United States Patent Application Publication US 2011/0177960 A1 - sequence listing, part 9

SEQ ID NO: 128756 - DNA, 25 bp, Artificial
  probe
  misc_feature (1)..(25): SEQ ID NO: 5253; WAN024CQ9_at; Start 201; Stop 225
ccaagtactggtgactcttgattaa

SEQ ID NO: 128757 - DNA, 25 bp, Artificial
  probe
  misc_feature (1)..(25): SEQ ID NO: 5253; WAN024CQ9_at; Start 153; Stop 177
tcaaggcttctaccgcagcatgttg

SEQ ID NO: 128758 - DNA, 25 bp, Artificial
  probe
  misc_feature (1)..(25): SEQ ID NO: 5253; WAN024CQ9_at; Start 24; Stop 48
tagcaaaaatatagaaggcaccgtc

SEQ ID NO: 128759 - DNA, 25 bp, Artificial
  probe
  misc_feature (1)..(25): SEQ ID NO: 5253; WAN024CQ9_at; Start 123; Stop 147
tcatgggctccgcatcgtttttacc

SEQ ID NO: 128760 - DNA, 25 bp, Artificial
  probe
  misc_feature (1)..(25): SEQ ID NO: 5253; WAN024CQ9_at; Start 161; Stop 185
tctaccgcagcatgttgcgccatgg

SEQ ID NO: 128761 - DNA, 25 bp, Artificial
  probe
  misc_feature (1)..(25): SEQ ID NO: 5253; WAN024CQ9_at; Start 178; Stop 202
cgccatggtatttgcggcagtgacc

SEQ ID NO: 128762 - DNA, 25 bp, Artificial
  probe
  misc_feature (1)..(25): SEQ ID NO: 5253; WAN024CQ9_at; Start 66; Stop 90
aaccaagagcagtcattttttcgat

SEQ ID NO: 128763 - DNA, 25 bp, Artificial
  probe
  misc_feature (1)..(25): SEQ ID NO: 5253; WAN024CQ9_at; Start 40; Stop 64
ggcaccgtctggtttgataatctca

SEQ ID NO: 128764 - DNA, 25 bp, Artificial
  probe
  misc_feature (1)..(25): SEQ ID NO: 5253; WAN024CQ9_at; Start 191; Stop 215
gcggcagtgaccaagtactggtgac

SEQ ID NO: 128765 - DNA, 25 bp, Artificial
  probe
  misc_feature (1)..(25): SEQ ID NO: 5253; WAN024CQ9_at; Start 134; Stop 158
gcatcgtttttaccagccgtcaagg

SEQ ID NO: 128766 - DNA, 25 bp, Artificial
  probe
  misc_feature (1)..(25): SEQ ID NO: 5253; WAN024CQ9_at; Start 150; Stop 174
ccgtcaaggcttctaccgcagcatg

SEQ ID NO: 128767 - DNA, 25 bp, Artificial
  probe
  misc_feature (1)..(25): SEQ ID NO: 5253; WAN024CQ9_at; Start 186; Stop 210
tatttgcggcagtgaccaagtactg

SEQ ID NO: 128768 - DNA, 25 bp, Artificial
  probe
  misc_feature (1)..(25): SEQ ID NO: 5253; WAN024CQ9_at; Start 113; Stop 137
tattccttcttcatgggctccgcat

SEQ ID NO: 128769 - DNA, 25 bp, Artificial
  probe
  misc_feature (1)..(25): SEQ ID NO: 5439; WAN024CQA_at; Start 286; Stop 310
gcaaccacgtctgtttctagcatgg

SEQ ID NO: 128770 - DNA, 25 bp, Artificial
  probe
  misc_feature (1)..(25): SEQ ID NO: 5439; WAN024CQA_at; Start 345; Stop 369
ggcatcgcttgagccatgagtcttg

SEQ ID NO: 128771 - DNA, 25 bp, Artificial
  probe
  misc_feature (1)..(25): SEQ ID NO: 5439; WAN024CQA_at; Start 301; Stop 325
tctagcatggtacggatctgacgaa

SEQ ID NO: 128772 - DNA, 25 bp, Artificial
  probe
  misc_feature (1)..(25): SEQ ID NO: 5439; WAN024CQA_at; Start 147; Stop 171
ccaaatcgtctttcagactcaagga

SEQ ID NO: 128773 - DNA, 25 bp, Artificial
  probe
  misc_feature (1)..(25): SEQ ID NO: 5439; WAN024CQA_at; Start 86; Stop 110
tcgatactaaattcatcttccagag

SEQ ID NO: 128774 - DNA, 25 bp, Artificial
  probe
  misc_feature (1)..(25): SEQ ID NO: 5439; WAN024CQA_at; Start 4; Stop 28
gaactccgattgctattttccttga

SEQ ID NO: 128775 - DNA, 25 bp, Artificial
  probe
  misc_feature (1)..(25): SEQ ID NO: 5439; WAN024CQA_at; Start 262; Stop 286
cctgaaaattcacgcgcagtctggg

SEQ ID NO: 128776 - DNA, 25 bp, Artificial
  probe
  misc_feature (1)..(25): SEQ ID NO: 5439; WAN024CQA_at; Start 228; Stop 252
caaaaatttctttttctgtcatctc

SEQ ID NO: 128777 - DNA, 25 bp, Artificial
  probe
  misc_feature (1)..(25): SEQ ID NO: 5439; WAN024CQA_at; Start 319; Stop 343
tgacgaatcgtactataaacagcct

SEQ ID NO: 128778 - DNA, 25 bp, Artificial
  probe
  misc_feature (1)..(25): SEQ ID NO: 5439; WAN024CQA_at; Start 101; Stop 125
tcttccagagtcaagataaactcca

SEQ ID NO: 128779 - DNA, 25 bp, Artificial
  probe
  misc_feature (1)..(25): SEQ ID NO: 5439; WAN024CQA_at; Start 306; Stop 330
catggtacggatctgacgaatcgta

SEQ ID NO: 128780 - DNA, 25 bp, Artificial
  probe
  misc_feature (1)..(25): SEQ ID NO: 5439; WAN024CQA_at; Start 36; Stop 60
taaccacatctcctacgttttggag

SEQ ID NO: 128781 - DNA, 25 bp, Artificial
  probe
  misc_feature (1)..(25): SEQ ID NO: 5439; WAN024CQA_at; Start 22; Stop 46
tccttgaatgattttaaccacatct

SEQ ID NO: 128782 - DNA, 25 bp, Artificial
  probe
  misc_feature (1)..(25): SEQ ID NO: 5439; WAN024CQA_at; Start 194; Stop 218
ccctgtcgctcttggataatggtca

SEQ ID NO: 128783 - DNA, 25 bp, Artificial
  probe
  misc_feature (1)..(25): SEQ ID NO: 5439; WAN024CQA_at; Start 256; Stop 280
tattctcctgaaaattcacgcgcag

SEQ ID NO: 128784 - DNA, 25 bp, Artificial
  probe
  misc_feature (1)..(25): SEQ ID NO: 5439; WAN024CQA_at; Start 204; Stop 228
cttggataatggtcacaatacggtc

SEQ ID NO: 128785 - DNA, 25 bp, Artificial
  probe
  misc_feature (1)..(25): SEQ ID NO: 5439; WAN024CQA_at; Start 336; Stop 360
aacagccttggcatcgcttgagcca

SEQ ID NO: 128786 - DNA, 25 bp, Artificial
  probe
  misc_feature (1)..(25): SEQ ID NO: 5439; WAN024CQA_at; Start 170; Stop 194
gattctgtcacgacaaagtcctctc

SEQ ID NO: 128787 - DNA, 25 bp, Artificial
  probe
  misc_feature (1)..(25): SEQ ID NO: 5439; WAN024CQA_at; Start 44; Stop 68
tctcctacgttttggagttggtcaa

SEQ ID NO: 128788 - DNA, 25 bp, Artificial
  probe
  misc_feature (1)..(25): SEQ ID NO: 5439; WAN024CQA_at; Start 185; Stop 209
aagtcctctccctgtcgctcttgga

SEQ ID NO: 128789 - DNA, 25 bp, Artificial
  probe
  misc_feature (1)..(25): SEQ ID NO: 5439; WAN024CQA_at; Start 64; Stop 88
gtcaatttcttcatcgctgatttcg

SEQ ID NO: 128790 - DNA, 25 bp, Artificial
  probe
  misc_feature (1)..(25): SEQ ID NO: 5439; WAN024CQA_at; Start 267; Stop 291
aaattcacgcgcagtctgggcaacc

SEQ ID NO: 128791 - DNA, 25 bp, Artificial
  probe
  misc_feature (1)..(25): SEQ ID NO: 5439; WAN024CQA_at; Start 295; Stop 319
tctgtttctagcatggtacggatct

SEQ ID NO: 128792 - DNA, 25 bp, Artificial
  probe
  misc_feature (1)..(25): SEQ ID NO: 5439; WAN024CQA_at; Start 244; Stop 268
tgtcatctcttttattctcctgaaa

SEQ ID NO: 128793 - DNA, 25 bp, Artificial
  probe
  misc_feature (1)..(25): SEQ ID NO: 5439; WAN024CQA_at; Start 162; Stop 186
gactcaaggattctgtcacgacaaa

SEQ ID NO: 128794 - DNA, 25 bp, Artificial
  probe
  misc_feature (1)..(25): SEQ ID NO: 5439; WAN024CQA_at; Start 210; Stop 234
taatggtcacaatacggtcaaaaat

SEQ ID NO: 128795 - DNA, 25 bp, Artificial
  probe
  misc_feature (1)..(25): SEQ ID NO: 5439; WAN024CQA_at; Start 327; Stop 351
cgtactataaacagccttggcatcg

SEQ ID NO: 128796 - DNA, 25 bp, Artificial
  probe
  misc_feature (1)..(25): SEQ ID NO: 5439; WAN024CQA_at; Start 8; Stop 32
tccgattgctattttccttgaatga

SEQ ID NO: 128797 - DNA, 25 bp, Artificial
  probe
  misc_feature (1)..(25): SEQ ID NO: 5439; WAN024CQA_at; Start 276; Stop 300
cgcagtctgggcaaccacgtctgtt

SEQ ID NO: 128798 - DNA, 25 bp, Artificial
  probe
  misc_feature (1)..(25): SEQ ID NO: 5439; WAN024CQA_at; Start 75; Stop 99
catcgctgatttcgatactaaattc

SEQ ID NO: 128799 - DNA, 25 bp, Artificial
  probe
  misc_feature (1)..(25): SEQ ID NO: 5439; WAN024CQA_at; Start 58; Stop 82
gagttggtcaatttcttcatcgctg

SEQ ID NO: 128800 - DNA, 25 bp, Artificial
  probe
  misc_feature (1)..(25): SEQ ID NO: 5439; WAN024CQA_at; Start 138; Stop 162
aatccgcatccaaatcgtctttcag

SEQ ID NO: 128801 - DNA, 25 bp, Artificial
  probe
  misc_feature (1)..(25): SEQ ID NO: 5439; WAN024CQA_at; Start 115; Stop 139
gataaactccatcaagtcaacagaa

SEQ ID NO: 128802 - DNA, 25 bp, Artificial
  probe
  misc_feature (1)..(25): SEQ ID NO: 5439; WAN024CQA_at; Start 126; Stop 150
tcaagtcaacagaatccgcatccaa

SEQ ID NO: 128803 - DNA, 25 bp, Artificial
  probe
  misc_feature (1)..(25): SEQ ID NO: 5418; WAN024CQB_at; Start 664; Stop 688
tactcctcaagtcgtttcatggctt

SEQ ID NO: 128804 - DNA, 25 bp, Artificial
  probe
  misc_feature (1)..(25): SEQ ID NO: 5418; WAN024CQB_at; Start 353; Stop 377
tctgcaagagctgccacataggtcg

SEQ ID NO: 128805 - DNA, 25 bp, Artificial
  probe
  misc_feature (1)..(25): SEQ ID NO: 5418; WAN024CQB_at; Start 364; Stop 388
tgccacataggtcgcataggccatg

SEQ ID NO: 128806 - DNA, 25 bp, Artificial
  probe
  misc_feature (1)..(25): SEQ ID NO: 5418; WAN024CQB_at; Start 521; Stop 545
gactgaccagcgtgtttgacaaaaa

SEQ ID NO: 128807 - DNA, 25 bp, Artificial
  probe
  misc_feature (1)..(25): SEQ ID NO: 5418; WAN024CQB_at; Start 304; Stop 328
caaaaaagcaaacaagggagcatcc

SEQ ID NO: 128808 - DNA, 25 bp, Artificial
  probe
  misc_feature (1)..(25): SEQ ID NO: 5418; WAN024CQB_at; Start 451; Stop 475
gagtccgtcatcattgattcgcaag

SEQ ID NO: 128809 - DNA, 25 bp, Artificial
  probe
  misc_feature (1)..(25): SEQ ID NO: 5418; WAN024CQB_at; Start 622; Stop 646
caagccttgactcgtgatagactga

SEQ ID NO: 128810 - DNA, 25 bp, Artificial
  probe
  misc_feature (1)..(25): SEQ ID NO: 5418; WAN024CQB_at; Start 504; Stop 528
taacaggcgccagcttagactgacc

SEQ ID NO: 128811 - DNA, 25 bp, Artificial
  probe
  misc_feature (1)..(25): SEQ ID NO: 5418; WAN024CQB_at; Start 54; Stop 78
cttgaaattgattgagcagataggg

SEQ ID NO: 128812 - DNA, 25 bp, Artificial
  probe
  misc_feature (1)..(25): SEQ ID NO: 5418; WAN024CQB_at; Start 272; Stop 296
aagcctgcttccatcaactccaaag

SEQ ID NO: 128813 - DNA, 25 bp, Artificial
  probe
  misc_feature (1)..(25): SEQ ID NO: 5418; WAN024CQB_at; Start 390; Stop 414
caaagaggtcactattaatcttggg

SEQ ID NO: 128814 - DNA, 25 bp, Artificial
  probe
  misc_feature (1)..(25): SEQ ID NO: 5418; WAN024CQB_at; Start 111; Stop 135
cctcatgataatgctctggacagag

SEQ ID NO: 128815 - DNA, 25 bp, Artificial
  probe
  misc_feature (1)..(25): SEQ ID NO: 5418; WAN024CQB_at; Start 606; Stop 630
tgcgattgtaaagcaccaagccttg

SEQ ID NO: 128816 - DNA, 25 bp, Artificial
  probe
  misc_feature (1)..(25): SEQ ID NO: 5418; WAN024CQB_at; Start 28; Stop 52
ggtctccaaagtctcaaaatcaata

SEQ ID NO: 128817 - DNA, 25 bp, Artificial
  probe
  misc_feature (1)..(25): SEQ ID NO: 5418; WAN024CQB_at; Start 637; Stop 661
gatagactgaatcatgcttctctca

SEQ ID NO: 128818 - DNA, 25 bp, Artificial
  probe
  misc_feature (1)..(25): SEQ ID NO: 5418; WAN024CQB_at; Start 2; Stop 26
tgcttgattccaggcttgagcgaaa

SEQ ID NO: 128819 - DNA, 25 bp, Artificial
  probe
  misc_feature (1)..(25): SEQ ID NO: 5418; WAN024CQB_at; Start 321; Stop 345
gagcatcctgctgattgtcctgcaa

SEQ ID NO: 128820 - DNA, 25 bp, Artificial
  probe
  misc_feature (1)..(25): SEQ ID NO: 5418; WAN024CQB_at; Start 336; Stop 360
tgtcctgcaaactagcatctgcaag

SEQ ID NO: 128821 - DNA, 25 bp, Artificial
  probe
  misc_feature (1)..(25): SEQ ID NO: 5418; WAN024CQB_at; Start 489; Stop 513
gcaccaagggctgaataacaggcgc

SEQ ID NO: 128822 - DNA, 25 bp, Artificial
  probe
  misc_feature (1)..(25): SEQ ID NO: 5418; WAN024CQB_at; Start 375; Stop 399
tcgcataggccatgacaaagaggtc

SEQ ID NO: 128823 - DNA, 25 bp, Artificial
  probe
  misc_feature (1)..(25): SEQ ID NO: 5418; WAN024CQB_at; Start 160; Stop 184
gtcaaaagcctgaccaacccgatgg

SEQ ID NO: 128824 - DNA, 25 bp, Artificial
  probe
  misc_feature (1)..(25): SEQ ID NO: 5418; WAN024CQB_at; Start 201; Stop 225
taaaattgaggctgattccaaatcg

SEQ ID NO: 128825 - DNA, 25 bp, Artificial
  probe
  misc_feature (1)..(25): SEQ ID NO: 5418; WAN024CQB_at; Start 585; Stop 609
gcttgtcatcctcacgaaaattgcg

SEQ ID NO: 128826 - DNA, 25 bp, Artificial
  probe
  misc_feature (1)..(25): SEQ ID NO: 5418; WAN024CQB_at; Start 421; Stop 445
catgacctcatgatagtcttcgatg

SEQ ID NO: 128827 - DNA, 25 bp, Artificial
  probe
  misc_feature (1)..(25): SEQ ID NO: 5418; WAN024CQB_at; Start 177; Stop 201
cccgatggcagaagacacactcatt

SEQ ID NO: 128828 - DNA, 25 bp, Artificial
  probe
  misc_feature (1)..(25): SEQ ID NO: 5418; WAN024CQB_at; Start 12; Stop 36
caggcttgagcgaaatggtctccaa

SEQ ID NO: 128829 - DNA, 25 bp, Artificial
  probe
  misc_feature (1)..(25): SEQ ID NO: 5418; WAN024CQB_at; Start 466; Stop 490
gattcgcaagagaaatcgtgccagc

SEQ ID NO: 128830 - DNA, 25 bp, Artificial
  probe
  misc_feature (1)..(25): SEQ ID NO: 5418; WAN024CQB_at; Start 405; Stop 429
taatcttgggaaaagtcatgacctc

SEQ ID NO: 128831 - DNA, 25 bp, Artificial
  probe
  misc_feature (1)..(25): SEQ ID NO: 5418; WAN024CQB_at; Start 555; Stop 579
tgccaacctgctctgtaaaaatttt

SEQ ID NO: 128832 - DNA, 25 bp, Artificial
  probe
  misc_feature (1)..(25): SEQ ID NO: 5418; WAN024CQB_at; Start 253; Stop 277
ggtcaaaacctgataatccaagcct

SEQ ID NO: 128833 - DNA, 25 bp, Artificial
  probe
  misc_feature (1)..(25): SEQ ID NO: 5418; WAN024CQB_at; Start 693; Stop 717
gatagtctccatgctggctgcataa

SEQ ID NO: 128834 - DNA, 25 bp, Artificial
  probe
  misc_feature (1)..(25): SEQ ID NO: 5418; WAN024CQB_at; Start 684; Stop 708
ggcttctttgatagtctccatgctg

SEQ ID NO: 128835 - DNA, 25 bp, Artificial
  probe
  misc_feature (1)..(25): SEQ ID NO: 5418; WAN024CQB_at; Start 436; Stop 460
gtcttcgatgtaactgagtccgtca

SEQ ID NO: 128836 - DNA, 25 bp, Artificial
  probe
  misc_feature (1)..(25): SEQ ID NO: 5418; WAN024CQB_at; Start 477; Stop 501
gaaatcgtgccagcaccaagggctg

SEQ ID NO: 128837 - DNA, 25 bp, Artificial
  probe
  misc_feature (1)..(25): SEQ ID NO: 1817; WAN024CQC_at; Start 649; Stop 673
caagagctacgccaatttatggatc

SEQ ID NO: 128838 - DNA, 25 bp, Artificial
  probe
  misc_feature (1)..(25): SEQ ID NO: 1817; WAN024CQC_at; Start 192; Stop 216
tgacggactcagttacatcgaagac

SEQ ID NO: 128839 - DNA, 25 bp, Artificial
  probe
  misc_feature (1)..(25): SEQ ID NO: 1817; WAN024CQC_at; Start 339; Stop 363
tgcttttttgcaaaagactttggag

SEQ ID NO: 128840 - DNA, 25 bp, Artificial
  probe
  misc_feature (1)..(25): SEQ ID NO: 1817; WAN024CQC_at; Start 450; Stop 474
taatgagtgtgtcttctgccatcgg

SEQ ID NO: 128841 - DNA, 25 bp, Artificial
  probe
  misc_feature (1)..(25): SEQ ID NO: 1817; WAN024CQC_at; Start 718; Stop 742
tttattgattccctagcagactggg

SEQ ID NO: 128842 - DNA, 25 bp, Artificial
  probe
  misc_feature (1)..(25): SEQ ID NO: 1817; WAN024CQC_at; Start 246; Stop 270
taatagtgacctctttgtcatggcc

SEQ ID NO: 128843 - DNA, 25 bp, Artificial
  probe
  misc_feature (1)..(25): SEQ ID NO: 1817; WAN024CQC_at; Start 355; Stop 379
actttggagttgatggaagcaggct

SEQ ID NO: 128844 - DNA, 25 bp, Artificial
  probe
  misc_feature (1)..(25): SEQ ID NO: 1817; WAN024CQC_at; Start 147; Stop 171
tattcagcccttggtgctggcacga

SEQ ID NO: 128845 - DNA, 25 bp, Artificial
  probe
  misc_feature (1)..(25): SEQ ID NO: 1817; WAN024CQC_at; Start 180; Stop 204
gcgaatcaatgatgacggactcagt

SEQ ID NO: 128846 - DNA, 25 bp, Artificial
  probe
  misc_feature (1)..(25): SEQ ID NO: 1817; WAN024CQC_at; Start 518; Stop 542
tctgtccagagcattatcatgagga

SEQ ID NO: 128847 - DNA, 25 bp, Artificial
  probe
  misc_feature (1)..(25): SEQ ID NO: 1817; WAN024CQC_at; Start 132; Stop 156
taagctggcgcctgttattcagccc

SEQ ID NO: 128848 - DNA, 25 bp, Artificial
  probe
  misc_feature (1)..(25): SEQ ID NO: 1817; WAN024CQC_at; Start 574; Stop 598
ccctatctgctcaatcaatttcaag

SEQ ID NO: 128849 - DNA, 25 bp, Artificial
  probe
  misc_feature (1)..(25): SEQ ID NO: 1817; WAN024CQC_at; Start 679; Stop 703
tatgaagagtacgttgggattcacc

SEQ ID NO: 128850 - DNA, 25 bp, Artificial
  probe
  misc_feature (1)..(25): SEQ ID NO: 1817; WAN024CQC_at; Start 261; Stop 285
tgtcatggcctatgcgacctatgtg

SEQ ID NO: 128851 - DNA, 25 bp, Artificial
  probe
  misc_feature (1)..(25): SEQ ID NO: 1817; WAN024CQC_at; Start 220; Stop 244
catgaggtcatgacttttcccaaga

SEQ ID NO: 128852 - DNA, 25 bp, Artificial
  probe
  misc_feature (1)..(25): SEQ ID NO: 1817; WAN024CQC_at; Start 306; Stop 330
tttgcaggacaatcagcaggatgct

SEQ ID NO: 128853 - DNA, 25 bp, Artificial
  probe
  misc_feature (1)..(25): SEQ ID NO: 1817; WAN024CQC_at; Start 468; Stop 492
ccatcgggttggtcaggcttttgac

SEQ ID NO: 128854 - DNA, 25 bp, Artificial
  probe
  misc_feature (1)..(25): SEQ ID NO: 1817; WAN024CQC_at; Start 73; Stop 97
aaaatttttacagagcaggttggca

SEQ ID NO: 128855 - DNA, 25 bp, Artificial
  probe
  misc_feature (1)..(25): SEQ ID NO: 1817; WAN024CQC_at; Start 105; Stop 129
gttttttgtcaaacacgctggtcag

SEQ ID NO: 128856 - DNA, 25 bp, Artificial
  probe
  misc_feature (1)..(25): SEQ ID NO: 1817; WAN024CQC_at; Start 22; Stop 46
caaggcttggtgctttacaatcgca

SEQ ID NO: 128857 - DNA, 25 bp, Artificial
  probe
  misc_feature (1)..(25): SEQ ID NO: 1817; WAN024CQC_at; Start 234; Stop 258
ttttcccaagattaatagtgacctc

SEQ ID NO: 128858 - DNA, 25 bp, Artificial
  probe
  misc_feature (1)..(25): SEQ ID NO: 1817; WAN024CQC_at; Start 291; Stop 315
tcttgcagatgctagtttgcaggac

SEQ ID NO: 128859 - DNA, 25 bp, Artificial
  probe
  misc_feature (1)..(25): SEQ ID NO: 1817; WAN024CQC_at; Start 632; Stop 656
tcaagcctggaatcaagcaagagct

SEQ ID NO: 128860 - DNA, 25 bp, Artificial
  probe
  misc_feature (1)..(25): SEQ ID NO: 1817; WAN024CQC_at; Start 423; Stop 447
gactcgatttggaatcagcctcaat

SEQ ID NO: 128861 - DNA, 25 bp, Artificial
  probe
  misc_feature (1)..(25): SEQ ID NO: 1817; WAN024CQC_at; Start 374; Stop 398
caggcttggattatcaggttttgac

SEQ ID NO: 128862 - DNA, 25 bp, Artificial
  probe
  misc_feature (1)..(25): SEQ ID NO: 1817; WAN024CQC_at; Start 617; Stop 641
tggagaccatttcgctcaagcctgg

SEQ ID NO: 128863 - DNA, 25 bp, Artificial
  probe
  misc_feature (1)..(25): SEQ ID NO: 1817; WAN024CQC_at; Start 7; Stop 31
cagtctatcacgagtcaaggcttgg

SEQ ID NO: 128864 - DNA, 25 bp, Artificial
  probe
  misc_feature (1)..(25): SEQ ID NO: 1817; WAN024CQC_at; Start 318; Stop 342
tcagcaggatgctcccttgtttgct

SEQ ID NO: 128865 - DNA, 25 bp, Artificial
  probe
  misc_feature (1)..(25): SEQ ID NO: 1817; WAN024CQC_at; Start 207; Stop 231
catcgaagactatcatgaggtcatg

SEQ ID NO: 128866 - DNA, 25 bp, Artificial
  probe
  misc_feature (1)..(25): SEQ ID NO: 1817; WAN024CQC_at; Start 118; Stop 142
cacgctggtcagtctaagctggcgc

SEQ ID NO: 128867 - DNA, 25 bp, Artificial
  probe
  misc_feature (1)..(25): SEQ ID NO: 1817; WAN024CQC_at; Start 276; Stop 300
gacctatgtggcagctcttgcagat

SEQ ID NO: 128868 - DNA, 25 bp, Artificial
  probe
  misc_feature (1)..(25): SEQ ID NO: 1817; WAN024CQC_at; Start 693; Stop 717
tgggattcacctaaaatcaaagaaa

SEQ ID NO: 128869 - DNA, 25 bp, Artificial
  probe
  misc_feature (1)..(25): SEQ ID NO: 1817; WAN024CQC_at; Start 39; Stop 63
caatcgcaattttcgtgaggatgac

SEQ ID NO: 128870 - DNA, 25 bp, Artificial
  probe
  misc_feature (1)..(25): SEQ ID NO: 1817; WAN024CQC_at; Start 600; Stop 624
tattgattttgagactttggagacc

SEQ ID NO: 128871 - DNA, 25 bp, Artificial
  probe
  misc_feature (1)..(25): SEQ ID NO: 2267; WAN024CQD_at; Start 370; Stop 394
gcttatccaggctatgaaccgattg

SEQ ID NO: 128872 - DNA, 25 bp, Artificial
  probe
  misc_feature (1)..(25): SEQ ID NO: 2267; WAN024CQD_at; Start 501; Stop 525
caaggcggttattctcaactatcca

SEQ ID NO: 128873 - DNA, 25 bp, Artificial
  probe
  misc_feature (1)..(25): SEQ ID NO: 2267; WAN024CQD_at; Start 552; Stop 576
tcgagagcagttagaggccttggca

SEQ ID NO: 128874 - DNA, 25 bp, Artificial
  probe
  misc_feature (1)..(25): SEQ ID NO: 2267; WAN024CQD_at; Start 966; Stop 990
tatttttgctaaaattccagcgggc

SEQ ID NO: 128875 - DNA, 25 bp, Artificial
  probe
  misc_feature (1)..(25): SEQ ID NO: 2267; WAN024CQD_at; Start 248; Stop 272
agtaccaactggactatgctcctga

SEQ ID NO: 128876 - DNA, 25 bp, Artificial
  probe
  misc_feature (1)..(25): SEQ ID NO: 2267; WAN024CQD_at; Start 862; Stop 886
gatgcggagcccatgaagaaggaat

SEQ ID NO: 128877 - DNA, 25 bp, Artificial
  probe
  misc_feature (1)..(25): SEQ ID NO: 2267; WAN024CQD_at; Start 346; Stop 370
gacaaggtacttttgccagctcctg

SEQ ID NO: 128878 - DNA, 25 bp, Artificial
  probe
  misc_feature (1)..(25): SEQ ID NO: 2267; WAN024CQD_at; Start 700; Stop 724
ggtttgtctaaatcgcatgccatga

SEQ ID NO: 128879 - DNA, 25 bp, Artificial
  probe
  misc_feature (1)..(25): SEQ ID NO: 2267; WAN024CQD_at; Start 1125; Stop 1149
caaagaagccatgaaacgacttgag

SEQ ID NO: 128880 - DNA, 25 bp, Artificial
  probe
  misc_feature (1)..(25): SEQ ID NO: 2267; WAN024CQD_at; Start 456; Stop 480
tcctgagatgttggagaaggccatt

SEQ ID NO: 128881 - DNA, 25 bp, Artificial
  probe
  misc_feature (1)..(25): SEQ ID NO: 2267; WAN024CQD_at; Start 262; Stop 286
tatgctcctgaaaatgaaatcttgg

SEQ ID NO: 128882 - DNA, 25 bp, Artificial
  probe
  misc_feature (1)..(25): SEQ ID NO: 2267; WAN024CQD_at; Start 664; Stop 688
ggaacgatgttgagagaccaggcta

SEQ ID NO: 128883 - DNA, 25 bp, Artificial
  probe
  misc_feature (1)..(25): SEQ ID NO: 2267; WAN024CQD_at; Start 536; Stop 560
caggaattacctacagtcgagagca

SEQ ID NO: 128884 - DNA, 25 bp, Artificial
  probe
  misc_feature (1)..(25): SEQ ID NO: 2267; WAN024CQD_at; Start 307; Stop 331
gctttatctgcgactttgacggcta

SEQ ID NO: 128885 - DNA, 25 bp, Artificial
  probe
  misc_feature (1)..(25): SEQ ID NO: 2267; WAN024CQD_at; Start 826; Stop 850
catgctgcggtagaagccttgacgg

SEQ ID NO: 128886 - DNA, 25 bp, Artificial
  probe
  misc_feature (1)..(25): SEQ ID NO: 2267; WAN024CQD_at; Start 1049; Stop 1073
ttatccctggtgcagcctttggacg

SEQ ID NO: 128887 - DNA, 25 bp, Artificial
  probe
  misc_feature (1)..(25): SEQ ID NO: 2267; WAN024CQD_at; Start 1090; Stop 1114
gtccgcctatcttatgcagccagca

SEQ ID NO: 128888 - DNA, 25 bp, Artificial
  probe
  misc_feature (1)..(25): SEQ ID NO: 2267; WAN024CQD_at; Start 1023; Stop 1047
ttttgctcagaagaaggccgttgcc

SEQ ID NO: 128889 - DNA, 25 bp, Artificial
  probe
  misc_feature (1)..(25): SEQ ID NO: 2267; WAN024CQD_at; Start 113; Stop 137
gggaacctgattttacaacgccaga

SEQ ID NO: 128890 - DNA, 25 bp, Artificial
  probe
  misc_feature (1)..(25): SEQ ID NO: 2267; WAN024CQD_at; Start 622; Stop 646
tactcagaattgacctacacaggcg

SEQ ID NO: 128891 - DNA, 25 bp, Artificial
  probe
  misc_feature (1)..(25): SEQ ID NO: 2267; WAN024CQD_at; Start 128; Stop 152
caacgccagaccatgtcaaggaggc

SEQ ID NO: 128892 - DNA, 25 bp, Artificial
  probe
  misc_feature (1)..(25): SEQ ID NO: 2267; WAN024CQD_at; Start 936; Stop 960
tgagattatcaaaccagacggtgcc

SEQ ID NO: 128893 - DNA, 25 bp, Artificial
  probe
  misc_feature (1)..(25): SEQ ID NO: 2267; WAN024CQD_at; Start 520; Stop 544
tatccagccaatccgacaggaatta

SEQ ID NO: 128894 - DNA, 25 bp, Artificial
  probe
  misc_feature (1)..(25): SEQ ID NO: 2267; WAN024CQD_at; Start 156; Stop 180
caagcgagcgattgatcagaaccaa

SEQ ID NO: 128895 - DNA, 25 bp, Artificial
  probe
  misc_feature (1)..(25): SEQ ID NO: 2267; WAN024CQD_at; Start 573; Stop 597
ggcagctgttttacgcaagtacgaa

SEQ ID NO: 128896 - DNA, 25 bp, Artificial
  probe
  misc_feature (1)..(25): SEQ ID NO: 2267; WAN024CQD_at; Start 1110; Stop 1134
cagcatggagactatcaaagaagcc

SEQ ID NO: 128897 - DNA, 25 bp, Artificial
  probe
  misc_feature (1)..(25): SEQ ID NO: 2267; WAN024CQD_at; Start 997; Stop 1021
caagactcctttgcttttctgaagg

SEQ ID NO: 128898 - DNA, 25 bp, Artificial
  probe
  misc_feature (1)..(25): SEQ ID NO: 2267; WAN024CQD_at; Start 646; Stop 670
gaagcccatgtgtctctaggaacga

SEQ ID NO: 128899 - DNA, 25 bp, Artificial
  probe
  misc_feature (1)..(25): SEQ ID NO: 2267; WAN024CQD_at; Start 909; Stop 933
catcgaaaaaatgactgctcttggt

SEQ ID NO: 128900 - DNA, 25 bp, Artificial
  probe
  misc_feature (1)..(25): SEQ ID NO: 2267; WAN024CQD_at; Start 798; Stop 822
ggtcactgccgcaaataccatggcg

SEQ ID NO: 128901 - DNA, 25 bp, Artificial
  probe
  misc_feature (1)..(25): SEQ ID NO: 2267; WAN024CQD_at; Start 980; Stop 1004
ttccagcgggctacaatcaagactc

SEQ ID NO: 128902 - DNA, 25 bp, Artificial
  probe
  misc_feature (1)..(25): SEQ ID NO: 2267; WAN024CQD_at; Start 811; Stop 835
aataccatggcgcaacatgctgcgg

SEQ ID NO: 128903 - DNA, 25 bp, Artificial
  probe
  misc_feature (1)..(25): SEQ ID NO: 2267; WAN024CQD_at; Start 184; Stop 208
tactatacagggatgagtggtctgc

SEQ ID NO: 128904 - DNA, 25 bp, Artificial
  probe
  misc_feature (1)..(25): SEQ ID NO: 2267; WAN024CQD_at; Start 476; Stop 500
ccattttggagcagggtgataagct

SEQ ID NO: 128905 - DNA, 25 bp, Artificial
  probe
  misc_feature (1)..(25): SEQ ID NO: 1660; WAN024CQE_at; Start 209; Stop 233
tggttaaaatcattcaaggaaaata

SEQ ID NO: 128906 - DNA, 25 bp, Artificial
  probe
  misc_feature (1)..(25): SEQ ID NO: 1660; WAN024CQE_at; Start 151; Stop 175
gaatttagtatcgaaatcagcgatg

SEQ ID NO: 128907 - DNA, 25 bp, Artificial
  probe
  misc_feature (1)..(25): SEQ ID NO: 1660; WAN024CQE_at; Start 28; Stop 52
attgtgaccattatccaagagcgac

SEQ ID NO: 128908 - DNA, 25 bp, Artificial
  probe
  misc_feature (1)..(25): SEQ ID NO: 1660; WAN024CQE_at; Start 33; Stop 57
gaccattatccaagagcgacaggga

SEQ ID NO: 128909 - DNA, 25 bp, Artificial
  probe
  misc_feature (1)..(25): SEQ ID NO: 1660; WAN024CQE_at; Start 26; Stop 50
gtattgtgaccattatccaagagcg

SEQ ID NO: 128910 - DNA, 25 bp, Artificial
  probe
  misc_feature (1)..(25): SEQ ID NO: 1660; WAN024CQE_at; Start 58; Stop 82
gaggactttgtcgtgacagaatcct

SEQ ID NO: 128911 - DNA, 25 bp, Artificial
  probe
  misc_feature (1)..(25): SEQ ID NO: 1660; WAN024CQE_at; Start 30; Stop 54
tgtgaccattatccaagagcgacag

SEQ ID NO: 128912 - DNA, 25 bp, Artificial
  probe
  misc_feature (1)..(25): SEQ ID NO: 1660; WAN024CQE_at; Start 34; Stop 58
accattatccaagagcgacagggag

SEQ ID NO: 128913 - DNA, 25 bp, Artificial
  probe
  misc_feature (1)..(25): SEQ ID NO: 1660; WAN024CQE_at; Start 68; Stop 92
tcgtgacagaatccttgagtctgaa

SEQ ID NO: 128914 - DNA, 25 bp, Artificial
  probe
  misc_feature (1)..(25): SEQ ID NO: 1660; WAN024CQE_at; Start 199; Stop 223
gtaggagatgtggttaaaatcattc

SEQ ID NO: 128915 - DNA, 25 bp, Artificial
  probe
  misc_feature (1)..(25): SEQ ID NO: 1660; WAN024CQE_at; Start 69; Stop 93
cgtgacagaatccttgagtctgaaa

SEQ ID NO: 128916 - DNA, 25 bp, Artificial
  probe
  misc_feature (1)..(25): SEQ ID NO: 1660; WAN024CQE_at; Start 27; Stop 51
tattgtgaccattatccaagagcga

SEQ ID NO: 128917 - DNA, 25 bp, Artificial
  probe
  misc_feature (1)..(25): SEQ ID NO: 1660; WAN024CQE_at; Start 42; Stop 66
ccaagagcgacagggagaggacttt

SEQ ID NO: 128918 - DNA, 25 bp, Artificial
  probe
  misc_feature (1)..(25): SEQ ID NO: 1660; WAN024CQE_at; Start 71; Stop 95
tgacagaatccttgagtctgaaaga

SEQ ID NO: 128919 - DNA, 25 bp, Artificial
  probe
  misc_feature (1)..(25): SEQ ID NO: 1660; WAN024CQE_at; Start 64; Stop 88
tttgtcgtgacagaatccttgagtc

SEQ ID NO: 128920 - DNA, 25 bp, Artificial
  probe
  misc_feature (1)..(25): SEQ ID NO: 1660; WAN024CQE_at; Start 41; Stop 65
tccaagagcgacagggagaggactt

SEQ ID NO: 128921 - DNA, 25 bp, Artificial
  probe
  misc_feature (1)..(25): SEQ ID NO: 1660; WAN024CQE_at; Start 31; Stop 55
gtgaccattatccaagagcgacagg

SEQ ID NO: 128922 - DNA, 25 bp, Artificial
  probe
  misc_feature (1)..(25): SEQ ID NO: 1660; WAN024CQE_at; Start 152; Stop 176
aatttagtatcgaaatcagcgatga

SEQ ID NO: 128923 - DNA, 25 bp, Artificial
  probe
  misc_feature (1)..(25): SEQ ID NO: 1660; WAN024CQE_at; Start 63; Stop 87
ctttgtcgtgacagaatccttgagt

SEQ ID NO: 128924 - DNA, 25 bp, Artificial
  probe
  misc_feature (1)..(25): SEQ ID NO: 1660; WAN024CQE_at; Start 207; Stop 231
tgtggttaaaatcattcaaggaaaa

SEQ ID NO: 128925 - DNA, 25 bp, Artificial
  probe
  misc_feature (1)..(25): SEQ ID NO: 1660; WAN024CQE_at; Start 74; Stop 98
cagaatccttgagtctgaaagacga

SEQ ID NO: 128926 - DNA, 25 bp, Artificial
  probe
  misc_feature (1)..(25): SEQ ID NO: 1660; WAN024CQE_at; Start 61; Stop 85
gactttgtcgtgacagaatccttga

SEQ ID NO: 128927 - DNA, 25 bp, Artificial
  probe
  misc_feature (1)..(25): SEQ ID NO: 1660; WAN024CQE_at; Start 36; Stop 60
cattatccaagagcgacagggagag

SEQ ID NO: 128928 - DNA, 25 bp, Artificial
  probe
  misc_feature (1)..(25): SEQ ID NO: 1660; WAN024CQE_at; Start 35; Stop 59
ccattatccaagagcgacagggaga

SEQ ID NO: 128929 - DNA, 25 bp, Artificial
  probe
  misc_feature (1)..(25): SEQ ID NO: 1660; WAN024CQE_at; Start 202; Stop 226
ggagatgtggttaaaatcattcaag

SEQ ID NO: 128930 - DNA, 25 bp, Artificial
  probe
  misc_feature (1)..(25): SEQ ID NO: 1660; WAN024CQE_at; Start 32; Stop 56
tgaccattatccaagagcgacaggg

SEQ ID NO: 128931 - DNA, 25 bp, Artificial
  probe
  misc_feature (1)..(25): SEQ ID NO: 1660; WAN024CQE_at; Start 29; Stop 53
ttgtgaccattatccaagagcgaca

SEQ ID NO: 128932 - DNA, 25 bp, Artificial
  probe
  misc_feature (1)..(25): SEQ ID NO: 1660; WAN024CQE_at; Start 205; Stop 229
gatgtggttaaaatcattcaaggaa

SEQ ID NO: 128933 - DNA, 25 bp, Artificial
  probe
  misc_feature (1)..(25): SEQ ID NO: 1660; WAN024CQE_at; Start 72; Stop 96
gacagaatccttgagtctgaaagac

SEQ ID NO: 128934 - DNA, 25 bp, Artificial
  probe
  misc_feature (1)..(25): SEQ ID NO: 1660; WAN024CQE_at; Start 38; Stop 62
ttatccaagagcgacagggagagga

SEQ ID NO: 128935 - DNA, 25 bp, Artificial
  probe
  misc_feature (1)..(25): SEQ ID NO: 1660; WAN024CQE_at; Start 148; Stop 172
gatgaatttagtatcgaaatcagcg

SEQ ID NO: 128936 - DNA, 25 bp, Artificial
  probe
  misc_feature (1)..(25): SEQ ID NO: 1660; WAN024CQE_at; Start 39; Stop 63
tatccaagagcgacagggagaggac

SEQ ID NO: 128937 - DNA, 25 bp, Artificial
  probe
  misc_feature (1)..(25): SEQ ID NO: 1660; WAN024CQE_at; Start 66; Stop 90
tgtcgtgacagaatccttgagtctg

SEQ ID NO: 128938 - DNA, 25 bp, Artificial
  probe
  misc_feature (1)..(25): SEQ ID NO: 1660; WAN024CQE_at; Start 56; Stop 80
gagaggactttgtcgtgacagaatc

SEQ ID NO: 128939 - DNA, 25 bp, Artificial
  probe
  misc_feature (1)..(25): SEQ ID NO: 3427; WAN024CQF_at; Start 732; Stop 756
catcgaagggacagctatgggaatc

SEQ ID NO: 128940 - DNA, 25 bp, Artificial
  probe
  misc_feature (1)..(25): SEQ ID NO: 3427; WAN024CQF_at; Start 589; Stop 613
ccgcttcgtaaggaaacttatgaat

SEQ ID NO: 128941 - DNA, 25 bp, Artificial
  probe
  misc_feature (1)..(25): SEQ ID NO: 3427; WAN024CQF_at; Start 221; Stop 245
cggatgatgaacctacgagagctat

SEQ ID NO: 128942 - DNA, 25 bp, Artificial
  probe
  misc_feature (1)..(25): SEQ ID NO: 3427; WAN024CQF_at; Start 794; Stop 818
ttcgagcgaaactaggtgccctcct

SEQ ID NO: 128943 - DNA, 25 bp, Artificial
  probe
  misc_feature (1)..(25): SEQ ID NO: 3427; WAN024CQF_at; Start 353; Stop 377
gattcttcatcgtgggtcgtatcaa

SEQ ID NO: 128944 - DNA, 25 bp, Artificial
  probe
  misc_feature (1)..(25): SEQ ID NO: 3427; WAN024CQF_at; Start 704; Stop 728
gtttcacgggaaacgctgtgctcaa

SEQ ID NO: 128945 - DNA, 25 bp, Artificial
  probe
  misc_feature (1)..(25): SEQ ID NO: 3427; WAN024CQF_at; Start 718; Stop 742
gctgtgctcaaatccatcgaaggga

SEQ ID NO: 128946 - DNA, 25 bp, Artificial
  probe
  misc_feature (1)..(25): SEQ ID NO: 3427; WAN024CQF_at; Start 278; Stop 302
cagccaaggctgtcaaagatggtga

SEQ ID NO: 128947 - DNA, 25 bp, Artificial
  probe
  misc_feature (1)..(25): SEQ ID NO: 3427; WAN024CQF_at; Start 806; Stop 830
taggtgccctccttctcaaggacag

SEQ ID NO: 128948 - DNA, 25 bp, Artificial
  probe
  misc_feature (1)..(25): SEQ ID NO: 3427; WAN024CQF_at; Start 166; Stop 190
tatctgacagcgacagagcgcgtca

SEQ ID NO: 128949 - DNA, 25 bp, Artificial
  probe
  misc_feature (1)..(25): SEQ ID NO: 3427; WAN024CQF_at; Start 35; Stop 59
aaaaaatcgcagtagatgccatggg

SEQ ID NO: 128950 - DNA, 25 bp, Artificial
  probe
  misc_feature (1)..(25): SEQ ID NO: 3427; WAN024CQF_at; Start 752; Stop 776
gaatcatgggcttgctcaagacagc

SEQ ID NO: 128951 - DNA, 25 bp, Artificial
  probe
  misc_feature (1)..(25): SEQ ID NO: 3427; WAN024CQF_at; Start 139; Stop 163
tacggagatgaagctaaaatcaagc

SEQ ID NO: 128952 - DNA, 25 bp, Artificial
  probe
  misc_feature (1)..(25): SEQ ID NO: 3427; WAN024CQF_at; Start 181; Stop 205
gagcgcgtcagcattatccatacgg

SEQ ID NO: 128953 - DNA, 25 bp, Artificial
  probe
  misc_feature (1)..(25): SEQ ID NO: 3427; WAN024CQF_at; Start 683; Stop 707
cagatgttgttgtggcagatggttt

SEQ ID NO: 128954 - DNA, 25 bp, Artificial
  probe
  misc_feature (1)..(25): SEQ ID NO: 3427; WAN024CQF_at; Start 85; Stop 109
gttgagggtgtcaatcaagccctat

SEQ ID NO: 128955 - DNA, 25 bp, Artificial
  probe
  misc_feature (1)..(25): SEQ ID NO: 3427; WAN024CQF_at; Start 213; Stop 237
gattgattcggatgatgaacctacg

SEQ ID NO: 128956 - DNA, 25 bp, Artificial
  probe
  misc_feature (1)..(25): SEQ ID NO: 3427; WAN024CQF_at; Start 767; Stop 791
tcaagacagctattacaggtggtgg

SEQ ID NO: 128957 - DNA, 25 bp, Artificial
  probe
  misc_feature (1)..(25): SEQ ID NO: 3427; WAN024CQF_at; Start 112; Stop 136
gacttttcagatatcgaggttcaac

SEQ ID NO: 128958 - DNA, 25 bp, Artificial
  probe
  misc_feature (1)..(25): SEQ ID NO: 3427; WAN024CQF_at; Start 371; Stop 395
gtatcaagaatatcgaccgtcctgg

SEQ ID NO: 128959 - DNA, 25 bp, Artificial
  probe
  misc_feature (1)..(25): SEQ ID NO: 3427; WAN024CQF_at; Start 97; Stop 121
aatcaagccctatctgacttttcag

SEQ ID NO: 128960 - DNA, 25 bp, Artificial
  probe
  misc_feature (1)..(25): SEQ ID NO: 3427; WAN024CQF_at; Start 263; Stop 287
ccagtatggtattggcagccaaggc

SEQ ID NO: 128961 - DNA, 25 bp, Artificial
  probe
  misc_feature (1)..(25): SEQ ID NO: 3427; WAN024CQF_at; Start 860; Stop 884
attcagatgttggtggagcggtctt

SEQ ID NO: 128962 - DNA, 25 bp, Artificial
  probe
  misc_feature (1)..(25): SEQ ID NO: 3427; WAN024CQF_at; Start 197; Stop 221
tccatacggatgagaagattgattc

SEQ ID NO: 128963 - DNA, 25 bp, Artificial
  probe
  misc_feature (1)..(25): SEQ ID NO: 3427; WAN024CQF_at; Start 313; Stop 337
gtcctttcggctgggaatacaggtg

SEQ ID NO: 128964 - DNA, 25 bp, Artificial
  probe
  misc_feature (1)..(25): SEQ ID NO: 3427; WAN024CQF_at; Start 745; Stop 769
gctatgggaatcatgggcttgctca

SEQ ID NO: 128965 - DNA, 25 bp, Artificial
  probe
  misc_feature (1)..(25): SEQ ID NO: 3427; WAN024CQF_at; Start 918; Stop 942
tggctcaagcgatgccaaggctgtt

SEQ ID NO: 128966 - DNA, 25 bp, Artificial
  probe
  misc_feature (1)..(25): SEQ ID NO: 3427; WAN024CQF_at; Start 291; Stop 315
caaagatggtgaagcagacgctgtc

SEQ ID NO: 128967 - DNA, 25 bp, Artificial
  probe
  misc_feature (1)..(25): SEQ ID NO: 3427; WAN024CQF_at; Start 932; Stop 956
ccaaggctgtttatagtacgattcg

SEQ ID NO: 128968 - DNA, 25 bp, Artificial
  probe
  misc_feature (1)..(25): SEQ ID NO: 3427; WAN024CQF_at; Start 993; Stop 1017
ccagactgcgcgtgaattttcagga

SEQ ID NO: 128969 - DNA, 25 bp, Artificial
  probe
  misc_feature (1)..(25): SEQ ID NO: 3427; WAN024CQF_at; Start 305; Stop 329
cagacgctgtcctttcggctgggaa

SEQ ID NO: 128970 - DNA, 25 bp, Artificial
  probe
  misc_feature (1)..(25): SEQ ID NO: 3427; WAN024CQF_at; Start 248; Stop 272
ggaataagaaaaatgccagtatggt

SEQ ID NO: 128971 - DNA, 25 bp, Artificial
  probe
  misc_feature (1)..(25): SEQ ID NO: 3427; WAN024CQF_at; Start 895; Stop 919
aaggcacctgttgtcaagactcatg

SEQ ID NO: 128972 - DNA, 25 bp, Artificial
  probe
  misc_feature (1)..(25): SEQ ID NO: 3427; WAN024CQF_at; Start 906; Stop 930
tgtcaagactcatggctcaagcgat

SEQ ID NO: 128973 - DNA, 25 bp, Artificial
  probe
  misc_feature (1)..(25): SEQ ID NO: 6414; WAN024CQG_at; Start 71; Stop 95
cccggttagagaaagctgagtttga

SEQ ID NO: 128974 - DNA, 25 bp, Artificial
  probe
  misc_feature (1)..(25): SEQ ID NO: 6414; WAN024CQG_at; Start 179; Stop 203
aaaatggcgctgctgtaaccttgtc

SEQ ID NO: 128975 - DNA, 25 bp, Artificial
  probe
  misc_feature (1)..(25): SEQ ID NO: 6414; WAN024CQG_at; Start 181; Stop 205
aatggcgctgctgtaaccttgtctg

SEQ ID NO: 128976 - DNA, 25 bp, Artificial
  probe
  misc_feature (1)..(25): SEQ ID NO: 6414; WAN024CQG_at; Start 178; Stop 202
gaaaatggcgctgctgtaaccttgt

SEQ ID NO: 128977 - DNA, 25 bp, Artificial
  probe
  misc_feature (1)..(25): SEQ ID NO: 6414; WAN024CQG_at; Start 68; Stop 92
atacccggttagagaaagctgagtt

SEQ ID NO: 128978 - DNA, 25 bp, Artificial
  probe
  misc_feature (1)..(25): SEQ ID NO: 6414; WAN024CQG_at; Start 183; Stop 207
tggcgctgctgtaaccttgtctgat

SEQ ID NO: 128979 - DNA, 25 bp, Artificial
  probe
  misc_feature (1)..(25): SEQ ID NO: 6414; WAN024CQG_at; Start 182; Stop 206
atggcgctgctgtaaccttgtctga

SEQ ID NO: 128980 - DNA, 25 bp, Artificial
  probe
  misc_feature (1)..(25): SEQ ID NO: 6414; WAN024CQG_at; Start 64; Stop 88
gaggatacccggttagagaaagctg

SEQ ID NO: 128981 - DNA, 25 bp, Artificial
  probe
  misc_feature (1)..(25): SEQ ID NO: 6414; WAN024CQG_at; Start 58; Stop 82
atctttgaggatacccggttagaga

SEQ ID NO: 128982 - DNA, 25 bp, Artificial
  probe
  misc_feature (1)..(25): SEQ ID NO: 6414; WAN024CQG_at; Start 72; Stop 96
ccggttagagaaagctgagtttgac

SEQ ID NO: 128983 - DNA, 25 bp, Artificial
  probe
  misc_feature (1)..(25): SEQ ID NO: 6414; WAN024CQG_at; Start 70; Stop 94
acccggttagagaaagctgagtttg

SEQ ID NO: 128984 - DNA, 25 bp, Artificial
  probe
  misc_feature (1)..(25): SEQ ID NO: 6414; WAN024CQG_at; Start 57; Stop 81
catctttgaggatacccggttagag

SEQ ID NO: 128985 - DNA, 25 bp, Artificial
  probe
  misc_feature (1)..(25): SEQ ID NO: 6414; WAN024CQG_at; Start 176; Stop 200
ttgaaaatggcgctgctgtaacctt

SEQ ID NO: 128986 - DNA, 25 bp, Artificial
  probe
  misc_feature (1)..(25): SEQ ID NO: 6414; WAN024CQG_at; Start 173; Stop 197
cttttgaaaatggcgctgctgtaac

SEQ ID NO: 128987 - DNA, 25 bp, Artificial
  probe
  misc_feature (1)..(25): SEQ ID NO: 6414; WAN024CQG_at; Start 74; Stop 98
ggttagagaaagctgagtttgacag

SEQ ID NO: 128988 - DNA, 25 bp, Artificial
  probe
  misc_feature (1)..(25): SEQ ID NO: 6414; WAN024CQG_at; Start 65; Stop 89
aggatacccggttagagaaagctga

SEQ ID NO: 128989 - DNA, 25 bp, Artificial
  probe
  misc_feature (1)..(25): SEQ ID NO: 6414; WAN024CQG_at; Start 172; Stop 196
gcttttgaaaatggcgctgctgtaa

SEQ ID NO: 128990 - DNA, 25 bp, Artificial
  probe
  misc_feature (1)..(25): SEQ ID NO: 6414; WAN024CQG_at; Start 63; Stop 87
tgaggatacccggttagagaaagct

SEQ ID NO: 128991 - DNA, 25 bp, Artificial
  probe
  misc_feature (1)..(25): SEQ ID NO: 6414; WAN024CQG_at; Start 66; Stop 90
ggatacccggttagagaaagctgag

SEQ ID NO: 128992 - DNA, 25 bp, Artificial
  probe
  misc_feature (1)..(25): SEQ ID NO: 6414; WAN024CQG_at; Start 177; Stop 201
tgaaaatggcgctgctgtaaccttg

SEQ ID NO: 128993 - DNA, 25 bp, Artificial
  probe
  misc_feature (1)..(25): SEQ ID NO: 6414; WAN024CQG_at; Start 174; Stop 198
ttttgaaaatggcgctgctgtaacc

SEQ ID NO: 128994 - DNA, 25 bp, Artificial
  probe
  misc_feature (1)..(25): SEQ ID NO: 6414; WAN024CQG_at; Start 180; Stop 204
aaatggcgctgctgtaaccttgtct

SEQ ID NO: 128995 - DNA, 25 bp, Artificial
  probe
  misc_feature (1)..(25): SEQ ID NO: 6414; WAN024CQG_at; Start 59; Stop 83
tctttgaggatacccggttagagaa

SEQ ID NO: 128996 - DNA, 25 bp, Artificial
  probe
  misc_feature (1)..(25): SEQ ID NO: 6414; WAN024CQG_at; Start 73; Stop 97
cggttagagaaagctgagtttgaca

SEQ ID NO: 128997 - DNA, 25 bp, Artificial
  probe
  misc_feature (1)..(25): SEQ ID NO: 6414; WAN024CQG_at; Start 171; Stop 195
agcttttgaaaatggcgctgctgta

SEQ ID NO: 128998 - DNA, 25 bp, Artificial
  probe
  misc_feature (1)..(25): SEQ ID NO: 6414; WAN024CQG_at; Start 67; Stop 91
gatacccggttagagaaagctgagt

SEQ ID NO: 128999 - DNA, 25 bp, Artificial
  probe
  misc_feature (1)..(25): SEQ ID NO: 6414; WAN024CQG_at; Start 62; Stop 86
ttgaggatacccggttagagaaagc

SEQ ID NO: 129000 - DNA, 25 bp, Artificial
  probe
  misc_feature (1)..(25): SEQ ID NO: 6414; WAN024CQG_at; Start 175; Stop 199
tttgaaaatggcgctgctgtaacct

SEQ ID NO: 129001 - DNA, 25 bp, Artificial
  probe
  misc_feature (1)..(25): SEQ ID NO: 7495; WAN024CQH_at; Start 23; Stop 47
ttgaagtagtaaacgtggccgattg

SEQ ID NO: 129002 - DNA, 25 bp, Artificial
  probe
  misc_feature (1)..(25): SEQ ID NO: 7495; WAN024CQH_at; Start 67; Stop 91
ttgagccaactgagcaatatcttct

SEQ ID NO: 129003 - DNA, 25 bp, Artificial
  probe
  misc_feature (1)..(25): SEQ ID NO: 7495; WAN024CQH_at; Start 84; Stop 108
tatcttctccatagaaaataacgat

SEQ ID NO: 129004 - DNA, 25 bp, Artificial
  probe
  misc_feature (1)..(25): SEQ ID NO: 7495; WAN024CQH_at; Start 222; Stop 246
ctggaatggcagagaaagtctctaa

SEQ ID NO: 129005 - DNA, 25 bp, Artificial
  probe
  misc_feature (1)..(25): SEQ ID NO: 7495; WAN024CQH_at; Start 183; Stop 207
tatccgccaacactgcaattttctt

SEQ ID NO: 129006 - DNA, 25 bp, Artificial
  probe
  misc_feature (1)..(25): SEQ ID NO: 7495; WAN024CQH_at; Start 3; Stop 27
gatcctggtcttctgttttcttgaa

SEQ ID NO: 129007 - DNA, 25 bp, Artificial
  probe
  misc_feature (1)..(25): SEQ ID NO: 7495; WAN024CQH_at; Start 52; Stop 76
catttgactggccaattgagccaac

SEQ ID NO: 129008 - DNA, 25 bp, Artificial
  probe
  misc_feature (1)..(25): SEQ ID NO: 7495; WAN024CQH_at; Start 161; Stop 185
gactggtcaccaagctccttcatat

SEQ ID NO: 129009 - DNA, 25 bp, Artificial
  probe
  misc_feature (1)..(25): SEQ ID NO: 7495; WAN024CQH_at; Start 38; Stop 62
tggccgattgggaacatttgactgg

SEQ ID NO: 129010 - DNA, 25 bp, Artificial
  probe
  misc_feature (1)..(25): SEQ ID NO: 7495; WAN024CQH_at; Start 203; Stop 227
ttcttgccaccttcattggctggaa

SEQ ID NO: 129011 - DNA, 25 bp, Artificial
  probe
  misc_feature (1)..(25): SEQ ID NO: 7495; WAN024CQH_at; Start 196; Stop 220
tgcaattttcttgccaccttcattg

SEQ ID NO: 129012 - DNA, 25 bp, Artificial
  probe
  misc_feature (1)..(25): SEQ ID NO: 7495; WAN024CQH_at; Start 220; Stop 244
ggctggaatggcagagaaagtctct

SEQ ID NO: 129013 - DNA, 25 bp, Artificial
  probe
  misc_feature (1)..(25): SEQ ID NO: 7495; WAN024CQH_at; Start 164; Stop 188
tggtcaccaagctccttcatatccg

SEQ ID NO: 129014 - DNA, 25 bp, Artificial
  probe
  misc_feature (1)..(25): SEQ ID NO: 7495; WAN024CQH_at; Start 71; Stop 95
gccaactgagcaatatcttctccat

SEQ ID NO: 129015 - DNA, 25 bp, Artificial
  probe
  misc_feature (1)..(25): SEQ ID NO: 7495; WAN024CQH_at; Start 135; Stop 159
aaatcatctgattatgaagttgaac

SEQ ID NO: 129016 - DNA, 25 bp, Artificial
  probe
  misc_feature (1)..(25): SEQ ID NO: 7495; WAN024CQH_at; Start 208; Stop 232
gccaccttcattggctggaatggca

SEQ ID NO: 129017 - DNA, 25 bp, Artificial
  probe
  misc_feature (1)..(25): SEQ ID NO: 7495; WAN024CQH_at; Start 119; Stop 143
tctggggagaggctcaaaatcatct

SEQ ID NO: 129018 - DNA, 25 bp, Artificial
  probe
  misc_feature (1)..(25): SEQ ID NO: 7495; WAN024CQH_at; Start 41; Stop 65
ccgattgggaacatttgactggcca

SEQ ID NO: 129019 - DNA, 25 bp, Artificial
  probe
  misc_feature (1)..(25): SEQ ID NO: 7495; WAN024CQH_at; Start 147; Stop 171
tatgaagttgaacagactggtcacc

SEQ ID NO: 129020 - DNA, 25 bp, Artificial
  probe
  misc_feature (1)..(25): SEQ ID NO: 7495; WAN024CQH_at; Start 61; Stop 85
ggccaattgagccaactgagcaata

SEQ ID NO: 129021 - DNA, 25 bp, Artificial
  probe
  misc_feature (1)..(25): SEQ ID NO: 7495; WAN024CQH_at; Start 35; Stop 59
acgtggccgattgggaacatttgac

SEQ ID NO: 129022 - DNA, 25 bp, Artificial
  probe
  misc_feature (1)..(25): SEQ ID NO: 7495; WAN024CQH_at; Start 57; Stop 81
gactggccaattgagccaactgagc

SEQ ID NO: 129023 - DNA, 25 bp, Artificial
  probe
  misc_feature (1)..(25): SEQ ID NO: 7495; WAN024CQH_at; Start 150; Stop 174
gaagttgaacagactggtcaccaag

SEQ ID NO: 129024 - DNA, 25 bp, Artificial
  probe
  misc_feature (1)..(25): SEQ ID NO: 7495; WAN024CQH_at; Start 108; Stop 132
tatcaagcacatctggggagaggct

SEQ ID NO: 129025 - DNA, 25 bp, Artificial
  probe
  misc_feature (1)..(25): SEQ ID NO: 7495; WAN024CQH_at; Start 100; Stop 124
aataacgatatcaagcacatctggg

SEQ ID NO: 129026 - DNA, 25 bp, Artificial
  probe
  misc_feature (1)..(25): SEQ ID NO: 7495; WAN024CQH_at; Start 180; Stop 204
tcatatccgccaacactgcaatttt

SEQ ID NO: 129027 - DNA, 25 bp, Artificial
  probe
  misc_feature (1)..(25): SEQ ID NO: 7495; WAN024CQH_at; Start 6; Stop 30
cctggtcttctgttttcttgaagta

SEQ ID NO: 129028 - DNA, 25 bp, Artificial
  probe
  misc_feature (1)..(25): SEQ ID NO: 7495; WAN024CQH_at; Start 20; Stop 44
ttcttgaagtagtaaacgtggccga

SEQ ID NO: 129029 - DNA, 25 bp, Artificial
  probe
  misc_feature (1)..(25): SEQ ID NO: 7495; WAN024CQH_at; Start 144; Stop 168
gattatgaagttgaacagactggtc

SEQ ID NO: 129030 - DNA, 25 bp, Artificial
  probe
  misc_feature (1)..(25): SEQ ID NO: 7495; WAN024CQH_at; Start 77; Stop 101
tgagcaatatcttctccatagaaaa

SEQ ID NO: 129031 - DNA, 25 bp, Artificial
  probe
  misc_feature (1)..(25): SEQ ID NO: 7495; WAN024CQH_at; Start 91; Stop 115
tccatagaaaataacgatatcaagc

SEQ ID NO: 129032 - DNA, 25 bp, Artificial
  probe
  misc_feature (1)..(25): SEQ ID NO: 7495; WAN024CQH_at; Start 48; Stop 72
ggaacatttgactggccaattgagc

SEQ ID NO: 129033 - DNA, 25 bp, Artificial
  probe
  misc_feature (1)..(25): SEQ ID NO: 7495; WAN024CQH_at; Start 188; Stop 212
gccaacactgcaattttcttgccac

SEQ ID NO: 129034 - DNA, 25 bp, Artificial
  probe
  misc_feature (1)..(25): SEQ ID NO: 7495; WAN024CQH_at; Start 155; Stop 179
tgaacagactggtcaccaagctcct

SEQ ID NO: 129035 - DNA, 25 bp, Artificial
  probe
  misc_feature (1)..(25): SEQ ID NO: 7556; WAN024CQI_at; Start 15; Stop 39
tagcaatctcagaacgatctttgaa

SEQ ID NO: 129036 - DNA, 25 bp, Artificial
  probe
  misc_feature (1)..(25): SEQ ID NO: 7556; WAN024CQI_at; Start 30; Stop 54
gatctttgaaaaaggccaaatgagc

SEQ ID NO: 129037 - DNA, 25 bp, Artificial
  probe
  misc_feature (1)..(25): SEQ ID NO: 7556; WAN024CQI_at; Start 3; Stop 27
gcatttttcctttagcaatctcaga

SEQ ID NO: 129038 - DNA, 25 bp, Artificial
  probe
  misc_feature (1)..(25): SEQ ID NO: 7556; WAN024CQI_at; Start 135; Stop 159
ccatctccaaaaccaacttttctgt

SEQ ID NO: 129039 - DNA, 25 bp, Artificial
  probe
  misc_feature (1)..(25): SEQ ID NO: 7556; WAN024CQI_at; Start 180; Stop 204
ctgtgtaaggaaggccaatctcatt

SEQ ID NO: 129040 - DNA, 25 bp, Artificial
  probe
  misc_feature (1)..(25): SEQ ID NO: 7556; WAN024CQI_at; Start 113; Stop 137
atatctcccaagtgatcctgtccca

SEQ ID NO: 129041 - DNA, 25 bp, Artificial
  probe
  misc_feature (1)..(25): SEQ ID NO: 7556; WAN024CQI_at; Start 36; Stop 60
tgaaaaaggccaaatgagcttctcc

SEQ ID NO: 129042 - DNA, 25 bp, Artificial
  probe
  misc_feature (1)..(25): SEQ ID NO: 7556; WAN024CQI_at; Start 209; Stop 233
taattgccttgtgttttgtaggtct

SEQ ID NO: 129043 - DNA, 25 bp, Artificial
  probe
  misc_feature (1)..(25): SEQ ID NO: 7556; WAN024CQI_at; Start 215; Stop 239
ccttgtgttttgtaggtcttgtatc

SEQ ID NO: 129044 - DNA, 25 bp, Artificial
  probe
  misc_feature (1)..(25): SEQ ID NO: 7556; WAN024CQI_at; Start 177; Stop 201
gaactgtgtaaggaaggccaatctc

SEQ ID NO: 129045 - DNA, 25 bp, Artificial
  probe
  misc_feature (1)..(25): SEQ ID NO: 7556; WAN024CQI_at; Start 72; Stop 96
cgatggctgtttttggacgagccaa

SEQ ID NO: 129046 - DNA, 25 bp, Artificial
  probe
  misc_feature (1)..(25): SEQ ID NO: 7556; WAN024CQI_at; Start 46; Stop 70
caaatgagcttctccaaccaaggtc

SEQ ID NO: 129047 - DNA, 25 bp, Artificial
  probe
  misc_feature (1)..(25): SEQ ID NO: 7556; WAN024CQI_at; Start 111; Stop 135
gaatatctcccaagtgatcctgtcc

SEQ ID NO: 129048 - DNA, 25 bp, Artificial
  probe
  misc_feature (1)..(25): SEQ ID NO: 7556; WAN024CQI_at; Start 148; Stop 172
caacttttctgttccttcaggcata

SEQ ID NO: 129049 - DNA, 25 bp, Artificial
  probe
  misc_feature (1)..(25): SEQ ID NO: 7556; WAN024CQI_at; Start 53; Stop 77
gcttctccaaccaaggtcacgatgg

SEQ ID NO: 129050 - DNA, 25 bp, Artificial
  probe
  misc_feature (1)..(25): SEQ ID NO: 7556; WAN024CQI_at; Start 171; Stop 195
tatgaagaactgtgtaaggaaggcc

SEQ ID NO: 129051 - DNA, 25 bp, Artificial
  probe
  misc_feature (1)..(25): SEQ ID NO: 7556; WAN024CQI_at; Start 160; Stop 184
tccttcaggcatatgaagaactgtg

SEQ ID NO: 129052 - DNA, 25 bp, Artificial
  probe
  misc_feature (1)..(25): SEQ ID NO: 7556; WAN024CQI_at; Start 222; Stop 246
ttttgtaggtcttgtatcttgttga

SEQ ID NO: 129053 - DNA, 25 bp, Artificial
  probe
  misc_feature (1)..(25): SEQ ID NO: 7556; WAN024CQI_at; Start 60; Stop 84
caaccaaggtcacgatggctgtttt

SEQ ID NO: 129054 - DNA, 25 bp, Artificial
  probe
  misc_feature (1)..(25): SEQ ID NO: 7556; WAN024CQI_at; Start 195; Stop 219
caatctcattattgtaattgccttg

SEQ ID NO: 129055 - DNA, 25 bp, Artificial
  probe
  misc_feature (1)..(25): SEQ ID NO: 7556; WAN024CQI_at; Start 85; Stop 109
tggacgagccaattcagacaagaga

SEQ ID NO: 129056 - DNA, 25 bp, Artificial
  probe
  misc_feature (1)..(25): SEQ ID NO: 7556; WAN024CQI_at; Start 21; Stop 45
tctcagaacgatctttgaaaaaggc

SEQ ID NO: 129057 - DNA, 25 bp, Artificial
  probe
  misc_feature (1)..(25): SEQ ID NO: 7556; WAN024CQI_at; Start 106; Stop 130
gagatgaatatctcccaagtgatcc

SEQ ID NO: 129058 - DNA, 25 bp, Artificial
  probe
  misc_feature (1)..(25): SEQ ID NO: 7556; WAN024CQI_at; Start 87; Stop 111
gacgagccaattcagacaagagatg

SEQ ID NO: 129059 - DNA, 25 bp, Artificial
  probe
  misc_feature (1)..(25): SEQ ID NO: 7556; WAN024CQI_at; Start 79; Stop 103
tgtttttggacgagccaattcagac

SEQ ID NO: 129060 - DNA, 25 bp, Artificial
  probe
  misc_feature (1)..(25): SEQ ID NO: 7556; WAN024CQI_at; Start 69; Stop 93
tcacgatggctgtttttggacgagc

SEQ ID NO: 129061 - DNA, 25 bp, Artificial
  probe
  misc_feature (1)..(25): SEQ ID NO: 7556; WAN024CQI_at; Start 64; Stop 88
caaggtcacgatggctgtttttgga

SEQ ID NO: 129062 - DNA, 25 bp, Artificial
  probe
  misc_feature (1)..(25): SEQ ID NO: 7556; WAN024CQI_at; Start 185; Stop 209
taaggaaggccaatctcattattgt

SEQ ID NO: 129063 - DNA, 25 bp, Artificial
  probe
  misc_feature (1)..(25): SEQ ID NO: 7556; WAN024CQI_at; Start 56; Stop 80
tctccaaccaaggtcacgatggctg

SEQ ID NO: 129064 - DNA, 25 bp, Artificial
  probe
  misc_feature (1)..(25): SEQ ID NO: 7556; WAN024CQI_at; Start 97; Stop 121
ttcagacaagagatgaatatctccc

SEQ ID NO: 129065 - DNA, 25 bp, Artificial
  probe
  misc_feature (1)..(25): SEQ ID NO: 7556; WAN024CQI_at; Start 10; Stop 34
tcctttagcaatctcagaacgatct

SEQ ID NO: 129066 - DNA, 25 bp, Artificial
  probe
  misc_feature (1)..(25): SEQ ID NO: 7556; WAN024CQI_at; Start 24; Stop 48
cagaacgatctttgaaaaaggccaa

SEQ ID NO: 129067 - DNA, 25 bp, Artificial
  probe
  misc_feature (1)..(25): SEQ ID NO: 7556; WAN024CQI_at; Start 43; Stop 67
ggccaaatgagcttctccaaccaag

SEQ ID NO: 129068 - DNA, 25 bp, Artificial
  probe
  misc_feature (1)..(25): SEQ ID NO: 7556; WAN024CQI_at; Start 50; Stop 74
tgagcttctccaaccaaggtcacga

SEQ ID NO: 129069 - DNA, 25 bp, Artificial
  probe
  misc_feature (1)..(25): SEQ ID NO: 969; WAN024CQJ_at; Start 651; Stop 675
gccggctgaccctatcgtagaggac

SEQ ID NO: 129070 - DNA, 25 bp, Artificial
  probe
  misc_feature (1)..(25): SEQ ID NO: 969; WAN024CQJ_at; Start 376; Stop 400
tacaagacctacaaaacacaaggca

SEQ ID NO: 129071 - DNA, 25 bp, Artificial
  probe
  misc_feature (1)..(25): SEQ ID NO: 969; WAN024CQJ_at; Start 859; Stop 883
caagaaggagtttcagaggagcaaa

SEQ ID NO: 129072 - DNA, 25 bp, Artificial
  probe
  misc_feature (1)..(25): SEQ ID NO: 969; WAN024CQJ_at; Start 243; Stop 267
tgatgttttgacagcctttcaatcc

SEQ ID NO: 129073 - DNA, 25 bp, Artificial
  probe
  misc_feature (1)..(25): SEQ ID NO: 969; WAN024CQJ_at; Start 208; Stop 232
aaagaggtctcaaatcatccttaca

SEQ ID NO: 129074 - DNA, 25 bp, Artificial
  probe
  misc_feature (1)..(25): SEQ ID NO: 969; WAN024CQJ_at; Start 931; Stop 955
tggaagaaagcagccaatggagcag

SEQ ID NO: 129075 - DNA, 25 bp, Artificial
  probe
  misc_feature (1)..(25): SEQ ID NO: 969; WAN024CQJ_at; Start 625; Stop 649
atggcttcaggttccttgcttttag

SEQ ID NO: 129076 - DNA, 25 bp, Artificial
  probe
  misc_feature (1)..(25): SEQ ID NO: 969; WAN024CQJ_at; Start 1018; Stop 1042
tctgccattccagccaatgaaggtg

SEQ ID NO: 129077 - DNA, 25 bp, Artificial
  probe
  misc_feature (1)..(25): SEQ ID NO: 969; WAN024CQJ_at; Start 619; Stop 643
gacggaatggcttcaggttccttgc

SEQ ID NO: 129078 - DNA, 25 bp, Artificial
  probe
  misc_feature (1)..(25): SEQ ID NO: 969; WAN024CQJ_at; Start 520; Stop 544
gctcgtccaaaaacagccatcgtga

SEQ ID NO: 129079 - DNA, 25 bp, Artificial
  probe
  misc_feature (1)..(25): SEQ ID NO: 969; WAN024CQJ_at; Start 536; Stop 560
ccatcgtgaccttggttggagaagc

SEQ ID NO: 129080 - DNA, 25 bp, Artificial
  probe
  misc_feature (1)..(25): SEQ ID NO: 969; WAN024CQJ_at; Start 335; Stop 359
caacgactaaggatatgttggcgca

SEQ ID NO: 129081 - DNA, 25 bp, Artificial
  probe
  misc_feature (1)..(25): SEQ ID NO: 969; WAN024CQJ_at; Start 443; Stop 467
tgcctgaaggaacagaaaagttggt

SEQ ID NO: 129082 - DNA, 25 bp, Artificial
  probe
  misc_feature (1)..(25): SEQ ID NO: 969; WAN024CQJ_at; Start 1007; Stop 1031
tagagactttctctgccattccagc

SEQ ID NO: 129083 - DNA, 25 bp, Artificial
  probe
  misc_feature (1)..(25): SEQ ID NO: 969; WAN024CQJ_at; Start 1030; Stop 1054
gccaatgaaggtggcaagaaaattg

SEQ ID NO: 129084 - DNA, 25 bp, Artificial
  probe
  misc_feature (1)..(25): SEQ ID NO: 969; WAN024CQJ_at; Start 236; Stop 260
tagtagatgatgttttgacagcctt

SEQ ID NO: 129085 - DNA, 25 bp, Artificial
  probe
  misc_feature (1)..(25): SEQ ID NO: 969; WAN024CQJ_at; Start 1219; Stop 1243
tactacttcaagaaaacagaagacc

SEQ ID NO: 129086 - DNA, 25 bp, Artificial
  probe
  misc_feature (1)..(25): SEQ ID NO: 969; WAN024CQJ_at; Start 277; Stop 301
tactatcttgaaaaaacgactgttg

SEQ ID NO: 129087 - DNA, 25 bp, Artificial
  probe
  misc_feature (1)..(25): SEQ ID NO: 969; WAN024CQJ_at; Start 831; Stop 855
tgctatgattgcatcctatgttgcc

SEQ ID NO: 129088 - DNA, 25 bp, Artificial
  probe
  misc_feature (1)..(25): SEQ ID NO: 969; WAN024CQJ_at; Start 1249; Stop 1273
caatttgaagacctagtcaagcagg

SEQ ID NO: 129089 - DNA, 25 bp, Artificial
  probe
  misc_feature (1)..(25): SEQ ID NO: 969; WAN024CQJ_at; Start 661; Stop 685
cctatcgtagaggactatttgccaa

SEQ ID NO: 129090 - DNA, 25 bp, Artificial
  probe
  misc_feature (1)..(25): SEQ ID NO: 969; WAN024CQJ_at; Start 346; Stop 370
gatatgttggcgcatttactgtcaa

SEQ ID NO: 129091 - DNA, 25 bp, Artificial
  probe
  misc_feature (1)..(25): SEQ ID NO: 969; WAN024CQJ_at; Start 282; Stop 306
tcttgaaaaaacgactgttgatgtc

SEQ ID NO: 129092 - DNA, 25 bp, Artificial
  probe
  misc_feature (1)..(25): SEQ ID NO: 969; WAN024CQJ_at; Start 1213; Stop 1237
cacgtttactacttcaagaaaacag

SEQ ID NO: 129093 - DNA, 25 bp, Artificial
  probe
  misc_feature (1)..(25): SEQ ID NO: 969; WAN024CQJ_at; Start 527; Stop 551
caaaaacagccatcgtgaccttggt

SEQ ID NO: 129094 - DNA, 25 bp, Artificial
  probe
  misc_feature (1)..(25): SEQ ID NO: 969; WAN024CQJ_at; Start 322; Stop 346
tcaaatggcaagacaacgactaagg

SEQ ID NO: 129095 - DNA, 25 bp, Artificial
  probe
  misc_feature (1)..(25): SEQ ID NO: 969; WAN024CQJ_at; Start 502; Stop 526
catctcttgtctgaattggctcgtc

SEQ ID NO: 129096 - DNA, 25 bp, Artificial
  probe
  misc_feature (1)..(25): SEQ ID NO: 969; WAN024CQJ_at; Start 862; Stop 886
gaaggagtttcagaggagcaaattc

SEQ ID NO: 129097 - DNA, 25 bp, Artificial
  probe
  misc_feature (1)..(25): SEQ ID NO: 969; WAN024CQJ_at; Start 294; Stop 318
gactgttgatgtctttgctgttaca

SEQ ID NO: 129098 - DNA, 25 bp, Artificial
  probe
  misc_feature (1)..(25): SEQ ID NO: 969; WAN024CQJ_at; Start 609; Stop 633
gcaaattgcagacggaatggcttca

SEQ ID NO: 129099 - DNA, 25 bp, Artificial
  probe
  misc_feature (1)..(25): SEQ ID NO: 969; WAN024CQJ_at; Start 941; Stop 965
cagccaatggagcagatatcctgtc

SEQ ID NO: 129100 - DNA, 25 bp, Artificial
  probe
  misc_feature (1)..(25): SEQ ID NO: 969; WAN024CQJ_at; Start 513; Stop 537
tgaattggctcgtccaaaaacagcc

SEQ ID NO: 129101 - DNA, 25 bp, Artificial
  probe
  misc_feature (1)..(25): SEQ ID NO: 969; WAN024CQJ_at; Start 601; Stop 625
ggaaaaatgcaaattgcagacggaa

SEQ ID NO: 129102 - DNA, 25 bp, Artificial
  probe
  misc_feature (1)..(25): SEQ ID NO: 969; WAN024CQJ_at; Start 310; Stop 334
gctgttacaggttcaaatggcaaga

SEQ ID NO: 129103 - DNA, 25 bp, Artificial
  probe
  misc_feature (1)..(25): SEQ ID NO: 6972; WAN024CQK_at; Start 78; Stop 102
caaaccccaattcatcaagcgtggt

SEQ ID NO: 129104 - DNA, 25 bp, Artificial
  probe
  misc_feature (1)..(25): SEQ ID NO: 6972; WAN024CQK_at; Start 117; Stop 141
acgtccgtcccttatcgtgattgag

SEQ ID NO: 129105 - DNA, 25 bp, Artificial
  probe
  misc_feature (1)..(25): SEQ ID NO: 6972; WAN024CQK_at; Start 86; Stop 110
aattcatcaagcgtggtaaggattg

SEQ ID NO: 129106 - DNA, 25 bp, Artificial
  probe
  misc_feature (1)..(25): SEQ ID NO: 6972; WAN024CQK_at; Start 109; Stop 133
tgtggtgaacgtccgtcccttatcg

SEQ ID NO: 129107 - DNA, 25 bp, Artificial
  probe
  misc_feature (1)..(25): SEQ ID NO: 6972; WAN024CQK_at; Start 51; Stop 75
tactgttaagcacctgccactcaac

SEQ ID NO: 129108 - DNA, 25 bp, Artificial
  probe
  misc_feature (1)..(25): SEQ ID NO: 6972; WAN024CQK_at; Start 47; Stop 71
tccttactgttaagcacctgccact

SEQ ID NO: 129109 - DNA, 25 bp, Artificial
  probe
  misc_feature (1)..(25): SEQ ID NO: 6972; WAN024CQK_at; Start 102; Stop 126
taaggattgtggtgaacgtccgtcc

SEQ ID NO: 129110 - DNA, 25 bp, Artificial
  probe
  misc_feature (1)..(25): SEQ ID NO: 6972; WAN024CQK_at; Start 53; Stop 77
ctgttaagcacctgccactcaacat

SEQ ID NO: 129111 - DNA, 25 bp, Artificial
  probe
  misc_feature (1)..(25): SEQ ID NO: 6972; WAN024CQK_at; Start 82; Stop 106
ccccaattcatcaagcgtggtaagg

SEQ ID NO: 129112 - DNA, 25 bp, Artificial
  probe
  misc_feature (1)..(25): SEQ ID NO: 6972; WAN024CQK_at; Start 4; Stop 28
tccgataataaacaccctctctctg

SEQ ID NO: 129113 - DNA, 25 bp, Artificial
  probe
  misc_feature (1)..(25): SEQ ID NO: 6972; WAN024CQK_at; Start 44; Stop 68
aaatccttactgttaagcacctgcc

SEQ ID NO: 129114 - DNA, 25 bp, Artificial
  probe
  misc_feature (1)..(25): SEQ ID NO: 6972; WAN024CQK_at; Start 83; Stop 107
cccaattcatcaagcgtggtaagga

SEQ ID NO: 129115 - DNA, 25 bp, Artificial
  probe
  misc_feature (1)..(25): SEQ ID NO: 6972; WAN024CQK_at; Start 6; Stop 30
cgataataaacaccctctctctgtt

SEQ ID NO: 129116 - DNA, 25 bp, Artificial
  probe
  misc_feature (1)..(25): SEQ ID NO: 6972; WAN024CQK_at; Start 57; Stop 81
taagcacctgccactcaacatcaaa

SEQ ID NO: 129117 - DNA, 25 bp, Artificial
  probe
  misc_feature (1)..(25): SEQ ID NO: 6972; WAN024CQK_at; Start 45; Stop 69
aatccttactgttaagcacctgcca

SEQ ID NO: 129118 - DNA, 25 bp, Artificial
  probe
  misc_feature (1)..(25): SEQ ID NO: 6972; WAN024CQK_at; Start 111; Stop 135
tggtgaacgtccgtcccttatcgtg

SEQ ID NO: 129119 - DNA, 25 bp, Artificial
  probe
  misc_feature (1)..(25): SEQ ID NO: 6972; WAN024CQK_at; Start 38; Stop 62
acgccaaaatccttactgttaagca

SEQ ID NO: 129120 - DNA, 25 bp, Artificial
  probe
  misc_feature (1)..(25): SEQ ID NO: 6972; WAN024CQK_at; Start 90; Stop 114
catcaagcgtggtaaggattgtggt

SEQ ID NO: 129121 - DNA, 25 bp, Artificial
  probe
  misc_feature (1)..(25): SEQ ID NO: 6972; WAN024CQK_at; Start 89; Stop 113
tcatcaagcgtggtaaggattgtgg

SEQ ID NO: 129122 - DNA, 25 bp, Artificial
  probe
  misc_feature (1)..(25): SEQ ID NO: 6972; WAN024CQK_at; Start 112; Stop 136
ggtgaacgtccgtcccttatcgtga

SEQ ID NO: 129123 - DNA, 25 bp, Artificial
  probe
  misc_feature (1)..(25): SEQ ID NO: 6972; WAN024CQK_at; Start 80; Stop 104
aaccccaattcatcaagcgtggtaa

SEQ ID NO: 129124 - DNA, 25 bp, Artificial
  probe
  misc_feature (1)..(25): SEQ ID NO: 6972; WAN024CQK_at; Start 106; Stop 130
gattgtggtgaacgtccgtccctta

SEQ ID NO: 129125 - DNA, 25 bp, Artificial
  probe
  misc_feature (1)..(25): SEQ ID NO: 6972; WAN024CQK_at; Start 104; Stop 128
aggattgtggtgaacgtccgtccct

SEQ ID NO: 129126 - DNA, 25 bp, Artificial
  probe
  misc_feature (1)..(25): SEQ ID NO: 6972; WAN024CQK_at; Start 115; Stop 139
gaacgtccgtcccttatcgtgattg

SEQ ID NO: 129127 - DNA, 25 bp, Artificial
  probe
  misc_feature (1)..(25): SEQ ID NO: 6972; WAN024CQK_at; Start 113; Stop 137
gtgaacgtccgtcccttatcgtgat

SEQ ID NO: 129128 - DNA, 25 bp, Artificial
  probe
  misc_feature (1)..(25): SEQ ID NO: 6972; WAN024CQK_at; Start 40; Stop 64
gccaaaatccttactgttaagcacc

SEQ ID NO: 129129 - DNA, 25 bp, Artificial
  probe
  misc_feature (1)..(25): SEQ ID NO: 6972; WAN024CQK_at; Start 42; Stop 66
caaaatccttactgttaagcacctg

SEQ ID NO: 129130 - DNA, 25 bp, Artificial
  probe
  misc_feature (1)..(25): SEQ ID NO: 6972; WAN024CQK_at; Start 49; Stop 73
cttactgttaagcacctgccactca

SEQ ID NO: 129131 - DNA, 25 bp, Artificial
  probe
  misc_feature (1)..(25): SEQ ID NO: 6972; WAN024CQK_at; Start 11; Stop 35
ataaacaccctctctctgttttggg

SEQ ID NO: 129132 - DNA, 25 bp, Artificial
  probe
  misc_feature (1)..(25): SEQ ID NO: 6972; WAN024CQK_at; Start 84; Stop 108
ccaattcatcaagcgtggtaaggat

SEQ ID NO: 129133 - DNA, 25 bp, Artificial
  probe
  misc_feature (1)..(25): SEQ ID NO: 6972; WAN024CQK_at; Start 2; Stop 26
tgtccgataataaacaccctctctc

SEQ ID NO: 129134 - DNA, 25 bp, Artificial
  probe
  misc_feature (1)..(25): SEQ ID NO: 6972; WAN024CQK_at; Start 19; Stop 43
cctctctctgttttggggaacgcca

SEQ ID NO: 129135 - DNA, 25 bp, Artificial
  probe
  misc_feature (1)..(25): SEQ ID NO: 6972; WAN024CQK_at; Start 77; Stop 101
tcaaaccccaattcatcaagcgtgg

SEQ ID NO: 129136 - DNA, 25 bp, Artificial
  probe
  misc_feature (1)..(25): SEQ ID NO: 6972; WAN024CQK_at; Start 74; Stop 98
acatcaaaccccaattcatcaagcg

SEQ ID NO: 129137 - DNA, 25 bp, Artificial
  probe
  misc_feature (1)..(25): SEQ ID NO: 984; WAN024CQL_at; Start 175; Stop 199
gacactattcgaggaatcggacatg

SEQ ID NO: 129138 - DNA, 25 bp, Artificial
  probe
  misc_feature (1)..(25): SEQ ID NO: 984; WAN024CQL_at; Start 423; Stop 447
tgtggaatggcaagtgcttaacagc

SEQ ID NO: 129139 - DNA, 25 bp, Artificial
  probe
  misc_feature (1)..(25): SEQ ID NO: 984; WAN024CQL_at; Start 236; Stop 260
tcagcattgcaggaaacagacgagg

SEQ ID NO: 129140 - DNA, 25 bp, Artificial
  probe
  misc_feature (1)..(25): SEQ ID NO: 984; WAN024CQL_at; Start 646; Stop 670
gctcccaccctgtgtagtactacga

SEQ ID NO: 129141 - DNA, 25 bp, Artificial
  probe
  misc_feature (1)..(25): SEQ ID NO: 984; WAN024CQL_at; Start 518; Stop 542
gaaaggtatttcctctcagcggaga

SEQ ID NO: 129142 - DNA, 25 bp, Artificial
  probe
  misc_feature (1)..(25): SEQ ID NO: 984; WAN024CQL_at; Start 359; Stop 383
tcaaccacgacagaggaaatacctt

SEQ ID NO: 129143 - DNA, 25 bp, Artificial
  probe
  misc_feature (1)..(25): SEQ ID NO: 984; WAN024CQL_at; Start 843; Stop 867
caagcaaggctaccaagaggctgaa

SEQ ID NO: 129144 - DNA, 25 bp, Artificial
  probe
  misc_feature (1)..(25): SEQ ID NO: 984; WAN024CQL_at; Start 1092; Stop 1116
gcaagcaggcaatagcgtaacagta

SEQ ID NO: 129145 - DNA, 25 bp, Artificial
  probe
  misc_feature (1)..(25): SEQ ID NO: 984; WAN024CQL_at; Start 284; Stop 308
tcttctttgaaatcgcaaggttcgc

SEQ ID NO: 129146 - DNA, 25 bp, Artificial
  probe
  misc_feature (1)..(25): SEQ ID NO: 984; WAN024CQL_at; Start 262; Stop 286
tttgaagatacaagaggaactctct

SEQ ID NO: 129147 - DNA, 25 bp, Artificial
  probe
  misc_feature (1)..(25): SEQ ID NO: 984; WAN024CQL_at; Start 610; Stop 634
tcgcaaagtggtgatgtcgtctcaa

SEQ ID NO: 129148 - DNA, 25 bp, Artificial
  probe
  misc_feature (1)..(25): SEQ ID NO: 984; WAN024CQL_at; Start 925; Stop 949
ggtaagcagatagcaaatactctct

SEQ ID NO: 129149 - DNA, 25 bp, Artificial
  probe
  misc_feature (1)..(25): SEQ ID NO: 984; WAN024CQL_at; Start 392; Stop 416
tcctctcagcgttggatgaactggg

SEQ ID NO: 129150 - DNA, 25 bp, Artificial
  probe
  misc_feature (1)..(25): SEQ ID NO: 984; WAN024CQL_at; Start 1036; Stop 1060
cctgattgggcttttgataaggcgc

SEQ ID NO: 129151 - DNA, 25 bp, Artificial
  probe
  misc_feature (1)..(25): SEQ ID NO: 984; WAN024CQL_at; Start 55; Stop 79
tcagccgggcatgaatgtataggat

SEQ ID NO: 129152 - DNA, 25 bp, Artificial
  probe
  misc_feature (1)..(25): SEQ ID NO: 984; WAN024CQL_at; Start 896; Stop 920
caaactctaaaacacgcagagggcg

SEQ ID NO: 129153 - DNA, 25 bp, Artificial
  probe
  misc_feature (1)..(25): SEQ ID NO: 984; WAN024CQL_at; Start 118; Stop 142
gctatacacgatacgaaaggagaaa

SEQ ID NO: 129154 - DNA, 25 bp, Artificial
  probe
  misc_feature (1)..(25): SEQ ID NO: 984; WAN024CQL_at; Start 733; Stop 757
ccaaactacaatcaaagcggcgttg

SEQ ID NO: 129155 - DNA, 25 bp, Artificial
  probe
  misc_feature (1)..(25): SEQ ID NO: 984; WAN024CQL_at; Start 947; Stop 971
tcttaactggagagagtcaaggtgt

SEQ ID NO: 129156 - DNA, 25 bp, Artificial
  probe
  misc_feature (1)..(25): SEQ ID NO: 984; WAN024CQL_at; Start 996; Stop 1020
gaagctaacacctagagaatgctgg

SEQ ID NO: 129157 - DNA, 25 bp, Artificial
  probe
  misc_feature (1)..(25): SEQ ID NO: 984; WAN024CQL_at; Start 771; Stop 795
tggtatttcaccaacaatcagagcg

SEQ ID NO: 129158 - DNA, 25 bp, Artificial
  probe
  misc_feature (1)..(25): SEQ ID NO: 984; WAN024CQL_at; Start 1050; Stop 1074
tgataaggcgcaggaggtcaactct

SEQ ID NO: 129159 - DNA, 25 bp, Artificial
  probe
  misc_feature (1)..(25): SEQ ID NO: 984; WAN024CQL_at; Start 1077; Stop 1101
cagtcaattatacaagcaagcaggc

SEQ ID NO: 129160 - DNA, 25 bp, Artificial
  probe
  misc_feature (1)..(25): SEQ ID NO: 984; WAN024CQL_at; Start 339; Stop 363
tgaaaacgtcaagggactcctcaac

SEQ ID NO: 129161 - DNA, 25 bp, Artificial
  probe
  misc_feature (1)..(25): SEQ ID NO: 984; WAN024CQL_at; Start 710; Stop 734
taaagcagtttggtgttctgcaacc

SEQ ID NO: 129162 - DNA, 25 bp, Artificial
  probe
  misc_feature (1)..(25): SEQ ID NO: 984; WAN024CQL_at; Start 464; Stop 488
cccaaaatcgggaacgtgtgttcat

SEQ ID NO: 129163 - DNA, 25 bp, Artificial
  probe
  misc_feature (1)..(25): SEQ ID NO: 984; WAN024CQL_at; Start 660; Stop 684
tagtactacgacacaaaaagatccg

SEQ ID NO: 129164 - DNA, 25 bp, Artificial
  probe
  misc_feature (1)..(25): SEQ ID NO: 984; WAN024CQL_at; Start 788; Stop 812
tcagagcgtatcaaggaggaaatct

SEQ ID NO: 129165 - DNA, 25 bp, Artificial
  probe
  misc_feature (1)..(25): SEQ ID NO: 984; WAN024CQL_at; Start 827; Stop 851
gagtaaaagaagcaaccaagcaagg

SEQ ID NO: 129166 - DNA, 25 bp, Artificial
  probe
  misc_feature (1)..(25): SEQ ID NO: 984; WAN024CQL_at; Start 36; Stop 60
ttttaggatcggcatggaatcagcc

SEQ ID NO: 129167 - DNA, 25 bp, Artificial
  probe
  misc_feature (1)..(25): SEQ ID NO: 984; WAN024CQL_at; Start 533; Stop 557
tcagcggagatggtgcagcgattac

SEQ ID NO: 129168 - DNA, 25 bp, Artificial
  probe
  misc_feature (1)..(25): SEQ ID NO: 984; WAN024CQL_at; Start 214; Stop 238
ggaggatttccgtgccaggctttca

SEQ ID NO: 129169 - DNA, 25 bp, Artificial
  probe
  misc_feature (1)..(25): SEQ ID NO: 984; WAN024CQL_at; Start 297; Stop 321
cgcaaggttcgcatctattctcaaa

SEQ ID NO: 129170 - DNA, 25 bp, Artificial
  probe
  misc_feature (1)..(25): SEQ ID NO: 984; WAN024CQL_at; Start 876; Stop 900
tagtgtaaacctatcgcatccaaac

SEQ ID NO: 129171 - DNA, 25 bp, Artificial
  probe
  misc_feature (1)..(25): SEQ ID NO: 4143; WAN024CQM_at; Start 323; Stop 347
tttcaatcgcaggaagacgattggg

SEQ ID NO: 129172 - DNA, 25 bp, Artificial
  probe
  misc_feature (1)..(25): SEQ ID NO: 4143; WAN024CQM_at; Start 1338; Stop 1362
tagtcagctctataaacaagctggt

SEQ ID NO: 129173 - DNA, 25 bp, Artificial
  probe
  misc_feature (1)..(25): SEQ ID NO: 4143; WAN024CQM_at; Start 310; Stop 334
ccttgtcaagcattttcaatcgcag

SEQ ID NO: 129174 - DNA, 25 bp, Artificial
  probe
  misc_feature (1)..(25): SEQ ID NO: 4143; WAN024CQM_at; Start 560; Stop 584
gagagagggtgtttattatcggaca

SEQ ID NO: 129175 - DNA, 25 bp, Artificial
  probe
  misc_feature (1)..(25): SEQ ID NO: 4143; WAN024CQM_at; Start 1364; Stop 1388
atagtgtaaccgttcctgtgattgc

SEQ ID NO: 129176 - DNA, 25 bp, Artificial
  probe
  misc_feature (1)..(25): SEQ ID NO: 4143; WAN024CQM_at; Start 164; Stop 188
tttgtgagattgataaatttgctag

SEQ ID NO: 129177 - DNA, 25 bp, Artificial
  probe
  misc_feature (1)..(25): SEQ ID NO: 4143; WAN024CQM_at; Start 1344; Stop 1368
gctctataaacaagctggtaatagt

SEQ ID NO: 129178 - DNA, 25 bp, Artificial
  probe
  misc_feature (1)..(25): SEQ ID NO: 4143; WAN024CQM_at; Start 617; Stop 641
ctttcagacgagaaggtcaagcaac

SEQ ID NO: 129179 - DNA, 25 bp, Artificial
  probe
  misc_feature (1)..(25): SEQ ID NO: 4143; WAN024CQM_at; Start 455; Stop 479
ataagggacggacgttcaccacaat

SEQ ID NO: 129180 - DNA, 25 bp, Artificial
  probe
  misc_feature (1)..(25): SEQ ID NO: 4143; WAN024CQM_at; Start 1357; Stop 1381
gctggtaatagtgtaaccgttcctg

SEQ ID NO: 129181 - DNA, 25 bp, Artificial
  probe
  misc_feature (1)..(25): SEQ ID NO: 4143; WAN024CQM_at; Start 244; Stop 268
cgagatgtttcagatgacgaattta

SEQ ID NO: 129182 - DNA, 25 bp, Artificial
  probe
  misc_feature (1)..(25): SEQ ID NO: 4143; WAN024CQM_at; Start 240; Stop 264
catacgagatgtttcagatgacgaa

SEQ ID NO: 129183 - DNA, 25 bp, Artificial
  probe
  misc_feature (1)..(25): SEQ ID NO: 4143; WAN024CQM_at; Start 447; Stop 471
caatcacgataagggacggacgttc

SEQ ID NO: 129184 - DNA, 25 bp, Artificial
  probe
  misc_feature (1)..(25): SEQ ID NO: 4143; WAN024CQM_at; Start 315; Stop 339
tcaagcattttcaatcgcaggaaga

SEQ ID NO: 129185 - DNA, 25 bp, Artificial
  probe
  misc_feature (1)..(25): SEQ ID NO: 4143; WAN024CQM_at; Start 1360; Stop 1384
ggtaatagtgtaaccgttcctgtga

SEQ ID NO: 129186 - DNA, 25 bp, Artificial
  probe
  misc_feature (1)..(25): SEQ ID NO: 4143; WAN024CQM_at; Start 453; Stop 477
cgataagggacggacgttcaccaca

SEQ ID NO: 129187 - DNA, 25 bp, Artificial
  probe
  misc_feature (1)..(25): SEQ ID NO: 4143; WAN024CQM_at; Start 443; Stop 467
tactcaatcacgataagggacggac

SEQ ID NO: 129188 - DNA, 25 bp, Artificial
  probe
  misc_feature (1)..(25): SEQ ID NO: 4143; WAN024CQM_at; Start 1335; Stop 1359
taatagtcagctctataaacaagct

SEQ ID NO: 129189 - DNA, 25 bp, Artificial
  probe
  misc_feature (1)..(25): SEQ ID NO: 4143; WAN024CQM_at; Start 558; Stop 582
cagagagagggtgtttattatcgga

SEQ ID NO: 129190 - DNA, 25 bp, Artificial
  probe
  misc_feature (1)..(25): SEQ ID NO: 4143; WAN024CQM_at; Start 621; Stop 645
cagacgagaaggtcaagcaactaac

SEQ ID NO: 129191 - DNA, 25 bp, Artificial
  probe
  misc_feature (1)..(25): SEQ ID NO: 4143; WAN024CQM_at; Start 767; Stop 791
ttgcgattccttgtatgacaccaga

SEQ ID NO: 129192 - DNA, 25 bp, Artificial
  probe
  misc_feature (1)..(25): SEQ ID NO: 4143; WAN024CQM_at; Start 318; Stop 342
agcattttcaatcgcaggaagacga

SEQ ID NO: 129193 - DNA, 25 bp, Artificial
  probe
  misc_feature (1)..(25): SEQ ID NO: 4143; WAN024CQM_at; Start 229; Stop 253
gaatttcatgacatacgagatgttt

SEQ ID NO: 129194 - DNA, 25 bp, Artificial
  probe
  misc_feature (1)..(25): SEQ ID NO: 4143; WAN024CQM_at; Start 330; Stop 354
cgcaggaagacgattgggatttgaa

SEQ ID NO: 129195 - DNA, 25 bp, Artificial
  probe
  misc_feature (1)..(25): SEQ ID NO: 4143; WAN024CQM_at; Start 571; Stop 595
tttattatcggacattctagaaaga

SEQ ID NO: 129196 - DNA, 25 bp, Artificial
  probe
  misc_feature (1)..(25): SEQ ID NO: 4143; WAN024CQM_at; Start 567; Stop 591
ggtgtttattatcggacattctaga

SEQ ID NO: 129197 - DNA, 25 bp, Artificial
  probe
  misc_feature (1)..(25): SEQ ID NO: 4143; WAN024CQM_at; Start 1327; Stop 1351
gtctctagtaatagtcagctctata

SEQ ID NO: 129198 - DNA, 25 bp, Artificial
  probe
  misc_feature (1)..(25): SEQ ID NO: 4143; WAN024CQM_at; Start 613; Stop 637
tttcctttcagacgagaaggtcaag

SEQ ID NO: 129199 - DNA, 25 bp, Artificial
  probe
  misc_feature (1)..(25): SEQ ID NO: 4143; WAN024CQM_at; Start 254; Stop 278
cagatgacgaatttaaaaaacttag

SEQ ID NO: 129200 - DNA, 25 bp, Artificial
  probe
  misc_feature (1)..(25): SEQ ID NO: 4143; WAN024CQM_at; Start 450; Stop 474
tcacgataagggacggacgttcacc

SEQ ID NO: 129201 - DNA, 25 bp, Artificial
  probe
  misc_feature (1)..(25): SEQ ID NO: 4143; WAN024CQM_at; Start 1354; Stop 1378
caagctggtaatagtgtaaccgttc

SEQ ID NO: 129202 - DNA, 25 bp, Artificial
  probe
  misc_feature (1)..(25): SEQ ID NO: 4143; WAN024CQM_at; Start 1350; Stop 1374
taaacaagctggtaatagtgtaacc

SEQ ID NO: 129203 - DNA, 25 bp, Artificial
  probe
  misc_feature (1)..(25): SEQ ID NO: 4143; WAN024CQM_at; Start 524; Stop 548
tgcttaacagtaaggattttggcgt

SEQ ID NO: 129204 - DNA, 25 bp, Artificial
  probe
  misc_feature (1)..(25): SEQ ID NO: 4143; WAN024CQM_at; Start 332; Stop 356
caggaagacgattgggatttgaaga

SEQ ID NO: 129205 - DNA, 25 bp, Artificial
  probe
  misc_feature (1)..(25): SEQ ID NO: 7429; WAN024CQN_at; Start 84; Stop 108
gaccaccaagatattgttcatctgg

SEQ ID NO: 129206 - DNA, 25 bp, Artificial
  probe
  misc_feature (1)..(25): SEQ ID NO: 7429; WAN024CQN_at; Start 47; Stop 71
taagtaccaccaataccagcttctg

SEQ ID NO: 129207 - DNA, 25 bp, Artificial
  probe
  misc_feature (1)..(25): SEQ ID NO: 7429; WAN024CQN_at; Start 21; Stop 45
tcaagaacaaatctggcataacgcc

SEQ ID NO: 129208 - DNA, 25 bp, Artificial
  probe
  misc_feature (1)..(25): SEQ ID NO: 7429; WAN024CQN_at; Start 179; Stop 203
gaatttttaactccaatcacacgag

SEQ ID NO: 129209 - DNA, 25 bp, Artificial
  probe
  misc_feature (1)..(25): SEQ ID NO: 7429; WAN024CQN_at; Start 155; Stop 179
tgaatatcttgtacaggcatagaag

SEQ ID NO: 129210 - DNA, 25 bp, Artificial
  probe
  misc_feature (1)..(25): SEQ ID NO: 7429; WAN024CQN_at; Start 213; Stop 237
gcattgttgcatacaaactaccagt

SEQ ID NO: 129211 - DNA, 25 bp, Artificial
  probe
  misc_feature (1)..(25): SEQ ID NO: 7429; WAN024CQN_at; Start 58; Stop 82
aataccagcttctgctcccatcaag

SEQ ID NO: 129212 - DNA, 25 bp, Artificial
  probe
  misc_feature (1)..(25): SEQ ID NO: 7429; WAN024CQN_at; Start 192; Stop 216
caatcacacgaggattttgacgcat

SEQ ID NO: 129213 - DNA, 25 bp, Artificial
  probe
  misc_feature (1)..(25): SEQ ID NO: 7429; WAN024CQN_at; Start 168; Stop 192
caggcatagaagaatttttaactcc

SEQ ID NO: 129214 - DNA, 25 bp, Artificial
  probe
  misc_feature (1)..(25): SEQ ID NO: 7429; WAN024CQN_at; Start 120; Stop 144
caatgtaatcttctccacctgcagc

SEQ ID NO: 129215 - DNA, 25 bp, Artificial
  probe
  misc_feature (1)..(25): SEQ ID NO: 7429; WAN024CQN_at; Start 35; Stop 59
ggcataacgccataagtaccaccaa

SEQ ID NO: 129216 - DNA, 25 bp, Artificial
  probe
  misc_feature (1)..(25): SEQ ID NO: 7429; WAN024CQN_at; Start 222; Stop 246
catacaaactaccagtcaacgcaac

SEQ ID NO: 129217 - DNA, 25 bp, Artificial
  probe
  misc_feature (1)..(25): SEQ ID NO: 7429; WAN024CQN_at; Start 93; Stop 117
gatattgttcatctggaccattgaa

SEQ ID NO: 129218 - DNA, 25 bp, Artificial
  probe
  misc_feature (1)..(25): SEQ ID NO: 7429; WAN024CQN_at; Start 248; Stop 272
cctgccaattgtggaatattataga

SEQ ID NO: 129219 - DNA, 25 bp, Artificial
  probe
  misc_feature (1)..(25): SEQ ID NO: 7429; WAN024CQN_at; Start 13; Stop 37
ttccaatttcaagaacaaatctggc

SEQ ID NO: 129220 - DNA, 25 bp, Artificial
  probe
  misc_feature (1)..(25): SEQ ID NO: 7429; WAN024CQN_at; Start 125; Stop 149
taatcttctccacctgcagctacaa

SEQ ID NO: 129221 - DNA, 25 bp, Artificial
  probe
  misc_feature (1)..(25): SEQ ID NO: 7429; WAN024CQN_at; Start 237; Stop 261
tcaacgcaacccctgccaattgtgg

SEQ ID NO: 129222 - DNA, 25 bp, Artificial
  probe
  misc_feature (1)..(25): SEQ ID NO: 7429; WAN024CQN_at; Start 251; Stop 275
gccaattgtggaatattatagataa

SEQ ID NO: 129223 - DNA, 25 bp, Artificial
  probe
  misc_feature (1)..(25): SEQ ID NO: 7429; WAN024CQN_at; Start 100; Stop 124
ttcatctggaccattgaatacaatg

SEQ ID NO: 129224 - DNA, 25 bp, Artificial
  probe
  misc_feature (1)..(25): SEQ ID NO: 7429; WAN024CQN_at; Start 186; Stop 210
taactccaatcacacgaggattttg

SEQ ID NO: 129225 - DNA, 25 bp, Artificial
  probe
  misc_feature (1)..(25): SEQ ID NO: 7429; WAN024CQN_at; Start 149; Stop 173
aacatttgaatatcttgtacaggca

SEQ ID NO: 129226 - DNA, 25 bp, Artificial
  probe
  misc_feature (1)..(25): SEQ ID NO: 7429; WAN024CQN_at; Start 198; Stop 222
cacgaggattttgacgcattgttgc

SEQ ID NO: 129227 - DNA, 25 bp, Artificial
  probe
  misc_feature (1)..(25): SEQ ID NO: 7429; WAN024CQN_at; Start 25; Stop 49
gaacaaatctggcataacgccataa

SEQ ID NO: 129228 - DNA, 25 bp, Artificial
  probe
  misc_feature (1)..(25): SEQ ID NO: 7429; WAN024CQN_at; Start 79; Stop 103
caagcgaccaccaagatattgttca

SEQ ID NO: 129229 - DNA, 25 bp, Artificial
  probe
  misc_feature (1)..(25): SEQ ID NO: 7429; WAN024CQN_at; Start 241; Stop 265
cgcaacccctgccaattgtggaata

SEQ ID NO: 129230 - DNA, 25 bp, Artificial
  probe
  misc_feature (1)..(25): SEQ ID NO: 7429; WAN024CQN_at; Start 3; Stop 27
gaatcaaactttccaatttcaagaa

SEQ ID NO: 129231 - DNA, 25 bp, Artificial
  probe
  misc_feature (1)..(25): SEQ ID NO: 7429; WAN024CQN_at; Start 89; Stop 113
ccaagatattgttcatctggaccat

SEQ ID NO: 129232 - DNA, 25 bp, Artificial
  probe
  misc_feature (1)..(25): SEQ ID NO: 7429; WAN024CQN_at; Start 219; Stop 243
ttgcatacaaactaccagtcaacgc

SEQ ID NO: 129233 - DNA, 25 bp, Artificial
  probe
  misc_feature (1)..(25): SEQ ID NO: 7429; WAN024CQN_at; Start 73; Stop 97
tcccatcaagcgaccaccaagatat

SEQ ID NO: 129234 - DNA, 25 bp, Artificial
  probe
  misc_feature (1)..(25): SEQ ID NO: 7429; WAN024CQN_at; Start 114; Stop 138
tgaatacaatgtaatcttctccacc

SEQ ID NO: 129235 - DNA, 25 bp, Artificial
  probe
  misc_feature (1)..(25): SEQ ID NO: 7429; WAN024CQN_at; Start 39; Stop 63
taacgccataagtaccaccaatacc

SEQ ID NO: 129236 - DNA, 25 bp, Artificial
  probe
  misc_feature (1)..(25): SEQ ID NO: 7429; WAN024CQN_at; Start 210; Stop 234
gacgcattgttgcatacaaactacc

SEQ ID NO: 129237 - DNA, 25 bp, Artificial
  probe
  misc_feature (1)..(25): SEQ ID NO: 7429; WAN024CQN_at; Start 134; Stop 158
ccacctgcagctacaaacatttgaa

SEQ ID NO: 129238 - DNA, 25 bp, Artificial
  probe
  misc_feature (1)..(25): SEQ ID NO: 7429; WAN024CQN_at; Start 203; Stop 227
ggattttgacgcattgttgcataca

SEQ ID NO: 129239 - DNA, 25 bp, Artificial
  probe
  misc_feature (1)..(25): SEQ ID NO: 3360; WAN024CQO_at; Start 151; Stop 175
tcaggtgaatgtatttaccaaagtg

SEQ ID NO: 129240 - DNA, 25 bp, Artificial
  probe
  misc_feature (1)..(25): SEQ ID NO: 3360; WAN024CQO_at; Start 740; Stop 764
tctataagatgatatcaggtaaggc

SEQ ID NO: 129241 - DNA, 25 bp, Artificial
  probe
  misc_feature (1)..(25): SEQ ID NO: 3360; WAN024CQO_at; Start 559; Stop 583
gattacattgtattcaatggtccag

SEQ ID NO: 129242 - DNA, 25 bp, Artificial
  probe
  misc_feature (1)..(25): SEQ ID NO: 3360; WAN024CQO_at; Start 511; Stop 535
tctatgcctgtacaagatattcaaa

SEQ ID NO: 129243 - DNA, 25 bp, Artificial
  probe
  misc_feature (1)..(25): SEQ ID NO: 3360; WAN024CQO_at; Start 532; Stop 556
caaatgtttgtagctgcaggtggag

SEQ ID NO: 129244 - DNA, 25 bp, Artificial
  probe
  misc_feature (1)..(25): SEQ ID NO: 3360; WAN024CQO_at; Start 680; Stop 704
tgattcaagaacgagatttagatac

SEQ ID NO: 129245 - DNA, 25 bp, Artificial
  probe
  misc_feature (1)..(25): SEQ ID NO: 3360; WAN024CQO_at; Start 496; Stop 520
ggagttaaaaattcttctatgcctg

SEQ ID NO: 129246 - DNA, 25 bp, Artificial
  probe
  misc_feature (1)..(25): SEQ ID NO: 3360; WAN024CQO_at; Start 372; Stop 396
ttggaatgcaatgagtgaagctgcg

SEQ ID NO: 129247 - DNA, 25 bp, Artificial
  probe
  misc_feature (1)..(25): SEQ ID NO: 3360; WAN024CQO_at; Start 809; Stop 833
aacttgatttaggttctgttcgtca

SEQ ID NO: 129248 - DNA, 25 bp, Artificial
  probe
  misc_feature (1)..(25): SEQ ID NO: 3360; WAN024CQO_at; Start 629; Stop 653
ttggtggtacttatggcgttatgcc

SEQ ID NO: 129249 - DNA, 25 bp, Artificial
  probe
  misc_feature (1)..(25): SEQ ID NO: 3360; WAN024CQO_at; Start 166; Stop 190
taccaaagtgtagaagatcgtaaac

SEQ ID NO: 129250 - DNA, 25 bp, Artificial
  probe
  misc_feature (1)..(25): SEQ ID NO: 3360; WAN024CQO_at; Start 606; Stop 630
cttgatgggagcagaagctggtatt

SEQ ID NO: 129251 - DNA, 25 bp, Artificial
  probe
  misc_feature (1)..(25): SEQ ID NO: 3360; WAN024CQO_at; Start 198; Stop 222
tgaagctgttatggaagttgctaaa

SEQ ID NO: 129252 - DNA, 25 bp, Artificial
  probe
  misc_feature (1)..(25): SEQ ID NO: 3360; WAN024CQO_at; Start 465; Stop 489
tgcaacaatgcgtcaaaatcctcgt

SEQ ID NO: 129253 - DNA, 25 bp, Artificial
  probe
  misc_feature (1)..(25): SEQ ID NO: 3360; WAN024CQO_at; Start 277; Stop 301
gaattggcaaaacattcagaaagtg

SEQ ID NO: 129254 - DNA, 25 bp, Artificial
  probe
  misc_feature (1)..(25): SEQ ID NO: 3360; WAN024CQO_at; Start 845; Stop 869
cattggcagaaggtgacttggaagt

SEQ ID NO: 129255 - DNA, 25 bp, Artificial
  probe
  misc_feature (1)..(25): SEQ ID NO: 3360; WAN024CQO_at; Start 293; Stop 317
cagaaagtgttggagtcgatgctat

SEQ ID NO: 129256 - DNA, 25 bp, Artificial
  probe
  misc_feature (1)..(25): SEQ ID NO: 3360; WAN024CQO_at; Start 478; Stop 502
caaaatcctcgtgtgattggagtta

SEQ ID NO: 129257 - DNA, 25 bp, Artificial
  probe
  misc_feature (1)..(25): SEQ ID NO: 3360; WAN024CQO_at; Start 445; Stop 469
gcgttgactggtagtttgtatgcaa

SEQ ID NO: 129258 - DNA, 25 bp, Artificial
  probe
  misc_feature (1)..(25): SEQ ID NO: 3360; WAN024CQO_at; Start 894; Stop 918
tcaacaagcacgaaaagaattttta

SEQ ID NO: 129259 - DNA, 25 bp, Artificial
  probe
  misc_feature (1)..(25): SEQ ID NO: 3360; WAN024CQO_at; Start 131; Stop 155
gtatctatgtaaatggttcttcagg

SEQ ID NO: 129260 - DNA, 25 bp, Artificial
  probe
  misc_feature (1)..(25): SEQ ID NO: 3360; WAN024CQO_at; Start 792; Stop 816
tttgcgtctaaatgaaaaacttgat

SEQ ID NO: 129261 - DNA, 25 bp, Artificial
  probe
  misc_feature (1)..(25): SEQ ID NO: 3360; WAN024CQO_at; Start 877; Stop 901
caagcagcagaacttattcaacaag

SEQ ID NO: 129262 - DNA, 25 bp, Artificial
  probe
  misc_feature (1)..(25): SEQ ID NO: 3360; WAN024CQO_at; Start 759; Stop 783
taaggcaaatatgtatgctgtagca

SEQ ID NO: 129263 - DNA, 25 bp, Artificial
  probe
  misc_feature (1)..(25): SEQ ID NO: 3360; WAN024CQO_at; Start 249; Stop 273
tgcatgtaataacacgaaagatagt

SEQ ID NO: 129264 - DNA, 25 bp, Artificial
  probe
  misc_feature (1)..(25): SEQ ID NO: 3360; WAN024CQO_at; Start 617; Stop 641
cagaagctggtattggtggtactta

SEQ ID NO: 129265 - DNA, 25 bp, Artificial
  probe
  misc_feature (1)..(25): SEQ ID NO: 3360; WAN024CQO_at; Start 111; Stop 135
cattgacaaaggtgtaaaaggtatc

SEQ ID NO: 129266 - DNA, 25 bp, Artificial
  probe
  misc_feature (1)..(25): SEQ ID NO: 3360; WAN024CQO_at; Start 586; Stop 610
gaacaatatcttggtggtcgcttga

SEQ ID NO: 129267 - DNA, 25 bp, Artificial
  probe
  misc_feature (1)..(25): SEQ ID NO: 3360; WAN024CQO_at; Start 862; Stop 886
ttggaagttgcaaaacaagcagcag

SEQ ID NO: 129268 - DNA, 25 bp, Artificial
  probe
  misc_feature (1)..(25): SEQ ID NO: 3360; WAN024CQO_at; Start 572; Stop 596
tcaatggtccagatgaacaatatct

SEQ ID NO: 129269 - DNA, 25 bp, Artificial
  probe
  misc_feature (1)..(25): SEQ ID NO: 3360; WAN024CQO_at; Start 544; Stop 568
gctgcaggtggagaagattacattg

SEQ ID NO: 129270 - DNA, 25 bp, Artificial
  probe
  misc_feature (1)..(25): SEQ ID NO: 3360; WAN024CQO_at; Start 181; Stop 205
gatcgtaaacaaattattgaagctg

SEQ ID NO: 129271 - DNA, 25 bp, Artificial
  probe
  misc_feature (1)..(25): SEQ ID NO: 3360; WAN024CQO_at; Start 643; Stop 667
ggcgttatgccagatttgttcttga

SEQ ID NO: 129272 - DNA, 25 bp, Artificial
  probe
  misc_feature (1)..(25): SEQ ID NO: 3360; WAN024CQO_at; Start 49; Stop 73
gcttgctatgatgaaaatggtgaaa

SEQ ID NO: 129273 - DNA, 25 bp, Artificial
  probe
  misc_feature (1)..(25): SEQ ID NO: 7240; WAN024CQP_at; Start 125; Stop 149
catacaatttgcaaaaacattttcc

SEQ ID NO: 129274 - DNA, 25 bp, Artificial
  probe
  misc_feature (1)..(25): SEQ ID NO: 7240; WAN024CQP_at; Start 81; Stop 105
tgagtttcaaaaatatctcctggaa

SEQ ID NO: 129275 - DNA, 25 bp, Artificial
  probe
  misc_feature (1)..(25): SEQ ID NO: 7240; WAN024CQP_at; Start 48; Stop 72
tcaacaacaatatgaatatctaaat

SEQ ID NO: 129276 - DNA, 25 bp, Artificial
  probe
  misc_feature (1)..(25): SEQ ID NO: 7240; WAN024CQP_at; Start 98; Stop 122
tcctggaactccatcagctagataa

SEQ ID NO: 129277 - DNA, 25 bp, Artificial
  probe
  misc_feature (1)..(25): SEQ ID NO: 7240; WAN024CQP_at; Start 91; Stop 115
aaatatctcctggaactccatcagc

SEQ ID NO: 129278 - DNA, 25 bp, Artificial
  probe
  misc_feature (1)..(25): SEQ ID NO: 7240; WAN024CQP_at; Start 20; Stop 44
ggaagttactgccattttttcagta

SEQ ID NO: 129279 - DNA, 25 bp, Artificial
  probe
  misc_feature (1)..(25): SEQ ID NO: 7240; WAN024CQP_at; Start 103; Stop 127
gaactccatcagctagataagtcat

SEQ ID NO: 129280 - DNA, 25 bp, Artificial
  probe
  misc_feature (1)..(25): SEQ ID NO: 7240; WAN024CQP_at; Start 94; Stop 118
tatctcctggaactccatcagctag

SEQ ID NO: 129281 - DNA, 25 bp, Artificial
  probe
  misc_feature (1)..(25): SEQ ID NO: 7240; WAN024CQP_at; Start 88; Stop 112
caaaaatatctcctggaactccatc

SEQ ID NO: 129282 - DNA, 25 bp, Artificial
  probe
  misc_feature (1)..(25): SEQ ID NO: 7240; WAN024CQP_at; Start 66; Stop 90
tctaaatatttcttatgagtttcaa

SEQ ID NO: 129283 - DNA, 25 bp, Artificial
  probe
  misc_feature (1)..(25): SEQ ID NO: 7240; WAN024CQP_at; Start 99; Stop 123
cctggaactccatcagctagataag

SEQ ID NO: 129284 - DNA, 25 bp, Artificial
  probe
  misc_feature (1)..(25): SEQ ID NO: 7240; WAN024CQP_at; Start 180; Stop 204
tctgtcaaatttgtattttctaaaa

SEQ ID NO: 129285 - DNA, 25 bp, Artificial
  probe
  misc_feature (1)..(25): SEQ ID NO: 7240; WAN024CQP_at; Start 208; Stop 232
cacagacttttgaaaaatatttatt

SEQ ID NO: 129286 - DNA, 25 bp, Artificial
  probe
  misc_feature (1)..(25): SEQ ID NO: 7240; WAN024CQP_at; Start 101; Stop 125
tggaactccatcagctagataagtc

SEQ ID NO: 129287 - DNA, 25 bp, Artificial
  probe
  misc_feature (1)..(25): SEQ ID NO: 7240; WAN024CQP_at; Start 134; Stop 158
tgcaaaaacattttccccgtcaata

SEQ ID NO: 129288 - DNA, 25 bp, Artificial
  probe
  misc_feature (1)..(25): SEQ ID NO: 7240; WAN024CQP_at; Start 154; Stop 178
caatatcaatttttccatcaactaa

SEQ ID NO: 129289 - DNA, 25 bp, Artificial
  probe
  misc_feature (1)..(25): SEQ ID NO: 7240; WAN024CQP_at; Start 85; Stop 109
tttcaaaaatatctcctggaactcc

SEQ ID NO: 129290 - DNA, 25 bp, Artificial
  probe
  misc_feature (1)..(25): SEQ ID NO: 7240; WAN024CQP_at; Start 142; Stop 166
cattttccccgtcaatatcaatttt

SEQ ID NO: 129291 - DNA, 25 bp, Artificial
  probe
  misc_feature (1)..(25): SEQ ID NO: 7240; WAN024CQP_at; Start 196; Stop 220
tttctaaaaaatcacagacttttga

SEQ ID NO: 129292 - DNA, 25 bp, Artificial
  probe
  misc_feature (1)..(25): SEQ ID NO: 7240; WAN024CQP_at; Start 114; Stop 138
gctagataagtcatacaatttgcaa

SEQ ID NO: 129293 - DNA, 25 bp, Artificial
  probe
  misc_feature (1)..(25): SEQ ID NO: 7240; WAN024CQP_at; Start 168; Stop 192
ccatcaactaaatctgtcaaatttg

SEQ ID NO: 129294 - DNA, 25 bp, Artificial
  probe
  misc_feature (1)..(25): SEQ ID NO: 7240; WAN024CQP_at; Start 107; Stop 131
tccatcagctagataagtcatacaa

SEQ ID NO: 129295 - DNA, 25 bp, Artificial
  probe
  misc_feature (1)..(25): SEQ ID NO: 7240; WAN024CQP_at; Start 163; Stop 187
tttttccatcaactaaatctgtcaa

SEQ ID NO: 129296 - DNA, 25 bp, Artificial
  probe
  misc_feature (1)..(25): SEQ ID NO: 7240; WAN024CQP_at; Start 118; Stop 142
gataagtcatacaatttgcaaaaac

SEQ ID NO: 129297 - DNA, 25 bp, Artificial
  probe
  misc_feature (1)..(25): SEQ ID NO: 7240; WAN024CQP_at; Start 30; Stop 54
gccattttttcagtattttcaacaa

SEQ ID NO: 129298 - DNA, 25 bp, Artificial
  probe
  misc_feature (1)..(25): SEQ ID NO: 7240; WAN024CQP_at; Start 150; Stop 174
ccgtcaatatcaatttttccatcaa

SEQ ID NO: 129299 - DNA, 25 bp, Artificial
  probe
  misc_feature (1)..(25): SEQ ID NO: 7240; WAN024CQP_at; Start 96; Stop 120
tctcctggaactccatcagctagat

SEQ ID NO: 129300 - DNA, 25 bp, Artificial
  probe
  misc_feature (1)..(25): SEQ ID NO: 7240; WAN024CQP_at; Start 5; Stop 29
ctgggcacgaactggggaagttact

SEQ ID NO: 129301 - DNA, 25 bp, Artificial
  probe
  misc_feature (1)..(25): SEQ ID NO: 7240; WAN024CQP_at; Start 39; Stop 63
tcagtattttcaacaacaatatgaa

SEQ ID NO: 129302 - DNA, 25 bp, Artificial
  probe
  misc_feature (1)..(25): SEQ ID NO: 7240; WAN024CQP_at; Start 112; Stop 136
cagctagataagtcatacaatttgc

SEQ ID NO: 129303 - DNA, 25 bp, Artificial
  probe
  misc_feature (1)..(25): SEQ ID NO: 7240; WAN024CQP_at; Start 146; Stop 170
ttccccgtcaatatcaatttttcca

SEQ ID NO: 129304 - DNA, 25 bp, Artificial
  probe
  misc_feature (1)..(25): SEQ ID NO: 7240; WAN024CQP_at; Start 109; Stop 133
catcagctagataagtcatacaatt

SEQ ID NO: 129305 - DNA, 25 bp, Artificial
  probe
  misc_feature (1)..(25): SEQ ID NO: 7240; WAN024CQP_at; Start 79; Stop 103
tatgagtttcaaaaatatctcctgg

SEQ ID NO: 129306 - DNA, 25 bp, Artificial
  probe
  misc_feature (1)..(25): SEQ ID NO: 7240; WAN024CQP_at; Start 105; Stop 129
actccatcagctagataagtcatac

SEQ ID NO: 129307 - DNA, 25 bp, Artificial
  probe
  misc_feature (1)..(25): SEQ ID NO: 1810; WAN024CQQ_at; Start 169; Stop 193
ggagttccaggagatatttttgaaa

SEQ ID NO: 129308 - DNA, 25 bp, Artificial
  probe
  misc_feature (1)..(25): SEQ ID NO: 1810; WAN024CQQ_at; Start 271; Stop 295
cagtcacgtgtaccttttagcgaag

SEQ ID NO: 129309 - DNA, 25 bp, Artificial
  probe
  misc_feature (1)..(25): SEQ ID NO: 1810; WAN024CQQ_at; Start 157; Stop 181
tatctagctgatggagttccaggag

SEQ ID NO: 129310 - DNA, 25 bp, Artificial
  probe
  misc_feature (1)..(25): SEQ ID NO: 1810; WAN024CQQ_at; Start 178; Stop 202
ggagatatttttgaaactcataaga

SEQ ID NO: 129311 - DNA, 25 bp, Artificial
  probe
  misc_feature (1)..(25): SEQ ID NO: 1810; WAN024CQQ_at; Start 373; Stop 397
gaagaagatcttcaccaaccaaaga

SEQ ID NO: 129312 - DNA, 25 bp, Artificial
  probe
  misc_feature (1)..(25): SEQ ID NO: 1810; WAN024CQQ_at; Start 153; Stop 177
gacttatctagctgatggagttcca

SEQ ID NO: 129313 - DNA, 25 bp, Artificial
  probe
  misc_feature (1)..(25): SEQ ID NO: 1810; WAN024CQQ_at; Start 284; Stop 308
cttttagcgaagagaaggatattgc

SEQ ID NO: 129314 - DNA, 25 bp, Artificial
  probe
  misc_feature (1)..(25): SEQ ID NO: 1810; WAN024CQQ_at; Start 345; Stop 369
gcttccagggaatatgttggtgact

SEQ ID NO: 129315 - DNA, 25 bp, Artificial
  probe
  misc_feature (1)..(25): SEQ ID NO: 1810; WAN024CQQ_at; Start 129; Stop 153
ggaaaatgtttttgcaaattgtatg

SEQ ID NO: 129316 - DNA, 25 bp, Artificial
  probe
  misc_feature (1)..(25): SEQ ID NO: 1810; WAN024CQQ_at; Start 242; Stop 266
aaatggcagtaacttccccagttcg

SEQ ID NO: 129317 - DNA, 25 bp, Artificial
  probe
  misc_feature (1)..(25): SEQ ID NO: 1810; WAN024CQQ_at; Start 105; Stop 129
tgatggaaaaattgatattgacggg

SEQ ID NO: 129318 - DNA, 25 bp, Artificial
  probe
  misc_feature (1)..(25): SEQ ID NO: 1810; WAN024CQQ_at; Start 388; Stop 412
caaccaaagattcattgcaatgatg

SEQ ID NO: 129319 - DNA, 25 bp, Artificial
  probe
  misc_feature (1)..(25): SEQ ID NO: 1810; WAN024CQQ_at; Start 381; Stop 405
tcttcaccaaccaaagattcattgc

SEQ ID NO: 129320 - DNA, 25 bp, Artificial
  probe
  misc_feature (1)..(25): SEQ ID NO: 1810; WAN024CQQ_at; Start 161; Stop 185
tagctgatggagttccaggagatat

SEQ ID NO: 129321 - DNA, 25 bp, Artificial
  probe
  misc_feature (1)..(25): SEQ ID NO: 1810; WAN024CQQ_at; Start 92; Stop 116
tgacagatttagttgatggaaaaat

SEQ ID NO: 129322 - DNA, 25 bp, Artificial
  probe
  misc_feature (1)..(25): SEQ ID NO: 1810; WAN024CQQ_at; Start 316; Stop 340
gatagcaaagactatcaaattgttg

SEQ ID NO: 129323 - DNA, 25 bp, Artificial
  probe
  misc_feature (1)..(25): SEQ ID NO: 1810; WAN024CQQ_at; Start 288; Stop 312
tagcgaagagaaggatattgctttt

SEQ ID NO: 129324 - DNA, 25 bp, Artificial
  probe
  misc_feature (1)..(25): SEQ ID NO: 1810; WAN024CQQ_at; Start 396; Stop 420
gattcattgcaatgatgaaactgtt

SEQ ID NO: 129325 - DNA, 25 bp, Artificial
  probe
  misc_feature (1)..(25): SEQ ID NO: 1810; WAN024CQQ_at; Start 58; Stop 82
tcaaaagtctgtgattttttagaaa

SEQ ID NO: 129326 - DNA, 25 bp, Artificial
  probe
  misc_feature (1)..(25): SEQ ID NO: 1810; WAN024CQQ_at; Start 340; Stop 364
gaattgcttccagggaatatgttgg

SEQ ID NO: 129327 - DNA, 25 bp, Artificial
  probe
  misc_feature (1)..(25): SEQ ID NO: 1810; WAN024CQQ_at; Start 142; Stop 166
gcaaattgtatgacttatctagctg

SEQ ID NO: 129328 - DNA, 25 bp, Artificial
  probe
  misc_feature (1)..(25): SEQ ID NO: 1810; WAN024CQQ_at; Start 245; Stop 269
tggcagtaacttccccagttcgtgc

SEQ ID NO: 129329 - DNA, 25 bp, Artificial
  probe
  misc_feature (1)..(25): SEQ ID NO: 1810; WAN024CQQ_at; Start 331; Stop 355
caaattgttgaattgcttccaggga

SEQ ID NO: 129330 - DNA, 25 bp, Artificial
  probe
  misc_feature (1)..(25): SEQ ID NO: 1810; WAN024CQQ_at; Start 187; Stop 211
tttgaaactcataagaaatatttag

SEQ ID NO: 129331 - DNA, 25 bp, Artificial
  probe
  misc_feature (1)..(25): SEQ ID NO: 1810; WAN024CQQ_at; Start 359; Stop 383
tgttggtgacttttgaagaagatct

SEQ ID NO: 129332 - DNA, 25 bp, Artificial
  probe
  misc_feature (1)..(25): SEQ ID NO: 1810; WAN024CQQ_at; Start 74; Stop 98
ttttagaaaatacaaatttgacaga

SEQ ID NO: 129333 - DNA, 25 bp, Artificial
  probe
  misc_feature (1)..(25): SEQ ID NO: 1810; WAN024CQQ_at; Start 86; Stop 110
caaatttgacagatttagttgatgg

SEQ ID NO: 129334 - DNA, 25 bp, Artificial
  probe
  misc_feature (1)..(25): SEQ ID NO: 1810; WAN024CQQ_at; Start 275; Stop 299
cacgtgtaccttttagcgaagagaa

SEQ ID NO: 129335 - DNA, 25 bp, Artificial
  probe
  misc_feature (1)..(25): SEQ ID NO: 1810; WAN024CQQ_at; Start 209; Stop 233
tagatattcatattgttgttgaaaa

SEQ ID NO: 129336 - DNA, 25 bp, Artificial
  probe
  misc_feature (1)..(25): SEQ ID NO: 1810; WAN024CQQ_at; Start 307; Stop 331
gctttttacgatagcaaagactatc

SEQ ID NO: 129337 - DNA, 25 bp, Artificial
  probe
  misc_feature (1)..(25): SEQ ID NO: 1810; WAN024CQQ_at; Start 148; Stop 172
tgtatgacttatctagctgatggag

SEQ ID NO: 129338 - DNA, 25 bp, Artificial
  probe
  misc_feature (1)..(25): SEQ ID NO: 1810; WAN024CQQ_at; Start 404; Stop 428
gcaatgatgaaactgttaaaaaact

SEQ ID NO: 129339 - DNA, 25 bp, Artificial
  probe
  misc_feature (1)..(25): SEQ ID NO: 1810; WAN024CQQ_at; Start 350; Stop 374
cagggaatatgttggtgacttttga

SEQ ID NO: 129340 - DNA, 25 bp, Artificial
  probe
  misc_feature (1)..(25): SEQ ID NO: 1810; WAN024CQQ_at; Start 297; Stop 321
gaaggatattgctttttacgatagc

SEQ ID NO: 129341 - DNA, 25 bp, Artificial
  probe
  misc_feature (1)..(25): SEQ ID NO: 7032; WAN024CQR_at; Start 71; Stop 95
tgactgaatctgctactactgcaac

SEQ ID NO: 129342 - DNA, 25 bp, Artificial
  probe
  misc_feature (1)..(25): SEQ ID NO: 7032; WAN024CQR_at; Start 196; Stop 220
aactcaccattgtctctaaggaaca

SEQ ID NO: 129343 - DNA, 25 bp, Artificial
  probe
  misc_feature (1)..(25): SEQ ID NO: 7032; WAN024CQR_at; Start 107; Stop 131
cagcctcttgtttgtacttacccca

SEQ ID NO: 129344 - DNA, 25 bp, Artificial
  probe
  misc_feature (1)..(25): SEQ ID NO: 7032; WAN024CQR_at; Start 27; Stop 51
ttctactacttttgtaccatttgcg

SEQ ID NO: 129345 - DNA, 25 bp, Artificial
  probe
  misc_feature (1)..(25): SEQ ID NO: 7032; WAN024CQR_at; Start 203; Stop 227
cattgtctctaaggaacacatctac

SEQ ID NO: 129346 - DNA, 25 bp, Artificial
  probe
  misc_feature (1)..(25): SEQ ID NO: 7032; WAN024CQR_at; Start 207; Stop 231
gtctctaaggaacacatctacataa

SEQ ID NO: 129347 - DNA, 25 bp, Artificial
  probe
  misc_feature (1)..(25): SEQ ID NO: 7032; WAN024CQR_at; Start 43; Stop 67
ccatttgcgtataaagaatatgttt

SEQ ID NO: 129348 - DNA, 25 bp, Artificial
  probe
  misc_feature (1)..(25): SEQ ID NO: 7032; WAN024CQR_at; Start 90; Stop 114
tgcaacagtgttagtcacagcctct

SEQ ID NO: 129349 - DNA, 25 bp, Artificial
  probe
  misc_feature (1)..(25): SEQ ID NO: 7032; WAN024CQR_at; Start 82; Stop 106
gctactactgcaacagtgttagtca

SEQ ID NO: 129350 - DNA, 25 bp, Artificial
  probe
  misc_feature (1)..(25): SEQ ID NO: 7032; WAN024CQR_at; Start 121; Stop 145
tacttaccccaaactgaagcaggtc

SEQ ID NO: 129351 - DNA, 25 bp, Artificial
  probe
  misc_feature (1)..(25): SEQ ID NO: 7032; WAN024CQR_at; Start 96; Stop 120
agtgttagtcacagcctcttgtttg

SEQ ID NO: 129352 - DNA, 25 bp, Artificial
  probe
  misc_feature (1)..(25): SEQ ID NO: 7032; WAN024CQR_at; Start 39; Stop 63
tgtaccatttgcgtataaagaatat

SEQ ID NO: 129353 - DNA, 25 bp, Artificial
  probe
  misc_feature (1)..(25): SEQ ID NO: 7032; WAN024CQR_at; Start 79; Stop 103
tctgctactactgcaacagtgttag

SEQ ID NO: 129354 - DNA, 25 bp, Artificial
  probe
  misc_feature (1)..(25): SEQ ID NO: 7032; WAN024CQR_at; Start 199; Stop 223
tcaccattgtctctaaggaacacat

SEQ ID NO: 129355 - DNA, 25 bp, Artificial
  probe
  misc_feature (1)..(25): SEQ ID NO: 7032; WAN024CQR_at; Start 146; Stop 170
tggatactaggttatttttattgga

SEQ ID NO: 129356 - DNA, 25 bp, Artificial
  probe
  misc_feature (1)..(25): SEQ ID NO: 7032; WAN024CQR_at; Start 164; Stop 188
tattggaagaagtatcacgcgcttc

SEQ ID NO: 129357 - DNA, 25 bp, Artificial
  probe
  misc_feature (1)..(25): SEQ ID NO: 7032; WAN024CQR_at; Start 136; Stop 160
gaagcaggtctggatactaggttat

SEQ ID NO: 129358 - DNA, 25 bp, Artificial
  probe
  misc_feature (1)..(25): SEQ ID NO: 7032; WAN024CQR_at; Start 119; Stop 143
tgtacttaccccaaactgaagcagg

SEQ ID NO: 129359 - DNA, 25 bp, Artificial
  probe
  misc_feature (1)..(25): SEQ ID NO: 7032; WAN024CQR_at; Start 68; Stop 92
ttttgactgaatctgctactactgc

SEQ ID NO: 129360 - DNA, 25 bp, Artificial
  probe
  misc_feature (1)..(25): SEQ ID NO: 7032; WAN024CQR_at; Start 1; Stop 25
atgtttaggaaattatccactttct

SEQ ID NO: 129361 - DNA, 25 bp, Artificial
  probe
  misc_feature (1)..(25): SEQ ID NO: 7032; WAN024CQR_at; Start 193; Stop 217
cccaactcaccattgtctctaagga

SEQ ID NO: 129362 - DNA, 25 bp, Artificial
  probe
  misc_feature (1)..(25): SEQ ID NO: 7032; WAN024CQR_at; Start 127; Stop 151
ccccaaactgaagcaggtctggata

SEQ ID NO: 129363 - DNA, 25 bp, Artificial
  probe
  misc_feature (1)..(25): SEQ ID NO: 7032; WAN024CQR_at; Start 161; Stop 185
ttttattggaagaagtatcacgcgc

SEQ ID NO: 129364 - DNA, 25 bp, Artificial
  probe
  misc_feature (1)..(25): SEQ ID NO: 7032; WAN024CQR_at; Start 87; Stop 111
tactgcaacagtgttagtcacagcc

SEQ ID NO: 129365 - DNA, 25 bp, Artificial
  probe
  misc_feature (1)..(25): SEQ ID NO: 7032; WAN024CQR_at; Start 124; Stop 148
ttaccccaaactgaagcaggtctgg

SEQ ID NO: 129366 - DNA, 25 bp, Artificial
  probe
  misc_feature (1)..(25): SEQ ID NO: 7032; WAN024CQR_at; Start 132; Stop 156
aactgaagcaggtctggatactagg

SEQ ID NO: 129367 - DNA, 25 bp, Artificial
  probe
  misc_feature (1)..(25): SEQ ID NO: 7032; WAN024CQR_at; Start 139; Stop 163
gcaggtctggatactaggttatttt

SEQ ID NO: 129368 - DNA, 25 bp, Artificial
  probe
  misc_feature (1)..(25): SEQ ID NO: 7032; WAN024CQR_at; Start 169; Stop 193
gaagaagtatcacgcgcttccatcc

SEQ ID NO: 129369 - DNA, 25 bp, Artificial
  probe
  misc_feature (1)..(25): SEQ ID NO: 7032; WAN024CQR_at; Start 93; Stop 117
aacagtgttagtcacagcctcttgt

SEQ ID NO: 129370 - DNA, 25 bp, Artificial
  probe
  misc_feature (1)..(25): SEQ ID NO: 7032; WAN024CQR_at; Start 30; Stop 54
tactacttttgtaccatttgcgtat

SEQ ID NO: 129371 - DNA, 25 bp, Artificial
  probe
  misc_feature (1)..(25): SEQ ID NO: 7032; WAN024CQR_at; Start 130; Stop 154
caaactgaagcaggtctggatacta

SEQ ID NO: 129372 - DNA, 25 bp, Artificial
  probe
  misc_feature (1)..(25): SEQ ID NO: 7032; WAN024CQR_at; Start 99; Stop 123
gttagtcacagcctcttgtttgtac

SEQ ID NO: 129373 - DNA, 25 bp, Artificial
  probe
  misc_feature (1)..(25): SEQ ID NO: 7032; WAN024CQR_at; Start 12; Stop 36
attatccactttcttttctactact

SEQ ID NO: 129374 - DNA, 25 bp, Artificial
  probe
  misc_feature (1)..(25): SEQ ID NO: 7032; WAN024CQR_at; Start 75; Stop 99
tgaatctgctactactgcaacagtg

SEQ ID NO: 129375 - DNA, 25 bp, Artificial
  probe
  misc_feature (1)..(25): SEQ ID NO: 7668; WAN024CQS_at; Start 140; Stop 164
taacagtagtttcaactgttcgagg

SEQ ID NO: 129376 - DNA, 25 bp, Artificial
  probe
  misc_feature (1)..(25): SEQ ID NO: 7668; WAN024CQS_at; Start 240; Stop 264
caccaactttggtgttgatacttca

SEQ ID NO: 129377 - DNA, 25 bp, Artificial
  probe
  misc_feature (1)..(25): SEQ ID NO: 7668; WAN024CQS_at; Start 195; Stop 219
tgtaggttgtacttccgaaatcgga

SEQ ID NO: 129378 - DNA, 25 bp, Artificial
  probe
  misc_feature (1)..(25): SEQ ID NO: 7668; WAN024CQS_at; Start 228; Stop 252
tgcaacaggttgcaccaactttggt

SEQ ID NO: 129379 - DNA, 25 bp, Artificial
  probe
  misc_feature (1)..(25): SEQ ID NO: 7668; WAN024CQS_at; Start 243; Stop 267
caactttggtgttgatacttcagaa

SEQ ID NO: 129380 - DNA, 25 bp, Artificial
  probe
  misc_feature (1)..(25): SEQ ID NO: 7668; WAN024CQS_at; Start 7; Stop 31
ttaatcactacagtaaagtcaccgc

SEQ ID NO: 129381 - DNA, 25 bp, Artificial
  probe
  misc_feature (1)..(25): SEQ ID NO: 7668; WAN024CQS_at; Start 115; Stop 139
tcttccgctgtagaagatggatcct

SEQ ID NO: 129382 - DNA, 25 bp, Artificial
  probe
  misc_feature (1)..(25): SEQ ID NO: 7668; WAN024CQS_at; Start 233; Stop 257
caggttgcaccaactttggtgttga

SEQ ID NO: 129383 - DNA, 25 bp, Artificial
  probe
  misc_feature (1)..(25): SEQ ID NO: 7668; WAN024CQS_at; Start 170; Stop 194
cagtaacttccgaagagttatccga

SEQ ID NO: 129384 - DNA, 25 bp, Artificial
  probe
  misc_feature (1)..(25): SEQ ID NO: 7668; WAN024CQS_at; Start 213; Stop 237
aatcggagtcgttggtgcaacaggt

SEQ ID NO: 129385 - DNA, 25 bp, Artificial
  probe
  misc_feature (1)..(25): SEQ ID NO: 7668; WAN024CQS_at; Start 125; Stop 149
tagaagatggatccttaacagtagt

SEQ ID NO: 129386 - DNA, 25 bp, Artificial
  probe
  misc_feature (1)..(25): SEQ ID NO: 7668; WAN024CQS_at; Start 105; Stop 129
gacaggagtttcttccgctgtagaa

SEQ ID NO: 129387 - DNA, 25 bp, Artificial
  probe
  misc_feature (1)..(25): SEQ ID NO: 7668; WAN024CQS_at; Start 188; Stop 212
tatccgatgtaggttgtacttccga

SEQ ID NO: 129388 - DNA, 25 bp, Artificial
  probe
  misc_feature (1)..(25): SEQ ID NO: 7668; WAN024CQS_at; Start 208; Stop 232
tccgaaatcggagtcgttggtgcaa

SEQ ID NO: 129389 - DNA, 25 bp, Artificial
  probe
  misc_feature (1)..(25): SEQ ID NO: 7668; WAN024CQS_at; Start 22; Stop 46
aagtcaccgctagtaaatttatcct

SEQ ID NO: 129390 - DNA, 25 bp, Artificial
  probe
  misc_feature (1)..(25): SEQ ID NO: 7668; WAN024CQS_at; Start 130; Stop 154
gatggatccttaacagtagtttcaa

SEQ ID NO: 129391 - DNA, 25 bp, Artificial
  probe
  misc_feature (1)..(25): SEQ ID NO: 7668; WAN024CQS_at; Start 107; Stop 131
caggagtttcttccgctgtagaaga

SEQ ID NO: 129392 - DNA, 25 bp, Artificial
  probe
  misc_feature (1)..(25): SEQ ID NO: 7668; WAN024CQS_at; Start 98; Stop 122
tttctaagacaggagtttcttccgc

SEQ ID NO: 129393 - DNA, 25 bp, Artificial
  probe
  misc_feature (1)..(25): SEQ ID NO: 7668; WAN024CQS_at; Start 120; Stop 144
cgctgtagaagatggatccttaaca

SEQ ID NO: 129394 - DNA, 25 bp, Artificial
  probe
  misc_feature (1)..(25): SEQ ID NO: 7668; WAN024CQS_at; Start 133; Stop 157
ggatccttaacagtagtttcaactg

SEQ ID NO: 129395 - DNA, 25 bp, Artificial
  probe
  misc_feature (1)..(25): SEQ ID NO: 7668; WAN024CQS_at; Start 152; Stop 176
caactgttcgaggttgtacagtaac

SEQ ID NO: 129396 - DNA, 25 bp, Artificial
  probe
  misc_feature (1)..(25): SEQ ID NO: 7668; WAN024CQS_at; Start 15; Stop 39
tacagtaaagtcaccgctagtaaat

SEQ ID NO: 129397 - DNA, 25 bp, Artificial
  probe
  misc_feature (1)..(25): SEQ ID NO: 7668; WAN024CQS_at; Start 202; Stop 226
tgtacttccgaaatcggagtcgttg

SEQ ID NO: 129398 - DNA, 25 bp, Artificial
  probe
  misc_feature (1)..(25): SEQ ID NO: 7668; WAN024CQS_at; Start 11; Stop 35
tcactacagtaaagtcaccgctagt

SEQ ID NO: 129399 - DNA, 25 bp, Artificial
  probe
  misc_feature (1)..(25): SEQ ID NO: 7668; WAN024CQS_at; Start 146; Stop 170
tagtttcaactgttcgaggttgtac

SEQ ID NO: 129400 - DNA, 25 bp, Artificial
  probe
  misc_feature (1)..(25): SEQ ID NO: 7668; WAN024CQS_at; Start 211; Stop 235
gaaatcggagtcgttggtgcaacag

SEQ ID NO: 129401 - DNA, 25 bp, Artificial
  probe
  misc_feature (1)..(25): SEQ ID NO: 7668; WAN024CQS_at; Start 191; Stop 215
ccgatgtaggttgtacttccgaaat

SEQ ID NO: 129402 - DNA, 25 bp, Artificial
  probe
  misc_feature (1)..(25): SEQ ID NO: 7668; WAN024CQS_at; Start 161; Stop 185
gaggttgtacagtaacttccgaaga

SEQ ID NO: 129403 - DNA, 25 bp, Artificial
  probe
  misc_feature (1)..(25): SEQ ID NO: 7668; WAN024CQS_at; Start 156; Stop 180
tgttcgaggttgtacagtaacttcc

SEQ ID NO: 129404 - DNA, 25 bp, Artificial
  probe
  misc_feature (1)..(25): SEQ ID NO: 7668; WAN024CQS_at; Start 258; Stop 282
tacttcagaagtttcagtctcctga

SEQ ID NO: 129405 - DNA, 25 bp, Artificial
  probe
  misc_feature (1)..(25): SEQ ID NO: 7668; WAN024CQS_at; Start 25; Stop 49
tcaccgctagtaaatttatccttta

SEQ ID NO: 129406 - DNA, 25 bp, Artificial
  probe
  misc_feature (1)..(25): SEQ ID NO: 7668; WAN024CQS_at; Start 176; Stop 200
cttccgaagagttatccgatgtagg

SEQ ID NO: 129407 - DNA, 25 bp, Artificial
  probe
  misc_feature (1)..(25): SEQ ID NO: 7668; WAN024CQS_at; Start 100; Stop 124
tctaagacaggagtttcttccgctg

SEQ ID NO: 129408 - DNA, 25 bp, Artificial
  probe
  misc_feature (1)..(25): SEQ ID NO: 7668; WAN024CQS_at; Start 179; Stop 203
ccgaagagttatccgatgtaggttg

SEQ ID NO: 129409 - DNA, 25 bp, Artificial
  probe
  misc_feature (1)..(25): SEQ ID NO: 603; WAN024CQT_at; Start 1727; Stop 1751
cacttccttctagttggtcagcaga

SEQ ID NO: 129410 - DNA, 25 bp, Artificial
  probe
  misc_feature (1)..(25): SEQ ID NO: 603; WAN024CQT_at; Start 439; Stop 463
gatgtgttccttagagacaatggtg

SEQ ID NO: 129411 - DNA, 25 bp, Artificial
  probe
  misc_feature (1)..(25): SEQ ID NO: 603; WAN024CQT_at; Start 222; Stop 246
taaggatccatcttctacagcggaa

SEQ ID NO: 129412 - DNA, 25 bp, Artificial
  probe
  misc_feature (1)..(25): SEQ ID NO: 603; WAN024CQT_at; Start 66; Stop 90
taactcagttgcagctcaggagact

SEQ ID NO: 129413 - DNA, 25 bp, Artificial
  probe
  misc_feature (1)..(25): SEQ ID NO: 603; WAN024CQT_at; Start 1513; Stop 1537
tatatttctagcaatgatcatggcg

SEQ ID NO: 129414 - DNA, 25 bp, Artificial
  probe
  misc_feature (1)..(25): SEQ ID NO: 603; WAN024CQT_at; Start 383; Stop 407
tacaagctctgtttggaatatctaa

SEQ ID NO: 129415 - DNA, 25 bp, Artificial
  probe
  misc_feature (1)..(25): SEQ ID NO: 603; WAN024CQT_at; Start 2030; Stop 2054
caattgattggcgttatcatcacga

SEQ ID NO: 129416 - DNA, 25 bp, Artificial
  probe
  misc_feature (1)..(25): SEQ ID NO: 603; WAN024CQT_at; Start 184; Stop 208
gaagttactgtacaacctcgaacag

SEQ ID NO: 129417 - DNA, 25 bp, Artificial
  probe
  misc_feature (1)..(25): SEQ ID NO: 603; WAN024CQT_at; Start 1769; Stop 1793
tgagtccaggagtaattcaagcata

SEQ ID NO: 129418 - DNA, 25 bp, Artificial
  probe
  misc_feature (1)..(25): SEQ ID NO: 603; WAN024CQT_at; Start 1306; Stop 1330
tacgacgatcgtaccaacagaccaa

SEQ ID NO: 129419 - DNA, 25 bp, Artificial
  probe
  misc_feature (1)..(25): SEQ ID NO: 603; WAN024CQT_at; Start 1562; Stop 1586
tacctcctataatgggacttaatcg

SEQ ID NO: 129420 - DNA, 25 bp, Artificial
  probe
  misc_feature (1)..(25): SEQ ID NO: 603; WAN024CQT_at; Start 1606; Stop 1630
cctggacgtggaatcattgaaagct

SEQ ID NO: 129421 - DNA, 25 bp, Artificial
  probe
  misc_feature (1)..(25): SEQ ID NO: 603; WAN024CQT_at; Start 1944; Stop 1968
aaaggctgtcattttaagtactcca

SEQ ID NO: 129422 - DNA, 25 bp, Artificial
  probe
  misc_feature (1)..(25): SEQ ID NO: 603; WAN024CQT_at; Start 1487; Stop 1511
aagtagtgccaacgaactatattgc

SEQ ID NO: 129423 - DNA, 25 bp, Artificial
  probe
  misc_feature (1)..(25): SEQ ID NO: 603; WAN024CQT_at; Start 798; Stop 822
gatgacaacaaacgctgttactgga

SEQ ID NO: 129424 - DNA, 25 bp, Artificial
  probe
  misc_feature (1)..(25): SEQ ID NO: 603; WAN024CQT_at; Start 571; Stop 595
gcagtagtagcagattcagtcaaaa

SEQ ID NO: 129425 - DNA, 25 bp, Artificial
  probe
  misc_feature (1)..(25): SEQ ID NO: 603; WAN024CQT_at; Start 1624; Stop 1648
gaaagctcaactggacgtattctta

SEQ ID NO: 129426 - DNA, 25 bp, Artificial
  probe
  misc_feature (1)..(25): SEQ ID NO: 603; WAN024CQT_at; Start 702; Stop 726
agtgaaacgtgcaggaaaaacggcg

SEQ ID NO: 129427 - DNA, 25 bp, Artificial
  probe
  misc_feature (1)..(25): SEQ ID NO: 603; WAN024CQT_at; Start 478; Stop 502
gcgcgtgatacttcttccaataaaa

SEQ ID NO: 129428 - DNA, 25 bp, Artificial
  probe
  misc_feature (1)..(25): SEQ ID NO: 603; WAN024CQT_at; Start 1973; Stop 1997
ccacaaatggtcgtaaacacggaca

SEQ ID NO: 129429 - DNA, 25 bp, Artificial
  probe
  misc_feature (1)..(25): SEQ ID NO: 603; WAN024CQT_at; Start 1421; Stop 1445
aaaagactgaatatcgtaatgggac

SEQ ID NO: 129430 - DNA, 25 bp, Artificial
  probe
  misc_feature (1)..(25): SEQ ID NO: 603; WAN024CQT_at; Start 82; Stop 106
caggagactgaaacttctgaagtat

SEQ ID NO: 129431 - DNA, 25 bp, Artificial
  probe
  misc_feature (1)..(25): SEQ ID NO: 603; WAN024CQT_at; Start 924; Stop 948
tcgttacggtggaactcatgatttc

SEQ ID NO: 129432 - DNA, 25 bp, Artificial
  probe
  misc_feature (1)..(25): SEQ ID NO: 603; WAN024CQT_at; Start 834; Stop 858
tacggctaatgatacaacaggttct

SEQ ID NO: 129433 - DNA, 25 bp, Artificial
  probe
  misc_feature (1)..(25): SEQ ID NO: 603; WAN024CQT_at; Start 1530; Stop 1554
tcatggcgaatcttggtctgcacca

SEQ ID NO: 129434 - DNA, 25 bp, Artificial
  probe
  misc_feature (1)..(25): SEQ ID NO: 603; WAN024CQT_at; Start 1170; Stop 1194
gcctgctggagtaagttttagagaa

SEQ ID NO: 129435 - DNA, 25 bp, Artificial
  probe
  misc_feature (1)..(25): SEQ ID NO: 603; WAN024CQT_at; Start 1958; Stop 1982
taagtactccaaactccacaaatgg

SEQ ID NO: 129436 - DNA, 25 bp, Artificial
  probe
  misc_feature (1)..(25): SEQ ID NO: 603; WAN024CQT_at; Start 1647; Stop 1671
tattccgtcttacactggtaaagag

SEQ ID NO: 129437 - DNA, 25 bp, Artificial
  probe
  misc_feature (1)..(25): SEQ ID NO: 603; WAN024CQT_at; Start 1741; Stop 1765
tggtcagcagaagcacaatttgtag

SEQ ID NO: 129438 - DNA, 25 bp, Artificial
  probe
  misc_feature (1)..(25): SEQ ID NO: 603; WAN024CQT_at; Start 1072; Stop 1096
ggtggacgtgacttacaaatcagcg

SEQ ID NO: 129439 - DNA, 25 bp, Artificial
  probe
  misc_feature (1)..(25): SEQ ID NO: 603; WAN024CQT_at; Start 881; Stop 905
tgtatacttttagcaatggtcgggt

SEQ ID NO: 129440 - DNA, 25 bp, Artificial
  probe
  misc_feature (1)..(25): SEQ ID NO: 603; WAN024CQT_at; Start 1087; Stop 1111
caaatcagcggtggtgcaacctata

SEQ ID NO: 129441 - DNA, 25 bp, Artificial
  probe
  misc_feature (1)..(25): SEQ ID NO: 603; WAN024CQT_at; Start 908; Stop 932
tttcaagcattgacgctcgttacgg

SEQ ID NO: 129442 - DNA, 25 bp, Artificial
  probe
  misc_feature (1)..(25): SEQ ID NO: 603; WAN024CQT_at; Start 235; Stop 259
tctacagcggaagaaactcctgtct

SEQ ID NO: 129443 - DNA, 25 bp, Artificial
  probe
  misc_feature (1)..(25): SEQ ID NO: 7335; WAN024CQU_at; Start 99; Stop 123
taagcagaccccataccgcttaatc

SEQ ID NO: 129444 - DNA, 25 bp, Artificial
  probe
  misc_feature (1)..(25): SEQ ID NO: 7335; WAN024CQU_at; Start 140; Stop 164
tcccaatgcagcgaagaaagctcct

SEQ ID NO: 129445 - DNA, 25 bp, Artificial
  probe
  misc_feature (1)..(25): SEQ ID NO: 7335; WAN024CQU_at; Start 71; Stop 95
ggcagattgcccagccttaccaact

SEQ ID NO: 129446 - DNA, 25 bp, Artificial
  probe
  misc_feature (1)..(25): SEQ ID NO: 7335; WAN024CQU_at; Start 82; Stop 106
cagccttaccaactccataagcaga

SEQ ID NO: 129447 - DNA, 25 bp, Artificial
  probe
  misc_feature (1)..(25): SEQ ID NO: 7335; WAN024CQU_at; Start 2; Stop 26
tgttccgggcaataattgcaatatc

SEQ ID NO: 129448 - DNA, 25 bp, Artificial
  probe
  misc_feature (1)..(25): SEQ ID NO: 7335; WAN024CQU_at; Start 152; Stop 176
gaagaaagctcctccataggttgaa

SEQ ID NO: 129449 - DNA, 25 bp, Artificial
  probe
  misc_feature (1)..(25): SEQ ID NO: 7335; WAN024CQU_at; Start 165; Stop 189
ccataggttgaaaaataagttgcta

SEQ ID NO: 129450 - DNA, 25 bp, Artificial
  probe
  misc_feature (1)..(25): SEQ ID NO: 7335; WAN024CQU_at; Start 9; Stop 33
ggcaataattgcaatatcaaagctg

SEQ ID NO: 129451 - DNA, 25 bp, Artificial
  probe
  misc_feature (1)..(25): SEQ ID NO: 7335; WAN024CQU_at; Start 62; Stop 86
taaagctgcggcagattgcccagcc

SEQ ID NO: 129452 - DNA, 25 bp, Artificial
  probe
  misc_feature (1)..(25): SEQ ID NO: 7335; WAN024CQU_at; Start 25; Stop 49
tcaaagctgaggcaaacttttcagg

SEQ ID NO: 129453 - DNA, 25 bp, Artificial
  probe
  misc_feature (1)..(25): SEQ ID NO: 7335; WAN024CQU_at; Start 159; Stop 183
gctcctccataggttgaaaaataag

SEQ ID NO: 129454 - DNA, 25 bp, Artificial
  probe
  misc_feature (1)..(25): SEQ ID NO: 7335; WAN024CQU_at; Start 150; Stop 174
gcgaagaaagctcctccataggttg

SEQ ID NO: 129455 - DNA, 25 bp, Artificial
  probe
  misc_feature (1)..(25): SEQ ID NO: 7335; WAN024CQU_at; Start 18; Stop 42
tgcaatatcaaagctgaggcaaact

SEQ ID NO: 129456 - DNA, 25 bp, Artificial
  probe
  misc_feature (1)..(25): SEQ ID NO: 7335; WAN024CQU_at; Start 155; Stop 179
gaaagctcctccataggttgaaaaa

SEQ ID NO: 129457 - DNA, 25 bp, Artificial
  probe
  misc_feature (1)..(25): SEQ ID NO: 7335; WAN024CQU_at; Start 131; Stop 155
caatacaattcccaatgcagcgaag

SEQ ID NO: 129458 - DNA, 25 bp, Artificial
  probe
  misc_feature (1)..(25): SEQ ID NO: 7335; WAN024CQU_at; Start 189; Stop 213
aaatgttccattatatatatcctcc

SEQ ID NO: 129459 - DNA, 25 bp, Artificial
  probe
  misc_feature (1)..(25): SEQ ID NO: 7335; WAN024CQU_at; Start 43; Stop 67
tttcaggctgttctttcagtaaagc

SEQ ID NO: 129460 - DNA, 25 bp, Artificial
  probe
  misc_feature (1)..(25): SEQ ID NO: 7335; WAN024CQU_at; Start 14; Stop 38
taattgcaatatcaaagctgaggca

SEQ ID NO: 129461 - DNA, 25 bp, Artificial
  probe
  misc_feature (1)..(25): SEQ ID NO: 7335; WAN024CQU_at; Start 143; Stop 167
caatgcagcgaagaaagctcctcca

SEQ ID NO: 129462 - DNA, 25 bp, Artificial
  probe
  misc_feature (1)..(25): SEQ ID NO: 7335; WAN024CQU_at; Start 129; Stop 153
gccaatacaattcccaatgcagcga

SEQ ID NO: 129463 - DNA, 25 bp, Artificial
  probe
  misc_feature (1)..(25): SEQ ID NO: 7335; WAN024CQU_at; Start 163; Stop 187
ctccataggttgaaaaataagttgc

SEQ ID NO: 129464 - DNA, 25 bp, Artificial
  probe
  misc_feature (1)..(25): SEQ ID NO: 7335; WAN024CQU_at; Start 204; Stop 228
tatatcctccattaattctttgtaa

SEQ ID NO: 129465 - DNA, 25 bp, Artificial
  probe
  misc_feature (1)..(25): SEQ ID NO: 7335; WAN024CQU_at; Start 36; Stop 60
gcaaacttttcaggctgttctttca

SEQ ID NO: 129466 - DNA, 25 bp, Artificial
  probe
  misc_feature (1)..(25): SEQ ID NO: 7335; WAN024CQU_at; Start 115; Stop 139
cgcttaatccaaccgccaatacaat

SEQ ID NO: 129467 - DNA, 25 bp, Artificial
  probe
  misc_feature (1)..(25): SEQ ID NO: 7335; WAN024CQU_at; Start 136; Stop 160
caattcccaatgcagcgaagaaagc

SEQ ID NO: 129468 - DNA, 25 bp, Artificial
  probe
  misc_feature (1)..(25): SEQ ID NO: 7335; WAN024CQU_at; Start 174; Stop 198
gaaaaataagttgctaaatgttcca

SEQ ID NO: 129469 - DNA, 25 bp, Artificial
  probe
  misc_feature (1)..(25): SEQ ID NO: 7335; WAN024CQU_at; Start 51; Stop 75
tgttctttcagtaaagctgcggcag

SEQ ID NO: 129470 - DNA, 25 bp, Artificial
  probe
  misc_feature (1)..(25): SEQ ID NO: 7335; WAN024CQU_at; Start 146; Stop 170
tgcagcgaagaaagctcctccatag

SEQ ID NO: 129471 - DNA, 25 bp, Artificial
  probe
  misc_feature (1)..(25): SEQ ID NO: 7335; WAN024CQU_at; Start 32; Stop 56
tgaggcaaacttttcaggctgttct

SEQ ID NO: 129472 - DNA, 25 bp, Artificial
  probe
  misc_feature (1)..(25): SEQ ID NO: 7335; WAN024CQU_at; Start 49; Stop 73
gctgttctttcagtaaagctgcggc

SEQ ID NO: 129473 - DNA, 25 bp, Artificial
  probe
  misc_feature (1)..(25): SEQ ID NO: 7335; WAN024CQU_at; Start 66; Stop 90
gctgcggcagattgcccagccttac

SEQ ID NO: 129474 - DNA, 25 bp, Artificial
  probe
  misc_feature (1)..(25): SEQ ID NO: 7335; WAN024CQU_at; Start 57; Stop 81
ttcagtaaagctgcggcagattgcc

SEQ ID NO: 129475 - DNA, 25 bp, Artificial
  probe
  misc_feature (1)..(25): SEQ ID NO: 7335; WAN024CQU_at; Start 111; Stop 135
ataccgcttaatccaaccgccaata

SEQ ID NO: 129476 - DNA, 25 bp, Artificial
  probe
  misc_feature (1)..(25): SEQ ID NO: 7335; WAN024CQU_at; Start 54; Stop 78
tctttcagtaaagctgcggcagatt

SEQ ID NO: 129477 - DNA, 25 bp, Artificial
  probe
  misc_feature (1)..(25): SEQ ID NO: 2187; WAN024CQV_at; Start 338; Stop 362
gaaatgtagcagtagcgggaatgca

SEQ ID NO: 129478 - DNA, 25 bp, Artificial
  probe
  misc_feature (1)..(25): SEQ ID NO: 2187; WAN024CQV_at; Start 3; Stop 27
ggaacatttagcaacttatttttca

SEQ ID NO: 129479 - DNA, 25 bp, Artificial
  probe
  misc_feature (1)..(25): SEQ ID NO: 2187; WAN024CQV_at; Start 299; Stop 323
caattgctattgtaggatacttttc

SEQ ID NO: 129480 - DNA, 25 bp, Artificial
  probe
  misc_feature (1)..(25): SEQ ID NO: 2187; WAN024CQV_at; Start 94; Stop 118
tctgcttatggagttggtaaggctg

SEQ ID NO: 129481 - DNA, 25 bp, Artificial
  probe
  misc_feature (1)..(25): SEQ ID NO: 2187; WAN024CQV_at; Start 239; Stop 263
tgcaattaactccagaacttccttt

SEQ ID NO: 129482 - DNA, 25 bp, Artificial
  probe
  misc_feature (1)..(25): SEQ ID NO: 2187; WAN024CQV_at; Start 105; Stop 129
agttggtaaggctgggcaatctgcc

SEQ ID NO: 129483 - DNA, 25 bp, Artificial
  probe
  misc_feature (1)..(25): SEQ ID NO: 2187; WAN024CQV_at; Start 47; Stop 71
tcgctgcattgggaattgtattggc

SEQ ID NO: 129484 - DNA, 25 bp, Artificial
  probe
  misc_feature (1)..(25): SEQ ID NO: 2187; WAN024CQV_at; Start 65; Stop 89
tattggcggttggattaagcggtat

SEQ ID NO: 129485 - DNA, 25 bp, Artificial
  probe
  misc_feature (1)..(25): SEQ ID NO: 2187; WAN024CQV_at; Start 325; Stop 349
gctaagcatcaaggaaatgtagcag

SEQ ID NO: 129486 - DNA, 25 bp, Artificial
  probe
  misc_feature (1)..(25): SEQ ID NO: 2187; WAN024CQV_at; Start 193; Stop 217
ggaacacaaggattatatggttttg

SEQ ID NO: 129487 - DNA, 25 bp, Artificial
  probe
  misc_feature (1)..(25): SEQ ID NO: 2187; WAN024CQV_at; Start 13; Stop 37
gcaacttatttttcaacctatggag

SEQ ID NO: 129488 - DNA, 25 bp, Artificial
  probe
  misc_feature (1)..(25): SEQ ID NO: 2187; WAN024CQV_at; Start 30; Stop 54
ctatggaggagctttcttcgctgca

SEQ ID NO: 129489 - DNA, 25 bp, Artificial
  probe
  misc_feature (1)..(25): SEQ ID NO: 2187; WAN024CQV_at; Start 36; Stop 60
aggagctttcttcgctgcattggga

SEQ ID NO: 129490 - DNA, 25 bp, Artificial
  probe
  misc_feature (1)..(25): SEQ ID NO: 2187; WAN024CQV_at; Start 111; Stop 135
taaggctgggcaatctgccgcagct

SEQ ID NO: 129491 - DNA, 25 bp, Artificial
  probe
  misc_feature (1)..(25): SEQ ID NO: 2187; WAN024CQV_at; Start 369; Stop 393
ggctaaaagaccaaaagaattcatg

SEQ ID NO: 129492 - DNA, 25 bp, Artificial
  probe
  misc_feature (1)..(25): SEQ ID NO: 2187; WAN024CQV_at; Start 416; Stop 440
tggtagaaacctatgcaattcttgc

SEQ ID NO: 129493 - DNA, 25 bp, Artificial
  probe
  misc_feature (1)..(25): SEQ ID NO: 2187; WAN024CQV_at; Start 189; Stop 213
gcccggaacacaaggattatatggt

SEQ ID NO: 129494 - DNA, 25 bp, Artificial
  probe
  misc_feature (1)..(25): SEQ ID NO: 2187; WAN024CQV_at; Start 185; Stop 209
tattgcccggaacacaaggattata

SEQ ID NO: 129495 - DNA, 25 bp, Artificial
  probe
  misc_feature (1)..(25): SEQ ID NO: 2187; WAN024CQV_at; Start 26; Stop 50
caacctatggaggagctttcttcgc

SEQ ID NO: 129496 - DNA, 25 bp, Artificial
  probe
  misc_feature (1)..(25): SEQ ID NO: 2187; WAN024CQV_at; Start 455; Stop 479
tcattttgacccttcgtgtactaac

SEQ ID NO: 129497 - DNA, 25 bp, Artificial
  probe
  misc_feature (1)..(25): SEQ ID NO: 2187; WAN024CQV_at; Start 232; Stop 256
atttggttgcaattaactccagaac

SEQ ID NO: 129498 - DNA, 25 bp, Artificial
  probe
  misc_feature (1)..(25): SEQ ID NO: 2187; WAN024CQV_at; Start 380; Stop 404
caaaagaattcatgaagggagcaat

SEQ ID NO: 129499 - DNA, 25 bp, Artificial
  probe
  misc_feature (1)..(25): SEQ ID NO: 2187; WAN024CQV_at; Start 128; Stop 152
ccgcagctttactgaaagaacagcc

SEQ ID NO: 129500 - DNA, 25 bp, Artificial
  probe
  misc_feature (1)..(25): SEQ ID NO: 2187; WAN024CQV_at; Start 356; Stop 380
gaatgcaaatcttggctaaaagacc

SEQ ID NO: 129501 - DNA, 25 bp, Artificial
  probe
  misc_feature (1)..(25): SEQ ID NO: 2187; WAN024CQV_at; Start 51; Stop 75
tgcattgggaattgtattggcggtt

SEQ ID NO: 129502 - DNA, 25 bp, Artificial
  probe
  misc_feature (1)..(25): SEQ ID NO: 2187; WAN024CQV_at; Start 377; Stop 401
gaccaaaagaattcatgaagggagc

SEQ ID NO: 129503 - DNA, 25 bp, Artificial
  probe
  misc_feature (1)..(25): SEQ ID NO: 2187; WAN024CQV_at; Start 347; Stop 371
cagtagcgggaatgcaaatcttggc

SEQ ID NO: 129504 - DNA, 25 bp, Artificial
  probe
  misc_feature (1)..(25): SEQ ID NO: 2187; WAN024CQV_at; Start 121; Stop 145
caatctgccgcagctttactgaaag

SEQ ID NO: 129505 - DNA, 25 bp, Artificial
  probe
  misc_feature (1)..(25): SEQ ID NO: 2187; WAN024CQV_at; Start 277; Stop 301
gcttatttctttgtagctcttccaa

SEQ ID NO: 129506 - DNA, 25 bp, Artificial
  probe
  misc_feature (1)..(25): SEQ ID NO: 2187; WAN024CQV_at; Start 442; Stop 466
tttgtcgtatcattcattttgaccc

SEQ ID NO: 129507 - DNA, 25 bp, Artificial
  probe
  misc_feature (1)..(25): SEQ ID NO: 2187; WAN024CQV_at; Start 331; Stop 355
catcaaggaaatgtagcagtagcgg

SEQ ID NO: 129508 - DNA, 25 bp, Artificial
  probe
  misc_feature (1)..(25): SEQ ID NO: 2187; WAN024CQV_at; Start 269; Stop 293
aaggcgttgcttatttctttgtagc

SEQ ID NO: 129509 - DNA, 25 bp, Artificial
  probe
  misc_feature (1)..(25): SEQ ID NO: 2187; WAN024CQV_at; Start 291; Stop 315
agctcttccaattgctattgtagga

SEQ ID NO: 129510 - DNA, 25 bp, Artificial
  probe
  misc_feature (1)..(25): SEQ ID NO: 2187; WAN024CQV_at; Start 409; Stop 433
gctgccatggtagaaacctatgcaa

SEQ ID NO: 129511 - DNA, 25 bp, Artificial
  probe
  misc_feature (1)..(25): SEQ ID NO: 7682; WAN024CQW_at; Start 90; Stop 114
caatatcaacattggcaaatttagc

SEQ ID NO: 129512 - DNA, 25 bp, Artificial
  probe
  misc_feature (1)..(25): SEQ ID NO: 7682; WAN024CQW_at; Start 81; Stop 105
cataaataacaatatcaacattggc

SEQ ID NO: 129513 - DNA, 25 bp, Artificial
  probe
  misc_feature (1)..(25): SEQ ID NO: 7682; WAN024CQW_at; Start 2; Stop 26
tgtccggtattagggtcaatcaact

SEQ ID NO: 129514 - DNA, 25 bp, Artificial
  probe
  misc_feature (1)..(25): SEQ ID NO: 7682; WAN024CQW_at; Start 180; Stop 204
tggttactggaaagaatgcatcaat

SEQ ID NO: 129515 - DNA, 25 bp, Artificial
  probe
  misc_feature (1)..(25): SEQ ID NO: 7682; WAN024CQW_at; Start 161; Stop 185
actgctgcagctccccctttggtta

SEQ ID NO: 129516 - DNA, 25 bp, Artificial
  probe
  misc_feature (1)..(25): SEQ ID NO: 7682; WAN024CQW_at; Start 105; Stop 129
caaatttagctacttggtgttgtac

SEQ ID NO: 129517 - DNA, 25 bp, Artificial
  probe
  misc_feature (1)..(25): SEQ ID NO: 7682; WAN024CQW_at; Start 201; Stop 225
caataactcgttgacctgtgattaa

SEQ ID NO: 129518 - DNA, 25 bp, Artificial
  probe
  misc_feature (1)..(25): SEQ ID NO: 7682; WAN024CQW_at; Start 70; Stop 94
tccacaaccgacataaataacaata

SEQ ID NO: 129519 - DNA, 25 bp, Artificial
  probe
  misc_feature (1)..(25): SEQ ID NO: 7682; WAN024CQW_at; Start 197; Stop 221
gcatcaataactcgttgacctgtga

SEQ ID NO: 129520 - DNA, 25 bp, Artificial
  probe
  misc_feature (1)..(25): SEQ ID NO: 7682; WAN024CQW_at; Start 39; Stop 63
tcagtacatccgtcatttcatttcc

SEQ ID NO: 129521 - DNA, 25 bp, Artificial
  probe
  misc_feature (1)..(25): SEQ ID NO: 7682; WAN024CQW_at; Start 22; Stop 46
caactcaggaaactcattcagtaca

SEQ ID NO: 129522 - DNA, 25 bp, Artificial
  probe
  misc_feature (1)..(25): SEQ ID NO: 7682; WAN024CQW_at; Start 148; Stop 172
aaacggtccaggaactgctgcagct

SEQ ID NO: 129523 - DNA, 25 bp, Artificial
  probe
  misc_feature (1)..(25): SEQ ID NO: 7682; WAN024CQW_at; Start 14; Stop 38
gggtcaatcaactcaggaaactcat

SEQ ID NO: 129524 - DNA, 25 bp, Artificial
  probe
  misc_feature (1)..(25): SEQ ID NO: 7682; WAN024CQW_at; Start 7; Stop 31
ggtattagggtcaatcaactcagga

SEQ ID NO: 129525 - DNA, 25 bp, Artificial
  probe
  misc_feature (1)..(25): SEQ ID NO: 7682; WAN024CQW_at; Start 145; Stop 169
tccaaacggtccaggaactgctgca

SEQ ID NO: 129526 - DNA, 25 bp, Artificial
  probe
  misc_feature (1)..(25): SEQ ID NO: 7682; WAN024CQW_at; Start 120; Stop 144
ggtgttgtacaactgtctttcctgc

SEQ ID NO: 129527 - DNA, 25 bp, Artificial
  probe
  misc_feature (1)..(25): SEQ ID NO: 7682; WAN024CQW_at; Start 65; Stop 89
cgttctccacaaccgacataaataa

SEQ ID NO: 129528 - DNA, 25 bp, Artificial
  probe
  misc_feature (1)..(25): SEQ ID NO: 7682; WAN024CQW_at; Start 18; Stop 42
caatcaactcaggaaactcattcag

SEQ ID NO: 129529 - DNA, 25 bp, Artificial
  probe
  misc_feature (1)..(25): SEQ ID NO: 7682; WAN024CQW_at; Start 99; Stop 123
cattggcaaatttagctacttggtg

SEQ ID NO: 129530 - DNA, 25 bp, Artificial
  probe
  misc_feature (1)..(25): SEQ ID NO: 7682; WAN024CQW_at; Start 110; Stop 134
ttagctacttggtgttgtacaactg

SEQ ID NO: 129531 - DNA, 25 bp, Artificial
  probe
  misc_feature (1)..(25): SEQ ID NO: 7682; WAN024CQW_at; Start 30; Stop 54
gaaactcattcagtacatccgtcat

SEQ ID NO: 129532 - DNA, 25 bp, Artificial
  probe
  misc_feature (1)..(25): SEQ ID NO: 7682; WAN024CQW_at; Start 26; Stop 50
tcaggaaactcattcagtacatccg

SEQ ID NO: 129533 - DNA, 25 bp, Artificial
  probe
  misc_feature (1)..(25): SEQ ID NO: 7682; WAN024CQW_at; Start 142; Stop 166
tgctccaaacggtccaggaactgct

SEQ ID NO: 129534 - DNA, 25 bp, Artificial
  probe
  misc_feature (1)..(25): SEQ ID NO: 7682; WAN024CQW_at; Start 125; Stop 149
tgtacaactgtctttcctgctccaa

SEQ ID NO: 129535 - DNA, 25 bp, Artificial
  probe
  misc_feature (1)..(25): SEQ ID NO: 7682; WAN024CQW_at; Start 51; Stop 75
tcatttcatttccacgttctccaca

SEQ ID NO: 129536 - DNA, 25 bp, Artificial
  probe
  misc_feature (1)..(25): SEQ ID NO: 7682; WAN024CQW_at; Start 129; Stop 153
caactgtctttcctgctccaaacgg

SEQ ID NO: 129537 - DNA, 25 bp, Artificial
  probe
  misc_feature (1)..(25): SEQ ID NO: 7682; WAN024CQW_at; Start 193; Stop 217
gaatgcatcaataactcgttgacct

SEQ ID NO: 129538 - DNA, 25 bp, Artificial
  probe
  misc_feature (1)..(25): SEQ ID NO: 7682; WAN024CQW_at; Start 11; Stop 35
ttagggtcaatcaactcaggaaact

SEQ ID NO: 129539 - DNA, 25 bp, Artificial
  probe
  misc_feature (1)..(25): SEQ ID NO: 7682; WAN024CQW_at; Start 135; Stop 159
tctttcctgctccaaacggtccagg

SEQ ID NO: 129540 - DNA, 25 bp, Artificial
  probe
  misc_feature (1)..(25): SEQ ID NO: 7682; WAN024CQW_at; Start 133; Stop 157
tgtctttcctgctccaaacggtcca

SEQ ID NO: 129541 - DNA, 25 bp, Artificial
  probe
  misc_feature (1)..(25): SEQ ID NO: 7682; WAN024CQW_at; Start 175; Stop 199
ccctttggttactggaaagaatgca

SEQ ID NO: 129542 - DNA, 25 bp, Artificial
  probe
  misc_feature (1)..(25): SEQ ID NO: 7682; WAN024CQW_at; Start 187; Stop 211
tggaaagaatgcatcaataactcgt

SEQ ID NO: 129543 - DNA, 25 bp, Artificial
  probe
  misc_feature (1)..(25): SEQ ID NO: 7682; WAN024CQW_at; Start 150; Stop 174
acggtccaggaactgctgcagctcc

SEQ ID NO: 129544 - DNA, 25 bp, Artificial
  probe
  misc_feature (1)..(25): SEQ ID NO: 7682; WAN024CQW_at; Start 113; Stop 137
gctacttggtgttgtacaactgtct

SEQ ID NO: 129545 - DNA, 25 bp, Artificial
  probe
  misc_feature (1)..(25): SEQ ID NO: 7551; WAN024CQX_at; Start 165; Stop 189
gaatatcacccgtactcactttttg

SEQ ID NO: 129546 - DNA, 25 bp, Artificial
  probe
  misc_feature (1)..(25): SEQ ID NO: 7551; WAN024CQX_at; Start 94; Stop 118
gacttctccagatactccataagga

SEQ ID NO: 129547 - DNA, 25 bp, Artificial
  probe
  misc_feature (1)..(25): SEQ ID NO: 7551; WAN024CQX_at; Start 56; Stop 80
acttcatcaattgtaaaatcgccag

SEQ ID NO: 129548 - DNA, 25 bp, Artificial
  probe
  misc_feature (1)..(25): SEQ ID NO: 7551; WAN024CQX_at; Start 152; Stop 176
ttgacagttccaagaatatcacccg

SEQ ID NO: 129549 - DNA, 25 bp, Artificial
  probe
  misc_feature (1)..(25): SEQ ID NO: 7551; WAN024CQX_at; Start 183; Stop 207
ctttttgaccaattgctatagtgga

SEQ ID NO: 129550 - DNA, 25 bp, Artificial
  probe
  misc_feature (1)..(25): SEQ ID NO: 7551; WAN024CQX_at; Start 102; Stop 126
cagatactccataaggaaccataat

SEQ ID NO: 129551 - DNA, 25 bp, Artificial
  probe
  misc_feature (1)..(25): SEQ ID NO: 7551; WAN024CQX_at; Start 70; Stop 94
aaaatcgccagatgcaatagaaacg

SEQ ID NO: 129552 - DNA, 25 bp, Artificial
  probe
  misc_feature (1)..(25): SEQ ID NO: 7551; WAN024CQX_at; Start 67; Stop 91
tgtaaaatcgccagatgcaatagaa

SEQ ID NO: 129553 - DNA, 25 bp, Artificial
  probe
  misc_feature (1)..(25): SEQ ID NO: 7551; WAN024CQX_at; Start 197; Stop 221
gctatagtggaatcaaaatgccact

SEQ ID NO: 129554 - DNA, 25 bp, Artificial
  probe
  misc_feature (1)..(25): SEQ ID NO: 7551; WAN024CQX_at; Start 121; Stop 145
cataattttatgattaactacctcg

SEQ ID NO: 129555 - DNA, 25 bp, Artificial
  probe
  misc_feature (1)..(25): SEQ ID NO: 7551; WAN024CQX_at; Start 2; Stop 26
tgcataagcgttcctttatagaaac

SEQ ID NO: 129556 - DNA, 25 bp, Artificial
  probe
  misc_feature (1)..(25): SEQ ID NO: 7551; WAN024CQX_at; Start 131; Stop 155
tgattaactacctcggtttccttga

SEQ ID NO: 129557 - DNA, 25 bp, Artificial
  probe
  misc_feature (1)..(25): SEQ ID NO: 7551; WAN024CQX_at; Start 4; Stop 28
cataagcgttcctttatagaaacta

SEQ ID NO: 129558 - DNA, 25 bp, Artificial
  probe
  misc_feature (1)..(25): SEQ ID NO: 7551; WAN024CQX_at; Start 83; Stop 107
gcaatagaaacgacttctccagata

SEQ ID NO: 129559 - DNA, 25 bp, Artificial
  probe
  misc_feature (1)..(25): SEQ ID NO: 7551; WAN024CQX_at; Start 139; Stop 163
tacctcggtttccttgacagttcca

SEQ ID NO: 129560 - DNA, 25 bp, Artificial
  probe
  misc_feature (1)..(25): SEQ ID NO: 7551; WAN024CQX_at; Start 229; Stop 253
tctatccaaacttggaacttctacc

SEQ ID NO: 129561 - DNA, 25 bp, Artificial
  probe
  misc_feature (1)..(25): SEQ ID NO: 7551; WAN024CQX_at; Start 40; Stop 64
ttttatttcatatacaacttcatca

SEQ ID NO: 129562 - DNA, 25 bp, Artificial
  probe
  misc_feature (1)..(25): SEQ ID NO: 7551; WAN024CQX_at; Start 143; Stop 167
tcggtttccttgacagttccaagaa

SEQ ID NO: 129563 - DNA, 25 bp, Artificial
  probe
  misc_feature (1)..(25): SEQ ID NO: 7551; WAN024CQX_at; Start 204; Stop 228
tggaatcaaaatgccacttaatatc

SEQ ID NO: 129564 - DNA, 25 bp, Artificial
  probe
  misc_feature (1)..(25): SEQ ID NO: 7551; WAN024CQX_at; Start 210; Stop 234
caaaatgccacttaatatctctatc

SEQ ID NO: 129565 - DNA, 25 bp, Artificial
  probe
  misc_feature (1)..(25): SEQ ID NO: 7551; WAN024CQX_at; Start 154; Stop 178
gacagttccaagaatatcacccgta

SEQ ID NO: 129566 - DNA, 25 bp, Artificial
  probe
  misc_feature (1)..(25): SEQ ID NO: 7551; WAN024CQX_at; Start 194; Stop 218
attgctatagtggaatcaaaatgcc

SEQ ID NO: 129567 - DNA, 25 bp, Artificial
  probe
  misc_feature (1)..(25): SEQ ID NO: 7551; WAN024CQX_at; Start 76; Stop 100
gccagatgcaatagaaacgacttct

SEQ ID NO: 129568 - DNA, 25 bp, Artificial
  probe
  misc_feature (1)..(25): SEQ ID NO: 7551; WAN024CQX_at; Start 80; Stop 104
gatgcaatagaaacgacttctccag

SEQ ID NO: 129569 - DNA, 25 bp, Artificial
  probe
  misc_feature (1)..(25): SEQ ID NO: 7551; WAN024CQX_at; Start 189; Stop 213
gaccaattgctatagtggaatcaaa

SEQ ID NO: 129570 - DNA, 25 bp, Artificial
  probe
  misc_feature (1)..(25): SEQ ID NO: 7551; WAN024CQX_at; Start 89; Stop 113
gaaacgacttctccagatactccat

SEQ ID NO: 129571 - DNA, 25 bp, Artificial
  probe
  misc_feature (1)..(25): SEQ ID NO: 7551; WAN024CQX_at; Start 74; Stop 98
tcgccagatgcaatagaaacgactt

SEQ ID NO: 129572 - DNA, 25 bp, Artificial
  probe
  misc_feature (1)..(25): SEQ ID NO: 7551; WAN024CQX_at; Start 170; Stop 194
tcacccgtactcactttttgaccaa

SEQ ID NO: 129573 - DNA, 25 bp, Artificial
  probe
  misc_feature (1)..(25): SEQ ID NO: 7551; WAN024CQX_at; Start 158; Stop 182
gttccaagaatatcacccgtactca

SEQ ID NO: 129574 - DNA, 25 bp, Artificial
  probe
  misc_feature (1)..(25): SEQ ID NO: 7551; WAN024CQX_at; Start 222; Stop 246
taatatctctatccaaacttggaac

SEQ ID NO: 129575 - DNA, 25 bp, Artificial
  probe
  misc_feature (1)..(25): SEQ ID NO: 7551; WAN024CQX_at; Start 98; Stop 122
tctccagatactccataaggaacca

SEQ ID NO: 129576 - DNA, 25 bp, Artificial
  probe
  misc_feature (1)..(25): SEQ ID NO: 7551; WAN024CQX_at; Start 62; Stop 86
tcaattgtaaaatcgccagatgcaa

SEQ ID NO: 129577 - DNA, 25 bp, Artificial
  probe
  misc_feature (1)..(25): SEQ ID NO: 7551; WAN024CQX_at; Start 106; Stop 130
tactccataaggaaccataatttta

SEQ ID NO: 129578 - DNA, 25 bp, Artificial
  probe
  misc_feature (1)..(25): SEQ ID NO: 7551; WAN024CQX_at; Start 175; Stop 199
cgtactcactttttgaccaattgct

SEQ ID NO: 129579 - DNA, 25 bp, Artificial
  probe
  misc_feature (1)..(25): SEQ ID NO: 5455; WAN024CQY_at; Start 1123; Stop 1147
tatgaaagagcaggacgttctcagg

SEQ ID NO: 129580 - DNA, 25 bp, Artificial
  probe
  misc_feature (1)..(25): SEQ ID NO: 5455; WAN024CQY_at; Start 872; Stop 896
gacaatcaattatgcaacggacagt

SEQ ID NO: 129581 - DNA, 25 bp, Artificial
  probe
  misc_feature (1)..(25): SEQ ID NO: 5455; WAN024CQY_at; Start 1185; Stop 1209
tattggagctgtatcgccacctggt

SEQ ID NO: 129582 - DNA, 25 bp, Artificial
  probe
  misc_feature (1)..(25): SEQ ID NO: 5455; WAN024CQY_at; Start 585; Stop 609
gcttatgcaaaaatggcctgtccgc

SEQ ID NO: 129583 - DNA, 25 bp, Artificial
  probe
  misc_feature (1)..(25): SEQ ID NO: 5455; WAN024CQY_at; Start 1331; Stop 1355
cactatataaagacagtgtgggcac

SEQ ID NO: 129584 - DNA, 25 bp, Artificial
  probe
  misc_feature (1)..(25): SEQ ID NO: 5455; WAN024CQY_at; Start 1200; Stop 1224
gccacctggtggagatatttcagaa

SEQ ID NO: 129585 - DNA, 25 bp, Artificial
  probe
  misc_feature (1)..(25): SEQ ID NO: 5455; WAN024CQY_at; Start 1483; Stop 1507
gaacgactaacgatggaaattgcta

SEQ ID NO: 129586 - DNA, 25 bp, Artificial
  probe
  misc_feature (1)..(25): SEQ ID NO: 5455; WAN024CQY_at; Start 429; Stop 453
tcttggaactgtcaaggaaaccgag

SEQ ID NO: 129587 - DNA, 25 bp, Artificial
  probe
  misc_feature (1)..(25): SEQ ID NO: 5455; WAN024CQY_at; Start 50; Stop 74
tatcgggacctctagttattgcatc

SEQ ID NO: 129588 - DNA, 25 bp, Artificial
  probe
  misc_feature (1)..(25): SEQ ID NO: 5455; WAN024CQY_at; Start 1404; Stop 1428
tgcgatgaactacttacaacgggaa

SEQ ID NO: 129589 - DNA, 25 bp, Artificial
  probe
  misc_feature (1)..(25): SEQ ID NO: 5455; WAN024CQY_at; Start 678; Stop 702
tgcattctttccagtaaccaaaggg

SEQ ID NO: 129590 - DNA, 25 bp, Artificial
  probe
  misc_feature (1)..(25): SEQ ID NO: 5455; WAN024CQY_at; Start 1169; Stop 1193
aaggaacgattactgctattggagc

SEQ ID NO: 129591 - DNA, 25 bp, Artificial
  probe
  misc_feature (1)..(25): SEQ ID NO: 5455; WAN024CQY_at; Start 1269; Stop 1293
gcttgatgctccgttggcacagcga

SEQ ID NO: 129592 - DNA, 25 bp, Artificial
  probe
  misc_feature (1)..(25): SEQ ID NO: 5455; WAN024CQY_at; Start 979; Stop 1003
cgtgatatgggctactctgtcgcca

SEQ ID NO: 129593 - DNA, 25 bp, Artificial
  probe
  misc_feature (1)..(25): SEQ ID NO: 5455; WAN024CQY_at; Start 851; Stop 875
agttgattgaccctaataccggaca

SEQ ID NO: 129594 - DNA, 25 bp, Artificial
  probe
  misc_feature (1)..(25): SEQ ID NO: 5455; WAN024CQY_at; Start 720; Stop 744
tggaccgtttggagcaggaaagaca

SEQ ID NO: 129595 - DNA, 25 bp, Artificial
  probe
  misc_feature (1)..(25): SEQ ID NO: 5455; WAN024CQY_at; Start 704; Stop 728
gagctgcagcagttcctggaccgtt

SEQ ID NO: 129596 - DNA, 25 bp, Artificial
  probe
  misc_feature (1)..(25): SEQ ID NO: 5455; WAN024CQY_at; Start 1016; Stop 1040
caacttcacgttgggcagaagcgct

SEQ ID NO: 129597 - DNA, 25 bp, Artificial
  probe
  misc_feature (1)..(25): SEQ ID NO: 5455; WAN024CQY_at; Start 185; Stop 209
aaacatctggtcttggtccgggaga

SEQ ID NO: 129598 - DNA, 25 bp, Artificial
  probe
  misc_feature (1)..(25): SEQ ID NO: 5455; WAN024CQY_at; Start 1138; Stop 1162
cgttctcaggttctagggcttccag

SEQ ID NO: 129599 - DNA, 25 bp, Artificial
  probe
  misc_feature (1)..(25): SEQ ID NO: 5455; WAN024CQY_at; Start 1671; Stop 1695
taccgtggcagttcgagaccgtatg

SEQ ID NO: 129600 - DNA, 25 bp, Artificial
  probe
  misc_feature (1)..(25): SEQ ID NO: 5455; WAN024CQY_at; Start 1093; Stop 1117
gcttatctgggaagtcgtatcgctg

SEQ ID NO: 129601 - DNA, 25 bp, Artificial
  probe
  misc_feature (1)..(25): SEQ ID NO: 5455; WAN024CQY_at; Start 270; Stop 294
aatgtttgatggcatacaacgccca

SEQ ID NO: 129602 - DNA, 25 bp, Artificial
  probe
  misc_feature (1)..(25): SEQ ID NO: 5455; WAN024CQY_at; Start 1655; Stop 1679
cagagattatggaaggtaccgtggc

SEQ ID NO: 129603 - DNA, 25 bp, Artificial
  probe
  misc_feature (1)..(25): SEQ ID NO: 5455; WAN024CQY_at; Start 74; Stop 98
caggtatgcaggaggctaatattca

SEQ ID NO: 129604 - DNA, 25 bp, Artificial
  probe
  misc_feature (1)..(25): SEQ ID NO: 5455; WAN024CQY_at; Start 1031; Stop 1055
cagaagcgctacgtgaaatgtcagg

SEQ ID NO: 129605 - DNA, 25 bp, Artificial
  probe
  misc_feature (1)..(25): SEQ ID NO: 5455; WAN024CQY_at; Start 608; Stop 632
gcaaggcgcgtcctgtttctaaacg

SEQ ID NO: 129606 - DNA, 25 bp, Artificial
  probe
  misc_feature (1)..(25): SEQ ID NO: 5455; WAN024CQY_at; Start 398; Stop 422
caattggtcaaaaagtgagtacggg

SEQ ID NO: 129607 - DNA, 25 bp, Artificial
  probe
  misc_feature (1)..(25): SEQ ID NO: 5455; WAN024CQY_at; Start 213; Stop 237
tgttgttacaactggagaacctctc

SEQ ID NO: 129608 - DNA, 25 bp, Artificial
  probe
  misc_feature (1)..(25): SEQ ID NO: 5455; WAN024CQY_at; Start 233; Stop 257
ctctctcggttgaattagggccagg

SEQ ID NO: 129609 - DNA, 25 bp, Artificial
  probe
  misc_feature (1)..(25): SEQ ID NO: 5455; WAN024CQY_at; Start 1049; Stop 1073
tgtcaggacgtctagaagaaatgcc

SEQ ID NO: 129610 - DNA, 25 bp, Artificial
  probe
  misc_feature (1)..(25): SEQ ID NO: 5455; WAN024CQY_at; Start 1284; Stop 1308
ggcacagcgacgtcattttcctgca

SEQ ID NO: 129611 - DNA, 25 bp, Artificial
  probe
  misc_feature (1)..(25): SEQ ID NO: 5455; WAN024CQY_at; Start 915; Stop 939
aaatatgcctgttgctgctcgtgag

SEQ ID NO: 129612 - DNA, 25 bp, Artificial
  probe
  misc_feature (1)..(25): SEQ ID NO: 5455; WAN024CQY_at; Start 1531; Stop 1555
caacagaacgcttttgattcggtag

SEQ ID NO: 129613 - DNA, 25 bp, Artificial
  probe
  misc_feature (1)..(25): SEQ ID NO: 6622; WAN024CQZ_at; Start 2; Stop 26
tgataactagaacgtgcatatcttt

SEQ ID NO: 129614 - DNA, 25 bp, Artificial
  probe
  misc_feature (1)..(25): SEQ ID NO: 6622; WAN024CQZ_at; Start 151; Stop 175
tcttccataaaaaactcagcttctt

SEQ ID NO: 129615 - DNA, 25 bp, Artificial
  probe
  misc_feature (1)..(25): SEQ ID NO: 6622; WAN024CQZ_at; Start 220; Stop 244
tcagaatttaaaacagtcgcttgtc

SEQ ID NO: 129616 - DNA, 25 bp, Artificial
  probe
  misc_feature (1)..(25): SEQ ID NO: 6622; WAN024CQZ_at; Start 201; Stop 225
tacaaccgcaaaattttcatcagaa

SEQ ID NO: 129617 - DNA, 25 bp, Artificial
  probe
  misc_feature (1)..(25): SEQ ID NO: 6622; WAN024CQZ_at; Start 166; Stop 190
tcagcttcttcaaaagtaataccca

SEQ ID NO: 129618 - DNA, 25 bp, Artificial
  probe
  misc_feature (1)..(25): SEQ ID NO: 6622; WAN024CQZ_at; Start 31; Stop 55
aaagctagatactctgccgcagtta

SEQ ID NO: 129619 - DNA, 25 bp, Artificial
  probe
  misc_feature (1)..(25): SEQ ID NO: 6622; WAN024CQZ_at; Start 82; Stop 106
tcaattgcaggatcatttgccaagt

SEQ ID NO: 129620 - DNA, 25 bp, Artificial
  probe
  misc_feature (1)..(25): SEQ ID NO: 6622; WAN024CQZ_at; Start 223; Stop 247
gaatttaaaacagtcgcttgtcttg

SEQ ID NO: 129621 - DNA, 25 bp, Artificial
  probe
  misc_feature (1)..(25): SEQ ID NO: 6622; WAN024CQZ_at; Start 98; Stop 122
ttgccaagttcataaataaaaccga

SEQ ID NO: 129622 - DNA, 25 bp, Artificial
  probe
  misc_feature (1)..(25): SEQ ID NO: 6622; WAN024CQZ_at; Start 192; Stop 216
tgctgcaaatacaaccgcaaaattt

SEQ ID NO: 129623 - DNA, 25 bp, Artificial
  probe
  misc_feature (1)..(25): SEQ ID NO: 6622; WAN024CQZ_at; Start 50; Stop 74
cagttaaagcaatgcggggagttgc

SEQ ID NO: 129624 - DNA, 25 bp, Artificial
  probe
  misc_feature (1)..(25): SEQ ID NO: 6622; WAN024CQZ_at; Start 25; Stop 49
ttttcaaaagctagatactctgccg

SEQ ID NO: 129625 - DNA, 25 bp, Artificial
  probe
  misc_feature (1)..(25): SEQ ID NO: 6622; WAN024CQZ_at; Start 215; Stop 239
tttcatcagaatttaaaacagtcgc

SEQ ID NO: 129626 - DNA, 25 bp, Artificial
  probe
  misc_feature (1)..(25): SEQ ID NO: 6622; WAN024CQZ_at; Start 40; Stop 64
tactctgccgcagttaaagcaatgc

SEQ ID NO: 129627 - DNA, 25 bp, Artificial
  probe
  misc_feature (1)..(25): SEQ ID NO: 6622; WAN024CQZ_at; Start 80; Stop 104
gctcaattgcaggatcatttgccaa

SEQ ID NO: 129628 - DNA, 25 bp, Artificial
  probe
  misc_feature (1)..(25): SEQ ID NO: 6622; WAN024CQZ_at; Start 116; Stop 140
aaaccgaacgatcgatcgctcctgt

SEQ ID NO: 129629 - DNA, 25 bp, Artificial
  probe
  misc_feature (1)..(25): SEQ ID NO: 6622; WAN024CQZ_at; Start 136; Stop 160
cctgtttttctgagttcttccataa

SEQ ID NO: 129630 - DNA, 25 bp, Artificial
  probe
  misc_feature (1)..(25): SEQ ID NO: 6622; WAN024CQZ_at; Start 172; Stop 196
tcttcaaaagtaatacccattgctg

SEQ ID NO: 129631 - DNA, 25 bp, Artificial
  probe
  misc_feature (1)..(25): SEQ ID NO: 6622; WAN024CQZ_at; Start 178; Stop 202
aaagtaatacccattgctgcaaata

SEQ ID NO: 129632 - DNA, 25 bp, Artificial
  probe
  misc_feature (1)..(25): SEQ ID NO: 6622; WAN024CQZ_at; Start 231; Stop 255
aacagtcgcttgtcttgctatctga

SEQ ID NO: 129633 - DNA, 25 bp, Artificial
  probe
  misc_feature (1)..(25): SEQ ID NO: 6622; WAN024CQZ_at; Start 228; Stop 252
taaaacagtcgcttgtcttgctatc

SEQ ID NO: 129634 - DNA, 25 bp, Artificial
  probe
  misc_feature (1)..(25): SEQ ID NO: 6622; WAN024CQZ_at; Start 29; Stop 53
caaaagctagatactctgccgcagt

SEQ ID NO: 129635 - DNA, 25 bp, Artificial
  probe
  misc_feature (1)..(25): SEQ ID NO: 6622; WAN024CQZ_at; Start 43; Stop 67
tctgccgcagttaaagcaatgcggg

SEQ ID NO: 129636 - DNA, 25 bp, Artificial
  probe
  misc_feature (1)..(25): SEQ ID NO: 6622; WAN024CQZ_at; Start 77; Stop 101
tacgctcaattgcaggatcatttgc

SEQ ID NO: 129637 - DNA, 25 bp, Artificial
  probe
  misc_feature (1)..(25): SEQ ID NO: 6622; WAN024CQZ_at; Start 73; Stop 97
gcaatacgctcaattgcaggatcat

SEQ ID NO: 129638 - DNA, 25 bp, Artificial
  probe
  misc_feature (1)..(25): SEQ ID NO: 6622; WAN024CQZ_at; Start 128; Stop 152
cgatcgctcctgtttttctgagttc

SEQ ID NO: 129639 - DNA, 25 bp, Artificial
  probe
  misc_feature (1)..(25): SEQ ID NO: 6622; WAN024CQZ_at; Start 66; Stop 90
gggagttgcaatacgctcaattgca

SEQ ID NO: 129640 - DNA, 25 bp, Artificial
  probe
  misc_feature (1)..(25): SEQ ID NO: 6622; WAN024CQZ_at; Start 110; Stop 134
taaataaaaccgaacgatcgatcgc

SEQ ID NO: 129641 - DNA, 25 bp, Artificial
  probe
  misc_feature (1)..(25): SEQ ID NO: 6622; WAN024CQZ_at; Start 88; Stop 112
gcaggatcatttgccaagttcataa

SEQ ID NO: 129642 - DNA, 25 bp, Artificial
  probe
  misc_feature (1)..(25): SEQ ID NO: 6622; WAN024CQZ_at; Start 185; Stop 209
tacccattgctgcaaatacaaccgc

SEQ ID NO: 129643 - DNA, 25 bp, Artificial
  probe
  misc_feature (1)..(25): SEQ ID NO: 6622; WAN024CQZ_at; Start 124; Stop 148
cgatcgatcgctcctgtttttctga

SEQ ID NO: 129644 - DNA, 25 bp, Artificial
  probe
  misc_feature (1)..(25): SEQ ID NO: 6622; WAN024CQZ_at; Start 11; Stop 35
gaacgtgcatatctttttcaaaagc

SEQ ID NO: 129645 - DNA, 25 bp, Artificial
  probe
  misc_feature (1)..(25): SEQ ID NO: 6622; WAN024CQZ_at; Start 34; Stop 58
gctagatactctgccgcagttaaag

SEQ ID NO: 129646 - DNA, 25 bp, Artificial
  probe
  misc_feature (1)..(25): SEQ ID NO: 6622; WAN024CQZ_at; Start 114; Stop 138
taaaaccgaacgatcgatcgctcct

SEQ ID NO: 129647 - DNA, 25 bp, Artificial
  probe
  misc_feature (1)..(25): SEQ ID NO: 1640; WAN024CR2_at; Start 850; Stop 874
tcaactctatacgaaagggctggtc

SEQ ID NO: 129648 - DNA, 25 bp, Artificial
  probe
  misc_feature (1)..(25): SEQ ID NO: 1640; WAN024CR2_at; Start 749; Stop 773
cggatatgactaactattgtgaagc

SEQ ID NO: 129649 - DNA, 25 bp, Artificial
  probe
  misc_feature (1)..(25): SEQ ID NO: 1640; WAN024CR2_at; Start 644; Stop 668
tggcaaatgatcctgcaattgagcg

SEQ ID NO: 129650 - DNA, 25 bp, Artificial
  probe
  misc_feature (1)..(25): SEQ ID NO: 1640; WAN024CR2_at; Start 210; Stop 234
taaaattcgttttgctggtcatgca

SEQ ID NO: 129651 - DNA, 25 bp, Artificial
  probe
  misc_feature (1)..(25): SEQ ID NO: 1640; WAN024CR2_at; Start 1106; Stop 1130
caactatgaatcaactgtttgcagc

SEQ ID NO: 129652 - DNA, 25 bp, Artificial
  probe
  misc_feature (1)..(25): SEQ ID NO: 1640; WAN024CR2_at; Start 148; Stop 172
cacgaagataaagcaatggttcagc

SEQ ID NO: 129653 - DNA, 25 bp, Artificial
  probe
  misc_feature (1)..(25): SEQ ID NO: 1640; WAN024CR2_at; Start 660; Stop 684
aattgagcgtattgcaactccccgc

SEQ ID NO: 129654 - DNA, 25 bp, Artificial
  probe
  misc_feature (1)..(25): SEQ ID NO: 1640; WAN024CR2_at; Start 920; Stop 944
caatgccagaagatgacataacaca

SEQ ID NO: 129655 - DNA, 25 bp, Artificial
  probe
  misc_feature (1)..(25): SEQ ID NO: 1640; WAN024CR2_at; Start 804; Stop 828
agttccagggagacgaggctatccg

SEQ ID NO: 129656 - DNA, 25 bp, Artificial
  probe
  misc_feature (1)..(25): SEQ ID NO: 1640; WAN024CR2_at; Start 1081; Stop 1105
ggtaaaactcgtggagatcatgctc

SEQ ID NO: 129657 - DNA, 25 bp, Artificial
  probe
  misc_feature (1)..(25): SEQ ID NO: 1640; WAN024CR2_at; Start 599; Stop 623
tcagaaaaacaggagcgatcgatcg

SEQ ID NO: 129658 - DNA, 25 bp, Artificial
  probe
  misc_feature (1)..(25): SEQ ID NO: 1640; WAN024CR2_at; Start 683; Stop 707
gcattgctttaactgcggcagagta

SEQ ID NO: 129659 - DNA, 25 bp, Artificial
  probe
  misc_feature (1)..(25): SEQ ID NO: 1640; WAN024CR2_at; Start 1220; Stop 1244
caaagcgttttgaagaagagtacat

SEQ ID NO: 129660 - DNA, 25 bp, Artificial
  probe
  misc_feature (1)..(25): SEQ ID NO: 1640; WAN024CR2_at; Start 415; Stop 439
catttgaatactcttgtacgtggtc

SEQ ID NO: 129661 - DNA, 25 bp, Artificial
  probe
  misc_feature (1)..(25): SEQ ID NO: 1640; WAN024CR2_at; Start 1121; Stop 1145
tgtttgcagcctatgcccaagggaa

SEQ ID NO: 129662 - DNA, 25 bp, Artificial
  probe
  misc_feature (1)..(25): SEQ ID NO: 1640; WAN024CR2_at; Start 726; Stop 750
tatgcacgttctagttatcatgacg

SEQ ID NO: 129663 - DNA, 25 bp, Artificial
  probe
  misc_feature (1)..(25): SEQ ID NO: 1640; WAN024CR2_at; Start 1008; Stop 1032
taatcaaggttatcgtccaccaatc

SEQ ID NO: 129664 - DNA, 25 bp, Artificial
  probe
  misc_feature (1)..(25): SEQ ID NO: 1640; WAN024CR2_at; Start 25; Stop 49
actgctagtgaagttgttgggcctc

SEQ ID NO: 129665 - DNA, 25 bp, Artificial
  probe
  misc_feature (1)..(25): SEQ ID NO: 1640; WAN024CR2_at; Start 790; Stop 814
gcagctcgccgtgaagttccaggga

SEQ ID NO: 129666 - DNA, 25 bp, Artificial
  probe
  misc_feature (1)..(25): SEQ ID NO: 1640; WAN024CR2_at; Start 382; Stop 406
gaatttattcagacagggatctcct

SEQ ID NO: 129667 - DNA, 25 bp, Artificial
  probe
  misc_feature (1)..(25): SEQ ID NO: 1640; WAN024CR2_at; Start 889; Stop 913
aaaggttcggtgacacagattccta

SEQ ID NO: 129668 - DNA, 25 bp, Artificial
  probe
  misc_feature (1)..(25): SEQ ID NO: 1640; WAN024CR2_at; Start 43; Stop 67
gggcctcttatgattgttgaacaag

SEQ ID NO: 129669 - DNA, 25 bp, Artificial
  probe
  misc_feature (1)..(25): SEQ ID NO: 1640; WAN024CR2_at; Start 1286; Stop 1310
tgaatcttgggtgggaattactatc

SEQ ID NO: 129670 - DNA, 25 bp, Artificial
  probe
  misc_feature (1)..(25): SEQ ID NO: 1640; WAN024CR2_at; Start 489; Stop 513
tgctcagatagcaagacaagcgact

SEQ ID NO: 129671 - DNA, 25 bp, Artificial
  probe
  misc_feature (1)..(25): SEQ ID NO: 1640; WAN024CR2_at; Start 460; Stop 484
ggttcgggcttacctcataatgaat

SEQ ID NO: 129672 - DNA, 25 bp, Artificial
  probe
  misc_feature (1)..(25): SEQ ID NO: 1640; WAN024CR2_at; Start 109; Stop 133
cataatggagaaattcgtcgtggac

SEQ ID NO: 129673 - DNA, 25 bp, Artificial
  probe
  misc_feature (1)..(25): SEQ ID NO: 1640; WAN024CR2_at; Start 697; Stop 721
gcggcagagtatctagcttttgaaa

SEQ ID NO: 129674 - DNA, 25 bp, Artificial
  probe
  misc_feature (1)..(25): SEQ ID NO: 1640; WAN024CR2_at; Start 769; Stop 793
gaagcgttacgtgaagtctcggcag

SEQ ID NO: 129675 - DNA, 25 bp, Artificial
  probe
  misc_feature (1)..(25): SEQ ID NO: 1640; WAN024CR2_at; Start 287; Stop 311
gaaaaccaattgatggtggaccaga

SEQ ID NO: 129676 - DNA, 25 bp, Artificial
  probe
  misc_feature (1)..(25): SEQ ID NO: 1640; WAN024CR2_at; Start 233; Stop 257
cattagaattggctgtatctgagga

SEQ ID NO: 129677 - DNA, 25 bp, Artificial
  probe
  misc_feature (1)..(25): SEQ ID NO: 1640; WAN024CR2_at; Start 1175; Stop 1199
gagaatcggctttatctgatgtaga

SEQ ID NO: 129678 - DNA, 25 bp, Artificial
  probe
  misc_feature (1)..(25): SEQ ID NO: 1640; WAN024CR2_at; Start 959; Stop 983
taactggatacattactgaagggca

SEQ ID NO: 129679 - DNA, 25 bp, Artificial
  probe
  misc_feature (1)..(25): SEQ ID NO: 1640; WAN024CR2_at; Start 131; Stop 155
gacaagttttagagatccacgaaga

SEQ ID NO: 129680 - DNA, 25 bp, Artificial
  probe
  misc_feature (1)..(25): SEQ ID NO: 1640; WAN024CR2_at; Start 1160; Stop 1184
tagcagtagtattaggagaatcggc

SEQ ID NO: 129681 - DNA, 25 bp, Artificial
  probe
  misc_feature (1)..(25): SEQ ID NO: 4150; WAN024CR3_at; Start 201; Stop 225
tgttctagcaaagcaccatcttgtc

SEQ ID NO: 129682 - DNA, 25 bp, Artificial
  probe
  misc_feature (1)..(25): SEQ ID NO: 4150; WAN024CR3_at; Start 1; Stop 25
gtggattgtaagaatcatcgccaaa

SEQ ID NO: 129683 - DNA, 25 bp, Artificial
  probe
  misc_feature (1)..(25): SEQ ID NO: 4150; WAN024CR3_at; Start 160; Stop 184
tattttcagacgtttttgcctctag

SEQ ID NO: 129684 - DNA, 25 bp, Artificial
  probe
  misc_feature (1)..(25): SEQ ID NO: 4150; WAN024CR3_at; Start 121; Stop 145
cagcagatagaggatattgttcacc

SEQ ID NO: 129685 - DNA, 25 bp, Artificial
  probe
  misc_feature (1)..(25): SEQ ID NO: 4150; WAN024CR3_at; Start 78; Stop 102
gtctttacagcataattattatcaa

SEQ ID NO: 129686 - DNA, 25 bp, Artificial
  probe
  misc_feature (1)..(25): SEQ ID NO: 4150; WAN024CR3_at; Start 60; Stop 84
tcttcataaatccagcctgtcttta

SEQ ID NO: 129687 - DNA, 25 bp, Artificial
  probe
  misc_feature (1)..(25): SEQ ID NO: 4150; WAN024CR3_at; Start 193; Stop 217
tatctgtttgttctagcaaagcacc

SEQ ID NO: 129688 - DNA, 25 bp, Artificial
  probe
  misc_feature (1)..(25): SEQ ID NO: 4150; WAN024CR3_at; Start 213; Stop 237
gcaccatcttgtccaaaatagtacc

SEQ ID NO: 129689 - DNA, 25 bp, Artificial
  probe
  misc_feature (1)..(25): SEQ ID NO: 4150; WAN024CR3_at; Start 124; Stop 148
cagatagaggatattgttcaccgta

SEQ ID NO: 129690 - DNA, 25 bp, Artificial
  probe
  misc_feature (1)..(25): SEQ ID NO: 4150; WAN024CR3_at; Start 103; Stop 127
aataataagttctcttttcagcaga

SEQ ID NO: 129691 - DNA, 25 bp, Artificial
  probe
  misc_feature (1)..(25): SEQ ID NO: 4150; WAN024CR3_at; Start 206; Stop 230
tagcaaagcaccatcttgtccaaaa

SEQ ID NO: 129692 - DNA, 25 bp, Artificial
  probe
  misc_feature (1)..(25): SEQ ID NO: 4150; WAN024CR3_at; Start 115; Stop 139
tcttttcagcagatagaggatattg

SEQ ID NO: 129693 - DNA, 25 bp, Artificial
  probe
  misc_feature (1)..(25): SEQ ID NO: 4150; WAN024CR3_at; Start 66; Stop 90
taaatccagcctgtctttacagcat

SEQ ID NO: 129694 - DNA, 25 bp, Artificial
  probe
  misc_feature (1)..(25): SEQ ID NO: 4150; WAN024CR3_at; Start 7; Stop 31
tgtaagaatcatcgccaaaatttcc

SEQ ID NO: 129695 - DNA, 25 bp, Artificial
  probe
  misc_feature (1)..(25): SEQ ID NO: 4150; WAN024CR3_at; Start 227; Stop 251
aaaatagtaccacttctcctgaagg

SEQ ID NO: 129696 - DNA, 25 bp, Artificial
  probe
  misc_feature (1)..(25): SEQ ID NO: 4150; WAN024CR3_at; Start 18; Stop 42
tcgccaaaatttcctagcttattta

SEQ ID NO: 129697 - DNA, 25 bp, Artificial
  probe
  misc_feature (1)..(25): SEQ ID NO: 4150; WAN024CR3_at; Start 167; Stop 191
agacgtttttgcctctagtacttgt

SEQ ID NO: 129698 - DNA, 25 bp, Artificial
  probe
  misc_feature (1)..(25): SEQ ID NO: 4150; WAN024CR3_at; Start 12; Stop 36
gaatcatcgccaaaatttcctagct

SEQ ID NO: 129699 - DNA, 25 bp, Artificial
  probe
  misc_feature (1)..(25): SEQ ID NO: 4150; WAN024CR3_at; Start 234; Stop 258
taccacttctcctgaaggccaattt

SEQ ID NO: 129700 - DNA, 25 bp, Artificial
  probe
  misc_feature (1)..(25): SEQ ID NO: 4150; WAN024CR3_at; Start 155; Stop 179
tcctgtattttcagacgtttttgcc

SEQ ID NO: 129701 - DNA, 25 bp, Artificial
  probe
  misc_feature (1)..(25): SEQ ID NO: 4150; WAN024CR3_at; Start 108; Stop 132
taagttctcttttcagcagatagag

SEQ ID NO: 129702 - DNA, 25 bp, Artificial
  probe
  misc_feature (1)..(25): SEQ ID NO: 4150; WAN024CR3_at; Start 30; Stop 54
cctagcttatttaaataataccaat

SEQ ID NO: 129703 - DNA, 25 bp, Artificial
  probe
  misc_feature (1)..(25): SEQ ID NO: 4150; WAN024CR3_at; Start 71; Stop 95
ccagcctgtctttacagcataatta

SEQ ID NO: 129704 - DNA, 25 bp, Artificial
  probe
  misc_feature (1)..(25): SEQ ID NO: 4150; WAN024CR3_at; Start 178; Stop 202
cctctagtacttgtttatctgtttg

SEQ ID NO: 129705 - DNA, 25 bp, Artificial
  probe
  misc_feature (1)..(25): SEQ ID NO: 4150; WAN024CR3_at; Start 197; Stop 221
tgtttgttctagcaaagcaccatct

SEQ ID NO: 129706 - DNA, 25 bp, Artificial
  probe
  misc_feature (1)..(25): SEQ ID NO: 4150; WAN024CR3_at; Start 219; Stop 243
tcttgtccaaaatagtaccacttct

SEQ ID NO: 129707 - DNA, 25 bp, Artificial
  probe
  misc_feature (1)..(25): SEQ ID NO: 4150; WAN024CR3_at; Start 238; Stop 262
acttctcctgaaggccaatttcatt

SEQ ID NO: 129708 - DNA, 25 bp, Artificial
  probe
  misc_feature (1)..(25): SEQ ID NO: 4150; WAN024CR3_at; Start 209; Stop 233
caaagcaccatcttgtccaaaatag

SEQ ID NO: 129709 - DNA, 25 bp, Artificial
  probe
  misc_feature (1)..(25): SEQ ID NO: 4150; WAN024CR3_at; Start 128; Stop 152
tagaggatattgttcaccgtatact

SEQ ID NO: 129710 - DNA, 25 bp, Artificial
  probe
  misc_feature (1)..(25): SEQ ID NO: 4150; WAN024CR3_at; Start 163; Stop 187
tttcagacgtttttgcctctagtac

SEQ ID NO: 129711 - DNA, 25 bp, Artificial
  probe
  misc_feature (1)..(25): SEQ ID NO: 4150; WAN024CR3_at; Start 147; Stop 171
tatacttttcctgtattttcagacg

SEQ ID NO: 129712 - DNA, 25 bp, Artificial
  probe
  misc_feature (1)..(25): SEQ ID NO: 4150; WAN024CR3_at; Start 231; Stop 255
tagtaccacttctcctgaaggccaa

SEQ ID NO: 129713 - DNA, 25 bp, Artificial
  probe
  misc_feature (1)..(25): SEQ ID NO: 4150; WAN024CR3_at; Start 174; Stop 198
tttgcctctagtacttgtttatctg

SEQ ID NO: 129714 - DNA, 25 bp, Artificial
  probe
  misc_feature (1)..(25): SEQ ID NO: 4150; WAN024CR3_at; Start 135; Stop 159
tattgttcaccgtatacttttcctg

SEQ ID NO: 129715 - DNA, 25 bp, Artificial
  probe
  misc_feature (1)..(25): SEQ ID NO: 4131; WAN024CR4_at; Start 238; Stop 262
gcttcattttatatatcctccaaca

SEQ ID NO: 129716 - DNA, 25 bp, Artificial
  probe
  misc_feature (1)..(25): SEQ ID NO: 4131; WAN024CR4_at; Start 31; Stop 55
ccatctctccggataaaggatcaaa

SEQ ID NO: 129717 - DNA, 25 bp, Artificial
  probe
  misc_feature (1)..(25): SEQ ID NO: 4131; WAN024CR4_at; Start 48; Stop 72
ggatcaaaataatagtacttcccat

SEQ ID NO: 129718 - DNA, 25 bp, Artificial
  probe
  misc_feature (1)..(25): SEQ ID NO: 4131; WAN024CR4_at; Start 276; Stop 300
ccagatgaagcgaagttataaactt

SEQ ID NO: 129719 - DNA, 25 bp, Artificial
  probe
  misc_feature (1)..(25): SEQ ID NO: 4131; WAN024CR4_at; Start 124; Stop 148
taccattttcttggacaaactgcca

SEQ ID NO: 129720 - DNA, 25 bp, Artificial
  probe
  misc_feature (1)..(25): SEQ ID NO: 4131; WAN024CR4_at; Start 127; Stop 151
cattttcttggacaaactgccatcc

SEQ ID NO: 129721 - DNA, 25 bp, Artificial
  probe
  misc_feature (1)..(25): SEQ ID NO: 4131; WAN024CR4_at; Start 11; Stop 35
tatatattgccagccgacaaccatc

SEQ ID NO: 129722 - DNA, 25 bp, Artificial
  probe
  misc_feature (1)..(25): SEQ ID NO: 4131; WAN024CR4_at; Start 152; Stop 176
ttcagaatcatctgcaaatactgta

SEQ ID NO: 129723 - DNA, 25 bp, Artificial
  probe
  misc_feature (1)..(25): SEQ ID NO: 4131; WAN024CR4_at; Start 145; Stop 169
gccatccttcagaatcatctgcaaa

SEQ ID NO: 129724 - DNA, 25 bp, Artificial
  probe
  misc_feature (1)..(25): SEQ ID NO: 4131; WAN024CR4_at; Start 70; Stop 94
catctatcactctccagtaggtttc

SEQ ID NO: 129725 - DNA, 25 bp, Artificial
  probe
  misc_feature (1)..(25): SEQ ID NO: 4131; WAN024CR4_at; Start 288; Stop 312
aagttataaactttaccatcgatag

SEQ ID NO: 129726 - DNA, 25 bp, Artificial
  probe
  misc_feature (1)..(25): SEQ ID NO: 4131; WAN024CR4_at; Start 265; Stop 289
aaatccactcaccagatgaagcgaa

SEQ ID NO: 129727 - DNA, 25 bp, Artificial
  probe
  misc_feature (1)..(25): SEQ ID NO: 4131; WAN024CR4_at; Start 2; Stop 26
tggagcaggtatatattgccagccg

SEQ ID NO: 129728 - DNA, 25 bp, Artificial
  probe
  misc_feature (1)..(25): SEQ ID NO: 4131; WAN024CR4_at; Start 137; Stop 161
gacaaactgccatccttcagaatca

SEQ ID NO: 129729 - DNA, 25 bp, Artificial
  probe
  misc_feature (1)..(25): SEQ ID NO: 4131; WAN024CR4_at; Start 135; Stop 159
tggacaaactgccatccttcagaat

SEQ ID NO: 129730 - DNA, 25 bp, Artificial
  probe
  misc_feature (1)..(25): SEQ ID NO: 4131; WAN024CR4_at; Start 26; Stop 50
gacaaccatctctccggataaagga

SEQ ID NO: 129731 - DNA, 25 bp, Artificial
  probe
  misc_feature (1)..(25): SEQ ID NO: 4131; WAN024CR4_at; Start 270; Stop 294
cactcaccagatgaagcgaagttat

SEQ ID NO: 129732 - DNA, 25 bp, Artificial
  probe
  misc_feature (1)..(25): SEQ ID NO: 4131; WAN024CR4_at; Start 114; Stop 138
tagtaggttctaccattttcttgga

SEQ ID NO: 129733 - DNA, 25 bp, Artificial
  probe
  misc_feature (1)..(25): SEQ ID NO: 4131; WAN024CR4_at; Start 38; Stop 62
tccggataaaggatcaaaataatag

SEQ ID NO: 129734 - DNA, 25 bp, Artificial
  probe
  misc_feature (1)..(25): SEQ ID NO: 4131; WAN024CR4_at; Start 141; Stop 165
aactgccatccttcagaatcatctg

SEQ ID NO: 129735 - DNA, 25 bp, Artificial
  probe
  misc_feature (1)..(25): SEQ ID NO: 4131; WAN024CR4_at; Start 268; Stop 292
tccactcaccagatgaagcgaagtt

SEQ ID NO: 129736 - DNA, 25 bp, Artificial
  probe
  misc_feature (1)..(25): SEQ ID NO: 4131; WAN024CR4_at; Start 188; Stop 212
caaaccgaagaaaaatgtggctagt

SEQ ID NO: 129737 - DNA, 25 bp, Artificial
  probe
  misc_feature (1)..(25): SEQ ID NO: 4131; WAN024CR4_at; Start 55; Stop 79
aataatagtacttcccatctatcac

SEQ ID NO: 129738 - DNA, 25 bp, Artificial
  probe
  misc_feature (1)..(25): SEQ ID NO: 4131; WAN024CR4_at; Start 34; Stop 58
tctctccggataaaggatcaaaata

SEQ ID NO: 129739 - DNA, 25 bp, Artificial
  probe
  misc_feature (1)..(25): SEQ ID NO: 4131; WAN024CR4_at; Start 285; Stop 309
gcgaagttataaactttaccatcga

SEQ ID NO: 129740 - DNA, 25 bp, Artificial
  probe
  misc_feature (1)..(25): SEQ ID NO: 4131; WAN024CR4_at; Start 132; Stop 156
tcttggacaaactgccatccttcag

SEQ ID NO: 129741 - DNA, 25 bp, Artificial
  probe
  misc_feature (1)..(25): SEQ ID NO: 4131; WAN024CR4_at; Start 117; Stop 141
taggttctaccattttcttggacaa

SEQ ID NO: 129742 - DNA, 25 bp, Artificial
  probe
  misc_feature (1)..(25): SEQ ID NO: 4131; WAN024CR4_at; Start 9; Stop 33
ggtatatattgccagccgacaacca

SEQ ID NO: 129743 - DNA, 25 bp, Artificial
  probe
  misc_feature (1)..(25): SEQ ID NO: 4131; WAN024CR4_at; Start 4; Stop 28
gagcaggtatatattgccagccgac

SEQ ID NO: 129744 - DNA, 25 bp, Artificial
  probe
  misc_feature (1)..(25): SEQ ID NO: 4131; WAN024CR4_at; Start 7; Stop 31
caggtatatattgccagccgacaac

SEQ ID NO: 129745 - DNA, 25 bp, Artificial
  probe
  misc_feature (1)..(25): SEQ ID NO: 4131; WAN024CR4_at; Start 77; Stop 101
cactctccagtaggtttcttttaga

SEQ ID NO: 129746 - DNA, 25 bp, Artificial
  probe
  misc_feature (1)..(25): SEQ ID NO: 4131; WAN024CR4_at; Start 66; Stop 90
ttcccatctatcactctccagtagg

SEQ ID NO: 129747 - DNA, 25 bp, Artificial
  probe
  misc_feature (1)..(25): SEQ ID NO: 4131; WAN024CR4_at; Start 235; Stop 259
aaagcttcattttatatatcctcca

SEQ ID NO: 129748 - DNA, 25 bp, Artificial
  probe
  misc_feature (1)..(25): SEQ ID NO: 4131; WAN024CR4_at; Start 273; Stop 297
tcaccagatgaagcgaagttataaa

SEQ ID NO: 129749 - DNA, 25 bp, Artificial
  probe
  misc_feature (1)..(25): SEQ ID NO: 1155; WAN024CR5_at; Start 351; Stop 375
tggttggaaaacattagagattaaa

SEQ ID NO: 129750 - DNA, 25 bp, Artificial
  probe
  misc_feature (1)..(25): SEQ ID NO: 1155; WAN024CR5_at; Start 316; Stop 340
tacttcgataaaaatggagtgctac

SEQ ID NO: 129751 - DNA, 25 bp, Artificial
  probe
  misc_feature (1)..(25): SEQ ID NO: 1155; WAN024CR5_at; Start 277; Stop 301
ggtatcagattagaaggttttccaa

SEQ ID NO: 129752 - DNA, 25 bp, Artificial
  probe
  misc_feature (1)..(25): SEQ ID NO: 1155; WAN024CR5_at; Start 482; Stop 506
tagagacaggttggctttatgatca

SEQ ID NO: 129753 - DNA, 25 bp, Artificial
  probe
  misc_feature (1)..(25): SEQ ID NO: 1155; WAN024CR5_at; Start 219; Stop 243
cggctggcaatatatcccgtttcca

SEQ ID NO: 129754 - DNA, 25 bp, Artificial
  probe
  misc_feature (1)..(25): SEQ ID NO: 1155; WAN024CR5_at; Start 367; Stop 391
gagattaaaactaaagacagtgttg

SEQ ID NO: 129755 - DNA, 25 bp, Artificial
  probe
  misc_feature (1)..(25): SEQ ID NO: 1155; WAN024CR5_at; Start 488; Stop 512
caggttggctttatgatcagtctaa

SEQ ID NO: 129756 - DNA, 25 bp, Artificial
  probe
  misc_feature (1)..(25): SEQ ID NO: 1155; WAN024CR5_at; Start 257; Stop 281
caattggtccttacccaaatggtat

SEQ ID NO: 129757 - DNA, 25 bp, Artificial
  probe
  misc_feature (1)..(25): SEQ ID NO: 1155; WAN024CR5_at; Start 193; Stop 217
gattctctatctggagagatggttg

SEQ ID NO: 129758 - DNA, 25 bp, Artificial
  probe
  misc_feature (1)..(25): SEQ ID NO: 1155; WAN024CR5_at; Start 287; Stop 311
tagaaggttttccaaagtcagagtg

SEQ ID NO: 129759 - DNA, 25 bp, Artificial
  probe
  misc_feature (1)..(25): SEQ ID NO: 1155; WAN024CR5_at; Start 163; Stop 187
cgagtgattgatggtaagtactatt

SEQ ID NO: 129760 - DNA, 25 bp, Artificial
  probe
  misc_feature (1)..(25): SEQ ID NO: 1155; WAN024CR5_at; Start 551; Stop 575
actaccttggtggtgaaagacgtgc

SEQ ID NO: 129761 - DNA, 25 bp, Artificial
  probe
  misc_feature (1)..(25): SEQ ID NO: 1155; WAN024CR5_at; Start 452; Stop 476
cgaactattactttaatcaaaatca

SEQ ID NO: 129762 - DNA, 25 bp, Artificial
  probe
  misc_feature (1)..(25): SEQ ID NO: 1155; WAN024CR5_at; Start 340; Stop 364
caagagtttgttggttggaaaacat

SEQ ID NO: 129763 - DNA, 25 bp, Artificial
  probe
  misc_feature (1)..(25): SEQ ID NO: 1155; WAN024CR5_at; Start 468; Stop 492
tcaaaatcattctttagagacaggt

SEQ ID NO: 129764 - DNA, 25 bp, Artificial
  probe
  misc_feature (1)..(25): SEQ ID NO: 1155; WAN024CR5_at; Start 227; Stop 251
aatatatcccgtttccatctaaagg

SEQ ID NO: 129765 - DNA, 25 bp, Artificial
  probe
  misc_feature (1)..(25): SEQ ID NO: 1155; WAN024CR5_at; Start 155; Stop 179
cctactggcgagtgattgatggtaa

SEQ ID NO: 129766 - DNA, 25 bp, Artificial
  probe
  misc_feature (1)..(25): SEQ ID NO: 1155; WAN024CR5_at; Start 541; Stop 565
aatggagaaaactaccttggtggtg

SEQ ID NO: 129767 - DNA, 25 bp, Artificial
  probe
  misc_feature (1)..(25): SEQ ID NO: 1155; WAN024CR5_at; Start 242; Stop 266
catctaaaggtagtacaattggtcc

SEQ ID NO: 129768 - DNA, 25 bp, Artificial
  probe
  misc_feature (1)..(25): SEQ ID NO: 1155; WAN024CR5_at; Start 141; Stop 165
ggacctcaaagaaacctactggcga

SEQ ID NO: 129769 - DNA, 25 bp, Artificial
  probe
  misc_feature (1)..(25): SEQ ID NO: 1155; WAN024CR5_at; Start 299; Stop 323
caaagtcagagtggtactacttcga

SEQ ID NO: 129770 - DNA, 25 bp, Artificial
  probe
  misc_feature (1)..(25): SEQ ID NO: 1155; WAN024CR5_at; Start 325; Stop 349
aaaaatggagtgctacaagagtttg

SEQ ID NO: 129771 - DNA, 25 bp, Artificial
  probe
  misc_feature (1)..(25): SEQ ID NO: 1155; WAN024CR5_at; Start 520; Stop 544
tatctagctaagacggaaattaatg

SEQ ID NO: 129772 - DNA, 25 bp, Artificial
  probe
  misc_feature (1)..(25): SEQ ID NO: 1155; WAN024CR5_at; Start 505; Stop 529
cagtctaactggtattatctagcta

SEQ ID NO: 129773 - DNA, 25 bp, Artificial
  probe
  misc_feature (1)..(25): SEQ ID NO: 1155; WAN024CR5_at; Start 310; Stop 334
tggtactacttcgataaaaatggag

SEQ ID NO: 129774 - DNA, 25 bp, Artificial
  probe
  misc_feature (1)..(25): SEQ ID NO: 1155; WAN024CR5_at; Start 494; Stop 518
ggctttatgatcagtctaactggta

SEQ ID NO: 129775 - DNA, 25 bp, Artificial
  probe
  misc_feature (1)..(25): SEQ ID NO: 1155; WAN024CR5_at; Start 147; Stop 171
caaagaaacctactggcgagtgatt

SEQ ID NO: 129776 - DNA, 25 bp, Artificial
  probe
  misc_feature (1)..(25): SEQ ID NO: 1155; WAN024CR5_at; Start 380; Stop 404
aagacagtgttggaagaaagtacgg

SEQ ID NO: 129777 - DNA, 25 bp, Artificial
  probe
  misc_feature (1)..(25): SEQ ID NO: 1155; WAN024CR5_at; Start 404; Stop 428
gggaaaaacgtgaagattcagaaga

SEQ ID NO: 129778 - DNA, 25 bp, Artificial
  probe
  misc_feature (1)..(25): SEQ ID NO: 1155; WAN024CR5_at; Start 415; Stop 439
gaagattcagaagataaagaagaga

SEQ ID NO: 129779 - DNA, 25 bp, Artificial
  probe
  misc_feature (1)..(25): SEQ ID NO: 1155; WAN024CR5_at; Start 474; Stop 498
tcattctttagagacaggttggctt

SEQ ID NO: 129780 - DNA, 25 bp, Artificial
  probe
  misc_feature (1)..(25): SEQ ID NO: 1155; WAN024CR5_at; Start 268; Stop 292
tacccaaatggtatcagattagaag

SEQ ID NO: 129781 - DNA, 25 bp, Artificial
  probe
  misc_feature (1)..(25): SEQ ID NO: 1155; WAN024CR5_at; Start 526; Stop 550
gctaagacggaaattaatggagaaa

SEQ ID NO: 129782 - DNA, 25 bp, Artificial
  probe
  misc_feature (1)..(25): SEQ ID NO: 1155; WAN024CR5_at; Start 184; Stop 208
tattattttgattctctatctggag

SEQ ID NO: 129783 - DNA, 25 bp, Artificial
  probe
  misc_feature (1)..(25): SEQ ID NO: 1154; WAN024CR6_at; Start 411; Stop 435
tctatctgctgaaaagagaacttat

SEQ ID NO: 129784 - DNA, 25 bp, Artificial
  probe
  misc_feature (1)..(25): SEQ ID NO: 1154; WAN024CR6_at; Start 804; Stop 828
gtggtactacctccgttcatcagga

SEQ ID NO: 129785 - DNA, 25 bp, Artificial
  probe
  misc_feature (1)..(25): SEQ ID NO: 1154; WAN024CR6_at; Start 620; Stop 644
catggtactacctagatgcttcagg

SEQ ID NO: 129786 - DNA, 25 bp, Artificial
  probe
  misc_feature (1)..(25): SEQ ID NO: 1154; WAN024CR6_at; Start 381; Stop 405
tacaggaaaagtatacggtgaacaa

SEQ ID NO: 129787 - DNA, 25 bp, Artificial
  probe
  misc_feature (1)..(25): SEQ ID NO: 1154; WAN024CR6_at; Start 680; Stop 704
aatggtattattttggctcctctgg

SEQ ID NO: 129788 - DNA, 25 bp, Artificial
  probe
  misc_feature (1)..(25): SEQ ID NO: 1154; WAN024CR6_at; Start 332; Stop 356
tgctagaacaaacagataaacaagt

SEQ ID NO: 129789 - DNA, 25 bp, Artificial
  probe
  misc_feature (1)..(25): SEQ ID NO: 1154; WAN024CR6_at; Start 529; Stop 553
tcttacaatccactaccaattggtg

SEQ ID NO: 129790 - DNA, 25 bp, Artificial
  probe
  misc_feature (1)..(25): SEQ ID NO: 1154; WAN024CR6_at; Start 559; Stop 583
gctaagggttggactcaagattttc

SEQ ID NO: 129791 - DNA, 25 bp, Artificial
  probe
  misc_feature (1)..(25): SEQ ID NO: 1154; WAN024CR6_at; Start 447; Stop 471
taattatgctgtaaagacaggctgg

SEQ ID NO: 129792 - DNA, 25 bp, Artificial
  probe
  misc_feature (1)..(25): SEQ ID NO: 1154; WAN024CR6_at; Start 363; Stop 387
ggcaaaaacgtctgaaaatacagga

SEQ ID NO: 129793 - DNA, 25 bp, Artificial
  probe
  misc_feature (1)..(25): SEQ ID NO: 1154; WAN024CR6_at; Start 605; Stop 629
gaagcaaacctgctccatggtacta

SEQ ID NO: 129794 - DNA, 25 bp, Artificial
  probe
  misc_feature (1)..(25): SEQ ID NO: 1154; WAN024CR6_at; Start 784; Stop 808
tggcaataccttggtaacaagtggt

SEQ ID NO: 129795 - DNA, 25 bp, Artificial
  probe
  misc_feature (1)..(25): SEQ ID NO: 1154; WAN024CR6_at; Start 351; Stop 375
acaagtactagaggcaaaaacgtct

SEQ ID NO: 129796 - DNA, 25 bp, Artificial
  probe
  misc_feature (1)..(25): SEQ ID NO: 1154; WAN024CR6_at; Start 856; Stop 880
ggttcaacttggtactatttagatc

SEQ ID NO: 129797 - DNA, 25 bp, Artificial
  probe
  misc_feature (1)..(25): SEQ ID NO: 1154; WAN024CR6_at; Start 74; Stop 98
tatttgcgaataccacaggtggccg

SEQ ID NO: 129798 - DNA, 25 bp, Artificial
  probe
  misc_feature (1)..(25): SEQ ID NO: 1154; WAN024CR6_at; Start 820; Stop 844
tcatcaggagctatggtaactggct

SEQ ID NO: 129799 - DNA, 25 bp, Artificial
  probe
  misc_feature (1)..(25): SEQ ID NO: 1154; WAN024CR6_at; Start 152; Stop 176
tctattggcataaaatagacggtaa

SEQ ID NO: 129800 - DNA, 25 bp, Artificial
  probe
  misc_feature (1)..(25): SEQ ID NO: 1154; WAN024CR6_at; Start 542; Stop 566
taccaattggtgaagttgctaaggg

SEQ ID NO: 129801 - DNA, 25 bp, Artificial
  probe
  misc_feature (1)..(25): SEQ ID NO: 1154; WAN024CR6_at; Start 839; Stop 863
ctggctggtatcaagatggttcaac

SEQ ID NO: 129802 - DNA, 25 bp, Artificial
  probe
  misc_feature (1)..(25): SEQ ID NO: 1154; WAN024CR6_at; Start 212; Stop 236
tcggttggcaatacttagaaattcc

SEQ ID NO: 129803 - DNA, 25 bp, Artificial
  probe
  misc_feature (1)..(25): SEQ ID NO: 1154; WAN024CR6_at; Start 695; Stop 719
gctcctctggttctatggcaacagg

SEQ ID NO: 129804 - DNA, 25 bp, Artificial
  probe
  misc_feature (1)..(25): SEQ ID NO: 1154; WAN024CR6_at; Start 229; Stop 253
gaaattcctggaacaggttatcgtg

SEQ ID NO: 129805 - DNA, 25 bp, Artificial
  probe
  misc_feature (1)..(25): SEQ ID NO: 1154; WAN024CR6_at; Start 300; Stop 324
gaagtggtactattttggacaagat

SEQ ID NO: 129806 - DNA, 25 bp, Artificial
  probe
  misc_feature (1)..(25): SEQ ID NO: 1154; WAN024CR6_at; Start 87; Stop 111
cacaggtggccgatttgttgataag

SEQ ID NO: 129807 - DNA, 25 bp, Artificial
  probe
  misc_feature (1)..(25): SEQ ID NO: 1154; WAN024CR6_at; Start 317; Stop 341
gacaagatggtgctttgctagaaca

SEQ ID NO: 129808 - DNA, 25 bp, Artificial
  probe
  misc_feature (1)..(25): SEQ ID NO: 1154; WAN024CR6_at; Start 397; Stop 421
ggtgaacaatatcctctatctgctg

SEQ ID NO: 129809 - DNA, 25 bp, Artificial
  probe
  misc_feature (1)..(25): SEQ ID NO: 1154; WAN024CR6_at; Start 731; Stop 755
tacgaggcaaatggtattacttaga

SEQ ID NO: 129810 - DNA, 25 bp, Artificial
  probe
  misc_feature (1)..(25): SEQ ID NO: 1154; WAN024CR6_at; Start 632; Stop 656
tagatgcttcaggtaagatgcttac

SEQ ID NO: 129811 - DNA, 25 bp, Artificial
  probe
  misc_feature (1)..(25): SEQ ID NO: 1154; WAN024CR6_at; Start 285; Stop 309
aattggccttcaggagaagtggtac

SEQ ID NO: 129812 - DNA, 25 bp, Artificial
  probe
  misc_feature (1)..(25): SEQ ID NO: 1154; WAN024CR6_at; Start 769; Stop 793
gatatgaaaacaggatggcaatacc

SEQ ID NO: 129813 - DNA, 25 bp, Artificial
  probe
  misc_feature (1)..(25): SEQ ID NO: 1154; WAN024CR6_at; Start 136; Stop 160
gatgatcataaagcaatctattggc

SEQ ID NO: 129814 - DNA, 25 bp, Artificial
  probe
  misc_feature (1)..(25): SEQ ID NO: 1154; WAN024CR6_at; Start 714; Stop 738
aacaggttggaaatatgtacgaggc

SEQ ID NO: 129815 - DNA, 25 bp, Artificial
  probe
  misc_feature (1)..(25): SEQ ID NO: 1154; WAN024CR6_at; Start 593; Stop 617
ttgacattgatagaagcaaacctgc

SEQ ID NO: 129816 - DNA, 25 bp, Artificial
  probe
  misc_feature (1)..(25): SEQ ID NO: 1154; WAN024CR6_at; Start 52; Stop 76
ggtttgctagctacaaatacggtat

SEQ ID NO: 129817 - DNA, 25 bp, Artificial
  probe
  misc_feature (1)..(25): SEQ ID NO: 1119; WAN024CR7_at; Start 376; Stop 400
aataccaacaaacatcatggggaag

SEQ ID NO: 129818 - DNA, 25 bp, Artificial
  probe
  misc_feature (1)..(25): SEQ ID NO: 1119; WAN024CR7_at; Start 418; Stop 442
gagaaacgagtctattattttgaag

SEQ ID NO: 129819 - DNA, 25 bp, Artificial
  probe
  misc_feature (1)..(25): SEQ ID NO: 1119; WAN024CR7_at; Start 219; Stop 243
cggctggcaatatatacctgctcca

SEQ ID NO: 129820 - DNA, 25 bp, Artificial
  probe
  misc_feature (1)..(25): SEQ ID NO: 1119; WAN024CR7_at; Start 184; Stop 208
tattattttgatcctttatccggag

SEQ ID NO: 129821 - DNA, 25 bp, Artificial
  probe
  misc_feature (1)..(25): SEQ ID NO: 1119; WAN024CR7_at; Start 227; Stop 251
aatatatacctgctccacacaaggg

SEQ ID NO: 129822 - DNA, 25 bp, Artificial
  probe
  misc_feature (1)..(25): SEQ ID NO: 1119; WAN024CR7_at; Start 442; Stop 466
gatcagcgtagttatcatactttaa

SEQ ID NO: 129823 - DNA, 25 bp, Artificial
  probe
  misc_feature (1)..(25): SEQ ID NO: 1119; WAN024CR7_at; Start 195; Stop 219
tcctttatccggagagatggttgtc

SEQ ID NO: 129824 - DNA, 25 bp, Artificial
  probe
  misc_feature (1)..(25): SEQ ID NO: 1119; WAN024CR7_at; Start 433; Stop 457
tattttgaagatcagcgtagttatc

SEQ ID NO: 129825 - DNA, 25 bp, Artificial
  probe
  misc_feature (1)..(25): SEQ ID NO: 1119; WAN024CR7_at; Start 428; Stop 452
tctattattttgaagatcagcgtag

SEQ ID NO: 129826 - DNA, 25 bp, Artificial
  probe
  misc_feature (1)..(25): SEQ ID NO: 1119; WAN024CR7_at; Start 425; Stop 449
gagtctattattttgaagatcagcg

SEQ ID NO: 129827 - DNA, 25 bp, Artificial
  probe
  misc_feature (1)..(25): SEQ ID NO: 1119; WAN024CR7_at; Start 221; Stop 245
gctggcaatatatacctgctccaca

SEQ ID NO: 129828 - DNA, 25 bp, Artificial
  probe
  misc_feature (1)..(25): SEQ ID NO: 1119; WAN024CR7_at; Start 559; Stop 583
ctagcacgtggttgggttaaggatt

SEQ ID NO: 129829 - DNA, 25 bp, Artificial
  probe
  misc_feature (1)..(25): SEQ ID NO: 1119; WAN024CR7_at; Start 541; Stop 565
agattgacggttggagagctagcac

SEQ ID NO: 129830 - DNA, 25 bp, Artificial
  probe
  misc_feature (1)..(25): SEQ ID NO: 1119; WAN024CR7_at; Start 144; Stop 168
tctaaaagaaacctactggagagtg

SEQ ID NO: 129831 - DNA, 25 bp, Artificial
  probe
  misc_feature (1)..(25): SEQ ID NO: 1119; WAN024CR7_at; Start 155; Stop 179
cctactggagagtgatagatgggaa

SEQ ID NO: 129832 - DNA, 25 bp, Artificial
  probe
  misc_feature (1)..(25): SEQ ID NO: 1119; WAN024CR7_at; Start 147; Stop 171
aaaagaaacctactggagagtgata

SEQ ID NO: 129833 - DNA, 25 bp, Artificial
  probe
  misc_feature (1)..(25): SEQ ID NO: 1119; WAN024CR7_at; Start 153; Stop 177
aacctactggagagtgatagatggg

SEQ ID NO: 129834 - DNA, 25 bp, Artificial
  probe
  misc_feature (1)..(25): SEQ ID NO: 1119; WAN024CR7_at; Start 33; Stop 57
actagccacatttttcttcggtttg

SEQ ID NO: 129835 - DNA, 25 bp, Artificial
  probe
  misc_feature (1)..(25): SEQ ID NO: 1119; WAN024CR7_at; Start 224; Stop 248
ggcaatatatacctgctccacacaa

SEQ ID NO: 129836 - DNA, 25 bp, Artificial
  probe
  misc_feature (1)..(25): SEQ ID NO: 1119; WAN024CR7_at; Start 187; Stop 211
tattttgatcctttatccggagaga

SEQ ID NO: 129837 - DNA, 25 bp, Artificial
  probe
  misc_feature (1)..(25): SEQ ID NO: 1119; WAN024CR7_at; Start 329; Stop 353
tacaagaatttgttggcaagcaagt

SEQ ID NO: 129838 - DNA, 25 bp, Artificial
  probe
  misc_feature (1)..(25): SEQ ID NO: 1119; WAN024CR7_at; Start 415; Stop 439
gcagagaaacgagtctattattttg

SEQ ID NO: 129839 - DNA, 25 bp, Artificial
  probe
  misc_feature (1)..(25): SEQ ID NO: 1119; WAN024CR7_at; Start 190; Stop 214
tttgatcctttatccggagagatgg

SEQ ID NO: 129840 - DNA, 25 bp, Artificial
  probe
  misc_feature (1)..(25): SEQ ID NO: 1119; WAN024CR7_at; Start 560; Stop 584
tagcacgtggttgggttaaggatta

SEQ ID NO: 129841 - DNA, 25 bp, Artificial
  probe
  misc_feature (1)..(25): SEQ ID NO: 1119; WAN024CR7_at; Start 532; Stop 556
cgcatcaacagattgacggttggag

SEQ ID NO: 129842 - DNA, 25 bp, Artificial
  probe
  misc_feature (1)..(25): SEQ ID NO: 1119; WAN024CR7_at; Start 448; Stop 472
cgtagttatcatactttaaaaactg

SEQ ID NO: 129843 - DNA, 25 bp, Artificial
  probe
  misc_feature (1)..(25): SEQ ID NO: 1119; WAN024CR7_at; Start 438; Stop 462
tgaagatcagcgtagttatcatact

SEQ ID NO: 129844 - DNA, 25 bp, Artificial
  probe
  misc_feature (1)..(25): SEQ ID NO: 1119; WAN024CR7_at; Start 543; Stop 567
attgacggttggagagctagcacgt

SEQ ID NO: 129845 - DNA, 25 bp, Artificial
  probe
  misc_feature (1)..(25): SEQ ID NO: 1119; WAN024CR7_at; Start 109; Stop 133
caagaaaatggtagaacctactaca

SEQ ID NO: 129846 - DNA, 25 bp, Artificial
  probe
  misc_feature (1)..(25): SEQ ID NO: 1119; WAN024CR7_at; Start 236; Stop 260
ctgctccacacaagggggttacgat

SEQ ID NO: 129847 - DNA, 25 bp, Artificial
  probe
  misc_feature (1)..(25): SEQ ID NO: 1119; WAN024CR7_at; Start 107; Stop 131
tccaagaaaatggtagaacctacta

SEQ ID NO: 129848 - DNA, 25 bp, Artificial
  probe
  misc_feature (1)..(25): SEQ ID NO: 1119; WAN024CR7_at; Start 539; Stop 563
acagattgacggttggagagctagc

SEQ ID NO: 129849 - DNA, 25 bp, Artificial
  probe
  misc_feature (1)..(25): SEQ ID NO: 1119; WAN024CR7_at; Start 388; Stop 412
catcatggggaagaatatgatagcc

SEQ ID NO: 129850 - DNA, 25 bp, Artificial
  probe
  misc_feature (1)..(25): SEQ ID NO: 1119; WAN024CR7_at; Start 536; Stop 560
tcaacagattgacggttggagagct

SEQ ID NO: 129851 - DNA, 25 bp, Artificial
  probe
  misc_feature (1)..(25): SEQ ID NO: 5237; WAN024CR8_at; Start 475; Stop 499
gatgatggcatgttcttggattacc

SEQ ID NO: 129852 - DNA, 25 bp, Artificial
  probe
  misc_feature (1)..(25): SEQ ID NO: 5237; WAN024CR8_at; Start 8; Stop 32
aaattgataatactttacagtatcc

SEQ ID NO: 129853 - DNA, 25 bp, Artificial
  probe
  misc_feature (1)..(25): SEQ ID NO: 5237; WAN024CR8_at; Start 725; Stop 749
cgggttggcaggagataaatgatac

SEQ ID NO: 129854 - DNA, 25 bp, Artificial
  probe
  misc_feature (1)..(25): SEQ ID NO: 5237; WAN024CR8_at; Start 465; Stop 489
agttttaagtgatgatggcatgttc

SEQ ID NO: 129855 - DNA, 25 bp, Artificial
  probe
  misc_feature (1)..(25): SEQ ID NO: 5237; WAN024CR8_at; Start 201; Stop 225
tccggctgttagtccaagtcaagaa

SEQ ID NO: 129856 - DNA, 25 bp, Artificial
  probe
  misc_feature (1)..(25): SEQ ID NO: 5237; WAN024CR8_at; Start 666; Stop 690
tgaaggatggaagaaaataaatggt

SEQ ID NO: 129857 - DNA, 25 bp, Artificial
  probe
  misc_feature (1)..(25): SEQ ID NO: 5237; WAN024CR8_at; Start 195; Stop 219
tgttcttccggctgttagtccaagt

SEQ ID NO: 129858 - DNA, 25 bp, Artificial
  probe
  misc_feature (1)..(25): SEQ ID NO: 5237; WAN024CR8_at; Start 761; Stop 785
tagacagttccggtaagatgcttac

SEQ ID NO: 129859 - DNA, 25 bp, Artificial
  probe
  misc_feature (1)..(25): SEQ ID NO: 5237; WAN024CR8_at; Start 184; Stop 208
gatgatatttatgttcttccggctg

SEQ ID NO: 129860 - DNA, 25 bp, Artificial
  probe
  misc_feature (1)..(25): SEQ ID NO: 5237; WAN024CR8_at; Start 38; Stop 62
cgacttcagctatggttttatctaa

SEQ ID NO: 129861 - DNA, 25 bp, Artificial
  probe
  misc_feature (1)..(25): SEQ ID NO: 5237; WAN024CR8_at; Start 137; Stop 161
ttacagcggctcacaactactacag

SEQ ID NO: 129862 - DNA, 25 bp, Artificial
  probe
  misc_feature (1)..(25): SEQ ID NO: 5237; WAN024CR8_at; Start 162; Stop 186
acatgactatgggaaagaagcggat

SEQ ID NO: 129863 - DNA, 25 bp, Artificial
  probe
  misc_feature (1)..(25): SEQ ID NO: 5237; WAN024CR8_at; Start 335; Stop 359
ccattggtgcaaaattagggacttt

SEQ ID NO: 129864 - DNA, 25 bp, Artificial
  probe
  misc_feature (1)..(25): SEQ ID NO: 5237; WAN024CR8_at; Start 150; Stop 174
caactactacagacatgactatggg

SEQ ID NO: 129865 - DNA, 25 bp, Artificial
  probe
  misc_feature (1)..(25): SEQ ID NO: 5237; WAN024CR8_at; Start 67; Stop 91
tatggagtagccgatggaatgaatg

SEQ ID NO: 129866 - DNA, 25 bp, Artificial
  probe
  misc_feature (1)..(25): SEQ ID NO: 5237; WAN024CR8_at; Start 568; Stop 592
catactttaggagatggagctaatc

SEQ ID NO: 129867 - DNA, 25 bp, Artificial
  probe
  misc_feature (1)..(25): SEQ ID NO: 5237; WAN024CR8_at; Start 658; Stop 682
tactctcttgaaggatggaagaaaa

SEQ ID NO: 129868 - DNA, 25 bp, Artificial
  probe
  misc_feature (1)..(25): SEQ ID NO: 5237; WAN024CR8_at; Start 712; Stop 736
catgataaacaaacgggttggcagg

SEQ ID NO: 129869 - DNA, 25 bp, Artificial
  probe
  misc_feature (1)..(25): SEQ ID NO: 5237; WAN024CR8_at; Start 74; Stop 98
tagccgatggaatgaatgtagaagg

SEQ ID NO: 129870 - DNA, 25 bp, Artificial
  probe
  misc_feature (1)..(25): SEQ ID NO: 5237; WAN024CR8_at; Start 583; Stop 607
ggagctaatcaaattaacagtgcag

SEQ ID NO: 129871 - DNA, 25 bp, Artificial
  probe
  misc_feature (1)..(25): SEQ ID NO: 5237; WAN024CR8_at; Start 717; Stop 741
taaacaaacgggttggcaggagata

SEQ ID NO: 129872 - DNA, 25 bp, Artificial
  probe
  misc_feature (1)..(25): SEQ ID NO: 5237; WAN024CR8_at; Start 354; Stop 378
gactttgggtcttcctactagtcaa

SEQ ID NO: 129873 - DNA, 25 bp, Artificial
  probe
  misc_feature (1)..(25): SEQ ID NO: 5237; WAN024CR8_at; Start 168; Stop 192
ctatgggaaagaagcggatgatatt

SEQ ID NO: 129874 - DNA, 25 bp, Artificial
  probe
  misc_feature (1)..(25): SEQ ID NO: 5237; WAN024CR8_at; Start 380; Stop 404
aaaatttgacaggaataactgtgac

SEQ ID NO: 129875 - DNA, 25 bp, Artificial
  probe
  misc_feature (1)..(25): SEQ ID NO: 5237; WAN024CR8_at; Start 751; Stop 775
tggtattatttagacagttccggta

SEQ ID NO: 129876 - DNA, 25 bp, Artificial
  probe
  misc_feature (1)..(25): SEQ ID NO: 5237; WAN024CR8_at; Start 391; Stop 415
ggaataactgtgactatcacaggct

SEQ ID NO: 129877 - DNA, 25 bp, Artificial
  probe
  misc_feature (1)..(25): SEQ ID NO: 5237; WAN024CR8_at; Start 306; Stop 330
tgacttggctttattaattctagaa

SEQ ID NO: 129878 - DNA, 25 bp, Artificial
  probe
  misc_feature (1)..(25): SEQ ID NO: 5237; WAN024CR8_at; Start 557; Stop 581
tagtaggagtgcatactttaggaga

SEQ ID NO: 129879 - DNA, 25 bp, Artificial
  probe
  misc_feature (1)..(25): SEQ ID NO: 5237; WAN024CR8_at; Start 705; Stop 729
tagacaacatgataaacaaacgggt

SEQ ID NO: 129880 - DNA, 25 bp, Artificial
  probe
  misc_feature (1)..(25): SEQ ID NO: 5237; WAN024CR8_at; Start 651; Stop 675
taaaggttactctcttgaaggatgg

SEQ ID NO: 129881 - DNA, 25 bp, Artificial
  probe
  misc_feature (1)..(25): SEQ ID NO: 5237; WAN024CR8_at; Start 294; Stop 318
tgcaagggaatatgacttggcttta

SEQ ID NO: 129882 - DNA, 25 bp, Artificial
  probe
  misc_feature (1)..(25): SEQ ID NO: 5237; WAN024CR8_at; Start 124; Stop 148
gataatgtgttaattacagcggctc

SEQ ID NO: 129883 - DNA, 25 bp, Artificial
  probe
  misc_feature (1)..(25): SEQ ID NO: 5237; WAN024CR8_at; Start 142; Stop 166
gcggctcacaactactacagacatg

SEQ ID NO: 129884 - DNA, 25 bp, Artificial
  probe
  misc_feature (1)..(25): SEQ ID NO: 5237; WAN024CR8_at; Start 56; Stop 80
tatctaagtattatggagtagccga

SEQ ID NO: 129885 - DNA, 25 bp, Artificial
  probe
  misc_feature (1)..(25): SEQ ID NO: 7534; WAN024CR9_at; Start 124; Stop 148
actggtcaagagacggtagggttca

SEQ ID NO: 129886 - DNA, 25 bp, Artificial
  probe
  misc_feature (1)..(25): SEQ ID NO: 7534; WAN024CR9_at; Start 204; Stop 228
gcttcaaaatcaattcaggcttgcc

SEQ ID NO: 129887 - DNA, 25 bp, Artificial
  probe
  misc_feature (1)..(25): SEQ ID NO: 7534; WAN024CR9_at; Start 257; Stop 281
gcgataatcccttggcctgctgcct

SEQ ID NO: 129888 - DNA, 25 bp, Artificial
  probe
  misc_feature (1)..(25): SEQ ID NO: 7534; WAN024CR9_at; Start 9; Stop 33
tcttgatttcaaaacgagcccagcg

SEQ ID NO: 129889 - DNA, 25 bp, Artificial
  probe
  misc_feature (1)..(25): SEQ ID NO: 7534; WAN024CR9_at; Start 69; Stop 93
cagtcaagcgcatatcagcattgtc

SEQ ID NO: 129890 - DNA, 25 bp, Artificial
  probe
  misc_feature (1)..(25): SEQ ID NO: 7534; WAN024CR9_at; Start 30; Stop 54
agcgttcatcgtccacaaggccaat

SEQ ID NO: 129891 - DNA, 25 bp, Artificial
  probe
  misc_feature (1)..(25): SEQ ID NO: 7534; WAN024CR9_at; Start 113; Stop 137
tattcagcacgactggtcaagagac

SEQ ID NO: 129892 - DNA, 25 bp, Artificial
  probe
  misc_feature (1)..(25): SEQ ID NO: 7534; WAN024CR9_at; Start 13; Stop 37
gatttcaaaacgagcccagcgttca

SEQ ID NO: 129893 - DNA, 25 bp, Artificial
  probe
  misc_feature (1)..(25): SEQ ID NO: 7534; WAN024CR9_at; Start 17; Stop 41
tcaaaacgagcccagcgttcatcgt

SEQ ID NO: 129894 - DNA, 25 bp, Artificial
  probe
  misc_feature (1)..(25): SEQ ID NO: 7534; WAN024CR9_at; Start 52; Stop 76
aatctcgcgtcccatctcagtcaag

SEQ ID NO: 129895 - DNA, 25 bp, Artificial
  probe
  misc_feature (1)..(25): SEQ ID NO: 7534; WAN024CR9_at; Start 240; Stop 264
gagccgcattgatacccgcgataat

SEQ ID NO: 129896 - DNA, 25 bp, Artificial
  probe
  misc_feature (1)..(25): SEQ ID NO: 7534; WAN024CR9_at; Start 108; Stop 132
gacggtattcagcacgactggtcaa

SEQ ID NO: 129897 - DNA, 25 bp, Artificial
  probe
  misc_feature (1)..(25): SEQ ID NO: 7534; WAN024CR9_at; Start 64; Stop 88
catctcagtcaagcgcatatcagca

SEQ ID NO: 129898 - DNA, 25 bp, Artificial
  probe
  misc_feature (1)..(25): SEQ ID NO: 7534; WAN024CR9_at; Start 93; Stop 117
catgacgaagaatgagacggtattc

SEQ ID NO: 129899 - DNA, 25 bp, Artificial
  probe
  misc_feature (1)..(25): SEQ ID NO: 7534; WAN024CR9_at; Start 198; Stop 222
cactgcgcttcaaaatcaattcagg

SEQ ID NO: 129900 - DNA, 25 bp, Artificial
  probe
  misc_feature (1)..(25): SEQ ID NO: 7534; WAN024CR9_at; Start 78; Stop 102
gcatatcagcattgtcatgacgaag

SEQ ID NO: 129901 - DNA, 25 bp, Artificial
  probe
  misc_feature (1)..(25): SEQ ID NO: 7534; WAN024CR9_at; Start 234; Stop 258
ttttcagagccgcattgatacccgc

SEQ ID NO: 129902 - DNA, 25 bp, Artificial
  probe
  misc_feature (1)..(25): SEQ ID NO: 7534; WAN024CR9_at; Start 34; Stop 58
ttcatcgtccacaaggccaatctcg

SEQ ID NO: 129903 - DNA, 25 bp, Artificial
  probe
  misc_feature (1)..(25): SEQ ID NO: 7534; WAN024CR9_at; Start 249; Stop 273
tgatacccgcgataatcccttggcc

SEQ ID NO: 129904 - DNA, 25 bp, Artificial
  probe
  misc_feature (1)..(25): SEQ ID NO: 7534; WAN024CR9_at; Start 130; Stop 154
caagagacggtagggttcaatggtt

SEQ ID NO: 129905 - DNA, 25 bp, Artificial
  probe
  misc_feature (1)..(25): SEQ ID NO: 7534; WAN024CR9_at; Start 237; Stop 261
tcagagccgcattgatacccgcgat

SEQ ID NO: 129906 - DNA, 25 bp, Artificial
  probe
  misc_feature (1)..(25): SEQ ID NO: 7534; WAN024CR9_at; Start 208; Stop 232
caaaatcaattcaggcttgccttgg

SEQ ID NO: 129907 - DNA, 25 bp, Artificial
  probe
  misc_feature (1)..(25): SEQ ID NO: 7534; WAN024CR9_at; Start 157; Stop 181
cttggtcaccaagtcgtcgatcatc

SEQ ID NO: 129908 - DNA, 25 bp, Artificial
  probe
  misc_feature (1)..(25): SEQ ID NO: 7534; WAN024CR9_at; Start 73; Stop 97
caagcgcatatcagcattgtcatga

SEQ ID NO: 129909 - DNA, 25 bp, Artificial
  probe
  misc_feature (1)..(25): SEQ ID NO: 7534; WAN024CR9_at; Start 117; Stop 141
cagcacgactggtcaagagacggta

SEQ ID NO: 129910 - DNA, 25 bp, Artificial
  probe
  misc_feature (1)..(25): SEQ ID NO: 7534; WAN024CR9_at; Start 166; Stop 190
caagtcgtcgatcatcaccccgata

SEQ ID NO: 129911 - DNA, 25 bp, Artificial
  probe
  misc_feature (1)..(25): SEQ ID NO: 7534; WAN024CR9_at; Start 218; Stop 242
tcaggcttgccttggattttcagag

SEQ ID NO: 129912 - DNA, 25 bp, Artificial
  probe
  misc_feature (1)..(25): SEQ ID NO: 7534; WAN024CR9_at; Start 102; Stop 126
gaatgagacggtattcagcacgact

SEQ ID NO: 129913 - DNA, 25 bp, Artificial
  probe
  misc_feature (1)..(25): SEQ ID NO: 7534; WAN024CR9_at; Start 270; Stop 294
ggcctgctgcctcttcgtaacctga

SEQ ID NO: 129914 - DNA, 25 bp, Artificial
  probe
  misc_feature (1)..(25): SEQ ID NO: 7534; WAN024CR9_at; Start 58; Stop 82
gcgtcccatctcagtcaagcgcata

SEQ ID NO: 129915 - DNA, 25 bp, Artificial
  probe
  misc_feature (1)..(25): SEQ ID NO: 7534; WAN024CR9_at; Start 170; Stop 194
tcgtcgatcatcaccccgatataac

SEQ ID NO: 129916 - DNA, 25 bp, Artificial
  probe
  misc_feature (1)..(25): SEQ ID NO: 7534; WAN024CR9_at; Start 187; Stop 211
gatataaccatcactgcgcttcaaa

SEQ ID NO: 129917 - DNA, 25 bp, Artificial
  probe
  misc_feature (1)..(25): SEQ ID NO: 7534; WAN024CR9_at; Start 227; Stop 251
ccttggattttcagagccgcattga

SEQ ID NO: 129918 - DNA, 25 bp, Artificial
  probe
  misc_feature (1)..(25): SEQ ID NO: 7534; WAN024CR9_at; Start 87; Stop 111
cattgtcatgacgaagaatgagacg

SEQ ID NO: 129919 - DNA, 25 bp, Artificial
  probe
  misc_feature (1)..(25): SEQ ID NO: 5720; WAN024CRA_at; Start 128; Stop 152
gctgttattattgtagcaaattgag

SEQ ID NO: 129920 - DNA, 25 bp, Artificial
  probe
  misc_feature (1)..(25): SEQ ID NO: 5720; WAN024CRA_at; Start 72; Stop 96
gaagtgcaggacaaaaaagcctgca

SEQ ID NO: 129921 - DNA, 25 bp, Artificial
  probe
  misc_feature (1)..(25): SEQ ID NO: 5720; WAN024CRA_at; Start 56; Stop 80
cagtcaaaactacaaagaagtgcag

SEQ ID NO: 129922 - DNA, 25 bp, Artificial
  probe
  misc_feature (1)..(25): SEQ ID NO: 5720; WAN024CRA_at; Start 112; Stop 136
gaccatcatttctattgctgttatt

SEQ ID NO: 129923 - DNA, 25 bp, Artificial
  probe
  misc_feature (1)..(25): SEQ ID NO: 5720; WAN024CRA_at; Start 185; Stop 209
tgtccatcgcggtaagcattgtcaa

SEQ ID NO: 129924 - DNA, 25 bp, Artificial
  probe
  misc_feature (1)..(25): SEQ ID NO: 5720; WAN024CRA_at; Start 101; Stop 125
ccatgagctttgaccatcatttcta

SEQ ID NO: 129925 - DNA, 25 bp, Artificial
  probe
  misc_feature (1)..(25): SEQ ID NO: 5720; WAN024CRA_at; Start 139; Stop 163
tgtagcaaattgagaaaatttgtca

SEQ ID NO: 129926 - DNA, 25 bp, Artificial
  probe
  misc_feature (1)..(25): SEQ ID NO: 5720; WAN024CRA_at; Start 83; Stop 107
caaaaaagcctgcaacatccatgag

SEQ ID NO: 129927 - DNA, 25 bp, Artificial
  probe
  misc_feature (1)..(25): SEQ ID NO: 5720; WAN024CRA_at; Start 188; Stop 212
ccatcgcggtaagcattgtcaatca

SEQ ID NO: 129928 - DNA, 25 bp, Artificial
  probe
  misc_feature (1)..(25): SEQ ID NO: 5720; WAN024CRA_at; Start 19; Stop 43
gagtcattcttgtcctttcccttaa

SEQ ID NO: 129929 - DNA, 25 bp, Artificial
  probe
  misc_feature (1)..(25): SEQ ID NO: 5720; WAN024CRA_at; Start 45; Stop 69
cgacacaaaaacagtcaaaactaca

SEQ ID NO: 129930 - DNA, 25 bp, Artificial
  probe
  misc_feature (1)..(25): SEQ ID NO: 5720; WAN024CRA_at; Start 155; Stop 179
aatttgtcaatctaaatgtactgac

SEQ ID NO: 129931 - DNA, 25 bp, Artificial
  probe
  misc_feature (1)..(25): SEQ ID NO: 5720; WAN024CRA_at; Start 176; Stop 200
tgacaaacttgtccatcgcggtaag

SEQ ID NO: 129932 - DNA, 25 bp, Artificial
  probe
  misc_feature (1)..(25): SEQ ID NO: 5720; WAN024CRA_at; Start 89; Stop 113
agcctgcaacatccatgagctttga

SEQ ID NO: 129933 - DNA, 25 bp, Artificial
  probe
  misc_feature (1)..(25): SEQ ID NO: 5720; WAN024CRA_at; Start 85; Stop 109
aaaaagcctgcaacatccatgagct

SEQ ID NO: 129934 - DNA, 25 bp, Artificial
  probe
  misc_feature (1)..(25): SEQ ID NO: 5720; WAN024CRA_at; Start 59; Stop 83
tcaaaactacaaagaagtgcaggac

SEQ ID NO: 129935 - DNA, 25 bp, Artificial
  probe
  misc_feature (1)..(25): SEQ ID NO: 5720; WAN024CRA_at; Start 178; Stop 202
acaaacttgtccatcgcggtaagca

SEQ ID NO: 129936 - DNA, 25 bp, Artificial
  probe
  misc_feature (1)..(25): SEQ ID NO: 5720; WAN024CRA_at; Start 68; Stop 92
caaagaagtgcaggacaaaaaagcc

SEQ ID NO: 129937 - DNA, 25 bp, Artificial
  probe
  misc_feature (1)..(25): SEQ ID NO: 5720; WAN024CRA_at; Start 191; Stop 215
tcgcggtaagcattgtcaatcaaac

SEQ ID NO: 129938 - DNA, 25 bp, Artificial
  probe
  misc_feature (1)..(25): SEQ ID NO: 5720; WAN024CRA_at; Start 201; Stop 225
cattgtcaatcaaaccgccacctag

SEQ ID NO: 129939 - DNA, 25 bp, Artificial
  probe
  misc_feature (1)..(25): SEQ ID NO: 5720; WAN024CRA_at; Start 180; Stop 204
aaacttgtccatcgcggtaagcatt

SEQ ID NO: 129940 - DNA, 25 bp, Artificial
  probe
  misc_feature (1)..(25): SEQ ID NO: 5720; WAN024CRA_at; Start 165; Stop 189
tctaaatgtactgacaaacttgtcc

SEQ ID NO: 129941 - DNA, 25 bp, Artificial
  probe
  misc_feature (1)..(25): SEQ ID NO: 5720; WAN024CRA_at; Start 4; Stop 28
tccgaaagtcttgttgagtcattct

SEQ ID NO: 129942 - DNA, 25 bp, Artificial
  probe
  misc_feature (1)..(25): SEQ ID NO: 5720; WAN024CRA_at; Start 15; Stop 39
tgttgagtcattcttgtcctttccc

SEQ ID NO: 129943 - DNA, 25 bp, Artificial
  probe
  misc_feature (1)..(25): SEQ ID NO: 5720; WAN024CRA_at; Start 95; Stop 119
caacatccatgagctttgaccatca

SEQ ID NO: 129944 - DNA, 25 bp, Artificial
  probe
  misc_feature (1)..(25): SEQ ID NO: 5720; WAN024CRA_at; Start 91; Stop 115
cctgcaacatccatgagctttgacc

SEQ ID NO: 129945 - DNA, 25 bp, Artificial
  probe
  misc_feature (1)..(25): SEQ ID NO: 5720; WAN024CRA_at; Start 9; Stop 33
aagtcttgttgagtcattcttgtcc

SEQ ID NO: 129946 - DNA, 25 bp, Artificial
  probe
  misc_feature (1)..(25): SEQ ID NO: 5720; WAN024CRA_at; Start 195; Stop 219
ggtaagcattgtcaatcaaaccgcc

SEQ ID NO: 129947 - DNA, 25 bp, Artificial
  probe
  misc_feature (1)..(25): SEQ ID NO: 5720; WAN024CRA_at; Start 171; Stop 195
tgtactgacaaacttgtccatcgcg

SEQ ID NO: 129948 - DNA, 25 bp, Artificial
  probe
  misc_feature (1)..(25): SEQ ID NO: 5720; WAN024CRA_at; Start 62; Stop 86
aaactacaaagaagtgcaggacaaa

SEQ ID NO: 129949 - DNA, 25 bp, Artificial
  probe
  misc_feature (1)..(25): SEQ ID NO: 5720; WAN024CRA_at; Start 1; Stop 25
ttgtccgaaagtcttgttgagtcat

SEQ ID NO: 129950 - DNA, 25 bp, Artificial
  probe
  misc_feature (1)..(25): SEQ ID NO: 5720; WAN024CRA_at; Start 105; Stop 129
gagctttgaccatcatttctattgc

SEQ ID NO: 129951 - DNA, 25 bp, Artificial
  probe
  misc_feature (1)..(25): SEQ ID NO: 5720; WAN024CRA_at; Start 81; Stop 105
gacaaaaaagcctgcaacatccatg

SEQ ID NO: 129952 - DNA, 25 bp, Artificial
  probe
  misc_feature (1)..(25): SEQ ID NO: 5720; WAN024CRA_at; Start 197; Stop 221
taagcattgtcaatcaaaccgccac

SEQ ID NO: 129953 - DNA, 25 bp, Artificial
  probe
  misc_feature (1)..(25): SEQ ID NO: 5664; WAN024CRB_at; Start 211; Stop 235
tacttggtccttgacataatcctca

SEQ ID NO: 129954 - DNA, 25 bp, Artificial
  probe
  misc_feature (1)..(25): SEQ ID NO: 5664; WAN024CRB_at; Start 202; Stop 226
ccagcatggtacttggtccttgaca

SEQ ID NO: 129955 - DNA, 25 bp, Artificial
  probe
  misc_feature (1)..(25): SEQ ID NO: 5664; WAN024CRB_at; Start 192; Stop 216
tataggtcaaccagcatggtacttg

SEQ ID NO: 129956 - DNA, 25 bp, Artificial
  probe
  misc_feature (1)..(25): SEQ ID NO: 5664; WAN024CRB_at; Start 154; Stop 178
gaggttgttttggataatctcatga

SEQ ID NO: 129957 - DNA, 25 bp, Artificial
  probe
  misc_feature (1)..(25): SEQ ID NO: 5664; WAN024CRB_at; Start 194; Stop 218
taggtcaaccagcatggtacttggt

SEQ ID NO: 129958 - DNA, 25 bp, Artificial
  probe
  misc_feature (1)..(25): SEQ ID NO: 5664; WAN024CRB_at; Start 208; Stop 232
tggtacttggtccttgacataatcc

SEQ ID NO: 129959 - DNA, 25 bp, Artificial
  probe
  misc_feature (1)..(25): SEQ ID NO: 5664; WAN024CRB_at; Start 186; Stop 210
cattggtataggtcaaccagcatgg

SEQ ID NO: 129960 - DNA, 25 bp, Artificial
  probe
  misc_feature (1)..(25): SEQ ID NO: 5664; WAN024CRB_at; Start 147; Stop 171
cacggtggaggttgttttggataat

SEQ ID NO: 129961 - DNA, 25 bp, Artificial
  probe
  misc_feature (1)..(25): SEQ ID NO: 5664; WAN024CRB_at; Start 43; Stop 67
gaagagttggtgacgttccttgtcc

SEQ ID NO: 129962 - DNA, 25 bp, Artificial
  probe
  misc_feature (1)..(25): SEQ ID NO: 5664; WAN024CRB_at; Start 46; Stop 70
gagttggtgacgttccttgtccgca

SEQ ID NO: 129963 - DNA, 25 bp, Artificial
  probe
  misc_feature (1)..(25): SEQ ID NO: 5664; WAN024CRB_at; Start 189; Stop 213
tggtataggtcaaccagcatggtac

SEQ ID NO: 129964 - DNA, 25 bp, Artificial
  probe
  misc_feature (1)..(25): SEQ ID NO: 5664; WAN024CRB_at; Start 54; Stop 78
gacgttccttgtccgcaaagcgcac

SEQ ID NO: 129965 - DNA, 25 bp, Artificial
  probe
  misc_feature (1)..(25): SEQ ID NO: 5664; WAN024CRB_at; Start 199; Stop 223
caaccagcatggtacttggtccttg

SEQ ID NO: 129966 - DNA, 25 bp, Artificial
  probe
  misc_feature (1)..(25): SEQ ID NO: 5664; WAN024CRB_at; Start 162; Stop 186
tttggataatctcatgactggtacc

SEQ ID NO: 129967 - DNA, 25 bp, Artificial
  probe
  misc_feature (1)..(25): SEQ ID NO: 5664; WAN024CRB_at; Start 61; Stop 85
cttgtccgcaaagcgcacaatcttg

SEQ ID NO: 129968 - DNA, 25 bp, Artificial
  probe
  misc_feature (1)..(25): SEQ ID NO: 5664; WAN024CRB_at; Start 181; Stop 205
ggtaccattggtataggtcaaccag

SEQ ID NO: 129969 - DNA, 25 bp, Artificial
  probe
  misc_feature (1)..(25): SEQ ID NO: 5664; WAN024CRB_at; Start 169; Stop 193
aatctcatgactggtaccattggta

SEQ ID NO: 129970 - DNA, 25 bp, Artificial
  probe
  misc_feature (1)..(25): SEQ ID NO: 5664; WAN024CRB_at; Start 173; Stop 197
tcatgactggtaccattggtatagg

SEQ ID NO: 129971 - DNA, 25 bp, Artificial
  probe
  misc_feature (1)..(25): SEQ ID NO: 5664; WAN024CRB_at; Start 51; Stop 75
ggtgacgttccttgtccgcaaagcg

SEQ ID NO: 129972 - DNA, 25 bp, Artificial
  probe
  misc_feature (1)..(25): SEQ ID NO: 5664; WAN024CRB_at; Start 166; Stop 190
gataatctcatgactggtaccattg

SEQ ID NO: 129973 - DNA, 25 bp, Artificial
  probe
  misc_feature (1)..(25): SEQ ID NO: 5664; WAN024CRB_at; Start 37; Stop 61
ctcaaggaagagttggtgacgttcc

SEQ ID NO: 129974 - DNA, 25 bp, Artificial
  probe
  misc_feature (1)..(25): SEQ ID NO: 5664; WAN024CRB_at; Start 131; Stop 155
cctgtaaacataggcgcacggtgga

SEQ ID NO: 129975 - DNA, 25 bp, Artificial
  probe
  misc_feature (1)..(25): SEQ ID NO: 5664; WAN024CRB_at; Start 32; Stop 56
tctggctcaaggaagagttggtgac

SEQ ID NO: 129976 - DNA, 25 bp, Artificial
  probe
  misc_feature (1)..(25): SEQ ID NO: 5664; WAN024CRB_at; Start 57; Stop 81
gttccttgtccgcaaagcgcacaat

SEQ ID NO: 129977 - DNA, 25 bp, Artificial
  probe
  misc_feature (1)..(25): SEQ ID NO: 5664; WAN024CRB_at; Start 216; Stop 240
ggtccttgacataatcctcatcacg

SEQ ID NO: 129978 - DNA, 25 bp, Artificial
  probe
  misc_feature (1)..(25): SEQ ID NO: 5664; WAN024CRB_at; Start 124; Stop 148
gaccacacctgtaaacataggcgca

SEQ ID NO: 129979 - DNA, 25 bp, Artificial
  probe
  misc_feature (1)..(25): SEQ ID NO: 5664; WAN024CRB_at; Start 183; Stop 207
taccattggtataggtcaaccagca

SEQ ID NO: 129980 - DNA, 25 bp, Artificial
  probe
  misc_feature (1)..(25): SEQ ID NO: 5664; WAN024CRB_at; Start 205; Stop 229
gcatggtacttggtccttgacataa

SEQ ID NO: 129981 - DNA, 25 bp, Artificial
  probe
  misc_feature (1)..(25): SEQ ID NO: 5664; WAN024CRB_at; Start 118; Stop 142
tcccttgaccacacctgtaaacata

SEQ ID NO: 129982 - DNA, 25 bp, Artificial
  probe
  misc_feature (1)..(25): SEQ ID NO: 5664; WAN024CRB_at; Start 29; Stop 53
ccttctggctcaaggaagagttggt

SEQ ID NO: 129983 - DNA, 25 bp, Artificial
  probe
  misc_feature (1)..(25): SEQ ID NO: 5664; WAN024CRB_at; Start 219; Stop 243
ccttgacataatcctcatcacgtga

SEQ ID NO: 129984 - DNA, 25 bp, Artificial
  probe
  misc_feature (1)..(25): SEQ ID NO: 5664; WAN024CRB_at; Start 122; Stop 146
ttgaccacacctgtaaacataggcg

SEQ ID NO: 129985 - DNA, 25 bp, Artificial
  probe
  misc_feature (1)..(25): SEQ ID NO: 5664; WAN024CRB_at; Start 127; Stop 151
cacacctgtaaacataggcgcacgg

SEQ ID NO: 129986 - DNA, 25 bp, Artificial
  probe
  misc_feature (1)..(25): SEQ ID NO: 5664; WAN024CRB_at; Start 196; Stop 220
ggtcaaccagcatggtacttggtcc

SEQ ID NO: 129987 - DNA, 25 bp, Artificial
  probe
  misc_feature (1)..(25): SEQ ID NO: 4977; WAN024CRC_at; Start 51; Stop 75
cattgtccacgccacgaagcatgtg

SEQ ID NO: 129988 - DNA, 25 bp, Artificial
  probe
  misc_feature (1)..(25): SEQ ID NO: 4977; WAN024CRC_at; Start 24; Stop 48
ggctgaggaaataggtctgatcctt

SEQ ID NO: 129989 - DNA, 25 bp, Artificial
  probe
  misc_feature (1)..(25): SEQ ID NO: 4977; WAN024CRC_at; Start 28; Stop 52
gaggaaataggtctgatccttgcca

SEQ ID NO: 129990 - DNA, 25 bp, Artificial
  probe
  misc_feature (1)..(25): SEQ ID NO: 4977; WAN024CRC_at; Start 177; Stop 201
tttccttgttgcacataacgtccgg

SEQ ID NO: 129991 - DNA, 25 bp, Artificial
  probe
  misc_feature (1)..(25): SEQ ID NO: 4977; WAN024CRC_at; Start 183; Stop 207
tgttgcacataacgtccggatttgg

SEQ ID NO: 129992 - DNA, 25 bp, Artificial
  probe
  misc_feature (1)..(25): SEQ ID NO: 4977; WAN024CRC_at; Start 189; Stop 213
acataacgtccggatttggcgtgcg

SEQ ID NO: 129993 - DNA, 25 bp, Artificial
  probe
  misc_feature (1)..(25): SEQ ID NO: 4977; WAN024CRC_at; Start 12; Stop 36
cttgcgaaagttggctgaggaaata

SEQ ID NO: 129994 - DNA, 25 bp, Artificial
  probe
  misc_feature (1)..(25): SEQ ID NO: 4977; WAN024CRC_at; Start 83; Stop 107
ccatcctcatcacgcgccactcgag

SEQ ID NO: 129995 - DNA, 25 bp, Artificial
  probe
  misc_feature (1)..(25): SEQ ID NO: 4977; WAN024CRC_at; Start 198; Stop 222
ccggatttggcgtgcgccctgcacg

SEQ ID NO: 129996 - DNA, 25 bp, Artificial
  probe
  misc_feature (1)..(25): SEQ ID NO: 4977; WAN024CRC_at; Start 19; Stop 43
aagttggctgaggaaataggtctga

SEQ ID NO: 129997 - DNA, 25 bp, Artificial
  probe
  misc_feature (1)..(25): SEQ ID NO: 4977; WAN024CRC_at; Start 120; Stop 144
tcgctacatagtctgcccccaaggt

SEQ ID NO: 129998 - DNA, 25 bp, Artificial
  probe
  misc_feature (1)..(25): SEQ ID NO: 4977; WAN024CRC_at; Start 54; Stop 78
tgtccacgccacgaagcatgtgaac

SEQ ID NO: 129999 - DNA, 25 bp, Artificial
  probe
  misc_feature (1)..(25): SEQ ID NO: 4977; WAN024CRC_at; Start 163; Stop 187
ggccttgaacttgatttccttgttg

SEQ ID NO: 130000 - DNA, 25 bp, Artificial
  probe
  misc_feature (1)..(25): SEQ ID NO: 4977; WAN024CRC_at; Start 180; Stop 204
ccttgttgcacataacgtccggatt

SEQ ID NO: 130001 - DNA, 25 bp, Artificial
  probe
  misc_feature (1)..(25): SEQ ID NO: 4977; WAN024CRC_at; Start 37; Stop 61
ggtctgatccttgccattgtccacg

SEQ ID NO: 130002 - DNA, 25 bp, Artificial
  probe
  misc_feature (1)..(25): SEQ ID NO: 4977; WAN024CRC_at; Start 47; Stop 71
ttgccattgtccacgccacgaagca

SEQ ID NO: 130003 - DNA, 25 bp, Artificial
  probe
  misc_feature (1)..(25): SEQ ID NO: 4977; WAN024CRC_at; Start 149; Stop 173
gcatagtccaaaaaggccttgaact

SEQ ID NO: 130004 - DNA, 25 bp, Artificial
  probe
  misc_feature (1)..(25): SEQ ID NO: 4977; WAN024CRC_at; Start 35; Stop 59
taggtctgatccttgccattgtcca

SEQ ID NO: 130005 - DNA, 25 bp, Artificial
  probe
  misc_feature (1)..(25): SEQ ID NO: 4977; WAN024CRC_at; Start 186; Stop 210
tgcacataacgtccggatttggcgt

SEQ ID NO: 130006 - DNA, 25 bp, Artificial
  probe
  misc_feature (1)..(25): SEQ ID NO: 4977; WAN024CRC_at; Start 2; Stop 26
tgaagttgttcttgcgaaagttggc

SEQ ID NO: 130007 - DNA, 25 bp, Artificial
  probe
  misc_feature (1)..(25): SEQ ID NO: 4977; WAN024CRC_at; Start 16; Stop 40
cgaaagttggctgaggaaataggtc

SEQ ID NO: 130008 - DNA, 25 bp, Artificial
  probe
  misc_feature (1)..(25): SEQ ID NO: 4977; WAN024CRC_at; Start 5; Stop 29
agttgttcttgcgaaagttggctga

SEQ ID NO: 130009 - DNA, 25 bp, Artificial
  probe
  misc_feature (1)..(25): SEQ ID NO: 4977; WAN024CRC_at; Start 22; Stop 46
ttggctgaggaaataggtctgatcc

SEQ ID NO: 130010 - DNA, 25 bp, Artificial
  probe
  misc_feature (1)..(25): SEQ ID NO: 4977; WAN024CRC_at; Start 160; Stop 184
aaaggccttgaacttgatttccttg

SEQ ID NO: 130011 - DNA, 25 bp, Artificial
  probe
  misc_feature (1)..(25): SEQ ID NO: 4977; WAN024CRC_at; Start 146; Stop 170
atggcatagtccaaaaaggccttga

SEQ ID NO: 130012 - DNA, 25 bp, Artificial
  probe
  misc_feature (1)..(25): SEQ ID NO: 4977; WAN024CRC_at; Start 113; Stop 137
tgcccagtcgctacatagtctgccc

SEQ ID NO: 130013 - DNA, 25 bp, Artificial
  probe
  misc_feature (1)..(25): SEQ ID NO: 4977; WAN024CRC_at; Start 31; Stop 55
gaaataggtctgatccttgccattg

SEQ ID NO: 130014 - DNA, 25 bp, Artificial
  probe
  misc_feature (1)..(25): SEQ ID NO: 4977; WAN024CRC_at; Start 151; Stop 175
atagtccaaaaaggccttgaacttg

SEQ ID NO: 130015 - DNA, 25 bp, Artificial
  probe
  misc_feature (1)..(25): SEQ ID NO: 4977; WAN024CRC_at; Start 169; Stop 193
gaacttgatttccttgttgcacata

SEQ ID NO: 130016 - DNA, 25 bp, Artificial
  probe
  misc_feature (1)..(25): SEQ ID NO: 4977; WAN024CRC_at; Start 194; Stop 218
acgtccggatttggcgtgcgccctg

SEQ ID NO: 130017 - DNA, 25 bp, Artificial
  probe
  misc_feature (1)..(25): SEQ ID NO: 4977; WAN024CRC_at; Start 204; Stop 228
ttggcgtgcgccctgcacggtattc

SEQ ID NO: 130018 - DNA, 25 bp, Artificial
  probe
  misc_feature (1)..(25): SEQ ID NO: 4977; WAN024CRC_at; Start 191; Stop 215
ataacgtccggatttggcgtgcgcc

SEQ ID NO: 130019 - DNA, 25 bp, Artificial
  probe
  misc_feature (1)..(25): SEQ ID NO: 4977; WAN024CRC_at; Start 8; Stop 32
tgttcttgcgaaagttggctgagga

SEQ ID NO: 130020 - DNA, 25 bp, Artificial
  probe
  misc_feature (1)..(25): SEQ ID NO: 4977; WAN024CRC_at; Start 175; Stop 199
gatttccttgttgcacataacgtcc

SEQ ID NO: 130021 - DNA, 25 bp, Artificial
  probe
  misc_feature (1)..(25): SEQ ID NO: 4949; WAN024CRD_at; Start 362; Stop 386
tccttggctgtcactgcatcggtca

SEQ ID NO: 130022 - DNA, 25 bp, Artificial
  probe
  misc_feature (1)..(25): SEQ ID NO: 4949; WAN024CRD_at; Start 97; Stop 121
gccgatggtttctggattgatgagt

SEQ ID NO: 130023 - DNA, 25 bp, Artificial
  probe
  misc_feature (1)..(25): SEQ ID NO: 4949; WAN024CRD_at; Start 307; Stop 331
tggtccgatgaaggccaccacatct

SEQ ID NO: 130024 - DNA, 25 bp, Artificial
  probe
  misc_feature (1)..(25): SEQ ID NO: 4949; WAN024CRD_at; Start 354; Stop 378
gaaggaattccttggctgtcactgc

SEQ ID NO: 130025 - DNA, 25 bp, Artificial
  probe
  misc_feature (1)..(25): SEQ ID NO: 4949; WAN024CRD_at; Start 417; Stop 441
cattggtttccttgactggcttgag

SEQ ID NO: 130026 - DNA, 25 bp, Artificial
  probe
  misc_feature (1)..(25): SEQ ID NO: 4949; WAN024CRD_at; Start 392; Stop 416
ttgaagcccatctcctcaaccttgg

SEQ ID NO: 130027 - DNA, 25 bp, Artificial
  probe
  misc_feature (1)..(25): SEQ ID NO: 4949; WAN024CRD_at; Start 358; Stop 382
gaattccttggctgtcactgcatcg

SEQ ID NO: 130028 - DNA, 25 bp, Artificial
  probe
  misc_feature (1)..(25): SEQ ID NO: 4949; WAN024CRD_at; Start 371; Stop 395
gtcactgcatcggtcaagggtttga

SEQ ID NO: 130029 - DNA, 25 bp, Artificial
  probe
  misc_feature (1)..(25): SEQ ID NO: 4949; WAN024CRD_at; Start 18; Stop 42
tactacgatttttaccttccagata

SEQ ID NO: 130030 - DNA, 25 bp, Artificial
  probe
  misc_feature (1)..(25): SEQ ID NO: 4949; WAN024CRD_at; Start 46; Stop 70
catcaaaatagaaatatctgctggg

SEQ ID NO: 130031 - DNA, 25 bp, Artificial
  probe
  misc_feature (1)..(25): SEQ ID NO: 4949; WAN024CRD_at; Start 111; Stop 135
gattgatgagtttgaacttctgacg

SEQ ID NO: 130032 - DNA, 25 bp, Artificial
  probe
  misc_feature (1)..(25): SEQ ID NO: 4949; WAN024CRD_at; Start 335; Stop 359
taagaaacttctggacggcgaagga

SEQ ID NO: 130033 - DNA, 25 bp, Artificial
  probe
  misc_feature (1)..(25): SEQ ID NO: 4949; WAN024CRD_at; Start 63; Stop 87
ctgctgggtttactcccgaaatacg

SEQ ID NO: 130034 - DNA, 25 bp, Artificial
  probe
  misc_feature (1)..(25): SEQ ID NO: 4949; WAN024CRD_at; Start 32; Stop 56
ccttccagatacaccatcaaaatag

SEQ ID NO: 130035 - DNA, 25 bp, Artificial
  probe
  misc_feature (1)..(25): SEQ ID NO: 4949; WAN024CRD_at; Start 313; Stop 337
gatgaaggccaccacatcttggtaa

SEQ ID NO: 130036 - DNA, 25 bp, Artificial
  probe
  misc_feature (1)..(25): SEQ ID NO: 4949; WAN024CRD_at; Start 316; Stop 340
gaaggccaccacatcttggtaagaa

SEQ ID NO: 130037 - DNA, 25 bp, Artificial
  probe
  misc_feature (1)..(25): SEQ ID NO: 4949; WAN024CRD_at; Start 299; Stop 323
tctgcagctggtccgatgaaggcca

SEQ ID NO: 130038 - DNA, 25 bp, Artificial
  probe
  misc_feature (1)..(25): SEQ ID NO: 4949; WAN024CRD_at; Start 23; Stop 47
cgatttttaccttccagatacacca

SEQ ID NO: 130039 - DNA, 25 bp, Artificial
  probe
  misc_feature (1)..(25): SEQ ID NO: 4949; WAN024CRD_at; Start 2; Stop 26
tgaagagttttagaaatactacgat

SEQ ID NO: 130040 - DNA, 25 bp, Artificial
  probe
  misc_feature (1)..(25): SEQ ID NO: 4949; WAN024CRD_at; Start 344; Stop 368
tctggacggcgaaggaattccttgg

SEQ ID NO: 130041 - DNA, 25 bp, Artificial
  probe
  misc_feature (1)..(25): SEQ ID NO: 4949; WAN024CRD_at; Start 329; Stop 353
tcttggtaagaaacttctggacggc

SEQ ID NO: 130042 - DNA, 25 bp, Artificial
  probe
  misc_feature (1)..(25): SEQ ID NO: 4949; WAN024CRD_at; Start 267; Stop 291
caatcaattcgataatcttgtcatc

SEQ ID NO: 130043 - DNA, 25 bp, Artificial
  probe
  misc_feature (1)..(25): SEQ ID NO: 4949; WAN024CRD_at; Start 225; Stop 249
ccatggctttggaaatatagccttc

SEQ ID NO: 130044 - DNA, 25 bp, Artificial
  probe
  misc_feature (1)..(25): SEQ ID NO: 4949; WAN024CRD_at; Start 325; Stop 349
cacatcttggtaagaaacttctgga

SEQ ID NO: 130045 - DNA, 25 bp, Artificial
  probe
  misc_feature (1)..(25): SEQ ID NO: 4949; WAN024CRD_at; Start 412; Stop 436
cttggcattggtttccttgactggc

SEQ ID NO: 130046 - DNA, 25 bp, Artificial
  probe
  misc_feature (1)..(25): SEQ ID NO: 4949; WAN024CRD_at; Start 293; Stop 317
aagtcttctgcagctggtccgatga

SEQ ID NO: 130047 - DNA, 25 bp, Artificial
  probe
  misc_feature (1)..(25): SEQ ID NO: 4949; WAN024CRD_at; Start 89; Stop 113
ctggcttggccgatggtttctggat

SEQ ID NO: 130048 - DNA, 25 bp, Artificial
  probe
  misc_feature (1)..(25): SEQ ID NO: 4949; WAN024CRD_at; Start 367; Stop 391
ggctgtcactgcatcggtcaagggt

SEQ ID NO: 130049 - DNA, 25 bp, Artificial
  probe
  misc_feature (1)..(25): SEQ ID NO: 4949; WAN024CRD_at; Start 432; Stop 456
ctggcttgagtttgatactgtctag

SEQ ID NO: 130050 - DNA, 25 bp, Artificial
  probe
  misc_feature (1)..(25): SEQ ID NO: 4949; WAN024CRD_at; Start 385; Stop 409
caagggtttgaagcccatctcctca

SEQ ID NO: 130051 - DNA, 25 bp, Artificial
  probe
  misc_feature (1)..(25): SEQ ID NO: 4949; WAN024CRD_at; Start 425; Stop 449
tccttgactggcttgagtttgatac

SEQ ID NO: 130052 - DNA, 25 bp, Artificial
  probe
  misc_feature (1)..(25): SEQ ID NO: 4949; WAN024CRD_at; Start 256; Stop 280
gatttctgtttcaatcaattcgata

SEQ ID NO: 130053 - DNA, 25 bp, Artificial
  probe
  misc_feature (1)..(25): SEQ ID NO: 4949; WAN024CRD_at; Start 56; Stop 80
gaaatatctgctgggtttactcccg

SEQ ID NO: 130054 - DNA, 25 bp, Artificial
  probe
  misc_feature (1)..(25): SEQ ID NO: 4949; WAN024CRD_at; Start 400; Stop 424
catctcctcaaccttggcattggtt

SEQ ID NO: 130055 - DNA, 25 bp, Artificial
  probe
  misc_feature (1)..(25): SEQ ID NO: 5463; WAN024CRE_at; Start 238; Stop 262
gagcgtagagccgattgttcttttc

SEQ ID NO: 130056 - DNA, 25 bp, Artificial
  probe
  misc_feature (1)..(25): SEQ ID NO: 5463; WAN024CRE_at; Start 196; Stop 220
aatcatcctctaaactatagcgcag

SEQ ID NO: 130057 - DNA, 25 bp, Artificial
  probe
  misc_feature (1)..(25): SEQ ID NO: 5463; WAN024CRE_at; Start 124; Stop 148
gaaaatgctctagcgctgccaaatg

SEQ ID NO: 130058 - DNA, 25 bp, Artificial
  probe
  misc_feature (1)..(25): SEQ ID NO: 5463; WAN024CRE_at; Start 29; Stop 53
gccacccaaggtcaccttggtttca

SEQ ID NO: 130059 - DNA, 25 bp, Artificial
  probe
  misc_feature (1)..(25): SEQ ID NO: 5463; WAN024CRE_at; Start 132; Stop 156
tctagcgctgccaaatgcacacagt

SEQ ID NO: 130060 - DNA, 25 bp, Artificial
  probe
  misc_feature (1)..(25): SEQ ID NO: 5463; WAN024CRE_at; Start 218; Stop 242
cagttcttcttctgcaacgcgagcg

SEQ ID NO: 130061 - DNA, 25 bp, Artificial
  probe
  misc_feature (1)..(25): SEQ ID NO: 5463; WAN024CRE_at; Start 23; Stop 47
aaacttgccacccaaggtcaccttg

SEQ ID NO: 130062 - DNA, 25 bp, Artificial
  probe
  misc_feature (1)..(25): SEQ ID NO: 5463; WAN024CRE_at; Start 149; Stop 173
cacacagtagcccctcttttgaaaa

SEQ ID NO: 130063 - DNA, 25 bp, Artificial
  probe
  misc_feature (1)..(25): SEQ ID NO: 5463; WAN024CRE_at; Start 118; Stop 142
ttttcagaaaatgctctagcgctgc

SEQ ID NO: 130064 - DNA, 25 bp, Artificial
  probe
  misc_feature (1)..(25): SEQ ID NO: 5463; WAN024CRE_at; Start 243; Stop 267
tagagccgattgttcttttccttga

SEQ ID NO: 130065 - DNA, 25 bp, Artificial
  probe
  misc_feature (1)..(25): SEQ ID NO: 5463; WAN024CRE_at; Start 213; Stop 237
tagcgcagttcttcttctgcaacgc

SEQ ID NO: 130066 - DNA, 25 bp, Artificial
  probe
  misc_feature (1)..(25): SEQ ID NO: 5463; WAN024CRE_at; Start 121; Stop 145
tcagaaaatgctctagcgctgccaa

SEQ ID NO: 130067 - DNA, 25 bp, Artificial
  probe
  misc_feature (1)..(25): SEQ ID NO: 5463; WAN024CRE_at; Start 103; Stop 127
gaccacgctcatcatttttcagaaa

SEQ ID NO: 130068 - DNA, 25 bp, Artificial
  probe
  misc_feature (1)..(25): SEQ ID NO: 5463; WAN024CRE_at; Start 135; Stop 159
agcgctgccaaatgcacacagtagc

SEQ ID NO: 130069 - DNA, 25 bp, Artificial
  probe
  misc_feature (1)..(25): SEQ ID NO: 5463; WAN024CRE_at; Start 92; Stop 116
caagatttcctgaccacgctcatca

SEQ ID NO: 130070 - DNA, 25 bp, Artificial
  probe
  misc_feature (1)..(25): SEQ ID NO: 5463; WAN024CRE_at; Start 201; Stop 225
tcctctaaactatagcgcagttctt

SEQ ID NO: 130071 - DNA, 25 bp, Artificial
  probe
  misc_feature (1)..(25): SEQ ID NO: 5463; WAN024CRE_at; Start 127; Stop 151
aatgctctagcgctgccaaatgcac

SEQ ID NO: 130072 - DNA, 25 bp, Artificial
  probe
  misc_feature (1)..(25): SEQ ID NO: 5463; WAN024CRE_at; Start 207; Stop 231
aaactatagcgcagttcttcttctg

SEQ ID NO: 130073 - DNA, 25 bp, Artificial
  probe
  misc_feature (1)..(25): SEQ ID NO: 5463; WAN024CRE_at; Start 232; Stop 256
caacgcgagcgtagagccgattgtt

SEQ ID NO: 130074 - DNA, 25 bp, Artificial
  probe
  misc_feature (1)..(25): SEQ ID NO: 5463; WAN024CRE_at; Start 8; Stop 32
taaaattcgatccaaaaacttgcca

SEQ ID NO: 130075 - DNA, 25 bp, Artificial
  probe
  misc_feature (1)..(25): SEQ ID NO: 5463; WAN024CRE_at; Start 71; Stop 95
atgaccttcttccagactccacaag

SEQ ID NO: 130076 - DNA, 25 bp, Artificial
  probe
  misc_feature (1)..(25): SEQ ID NO: 5463; WAN024CRE_at; Start 177; Stop 201
tcacaggcacaaaaaaccaaatcat

SEQ ID NO: 130077 - DNA, 25 bp, Artificial
  probe
  misc_feature (1)..(25): SEQ ID NO: 5463; WAN024CRE_at; Start 95; Stop 119
gatttcctgaccacgctcatcattt

SEQ ID NO: 130078 - DNA, 25 bp, Artificial
  probe
  misc_feature (1)..(25): SEQ ID NO: 5463; WAN024CRE_at; Start 85; Stop 109
gactccacaagatttcctgaccacg

SEQ ID NO: 130079 - DNA, 25 bp, Artificial
  probe
  misc_feature (1)..(25): SEQ ID NO: 5463; WAN024CRE_at; Start 90; Stop 114
cacaagatttcctgaccacgctcat

SEQ ID NO: 130080 - DNA, 25 bp, Artificial
  probe
  misc_feature (1)..(25): SEQ ID NO: 5463; WAN024CRE_at; Start 182; Stop 206
ggcacaaaaaaccaaatcatcctct

SEQ ID NO: 130081 - DNA, 25 bp, Artificial
  probe
  misc_feature (1)..(25): SEQ ID NO: 5463; WAN024CRE_at; Start 145; Stop 169
aatgcacacagtagcccctcttttg

SEQ ID NO: 130082 - DNA, 25 bp, Artificial
  probe
  misc_feature (1)..(25): SEQ ID NO: 5463; WAN024CRE_at; Start 79; Stop 103
cttccagactccacaagatttcctg

SEQ ID NO: 130083 - DNA, 25 bp, Artificial
  probe
  misc_feature (1)..(25): SEQ ID NO: 5463; WAN024CRE_at; Start 2; Stop 26
tggagataaaattcgatccaaaaac

SEQ ID NO: 130084 - DNA, 25 bp, Artificial
  probe
  misc_feature (1)..(25): SEQ ID NO: 5463; WAN024CRE_at; Start 235; Stop 259
cgcgagcgtagagccgattgttctt

SEQ ID NO: 130085 - DNA, 25 bp, Artificial
  probe
  misc_feature (1)..(25): SEQ ID NO: 5463; WAN024CRE_at; Start 57; Stop 81
gcctctttttcttcatgaccttctt

SEQ ID NO: 130086 - DNA, 25 bp, Artificial
  probe
  misc_feature (1)..(25): SEQ ID NO: 5463; WAN024CRE_at; Start 228; Stop 252
tctgcaacgcgagcgtagagccgat

SEQ ID NO: 130087 - DNA, 25 bp, Artificial
  probe
  misc_feature (1)..(25): SEQ ID NO: 5463; WAN024CRE_at; Start 14; Stop 38
tcgatccaaaaacttgccacccaag

SEQ ID NO: 130088 - DNA, 25 bp, Artificial
  probe
  misc_feature (1)..(25): SEQ ID NO: 5463; WAN024CRE_at; Start 222; Stop 246
tcttcttctgcaacgcgagcgtaga

SEQ ID NO: 130089 - DNA, 25 bp, Artificial
  probe
  misc_feature (1)..(25): SEQ ID NO: 5230; WAN024CRF_at; Start 163; Stop 187
caaaaaagcaatggtctgaagggtt

SEQ ID NO: 130090 - DNA, 25 bp, Artificial
  probe
  misc_feature (1)..(25): SEQ ID NO: 5230; WAN024CRF_at; Start 64; Stop 88
caactgtggagcaaatttctgaaac

SEQ ID NO: 130091 - DNA, 25 bp, Artificial
  probe
  misc_feature (1)..(25): SEQ ID NO: 5230; WAN024CRF_at; Start 297; Stop 321
gagttgcttgcaaaggaaagtcctc

SEQ ID NO: 130092 - DNA, 25 bp, Artificial
  probe
  misc_feature (1)..(25): SEQ ID NO: 5230; WAN024CRF_at; Start 308; Stop 332
aaaggaaagtcctctggatgcgtca

SEQ ID NO: 130093 - DNA, 25 bp, Artificial
  probe
  misc_feature (1)..(25): SEQ ID NO: 5230; WAN024CRF_at; Start 120; Stop 144
gagcgagaatcaaaacccgactttc

SEQ ID NO: 130094 - DNA, 25 bp, Artificial
  probe
  misc_feature (1)..(25): SEQ ID NO: 5230; WAN024CRF_at; Start 201; Stop 225
tatcatcagccaaaatcccaccaaa

SEQ ID NO: 130095 - DNA, 25 bp, Artificial
  probe
  misc_feature (1)..(25): SEQ ID NO: 5230; WAN024CRF_at; Start 339; Stop 363
gggccagattctggaattcttgtga

SEQ ID NO: 130096 - DNA, 25 bp, Artificial
  probe
  misc_feature (1)..(25): SEQ ID NO: 5230; WAN024CRF_at; Start 324; Stop 348
gatgcgtcaaatcctgggccagatt

SEQ ID NO: 130097 - DNA, 25 bp, Artificial
  probe
  misc_feature (1)..(25): SEQ ID NO: 5230; WAN024CRF_at; Start 18; Stop 42
gaatctcctcacgacttgctttcaa

SEQ ID NO: 130098 - DNA, 25 bp, Artificial
  probe
  misc_feature (1)..(25): SEQ ID NO: 5230; WAN024CRF_at; Start 11; Stop 35
tcggcaagaatctcctcacgacttg

SEQ ID NO: 130099 - DNA, 25 bp, Artificial
  probe
  misc_feature (1)..(25): SEQ ID NO: 5230; WAN024CRF_at; Start 320; Stop 344
tctggatgcgtcaaatcctgggcca

SEQ ID NO: 130100 - DNA, 25 bp, Artificial
  probe
  misc_feature (1)..(25): SEQ ID NO: 5230; WAN024CRF_at; Start 191; Stop 215
ccaagtcccatatcatcagccaaaa

SEQ ID NO: 130101 - DNA, 25 bp, Artificial
  probe
  misc_feature (1)..(25): SEQ ID NO: 5230; WAN024CRF_at; Start 58; Stop 82
cacatccaactgtggagcaaatttc

SEQ ID NO: 130102 - DNA, 25 bp, Artificial
  probe
  misc_feature (1)..(25): SEQ ID NO: 5230; WAN024CRF_at; Start 312; Stop 336
gaaagtcctctggatgcgtcaaatc

SEQ ID NO: 130103 - DNA, 25 bp, Artificial
  probe
  misc_feature (1)..(25): SEQ ID NO: 5230; WAN024CRF_at; Start 108; Stop 132
tcaaacccgacggagcgagaatcaa

SEQ ID NO: 130104 - DNA, 25 bp, Artificial
  probe
  misc_feature (1)..(25): SEQ ID NO: 5230; WAN024CRF_at; Start 3; Stop 27
gatggctctcggcaagaatctcctc

SEQ ID NO: 130105 - DNA, 25 bp, Artificial
  probe
  misc_feature (1)..(25): SEQ ID NO: 5230; WAN024CRF_at; Start 251; Stop 275
cagccaattcccttttcctgataat

SEQ ID NO: 130106 - DNA, 25 bp, Artificial
  probe
  misc_feature (1)..(25): SEQ ID NO: 5230; WAN024CRF_at; Start 92; Stop 116
tctgcccagttgtaaatcaaacccg

SEQ ID NO: 130107 - DNA, 25 bp, Artificial
  probe
  misc_feature (1)..(25): SEQ ID NO: 5230; WAN024CRF_at; Start 285; Stop 309
cagccttgacctgagttgcttgcaa

SEQ ID NO: 130108 - DNA, 25 bp, Artificial
  probe
  misc_feature (1)..(25): SEQ ID NO: 5230; WAN024CRF_at; Start 331; Stop 355
caaatcctgggccagattctggaat

SEQ ID NO: 130109 - DNA, 25 bp, Artificial
  probe
  misc_feature (1)..(25): SEQ ID NO: 5230; WAN024CRF_at; Start 26; Stop 50
tcacgacttgctttcaaaccatgaa

SEQ ID NO: 130110 - DNA, 25 bp, Artificial
  probe
  misc_feature (1)..(25): SEQ ID NO: 5230; WAN024CRF_at; Start 170; Stop 194
gcaatggtctgaagggttttcccaa

SEQ ID NO: 130111 - DNA, 25 bp, Artificial
  probe
  misc_feature (1)..(25): SEQ ID NO: 5230; WAN024CRF_at; Start 32; Stop 56
cttgctttcaaaccatgaacaacag

SEQ ID NO: 130112 - DNA, 25 bp, Artificial
  probe
  misc_feature (1)..(25): SEQ ID NO: 5230; WAN024CRF_at; Start 185; Stop 209
gttttcccaagtcccatatcatcag

SEQ ID NO: 130113 - DNA, 25 bp, Artificial
  probe
  misc_feature (1)..(25): SEQ ID NO: 5230; WAN024CRF_at; Start 236; Stop 260
tggagcatctgcaaccagccaattc

SEQ ID NO: 130114 - DNA, 25 bp, Artificial
  probe
  misc_feature (1)..(25): SEQ ID NO: 5230; WAN024CRF_at; Start 270; Stop 294
gataatctcgcaagtcagccttgac

SEQ ID NO: 130115 - DNA, 25 bp, Artificial
  probe
  misc_feature (1)..(25): SEQ ID NO: 5230; WAN024CRF_at; Start 137; Stop 161
cgactttcttttgtcacttgactag

SEQ ID NO: 130116 - DNA, 25 bp, Artificial
  probe
  misc_feature (1)..(25): SEQ ID NO: 5230; WAN024CRF_at; Start 101; Stop 125
ttgtaaatcaaacccgacggagcga

SEQ ID NO: 130117 - DNA, 25 bp, Artificial
  probe
  misc_feature (1)..(25): SEQ ID NO: 5230; WAN024CRF_at; Start 76; Stop 100
aaatttctgaaactcatctgcccag

SEQ ID NO: 130118 - DNA, 25 bp, Artificial
  probe
  misc_feature (1)..(25): SEQ ID NO: 5230; WAN024CRF_at; Start 115; Stop 139
cgacggagcgagaatcaaaacccga

SEQ ID NO: 130119 - DNA, 25 bp, Artificial
  probe
  misc_feature (1)..(25): SEQ ID NO: 5230; WAN024CRF_at; Start 83; Stop 107
tgaaactcatctgcccagttgtaaa

SEQ ID NO: 130120 - DNA, 25 bp, Artificial
  probe
  misc_feature (1)..(25): SEQ ID NO: 5230; WAN024CRF_at; Start 154; Stop 178
ttgactagtcaaaaaagcaatggtc

SEQ ID NO: 130121 - DNA, 25 bp, Artificial
  probe
  misc_feature (1)..(25): SEQ ID NO: 5230; WAN024CRF_at; Start 259; Stop 283
tcccttttcctgataatctcgcaag

SEQ ID NO: 130122 - DNA, 25 bp, Artificial
  probe
  misc_feature (1)..(25): SEQ ID NO: 5230; WAN024CRF_at; Start 228; Stop 252
cataatgatggagcatctgcaacca

SEQ ID NO: 130123 - DNA, 25 bp, Artificial
  probe
  misc_feature (1)..(25): SEQ ID NO: 2609; WAN024CRG_at; Start 338; Stop 362
ttacagcccatacggctagcggcca

SEQ ID NO: 130124 - DNA, 25 bp, Artificial
  probe
  misc_feature (1)..(25): SEQ ID NO: 2609; WAN024CRG_at; Start 103; Stop 127
gcgcatctccttagagtaaagttcc

SEQ ID NO: 130125 - DNA, 25 bp, Artificial
  probe
  misc_feature (1)..(25): SEQ ID NO: 2609; WAN024CRG_at; Start 65; Stop 89
tgacgaagggtcagattttcttgat

SEQ ID NO: 130126 - DNA, 25 bp, Artificial
  probe
  misc_feature (1)..(25): SEQ ID NO: 2609; WAN024CRG_at; Start 271; Stop 295
accaccgatagagggattacaaggc

SEQ ID NO: 130127 - DNA, 25 bp, Artificial
  probe
  misc_feature (1)..(25): SEQ ID NO: 2609; WAN024CRG_at; Start 324; Stop 348
tcgcaagcaggaccttacagcccat

SEQ ID NO: 130128 - DNA, 25 bp, Artificial
  probe
  misc_feature (1)..(25): SEQ ID NO: 2609; WAN024CRG_at; Start 137; Stop 161
tgcgcacgaagagcacggacagctg

SEQ ID NO: 130129 - DNA, 25 bp, Artificial
  probe
  misc_feature (1)..(25): SEQ ID NO: 2609; WAN024CRG_at; Start 312; Stop 336
caatattgatggtcgcaagcaggac

SEQ ID NO: 130130 - DNA, 25 bp, Artificial
  probe
  misc_feature (1)..(25): SEQ ID NO: 2609; WAN024CRG_at; Start 94; Stop 118
aactgtcttgcgcatctccttagag

SEQ ID NO: 130131 - DNA, 25 bp, Artificial
  probe
  misc_feature (1)..(25): SEQ ID NO: 2609; WAN024CRG_at; Start 7; Stop 31
ggctgtacgcacaccgacagccttg

SEQ ID NO: 130132 - DNA, 25 bp, Artificial
  probe
  misc_feature (1)..(25): SEQ ID NO: 2609; WAN024CRG_at; Start 144; Stop 168
gaagagcacggacagctggcccctt

SEQ ID NO: 130133 - DNA, 25 bp, Artificial
  probe
  misc_feature (1)..(25): SEQ ID NO: 2609; WAN024CRG_at; Start 275; Stop 299
ccgatagagggattacaaggcatga

SEQ ID NO: 130134 - DNA, 25 bp, Artificial
  probe
  misc_feature (1)..(25): SEQ ID NO: 2609; WAN024CRG_at; Start 53; Stop 77
tcaatcatggtttgacgaagggtca

SEQ ID NO: 130135 - DNA, 25 bp, Artificial
  probe
  misc_feature (1)..(25): SEQ ID NO: 2609; WAN024CRG_at; Start 170; Stop 194
cctgtgttgagcatcttcatctgga

SEQ ID NO: 130136 - DNA, 25 bp, Artificial
  probe
  misc_feature (1)..(25): SEQ ID NO: 2609; WAN024CRG_at; Start 29; Stop 53
ttgccatcttccaccaaaatctcat

SEQ ID NO: 130137 - DNA, 25 bp, Artificial
  probe
  misc_feature (1)..(25): SEQ ID NO: 2609; WAN024CRG_at; Start 362; Stop 386
aaggaagcctcaaccccagcgtgtc

SEQ ID NO: 130138 - DNA, 25 bp, Artificial
  probe
  misc_feature (1)..(25): SEQ ID NO: 2609; WAN024CRG_at; Start 184; Stop 208
cttcatctggatgtaagtcttgtca

SEQ ID NO: 130139 - DNA, 25 bp, Artificial
  probe
  misc_feature (1)..(25): SEQ ID NO: 2609; WAN024CRG_at; Start 83; Stop 107
tcttgattttcaactgtcttgcgca

SEQ ID NO: 130140 - DNA, 25 bp, Artificial
  probe
  misc_feature (1)..(25): SEQ ID NO: 2609; WAN024CRG_at; Start 402; Stop 426
taatatcgtattcttcagtaaaatg

SEQ ID NO: 130141 - DNA, 25 bp, Artificial
  probe
  misc_feature (1)..(25): SEQ ID NO: 2609; WAN024CRG_at; Start 432; Stop 456
tcatgtttctctcctattcctcaag

SEQ ID NO: 130142 - DNA, 25 bp, Artificial
  probe
  misc_feature (1)..(25): SEQ ID NO: 2609; WAN024CRG_at; Start 413; Stop 437
tcttcagtaaaatgataaatcatgt

SEQ ID NO: 130143 - DNA, 25 bp, Artificial
  probe
  misc_feature (1)..(25): SEQ ID NO: 2609; WAN024CRG_at; Start 380; Stop 404
gcgtgtcccgcaccaattacaataa

SEQ ID NO: 130144 - DNA, 25 bp, Artificial
  probe
  misc_feature (1)..(25): SEQ ID NO: 2609; WAN024CRG_at; Start 298; Stop 322
gaaagccagcatttcaatattgatg

SEQ ID NO: 130145 - DNA, 25 bp, Artificial
  probe
  misc_feature (1)..(25): SEQ ID NO: 2609; WAN024CRG_at; Start 118; Stop 142
gtaaagttccttgtcagcctgcgca

SEQ ID NO: 130146 - DNA, 25 bp, Artificial
  probe
  misc_feature (1)..(25): SEQ ID NO: 2609; WAN024CRG_at; Start 349; Stop 373
acggctagcggccaaggaagcctca

SEQ ID NO: 130147 - DNA, 25 bp, Artificial
  probe
  misc_feature (1)..(25): SEQ ID NO: 2609; WAN024CRG_at; Start 263; Stop 287
ttggcagaaccaccgatagagggat

SEQ ID NO: 130148 - DNA, 25 bp, Artificial
  probe
  misc_feature (1)..(25): SEQ ID NO: 2609; WAN024CRG_at; Start 1; Stop 25
atgggtggctgtacgcacaccgaca

SEQ ID NO: 130149 - DNA, 25 bp, Artificial
  probe
  misc_feature (1)..(25): SEQ ID NO: 2609; WAN024CRG_at; Start 157; Stop 181
agctggccccttccctgtgttgagc

SEQ ID NO: 130150 - DNA, 25 bp, Artificial
  probe
  misc_feature (1)..(25): SEQ ID NO: 2609; WAN024CRG_at; Start 221; Stop 245
atctcgccaccgagggcatcgactt

SEQ ID NO: 130151 - DNA, 25 bp, Artificial
  probe
  misc_feature (1)..(25): SEQ ID NO: 2609; WAN024CRG_at; Start 446; Stop 470
tattcctcaagatgaatgtgtctta

SEQ ID NO: 130152 - DNA, 25 bp, Artificial
  probe
  misc_feature (1)..(25): SEQ ID NO: 2609; WAN024CRG_at; Start 256; Stop 280
aatccccttggcagaaccaccgata

SEQ ID NO: 130153 - DNA, 25 bp, Artificial
  probe
  misc_feature (1)..(25): SEQ ID NO: 2609; WAN024CRG_at; Start 124; Stop 148
ttccttgtcagcctgcgcacgaaga

SEQ ID NO: 130154 - DNA, 25 bp, Artificial
  probe
  misc_feature (1)..(25): SEQ ID NO: 2609; WAN024CRG_at; Start 38; Stop 62
tccaccaaaatctcatcaatcatgg

SEQ ID NO: 130155 - DNA, 25 bp, Artificial
  probe
  misc_feature (1)..(25): SEQ ID NO: 2609; WAN024CRG_at; Start 387; Stop 411
ccgcaccaattacaataatatcgta

SEQ ID NO: 130156 - DNA, 25 bp, Artificial
  probe
  misc_feature (1)..(25): SEQ ID NO: 2609; WAN024CRG_at; Start 288; Stop 312
tacaaggcatgaaagccagcatttc

SEQ ID NO: 130157 - DNA, 25 bp, Artificial
  probe
  misc_feature (1)..(25): SEQ ID NO: 3946; WAN024CRH_at; Start 82; Stop 106
ccttggtcaccaagcgatagacctc

SEQ ID NO: 130158 - DNA, 25 bp, Artificial
  probe
  misc_feature (1)..(25): SEQ ID NO: 3946; WAN024CRH_at; Start 191; Stop 215
cactgtatctgcacctgtcaggttc

SEQ ID NO: 130159 - DNA, 25 bp, Artificial
  probe
  misc_feature (1)..(25): SEQ ID NO: 3946; WAN024CRH_at; Start 97; Stop 121
gatagacctcaaccgtttcttcctg

SEQ ID NO: 130160 - DNA, 25 bp, Artificial
  probe
  misc_feature (1)..(25): SEQ ID NO: 3946; WAN024CRH_at; Start 188; Stop 212
gatcactgtatctgcacctgtcagg

SEQ ID NO: 130161 - DNA, 25 bp, Artificial
  probe
  misc_feature (1)..(25): SEQ ID NO: 3946; WAN024CRH_at; Start 284; Stop 308
catgtcttgtctttccttggctggg

SEQ ID NO: 130162 - DNA, 25 bp, Artificial
  probe
  misc_feature (1)..(25): SEQ ID NO: 3946; WAN024CRH_at; Start 6; Stop 30
tctgtgccgtccaatacttgtgaca

SEQ ID NO: 130163 - DNA, 25 bp, Artificial
  probe
  misc_feature (1)..(25): SEQ ID NO: 3946; WAN024CRH_at; Start 92; Stop 116
caagcgatagacctcaaccgtttct

SEQ ID NO: 130164 - DNA, 25 bp, Artificial
  probe
  misc_feature (1)..(25): SEQ ID NO: 3946; WAN024CRH_at; Start 11; Stop 35
gccgtccaatacttgtgacaccaga

SEQ ID NO: 130165 - DNA, 25 bp, Artificial
  probe
  misc_feature (1)..(25): SEQ ID NO: 3946; WAN024CRH_at; Start 155; Stop 179
ttccaccgcaggattccaccaaagg

SEQ ID NO: 130166 - DNA, 25 bp, Artificial
  probe
  misc_feature (1)..(25): SEQ ID NO: 3946; WAN024CRH_at; Start 174; Stop 198
caaaggtcaaccaagatcactgtat

SEQ ID NO: 130167 - DNA, 25 bp, Artificial
  probe
  misc_feature (1)..(25): SEQ ID NO: 3946; WAN024CRH_at; Start 226; Stop 250
caccagccttgagggaaatcagaaa

SEQ ID NO: 130168 - DNA, 25 bp, Artificial
  probe
  misc_feature (1)..(25): SEQ ID NO: 3946; WAN024CRH_at; Start 15; Stop 39
tccaatacttgtgacaccagatgtt

SEQ ID NO: 130169 - DNA, 25 bp, Artificial
  probe
  misc_feature (1)..(25): SEQ ID NO: 3946; WAN024CRH_at; Start 146; Stop 170
ggcttgcgcttccaccgcaggattc

SEQ ID NO: 130170 - DNA, 25 bp, Artificial
  probe
  misc_feature (1)..(25): SEQ ID NO: 3946; WAN024CRH_at; Start 143; Stop 167
aatggcttgcgcttccaccgcagga

SEQ ID NO: 130171 - DNA, 25 bp, Artificial
  probe
  misc_feature (1)..(25): SEQ ID NO: 3946; WAN024CRH_at; Start 39; Stop 63
ttcttttgttcttggagttcctgaa

SEQ ID NO: 130172 - DNA, 25 bp, Artificial
  probe
  misc_feature (1)..(25): SEQ ID NO: 3946; WAN024CRH_at; Start 162; Stop 186
gcaggattccaccaaaggtcaacca

SEQ ID NO: 130173 - DNA, 25 bp, Artificial
  probe
  misc_feature (1)..(25): SEQ ID NO: 3946; WAN024CRH_at; Start 198; Stop 222
tctgcacctgtcaggttcagaccga

SEQ ID NO: 130174 - DNA, 25 bp, Artificial
  probe
  misc_feature (1)..(25): SEQ ID NO: 3946; WAN024CRH_at; Start 126; Stop 150
atccgatgggcacggccaatggctt

SEQ ID NO: 130175 - DNA, 25 bp, Artificial
  probe
  misc_feature (1)..(25): SEQ ID NO: 3946; WAN024CRH_at; Start 29; Stop 53
caccagatgtttcttttgttcttgg

SEQ ID NO: 130176 - DNA, 25 bp, Artificial
  probe
  misc_feature (1)..(25): SEQ ID NO: 3946; WAN024CRH_at; Start 158; Stop 182
caccgcaggattccaccaaaggtca

SEQ ID NO: 130177 - DNA, 25 bp, Artificial
  probe
  misc_feature (1)..(25): SEQ ID NO: 3946; WAN024CRH_at; Start 271; Stop 295
taaaggccttggtcatgtcttgtct

SEQ ID NO: 130178 - DNA, 25 bp, Artificial
  probe
  misc_feature (1)..(25): SEQ ID NO: 3946; WAN024CRH_at; Start 120; Stop 144
tgacccatccgatgggcacggccaa

SEQ ID NO: 130179 - DNA, 25 bp, Artificial
  probe
  misc_feature (1)..(25): SEQ ID NO: 3946; WAN024CRH_at; Start 238; Stop 262
gggaaatcagaaaggcatctctttc

SEQ ID NO: 130180 - DNA, 25 bp, Artificial
  probe
  misc_feature (1)..(25): SEQ ID NO: 3946; WAN024CRH_at; Start 3; Stop 27
gactctgtgccgtccaatacttgtg

SEQ ID NO: 130181 - DNA, 25 bp, Artificial
  probe
  misc_feature (1)..(25): SEQ ID NO: 3946; WAN024CRH_at; Start 166; Stop 190
gattccaccaaaggtcaaccaagat

SEQ ID NO: 130182 - DNA, 25 bp, Artificial
  probe
  misc_feature (1)..(25): SEQ ID NO: 3946; WAN024CRH_at; Start 132; Stop 156
tgggcacggccaatggcttgcgctt

SEQ ID NO: 130183 - DNA, 25 bp, Artificial
  probe
  misc_feature (1)..(25): SEQ ID NO: 3946; WAN024CRH_at; Start 244; Stop 268
tcagaaaggcatctctttctccttg

SEQ ID NO: 130184 - DNA, 25 bp, Artificial
  probe
  misc_feature (1)..(25): SEQ ID NO: 3946; WAN024CRH_at; Start 110; Stop 134
cgtttcttcctgacccatccgatgg

SEQ ID NO: 130185 - DNA, 25 bp, Artificial
  probe
  misc_feature (1)..(25): SEQ ID NO: 3946; WAN024CRH_at; Start 221; Stop 245
gaccccaccagccttgagggaaatc

SEQ ID NO: 130186 - DNA, 25 bp, Artificial
  probe
  misc_feature (1)..(25): SEQ ID NO: 3946; WAN024CRH_at; Start 178; Stop 202
ggtcaaccaagatcactgtatctgc

SEQ ID NO: 130187 - DNA, 25 bp, Artificial
  probe
  misc_feature (1)..(25): SEQ ID NO: 3946; WAN024CRH_at; Start 20; Stop 44
tacttgtgacaccagatgtttcttt

SEQ ID NO: 130188 - DNA, 25 bp, Artificial
  probe
  misc_feature (1)..(25): SEQ ID NO: 3946; WAN024CRH_at; Start 87; Stop 111
gtcaccaagcgatagacctcaaccg

SEQ ID NO: 130189 - DNA, 25 bp, Artificial
  probe
  misc_feature (1)..(25): SEQ ID NO: 3946; WAN024CRH_at; Start 53; Stop 77
gagttcctgaattttttcttcaatg

SEQ ID NO: 130190 - DNA, 25 bp, Artificial
  probe
  misc_feature (1)..(25): SEQ ID NO: 3946; WAN024CRH_at; Start 113; Stop 137
ttcttcctgacccatccgatgggca

SEQ ID NO: 130191 - DNA, 25 bp, Artificial
  probe
  misc_feature (1)..(25): SEQ ID NO: 3397; WAN024CRI_at; Start 370; Stop 394
ccggacgttatgtgcaacaaggaaa

SEQ ID NO: 130192 - DNA, 25 bp, Artificial
  probe
  misc_feature (1)..(25): SEQ ID NO: 3397; WAN024CRI_at; Start 1105; Stop 1129
caggcagttgtcttttacgatggcg

SEQ ID NO: 130193 - DNA, 25 bp, Artificial
  probe
  misc_feature (1)..(25): SEQ ID NO: 3397; WAN024CRI_at; Start 1118; Stop 1142
tttacgatggcgaagagtgtctagg

SEQ ID NO: 130194 - DNA, 25 bp, Artificial
  probe
  misc_feature (1)..(25): SEQ ID NO: 3397; WAN024CRI_at; Start 642; Stop 666
gactgctaagaagaaagactcgaca

SEQ ID NO: 130195 - DNA, 25 bp, Artificial
  probe
  misc_feature (1)..(25): SEQ ID NO: 3397; WAN024CRI_at; Start 843; Stop 867
caatgccccttggttcgttgtcgga

SEQ ID NO: 130196 - DNA, 25 bp, Artificial
  probe
  misc_feature (1)..(25): SEQ ID NO: 3397; WAN024CRI_at; Start 384; Stop 408
caacaaggaaatcaagttcaaggcc

SEQ ID NO: 130197 - DNA, 25 bp, Artificial
  probe
  misc_feature (1)..(25): SEQ ID NO: 3397; WAN024CRI_at; Start 356; Stop 380
ggcgcacgccaaatccggacgttat

SEQ ID NO: 130198 - DNA, 25 bp, Artificial
  probe
  misc_feature (1)..(25): SEQ ID NO: 3397; WAN024CRI_at; Start 663; Stop 687
gacagggatttgctttatcggagaa

SEQ ID NO: 130199 - DNA, 25 bp, Artificial
  probe
  misc_feature (1)..(25): SEQ ID NO: 3397; WAN024CRI_at; Start 1002; Stop 1026
taaattccgttaccgtcagcctgac

SEQ ID NO: 130200 - DNA, 25 bp, Artificial
  probe
  misc_feature (1)..(25): SEQ ID NO: 3397; WAN024CRI_at; Start 196; Stop 220
tgggatgacacagatgaaaacggcg

SEQ ID NO: 130201 - DNA, 25 bp, Artificial
  probe
  misc_feature (1)..(25): SEQ ID NO: 3397; WAN024CRI_at; Start 82; Stop 106
gataactctaaaacacgtgttgtcg

SEQ ID NO: 130202 - DNA, 25 bp, Artificial
  probe
  misc_feature (1)..(25): SEQ ID NO: 3397; WAN024CRI_at; Start 1151; Stop 1175
tgattgacaatgcttaccgcgatgg

SEQ ID NO: 130203 - DNA, 25 bp, Artificial
  probe
  misc_feature (1)..(25): SEQ ID NO: 3397; WAN024CRI_at; Start 168; Stop 192
cgatgtgatcggtatcttcatgaag

SEQ ID NO: 130204 - DNA, 25 bp, Artificial
  probe
  misc_feature (1)..(25): SEQ ID NO: 3397; WAN024CRI_at; Start 208; Stop 232
gatgaaaacggcgtctgtacggcga

SEQ ID NO: 130205 - DNA, 25 bp, Artificial
  probe
  misc_feature (1)..(25): SEQ ID NO: 3397; WAN024CRI_at; Start 1090; Stop 1114
gcgattacaccaggacaggcagttg

SEQ ID NO: 130206 - DNA, 25 bp, Artificial
  probe
  misc_feature (1)..(25): SEQ ID NO: 3397; WAN024CRI_at; Start 979; Stop 1003
gagtttacgctagaatgtacggcta

SEQ ID NO: 130207 - DNA, 25 bp, Artificial
  probe
  misc_feature (1)..(25): SEQ ID NO: 3397; WAN024CRI_at; Start 1016; Stop 1040
gtcagcctgactctaaggtgaccgt

SEQ ID NO: 130208 - DNA, 25 bp, Artificial
  probe
  misc_feature (1)..(25): SEQ ID NO: 3397; WAN024CRI_at; Start 24; Stop 48
gaagcacacacgaccttcaatcgtg

SEQ ID NO: 130209 - DNA, 25 bp, Artificial
  probe
  misc_feature (1)..(25): SEQ ID NO: 3397; WAN024CRI_at; Start 51; Stop 75
taaacgaatagatgggagacttacc

SEQ ID NO: 130210 - DNA, 25 bp, Artificial
  probe
  misc_feature (1)..(25): SEQ ID NO: 3397; WAN024CRI_at; Start 952; Stop 976
gtccactttactcgtgaaatgccag

SEQ ID NO: 130211 - DNA, 25 bp, Artificial
  probe
  misc_feature (1)..(25): SEQ ID NO: 3397; WAN024CRI_at; Start 1070; Stop 1094
tctttgcggaaccacaacgcgcgat

SEQ ID NO: 130212 - DNA, 25 bp, Artificial
  probe
  misc_feature (1)..(25): SEQ ID NO: 3397; WAN024CRI_at; Start 1162; Stop 1186
gcttaccgcgatggacaagtttgtc

SEQ ID NO: 130213 - DNA, 25 bp, Artificial
  probe
  misc_feature (1)..(25): SEQ ID NO: 3397; WAN024CRI_at; Start 567; Stop 591
tcaaaaaaccatgttcccactagga

SEQ ID NO: 130214 - DNA, 25 bp, Artificial
  probe
  misc_feature (1)..(25): SEQ ID NO: 3397; WAN024CRI_at; Start 182; Stop 206
tcttcatgaagaactgggatgacac

SEQ ID NO: 130215 - DNA, 25 bp, Artificial
  probe
  misc_feature (1)..(25): SEQ ID NO: 3397; WAN024CRI_at; Start 270; Stop 294
gattggcattccctactactctgtc

SEQ ID NO: 130216 - DNA, 25 bp, Artificial
  probe
  misc_feature (1)..(25): SEQ ID NO: 3397; WAN024CRI_at; Start 967; Stop 991
gaaatgccagaagagtttacgctag

SEQ ID NO: 130217 - DNA, 25 bp, Artificial
  probe
  misc_feature (1)..(25): SEQ ID NO: 3397; WAN024CRI_at; Start 134; Stop 158
cggtgacggctcttttgctcaagga

SEQ ID NO: 130218 - DNA, 25 bp, Artificial
  probe
  misc_feature (1)..(25): SEQ ID NO: 3397; WAN024CRI_at; Start 225; Stop 249
tacggcgaccgaagattacaaggat

SEQ ID NO: 130219 - DNA, 25 bp, Artificial
  probe
  misc_feature (1)..(25): SEQ ID NO: 3397; WAN024CRI_at; Start 535; Stop 559
tatttcctcagccaactttcgcaag

SEQ ID NO: 130220 - DNA, 25 bp, Artificial
  probe
  misc_feature (1)..(25): SEQ ID NO: 3397; WAN024CRI_at; Start 858; Stop 882
cgttgtcggaaaagatctaagcaag

SEQ ID NO: 130221 - DNA, 25 bp, Artificial
  probe
  misc_feature (1)..(25): SEQ ID NO: 3397; WAN024CRI_at; Start 65; Stop 89
ggagacttaccatgagtgataactc

SEQ ID NO: 130222 - DNA, 25 bp, Artificial
  probe
  misc_feature (1)..(25): SEQ ID NO: 3397; WAN024CRI_at; Start 9; Stop 33
gcgaccttcaatcgtgaagcacaca

SEQ ID NO: 130223 - DNA, 25 bp, Artificial
  probe
  misc_feature (1)..(25): SEQ ID NO: 3397; WAN024CRI_at; Start 401; Stop 425
tcaaggcctttttggactatgccat

SEQ ID NO: 130224 - DNA, 25 bp, Artificial
  probe
  misc_feature (1)..(25): SEQ ID NO: 3397; WAN024CRI_at; Start 496; Stop 520
cacatgcttcgtggcgtggacaatg

SEQ ID NO: 130225 - DNA, 25 bp, Artificial
  probe
  misc_feature (1)..(25): SEQ ID NO: 2359; WAN024CRJ_at; Start 491; Stop 515
ccagattgggaaggccaactaagac

SEQ ID NO: 130226 - DNA, 25 bp, Artificial
  probe
  misc_feature (1)..(25): SEQ ID NO: 2359; WAN024CRJ_at; Start 66; Stop 90
gggaaaggacaagaatgactcaaca

SEQ ID NO: 130227 - DNA, 25 bp, Artificial
  probe
  misc_feature (1)..(25): SEQ ID NO: 2359; WAN024CRJ_at; Start 78; Stop 102
gaatgactcaacaagactttcggac

SEQ ID NO: 130228 - DNA, 25 bp, Artificial
  probe
  misc_feature (1)..(25): SEQ ID NO: 2359; WAN024CRJ_at; Start 4; Stop 28
gatgttgcaggcttttttgtcctgc

SEQ ID NO: 130229 - DNA, 25 bp, Artificial
  probe
  misc_feature (1)..(25): SEQ ID NO: 2359; WAN024CRJ_at; Start 293; Stop 317
ctagcttttgtggttgaaaatcgtt

SEQ ID NO: 130230 - DNA, 25 bp, Artificial
  probe
  misc_feature (1)..(25): SEQ ID NO: 2359; WAN024CRJ_at; Start 423; Stop 447
gtgagtggattgacttggataagct

SEQ ID NO: 130231 - DNA, 25 bp, Artificial
  probe
  misc_feature (1)..(25): SEQ ID NO: 2359; WAN024CRJ_at; Start 489; Stop 513
taccagattgggaaggccaactaag

SEQ ID NO: 130232 - DNA, 25 bp, Artificial
  probe
  misc_feature (1)..(25): SEQ ID NO: 2359; WAN024CRJ_at; Start 280; Stop 304
tcaagctgggcagctagcttttgtg

SEQ ID NO: 130233 - DNA, 25 bp, Artificial
  probe
  misc_feature (1)..(25): SEQ ID NO: 2359; WAN024CRJ_at; Start 68; Stop 92
gaaaggacaagaatgactcaacaag

SEQ ID NO: 130234 - DNA, 25 bp, Artificial
  probe
  misc_feature (1)..(25): SEQ ID NO: 2359; WAN024CRJ_at; Start 72; Stop 96
ggacaagaatgactcaacaagactt

SEQ ID NO: 130235 - DNA, 25 bp, Artificial
  probe
  misc_feature (1)..(25): SEQ ID NO: 2359; WAN024CRJ_at; Start 497; Stop 521
tgggaaggccaactaagacacattc

SEQ ID NO: 130236 - DNA, 25 bp, Artificial
  probe
  misc_feature (1)..(25): SEQ ID NO: 2359; WAN024CRJ_at; Start 1; Stop 25
atggatgttgcaggcttttttgtcc

SEQ ID NO: 130237 - DNA, 25 bp, Artificial
  probe
  misc_feature (1)..(25): SEQ ID NO: 2359; WAN024CRJ_at; Start 485; Stop 509
gccctaccagattgggaaggccaac

SEQ ID NO: 130238 - DNA, 25 bp, Artificial
  probe
  misc_feature (1)..(25): SEQ ID NO: 2359; WAN024CRJ_at; Start 494; Stop 518
gattgggaaggccaactaagacaca

SEQ ID NO: 130239 - DNA, 25 bp, Artificial
  probe
  misc_feature (1)..(25): SEQ ID NO: 2359; WAN024CRJ_at; Start 94; Stop 118
ctttcggacaaaagtagacaatacg

SEQ ID NO: 130240 - DNA, 25 bp, Artificial
  probe
  misc_feature (1)..(25): SEQ ID NO: 2359; WAN024CRJ_at; Start 506; Stop 530
caactaagacacattcatcttgagg

SEQ ID NO: 130241 - DNA, 25 bp, Artificial
  probe
  misc_feature (1)..(25): SEQ ID NO: 2359; WAN024CRJ_at; Start 86; Stop 110
caacaagactttcggacaaaagtag

SEQ ID NO: 130242 - DNA, 25 bp, Artificial
  probe
  misc_feature (1)..(25): SEQ ID NO: 2359; WAN024CRJ_at; Start 233; Stop 257
gaagacgcggtagtccgtgaagtga

SEQ ID NO: 130243 - DNA, 25 bp, Artificial
  probe
  misc_feature (1)..(25): SEQ ID NO: 2359; WAN024CRJ_at; Start 390; Stop 414
tgaccatgcaggaagatgagaaaag

SEQ ID NO: 130244 - DNA, 25 bp, Artificial
  probe
  misc_feature (1)..(25): SEQ ID NO: 2359; WAN024CRJ_at; Start 62; Stop 86
ttaagggaaaggacaagaatgactc

SEQ ID NO: 130245 - DNA, 25 bp, Artificial
  probe
  misc_feature (1)..(25): SEQ ID NO: 2359; WAN024CRJ_at; Start 287; Stop 311
gggcagctagcttttgtggttgaaa

SEQ ID NO: 130246 - DNA, 25 bp, Artificial
  probe
  misc_feature (1)..(25): SEQ ID NO: 2359; WAN024CRJ_at; Start 76; Stop 100
aagaatgactcaacaagactttcgg

SEQ ID NO: 130247 - DNA, 25 bp, Artificial
  probe
  misc_feature (1)..(25): SEQ ID NO: 2359; WAN024CRJ_at; Start 82; Stop 106
gactcaacaagactttcggacaaaa

SEQ ID NO: 130248 - DNA, 25 bp, Artificial
  probe
  misc_feature (1)..(25): SEQ ID NO: 2359; WAN024CRJ_at; Start 510; Stop 534
taagacacattcatcttgaggaata

SEQ ID NO: 130249 - DNA, 25 bp, Artificial
  probe
  misc_feature (1)..(25): SEQ ID NO: 2359; WAN024CRJ_at; Start 500; Stop 524
gaaggccaactaagacacattcatc

SEQ ID NO: 130250 - DNA, 25 bp, Artificial
  probe
  misc_feature (1)..(25): SEQ ID NO: 2359; WAN024CRJ_at; Start 13; Stop 37
ggcttttttgtcctgcacttctttg

SEQ ID NO: 130251 - DNA, 25 bp, Artificial
  probe
  misc_feature (1)..(25): SEQ ID NO: 2359; WAN024CRJ_at; Start 26; Stop 50
tgcacttctttgtagttttgactgt

SEQ ID NO: 130252 - DNA, 25 bp, Artificial
  probe
  misc_feature (1)..(25): SEQ ID NO: 2359; WAN024CRJ_at; Start 290; Stop 314
cagctagcttttgtggttgaaaatc

SEQ ID NO: 130253 - DNA, 25 bp, Artificial
  probe
  misc_feature (1)..(25): SEQ ID NO: 2359; WAN024CRJ_at; Start 23; Stop 47
tcctgcacttctttgtagttttgac

SEQ ID NO: 130254 - DNA, 25 bp, Artificial
  probe
  misc_feature (1)..(25): SEQ ID NO: 2359; WAN024CRJ_at; Start 419; Stop 443
ccctgtgagtggattgacttggata

SEQ ID NO: 130255 - DNA, 25 bp, Artificial
  probe
  misc_feature (1)..(25): SEQ ID NO: 2359; WAN024CRJ_at; Start 503; Stop 527
ggccaactaagacacattcatcttg

SEQ ID NO: 130256 - DNA, 25 bp, Artificial
  probe
  misc_feature (1)..(25): SEQ ID NO: 2359; WAN024CRJ_at; Start 173; Stop 197
accaaagacaagggcaagtattaca

SEQ ID NO: 130257 - DNA, 25 bp, Artificial
  probe
  misc_feature (1)..(25): SEQ ID NO: 2359; WAN024CRJ_at; Start 89; Stop 113
caagactttcggacaaaagtagaca

SEQ ID NO: 130258 - DNA, 25 bp, Artificial
  probe
  misc_feature (1)..(25): SEQ ID NO: 2359; WAN024CRJ_at; Start 416; Stop 440
cagccctgtgagtggattgacttgg

SEQ ID NO: 130259 - DNA, 25 bp, Artificial
  probe
  misc_feature (1)..(25): SEQ ID NO: 93; WAN024CRK-3_at; Start 877; Stop 901
cccagttacaacagatgcgagacca

SEQ ID NO: 130260 - DNA, 25 bp, Artificial
  probe
  misc_feature (1)..(25): SEQ ID NO: 93; WAN024CRK-3_at; Start 1001; Stop 1025
tatggaagattatcagggagccagc

SEQ ID NO: 130261 - DNA, 25 bp, Artificial
  probe
  misc_feature (1)..(25): SEQ ID NO: 93; WAN024CRK-3_at; Start 895; Stop 919
gagaccatctggctcaagtgtcaga

SEQ ID NO: 130262 - DNA, 25 bp, Artificial
  probe
  misc_feature (1)..(25): SEQ ID NO: 93; WAN024CRK-3_at; Start 918; Stop 942
gaacaggaatttcagcgaagtcgtg

SEQ ID NO: 130263 - DNA, 25 bp, Artificial
  probe
  misc_feature (1)..(25): SEQ ID NO: 93; WAN024CRK-3_at; Start 31; Stop 55
taaaagatgggaccttgcaggctcg

SEQ ID NO: 130264 - DNA, 25 bp, Artificial
  probe
  misc_feature (1)..(25): SEQ ID NO: 93; WAN024CRK-3_at; Start 85; Stop 109
tctttgaagggcgagaccgtgtttc

SEQ ID NO: 130265 - DNA, 25 bp, Artificial
  probe
  misc_feature (1)..(25): SEQ ID NO: 93; WAN024CRK-3_at; Start 1368; Stop 1392
gaagaaacggttgaggtctatcgct

SEQ ID NO: 130266 - DNA, 25 bp, Artificial
  probe
  misc_feature (1)..(25): SEQ ID NO: 93; WAN024CRK-3_at; Start 605; Stop 629
gagacaatttgtggtgccgtcggtc

SEQ ID NO: 130267 - DNA, 25 bp, Artificial
  probe
  misc_feature (1)..(25): SEQ ID NO: 93; WAN024CRK-3_at; Start 642; Stop 666
ggaactccgattgaaaaccatctgg

SEQ ID NO: 130268 - DNA, 25 bp, Artificial
  probe
  misc_feature (1)..(25): SEQ ID NO: 93; WAN024CRK-3_at; Start 576; Stop 600
aatgcccagaccaagattgcccaga

SEQ ID NO: 130269 - DNA, 25 bp, Artificial
  probe
  misc_feature (1)..(25): SEQ ID NO: 93; WAN024CRK-3_at; Start 984; Stop 1008
gacactcctgccctgtttatggaag

SEQ ID NO: 130270 - DNA, 25 bp, Artificial
  probe
  misc_feature (1)..(25): SEQ ID NO: 93; WAN024CRK-3_at; Start 952; Stop 976
tatctggtttgatgcgcttgcgtca

SEQ ID NO: 130271 - DNA, 25 bp, Artificial
  probe
  misc_feature (1)..(25): SEQ ID NO: 93; WAN024CRK-3_at; Start 728; Stop 752
tatgaaattgccagcagagcgagtg

SEQ ID NO: 130272 - DNA, 25 bp, Artificial
  probe
  misc_feature (1)..(25): SEQ ID NO: 93; WAN024CRK-3_at; Start 1302; Stop 1326
gttgacctttggtggaatcctgcgg

SEQ ID NO: 130273 - DNA, 25 bp, Artificial
  probe
  misc_feature (1)..(25): SEQ ID NO: 93; WAN024CRK-3_at; Start 1188; Stop 1212
gaaagacaagacatgaccaaggcct

SEQ ID NO: 130274 - DNA, 25 bp, Artificial
  probe
  misc_feature (1)..(25): SEQ ID NO: 93; WAN024CRK-3_at; Start 1475; Stop 1499
cacagagtcacgtggtagtctgacc

SEQ ID NO: 130275 - DNA, 25 bp, Artificial
  probe
  misc_feature (1)..(25): SEQ ID NO: 93; WAN024CRK-3_at; Start 561; Stop 585
gctcaggtcatgaaaaatgcccaga

SEQ ID NO: 130276 - DNA, 25 bp, Artificial
  probe
  misc_feature (1)..(25): SEQ ID NO: 93; WAN024CRK-3_at; Start 217; Stop 241
gaattggctggttgcagatgctcca

SEQ ID NO: 130277 - DNA, 25 bp, Artificial
  probe
  misc_feature (1)..(25): SEQ ID NO: 93; WAN024CRK-3_at; Start 117; Stop 141
caagaattccagaatctggcccagg

SEQ ID NO: 130278 - DNA, 25 bp, Artificial
  probe
  misc_feature (1)..(25): SEQ ID NO: 93; WAN024CRK-3_at; Start 1317; Stop 1341
aatcctgcggtggaagcgcaagcca

SEQ ID NO: 130279 - DNA, 25 bp, Artificial
  probe
  misc_feature (1)..(25): SEQ ID NO: 93; WAN024CRK-3_at; Start 1018; Stop 1042
gagccagcggcaaactagatagtct

SEQ ID NO: 130280 - DNA, 25 bp, Artificial
  probe
  misc_feature (1)..(25): SEQ ID NO: 93; WAN024CRK-3_at; Start 744; Stop 768
gagcgagtggctcagtttatcaagc

SEQ ID NO: 130281 - DNA, 25 bp, Artificial
  probe
  misc_feature (1)..(25): SEQ ID NO: 93; WAN024CRK-3_at; Start 1037; Stop 1061
tagtctccgagacctactggtacag

SEQ ID NO: 130282 - DNA, 25 bp, Artificial
  probe
  misc_feature (1)..(25): SEQ ID NO: 93; WAN024CRK-3_at; Start 269; Stop 293
tgatgatatgggacttgggaaaacc

SEQ ID NO: 130283 - DNA, 25 bp, Artificial
  probe
  misc_feature (1)..(25): SEQ ID NO: 93; WAN024CRK-3_at; Start 1352; Stop 1376
ccatcggatgggtcaggaagaaacg

SEQ ID NO: 130284 - DNA, 25 bp, Artificial
  probe
  misc_feature (1)..(25): SEQ ID NO: 93; WAN024CRK-3_at; Start 761; Stop 785
tatcaagcctttcgtgatgcgacgc

SEQ ID NO: 130285 - DNA, 25 bp, Artificial
  probe
  misc_feature (1)..(25): SEQ ID NO: 93; WAN024CRK-3_at; Start 834; Stop 858
tataaaaatgaactggaagaccagc

SEQ ID NO: 130286 - DNA, 25 bp, Artificial
  probe
  misc_feature (1)..(25): SEQ ID NO: 93; WAN024CRK-3_at; Start 1238; Stop 1262
tctgatttccctcaaggctggtggg

SEQ ID NO: 130287 - DNA, 25 bp, Artificial
  probe
  misc_feature (1)..(25): SEQ ID NO: 93; WAN024CRK-3_at; Start 621; Stop 645
ccgtcggtctttgccttgtcaggaa

SEQ ID NO: 130288 - DNA, 25 bp, Artificial
  probe
  misc_feature (1)..(25): SEQ ID NO: 93; WAN024CRK-3_at; Start 453; Stop 477
gagattcttgccgagagccatcaaa

SEQ ID NO: 130289 - DNA, 25 bp, Artificial
  probe
  misc_feature (1)..(25): SEQ ID NO: 93; WAN024CRK-3_at; Start 429; Stop 453
catggtttgaaagcaagtcgtgagg

SEQ ID NO: 130290 - DNA, 25 bp, Artificial
  probe
  misc_feature (1)..(25): SEQ ID NO: 93; WAN024CRK-3_at; Start 488; Stop 512
tagctatgccaccttccgtcaggac

SEQ ID NO: 130291 - DNA, 25 bp, Artificial
  probe
  misc_feature (1)..(25): SEQ ID NO: 93; WAN024CRK-3_at; Start 51; Stop 75
gctcggaaatccttggcctacagtt

SEQ ID NO: 130292 - DNA, 25 bp, Artificial
  probe
  misc_feature (1)..(25): SEQ ID NO: 93; WAN024CRK-3_at; Start 1519; Stop 1543
ttttgggaatttctgaagccagcac

SEQ ID NO: 130293 - DNA, 25 bp, Artificial
  probe
  misc_feature (1)..(25): SEQ ID NO: 2483; WAN024CRK-5_at; Start 353; Stop 377
cctatgagttatcagctgtgggtca

SEQ ID NO: 130294 - DNA, 25 bp, Artificial
  probe
  misc_feature (1)..(25): SEQ ID NO: 2483; WAN024CRK-5_at; Start 972; Stop 996
tagcagtgatcgagacaaattggcc

SEQ ID NO: 130295 - DNA, 25 bp, Artificial
  probe
  misc_feature (1)..(25): SEQ ID NO: 2483; WAN024CRK-5_at; Start 570; Stop 594
gactttcttgcacggactaacggag

SEQ ID NO: 130296 - DNA, 25 bp, Artificial
  probe
  misc_feature (1)..(25): SEQ ID NO: 2483; WAN024CRK-5_at; Start 473; Stop 497
taaggattgtcgagcagagaaagtc

SEQ ID NO: 130297 - DNA, 25 bp, Artificial
  probe
  misc_feature (1)..(25): SEQ ID NO: 2483; WAN024CRK-5_at; Start 718; Stop 742
gtggatagctaccaaaccctgcttt

SEQ ID NO: 130298 - DNA, 25 bp, Artificial
  probe
  misc_feature (1)..(25): SEQ ID NO: 2483; WAN024CRK-5_at; Start 519; Stop 543
tgaggagtctctttcttgggaagcc

SEQ ID NO: 130299 - DNA, 25 bp, Artificial
  probe
  misc_feature (1)..(25): SEQ ID NO: 2483; WAN024CRK-5_at; Start 214; Stop 238
tttctgaaaaatgatgagcgtggtc

SEQ ID NO: 130300 - DNA, 25 bp, Artificial
  probe
  misc_feature (1)..(25): SEQ ID NO: 2483; WAN024CRK-5_at; Start 1326; Stop 1350
cgggcatgttgacctatcagataaa

SEQ ID NO: 130301 - DNA, 25 bp, Artificial
  probe
  misc_feature (1)..(25): SEQ ID NO: 2483; WAN024CRK-5_at; Start 536; Stop 560
gggaagcctttgatgatgccagcca

SEQ ID NO: 130302 - DNA, 25 bp, Artificial
  probe
  misc_feature (1)..(25): SEQ ID NO: 2483; WAN024CRK-5_at; Start 336; Stop 360
tccaaaatcagaatgcgcctatgag

SEQ ID NO: 130303 - DNA, 25 bp, Artificial
  probe
  misc_feature (1)..(25): SEQ ID NO: 2483; WAN024CRK-5_at; Start 1209; Stop 1233
tttccaagtctgtttggctgcgggc

SEQ ID NO: 130304 - DNA, 25 bp, Artificial
  probe
  misc_feature (1)..(25): SEQ ID NO: 2483; WAN024CRK-5_at; Start 1310; Stop 1334
cagtctttgaaaaactcgggcatgt

SEQ ID NO: 130305 - DNA, 25 bp, Artificial
  probe
  misc_feature (1)..(25): SEQ ID NO: 2483; WAN024CRK-5_at; Start 97; Stop 121
tacgctcgcgttgcagaagaagaac

SEQ ID NO: 130306 - DNA, 25 bp, Artificial
  probe
  misc_feature (1)..(25): SEQ ID NO: 2483; WAN024CRK-5_at; Start 814; Stop 838
gaaatcagtgagagtcctagggtca

SEQ ID NO: 130307 - DNA, 25 bp, Artificial
  probe
  misc_feature (1)..(25): SEQ ID NO: 2483; WAN024CRK-5_at; Start 672; Stop 696
tgtgaatttactgatggccttgccc

SEQ ID NO: 130308 - DNA, 25 bp, Artificial
  probe
  misc_feature (1)..(25): SEQ ID NO: 2483; WAN024CRK-5_at; Start 631; Stop 655
ggtcggcacctctttttccctctga

SEQ ID NO: 130309 - DNA, 25 bp, Artificial
  probe
  misc_feature (1)..(25): SEQ ID NO: 2483; WAN024CRK-5_at; Start 375; Stop 399
tcaggtggaagcaggaaccaatcat

SEQ ID NO: 130310 - DNA, 25 bp, Artificial
  probe
  misc_feature (1)..(25): SEQ ID NO: 2483; WAN024CRK-5_at; Start 71; Stop 95
tcatcaaggaaaagaacaatcggct

SEQ ID NO: 130311 - DNA, 25 bp, Artificial
  probe
  misc_feature (1)..(25): SEQ ID NO: 2483; WAN024CRK-5_at; Start 1363; Stop 1387
tatagcctagcgagtcctcaggtgc

SEQ ID NO: 130312 - DNA, 25 bp, Artificial
  probe
  misc_feature (1)..(25): SEQ ID NO: 2483; WAN024CRK-5_at; Start 1398; Stop 1422
caagggaggtctcttggaaatccag

SEQ ID NO: 130313 - DNA, 25 bp, Artificial
  probe
  misc_feature (1)..(25): SEQ ID NO: 2483; WAN024CRK-5_at; Start 547; Stop 571
gatgatgccagccaagaacttttga

SEQ ID NO: 130314 - DNA, 25 bp, Artificial
  probe
  misc_feature (1)..(25): SEQ ID NO: 2483; WAN024CRK-5_at; Start 37; Stop 61
ggtgttgccctttatgaaactggta

SEQ ID NO: 130315 - DNA, 25 bp, Artificial
  probe
  misc_feature (1)..(25): SEQ ID NO: 2483; WAN024CRK-5_at; Start 232; Stop 256
cgtggtcaggaaatcttgtggagtc

SEQ ID NO: 130316 - DNA, 25 bp, Artificial
  probe
  misc_feature (1)..(25): SEQ ID NO: 2483; WAN024CRK-5_at; Start 1020; Stop 1044
gatgggcaccgtttcagctccagaa

SEQ ID NO: 130317 - DNA, 25 bp, Artificial
  probe
  misc_feature (1)..(25): SEQ ID NO: 2483; WAN024CRK-5_at; Start 1005; Stop 1029
gactctttttatccagatgggcacc

SEQ ID NO: 130318 - DNA, 25 bp, Artificial
  probe
  misc_feature (1)..(25): SEQ ID NO: 2483; WAN024CRK-5_at; Start 399; Stop 423
tatcttgtggactctgagaatcggc

SEQ ID NO: 130319 - DNA, 25 bp, Artificial
  probe
  misc_feature (1)..(25): SEQ ID NO: 2483; WAN024CRK-5_at; Start 1139; Stop 1163
gacaggtatctagccgacaagagct

SEQ ID NO: 130320 - DNA, 25 bp, Artificial
  probe
  misc_feature (1)..(25): SEQ ID NO: 2483; WAN024CRK-5_at; Start 414; Stop 438
gagaatcggccaaatcaatagccaa

SEQ ID NO: 130321 - DNA, 25 bp, Artificial
  probe
  misc_feature (1)..(25): SEQ ID NO: 2483; WAN024CRK-5_at; Start 193; Stop 217
catttggcagcgctagagcattttc

SEQ ID NO: 130322 - DNA, 25 bp, Artificial
  probe
  misc_feature (1)..(25): SEQ ID NO: 2483; WAN024CRK-5_at; Start 898; Stop 922
cagcagatgcgtcttctcaaggaaa

SEQ ID NO: 130323 - DNA, 25 bp, Artificial
  probe
  misc_feature (1)..(25): SEQ ID NO: 2483; WAN024CRK-5_at; Start 1381; Stop 1405
caggtgcagattgcctccaagggag

SEQ ID NO: 130324 - DNA, 25 bp, Artificial
  probe
  misc_feature (1)..(25): SEQ ID NO: 2483; WAN024CRK-5_at; Start 883; Stop 907
tattttttaacagaccagcagatgc

SEQ ID NO: 130325 - DNA, 25 bp, Artificial
  probe
  misc_feature (1)..(25): SEQ ID NO: 2483; WAN024CRK-5_at; Start 702; Stop 726
tcaatttgaccatcaagtggatagc

SEQ ID NO: 130326 - DNA, 25 bp, Artificial
  probe
  misc_feature (1)..(25): SEQ ID NO: 2483; WAN024CRK-5_at; Start 1080; Stop 1104
ctttgacagggaagaagataatcgg

SEQ ID NO: 130327 - DNA, 25 bp, Artificial
  probe
  misc_feature (1)..(25): SEQ ID NO: 1900; WAN024CRL_at; Start 1550; Stop 1574
gccgtccagaagtttcttaccaaga

SEQ ID NO: 130328 - DNA, 25 bp, Artificial
  probe
  misc_feature (1)..(25): SEQ ID NO: 1900; WAN024CRL_at; Start 415; Stop 439
ggtgtgcgtacagccacccatcaag

SEQ ID NO: 130329 - DNA, 25 bp, Artificial
  probe
  misc_feature (1)..(25): SEQ ID NO: 1900; WAN024CRL_at; Start 855; Stop 879
caagattgtgcgctttgcggacaag

SEQ ID NO: 130330 - DNA, 25 bp, Artificial
  probe
  misc_feature (1)..(25): SEQ ID NO: 1900; WAN024CRL_at; Start 124; Stop 148
gaaatgctggctttcatgccttgta

SEQ ID NO: 130331 - DNA, 25 bp, Artificial
  probe
  misc_feature (1)..(25): SEQ ID NO: 1900; WAN024CRL_at; Start 1393; Stop 1417
cgctgggctcgttttgaaatcaaga

SEQ ID NO: 130332 - DNA, 25 bp, Artificial
  probe
  misc_feature (1)..(25): SEQ ID NO: 1900; WAN024CRL_at; Start 582; Stop 606
cgaaatcggtcgtttcaagacagga

SEQ ID NO: 130333 - DNA, 25 bp, Artificial
  probe
  misc_feature (1)..(25): SEQ ID NO: 1900; WAN024CRL_at; Start 785; Stop 809
tccaccgtgcgcctatgtttacagg

SEQ ID NO: 130334 - DNA, 25 bp, Artificial
  probe
  misc_feature (1)..(25): SEQ ID NO: 1900; WAN024CRL_at; Start 798; Stop 822
tatgtttacaggtgtggtcaaggga

SEQ ID NO: 130335 - DNA, 25 bp, Artificial
  probe
  misc_feature (1)..(25): SEQ ID NO: 1900; WAN024CRL_at; Start 445; Stop 469
gctgctaaggctgttattgtgacga

SEQ ID NO: 130336 - DNA, 25 bp, Artificial
  probe
  misc_feature (1)..(25): SEQ ID NO: 1900; WAN024CRL_at; Start 947; Stop 971
caaccagtctgcctgaggatgtcca

SEQ ID NO: 130337 - DNA, 25 bp, Artificial
  probe
  misc_feature (1)..(25): SEQ ID NO: 1900; WAN024CRL_at; Start 871; Stop 895
gcggacaaggaacgtcaccaactct

SEQ ID NO: 130338 - DNA, 25 bp, Artificial
  probe
  misc_feature (1)..(25): SEQ ID NO: 1900; WAN024CRL_at; Start 591; Stop 615
tcgtttcaagacaggaacccctcca

SEQ ID NO: 130339 - DNA, 25 bp, Artificial
  probe
  misc_feature (1)..(25): SEQ ID NO: 1900; WAN024CRL_at; Start 554; Stop 578
tagctgacaatctcaaggaactggg

SEQ ID NO: 130340 - DNA, 25 bp, Artificial
  probe
  misc_feature (1)..(25): SEQ ID NO: 1900; WAN024CRL_at; Start 228; Stop 252
tgacaagacttacatccagatgaag

SEQ ID NO: 130341 - DNA, 25 bp, Artificial
  probe
  misc_feature (1)..(25): SEQ ID NO: 1900; WAN024CRL_at; Start 488; Stop 512
gggaaattatcatcggagacctcaa

SEQ ID NO: 130342 - DNA, 25 bp, Artificial
  probe
  misc_feature (1)..(25): SEQ ID NO: 1900; WAN024CRL_at; Start 1106; Stop 1130
tcactgctggtcagacaaatggaac

SEQ ID NO: 130343 - DNA, 25 bp, Artificial
  probe
  misc_feature (1)..(25): SEQ ID NO: 1900; WAN024CRL_at; Start 1285; Stop 1309
taccgtctcttgaccagtcgtgctg

SEQ ID NO: 130344 - DNA, 25 bp, Artificial
  probe
  misc_feature (1)..(25): SEQ ID NO: 1900; WAN024CRL_at; Start 1076; Stop 1100
ctttggaaaccaagaaaatctcagg

SEQ ID NO: 130345 - DNA, 25 bp, Artificial
  probe
  misc_feature (1)..(25): SEQ ID NO: 1900; WAN024CRL_at; Start 1335; Stop 1359
caatgctgatatgcgcttgactgag

SEQ ID NO: 130346 - DNA, 25 bp, Artificial
  probe
  misc_feature (1)..(25): SEQ ID NO: 1900; WAN024CRL_at; Start 693; Stop 717
cacttcacgtgatgaggattatgtc

SEQ ID NO: 130347 - DNA, 25 bp, Artificial
  probe
  misc_feature (1)..(25): SEQ ID NO: 1900; WAN024CRL_at; Start 87; Stop 111
tatgggctgtaaggtcctgcttgcg

SEQ ID NO: 130348 - DNA, 25 bp, Artificial
  probe
  misc_feature (1)..(25): SEQ ID NO: 1900; WAN024CRL_at; Start 359; Stop 383
tgacccttcgtcaaaccatgattga

SEQ ID NO: 130349 - DNA, 25 bp, Artificial
  probe
  misc_feature (1)..(25): SEQ ID NO: 1900; WAN024CRL_at; Start 1063; Stop 1087
cagttgcgtgcgactttggaaacca

SEQ ID NO: 130350 - DNA, 25 bp, Artificial
  probe
  misc_feature (1)..(25): SEQ ID NO: 1900; WAN024CRL_at; Start 500; Stop 524
tcggagacctcaagtactcatcagg

SEQ ID NO: 130351 - DNA, 25 bp, Artificial
  probe
  misc_feature (1)..(25): SEQ ID NO: 1900; WAN024CRL_at; Start 102; Stop 126
cctgcttgcgaccatcaatattgaa

SEQ ID NO: 130352 - DNA, 25 bp, Artificial
  probe
  misc_feature (1)..(25): SEQ ID NO: 1900; WAN024CRL_at; Start 141; Stop 165
gccttgtaatccctctatcggtggt

SEQ ID NO: 130353 - DNA, 25 bp, Artificial
  probe
  misc_feature (1)..(25): SEQ ID NO: 1900; WAN024CRL_at; Start 429; Stop 453
cacccatcaagaatatgctgctaag

SEQ ID NO: 130354 - DNA, 25 bp, Artificial
  probe
  misc_feature (1)..(25): SEQ ID NO: 1900; WAN024CRL_at; Start 33; Stop 57
tattgtaattggtgcgggacacgct

SEQ ID NO: 130355 - DNA, 25 bp, Artificial
  probe
  misc_feature (1)..(25): SEQ ID NO: 1900; WAN024CRL_at; Start 886; Stop 910
caccaactcttccttgagccagaag

SEQ ID NO: 130356 - DNA, 25 bp, Artificial
  probe
  misc_feature (1)..(25): SEQ ID NO: 1900; WAN024CRL_at; Start 749; Stop 773
ccaatggtaccagtcatgagattat

SEQ ID NO: 130357 - DNA, 25 bp, Artificial
  probe
  misc_feature (1)..(25): SEQ ID NO: 1900; WAN024CRL_at; Start 1174; Stop 1198
atcaatgcggctctgaaaatccaag

SEQ ID NO: 130358 - DNA, 25 bp, Artificial
  probe
  misc_feature (1)..(25): SEQ ID NO: 1900; WAN024CRL_at; Start 70; Stop 94
tccttggccgctagccgtatgggct

SEQ ID NO: 130359 - DNA, 25 bp, Artificial
  probe
  misc_feature (1)..(25): SEQ ID NO: 1900; WAN024CRL_at; Start 191; Stop 215
aagtcgatgccctcggtggcgagat

SEQ ID NO: 130360 - DNA, 25 bp, Artificial
  probe
  misc_feature (1)..(25): SEQ ID NO: 1900; WAN024CRL_at; Start 459; Stop 483
tattgtgacgacagggactgctctc

SEQ ID NO: 130361 - DNA, 25 bp, Artificial
  probe
  misc_feature (1)..(25): SEQ ID NO: 2527; WAN024CRM_at; Start 260; Stop 284
aggacaagatttacggcctgagctt

SEQ ID NO: 130362 - DNA, 25 bp, Artificial
  probe
  misc_feature (1)..(25): SEQ ID NO: 2527; WAN024CRM_at; Start 225; Stop 249
gcctttcctatttattactgctaag

SEQ ID NO: 130363 - DNA, 25 bp, Artificial
  probe
  misc_feature (1)..(25): SEQ ID NO: 2527; WAN024CRM_at; Start 391; Stop 415
tcccttggcaatctaaaaatgaatc

SEQ ID NO: 130364 - DNA, 25 bp, Artificial
  probe
  misc_feature (1)..(25): SEQ ID NO: 2527; WAN024CRM_at; Start 341; Stop 365
tccacaatattttgcgccgccttca

SEQ ID NO: 130365 - DNA, 25 bp, Artificial
  probe
  misc_feature (1)..(25): SEQ ID NO: 2527; WAN024CRM_at; Start 134; Stop 158
aaccgattgatttgattatcacaga

SEQ ID NO: 130366 - DNA, 25 bp, Artificial
  probe
  misc_feature (1)..(25): SEQ ID NO: 2527; WAN024CRM_at; Start 473; Stop 497
ttgaattgctgtggattttagctag

SEQ ID NO: 130367 - DNA, 25 bp, Artificial
  probe
  misc_feature (1)..(25): SEQ ID NO: 2527; WAN024CRM_at; Start 20; Stop 44
tcgttgacgacgaggtagaaatcac

SEQ ID NO: 130368 - DNA, 25 bp, Artificial
  probe
  misc_feature (1)..(25): SEQ ID NO: 2527; WAN024CRM_at; Start 511; Stop 535
gttttctccaagacagacctctatg

SEQ ID NO: 130369 - DNA, 25 bp, Artificial
  probe
  misc_feature (1)..(25): SEQ ID NO: 2527; WAN024CRM_at; Start 588; Stop 612
tatccatgctcttcgacaggagctg

SEQ ID NO: 130370 - DNA, 25 bp, Artificial
  probe
  misc_feature (1)..(25): SEQ ID NO: 2527; WAN024CRM_at; Start 149; Stop 173
ttatcacagatgtcatgatgcctcg

SEQ ID NO: 130371 - DNA, 25 bp, Artificial
  probe
  misc_feature (1)..(25): SEQ ID NO: 2527; WAN024CRM_at; Start 184; Stop 208
tatgatttaatcagtgaggttcaat

SEQ ID NO: 130372 - DNA, 25 bp, Artificial
  probe
  misc_feature (1)..(25): SEQ ID NO: 2527; WAN024CRM_at; Start 376; Stop 400
gaaacagagctgatttcccttggca

SEQ ID NO: 130373 - DNA, 25 bp, Artificial
  probe
  misc_feature (1)..(25): SEQ ID NO: 2527; WAN024CRM_at; Start 607; Stop 631
gagctggcaaaatatagtagtgacc

SEQ ID NO: 130374 - DNA, 25 bp, Artificial
  probe
  misc_feature (1)..(25): SEQ ID NO: 2527; WAN024CRM_at; Start 155; Stop 179
cagatgtcatgatgcctcggatgga

SEQ ID NO: 130375 - DNA, 25 bp, Artificial
  probe
  misc_feature (1)..(25): SEQ ID NO: 2527; WAN024CRM_at; Start 74; Stop 98
caggttatcaggtcttggtagccca

SEQ ID NO: 130376 - DNA, 25 bp, Artificial
  probe
  misc_feature (1)..(25): SEQ ID NO: 2527; WAN024CRM_at; Start 561; Stop 585
ggatgacaccaataccttgaatgtg

SEQ ID NO: 130377 - DNA, 25 bp, Artificial
  probe
  misc_feature (1)..(25): SEQ ID NO: 2527; WAN024CRM_at; Start 526; Stop 550
gacctctatgaaaagatctggaaag

SEQ ID NO: 130378 - DNA, 25 bp, Artificial
  probe
  misc_feature (1)..(25): SEQ ID NO: 2527; WAN024CRM_at; Start 535; Stop 559
gaaaagatctggaaagaagactacg

SEQ ID NO: 130379 - DNA, 25 bp, Artificial
  probe
  misc_feature (1)..(25): SEQ ID NO: 2527; WAN024CRM_at; Start 303; Stop 327
tgctaagccttttagcccacgtgag

SEQ ID NO: 130380 - DNA, 25 bp, Artificial
  probe
  misc_feature (1)..(25): SEQ ID NO: 2527; WAN024CRM_at; Start 462; Stop 486
tgttaaatcatttgaattgctgtgg

SEQ ID NO: 130381 - DNA, 25 bp, Artificial
  probe
  misc_feature (1)..(25): SEQ ID NO: 2527; WAN024CRM_at; Start 499; Stop 523
aatccagagcgagttttctccaaga

SEQ ID NO: 130382 - DNA, 25 bp, Artificial
  probe
  misc_feature (1)..(25): SEQ ID NO: 2527; WAN024CRM_at; Start 546; Stop 570
gaaagaagactacgtggatgacacc

SEQ ID NO: 130383 - DNA, 25 bp, Artificial
  probe
  misc_feature (1)..(25): SEQ ID NO: 2527; WAN024CRM_at; Start 169; Stop 193
cctcggatggatggttatgatttaa

SEQ ID NO: 130384 - DNA, 25 bp, Artificial
  probe
  misc_feature (1)..(25): SEQ ID NO: 2527; WAN024CRM_at; Start 411; Stop 435
gaatcatagtagtcatgaagttcaa

SEQ ID NO: 130385 - DNA, 25 bp, Artificial
  probe
  misc_feature (1)..(25): SEQ ID NO: 2527; WAN024CRM_at; Start 196; Stop 220
agtgaggttcaatacttatcaccag

SEQ ID NO: 130386 - DNA, 25 bp, Artificial
  probe
  misc_feature (1)..(25): SEQ ID NO: 2527; WAN024CRM_at; Start 63; Stop 87
cttaattcaggcaggttatcaggtc

SEQ ID NO: 130387 - DNA, 25 bp, Artificial
  probe
  misc_feature (1)..(25): SEQ ID NO: 2527; WAN024CRM_at; Start 252; Stop 276
cagtgaacaggacaagatttacggc

SEQ ID NO: 130388 - DNA, 25 bp, Artificial
  probe
  misc_feature (1)..(25): SEQ ID NO: 2527; WAN024CRM_at; Start 7; Stop 31
aagacaattttactcgttgacgacg

SEQ ID NO: 130389 - DNA, 25 bp, Artificial
  probe
  misc_feature (1)..(25): SEQ ID NO: 2527; WAN024CRM_at; Start 332; Stop 356
ttttgcgtgtccacaatattttgcg

SEQ ID NO: 130390 - DNA, 25 bp, Artificial
  probe
  misc_feature (1)..(25): SEQ ID NO: 2527; WAN024CRM_at; Start 240; Stop 264
tactgctaagaccagtgaacaggac

SEQ ID NO: 130391 - DNA, 25 bp, Artificial
  probe
  misc_feature (1)..(25): SEQ ID NO: 2527; WAN024CRM_at; Start 672; Stop 696
gatagagaaaccgagaggacaaaca

SEQ ID NO: 130392 - DNA, 25 bp, Artificial
  probe
  misc_feature (1)..(25): SEQ ID NO: 2527; WAN024CRM_at; Start 597; Stop 621
tcttcgacaggagctggcaaaatat

SEQ ID NO: 130393 - DNA, 25 bp, Artificial
  probe
  misc_feature (1)..(25): SEQ ID NO: 2527; WAN024CRM_at; Start 35; Stop 59
tagaaatcacagatattcatcagag

SEQ ID NO: 130394 - DNA, 25 bp, Artificial
  probe
  misc_feature (1)..(25): SEQ ID NO: 2527; WAN024CRM_at; Start 665; Stop 689
gatataagatagagaaaccgagagg

SEQ ID NO: 130395 - DNA, 25 bp, Artificial
  probe
  misc_feature (1)..(25): SEQ ID NO: 5031; WAN024CRN_at; Start 19; Stop 43
catgtactcacctgtttggtaattc

SEQ ID NO: 130396 - DNA, 25 bp, Artificial
  probe
  misc_feature (1)..(25): SEQ ID NO: 5031; WAN024CRN_at; Start 42; Stop 66
tcttataaagctgaacggctccttc

SEQ ID NO: 130397 - DNA, 25 bp, Artificial
  probe
  misc_feature (1)..(25): SEQ ID NO: 5031; WAN024CRN_at; Start 27; Stop 51
cacctgtttggtaattcttataaag

SEQ ID NO: 130398 - DNA, 25 bp, Artificial
  probe
  misc_feature (1)..(25): SEQ ID NO: 5031; WAN024CRN_at; Start 58; Stop 82
ggctccttcttgcaccaattgctca

SEQ ID NO: 130399 - DNA, 25 bp, Artificial
  probe
  misc_feature (1)..(25): SEQ ID NO: 5031; WAN024CRN_at; Start 39; Stop 63
aattcttataaagctgaacggctcc

SEQ ID NO: 130400 - DNA, 25 bp, Artificial
  probe
  misc_feature (1)..(25): SEQ ID NO: 5031; WAN024CRN_at; Start 48; Stop 72
aaagctgaacggctccttcttgcac

SEQ ID NO: 130401 - DNA, 25 bp, Artificial
  probe
  misc_feature (1)..(25): SEQ ID NO: 5031; WAN024CRN_at; Start 205; Stop 229
cccaacctgataagtaccggtatcg

SEQ ID NO: 130402 - DNA, 25 bp, Artificial
  probe
  misc_feature (1)..(25): SEQ ID NO: 5031; WAN024CRN_at; Start 81; Stop 105
caatccccttgtggaaggatttttg

SEQ ID NO: 130403 - DNA, 25 bp, Artificial
  probe
  misc_feature (1)..(25): SEQ ID NO: 5031; WAN024CRN_at; Start 2; Stop 26
tgaccaacagctcccagcatgtact

SEQ ID NO: 130404 - DNA, 25 bp, Artificial
  probe
  misc_feature (1)..(25): SEQ ID NO: 5031; WAN024CRN_at; Start 36; Stop 60
ggtaattcttataaagctgaacggc

SEQ ID NO: 130405 - DNA, 25 bp, Artificial
  probe
  misc_feature (1)..(25): SEQ ID NO: 5031; WAN024CRN_at; Start 207; Stop 231
caacctgataagtaccggtatcgta

SEQ ID NO: 130406 - DNA, 25 bp, Artificial
  probe
  misc_feature (1)..(25): SEQ ID NO: 5031; WAN024CRN_at; Start 90; Stop 114
tgtggaaggatttttgcttcataac

SEQ ID NO: 130407 - DNA, 25 bp, Artificial
  probe
  misc_feature (1)..(25): SEQ ID NO: 5031; WAN024CRN_at; Start 73; Stop 97
caattgctcaatccccttgtggaag

SEQ ID NO: 130408 - DNA, 25 bp, Artificial
  probe
  misc_feature (1)..(25): SEQ ID NO: 5031; WAN024CRN_at; Start 76; Stop 100
ttgctcaatccccttgtggaaggat

SEQ ID NO: 130409 - DNA, 25 bp, Artificial
  probe
  misc_feature (1)..(25): SEQ ID NO: 5031; WAN024CRN_at; Start 285; Stop 309
ccataaactgggtaacattagatag

SEQ ID NO: 130410 - DNA, 25 bp, Artificial
  probe
  misc_feature (1)..(25): SEQ ID NO: 5031; WAN024CRN_at; Start 16; Stop 40
cagcatgtactcacctgtttggtaa

SEQ ID NO: 130411 - DNA, 25 bp, Artificial
  probe
  misc_feature (1)..(25): SEQ ID NO: 5031; WAN024CRN_at; Start 51; Stop 75
gctgaacggctccttcttgcaccaa

SEQ ID NO: 130412 - DNA, 25 bp, Artificial
  probe
  misc_feature (1)..(25): SEQ ID NO: 5031; WAN024CRN_at; Start 1; Stop 25
ttgaccaacagctcccagcatgtac

SEQ ID NO: 130413 - DNA, 25 bp, Artificial
  probe
  misc_feature (1)..(25): SEQ ID NO: 5031; WAN024CRN_at; Start 11; Stop 35
gctcccagcatgtactcacctgttt

SEQ ID NO: 130414 - DNA, 25 bp, Artificial
  probe
  misc_feature (1)..(25): SEQ ID NO: 5031; WAN024CRN_at; Start 45; Stop 69
tataaagctgaacggctccttcttg

SEQ ID NO: 130415 - DNA, 25 bp, Artificial
  probe
  misc_feature (1)..(25): SEQ ID NO: 5031; WAN024CRN_at; Start 78; Stop 102
gctcaatccccttgtggaaggattt

SEQ ID NO: 130416 - DNA, 25 bp, Artificial
  probe
  misc_feature (1)..(25): SEQ ID NO: 5031; WAN024CRN_at; Start 86; Stop 110
cccttgtggaaggatttttgcttca

SEQ ID NO: 130417 - DNA, 25 bp, Artificial
  probe
  misc_feature (1)..(25): SEQ ID NO: 5031; WAN024CRN_at; Start 94; Stop 118
gaaggatttttgcttcataacattc

SEQ ID NO: 130418 - DNA, 25 bp, Artificial
  probe
  misc_feature (1)..(25): SEQ ID NO: 5031; WAN024CRN_at; Start 13; Stop 37
tcccagcatgtactcacctgtttgg

SEQ ID NO: 130419 - DNA, 25 bp, Artificial
  probe
  misc_feature (1)..(25): SEQ ID NO: 5031; WAN024CRN_at; Start 67; Stop 91
ttgcaccaattgctcaatccccttg

SEQ ID NO: 130420 - DNA, 25 bp, Artificial
  probe
  misc_feature (1)..(25): SEQ ID NO: 5031; WAN024CRN_at; Start 54; Stop 78
gaacggctccttcttgcaccaattg

SEQ ID NO: 130421 - DNA, 25 bp, Artificial
  probe
  misc_feature (1)..(25): SEQ ID NO: 5031; WAN024CRN_at; Start 227; Stop 251
tcgtaaaccccgataatatcacctg

SEQ ID NO: 130422 - DNA, 25 bp, Artificial
  probe
  misc_feature (1)..(25): SEQ ID NO: 5031; WAN024CRN_at; Start 196; Stop 220
caaggtatccccaacctgataagta

SEQ ID NO: 130423 - DNA, 25 bp, Artificial
  probe
  misc_feature (1)..(25): SEQ ID NO: 5031; WAN024CRN_at; Start 282; Stop 306
ccgccataaactgggtaacattaga

SEQ ID NO: 130424 - DNA, 25 bp, Artificial
  probe
  misc_feature (1)..(25): SEQ ID NO: 5031; WAN024CRN_at; Start 230; Stop 254
taaaccccgataatatcacctgcca

SEQ ID NO: 130425 - DNA, 25 bp, Artificial
  probe
  misc_feature (1)..(25): SEQ ID NO: 5031; WAN024CRN_at; Start 238; Stop 262
gataatatcacctgccacggcattg

SEQ ID NO: 130426 - DNA, 25 bp, Artificial
  probe
  misc_feature (1)..(25): SEQ ID NO: 5031; WAN024CRN_at; Start 192; Stop 216
ccgtcaaggtatccccaacctgata

SEQ ID NO: 130427 - DNA, 25 bp, Artificial
  probe
  misc_feature (1)..(25): SEQ ID NO: 5031; WAN024CRN_at; Start 281; Stop 305
tccgccataaactgggtaacattag

SEQ ID NO: 130428 - DNA, 25 bp, Artificial
  probe
  misc_feature (1)..(25): SEQ ID NO: 5031; WAN024CRN_at; Start 61; Stop 85
tccttcttgcaccaattgctcaatc

SEQ ID NO: 130429 - DNA, 25 bp, Artificial
  probe
  misc_feature (1)..(25): SEQ ID NO: 5834; WAN024CRO_at; Start 109; Stop 133
cggtctttggctaagatattgcgac

SEQ ID NO: 130430 - DNA, 25 bp, Artificial
  probe
  misc_feature (1)..(25): SEQ ID NO: 5834; WAN024CRO_at; Start 60; Stop 84
ccagcggagggcaaagtcattttca

SEQ ID NO: 130431 - DNA, 25 bp, Artificial
  probe
  misc_feature (1)..(25): SEQ ID NO: 5834; WAN024CRO_at; Start 44; Stop 68
gatacttgtccgcaaaccagcggag

SEQ ID NO: 130432 - DNA, 25 bp, Artificial
  probe
  misc_feature (1)..(25): SEQ ID NO: 5834; WAN024CRO_at; Start 68; Stop 92
gggcaaagtcattttcaaagagaaa

SEQ ID NO: 130433 - DNA, 25 bp, Artificial
  probe
  misc_feature (1)..(25): SEQ ID NO: 5834; WAN024CRO_at; Start 157; Stop 181
tcctcaggcttgatccaacgaacgg

SEQ ID NO: 130434 - DNA, 25 bp, Artificial
  probe
  misc_feature (1)..(25): SEQ ID NO: 5834; WAN024CRO_at; Start 128; Stop 152
tgcgacttgacgacatccgttcatc

SEQ ID NO: 130435 - DNA, 25 bp, Artificial
  probe
  misc_feature (1)..(25): SEQ ID NO: 5834; WAN024CRO_at; Start 80; Stop 104
tttcaaagagaaagactggttggtc

SEQ ID NO: 130436 - DNA, 25 bp, Artificial
  probe
  misc_feature (1)..(25): SEQ ID NO: 5834; WAN024CRO_at; Start 36; Stop 60
tacgtctggatacttgtccgcaaac

SEQ ID NO: 130437 - DNA, 25 bp, Artificial
  probe
  misc_feature (1)..(25): SEQ ID NO: 5834; WAN024CRO_at; Start 6; Stop 30
ggtactgagtcacatcttctcctct

SEQ ID NO: 130438 - DNA, 25 bp, Artificial
  probe
  misc_feature (1)..(25): SEQ ID NO: 5834; WAN024CRO_at; Start 86; Stop 110
agagaaagactggttggtcaaaacg

SEQ ID NO: 130439 - DNA, 25 bp, Artificial
  probe
  misc_feature (1)..(25): SEQ ID NO: 5834; WAN024CRO_at; Start 161; Stop 185
caggcttgatccaacgaacggtctt

SEQ ID NO: 130440 - DNA, 25 bp, Artificial
  probe
  misc_feature (1)..(25): SEQ ID NO: 5834; WAN024CRO_at; Start 112; Stop 136
tctttggctaagatattgcgacttg

SEQ ID NO: 130441 - DNA, 25 bp, Artificial
  probe
  misc_feature (1)..(25): SEQ ID NO: 5834; WAN024CRO_at; Start 135; Stop 159
tgacgacatccgttcatccaagtcc

SEQ ID NO: 130442 - DNA, 25 bp, Artificial
  probe
  misc_feature (1)..(25): SEQ ID NO: 5834; WAN024CRO_at; Start 46; Stop 70
tacttgtccgcaaaccagcggaggg

SEQ ID NO: 130443 - DNA, 25 bp, Artificial
  probe
  misc_feature (1)..(25): SEQ ID NO: 5834; WAN024CRO_at; Start 103; Stop 127
tcaaaacggtctttggctaagatat

SEQ ID NO: 130444 - DNA, 25 bp, Artificial
  probe
  misc_feature (1)..(25): SEQ ID NO: 5834; WAN024CRO_at; Start 117; Stop 141
ggctaagatattgcgacttgacgac

SEQ ID NO: 130445 - DNA, 25 bp, Artificial
  probe
  misc_feature (1)..(25): SEQ ID NO: 5834; WAN024CRO_at; Start 120; Stop 144
taagatattgcgacttgacgacatc

SEQ ID NO: 130446 - DNA, 25 bp, Artificial
  probe
  misc_feature (1)..(25): SEQ ID NO: 5834; WAN024CRO_at; Start 240; Stop 264
tttaaagacttcaaactggagttga

SEQ ID NO: 130447 - DNA, 25 bp, Artificial
  probe
  misc_feature (1)..(25): SEQ ID NO: 5834; WAN024CRO_at; Start 145; Stop 169
cgttcatccaagtcctcaggcttga

SEQ ID NO: 130448 - DNA, 25 bp, Artificial
  probe
  misc_feature (1)..(25): SEQ ID NO: 5834; WAN024CRO_at; Start 64; Stop 88
cggagggcaaagtcattttcaaaga

SEQ ID NO: 130449 - DNA, 25 bp, Artificial
  probe
  misc_feature (1)..(25): SEQ ID NO: 5834; WAN024CRO_at; Start 143; Stop 167
tccgttcatccaagtcctcaggctt

SEQ ID NO: 130450 - DNA, 25 bp, Artificial
  probe
  misc_feature (1)..(25): SEQ ID NO: 5834; WAN024CRO_at; Start 50; Stop 74
tgtccgcaaaccagcggagggcaaa

SEQ ID NO: 130451 - DNA, 25 bp, Artificial
  probe
  misc_feature (1)..(25): SEQ ID NO: 5834; WAN024CRO_at; Start 20; Stop 44
tcttctcctctaactctacgtctgg

SEQ ID NO: 130452 - DNA, 25 bp, Artificial
  probe
  misc_feature (1)..(25): SEQ ID NO: 5834; WAN024CRO_at; Start 154; Stop 178
aagtcctcaggcttgatccaacgaa

SEQ ID NO: 130453 - DNA, 25 bp, Artificial
  probe
  misc_feature (1)..(25): SEQ ID NO: 5834; WAN024CRO_at; Start 100; Stop 124
tggtcaaaacggtctttggctaaga

SEQ ID NO: 130454 - DNA, 25 bp, Artificial
  probe
  misc_feature (1)..(25): SEQ ID NO: 5834; WAN024CRO_at; Start 56; Stop 80
caaaccagcggagggcaaagtcatt

SEQ ID NO: 130455 - DNA, 25 bp, Artificial
  probe
  misc_feature (1)..(25): SEQ ID NO: 5834; WAN024CRO_at; Start 2; Stop 26
tgttggtactgagtcacatcttctc

SEQ ID NO: 130456 - DNA, 25 bp, Artificial
  probe
  misc_feature (1)..(25): SEQ ID NO: 5834; WAN024CRO_at; Start 38; Stop 62
cgtctggatacttgtccgcaaacca

SEQ ID NO: 130457 - DNA, 25 bp, Artificial
  probe
  misc_feature (1)..(25): SEQ ID NO: 5834; WAN024CRO_at; Start 140; Stop 164
acatccgttcatccaagtcctcagg

SEQ ID NO: 130458 - DNA, 25 bp, Artificial
  probe
  misc_feature (1)..(25): SEQ ID NO: 5834; WAN024CRO_at; Start 123; Stop 147
gatattgcgacttgacgacatccgt

SEQ ID NO: 130459 - DNA, 25 bp, Artificial
  probe
  misc_feature (1)..(25): SEQ ID NO: 5834; WAN024CRO_at; Start 27; Stop 51
ctctaactctacgtctggatacttg

SEQ ID NO: 130460 - DNA, 25 bp, Artificial
  probe
  misc_feature (1)..(25): SEQ ID NO: 5834; WAN024CRO_at; Start 31; Stop 55
aactctacgtctggatacttgtccg

SEQ ID NO: 130461 - DNA, 25 bp, Artificial
  probe
  misc_feature (1)..(25): SEQ ID NO: 5834; WAN024CRO_at; Start 131; Stop 155
gacttgacgacatccgttcatccaa

SEQ ID NO: 130462 - DNA, 25 bp, Artificial
  probe
  misc_feature (1)..(25): SEQ ID NO: 5834; WAN024CRO_at; Start 125; Stop 149
tattgcgacttgacgacatccgttc

SEQ ID NO: 130463 - DNA, 25 bp, Artificial
  probe
  misc_feature (1)..(25): SEQ ID NO: 5643; WAN024CRP_at; Start 199; Stop 223
ttgagcctcgatccccttggcagag

SEQ ID NO: 130464 - DNA, 25 bp, Artificial
  probe
  misc_feature (1)..(25): SEQ ID NO: 5643; WAN024CRP_at; Start 255; Stop 279
tcaaggtacgataggtatcttctga

SEQ ID NO: 130465 - DNA, 25 bp, Artificial
  probe
  misc_feature (1)..(25): SEQ ID NO: 5643; WAN024CRP_at; Start 158; Stop 182
ggaatgccacgatgtttcacaacct

SEQ ID NO: 130466 - DNA, 25 bp, Artificial
  probe
  misc_feature (1)..(25): SEQ ID NO: 5643; WAN024CRP_at; Start 82; Stop 106
gatttcttccaattcttgcaagaga

SEQ ID NO: 130467 - DNA, 25 bp, Artificial
  probe
  misc_feature (1)..(25): SEQ ID NO: 5643; WAN024CRP_at; Start 162; Stop 186
tgccacgatgtttcacaacctcaaa

SEQ ID NO: 130468 - DNA, 25 bp, Artificial
  probe
  misc_feature (1)..(25): SEQ ID NO: 5643; WAN024CRP_at; Start 196; Stop 220
ggtttgagcctcgatccccttggca

SEQ ID NO: 130469 - DNA, 25 bp, Artificial
  probe
  misc_feature (1)..(25): SEQ ID NO: 5643; WAN024CRP_at; Start 155; Stop 179
actggaatgccacgatgtttcacaa

SEQ ID NO: 130470 - DNA, 25 bp, Artificial
  probe
  misc_feature (1)..(25): SEQ ID NO: 5643; WAN024CRP_at; Start 214; Stop 238
cttggcagagtccacgaccatgacc

SEQ ID NO: 130471 - DNA, 25 bp, Artificial
  probe
  misc_feature (1)..(25): SEQ ID NO: 5643; WAN024CRP_at; Start 221; Stop 245
gagtccacgaccatgaccgcagcat

SEQ ID NO: 130472 - DNA, 25 bp, Artificial
  probe
  misc_feature (1)..(25): SEQ ID NO: 5643; WAN024CRP_at; Start 247; Stop 271
caccgccatcaaggtacgataggta

SEQ ID NO: 130473 - DNA, 25 bp, Artificial
  probe
  misc_feature (1)..(25): SEQ ID NO: 5643; WAN024CRP_at; Start 252; Stop 276
ccatcaaggtacgataggtatcttc

SEQ ID NO: 130474 - DNA, 25 bp, Artificial
  probe
  misc_feature (1)..(25): SEQ ID NO: 5643; WAN024CRP_at; Start 123; Stop 147
cgtcacggtccagcttgttcataaa

SEQ ID NO: 130475 - DNA, 25 bp, Artificial
  probe
  misc_feature (1)..(25): SEQ ID NO: 5643; WAN024CRP_at; Start 45; Stop 69
cgataggccagttcatagggtagct

SEQ ID NO: 130476 - DNA, 25 bp, Artificial
  probe
  misc_feature (1)..(25): SEQ ID NO: 5643; WAN024CRP_at; Start 27; Stop 51
caaaggctttccccatcccgatagg

SEQ ID NO: 130477 - DNA, 25 bp, Artificial
  probe
  misc_feature (1)..(25): SEQ ID NO: 5643; WAN024CRP_at; Start 241; Stop 265
agcatccaccgccatcaaggtacga

SEQ ID NO: 130478 - DNA, 25 bp, Artificial
  probe
  misc_feature (1)..(25): SEQ ID NO: 5643; WAN024CRP_at; Start 14; Stop 38
tcatacaagccctcaaaggctttcc

SEQ ID NO: 130479 - DNA, 25 bp, Artificial
  probe
  misc_feature (1)..(25): SEQ ID NO: 5643; WAN024CRP_at; Start 60; Stop 84
tagggtagctagcaatgcccaagat

SEQ ID NO: 130480 - DNA, 25 bp, Artificial
  probe
  misc_feature (1)..(25): SEQ ID NO: 5643; WAN024CRP_at; Start 1; Stop 25
ttggttatagaggtcatacaagccc

SEQ ID NO: 130481 - DNA, 25 bp, Artificial
  probe
  misc_feature (1)..(25): SEQ ID NO: 5643; WAN024CRP_at; Start 110; Stop 134
aaaggctcacgaccgtcacggtcca

SEQ ID NO: 130482 - DNA, 25 bp, Artificial
  probe
  misc_feature (1)..(25): SEQ ID NO: 5643; WAN024CRP_at; Start 4; Stop 28
gttatagaggtcatacaagccctca

SEQ ID NO: 130483 - DNA, 25 bp, Artificial
  probe
  misc_feature (1)..(25): SEQ ID NO: 5643; WAN024CRP_at; Start 126; Stop 150
cacggtccagcttgttcataaaggt

SEQ ID NO: 130484 - DNA, 25 bp, Artificial
  probe
  misc_feature (1)..(25): SEQ ID NO: 5643; WAN024CRP_at; Start 96; Stop 120
cttgcaagagatccaaaggctcacg

SEQ ID NO: 130485 - DNA, 25 bp, Artificial
  probe
  misc_feature (1)..(25): SEQ ID NO: 5643; WAN024CRP_at; Start 129; Stop 153
ggtccagcttgttcataaaggtaaa

SEQ ID NO: 130486 - DNA, 25 bp, Artificial
  probe
  misc_feature (1)..(25): SEQ ID NO: 5643; WAN024CRP_at; Start 101; Stop 125
aagagatccaaaggctcacgaccgt

SEQ ID NO: 130487 - DNA, 25 bp, Artificial
  probe
  misc_feature (1)..(25): SEQ ID NO: 5643; WAN024CRP_at; Start 50; Stop 74
ggccagttcatagggtagctagcaa

SEQ ID NO: 130488 - DNA, 25 bp, Artificial
  probe
  misc_feature (1)..(25): SEQ ID NO: 5643; WAN024CRP_at; Start 69; Stop 93
tagcaatgcccaagatttcttccaa

SEQ ID NO: 130489 - DNA, 25 bp, Artificial
  probe
  misc_feature (1)..(25): SEQ ID NO: 5643; WAN024CRP_at; Start 185; Stop 209
aacaatttcttggtttgagcctcga

SEQ ID NO: 130490 - DNA, 25 bp, Artificial
  probe
  misc_feature (1)..(25): SEQ ID NO: 5643; WAN024CRP_at; Start 56; Stop 80
ttcatagggtagctagcaatgccca

SEQ ID NO: 130491 - DNA, 25 bp, Artificial
  probe
  misc_feature (1)..(25): SEQ ID NO: 5643; WAN024CRP_at; Start 188; Stop 212
aatttcttggtttgagcctcgatcc

SEQ ID NO: 130492 - DNA, 25 bp, Artificial
  probe
  misc_feature (1)..(25): SEQ ID NO: 5643; WAN024CRP_at; Start 91; Stop 115
caattcttgcaagagatccaaaggc

SEQ ID NO: 130493 - DNA, 25 bp, Artificial
  probe
  misc_feature (1)..(25): SEQ ID NO: 5643; WAN024CRP_at; Start 173; Stop 197
ttcacaacctcaaacaatttcttgg

SEQ ID NO: 130494 - DNA, 25 bp, Artificial
  probe
  misc_feature (1)..(25): SEQ ID NO: 5643; WAN024CRP_at; Start 63; Stop 87
ggtagctagcaatgcccaagatttc

SEQ ID NO: 130495 - DNA, 25 bp, Artificial
  probe
  misc_feature (1)..(25): SEQ ID NO: 5643; WAN024CRP_at; Start 10; Stop 34
gaggtcatacaagccctcaaaggct

SEQ ID NO: 130496 - DNA, 25 bp, Artificial
  probe
  misc_feature (1)..(25): SEQ ID NO: 5643; WAN024CRP_at; Start 42; Stop 66
tcccgataggccagttcatagggta

SEQ ID NO: 130497 - DNA, 25 bp, Artificial
  probe
  misc_feature (1)..(25): SEQ ID NO: 1219; WAN024CRQ_at; Start 1254; Stop 1278
taagaattaccaaacaggtgagtac

SEQ ID NO: 130498 - DNA, 25 bp, Artificial
  probe
  misc_feature (1)..(25): SEQ ID NO: 1219; WAN024CRQ_at; Start 283; Stop 307
gatacctatcgtaccttgatggcgg

SEQ ID NO: 130499 - DNA, 25 bp, Artificial
  probe
  misc_feature (1)..(25): SEQ ID NO: 1219; WAN024CRQ_at; Start 1498; Stop 1522
tggtttgcggacaagtatccagacg

SEQ ID NO: 130500 - DNA, 25 bp, Artificial
  probe
  misc_feature (1)..(25): SEQ ID NO: 1219; WAN024CRQ_at; Start 217; Stop 241
caatttgactacgacggcaagcgcg

SEQ ID NO: 130501 - DNA, 25 bp, Artificial
  probe
  misc_feature (1)..(25): SEQ ID NO: 1219; WAN024CRQ_at; Start 1517; Stop 1541
cagacgtagagttagaggagaagat

SEQ ID NO: 130502 - DNA, 25 bp, Artificial
  probe
  misc_feature (1)..(25): SEQ ID NO: 1219; WAN024CRQ_at; Start 64; Stop 88
gggaaaacaaccatcactgagcagt

SEQ ID NO: 130503 - DNA, 25 bp, Artificial
  probe
  misc_feature (1)..(25): SEQ ID NO: 1219; WAN024CRQ_at; Start 163; Stop 187
gactggatggatatcgagaagcaac

SEQ ID NO: 130504 - DNA, 25 bp, Artificial
  probe
  misc_feature (1)..(25): SEQ ID NO: 1219; WAN024CRQ_at; Start 906; Stop 930
ccgtattgcctttgtccgtatcgta

SEQ ID NO: 130505 - DNA, 25 bp, Artificial
  probe
  misc_feature (1)..(25): SEQ ID NO: 1219; WAN024CRQ_at; Start 1408; Stop 1432
gatgaacggatgtcgtcaagtcgca

SEQ ID NO: 130506 - DNA, 25 bp, Artificial
  probe
  misc_feature (1)..(25): SEQ ID NO: 1219; WAN024CRQ_at; Start 865; Stop 889
gtctttaaaatccaagccaacatgg

SEQ ID NO: 130507 - DNA, 25 bp, Artificial
  probe
  misc_feature (1)..(25): SEQ ID NO: 1219; WAN024CRQ_at; Start 180; Stop 204
gaagcaacgtgggatttctgttact

SEQ ID NO: 130508 - DNA, 25 bp, Artificial
  probe
  misc_feature (1)..(25): SEQ ID NO: 1219; WAN024CRQ_at; Start 634; Stop 658
tacgagcaagtcaaggatgacattg

SEQ ID NO: 130509 - DNA, 25 bp, Artificial
  probe
  misc_feature (1)..(25): SEQ ID NO: 1219; WAN024CRQ_at; Start 953; Stop 977
tgagtgtcaatctccctcgtactgg

SEQ ID NO: 130510 - DNA, 25 bp, Artificial
  probe
  misc_feature (1)..(25): SEQ ID NO: 1219; WAN024CRQ_at; Start 749; Stop 773
actttggtgtgcagaccttccttga

SEQ ID NO: 130511 - DNA, 25 bp, Artificial
  probe
  misc_feature (1)..(25): SEQ ID NO: 1219; WAN024CRQ_at; Start 258; Stop 282
gccagggcacgaggacttctcagaa

SEQ ID NO: 130512 - DNA, 25 bp, Artificial
  probe
  misc_feature (1)..(25): SEQ ID NO: 1219; WAN024CRQ_at; Start 78; Stop 102
cactgagcagttactctactttggg

SEQ ID NO: 130513 - DNA, 25 bp, Artificial
  probe
  misc_feature (1)..(25): SEQ ID NO: 1219; WAN024CRQ_at; Start 717; Stop 741
gacgcctgtctttttcggttcagcc

SEQ ID NO: 130514 - DNA, 25 bp, Artificial
  probe
  misc_feature (1)..(25): SEQ ID NO: 1219; WAN024CRQ_at; Start 1476; Stop 1500
tgaaaatgactttgccctccgctgg

SEQ ID NO: 130515 - DNA, 25 bp, Artificial
  probe
  misc_feature (1)..(25): SEQ ID NO: 1219; WAN024CRQ_at; Start 536; Stop 560
tgtatgacctctataaccaacgttt

SEQ ID NO: 130516 - DNA, 25 bp, Artificial
  probe
  misc_feature (1)..(25): SEQ ID NO: 1219; WAN024CRQ_at; Start 145; Stop 169
gggacttttgctaaatctgactgga

SEQ ID NO: 130517 - DNA, 25 bp, Artificial
  probe
  misc_feature (1)..(25): SEQ ID NO: 1219; WAN024CRQ_at; Start 320; Stop 344
tcatggtcgtggactctgccaaggg

SEQ ID NO: 130518 - DNA, 25 bp, Artificial
  probe
  misc_feature (1)..(25): SEQ ID NO: 1219; WAN024CRQ_at; Start 24; Stop 48
gaaacgtcgtacctttgccattatc

SEQ ID NO: 130519 - DNA, 25 bp, Artificial
  probe
  misc_feature (1)..(25): SEQ ID NO: 1219; WAN024CRQ_at; Start 108; Stop 132
gattcgtgaggctggtacggtaaaa

SEQ ID NO: 130520 - DNA, 25 bp, Artificial
  probe
  misc_feature (1)..(25): SEQ ID NO: 1219; WAN024CRQ_at; Start 409; Stop 433
tttatgaacaagctggaccgtgacg

SEQ ID NO: 130521 - DNA, 25 bp, Artificial
  probe
  misc_feature (1)..(25): SEQ ID NO: 1219; WAN024CRQ_at; Start 796; Stop 820
gaaccacatggtcacaagaaaacag

SEQ ID NO: 130522 - DNA, 25 bp, Artificial
  probe
  misc_feature (1)..(25): SEQ ID NO: 1219; WAN024CRQ_at; Start 733; Stop 757
ggttcagccctgacaaactttggtg

SEQ ID NO: 130523 - DNA, 25 bp, Artificial
  probe
  misc_feature (1)..(25): SEQ ID NO: 1219; WAN024CRQ_at; Start 702; Stop 726
tctggctggagaattgacgcctgtc

SEQ ID NO: 130524 - DNA, 25 bp, Artificial
  probe
  misc_feature (1)..(25): SEQ ID NO: 1219; WAN024CRQ_at; Start 375; Stop 399
ggttgtgaaacatcgtggcattcca

SEQ ID NO: 130525 - DNA, 25 bp, Artificial
  probe
  misc_feature (1)..(25): SEQ ID NO: 1219; WAN024CRQ_at; Start 782; Stop 806
tcaagtttgctccagaaccacatgg

SEQ ID NO: 130526 - DNA, 25 bp, Artificial
  probe
  misc_feature (1)..(25): SEQ ID NO: 1219; WAN024CRQ_at; Start 488; Stop 512
gctaccctatgaactggcctatcgg

SEQ ID NO: 130527 - DNA, 25 bp, Artificial
  probe
  misc_feature (1)..(25): SEQ ID NO: 1219; WAN024CRQ_at; Start 686; Stop 710
tttcagaggaagctattctggctgg

SEQ ID NO: 130528 - DNA, 25 bp, Artificial
  probe
  misc_feature (1)..(25): SEQ ID NO: 1219; WAN024CRQ_at; Start 1190; Stop 1214
tgaagcaaaaatccttccacaaggg

SEQ ID NO: 130529 - DNA, 25 bp, Artificial
  probe
  misc_feature (1)..(25): SEQ ID NO: 1219; WAN024CRQ_at; Start 425; Stop 449
accgtgacggtcgtgagcctttgga

SEQ ID NO: 130530 - DNA, 25 bp, Artificial
  probe
  misc_feature (1)..(25): SEQ ID NO: 1219; WAN024CRQ_at; Start 469; Stop 493
gaaatcttgggcattgctagctacc

SEQ ID NO: 130531 - DNA, 25 bp, Artificial
  probe
  misc_feature (1)..(25): SEQ ID NO: 3045; WAN024CRR_at; Start 28; Stop 52
cacgtcatcgataactccattttca

SEQ ID NO: 130532 - DNA, 25 bp, Artificial
  probe
  misc_feature (1)..(25): SEQ ID NO: 3045; WAN024CRR_at; Start 275; Stop 299
tgaacacgttttggatggtagtagt

SEQ ID NO: 130533 - DNA, 25 bp, Artificial
  probe
  misc_feature (1)..(25): SEQ ID NO: 3045; WAN024CRR_at; Start 119; Stop 143
tattcttccttcacaatcatagcaa

SEQ ID NO: 130534 - DNA, 25 bp, Artificial
  probe
  misc_feature (1)..(25): SEQ ID NO: 3045; WAN024CRR_at; Start 204; Stop 228
gccattcatactctttgaagtattg

SEQ ID NO: 130535 - DNA, 25 bp, Artificial
  probe
  misc_feature (1)..(25): SEQ ID NO: 3045; WAN024CRR_at; Start 132; Stop 156
caatcatagcaatatcataaatggc

SEQ ID NO: 130536 - DNA, 25 bp, Artificial
  probe
  misc_feature (1)..(25): SEQ ID NO: 3045; WAN024CRR_at; Start 258; Stop 282
caggatttgcttgtgcttgaacacg

SEQ ID NO: 130537 - DNA, 25 bp, Artificial
  probe
  misc_feature (1)..(25): SEQ ID NO: 3045; WAN024CRR_at; Start 224; Stop 248
tattggtctggcatccagggcgtct

SEQ ID NO: 130538 - DNA, 25 bp, Artificial
  probe
  misc_feature (1)..(25): SEQ ID NO: 3045; WAN024CRR_at; Start 302; Stop 326
actccaagaaaatcaaccgtatttg

SEQ ID NO: 130539 - DNA, 25 bp, Artificial
  probe
  misc_feature (1)..(25): SEQ ID NO: 3045; WAN024CRR_at; Start 64; Stop 88
tgcttcgttttcaacacccattccg

SEQ ID NO: 130540 - DNA, 25 bp, Artificial
  probe
  misc_feature (1)..(25): SEQ ID NO: 3045; WAN024CRR_at; Start 24; Stop 48
gatacacgtcatcgataactccatt

SEQ ID NO: 130541 - DNA, 25 bp, Artificial
  probe
  misc_feature (1)..(25): SEQ ID NO: 3045; WAN024CRR_at; Start 255; Stop 279
cctcaggatttgcttgtgcttgaac

SEQ ID NO: 130542 - DNA, 25 bp, Artificial
  probe
  misc_feature (1)..(25): SEQ ID NO: 3045; WAN024CRR_at; Start 39; Stop 63
taactccattttcatcgataaaccg

SEQ ID NO: 130543 - DNA, 25 bp, Artificial
  probe
  misc_feature (1)..(25): SEQ ID NO: 3045; WAN024CRR_at; Start 144; Stop 168
tatcataaatggctttcggaaaaat

SEQ ID NO: 130544 - DNA, 25 bp, Artificial
  probe
  misc_feature (1)..(25): SEQ ID NO: 3045; WAN024CRR_at; Start 220; Stop 244
gaagtattggtctggcatccagggc

SEQ ID NO: 130545 - DNA, 25 bp, Artificial
  probe
  misc_feature (1)..(25): SEQ ID NO: 3045; WAN024CRR_at; Start 215; Stop 239
tctttgaagtattggtctggcatcc

SEQ ID NO: 130546 - DNA, 25 bp, Artificial
  probe
  misc_feature (1)..(25): SEQ ID NO: 3045; WAN024CRR_at; Start 271; Stop 295
tgcttgaacacgttttggatggtag

SEQ ID NO: 130547 - DNA, 25 bp, Artificial
  probe
  misc_feature (1)..(25): SEQ ID NO: 3045; WAN024CRR_at; Start 55; Stop 79
gataaaccgtgcttcgttttcaaca

SEQ ID NO: 130548 - DNA, 25 bp, Artificial
  probe
  misc_feature (1)..(25): SEQ ID NO: 3045; WAN024CRR_at; Start 164; Stop 188
aaaatttcccaaccacgatatggat

SEQ ID NO: 130549 - DNA, 25 bp, Artificial
  probe
  misc_feature (1)..(25): SEQ ID NO: 3045; WAN024CRR_at; Start 93; Stop 117
cactgataaaccatgggatattacc

SEQ ID NO: 130550 - DNA, 25 bp, Artificial
  probe
  misc_feature (1)..(25): SEQ ID NO: 3045; WAN024CRR_at; Start 87; Stop 111
cgttttcactgataaaccatgggat

SEQ ID NO: 130551 - DNA, 25 bp, Artificial
  probe
  misc_feature (1)..(25): SEQ ID NO: 3045; WAN024CRR_at; Start 265; Stop 289
tgcttgtgcttgaacacgttttgga

SEQ ID NO: 130552 - DNA, 25 bp, Artificial
  probe
  misc_feature (1)..(25): SEQ ID NO: 3045; WAN024CRR_at; Start 249; Stop 273
gatattcctcaggatttgcttgtgc

SEQ ID NO: 130553 - DNA, 25 bp, Artificial
  probe
  misc_feature (1)..(25): SEQ ID NO: 3045; WAN024CRR_at; Start 175; Stop 199
accacgatatggattcatgcgacgc

SEQ ID NO: 130554 - DNA, 25 bp, Artificial
  probe
  misc_feature (1)..(25): SEQ ID NO: 3045; WAN024CRR_at; Start 235; Stop 259
catccagggcgtctgatattcctca

SEQ ID NO: 130555 - DNA, 25 bp, Artificial
  probe
  misc_feature (1)..(25): SEQ ID NO: 3045; WAN024CRR_at; Start 239; Stop 263
cagggcgtctgatattcctcaggat

SEQ ID NO: 130556 - DNA, 25 bp, Artificial
  probe
  misc_feature (1)..(25): SEQ ID NO: 3045; WAN024CRR_at; Start 229; Stop 253
gtctggcatccagggcgtctgatat

SEQ ID NO: 130557 - DNA, 25 bp, Artificial
  probe
  misc_feature (1)..(25): SEQ ID NO: 3045; WAN024CRR_at; Start 287; Stop 311
ggatggtagtagtttactccaagaa

SEQ ID NO: 130558 - DNA, 25 bp, Artificial
  probe
  misc_feature (1)..(25): SEQ ID NO: 3045; WAN024CRR_at; Start 170; Stop 194
tcccaaccacgatatggattcatgc

SEQ ID NO: 130559 - DNA, 25 bp, Artificial
  probe
  misc_feature (1)..(25): SEQ ID NO: 3045; WAN024CRR_at; Start 178; Stop 202
acgatatggattcatgcgacgctcc

SEQ ID NO: 130560 - DNA, 25 bp, Artificial
  probe
  misc_feature (1)..(25): SEQ ID NO: 3045; WAN024CRR_at; Start 107; Stop 131
gggatattaccatattcttccttca

SEQ ID NO: 130561 - DNA, 25 bp, Artificial
  probe
  misc_feature (1)..(25): SEQ ID NO: 3045; WAN024CRR_at; Start 140; Stop 164
gcaatatcataaatggctttcggaa

SEQ ID NO: 130562 - DNA, 25 bp, Artificial
  probe
  misc_feature (1)..(25): SEQ ID NO: 3045; WAN024CRR_at; Start 293; Stop 317
tagtagtttactccaagaaaatcaa

SEQ ID NO: 130563 - DNA, 25 bp, Artificial
  probe
  misc_feature (1)..(25): SEQ ID NO: 3045; WAN024CRR_at; Start 78; Stop 102
cacccattccgttttcactgataaa

SEQ ID NO: 130564 - DNA, 25 bp, Artificial
  probe
  misc_feature (1)..(25): SEQ ID NO: 3045; WAN024CRR_at; Start 45; Stop 69
cattttcatcgataaaccgtgcttc

SEQ ID NO: 130565 - DNA, 25 bp, Artificial
  probe
  misc_feature (1)..(25): SEQ ID NO: 1971; WAN024CRS_at; Start 36; Stop 60
caagcgtggtatccaaaacagtgac

SEQ ID NO: 130566 - DNA, 25 bp, Artificial
  probe
  misc_feature (1)..(25): SEQ ID NO: 1971; WAN024CRS_at; Start 51; Stop 75
aaacagtgacttccctcttcaatgg

SEQ ID NO: 130567 - DNA, 25 bp, Artificial
  probe
  misc_feature (1)..(25): SEQ ID NO: 1971; WAN024CRS_at; Start 82; Stop 106
gtagccatcttaaatgttcttcata

SEQ ID NO: 130568 - DNA, 25 bp, Artificial
  probe
  misc_feature (1)..(25): SEQ ID NO: 1971; WAN024CRS_at; Start 3; Stop 27
gcattattccaagaccagcaatcaa

SEQ ID NO: 130569 - DNA, 25 bp, Artificial
  probe
  misc_feature (1)..(25): SEQ ID NO: 1971; WAN024CRS_at; Start 25; Stop 49
caaatgcggtccaagcgtggtatcc

SEQ ID NO: 130570 - DNA, 25 bp, Artificial
  probe
  misc_feature (1)..(25): SEQ ID NO: 1971; WAN024CRS_at; Start 10; Stop 34
tccaagaccagcaatcaaatgcggt

SEQ ID NO: 130571 - DNA, 25 bp, Artificial
  probe
  misc_feature (1)..(25): SEQ ID NO: 1971; WAN024CRS_at; Start 44; Stop 68
gtatccaaaacagtgacttccctct

SEQ ID NO: 130572 - DNA, 25 bp, Artificial
  probe
  misc_feature (1)..(25): SEQ ID NO: 1971; WAN024CRS_at; Start 54; Stop 78
cagtgacttccctcttcaatggctt

SEQ ID NO: 130573 - DNA, 25 bp, Artificial
  probe
  misc_feature (1)..(25): SEQ ID NO: 1971; WAN024CRS_at; Start 24; Stop 48
tcaaatgcggtccaagcgtggtatc

SEQ ID NO: 130574 - DNA, 25 bp, Artificial
  probe
  misc_feature (1)..(25): SEQ ID NO: 1971; WAN024CRS_at; Start 31; Stop 55
cggtccaagcgtggtatccaaaaca

SEQ ID NO: 130575 - DNA, 25 bp, Artificial
  probe
  misc_feature (1)..(25): SEQ ID NO: 1971; WAN024CRS_at; Start 9; Stop 33
ttccaagaccagcaatcaaatgcgg

SEQ ID NO: 130576 - DNA, 25 bp, Artificial
  probe
  misc_feature (1)..(25): SEQ ID NO: 1971; WAN024CRS_at; Start 2; Stop 26
tgcattattccaagaccagcaatca

SEQ ID NO: 130577 - DNA, 25 bp, Artificial
  probe
  misc_feature (1)..(25): SEQ ID NO: 1971; WAN024CRS_at; Start 26; Stop 50
aaatgcggtccaagcgtggtatcca

SEQ ID NO: 130578 - DNA, 25 bp, Artificial
  probe
  misc_feature (1)..(25): SEQ ID NO: 1971; WAN024CRS_at; Start 85; Stop 109
gccatcttaaatgttcttcataaaa

SEQ ID NO: 130579 - DNA, 25 bp, Artificial
  probe
  misc_feature (1)..(25): SEQ ID NO: 1971; WAN024CRS_at; Start 12; Stop 36
caagaccagcaatcaaatgcggtcc

SEQ ID NO: 130580 - DNA, 25 bp, Artificial
  probe
  misc_feature (1)..(25): SEQ ID NO: 1971; WAN024CRS_at; Start 7; Stop 31
tattccaagaccagcaatcaaatgc

SEQ ID NO: 130581 - DNA, 25 bp, Artificial
  probe
  misc_feature (1)..(25): SEQ ID NO: 1971; WAN024CRS_at; Start 66; Stop 90
tcttcaatggctttatgtagccatc

SEQ ID NO: 130582 - DNA, 25 bp, Artificial
  probe
  misc_feature (1)..(25): SEQ ID NO: 1971; WAN024CRS_at; Start 58; Stop 82
gacttccctcttcaatggctttatg

SEQ ID NO: 130583 - DNA, 25 bp, Artificial
  probe
  misc_feature (1)..(25): SEQ ID NO: 1971; WAN024CRS_at; Start 42; Stop 66
tggtatccaaaacagtgacttccct

SEQ ID NO: 130584 - DNA, 25 bp, Artificial
  probe
  misc_feature (1)..(25): SEQ ID NO: 1971; WAN024CRS_at; Start 70; Stop 94
caatggctttatgtagccatcttaa

SEQ ID NO: 130585 - DNA, 25 bp, Artificial
  probe
  misc_feature (1)..(25): SEQ ID NO: 1971; WAN024CRS_at; Start 32; Stop 56
ggtccaagcgtggtatccaaaacag

SEQ ID NO: 130586 - DNA, 25 bp, Artificial
  probe
  misc_feature (1)..(25): SEQ ID NO: 1971; WAN024CRS_at; Start 56; Stop 80
gtgacttccctcttcaatggcttta

SEQ ID NO: 130587 - DNA, 25 bp, Artificial
  probe
  misc_feature (1)..(25): SEQ ID NO: 1971; WAN024CRS_at; Start 27; Stop 51
aatgcggtccaagcgtggtatccaa

SEQ ID NO: 130588 - DNA, 25 bp, Artificial
  probe
  misc_feature (1)..(25): SEQ ID NO: 1971; WAN024CRS_at; Start 34; Stop 58
tccaagcgtggtatccaaaacagtg

SEQ ID NO: 130589 - DNA, 25 bp, Artificial
  probe
  misc_feature (1)..(25): SEQ ID NO: 1971; WAN024CRS_at; Start 40; Stop 64
cgtggtatccaaaacagtgacttcc

SEQ ID NO: 130590 - DNA, 25 bp, Artificial
  probe
  misc_feature (1)..(25): SEQ ID NO: 1971; WAN024CRS_at; Start 39; Stop 63
gcgtggtatccaaaacagtgacttc

SEQ ID NO: 130591 - DNA, 25 bp, Artificial
  probe
  misc_feature (1)..(25): SEQ ID NO: 1971; WAN024CRS_at; Start 62; Stop 86
tccctcttcaatggctttatgtagc

SEQ ID NO: 130592 - DNA, 25 bp, Artificial
  probe
  misc_feature (1)..(25): SEQ ID NO: 1971; WAN024CRS_at; Start 15; Stop 39
gaccagcaatcaaatgcggtccaag

SEQ ID NO: 130593 - DNA, 25 bp, Artificial
  probe
  misc_feature (1)..(25): SEQ ID NO: 1971; WAN024CRS_at; Start 21; Stop 45
caatcaaatgcggtccaagcgtggt

SEQ ID NO: 130594 - DNA, 25 bp, Artificial
  probe
  misc_feature (1)..(25): SEQ ID NO: 1971; WAN024CRS_at; Start 17; Stop 41
ccagcaatcaaatgcggtccaagcg

SEQ ID NO: 130595 - DNA, 25 bp, Artificial
  probe
  misc_feature (1)..(25): SEQ ID NO: 1971; WAN024CRS_at; Start 18; Stop 42
cagcaatcaaatgcggtccaagcgt

SEQ ID NO: 130596 - DNA, 25 bp, Artificial
  probe
  misc_feature (1)..(25): SEQ ID NO: 1971; WAN024CRS_at; Start 29; Stop 53
tgcggtccaagcgtggtatccaaaa

SEQ ID NO: 130597 - DNA, 25 bp, Artificial
  probe
  misc_feature (1)..(25): SEQ ID NO: 1971; WAN024CRS_at; Start 22; Stop 46
aatcaaatgcggtccaagcgtggta

SEQ ID NO: 130598 - DNA, 25 bp, Artificial
  probe
  misc_feature (1)..(25): SEQ ID NO: 1971; WAN024CRS_at; Start 79; Stop 103
tatgtagccatcttaaatgttcttc

SEQ ID NO: 130599 - DNA, 25 bp, Artificial
  probe
  misc_feature (1)..(25): SEQ ID NO: 5498; WAN024CRT_at; Start 85; Stop 109
tacaagaggtccgacattatcgaaa

SEQ ID NO: 130600 - DNA, 25 bp, Artificial
  probe
  misc_feature (1)..(25): SEQ ID NO: 5498; WAN024CRT_at; Start 40; Stop 64
catcaagtggaaatcttcggtgtaa

SEQ ID NO: 130601 - DNA, 25 bp, Artificial
  probe
  misc_feature (1)..(25): SEQ ID NO: 5498; WAN024CRT_at; Start 43; Stop 67
caagtggaaatcttcggtgtaagta

SEQ ID NO: 130602 - DNA, 25 bp, Artificial
  probe
  misc_feature (1)..(25): SEQ ID NO: 5498; WAN024CRT_at; Start 134; Stop 158
cagtagtccatcacattttcatgta

SEQ ID NO: 130603 - DNA, 25 bp, Artificial
  probe
  misc_feature (1)..(25): SEQ ID NO: 5498; WAN024CRT_at; Start 76; Stop 100
gttactggctacaagaggtccgaca

SEQ ID NO: 130604 - DNA, 25 bp, Artificial
  probe
  misc_feature (1)..(25): SEQ ID NO: 5498; WAN024CRT_at; Start 1; Stop 25
ttggatggaagtgcggaaagaatta

SEQ ID NO: 130605 - DNA, 25 bp, Artificial
  probe
  misc_feature (1)..(25): SEQ ID NO: 5498; WAN024CRT_at; Start 174; Stop 198
cttctgtctgaggtccgctagaagc

SEQ ID NO: 130606 - DNA, 25 bp, Artificial
  probe
  misc_feature (1)..(25): SEQ ID NO: 5498; WAN024CRT_at; Start 206; Stop 230
caccaaaacagattaggaaatacta

SEQ ID NO: 130607 - DNA, 25 bp, Artificial
  probe
  misc_feature (1)..(25): SEQ ID NO: 5498; WAN024CRT_at; Start 35; Stop 59
tccttcatcaagtggaaatcttcgg

SEQ ID NO: 130608 - DNA, 25 bp, Artificial
  probe
  misc_feature (1)..(25): SEQ ID NO: 5498; WAN024CRT_at; Start 155; Stop 179
tgtacttttccatattgaccttctg

SEQ ID NO: 130609 - DNA, 25 bp, Artificial
  probe
  misc_feature (1)..(25): SEQ ID NO: 5498; WAN024CRT_at; Start 122; Stop 146
tgcgttttgaaccagtagtccatca

SEQ ID NO: 130610 - DNA, 25 bp, Artificial
  probe
  misc_feature (1)..(25): SEQ ID NO: 5498; WAN024CRT_at; Start 130; Stop 154
gaaccagtagtccatcacattttca

SEQ ID NO: 130611 - DNA, 25 bp, Artificial
  probe
  misc_feature (1)..(25): SEQ ID NO: 5498; WAN024CRT_at; Start 73; Stop 97
aaagttactggctacaagaggtccg

SEQ ID NO: 130612 - DNA, 25 bp, Artificial
  probe
  misc_feature (1)..(25): SEQ ID NO: 5498; WAN024CRT_at; Start 60; Stop 84
tgtaagtatgaaaaaagttactggc

SEQ ID NO: 130613 - DNA, 25 bp, Artificial
  probe
  misc_feature (1)..(25): SEQ ID NO: 5498; WAN024CRT_at; Start 118; Stop 142
tggatgcgttttgaaccagtagtcc

SEQ ID NO: 130614 - DNA, 25 bp, Artificial
  probe
  misc_feature (1)..(25): SEQ ID NO: 5498; WAN024CRT_at; Start 125; Stop 149
gttttgaaccagtagtccatcacat

SEQ ID NO: 130615 - DNA, 25 bp, Artificial
  probe
  misc_feature (1)..(25): SEQ ID NO: 5498; WAN024CRT_at; Start 12; Stop 36
tgcggaaagaattaactccaatttc

SEQ ID NO: 130616 - DNA, 25 bp, Artificial
  probe
  misc_feature (1)..(25): SEQ ID NO: 5498; WAN024CRT_at; Start 200; Stop 224
gctccccaccaaaacagattaggaa

SEQ ID NO: 130617 - DNA, 25 bp, Artificial
  probe
  misc_feature (1)..(25): SEQ ID NO: 5498; WAN024CRT_at; Start 171; Stop 195
gaccttctgtctgaggtccgctaga

SEQ ID NO: 130618 - DNA, 25 bp, Artificial
  probe
  misc_feature (1)..(25): SEQ ID NO: 5498; WAN024CRT_at; Start 167; Stop 191
tattgaccttctgtctgaggtccgc

SEQ ID NO: 130619 - DNA, 25 bp, Artificial
  probe
  misc_feature (1)..(25): SEQ ID NO: 5498; WAN024CRT_at; Start 142; Stop 166
catcacattttcatgtacttttcca

SEQ ID NO: 130620 - DNA, 25 bp, Artificial
  probe
  misc_feature (1)..(25): SEQ ID NO: 5498; WAN024CRT_at; Start 24; Stop 48
taactccaatttccttcatcaagtg

SEQ ID NO: 130621 - DNA, 25 bp, Artificial
  probe
  misc_feature (1)..(25): SEQ ID NO: 5498; WAN024CRT_at; Start 97; Stop 121
gacattatcgaaaaaatcttctgga

SEQ ID NO: 130622 - DNA, 25 bp, Artificial
  probe
  misc_feature (1)..(25): SEQ ID NO: 5498; WAN024CRT_at; Start 8; Stop 32
gaagtgcggaaagaattaactccaa

SEQ ID NO: 130623 - DNA, 25 bp, Artificial
  probe
  misc_feature (1)..(25): SEQ ID NO: 5498; WAN024CRT_at; Start 6; Stop 30
tggaagtgcggaaagaattaactcc

SEQ ID NO: 130624 - DNA, 25 bp, Artificial
  probe
  misc_feature (1)..(25): SEQ ID NO: 5498; WAN024CRT_at; Start 78; Stop 102
tactggctacaagaggtccgacatt

SEQ ID NO: 130625 - DNA, 25 bp, Artificial
  probe
  misc_feature (1)..(25): SEQ ID NO: 5498; WAN024CRT_at; Start 102; Stop 126
tatcgaaaaaatcttctggatgcgt

SEQ ID NO: 130626 - DNA, 25 bp, Artificial
  probe
  misc_feature (1)..(25): SEQ ID NO: 5498; WAN024CRT_at; Start 162; Stop 186
ttccatattgaccttctgtctgagg

SEQ ID NO: 130627 - DNA, 25 bp, Artificial
  probe
  misc_feature (1)..(25): SEQ ID NO: 5498; WAN024CRT_at; Start 80; Stop 104
ctggctacaagaggtccgacattat

SEQ ID NO: 130628 - DNA, 25 bp, Artificial
  probe
  misc_feature (1)..(25): SEQ ID NO: 5498; WAN024CRT_at; Start 111; Stop 135
aatcttctggatgcgttttgaacca

SEQ ID NO: 130629 - DNA, 25 bp, Artificial
  probe
  misc_feature (1)..(25): SEQ ID NO: 5498; WAN024CRT_at; Start 68; Stop 92
tgaaaaaagttactggctacaagag

SEQ ID NO: 130630 - DNA, 25 bp, Artificial
  probe
  misc_feature (1)..(25): SEQ ID NO: 5498; WAN024CRT_at; Start 82; Stop 106
ggctacaagaggtccgacattatcg

SEQ ID NO: 130631 - DNA, 25 bp, Artificial
  probe
  misc_feature (1)..(25): SEQ ID NO: 5498; WAN024CRT_at; Start 90; Stop 114
gaggtccgacattatcgaaaaaatc

SEQ ID NO: 130632 - DNA, 25 bp, Artificial
  probe
  misc_feature (1)..(25): SEQ ID NO: 5498; WAN024CRT_at; Start 49; Stop 73
gaaatcttcggtgtaagtatgaaaa

SEQ ID NO: 130633 - DNA, 25 bp, Artificial
  probe
  misc_feature (1)..(25): SEQ ID NO: 2070; WAN024CRU_at; Start 439; Stop 463
tacggtggttgggaaagcaaacatg

SEQ ID NO: 130634 - DNA, 25 bp, Artificial
  probe
  misc_feature (1)..(25): SEQ ID NO: 2070; WAN024CRU_at; Start 719; Stop 743
tgacacctgcttatccaagaagtaa

SEQ ID NO: 130635 - DNA, 25 bp, Artificial
  probe
  misc_feature (1)..(25): SEQ ID NO: 2070; WAN024CRU_at; Start 869; Stop 893
tatggagtcataccgaaaaagagct

SEQ ID NO: 130636 - DNA, 25 bp, Artificial
  probe
  misc_feature (1)..(25): SEQ ID NO: 2070; WAN024CRU_at; Start 1149; Stop 1173
aatgggtgttgaaaacgaagcacgg

SEQ ID NO: 130637 - DNA, 25 bp, Artificial
  probe
  misc_feature (1)..(25): SEQ ID NO: 2070; WAN024CRU_at; Start 1248; Stop 1272
taaagccattgaagagggaagtcac

SEQ ID NO: 130638 - DNA, 25 bp, Artificial
  probe
  misc_feature (1)..(25): SEQ ID NO: 2070; WAN024CRU_at; Start 140; Stop 164
tgatggactactggttcaaaacgca

SEQ ID NO: 130639 - DNA, 25 bp, Artificial
  probe
  misc_feature (1)..(25): SEQ ID NO: 2070; WAN024CRU_at; Start 1280; Stop 1304
gataccacgcttggaccgcatttga

SEQ ID NO: 130640 - DNA, 25 bp, Artificial
  probe
  misc_feature (1)..(25): SEQ ID NO: 2070; WAN024CRU_at; Start 90; Stop 114
ttctagcggacctcagacagaaggt

SEQ ID NO: 130641 - DNA, 25 bp, Artificial
  probe
  misc_feature (1)..(25): SEQ ID NO: 2070; WAN024CRU_at; Start 529; Stop 553
tggacaactttcaatgagccaatgg

SEQ ID NO: 130642 - DNA, 25 bp, Artificial
  probe
  misc_feature (1)..(25): SEQ ID NO: 2070; WAN024CRU_at; Start 842; Stop 866
taaaacagctagagagagatggcgt

SEQ ID NO: 130643 - DNA, 25 bp, Artificial
  probe
  misc_feature (1)..(25): SEQ ID NO: 2070; WAN024CRU_at; Start 646; Stop 670
cttgctagtgcaaaagtgattcaac

SEQ ID NO: 130644 - DNA, 25 bp, Artificial
  probe
  misc_feature (1)..(25): SEQ ID NO: 2070; WAN024CRU_at; Start 491; Stop 515
agactgctttcacatgctttggaga

SEQ ID NO: 130645 - DNA, 25 bp, Artificial
  probe
  misc_feature (1)..(25): SEQ ID NO: 2070; WAN024CRU_at; Start 996; Stop 1020
gatgccagaccaatacttcaaagag

SEQ ID NO: 130646 - DNA, 25 bp, Artificial
  probe
  misc_feature (1)..(25): SEQ ID NO: 2070; WAN024CRU_at; Start 299; Stop 323
tcaagaatttagagacaggtgagcc

SEQ ID NO: 130647 - DNA, 25 bp, Artificial
  probe
  misc_feature (1)..(25): SEQ ID NO: 2070; WAN024CRU_at; Start 827; Stop 851
tcccagaaagattggtaaaacagct

SEQ ID NO: 130648 - DNA, 25 bp, Artificial
  probe
  misc_feature (1)..(25): SEQ ID NO: 2070; WAN024CRU_at; Start 1182; Stop 1206
tgaaaatggagttatcgatgacgtg

SEQ ID NO: 130649 - DNA, 25 bp, Artificial
  probe
  misc_feature (1)..(25): SEQ ID NO: 2070; WAN024CRU_at; Start 954; Stop 978
tgttcaagcacaagcaaatcctgag

SEQ ID NO: 130650 - DNA, 25 bp, Artificial
  probe
  misc_feature (1)..(25): SEQ ID NO: 2070; WAN024CRU_at; Start 256; Stop 280
ggagttaattctttccgcacttcca

SEQ ID NO: 130651 - DNA, 25 bp, Artificial
  probe
  misc_feature (1)..(25): SEQ ID NO: 2070; WAN024CRU_at; Start 758; Stop 782
tagaagcaagtcgatttacagatga

SEQ ID NO: 130652 - DNA, 25 bp, Artificial
  probe
  misc_feature (1)..(25): SEQ ID NO: 2070; WAN024CRU_at; Start 937; Stop 961
tactaccatccaaaacgtgttcaag

SEQ ID NO: 130653 - DNA, 25 bp, Artificial
  probe
  misc_feature (1)..(25): SEQ ID NO: 2070; WAN024CRU_at; Start 1397; Stop 1421
gatggtatcgcaaagtaagtgacaa

SEQ ID NO: 130654 - DNA, 25 bp, Artificial
  probe
  misc_feature (1)..(25): SEQ ID NO: 2070; WAN024CRU_at; Start 512; Stop 536
gagataaggttcattactggacaac

SEQ ID NO: 130655 - DNA, 25 bp, Artificial
  probe
  misc_feature (1)..(25): SEQ ID NO: 2070; WAN024CRU_at; Start 544; Stop 568
gagccaatggtcattccagaagcag

SEQ ID NO: 130656 - DNA, 25 bp, Artificial
  probe
  misc_feature (1)..(25): SEQ ID NO: 2070; WAN024CRU_at; Start 364; Stop 388
gaagctaaaaagaaccagatggatc

SEQ ID NO: 130657 - DNA, 25 bp, Artificial
  probe
  misc_feature (1)..(25): SEQ ID NO: 2070; WAN024CRU_at; Start 1359; Stop 1383
tttagaaacgcaaaagagaaccatc

SEQ ID NO: 130658 - DNA, 25 bp, Artificial
  probe
  misc_feature (1)..(25): SEQ ID NO: 2070; WAN024CRU_at; Start 975; Stop 999
tgaggaatatcagacgccctggatg

SEQ ID NO: 130659 - DNA, 25 bp, Artificial
  probe
  misc_feature (1)..(25): SEQ ID NO: 2070; WAN024CRU_at; Start 1265; Stop 1289
gaagtcactgttttggataccacgc

SEQ ID NO: 130660 - DNA, 25 bp, Artificial
  probe
  misc_feature (1)..(25): SEQ ID NO: 2070; WAN024CRU_at; Start 1033; Stop 1057
gagcgtcgcatgaatccatatcgtg

SEQ ID NO: 130661 - DNA, 25 bp, Artificial
  probe
  misc_feature (1)..(25): SEQ ID NO: 2070; WAN024CRU_at; Start 183; Stop 207
taatgtcggacctcttgtagccagt

SEQ ID NO: 130662 - DNA, 25 bp, Artificial
  probe
  misc_feature (1)..(25): SEQ ID NO: 2070; WAN024CRU_at; Start 314; Stop 338
caggtgagcctgatccaaaaggtat

SEQ ID NO: 130663 - DNA, 25 bp, Artificial
  probe
  misc_feature (1)..(25): SEQ ID NO: 2070; WAN024CRU_at; Start 279; Stop 303
catccaatggagtcgactcatcaag

SEQ ID NO: 130664 - DNA, 25 bp, Artificial
  probe
  misc_feature (1)..(25): SEQ ID NO: 2070; WAN024CRU_at; Start 789; Stop 813
taacaaagtcttcttgaatccagct

SEQ ID NO: 130665 - DNA, 25 bp, Artificial
  probe
  misc_feature (1)..(25): SEQ ID NO: 2070; WAN024CRU_at; Start 225; Stop 249
caccgaagatttccacttgatgaag

SEQ ID NO: 130666 - DNA, 25 bp, Artificial
  probe
  misc_feature (1)..(25): SEQ ID NO: 2070; WAN024CRU_at; Start 473; Stop 497
tattcgtgaagtttgccaagactgc

SEQ ID NO: 130667 - DNA, 25 bp, Artificial
  probe
  misc_feature (1)..(25): SEQ ID NO: 2918; WAN024CRV_at; Start 625; Stop 649
gactaccatatccactactttgaga

SEQ ID NO: 130668 - DNA, 25 bp, Artificial
  probe
  misc_feature (1)..(25): SEQ ID NO: 2918; WAN024CRV_at; Start 885; Stop 909
tcaactcctacgtgaagccaaaacc

SEQ ID NO: 130669 - DNA, 25 bp, Artificial
  probe
  misc_feature (1)..(25): SEQ ID NO: 2918; WAN024CRV_at; Start 581; Stop 605
gactggtctatttggatcactctga

SEQ ID NO: 130670 - DNA, 25 bp, Artificial
  probe
  misc_feature (1)..(25): SEQ ID NO: 2918; WAN024CRV_at; Start 208; Stop 232
cacttgagcggatttcatatctgga

SEQ ID NO: 130671 - DNA, 25 bp, Artificial
  probe
  misc_feature (1)..(25): SEQ ID NO: 2918; WAN024CRV_at; Start 170; Stop 194
ctatgcttctagctctggctatcgg

SEQ ID NO: 130672 - DNA, 25 bp, Artificial
  probe
  misc_feature (1)..(25): SEQ ID NO: 2918; WAN024CRV_at; Start 536; Stop 560
cacagctggtagcagaattagacac

SEQ ID NO: 130673 - DNA, 25 bp, Artificial
  probe
  misc_feature (1)..(25): SEQ ID NO: 2918; WAN024CRV_at; Start 763; Stop 787
caactgagccagaccaatcctgctt

SEQ ID NO: 130674 - DNA, 25 bp, Artificial
  probe
  misc_feature (1)..(25): SEQ ID NO: 2918; WAN024CRV_at; Start 137; Stop 161
gtactttaaaactggctcgcaatcg

SEQ ID NO: 130675 - DNA, 25 bp, Artificial
  probe
  misc_feature (1)..(25): SEQ ID NO: 2918; WAN024CRV_at; Start 807; Stop 831
tgaacgttatctggaagtcttccgg

SEQ ID NO: 130676 - DNA, 25 bp, Artificial
  probe
  misc_feature (1)..(25): SEQ ID NO: 2918; WAN024CRV_at; Start 256; Stop 280
tacgttcctttagcctacaagatgg

SEQ ID NO: 130677 - DNA, 25 bp, Artificial
  probe
  misc_feature (1)..(25): SEQ ID NO: 2918; WAN024CRV_at; Start 505; Stop 529
tatttatccagaggagacggacgca

SEQ ID NO: 130678 - DNA, 25 bp, Artificial
  probe
  misc_feature (1)..(25): SEQ ID NO: 2918; WAN024CRV_at; Start 314; Stop 338
tggttagccatctcttggttcaaga

SEQ ID NO: 130679 - DNA, 25 bp, Artificial
  probe
  misc_feature (1)..(25): SEQ ID NO: 2918; WAN024CRV_at; Start 749; Stop 773
caaaaattgcaggtcaactgagcca

SEQ ID NO: 130680 - DNA, 25 bp, Artificial
  probe
  misc_feature (1)..(25): SEQ ID NO: 2918; WAN024CRV_at; Start 781; Stop 805
cctgcttctgatttgctagatgaaa

SEQ ID NO: 130681 - DNA, 25 bp, Artificial
  probe
  misc_feature (1)..(25): SEQ ID NO: 2918; WAN024CRV_at; Start 721; Stop 745
gaaagcctgatcttagcgcaactct

SEQ ID NO: 130682 - DNA, 25 bp, Artificial
  probe
  misc_feature (1)..(25): SEQ ID NO: 2918; WAN024CRV_at; Start 29; Stop 53
tcatcttagctacctgtcttgcctg

SEQ ID NO: 130683 - DNA, 25 bp, Artificial
  probe
  misc_feature (1)..(25): SEQ ID NO: 2918; WAN024CRV_at; Start 521; Stop 545
acggacgcaaccgagcacagctggt

SEQ ID NO: 130684 - DNA, 25 bp, Artificial
  probe
  misc_feature (1)..(25): SEQ ID NO: 2918; WAN024CRV_at; Start 898; Stop 922
gaagccaaaaccttcatccaagtaa

SEQ ID NO: 130685 - DNA, 25 bp, Artificial
  probe
  misc_feature (1)..(25): SEQ ID NO: 2918; WAN024CRV_at; Start 271; Stop 295
tacaagatgggctgggaaattggca

SEQ ID NO: 130686 - DNA, 25 bp, Artificial
  probe
  misc_feature (1)..(25): SEQ ID NO: 2918; WAN024CRV_at; Start 225; Stop 249
tatctggagtctcggcctctatctg

SEQ ID NO: 130687 - DNA, 25 bp, Artificial
  probe
  misc_feature (1)..(25): SEQ ID NO: 2918; WAN024CRV_at; Start 553; Stop 577
ttagacacgcttttgaaagaagccc

SEQ ID NO: 130688 - DNA, 25 bp, Artificial
  probe
  misc_feature (1)..(25): SEQ ID NO: 2918; WAN024CRV_at; Start 454; Stop 478
cacacgctggtggaagaaaagttaa

SEQ ID NO: 130689 - DNA, 25 bp, Artificial
  probe
  misc_feature (1)..(25): SEQ ID NO: 2918; WAN024CRV_at; Start 486; Stop 510
cctccagcgcttcaaatactattta

SEQ ID NO: 130690 - DNA, 25 bp, Artificial
  probe
  misc_feature (1)..(25): SEQ ID NO: 2918; WAN024CRV_at; Start 708; Stop 732
ccttgccgccagtgaaagcctgatc

SEQ ID NO: 130691 - DNA, 25 bp, Artificial
  probe
  misc_feature (1)..(25): SEQ ID NO: 2918; WAN024CRV_at; Start 566; Stop 590
tgaaagaagccctcagactggtcta

SEQ ID NO: 130692 - DNA, 25 bp, Artificial
  probe
  misc_feature (1)..(25): SEQ ID NO: 2918; WAN024CRV_at; Start 820; Stop 844
gaagtcttccggaaccgcagtctgc

SEQ ID NO: 130693 - DNA, 25 bp, Artificial
  probe
  misc_feature (1)..(25): SEQ ID NO: 2918; WAN024CRV_at; Start 107; Stop 131
ctctcttgagcctatctgatacgcg

SEQ ID NO: 130694 - DNA, 25 bp, Artificial
  probe
  misc_feature (1)..(25): SEQ ID NO: 2918; WAN024CRV_at; Start 658; Stop 682
cgacaaagtcgtatcctgagaaaca

SEQ ID NO: 130695 - DNA, 25 bp, Artificial
  probe
  misc_feature (1)..(25): SEQ ID NO: 2918; WAN024CRV_at; Start 672; Stop 696
cctgagaaacatggcccaacagatt

SEQ ID NO: 130696 - DNA, 25 bp, Artificial
  probe
  misc_feature (1)..(25): SEQ ID NO: 2918; WAN024CRV_at; Start 471; Stop 495
aaagttaaaagatatcctccagcgc

SEQ ID NO: 130697 - DNA, 25 bp, Artificial
  probe
  misc_feature (1)..(25): SEQ ID NO: 2918; WAN024CRV_at; Start 284; Stop 308
gggaaattggcatcacaccaagcac

SEQ ID NO: 130698 - DNA, 25 bp, Artificial
  probe
  misc_feature (1)..(25): SEQ ID NO: 2918; WAN024CRV_at; Start 693; Stop 717
gattaacacttgtcaccttgccgcc

SEQ ID NO: 130699 - DNA, 25 bp, Artificial
  probe
  misc_feature (1)..(25): SEQ ID NO: 2918; WAN024CRV_at; Start 329; Stop 353
tggttcaagagtcaacctctccaga

SEQ ID NO: 130700 - DNA, 25 bp, Artificial
  probe
  misc_feature (1)..(25): SEQ ID NO: 2918; WAN024CRV_at; Start 441; Stop 465
aatccagcactaccacacgctggtg

SEQ ID NO: 130701 - DNA, 25 bp, Artificial
  probe
  misc_feature (1)..(25): SEQ ID NO: 1563; WAN024CRW_at; Start 41; Stop 65
ctgcgtattcggcaacggcggtaaa

SEQ ID NO: 130702 - DNA, 25 bp, Artificial
  probe
  misc_feature (1)..(25): SEQ ID NO: 1563; WAN024CRW_at; Start 97; Stop 121
tcacatgagtcttggatgacaccaa

SEQ ID NO: 130703 - DNA, 25 bp, Artificial
  probe
  misc_feature (1)..(25): SEQ ID NO: 1563; WAN024CRW_at; Start 103; Stop 127
gagtcttggatgacaccaatcacaa

SEQ ID NO: 130704 - DNA, 25 bp, Artificial
  probe
  misc_feature (1)..(25): SEQ ID NO: 1563; WAN024CRW_at; Start 330; Stop 354
ggtaatcgctactccagccatattg

SEQ ID NO: 130705 - DNA, 25 bp, Artificial
  probe
  misc_feature (1)..(25): SEQ ID NO: 1563; WAN024CRW_at; Start 238; Stop 262
gagatagctgctaccacactgagga

SEQ ID NO: 130706 - DNA, 25 bp, Artificial
  probe
  misc_feature (1)..(25): SEQ ID NO: 1563; WAN024CRW_at; Start 147; Stop 171
tatggcaatatcgttagaaataccg

SEQ ID NO: 130707 - DNA, 25 bp, Artificial
  probe
  misc_feature (1)..(25): SEQ ID NO: 1563; WAN024CRW_at; Start 323; Stop 347
ggttaatggtaatcgctactccagc

SEQ ID NO: 130708 - DNA, 25 bp, Artificial
  probe
  misc_feature (1)..(25): SEQ ID NO: 1563; WAN024CRW_at; Start 30; Stop 54
tttacgggttgctgcgtattcggca

SEQ ID NO: 130709 - DNA, 25 bp, Artificial
  probe
  misc_feature (1)..(25): SEQ ID NO: 1563; WAN024CRW_at; Start 283; Stop 307
acaggaattccaagagtgttaactg

SEQ ID NO: 130710 - DNA, 25 bp, Artificial
  probe
  misc_feature (1)..(25): SEQ ID NO: 1563; WAN024CRW_at; Start 86; Stop 110
taagggctgtttcacatgagtcttg

SEQ ID NO: 130711 - DNA, 25 bp, Artificial
  probe
  misc_feature (1)..(25): SEQ ID NO: 1563; WAN024CRW_at; Start 20; Stop 44
tgagttattttttacgggttgctgc

SEQ ID NO: 130712 - DNA, 25 bp, Artificial
  probe
  misc_feature (1)..(25): SEQ ID NO: 1563; WAN024CRW_at; Start 177; Stop 201
gctacaagcaactgggataagaagg

SEQ ID NO: 130713 - DNA, 25 bp, Artificial
  probe
  misc_feature (1)..(25): SEQ ID NO: 1563; WAN024CRW_at; Start 204; Stop 228
ggaacctccggcaatacctgaagca

SEQ ID NO: 130714 - DNA, 25 bp, Artificial
  probe
  misc_feature (1)..(25): SEQ ID NO: 1563; WAN024CRW_at; Start 69; Stop 93
gacatctgtagaagagttaagggct

SEQ ID NO: 130715 - DNA, 25 bp, Artificial
  probe
  misc_feature (1)..(25): SEQ ID NO: 1563; WAN024CRW_at; Start 363; Stop 387
accgagtgggatagaaacagaatag

SEQ ID NO: 130716 - DNA, 25 bp, Artificial
  probe
  misc_feature (1)..(25): SEQ ID NO: 1563; WAN024CRW_at; Start 199; Stop 223
aggagggaacctccggcaatacctg

SEQ ID NO: 130717 - DNA, 25 bp, Artificial
  probe
  misc_feature (1)..(25): SEQ ID NO: 1563; WAN024CRW_at; Start 247; Stop 271
gctaccacactgaggacaaaggctg

SEQ ID NO: 130718 - DNA, 25 bp, Artificial
  probe
  misc_feature (1)..(25): SEQ ID NO: 1563; WAN024CRW_at; Start 12; Stop 36
tgccttgatgagttattttttacgg

SEQ ID NO: 130719 - DNA, 25 bp, Artificial
  probe
  misc_feature (1)..(25): SEQ ID NO: 1563; WAN024CRW_at; Start 170; Stop 194
cgaaaaggctacaagcaactgggat

SEQ ID NO: 130720 - DNA, 25 bp, Artificial
  probe
  misc_feature (1)..(25): SEQ ID NO: 1563; WAN024CRW_at; Start 317; Stop 341
tcaaaaggttaatggtaatcgctac

SEQ ID NO: 130721 - DNA, 25 bp, Artificial
  probe
  misc_feature (1)..(25): SEQ ID NO: 1563; WAN024CRW_at; Start 275; Stop 299
caaagtcaacaggaattccaagagt

SEQ ID NO: 130722 - DNA, 25 bp, Artificial
  probe
  misc_feature (1)..(25): SEQ ID NO: 1563; WAN024CRW_at; Start 77; Stop 101
tagaagagttaagggctgtttcaca

SEQ ID NO: 130723 - DNA, 25 bp, Artificial
  probe
  misc_feature (1)..(25): SEQ ID NO: 1563; WAN024CRW_at; Start 254; Stop 278
cactgaggacaaaggctgtggcaaa

SEQ ID NO: 130724 - DNA, 25 bp, Artificial
  probe
  misc_feature (1)..(25): SEQ ID NO: 1563; WAN024CRW_at; Start 342; Stop 366
tccagccatattgatagtagaaccg

SEQ ID NO: 130725 - DNA, 25 bp, Artificial
  probe
  misc_feature (1)..(25): SEQ ID NO: 1563; WAN024CRW_at; Start 53; Stop 77
caacggcggtaaagaggacatctgt

SEQ ID NO: 130726 - DNA, 25 bp, Artificial
  probe
  misc_feature (1)..(25): SEQ ID NO: 1563; WAN024CRW_at; Start 180; Stop 204
acaagcaactgggataagaaggagg

SEQ ID NO: 130727 - DNA, 25 bp, Artificial
  probe
  misc_feature (1)..(25): SEQ ID NO: 1563; WAN024CRW_at; Start 161; Stop 185
tagaaataccgaaaaggctacaagc

SEQ ID NO: 130728 - DNA, 25 bp, Artificial
  probe
  misc_feature (1)..(25): SEQ ID NO: 1563; WAN024CRW_at; Start 135; Stop 159
cccaacaatttgtatggcaatatcg

SEQ ID NO: 130729 - DNA, 25 bp, Artificial
  probe
  misc_feature (1)..(25): SEQ ID NO: 1563; WAN024CRW_at; Start 110; Stop 134
ggatgacaccaatcacaaaaccaac

SEQ ID NO: 130730 - DNA, 25 bp, Artificial
  probe
  misc_feature (1)..(25): SEQ ID NO: 1563; WAN024CRW_at; Start 348; Stop 372
catattgatagtagaaccgagtggg

SEQ ID NO: 130731 - DNA, 25 bp, Artificial
  probe
  misc_feature (1)..(25): SEQ ID NO: 1563; WAN024CRW_at; Start 269; Stop 293
ctgtggcaaagtcaacaggaattcc

SEQ ID NO: 130732 - DNA, 25 bp, Artificial
  probe
  misc_feature (1)..(25): SEQ ID NO: 1563; WAN024CRW_at; Start 49; Stop 73
tcggcaacggcggtaaagaggacat

SEQ ID NO: 130733 - DNA, 25 bp, Artificial
  probe
  misc_feature (1)..(25): SEQ ID NO: 1563; WAN024CRW_at; Start 356; Stop 380
tagtagaaccgagtgggatagaaac

SEQ ID NO: 130734 - DNA, 25 bp, Artificial
  probe
  misc_feature (1)..(25): SEQ ID NO: 1563; WAN024CRW_at; Start 261; Stop 285
gacaaaggctgtggcaaagtcaaca

SEQ ID NO: 130735 - DNA, 25 bp, Artificial
  probe
  misc_feature (1)..(25): SEQ ID NO: 5074; WAN024CRX_at; Start 161; Stop 185
taggatatacaagaaaacaacagtt

SEQ ID NO: 130736 - DNA, 25 bp, Artificial
  probe
  misc_feature (1)..(25): SEQ ID NO: 5074; WAN024CRX_at; Start 61; Stop 85
ggtggtgcaatttcagtattggcac

SEQ ID NO: 130737 - DNA, 25 bp, Artificial
  probe
  misc_feature (1)..(25): SEQ ID NO: 5074; WAN024CRX_at; Start 126; Stop 150
tacagctacaagagcagcggcgaaa

SEQ ID NO: 130738 - DNA, 25 bp, Artificial
  probe
  misc_feature (1)..(25): SEQ ID NO: 5074; WAN024CRX_at; Start 123; Stop 147
tagtacagctacaagagcagcggcg

SEQ ID NO: 130739 - DNA, 25 bp, Artificial
  probe
  misc_feature (1)..(25): SEQ ID NO: 5074; WAN024CRX_at; Start 205; Stop 229
ccttttgatgttgggaaagggcatt

SEQ ID NO: 130740 - DNA, 25 bp, Artificial
  probe
  misc_feature (1)..(25): SEQ ID NO: 5074; WAN024CRX_at; Start 46; Stop 70
tgcccaatcccatctggtggtgcaa

SEQ ID NO: 130741 - DNA, 25 bp, Artificial
  probe
  misc_feature (1)..(25): SEQ ID NO: 5074; WAN024CRX_at; Start 198; Stop 222
tcttgtcccttttgatgttgggaaa

SEQ ID NO: 130742 - DNA, 25 bp, Artificial
  probe
  misc_feature (1)..(25): SEQ ID NO: 5074; WAN024CRX_at; Start 139; Stop 163
gcagcggcgaaagtccctatcatag

SEQ ID NO: 130743 - DNA, 25 bp, Artificial
  probe
  misc_feature (1)..(25): SEQ ID NO: 5074; WAN024CRX_at; Start 203; Stop 227
tcccttttgatgttgggaaagggca

SEQ ID NO: 130744 - DNA, 25 bp, Artificial
  probe
  misc_feature (1)..(25): SEQ ID NO: 5074; WAN024CRX_at; Start 119; Stop 143
ttgctagtacagctacaagagcagc

SEQ ID NO: 130745 - DNA, 25 bp, Artificial
  probe
  misc_feature (1)..(25): SEQ ID NO: 5074; WAN024CRX_at; Start 66; Stop 90
tgcaatttcagtattggcactattt

SEQ ID NO: 130746 - DNA, 25 bp, Artificial
  probe
  misc_feature (1)..(25): SEQ ID NO: 5074; WAN024CRX_at; Start 130; Stop 154
gctacaagagcagcggcgaaagtcc

SEQ ID NO: 130747 - DNA, 25 bp, Artificial
  probe
  misc_feature (1)..(25): SEQ ID NO: 5074; WAN024CRX_at; Start 175; Stop 199
aaacaacagttttcatattgctatc

SEQ ID NO: 130748 - DNA, 25 bp, Artificial
  probe
  misc_feature (1)..(25): SEQ ID NO: 5074; WAN024CRX_at; Start 121; Stop 145
gctagtacagctacaagagcagcgg

SEQ ID NO: 130749 - DNA, 25 bp, Artificial
  probe
  misc_feature (1)..(25): SEQ ID NO: 5074; WAN024CRX_at; Start 125; Stop 149
gtacagctacaagagcagcggcgaa

SEQ ID NO: 130750 - DNA, 25 bp, Artificial
  probe
  misc_feature (1)..(25): SEQ ID NO: 5074; WAN024CRX_at; Start 128; Stop 152
cagctacaagagcagcggcgaaagt

SEQ ID NO: 130751 - DNA, 25 bp, Artificial
  probe
  misc_feature (1)..(25): SEQ ID NO: 5074; WAN024CRX_at; Start 194; Stop 218
gctatcttgtcccttttgatgttgg

SEQ ID NO: 130752 - DNA, 25 bp, Artificial
  probe
  misc_feature (1)..(25): SEQ ID NO: 5074; WAN024CRX_at; Start 135; Stop 159
aagagcagcggcgaaagtccctatc

SEQ ID NO: 130753 - DNA, 25 bp, Artificial
  probe
  misc_feature (1)..(25): SEQ ID NO: 5074; WAN024CRX_at; Start 59; Stop 83
ctggtggtgcaatttcagtattggc

SEQ ID NO: 130754 - DNA, 25 bp, Artificial
  probe
  misc_feature (1)..(25): SEQ ID NO: 5074; WAN024CRX_at; Start 154; Stop 178
cctatcataggatatacaagaaaac

SEQ ID NO: 130755 - DNA, 25 bp, Artificial
  probe
  misc_feature (1)..(25): SEQ ID NO: 5074; WAN024CRX_at; Start 143; Stop 167
cggcgaaagtccctatcataggata

SEQ ID NO: 130756 - DNA, 25 bp, Artificial
  probe
  misc_feature (1)..(25): SEQ ID NO: 5074; WAN024CRX_at; Start 188; Stop 212
catattgctatcttgtcccttttga

SEQ ID NO: 130757 - DNA, 25 bp, Artificial
  probe
  misc_feature (1)..(25): SEQ ID NO: 5074; WAN024CRX_at; Start 92; Stop 116
gggtaatttcaatagggacgatgaa

SEQ ID NO: 130758 - DNA, 25 bp, Artificial
  probe
  misc_feature (1)..(25): SEQ ID NO: 5074; WAN024CRX_at; Start 145; Stop 169
gcgaaagtccctatcataggatata

SEQ ID NO: 130759 - DNA, 25 bp, Artificial
  probe
  misc_feature (1)..(25): SEQ ID NO: 5074; WAN024CRX_at; Start 141; Stop 165
agcggcgaaagtccctatcatagga

SEQ ID NO: 130760 - DNA, 25 bp, Artificial
  probe
  misc_feature (1)..(25): SEQ ID NO: 5074; WAN024CRX_at; Start 211; Stop 235
gatgttgggaaagggcattggcaac

SEQ ID NO: 130761 - DNA, 25 bp, Artificial
  probe
  misc_feature (1)..(25): SEQ ID NO: 5074; WAN024CRX_at; Start 182; Stop 206
agttttcatattgctatcttgtccc

SEQ ID NO: 130762 - DNA, 25 bp, Artificial
  probe
  misc_feature (1)..(25): SEQ ID NO: 5074; WAN024CRX_at; Start 53; Stop 77
tcccatctggtggtgcaatttcagt

SEQ ID NO: 130763 - DNA, 25 bp, Artificial
  probe
  misc_feature (1)..(25): SEQ ID NO: 5074; WAN024CRX_at; Start 151; Stop 175
gtccctatcataggatatacaagaa

SEQ ID NO: 130764 - DNA, 25 bp, Artificial
  probe
  misc_feature (1)..(25): SEQ ID NO: 5074; WAN024CRX_at; Start 50; Stop 74
caatcccatctggtggtgcaatttc

SEQ ID NO: 130765 - DNA, 25 bp, Artificial
  probe
  misc_feature (1)..(25): SEQ ID NO: 5074; WAN024CRX_at; Start 137; Stop 161
gagcagcggcgaaagtccctatcat

SEQ ID NO: 130766 - DNA, 25 bp, Artificial
  probe
  misc_feature (1)..(25): SEQ ID NO: 5074; WAN024CRX_at; Start 159; Stop 183
cataggatatacaagaaaacaacag

SEQ ID NO: 130767 - DNA, 25 bp, Artificial
  probe
  misc_feature (1)..(25): SEQ ID NO: 5074; WAN024CRX_at; Start 11; Stop 35
tgtcaaccagtttgagcaagaggtt

SEQ ID NO: 130768 - DNA, 25 bp, Artificial
  probe
  misc_feature (1)..(25): SEQ ID NO: 5074; WAN024CRX_at; Start 55; Stop 79
ccatctggtggtgcaatttcagtat

SEQ ID NO: 130769 - DNA, 25 bp, Artificial
  probe
  misc_feature (1)..(25): SEQ ID NO: 5763; WAN024CRY_at; Start 136; Stop 160
caaaagggacaagatagcaatatga

SEQ ID NO: 130770 - DNA, 25 bp, Artificial
  probe
  misc_feature (1)..(25): SEQ ID NO: 5763; WAN024CRY_at; Start 83; Stop 107
ctgttgctcctatcctagtctttgc

SEQ ID NO: 130771 - DNA, 25 bp, Artificial
  probe
  misc_feature (1)..(25): SEQ ID NO: 5763; WAN024CRY_at; Start 79; Stop 103
aaagctgttgctcctatcctagtct

SEQ ID NO: 130772 - DNA, 25 bp, Artificial
  probe
  misc_feature (1)..(25): SEQ ID NO: 5763; WAN024CRY_at; Start 7; Stop 31
ggaatcctaggactgacccttccta

SEQ ID NO: 130773 - DNA, 25 bp, Artificial
  probe
  misc_feature (1)..(25): SEQ ID NO: 5763; WAN024CRY_at; Start 133; Stop 157
catcaaaagggacaagatagcaata

SEQ ID NO: 130774 - DNA, 25 bp, Artificial
  probe
  misc_feature (1)..(25): SEQ ID NO: 5763; WAN024CRY_at; Start 77; Stop 101
taaaagctgttgctcctatcctagt

SEQ ID NO: 130775 - DNA, 25 bp, Artificial
  probe
  misc_feature (1)..(25): SEQ ID NO: 5763; WAN024CRY_at; Start 68; Stop 92
ttggaggtctaaaagctgttgctcc

SEQ ID NO: 130776 - DNA, 25 bp, Artificial
  probe
  misc_feature (1)..(25): SEQ ID NO: 5763; WAN024CRY_at; Start 65; Stop 89
tcgttggaggtctaaaagctgttgc

SEQ ID NO: 130777 - DNA, 25 bp, Artificial
  probe
  misc_feature (1)..(25): SEQ ID NO: 5763; WAN024CRY_at; Start 20; Stop 44
tgacccttcctaatctctcagggat

SEQ ID NO: 130778 - DNA, 25 bp, Artificial
  probe
  misc_feature (1)..(25): SEQ ID NO: 5763; WAN024CRY_at; Start 135; Stop 159
tcaaaagggacaagatagcaatatg

SEQ ID NO: 130779 - DNA, 25 bp, Artificial
  probe
  misc_feature (1)..(25): SEQ ID NO: 5763; WAN024CRY_at; Start 128; Stop 152
cccaacatcaaaagggacaagatag

SEQ ID NO: 130780 - DNA, 25 bp, Artificial
  probe
  misc_feature (1)..(25): SEQ ID NO: 5763; WAN024CRY_at; Start 26; Stop 50
ttcctaatctctcagggattgggct

SEQ ID NO: 130781 - DNA, 25 bp, Artificial
  probe
  misc_feature (1)..(25): SEQ ID NO: 5763; WAN024CRY_at; Start 28; Stop 52
cctaatctctcagggattgggctac

SEQ ID NO: 130782 - DNA, 25 bp, Artificial
  probe
  misc_feature (1)..(25): SEQ ID NO: 5763; WAN024CRY_at; Start 8; Stop 32
gaatcctaggactgacccttcctaa

SEQ ID NO: 130783 - DNA, 25 bp, Artificial
  probe
  misc_feature (1)..(25): SEQ ID NO: 5763; WAN024CRY_at; Start 129; Stop 153
ccaacatcaaaagggacaagatagc

SEQ ID NO: 130784 - DNA, 25 bp, Artificial
  probe
  misc_feature (1)..(25): SEQ ID NO: 5763; WAN024CRY_at; Start 141; Stop 165
gggacaagatagcaatatgaaaact

SEQ ID NO: 130785 - DNA, 25 bp, Artificial
  probe
  misc_feature (1)..(25): SEQ ID NO: 5763; WAN024CRY_at; Start 75; Stop 99
tctaaaagctgttgctcctatccta

SEQ ID NO: 130786 - DNA, 25 bp, Artificial
  probe
  misc_feature (1)..(25): SEQ ID NO: 5763; WAN024CRY_at; Start 169; Stop 193
gttttcttgtatatcctactaacta

SEQ ID NO: 130787 - DNA, 25 bp, Artificial
  probe
  misc_feature (1)..(25): SEQ ID NO: 5763; WAN024CRY_at; Start 125; Stop 149
tttcccaacatcaaaagggacaaga

SEQ ID NO: 130788 - DNA, 25 bp, Artificial
  probe
  misc_feature (1)..(25): SEQ ID NO: 5763; WAN024CRY_at; Start 73; Stop 97
ggtctaaaagctgttgctcctatcc

SEQ ID NO: 130789 - DNA, 25 bp, Artificial
  probe
  misc_feature (1)..(25): SEQ ID NO: 5763; WAN024CRY_at; Start 62; Stop 86
tattcgttggaggtctaaaagctgt

SEQ ID NO: 130790 - DNA, 25 bp, Artificial
  probe
  misc_feature (1)..(25): SEQ ID NO: 5763; WAN024CRY_at; Start 148; Stop 172
gatagcaatatgaaaactgttgttt

SEQ ID NO: 130791 - DNA, 25 bp, Artificial
  probe
  misc_feature (1)..(25): SEQ ID NO: 5763; WAN024CRY_at; Start 145; Stop 169
caagatagcaatatgaaaactgttg

SEQ ID NO: 130792 - DNA, 25 bp, Artificial
  probe
  misc_feature (1)..(25): SEQ ID NO: 5763; WAN024CRY_at; Start 82; Stop 106
gctgttgctcctatcctagtctttg

SEQ ID NO: 130793 - DNA, 25 bp, Artificial
  probe
  misc_feature (1)..(25): SEQ ID NO: 5763; WAN024CRY_at; Start 66; Stop 90
cgttggaggtctaaaagctgttgct

SEQ ID NO: 130794 - DNA, 25 bp, Artificial
  probe
  misc_feature (1)..(25): SEQ ID NO: 5763; WAN024CRY_at; Start 118; Stop 142
aatgccctttcccaacatcaaaagg

SEQ ID NO: 130795 - DNA, 25 bp, Artificial
  probe
  misc_feature (1)..(25): SEQ ID NO: 5763; WAN024CRY_at; Start 17; Stop 41
gactgacccttcctaatctctcagg

SEQ ID NO: 130796 - DNA, 25 bp, Artificial
  probe
  misc_feature (1)..(25): SEQ ID NO: 5763; WAN024CRY_at; Start 163; Stop 187
actgttgttttcttgtatatcctac

SEQ ID NO: 130797 - DNA, 25 bp, Artificial
  probe
  misc_feature (1)..(25): SEQ ID NO: 5763; WAN024CRY_at; Start 30; Stop 54
taatctctcagggattgggctactc

SEQ ID NO: 130798 - DNA, 25 bp, Artificial
  probe
  misc_feature (1)..(25): SEQ ID NO: 5763; WAN024CRY_at; Start 24; Stop 48
ccttcctaatctctcagggattggg

SEQ ID NO: 130799 - DNA, 25 bp, Artificial
  probe
  misc_feature (1)..(25): SEQ ID NO: 5763; WAN024CRY_at; Start 71; Stop 95
gaggtctaaaagctgttgctcctat

SEQ ID NO: 130800 - DNA, 25 bp, Artificial
  probe
  misc_feature (1)..(25): SEQ ID NO: 5763; WAN024CRY_at; Start 11; Stop 35
tcctaggactgacccttcctaatct

SEQ ID NO: 130801 - DNA, 25 bp, Artificial
  probe
  misc_feature (1)..(25): SEQ ID NO: 5763; WAN024CRY_at; Start 31; Stop 55
aatctctcagggattgggctactcg

SEQ ID NO: 130802 - DNA, 25 bp, Artificial
  probe
  misc_feature (1)..(25): SEQ ID NO: 5763; WAN024CRY_at; Start 120; Stop 144
tgccctttcccaacatcaaaaggga

SEQ ID NO: 130803 - DNA, 25 bp, Artificial
  probe
  misc_feature (1)..(25): SEQ ID NO: 1709; WAN024CRZ_at; Start 84; Stop 108
tactgaaattgcaccaccagatggg

SEQ ID NO: 130804 - DNA, 25 bp, Artificial
  probe
  misc_feature (1)..(25): SEQ ID NO: 1709; WAN024CRZ_at; Start 813; Stop 837
cggtatttctaacgatattgccata

SEQ ID NO: 130805 - DNA, 25 bp, Artificial
  probe
  misc_feature (1)..(25): SEQ ID NO: 1709; WAN024CRZ_at; Start 404; Stop 428
taacgactatgctttttgttgcccc

SEQ ID NO: 130806 - DNA, 25 bp, Artificial
  probe
  misc_feature (1)..(25): SEQ ID NO: 1709; WAN024CRZ_at; Start 919; Stop 943
tttaccgccgttgccgaatacgcag

SEQ ID NO: 130807 - DNA, 25 bp, Artificial
  probe
  misc_feature (1)..(25): SEQ ID NO: 1709; WAN024CRZ_at; Start 2; Stop 26
tgatagggactttcgccgctgctct

SEQ ID NO: 130808 - DNA, 25 bp, Artificial
  probe
  misc_feature (1)..(25): SEQ ID NO: 1709; WAN024CRZ_at; Start 497; Stop 521
tccgtgtcagcggtgtgacagcctt

SEQ ID NO: 130809 - DNA, 25 bp, Artificial
  probe
  misc_feature (1)..(25): SEQ ID NO: 1709; WAN024CRZ_at; Start 691; Stop 715
ggaattcctgttgactttgccacag

SEQ ID NO: 130810 - DNA, 25 bp, Artificial
  probe
  misc_feature (1)..(25): SEQ ID NO: 1709; WAN024CRZ_at; Start 214; Stop 238
ggaatcgctatgagagaagccagta

SEQ ID NO: 130811 - DNA, 25 bp, Artificial
  probe
  misc_feature (1)..(25): SEQ ID NO: 1709; WAN024CRZ_at; Start 16; Stop 40
gccgctgctcttgtagctgtactag

SEQ ID NO: 130812 - DNA, 25 bp, Artificial
  probe
  misc_feature (1)..(25): SEQ ID NO: 1709; WAN024CRZ_at; Start 722; Stop 746
tcctcagtgtggtagcagctatctc

SEQ ID NO: 130813 - DNA, 25 bp, Artificial
  probe
  misc_feature (1)..(25): SEQ ID NO: 1709; WAN024CRZ_at; Start 904; Stop 928
tctacagatgtcctctttaccgccg

SEQ ID NO: 130814 - DNA, 25 bp, Artificial
  probe
  misc_feature (1)..(25): SEQ ID NO: 1709; WAN024CRZ_at; Start 280; Stop 304
tctaaaattgtcgaatggatcatca

SEQ ID NO: 130815 - DNA, 25 bp, Artificial
  probe
  misc_feature (1)..(25): SEQ ID NO: 1709; WAN024CRZ_at; Start 266; Stop 290
tcgctgacgtgacttctaaaattgt

SEQ ID NO: 130816 - DNA, 25 bp, Artificial
  probe
  misc_feature (1)..(25): SEQ ID NO: 1709; WAN024CRZ_at; Start 513; Stop 537
gacagcctttttcactcgtagttct

SEQ ID NO: 130817 - DNA, 25 bp, Artificial
  probe
  misc_feature (1)..(25): SEQ ID NO: 1709; WAN024CRZ_at; Start 614; Stop 638
cactcggttctactatcaatatggc

SEQ ID NO: 130818 - DNA, 25 bp, Artificial
  probe
  misc_feature (1)..(25): SEQ ID NO: 1709; WAN024CRZ_at; Start 560; Stop 584
tgaaactctgccatgaccttggact

SEQ ID NO: 130819 - DNA, 25 bp, Artificial
  probe
  misc_feature (1)..(25): SEQ ID NO: 1709; WAN024CRZ_at; Start 783; Stop 807
ccttcttatcccagttgcttgtagc

SEQ ID NO: 130820 - DNA, 25 bp, Artificial
  probe
  misc_feature (1)..(25): SEQ ID NO: 1709; WAN024CRZ_at; Start 861; Stop 885
gattggtgtcatccaagactcatgt

SEQ ID NO: 130821 - DNA, 25 bp, Artificial
  probe
  misc_feature (1)..(25): SEQ ID NO: 1709; WAN024CRZ_at; Start 757; Stop 781
gcttcaggtattgccggaggttccc

SEQ ID NO: 130822 - DNA, 25 bp, Artificial
  probe
  misc_feature (1)..(25): SEQ ID NO: 1709; WAN024CRZ_at; Start 931; Stop 955
gccgaatacgcagcaacccgtaaaa

SEQ ID NO: 130823 - DNA, 25 bp, Artificial
  probe
  misc_feature (1)..(25): SEQ ID NO: 1709; WAN024CRZ_at; Start 598; Stop 622
tattctgtttctatcccactcggtt

SEQ ID NO: 130824 - DNA, 25 bp, Artificial
  probe
  misc_feature (1)..(25): SEQ ID NO: 1709; WAN024CRZ_at; Start 877; Stop 901
gactcatgtgaaacagcccttaact

SEQ ID NO: 130825 - DNA, 25 bp, Artificial
  probe
  misc_feature (1)..(25): SEQ ID NO: 1709; WAN024CRZ_at; Start 339; Stop 363
taaaaccatttctgacaagggagtc

SEQ ID NO: 130826 - DNA, 25 bp, Artificial
  probe
  misc_feature (1)..(25): SEQ ID NO: 1709; WAN024CRZ_at; Start 574; Stop 598
gaccttggactcaacccagatacct

SEQ ID NO: 130827 - DNA, 25 bp, Artificial
  probe
  misc_feature (1)..(25): SEQ ID NO: 1709; WAN024CRZ_at; Start 197; Stop 221
cttgggcagtcatttttggaatcgc

SEQ ID NO: 130828 - DNA, 25 bp, Artificial
  probe
  misc_feature (1)..(25): SEQ ID NO: 1709; WAN024CRZ_at; Start 630; Stop 654
caatatggctggagtagcgattacc

SEQ ID NO: 130829 - DNA, 25 bp, Artificial
  probe
  misc_feature (1)..(25): SEQ ID NO: 1709; WAN024CRZ_at; Start 421; Stop 445
gttgcccctgtggtcaaccctttga

SEQ ID NO: 130830 - DNA, 25 bp, Artificial
  probe
  misc_feature (1)..(25): SEQ ID NO: 1709; WAN024CRZ_at; Start 122; Stop 146
tcagcaacctcttgctcaaactggt

SEQ ID NO: 130831 - DNA, 25 bp, Artificial
  probe
  misc_feature (1)..(25): SEQ ID NO: 1709; WAN024CRZ_at; Start 462; Stop 486
gagacgcaatccttaccctctagtt

SEQ ID NO: 130832 - DNA, 25 bp, Artificial
  probe
  misc_feature (1)..(25): SEQ ID NO: 1709; WAN024CRZ_at; Start 482; Stop 506
tagtttggaactgcctccgtgtcag

SEQ ID NO: 130833 - DNA, 25 bp, Artificial
  probe
  misc_feature (1)..(25): SEQ ID NO: 1709; WAN024CRZ_at; Start 361; Stop 385
gtcggaagccttgccaactacggta

SEQ ID NO: 130834 - DNA, 25 bp, Artificial
  probe
  misc_feature (1)..(25): SEQ ID NO: 1709; WAN024CRZ_at; Start 707; Stop 731
ttgccacagcctttgtcctcagtgt

SEQ ID NO: 130835 - DNA, 25 bp, Artificial
  probe
  misc_feature (1)..(25): SEQ ID NO: 1709; WAN024CRZ_at; Start 250; Stop 274
gaattgctaaaaactatcgctgacg

SEQ ID NO: 130836 - DNA, 25 bp, Artificial
  probe
  misc_feature (1)..(25): SEQ ID NO: 1709; WAN024CRZ_at; Start 158; Stop 182
tcaacgccctgcttactgctaacta

SEQ ID NO: 130837 - DNA, 25 bp, Artificial
  probe
  misc_feature (1)..(25): SEQ ID NO: 6448; WAN024CS2_at; Start 12; Stop 36
gaagagttccaatccagaagccatt

SEQ ID NO: 130838 - DNA, 25 bp, Artificial
  probe
  misc_feature (1)..(25): SEQ ID NO: 6448; WAN024CS2_at; Start 8; Stop 32
ttaagaagagttccaatccagaagc

SEQ ID NO: 130839 - DNA, 25 bp, Artificial
  probe
  misc_feature (1)..(25): SEQ ID NO: 6448; WAN024CS2_at; Start 10; Stop 34
aagaagagttccaatccagaagcca

SEQ ID NO: 130840 - DNA, 25 bp, Artificial
  probe
  misc_feature (1)..(25): SEQ ID NO: 6448; WAN024CS2_at; Start 7; Stop 31
attaagaagagttccaatccagaag

SEQ ID NO: 130841 - DNA, 25 bp, Artificial
  probe
  misc_feature (1)..(25): SEQ ID NO: 6448; WAN024CS2_at; Start 9; Stop 33
taagaagagttccaatccagaagcc

SEQ ID NO: 130842 - DNA, 25 bp, Artificial
  probe
  misc_feature (1)..(25): SEQ ID NO: 6448; WAN024CS2_at; Start 6; Stop 30
gattaagaagagttccaatccagaa

SEQ ID NO: 130843 - DNA, 25 bp, Artificial
  probe
  misc_feature (1)..(25): SEQ ID NO: 6448; WAN024CS2_at; Start 4; Stop 28
aagattaagaagagttccaatccag

SEQ ID NO: 130844 - DNA, 25 bp, Artificial
  probe
  misc_feature (1)..(25): SEQ ID NO: 6448; WAN024CS2_at; Start 5; Stop 29
agattaagaagagttccaatccaga

SEQ ID NO: 130845 - DNA, 25 bp, Artificial
  probe
  misc_feature (1)..(25): SEQ ID NO: 6448; WAN024CS2_at; Start 63; Stop 87
tatttcctacttgggagcgtctaac

SEQ ID NO: 130846 - DNA, 25 bp, Artificial
  probe
  misc_feature (1)..(25): SEQ ID NO: 6448; WAN024CS2_at; Start 62; Stop 86
ttatttcctacttgggagcgtctaa

SEQ ID NO: 130847 - DNA, 25 bp, Artificial
  probe
  misc_feature (1)..(25): SEQ ID NO: 6448; WAN024CS2_at; Start 3; Stop 27
gaagattaagaagagttccaatcca

SEQ ID NO: 130848 - DNA, 25 bp, Artificial
  probe
  misc_feature (1)..(25): SEQ ID NO: 6448; WAN024CS2_at; Start 11; Stop 35
agaagagttccaatccagaagccat

SEQ ID NO: 130849 - DNA, 25 bp, Artificial
  probe
  misc_feature (1)..(25): SEQ ID NO: 6448; WAN024CS2_at; Start 1; Stop 25
atgaagattaagaagagttccaatc

SEQ ID NO: 130850 - DNA, 25 bp, Artificial
  probe
  misc_feature (1)..(25): SEQ ID NO: 6448; WAN024CS2_at; Start 2; Stop 26
tgaagattaagaagagttccaatcc

SEQ ID NO: 130851 - DNA, 25 bp, Artificial
  probe
  misc_feature (1)..(25): SEQ ID NO: 5435; WAN024CS3_at; Start 232; Stop 256
ccccttcatacggatggttgcctgg

SEQ ID NO: 130852 - DNA, 25 bp, Artificial
  probe
  misc_feature (1)..(25): SEQ ID NO: 5435; WAN024CS3_at; Start 112; Stop 136
cacccggtatgcgtcgtcaacagaa

SEQ ID NO: 130853 - DNA, 25 bp, Artificial
  probe
  misc_feature (1)..(25): SEQ ID NO: 5435; WAN024CS3_at; Start 126; Stop 150
cgtcaacagaaccattaagataaag

SEQ ID NO: 130854 - DNA, 25 bp, Artificial
  probe
  misc_feature (1)..(25): SEQ ID NO: 5435; WAN024CS3_at; Start 252; Stop 276
cctgggcaatggctacagcgtgatc

SEQ ID NO: 130855 - DNA, 25 bp, Artificial
  probe
  misc_feature (1)..(25): SEQ ID NO: 5435; WAN024CS3_at; Start 60; Stop 84
caaggtcacggatagtttcaaaata

SEQ ID NO: 130856 - DNA, 25 bp, Artificial
  probe
  misc_feature (1)..(25): SEQ ID NO: 5435; WAN024CS3_at; Start 121; Stop 145
tgcgtcgtcaacagaaccattaaga

SEQ ID NO: 130857 - DNA, 25 bp, Artificial
  probe
  misc_feature (1)..(25): SEQ ID NO: 5435; WAN024CS3_at; Start 80; Stop 104
aaatagtggttaatttgctcatcca

SEQ ID NO: 130858 - DNA, 25 bp, Artificial
  probe
  misc_feature (1)..(25): SEQ ID NO: 5435; WAN024CS3_at; Start 50; Stop 74
tcttcagtcgcaaggtcacggatag

SEQ ID NO: 130859 - DNA, 25 bp, Artificial
  probe
  misc_feature (1)..(25): SEQ ID NO: 5435; WAN024CS3_at; Start 106; Stop 130
ggaggccacccggtatgcgtcgtca

SEQ ID NO: 130860 - DNA, 25 bp, Artificial
  probe
  misc_feature (1)..(25): SEQ ID NO: 5435; WAN024CS3_at; Start 90; Stop 114
taatttgctcatccatggaggccac

SEQ ID NO: 130861 - DNA, 25 bp, Artificial
  probe
  misc_feature (1)..(25): SEQ ID NO: 5435; WAN024CS3_at; Start 15; Stop 39
gacccgtaacaatggcttctggatt

SEQ ID NO: 130862 - DNA, 25 bp, Artificial
  probe
  misc_feature (1)..(25): SEQ ID NO: 5435; WAN024CS3_at; Start 58; Stop 82
cgcaaggtcacggatagtttcaaaa

SEQ ID NO: 130863 - DNA, 25 bp, Artificial
  probe
  misc_feature (1)..(25): SEQ ID NO: 5435; WAN024CS3_at; Start 237; Stop 261
tcatacggatggttgcctgggcaat

SEQ ID NO: 130864 - DNA, 25 bp, Artificial
  probe
  misc_feature (1)..(25): SEQ ID NO: 5435; WAN024CS3_at; Start 195; Stop 219
ttttaatttcttcctctacagctgg

SEQ ID NO: 130865 - DNA, 25 bp, Artificial
  probe
  misc_feature (1)..(25): SEQ ID NO: 5435; WAN024CS3_at; Start 8; Stop 32
taatcacgacccgtaacaatggctt

SEQ ID NO: 130866 - DNA, 25 bp, Artificial
  probe
  misc_feature (1)..(25): SEQ ID NO: 5435; WAN024CS3_at; Start 168; Stop 192
caacgcttttaacttcacgtcccat

SEQ ID NO: 130867 - DNA, 25 bp, Artificial
  probe
  misc_feature (1)..(25): SEQ ID NO: 5435; WAN024CS3_at; Start 235; Stop 259
cttcatacggatggttgcctgggca

SEQ ID NO: 130868 - DNA, 25 bp, Artificial
  probe
  misc_feature (1)..(25): SEQ ID NO: 5435; WAN024CS3_at; Start 12; Stop 36
cacgacccgtaacaatggcttctgg

SEQ ID NO: 130869 - DNA, 25 bp, Artificial
  probe
  misc_feature (1)..(25): SEQ ID NO: 5435; WAN024CS3_at; Start 255; Stop 279
gggcaatggctacagcgtgatcccc

SEQ ID NO: 130870 - DNA, 25 bp, Artificial
  probe
  misc_feature (1)..(25): SEQ ID NO: 5435; WAN024CS3_at; Start 100; Stop 124
atccatggaggccacccggtatgcg

SEQ ID NO: 130871 - DNA, 25 bp, Artificial
  probe
  misc_feature (1)..(25): SEQ ID NO: 5435; WAN024CS3_at; Start 141; Stop 165
taagataaagatcaagtgctgcttc

SEQ ID NO: 130872 - DNA, 25 bp, Artificial
  probe
  misc_feature (1)..(25): SEQ ID NO: 5435; WAN024CS3_at; Start 87; Stop 111
ggttaatttgctcatccatggaggc

SEQ ID NO: 130873 - DNA, 25 bp, Artificial
  probe
  misc_feature (1)..(25): SEQ ID NO: 5435; WAN024CS3_at; Start 1; Stop 25
ttggaaataatcacgacccgtaaca

SEQ ID NO: 130874 - DNA, 25 bp, Artificial
  probe
  misc_feature (1)..(25): SEQ ID NO: 5435; WAN024CS3_at; Start 46; Stop 70
aatctcttcagtcgcaaggtcacgg

SEQ ID NO: 130875 - DNA, 25 bp, Artificial
  probe
  misc_feature (1)..(25): SEQ ID NO: 5435; WAN024CS3_at; Start 259; Stop 283
aatggctacagcgtgatcccccata

SEQ ID NO: 130876 - DNA, 25 bp, Artificial
  probe
  misc_feature (1)..(25): SEQ ID NO: 5435; WAN024CS3_at; Start 249; Stop 273
ttgcctgggcaatggctacagcgtg

SEQ ID NO: 130877 - DNA, 25 bp, Artificial
  probe
  misc_feature (1)..(25): SEQ ID NO: 5435; WAN024CS3_at; Start 24; Stop 48
caatggcttctggatttttcttaat

SEQ ID NO: 130878 - DNA, 25 bp, Artificial
  probe
  misc_feature (1)..(25): SEQ ID NO: 5435; WAN024CS3_at; Start 116; Stop 140
cggtatgcgtcgtcaacagaaccat

SEQ ID NO: 130879 - DNA, 25 bp, Artificial
  probe
  misc_feature (1)..(25): SEQ ID NO: 5435; WAN024CS3_at; Start 66; Stop 90
cacggatagtttcaaaatagtggtt

SEQ ID NO: 130880 - DNA, 25 bp, Artificial
  probe
  misc_feature (1)..(25): SEQ ID NO: 5435; WAN024CS3_at; Start 18; Stop 42
ccgtaacaatggcttctggattttt

SEQ ID NO: 130881 - DNA, 25 bp, Artificial
  probe
  misc_feature (1)..(25): SEQ ID NO: 5435; WAN024CS3_at; Start 138; Stop 162
cattaagataaagatcaagtgctgc

SEQ ID NO: 130882 - DNA, 25 bp, Artificial
  probe
  misc_feature (1)..(25): SEQ ID NO: 5435; WAN024CS3_at; Start 40; Stop 64
tttcttaatctcttcagtcgcaagg

SEQ ID NO: 130883 - DNA, 25 bp, Artificial
  probe
  misc_feature (1)..(25): SEQ ID NO: 5435; WAN024CS3_at; Start 93; Stop 117
tttgctcatccatggaggccacccg

SEQ ID NO: 130884 - DNA, 25 bp, Artificial
  probe
  misc_feature (1)..(25): SEQ ID NO: 5435; WAN024CS3_at; Start 54; Stop 78
cagtcgcaaggtcacggatagtttc

SEQ ID NO: 130885 - DNA, 25 bp, Artificial
  probe
  misc_feature (1)..(25): SEQ ID NO: 3000; WAN024CS4_at; Start 303; Stop 327
tgcccaggcaaccatccgtatgaag

SEQ ID NO: 130886 - DNA, 25 bp, Artificial
  probe
  misc_feature (1)..(25): SEQ ID NO: 3000; WAN024CS4_at; Start 454; Stop 478
tccatggatgagcaaattaaccact

SEQ ID NO: 130887 - DNA, 25 bp, Artificial
  probe
  misc_feature (1)..(25): SEQ ID NO: 3000; WAN024CS4_at; Start 489; Stop 513
tatccgtgaccttgcgactgaagag

SEQ ID NO: 130888 - DNA, 25 bp, Artificial
  probe
  misc_feature (1)..(25): SEQ ID NO: 3000; WAN024CS4_at; Start 572; Stop 596
acttggagcgtatcggtgactatgc

SEQ ID NO: 130889 - DNA, 25 bp, Artificial
  probe
  misc_feature (1)..(25): SEQ ID NO: 3000; WAN024CS4_at; Start 111; Stop 135
gcatgaccgtgacctggcaaaagag

SEQ ID NO: 130890 - DNA, 25 bp, Artificial
  probe
  misc_feature (1)..(25): SEQ ID NO: 3000; WAN024CS4_at; Start 397; Stop 421
gaagcagcacttgatctttatctta

SEQ ID NO: 130891 - DNA, 25 bp, Artificial
  probe
  misc_feature (1)..(25): SEQ ID NO: 3000; WAN024CS4_at; Start 498; Stop 522
ccttgcgactgaagagattaagaaa

SEQ ID NO: 130892 - DNA, 25 bp, Artificial
  probe
  misc_feature (1)..(25): SEQ ID NO: 3000; WAN024CS4_at; Start 172; Stop 196
gtgaaactggaaaagaaatcatttg

SEQ ID NO: 130893 - DNA, 25 bp, Artificial
  probe
  misc_feature (1)..(25): SEQ ID NO: 3000; WAN024CS4_at; Start 343; Stop 367
ccagctgtagaggaagaaattaaaa

SEQ ID NO: 130894 - DNA, 25 bp, Artificial
  probe
  misc_feature (1)..(25): SEQ ID NO: 3000; WAN024CS4_at; Start 478; Stop 502
tattttgaaactatccgtgaccttg

SEQ ID NO: 130895 - DNA, 25 bp, Artificial
  probe
  misc_feature (1)..(25): SEQ ID NO: 3000; WAN024CS4_at; Start 77; Stop 101
cacaaatcaatcgtacggtacgtgc

SEQ ID NO: 130896 - DNA, 25 bp, Artificial
  probe
  misc_feature (1)..(25): SEQ ID NO: 3000; WAN024CS4_at; Start 38; Stop 62
tacataaccagttctacgctatggg

SEQ ID NO: 130897 - DNA, 25 bp, Artificial
  probe
  misc_feature (1)..(25): SEQ ID NO: 3000; WAN024CS4_at; Start 190; Stop 214
tcatttgaaatgatcgcactccaac

SEQ ID NO: 130898 - DNA, 25 bp, Artificial
  probe
  misc_feature (1)..(25): SEQ ID NO: 3000; WAN024CS4_at; Start 513; Stop 537
gattaagaaaaatccagaagccatt

SEQ ID NO: 130899 - DNA, 25 bp, Artificial
  probe
  misc_feature (1)..(25): SEQ ID NO: 3000; WAN024CS4_at; Start 370; Stop 394
atgggacgtgaagttaaaagcgttg

SEQ ID NO: 130900 - DNA, 25 bp, Artificial
  probe
  misc_feature (1)..(25): SEQ ID NO: 3000; WAN024CS4_at; Start 2; Stop 26
tgttacgatctcaatttgaagaaga

SEQ ID NO: 130901 - DNA, 25 bp, Artificial
  probe
  misc_feature (1)..(25): SEQ ID NO: 3000; WAN024CS4_at; Start 426; Stop 450
ttctgttgacgacgcataccgggtg

SEQ ID NO: 130902 - DNA, 25 bp, Artificial
  probe
  misc_feature (1)..(25): SEQ ID NO: 3000; WAN024CS4_at; Start 25; Stop 49
gatttagagaaattacataaccagt

SEQ ID NO: 130903 - DNA, 25 bp, Artificial
  probe
  misc_feature (1)..(25): SEQ ID NO: 3000; WAN024CS4_at; Start 627; Stop 651
tgaaacaggtaagattgtcgaacta

SEQ ID NO: 130904 - DNA, 25 bp, Artificial
  probe
  misc_feature (1)..(25): SEQ ID NO: 3000; WAN024CS4_at; Start 586; Stop 610
ggtgactatgctaaaaatatctgtg

SEQ ID NO: 130905 - DNA, 25 bp, Artificial
  probe
  misc_feature (1)..(25): SEQ ID NO: 3000; WAN024CS4_at; Start 442; Stop 466
taccgggtggcctccatggatgagc

SEQ ID NO: 130906 - DNA, 25 bp, Artificial
  probe
  misc_feature (1)..(25): SEQ ID NO: 3000; WAN024CS4_at; Start 158; Stop 182
taaatgaatacgaagtgaaactgga

SEQ ID NO: 130907 - DNA, 25 bp, Artificial
  probe
  misc_feature (1)..(25): SEQ ID NO: 3000; WAN024CS4_at; Start 52; Stop 76
tacgctatgggacaagaagtgctct

SEQ ID NO: 130908 - DNA, 25 bp, Artificial
  probe
  misc_feature (1)..(25): SEQ ID NO: 3000; WAN024CS4_at; Start 95; Stop 119
tacgtgcttttgtcacgcatgaccg

SEQ ID NO: 130909 - DNA, 25 bp, Artificial
  probe
  misc_feature (1)..(25): SEQ ID NO: 3000; WAN024CS4_at; Start 285; Stop 309
ggatcacgctgtagccattgcccag

SEQ ID NO: 130910 - DNA, 25 bp, Artificial
  probe
  misc_feature (1)..(25): SEQ ID NO: 3000; WAN024CS4_at; Start 217; Stop 241
ccagtctctcaagatttgcgtacag

SEQ ID NO: 130911 - DNA, 25 bp, Artificial
  probe
  misc_feature (1)..(25): SEQ ID NO: 3000; WAN024CS4_at; Start 198; Stop 222
aatgatcgcactccaacaaccagtc

SEQ ID NO: 130912 - DNA, 25 bp, Artificial
  probe
  misc_feature (1)..(25): SEQ ID NO: 3000; WAN024CS4_at; Start 563; Stop 587
ttatttcctacttggagcgtatcgg

SEQ ID NO: 130913 - DNA, 25 bp, Artificial
  probe
  misc_feature (1)..(25): SEQ ID NO: 3000; WAN024CS4_at; Start 145; Stop 169
gatgatgcagaagtaaatgaatacg

SEQ ID NO: 130914 - DNA, 25 bp, Artificial
  probe
  misc_feature (1)..(25): SEQ ID NO: 3000; WAN024CS4_at; Start 600; Stop 624
aaatatctgtgaatgggttgtctac

SEQ ID NO: 130915 - DNA, 25 bp, Artificial
  probe
  misc_feature (1)..(25): SEQ ID NO: 3000; WAN024CS4_at; Start 613; Stop 637
tgggttgtctactttgaaacaggta

SEQ ID NO: 130916 - DNA, 25 bp, Artificial
  probe
  misc_feature (1)..(25): SEQ ID NO: 3000; WAN024CS4_at; Start 234; Stop 258
gcgtacagtcttgactgtccttaag

SEQ ID NO: 130917 - DNA, 25 bp, Artificial
  probe
  misc_feature (1)..(25): SEQ ID NO: 3000; WAN024CS4_at; Start 415; Stop 439
tatcttaatggttctgttgacgacg

SEQ ID NO: 130918 - DNA, 25 bp, Artificial
  probe
  misc_feature (1)..(25): SEQ ID NO: 3000; WAN024CS4_at; Start 67; Stop 91
gaagtgctctcacaaatcaatcgta

SEQ ID NO: 130919 - DNA, 25 bp, Artificial
  probe
  misc_feature (1)..(25): SEQ ID NO: 5777; WAN024CS5_at; Start 109; Stop 133
cgggttaccagaagcatggtgtact

SEQ ID NO: 130920 - DNA, 25 bp, Artificial
  probe
  misc_feature (1)..(25): SEQ ID NO: 5777; WAN024CS5_at; Start 65; Stop 89
aaaatcctgtcttatcagagatacg

SEQ ID NO: 130921 - DNA, 25 bp, Artificial
  probe
  misc_feature (1)..(25): SEQ ID NO: 5777; WAN024CS5_at; Start 21; Stop 45
catctgcttggtatcattaaattca

SEQ ID NO: 130922 - DNA, 25 bp, Artificial
  probe
  misc_feature (1)..(25): SEQ ID NO: 5777; WAN024CS5_at; Start 186; Stop 210
caaagccgaagttggctcatccaag

SEQ ID NO: 130923 - DNA, 25 bp, Artificial
  probe
  misc_feature (1)..(25): SEQ ID NO: 5777; WAN024CS5_at; Start 60; Stop 84
taggaaaaatcctgtcttatcagag

SEQ ID NO: 130924 - DNA, 25 bp, Artificial
  probe
  misc_feature (1)..(25): SEQ ID NO: 5777; WAN024CS5_at; Start 166; Stop 190
ttaccagctgaaatcggatccaaag

SEQ ID NO: 130925 - DNA, 25 bp, Artificial
  probe
  misc_feature (1)..(25): SEQ ID NO: 5777; WAN024CS5_at; Start 96; Stop 120
ttgctgcatggaacgggttaccaga

SEQ ID NO: 130926 - DNA, 25 bp, Artificial
  probe
  misc_feature (1)..(25): SEQ ID NO: 5777; WAN024CS5_at; Start 190; Stop 214
gccgaagttggctcatccaagagga

SEQ ID NO: 130927 - DNA, 25 bp, Artificial
  probe
  misc_feature (1)..(25): SEQ ID NO: 5777; WAN024CS5_at; Start 101; Stop 125
gcatggaacgggttaccagaagcat

SEQ ID NO: 130928 - DNA, 25 bp, Artificial
  probe
  misc_feature (1)..(25): SEQ ID NO: 5777; WAN024CS5_at; Start 228; Stop 252
agttgccaagacacgggccacgcag

SEQ ID NO: 130929 - DNA, 25 bp, Artificial
  probe
  misc_feature (1)..(25): SEQ ID NO: 5777; WAN024CS5_at; Start 220; Stop 244
ttaggactagttgccaagacacggg

SEQ ID NO: 130930 - DNA, 25 bp, Artificial
  probe
  misc_feature (1)..(25): SEQ ID NO: 5777; WAN024CS5_at; Start 75; Stop 99
cttatcagagatacgtgaagcttgc

SEQ ID NO: 130931 - DNA, 25 bp, Artificial
  probe
  misc_feature (1)..(25): SEQ ID NO: 5777; WAN024CS5_at; Start 47; Stop 71
tcaaatctccatctaggaaaaatcc

SEQ ID NO: 130932 - DNA, 25 bp, Artificial
  probe
  misc_feature (1)..(25): SEQ ID NO: 5777; WAN024CS5_at; Start 153; Stop 177
ggtttcctcaattttaccagctgaa

SEQ ID NO: 130933 - DNA, 25 bp, Artificial
  probe
  misc_feature (1)..(25): SEQ ID NO: 5777; WAN024CS5_at; Start 206; Stop 230
ccaagaggatgattttaggactagt

SEQ ID NO: 130934 - DNA, 25 bp, Artificial
  probe
  misc_feature (1)..(25): SEQ ID NO: 5777; WAN024CS5_at; Start 223; Stop 247
ggactagttgccaagacacgggcca

SEQ ID NO: 130935 - DNA, 25 bp, Artificial
  probe
  misc_feature (1)..(25): SEQ ID NO: 5777; WAN024CS5_at; Start 52; Stop 76
tctccatctaggaaaaatcctgtct

SEQ ID NO: 130936 - DNA, 25 bp, Artificial
  probe
  misc_feature (1)..(25): SEQ ID NO: 5777; WAN024CS5_at; Start 70; Stop 94
cctgtcttatcagagatacgtgaag

SEQ ID NO: 130937 - DNA, 25 bp, Artificial
  probe
  misc_feature (1)..(25): SEQ ID NO: 5777; WAN024CS5_at; Start 114; Stop 138
taccagaagcatggtgtacttgtct

SEQ ID NO: 130938 - DNA, 25 bp, Artificial
  probe
  misc_feature (1)..(25): SEQ ID NO: 5777; WAN024CS5_at; Start 9; Stop 33
gggatcaaggaacatctgcttggta

SEQ ID NO: 130939 - DNA, 25 bp, Artificial
  probe
  misc_feature (1)..(25): SEQ ID NO: 5777; WAN024CS5_at; Start 134; Stop 158
tgtcttttagaccatacaaggtttc

SEQ ID NO: 130940 - DNA, 25 bp, Artificial
  probe
  misc_feature (1)..(25): SEQ ID NO: 5777; WAN024CS5_at; Start 141; Stop 165
tagaccatacaaggtttcctcaatt

SEQ ID NO: 130941 - DNA, 25 bp, Artificial
  probe
  misc_feature (1)..(25): SEQ ID NO: 5777; WAN024CS5_at; Start 122; Stop 146
gcatggtgtacttgtcttttagacc

SEQ ID NO: 130942 - DNA, 25 bp, Artificial
  probe
  misc_feature (1)..(25): SEQ ID NO: 5777; WAN024CS5_at; Start 86; Stop 110
tacgtgaagcttgctgcatggaacg

SEQ ID NO: 130943 - DNA, 25 bp, Artificial
  probe
  misc_feature (1)..(25): SEQ ID NO: 5777; WAN024CS5_at; Start 106; Stop 130
gaacgggttaccagaagcatggtgt

SEQ ID NO: 130944 - DNA, 25 bp, Artificial
  probe
  misc_feature (1)..(25): SEQ ID NO: 5777; WAN024CS5_at; Start 193; Stop 217
gaagttggctcatccaagaggatga

SEQ ID NO: 130945 - DNA, 25 bp, Artificial
  probe
  misc_feature (1)..(25): SEQ ID NO: 5777; WAN024CS5_at; Start 181; Stop 205
ggatccaaagccgaagttggctcat

SEQ ID NO: 130946 - DNA, 25 bp, Artificial
  probe
  misc_feature (1)..(25): SEQ ID NO: 5777; WAN024CS5_at; Start 172; Stop 196
gctgaaatcggatccaaagccgaag

SEQ ID NO: 130947 - DNA, 25 bp, Artificial
  probe
  misc_feature (1)..(25): SEQ ID NO: 5777; WAN024CS5_at; Start 177; Stop 201
aatcggatccaaagccgaagttggc

SEQ ID NO: 130948 - DNA, 25 bp, Artificial
  probe
  misc_feature (1)..(25): SEQ ID NO: 5777; WAN024CS5_at; Start 93; Stop 117
agcttgctgcatggaacgggttacc

SEQ ID NO: 130949 - DNA, 25 bp, Artificial
  probe
  misc_feature (1)..(25): SEQ ID NO: 5777; WAN024CS5_at; Start 213; Stop 237
gatgattttaggactagttgccaag

SEQ ID NO: 130950 - DNA, 25 bp, Artificial
  probe
  misc_feature (1)..(25): SEQ ID NO: 5777; WAN024CS5_at; Start 17; Stop 41
ggaacatctgcttggtatcattaaa

SEQ ID NO: 130951 - DNA, 25 bp, Artificial
  probe
  misc_feature (1)..(25): SEQ ID NO: 5777; WAN024CS5_at; Start 79; Stop 103
tcagagatacgtgaagcttgctgca

SEQ ID NO: 130952 - DNA, 25 bp, Artificial
  probe
  misc_feature (1)..(25): SEQ ID NO: 5777; WAN024CS5_at; Start 243; Stop 267
ggccacgcagacacgctgctgttga

SEQ ID NO: 130953 - DNA, 25 bp, Artificial
  probe
  misc_feature (1)..(25): SEQ ID NO: 1368; WAN024CS6_at; Start 621; Stop 645
gcagcaagcttcacgtatctctgat

SEQ ID NO: 130954 - DNA, 25 bp, Artificial
  probe
  misc_feature (1)..(25): SEQ ID NO: 1368; WAN024CS6_at; Start 176; Stop 200
cagaggtgaccacaactggatccgt

SEQ ID NO: 130955 - DNA, 25 bp, Artificial
  probe
  misc_feature (1)..(25): SEQ ID NO: 1368; WAN024CS6_at; Start 54; Stop 78
gaaggctttgaatagtgtttcccta

SEQ ID NO: 130956 - DNA, 25 bp, Artificial
  probe
  misc_feature (1)..(25): SEQ ID NO: 1368; WAN024CS6_at; Start 565; Stop 589
gaaaccttgtatggtctaaaagaca

SEQ ID NO: 130957 - DNA, 25 bp, Artificial
  probe
  misc_feature (1)..(25): SEQ ID NO: 1368; WAN024CS6_at; Start 479; Stop 503
cccgtgtcttggcaactagtcctaa

SEQ ID NO: 130958 - DNA, 25 bp, Artificial
  probe
  misc_feature (1)..(25): SEQ ID NO: 1368; WAN024CS6_at; Start 128; Stop 152
ggaagtcaaccctcctcaagtctct

SEQ ID NO: 130959 - DNA, 25 bp, Artificial
  probe
  misc_feature (1)..(25): SEQ ID NO: 1368; WAN024CS6_at; Start 161; Stop 185
tgggagatctcaatccagaggtgac

SEQ ID NO: 130960 - DNA, 25 bp, Artificial
  probe
  misc_feature (1)..(25): SEQ ID NO: 1368; WAN024CS6_at; Start 84; Stop 108
ccaacctaaggaaattacagccttg

SEQ ID NO: 130961 - DNA, 25 bp, Artificial
  probe
  misc_feature (1)..(25): SEQ ID NO: 1368; WAN024CS6_at; Start 188; Stop 212
caactggatccgtggtgtacaatgg

SEQ ID NO: 130962 - DNA, 25 bp, Artificial
  probe
  misc_feature (1)..(25): SEQ ID NO: 1368; WAN024CS6_at; Start 143; Stop 167
tcaagtctctcaaccgcatgggaga

SEQ ID NO: 130963 - DNA, 25 bp, Artificial
  probe
  misc_feature (1)..(25): SEQ ID NO: 1368; WAN024CS6_at; Start 348; Stop 372
ggataagcaggttctggatgaagcc

SEQ ID NO: 130964 - DNA, 25 bp, Artificial
  probe
  misc_feature (1)..(25): SEQ ID NO: 1368; WAN024CS6_at; Start 221; Stop 245
tctacagtccgcgtacagatacggt

SEQ ID NO: 130965 - DNA, 25 bp, Artificial
  probe
  misc_feature (1)..(25): SEQ ID NO: 1368; WAN024CS6_at; Start 3; Stop 27
gacagatgcgattttacaggtatca

SEQ ID NO: 130966 - DNA, 25 bp, Artificial
  probe
  misc_feature (1)..(25): SEQ ID NO: 1368; WAN024CS6_at; Start 99; Stop 123
tacagccttgattggtccatctgga

SEQ ID NO: 130967 - DNA, 25 bp, Artificial
  probe
  misc_feature (1)..(25): SEQ ID NO: 1368; WAN024CS6_at; Start 509; Stop 533
tcctcttggatgagccaacttcggc

SEQ ID NO: 130968 - DNA, 25 bp, Artificial
  probe
  misc_feature (1)..(25): SEQ ID NO: 1368; WAN024CS6_at; Start 450; Stop 474
aggtggtcaacagcagcgtgtctgc

SEQ ID NO: 130969 - DNA, 25 bp, Artificial
  probe
  misc_feature (1)..(25): SEQ ID NO: 1368; WAN024CS6_at; Start 364; Stop 388
gatgaagccgtagaaaaagccttgc

SEQ ID NO: 130970 - DNA, 25 bp, Artificial
  probe
  misc_feature (1)..(25): SEQ ID NO: 1368; WAN024CS6_at; Start 718; Stop 742
cacaaggaaacggaagactatatta

SEQ ID NO: 130971 - DNA, 25 bp, Artificial
  probe
  misc_feature (1)..(25): SEQ ID NO: 1368; WAN024CS6_at; Start 236; Stop 260
cagatacggttgaattacgtaagga

SEQ ID NO: 130972 - DNA, 25 bp, Artificial
  probe
  misc_feature (1)..(25): SEQ ID NO: 1368; WAN024CS6_at; Start 307; Stop 331
tatgagaatgttgtctacgggcttc

SEQ ID NO: 130973 - DNA, 25 bp, Artificial
  probe
  misc_feature (1)..(25): SEQ ID NO: 1368; WAN024CS6_at; Start 606; Stop 630
ggtaacccgttccatgcagcaagct

SEQ ID NO: 130974 - DNA, 25 bp, Artificial
  probe
  misc_feature (1)..(25): SEQ ID NO: 1368; WAN024CS6_at; Start 682; Stop 706
tttaatgataccaagcagatgttcc

SEQ ID NO: 130975 - DNA, 25 bp, Artificial
  probe
  misc_feature (1)..(25): SEQ ID NO: 1368; WAN024CS6_at; Start 289; Stop 313
cctttccctatgactatctatgaga

SEQ ID NO: 130976 - DNA, 25 bp, Artificial
  probe
  misc_feature (1)..(25): SEQ ID NO: 1368; WAN024CS6_at; Start 578; Stop 602
gtctaaaagacaagtacaccatgct

SEQ ID NO: 130977 - DNA, 25 bp, Artificial
  probe
  misc_feature (1)..(25): SEQ ID NO: 1368; WAN024CS6_at; Start 114; Stop 138
tccatctggatcagggaagtcaacc

SEQ ID NO: 130978 - DNA, 25 bp, Artificial
  probe
  misc_feature (1)..(25): SEQ ID NO: 1368; WAN024CS6_at; Start 413; Stop 437
tcaaggatcgtctatatgattcagc

SEQ ID NO: 130979 - DNA, 25 bp, Artificial
  probe
  misc_feature (1)..(25): SEQ ID NO: 1368; WAN024CS6_at; Start 464; Stop 488
agcgtgtctgcgtggcccgtgtctt

SEQ ID NO: 130980 - DNA, 25 bp, Artificial
  probe
  misc_feature (1)..(25): SEQ ID NO: 1368; WAN024CS6_at; Start 26; Stop 50
cagacctgtccgtttattataataa

SEQ ID NO: 130981 - DNA, 25 bp, Artificial
  probe
  misc_feature (1)..(25): SEQ ID NO: 1368; WAN024CS6_at; Start 322; Stop 346
tacgggcttcgtatcaatggaatta

SEQ ID NO: 130982 - DNA, 25 bp, Artificial
  probe
  misc_feature (1)..(25): SEQ ID NO: 1368; WAN024CS6_at; Start 592; Stop 616
tacaccatgcttctggtaacccgtt

SEQ ID NO: 130983 - DNA, 25 bp, Artificial
  probe
  misc_feature (1)..(25): SEQ ID NO: 1368; WAN024CS6_at; Start 397; Stop 421
tctatctgggatgaggtcaaggatc

SEQ ID NO: 130984 - DNA, 25 bp, Artificial
  probe
  misc_feature (1)..(25): SEQ ID NO: 1368; WAN024CS6_at; Start 648; Stop 672
gacaggatttttcctagatggagat

SEQ ID NO: 130985 - DNA, 25 bp, Artificial
  probe
  misc_feature (1)..(25): SEQ ID NO: 1368; WAN024CS6_at; Start 434; Stop 458
cagctattggattgtcaggtggtca

SEQ ID NO: 130986 - DNA, 25 bp, Artificial
  probe
  misc_feature (1)..(25): SEQ ID NO: 1368; WAN024CS6_at; Start 382; Stop 406
gccttgcaaggtgcctctatctggg

SEQ ID NO: 130987 - DNA, 25 bp, Artificial
  probe
  misc_feature (1)..(25): SEQ ID NO: 1969; WAN024CS7_at; Start 39; Stop 63
gcaaaatatcggctttcccaagact

SEQ ID NO: 130988 - DNA, 25 bp, Artificial
  probe
  misc_feature (1)..(25): SEQ ID NO: 1969; WAN024CS7_at; Start 153; Stop 177
gatccagaacagtcacttcttcctg

SEQ ID NO: 130989 - DNA, 25 bp, Artificial
  probe
  misc_feature (1)..(25): SEQ ID NO: 1969; WAN024CS7_at; Start 76; Stop 100
tcgctgggcaacctgcataacctgc

SEQ ID NO: 130990 - DNA, 25 bp, Artificial
  probe
  misc_feature (1)..(25): SEQ ID NO: 1969; WAN024CS7_at; Start 45; Stop 69
tatcggctttcccaagactaaatcc

SEQ ID NO: 130991 - DNA, 25 bp, Artificial
  probe
  misc_feature (1)..(25): SEQ ID NO: 1969; WAN024CS7_at; Start 87; Stop 111
cctgcataacctgctcctgatagag

SEQ ID NO: 130992 - DNA, 25 bp, Artificial
  probe
  misc_feature (1)..(25): SEQ ID NO: 1969; WAN024CS7_at; Start 28; Stop 52
catagcccgacgcaaaatatcggct

SEQ ID NO: 130993 - DNA, 25 bp, Artificial
  probe
  misc_feature (1)..(25): SEQ ID NO: 1969; WAN024CS7_at; Start 209; Stop 233
tagtcactagcacccggtcgattta

SEQ ID NO: 130994 - DNA, 25 bp, Artificial
  probe
  misc_feature (1)..(25): SEQ ID NO: 1969; WAN024CS7_at; Start 187; Stop 211
tcttgccacaaaattattgatatag

SEQ ID NO: 130995 - DNA, 25 bp, Artificial
  probe
  misc_feature (1)..(25): SEQ ID NO: 1969; WAN024CS7_at; Start 143; Stop 167
tccagtactggatccagaacagtca

SEQ ID NO: 130996 - DNA, 25 bp, Artificial
  probe
  misc_feature (1)..(25): SEQ ID NO: 1969; WAN024CS7_at; Start 114; Stop 138
ttatgccgtaggttggagccaaaat

SEQ ID NO: 130997 - DNA, 25 bp, Artificial
  probe
  misc_feature (1)..(25): SEQ ID NO: 1969; WAN024CS7_at; Start 1; Stop 25
atgcatggcagaggcatcctttttc

SEQ ID NO: 130998 - DNA, 25 bp, Artificial
  probe
  misc_feature (1)..(25): SEQ ID NO: 1969; WAN024CS7_at; Start 205; Stop 229
gatatagtcactagcacccggtcga

SEQ ID NO: 130999 - DNA, 25 bp, Artificial
  probe
  misc_feature (1)..(25): SEQ ID NO: 1969; WAN024CS7_at; Start 7; Stop 31
ggcagaggcatcctttttccccata

SEQ ID NO: 131000 - DNA, 25 bp, Artificial
  probe
  misc_feature (1)..(25): SEQ ID NO: 1969; WAN024CS7_at; Start 81; Stop 105
gggcaacctgcataacctgctcctg

SEQ ID NO: 131001 - DNA, 25 bp, Artificial
  probe
  misc_feature (1)..(25): SEQ ID NO: 1969; WAN024CS7_at; Start 101; Stop 125
tcctgatagagcattatgccgtagg

SEQ ID NO: 131002 - DNA, 25 bp, Artificial
  probe
  misc_feature (1)..(25): SEQ ID NO: 1969; WAN024CS7_at; Start 201; Stop 225
tattgatatagtcactagcacccgg

SEQ ID NO: 131003 - DNA, 25 bp, Artificial
  probe
  misc_feature (1)..(25): SEQ ID NO: 1969; WAN024CS7_at; Start 10; Stop 34
agaggcatcctttttccccatagcc

SEQ ID NO: 131004 - DNA, 25 bp, Artificial
  probe
  misc_feature (1)..(25): SEQ ID NO: 1969; WAN024CS7_at; Start 4; Stop 28
catggcagaggcatcctttttcccc

SEQ ID NO: 131005 - DNA, 25 bp, Artificial
  probe
  misc_feature (1)..(25): SEQ ID NO: 1969; WAN024CS7_at; Start 176; Stop 200
tgcccatgctttcttgccacaaaat

SEQ ID NO: 131006 - DNA, 25 bp, Artificial
  probe
  misc_feature (1)..(25): SEQ ID NO: 1969; WAN024CS7_at; Start 90; Stop 114
gcataacctgctcctgatagagcat

SEQ ID NO: 131007 - DNA, 25 bp, Artificial
  probe
  misc_feature (1)..(25): SEQ ID NO: 1969; WAN024CS7_at; Start 50; Stop 74
gctttcccaagactaaatccggcaa

SEQ ID NO: 131008 - DNA, 25 bp, Artificial
  probe
  misc_feature (1)..(25): SEQ ID NO: 1969; WAN024CS7_at; Start 109; Stop 133
gagcattatgccgtaggttggagcc

SEQ ID NO: 131009 - DNA, 25 bp, Artificial
  probe
  misc_feature (1)..(25): SEQ ID NO: 1969; WAN024CS7_at; Start 36; Stop 60
gacgcaaaatatcggctttcccaag

SEQ ID NO: 131010 - DNA, 25 bp, Artificial
  probe
  misc_feature (1)..(25): SEQ ID NO: 1969; WAN024CS7_at; Start 112; Stop 136
cattatgccgtaggttggagccaaa

SEQ ID NO: 131011 - DNA, 25 bp, Artificial
  probe
  misc_feature (1)..(25): SEQ ID NO: 1969; WAN024CS7_at; Start 129; Stop 153
gagccaaaatatcctccagtactgg

SEQ ID NO: 131012 - DNA, 25 bp, Artificial
  probe
  misc_feature (1)..(25): SEQ ID NO: 1969; WAN024CS7_at; Start 124; Stop 148
ggttggagccaaaatatcctccagt

SEQ ID NO: 131013 - DNA, 25 bp, Artificial
  probe
  misc_feature (1)..(25): SEQ ID NO: 1969; WAN024CS7_at; Start 98; Stop 122
tgctcctgatagagcattatgccgt

SEQ ID NO: 131014 - DNA, 25 bp, Artificial
  probe
  misc_feature (1)..(25): SEQ ID NO: 1969; WAN024CS7_at; Start 163; Stop 187
agtcacttcttcctgcccatgcttt

SEQ ID NO: 131015 - DNA, 25 bp, Artificial
  probe
  misc_feature (1)..(25): SEQ ID NO: 1969; WAN024CS7_at; Start 136; Stop 160
aatatcctccagtactggatccaga

SEQ ID NO: 131016 - DNA, 25 bp, Artificial
  probe
  misc_feature (1)..(25): SEQ ID NO: 1969; WAN024CS7_at; Start 119; Stop 143
ccgtaggttggagccaaaatatcct

SEQ ID NO: 131017 - DNA, 25 bp, Artificial
  probe
  misc_feature (1)..(25): SEQ ID NO: 1969; WAN024CS7_at; Start 207; Stop 231
tatagtcactagcacccggtcgatt

SEQ ID NO: 131018 - DNA, 25 bp, Artificial
  probe
  misc_feature (1)..(25): SEQ ID NO: 1969; WAN024CS7_at; Start 183; Stop 207
gctttcttgccacaaaattattgat

SEQ ID NO: 131019 - DNA, 25 bp, Artificial
  probe
  misc_feature (1)..(25): SEQ ID NO: 1969; WAN024CS7_at; Start 159; Stop 183
gaacagtcacttcttcctgcccatg

SEQ ID NO: 131020 - DNA, 25 bp, Artificial
  probe
  misc_feature (1)..(25): SEQ ID NO: 1969; WAN024CS7_at; Start 148; Stop 172
tactggatccagaacagtcacttct

SEQ ID NO: 131021 - DNA, 25 bp, Artificial
  probe
  misc_feature (1)..(25): SEQ ID NO: 3186; WAN024CS8-3_at; Start 1425; Stop 1449
tttaaaggcccaatcccagtcatca

SEQ ID NO: 131022 - DNA, 25 bp, Artificial
  probe
  misc_feature (1)..(25): SEQ ID NO: 3186; WAN024CS8-3_at; Start 1439; Stop 1463
cccagtcatcatccggtatgaagag

SEQ ID NO: 131023 - DNA, 25 bp, Artificial
  probe
  misc_feature (1)..(25): SEQ ID NO: 3186; WAN024CS8-3_at; Start 828; Stop 852
cctctgctagaacctttggtaaaag

SEQ ID NO: 131024 - DNA, 25 bp, Artificial
  probe
  misc_feature (1)..(25): SEQ ID NO: 3186; WAN024CS8-3_at; Start 1014; Stop 1038
caagagcttttagggataggtgtca

SEQ ID NO: 131025 - DNA, 25 bp, Artificial
  probe
  misc_feature (1)..(25): SEQ ID NO: 3186; WAN024CS8-3_at; Start 1342; Stop 1366
taagagaagcagttgctgaacgctt

SEQ ID NO: 131026 - DNA, 25 bp, Artificial
  probe
  misc_feature (1)..(25): SEQ ID NO: 3186; WAN024CS8-3_at; Start 1500; Stop 1524
gctaaatccaatgaattagaggaga

SEQ ID NO: 131027 - DNA, 25 bp, Artificial
  probe
  misc_feature (1)..(25): SEQ ID NO: 3186; WAN024CS8-3_at; Start 1294; Stop 1318
gaaaaatacaatcacgtgatggccg

SEQ ID NO: 131028 - DNA, 25 bp, Artificial
  probe
  misc_feature (1)..(25): SEQ ID NO: 3186; WAN024CS8-3_at; Start 67; Stop 91
caaaaggtatctttcaatttgagca

SEQ ID NO: 131029 - DNA, 25 bp, Artificial
  probe
  misc_feature (1)..(25): SEQ ID NO: 3186; WAN024CS8-3_at; Start 1327; Stop 1351
tgattgcacaagaaataagagaagc

SEQ ID NO: 131030 - DNA, 25 bp, Artificial
  probe
  misc_feature (1)..(25): SEQ ID NO: 3186; WAN024CS8-3_at; Start 1234; Stop 1258
cagacttatatcgtcaggttggaca

SEQ ID NO: 131031 - DNA, 25 bp, Artificial
  probe
  misc_feature (1)..(25): SEQ ID NO: 3186; WAN024CS8-3_at; Start 1217; Stop 1241
ggatgtcactctcttttcagactta

SEQ ID NO: 131032 - DNA, 25 bp, Artificial
  probe
  misc_feature (1)..(25): SEQ ID NO: 3186; WAN024CS8-3_at; Start 996; Stop 1020
gaaaaattttatatggaacaagagc

SEQ ID NO: 131033 - DNA, 25 bp, Artificial
  probe
  misc_feature (1)..(25): SEQ ID NO: 3186; WAN024CS8-3_at; Start 674; Stop 698
ctatcacgataaaattgccaacaag

SEQ ID NO: 131034 - DNA, 25 bp, Artificial
  probe
  misc_feature (1)..(25): SEQ ID NO: 3186; WAN024CS8-3_at; Start 123; Stop 147
caaccagtctgttttgaagatgtcg

SEQ ID NO: 131035 - DNA, 25 bp, Artificial
  probe
  misc_feature (1)..(25): SEQ ID NO: 3186; WAN024CS8-3_at; Start 397; Stop 421
agatgagggcttcctttattcaagg

SEQ ID NO: 131036 - DNA, 25 bp, Artificial
  probe
  misc_feature (1)..(25): SEQ ID NO: 3186; WAN024CS8-3_at; Start 812; Stop 836
gaattatctgaaacttcctctgcta

SEQ ID NO: 131037 - DNA, 25 bp, Artificial
  probe
  misc_feature (1)..(25): SEQ ID NO: 3186; WAN024CS8-3_at; Start 1484; Stop 1508
tccccatcattttgtagctaaatcc

SEQ ID NO: 131038 - DNA, 25 bp, Artificial
  probe
  misc_feature (1)..(25): SEQ ID NO: 3186; WAN024CS8-3_at; Start 1253; Stop 1277
tggacaggaaataaaagagggagcc

SEQ ID NO: 131039 - DNA, 25 bp, Artificial
  probe
  misc_feature (1)..(25): SEQ ID NO: 3186; WAN024CS8-3_at; Start 1358; Stop 1382
tgaacgcttttggatacaggtgaaa

SEQ ID NO: 131040 - DNA, 25 bp, Artificial
  probe
  misc_feature (1)..(25): SEQ ID NO: 3186; WAN024CS8-3_at; Start 1205; Stop 1229
taagaaaaaattggatgtcactctc

SEQ ID NO: 131041 - DNA, 25 bp, Artificial
  probe
  misc_feature (1)..(25): SEQ ID NO: 3186; WAN024CS8-3_at; Start 1386; Stop 1410
catgaatcggatcaagaaatttcac

SEQ ID NO: 131042 - DNA, 25 bp, Artificial
  probe
  misc_feature (1)..(25): SEQ ID NO: 3186; WAN024CS8-3_at; Start 1062; Stop 1086
gcaagtaaggctatttacccgatta

SEQ ID NO: 131043 - DNA, 25 bp, Artificial
  probe
  misc_feature (1)..(25): SEQ ID NO: 3186; WAN024CS8-3_at; Start 1374; Stop 1398
caggtgaaaaatcatgaatcggatc

SEQ ID NO: 131044 - DNA, 25 bp, Artificial
  probe
  misc_feature (1)..(25): SEQ ID NO: 3186; WAN024CS8-3_at; Start 1269; Stop 1293
gagggagccttctactatgtaaaag

SEQ ID NO: 131045 - DNA, 25 bp, Artificial
  probe
  misc_feature (1)..(25): SEQ ID NO: 3186; WAN024CS8-3_at; Start 1048; Stop 1072
cactacaagctattgcaagtaaggc

SEQ ID NO: 131046 - DNA, 25 bp, Artificial
  probe
  misc_feature (1)..(25): SEQ ID NO: 3186; WAN024CS8-3_at; Start 213; Stop 237
catgggcaggaagaagtgactgttc

SEQ ID NO: 131047 - DNA, 25 bp, Artificial
  probe
  misc_feature (1)..(25): SEQ ID NO: 3186; WAN024CS8-3_at; Start 613; Stop 637
acttaatagatgcacttgaagcagg

SEQ ID NO: 131048 - DNA, 25 bp, Artificial
  probe
  misc_feature (1)..(25): SEQ ID NO: 3186; WAN024CS8-3_at; Start 954; Stop 978
gctatttatagttggcaggaatcgg

SEQ ID NO: 131049 - DNA, 25 bp, Artificial
  probe
  misc_feature (1)..(25): SEQ ID NO: 3186; WAN024CS8-3_at; Start 1455; Stop 1479
tatgaagaggaacagaaaaccatcg

SEQ ID NO: 131050 - DNA, 25 bp, Artificial
  probe
  misc_feature (1)..(25): SEQ ID NO: 3186; WAN024CS8-3_at; Start 969; Stop 993
caggaatcggaagattggacggaac

SEQ ID NO: 131051 - DNA, 25 bp, Artificial
  probe
  misc_feature (1)..(25): SEQ ID NO: 3186; WAN024CS8-3_at; Start 286; Stop 310
tctatcaggagcaggttatgcaggt

SEQ ID NO: 131052 - DNA, 25 bp, Artificial
  probe
  misc_feature (1)..(25): SEQ ID NO: 3186; WAN024CS8-3_at; Start 1082; Stop 1106
gattaccccaatcggaaatttgtca

SEQ ID NO: 131053 - DNA, 25 bp, Artificial
  probe
  misc_feature (1)..(25): SEQ ID NO: 3186; WAN024CS8-3_at; Start 1173; Stop 1197
gaaaatatggccttcttacaggcag

SEQ ID NO: 131054 - DNA, 25 bp, Artificial
  probe
  misc_feature (1)..(25): SEQ ID NO: 3186; WAN024CS8-3_at; Start 1139; Stop 1163
tcagaaaataaaagtgattcgtacc

SEQ ID NO: 131055 - DNA, 25 bp, Artificial
  probe
  misc_feature (1)..(25): SEQ ID NO: 3953; WAN024CS8-5_at; Start 546; Stop 570
taaagaaaatctaccgctcagagaa

SEQ ID NO: 131056 - DNA, 25 bp, Artificial
  probe
  misc_feature (1)..(25): SEQ ID NO: 3953; WAN024CS8-5_at; Start 1489; Stop 1513
aagatggactttctgggactacgaa

SEQ ID NO: 131057 - DNA, 25 bp, Artificial
  probe
  misc_feature (1)..(25): SEQ ID NO: 3953; WAN024CS8-5_at; Start 437; Stop 461
tttatccagaaacactagcaagcga

SEQ ID NO: 131058 - DNA, 25 bp, Artificial
  probe
  misc_feature (1)..(25): SEQ ID NO: 3953; WAN024CS8-5_at; Start 193; Stop 217
tacggcattcatcctttgctagggc

SEQ ID NO: 131059 - DNA, 25 bp, Artificial
  probe
  misc_feature (1)..(25): SEQ ID NO: 3953; WAN024CS8-5_at; Start 1357; Stop 1381
caaacctctgtccatgcggctggtg

SEQ ID NO: 131060 - DNA, 25 bp, Artificial
  probe
  misc_feature (1)..(25): SEQ ID NO: 3953; WAN024CS8-5_at; Start 708; Stop 732
gaaactgcctcgttttaatccagct

SEQ ID NO: 131061 - DNA, 25 bp, Artificial
  probe
  misc_feature (1)..(25): SEQ ID NO: 3953; WAN024CS8-5_at; Start 286; Stop 310
tatcagcagttgatgaagctttcga

SEQ ID NO: 131062 - DNA, 25 bp, Artificial
  probe
  misc_feature (1)..(25): SEQ ID NO: 3953; WAN024CS8-5_at; Start 270; Stop 294
tctatctagtgtgggctatcagcag

SEQ ID NO: 131063 - DNA, 25 bp, Artificial
  probe
  misc_feature (1)..(25): SEQ ID NO: 3953; WAN024CS8-5_at; Start 676; Stop 700
tcaggcatttcttacgacttggata

SEQ ID NO: 131064 - DNA, 25 bp, Artificial
  probe
  misc_feature (1)..(25): SEQ ID NO: 3953; WAN024CS8-5_at; Start 1329; Stop 1353
tgcttgcaagatagagggctatcca

SEQ ID NO: 131065 - DNA, 25 bp, Artificial
  probe
  misc_feature (1)..(25): SEQ ID NO: 3953; WAN024CS8-5_at; Start 1274; Stop 1298
tccagtttcgtcagcaaatcaatag

SEQ ID NO: 131066 - DNA, 25 bp, Artificial
  probe
  misc_feature (1)..(25): SEQ ID NO: 3953; WAN024CS8-5_at; Start 352; Stop 376
cagtacctggaggatatcgcggtca

SEQ ID NO: 131067 - DNA, 25 bp, Artificial
  probe
  misc_feature (1)..(25): SEQ ID NO: 3953; WAN024CS8-5_at; Start 96; Stop 120
tgtgagagcagctaaagaatacggc

SEQ ID NO: 131068 - DNA, 25 bp, Artificial
  probe
  misc_feature (1)..(25): SEQ ID NO: 3953; WAN024CS8-5_at; Start 16; Stop 40
gagaagtgtaaattgatcgcacaac

SEQ ID NO: 131069 - DNA, 25 bp, Artificial
  probe
  misc_feature (1)..(25): SEQ ID NO: 3953; WAN024CS8-5_at; Start 112; Stop 136
gaatacggctacactcatttggcta

SEQ ID NO: 131070 - DNA, 25 bp, Artificial
  probe
  misc_feature (1)..(25): SEQ ID NO: 3953; WAN024CS8-5_at; Start 157; Stop 181
tatggcgctttcgactttctagaga

SEQ ID NO: 131071 - DNA, 25 bp, Artificial
  probe
  misc_feature (1)..(25): SEQ ID NO: 3953; WAN024CS8-5_at; Start 1460; Stop 1484
ctcatggagttgaggctagcggact

SEQ ID NO: 131072 - DNA, 25 bp, Artificial
  probe
  misc_feature (1)..(25): SEQ ID NO: 3953; WAN024CS8-5_at; Start 1474; Stop 1498
gctagcggacttttgaagatggact

SEQ ID NO: 131073 - DNA, 25 bp, Artificial
  probe
  misc_feature (1)..(25): SEQ ID NO: 3953; WAN024CS8-5_at; Start 300; Stop 324
gaagctttcgacagccaagatgcag

SEQ ID NO: 131074 - DNA, 25 bp, Artificial
  probe
  misc_feature (1)..(25): SEQ ID NO: 3953; WAN024CS8-5_at; Start 1244; Stop 1268
acaatcttaagtcggcctatgaggg

SEQ ID NO: 131075 - DNA, 25 bp, Artificial
  probe
  misc_feature (1)..(25): SEQ ID NO: 3953; WAN024CS8-5_at; Start 330; Stop 354
gaaaacttggtcagtcctgtcccag

SEQ ID NO: 131076 - DNA, 25 bp, Artificial
  probe
  misc_feature (1)..(25): SEQ ID NO: 3953; WAN024CS8-5_at; Start 953; Stop 977
tttcttatgccttagacatcacggg

SEQ ID NO: 131077 - DNA, 25 bp, Artificial
  probe
  misc_feature (1)..(25): SEQ ID NO: 3953; WAN024CS8-5_at; Start 141; Stop 165
ggatattgacaatctttatggcgct

SEQ ID NO: 131078 - DNA, 25 bp, Artificial
  probe
  misc_feature (1)..(25): SEQ ID NO: 3953; WAN024CS8-5_at; Start 1142; Stop 1166
tttcaacctttggagccaagcaagc

SEQ ID NO: 131079 - DNA, 25 bp, Artificial
  probe
  misc_feature (1)..(25): SEQ ID NO: 3953; WAN024CS8-5_at; Start 643; Stop 667
ccgcaagctttggacaatttagaaa

SEQ ID NO: 131080 - DNA, 25 bp, Artificial
  probe
  misc_feature (1)..(25): SEQ ID NO: 3953; WAN024CS8-5_at; Start 66; Stop 90
tatggaaagcgtcatttcgatcgaa

SEQ ID NO: 131081 - DNA, 25 bp, Artificial
  probe
  misc_feature (1)..(25): SEQ ID NO: 3953; WAN024CS8-5_at; Start 1009; Stop 1033
gaacgctttcttaatcgtgaacgct

SEQ ID NO: 131082 - DNA, 25 bp, Artificial
  probe
  misc_feature (1)..(25): SEQ ID NO: 3953; WAN024CS8-5_at; Start 489; Stop 513
tcgggtcaacgcttttgaaagcagg

SEQ ID NO: 131083 - DNA, 25 bp, Artificial
  probe
  misc_feature (1)..(25): SEQ ID NO: 3953; WAN024CS8-5_at; Start 1111; Stop 1135
ggtagtaaacatgcggcacaaatcg

SEQ ID NO: 131084 - DNA, 25 bp, Artificial
  probe
  misc_feature (1)..(25): SEQ ID NO: 3953; WAN024CS8-5_at; Start 1442; Stop 1466
cactgactcagtatgatgctcatgg

SEQ ID NO: 131085 - DNA, 25 bp, Artificial
  probe
  misc_feature (1)..(25): SEQ ID NO: 3953; WAN024CS8-5_at; Start 587; Stop 611
gacaagatgtctttatatcagcaag

SEQ ID NO: 131086 - DNA, 25 bp, Artificial
  probe
  misc_feature (1)..(25): SEQ ID NO: 3953; WAN024CS8-5_at; Start 566; Stop 590
gagaagttcccttgcgttcgagaca

SEQ ID NO: 131087 - DNA, 25 bp, Artificial
  probe
  misc_feature (1)..(25): SEQ ID NO: 3953; WAN024CS8-5_at; Start 83; Stop 107
cgatcgaaaagtatgtgagagcagc

SEQ ID NO: 131088 - DNA, 25 bp, Artificial
  probe
  misc_feature (1)..(25): SEQ ID NO: 3953; WAN024CS8-5_at; Start 723; Stop 747
taatccagctagaccagcagtagag

SEQ ID NO: 131089 - DNA, 25 bp, Artificial
  probe
  misc_feature (1)..(25): SEQ ID NO: 6639; WAN024CS9_at; Start 84; Stop 108
ggttacagcgctatcagaagccaat

SEQ ID NO: 131090 - DNA, 25 bp, Artificial
  probe
  misc_feature (1)..(25): SEQ ID NO: 6639; WAN024CS9_at; Start 95; Stop 119
tatcagaagccaatacaacaccatt

SEQ ID NO: 131091 - DNA, 25 bp, Artificial
  probe
  misc_feature (1)..(25): SEQ ID NO: 6639; WAN024CS9_at; Start 166; Stop 190
tctaaacctgctcatgctctaatgg

SEQ ID NO: 131092 - DNA, 25 bp, Artificial
  probe
  misc_feature (1)..(25): SEQ ID NO: 6639; WAN024CS9_at; Start 79; Stop 103
gataaggttacagcgctatcagaag

SEQ ID NO: 131093 - DNA, 25 bp, Artificial
  probe
  misc_feature (1)..(25): SEQ ID NO: 6639; WAN024CS9_at; Start 30; Stop 54
agtgaataattttcgggcgctatta

SEQ ID NO: 131094 - DNA, 25 bp, Artificial
  probe
  misc_feature (1)..(25): SEQ ID NO: 6639; WAN024CS9_at; Start 207; Stop 231
ttaccaagacttgccaacactttta

SEQ ID NO: 131095 - DNA, 25 bp, Artificial
  probe
  misc_feature (1)..(25): SEQ ID NO: 6639; WAN024CS9_at; Start 74; Stop 98
cgtctgataaggttacagcgctatc

SEQ ID NO: 131096 - DNA, 25 bp, Artificial
  probe
  misc_feature (1)..(25): SEQ ID NO: 6639; WAN024CS9_at; Start 134; Stop 158
caatttctgctgtcaaaatatcacc

SEQ ID NO: 131097 - DNA, 25 bp, Artificial
  probe
  misc_feature (1)..(25): SEQ ID NO: 6639; WAN024CS9_at; Start 195; Stop 219
acagctaaggtcttaccaagacttg

SEQ ID NO: 131098 - DNA, 25 bp, Artificial
  probe
  misc_feature (1)..(25): SEQ ID NO: 6639; WAN024CS9_at; Start 7; Stop 31
cccacggaatgttcttttgataaag

SEQ ID NO: 131099 - DNA, 25 bp, Artificial
  probe
  misc_feature (1)..(25): SEQ ID NO: 6639; WAN024CS9_at; Start 178; Stop 202
catgctctaatggtacaacagctaa

SEQ ID NO: 131100 - DNA, 25 bp, Artificial
  probe
  misc_feature (1)..(25): SEQ ID NO: 6639; WAN024CS9_at; Start 82; Stop 106
aaggttacagcgctatcagaagcca

SEQ ID NO: 131101 - DNA, 25 bp, Artificial
  probe
  misc_feature (1)..(25): SEQ ID NO: 6639; WAN024CS9_at; Start 233; Stop 257
tactgtatcaagttgtgggcttgtc

SEQ ID NO: 131102 - DNA, 25 bp, Artificial
  probe
  misc_feature (1)..(25): SEQ ID NO: 6639; WAN024CS9_at; Start 91; Stop 115
gcgctatcagaagccaatacaacac

SEQ ID NO: 131103 - DNA, 25 bp, Artificial
  probe
  misc_feature (1)..(25): SEQ ID NO: 6639; WAN024CS9_at; Start 174; Stop 198
tgctcatgctctaatggtacaacag

SEQ ID NO: 131104 - DNA, 25 bp, Artificial
  probe
  misc_feature (1)..(25): SEQ ID NO: 6639; WAN024CS9_at; Start 228; Stop 252
tttaatactgtatcaagttgtgggc

SEQ ID NO: 131105 - DNA, 25 bp, Artificial
  probe
  misc_feature (1)..(25): SEQ ID NO: 6639; WAN024CS9_at; Start 97; Stop 121
tcagaagccaatacaacaccatttt

SEQ ID NO: 131106 - DNA, 25 bp, Artificial
  probe
  misc_feature (1)..(25): SEQ ID NO: 6639; WAN024CS9_at; Start 100; Stop 124
gaagccaatacaacaccatttttat

SEQ ID NO: 131107 - DNA, 25 bp, Artificial
  probe
  misc_feature (1)..(25): SEQ ID NO: 6639; WAN024CS9_at; Start 87; Stop 111
tacagcgctatcagaagccaataca

SEQ ID NO: 131108 - DNA, 25 bp, Artificial
  probe
  misc_feature (1)..(25): SEQ ID NO: 6639; WAN024CS9_at; Start 237; Stop 261
gtatcaagttgtgggcttgtctttc

SEQ ID NO: 131109 - DNA, 25 bp, Artificial
  probe
  misc_feature (1)..(25): SEQ ID NO: 6639; WAN024CS9_at; Start 152; Stop 176
tatcacctaaactttctaaacctgc

SEQ ID NO: 131110 - DNA, 25 bp, Artificial
  probe
  misc_feature (1)..(25): SEQ ID NO: 6639; WAN024CS9_at; Start 214; Stop 238
gacttgccaacacttttaatactgt

SEQ ID NO: 131111 - DNA, 25 bp, Artificial
  probe
  misc_feature (1)..(25): SEQ ID NO: 6639; WAN024CS9_at; Start 25; Stop 49
gataaagtgaataattttcgggcgc

SEQ ID NO: 131112 - DNA, 25 bp, Artificial
  probe
  misc_feature (1)..(25): SEQ ID NO: 6639; WAN024CS9_at; Start 68; Stop 92
ttttcccgtctgataaggttacagc

SEQ ID NO: 131113 - DNA, 25 bp, Artificial
  probe
  misc_feature (1)..(25): SEQ ID NO: 6639; WAN024CS9_at; Start 2; Stop 26
tgatccccacggaatgttcttttga

SEQ ID NO: 131114 - DNA, 25 bp, Artificial
  probe
  misc_feature (1)..(25): SEQ ID NO: 6639; WAN024CS9_at; Start 126; Stop 150
taatattccaatttctgctgtcaaa

SEQ ID NO: 131115 - DNA, 25 bp, Artificial
  probe
  misc_feature (1)..(25): SEQ ID NO: 6639; WAN024CS9_at; Start 170; Stop 194
aacctgctcatgctctaatggtaca

SEQ ID NO: 131116 - DNA, 25 bp, Artificial
  probe
  misc_feature (1)..(25): SEQ ID NO: 6639; WAN024CS9_at; Start 27; Stop 51
taaagtgaataattttcgggcgcta

SEQ ID NO: 131117 - DNA, 25 bp, Artificial
  probe
  misc_feature (1)..(25): SEQ ID NO: 6639; WAN024CS9_at; Start 11; Stop 35
cggaatgttcttttgataaagtgaa

SEQ ID NO: 131118 - DNA, 25 bp, Artificial
  probe
  misc_feature (1)..(25): SEQ ID NO: 6639; WAN024CS9_at; Start 252; Stop 276
cttgtctttcctgtttccattctag

SEQ ID NO: 131119 - DNA, 25 bp, Artificial
  probe
  misc_feature (1)..(25): SEQ ID NO: 6639; WAN024CS9_at; Start 141; Stop 165
tgctgtcaaaatatcacctaaactt

SEQ ID NO: 131120 - DNA, 25 bp, Artificial
  probe
  misc_feature (1)..(25): SEQ ID NO: 6639; WAN024CS9_at; Start 71; Stop 95
tcccgtctgataaggttacagcgct

SEQ ID NO: 131121 - DNA, 25 bp, Artificial
  probe
  misc_feature (1)..(25): SEQ ID NO: 6639; WAN024CS9_at; Start 191; Stop 215
tacaacagctaaggtcttaccaaga

SEQ ID NO: 131122 - DNA, 25 bp, Artificial
  probe
  misc_feature (1)..(25): SEQ ID NO: 6639; WAN024CS9_at; Start 159; Stop 183
taaactttctaaacctgctcatgct

SEQ ID NO: 131123 - DNA, 25 bp, Artificial
  probe
  misc_feature (1)..(25): SEQ ID NO: 686; WAN024CSA_at; Start 139; Stop 163
cagaagaaactagaggagatgagcg

SEQ ID NO: 131124 - DNA, 25 bp, Artificial
  probe
  misc_feature (1)..(25): SEQ ID NO: 686; WAN024CSA_at; Start 68; Stop 92
ttttggaaagtgatatgcgcgtggc

SEQ ID NO: 131125 - DNA, 25 bp, Artificial
  probe
  misc_feature (1)..(25): SEQ ID NO: 686; WAN024CSA_at; Start 130; Stop 154
ggtattagtcagaagaaactagagg

SEQ ID NO: 131126 - DNA, 25 bp, Artificial
  probe
  misc_feature (1)..(25): SEQ ID NO: 686; WAN024CSA_at; Start 70; Stop 94
ttggaaagtgatatgcgcgtggcta

SEQ ID NO: 131127 - DNA, 25 bp, Artificial
  probe
  misc_feature (1)..(25): SEQ ID NO: 686; WAN024CSA_at; Start 204; Stop 228
gacaagcccacaacttgatacagta

SEQ ID NO: 131128 - DNA, 25 bp, Artificial
  probe
  misc_feature (1)..(25): SEQ ID NO: 686; WAN024CSA_at; Start 269; Stop 293
taccattagagcatgagcaggttct

SEQ ID NO: 131129 - DNA, 25 bp, Artificial
  probe
  misc_feature (1)..(25): SEQ ID NO: 686; WAN024CSA_at; Start 255; Stop 279
gaccttagctgttgtaccattagag

SEQ ID NO: 131130 - DNA, 25 bp, Artificial
  probe
  misc_feature (1)..(25): SEQ ID NO: 686; WAN024CSA_at; Start 234; Stop 258
agtgttggcaagtcttggtaagacc

SEQ ID NO: 131131 - DNA, 25 bp, Artificial
  probe
  misc_feature (1)..(25): SEQ ID NO: 686; WAN024CSA_at; Start 242; Stop 266
caagtcttggtaagaccttagctgt

SEQ ID NO: 131132 - DNA, 25 bp, Artificial
  probe
  misc_feature (1)..(25): SEQ ID NO: 686; WAN024CSA_at; Start 44; Stop 68
ctgaattattcagcaaagaggaaat

SEQ ID NO: 131133 - DNA, 25 bp, Artificial
  probe
  misc_feature (1)..(25): SEQ ID NO: 686; WAN024CSA_at; Start 6; Stop 30
aaataatgctattggtagtaactgg

SEQ ID NO: 131134 - DNA, 25 bp, Artificial
  probe
  misc_feature (1)..(25): SEQ ID NO: 686; WAN024CSA_at; Start 209; Stop 233
gcccacaacttgatacagtattaaa

SEQ ID NO: 131135 - DNA, 25 bp, Artificial
  probe
  misc_feature (1)..(25): SEQ ID NO: 686; WAN024CSA_at; Start 197; Stop 221
caggaaagacaagcccacaacttga

SEQ ID NO: 131136 - DNA, 25 bp, Artificial
  probe
  misc_feature (1)..(25): SEQ ID NO: 686; WAN024CSA_at; Start 10; Stop 34
aatgctattggtagtaactggaaag

SEQ ID NO: 131137 - DNA, 25 bp, Artificial
  probe
  misc_feature (1)..(25): SEQ ID NO: 686; WAN024CSA_at; Start 34; Stop 58
gatgtaagagctgaattattcagca

SEQ ID NO: 131138 - DNA, 25 bp, Artificial
  probe
  misc_feature (1)..(25): SEQ ID NO: 686; WAN024CSA_at; Start 168; Stop 192
tagtcagccagttatcgctagaatg

SEQ ID NO: 131139 - DNA, 25 bp, Artificial
  probe
  misc_feature (1)..(25): SEQ ID NO: 686; WAN024CSA_at; Start 171; Stop 195
tcagccagttatcgctagaatggaa

SEQ ID NO: 131140 - DNA, 25 bp, Artificial
  probe
  misc_feature (1)..(25): SEQ ID NO: 686; WAN024CSA_at; Start 156; Stop 180
gatgagcggtgttagtcagccagtt

SEQ ID NO: 131141 - DNA, 25 bp, Artificial
  probe
  misc_feature (1)..(25): SEQ ID NO: 686; WAN024CSA_at; Start 115; Stop 139
gctagaaatgaaaagggtattagtc

SEQ ID NO: 131142 - DNA, 25 bp, Artificial
  probe
  misc_feature (1)..(25): SEQ ID NO: 686; WAN024CSA_at; Start 227; Stop 251
tattaaaagtgttggcaagtcttgg

SEQ ID NO: 131143 - DNA, 25 bp, Artificial
  probe
  misc_feature (1)..(25): SEQ ID NO: 686; WAN024CSA_at; Start 188; Stop 212
gaatggaaacaggaaagacaagccc

SEQ ID NO: 131144 - DNA, 25 bp, Artificial
  probe
  misc_feature (1)..(25): SEQ ID NO: 686; WAN024CSA_at; Start 145; Stop 169
aaactagaggagatgagcggtgtta

SEQ ID NO: 131145 - DNA, 25 bp, Artificial
  probe
  misc_feature (1)..(25): SEQ ID NO: 686; WAN024CSA_at; Start 224; Stop 248
cagtattaaaagtgttggcaagtct

SEQ ID NO: 131146 - DNA, 25 bp, Artificial
  probe
  misc_feature (1)..(25): SEQ ID NO: 686; WAN024CSA_at; Start 262; Stop 286
gctgttgtaccattagagcatgagc

SEQ ID NO: 131147 - DNA, 25 bp, Artificial
  probe
  misc_feature (1)..(25): SEQ ID NO: 686; WAN024CSA_at; Start 108; Stop 132
tatcgaggctagaaatgaaaagggt

SEQ ID NO: 131148 - DNA, 25 bp, Artificial
  probe
  misc_feature (1)..(25): SEQ ID NO: 686; WAN024CSA_at; Start 191; Stop 215
tggaaacaggaaagacaagcccaca

SEQ ID NO: 131149 - DNA, 25 bp, Artificial
  probe
  misc_feature (1)..(25): SEQ ID NO: 686; WAN024CSA_at; Start 83; Stop 107
tgcgcgtggctatcatgagtgagct

SEQ ID NO: 131150 - DNA, 25 bp, Artificial
  probe
  misc_feature (1)..(25): SEQ ID NO: 686; WAN024CSA_at; Start 176; Stop 200
cagttatcgctagaatggaaacagg

SEQ ID NO: 131151 - DNA, 25 bp, Artificial
  probe
  misc_feature (1)..(25): SEQ ID NO: 686; WAN024CSA_at; Start 99; Stop 123
gagtgagcttatcgaggctagaaat

SEQ ID NO: 131152 - DNA, 25 bp, Artificial
  probe
  misc_feature (1)..(25): SEQ ID NO: 686; WAN024CSA_at; Start 92; Stop 116
ctatcatgagtgagcttatcgaggc

SEQ ID NO: 131153 - DNA, 25 bp, Artificial
  probe
  misc_feature (1)..(25): SEQ ID NO: 686; WAN024CSA_at; Start 53; Stop 77
tcagcaaagaggaaattttggaaag

SEQ ID NO: 131154 - DNA, 25 bp, Artificial
  probe
  misc_feature (1)..(25): SEQ ID NO: 686; WAN024CSA_at; Start 24; Stop 48
taactggaaagatgtaagagctgaa

SEQ ID NO: 131155 - DNA, 25 bp, Artificial
  probe
  misc_feature (1)..(25): SEQ ID NO: 686; WAN024CSA_at; Start 182; Stop 206
tcgctagaatggaaacaggaaagac

SEQ ID NO: 131156 - DNA, 25 bp, Artificial
  probe
  misc_feature (1)..(25): SEQ ID NO: 686; WAN024CSA_at; Start 96; Stop 120
catgagtgagcttatcgaggctaga

SEQ ID NO: 131157 - DNA, 25 bp, Artificial
  probe
  misc_feature (1)..(25): SEQ ID NO: 5024; WAN024CSB_at; Start 162; Stop 186
cgcttcgtttatggaaattccgtgg

SEQ ID NO: 131158 - DNA, 25 bp, Artificial
  probe
  misc_feature (1)..(25): SEQ ID NO: 5024; WAN024CSB_at; Start 1044; Stop 1068
gagaaaaattgtcaacactcttgaa

SEQ ID NO: 131159 - DNA, 25 bp, Artificial
  probe
  misc_feature (1)..(25): SEQ ID NO: 5024; WAN024CSB_at; Start 201; Stop 225
tgagtttaagcaggctattggcaca

SEQ ID NO: 131160 - DNA, 25 bp, Artificial
  probe
  misc_feature (1)..(25): SEQ ID NO: 5024; WAN024CSB_at; Start 389; Stop 413
gagtttctaatggtgaaaccatcac

SEQ ID NO: 131161 - DNA, 25 bp, Artificial
  probe
  misc_feature (1)..(25): SEQ ID NO: 5024; WAN024CSB_at; Start 232; Stop 256
ttagataatactgcccaatacgttg

SEQ ID NO: 131162 - DNA, 25 bp, Artificial
  probe
  misc_feature (1)..(25): SEQ ID NO: 5024; WAN024CSB_at; Start 1001; Stop 1025
tggcgagtacagctaaaacatttat

SEQ ID NO: 131163 - DNA, 25 bp, Artificial
  probe
  misc_feature (1)..(25): SEQ ID NO: 5024; WAN024CSB_at; Start 119; Stop 143
ctttatcaaaagaacattccgtggg

SEQ ID NO: 131164 - DNA, 25 bp, Artificial
  probe
  misc_feature (1)..(25): SEQ ID NO: 5024; WAN024CSB_at; Start 1073; Stop 1097
taggaggtccggtagatgtacttgc

SEQ ID NO: 131165 - DNA, 25 bp, Artificial
  probe
  misc_feature (1)..(25): SEQ ID NO: 5024; WAN024CSB_at; Start 623; Stop 647
gatatgactcaacaaacataactgg

SEQ ID NO: 131166 - DNA, 25 bp, Artificial
  probe
  misc_feature (1)..(25): SEQ ID NO: 5024; WAN024CSB_at; Start 783; Stop 807
tataatcccttttgcacagtcagag

SEQ ID NO: 131167 - DNA, 25 bp, Artificial
  probe
  misc_feature (1)..(25): SEQ ID NO: 5024; WAN024CSB_at; Start 654; Stop 678
tatagcaggttatggtacagacgag

SEQ ID NO: 131168 - DNA, 25 bp, Artificial
  probe
  misc_feature (1)..(25): SEQ ID NO: 5024; WAN024CSB_at; Start 984; Stop 1008
gcaaccacttaatgaaatggcgagt

SEQ ID NO: 131169 - DNA, 25 bp, Artificial
  probe
  misc_feature (1)..(25): SEQ ID NO: 5024; WAN024CSB_at; Start 245; Stop 269
cccaatacgttgaaaagctaataga

SEQ ID NO: 131170 - DNA, 25 bp, Artificial
  probe
  misc_feature (1)..(25): SEQ ID NO: 5024; WAN024CSB_at; Start 1087; Stop 1111
gatgtacttgctatttctaaaggag

SEQ ID NO: 131171 - DNA, 25 bp, Artificial
  probe
  misc_feature (1)..(25): SEQ ID NO: 5024; WAN024CSB_at; Start 1059; Stop 1083
cactcttgaaacagtaggaggtccg

SEQ ID NO: 131172 - DNA, 25 bp, Artificial
  probe
  misc_feature (1)..(25): SEQ ID NO: 5024; WAN024CSB_at; Start 96; Stop 120
taatagcgcccgaaaattattcact

SEQ ID NO: 131173 - DNA, 25 bp, Artificial
  probe
  misc_feature (1)..(25): SEQ ID NO: 5024; WAN024CSB_at; Start 553; Stop 577
aaatcctttcctcatactgatgatg

SEQ ID NO: 131174 - DNA, 25 bp, Artificial
  probe
  misc_feature (1)..(25): SEQ ID NO: 5024; WAN024CSB_at; Start 29; Stop 53
aaaatggtgttgtattggcttctga

SEQ ID NO: 131175 - DNA, 25 bp, Artificial
  probe
  misc_feature (1)..(25): SEQ ID NO: 5024; WAN024CSB_at; Start 875; Stop 899
cagttatggagaaaaatggattggg

SEQ ID NO: 131176 - DNA, 25 bp, Artificial
  probe
  misc_feature (1)..(25): SEQ ID NO: 5024; WAN024CSB_at; Start 144; Stop 168
gatcatgatatatgggaacgcttcg

SEQ ID NO: 131177 - DNA, 25 bp, Artificial
  probe
  misc_feature (1)..(25): SEQ ID NO: 5024; WAN024CSB_at; Start 280; Stop 304
tcctttaaacatctacaagttgagg

SEQ ID NO: 131178 - DNA, 25 bp, Artificial
  probe
  misc_feature (1)..(25): SEQ ID NO: 5024; WAN024CSB_at; Start 1165; Stop 1189
gattacaggatgagaaaggagagtc

SEQ ID NO: 131179 - DNA, 25 bp, Artificial
  probe
  misc_feature (1)..(25): SEQ ID NO: 5024; WAN024CSB_at; Start 43; Stop 67
ttggcttctgatagcgctgtaacct

SEQ ID NO: 131180 - DNA, 25 bp, Artificial
  probe
  misc_feature (1)..(25): SEQ ID NO: 5024; WAN024CSB_at; Start 58; Stop 82
gctgtaaccttatcagacgggaaaa

SEQ ID NO: 131181 - DNA, 25 bp, Artificial
  probe
  misc_feature (1)..(25): SEQ ID NO: 5024; WAN024CSB_at; Start 968; Stop 992
tagaccttattggaatgcaaccact

SEQ ID NO: 131182 - DNA, 25 bp, Artificial
  probe
  misc_feature (1)..(25): SEQ ID NO: 5024; WAN024CSB_at; Start 859; Stop 883
gcagagcaagtatcatcagttatgg

SEQ ID NO: 131183 - DNA, 25 bp, Artificial
  probe
  misc_feature (1)..(25): SEQ ID NO: 5024; WAN024CSB_at; Start 338; Stop 362
gaagtattttggacagcattgccta

SEQ ID NO: 131184 - DNA, 25 bp, Artificial
  probe
  misc_feature (1)..(25): SEQ ID NO: 5024; WAN024CSB_at; Start 673; Stop 697
gacgagatatttccatctataagac

SEQ ID NO: 131185 - DNA, 25 bp, Artificial
  probe
  misc_feature (1)..(25): SEQ ID NO: 5024; WAN024CSB_at; Start 797; Stop 821
cacagtcagagatggttgagacgat

SEQ ID NO: 131186 - DNA, 25 bp, Artificial
  probe
  misc_feature (1)..(25): SEQ ID NO: 5024; WAN024CSB_at; Start 845; Stop 869
taaatgtatatatcgcagagcaagt

SEQ ID NO: 131187 - DNA, 25 bp, Artificial
  probe
  misc_feature (1)..(25): SEQ ID NO: 5024; WAN024CSB_at; Start 816; Stop 840
gacgattatgaatggtatagatcct

SEQ ID NO: 131188 - DNA, 25 bp, Artificial
  probe
  misc_feature (1)..(25): SEQ ID NO: 5024; WAN024CSB_at; Start 520; Stop 544
gagttaataaaaagcattgtagacg

SEQ ID NO: 131189 - DNA, 25 bp, Artificial
  probe
  misc_feature (1)..(25): SEQ ID NO: 5024; WAN024CSB_at; Start 358; Stop 382
gcctatgaagcgcaagaaacagctg

SEQ ID NO: 131190 - DNA, 25 bp, Artificial
  probe
  misc_feature (1)..(25): SEQ ID NO: 5024; WAN024CSB_at; Start 1102; Stop 1126
tctaaaggagaaggaccaatttgga

SEQ ID NO: 131191 - DNA, 25 bp, Artificial
  probe
  misc_feature (1)..(25): SEQ ID NO: 6986; WAN024CSC_at; Start 13; Stop 37
tcaacttgtccgatagacgctgcgt

SEQ ID NO: 131192 - DNA, 25 bp, Artificial
  probe
  misc_feature (1)..(25): SEQ ID NO: 6986; WAN024CSC_at; Start 110; Stop 134
tgagaacacggctctcttgttgcgc

SEQ ID NO: 131193 - DNA, 25 bp, Artificial
  probe
  misc_feature (1)..(25): SEQ ID NO: 6986; WAN024CSC_at; Start 100; Stop 124
tctgaaagcatgagaacacggctct

SEQ ID NO: 131194 - DNA, 25 bp, Artificial
  probe
  misc_feature (1)..(25): SEQ ID NO: 6986; WAN024CSC_at; Start 205; Stop 229
accccatgttgtagaatgtttccga

SEQ ID NO: 131195 - DNA, 25 bp, Artificial
  probe
  misc_feature (1)..(25): SEQ ID NO: 6986; WAN024CSC_at; Start 97; Stop 121
tggtctgaaagcatgagaacacggc

SEQ ID NO: 131196 - DNA, 25 bp, Artificial
  probe
  misc_feature (1)..(25): SEQ ID NO: 6986; WAN024CSC_at; Start 113; Stop 137
gaacacggctctcttgttgcgcatc

SEQ ID NO: 131197 - DNA, 25 bp, Artificial
  probe
  misc_feature (1)..(25): SEQ ID NO: 6986; WAN024CSC_at; Start 145; Stop 169
ttagcacccttgatgatgtggccga

SEQ ID NO: 131198 - DNA, 25 bp, Artificial
  probe
  misc_feature (1)..(25): SEQ ID NO: 6986; WAN024CSC_at; Start 163; Stop 187
tggccgataccattgaaagtcaaag

SEQ ID NO: 131199 - DNA, 25 bp, Artificial
  probe
  misc_feature (1)..(25): SEQ ID NO: 6986; WAN024CSC_at; Start 168; Stop 192
gataccattgaaagtcaaagttgct

SEQ ID NO: 131200 - DNA, 25 bp, Artificial
  probe
  misc_feature (1)..(25): SEQ ID NO: 6986; WAN024CSC_at; Start 189; Stop 213
tgctttttcaaggataaccccatgt

SEQ ID NO: 131201 - DNA, 25 bp, Artificial
  probe
  misc_feature (1)..(25): SEQ ID NO: 6986; WAN024CSC_at; Start 17; Stop 41
cttgtccgatagacgctgcgtgtcc

SEQ ID NO: 131202 - DNA, 25 bp, Artificial
  probe
  misc_feature (1)..(25): SEQ ID NO: 6986; WAN024CSC_at; Start 36; Stop 60
gtgtcctgcagtgacatcattttca

SEQ ID NO: 131203 - DNA, 25 bp, Artificial
  probe
  misc_feature (1)..(25): SEQ ID NO: 6986; WAN024CSC_at; Start 197; Stop 221
caaggataaccccatgttgtagaat

SEQ ID NO: 131204 - DNA, 25 bp, Artificial
  probe
  misc_feature (1)..(25): SEQ ID NO: 6986; WAN024CSC_at; Start 117; Stop 141
acggctctcttgttgcgcatctgct

SEQ ID NO: 131205 - DNA, 25 bp, Artificial
  probe
  misc_feature (1)..(25): SEQ ID NO: 6986; WAN024CSC_at; Start 59; Stop 83
catcaatcaaaagaattgggttagc

SEQ ID NO: 131206 - DNA, 25 bp, Artificial
  probe
  misc_feature (1)..(25): SEQ ID NO: 6986; WAN024CSC_at; Start 103; Stop 127
gaaagcatgagaacacggctctctt

SEQ ID NO: 131207 - DNA, 25 bp, Artificial
  probe
  misc_feature (1)..(25): SEQ ID NO: 6986; WAN024CSC_at; Start 126; Stop 150
ttgttgcgcatctgctcccttagca

SEQ ID NO: 131208 - DNA, 25 bp, Artificial
  probe
  misc_feature (1)..(25): SEQ ID NO: 6986; WAN024CSC_at; Start 1; Stop 25
atgtcttctggatcaacttgtccga

SEQ ID NO: 131209 - DNA, 25 bp, Artificial
  probe
  misc_feature (1)..(25): SEQ ID NO: 6986; WAN024CSC_at; Start 159; Stop 183
gatgtggccgataccattgaaagtc

SEQ ID NO: 131210 - DNA, 25 bp, Artificial
  probe
  misc_feature (1)..(25): SEQ ID NO: 6986; WAN024CSC_at; Start 88; Stop 112
gaacgcgcttggtctgaaagcatga

SEQ ID NO: 131211 - DNA, 25 bp, Artificial
  probe
  misc_feature (1)..(25): SEQ ID NO: 6986; WAN024CSC_at; Start 9; Stop 33
tggatcaacttgtccgatagacgct

SEQ ID NO: 131212 - DNA, 25 bp, Artificial
  probe
  misc_feature (1)..(25): SEQ ID NO: 6986; WAN024CSC_at; Start 26; Stop 50
tagacgctgcgtgtcctgcagtgac

SEQ ID NO: 131213 - DNA, 25 bp, Artificial
  probe
  misc_feature (1)..(25): SEQ ID NO: 6986; WAN024CSC_at; Start 77; Stop 101
ggttagcatctgaacgcgcttggtc

SEQ ID NO: 131214 - DNA, 25 bp, Artificial
  probe
  misc_feature (1)..(25): SEQ ID NO: 6986; WAN024CSC_at; Start 218; Stop 242
gaatgtttccgattgagttgcagcc

SEQ ID NO: 131215 - DNA, 25 bp, Artificial
  probe
  misc_feature (1)..(25): SEQ ID NO: 6986; WAN024CSC_at; Start 156; Stop 180
gatgatgtggccgataccattgaaa

SEQ ID NO: 131216 - DNA, 25 bp, Artificial
  probe
  misc_feature (1)..(25): SEQ ID NO: 6986; WAN024CSC_at; Start 71; Stop 95
gaattgggttagcatctgaacgcgc

SEQ ID NO: 131217 - DNA, 25 bp, Artificial
  probe
  misc_feature (1)..(25): SEQ ID NO: 6986; WAN024CSC_at; Start 83; Stop 107
catctgaacgcgcttggtctgaaag

SEQ ID NO: 131218 - DNA, 25 bp, Artificial
  probe
  misc_feature (1)..(25): SEQ ID NO: 6986; WAN024CSC_at; Start 21; Stop 45
tccgatagacgctgcgtgtcctgca

SEQ ID NO: 131219 - DNA, 25 bp, Artificial
  probe
  misc_feature (1)..(25): SEQ ID NO: 6986; WAN024CSC_at; Start 31; Stop 55
gctgcgtgtcctgcagtgacatcat

SEQ ID NO: 131220 - DNA, 25 bp, Artificial
  probe
  misc_feature (1)..(25): SEQ ID NO: 6986; WAN024CSC_at; Start 43; Stop 67
gcagtgacatcattttcatcaatca

SEQ ID NO: 131221 - DNA, 25 bp, Artificial
  probe
  misc_feature (1)..(25): SEQ ID NO: 6986; WAN024CSC_at; Start 182; Stop 206
tcaaagttgctttttcaaggataac

SEQ ID NO: 131222 - DNA, 25 bp, Artificial
  probe
  misc_feature (1)..(25): SEQ ID NO: 6986; WAN024CSC_at; Start 139; Stop 163
gctcccttagcacccttgatgatgt

SEQ ID NO: 131223 - DNA, 25 bp, Artificial
  probe
  misc_feature (1)..(25): SEQ ID NO: 6986; WAN024CSC_at; Start 222; Stop 246
gtttccgattgagttgcagccatag

SEQ ID NO: 131224 - DNA, 25 bp, Artificial
  probe
  misc_feature (1)..(25): SEQ ID NO: 6986; WAN024CSC_at; Start 150; Stop 174
acccttgatgatgtggccgatacca

SEQ ID NO: 131225 - DNA, 25 bp, Artificial
  probe
  misc_feature (1)..(25): SEQ ID NO: 7295; WAN024CSD_at; Start 148; Stop 172
ggaacttcaggtaaagggatgctca

SEQ ID NO: 131226 - DNA, 25 bp, Artificial
  probe
  misc_feature (1)..(25): SEQ ID NO: 7295; WAN024CSD_at; Start 155; Stop 179
caggtaaagggatgctcatgttgtc

SEQ ID NO: 131227 - DNA, 25 bp, Artificial
  probe
  misc_feature (1)..(25): SEQ ID NO: 7295; WAN024CSD_at; Start 22; Stop 46
gccattccaaatgtgcaagttcaaa

SEQ ID NO: 131228 - DNA, 25 bp, Artificial
  probe
  misc_feature (1)..(25): SEQ ID NO: 7295; WAN024CSD_at; Start 43; Stop 67
caaaatggaaaagtcctggacatca

SEQ ID NO: 131229 - DNA, 25 bp, Artificial
  probe
  misc_feature (1)..(25): SEQ ID NO: 7295; WAN024CSD_at; Start 240; Stop 264
ggcagttcactttgctagtccacca

SEQ ID NO: 131230 - DNA, 25 bp, Artificial
  probe
  misc_feature (1)..(25): SEQ ID NO: 7295; WAN024CSD_at; Start 80; Stop 104
gagattcgtggaagaagcagcctat

SEQ ID NO: 131231 - DNA, 25 bp, Artificial
  probe
  misc_feature (1)..(25): SEQ ID NO: 7295; WAN024CSD_at; Start 313; Stop 337
ttgaccaagtttggcggaaatatca

SEQ ID NO: 131232 - DNA, 25 bp, Artificial
  probe
  misc_feature (1)..(25): SEQ ID NO: 7295; WAN024CSD_at; Start 330; Stop 354
aaatatcacttgtcttagtccagag

SEQ ID NO: 131233 - DNA, 25 bp, Artificial
  probe
  misc_feature (1)..(25): SEQ ID NO: 7295; WAN024CSD_at; Start 140; Stop 164
tgccagttggaacttcaggtaaagg

SEQ ID NO: 131234 - DNA, 25 bp, Artificial
  probe
  misc_feature (1)..(25): SEQ ID NO: 7295; WAN024CSD_at; Start 66; Stop 90
caatcttcagggtggagattcgtgg

SEQ ID NO: 131235 - DNA, 25 bp, Artificial
  probe
  misc_feature (1)..(25): SEQ ID NO: 7295; WAN024CSD_at; Start 374; Stop 398
catctaagctaggaagtcatgctac

SEQ ID NO: 131236 - DNA, 25 bp, Artificial
  probe
  misc_feature (1)..(25): SEQ ID NO: 7295; WAN024CSD_at; Start 321; Stop 345
gtttggcggaaatatcacttgtctt

SEQ ID NO: 131237 - DNA, 25 bp, Artificial
  probe
  misc_feature (1)..(25): SEQ ID NO: 7295; WAN024CSD_at; Start 345; Stop 369
tagtccagagaaatggcggtgctgc

SEQ ID NO: 131238 - DNA, 25 bp, Artificial
  probe
  misc_feature (1)..(25): SEQ ID NO: 7295; WAN024CSD_at; Start 342; Stop 366
tcttagtccagagaaatggcggtgc

SEQ ID NO: 131239 - DNA, 25 bp, Artificial
  probe
  misc_feature (1)..(25): SEQ ID NO: 7295; WAN024CSD_at; Start 181; Stop 205
ggagggattgactcacctgtagcag

SEQ ID NO: 131240 - DNA, 25 bp, Artificial
  probe
  misc_feature (1)..(25): SEQ ID NO: 7295; WAN024CSD_at; Start 273; Stop 297
tcctggtgccctcaagaaagcgcag

SEQ ID NO: 131241 - DNA, 25 bp, Artificial
  probe
  misc_feature (1)..(25): SEQ ID NO: 7295; WAN024CSD_at; Start 255; Stop 279
tagtccaccatatactagtcctggt

SEQ ID NO: 131242 - DNA, 25 bp, Artificial
  probe
  misc_feature (1)..(25): SEQ ID NO: 7295; WAN024CSD_at; Start 132; Stop 156
tggtggtttgccagttggaacttca

SEQ ID NO: 131243 - DNA, 25 bp, Artificial
  probe
  misc_feature (1)..(25): SEQ ID NO: 7295; WAN024CSD_at; Start 35; Stop 59
tgcaagttcaaaatggaaaagtcct

SEQ ID NO: 131244 - DNA, 25 bp, Artificial
  probe
  misc_feature (1)..(25): SEQ ID NO: 7295; WAN024CSD_at; Start 288; Stop 312
gaaagcgcaggacttgacccgtaaa

SEQ ID NO: 131245 - DNA, 25 bp, Artificial
  probe
  misc_feature (1)..(25): SEQ ID NO: 7295; WAN024CSD_at; Start 367; Stop 391
tgcgagccatctaagctaggaagtc

SEQ ID NO: 131246 - DNA, 25 bp, Artificial
  probe
  misc_feature (1)..(25): SEQ ID NO: 7295; WAN024CSD_at; Start 279; Stop 303
tgccctcaagaaagcgcaggacttg

SEQ ID NO: 131247 - DNA, 25 bp, Artificial
  probe
  misc_feature (1)..(25): SEQ ID NO: 7295; WAN024CSD_at; Start 204; Stop 228
aggttatcttgctcttaagcgtggg

SEQ ID NO: 131248 - DNA, 25 bp, Artificial
  probe
  misc_feature (1)..(25): SEQ ID NO: 7295; WAN024CSD_at; Start 200; Stop 224
tagcaggttatcttgctcttaagcg

SEQ ID NO: 131249 - DNA, 25 bp, Artificial
  probe
  misc_feature (1)..(25): SEQ ID NO: 7295; WAN024CSD_at; Start 403; Stop 427
tcatacaattgcataagaacaagag

SEQ ID NO: 131250 - DNA, 25 bp, Artificial
  probe
  misc_feature (1)..(25): SEQ ID NO: 7295; WAN024CSD_at; Start 293; Stop 317
cgcaggacttgacccgtaaattgac

SEQ ID NO: 131251 - DNA, 25 bp, Artificial
  probe
  misc_feature (1)..(25): SEQ ID NO: 7295; WAN024CSD_at; Start 170; Stop 194
tcatgttgtcaggagggattgactc

SEQ ID NO: 131252 - DNA, 25 bp, Artificial
  probe
  misc_feature (1)..(25): SEQ ID NO: 7295; WAN024CSD_at; Start 111; Stop 135
tatggaaaccattcgtggggctggt

SEQ ID NO: 131253 - DNA, 25 bp, Artificial
  probe
  misc_feature (1)..(25): SEQ ID NO: 7295; WAN024CSD_at; Start 381; Stop 405
gctaggaagtcatgctactcaatca

SEQ ID NO: 131254 - DNA, 25 bp, Artificial
  probe
  misc_feature (1)..(25): SEQ ID NO: 7295; WAN024CSD_at; Start 360; Stop 384
gcggtgctgcgagccatctaagcta

SEQ ID NO: 131255 - DNA, 25 bp, Artificial
  probe
  misc_feature (1)..(25): SEQ ID NO: 7295; WAN024CSD_at; Start 185; Stop 209
ggattgactcacctgtagcaggtta

SEQ ID NO: 131256 - DNA, 25 bp, Artificial
  probe
  misc_feature (1)..(25): SEQ ID NO: 7295; WAN024CSD_at; Start 265; Stop 289
tatactagtcctggtgccctcaaga

SEQ ID NO: 131257 - DNA, 25 bp, Artificial
  probe
  misc_feature (1)..(25): SEQ ID NO: 7295; WAN024CSD_at; Start 386; Stop 410
gaagtcatgctactcaatcatacaa

SEQ ID NO: 131258 - DNA, 25 bp, Artificial
  probe
  misc_feature (1)..(25): SEQ ID NO: 7295; WAN024CSD_at; Start 13; Stop 37
tattcggaagccattccaaatgtgc

SEQ ID NO: 131259 - DNA, 25 bp, Artificial
  probe
  misc_feature (1)..(25): SEQ ID NO: 4215; WAN024CSE_at; Start 28; Stop 52
aaaggtcataccttccttgtagatg

SEQ ID NO: 131260 - DNA, 25 bp, Artificial
  probe
  misc_feature (1)..(25): SEQ ID NO: 4215; WAN024CSE_at; Start 11; Stop 35
cgcttgctagaaatcttaaaggtca

SEQ ID NO: 131261 - DNA, 25 bp, Artificial
  probe
  misc_feature (1)..(25): SEQ ID NO: 4215; WAN024CSE_at; Start 264; Stop 288
gaagtttattgatgaaacgcatacg

SEQ ID NO: 131262 - DNA, 25 bp, Artificial
  probe
  misc_feature (1)..(25): SEQ ID NO: 4215; WAN024CSE_at; Start 195; Stop 219
gggcacggtcgcgatctgctgttac

SEQ ID NO: 131263 - DNA, 25 bp, Artificial
  probe
  misc_feature (1)..(25): SEQ ID NO: 4215; WAN024CSE_at; Start 37; Stop 61
accttccttgtagatgtcccgcata

SEQ ID NO: 131264 - DNA, 25 bp, Artificial
  probe
  misc_feature (1)..(25): SEQ ID NO: 4215; WAN024CSE_at; Start 2; Stop 26
tggtcgctacgcttgctagaaatct

SEQ ID NO: 131265 - DNA, 25 bp, Artificial
  probe
  misc_feature (1)..(25): SEQ ID NO: 4215; WAN024CSE_at; Start 143; Stop 167
tgtttgagagattctgcaactgctg

SEQ ID NO: 131266 - DNA, 25 bp, Artificial
  probe
  misc_feature (1)..(25): SEQ ID NO: 4215; WAN024CSE_at; Start 41; Stop 65
tccttgtagatgtcccgcataatct

SEQ ID NO: 131267 - DNA, 25 bp, Artificial
  probe
  misc_feature (1)..(25): SEQ ID NO: 4215; WAN024CSE_at; Start 177; Stop 201
ctccattgaggtaagcgtgggcacg

SEQ ID NO: 131268 - DNA, 25 bp, Artificial
  probe
  misc_feature (1)..(25): SEQ ID NO: 4215; WAN024CSE_at; Start 148; Stop 172
gagagattctgcaactgctgtgtaa

SEQ ID NO: 131269 - DNA, 25 bp, Artificial
  probe
  misc_feature (1)..(25): SEQ ID NO: 4215; WAN024CSE_at; Start 165; Stop 189
ctgtgtaatcagctccattgaggta

SEQ ID NO: 131270 - DNA, 25 bp, Artificial
  probe
  misc_feature (1)..(25): SEQ ID NO: 4215; WAN024CSE_at; Start 47; Stop 71
tagatgtcccgcataatctcttgga

SEQ ID NO: 131271 - DNA, 25 bp, Artificial
  probe
  misc_feature (1)..(25): SEQ ID NO: 4215; WAN024CSE_at; Start 81; Stop 105
tcaaaacttctacagatttttcaac

SEQ ID NO: 131272 - DNA, 25 bp, Artificial
  probe
  misc_feature (1)..(25): SEQ ID NO: 4215; WAN024CSE_at; Start 60; Stop 84
taatctcttggacagaagacttcaa

SEQ ID NO: 131273 - DNA, 25 bp, Artificial
  probe
  misc_feature (1)..(25): SEQ ID NO: 4215; WAN024CSE_at; Start 136; Stop 160
aaaaacttgtttgagagattctgca

SEQ ID NO: 131274 - DNA, 25 bp, Artificial
  probe
  misc_feature (1)..(25): SEQ ID NO: 4215; WAN024CSE_at; Start 66; Stop 90
cttggacagaagacttcaaaacttc

SEQ ID NO: 131275 - DNA, 25 bp, Artificial
  probe
  misc_feature (1)..(25): SEQ ID NO: 4215; WAN024CSE_at; Start 235; Stop 259
gatagacaaaacgtccgaaatatta

SEQ ID NO: 131276 - DNA, 25 bp, Artificial
  probe
  misc_feature (1)..(25): SEQ ID NO: 4215; WAN024CSE_at; Start 74; Stop 98
gaagacttcaaaacttctacagatt

SEQ ID NO: 131277 - DNA, 25 bp, Artificial
  probe
  misc_feature (1)..(25): SEQ ID NO: 4215; WAN024CSE_at; Start 128; Stop 152
tgaattccaaaaacttgtttgagag

SEQ ID NO: 131278 - DNA, 25 bp, Artificial
  probe
  misc_feature (1)..(25): SEQ ID NO: 4215; WAN024CSE_at; Start 53; Stop 77
tcccgcataatctcttggacagaag

SEQ ID NO: 131279 - DNA, 25 bp, Artificial
  probe
  misc_feature (1)..(25): SEQ ID NO: 4215; WAN024CSE_at; Start 174; Stop 198
cagctccattgaggtaagcgtgggc

SEQ ID NO: 131280 - DNA, 25 bp, Artificial
  probe
  misc_feature (1)..(25): SEQ ID NO: 4215; WAN024CSE_at; Start 152; Stop 176
gattctgcaactgctgtgtaatcag

SEQ ID NO: 131281 - DNA, 25 bp, Artificial
  probe
  misc_feature (1)..(25): SEQ ID NO: 4215; WAN024CSE_at; Start 170; Stop 194
taatcagctccattgaggtaagcgt

SEQ ID NO: 131282 - DNA, 25 bp, Artificial
  probe
  misc_feature (1)..(25): SEQ ID NO: 4215; WAN024CSE_at; Start 231; Stop 255
tatagatagacaaaacgtccgaaat

SEQ ID NO: 131283 - DNA, 25 bp, Artificial
  probe
  misc_feature (1)..(25): SEQ ID NO: 4215; WAN024CSE_at; Start 200; Stop 224
cggtcgcgatctgctgttaccttaa

SEQ ID NO: 131284 - DNA, 25 bp, Artificial
  probe
  misc_feature (1)..(25): SEQ ID NO: 4215; WAN024CSE_at; Start 250; Stop 274
cgaaatattattacgaagtttattg

SEQ ID NO: 131285 - DNA, 25 bp, Artificial
  probe
  misc_feature (1)..(25): SEQ ID NO: 4215; WAN024CSE_at; Start 7; Stop 31
gctacgcttgctagaaatcttaaag

SEQ ID NO: 131286 - DNA, 25 bp, Artificial
  probe
  misc_feature (1)..(25): SEQ ID NO: 4215; WAN024CSE_at; Start 93; Stop 117
cagatttttcaaccttataaacagg

SEQ ID NO: 131287 - DNA, 25 bp, Artificial
  probe
  misc_feature (1)..(25): SEQ ID NO: 4215; WAN024CSE_at; Start 158; Stop 182
gcaactgctgtgtaatcagctccat

SEQ ID NO: 131288 - DNA, 25 bp, Artificial
  probe
  misc_feature (1)..(25): SEQ ID NO: 4215; WAN024CSE_at; Start 205; Stop 229
gcgatctgctgttaccttaacttgg

SEQ ID NO: 131289 - DNA, 25 bp, Artificial
  probe
  misc_feature (1)..(25): SEQ ID NO: 4215; WAN024CSE_at; Start 56; Stop 80
cgcataatctcttggacagaagact

SEQ ID NO: 131290 - DNA, 25 bp, Artificial
  probe
  misc_feature (1)..(25): SEQ ID NO: 4215; WAN024CSE_at; Start 273; Stop 297
tgatgaaacgcatacggtttttacc

SEQ ID NO: 131291 - DNA, 25 bp, Artificial
  probe
  misc_feature (1)..(25): SEQ ID NO: 4215; WAN024CSE_at; Start 16; Stop 40
gctagaaatcttaaaggtcatacct

SEQ ID NO: 131292 - DNA, 25 bp, Artificial
  probe
  misc_feature (1)..(25): SEQ ID NO: 4215; WAN024CSE_at; Start 33; Stop 57
tcataccttccttgtagatgtcccg

SEQ ID NO: 131293 - DNA, 25 bp, Artificial
  probe
  misc_feature (1)..(25): SEQ ID NO: 1575; WAN024CSF_at; Start 134; Stop 158
tagacaaaatcaatcatctcgccgc

SEQ ID NO: 131294 - DNA, 25 bp, Artificial
  probe
  misc_feature (1)..(25): SEQ ID NO: 1575; WAN024CSF_at; Start 139; Stop 163
aaaatcaatcatctcgccgccaaat

SEQ ID NO: 131295 - DNA, 25 bp, Artificial
  probe
  misc_feature (1)..(25): SEQ ID NO: 1575; WAN024CSF_at; Start 294; Stop 318
gaggtgtagattgagcaccatccac

SEQ ID NO: 131296 - DNA, 25 bp, Artificial
  probe
  misc_feature (1)..(25): SEQ ID NO: 1575; WAN024CSF_at; Start 247; Stop 271
aaaggcgaaaaagtccagatccaag

SEQ ID NO: 131297 - DNA, 25 bp, Artificial
  probe
  misc_feature (1)..(25): SEQ ID NO: 1575; WAN024CSF_at; Start 198; Stop 222
tgccgtaaaggacaccgataccagt

SEQ ID NO: 131298 - DNA, 25 bp, Artificial
  probe
  misc_feature (1)..(25): SEQ ID NO: 1575; WAN024CSF_at; Start 29; Stop 53
ttttccagataatcaactgcagtcg

SEQ ID NO: 131299 - DNA, 25 bp, Artificial
  probe
  misc_feature (1)..(25): SEQ ID NO: 1575; WAN024CSF_at; Start 166; Stop 190
tactggagacatttgctcaagatac

SEQ ID NO: 131300 - DNA, 25 bp, Artificial
  probe
  misc_feature (1)..(25): SEQ ID NO: 1575; WAN024CSF_at; Start 288; Stop 312
tcatatgaggtgtagattgagcacc

SEQ ID NO: 131301 - DNA, 25 bp, Artificial
  probe
  misc_feature (1)..(25): SEQ ID NO: 1575; WAN024CSF_at; Start 217; Stop 241
accagtcggaccagccatcttgtga

SEQ ID NO: 131302 - DNA, 25 bp, Artificial
  probe
  misc_feature (1)..(25): SEQ ID NO: 1575; WAN024CSF_at; Start 203; Stop 227
taaaggacaccgataccagtcggac

SEQ ID NO: 131303 - DNA, 25 bp, Artificial
  probe
  misc_feature (1)..(25): SEQ ID NO: 1575; WAN024CSF_at; Start 147; Stop 171
tcatctcgccgccaaattctactgg

SEQ ID NO: 131304 - DNA, 25 bp, Artificial
  probe
  misc_feature (1)..(25): SEQ ID NO: 1575; WAN024CSF_at; Start 83; Stop 107
gttccagcctcaaatttccaaggca

SEQ ID NO: 131305 - DNA, 25 bp, Artificial
  probe
  misc_feature (1)..(25): SEQ ID NO: 1575; WAN024CSF_at; Start 161; Stop 185
aattctactggagacatttgctcaa

SEQ ID NO: 131306 - DNA, 25 bp, Artificial
  probe
  misc_feature (1)..(25): SEQ ID NO: 1575; WAN024CSF_at; Start 183; Stop 207
caagatacttttctttgccgtaaag

SEQ ID NO: 131307 - DNA, 25 bp, Artificial
  probe
  misc_feature (1)..(25): SEQ ID NO: 1575; WAN024CSF_at; Start 100; Stop 124
ccaaggcaattccttccaactagca

SEQ ID NO: 131308 - DNA, 25 bp, Artificial
  probe
  misc_feature (1)..(25): SEQ ID NO: 1575; WAN024CSF_at; Start 46; Stop 70
tgcagtcgcaagtccaatagctcct

SEQ ID NO: 131309 - DNA, 25 bp, Artificial
  probe
  misc_feature (1)..(25): SEQ ID NO: 1575; WAN024CSF_at; Start 251; Stop 275
gcgaaaaagtccagatccaagtcct

SEQ ID NO: 131310 - DNA, 25 bp, Artificial
  probe
  misc_feature (1)..(25): SEQ ID NO: 1575; WAN024CSF_at; Start 253; Stop 277
gaaaaagtccagatccaagtcctgg

SEQ ID NO: 131311 - DNA, 25 bp, Artificial
  probe
  misc_feature (1)..(25): SEQ ID NO: 1575; WAN024CSF_at; Start 53; Stop 77
gcaagtccaatagctcctgccatat

SEQ ID NO: 131312 - DNA, 25 bp, Artificial
  probe
  misc_feature (1)..(25): SEQ ID NO: 1575; WAN024CSF_at; Start 300; Stop 324
tagattgagcaccatccactaccat

SEQ ID NO: 131313 - DNA, 25 bp, Artificial
  probe
  misc_feature (1)..(25): SEQ ID NO: 1575; WAN024CSF_at; Start 59; Stop 83
ccaatagctcctgccatatttggcg

SEQ ID NO: 131314 - DNA, 25 bp, Artificial
  probe
  misc_feature (1)..(25): SEQ ID NO: 1575; WAN024CSF_at; Start 171; Stop 195
gagacatttgctcaagatacttttc

SEQ ID NO: 131315 - DNA, 25 bp, Artificial
  probe
  misc_feature (1)..(25): SEQ ID NO: 1575; WAN024CSF_at; Start 154; Stop 178
gccgccaaattctactggagacatt

SEQ ID NO: 131316 - DNA, 25 bp, Artificial
  probe
  misc_feature (1)..(25): SEQ ID NO: 1575; WAN024CSF_at; Start 89; Stop 113
gcctcaaatttccaaggcaattcct

SEQ ID NO: 131317 - DNA, 25 bp, Artificial
  probe
  misc_feature (1)..(25): SEQ ID NO: 1575; WAN024CSF_at; Start 259; Stop 283
gtccagatccaagtcctggacatca

SEQ ID NO: 131318 - DNA, 25 bp, Artificial
  probe
  misc_feature (1)..(25): SEQ ID NO: 1575; WAN024CSF_at; Start 71; Stop 95
gccatatttggcgttccagcctcaa

SEQ ID NO: 131319 - DNA, 25 bp, Artificial
  probe
  misc_feature (1)..(25): SEQ ID NO: 1575; WAN024CSF_at; Start 80; Stop 104
ggcgttccagcctcaaatttccaag

SEQ ID NO: 131320 - DNA, 25 bp, Artificial
  probe
  misc_feature (1)..(25): SEQ ID NO: 1575; WAN024CSF_at; Start 34; Stop 58
cagataatcaactgcagtcgcaagt

SEQ ID NO: 131321 - DNA, 25 bp, Artificial
  probe
  misc_feature (1)..(25): SEQ ID NO: 1575; WAN024CSF_at; Start 13; Stop 37
ggcatccataccaatcttttccaga

SEQ ID NO: 131322 - DNA, 25 bp, Artificial
  probe
  misc_feature (1)..(25): SEQ ID NO: 1575; WAN024CSF_at; Start 207; Stop 231
ggacaccgataccagtcggaccagc

SEQ ID NO: 131323 - DNA, 25 bp, Artificial
  probe
  misc_feature (1)..(25): SEQ ID NO: 1575; WAN024CSF_at; Start 276; Stop 300
ggacatcaatcttcatatgaggtgt

SEQ ID NO: 131324 - DNA, 25 bp, Artificial
  probe
  misc_feature (1)..(25): SEQ ID NO: 1575; WAN024CSF_at; Start 127; Stop 151
ttgctcgtagacaaaatcaatcatc

SEQ ID NO: 131325 - DNA, 25 bp, Artificial
  probe
  misc_feature (1)..(25): SEQ ID NO: 1575; WAN024CSF_at; Start 194; Stop 218
tctttgccgtaaaggacaccgatac

SEQ ID NO: 131326 - DNA, 25 bp, Artificial
  probe
  misc_feature (1)..(25): SEQ ID NO: 1575; WAN024CSF_at; Start 38; Stop 62
taatcaactgcagtcgcaagtccaa

SEQ ID NO: 131327 - DNA, 25 bp, Artificial
  probe
  misc_feature (1)..(25): SEQ ID NO: 1821; WAN024CSG_at; Start 236; Stop 260
tgatagccttcatactttcaagggt

SEQ ID NO: 131328 - DNA, 25 bp, Artificial
  probe
  misc_feature (1)..(25): SEQ ID NO: 1821; WAN024CSG_at; Start 94; Stop 118
cgatctggtgcaaaaatggtacaac

SEQ ID NO: 131329 - DNA, 25 bp, Artificial
  probe
  misc_feature (1)..(25): SEQ ID NO: 1821; WAN024CSG_at; Start 34; Stop 58
tcaacatccatacgcgcttcgtact

SEQ ID NO: 131330 - DNA, 25 bp, Artificial
  probe
  misc_feature (1)..(25): SEQ ID NO: 1821; WAN024CSG_at; Start 183; Stop 207
caacttgtccatggtaaccacagga

SEQ ID NO: 131331 - DNA, 25 bp, Artificial
  probe
  misc_feature (1)..(25): SEQ ID NO: 1821; WAN024CSG_at; Start 249; Stop 273
actttcaagggtttggctggctact

SEQ ID NO: 131332 - DNA, 25 bp, Artificial
  probe
  misc_feature (1)..(25): SEQ ID NO: 1821; WAN024CSG_at; Start 80; Stop 104
gatttgtttttggacgatctggtgc

SEQ ID NO: 131333 - DNA, 25 bp, Artificial
  probe
  misc_feature (1)..(25): SEQ ID NO: 1821; WAN024CSG_at; Start 13; Stop 37
actgctcgctcaaccaagccttcaa

SEQ ID NO: 131334 - DNA, 25 bp, Artificial
  probe
  misc_feature (1)..(25): SEQ ID NO: 1821; WAN024CSG_at; Start 28; Stop 52
aagccttcaacatccatacgcgctt

SEQ ID NO: 131335 - DNA, 25 bp, Artificial
  probe
  misc_feature (1)..(25): SEQ ID NO: 1821; WAN024CSG_at; Start 99; Stop 123
tggtgcaaaaatggtacaacagtct

SEQ ID NO: 131336 - DNA, 25 bp, Artificial
  probe
  misc_feature (1)..(25): SEQ ID NO: 1821; WAN024CSG_at; Start 221; Stop 245
tgttggtaacagcattgatagcctt

SEQ ID NO: 131337 - DNA, 25 bp, Artificial
  probe
  misc_feature (1)..(25): SEQ ID NO: 1821; WAN024CSG_at; Start 225; Stop 249
ggtaacagcattgatagccttcata

SEQ ID NO: 131338 - DNA, 25 bp, Artificial
  probe
  misc_feature (1)..(25): SEQ ID NO: 1821; WAN024CSG_at; Start 107; Stop 131
aaatggtacaacagtcttcaaacgg

SEQ ID NO: 131339 - DNA, 25 bp, Artificial
  probe
  misc_feature (1)..(25): SEQ ID NO: 1821; WAN024CSG_at; Start 165; Stop 189
ggcgatgtcaatgatttccaacttg

SEQ ID NO: 131340 - DNA, 25 bp, Artificial
  probe
  misc_feature (1)..(25): SEQ ID NO: 1821; WAN024CSG_at; Start 210; Stop 234
aatgatgggagtgttggtaacagca

SEQ ID NO: 131341 - DNA, 25 bp, Artificial
  probe
  misc_feature (1)..(25): SEQ ID NO: 1821; WAN024CSG_at; Start 177; Stop 201
gatttccaacttgtccatggtaacc

SEQ ID NO: 131342 - DNA, 25 bp, Artificial
  probe
  misc_feature (1)..(25): SEQ ID NO: 1821; WAN024CSG_at; Start 192; Stop 216
catggtaaccacaggacgaatgatg

SEQ ID NO: 131343 - DNA, 25 bp, Artificial
  probe
  misc_feature (1)..(25): SEQ ID NO: 1821; WAN024CSG_at; Start 1; Stop 25
atgattccagccactgctcgctcaa

SEQ ID NO: 131344 - DNA, 25 bp, Artificial
  probe
  misc_feature (1)..(25): SEQ ID NO: 1821; WAN024CSG_at; Start 197; Stop 221
taaccacaggacgaatgatgggagt

SEQ ID NO: 131345 - DNA, 25 bp, Artificial
  probe
  misc_feature (1)..(25): SEQ ID NO: 1821; WAN024CSG_at; Start 125; Stop 149
caaacggttggattgaaatgtcaaa

SEQ ID NO: 131346 - DNA, 25 bp, Artificial
  probe
  misc_feature (1)..(25): SEQ ID NO: 1821; WAN024CSG_at; Start 112; Stop 136
gtacaacagtcttcaaacggttgga

SEQ ID NO: 131347 - DNA, 25 bp, Artificial
  probe
  misc_feature (1)..(25): SEQ ID NO: 1821; WAN024CSG_at; Start 200; Stop 224
ccacaggacgaatgatgggagtgtt

SEQ ID NO: 131348 - DNA, 25 bp, Artificial
  probe
  misc_feature (1)..(25): SEQ ID NO: 1821; WAN024CSG_at; Start 160; Stop 184
tcctgggcgatgtcaatgatttcca

SEQ ID NO: 131349 - DNA, 25 bp, Artificial
  probe
  misc_feature (1)..(25): SEQ ID NO: 1821; WAN024CSG_at; Start 91; Stop 115
ggacgatctggtgcaaaaatggtac

SEQ ID NO: 131350 - DNA, 25 bp, Artificial
  probe
  misc_feature (1)..(25): SEQ ID NO: 1821; WAN024CSG_at; Start 156; Stop 180
gatttcctgggcgatgtcaatgatt

SEQ ID NO: 131351 - DNA, 25 bp, Artificial
  probe
  misc_feature (1)..(25): SEQ ID NO: 1821; WAN024CSG_at; Start 44; Stop 68
tacgcgcttcgtactgctccgcatt

SEQ ID NO: 131352 - DNA, 25 bp, Artificial
  probe
  misc_feature (1)..(25): SEQ ID NO: 1821; WAN024CSG_at; Start 245; Stop 269
tcatactttcaagggtttggctggc

SEQ ID NO: 131353 - DNA, 25 bp, Artificial
  probe
  misc_feature (1)..(25): SEQ ID NO: 1821; WAN024CSG_at; Start 145; Stop 169
tcaaaggtatcgatttcctgggcga

SEQ ID NO: 131354 - DNA, 25 bp, Artificial
  probe
  misc_feature (1)..(25): SEQ ID NO: 1821; WAN024CSG_at; Start 150; Stop 174
ggtatcgatttcctgggcgatgtca

SEQ ID NO: 131355 - DNA, 25 bp, Artificial
  probe
  misc_feature (1)..(25): SEQ ID NO: 1821; WAN024CSG_at; Start 172; Stop 196
tcaatgatttccaacttgtccatgg

SEQ ID NO: 131356 - DNA, 25 bp, Artificial
  probe
  misc_feature (1)..(25): SEQ ID NO: 1821; WAN024CSG_at; Start 116; Stop 140
aacagtcttcaaacggttggattga

SEQ ID NO: 131357 - DNA, 25 bp, Artificial
  probe
  misc_feature (1)..(25): SEQ ID NO: 1821; WAN024CSG_at; Start 141; Stop 165
aatgtcaaaggtatcgatttcctgg

SEQ ID NO: 131358 - DNA, 25 bp, Artificial
  probe
  misc_feature (1)..(25): SEQ ID NO: 1821; WAN024CSG_at; Start 62; Stop 86
ccgcattcttaattttaggatttgt

SEQ ID NO: 131359 - DNA, 25 bp, Artificial
  probe
  misc_feature (1)..(25): SEQ ID NO: 1821; WAN024CSG_at; Start 56; Stop 80
actgctccgcattcttaattttagg

SEQ ID NO: 131360 - DNA, 25 bp, Artificial
  probe
  misc_feature (1)..(25): SEQ ID NO: 1821; WAN024CSG_at; Start 49; Stop 73
gcttcgtactgctccgcattcttaa

SEQ ID NO: 131361 - DNA, 25 bp, Artificial
  probe
  misc_feature (1)..(25): SEQ ID NO: 5293; WAN024CSH_at; Start 190; Stop 214
gacaatgccaatgttcaccgtggtg

SEQ ID NO: 131362 - DNA, 25 bp, Artificial
  probe
  misc_feature (1)..(25): SEQ ID NO: 5293; WAN024CSH_at; Start 285; Stop 309
tgcaggctctacaaaggaagttctc

SEQ ID NO: 131363 - DNA, 25 bp, Artificial
  probe
  misc_feature (1)..(25): SEQ ID NO: 5293; WAN024CSH_at; Start 946; Stop 970
catgaacaggaattgattgcgtacg

SEQ ID NO: 131364 - DNA, 25 bp, Artificial
  probe
  misc_feature (1)..(25): SEQ ID NO: 5293; WAN024CSH_at; Start 103; Stop 127
gatgaacctctggtctatctggaca

SEQ ID NO: 131365 - DNA, 25 bp, Artificial
  probe
  misc_feature (1)..(25): SEQ ID NO: 5293; WAN024CSH_at; Start 981; Stop 1005
actgcaggcaattgagggattgacc

SEQ ID NO: 131366 - DNA, 25 bp, Artificial
  probe
  misc_feature (1)..(25): SEQ ID NO: 5293; WAN024CSH_at; Start 845; Stop 869
cttggaaatttgaggctggaacgcc

SEQ ID NO: 131367 - DNA, 25 bp, Artificial
  probe
  misc_feature (1)..(25): SEQ ID NO: 5293; WAN024CSH_at; Start 589; Stop 613
gaaatcactcaattagcccaccaag

SEQ ID NO: 131368 - DNA, 25 bp, Artificial
  probe
  misc_feature (1)..(25): SEQ ID NO: 5293; WAN024CSH_at; Start 1202; Stop 1226
ccaaggcagattgcgacaaactagt

SEQ ID NO: 131369 - DNA, 25 bp, Artificial
  probe
  misc_feature (1)..(25): SEQ ID NO: 5293; WAN024CSH_at; Start 729; Stop 753
tggtatcggtgtcctttacggcaaa

SEQ ID NO: 131370 - DNA, 25 bp, Artificial
  probe
  misc_feature (1)..(25): SEQ ID NO: 5293; WAN024CSH_at; Start 879; Stop 903
aggagctattggacttgcgactgca

SEQ ID NO: 131371 - DNA, 25 bp, Artificial
  probe
  misc_feature (1)..(25): SEQ ID NO: 5293; WAN024CSH_at; Start 558; Stop 582
caatgttcttggtgtggtcaatccg

SEQ ID NO: 131372 - DNA, 25 bp, Artificial
  probe
  misc_feature (1)..(25): SEQ ID NO: 5293; WAN024CSH_at; Start 470; Stop 494
tctatcttaaagacggtgccttgga

SEQ ID NO: 131373 - DNA, 25 bp, Artificial
  probe
  misc_feature (1)..(25): SEQ ID NO: 5293; WAN024CSH_at; Start 310; Stop 334
tttaccagaggaacgacaaccagcc

SEQ ID NO: 131374 - DNA, 25 bp, Artificial
  probe
  misc_feature (1)..(25): SEQ ID NO: 5293; WAN024CSH_at; Start 45; Stop 69
tatgttagatgtagaagcgattcgc

SEQ ID NO: 131375 - DNA, 25 bp, Artificial
  probe
  misc_feature (1)..(25): SEQ ID NO: 5293; WAN024CSH_at; Start 326; Stop 350
caaccagccttaactgggtggcacg

SEQ ID NO: 131376 - DNA, 25 bp, Artificial
  probe
  misc_feature (1)..(25): SEQ ID NO: 5293; WAN024CSH_at; Start 1218; Stop 1242
caaactagtcgatgccctacaaaag

SEQ ID NO: 131377 - DNA, 25 bp, Artificial
  probe
  misc_feature (1)..(25): SEQ ID NO: 5293; WAN024CSH_at; Start 441; Stop 465
tcgaaagactggagcagagcttgtc

SEQ ID NO: 131378 - DNA, 25 bp, Artificial
  probe
  misc_feature (1)..(25): SEQ ID NO: 5293; WAN024CSH_at; Start 118; Stop 142
tatctggacaatgctgcgacgacac

SEQ ID NO: 131379 - DNA, 25 bp, Artificial
  probe
  misc_feature (1)..(25): SEQ ID NO: 5293; WAN024CSH_at; Start 204; Stop 228
tcaccgtggtgtccataccttagcg

SEQ ID NO: 131380 - DNA, 25 bp, Artificial
  probe
  misc_feature (1)..(25): SEQ ID NO: 5293; WAN024CSH_at; Start 1017; Stop 1041
tcaggatttggctcaacgttcgggt

SEQ ID NO: 131381 - DNA, 25 bp, Artificial
  probe
  misc_feature (1)..(25): SEQ ID NO: 5293; WAN024CSH_at; Start 1122; Stop 1146
tggtcaccattgtgcgcaacccttg

SEQ ID NO: 131382 - DNA, 25 bp, Artificial
  probe
  misc_feature (1)..(25): SEQ ID NO: 5293; WAN024CSH_at; Start 654; Stop 678
tcatatgaagattgatgtccaggac

SEQ ID NO: 131383 - DNA, 25 bp, Artificial
  probe
  misc_feature (1)..(25): SEQ ID NO: 5293; WAN024CSH_at; Start 964; Stop 988
gcgtacgtctatccaaaactgcagg

SEQ ID NO: 131384 - DNA, 25 bp, Artificial
  probe
  misc_feature (1)..(25): SEQ ID NO: 5293; WAN024CSH_at; Start 345; Stop 369
ggcacgctttgctgaggaaattctc

SEQ ID NO: 131385 - DNA, 25 bp, Artificial
  probe
  misc_feature (1)..(25): SEQ ID NO: 5293; WAN024CSH_at; Start 861; Stop 885
tggaacgccaaatatggcaggagct

SEQ ID NO: 131386 - DNA, 25 bp, Artificial
  probe
  misc_feature (1)..(25): SEQ ID NO: 5293; WAN024CSH_at; Start 250; Stop 274
gaagctgctcgtgaaaccattcgta

SEQ ID NO: 131387 - DNA, 25 bp, Artificial
  probe
  misc_feature (1)..(25): SEQ ID NO: 5293; WAN024CSH_at; Start 1106; Stop 1130
gagtggctgttcgtgctggtcacca

SEQ ID NO: 131388 - DNA, 25 bp, Artificial
  probe
  misc_feature (1)..(25): SEQ ID NO: 5293; WAN024CSH_at; Start 709; Stop 733
cacaagatggctggtccgactggta

SEQ ID NO: 131389 - DNA, 25 bp, Artificial
  probe
  misc_feature (1)..(25): SEQ ID NO: 5293; WAN024CSH_at; Start 423; Stop 447
tccatggcaggaagcttgtcgaaag

SEQ ID NO: 131390 - DNA, 25 bp, Artificial
  probe
  misc_feature (1)..(25): SEQ ID NO: 5293; WAN024CSH_at; Start 219; Stop 243
taccttagcggaacgagcgacagct

SEQ ID NO: 131391 - DNA, 25 bp, Artificial
  probe
  misc_feature (1)..(25): SEQ ID NO: 5293; WAN024CSH_at; Start 133; Stop 157
gcgacgacacaaaaaccactagtag

SEQ ID NO: 131392 - DNA, 25 bp, Artificial
  probe
  misc_feature (1)..(25): SEQ ID NO: 5293; WAN024CSH_at; Start 676; Stop 700
gacttggatctggactttttcgcct

SEQ ID NO: 131393 - DNA, 25 bp, Artificial
  probe
  misc_feature (1)..(25): SEQ ID NO: 5293; WAN024CSH_at; Start 1146; Stop 1170
gcttcagtatttggaagtcccagca

SEQ ID NO: 131394 - DNA, 25 bp, Artificial
  probe
  misc_feature (1)..(25): SEQ ID NO: 5293; WAN024CSH_at; Start 998; Stop 1022
gattgaccatttacggttctcagga

SEQ ID NO: 131395 - DNA, 25 bp, Artificial
  probe
  misc_feature (1)..(25): SEQ ID NO: 1447; WAN024CSI_at; Start 852; Stop 876
tactcgtgtaactaactatggctgc

SEQ ID NO: 131396 - DNA, 25 bp, Artificial
  probe
  misc_feature (1)..(25): SEQ ID NO: 1447; WAN024CSI_at; Start 221; Stop 245
tggtgcaagtaggaactcaaactgt

SEQ ID NO: 131397 - DNA, 25 bp, Artificial
  probe
  misc_feature (1)..(25): SEQ ID NO: 1447; WAN024CSI_at; Start 472; Stop 496
caagatagcgatagcaatgtgccgt

SEQ ID NO: 131398 - DNA, 25 bp, Artificial
  probe
  misc_feature (1)..(25): SEQ ID NO: 1447; WAN024CSI_at; Start 1135; Stop 1159
ttggataaggcaactgcagagcgtt

SEQ ID NO: 131399 - DNA, 25 bp, Artificial
  probe
  misc_feature (1)..(25): SEQ ID NO: 1447; WAN024CSI_at; Start 622; Stop 646
tctggtgcgcaagtcaagtttgctg

SEQ ID NO: 131400 - DNA, 25 bp, Artificial
  probe
  misc_feature (1)..(25): SEQ ID NO: 1447; WAN024CSI_at; Start 951; Stop 975
catcatcaagggtgctaagggagca

SEQ ID NO: 131401 - DNA, 25 bp, Artificial
  probe
  misc_feature (1)..(25): SEQ ID NO: 1447; WAN024CSI_at; Start 243; Stop 267
tgttttcgaacaaactccagttgag

SEQ ID NO: 131402 - DNA, 25 bp, Artificial
  probe
  misc_feature (1)..(25): SEQ ID NO: 1447; WAN024CSI_at; Start 31; Stop 55
gaaatgcacgctgaaccaagctggt

SEQ ID NO: 131403 - DNA, 25 bp, Artificial
  probe
  misc_feature (1)..(25): SEQ ID NO: 1447; WAN024CSI_at; Start 990; Stop 1014
gagccgtgttctcatgctttcagac

SEQ ID NO: 131404 - DNA, 25 bp, Artificial
  probe
  misc_feature (1)..(25): SEQ ID NO: 1447; WAN024CSI_at; Start 824; Stop 848
caagtggtcgtcaggtacaagggat

SEQ ID NO: 131405 - DNA, 25 bp, Artificial
  probe
  misc_feature (1)..(25): SEQ ID NO: 1447; WAN024CSI_at; Start 1188; Stop 1212
tatcgtggagattccagtcaaggaa

SEQ ID NO: 131406 - DNA, 25 bp, Artificial
  probe
  misc_feature (1)..(25): SEQ ID NO: 1447; WAN024CSI_at; Start 562; Stop 586
tcacgcggtgaaggaagtgacaaag

SEQ ID NO: 131407 - DNA, 25 bp, Artificial
  probe
  misc_feature (1)..(25): SEQ ID NO: 1447; WAN024CSI_at; Start 366; Stop 390
tgatgacaagttggcggcttaccac

SEQ ID NO: 131408 - DNA, 25 bp, Artificial
  probe
  misc_feature (1)..(25): SEQ ID NO: 1447; WAN024CSI_at; Start 47; Stop 71
caagctggttggctgatctccgtca

SEQ ID NO: 131409 - DNA, 25 bp, Artificial
  probe
  misc_feature (1)..(25): SEQ ID NO: 1447; WAN024CSI_at; Start 457; Stop 481
gaaggaattttctaccaagatagcg

SEQ ID NO: 131410 - DNA, 25 bp, Artificial
  probe
  misc_feature (1)..(25): SEQ ID NO: 1447; WAN024CSI_at; Start 600; Stop 624
cacagtggaagtgattgcacgttct

SEQ ID NO: 131411 - DNA, 25 bp, Artificial
  probe
  misc_feature (1)..(25): SEQ ID NO: 1447; WAN024CSI_at; Start 1010; Stop 1034
cagaccaagcgcgttcagatgctaa

SEQ ID NO: 131412 - DNA, 25 bp, Artificial
  probe
  misc_feature (1)..(25): SEQ ID NO: 1447; WAN024CSI_at; Start 274; Stop 298
gaacagggtgttgtcttcacagact

SEQ ID NO: 131413 - DNA, 25 bp, Artificial
  probe
  misc_feature (1)..(25): SEQ ID NO: 1447; WAN024CSI_at; Start 437; Stop 461
tagaaatcacagagccaattgaagg

SEQ ID NO: 131414 - DNA, 25 bp, Artificial
  probe
  misc_feature (1)..(25): SEQ ID NO: 1447; WAN024CSI_at; Start 929; Stop 953
tgactttcaatggtatcggccacat

SEQ ID NO: 131415 - DNA, 25 bp, Artificial
  probe
  misc_feature (1)..(25): SEQ ID NO: 1447; WAN024CSI_at; Start 652; Stop 676
gaccgtctaggtgaaaacgtcactg

SEQ ID NO: 131416 - DNA, 25 bp, Artificial
  probe
  misc_feature (1)..(25): SEQ ID NO: 1447; WAN024CSI_at; Start 786; Stop 810
taatggtagccatgctgacctcaag

SEQ ID NO: 131417 - DNA, 25 bp, Artificial
  probe
  misc_feature (1)..(25): SEQ ID NO: 1447; WAN024CSI_at; Start 691; Stop 715
cgtggtaaattaggcaacgatgcaa

SEQ ID NO: 131418 - DNA, 25 bp, Artificial
  probe
  misc_feature (1)..(25): SEQ ID NO: 1447; WAN024CSI_at; Start 258; Stop 282
tccagttgagttagctgaacagggt

SEQ ID NO: 131419 - DNA, 25 bp, Artificial
  probe
  misc_feature (1)..(25): SEQ ID NO: 1447; WAN024CSI_at; Start 84; Stop 108
caagattgagactttggaattacca

SEQ ID NO: 131420 - DNA, 25 bp, Artificial
  probe
  misc_feature (1)..(25): SEQ ID NO: 1447; WAN024CSI_at; Start 390; Stop 414
cacagcttactttaacagtggtgct

SEQ ID NO: 131421 - DNA, 25 bp, Artificial
  probe
  misc_feature (1)..(25): SEQ ID NO: 1447; WAN024CSI_at; Start 166; Stop 190
aatgagccatcagcaaatgttccag

SEQ ID NO: 131422 - DNA, 25 bp, Artificial
  probe
  misc_feature (1)..(25): SEQ ID NO: 1447; WAN024CSI_at; Start 705; Stop 729
caacgatgcaagtattgactgggct

SEQ ID NO: 131423 - DNA, 25 bp, Artificial
  probe
  misc_feature (1)..(25): SEQ ID NO: 1447; WAN024CSI_at; Start 722; Stop 746
actgggctatcggtgtcatgaacga

SEQ ID NO: 131424 - DNA, 25 bp, Artificial
  probe
  misc_feature (1)..(25): SEQ ID NO: 1447; WAN024CSI_at; Start 322; Stop 346
ccagagctgatcgaagaattcttca

SEQ ID NO: 131425 - DNA, 25 bp, Artificial
  probe
  misc_feature (1)..(25): SEQ ID NO: 1447; WAN024CSI_at; Start 131; Stop 155
accgttggaatctgggtgatggaac

SEQ ID NO: 131426 - DNA, 25 bp, Artificial
  probe
  misc_feature (1)..(25): SEQ ID NO: 1447; WAN024CSI_at; Start 544; Stop 568
tatctggagcgtttagagtcacgcg

SEQ ID NO: 131427 - DNA, 25 bp, Artificial
  probe
  misc_feature (1)..(25): SEQ ID NO: 1447; WAN024CSI_at; Start 802; Stop 826
gacctcaaggttgtagctctttcaa

SEQ ID NO: 131428 - DNA, 25 bp, Artificial
  probe
  misc_feature (1)..(25): SEQ ID NO: 1447; WAN024CSI_at; Start 673; Stop 697
actgcctacattagccgtcgtggta

SEQ ID NO: 131429 - DNA, 25 bp, Artificial
  probe
  misc_feature (1)..(25): SEQ ID NO: 2000; WAN024CSJ_at; Start 84; Stop 108
gaaaaatccacatcaccaagggaag

SEQ ID NO: 131430 - DNA, 25 bp, Artificial
  probe
  misc_feature (1)..(25): SEQ ID NO: 2000; WAN024CSJ_at; Start 43; Stop 67
aaactagatagcctttatatggcag

SEQ ID NO: 131431 - DNA, 25 bp, Artificial
  probe
  misc_feature (1)..(25): SEQ ID NO: 2000; WAN024CSJ_at; Start 219; Stop 243
ttcaggatgcacgatttcaactgct

SEQ ID NO: 131432 - DNA, 25 bp, Artificial
  probe
  misc_feature (1)..(25): SEQ ID NO: 2000; WAN024CSJ_at; Start 392; Stop 416
aattccctcaaagaatcaagtgtgc

SEQ ID NO: 131433 - DNA, 25 bp, Artificial
  probe
  misc_feature (1)..(25): SEQ ID NO: 2000; WAN024CSJ_at; Start 282; Stop 306
caaacaagaaattttagaactggcg

SEQ ID NO: 131434 - DNA, 25 bp, Artificial
  probe
  misc_feature (1)..(25): SEQ ID NO: 2000; WAN024CSJ_at; Start 91; Stop 115
ccacatcaccaagggaagttagaag

SEQ ID NO: 131435 - DNA, 25 bp, Artificial
  probe
  misc_feature (1)..(25): SEQ ID NO: 2000; WAN024CSJ_at; Start 328; Stop 352
caagggcaaaaagatgagcgtcaag

SEQ ID NO: 131436 - DNA, 25 bp, Artificial
  probe
  misc_feature (1)..(25): SEQ ID NO: 2000; WAN024CSJ_at; Start 374; Stop 398
tcttgtcaggtgttgccaaattccc

SEQ ID NO: 131437 - DNA, 25 bp, Artificial
  probe
  misc_feature (1)..(25): SEQ ID NO: 2000; WAN024CSJ_at; Start 286; Stop 310
caagaaattttagaactggcgacta

SEQ ID NO: 131438 - DNA, 25 bp, Artificial
  probe
  misc_feature (1)..(25): SEQ ID NO: 2000; WAN024CSJ_at; Start 81; Stop 105
ttcgaaaaatccacatcaccaaggg

SEQ ID NO: 131439 - DNA, 25 bp, Artificial
  probe
  misc_feature (1)..(25): SEQ ID NO: 2000; WAN024CSJ_at; Start 190; Stop 214
gaccgtttggaagatattgcttttc

SEQ ID NO: 131440 - DNA, 25 bp, Artificial
  probe
  misc_feature (1)..(25): SEQ ID NO: 2000; WAN024CSJ_at; Start 425; Stop 449
cttggaatgcccttaagaaaacaat

SEQ ID NO: 131441 - DNA, 25 bp, Artificial
  probe
  misc_feature (1)..(25): SEQ ID NO: 2000; WAN024CSJ_at; Start 399; Stop 423
tcaaagaatcaagtgtgcaacccta

SEQ ID NO: 131442 - DNA, 25 bp, Artificial
  probe
  misc_feature (1)..(25): SEQ ID NO: 2000; WAN024CSJ_at; Start 296; Stop 320
tagaactggcgactattttttctga

SEQ ID NO: 131443 - DNA, 25 bp, Artificial
  probe
  misc_feature (1)..(25): SEQ ID NO: 2000; WAN024CSJ_at; Start 429; Stop 453
gaatgcccttaagaaaacaattgaa

SEQ ID NO: 131444 - DNA, 25 bp, Artificial
  probe
  misc_feature (1)..(25): SEQ ID NO: 2000; WAN024CSJ_at; Start 169; Stop 193
tctgtcaagtttgatgcagaggacc

SEQ ID NO: 131445 - DNA, 25 bp, Artificial
  probe
  misc_feature (1)..(25): SEQ ID NO: 2000; WAN024CSJ_at; Start 208; Stop 232
gcttttctaaattcaggatgcacga

SEQ ID NO: 131446 - DNA, 25 bp, Artificial
  probe
  misc_feature (1)..(25): SEQ ID NO: 2000; WAN024CSJ_at; Start 54; Stop 78
cctttatatggcagtggtagcagac

SEQ ID NO: 131447 - DNA, 25 bp, Artificial
  probe
  misc_feature (1)..(25): SEQ ID NO: 2000; WAN024CSJ_at; Start 236; Stop 260
caactgcttctgctagtatgatgac

SEQ ID NO: 131448 - DNA, 25 bp, Artificial
  probe
  misc_feature (1)..(25): SEQ ID NO: 2000; WAN024CSJ_at; Start 30; Stop 54
aatggcactttctaaactagatagc

SEQ ID NO: 131449 - DNA, 25 bp, Artificial
  probe
  misc_feature (1)..(25): SEQ ID NO: 2000; WAN024CSJ_at; Start 128; Stop 152
tcagtctcaacaatccgacttgtgg

SEQ ID NO: 131450 - DNA, 25 bp, Artificial
  probe
  misc_feature (1)..(25): SEQ ID NO: 2000; WAN024CSJ_at; Start 227; Stop 251
gcacgatttcaactgcttctgctag

SEQ ID NO: 131451 - DNA, 25 bp, Artificial
  probe
  misc_feature (1)..(25): SEQ ID NO: 2000; WAN024CSJ_at; Start 311; Stop 335
ttttttctgaaatggttcaagggca

SEQ ID NO: 131452 - DNA, 25 bp, Artificial
  probe
  misc_feature (1)..(25): SEQ ID NO: 2000; WAN024CSJ_at; Start 123; Stop 147
gcaaatcagtctcaacaatccgact

SEQ ID NO: 131453 - DNA, 25 bp, Artificial
  probe
  misc_feature (1)..(25): SEQ ID NO: 2000; WAN024CSJ_at; Start 185; Stop 209
cagaggaccgtttggaagatattgc

SEQ ID NO: 131454 - DNA, 25 bp, Artificial
  probe
  misc_feature (1)..(25): SEQ ID NO: 2000; WAN024CSJ_at; Start 450; Stop 474
tgaaaatcaagaaaaacagtaacta

SEQ ID NO: 131455 - DNA, 25 bp, Artificial
  probe
  misc_feature (1)..(25): SEQ ID NO: 2000; WAN024CSJ_at; Start 354; Stop 378
ccaacttggagacgcggcattcttg

SEQ ID NO: 131456 - DNA, 25 bp, Artificial
  probe
  misc_feature (1)..(25): SEQ ID NO: 2000; WAN024CSJ_at; Start 323; Stop 347
tggttcaagggcaaaaagatgagcg

SEQ ID NO: 131457 - DNA, 25 bp, Artificial
  probe
  misc_feature (1)..(25): SEQ ID NO: 2000; WAN024CSJ_at; Start 241; Stop 265
gcttctgctagtatgatgacagatg

SEQ ID NO: 131458 - DNA, 25 bp, Artificial
  probe
  misc_feature (1)..(25): SEQ ID NO: 2000; WAN024CSJ_at; Start 362; Stop 386
gagacgcggcattcttgtcaggtgt

SEQ ID NO: 131459 - DNA, 25 bp, Artificial
  probe
  misc_feature (1)..(25): SEQ ID NO: 2000; WAN024CSJ_at; Start 382; Stop 406
ggtgttgccaaattccctcaaagaa

SEQ ID NO: 131460 - DNA, 25 bp, Artificial
  probe
  misc_feature (1)..(25): SEQ ID NO: 2000; WAN024CSJ_at; Start 60; Stop 84
tatggcagtggtagcagaccattcg

SEQ ID NO: 131461 - DNA, 25 bp, Artificial
  probe
  misc_feature (1)..(25): SEQ ID NO: 2000; WAN024CSJ_at; Start 173; Stop 197
tcaagtttgatgcagaggaccgttt

SEQ ID NO: 131462 - DNA, 25 bp, Artificial
  probe
  misc_feature (1)..(25): SEQ ID NO: 2000; WAN024CSJ_at; Start 69; Stop 93
ggtagcagaccattcgaaaaatcca

SEQ ID NO: 131463 - DNA, 25 bp, Artificial
  probe
  misc_feature (1)..(25): SEQ ID NO: 1958; WAN024CSK_at; Start 984; Stop 1008
ccaggaaatcgatacctttgacatt

SEQ ID NO: 131464 - DNA, 25 bp, Artificial
  probe
  misc_feature (1)..(25): SEQ ID NO: 1958; WAN024CSK_at; Start 886; Stop 910
caaacccttgaaagtatgaaggcta

SEQ ID NO: 131465 - DNA, 25 bp, Artificial
  probe
  misc_feature (1)..(25): SEQ ID NO: 1958; WAN024CSK_at; Start 734; Stop 758
cagagattcaagaggaaatcaaagc

SEQ ID NO: 131466 - DNA, 25 bp, Artificial
  probe
  misc_feature (1)..(25): SEQ ID NO: 1958; WAN024CSK_at; Start 967; Stop 991
gaaatcattgacatcgcccaggaaa

SEQ ID NO: 131467 - DNA, 25 bp, Artificial
  probe
  misc_feature (1)..(25): SEQ ID NO: 1958; WAN024CSK_at; Start 933; Stop 957
catcattcgtcctgtggttaccatg

SEQ ID NO: 131468 - DNA, 25 bp, Artificial
  probe
  misc_feature (1)..(25): SEQ ID NO: 1958; WAN024CSK_at; Start 59; Stop 83
gtatgcgtttcatcaataaacttcg

SEQ ID NO: 131469 - DNA, 25 bp, Artificial
  probe
  misc_feature (1)..(25): SEQ ID NO: 1958; WAN024CSK_at; Start 1163; Stop 1187
cacctcaagccgaaaaagatgaagt

SEQ ID NO: 131470 - DNA, 25 bp, Artificial
  probe
  misc_feature (1)..(25): SEQ ID NO: 1958; WAN024CSK_at; Start 125; Stop 149
aggtaacagcagatcgcgaccgtgc

SEQ ID NO: 131471 - DNA, 25 bp, Artificial
  probe
  misc_feature (1)..(25): SEQ ID NO: 1958; WAN024CSK_at; Start 862; Stop 886
gaaagtctaggtcaagtagccagcc

SEQ ID NO: 131472 - DNA, 25 bp, Artificial
  probe
  misc_feature (1)..(25): SEQ ID NO: 1958; WAN024CSK_at; Start 1000; Stop 1024
tttgacatttcaatccaaccgtttg

SEQ ID NO: 131473 - DNA, 25 bp, Artificial
  probe
  misc_feature (1)..(25): SEQ ID NO: 1958; WAN024CSK_at; Start 8; Stop 32
attcagaaattatgattcgctacgg

SEQ ID NO: 131474 - DNA, 25 bp, Artificial
  probe
  misc_feature (1)..(25): SEQ ID NO: 1958; WAN024CSK_at; Start 1044; Stop 1068
tgcaccagatcgtccaaaaacaaat

SEQ ID NO: 131475 - DNA, 25 bp, Artificial
  probe
  misc_feature (1)..(25): SEQ ID NO: 1958; WAN024CSK_at; Start 1171; Stop 1195
gccgaaaaagatgaagttgatgact

SEQ ID NO: 131476 - DNA, 25 bp, Artificial
  probe
  misc_feature (1)..(25): SEQ ID NO: 1958; WAN024CSK_at; Start 945; Stop 969
tgtggttaccatggacaagttggaa

SEQ ID NO: 131477 - DNA, 25 bp, Artificial
  probe
  misc_feature (1)..(25): SEQ ID NO: 1958; WAN024CSK_at; Start 813; Stop 837
tactgaccgtattcgtgaggtacga

SEQ ID NO: 131478 - DNA, 25 bp, Artificial
  probe
  misc_feature (1)..(25): SEQ ID NO: 1958; WAN024CSK_at; Start 1093; Stop 1117
tacgaagcgcgtatggatgttgaag

SEQ ID NO: 131479 - DNA, 25 bp, Artificial
  probe
  misc_feature (1)..(25): SEQ ID NO: 1958; WAN024CSK_at; Start 1186; Stop 1210
gttgatgacttgattgacaatctgc

SEQ ID NO: 131480 - DNA, 25 bp, Artificial
  probe
  misc_feature (1)..(25): SEQ ID NO: 1958; WAN024CSK_at; Start 1013; Stop 1037
tccaaccgtttgaagactgttgtac

SEQ ID NO: 131481 - DNA, 25 bp, Artificial
  probe
  misc_feature (1)..(25): SEQ ID NO: 1958; WAN024CSK_at; Start 424; Stop 448
caaatgaaaagtcctgacatcaatc

SEQ ID NO: 131482 - DNA, 25 bp, Artificial
  probe
  misc_feature (1)..(25): SEQ ID NO: 1958; WAN024CSK_at; Start 118; Stop 142
caagttaaggtaacagcagatcgcg

SEQ ID NO: 131483 - DNA, 25 bp, Artificial
  probe
  misc_feature (1)..(25): SEQ ID NO: 1958; WAN024CSK_at; Start 748; Stop 772
gaaatcaaagccaaagcgccagaag

SEQ ID NO: 131484 - DNA, 25 bp, Artificial
  probe
  misc_feature (1)..(25): SEQ ID NO: 1958; WAN024CSK_at; Start 875; Stop 899
aagtagccagccaaacccttgaaag

SEQ ID NO: 131485 - DNA, 25 bp, Artificial
  probe
  misc_feature (1)..(25): SEQ ID NO: 1958; WAN024CSK_at; Start 1152; Stop 1176
tactgaaatcacacctcaagccgaa

SEQ ID NO: 131486 - DNA, 25 bp, Artificial
  probe
  misc_feature (1)..(25): SEQ ID NO: 1958; WAN024CSK_at; Start 1068; Stop 1092
tcctaaaattaagaatgcggagcag

SEQ ID NO: 131487 - DNA, 25 bp, Artificial
  probe
  misc_feature (1)..(25): SEQ ID NO: 1958; WAN024CSK_at; Start 229; Stop 253
cctgtttataaggttgaaaaatctg

SEQ ID NO: 131488 - DNA, 25 bp, Artificial
  probe
  misc_feature (1)..(25): SEQ ID NO: 1958; WAN024CSK_at; Start 903; Stop 927
gaaggctatcaatgctgttaccaac

SEQ ID NO: 131489 - DNA, 25 bp, Artificial
  probe
  misc_feature (1)..(25): SEQ ID NO: 1958; WAN024CSK_at; Start 1124; Stop 1148
ttgagcgagcagtggctggaatcat

SEQ ID NO: 131490 - DNA, 25 bp, Artificial
  probe
  misc_feature (1)..(25): SEQ ID NO: 1958; WAN024CSK_at; Start 145; Stop 169
cgtgcccacgcttacctcaatggag

SEQ ID NO: 131491 - DNA, 25 bp, Artificial
  probe
  misc_feature (1)..(25): SEQ ID NO: 1958; WAN024CSK_at; Start 1196; Stop 1220
tgattgacaatctgctctaactaat

SEQ ID NO: 131492 - DNA, 25 bp, Artificial
  probe
  misc_feature (1)..(25): SEQ ID NO: 1958; WAN024CSK_at; Start 975; Stop 999
tgacatcgcccaggaaatcgatacc

SEQ ID NO: 131493 - DNA, 25 bp, Artificial
  probe
  misc_feature (1)..(25): SEQ ID NO: 1958; WAN024CSK_at; Start 960; Stop 984
caagttggaaatcattgacatcgcc

SEQ ID NO: 131494 - DNA, 25 bp, Artificial
  probe
  misc_feature (1)..(25): SEQ ID NO: 1958; WAN024CSK_at; Start 1081; Stop 1105
aatgcggagcagtacgaagcgcgta

SEQ ID NO: 131495 - DNA, 25 bp, Artificial
  probe
  misc_feature (1)..(25): SEQ ID NO: 1958; WAN024CSK_at; Start 1137; Stop 1161
ggctggaatcatgattactgaaatc

SEQ ID NO: 131496 - DNA, 25 bp, Artificial
  probe
  misc_feature (1)..(25): SEQ ID NO: 1958; WAN024CSK_at; Start 918; Stop 942
tgttaccaacactcccatcattcgt

SEQ ID NO: 131497 - DNA, 25 bp, Artificial
  probe
  misc_feature (1)..(25): SEQ ID NO: 6771; WAN024CSL_at; Start 141; Stop 165
tctgcttgtgtcatgttgtctaaat

SEQ ID NO: 131498 - DNA, 25 bp, Artificial
  probe
  misc_feature (1)..(25): SEQ ID NO: 6771; WAN024CSL_at; Start 3; Stop 27
gctttacctgtctcagctcgcttca

SEQ ID NO: 131499 - DNA, 25 bp, Artificial
  probe
  misc_feature (1)..(25): SEQ ID NO: 6771; WAN024CSL_at; Start 217; Stop 241
tgctttctgagttccatttttagag

SEQ ID NO: 131500 - DNA, 25 bp, Artificial
  probe
  misc_feature (1)..(25): SEQ ID NO: 6771; WAN024CSL_at; Start 176; Stop 200
tgcattgcctcctcaaacttctcta

SEQ ID NO: 131501 - DNA, 25 bp, Artificial
  probe
  misc_feature (1)..(25): SEQ ID NO: 6771; WAN024CSL_at; Start 180; Stop 204
ttgcctcctcaaacttctctataag

SEQ ID NO: 131502 - DNA, 25 bp, Artificial
  probe
  misc_feature (1)..(25): SEQ ID NO: 6771; WAN024CSL_at; Start 22; Stop 46
gcttcatattcaacaagtcgtctat

SEQ ID NO: 131503 - DNA, 25 bp, Artificial
  probe
  misc_feature (1)..(25): SEQ ID NO: 6771; WAN024CSL_at; Start 185; Stop 209
tcctcaaacttctctataagacaac

SEQ ID NO: 131504 - DNA, 25 bp, Artificial
  probe
  misc_feature (1)..(25): SEQ ID NO: 6771; WAN024CSL_at; Start 115; Stop 139
ggatttcagccattacctcatcaaa

SEQ ID NO: 131505 - DNA, 25 bp, Artificial
  probe
  misc_feature (1)..(25): SEQ ID NO: 6771; WAN024CSL_at; Start 170; Stop 194
tgtcattgcattgcctcctcaaact

SEQ ID NO: 131506 - DNA, 25 bp, Artificial
  probe
  misc_feature (1)..(25): SEQ ID NO: 6771; WAN024CSL_at; Start 120; Stop 144
tcagccattacctcatcaaattctg

SEQ ID NO: 131507 - DNA, 25 bp, Artificial
  probe
  misc_feature (1)..(25): SEQ ID NO: 6771; WAN024CSL_at; Start 163; Stop 187
aatctagtgtcattgcattgcctcc

SEQ ID NO: 131508 - DNA, 25 bp, Artificial
  probe
  misc_feature (1)..(25): SEQ ID NO: 6771; WAN024CSL_at; Start 222; Stop 246
tctgagttccatttttagagttaaa

SEQ ID NO: 131509 - DNA, 25 bp, Artificial
  probe
  misc_feature (1)..(25): SEQ ID NO: 6771; WAN024CSL_at; Start 189; Stop 213
caaacttctctataagacaactttt

SEQ ID NO: 131510 - DNA, 25 bp, Artificial
  probe
  misc_feature (1)..(25): SEQ ID NO: 6771; WAN024CSL_at; Start 40; Stop 64
cgtctatttccacactggttacttt

SEQ ID NO: 131511 - DNA, 25 bp, Artificial
  probe
  misc_feature (1)..(25): SEQ ID NO: 6771; WAN024CSL_at; Start 110; Stop 134
tagctggatttcagccattacctca

SEQ ID NO: 131512 - DNA, 25 bp, Artificial
  probe
  misc_feature (1)..(25): SEQ ID NO: 6771; WAN024CSL_at; Start 147; Stop 171
tgtgtcatgttgtctaaatctagtg

SEQ ID NO: 131513 - DNA, 25 bp, Artificial
  probe
  misc_feature (1)..(25): SEQ ID NO: 6771; WAN024CSL_at; Start 128; Stop 152
tacctcatcaaattctgcttgtgtc

SEQ ID NO: 131514 - DNA, 25 bp, Artificial
  probe
  misc_feature (1)..(25): SEQ ID NO: 6771; WAN024CSL_at; Start 7; Stop 31
tacctgtctcagctcgcttcatatt

SEQ ID NO: 131515 - DNA, 25 bp, Artificial
  probe
  misc_feature (1)..(25): SEQ ID NO: 6771; WAN024CSL_at; Start 67; Stop 91
tatttacaaaatcagaaatcagttg

SEQ ID NO: 131516 - DNA, 25 bp, Artificial
  probe
  misc_feature (1)..(25): SEQ ID NO: 6771; WAN024CSL_at; Start 15; Stop 39
tcagctcgcttcatattcaacaagt

SEQ ID NO: 131517 - DNA, 25 bp, Artificial
  probe
  misc_feature (1)..(25): SEQ ID NO: 6771; WAN024CSL_at; Start 33; Stop 57
aacaagtcgtctatttccacactgg

SEQ ID NO: 131518 - DNA, 25 bp, Artificial
  probe
  misc_feature (1)..(25): SEQ ID NO: 6771; WAN024CSL_at; Start 12; Stop 36
gtctcagctcgcttcatattcaaca

SEQ ID NO: 131519 - DNA, 25 bp, Artificial
  probe
  misc_feature (1)..(25): SEQ ID NO: 6771; WAN024CSL_at; Start 36; Stop 60
aagtcgtctatttccacactggtta

SEQ ID NO: 131520 - DNA, 25 bp, Artificial
  probe
  misc_feature (1)..(25): SEQ ID NO: 6771; WAN024CSL_at; Start 102; Stop 126
ggactttgtagctggatttcagcca

SEQ ID NO: 131521 - DNA, 25 bp, Artificial
  probe
  misc_feature (1)..(25): SEQ ID NO: 6771; WAN024CSL_at; Start 167; Stop 191
tagtgtcattgcattgcctcctcaa

SEQ ID NO: 131522 - DNA, 25 bp, Artificial
  probe
  misc_feature (1)..(25): SEQ ID NO: 6771; WAN024CSL_at; Start 160; Stop 184
ctaaatctagtgtcattgcattgcc

SEQ ID NO: 131523 - DNA, 25 bp, Artificial
  probe
  misc_feature (1)..(25): SEQ ID NO: 6771; WAN024CSL_at; Start 204; Stop 228
gacaacttttatttgctttctgagt

SEQ ID NO: 131524 - DNA, 25 bp, Artificial
  probe
  misc_feature (1)..(25): SEQ ID NO: 6771; WAN024CSL_at; Start 28; Stop 52
tattcaacaagtcgtctatttccac

SEQ ID NO: 131525 - DNA, 25 bp, Artificial
  probe
  misc_feature (1)..(25): SEQ ID NO: 6771; WAN024CSL_at; Start 82; Stop 106
aaatcagttgaaaaatgtttggact

SEQ ID NO: 131526 - DNA, 25 bp, Artificial
  probe
  misc_feature (1)..(25): SEQ ID NO: 6771; WAN024CSL_at; Start 18; Stop 42
gctcgcttcatattcaacaagtcgt

SEQ ID NO: 131527 - DNA, 25 bp, Artificial
  probe
  misc_feature (1)..(25): SEQ ID NO: 6771; WAN024CSL_at; Start 154; Stop 178
tgttgtctaaatctagtgtcattgc

SEQ ID NO: 131528 - DNA, 25 bp, Artificial
  probe
  misc_feature (1)..(25): SEQ ID NO: 6771; WAN024CSL_at; Start 93; Stop 117
aaaatgtttggactttgtagctgga

SEQ ID NO: 131529 - DNA, 25 bp, Artificial
  probe
  misc_feature (1)..(25): SEQ ID NO: 6771; WAN024CSL_at; Start 136; Stop 160
caaattctgcttgtgtcatgttgtc

SEQ ID NO: 131530 - DNA, 25 bp, Artificial
  probe
  misc_feature (1)..(25): SEQ ID NO: 6771; WAN024CSL_at; Start 98; Stop 122
gtttggactttgtagctggatttca

SEQ ID NO: 131531 - DNA, 25 bp, Artificial
  probe
  misc_feature (1)..(25): SEQ ID NO: 1348; WAN024CSM_at; Start 248; Stop 272
taaaagaggctgtcagtcagggtaa

SEQ ID NO: 131532 - DNA, 25 bp, Artificial
  probe
  misc_feature (1)..(25): SEQ ID NO: 1348; WAN024CSM_at; Start 383; Stop 407
aaaccaatcaactagagcctaccag

SEQ ID NO: 131533 - DNA, 25 bp, Artificial
  probe
  misc_feature (1)..(25): SEQ ID NO: 1348; WAN024CSM_at; Start 395; Stop 419
tagagcctaccagctatgaagattg

SEQ ID NO: 131534 - DNA, 25 bp, Artificial
  probe
  misc_feature (1)..(25): SEQ ID NO: 1348; WAN024CSM_at; Start 2; Stop 26
tgacactagatttagacaacatgac

SEQ ID NO: 131535 - DNA, 25 bp, Artificial
  probe
  misc_feature (1)..(25): SEQ ID NO: 1348; WAN024CSM_at; Start 260; Stop 284
tcagtcagggtaaagcaaactttgc

SEQ ID NO: 131536 - DNA, 25 bp, Artificial
  probe
  misc_feature (1)..(25): SEQ ID NO: 1348; WAN024CSM_at; Start 39; Stop 63
tgatgaggtaatggctgaaatccag

SEQ ID NO: 131537 - DNA, 25 bp, Artificial
  probe
  misc_feature (1)..(25): SEQ ID NO: 1348; WAN024CSM_at; Start 288; Stop 312
catcaaggtaatccttaaccgttgg

SEQ ID NO: 131538 - DNA, 25 bp, Artificial
  probe
  misc_feature (1)..(25): SEQ ID NO: 1348; WAN024CSM_at; Start 362; Stop 386
cgcgtgaggctaaaaaacagcaaac

SEQ ID NO: 131539 - DNA, 25 bp, Artificial
  probe
  misc_feature (1)..(25): SEQ ID NO: 1348; WAN024CSM_at; Start 131; Stop 155
tagacgacttgttgaatatgaagcg

SEQ ID NO: 131540 - DNA, 25 bp, Artificial
  probe
  misc_feature (1)..(25): SEQ ID NO: 1348; WAN024CSM_at; Start 193; Stop 217
caagaattgcagtatatgctagaag

SEQ ID NO: 131541 - DNA, 25 bp, Artificial
  probe
  misc_feature (1)..(25): SEQ ID NO: 1348; WAN024CSM_at; Start 54; Stop 78
tgaaatccagctacaaagtccaaac

SEQ ID NO: 131542 - DNA, 25 bp, Artificial
  probe
  misc_feature (1)..(25): SEQ ID NO: 1348; WAN024CSM_at; Start 149; Stop 173
tgaagcgagctgagacaggtaaagc

SEQ ID NO: 131543 - DNA, 25 bp, Artificial
  probe
  misc_feature (1)..(25): SEQ ID NO: 1348; WAN024CSM_at; Start 166; Stop 190
ggtaaagcattgtcaccgttacaga

SEQ ID NO: 131544 - DNA, 25 bp, Artificial
  probe
  misc_feature (1)..(25): SEQ ID NO: 1348; WAN024CSM_at; Start 274; Stop 298
gcaaactttgcatacatcaaggtaa

SEQ ID NO: 131545 - DNA, 25 bp, Artificial
  probe
  misc_feature (1)..(25): SEQ ID NO: 1348; WAN024CSM_at; Start 404; Stop 428
ccagctatgaagattggataccaac

SEQ ID NO: 131546 - DNA, 25 bp, Artificial
  probe
  misc_feature (1)..(25): SEQ ID NO: 1348; WAN024CSM_at; Start 316; Stop 340
caggacaatttattgacggtggaac

SEQ ID NO: 131547 - DNA, 25 bp, Artificial
  probe
  misc_feature (1)..(25): SEQ ID NO: 1348; WAN024CSM_at; Start 226; Stop 250
ccagagcttatccatgaggcgttaa

SEQ ID NO: 131548 - DNA, 25 bp, Artificial
  probe
  misc_feature (1)..(25): SEQ ID NO: 1348; WAN024CSM_at; Start 12; Stop 36
tttagacaacatgacacaagcagaa

SEQ ID NO: 131549 - DNA, 25 bp, Artificial
  probe
  misc_feature (1)..(25): SEQ ID NO: 1348; WAN024CSM_at; Start 375; Stop 399
aaaacagcaaaccaatcaactagag

SEQ ID NO: 131550 - DNA, 25 bp, Artificial
  probe
  misc_feature (1)..(25): SEQ ID NO: 1348; WAN024CSM_at; Start 159; Stop 183
tgagacaggtaaagcattgtcaccg

SEQ ID NO: 131551 - DNA, 25 bp, Artificial
  probe
  misc_feature (1)..(25): SEQ ID NO: 1348; WAN024CSM_at; Start 63; Stop 87
gctacaaagtccaaacatttttcaa

SEQ ID NO: 131552 - DNA, 25 bp, Artificial
  probe
  misc_feature (1)..(25): SEQ ID NO: 1348; WAN024CSM_at; Start 140; Stop 164
tgttgaatatgaagcgagctgagac

SEQ ID NO: 131553 - DNA, 25 bp, Artificial
  probe
  misc_feature (1)..(25): SEQ ID NO: 1348; WAN024CSM_at; Start 178; Stop 202
tcaccgttacagattcaagaattgc

SEQ ID NO: 131554 - DNA, 25 bp, Artificial
  probe
  misc_feature (1)..(25): SEQ ID NO: 1348; WAN024CSM_at; Start 330; Stop 354
gacggtggaacttgttagaaatagc

SEQ ID NO: 131555 - DNA, 25 bp, Artificial
  probe
  misc_feature (1)..(25): SEQ ID NO: 1348; WAN024CSM_at; Start 74; Stop 98
caaacatttttcaactgatttctga

SEQ ID NO: 131556 - DNA, 25 bp, Artificial
  probe
  misc_feature (1)..(25): SEQ ID NO: 1348; WAN024CSM_at; Start 220; Stop 244
tttagcccagagcttatccatgagg

SEQ ID NO: 131557 - DNA, 25 bp, Artificial
  probe
  misc_feature (1)..(25): SEQ ID NO: 1348; WAN024CSM_at; Start 418; Stop 442
tggataccaacacaagaaaaaccat

SEQ ID NO: 131558 - DNA, 25 bp, Artificial
  probe
  misc_feature (1)..(25): SEQ ID NO: 1348; WAN024CSM_at; Start 354; Stop 378
cagggcagcgcgtgaggctaaaaaa

SEQ ID NO: 131559 - DNA, 25 bp, Artificial
  probe
  misc_feature (1)..(25): SEQ ID NO: 1348; WAN024CSM_at; Start 344; Stop 368
ttagaaatagcagggcagcgcgtga

SEQ ID NO: 131560 - DNA, 25 bp, Artificial
  probe
  misc_feature (1)..(25): SEQ ID NO: 1348; WAN024CSM_at; Start 237; Stop 261
ccatgaggcgttaaaagaggctgtc

SEQ ID NO: 131561 - DNA, 25 bp, Artificial
  probe
  misc_feature (1)..(25): SEQ ID NO: 1348; WAN024CSM_at; Start 116; Stop 140
taaccagtgtggaaatagacgactt

SEQ ID NO: 131562 - DNA, 25 bp, Artificial
  probe
  misc_feature (1)..(25): SEQ ID NO: 1348; WAN024CSM_at; Start 209; Stop 233
tgctagaagattttagcccagagct

SEQ ID NO: 131563 - DNA, 25 bp, Artificial
  probe
  misc_feature (1)..(25): SEQ ID NO: 1348; WAN024CSM_at; Start 306; Stop 330
ccgttggaaacaggacaatttattg

SEQ ID NO: 131564 - DNA, 25 bp, Artificial
  probe
  misc_feature (1)..(25): SEQ ID NO: 1348; WAN024CSM_at; Start 340; Stop 364
cttgttagaaatagcagggcagcgc

SEQ ID NO: 131565 - DNA, 25 bp, Artificial
  probe
  misc_feature (1)..(25): SEQ ID NO: 1354; WAN024CSN_at; Start 142; Stop 166
cgtttactttggattgaacttcctg

SEQ ID NO: 131566 - DNA, 25 bp, Artificial
  probe
  misc_feature (1)..(25): SEQ ID NO: 1354; WAN024CSN_at; Start 309; Stop 333
gcaacaggcgtatatagagcatgct

SEQ ID NO: 131567 - DNA, 25 bp, Artificial
  probe
  misc_feature (1)..(25): SEQ ID NO: 1354; WAN024CSN_at; Start 266; Stop 290
tctttaaacgccaagctaagcactt

SEQ ID NO: 131568 - DNA, 25 bp, Artificial
  probe
  misc_feature (1)..(25): SEQ ID NO: 1354; WAN024CSN_at; Start 245; Stop 269
tggacgctatgcgaaaagcattctt

SEQ ID NO: 131569 - DNA, 25 bp, Artificial
  probe
  misc_feature (1)..(25): SEQ ID NO: 1354; WAN024CSN_at; Start 300; Stop 324
cgaagcagagcaacaggcgtatata

SEQ ID NO: 131570 - DNA, 25 bp, Artificial
  probe
  misc_feature (1)..(25): SEQ ID NO: 1354; WAN024CSN_at; Start 421; Stop 445
cttatagagaagtttgaggaggcaa

SEQ ID NO: 131571 - DNA, 25 bp, Artificial
  probe
  misc_feature (1)..(25): SEQ ID NO: 1354; WAN024CSN_at; Start 280; Stop 304
gctaagcacttttttgagaacgaag

SEQ ID NO: 131572 - DNA, 25 bp, Artificial
  probe
  misc_feature (1)..(25): SEQ ID NO: 1354; WAN024CSN_at; Start 2; Stop 26
tgacagaaacaacatatgagaattt

SEQ ID NO: 131573 - DNA, 25 bp, Artificial
  probe
  misc_feature (1)..(25): SEQ ID NO: 1354; WAN024CSN_at; Start 18; Stop 42
tgagaatttaactagacgtatagac

SEQ ID NO: 131574 - DNA, 25 bp, Artificial
  probe
  misc_feature (1)..(25): SEQ ID NO: 1354; WAN024CSN_at; Start 406; Stop 430
gcaaataaaagttgtcttatagaga

SEQ ID NO: 131575 - DNA, 25 bp, Artificial
  probe
  misc_feature (1)..(25): SEQ ID NO: 1354; WAN024CSN_at; Start 379; Stop 403
tttaactctaaaaatggaactcaga

SEQ ID NO: 131576 - DNA, 25 bp, Artificial
  probe
  misc_feature (1)..(25): SEQ ID NO: 1354; WAN024CSN_at; Start 179; Stop 203
gccataaaatcgaagcggtctctaa

SEQ ID NO: 131577 - DNA, 25 bp, Artificial
  probe
  misc_feature (1)..(25): SEQ ID NO: 1354; WAN024CSN_at; Start 349; Stop 373
gaggctactgtaaccttaaaagata

SEQ ID NO: 131578 - DNA, 25 bp, Artificial
  probe
  misc_feature (1)..(25): SEQ ID NO: 1354; WAN024CSN_at; Start 197; Stop 221
tctctaaaagcactacgggaatgtt

SEQ ID NO: 131579 - DNA, 25 bp, Artificial
  probe
  misc_feature (1)..(25): SEQ ID NO: 1354; WAN024CSN_at; Start 92; Stop 116
tcctttctttattggaaagtcagac

SEQ ID NO: 131580 - DNA, 25 bp, Artificial
  probe
  misc_feature (1)..(25): SEQ ID NO: 1354; WAN024CSN_at; Start 257; Stop 281
gaaaagcattctttaaacgccaagc

SEQ ID NO: 131581 - DNA, 25 bp, Artificial
  probe
  misc_feature (1)..(25): SEQ ID NO: 1354; WAN024CSN_at; Start 32; Stop 56
gacgtatagacagaattagcgcaga

SEQ ID NO: 131582 - DNA, 25 bp, Artificial
  probe
  misc_feature (1)..(25): SEQ ID NO: 1354; WAN024CSN_at; Start 61; Stop 85
cgagaaattagcgaagaaaatggcc

SEQ ID NO: 131583 - DNA, 25 bp, Artificial
  probe
  misc_feature (1)..(25): SEQ ID NO: 1354; WAN024CSN_at; Start 234; Stop 258
tatttttgaaatggacgctatgcga

SEQ ID NO: 131584 - DNA, 25 bp, Artificial
  probe
  misc_feature (1)..(25): SEQ ID NO: 1354; WAN024CSN_at; Start 106; Stop 130
gaaagtcagacaaaatccatcaaag

SEQ ID NO: 131585 - DNA, 25 bp, Artificial
  probe
  misc_feature (1)..(25): SEQ ID NO: 1354; WAN024CSN_at; Start 51; Stop 75
cgcagaaatgcgagaaattagcgaa

SEQ ID NO: 131586 - DNA, 25 bp, Artificial
  probe
  misc_feature (1)..(25): SEQ ID NO: 1354; WAN024CSN_at; Start 121; Stop 145
tccatcaaagatgagttgtcccgtt

SEQ ID NO: 131587 - DNA, 25 bp, Artificial
  probe
  misc_feature (1)..(25): SEQ ID NO: 1354; WAN024CSN_at; Start 323; Stop 347
tagagcatgctgaaaaggagtattt

SEQ ID NO: 131588 - DNA, 25 bp, Artificial
  probe
  misc_feature (1)..(25): SEQ ID NO: 1354; WAN024CSN_at; Start 157; Stop 181
gaacttcctgaattgaatgaaagcc

SEQ ID NO: 131589 - DNA, 25 bp, Artificial
  probe
  misc_feature (1)..(25): SEQ ID NO: 1354; WAN024CSN_at; Start 426; Stop 450
agagaagtttgaggaggcaatgcaa

SEQ ID NO: 131590 - DNA, 25 bp, Artificial
  probe
  misc_feature (1)..(25): SEQ ID NO: 1354; WAN024CSN_at; Start 190; Stop 214
gaagcggtctctaaaagcactacgg

SEQ ID NO: 131591 - DNA, 25 bp, Artificial
  probe
  misc_feature (1)..(25): SEQ ID NO: 1354; WAN024CSN_at; Start 393; Stop 417
tggaactcagaaagcaaataaaagt

SEQ ID NO: 131592 - DNA, 25 bp, Artificial
  probe
  misc_feature (1)..(25): SEQ ID NO: 1354; WAN024CSN_at; Start 339; Stop 363
ggagtatttagaggctactgtaacc

SEQ ID NO: 131593 - DNA, 25 bp, Artificial
  probe
  misc_feature (1)..(25): SEQ ID NO: 1354; WAN024CSN_at; Start 69; Stop 93
tagcgaagaaaatggcctaagaatc

SEQ ID NO: 131594 - DNA, 25 bp, Artificial
  probe
  misc_feature (1)..(25): SEQ ID NO: 1354; WAN024CSN_at; Start 224; Stop 248
tcgcccctggtatttttgaaatgga

SEQ ID NO: 131595 - DNA, 25 bp, Artificial
  probe
  misc_feature (1)..(25): SEQ ID NO: 1354; WAN024CSN_at; Start 172; Stop 196
aatgaaagccataaaatcgaagcgg

SEQ ID NO: 131596 - DNA, 25 bp, Artificial
  probe
  misc_feature (1)..(25): SEQ ID NO: 1354; WAN024CSN_at; Start 38; Stop 62
tagacagaattagcgcagaaatgcg

SEQ ID NO: 131597 - DNA, 25 bp, Artificial
  probe
  misc_feature (1)..(25): SEQ ID NO: 1354; WAN024CSN_at; Start 126; Stop 150
caaagatgagttgtcccgtttactt

SEQ ID NO: 131598 - DNA, 25 bp, Artificial
  probe
  misc_feature (1)..(25): SEQ ID NO: 1354; WAN024CSN_at; Start 293; Stop 317
ttgagaacgaagcagagcaacaggc

SEQ ID NO: 131599 - DNA, 25 bp, Artificial
  probe
  misc_feature (1)..(25): SEQ ID NO: 6703; WAN024CSO_at; Start 125; Stop 149
tagccattagcagcaaaagtattga

SEQ ID NO: 131600 - DNA, 25 bp, Artificial
  probe
  misc_feature (1)..(25): SEQ ID NO: 6703; WAN024CSO_at; Start 177; Stop 201
cctttttagtggttgctgtaacagt

SEQ ID NO: 131601 - DNA, 25 bp, Artificial
  probe
  misc_feature (1)..(25): SEQ ID NO: 6703; WAN024CSO_at; Start 85; Stop 109
ctcattatatgttgtaattgtcggc

SEQ ID NO: 131602 - DNA, 25 bp, Artificial
  probe
  misc_feature (1)..(25): SEQ ID NO: 6703; WAN024CSO_at; Start 45; Stop 69
taactgtattcttgtaactatccca

SEQ ID NO: 131603 - DNA, 25 bp, Artificial
  probe
  misc_feature (1)..(25): SEQ ID NO: 6703; WAN024CSO_at; Start 190; Stop 214
tgctgtaacagttgtacgggctttt

SEQ ID NO: 131604 - DNA, 25 bp, Artificial
  probe
  misc_feature (1)..(25): SEQ ID NO: 6703; WAN024CSO_at; Start 151; Stop 175
cgcatcacgcgcttttactttaacg

SEQ ID NO: 131605 - DNA, 25 bp, Artificial
  probe
  misc_feature (1)..(25): SEQ ID NO: 6703; WAN024CSO_at; Start 137; Stop 161
gcaaaagtattgatcgcatcacgcg

SEQ ID NO: 131606 - DNA, 25 bp, Artificial
  probe
  misc_feature (1)..(25): SEQ ID NO: 6703; WAN024CSO_at; Start 22; Stop 46
catggattggcgagtatttggctta

SEQ ID NO: 131607 - DNA, 25 bp, Artificial
  probe
  misc_feature (1)..(25): SEQ ID NO: 6703; WAN024CSO_at; Start 111; Stop 135
tgtctttaactgtatagccattagc

SEQ ID NO: 131608 - DNA, 25 bp, Artificial
  probe
  misc_feature (1)..(25): SEQ ID NO: 6703; WAN024CSO_at; Start 31; Stop 55
gcgagtatttggcttaactgtattc

SEQ ID NO: 131609 - DNA, 25 bp, Artificial
  probe
  misc_feature (1)..(25): SEQ ID NO: 6703; WAN024CSO_at; Start 114; Stop 138
ctttaactgtatagccattagcagc

SEQ ID NO: 131610 - DNA, 25 bp, Artificial
  probe
  misc_feature (1)..(25): SEQ ID NO: 6703; WAN024CSO_at; Start 9; Stop 33
taaccaatccctccatggattggcg

SEQ ID NO: 131611 - DNA, 25 bp, Artificial
  probe
  misc_feature (1)..(25): SEQ ID NO: 6703; WAN024CSO_at; Start 49; Stop 73
tgtattcttgtaactatcccaccaa

SEQ ID NO: 131612 - DNA, 25 bp, Artificial
  probe
  misc_feature (1)..(25): SEQ ID NO: 6703; WAN024CSO_at; Start 104; Stop 128
gtcggcttgtctttaactgtatagc

SEQ ID NO: 131613 - DNA, 25 bp, Artificial
  probe
  misc_feature (1)..(25): SEQ ID NO: 6703; WAN024CSO_at; Start 153; Stop 177
catcacgcgcttttactttaacgcc

SEQ ID NO: 131614 - DNA, 25 bp, Artificial
  probe
  misc_feature (1)..(25): SEQ ID NO: 6703; WAN024CSO_at; Start 71; Stop 95
caaacttttacaagctcattatatg

SEQ ID NO: 131615 - DNA, 25 bp, Artificial
  probe
  misc_feature (1)..(25): SEQ ID NO: 6703; WAN024CSO_at; Start 13; Stop 37
caatccctccatggattggcgagta

SEQ ID NO: 131616 - DNA, 25 bp, Artificial
  probe
  misc_feature (1)..(25): SEQ ID NO: 6703; WAN024CSO_at; Start 90; Stop 114
tatatgttgtaattgtcggcttgtc

SEQ ID NO: 131617 - DNA, 25 bp, Artificial
  probe
  misc_feature (1)..(25): SEQ ID NO: 6703; WAN024CSO_at; Start 141; Stop 165
aagtattgatcgcatcacgcgcttt

SEQ ID NO: 131618 - DNA, 25 bp, Artificial
  probe
  misc_feature (1)..(25): SEQ ID NO: 6703; WAN024CSO_at; Start 135; Stop 159
cagcaaaagtattgatcgcatcacg

SEQ ID NO: 131619 - DNA, 25 bp, Artificial
  probe
  misc_feature (1)..(25): SEQ ID NO: 6703; WAN024CSO_at; Start 183; Stop 207
tagtggttgctgtaacagttgtacg

SEQ ID NO: 131620 - DNA, 25 bp, Artificial
  probe
  misc_feature (1)..(25): SEQ ID NO: 6703; WAN024CSO_at; Start 51; Stop 75
tattcttgtaactatcccaccaaac

SEQ ID NO: 131621 - DNA, 25 bp, Artificial
  probe
  misc_feature (1)..(25): SEQ ID NO: 6703; WAN024CSO_at; Start 63; Stop 87
tatcccaccaaacttttacaagctc

SEQ ID NO: 131622 - DNA, 25 bp, Artificial
  probe
  misc_feature (1)..(25): SEQ ID NO: 6703; WAN024CSO_at; Start 175; Stop 199
gccctttttagtggttgctgtaaca

SEQ ID NO: 131623 - DNA, 25 bp, Artificial
  probe
  misc_feature (1)..(25): SEQ ID NO: 6703; WAN024CSO_at; Start 144; Stop 168
tattgatcgcatcacgcgcttttac

SEQ ID NO: 131624 - DNA, 25 bp, Artificial
  probe
  misc_feature (1)..(25): SEQ ID NO: 6703; WAN024CSO_at; Start 100; Stop 124
aattgtcggcttgtctttaactgta

SEQ ID NO: 131625 - DNA, 25 bp, Artificial
  probe
  misc_feature (1)..(25): SEQ ID NO: 6703; WAN024CSO_at; Start 26; Stop 50
gattggcgagtatttggcttaactg

SEQ ID NO: 131626 - DNA, 25 bp, Artificial
  probe
  misc_feature (1)..(25): SEQ ID NO: 6703; WAN024CSO_at; Start 139; Stop 163
aaaagtattgatcgcatcacgcgct

SEQ ID NO: 131627 - DNA, 25 bp, Artificial
  probe
  misc_feature (1)..(25): SEQ ID NO: 6703; WAN024CSO_at; Start 121; Stop 145
tgtatagccattagcagcaaaagta

SEQ ID NO: 131628 - DNA, 25 bp, Artificial
  probe
  misc_feature (1)..(25): SEQ ID NO: 6703; WAN024CSO_at; Start 17; Stop 41
ccctccatggattggcgagtatttg

SEQ ID NO: 131629 - DNA, 25 bp, Artificial
  probe
  misc_feature (1)..(25): SEQ ID NO: 6703; WAN024CSO_at; Start 129; Stop 153
cattagcagcaaaagtattgatcgc

SEQ ID NO: 131630 - DNA, 25 bp, Artificial
  probe
  misc_feature (1)..(25): SEQ ID NO: 6703; WAN024CSO_at; Start 117; Stop 141
taactgtatagccattagcagcaaa

SEQ ID NO: 131631 - DNA, 25 bp, Artificial
  probe
  misc_feature (1)..(25): SEQ ID NO: 6703; WAN024CSO_at; Start 132; Stop 156
tagcagcaaaagtattgatcgcatc

SEQ ID NO: 131632 - DNA, 25 bp, Artificial
  probe
  misc_feature (1)..(25): SEQ ID NO: 6703; WAN024CSO_at; Start 187; Stop 211
ggttgctgtaacagttgtacgggct

SEQ ID NO: 131633 - DNA, 25 bp, Artificial
  probe
  misc_feature (1)..(25): SEQ ID NO: 1213; WAN024CSP_at; Start 529; Stop 553
gaaaaggctgctgtcaaatacttag

SEQ ID NO: 131634 - DNA, 25 bp, Artificial
  probe
  misc_feature (1)..(25): SEQ ID NO: 1213; WAN024CSP_at; Start 1093; Stop 1117
tactggcatactaaccaagagaatg

SEQ ID NO: 131635 - DNA, 25 bp, Artificial
  probe
  misc_feature (1)..(25): SEQ ID NO: 1213; WAN024CSP_at; Start 919; Stop 943
gcttgtaacttacgcaaacgcctaa

SEQ ID NO: 131636 - DNA, 25 bp, Artificial
  probe
  misc_feature (1)..(25): SEQ ID NO: 1213; WAN024CSP_at; Start 60; Stop 84
tctaggcgttgaccaactaacgggc

SEQ ID NO: 131637 - DNA, 25 bp, Artificial
  probe
  misc_feature (1)..(25): SEQ ID NO: 1213; WAN024CSP_at; Start 674; Stop 698
aggctctggctcttgaatggtctga

SEQ ID NO: 131638 - DNA, 25 bp, Artificial
  probe
  misc_feature (1)..(25): SEQ ID NO: 1213; WAN024CSP_at; Start 773; Stop 797
caagcgctggttatcgtgatatacc

SEQ ID NO: 131639 - DNA, 25 bp, Artificial
  probe
  misc_feature (1)..(25): SEQ ID NO: 1213; WAN024CSP_at; Start 1044; Stop 1068
tgttcagtatagattaggccactct

SEQ ID NO: 131640 - DNA, 25 bp, Artificial
  probe
  misc_feature (1)..(25): SEQ ID NO: 1213; WAN024CSP_at; Start 1076; Stop 1100
tgatcactgaaaatacttactggca

SEQ ID NO: 131641 - DNA, 25 bp, Artificial
  probe
  misc_feature (1)..(25): SEQ ID NO: 1213; WAN024CSP_at; Start 360; Stop 384
gcaagtaaacaaatgggctgacaag

SEQ ID NO: 131642 - DNA, 25 bp, Artificial
  probe
  misc_feature (1)..(25): SEQ ID NO: 1213; WAN024CSP_at; Start 150; Stop 174
gatcaatacttttgctgctaatggc

SEQ ID NO: 131643 - DNA, 25 bp, Artificial
  probe
  misc_feature (1)..(25): SEQ ID NO: 1213; WAN024CSP_at; Start 988; Stop 1012
ggtttccgccatacacatactacta

SEQ ID NO: 131644 - DNA, 25 bp, Artificial
  probe
  misc_feature (1)..(25): SEQ ID NO: 1213; WAN024CSP_at; Start 177; Stop 201
tacagttaaagacaagccgacaatt

SEQ ID NO: 131645 - DNA, 25 bp, Artificial
  probe
  misc_feature (1)..(25): SEQ ID NO: 1213; WAN024CSP_at; Start 730; Stop 754
aataagacactaaaccgctatcagg

SEQ ID NO: 131646 - DNA, 25 bp, Artificial
  probe
  misc_feature (1)..(25): SEQ ID NO: 1213; WAN024CSP_at; Start 1014; Stop 1038
gatgctctatgctcaggttagcccg

SEQ ID NO: 131647 - DNA, 25 bp, Artificial
  probe
  misc_feature (1)..(25): SEQ ID NO: 1213; WAN024CSP_at; Start 862; Stop 886
aaattaggccgatctgaaacagttg

SEQ ID NO: 131648 - DNA, 25 bp, Artificial
  probe
  misc_feature (1)..(25): SEQ ID NO: 1213; WAN024CSP_at; Start 261; Stop 285
aaatactcgccaatccatggaggga

SEQ ID NO: 131649 - DNA, 25 bp, Artificial
  probe
  misc_feature (1)..(25): SEQ ID NO: 1213; WAN024CSP_at; Start 972; Stop 996
taacgtatcatttcatggtttccgc

SEQ ID NO: 131650 - DNA, 25 bp, Artificial
  probe
  misc_feature (1)..(25): SEQ ID NO: 1213; WAN024CSP_at; Start 126; Stop 150
cgttaaagtaaaagcgcgtgatgcg

SEQ ID NO: 131651 - DNA, 25 bp, Artificial
  probe
  misc_feature (1)..(25): SEQ ID NO: 1213; WAN024CSP_at; Start 87; Stop 111
aaaagcccgtacaactgttacagca

SEQ ID NO: 131652 - DNA, 25 bp, Artificial
  probe
  misc_feature (1)..(25): SEQ ID NO: 1213; WAN024CSP_at; Start 499; Stop 523
gatgtcatcgttccacgcaaacagc

SEQ ID NO: 131653 - DNA, 25 bp, Artificial
  probe
  misc_feature (1)..(25): SEQ ID NO: 1213; WAN024CSP_at; Start 484; Stop 508
tacaacccagctaatgatgtcatcg

SEQ ID NO: 131654 - DNA, 25 bp, Artificial
  probe
  misc_feature (1)..(25): SEQ ID NO: 1213; WAN024CSP_at; Start 654; Stop 678
cactggttgccgtattagtgaggct

SEQ ID NO: 131655 - DNA, 25 bp, Artificial
  probe
  misc_feature (1)..(25): SEQ ID NO: 1213; WAN024CSP_at; Start 952; Stop 976
tttgatgctgctggagtaactaacg

SEQ ID NO: 131656 - DNA, 25 bp, Artificial
  probe
  misc_feature (1)..(25): SEQ ID NO: 1213; WAN024CSP_at; Start 758; Stop 782
taaactcacctaaatcaagcgctgg

SEQ ID NO: 131657 - DNA, 25 bp, Artificial
  probe
  misc_feature (1)..(25): SEQ ID NO: 1213; WAN024CSP_at; Start 102; Stop 126
tgttacagcaaccactaaaaagggc

SEQ ID NO: 131658 - DNA, 25 bp, Artificial
  probe
  misc_feature (1)..(25): SEQ ID NO: 1213; WAN024CSP_at; Start 790; Stop 814
gatataccaatagacaaagccacat

SEQ ID NO: 131659 - DNA, 25 bp, Artificial
  probe
  misc_feature (1)..(25): SEQ ID NO: 1213; WAN024CSP_at; Start 246; Stop 270
gaatacagttaagccaaatactcgc

SEQ ID NO: 131660 - DNA, 25 bp, Artificial
  probe
  misc_feature (1)..(25): SEQ ID NO: 1213; WAN024CSP_at; Start 694; Stop 718
tctgatattgacctagaaagcggtg

SEQ ID NO: 131661 - DNA, 25 bp, Artificial
  probe
  misc_feature (1)..(25): SEQ ID NO: 1213; WAN024CSP_at; Start 375; Stop 399
ggctgacaaggcaaataaaggcgaa

SEQ ID NO: 131662 - DNA, 25 bp, Artificial
  probe
  misc_feature (1)..(25): SEQ ID NO: 1213; WAN024CSP_at; Start 709; Stop 733
gaaagcggtgttatcagcatcaata

SEQ ID NO: 131663 - DNA, 25 bp, Artificial
  probe
  misc_feature (1)..(25): SEQ ID NO: 1213; WAN024CSP_at; Start 639; Stop 663
taagactttattggccactggttgc

SEQ ID NO: 131664 - DNA, 25 bp, Artificial
  probe
  misc_feature (1)..(25): SEQ ID NO: 1213; WAN024CSP_at; Start 457; Stop 481
tatggcgtagctatccaggtaatac

SEQ ID NO: 131665 - DNA, 25 bp, Artificial
  probe
  misc_feature (1)..(25): SEQ ID NO: 1213; WAN024CSP_at; Start 1027; Stop 1051
caggttagcccgaaagatgttcagt

SEQ ID NO: 131666 - DNA, 25 bp, Artificial
  probe
  misc_feature (1)..(25): SEQ ID NO: 1213; WAN024CSP_at; Start 848; Stop 872
aaattcagtcttggaaattaggccg

SEQ ID NO: 131667 - DNA, 25 bp, Artificial
  probe
  misc_feature (1)..(25): SEQ ID NO: 5856; WAN024CSQ_at; Start 55; Stop 79
ttgactagcaatgtaacgatgaccg

SEQ ID NO: 131668 - DNA, 25 bp, Artificial
  probe
  misc_feature (1)..(25): SEQ ID NO: 5856; WAN024CSQ_at; Start 190; Stop 214
taccttgtgaggtacttccttgact

SEQ ID NO: 131669 - DNA, 25 bp, Artificial
  probe
  misc_feature (1)..(25): SEQ ID NO: 5856; WAN024CSQ_at; Start 12; Stop 36
tatctgcaaaagtacgaagggcacc

SEQ ID NO: 131670 - DNA, 25 bp, Artificial
  probe
  misc_feature (1)..(25): SEQ ID NO: 5856; WAN024CSQ_at; Start 60; Stop 84
tagcaatgtaacgatgaccgttgac

SEQ ID NO: 131671 - DNA, 25 bp, Artificial
  probe
  misc_feature (1)..(25): SEQ ID NO: 5856; WAN024CSQ_at; Start 163; Stop 187
ttgacgaagttgttcttgaagtcct

SEQ ID NO: 131672 - DNA, 25 bp, Artificial
  probe
  misc_feature (1)..(25): SEQ ID NO: 5856; WAN024CSQ_at; Start 138; Stop 162
tcaactcagcattttctttttgaag

SEQ ID NO: 131673 - DNA, 25 bp, Artificial
  probe
  misc_feature (1)..(25): SEQ ID NO: 5856; WAN024CSQ_at; Start 28; Stop 52
aagggcaccggcatcggatacagac

SEQ ID NO: 131674 - DNA, 25 bp, Artificial
  probe
  misc_feature (1)..(25): SEQ ID NO: 5856; WAN024CSQ_at; Start 296; Stop 320
actgccaagatacggcgagttcctg

SEQ ID NO: 131675 - DNA, 25 bp, Artificial
  probe
  misc_feature (1)..(25): SEQ ID NO: 5856; WAN024CSQ_at; Start 41; Stop 65
tcggatacagacacttgactagcaa

SEQ ID NO: 131676 - DNA, 25 bp, Artificial
  probe
  misc_feature (1)..(25): SEQ ID NO: 5856; WAN024CSQ_at; Start 220; Stop 244
tgctttcaaggttgctgcgatagct

SEQ ID NO: 131677 - DNA, 25 bp, Artificial
  probe
  misc_feature (1)..(25): SEQ ID NO: 5856; WAN024CSQ_at; Start 35; Stop 59
ccggcatcggatacagacacttgac

SEQ ID NO: 131678 - DNA, 25 bp, Artificial
  probe
  misc_feature (1)..(25): SEQ ID NO: 5856; WAN024CSQ_at; Start 198; Stop 222
gaggtacttccttgacttgaggtgc

SEQ ID NO: 131679 - DNA, 25 bp, Artificial
  probe
  misc_feature (1)..(25): SEQ ID NO: 5856; WAN024CSQ_at; Start 147; Stop 171
cattttctttttgaagttgacgaag

SEQ ID NO: 131680 - DNA, 25 bp, Artificial
  probe
  misc_feature (1)..(25): SEQ ID NO: 5856; WAN024CSQ_at; Start 257; Stop 281
tcttgttcacgataggcttcaaagg

SEQ ID NO: 131681 - DNA, 25 bp, Artificial
  probe
  misc_feature (1)..(25): SEQ ID NO: 5856; WAN024CSQ_at; Start 125; Stop 149
gcggctttttctttcaactcagcat

SEQ ID NO: 131682 - DNA, 25 bp, Artificial
  probe
  misc_feature (1)..(25): SEQ ID NO: 5856; WAN024CSQ_at; Start 249; Stop 273
gagcatcctcttgttcacgataggc

SEQ ID NO: 131683 - DNA, 25 bp, Artificial
  probe
  misc_feature (1)..(25): SEQ ID NO: 5856; WAN024CSQ_at; Start 78; Stop 102
cgttgacttccttaacatctttgaa

SEQ ID NO: 131684 - DNA, 25 bp, Artificial
  probe
  misc_feature (1)..(25): SEQ ID NO: 5856; WAN024CSQ_at; Start 177; Stop 201
cttgaagtccttctaccttgtgagg

SEQ ID NO: 131685 - DNA, 25 bp, Artificial
  probe
  misc_feature (1)..(25): SEQ ID NO: 5856; WAN024CSQ_at; Start 112; Stop 136
tgcggctgcagctgcggctttttct

SEQ ID NO: 131686 - DNA, 25 bp, Artificial
  probe
  misc_feature (1)..(25): SEQ ID NO: 5856; WAN024CSQ_at; Start 276; Stop 300
caaaggcttccttaccagtcactgc

SEQ ID NO: 131687 - DNA, 25 bp, Artificial
  probe
  misc_feature (1)..(25): SEQ ID NO: 5856; WAN024CSQ_at; Start 203; Stop 227
acttccttgacttgaggtgctttca

SEQ ID NO: 131688 - DNA, 25 bp, Artificial
  probe
  misc_feature (1)..(25): SEQ ID NO: 5856; WAN024CSQ_at; Start 228; Stop 252
aggttgctgcgatagctttaagagc

SEQ ID NO: 131689 - DNA, 25 bp, Artificial
  probe
  misc_feature (1)..(25): SEQ ID NO: 5856; WAN024CSQ_at; Start 119; Stop 143
gcagctgcggctttttctttcaact

SEQ ID NO: 131690 - DNA, 25 bp, Artificial
  probe
  misc_feature (1)..(25): SEQ ID NO: 5856; WAN024CSQ_at; Start 95; Stop 119
tctttgaagatatcgcctgcggctg

SEQ ID NO: 131691 - DNA, 25 bp, Artificial
  probe
  misc_feature (1)..(25): SEQ ID NO: 5856; WAN024CSQ_at; Start 93; Stop 117
catctttgaagatatcgcctgcggc

SEQ ID NO: 131692 - DNA, 25 bp, Artificial
  probe
  misc_feature (1)..(25): SEQ ID NO: 5856; WAN024CSQ_at; Start 100; Stop 124
gaagatatcgcctgcggctgcagct

SEQ ID NO: 131693 - DNA, 25 bp, Artificial
  probe
  misc_feature (1)..(25): SEQ ID NO: 5856; WAN024CSQ_at; Start 70; Stop 94
acgatgaccgttgacttccttaaca

SEQ ID NO: 131694 - DNA, 25 bp, Artificial
  probe
  misc_feature (1)..(25): SEQ ID NO: 5856; WAN024CSQ_at; Start 267; Stop 291
gataggcttcaaaggcttccttacc

SEQ ID NO: 131695 - DNA, 25 bp, Artificial
  probe
  misc_feature (1)..(25): SEQ ID NO: 5856; WAN024CSQ_at; Start 16; Stop 40
tgcaaaagtacgaagggcaccggca

SEQ ID NO: 131696 - DNA, 25 bp, Artificial
  probe
  misc_feature (1)..(25): SEQ ID NO: 5856; WAN024CSQ_at; Start 215; Stop 239
tgaggtgctttcaaggttgctgcga

SEQ ID NO: 131697 - DNA, 25 bp, Artificial
  probe
  misc_feature (1)..(25): SEQ ID NO: 5856; WAN024CSQ_at; Start 262; Stop 286
ttcacgataggcttcaaaggcttcc

SEQ ID NO: 131698 - DNA, 25 bp, Artificial
  probe
  misc_feature (1)..(25): SEQ ID NO: 5856; WAN024CSQ_at; Start 235; Stop 259
tgcgatagctttaagagcatcctct

SEQ ID NO: 131699 - DNA, 25 bp, Artificial
  probe
  misc_feature (1)..(25): SEQ ID NO: 5856; WAN024CSQ_at; Start 291; Stop 315
cagtcactgccaagatacggcgagt

SEQ ID NO: 131700 - DNA, 25 bp, Artificial
  probe
  misc_feature (1)..(25): SEQ ID NO: 5856; WAN024CSQ_at; Start 6; Stop 30
tccagttatctgcaaaagtacgaag

SEQ ID NO: 131701 - DNA, 25 bp, Artificial
  probe
  misc_feature (1)..(25): SEQ ID NO: 4216; WAN024CSR_at; Start 64; Stop 88
tttctcgacttcacggataatcggc

SEQ ID NO: 131702 - DNA, 25 bp, Artificial
  probe
  misc_feature (1)..(25): SEQ ID NO: 4216; WAN024CSR_at; Start 111; Stop 135
tggtcttagccccttggataacggc

SEQ ID NO: 131703 - DNA, 25 bp, Artificial
  probe
  misc_feature (1)..(25): SEQ ID NO: 4216; WAN024CSR_at; Start 19; Stop 43
gaagctcatgttgtcgccatcttgg

SEQ ID NO: 131704 - DNA, 25 bp, Artificial
  probe
  misc_feature (1)..(25): SEQ ID NO: 4216; WAN024CSR_at; Start 124; Stop 148
ttggataacggccaccaaacgctcc

SEQ ID NO: 131705 - DNA, 25 bp, Artificial
  probe
  misc_feature (1)..(25): SEQ ID NO: 4216; WAN024CSR_at; Start 116; Stop 140
ttagccccttggataacggccacca

SEQ ID NO: 131706 - DNA, 25 bp, Artificial
  probe
  misc_feature (1)..(25): SEQ ID NO: 4216; WAN024CSR_at; Start 59; Stop 83
gacaatttctcgacttcacggataa

SEQ ID NO: 131707 - DNA, 25 bp, Artificial
  probe
  misc_feature (1)..(25): SEQ ID NO: 4216; WAN024CSR_at; Start 47; Stop 71
taaaccttaccagacaatttctcga

SEQ ID NO: 131708 - DNA, 25 bp, Artificial
  probe
  misc_feature (1)..(25): SEQ ID NO: 4216; WAN024CSR_at; Start 197; Stop 221
ctacgaggaacagcagggtctgcgt

SEQ ID NO: 131709 - DNA, 25 bp, Artificial
  probe
  misc_feature (1)..(25): SEQ ID NO: 4216; WAN024CSR_at; Start 81; Stop 105
taatcggcatgaagaggtccgtttc

SEQ ID NO: 131710 - DNA, 25 bp, Artificial
  probe
  misc_feature (1)..(25): SEQ ID NO: 4216; WAN024CSR_at; Start 25; Stop 49
catgttgtcgccatcttggtcataa

SEQ ID NO: 131711 - DNA, 25 bp, Artificial
  probe
  misc_feature (1)..(25): SEQ ID NO: 4216; WAN024CSR_at; Start 206; Stop 230
acagcagggtctgcgttaaattgtg

SEQ ID NO: 131712 - DNA, 25 bp, Artificial
  probe
  misc_feature (1)..(25): SEQ ID NO: 4216; WAN024CSR_at; Start 84; Stop 108
tcggcatgaagaggtccgtttcaaa

SEQ ID NO: 131713 - DNA, 25 bp, Artificial
  probe
  misc_feature (1)..(25): SEQ ID NO: 4216; WAN024CSR_at; Start 57; Stop 81
cagacaatttctcgacttcacggat

SEQ ID NO: 131714 - DNA, 25 bp, Artificial
  probe
  misc_feature (1)..(25): SEQ ID NO: 4216; WAN024CSR_at; Start 180; Stop 204
gcaattccttgtattcgctacgagg

SEQ ID NO: 131715 - DNA, 25 bp, Artificial
  probe
  misc_feature (1)..(25): SEQ ID NO: 4216; WAN024CSR_at; Start 31; Stop 55
gtcgccatcttggtcataaacctta

SEQ ID NO: 131716 - DNA, 25 bp, Artificial
  probe
  misc_feature (1)..(25): SEQ ID NO: 4216; WAN024CSR_at; Start 164; Stop 188
tcaatgttcttatgtggcaattcct

SEQ ID NO: 131717 - DNA, 25 bp, Artificial
  probe
  misc_feature (1)..(25): SEQ ID NO: 4216; WAN024CSR_at; Start 149; Stop 173
aaaccagcgcccgtatcaatgttct

SEQ ID NO: 131718 - DNA, 25 bp, Artificial
  probe
  misc_feature (1)..(25): SEQ ID NO: 4216; WAN024CSR_at; Start 76; Stop 100
acggataatcggcatgaagaggtcc

SEQ ID NO: 131719 - DNA, 25 bp, Artificial
  probe
  misc_feature (1)..(25): SEQ ID NO: 4216; WAN024CSR_at; Start 38; Stop 62
tcttggtcataaaccttaccagaca

SEQ ID NO: 131720 - DNA, 25 bp, Artificial
  probe
  misc_feature (1)..(25): SEQ ID NO: 4216; WAN024CSR_at; Start 173; Stop 197
ttatgtggcaattccttgtattcgc

SEQ ID NO: 131721 - DNA, 25 bp, Artificial
  probe
  misc_feature (1)..(25): SEQ ID NO: 4216; WAN024CSR_at; Start 5; Stop 29
tctgcgataaccttgaagctcatgt

SEQ ID NO: 131722 - DNA, 25 bp, Artificial
  probe
  misc_feature (1)..(25): SEQ ID NO: 4216; WAN024CSR_at; Start 193; Stop 217
ttcgctacgaggaacagcagggtct

SEQ ID NO: 131723 - DNA, 25 bp, Artificial
  probe
  misc_feature (1)..(25): SEQ ID NO: 4216; WAN024CSR_at; Start 191; Stop 215
tattcgctacgaggaacagcagggt

SEQ ID NO: 131724 - DNA, 25 bp, Artificial
  probe
  misc_feature (1)..(25): SEQ ID NO: 4216; WAN024CSR_at; Start 89; Stop 113
atgaagaggtccgtttcaaagttgg

SEQ ID NO: 131725 - DNA, 25 bp, Artificial
  probe
  misc_feature (1)..(25): SEQ ID NO: 4216; WAN024CSR_at; Start 15; Stop 39
ccttgaagctcatgttgtcgccatc

SEQ ID NO: 131726 - DNA, 25 bp, Artificial
  probe
  misc_feature (1)..(25): SEQ ID NO: 4216; WAN024CSR_at; Start 186; Stop 210
ccttgtattcgctacgaggaacagc

SEQ ID NO: 131727 - DNA, 25 bp, Artificial
  probe
  misc_feature (1)..(25): SEQ ID NO: 4216; WAN024CSR_at; Start 104; Stop 128
tcaaagttggtcttagccccttgga

SEQ ID NO: 131728 - DNA, 25 bp, Artificial
  probe
  misc_feature (1)..(25): SEQ ID NO: 4216; WAN024CSR_at; Start 159; Stop 183
ccgtatcaatgttcttatgtggcaa

SEQ ID NO: 131729 - DNA, 25 bp, Artificial
  probe
  misc_feature (1)..(25): SEQ ID NO: 4216; WAN024CSR_at; Start 153; Stop 177
cagcgcccgtatcaatgttcttatg

SEQ ID NO: 131730 - DNA, 25 bp, Artificial
  probe
  misc_feature (1)..(25): SEQ ID NO: 4216; WAN024CSR_at; Start 1; Stop 25
gtggtctgcgataaccttgaagctc

SEQ ID NO: 131731 - DNA, 25 bp, Artificial
  probe
  misc_feature (1)..(25): SEQ ID NO: 4216; WAN024CSR_at; Start 12; Stop 36
taaccttgaagctcatgttgtcgcc

SEQ ID NO: 131732 - DNA, 25 bp, Artificial
  probe
  misc_feature (1)..(25): SEQ ID NO: 4216; WAN024CSR_at; Start 200; Stop 224
cgaggaacagcagggtctgcgttaa

SEQ ID NO: 131733 - DNA, 25 bp, Artificial
  probe
  misc_feature (1)..(25): SEQ ID NO: 4216; WAN024CSR_at; Start 68; Stop 92
tcgacttcacggataatcggcatga

SEQ ID NO: 131734 - DNA, 25 bp, Artificial
  probe
  misc_feature (1)..(25): SEQ ID NO: 4216; WAN024CSR_at; Start 127; Stop 151
gataacggccaccaaacgctccaaa

SEQ ID NO: 131735 - DNA, 25 bp, Artificial
  probe
  misc_feature (1)..(25): SEQ ID NO: 1607; WAN024CSS_at; Start 183; Stop 207
gaagttcctcagcagttactgcttg

SEQ ID NO: 131736 - DNA, 25 bp, Artificial
  probe
  misc_feature (1)..(25): SEQ ID NO: 1607; WAN024CSS_at; Start 14; Stop 38
caaagttcaatagagtagtcaccga

SEQ ID NO: 131737 - DNA, 25 bp, Artificial
  probe
  misc_feature (1)..(25): SEQ ID NO: 1607; WAN024CSS_at; Start 289; Stop 313
aagggcagcgtgaagcaaatgagtc

SEQ ID NO: 131738 - DNA, 25 bp, Artificial
  probe
  misc_feature (1)..(25): SEQ ID NO: 1607; WAN024CSS_at; Start 37; Stop 61
gatagtcacgacacgaacttccttg

SEQ ID NO: 131739 - DNA, 25 bp, Artificial
  probe
  misc_feature (1)..(25): SEQ ID NO: 1607; WAN024CSS_at; Start 137; Stop 161
tcaagtgcttcccaaattttctcgt

SEQ ID NO: 131740 - DNA, 25 bp, Artificial
  probe
  misc_feature (1)..(25): SEQ ID NO: 1607; WAN024CSS_at; Start 173; Stop 197
tcaatcgcacgaagttcctcagcag

SEQ ID NO: 131741 - DNA, 25 bp, Artificial
  probe
  misc_feature (1)..(25): SEQ ID NO: 1607; WAN024CSS_at; Start 406; Stop 430
tgtatgaagggcttgaccatttggg

SEQ ID NO: 131742 - DNA, 25 bp, Artificial
  probe
  misc_feature (1)..(25): SEQ ID NO: 1607; WAN024CSS_at; Start 304; Stop 328
caaatgagtcgcagtgtggtttttc

SEQ ID NO: 131743 - DNA, 25 bp, Artificial
  probe
  misc_feature (1)..(25): SEQ ID NO: 1607; WAN024CSS_at; Start 275; Stop 299
ccaaggatattgtgaagggcagcgt

SEQ ID NO: 131744 - DNA, 25 bp, Artificial
  probe
  misc_feature (1)..(25): SEQ ID NO: 1607; WAN024CSS_at; Start 63; Stop 87
cgtatttctcaccaaagagggccat

SEQ ID NO: 131745 - DNA, 25 bp, Artificial
  probe
  misc_feature (1)..(25): SEQ ID NO: 1607; WAN024CSS_at; Start 22; Stop 46
aatagagtagtcaccgatagtcacg

SEQ ID NO: 131746 - DNA, 25 bp, Artificial
  probe
  misc_feature (1)..(25): SEQ ID NO: 1607; WAN024CSS_at; Start 361; Stop 385
caaggtatattcttggttcaaggca

SEQ ID NO: 131747 - DNA, 25 bp, Artificial
  probe
  misc_feature (1)..(25): SEQ ID NO: 1607; WAN024CSS_at; Start 147; Stop 171
cccaaattttctcgttaacttgctg

SEQ ID NO: 131748 - DNA, 25 bp, Artificial
  probe
  misc_feature (1)..(25): SEQ ID NO: 1607; WAN024CSS_at; Start 199; Stop 223
tactgcttggaagtgggtaaagtca

SEQ ID NO: 131749 - DNA, 25 bp, Artificial
  probe
  misc_feature (1)..(25): SEQ ID NO: 1607; WAN024CSS_at; Start 162; Stop 186
taacttgctgttcaatcgcacgaag

SEQ ID NO: 131750 - DNA, 25 bp, Artificial
  probe
  misc_feature (1)..(25): SEQ ID NO: 1607; WAN024CSS_at; Start 119; Stop 143
gtttcaactgtcttcacttcaagtg

SEQ ID NO: 131751 - DNA, 25 bp, Artificial
  probe
  misc_feature (1)..(25): SEQ ID NO: 1607; WAN024CSS_at; Start 46; Stop 70
gacacgaacttccttgccgtatttc

SEQ ID NO: 131752 - DNA, 25 bp, Artificial
  probe
  misc_feature (1)..(25): SEQ ID NO: 1607; WAN024CSS_at; Start 243; Stop 267
cgttaagagatcctgcctgtgttgc

SEQ ID NO: 131753 - DNA, 25 bp, Artificial
  probe
  misc_feature (1)..(25): SEQ ID NO: 1607; WAN024CSS_at; Start 333; Stop 357
cacggtgacggcgattgctatcaat

SEQ ID NO: 131754 - DNA, 25 bp, Artificial
  probe
  misc_feature (1)..(25): SEQ ID NO: 1607; WAN024CSS_at; Start 437; Stop 461
tgaacattggtcacagtagccacaa

SEQ ID NO: 131755 - DNA, 25 bp, Artificial
  probe
  misc_feature (1)..(25): SEQ ID NO: 1607; WAN024CSS_at; Start 393; Stop 417
caaggacttcaactgtatgaagggc

SEQ ID NO: 131756 - DNA, 25 bp, Artificial
  probe
  misc_feature (1)..(25): SEQ ID NO: 1607; WAN024CSS_at; Start 214; Stop 238
ggtaaagtcaaagcgaaggaattca

SEQ ID NO: 131757 - DNA, 25 bp, Artificial
  probe
  misc_feature (1)..(25): SEQ ID NO: 1607; WAN024CSS_at; Start 89; Stop 113
gctcccatttctttagcagtgtcaa

SEQ ID NO: 131758 - DNA, 25 bp, Artificial
  probe
  misc_feature (1)..(25): SEQ ID NO: 1607; WAN024CSS_at; Start 370; Stop 394
ttcttggttcaaggcaagcggtgca

SEQ ID NO: 131759 - DNA, 25 bp, Artificial
  probe
  misc_feature (1)..(25): SEQ ID NO: 1607; WAN024CSS_at; Start 102; Stop 126
tagcagtgtcaatatccgtttcaac

SEQ ID NO: 131760 - DNA, 25 bp, Artificial
  probe
  misc_feature (1)..(25): SEQ ID NO: 1607; WAN024CSS_at; Start 231; Stop 255
ggaattcaacttcgttaagagatcc

SEQ ID NO: 131761 - DNA, 25 bp, Artificial
  probe
  misc_feature (1)..(25): SEQ ID NO: 1607; WAN024CSS_at; Start 260; Stop 284
tgtgttgcgtggtttccaaggatat

SEQ ID NO: 131762 - DNA, 25 bp, Artificial
  probe
  misc_feature (1)..(25): SEQ ID NO: 1607; WAN024CSS_at; Start 320; Stop 344
tggtttttcatgacacggtgacggc

SEQ ID NO: 131763 - DNA, 25 bp, Artificial
  probe
  misc_feature (1)..(25): SEQ ID NO: 1607; WAN024CSS_at; Start 75; Stop 99
caaagagggccatagctcccatttc

SEQ ID NO: 131764 - DNA, 25 bp, Artificial
  probe
  misc_feature (1)..(25): SEQ ID NO: 1607; WAN024CSS_at; Start 429; Stop 453
gggctttctgaacattggtcacagt

SEQ ID NO: 131765 - DNA, 25 bp, Artificial
  probe
  misc_feature (1)..(25): SEQ ID NO: 1607; WAN024CSS_at; Start 254; Stop 278
cctgcctgtgttgcgtggtttccaa

SEQ ID NO: 131766 - DNA, 25 bp, Artificial
  probe
  misc_feature (1)..(25): SEQ ID NO: 1607; WAN024CSS_at; Start 379; Stop 403
caaggcaagcggtgcaaggacttca

SEQ ID NO: 131767 - DNA, 25 bp, Artificial
  probe
  misc_feature (1)..(25): SEQ ID NO: 1607; WAN024CSS_at; Start 3; Stop 27
gagtaccaccacaaagttcaataga

SEQ ID NO: 131768 - DNA, 25 bp, Artificial
  probe
  misc_feature (1)..(25): SEQ ID NO: 1607; WAN024CSS_at; Start 345; Stop 369
gattgctatcaattgccaaggtata

SEQ ID NO: 131769 - DNA, 25 bp, Artificial
  probe
  misc_feature (1)..(25): SEQ ID NO: 3918; WAN024CST_at; Start 438; Stop 462
cgtggattttcagggataatggtcc

SEQ ID NO: 131770 - DNA, 25 bp, Artificial
  probe
  misc_feature (1)..(25): SEQ ID NO: 3918; WAN024CST_at; Start 117; Stop 141
gtatctggtccagaaggtcccgcac

SEQ ID NO: 131771 - DNA, 25 bp, Artificial
  probe
  misc_feature (1)..(25): SEQ ID NO: 3918; WAN024CST_at; Start 258; Stop 282
gcagggaaatcaaaccattcagggc

SEQ ID NO: 131772 - DNA, 25 bp, Artificial
  probe
  misc_feature (1)..(25): SEQ ID NO: 3918; WAN024CST_at; Start 298; Stop 322
aagcccaagtgatagcttcgtcacg

SEQ ID NO: 131773 - DNA, 25 bp, Artificial
  probe
  misc_feature (1)..(25): SEQ ID NO: 3918; WAN024CST_at; Start 71; Stop 95
gatattttctgggtcaaaggcttcc

SEQ ID NO: 131774 - DNA, 25 bp, Artificial
  probe
  misc_feature (1)..(25): SEQ ID NO: 3918; WAN024CST_at; Start 55; Stop 79
caagcaggcgaagaccgatattttc

SEQ ID NO: 131775 - DNA, 25 bp, Artificial
  probe
  misc_feature (1)..(25): SEQ ID NO: 3918; WAN024CST_at; Start 40; Stop 64
tttcaatatcttctgcaagcaggcg

SEQ ID NO: 131776 - DNA, 25 bp, Artificial
  probe
  misc_feature (1)..(25): SEQ ID NO: 3918; WAN024CST_at; Start 16; Stop 40
tccagatttcaatataacggtcgtt

SEQ ID NO: 131777 - DNA, 25 bp, Artificial
  probe
  misc_feature (1)..(25): SEQ ID NO: 3918; WAN024CST_at; Start 203; Stop 227
ccagcggttgtaagaatctttatcg

SEQ ID NO: 131778 - DNA, 25 bp, Artificial
  probe
  misc_feature (1)..(25): SEQ ID NO: 3918; WAN024CST_at; Start 506; Stop 530
caaaagagttgggtcatttacagga

SEQ ID NO: 131779 - DNA, 25 bp, Artificial
  probe
  misc_feature (1)..(25): SEQ ID NO: 3918; WAN024CST_at; Start 452; Stop 476
gataatggtcccgtcaaagtatttc

SEQ ID NO: 131780 - DNA, 25 bp, Artificial
  probe
  misc_feature (1)..(25): SEQ ID NO: 3918; WAN024CST_at; Start 404; Stop 428
gttggtacggatagccttttgggca

SEQ ID NO: 131781 - DNA, 25 bp, Artificial
  probe
  misc_feature (1)..(25): SEQ ID NO: 3918; WAN024CST_at; Start 160; Stop 184
cctcaattggaatcaagtgacttgg

SEQ ID NO: 131782 - DNA, 25 bp, Artificial
  probe
  misc_feature (1)..(25): SEQ ID NO: 3918; WAN024CST_at; Start 478; Stop 502
taagggttgctaccccagagttgat

SEQ ID NO: 131783 - DNA, 25 bp, Artificial
  probe
  misc_feature (1)..(25): SEQ ID NO: 3918; WAN024CST_at; Start 191; Stop 215
tcccacttcaatccagcggttgtaa

SEQ ID NO: 131784 - DNA, 25 bp, Artificial
  probe
  misc_feature (1)..(25): SEQ ID NO: 3918; WAN024CST_at; Start 355; Stop 379
tttcaaacatggtatggtgacgcgc

SEQ ID NO: 131785 - DNA, 25 bp, Artificial
  probe
  misc_feature (1)..(25): SEQ ID NO: 3918; WAN024CST_at; Start 395; Stop 419
ttcgatgtcgttggtacggatagcc

SEQ ID NO: 131786 - DNA, 25 bp, Artificial
  probe
  misc_feature (1)..(25): SEQ ID NO: 3918; WAN024CST_at; Start 145; Stop 169
tttcccagaagttgtcctcaattgg

SEQ ID NO: 131787 - DNA, 25 bp, Artificial
  probe
  misc_feature (1)..(25): SEQ ID NO: 3918; WAN024CST_at; Start 419; Stop 443
cttttgggcattggtaatacgtgga

SEQ ID NO: 131788 - DNA, 25 bp, Artificial
  probe
  misc_feature (1)..(25): SEQ ID NO: 3918; WAN024CST_at; Start 103; Stop 127
caaagaagatttctgtatctggtcc

SEQ ID NO: 131789 - DNA, 25 bp, Artificial
  probe
  misc_feature (1)..(25): SEQ ID NO: 3918; WAN024CST_at; Start 223; Stop 247
tatcgtctggatagtaggtcatgta

SEQ ID NO: 131790 - DNA, 25 bp, Artificial
  probe
  misc_feature (1)..(25): SEQ ID NO: 3918; WAN024CST_at; Start 1; Stop 25
gtgacaaaacgatgttccagatttc

SEQ ID NO: 131791 - DNA, 25 bp, Artificial
  probe
  misc_feature (1)..(25): SEQ ID NO: 3918; WAN024CST_at; Start 129; Stop 153
gaaggtcccgcaccgatttcccaga

SEQ ID NO: 131792 - DNA, 25 bp, Artificial
  probe
  misc_feature (1)..(25): SEQ ID NO: 3918; WAN024CST_at; Start 239; Stop 263
ggtcatgtaaagtttttcagcaggg

SEQ ID NO: 131793 - DNA, 25 bp, Artificial
  probe
  misc_feature (1)..(25): SEQ ID NO: 3918; WAN024CST_at; Start 491; Stop 515
cccagagttgatccacaaaagagtt

SEQ ID NO: 131794 - DNA, 25 bp, Artificial
  probe
  misc_feature (1)..(25): SEQ ID NO: 3918; WAN024CST_at; Start 93; Stop 117
tccccacggtcaaagaagatttctg

SEQ ID NO: 131795 - DNA, 25 bp, Artificial
  probe
  misc_feature (1)..(25): SEQ ID NO: 3918; WAN024CST_at; Start 284; Stop 308
tgtcaaaagctcataagcccaagtg

SEQ ID NO: 131796 - DNA, 25 bp, Artificial
  probe
  misc_feature (1)..(25): SEQ ID NO: 3918; WAN024CST_at; Start 272; Stop 296
ccattcagggcttgtcaaaagctca

SEQ ID NO: 131797 - DNA, 25 bp, Artificial
  probe
  misc_feature (1)..(25): SEQ ID NO: 3918; WAN024CST_at; Start 176; Stop 200
gtgacttggatccactcccacttca

SEQ ID NO: 131798 - DNA, 25 bp, Artificial
  probe
  misc_feature (1)..(25): SEQ ID NO: 3918; WAN024CST_at; Start 327; Stop 351
taatccccgatagagaagttcccca

SEQ ID NO: 131799 - DNA, 25 bp, Artificial
  probe
  misc_feature (1)..(25): SEQ ID NO: 3918; WAN024CST_at; Start 520; Stop 544
catttacaggaaccaaacttactga

SEQ ID NO: 131800 - DNA, 25 bp, Artificial
  probe
  misc_feature (1)..(25): SEQ ID NO: 3918; WAN024CST_at; Start 80; Stop 104
tgggtcaaaggcttccccacggtca

SEQ ID NO: 131801 - DNA, 25 bp, Artificial
  probe
  misc_feature (1)..(25): SEQ ID NO: 3918; WAN024CST_at; Start 312; Stop 336
gcttcgtcacggaagtaatccccga

SEQ ID NO: 131802 - DNA, 25 bp, Artificial
  probe
  misc_feature (1)..(25): SEQ ID NO: 3918; WAN024CST_at; Start 341; Stop 365
gaagttccccagcatttcaaacatg

SEQ ID NO: 131803 - DNA, 25 bp, Artificial
  probe
  misc_feature (1)..(25): SEQ ID NO: 809; WAN024CSU_at; Start 633; Stop 657
agaccctgctgttcctcgtagcgaa

SEQ ID NO: 131804 - DNA, 25 bp, Artificial
  probe
  misc_feature (1)..(25): SEQ ID NO: 809; WAN024CSU_at; Start 1609; Stop 1633
catacagttgaagtccttgcaccgc

SEQ ID NO: 131805 - DNA, 25 bp, Artificial
  probe
  misc_feature (1)..(25): SEQ ID NO: 809; WAN024CSU_at; Start 1575; Stop 1599
caatgttcagaaagccccaaatggt

SEQ ID NO: 131806 - DNA, 25 bp, Artificial
  probe
  misc_feature (1)..(25): SEQ ID NO: 809; WAN024CSU_at; Start 15; Stop 39
tagtgcacaagtacgccaaatgtgg

SEQ ID NO: 131807 - DNA, 25 bp, Artificial
  probe
  misc_feature (1)..(25): SEQ ID NO: 809; WAN024CSU_at; Start 1463; Stop 1487
gaactgcctctcttatctttgcgga

SEQ ID NO: 131808 - DNA, 25 bp, Artificial
  probe
  misc_feature (1)..(25): SEQ ID NO: 809; WAN024CSU_at; Start 1258; Stop 1282
gaccgtgaaggttttgaagcagcca

SEQ ID NO: 131809 - DNA, 25 bp, Artificial
  probe
  misc_feature (1)..(25): SEQ ID NO: 809; WAN024CSU_at; Start 397; Stop 421
gataaagattcttacaaccgctgga

SEQ ID NO: 131810 - DNA, 25 bp, Artificial
  probe
  misc_feature (1)..(25): SEQ ID NO: 809; WAN024CSU_at; Start 2345; Stop 2369
tgtctgtatccgatgccggtgccct

SEQ ID NO: 131811 - DNA, 25 bp, Artificial
  probe
  misc_feature (1)..(25): SEQ ID NO: 809; WAN024CSU_at; Start 673; Stop 697
cataagaacattgatacgggcgctg

SEQ ID NO: 131812 - DNA, 25 bp, Artificial
  probe
  misc_feature (1)..(25): SEQ ID NO: 809; WAN024CSU_at; Start 504; Stop 528
tacagaaatcttctttgaccgtggg

SEQ ID NO: 131813 - DNA, 25 bp, Artificial
  probe
  misc_feature (1)..(25): SEQ ID NO: 809; WAN024CSU_at; Start 2080; Stop 2104
ggaactcgccgtatcttggcagtga

SEQ ID NO: 131814 - DNA, 25 bp, Artificial
  probe
  misc_feature (1)..(25): SEQ ID NO: 809; WAN024CSU_at; Start 1520; Stop 1544
tagctgactacggacaaatcttgga

SEQ ID NO: 131815 - DNA, 25 bp, Artificial
  probe
  misc_feature (1)..(25): SEQ ID NO: 809; WAN024CSU_at; Start 1753; Stop 1777
gcaacacaggcaggatctcttaacg

SEQ ID NO: 131816 - DNA, 25 bp, Artificial
  probe
  misc_feature (1)..(25): SEQ ID NO: 809; WAN024CSU_at; Start 1937; Stop 1961
ccctctttggtgagaaatacggcaa

SEQ ID NO: 131817 - DNA, 25 bp, Artificial
  probe
  misc_feature (1)..(25): SEQ ID NO: 809; WAN024CSU_at; Start 1026; Stop 1050
cccagaagtgcttgagaaacgtgac

SEQ ID NO: 131818 - DNA, 25 bp, Artificial
  probe
  misc_feature (1)..(25): SEQ ID NO: 809; WAN024CSU_at; Start 2126; Stop 2150
cctatcgtgaacaagaggatgctct

SEQ ID NO: 131819 - DNA, 25 bp, Artificial
  probe
  misc_feature (1)..(25): SEQ ID NO: 809; WAN024CSU_at; Start 768; Stop 792
tatccgtgaagtcgagaaattgtct

SEQ ID NO: 131820 - DNA, 25 bp, Artificial
  probe
  misc_feature (1)..(25): SEQ ID NO: 809; WAN024CSU_at; Start 1737; Stop 1761
tatccttggaaaccacgcaacacag

SEQ ID NO: 131821 - DNA, 25 bp, Artificial
  probe
  misc_feature (1)..(25): SEQ ID NO: 809; WAN024CSU_at; Start 2065; Stop 2089
gaaggaatcggttcaggaactcgcc

SEQ ID NO: 131822 - DNA, 25 bp, Artificial
  probe
  misc_feature (1)..(25): SEQ ID NO: 809; WAN024CSU_at; Start 2427; Stop 2451
tgccgctatcggtgacaaagtcaat

SEQ ID NO: 131823 - DNA, 25 bp, Artificial
  probe
  misc_feature (1)..(25): SEQ ID NO: 809; WAN024CSU_at; Start 1320; Stop 1344
caagggtggctcaatgggtatgcaa

SEQ ID NO: 131824 - DNA, 25 bp, Artificial
  probe
  misc_feature (1)..(25): SEQ ID NO: 809; WAN024CSU_at; Start 795; Stop 819
taaggtttatgaccaagatggcgac

SEQ ID NO: 131825 - DNA, 25 bp, Artificial
  probe
  misc_feature (1)..(25): SEQ ID NO: 809; WAN024CSU_at; Start 2507; Stop 2531
tagcaccaatcatcgatggacgtgg

SEQ ID NO: 131826 - DNA, 25 bp, Artificial
  probe
  misc_feature (1)..(25): SEQ ID NO: 809; WAN024CSU_at; Start 544; Stop 568
gaaaatatcggtcttcgcctgcttg

SEQ ID NO: 131827 - DNA, 25 bp, Artificial
  probe
  misc_feature (1)..(25): SEQ ID NO: 809; WAN024CSU_at; Start 1662; Stop 1686
aattgatagcaatcgccgtcaccgt

SEQ ID NO: 131828 - DNA, 25 bp, Artificial
  probe
  misc_feature (1)..(25): SEQ ID NO: 809; WAN024CSU_at; Start 1075; Stop 1099
gaagaagaatcatttgcccgtaccc

SEQ ID NO: 131829 - DNA, 25 bp, Artificial
  probe
  misc_feature (1)..(25): SEQ ID NO: 809; WAN024CSU_at; Start 2197; Stop 2221
cctcacaaggtagaaggacttcaag

SEQ ID NO: 131830 - DNA, 25 bp, Artificial
  probe
  misc_feature (1)..(25): SEQ ID NO: 809; WAN024CSU_at; Start 1917; Stop 1941
taaagaaatgggagctatggccctc

SEQ ID NO: 131831 - DNA, 25 bp, Artificial
  probe
  misc_feature (1)..(25): SEQ ID NO: 809; WAN024CSU_at; Start 2410; Stop 2434
gatcttcttgtcctagttgccgcta

SEQ ID NO: 131832 - DNA, 25 bp, Artificial
  probe
  misc_feature (1)..(25): SEQ ID NO: 809; WAN024CSU_at; Start 481; Stop 505
ggtgcgggaccttctggaccagata

SEQ ID NO: 131833 - DNA, 25 bp, Artificial
  probe
  misc_feature (1)..(25): SEQ ID NO: 809; WAN024CSU_at; Start 2253; Stop 2277
tgagttgaaagaaaaagccgcagct

SEQ ID NO: 131834 - DNA, 25 bp, Artificial
  probe
  misc_feature (1)..(25): SEQ ID NO: 809; WAN024CSU_at; Start 33; Stop 57
aatgtggcttgatttctgggcgacc

SEQ ID NO: 131835 - DNA, 25 bp, Artificial
  probe
  misc_feature (1)..(25): SEQ ID NO: 809; WAN024CSU_at; Start 2279; Stop 2303
cagccgcaggcgatatcttcaaaga

SEQ ID NO: 131836 - DNA, 25 bp, Artificial
  probe
  misc_feature (1)..(25): SEQ ID NO: 809; WAN024CSU_at; Start 811; Stop 835
gatggcgacaacatgagcttcaagg

SEQ ID NO: 131837 - DNA, 25 bp, Artificial
  probe
  misc_feature (1)..(25): SEQ ID NO: 3403; WAN024CSV_at; Start 603; Stop 627
gacgtgtcccaaactccatcaaggg

SEQ ID NO: 131838 - DNA, 25 bp, Artificial
  probe
  misc_feature (1)..(25): SEQ ID NO: 3403; WAN024CSV_at; Start 683; Stop 707
tagttgacgatgttcaaaagagccg

SEQ ID NO: 131839 - DNA, 25 bp, Artificial
  probe
  misc_feature (1)..(25): SEQ ID NO: 3403; WAN024CSV_at; Start 584; Stop 608
gcatccatttcttgagcccgacgtg

SEQ ID NO: 131840 - DNA, 25 bp, Artificial
  probe
  misc_feature (1)..(25): SEQ ID NO: 3403; WAN024CSV_at; Start 36; Stop 60
tattagacagcttaatcgtattgcg

SEQ ID NO: 131841 - DNA, 25 bp, Artificial
  probe
  misc_feature (1)..(25): SEQ ID NO: 3403; WAN024CSV_at; Start 278; Stop 302
gaaatgtaggcaatatccccagagt

SEQ ID NO: 131842 - DNA, 25 bp, Artificial
  probe
  misc_feature (1)..(25): SEQ ID NO: 3403; WAN024CSV_at; Start 637; Stop 661
gataaccgaacgaatacgagctgcc

SEQ ID NO: 131843 - DNA, 25 bp, Artificial
  probe
  misc_feature (1)..(25): SEQ ID NO: 3403; WAN024CSV_at; Start 408; Stop 432
cacaatttttgtgggtcgcagcgta

SEQ ID NO: 131844 - DNA, 25 bp, Artificial
  probe
  misc_feature (1)..(25): SEQ ID NO: 3403; WAN024CSV_at; Start 485; Stop 509
tgggttcccaaaacaggaatgtcaa

SEQ ID NO: 131845 - DNA, 25 bp, Artificial
  probe
  misc_feature (1)..(25): SEQ ID NO: 3403; WAN024CSV_at; Start 699; Stop 723
aaagagccgtttcgaccaactgaca

SEQ ID NO: 131846 - DNA, 25 bp, Artificial
  probe
  misc_feature (1)..(25): SEQ ID NO: 3403; WAN024CSV_at; Start 2; Stop 26
tgcttcttacctggcgtcgacactt

SEQ ID NO: 131847 - DNA, 25 bp, Artificial
  probe
  misc_feature (1)..(25): SEQ ID NO: 3403; WAN024CSV_at; Start 113; Stop 137
gctggctggtcataggctgtaatca

SEQ ID NO: 131848 - DNA, 25 bp, Artificial
  probe
  misc_feature (1)..(25): SEQ ID NO: 3403; WAN024CSV_at; Start 98; Stop 122
taaaccgccccaagagctggctggt

SEQ ID NO: 131849 - DNA, 25 bp, Artificial
  probe
  misc_feature (1)..(25): SEQ ID NO: 3403; WAN024CSV_at; Start 218; Stop 242
gaagcataaatcttagcctctgtaa

SEQ ID NO: 131850 - DNA, 25 bp, Artificial
  probe
  misc_feature (1)..(25): SEQ ID NO: 3403; WAN024CSV_at; Start 391; Stop 415
ggtatccacaagaaagacacaattt

SEQ ID NO: 131851 - DNA, 25 bp, Artificial
  probe
  misc_feature (1)..(25): SEQ ID NO: 3403; WAN024CSV_at; Start 547; Stop 571
gccaccaatcacagctgcgcgtgtt

SEQ ID NO: 131852 - DNA, 25 bp, Artificial
  probe
  misc_feature (1)..(25): SEQ ID NO: 3403; WAN024CSV_at; Start 501; Stop 525
gaatgtcaaagagcttacccgcacg

SEQ ID NO: 131853 - DNA, 25 bp, Artificial
  probe
  misc_feature (1)..(25): SEQ ID NO: 3403; WAN024CSV_at; Start 51; Stop 75
tcgtattgcgcatctgaccagtttc

SEQ ID NO: 131854 - DNA, 25 bp, Artificial
  probe
  misc_feature (1)..(25): SEQ ID NO: 3403; WAN024CSV_at; Start 421; Stop 445
ggtcgcagcgtaagccttgaaagct

SEQ ID NO: 131855 - DNA, 25 bp, Artificial
  probe
  misc_feature (1)..(25): SEQ ID NO: 3403; WAN024CSV_at; Start 162; Stop 186
caatcttggccttttgcatcttgag

SEQ ID NO: 131856 - DNA, 25 bp, Artificial
  probe
  misc_feature (1)..(25): SEQ ID NO: 3403; WAN024CSV_at; Start 567; Stop 591
gtgttccccagatggccgcatccat

SEQ ID NO: 131857 - DNA, 25 bp, Artificial
  probe
  misc_feature (1)..(25): SEQ ID NO: 3403; WAN024CSV_at; Start 459; Stop 483
cataaacctgtaccaaggcatgggc

SEQ ID NO: 131858 - DNA, 25 bp, Artificial
  probe
  misc_feature (1)..(25): SEQ ID NO: 3403; WAN024CSV_at; Start 238; Stop 262
tgtaaatccagcctcgtccagttgc

SEQ ID NO: 131859 - DNA, 25 bp, Artificial
  probe
  misc_feature (1)..(25): SEQ ID NO: 3403; WAN024CSV_at; Start 376; Stop 400
gcgaagggtgtcataggtatccaca

SEQ ID NO: 131860 - DNA, 25 bp, Artificial
  probe
  misc_feature (1)..(25): SEQ ID NO: 3403; WAN024CSV_at; Start 66; Stop 90
gaccagtttcatcttcgattgcaac

SEQ ID NO: 131861 - DNA, 25 bp, Artificial
  probe
  misc_feature (1)..(25): SEQ ID NO: 3403; WAN024CSV_at; Start 472; Stop 496
caaggcatgggcatgggttcccaaa

SEQ ID NO: 131862 - DNA, 25 bp, Artificial
  probe
  misc_feature (1)..(25): SEQ ID NO: 3403; WAN024CSV_at; Start 338; Stop 362
agctcacgcgccacctgaatggcag

SEQ ID NO: 131863 - DNA, 25 bp, Artificial
  probe
  misc_feature (1)..(25): SEQ ID NO: 3403; WAN024CSV_at; Start 127; Stop 151
ggctgtaatcagcttggtacccacg

SEQ ID NO: 131864 - DNA, 25 bp, Artificial
  probe
  misc_feature (1)..(25): SEQ ID NO: 3403; WAN024CSV_at; Start 439; Stop 463
gaaagcttcatagtcattgccataa

SEQ ID NO: 131865 - DNA, 25 bp, Artificial
  probe
  misc_feature (1)..(25): SEQ ID NO: 3403; WAN024CSV_at; Start 82; Stop 106
gattgcaacaatcttgtaaaccgcc

SEQ ID NO: 131866 - DNA, 25 bp, Artificial
  probe
  misc_feature (1)..(25): SEQ ID NO: 3403; WAN024CSV_at; Start 622; Stop 646
caagggttcatcttcgataaccgaa

SEQ ID NO: 131867 - DNA, 25 bp, Artificial
  probe
  misc_feature (1)..(25): SEQ ID NO: 3403; WAN024CSV_at; Start 354; Stop 378
gaatggcagctggtacaccgatgcg

SEQ ID NO: 131868 - DNA, 25 bp, Artificial
  probe
  misc_feature (1)..(25): SEQ ID NO: 3403; WAN024CSV_at; Start 526; Stop 550
cacgttgctggttccattggcgcca

SEQ ID NO: 131869 - DNA, 25 bp, Artificial
  probe
  misc_feature (1)..(25): SEQ ID NO: 3403; WAN024CSV_at; Start 299; Stop 323
gagtcaatccgcacacccataaagt

SEQ ID NO: 131870 - DNA, 25 bp, Artificial
  probe
  misc_feature (1)..(25): SEQ ID NO: 3403; WAN024CSV_at; Start 254; Stop 278
tccagttgctgacggactttcttag

SEQ ID NO: 131871 - DNA, 25 bp, Artificial
  probe
  misc_feature (1)..(25): SEQ ID NO: 2796; WAN024CSW_at; Start 595; Stop 619
catgcccatgccttggtacaggttt

SEQ ID NO: 131872 - DNA, 25 bp, Artificial
  probe
  misc_feature (1)..(25): SEQ ID NO: 2796; WAN024CSW_at; Start 637; Stop 661
gctttcaaggcttacgctgcgaccc

SEQ ID NO: 131873 - DNA, 25 bp, Artificial
  probe
  misc_feature (1)..(25): SEQ ID NO: 2796; WAN024CSW_at; Start 829; Stop 853
gaggctggatttacagaggctaaga

SEQ ID NO: 131874 - DNA, 25 bp, Artificial
  probe
  misc_feature (1)..(25): SEQ ID NO: 2796; WAN024CSW_at; Start 1071; Stop 1095
taagaagcaggtgtggcgcattacc

SEQ ID NO: 131875 - DNA, 25 bp, Artificial
  probe
  misc_feature (1)..(25): SEQ ID NO: 2796; WAN024CSW_at; Start 1364; Stop 1388
actatccagtggatttggcgcgtga

SEQ ID NO: 131876 - DNA, 25 bp, Artificial
  probe
  misc_feature (1)..(25): SEQ ID NO: 2796; WAN024CSW_at; Start 1287; Stop 1311
gactgacattcaggattatgcccgt

SEQ ID NO: 131877 - DNA, 25 bp, Artificial
  probe
  misc_feature (1)..(25): SEQ ID NO: 2796; WAN024CSW_at; Start 28; Stop 52
cacacggacttgtaccagatcaaca

SEQ ID NO: 131878 - DNA, 25 bp, Artificial
  probe
  misc_feature (1)..(25): SEQ ID NO: 2796; WAN024CSW_at; Start 803; Stop 827
ctaagaaagtccgtcagcaactgga

SEQ ID NO: 131879 - DNA, 25 bp, Artificial
  probe
  misc_feature (1)..(25): SEQ ID NO: 2796; WAN024CSW_at; Start 370; Stop 394
gaaacggctcttttgaacatcgtca

SEQ ID NO: 131880 - DNA, 25 bp, Artificial
  probe
  misc_feature (1)..(25): SEQ ID NO: 2796; WAN024CSW_at; Start 756; Stop 780
taactttatgggtgtgcggattgac

SEQ ID NO: 131881 - DNA, 25 bp, Artificial
  probe
  misc_feature (1)..(25): SEQ ID NO: 2796; WAN024CSW_at; Start 101; Stop 125
ttgaggtgtatttccgccaacagcc

SEQ ID NO: 131882 - DNA, 25 bp, Artificial
  probe
  misc_feature (1)..(25): SEQ ID NO: 2796; WAN024CSW_at; Start 1191; Stop 1215
tacatacatcaagaagacggttcgt

SEQ ID NO: 131883 - DNA, 25 bp, Artificial
  probe
  misc_feature (1)..(25): SEQ ID NO: 2796; WAN024CSW_at; Start 1017; Stop 1041
gatgcgcaatacgattaagctgtct

SEQ ID NO: 131884 - DNA, 25 bp, Artificial
  probe
  misc_feature (1)..(25): SEQ ID NO: 2796; WAN024CSW_at; Start 1413; Stop 1437
gattgataagatgcgcaaggaagcc

SEQ ID NO: 131885 - DNA, 25 bp, Artificial
  probe
  misc_feature (1)..(25): SEQ ID NO: 2796; WAN024CSW_at; Start 455; Stop 479
ccttgatggagtttgggacacgtcg

SEQ ID NO: 131886 - DNA, 25 bp, Artificial
  probe
  misc_feature (1)..(25): SEQ ID NO: 2796; WAN024CSW_at; Start 129; Stop 153
taagaacggctatgcggtttttgca

SEQ ID NO: 131887 - DNA, 25 bp, Artificial
  probe
  misc_feature (1)..(25): SEQ ID NO: 2796; WAN024CSW_at; Start 734; Stop 758
cgcgtgagctgggtgatcagattaa

SEQ ID NO: 131888 - DNA, 25 bp, Artificial
  probe
  misc_feature (1)..(25): SEQ ID NO: 2796; WAN024CSW_at; Start 1428; Stop 1452
caaggaagcccttggtgaaggagaa

SEQ ID NO: 131889 - DNA, 25 bp, Artificial
  probe
  misc_feature (1)..(25): SEQ ID NO: 2796; WAN024CSW_at; Start 705; Stop 729
catcggtgtaccagctgccattcag

SEQ ID NO: 131890 - DNA, 25 bp, Artificial
  probe
  misc_feature (1)..(25): SEQ ID NO: 2796; WAN024CSW_at; Start 649; Stop 673
tacgctgcgacccacaaaaattgtg

SEQ ID NO: 131891 - DNA, 25 bp, Artificial
  probe
  misc_feature (1)..(25): SEQ ID NO: 2796; WAN024CSW_at; Start 323; Stop 347
aaccgattgtgcaggtggaaggacc

SEQ ID NO: 131892 - DNA, 25 bp, Artificial
  probe
  misc_feature (1)..(25): SEQ ID NO: 2796; WAN024CSW_at; Start 212; Stop 236
cctatttggagtcgcttggttatca

SEQ ID NO: 131893 - DNA, 25 bp, Artificial
  probe
  misc_feature (1)..(25): SEQ ID NO: 2796; WAN024CSW_at; Start 537; Stop 561
caatggaaccagcaacgtgcgtgcg

SEQ ID NO: 131894 - DNA, 25 bp, Artificial
  probe
  misc_feature (1)..(25): SEQ ID NO: 2796; WAN024CSW_at; Start 574; Stop 598
gacattcctgttttgggaacccatg

SEQ ID NO: 131895 - DNA, 25 bp, Artificial
  probe
  misc_feature (1)..(25): SEQ ID NO: 2796; WAN024CSW_at; Start 1085; Stop 1109
ggcgcattaccagtcgtgaaaaagg

SEQ ID NO: 131896 - DNA, 25 bp, Artificial
  probe
  misc_feature (1)..(25): SEQ ID NO: 2796; WAN024CSW_at; Start 552; Stop 576
cgtgcgtgcgggtaagctctttgac

SEQ ID NO: 131897 - DNA, 25 bp, Artificial
  probe
  misc_feature (1)..(25): SEQ ID NO: 2796; WAN024CSW_at; Start 239; Stop 263
gggcgttcttggattaccttcgcaa

SEQ ID NO: 131898 - DNA, 25 bp, Artificial
  probe
  misc_feature (1)..(25): SEQ ID NO: 2796; WAN024CSW_at; Start 12; Stop 36
tgatagtttgacattgcacacggac

SEQ ID NO: 131899 - DNA, 25 bp, Artificial
  probe
  misc_feature (1)..(25): SEQ ID NO: 2796; WAN024CSW_at; Start 355; Stop 379
caatgtcagttggtcgaaacggctc

SEQ ID NO: 131900 - DNA, 25 bp, Artificial
  probe
  misc_feature (1)..(25): SEQ ID NO: 2796; WAN024CSW_at; Start 1339; Stop 1363
tataagcgtgtgctcaatccgcagc

SEQ ID NO: 131901 - DNA, 25 bp, Artificial
  probe
  misc_feature (1)..(25): SEQ ID NO: 2796; WAN024CSW_at; Start 904; Stop 928
caaaaggccaagattgatgtctggg

SEQ ID NO: 131902 - DNA, 25 bp, Artificial
  probe
  misc_feature (1)..(25): SEQ ID NO: 2796; WAN024CSW_at; Start 441; Stop 465
tatcgaagatgaacccttgatggag

SEQ ID NO: 131903 - DNA, 25 bp, Artificial
  probe
  misc_feature (1)..(25): SEQ ID NO: 2796; WAN024CSW_at; Start 1161; Stop 1185
gacagaaatcaagatgttccatccg

SEQ ID NO: 131904 - DNA, 25 bp, Artificial
  probe
  misc_feature (1)..(25): SEQ ID NO: 2796; WAN024CSW_at; Start 274; Stop 298
gagttgaccgttcgttctgcccaag

SEQ ID NO: 131905 - DNA, 25 bp, Artificial
  probe
  misc_feature (1)..(25): SEQ ID NO: 7680; WAN024CSX_at; Start 97; Stop 121
gtggtttgttctgcggctataagcc

SEQ ID NO: 131906 - DNA, 25 bp, Artificial
  probe
  misc_feature (1)..(25): SEQ ID NO: 7680; WAN024CSX_at; Start 225; Stop 249
gccagtaaacggatctactgactcg

SEQ ID NO: 131907 - DNA, 25 bp, Artificial
  probe
  misc_feature (1)..(25): SEQ ID NO: 7680; WAN024CSX_at; Start 138; Stop 162
gccaaaggcccaccgaaatagcttc

SEQ ID NO: 131908 - DNA, 25 bp, Artificial
  probe
  misc_feature (1)..(25): SEQ ID NO: 7680; WAN024CSX_at; Start 230; Stop 254
taaacggatctactgactcgaataa

SEQ ID NO: 131909 - DNA, 25 bp, Artificial
  probe
  misc_feature (1)..(25): SEQ ID NO: 7680; WAN024CSX_at; Start 245; Stop 269
actcgaataacgtgagctggtctgc

SEQ ID NO: 131910 - DNA, 25 bp, Artificial
  probe
  misc_feature (1)..(25): SEQ ID NO: 7680; WAN024CSX_at; Start 68; Stop 92
ttttaaatcaaaaccaccagtgtga

SEQ ID NO: 131911 - DNA, 25 bp, Artificial
  probe
  misc_feature (1)..(25): SEQ ID NO: 7680; WAN024CSX_at; Start 122; Stop 146
gcttctaccggccagggccaaaggc

SEQ ID NO: 131912 - DNA, 25 bp, Artificial
  probe
  misc_feature (1)..(25): SEQ ID NO: 7680; WAN024CSX_at; Start 73; Stop 97
aatcaaaaccaccagtgtgaactgg

SEQ ID NO: 131913 - DNA, 25 bp, Artificial
  probe
  misc_feature (1)..(25): SEQ ID NO: 7680; WAN024CSX_at; Start 219; Stop 243
tatttcgccagtaaacggatctact

SEQ ID NO: 131914 - DNA, 25 bp, Artificial
  probe
  misc_feature (1)..(25): SEQ ID NO: 7680; WAN024CSX_at; Start 205; Stop 229
tacttcctcttatttatttcgccag

SEQ ID NO: 131915 - DNA, 25 bp, Artificial
  probe
  misc_feature (1)..(25): SEQ ID NO: 7680; WAN024CSX_at; Start 240; Stop 264
tactgactcgaataacgtgagctgg

SEQ ID NO: 131916 - DNA, 25 bp, Artificial
  probe
  misc_feature (1)..(25): SEQ ID NO: 7680; WAN024CSX_at; Start 41; Stop 65
tagacttttatttttatgtatcaag

SEQ ID NO: 131917 - DNA, 25 bp, Artificial
  probe
  misc_feature (1)..(25): SEQ ID NO: 7680; WAN024CSX_at; Start 21; Stop 45
gaattttaccatcctttatatagac

SEQ ID NO: 131918 - DNA, 25 bp, Artificial
  probe
  misc_feature (1)..(25): SEQ ID NO: 7680; WAN024CSX_at; Start 103; Stop 127
tgttctgcggctataagccgcttct

SEQ ID NO: 131919 - DNA, 25 bp, Artificial
  probe
  misc_feature (1)..(25): SEQ ID NO: 7680; WAN024CSX_at; Start 175; Stop 199
tttcccgagcaggtgctaaagcacc

SEQ ID NO: 131920 - DNA, 25 bp, Artificial
  probe
  misc_feature (1)..(25): SEQ ID NO: 7680; WAN024CSX_at; Start 215; Stop 239
tatttatttcgccagtaaacggatc

SEQ ID NO: 131921 - DNA, 25 bp, Artificial
  probe
  misc_feature (1)..(25): SEQ ID NO: 7680; WAN024CSX_at; Start 255; Stop 279
cgtgagctggtctgctactctgtct

SEQ ID NO: 131922 - DNA, 25 bp, Artificial
  probe
  misc_feature (1)..(25): SEQ ID NO: 7680; WAN024CSX_at; Start 267; Stop 291
tgctactctgtcttcttgtaattga

SEQ ID NO: 131923 - DNA, 25 bp, Artificial
  probe
  misc_feature (1)..(25): SEQ ID NO: 7680; WAN024CSX_at; Start 2; Stop 26
tgtccaaatcggacaacaggaattt

SEQ ID NO: 131924 - DNA, 25 bp, Artificial
  probe
  misc_feature (1)..(25): SEQ ID NO: 7680; WAN024CSX_at; Start 260; Stop 284
gctggtctgctactctgtcttcttg

SEQ ID NO: 131925 - DNA, 25 bp, Artificial
  probe
  misc_feature (1)..(25): SEQ ID NO: 7680; WAN024CSX_at; Start 190; Stop 214
ctaaagcaccttagttacttcctct

SEQ ID NO: 131926 - DNA, 25 bp, Artificial
  probe
  misc_feature (1)..(25): SEQ ID NO: 7680; WAN024CSX_at; Start 10; Stop 34
tcggacaacaggaattttaccatcc

SEQ ID NO: 131927 - DNA, 25 bp, Artificial
  probe
  misc_feature (1)..(25): SEQ ID NO: 7680; WAN024CSX_at; Start 235; Stop 259
ggatctactgactcgaataacgtga

SEQ ID NO: 131928 - DNA, 25 bp, Artificial
  probe
  misc_feature (1)..(25): SEQ ID NO: 7680; WAN024CSX_at; Start 248; Stop 272
cgaataacgtgagctggtctgctac

SEQ ID NO: 131929 - DNA, 25 bp, Artificial
  probe
  misc_feature (1)..(25): SEQ ID NO: 7680; WAN024CSX_at; Start 153; Stop 177
aaatagcttcctcgcgcaccacttt

SEQ ID NO: 131930 - DNA, 25 bp, Artificial
  probe
  misc_feature (1)..(25): SEQ ID NO: 7680; WAN024CSX_at; Start 263; Stop 287
ggtctgctactctgtcttcttgtaa

SEQ ID NO: 131931 - DNA, 25 bp, Artificial
  probe
  misc_feature (1)..(25): SEQ ID NO: 7680; WAN024CSX_at; Start 114; Stop 138
tataagccgcttctaccggccaggg

SEQ ID NO: 131932 - DNA, 25 bp, Artificial
  probe
  misc_feature (1)..(25): SEQ ID NO: 7680; WAN024CSX_at; Start 84; Stop 108
ccagtgtgaactggtggtttgttct

SEQ ID NO: 131933 - DNA, 25 bp, Artificial
  probe
  misc_feature (1)..(25): SEQ ID NO: 7680; WAN024CSX_at; Start 142; Stop 166
aaggcccaccgaaatagcttcctcg

SEQ ID NO: 131934 - DNA, 25 bp, Artificial
  probe
  misc_feature (1)..(25): SEQ ID NO: 7680; WAN024CSX_at; Start 91; Stop 115
gaactggtggtttgttctgcggcta

SEQ ID NO: 131935 - DNA, 25 bp, Artificial
  probe
  misc_feature (1)..(25): SEQ ID NO: 7680; WAN024CSX_at; Start 186; Stop 210
ggtgctaaagcaccttagttacttc

SEQ ID NO: 131936 - DNA, 25 bp, Artificial
  probe
  misc_feature (1)..(25): SEQ ID NO: 7680; WAN024CSX_at; Start 170; Stop 194
accactttcccgagcaggtgctaaa

SEQ ID NO: 131937 - DNA, 25 bp, Artificial
  probe
  misc_feature (1)..(25): SEQ ID NO: 7680; WAN024CSX_at; Start 94; Stop 118
ctggtggtttgttctgcggctataa

SEQ ID NO: 131938 - DNA, 25 bp, Artificial
  probe
  misc_feature (1)..(25): SEQ ID NO: 7680; WAN024CSX_at; Start 252; Stop 276
taacgtgagctggtctgctactctg

SEQ ID NO: 131939 - DNA, 25 bp, Artificial
  probe
  misc_feature (1)..(25): SEQ ID NO: 1539; WAN024CSY_at; Start 329; Stop 353
gctattatgtagatacggtaggccg

SEQ ID NO: 131940 - DNA, 25 bp, Artificial
  probe
  misc_feature (1)..(25): SEQ ID NO: 1539; WAN024CSY_at; Start 420; Stop 444
cacgttattcgagtcagtagatccg

SEQ ID NO: 131941 - DNA, 25 bp, Artificial
  probe
  misc_feature (1)..(25): SEQ ID NO: 1539; WAN024CSY_at; Start 152; Stop 176
taataatccatgaagcgaatgcttg

SEQ ID NO: 131942 - DNA, 25 bp, Artificial
  probe
  misc_feature (1)..(25): SEQ ID NO: 1539; WAN024CSY_at; Start 123; Stop 147
catacgtgacttatgtgagcgtaag

SEQ ID NO: 131943 - DNA, 25 bp, Artificial
  probe
  misc_feature (1)..(25): SEQ ID NO: 1539; WAN024CSY_at; Start 358; Stop 382
cagaaagtgatagctgaatatattc

SEQ ID NO: 131944 - DNA, 25 bp, Artificial
  probe
  misc_feature (1)..(25): SEQ ID NO: 1539; WAN024CSY_at; Start 274; Stop 298
gataagcatgcgaatttaaaataca

SEQ ID NO: 131945 - DNA, 25 bp, Artificial
  probe
  misc_feature (1)..(25): SEQ ID NO: 1539; WAN024CSY_at; Start 434; Stop 458
cagtagatccgtttactggcgaaat

SEQ ID NO: 131946 - DNA, 25 bp, Artificial
  probe
  misc_feature (1)..(25): SEQ ID NO: 1539; WAN024CSY_at; Start 263; Stop 287
tgatgatttttgataagcatgcgaa

SEQ ID NO: 131947 - DNA, 25 bp, Artificial
  probe
  misc_feature (1)..(25): SEQ ID NO: 1539; WAN024CSY_at; Start 309; Stop 333
tcgcaagttttggtgtagaggctat

SEQ ID NO: 131948 - DNA, 25 bp, Artificial
  probe
  misc_feature (1)..(25): SEQ ID NO: 1539; WAN024CSY_at; Start 86; Stop 110
tcatttatggcagatacaaagctag

SEQ ID NO: 131949 - DNA, 25 bp, Artificial
  probe
  misc_feature (1)..(25): SEQ ID NO: 1539; WAN024CSY_at; Start 46; Stop 70
aaatatcatattgtttttgcaccca

SEQ ID NO: 131950 - DNA, 25 bp, Artificial
  probe
  misc_feature (1)..(25): SEQ ID NO: 1539; WAN024CSY_at; Start 409; Stop 433
gcagaccagctcacgttattcgagt

SEQ ID NO: 131951 - DNA, 25 bp, Artificial
  probe
  misc_feature (1)..(25): SEQ ID NO: 1539; WAN024CSY_at; Start 175; Stop 199
tgttcagaccatattcacatgctta

SEQ ID NO: 131952 - DNA, 25 bp, Artificial
  probe
  misc_feature (1)..(25): SEQ ID NO: 1539; WAN024CSY_at; Start 58; Stop 82
gtttttgcacccaaatatcgtcgtc

SEQ ID NO: 131953 - DNA, 25 bp, Artificial
  probe
  misc_feature (1)..(25): SEQ ID NO: 1539; WAN024CSY_at; Start 297; Stop 321
caaatatggcaatcgcaagttttgg

SEQ ID NO: 131954 - DNA, 25 bp, Artificial
  probe
  misc_feature (1)..(25): SEQ ID NO: 1539; WAN024CSY_at; Start 343; Stop 367
acggtaggccgtaatcagaaagtga

SEQ ID NO: 131955 - DNA, 25 bp, Artificial
  probe
  misc_feature (1)..(25): SEQ ID NO: 1539; WAN024CSY_at; Start 245; Stop 269
taaagggcaagagcagtttgatgat

SEQ ID NO: 131956 - DNA, 25 bp, Artificial
  probe
  misc_feature (1)..(25): SEQ ID NO: 1539; WAN024CSY_at; Start 138; Stop 162
tgagcgtaagggtgtaataatccat

SEQ ID NO: 131957 - DNA, 25 bp, Artificial
  probe
  misc_feature (1)..(25): SEQ ID NO: 1539; WAN024CSY_at; Start 100; Stop 124
tacaaagctagtatcggaagaatca

SEQ ID NO: 131958 - DNA, 25 bp, Artificial
  probe
  misc_feature (1)..(25): SEQ ID NO: 1539; WAN024CSY_at; Start 190; Stop 214
cacatgcttatcagtattcctccga

SEQ ID NO: 131959 - DNA, 25 bp, Artificial
  probe
  misc_feature (1)..(25): SEQ ID NO: 1539; WAN024CSY_at; Start 163; Stop 187
gaagcgaatgcttgttcagaccata

SEQ ID NO: 131960 - DNA, 25 bp, Artificial
  probe
  misc_feature (1)..(25): SEQ ID NO: 1539; WAN024CSY_at; Start 108; Stop 132
tagtatcggaagaatcatacgtgac

SEQ ID NO: 131961 - DNA, 25 bp, Artificial
  probe
  misc_feature (1)..(25): SEQ ID NO: 1539; WAN024CSY_at; Start 201; Stop 225
cagtattcctccgaaacttagtgtt

SEQ ID NO: 131962 - DNA, 25 bp, Artificial
  probe
  misc_feature (1)..(25): SEQ ID NO: 1539; WAN024CSY_at; Start 15; Stop 39
tcaaagtttatcacataccacatgg

SEQ ID NO: 131963 - DNA, 25 bp, Artificial
  probe
  misc_feature (1)..(25): SEQ ID NO: 1539; WAN024CSY_at; Start 400; Stop 424
gacagagtagcagaccagctcacgt

SEQ ID NO: 131964 - DNA, 25 bp, Artificial
  probe
  misc_feature (1)..(25): SEQ ID NO: 1539; WAN024CSY_at; Start 445; Stop 469
tttactggcgaaataaataagagga

SEQ ID NO: 131965 - DNA, 25 bp, Artificial
  probe
  misc_feature (1)..(25): SEQ ID NO: 1539; WAN024CSY_at; Start 2; Stop 26
tgagagaggataatcaaagtttatc

SEQ ID NO: 131966 - DNA, 25 bp, Artificial
  probe
  misc_feature (1)..(25): SEQ ID NO: 1539; WAN024CSY_at; Start 288; Stop 312
tttaaaatacaaatatggcaatcgc

SEQ ID NO: 131967 - DNA, 25 bp, Artificial
  probe
  misc_feature (1)..(25): SEQ ID NO: 1539; WAN024CSY_at; Start 217; Stop 241
cttagtgtttcgtcctttatgggct

SEQ ID NO: 131968 - DNA, 25 bp, Artificial
  probe
  misc_feature (1)..(25): SEQ ID NO: 1539; WAN024CSY_at; Start 394; Stop 418
caagaagacagagtagcagaccagc

SEQ ID NO: 131969 - DNA, 25 bp, Artificial
  probe
  misc_feature (1)..(25): SEQ ID NO: 1539; WAN024CSY_at; Start 73; Stop 97
tatcgtcgtcaaatcatttatggca

SEQ ID NO: 131970 - DNA, 25 bp, Artificial
  probe
  misc_feature (1)..(25): SEQ ID NO: 1539; WAN024CSY_at; Start 234; Stop 258
tatgggctatttaaagggcaagagc

SEQ ID NO: 131971 - DNA, 25 bp, Artificial
  probe
  misc_feature (1)..(25): SEQ ID NO: 1539; WAN024CSY_at; Start 380; Stop 404
ttcagaatcaattacaagaagacag

SEQ ID NO: 131972 - DNA, 25 bp, Artificial
  probe
  misc_feature (1)..(25): SEQ ID NO: 1539; WAN024CSY_at; Start 28; Stop 52
cataccacatggaattgtaaatatc

SEQ ID NO: 131973 - DNA, 25 bp, Artificial
  probe
  misc_feature (1)..(25): SEQ ID NO: 6747; WAN024CSZ_at; Start 82; Stop 106
tttaatattgaagcgctcaggtgta

SEQ ID NO: 131974 - DNA, 25 bp, Artificial
  probe
  misc_feature (1)..(25): SEQ ID NO: 6747; WAN024CSZ_at; Start 115; Stop 139
cccttagattgggtgatattagacg

SEQ ID NO: 131975 - DNA, 25 bp, Artificial
  probe
  misc_feature (1)..(25): SEQ ID NO: 6747; WAN024CSZ_at; Start 94; Stop 118
gcgctcaggtgtattttaaatccct

SEQ ID NO: 131976 - DNA, 25 bp, Artificial
  probe
  misc_feature (1)..(25): SEQ ID NO: 6747; WAN024CSZ_at; Start 134; Stop 158
tagacggcaaattatataaccaatg

SEQ ID NO: 131977 - DNA, 25 bp, Artificial
  probe
  misc_feature (1)..(25): SEQ ID NO: 6747; WAN024CSZ_at; Start 138; Stop 162
cggcaaattatataaccaatgttca

SEQ ID NO: 131978 - DNA, 25 bp, Artificial
  probe
  misc_feature (1)..(25): SEQ ID NO: 6747; WAN024CSZ_at; Start 57; Stop 81
gaattttttagcaaccaaattagca

SEQ ID NO: 131979 - DNA, 25 bp, Artificial
  probe
  misc_feature (1)..(25): SEQ ID NO: 6747; WAN024CSZ_at; Start 157; Stop 181
tgttcatcactaaaattatcactaa

SEQ ID NO: 131980 - DNA, 25 bp, Artificial
  probe
  misc_feature (1)..(25): SEQ ID NO: 6747; WAN024CSZ_at; Start 202; Stop 226
ttatggtatgcgtcttctatttcag

SEQ ID NO: 131981 - DNA, 25 bp, Artificial
  probe
  misc_feature (1)..(25): SEQ ID NO: 6747; WAN024CSZ_at; Start 99; Stop 123
caggtgtattttaaatcccttagat

SEQ ID NO: 131982 - DNA, 25 bp, Artificial
  probe
  misc_feature (1)..(25): SEQ ID NO: 6747; WAN024CSZ_at; Start 206; Stop 230
ggtatgcgtcttctatttcagtttc

SEQ ID NO: 131983 - DNA, 25 bp, Artificial
  probe
  misc_feature (1)..(25): SEQ ID NO: 6747; WAN024CSZ_at; Start 61; Stop 85
tttttagcaaccaaattagcattta

SEQ ID NO: 131984 - DNA, 25 bp, Artificial
  probe
  misc_feature (1)..(25): SEQ ID NO: 6747; WAN024CSZ_at; Start 124; Stop 148
tgggtgatattagacggcaaattat

SEQ ID NO: 131985 - DNA, 25 bp, Artificial
  probe
  misc_feature (1)..(25): SEQ ID NO: 6747; WAN024CSZ_at; Start 210; Stop 234
tgcgtcttctatttcagtttcatag

SEQ ID NO: 131986 - DNA, 25 bp, Artificial
  probe
  misc_feature (1)..(25): SEQ ID NO: 6747; WAN024CSZ_at; Start 79; Stop 103
gcatttaatattgaagcgctcaggt

SEQ ID NO: 131987 - DNA, 25 bp, Artificial
  probe
  misc_feature (1)..(25): SEQ ID NO: 6747; WAN024CSZ_at; Start 87; Stop 111
tattgaagcgctcaggtgtatttta

SEQ ID NO: 131988 - DNA, 25 bp, Artificial
  probe
  misc_feature (1)..(25): SEQ ID NO: 6747; WAN024CSZ_at; Start 93; Stop 117
agcgctcaggtgtattttaaatccc

SEQ ID NO: 131989 - DNA, 25 bp, Artificial
  probe
  misc_feature (1)..(25): SEQ ID NO: 6747; WAN024CSZ_at; Start 154; Stop 178
caatgttcatcactaaaattatcac

SEQ ID NO: 131990 - DNA, 25 bp, Artificial
  probe
  misc_feature (1)..(25): SEQ ID NO: 6747; WAN024CSZ_at; Start 72; Stop 96
caaattagcatttaatattgaagcg

SEQ ID NO: 131991 - DNA, 25 bp, Artificial
  probe
  misc_feature (1)..(25): SEQ ID NO: 6747; WAN024CSZ_at; Start 148; Stop 172
tataaccaatgttcatcactaaaat

SEQ ID NO: 131992 - DNA, 25 bp, Artificial
  probe
  misc_feature (1)..(25): SEQ ID NO: 6747; WAN024CSZ_at; Start 117; Stop 141
cttagattgggtgatattagacggc

SEQ ID NO: 131993 - DNA, 25 bp, Artificial
  probe
  misc_feature (1)..(25): SEQ ID NO: 6747; WAN024CSZ_at; Start 91; Stop 115
gaagcgctcaggtgtattttaaatc

SEQ ID NO: 131994 - DNA, 25 bp, Artificial
  probe
  misc_feature (1)..(25): SEQ ID NO: 6747; WAN024CSZ_at; Start 119; Stop 143
tagattgggtgatattagacggcaa

SEQ ID NO: 131995 - DNA, 25 bp, Artificial
  probe
  misc_feature (1)..(25): SEQ ID NO: 6747; WAN024CSZ_at; Start 131; Stop 155
tattagacggcaaattatataacca

SEQ ID NO: 131996 - DNA, 25 bp, Artificial
  probe
  misc_feature (1)..(25): SEQ ID NO: 6747; WAN024CSZ_at; Start 29; Stop 53
tcttctctctagaaaatataaaatc

SEQ ID NO: 131997 - DNA, 25 bp, Artificial
  probe
  misc_feature (1)..(25): SEQ ID NO: 6747; WAN024CSZ_at; Start 80; Stop 104
catttaatattgaagcgctcaggtg

SEQ ID NO: 131998 - DNA, 25 bp, Artificial
  probe
  misc_feature (1)..(25): SEQ ID NO: 6747; WAN024CSZ_at; Start 77; Stop 101
tagcatttaatattgaagcgctcag

SEQ ID NO: 131999 - DNA, 25 bp, Artificial
  probe
  misc_feature (1)..(25): SEQ ID NO: 6747; WAN024CSZ_at; Start 195; Stop 219
taataaattatggtatgcgtcttct

SEQ ID NO: 132000 - DNA, 25 bp, Artificial
  probe
  misc_feature (1)..(25): SEQ ID NO: 6747; WAN024CSZ_at; Start 108; Stop 132
tttaaatcccttagattgggtgata

SEQ ID NO: 132001 - DNA, 25 bp, Artificial
  probe
  misc_feature (1)..(25): SEQ ID NO: 6747; WAN024CSZ_at; Start 33; Stop 57
ctctctagaaaatataaaatcaaag

SEQ ID NO: 132002 - DNA, 25 bp, Artificial
  probe
  misc_feature (1)..(25): SEQ ID NO: 6747; WAN024CSZ_at; Start 140; Stop 164
gcaaattatataaccaatgttcatc

SEQ ID NO: 132003 - DNA, 25 bp, Artificial
  probe
  misc_feature (1)..(25): SEQ ID NO: 6747; WAN024CSZ_at; Start 96; Stop 120
gctcaggtgtattttaaatccctta

SEQ ID NO: 132004 - DNA, 25 bp, Artificial
  probe
  misc_feature (1)..(25): SEQ ID NO: 6747; WAN024CSZ_at; Start 18; Stop 42
gaaatttatcttcttctctctagaa

SEQ ID NO: 132005 - DNA, 25 bp, Artificial
  probe
  misc_feature (1)..(25): SEQ ID NO: 6747; WAN024CSZ_at; Start 121; Stop 145
gattgggtgatattagacggcaaat

SEQ ID NO: 132006 - DNA, 25 bp, Artificial
  probe
  misc_feature (1)..(25): SEQ ID NO: 6747; WAN024CSZ_at; Start 136; Stop 160
gacggcaaattatataaccaatgtt

SEQ ID NO: 132007 - DNA, 25 bp, Artificial
  probe
  misc_feature (1)..(25): SEQ ID NO: 1264; WAN024CT2_at; Start 533; Stop 557
caataagggattactatattccaag

SEQ ID NO: 132008 - DNA, 25 bp, Artificial
  probe
  misc_feature (1)..(25): SEQ ID NO: 1264; WAN024CT2_at; Start 588; Stop 612
tttggaagtgatttctaaaaatgcc

SEQ ID NO: 132009 - DNA, 25 bp, Artificial
  probe
  misc_feature (1)..(25): SEQ ID NO: 1264; WAN024CT2_at; Start 135; Stop 159
tatcacccaatctaagggatttaaa

SEQ ID NO: 132010 - DNA, 25 bp, Artificial
  probe
  misc_feature (1)..(25): SEQ ID NO: 1264; WAN024CT2_at; Start 693; Stop 717
tgattttacaaatagagattctgtg

SEQ ID NO: 132011 - DNA, 25 bp, Artificial
  probe
  misc_feature (1)..(25): SEQ ID NO: 1264; WAN024CT2_at; Start 1101; Stop 1125
taatcaaccagaggatattatggga

SEQ ID NO: 132012 - DNA, 25 bp, Artificial
  probe
  misc_feature (1)..(25): SEQ ID NO: 1264; WAN024CT2_at; Start 150; Stop 174
gggatttaaaatacacctgagcgct

SEQ ID NO: 132013 - DNA, 25 bp, Artificial
  probe
  misc_feature (1)..(25): SEQ ID NO: 1264; WAN024CT2_at; Start 37; Stop 61
gaaactgaaatagaagacgcatacc

SEQ ID NO: 132014 - DNA, 25 bp, Artificial
  probe
  misc_feature (1)..(25): SEQ ID NO: 1264; WAN024CT2_at; Start 554; Stop 578
caagatataacactattcctgatca

SEQ ID NO: 132015 - DNA, 25 bp, Artificial
  probe
  misc_feature (1)..(25): SEQ ID NO: 1264; WAN024CT2_at; Start 105; Stop 129
tgaacattggttatataatttgccg

SEQ ID NO: 132016 - DNA, 25 bp, Artificial
  probe
  misc_feature (1)..(25): SEQ ID NO: 1264; WAN024CT2_at; Start 120; Stop 144
taatttgccgtctaatatcacccaa

SEQ ID NO: 132017 - DNA, 25 bp, Artificial
  probe
  misc_feature (1)..(25): SEQ ID NO: 1264; WAN024CT2_at; Start 163; Stop 187
cacctgagcgcttcaatattaaatg

SEQ ID NO: 132018 - DNA, 25 bp, Artificial
  probe
  misc_feature (1)..(25): SEQ ID NO: 1264; WAN024CT2_at; Start 504; Stop 528
taagaaaatcccttcaaatgtgaat

SEQ ID NO: 132019 - DNA, 25 bp, Artificial
  probe
  misc_feature (1)..(25): SEQ ID NO: 1264; WAN024CT2_at; Start 1237; Stop 1261
gacacacttgataaatcagattggc

SEQ ID NO: 132020 - DNA, 25 bp, Artificial
  probe
  misc_feature (1)..(25): SEQ ID NO: 1264; WAN024CT2_at; Start 609; Stop 633
tgccaaaggtggagtttataaagta

SEQ ID NO: 132021 - DNA, 25 bp, Artificial
  probe
  misc_feature (1)..(25): SEQ ID NO: 1264; WAN024CT2_at; Start 1222; Stop 1246
aattcgcgtcgcttagacacacttg

SEQ ID NO: 132022 - DNA, 25 bp, Artificial
  probe
  misc_feature (1)..(25): SEQ ID NO: 1264; WAN024CT2_at; Start 435; Stop 459
acttagcgaggttgtatattacaga

SEQ ID NO: 132023 - DNA, 25 bp, Artificial
  probe
  misc_feature (1)..(25): SEQ ID NO: 1264; WAN024CT2_at; Start 465; Stop 489
ggagttcgtaaaagatagcactttc

SEQ ID NO: 132024 - DNA, 25 bp, Artificial
  probe
  misc_feature (1)..(25): SEQ ID NO: 1264; WAN024CT2_at; Start 398; Stop 422
taaagggtgtaaacataccatcaga

SEQ ID NO: 132025 - DNA, 25 bp, Artificial
  probe
  misc_feature (1)..(25): SEQ ID NO: 1264; WAN024CT2_at; Start 996; Stop 1020
tatagactttgagcatgccctaagg

SEQ ID NO: 132026 - DNA, 25 bp, Artificial
  probe
  misc_feature (1)..(25): SEQ ID NO: 1264; WAN024CT2_at; Start 743; Stop 767
tattagtagaattggaaaaggagga

SEQ ID NO: 132027 - DNA, 25 bp, Artificial
  probe
  misc_feature (1)..(25): SEQ ID NO: 1264; WAN024CT2_at; Start 288; Stop 312
tacagggcttaatggttattcacaa

SEQ ID NO: 132028 - DNA, 25 bp, Artificial
  probe
  misc_feature (1)..(25): SEQ ID NO: 1264; WAN024CT2_at; Start 518; Stop 542
caaatgtgaatgttccaataaggga

SEQ ID NO: 132029 - DNA, 25 bp, Artificial
  probe
  misc_feature (1)..(25): SEQ ID NO: 1264; WAN024CT2_at; Start 1047; Stop 1071
gttgcctctatttggaactccaggg

SEQ ID NO: 132030 - DNA, 25 bp, Artificial
  probe
  misc_feature (1)..(25): SEQ ID NO: 1264; WAN024CT2_at; Start 334; Stop 358
tatccaaaagataataaagagtttc

SEQ ID NO: 132031 - DNA, 25 bp, Artificial
  probe
  misc_feature (1)..(25): SEQ ID NO: 1264; WAN024CT2_at; Start 478; Stop 502
gatagcactttcaaggataaaagag

SEQ ID NO: 132032 - DNA, 25 bp, Artificial
  probe
  misc_feature (1)..(25): SEQ ID NO: 1264; WAN024CT2_at; Start 421; Stop 445
gatttcagatttcaacttagcgagg

SEQ ID NO: 132033 - DNA, 25 bp, Artificial
  probe
  misc_feature (1)..(25): SEQ ID NO: 1264; WAN024CT2_at; Start 307; Stop 331
tcacaagtcgggaaattcattacaa

SEQ ID NO: 132034 - DNA, 25 bp, Artificial
  probe
  misc_feature (1)..(25): SEQ ID NO: 1264; WAN024CT2_at; Start 1009; Stop 1033
catgccctaaggaaagaaactcaaa

SEQ ID NO: 132035 - DNA, 25 bp, Artificial
  probe
  misc_feature (1)..(25): SEQ ID NO: 1264; WAN024CT2_at; Start 1209; Stop 1233
tgcaatgaattttaattcgcgtcgc

SEQ ID NO: 132036 - DNA, 25 bp, Artificial
  probe
  misc_feature (1)..(25): SEQ ID NO: 1264; WAN024CT2_at; Start 271; Stop 295
gaactttctttgcaaaatacagggc

SEQ ID NO: 132037 - DNA, 25 bp, Artificial
  probe
  misc_feature (1)..(25): SEQ ID NO: 1264; WAN024CT2_at; Start 1188; Stop 1212
ttttttagaagcgatggagtatgca

SEQ ID NO: 132038 - DNA, 25 bp, Artificial
  probe
  misc_feature (1)..(25): SEQ ID NO: 1264; WAN024CT2_at; Start 856; Stop 880
tataatatggttagtggctcgtatg

SEQ ID NO: 132039 - DNA, 25 bp, Artificial
  probe
  misc_feature (1)..(25): SEQ ID NO: 1264; WAN024CT2_at; Start 20; Stop 44
taaactatttggactatgaaactga

SEQ ID NO: 132040 - DNA, 25 bp, Artificial
  probe
  misc_feature (1)..(25): SEQ ID NO: 1264; WAN024CT2_at; Start 831; Stop 855
tattattgcagataaattaagcgag

SEQ ID NO: 132041 - DNA, 25 bp, Artificial
  probe
  misc_feature (1)..(25): SEQ ID NO: 6923; WAN024CT3_at; Start 252; Stop 276
tattattcagtccttttcgccagag

SEQ ID NO: 132042 - DNA, 25 bp, Artificial
  probe
  misc_feature (1)..(25): SEQ ID NO: 6923; WAN024CT3_at; Start 9; Stop 33
cactaagcattttgccattcatgga

SEQ ID NO: 132043 - DNA, 25 bp, Artificial
  probe
  misc_feature (1)..(25): SEQ ID NO: 6923; WAN024CT3_at; Start 1293; Stop 1317
tagagaaactagctcctactatgtc

SEQ ID NO: 132044 - DNA, 25 bp, Artificial
  probe
  misc_feature (1)..(25): SEQ ID NO: 6923; WAN024CT3_at; Start 1251; Stop 1275
tatgcagctcgatattgaagaggag

SEQ ID NO: 132045 - DNA, 25 bp, Artificial
  probe
  misc_feature (1)..(25): SEQ ID NO: 6923; WAN024CT3_at; Start 198; Stop 222
caattttcgacacgataggctggag

SEQ ID NO: 132046 - DNA, 25 bp, Artificial
  probe
  misc_feature (1)..(25): SEQ ID NO: 6923; WAN024CT3_at; Start 695; Stop 719
tgacggactcatccatgaaacaggt

SEQ ID NO: 132047 - DNA, 25 bp, Artificial
  probe
  misc_feature (1)..(25): SEQ ID NO: 6923; WAN024CT3_at; Start 853; Stop 877
gaaactgcgaaactttttgatctaa

SEQ ID NO: 132048 - DNA, 25 bp, Artificial
  probe
  misc_feature (1)..(25): SEQ ID NO: 6923; WAN024CT3_at; Start 315; Stop 339
tgagaccatgaaagaattgactagt

SEQ ID NO: 132049 - DNA, 25 bp, Artificial
  probe
  misc_feature (1)..(25): SEQ ID NO: 6923; WAN024CT3_at; Start 184; Stop 208
aatgacacgctttacaattttcgac

SEQ ID NO: 132050 - DNA, 25 bp, Artificial
  probe
  misc_feature (1)..(25): SEQ ID NO: 6923; WAN024CT3_at; Start 544; Stop 568
gaagtttatcgcaagaccaatcaca

SEQ ID NO: 132051 - DNA, 25 bp, Artificial
  probe
  misc_feature (1)..(25): SEQ ID NO: 6923; WAN024CT3_at; Start 30; Stop 54
tggaaagagttatcgcagaaagctc

SEQ ID NO: 132052 - DNA, 25 bp, Artificial
  probe
  misc_feature (1)..(25): SEQ ID NO: 6923; WAN024CT3_at; Start 513; Stop 537
tatagagaatcgctattctcaccag

SEQ ID NO: 132053 - DNA, 25 bp, Artificial
  probe
  misc_feature (1)..(25): SEQ ID NO: 6923; WAN024CT3_at; Start 636; Stop 660
gaatgctccactactacatgtagaa

SEQ ID NO: 132054 - DNA, 25 bp, Artificial
  probe
  misc_feature (1)..(25): SEQ ID NO: 6923; WAN024CT3_at; Start 341; Stop 365
gaaagtttcgctttatcgttgcgac

SEQ ID NO: 132055 - DNA, 25 bp, Artificial
  probe
  misc_feature (1)..(25): SEQ ID NO: 6923; WAN024CT3_at; Start 837; Stop 861
tatagatgacttgattgaaactgcg

SEQ ID NO: 132056 - DNA, 25 bp, Artificial
  probe
  misc_feature (1)..(25): SEQ ID NO: 6923; WAN024CT3_at; Start 823; Stop 847
tcaaaggctgagaatatagatgact

SEQ ID NO: 132057 - DNA, 25 bp, Artificial
  probe
  misc_feature (1)..(25): SEQ ID NO: 6923; WAN024CT3_at; Start 894; Stop 918
aaagcatgtgtatttccagttggca

SEQ ID NO: 132058 - DNA, 25 bp, Artificial
  probe
  misc_feature (1)..(25): SEQ ID NO: 6923; WAN024CT3_at; Start 783; Stop 807
tgccaaaagggaaatggaagaactc

SEQ ID NO: 132059 - DNA, 25 bp, Artificial
  probe
  misc_feature (1)..(25): SEQ ID NO: 6923; WAN024CT3_at; Start 929; Stop 953
tgaaagagacagaactagaccagaa

SEQ ID NO: 132060 - DNA, 25 bp, Artificial
  probe
  misc_feature (1)..(25): SEQ ID NO: 6923; WAN024CT3_at; Start 438; Stop 462
taagtgggattataaagtggagcga

SEQ ID NO: 132061 - DNA, 25 bp, Artificial
  probe
  misc_feature (1)..(25): SEQ ID NO: 6923; WAN024CT3_at; Start 225; Stop 249
gaaacaacgacaaatccatgctcac

SEQ ID NO: 132062 - DNA, 25 bp, Artificial
  probe
  misc_feature (1)..(25): SEQ ID NO: 6923; WAN024CT3_at; Start 407; Stop 431
actcggttgacagcaattctgacaa

SEQ ID NO: 132063 - DNA, 25 bp, Artificial
  probe
  misc_feature (1)..(25): SEQ ID NO: 6923; WAN024CT3_at; Start 396; Stop 420
catcattataaactcggttgacagc

SEQ ID NO: 132064 - DNA, 25 bp, Artificial
  probe
  misc_feature (1)..(25): SEQ ID NO: 6923; WAN024CT3_at; Start 169; Stop 193
gaaaattttatcaacaatgacacgc

SEQ ID NO: 132065 - DNA, 25 bp, Artificial
  probe
  misc_feature (1)..(25): SEQ ID NO: 6923; WAN024CT3_at; Start 683; Stop 707
cgaccttttttatgacggactcatc

SEQ ID NO: 132066 - DNA, 25 bp, Artificial
  probe
  misc_feature (1)..(25): SEQ ID NO: 6923; WAN024CT3_at; Start 664; Stop 688
gattttagccacaagcatgcgacct

SEQ ID NO: 132067 - DNA, 25 bp, Artificial
  probe
  misc_feature (1)..(25): SEQ ID NO: 6923; WAN024CT3_at; Start 1003; Stop 1027
gattggcaaaatccagaaattgagg

SEQ ID NO: 132068 - DNA, 25 bp, Artificial
  probe
  misc_feature (1)..(25): SEQ ID NO: 6923; WAN024CT3_at; Start 95; Stop 119
ccttagtgtcggattatgatatgag

SEQ ID NO: 132069 - DNA, 25 bp, Artificial
  probe
  misc_feature (1)..(25): SEQ ID NO: 6923; WAN024CT3_at; Start 213; Stop 237
taggctggaggagaaacaacgacaa

SEQ ID NO: 132070 - DNA, 25 bp, Artificial
  probe
  misc_feature (1)..(25): SEQ ID NO: 6923; WAN024CT3_at; Start 879; Stop 903
tatcattcccaaacaaaagcatgtg

SEQ ID NO: 132071 - DNA, 25 bp, Artificial
  probe
  misc_feature (1)..(25): SEQ ID NO: 6923; WAN024CT3_at; Start 806; Stop 830
tcatggaatttctcttatcaaaggc

SEQ ID NO: 132072 - DNA, 25 bp, Artificial
  probe
  misc_feature (1)..(25): SEQ ID NO: 6923; WAN024CT3_at; Start 42; Stop 66
tcgcagaaagctcatcaagtatatt

SEQ ID NO: 132073 - DNA, 25 bp, Artificial
  probe
  misc_feature (1)..(25): SEQ ID NO: 6923; WAN024CT3_at; Start 265; Stop 289
ttttcgccagaggacaatctcactc

SEQ ID NO: 132074 - DNA, 25 bp, Artificial
  probe
  misc_feature (1)..(25): SEQ ID NO: 6923; WAN024CT3_at; Start 328; Stop 352
gaattgactagtggaaagtttcgct

SEQ ID NO: 132075 - DNA, 25 bp, Artificial
  probe
  misc_feature (1)..(25): SEQ ID NO: 6640; WAN024CT4_at; Start 223; Stop 247
cttgataagctttctgcggtaactc

SEQ ID NO: 132076 - DNA, 25 bp, Artificial
  probe
  misc_feature (1)..(25): SEQ ID NO: 6640; WAN024CT4_at; Start 54; Stop 78
gattttcttccatcctgtcgtggcg

SEQ ID NO: 132077 - DNA, 25 bp, Artificial
  probe
  misc_feature (1)..(25): SEQ ID NO: 6640; WAN024CT4_at; Start 123; Stop 147
tctgcaccatttcctcatagctagg

SEQ ID NO: 132078 - DNA, 25 bp, Artificial
  probe
  misc_feature (1)..(25): SEQ ID NO: 6640; WAN024CT4_at; Start 261; Stop 285
caaagtgtttagtgatgaccatgga

SEQ ID NO: 132079 - DNA, 25 bp, Artificial
  probe
  misc_feature (1)..(25): SEQ ID NO: 6640; WAN024CT4_at; Start 164; Stop 188
ttcatgccatagtccgacaccaagg

SEQ ID NO: 132080 - DNA, 25 bp, Artificial
  probe
  misc_feature (1)..(25): SEQ ID NO: 6640; WAN024CT4_at; Start 74; Stop 98
tggcgaaaatcgtaaagcgtatcgt

SEQ ID NO: 132081 - DNA, 25 bp, Artificial
  probe
  misc_feature (1)..(25): SEQ ID NO: 6640; WAN024CT4_at; Start 117; Stop 141
gatacatctgcaccatttcctcata

SEQ ID NO: 132082 - DNA, 25 bp, Artificial
  probe
  misc_feature (1)..(25): SEQ ID NO: 6640; WAN024CT4_at; Start 184; Stop 208
caaggcaagattattggttttctca

SEQ ID NO: 132083 - DNA, 25 bp, Artificial
  probe
  misc_feature (1)..(25): SEQ ID NO: 6640; WAN024CT4_at; Start 21; Stop 45
actgaatgatgtggtgagcgtgtat

SEQ ID NO: 132084 - DNA, 25 bp, Artificial
  probe
  misc_feature (1)..(25): SEQ ID NO: 6640; WAN024CT4_at; Start 142; Stop 166
gctaggaaagtccagaaaattcttc

SEQ ID NO: 132085 - DNA, 25 bp, Artificial
  probe
  misc_feature (1)..(25): SEQ ID NO: 6640; WAN024CT4_at; Start 175; Stop 199
gtccgacaccaaggcaagattattg

SEQ ID NO: 132086 - DNA, 25 bp, Artificial
  probe
  misc_feature (1)..(25): SEQ ID NO: 6640; WAN024CT4_at; Start 283; Stop 307
ggaactcctttagcttctgcgcttg

SEQ ID NO: 132087 - DNA, 25 bp, Artificial
  probe
  misc_feature (1)..(25): SEQ ID NO: 6640; WAN024CT4_at; Start 289; Stop 313
cctttagcttctgcgcttgcagatt

SEQ ID NO: 132088 - DNA, 25 bp, Artificial
  probe
  misc_feature (1)..(25): SEQ ID NO: 6640; WAN024CT4_at; Start 205; Stop 229
ctcaggattgagaatgtacttgata

SEQ ID NO: 132089 - DNA, 25 bp, Artificial
  probe
  misc_feature (1)..(25): SEQ ID NO: 6640; WAN024CT4_at; Start 6; Stop 30
cctctggcgagaaagactgaatgat

SEQ ID NO: 132090 - DNA, 25 bp, Artificial
  probe
  misc_feature (1)..(25): SEQ ID NO: 6640; WAN024CT4_at; Start 256; Stop 280
aatggcaaagtgtttagtgatgacc

SEQ ID NO: 132091 - DNA, 25 bp, Artificial
  probe
  misc_feature (1)..(25): SEQ ID NO: 6640; WAN024CT4_at; Start 243; Stop 267
aactctttccgtgaatggcaaagtg

SEQ ID NO: 132092 - DNA, 25 bp, Artificial
  probe
  misc_feature (1)..(25): SEQ ID NO: 6640; WAN024CT4_at; Start 13; Stop 37
cgagaaagactgaatgatgtggtga

SEQ ID NO: 132093 - DNA, 25 bp, Artificial
  probe
  misc_feature (1)..(25): SEQ ID NO: 6640; WAN024CT4_at; Start 156; Stop 180
gaaaattcttcatgccatagtccga

SEQ ID NO: 132094 - DNA, 25 bp, Artificial
  probe
  misc_feature (1)..(25): SEQ ID NO: 6640; WAN024CT4_at; Start 238; Stop 262
gcggtaactctttccgtgaatggca

SEQ ID NO: 132095 - DNA, 25 bp, Artificial
  probe
  misc_feature (1)..(25): SEQ ID NO: 6640; WAN024CT4_at; Start 273; Stop 297
tgatgaccatggaactcctttagct

SEQ ID NO: 132096 - DNA, 25 bp, Artificial
  probe
  misc_feature (1)..(25): SEQ ID NO: 6640; WAN024CT4_at; Start 134; Stop 158
tcctcatagctaggaaagtccagaa

SEQ ID NO: 132097 - DNA, 25 bp, Artificial
  probe
  misc_feature (1)..(25): SEQ ID NO: 6640; WAN024CT4_at; Start 63; Stop 87
ccatcctgtcgtggcgaaaatcgta

SEQ ID NO: 132098 - DNA, 25 bp, Artificial
  probe
  misc_feature (1)..(25): SEQ ID NO: 6640; WAN024CT4_at; Start 192; Stop 216
gattattggttttctcaggattgag

SEQ ID NO: 132099 - DNA, 25 bp, Artificial
  probe
  misc_feature (1)..(25): SEQ ID NO: 6640; WAN024CT4_at; Start 217; Stop 241
aatgtacttgataagctttctgcgg

SEQ ID NO: 132100 - DNA, 25 bp, Artificial
  probe
  misc_feature (1)..(25): SEQ ID NO: 6640; WAN024CT4_at; Start 91; Stop 115
cgtatcgttgctgatgaaattttca

SEQ ID NO: 132101 - DNA, 25 bp, Artificial
  probe
  misc_feature (1)..(25): SEQ ID NO: 6640; WAN024CT4_at; Start 36; Stop 60
gagcgtgtatttttcgttgattttc

SEQ ID NO: 132102 - DNA, 25 bp, Artificial
  probe
  misc_feature (1)..(25): SEQ ID NO: 6640; WAN024CT4_at; Start 84; Stop 108
cgtaaagcgtatcgttgctgatgaa

SEQ ID NO: 132103 - DNA, 25 bp, Artificial
  probe
  misc_feature (1)..(25): SEQ ID NO: 6640; WAN024CT4_at; Start 229; Stop 253
aagctttctgcggtaactctttccg

SEQ ID NO: 132104 - DNA, 25 bp, Artificial
  probe
  misc_feature (1)..(25): SEQ ID NO: 6640; WAN024CT4_at; Start 170; Stop 194
ccatagtccgacaccaaggcaagat

SEQ ID NO: 132105 - DNA, 25 bp, Artificial
  probe
  misc_feature (1)..(25): SEQ ID NO: 6640; WAN024CT4_at; Start 2; Stop 26
tgatcctctggcgagaaagactgaa

SEQ ID NO: 132106 - DNA, 25 bp, Artificial
  probe
  misc_feature (1)..(25): SEQ ID NO: 6640; WAN024CT4_at; Start 266; Stop 290
tgtttagtgatgaccatggaactcc

SEQ ID NO: 132107 - DNA, 25 bp, Artificial
  probe
  misc_feature (1)..(25): SEQ ID NO: 6640; WAN024CT4_at; Start 106; Stop 130
gaaattttcatgatacatctgcacc

SEQ ID NO: 132108 - DNA, 25 bp, Artificial
  probe
  misc_feature (1)..(25): SEQ ID NO: 6640; WAN024CT4_at; Start 249; Stop 273
ttccgtgaatggcaaagtgtttagt

SEQ ID NO: 132109 - DNA, 25 bp, Artificial
  probe
  misc_feature (1)..(25): SEQ ID NO: 6982; WAN024CT5_at; Start 344; Stop 368
taactgataaaattggcattgatgt

SEQ ID NO: 132110 - DNA, 25 bp, Artificial
  probe
  misc_feature (1)..(25): SEQ ID NO: 6982; WAN024CT5_at; Start 256; Stop 280
gtgacaaccttaaatcaagtagcag

SEQ ID NO: 132111 - DNA, 25 bp, Artificial
  probe
  misc_feature (1)..(25): SEQ ID NO: 6982; WAN024CT5_at; Start 414; Stop 438
gagcaatagatatgagaatatcgta

SEQ ID NO: 132112 - DNA, 25 bp, Artificial
  probe
  misc_feature (1)..(25): SEQ ID NO: 6982; WAN024CT5_at; Start 125; Stop 149
aagagaagattgaggaagtgtatac

SEQ ID NO: 132113 - DNA, 25 bp, Artificial
  probe
  misc_feature (1)..(25): SEQ ID NO: 6982; WAN024CT5_at; Start 216; Stop 240
ggcagcttcagaattgagaatcaat

SEQ ID NO: 132114 - DNA, 25 bp, Artificial
  probe
  misc_feature (1)..(25): SEQ ID NO: 6982; WAN024CT5_at; Start 145; Stop 169
tatactttacttgagctggatatgg

SEQ ID NO: 132115 - DNA, 25 bp, Artificial
  probe
  misc_feature (1)..(25): SEQ ID NO: 6982; WAN024CT5_at; Start 398; Stop 422
tccagatagaattagagagcaatag

SEQ ID NO: 132116 - DNA, 25 bp, Artificial
  probe
  misc_feature (1)..(25): SEQ ID NO: 6982; WAN024CT5_at; Start 446; Stop 470
tgaataagtttatcaatcgtttgag

SEQ ID NO: 132117 - DNA, 25 bp, Artificial
  probe
  misc_feature (1)..(25): SEQ ID NO: 6982; WAN024CT5_at; Start 30; Stop 54
gaatcgctacatgaaaggtcgaacc

SEQ ID NO: 132118 - DNA, 25 bp, Artificial
  probe
  misc_feature (1)..(25): SEQ ID NO: 6982; WAN024CT5_at; Start 429; Stop 453
gaatatcgtatttaaagtgaataag

SEQ ID NO: 132119 - DNA, 25 bp, Artificial
  probe
  misc_feature (1)..(25): SEQ ID NO: 6982; WAN024CT5_at; Start 406; Stop 430
gaattagagagcaatagatatgaga

SEQ ID NO: 132120 - DNA, 25 bp, Artificial
  probe
  misc_feature (1)..(25): SEQ ID NO: 6982; WAN024CT5_at; Start 136; Stop 160
gaggaagtgtatactttacttgagc

SEQ ID NO: 132121 - DNA, 25 bp, Artificial
  probe
  misc_feature (1)..(25): SEQ ID NO: 6982; WAN024CT5_at; Start 211; Stop 235
gaattggcagcttcagaattgagaa

SEQ ID NO: 132122 - DNA, 25 bp, Artificial
  probe
  misc_feature (1)..(25): SEQ ID NO: 6982; WAN024CT5_at; Start 18; Stop 42
gatgcctgagaagaatcgctacatg

SEQ ID NO: 132123 - DNA, 25 bp, Artificial
  probe
  misc_feature (1)..(25): SEQ ID NO: 6982; WAN024CT5_at; Start 171; Stop 195
taagcactcttatattacaattaaa

SEQ ID NO: 132124 - DNA, 25 bp, Artificial
  probe
  misc_feature (1)..(25): SEQ ID NO: 6982; WAN024CT5_at; Start 203; Stop 227
taattcatgaattggcagcttcaga

SEQ ID NO: 132125 - DNA, 25 bp, Artificial
  probe
  misc_feature (1)..(25): SEQ ID NO: 6982; WAN024CT5_at; Start 196; Stop 220
gatgatttaattcatgaattggcag

SEQ ID NO: 132126 - DNA, 25 bp, Artificial
  probe
  misc_feature (1)..(25): SEQ ID NO: 6982; WAN024CT5_at; Start 9; Stop 33
cataaagacgatgcctgagaagaat

SEQ ID NO: 132127 - DNA, 25 bp, Artificial
  probe
  misc_feature (1)..(25): SEQ ID NO: 6982; WAN024CT5_at; Start 250; Stop 274
gaacgagtgacaaccttaaatcaag

SEQ ID NO: 132128 - DNA, 25 bp, Artificial
  probe
  misc_feature (1)..(25): SEQ ID NO: 6982; WAN024CT5_at; Start 300; Stop 324
tgaaaataagcaaaaaatgaaattg

SEQ ID NO: 132129 - DNA, 25 bp, Artificial
  probe
  misc_feature (1)..(25): SEQ ID NO: 6982; WAN024CT5_at; Start 384; Stop 408
gaatgagttaggtatccagatagaa

SEQ ID NO: 132130 - DNA, 25 bp, Artificial
  probe
  misc_feature (1)..(25): SEQ ID NO: 6982; WAN024CT5_at; Start 82; Stop 106
caaacgattccattccgcagaaaaa

SEQ ID NO: 132131 - DNA, 25 bp, Artificial
  probe
  misc_feature (1)..(25): SEQ ID NO: 6982; WAN024CT5_at; Start 241; Stop 265
gctttgcaagaacgagtgacaacct

SEQ ID NO: 132132 - DNA, 25 bp, Artificial
  probe
  misc_feature (1)..(25): SEQ ID NO: 6982; WAN024CT5_at; Start 379; Stop 403
gaattgaatgagttaggtatccaga

SEQ ID NO: 132133 - DNA, 25 bp, Artificial
  probe
  misc_feature (1)..(25): SEQ ID NO: 6982; WAN024CT5_at; Start 159; Stop 183
gctggatatggataagcactcttat

SEQ ID NO: 132134 - DNA, 25 bp, Artificial
  probe
  misc_feature (1)..(25): SEQ ID NO: 6982; WAN024CT5_at; Start 459; Stop 483
caatcgtttgagtaagaaaatttca

SEQ ID NO: 132135 - DNA, 25 bp, Artificial
  probe
  misc_feature (1)..(25): SEQ ID NO: 6982; WAN024CT5_at; Start 394; Stop 418
ggtatccagatagaattagagagca

SEQ ID NO: 132136 - DNA, 25 bp, Artificial
  probe
  misc_feature (1)..(25): SEQ ID NO: 6982; WAN024CT5_at; Start 481; Stop 505
tcaaaagaagaagggatatgttttc

SEQ ID NO: 132137 - DNA, 25 bp, Artificial
  probe
  misc_feature (1)..(25): SEQ ID NO: 6982; WAN024CT5_at; Start 236; Stop 260
tcaatgctttgcaagaacgagtgac

SEQ ID NO: 132138 - DNA, 25 bp, Artificial
  probe
  misc_feature (1)..(25): SEQ ID NO: 6982; WAN024CT5_at; Start 25; Stop 49
gagaagaatcgctacatgaaaggtc

SEQ ID NO: 132139 - DNA, 25 bp, Artificial
  probe
  misc_feature (1)..(25): SEQ ID NO: 6982; WAN024CT5_at; Start 357; Stop 381
tggcattgatgttgttgagaaggaa

SEQ ID NO: 132140 - DNA, 25 bp, Artificial
  probe
  misc_feature (1)..(25): SEQ ID NO: 6982; WAN024CT5_at; Start 366; Stop 390
tgttgttgagaaggaattgaatgag

SEQ ID NO: 132141 - DNA, 25 bp, Artificial
  probe
  misc_feature (1)..(25): SEQ ID NO: 6982; WAN024CT5_at; Start 87; Stop 111
gattccattccgcagaaaaacgaca

SEQ ID NO: 132142 - DNA, 25 bp, Artificial
  probe
  misc_feature (1)..(25): SEQ ID NO: 6982; WAN024CT5_at; Start 152; Stop 176
tacttgagctggatatggataagca

SEQ ID NO: 132143 - DNA, 25 bp, Artificial
  probe
  misc_feature (1)..(25): SEQ ID NO: 6782; WAN024CT6_at; Start 100; Stop 124
ttttcagaatatgctcgacgaaccc

SEQ ID NO: 132144 - DNA, 25 bp, Artificial
  probe
  misc_feature (1)..(25): SEQ ID NO: 6782; WAN024CT6_at; Start 51; Stop 75
cgaattgagtcagttgaaacattgc

SEQ ID NO: 132145 - DNA, 25 bp, Artificial
  probe
  misc_feature (1)..(25): SEQ ID NO: 6782; WAN024CT6_at; Start 324; Stop 348
tgttcaagcaaaaaagttgagggag

SEQ ID NO: 132146 - DNA, 25 bp, Artificial
  probe
  misc_feature (1)..(25): SEQ ID NO: 6782; WAN024CT6_at; Start 86; Stop 110
gcggttgtcaatctttttcagaata

SEQ ID NO: 132147 - DNA, 25 bp, Artificial
  probe
  misc_feature (1)..(25): SEQ ID NO: 6782; WAN024CT6_at; Start 204; Stop 228
taataacatcaaccagattgcccga

SEQ ID NO: 132148 - DNA, 25 bp, Artificial
  probe
  misc_feature (1)..(25): SEQ ID NO: 6782; WAN024CT6_at; Start 339; Stop 363
gttgagggagttttatggtcatcac

SEQ ID NO: 132149 - DNA, 25 bp, Artificial
  probe
  misc_feature (1)..(25): SEQ ID NO: 6782; WAN024CT6_at; Start 103; Stop 127
tcagaatatgctcgacgaaccctac

SEQ ID NO: 132150 - DNA, 25 bp, Artificial
  probe
  misc_feature (1)..(25): SEQ ID NO: 6782; WAN024CT6_at; Start 73; Stop 97
tgcatcgatcaaagcggttgtcaat

SEQ ID NO: 132151 - DNA, 25 bp, Artificial
  probe
  misc_feature (1)..(25): SEQ ID NO: 6782; WAN024CT6_at; Start 82; Stop 106
caaagcggttgtcaatctttttcag

SEQ ID NO: 132152 - DNA, 25 bp, Artificial
  probe
  misc_feature (1)..(25): SEQ ID NO: 6782; WAN024CT6_at; Start 109; Stop 133
tatgctcgacgaaccctacttgacc

SEQ ID NO: 132153 - DNA, 25 bp, Artificial
  probe
  misc_feature (1)..(25): SEQ ID NO: 6782; WAN024CT6_at; Start 296; Stop 320
tgataagtgaggtagagaaagagtt

SEQ ID NO: 132154 - DNA, 25 bp, Artificial
  probe
  misc_feature (1)..(25): SEQ ID NO: 6782; WAN024CT6_at; Start 65; Stop 89
tgaaacattgcatcgatcaaagcgg

SEQ ID NO: 132155 - DNA, 25 bp, Artificial
  probe
  misc_feature (1)..(25): SEQ ID NO: 6782; WAN024CT6_at; Start 38; Stop 62
tcctatctgatagcgaattgagtca

SEQ ID NO: 132156 - DNA, 25 bp, Artificial
  probe
  misc_feature (1)..(25): SEQ ID NO: 6782; WAN024CT6_at; Start 59; Stop 83
gtcagttgaaacattgcatcgatca

SEQ ID NO: 132157 - DNA, 25 bp, Artificial
  probe
  misc_feature (1)..(25): SEQ ID NO: 6782; WAN024CT6_at; Start 284; Stop 308
gaatcgctgacttgataagtgaggt

SEQ ID NO: 132158 - DNA, 25 bp, Artificial
  probe
  misc_feature (1)..(25): SEQ ID NO: 6782; WAN024CT6_at; Start 97; Stop 121
tctttttcagaatatgctcgacgaa

SEQ ID NO: 132159 - DNA, 25 bp, Artificial
  probe
  misc_feature (1)..(25): SEQ ID NO: 6782; WAN024CT6_at; Start 321; Stop 345
tagtgttcaagcaaaaaagttgagg

SEQ ID NO: 132160 - DNA, 25 bp, Artificial
  probe
  misc_feature (1)..(25): SEQ ID NO: 6782; WAN024CT6_at; Start 202; Stop 226
ggtaataacatcaaccagattgccc

SEQ ID NO: 132161 - DNA, 25 bp, Artificial
  probe
  misc_feature (1)..(25): SEQ ID NO: 6782; WAN024CT6_at; Start 46; Stop 70
gatagcgaattgagtcagttgaaac

SEQ ID NO: 132162 - DNA, 25 bp, Artificial
  probe
  misc_feature (1)..(25): SEQ ID NO: 6782; WAN024CT6_at; Start 66; Stop 90
gaaacattgcatcgatcaaagcggt

SEQ ID NO: 132163 - DNA, 25 bp, Artificial
  probe
  misc_feature (1)..(25): SEQ ID NO: 6782; WAN024CT6_at; Start 279; Stop 303
aaagggaatcgctgacttgataagt

SEQ ID NO: 132164 - DNA, 25 bp, Artificial
  probe
  misc_feature (1)..(25): SEQ ID NO: 6782; WAN024CT6_at; Start 249; Stop 273
gatttcaagtgaagaattgcaagac

SEQ ID NO: 132165 - DNA, 25 bp, Artificial
  probe
  misc_feature (1)..(25): SEQ ID NO: 6782; WAN024CT6_at; Start 172; Stop 196
caagatttgatatttgagttgaaga

SEQ ID NO: 132166 - DNA, 25 bp, Artificial
  probe
  misc_feature (1)..(25): SEQ ID NO: 6782; WAN024CT6_at; Start 288; Stop 312
cgctgacttgataagtgaggtagag

SEQ ID NO: 132167 - DNA, 25 bp, Artificial
  probe
  misc_feature (1)..(25): SEQ ID NO: 6782; WAN024CT6_at; Start 312; Stop 336
gaaagagtttagtgttcaagcaaaa

SEQ ID NO: 132168 - DNA, 25 bp, Artificial
  probe
  misc_feature (1)..(25): SEQ ID NO: 6782; WAN024CT6_at; Start 22; Stop 46
aagctaaagaaagttttcctatctg

SEQ ID NO: 132169 - DNA, 25 bp, Artificial
  probe
  misc_feature (1)..(25): SEQ ID NO: 6782; WAN024CT6_at; Start 281; Stop 305
agggaatcgctgacttgataagtga

SEQ ID NO: 132170 - DNA, 25 bp, Artificial
  probe
  misc_feature (1)..(25): SEQ ID NO: 6782; WAN024CT6_at; Start 77; Stop 101
tcgatcaaagcggttgtcaatcttt

SEQ ID NO: 132171 - DNA, 25 bp, Artificial
  probe
  misc_feature (1)..(25): SEQ ID NO: 6782; WAN024CT6_at; Start 70; Stop 94
cattgcatcgatcaaagcggttgtc

SEQ ID NO: 132172 - DNA, 25 bp, Artificial
  probe
  misc_feature (1)..(25): SEQ ID NO: 6782; WAN024CT6_at; Start 308; Stop 332
tagagaaagagtttagtgttcaagc

SEQ ID NO: 132173 - DNA, 25 bp, Artificial
  probe
  misc_feature (1)..(25): SEQ ID NO: 6782; WAN024CT6_at; Start 28; Stop 52
aagaaagttttcctatctgatagcg

SEQ ID NO: 132174 - DNA, 25 bp, Artificial
  probe
  misc_feature (1)..(25): SEQ ID NO: 6782; WAN024CT6_at; Start 55; Stop 79
ttgagtcagttgaaacattgcatcg

SEQ ID NO: 132175 - DNA, 25 bp, Artificial
  probe
  misc_feature (1)..(25): SEQ ID NO: 6782; WAN024CT6_at; Start 254; Stop 278
caagtgaagaattgcaagacttgaa

SEQ ID NO: 132176 - DNA, 25 bp, Artificial
  probe
  misc_feature (1)..(25): SEQ ID NO: 6782; WAN024CT6_at; Start 106; Stop 130
gaatatgctcgacgaaccctacttg

SEQ ID NO: 132177 - DNA, 25 bp, Artificial
  probe
  misc_feature (1)..(25): SEQ ID NO: 6792; WAN024CT7_at; Start 86; Stop 110
gtagctgccaatctttttctgaata

SEQ ID NO: 132178 - DNA, 25 bp, Artificial
  probe
  misc_feature (1)..(25): SEQ ID NO: 6792; WAN024CT7_at; Start 73; Stop 97
aatatcgaccaaagtagctgccaat

SEQ ID NO: 132179 - DNA, 25 bp, Artificial
  probe
  misc_feature (1)..(25): SEQ ID NO: 6792; WAN024CT7_at; Start 249; Stop 273
gatttctagcgaagaattgcaagag

SEQ ID NO: 132180 - DNA, 25 bp, Artificial
  probe
  misc_feature (1)..(25): SEQ ID NO: 6792; WAN024CT7_at; Start 105; Stop 129
tgaatatgcgagacgcaccctactt

SEQ ID NO: 132181 - DNA, 25 bp, Artificial
  probe
  misc_feature (1)..(25): SEQ ID NO: 6792; WAN024CT7_at; Start 326; Stop 350
tacaagctcaaaagctgagggagtt

SEQ ID NO: 132182 - DNA, 25 bp, Artificial
  probe
  misc_feature (1)..(25): SEQ ID NO: 6792; WAN024CT7_at; Start 335; Stop 359
aaaagctgagggagttccatggtca

SEQ ID NO: 132183 - DNA, 25 bp, Artificial
  probe
  misc_feature (1)..(25): SEQ ID NO: 6792; WAN024CT7_at; Start 75; Stop 99
tatcgaccaaagtagctgccaatct

SEQ ID NO: 132184 - DNA, 25 bp, Artificial
  probe
  misc_feature (1)..(25): SEQ ID NO: 6792; WAN024CT7_at; Start 109; Stop 133
tatgcgagacgcaccctacttgacc

SEQ ID NO: 132185 - DNA, 25 bp, Artificial
  probe
  misc_feature (1)..(25): SEQ ID NO: 6792; WAN024CT7_at; Start 106; Stop 130
gaatatgcgagacgcaccctacttg

SEQ ID NO: 132186 - DNA, 25 bp, Artificial
  probe
  misc_feature (1)..(25): SEQ ID NO: 6792; WAN024CT7_at; Start 79; Stop 103
gaccaaagtagctgccaatcttttt

SEQ ID NO: 132187 - DNA, 25 bp, Artificial
  probe
  misc_feature (1)..(25): SEQ ID NO: 6792; WAN024CT7_at; Start 71; Stop 95
gaaatatcgaccaaagtagctgcca

SEQ ID NO: 132188 - DNA, 25 bp, Artificial
  probe
  misc_feature (1)..(25): SEQ ID NO: 6792; WAN024CT7_at; Start 255; Stop 279
tagcgaagaattgcaagagttgaaa

SEQ ID NO: 132189 - DNA, 25 bp, Artificial
  probe
  misc_feature (1)..(25): SEQ ID NO: 6792; WAN024CT7_at; Start 310; Stop 334
gagaaagaatttacaatacaagctc

SEQ ID NO: 132190 - DNA, 25 bp, Artificial
  probe
  misc_feature (1)..(25): SEQ ID NO: 6792; WAN024CT7_at; Start 323; Stop 347
caatacaagctcaaaagctgaggga

SEQ ID NO: 132191 - DNA, 25 bp, Artificial
  probe
  misc_feature (1)..(25): SEQ ID NO: 6792; WAN024CT7_at; Start 334; Stop 358
caaaagctgagggagttccatggtc

SEQ ID NO: 132192 - DNA, 25 bp, Artificial
  probe
  misc_feature (1)..(25): SEQ ID NO: 6792; WAN024CT7_at; Start 316; Stop 340
gaatttacaatacaagctcaaaagc

SEQ ID NO: 132193 - DNA, 25 bp, Artificial
  probe
  misc_feature (1)..(25): SEQ ID NO: 6792; WAN024CT7_at; Start 164; Stop 188
atggctaccaagacttagtgtttga

SEQ ID NO: 132194 - DNA, 25 bp, Artificial
  probe
  misc_feature (1)..(25): SEQ ID NO: 6792; WAN024CT7_at; Start 328; Stop 352
caagctcaaaagctgagggagttcc

SEQ ID NO: 132195 - DNA, 25 bp, Artificial
  probe
  misc_feature (1)..(25): SEQ ID NO: 6792; WAN024CT7_at; Start 279; Stop 303
aaagggaatcgctgaattgataaaa

SEQ ID NO: 132196 - DNA, 25 bp, Artificial
  probe
  misc_feature (1)..(25): SEQ ID NO: 6792; WAN024CT7_at; Start 253; Stop 277
tctagcgaagaattgcaagagttga

SEQ ID NO: 132197 - DNA, 25 bp, Artificial
  probe
  misc_feature (1)..(25): SEQ ID NO: 6792; WAN024CT7_at; Start 84; Stop 108
aagtagctgccaatctttttctgaa

SEQ ID NO: 132198 - DNA, 25 bp, Artificial
  probe
  misc_feature (1)..(25): SEQ ID NO: 6792; WAN024CT7_at; Start 331; Stop 355
gctcaaaagctgagggagttccatg

SEQ ID NO: 132199 - DNA, 25 bp, Artificial
  probe
  misc_feature (1)..(25): SEQ ID NO: 6792; WAN024CT7_at; Start 66; Stop 90
aaatagaaatatcgaccaaagtagc

SEQ ID NO: 132200 - DNA, 25 bp, Artificial
  probe
  misc_feature (1)..(25): SEQ ID NO: 6792; WAN024CT7_at; Start 281; Stop 305
agggaatcgctgaattgataaaaga

SEQ ID NO: 132201 - DNA, 25 bp, Artificial
  probe
  misc_feature (1)..(25): SEQ ID NO: 6792; WAN024CT7_at; Start 304; Stop 328
gaagttgagaaagaatttacaatac

SEQ ID NO: 132202 - DNA, 25 bp, Artificial
  probe
  misc_feature (1)..(25): SEQ ID NO: 6792; WAN024CT7_at; Start 77; Stop 101
tcgaccaaagtagctgccaatcttt

SEQ ID NO: 132203 - DNA, 25 bp, Artificial
  probe
  misc_feature (1)..(25): SEQ ID NO: 6792; WAN024CT7_at; Start 89; Stop 113
gctgccaatctttttctgaatatgc

SEQ ID NO: 132204 - DNA, 25 bp, Artificial
  probe
  misc_feature (1)..(25): SEQ ID NO: 6792; WAN024CT7_at; Start 90; Stop 114
ctgccaatctttttctgaatatgcg

SEQ ID NO: 132205 - DNA, 25 bp, Artificial
  probe
  misc_feature (1)..(25): SEQ ID NO: 6792; WAN024CT7_at; Start 69; Stop 93
tagaaatatcgaccaaagtagctgc

SEQ ID NO: 132206 - DNA, 25 bp, Artificial
  probe
  misc_feature (1)..(25): SEQ ID NO: 6792; WAN024CT7_at; Start 321; Stop 345
tacaatacaagctcaaaagctgagg

SEQ ID NO: 132207 - DNA, 25 bp, Artificial
  probe
  misc_feature (1)..(25): SEQ ID NO: 6792; WAN024CT7_at; Start 161; Stop 185
caaatggctaccaagacttagtgtt

SEQ ID NO: 132208 - DNA, 25 bp, Artificial
  probe
  misc_feature (1)..(25): SEQ ID NO: 6792; WAN024CT7_at; Start 159; Stop 183
tacaaatggctaccaagacttagtg

SEQ ID NO: 132209 - DNA, 25 bp, Artificial
  probe
  misc_feature (1)..(25): SEQ ID NO: 6792; WAN024CT7_at; Start 153; Stop 177
cattgatacaaatggctaccaagac

SEQ ID NO: 132210 - DNA, 25 bp, Artificial
  probe
  misc_feature (1)..(25): SEQ ID NO: 6792; WAN024CT7_at; Start 157; Stop 181
gatacaaatggctaccaagacttag

SEQ ID NO: 132211 - DNA, 25 bp, Artificial
  probe
  misc_feature (1)..(25): SEQ ID NO: 4130; WAN024CT8_at; Start 111; Stop 135
tgctagacgaactactactagatcc

SEQ ID NO: 132212 - DNA, 25 bp, Artificial
  probe
  misc_feature (1)..(25): SEQ ID NO: 4130; WAN024CT8_at; Start 75; Stop 99
tatctcaaaaagtaactgcttatca

SEQ ID NO: 132213 - DNA, 25 bp, Artificial
  probe
  misc_feature (1)..(25): SEQ ID NO: 4130; WAN024CT8_at; Start 119; Stop 143
gaactactactagatcctggtatga

SEQ ID NO: 132214 - DNA, 25 bp, Artificial
  probe
  misc_feature (1)..(25): SEQ ID NO: 4130; WAN024CT8_at; Start 290; Stop 314
gaagagttaatagtagaagtggaga

SEQ ID NO: 132215 - DNA, 25 bp, Artificial
  probe
  misc_feature (1)..(25): SEQ ID NO: 4130; WAN024CT8_at; Start 98; Stop 122
cattctcagaatatgctagacgaac

SEQ ID NO: 132216 - DNA, 25 bp, Artificial
  probe
  misc_feature (1)..(25): SEQ ID NO: 4130; WAN024CT8_at; Start 116; Stop 140
gacgaactactactagatcctggta

SEQ ID NO: 132217 - DNA, 25 bp, Artificial
  probe
  misc_feature (1)..(25): SEQ ID NO: 4130; WAN024CT8_at; Start 293; Stop 317
gagttaatagtagaagtggagaaag

SEQ ID NO: 132218 - DNA, 25 bp, Artificial
  probe
  misc_feature (1)..(25): SEQ ID NO: 4130; WAN024CT8_at; Start 49; Stop 73
ctagaattagtcaaattgaatgaaa

SEQ ID NO: 132219 - DNA, 25 bp, Artificial
  probe
  misc_feature (1)..(25): SEQ ID NO: 4130; WAN024CT8_at; Start 95; Stop 119
tatcattctcagaatatgctagacg

SEQ ID NO: 132220 - DNA, 25 bp, Artificial
  probe
  misc_feature (1)..(25): SEQ ID NO: 4130; WAN024CT8_at; Start 271; Stop 295
tgagttgagaaaaggtatagaagag

SEQ ID NO: 132221 - DNA, 25 bp, Artificial
  probe
  misc_feature (1)..(25): SEQ ID NO: 4130; WAN024CT8_at; Start 88; Stop 112
aactgcttatcattctcagaatatg

SEQ ID NO: 132222 - DNA, 25 bp, Artificial
  probe
  misc_feature (1)..(25): SEQ ID NO: 4130; WAN024CT8_at; Start 343; Stop 367
gaggaaattttatggtcatcactaa

SEQ ID NO: 132223 - DNA, 25 bp, Artificial
  probe
  misc_feature (1)..(25): SEQ ID NO: 4130; WAN024CT8_at; Start 109; Stop 133
tatgctagacgaactactactagat

SEQ ID NO: 132224 - DNA, 25 bp, Artificial
  probe
  misc_feature (1)..(25): SEQ ID NO: 4130; WAN024CT8_at; Start 101; Stop 125
tctcagaatatgctagacgaactac

SEQ ID NO: 132225 - DNA, 25 bp, Artificial
  probe
  misc_feature (1)..(25): SEQ ID NO: 4130; WAN024CT8_at; Start 267; Stop 291
taaatgagttgagaaaaggtataga

SEQ ID NO: 132226 - DNA, 25 bp, Artificial
  probe
  misc_feature (1)..(25): SEQ ID NO: 4130; WAN024CT8_at; Start 195; Stop 219
aacgaatcggaaataatattaatca

SEQ ID NO: 132227 - DNA, 25 bp, Artificial
  probe
  misc_feature (1)..(25): SEQ ID NO: 4130; WAN024CT8_at; Start 80; Stop 104
caaaaagtaactgcttatcattctc

SEQ ID NO: 132228 - DNA, 25 bp, Artificial
  probe
  misc_feature (1)..(25): SEQ ID NO: 4130; WAN024CT8_at; Start 220; Stop 244
aatagccagaagcataaattattcg

SEQ ID NO: 132229 - DNA, 25 bp, Artificial
  probe
  misc_feature (1)..(25): SEQ ID NO: 4130; WAN024CT8_at; Start 214; Stop 238
taatcaaatagccagaagcataaat

SEQ ID NO: 132230 - DNA, 25 bp, Artificial
  probe
  misc_feature (1)..(25): SEQ ID NO: 4130; WAN024CT8_at; Start 56; Stop 80
tagtcaaattgaatgaaaatatctc

SEQ ID NO: 132231 - DNA, 25 bp, Artificial
  probe
  misc_feature (1)..(25): SEQ ID NO: 4130; WAN024CT8_at; Start 262; Stop 286
tgaattaaatgagttgagaaaaggt

SEQ ID NO: 132232 - DNA, 25 bp, Artificial
  probe
  misc_feature (1)..(25): SEQ ID NO: 4130; WAN024CT8_at; Start 305; Stop 329
gaagtggagaaagattttcttattc

SEQ ID NO: 132233 - DNA, 25 bp, Artificial
  probe
  misc_feature (1)..(25): SEQ ID NO: 4130; WAN024CT8_at; Start 121; Stop 145
actactactagatcctggtatgaat

SEQ ID NO: 132234 - DNA, 25 bp, Artificial
  probe
  misc_feature (1)..(25): SEQ ID NO: 4130; WAN024CT8_at; Start 276; Stop 300
tgagaaaaggtatagaagagttaat

SEQ ID NO: 132235 - DNA, 25 bp, Artificial
  probe
  misc_feature (1)..(25): SEQ ID NO: 4130; WAN024CT8_at; Start 84; Stop 108
aagtaactgcttatcattctcagaa

SEQ ID NO: 132236 - DNA, 25 bp, Artificial
  probe
  misc_feature (1)..(25): SEQ ID NO: 4130; WAN024CT8_at; Start 104; Stop 128
cagaatatgctagacgaactactac

SEQ ID NO: 132237 - DNA, 25 bp, Artificial
  probe
  misc_feature (1)..(25): SEQ ID NO: 4130; WAN024CT8_at; Start 222; Stop 246
tagccagaagcataaattattcgaa

SEQ ID NO: 132238 - DNA, 25 bp, Artificial
  probe
  misc_feature (1)..(25): SEQ ID NO: 4130; WAN024CT8_at; Start 70; Stop 94
gaaaatatctcaaaaagtaactgct

SEQ ID NO: 132239 - DNA, 25 bp, Artificial
  probe
  misc_feature (1)..(25): SEQ ID NO: 4130; WAN024CT8_at; Start 211; Stop 235
tattaatcaaatagccagaagcata

SEQ ID NO: 132240 - DNA, 25 bp, Artificial
  probe
  misc_feature (1)..(25): SEQ ID NO: 4130; WAN024CT8_at; Start 339; Stop 363
aattgaggaaattttatggtcatca

SEQ ID NO: 132241 - DNA, 25 bp, Artificial
  probe
  misc_feature (1)..(25): SEQ ID NO: 4130; WAN024CT8_at; Start 300; Stop 324
tagtagaagtggagaaagattttct

SEQ ID NO: 132242 - DNA, 25 bp, Artificial
  probe
  misc_feature (1)..(25): SEQ ID NO: 4130; WAN024CT8_at; Start 224; Stop 248
gccagaagcataaattattcgaatt

SEQ ID NO: 132243 - DNA, 25 bp, Artificial
  probe
  misc_feature (1)..(25): SEQ ID NO: 4130; WAN024CT8_at; Start 106; Stop 130
gaatatgctagacgaactactacta

SEQ ID NO: 132244 - DNA, 25 bp, Artificial
  probe
  misc_feature (1)..(25): SEQ ID NO: 4130; WAN024CT8_at; Start 114; Stop 138
tagacgaactactactagatcctgg

SEQ ID NO: 132245 - DNA, 25 bp, Artificial
  probe
  misc_feature (1)..(25): SEQ ID NO: 2657; WAN024CT9_at; Start 1312; Stop 1336
tatgtctaccacaaagacgctgccg

SEQ ID NO: 132246 - DNA, 25 bp, Artificial
  probe
  misc_feature (1)..(25): SEQ ID NO: 2657; WAN024CT9_at; Start 1003; Stop 1027
gattggcaagctccagaaactgagg

SEQ ID NO: 132247 - DNA, 25 bp, Artificial
  probe
  misc_feature (1)..(25): SEQ ID NO: 2657; WAN024CT9_at; Start 319; Stop 343
actgtgaaggaattaactggtggca

SEQ ID NO: 132248 - DNA, 25 bp, Artificial
  probe
  misc_feature (1)..(25): SEQ ID NO: 2657; WAN024CT9_at; Start 427; Stop 451
gacaaaaagctcaagtgggactaca

SEQ ID NO: 132249 - DNA, 25 bp, Artificial
  probe
  misc_feature (1)..(25): SEQ ID NO: 2657; WAN024CT9_at; Start 1398; Stop 1422
cattccattacgcagaaaagcgaca

SEQ ID NO: 132250 - DNA, 25 bp, Artificial
  probe
  misc_feature (1)..(25): SEQ ID NO: 2657; WAN024CT9_at; Start 169; Stop 193
gaaaatttcatcagcaacgatacgc

SEQ ID NO: 132251 - DNA, 25 bp, Artificial
  probe
  misc_feature (1)..(25): SEQ ID NO: 2657; WAN024CT9_at; Start 254; Stop 278
tcattcagtctttctcgccagagga

SEQ ID NO: 132252 - DNA, 25 bp, Artificial
  probe
  misc_feature (1)..(25): SEQ ID NO: 2657; WAN024CT9_at; Start 9; Stop 33
cactaaacactttgccattcacgga

SEQ ID NO: 132253 - DNA, 25 bp, Artificial
  probe
  misc_feature (1)..(25): SEQ ID NO: 2657; WAN024CT9_at; Start 636; Stop 660
gaatgctccgctactacatgtggag

SEQ ID NO: 132254 - DNA, 25 bp, Artificial
  probe
  misc_feature (1)..(25): SEQ ID NO: 2657; WAN024CT9_at; Start 695; Stop 719
ttacggactcaactatgaaacaggt

SEQ ID NO: 132255 - DNA, 25 bp, Artificial
  probe
  misc_feature (1)..(25): SEQ ID NO: 2657; WAN024CT9_at; Start 1327; Stop 1351
gacgctgccgagaaaaattgttata

SEQ ID NO: 132256 - DNA, 25 bp, Artificial
  probe
  misc_feature (1)..(25): SEQ ID NO: 2657; WAN024CT9_at; Start 929; Stop 953
taaaggagacagagctagaccagaa

SEQ ID NO: 132257 - DNA, 25 bp, Artificial
  probe
  misc_feature (1)..(25): SEQ ID NO: 2657; WAN024CT9_at; Start 270; Stop 294
gccagaggatcatatcactcctgaa

SEQ ID NO: 132258 - DNA, 25 bp, Artificial
  probe
  misc_feature (1)..(25): SEQ ID NO: 2657; WAN024CT9_at; Start 233; Stop 257
gaaaaatacacgctcaccacatcat

SEQ ID NO: 132259 - DNA, 25 bp, Artificial
  probe
  misc_feature (1)..(25): SEQ ID NO: 2657; WAN024CT9_at; Start 1548; Stop 1572
caatgagttgcaagaacgaatgtca

SEQ ID NO: 132260 - DNA, 25 bp, Artificial
  probe
  misc_feature (1)..(25): SEQ ID NO: 2657; WAN024CT9_at; Start 1509; Stop 1533
tgagttagtgcatgaactagcagcg

SEQ ID NO: 132261 - DNA, 25 bp, Artificial
  probe
  misc_feature (1)..(25): SEQ ID NO: 2657; WAN024CT9_at; Start 1286; Stop 1310
ttttcatcagggaaaccagctccta

SEQ ID NO: 132262 - DNA, 25 bp, Artificial
  probe
  misc_feature (1)..(25): SEQ ID NO: 2657; WAN024CT9_at; Start 1526; Stop 1550
tagcagcgtctgaattgagaatcaa

SEQ ID NO: 132263 - DNA, 25 bp, Artificial
  probe
  misc_feature (1)..(25): SEQ ID NO: 2657; WAN024CT9_at; Start 84; Stop 108
caataatcttgccttggtgtcggac

SEQ ID NO: 132264 - DNA, 25 bp, Artificial
  probe
  misc_feature (1)..(25): SEQ ID NO: 2657; WAN024CT9_at; Start 442; Stop 466
tgggactacaaggtggagcgaaatc

SEQ ID NO: 132265 - DNA, 25 bp, Artificial
  probe
  misc_feature (1)..(25): SEQ ID NO: 2657; WAN024CT9_at; Start 208; Stop 232
cacgacaggatggaagaaaatcaac

SEQ ID NO: 132266 - DNA, 25 bp, Artificial
  probe
  misc_feature (1)..(25): SEQ ID NO: 2657; WAN024CT9_at; Start 905; Stop 929
cttttcaatttgcaggagtggaggt

SEQ ID NO: 132267 - DNA, 25 bp, Artificial
  probe
  misc_feature (1)..(25): SEQ ID NO: 2657; WAN024CT9_at; Start 1682; Stop 1706
ttgagaaaaaattgaagagcctggg

SEQ ID NO: 132268 - DNA, 25 bp, Artificial
  probe
  misc_feature (1)..(25): SEQ ID NO: 2657; WAN024CT9_at; Start 484; Stop 508
cgtttttctaaaatcgcaggtgcta

SEQ ID NO: 132269 - DNA, 25 bp, Artificial
  probe
  misc_feature (1)..(25): SEQ ID NO: 2657; WAN024CT9_at; Start 660; Stop 684
gatggatttccgtcacaagcatgcc

SEQ ID NO: 132270 - DNA, 25 bp, Artificial
  probe
  misc_feature (1)..(25): SEQ ID NO: 2657; WAN024CT9_at; Start 1242; Stop 1266
tgtgccgaacatgcagcttgatatg

SEQ ID NO: 132271 - DNA, 25 bp, Artificial
  probe
  misc_feature (1)..(25): SEQ ID NO: 2657; WAN024CT9_at; Start 30; Stop 54
cggaaagagttaccgcagaaagctt

SEQ ID NO: 132272 - DNA, 25 bp, Artificial
  probe
  misc_feature (1)..(25): SEQ ID NO: 2657; WAN024CT9_at; Start 300; Stop 324
caatcggataggttatgagactgtg

SEQ ID NO: 132273 - DNA, 25 bp, Artificial
  probe
  misc_feature (1)..(25): SEQ ID NO: 2657; WAN024CT9_at; Start 532; Stop 556
caccagcggtatgaagtctatcgta

SEQ ID NO: 132274 - DNA, 25 bp, Artificial
  probe
  misc_feature (1)..(25): SEQ ID NO: 2657; WAN024CT9_at; Start 366; Stop 390
ccatgttgataaagaccacctgcac

SEQ ID NO: 132275 - DNA, 25 bp, Artificial
  probe
  misc_feature (1)..(25): SEQ ID NO: 2657; WAN024CT9_at; Start 502; Stop 526
ggtgctaaaatcattgagaaccgct

SEQ ID NO: 132276 - DNA, 25 bp, Artificial
  probe
  misc_feature (1)..(25): SEQ ID NO: 2657; WAN024CT9_at; Start 1782; Stop 1806
tacaggactttcaaaaggagatggg

SEQ ID NO: 132277 - DNA, 25 bp, Artificial
  probe
  misc_feature (1)..(25): SEQ ID NO: 2657; WAN024CT9_at; Start 97; Stop 121
ttggtgtcggactatggcatgaaga

SEQ ID NO: 132278 - DNA, 25 bp, Artificial
  probe
  misc_feature (1)..(25): SEQ ID NO: 2657; WAN024CT9_at; Start 192; Stop 216
gctttacgattttcgccacgacagg

SEQ ID NO: 132279 - DNA, 25 bp, Artificial
  probe
  misc_feature (1)..(25): SEQ ID NO: 2186; WAN024CTA_at; Start 331; Stop 355
gcgcagaagctaaaggagttccatg

SEQ ID NO: 132280 - DNA, 25 bp, Artificial
  probe
  misc_feature (1)..(25): SEQ ID NO: 2186; WAN024CTA_at; Start 69; Stop 93
tataaatatcgatcaaagtggttgt

SEQ ID NO: 132281 - DNA, 25 bp, Artificial
  probe
  misc_feature (1)..(25): SEQ ID NO: 2186; WAN024CTA_at; Start 109; Stop 133
tatgcgagacgaactctactcgatc

SEQ ID NO: 132282 - DNA, 25 bp, Artificial
  probe
  misc_feature (1)..(25): SEQ ID NO: 2186; WAN024CTA_at; Start 253; Stop 277
tctggtgaagaattgcaggagttga

SEQ ID NO: 132283 - DNA, 25 bp, Artificial
  probe
  misc_feature (1)..(25): SEQ ID NO: 2186; WAN024CTA_at; Start 144; Stop 168
ttttatcacgattgacacaaacggt

SEQ ID NO: 132284 - DNA, 25 bp, Artificial
  probe
  misc_feature (1)..(25): SEQ ID NO: 2186; WAN024CTA_at; Start 105; Stop 129
tgaatatgcgagacgaactctactc

SEQ ID NO: 132285 - DNA, 25 bp, Artificial
  probe
  misc_feature (1)..(25): SEQ ID NO: 2186; WAN024CTA_at; Start 120; Stop 144
aactctactcgatcctggtatgaat

SEQ ID NO: 132286 - DNA, 25 bp, Artificial
  probe
  misc_feature (1)..(25): SEQ ID NO: 2186; WAN024CTA_at; Start 150; Stop 174
cacgattgacacaaacggttaccaa

SEQ ID NO: 132287 - DNA, 25 bp, Artificial
  probe
  misc_feature (1)..(25): SEQ ID NO: 2186; WAN024CTA_at; Start 65; Stop 89
taaatataaatatcgatcaaagtgg

SEQ ID NO: 132288 - DNA, 25 bp, Artificial
  probe
  misc_feature (1)..(25): SEQ ID NO: 2186; WAN024CTA_at; Start 153; Stop 177
gattgacacaaacggttaccaagat

SEQ ID NO: 132289 - DNA, 25 bp, Artificial
  probe
  misc_feature (1)..(25): SEQ ID NO: 2186; WAN024CTA_at; Start 316; Stop 340
gaatttaatctgcaagcgcagaagc

SEQ ID NO: 132290 - DNA, 25 bp, Artificial
  probe
  misc_feature (1)..(25): SEQ ID NO: 2186; WAN024CTA_at; Start 238; Stop 262
caatctcagttaatttctggtgaag

SEQ ID NO: 132291 - DNA, 25 bp, Artificial
  probe
  misc_feature (1)..(25): SEQ ID NO: 2186; WAN024CTA_at; Start 119; Stop 143
gaactctactcgatcctggtatgaa

SEQ ID NO: 132292 - DNA, 25 bp, Artificial
  probe
  misc_feature (1)..(25): SEQ ID NO: 2186; WAN024CTA_at; Start 328; Stop 352
caagcgcagaagctaaaggagttcc

SEQ ID NO: 132293 - DNA, 25 bp, Artificial
  probe
  misc_feature (1)..(25): SEQ ID NO: 2186; WAN024CTA_at; Start 335; Stop 359
agaagctaaaggagttccatggtca

SEQ ID NO: 132294 - DNA, 25 bp, Artificial
  probe
  misc_feature (1)..(25): SEQ ID NO: 2186; WAN024CTA_at; Start 147; Stop 171
tatcacgattgacacaaacggttac

SEQ ID NO: 132295 - DNA, 25 bp, Artificial
  probe
  misc_feature (1)..(25): SEQ ID NO: 2186; WAN024CTA_at; Start 312; Stop 336
taaggaatttaatctgcaagcgcag

SEQ ID NO: 132296 - DNA, 25 bp, Artificial
  probe
  misc_feature (1)..(25): SEQ ID NO: 2186; WAN024CTA_at; Start 248; Stop 272
taatttctggtgaagaattgcagga

SEQ ID NO: 132297 - DNA, 25 bp, Artificial
  probe
  misc_feature (1)..(25): SEQ ID NO: 2186; WAN024CTA_at; Start 304; Stop 328
gaagttgataaggaatttaatctgc

SEQ ID NO: 132298 - DNA, 25 bp, Artificial
  probe
  misc_feature (1)..(25): SEQ ID NO: 2186; WAN024CTA_at; Start 82; Stop 106
caaagtggttgtaaatccttttctg

SEQ ID NO: 132299 - DNA, 25 bp, Artificial
  probe
  misc_feature (1)..(25): SEQ ID NO: 2186; WAN024CTA_at; Start 334; Stop 358
cagaagctaaaggagttccatggtc

SEQ ID NO: 132300 - DNA, 25 bp, Artificial
  probe
  misc_feature (1)..(25): SEQ ID NO: 2186; WAN024CTA_at; Start 265; Stop 289
ttgcaggagttgaaaaaaggaattg

SEQ ID NO: 132301 - DNA, 25 bp, Artificial
  probe
  misc_feature (1)..(25): SEQ ID NO: 2186; WAN024CTA_at; Start 77; Stop 101
tcgatcaaagtggttgtaaatcctt

SEQ ID NO: 132302 - DNA, 25 bp, Artificial
  probe
  misc_feature (1)..(25): SEQ ID NO: 2186; WAN024CTA_at; Start 90; Stop 114
ttgtaaatccttttctgaatatgcg

SEQ ID NO: 132303 - DNA, 25 bp, Artificial
  probe
  misc_feature (1)..(25): SEQ ID NO: 2186; WAN024CTA_at; Start 116; Stop 140
gacgaactctactcgatcctggtat

SEQ ID NO: 132304 - DNA, 25 bp, Artificial
  probe
  misc_feature (1)..(25): SEQ ID NO: 2186; WAN024CTA_at; Start 319; Stop 343
tttaatctgcaagcgcagaagctaa

SEQ ID NO: 132305 - DNA, 25 bp, Artificial
  probe
  misc_feature (1)..(25): SEQ ID NO: 2186; WAN024CTA_at; Start 268; Stop 292
caggagttgaaaaaaggaattggtg

SEQ ID NO: 132306 - DNA, 25 bp, Artificial
  probe
  misc_feature (1)..(25): SEQ ID NO: 2186; WAN024CTA_at; Start 310; Stop 334
gataaggaatttaatctgcaagcgc

SEQ ID NO: 132307 - DNA, 25 bp, Artificial
  probe
  misc_feature (1)..(25): SEQ ID NO: 2186; WAN024CTA_at; Start 159; Stop 183
cacaaacggttaccaagatttagtg

SEQ ID NO: 132308 - DNA, 25 bp, Artificial
  probe
  misc_feature (1)..(25): SEQ ID NO: 2186; WAN024CTA_at; Start 114; Stop 138
gagacgaactctactcgatcctggt

SEQ ID NO: 132309 - DNA, 25 bp, Artificial
  probe
  misc_feature (1)..(25): SEQ ID NO: 2186; WAN024CTA_at; Start 281; Stop 305
aaggaattggtgaattgataaaaga

SEQ ID NO: 132310 - DNA, 25 bp, Artificial
  probe
  misc_feature (1)..(25): SEQ ID NO: 2186; WAN024CTA_at; Start 141; Stop 165
gaattttatcacgattgacacaaac

SEQ ID NO: 132311 - DNA, 25 bp, Artificial
  probe
  misc_feature (1)..(25): SEQ ID NO: 2186; WAN024CTA_at; Start 75; Stop 99
tatcgatcaaagtggttgtaaatcc

SEQ ID NO: 132312 - DNA, 25 bp, Artificial
  probe
  misc_feature (1)..(25): SEQ ID NO: 2186; WAN024CTA_at; Start 324; Stop 348
tctgcaagcgcagaagctaaaggag

SEQ ID NO: 132313 - DNA, 25 bp, Artificial
  probe
  misc_feature (1)..(25): SEQ ID NO: 2658; WAN024CTB_at; Start 1806; Stop 1830
ggaaaatgagatacatttagagtaa

SEQ ID NO: 132314 - DNA, 25 bp, Artificial
  probe
  misc_feature (1)..(25): SEQ ID NO: 2658; WAN024CTB_at; Start 1608; Stop 1632
tacgacaaatagttctagcaattta

SEQ ID NO: 132315 - DNA, 25 bp, Artificial
  probe
  misc_feature (1)..(25): SEQ ID NO: 2658; WAN024CTB_at; Start 1580; Stop 1604
ctaatttagaggaagtattgttgaa

SEQ ID NO: 132316 - DNA, 25 bp, Artificial
  probe
  misc_feature (1)..(25): SEQ ID NO: 2658; WAN024CTB_at; Start 831; Stop 855
gaagaatatgaatgaattgattcaa

SEQ ID NO: 132317 - DNA, 25 bp, Artificial
  probe
  misc_feature (1)..(25): SEQ ID NO: 2658; WAN024CTB_at; Start 1293; Stop 1317
cagagaaactagttcttactatgta

SEQ ID NO: 132318 - DNA, 25 bp, Artificial
  probe
  misc_feature (1)..(25): SEQ ID NO: 2658; WAN024CTB_at; Start 1498; Stop 1522
gatataacaaatgatttcattgccc

SEQ ID NO: 132319 - DNA, 25 bp, Artificial
  probe
  misc_feature (1)..(25): SEQ ID NO: 2658; WAN024CTB_at; Start 1147; Stop 1171
gaagtagagttgaatcttaatcaaa

SEQ ID NO: 132320 - DNA, 25 bp, Artificial
  probe
  misc_feature (1)..(25): SEQ ID NO: 2658; WAN024CTB_at; Start 1303; Stop 1327
agttcttactatgtatatcataaag

SEQ ID NO: 132321 - DNA, 25 bp, Artificial
  probe
  misc_feature (1)..(25): SEQ ID NO: 2658; WAN024CTB_at; Start 1200; Stop 1224
cattaaggtacagtttggtatccga

SEQ ID NO: 132322 - DNA, 25 bp, Artificial
  probe
  misc_feature (1)..(25): SEQ ID NO: 2658; WAN024CTB_at; Start 1213; Stop 1237
tttggtatccgacaagaaggactta

SEQ ID NO: 132323 - DNA, 25 bp, Artificial
  probe
  misc_feature (1)..(25): SEQ ID NO: 2658; WAN024CTB_at; Start 563; Stop 587
attacaaatatgaaataaaacaacg

SEQ ID NO: 132324 - DNA, 25 bp, Artificial
  probe
  misc_feature (1)..(25): SEQ ID NO: 2658; WAN024CTB_at; Start 705; Stop 729
aaatatgaaacaagtcgtacgtgat

SEQ ID NO: 132325 - DNA, 25 bp, Artificial
  probe
  misc_feature (1)..(25): SEQ ID NO: 2658; WAN024CTB_at; Start 1482; Stop 1506
tccgaatgattttgaagatataaca

SEQ ID NO: 132326 - DNA, 25 bp, Artificial
  probe
  misc_feature (1)..(25): SEQ ID NO: 2658; WAN024CTB_at; Start 1537; Stop 1561
gagaatatgattgaacaagtccaaa

SEQ ID NO: 132327 - DNA, 25 bp, Artificial
  probe
  misc_feature (1)..(25): SEQ ID NO: 2658; WAN024CTB_at; Start 1219; Stop 1243
atccgacaagaaggacttatttttg

SEQ ID NO: 132328 - DNA, 25 bp, Artificial
  probe
  misc_feature (1)..(25): SEQ ID NO: 2658; WAN024CTB_at; Start 663; Stop 687
tgattttagacacaagcatgttact

SEQ ID NO: 132329 - DNA, 25 bp, Artificial
  probe
  misc_feature (1)..(25): SEQ ID NO: 2658; WAN024CTB_at; Start 1533; Stop 1557
tctagagaatatgattgaacaagtc

SEQ ID NO: 132330 - DNA, 25 bp, Artificial
  probe
  misc_feature (1)..(25): SEQ ID NO: 2658; WAN024CTB_at; Start 1513; Stop 1537
ttcattgcccaaatatcatatctag

SEQ ID NO: 132331 - DNA, 25 bp, Artificial
  probe
  misc_feature (1)..(25): SEQ ID NO: 2658; WAN024CTB_at; Start 1474; Stop 1498
gaaaatagtccgaatgattttgaag

SEQ ID NO: 132332 - DNA, 25 bp, Artificial
  probe
  misc_feature (1)..(25): SEQ ID NO: 2658; WAN024CTB_at; Start 1232; Stop 1256
gacttatttttgtaccaaatattca

SEQ ID NO: 132333 - DNA, 25 bp, Artificial
  probe
  misc_feature (1)..(25): SEQ ID NO: 2658; WAN024CTB_at; Start 1278; Stop 1302
agttaaagtatttctcagagaaact

SEQ ID NO: 132334 - DNA, 25 bp, Artificial
  probe
  misc_feature (1)..(25): SEQ ID NO: 2658; WAN024CTB_at; Start 1549; Stop 1573
gaacaagtccaaaataaaattgatg

SEQ ID NO: 132335 - DNA, 25 bp, Artificial
  probe
  misc_feature (1)..(25): SEQ ID NO: 2658; WAN024CTB_at; Start 1153; Stop 1177
gagttgaatcttaatcaaatagaag

SEQ ID NO: 132336 - DNA, 25 bp, Artificial
  probe
  misc_feature (1)..(25): SEQ ID NO: 2658; WAN024CTB_at; Start 1204; Stop 1228
aaggtacagtttggtatccgacaag

SEQ ID NO: 132337 - DNA, 25 bp, Artificial
  probe
  misc_feature (1)..(25): SEQ ID NO: 2658; WAN024CTB_at; Start 692; Stop 716
ttatgactgattcaaatatgaaaca

SEQ ID NO: 132338 - DNA, 25 bp, Artificial
  probe
  misc_feature (1)..(25): SEQ ID NO: 2658; WAN024CTB_at; Start 391; Stop 415
aatcacatcatcctaaattcaattg

SEQ ID NO: 132339 - DNA, 25 bp, Artificial
  probe
  misc_feature (1)..(25): SEQ ID NO: 2658; WAN024CTB_at; Start 964; Stop 988
agtgttagttattttcaagactatt

SEQ ID NO: 132340 - DNA, 25 bp, Artificial
  probe
  misc_feature (1)..(25): SEQ ID NO: 2658; WAN024CTB_at; Start 1570; Stop 1594
gatgatttaactaatttagaggaag

SEQ ID NO: 132341 - DNA, 25 bp, Artificial
  probe
  misc_feature (1)..(25): SEQ ID NO: 2658; WAN024CTB_at; Start 1208; Stop 1232
tacagtttggtatccgacaagaagg

SEQ ID NO: 132342 - DNA, 25 bp, Artificial
  probe
  misc_feature (1)..(25): SEQ ID NO: 2658; WAN024CTB_at; Start 1190; Stop 1214
atggaatttacattaaggtacagtt

SEQ ID NO: 132343 - DNA, 25 bp, Artificial
  probe
  misc_feature (1)..(25): SEQ ID NO: 2658; WAN024CTB_at; Start 381; Stop 405
tcatatccacaatcacatcatccta

SEQ ID NO: 132344 - DNA, 25 bp, Artificial
  probe
  misc_feature (1)..(25): SEQ ID NO: 2658; WAN024CTB_at; Start 1622; Stop 1646
ctagcaatttagaaaatagtattca

SEQ ID NO: 132345 - DNA, 25 bp, Artificial
  probe
  misc_feature (1)..(25): SEQ ID NO: 2658; WAN024CTB_at; Start 703; Stop 727
tcaaatatgaaacaagtcgtacgtg

SEQ ID NO: 132346 - DNA, 25 bp, Artificial
  probe
  misc_feature (1)..(25): SEQ ID NO: 2658; WAN024CTB_at; Start 1519; Stop 1543
gcccaaatatcatatctagagaata

SEQ ID NO: 132347 - DNA, 25 bp, Artificial
  probe
  misc_feature (1)..(25): SEQ ID NO: 7719; WAN024CTC_at; Start 37; Stop 61
cgtccaatcaagataactttattat

SEQ ID NO: 132348 - DNA, 25 bp, Artificial
  probe
  misc_feature (1)..(25): SEQ ID NO: 7719; WAN024CTC_at; Start 19; Stop 43
tctggtgtagacgttaaacgtccaa

SEQ ID NO: 132349 - DNA, 25 bp, Artificial
  probe
  misc_feature (1)..(25): SEQ ID NO: 7719; WAN024CTC_at; Start 10; Stop 34
ttgtgcaattctggtgtagacgtta

SEQ ID NO: 132350 - DNA, 25 bp, Artificial
  probe
  misc_feature (1)..(25): SEQ ID NO: 7719; WAN024CTC_at; Start 40; Stop 64
ccaatcaagataactttattataca

SEQ ID NO: 132351 - DNA, 25 bp, Artificial
  probe
  misc_feature (1)..(25): SEQ ID NO: 7719; WAN024CTC_at; Start 3; Stop 27
gttggttttgtgcaattctggtgta

SEQ ID NO: 132352 - DNA, 25 bp, Artificial
  probe
  misc_feature (1)..(25): SEQ ID NO: 7719; WAN024CTC_at; Start 8; Stop 32
ttttgtgcaattctggtgtagacgt

SEQ ID NO: 132353 - DNA, 25 bp, Artificial
  probe
  misc_feature (1)..(25): SEQ ID NO: 7719; WAN024CTC_at; Start 21; Stop 45
tggtgtagacgttaaacgtccaatc

SEQ ID NO: 132354 - DNA, 25 bp, Artificial
  probe
  misc_feature (1)..(25): SEQ ID NO: 7719; WAN024CTC_at; Start 59; Stop 83
tatacatattttcttcctcctactt

SEQ ID NO: 132355 - DNA, 25 bp, Artificial
  probe
  misc_feature (1)..(25): SEQ ID NO: 7719; WAN024CTC_at; Start 12; Stop 36
gtgcaattctggtgtagacgttaaa

SEQ ID NO: 132356 - DNA, 25 bp, Artificial
  probe
  misc_feature (1)..(25): SEQ ID NO: 7719; WAN024CTC_at; Start 6; Stop 30
ggttttgtgcaattctggtgtagac

SEQ ID NO: 132357 - DNA, 25 bp, Artificial
  probe
  misc_feature (1)..(25): SEQ ID NO: 7719; WAN024CTC_at; Start 7; Stop 31
gttttgtgcaattctggtgtagacg

SEQ ID NO: 132358 - DNA, 25 bp, Artificial
  probe
  misc_feature (1)..(25): SEQ ID NO: 7719; WAN024CTC_at; Start 68; Stop 92
tttcttcctcctacttatctattcg

SEQ ID NO: 132359 - DNA, 25 bp, Artificial
  probe
  misc_feature (1)..(25): SEQ ID NO: 7719; WAN024CTC_at; Start 111; Stop 135
tacagaaatttgtaacttttcgaga

SEQ ID NO: 132360 - DNA, 25 bp, Artificial
  probe
  misc_feature (1)..(25): SEQ ID NO: 7719; WAN024CTC_at; Start 62; Stop 86
acatattttcttcctcctacttatc

SEQ ID NO: 132361 - DNA, 25 bp, Artificial
  probe
  misc_feature (1)..(25): SEQ ID NO: 7719; WAN024CTC_at; Start 28; Stop 52
gacgttaaacgtccaatcaagataa

SEQ ID NO: 132362 - DNA, 25 bp, Artificial
  probe
  misc_feature (1)..(25): SEQ ID NO: 7719; WAN024CTC_at; Start 81; Stop 105
cttatctattcgtaggaaatcaaaa

SEQ ID NO: 132363 - DNA, 25 bp, Artificial
  probe
  misc_feature (1)..(25): SEQ ID NO: 7719; WAN024CTC_at; Start 13; Stop 37
tgcaattctggtgtagacgttaaac

SEQ ID NO: 132364 - DNA, 25 bp, Artificial
  probe
  misc_feature (1)..(25): SEQ ID NO: 7719; WAN024CTC_at; Start 80; Stop 104
acttatctattcgtaggaaatcaaa

SEQ ID NO: 132365 - DNA, 25 bp, Artificial
  probe
  misc_feature (1)..(25): SEQ ID NO: 7719; WAN024CTC_at; Start 26; Stop 50
tagacgttaaacgtccaatcaagat

SEQ ID NO: 132366 - DNA, 25 bp, Artificial
  probe
  misc_feature (1)..(25): SEQ ID NO: 7719; WAN024CTC_at; Start 83; Stop 107
tatctattcgtaggaaatcaaaaaa

SEQ ID NO: 132367 - DNA, 25 bp, Artificial
  probe
  misc_feature (1)..(25): SEQ ID NO: 7719; WAN024CTC_at; Start 9; Stop 33
tttgtgcaattctggtgtagacgtt

SEQ ID NO: 132368 - DNA, 25 bp, Artificial
  probe
  misc_feature (1)..(25): SEQ ID NO: 7719; WAN024CTC_at; Start 33; Stop 57
taaacgtccaatcaagataacttta

SEQ ID NO: 132369 - DNA, 25 bp, Artificial
  probe
  misc_feature (1)..(25): SEQ ID NO: 7719; WAN024CTC_at; Start 18; Stop 42
ttctggtgtagacgttaaacgtcca

SEQ ID NO: 132370 - DNA, 25 bp, Artificial
  probe
  misc_feature (1)..(25): SEQ ID NO: 7719; WAN024CTC_at; Start 30; Stop 54
cgttaaacgtccaatcaagataact

SEQ ID NO: 132371 - DNA, 25 bp, Artificial
  probe
  misc_feature (1)..(25): SEQ ID NO: 7719; WAN024CTC_at; Start 24; Stop 48
tgtagacgttaaacgtccaatcaag

SEQ ID NO: 132372 - DNA, 25 bp, Artificial
  probe
  misc_feature (1)..(25): SEQ ID NO: 7719; WAN024CTC_at; Start 35; Stop 59
aacgtccaatcaagataactttatt

SEQ ID NO: 132373 - DNA, 25 bp, Artificial
  probe
  misc_feature (1)..(25): SEQ ID NO: 7719; WAN024CTC_at; Start 11; Stop 35
tgtgcaattctggtgtagacgttaa

SEQ ID NO: 132374 - DNA, 25 bp, Artificial
  probe
  misc_feature (1)..(25): SEQ ID NO: 7719; WAN024CTC_at; Start 15; Stop 39
caattctggtgtagacgttaaacgt

SEQ ID NO: 132375 - DNA, 25 bp, Artificial
  probe
  misc_feature (1)..(25): SEQ ID NO: 7719; WAN024CTC_at; Start 77; Stop 101
cctacttatctattcgtaggaaatc

SEQ ID NO: 132376 - DNA, 25 bp, Artificial
  probe
  misc_feature (1)..(25): SEQ ID NO: 7719; WAN024CTC_at; Start 79; Stop 103
tacttatctattcgtaggaaatcaa

SEQ ID NO: 132377 - DNA, 25 bp, Artificial
  probe
  misc_feature (1)..(25): SEQ ID NO: 7719; WAN024CTC_at; Start 1; Stop 25
ttgttggttttgtgcaattctggtg

SEQ ID NO: 132378 - DNA, 25 bp, Artificial
  probe
  misc_feature (1)..(25): SEQ ID NO: 7719; WAN024CTC_at; Start 22; Stop 46
ggtgtagacgttaaacgtccaatca

SEQ ID NO: 132379 - DNA, 25 bp, Artificial
  probe
  misc_feature (1)..(25): SEQ ID NO: 7719; WAN024CTC_at; Start 14; Stop 38
gcaattctggtgtagacgttaaacg

SEQ ID NO: 132380 - DNA, 25 bp, Artificial
  probe
  misc_feature (1)..(25): SEQ ID NO: 7719; WAN024CTC_at; Start 56; Stop 80
tattatacatattttcttcctccta

SEQ ID NO: 132381 - DNA, 25 bp, Artificial
  probe
  misc_feature (1)..(25): SEQ ID NO: 2789; WAN024CTD_at; Start 202; Stop 226
ggtagtctcatttccgttgatggag

SEQ ID NO: 132382 - DNA, 25 bp, Artificial
  probe
  misc_feature (1)..(25): SEQ ID NO: 2789; WAN024CTD_at; Start 209; Stop 233
tcatttccgttgatggagaattgcg

SEQ ID NO: 132383 - DNA, 25 bp, Artificial
  probe
  misc_feature (1)..(25): SEQ ID NO: 2789; WAN024CTD_at; Start 219; Stop 243
tgatggagaattgcgtacccgtcgc

SEQ ID NO: 132384 - DNA, 25 bp, Artificial
  probe
  misc_feature (1)..(25): SEQ ID NO: 2789; WAN024CTD_at; Start 182; Stop 206
tggcaagctacgcaaccaaaggtag

SEQ ID NO: 132385 - DNA, 25 bp, Artificial
  probe
  misc_feature (1)..(25): SEQ ID NO: 2789; WAN024CTD_at; Start 170; Stop 194
tagcagaaactttggcaagctacgc

SEQ ID NO: 132386 - DNA, 25 bp, Artificial
  probe
  misc_feature (1)..(25): SEQ ID NO: 2789; WAN024CTD_at; Start 227; Stop 251
aattgcgtacccgtcgctttgagaa

SEQ ID NO: 132387 - DNA, 25 bp, Artificial
  probe
  misc_feature (1)..(25): SEQ ID NO: 2789; WAN024CTD_at; Start 193; Stop 217
gcaaccaaaggtagtctcatttccg

SEQ ID NO: 132388 - DNA, 25 bp, Artificial
  probe
  misc_feature (1)..(25): SEQ ID NO: 2789; WAN024CTD_at; Start 185; Stop 209
caagctacgcaaccaaaggtagtct

SEQ ID NO: 132389 - DNA, 25 bp, Artificial
  probe
  misc_feature (1)..(25): SEQ ID NO: 2789; WAN024CTD_at; Start 39; Stop 63
tacaccagaattgcacaaaaccaac

SEQ ID NO: 132390 - DNA, 25 bp, Artificial
  probe
  misc_feature (1)..(25): SEQ ID NO: 2789; WAN024CTD_at; Start 175; Stop 199
gaaactttggcaagctacgcaacca

SEQ ID NO: 132391 - DNA, 25 bp, Artificial
  probe
  misc_feature (1)..(25): SEQ ID NO: 2789; WAN024CTD_at; Start 188; Stop 212
gctacgcaaccaaaggtagtctcat

SEQ ID NO: 132392 - DNA, 25 bp, Artificial
  probe
  misc_feature (1)..(25): SEQ ID NO: 2789; WAN024CTD_at; Start 200; Stop 224
aaggtagtctcatttccgttgatgg

SEQ ID NO: 132393 - DNA, 25 bp, Artificial
  probe
  misc_feature (1)..(25): SEQ ID NO: 2789; WAN024CTD_at; Start 329; Stop 353
tgcgtgaaaataatgcaggccaaga

SEQ ID NO: 132394 - DNA, 25 bp, Artificial
  probe
  misc_feature (1)..(25): SEQ ID NO: 2789; WAN024CTD_at; Start 232; Stop 256
cgtacccgtcgctttgagaaaaatg

SEQ ID NO: 132395 - DNA, 25 bp, Artificial
  probe
  misc_feature (1)..(25): SEQ ID NO: 2789; WAN024CTD_at; Start 341; Stop 365
atgcaggccaagatttggcagattt

SEQ ID NO: 132396 - DNA, 25 bp, Artificial
  probe
  misc_feature (1)..(25): SEQ ID NO: 2789; WAN024CTD_at; Start 221; Stop 245
atggagaattgcgtacccgtcgctt

SEQ ID NO: 132397 - DNA, 25 bp, Artificial
  probe
  misc_feature (1)..(25): SEQ ID NO: 2789; WAN024CTD_at; Start 217; Stop 241
gttgatggagaattgcgtacccgtc

SEQ ID NO: 132398 - DNA, 25 bp, Artificial
  probe
  misc_feature (1)..(25): SEQ ID NO: 2789; WAN024CTD_at; Start 180; Stop 204
tttggcaagctacgcaaccaaaggt

SEQ ID NO: 132399 - DNA, 25 bp, Artificial
  probe
  misc_feature (1)..(25): SEQ ID NO: 2789; WAN024CTD_at; Start 229; Stop 253
ttgcgtacccgtcgctttgagaaaa

SEQ ID NO: 132400 - DNA, 25 bp, Artificial
  probe
  misc_feature (1)..(25): SEQ ID NO: 2789; WAN024CTD_at; Start 50; Stop 74
tgcacaaaaccaacaatgacaagtc

SEQ ID NO: 132401 - DNA, 25 bp, Artificial
  probe
  misc_feature (1)..(25): SEQ ID NO: 2789; WAN024CTD_at; Start 339; Stop 363
taatgcaggccaagatttggcagat

SEQ ID NO: 132402 - DNA, 25 bp, Artificial
  probe
  misc_feature (1)..(25): SEQ ID NO: 2789; WAN024CTD_at; Start 165; Stop 189
cagactagcagaaactttggcaagc

SEQ ID NO: 132403 - DNA, 25 bp, Artificial
  probe
  misc_feature (1)..(25): SEQ ID NO: 2789; WAN024CTD_at; Start 34; Stop 58
acgtctacaccagaattgcacaaaa

SEQ ID NO: 132404 - DNA, 25 bp, Artificial
  probe
  misc_feature (1)..(25): SEQ ID NO: 2789; WAN024CTD_at; Start 162; Stop 186
gggcagactagcagaaactttggca

SEQ ID NO: 132405 - DNA, 25 bp, Artificial
  probe
  misc_feature (1)..(25): SEQ ID NO: 2789; WAN024CTD_at; Start 224; Stop 248
gagaattgcgtacccgtcgctttga

SEQ ID NO: 132406 - DNA, 25 bp, Artificial
  probe
  misc_feature (1)..(25): SEQ ID NO: 2789; WAN024CTD_at; Start 173; Stop 197
cagaaactttggcaagctacgcaac

SEQ ID NO: 132407 - DNA, 25 bp, Artificial
  probe
  misc_feature (1)..(25): SEQ ID NO: 2789; WAN024CTD_at; Start 334; Stop 358
gaaaataatgcaggccaagatttgg

SEQ ID NO: 132408 - DNA, 25 bp, Artificial
  probe
  misc_feature (1)..(25): SEQ ID NO: 2789; WAN024CTD_at; Start 293; Stop 317
gattccaactcttggaaagtcgtgc

SEQ ID NO: 132409 - DNA, 25 bp, Artificial
  probe
  misc_feature (1)..(25): SEQ ID NO: 2789; WAN024CTD_at; Start 214; Stop 238
tccgttgatggagaattgcgtaccc

SEQ ID NO: 132410 - DNA, 25 bp, Artificial
  probe
  misc_feature (1)..(25): SEQ ID NO: 2789; WAN024CTD_at; Start 46; Stop 70
gaattgcacaaaaccaacaatgaca

SEQ ID NO: 132411 - DNA, 25 bp, Artificial
  probe
  misc_feature (1)..(25): SEQ ID NO: 2789; WAN024CTD_at; Start 331; Stop 355
cgtgaaaataatgcaggccaagatt

SEQ ID NO: 132412 - DNA, 25 bp, Artificial
  probe
  misc_feature (1)..(25): SEQ ID NO: 2789; WAN024CTD_at; Start 197; Stop 221
ccaaaggtagtctcatttccgttga

SEQ ID NO: 132413 - DNA, 25 bp, Artificial
  probe
  misc_feature (1)..(25): SEQ ID NO: 2789; WAN024CTD_at; Start 337; Stop 361
aataatgcaggccaagatttggcag

SEQ ID NO: 132414 - DNA, 25 bp, Artificial
  probe
  misc_feature (1)..(25): SEQ ID NO: 2789; WAN024CTD_at; Start 290; Stop 314
caggattccaactcttggaaagtcg

SEQ ID NO: 132415 - DNA, 25 bp, Artificial
  probe
  misc_feature (1)..(25): SEQ ID NO: 6427; WAN024CTE_at; Start 126; Stop 150
ttccttggtaaacggacgcagctcg

SEQ ID NO: 132416 - DNA, 25 bp, Artificial
  probe
  misc_feature (1)..(25): SEQ ID NO: 6427; WAN024CTE_at; Start 225; Stop 249
tatccgttgcgatggtatcaattcg

SEQ ID NO: 132417 - DNA, 25 bp, Artificial
  probe
  misc_feature (1)..(25): SEQ ID NO: 6427; WAN024CTE_at; Start 200; Stop 224
ccaggctgaatggtcgtcaccttga

SEQ ID NO: 132418 - DNA, 25 bp, Artificial
  probe
  misc_feature (1)..(25): SEQ ID NO: 6427; WAN024CTE_at; Start 196; Stop 220
aattccaggctgaatggtcgtcacc

SEQ ID NO: 132419 - DNA, 25 bp, Artificial
  probe
  misc_feature (1)..(25): SEQ ID NO: 6427; WAN024CTE_at; Start 19; Stop 43
cgcctgttgattggccataatggtc

SEQ ID NO: 132420 - DNA, 25 bp, Artificial
  probe
  misc_feature (1)..(25): SEQ ID NO: 6427; WAN024CTE_at; Start 68; Stop 92
ggttgactagtcacatagactactg

SEQ ID NO: 132421 - DNA, 25 bp, Artificial
  probe
  misc_feature (1)..(25): SEQ ID NO: 6427; WAN024CTE_at; Start 110; Stop 134
gcttgcaaagcttctattccttggt

SEQ ID NO: 132422 - DNA, 25 bp, Artificial
  probe
  misc_feature (1)..(25): SEQ ID NO: 6427; WAN024CTE_at; Start 31; Stop 55
ggccataatggtcatatctgtaatc

SEQ ID NO: 132423 - DNA, 25 bp, Artificial
  probe
  misc_feature (1)..(25): SEQ ID NO: 6427; WAN024CTE_at; Start 233; Stop 257
gcgatggtatcaattcgcagtccat

SEQ ID NO: 132424 - DNA, 25 bp, Artificial
  probe
  misc_feature (1)..(25): SEQ ID NO: 6427; WAN024CTE_at; Start 98; Stop 122
gcaatatcctgagcttgcaaagctt

SEQ ID NO: 132425 - DNA, 25 bp, Artificial
  probe
  misc_feature (1)..(25): SEQ ID NO: 6427; WAN024CTE_at; Start 77; Stop 101
gtcacatagactactgtatctgcaa

SEQ ID NO: 132426 - DNA, 25 bp, Artificial
  probe
  misc_feature (1)..(25): SEQ ID NO: 6427; WAN024CTE_at; Start 139; Stop 163
ggacgcagctcgttctttatcacca

SEQ ID NO: 132427 - DNA, 25 bp, Artificial
  probe
  misc_feature (1)..(25): SEQ ID NO: 6427; WAN024CTE_at; Start 85; Stop 109
gactactgtatctgcaatatcctga

SEQ ID NO: 132428 - DNA, 25 bp, Artificial
  probe
  misc_feature (1)..(25): SEQ ID NO: 6427; WAN024CTE_at; Start 187; Stop 211
tgtttcgacaattccaggctgaatg

SEQ ID NO: 132429 - DNA, 25 bp, Artificial
  probe
  misc_feature (1)..(25): SEQ ID NO: 6427; WAN024CTE_at; Start 215; Stop 239
gtcaccttgatatccgttgcgatgg

SEQ ID NO: 132430 - DNA, 25 bp, Artificial
  probe
  misc_feature (1)..(25): SEQ ID NO: 6427; WAN024CTE_at; Start 45; Stop 69
tatctgtaatctgaacacgacgagg

SEQ ID NO: 132431 - DNA, 25 bp, Artificial
  probe
  misc_feature (1)..(25): SEQ ID NO: 6427; WAN024CTE_at; Start 155; Stop 179
ttatcaccatgaaaacgcactgtag

SEQ ID NO: 132432 - DNA, 25 bp, Artificial
  probe
  misc_feature (1)..(25): SEQ ID NO: 6427; WAN024CTE_at; Start 14; Stop 38
cctgtcgcctgttgattggccataa

SEQ ID NO: 132433 - DNA, 25 bp, Artificial
  probe
  misc_feature (1)..(25): SEQ ID NO: 6427; WAN024CTE_at; Start 211; Stop 235
ggtcgtcaccttgatatccgttgcg

SEQ ID NO: 132434 - DNA, 25 bp, Artificial
  probe
  misc_feature (1)..(25): SEQ ID NO: 6427; WAN024CTE_at; Start 143; Stop 167
gcagctcgttctttatcaccatgaa

SEQ ID NO: 132435 - DNA, 25 bp, Artificial
  probe
  misc_feature (1)..(25): SEQ ID NO: 6427; WAN024CTE_at; Start 1; Stop 25
atgaaccatgaaacctgtcgcctgt

SEQ ID NO: 132436 - DNA, 25 bp, Artificial
  probe
  misc_feature (1)..(25): SEQ ID NO: 6427; WAN024CTE_at; Start 58; Stop 82
aacacgacgaggttgactagtcaca

SEQ ID NO: 132437 - DNA, 25 bp, Artificial
  probe
  misc_feature (1)..(25): SEQ ID NO: 6427; WAN024CTE_at; Start 206; Stop 230
tgaatggtcgtcaccttgatatccg

SEQ ID NO: 132438 - DNA, 25 bp, Artificial
  probe
  misc_feature (1)..(25): SEQ ID NO: 6427; WAN024CTE_at; Start 10; Stop 34
gaaacctgtcgcctgttgattggcc

SEQ ID NO: 132439 - DNA, 25 bp, Artificial
  probe
  misc_feature (1)..(25): SEQ ID NO: 6427; WAN024CTE_at; Start 51; Stop 75
taatctgaacacgacgaggttgact

SEQ ID NO: 132440 - DNA, 25 bp, Artificial
  probe
  misc_feature (1)..(25): SEQ ID NO: 6427; WAN024CTE_at; Start 164; Stop 188
tgaaaacgcactgtagaaaaatctg

SEQ ID NO: 132441 - DNA, 25 bp, Artificial
  probe
  misc_feature (1)..(25): SEQ ID NO: 6427; WAN024CTE_at; Start 181; Stop 205
aaaatctgtttcgacaattccaggc

SEQ ID NO: 132442 - DNA, 25 bp, Artificial
  probe
  misc_feature (1)..(25): SEQ ID NO: 6427; WAN024CTE_at; Start 130; Stop 154
ttggtaaacggacgcagctcgttct

SEQ ID NO: 132443 - DNA, 25 bp, Artificial
  probe
  misc_feature (1)..(25): SEQ ID NO: 6427; WAN024CTE_at; Start 63; Stop 87
gacgaggttgactagtcacatagac

SEQ ID NO: 132444 - DNA, 25 bp, Artificial
  probe
  misc_feature (1)..(25): SEQ ID NO: 6427; WAN024CTE_at; Start 170; Stop 194
cgcactgtagaaaaatctgtttcga

SEQ ID NO: 132445 - DNA, 25 bp, Artificial
  probe
  misc_feature (1)..(25): SEQ ID NO: 6427; WAN024CTE_at; Start 3; Stop 27
gaaccatgaaacctgtcgcctgttg

SEQ ID NO: 132446 - DNA, 25 bp, Artificial
  probe
  misc_feature (1)..(25): SEQ ID NO: 6427; WAN024CTE_at; Start 122; Stop 146
tctattccttggtaaacggacgcag

SEQ ID NO: 132447 - DNA, 25 bp, Artificial
  probe
  misc_feature (1)..(25): SEQ ID NO: 6427; WAN024CTE_at; Start 236; Stop 260
atggtatcaattcgcagtccatctg

SEQ ID NO: 132448 - DNA, 25 bp, Artificial
  probe
  misc_feature (1)..(25): SEQ ID NO: 6427; WAN024CTE_at; Start 91; Stop 115
tgtatctgcaatatcctgagcttgc

SEQ ID NO: 132449 - DNA, 25 bp, Artificial
  probe
  misc_feature (1)..(25): SEQ ID NO: 3409; WAN024CTF_at; Start 767; Stop 791
caatcaacaggcgacaggtttcatg

SEQ ID NO: 132450 - DNA, 25 bp, Artificial
  probe
  misc_feature (1)..(25): SEQ ID NO: 3409; WAN024CTF_at; Start 559; Stop 583
ccatcgcaacggatatcaaggtgac

SEQ ID NO: 132451 - DNA, 25 bp, Artificial
  probe
  misc_feature (1)..(25): SEQ ID NO: 3409; WAN024CTF_at; Start 78; Stop 102
tcaggaatcggtgaagcgattgcgc

SEQ ID NO: 132452 - DNA, 25 bp, Artificial
  probe
  misc_feature (1)..(25): SEQ ID NO: 3409; WAN024CTF_at; Start 120; Stop 144
ggtgaggatgtcgttctaacaggac

SEQ ID NO: 132453 - DNA, 25 bp, Artificial
  probe
  misc_feature (1)..(25): SEQ ID NO: 3409; WAN024CTF_at; Start 755; Stop 779
gaccattatggccaatcaacaggcg

SEQ ID NO: 132454 - DNA, 25 bp, Artificial
  probe
  misc_feature (1)..(25): SEQ ID NO: 3409; WAN024CTF_at; Start 547; Stop 571
tgcgaattgataccatcgcaacgga

SEQ ID NO: 132455 - DNA, 25 bp, Artificial
  probe
  misc_feature (1)..(25): SEQ ID NO: 3409; WAN024CTF_at; Start 735; Stop 759
cgtgttcagattacagatatgacca

SEQ ID NO: 132456 - DNA, 25 bp, Artificial
  probe
  misc_feature (1)..(25): SEQ ID NO: 3409; WAN024CTF_at; Start 85; Stop 109
tcggtgaagcgattgcgcgtgctta

SEQ ID NO: 132457 - DNA, 25 bp, Artificial
  probe
  misc_feature (1)..(25): SEQ ID NO: 3409; WAN024CTF_at; Start 96; Stop 120
attgcgcgtgcttatctggagcagg

SEQ ID NO: 132458 - DNA, 25 bp, Artificial
  probe
  misc_feature (1)..(25): SEQ ID NO: 3409; WAN024CTF_at; Start 543; Stop 567
ggactgcgaattgataccatcgcaa

SEQ ID NO: 132459 - DNA, 25 bp, Artificial
  probe
  misc_feature (1)..(25): SEQ ID NO: 3409; WAN024CTF_at; Start 761; Stop 785
tatggccaatcaacaggcgacaggt

SEQ ID NO: 132460 - DNA, 25 bp, Artificial
  probe
  misc_feature (1)..(25): SEQ ID NO: 3409; WAN024CTF_at; Start 94; Stop 118
cgattgcgcgtgcttatctggagca

SEQ ID NO: 132461 - DNA, 25 bp, Artificial
  probe
  misc_feature (1)..(25): SEQ ID NO: 3409; WAN024CTF_at; Start 651; Stop 675
gctgcgtccgtttaccaaggaatag

SEQ ID NO: 132462 - DNA, 25 bp, Artificial
  probe
  misc_feature (1)..(25): SEQ ID NO: 3409; WAN024CTF_at; Start 34; Stop 58
aaggaaataagatggcaaaaaatgt

SEQ ID NO: 132463 - DNA, 25 bp, Artificial
  probe
  misc_feature (1)..(25): SEQ ID NO: 3409; WAN024CTF_at; Start 746; Stop 770
tacagatatgaccattatggccaat

SEQ ID NO: 132464 - DNA, 25 bp, Artificial
  probe
  misc_feature (1)..(25): SEQ ID NO: 3409; WAN024CTF_at; Start 100; Stop 124
cgcgtgcttatctggagcagggtga

SEQ ID NO: 132465 - DNA, 25 bp, Artificial
  probe
  misc_feature (1)..(25): SEQ ID NO: 3409; WAN024CTF_at; Start 31; Stop 55
tagaaggaaataagatggcaaaaaa

SEQ ID NO: 132466 - DNA, 25 bp, Artificial
  probe
  misc_feature (1)..(25): SEQ ID NO: 3409; WAN024CTF_at; Start 115; Stop 139
agcagggtgaggatgtcgttctaac

SEQ ID NO: 132467 - DNA, 25 bp, Artificial
  probe
  misc_feature (1)..(25): SEQ ID NO: 3409; WAN024CTF_at; Start 555; Stop 579
gataccatcgcaacggatatcaagg

SEQ ID NO: 132468 - DNA, 25 bp, Artificial
  probe
  misc_feature (1)..(25): SEQ ID NO: 3409; WAN024CTF_at; Start 752; Stop 776
tatgaccattatggccaatcaacag

SEQ ID NO: 132469 - DNA, 25 bp, Artificial
  probe
  misc_feature (1)..(25): SEQ ID NO: 3409; WAN024CTF_at; Start 134; Stop 158
tctaacaggacgacggatagacaga

SEQ ID NO: 132470 - DNA, 25 bp, Artificial
  probe
  misc_feature (1)..(25): SEQ ID NO: 3409; WAN024CTF_at; Start 130; Stop 154
tcgttctaacaggacgacggataga

SEQ ID NO: 132471 - DNA, 25 bp, Artificial
  probe
  misc_feature (1)..(25): SEQ ID NO: 3409; WAN024CTF_at; Start 540; Stop 564
gatggactgcgaattgataccatcg

SEQ ID NO: 132472 - DNA, 25 bp, Artificial
  probe
  misc_feature (1)..(25): SEQ ID NO: 3409; WAN024CTF_at; Start 117; Stop 141
cagggtgaggatgtcgttctaacag

SEQ ID NO: 132473 - DNA, 25 bp, Artificial
  probe
  misc_feature (1)..(25): SEQ ID NO: 3409; WAN024CTF_at; Start 91; Stop 115
aagcgattgcgcgtgcttatctgga

SEQ ID NO: 132474 - DNA, 25 bp, Artificial
  probe
  misc_feature (1)..(25): SEQ ID NO: 3409; WAN024CTF_at; Start 550; Stop 574
gaattgataccatcgcaacggatat

SEQ ID NO: 132475 - DNA, 25 bp, Artificial
  probe
  misc_feature (1)..(25): SEQ ID NO: 3409; WAN024CTF_at; Start 764; Stop 788
ggccaatcaacaggcgacaggtttc

SEQ ID NO: 132476 - DNA, 25 bp, Artificial
  probe
  misc_feature (1)..(25): SEQ ID NO: 3409; WAN024CTF_at; Start 83; Stop 107
aatcggtgaagcgattgcgcgtgct

SEQ ID NO: 132477 - DNA, 25 bp, Artificial
  probe
  misc_feature (1)..(25): SEQ ID NO: 3409; WAN024CTF_at; Start 452; Stop 476
tatcaatatggggtcaaccgcagga

SEQ ID NO: 132478 - DNA, 25 bp, Artificial
  probe
  misc_feature (1)..(25): SEQ ID NO: 3409; WAN024CTF_at; Start 758; Stop 782
cattatggccaatcaacaggcgaca

SEQ ID NO: 132479 - DNA, 25 bp, Artificial
  probe
  misc_feature (1)..(25): SEQ ID NO: 3409; WAN024CTF_at; Start 653; Stop 677
tgcgtccgtttaccaaggaatagaa

SEQ ID NO: 132480 - DNA, 25 bp, Artificial
  probe
  misc_feature (1)..(25): SEQ ID NO: 3409; WAN024CTF_at; Start 126; Stop 150
gatgtcgttctaacaggacgacgga

SEQ ID NO: 132481 - DNA, 25 bp, Artificial
  probe
  misc_feature (1)..(25): SEQ ID NO: 3409; WAN024CTF_at; Start 743; Stop 767
gattacagatatgaccattatggcc

SEQ ID NO: 132482 - DNA, 25 bp, Artificial
  probe
  misc_feature (1)..(25): SEQ ID NO: 3409; WAN024CTF_at; Start 122; Stop 146
tgaggatgtcgttctaacaggacga

SEQ ID NO: 132483 - DNA, 25 bp, Artificial
  probe
  misc_feature (1)..(25): SEQ ID NO: 3470; WAN024CTG_at; Start 6; Stop 30
tgctacaagcacgactgcccacgac

SEQ ID NO: 132484 - DNA, 25 bp, Artificial
  probe
  misc_feature (1)..(25): SEQ ID NO: 3470; WAN024CTG_at; Start 31; Stop 55
cgctaccttcgggaatttcaggagg

SEQ ID NO: 132485 - DNA, 25 bp, Artificial
  probe
  misc_feature (1)..(25): SEQ ID NO: 3470; WAN024CTG_at; Start 2; Stop 26
tgtttgctacaagcacgactgccca

SEQ ID NO: 132486 - DNA, 25 bp, Artificial
  probe
  misc_feature (1)..(25): SEQ ID NO: 3470; WAN024CTG_at; Start 21; Stop 45
tgcccacgaccgctaccttcgggaa

SEQ ID NO: 132487 - DNA, 25 bp, Artificial
  probe
  misc_feature (1)..(25): SEQ ID NO: 3470; WAN024CTG_at; Start 17; Stop 41
cgactgcccacgaccgctaccttcg

SEQ ID NO: 132488 - DNA, 25 bp, Artificial
  probe
  misc_feature (1)..(25): SEQ ID NO: 3470; WAN024CTG_at; Start 45; Stop 69
atttcaggaggtcaagatttccctt

SEQ ID NO: 132489 - DNA, 25 bp, Artificial
  probe
  misc_feature (1)..(25): SEQ ID NO: 3470; WAN024CTG_at; Start 42; Stop 66
ggaatttcaggaggtcaagatttcc

SEQ ID NO: 132490 - DNA, 25 bp, Artificial
  probe
  misc_feature (1)..(25): SEQ ID NO: 3470; WAN024CTG_at; Start 39; Stop 63
tcgggaatttcaggaggtcaagatt

SEQ ID NO: 132491 - DNA, 25 bp, Artificial
  probe
  misc_feature (1)..(25): SEQ ID NO: 3470; WAN024CTG_at; Start 37; Stop 61
cttcgggaatttcaggaggtcaaga

SEQ ID NO: 132492 - DNA, 25 bp, Artificial
  probe
  misc_feature (1)..(25): SEQ ID NO: 3470; WAN024CTG_at; Start 14; Stop 38
gcacgactgcccacgaccgctacct

SEQ ID NO: 132493 - DNA, 25 bp, Artificial
  probe
  misc_feature (1)..(25): SEQ ID NO: 3470; WAN024CTG_at; Start 4; Stop 28
tttgctacaagcacgactgcccacg

SEQ ID NO: 132494 - DNA, 25 bp, Artificial
  probe
  misc_feature (1)..(25): SEQ ID NO: 3470; WAN024CTG_at; Start 3; Stop 27
gtttgctacaagcacgactgcccac

SEQ ID NO: 132495 - DNA, 25 bp, Artificial
  probe
  misc_feature (1)..(25): SEQ ID NO: 3470; WAN024CTG_at; Start 1; Stop 25
ctgtttgctacaagcacgactgccc

SEQ ID NO: 132496 - DNA, 25 bp, Artificial
  probe
  misc_feature (1)..(25): SEQ ID NO: 3470; WAN024CTG_at; Start 7; Stop 31
gctacaagcacgactgcccacgacc

SEQ ID NO: 132497 - DNA, 25 bp, Artificial
  probe
  misc_feature (1)..(25): SEQ ID NO: 3470; WAN024CTG_at; Start 48; Stop 72
tcaggaggtcaagatttcccttgta

SEQ ID NO: 132498 - DNA, 25 bp, Artificial
  probe
  misc_feature (1)..(25): SEQ ID NO: 3470; WAN024CTG_at; Start 9; Stop 33
tacaagcacgactgcccacgaccgc

SEQ ID NO: 132499 - DNA, 25 bp, Artificial
  probe
  misc_feature (1)..(25): SEQ ID NO: 3470; WAN024CTG_at; Start 49; Stop 73
caggaggtcaagatttcccttgtaa

SEQ ID NO: 132500 - DNA, 25 bp, Artificial
  probe
  misc_feature (1)..(25): SEQ ID NO: 3470; WAN024CTG_at; Start 18; Stop 42
gactgcccacgaccgctaccttcgg

SEQ ID NO: 132501 - DNA, 25 bp, Artificial
  probe
  misc_feature (1)..(25): SEQ ID NO: 3470; WAN024CTG_at; Start 27; Stop 51
cgaccgctaccttcgggaatttcag

SEQ ID NO: 132502 - DNA, 25 bp, Artificial
  probe
  misc_feature (1)..(25): SEQ ID NO: 3470; WAN024CTG_at; Start 13; Stop 37
agcacgactgcccacgaccgctacc

SEQ ID NO: 132503 - DNA, 25 bp, Artificial
  probe
  misc_feature (1)..(25): SEQ ID NO: 3470; WAN024CTG_at; Start 10; Stop 34
acaagcacgactgcccacgaccgct

SEQ ID NO: 132504 - DNA, 25 bp, Artificial
  probe
  misc_feature (1)..(25): SEQ ID NO: 3470; WAN024CTG_at; Start 8; Stop 32
ctacaagcacgactgcccacgaccg

SEQ ID NO: 132505 - DNA, 25 bp, Artificial
  probe
  misc_feature (1)..(25): SEQ ID NO: 3470; WAN024CTG_at; Start 34; Stop 58
taccttcgggaatttcaggaggtca

SEQ ID NO: 132506 - DNA, 25 bp, Artificial
  probe
  misc_feature (1)..(25): SEQ ID NO: 3470; WAN024CTG_at; Start 15; Stop 39
cacgactgcccacgaccgctacctt

SEQ ID NO: 132507 - DNA, 25 bp, Artificial
  probe
  misc_feature (1)..(25): SEQ ID NO: 3470; WAN024CTG_at; Start 16; Stop 40
acgactgcccacgaccgctaccttc

SEQ ID NO: 132508 - DNA, 25 bp, Artificial
  probe
  misc_feature (1)..(25): SEQ ID NO: 3470; WAN024CTG_at; Start 47; Stop 71
ttcaggaggtcaagatttcccttgt

SEQ ID NO: 132509 - DNA, 25 bp, Artificial
  probe
  misc_feature (1)..(25): SEQ ID NO: 3470; WAN024CTG_at; Start 41; Stop 65
gggaatttcaggaggtcaagatttc

SEQ ID NO: 132510 - DNA, 25 bp, Artificial
  probe
  misc_feature (1)..(25): SEQ ID NO: 3470; WAN024CTG_at; Start 46; Stop 70
tttcaggaggtcaagatttcccttg

SEQ ID NO: 132511 - DNA, 25 bp, Artificial
  probe
  misc_feature (1)..(25): SEQ ID NO: 3470; WAN024CTG_at; Start 38; Stop 62
ttcgggaatttcaggaggtcaagat

SEQ ID NO: 132512 - DNA, 25 bp, Artificial
  probe
  misc_feature (1)..(25): SEQ ID NO: 3470; WAN024CTG_at; Start 5; Stop 29
ttgctacaagcacgactgcccacga

SEQ ID NO: 132513 - DNA, 25 bp, Artificial
  probe
  misc_feature (1)..(25): SEQ ID NO: 3470; WAN024CTG_at; Start 36; Stop 60
ccttcgggaatttcaggaggtcaag

SEQ ID NO: 132514 - DNA, 25 bp, Artificial
  probe
  misc_feature (1)..(25): SEQ ID NO: 3470; WAN024CTG_at; Start 44; Stop 68
aatttcaggaggtcaagatttccct

SEQ ID NO: 132515 - DNA, 25 bp, Artificial
  probe
  misc_feature (1)..(25): SEQ ID NO: 3470; WAN024CTG_at; Start 40; Stop 64
cgggaatttcaggaggtcaagattt

SEQ ID NO: 132516 - DNA, 25 bp, Artificial
  probe
  misc_feature (1)..(25): SEQ ID NO: 3470; WAN024CTG_at; Start 43; Stop 67
gaatttcaggaggtcaagatttccc

SEQ ID NO: 132517 - DNA, 25 bp, Artificial
  probe
  misc_feature (1)..(25): SEQ ID NO: 2303; WAN024CTH_at; Start 400; Stop 424
caaggcttggaaaatgaactggtta

SEQ ID NO: 132518 - DNA, 25 bp, Artificial
  probe
  misc_feature (1)..(25): SEQ ID NO: 2303; WAN024CTH_at; Start 388; Stop 412
gaaaaagtcattcaaggcttggaaa

SEQ ID NO: 132519 - DNA, 25 bp, Artificial
  probe
  misc_feature (1)..(25): SEQ ID NO: 2303; WAN024CTH_at; Start 654; Stop 678
actttgtcgtggtgtgattgtagca

SEQ ID NO: 132520 - DNA, 25 bp, Artificial
  probe
  misc_feature (1)..(25): SEQ ID NO: 2303; WAN024CTH_at; Start 450; Stop 474
tgacacagcagctcatatggcagct

SEQ ID NO: 132521 - DNA, 25 bp, Artificial
  probe
  misc_feature (1)..(25): SEQ ID NO: 2303; WAN024CTH_at; Start 630; Stop 654
tgcccgtaatcgcatcattgctgga

SEQ ID NO: 132522 - DNA, 25 bp, Artificial
  probe
  misc_feature (1)..(25): SEQ ID NO: 2303; WAN024CTH_at; Start 193; Stop 217
gatgcgcatttgtcgaaagagtttc

SEQ ID NO: 132523 - DNA, 25 bp, Artificial
  probe
  misc_feature (1)..(25): SEQ ID NO: 2303; WAN024CTH_at; Start 793; Stop 817
catttgattcaagaaggagcaaaat

SEQ ID NO: 132524 - DNA, 25 bp, Artificial
  probe
  misc_feature (1)..(25): SEQ ID NO: 2303; WAN024CTH_at; Start 544; Stop 568
aaacgcttgcaagactacatcggca

SEQ ID NO: 132525 - DNA, 25 bp, Artificial
  probe
  misc_feature (1)..(25): SEQ ID NO: 2303; WAN024CTH_at; Start 640; Stop 664
cgcatcattgctggactttgtcgtg

SEQ ID NO: 132526 - DNA, 25 bp, Artificial
  probe
  misc_feature (1)..(25): SEQ ID NO: 2303; WAN024CTH_at; Start 766; Stop 790
ttagatggactatcagacggttgcc

SEQ ID NO: 132527 - DNA, 25 bp, Artificial
  probe
  misc_feature (1)..(25): SEQ ID NO: 2303; WAN024CTH_at; Start 244; Stop 268
gatgactgttatccttgggatttga

SEQ ID NO: 132528 - DNA, 25 bp, Artificial
  probe
  misc_feature (1)..(25): SEQ ID NO: 2303; WAN024CTH_at; Start 300; Stop 324
ttacaagggaaatcttgacctcctg

SEQ ID NO: 132529 - DNA, 25 bp, Artificial
  probe
  misc_feature (1)..(25): SEQ ID NO: 2303; WAN024CTH_at; Start 509; Stop 533
gaacaggactggatgtgttttatcc

SEQ ID NO: 132530 - DNA, 25 bp, Artificial
  probe
  misc_feature (1)..(25): SEQ ID NO: 2303; WAN024CTH_at; Start 423; Stop 447
tattgtcagtggtctggccaagggc

SEQ ID NO: 132531 - DNA, 25 bp, Artificial
  probe
  misc_feature (1)..(25): SEQ ID NO: 2303; WAN024CTH_at; Start 438; Stop 462
ggccaagggcattgacacagcagct

SEQ ID NO: 132532 - DNA, 25 bp, Artificial
  probe
  misc_feature (1)..(25): SEQ ID NO: 2303; WAN024CTH_at; Start 312; Stop 336
tcttgacctcctgaaattcccgaag

SEQ ID NO: 132533 - DNA, 25 bp, Artificial
  probe
  misc_feature (1)..(25): SEQ ID NO: 2303; WAN024CTH_at; Start 556; Stop 580
gactacatcggcaatgaccatctgg

SEQ ID NO: 132534 - DNA, 25 bp, Artificial
  probe
  misc_feature (1)..(25): SEQ ID NO: 2303; WAN024CTH_at; Start 832; Stop 856
caagatgttcttgcggaatttgaat

SEQ ID NO: 132535 - DNA, 25 bp, Artificial
  probe
  misc_feature (1)..(25): SEQ ID NO: 2303; WAN024CTH_at; Start 48; Stop 72
aaaatcaggtttgaccaatcaacag

SEQ ID NO: 132536 - DNA, 25 bp, Artificial
  probe
  misc_feature (1)..(25): SEQ ID NO: 2303; WAN024CTH_at; Start 682; Stop 706
gctaagatgcgttcaggtagtctca

SEQ ID NO: 132537 - DNA, 25 bp, Artificial
  probe
  misc_feature (1)..(25): SEQ ID NO: 2303; WAN024CTH_at; Start 267; Stop 291
gagtgaaatatatgatgcgcctgta

SEQ ID NO: 132538 - DNA, 25 bp, Artificial
  probe
  misc_feature (1)..(25): SEQ ID NO: 2303; WAN024CTH_at; Start 176; Stop 200
gttattttcagatagacgatgcgca

SEQ ID NO: 132539 - DNA, 25 bp, Artificial
  probe
  misc_feature (1)..(25): SEQ ID NO: 2303; WAN024CTH_at; Start 494; Stop 518
ccattgcagtgattggaacaggact

SEQ ID NO: 132540 - DNA, 25 bp, Artificial
  probe
  misc_feature (1)..(25): SEQ ID NO: 2303; WAN024CTH_at; Start 821; Stop 845
tcaccagtgggcaagatgttcttgc

SEQ ID NO: 132541 - DNA, 25 bp, Artificial
  probe
  misc_feature (1)..(25): SEQ ID NO: 2303; WAN024CTH_at; Start 91; Stop 115
tacggtgaaaatgttgatcaggagc

SEQ ID NO: 132542 - DNA, 25 bp, Artificial
  probe
  misc_feature (1)..(25): SEQ ID NO: 2303; WAN024CTH_at; Start 753; Stop 777
tcctggtagcattttagatggacta

SEQ ID NO: 132543 - DNA, 25 bp, Artificial
  probe
  misc_feature (1)..(25): SEQ ID NO: 2303; WAN024CTH_at; Start 668; Stop 692
tgattgtagcagaggctaagatgcg

SEQ ID NO: 132544 - DNA, 25 bp, Artificial
  probe
  misc_feature (1)..(25): SEQ ID NO: 2303; WAN024CTH_at; Start 280; Stop 304
gatgcgcctgtacttttattttaca

SEQ ID NO: 132545 - DNA, 25 bp, Artificial
  probe
  misc_feature (1)..(25): SEQ ID NO: 2303; WAN024CTH_at; Start 322; Stop 346
ctgaaattcccgaaggtagcggtcg

SEQ ID NO: 132546 - DNA, 25 bp, Artificial
  probe
  misc_feature (1)..(25): SEQ ID NO: 2303; WAN024CTH_at; Start 779; Stop 803
cagacggttgccatcatttgattca

SEQ ID NO: 132547 - DNA, 25 bp, Artificial
  probe
  misc_feature (1)..(25): SEQ ID NO: 2303; WAN024CTH_at; Start 476; Stop 500
ttcagaatggcggaaaaaccattgc

SEQ ID NO: 132548 - DNA, 25 bp, Artificial
  probe
  misc_feature (1)..(25): SEQ ID NO: 2303; WAN024CTH_at; Start 614; Stop 638
tgaaatttcattttcctgcccgtaa

SEQ ID NO: 132549 - DNA, 25 bp, Artificial
  probe
  misc_feature (1)..(25): SEQ ID NO: 2303; WAN024CTH_at; Start 354; Stop 378
tcgtgcttgtagcaaacagggagct

SEQ ID NO: 132550 - DNA, 25 bp, Artificial
  probe
  misc_feature (1)..(25): SEQ ID NO: 2303; WAN024CTH_at; Start 111; Stop 135
ggagcttttgttgggtgatattgca

SEQ ID NO: 132551 - DNA, 25 bp, Artificial
  probe
  misc_feature (1)..(25): SEQ ID NO: 7430; WAN024CTI_at; Start 119; Stop 143
tccacagatttcacagactctatta

SEQ ID NO: 132552 - DNA, 25 bp, Artificial
  probe
  misc_feature (1)..(25): SEQ ID NO: 7430; WAN024CTI_at; Start 91; Stop 115
cttgatatgacttgtttaaaggctg

SEQ ID NO: 132553 - DNA, 25 bp, Artificial
  probe
  misc_feature (1)..(25): SEQ ID NO: 7430; WAN024CTI_at; Start 112; Stop 136
gctgttttccacagatttcacagac

SEQ ID NO: 132554 - DNA, 25 bp, Artificial
  probe
  misc_feature (1)..(25): SEQ ID NO: 7430; WAN024CTI_at; Start 82; Stop 106
gctaaaaaacttgatatgacttgtt

SEQ ID NO: 132555 - DNA, 25 bp, Artificial
  probe
  misc_feature (1)..(25): SEQ ID NO: 7430; WAN024CTI_at; Start 123; Stop 147
cagatttcacagactctattattac

SEQ ID NO: 132556 - DNA, 25 bp, Artificial
  probe
  misc_feature (1)..(25): SEQ ID NO: 7430; WAN024CTI_at; Start 115; Stop 139
gttttccacagatttcacagactct

SEQ ID NO: 132557 - DNA, 25 bp, Artificial
  probe
  misc_feature (1)..(25): SEQ ID NO: 7430; WAN024CTI_at; Start 125; Stop 149
gatttcacagactctattattacta

SEQ ID NO: 132558 - DNA, 25 bp, Artificial
  probe
  misc_feature (1)..(25): SEQ ID NO: 7430; WAN024CTI_at; Start 108; Stop 132
aaaggctgttttccacagatttcac

SEQ ID NO: 132559 - DNA, 25 bp, Artificial
  probe
  misc_feature (1)..(25): SEQ ID NO: 7430; WAN024CTI_at; Start 118; Stop 142
ttccacagatttcacagactctatt

SEQ ID NO: 132560 - DNA, 25 bp, Artificial
  probe
  misc_feature (1)..(25): SEQ ID NO: 7430; WAN024CTI_at; Start 107; Stop 131
taaaggctgttttccacagatttca

SEQ ID NO: 132561 - DNA, 25 bp, Artificial
  probe
  misc_feature (1)..(25): SEQ ID NO: 7430; WAN024CTI_at; Start 93; Stop 117
tgatatgacttgtttaaaggctgtt

SEQ ID NO: 132562 - DNA, 25 bp, Artificial
  probe
  misc_feature (1)..(25): SEQ ID NO: 7430; WAN024CTI_at; Start 113; Stop 137
ctgttttccacagatttcacagact

SEQ ID NO: 132563 - DNA, 25 bp, Artificial
  probe
  misc_feature (1)..(25): SEQ ID NO: 7430; WAN024CTI_at; Start 121; Stop 145
cacagatttcacagactctattatt

SEQ ID NO: 132564 - DNA, 25 bp, Artificial
  probe
  misc_feature (1)..(25): SEQ ID NO: 7430; WAN024CTI_at; Start 23; Stop 47
caaataatttgtggataacttttag

SEQ ID NO: 132565 - DNA, 25 bp, Artificial
  probe
  misc_feature (1)..(25): SEQ ID NO: 7430; WAN024CTI_at; Start 101; Stop 125
cttgtttaaaggctgttttccacag

SEQ ID NO: 132566 - DNA, 25 bp, Artificial
  probe
  misc_feature (1)..(25): SEQ ID NO: 7430; WAN024CTI_at; Start 106; Stop 130
ttaaaggctgttttccacagatttc

SEQ ID NO: 132567 - DNA, 25 bp, Artificial
  probe
  misc_feature (1)..(25): SEQ ID NO: 7430; WAN024CTI_at; Start 114; Stop 138
tgttttccacagatttcacagactc

SEQ ID NO: 132568 - DNA, 25 bp, Artificial
  probe
  misc_feature (1)..(25): SEQ ID NO: 7430; WAN024CTI_at; Start 130; Stop 154
cacagactctattattactattatc

SEQ ID NO: 132569 - DNA, 25 bp, Artificial
  probe
  misc_feature (1)..(25): SEQ ID NO: 7430; WAN024CTI_at; Start 80; Stop 104
aagctaaaaaacttgatatgacttg

SEQ ID NO: 132570 - DNA, 25 bp, Artificial
  probe
  misc_feature (1)..(25): SEQ ID NO: 7430; WAN024CTI_at; Start 111; Stop 135
ggctgttttccacagatttcacaga

SEQ ID NO: 132571 - DNA, 25 bp, Artificial
  probe
  misc_feature (1)..(25): SEQ ID NO: 7430; WAN024CTI_at; Start 117; Stop 141
tttccacagatttcacagactctat

SEQ ID NO: 132572 - DNA, 25 bp, Artificial
  probe
  misc_feature (1)..(25): SEQ ID NO: 7430; WAN024CTI_at; Start 98; Stop 122
tgacttgtttaaaggctgttttcca

SEQ ID NO: 132573 - DNA, 25 bp, Artificial
  probe
  misc_feature (1)..(25): SEQ ID NO: 7430; WAN024CTI_at; Start 103; Stop 127
tgtttaaaggctgttttccacagat

SEQ ID NO: 132574 - DNA, 25 bp, Artificial
  probe
  misc_feature (1)..(25): SEQ ID NO: 7430; WAN024CTI_at; Start 109; Stop 133
aaggctgttttccacagatttcaca

SEQ ID NO: 132575 - DNA, 25 bp, Artificial
  probe
  misc_feature (1)..(25): SEQ ID NO: 7430; WAN024CTI_at; Start 102; Stop 126
ttgtttaaaggctgttttccacaga

SEQ ID NO: 132576 - DNA, 25 bp, Artificial
  probe
  misc_feature (1)..(25): SEQ ID NO: 7430; WAN024CTI_at; Start 94; Stop 118
gatatgacttgtttaaaggctgttt

SEQ ID NO: 132577 - DNA, 25 bp, Artificial
  probe
  misc_feature (1)..(25): SEQ ID NO: 7430; WAN024CTI_at; Start 75; Stop 99
taaacaagctaaaaaacttgatatg

SEQ ID NO: 132578 - DNA, 25 bp, Artificial
  probe
  misc_feature (1)..(25): SEQ ID NO: 7430; WAN024CTI_at; Start 120; Stop 144
ccacagatttcacagactctattat

SEQ ID NO: 132579 - DNA, 25 bp, Artificial
  probe
  misc_feature (1)..(25): SEQ ID NO: 7430; WAN024CTI_at; Start 96; Stop 120
tatgacttgtttaaaggctgttttc

SEQ ID NO: 132580 - DNA, 25 bp, Artificial
  probe
  misc_feature (1)..(25): SEQ ID NO: 7430; WAN024CTI_at; Start 134; Stop 158
gactctattattactattatctttc

SEQ ID NO: 132581 - DNA, 25 bp, Artificial
  probe
  misc_feature (1)..(25): SEQ ID NO: 7430; WAN024CTI_at; Start 77; Stop 101
aacaagctaaaaaacttgatatgac

SEQ ID NO: 132582 - DNA, 25 bp, Artificial
  probe
  misc_feature (1)..(25): SEQ ID NO: 7430; WAN024CTI_at; Start 116; Stop 140
ttttccacagatttcacagactcta

SEQ ID NO: 132583 - DNA, 25 bp, Artificial
  probe
  misc_feature (1)..(25): SEQ ID NO: 7430; WAN024CTI_at; Start 89; Stop 113
aacttgatatgacttgtttaaaggc

SEQ ID NO: 132584 - DNA, 25 bp, Artificial
  probe
  misc_feature (1)..(25): SEQ ID NO: 7430; WAN024CTI_at; Start 110; Stop 134
aggctgttttccacagatttcacag

SEQ ID NO: 132585 - DNA, 25 bp, Artificial
  probe
  misc_feature (1)..(25): SEQ ID NO: 4308; WAN024CTJ_at; Start 1; Stop 25
gtgttgaatcatagaaatcacgcta

SEQ ID NO: 132586 - DNA, 25 bp, Artificial
  probe
  misc_feature (1)..(25): SEQ ID NO: 4308; WAN024CTJ_at; Start 98; Stop 122
tactcataatccttaacaccgacag

SEQ ID NO: 132587 - DNA, 25 bp, Artificial
  probe
  misc_feature (1)..(25): SEQ ID NO: 4308; WAN024CTJ_at; Start 178; Stop 202
tgcctcatcaaaacggtgcataatg

SEQ ID NO: 132588 - DNA, 25 bp, Artificial
  probe
  misc_feature (1)..(25): SEQ ID NO: 4308; WAN024CTJ_at; Start 235; Stop 259
tacattttcatccaaaatcgtctgc

SEQ ID NO: 132589 - DNA, 25 bp, Artificial
  probe
  misc_feature (1)..(25): SEQ ID NO: 4308; WAN024CTJ_at; Start 257; Stop 281
tgcatattcgctggcacaacaggta

SEQ ID NO: 132590 - DNA, 25 bp, Artificial
  probe
  misc_feature (1)..(25): SEQ ID NO: 4308; WAN024CTJ_at; Start 205; Stop 229
gaagtaaccacctttagccagttgc

SEQ ID NO: 132591 - DNA, 25 bp, Artificial
  probe
  misc_feature (1)..(25): SEQ ID NO: 4308; WAN024CTJ_at; Start 15; Stop 39
aaatcacgctatccgcatgaccatg

SEQ ID NO: 132592 - DNA, 25 bp, Artificial
  probe
  misc_feature (1)..(25): SEQ ID NO: 4308; WAN024CTJ_at; Start 6; Stop 30
gaatcatagaaatcacgctatccgc

SEQ ID NO: 132593 - DNA, 25 bp, Artificial
  probe
  misc_feature (1)..(25): SEQ ID NO: 4308; WAN024CTJ_at; Start 250; Stop 274
aatcgtctgcatattcgctggcaca

SEQ ID NO: 132594 - DNA, 25 bp, Artificial
  probe
  misc_feature (1)..(25): SEQ ID NO: 4308; WAN024CTJ_at; Start 81; Stop 105
gctggctaacaaaatcatactcata

SEQ ID NO: 132595 - DNA, 25 bp, Artificial
  probe
  misc_feature (1)..(25): SEQ ID NO: 4308; WAN024CTJ_at; Start 44; Stop 68
atatcaatagtgatatactcaggag

SEQ ID NO: 132596 - DNA, 25 bp, Artificial
  probe
  misc_feature (1)..(25): SEQ ID NO: 4308; WAN024CTJ_at; Start 21; Stop 45
cgctatccgcatgaccatgagcaat

SEQ ID NO: 132597 - DNA, 25 bp, Artificial
  probe
  misc_feature (1)..(25): SEQ ID NO: 4308; WAN024CTJ_at; Start 220; Stop 244
agccagttgctctgctacattttca

SEQ ID NO: 132598 - DNA, 25 bp, Artificial
  probe
  misc_feature (1)..(25): SEQ ID NO: 4308; WAN024CTJ_at; Start 201; Stop 225
tgtagaagtaaccacctttagccag

SEQ ID NO: 132599 - DNA, 25 bp, Artificial
  probe
  misc_feature (1)..(25): SEQ ID NO: 4308; WAN024CTJ_at; Start 255; Stop 279
tctgcatattcgctggcacaacagg

SEQ ID NO: 132600 - DNA, 25 bp, Artificial
  probe
  misc_feature (1)..(25): SEQ ID NO: 4308; WAN024CTJ_at; Start 174; Stop 198
gtcctgcctcatcaaaacggtgcat

SEQ ID NO: 132601 - DNA, 25 bp, Artificial
  probe
  misc_feature (1)..(25): SEQ ID NO: 4308; WAN024CTJ_at; Start 162; Stop 186
taaaaggaatgcgtcctgcctcatc

SEQ ID NO: 132602 - DNA, 25 bp, Artificial
  probe
  misc_feature (1)..(25): SEQ ID NO: 4308; WAN024CTJ_at; Start 159; Stop 183
taataaaaggaatgcgtcctgcctc

SEQ ID NO: 132603 - DNA, 25 bp, Artificial
  probe
  misc_feature (1)..(25): SEQ ID NO: 4308; WAN024CTJ_at; Start 247; Stop 271
caaaatcgtctgcatattcgctggc

SEQ ID NO: 132604 - DNA, 25 bp, Artificial
  probe
  misc_feature (1)..(25): SEQ ID NO: 4308; WAN024CTJ_at; Start 71; Stop 95
tcagccttgagctggctaacaaaat

SEQ ID NO: 132605 - DNA, 25 bp, Artificial
  probe
  misc_feature (1)..(25): SEQ ID NO: 4308; WAN024CTJ_at; Start 209; Stop 233
taaccacctttagccagttgctctg

SEQ ID NO: 132606 - DNA, 25 bp, Artificial
  probe
  misc_feature (1)..(25): SEQ ID NO: 4308; WAN024CTJ_at; Start 26; Stop 50
tccgcatgaccatgagcaatatcaa

SEQ ID NO: 132607 - DNA, 25 bp, Artificial
  probe
  misc_feature (1)..(25): SEQ ID NO: 4308; WAN024CTJ_at; Start 171; Stop 195
tgcgtcctgcctcatcaaaacggtg

SEQ ID NO: 132608 - DNA, 25 bp, Artificial
  probe
  misc_feature (1)..(25): SEQ ID NO: 4308; WAN024CTJ_at; Start 194; Stop 218
tgcataatgtagaagtaaccacctt

SEQ ID NO: 132609 - DNA, 25 bp, Artificial
  probe
  misc_feature (1)..(25): SEQ ID NO: 4308; WAN024CTJ_at; Start 166; Stop 190
aggaatgcgtcctgcctcatcaaaa

SEQ ID NO: 132610 - DNA, 25 bp, Artificial
  probe
  misc_feature (1)..(25): SEQ ID NO: 4308; WAN024CTJ_at; Start 224; Stop 248
agttgctctgctacattttcatcca

SEQ ID NO: 132611 - DNA, 25 bp, Artificial
  probe
  misc_feature (1)..(25): SEQ ID NO: 4308; WAN024CTJ_at; Start 32; Stop 56
tgaccatgagcaatatcaatagtga

SEQ ID NO: 132612 - DNA, 25 bp, Artificial
  probe
  misc_feature (1)..(25): SEQ ID NO: 4308; WAN024CTJ_at; Start 214; Stop 238
acctttagccagttgctctgctaca

SEQ ID NO: 132613 - DNA, 25 bp, Artificial
  probe
  misc_feature (1)..(25): SEQ ID NO: 4308; WAN024CTJ_at; Start 191; Stop 215
cggtgcataatgtagaagtaaccac

SEQ ID NO: 132614 - DNA, 25 bp, Artificial
  probe
  misc_feature (1)..(25): SEQ ID NO: 4308; WAN024CTJ_at; Start 84; Stop 108
ggctaacaaaatcatactcataatc

SEQ ID NO: 132615 - DNA, 25 bp, Artificial
  probe
  misc_feature (1)..(25): SEQ ID NO: 4308; WAN024CTJ_at; Start 74; Stop 98
gccttgagctggctaacaaaatcat

SEQ ID NO: 132616 - DNA, 25 bp, Artificial
  probe
  misc_feature (1)..(25): SEQ ID NO: 4308; WAN024CTJ_at; Start 155; Stop 179
cgtttaataaaaggaatgcgtcctg

SEQ ID NO: 132617 - DNA, 25 bp, Artificial
  probe
  misc_feature (1)..(25): SEQ ID NO: 4308; WAN024CTJ_at; Start 185; Stop 209
tcaaaacggtgcataatgtagaagt

SEQ ID NO: 132618 - DNA, 25 bp, Artificial
  probe
  misc_feature (1)..(25): SEQ ID NO: 4308; WAN024CTJ_at; Start 12; Stop 36
tagaaatcacgctatccgcatgacc

SEQ ID NO: 132619 - DNA, 25 bp, Artificial
  probe
  misc_feature (1)..(25): SEQ ID NO: 3456; WAN024CTK_at; Start 82; Stop 106
aaagttatccacaaattatttgatt

SEQ ID NO: 132620 - DNA, 25 bp, Artificial
  probe
  misc_feature (1)..(25): SEQ ID NO: 3456; WAN024CTK_at; Start 9; Stop 33
aacagcctttaaacaagtcatatca

SEQ ID NO: 132621 - DNA, 25 bp, Artificial
  probe
  misc_feature (1)..(25): SEQ ID NO: 3456; WAN024CTK_at; Start 86; Stop 110
ttatccacaaattatttgattttct

SEQ ID NO: 132622 - DNA, 25 bp, Artificial
  probe
  misc_feature (1)..(25): SEQ ID NO: 3456; WAN024CTK_at; Start 1; Stop 25
ctgtggaaaacagcctttaaacaag

SEQ ID NO: 132623 - DNA, 25 bp, Artificial
  probe
  misc_feature (1)..(25): SEQ ID NO: 3456; WAN024CTK_at; Start 11; Stop 35
cagcctttaaacaagtcatatcaag

SEQ ID NO: 132624 - DNA, 25 bp, Artificial
  probe
  misc_feature (1)..(25): SEQ ID NO: 3456; WAN024CTK_at; Start 79; Stop 103
ctaaaagttatccacaaattatttg

SEQ ID NO: 132625 - DNA, 25 bp, Artificial
  probe
  misc_feature (1)..(25): SEQ ID NO: 3456; WAN024CTK_at; Start 26; Stop 50
tcatatcaagttttttagcttgttt

SEQ ID NO: 132626 - DNA, 25 bp, Artificial
  probe
  misc_feature (1)..(25): SEQ ID NO: 3456; WAN024CTK_at; Start 6; Stop 30
gaaaacagcctttaaacaagtcata

SEQ ID NO: 132627 - DNA, 25 bp, Artificial
  probe
  misc_feature (1)..(25): SEQ ID NO: 3456; WAN024CTK_at; Start 87; Stop 111
tatccacaaattatttgattttctt

SEQ ID NO: 132628 - DNA, 25 bp, Artificial
  probe
  misc_feature (1)..(25): SEQ ID NO: 3456; WAN024CTK_at; Start 21; Stop 45
acaagtcatatcaagttttttagct

SEQ ID NO: 132629 - DNA, 25 bp, Artificial
  probe
  misc_feature (1)..(25): SEQ ID NO: 3456; WAN024CTK_at; Start 85; Stop 109
gttatccacaaattatttgattttc

SEQ ID NO: 132630 - DNA, 25 bp, Artificial
  probe
  misc_feature (1)..(25): SEQ ID NO: 3456; WAN024CTK_at; Start 22; Stop 46
caagtcatatcaagttttttagctt

SEQ ID NO: 132631 - DNA, 25 bp, Artificial
  probe
  misc_feature (1)..(25): SEQ ID NO: 3456; WAN024CTK_at; Start 80; Stop 104
taaaagttatccacaaattatttga

SEQ ID NO: 132632 - DNA, 25 bp, Artificial
  probe
  misc_feature (1)..(25): SEQ ID NO: 3456; WAN024CTK_at; Start 13; Stop 37
gcctttaaacaagtcatatcaagtt

SEQ ID NO: 132633 - DNA, 25 bp, Artificial
  probe
  misc_feature (1)..(25): SEQ ID NO: 3456; WAN024CTK_at; Start 18; Stop 42
taaacaagtcatatcaagtttttta

SEQ ID NO: 132634 - DNA, 25 bp, Artificial
  probe
  misc_feature (1)..(25): SEQ ID NO: 3456; WAN024CTK_at; Start 84; Stop 108
agttatccacaaattatttgatttt

SEQ ID NO: 132635 - DNA, 25 bp, Artificial
  probe
  misc_feature (1)..(25): SEQ ID NO: 3456; WAN024CTK_at; Start 27; Stop 51
catatcaagttttttagcttgttta

SEQ ID NO: 132636 - DNA, 25 bp, Artificial
  probe
  misc_feature (1)..(25): SEQ ID NO: 3456; WAN024CTK_at; Start 15; Stop 39
ctttaaacaagtcatatcaagtttt

SEQ ID NO: 132637 - DNA, 25 bp, Artificial
  probe
  misc_feature (1)..(25): SEQ ID NO: 3456; WAN024CTK_at; Start 7; Stop 31
aaaacagcctttaaacaagtcatat

SEQ ID NO: 132638 - DNA, 25 bp, Artificial
  probe
  misc_feature (1)..(25): SEQ ID NO: 3456; WAN024CTK_at; Start 8; Stop 32
aaacagcctttaaacaagtcatatc

SEQ ID NO: 132639 - DNA, 25 bp, Artificial
  probe
  misc_feature (1)..(25): SEQ ID NO: 3456; WAN024CTK_at; Start 83; Stop 107
aagttatccacaaattatttgattt

SEQ ID NO: 132640 - DNA, 25 bp, Artificial
  probe
  misc_feature (1)..(25): SEQ ID NO: 3456; WAN024CTK_at; Start 23; Stop 47
aagtcatatcaagttttttagcttg

SEQ ID NO: 132641 - DNA, 25 bp, Artificial
  probe
  misc_feature (1)..(25): SEQ ID NO: 3456; WAN024CTK_at; Start 20; Stop 44
aacaagtcatatcaagttttttagc

SEQ ID NO: 132642 - DNA, 25 bp, Artificial
  probe
  misc_feature (1)..(25): SEQ ID NO: 3456; WAN024CTK_at; Start 81; Stop 105
aaaagttatccacaaattatttgat

SEQ ID NO: 132643 - DNA, 25 bp, Artificial
  probe
  misc_feature (1)..(25): SEQ ID NO: 3456; WAN024CTK_at; Start 4; Stop 28
tggaaaacagcctttaaacaagtca

SEQ ID NO: 132644 - DNA, 25 bp, Artificial
  probe
  misc_feature (1)..(25): SEQ ID NO: 3456; WAN024CTK_at; Start 14; Stop 38
cctttaaacaagtcatatcaagttt

SEQ ID NO: 132645 - DNA, 25 bp, Artificial
  probe
  misc_feature (1)..(25): SEQ ID NO: 3456; WAN024CTK_at; Start 25; Stop 49
gtcatatcaagttttttagcttgtt

SEQ ID NO: 132646 - DNA, 25 bp, Artificial
  probe
  misc_feature (1)..(25): SEQ ID NO: 3456; WAN024CTK_at; Start 19; Stop 43
aaacaagtcatatcaagttttttag

SEQ ID NO: 132647 - DNA, 25 bp, Artificial
  probe
  misc_feature (1)..(25): SEQ ID NO: 3456; WAN024CTK_at; Start 12; Stop 36
agcctttaaacaagtcatatcaagt

SEQ ID NO: 132648 - DNA, 25 bp, Artificial
  probe
  misc_feature (1)..(25): SEQ ID NO: 3456; WAN024CTK_at; Start 10; Stop 34
acagcctttaaacaagtcatatcaa

SEQ ID NO: 132649 - DNA, 25 bp, Artificial
  probe
  misc_feature (1)..(25): SEQ ID NO: 3456; WAN024CTK_at; Start 24; Stop 48
agtcatatcaagttttttagcttgt

SEQ ID NO: 132650 - DNA, 25 bp, Artificial
  probe
  misc_feature (1)..(25): SEQ ID NO: 2988; WAN024CTL_at; Start 446; Stop 470
tgggaacaccagaagctgtgcgtga

SEQ ID NO: 132651 - DNA, 25 bp, Artificial
  probe
  misc_feature (1)..(25): SEQ ID NO: 2988; WAN024CTL_at; Start 117; Stop 141
taaactacctgttgtgccagcgaat

SEQ ID NO: 132652 - DNA, 25 bp, Artificial
  probe
  misc_feature (1)..(25): SEQ ID NO: 2988; WAN024CTL_at; Start 367; Stop 391
ggtcatgcggatagcgtgatttcta

SEQ ID NO: 132653 - DNA, 25 bp, Artificial
  probe
  misc_feature (1)..(25): SEQ ID NO: 2988; WAN024CTL_at; Start 88; Stop 112
acaagtgtcactttaggaaatcaca

SEQ ID NO: 132654 - DNA, 25 bp, Artificial
  probe
  misc_feature (1)..(25): SEQ ID NO: 2988; WAN024CTL_at; Start 655; Stop 679
aagtctatccgcttcggtgctagca

SEQ ID NO: 132655 - DNA, 25 bp, Artificial
  probe
  misc_feature (1)..(25): SEQ ID NO: 2988; WAN024CTL_at; Start 686; Stop 710
tgattggttccctctttgcaggaca

SEQ ID NO: 132656 - DNA, 25 bp, Artificial
  probe
  misc_feature (1)..(25): SEQ ID NO: 2988; WAN024CTL_at; Start 891; Stop 915
tatttcttatgcaggtggacgtcag

SEQ ID NO: 132657 - DNA, 25 bp, Artificial
  probe
  misc_feature (1)..(25): SEQ ID NO: 2988; WAN024CTL_at; Start 172; Stop 196
gagcaactggctaaaggtggttact

SEQ ID NO: 132658 - DNA, 25 bp, Artificial
  probe
  misc_feature (1)..(25): SEQ ID NO: 2988; WAN024CTL_at; Start 625; Stop 649
ggaggaattcgtactcacggtgata

SEQ ID NO: 132659 - DNA, 25 bp, Artificial
  probe
  misc_feature (1)..(25): SEQ ID NO: 2988; WAN024CTL_at; Start 595; Stop 619
aaggctgcgcgtaaaccgattatcg

SEQ ID NO: 132660 - DNA, 25 bp, Artificial
  probe
  misc_feature (1)..(25): SEQ ID NO: 2988; WAN024CTL_at; Start 159; Stop 183
tgaaaatgtagcagagcaactggct

SEQ ID NO: 132661 - DNA, 25 bp, Artificial
  probe
  misc_feature (1)..(25): SEQ ID NO: 2988; WAN024CTL_at; Start 867; Stop 891
gatggaacaagaccttcaaagtgct

SEQ ID NO: 132662 - DNA, 25 bp, Artificial
  probe
  misc_feature (1)..(25): SEQ ID NO: 2988; WAN024CTL_at; Start 524; Stop 548
tttgtatcaccaaggttaagactgg

SEQ ID NO: 132663 - DNA, 25 bp, Artificial
  probe
  misc_feature (1)..(25): SEQ ID NO: 2988; WAN024CTL_at; Start 222; Stop 246
ggcaggacgcattccttttattaaa

SEQ ID NO: 132664 - DNA, 25 bp, Artificial
  probe
  misc_feature (1)..(25): SEQ ID NO: 2988; WAN024CTL_at; Start 431; Stop 455
tcattgctggaaatgtgggaacacc

SEQ ID NO: 132665 - DNA, 25 bp, Artificial
  probe
  misc_feature (1)..(25): SEQ ID NO: 2988; WAN024CTL_at; Start 188; Stop 212
gtggttacttctacattatgcaccg

SEQ ID NO: 132666 - DNA, 25 bp, Artificial
  probe
  misc_feature (1)..(25): SEQ ID NO: 2988; WAN024CTL_at; Start 610; Stop 634
ccgattatcgctgatggaggaattc

SEQ ID NO: 132667 - DNA, 25 bp, Artificial
  probe
  misc_feature (1)..(25): SEQ ID NO: 2988; WAN024CTL_at; Start 397; Stop 421
caacacatcaagaaagaattgccag

SEQ ID NO: 132668 - DNA, 25 bp, Artificial
  probe
  misc_feature (1)..(25): SEQ ID NO: 2988; WAN024CTL_at; Start 208; Stop 232
caccgttttgatgaggcaggacgca

SEQ ID NO: 132669 - DNA, 25 bp, Artificial
  probe
  misc_feature (1)..(25): SEQ ID NO: 2988; WAN024CTL_at; Start 673; Stop 697
gctagcatgatcatgattggttccc

SEQ ID NO: 132670 - DNA, 25 bp, Artificial
  probe
  misc_feature (1)..(25): SEQ ID NO: 2988; WAN024CTL_at; Start 834; Stop 858
tgctaaaggtcatctgcaagacact

SEQ ID NO: 132671 - DNA, 25 bp, Artificial
  probe
  misc_feature (1)..(25): SEQ ID NO: 2988; WAN024CTL_at; Start 351; Stop 375
tattgatattgctcatggtcatgcg

SEQ ID NO: 132672 - DNA, 25 bp, Artificial
  probe
  misc_feature (1)..(25): SEQ ID NO: 2988; WAN024CTL_at; Start 132; Stop 156
gccagcgaatatgcagacgattttg

SEQ ID NO: 132673 - DNA, 25 bp, Artificial
  probe
  misc_feature (1)..(25): SEQ ID NO: 2988; WAN024CTL_at; Start 818; Stop 842
aacgtatcttgcttcctgctaaagg

SEQ ID NO: 132674 - DNA, 25 bp, Artificial
  probe
  misc_feature (1)..(25): SEQ ID NO: 2988; WAN024CTL_at; Start 464; Stop 488
tgcgtgaattggaaaatgctggtgc

SEQ ID NO: 132675 - DNA, 25 bp, Artificial
  probe
  misc_feature (1)..(25): SEQ ID NO: 2988; WAN024CTL_at; Start 915; Stop 939
ggttgctgaccttaaacacgttgat

SEQ ID NO: 132676 - DNA, 25 bp, Artificial
  probe
  misc_feature (1)..(25): SEQ ID NO: 2988; WAN024CTL_at; Start 585; Stop 609
ctggtgtgccaaggctgcgcgtaaa

SEQ ID NO: 132677 - DNA, 25 bp, Artificial
  probe
  misc_feature (1)..(25): SEQ ID NO: 2988; WAN024CTL_at; Start 55; Stop 79
aaatgtgtcattaaaagccgtgcag

SEQ ID NO: 132678 - DNA, 25 bp, Artificial
  probe
  misc_feature (1)..(25): SEQ ID NO: 2988; WAN024CTL_at; Start 763; Stop 787
tattatggttcagcctcacaatatc

SEQ ID NO: 132679 - DNA, 25 bp, Artificial
  probe
  misc_feature (1)..(25): SEQ ID NO: 2988; WAN024CTL_at; Start 73; Stop 97
cgtgcagaagcggatacaagtgtca

SEQ ID NO: 132680 - DNA, 25 bp, Artificial
  probe
  misc_feature (1)..(25): SEQ ID NO: 2988; WAN024CTL_at; Start 412; Stop 436
gaattgccagatacctttgtcattg

SEQ ID NO: 132681 - DNA, 25 bp, Artificial
  probe
  misc_feature (1)..(25): SEQ ID NO: 2988; WAN024CTL_at; Start 942; Stop 966
tgtgatcgtgaaaaactccatctgg

SEQ ID NO: 132682 - DNA, 25 bp, Artificial
  probe
  misc_feature (1)..(25): SEQ ID NO: 2988; WAN024CTL_at; Start 850; Stop 874
caagacactttaactgagatggaac

SEQ ID NO: 132683 - DNA, 25 bp, Artificial
  probe
  misc_feature (1)..(25): SEQ ID NO: 2988; WAN024CTL_at; Start 511; Stop 535
ggtcctggtaaggtttgtatcacca

SEQ ID NO: 132684 - DNA, 25 bp, Artificial
  probe
  misc_feature (1)..(25): SEQ ID NO: 4894; WAN024CTM_at; Start 1276; Stop 1300
catgcccatgccaaaataaaatctt

SEQ ID NO: 132685 - DNA, 25 bp, Artificial
  probe
  misc_feature (1)..(25): SEQ ID NO: 4894; WAN024CTM_at; Start 746; Stop 770
tcctaacgagtgatcgtagtccaaa

SEQ ID NO: 132686 - DNA, 25 bp, Artificial
  probe
  misc_feature (1)..(25): SEQ ID NO: 4894; WAN024CTM_at; Start 415; Stop 439
gctgtctctgaagatttggctctga

SEQ ID NO: 132687 - DNA, 25 bp, Artificial
  probe
  misc_feature (1)..(25): SEQ ID NO: 4894; WAN024CTM_at; Start 841; Stop 865
cctgactttgaaacacgtattgcca

SEQ ID NO: 132688 - DNA, 25 bp, Artificial
  probe
  misc_feature (1)..(25): SEQ ID NO: 4894; WAN024CTM_at; Start 890; Stop 914
taggctacaatttccaaagtgatac

SEQ ID NO: 132689 - DNA, 25 bp, Artificial
  probe
  misc_feature (1)..(25): SEQ ID NO: 4894; WAN024CTM_at; Start 46; Stop 70
gaaagactgactcgatccatgtatg

SEQ ID NO: 132690 - DNA, 25 bp, Artificial
  probe
  misc_feature (1)..(25): SEQ ID NO: 4894; WAN024CTM_at; Start 705; Stop 729
caatacctttaacgcccttcatgac

SEQ ID NO: 132691 - DNA, 25 bp, Artificial
  probe
  misc_feature (1)..(25): SEQ ID NO: 4894; WAN024CTM_at; Start 67; Stop 91
tatgatttctatgctattcaagctg

SEQ ID NO: 132692 - DNA, 25 bp, Artificial
  probe
  misc_feature (1)..(25): SEQ ID NO: 4894; WAN024CTM_at; Start 1026; Stop 1050
tattgctgcagaagccattagagcc

SEQ ID NO: 132693 - DNA, 25 bp, Artificial
  probe
  misc_feature (1)..(25): SEQ ID NO: 4894; WAN024CTM_at; Start 1041; Stop 1065
cattagagcccgcaaacaagatgtt

SEQ ID NO: 132694 - DNA, 25 bp, Artificial
  probe
  misc_feature (1)..(25): SEQ ID NO: 4894; WAN024CTM_at; Start 1251; Stop 1275
gggaaaagatcataccacagtcatt

SEQ ID NO: 132695 - DNA, 25 bp, Artificial
  probe
  misc_feature (1)..(25): SEQ ID NO: 4894; WAN024CTM_at; Start 231; Stop 255
tattttcaccaaacctcaagatacg

SEQ ID NO: 132696 - DNA, 25 bp, Artificial
  probe
  misc_feature (1)..(25): SEQ ID NO: 4894; WAN024CTM_at; Start 975; Stop 999
cgacatcactttaattgccagagta

SEQ ID NO: 132697 - DNA, 25 bp, Artificial
  probe
  misc_feature (1)..(25): SEQ ID NO: 4894; WAN024CTM_at; Start 909; Stop 933
tgatactctagaatacctagctggg

SEQ ID NO: 132698 - DNA, 25 bp, Artificial
  probe
  misc_feature (1)..(25): SEQ ID NO: 4894; WAN024CTM_at; Start 188; Stop 212
tagctggttttgaaatttatgacgc

SEQ ID NO: 132699 - DNA, 25 bp, Artificial
  probe
  misc_feature (1)..(25): SEQ ID NO: 4894; WAN024CTM_at; Start 34; Stop 58
gaatttgcacaagaaagactgactc

SEQ ID NO: 132700 - DNA, 25 bp, Artificial
  probe
  misc_feature (1)..(25): SEQ ID NO: 4894; WAN024CTM_at; Start 114; Stop 138
tgttgccactatatttctacctcgc

SEQ ID NO: 132701 - DNA, 25 bp, Artificial
  probe
  misc_feature (1)..(25): SEQ ID NO: 4894; WAN024CTM_at; Start 1057; Stop 1081
caagatgttagccaaatgctcgtca

SEQ ID NO: 132702 - DNA, 25 bp, Artificial
  probe
  misc_feature (1)..(25): SEQ ID NO: 4894; WAN024CTM_at; Start 1071; Stop 1095
aatgctcgtcatcccaattgataaa

SEQ ID NO: 132703 - DNA, 25 bp, Artificial
  probe
  misc_feature (1)..(25): SEQ ID NO: 4894; WAN024CTM_at; Start 387; Stop 411
aaatgtttgggctgtatcagccgct

SEQ ID NO: 132704 - DNA, 25 bp, Artificial
  probe
  misc_feature (1)..(25): SEQ ID NO: 4894; WAN024CTM_at; Start 945; Stop 969
aaatgttcgagatcttgagggagcc

SEQ ID NO: 132705 - DNA, 25 bp, Artificial
  probe
  misc_feature (1)..(25): SEQ ID NO: 4894; WAN024CTM_at; Start 924; Stop 948
cctagctgggcaatttgattcaaat

SEQ ID NO: 132706 - DNA, 25 bp, Artificial
  probe
  misc_feature (1)..(25): SEQ ID NO: 4894; WAN024CTM_at; Start 1162; Stop 1186
caaaatattgttttggcccgtcaag

SEQ ID NO: 132707 - DNA, 25 bp, Artificial
  probe
  misc_feature (1)..(25): SEQ ID NO: 4894; WAN024CTM_at; Start 1134; Stop 1158
caaagaaatgaagggaagtagacgc

SEQ ID NO: 132708 - DNA, 25 bp, Artificial
  probe
  misc_feature (1)..(25): SEQ ID NO: 4894; WAN024CTM_at; Start 401; Stop 425
tatcagccgctttagctgtctctga

SEQ ID NO: 132709 - DNA, 25 bp, Artificial
  probe
  misc_feature (1)..(25): SEQ ID NO: 4894; WAN024CTM_at; Start 244; Stop 268
cctcaagatacgactagctcacaag

SEQ ID NO: 132710 - DNA, 25 bp, Artificial
  probe
  misc_feature (1)..(25): SEQ ID NO: 4894; WAN024CTM_at; Start 1216; Stop 1240
gataatagtcttccaaaaattggga

SEQ ID NO: 132711 - DNA, 25 bp, Artificial
  probe
  misc_feature (1)..(25): SEQ ID NO: 4894; WAN024CTM_at; Start 431; Stop 455
tggctctgacctataaccctctttt

SEQ ID NO: 132712 - DNA, 25 bp, Artificial
  probe
  misc_feature (1)..(25): SEQ ID NO: 4894; WAN024CTM_at; Start 960; Stop 984
tgagggagccatcaacgacatcact

SEQ ID NO: 132713 - DNA, 25 bp, Artificial
  probe
  misc_feature (1)..(25): SEQ ID NO: 4894; WAN024CTM_at; Start 98; Stop 122
tcaaggtagaggaaaatgttgccac

SEQ ID NO: 132714 - DNA, 25 bp, Artificial
  probe
  misc_feature (1)..(25): SEQ ID NO: 4894; WAN024CTM_at; Start 129; Stop 153
tctacctcgctctgaaatggaaatg

SEQ ID NO: 132715 - DNA, 25 bp, Artificial
  probe
  misc_feature (1)..(25): SEQ ID NO: 4894; WAN024CTM_at; Start 205; Stop 229
tatgacgctgaaataactccccact

SEQ ID NO: 132716 - DNA, 25 bp, Artificial
  probe
  misc_feature (1)..(25): SEQ ID NO: 4894; WAN024CTM_at; Start 1177; Stop 1201
gcccgtcaagtagccatgtatttat

SEQ ID NO: 132717 - DNA, 25 bp, Artificial
  probe
  misc_feature (1)..(25): SEQ ID NO: 4894; WAN024CTM_at; Start 317; Stop 341
tatctattccttattcagatacggg

SEQ ID NO: 132718 - DNA, 25 bp, Artificial
  probe
  misc_feature (1)..(25): SEQ ID NO: 7499; WAN024CTN_at; Start 40; Stop 64
gctgcaaagaggtccaaaatctctg

SEQ ID NO: 132719 - DNA, 25 bp, Artificial
  probe
  misc_feature (1)..(25): SEQ ID NO: 7499; WAN024CTN_at; Start 32; Stop 56
catattcagctgcaaagaggtccaa

SEQ ID NO: 132720 - DNA, 25 bp, Artificial
  probe
  misc_feature (1)..(25): SEQ ID NO: 7499; WAN024CTN_at; Start 16; Stop 40
gtttcttcctcagtcgcatattcag

SEQ ID NO: 132721 - DNA, 25 bp, Artificial
  probe
  misc_feature (1)..(25): SEQ ID NO: 7499; WAN024CTN_at; Start 144; Stop 168
caaaagatggaaaatcaagcgctcc

SEQ ID NO: 132722 - DNA, 25 bp, Artificial
  probe
  misc_feature (1)..(25): SEQ ID NO: 7499; WAN024CTN_at; Start 50; Stop 74
ggtccaaaatctctgcatcaaagtc

SEQ ID NO: 132723 - DNA, 25 bp, Artificial
  probe
  misc_feature (1)..(25): SEQ ID NO: 7499; WAN024CTN_at; Start 54; Stop 78
caaaatctctgcatcaaagtctgtc

SEQ ID NO: 132724 - DNA, 25 bp, Artificial
  probe
  misc_feature (1)..(25): SEQ ID NO: 7499; WAN024CTN_at; Start 178; Stop 202
gataccaagatatccatagatgggc

SEQ ID NO: 132725 - DNA, 25 bp, Artificial
  probe
  misc_feature (1)..(25): SEQ ID NO: 7499; WAN024CTN_at; Start 96; Stop 120
cgtgttcaaggcattcataagttca

SEQ ID NO: 132726 - DNA, 25 bp, Artificial
  probe
  misc_feature (1)..(25): SEQ ID NO: 7499; WAN024CTN_at; Start 83; Stop 107
tatattgtccttgcgtgttcaaggc

SEQ ID NO: 132727 - DNA, 25 bp, Artificial
  probe
  misc_feature (1)..(25): SEQ ID NO: 7499; WAN024CTN_at; Start 102; Stop 126
caaggcattcataagttcagttgtc

SEQ ID NO: 132728 - DNA, 25 bp, Artificial
  probe
  misc_feature (1)..(25): SEQ ID NO: 7499; WAN024CTN_at; Start 90; Stop 114
tccttgcgtgttcaaggcattcata

SEQ ID NO: 132729 - DNA, 25 bp, Artificial
  probe
  misc_feature (1)..(25): SEQ ID NO: 7499; WAN024CTN_at; Start 34; Stop 58
tattcagctgcaaagaggtccaaaa

SEQ ID NO: 132730 - DNA, 25 bp, Artificial
  probe
  misc_feature (1)..(25): SEQ ID NO: 7499; WAN024CTN_at; Start 164; Stop 188
gctccaagtttgaagataccaagat

SEQ ID NO: 132731 - DNA, 25 bp, Artificial
  probe
  misc_feature (1)..(25): SEQ ID NO: 7499; WAN024CTN_at; Start 26; Stop 50
cagtcgcatattcagctgcaaagag

SEQ ID NO: 132732 - DNA, 25 bp, Artificial
  probe
  misc_feature (1)..(25): SEQ ID NO: 7499; WAN024CTN_at; Start 75; Stop 99
tgtcaacttatattgtccttgcgtg

SEQ ID NO: 132733 - DNA, 25 bp, Artificial
  probe
  misc_feature (1)..(25): SEQ ID NO: 7499; WAN024CTN_at; Start 141; Stop 165
tcccaaaagatggaaaatcaagcgc

SEQ ID NO: 132734 - DNA, 25 bp, Artificial
  probe
  misc_feature (1)..(25): SEQ ID NO: 7499; WAN024CTN_at; Start 129; Stop 153
ttcagcattatttcccaaaagatgg

SEQ ID NO: 132735 - DNA, 25 bp, Artificial
  probe
  misc_feature (1)..(25): SEQ ID NO: 7499; WAN024CTN_at; Start 1; Stop 25
ttgatctctgctgccgtttcttcct

SEQ ID NO: 132736 - DNA, 25 bp, Artificial
  probe
  misc_feature (1)..(25): SEQ ID NO: 7499; WAN024CTN_at; Start 149; Stop 173
gatggaaaatcaagcgctccaagtt

SEQ ID NO: 132737 - DNA, 25 bp, Artificial
  probe
  misc_feature (1)..(25): SEQ ID NO: 7499; WAN024CTN_at; Start 121; Stop 145
gttgtcttttcagcattatttccca

SEQ ID NO: 132738 - DNA, 25 bp, Artificial
  probe
  misc_feature (1)..(25): SEQ ID NO: 7499; WAN024CTN_at; Start 61; Stop 85
tctgcatcaaagtctgtcaacttat

SEQ ID NO: 132739 - DNA, 25 bp, Artificial
  probe
  misc_feature (1)..(25): SEQ ID NO: 7499; WAN024CTN_at; Start 57; Stop 81
aatctctgcatcaaagtctgtcaac

SEQ ID NO: 132740 - DNA, 25 bp, Artificial
  probe
  misc_feature (1)..(25): SEQ ID NO: 7499; WAN024CTN_at; Start 21; Stop 45
ttcctcagtcgcatattcagctgca

SEQ ID NO: 132741 - DNA, 25 bp, Artificial
  probe
  misc_feature (1)..(25): SEQ ID NO: 7499; WAN024CTN_at; Start 168; Stop 192
caagtttgaagataccaagatatcc

SEQ ID NO: 132742 - DNA, 25 bp, Artificial
  probe
  misc_feature (1)..(25): SEQ ID NO: 7499; WAN024CTN_at; Start 111; Stop 135
cataagttcagttgtcttttcagca

SEQ ID NO: 132743 - DNA, 25 bp, Artificial
  probe
  misc_feature (1)..(25): SEQ ID NO: 7499; WAN024CTN_at; Start 9; Stop 33
tgctgccgtttcttcctcagtcgca

SEQ ID NO: 132744 - DNA, 25 bp, Artificial
  probe
  misc_feature (1)..(25): SEQ ID NO: 7499; WAN024CTN_at; Start 37; Stop 61
tcagctgcaaagaggtccaaaatct

SEQ ID NO: 132745 - DNA, 25 bp, Artificial
  probe
  misc_feature (1)..(25): SEQ ID NO: 7499; WAN024CTN_at; Start 153; Stop 177
gaaaatcaagcgctccaagtttgaa

SEQ ID NO: 132746 - DNA, 25 bp, Artificial
  probe
  misc_feature (1)..(25): SEQ ID NO: 7499; WAN024CTN_at; Start 198; Stop 222
tgggctggttgttaccttaaactca

SEQ ID NO: 132747 - DNA, 25 bp, Artificial
  probe
  misc_feature (1)..(25): SEQ ID NO: 7499; WAN024CTN_at; Start 213; Stop 237
cttaaactcacgttttttgtcatag

SEQ ID NO: 132748 - DNA, 25 bp, Artificial
  probe
  misc_feature (1)..(25): SEQ ID NO: 7499; WAN024CTN_at; Start 191; Stop 215
ccatagatgggctggttgttacctt

SEQ ID NO: 132749 - DNA, 25 bp, Artificial
  probe
  misc_feature (1)..(25): SEQ ID NO: 7499; WAN024CTN_at; Start 44; Stop 68
caaagaggtccaaaatctctgcatc

SEQ ID NO: 132750 - DNA, 25 bp, Artificial
  probe
  misc_feature (1)..(25): SEQ ID NO: 7499; WAN024CTN_at; Start 159; Stop 183
caagcgctccaagtttgaagatacc

SEQ ID NO: 132751 - DNA, 25 bp, Artificial
  probe
  misc_feature (1)..(25): SEQ ID NO: 7499; WAN024CTN_at; Start 183; Stop 207
caagatatccatagatgggctggtt

SEQ ID NO: 132752 - DNA, 25 bp, Artificial
  probe
  misc_feature (1)..(25): SEQ ID NO: 1388; WAN024CTO_at; Start 951; Stop 975
cagcccatctatggatatcttggta

SEQ ID NO: 132753 - DNA, 25 bp, Artificial
  probe
  misc_feature (1)..(25): SEQ ID NO: 1388; WAN024CTO_at; Start 1282; Stop 1306
tacaagttcccagtagttgcagtag

SEQ ID NO: 132754 - DNA, 25 bp, Artificial
  probe
  misc_feature (1)..(25): SEQ ID NO: 1388; WAN024CTO_at; Start 968; Stop 992
tcttggtatcttcaaacttggagcg

SEQ ID NO: 132755 - DNA, 25 bp, Artificial
  probe
  misc_feature (1)..(25): SEQ ID NO: 1388; WAN024CTO_at; Start 358; Stop 382
ccatactttatgacgactgctgcta

SEQ ID NO: 132756 - DNA, 25 bp, Artificial
  probe
  misc_feature (1)..(25): SEQ ID NO: 1388; WAN024CTO_at; Start 59; Stop 83
caattttgcaaggtttggcgacgga

SEQ ID NO: 132757 - DNA, 25 bp, Artificial
  probe
  misc_feature (1)..(25): SEQ ID NO: 1388; WAN024CTO_at; Start 1364; Stop 1388
aaatctcaggcgttgcagtgccacc

SEQ ID NO: 132758 - DNA, 25 bp, Artificial
  probe
  misc_feature (1)..(25): SEQ ID NO: 1388; WAN024CTO_at; Start 1256; Stop 1280
cagtgattgcttcaacagctagtcc

SEQ ID NO: 132759 - DNA, 25 bp, Artificial
  probe
  misc_feature (1)..(25): SEQ ID NO: 1388; WAN024CTO_at; Start 785; Stop 809
tcacagtaccaacaggaaactttgg

SEQ ID NO: 132760 - DNA, 25 bp, Artificial
  probe
  misc_feature (1)..(25): SEQ ID NO: 1388; WAN024CTO_at; Start 284; Stop 308
tagatgggcaatacaatttggaact

SEQ ID NO: 132761 - DNA, 25 bp, Artificial
  probe
  misc_feature (1)..(25): SEQ ID NO: 1388; WAN024CTO_at; Start 933; Stop 957
tgagtttaaggtaacaaccagccca

SEQ ID NO: 132762 - DNA, 25 bp, Artificial
  probe
  misc_feature (1)..(25): SEQ ID NO: 1388; WAN024CTO_at; Start 253; Stop 277
gatactccagctattgcaccattag

SEQ ID NO: 132763 - DNA, 25 bp, Artificial
  probe
  misc_feature (1)..(25): SEQ ID NO: 1388; WAN024CTO_at; Start 223; Stop 247
tgtatcaacaatgcctacgatagca

SEQ ID NO: 132764 - DNA, 25 bp, Artificial
  probe
  misc_feature (1)..(25): SEQ ID NO: 1388; WAN024CTO_at; Start 818; Stop 842
tggctgccttttatgccaaacaaat

SEQ ID NO: 132765 - DNA, 25 bp, Artificial
  probe
  misc_feature (1)..(25): SEQ ID NO: 1388; WAN024CTO_at; Start 19; Stop 43
tcaacgcgtgatgccaacaatacag

SEQ ID NO: 132766 - DNA, 25 bp, Artificial
  probe
  misc_feature (1)..(25): SEQ ID NO: 1388; WAN024CTO_at; Start 388; Stop 412
catggtttggagaacaagattgtta

SEQ ID NO: 132767 - DNA, 25 bp, Artificial
  probe
  misc_feature (1)..(25): SEQ ID NO: 1388; WAN024CTO_at; Start 238; Stop 262
tacgatagcaaatttgatactccag

SEQ ID NO: 132768 - DNA, 25 bp, Artificial
  probe
  misc_feature (1)..(25): SEQ ID NO: 1388; WAN024CTO_at; Start 321; Stop 345
aacgattgcctttaaggatatggcc

SEQ ID NO: 132769 - DNA, 25 bp, Artificial
  probe
  misc_feature (1)..(25): SEQ ID NO: 1388; WAN024CTO_at; Start 1115; Stop 1139
ctgaatatgcgactgaggaagaaac

SEQ ID NO: 132770 - DNA, 25 bp, Artificial
  probe
  misc_feature (1)..(25): SEQ ID NO: 1388; WAN024CTO_at; Start 617; Stop 641
tgtttaacgacgtggctcttcgtga

SEQ ID NO: 132771 - DNA, 25 bp, Artificial
  probe
  misc_feature (1)..(25): SEQ ID NO: 1388; WAN024CTO_at; Start 1349; Stop 1373
tggctcaattacatgaaatctcagg

SEQ ID NO: 132772 - DNA, 25 bp, Artificial
  probe
  misc_feature (1)..(25): SEQ ID NO: 1388; WAN024CTO_at; Start 481; Stop 505
gagattatcgtcttttatccaaagg

SEQ ID NO: 132773 - DNA, 25 bp, Artificial
  probe
  misc_feature (1)..(25): SEQ ID NO: 1388; WAN024CTO_at; Start 269; Stop 293
caccattagtgaaattagatgggca

SEQ ID NO: 132774 - DNA, 25 bp, Artificial
  probe
  misc_feature (1)..(25): SEQ ID NO: 1388; WAN024CTO_at; Start 415; Stop 439
ttgacagcgacatctggtgacacgg

SEQ ID NO: 132775 - DNA, 25 bp, Artificial
  probe
  misc_feature (1)..(25): SEQ ID NO: 1388; WAN024CTO_at; Start 1106; Stop 1130
tctttgcagctgaatatgcgactga

SEQ ID NO: 132776 - DNA, 25 bp, Artificial
  probe
  misc_feature (1)..(25): SEQ ID NO: 1388; WAN024CTO_at; Start 468; Stop 492
tgtgcctggtactgagattatcgtc

SEQ ID NO: 132777 - DNA, 25 bp, Artificial
  probe
  misc_feature (1)..(25): SEQ ID NO: 1388; WAN024CTO_at; Start 1379; Stop 1403
cagtgccaccagcagttgatgggct

SEQ ID NO: 132778 - DNA, 25 bp, Artificial
  probe
  misc_feature (1)..(25): SEQ ID NO: 1388; WAN024CTO_at; Start 3; Stop 27
gacattagtttatcaatcaacgcgt

SEQ ID NO: 132779 - DNA, 25 bp, Artificial
  probe
  misc_feature (1)..(25): SEQ ID NO: 1388; WAN024CTO_at; Start 306; Stop 330
acttttccatggttcaacgattgcc

SEQ ID NO: 132780 - DNA, 25 bp, Artificial
  probe
  misc_feature (1)..(25): SEQ ID NO: 1388; WAN024CTO_at; Start 801; Stop 825
aaactttggaaatatcttggctgcc

SEQ ID NO: 132781 - DNA, 25 bp, Artificial
  probe
  misc_feature (1)..(25): SEQ ID NO: 1388; WAN024CTO_at; Start 402; Stop 426
caagattgttatcttgacagcgaca

SEQ ID NO: 132782 - DNA, 25 bp, Artificial
  probe
  misc_feature (1)..(25): SEQ ID NO: 1388; WAN024CTO_at; Start 336; Stop 360
ggatatggccttgtctattttgcca

SEQ ID NO: 132783 - DNA, 25 bp, Artificial
  probe
  misc_feature (1)..(25): SEQ ID NO: 1388; WAN024CTO_at; Start 207; Stop 231
tgaggagttggactactgtatcaac

SEQ ID NO: 132784 - DNA, 25 bp, Artificial
  probe
  misc_feature (1)..(25): SEQ ID NO: 1388; WAN024CTO_at; Start 151; Stop 175
tcttaccaggaagttgctaagctag

SEQ ID NO: 132785 - DNA, 25 bp, Artificial
  probe
  misc_feature (1)..(25): SEQ ID NO: 1388; WAN024CTO_at; Start 608; Stop 632
tgaagcacatgtttaacgacgtggc

SEQ ID NO: 132786 - DNA, 25 bp, Artificial
  probe
  misc_feature (1)..(25): SEQ ID NO: 7194; WAN024CTP-3_at; Start 1611; Stop 1635
taagaacttagttgcagaagctcca

SEQ ID NO: 132787 - DNA, 25 bp, Artificial
  probe
  misc_feature (1)..(25): SEQ ID NO: 7194; WAN024CTP-3_at; Start 1931; Stop 1955
taaacgaagttccagaatacacagg

SEQ ID NO: 132788 - DNA, 25 bp, Artificial
  probe
  misc_feature (1)..(25): SEQ ID NO: 7194; WAN024CTP-3_at; Start 2282; Stop 2306
ttgccaaggaaggaaagagattacc

SEQ ID NO: 132789 - DNA, 25 bp, Artificial
  probe
  misc_feature (1)..(25): SEQ ID NO: 7194; WAN024CTP-3_at; Start 1039; Stop 1063
tttaaagatagtggcacagatgccc

SEQ ID NO: 132790 - DNA, 25 bp, Artificial
  probe
  misc_feature (1)..(25): SEQ ID NO: 7194; WAN024CTP-3_at; Start 1087; Stop 1111
tatattggtcctgcctttacagagc

SEQ ID NO: 132791 - DNA, 25 bp, Artificial
  probe
  misc_feature (1)..(25): SEQ ID NO: 7194; WAN024CTP-3_at; Start 1057; Stop 1081
gatgccccagagaaaatggttctag

SEQ ID NO: 132792 - DNA, 25 bp, Artificial
  probe
  misc_feature (1)..(25): SEQ ID NO: 7194; WAN024CTP-3_at; Start 1336; Stop 1360
ggagcagaagtcgaaacaccatcag

SEQ ID NO: 132793 - DNA, 25 bp, Artificial
  probe
  misc_feature (1)..(25): SEQ ID NO: 7194; WAN024CTP-3_at; Start 61; Stop 85
ccagatttaccaagtgatgtcagca

SEQ ID NO: 132794 - DNA, 25 bp, Artificial
  probe
  misc_feature (1)..(25): SEQ ID NO: 7194; WAN024CTP-3_at; Start 2206; Stop 2230
gcaccgacagtagaaaaaccagagt

SEQ ID NO: 132795 - DNA, 25 bp, Artificial
  probe
  misc_feature (1)..(25): SEQ ID NO: 7194; WAN024CTP-3_at; Start 2095; Stop 2119
gcaccgacagtagagaaacctgaat

SEQ ID NO: 132796 - DNA, 25 bp, Artificial
  probe
  misc_feature (1)..(25): SEQ ID NO: 7194; WAN024CTP-3_at; Start 1672; Stop 1696
gaagttgttcgtgaaacccctgcgc

SEQ ID NO: 132797 - DNA, 25 bp, Artificial
  probe
  misc_feature (1)..(25): SEQ ID NO: 7194; WAN024CTP-3_at; Start 453; Stop 477
tagtccaaaaggtgcaacacgtctc

SEQ ID NO: 132798 - DNA, 25 bp, Artificial
  probe
  misc_feature (1)..(25): SEQ ID NO: 7194; WAN024CTP-3_at; Start 2048; Stop 2072
aactcccagagtacacaggtccggt

SEQ ID NO: 132799 - DNA, 25 bp, Artificial
  probe
  misc_feature (1)..(25): SEQ ID NO: 7194; WAN024CTP-3_at; Start 1854; Stop 1878
tagtaagggtgaggaacctgcgcca

SEQ ID NO: 132800 - DNA, 25 bp, Artificial
  probe
  misc_feature (1)..(25): SEQ ID NO: 7194; WAN024CTP-3_at; Start 2001; Stop 2025
gcctgagttcaagggtggagtcaac

SEQ ID NO: 132801 - DNA, 25 bp, Artificial
  probe
  misc_feature (1)..(25): SEQ ID NO: 7194; WAN024CTP-3_at; Start 645; Stop 669
tacttggactacagaaaaacttgca

SEQ ID NO: 132802 - DNA, 25 bp, Artificial
  probe
  misc_feature (1)..(25): SEQ ID NO: 7194; WAN024CTP-3_at; Start 1695; Stop 1719
gcttgctcaaggtaaacgtcgtgta

SEQ ID NO: 132803 - DNA, 25 bp, Artificial
  probe
  misc_feature (1)..(25): SEQ ID NO: 7194; WAN024CTP-3_at; Start 1246; Stop 1270
caaacaacagctattcgtgcgcgta

SEQ ID NO: 132804 - DNA, 25 bp, Artificial
  probe
  misc_feature (1)..(25): SEQ ID NO: 7194; WAN024CTP-3_at; Start 1154; Stop 1178
tcaacaaggcagaaaattgggcacc

SEQ ID NO: 132805 - DNA, 25 bp, Artificial
  probe
  misc_feature (1)..(25): SEQ ID NO: 7194; WAN024CTP-3_at; Start 679; Stop 703
gatgctattcctgaacatgcgacag

SEQ ID NO: 132806 - DNA, 25 bp, Artificial
  probe
  misc_feature (1)..(25): SEQ ID NO: 7194; WAN024CTP-3_at; Start 1955; Stop 1979
gaattcttgccactgtaggcgacca

SEQ ID NO: 132807 - DNA, 25 bp, Artificial
  probe
  misc_feature (1)..(25): SEQ ID NO: 7194; WAN024CTP-3_at; Start 1434; Stop 1458
gggatccaaaccaaaagtcactgcg

SEQ ID NO: 132808 - DNA, 25 bp, Artificial
  probe
  misc_feature (1)..(25): SEQ ID NO: 7194; WAN024CTP-3_at; Start 1309; Stop 1333
gaatttacagcctactctgcaggca

SEQ ID NO: 132809 - DNA, 25 bp, Artificial
  probe
  misc_feature (1)..(25): SEQ ID NO: 7194; WAN024CTP-3_at; Start 554; Stop 578
cgcttgctgcagaaaatggtgctaa

SEQ ID NO: 132810 - DNA, 25 bp, Artificial
  probe
  misc_feature (1)..(25): SEQ ID NO: 7194; WAN024CTP-3_at; Start 2266; Stop 2290
gaagcaccagttcaagttgccaagg

SEQ ID NO: 132811 - DNA, 25 bp, Artificial
  probe
  misc_feature (1)..(25): SEQ ID NO: 7194; WAN024CTP-3_at; Start 2155; Stop 2179
cataaacttccagagtaccgtggtg

SEQ ID NO: 132812 - DNA, 25 bp, Artificial
  probe
  misc_feature (1)..(25): SEQ ID NO: 7194; WAN024CTP-3_at; Start 537; Stop 561
gagagaaactagtcaaccgcttgct

SEQ ID NO: 132813 - DNA, 25 bp, Artificial
  probe
  misc_feature (1)..(25): SEQ ID NO: 7194; WAN024CTP-3_at; Start 1261; Stop 1285
cgtgcgcgtatgactcgtaaggcta

SEQ ID NO: 132814 - DNA, 25 bp, Artificial
  probe
  misc_feature (1)..(25): SEQ ID NO: 7194; WAN024CTP-3_at; Start 1984; Stop 2008
gctccgacagtagagaagcctgagt

SEQ ID NO: 132815 - DNA, 25 bp, Artificial
  probe
  misc_feature (1)..(25): SEQ ID NO: 7194; WAN024CTP-3_at; Start 1872; Stop 1896
tgcgccagtcaacgaagttccagaa

SEQ ID NO: 132816 - DNA, 25 bp, Artificial
  probe
  misc_feature (1)..(25): SEQ ID NO: 7194; WAN024CTP-3_at; Start 849; Stop 873
gataacgaacgatacacaagcagct

SEQ ID NO: 132817 - DNA, 25 bp, Artificial
  probe
  misc_feature (1)..(25): SEQ ID NO: 7194; WAN024CTP-3_at; Start 930; Stop 954
gacaaactggactcgtactccgaaa

SEQ ID NO: 132818 - DNA, 25 bp, Artificial
  probe
  misc_feature (1)..(25): SEQ ID NO: 7194; WAN024CTP-3_at; Start 2173; Stop 2197
cgtggtgttctagctacagtaggca

SEQ ID NO: 132819 - DNA, 25 bp, Artificial
  probe
  misc_feature (1)..(25): SEQ ID NO: 7194; WAN024CTP-3_at; Start 2030; Stop 2054
ttatggccttgaaacacgaactccc

SEQ ID NO: 132820 - DNA, 25 bp, Artificial
  probe
  misc_feature (1)..(25): SEQ ID NO: 6420; WAN024CTP-5_at; Start 195; Stop 219
tgtggcagctgcaatcgcaaaggct

SEQ ID NO: 132821 - DNA, 25 bp, Artificial
  probe
  misc_feature (1)..(25): SEQ ID NO: 6420; WAN024CTP-5_at; Start 1794; Stop 1818
gaacaatccgtcgatcgtcatgtgg

SEQ ID NO: 132822 - DNA, 25 bp, Artificial
  probe
  misc_feature (1)..(25): SEQ ID NO: 6420; WAN024CTP-5_at; Start 717; Stop 741
tgatttcgatcacaagtctcccgca

SEQ ID NO: 132823 - DNA, 25 bp, Artificial
  probe
  misc_feature (1)..(25): SEQ ID NO: 6420; WAN024CTP-5_at; Start 1719; Stop 1743
tgcaacccatcctgaagctaagaag

SEQ ID NO: 132824 - DNA, 25 bp, Artificial
  probe
  misc_feature (1)..(25): SEQ ID NO: 6420; WAN024CTP-5_at; Start 735; Stop 759
tcccgcacgtaatgaaggtggccag

SEQ ID NO: 132825 - DNA, 25 bp, Artificial
  probe
  misc_feature (1)..(25): SEQ ID NO: 6420; WAN024CTP-5_at; Start 1908; Stop 1932
tactgaacgttatgtcaccatgggt

SEQ ID NO: 132826 - DNA, 25 bp, Artificial
  probe
  misc_feature (1)..(25): SEQ ID NO: 6420; WAN024CTP-5_at; Start 538; Stop 562
tctggagagtcgaacaaagccgaag

SEQ ID NO: 132827 - DNA, 25 bp, Artificial
  probe
  misc_feature (1)..(25): SEQ ID NO: 6420; WAN024CTP-5_at; Start 761; Stop 785
taaatggtggaacagcttggtatcg

SEQ ID NO: 132828 - DNA, 25 bp, Artificial
  probe
  misc_feature (1)..(25): SEQ ID NO: 6420; WAN024CTP-5_at; Start 410; Stop 434
caaagcctattgaatctgcagcaac

SEQ ID NO: 132829 - DNA, 25 bp, Artificial
  probe
  misc_feature (1)..(25): SEQ ID NO: 6420; WAN024CTP-5_at; Start 1048; Stop 1072
tatcgtgataaagtccatgttgccg

SEQ ID NO: 132830 - DNA, 25 bp, Artificial
  probe
  misc_feature (1)..(25): SEQ ID NO: 6420; WAN024CTP-5_at; Start 2345; Stop 2369
tcgatacggctggtttaccgaagaa

SEQ ID NO: 132831 - DNA, 25 bp, Artificial
  probe
  misc_feature (1)..(25): SEQ ID NO: 6420; WAN024CTP-5_at; Start 1602; Stop 1626
tagccctcagttgcttgatgctgcg

SEQ ID NO: 132832 - DNA, 25 bp, Artificial
  probe
  misc_feature (1)..(25): SEQ ID NO: 6420; WAN024CTP-5_at; Start 178; Stop 202
gataagcttcccgatgatgtggcag

SEQ ID NO: 132833 - DNA, 25 bp, Artificial
  probe
  misc_feature (1)..(25): SEQ ID NO: 6420; WAN024CTP-5_at; Start 109; Stop 133
caagctgaggaggtggcttcatcca

SEQ ID NO: 132834 - DNA, 25 bp, Artificial
  probe
  misc_feature (1)..(25): SEQ ID NO: 6420; WAN024CTP-5_at; Start 1846; Stop 1870
aatggtagtcctcgctctatcgaaa

SEQ ID NO: 132835 - DNA, 25 bp, Artificial
  probe
  misc_feature (1)..(25): SEQ ID NO: 6420; WAN024CTP-5_at; Start 1228; Stop 1252
gaattagtgcgctctgaaacgaaga

SEQ ID NO: 132836 - DNA, 25 bp, Artificial
  probe
  misc_feature (1)..(25): SEQ ID NO: 6420; WAN024CTP-5_at; Start 1491; Stop 1515
ccatgacaatggagccttgggtgca

SEQ ID NO: 132837 - DNA, 25 bp, Artificial
  probe
  misc_feature (1)..(25): SEQ ID NO: 6420; WAN024CTP-5_at; Start 1455; Stop 1479
tggtgaacgcatgaaattccacgga

SEQ ID NO: 132838 - DNA, 25 bp, Artificial
  probe
  misc_feature (1)..(25): SEQ ID NO: 6420; WAN024CTP-5_at; Start 520; Stop 544
gaaaaattgcaagcactgtctggag

SEQ ID NO: 132839 - DNA, 25 bp, Artificial
  probe
  misc_feature (1)..(25): SEQ ID NO: 6420; WAN024CTP-5_at; Start 1428; Stop 1452
gactgctaaggatggtttctctctg

SEQ ID NO: 132840 - DNA, 25 bp, Artificial
  probe
  misc_feature (1)..(25): SEQ ID NO: 6420; WAN024CTP-5_at; Start 2159; Stop 2183
aacaatctgactatggtaatgaccg

SEQ ID NO: 132841 - DNA, 25 bp, Artificial
  probe
  misc_feature (1)..(25): SEQ ID NO: 6420; WAN024CTP-5_at; Start 285; Stop 309
ggatacggaacctactagacctgct

SEQ ID NO: 132842 - DNA, 25 bp, Artificial
  probe
  misc_feature (1)..(25): SEQ ID NO: 6420; WAN024CTP-5_at; Start 483; Stop 507
ccaggtaaaagcagatacagagcgc

SEQ ID NO: 132843 - DNA, 25 bp, Artificial
  probe
  misc_feature (1)..(25): SEQ ID NO: 6420; WAN024CTP-5_at; Start 259; Stop 283
gattcgacagaagacaaagtgacta

SEQ ID NO: 132844 - DNA, 25 bp, Artificial
  probe
  misc_feature (1)..(25): SEQ ID NO: 6420; WAN024CTP-5_at; Start 427; Stop 451
gcagcaacagctggaacagaactga

SEQ ID NO: 132845 - DNA, 25 bp, Artificial
  probe
  misc_feature (1)..(25): SEQ ID NO: 6420; WAN024CTP-5_at; Start 2217; Stop 2241
gacttttgaccgtgatcgtgctggc

SEQ ID NO: 132846 - DNA, 25 bp, Artificial
  probe
  misc_feature (1)..(25): SEQ ID NO: 6420; WAN024CTP-5_at; Start 1866; Stop 1890
cgaaactgctaagcgcctgaaggca

SEQ ID NO: 132847 - DNA, 25 bp, Artificial
  probe
  misc_feature (1)..(25): SEQ ID NO: 6420; WAN024CTP-5_at; Start 329; Stop 353
tggctagacctaaagtggaaactcc

SEQ ID NO: 132848 - DNA, 25 bp, Artificial
  probe
  misc_feature (1)..(25): SEQ ID NO: 6420; WAN024CTP-5_at; Start 1474; Stop 1498
cacggagtaagtattcaccatgaca

SEQ ID NO: 132849 - DNA, 25 bp, Artificial
  probe
  misc_feature (1)..(25): SEQ ID NO: 6420; WAN024CTP-5_at; Start 1948; Stop 1972
cgtgcagcgacaggtgatttcttga

SEQ ID NO: 132850 - DNA, 25 bp, Artificial
  probe
  misc_feature (1)..(25): SEQ ID NO: 6420; WAN024CTP-5_at; Start 2031; Stop 2055
ggttcgtagtgctcatccagactgg

SEQ ID NO: 132851 - DNA, 25 bp, Artificial
  probe
  misc_feature (1)..(25): SEQ ID NO: 6420; WAN024CTP-5_at; Start 1580; Stop 1604
ttcgaacaacccacaatccagctag

SEQ ID NO: 132852 - DNA, 25 bp, Artificial
  probe
  misc_feature (1)..(25): SEQ ID NO: 6420; WAN024CTP-5_at; Start 1680; Stop 1704
caagaagacttacgactatggacgg

SEQ ID NO: 132853 - DNA, 25 bp, Artificial
  probe
  misc_feature (1)..(25): SEQ ID NO: 6420; WAN024CTP-5_at; Start 1152; Stop 1176
taaaaatacggataagaaggctgct

SEQ ID NO: 132854 - DNA, 25 bp, Artificial
  probe
  misc_feature (1)..(25): SEQ ID NO: 7344; WAN024CTP-M_at; Start 2257; Stop 2281
cctgactgtgtcaagaacgccaaca

SEQ ID NO: 132855 - DNA, 25 bp, Artificial
  probe
  misc_feature (1)..(25): SEQ ID NO: 7344; WAN024CTP-M_at; Start 2127; Stop 2151
aagcccatgttcgagtgtctagcca

SEQ ID NO: 132856 - DNA, 25 bp, Artificial
  probe
  misc_feature (1)..(25): SEQ ID NO: 7344; WAN024CTP-M_at; Start 644; Stop 668
ttaacttctgatagcgcaacggtcg

SEQ ID NO: 132857 - DNA, 25 bp, Artificial
  probe
  misc_feature (1)..(25): SEQ ID NO: 7344; WAN024CTP-M_at; Start 94; Stop 118
ggttcgtaccttctcaaatgctgca

SEQ ID NO: 132858 - DNA, 25 bp, Artificial
  probe
  misc_feature (1)..(25): SEQ ID NO: 7344; WAN024CTP-M_at; Start 52; Stop 76
gacccttaaggatcgcaagatgcgg

SEQ ID NO: 132859 - DNA, 25 bp, Artificial
  probe
  misc_feature (1)..(25): SEQ ID NO: 7344; WAN024CTP-M_at; Start 2043; Stop 2067
gggatcaggttccagccaactttag

SEQ ID NO: 132860 - DNA, 25 bp, Artificial
  probe
  misc_feature (1)..(25): SEQ ID NO: 7344; WAN024CTP-M_at; Start 1897; Stop 1921
tgaagctcaagcgactgtaacagtt

SEQ ID NO: 132861 - DNA, 25 bp, Artificial
  probe
  misc_feature (1)..(25): SEQ ID NO: 7344; WAN024CTP-M_at; Start 660; Stop 684
caacggtcgcaactgtgtctggtaa

SEQ ID NO: 132862 - DNA, 25 bp, Artificial
  probe
  misc_feature (1)..(25): SEQ ID NO: 7344; WAN024CTP-M_at; Start 1611; Stop 1635
gagtggctttgacacctcgaatcga

SEQ ID NO: 132863 - DNA, 25 bp, Artificial
  probe
  misc_feature (1)..(25): SEQ ID NO: 7344; WAN024CTP-M_at; Start 540; Stop 564
cagatggaacatggcaaagacgtgc

SEQ ID NO: 132864 - DNA, 25 bp, Artificial
  probe
  misc_feature (1)..(25): SEQ ID NO: 7344; WAN024CTP-M_at; Start 32; Stop 56
cattggaactggactgaagagaccc

SEQ ID NO: 132865 - DNA, 25 bp, Artificial
  probe
  misc_feature (1)..(25): SEQ ID NO: 7344; WAN024CTP-M_at; Start 936; Stop 960
caaaagttgctacagtaccggttgg

SEQ ID NO: 132866 - DNA, 25 bp, Artificial
  probe
  misc_feature (1)..(25): SEQ ID NO: 7344; WAN024CTP-M_at; Start 2242; Stop 2266
taataccttgaacgacctgactgtg

SEQ ID NO: 132867 - DNA, 25 bp, Artificial
  probe
  misc_feature (1)..(25): SEQ ID NO: 7344; WAN024CTP-M_at; Start 1400; Stop 1424
gaagctcctgccttgaaacgtttgg

SEQ ID NO: 132868 - DNA, 25 bp, Artificial
  probe
  misc_feature (1)..(25): SEQ ID NO: 7344; WAN024CTP-M_at; Start 880; Stop 904
tttggaaaccaaagctgaggcactt

SEQ ID NO: 132869 - DNA, 25 bp, Artificial
  probe
  misc_feature (1)..(25): SEQ ID NO: 7344; WAN024CTP-M_at; Start 2112; Stop 2136
gcaatttgaccactaaagcccatgt

SEQ ID NO: 132870 - DNA, 25 bp, Artificial
  probe
  misc_feature (1)..(25): SEQ ID NO: 7344; WAN024CTP-M_at; Start 2170; Stop 2194
tatctctaaacaatggacaggttcg

SEQ ID NO: 132871 - DNA, 25 bp, Artificial
  probe
  misc_feature (1)..(25): SEQ ID NO: 7344; WAN024CTP-M_at; Start 295; Stop 319
cgaaattgcgcgtgatagtgtgaca

SEQ ID NO: 132872 - DNA, 25 bp, Artificial
  probe
  misc_feature (1)..(25): SEQ ID NO: 7344; WAN024CTP-M_at; Start 182; Stop 206
gaagacggacgtccatatcatgagg

SEQ ID NO: 132873 - DNA, 25 bp, Artificial
  probe
  misc_feature (1)..(25): SEQ ID NO: 7344; WAN024CTP-M_at; Start 2313; Stop 2337
caaatactgataatgactgggcttc

SEQ ID NO: 132874 - DNA, 25 bp, Artificial
  probe
  misc_feature (1)..(25): SEQ ID NO: 7344; WAN024CTP-M_at; Start 830; Stop 854
gacttgcttacaagcgcaggtgaga

SEQ ID NO: 132875 - DNA, 25 bp, Artificial
  probe
  misc_feature (1)..(25): SEQ ID NO: 7344; WAN024CTP-M_at; Start 951; Stop 975
taccggttggtacaactgcagctga

SEQ ID NO: 132876 - DNA, 25 bp, Artificial
  probe
  misc_feature (1)..(25): SEQ ID NO: 7344; WAN024CTP-M_at; Start 2218; Stop 2242
caatacaggaggagatgactcagct

SEQ ID NO: 132877 - DNA, 25 bp, Artificial
  probe
  misc_feature (1)..(25): SEQ ID NO: 7344; WAN024CTP-M_at; Start 1109; Stop 1133
gatgacgatcgtgaagtaactgcaa

SEQ ID NO: 132878 - DNA, 25 bp, Artificial
  probe
  misc_feature (1)..(25): SEQ ID NO: 7344; WAN024CTP-M_at; Start 974; Stop 998
gatttggataaaacggtcacagctg

SEQ ID NO: 132879 - DNA, 25 bp, Artificial
  probe
  misc_feature (1)..(25): SEQ ID NO: 7344; WAN024CTP-M_at; Start 369; Stop 393
tcactgcagatggaaaagacctatc

SEQ ID NO: 132880 - DNA, 25 bp, Artificial
  probe
  misc_feature (1)..(25): SEQ ID NO: 7344; WAN024CTP-M_at; Start 497; Stop 521
gataatggagaacaagctagccgtg

SEQ ID NO: 132881 - DNA, 25 bp, Artificial
  probe
  misc_feature (1)..(25): SEQ ID NO: 7344; WAN024CTP-M_at; Start 257; Stop 281
ggcacactgactgcgattgctcgag

SEQ ID NO: 132882 - DNA, 25 bp, Artificial
  probe
  misc_feature (1)..(25): SEQ ID NO: 7344; WAN024CTP-M_at; Start 2185; Stop 2209
gacaggttcgcaattgccagctgcc

SEQ ID NO: 132883 - DNA, 25 bp, Artificial
  probe
  misc_feature (1)..(25): SEQ ID NO: 7344; WAN024CTP-M_at; Start 1977; Stop 2001
ttcaattgccagctaatgtgcgtgc

SEQ ID NO: 132884 - DNA, 25 bp, Artificial
  probe
  misc_feature (1)..(25): SEQ ID NO: 7344; WAN024CTP-M_at; Start 752; Stop 776
gaattgcctcaaacagtaacagcta

SEQ ID NO: 132885 - DNA, 25 bp, Artificial
  probe
  misc_feature (1)..(25): SEQ ID NO: 7344; WAN024CTP-M_at; Start 1957; Stop 1981
tcttcctaagggtgagacagttcaa

SEQ ID NO: 132886 - DNA, 25 bp, Artificial
  probe
  misc_feature (1)..(25): SEQ ID NO: 7344; WAN024CTP-M_at; Start 813; Stop 837
catgggatgtgccagctgacttgct

SEQ ID NO: 132887 - DNA, 25 bp, Artificial
  probe
  misc_feature (1)..(25): SEQ ID NO: 7344; WAN024CTP-M_at; Start 1929; Stop 1953
tgcaagttgcagaggaaatcagcct

SEQ ID NO: 132888 - DNA, 25 bp, Artificial
  probe
  misc_feature (1)..(25): SEQ ID NO: 6735; WAN024CTQ_at; Start 56; Stop 80
caggattaatcgctgtaaagatacg

SEQ ID NO: 132889 - DNA, 25 bp, Artificial
  probe
  misc_feature (1)..(25): SEQ ID NO: 6735; WAN024CTQ_at; Start 293; Stop 317
cgaggcgaacaagtactggaaagct

SEQ ID NO: 132890 - DNA, 25 bp, Artificial
  probe
  misc_feature (1)..(25): SEQ ID NO: 6735; WAN024CTQ_at; Start 329; Stop 353
tatctaccacagttgaagctacttg

SEQ ID NO: 132891 - DNA, 25 bp, Artificial
  probe
  misc_feature (1)..(25): SEQ ID NO: 6735; WAN024CTQ_at; Start 67; Stop 91
gctgtaaagatacgttcttttccaa

SEQ ID NO: 132892 - DNA, 25 bp, Artificial
  probe
  misc_feature (1)..(25): SEQ ID NO: 6735; WAN024CTQ_at; Start 119; Stop 143
cacctagatacagtgttgaatcttt

SEQ ID NO: 132893 - DNA, 25 bp, Artificial
  probe
  misc_feature (1)..(25): SEQ ID NO: 6735; WAN024CTQ_at; Start 100; Stop 124
tcttgttctacacgagtttcaccta

SEQ ID NO: 132894 - DNA, 25 bp, Artificial
  probe
  misc_feature (1)..(25): SEQ ID NO: 6735; WAN024CTQ_at; Start 211; Stop 235
gcagcaactgtcttctcagaaactg

SEQ ID NO: 132895 - DNA, 25 bp, Artificial
  probe
  misc_feature (1)..(25): SEQ ID NO: 6735; WAN024CTQ_at; Start 302; Stop 326
caagtactggaaagctatcttctcc

SEQ ID NO: 132896 - DNA, 25 bp, Artificial
  probe
  misc_feature (1)..(25): SEQ ID NO: 6735; WAN024CTQ_at; Start 266; Stop 290
ccttgacttgttttccactttctga

SEQ ID NO: 132897 - DNA, 25 bp, Artificial
  probe
  misc_feature (1)..(25): SEQ ID NO: 6735; WAN024CTQ_at; Start 219; Stop 243
tgtcttctcagaaactggtttttcc

SEQ ID NO: 132898 - DNA, 25 bp, Artificial
  probe
  misc_feature (1)..(25): SEQ ID NO: 6735; WAN024CTQ_at; Start 12; Stop 36
cggaacttctaccacttcacggagt

SEQ ID NO: 132899 - DNA, 25 bp, Artificial
  probe
  misc_feature (1)..(25): SEQ ID NO: 6735; WAN024CTQ_at; Start 233; Stop 257
ctggtttttccttagtcaagtggat

SEQ ID NO: 132900 - DNA, 25 bp, Artificial
  probe
  misc_feature (1)..(25): SEQ ID NO: 6735; WAN024CTQ_at; Start 146; Stop 170
tctcaactgtcttgtatgccaaatc

SEQ ID NO: 132901 - DNA, 25 bp, Artificial
  probe
  misc_feature (1)..(25): SEQ ID NO: 6735; WAN024CTQ_at; Start 176; Stop 200
caacaaattcgatttttggaagatc

SEQ ID NO: 132902 - DNA, 25 bp, Artificial
  probe
  misc_feature (1)..(25): SEQ ID NO: 6735; WAN024CTQ_at; Start 276; Stop 300
ttttccactttctgaaacgaggcga

SEQ ID NO: 132903 - DNA, 25 bp, Artificial
  probe
  misc_feature (1)..(25): SEQ ID NO: 6735; WAN024CTQ_at; Start 33; Stop 57
gagtttttcttccttacttccatca

SEQ ID NO: 132904 - DNA, 25 bp, Artificial
  probe
  misc_feature (1)..(25): SEQ ID NO: 6735; WAN024CTQ_at; Start 205; Stop 229
tgtacagcagcaactgtcttctcag

SEQ ID NO: 132905 - DNA, 25 bp, Artificial
  probe
  misc_feature (1)..(25): SEQ ID NO: 6735; WAN024CTQ_at; Start 108; Stop 132
tacacgagtttcacctagatacagt

SEQ ID NO: 132906 - DNA, 25 bp, Artificial
  probe
  misc_feature (1)..(25): SEQ ID NO: 6735; WAN024CTQ_at; Start 322; Stop 346
tctccactatctaccacagttgaag

SEQ ID NO: 132907 - DNA, 25 bp, Artificial
  probe
  misc_feature (1)..(25): SEQ ID NO: 6735; WAN024CTQ_at; Start 242; Stop 266
ccttagtcaagtggatacggtattc

SEQ ID NO: 132908 - DNA, 25 bp, Artificial
  probe
  misc_feature (1)..(25): SEQ ID NO: 6735; WAN024CTQ_at; Start 89; Stop 113
caacttttccttcttgttctacacg

SEQ ID NO: 132909 - DNA, 25 bp, Artificial
  probe
  misc_feature (1)..(25): SEQ ID NO: 6735; WAN024CTQ_at; Start 159; Stop 183
gtatgccaaatctttttcaacaaat

SEQ ID NO: 132910 - DNA, 25 bp, Artificial
  probe
  misc_feature (1)..(25): SEQ ID NO: 6735; WAN024CTQ_at; Start 2; Stop 26
tgcggtctgtcggaacttctaccac

SEQ ID NO: 132911 - DNA, 25 bp, Artificial
  probe
  misc_feature (1)..(25): SEQ ID NO: 6735; WAN024CTQ_at; Start 288; Stop 312
tgaaacgaggcgaacaagtactgga

SEQ ID NO: 132912 - DNA, 25 bp, Artificial
  probe
  misc_feature (1)..(25): SEQ ID NO: 6735; WAN024CTQ_at; Start 253; Stop 277
tggatacggtattccttgacttgtt

SEQ ID NO: 132913 - DNA, 25 bp, Artificial
  probe
  misc_feature (1)..(25): SEQ ID NO: 6735; WAN024CTQ_at; Start 47; Stop 71
tacttccatcaggattaatcgctgt

SEQ ID NO: 132914 - DNA, 25 bp, Artificial
  probe
  misc_feature (1)..(25): SEQ ID NO: 6735; WAN024CTQ_at; Start 113; Stop 137
gagtttcacctagatacagtgttga

SEQ ID NO: 132915 - DNA, 25 bp, Artificial
  probe
  misc_feature (1)..(25): SEQ ID NO: 6735; WAN024CTQ_at; Start 193; Stop 217
ggaagatcttcttgtacagcagcaa

SEQ ID NO: 132916 - DNA, 25 bp, Artificial
  probe
  misc_feature (1)..(25): SEQ ID NO: 6735; WAN024CTQ_at; Start 197; Stop 221
gatcttcttgtacagcagcaactgt

SEQ ID NO: 132917 - DNA, 25 bp, Artificial
  probe
  misc_feature (1)..(25): SEQ ID NO: 6735; WAN024CTQ_at; Start 281; Stop 305
cactttctgaaacgaggcgaacaag

SEQ ID NO: 132918 - DNA, 25 bp, Artificial
  probe
  misc_feature (1)..(25): SEQ ID NO: 6735; WAN024CTQ_at; Start 136; Stop 160
gaatcttttttctcaactgtcttgt

SEQ ID NO: 132919 - DNA, 25 bp, Artificial
  probe
  misc_feature (1)..(25): SEQ ID NO: 6735; WAN024CTQ_at; Start 310; Stop 334
ggaaagctatcttctccactatcta

SEQ ID NO: 132920 - DNA, 25 bp, Artificial
  probe
  misc_feature (1)..(25): SEQ ID NO: 6735; WAN024CTQ_at; Start 297; Stop 321
gcgaacaagtactggaaagctatct

SEQ ID NO: 132921 - DNA, 25 bp, Artificial
  probe
  misc_feature (1)..(25): SEQ ID NO: 6735; WAN024CTQ_at; Start 9; Stop 33
tgtcggaacttctaccacttcacgg

SEQ ID NO: 132922 - DNA, 25 bp, Artificial
  probe
  misc_feature (1)..(25): SEQ ID NO: 4197; WAN024CTR_at; Start 162; Stop 186
gagtccagtgatagtaacggtaacc

SEQ ID NO: 132923 - DNA, 25 bp, Artificial
  probe
  misc_feature (1)..(25): SEQ ID NO: 4197; WAN024CTR_at; Start 2; Stop 26
tgggttgtacggatggagttaactc

SEQ ID NO: 132924 - DNA, 25 bp, Artificial
  probe
  misc_feature (1)..(25): SEQ ID NO: 4197; WAN024CTR_at; Start 37; Stop 61
catttgtttgagacggcgatattct

SEQ ID NO: 132925 - DNA, 25 bp, Artificial
  probe
  misc_feature (1)..(25): SEQ ID NO: 4197; WAN024CTR_at; Start 188; Stop 212
aacaaatccttcttagcatcaacca

SEQ ID NO: 132926 - DNA, 25 bp, Artificial
  probe
  misc_feature (1)..(25): SEQ ID NO: 4197; WAN024CTR_at; Start 85; Stop 109
aagcgccccatggtcgtggtgcaag

SEQ ID NO: 132927 - DNA, 25 bp, Artificial
  probe
  misc_feature (1)..(25): SEQ ID NO: 4197; WAN024CTR_at; Start 215; Stop 239
tgaccgtcacggtaaacacgcgtaa

SEQ ID NO: 132928 - DNA, 25 bp, Artificial
  probe
  misc_feature (1)..(25): SEQ ID NO: 4197; WAN024CTR_at; Start 102; Stop 126
ggtgcaaggatactccatggaattt

SEQ ID NO: 132929 - DNA, 25 bp, Artificial
  probe
  misc_feature (1)..(25): SEQ ID NO: 4197; WAN024CTR_at; Start 90; Stop 114
ccccatggtcgtggtgcaaggatac

SEQ ID NO: 132930 - DNA, 25 bp, Artificial
  probe
  misc_feature (1)..(25): SEQ ID NO: 4197; WAN024CTR_at; Start 148; Stop 172
gaaaccttcatttggagtccagtga

SEQ ID NO: 132931 - DNA, 25 bp, Artificial
  probe
  misc_feature (1)..(25): SEQ ID NO: 4197; WAN024CTR_at; Start 98; Stop 122
tcgtggtgcaaggatactccatgga

SEQ ID NO: 132932 - DNA, 25 bp, Artificial
  probe
  misc_feature (1)..(25): SEQ ID NO: 4197; WAN024CTR_at; Start 167; Stop 191
cagtgatagtaacggtaaccaaaca

SEQ ID NO: 132933 - DNA, 25 bp, Artificial
  probe
  misc_feature (1)..(25): SEQ ID NO: 4197; WAN024CTR_at; Start 225; Stop 249
ggtaaacacgcgtaatcaattcgta

SEQ ID NO: 132934 - DNA, 25 bp, Artificial
  probe
  misc_feature (1)..(25): SEQ ID NO: 4197; WAN024CTR_at; Start 240; Stop 264
tcaattcgtacaaggcaggtttgtc

SEQ ID NO: 132935 - DNA, 25 bp, Artificial
  probe
  misc_feature (1)..(25): SEQ ID NO: 4197; WAN024CTR_at; Start 18; Stop 42
agttaactcccatctccttcatttg

SEQ ID NO: 132936 - DNA, 25 bp, Artificial
  probe
  misc_feature (1)..(25): SEQ ID NO: 4197; WAN024CTR_at; Start 126; Stop 150
taatacgttcaccattcaaagagaa

SEQ ID NO: 132937 - DNA, 25 bp, Artificial
  probe
  misc_feature (1)..(25): SEQ ID NO: 4197; WAN024CTR_at; Start 246; Stop 270
cgtacaaggcaggtttgtcatttaa

SEQ ID NO: 132938 - DNA, 25 bp, Artificial
  probe
  misc_feature (1)..(25): SEQ ID NO: 4197; WAN024CTR_at; Start 46; Stop 70
gagacggcgatattctgctttatag

SEQ ID NO: 132939 - DNA, 25 bp, Artificial
  probe
  misc_feature (1)..(25): SEQ ID NO: 4197; WAN024CTR_at; Start 144; Stop 168
aagagaaaccttcatttggagtcca

SEQ ID NO: 132940 - DNA, 25 bp, Artificial
  probe
  misc_feature (1)..(25): SEQ ID NO: 4197; WAN024CTR_at; Start 212; Stop 236
aattgaccgtcacggtaaacacgcg

SEQ ID NO: 132941 - DNA, 25 bp, Artificial
  probe
  misc_feature (1)..(25): SEQ ID NO: 4197; WAN024CTR_at; Start 156; Stop 180
catttggagtccagtgatagtaacg

SEQ ID NO: 132942 - DNA, 25 bp, Artificial
  probe
  misc_feature (1)..(25): SEQ ID NO: 4197; WAN024CTR_at; Start 203; Stop 227
gcatcaaccaattgaccgtcacggt

SEQ ID NO: 132943 - DNA, 25 bp, Artificial
  probe
  misc_feature (1)..(25): SEQ ID NO: 4197; WAN024CTR_at; Start 198; Stop 222
tcttagcatcaaccaattgaccgtc

SEQ ID NO: 132944 - DNA, 25 bp, Artificial
  probe
  misc_feature (1)..(25): SEQ ID NO: 4197; WAN024CTR_at; Start 33; Stop 57
ccttcatttgtttgagacggcgata

SEQ ID NO: 132945 - DNA, 25 bp, Artificial
  probe
  misc_feature (1)..(25): SEQ ID NO: 4197; WAN024CTR_at; Start 131; Stop 155
cgttcaccattcaaagagaaacctt

SEQ ID NO: 132946 - DNA, 25 bp, Artificial
  probe
  misc_feature (1)..(25): SEQ ID NO: 4197; WAN024CTR_at; Start 218; Stop 242
ccgtcacggtaaacacgcgtaatca

SEQ ID NO: 132947 - DNA, 25 bp, Artificial
  probe
  misc_feature (1)..(25): SEQ ID NO: 4197; WAN024CTR_at; Start 7; Stop 31
tgtacggatggagttaactcccatc

SEQ ID NO: 132948 - DNA, 25 bp, Artificial
  probe
  misc_feature (1)..(25): SEQ ID NO: 4197; WAN024CTR_at; Start 115; Stop 139
tccatggaatttaatacgttcacca

SEQ ID NO: 132949 - DNA, 25 bp, Artificial
  probe
  misc_feature (1)..(25): SEQ ID NO: 4197; WAN024CTR_at; Start 93; Stop 117
catggtcgtggtgcaaggatactcc

SEQ ID NO: 132950 - DNA, 25 bp, Artificial
  probe
  misc_feature (1)..(25): SEQ ID NO: 4197; WAN024CTR_at; Start 181; Stop 205
gtaaccaaacaaatccttcttagca

SEQ ID NO: 132951 - DNA, 25 bp, Artificial
  probe
  misc_feature (1)..(25): SEQ ID NO: 4197; WAN024CTR_at; Start 81; Stop 105
ctccaagcgccccatggtcgtggtg

SEQ ID NO: 132952 - DNA, 25 bp, Artificial
  probe
  misc_feature (1)..(25): SEQ ID NO: 4197; WAN024CTR_at; Start 66; Stop 90
tatagttttcttctgctccaagcgc

SEQ ID NO: 132953 - DNA, 25 bp, Artificial
  probe
  misc_feature (1)..(25): SEQ ID NO: 4197; WAN024CTR_at; Start 109; Stop 133
ggatactccatggaatttaatacgt

SEQ ID NO: 132954 - DNA, 25 bp, Artificial
  probe
  misc_feature (1)..(25): SEQ ID NO: 4197; WAN024CTR_at; Start 51; Stop 75
ggcgatattctgctttatagttttc

SEQ ID NO: 132955 - DNA, 25 bp, Artificial
  probe
  misc_feature (1)..(25): SEQ ID NO: 4197; WAN024CTR_at; Start 235; Stop 259
cgtaatcaattcgtacaaggcaggt

SEQ ID NO: 132956 - DNA, 25 bp, Artificial
  probe
  misc_feature (1)..(25): SEQ ID NO: 1931; WAN024CTS_at; Start 281; Stop 305
cgcccatcgctggtttgttttttat

SEQ ID NO: 132957 - DNA, 25 bp, Artificial
  probe
  misc_feature (1)..(25): SEQ ID NO: 1931; WAN024CTS_at; Start 116; Stop 140
tccttaataagacgaactgccgctg

SEQ ID NO: 132958 - DNA, 25 bp, Artificial
  probe
  misc_feature (1)..(25): SEQ ID NO: 1931; WAN024CTS_at; Start 137; Stop 161
gctggcttaccagcagtcgtaatct

SEQ ID NO: 132959 - DNA, 25 bp, Artificial
  probe
  misc_feature (1)..(25): SEQ ID NO: 1931; WAN024CTS_at; Start 93; Stop 117
catctgctgcaatcgcatggtcttc

SEQ ID NO: 132960 - DNA, 25 bp, Artificial
  probe
  misc_feature (1)..(25): SEQ ID NO: 1931; WAN024CTS_at; Start 126; Stop 150
gacgaactgccgctggcttaccagc

SEQ ID NO: 132961 - DNA, 25 bp, Artificial
  probe
  misc_feature (1)..(25): SEQ ID NO: 1931; WAN024CTS_at; Start 268; Stop 292
ttcttggtaagtccgcccatcgctg

SEQ ID NO: 132962 - DNA, 25 bp, Artificial
  probe
  misc_feature (1)..(25): SEQ ID NO: 1931; WAN024CTS_at; Start 303; Stop 327
tattgaaagtcttaagaccaagaga

SEQ ID NO: 132963 - DNA, 25 bp, Artificial
  probe
  misc_feature (1)..(25): SEQ ID NO: 1931; WAN024CTS_at; Start 181; Stop 205
gccagattcatcacgagcaattgct

SEQ ID NO: 132964 - DNA, 25 bp, Artificial
  probe
  misc_feature (1)..(25): SEQ ID NO: 1931; WAN024CTS_at; Start 9; Stop 33
ggaagcgaaccagattattagcagt

SEQ ID NO: 132965 - DNA, 25 bp, Artificial
  probe
  misc_feature (1)..(25): SEQ ID NO: 1931; WAN024CTS_at; Start 363; Stop 387
tcgaataagcacgaactggaatctt

SEQ ID NO: 132966 - DNA, 25 bp, Artificial
  probe
  misc_feature (1)..(25): SEQ ID NO: 1931; WAN024CTS_at; Start 149; Stop 173
gcagtcgtaatcttatctcgagcaa

SEQ ID NO: 132967 - DNA, 25 bp, Artificial
  probe
  misc_feature (1)..(25): SEQ ID NO: 1931; WAN024CTS_at; Start 243; Stop 267
gataaagttcattagcatttgcacc

SEQ ID NO: 132968 - DNA, 25 bp, Artificial
  probe
  misc_feature (1)..(25): SEQ ID NO: 1931; WAN024CTS_at; Start 222; Stop 246
gataggcaactttccattcaagata

SEQ ID NO: 132969 - DNA, 25 bp, Artificial
  probe
  misc_feature (1)..(25): SEQ ID NO: 1931; WAN024CTS_at; Start 207; Stop 231
ccaaggtacctggttgataggcaac

SEQ ID NO: 132970 - DNA, 25 bp, Artificial
  probe
  misc_feature (1)..(25): SEQ ID NO: 1931; WAN024CTS_at; Start 31; Stop 55
agttggaaccacattcccctggctg

SEQ ID NO: 132971 - DNA, 25 bp, Artificial
  probe
  misc_feature (1)..(25): SEQ ID NO: 1931; WAN024CTS_at; Start 213; Stop 237
tacctggttgataggcaactttcca

SEQ ID NO: 132972 - DNA, 25 bp, Artificial
  probe
  misc_feature (1)..(25): SEQ ID NO: 1931; WAN024CTS_at; Start 195; Stop 219
gagcaattgcttccaaggtacctgg

SEQ ID NO: 132973 - DNA, 25 bp, Artificial
  probe
  misc_feature (1)..(25): SEQ ID NO: 1931; WAN024CTS_at; Start 318; Stop 342
gaccaagagattttccattcaagaa

SEQ ID NO: 132974 - DNA, 25 bp, Artificial
  probe
  misc_feature (1)..(25): SEQ ID NO: 1931; WAN024CTS_at; Start 79; Stop 103
agtcaagtcttttccatctgctgca

SEQ ID NO: 132975 - DNA, 25 bp, Artificial
  probe
  misc_feature (1)..(25): SEQ ID NO: 1931; WAN024CTS_at; Start 351; Stop 375
cactagaagcattcgaataagcacg

SEQ ID NO: 132976 - DNA, 25 bp, Artificial
  probe
  misc_feature (1)..(25): SEQ ID NO: 1931; WAN024CTS_at; Start 174; Stop 198
tttccttgccagattcatcacgagc

SEQ ID NO: 132977 - DNA, 25 bp, Artificial
  probe
  misc_feature (1)..(25): SEQ ID NO: 1931; WAN024CTS_at; Start 51; Stop 75
ggctgtcaacaatttcatagtagat

SEQ ID NO: 132978 - DNA, 25 bp, Artificial
  probe
  misc_feature (1)..(25): SEQ ID NO: 1931; WAN024CTS_at; Start 46; Stop 70
cccctggctgtcaacaatttcatag

SEQ ID NO: 132979 - DNA, 25 bp, Artificial
  probe
  misc_feature (1)..(25): SEQ ID NO: 1931; WAN024CTS_at; Start 1; Stop 25
atgcaattggaagcgaaccagatta

SEQ ID NO: 132980 - DNA, 25 bp, Artificial
  probe
  misc_feature (1)..(25): SEQ ID NO: 1931; WAN024CTS_at; Start 372; Stop 396
cacgaactggaatcttaccttctga

SEQ ID NO: 132981 - DNA, 25 bp, Artificial
  probe
  misc_feature (1)..(25): SEQ ID NO: 1931; WAN024CTS_at; Start 234; Stop 258
tccattcaagataaagttcattagc

SEQ ID NO: 132982 - DNA, 25 bp, Artificial
  probe
  misc_feature (1)..(25): SEQ ID NO: 1931; WAN024CTS_at; Start 275; Stop 299
taagtccgcccatcgctggtttgtt

SEQ ID NO: 132983 - DNA, 25 bp, Artificial
  probe
  misc_feature (1)..(25): SEQ ID NO: 1931; WAN024CTS_at; Start 120; Stop 144
taataagacgaactgccgctggctt

SEQ ID NO: 132984 - DNA, 25 bp, Artificial
  probe
  misc_feature (1)..(25): SEQ ID NO: 1931; WAN024CTS_at; Start 19; Stop 43
cagattattagcagttggaaccaca

SEQ ID NO: 132985 - DNA, 25 bp, Artificial
  probe
  misc_feature (1)..(25): SEQ ID NO: 1931; WAN024CTS_at; Start 258; Stop 282
catttgcaccttcttggtaagtccg

SEQ ID NO: 132986 - DNA, 25 bp, Artificial
  probe
  misc_feature (1)..(25): SEQ ID NO: 1931; WAN024CTS_at; Start 162; Stop 186
tatctcgagcaatttccttgccaga

SEQ ID NO: 132987 - DNA, 25 bp, Artificial
  probe
  misc_feature (1)..(25): SEQ ID NO: 1931; WAN024CTS_at; Start 336; Stop 360
tcaagaacaattctacactagaagc

SEQ ID NO: 132988 - DNA, 25 bp, Artificial
  probe
  misc_feature (1)..(25): SEQ ID NO: 1931; WAN024CTS_at; Start 101; Stop 125
gcaatcgcatggtcttccttaataa

SEQ ID NO: 132989 - DNA, 25 bp, Artificial
  probe
  misc_feature (1)..(25): SEQ ID NO: 1931; WAN024CTS_at; Start 64; Stop 88
ttcatagtagatgtaagtcaagtct

SEQ ID NO: 132990 - DNA, 25 bp, Artificial
  probe
  misc_feature (1)..(25): SEQ ID NO: 3970; WAN024CTT_at; Start 185; Stop 209
aactgtccagcatagccagcgttgt

SEQ ID NO: 132991 - DNA, 25 bp, Artificial
  probe
  misc_feature (1)..(25): SEQ ID NO: 3970; WAN024CTT_at; Start 34; Stop 58
aacagaaacccattggctttggtag

SEQ ID NO: 132992 - DNA, 25 bp, Artificial
  probe
  misc_feature (1)..(25): SEQ ID NO: 3970; WAN024CTT_at; Start 197; Stop 221
tagccagcgttgtcacggtcaaaag

SEQ ID NO: 132993 - DNA, 25 bp, Artificial
  probe
  misc_feature (1)..(25): SEQ ID NO: 3970; WAN024CTT_at; Start 64; Stop 88
gaagtcatgttttggaatgccggct

SEQ ID NO: 132994 - DNA, 25 bp, Artificial
  probe
  misc_feature (1)..(25): SEQ ID NO: 3970; WAN024CTT_at; Start 170; Stop 194
gtacctgtccagataaactgtccag

SEQ ID NO: 132995 - DNA, 25 bp, Artificial
  probe
  misc_feature (1)..(25): SEQ ID NO: 3970; WAN024CTT_at; Start 82; Stop 106
gccggctgtatctacgataccaaag

SEQ ID NO: 132996 - DNA, 25 bp, Artificial
  probe
  misc_feature (1)..(25): SEQ ID NO: 3970; WAN024CTT_at; Start 30; Stop 54
tcttaacagaaacccattggctttg

SEQ ID NO: 132997 - DNA, 25 bp, Artificial
  probe
  misc_feature (1)..(25): SEQ ID NO: 3970; WAN024CTT_at; Start 158; Stop 182
ccaatatagtccgtacctgtccaga

SEQ ID NO: 132998 - DNA, 25 bp, Artificial
  probe
  misc_feature (1)..(25): SEQ ID NO: 3970; WAN024CTT_at; Start 134; Stop 158
tggttgtgccatggtgtaggttcac

SEQ ID NO: 132999 - DNA, 25 bp, Artificial
  probe
  misc_feature (1)..(25): SEQ ID NO: 3970; WAN024CTT_at; Start 204; Stop 228
cgttgtcacggtcaaaagtccatga

SEQ ID NO: 133000 - DNA, 25 bp, Artificial
  probe
  misc_feature (1)..(25): SEQ ID NO: 3970; WAN024CTT_at; Start 181; Stop 205
gataaactgtccagcatagccagcg

SEQ ID NO: 133001 - DNA, 25 bp, Artificial
  probe
  misc_feature (1)..(25): SEQ ID NO: 3970; WAN024CTT_at; Start 42; Stop 66
cccattggctttggtagagatagaa

SEQ ID NO: 133002 - DNA, 25 bp, Artificial
  probe
  misc_feature (1)..(25): SEQ ID NO: 3970; WAN024CTT_at; Start 200; Stop 224
ccagcgttgtcacggtcaaaagtcc

SEQ ID NO: 133003 - DNA, 25 bp, Artificial
  probe
  misc_feature (1)..(25): SEQ ID NO: 3970; WAN024CTT_at; Start 138; Stop 162
tgtgccatggtgtaggttcaccaat

SEQ ID NO: 133004 - DNA, 25 bp, Artificial
  probe
  misc_feature (1)..(25): SEQ ID NO: 3970; WAN024CTT_at; Start 69; Stop 93
catgttttggaatgccggctgtatc

SEQ ID NO: 133005 - DNA, 25 bp, Artificial
  probe
  misc_feature (1)..(25): SEQ ID NO: 3970; WAN024CTT_at; Start 175; Stop 199
tgtccagataaactgtccagcatag

SEQ ID NO: 133006 - DNA, 25 bp, Artificial
  probe
  misc_feature (1)..(25): SEQ ID NO: 3970; WAN024CTT_at; Start 166; Stop 190
gtccgtacctgtccagataaactgt

SEQ ID NO: 133007 - DNA, 25 bp, Artificial
  probe
  misc_feature (1)..(25): SEQ ID NO: 3970; WAN024CTT_at; Start 123; Stop 147
gagtttgattttggttgtgccatgg

SEQ ID NO: 133008 - DNA, 25 bp, Artificial
  probe
  misc_feature (1)..(25): SEQ ID NO: 3970; WAN024CTT_at; Start 152; Stop 176
ggttcaccaatatagtccgtacctg

SEQ ID NO: 133009 - DNA, 25 bp, Artificial
  probe
  misc_feature (1)..(25): SEQ ID NO: 3970; WAN024CTT_at; Start 27; Stop 51
tcttcttaacagaaacccattggct

SEQ ID NO: 133010 - DNA, 25 bp, Artificial
  probe
  misc_feature (1)..(25): SEQ ID NO: 3970; WAN024CTT_at; Start 76; Stop 100
tggaatgccggctgtatctacgata

SEQ ID NO: 133011 - DNA, 25 bp, Artificial
  probe
  misc_feature (1)..(25): SEQ ID NO: 3970; WAN024CTT_at; Start 190; Stop 214
tccagcatagccagcgttgtcacgg

SEQ ID NO: 133012 - DNA, 25 bp, Artificial
  probe
  misc_feature (1)..(25): SEQ ID NO: 3970; WAN024CTT_at; Start 49; Stop 73
gctttggtagagatagaagtcatgt

SEQ ID NO: 133013 - DNA, 25 bp, Artificial
  probe
  misc_feature (1)..(25): SEQ ID NO: 3970; WAN024CTT_at; Start 148; Stop 172
tgtaggttcaccaatatagtccgta

SEQ ID NO: 133014 - DNA, 25 bp, Artificial
  probe
  misc_feature (1)..(25): SEQ ID NO: 3970; WAN024CTT_at; Start 38; Stop 62
gaaacccattggctttggtagagat

SEQ ID NO: 133015 - DNA, 25 bp, Artificial
  probe
  misc_feature (1)..(25): SEQ ID NO: 3970; WAN024CTT_at; Start 96; Stop 120
cgataccaaagtaagagctcttaac

SEQ ID NO: 133016 - DNA, 25 bp, Artificial
  probe
  misc_feature (1)..(25): SEQ ID NO: 3970; WAN024CTT_at; Start 88; Stop 112
tgtatctacgataccaaagtaagag

SEQ ID NO: 133017 - DNA, 25 bp, Artificial
  probe
  misc_feature (1)..(25): SEQ ID NO: 3970; WAN024CTT_at; Start 78; Stop 102
gaatgccggctgtatctacgatacc

SEQ ID NO: 133018 - DNA, 25 bp, Artificial
  probe
  misc_feature (1)..(25): SEQ ID NO: 3970; WAN024CTT_at; Start 2; Stop 26
tgaggaagaaggtgtaccatcggtt

SEQ ID NO: 133019 - DNA, 25 bp, Artificial
  probe
  misc_feature (1)..(25): SEQ ID NO: 3970; WAN024CTT_at; Start 92; Stop 116
tctacgataccaaagtaagagctct

SEQ ID NO: 133020 - DNA, 25 bp, Artificial
  probe
  misc_feature (1)..(25): SEQ ID NO: 3970; WAN024CTT_at; Start 15; Stop 39
gtaccatcggtttcttcttaacaga

SEQ ID NO: 133021 - DNA, 25 bp, Artificial
  probe
  misc_feature (1)..(25): SEQ ID NO: 3970; WAN024CTT_at; Start 183; Stop 207
taaactgtccagcatagccagcgtt

SEQ ID NO: 133022 - DNA, 25 bp, Artificial
  probe
  misc_feature (1)..(25): SEQ ID NO: 3970; WAN024CTT_at; Start 194; Stop 218
gcatagccagcgttgtcacggtcaa

SEQ ID NO: 133023 - DNA, 25 bp, Artificial
  probe
  misc_feature (1)..(25): SEQ ID NO: 3970; WAN024CTT_at; Start 162; Stop 186
tatagtccgtacctgtccagataaa

SEQ ID NO: 133024 - DNA, 25 bp, Artificial
  probe
  misc_feature (1)..(25): SEQ ID NO: 3964; WAN024CTU_at; Start 351; Stop 375
ctaccacaagggttgcatgaattgg

SEQ ID NO: 133025 - DNA, 25 bp, Artificial
  probe
  misc_feature (1)..(25): SEQ ID NO: 3964; WAN024CTU_at; Start 111; Stop 135
cataggtttgaagagggccaccatc

SEQ ID NO: 133026 - DNA, 25 bp, Artificial
  probe
  misc_feature (1)..(25): SEQ ID NO: 3964; WAN024CTU_at; Start 281; Stop 305
gtaagacctgttactgcctcaccac

SEQ ID NO: 133027 - DNA, 25 bp, Artificial
  probe
  misc_feature (1)..(25): SEQ ID NO: 3964; WAN024CTU_at; Start 306; Stop 330
caaccgttacagttggtactgcagg

SEQ ID NO: 133028 - DNA, 25 bp, Artificial
  probe
  misc_feature (1)..(25): SEQ ID NO: 3964; WAN024CTU_at; Start 54; Stop 78
tttccacttgcaagctcaagtgagc

SEQ ID NO: 133029 - DNA, 25 bp, Artificial
  probe
  misc_feature (1)..(25): SEQ ID NO: 3964; WAN024CTU_at; Start 256; Stop 280
gcggtattgcattggtttttgacta

SEQ ID NO: 133030 - DNA, 25 bp, Artificial
  probe
  misc_feature (1)..(25): SEQ ID NO: 3964; WAN024CTU_at; Start 120; Stop 144
gaagagggccaccatctttaggctg

SEQ ID NO: 133031 - DNA, 25 bp, Artificial
  probe
  misc_feature (1)..(25): SEQ ID NO: 3964; WAN024CTU_at; Start 12; Stop 36
ccgacaatttgacagtttggtcttc

SEQ ID NO: 133032 - DNA, 25 bp, Artificial
  probe
  misc_feature (1)..(25): SEQ ID NO: 3964; WAN024CTU_at; Start 138; Stop 162
taggctgaataaagatgctcgcacg

SEQ ID NO: 133033 - DNA, 25 bp, Artificial
  probe
  misc_feature (1)..(25): SEQ ID NO: 3964; WAN024CTU_at; Start 163; Stop 187
catgccgtttgctgcgcttgcttga

SEQ ID NO: 133034 - DNA, 25 bp, Artificial
  probe
  misc_feature (1)..(25): SEQ ID NO: 3964; WAN024CTU_at; Start 7; Stop 31
tcgaaccgacaatttgacagtttgg

SEQ ID NO: 133035 - DNA, 25 bp, Artificial
  probe
  misc_feature (1)..(25): SEQ ID NO: 3964; WAN024CTU_at; Start 92; Stop 116
tcttcaaggaattgaattgcatagg

SEQ ID NO: 133036 - DNA, 25 bp, Artificial
  probe
  misc_feature (1)..(25): SEQ ID NO: 3964; WAN024CTU_at; Start 82; Stop 106
ttttggcgcttcttcaaggaattga

SEQ ID NO: 133037 - DNA, 25 bp, Artificial
  probe
  misc_feature (1)..(25): SEQ ID NO: 3964; WAN024CTU_at; Start 2; Stop 26
tgagctcgaaccgacaatttgacag

SEQ ID NO: 133038 - DNA, 25 bp, Artificial
  probe
  misc_feature (1)..(25): SEQ ID NO: 3964; WAN024CTU_at; Start 343; Stop 367
gccttcttctaccacaagggttgca

SEQ ID NO: 133039 - DNA, 25 bp, Artificial
  probe
  misc_feature (1)..(25): SEQ ID NO: 3964; WAN024CTU_at; Start 42; Stop 66
gactgtcagctttttccacttgcaa

SEQ ID NO: 133040 - DNA, 25 bp, Artificial
  probe
  misc_feature (1)..(25): SEQ ID NO: 3964; WAN024CTU_at; Start 39; Stop 63
tgagactgtcagctttttccacttg

SEQ ID NO: 133041 - DNA, 25 bp, Artificial
  probe
  misc_feature (1)..(25): SEQ ID NO: 3964; WAN024CTU_at; Start 329; Stop 353
ggtgccgcaggattgccttcttcta

SEQ ID NO: 133042 - DNA, 25 bp, Artificial
  probe
  misc_feature (1)..(25): SEQ ID NO: 3964; WAN024CTU_at; Start 125; Stop 149
gggccaccatctttaggctgaataa

SEQ ID NO: 133043 - DNA, 25 bp, Artificial
  probe
  misc_feature (1)..(25): SEQ ID NO: 3964; WAN024CTU_at; Start 362; Stop 386
gttgcatgaattggttgaccttcta

SEQ ID NO: 133044 - DNA, 25 bp, Artificial
  probe
  misc_feature (1)..(25): SEQ ID NO: 3964; WAN024CTU_at; Start 151; Stop 175
gatgctcgcacgcatgccgtttgct

SEQ ID NO: 133045 - DNA, 25 bp, Artificial
  probe
  misc_feature (1)..(25): SEQ ID NO: 3964; WAN024CTU_at; Start 313; Stop 337
tacagttggtactgcaggtgccgca

SEQ ID NO: 133046 - DNA, 25 bp, Artificial
  probe
  misc_feature (1)..(25): SEQ ID NO: 3964; WAN024CTU_at; Start 105; Stop 129
gaattgcataggtttgaagagggcc

SEQ ID NO: 133047 - DNA, 25 bp, Artificial
  probe
  misc_feature (1)..(25): SEQ ID NO: 3964; WAN024CTU_at; Start 27; Stop 51
tttggtcttctttgagactgtcagc

SEQ ID NO: 133048 - DNA, 25 bp, Artificial
  probe
  misc_feature (1)..(25): SEQ ID NO: 3964; WAN024CTU_at; Start 66; Stop 90
agctcaagtgagcaatttttggcgc

SEQ ID NO: 133049 - DNA, 25 bp, Artificial
  probe
  misc_feature (1)..(25): SEQ ID NO: 3964; WAN024CTU_at; Start 275; Stop 299
tgactagtaagacctgttactgcct

SEQ ID NO: 133050 - DNA, 25 bp, Artificial
  probe
  misc_feature (1)..(25): SEQ ID NO: 3964; WAN024CTU_at; Start 357; Stop 381
caagggttgcatgaattggttgacc

SEQ ID NO: 133051 - DNA, 25 bp, Artificial
  probe
  misc_feature (1)..(25): SEQ ID NO: 3964; WAN024CTU_at; Start 299; Stop 323
tcaccaccaaccgttacagttggta

SEQ ID NO: 133052 - DNA, 25 bp, Artificial
  probe
  misc_feature (1)..(25): SEQ ID NO: 3964; WAN024CTU_at; Start 171; Stop 195
ttgctgcgcttgcttgaagaactgt

SEQ ID NO: 133053 - DNA, 25 bp, Artificial
  probe
  misc_feature (1)..(25): SEQ ID NO: 3964; WAN024CTU_at; Start 264; Stop 288
gcattggtttttgactagtaagacc

SEQ ID NO: 133054 - DNA, 25 bp, Artificial
  probe
  misc_feature (1)..(25): SEQ ID NO: 3964; WAN024CTU_at; Start 78; Stop 102
caatttttggcgcttcttcaaggaa

SEQ ID NO: 133055 - DNA, 25 bp, Artificial
  probe
  misc_feature (1)..(25): SEQ ID NO: 3964; WAN024CTU_at; Start 145; Stop 169
aataaagatgctcgcacgcatgccg

SEQ ID NO: 133056 - DNA, 25 bp, Artificial
  probe
  misc_feature (1)..(25): SEQ ID NO: 3964; WAN024CTU_at; Start 338; Stop 362
ggattgccttcttctaccacaaggg

SEQ ID NO: 133057 - DNA, 25 bp, Artificial
  probe
  misc_feature (1)..(25): SEQ ID NO: 3964; WAN024CTU_at; Start 325; Stop 349
tgcaggtgccgcaggattgccttct

SEQ ID NO: 133058 - DNA, 25 bp, Artificial
  probe
  misc_feature (1)..(25): SEQ ID NO: 5157; WAN024CTV_at; Start 22; Stop 46
ttcacttggtgcaaggaaggtcatc

SEQ ID NO: 133059 - DNA, 25 bp, Artificial
  probe
  misc_feature (1)..(25): SEQ ID NO: 5157; WAN024CTV_at; Start 3; Stop 27
gagtgctttcttgaggcaattcact

SEQ ID NO: 133060 - DNA, 25 bp, Artificial
  probe
  misc_feature (1)..(25): SEQ ID NO: 5157; WAN024CTV_at; Start 10; Stop 34
ttcttgaggcaattcacttggtgca

SEQ ID NO: 133061 - DNA, 25 bp, Artificial
  probe
  misc_feature (1)..(25): SEQ ID NO: 5157; WAN024CTV_at; Start 14; Stop 38
tgaggcaattcacttggtgcaagga

SEQ ID NO: 133062 - DNA, 25 bp, Artificial
  probe
  misc_feature (1)..(25): SEQ ID NO: 5157; WAN024CTV_at; Start 9; Stop 33
tttcttgaggcaattcacttggtgc

SEQ ID NO: 133063 - DNA, 25 bp, Artificial
  probe
  misc_feature (1)..(25): SEQ ID NO: 5157; WAN024CTV_at; Start 38; Stop 62
aaggtcatctcaatcatcgcaacac

SEQ ID NO: 133064 - DNA, 25 bp, Artificial
  probe
  misc_feature (1)..(25): SEQ ID NO: 5157; WAN024CTV_at; Start 18; Stop 42
gcaattcacttggtgcaaggaaggt

SEQ ID NO: 133065 - DNA, 25 bp, Artificial
  probe
  misc_feature (1)..(25): SEQ ID NO: 5157; WAN024CTV_at; Start 74; Stop 98
gctttacgctccatacgccatctca

SEQ ID NO: 133066 - DNA, 25 bp, Artificial
  probe
  misc_feature (1)..(25): SEQ ID NO: 5157; WAN024CTV_at; Start 23; Stop 47
tcacttggtgcaaggaaggtcatct

SEQ ID NO: 133067 - DNA, 25 bp, Artificial
  probe
  misc_feature (1)..(25): SEQ ID NO: 5157; WAN024CTV_at; Start 115; Stop 139
agctttaaatgttacgttgatttca

SEQ ID NO: 133068 - DNA, 25 bp, Artificial
  probe
  misc_feature (1)..(25): SEQ ID NO: 5157; WAN024CTV_at; Start 2; Stop 26
tgagtgctttcttgaggcaattcac

SEQ ID NO: 133069 - DNA, 25 bp, Artificial
  probe
  misc_feature (1)..(25): SEQ ID NO: 5157; WAN024CTV_at; Start 176; Stop 200
acagcttcccaattttctggattgt

SEQ ID NO: 133070 - DNA, 25 bp, Artificial
  probe
  misc_feature (1)..(25): SEQ ID NO: 5157; WAN024CTV_at; Start 17; Stop 41
ggcaattcacttggtgcaaggaagg

SEQ ID NO: 133071 - DNA, 25 bp, Artificial
  probe
  misc_feature (1)..(25): SEQ ID NO: 5157; WAN024CTV_at; Start 177; Stop 201
cagcttcccaattttctggattgtt

SEQ ID NO: 133072 - DNA, 25 bp, Artificial
  probe
  misc_feature (1)..(25): SEQ ID NO: 5157; WAN024CTV_at; Start 120; Stop 144
taaatgttacgttgatttcatcacc

SEQ ID NO: 133073 - DNA, 25 bp, Artificial
  probe
  misc_feature (1)..(25): SEQ ID NO: 5157; WAN024CTV_at; Start 8; Stop 32
ctttcttgaggcaattcacttggtg

SEQ ID NO: 133074 - DNA, 25 bp, Artificial
  probe
  misc_feature (1)..(25): SEQ ID NO: 5157; WAN024CTV_at; Start 37; Stop 61
gaaggtcatctcaatcatcgcaaca

SEQ ID NO: 133075 - DNA, 25 bp, Artificial
  probe
  misc_feature (1)..(25): SEQ ID NO: 5157; WAN024CTV_at; Start 19; Stop 43
caattcacttggtgcaaggaaggtc

SEQ ID NO: 133076 - DNA, 25 bp, Artificial
  probe
  misc_feature (1)..(25): SEQ ID NO: 5157; WAN024CTV_at; Start 20; Stop 44
aattcacttggtgcaaggaaggtca

SEQ ID NO: 133077 - DNA, 25 bp, Artificial
  probe
  misc_feature (1)..(25): SEQ ID NO: 5157; WAN024CTV_at; Start 125; Stop 149
gttacgttgatttcatcaccagctg

SEQ ID NO: 133078 - DNA, 25 bp, Artificial
  probe
  misc_feature (1)..(25): SEQ ID NO: 5157; WAN024CTV_at; Start 124; Stop 148
tgttacgttgatttcatcaccagct

SEQ ID NO: 133079 - DNA, 25 bp, Artificial
  probe
  misc_feature (1)..(25): SEQ ID NO: 5157; WAN024CTV_at; Start 11; Stop 35
tcttgaggcaattcacttggtgcaa

SEQ ID NO: 133080 - DNA, 25 bp, Artificial
  probe
  misc_feature (1)..(25): SEQ ID NO: 5157; WAN024CTV_at; Start 123; Stop 147
atgttacgttgatttcatcaccagc

SEQ ID NO: 133081 - DNA, 25 bp, Artificial
  probe
  misc_feature (1)..(25): SEQ ID NO: 5157; WAN024CTV_at; Start 16; Stop 40
aggcaattcacttggtgcaaggaag

SEQ ID NO: 133082 - DNA, 25 bp, Artificial
  probe
  misc_feature (1)..(25): SEQ ID NO: 5157; WAN024CTV_at; Start 5; Stop 29
gtgctttcttgaggcaattcacttg

SEQ ID NO: 133083 - DNA, 25 bp, Artificial
  probe
  misc_feature (1)..(25): SEQ ID NO: 5157; WAN024CTV_at; Start 12; Stop 36
cttgaggcaattcacttggtgcaag

SEQ ID NO: 133084 - DNA, 25 bp, Artificial
  probe
  misc_feature (1)..(25): SEQ ID NO: 5157; WAN024CTV_at; Start 45; Stop 69
tctcaatcatcgcaacaccgctctt

SEQ ID NO: 133085 - DNA, 25 bp, Artificial
  probe
  misc_feature (1)..(25): SEQ ID NO: 5157; WAN024CTV_at; Start 7; Stop 31
gctttcttgaggcaattcacttggt

SEQ ID NO: 133086 - DNA, 25 bp, Artificial
  probe
  misc_feature (1)..(25): SEQ ID NO: 5157; WAN024CTV_at; Start 36; Stop 60
ggaaggtcatctcaatcatcgcaac

SEQ ID NO: 133087 - DNA, 25 bp, Artificial
  probe
  misc_feature (1)..(25): SEQ ID NO: 5157; WAN024CTV_at; Start 40; Stop 64
ggtcatctcaatcatcgcaacaccg

SEQ ID NO: 133088 - DNA, 25 bp, Artificial
  probe
  misc_feature (1)..(25): SEQ ID NO: 5157; WAN024CTV_at; Start 15; Stop 39
gaggcaattcacttggtgcaaggaa

SEQ ID NO: 133089 - DNA, 25 bp, Artificial
  probe
  misc_feature (1)..(25): SEQ ID NO: 5157; WAN024CTV_at; Start 13; Stop 37
ttgaggcaattcacttggtgcaagg

SEQ ID NO: 133090 - DNA, 25 bp, Artificial
  probe
  misc_feature (1)..(25): SEQ ID NO: 5157; WAN024CTV_at; Start 126; Stop 150
ttacgttgatttcatcaccagctgc

SEQ ID NO: 133091 - DNA, 25 bp, Artificial
  probe
  misc_feature (1)..(25): SEQ ID NO: 5157; WAN024CTV_at; Start 122; Stop 146
aatgttacgttgatttcatcaccag

SEQ ID NO: 133092 - DNA, 25 bp, Artificial
  probe
  misc_feature (1)..(25): SEQ ID NO: 4206; WAN024CTW_at; Start 110; Stop 134
ggttcgatttcaagagatcagagtg

SEQ ID NO: 133093 - DNA, 25 bp, Artificial
  probe
  misc_feature (1)..(25): SEQ ID NO: 4206; WAN024CTW_at; Start 73; Stop 97
tcttgtccttctttcttaccagtaa

SEQ ID NO: 133094 - DNA, 25 bp, Artificial
  probe
  misc_feature (1)..(25): SEQ ID NO: 4206; WAN024CTW_at; Start 105; Stop 129
gacttggttcgatttcaagagatca

SEQ ID NO: 133095 - DNA, 25 bp, Artificial
  probe
  misc_feature (1)..(25): SEQ ID NO: 4206; WAN024CTW_at; Start 153; Stop 177
ccctgcttgttcagttgatttgaca

SEQ ID NO: 133096 - DNA, 25 bp, Artificial
  probe
  misc_feature (1)..(25): SEQ ID NO: 4206; WAN024CTW_at; Start 26; Stop 50
caataatggtctgtacttttggcac

SEQ ID NO: 133097 - DNA, 25 bp, Artificial
  probe
  misc_feature (1)..(25): SEQ ID NO: 4206; WAN024CTW_at; Start 171; Stop 195
tttgacaatggcaacacctttacca

SEQ ID NO: 133098 - DNA, 25 bp, Artificial
  probe
  misc_feature (1)..(25): SEQ ID NO: 4206; WAN024CTW_at; Start 179; Stop 203
tggcaacacctttaccattaaatgc

SEQ ID NO: 133099 - DNA, 25 bp, Artificial
  probe
  misc_feature (1)..(25): SEQ ID NO: 4206; WAN024CTW_at; Start 16; Stop 40
ggtgcctctccaataatggtctgta

SEQ ID NO: 133100 - DNA, 25 bp, Artificial
  probe
  misc_feature (1)..(25): SEQ ID NO: 4206; WAN024CTW_at; Start 216; Stop 240
agaaccatctgcttgcgccttatag

SEQ ID NO: 133101 - DNA, 25 bp, Artificial
  probe
  misc_feature (1)..(25): SEQ ID NO: 4206; WAN024CTW_at; Start 206; Stop 230
tacgaatccaagaaccatctgcttg

SEQ ID NO: 133102 - DNA, 25 bp, Artificial
  probe
  misc_feature (1)..(25): SEQ ID NO: 4206; WAN024CTW_at; Start 202; Stop 226
gctttacgaatccaagaaccatctg

SEQ ID NO: 133103 - DNA, 25 bp, Artificial
  probe
  misc_feature (1)..(25): SEQ ID NO: 4206; WAN024CTW_at; Start 204; Stop 228
tttacgaatccaagaaccatctgct

SEQ ID NO: 133104 - DNA, 25 bp, Artificial
  probe
  misc_feature (1)..(25): SEQ ID NO: 4206; WAN024CTW_at; Start 160; Stop 184
tgttcagttgatttgacaatggcaa

SEQ ID NO: 133105 - DNA, 25 bp, Artificial
  probe
  misc_feature (1)..(25): SEQ ID NO: 4206; WAN024CTW_at; Start 193; Stop 217
ccattaaatgctttacgaatccaag

SEQ ID NO: 133106 - DNA, 25 bp, Artificial
  probe
  misc_feature (1)..(25): SEQ ID NO: 4206; WAN024CTW_at; Start 12; Stop 36
ttcaggtgcctctccaataatggtc

SEQ ID NO: 133107 - DNA, 25 bp, Artificial
  probe
  misc_feature (1)..(25): SEQ ID NO: 4206; WAN024CTW_at; Start 168; Stop 192
tgatttgacaatggcaacaccttta

SEQ ID NO: 133108 - DNA, 25 bp, Artificial
  probe
  misc_feature (1)..(25): SEQ ID NO: 4206; WAN024CTW_at; Start 101; Stop 125
cagtgacttggttcgatttcaagag

SEQ ID NO: 133109 - DNA, 25 bp, Artificial
  probe
  misc_feature (1)..(25): SEQ ID NO: 4206; WAN024CTW_at; Start 1; Stop 25
gtggtaggcatttcaggtgcctctc

SEQ ID NO: 133110 - DNA, 25 bp, Artificial
  probe
  misc_feature (1)..(25): SEQ ID NO: 4206; WAN024CTW_at; Start 209; Stop 233
gaatccaagaaccatctgcttgcgc

SEQ ID NO: 133111 - DNA, 25 bp, Artificial
  probe
  misc_feature (1)..(25): SEQ ID NO: 4206; WAN024CTW_at; Start 147; Stop 171
gaatttccctgcttgttcagttgat

SEQ ID NO: 133112 - DNA, 25 bp, Artificial
  probe
  misc_feature (1)..(25): SEQ ID NO: 4206; WAN024CTW_at; Start 14; Stop 38
caggtgcctctccaataatggtctg

SEQ ID NO: 133113 - DNA, 25 bp, Artificial
  probe
  misc_feature (1)..(25): SEQ ID NO: 4206; WAN024CTW_at; Start 19; Stop 43
gcctctccaataatggtctgtactt

SEQ ID NO: 133114 - DNA, 25 bp, Artificial
  probe
  misc_feature (1)..(25): SEQ ID NO: 4206; WAN024CTW_at; Start 7; Stop 31
ggcatttcaggtgcctctccaataa

SEQ ID NO: 133115 - DNA, 25 bp, Artificial
  probe
  misc_feature (1)..(25): SEQ ID NO: 4206; WAN024CTW_at; Start 79; Stop 103
ccttctttcttaccagtaaagacag

SEQ ID NO: 133116 - DNA, 25 bp, Artificial
  probe
  misc_feature (1)..(25): SEQ ID NO: 4206; WAN024CTW_at; Start 4; Stop 28
gtaggcatttcaggtgcctctccaa

SEQ ID NO: 133117 - DNA, 25 bp, Artificial
  probe
  misc_feature (1)..(25): SEQ ID NO: 4206; WAN024CTW_at; Start 91; Stop 115
ccagtaaagacagtgacttggttcg

SEQ ID NO: 133118 - DNA, 25 bp, Artificial
  probe
  misc_feature (1)..(25): SEQ ID NO: 4206; WAN024CTW_at; Start 116; Stop 140
atttcaagagatcagagtgggcagt

SEQ ID NO: 133119 - DNA, 25 bp, Artificial
  probe
  misc_feature (1)..(25): SEQ ID NO: 4206; WAN024CTW_at; Start 185; Stop 209
cacctttaccattaaatgctttacg

SEQ ID NO: 133120 - DNA, 25 bp, Artificial
  probe
  misc_feature (1)..(25): SEQ ID NO: 4206; WAN024CTW_at; Start 164; Stop 188
cagttgatttgacaatggcaacacc

SEQ ID NO: 133121 - DNA, 25 bp, Artificial
  probe
  misc_feature (1)..(25): SEQ ID NO: 4206; WAN024CTW_at; Start 212; Stop 236
tccaagaaccatctgcttgcgcctt

SEQ ID NO: 133122 - DNA, 25 bp, Artificial
  probe
  misc_feature (1)..(25): SEQ ID NO: 4206; WAN024CTW_at; Start 114; Stop 138
cgatttcaagagatcagagtgggca

SEQ ID NO: 133123 - DNA, 25 bp, Artificial
  probe
  misc_feature (1)..(25): SEQ ID NO: 4206; WAN024CTW_at; Start 97; Stop 121
aagacagtgacttggttcgatttca

SEQ ID NO: 133124 - DNA, 25 bp, Artificial
  probe
  misc_feature (1)..(25): SEQ ID NO: 4206; WAN024CTW_at; Start 197; Stop 221
taaatgctttacgaatccaagaacc

SEQ ID NO: 133125 - DNA, 25 bp, Artificial
  probe
  misc_feature (1)..(25): SEQ ID NO: 4206; WAN024CTW_at; Start 143; Stop 167
gggtgaatttccctgcttgttcagt

SEQ ID NO: 133126 - DNA, 25 bp, Artificial
  probe
  misc_feature (1)..(25): SEQ ID NO: 1657; WAN024CTX_at; Start 158; Stop 182
ccctcatattcagcgttcagagtga

SEQ ID NO: 133127 - DNA, 25 bp, Artificial
  probe
  misc_feature (1)..(25): SEQ ID NO: 1657; WAN024CTX_at; Start 177; Stop 201
gagtgactgctcctggcttatgcaa

SEQ ID NO: 133128 - DNA, 25 bp, Artificial
  probe
  misc_feature (1)..(25): SEQ ID NO: 1657; WAN024CTX_at; Start 204; Stop 228
caagcattcctttacgaattgcgac

SEQ ID NO: 133129 - DNA, 25 bp, Artificial
  probe
  misc_feature (1)..(25): SEQ ID NO: 1657; WAN024CTX_at; Start 17; Stop 41
cctttgtcatactcaactgttactg

SEQ ID NO: 133130 - DNA, 25 bp, Artificial
  probe
  misc_feature (1)..(25): SEQ ID NO: 1657; WAN024CTX_at; Start 44; Stop 68
gctggaagacttggttcctgatgca

SEQ ID NO: 133131 - DNA, 25 bp, Artificial
  probe
  misc_feature (1)..(25): SEQ ID NO: 1657; WAN024CTX_at; Start 9; Stop 33
tagggaaacctttgtcatactcaac

SEQ ID NO: 133132 - DNA, 25 bp, Artificial
  probe
  misc_feature (1)..(25): SEQ ID NO: 1657; WAN024CTX_at; Start 208; Stop 232
cattcctttacgaattgcgacttcc

SEQ ID NO: 133133 - DNA, 25 bp, Artificial
  probe
  misc_feature (1)..(25): SEQ ID NO: 1657; WAN024CTX_at; Start 37; Stop 61
tactgttgctggaagacttggttcc

SEQ ID NO: 133134 - DNA, 25 bp, Artificial
  probe
  misc_feature (1)..(25): SEQ ID NO: 1657; WAN024CTX_at; Start 51; Stop 75
gacttggttcctgatgcaaatctgt

SEQ ID NO: 133135 - DNA, 25 bp, Artificial
  probe
  misc_feature (1)..(25): SEQ ID NO: 1657; WAN024CTX_at; Start 185; Stop 209
gctcctggcttatgcaactcaagca

SEQ ID NO: 133136 - DNA, 25 bp, Artificial
  probe
  misc_feature (1)..(25): SEQ ID NO: 1657; WAN024CTX_at; Start 214; Stop 238
tttacgaattgcgacttccccttca

SEQ ID NO: 133137 - DNA, 25 bp, Artificial
  probe
  misc_feature (1)..(25): SEQ ID NO: 1657; WAN024CTX_at; Start 171; Stop 195
cgttcagagtgactgctcctggctt

SEQ ID NO: 133138 - DNA, 25 bp, Artificial
  probe
  misc_feature (1)..(25): SEQ ID NO: 1657; WAN024CTX_at; Start 101; Stop 125
tgcgcaatcttcttctcagtattgg

SEQ ID NO: 133139 - DNA, 25 bp, Artificial
  probe
  misc_feature (1)..(25): SEQ ID NO: 1657; WAN024CTX_at; Start 197; Stop 221
tgcaactcaagcattcctttacgaa

SEQ ID NO: 133140 - DNA, 25 bp, Artificial
  probe
  misc_feature (1)..(25): SEQ ID NO: 1657; WAN024CTX_at; Start 29; Stop 53
tcaactgttactgttgctggaagac

SEQ ID NO: 133141 - DNA, 25 bp, Artificial
  probe
  misc_feature (1)..(25): SEQ ID NO: 1657; WAN024CTX_at; Start 48; Stop 72
gaagacttggttcctgatgcaaatc

SEQ ID NO: 133142 - DNA, 25 bp, Artificial
  probe
  misc_feature (1)..(25): SEQ ID NO: 1657; WAN024CTX_at; Start 249; Stop 273
agaaggttactttatcagctggtaa

SEQ ID NO: 133143 - DNA, 25 bp, Artificial
  probe
  misc_feature (1)..(25): SEQ ID NO: 1657; WAN024CTX_at; Start 117; Stop 141
cagtattggcttggatagtgagttc

SEQ ID NO: 133144 - DNA, 25 bp, Artificial
  probe
  misc_feature (1)..(25): SEQ ID NO: 1657; WAN024CTX_at; Start 153; Stop 177
tagctccctcatattcagcgttcag

SEQ ID NO: 133145 - DNA, 25 bp, Artificial
  probe
  misc_feature (1)..(25): SEQ ID NO: 1657; WAN024CTX_at; Start 98; Stop 122
gattgcgcaatcttcttctcagtat

SEQ ID NO: 133146 - DNA, 25 bp, Artificial
  probe
  misc_feature (1)..(25): SEQ ID NO: 1657; WAN024CTX_at; Start 108; Stop 132
tcttcttctcagtattggcttggat

SEQ ID NO: 133147 - DNA, 25 bp, Artificial
  probe
  misc_feature (1)..(25): SEQ ID NO: 1657; WAN024CTX_at; Start 120; Stop 144
tattggcttggatagtgagttcaac

SEQ ID NO: 133148 - DNA, 25 bp, Artificial
  probe
  misc_feature (1)..(25): SEQ ID NO: 1657; WAN024CTX_at; Start 33; Stop 57
ctgttactgttgctggaagacttgg

SEQ ID NO: 133149 - DNA, 25 bp, Artificial
  probe
  misc_feature (1)..(25): SEQ ID NO: 1657; WAN024CTX_at; Start 124; Stop 148
ggcttggatagtgagttcaacttgg

SEQ ID NO: 133150 - DNA, 25 bp, Artificial
  probe
  misc_feature (1)..(25): SEQ ID NO: 1657; WAN024CTX_at; Start 226; Stop 250
gacttccccttcaccacttgtagag

SEQ ID NO: 133151 - DNA, 25 bp, Artificial
  probe
  misc_feature (1)..(25): SEQ ID NO: 1657; WAN024CTX_at; Start 190; Stop 214
tggcttatgcaactcaagcattcct

SEQ ID NO: 133152 - DNA, 25 bp, Artificial
  probe
  misc_feature (1)..(25): SEQ ID NO: 1657; WAN024CTX_at; Start 24; Stop 48
catactcaactgttactgttgctgg

SEQ ID NO: 133153 - DNA, 25 bp, Artificial
  probe
  misc_feature (1)..(25): SEQ ID NO: 1657; WAN024CTX_at; Start 167; Stop 191
tcagcgttcagagtgactgctcctg

SEQ ID NO: 133154 - DNA, 25 bp, Artificial
  probe
  misc_feature (1)..(25): SEQ ID NO: 1657; WAN024CTX_at; Start 230; Stop 254
tccccttcaccacttgtagagaagg

SEQ ID NO: 133155 - DNA, 25 bp, Artificial
  probe
  misc_feature (1)..(25): SEQ ID NO: 1657; WAN024CTX_at; Start 181; Stop 205
gactgctcctggcttatgcaactca

SEQ ID NO: 133156 - DNA, 25 bp, Artificial
  probe
  misc_feature (1)..(25): SEQ ID NO: 1657; WAN024CTX_at; Start 246; Stop 270
tagagaaggttactttatcagctgg

SEQ ID NO: 133157 - DNA, 25 bp, Artificial
  probe
  misc_feature (1)..(25): SEQ ID NO: 1657; WAN024CTX_at; Start 164; Stop 188
tattcagcgttcagagtgactgctc

SEQ ID NO: 133158 - DNA, 25 bp, Artificial
  probe
  misc_feature (1)..(25): SEQ ID NO: 1657; WAN024CTX_at; Start 12; Stop 36
ggaaacctttgtcatactcaactgt

SEQ ID NO: 133159 - DNA, 25 bp, Artificial
  probe
  misc_feature (1)..(25): SEQ ID NO: 1657; WAN024CTX_at; Start 237; Stop 261
caccacttgtagagaaggttacttt

SEQ ID NO: 133160 - DNA, 25 bp, Artificial
  probe
  misc_feature (1)..(25): SEQ ID NO: 351; WAN024CTY-3_at; Start 1396; Stop 1420
cagctggtgatgaaatcaacgtaac

SEQ ID NO: 133161 - DNA, 25 bp, Artificial
  probe
  misc_feature (1)..(25): SEQ ID NO: 351; WAN024CTY-3_at; Start 810; Stop 834
tacttcacaggtaaagacggctacg

SEQ ID NO: 133162 - DNA, 25 bp, Artificial
  probe
  misc_feature (1)..(25): SEQ ID NO: 351; WAN024CTY-3_at; Start 687; Stop 711
gaataccgtctgcacttcactaagg

SEQ ID NO: 133163 - DNA, 25 bp, Artificial
  probe
  misc_feature (1)..(25): SEQ ID NO: 351; WAN024CTY-3_at; Start 316; Stop 340
taaaagcccctgctcaactcaaggc

SEQ ID NO: 133164 - DNA, 25 bp, Artificial
  probe
  misc_feature (1)..(25): SEQ ID NO: 351; WAN024CTY-3_at; Start 777; Stop 801
caagcacttgaattgccgactaagg

SEQ ID NO: 133165 - DNA, 25 bp, Artificial
  probe
  misc_feature (1)..(25): SEQ ID NO: 351; WAN024CTY-3_at; Start 481; Stop 505
gacaaacaagaatccaagttgacgg

SEQ ID NO: 133166 - DNA, 25 bp, Artificial
  probe
  misc_feature (1)..(25): SEQ ID NO: 351; WAN024CTY-3_at; Start 619; Stop 643
ttccaagcgttcgtgaaggtgagcc

SEQ ID NO: 133167 - DNA, 25 bp, Artificial
  probe
  misc_feature (1)..(25): SEQ ID NO: 351; WAN024CTY-3_at; Start 218; Stop 242
tggtaagactgtcccaacagctcct

SEQ ID NO: 133168 - DNA, 25 bp, Artificial
  probe
  misc_feature (1)..(25): SEQ ID NO: 351; WAN024CTY-3_at; Start 332; Stop 356
actcaaggctggagaaatgaaccac

SEQ ID NO: 133169 - DNA, 25 bp, Artificial
  probe
  misc_feature (1)..(25): SEQ ID NO: 351; WAN024CTY-3_at; Start 2019; Stop 2043
ggaaccaaaccagtagctcaagaag

SEQ ID NO: 133170 - DNA, 25 bp, Artificial
  probe
  misc_feature (1)..(25): SEQ ID NO: 351; WAN024CTY-3_at; Start 431; Stop 455
tatcacagaggtacaaatctttgcg

SEQ ID NO: 133171 - DNA, 25 bp, Artificial
  probe
  misc_feature (1)..(25): SEQ ID NO: 351; WAN024CTY-3_at; Start 1091; Stop 1115
tcattcagaaaatcgtcgttggaca

SEQ ID NO: 133172 - DNA, 25 bp, Artificial
  probe
  misc_feature (1)..(25): SEQ ID NO: 351; WAN024CTY-3_at; Start 723; Stop 747
ctttctcataaaccagttgctgcgg

SEQ ID NO: 133173 - DNA, 25 bp, Artificial
  probe
  misc_feature (1)..(25): SEQ ID NO: 351; WAN024CTY-3_at; Start 1226; Stop 1250
tgcagatagtggtacggatgcacca

SEQ ID NO: 133174 - DNA, 25 bp, Artificial
  probe
  misc_feature (1)..(25): SEQ ID NO: 351; WAN024CTY-3_at; Start 650; Stop 674
tgtcatcgcgaaagctgaaaatggc

SEQ ID NO: 133175 - DNA, 25 bp, Artificial
  probe
  misc_feature (1)..(25): SEQ ID NO: 351; WAN024CTY-3_at; Start 281; Stop 305
taatgattctgccaactggaaacca

SEQ ID NO: 133176 - DNA, 25 bp, Artificial
  probe
  misc_feature (1)..(25): SEQ ID NO: 351; WAN024CTY-3_at; Start 999; Stop 1023
tatgatgaaaacagtaaccaggcct

SEQ ID NO: 133177 - DNA, 25 bp, Artificial
  probe
  misc_feature (1)..(25): SEQ ID NO: 351; WAN024CTY-3_at; Start 1062; Stop 1086
gaccgcgttgactatctcaatgacg

SEQ ID NO: 133178 - DNA, 25 bp, Artificial
  probe
  misc_feature (1)..(25): SEQ ID NO: 351; WAN024CTY-3_at; Start 671; Stop 695
tggcgacatcttaggagaataccgt

SEQ ID NO: 133179 - DNA, 25 bp, Artificial
  probe
  misc_feature (1)..(25): SEQ ID NO: 351; WAN024CTY-3_at; Start 1719; Stop 1743
tcagaaagtggaaaacaagtcaagg

SEQ ID NO: 133180 - DNA, 25 bp, Artificial
  probe
  misc_feature (1)..(25): SEQ ID NO: 351; WAN024CTY-3_at; Start 1792; Stop 1816
ttgctgctgtacaagaagatcttcc

SEQ ID NO: 133181 - DNA, 25 bp, Artificial
  probe
  misc_feature (1)..(25): SEQ ID NO: 351; WAN024CTY-3_at; Start 738; Stop 762
gttgctgcggttaaacaagctcgct

SEQ ID NO: 133182 - DNA, 25 bp, Artificial
  probe
  misc_feature (1)..(25): SEQ ID NO: 351; WAN024CTY-3_at; Start 1885; Stop 1909
taggtgaaactcgtgtagaacaaga

SEQ ID NO: 133183 - DNA, 25 bp, Artificial
  probe
  misc_feature (1)..(25): SEQ ID NO: 351; WAN024CTY-3_at; Start 1618; Stop 1642
aaggtcaacggccaaaagtctcagt

SEQ ID NO: 133184 - DNA, 25 bp, Artificial
  probe
  misc_feature (1)..(25): SEQ ID NO: 351; WAN024CTY-3_at; Start 1652; Stop 1676
caatcaagtagcttcaactgtggta

SEQ ID NO: 133185 - DNA, 25 bp, Artificial
  probe
  misc_feature (1)..(25): SEQ ID NO: 351; WAN024CTY-3_at; Start 1485; Stop 1509
gttgcgatgattgagatgaccttcc

SEQ ID NO: 133186 - DNA, 25 bp, Artificial
  probe
  misc_feature (1)..(25): SEQ ID NO: 351; WAN024CTY-3_at; Start 2040; Stop 2064
gaagctaaaaaaccacaagtgtcag

SEQ ID NO: 133187 - DNA, 25 bp, Artificial
  probe
  misc_feature (1)..(25): SEQ ID NO: 351; WAN024CTY-3_at; Start 753; Stop 777
caagctcgcttgctacaagtaggtc

SEQ ID NO: 133188 - DNA, 25 bp, Artificial
  probe
  misc_feature (1)..(25): SEQ ID NO: 351; WAN024CTY-3_at; Start 1702; Stop 1726
tacttgttcgcctcgtttcagaaag

SEQ ID NO: 133189 - DNA, 25 bp, Artificial
  probe
  misc_feature (1)..(25): SEQ ID NO: 351; WAN024CTY-3_at; Start 1047; Stop 1071
gacaaaaactctcatgaccgcgttg

SEQ ID NO: 133190 - DNA, 25 bp, Artificial
  probe
  misc_feature (1)..(25): SEQ ID NO: 351; WAN024CTY-3_at; Start 850; Stop 874
cagttgaatgggaagaagttccagc

SEQ ID NO: 133191 - DNA, 25 bp, Artificial
  probe
  misc_feature (1)..(25): SEQ ID NO: 351; WAN024CTY-3_at; Start 2001; Stop 2025
gaccgcatcgtcttggttggaacca

SEQ ID NO: 133192 - DNA, 25 bp, Artificial
  probe
  misc_feature (1)..(25): SEQ ID NO: 351; WAN024CTY-3_at; Start 1137; Stop 1161
tctaatccagaagtatcagcgggtg

SEQ ID NO: 133193 - DNA, 25 bp, Artificial
  probe
  misc_feature (1)..(25): SEQ ID NO: 351; WAN024CTY-3_at; Start 445; Stop 469
aaatctttgcgaaacaagttgcggc

SEQ ID NO: 133194 - DNA, 25 bp, Artificial
  probe
  misc_feature (1)..(25): SEQ ID NO: 2585; WAN024CTY-5_at; Start 1782; Stop 1806
taccatgggagcagataaattccgt

SEQ ID NO: 133195 - DNA, 25 bp, Artificial
  probe
  misc_feature (1)..(25): SEQ ID NO: 2585; WAN024CTY-5_at; Start 263; Stop 287
caactgaggctattgcatctgagaa

SEQ ID NO: 133196 - DNA, 25 bp, Artificial
  probe
  misc_feature (1)..(25): SEQ ID NO: 2585; WAN024CTY-5_at; Start 1465; Stop 1489
gagcaaaccttgcaaatcgcagcag

SEQ ID NO: 133197 - DNA, 25 bp, Artificial
  probe
  misc_feature (1)..(25): SEQ ID NO: 2585; WAN024CTY-5_at; Start 1338; Stop 1362
agtatccttgcaccacgaccatggg

SEQ ID NO: 133198 - DNA, 25 bp, Artificial
  probe
  misc_feature (1)..(25): SEQ ID NO: 2585; WAN024CTY-5_at; Start 1211; Stop 1235
tgattacgcgtgtttaccgtgacgg

SEQ ID NO: 133199 - DNA, 25 bp, Artificial
  probe
  misc_feature (1)..(25): SEQ ID NO: 2585; WAN024CTY-5_at; Start 2130; Stop 2154
tacggactatattggtgaacctaca

SEQ ID NO: 133200 - DNA, 25 bp, Artificial
  probe
  misc_feature (1)..(25): SEQ ID NO: 2585; WAN024CTY-5_at; Start 1765; Stop 1789
gataagactcgctatgttaccatgg

SEQ ID NO: 133201 - DNA, 25 bp, Artificial
  probe
  misc_feature (1)..(25): SEQ ID NO: 2585; WAN024CTY-5_at; Start 1499; Stop 1523
tactcgttcaggaagaggcctttga

SEQ ID NO: 133202 - DNA, 25 bp, Artificial
  probe
  misc_feature (1)..(25): SEQ ID NO: 2585; WAN024CTY-5_at; Start 1100; Stop 1124
cagcgagtcgtaccttaaaagcaca

SEQ ID NO: 133203 - DNA, 25 bp, Artificial
  probe
  misc_feature (1)..(25): SEQ ID NO: 2585; WAN024CTY-5_at; Start 981; Stop 1005
caaggttgaaactcatgtgaccagc

SEQ ID NO: 133204 - DNA, 25 bp, Artificial
  probe
  misc_feature (1)..(25): SEQ ID NO: 2585; WAN024CTY-5_at; Start 1960; Stop 1984
ggaagttactatcgccctgaacgtg

SEQ ID NO: 133205 - DNA, 25 bp, Artificial
  probe
  misc_feature (1)..(25): SEQ ID NO: 2585; WAN024CTY-5_at; Start 1189; Stop 1213
gacaaacctgccttgtacgaattga

SEQ ID NO: 133206 - DNA, 25 bp, Artificial
  probe
  misc_feature (1)..(25): SEQ ID NO: 2585; WAN024CTY-5_at; Start 1123; Stop 1147
catgaatcaacaagcctagatgcga

SEQ ID NO: 133207 - DNA, 25 bp, Artificial
  probe
  misc_feature (1)..(25): SEQ ID NO: 2585; WAN024CTY-5_at; Start 1630; Stop 1654
cgtaccatggtcgaaagaggcaaaa

SEQ ID NO: 133208 - DNA, 25 bp, Artificial
  probe
  misc_feature (1)..(25): SEQ ID NO: 2585; WAN024CTY-5_at; Start 1698; Stop 1722
tgaagctaatggtgatgcccactct

SEQ ID NO: 133209 - DNA, 25 bp, Artificial
  probe
  misc_feature (1)..(25): SEQ ID NO: 2585; WAN024CTY-5_at; Start 328; Stop 352
tctgctaaaccggaagaaaaagctc

SEQ ID NO: 133210 - DNA, 25 bp, Artificial
  probe
  misc_feature (1)..(25): SEQ ID NO: 2585; WAN024CTY-5_at; Start 837; Stop 861
tgcagtcaacaaacagccaagtagc

SEQ ID NO: 133211 - DNA, 25 bp, Artificial
  probe
  misc_feature (1)..(25): SEQ ID NO: 2585; WAN024CTY-5_at; Start 1615; Stop 1639
tctgattttgacctacgtaccatgg

SEQ ID NO: 133212 - DNA, 25 bp, Artificial
  probe
  misc_feature (1)..(25): SEQ ID NO: 2585; WAN024CTY-5_at; Start 1026; Stop 1050
caaagaccatgaacttgtagccgaa

SEQ ID NO: 133213 - DNA, 25 bp, Artificial
  probe
  misc_feature (1)..(25): SEQ ID NO: 2585; WAN024CTY-5_at; Start 2111; Stop 2135
gacagtttatctggacaggtacgga

SEQ ID NO: 133214 - DNA, 25 bp, Artificial
  probe
  misc_feature (1)..(25): SEQ ID NO: 2585; WAN024CTY-5_at; Start 1896; Stop 1920
tagagctaagcatccaaaatggttg

SEQ ID NO: 133215 - DNA, 25 bp, Artificial
  probe
  misc_feature (1)..(25): SEQ ID NO: 2585; WAN024CTY-5_at; Start 589; Stop 613
gaatctcctgcacaaaatgaaggtg

SEQ ID NO: 133216 - DNA, 25 bp, Artificial
  probe
  misc_feature (1)..(25): SEQ ID NO: 2585; WAN024CTY-5_at; Start 1082; Stop 1106
taacaggcttagttcgtacagcgag

SEQ ID NO: 133217 - DNA, 25 bp, Artificial
  probe
  misc_feature (1)..(25): SEQ ID NO: 2585; WAN024CTY-5_at; Start 2202; Stop 2226
tatcgtagatacagccggcattcca

SEQ ID NO: 133218 - DNA, 25 bp, Artificial
  probe
  misc_feature (1)..(25): SEQ ID NO: 2585; WAN024CTY-5_at; Start 382; Stop 406
gaaaaaccgctcaaggaagatgcta

SEQ ID NO: 133219 - DNA, 25 bp, Artificial
  probe
  misc_feature (1)..(25): SEQ ID NO: 2585; WAN024CTY-5_at; Start 154; Stop 178
catactgctgagaaacctaaagagg

SEQ ID NO: 133220 - DNA, 25 bp, Artificial
  probe
  misc_feature (1)..(25): SEQ ID NO: 2585; WAN024CTY-5_at; Start 2079; Stop 2103
gacttttgaccgtgacaacgctggc

SEQ ID NO: 133221 - DNA, 25 bp, Artificial
  probe
  misc_feature (1)..(25): SEQ ID NO: 2585; WAN024CTY-5_at; Start 1282; Stop 1306
cactggactccaaatgaaggtttct

SEQ ID NO: 133222 - DNA, 25 bp, Artificial
  probe
  misc_feature (1)..(25): SEQ ID NO: 2585; WAN024CTY-5_at; Start 1065; Stop 1089
acgaggtggtcatgctgtaacaggc

SEQ ID NO: 133223 - DNA, 25 bp, Artificial
  probe
  misc_feature (1)..(25): SEQ ID NO: 2585; WAN024CTY-5_at; Start 2056; Stop 2080
gggaaaacagcaaccgcttcatgga

SEQ ID NO: 133224 - DNA, 25 bp, Artificial
  probe
  misc_feature (1)..(25): SEQ ID NO: 2585; WAN024CTY-5_at; Start 1989; Stop 2013
gaaacatagcaatggacctgagcgt

SEQ ID NO: 133225 - DNA, 25 bp, Artificial
  probe
  misc_feature (1)..(25): SEQ ID NO: 2585; WAN024CTY-5_at; Start 502; Stop 526
gaagccattaaacctgatgcagacg

SEQ ID NO: 133226 - DNA, 25 bp, Artificial
  probe
  misc_feature (1)..(25): SEQ ID NO: 2585; WAN024CTY-5_at; Start 1833; Stop 1857
gaaaattgctgatgaactcgatgct

SEQ ID NO: 133227 - DNA, 25 bp, Artificial
  probe
  misc_feature (1)..(25): SEQ ID NO: 2585; WAN024CTY-5_at; Start 1572; Stop 1596
aaaagatgccactcacccagaagct

SEQ ID NO: 133228 - DNA, 25 bp, Artificial
  probe
  misc_feature (1)..(25): SEQ ID NO: 4844; WAN024CTY-M_at; Start 521; Stop 545
tcggtgtagataacggagaacaagc

SEQ ID NO: 133229 - DNA, 25 bp, Artificial
  probe
  misc_feature (1)..(25): SEQ ID NO: 4844; WAN024CTY-M_at; Start 1453; Stop 1477
caagtggaaaaagctgacagtctca

SEQ ID NO: 133230 - DNA, 25 bp, Artificial
  probe
  misc_feature (1)..(25): SEQ ID NO: 4844; WAN024CTY-M_at; Start 45; Stop 69
gatggtacaccttcttcctcactgg

SEQ ID NO: 133231 - DNA, 25 bp, Artificial
  probe
  misc_feature (1)..(25): SEQ ID NO: 4844; WAN024CTY-M_at; Start 1816; Stop 1840
gtcacttggcaagctattccgaaag

SEQ ID NO: 133232 - DNA, 25 bp, Artificial
  probe
  misc_feature (1)..(25): SEQ ID NO: 4844; WAN024CTY-M_at; Start 383; Stop 407
ttaaggaagaccatgcgattgcagc

SEQ ID NO: 133233 - DNA, 25 bp, Artificial
  probe
  misc_feature (1)..(25): SEQ ID NO: 4844; WAN024CTY-M_at; Start 621; Stop 645
tgtcaaatcaactgaacaagcaggg

SEQ ID NO: 133234 - DNA, 25 bp, Artificial
  probe
  misc_feature (1)..(25): SEQ ID NO: 4844; WAN024CTY-M_at; Start 342; Stop 366
taagattacgactgctggtaagcca

SEQ ID NO: 133235 - DNA, 25 bp, Artificial
  probe
  misc_feature (1)..(25): SEQ ID NO: 4844; WAN024CTY-M_at; Start 2157; Stop 2181
tgagcaaggtgcaaacatttctgac

SEQ ID NO: 133236 - DNA, 25 bp, Artificial
  probe
  misc_feature (1)..(25): SEQ ID NO: 4844; WAN024CTY-M_at; Start 2136; Stop 2160
tgttcgcgtatctgctcaaactgag

SEQ ID NO: 133237 - DNA, 25 bp, Artificial
  probe
  misc_feature (1)..(25): SEQ ID NO: 4844; WAN024CTY-M_at; Start 28; Stop 52
tctgttaagaagaaaccgatggtac

SEQ ID NO: 133238 - DNA, 25 bp, Artificial
  probe
  misc_feature (1)..(25): SEQ ID NO: 4844; WAN024CTY-M_at; Start 2029; Stop 2053
tcagctaaggttgcatgggatgcga

SEQ ID NO: 133239 - DNA, 25 bp, Artificial
  probe
  misc_feature (1)..(25): SEQ ID NO: 4844; WAN024CTY-M_at; Start 1884; Stop 1908
tgaaggaattgaccttgaagcgcgt

SEQ ID NO: 133240 - DNA, 25 bp, Artificial
  probe
  misc_feature (1)..(25): SEQ ID NO: 4844; WAN024CTY-M_at; Start 213; Stop 237
cagcgatgggcggacttaccaagaa

SEQ ID NO: 133241 - DNA, 25 bp, Artificial
  probe
  misc_feature (1)..(25): SEQ ID NO: 4844; WAN024CTY-M_at; Start 1480; Stop 1504
gaagaccaaactgtcaaattgtcgg

SEQ ID NO: 133242 - DNA, 25 bp, Artificial
  probe
  misc_feature (1)..(25): SEQ ID NO: 4844; WAN024CTY-M_at; Start 1519; Stop 1543
caagatggaacgcaagctgtattac

SEQ ID NO: 133243 - DNA, 25 bp, Artificial
  probe
  misc_feature (1)..(25): SEQ ID NO: 4844; WAN024CTY-M_at; Start 365; Stop 389
cagcggcagttcgtcttattaagga

SEQ ID NO: 133244 - DNA, 25 bp, Artificial
  probe
  misc_feature (1)..(25): SEQ ID NO: 4844; WAN024CTY-M_at; Start 2; Stop 26
tctatctctaccaaagccaatgggt

SEQ ID NO: 133245 - DNA, 25 bp, Artificial
  probe
  misc_feature (1)..(25): SEQ ID NO: 4844; WAN024CTY-M_at; Start 61; Stop 85
cctcactggaactgggaaaacaaag

SEQ ID NO: 133246 - DNA, 25 bp, Artificial
  probe
  misc_feature (1)..(25): SEQ ID NO: 4844; WAN024CTY-M_at; Start 1608; Stop 1632
tgagttgcataagccaggagcagtc

SEQ ID NO: 133247 - DNA, 25 bp, Artificial
  probe
  misc_feature (1)..(25): SEQ ID NO: 4844; WAN024CTY-M_at; Start 2052; Stop 2076
gattcgtccagagcaatacgctaag

SEQ ID NO: 133248 - DNA, 25 bp, Artificial
  probe
  misc_feature (1)..(25): SEQ ID NO: 4844; WAN024CTY-M_at; Start 1503; Stop 1527
ggttcgagctcactatcaagatgga

SEQ ID NO: 133249 - DNA, 25 bp, Artificial
  probe
  misc_feature (1)..(25): SEQ ID NO: 4844; WAN024CTY-M_at; Start 1900; Stop 1924
gaagcgcgtgcaaaagtctctgtag

SEQ ID NO: 133250 - DNA, 25 bp, Artificial
  probe
  misc_feature (1)..(25): SEQ ID NO: 4844; WAN024CTY-M_at; Start 558; Stop 582
ctataaggcgcaagcagatggttct

SEQ ID NO: 133251 - DNA, 25 bp, Artificial
  probe
  misc_feature (1)..(25): SEQ ID NO: 4844; WAN024CTY-M_at; Start 486; Stop 510
ggttcgcttccaattgcatggccaa

SEQ ID NO: 133252 - DNA, 25 bp, Artificial
  probe
  misc_feature (1)..(25): SEQ ID NO: 4844; WAN024CTY-M_at; Start 1371; Stop 1395
tcagcctaaagatggtggccctctt

SEQ ID NO: 133253 - DNA, 25 bp, Artificial
  probe
  misc_feature (1)..(25): SEQ ID NO: 4844; WAN024CTY-M_at; Start 2014; Stop 2038
aatggtcacgtttcatcagctaagg

SEQ ID NO: 133254 - DNA, 25 bp, Artificial
  probe
  misc_feature (1)..(25): SEQ ID NO: 4844; WAN024CTY-M_at; Start 2172; Stop 2196
catttctgaccaatggaccggttca

SEQ ID NO: 133255 - DNA, 25 bp, Artificial
  probe
  misc_feature (1)..(25): SEQ ID NO: 4844; WAN024CTY-M_at; Start 1147; Stop 1171
catgcaacccttgtggtagaagaag

SEQ ID NO: 133256 - DNA, 25 bp, Artificial
  probe
  misc_feature (1)..(25): SEQ ID NO: 4844; WAN024CTY-M_at; Start 501; Stop 525
gcatggccaaggtcaactggtcggt

SEQ ID NO: 133257 - DNA, 25 bp, Artificial
  probe
  misc_feature (1)..(25): SEQ ID NO: 4844; WAN024CTY-M_at; Start 402; Stop 426
tgcagcagatggaaaagacttgact

SEQ ID NO: 133258 - DNA, 25 bp, Artificial
  probe
  misc_feature (1)..(25): SEQ ID NO: 4844; WAN024CTY-M_at; Start 101; Stop 125
tagctgactcagaaggtaagattcc

SEQ ID NO: 133259 - DNA, 25 bp, Artificial
  probe
  misc_feature (1)..(25): SEQ ID NO: 4844; WAN024CTY-M_at; Start 1953; Stop 1977
tgtgacaactccaatcgcagaagca

SEQ ID NO: 133260 - DNA, 25 bp, Artificial
  probe
  misc_feature (1)..(25): SEQ ID NO: 4844; WAN024CTY-M_at; Start 2187; Stop 2211
gaccggttcagaattgccacttgcc

SEQ ID NO: 133261 - DNA, 25 bp, Artificial
  probe
  misc_feature (1)..(25): SEQ ID NO: 4844; WAN024CTY-M_at; Start 1328; Stop 1352
ttcaagcaagcgcagcaaacggcat

SEQ ID NO: 133262 - DNA, 25 bp, Artificial
  probe
  misc_feature (1)..(25): SEQ ID NO: 975; WAN024CTZ_at; Start 1997; Stop 2021
ataagcaaaatggaattgcaccagc

SEQ ID NO: 133263 - DNA, 25 bp, Artificial
  probe
  misc_feature (1)..(25): SEQ ID NO: 975; WAN024CTZ_at; Start 306; Stop 330
ggctggtgccttgtctggtcaaaag

SEQ ID NO: 133264 - DNA, 25 bp, Artificial
  probe
  misc_feature (1)..(25): SEQ ID NO: 975; WAN024CTZ_at; Start 1654; Stop 1678
caaaaacgggtgattgataagtctg

SEQ ID NO: 133265 - DNA, 25 bp, Artificial
  probe
  misc_feature (1)..(25): SEQ ID NO: 975; WAN024CTZ_at; Start 1139; Stop 1163
ttcgtggagttgtcggtcaagttgc

SEQ ID NO: 133266 - DNA, 25 bp, Artificial
  probe
  misc_feature (1)..(25): SEQ ID NO: 975; WAN024CTZ_at; Start 1729; Stop 1753
ggtattagttcatcgcctgcagact

SEQ ID NO: 133267 - DNA, 25 bp, Artificial
  probe
  misc_feature (1)..(25): SEQ ID NO: 975; WAN024CTZ_at; Start 1170; Stop 1194
tgataaaactggattccggaatttc

SEQ ID NO: 133268 - DNA, 25 bp, Artificial
  probe
  misc_feature (1)..(25): SEQ ID NO: 975; WAN024CTZ_at; Start 1647; Stop 1671
aaattcacaaaaacgggtgattgat

SEQ ID NO: 133269 - DNA, 25 bp, Artificial
  probe
  misc_feature (1)..(25): SEQ ID NO: 975; WAN024CTZ_at; Start 1808; Stop 1832
caagtgaccagtgggtaattggtta

SEQ ID NO: 133270 - DNA, 25 bp, Artificial
  probe
  misc_feature (1)..(25): SEQ ID NO: 975; WAN024CTZ_at; Start 127; Stop 151
ggtccgattcgaaaattctggcgtc

SEQ ID NO: 133271 - DNA, 25 bp, Artificial
  probe
  misc_feature (1)..(25): SEQ ID NO: 975; WAN024CTZ_at; Start 646; Stop 670
ggtgtagaagatgcgagtaagaaat

SEQ ID NO: 133272 - DNA, 25 bp, Artificial
  probe
  misc_feature (1)..(25): SEQ ID NO: 975; WAN024CTZ_at; Start 240; Stop 264
caatgtcaatgatttgcaaaatgcc

SEQ ID NO: 133273 - DNA, 25 bp, Artificial
  probe
  misc_feature (1)..(25): SEQ ID NO: 975; WAN024CTZ_at; Start 312; Stop 336
tgccttgtctggtcaaaagggaacc

SEQ ID NO: 133274 - DNA, 25 bp, Artificial
  probe
  misc_feature (1)..(25): SEQ ID NO: 975; WAN024CTZ_at; Start 1768; Stop 1792
aaaactggaacaactgaagcagttt

SEQ ID NO: 133275 - DNA, 25 bp, Artificial
  probe
  misc_feature (1)..(25): SEQ ID NO: 975; WAN024CTZ_at; Start 1652; Stop 1676
cacaaaaacgggtgattgataagtc

SEQ ID NO: 133276 - DNA, 25 bp, Artificial
  probe
  misc_feature (1)..(25): SEQ ID NO: 975; WAN024CTZ_at; Start 1181; Stop 1205
gattccggaatttcaactatgcaac

SEQ ID NO: 133277 - DNA, 25 bp, Artificial
  probe
  misc_feature (1)..(25): SEQ ID NO: 975; WAN024CTZ_at; Start 1986; Stop 2010
tgaaaatgcttataagcaaaatgga

SEQ ID NO: 133278 - DNA, 25 bp, Artificial
  probe
  misc_feature (1)..(25): SEQ ID NO: 975; WAN024CTZ_at; Start 1661; Stop 1685
gggtgattgataagtctgtagctga

SEQ ID NO: 133279 - DNA, 25 bp, Artificial
  probe
  misc_feature (1)..(25): SEQ ID NO: 975; WAN024CTZ_at; Start 988; Stop 1012
aataatggctaccgcatttacacag

SEQ ID NO: 133280 - DNA, 25 bp, Artificial
  probe
  misc_feature (1)..(25): SEQ ID NO: 975; WAN024CTZ_at; Start 246; Stop 270
caatgatttgcaaaatgccttgaaa

SEQ ID NO: 133281 - DNA, 25 bp, Artificial
  probe
  misc_feature (1)..(25): SEQ ID NO: 975; WAN024CTZ_at; Start 1994; Stop 2018
cttataagcaaaatggaattgcacc

SEQ ID NO: 133282 - DNA, 25 bp, Artificial
  probe
  misc_feature (1)..(25): SEQ ID NO: 975; WAN024CTZ_at; Start 1591; Stop 1615
gctcattttattagtagaattgaaa

SEQ ID NO: 133283 - DNA, 25 bp, Artificial
  probe
  misc_feature (1)..(25): SEQ ID NO: 975; WAN024CTZ_at; Start 250; Stop 274
gatttgcaaaatgccttgaaaactc

SEQ ID NO: 133284 - DNA, 25 bp, Artificial
  probe
  misc_feature (1)..(25): SEQ ID NO: 975; WAN024CTZ_at; Start 1137; Stop 1161
agttcgtggagttgtcggtcaagtt

SEQ ID NO: 133285 - DNA, 25 bp, Artificial
  probe
  misc_feature (1)..(25): SEQ ID NO: 975; WAN024CTZ_at; Start 100; Stop 124
agtgatcgaaaaaaattagcccaag

SEQ ID NO: 133286 - DNA, 25 bp, Artificial
  probe
  misc_feature (1)..(25): SEQ ID NO: 975; WAN024CTZ_at; Start 128; Stop 152
gtccgattcgaaaattctggcgtcg

SEQ ID NO: 133287 - DNA, 25 bp, Artificial
  probe
  misc_feature (1)..(25): SEQ ID NO: 975; WAN024CTZ_at; Start 406; Stop 430
tataaaaatgacgggattaactatg

SEQ ID NO: 133288 - DNA, 25 bp, Artificial
  probe
  misc_feature (1)..(25): SEQ ID NO: 975; WAN024CTZ_at; Start 2065; Stop 2089
gatgataatttgtctgatattcgag

SEQ ID NO: 133289 - DNA, 25 bp, Artificial
  probe
  misc_feature (1)..(25): SEQ ID NO: 975; WAN024CTZ_at; Start 1179; Stop 1203
tggattccggaatttcaactatgca

SEQ ID NO: 133290 - DNA, 25 bp, Artificial
  probe
  misc_feature (1)..(25): SEQ ID NO: 975; WAN024CTZ_at; Start 2058; Stop 2082
ccagacagatgataatttgtctgat

SEQ ID NO: 133291 - DNA, 25 bp, Artificial
  probe
  misc_feature (1)..(25): SEQ ID NO: 975; WAN024CTZ_at; Start 1562; Stop 1586
cctttgcaaatgaaggtttaatgcc

SEQ ID NO: 133292 - DNA, 25 bp, Artificial
  probe
  misc_feature (1)..(25): SEQ ID NO: 975; WAN024CTZ_at; Start 1658; Stop 1682
aacgggtgattgataagtctgtagc

SEQ ID NO: 133293 - DNA, 25 bp, Artificial
  probe
  misc_feature (1)..(25): SEQ ID NO: 975; WAN024CTZ_at; Start 304; Stop 328
gaggctggtgccttgtctggtcaaa

SEQ ID NO: 133294 - DNA, 25 bp, Artificial
  probe
  misc_feature (1)..(25): SEQ ID NO: 975; WAN024CTZ_at; Start 1730; Stop 1754
gtattagttcatcgcctgcagacta

SEQ ID NO: 133295 - DNA, 25 bp, Artificial
  probe
  misc_feature (1)..(25): SEQ ID NO: 975; WAN024CTZ_at; Start 1811; Stop 1835
gtgaccagtgggtaattggttatac

SEQ ID NO: 133296 - DNA, 25 bp, Artificial
  probe
  misc_feature (1)..(25): SEQ ID NO: 5255; WAN024CU2_at; Start 271; Stop 295
cagatgattcgtgcctttgttaagt

SEQ ID NO: 133297 - DNA, 25 bp, Artificial
  probe
  misc_feature (1)..(25): SEQ ID NO: 5255; WAN024CU2_at; Start 210; Stop 234
tttggaacgtttgggaagagcgaca

SEQ ID NO: 133298 - DNA, 25 bp, Artificial
  probe
  misc_feature (1)..(25): SEQ ID NO: 5255; WAN024CU2_at; Start 737; Stop 761
gattgctaggaggatggaaacatga

SEQ ID NO: 133299 - DNA, 25 bp, Artificial
  probe
  misc_feature (1)..(25): SEQ ID NO: 5255; WAN024CU2_at; Start 303; Stop 327
atacatgagtcctcgtaaaatcggg

SEQ ID NO: 133300 - DNA, 25 bp, Artificial
  probe
  misc_feature (1)..(25): SEQ ID NO: 5255; WAN024CU2_at; Start 391; Stop 415
gatgctaagatttctgcagaacttc

SEQ ID NO: 133301 - DNA, 25 bp, Artificial
  probe
  misc_feature (1)..(25): SEQ ID NO: 5255; WAN024CU2_at; Start 231; Stop 255
gacagatttcttttccaatgcccct

SEQ ID NO: 133302 - DNA, 25 bp, Artificial
  probe
  misc_feature (1)..(25): SEQ ID NO: 5255; WAN024CU2_at; Start 723; Stop 747
tagttttaaagaacgattgctagga

SEQ ID NO: 133303 - DNA, 25 bp, Artificial
  probe
  misc_feature (1)..(25): SEQ ID NO: 5255; WAN024CU2_at; Start 246; Stop 270
caatgcccctattagtgctgaggaa

SEQ ID NO: 133304 - DNA, 25 bp, Artificial
  probe
  misc_feature (1)..(25): SEQ ID NO: 5255; WAN024CU2_at; Start 659; Stop 683
taacacttgatgaatttgaaacaga

SEQ ID NO: 133305 - DNA, 25 bp, Artificial
  probe
  misc_feature (1)..(25): SEQ ID NO: 5255; WAN024CU2_at; Start 486; Stop 510
tgtgacgtctgcctatctgcccttg

SEQ ID NO: 133306 - DNA, 25 bp, Artificial
  probe
  misc_feature (1)..(25): SEQ ID NO: 5255; WAN024CU2_at; Start 688; Stop 712
cgtgaaatcttacttccaaaagagg

SEQ ID NO: 133307 - DNA, 25 bp, Artificial
  probe
  misc_feature (1)..(25): SEQ ID NO: 5255; WAN024CU2_at; Start 375; Stop 399
gacaggaattcccttggatgctaag

SEQ ID NO: 133308 - DNA, 25 bp, Artificial
  probe
  misc_feature (1)..(25): SEQ ID NO: 5255; WAN024CU2_at; Start 261; Stop 285
tgctgaggaacagatgattcgtgcc

SEQ ID NO: 133309 - DNA, 25 bp, Artificial
  probe
  misc_feature (1)..(25): SEQ ID NO: 5255; WAN024CU2_at; Start 114; Stop 138
gattggtttgactacgatttcttgg

SEQ ID NO: 133310 - DNA, 25 bp, Artificial
  probe
  misc_feature (1)..(25): SEQ ID NO: 5255; WAN024CU2_at; Start 583; Stop 607
gatgccttgacttttgtcgtatcag

SEQ ID NO: 133311 - DNA, 25 bp, Artificial
  probe
  misc_feature (1)..(25): SEQ ID NO: 5255; WAN024CU2_at; Start 327; Stop 351
ggccttggttgctattcagcgtgta

SEQ ID NO: 133312 - DNA, 25 bp, Artificial
  probe
  misc_feature (1)..(25): SEQ ID NO: 5255; WAN024CU2_at; Start 290; Stop 314
ttaagtctgttgaatacatgagtcc

SEQ ID NO: 133313 - DNA, 25 bp, Artificial
  probe
  misc_feature (1)..(25): SEQ ID NO: 5255; WAN024CU2_at; Start 599; Stop 623
tcgtatcagaggaaacgggaggaat

SEQ ID NO: 133314 - DNA, 25 bp, Artificial
  probe
  misc_feature (1)..(25): SEQ ID NO: 5255; WAN024CU2_at; Start 167; Stop 191
ttattgcggcggttgttatcttctc

SEQ ID NO: 133315 - DNA, 25 bp, Artificial
  probe
  misc_feature (1)..(25): SEQ ID NO: 5255; WAN024CU2_at; Start 193; Stop 217
ccagagattcggactggtttggaac

SEQ ID NO: 133316 - DNA, 25 bp, Artificial
  probe
  misc_feature (1)..(25): SEQ ID NO: 5255; WAN024CU2_at; Start 501; Stop 525
tctgcccttgacaaaaaacacaggg

SEQ ID NO: 133317 - DNA, 25 bp, Artificial
  probe
  misc_feature (1)..(25): SEQ ID NO: 5255; WAN024CU2_at; Start 454; Stop 478
ggtgcggtgattatcaaagaagaac

SEQ ID NO: 133318 - DNA, 25 bp, Artificial
  probe
  misc_feature (1)..(25): SEQ ID NO: 5255; WAN024CU2_at; Start 569; Stop 593
tatcagaagtctcagatgccttgac

SEQ ID NO: 133319 - DNA, 25 bp, Artificial
  probe
  misc_feature (1)..(25): SEQ ID NO: 5255; WAN024CU2_at; Start 632; Stop 656
cctataatggaaggtttaagcacaa

SEQ ID NO: 133320 - DNA, 25 bp, Artificial
  probe
  misc_feature (1)..(25): SEQ ID NO: 5255; WAN024CU2_at; Start 51; Stop 75
caagattatgattttggtacgtgga

SEQ ID NO: 133321 - DNA, 25 bp, Artificial
  probe
  misc_feature (1)..(25): SEQ ID NO: 5255; WAN024CU2_at; Start 175; Stop 199
gcggttgttatcttctctccagaga

SEQ ID NO: 133322 - DNA, 25 bp, Artificial
  probe
  misc_feature (1)..(25): SEQ ID NO: 5255; WAN024CU2_at; Start 468; Stop 492
caaagaagaacgtatcgctgtgacg

SEQ ID NO: 133323 - DNA, 25 bp, Artificial
  probe
  misc_feature (1)..(25): SEQ ID NO: 5255; WAN024CU2_at; Start 617; Stop 641
gaggaatttcgataacctataatgg

SEQ ID NO: 133324 - DNA, 25 bp, Artificial
  probe
  misc_feature (1)..(25): SEQ ID NO: 5255; WAN024CU2_at; Start 101; Stop 125
tccttgcaaatatgattggtttgac

SEQ ID NO: 133325 - DNA, 25 bp, Artificial
  probe
  misc_feature (1)..(25): SEQ ID NO: 5255; WAN024CU2_at; Start 552; Stop 576
ccgggcggctatcggtttatcagaa

SEQ ID NO: 133326 - DNA, 25 bp, Artificial
  probe
  misc_feature (1)..(25): SEQ ID NO: 5255; WAN024CU2_at; Start 644; Stop 668
ggtttaagcacaacctaacacttga

SEQ ID NO: 133327 - DNA, 25 bp, Artificial
  probe
  misc_feature (1)..(25): SEQ ID NO: 5255; WAN024CU2_at; Start 531; Stop 555
caaggaatttgggaccagacaccgg

SEQ ID NO: 133328 - DNA, 25 bp, Artificial
  probe
  misc_feature (1)..(25): SEQ ID NO: 5255; WAN024CU2_at; Start 30; Stop 54
tacaaaagctattgcaggaaccaag

SEQ ID NO: 133329 - DNA, 25 bp, Artificial
  probe
  misc_feature (1)..(25): SEQ ID NO: 5255; WAN024CU2_at; Start 342; Stop 366
tcagcgtgtacgtaccttgcaggag

SEQ ID NO: 133330 - DNA, 25 bp, Artificial
  probe
  misc_feature (1)..(25): SEQ ID NO: 5821; WAN024CU3_at; Start 83; Stop 107
ccggcattcatagaaagagcaccca

SEQ ID NO: 133331 - DNA, 25 bp, Artificial
  probe
  misc_feature (1)..(25): SEQ ID NO: 5821; WAN024CU3_at; Start 79; Stop 103
gacgccggcattcatagaaagagca

SEQ ID NO: 133332 - DNA, 25 bp, Artificial
  probe
  misc_feature (1)..(25): SEQ ID NO: 5821; WAN024CU3_at; Start 5; Stop 29
tctggacttgttccttttggatagc

SEQ ID NO: 133333 - DNA, 25 bp, Artificial
  probe
  misc_feature (1)..(25): SEQ ID NO: 5821; WAN024CU3_at; Start 171; Stop 195
ctgcgatgtcaaggtagtctttggc

SEQ ID NO: 133334 - DNA, 25 bp, Artificial
  probe
  misc_feature (1)..(25): SEQ ID NO: 5821; WAN024CU3_at; Start 49; Stop 73
attatcagcacttgtttcatcgaag

SEQ ID NO: 133335 - DNA, 25 bp, Artificial
  probe
  misc_feature (1)..(25): SEQ ID NO: 5821; WAN024CU3_at; Start 135; Stop 159
gattttcaccctcatgatcgttcaa

SEQ ID NO: 133336 - DNA, 25 bp, Artificial
  probe
  misc_feature (1)..(25): SEQ ID NO: 5821; WAN024CU3_at; Start 38; Stop 62
agggcaatggtattatcagcacttg

SEQ ID NO: 133337 - DNA, 25 bp, Artificial
  probe
  misc_feature (1)..(25): SEQ ID NO: 5821; WAN024CU3_at; Start 75; Stop 99
ggaagacgccggcattcatagaaag

SEQ ID NO: 133338 - DNA, 25 bp, Artificial
  probe
  misc_feature (1)..(25): SEQ ID NO: 5821; WAN024CU3_at; Start 86; Stop 110
gcattcatagaaagagcacccatct

SEQ ID NO: 133339 - DNA, 25 bp, Artificial
  probe
  misc_feature (1)..(25): SEQ ID NO: 5821; WAN024CU3_at; Start 230; Stop 254
gcaaggtaagttgcgccattgacac

SEQ ID NO: 133340 - DNA, 25 bp, Artificial
  probe
  misc_feature (1)..(25): SEQ ID NO: 5821; WAN024CU3_at; Start 12; Stop 36
ttgttccttttggatagcggatgtt

SEQ ID NO: 133341 - DNA, 25 bp, Artificial
  probe
  misc_feature (1)..(25): SEQ ID NO: 5821; WAN024CU3_at; Start 153; Stop 177
cgttcaagagaattttacctgcgat

SEQ ID NO: 133342 - DNA, 25 bp, Artificial
  probe
  misc_feature (1)..(25): SEQ ID NO: 5821; WAN024CU3_at; Start 46; Stop 70
ggtattatcagcacttgtttcatcg

SEQ ID NO: 133343 - DNA, 25 bp, Artificial
  probe
  misc_feature (1)..(25): SEQ ID NO: 5821; WAN024CU3_at; Start 108; Stop 132
tcttttcatccacatgagcaatctt

SEQ ID NO: 133344 - DNA, 25 bp, Artificial
  probe
  misc_feature (1)..(25): SEQ ID NO: 5821; WAN024CU3_at; Start 99; Stop 123
gagcacccatcttttcatccacatg

SEQ ID NO: 133345 - DNA, 25 bp, Artificial
  probe
  misc_feature (1)..(25): SEQ ID NO: 5821; WAN024CU3_at; Start 204; Stop 228
caaagccaaactggctgaggaagag

SEQ ID NO: 133346 - DNA, 25 bp, Artificial
  probe
  misc_feature (1)..(25): SEQ ID NO: 5821; WAN024CU3_at; Start 183; Stop 207
ggtagtctttggctggaccagcaaa

SEQ ID NO: 133347 - DNA, 25 bp, Artificial
  probe
  misc_feature (1)..(25): SEQ ID NO: 5821; WAN024CU3_at; Start 101; Stop 125
gcacccatcttttcatccacatgag

SEQ ID NO: 133348 - DNA, 25 bp, Artificial
  probe
  misc_feature (1)..(25): SEQ ID NO: 5821; WAN024CU3_at; Start 201; Stop 225
cagcaaagccaaactggctgaggaa

SEQ ID NO: 133349 - DNA, 25 bp, Artificial
  probe
  misc_feature (1)..(25): SEQ ID NO: 5821; WAN024CU3_at; Start 180; Stop 204
caaggtagtctttggctggaccagc

SEQ ID NO: 133350 - DNA, 25 bp, Artificial
  probe
  misc_feature (1)..(25): SEQ ID NO: 5821; WAN024CU3_at; Start 140; Stop 164
tcaccctcatgatcgttcaagagaa

SEQ ID NO: 133351 - DNA, 25 bp, Artificial
  probe
  misc_feature (1)..(25): SEQ ID NO: 5821; WAN024CU3_at; Start 188; Stop 212
tctttggctggaccagcaaagccaa

SEQ ID NO: 133352 - DNA, 25 bp, Artificial
  probe
  misc_feature (1)..(25): SEQ ID NO: 5821; WAN024CU3_at; Start 177; Stop 201
tgtcaaggtagtctttggctggacc

SEQ ID NO: 133353 - DNA, 25 bp, Artificial
  probe
  misc_feature (1)..(25): SEQ ID NO: 5821; WAN024CU3_at; Start 160; Stop 184
gagaattttacctgcgatgtcaagg

SEQ ID NO: 133354 - DNA, 25 bp, Artificial
  probe
  misc_feature (1)..(25): SEQ ID NO: 5821; WAN024CU3_at; Start 224; Stop 248
aagagggcaaggtaagttgcgccat

SEQ ID NO: 133355 - DNA, 25 bp, Artificial
  probe
  misc_feature (1)..(25): SEQ ID NO: 5821; WAN024CU3_at; Start 147; Stop 171
catgatcgttcaagagaattttacc

SEQ ID NO: 133356 - DNA, 25 bp, Artificial
  probe
  misc_feature (1)..(25): SEQ ID NO: 5821; WAN024CU3_at; Start 193; Stop 217
ggctggaccagcaaagccaaactgg

SEQ ID NO: 133357 - DNA, 25 bp, Artificial
  probe
  misc_feature (1)..(25): SEQ ID NO: 5821; WAN024CU3_at; Start 209; Stop 233
ccaaactggctgaggaagagggcaa

SEQ ID NO: 133358 - DNA, 25 bp, Artificial
  probe
  misc_feature (1)..(25): SEQ ID NO: 5821; WAN024CU3_at; Start 90; Stop 114
tcatagaaagagcacccatcttttc

SEQ ID NO: 133359 - DNA, 25 bp, Artificial
  probe
  misc_feature (1)..(25): SEQ ID NO: 5821; WAN024CU3_at; Start 196; Stop 220
tggaccagcaaagccaaactggctg

SEQ ID NO: 133360 - DNA, 25 bp, Artificial
  probe
  misc_feature (1)..(25): SEQ ID NO: 5821; WAN024CU3_at; Start 234; Stop 258
ggtaagttgcgccattgacacctga

SEQ ID NO: 133361 - DNA, 25 bp, Artificial
  probe
  misc_feature (1)..(25): SEQ ID NO: 5821; WAN024CU3_at; Start 8; Stop 32
ggacttgttccttttggatagcgga

SEQ ID NO: 133362 - DNA, 25 bp, Artificial
  probe
  misc_feature (1)..(25): SEQ ID NO: 5821; WAN024CU3_at; Start 165; Stop 189
ttttacctgcgatgtcaaggtagtc

SEQ ID NO: 133363 - DNA, 25 bp, Artificial
  probe
  misc_feature (1)..(25): SEQ ID NO: 5821; WAN024CU3_at; Start 157; Stop 181
caagagaattttacctgcgatgtca

SEQ ID NO: 133364 - DNA, 25 bp, Artificial
  probe
  misc_feature (1)..(25): SEQ ID NO: 1898; WAN024CU4_at; Start 348; Stop 372
ggcttcggacgataagggtcctaca

SEQ ID NO: 133365 - DNA, 25 bp, Artificial
  probe
  misc_feature (1)..(25): SEQ ID NO: 1898; WAN024CU4_at; Start 766; Stop 790
gctggcaaatacaaggtgacgatca

SEQ ID NO: 133366 - DNA, 25 bp, Artificial
  probe
  misc_feature (1)..(25): SEQ ID NO: 1898; WAN024CU4_at; Start 429; Stop 453
gaaagttcgcttcatcgttggaaca

SEQ ID NO: 133367 - DNA, 25 bp, Artificial
  probe
  misc_feature (1)..(25): SEQ ID NO: 1898; WAN024CU4_at; Start 1049; Stop 1073
tccgctatccaaaaggaacaagtcc

SEQ ID NO: 133368 - DNA, 25 bp, Artificial
  probe
  misc_feature (1)..(25): SEQ ID NO: 1898; WAN024CU4_at; Start 360; Stop 384
taagggtcctacaacagcttgttac

SEQ ID NO: 133369 - DNA, 25 bp, Artificial
  probe
  misc_feature (1)..(25): SEQ ID NO: 1898; WAN024CU4_at; Start 733; Stop 757
gaacacaaacttagaggagaactcc

SEQ ID NO: 133370 - DNA, 25 bp, Artificial
  probe
  misc_feature (1)..(25): SEQ ID NO: 1898; WAN024CU4_at; Start 748; Stop 772
ggagaactccaagaagaagctggca

SEQ ID NO: 133371 - DNA, 25 bp, Artificial
  probe
  misc_feature (1)..(25): SEQ ID NO: 1898; WAN024CU4_at; Start 16; Stop 40
tttacagcagaagtagaaaaacgca

SEQ ID NO: 133372 - DNA, 25 bp, Artificial
  probe
  misc_feature (1)..(25): SEQ ID NO: 1898; WAN024CU4_at; Start 1304; Stop 1328
ttgataccatgcaccaagccaatga

SEQ ID NO: 133373 - DNA, 25 bp, Artificial
  probe
  misc_feature (1)..(25): SEQ ID NO: 1898; WAN024CU4_at; Start 241; Stop 265
gaagttctcggaatctttgcccata

SEQ ID NO: 133374 - DNA, 25 bp, Artificial
  probe
  misc_feature (1)..(25): SEQ ID NO: 1898; WAN024CU4_at; Start 956; Stop 980
ctcatgtggatgaaaagatgggtgc

SEQ ID NO: 133375 - DNA, 25 bp, Artificial
  probe
  misc_feature (1)..(25): SEQ ID NO: 1898; WAN024CU4_at; Start 1147; Stop 1171
cactatgtgccaatggaagatccac

SEQ ID NO: 133376 - DNA, 25 bp, Artificial
  probe
  misc_feature (1)..(25): SEQ ID NO: 1898; WAN024CU4_at; Start 1019; Stop 1043
caagtgctgataataccattgccct

SEQ ID NO: 133377 - DNA, 25 bp, Artificial
  probe
  misc_feature (1)..(25): SEQ ID NO: 1898; WAN024CU4_at; Start 464; Stop 488
caggctgggcagacatggactacta

SEQ ID NO: 133378 - DNA, 25 bp, Artificial
  probe
  misc_feature (1)..(25): SEQ ID NO: 1898; WAN024CU4_at; Start 322; Stop 346
aaagatggtcgcctttatgcgcgcg

SEQ ID NO: 133379 - DNA, 25 bp, Artificial
  probe
  misc_feature (1)..(25): SEQ ID NO: 1898; WAN024CU4_at; Start 552; Stop 576
catcaatggtgaaaaaggaaatatc

SEQ ID NO: 133380 - DNA, 25 bp, Artificial
  probe
  misc_feature (1)..(25): SEQ ID NO: 1898; WAN024CU4_at; Start 406; Stop 430
gaattgggtcttccaacttctaaga

SEQ ID NO: 133381 - DNA, 25 bp, Artificial
  probe
  misc_feature (1)..(25): SEQ ID NO: 1898; WAN024CU4_at; Start 718; Stop 742
gatgcctttgttgcagaacacaaac

SEQ ID NO: 133382 - DNA, 25 bp, Artificial
  probe
  misc_feature (1)..(25): SEQ ID NO: 1898; WAN024CU4_at; Start 654; Stop 678
tatggtaccagaatcagcaacagca

SEQ ID NO: 133383 - DNA, 25 bp, Artificial
  probe
  misc_feature (1)..(25): SEQ ID NO: 1898; WAN024CU4_at; Start 480; Stop 504
ggactactactttgagcacgtagga

SEQ ID NO: 133384 - DNA, 25 bp, Artificial
  probe
  misc_feature (1)..(25): SEQ ID NO: 1898; WAN024CU4_at; Start 568; Stop 592
ggaaatatcacggaatacctccact

SEQ ID NO: 133385 - DNA, 25 bp, Artificial
  probe
  misc_feature (1)..(25): SEQ ID NO: 1898; WAN024CU4_at; Start 1063; Stop 1087
ggaacaagtccagaacaaatcaagt

SEQ ID NO: 133386 - DNA, 25 bp, Artificial
  probe
  misc_feature (1)..(25): SEQ ID NO: 1898; WAN024CU4_at; Start 627; Stop 651
cagctttacaggtggtttacgtgaa

SEQ ID NO: 133387 - DNA, 25 bp, Artificial
  probe
  misc_feature (1)..(25): SEQ ID NO: 1898; WAN024CU4_at; Start 668; Stop 692
cagcaacagcagtcgtttcaggtga

SEQ ID NO: 133388 - DNA, 25 bp, Artificial
  probe
  misc_feature (1)..(25): SEQ ID NO: 1898; WAN024CU4_at; Start 587; Stop 611
tccactttgcaggagaaaatacagg

SEQ ID NO: 133389 - DNA, 25 bp, Artificial
  probe
  misc_feature (1)..(25): SEQ ID NO: 1898; WAN024CU4_at; Start 615; Stop 639
tgcccgtcttcacagctttacaggt

SEQ ID NO: 133390 - DNA, 25 bp, Artificial
  probe
  misc_feature (1)..(25): SEQ ID NO: 1898; WAN024CU4_at; Start 1162; Stop 1186
gaagatccacttgtgcaaaccttgt

SEQ ID NO: 133391 - DNA, 25 bp, Artificial
  probe
  misc_feature (1)..(25): SEQ ID NO: 1898; WAN024CU4_at; Start 700; Stop 724
gacttgcaagctaaactagatgcct

SEQ ID NO: 133392 - DNA, 25 bp, Artificial
  probe
  misc_feature (1)..(25): SEQ ID NO: 1898; WAN024CU4_at; Start 788; Stop 812
tcattggtaaatcagcccacggtgc

SEQ ID NO: 133393 - DNA, 25 bp, Artificial
  probe
  misc_feature (1)..(25): SEQ ID NO: 1898; WAN024CU4_at; Start 1224; Stop 1248
tgaacaagtcatcggtggtggaacc

SEQ ID NO: 133394 - DNA, 25 bp, Artificial
  probe
  misc_feature (1)..(25): SEQ ID NO: 1898; WAN024CU4_at; Start 37; Stop 61
cgcaaagaagacctcttggctgact

SEQ ID NO: 133395 - DNA, 25 bp, Artificial
  probe
  misc_feature (1)..(25): SEQ ID NO: 1898; WAN024CU4_at; Start 804; Stop 828
ccacggtgctatgcctgcttcaggt

SEQ ID NO: 133396 - DNA, 25 bp, Artificial
  probe
  misc_feature (1)..(25): SEQ ID NO: 1898; WAN024CU4_at; Start 445; Stop 469
gttggaacagacgaagaatcaggct

SEQ ID NO: 133397 - DNA, 25 bp, Artificial
  probe
  misc_feature (1)..(25): SEQ ID NO: 1898; WAN024CU4_at; Start 1369; Stop 1393
tatgccgaagctatttacgaattga

SEQ ID NO: 133398 - DNA, 25 bp, Artificial
  probe
  misc_feature (1)..(25): SEQ ID NO: 788; WAN024CU5_at; Start 717; Stop 741
cgatgtggattataccgataaggac

SEQ ID NO: 133399 - DNA, 25 bp, Artificial
  probe
  misc_feature (1)..(25): SEQ ID NO: 788; WAN024CU5_at; Start 139; Stop 163
tctgtggtgccagttgaaaattcta

SEQ ID NO: 133400 - DNA, 25 bp, Artificial
  probe
  misc_feature (1)..(25): SEQ ID NO: 788; WAN024CU5_at; Start 554; Stop 578
tgcaagcacaaactgaaaagatgag

SEQ ID NO: 133401 - DNA, 25 bp, Artificial
  probe
  misc_feature (1)..(25): SEQ ID NO: 788; WAN024CU5_at; Start 498; Stop 522
ggaagccaatttcacacgtttctgg

SEQ ID NO: 133402 - DNA, 25 bp, Artificial
  probe
  misc_feature (1)..(25): SEQ ID NO: 788; WAN024CU5_at; Start 610; Stop 634
ggtgcactttataaggccctgtcga

SEQ ID NO: 133403 - DNA, 25 bp, Artificial
  probe
  misc_feature (1)..(25): SEQ ID NO: 788; WAN024CU5_at; Start 627; Stop 651
cctgtcgacctttgcttggcgagga

SEQ ID NO: 133404 - DNA, 25 bp, Artificial
  probe
  misc_feature (1)..(25): SEQ ID NO: 788; WAN024CU5_at; Start 190; Stop 214
gactatctttttcatcaggctcaca

SEQ ID NO: 133405 - DNA, 25 bp, Artificial
  probe
  misc_feature (1)..(25): SEQ ID NO: 788; WAN024CU5_at; Start 63; Stop 87
tcctcatgaggaattgcaggctttt

SEQ ID NO: 133406 - DNA, 25 bp, Artificial
  probe
  misc_feature (1)..(25): SEQ ID NO: 788; WAN024CU5_at; Start 264; Stop 288
ggttccaggccatactaagattgaa

SEQ ID NO: 133407 - DNA, 25 bp, Artificial
  probe
  misc_feature (1)..(25): SEQ ID NO: 788; WAN024CU5_at; Start 28; Stop 52
ggatcattttcacaccacgttgtgc

SEQ ID NO: 133408 - DNA, 25 bp, Artificial
  probe
  misc_feature (1)..(25): SEQ ID NO: 788; WAN024CU5_at; Start 818; Stop 842
caatatcagaccatggaaaggagag

SEQ ID NO: 133409 - DNA, 25 bp, Artificial
  probe
  misc_feature (1)..(25): SEQ ID NO: 788; WAN024CU5_at; Start 798; Stop 822
gggtgcctatcctatttatccaata

SEQ ID NO: 133410 - DNA, 25 bp, Artificial
  probe
  misc_feature (1)..(25): SEQ ID NO: 788; WAN024CU5_at; Start 576; Stop 600
gagtttggccttgacattacctgac

SEQ ID NO: 133411 - DNA, 25 bp, Artificial
  probe
  misc_feature (1)..(25): SEQ ID NO: 788; WAN024CU5_at; Start 311; Stop 335
ccttggctcaaggaaagaaattcat

SEQ ID NO: 133412 - DNA, 25 bp, Artificial
  probe
  misc_feature (1)..(25): SEQ ID NO: 788; WAN024CU5_at; Start 373; Stop 397
gctagtacagcttatgcggcccgtt

SEQ ID NO: 133413 - DNA, 25 bp, Artificial
  probe
  misc_feature (1)..(25): SEQ ID NO: 788; WAN024CU5_at; Start 678; Stop 702
tccactcaagacagcactgggtgaa

SEQ ID NO: 133414 - DNA, 25 bp, Artificial
  probe
  misc_feature (1)..(25): SEQ ID NO: 788; WAN024CU5_at; Start 332; Stop 356
tcatcgatgaacaatatccagaggc

SEQ ID NO: 133415 - DNA, 25 bp, Artificial
  probe
  misc_feature (1)..(25): SEQ ID NO: 788; WAN024CU5_at; Start 250; Stop 274
cagcagttgatggtggttccaggcc

SEQ ID NO: 133416 - DNA, 25 bp, Artificial
  probe
  misc_feature (1)..(25): SEQ ID NO: 788; WAN024CU5_at; Start 435; Stop 459
tgcacctagaagttctgctgaagaa

SEQ ID NO: 133417 - DNA, 25 bp, Artificial
  probe
  misc_feature (1)..(25): SEQ ID NO: 788; WAN024CU5_at; Start 480; Stop 504
cgaggatattcaggaaatggaagcc

SEQ ID NO: 133418 - DNA, 25 bp, Artificial
  probe
  misc_feature (1)..(25): SEQ ID NO: 788; WAN024CU5_at; Start 535; Stop 559
gaaaagcctagtattcccttgcaag

SEQ ID NO: 133419 - DNA, 25 bp, Artificial
  probe
  misc_feature (1)..(25): SEQ ID NO: 788; WAN024CU5_at; Start 2; Stop 26
tgaaaattgcttatctaggtcccaa

SEQ ID NO: 133420 - DNA, 25 bp, Artificial
  probe
  misc_feature (1)..(25): SEQ ID NO: 788; WAN024CU5_at; Start 162; Stop 186
tattgagggtagtgttcatgaaacc

SEQ ID NO: 133421 - DNA, 25 bp, Artificial
  probe
  misc_feature (1)..(25): SEQ ID NO: 788; WAN024CU5_at; Start 205; Stop 229
caggctcacatccaagcagtagcag

SEQ ID NO: 133422 - DNA, 25 bp, Artificial
  probe
  misc_feature (1)..(25): SEQ ID NO: 788; WAN024CU5_at; Start 448; Stop 472
tctgctgaagaatatggattggaac

SEQ ID NO: 133423 - DNA, 25 bp, Artificial
  probe
  misc_feature (1)..(25): SEQ ID NO: 788; WAN024CU5_at; Start 291; Stop 315
gattttttcacatccacaggccttg

SEQ ID NO: 133424 - DNA, 25 bp, Artificial
  probe
  misc_feature (1)..(25): SEQ ID NO: 788; WAN024CU5_at; Start 751; Stop 775
tttgcccaaaaagaattagaagcga

SEQ ID NO: 133425 - DNA, 25 bp, Artificial
  probe
  misc_feature (1)..(25): SEQ ID NO: 788; WAN024CU5_at; Start 359; Stop 383
aaatcgaggtaacagctagtacagc

SEQ ID NO: 133426 - DNA, 25 bp, Artificial
  probe
  misc_feature (1)..(25): SEQ ID NO: 788; WAN024CU5_at; Start 346; Stop 370
tatccagaggctcaaatcgaggtaa

SEQ ID NO: 133427 - DNA, 25 bp, Artificial
  probe
  misc_feature (1)..(25): SEQ ID NO: 788; WAN024CU5_at; Start 96; Stop 120
tacagatgtcatcaaggcttatgag

SEQ ID NO: 133428 - DNA, 25 bp, Artificial
  probe
  misc_feature (1)..(25): SEQ ID NO: 788; WAN024CU5_at; Start 464; Stop 488
gattggaactgattgccgaggatat

SEQ ID NO: 133429 - DNA, 25 bp, Artificial
  probe
  misc_feature (1)..(25): SEQ ID NO: 788; WAN024CU5_at; Start 735; Stop 759
taaggacttggtccactttgcccaa

SEQ ID NO: 133430 - DNA, 25 bp, Artificial
  probe
  misc_feature (1)..(25): SEQ ID NO: 788; WAN024CU5_at; Start 234; Stop 258
cgttcagcctattcatcagcagttg

SEQ ID NO: 133431 - DNA, 25 bp, Artificial
  probe
  misc_feature (1)..(25): SEQ ID NO: 788; WAN024CU5_at; Start 220; Stop 244
gcagtagcagaaatcgttcagccta

SEQ ID NO: 133432 - DNA, 25 bp, Artificial
  probe
  misc_feature (1)..(25): SEQ ID NO: 2121; WAN024CU6_at; Start 524; Stop 548
cgaaatcaaatctggatggccaaaa

SEQ ID NO: 133433 - DNA, 25 bp, Artificial
  probe
  misc_feature (1)..(25): SEQ ID NO: 2121; WAN024CU6_at; Start 260; Stop 284
tcaggttattttgctgttttgccta

SEQ ID NO: 133434 - DNA, 25 bp, Artificial
  probe
  misc_feature (1)..(25): SEQ ID NO: 2121; WAN024CU6_at; Start 320; Stop 344
gatcttccgcctcgtacaggttttg

SEQ ID NO: 133435 - DNA, 25 bp, Artificial
  probe
  misc_feature (1)..(25): SEQ ID NO: 2121; WAN024CU6_at; Start 394; Stop 418
aaccctcttgattgggcaatatgcc

SEQ ID NO: 133436 - DNA, 25 bp, Artificial
  probe
  misc_feature (1)..(25): SEQ ID NO: 2121; WAN024CU6_at; Start 366; Stop 390
tcttacaggaattgcctgatattca

SEQ ID NO: 133437 - DNA, 25 bp, Artificial
  probe
  misc_feature (1)..(25): SEQ ID NO: 2121; WAN024CU6_at; Start 241; Stop 265
tgaagataccttttacaattcaggt

SEQ ID NO: 133438 - DNA, 25 bp, Artificial
  probe
  misc_feature (1)..(25): SEQ ID NO: 2121; WAN024CU6_at; Start 24; Stop 48
gaaagtagatgtctcaaatcgaaag

SEQ ID NO: 133439 - DNA, 25 bp, Artificial
  probe
  misc_feature (1)..(25): SEQ ID NO: 2121; WAN024CU6_at; Start 226; Stop 250
ctggctaggtgtggatgaagatacc

SEQ ID NO: 133440 - DNA, 25 bp, Artificial
  probe
  misc_feature (1)..(25): SEQ ID NO: 2121; WAN024CU6_at; Start 129; Stop 153
aaactgctcgcatcaatatcatcgg

SEQ ID NO: 133441 - DNA, 25 bp, Artificial
  probe
  misc_feature (1)..(25): SEQ ID NO: 2121; WAN024CU6_at; Start 51; Stop 75
tcaaacaggctatcatggcggattc

SEQ ID NO: 133442 - DNA, 25 bp, Artificial
  probe
  misc_feature (1)..(25): SEQ ID NO: 2121; WAN024CU6_at; Start 544; Stop 568
caaaaatccttggtttgaggcagaa

SEQ ID NO: 133443 - DNA, 25 bp, Artificial
  probe
  misc_feature (1)..(25): SEQ ID NO: 2121; WAN024CU6_at; Start 165; Stop 189
gacttaaaactcaagaagcaggcct

SEQ ID NO: 133444 - DNA, 25 bp, Artificial
  probe
  misc_feature (1)..(25): SEQ ID NO: 2121; WAN024CU6_at; Start 191; Stop 215
tactggaaagataaaagtggtgacc

SEQ ID NO: 133445 - DNA, 25 bp, Artificial
  probe
  misc_feature (1)..(25): SEQ ID NO: 2121; WAN024CU6_at; Start 296; Stop 320
tttccaggacatggcaagtcgggtg

SEQ ID NO: 133446 - DNA, 25 bp, Artificial
  probe
  misc_feature (1)..(25): SEQ ID NO: 2121; WAN024CU6_at; Start 37; Stop 61
tcaaatcgaaagaatcaaacaggct

SEQ ID NO: 133447 - DNA, 25 bp, Artificial
  probe
  misc_feature (1)..(25): SEQ ID NO: 2121; WAN024CU6_at; Start 432; Stop 456
tacaggagaaaatcagtgggaaggt

SEQ ID NO: 133448 - DNA, 25 bp, Artificial
  probe
  misc_feature (1)..(25): SEQ ID NO: 2121; WAN024CU6_at; Start 328; Stop 352
gcctcgtacaggttttgcagaaaaa

SEQ ID NO: 133449 - DNA, 25 bp, Artificial
  probe
  misc_feature (1)..(25): SEQ ID NO: 2121; WAN024CU6_at; Start 485; Stop 509
tatctgccagcctattttccgctag

SEQ ID NO: 133450 - DNA, 25 bp, Artificial
  probe
  misc_feature (1)..(25): SEQ ID NO: 2121; WAN024CU6_at; Start 309; Stop 333
gcaagtcgggtgatcttccgcctcg

SEQ ID NO: 133451 - DNA, 25 bp, Artificial
  probe
  misc_feature (1)..(25): SEQ ID NO: 2121; WAN024CU6_at; Start 379; Stop 403
gcctgatattcagttaaccctcttg

SEQ ID NO: 133452 - DNA, 25 bp, Artificial
  probe
  misc_feature (1)..(25): SEQ ID NO: 2121; WAN024CU6_at; Start 12; Stop 36
tctttttggagggaaagtagatgtc

SEQ ID NO: 133453 - DNA, 25 bp, Artificial
  probe
  misc_feature (1)..(25): SEQ ID NO: 2121; WAN024CU6_at; Start 114; Stop 138
tctttgcagcgccaaaaactgctcg

SEQ ID NO: 133454 - DNA, 25 bp, Artificial
  probe
  misc_feature (1)..(25): SEQ ID NO: 2121; WAN024CU6_at; Start 142; Stop 166
caatatcatcggtcaggctccggga

SEQ ID NO: 133455 - DNA, 25 bp, Artificial
  probe
  misc_feature (1)..(25): SEQ ID NO: 2121; WAN024CU6_at; Start 418; Stop 442
ccaagcctactatttacaggagaaa

SEQ ID NO: 133456 - DNA, 25 bp, Artificial
  probe
  misc_feature (1)..(25): SEQ ID NO: 2121; WAN024CU6_at; Start 2; Stop 26
tgcttggacttctttttggagggaa

SEQ ID NO: 133457 - DNA, 25 bp, Artificial
  probe
  misc_feature (1)..(25): SEQ ID NO: 2121; WAN024CU6_at; Start 271; Stop 295
tgctgttttgcctatggatttctac

SEQ ID NO: 133458 - DNA, 25 bp, Artificial
  probe
  misc_feature (1)..(25): SEQ ID NO: 2121; WAN024CU6_at; Start 559; Stop 583
tgaggcagaagtagtgccagatttg

SEQ ID NO: 133459 - DNA, 25 bp, Artificial
  probe
  misc_feature (1)..(25): SEQ ID NO: 2121; WAN024CU6_at; Start 155; Stop 179
caggctccgggacttaaaactcaag

SEQ ID NO: 133460 - DNA, 25 bp, Artificial
  probe
  misc_feature (1)..(25): SEQ ID NO: 2121; WAN024CU6_at; Start 534; Stop 558
tctggatggccaaaaatccttggtt

SEQ ID NO: 133461 - DNA, 25 bp, Artificial
  probe
  misc_feature (1)..(25): SEQ ID NO: 2121; WAN024CU6_at; Start 407; Stop 431
gggcaatatgcccaagcctactatt

SEQ ID NO: 133462 - DNA, 25 bp, Artificial
  probe
  misc_feature (1)..(25): SEQ ID NO: 2121; WAN024CU6_at; Start 456; Stop 480
taacggagagggtgaaacactataa

SEQ ID NO: 133463 - DNA, 25 bp, Artificial
  probe
  misc_feature (1)..(25): SEQ ID NO: 2121; WAN024CU6_at; Start 48; Stop 72
gaatcaaacaggctatcatggcgga

SEQ ID NO: 133464 - DNA, 25 bp, Artificial
  probe
  misc_feature (1)..(25): SEQ ID NO: 2121; WAN024CU6_at; Start 286; Stop 310
ggatttctactttccaggacatggc

SEQ ID NO: 133465 - DNA, 25 bp, Artificial
  probe
  misc_feature (1)..(25): SEQ ID NO: 2121; WAN024CU6_at; Start 176; Stop 200
caagaagcaggcctttactggaaag

SEQ ID NO: 133466 - DNA, 25 bp, Artificial
  probe
  misc_feature (1)..(25): SEQ ID NO: 7716; WAN024CU7_at; Start 180; Stop 204
caacgccgtagccaattccatgaag

SEQ ID NO: 133467 - DNA, 25 bp, Artificial
  probe
  misc_feature (1)..(25): SEQ ID NO: 7716; WAN024CU7_at; Start 147; Stop 171
tgatagcaacggcaaatccctgaat

SEQ ID NO: 133468 - DNA, 25 bp, Artificial
  probe
  misc_feature (1)..(25): SEQ ID NO: 7716; WAN024CU7_at; Start 116; Stop 140
gcatcaaagtcagccttggttgctc

SEQ ID NO: 133469 - DNA, 25 bp, Artificial
  probe
  misc_feature (1)..(25): SEQ ID NO: 7716; WAN024CU7_at; Start 65; Stop 89
taacgcatggttacaaattcttcag

SEQ ID NO: 133470 - DNA, 25 bp, Artificial
  probe
  misc_feature (1)..(25): SEQ ID NO: 7716; WAN024CU7_at; Start 30; Stop 54
gcagacatatttatatcagcttctt

SEQ ID NO: 133471 - DNA, 25 bp, Artificial
  probe
  misc_feature (1)..(25): SEQ ID NO: 7716; WAN024CU7_at; Start 102; Stop 126
gaattgccacagttgcatcaaagtc

SEQ ID NO: 133472 - DNA, 25 bp, Artificial
  probe
  misc_feature (1)..(25): SEQ ID NO: 7716; WAN024CU7_at; Start 89; Stop 113
gatgcagttgggtgaattgccacag

SEQ ID NO: 133473 - DNA, 25 bp, Artificial
  probe
  misc_feature (1)..(25): SEQ ID NO: 7716; WAN024CU7_at; Start 98; Stop 122
gggtgaattgccacagttgcatcaa

SEQ ID NO: 133474 - DNA, 25 bp, Artificial
  probe
  misc_feature (1)..(25): SEQ ID NO: 7716; WAN024CU7_at; Start 150; Stop 174
tagcaacggcaaatccctgaatcat

SEQ ID NO: 133475 - DNA, 25 bp, Artificial
  probe
  misc_feature (1)..(25): SEQ ID NO: 7716; WAN024CU7_at; Start 107; Stop 131
gccacagttgcatcaaagtcagcct

SEQ ID NO: 133476 - DNA, 25 bp, Artificial
  probe
  misc_feature (1)..(25): SEQ ID NO: 7716; WAN024CU7_at; Start 86; Stop 110
tcagatgcagttgggtgaattgcca

SEQ ID NO: 133477 - DNA, 25 bp, Artificial
  probe
  misc_feature (1)..(25): SEQ ID NO: 7716; WAN024CU7_at; Start 111; Stop 135
cagttgcatcaaagtcagccttggt

SEQ ID NO: 133478 - DNA, 25 bp, Artificial
  probe
  misc_feature (1)..(25): SEQ ID NO: 7716; WAN024CU7_at; Start 137; Stop 161
gctcccattttgatagcaacggcaa

SEQ ID NO: 133479 - DNA, 25 bp, Artificial
  probe
  misc_feature (1)..(25): SEQ ID NO: 7716; WAN024CU7_at; Start 168; Stop 192
gaatcatttcatcaacgccgtagcc

SEQ ID NO: 133480 - DNA, 25 bp, Artificial
  probe
  misc_feature (1)..(25): SEQ ID NO: 7716; WAN024CU7_at; Start 154; Stop 178
aacggcaaatccctgaatcatttca

SEQ ID NO: 133481 - DNA, 25 bp, Artificial
  probe
  misc_feature (1)..(25): SEQ ID NO: 7716; WAN024CU7_at; Start 125; Stop 149
tcagccttggttgctcccattttga

SEQ ID NO: 133482 - DNA, 25 bp, Artificial
  probe
  misc_feature (1)..(25): SEQ ID NO: 7716; WAN024CU7_at; Start 184; Stop 208
gccgtagccaattccatgaagtccg

SEQ ID NO: 133483 - DNA, 25 bp, Artificial
  probe
  misc_feature (1)..(25): SEQ ID NO: 7716; WAN024CU7_at; Start 177; Stop 201
catcaacgccgtagccaattccatg

SEQ ID NO: 133484 - DNA, 25 bp, Artificial
  probe
  misc_feature (1)..(25): SEQ ID NO: 7716; WAN024CU7_at; Start 128; Stop 152
gccttggttgctcccattttgatag

SEQ ID NO: 133485 - DNA, 25 bp, Artificial
  probe
  misc_feature (1)..(25): SEQ ID NO: 7716; WAN024CU7_at; Start 196; Stop 220
tccatgaagtccgacaactttttct

SEQ ID NO: 133486 - DNA, 25 bp, Artificial
  probe
  misc_feature (1)..(25): SEQ ID NO: 7716; WAN024CU7_at; Start 190; Stop 214
gccaattccatgaagtccgacaact

SEQ ID NO: 133487 - DNA, 25 bp, Artificial
  probe
  misc_feature (1)..(25): SEQ ID NO: 7716; WAN024CU7_at; Start 16; Stop 40
tcattaaaaaagaagcagacatatt

SEQ ID NO: 133488 - DNA, 25 bp, Artificial
  probe
  misc_feature (1)..(25): SEQ ID NO: 7716; WAN024CU7_at; Start 70; Stop 94
catggttacaaattcttcagatgca

SEQ ID NO: 133489 - DNA, 25 bp, Artificial
  probe
  misc_feature (1)..(25): SEQ ID NO: 7716; WAN024CU7_at; Start 144; Stop 168
ttttgatagcaacggcaaatccctg

SEQ ID NO: 133490 - DNA, 25 bp, Artificial
  probe
  misc_feature (1)..(25): SEQ ID NO: 7716; WAN024CU7_at; Start 46; Stop 70
cagcttcttttgtttcgattaacgc

SEQ ID NO: 133491 - DNA, 25 bp, Artificial
  probe
  misc_feature (1)..(25): SEQ ID NO: 7716; WAN024CU7_at; Start 171; Stop 195
tcatttcatcaacgccgtagccaat

SEQ ID NO: 133492 - DNA, 25 bp, Artificial
  probe
  misc_feature (1)..(25): SEQ ID NO: 7716; WAN024CU7_at; Start 93; Stop 117
cagttgggtgaattgccacagttgc

SEQ ID NO: 133493 - DNA, 25 bp, Artificial
  probe
  misc_feature (1)..(25): SEQ ID NO: 7716; WAN024CU7_at; Start 51; Stop 75
tcttttgtttcgattaacgcatggt

SEQ ID NO: 133494 - DNA, 25 bp, Artificial
  probe
  misc_feature (1)..(25): SEQ ID NO: 7716; WAN024CU7_at; Start 56; Stop 80
tgtttcgattaacgcatggttacaa

SEQ ID NO: 133495 - DNA, 25 bp, Artificial
  probe
  misc_feature (1)..(25): SEQ ID NO: 7716; WAN024CU7_at; Start 187; Stop 211
gtagccaattccatgaagtccgaca

SEQ ID NO: 133496 - DNA, 25 bp, Artificial
  probe
  misc_feature (1)..(25): SEQ ID NO: 7716; WAN024CU7_at; Start 201; Stop 225
gaagtccgacaactttttcttctga

SEQ ID NO: 133497 - DNA, 25 bp, Artificial
  probe
  misc_feature (1)..(25): SEQ ID NO: 7716; WAN024CU7_at; Start 120; Stop 144
caaagtcagccttggttgctcccat

SEQ ID NO: 133498 - DNA, 25 bp, Artificial
  probe
  misc_feature (1)..(25): SEQ ID NO: 7716; WAN024CU7_at; Start 76; Stop 100
tacaaattcttcagatgcagttggg

SEQ ID NO: 133499 - DNA, 25 bp, Artificial
  probe
  misc_feature (1)..(25): SEQ ID NO: 7716; WAN024CU7_at; Start 79; Stop 103
aaattcttcagatgcagttgggtga

SEQ ID NO: 133500 - DNA, 25 bp, Artificial
  probe
  misc_feature (1)..(25): SEQ ID NO: 1537; WAN024CU8_at; Start 1205; Stop 1229
gacttcatggaattggctacggcgt

SEQ ID NO: 133501 - DNA, 25 bp, Artificial
  probe
  misc_feature (1)..(25): SEQ ID NO: 1537; WAN024CU8_at; Start 526; Stop 550
tatatcgccgttgaattagctggcg

SEQ ID NO: 133502 - DNA, 25 bp, Artificial
  probe
  misc_feature (1)..(25): SEQ ID NO: 1537; WAN024CU8_at; Start 941; Stop 965
aggccggacgtaccctatctgaacg

SEQ ID NO: 133503 - DNA, 25 bp, Artificial
  probe
  misc_feature (1)..(25): SEQ ID NO: 1537; WAN024CU8_at; Start 397; Stop 421
catatcgtgattgctacaggtgccc

SEQ ID NO: 133504 - DNA, 25 bp, Artificial
  probe
  misc_feature (1)..(25): SEQ ID NO: 1537; WAN024CU8_at; Start 1319; Stop 1343
catctgaagaatttgtaaccatgcg

SEQ ID NO: 133505 - DNA, 25 bp, Artificial
  probe
  misc_feature (1)..(25): SEQ ID NO: 1537; WAN024CU8_at; Start 782; Stop 806
gccgtccaaacgttaagggcttgca

SEQ ID NO: 133506 - DNA, 25 bp, Artificial
  probe
  misc_feature (1)..(25): SEQ ID NO: 1537; WAN024CU8_at; Start 1028; Stop 1052
cacaccctgctatcggaactgttgg

SEQ ID NO: 133507 - DNA, 25 bp, Artificial
  probe
  misc_feature (1)..(25): SEQ ID NO: 1537; WAN024CU8_at; Start 240; Stop 264
tgcaaccctacgtcgcaatcgtgaa

SEQ ID NO: 133508 - DNA, 25 bp, Artificial
  probe
  misc_feature (1)..(25): SEQ ID NO: 1537; WAN024CU8_at; Start 40; Stop 64
ggaggaatcgctaccatgaaccgtg

SEQ ID NO: 133509 - DNA, 25 bp, Artificial
  probe
  misc_feature (1)..(25): SEQ ID NO: 1537; WAN024CU8_at; Start 679; Stop 703
cacaaagtccctgtcaagttagaaa

SEQ ID NO: 133510 - DNA, 25 bp, Artificial
  probe
  misc_feature (1)..(25): SEQ ID NO: 1537; WAN024CU8_at; Start 110; Stop 134
taggtggaacctgtgtcaacgtcgg

SEQ ID NO: 133511 - DNA, 25 bp, Artificial
  probe
  misc_feature (1)..(25): SEQ ID NO: 1537; WAN024CU8_at; Start 905; Stop 929
taacgggcgagaaagaactgactcc

SEQ ID NO: 133512 - DNA, 25 bp, Artificial
  probe
  misc_feature (1)..(25): SEQ ID NO: 1537; WAN024CU8_at; Start 731; Stop 755
tcgaagatggtactagtcacacagc

SEQ ID NO: 133513 - DNA, 25 bp, Artificial
  probe
  misc_feature (1)..(25): SEQ ID NO: 1537; WAN024CU8_at; Start 475; Stop 499
gtatttgcctgggaagaacttccag

SEQ ID NO: 133514 - DNA, 25 bp, Artificial
  probe
  misc_feature (1)..(25): SEQ ID NO: 1537; WAN024CU8_at; Start 889; Stop 913
tatgctctaggtgatgtaacgggcg

SEQ ID NO: 133515 - DNA, 25 bp, Artificial
  probe
  misc_feature (1)..(25): SEQ ID NO: 1537; WAN024CU8_at; Start 975; Stop 999
cggaaaaactactgcaaaaatggat

SEQ ID NO: 133516 - DNA, 25 bp, Artificial
  probe
  misc_feature (1)..(25): SEQ ID NO: 1537; WAN024CU8_at; Start 1247; Stop 1271
gatttgccgttgctatcaaaatggg

SEQ ID NO: 133517 - DNA, 25 bp, Artificial
  probe
  misc_feature (1)..(25): SEQ ID NO: 1537; WAN024CU8_at; Start 805; Stop 829
caacttgaaaaagctggagtgactc

SEQ ID NO: 133518 - DNA, 25 bp, Artificial
  probe
  misc_feature (1)..(25): SEQ ID NO: 1537; WAN024CU8_at; Start 923; Stop 947
tgactccagttgcaatcaaggccgg

SEQ ID NO: 133519 - DNA, 25 bp, Artificial
  probe
  misc_feature (1)..(25): SEQ ID NO: 1537; WAN024CU8_at; Start 572; Stop 596
agacagatctctttgttcgccgcga

SEQ ID NO: 133520 - DNA, 25 bp, Artificial
  probe
  misc_feature (1)..(25): SEQ ID NO: 1537; WAN024CU8_at; Start 834; Stop 858
cgaacgtggctttatccaagtggat

SEQ ID NO: 133521 - DNA, 25 bp, Artificial
  probe
  misc_feature (1)..(25): SEQ ID NO: 1537; WAN024CU8_at; Start 57; Stop 81
gaaccgtgctggtgaacatggagcc

SEQ ID NO: 133522 - DNA, 25 bp, Artificial
  probe
  misc_feature (1)..(25): SEQ ID NO: 1537; WAN024CU8_at; Start 712; Stop 736
gacggcattaccattcatttcgaag

SEQ ID NO: 133523 - DNA, 25 bp, Artificial
  probe
  misc_feature (1)..(25): SEQ ID NO: 1537; WAN024CU8_at; Start 438; Stop 462
tattcctggtgctgagctaggtggc

SEQ ID NO: 133524 - DNA, 25 bp, Artificial
  probe
  misc_feature (1)..(25): SEQ ID NO: 1537; WAN024CU8_at; Start 1145; Stop 1169
gcaaccgtcaagaatcccgtttcaa

SEQ ID NO: 133525 - DNA, 25 bp, Artificial
  probe
  misc_feature (1)..(25): SEQ ID NO: 1537; WAN024CU8_at; Start 1219; Stop 1243
ggctacggcgttgatgaaatgattc

SEQ ID NO: 133526 - DNA, 25 bp, Artificial
  probe
  misc_feature (1)..(25): SEQ ID NO: 1537; WAN024CU8_at; Start 1263; Stop 1287
caaaatgggagcaaccaaggctgac

SEQ ID NO: 133527 - DNA, 25 bp, Artificial
  probe
  misc_feature (1)..(25): SEQ ID NO: 1537; WAN024CU8_at; Start 415; Stop 439
ggtgcccatccaagtattcctaata

SEQ ID NO: 133528 - DNA, 25 bp, Artificial
  probe
  misc_feature (1)..(25): SEQ ID NO: 1537; WAN024CU8_at; Start 358; Stop 382
catactgtaagcgtaaatggtgaac

SEQ ID NO: 133529 - DNA, 25 bp, Artificial
  probe
  misc_feature (1)..(25): SEQ ID NO: 1537; WAN024CU8_at; Start 588; Stop 612
tcgccgcgatcgtcctttacgtggt

SEQ ID NO: 133530 - DNA, 25 bp, Artificial
  probe
  misc_feature (1)..(25): SEQ ID NO: 1537; WAN024CU8_at; Start 748; Stop 772
cacacagctagccaagttatctggg

SEQ ID NO: 133531 - DNA, 25 bp, Artificial
  probe
  misc_feature (1)..(25): SEQ ID NO: 1537; WAN024CU8_at; Start 15; Stop 39
tatcattgctatcggtggaggtagc

SEQ ID NO: 133532 - DNA, 25 bp, Artificial
  probe
  misc_feature (1)..(25): SEQ ID NO: 1537; WAN024CU8_at; Start 819; Stop 843
tggagtgactctgaacgaacgtggc

SEQ ID NO: 133533 - DNA, 25 bp, Artificial
  probe
  misc_feature (1)..(25): SEQ ID NO: 1537; WAN024CU8_at; Start 542; Stop 566
tagctggcgtactccacacttttgg

SEQ ID NO: 133534 - DNA, 25 bp, Artificial
  probe
  misc_feature (1)..(25): SEQ ID NO: 5115; WAN024CU9_at; Start 188; Stop 212
tccatataacgacaaggtgccacat

SEQ ID NO: 133535 - DNA, 25 bp, Artificial
  probe
  misc_feature (1)..(25): SEQ ID NO: 5115; WAN024CU9_at; Start 190; Stop 214
catataacgacaaggtgccacatag

SEQ ID NO: 133536 - DNA, 25 bp, Artificial
  probe
  misc_feature (1)..(25): SEQ ID NO: 5115; WAN024CU9_at; Start 44; Stop 68
gcacagccttcttccttacgataag

SEQ ID NO: 133537 - DNA, 25 bp, Artificial
  probe
  misc_feature (1)..(25): SEQ ID NO: 5115; WAN024CU9_at; Start 194; Stop 218
taacgacaaggtgccacatagtggt

SEQ ID NO: 133538 - DNA, 25 bp, Artificial
  probe
  misc_feature (1)..(25): SEQ ID NO: 5115; WAN024CU9_at; Start 184; Stop 208
catttccatataacgacaaggtgcc

SEQ ID NO: 133539 - DNA, 25 bp, Artificial
  probe
  misc_feature (1)..(25): SEQ ID NO: 5115; WAN024CU9_at; Start 47; Stop 71
cagccttcttccttacgataagcca

SEQ ID NO: 133540 - DNA, 25 bp, Artificial
  probe
  misc_feature (1)..(25): SEQ ID NO: 5115; WAN024CU9_at; Start 118; Stop 142
gacttcttcataaggaatccctctg

SEQ ID NO: 133541 - DNA, 25 bp, Artificial
  probe
  misc_feature (1)..(25): SEQ ID NO: 5115; WAN024CU9_at; Start 7; Stop 31
tactgccgcaagagcagaacactcc

SEQ ID NO: 133542 - DNA, 25 bp, Artificial
  probe
  misc_feature (1)..(25): SEQ ID NO: 5115; WAN024CU9_at; Start 155; Stop 179
tcctcaatagcagcaatagcctctg

SEQ ID NO: 133543 - DNA, 25 bp, Artificial
  probe
  misc_feature (1)..(25): SEQ ID NO: 5115; WAN024CU9_at; Start 3; Stop 27
gagctactgccgcaagagcagaaca

SEQ ID NO: 133544 - DNA, 25 bp, Artificial
  probe
  misc_feature (1)..(25): SEQ ID NO: 5115; WAN024CU9_at; Start 59; Stop 83
ttacgataagccaccttttcagccg

SEQ ID NO: 133545 - DNA, 25 bp, Artificial
  probe
  misc_feature (1)..(25): SEQ ID NO: 5115; WAN024CU9_at; Start 167; Stop 191
gcaatagcctctggctgcatttcca

SEQ ID NO: 133546 - DNA, 25 bp, Artificial
  probe
  misc_feature (1)..(25): SEQ ID NO: 5115; WAN024CU9_at; Start 17; Stop 41
agagcagaacactccatctccacaa

SEQ ID NO: 133547 - DNA, 25 bp, Artificial
  probe
  misc_feature (1)..(25): SEQ ID NO: 5115; WAN024CU9_at; Start 99; Stop 123
cgtctgtcgtccaggtcatgacttc

SEQ ID NO: 133548 - DNA, 25 bp, Artificial
  probe
  misc_feature (1)..(25): SEQ ID NO: 5115; WAN024CU9_at; Start 158; Stop 182
tcaatagcagcaatagcctctggct

SEQ ID NO: 133549 - DNA, 25 bp, Artificial
  probe
  misc_feature (1)..(25): SEQ ID NO: 5115; WAN024CU9_at; Start 132; Stop 156
gaatccctctgtcttccaaaacttc

SEQ ID NO: 133550 - DNA, 25 bp, Artificial
  probe
  misc_feature (1)..(25): SEQ ID NO: 5115; WAN024CU9_at; Start 95; Stop 119
aaaccgtctgtcgtccaggtcatga

SEQ ID NO: 133551 - DNA, 25 bp, Artificial
  probe
  misc_feature (1)..(25): SEQ ID NO: 5115; WAN024CU9_at; Start 40; Stop 64
aacagcacagccttcttccttacga

SEQ ID NO: 133552 - DNA, 25 bp, Artificial
  probe
  misc_feature (1)..(25): SEQ ID NO: 5115; WAN024CU9_at; Start 92; Stop 116
taaaaaccgtctgtcgtccaggtca

SEQ ID NO: 133553 - DNA, 25 bp, Artificial
  probe
  misc_feature (1)..(25): SEQ ID NO: 5115; WAN024CU9_at; Start 150; Stop 174
aaacttcctcaatagcagcaatagc

SEQ ID NO: 133554 - DNA, 25 bp, Artificial
  probe
  misc_feature (1)..(25): SEQ ID NO: 5115; WAN024CU9_at; Start 204; Stop 228
gtgccacatagtggtaactggctcc

SEQ ID NO: 133555 - DNA, 25 bp, Artificial
  probe
  misc_feature (1)..(25): SEQ ID NO: 5115; WAN024CU9_at; Start 110; Stop 134
caggtcatgacttcttcataaggaa

SEQ ID NO: 133556 - DNA, 25 bp, Artificial
  probe
  misc_feature (1)..(25): SEQ ID NO: 5115; WAN024CU9_at; Start 176; Stop 200
tctggctgcatttccatataacgac

SEQ ID NO: 133557 - DNA, 25 bp, Artificial
  probe
  misc_feature (1)..(25): SEQ ID NO: 5115; WAN024CU9_at; Start 63; Stop 87
gataagccaccttttcagccgtttc

SEQ ID NO: 133558 - DNA, 25 bp, Artificial
  probe
  misc_feature (1)..(25): SEQ ID NO: 5115; WAN024CU9_at; Start 103; Stop 127
tgtcgtccaggtcatgacttcttca

SEQ ID NO: 133559 - DNA, 25 bp, Artificial
  probe
  misc_feature (1)..(25): SEQ ID NO: 5115; WAN024CU9_at; Start 14; Stop 38
gcaagagcagaacactccatctcca

SEQ ID NO: 133560 - DNA, 25 bp, Artificial
  probe
  misc_feature (1)..(25): SEQ ID NO: 5115; WAN024CU9_at; Start 128; Stop 152
taaggaatccctctgtcttccaaaa

SEQ ID NO: 133561 - DNA, 25 bp, Artificial
  probe
  misc_feature (1)..(25): SEQ ID NO: 5115; WAN024CU9_at; Start 122; Stop 146
tcttcataaggaatccctctgtctt

SEQ ID NO: 133562 - DNA, 25 bp, Artificial
  probe
  misc_feature (1)..(25): SEQ ID NO: 5115; WAN024CU9_at; Start 67; Stop 91
agccaccttttcagccgtttctcgg

SEQ ID NO: 133563 - DNA, 25 bp, Artificial
  probe
  misc_feature (1)..(25): SEQ ID NO: 5115; WAN024CU9_at; Start 180; Stop 204
gctgcatttccatataacgacaagg

SEQ ID NO: 133564 - DNA, 25 bp, Artificial
  probe
  misc_feature (1)..(25): SEQ ID NO: 5115; WAN024CU9_at; Start 10; Stop 34
tgccgcaagagcagaacactccatc

SEQ ID NO: 133565 - DNA, 25 bp, Artificial
  probe
  misc_feature (1)..(25): SEQ ID NO: 5115; WAN024CU9_at; Start 145; Stop 169
ttccaaaacttcctcaatagcagca

SEQ ID NO: 133566 - DNA, 25 bp, Artificial
  probe
  misc_feature (1)..(25): SEQ ID NO: 5115; WAN024CU9_at; Start 200; Stop 224
caaggtgccacatagtggtaactgg

SEQ ID NO: 133567 - DNA, 25 bp, Artificial
  probe
  misc_feature (1)..(25): SEQ ID NO: 5115; WAN024CU9_at; Start 171; Stop 195
tagcctctggctgcatttccatata

SEQ ID NO: 133568 - DNA, 25 bp, Artificial
  probe
  misc_feature (1)..(25): SEQ ID NO: 1816; WAN024CUA_at; Start 666; Stop 690
ttctctagcggacttggaccagtac

SEQ ID NO: 133569 - DNA, 25 bp, Artificial
  probe
  misc_feature (1)..(25): SEQ ID NO: 1816; WAN024CUA_at; Start 321; Stop 345
tactgggacctgtggtgtcctagct

SEQ ID NO: 133570 - DNA, 25 bp, Artificial
  probe
  misc_feature (1)..(25): SEQ ID NO: 1816; WAN024CUA_at; Start 534; Stop 558
ccgagaaacggctgaaaaggtggct

SEQ ID NO: 133571 - DNA, 25 bp, Artificial
  probe
  misc_feature (1)..(25): SEQ ID NO: 1816; WAN024CUA_at; Start 437; Stop 461
aaatgcagccagaggctattgctgc

SEQ ID NO: 133572 - DNA, 25 bp, Artificial
  probe
  misc_feature (1)..(25): SEQ ID NO: 1816; WAN024CUA_at; Start 343; Stop 367
gctgatatagaggaaaatgcctttc

SEQ ID NO: 133573 - DNA, 25 bp, Artificial
  probe
  misc_feature (1)..(25): SEQ ID NO: 1816; WAN024CUA_at; Start 45; Stop 69
tcctcaggcggttatcatgcccaat

SEQ ID NO: 133574 - DNA, 25 bp, Artificial
  probe
  misc_feature (1)..(25): SEQ ID NO: 1816; WAN024CUA_at; Start 331; Stop 355
tgtggtgtcctagctgatatagagg

SEQ ID NO: 133575 - DNA, 25 bp, Artificial
  probe
  misc_feature (1)..(25): SEQ ID NO: 1816; WAN024CUA_at; Start 400; Stop 424
gccagttaccactatgtggcacctt

SEQ ID NO: 133576 - DNA, 25 bp, Artificial
  probe
  misc_feature (1)..(25): SEQ ID NO: 1816; WAN024CUA_at; Start 352; Stop 376
gaggaaaatgcctttctagtccctg

SEQ ID NO: 133577 - DNA, 25 bp, Artificial
  probe
  misc_feature (1)..(25): SEQ ID NO: 1816; WAN024CUA_at; Start 51; Stop 75
ggcggttatcatgcccaatcacgag

SEQ ID NO: 133578 - DNA, 25 bp, Artificial
  probe
  misc_feature (1)..(25): SEQ ID NO: 1816; WAN024CUA_at; Start 434; Stop 458
tggaaatgcagccagaggctattgc

SEQ ID NO: 133579 - DNA, 25 bp, Artificial
  probe
  misc_feature (1)..(25): SEQ ID NO: 1816; WAN024CUA_at; Start 397; Stop 421
ggagccagttaccactatgtggcac

SEQ ID NO: 133580 - DNA, 25 bp, Artificial
  probe
  misc_feature (1)..(25): SEQ ID NO: 1816; WAN024CUA_at; Start 315; Stop 339
tatctctactgggacctgtggtgtc

SEQ ID NO: 133581 - DNA, 25 bp, Artificial
  probe
  misc_feature (1)..(25): SEQ ID NO: 1816; WAN024CUA_at; Start 636; Stop 660
tctctggggtgaattgttgttcaca

SEQ ID NO: 133582 - DNA, 25 bp, Artificial
  probe
  misc_feature (1)..(25): SEQ ID NO: 1816; WAN024CUA_at; Start 607; Stop 631
cttgcggcagtagctcaattgcgtg

SEQ ID NO: 133583 - DNA, 25 bp, Artificial
  probe
  misc_feature (1)..(25): SEQ ID NO: 1816; WAN024CUA_at; Start 426; Stop 450
tcgttatatggaaatgcagccagag

SEQ ID NO: 133584 - DNA, 25 bp, Artificial
  probe
  misc_feature (1)..(25): SEQ ID NO: 1816; WAN024CUA_at; Start 430; Stop 454
tatatggaaatgcagccagaggcta

SEQ ID NO: 133585 - DNA, 25 bp, Artificial
  probe
  misc_feature (1)..(25): SEQ ID NO: 1816; WAN024CUA_at; Start 604; Stop 628
gctcttgcggcagtagctcaattgc

SEQ ID NO: 133586 - DNA, 25 bp, Artificial
  probe
  misc_feature (1)..(25): SEQ ID NO: 1816; WAN024CUA_at; Start 115; Stop 139
tttttaggtgaggagattgaccgct

SEQ ID NO: 133587 - DNA, 25 bp, Artificial
  probe
  misc_feature (1)..(25): SEQ ID NO: 1816; WAN024CUA_at; Start 43; Stop 67
aatcctcaggcggttatcatgccca

SEQ ID NO: 133588 - DNA, 25 bp, Artificial
  probe
  misc_feature (1)..(25): SEQ ID NO: 1816; WAN024CUA_at; Start 49; Stop 73
caggcggttatcatgcccaatcacg

SEQ ID NO: 133589 - DNA, 25 bp, Artificial
  probe
  misc_feature (1)..(25): SEQ ID NO: 1816; WAN024CUA_at; Start 489; Stop 513
gattccttatgaagaagtcatgacc

SEQ ID NO: 133590 - DNA, 25 bp, Artificial
  probe
  misc_feature (1)..(25): SEQ ID NO: 1816; WAN024CUA_at; Start 492; Stop 516
tccttatgaagaagtcatgacctgg

SEQ ID NO: 133591 - DNA, 25 bp, Artificial
  probe
  misc_feature (1)..(25): SEQ ID NO: 1816; WAN024CUA_at; Start 576; Stop 600
ctgtgctgttgtggagatggagtgt

SEQ ID NO: 133592 - DNA, 25 bp, Artificial
  probe
  misc_feature (1)..(25): SEQ ID NO: 1816; WAN024CUA_at; Start 339; Stop 363
cctagctgatatagaggaaaatgcc

SEQ ID NO: 133593 - DNA, 25 bp, Artificial
  probe
  misc_feature (1)..(25): SEQ ID NO: 1816; WAN024CUA_at; Start 617; Stop 641
tagctcaattgcgtggggttctctg

SEQ ID NO: 133594 - DNA, 25 bp, Artificial
  probe
  misc_feature (1)..(25): SEQ ID NO: 1816; WAN024CUA_at; Start 360; Stop 384
tgcctttctagtccctgttcgcgct

SEQ ID NO: 133595 - DNA, 25 bp, Artificial
  probe
  misc_feature (1)..(25): SEQ ID NO: 1816; WAN024CUA_at; Start 329; Stop 353
cctgtggtgtcctagctgatataga

SEQ ID NO: 133596 - DNA, 25 bp, Artificial
  probe
  misc_feature (1)..(25): SEQ ID NO: 1816; WAN024CUA_at; Start 327; Stop 351
gacctgtggtgtcctagctgatata

SEQ ID NO: 133597 - DNA, 25 bp, Artificial
  probe
  misc_feature (1)..(25): SEQ ID NO: 1816; WAN024CUA_at; Start 358; Stop 382
aatgcctttctagtccctgttcgcg

SEQ ID NO: 133598 - DNA, 25 bp, Artificial
  probe
  misc_feature (1)..(25): SEQ ID NO: 1816; WAN024CUA_at; Start 317; Stop 341
tctctactgggacctgtggtgtcct

SEQ ID NO: 133599 - DNA, 25 bp, Artificial
  probe
  misc_feature (1)..(25): SEQ ID NO: 1816; WAN024CUA_at; Start 484; Stop 508
agagggattccttatgaagaagtca

SEQ ID NO: 133600 - DNA, 25 bp, Artificial
  probe
  misc_feature (1)..(25): SEQ ID NO: 1816; WAN024CUA_at; Start 119; Stop 143
taggtgaggagattgaccgctatgc

SEQ ID NO: 133601 - DNA, 25 bp, Artificial
  probe
  misc_feature (1)..(25): SEQ ID NO: 1816; WAN024CUA_at; Start 287; Stop 311
ggttgattggctatggtgtggagca

SEQ ID NO: 133602 - DNA, 25 bp, Artificial
  probe
  misc_feature (1)..(25): SEQ ID NO: 4050; WAN024CUB_at; Start 26; Stop 50
gtttgaaactcaagtccagcttcac

SEQ ID NO: 133603 - DNA, 25 bp, Artificial
  probe
  misc_feature (1)..(25): SEQ ID NO: 4050; WAN024CUB_at; Start 42; Stop 66
cagcttcactcgctcgcttaacgat

SEQ ID NO: 133604 - DNA, 25 bp, Artificial
  probe
  misc_feature (1)..(25): SEQ ID NO: 4050; WAN024CUB_at; Start 24; Stop 48
cagtttgaaactcaagtccagcttc

SEQ ID NO: 133605 - DNA, 25 bp, Artificial
  probe
  misc_feature (1)..(25): SEQ ID NO: 4050; WAN024CUB_at; Start 29; Stop 53
tgaaactcaagtccagcttcactcg

SEQ ID NO: 133606 - DNA, 25 bp, Artificial
  probe
  misc_feature (1)..(25): SEQ ID NO: 4050; WAN024CUB_at; Start 56; Stop 80
cgcttaacgatagcctcagccagtg

SEQ ID NO: 133607 - DNA, 25 bp, Artificial
  probe
  misc_feature (1)..(25): SEQ ID NO: 4050; WAN024CUB_at; Start 31; Stop 55
aaactcaagtccagcttcactcgct

SEQ ID NO: 133608 - DNA, 25 bp, Artificial
  probe
  misc_feature (1)..(25): SEQ ID NO: 4050; WAN024CUB_at; Start 22; Stop 46
aacagtttgaaactcaagtccagct

SEQ ID NO: 133609 - DNA, 25 bp, Artificial
  probe
  misc_feature (1)..(25): SEQ ID NO: 4050; WAN024CUB_at; Start 172; Stop 196
caaagtcccggtcttatcaaagaca

SEQ ID NO: 133610 - DNA, 25 bp, Artificial
  probe
  misc_feature (1)..(25): SEQ ID NO: 4050; WAN024CUB_at; Start 20; Stop 44
tcaacagtttgaaactcaagtccag

SEQ ID NO: 133611 - DNA, 25 bp, Artificial
  probe
  misc_feature (1)..(25): SEQ ID NO: 4050; WAN024CUB_at; Start 87; Stop 111
gagaagcatcttccaaggaggctgc

SEQ ID NO: 133612 - DNA, 25 bp, Artificial
  probe
  misc_feature (1)..(25): SEQ ID NO: 4050; WAN024CUB_at; Start 66; Stop 90
tagcctcagccagtgggtgttgaga

SEQ ID NO: 133613 - DNA, 25 bp, Artificial
  probe
  misc_feature (1)..(25): SEQ ID NO: 4050; WAN024CUB_at; Start 80; Stop 104
gggtgttgagaagcatcttccaagg

SEQ ID NO: 133614 - DNA, 25 bp, Artificial
  probe
  misc_feature (1)..(25): SEQ ID NO: 4050; WAN024CUB_at; Start 119; Stop 143
aacacttctacttcgtcgccgatga

SEQ ID NO: 133615 - DNA, 25 bp, Artificial
  probe
  misc_feature (1)..(25): SEQ ID NO: 4050; WAN024CUB_at; Start 85; Stop 109
ttgagaagcatcttccaaggaggct

SEQ ID NO: 133616 - DNA, 25 bp, Artificial
  probe
  misc_feature (1)..(25): SEQ ID NO: 4050; WAN024CUB_at; Start 83; Stop 107
tgttgagaagcatcttccaaggagg

SEQ ID NO: 133617 - DNA, 25 bp, Artificial
  probe
  misc_feature (1)..(25): SEQ ID NO: 4050; WAN024CUB_at; Start 62; Stop 86
acgatagcctcagccagtgggtgtt

SEQ ID NO: 133618 - DNA, 25 bp, Artificial
  probe
  misc_feature (1)..(25): SEQ ID NO: 4050; WAN024CUB_at; Start 60; Stop 84
taacgatagcctcagccagtgggtg

SEQ ID NO: 133619 - DNA, 25 bp, Artificial
  probe
  misc_feature (1)..(25): SEQ ID NO: 4050; WAN024CUB_at; Start 166; Stop 190
ttccgtcaaagtcccggtcttatca

SEQ ID NO: 133620 - DNA, 25 bp, Artificial
  probe
  misc_feature (1)..(25): SEQ ID NO: 4050; WAN024CUB_at; Start 76; Stop 100
cagtgggtgttgagaagcatcttcc

SEQ ID NO: 133621 - DNA, 25 bp, Artificial
  probe
  misc_feature (1)..(25): SEQ ID NO: 4050; WAN024CUB_at; Start 53; Stop 77
gctcgcttaacgatagcctcagcca

SEQ ID NO: 133622 - DNA, 25 bp, Artificial
  probe
  misc_feature (1)..(25): SEQ ID NO: 4050; WAN024CUB_at; Start 47; Stop 71
tcactcgctcgcttaacgatagcct

SEQ ID NO: 133623 - DNA, 25 bp, Artificial
  probe
  misc_feature (1)..(25): SEQ ID NO: 4050; WAN024CUB_at; Start 170; Stop 194
gtcaaagtcccggtcttatcaaaga

SEQ ID NO: 133624 - DNA, 25 bp, Artificial
  probe
  misc_feature (1)..(25): SEQ ID NO: 4050; WAN024CUB_at; Start 51; Stop 75
tcgctcgcttaacgatagcctcagc

SEQ ID NO: 133625 - DNA, 25 bp, Artificial
  probe
  misc_feature (1)..(25): SEQ ID NO: 4050; WAN024CUB_at; Start 44; Stop 68
gcttcactcgctcgcttaacgatag

SEQ ID NO: 133626 - DNA, 25 bp, Artificial
  probe
  misc_feature (1)..(25): SEQ ID NO: 4050; WAN024CUB_at; Start 89; Stop 113
gaagcatcttccaaggaggctgcca

SEQ ID NO: 133627 - DNA, 25 bp, Artificial
  probe
  misc_feature (1)..(25): SEQ ID NO: 4050; WAN024CUB_at; Start 72; Stop 96
cagccagtgggtgttgagaagcatc

SEQ ID NO: 133628 - DNA, 25 bp, Artificial
  probe
  misc_feature (1)..(25): SEQ ID NO: 4050; WAN024CUB_at; Start 58; Stop 82
cttaacgatagcctcagccagtggg

SEQ ID NO: 133629 - DNA, 25 bp, Artificial
  probe
  misc_feature (1)..(25): SEQ ID NO: 4050; WAN024CUB_at; Start 70; Stop 94
ctcagccagtgggtgttgagaagca

SEQ ID NO: 133630 - DNA, 25 bp, Artificial
  probe
  misc_feature (1)..(25): SEQ ID NO: 4050; WAN024CUB_at; Start 174; Stop 198
aagtcccggtcttatcaaagacaag

SEQ ID NO: 133631 - DNA, 25 bp, Artificial
  probe
  misc_feature (1)..(25): SEQ ID NO: 4050; WAN024CUB_at; Start 90; Stop 114
aagcatcttccaaggaggctgccaa

SEQ ID NO: 133632 - DNA, 25 bp, Artificial
  probe
  misc_feature (1)..(25): SEQ ID NO: 4050; WAN024CUB_at; Start 37; Stop 61
aagtccagcttcactcgctcgctta

SEQ ID NO: 133633 - DNA, 25 bp, Artificial
  probe
  misc_feature (1)..(25): SEQ ID NO: 4050; WAN024CUB_at; Start 200; Stop 224
gtttgaactttctggatttcctgta

SEQ ID NO: 133634 - DNA, 25 bp, Artificial
  probe
  misc_feature (1)..(25): SEQ ID NO: 4050; WAN024CUB_at; Start 117; Stop 141
caaacacttctacttcgtcgccgat

SEQ ID NO: 133635 - DNA, 25 bp, Artificial
  probe
  misc_feature (1)..(25): SEQ ID NO: 4050; WAN024CUB_at; Start 74; Stop 98
gccagtgggtgttgagaagcatctt

SEQ ID NO: 133636 - DNA, 25 bp, Artificial
  probe
  misc_feature (1)..(25): SEQ ID NO: 4126; WAN024CUC_at; Start 1009; Stop 1033
aaagctcagacaagtcgtgcgccga

SEQ ID NO: 133637 - DNA, 25 bp, Artificial
  probe
  misc_feature (1)..(25): SEQ ID NO: 4126; WAN024CUC_at; Start 860; Stop 884
ccatggtgacaggtgagagtctgcc

SEQ ID NO: 133638 - DNA, 25 bp, Artificial
  probe
  misc_feature (1)..(25): SEQ ID NO: 4126; WAN024CUC_at; Start 1976; Stop 2000
cagatatcgccatcgagtcagcaga

SEQ ID NO: 133639 - DNA, 25 bp, Artificial
  probe
  misc_feature (1)..(25): SEQ ID NO: 4126; WAN024CUC_at; Start 1766; Stop 1790
tcatgctgacaggagacaatgctgg

SEQ ID NO: 133640 - DNA, 25 bp, Artificial
  probe
  misc_feature (1)..(25): SEQ ID NO: 4126; WAN024CUC_at; Start 712; Stop 736
gctaaaaccgcagaagtcttgagtg

SEQ ID NO: 133641 - DNA, 25 bp, Artificial
  probe
  misc_feature (1)..(25): SEQ ID NO: 4126; WAN024CUC_at; Start 1162; Stop 1186
tcctctcttctctacggagtggcgg

SEQ ID NO: 133642 - DNA, 25 bp, Artificial
  probe
  misc_feature (1)..(25): SEQ ID NO: 4126; WAN024CUC_at; Start 1115; Stop 1139
tcgtcttgctcagggatagtgtggt

SEQ ID NO: 133643 - DNA, 25 bp, Artificial
  probe
  misc_feature (1)..(25): SEQ ID NO: 4126; WAN024CUC_at; Start 1438; Stop 1462
cacccactggctgaggctatcgtta

SEQ ID NO: 133644 - DNA, 25 bp, Artificial
  probe
  misc_feature (1)..(25): SEQ ID NO: 4126; WAN024CUC_at; Start 698; Stop 722
tactggacttgcaagctaaaaccgc

SEQ ID NO: 133645 - DNA, 25 bp, Artificial
  probe
  misc_feature (1)..(25): SEQ ID NO: 4126; WAN024CUC_at; Start 679; Stop 703
tcccaagctgtggagaaattactgg

SEQ ID NO: 133646 - DNA, 25 bp, Artificial
  probe
  misc_feature (1)..(25): SEQ ID NO: 4126; WAN024CUC_at; Start 1921; Stop 1945
aatgacgctcctgcccttagtgtag

SEQ ID NO: 133647 - DNA, 25 bp, Artificial
  probe
  misc_feature (1)..(25): SEQ ID NO: 4126; WAN024CUC_at; Start 1827; Stop 1851
agaggtcattgcaggcgtcttgcca

SEQ ID NO: 133648 - DNA, 25 bp, Artificial
  probe
  misc_feature (1)..(25): SEQ ID NO: 4126; WAN024CUC_at; Start 314; Stop 338
gaaaatctctatctctcctgcaacg

SEQ ID NO: 133649 - DNA, 25 bp, Artificial
  probe
  misc_feature (1)..(25): SEQ ID NO: 4126; WAN024CUC_at; Start 1843; Stop 1867
gtcttgccagaagaaaaagcccatg

SEQ ID NO: 133650 - DNA, 25 bp, Artificial
  probe
  misc_feature (1)..(25): SEQ ID NO: 4126; WAN024CUC_at; Start 1781; Stop 1805
acaatgctggtgtggcgcgtgctat

SEQ ID NO: 133651 - DNA, 25 bp, Artificial
  probe
  misc_feature (1)..(25): SEQ ID NO: 4126; WAN024CUC_at; Start 1455; Stop 1479
tatcgttaagcgagcgagtgaagct

SEQ ID NO: 133652 - DNA, 25 bp, Artificial
  probe
  misc_feature (1)..(25): SEQ ID NO: 4126; WAN024CUC_at; Start 526; Stop 550
gataccttggttgcgctgggaactc

SEQ ID NO: 133653 - DNA, 25 bp, Artificial
  probe
  misc_feature (1)..(25): SEQ ID NO: 4126; WAN024CUC_at; Start 1207; Stop 1231
tgtgccttgggacttgcaacaccga

SEQ ID NO: 133654 - DNA, 25 bp, Artificial
  probe
  misc_feature (1)..(25): SEQ ID NO: 4126; WAN024CUC_at; Start 794; Stop 818
tgcgtcccggtgaaaagattgctgt

SEQ ID NO: 133655 - DNA, 25 bp, Artificial
  probe
  misc_feature (1)..(25): SEQ ID NO: 4126; WAN024CUC_at; Start 95; Stop 119
tccagcttcaaaagggaattccagc

SEQ ID NO: 133656 - DNA, 25 bp, Artificial
  probe
  misc_feature (1)..(25): SEQ ID NO: 4126; WAN024CUC_at; Start 2156; Stop 2180
tggctctcaacccagaattggcagg

SEQ ID NO: 133657 - DNA, 25 bp, Artificial
  probe
  misc_feature (1)..(25): SEQ ID NO: 4126; WAN024CUC_at; Start 1422; Stop 1446
ggaagatgcttctcaacacccactg

SEQ ID NO: 133658 - DNA, 25 bp, Artificial
  probe
  misc_feature (1)..(25): SEQ ID NO: 4126; WAN024CUC_at; Start 1534; Stop 1558
tcagggcgaatcaatggaaaacaag

SEQ ID NO: 133659 - DNA, 25 bp, Artificial
  probe
  misc_feature (1)..(25): SEQ ID NO: 4126; WAN024CUC_at; Start 2123; Stop 2147
cgattgcagcaggagtcttttcagg

SEQ ID NO: 133660 - DNA, 25 bp, Artificial
  probe
  misc_feature (1)..(25): SEQ ID NO: 4126; WAN024CUC_at; Start 924; Stop 948
catcaatcatagtggaacgcttgtc

SEQ ID NO: 133661 - DNA, 25 bp, Artificial
  probe
  misc_feature (1)..(25): SEQ ID NO: 4126; WAN024CUC_at; Start 845; Stop 869
ctagtattgacgaatccatggtgac

SEQ ID NO: 133662 - DNA, 25 bp, Artificial
  probe
  misc_feature (1)..(25): SEQ ID NO: 4126; WAN024CUC_at; Start 1191; Stop 1215
gattatcgcctgtccttgtgccttg

SEQ ID NO: 133663 - DNA, 25 bp, Artificial
  probe
  misc_feature (1)..(25): SEQ ID NO: 4126; WAN024CUC_at; Start 586; Stop 610
gctggtctccctgtttacttcgaaa

SEQ ID NO: 133664 - DNA, 25 bp, Artificial
  probe
  misc_feature (1)..(25): SEQ ID NO: 4126; WAN024CUC_at; Start 476; Stop 500
catatatccagagtgcttgggccag

SEQ ID NO: 133665 - DNA, 25 bp, Artificial
  probe
  misc_feature (1)..(25): SEQ ID NO: 4126; WAN024CUC_at; Start 1707; Stop 1731
tcctaaggaaaatgctaagctagcc

SEQ ID NO: 133666 - DNA, 25 bp, Artificial
  probe
  misc_feature (1)..(25): SEQ ID NO: 4126; WAN024CUC_at; Start 1750; Stop 1774
cgtggtctccgaacagtcatgctga

SEQ ID NO: 133667 - DNA, 25 bp, Artificial
  probe
  misc_feature (1)..(25): SEQ ID NO: 4126; WAN024CUC_at; Start 1798; Stop 1822
cgtgctattgcagatcaaatcggaa

SEQ ID NO: 133668 - DNA, 25 bp, Artificial
  probe
  misc_feature (1)..(25): SEQ ID NO: 4126; WAN024CUC_at; Start 904; Stop 928
gatactgtcattggctcaaccatca

SEQ ID NO: 133669 - DNA, 25 bp, Artificial
  probe
  misc_feature (1)..(25): SEQ ID NO: 4126; WAN024CUC_at; Start 879; Stop 903
tctgcctgtggacaagacagttgga

SEQ ID NO: 133670 - DNA, 25 bp, Artificial
  probe
  misc_feature (1)..(25): SEQ ID NO: 2389; WAN024CUD_at; Start 106; Stop 130
tatgagattgacagacgaccgttcg

SEQ ID NO: 133671 - DNA, 25 bp, Artificial
  probe
  misc_feature (1)..(25): SEQ ID NO: 2389; WAN024CUD_at; Start 379; Stop 403
gactttgtcgtggtgcgtgaattga

SEQ ID NO: 133672 - DNA, 25 bp, Artificial
  probe
  misc_feature (1)..(25): SEQ ID NO: 2389; WAN024CUD_at; Start 777; Stop 801
cagtcattctgaaaatggaccaagt

SEQ ID NO: 133673 - DNA, 25 bp, Artificial
  probe
  misc_feature (1)..(25): SEQ ID NO: 2389; WAN024CUD_at; Start 939; Stop 963
tgctgttgagacaagtctggcggca

SEQ ID NO: 133674 - DNA, 25 bp, Artificial
  probe
  misc_feature (1)..(25): SEQ ID NO: 2389; WAN024CUD_at; Start 503; Stop 527
cctttgaaattgcaagaaatcgcag

SEQ ID NO: 133675 - DNA, 25 bp, Artificial
  probe
  misc_feature (1)..(25): SEQ ID NO: 2389; WAN024CUD_at; Start 665; Stop 689
tgattaccaatcctgctaagtttga

SEQ ID NO: 133676 - DNA, 25 bp, Artificial
  probe
  misc_feature (1)..(25): SEQ ID NO: 2389; WAN024CUD_at; Start 954; Stop 978
tctggcggcaggaattttaacgaga

SEQ ID NO: 133677 - DNA, 25 bp, Artificial
  probe
  misc_feature (1)..(25): SEQ ID NO: 2389; WAN024CUD_at; Start 733; Stop 757
gaatcaagcgtcttatctggtacac

SEQ ID NO: 133678 - DNA, 25 bp, Artificial
  probe
  misc_feature (1)..(25): SEQ ID NO: 2389; WAN024CUD_at; Start 448; Stop 472
gcgcgtgatatcaacgactatagct

SEQ ID NO: 133679 - DNA, 25 bp, Artificial
  probe
  misc_feature (1)..(25): SEQ ID NO: 2389; WAN024CUD_at; Start 28; Stop 52
ggagacggaattggcccagaaatca

SEQ ID NO: 133680 - DNA, 25 bp, Artificial
  probe
  misc_feature (1)..(25): SEQ ID NO: 2389; WAN024CUD_at; Start 887; Stop 911
tgatgttgagagatagtttcggacg

SEQ ID NO: 133681 - DNA, 25 bp, Artificial
  probe
  misc_feature (1)..(25): SEQ ID NO: 2389; WAN024CUD_at; Start 484; Stop 508
gagcggattattcgcaaagcctttg

SEQ ID NO: 133682 - DNA, 25 bp, Artificial
  probe
  misc_feature (1)..(25): SEQ ID NO: 2389; WAN024CUD_at; Start 464; Stop 488
actatagctatgaggaagtggagcg

SEQ ID NO: 133683 - DNA, 25 bp, Artificial
  probe
  misc_feature (1)..(25): SEQ ID NO: 2389; WAN024CUD_at; Start 184; Stop 208
gcaagtagggaagcagatgctatcc

SEQ ID NO: 133684 - DNA, 25 bp, Artificial
  probe
  misc_feature (1)..(25): SEQ ID NO: 2389; WAN024CUD_at; Start 823; Stop 847
tcagcacctgatattgcaggtcaag

SEQ ID NO: 133685 - DNA, 25 bp, Artificial
  probe
  misc_feature (1)..(25): SEQ ID NO: 2389; WAN024CUD_at; Start 219; Stop 243
tatcggtagtcctcagtatgatgga

SEQ ID NO: 133686 - DNA, 25 bp, Artificial
  probe
  misc_feature (1)..(25): SEQ ID NO: 2389; WAN024CUD_at; Start 122; Stop 146
gaccgttcggaggtgcagatattga

SEQ ID NO: 133687 - DNA, 25 bp, Artificial
  probe
  misc_feature (1)..(25): SEQ ID NO: 2389; WAN024CUD_at; Start 642; Stop 666
ggtagactcagctgctatgcttatg

SEQ ID NO: 133688 - DNA, 25 bp, Artificial
  probe
  misc_feature (1)..(25): SEQ ID NO: 2389; WAN024CUD_at; Start 79; Stop 103
gctctagctgaaaaaacaggttttg

SEQ ID NO: 133689 - DNA, 25 bp, Artificial
  probe
  misc_feature (1)..(25): SEQ ID NO: 2389; WAN024CUD_at; Start 985; Stop 1009
ggaggtcaggcttcaacaaaggaaa

SEQ ID NO: 133690 - DNA, 25 bp, Artificial
  probe
  misc_feature (1)..(25): SEQ ID NO: 2389; WAN024CUD_at; Start 762; Stop 786
ggttatgccatcagccagtcattct

SEQ ID NO: 133691 - DNA, 25 bp, Artificial
  probe
  misc_feature (1)..(25): SEQ ID NO: 2389; WAN024CUD_at; Start 597; Stop 621
ggaagtcgcacaggatttcccagat

SEQ ID NO: 133692 - DNA, 25 bp, Artificial
  probe
  misc_feature (1)..(25): SEQ ID NO: 2389; WAN024CUD_at; Start 549; Stop 573
taagcaaaatgttctagcgacctca

SEQ ID NO: 133693 - DNA, 25 bp, Artificial
  probe
  misc_feature (1)..(25): SEQ ID NO: 2389; WAN024CUD_at; Start 263; Stop 287
aaggcctgatggctctccgtaagga

SEQ ID NO: 133694 - DNA, 25 bp, Artificial
  probe
  misc_feature (1)..(25): SEQ ID NO: 2389; WAN024CUD_at; Start 792; Stop 816
tggaccaagtctctatgaacctatt

SEQ ID NO: 133695 - DNA, 25 bp, Artificial
  probe
  misc_feature (1)..(25): SEQ ID NO: 2389; WAN024CUD_at; Start 164; Stop 188
tacctgatgaaacccttaaggcaag

SEQ ID NO: 133696 - DNA, 25 bp, Artificial
  probe
  misc_feature (1)..(25): SEQ ID NO: 2389; WAN024CUD_at; Start 518; Stop 542
gaaatcgcagaaaaatcgttactag

SEQ ID NO: 133697 - DNA, 25 bp, Artificial
  probe
  misc_feature (1)..(25): SEQ ID NO: 2389; WAN024CUD_at; Start 141; Stop 165
tattgatgcagcaggacctccctta

SEQ ID NO: 133698 - DNA, 25 bp, Artificial
  probe
  misc_feature (1)..(25): SEQ ID NO: 2389; WAN024CUD_at; Start 971; Stop 995
taacgagagatataggaggtcaggc

SEQ ID NO: 133699 - DNA, 25 bp, Artificial
  probe
  misc_feature (1)..(25): SEQ ID NO: 2389; WAN024CUD_at; Start 249; Stop 273
ggttcgccctgaacaaggcctgatg

SEQ ID NO: 133700 - DNA, 25 bp, Artificial
  probe
  misc_feature (1)..(25): SEQ ID NO: 2389; WAN024CUD_at; Start 565; Stop 589
gcgacctcaaaactctggcggaaag

SEQ ID NO: 133701 - DNA, 25 bp, Artificial
  probe
  misc_feature (1)..(25): SEQ ID NO: 2389; WAN024CUD_at; Start 65; Stop 89
tagaagttctggaggctctagctga

SEQ ID NO: 133702 - DNA, 25 bp, Artificial
  probe
  misc_feature (1)..(25): SEQ ID NO: 2389; WAN024CUD_at; Start 838; Stop 862
gcaggtcaaggaattgccaatccta

SEQ ID NO: 133703 - DNA, 25 bp, Artificial
  probe
  misc_feature (1)..(25): SEQ ID NO: 2389; WAN024CUD_at; Start 583; Stop 607
cggaaagtagctgaggaagtcgcac

SEQ ID NO: 133704 - DNA, 25 bp, Artificial
  probe
  misc_feature (1)..(25): SEQ ID NO: 5746; WAN024CUE_at; Start 205; Stop 229
tcaggaaatttgatcctccaggagc

SEQ ID NO: 133705 - DNA, 25 bp, Artificial
  probe
  misc_feature (1)..(25): SEQ ID NO: 5746; WAN024CUE_at; Start 258; Stop 282
tacttatatcggtgaactctctagc

SEQ ID NO: 133706 - DNA, 25 bp, Artificial
  probe
  misc_feature (1)..(25): SEQ ID NO: 5746; WAN024CUE_at; Start 48; Stop 72
tagttcgggctcagagtttcaaagt

SEQ ID NO: 133707 - DNA, 25 bp, Artificial
  probe
  misc_feature (1)..(25): SEQ ID NO: 5746; WAN024CUE_at; Start 67; Stop 91
caaagtggatggcaagagcatcaat

SEQ ID NO: 133708 - DNA, 25 bp, Artificial
  probe
  misc_feature (1)..(25): SEQ ID NO: 5746; WAN024CUE_at; Start 61; Stop 85
gagtttcaaagtggatggcaagagc

SEQ ID NO: 133709 - DNA, 25 bp, Artificial
  probe
  misc_feature (1)..(25): SEQ ID NO: 5746; WAN024CUE_at; Start 95; Stop 119
ttgctgagaaggttagtaaaacact

SEQ ID NO: 133710 - DNA, 25 bp, Artificial
  probe
  misc_feature (1)..(25): SEQ ID NO: 5746; WAN024CUE_at; Start 220; Stop 244
ctccaggagctgataactgtgaatg

SEQ ID NO: 133711 - DNA, 25 bp, Artificial
  probe
  misc_feature (1)..(25): SEQ ID NO: 5746; WAN024CUE_at; Start 88; Stop 112
caattgattgctgagaaggttagta

SEQ ID NO: 133712 - DNA, 25 bp, Artificial
  probe
  misc_feature (1)..(25): SEQ ID NO: 5746; WAN024CUE_at; Start 30; Stop 54
tatcccagtcatggtttctagttcg

SEQ ID NO: 133713 - DNA, 25 bp, Artificial
  probe
  misc_feature (1)..(25): SEQ ID NO: 5746; WAN024CUE_at; Start 65; Stop 89
ttcaaagtggatggcaagagcatca

SEQ ID NO: 133714 - DNA, 25 bp, Artificial
  probe
  misc_feature (1)..(25): SEQ ID NO: 5746; WAN024CUE_at; Start 208; Stop 232
ggaaatttgatcctccaggagctga

SEQ ID NO: 133715 - DNA, 25 bp, Artificial
  probe
  misc_feature (1)..(25): SEQ ID NO: 5746; WAN024CUE_at; Start 46; Stop 70
tctagttcgggctcagagtttcaaa

SEQ ID NO: 133716 - DNA, 25 bp, Artificial
  probe
  misc_feature (1)..(25): SEQ ID NO: 5746; WAN024CUE_at; Start 79; Stop 103
caagagcatcaattgattgctgaga

SEQ ID NO: 133717 - DNA, 25 bp, Artificial
  probe
  misc_feature (1)..(25): SEQ ID NO: 5746; WAN024CUE_at; Start 261; Stop 285
ttatatcggtgaactctctagcaac

SEQ ID NO: 133718 - DNA, 25 bp, Artificial
  probe
  misc_feature (1)..(25): SEQ ID NO: 5746; WAN024CUE_at; Start 12; Stop 36
tctactgaccttgttgtttatccca

SEQ ID NO: 133719 - DNA, 25 bp, Artificial
  probe
  misc_feature (1)..(25): SEQ ID NO: 5746; WAN024CUE_at; Start 218; Stop 242
tcctccaggagctgataactgtgaa

SEQ ID NO: 133720 - DNA, 25 bp, Artificial
  probe
  misc_feature (1)..(25): SEQ ID NO: 5746; WAN024CUE_at; Start 19; Stop 43
accttgttgtttatcccagtcatgg

SEQ ID NO: 133721 - DNA, 25 bp, Artificial
  probe
  misc_feature (1)..(25): SEQ ID NO: 5746; WAN024CUE_at; Start 74; Stop 98
gatggcaagagcatcaattgattgc

SEQ ID NO: 133722 - DNA, 25 bp, Artificial
  probe
  misc_feature (1)..(25): SEQ ID NO: 5746; WAN024CUE_at; Start 56; Stop 80
gctcagagtttcaaagtggatggca

SEQ ID NO: 133723 - DNA, 25 bp, Artificial
  probe
  misc_feature (1)..(25): SEQ ID NO: 5746; WAN024CUE_at; Start 264; Stop 288
tatcggtgaactctctagcaactaa

SEQ ID NO: 133724 - DNA, 25 bp, Artificial
  probe
  misc_feature (1)..(25): SEQ ID NO: 5746; WAN024CUE_at; Start 216; Stop 240
gatcctccaggagctgataactgtg

SEQ ID NO: 133725 - DNA, 25 bp, Artificial
  probe
  misc_feature (1)..(25): SEQ ID NO: 5746; WAN024CUE_at; Start 26; Stop 50
tgtttatcccagtcatggtttctag

SEQ ID NO: 133726 - DNA, 25 bp, Artificial
  probe
  misc_feature (1)..(25): SEQ ID NO: 5746; WAN024CUE_at; Start 36; Stop 60
agtcatggtttctagttcgggctca

SEQ ID NO: 133727 - DNA, 25 bp, Artificial
  probe
  misc_feature (1)..(25): SEQ ID NO: 5746; WAN024CUE_at; Start 247; Stop 271
gcttataaagctacttatatcggtg

SEQ ID NO: 133728 - DNA, 25 bp, Artificial
  probe
  misc_feature (1)..(25): SEQ ID NO: 5746; WAN024CUE_at; Start 98; Stop 122
ctgagaaggttagtaaaacacttga

SEQ ID NO: 133729 - DNA, 25 bp, Artificial
  probe
  misc_feature (1)..(25): SEQ ID NO: 5746; WAN024CUE_at; Start 84; Stop 108
gcatcaattgattgctgagaaggtt

SEQ ID NO: 133730 - DNA, 25 bp, Artificial
  probe
  misc_feature (1)..(25): SEQ ID NO: 5746; WAN024CUE_at; Start 39; Stop 63
catggtttctagttcgggctcagag

SEQ ID NO: 133731 - DNA, 25 bp, Artificial
  probe
  misc_feature (1)..(25): SEQ ID NO: 5746; WAN024CUE_at; Start 269; Stop 293
gtgaactctctagcaactaactaat

SEQ ID NO: 133732 - DNA, 25 bp, Artificial
  probe
  misc_feature (1)..(25): SEQ ID NO: 5746; WAN024CUE_at; Start 252; Stop 276
taaagctacttatatcggtgaactc

SEQ ID NO: 133733 - DNA, 25 bp, Artificial
  probe
  misc_feature (1)..(25): SEQ ID NO: 5746; WAN024CUE_at; Start 202; Stop 226
tactcaggaaatttgatcctccagg

SEQ ID NO: 133734 - DNA, 25 bp, Artificial
  probe
  misc_feature (1)..(25): SEQ ID NO: 5746; WAN024CUE_at; Start 52; Stop 76
tcgggctcagagtttcaaagtggat

SEQ ID NO: 133735 - DNA, 25 bp, Artificial
  probe
  misc_feature (1)..(25): SEQ ID NO: 5746; WAN024CUE_at; Start 266; Stop 290
tcggtgaactctctagcaactaact

SEQ ID NO: 133736 - DNA, 25 bp, Artificial
  probe
  misc_feature (1)..(25): SEQ ID NO: 5746; WAN024CUE_at; Start 59; Stop 83
cagagtttcaaagtggatggcaaga

SEQ ID NO: 133737 - DNA, 25 bp, Artificial
  probe
  misc_feature (1)..(25): SEQ ID NO: 5746; WAN024CUE_at; Start 34; Stop 58
ccagtcatggtttctagttcgggct

SEQ ID NO: 133738 - DNA, 25 bp, Artificial
  probe
  misc_feature (1)..(25): SEQ ID NO: 6553; WAN024CUF_at; Start 108; Stop 132
ccttcacaggagtctgactgattgg

SEQ ID NO: 133739 - DNA, 25 bp, Artificial
  probe
  misc_feature (1)..(25): SEQ ID NO: 6553; WAN024CUF_at; Start 200; Stop 224
tctgcaagactgagggcattatagc

SEQ ID NO: 133740 - DNA, 25 bp, Artificial
  probe
  misc_feature (1)..(25): SEQ ID NO: 6553; WAN024CUF_at; Start 74; Stop 98
taagctccactgtgttgaattgtca

SEQ ID NO: 133741 - DNA, 25 bp, Artificial
  probe
  misc_feature (1)..(25): SEQ ID NO: 6553; WAN024CUF_at; Start 49; Stop 73
ccaagttatggagtagcgggcaatg

SEQ ID NO: 133742 - DNA, 25 bp, Artificial
  probe
  misc_feature (1)..(25): SEQ ID NO: 6553; WAN024CUF_at; Start 103; Stop 127
tttatccttcacaggagtctgactg

SEQ ID NO: 133743 - DNA, 25 bp, Artificial
  probe
  misc_feature (1)..(25): SEQ ID NO: 6553; WAN024CUF_at; Start 135; Stop 159
gaactggcttagaaacttgtgtcgc

SEQ ID NO: 133744 - DNA, 25 bp, Artificial
  probe
  misc_feature (1)..(25): SEQ ID NO: 6553; WAN024CUF_at; Start 24; Stop 48
catctttatctactggaacttcttc

SEQ ID NO: 133745 - DNA, 25 bp, Artificial
  probe
  misc_feature (1)..(25): SEQ ID NO: 6553; WAN024CUF_at; Start 29; Stop 53
ttatctactggaacttcttcccaag

SEQ ID NO: 133746 - DNA, 25 bp, Artificial
  probe
  misc_feature (1)..(25): SEQ ID NO: 6553; WAN024CUF_at; Start 14; Stop 38
acttggtttccatctttatctactg

SEQ ID NO: 133747 - DNA, 25 bp, Artificial
  probe
  misc_feature (1)..(25): SEQ ID NO: 6553; WAN024CUF_at; Start 80; Stop 104
ccactgtgttgaattgtcaatgttt

SEQ ID NO: 133748 - DNA, 25 bp, Artificial
  probe
  misc_feature (1)..(25): SEQ ID NO: 6553; WAN024CUF_at; Start 44; Stop 68
tcttcccaagttatggagtagcggg

SEQ ID NO: 133749 - DNA, 25 bp, Artificial
  probe
  misc_feature (1)..(25): SEQ ID NO: 6553; WAN024CUF_at; Start 139; Stop 163
tggcttagaaacttgtgtcgccgtt

SEQ ID NO: 133750 - DNA, 25 bp, Artificial
  probe
  misc_feature (1)..(25): SEQ ID NO: 6553; WAN024CUF_at; Start 144; Stop 168
tagaaacttgtgtcgccgtttcagc

SEQ ID NO: 133751 - DNA, 25 bp, Artificial
  probe
  misc_feature (1)..(25): SEQ ID NO: 6553; WAN024CUF_at; Start 61; Stop 85
gtagcgggcaatgtaagctccactg

SEQ ID NO: 133752 - DNA, 25 bp, Artificial
  probe
  misc_feature (1)..(25): SEQ ID NO: 6553; WAN024CUF_at; Start 77; Stop 101
gctccactgtgttgaattgtcaatg

SEQ ID NO: 133753 - DNA, 25 bp, Artificial
  probe
  misc_feature (1)..(25): SEQ ID NO: 6553; WAN024CUF_at; Start 195; Stop 219
caacttctgcaagactgagggcatt

SEQ ID NO: 133754 - DNA, 25 bp, Artificial
  probe
  misc_feature (1)..(25): SEQ ID NO: 6553; WAN024CUF_at; Start 152; Stop 176
tgtgtcgccgtttcagcattcgtag

SEQ ID NO: 133755 - DNA, 25 bp, Artificial
  probe
  misc_feature (1)..(25): SEQ ID NO: 6553; WAN024CUF_at; Start 114; Stop 138
caggagtctgactgattggttgaac

SEQ ID NO: 133756 - DNA, 25 bp, Artificial
  probe
  misc_feature (1)..(25): SEQ ID NO: 6553; WAN024CUF_at; Start 68; Stop 92
gcaatgtaagctccactgtgttgaa

SEQ ID NO: 133757 - DNA, 25 bp, Artificial
  probe
  misc_feature (1)..(25): SEQ ID NO: 6553; WAN024CUF_at; Start 64; Stop 88
gcgggcaatgtaagctccactgtgt

SEQ ID NO: 133758 - DNA, 25 bp, Artificial
  probe
  misc_feature (1)..(25): SEQ ID NO: 6553; WAN024CUF_at; Start 59; Stop 83
gagtagcgggcaatgtaagctccac

SEQ ID NO: 133759 - DNA, 25 bp, Artificial
  probe
  misc_feature (1)..(25): SEQ ID NO: 6553; WAN024CUF_at; Start 35; Stop 59
actggaacttcttcccaagttatgg

SEQ ID NO: 133760 - DNA, 25 bp, Artificial
  probe
  misc_feature (1)..(25): SEQ ID NO: 6553; WAN024CUF_at; Start 157; Stop 181
cgccgtttcagcattcgtagctata

SEQ ID NO: 133761 - DNA, 25 bp, Artificial
  probe
  misc_feature (1)..(25): SEQ ID NO: 6553; WAN024CUF_at; Start 192; Stop 216
cttcaacttctgcaagactgagggc

SEQ ID NO: 133762 - DNA, 25 bp, Artificial
  probe
  misc_feature (1)..(25): SEQ ID NO: 6553; WAN024CUF_at; Start 2; Stop 26
tgactacgaacaacttggtttccat

SEQ ID NO: 133763 - DNA, 25 bp, Artificial
  probe
  misc_feature (1)..(25): SEQ ID NO: 6553; WAN024CUF_at; Start 149; Stop 173
acttgtgtcgccgtttcagcattcg

SEQ ID NO: 133764 - DNA, 25 bp, Artificial
  probe
  misc_feature (1)..(25): SEQ ID NO: 6553; WAN024CUF_at; Start 187; Stop 211
gaaaacttcaacttctgcaagactg

SEQ ID NO: 133765 - DNA, 25 bp, Artificial
  probe
  misc_feature (1)..(25): SEQ ID NO: 6553; WAN024CUF_at; Start 207; Stop 231
gactgagggcattatagccttctag

SEQ ID NO: 133766 - DNA, 25 bp, Artificial
  probe
  misc_feature (1)..(25): SEQ ID NO: 6553; WAN024CUF_at; Start 119; Stop 143
gtctgactgattggttgaactggct

SEQ ID NO: 133767 - DNA, 25 bp, Artificial
  probe
  misc_feature (1)..(25): SEQ ID NO: 6553; WAN024CUF_at; Start 123; Stop 147
gactgattggttgaactggcttaga

SEQ ID NO: 133768 - DNA, 25 bp, Artificial
  probe
  misc_feature (1)..(25): SEQ ID NO: 6553; WAN024CUF_at; Start 127; Stop 151
gattggttgaactggcttagaaact

SEQ ID NO: 133769 - DNA, 25 bp, Artificial
  probe
  misc_feature (1)..(25): SEQ ID NO: 6553; WAN024CUF_at; Start 165; Stop 189
cagcattcgtagctataaagcagaa

SEQ ID NO: 133770 - DNA, 25 bp, Artificial
  probe
  misc_feature (1)..(25): SEQ ID NO: 6553; WAN024CUF_at; Start 95; Stop 119
gtcaatgttttatccttcacaggag

SEQ ID NO: 133771 - DNA, 25 bp, Artificial
  probe
  misc_feature (1)..(25): SEQ ID NO: 6553; WAN024CUF_at; Start 172; Stop 196
cgtagctataaagcagaaaacttca

SEQ ID NO: 133772 - DNA, 25 bp, Artificial
  probe
  misc_feature (1)..(25): SEQ ID NO: 4257; WAN024CUG_at; Start 195; Stop 219
tcaacacagtggagcttacattgcc

SEQ ID NO: 133773 - DNA, 25 bp, Artificial
  probe
  misc_feature (1)..(25): SEQ ID NO: 4257; WAN024CUG_at; Start 221; Stop 245
gctactccataacttgggaagaagt

SEQ ID NO: 133774 - DNA, 25 bp, Artificial
  probe
  misc_feature (1)..(25): SEQ ID NO: 4257; WAN024CUG_at; Start 29; Stop 53
aaaaagcgcgctatgttcggattga

SEQ ID NO: 133775 - DNA, 25 bp, Artificial
  probe
  misc_feature (1)..(25): SEQ ID NO: 4257; WAN024CUG_at; Start 213; Stop 237
cattgcccgctactccataacttgg

SEQ ID NO: 133776 - DNA, 25 bp, Artificial
  probe
  misc_feature (1)..(25): SEQ ID NO: 4257; WAN024CUG_at; Start 404; Stop 428
gatggcaaacaatctatgaaaacag

SEQ ID NO: 133777 - DNA, 25 bp, Artificial
  probe
  misc_feature (1)..(25): SEQ ID NO: 4257; WAN024CUG_at; Start 309; Stop 333
ccagactgcaggttttgtcctcaac

SEQ ID NO: 133778 - DNA, 25 bp, Artificial
  probe
  misc_feature (1)..(25): SEQ ID NO: 4257; WAN024CUG_at; Start 494; Stop 518
gtgacgatgatgtcttgtaactaat

SEQ ID NO: 133779 - DNA, 25 bp, Artificial
  probe
  misc_feature (1)..(25): SEQ ID NO: 4257; WAN024CUG_at; Start 478; Stop 502
ttgaattccaaggtgagtgacgatg

SEQ ID NO: 133780 - DNA, 25 bp, Artificial
  probe
  misc_feature (1)..(25): SEQ ID NO: 4257; WAN024CUG_at; Start 58; Stop 82
gaaggctataatgccctcagtcttg

SEQ ID NO: 133781 - DNA, 25 bp, Artificial
  probe
  misc_feature (1)..(25): SEQ ID NO: 4257; WAN024CUG_at; Start 324; Stop 348
tgtcctcaacctcccaatcaaagaa

SEQ ID NO: 133782 - DNA, 25 bp, Artificial
  probe
  misc_feature (1)..(25): SEQ ID NO: 4257; WAN024CUG_at; Start 152; Stop 176
aaccaatcagtcagactcctgtgaa

SEQ ID NO: 133783 - DNA, 25 bp, Artificial
  probe
  misc_feature (1)..(25): SEQ ID NO: 4257; WAN024CUG_at; Start 354; Stop 378
gagaaatctgcgagttaagattgag

SEQ ID NO: 133784 - DNA, 25 bp, Artificial
  probe
  misc_feature (1)..(25): SEQ ID NO: 4257; WAN024CUG_at; Start 64; Stop 88
tataatgccctcagtcttgcagaag

SEQ ID NO: 133785 - DNA, 25 bp, Artificial
  probe
  misc_feature (1)..(25): SEQ ID NO: 4257; WAN024CUG_at; Start 40; Stop 64
tatgttcggattgagctagaaggct

SEQ ID NO: 133786 - DNA, 25 bp, Artificial
  probe
  misc_feature (1)..(25): SEQ ID NO: 4257; WAN024CUG_at; Start 274; Stop 298
gttcgtagtcattcttgggaaggaa

SEQ ID NO: 133787 - DNA, 25 bp, Artificial
  probe
  misc_feature (1)..(25): SEQ ID NO: 4257; WAN024CUG_at; Start 75; Stop 99
cagtcttgcagaagttgaagttttc

SEQ ID NO: 133788 - DNA, 25 bp, Artificial
  probe
  misc_feature (1)..(25): SEQ ID NO: 4257; WAN024CUG_at; Start 346; Stop 370
gaaaatatgagaaatctgcgagtta

SEQ ID NO: 133789 - DNA, 25 bp, Artificial
  probe
  misc_feature (1)..(25): SEQ ID NO: 4257; WAN024CUG_at; Start 421; Stop 445
gaaaacagaccaattttagctcaac

SEQ ID NO: 133790 - DNA, 25 bp, Artificial
  probe
  misc_feature (1)..(25): SEQ ID NO: 4257; WAN024CUG_at; Start 362; Stop 386
tgcgagttaagattgagaaaaagac

SEQ ID NO: 133791 - DNA, 25 bp, Artificial
  probe
  misc_feature (1)..(25): SEQ ID NO: 4257; WAN024CUG_at; Start 148; Stop 172
gttcaaccaatcagtcagactcctg

SEQ ID NO: 133792 - DNA, 25 bp, Artificial
  probe
  misc_feature (1)..(25): SEQ ID NO: 4257; WAN024CUG_at; Start 391; Stop 415
ctactatggaatagatggcaaacaa

SEQ ID NO: 133793 - DNA, 25 bp, Artificial
  probe
  misc_feature (1)..(25): SEQ ID NO: 4257; WAN024CUG_at; Start 1; Stop 25
gtgtcagcacaaattacgattaacc

SEQ ID NO: 133794 - DNA, 25 bp, Artificial
  probe
  misc_feature (1)..(25): SEQ ID NO: 4257; WAN024CUG_at; Start 316; Stop 340
gcaggttttgtcctcaacctcccaa

SEQ ID NO: 133795 - DNA, 25 bp, Artificial
  probe
  misc_feature (1)..(25): SEQ ID NO: 4257; WAN024CUG_at; Start 263; Stop 287
gaaaccaagttgttcgtagtcattc

SEQ ID NO: 133796 - DNA, 25 bp, Artificial
  probe
  misc_feature (1)..(25): SEQ ID NO: 4257; WAN024CUG_at; Start 17; Stop 41
cgattaaccataaaaaagcgcgcta

SEQ ID NO: 133797 - DNA, 25 bp, Artificial
  probe
  misc_feature (1)..(25): SEQ ID NO: 4257; WAN024CUG_at; Start 248; Stop 272
cagtagataaagatggaaaccaagt

SEQ ID NO: 133798 - DNA, 25 bp, Artificial
  probe
  misc_feature (1)..(25): SEQ ID NO: 4257; WAN024CUG_at; Start 408; Stop 432
gcaaacaatctatgaaaacagacca

SEQ ID NO: 133799 - DNA, 25 bp, Artificial
  probe
  misc_feature (1)..(25): SEQ ID NO: 4257; WAN024CUG_at; Start 484; Stop 508
tccaaggtgagtgacgatgatgtct

SEQ ID NO: 133800 - DNA, 25 bp, Artificial
  probe
  misc_feature (1)..(25): SEQ ID NO: 4257; WAN024CUG_at; Start 300; Stop 324
cggtcgcaaccagactgcaggtttt

SEQ ID NO: 133801 - DNA, 25 bp, Artificial
  probe
  misc_feature (1)..(25): SEQ ID NO: 4257; WAN024CUG_at; Start 70; Stop 94
gccctcagtcttgcagaagttgaag

SEQ ID NO: 133802 - DNA, 25 bp, Artificial
  probe
  misc_feature (1)..(25): SEQ ID NO: 4257; WAN024CUG_at; Start 333; Stop 357
cctcccaatcaaagaaaatatgaga

SEQ ID NO: 133803 - DNA, 25 bp, Artificial
  probe
  misc_feature (1)..(25): SEQ ID NO: 4257; WAN024CUG_at; Start 36; Stop 60
gcgctatgttcggattgagctagaa

SEQ ID NO: 133804 - DNA, 25 bp, Artificial
  probe
  misc_feature (1)..(25): SEQ ID NO: 4257; WAN024CUG_at; Start 51; Stop 75
tgagctagaaggctataatgccctc

SEQ ID NO: 133805 - DNA, 25 bp, Artificial
  probe
  misc_feature (1)..(25): SEQ ID NO: 4257; WAN024CUG_at; Start 201; Stop 225
cagtggagcttacattgcccgctac

SEQ ID NO: 133806 - DNA, 25 bp, Artificial
  probe
  misc_feature (1)..(25): SEQ ID NO: 7651; WAN024CUH_at; Start 57; Stop 81
ttccagagataaaaaggctcttggg

SEQ ID NO: 133807 - DNA, 25 bp, Artificial
  probe
  misc_feature (1)..(25): SEQ ID NO: 7651; WAN024CUH_at; Start 67; Stop 91
aaaaaggctcttggggtgatcaatc

SEQ ID NO: 133808 - DNA, 25 bp, Artificial
  probe
  misc_feature (1)..(25): SEQ ID NO: 7651; WAN024CUH_at; Start 3; Stop 27
ggtacttttagaacacaggcataag

SEQ ID NO: 133809 - DNA, 25 bp, Artificial
  probe
  misc_feature (1)..(25): SEQ ID NO: 7651; WAN024CUH_at; Start 37; Stop 61
ttcccacaagccatacgagtttcca

SEQ ID NO: 133810 - DNA, 25 bp, Artificial
  probe
  misc_feature (1)..(25): SEQ ID NO: 7651; WAN024CUH_at; Start 14; Stop 38
aacacaggcataagcaagctccctt

SEQ ID NO: 133811 - DNA, 25 bp, Artificial
  probe
  misc_feature (1)..(25): SEQ ID NO: 7651; WAN024CUH_at; Start 47; Stop 71
ccatacgagtttccagagataaaaa

SEQ ID NO: 133812 - DNA, 25 bp, Artificial
  probe
  misc_feature (1)..(25): SEQ ID NO: 7651; WAN024CUH_at; Start 7; Stop 31
cttttagaacacaggcataagcaag

SEQ ID NO: 133813 - DNA, 25 bp, Artificial
  probe
  misc_feature (1)..(25): SEQ ID NO: 7651; WAN024CUH_at; Start 48; Stop 72
catacgagtttccagagataaaaag

SEQ ID NO: 133814 - DNA, 25 bp, Artificial
  probe
  misc_feature (1)..(25): SEQ ID NO: 7651; WAN024CUH_at; Start 1; Stop 25
ttggtacttttagaacacaggcata

SEQ ID NO: 133815 - DNA, 25 bp, Artificial
  probe
  misc_feature (1)..(25): SEQ ID NO: 7651; WAN024CUH_at; Start 43; Stop 67
caagccatacgagtttccagagata

SEQ ID NO: 133816 - DNA, 25 bp, Artificial
  probe
  misc_feature (1)..(25): SEQ ID NO: 7651; WAN024CUH_at; Start 55; Stop 79
gtttccagagataaaaaggctcttg

SEQ ID NO: 133817 - DNA, 25 bp, Artificial
  probe
  misc_feature (1)..(25): SEQ ID NO: 7651; WAN024CUH_at; Start 39; Stop 63
cccacaagccatacgagtttccaga

SEQ ID NO: 133818 - DNA, 25 bp, Artificial
  probe
  misc_feature (1)..(25): SEQ ID NO: 7651; WAN024CUH_at; Start 46; Stop 70
gccatacgagtttccagagataaaa

SEQ ID NO: 133819 - DNA, 25 bp, Artificial
  probe
  misc_feature (1)..(25): SEQ ID NO: 7651; WAN024CUH_at; Start 12; Stop 36
agaacacaggcataagcaagctccc

SEQ ID NO: 133820 - DNA, 25 bp, Artificial
  probe
  misc_feature (1)..(25): SEQ ID NO: 7651; WAN024CUH_at; Start 56; Stop 80
tttccagagataaaaaggctcttgg

SEQ ID NO: 133821 - DNA, 25 bp, Artificial
  probe
  misc_feature (1)..(25): SEQ ID NO: 7651; WAN024CUH_at; Start 53; Stop 77
gagtttccagagataaaaaggctct

SEQ ID NO: 133822 - DNA, 25 bp, Artificial
  probe
  misc_feature (1)..(25): SEQ ID NO: 7651; WAN024CUH_at; Start 73; Stop 97
gctcttggggtgatcaatcaaaggg

SEQ ID NO: 133823 - DNA, 25 bp, Artificial
  probe
  misc_feature (1)..(25): SEQ ID NO: 7651; WAN024CUH_at; Start 38; Stop 62
tcccacaagccatacgagtttccag

SEQ ID NO: 133824 - DNA, 25 bp, Artificial
  probe
  misc_feature (1)..(25): SEQ ID NO: 7651; WAN024CUH_at; Start 22; Stop 46
cataagcaagctcccttcccacaag

SEQ ID NO: 133825 - DNA, 25 bp, Artificial
  probe
  misc_feature (1)..(25): SEQ ID NO: 7651; WAN024CUH_at; Start 45; Stop 69
agccatacgagtttccagagataaa

SEQ ID NO: 133826 - DNA, 25 bp, Artificial
  probe
  misc_feature (1)..(25): SEQ ID NO: 7651; WAN024CUH_at; Start 11; Stop 35
tagaacacaggcataagcaagctcc

SEQ ID NO: 133827 - DNA, 25 bp, Artificial
  probe
  misc_feature (1)..(25): SEQ ID NO: 7651; WAN024CUH_at; Start 5; Stop 29
tacttttagaacacaggcataagca

SEQ ID NO: 133828 - DNA, 25 bp, Artificial
  probe
  misc_feature (1)..(25): SEQ ID NO: 7651; WAN024CUH_at; Start 50; Stop 74
tacgagtttccagagataaaaaggc

SEQ ID NO: 133829 - DNA, 25 bp, Artificial
  probe
  misc_feature (1)..(25): SEQ ID NO: 7651; WAN024CUH_at; Start 78; Stop 102
tggggtgatcaatcaaagggttgat

SEQ ID NO: 133830 - DNA, 25 bp, Artificial
  probe
  misc_feature (1)..(25): SEQ ID NO: 7651; WAN024CUH_at; Start 13; Stop 37
gaacacaggcataagcaagctccct

SEQ ID NO: 133831 - DNA, 25 bp, Artificial
  probe
  misc_feature (1)..(25): SEQ ID NO: 7651; WAN024CUH_at; Start 42; Stop 66
acaagccatacgagtttccagagat

SEQ ID NO: 133832 - DNA, 25 bp, Artificial
  probe
  misc_feature (1)..(25): SEQ ID NO: 7651; WAN024CUH_at; Start 40; Stop 64
ccacaagccatacgagtttccagag

SEQ ID NO: 133833 - DNA, 25 bp, Artificial
  probe
  misc_feature (1)..(25): SEQ ID NO: 7651; WAN024CUH_at; Start 8; Stop 32
ttttagaacacaggcataagcaagc

SEQ ID NO: 133834 - DNA, 25 bp, Artificial
  probe
  misc_feature (1)..(25): SEQ ID NO: 7651; WAN024CUH_at; Start 41; Stop 65
cacaagccatacgagtttccagaga

SEQ ID NO: 133835 - DNA, 25 bp, Artificial
  probe
  misc_feature (1)..(25): SEQ ID NO: 7651; WAN024CUH_at; Start 4; Stop 28
gtacttttagaacacaggcataagc

SEQ ID NO: 133836 - DNA, 25 bp, Artificial
  probe
  misc_feature (1)..(25): SEQ ID NO: 7651; WAN024CUH_at; Start 10; Stop 34
ttagaacacaggcataagcaagctc

SEQ ID NO: 133837 - DNA, 25 bp, Artificial
  probe
  misc_feature (1)..(25): SEQ ID NO: 7651; WAN024CUH_at; Start 52; Stop 76
cgagtttccagagataaaaaggctc

SEQ ID NO: 133838 - DNA, 25 bp, Artificial
  probe
  misc_feature (1)..(25): SEQ ID NO: 7651; WAN024CUH_at; Start 44; Stop 68
aagccatacgagtttccagagataa

SEQ ID NO: 133839 - DNA, 25 bp, Artificial
  probe
  misc_feature (1)..(25): SEQ ID NO: 7651; WAN024CUH_at; Start 51; Stop 75
acgagtttccagagataaaaaggct

SEQ ID NO: 133840 - DNA, 25 bp, Artificial
  probe
  misc_feature (1)..(25): SEQ ID NO: 1708; WAN024CUI_at; Start 140; Stop 164
gagtattgatcatggtcaagccact

SEQ ID NO: 133841 - DNA, 25 bp, Artificial
  probe
  misc_feature (1)..(25): SEQ ID NO: 1708; WAN024CUI_at; Start 178; Stop 202
tctgcagcttttgcgacagtaacga

SEQ ID NO: 133842 - DNA, 25 bp, Artificial
  probe
  misc_feature (1)..(25): SEQ ID NO: 1708; WAN024CUI_at; Start 119; Stop 143
ggtcaaagcgcattccaaccagagt

SEQ ID NO: 133843 - DNA, 25 bp, Artificial
  probe
  misc_feature (1)..(25): SEQ ID NO: 1708; WAN024CUI_at; Start 172; Stop 196
gcatcttctgcagcttttgcgacag

SEQ ID NO: 133844 - DNA, 25 bp, Artificial
  probe
  misc_feature (1)..(25): SEQ ID NO: 1708; WAN024CUI_at; Start 124; Stop 148
aagcgcattccaaccagagtattga

SEQ ID NO: 133845 - DNA, 25 bp, Artificial
  probe
  misc_feature (1)..(25): SEQ ID NO: 1708; WAN024CUI_at; Start 187; Stop 211
tttgcgacagtaacgatatcggtca

SEQ ID NO: 133846 - DNA, 25 bp, Artificial
  probe
  misc_feature (1)..(25): SEQ ID NO: 1708; WAN024CUI_at; Start 80; Stop 104
cacctgttccattggccaagattgg

SEQ ID NO: 133847 - DNA, 25 bp, Artificial
  probe
  misc_feature (1)..(25): SEQ ID NO: 1708; WAN024CUI_at; Start 43; Stop 67
ttgagggctactggaaagactgctg

SEQ ID NO: 133848 - DNA, 25 bp, Artificial
  probe
  misc_feature (1)..(25): SEQ ID NO: 1708; WAN024CUI_at; Start 121; Stop 145
tcaaagcgcattccaaccagagtat

SEQ ID NO: 133849 - DNA, 25 bp, Artificial
  probe
  misc_feature (1)..(25): SEQ ID NO: 1708; WAN024CUI_at; Start 143; Stop 167
tattgatcatggtcaagccacttgc

SEQ ID NO: 133850 - DNA, 25 bp, Artificial
  probe
  misc_feature (1)..(25): SEQ ID NO: 1708; WAN024CUI_at; Start 126; Stop 150
gcgcattccaaccagagtattgatc

SEQ ID NO: 133851 - DNA, 25 bp, Artificial
  probe
  misc_feature (1)..(25): SEQ ID NO: 1708; WAN024CUI_at; Start 182; Stop 206
cagcttttgcgacagtaacgatatc

SEQ ID NO: 133852 - DNA, 25 bp, Artificial
  probe
  misc_feature (1)..(25): SEQ ID NO: 1708; WAN024CUI_at; Start 86; Stop 110
ttccattggccaagattggttttct

SEQ ID NO: 133853 - DNA, 25 bp, Artificial
  probe
  misc_feature (1)..(25): SEQ ID NO: 1708; WAN024CUI_at; Start 190; Stop 214
gcgacagtaacgatatcggtcacac

SEQ ID NO: 133854 - DNA, 25 bp, Artificial
  probe
  misc_feature (1)..(25): SEQ ID NO: 1708; WAN024CUI_at; Start 151; Stop 175
atggtcaagccacttgctcccgcat

SEQ ID NO: 133855 - DNA, 25 bp, Artificial
  probe
  misc_feature (1)..(25): SEQ ID NO: 1708; WAN024CUI_at; Start 42; Stop 66
tttgagggctactggaaagactgct

SEQ ID NO: 133856 - DNA, 25 bp, Artificial
  probe
  misc_feature (1)..(25): SEQ ID NO: 1708; WAN024CUI_at; Start 29; Stop 53
cttggcggatgagtttgagggctac

SEQ ID NO: 133857 - DNA, 25 bp, Artificial
  probe
  misc_feature (1)..(25): SEQ ID NO: 1708; WAN024CUI_at; Start 133; Stop 157
ccaaccagagtattgatcatggtca

SEQ ID NO: 133858 - DNA, 25 bp, Artificial
  probe
  misc_feature (1)..(25): SEQ ID NO: 1708; WAN024CUI_at; Start 47; Stop 71
gggctactggaaagactgctggacc

SEQ ID NO: 133859 - DNA, 25 bp, Artificial
  probe
  misc_feature (1)..(25): SEQ ID NO: 1708; WAN024CUI_at; Start 137; Stop 161
ccagagtattgatcatggtcaagcc

SEQ ID NO: 133860 - DNA, 25 bp, Artificial
  probe
  misc_feature (1)..(25): SEQ ID NO: 1708; WAN024CUI_at; Start 146; Stop 170
tgatcatggtcaagccacttgctcc

SEQ ID NO: 133861 - DNA, 25 bp, Artificial
  probe
  misc_feature (1)..(25): SEQ ID NO: 1708; WAN024CUI_at; Start 175; Stop 199
tcttctgcagcttttgcgacagtaa

SEQ ID NO: 133862 - DNA, 25 bp, Artificial
  probe
  misc_feature (1)..(25): SEQ ID NO: 1708; WAN024CUI_at; Start 201; Stop 225
gatatcggtcacactcggggttaat

SEQ ID NO: 133863 - DNA, 25 bp, Artificial
  probe
  misc_feature (1)..(25): SEQ ID NO: 1708; WAN024CUI_at; Start 166; Stop 190
gctcccgcatcttctgcagcttttg

SEQ ID NO: 133864 - DNA, 25 bp, Artificial
  probe
  misc_feature (1)..(25): SEQ ID NO: 1708; WAN024CUI_at; Start 117; Stop 141
gaggtcaaagcgcattccaaccaga

SEQ ID NO: 133865 - DNA, 25 bp, Artificial
  probe
  misc_feature (1)..(25): SEQ ID NO: 1708; WAN024CUI_at; Start 112; Stop 136
gttttgaggtcaaagcgcattccaa

SEQ ID NO: 133866 - DNA, 25 bp, Artificial
  probe
  misc_feature (1)..(25): SEQ ID NO: 1708; WAN024CUI_at; Start 129; Stop 153
cattccaaccagagtattgatcatg

SEQ ID NO: 133867 - DNA, 25 bp, Artificial
  probe
  misc_feature (1)..(25): SEQ ID NO: 1708; WAN024CUI_at; Start 184; Stop 208
gcttttgcgacagtaacgatatcgg

SEQ ID NO: 133868 - DNA, 25 bp, Artificial
  probe
  misc_feature (1)..(25): SEQ ID NO: 1708; WAN024CUI_at; Start 114; Stop 138
tttgaggtcaaagcgcattccaacc

SEQ ID NO: 133869 - DNA, 25 bp, Artificial
  probe
  misc_feature (1)..(25): SEQ ID NO: 1708; WAN024CUI_at; Start 75; Stop 99
cattccacctgttccattggccaag

SEQ ID NO: 133870 - DNA, 25 bp, Artificial
  probe
  misc_feature (1)..(25): SEQ ID NO: 1708; WAN024CUI_at; Start 210; Stop 234
cacactcggggttaatttgacataa

SEQ ID NO: 133871 - DNA, 25 bp, Artificial
  probe
  misc_feature (1)..(25): SEQ ID NO: 1708; WAN024CUI_at; Start 2; Stop 26
tgataggcaggtctgttgtttgggc

SEQ ID NO: 133872 - DNA, 25 bp, Artificial
  probe
  misc_feature (1)..(25): SEQ ID NO: 1708; WAN024CUI_at; Start 180; Stop 204
tgcagcttttgcgacagtaacgata

SEQ ID NO: 133873 - DNA, 25 bp, Artificial
  probe
  misc_feature (1)..(25): SEQ ID NO: 1708; WAN024CUI_at; Start 194; Stop 218
cagtaacgatatcggtcacactcgg

SEQ ID NO: 133874 - DNA, 25 bp, Artificial
  probe
  misc_feature (1)..(25): SEQ ID NO: 1244; WAN024CUJ_at; Start 484; Stop 508
gaattggctcagtatggtcaggtct

SEQ ID NO: 133875 - DNA, 25 bp, Artificial
  probe
  misc_feature (1)..(25): SEQ ID NO: 1244; WAN024CUJ_at; Start 470; Stop 494
ttattttgaaaacggaattggctca

SEQ ID NO: 133876 - DNA, 25 bp, Artificial
  probe
  misc_feature (1)..(25): SEQ ID NO: 1244; WAN024CUJ_at; Start 9; Stop 33
cacatgtaagaagcgtttgggtgtc

SEQ ID NO: 133877 - DNA, 25 bp, Artificial
  probe
  misc_feature (1)..(25): SEQ ID NO: 1244; WAN024CUJ_at; Start 656; Stop 680
gagcctatttatctctggaatctcg

SEQ ID NO: 133878 - DNA, 25 bp, Artificial
  probe
  misc_feature (1)..(25): SEQ ID NO: 1244; WAN024CUJ_at; Start 605; Stop 629
gggctccaggaatgatgaagtatat

SEQ ID NO: 133879 - DNA, 25 bp, Artificial
  probe
  misc_feature (1)..(25): SEQ ID NO: 1244; WAN024CUJ_at; Start 384; Stop 408
tccacccttgcttgaggtggccaag

SEQ ID NO: 133880 - DNA, 25 bp, Artificial
  probe
  misc_feature (1)..(25): SEQ ID NO: 1244; WAN024CUJ_at; Start 638; Stop 662
cctttgatgatcacccaagagccta

SEQ ID NO: 133881 - DNA, 25 bp, Artificial
  probe
  misc_feature (1)..(25): SEQ ID NO: 1244; WAN024CUJ_at; Start 498; Stop 522
tggtcaggtctttgtaacgacagat

SEQ ID NO: 133882 - DNA, 25 bp, Artificial
  probe
  misc_feature (1)..(25): SEQ ID NO: 1244; WAN024CUJ_at; Start 697; Stop 721
ggagcttgctatgcctgtgttctaa

SEQ ID NO: 133883 - DNA, 25 bp, Artificial
  probe
  misc_feature (1)..(25): SEQ ID NO: 1244; WAN024CUJ_at; Start 314; Stop 338
gaaatggttttgacttgtctgacct

SEQ ID NO: 133884 - DNA, 25 bp, Artificial
  probe
  misc_feature (1)..(25): SEQ ID NO: 1244; WAN024CUJ_at; Start 269; Stop 293
caaccttaagtcagggagacactct

SEQ ID NO: 133885 - DNA, 25 bp, Artificial
  probe
  misc_feature (1)..(25): SEQ ID NO: 1244; WAN024CUJ_at; Start 515; Stop 539
cgacagatgatggttcttatggcat

SEQ ID NO: 133886 - DNA, 25 bp, Artificial
  probe
  misc_feature (1)..(25): SEQ ID NO: 1244; WAN024CUJ_at; Start 217; Stop 241
aagcagtgtcacctcatttatcgga

SEQ ID NO: 133887 - DNA, 25 bp, Artificial
  probe
  misc_feature (1)..(25): SEQ ID NO: 1244; WAN024CUJ_at; Start 258; Stop 282
tgcaattttttcaaccttaagtcag

SEQ ID NO: 133888 - DNA, 25 bp, Artificial
  probe
  misc_feature (1)..(25): SEQ ID NO: 1244; WAN024CUJ_at; Start 83; Stop 107
caatctttgaattagtcctagaagg

SEQ ID NO: 133889 - DNA, 25 bp, Artificial
  probe
  misc_feature (1)..(25): SEQ ID NO: 1244; WAN024CUJ_at; Start 738; Stop 762
gacggtcagccaacgcgtctgtgaa

SEQ ID NO: 133890 - DNA, 25 bp, Artificial
  probe
  misc_feature (1)..(25): SEQ ID NO: 1244; WAN024CUJ_at; Start 369; Stop 393
tggtgggattggtgttccacccttg

SEQ ID NO: 133891 - DNA, 25 bp, Artificial
  probe
  misc_feature (1)..(25): SEQ ID NO: 1244; WAN024CUJ_at; Start 134; Stop 158
gccaatttcttcatctgcgtgtacc

SEQ ID NO: 133892 - DNA, 25 bp, Artificial
  probe
  misc_feature (1)..(25): SEQ ID NO: 1244; WAN024CUJ_at; Start 125; Stop 149
tgcgagcaggccaatttcttcatct

SEQ ID NO: 133893 - DNA, 25 bp, Artificial
  probe
  misc_feature (1)..(25): SEQ ID NO: 1244; WAN024CUJ_at; Start 531; Stop 555
ttatggcatcaagggaaatgtttcc

SEQ ID NO: 133894 - DNA, 25 bp, Artificial
  probe
  misc_feature (1)..(25): SEQ ID NO: 1244; WAN024CUJ_at; Start 69; Stop 93
ggaaatcgcgccagcaatctttgaa

SEQ ID NO: 133895 - DNA, 25 bp, Artificial
  probe
  misc_feature (1)..(25): SEQ ID NO: 1244; WAN024CUJ_at; Start 748; Stop 772
caacgcgtctgtgaagatggtcctg

SEQ ID NO: 133896 - DNA, 25 bp, Artificial
  probe
  misc_feature (1)..(25): SEQ ID NO: 1244; WAN024CUJ_at; Start 113; Stop 137
tggttgaagccatgcgagcaggcca

SEQ ID NO: 133897 - DNA, 25 bp, Artificial
  probe
  misc_feature (1)..(25): SEQ ID NO: 1244; WAN024CUJ_at; Start 40; Stop 64
ttggaaaccatgaaggtggttgcac

SEQ ID NO: 133898 - DNA, 25 bp, Artificial
  probe
  misc_feature (1)..(25): SEQ ID NO: 1244; WAN024CUJ_at; Start 98; Stop 122
tcctagaaggagaaatggttgaagc

SEQ ID NO: 133899 - DNA, 25 bp, Artificial
  probe
  misc_feature (1)..(25): SEQ ID NO: 1244; WAN024CUJ_at; Start 421; Stop 445
cgtggagtgaaagtagtgacagtcc

SEQ ID NO: 133900 - DNA, 25 bp, Artificial
  probe
  misc_feature (1)..(25): SEQ ID NO: 1244; WAN024CUJ_at; Start 438; Stop 462
gacagtcctcggttttgctaataag

SEQ ID NO: 133901 - DNA, 25 bp, Artificial
  probe
  misc_feature (1)..(25): SEQ ID NO: 1244; WAN024CUJ_at; Start 448; Stop 472
ggttttgctaataaggatgctgtta

SEQ ID NO: 133902 - DNA, 25 bp, Artificial
  probe
  misc_feature (1)..(25): SEQ ID NO: 1244; WAN024CUJ_at; Start 709; Stop 733
gcctgtgttctaaaagtaccagaaa

SEQ ID NO: 133903 - DNA, 25 bp, Artificial
  probe
  misc_feature (1)..(25): SEQ ID NO: 1244; WAN024CUJ_at; Start 25; Stop 49
ttgggtgtcattcggttggaaacca

SEQ ID NO: 133904 - DNA, 25 bp, Artificial
  probe
  misc_feature (1)..(25): SEQ ID NO: 1244; WAN024CUJ_at; Start 620; Stop 644
tgaagtatatcaatcaaacctttga

SEQ ID NO: 133905 - DNA, 25 bp, Artificial
  probe
  misc_feature (1)..(25): SEQ ID NO: 1244; WAN024CUJ_at; Start 669; Stop 693
tctggaatctcgtatggcttgtggg

SEQ ID NO: 133906 - DNA, 25 bp, Artificial
  probe
  misc_feature (1)..(25): SEQ ID NO: 1244; WAN024CUJ_at; Start 306; Stop 330
gcctcagggaaatggttttgacttg

SEQ ID NO: 133907 - DNA, 25 bp, Artificial
  probe
  misc_feature (1)..(25): SEQ ID NO: 1244; WAN024CUJ_at; Start 56; Stop 80
tggttgcacaagaggaaatcgcgcc

SEQ ID NO: 133908 - DNA, 25 bp, Artificial
  probe
  misc_feature (1)..(25): SEQ ID NO: 3888; WAN024CUK_at; Start 418; Stop 442
gcaactaatgtaaaagctatcgagc

SEQ ID NO: 133909 - DNA, 25 bp, Artificial
  probe
  misc_feature (1)..(25): SEQ ID NO: 3888; WAN024CUK_at; Start 181; Stop 205
tctattatgatcaaggcgacaaccc

SEQ ID NO: 133910 - DNA, 25 bp, Artificial
  probe
  misc_feature (1)..(25): SEQ ID NO: 3888; WAN024CUK_at; Start 439; Stop 463
gagctcaatatttcttgtcccaatg

SEQ ID NO: 133911 - DNA, 25 bp, Artificial
  probe
  misc_feature (1)..(25): SEQ ID NO: 3888; WAN024CUK_at; Start 524; Stop 548
tgaaagcagctgtggaagcctcaga

SEQ ID NO: 133912 - DNA, 25 bp, Artificial
  probe
  misc_feature (1)..(25): SEQ ID NO: 3888; WAN024CUK_at; Start 268; Stop 292
gcaattggcttgcaaaatcctggtt

SEQ ID NO: 133913 - DNA, 25 bp, Artificial
  probe
  misc_feature (1)..(25): SEQ ID NO: 3888; WAN024CUK_at; Start 725; Stop 749
cagcagtctttccagtagccctcaa

SEQ ID NO: 133914 - DNA, 25 bp, Artificial
  probe
  misc_feature (1)..(25): SEQ ID NO: 3888; WAN024CUK_at; Start 358; Stop 382
gccaatgtagctggtttttcaaaac

SEQ ID NO: 133915 - DNA, 25 bp, Artificial
  probe
  misc_feature (1)..(25): SEQ ID NO: 3888; WAN024CUK_at; Start 962; Stop 986
tccgtcaggaagtaaaagagtctct

SEQ ID NO: 133916 - DNA, 25 bp, Artificial
  probe
  misc_feature (1)..(25): SEQ ID NO: 3888; WAN024CUK_at; Start 373; Stop 397
ttttcaaaacaagagtatgcagctg

SEQ ID NO: 133917 - DNA, 25 bp, Artificial
  probe
  misc_feature (1)..(25): SEQ ID NO: 3888; WAN024CUK_at; Start 588; Stop 612
tatcgttactgtcgcaaaagctgca

SEQ ID NO: 133918 - DNA, 25 bp, Artificial
  probe
  misc_feature (1)..(25): SEQ ID NO: 3888; WAN024CUK_at; Start 846; Stop 870
ggcatctgctatcggagttggaaca

SEQ ID NO: 133919 - DNA, 25 bp, Artificial
  probe
  misc_feature (1)..(25): SEQ ID NO: 3888; WAN024CUK_at; Start 554; Stop 578
cagtttatgtcaaattaaccccgag

SEQ ID NO: 133920 - DNA, 25 bp, Artificial
  probe
  misc_feature (1)..(25): SEQ ID NO: 3888; WAN024CUK_at; Start 917; Stop 941
taccaaaagtcatggataaatacgg

SEQ ID NO: 133921 - DNA, 25 bp, Artificial
  probe
  misc_feature (1)..(25): SEQ ID NO: 3888; WAN024CUK_at; Start 460; Stop 484
aatgttgaccactgtaatcatggac

SEQ ID NO: 133922 - DNA, 25 bp, Artificial
  probe
  misc_feature (1)..(25): SEQ ID NO: 3888; WAN024CUK_at; Start 246; Stop 270
gacgcctgctggtatgctcaatgca

SEQ ID NO: 133923 - DNA, 25 bp, Artificial
  probe
  misc_feature (1)..(25): SEQ ID NO: 3888; WAN024CUK_at; Start 648; Stop 672
tactctggttggaatgcgctttgac

SEQ ID NO: 133924 - DNA, 25 bp, Artificial
  probe
  misc_feature (1)..(25): SEQ ID NO: 3888; WAN024CUK_at; Start 503; Stop 527
cagatttggcttatgatgtggtgaa

SEQ ID NO: 133925 - DNA, 25 bp, Artificial
  probe
  misc_feature (1)..(25): SEQ ID NO: 3888; WAN024CUK_at; Start 391; Stop 415
gcagctgtttctcatgggatttcca

SEQ ID NO: 133926 - DNA, 25 bp, Artificial
  probe
  misc_feature (1)..(25): SEQ ID NO: 3888; WAN024CUK_at; Start 569; Stop 593
taaccccgagtgtgaccgatatcgt

SEQ ID NO: 133927 - DNA, 25 bp, Artificial
  probe
  misc_feature (1)..(25): SEQ ID NO: 3888; WAN024CUK_at; Start 538; Stop 562
gaagcctcagaagtgccagtttatg

SEQ ID NO: 133928 - DNA, 25 bp, Artificial
  probe
  misc_feature (1)..(25): SEQ ID NO: 3888; WAN024CUK_at; Start 631; Stop 655
ggcttgaccatgatcaatactctgg

SEQ ID NO: 133929 - DNA, 25 bp, Artificial
  probe
  misc_feature (1)..(25): SEQ ID NO: 3888; WAN024CUK_at; Start 602; Stop 626
caaaagctgcagaagatgcgggagc

SEQ ID NO: 133930 - DNA, 25 bp, Artificial
  probe
  misc_feature (1)..(25): SEQ ID NO: 3888; WAN024CUK_at; Start 482; Stop 506
gacttttgattggtcaagatccaga

SEQ ID NO: 133931 - DNA, 25 bp, Artificial
  probe
  misc_feature (1)..(25): SEQ ID NO: 3888; WAN024CUK_at; Start 317; Stop 341
taccttggctggaaagagaatatcc

SEQ ID NO: 133932 - DNA, 25 bp, Artificial
  probe
  misc_feature (1)..(25): SEQ ID NO: 3888; WAN024CUK_at; Start 119; Stop 143
catcaggctgttttggctttggaca

SEQ ID NO: 133933 - DNA, 25 bp, Artificial
  probe
  misc_feature (1)..(25): SEQ ID NO: 3888; WAN024CUK_at; Start 933; Stop 957
taaatacggtattagcagtctggaa

SEQ ID NO: 133934 - DNA, 25 bp, Artificial
  probe
  misc_feature (1)..(25): SEQ ID NO: 3888; WAN024CUK_at; Start 689; Stop 713
caatcttggccaatggaacaggtgg

SEQ ID NO: 133935 - DNA, 25 bp, Artificial
  probe
  misc_feature (1)..(25): SEQ ID NO: 3888; WAN024CUK_at; Start 302; Stop 326
ttttggctgaaaagctaccttggct

SEQ ID NO: 133936 - DNA, 25 bp, Artificial
  probe
  misc_feature (1)..(25): SEQ ID NO: 3888; WAN024CUK_at; Start 403; Stop 427
catgggatttccaaggcaactaatg

SEQ ID NO: 133937 - DNA, 25 bp, Artificial
  probe
  misc_feature (1)..(25): SEQ ID NO: 3888; WAN024CUK_at; Start 776; Stop 800
cagacctgcctatcattggaatggg

SEQ ID NO: 133938 - DNA, 25 bp, Artificial
  probe
  misc_feature (1)..(25): SEQ ID NO: 3888; WAN024CUK_at; Start 817; Stop 841
gaagctgccctagaaatgtatctgg

SEQ ID NO: 133939 - DNA, 25 bp, Artificial
  probe
  misc_feature (1)..(25): SEQ ID NO: 3888; WAN024CUK_at; Start 949; Stop 973
agtctggaagaactccgtcaggaag

SEQ ID NO: 133940 - DNA, 25 bp, Artificial
  probe
  misc_feature (1)..(25): SEQ ID NO: 3888; WAN024CUK_at; Start 102; Stop 126
aaatccgattattccagcatcaggc

SEQ ID NO: 133941 - DNA, 25 bp, Artificial
  probe
  misc_feature (1)..(25): SEQ ID NO: 3888; WAN024CUK_at; Start 138; Stop 162
tggacaagagtatgccaagtactat

SEQ ID NO: 133942 - DNA, 25 bp, Artificial
  probe
  misc_feature (1)..(25): SEQ ID NO: 1038; WAN024CUL_at; Start 309; Stop 333
tggtcgcgaagaagaagttgttact

SEQ ID NO: 133943 - DNA, 25 bp, Artificial
  probe
  misc_feature (1)..(25): SEQ ID NO: 1038; WAN024CUL_at; Start 276; Stop 300
ccttgaagctcgcaaagcatgggac

SEQ ID NO: 133944 - DNA, 25 bp, Artificial
  probe
  misc_feature (1)..(25): SEQ ID NO: 1038; WAN024CUL_at; Start 108; Stop 132
ctctggaactggtgttgaaggtgtc

SEQ ID NO: 133945 - DNA, 25 bp, Artificial
  probe
  misc_feature (1)..(25): SEQ ID NO: 1038; WAN024CUL_at; Start 1154; Stop 1178
cacaaacaggattttcaatggctga

SEQ ID NO: 133946 - DNA, 25 bp, Artificial
  probe
  misc_feature (1)..(25): SEQ ID NO: 1038; WAN024CUL_at; Start 345; Stop 369
gcgtgccgttaaaggtggactttca

SEQ ID NO: 133947 - DNA, 25 bp, Artificial
  probe
  misc_feature (1)..(25): SEQ ID NO: 1038; WAN024CUL_at; Start 1139; Stop 1163
tcgaacttccagaaacacaaacagg

SEQ ID NO: 133948 - DNA, 25 bp, Artificial
  probe
  misc_feature (1)..(25): SEQ ID NO: 1038; WAN024CUL_at; Start 925; Stop 949
tcacaaatttcacacaaacggattg

SEQ ID NO: 133949 - DNA, 25 bp, Artificial
  probe
  misc_feature (1)..(25): SEQ ID NO: 1038; WAN024CUL_at; Start 327; Stop 351
tgttactgttaaaggaacgcgtgcc

SEQ ID NO: 133950 - DNA, 25 bp, Artificial
  probe
  misc_feature (1)..(25): SEQ ID NO: 1038; WAN024CUL_at; Start 782; Stop 806
ttaaagcaacagtaccaggaccatg

SEQ ID NO: 133951 - DNA, 25 bp, Artificial
  probe
  misc_feature (1)..(25): SEQ ID NO: 1038; WAN024CUL_at; Start 945; Stop 969
gattgaaaatccaaaagaagctctt

SEQ ID NO: 133952 - DNA, 25 bp, Artificial
  probe
  misc_feature (1)..(25): SEQ ID NO: 1038; WAN024CUL_at; Start 433; Stop 457
aacgctgagcgttttgtaggtcaag

SEQ ID NO: 133953 - DNA, 25 bp, Artificial
  probe
  misc_feature (1)..(25): SEQ ID NO: 1038; WAN024CUL_at; Start 483; Stop 507
taacgctaaagaaaaccgcttcatc

SEQ ID NO: 133954 - DNA, 25 bp, Artificial
  probe
  misc_feature (1)..(25): SEQ ID NO: 1038; WAN024CUL_at; Start 67; Stop 91
gaagtattgacagttgatgcgactc

SEQ ID NO: 133955 - DNA, 25 bp, Artificial
  probe
  misc_feature (1)..(25): SEQ ID NO: 1038; WAN024CUL_at; Start 156; Stop 180
cgatcgtgatgcagatatcaatgac

SEQ ID NO: 133956 - DNA, 25 bp, Artificial
  probe
  misc_feature (1)..(25): SEQ ID NO: 1038; WAN024CUL_at; Start 889; Stop 913
gaagtattgccaggtatcgatggac

SEQ ID NO: 133957 - DNA, 25 bp, Artificial
  probe
  misc_feature (1)..(25): SEQ ID NO: 1038; WAN024CUL_at; Start 747; Stop 771
tcttaacgaagaagaaggacgtgta

SEQ ID NO: 133958 - DNA, 25 bp, Artificial
  probe
  misc_feature (1)..(25): SEQ ID NO: 1038; WAN024CUL_at; Start 512; Stop 536
cacgtcgtgaagttgttgaagcagc

SEQ ID NO: 133959 - DNA, 25 bp, Artificial
  probe
  misc_feature (1)..(25): SEQ ID NO: 1038; WAN024CUL_at; Start 1126; Stop 1150
gaaaagcgtgatttcgaacttccag

SEQ ID NO: 133960 - DNA, 25 bp, Artificial
  probe
  misc_feature (1)..(25): SEQ ID NO: 1038; WAN024CUL_at; Start 379; Stop 403
gaaggtgttcgtggatttatcccag

SEQ ID NO: 133961 - DNA, 25 bp, Artificial
  probe
  misc_feature (1)..(25): SEQ ID NO: 1038; WAN024CUL_at; Start 528; Stop 552
tgaagcagctactgcagcagctcgc

SEQ ID NO: 133962 - DNA, 25 bp, Artificial
  probe
  misc_feature (1)..(25): SEQ ID NO: 1038; WAN024CUL_at; Start 260; Stop 284
ttgtatctaaaaaacgccttgaagc

SEQ ID NO: 133963 - DNA, 25 bp, Artificial
  probe
  misc_feature (1)..(25): SEQ ID NO: 1038; WAN024CUL_at; Start 127; Stop 151
ggtgtcttgactcttcgcgaattga

SEQ ID NO: 133964 - DNA, 25 bp, Artificial
  probe
  misc_feature (1)..(25): SEQ ID NO: 1038; WAN024CUL_at; Start 415; Stop 439
gatactcgtttcgtacgtaacgctg

SEQ ID NO: 133965 - DNA, 25 bp, Artificial
  probe
  misc_feature (1)..(25): SEQ ID NO: 1038; WAN024CUL_at; Start 905; Stop 929
tcgatggacttgttcacgtatcaca

SEQ ID NO: 133966 - DNA, 25 bp, Artificial
  probe
  misc_feature (1)..(25): SEQ ID NO: 1038; WAN024CUL_at; Start 802; Stop 826
ccatgggatggcgttgagcaaaaat

SEQ ID NO: 133967 - DNA, 25 bp, Artificial
  probe
  misc_feature (1)..(25): SEQ ID NO: 1038; WAN024CUL_at; Start 1110; Stop 1134
tcgtccaagacgtcaagaaaagcgt

SEQ ID NO: 133968 - DNA, 25 bp, Artificial
  probe
  misc_feature (1)..(25): SEQ ID NO: 1038; WAN024CUL_at; Start 1054; Stop 1078
gaacgtccagcccaagaagaaggac

SEQ ID NO: 133969 - DNA, 25 bp, Artificial
  probe
  misc_feature (1)..(25): SEQ ID NO: 1038; WAN024CUL_at; Start 545; Stop 569
cagctcgcgctgaagtattcggtaa

SEQ ID NO: 133970 - DNA, 25 bp, Artificial
  probe
  misc_feature (1)..(25): SEQ ID NO: 1038; WAN024CUL_at; Start 858; Stop 882
taaacgtttgactgacttcggtgca

SEQ ID NO: 133971 - DNA, 25 bp, Artificial
  probe
  misc_feature (1)..(25): SEQ ID NO: 1038; WAN024CUL_at; Start 1041; Stop 1065
taaagctcttgaagaacgtccagcc

SEQ ID NO: 133972 - DNA, 25 bp, Artificial
  probe
  misc_feature (1)..(25): SEQ ID NO: 1038; WAN024CUL_at; Start 1002; Stop 1026
tgaagttaacgcagatgcagaacgc

SEQ ID NO: 133973 - DNA, 25 bp, Artificial
  probe
  misc_feature (1)..(25): SEQ ID NO: 1038; WAN024CUL_at; Start 293; Stop 317
catgggacaaacttgttggtcgcga

SEQ ID NO: 133974 - DNA, 25 bp, Artificial
  probe
  misc_feature (1)..(25): SEQ ID NO: 1038; WAN024CUL_at; Start 601; Stop 625
gttgctcgtatcacaagcttcggcg

SEQ ID NO: 133975 - DNA, 25 bp, Artificial
  probe
  misc_feature (1)..(25): SEQ ID NO: 1038; WAN024CUL_at; Start 81; Stop 105
tgatgcgactcaagctaacgttgca

SEQ ID NO: 133976 - DNA, 25 bp, Artificial
  probe
  misc_feature (1)..(25): SEQ ID NO: 4974; WAN024CUM_at; Start 85; Stop 109
ggaatgactcgtaatactattgata

SEQ ID NO: 133977 - DNA, 25 bp, Artificial
  probe
  misc_feature (1)..(25): SEQ ID NO: 4974; WAN024CUM_at; Start 56; Stop 80
tcccaaatggcataaattgcagtgg

SEQ ID NO: 133978 - DNA, 25 bp, Artificial
  probe
  misc_feature (1)..(25): SEQ ID NO: 4974; WAN024CUM_at; Start 217; Stop 241
cattggttattggatgtggtttatc

SEQ ID NO: 133979 - DNA, 25 bp, Artificial
  probe
  misc_feature (1)..(25): SEQ ID NO: 4974; WAN024CUM_at; Start 13; Stop 37
aatactgggtgtcttctgatgttaa

SEQ ID NO: 133980 - DNA, 25 bp, Artificial
  probe
  misc_feature (1)..(25): SEQ ID NO: 4974; WAN024CUM_at; Start 2; Stop 26
tgaagttcgagaatactgggtgtct

SEQ ID NO: 133981 - DNA, 25 bp, Artificial
  probe
  misc_feature (1)..(25): SEQ ID NO: 4974; WAN024CUM_at; Start 93; Stop 117
tcgtaatactattgatagagatggt

SEQ ID NO: 133982 - DNA, 25 bp, Artificial
  probe
  misc_feature (1)..(25): SEQ ID NO: 4974; WAN024CUM_at; Start 252; Stop 276
tcatcagaccctggataaacgagct

SEQ ID NO: 133983 - DNA, 25 bp, Artificial
  probe
  misc_feature (1)..(25): SEQ ID NO: 4974; WAN024CUM_at; Start 271; Stop 295
cgagctgcttttaaccttaatctta

SEQ ID NO: 133984 - DNA, 25 bp, Artificial
  probe
  misc_feature (1)..(25): SEQ ID NO: 4974; WAN024CUM_at; Start 74; Stop 98
gcagtggaattggaatgactcgtaa

SEQ ID NO: 133985 - DNA, 25 bp, Artificial
  probe
  misc_feature (1)..(25): SEQ ID NO: 4974; WAN024CUM_at; Start 25; Stop 49
cttctgatgttaagtggttgtgtca

SEQ ID NO: 133986 - DNA, 25 bp, Artificial
  probe
  misc_feature (1)..(25): SEQ ID NO: 4974; WAN024CUM_at; Start 226; Stop 250
ttggatgtggtttatcgtgaagacc

SEQ ID NO: 133987 - DNA, 25 bp, Artificial
  probe
  misc_feature (1)..(25): SEQ ID NO: 4974; WAN024CUM_at; Start 200; Stop 224
ggtcagcagaaagtatgcattggtt

SEQ ID NO: 133988 - DNA, 25 bp, Artificial
  probe
  misc_feature (1)..(25): SEQ ID NO: 4974; WAN024CUM_at; Start 43; Stop 67
tgtgtcaaaaccatcccaaatggca

SEQ ID NO: 133989 - DNA, 25 bp, Artificial
  probe
  misc_feature (1)..(25): SEQ ID NO: 4974; WAN024CUM_at; Start 234; Stop 258
ggtttatcgtgaagaccatcatcag

SEQ ID NO: 133990 - DNA, 25 bp, Artificial
  probe
  misc_feature (1)..(25): SEQ ID NO: 4974; WAN024CUM_at; Start 206; Stop 230
cagaaagtatgcattggttattgga

SEQ ID NO: 133991 - DNA, 25 bp, Artificial
  probe
  misc_feature (1)..(25): SEQ ID NO: 4974; WAN024CUM_at; Start 181; Stop 205
catagtgttcgaggtcattggtcag

SEQ ID NO: 133992 - DNA, 25 bp, Artificial
  probe
  misc_feature (1)..(25): SEQ ID NO: 4974; WAN024CUM_at; Start 285; Stop 309
ccttaatcttatccgaaaaatgtgt

SEQ ID NO: 133993 - DNA, 25 bp, Artificial
  probe
  misc_feature (1)..(25): SEQ ID NO: 4974; WAN024CUM_at; Start 70; Stop 94
aattgcagtggaattggaatgactc

SEQ ID NO: 133994 - DNA, 25 bp, Artificial
  probe
  misc_feature (1)..(25): SEQ ID NO: 4974; WAN024CUM_at; Start 240; Stop 264
tcgtgaagaccatcatcagaccctg

SEQ ID NO: 133995 - DNA, 25 bp, Artificial
  probe
  misc_feature (1)..(25): SEQ ID NO: 4974; WAN024CUM_at; Start 35; Stop 59
taagtggttgtgtcaaaaccatccc

SEQ ID NO: 133996 - DNA, 25 bp, Artificial
  probe
  misc_feature (1)..(25): SEQ ID NO: 4974; WAN024CUM_at; Start 127; Stop 151
caagacgttcgctattttatcttta

SEQ ID NO: 133997 - DNA, 25 bp, Artificial
  probe
  misc_feature (1)..(25): SEQ ID NO: 4974; WAN024CUM_at; Start 122; Stop 146
caagtcaagacgttcgctattttat

SEQ ID NO: 133998 - DNA, 25 bp, Artificial
  probe
  misc_feature (1)..(25): SEQ ID NO: 4974; WAN024CUM_at; Start 244; Stop 268
gaagaccatcatcagaccctggata

SEQ ID NO: 133999 - DNA, 25 bp, Artificial
  probe
  misc_feature (1)..(25): SEQ ID NO: 4974; WAN024CUM_at; Start 265; Stop 289
gataaacgagctgcttttaacctta

SEQ ID NO: 134000 - DNA, 25 bp, Artificial
  probe
  misc_feature (1)..(25): SEQ ID NO: 4974; WAN024CUM_at; Start 173; Stop 197
ccttttgccatagtgttcgaggtca

SEQ ID NO: 134001 - DNA, 25 bp, Artificial
  probe
  misc_feature (1)..(25): SEQ ID NO: 4974; WAN024CUM_at; Start 108; Stop 132
tagagatggtattacaagtcaagac

SEQ ID NO: 134002 - DNA, 25 bp, Artificial
  probe
  misc_feature (1)..(25): SEQ ID NO: 4974; WAN024CUM_at; Start 115; Stop 139
ggtattacaagtcaagacgttcgct

SEQ ID NO: 134003 - DNA, 25 bp, Artificial
  probe
  misc_feature (1)..(25): SEQ ID NO: 4974; WAN024CUM_at; Start 189; Stop 213
tcgaggtcattggtcagcagaaagt

SEQ ID NO: 134004 - DNA, 25 bp, Artificial
  probe
  misc_feature (1)..(25): SEQ ID NO: 4974; WAN024CUM_at; Start 255; Stop 279
tcagaccctggataaacgagctgct

SEQ ID NO: 134005 - DNA, 25 bp, Artificial
  probe
  misc_feature (1)..(25): SEQ ID NO: 4974; WAN024CUM_at; Start 196; Stop 220
cattggtcagcagaaagtatgcatt

SEQ ID NO: 134006 - DNA, 25 bp, Artificial
  probe
  misc_feature (1)..(25): SEQ ID NO: 4974; WAN024CUM_at; Start 258; Stop 282
gaccctggataaacgagctgctttt

SEQ ID NO: 134007 - DNA, 25 bp, Artificial
  probe
  misc_feature (1)..(25): SEQ ID NO: 4974; WAN024CUM_at; Start 9; Stop 33
cgagaatactgggtgtcttctgatg

SEQ ID NO: 134008 - DNA, 25 bp, Artificial
  probe
  misc_feature (1)..(25): SEQ ID NO: 4974; WAN024CUM_at; Start 79; Stop 103
ggaattggaatgactcgtaatacta

SEQ ID NO: 134009 - DNA, 25 bp, Artificial
  probe
  misc_feature (1)..(25): SEQ ID NO: 4974; WAN024CUM_at; Start 291; Stop 315
tcttatccgaaaaatgtgtttatat

SEQ ID NO: 134010 - DNA, 25 bp, Artificial
  probe
  misc_feature (1)..(25): SEQ ID NO: 6731; WAN024CUN_at; Start 79; Stop 103
caccttgaaaacacggacttgcctg

SEQ ID NO: 134011 - DNA, 25 bp, Artificial
  probe
  misc_feature (1)..(25): SEQ ID NO: 6731; WAN024CUN_at; Start 83; Stop 107
ttgaaaacacggacttgcctgcatt

SEQ ID NO: 134012 - DNA, 25 bp, Artificial
  probe
  misc_feature (1)..(25): SEQ ID NO: 6731; WAN024CUN_at; Start 52; Stop 76
gcgaccaatatcccaaccttgaaaa

SEQ ID NO: 134013 - DNA, 25 bp, Artificial
  probe
  misc_feature (1)..(25): SEQ ID NO: 6731; WAN024CUN_at; Start 47; Stop 71
gtgttgcgaccaatatcccaacctt

SEQ ID NO: 134014 - DNA, 25 bp, Artificial
  probe
  misc_feature (1)..(25): SEQ ID NO: 6731; WAN024CUN_at; Start 115; Stop 139
catacaatccaccgaatttcgatgt

SEQ ID NO: 134015 - DNA, 25 bp, Artificial
  probe
  misc_feature (1)..(25): SEQ ID NO: 6731; WAN024CUN_at; Start 44; Stop 68
ctggtgttgcgaccaatatcccaac

SEQ ID NO: 134016 - DNA, 25 bp, Artificial
  probe
  misc_feature (1)..(25): SEQ ID NO: 6731; WAN024CUN_at; Start 48; Stop 72
tgttgcgaccaatatcccaaccttg

SEQ ID NO: 134017 - DNA, 25 bp, Artificial
  probe
  misc_feature (1)..(25): SEQ ID NO: 6731; WAN024CUN_at; Start 84; Stop 108
tgaaaacacggacttgcctgcattt

SEQ ID NO: 134018 - DNA, 25 bp, Artificial
  probe
  misc_feature (1)..(25): SEQ ID NO: 6731; WAN024CUN_at; Start 50; Stop 74
ttgcgaccaatatcccaaccttgaa

SEQ ID NO: 134019 - DNA, 25 bp, Artificial
  probe
  misc_feature (1)..(25): SEQ ID NO: 6731; WAN024CUN_at; Start 110; Stop 134
tatctcatacaatccaccgaatttc

SEQ ID NO: 134020 - DNA, 25 bp, Artificial
  probe
  misc_feature (1)..(25): SEQ ID NO: 6731; WAN024CUN_at; Start 78; Stop 102
ccaccttgaaaacacggacttgcct

SEQ ID NO: 134021 - DNA, 25 bp, Artificial
  probe
  misc_feature (1)..(25): SEQ ID NO: 6731; WAN024CUN_at; Start 82; Stop 106
cttgaaaacacggacttgcctgcat

SEQ ID NO: 134022 - DNA, 25 bp, Artificial
  probe
  misc_feature (1)..(25): SEQ ID NO: 6731; WAN024CUN_at; Start 51; Stop 75
tgcgaccaatatcccaaccttgaaa

SEQ ID NO: 134023 - DNA, 25 bp, Artificial
  probe
  misc_feature (1)..(25): SEQ ID NO: 6731; WAN024CUN_at; Start 122; Stop 146
tccaccgaatttcgatgtccccctc

SEQ ID NO: 134024 - DNA, 25 bp, Artificial
  probe
  misc_feature (1)..(25): SEQ ID NO: 6731; WAN024CUN_at; Start 128; Stop 152
gaatttcgatgtccccctccctaca

SEQ ID NO: 134025 - DNA, 25 bp, Artificial
  probe
  misc_feature (1)..(25): SEQ ID NO: 6731; WAN024CUN_at; Start 46; Stop 70
ggtgttgcgaccaatatcccaacct

SEQ ID NO: 134026 - DNA, 25 bp, Artificial
  probe
  misc_feature (1)..(25): SEQ ID NO: 6731; WAN024CUN_at; Start 119; Stop 143
caatccaccgaatttcgatgtcccc

SEQ ID NO: 134027 - DNA, 25 bp, Artificial
  probe
  misc_feature (1)..(25): SEQ ID NO: 6731; WAN024CUN_at; Start 111; Stop 135
atctcatacaatccaccgaatttcg

SEQ ID NO: 134028 - DNA, 25 bp, Artificial
  probe
  misc_feature (1)..(25): SEQ ID NO: 6731; WAN024CUN_at; Start 112; Stop 136
tctcatacaatccaccgaatttcga

SEQ ID NO: 134029 - DNA, 25 bp, Artificial
  probe
  misc_feature (1)..(25): SEQ ID NO: 6731; WAN024CUN_at; Start 81; Stop 105
ccttgaaaacacggacttgcctgca

SEQ ID NO: 134030 - DNA, 25 bp, Artificial
  probe
  misc_feature (1)..(25): SEQ ID NO: 6731; WAN024CUN_at; Start 45; Stop 69
tggtgttgcgaccaatatcccaacc

SEQ ID NO: 134031 - DNA, 25 bp, Artificial
  probe
  misc_feature (1)..(25): SEQ ID NO: 6731; WAN024CUN_at; Start 80; Stop 104
accttgaaaacacggacttgcctgc

SEQ ID NO: 134032 - DNA, 25 bp, Artificial
  probe
  misc_feature (1)..(25): SEQ ID NO: 6731; WAN024CUN_at; Start 113; Stop 137
ctcatacaatccaccgaatttcgat

SEQ ID NO: 134033 - DNA, 25 bp, Artificial
  probe
  misc_feature (1)..(25): SEQ ID NO: 6731; WAN024CUN_at; Start 116; Stop 140
atacaatccaccgaatttcgatgtc

SEQ ID NO: 134034 - DNA, 25 bp, Artificial
  probe
  misc_feature (1)..(25): SEQ ID NO: 6731; WAN024CUN_at; Start 49; Stop 73
gttgcgaccaatatcccaaccttga

SEQ ID NO: 134035 - DNA, 25 bp, Artificial
  probe
  misc_feature (1)..(25): SEQ ID NO: 6731; WAN024CUN_at; Start 114; Stop 138
tcatacaatccaccgaatttcgatg

SEQ ID NO: 134036 - DNA, 25 bp, Artificial
  probe
  misc_feature (1)..(25): SEQ ID NO: 6731; WAN024CUN_at; Start 121; Stop 145
atccaccgaatttcgatgtccccct

SEQ ID NO: 134037 - DNA, 25 bp, Artificial
  probe
  misc_feature (1)..(25): SEQ ID NO: 6731; WAN024CUN_at; Start 117; Stop 141
tacaatccaccgaatttcgatgtcc

SEQ ID NO: 134038 - DNA, 25 bp, Artificial
  probe
  misc_feature (1)..(25): SEQ ID NO: 6731; WAN024CUN_at; Start 118; Stop 142
acaatccaccgaatttcgatgtccc

SEQ ID NO: 134039 - DNA, 25 bp, Artificial
  probe
  misc_feature (1)..(25): SEQ ID NO: 6731; WAN024CUN_at; Start 133; Stop 157
tcgatgtccccctccctacaaccta

SEQ ID NO: 134040 - DNA, 25 bp, Artificial
  probe
  misc_feature (1)..(25): SEQ ID NO: 2029; WAN024CUO_at; Start 687; Stop 711
tgctgatgttctgaaagaggaagac

SEQ ID NO: 134041 - DNA, 25 bp, Artificial
  probe
  misc_feature (1)..(25): SEQ ID NO: 2029; WAN024CUO_at; Start 989; Stop 1013
tgtactatggagaacatgatttggc

SEQ ID NO: 134042 - DNA, 25 bp, Artificial
  probe
  misc_feature (1)..(25): SEQ ID NO: 2029; WAN024CUO_at; Start 1184; Stop 1208
tcagtcagcgtatctttaagacagt

SEQ ID NO: 134043 - DNA, 25 bp, Artificial
  probe
  misc_feature (1)..(25): SEQ ID NO: 2029; WAN024CUO_at; Start 920; Stop 944
gaacacctgtcattgctcacggaaa

SEQ ID NO: 134044 - DNA, 25 bp, Artificial
  probe
  misc_feature (1)..(25): SEQ ID NO: 2029; WAN024CUO_at; Start 846; Stop 870
agcggcggatttcttcatttcggca

SEQ ID NO: 134045 - DNA, 25 bp, Artificial
  probe
  misc_feature (1)..(25): SEQ ID NO: 2029; WAN024CUO_at; Start 711; Stop 735
caaggttaaactggtagtagctggg

SEQ ID NO: 134046 - DNA, 25 bp, Artificial
  probe
  misc_feature (1)..(25): SEQ ID NO: 2029; WAN024CUO_at; Start 1027; Stop 1051
gaagccctgattgcaacaccagaca

SEQ ID NO: 134047 - DNA, 25 bp, Artificial
  probe
  misc_feature (1)..(25): SEQ ID NO: 2029; WAN024CUO_at; Start 536; Stop 560
ttgaattagccaagtttgagcgtcc

SEQ ID NO: 134048 - DNA, 25 bp, Artificial
  probe
  misc_feature (1)..(25): SEQ ID NO: 2029; WAN024CUO_at; Start 828; Stop 852
gacggctctttactataaagcggcg

SEQ ID NO: 134049 - DNA, 25 bp, Artificial
  probe
  misc_feature (1)..(25): SEQ ID NO: 2029; WAN024CUO_at; Start 463; Stop 487
cctagtgagattgtccgtgacttgc

SEQ ID NO: 134050 - DNA, 25 bp, Artificial
  probe
  misc_feature (1)..(25): SEQ ID NO: 2029; WAN024CUO_at; Start 904; Stop 928
gaaagcttagccagtggaacacctg

SEQ ID NO: 134051 - DNA, 25 bp, Artificial
  probe
  misc_feature (1)..(25): SEQ ID NO: 2029; WAN024CUO_at; Start 1090; Stop 1114
tcagctgagaactttgggaaacgag

SEQ ID NO: 134052 - DNA, 25 bp, Artificial
  probe
  misc_feature (1)..(25): SEQ ID NO: 2029; WAN024CUO_at; Start 581; Stop 605
tgaaagaactgcgtagtaaactagg

SEQ ID NO: 134053 - DNA, 25 bp, Artificial
  probe
  misc_feature (1)..(25): SEQ ID NO: 2029; WAN024CUO_at; Start 772; Stop 796
cagaacctagagattcaagactcag

SEQ ID NO: 134054 - DNA, 25 bp, Artificial
  probe
  misc_feature (1)..(25): SEQ ID NO: 2029; WAN024CUO_at; Start 142; Stop 166
tacgaagattggcaaattatccgca

SEQ ID NO: 134055 - DNA, 25 bp, Artificial
  probe
  misc_feature (1)..(25): SEQ ID NO: 2029; WAN024CUO_at; Start 192; Stop 216
taaggatcgtcgctttgcctaccga

SEQ ID NO: 134056 - DNA, 25 bp, Artificial
  probe
  misc_feature (1)..(25): SEQ ID NO: 2029; WAN024CUO_at; Start 278; Stop 302
cagaattttctcttggcctgttggg

SEQ ID NO: 134057 - DNA, 25 bp, Artificial
  probe
  misc_feature (1)..(25): SEQ ID NO: 2029; WAN024CUO_at; Start 415; Stop 439
aagtatctggttagaggtttcctgc

SEQ ID NO: 134058 - DNA, 25 bp, Artificial
  probe
  misc_feature (1)..(25): SEQ ID NO: 2029; WAN024CUO_at; Start 609; Stop 633
tcaagatggtgaaaagacgttgctt

SEQ ID NO: 134059 - DNA, 25 bp, Artificial
  probe
  misc_feature (1)..(25): SEQ ID NO: 2029; WAN024CUO_at; Start 734; Stop 758
gggatggcccttatctgaatgacct

SEQ ID NO: 134060 - DNA, 25 bp, Artificial
  probe
  misc_feature (1)..(25): SEQ ID NO: 2029; WAN024CUO_at; Start 1012; Stop 1036
gctggtgctattttggaagccctga

SEQ ID NO: 134061 - DNA, 25 bp, Artificial
  probe
  misc_feature (1)..(25): SEQ ID NO: 2029; WAN024CUO_at; Start 77; Stop 101
cagaacttgaaaagcagggacatgc

SEQ ID NO: 134062 - DNA, 25 bp, Artificial
  probe
  misc_feature (1)..(25): SEQ ID NO: 2029; WAN024CUO_at; Start 110; Stop 134
tctttacgacgacagataaggatgt

SEQ ID NO: 134063 - DNA, 25 bp, Artificial
  probe
  misc_feature (1)..(25): SEQ ID NO: 2029; WAN024CUO_at; Start 891; Stop 915
tttgacctacttggaaagcttagcc

SEQ ID NO: 134064 - DNA, 25 bp, Artificial
  probe
  misc_feature (1)..(25): SEQ ID NO: 2029; WAN024CUO_at; Start 810; Stop 834
gatgattgctcctagtgagacggct

SEQ ID NO: 134065 - DNA, 25 bp, Artificial
  probe
  misc_feature (1)..(25): SEQ ID NO: 2029; WAN024CUO_at; Start 1252; Stop 1276
tctagacgcatgttgaaggcttcaa

SEQ ID NO: 134066 - DNA, 25 bp, Artificial
  probe
  misc_feature (1)..(25): SEQ ID NO: 2029; WAN024CUO_at; Start 126; Stop 150
taaggatgtcaatcgctacgaagat

SEQ ID NO: 134067 - DNA, 25 bp, Artificial
  probe
  misc_feature (1)..(25): SEQ ID NO: 2029; WAN024CUO_at; Start 1280; Stop 1304
cacagttgatcagtatgagagacta

SEQ ID NO: 134068 - DNA, 25 bp, Artificial
  probe
  misc_feature (1)..(25): SEQ ID NO: 2029; WAN024CUO_at; Start 351; Stop 375
cacccagtatgaagactatgtccat

SEQ ID NO: 134069 - DNA, 25 bp, Artificial
  probe
  misc_feature (1)..(25): SEQ ID NO: 2029; WAN024CUO_at; Start 211; Stop 235
taccgaggttttagcaaggcacttg

SEQ ID NO: 134070 - DNA, 25 bp, Artificial
  probe
  misc_feature (1)..(25): SEQ ID NO: 2029; WAN024CUO_at; Start 48; Stop 72
tgttgcgaccagtattcgaaccttg

SEQ ID NO: 134071 - DNA, 25 bp, Artificial
  probe
  misc_feature (1)..(25): SEQ ID NO: 2029; WAN024CUO_at; Start 1169; Stop 1193
ctaaagatgatacggtcagtcagcg

SEQ ID NO: 134072 - DNA, 25 bp, Artificial
  probe
  misc_feature (1)..(25): SEQ ID NO: 2029; WAN024CUO_at; Start 515; Stop 539
aacgggtcattcctactgggattga

SEQ ID NO: 134073 - DNA, 25 bp, Artificial
  probe
  misc_feature (1)..(25): SEQ ID NO: 2029; WAN024CUO_at; Start 865; Stop 889
tcggcatcgacaagcgaaacgcaag

SEQ ID NO: 134074 - DNA, 25 bp, Artificial
  probe
  misc_feature (1)..(25): SEQ ID NO: 853; WAN024CUP_at; Start 895; Stop 919
tcgcgtaacatgaagacaggtggtc

SEQ ID NO: 134075 - DNA, 25 bp, Artificial
  probe
  misc_feature (1)..(25): SEQ ID NO: 853; WAN024CUP_at; Start 968; Stop 992
gggaaatcacagtcagcagccagta

SEQ ID NO: 134076 - DNA, 25 bp, Artificial
  probe
  misc_feature (1)..(25): SEQ ID NO: 853; WAN024CUP_at; Start 497; Stop 521
cggagaggctcaataaactggttga

SEQ ID NO: 134077 - DNA, 25 bp, Artificial
  probe
  misc_feature (1)..(25): SEQ ID NO: 853; WAN024CUP_at; Start 202; Stop 226
ctcaaggagcatgccaagcgggtag

SEQ ID NO: 134078 - DNA, 25 bp, Artificial
  probe
  misc_feature (1)..(25): SEQ ID NO: 853; WAN024CUP_at; Start 984; Stop 1008
cagccagtacggtctaggaagtacc

SEQ ID NO: 134079 - DNA, 25 bp, Artificial
  probe
  misc_feature (1)..(25): SEQ ID NO: 853; WAN024CUP_at; Start 79; Stop 103
caaaaaatgctgattgcgaaaggcg

SEQ ID NO: 134080 - DNA, 25 bp, Artificial
  probe
  misc_feature (1)..(25): SEQ ID NO: 853; WAN024CUP_at; Start 837; Stop 861
gggtattgccccagaggatttggaa

SEQ ID NO: 134081 - DNA, 25 bp, Artificial
  probe
  misc_feature (1)..(25): SEQ ID NO: 853; WAN024CUP_at; Start 945; Stop 969
tgaattggcccatcaattgggtggg

SEQ ID NO: 134082 - DNA, 25 bp, Artificial
  probe
  misc_feature (1)..(25): SEQ ID NO: 853; WAN024CUP_at; Start 595; Stop 619
gacaagctcttaattgagtgcatga

SEQ ID NO: 134083 - DNA, 25 bp, Artificial
  probe
  misc_feature (1)..(25): SEQ ID NO: 853; WAN024CUP_at; Start 686; Stop 710
cccggattgagggagattatgctaa

SEQ ID NO: 134084 - DNA, 25 bp, Artificial
  probe
  misc_feature (1)..(25): SEQ ID NO: 853; WAN024CUP_at; Start 577; Stop 601
aaagacagtatttttctggacaagc

SEQ ID NO: 134085 - DNA, 25 bp, Artificial
  probe
  misc_feature (1)..(25): SEQ ID NO: 853; WAN024CUP_at; Start 469; Stop 493
cattatctagcaaccattggacgcc

SEQ ID NO: 134086 - DNA, 25 bp, Artificial
  probe
  misc_feature (1)..(25): SEQ ID NO: 853; WAN024CUP_at; Start 105; Stop 129
gatttactttttgcttgggatgacc

SEQ ID NO: 134087 - DNA, 25 bp, Artificial
  probe
  misc_feature (1)..(25): SEQ ID NO: 853; WAN024CUP_at; Start 527; Stop 551
tgaattttttgaccctaaacacagc

SEQ ID NO: 134088 - DNA, 25 bp, Artificial
  probe
  misc_feature (1)..(25): SEQ ID NO: 853; WAN024CUP_at; Start 558; Stop 582
tcaggtggaaactaccagtaaagac

SEQ ID NO: 134089 - DNA, 25 bp, Artificial
  probe
  misc_feature (1)..(25): SEQ ID NO: 853; WAN024CUP_at; Start 188; Stop 212
cgtcgttgggcaaactcaaggagca

SEQ ID NO: 134090 - DNA, 25 bp, Artificial
  probe
  misc_feature (1)..(25): SEQ ID NO: 853; WAN024CUP_at; Start 1026; Stop 1050
cctctctggtagtgaaaataaagcc

SEQ ID NO: 134091 - DNA, 25 bp, Artificial
  probe
  misc_feature (1)..(25): SEQ ID NO: 853; WAN024CUP_at; Start 173; Stop 197
tattgccagtctttacgtcgttggg

SEQ ID NO: 134092 - DNA, 25 bp, Artificial
  probe
  misc_feature (1)..(25): SEQ ID NO: 853; WAN024CUP_at; Start 245; Stop 269
caaatttggaggttcaaggtcctgt

SEQ ID NO: 134093 - DNA, 25 bp, Artificial
  probe
  misc_feature (1)..(25): SEQ ID NO: 853; WAN024CUP_at; Start 919; Stop 943
catggattaggacttgcgattgcgc

SEQ ID NO: 134094 - DNA, 25 bp, Artificial
  probe
  misc_feature (1)..(25): SEQ ID NO: 853; WAN024CUP_at; Start 754; Stop 778
tattctgctccaggaaccaagctgg

SEQ ID NO: 134095 - DNA, 25 bp, Artificial
  probe
  misc_feature (1)..(25): SEQ ID NO: 853; WAN024CUP_at; Start 880; Stop 904
tatcgtgtcgaaacttcgcgtaaca

SEQ ID NO: 134096 - DNA, 25 bp, Artificial
  probe
  misc_feature (1)..(25): SEQ ID NO: 853; WAN024CUP_at; Start 655; Stop 679
gatgtccacttgcaggtaatcccag

SEQ ID NO: 134097 - DNA, 25 bp, Artificial
  probe
  misc_feature (1)..(25): SEQ ID NO: 853; WAN024CUP_at; Start 446; Stop 470
ttatcaaggagtcggagcaagctca

SEQ ID NO: 134098 - DNA, 25 bp, Artificial
  probe
  misc_feature (1)..(25): SEQ ID NO: 853; WAN024CUP_at; Start 706; Stop 730
gctaagctttctcgtatcttggtga

SEQ ID NO: 134099 - DNA, 25 bp, Artificial
  probe
  misc_feature (1)..(25): SEQ ID NO: 853; WAN024CUP_at; Start 542; Stop 566
taaacacagctagaaatcaggtgga

SEQ ID NO: 134100 - DNA, 25 bp, Artificial
  probe
  misc_feature (1)..(25): SEQ ID NO: 853; WAN024CUP_at; Start 667; Stop 691
caggtaatcccagagtctgcccgga

SEQ ID NO: 134101 - DNA, 25 bp, Artificial
  probe
  misc_feature (1)..(25): SEQ ID NO: 853; WAN024CUP_at; Start 482; Stop 506
ccattggacgccagacggagaggct

SEQ ID NO: 134102 - DNA, 25 bp, Artificial
  probe
  misc_feature (1)..(25): SEQ ID NO: 853; WAN024CUP_at; Start 770; Stop 794
ccaagctggaagtggtggctaagct

SEQ ID NO: 134103 - DNA, 25 bp, Artificial
  probe
  misc_feature (1)..(25): SEQ ID NO: 853; WAN024CUP_at; Start 122; Stop 146
ggatgaccatcgttgccagccttgt

SEQ ID NO: 134104 - DNA, 25 bp, Artificial
  probe
  misc_feature (1)..(25): SEQ ID NO: 853; WAN024CUP_at; Start 156; Stop 180
gattagtctctttctcctattgcca

SEQ ID NO: 134105 - DNA, 25 bp, Artificial
  probe
  misc_feature (1)..(25): SEQ ID NO: 853; WAN024CUP_at; Start 141; Stop 165
ccttgtcggtgctgggattagtctc

SEQ ID NO: 134106 - DNA, 25 bp, Artificial
  probe
  misc_feature (1)..(25): SEQ ID NO: 853; WAN024CUP_at; Start 722; Stop 746
tcttggtgaatctggtcgataacgc

SEQ ID NO: 134107 - DNA, 25 bp, Artificial
  probe
  misc_feature (1)..(25): SEQ ID NO: 853; WAN024CUP_at; Start 639; Stop 663
tgagcaggagagaagagatgtccac

SEQ ID NO: 134108 - DNA, 25 bp, Artificial
  probe
  misc_feature (1)..(25): SEQ ID NO: 5316; WAN024CUQ_at; Start 148; Stop 172
gacctgaatttccttaggcagagtg

SEQ ID NO: 134109 - DNA, 25 bp, Artificial
  probe
  misc_feature (1)..(25): SEQ ID NO: 5316; WAN024CUQ_at; Start 327; Stop 351
tgtagctcgaagcaatagcaactgc

SEQ ID NO: 134110 - DNA, 25 bp, Artificial
  probe
  misc_feature (1)..(25): SEQ ID NO: 5316; WAN024CUQ_at; Start 224; Stop 248
gcagcttcgttgatgcgttgctcaa

SEQ ID NO: 134111 - DNA, 25 bp, Artificial
  probe
  misc_feature (1)..(25): SEQ ID NO: 5316; WAN024CUQ_at; Start 75; Stop 99
catttttaagagaatttgtcacgga

SEQ ID NO: 134112 - DNA, 25 bp, Artificial
  probe
  misc_feature (1)..(25): SEQ ID NO: 5316; WAN024CUQ_at; Start 162; Stop 186
taggcagagtgattcctgtcaagga

SEQ ID NO: 134113 - DNA, 25 bp, Artificial
  probe
  misc_feature (1)..(25): SEQ ID NO: 5316; WAN024CUQ_at; Start 357; Stop 381
ccaagtcaatcgcaggttcatccaa

SEQ ID NO: 134114 - DNA, 25 bp, Artificial
  probe
  misc_feature (1)..(25): SEQ ID NO: 5316; WAN024CUQ_at; Start 374; Stop 398
tcatccaatttaacaccaccagcag

SEQ ID NO: 134115 - DNA, 25 bp, Artificial
  probe
  misc_feature (1)..(25): SEQ ID NO: 5316; WAN024CUQ_at; Start 466; Stop 490
gctagcacggttaaaatcaagtcct

SEQ ID NO: 134116 - DNA, 25 bp, Artificial
  probe
  misc_feature (1)..(25): SEQ ID NO: 5316; WAN024CUQ_at; Start 285; Stop 309
gttctccgacaaaacattcctgagg

SEQ ID NO: 134117 - DNA, 25 bp, Artificial
  probe
  misc_feature (1)..(25): SEQ ID NO: 5316; WAN024CUQ_at; Start 405; Stop 429
gataggcatcctgattttgcaagag

SEQ ID NO: 134118 - DNA, 25 bp, Artificial
  probe
  misc_feature (1)..(25): SEQ ID NO: 5316; WAN024CUQ_at; Start 240; Stop 264
gttgctcaatacgattcacgcgccg

SEQ ID NO: 134119 - DNA, 25 bp, Artificial
  probe
  misc_feature (1)..(25): SEQ ID NO: 5316; WAN024CUQ_at; Start 312; Stop 336
tagttggcttgtctttgtagctcga

SEQ ID NO: 134120 - DNA, 25 bp, Artificial
  probe
  misc_feature (1)..(25): SEQ ID NO: 5316; WAN024CUQ_at; Start 539; Stop 563
tgaacctccgccaaaatcggacgcg

SEQ ID NO: 134121 - DNA, 25 bp, Artificial
  probe
  misc_feature (1)..(25): SEQ ID NO: 5316; WAN024CUQ_at; Start 557; Stop 581
ggacgcgtcccttccatggttacaa

SEQ ID NO: 134122 - DNA, 25 bp, Artificial
  probe
  misc_feature (1)..(25): SEQ ID NO: 5316; WAN024CUQ_at; Start 478; Stop 502
aaaatcaagtcctgtcgtagtacgc

SEQ ID NO: 134123 - DNA, 25 bp, Artificial
  probe
  misc_feature (1)..(25): SEQ ID NO: 5316; WAN024CUQ_at; Start 436; Stop 460
tgcccgtttttccaaaacagccata

SEQ ID NO: 134124 - DNA, 25 bp, Artificial
  probe
  misc_feature (1)..(25): SEQ ID NO: 5316; WAN024CUQ_at; Start 451; Stop 475
aacagccataatcaagctagcacgg

SEQ ID NO: 134125 - DNA, 25 bp, Artificial
  probe
  misc_feature (1)..(25): SEQ ID NO: 5316; WAN024CUQ_at; Start 209; Stop 233
gtaaagcccagtttagcagcttcgt

SEQ ID NO: 134126 - DNA, 25 bp, Artificial
  probe
  misc_feature (1)..(25): SEQ ID NO: 5316; WAN024CUQ_at; Start 491; Stop 515
gtcgtagtacgcttggcatttccaa

SEQ ID NO: 134127 - DNA, 25 bp, Artificial
  probe
  misc_feature (1)..(25): SEQ ID NO: 5316; WAN024CUQ_at; Start 17; Stop 41
aaatacgacacgattccctccttga

SEQ ID NO: 134128 - DNA, 25 bp, Artificial
  probe
  misc_feature (1)..(25): SEQ ID NO: 5316; WAN024CUQ_at; Start 577; Stop 601
tacaacgatggaggaaccagtcgcc

SEQ ID NO: 134129 - DNA, 25 bp, Artificial
  probe
  misc_feature (1)..(25): SEQ ID NO: 5316; WAN024CUQ_at; Start 342; Stop 366
tagcaactgcaacagccaagtcaat

SEQ ID NO: 134130 - DNA, 25 bp, Artificial
  probe
  misc_feature (1)..(25): SEQ ID NO: 5316; WAN024CUQ_at; Start 4; Stop 28
cataaactgttcaaaatacgacacg

SEQ ID NO: 134131 - DNA, 25 bp, Artificial
  probe
  misc_feature (1)..(25): SEQ ID NO: 5316; WAN024CUQ_at; Start 194; Stop 218
ggtacataaatcttagtaaagccca

SEQ ID NO: 134132 - DNA, 25 bp, Artificial
  probe
  misc_feature (1)..(25): SEQ ID NO: 5316; WAN024CUQ_at; Start 504; Stop 528
tggcatttccaaacatggtcggtgt

SEQ ID NO: 134133 - DNA, 25 bp, Artificial
  probe
  misc_feature (1)..(25): SEQ ID NO: 5316; WAN024CUQ_at; Start 299; Stop 323
cattcctgaggattagttggcttgt

SEQ ID NO: 134134 - DNA, 25 bp, Artificial
  probe
  misc_feature (1)..(25): SEQ ID NO: 5316; WAN024CUQ_at; Start 417; Stop 441
gattttgcaagagaagccctgcccg

SEQ ID NO: 134135 - DNA, 25 bp, Artificial
  probe
  misc_feature (1)..(25): SEQ ID NO: 5316; WAN024CUQ_at; Start 129; Stop 153
gaatcgttgtcacgccaatgacctg

SEQ ID NO: 134136 - DNA, 25 bp, Artificial
  probe
  misc_feature (1)..(25): SEQ ID NO: 5316; WAN024CUQ_at; Start 519; Stop 543
tggtcggtgttaccaaagcctgaac

SEQ ID NO: 134137 - DNA, 25 bp, Artificial
  probe
  misc_feature (1)..(25): SEQ ID NO: 5316; WAN024CUQ_at; Start 91; Stop 115
tgtcacggattatgcaaagaccttt

SEQ ID NO: 134138 - DNA, 25 bp, Artificial
  probe
  misc_feature (1)..(25): SEQ ID NO: 5316; WAN024CUQ_at; Start 28; Stop 52
gattccctccttgaaaatttgatag

SEQ ID NO: 134139 - DNA, 25 bp, Artificial
  probe
  misc_feature (1)..(25): SEQ ID NO: 5316; WAN024CUQ_at; Start 264; Stop 288
gaatctctcctgtcaagcccagttc

SEQ ID NO: 134140 - DNA, 25 bp, Artificial
  probe
  misc_feature (1)..(25): SEQ ID NO: 5316; WAN024CUQ_at; Start 175; Stop 199
tcctgtcaaggaattcttaggtaca

SEQ ID NO: 134141 - DNA, 25 bp, Artificial
  probe
  misc_feature (1)..(25): SEQ ID NO: 5316; WAN024CUQ_at; Start 389; Stop 413
ccaccagcagatttgagataggcat

SEQ ID NO: 134142 - DNA, 25 bp, Artificial
  probe
  misc_feature (1)..(25): SEQ ID NO: 5064; WAN024CUR_at; Start 149; Stop 173
atatgctccaacatacgaggcccag

SEQ ID NO: 134143 - DNA, 25 bp, Artificial
  probe
  misc_feature (1)..(25): SEQ ID NO: 5064; WAN024CUR_at; Start 198; Stop 222
gacctacgataaagatggcaatgtt

SEQ ID NO: 134144 - DNA, 25 bp, Artificial
  probe
  misc_feature (1)..(25): SEQ ID NO: 5064; WAN024CUR_at; Start 98; Stop 122
atacgaaaggtgtggtgacgctccc

SEQ ID NO: 134145 - DNA, 25 bp, Artificial
  probe
  misc_feature (1)..(25): SEQ ID NO: 5064; WAN024CUR_at; Start 161; Stop 185
atacgaggcccagccaaggttcctt

SEQ ID NO: 134146 - DNA, 25 bp, Artificial
  probe
  misc_feature (1)..(25): SEQ ID NO: 5064; WAN024CUR_at; Start 164; Stop 188
cgaggcccagccaaggttccttctt

SEQ ID NO: 134147 - DNA, 25 bp, Artificial
  probe
  misc_feature (1)..(25): SEQ ID NO: 5064; WAN024CUR_at; Start 235; Stop 259
caactgcatgagttcagcggtcact

SEQ ID NO: 134148 - DNA, 25 bp, Artificial
  probe
  misc_feature (1)..(25): SEQ ID NO: 5064; WAN024CUR_at; Start 124; Stop 148
ttcaaagtaaagcaccgtatccacc

SEQ ID NO: 134149 - DNA, 25 bp, Artificial
  probe
  misc_feature (1)..(25): SEQ ID NO: 5064; WAN024CUR_at; Start 175; Stop 199
caaggttccttctttggtcacatga

SEQ ID NO: 134150 - DNA, 25 bp, Artificial
  probe
  misc_feature (1)..(25): SEQ ID NO: 5064; WAN024CUR_at; Start 239; Stop 263
tgcatgagttcagcggtcacttcac

SEQ ID NO: 134151 - DNA, 25 bp, Artificial
  probe
  misc_feature (1)..(25): SEQ ID NO: 5064; WAN024CUR_at; Start 103; Stop 127
aaaggtgtggtgacgctccccttca

SEQ ID NO: 134152 - DNA, 25 bp, Artificial
  probe
  misc_feature (1)..(25): SEQ ID NO: 5064; WAN024CUR_at; Start 231; Stop 255
tggccaactgcatgagttcagcggt

SEQ ID NO: 134153 - DNA, 25 bp, Artificial
  probe
  misc_feature (1)..(25): SEQ ID NO: 5064; WAN024CUR_at; Start 211; Stop 235
gatggcaatgttattggtcttggcc

SEQ ID NO: 134154 - DNA, 25 bp, Artificial
  probe
  misc_feature (1)..(25): SEQ ID NO: 5064; WAN024CUR_at; Start 130; Stop 154
gtaaagcaccgtatccaccatatgc

SEQ ID NO: 134155 - DNA, 25 bp, Artificial
  probe
  misc_feature (1)..(25): SEQ ID NO: 5064; WAN024CUR_at; Start 1; Stop 25
ttgactcggattgagtacctcaacc

SEQ ID NO: 134156 - DNA, 25 bp, Artificial
  probe
  misc_feature (1)..(25): SEQ ID NO: 5064; WAN024CUR_at; Start 113; Stop 137
tgacgctccccttcaaagtaaagca

SEQ ID NO: 134157 - DNA, 25 bp, Artificial
  probe
  misc_feature (1)..(25): SEQ ID NO: 5064; WAN024CUR_at; Start 178; Stop 202
ggttccttctttggtcacatgacct

SEQ ID NO: 134158 - DNA, 25 bp, Artificial
  probe
  misc_feature (1)..(25): SEQ ID NO: 5064; WAN024CUR_at; Start 143; Stop 167
tccaccatatgctccaacatacgag

SEQ ID NO: 134159 - DNA, 25 bp, Artificial
  probe
  misc_feature (1)..(25): SEQ ID NO: 5064; WAN024CUR_at; Start 266; Stop 290
acctgagaaacagacccctgcaccc

SEQ ID NO: 134160 - DNA, 25 bp, Artificial
  probe
  misc_feature (1)..(25): SEQ ID NO: 5064; WAN024CUR_at; Start 58; Stop 82
ctcattagtggaaccaaaacgattt

SEQ ID NO: 134161 - DNA, 25 bp, Artificial
  probe
  misc_feature (1)..(25): SEQ ID NO: 5064; WAN024CUR_at; Start 9; Stop 33
gattgagtacctcaaccaagccgcc

SEQ ID NO: 134162 - DNA, 25 bp, Artificial
  probe
  misc_feature (1)..(25): SEQ ID NO: 5064; WAN024CUR_at; Start 214; Stop 238
ggcaatgttattggtcttggccaac

SEQ ID NO: 134163 - DNA, 25 bp, Artificial
  probe
  misc_feature (1)..(25): SEQ ID NO: 5064; WAN024CUR_at; Start 189; Stop 213
tggtcacatgacctacgataaagat

SEQ ID NO: 134164 - DNA, 25 bp, Artificial
  probe
  misc_feature (1)..(25): SEQ ID NO: 5064; WAN024CUR_at; Start 83; Stop 107
ttgaccgctctcaaaatacgaaagg

SEQ ID NO: 134165 - DNA, 25 bp, Artificial
  probe
  misc_feature (1)..(25): SEQ ID NO: 5064; WAN024CUR_at; Start 94; Stop 118
caaaatacgaaaggtgtggtgacgc

SEQ ID NO: 134166 - DNA, 25 bp, Artificial
  probe
  misc_feature (1)..(25): SEQ ID NO: 5064; WAN024CUR_at; Start 35; Stop 59
gactgcatctcaaaaatcccaatct

SEQ ID NO: 134167 - DNA, 25 bp, Artificial
  probe
  misc_feature (1)..(25): SEQ ID NO: 5064; WAN024CUR_at; Start 26; Stop 50
aagccgcccgactgcatctcaaaaa

SEQ ID NO: 134168 - DNA, 25 bp, Artificial
  probe
  misc_feature (1)..(25): SEQ ID NO: 5064; WAN024CUR_at; Start 45; Stop 69
caaaaatcccaatctcattagtgga

SEQ ID NO: 134169 - DNA, 25 bp, Artificial
  probe
  misc_feature (1)..(25): SEQ ID NO: 5064; WAN024CUR_at; Start 226; Stop 250
ggtcttggccaactgcatgagttca

SEQ ID NO: 134170 - DNA, 25 bp, Artificial
  probe
  misc_feature (1)..(25): SEQ ID NO: 5064; WAN024CUR_at; Start 220; Stop 244
gttattggtcttggccaactgcatg

SEQ ID NO: 134171 - DNA, 25 bp, Artificial
  probe
  misc_feature (1)..(25): SEQ ID NO: 5064; WAN024CUR_at; Start 54; Stop 78
caatctcattagtggaaccaaaacg

SEQ ID NO: 134172 - DNA, 25 bp, Artificial
  probe
  misc_feature (1)..(25): SEQ ID NO: 5064; WAN024CUR_at; Start 108; Stop 132
tgtggtgacgctccccttcaaagta

SEQ ID NO: 134173 - DNA, 25 bp, Artificial
  probe
  misc_feature (1)..(25): SEQ ID NO: 5064; WAN024CUR_at; Start 72; Stop 96
caaaacgatttttgaccgctctcaa

SEQ ID NO: 134174 - DNA, 25 bp, Artificial
  probe
  misc_feature (1)..(25): SEQ ID NO: 5064; WAN024CUR_at; Start 193; Stop 217
cacatgacctacgataaagatggca

SEQ ID NO: 134175 - DNA, 25 bp, Artificial
  probe
  misc_feature (1)..(25): SEQ ID NO: 5064; WAN024CUR_at; Start 88; Stop 112
cgctctcaaaatacgaaaggtgtgg

SEQ ID NO: 134176 - DNA, 25 bp, Artificial
  probe
  misc_feature (1)..(25): SEQ ID NO: 3920; WAN024CUS_at; Start 465; Stop 489
tatgcaactgcttatcgagtctccc

SEQ ID NO: 134177 - DNA, 25 bp, Artificial
  probe
  misc_feature (1)..(25): SEQ ID NO: 3920; WAN024CUS_at; Start 100; Stop 124
aatcaggcttatgttgccctacatg

SEQ ID NO: 134178 - DNA, 25 bp, Artificial
  probe
  misc_feature (1)..(25): SEQ ID NO: 3920; WAN024CUS_at; Start 459; Stop 483
cgaggatatgcaactgcttatcgag

SEQ ID NO: 134179 - DNA, 25 bp, Artificial
  probe
  misc_feature (1)..(25): SEQ ID NO: 3920; WAN024CUS_at; Start 74; Stop 98
cgtattttgaacagtttatgcaagc

SEQ ID NO: 134180 - DNA, 25 bp, Artificial
  probe
  misc_feature (1)..(25): SEQ ID NO: 3920; WAN024CUS_at; Start 349; Stop 373
gctcagacctttgaaaatgaacctt

SEQ ID NO: 134181 - DNA, 25 bp, Artificial
  probe
  misc_feature (1)..(25): SEQ ID NO: 3920; WAN024CUS_at; Start 3; Stop 27
gacaaattctcttaaaaatgataag

SEQ ID NO: 134182 - DNA, 25 bp, Artificial
  probe
  misc_feature (1)..(25): SEQ ID NO: 3920; WAN024CUS_at; Start 116; Stop 140
ccctacatgggcagttaaatctgcc

SEQ ID NO: 134183 - DNA, 25 bp, Artificial
  probe
  misc_feature (1)..(25): SEQ ID NO: 3920; WAN024CUS_at; Start 453; Stop 477
tgtacgcgaggatatgcaactgctt

SEQ ID NO: 134184 - DNA, 25 bp, Artificial
  probe
  misc_feature (1)..(25): SEQ ID NO: 3920; WAN024CUS_at; Start 22; Stop 46
gataagataggagaaatatttgact

SEQ ID NO: 134185 - DNA, 25 bp, Artificial
  probe
  misc_feature (1)..(25): SEQ ID NO: 3920; WAN024CUS_at; Start 63; Stop 87
gggaatcgtgtcgtattttgaacag

SEQ ID NO: 134186 - DNA, 25 bp, Artificial
  probe
  misc_feature (1)..(25): SEQ ID NO: 3920; WAN024CUS_at; Start 441; Stop 465
tatagaagagagtgtacgcgaggat

SEQ ID NO: 134187 - DNA, 25 bp, Artificial
  probe
  misc_feature (1)..(25): SEQ ID NO: 3920; WAN024CUS_at; Start 51; Stop 75
aattttcaaggagggaatcgtgtcg

SEQ ID NO: 134188 - DNA, 25 bp, Artificial
  probe
  misc_feature (1)..(25): SEQ ID NO: 3920; WAN024CUS_at; Start 56; Stop 80
tcaaggagggaatcgtgtcgtattt

SEQ ID NO: 134189 - DNA, 25 bp, Artificial
  probe
  misc_feature (1)..(25): SEQ ID NO: 3920; WAN024CUS_at; Start 486; Stop 510
tcccctaataccagacgatgtcatt

SEQ ID NO: 134190 - DNA, 25 bp, Artificial
  probe
  misc_feature (1)..(25): SEQ ID NO: 3920; WAN024CUS_at; Start 548; Stop 572
tgacagtcgtagaattataactaat

SEQ ID NO: 134191 - DNA, 25 bp, Artificial
  probe
  misc_feature (1)..(25): SEQ ID NO: 3920; WAN024CUS_at; Start 537; Stop 561
tacaggaagtatgacagtcgtagaa

SEQ ID NO: 134192 - DNA, 25 bp, Artificial
  probe
  misc_feature (1)..(25): SEQ ID NO: 3920; WAN024CUS_at; Start 46; Stop 70
tatcaaattttcaaggagggaatcg

SEQ ID NO: 134193 - DNA, 25 bp, Artificial
  probe
  misc_feature (1)..(25): SEQ ID NO: 3920; WAN024CUS_at; Start 426; Stop 450
cttgcccttccaagatatagaagag

SEQ ID NO: 134194 - DNA, 25 bp, Artificial
  probe
  misc_feature (1)..(25): SEQ ID NO: 3920; WAN024CUS_at; Start 239; Stop 263
tgcggaatgcaggtggtcgagtgac

SEQ ID NO: 134195 - DNA, 25 bp, Artificial
  probe
  misc_feature (1)..(25): SEQ ID NO: 3920; WAN024CUS_at; Start 360; Stop 384
tgaaaatgaaccttttcaggagtat

SEQ ID NO: 134196 - DNA, 25 bp, Artificial
  probe
  misc_feature (1)..(25): SEQ ID NO: 3920; WAN024CUS_at; Start 468; Stop 492
gcaactgcttatcgagtctccccta

SEQ ID NO: 134197 - DNA, 25 bp, Artificial
  probe
  misc_feature (1)..(25): SEQ ID NO: 3920; WAN024CUS_at; Start 42; Stop 66
tgactatcaaattttcaaggaggga

SEQ ID NO: 134198 - DNA, 25 bp, Artificial
  probe
  misc_feature (1)..(25): SEQ ID NO: 3920; WAN024CUS_at; Start 124; Stop 148
gggcagttaaatctgccacttaaac

SEQ ID NO: 134199 - DNA, 25 bp, Artificial
  probe
  misc_feature (1)..(25): SEQ ID NO: 3920; WAN024CUS_at; Start 345; Stop 369
tggtgctcagacctttgaaaatgaa

SEQ ID NO: 134200 - DNA, 25 bp, Artificial
  probe
  misc_feature (1)..(25): SEQ ID NO: 3920; WAN024CUS_at; Start 103; Stop 127
caggcttatgttgccctacatgggc

SEQ ID NO: 134201 - DNA, 25 bp, Artificial
  probe
  misc_feature (1)..(25): SEQ ID NO: 3920; WAN024CUS_at; Start 340; Stop 364
gactgtggtgctcagacctttgaaa

SEQ ID NO: 134202 - DNA, 25 bp, Artificial
  probe
  misc_feature (1)..(25): SEQ ID NO: 3920; WAN024CUS_at; Start 435; Stop 459
ccaagatatagaagagagtgtacgc

SEQ ID NO: 134203 - DNA, 25 bp, Artificial
  probe
  misc_feature (1)..(25): SEQ ID NO: 3920; WAN024CUS_at; Start 481; Stop 505
gagtctcccctaataccagacgatg

SEQ ID NO: 134204 - DNA, 25 bp, Artificial
  probe
  misc_feature (1)..(25): SEQ ID NO: 3920; WAN024CUS_at; Start 497; Stop 521
cagacgatgtcattatctctggtgc

SEQ ID NO: 134205 - DNA, 25 bp, Artificial
  probe
  misc_feature (1)..(25): SEQ ID NO: 3920; WAN024CUS_at; Start 448; Stop 472
gagagtgtacgcgaggatatgcaac

SEQ ID NO: 134206 - DNA, 25 bp, Artificial
  probe
  misc_feature (1)..(25): SEQ ID NO: 3920; WAN024CUS_at; Start 284; Stop 308
tagttatttcccagcaacaaatggg

SEQ ID NO: 134207 - DNA, 25 bp, Artificial
  probe
  misc_feature (1)..(25): SEQ ID NO: 3920; WAN024CUS_at; Start 109; Stop 133
tatgttgccctacatgggcagttaa

SEQ ID NO: 134208 - DNA, 25 bp, Artificial
  probe
  misc_feature (1)..(25): SEQ ID NO: 3920; WAN024CUS_at; Start 528; Stop 552
caatgttgatacaggaagtatgaca

SEQ ID NO: 134209 - DNA, 25 bp, Artificial
  probe
  misc_feature (1)..(25): SEQ ID NO: 3920; WAN024CUS_at; Start 334; Stop 358
catacagactgtggtgctcagacct

SEQ ID NO: 134210 - DNA, 25 bp, Artificial
  probe
  misc_feature (1)..(25): SEQ ID NO: 3424; WAN024CUT_at; Start 890; Stop 914
gaaatgccaagcgtactacgacagg

SEQ ID NO: 134211 - DNA, 25 bp, Artificial
  probe
  misc_feature (1)..(25): SEQ ID NO: 3424; WAN024CUT_at; Start 1093; Stop 1117
cctcaggaatgttttgtcggagaac

SEQ ID NO: 134212 - DNA, 25 bp, Artificial
  probe
  misc_feature (1)..(25): SEQ ID NO: 3424; WAN024CUT_at; Start 166; Stop 190
gaattcaaccgtgtgcttggaggcg

SEQ ID NO: 134213 - DNA, 25 bp, Artificial
  probe
  misc_feature (1)..(25): SEQ ID NO: 3424; WAN024CUT_at; Start 576; Stop 600
tcatgtgaccaaagaaggaaccttg

SEQ ID NO: 134214 - DNA, 25 bp, Artificial
  probe
  misc_feature (1)..(25): SEQ ID NO: 3424; WAN024CUT_at; Start 5; Stop 29
gacgttgccccaactgtgggtcttg

SEQ ID NO: 134215 - DNA, 25 bp, Artificial
  probe
  misc_feature (1)..(25): SEQ ID NO: 3424; WAN024CUT_at; Start 875; Stop 899
caccgaccatgtttggaaatgccaa

SEQ ID NO: 134216 - DNA, 25 bp, Artificial
  probe
  misc_feature (1)..(25): SEQ ID NO: 3424; WAN024CUT_at; Start 908; Stop 932
cgacaggacttgattttaaccgtgc

SEQ ID NO: 134217 - DNA, 25 bp, Artificial
  probe
  misc_feature (1)..(25): SEQ ID NO: 3424; WAN024CUT_at; Start 766; Stop 790
ccgagtcaagttttcctagaagagc

SEQ ID NO: 134218 - DNA, 25 bp, Artificial
  probe
  misc_feature (1)..(25): SEQ ID NO: 3424; WAN024CUT_at; Start 923; Stop 947
ttaaccgtgctagcttgattatggc

SEQ ID NO: 134219 - DNA, 25 bp, Artificial
  probe
  misc_feature (1)..(25): SEQ ID NO: 3424; WAN024CUT_at; Start 1254; Stop 1278
cattggcgtgacaacgattcaggaa

SEQ ID NO: 134220 - DNA, 25 bp, Artificial
  probe
  misc_feature (1)..(25): SEQ ID NO: 3424; WAN024CUT_at; Start 514; Stop 538
gaagtgaccgctgaactcatgcagt

SEQ ID NO: 134221 - DNA, 25 bp, Artificial
  probe
  misc_feature (1)..(25): SEQ ID NO: 3424; WAN024CUT_at; Start 150; Stop 174
caagacggagatggaggaattcaac

SEQ ID NO: 134222 - DNA, 25 bp, Artificial
  probe
  misc_feature (1)..(25): SEQ ID NO: 3424; WAN024CUT_at; Start 801; Stop 825
ggcgactggttcctccatcgttgta

SEQ ID NO: 134223 - DNA, 25 bp, Artificial
  probe
  misc_feature (1)..(25): SEQ ID NO: 3424; WAN024CUT_at; Start 106; Stop 130
cccatgaaactagctgaggtgactt

SEQ ID NO: 134224 - DNA, 25 bp, Artificial
  probe
  misc_feature (1)..(25): SEQ ID NO: 3424; WAN024CUT_at; Start 383; Stop 407
cagagaccaatatgcagagtgttcg

SEQ ID NO: 134225 - DNA, 25 bp, Artificial
  probe
  misc_feature (1)..(25): SEQ ID NO: 3424; WAN024CUT_at; Start 725; Stop 749
tttttgagatgcagtcgggcggctt

SEQ ID NO: 134226 - DNA, 25 bp, Artificial
  probe
  misc_feature (1)..(25): SEQ ID NO: 3424; WAN024CUT_at; Start 67; Stop 91
aagaatgcgcgtgtgtccttgacag

SEQ ID NO: 134227 - DNA, 25 bp, Artificial
  probe
  misc_feature (1)..(25): SEQ ID NO: 3424; WAN024CUT_at; Start 653; Stop 677
gggagcgtcaccacacctttcgtat

SEQ ID NO: 134228 - DNA, 25 bp, Artificial
  probe
  misc_feature (1)..(25): SEQ ID NO: 3424; WAN024CUT_at; Start 1137; Stop 1161
tcggcgcgtgaatcgtattgagcaa

SEQ ID NO: 134229 - DNA, 25 bp, Artificial
  probe
  misc_feature (1)..(25): SEQ ID NO: 3424; WAN024CUT_at; Start 991; Stop 1015
gcctatctcaaatctgctggtggtg

SEQ ID NO: 134230 - DNA, 25 bp, Artificial
  probe
  misc_feature (1)..(25): SEQ ID NO: 3424; WAN024CUT_at; Start 1164; Stop 1188
catcaacgaagctgctaaactgggc

SEQ ID NO: 134231 - DNA, 25 bp, Artificial
  probe
  misc_feature (1)..(25): SEQ ID NO: 3424; WAN024CUT_at; Start 856; Stop 880
gaggttcaggctttggtaacaccga

SEQ ID NO: 134232 - DNA, 25 bp, Artificial
  probe
  misc_feature (1)..(25): SEQ ID NO: 3424; WAN024CUT_at; Start 821; Stop 845
ttgtaaccatggaagggacgcgtcc

SEQ ID NO: 134233 - DNA, 25 bp, Artificial
  probe
  misc_feature (1)..(25): SEQ ID NO: 3424; WAN024CUT_at; Start 1076; Stop 1100
aagacaagccaactaatcctcagga

SEQ ID NO: 134234 - DNA, 25 bp, Artificial
  probe
  misc_feature (1)..(25): SEQ ID NO: 3424; WAN024CUT_at; Start 965; Stop 989
cagggcttctcttgcaaaatcagga

SEQ ID NO: 134235 - DNA, 25 bp, Artificial
  probe
  misc_feature (1)..(25): SEQ ID NO: 3424; WAN024CUT_at; Start 91; Stop 115
ggtgagaaaaccaagcccatgaaac

SEQ ID NO: 134236 - DNA, 25 bp, Artificial
  probe
  misc_feature (1)..(25): SEQ ID NO: 3424; WAN024CUT_at; Start 1059; Stop 1083
tattgcttcgagctacaaagacaag

SEQ ID NO: 134237 - DNA, 25 bp, Artificial
  probe
  misc_feature (1)..(25): SEQ ID NO: 3424; WAN024CUT_at; Start 1221; Stop 1245
gacaggaatcactctgcctaaggaa

SEQ ID NO: 134238 - DNA, 25 bp, Artificial
  probe
  misc_feature (1)..(25): SEQ ID NO: 3424; WAN024CUT_at; Start 622; Stop 646
catatggtggatacggtgctttact

SEQ ID NO: 134239 - DNA, 25 bp, Artificial
  probe
  misc_feature (1)..(25): SEQ ID NO: 3424; WAN024CUT_at; Start 135; Stop 159
caatgtcaatcgaaccaagacggag

SEQ ID NO: 134240 - DNA, 25 bp, Artificial
  probe
  misc_feature (1)..(25): SEQ ID NO: 3424; WAN024CUT_at; Start 592; Stop 616
ggaaccttggctgggcctcgtatgt

SEQ ID NO: 134241 - DNA, 25 bp, Artificial
  probe
  misc_feature (1)..(25): SEQ ID NO: 3424; WAN024CUT_at; Start 1239; Stop 1263
taaggaaattcaggtcattggcgtg

SEQ ID NO: 134242 - DNA, 25 bp, Artificial
  probe
  misc_feature (1)..(25): SEQ ID NO: 3424; WAN024CUT_at; Start 263; Stop 287
tctcaacccagttgtcccaagtggg

SEQ ID NO: 134243 - DNA, 25 bp, Artificial
  probe
  misc_feature (1)..(25): SEQ ID NO: 3424; WAN024CUT_at; Start 325; Stop 349
cagattaaactacgtgcagagcgct

SEQ ID NO: 134244 - DNA, 25 bp, Artificial
  probe
  misc_feature (1)..(25): SEQ ID NO: 7338; WAN024CUU_at; Start 118; Stop 142
ccaattcaacaaacagaatctcttg

SEQ ID NO: 134245 - DNA, 25 bp, Artificial
  probe
  misc_feature (1)..(25): SEQ ID NO: 7338; WAN024CUU_at; Start 90; Stop 114
cgacgtatgcactcttcaagacttg

SEQ ID NO: 134246 - DNA, 25 bp, Artificial
  probe
  misc_feature (1)..(25): SEQ ID NO: 7338; WAN024CUU_at; Start 154; Stop 178
ccaataaatcctgaatttgctttaa

SEQ ID NO: 134247 - DNA, 25 bp, Artificial
  probe
  misc_feature (1)..(25): SEQ ID NO: 7338; WAN024CUU_at; Start 172; Stop 196
gctttaaatacatcagctggtactg

SEQ ID NO: 134248 - DNA, 25 bp, Artificial
  probe
  misc_feature (1)..(25): SEQ ID NO: 7338; WAN024CUU_at; Start 238; Stop 262
gatttcttgcacttgctccaaggaa

SEQ ID NO: 134249 - DNA, 25 bp, Artificial
  probe
  misc_feature (1)..(25): SEQ ID NO: 7338; WAN024CUU_at; Start 80; Stop 104
cgttcgatttcgacgtatgcactct

SEQ ID NO: 134250 - DNA, 25 bp, Artificial
  probe
  misc_feature (1)..(25): SEQ ID NO: 7338; WAN024CUU_at; Start 61; Stop 85
tgtgctttaatcgattctccgttcg

SEQ ID NO: 134251 - DNA, 25 bp, Artificial
  probe
  misc_feature (1)..(25): SEQ ID NO: 7338; WAN024CUU_at; Start 231; Stop 255
gatcgctgatttcttgcacttgctc

SEQ ID NO: 134252 - DNA, 25 bp, Artificial
  probe
  misc_feature (1)..(25): SEQ ID NO: 7338; WAN024CUU_at; Start 224; Stop 248
aattactgatcgctgatttcttgca

SEQ ID NO: 134253 - DNA, 25 bp, Artificial
  probe
  misc_feature (1)..(25): SEQ ID NO: 7338; WAN024CUU_at; Start 17; Stop 41
taaaatttctctttcagatacctca

SEQ ID NO: 134254 - DNA, 25 bp, Artificial
  probe
  misc_feature (1)..(25): SEQ ID NO: 7338; WAN024CUU_at; Start 212; Stop 236
tacgtctgttaaaattactgatcgc

SEQ ID NO: 134255 - DNA, 25 bp, Artificial
  probe
  misc_feature (1)..(25): SEQ ID NO: 7338; WAN024CUU_at; Start 102; Stop 126
tcttcaagacttgtttccaattcaa

SEQ ID NO: 134256 - DNA, 25 bp, Artificial
  probe
  misc_feature (1)..(25): SEQ ID NO: 7338; WAN024CUU_at; Start 72; Stop 96
cgattctccgttcgatttcgacgta

SEQ ID NO: 134257 - DNA, 25 bp, Artificial
  probe
  misc_feature (1)..(25): SEQ ID NO: 7338; WAN024CUU_at; Start 109; Stop 133
gacttgtttccaattcaacaaacag

SEQ ID NO: 134258 - DNA, 25 bp, Artificial
  probe
  misc_feature (1)..(25): SEQ ID NO: 7338; WAN024CUU_at; Start 57; Stop 81
ggtttgtgctttaatcgattctccg

SEQ ID NO: 134259 - DNA, 25 bp, Artificial
  probe
  misc_feature (1)..(25): SEQ ID NO: 7338; WAN024CUU_at; Start 40; Stop 64
caatatgtcgttttaagggtttgtg

SEQ ID NO: 134260 - DNA, 25 bp, Artificial
  probe
  misc_feature (1)..(25): SEQ ID NO: 7338; WAN024CUU_at; Start 166; Stop 190
gaatttgctttaaatacatcagctg

SEQ ID NO: 134261 - DNA, 25 bp, Artificial
  probe
  misc_feature (1)..(25): SEQ ID NO: 7338; WAN024CUU_at; Start 127; Stop 151
caaacagaatctcttgatgaaagtt

SEQ ID NO: 134262 - DNA, 25 bp, Artificial
  probe
  misc_feature (1)..(25): SEQ ID NO: 7338; WAN024CUU_at; Start 1; Stop 25
gtgtttcagcggtctctaaaatttc

SEQ ID NO: 134263 - DNA, 25 bp, Artificial
  probe
  misc_feature (1)..(25): SEQ ID NO: 7338; WAN024CUU_at; Start 95; Stop 119
tatgcactcttcaagacttgtttcc

SEQ ID NO: 134264 - DNA, 25 bp, Artificial
  probe
  misc_feature (1)..(25): SEQ ID NO: 7338; WAN024CUU_at; Start 184; Stop 208
tcagctggtactgatttgaaaaatc

SEQ ID NO: 134265 - DNA, 25 bp, Artificial
  probe
  misc_feature (1)..(25): SEQ ID NO: 7338; WAN024CUU_at; Start 133; Stop 157
gaatctcttgatgaaagttatccaa

SEQ ID NO: 134266 - DNA, 25 bp, Artificial
  probe
  misc_feature (1)..(25): SEQ ID NO: 7338; WAN024CUU_at; Start 196; Stop 220
gatttgaaaaatcaattacgtctgt

SEQ ID NO: 134267 - DNA, 25 bp, Artificial
  probe
  misc_feature (1)..(25): SEQ ID NO: 7338; WAN024CUU_at; Start 149; Stop 173
gttatccaataaatcctgaatttgc

SEQ ID NO: 134268 - DNA, 25 bp, Artificial
  probe
  misc_feature (1)..(25): SEQ ID NO: 7338; WAN024CUU_at; Start 234; Stop 258
cgctgatttcttgcacttgctccaa

SEQ ID NO: 134269 - DNA, 25 bp, Artificial
  probe
  misc_feature (1)..(25): SEQ ID NO: 7338; WAN024CUU_at; Start 247; Stop 271
cacttgctccaaggaaagaaaaggt

SEQ ID NO: 134270 - DNA, 25 bp, Artificial
  probe
  misc_feature (1)..(25): SEQ ID NO: 7338; WAN024CUU_at; Start 215; Stop 239
gtctgttaaaattactgatcgctga

SEQ ID NO: 134271 - DNA, 25 bp, Artificial
  probe
  misc_feature (1)..(25): SEQ ID NO: 7338; WAN024CUU_at; Start 142; Stop 166
gatgaaagttatccaataaatcctg

SEQ ID NO: 134272 - DNA, 25 bp, Artificial
  probe
  misc_feature (1)..(25): SEQ ID NO: 7338; WAN024CUU_at; Start 53; Stop 77
taagggtttgtgctttaatcgattc

SEQ ID NO: 134273 - DNA, 25 bp, Artificial
  probe
  misc_feature (1)..(25): SEQ ID NO: 7338; WAN024CUU_at; Start 9; Stop 33
gcggtctctaaaatttctctttcag

SEQ ID NO: 134274 - DNA, 25 bp, Artificial
  probe
  misc_feature (1)..(25): SEQ ID NO: 7338; WAN024CUU_at; Start 26; Stop 50
tctttcagatacctcaatatgtcgt

SEQ ID NO: 134275 - DNA, 25 bp, Artificial
  probe
  misc_feature (1)..(25): SEQ ID NO: 7338; WAN024CUU_at; Start 33; Stop 57
gatacctcaatatgtcgttttaagg

SEQ ID NO: 134276 - DNA, 25 bp, Artificial
  probe
  misc_feature (1)..(25): SEQ ID NO: 7338; WAN024CUU_at; Start 85; Stop 109
gatttcgacgtatgcactcttcaag

SEQ ID NO: 134277 - DNA, 25 bp, Artificial
  probe
  misc_feature (1)..(25): SEQ ID NO: 7338; WAN024CUU_at; Start 242; Stop 266
tcttgcacttgctccaaggaaagaa

SEQ ID NO: 134278 - DNA, 25 bp, Artificial
  probe
  misc_feature (1)..(25): SEQ ID NO: 4174; WAN024CUV_at; Start 43; Stop 67
gcatcaggaaaaatgaccattggtc

SEQ ID NO: 134279 - DNA, 25 bp, Artificial
  probe
  misc_feature (1)..(25): SEQ ID NO: 4174; WAN024CUV_at; Start 370; Stop 394
cgaacggagaatcgattaaagcaca

SEQ ID NO: 134280 - DNA, 25 bp, Artificial
  probe
  misc_feature (1)..(25): SEQ ID NO: 4174; WAN024CUV_at; Start 110; Stop 134
atcaagccattgattttgcactaga

SEQ ID NO: 134281 - DNA, 25 bp, Artificial
  probe
  misc_feature (1)..(25): SEQ ID NO: 4174; WAN024CUV_at; Start 378; Stop 402
gaatcgattaaagcacaaaccctta

SEQ ID NO: 134282 - DNA, 25 bp, Artificial
  probe
  misc_feature (1)..(25): SEQ ID NO: 4174; WAN024CUV_at; Start 445; Stop 469
gctgaaacacttcaattaaattccc

SEQ ID NO: 134283 - DNA, 25 bp, Artificial
  probe
  misc_feature (1)..(25): SEQ ID NO: 4174; WAN024CUV_at; Start 57; Stop 81
gaccattggtcaagaattatctcga

SEQ ID NO: 134284 - DNA, 25 bp, Artificial
  probe
  misc_feature (1)..(25): SEQ ID NO: 4174; WAN024CUV_at; Start 560; Stop 584
taaacaaaatagagaaaggacacac

SEQ ID NO: 134285 - DNA, 25 bp, Artificial
  probe
  misc_feature (1)..(25): SEQ ID NO: 4174; WAN024CUV_at; Start 474; Stop 498
tcaaccgaatgagttgcaccactac

SEQ ID NO: 134286 - DNA, 25 bp, Artificial
  probe
  misc_feature (1)..(25): SEQ ID NO: 4174; WAN024CUV_at; Start 349; Stop 373
gaagagtgcatacgtcgaaatcgaa

SEQ ID NO: 134287 - DNA, 25 bp, Artificial
  probe
  misc_feature (1)..(25): SEQ ID NO: 4174; WAN024CUV_at; Start 4; Stop 28
ggaggtgatttgatgcatcttttca

SEQ ID NO: 134288 - DNA, 25 bp, Artificial
  probe
  misc_feature (1)..(25): SEQ ID NO: 4174; WAN024CUV_at; Start 27; Stop 51
catcattggtgctccagcatcagga

SEQ ID NO: 134289 - DNA, 25 bp, Artificial
  probe
  misc_feature (1)..(25): SEQ ID NO: 4174; WAN024CUV_at; Start 341; Stop 365
caagtcttgaagagtgcatacgtcg

SEQ ID NO: 134290 - DNA, 25 bp, Artificial
  probe
  misc_feature (1)..(25): SEQ ID NO: 4174; WAN024CUV_at; Start 393; Stop 417
caaacccttaaaacgacatattgag

SEQ ID NO: 134291 - DNA, 25 bp, Artificial
  probe
  misc_feature (1)..(25): SEQ ID NO: 4174; WAN024CUV_at; Start 573; Stop 597
gaaaggacacacacatgtctaacta

SEQ ID NO: 134292 - DNA, 25 bp, Artificial
  probe
  misc_feature (1)..(25): SEQ ID NO: 4174; WAN024CUV_at; Start 76; Stop 100
tctcgactgacggatgctaccctat

SEQ ID NO: 134293 - DNA, 25 bp, Artificial
  probe
  misc_feature (1)..(25): SEQ ID NO: 4174; WAN024CUV_at; Start 423; Stop 447
tgaaagagaaattttagagaccgct

SEQ ID NO: 134294 - DNA, 25 bp, Artificial
  probe
  misc_feature (1)..(25): SEQ ID NO: 4174; WAN024CUV_at; Start 19; Stop 43
catcttttcatcattggtgctccag

SEQ ID NO: 134295 - DNA, 25 bp, Artificial
  probe
  misc_feature (1)..(25): SEQ ID NO: 4174; WAN024CUV_at; Start 67; Stop 91
caagaattatctcgactgacggatg

SEQ ID NO: 134296 - DNA, 25 bp, Artificial
  probe
  misc_feature (1)..(25): SEQ ID NO: 4174; WAN024CUV_at; Start 434; Stop 458
ttttagagaccgctgaaacacttca

SEQ ID NO: 134297 - DNA, 25 bp, Artificial
  probe
  misc_feature (1)..(25): SEQ ID NO: 4174; WAN024CUV_at; Start 516; Stop 540
gaatttgtctgcagaagaagctgct

SEQ ID NO: 134298 - DNA, 25 bp, Artificial
  probe
  misc_feature (1)..(25): SEQ ID NO: 4174; WAN024CUV_at; Start 407; Stop 431
gacatattgaggtatctgaaagaga

SEQ ID NO: 134299 - DNA, 25 bp, Artificial
  probe
  misc_feature (1)..(25): SEQ ID NO: 4174; WAN024CUV_at; Start 194; Stop 218
tccttggagcaagtgcaagaaatca

SEQ ID NO: 134300 - DNA, 25 bp, Artificial
  probe
  misc_feature (1)..(25): SEQ ID NO: 4174; WAN024CUV_at; Start 265; Stop 289
cagctgatgtatttaaagcaaattc

SEQ ID NO: 134301 - DNA, 25 bp, Artificial
  probe
  misc_feature (1)..(25): SEQ ID NO: 4174; WAN024CUV_at; Start 529; Stop 553
gaagaagctgctaagcaaattcaaa

SEQ ID NO: 134302 - DNA, 25 bp, Artificial
  probe
  misc_feature (1)..(25): SEQ ID NO: 4174; WAN024CUV_at; Start 83; Stop 107
tgacggatgctaccctattttataa

SEQ ID NO: 134303 - DNA, 25 bp, Artificial
  probe
  misc_feature (1)..(25): SEQ ID NO: 4174; WAN024CUV_at; Start 36; Stop 60
tgctccagcatcaggaaaaatgacc

SEQ ID NO: 134304 - DNA, 25 bp, Artificial
  probe
  misc_feature (1)..(25): SEQ ID NO: 4174; WAN024CUV_at; Start 98; Stop 122
tattttataaccatcaagccattga

SEQ ID NO: 134305 - DNA, 25 bp, Artificial
  probe
  misc_feature (1)..(25): SEQ ID NO: 4174; WAN024CUV_at; Start 334; Stop 358
ttggaaacaagtcttgaagagtgca

SEQ ID NO: 134306 - DNA, 25 bp, Artificial
  probe
  misc_feature (1)..(25): SEQ ID NO: 4174; WAN024CUV_at; Start 214; Stop 238
aatcagcgatcagtaattttaacag

SEQ ID NO: 134307 - DNA, 25 bp, Artificial
  probe
  misc_feature (1)..(25): SEQ ID NO: 4174; WAN024CUV_at; Start 508; Stop 532
aataatacgaatttgtctgcagaag

SEQ ID NO: 134308 - DNA, 25 bp, Artificial
  probe
  misc_feature (1)..(25): SEQ ID NO: 4174; WAN024CUV_at; Start 359; Stop 383
tacgtcgaaatcgaacggagaatcg

SEQ ID NO: 134309 - DNA, 25 bp, Artificial
  probe
  misc_feature (1)..(25): SEQ ID NO: 4174; WAN024CUV_at; Start 203; Stop 227
caagtgcaagaaatcagcgatcagt

SEQ ID NO: 134310 - DNA, 25 bp, Artificial
  probe
  misc_feature (1)..(25): SEQ ID NO: 4174; WAN024CUV_at; Start 484; Stop 508
gagttgcaccactactttaaaataa

SEQ ID NO: 134311 - DNA, 25 bp, Artificial
  probe
  misc_feature (1)..(25): SEQ ID NO: 4174; WAN024CUV_at; Start 535; Stop 559
gctgctaagcaaattcaaaataaaa

SEQ ID NO: 134312 - DNA, 25 bp, Artificial
  probe
  misc_feature (1)..(25): SEQ ID NO: 7714; WAN024CUW_at; Start 153; Stop 177
tttatttcaagccacctctaaatgt

SEQ ID NO: 134313 - DNA, 25 bp, Artificial
  probe
  misc_feature (1)..(25): SEQ ID NO: 7714; WAN024CUW_at; Start 142; Stop 166
gaattagcttttttatttcaagcca

SEQ ID NO: 134314 - DNA, 25 bp, Artificial
  probe
  misc_feature (1)..(25): SEQ ID NO: 7714; WAN024CUW_at; Start 156; Stop 180
atttcaagccacctctaaatgttta

SEQ ID NO: 134315 - DNA, 25 bp, Artificial
  probe
  misc_feature (1)..(25): SEQ ID NO: 7714; WAN024CUW_at; Start 194; Stop 218
ctaatcacttttttaccattcagga

SEQ ID NO: 134316 - DNA, 25 bp, Artificial
  probe
  misc_feature (1)..(25): SEQ ID NO: 7714; WAN024CUW_at; Start 216; Stop 240
ggaagttttaatgactattcaagat

SEQ ID NO: 134317 - DNA, 25 bp, Artificial
  probe
  misc_feature (1)..(25): SEQ ID NO: 7714; WAN024CUW_at; Start 146; Stop 170
tagcttttttatttcaagccacctc

SEQ ID NO: 134318 - DNA, 25 bp, Artificial
  probe
  misc_feature (1)..(25): SEQ ID NO: 7714; WAN024CUW_at; Start 159; Stop 183
tcaagccacctctaaatgtttaaaa

SEQ ID NO: 134319 - DNA, 25 bp, Artificial
  probe
  misc_feature (1)..(25): SEQ ID NO: 7714; WAN024CUW_at; Start 12; Stop 36
tttttgtattcatgacaaatactcc

SEQ ID NO: 134320 - DNA, 25 bp, Artificial
  probe
  misc_feature (1)..(25): SEQ ID NO: 7714; WAN024CUW_at; Start 155; Stop 179
tatttcaagccacctctaaatgttt

SEQ ID NO: 134321 - DNA, 25 bp, Artificial
  probe
  misc_feature (1)..(25): SEQ ID NO: 7714; WAN024CUW_at; Start 210; Stop 234
cattcaggaagttttaatgactatt

SEQ ID NO: 134322 - DNA, 25 bp, Artificial
  probe
  misc_feature (1)..(25): SEQ ID NO: 7714; WAN024CUW_at; Start 212; Stop 236
ttcaggaagttttaatgactattca

SEQ ID NO: 134323 - DNA, 25 bp, Artificial
  probe
  misc_feature (1)..(25): SEQ ID NO: 7714; WAN024CUW_at; Start 154; Stop 178
ttatttcaagccacctctaaatgtt

SEQ ID NO: 134324 - DNA, 25 bp, Artificial
  probe
  misc_feature (1)..(25): SEQ ID NO: 7714; WAN024CUW_at; Start 230; Stop 254
ctattcaagatttcataaaatatga

SEQ ID NO: 134325 - DNA, 25 bp, Artificial
  probe
  misc_feature (1)..(25): SEQ ID NO: 7714; WAN024CUW_at; Start 15; Stop 39
ttgtattcatgacaaatactccttt

SEQ ID NO: 134326 - DNA, 25 bp, Artificial
  probe
  misc_feature (1)..(25): SEQ ID NO: 7714; WAN024CUW_at; Start 148; Stop 172
gcttttttatttcaagccacctcta

SEQ ID NO: 134327 - DNA, 25 bp, Artificial
  probe
  misc_feature (1)..(25): SEQ ID NO: 7714; WAN024CUW_at; Start 193; Stop 217
tctaatcacttttttaccattcagg

SEQ ID NO: 134328 - DNA, 25 bp, Artificial
  probe
  misc_feature (1)..(25): SEQ ID NO: 7714; WAN024CUW_at; Start 2; Stop 26
tgttccatcatttttgtattcatga

SEQ ID NO: 134329 - DNA, 25 bp, Artificial
  probe
  misc_feature (1)..(25): SEQ ID NO: 7714; WAN024CUW_at; Start 5; Stop 29
tccatcatttttgtattcatgacaa

SEQ ID NO: 134330 - DNA, 25 bp, Artificial
  probe
  misc_feature (1)..(25): SEQ ID NO: 7714; WAN024CUW_at; Start 195; Stop 219
taatcacttttttaccattcaggaa

SEQ ID NO: 134331 - DNA, 25 bp, Artificial
  probe
  misc_feature (1)..(25): SEQ ID NO: 7714; WAN024CUW_at; Start 6; Stop 30
ccatcatttttgtattcatgacaaa

SEQ ID NO: 134332 - DNA, 25 bp, Artificial
  probe
  misc_feature (1)..(25): SEQ ID NO: 7714; WAN024CUW_at; Start 248; Stop 272
aatatgaacttagttttatgacata

SEQ ID NO: 134333 - DNA, 25 bp, Artificial
  probe
  misc_feature (1)..(25): SEQ ID NO: 7714; WAN024CUW_at; Start 206; Stop 230
ttaccattcaggaagttttaatgac

SEQ ID NO: 134334 - DNA, 25 bp, Artificial
  probe
  misc_feature (1)..(25): SEQ ID NO: 7714; WAN024CUW_at; Start 197; Stop 221
atcacttttttaccattcaggaagt

SEQ ID NO: 134335 - DNA, 25 bp, Artificial
  probe
  misc_feature (1)..(25): SEQ ID NO: 7714; WAN024CUW_at; Start 158; Stop 182
ttcaagccacctctaaatgtttaaa

SEQ ID NO: 134336 - DNA, 25 bp, Artificial
  probe
  misc_feature (1)..(25): SEQ ID NO: 7714; WAN024CUW_at; Start 220; Stop 244
gttttaatgactattcaagatttca

SEQ ID NO: 134337 - DNA, 25 bp, Artificial
  probe
  misc_feature (1)..(25): SEQ ID NO: 7714; WAN024CUW_at; Start 224; Stop 248
taatgactattcaagatttcataaa

SEQ ID NO: 134338 - DNA, 25 bp, Artificial
  probe
  misc_feature (1)..(25): SEQ ID NO: 7714; WAN024CUW_at; Start 246; Stop 270
aaaatatgaacttagttttatgaca

SEQ ID NO: 134339 - DNA, 25 bp, Artificial
  probe
  misc_feature (1)..(25): SEQ ID NO: 7714; WAN024CUW_at; Start 209; Stop 233
ccattcaggaagttttaatgactat

SEQ ID NO: 134340 - DNA, 25 bp, Artificial
  probe
  misc_feature (1)..(25): SEQ ID NO: 7714; WAN024CUW_at; Start 207; Stop 231
taccattcaggaagttttaatgact

SEQ ID NO: 134341 - DNA, 25 bp, Artificial
  probe
  misc_feature (1)..(25): SEQ ID NO: 7714; WAN024CUW_at; Start 208; Stop 232
accattcaggaagttttaatgacta

SEQ ID NO: 134342 - DNA, 25 bp, Artificial
  probe
  misc_feature (1)..(25): SEQ ID NO: 7714; WAN024CUW_at; Start 14; Stop 38
tttgtattcatgacaaatactcctt

SEQ ID NO: 134343 - DNA, 25 bp, Artificial
  probe
  misc_feature (1)..(25): SEQ ID NO: 7714; WAN024CUW_at; Start 214; Stop 238
caggaagttttaatgactattcaag

SEQ ID NO: 134344 - DNA, 25 bp, Artificial
  probe
  misc_feature (1)..(25): SEQ ID NO: 7714; WAN024CUW_at; Start 213; Stop 237
tcaggaagttttaatgactattcaa

SEQ ID NO: 134345 - DNA, 25 bp, Artificial
  probe
  misc_feature (1)..(25): SEQ ID NO: 7714; WAN024CUW_at; Start 157; Stop 181
tttcaagccacctctaaatgtttaa

SEQ ID NO: 134346 - DNA, 25 bp, Artificial
  probe
  misc_feature (1)..(25): SEQ ID NO: 6304; WAN024CUX_at; Start 10; Stop 34
attaatagatactgttatactaaac

SEQ ID NO: 134347 - DNA, 25 bp, Artificial
  probe
  misc_feature (1)..(25): SEQ ID NO: 6304; WAN024CUX_at; Start 13; Stop 37
aatagatactgttatactaaacttg

SEQ ID NO: 134348 - DNA, 25 bp, Artificial
  probe
  misc_feature (1)..(25): SEQ ID NO: 6304; WAN024CUX_at; Start 2; Stop 26
tgaaaaaaattaatagatactgtta

SEQ ID NO: 134349 - DNA, 25 bp, Artificial
  probe
  misc_feature (1)..(25): SEQ ID NO: 6304; WAN024CUX_at; Start 38; Stop 62
tcaagtttgtaacaagacaaatatt

SEQ ID NO: 134350 - DNA, 25 bp, Artificial
  probe
  misc_feature (1)..(25): SEQ ID NO: 6304; WAN024CUX_at; Start 1; Stop 25
atgaaaaaaattaatagatactgtt

SEQ ID NO: 134351 - DNA, 25 bp, Artificial
  probe
  misc_feature (1)..(25): SEQ ID NO: 6304; WAN024CUX_at; Start 12; Stop 36
taatagatactgttatactaaactt

SEQ ID NO: 134352 - DNA, 25 bp, Artificial
  probe
  misc_feature (1)..(25): SEQ ID NO: 6304; WAN024CUX_at; Start 8; Stop 32
aaattaatagatactgttatactaa

SEQ ID NO: 134353 - DNA, 25 bp, Artificial
  probe
  misc_feature (1)..(25): SEQ ID NO: 6304; WAN024CUX_at; Start 45; Stop 69
tgtaacaagacaaatattaaaaata

SEQ ID NO: 134354 - DNA, 25 bp, Artificial
  probe
  misc_feature (1)..(25): SEQ ID NO: 6304; WAN024CUX_at; Start 39; Stop 63
caagtttgtaacaagacaaatatta

SEQ ID NO: 134355 - DNA, 25 bp, Artificial
  probe
  misc_feature (1)..(25): SEQ ID NO: 6304; WAN024CUX_at; Start 7; Stop 31
aaaattaatagatactgttatacta

SEQ ID NO: 134356 - DNA, 25 bp, Artificial
  probe
  misc_feature (1)..(25): SEQ ID NO: 6304; WAN024CUX_at; Start 14; Stop 38
atagatactgttatactaaacttgt

SEQ ID NO: 134357 - DNA, 25 bp, Artificial
  probe
  misc_feature (1)..(25): SEQ ID NO: 6304; WAN024CUX_at; Start 6; Stop 30
aaaaattaatagatactgttatact

SEQ ID NO: 134358 - DNA, 25 bp, Artificial
  probe
  misc_feature (1)..(25): SEQ ID NO: 6304; WAN024CUX_at; Start 9; Stop 33
aattaatagatactgttatactaaa

SEQ ID NO: 134359 - DNA, 25 bp, Artificial
  probe
  misc_feature (1)..(25): SEQ ID NO: 6304; WAN024CUX_at; Start 15; Stop 39
tagatactgttatactaaacttgtc

SEQ ID NO: 134360 - DNA, 25 bp, Artificial
  probe
  misc_feature (1)..(25): SEQ ID NO: 6304; WAN024CUX_at; Start 11; Stop 35
ttaatagatactgttatactaaact

SEQ ID NO: 134361 - DNA, 25 bp, Artificial
  probe
  misc_feature (1)..(25): SEQ ID NO: 6304; WAN024CUX_at; Start 37; Stop 61
gtcaagtttgtaacaagacaaatat

SEQ ID NO: 134362 - DNA, 25 bp, Artificial
  probe
  misc_feature (1)..(25): SEQ ID NO: 5752; WAN024CUY_at; Start 19; Stop 43
gacaagtttagtataacagtatcta

SEQ ID NO: 134363 - DNA, 25 bp, Artificial
  probe
  misc_feature (1)..(25): SEQ ID NO: 5752; WAN024CUY_at; Start 24; Stop 48
gtttagtataacagtatctattaat

SEQ ID NO: 134364 - DNA, 25 bp, Artificial
  probe
  misc_feature (1)..(25): SEQ ID NO: 5752; WAN024CUY_at; Start 22; Stop 46
aagtttagtataacagtatctatta

SEQ ID NO: 134365 - DNA, 25 bp, Artificial
  probe
  misc_feature (1)..(25): SEQ ID NO: 5752; WAN024CUY_at; Start 35; Stop 59
cagtatctattaatttttttcatcc

SEQ ID NO: 134366 - DNA, 25 bp, Artificial
  probe
  misc_feature (1)..(25): SEQ ID NO: 5752; WAN024CUY_at; Start 102; Stop 126
gtttcaaaatcatctctatttttaa

SEQ ID NO: 134367 - DNA, 25 bp, Artificial
  probe
  misc_feature (1)..(25): SEQ ID NO: 5752; WAN024CUY_at; Start 100; Stop 124
ttgtttcaaaatcatctctattttt

SEQ ID NO: 134368 - DNA, 25 bp, Artificial
  probe
  misc_feature (1)..(25): SEQ ID NO: 5752; WAN024CUY_at; Start 92; Stop 116
tagcttttttgtttcaaaatcatct

SEQ ID NO: 134369 - DNA, 25 bp, Artificial
  probe
  misc_feature (1)..(25): SEQ ID NO: 5752; WAN024CUY_at; Start 93; Stop 117
agcttttttgtttcaaaatcatctc

SEQ ID NO: 134370 - DNA, 25 bp, Artificial
  probe
  misc_feature (1)..(25): SEQ ID NO: 5752; WAN024CUY_at; Start 21; Stop 45
caagtttagtataacagtatctatt

SEQ ID NO: 134371 - DNA, 25 bp, Artificial
  probe
  misc_feature (1)..(25): SEQ ID NO: 5752; WAN024CUY_at; Start 20; Stop 44
acaagtttagtataacagtatctat

SEQ ID NO: 134372 - DNA, 25 bp, Artificial
  probe
  misc_feature (1)..(25): SEQ ID NO: 5752; WAN024CUY_at; Start 27; Stop 51
tagtataacagtatctattaatttt

SEQ ID NO: 134373 - DNA, 25 bp, Artificial
  probe
  misc_feature (1)..(25): SEQ ID NO: 5752; WAN024CUY_at; Start 40; Stop 64
tctattaatttttttcatccaaatc

SEQ ID NO: 134374 - DNA, 25 bp, Artificial
  probe
  misc_feature (1)..(25): SEQ ID NO: 5752; WAN024CUY_at; Start 36; Stop 60
agtatctattaatttttttcatcca

SEQ ID NO: 134375 - DNA, 25 bp, Artificial
  probe
  misc_feature (1)..(25): SEQ ID NO: 5752; WAN024CUY_at; Start 26; Stop 50
ttagtataacagtatctattaattt

SEQ ID NO: 134376 - DNA, 25 bp, Artificial
  probe
  misc_feature (1)..(25): SEQ ID NO: 5752; WAN024CUY_at; Start 37; Stop 61
gtatctattaatttttttcatccaa

SEQ ID NO: 134377 - DNA, 25 bp, Artificial
  probe
  misc_feature (1)..(25): SEQ ID NO: 5752; WAN024CUY_at; Start 99; Stop 123
tttgtttcaaaatcatctctatttt

SEQ ID NO: 134378 - DNA, 25 bp, Artificial
  probe
  misc_feature (1)..(25): SEQ ID NO: 5752; WAN024CUY_at; Start 25; Stop 49
tttagtataacagtatctattaatt

SEQ ID NO: 134379 - DNA, 25 bp, Artificial
  probe
  misc_feature (1)..(25): SEQ ID NO: 5752; WAN024CUY_at; Start 98; Stop 122
ttttgtttcaaaatcatctctattt

SEQ ID NO: 134380 - DNA, 25 bp, Artificial
  probe
  misc_feature (1)..(25): SEQ ID NO: 5752; WAN024CUY_at; Start 94; Stop 118
gcttttttgtttcaaaatcatctct

SEQ ID NO: 134381 - DNA, 25 bp, Artificial
  probe
  misc_feature (1)..(25): SEQ ID NO: 5752; WAN024CUY_at; Start 96; Stop 120
ttttttgtttcaaaatcatctctat

SEQ ID NO: 134382 - DNA, 25 bp, Artificial
  probe
  misc_feature (1)..(25): SEQ ID NO: 5752; WAN024CUY_at; Start 32; Stop 56
taacagtatctattaatttttttca

SEQ ID NO: 134383 - DNA, 25 bp, Artificial
  probe
  misc_feature (1)..(25): SEQ ID NO: 5752; WAN024CUY_at; Start 28; Stop 52
agtataacagtatctattaattttt

SEQ ID NO: 134384 - DNA, 25 bp, Artificial
  probe
  misc_feature (1)..(25): SEQ ID NO: 5752; WAN024CUY_at; Start 101; Stop 125
tgtttcaaaatcatctctattttta

SEQ ID NO: 134385 - DNA, 25 bp, Artificial
  probe
  misc_feature (1)..(25): SEQ ID NO: 5752; WAN024CUY_at; Start 23; Stop 47
agtttagtataacagtatctattaa

SEQ ID NO: 134386 - DNA, 25 bp, Artificial
  probe
  misc_feature (1)..(25): SEQ ID NO: 5752; WAN024CUY_at; Start 95; Stop 119
cttttttgtttcaaaatcatctcta

SEQ ID NO: 134387 - DNA, 25 bp, Artificial
  probe
  misc_feature (1)..(25): SEQ ID NO: 5752; WAN024CUY_at; Start 38; Stop 62
tatctattaatttttttcatccaaa

SEQ ID NO: 134388 - DNA, 25 bp, Artificial
  probe
  misc_feature (1)..(25): SEQ ID NO: 5752; WAN024CUY_at; Start 97; Stop 121
tttttgtttcaaaatcatctctatt

SEQ ID NO: 134389 - DNA, 25 bp, Artificial
  probe
  misc_feature (1)..(25): SEQ ID NO: 5752; WAN024CUY_at; Start 33; Stop 57
aacagtatctattaatttttttcat

SEQ ID NO: 134390 - DNA, 25 bp, Artificial
  probe
  misc_feature (1)..(25): SEQ ID NO: 5752; WAN024CUY_at; Start 34; Stop 58
acagtatctattaatttttttcatc

SEQ ID NO: 134391 - DNA, 25 bp, Artificial
  probe
  misc_feature (1)..(25): SEQ ID NO: 5785; WAN024CUZ_at; Start 277; Stop 301
gaagagattcctttagccatcgctt

SEQ ID NO: 134392 - DNA, 25 bp, Artificial
  probe
  misc_feature (1)..(25): SEQ ID NO: 5785; WAN024CUZ_at; Start 285; Stop 309
tcctttagccatcgcttggcaaggg

SEQ ID NO: 134393 - DNA, 25 bp, Artificial
  probe
  misc_feature (1)..(25): SEQ ID NO: 5785; WAN024CUZ_at; Start 193; Stop 217
tattcgattgatacgattaatctga

SEQ ID NO: 134394 - DNA, 25 bp, Artificial
  probe
  misc_feature (1)..(25): SEQ ID NO: 5785; WAN024CUZ_at; Start 167; Stop 191
aattagaagaattgctacaatctcc

SEQ ID NO: 134395 - DNA, 25 bp, Artificial
  probe
  misc_feature (1)..(25): SEQ ID NO: 5785; WAN024CUZ_at; Start 232; Stop 256
gacaaaccaattgatatagagaaat

SEQ ID NO: 134396 - DNA, 25 bp, Artificial
  probe
  misc_feature (1)..(25): SEQ ID NO: 5785; WAN024CUZ_at; Start 26; Stop 50
cctctgaacaacaggaacgaatggc

SEQ ID NO: 134397 - DNA, 25 bp, Artificial
  probe
  misc_feature (1)..(25): SEQ ID NO: 5785; WAN024CUZ_at; Start 239; Stop 263
caattgatatagagaaatttaaagc

SEQ ID NO: 134398 - DNA, 25 bp, Artificial
  probe
  misc_feature (1)..(25): SEQ ID NO: 5785; WAN024CUZ_at; Start 435; Stop 459
tgcaattgatgaggctaaatcccaa

SEQ ID NO: 134399 - DNA, 25 bp, Artificial
  probe
  misc_feature (1)..(25): SEQ ID NO: 5785; WAN024CUZ_at; Start 275; Stop 299
aagaagagattcctttagccatcgc

SEQ ID NO: 134400 - DNA, 25 bp, Artificial
  probe
  misc_feature (1)..(25): SEQ ID NO: 5785; WAN024CUZ_at; Start 23; Stop 47
tgtcctctgaacaacaggaacgaat

SEQ ID NO: 134401 - DNA, 25 bp, Artificial
  probe
  misc_feature (1)..(25): SEQ ID NO: 5785; WAN024CUZ_at; Start 18; Stop 42
tcagatgtcctctgaacaacaggaa

SEQ ID NO: 134402 - DNA, 25 bp, Artificial
  probe
  misc_feature (1)..(25): SEQ ID NO: 5785; WAN024CUZ_at; Start 481; Stop 505
gccgtcaaacagaaagagatggtga

SEQ ID NO: 134403 - DNA, 25 bp, Artificial
  probe
  misc_feature (1)..(25): SEQ ID NO: 5785; WAN024CUZ_at; Start 433; Stop 457
gatgcaattgatgaggctaaatccc

SEQ ID NO: 134404 - DNA, 25 bp, Artificial
  probe
  misc_feature (1)..(25): SEQ ID NO: 5785; WAN024CUZ_at; Start 293; Stop 317
ccatcgcttggcaaggggattctct

SEQ ID NO: 134405 - DNA, 25 bp, Artificial
  probe
  misc_feature (1)..(25): SEQ ID NO: 5785; WAN024CUZ_at; Start 113; Stop 137
ggtctagacgtcaggctttagcaca

SEQ ID NO: 134406 - DNA, 25 bp, Artificial
  probe
  misc_feature (1)..(25): SEQ ID NO: 5785; WAN024CUZ_at; Start 437; Stop 461
caattgatgaggctaaatcccaaat

SEQ ID NO: 134407 - DNA, 25 bp, Artificial
  probe
  misc_feature (1)..(25): SEQ ID NO: 5785; WAN024CUZ_at; Start 202; Stop 226
gatacgattaatctgaaaaaagatt

SEQ ID NO: 134408 - DNA, 25 bp, Artificial
  probe
  misc_feature (1)..(25): SEQ ID NO: 5785; WAN024CUZ_at; Start 483; Stop 507
cgtcaaacagaaagagatggtgaga

SEQ ID NO: 134409 - DNA, 25 bp, Artificial
  probe
  misc_feature (1)..(25): SEQ ID NO: 5785; WAN024CUZ_at; Start 228; Stop 252
tttagacaaaccaattgatatagag

SEQ ID NO: 134410 - DNA, 25 bp, Artificial
  probe
  misc_feature (1)..(25): SEQ ID NO: 5785; WAN024CUZ_at; Start 223; Stop 247
gattttttagacaaaccaattgata

SEQ ID NO: 134411 - DNA, 25 bp, Artificial
  probe
  misc_feature (1)..(25): SEQ ID NO: 5785; WAN024CUZ_at; Start 21; Stop 45
gatgtcctctgaacaacaggaacga

SEQ ID NO: 134412 - DNA, 25 bp, Artificial
  probe
  misc_feature (1)..(25): SEQ ID NO: 5785; WAN024CUZ_at; Start 12; Stop 36
gaggcatcagatgtcctctgaacaa

SEQ ID NO: 134413 - DNA, 25 bp, Artificial
  probe
  misc_feature (1)..(25): SEQ ID NO: 5785; WAN024CUZ_at; Start 16; Stop 40
catcagatgtcctctgaacaacagg

SEQ ID NO: 134414 - DNA, 25 bp, Artificial
  probe
  misc_feature (1)..(25): SEQ ID NO: 5785; WAN024CUZ_at; Start 430; Stop 454
gacgatgcaattgatgaggctaaat

SEQ ID NO: 134415 - DNA, 25 bp, Artificial
  probe
  misc_feature (1)..(25): SEQ ID NO: 5785; WAN024CUZ_at; Start 163; Stop 187
cagaaattagaagaattgctacaat

SEQ ID NO: 134416 - DNA, 25 bp, Artificial
  probe
  misc_feature (1)..(25): SEQ ID NO: 5785; WAN024CUZ_at; Start 282; Stop 306
gattcctttagccatcgcttggcaa

SEQ ID NO: 134417 - DNA, 25 bp, Artificial
  probe
  misc_feature (1)..(25): SEQ ID NO: 5785; WAN024CUZ_at; Start 368; Stop 392
tgttagaaaaaatggttaatgatcc

SEQ ID NO: 134418 - DNA, 25 bp, Artificial
  probe
  misc_feature (1)..(25): SEQ ID NO: 5785; WAN024CUZ_at; Start 269; Stop 293
tagaaaaagaagagattcctttagc

SEQ ID NO: 134419 - DNA, 25 bp, Artificial
  probe
  misc_feature (1)..(25): SEQ ID NO: 5785; WAN024CUZ_at; Start 10; Stop 34
aggaggcatcagatgtcctctgaac

SEQ ID NO: 134420 - DNA, 25 bp, Artificial
  probe
  misc_feature (1)..(25): SEQ ID NO: 5785; WAN024CUZ_at; Start 271; Stop 295
gaaaaagaagagattcctttagcca

SEQ ID NO: 134421 - DNA, 25 bp, Artificial
  probe
  misc_feature (1)..(25): SEQ ID NO: 5785; WAN024CUZ_at; Start 110; Stop 134
aatggtctagacgtcaggctttagc

SEQ ID NO: 134422 - DNA, 25 bp, Artificial
  probe
  misc_feature (1)..(25): SEQ ID NO: 5785; WAN024CUZ_at; Start 109; Stop 133
gaatggtctagacgtcaggctttag

SEQ ID NO: 134423 - DNA, 25 bp, Artificial
  probe
  misc_feature (1)..(25): SEQ ID NO: 5785; WAN024CUZ_at; Start 280; Stop 304
gagattcctttagccatcgcttggc

SEQ ID NO: 134424 - DNA, 25 bp, Artificial
  probe
  misc_feature (1)..(25): SEQ ID NO: 5785; WAN024CUZ_at; Start 197; Stop 221
cgattgatacgattaatctgaaaaa

SEQ ID NO: 134425 - DNA, 25 bp, Artificial
  probe
  misc_feature (1)..(25): SEQ ID NO: 1130; WAN024CV2_at; Start 112; Stop 136
gactacattgaatttaaacgtgttg

SEQ ID NO: 134426 - DNA, 25 bp, Artificial
  probe
  misc_feature (1)..(25): SEQ ID NO: 1130; WAN024CV2_at; Start 234; Stop 258
gatagcttatcgttataaagaagga

SEQ ID NO: 134427 - DNA, 25 bp, Artificial
  probe
  misc_feature (1)..(25): SEQ ID NO: 1130; WAN024CV2_at; Start 70; Stop 94
catcactttccttttggtatgggct

SEQ ID NO: 134428 - DNA, 25 bp, Artificial
  probe
  misc_feature (1)..(25): SEQ ID NO: 1130; WAN024CV2_at; Start 53; Stop 77
gtaccatccaattgattcatcactt

SEQ ID NO: 134429 - DNA, 25 bp, Artificial
  probe
  misc_feature (1)..(25): SEQ ID NO: 1130; WAN024CV2_at; Start 168; Stop 192
tcttcgagaaccttattcgagagat

SEQ ID NO: 134430 - DNA, 25 bp, Artificial
  probe
  misc_feature (1)..(25): SEQ ID NO: 1130; WAN024CV2_at; Start 21; Stop 45
tgatttgaaacaaatgggaaataaa

SEQ ID NO: 134431 - DNA, 25 bp, Artificial
  probe
  misc_feature (1)..(25): SEQ ID NO: 1130; WAN024CV2_at; Start 40; Stop 64
aataaaggtggttgtaccatccaat

SEQ ID NO: 134432 - DNA, 25 bp, Artificial
  probe
  misc_feature (1)..(25): SEQ ID NO: 1130; WAN024CV2_at; Start 46; Stop 70
ggtggttgtaccatccaattgattc

SEQ ID NO: 134433 - DNA, 25 bp, Artificial
  probe
  misc_feature (1)..(25): SEQ ID NO: 1130; WAN024CV2_at; Start 162; Stop 186
agttactcttcgagaaccttattcg

SEQ ID NO: 134434 - DNA, 25 bp, Artificial
  probe
  misc_feature (1)..(25): SEQ ID NO: 1130; WAN024CV2_at; Start 38; Stop 62
gaaataaaggtggttgtaccatcca

SEQ ID NO: 134435 - DNA, 25 bp, Artificial
  probe
  misc_feature (1)..(25): SEQ ID NO: 1130; WAN024CV2_at; Start 247; Stop 271
tataaagaaggaaagctgctatttg

SEQ ID NO: 134436 - DNA, 25 bp, Artificial
  probe
  misc_feature (1)..(25): SEQ ID NO: 1130; WAN024CV2_at; Start 155; Stop 179
cagtagaagttactcttcgagaacc

SEQ ID NO: 134437 - DNA, 25 bp, Artificial
  probe
  misc_feature (1)..(25): SEQ ID NO: 1130; WAN024CV2_at; Start 73; Stop 97
cactttccttttggtatgggcttag

SEQ ID NO: 134438 - DNA, 25 bp, Artificial
  probe
  misc_feature (1)..(25): SEQ ID NO: 1130; WAN024CV2_at; Start 223; Stop 247
cgtcagaaattgatagcttatcgtt

SEQ ID NO: 134439 - DNA, 25 bp, Artificial
  probe
  misc_feature (1)..(25): SEQ ID NO: 1130; WAN024CV2_at; Start 62; Stop 86
aattgattcatcactttccttttgg

SEQ ID NO: 134440 - DNA, 25 bp, Artificial
  probe
  misc_feature (1)..(25): SEQ ID NO: 1130; WAN024CV2_at; Start 42; Stop 66
taaaggtggttgtaccatccaattg

SEQ ID NO: 134441 - DNA, 25 bp, Artificial
  probe
  misc_feature (1)..(25): SEQ ID NO: 1130; WAN024CV2_at; Start 226; Stop 250
cagaaattgatagcttatcgttata

SEQ ID NO: 134442 - DNA, 25 bp, Artificial
  probe
  misc_feature (1)..(25): SEQ ID NO: 1130; WAN024CV2_at; Start 221; Stop 245
aacgtcagaaattgatagcttatcg

SEQ ID NO: 134443 - DNA, 25 bp, Artificial
  probe
  misc_feature (1)..(25): SEQ ID NO: 1130; WAN024CV2_at; Start 165; Stop 189
tactcttcgagaaccttattcgaga

SEQ ID NO: 134444 - DNA, 25 bp, Artificial
  probe
  misc_feature (1)..(25): SEQ ID NO: 1130; WAN024CV2_at; Start 49; Stop 73
ggttgtaccatccaattgattcatc

SEQ ID NO: 134445 - DNA, 25 bp, Artificial
  probe
  misc_feature (1)..(25): SEQ ID NO: 1130; WAN024CV2_at; Start 145; Stop 169
gatgggaaagcagtagaagttactc

SEQ ID NO: 134446 - DNA, 25 bp, Artificial
  probe
  misc_feature (1)..(25): SEQ ID NO: 1130; WAN024CV2_at; Start 236; Stop 260
tagcttatcgttataaagaaggaaa

SEQ ID NO: 134447 - DNA, 25 bp, Artificial
  probe
  misc_feature (1)..(25): SEQ ID NO: 1130; WAN024CV2_at; Start 66; Stop 90
gattcatcactttccttttggtatg

SEQ ID NO: 134448 - DNA, 25 bp, Artificial
  probe
  misc_feature (1)..(25): SEQ ID NO: 1130; WAN024CV2_at; Start 69; Stop 93
tcatcactttccttttggtatgggc

SEQ ID NO: 134449 - DNA, 25 bp, Artificial
  probe
  misc_feature (1)..(25): SEQ ID NO: 1130; WAN024CV2_at; Start 15; Stop 39
cttgtatgatttgaaacaaatggga

SEQ ID NO: 134450 - DNA, 25 bp, Artificial
  probe
  misc_feature (1)..(25): SEQ ID NO: 1130; WAN024CV2_at; Start 150; Stop 174
gaaagcagtagaagttactcttcga

SEQ ID NO: 134451 - DNA, 25 bp, Artificial
  probe
  misc_feature (1)..(25): SEQ ID NO: 1130; WAN024CV2_at; Start 163; Stop 187
gttactcttcgagaaccttattcga

SEQ ID NO: 134452 - DNA, 25 bp, Artificial
  probe
  misc_feature (1)..(25): SEQ ID NO: 1130; WAN024CV2_at; Start 152; Stop 176
aagcagtagaagttactcttcgaga

SEQ ID NO: 134453 - DNA, 25 bp, Artificial
  probe
  misc_feature (1)..(25): SEQ ID NO: 1130; WAN024CV2_at; Start 117; Stop 141
cattgaatttaaacgtgttggtatc

SEQ ID NO: 134454 - DNA, 25 bp, Artificial
  probe
  misc_feature (1)..(25): SEQ ID NO: 1130; WAN024CV2_at; Start 47; Stop 71
gtggttgtaccatccaattgattca

SEQ ID NO: 134455 - DNA, 25 bp, Artificial
  probe
  misc_feature (1)..(25): SEQ ID NO: 1130; WAN024CV2_at; Start 143; Stop 167
ttgatgggaaagcagtagaagttac

SEQ ID NO: 134456 - DNA, 25 bp, Artificial
  probe
  misc_feature (1)..(25): SEQ ID NO: 1130; WAN024CV2_at; Start 148; Stop 172
gggaaagcagtagaagttactcttc

SEQ ID NO: 134457 - DNA, 25 bp, Artificial
  probe
  misc_feature (1)..(25): SEQ ID NO: 1130; WAN024CV2_at; Start 3; Stop 27
gaaggtagtaaacttgtatgatttg

SEQ ID NO: 134458 - DNA, 25 bp, Artificial
  probe
  misc_feature (1)..(25): SEQ ID NO: 1130; WAN024CV2_at; Start 158; Stop 182
tagaagttactcttcgagaacctta

SEQ ID NO: 134459 - DNA, 25 bp, Artificial
  probe
  misc_feature (1)..(25): SEQ ID NO: 2970; WAN024CV3_at; Start 21; Stop 45
caagaatcaaattagccattttttc

SEQ ID NO: 134460 - DNA, 25 bp, Artificial
  probe
  misc_feature (1)..(25): SEQ ID NO: 2970; WAN024CV3_at; Start 199; Stop 223
tccttcagtagcactaatagcatca

SEQ ID NO: 134461 - DNA, 25 bp, Artificial
  probe
  misc_feature (1)..(25): SEQ ID NO: 2970; WAN024CV3_at; Start 101; Stop 125
cctgctttagaaccagcctcttcaa

SEQ ID NO: 134462 - DNA, 25 bp, Artificial
  probe
  misc_feature (1)..(25): SEQ ID NO: 2970; WAN024CV3_at; Start 45; Stop 69
caattcccattggaataggaatata

SEQ ID NO: 134463 - DNA, 25 bp, Artificial
  probe
  misc_feature (1)..(25): SEQ ID NO: 2970; WAN024CV3_at; Start 191; Stop 215
gctttccctccttcagtagcactaa

SEQ ID NO: 134464 - DNA, 25 bp, Artificial
  probe
  misc_feature (1)..(25): SEQ ID NO: 2970; WAN024CV3_at; Start 107; Stop 131
ttagaaccagcctcttcaaattgct

SEQ ID NO: 134465 - DNA, 25 bp, Artificial
  probe
  misc_feature (1)..(25): SEQ ID NO: 2970; WAN024CV3_at; Start 156; Stop 180
tgacaagatacaaatcaaaagctgc

SEQ ID NO: 134466 - DNA, 25 bp, Artificial
  probe
  misc_feature (1)..(25): SEQ ID NO: 2970; WAN024CV3_at; Start 35; Stop 59
gccattttttcaattcccattggaa

SEQ ID NO: 134467 - DNA, 25 bp, Artificial
  probe
  misc_feature (1)..(25): SEQ ID NO: 2970; WAN024CV3_at; Start 97; Stop 121
ttttcctgctttagaaccagcctct

SEQ ID NO: 134468 - DNA, 25 bp, Artificial
  probe
  misc_feature (1)..(25): SEQ ID NO: 2970; WAN024CV3_at; Start 195; Stop 219
tccctccttcagtagcactaatagc

SEQ ID NO: 134469 - DNA, 25 bp, Artificial
  probe
  misc_feature (1)..(25): SEQ ID NO: 2970; WAN024CV3_at; Start 110; Stop 134
gaaccagcctcttcaaattgcttaa

SEQ ID NO: 134470 - DNA, 25 bp, Artificial
  probe
  misc_feature (1)..(25): SEQ ID NO: 2970; WAN024CV3_at; Start 164; Stop 188
tacaaatcaaaagctgctgctgcga

SEQ ID NO: 134471 - DNA, 25 bp, Artificial
  probe
  misc_feature (1)..(25): SEQ ID NO: 2970; WAN024CV3_at; Start 207; Stop 231
tagcactaatagcatcaactacaat

SEQ ID NO: 134472 - DNA, 25 bp, Artificial
  probe
  misc_feature (1)..(25): SEQ ID NO: 2970; WAN024CV3_at; Start 170; Stop 194
tcaaaagctgctgctgcgatagctt

SEQ ID NO: 134473 - DNA, 25 bp, Artificial
  probe
  misc_feature (1)..(25): SEQ ID NO: 2970; WAN024CV3_at; Start 82; Stop 106
tatttgtacaactggttttcctgct

SEQ ID NO: 134474 - DNA, 25 bp, Artificial
  probe
  misc_feature (1)..(25): SEQ ID NO: 2970; WAN024CV3_at; Start 94; Stop 118
tggttttcctgctttagaaccagcc

SEQ ID NO: 134475 - DNA, 25 bp, Artificial
  probe
  misc_feature (1)..(25): SEQ ID NO: 2970; WAN024CV3_at; Start 15; Stop 39
tattctcaagaatcaaattagccat

SEQ ID NO: 134476 - DNA, 25 bp, Artificial
  probe
  misc_feature (1)..(25): SEQ ID NO: 2970; WAN024CV3_at; Start 71; Stop 95
gcttgaggaggtatttgtacaactg

SEQ ID NO: 134477 - DNA, 25 bp, Artificial
  probe
  misc_feature (1)..(25): SEQ ID NO: 2970; WAN024CV3_at; Start 1; Stop 25
atgtgttcatcaaatattctcaaga

SEQ ID NO: 134478 - DNA, 25 bp, Artificial
  probe
  misc_feature (1)..(25): SEQ ID NO: 2970; WAN024CV3_at; Start 162; Stop 186
gatacaaatcaaaagctgctgctgc

SEQ ID NO: 134479 - DNA, 25 bp, Artificial
  probe
  misc_feature (1)..(25): SEQ ID NO: 2970; WAN024CV3_at; Start 175; Stop 199
agctgctgctgcgatagctttccct

SEQ ID NO: 134480 - DNA, 25 bp, Artificial
  probe
  misc_feature (1)..(25): SEQ ID NO: 2970; WAN024CV3_at; Start 221; Stop 245
tcaactacaatatctttcccttttc

SEQ ID NO: 134481 - DNA, 25 bp, Artificial
  probe
  misc_feature (1)..(25): SEQ ID NO: 2970; WAN024CV3_at; Start 181; Stop 205
tgctgcgatagctttccctccttca

SEQ ID NO: 134482 - DNA, 25 bp, Artificial
  probe
  misc_feature (1)..(25): SEQ ID NO: 2970; WAN024CV3_at; Start 202; Stop 226
ttcagtagcactaatagcatcaact

SEQ ID NO: 134483 - DNA, 25 bp, Artificial
  probe
  misc_feature (1)..(25): SEQ ID NO: 2970; WAN024CV3_at; Start 178; Stop 202
tgctgctgcgatagctttccctcct

SEQ ID NO: 134484 - DNA, 25 bp, Artificial
  probe
  misc_feature (1)..(25): SEQ ID NO: 2970; WAN024CV3_at; Start 116; Stop 140
gcctcttcaaattgcttaaagtaca

SEQ ID NO: 134485 - DNA, 25 bp, Artificial
  probe
  misc_feature (1)..(25): SEQ ID NO: 2970; WAN024CV3_at; Start 159; Stop 183
caagatacaaatcaaaagctgctgc

SEQ ID NO: 134486 - DNA, 25 bp, Artificial
  probe
  misc_feature (1)..(25): SEQ ID NO: 2970; WAN024CV3_at; Start 216; Stop 240
tagcatcaactacaatatctttccc

SEQ ID NO: 134487 - DNA, 25 bp, Artificial
  probe
  misc_feature (1)..(25): SEQ ID NO: 2970; WAN024CV3_at; Start 74; Stop 98
tgaggaggtatttgtacaactggtt

SEQ ID NO: 134488 - DNA, 25 bp, Artificial
  probe
  misc_feature (1)..(25): SEQ ID NO: 2970; WAN024CV3_at; Start 88; Stop 112
tacaactggttttcctgctttagaa

SEQ ID NO: 134489 - DNA, 25 bp, Artificial
  probe
  misc_feature (1)..(25): SEQ ID NO: 2970; WAN024CV3_at; Start 128; Stop 152
tgcttaaagtacatttttgtttgag

SEQ ID NO: 134490 - DNA, 25 bp, Artificial
  probe
  misc_feature (1)..(25): SEQ ID NO: 2970; WAN024CV3_at; Start 168; Stop 192
aatcaaaagctgctgctgcgatagc

SEQ ID NO: 134491 - DNA, 25 bp, Artificial
  probe
  misc_feature (1)..(25): SEQ ID NO: 2970; WAN024CV3_at; Start 184; Stop 208
tgcgatagctttccctccttcagta

SEQ ID NO: 134492 - DNA, 25 bp, Artificial
  probe
  misc_feature (1)..(25): SEQ ID NO: 2970; WAN024CV3_at; Start 187; Stop 211
gatagctttccctccttcagtagca

SEQ ID NO: 134493 - DNA, 25 bp, Artificial
  probe
  misc_feature (1)..(25): SEQ ID NO: 2380; WAN024CV4_at; Start 111; Stop 135
tagtgctactgaaggagggaaagct

SEQ ID NO: 134494 - DNA, 25 bp, Artificial
  probe
  misc_feature (1)..(25): SEQ ID NO: 2380; WAN024CV4_at; Start 140; Stop 164
cagcagcagcttttgatttgtatct

SEQ ID NO: 134495 - DNA, 25 bp, Artificial
  probe
  misc_feature (1)..(25): SEQ ID NO: 2380; WAN024CV4_at; Start 10; Stop 34
gctttaattatttgtgcagcaggaa

SEQ ID NO: 134496 - DNA, 25 bp, Artificial
  probe
  misc_feature (1)..(25): SEQ ID NO: 2380; WAN024CV4_at; Start 55; Stop 79
cagaaaacaacagagtttctaaaag

SEQ ID NO: 134497 - DNA, 25 bp, Artificial
  probe
  misc_feature (1)..(25): SEQ ID NO: 2380; WAN024CV4_at; Start 14; Stop 38
taattatttgtgcagcaggaatgtc

SEQ ID NO: 134498 - DNA, 25 bp, Artificial
  probe
  misc_feature (1)..(25): SEQ ID NO: 2380; WAN024CV4_at; Start 132; Stop 156
agctatcgcagcagcagcttttgat

SEQ ID NO: 134499 - DNA, 25 bp, Artificial
  probe
  misc_feature (1)..(25): SEQ ID NO: 2380; WAN024CV4_at; Start 50; Stop 74
tggcacagaaaacaacagagtttct

SEQ ID NO: 134500 - DNA, 25 bp, Artificial
  probe
  misc_feature (1)..(25): SEQ ID NO: 2380; WAN024CV4_at; Start 46; Stop 70
cttatggcacagaaaacaacagagt

SEQ ID NO: 134501 - DNA, 25 bp, Artificial
  probe
  misc_feature (1)..(25): SEQ ID NO: 2380; WAN024CV4_at; Start 41; Stop 65
catcacttatggcacagaaaacaac

SEQ ID NO: 134502 - DNA, 25 bp, Artificial
  probe
  misc_feature (1)..(25): SEQ ID NO: 2380; WAN024CV4_at; Start 120; Stop 144
tgaaggagggaaagctatcgcagca

SEQ ID NO: 134503 - DNA, 25 bp, Artificial
  probe
  misc_feature (1)..(25): SEQ ID NO: 2380; WAN024CV4_at; Start 108; Stop 132
tattagtgctactgaaggagggaaa

SEQ ID NO: 134504 - DNA, 25 bp, Artificial
  probe
  misc_feature (1)..(25): SEQ ID NO: 2380; WAN024CV4_at; Start 36; Stop 60
gtcttcatcacttatggcacagaaa

SEQ ID NO: 134505 - DNA, 25 bp, Artificial
  probe
  misc_feature (1)..(25): SEQ ID NO: 2380; WAN024CV4_at; Start 18; Stop 42
tatttgtgcagcaggaatgtcttca

SEQ ID NO: 134506 - DNA, 25 bp, Artificial
  probe
  misc_feature (1)..(25): SEQ ID NO: 2380; WAN024CV4_at; Start 22; Stop 46
tgtgcagcaggaatgtcttcatcac

SEQ ID NO: 134507 - DNA, 25 bp, Artificial
  probe
  misc_feature (1)..(25): SEQ ID NO: 2380; WAN024CV4_at; Start 48; Stop 72
tatggcacagaaaacaacagagttt

SEQ ID NO: 134508 - DNA, 25 bp, Artificial
  probe
  misc_feature (1)..(25): SEQ ID NO: 2380; WAN024CV4_at; Start 43; Stop 67
tcacttatggcacagaaaacaacag

SEQ ID NO: 134509 - DNA, 25 bp, Artificial
  probe
  misc_feature (1)..(25): SEQ ID NO: 2380; WAN024CV4_at; Start 287; Stop 311
tggctaatttgattcttgagaatat

SEQ ID NO: 134510 - DNA, 25 bp, Artificial
  probe
  misc_feature (1)..(25): SEQ ID NO: 2380; WAN024CV4_at; Start 106; Stop 130
gctattagtgctactgaaggaggga

SEQ ID NO: 134511 - DNA, 25 bp, Artificial
  probe
  misc_feature (1)..(25): SEQ ID NO: 2380; WAN024CV4_at; Start 5; Stop 29
caaaagctttaattatttgtgcagc

SEQ ID NO: 134512 - DNA, 25 bp, Artificial
  probe
  misc_feature (1)..(25): SEQ ID NO: 2380; WAN024CV4_at; Start 93; Stop 117
tattgtagttgatgctattagtgct

SEQ ID NO: 134513 - DNA, 25 bp, Artificial
  probe
  misc_feature (1)..(25): SEQ ID NO: 2380; WAN024CV4_at; Start 207; Stop 231
ggctggttctaaagcaggaaaacca

SEQ ID NO: 134514 - DNA, 25 bp, Artificial
  probe
  misc_feature (1)..(25): SEQ ID NO: 2380; WAN024CV4_at; Start 114; Stop 138
tgctactgaaggagggaaagctatc

SEQ ID NO: 134515 - DNA, 25 bp, Artificial
  probe
  misc_feature (1)..(25): SEQ ID NO: 2380; WAN024CV4_at; Start 25; Stop 49
gcagcaggaatgtcttcatcactta

SEQ ID NO: 134516 - DNA, 25 bp, Artificial
  probe
  misc_feature (1)..(25): SEQ ID NO: 2380; WAN024CV4_at; Start 125; Stop 149
gagggaaagctatcgcagcagcagc

SEQ ID NO: 134517 - DNA, 25 bp, Artificial
  probe
  misc_feature (1)..(25): SEQ ID NO: 2380; WAN024CV4_at; Start 128; Stop 152
ggaaagctatcgcagcagcagcttt

SEQ ID NO: 134518 - DNA, 25 bp, Artificial
  probe
  misc_feature (1)..(25): SEQ ID NO: 2380; WAN024CV4_at; Start 103; Stop 127
gatgctattagtgctactgaaggag

SEQ ID NO: 134519 - DNA, 25 bp, Artificial
  probe
  misc_feature (1)..(25): SEQ ID NO: 2380; WAN024CV4_at; Start 209; Stop 233
ctggttctaaagcaggaaaaccagt

SEQ ID NO: 134520 - DNA, 25 bp, Artificial
  probe
  misc_feature (1)..(25): SEQ ID NO: 2380; WAN024CV4_at; Start 173; Stop 197
ctcaaacaaaaatgtactttaagca

SEQ ID NO: 134521 - DNA, 25 bp, Artificial
  probe
  misc_feature (1)..(25): SEQ ID NO: 2380; WAN024CV4_at; Start 32; Stop 56
gaatgtcttcatcacttatggcaca

SEQ ID NO: 134522 - DNA, 25 bp, Artificial
  probe
  misc_feature (1)..(25): SEQ ID NO: 2380; WAN024CV4_at; Start 117; Stop 141
tactgaaggagggaaagctatcgca

SEQ ID NO: 134523 - DNA, 25 bp, Artificial
  probe
  misc_feature (1)..(25): SEQ ID NO: 2380; WAN024CV4_at; Start 29; Stop 53
caggaatgtcttcatcacttatggc

SEQ ID NO: 134524 - DNA, 25 bp, Artificial
  probe
  misc_feature (1)..(25): SEQ ID NO: 2380; WAN024CV4_at; Start 135; Stop 159
tatcgcagcagcagcttttgatttg

SEQ ID NO: 134525 - DNA, 25 bp, Artificial
  probe
  misc_feature (1)..(25): SEQ ID NO: 2380; WAN024CV4_at; Start 85; Stop 109
gggaaagatattgtagttgatgcta

SEQ ID NO: 134526 - DNA, 25 bp, Artificial
  probe
  misc_feature (1)..(25): SEQ ID NO: 2380; WAN024CV4_at; Start 179; Stop 203
caaaaatgtactttaagcaatttga

SEQ ID NO: 134527 - DNA, 25 bp, Artificial
  probe
  misc_feature (1)..(25): SEQ ID NO: 1509; WAN024CV5_at; Start 784; Stop 808
gatgctatctcactgaataccttgc

SEQ ID NO: 134528 - DNA, 25 bp, Artificial
  probe
  misc_feature (1)..(25): SEQ ID NO: 1509; WAN024CV5_at; Start 889; Stop 913
gggaaagccttgtcgcctttgatga

SEQ ID NO: 134529 - DNA, 25 bp, Artificial
  probe
  misc_feature (1)..(25): SEQ ID NO: 1509; WAN024CV5_at; Start 436; Stop 460
cgcttagcgcagacaattcaattca

SEQ ID NO: 134530 - DNA, 25 bp, Artificial
  probe
  misc_feature (1)..(25): SEQ ID NO: 1509; WAN024CV5_at; Start 13; Stop 37
tgggttgtaatcaaggaaacctatc

SEQ ID NO: 134531 - DNA, 25 bp, Artificial
  probe
  misc_feature (1)..(25): SEQ ID NO: 1509; WAN024CV5_at; Start 933; Stop 957
ttttggagtgacagctctaggtgca

SEQ ID NO: 134532 - DNA, 25 bp, Artificial
  probe
  misc_feature (1)..(25): SEQ ID NO: 1509; WAN024CV5_at; Start 1126; Stop 1150
tatgctagtctcgttcttcaaacgg

SEQ ID NO: 134533 - DNA, 25 bp, Artificial
  probe
  misc_feature (1)..(25): SEQ ID NO: 1509; WAN024CV5_at; Start 498; Stop 522
tattcaaacaattgcagcaggtgcc

SEQ ID NO: 134534 - DNA, 25 bp, Artificial
  probe
  misc_feature (1)..(25): SEQ ID NO: 1509; WAN024CV5_at; Start 95; Stop 119
taggaatctctgtaggaattgggca

SEQ ID NO: 134535 - DNA, 25 bp, Artificial
  probe
  misc_feature (1)..(25): SEQ ID NO: 1509; WAN024CV5_at; Start 768; Stop 792
tttggatcacttgggagatgctatc

SEQ ID NO: 134536 - DNA, 25 bp, Artificial
  probe
  misc_feature (1)..(25): SEQ ID NO: 1509; WAN024CV5_at; Start 1075; Stop 1099
gctattacagtgatttttgcggtgg

SEQ ID NO: 134537 - DNA, 25 bp, Artificial
  probe
  misc_feature (1)..(25): SEQ ID NO: 1509; WAN024CV5_at; Start 540; Stop 564
tatgattctgattacctatgcgggt

SEQ ID NO: 134538 - DNA, 25 bp, Artificial
  probe
  misc_feature (1)..(25): SEQ ID NO: 1509; WAN024CV5_at; Start 635; Stop 659
caagtcactatttctatgcgcggat

SEQ ID NO: 134539 - DNA, 25 bp, Artificial
  probe
  misc_feature (1)..(25): SEQ ID NO: 1509; WAN024CV5_at; Start 714; Stop 738
tctggctgccgttttgctctttaaa

SEQ ID NO: 134540 - DNA, 25 bp, Artificial
  probe
  misc_feature (1)..(25): SEQ ID NO: 1509; WAN024CV5_at; Start 562; Stop 586
ggtgtaacagctcaggaagttgcca

SEQ ID NO: 134541 - DNA, 25 bp, Artificial
  probe
  misc_feature (1)..(25): SEQ ID NO: 1509; WAN024CV5_at; Start 699; Stop 723
ctatgttgtaggtggtctggctgcc

SEQ ID NO: 134542 - DNA, 25 bp, Artificial
  probe
  misc_feature (1)..(25): SEQ ID NO: 1509; WAN024CV5_at; Start 351; Stop 375
taaatttgaggttacaggtacactc

SEQ ID NO: 134543 - DNA, 25 bp, Artificial
  probe
  misc_feature (1)..(25): SEQ ID NO: 1509; WAN024CV5_at; Start 416; Stop 440
tgtctcaagagcaggaaaaacgctt

SEQ ID NO: 134544 - DNA, 25 bp, Artificial
  probe
  misc_feature (1)..(25): SEQ ID NO: 1509; WAN024CV5_at; Start 844; Stop 868
ttggcagccttcctaggatctatgg

SEQ ID NO: 134545 - DNA, 25 bp, Artificial
  probe
  misc_feature (1)..(25): SEQ ID NO: 1509; WAN024CV5_at; Start 305; Stop 329
ttctaaaggcagtttatcatggcga

SEQ ID NO: 134546 - DNA, 25 bp, Artificial
  probe
  misc_feature (1)..(25): SEQ ID NO: 1509; WAN024CV5_at; Start 43; Stop 67
catgtcgagtcatggagtttcttct

SEQ ID NO: 134547 - DNA, 25 bp, Artificial
  probe
  misc_feature (1)..(25): SEQ ID NO: 1509; WAN024CV5_at; Start 511; Stop 535
gcagcaggtgccttaggattctttc

SEQ ID NO: 134548 - DNA, 25 bp, Artificial
  probe
  misc_feature (1)..(25): SEQ ID NO: 1509; WAN024CV5_at; Start 167; Stop 191
caacagtgccatctgtagcagaagg

SEQ ID NO: 134549 - DNA, 25 bp, Artificial
  probe
  misc_feature (1)..(25): SEQ ID NO: 1509; WAN024CV5_at; Start 401; Stop 425
gttcaactgcttccttgtctcaaga

SEQ ID NO: 134550 - DNA, 25 bp, Artificial
  probe
  misc_feature (1)..(25): SEQ ID NO: 1509; WAN024CV5_at; Start 673; Stop 697
ctagtgattttaacgcatattggga

SEQ ID NO: 134551 - DNA, 25 bp, Artificial
  probe
  misc_feature (1)..(25): SEQ ID NO: 1509; WAN024CV5_at; Start 577; Stop 601
gaagttgccagtgaaaaaggcacca

SEQ ID NO: 134552 - DNA, 25 bp, Artificial
  probe
  misc_feature (1)..(25): SEQ ID NO: 1509; WAN024CV5_at; Start 753; Stop 777
ggctcagtctggtattttggatcac

SEQ ID NO: 134553 - DNA, 25 bp, Artificial
  probe
  misc_feature (1)..(25): SEQ ID NO: 1509; WAN024CV5_at; Start 619; Stop 643
ttttctagcataagggcaagtcact

SEQ ID NO: 134554 - DNA, 25 bp, Artificial
  probe
  misc_feature (1)..(25): SEQ ID NO: 1509; WAN024CV5_at; Start 649; Stop 673
tatgcgcggatgatggctctgtttc

SEQ ID NO: 134555 - DNA, 25 bp, Artificial
  probe
  misc_feature (1)..(25): SEQ ID NO: 1509; WAN024CV5_at; Start 459; Stop 483
cacagaaaagattgatgaagccaag

SEQ ID NO: 134556 - DNA, 25 bp, Artificial
  probe
  misc_feature (1)..(25): SEQ ID NO: 1509; WAN024CV5_at; Start 1093; Stop 1117
gcggtggtagcaacaggatttatcg

SEQ ID NO: 134557 - DNA, 25 bp, Artificial
  probe
  misc_feature (1)..(25): SEQ ID NO: 1509; WAN024CV5_at; Start 369; Stop 393
tacactcaatgaactgcaaaatcag

SEQ ID NO: 134558 - DNA, 25 bp, Artificial
  probe
  misc_feature (1)..(25): SEQ ID NO: 1509; WAN024CV5_at; Start 384; Stop 408
gcaaaatcagcttaatcgttcaact

SEQ ID NO: 134559 - DNA, 25 bp, Artificial
  probe
  misc_feature (1)..(25): SEQ ID NO: 1509; WAN024CV5_at; Start 1108; Stop 1132
ggatttatcggacgcatgtatgcta

SEQ ID NO: 134560 - DNA, 25 bp, Artificial
  probe
  misc_feature (1)..(25): SEQ ID NO: 1509; WAN024CV5_at; Start 948; Stop 972
tctaggtgcagctggtgacaatctc

SEQ ID NO: 134561 - DNA, 25 bp, Artificial
  probe
  misc_feature (1)..(25): SEQ ID NO: 6650; WAN024CV6_at; Start 265; Stop 289
catctgtccaaaacaataaatagga

SEQ ID NO: 134562 - DNA, 25 bp, Artificial
  probe
  misc_feature (1)..(25): SEQ ID NO: 6650; WAN024CV6_at; Start 87; Stop 111
cagacacttggtaattgacctcata

SEQ ID NO: 134563 - DNA, 25 bp, Artificial
  probe
  misc_feature (1)..(25): SEQ ID NO: 6650; WAN024CV6_at; Start 119; Stop 143
gccaaaaaaggatctacaatgcgat

SEQ ID NO: 134564 - DNA, 25 bp, Artificial
  probe
  misc_feature (1)..(25): SEQ ID NO: 6650; WAN024CV6_at; Start 139; Stop 163
gcgattttgcgaagccaagcgttga

SEQ ID NO: 134565 - DNA, 25 bp, Artificial
  probe
  misc_feature (1)..(25): SEQ ID NO: 6650; WAN024CV6_at; Start 110; Stop 134
tatccctccgccaaaaaaggatcta

SEQ ID NO: 134566 - DNA, 25 bp, Artificial
  probe
  misc_feature (1)..(25): SEQ ID NO: 6650; WAN024CV6_at; Start 58; Stop 82
caagtaaccatagactgcatcaggg

SEQ ID NO: 134567 - DNA, 25 bp, Artificial
  probe
  misc_feature (1)..(25): SEQ ID NO: 6650; WAN024CV6_at; Start 2; Stop 26
tgatgataatctgctcccaaataaa

SEQ ID NO: 134568 - DNA, 25 bp, Artificial
  probe
  misc_feature (1)..(25): SEQ ID NO: 6650; WAN024CV6_at; Start 303; Stop 327
ccaacatcaacaagtatcccaataa

SEQ ID NO: 134569 - DNA, 25 bp, Artificial
  probe
  misc_feature (1)..(25): SEQ ID NO: 6650; WAN024CV6_at; Start 75; Stop 99
catcagggtcgtcagacacttggta

SEQ ID NO: 134570 - DNA, 25 bp, Artificial
  probe
  misc_feature (1)..(25): SEQ ID NO: 6650; WAN024CV6_at; Start 43; Stop 67
caaacttggaatagacaagtaacca

SEQ ID NO: 134571 - DNA, 25 bp, Artificial
  probe
  misc_feature (1)..(25): SEQ ID NO: 6650; WAN024CV6_at; Start 148; Stop 172
cgaagccaagcgttgattgtaggcg

SEQ ID NO: 134572 - DNA, 25 bp, Artificial
  probe
  misc_feature (1)..(25): SEQ ID NO: 6650; WAN024CV6_at; Start 296; Stop 320
caggctaccaacatcaacaagtatc

SEQ ID NO: 134573 - DNA, 25 bp, Artificial
  probe
  misc_feature (1)..(25): SEQ ID NO: 6650; WAN024CV6_at; Start 95; Stop 119
tggtaattgacctcatatccctccg

SEQ ID NO: 134574 - DNA, 25 bp, Artificial
  probe
  misc_feature (1)..(25): SEQ ID NO: 6650; WAN024CV6_at; Start 245; Stop 269
tgtccaagagactgcaacaccatct

SEQ ID NO: 134575 - DNA, 25 bp, Artificial
  probe
  misc_feature (1)..(25): SEQ ID NO: 6650; WAN024CV6_at; Start 222; Stop 246
caaatgtagcatgacctttcacctg

SEQ ID NO: 134576 - DNA, 25 bp, Artificial
  probe
  misc_feature (1)..(25): SEQ ID NO: 6650; WAN024CV6_at; Start 66; Stop 90
catagactgcatcagggtcgtcaga

SEQ ID NO: 134577 - DNA, 25 bp, Artificial
  probe
  misc_feature (1)..(25): SEQ ID NO: 6650; WAN024CV6_at; Start 13; Stop 37
tgctcccaaataaaccggctccatg

SEQ ID NO: 134578 - DNA, 25 bp, Artificial
  probe
  misc_feature (1)..(25): SEQ ID NO: 6650; WAN024CV6_at; Start 161; Stop 185
tgattgtaggcgagagaatggttct

SEQ ID NO: 134579 - DNA, 25 bp, Artificial
  probe
  misc_feature (1)..(25): SEQ ID NO: 6650; WAN024CV6_at; Start 176; Stop 200
gaatggttctgttgttcttggtaca

SEQ ID NO: 134580 - DNA, 25 bp, Artificial
  probe
  misc_feature (1)..(25): SEQ ID NO: 6650; WAN024CV6_at; Start 80; Stop 104
gggtcgtcagacacttggtaattga

SEQ ID NO: 134581 - DNA, 25 bp, Artificial
  probe
  misc_feature (1)..(25): SEQ ID NO: 6650; WAN024CV6_at; Start 288; Stop 312
gaatcaaacaggctaccaacatcaa

SEQ ID NO: 134582 - DNA, 25 bp, Artificial
  probe
  misc_feature (1)..(25): SEQ ID NO: 6650; WAN024CV6_at; Start 252; Stop 276
gagactgcaacaccatctgtccaaa

SEQ ID NO: 134583 - DNA, 25 bp, Artificial
  probe
  misc_feature (1)..(25): SEQ ID NO: 6650; WAN024CV6_at; Start 154; Stop 178
caagcgttgattgtaggcgagagaa

SEQ ID NO: 134584 - DNA, 25 bp, Artificial
  probe
  misc_feature (1)..(25): SEQ ID NO: 6650; WAN024CV6_at; Start 29; Stop 53
ggctccatgatttccaaacttggaa

SEQ ID NO: 134585 - DNA, 25 bp, Artificial
  probe
  misc_feature (1)..(25): SEQ ID NO: 6650; WAN024CV6_at; Start 213; Stop 237
tggatttcacaaatgtagcatgacc

SEQ ID NO: 134586 - DNA, 25 bp, Artificial
  probe
  misc_feature (1)..(25): SEQ ID NO: 6650; WAN024CV6_at; Start 8; Stop 32
taatctgctcccaaataaaccggct

SEQ ID NO: 134587 - DNA, 25 bp, Artificial
  probe
  misc_feature (1)..(25): SEQ ID NO: 6650; WAN024CV6_at; Start 70; Stop 94
gactgcatcagggtcgtcagacact

SEQ ID NO: 134588 - DNA, 25 bp, Artificial
  probe
  misc_feature (1)..(25): SEQ ID NO: 6650; WAN024CV6_at; Start 133; Stop 157
tacaatgcgattttgcgaagccaag

SEQ ID NO: 134589 - DNA, 25 bp, Artificial
  probe
  misc_feature (1)..(25): SEQ ID NO: 6650; WAN024CV6_at; Start 281; Stop 305
taaataggaatcaaacaggctacca

SEQ ID NO: 134590 - DNA, 25 bp, Artificial
  probe
  misc_feature (1)..(25): SEQ ID NO: 6650; WAN024CV6_at; Start 191; Stop 215
tcttggtacatttcagttgtcatgg

SEQ ID NO: 134591 - DNA, 25 bp, Artificial
  probe
  misc_feature (1)..(25): SEQ ID NO: 6650; WAN024CV6_at; Start 23; Stop 47
taaaccggctccatgatttccaaac

SEQ ID NO: 134592 - DNA, 25 bp, Artificial
  probe
  misc_feature (1)..(25): SEQ ID NO: 6650; WAN024CV6_at; Start 199; Stop 223
catttcagttgtcatggatttcaca

SEQ ID NO: 134593 - DNA, 25 bp, Artificial
  probe
  misc_feature (1)..(25): SEQ ID NO: 6650; WAN024CV6_at; Start 228; Stop 252
tagcatgacctttcacctgtccaag

SEQ ID NO: 134594 - DNA, 25 bp, Artificial
  probe
  misc_feature (1)..(25): SEQ ID NO: 6650; WAN024CV6_at; Start 234; Stop 258
gacctttcacctgtccaagagactg

SEQ ID NO: 134595 - DNA, 25 bp, Artificial
  probe
  misc_feature (1)..(25): SEQ ID NO: 4086; WAN024CV7_at; Start 66; Stop 90
cattgagaggttgcaacacgcgata

SEQ ID NO: 134596 - DNA, 25 bp, Artificial
  probe
  misc_feature (1)..(25): SEQ ID NO: 4086; WAN024CV7_at; Start 12; Stop 36
cacaaaacaaacaggattcccagaa

SEQ ID NO: 134597 - DNA, 25 bp, Artificial
  probe
  misc_feature (1)..(25): SEQ ID NO: 4086; WAN024CV7_at; Start 50; Stop 74
tagcccacggtacaaccattgagag

SEQ ID NO: 134598 - DNA, 25 bp, Artificial
  probe
  misc_feature (1)..(25): SEQ ID NO: 4086; WAN024CV7_at; Start 87; Stop 111
gatacagattgtccttctttcgcta

SEQ ID NO: 134599 - DNA, 25 bp, Artificial
  probe
  misc_feature (1)..(25): SEQ ID NO: 4086; WAN024CV7_at; Start 33; Stop 57
agaaatgccagtaccactagcccac

SEQ ID NO: 134600 - DNA, 25 bp, Artificial
  probe
  misc_feature (1)..(25): SEQ ID NO: 4086; WAN024CV7_at; Start 91; Stop 115
cagattgtccttctttcgctaacta

SEQ ID NO: 134601 - DNA, 25 bp, Artificial
  probe
  misc_feature (1)..(25): SEQ ID NO: 4086; WAN024CV7_at; Start 93; Stop 117
gattgtccttctttcgctaactaat

SEQ ID NO: 134602 - DNA, 25 bp, Artificial
  probe
  misc_feature (1)..(25): SEQ ID NO: 4086; WAN024CV7_at; Start 20; Stop 44
aaacaggattcccagaaatgccagt

SEQ ID NO: 134603 - DNA, 25 bp, Artificial
  probe
  misc_feature (1)..(25): SEQ ID NO: 4086; WAN024CV7_at; Start 10; Stop 34
tccacaaaacaaacaggattcccag

SEQ ID NO: 134604 - DNA, 25 bp, Artificial
  probe
  misc_feature (1)..(25): SEQ ID NO: 4086; WAN024CV7_at; Start 23; Stop 47
caggattcccagaaatgccagtacc

SEQ ID NO: 134605 - DNA, 25 bp, Artificial
  probe
  misc_feature (1)..(25): SEQ ID NO: 4086; WAN024CV7_at; Start 7; Stop 31
gcttccacaaaacaaacaggattcc

SEQ ID NO: 134606 - DNA, 25 bp, Artificial
  probe
  misc_feature (1)..(25): SEQ ID NO: 4086; WAN024CV7_at; Start 77; Stop 101
tgcaacacgcgatacagattgtcct

SEQ ID NO: 134607 - DNA, 25 bp, Artificial
  probe
  misc_feature (1)..(25): SEQ ID NO: 4086; WAN024CV7_at; Start 84; Stop 108
cgcgatacagattgtccttctttcg

SEQ ID NO: 134608 - DNA, 25 bp, Artificial
  probe
  misc_feature (1)..(25): SEQ ID NO: 4086; WAN024CV7_at; Start 55; Stop 79
cacggtacaaccattgagaggttgc

SEQ ID NO: 134609 - DNA, 25 bp, Artificial
  probe
  misc_feature (1)..(25): SEQ ID NO: 4086; WAN024CV7_at; Start 52; Stop 76
gcccacggtacaaccattgagaggt

SEQ ID NO: 134610 - DNA, 25 bp, Artificial
  probe
  misc_feature (1)..(25): SEQ ID NO: 4086; WAN024CV7_at; Start 62; Stop 86
caaccattgagaggttgcaacacgc

SEQ ID NO: 134611 - DNA, 25 bp, Artificial
  probe
  misc_feature (1)..(25): SEQ ID NO: 4086; WAN024CV7_at; Start 70; Stop 94
gagaggttgcaacacgcgatacaga

SEQ ID NO: 134612 - DNA, 25 bp, Artificial
  probe
  misc_feature (1)..(25): SEQ ID NO: 4086; WAN024CV7_at; Start 82; Stop 106
cacgcgatacagattgtccttcttt

SEQ ID NO: 134613 - DNA, 25 bp, Artificial
  probe
  misc_feature (1)..(25): SEQ ID NO: 4086; WAN024CV7_at; Start 17; Stop 41
aacaaacaggattcccagaaatgcc

SEQ ID NO: 134614 - DNA, 25 bp, Artificial
  probe
  misc_feature (1)..(25): SEQ ID NO: 4086; WAN024CV7_at; Start 72; Stop 96
gaggttgcaacacgcgatacagatt

SEQ ID NO: 134615 - DNA, 25 bp, Artificial
  probe
  misc_feature (1)..(25): SEQ ID NO: 4086; WAN024CV7_at; Start 2; Stop 26
tgctagcttccacaaaacaaacagg

SEQ ID NO: 134616 - DNA, 25 bp, Artificial
  probe
  misc_feature (1)..(25): SEQ ID NO: 4086; WAN024CV7_at; Start 25; Stop 49
ggattcccagaaatgccagtaccac

SEQ ID NO: 134617 - DNA, 25 bp, Artificial
  probe
  misc_feature (1)..(25): SEQ ID NO: 4086; WAN024CV7_at; Start 79; Stop 103
caacacgcgatacagattgtccttc

SEQ ID NO: 134618 - DNA, 25 bp, Artificial
  probe
  misc_feature (1)..(25): SEQ ID NO: 4086; WAN024CV7_at; Start 75; Stop 99
gttgcaacacgcgatacagattgtc

SEQ ID NO: 134619 - DNA, 25 bp, Artificial
  probe
  misc_feature (1)..(25): SEQ ID NO: 4086; WAN024CV7_at; Start 48; Stop 72
actagcccacggtacaaccattgag

SEQ ID NO: 134620 - DNA, 25 bp, Artificial
  probe
  misc_feature (1)..(25): SEQ ID NO: 4086; WAN024CV7_at; Start 29; Stop 53
tcccagaaatgccagtaccactagc

SEQ ID NO: 134621 - DNA, 25 bp, Artificial
  probe
  misc_feature (1)..(25): SEQ ID NO: 4086; WAN024CV7_at; Start 26; Stop 50
gattcccagaaatgccagtaccact

SEQ ID NO: 134622 - DNA, 25 bp, Artificial
  probe
  misc_feature (1)..(25): SEQ ID NO: 4086; WAN024CV7_at; Start 57; Stop 81
cggtacaaccattgagaggttgcaa

SEQ ID NO: 134623 - DNA, 25 bp, Artificial
  probe
  misc_feature (1)..(25): SEQ ID NO: 4086; WAN024CV7_at; Start 37; Stop 61
atgccagtaccactagcccacggta

SEQ ID NO: 134624 - DNA, 25 bp, Artificial
  probe
  misc_feature (1)..(25): SEQ ID NO: 4086; WAN024CV7_at; Start 3; Stop 27
gctagcttccacaaaacaaacagga

SEQ ID NO: 134625 - DNA, 25 bp, Artificial
  probe
  misc_feature (1)..(25): SEQ ID NO: 4086; WAN024CV7_at; Start 64; Stop 88
accattgagaggttgcaacacgcga

SEQ ID NO: 134626 - DNA, 25 bp, Artificial
  probe
  misc_feature (1)..(25): SEQ ID NO: 4086; WAN024CV7_at; Start 5; Stop 29
tagcttccacaaaacaaacaggatt

SEQ ID NO: 134627 - DNA, 25 bp, Artificial
  probe
  misc_feature (1)..(25): SEQ ID NO: 4086; WAN024CV7_at; Start 53; Stop 77
cccacggtacaaccattgagaggtt

SEQ ID NO: 134628 - DNA, 25 bp, Artificial
  probe
  misc_feature (1)..(25): SEQ ID NO: 4086; WAN024CV7_at; Start 68; Stop 92
ttgagaggttgcaacacgcgataca

SEQ ID NO: 134629 - DNA, 25 bp, Artificial
  probe
  misc_feature (1)..(25): SEQ ID NO: 2835; WAN024CV8_at; Start 780; Stop 804
gctagtggtactggcatttctggga

SEQ ID NO: 134630 - DNA, 25 bp, Artificial
  probe
  misc_feature (1)..(25): SEQ ID NO: 2835; WAN024CV8_at; Start 415; Stop 439
tcagtgattgctgggcaccgtgcag

SEQ ID NO: 134631 - DNA, 25 bp, Artificial
  probe
  misc_feature (1)..(25): SEQ ID NO: 2835; WAN024CV8_at; Start 617; Stop 641
gcgatccgattcctacctttaataa

SEQ ID NO: 134632 - DNA, 25 bp, Artificial
  probe
  misc_feature (1)..(25): SEQ ID NO: 2835; WAN024CV8_at; Start 690; Stop 714
tccacaaacagctgcagttgcgagg

SEQ ID NO: 134633 - DNA, 25 bp, Artificial
  probe
  misc_feature (1)..(25): SEQ ID NO: 2835; WAN024CV8_at; Start 534; Stop 558
gatggacacagagattattttaccg

SEQ ID NO: 134634 - DNA, 25 bp, Artificial
  probe
  misc_feature (1)..(25): SEQ ID NO: 2835; WAN024CV8_at; Start 695; Stop 719
aaacagctgcagttgcgagggttgc

SEQ ID NO: 134635 - DNA, 25 bp, Artificial
  probe
  misc_feature (1)..(25): SEQ ID NO: 2835; WAN024CV8_at; Start 444; Stop 468
aagccatgtctttttccgccatttg

SEQ ID NO: 134636 - DNA, 25 bp, Artificial
  probe
  misc_feature (1)..(25): SEQ ID NO: 2835; WAN024CV8_at; Start 458; Stop 482
tccgccatttggatcagctaaaagt

SEQ ID NO: 134637 - DNA, 25 bp, Artificial
  probe
  misc_feature (1)..(25): SEQ ID NO: 2835; WAN024CV8_at; Start 822; Stop 846
gaagctagcacgtttactacgaggg

SEQ ID NO: 134638 - DNA, 25 bp, Artificial
  probe
  misc_feature (1)..(25): SEQ ID NO: 2835; WAN024CV8_at; Start 661; Stop 685
gaacgagtcgctgtttatcaaaaat

SEQ ID NO: 134639 - DNA, 25 bp, Artificial
  probe
  misc_feature (1)..(25): SEQ ID NO: 2835; WAN024CV8_at; Start 507; Stop 531
tggccaggaaattgtagaatatcag

SEQ ID NO: 134640 - DNA, 25 bp, Artificial
  probe
  misc_feature (1)..(25): SEQ ID NO: 2835; WAN024CV8_at; Start 647; Stop 671
tattagtgaattttgaacgagtcgc

SEQ ID NO: 134641 - DNA, 25 bp, Artificial
  probe
  misc_feature (1)..(25): SEQ ID NO: 2835; WAN024CV8_at; Start 471; Stop 495
tcagctaaaagttggagatgctctt

SEQ ID NO: 134642 - DNA, 25 bp, Artificial
  probe
  misc_feature (1)..(25): SEQ ID NO: 2835; WAN024CV8_at; Start 595; Stop 619
aatatcatgaccttgataacctgcg

SEQ ID NO: 134643 - DNA, 25 bp, Artificial
  probe
  misc_feature (1)..(25): SEQ ID NO: 2835; WAN024CV8_at; Start 499; Stop 523
tatgataatggccaggaaattgtag

SEQ ID NO: 134644 - DNA, 25 bp, Artificial
  probe
  misc_feature (1)..(25): SEQ ID NO: 2835; WAN024CV8_at; Start 786; Stop 810
ggtactggcatttctgggaatcctg

SEQ ID NO: 134645 - DNA, 25 bp, Artificial
  probe
  misc_feature (1)..(25): SEQ ID NO: 2835; WAN024CV8_at; Start 792; Stop 816
ggcatttctgggaatcctgtttgtt

SEQ ID NO: 134646 - DNA, 25 bp, Artificial
  probe
  misc_feature (1)..(25): SEQ ID NO: 2835; WAN024CV8_at; Start 727; Stop 751
aaagaaggacaatctgtatcgcgtg

SEQ ID NO: 134647 - DNA, 25 bp, Artificial
  probe
  misc_feature (1)..(25): SEQ ID NO: 2835; WAN024CV8_at; Start 609; Stop 633
gataacctgcgatccgattcctacc

SEQ ID NO: 134648 - DNA, 25 bp, Artificial
  probe
  misc_feature (1)..(25): SEQ ID NO: 2835; WAN024CV8_at; Start 734; Stop 758
gacaatctgtatcgcgtgttgcaac

SEQ ID NO: 134649 - DNA, 25 bp, Artificial
  probe
  misc_feature (1)..(25): SEQ ID NO: 2835; WAN024CV8_at; Start 704; Stop 728
cagttgcgagggttgcttttacgaa

SEQ ID NO: 134650 - DNA, 25 bp, Artificial
  probe
  misc_feature (1)..(25): SEQ ID NO: 2835; WAN024CV8_at; Start 521; Stop 545
tagaatatcagatgatggacacaga

SEQ ID NO: 134651 - DNA, 25 bp, Artificial
  probe
  misc_feature (1)..(25): SEQ ID NO: 2835; WAN024CV8_at; Start 718; Stop 742
gcttttacgaaagaaggacaatctg

SEQ ID NO: 134652 - DNA, 25 bp, Artificial
  probe
  misc_feature (1)..(25): SEQ ID NO: 2835; WAN024CV8_at; Start 825; Stop 849
gctagcacgtttactacgagggaaa

SEQ ID NO: 134653 - DNA, 25 bp, Artificial
  probe
  misc_feature (1)..(25): SEQ ID NO: 2835; WAN024CV8_at; Start 602; Stop 626
tgaccttgataacctgcgatccgat

SEQ ID NO: 134654 - DNA, 25 bp, Artificial
  probe
  misc_feature (1)..(25): SEQ ID NO: 2835; WAN024CV8_at; Start 490; Stop 514
gctctttattatgataatggccagg

SEQ ID NO: 134655 - DNA, 25 bp, Artificial
  probe
  misc_feature (1)..(25): SEQ ID NO: 2835; WAN024CV8_at; Start 670; Stop 694
gctgtttatcaaaaatcagatccac

SEQ ID NO: 134656 - DNA, 25 bp, Artificial
  probe
  misc_feature (1)..(25): SEQ ID NO: 2835; WAN024CV8_at; Start 743; Stop 767
tatcgcgtgttgcaacctctcaatg

SEQ ID NO: 134657 - DNA, 25 bp, Artificial
  probe
  misc_feature (1)..(25): SEQ ID NO: 2835; WAN024CV8_at; Start 543; Stop 567
agagattattttaccgtcggaatgg

SEQ ID NO: 134658 - DNA, 25 bp, Artificial
  probe
  misc_feature (1)..(25): SEQ ID NO: 2835; WAN024CV8_at; Start 682; Stop 706
aaatcagatccacaaacagctgcag

SEQ ID NO: 134659 - DNA, 25 bp, Artificial
  probe
  misc_feature (1)..(25): SEQ ID NO: 2835; WAN024CV8_at; Start 747; Stop 771
gcgtgttgcaacctctcaatggttg

SEQ ID NO: 134660 - DNA, 25 bp, Artificial
  probe
  misc_feature (1)..(25): SEQ ID NO: 2835; WAN024CV8_at; Start 807; Stop 831
cctgtttgttttgtggaagctagca

SEQ ID NO: 134661 - DNA, 25 bp, Artificial
  probe
  misc_feature (1)..(25): SEQ ID NO: 2835; WAN024CV8_at; Start 581; Stop 605
cggttagctctaaaaatatcatgac

SEQ ID NO: 134662 - DNA, 25 bp, Artificial
  probe
  misc_feature (1)..(25): SEQ ID NO: 2835; WAN024CV8_at; Start 568; Stop 592
gaaaaattagaatcggttagctcta

SEQ ID NO: 134663 - DNA, 25 bp, Artificial
  probe
  misc_feature (1)..(25): SEQ ID NO: 6842; WAN024CV9_at; Start 128; Stop 152
ttgctgctttcagcgccttcaaagc

SEQ ID NO: 134664 - DNA, 25 bp, Artificial
  probe
  misc_feature (1)..(25): SEQ ID NO: 6842; WAN024CV9_at; Start 12; Stop 36
gcaacggcgaatcctactaagaaaa

SEQ ID NO: 134665 - DNA, 25 bp, Artificial
  probe
  misc_feature (1)..(25): SEQ ID NO: 6842; WAN024CV9_at; Start 161; Stop 185
gttgttttttcttcttgcgcaagcg

SEQ ID NO: 134666 - DNA, 25 bp, Artificial
  probe
  misc_feature (1)..(25): SEQ ID NO: 6842; WAN024CV9_at; Start 2; Stop 26
tggatatatcgcaacggcgaatcct

SEQ ID NO: 134667 - DNA, 25 bp, Artificial
  probe
  misc_feature (1)..(25): SEQ ID NO: 6842; WAN024CV9_at; Start 116; Stop 140
tcacttccttccttgctgctttcag

SEQ ID NO: 134668 - DNA, 25 bp, Artificial
  probe
  misc_feature (1)..(25): SEQ ID NO: 6842; WAN024CV9_at; Start 165; Stop 189
ttttttcttcttgcgcaagcgtcga

SEQ ID NO: 134669 - DNA, 25 bp, Artificial
  probe
  misc_feature (1)..(25): SEQ ID NO: 6842; WAN024CV9_at; Start 179; Stop 203
gcaagcgtcgaataatccataaaag

SEQ ID NO: 134670 - DNA, 25 bp, Artificial
  probe
  misc_feature (1)..(25): SEQ ID NO: 6842; WAN024CV9_at; Start 125; Stop 149
tccttgctgctttcagcgccttcaa

SEQ ID NO: 134671 - DNA, 25 bp, Artificial
  probe
  misc_feature (1)..(25): SEQ ID NO: 6842; WAN024CV9_at; Start 29; Stop 53
taagaaaatcagaagaaggatcagc

SEQ ID NO: 134672 - DNA, 25 bp, Artificial
  probe
  misc_feature (1)..(25): SEQ ID NO: 6842; WAN024CV9_at; Start 200; Stop 224
aaagaatcacaatcaaaccaactgc

SEQ ID NO: 134673 - DNA, 25 bp, Artificial
  probe
  misc_feature (1)..(25): SEQ ID NO: 6842; WAN024CV9_at; Start 10; Stop 34
tcgcaacggcgaatcctactaagaa

SEQ ID NO: 134674 - DNA, 25 bp, Artificial
  probe
  misc_feature (1)..(25): SEQ ID NO: 6842; WAN024CV9_at; Start 8; Stop 32
tatcgcaacggcgaatcctactaag

SEQ ID NO: 134675 - DNA, 25 bp, Artificial
  probe
  misc_feature (1)..(25): SEQ ID NO: 6842; WAN024CV9_at; Start 19; Stop 43
cgaatcctactaagaaaatcagaag

SEQ ID NO: 134676 - DNA, 25 bp, Artificial
  probe
  misc_feature (1)..(25): SEQ ID NO: 6842; WAN024CV9_at; Start 186; Stop 210
tcgaataatccataaaagaatcaca

SEQ ID NO: 134677 - DNA, 25 bp, Artificial
  probe
  misc_feature (1)..(25): SEQ ID NO: 6842; WAN024CV9_at; Start 4; Stop 28
gatatatcgcaacggcgaatcctac

SEQ ID NO: 134678 - DNA, 25 bp, Artificial
  probe
  misc_feature (1)..(25): SEQ ID NO: 6842; WAN024CV9_at; Start 173; Stop 197
tcttgcgcaagcgtcgaataatcca

SEQ ID NO: 134679 - DNA, 25 bp, Artificial
  probe
  misc_feature (1)..(25): SEQ ID NO: 6842; WAN024CV9_at; Start 84; Stop 108
cgtgaacgtctactgttgtccatcc

SEQ ID NO: 134680 - DNA, 25 bp, Artificial
  probe
  misc_feature (1)..(25): SEQ ID NO: 6842; WAN024CV9_at; Start 43; Stop 67
gaaggatcagcggatgtttcttctt

SEQ ID NO: 134681 - DNA, 25 bp, Artificial
  probe
  misc_feature (1)..(25): SEQ ID NO: 6842; WAN024CV9_at; Start 46; Stop 70
ggatcagcggatgtttcttcttttt

SEQ ID NO: 134682 - DNA, 25 bp, Artificial
  probe
  misc_feature (1)..(25): SEQ ID NO: 6842; WAN024CV9_at; Start 16; Stop 40
cggcgaatcctactaagaaaatcag

SEQ ID NO: 134683 - DNA, 25 bp, Artificial
  probe
  misc_feature (1)..(25): SEQ ID NO: 6842; WAN024CV9_at; Start 157; Stop 181
tccggttgttttttcttcttgcgca

SEQ ID NO: 134684 - DNA, 25 bp, Artificial
  probe
  misc_feature (1)..(25): SEQ ID NO: 6842; WAN024CV9_at; Start 138; Stop 162
cagcgccttcaaagccttttccggt

SEQ ID NO: 134685 - DNA, 25 bp, Artificial
  probe
  misc_feature (1)..(25): SEQ ID NO: 6842; WAN024CV9_at; Start 176; Stop 200
tgcgcaagcgtcgaataatccataa

SEQ ID NO: 134686 - DNA, 25 bp, Artificial
  probe
  misc_feature (1)..(25): SEQ ID NO: 6842; WAN024CV9_at; Start 38; Stop 62
cagaagaaggatcagcggatgtttc

SEQ ID NO: 134687 - DNA, 25 bp, Artificial
  probe
  misc_feature (1)..(25): SEQ ID NO: 6842; WAN024CV9_at; Start 203; Stop 227
gaatcacaatcaaaccaactgccac

SEQ ID NO: 134688 - DNA, 25 bp, Artificial
  probe
  misc_feature (1)..(25): SEQ ID NO: 6842; WAN024CV9_at; Start 183; Stop 207
gcgtcgaataatccataaaagaatc

SEQ ID NO: 134689 - DNA, 25 bp, Artificial
  probe
  misc_feature (1)..(25): SEQ ID NO: 6842; WAN024CV9_at; Start 88; Stop 112
aacgtctactgttgtccatcctcca

SEQ ID NO: 134690 - DNA, 25 bp, Artificial
  probe
  misc_feature (1)..(25): SEQ ID NO: 6842; WAN024CV9_at; Start 207; Stop 231
cacaatcaaaccaactgccacataa

SEQ ID NO: 134691 - DNA, 25 bp, Artificial
  probe
  misc_feature (1)..(25): SEQ ID NO: 6842; WAN024CV9_at; Start 32; Stop 56
gaaaatcagaagaaggatcagcgga

SEQ ID NO: 134692 - DNA, 25 bp, Artificial
  probe
  misc_feature (1)..(25): SEQ ID NO: 6842; WAN024CV9_at; Start 132; Stop 156
tgctttcagcgccttcaaagccttt

SEQ ID NO: 134693 - DNA, 25 bp, Artificial
  probe
  misc_feature (1)..(25): SEQ ID NO: 6842; WAN024CV9_at; Start 168; Stop 192
tttcttcttgcgcaagcgtcgaata

SEQ ID NO: 134694 - DNA, 25 bp, Artificial
  probe
  misc_feature (1)..(25): SEQ ID NO: 6842; WAN024CV9_at; Start 80; Stop 104
ttttcgtgaacgtctactgttgtcc

SEQ ID NO: 134695 - DNA, 25 bp, Artificial
  probe
  misc_feature (1)..(25): SEQ ID NO: 6842; WAN024CV9_at; Start 52; Stop 76
gcggatgtttcttcttttttgtgcc

SEQ ID NO: 134696 - DNA, 25 bp, Artificial
  probe
  misc_feature (1)..(25): SEQ ID NO: 6842; WAN024CV9_at; Start 97; Stop 121
tgttgtccatcctccaccttcactt

SEQ ID NO: 134697 - DNA, 25 bp, Artificial
  probe
  misc_feature (1)..(25): SEQ ID NO: 5877; WAN024CVA_at; Start 23; Stop 47
catccctttatcttcaaactcatca

SEQ ID NO: 134698 - DNA, 25 bp, Artificial
  probe
  misc_feature (1)..(25): SEQ ID NO: 5877; WAN024CVA_at; Start 78; Stop 102
tctgctaagagaaacgagaaaatct

SEQ ID NO: 134699 - DNA, 25 bp, Artificial
  probe
  misc_feature (1)..(25): SEQ ID NO: 5877; WAN024CVA_at; Start 53; Stop 77
tcgcttttcctaacagacaatccta

SEQ ID NO: 134700 - DNA, 25 bp, Artificial
  probe
  misc_feature (1)..(25): SEQ ID NO: 5877; WAN024CVA_at; Start 11; Stop 35
catttttatcagcatccctttatct

SEQ ID NO: 134701 - DNA, 25 bp, Artificial
  probe
  misc_feature (1)..(25): SEQ ID NO: 5877; WAN024CVA_at; Start 46; Stop 70
cattttatcgcttttcctaacagac

SEQ ID NO: 134702 - DNA, 25 bp, Artificial
  probe
  misc_feature (1)..(25): SEQ ID NO: 5877; WAN024CVA_at; Start 64; Stop 88
aacagacaatcctatctgctaagag

SEQ ID NO: 134703 - DNA, 25 bp, Artificial
  probe
  misc_feature (1)..(25): SEQ ID NO: 5877; WAN024CVA_at; Start 79; Stop 103
ctgctaagagaaacgagaaaatctc

SEQ ID NO: 134704 - DNA, 25 bp, Artificial
  probe
  misc_feature (1)..(25): SEQ ID NO: 5877; WAN024CVA_at; Start 3; Stop 27
gtttttaccatttttatcagcatcc

SEQ ID NO: 134705 - DNA, 25 bp, Artificial
  probe
  misc_feature (1)..(25): SEQ ID NO: 5877; WAN024CVA_at; Start 8; Stop 32
taccatttttatcagcatcccttta

SEQ ID NO: 134706 - DNA, 25 bp, Artificial
  probe
  misc_feature (1)..(25): SEQ ID NO: 5877; WAN024CVA_at; Start 17; Stop 41
tatcagcatccctttatcttcaaac

SEQ ID NO: 134707 - DNA, 25 bp, Artificial
  probe
  misc_feature (1)..(25): SEQ ID NO: 5877; WAN024CVA_at; Start 102; Stop 126
tcatttctttctgattcaccatcca

SEQ ID NO: 134708 - DNA, 25 bp, Artificial
  probe
  misc_feature (1)..(25): SEQ ID NO: 5877; WAN024CVA_at; Start 66; Stop 90
cagacaatcctatctgctaagagaa

SEQ ID NO: 134709 - DNA, 25 bp, Artificial
  probe
  misc_feature (1)..(25): SEQ ID NO: 5877; WAN024CVA_at; Start 86; Stop 110
gagaaacgagaaaatctcatttctt

SEQ ID NO: 134710 - DNA, 25 bp, Artificial
  probe
  misc_feature (1)..(25): SEQ ID NO: 5877; WAN024CVA_at; Start 75; Stop 99
ctatctgctaagagaaacgagaaaa

SEQ ID NO: 134711 - DNA, 25 bp, Artificial
  probe
  misc_feature (1)..(25): SEQ ID NO: 5877; WAN024CVA_at; Start 31; Stop 55
tatcttcaaactcatcattttatcg

SEQ ID NO: 134712 - DNA, 25 bp, Artificial
  probe
  misc_feature (1)..(25): SEQ ID NO: 5877; WAN024CVA_at; Start 68; Stop 92
gacaatcctatctgctaagagaaac

SEQ ID NO: 134713 - DNA, 25 bp, Artificial
  probe
  misc_feature (1)..(25): SEQ ID NO: 5877; WAN024CVA_at; Start 74; Stop 98
cctatctgctaagagaaacgagaaa

SEQ ID NO: 134714 - DNA, 25 bp, Artificial
  probe
  misc_feature (1)..(25): SEQ ID NO: 5877; WAN024CVA_at; Start 90; Stop 114
aacgagaaaatctcatttctttctg

SEQ ID NO: 134715 - DNA, 25 bp, Artificial
  probe
  misc_feature (1)..(25): SEQ ID NO: 5877; WAN024CVA_at; Start 58; Stop 82
tttcctaacagacaatcctatctgc

SEQ ID NO: 134716 - DNA, 25 bp, Artificial
  probe
  misc_feature (1)..(25): SEQ ID NO: 5877; WAN024CVA_at; Start 107; Stop 131
tctttctgattcaccatccatttta

SEQ ID NO: 134717 - DNA, 25 bp, Artificial
  probe
  misc_feature (1)..(25): SEQ ID NO: 5877; WAN024CVA_at; Start 51; Stop 75
tatcgcttttcctaacagacaatcc

SEQ ID NO: 134718 - DNA, 25 bp, Artificial
  probe
  misc_feature (1)..(25): SEQ ID NO: 5877; WAN024CVA_at; Start 5; Stop 29
ttttaccatttttatcagcatccct

SEQ ID NO: 134719 - DNA, 25 bp, Artificial
  probe
  misc_feature (1)..(25): SEQ ID NO: 5877; WAN024CVA_at; Start 73; Stop 97
tcctatctgctaagagaaacgagaa

SEQ ID NO: 134720 - DNA, 25 bp, Artificial
  probe
  misc_feature (1)..(25): SEQ ID NO: 5877; WAN024CVA_at; Start 83; Stop 107
taagagaaacgagaaaatctcattt

SEQ ID NO: 134721 - DNA, 25 bp, Artificial
  probe
  misc_feature (1)..(25): SEQ ID NO: 5877; WAN024CVA_at; Start 33; Stop 57
tcttcaaactcatcattttatcgct

SEQ ID NO: 134722 - DNA, 25 bp, Artificial
  probe
  misc_feature (1)..(25): SEQ ID NO: 5877; WAN024CVA_at; Start 98; Stop 122
aatctcatttctttctgattcacca

SEQ ID NO: 134723 - DNA, 25 bp, Artificial
  probe
  misc_feature (1)..(25): SEQ ID NO: 5877; WAN024CVA_at; Start 48; Stop 72
ttttatcgcttttcctaacagacaa

SEQ ID NO: 134724 - DNA, 25 bp, Artificial
  probe
  misc_feature (1)..(25): SEQ ID NO: 5877; WAN024CVA_at; Start 60; Stop 84
tcctaacagacaatcctatctgcta

SEQ ID NO: 134725 - DNA, 25 bp, Artificial
  probe
  misc_feature (1)..(25): SEQ ID NO: 5877; WAN024CVA_at; Start 71; Stop 95
aatcctatctgctaagagaaacgag

SEQ ID NO: 134726 - DNA, 25 bp, Artificial
  probe
  misc_feature (1)..(25): SEQ ID NO: 5877; WAN024CVA_at; Start 95; Stop 119
gaaaatctcatttctttctgattca

SEQ ID NO: 134727 - DNA, 25 bp, Artificial
  probe
  misc_feature (1)..(25): SEQ ID NO: 5877; WAN024CVA_at; Start 55; Stop 79
gcttttcctaacagacaatcctatc

SEQ ID NO: 134728 - DNA, 25 bp, Artificial
  probe
  misc_feature (1)..(25): SEQ ID NO: 5877; WAN024CVA_at; Start 81; Stop 105
gctaagagaaacgagaaaatctcat

SEQ ID NO: 134729 - DNA, 25 bp, Artificial
  probe
  misc_feature (1)..(25): SEQ ID NO: 5877; WAN024CVA_at; Start 20; Stop 44
cagcatccctttatcttcaaactca

SEQ ID NO: 134730 - DNA, 25 bp, Artificial
  probe
  misc_feature (1)..(25): SEQ ID NO: 5877; WAN024CVA_at; Start 70; Stop 94
caatcctatctgctaagagaaacga

SEQ ID NO: 134731 - DNA, 25 bp, Artificial
  probe
  misc_feature (1)..(25): SEQ ID NO: 2093; WAN024CVB_at; Start 634; Stop 658
tatgtgaccttgctgacttgtacgc

SEQ ID NO: 134732 - DNA, 25 bp, Artificial
  probe
  misc_feature (1)..(25): SEQ ID NO: 2093; WAN024CVB_at; Start 189; Stop 213
tgaacgaatgaaattggcacaagcc

SEQ ID NO: 134733 - DNA, 25 bp, Artificial
  probe
  misc_feature (1)..(25): SEQ ID NO: 2093; WAN024CVB_at; Start 444; Stop 468
gacccatgcggtgattacggcacat

SEQ ID NO: 134734 - DNA, 25 bp, Artificial
  probe
  misc_feature (1)..(25): SEQ ID NO: 2093; WAN024CVB_at; Start 847; Stop 871
ccggaaaaggctttgaaggcgctga

SEQ ID NO: 134735 - DNA, 25 bp, Artificial
  probe
  misc_feature (1)..(25): SEQ ID NO: 2093; WAN024CVB_at; Start 245; Stop 269
gcgatccttggtcggaagaaatgaa

SEQ ID NO: 134736 - DNA, 25 bp, Artificial
  probe
  misc_feature (1)..(25): SEQ ID NO: 2093; WAN024CVB_at; Start 159; Stop 183
aaaagcaacgttggatgaggctgac

SEQ ID NO: 134737 - DNA, 25 bp, Artificial
  probe
  misc_feature (1)..(25): SEQ ID NO: 2093; WAN024CVB_at; Start 413; Stop 437
agggaacttctctgccgatcggagg

SEQ ID NO: 134738 - DNA, 25 bp, Artificial
  probe
  misc_feature (1)..(25): SEQ ID NO: 2093; WAN024CVB_at; Start 429; Stop 453
gatcggaggcaattcgacccatgcg

SEQ ID NO: 134739 - DNA, 25 bp, Artificial
  probe
  misc_feature (1)..(25): SEQ ID NO: 2093; WAN024CVB_at; Start 271; Stop 295
aaaaaagggcgagcagagtatgcac

SEQ ID NO: 134740 - DNA, 25 bp, Artificial
  probe
  misc_feature (1)..(25): SEQ ID NO: 2093; WAN024CVB_at; Start 329; Stop 353
tggaaatccccgttattgacgtgga

SEQ ID NO: 134741 - DNA, 25 bp, Artificial
  probe
  misc_feature (1)..(25): SEQ ID NO: 2093; WAN024CVB_at; Start 484; Stop 508
gctaagatgtttacggatttgacca

SEQ ID NO: 134742 - DNA, 25 bp, Artificial
  probe
  misc_feature (1)..(25): SEQ ID NO: 2093; WAN024CVB_at; Start 71; Stop 95
ttggaatggcggtaatggcgtatcc

SEQ ID NO: 134743 - DNA, 25 bp, Artificial
  probe
  misc_feature (1)..(25): SEQ ID NO: 2093; WAN024CVB_at; Start 827; Stop 851
tgcgcaagaagaaaaaacaaccgga

SEQ ID NO: 134744 - DNA, 25 bp, Artificial
  probe
  misc_feature (1)..(25): SEQ ID NO: 2093; WAN024CVB_at; Start 735; Stop 759
tattgcagcaaacaaactcagtcat

SEQ ID NO: 134745 - DNA, 25 bp, Artificial
  probe
  misc_feature (1)..(25): SEQ ID NO: 2093; WAN024CVB_at; Start 589; Stop 613
gagccgacgaactttgatgatttat

SEQ ID NO: 134746 - DNA, 25 bp, Artificial
  probe
  misc_feature (1)..(25): SEQ ID NO: 2093; WAN024CVB_at; Start 538; Stop 562
cacaatatcaaggaagtgatggcct

SEQ ID NO: 134747 - DNA, 25 bp, Artificial
  probe
  misc_feature (1)..(25): SEQ ID NO: 2093; WAN024CVB_at; Start 574; Stop 598
caagtaaaggtgattgagccgacga

SEQ ID NO: 134748 - DNA, 25 bp, Artificial
  probe
  misc_feature (1)..(25): SEQ ID NO: 2093; WAN024CVB_at; Start 286; Stop 310
gagtatgcacgtatgttagaaatcc

SEQ ID NO: 134749 - DNA, 25 bp, Artificial
  probe
  misc_feature (1)..(25): SEQ ID NO: 2093; WAN024CVB_at; Start 299; Stop 323
tgttagaaatccatgagcggatggg

SEQ ID NO: 134750 - DNA, 25 bp, Artificial
  probe
  misc_feature (1)..(25): SEQ ID NO: 2093; WAN024CVB_at; Start 809; Stop 833
tatggattattcgacgcttgcgcaa

SEQ ID NO: 134751 - DNA, 25 bp, Artificial
  probe
  misc_feature (1)..(25): SEQ ID NO: 2093; WAN024CVB_at; Start 227; Stop 251
tgaataatgtagtgagtggcgatcc

SEQ ID NO: 134752 - DNA, 25 bp, Artificial
  probe
  misc_feature (1)..(25): SEQ ID NO: 2093; WAN024CVB_at; Start 670; Stop 694
aatacccatcgtctattggttcggg

SEQ ID NO: 134753 - DNA, 25 bp, Artificial
  probe
  misc_feature (1)..(25): SEQ ID NO: 2093; WAN024CVB_at; Start 555; Stop 579
gatggcctatcaagtggatcaagta

SEQ ID NO: 134754 - DNA, 25 bp, Artificial
  probe
  misc_feature (1)..(25): SEQ ID NO: 2093; WAN024CVB_at; Start 763; Stop 787
tatcgctacctgttttatgtggcag

SEQ ID NO: 134755 - DNA, 25 bp, Artificial
  probe
  misc_feature (1)..(25): SEQ ID NO: 2093; WAN024CVB_at; Start 468; Stop 492
tacaggtttgccaacagctaagatg

SEQ ID NO: 134756 - DNA, 25 bp, Artificial
  probe
  misc_feature (1)..(25): SEQ ID NO: 2093; WAN024CVB_at; Start 204; Stop 228
ggcacaagccttcaatgactctttg

SEQ ID NO: 134757 - DNA, 25 bp, Artificial
  probe
  misc_feature (1)..(25): SEQ ID NO: 2093; WAN024CVB_at; Start 607; Stop 631
gatttattgattgtaccaggtcatg

SEQ ID NO: 134758 - DNA, 25 bp, Artificial
  probe
  misc_feature (1)..(25): SEQ ID NO: 2093; WAN024CVB_at; Start 172; Stop 196
gatgaggctgacattgatgaacgaa

SEQ ID NO: 134759 - DNA, 25 bp, Artificial
  probe
  misc_feature (1)..(25): SEQ ID NO: 2093; WAN024CVB_at; Start 868; Stop 892
ctgaaagcagcaaggaaggaagtga

SEQ ID NO: 134760 - DNA, 25 bp, Artificial
  probe
  misc_feature (1)..(25): SEQ ID NO: 2093; WAN024CVB_at; Start 652; Stop 676
tgtacgccatacatgatcaataccc

SEQ ID NO: 134761 - DNA, 25 bp, Artificial
  probe
  misc_feature (1)..(25): SEQ ID NO: 2093; WAN024CVB_at; Start 697; Stop 721
catcggataccgtacgtagcagagg

SEQ ID NO: 134762 - DNA, 25 bp, Artificial
  probe
  misc_feature (1)..(25): SEQ ID NO: 2093; WAN024CVB_at; Start 89; Stop 113
cgtatccgctggtgtctcgcttgta

SEQ ID NO: 134763 - DNA, 25 bp, Artificial
  probe
  misc_feature (1)..(25): SEQ ID NO: 2093; WAN024CVB_at; Start 357; Stop 381
gccggtttatgctggtactgctgaa

SEQ ID NO: 134764 - DNA, 25 bp, Artificial
  probe
  misc_feature (1)..(25): SEQ ID NO: 2093; WAN024CVB_at; Start 399; Stop 423
ggctgggcatctagagggaacttct

SEQ ID NO: 134765 - DNA, 25 bp, Artificial
  probe
  misc_feature (1)..(25): SEQ ID NO: 2249; WAN024CVC_at; Start 760; Stop 784
cgtgggcaattctggttgtggttat

SEQ ID NO: 134766 - DNA, 25 bp, Artificial
  probe
  misc_feature (1)..(25): SEQ ID NO: 2249; WAN024CVC_at; Start 188; Stop 212
cagaacttgaggagcgttggcgctt

SEQ ID NO: 134767 - DNA, 25 bp, Artificial
  probe
  misc_feature (1)..(25): SEQ ID NO: 2249; WAN024CVC_at; Start 247; Stop 271
gaaattcttgatccttttacagagc

SEQ ID NO: 134768 - DNA, 25 bp, Artificial
  probe
  misc_feature (1)..(25): SEQ ID NO: 2249; WAN024CVC_at; Start 326; Stop 350
ggattggctatgtggaaattcctgc

SEQ ID NO: 134769 - DNA, 25 bp, Artificial
  probe
  misc_feature (1)..(25): SEQ ID NO: 2249; WAN024CVC_at; Start 121; Stop 145
tattatcgtattgagtcaaacgagg

SEQ ID NO: 134770 - DNA, 25 bp, Artificial
  probe
  misc_feature (1)..(25): SEQ ID NO: 2249; WAN024CVC_at; Start 233; Stop 257
ccttgaaaccatctgaaattcttga

SEQ ID NO: 134771 - DNA, 25 bp, Artificial
  probe
  misc_feature (1)..(25): SEQ ID NO: 2249; WAN024CVC_at; Start 348; Stop 372
tgcgattgatcaggaaattccgatg

SEQ ID NO: 134772 - DNA, 25 bp, Artificial
  probe
  misc_feature (1)..(25): SEQ ID NO: 2249; WAN024CVC_at; Start 73; Stop 97
ttcttagtaggattcgccgttgcga

SEQ ID NO: 134773 - DNA, 25 bp, Artificial
  probe
  misc_feature (1)..(25): SEQ ID NO: 2249; WAN024CVC_at; Start 160; Stop 184
gatgagacggtttcccagatggata

SEQ ID NO: 134774 - DNA, 25 bp, Artificial
  probe
  misc_feature (1)..(25): SEQ ID NO: 2249; WAN024CVC_at; Start 152; Stop 176
aagagtttgatgagacggtttccca

SEQ ID NO: 134775 - DNA, 25 bp, Artificial
  probe
  misc_feature (1)..(25): SEQ ID NO: 2249; WAN024CVC_at; Start 132; Stop 156
tgagtcaaacgaggttattaaagag

SEQ ID NO: 134776 - DNA, 25 bp, Artificial
  probe
  misc_feature (1)..(25): SEQ ID NO: 2249; WAN024CVC_at; Start 612; Stop 636
tgagcctgtcttgattcaacatggg

SEQ ID NO: 134777 - DNA, 25 bp, Artificial
  probe
  misc_feature (1)..(25): SEQ ID NO: 2249; WAN024CVC_at; Start 45; Stop 69
gaaacatccgctgatccttcttctg

SEQ ID NO: 134778 - DNA, 25 bp, Artificial
  probe
  misc_feature (1)..(25): SEQ ID NO: 2249; WAN024CVC_at; Start 362; Stop 386
aaattccgatgtatgtcggaacgag

SEQ ID NO: 134779 - DNA, 25 bp, Artificial
  probe
  misc_feature (1)..(25): SEQ ID NO: 2249; WAN024CVC_at; Start 199; Stop 223
gagcgttggcgcttggctcaagcct

SEQ ID NO: 134780 - DNA, 25 bp, Artificial
  probe
  misc_feature (1)..(25): SEQ ID NO: 2249; WAN024CVC_at; Start 298; Stop 322
tatgccaatatgctaaaggtccatg

SEQ ID NO: 134781 - DNA, 25 bp, Artificial
  probe
  misc_feature (1)..(25): SEQ ID NO: 2249; WAN024CVC_at; Start 213; Stop 237
ggctcaagccttcaatgcgaccttg

SEQ ID NO: 134782 - DNA, 25 bp, Artificial
  probe
  misc_feature (1)..(25): SEQ ID NO: 2249; WAN024CVC_at; Start 675; Stop 699
gattaacagtcatcgtctgttggta

SEQ ID NO: 134783 - DNA, 25 bp, Artificial
  probe
  misc_feature (1)..(25): SEQ ID NO: 2249; WAN024CVC_at; Start 270; Stop 294
gcaagagaaaaagaaaggcgtctca

SEQ ID NO: 134784 - DNA, 25 bp, Artificial
  probe
  misc_feature (1)..(25): SEQ ID NO: 2249; WAN024CVC_at; Start 716; Stop 740
cgtatacggcaccaattgcagagcg

SEQ ID NO: 134785 - DNA, 25 bp, Artificial
  probe
  misc_feature (1)..(25): SEQ ID NO: 2249; WAN024CVC_at; Start 88; Stop 112
gccgttgcgatatatccattggtgt

SEQ ID NO: 134786 - DNA, 25 bp, Artificial
  probe
  misc_feature (1)..(25): SEQ ID NO: 2249; WAN024CVC_at; Start 336; Stop 360
tgtggaaattcctgcgattgatcag

SEQ ID NO: 134787 - DNA, 25 bp, Artificial
  probe
  misc_feature (1)..(25): SEQ ID NO: 2249; WAN024CVC_at; Start 311; Stop 335
taaaggtccatgagcggattggcta

SEQ ID NO: 134788 - DNA, 25 bp, Artificial
  probe
  misc_feature (1)..(25): SEQ ID NO: 2249; WAN024CVC_at; Start 31; Stop 55
ggcacaaaaaagaagaaacatccgc

SEQ ID NO: 134789 - DNA, 25 bp, Artificial
  probe
  misc_feature (1)..(25): SEQ ID NO: 2249; WAN024CVC_at; Start 705; Stop 729
gaagcggattccgtatacggcacca

SEQ ID NO: 134790 - DNA, 25 bp, Artificial
  probe
  misc_feature (1)..(25): SEQ ID NO: 2249; WAN024CVC_at; Start 2; Stop 26
tggacaacagtagacgttcacgaaa

SEQ ID NO: 134791 - DNA, 25 bp, Artificial
  probe
  misc_feature (1)..(25): SEQ ID NO: 2249; WAN024CVC_at; Start 507; Stop 531
tcaattggataagatgaaaaaaggg

SEQ ID NO: 134792 - DNA, 25 bp, Artificial
  probe
  misc_feature (1)..(25): SEQ ID NO: 2249; WAN024CVC_at; Start 685; Stop 709
catcgtctgttggtacgtgggaagc

SEQ ID NO: 134793 - DNA, 25 bp, Artificial
  probe
  misc_feature (1)..(25): SEQ ID NO: 2249; WAN024CVC_at; Start 282; Stop 306
gaaaggcgtctcagaatatgccaat

SEQ ID NO: 134794 - DNA, 25 bp, Artificial
  probe
  misc_feature (1)..(25): SEQ ID NO: 2249; WAN024CVC_at; Start 173; Stop 197
cccagatggataaggcagaacttga

SEQ ID NO: 134795 - DNA, 25 bp, Artificial
  probe
  misc_feature (1)..(25): SEQ ID NO: 2249; WAN024CVC_at; Start 559; Stop 583
caggtgttggcctaccaagtggatc

SEQ ID NO: 134796 - DNA, 25 bp, Artificial
  probe
  misc_feature (1)..(25): SEQ ID NO: 2249; WAN024CVC_at; Start 103; Stop 127
ccattggtgtctcgttattattatc

SEQ ID NO: 134797 - DNA, 25 bp, Artificial
  probe
  misc_feature (1)..(25): SEQ ID NO: 2249; WAN024CVC_at; Start 661; Stop 685
tgtacaccgtatatgattaacagtc

SEQ ID NO: 134798 - DNA, 25 bp, Artificial
  probe
  misc_feature (1)..(25): SEQ ID NO: 2249; WAN024CVC_at; Start 255; Stop 279
tgatccttttacagagcaagagaaa

SEQ ID NO: 134799 - DNA, 25 bp, Artificial
  probe
  misc_feature (1)..(25): SEQ ID NO: 7665; WAN024CVD_at; Start 27; Stop 51
taaccaaatcgaacgttgcttcagc

SEQ ID NO: 134800 - DNA, 25 bp, Artificial
  probe
  misc_feature (1)..(25): SEQ ID NO: 7665; WAN024CVD_at; Start 6; Stop 30
caactttaccagtctgagcattaac

SEQ ID NO: 134801 - DNA, 25 bp, Artificial
  probe
  misc_feature (1)..(25): SEQ ID NO: 7665; WAN024CVD_at; Start 255; Stop 279
cagcgttttggtcattcactttagc

SEQ ID NO: 134802 - DNA, 25 bp, Artificial
  probe
  misc_feature (1)..(25): SEQ ID NO: 7665; WAN024CVD_at; Start 58; Stop 82
cggaattggtgcacctgtagcatca

SEQ ID NO: 134803 - DNA, 25 bp, Artificial
  probe
  misc_feature (1)..(25): SEQ ID NO: 7665; WAN024CVD_at; Start 186; Stop 210
tagattctggtacttctacaattgc

SEQ ID NO: 134804 - DNA, 25 bp, Artificial
  probe
  misc_feature (1)..(25): SEQ ID NO: 7665; WAN024CVD_at; Start 194; Stop 218
ggtacttctacaattgctttgtcat

SEQ ID NO: 134805 - DNA, 25 bp, Artificial
  probe
  misc_feature (1)..(25): SEQ ID NO: 7665; WAN024CVD_at; Start 54; Stop 78
cagccggaattggtgcacctgtagc

SEQ ID NO: 134806 - DNA, 25 bp, Artificial
  probe
  misc_feature (1)..(25): SEQ ID NO: 7665; WAN024CVD_at; Start 75; Stop 99
tagcatcaacccatgtcttggtcaa

SEQ ID NO: 134807 - DNA, 25 bp, Artificial
  probe
  misc_feature (1)..(25): SEQ ID NO: 7665; WAN024CVD_at; Start 12; Stop 36
taccagtctgagcattaaccaaatc

SEQ ID NO: 134808 - DNA, 25 bp, Artificial
  probe
  misc_feature (1)..(25): SEQ ID NO: 7665; WAN024CVD_at; Start 244; Stop 268
cacagttttttcagcgttttggtca

SEQ ID NO: 134809 - DNA, 25 bp, Artificial
  probe
  misc_feature (1)..(25): SEQ ID NO: 7665; WAN024CVD_at; Start 180; Stop 204
catcattagattctggtacttctac

SEQ ID NO: 134810 - DNA, 25 bp, Artificial
  probe
  misc_feature (1)..(25): SEQ ID NO: 7665; WAN024CVD_at; Start 44; Stop 68
gcttcagctccagccggaattggtg

SEQ ID NO: 134811 - DNA, 25 bp, Artificial
  probe
  misc_feature (1)..(25): SEQ ID NO: 7665; WAN024CVD_at; Start 50; Stop 74
gctccagccggaattggtgcacctg

SEQ ID NO: 134812 - DNA, 25 bp, Artificial
  probe
  misc_feature (1)..(25): SEQ ID NO: 7665; WAN024CVD_at; Start 145; Stop 169
cccgtgatctggattattaccatag

SEQ ID NO: 134813 - DNA, 25 bp, Artificial
  probe
  misc_feature (1)..(25): SEQ ID NO: 7665; WAN024CVD_at; Start 123; Stop 147
gcttattcggctttggagtattccc

SEQ ID NO: 134814 - DNA, 25 bp, Artificial
  probe
  misc_feature (1)..(25): SEQ ID NO: 7665; WAN024CVD_at; Start 117; Stop 141
catttggcttattcggctttggagt

SEQ ID NO: 134815 - DNA, 25 bp, Artificial
  probe
  misc_feature (1)..(25): SEQ ID NO: 7665; WAN024CVD_at; Start 220; Stop 244
caatgttgccgaataagtgattttc

SEQ ID NO: 134816 - DNA, 25 bp, Artificial
  probe
  misc_feature (1)..(25): SEQ ID NO: 7665; WAN024CVD_at; Start 32; Stop 56
aaatcgaacgttgcttcagctccag

SEQ ID NO: 134817 - DNA, 25 bp, Artificial
  probe
  misc_feature (1)..(25): SEQ ID NO: 7665; WAN024CVD_at; Start 88; Stop 112
tgtcttggtcaatgtcaaatcgccg

SEQ ID NO: 134818 - DNA, 25 bp, Artificial
  probe
  misc_feature (1)..(25): SEQ ID NO: 7665; WAN024CVD_at; Start 81; Stop 105
caacccatgtcttggtcaatgtcaa

SEQ ID NO: 134819 - DNA, 25 bp, Artificial
  probe
  misc_feature (1)..(25): SEQ ID NO: 7665; WAN024CVD_at; Start 94; Stop 118
ggtcaatgtcaaatcgccgttttca

SEQ ID NO: 134820 - DNA, 25 bp, Artificial
  probe
  misc_feature (1)..(25): SEQ ID NO: 7665; WAN024CVD_at; Start 65; Stop 89
ggtgcacctgtagcatcaacccatg

SEQ ID NO: 134821 - DNA, 25 bp, Artificial
  probe
  misc_feature (1)..(25): SEQ ID NO: 7665; WAN024CVD_at; Start 21; Stop 45
gagcattaaccaaatcgaacgttgc

SEQ ID NO: 134822 - DNA, 25 bp, Artificial
  probe
  misc_feature (1)..(25): SEQ ID NO: 7665; WAN024CVD_at; Start 71; Stop 95
cctgtagcatcaacccatgtcttgg

SEQ ID NO: 134823 - DNA, 25 bp, Artificial
  probe
  misc_feature (1)..(25): SEQ ID NO: 7665; WAN024CVD_at; Start 208; Stop 232
tgctttgtcattcaatgttgccgaa

SEQ ID NO: 134824 - DNA, 25 bp, Artificial
  probe
  misc_feature (1)..(25): SEQ ID NO: 7665; WAN024CVD_at; Start 258; Stop 282
cgttttggtcattcactttagctaa

SEQ ID NO: 134825 - DNA, 25 bp, Artificial
  probe
  misc_feature (1)..(25): SEQ ID NO: 7665; WAN024CVD_at; Start 126; Stop 150
tattcggctttggagtattcccgtg

SEQ ID NO: 134826 - DNA, 25 bp, Artificial
  probe
  misc_feature (1)..(25): SEQ ID NO: 7665; WAN024CVD_at; Start 40; Stop 64
cgttgcttcagctccagccggaatt

SEQ ID NO: 134827 - DNA, 25 bp, Artificial
  probe
  misc_feature (1)..(25): SEQ ID NO: 7665; WAN024CVD_at; Start 133; Stop 157
ctttggagtattcccgtgatctgga

SEQ ID NO: 134828 - DNA, 25 bp, Artificial
  probe
  misc_feature (1)..(25): SEQ ID NO: 7665; WAN024CVD_at; Start 152; Stop 176
tctggattattaccatagttaaatg

SEQ ID NO: 134829 - DNA, 25 bp, Artificial
  probe
  misc_feature (1)..(25): SEQ ID NO: 7665; WAN024CVD_at; Start 164; Stop 188
ccatagttaaatgttacatcattag

SEQ ID NO: 134830 - DNA, 25 bp, Artificial
  probe
  misc_feature (1)..(25): SEQ ID NO: 7665; WAN024CVD_at; Start 18; Stop 42
tctgagcattaaccaaatcgaacgt

SEQ ID NO: 134831 - DNA, 25 bp, Artificial
  probe
  misc_feature (1)..(25): SEQ ID NO: 7665; WAN024CVD_at; Start 103; Stop 127
caaatcgccgttttcatttggctta

SEQ ID NO: 134832 - DNA, 25 bp, Artificial
  probe
  misc_feature (1)..(25): SEQ ID NO: 7665; WAN024CVD_at; Start 235; Stop 259
agtgattttcacagttttttcagcg

SEQ ID NO: 134833 - DNA, 25 bp, Artificial
  probe
  misc_feature (1)..(25): SEQ ID NO: 6408; WAN024CVE_at; Start 524; Stop 548
cagtaattgatgcacatgttttccc

SEQ ID NO: 134834 - DNA, 25 bp, Artificial
  probe
  misc_feature (1)..(25): SEQ ID NO: 6408; WAN024CVE_at; Start 1771; Stop 1795
gatgttcaaaagaatgacgctacaa

SEQ ID NO: 134835 - DNA, 25 bp, Artificial
  probe
  misc_feature (1)..(25): SEQ ID NO: 6408; WAN024CVE_at; Start 1522; Stop 1546
gatcaagcacagcaagaatacaatg

SEQ ID NO: 134836 - DNA, 25 bp, Artificial
  probe
  misc_feature (1)..(25): SEQ ID NO: 6408; WAN024CVE_at; Start 1500; Stop 1524
gcaagccgctcaagctctagtagat

SEQ ID NO: 134837 - DNA, 25 bp, Artificial
  probe
  misc_feature (1)..(25): SEQ ID NO: 6408; WAN024CVE_at; Start 1680; Stop 1704
taaagctccagaaggttttgcgaaa

SEQ ID NO: 134838 - DNA, 25 bp, Artificial
  probe
  misc_feature (1)..(25): SEQ ID NO: 6408; WAN024CVE_at; Start 1336; Stop 1360
gatactcgtctagaaaatgcgcagt

SEQ ID NO: 134839 - DNA, 25 bp, Artificial
  probe
  misc_feature (1)..(25): SEQ ID NO: 6408; WAN024CVE_at; Start 414; Stop 438
tcgtgaggatagaacaaagactacc

SEQ ID NO: 134840 - DNA, 25 bp, Artificial
  probe
  misc_feature (1)..(25): SEQ ID NO: 6408; WAN024CVE_at; Start 469; Stop 493
ggttcaaaagccgtacctgctcttg

SEQ ID NO: 134841 - DNA, 25 bp, Artificial
  probe
  misc_feature (1)..(25): SEQ ID NO: 6408; WAN024CVE_at; Start 1093; Stop 1117
gagaaagtcggtgctcctgtagaac

SEQ ID NO: 134842 - DNA, 25 bp, Artificial
  probe
  misc_feature (1)..(25): SEQ ID NO: 6408; WAN024CVE_at; Start 93; Stop 117
caatgttagtacagcaccagatgct

SEQ ID NO: 134843 - DNA, 25 bp, Artificial
  probe
  misc_feature (1)..(25): SEQ ID NO: 6408; WAN024CVE_at; Start 1355; Stop 1379
cgcagttcgttgttaaaaaagcaga

SEQ ID NO: 134844 - DNA, 25 bp, Artificial
  probe
  misc_feature (1)..(25): SEQ ID NO: 6408; WAN024CVE_at; Start 381; Stop 405
tgaaaccagtactcttaaaggtgtg

SEQ ID NO: 134845 - DNA, 25 bp, Artificial
  probe
  misc_feature (1)..(25): SEQ ID NO: 6408; WAN024CVE_at; Start 1027; Stop 1051
tgggacagtcaacctgctcctgagg

SEQ ID NO: 134846 - DNA, 25 bp, Artificial
  probe
  misc_feature (1)..(25): SEQ ID NO: 6408; WAN024CVE_at; Start 1484; Stop 1508
caaatgctgcagataagcaagccgc

SEQ ID NO: 134847 - DNA, 25 bp, Artificial
  probe
  misc_feature (1)..(25): SEQ ID NO: 6408; WAN024CVE_at; Start 1466; Stop 1490
cagcggtagcagcttacacaaatgc

SEQ ID NO: 134848 - DNA, 25 bp, Artificial
  probe
  misc_feature (1)..(25): SEQ ID NO: 6408; WAN024CVE_at; Start 1071; Stop 1095
acttgtaaatgccaagactggtgag

SEQ ID NO: 134849 - DNA, 25 bp, Artificial
  probe
  misc_feature (1)..(25): SEQ ID NO: 6408; WAN024CVE_at; Start 1601; Stop 1625
caatggttcttacttctaatacgga

SEQ ID NO: 134850 - DNA, 25 bp, Artificial
  probe
  misc_feature (1)..(25): SEQ ID NO: 6408; WAN024CVE_at; Start 613; Stop 637
caaaatggtctgtctatcggtacta

SEQ ID NO: 134851 - DNA, 25 bp, Artificial
  probe
  misc_feature (1)..(25): SEQ ID NO: 6408; WAN024CVE_at; Start 957; Stop 981
tcatcaagatcatgggaatactcca

SEQ ID NO: 134852 - DNA, 25 bp, Artificial
  probe
  misc_feature (1)..(25): SEQ ID NO: 6408; WAN024CVE_at; Start 1271; Stop 1295
caatcaatcctgaagaaccacgtgt

SEQ ID NO: 134853 - DNA, 25 bp, Artificial
  probe
  misc_feature (1)..(25): SEQ ID NO: 6408; WAN024CVE_at; Start 1013; Stop 1037
cagtaactaagacatgggacagtca

SEQ ID NO: 134854 - DNA, 25 bp, Artificial
  probe
  misc_feature (1)..(25): SEQ ID NO: 6408; WAN024CVE_at; Start 435; Stop 459
tacctatgttggtcctaatgggcaa

SEQ ID NO: 134855 - DNA, 25 bp, Artificial
  probe
  misc_feature (1)..(25): SEQ ID NO: 6408; WAN024CVE_at; Start 139; Stop 163
cataagttactgctctcagaagatg

SEQ ID NO: 134856 - DNA, 25 bp, Artificial
  probe
  misc_feature (1)..(25): SEQ ID NO: 6408; WAN024CVE_at; Start 1210; Stop 1234
tacacagtagagagcaaagggaagt

SEQ ID NO: 134857 - DNA, 25 bp, Artificial
  probe
  misc_feature (1)..(25): SEQ ID NO: 6408; WAN024CVE_at; Start 1637; Stop 1661
aaatttcaggtcttgctgctggtac

SEQ ID NO: 134858 - DNA, 25 bp, Artificial
  probe
  misc_feature (1)..(25): SEQ ID NO: 6408; WAN024CVE_at; Start 1451; Stop 1475
aacaaaaattggatgcagcggtagc

SEQ ID NO: 134859 - DNA, 25 bp, Artificial
  probe
  misc_feature (1)..(25): SEQ ID NO: 6408; WAN024CVE_at; Start 80; Stop 104
tttttgcggcggacaatgttagtac

SEQ ID NO: 134860 - DNA, 25 bp, Artificial
  probe
  misc_feature (1)..(25): SEQ ID NO: 6408; WAN024CVE_at; Start 230; Stop 254
taactggagttgtagctgaggaaat

SEQ ID NO: 134861 - DNA, 25 bp, Artificial
  probe
  misc_feature (1)..(25): SEQ ID NO: 6408; WAN024CVE_at; Start 902; Stop 926
cacttgctgttgcagacattcctga

SEQ ID NO: 134862 - DNA, 25 bp, Artificial
  probe
  misc_feature (1)..(25): SEQ ID NO: 6408; WAN024CVE_at; Start 338; Stop 362
caacagttcatggtggtttgacaac

SEQ ID NO: 134863 - DNA, 25 bp, Artificial
  probe
  misc_feature (1)..(25): SEQ ID NO: 6408; WAN024CVE_at; Start 1195; Stop 1219
ggatactcagctgaatacacagtag

SEQ ID NO: 134864 - DNA, 25 bp, Artificial
  probe
  misc_feature (1)..(25): SEQ ID NO: 6408; WAN024CVE_at; Start 1422; Stop 1446
tgcagatgaaaaagcagcagcaact

SEQ ID NO: 134865 - DNA, 25 bp, Artificial
  probe
  misc_feature (1)..(25): SEQ ID NO: 6408; WAN024CVE_at; Start 1622; Stop 1646
cggatggtcaattccaaatttcagg

SEQ ID NO: 134866 - DNA, 25 bp, Artificial
  probe
  misc_feature (1)..(25): SEQ ID NO: 6408; WAN024CVE_at; Start 1400; Stop 1424
ttaagtcaactgcacaacaagctgc

SEQ ID NO: 134867 - DNA, 25 bp, Artificial
  probe
  misc_feature (1)..(25): SEQ ID NO: 4218; WAN024CVF_at; Start 93; Stop 117
tcatttcaaaaagaaattcagctgg

SEQ ID NO: 134868 - DNA, 25 bp, Artificial
  probe
  misc_feature (1)..(25): SEQ ID NO: 4218; WAN024CVF_at; Start 324; Stop 348
gcaaccgatgaccatcacgagatgg

SEQ ID NO: 134869 - DNA, 25 bp, Artificial
  probe
  misc_feature (1)..(25): SEQ ID NO: 4218; WAN024CVF_at; Start 71; Stop 95
aaaggctctaccgtttgatctgtca

SEQ ID NO: 134870 - DNA, 25 bp, Artificial
  probe
  misc_feature (1)..(25): SEQ ID NO: 4218; WAN024CVF_at; Start 22; Stop 46
cagcttcacctttgttgtcattgta

SEQ ID NO: 134871 - DNA, 25 bp, Artificial
  probe
  misc_feature (1)..(25): SEQ ID NO: 4218; WAN024CVF_at; Start 433; Stop 457
tacaagagaaaaacacagagccata

SEQ ID NO: 134872 - DNA, 25 bp, Artificial
  probe
  misc_feature (1)..(25): SEQ ID NO: 4218; WAN024CVF_at; Start 2; Stop 26
tggtcttgatccacctttatcagct

SEQ ID NO: 134873 - DNA, 25 bp, Artificial
  probe
  misc_feature (1)..(25): SEQ ID NO: 4218; WAN024CVF_at; Start 248; Stop 272
tcatcccacgaatgcaagtctctta

SEQ ID NO: 134874 - DNA, 25 bp, Artificial
  probe
  misc_feature (1)..(25): SEQ ID NO: 4218; WAN024CVF_at; Start 375; Stop 399
tctccaattgcaagaccaacgtgtg

SEQ ID NO: 134875 - DNA, 25 bp, Artificial
  probe
  misc_feature (1)..(25): SEQ ID NO: 4218; WAN024CVF_at; Start 310; Stop 334
caacttccatacttgcaaccgatga

SEQ ID NO: 134876 - DNA, 25 bp, Artificial
  probe
  misc_feature (1)..(25): SEQ ID NO: 4218; WAN024CVF_at; Start 162; Stop 186
gaccatttggaatatgagatacttc

SEQ ID NO: 134877 - DNA, 25 bp, Artificial
  probe
  misc_feature (1)..(25): SEQ ID NO: 4218; WAN024CVF_at; Start 262; Stop 286
caagtctcttacaatttgcacccga

SEQ ID NO: 134878 - DNA, 25 bp, Artificial
  probe
  misc_feature (1)..(25): SEQ ID NO: 4218; WAN024CVF_at; Start 148; Stop 172
gcgaacatagtaaagaccatttgga

SEQ ID NO: 134879 - DNA, 25 bp, Artificial
  probe
  misc_feature (1)..(25): SEQ ID NO: 4218; WAN024CVF_at; Start 419; Stop 443
gcatgtgcaccccatacaagagaaa

SEQ ID NO: 134880 - DNA, 25 bp, Artificial
  probe
  misc_feature (1)..(25): SEQ ID NO: 4218; WAN024CVF_at; Start 141; Stop 165
taatagagcgaacatagtaaagacc

SEQ ID NO: 134881 - DNA, 25 bp, Artificial
  probe
  misc_feature (1)..(25): SEQ ID NO: 4218; WAN024CVF_at; Start 56; Stop 80
ttcgctacaatgaccaaaggctcta

SEQ ID NO: 134882 - DNA, 25 bp, Artificial
  probe
  misc_feature (1)..(25): SEQ ID NO: 4218; WAN024CVF_at; Start 347; Stop 371
ggcaattgactaaccacctcctgat

SEQ ID NO: 134883 - DNA, 25 bp, Artificial
  probe
  misc_feature (1)..(25): SEQ ID NO: 4218; WAN024CVF_at; Start 129; Stop 153
catccgtctggataatagagcgaac

SEQ ID NO: 134884 - DNA, 25 bp, Artificial
  probe
  misc_feature (1)..(25): SEQ ID NO: 4218; WAN024CVF_at; Start 107; Stop 131
aattcagctggataagaaaccgcat

SEQ ID NO: 134885 - DNA, 25 bp, Artificial
  probe
  misc_feature (1)..(25): SEQ ID NO: 4218; WAN024CVF_at; Start 404; Stop 428
tcttgcgcttggactgcatgtgcac

SEQ ID NO: 134886 - DNA, 25 bp, Artificial
  probe
  misc_feature (1)..(25): SEQ ID NO: 4218; WAN024CVF_at; Start 117; Stop 141
gataagaaaccgcatccgtctggat

SEQ ID NO: 134887 - DNA, 25 bp, Artificial
  probe
  misc_feature (1)..(25): SEQ ID NO: 4218; WAN024CVF_at; Start 293; Stop 317
taggaatacgaatcatccaacttcc

SEQ ID NO: 134888 - DNA, 25 bp, Artificial
  probe
  misc_feature (1)..(25): SEQ ID NO: 4218; WAN024CVF_at; Start 185; Stop 209
tcaatctgattctcaaggaaggtca

SEQ ID NO: 134889 - DNA, 25 bp, Artificial
  probe
  misc_feature (1)..(25): SEQ ID NO: 4218; WAN024CVF_at; Start 392; Stop 416
aacgtgtgatcttcttgcgcttgga

SEQ ID NO: 134890 - DNA, 25 bp, Artificial
  probe
  misc_feature (1)..(25): SEQ ID NO: 4218; WAN024CVF_at; Start 505; Stop 529
caatggctcctttctctcttactta

SEQ ID NO: 134891 - DNA, 25 bp, Artificial
  probe
  misc_feature (1)..(25): SEQ ID NO: 4218; WAN024CVF_at; Start 490; Stop 514
tttctgcattgtcatcaatggctcc

SEQ ID NO: 134892 - DNA, 25 bp, Artificial
  probe
  misc_feature (1)..(25): SEQ ID NO: 4218; WAN024CVF_at; Start 233; Stop 257
gaagaaagtttattctcatcccacg

SEQ ID NO: 134893 - DNA, 25 bp, Artificial
  probe
  misc_feature (1)..(25): SEQ ID NO: 4218; WAN024CVF_at; Start 531; Stop 555
gcaagttgatcctcatctttgttgt

SEQ ID NO: 134894 - DNA, 25 bp, Artificial
  probe
  misc_feature (1)..(25): SEQ ID NO: 4218; WAN024CVF_at; Start 201; Stop 225
ggaaggtcatctcaaacgaagtctt

SEQ ID NO: 134895 - DNA, 25 bp, Artificial
  probe
  misc_feature (1)..(25): SEQ ID NO: 4218; WAN024CVF_at; Start 463; Stop 487
gaagatacgactaatcattttctgc

SEQ ID NO: 134896 - DNA, 25 bp, Artificial
  probe
  misc_feature (1)..(25): SEQ ID NO: 4218; WAN024CVF_at; Start 448; Stop 472
cagagccataacaaagaagatacga

SEQ ID NO: 134897 - DNA, 25 bp, Artificial
  probe
  misc_feature (1)..(25): SEQ ID NO: 4218; WAN024CVF_at; Start 362; Stop 386
acctcctgatagttctccaattgca

SEQ ID NO: 134898 - DNA, 25 bp, Artificial
  probe
  misc_feature (1)..(25): SEQ ID NO: 4218; WAN024CVF_at; Start 278; Stop 302
tgcacccgatcatcataggaatacg

SEQ ID NO: 134899 - DNA, 25 bp, Artificial
  probe
  misc_feature (1)..(25): SEQ ID NO: 4218; WAN024CVF_at; Start 521; Stop 545
tcttacttaagcaagttgatcctca

SEQ ID NO: 134900 - DNA, 25 bp, Artificial
  probe
  misc_feature (1)..(25): SEQ ID NO: 4218; WAN024CVF_at; Start 339; Stop 363
cacgagatggcaattgactaaccac

SEQ ID NO: 134901 - DNA, 25 bp, Artificial
  probe
  misc_feature (1)..(25): SEQ ID NO: 951; WAN024CVG_at; Start 1044; Stop 1068
caagacatgggttgatgctacaggt

SEQ ID NO: 134902 - DNA, 25 bp, Artificial
  probe
  misc_feature (1)..(25): SEQ ID NO: 951; WAN024CVG_at; Start 1590; Stop 1614
taatgctgctgtgattgctgccaac

SEQ ID NO: 134903 - DNA, 25 bp, Artificial
  probe
  misc_feature (1)..(25): SEQ ID NO: 951; WAN024CVG_at; Start 1611; Stop 1635
caacaatgcatttgaatgggtggca

SEQ ID NO: 134904 - DNA, 25 bp, Artificial
  probe
  misc_feature (1)..(25): SEQ ID NO: 951; WAN024CVG_at; Start 446; Stop 470
cttatgtcggtgaagatggagcaac

SEQ ID NO: 134905 - DNA, 25 bp, Artificial
  probe
  misc_feature (1)..(25): SEQ ID NO: 951; WAN024CVG_at; Start 1690; Stop 1714
gaaattacaggccttcttgcaggta

SEQ ID NO: 134906 - DNA, 25 bp, Artificial
  probe
  misc_feature (1)..(25): SEQ ID NO: 951; WAN024CVG_at; Start 1724; Stop 1748
tagaagaaacaaaacagcctgctgg

SEQ ID NO: 134907 - DNA, 25 bp, Artificial
  probe
  misc_feature (1)..(25): SEQ ID NO: 951; WAN024CVG_at; Start 1267; Stop 1291
gaaattgctgtcaagaactggaaag

SEQ ID NO: 134908 - DNA, 25 bp, Artificial
  probe
  misc_feature (1)..(25): SEQ ID NO: 951; WAN024CVG_at; Start 1563; Stop 1587
gaaagttgacaaagctcaagctgct

SEQ ID NO: 134909 - DNA, 25 bp, Artificial
  probe
  misc_feature (1)..(25): SEQ ID NO: 951; WAN024CVG_at; Start 476; Stop 500
caggttctaaagcagttccaattga

SEQ ID NO: 134910 - DNA, 25 bp, Artificial
  probe
  misc_feature (1)..(25): SEQ ID NO: 951; WAN024CVG_at; Start 1020; Stop 1044
tgaaaacggcgatttgacattgacc

SEQ ID NO: 134911 - DNA, 25 bp, Artificial
  probe
  misc_feature (1)..(25): SEQ ID NO: 951; WAN024CVG_at; Start 373; Stop 397
gaaggagctaaatttaacacggcaa

SEQ ID NO: 134912 - DNA, 25 bp, Artificial
  probe
  misc_feature (1)..(25): SEQ ID NO: 951; WAN024CVG_at; Start 696; Stop 720
taattatgcaacagcaaactggagc

SEQ ID NO: 134913 - DNA, 25 bp, Artificial
  probe
  misc_feature (1)..(25): SEQ ID NO: 951; WAN024CVG_at; Start 970; Stop 994
tatggtaataatccagatcacggga

SEQ ID NO: 134914 - DNA, 25 bp, Artificial
  probe
  misc_feature (1)..(25): SEQ ID NO: 951; WAN024CVG_at; Start 332; Stop 356
gggcaatgccggcaactgcaatgaa

SEQ ID NO: 134915 - DNA, 25 bp, Artificial
  probe
  misc_feature (1)..(25): SEQ ID NO: 951; WAN024CVG_at; Start 87; Stop 111
ggctgggacgacaacaacatctgtt

SEQ ID NO: 134916 - DNA, 25 bp, Artificial
  probe
  misc_feature (1)..(25): SEQ ID NO: 951; WAN024CVG_at; Start 1830; Stop 1854
tgctggttcaggtaaagatgacgct

SEQ ID NO: 134917 - DNA, 25 bp, Artificial
  probe
  misc_feature (1)..(25): SEQ ID NO: 951; WAN024CVG_at; Start 1798; Stop 1822
tattcagcgactggacaaggcattg

SEQ ID NO: 134918 - DNA, 25 bp, Artificial
  probe
  misc_feature (1)..(25): SEQ ID NO: 951; WAN024CVG_at; Start 595; Stop 619
gcaaatccagatacaccacgtgtag

SEQ ID NO: 134919 - DNA, 25 bp, Artificial
  probe
  misc_feature (1)..(25): SEQ ID NO: 951; WAN024CVG_at; Start 512; Stop 536
cattgaacgatgttgtggatgcgca

SEQ ID NO: 134920 - DNA, 25 bp, Artificial
  probe
  misc_feature (1)..(25): SEQ ID NO: 951; WAN024CVG_at; Start 894; Stop 918
gaaaatcacttattcggcaacattg

SEQ ID NO: 134921 - DNA, 25 bp, Artificial
  probe
  misc_feature (1)..(25): SEQ ID NO: 951; WAN024CVG_at; Start 1664; Stop 1688
tagtttctgatgcacaaggtcgctt

SEQ ID NO: 134922 - DNA, 25 bp, Artificial
  probe
  misc_feature (1)..(25): SEQ ID NO: 951; WAN024CVG_at; Start 1243; Stop 1267
tatcaagaaatcactacagctggag

SEQ ID NO: 134923 - DNA, 25 bp, Artificial
  probe
  misc_feature (1)..(25): SEQ ID NO: 951; WAN024CVG_at; Start 189; Stop 213
taataaagtgggtgttctacctgca

SEQ ID NO: 134924 - DNA, 25 bp, Artificial
  probe
  misc_feature (1)..(25): SEQ ID NO: 951; WAN024CVG_at; Start 991; Stop 1015
gggaatactccaaagccgaataagc

SEQ ID NO: 134925 - DNA, 25 bp, Artificial
  probe
  misc_feature (1)..(25): SEQ ID NO: 951; WAN024CVG_at; Start 1102; Stop 1126
gatttggttaatgctcagactggta

SEQ ID NO: 134926 - DNA, 25 bp, Artificial
  probe
  misc_feature (1)..(25): SEQ ID NO: 951; WAN024CVG_at; Start 805; Stop 829
gctctaacagaagtagcaactggtt

SEQ ID NO: 134927 - DNA, 25 bp, Artificial
  probe
  misc_feature (1)..(25): SEQ ID NO: 951; WAN024CVG_at; Start 274; Stop 298
gatgaaaatggccaaactctaggag

SEQ ID NO: 134928 - DNA, 25 bp, Artificial
  probe
  misc_feature (1)..(25): SEQ ID NO: 951; WAN024CVG_at; Start 1750; Stop 1774
tatgcattactaactagccgtcaga

SEQ ID NO: 134929 - DNA, 25 bp, Artificial
  probe
  misc_feature (1)..(25): SEQ ID NO: 951; WAN024CVG_at; Start 390; Stop 414
cacggcaaatttaccagctgctaag

SEQ ID NO: 134930 - DNA, 25 bp, Artificial
  probe
  misc_feature (1)..(25): SEQ ID NO: 951; WAN024CVG_at; Start 859; Stop 883
gctaaagtgaatgaccaaaacgctg

SEQ ID NO: 134931 - DNA, 25 bp, Artificial
  probe
  misc_feature (1)..(25): SEQ ID NO: 951; WAN024CVG_at; Start 1062; Stop 1086
tacaggtgcaccaattccggctgga

SEQ ID NO: 134932 - DNA, 25 bp, Artificial
  probe
  misc_feature (1)..(25): SEQ ID NO: 951; WAN024CVG_at; Start 710; Stop 734
caaactggagcgatagaatgactga

SEQ ID NO: 134933 - DNA, 25 bp, Artificial
  probe
  misc_feature (1)..(25): SEQ ID NO: 951; WAN024CVG_at; Start 1077; Stop 1101
tccggctggagctgaagcaacgttc

SEQ ID NO: 134934 - DNA, 25 bp, Artificial
  probe
  misc_feature (1)..(25): SEQ ID NO: 951; WAN024CVG_at; Start 629; Stop 653
cacctgtgaaccaccaagttggaga

SEQ ID NO: 134935 - DNA, 25 bp, Artificial
  probe
  misc_feature (1)..(25): SEQ ID NO: 5214; WAN024CVH_at; Start 936; Stop 960
gaaagatggtcgtttccgagtggaa

SEQ ID NO: 134936 - DNA, 25 bp, Artificial
  probe
  misc_feature (1)..(25): SEQ ID NO: 5214; WAN024CVH_at; Start 109; Stop 133
cacacgttggtcttgcaattggaga

SEQ ID NO: 134937 - DNA, 25 bp, Artificial
  probe
  misc_feature (1)..(25): SEQ ID NO: 5214; WAN024CVH_at; Start 206; Stop 230
cgtattcctatgatgatcgggtgca

SEQ ID NO: 134938 - DNA, 25 bp, Artificial
  probe
  misc_feature (1)..(25): SEQ ID NO: 5214; WAN024CVH_at; Start 299; Stop 323
tgaccttccttgagaatcagattga

SEQ ID NO: 134939 - DNA, 25 bp, Artificial
  probe
  misc_feature (1)..(25): SEQ ID NO: 5214; WAN024CVH_at; Start 977; Stop 1001
catactatttatgggagctccaagc

SEQ ID NO: 134940 - DNA, 25 bp, Artificial
  probe
  misc_feature (1)..(25): SEQ ID NO: 5214; WAN024CVH_at; Start 777; Stop 801
tgtcaatcagaaattaccacgtggc

SEQ ID NO: 134941 - DNA, 25 bp, Artificial
  probe
  misc_feature (1)..(25): SEQ ID NO: 5214; WAN024CVH_at; Start 1092; Stop 1116
caagcgaccacggattgatgtgcca

SEQ ID NO: 134942 - DNA, 25 bp, Artificial
  probe
  misc_feature (1)..(25): SEQ ID NO: 5214; WAN024CVH_at; Start 375; Stop 399
ggatgcggtttcttatccagctgaa

SEQ ID NO: 134943 - DNA, 25 bp, Artificial
  probe
  misc_feature (1)..(25): SEQ ID NO: 5214; WAN024CVH_at; Start 991; Stop 1015
gagctccaagctccaactggttatg

SEQ ID NO: 134944 - DNA, 25 bp, Artificial
  probe
  misc_feature (1)..(25): SEQ ID NO: 5214; WAN024CVH_at; Start 79; Stop 103
ggtgcacatgcagtccaagcgcaag

SEQ ID NO: 134945 - DNA, 25 bp, Artificial
  probe
  misc_feature (1)..(25): SEQ ID NO: 5214; WAN024CVH_at; Start 283; Stop 307
aagacttcgtttgagatgaccttcc

SEQ ID NO: 134946 - DNA, 25 bp, Artificial
  probe
  misc_feature (1)..(25): SEQ ID NO: 5214; WAN024CVH_at; Start 810; Stop 834
ctttatgaaggtggatggtcggacc

SEQ ID NO: 134947 - DNA, 25 bp, Artificial
  probe
  misc_feature (1)..(25): SEQ ID NO: 5214; WAN024CVH_at; Start 753; Stop 777
tcatcagctggtgacgattacggtt

SEQ ID NO: 134948 - DNA, 25 bp, Artificial
  probe
  misc_feature (1)..(25): SEQ ID NO: 5214; WAN024CVH_at; Start 428; Stop 452
tagagcctttggtcattgtagcgaa

SEQ ID NO: 134949 - DNA, 25 bp, Artificial
  probe
  misc_feature (1)..(25): SEQ ID NO: 5214; WAN024CVH_at; Start 654; Stop 678
tgtgacaaatcttcctcttgggaac

SEQ ID NO: 134950 - DNA, 25 bp, Artificial
  probe
  misc_feature (1)..(25): SEQ ID NO: 5214; WAN024CVH_at; Start 712; Stop 736
tatgctgttacgacgctggatacgg

SEQ ID NO: 134951 - DNA, 25 bp, Artificial
  probe
  misc_feature (1)..(25): SEQ ID NO: 5214; WAN024CVH_at; Start 730; Stop 754
gatacggatgtccagctggtagatc

SEQ ID NO: 134952 - DNA, 25 bp, Artificial
  probe
  misc_feature (1)..(25): SEQ ID NO: 5214; WAN024CVH_at; Start 488; Stop 512
taaaggtggatcaagaccacaatcg

SEQ ID NO: 134953 - DNA, 25 bp, Artificial
  probe
  misc_feature (1)..(25): SEQ ID NO: 5214; WAN024CVH_at; Start 352; Stop 376
tatgttcgctctattatccagacgg

SEQ ID NO: 134954 - DNA, 25 bp, Artificial
  probe
  misc_feature (1)..(25): SEQ ID NO: 5214; WAN024CVH_at; Start 697; Stop 721
gagccactggcaggctatgctgtta

SEQ ID NO: 134955 - DNA, 25 bp, Artificial
  probe
  misc_feature (1)..(25): SEQ ID NO: 5214; WAN024CVH_at; Start 604; Stop 628
tctggtcaagtagggagaactctct

SEQ ID NO: 134956 - DNA, 25 bp, Artificial
  probe
  misc_feature (1)..(25): SEQ ID NO: 5214; WAN024CVH_at; Start 138; Stop 162
tcaggaggtggttagtcaattgcca

SEQ ID NO: 134957 - DNA, 25 bp, Artificial
  probe
  misc_feature (1)..(25): SEQ ID NO: 5214; WAN024CVH_at; Start 462; Stop 486
tacaatgacaacaaaggtgaagctg

SEQ ID NO: 134958 - DNA, 25 bp, Artificial
  probe
  misc_feature (1)..(25): SEQ ID NO: 5214; WAN024CVH_at; Start 574; Stop 598
cccttgattggagaataccgttaca

SEQ ID NO: 134959 - DNA, 25 bp, Artificial
  probe
  misc_feature (1)..(25): SEQ ID NO: 5214; WAN024CVH_at; Start 505; Stop 529
cacaatcgcttggagggtgtcggct

SEQ ID NO: 134960 - DNA, 25 bp, Artificial
  probe
  misc_feature (1)..(25): SEQ ID NO: 5214; WAN024CVH_at; Start 94; Stop 118
caagcgcaagaagatcacacgttgg

SEQ ID NO: 134961 - DNA, 25 bp, Artificial
  probe
  misc_feature (1)..(25): SEQ ID NO: 5214; WAN024CVH_at; Start 1043; Stop 1067
caatcgggaaagatactcgtaagga

SEQ ID NO: 134962 - DNA, 25 bp, Artificial
  probe
  misc_feature (1)..(25): SEQ ID NO: 5214; WAN024CVH_at; Start 874; Stop 898
gaagaaagcggacactatactcctg

SEQ ID NO: 134963 - DNA, 25 bp, Artificial
  probe
  misc_feature (1)..(25): SEQ ID NO: 5214; WAN024CVH_at; Start 679; Stop 703
tatcgtttcaaggaggtggagccac

SEQ ID NO: 134964 - DNA, 25 bp, Artificial
  probe
  misc_feature (1)..(25): SEQ ID NO: 5214; WAN024CVH_at; Start 124; Stop 148
caattggagaactatcaggaggtgg

SEQ ID NO: 134965 - DNA, 25 bp, Artificial
  probe
  misc_feature (1)..(25): SEQ ID NO: 5214; WAN024CVH_at; Start 410; Stop 434
aaatgacagatcaaacggtagagcc

SEQ ID NO: 134966 - DNA, 25 bp, Artificial
  probe
  misc_feature (1)..(25): SEQ ID NO: 5214; WAN024CVH_at; Start 828; Stop 852
tcggaccaatacctctcttcaaggg

SEQ ID NO: 134967 - DNA, 25 bp, Artificial
  probe
  misc_feature (1)..(25): SEQ ID NO: 5214; WAN024CVH_at; Start 236; Stop 260
taagagacttgcattcgtgggatga

SEQ ID NO: 134968 - DNA, 25 bp, Artificial
  probe
  misc_feature (1)..(25): SEQ ID NO: 5214; WAN024CVH_at; Start 161; Stop 185
catctcgtgatggtcatcggttgca

SEQ ID NO: 134969 - DNA, 25 bp, Artificial
  probe
  misc_feature (1)..(25): SEQ ID NO: 7217; WAN024CVI_at; Start 25; Stop 49
accagtaaaatagcaaccatcgtac

SEQ ID NO: 134970 - DNA, 25 bp, Artificial
  probe
  misc_feature (1)..(25): SEQ ID NO: 7217; WAN024CVI_at; Start 16; Stop 40
aaggccagcaccagtaaaatagcaa

SEQ ID NO: 134971 - DNA, 25 bp, Artificial
  probe
  misc_feature (1)..(25): SEQ ID NO: 7217; WAN024CVI_at; Start 15; Stop 39
aaaggccagcaccagtaaaatagca

SEQ ID NO: 134972 - DNA, 25 bp, Artificial
  probe
  misc_feature (1)..(25): SEQ ID NO: 7217; WAN024CVI_at; Start 60; Stop 84
tggcatttcctcaaaaggaaaacga

SEQ ID NO: 134973 - DNA, 25 bp, Artificial
  probe
  misc_feature (1)..(25): SEQ ID NO: 7217; WAN024CVI_at; Start 13; Stop 37
gaaaaggccagcaccagtaaaatag

SEQ ID NO: 134974 - DNA, 25 bp, Artificial
  probe
  misc_feature (1)..(25): SEQ ID NO: 7217; WAN024CVI_at; Start 2; Stop 26
tgaaagaagttgaaaaggccagcac

SEQ ID NO: 134975 - DNA, 25 bp, Artificial
  probe
  misc_feature (1)..(25): SEQ ID NO: 7217; WAN024CVI_at; Start 98; Stop 122
taaacatgaaaagcatcaagagact

SEQ ID NO: 134976 - DNA, 25 bp, Artificial
  probe
  misc_feature (1)..(25): SEQ ID NO: 7217; WAN024CVI_at; Start 18; Stop 42
ggccagcaccagtaaaatagcaacc

SEQ ID NO: 134977 - DNA, 25 bp, Artificial
  probe
  misc_feature (1)..(25): SEQ ID NO: 7217; WAN024CVI_at; Start 12; Stop 36
tgaaaaggccagcaccagtaaaata

SEQ ID NO: 134978 - DNA, 25 bp, Artificial
  probe
  misc_feature (1)..(25): SEQ ID NO: 7217; WAN024CVI_at; Start 87; Stop 111
ggctatatttataaacatgaaaagc

SEQ ID NO: 134979 - DNA, 25 bp, Artificial
  probe
  misc_feature (1)..(25): SEQ ID NO: 7217; WAN024CVI_at; Start 23; Stop 47
gcaccagtaaaatagcaaccatcgt

SEQ ID NO: 134980 - DNA, 25 bp, Artificial
  probe
  misc_feature (1)..(25): SEQ ID NO: 7217; WAN024CVI_at; Start 24; Stop 48
caccagtaaaatagcaaccatcgta

SEQ ID NO: 134981 - DNA, 25 bp, Artificial
  probe
  misc_feature (1)..(25): SEQ ID NO: 7217; WAN024CVI_at; Start 5; Stop 29
aagaagttgaaaaggccagcaccag

SEQ ID NO: 134982 - DNA, 25 bp, Artificial
  probe
  misc_feature (1)..(25): SEQ ID NO: 7217; WAN024CVI_at; Start 3; Stop 27
gaaagaagttgaaaaggccagcacc

SEQ ID NO: 134983 - DNA, 25 bp, Artificial
  probe
  misc_feature (1)..(25): SEQ ID NO: 7217; WAN024CVI_at; Start 19; Stop 43
gccagcaccagtaaaatagcaacca

SEQ ID NO: 134984 - DNA, 25 bp, Artificial
  probe
  misc_feature (1)..(25): SEQ ID NO: 7217; WAN024CVI_at; Start 27; Stop 51
cagtaaaatagcaaccatcgtacta

SEQ ID NO: 134985 - DNA, 25 bp, Artificial
  probe
  misc_feature (1)..(25): SEQ ID NO: 7217; WAN024CVI_at; Start 82; Stop 106
cgaaaggctatatttataaacatga

SEQ ID NO: 134986 - DNA, 25 bp, Artificial
  probe
  misc_feature (1)..(25): SEQ ID NO: 7217; WAN024CVI_at; Start 22; Stop 46
agcaccagtaaaatagcaaccatcg

SEQ ID NO: 134987 - DNA, 25 bp, Artificial
  probe
  misc_feature (1)..(25): SEQ ID NO: 7217; WAN024CVI_at; Start 102; Stop 126
catgaaaagcatcaagagactagaa

SEQ ID NO: 134988 - DNA, 25 bp, Artificial
  probe
  misc_feature (1)..(25): SEQ ID NO: 7217; WAN024CVI_at; Start 14; Stop 38
aaaaggccagcaccagtaaaatagc

SEQ ID NO: 134989 - DNA, 25 bp, Artificial
  probe
  misc_feature (1)..(25): SEQ ID NO: 7217; WAN024CVI_at; Start 29; Stop 53
gtaaaatagcaaccatcgtactaaa

SEQ ID NO: 134990 - DNA, 25 bp, Artificial
  probe
  misc_feature (1)..(25): SEQ ID NO: 7217; WAN024CVI_at; Start 6; Stop 30
agaagttgaaaaggccagcaccagt

SEQ ID NO: 134991 - DNA, 25 bp, Artificial
  probe
  misc_feature (1)..(25): SEQ ID NO: 7217; WAN024CVI_at; Start 100; Stop 124
aacatgaaaagcatcaagagactag

SEQ ID NO: 134992 - DNA, 25 bp, Artificial
  probe
  misc_feature (1)..(25): SEQ ID NO: 7217; WAN024CVI_at; Start 95; Stop 119
ttataaacatgaaaagcatcaagag

SEQ ID NO: 134993 - DNA, 25 bp, Artificial
  probe
  misc_feature (1)..(25): SEQ ID NO: 7217; WAN024CVI_at; Start 105; Stop 129
gaaaagcatcaagagactagaaaaa

SEQ ID NO: 134994 - DNA, 25 bp, Artificial
  probe
  misc_feature (1)..(25): SEQ ID NO: 7217; WAN024CVI_at; Start 9; Stop 33
agttgaaaaggccagcaccagtaaa

SEQ ID NO: 134995 - DNA, 25 bp, Artificial
  probe
  misc_feature (1)..(25): SEQ ID NO: 7217; WAN024CVI_at; Start 10; Stop 34
gttgaaaaggccagcaccagtaaaa

SEQ ID NO: 134996 - DNA, 25 bp, Artificial
  probe
  misc_feature (1)..(25): SEQ ID NO: 7217; WAN024CVI_at; Start 30; Stop 54
taaaatagcaaccatcgtactaaaa

SEQ ID NO: 134997 - DNA, 25 bp, Artificial
  probe
  misc_feature (1)..(25): SEQ ID NO: 7217; WAN024CVI_at; Start 42; Stop 66
catcgtactaaaaaaacttggcatt

SEQ ID NO: 134998 - DNA, 25 bp, Artificial
  probe
  misc_feature (1)..(25): SEQ ID NO: 7217; WAN024CVI_at; Start 104; Stop 128
tgaaaagcatcaagagactagaaaa

SEQ ID NO: 134999 - DNA, 25 bp, Artificial
  probe
  misc_feature (1)..(25): SEQ ID NO: 7217; WAN024CVI_at; Start 4; Stop 28
aaagaagttgaaaaggccagcacca

SEQ ID NO: 135000 - DNA, 25 bp, Artificial
  probe
  misc_feature (1)..(25): SEQ ID NO: 7217; WAN024CVI_at; Start 20; Stop 44
ccagcaccagtaaaatagcaaccat

SEQ ID NO: 135001 - DNA, 25 bp, Artificial
  probe
  misc_feature (1)..(25): SEQ ID NO: 7217; WAN024CVI_at; Start 108; Stop 132
aagcatcaagagactagaaaaaatg

SEQ ID NO: 135002 - DNA, 25 bp, Artificial
  probe
  misc_feature (1)..(25): SEQ ID NO: 7217; WAN024CVI_at; Start 11; Stop 35
ttgaaaaggccagcaccagtaaaat

SEQ ID NO: 135003 - DNA, 25 bp, Artificial
  probe
  misc_feature (1)..(25): SEQ ID NO: 5281; WAN024CVJ_at; Start 213; Stop 237
tatcatttcacccagcagtggtcgt

SEQ ID NO: 135004 - DNA, 25 bp, Artificial
  probe
  misc_feature (1)..(25): SEQ ID NO: 5281; WAN024CVJ_at; Start 222; Stop 246
acccagcagtggtcgtattttggta

SEQ ID NO: 135005 - DNA, 25 bp, Artificial
  probe
  misc_feature (1)..(25): SEQ ID NO: 5281; WAN024CVJ_at; Start 254; Stop 278
aggagttatcggaaaatcgcttggc

SEQ ID NO: 135006 - DNA, 25 bp, Artificial
  probe
  misc_feature (1)..(25): SEQ ID NO: 5281; WAN024CVJ_at; Start 126; Stop 150
caatttgcagattgaaaatggagag

SEQ ID NO: 135007 - DNA, 25 bp, Artificial
  probe
  misc_feature (1)..(25): SEQ ID NO: 5281; WAN024CVJ_at; Start 105; Stop 129
taaagaggccttgagtaatctcaat

SEQ ID NO: 135008 - DNA, 25 bp, Artificial
  probe
  misc_feature (1)..(25): SEQ ID NO: 5281; WAN024CVJ_at; Start 6; Stop 30
ttttttgtatcaaagtgctagtata

SEQ ID NO: 135009 - DNA, 25 bp, Artificial
  probe
  misc_feature (1)..(25): SEQ ID NO: 5281; WAN024CVJ_at; Start 540; Stop 564
acccttgactggtttggatccccag

SEQ ID NO: 135010 - DNA, 25 bp, Artificial
  probe
  misc_feature (1)..(25): SEQ ID NO: 5281; WAN024CVJ_at; Start 141; Stop 165
aaatggagagattatgggcttgatt

SEQ ID NO: 135011 - DNA, 25 bp, Artificial
  probe
  misc_feature (1)..(25): SEQ ID NO: 5281; WAN024CVJ_at; Start 112; Stop 136
gccttgagtaatctcaatttgcaga

SEQ ID NO: 135012 - DNA, 25 bp, Artificial
  probe
  misc_feature (1)..(25): SEQ ID NO: 5281; WAN024CVJ_at; Start 413; Stop 437
tattgaacgtttttgattttgctga

SEQ ID NO: 135013 - DNA, 25 bp, Artificial
  probe
  misc_feature (1)..(25): SEQ ID NO: 5281; WAN024CVJ_at; Start 335; Stop 359
cggccaatgaattttgggaattgat

SEQ ID NO: 135014 - DNA, 25 bp, Artificial
  probe
  misc_feature (1)..(25): SEQ ID NO: 5281; WAN024CVJ_at; Start 153; Stop 177
tatgggcttgattggtcataatggg

SEQ ID NO: 135015 - DNA, 25 bp, Artificial
  probe
  misc_feature (1)..(25): SEQ ID NO: 5281; WAN024CVJ_at; Start 210; Stop 234
cagtatcatttcacccagcagtggt

SEQ ID NO: 135016 - DNA, 25 bp, Artificial
  probe
  misc_feature (1)..(25): SEQ ID NO: 5281; WAN024CVJ_at; Start 148; Stop 172
gagattatgggcttgattggtcata

SEQ ID NO: 135017 - DNA, 25 bp, Artificial
  probe
  misc_feature (1)..(25): SEQ ID NO: 5281; WAN024CVJ_at; Start 542; Stop 566
ccttgactggtttggatccccaggc

SEQ ID NO: 135018 - DNA, 25 bp, Artificial
  probe
  misc_feature (1)..(25): SEQ ID NO: 5281; WAN024CVJ_at; Start 215; Stop 239
tcatttcacccagcagtggtcgtat

SEQ ID NO: 135019 - DNA, 25 bp, Artificial
  probe
  misc_feature (1)..(25): SEQ ID NO: 5281; WAN024CVJ_at; Start 220; Stop 244
tcacccagcagtggtcgtattttgg

SEQ ID NO: 135020 - DNA, 25 bp, Artificial
  probe
  misc_feature (1)..(25): SEQ ID NO: 5281; WAN024CVJ_at; Start 197; Stop 221
taaaatccctagtcagtatcatttc

SEQ ID NO: 135021 - DNA, 25 bp, Artificial
  probe
  misc_feature (1)..(25): SEQ ID NO: 5281; WAN024CVJ_at; Start 97; Stop 121
tatggtgataaagaggccttgagta

SEQ ID NO: 135022 - DNA, 25 bp, Artificial
  probe
  misc_feature (1)..(25): SEQ ID NO: 5281; WAN024CVJ_at; Start 95; Stop 119
tgtatggtgataaagaggccttgag

SEQ ID NO: 135023 - DNA, 25 bp, Artificial
  probe
  misc_feature (1)..(25): SEQ ID NO: 5281; WAN024CVJ_at; Start 90; Stop 114
taagttgtatggtgataaagaggcc

SEQ ID NO: 135024 - DNA, 25 bp, Artificial
  probe
  misc_feature (1)..(25): SEQ ID NO: 5281; WAN024CVJ_at; Start 283; Stop 307
aaacgaaagattggctacgtagcag

SEQ ID NO: 135025 - DNA, 25 bp, Artificial
  probe
  misc_feature (1)..(25): SEQ ID NO: 5281; WAN024CVJ_at; Start 117; Stop 141
gagtaatctcaatttgcagattgaa

SEQ ID NO: 135026 - DNA, 25 bp, Artificial
  probe
  misc_feature (1)..(25): SEQ ID NO: 5281; WAN024CVJ_at; Start 206; Stop 230
tagtcagtatcatttcacccagcag

SEQ ID NO: 135027 - DNA, 25 bp, Artificial
  probe
  misc_feature (1)..(25): SEQ ID NO: 5281; WAN024CVJ_at; Start 93; Stop 117
gttgtatggtgataaagaggccttg

SEQ ID NO: 135028 - DNA, 25 bp, Artificial
  probe
  misc_feature (1)..(25): SEQ ID NO: 5281; WAN024CVJ_at; Start 208; Stop 232
gtcagtatcatttcacccagcagtg

SEQ ID NO: 135029 - DNA, 25 bp, Artificial
  probe
  misc_feature (1)..(25): SEQ ID NO: 5281; WAN024CVJ_at; Start 200; Stop 224
aatccctagtcagtatcatttcacc

SEQ ID NO: 135030 - DNA, 25 bp, Artificial
  probe
  misc_feature (1)..(25): SEQ ID NO: 5281; WAN024CVJ_at; Start 416; Stop 440
tgaacgtttttgattttgctgaaaa

SEQ ID NO: 135031 - DNA, 25 bp, Artificial
  probe
  misc_feature (1)..(25): SEQ ID NO: 5281; WAN024CVJ_at; Start 250; Stop 274
ggtcaggagttatcggaaaatcgct

SEQ ID NO: 135032 - DNA, 25 bp, Artificial
  probe
  misc_feature (1)..(25): SEQ ID NO: 5281; WAN024CVJ_at; Start 103; Stop 127
gataaagaggccttgagtaatctca

SEQ ID NO: 135033 - DNA, 25 bp, Artificial
  probe
  misc_feature (1)..(25): SEQ ID NO: 5281; WAN024CVJ_at; Start 109; Stop 133
gaggccttgagtaatctcaatttgc

SEQ ID NO: 135034 - DNA, 25 bp, Artificial
  probe
  misc_feature (1)..(25): SEQ ID NO: 5281; WAN024CVJ_at; Start 64; Stop 88
cccatgattgaatttcaaaatgtta

SEQ ID NO: 135035 - DNA, 25 bp, Artificial
  probe
  misc_feature (1)..(25): SEQ ID NO: 5281; WAN024CVJ_at; Start 79; Stop 103
caaaatgttagtaagttgtatggtg

SEQ ID NO: 135036 - DNA, 25 bp, Artificial
  probe
  misc_feature (1)..(25): SEQ ID NO: 5281; WAN024CVJ_at; Start 162; Stop 186
gattggtcataatggggctggaaaa

SEQ ID NO: 135037 - DNA, 25 bp, Artificial
  probe
  misc_feature (1)..(25): SEQ ID NO: 5408; WAN024CVK_at; Start 1485; Stop 1509
tatttatagtgcaatcctgatggcc

SEQ ID NO: 135038 - DNA, 25 bp, Artificial
  probe
  misc_feature (1)..(25): SEQ ID NO: 5408; WAN024CVK_at; Start 1044; Stop 1068
gatttccaaaatccgagattctcag

SEQ ID NO: 135039 - DNA, 25 bp, Artificial
  probe
  misc_feature (1)..(25): SEQ ID NO: 5408; WAN024CVK_at; Start 1134; Stop 1158
tgtcaataacaatatcaccagcctg

SEQ ID NO: 135040 - DNA, 25 bp, Artificial
  probe
  misc_feature (1)..(25): SEQ ID NO: 5408; WAN024CVK_at; Start 1626; Stop 1650
cctgtcacgcatattggcagaaata

SEQ ID NO: 135041 - DNA, 25 bp, Artificial
  probe
  misc_feature (1)..(25): SEQ ID NO: 5408; WAN024CVK_at; Start 115; Stop 139
caggctaagaatcctgggaaaaaag

SEQ ID NO: 135042 - DNA, 25 bp, Artificial
  probe
  misc_feature (1)..(25): SEQ ID NO: 5408; WAN024CVK_at; Start 783; Stop 807
gctcgcttggataggactaactctc

SEQ ID NO: 135043 - DNA, 25 bp, Artificial
  probe
  misc_feature (1)..(25): SEQ ID NO: 5408; WAN024CVK_at; Start 1361; Stop 1385
ttgccagtgtcatcctttcttgcca

SEQ ID NO: 135044 - DNA, 25 bp, Artificial
  probe
  misc_feature (1)..(25): SEQ ID NO: 5408; WAN024CVK_at; Start 1078; Stop 1102
gacattcatcctccatactggttac

SEQ ID NO: 135045 - DNA, 25 bp, Artificial
  probe
  misc_feature (1)..(25): SEQ ID NO: 5408; WAN024CVK_at; Start 1612; Stop 1636
ggctatcattattacctgtcacgca

SEQ ID NO: 135046 - DNA, 25 bp, Artificial
  probe
  misc_feature (1)..(25): SEQ ID NO: 5408; WAN024CVK_at; Start 1378; Stop 1402
tcttgccaccattactttaaggacg

SEQ ID NO: 135047 - DNA, 25 bp, Artificial
  probe
  misc_feature (1)..(25): SEQ ID NO: 5408; WAN024CVK_at; Start 993; Stop 1017
tacagtgctttttacaagtgctttc

SEQ ID NO: 135048 - DNA, 25 bp, Artificial
  probe
  misc_feature (1)..(25): SEQ ID NO: 5408; WAN024CVK_at; Start 1408; Stop 1432
aatctgtcaaccaattggagtagca

SEQ ID NO: 135049 - DNA, 25 bp, Artificial
  probe
  misc_feature (1)..(25): SEQ ID NO: 5408; WAN024CVK_at; Start 492; Stop 516
gcctttgatgctactgtccttgacc

SEQ ID NO: 135050 - DNA, 25 bp, Artificial
  probe
  misc_feature (1)..(25): SEQ ID NO: 5408; WAN024CVK_at; Start 1163; Stop 1187
caattgccttgtccttggagaggga

SEQ ID NO: 135051 - DNA, 25 bp, Artificial
  probe
  misc_feature (1)..(25): SEQ ID NO: 5408; WAN024CVK_at; Start 731; Stop 755
tcttttacaaaatagcagtggagcc

SEQ ID NO: 135052 - DNA, 25 bp, Artificial
  probe
  misc_feature (1)..(25): SEQ ID NO: 5408; WAN024CVK_at; Start 764; Stop 788
cagaagccttagtgggtctgctcgc

SEQ ID NO: 135053 - DNA, 25 bp, Artificial
  probe
  misc_feature (1)..(25): SEQ ID NO: 5408; WAN024CVK_at; Start 817; Stop 841
tatctgaccaaaaagaaggtccttc

SEQ ID NO: 135054 - DNA, 25 bp, Artificial
  probe
  misc_feature (1)..(25): SEQ ID NO: 5408; WAN024CVK_at; Start 685; Stop 709
gttgacaaagttagagacattccat

SEQ ID NO: 135055 - DNA, 25 bp, Artificial
  probe
  misc_feature (1)..(25): SEQ ID NO: 5408; WAN024CVK_at; Start 350; Stop 374
ggccctatgcctttaaagaatcaga

SEQ ID NO: 135056 - DNA, 25 bp, Artificial
  probe
  misc_feature (1)..(25): SEQ ID NO: 5408; WAN024CVK_at; Start 885; Stop 909
caaaaaagaacgtcgcagcaaggag

SEQ ID NO: 135057 - DNA, 25 bp, Artificial
  probe
  misc_feature (1)..(25): SEQ ID NO: 5408; WAN024CVK_at; Start 1459; Stop 1483
ggcatagtcgccatagttttattgt

SEQ ID NO: 135058 - DNA, 25 bp, Artificial
  probe
  misc_feature (1)..(25): SEQ ID NO: 5408; WAN024CVK_at; Start 73; Stop 97
tattcatctcaagaagctaatctgg

SEQ ID NO: 135059 - DNA, 25 bp, Artificial
  probe
  misc_feature (1)..(25): SEQ ID NO: 5408; WAN024CVK_at; Start 99; Stop 123
taatctacgaaagaagcaggctaag

SEQ ID NO: 135060 - DNA, 25 bp, Artificial
  probe
  misc_feature (1)..(25): SEQ ID NO: 5408; WAN024CVK_at; Start 88; Stop 112
gctaatctggctaatctacgaaaga

SEQ ID NO: 135061 - DNA, 25 bp, Artificial
  probe
  misc_feature (1)..(25): SEQ ID NO: 5408; WAN024CVK_at; Start 1423; Stop 1447
tggagtagcattacggacctggtga

SEQ ID NO: 135062 - DNA, 25 bp, Artificial
  probe
  misc_feature (1)..(25): SEQ ID NO: 5408; WAN024CVK_at; Start 841; Stop 865
cctcgtttttatgacgtgatcctgc

SEQ ID NO: 135063 - DNA, 25 bp, Artificial
  probe
  misc_feature (1)..(25): SEQ ID NO: 5408; WAN024CVK_at; Start 1438; Stop 1462
gacctggtgaatcgttcaaatggca

SEQ ID NO: 135064 - DNA, 25 bp, Artificial
  probe
  misc_feature (1)..(25): SEQ ID NO: 5408; WAN024CVK_at; Start 1518; Stop 1542
tgggagcatattcttggttcagtct

SEQ ID NO: 135065 - DNA, 25 bp, Artificial
  probe
  misc_feature (1)..(25): SEQ ID NO: 5408; WAN024CVK_at; Start 1500; Stop 1524
cctgatggcccttgtaattgggagc

SEQ ID NO: 135066 - DNA, 25 bp, Artificial
  probe
  misc_feature (1)..(25): SEQ ID NO: 5408; WAN024CVK_at; Start 617; Stop 641
tgattgggataggagttctcatacc

SEQ ID NO: 135067 - DNA, 25 bp, Artificial
  probe
  misc_feature (1)..(25): SEQ ID NO: 5408; WAN024CVK_at; Start 800; Stop 824
taactctcttcctgctttatctgac

SEQ ID NO: 135068 - DNA, 25 bp, Artificial
  probe
  misc_feature (1)..(25): SEQ ID NO: 5408; WAN024CVK_at; Start 1214; Stop 1238
cctttgactttgctcgttatgtgaa

SEQ ID NO: 135069 - DNA, 25 bp, Artificial
  probe
  misc_feature (1)..(25): SEQ ID NO: 5408; WAN024CVK_at; Start 746; Stop 770
cagtggagcctttttcgacagaagc

SEQ ID NO: 135070 - DNA, 25 bp, Artificial
  probe
  misc_feature (1)..(25): SEQ ID NO: 5408; WAN024CVK_at; Start 668; Stop 692
cgacttttggaagtattgttgacaa

SEQ ID NO: 135071 - DNA, 25 bp, Artificial
  probe
  misc_feature (1)..(25): SEQ ID NO: 7125; WAN024CVL_at; Start 39; Stop 63
ttggattcaagtttatctgcgtgac

SEQ ID NO: 135072 - DNA, 25 bp, Artificial
  probe
  misc_feature (1)..(25): SEQ ID NO: 7125; WAN024CVL_at; Start 50; Stop 74
tttatctgcgtgactacgcaggcac

SEQ ID NO: 135073 - DNA, 25 bp, Artificial
  probe
  misc_feature (1)..(25): SEQ ID NO: 7125; WAN024CVL_at; Start 28; Stop 52
caaaacgaagcttggattcaagttt

SEQ ID NO: 135074 - DNA, 25 bp, Artificial
  probe
  misc_feature (1)..(25): SEQ ID NO: 7125; WAN024CVL_at; Start 7; Stop 31
caagaaagcctagttgcttggcaaa

SEQ ID NO: 135075 - DNA, 25 bp, Artificial
  probe
  misc_feature (1)..(25): SEQ ID NO: 7125; WAN024CVL_at; Start 21; Stop 45
tgcttggcaaaacgaagcttggatt

SEQ ID NO: 135076 - DNA, 25 bp, Artificial
  probe
  misc_feature (1)..(25): SEQ ID NO: 7125; WAN024CVL_at; Start 26; Stop 50
ggcaaaacgaagcttggattcaagt

SEQ ID NO: 135077 - DNA, 25 bp, Artificial
  probe
  misc_feature (1)..(25): SEQ ID NO: 7125; WAN024CVL_at; Start 23; Stop 47
cttggcaaaacgaagcttggattca

SEQ ID NO: 135078 - DNA, 25 bp, Artificial
  probe
  misc_feature (1)..(25): SEQ ID NO: 7125; WAN024CVL_at; Start 17; Stop 41
tagttgcttggcaaaacgaagcttg

SEQ ID NO: 135079 - DNA, 25 bp, Artificial
  probe
  misc_feature (1)..(25): SEQ ID NO: 7125; WAN024CVL_at; Start 27; Stop 51
gcaaaacgaagcttggattcaagtt

SEQ ID NO: 135080 - DNA, 25 bp, Artificial
  probe
  misc_feature (1)..(25): SEQ ID NO: 7125; WAN024CVL_at; Start 12; Stop 36
aagcctagttgcttggcaaaacgaa

SEQ ID NO: 135081 - DNA, 25 bp, Artificial
  probe
  misc_feature (1)..(25): SEQ ID NO: 7125; WAN024CVL_at; Start 45; Stop 69
tcaagtttatctgcgtgactacgca

SEQ ID NO: 135082 - DNA, 25 bp, Artificial
  probe
  misc_feature (1)..(25): SEQ ID NO: 7125; WAN024CVL_at; Start 31; Stop 55
aacgaagcttggattcaagtttatc

SEQ ID NO: 135083 - DNA, 25 bp, Artificial
  probe
  misc_feature (1)..(25): SEQ ID NO: 7125; WAN024CVL_at; Start 22; Stop 46
gcttggcaaaacgaagcttggattc

SEQ ID NO: 135084 - DNA, 25 bp, Artificial
  probe
  misc_feature (1)..(25): SEQ ID NO: 7125; WAN024CVL_at; Start 1; Stop 25
ctgcttcaagaaagcctagttgctt

SEQ ID NO: 135085 - DNA, 25 bp, Artificial
  probe
  misc_feature (1)..(25): SEQ ID NO: 7125; WAN024CVL_at; Start 14; Stop 38
gcctagttgcttggcaaaacgaagc

SEQ ID NO: 135086 - DNA, 25 bp, Artificial
  probe
  misc_feature (1)..(25): SEQ ID NO: 7125; WAN024CVL_at; Start 11; Stop 35
aaagcctagttgcttggcaaaacga

SEQ ID NO: 135087 - DNA, 25 bp, Artificial
  probe
  misc_feature (1)..(25): SEQ ID NO: 7125; WAN024CVL_at; Start 19; Stop 43
gttgcttggcaaaacgaagcttgga

SEQ ID NO: 135088 - DNA, 25 bp, Artificial
  probe
  misc_feature (1)..(25): SEQ ID NO: 7125; WAN024CVL_at; Start 2; Stop 26
tgcttcaagaaagcctagttgcttg

SEQ ID NO: 135089 - DNA, 25 bp, Artificial
  probe
  misc_feature (1)..(25): SEQ ID NO: 7125; WAN024CVL_at; Start 51; Stop 75
ttatctgcgtgactacgcaggcacc

SEQ ID NO: 135090 - DNA, 25 bp, Artificial
  probe
  misc_feature (1)..(25): SEQ ID NO: 7125; WAN024CVL_at; Start 20; Stop 44
ttgcttggcaaaacgaagcttggat

SEQ ID NO: 135091 - DNA, 25 bp, Artificial
  probe
  misc_feature (1)..(25): SEQ ID NO: 7125; WAN024CVL_at; Start 8; Stop 32
aagaaagcctagttgcttggcaaaa

SEQ ID NO: 135092 - DNA, 25 bp, Artificial
  probe
  misc_feature (1)..(25): SEQ ID NO: 7125; WAN024CVL_at; Start 49; Stop 73
gtttatctgcgtgactacgcaggca

SEQ ID NO: 135093 - DNA, 25 bp, Artificial
  probe
  misc_feature (1)..(25): SEQ ID NO: 7125; WAN024CVL_at; Start 41; Stop 65
ggattcaagtttatctgcgtgacta

SEQ ID NO: 135094 - DNA, 25 bp, Artificial
  probe
  misc_feature (1)..(25): SEQ ID NO: 7125; WAN024CVL_at; Start 16; Stop 40
ctagttgcttggcaaaacgaagctt

SEQ ID NO: 135095 - DNA, 25 bp, Artificial
  probe
  misc_feature (1)..(25): SEQ ID NO: 7125; WAN024CVL_at; Start 37; Stop 61
gcttggattcaagtttatctgcgtg

SEQ ID NO: 135096 - DNA, 25 bp, Artificial
  probe
  misc_feature (1)..(25): SEQ ID NO: 7125; WAN024CVL_at; Start 47; Stop 71
aagtttatctgcgtgactacgcagg

SEQ ID NO: 135097 - DNA, 25 bp, Artificial
  probe
  misc_feature (1)..(25): SEQ ID NO: 7125; WAN024CVL_at; Start 6; Stop 30
tcaagaaagcctagttgcttggcaa

SEQ ID NO: 135098 - DNA, 25 bp, Artificial
  probe
  misc_feature (1)..(25): SEQ ID NO: 7125; WAN024CVL_at; Start 42; Stop 66
gattcaagtttatctgcgtgactac

SEQ ID NO: 135099 - DNA, 25 bp, Artificial
  probe
  misc_feature (1)..(25): SEQ ID NO: 7125; WAN024CVL_at; Start 25; Stop 49
tggcaaaacgaagcttggattcaag

SEQ ID NO: 135100 - DNA, 25 bp, Artificial
  probe
  misc_feature (1)..(25): SEQ ID NO: 7125; WAN024CVL_at; Start 34; Stop 58
gaagcttggattcaagtttatctgc

SEQ ID NO: 135101 - DNA, 25 bp, Artificial
  probe
  misc_feature (1)..(25): SEQ ID NO: 7125; WAN024CVL_at; Start 44; Stop 68
ttcaagtttatctgcgtgactacgc

SEQ ID NO: 135102 - DNA, 25 bp, Artificial
  probe
  misc_feature (1)..(25): SEQ ID NO: 7125; WAN024CVL_at; Start 52; Stop 76
tatctgcgtgactacgcaggcaccc

SEQ ID NO: 135103 - DNA, 25 bp, Artificial
  probe
  misc_feature (1)..(25): SEQ ID NO: 7125; WAN024CVL_at; Start 4; Stop 28
cttcaagaaagcctagttgcttggc

SEQ ID NO: 135104 - DNA, 25 bp, Artificial
  probe
  misc_feature (1)..(25): SEQ ID NO: 7125; WAN024CVL_at; Start 10; Stop 34
gaaagcctagttgcttggcaaaacg

SEQ ID NO: 135105 - DNA, 25 bp, Artificial
  probe
  misc_feature (1)..(25): SEQ ID NO: 2147; WAN024CVM_at; Start 60; Stop 84
cagtcagaaggattggcaggctgca

SEQ ID NO: 135106 - DNA, 25 bp, Artificial
  probe
  misc_feature (1)..(25): SEQ ID NO: 2147; WAN024CVM_at; Start 491; Stop 515
ttcattcggaatggatcaatctcca

SEQ ID NO: 135107 - DNA, 25 bp, Artificial
  probe
  misc_feature (1)..(25): SEQ ID NO: 2147; WAN024CVM_at; Start 118; Stop 142
gggacaattgagaataaggtcttaa

SEQ ID NO: 135108 - DNA, 25 bp, Artificial
  probe
  misc_feature (1)..(25): SEQ ID NO: 2147; WAN024CVM_at; Start 618; Stop 642
tcaagcagtcgctttagaattagct

SEQ ID NO: 135109 - DNA, 25 bp, Artificial
  probe
  misc_feature (1)..(25): SEQ ID NO: 2147; WAN024CVM_at; Start 345; Stop 369
gcaccctgtaacaaaagcctttcag

SEQ ID NO: 135110 - DNA, 25 bp, Artificial
  probe
  misc_feature (1)..(25): SEQ ID NO: 2147; WAN024CVM_at; Start 332; Stop 356
tagaagtgactttgcaccctgtaac

SEQ ID NO: 135111 - DNA, 25 bp, Artificial
  probe
  misc_feature (1)..(25): SEQ ID NO: 2147; WAN024CVM_at; Start 253; Stop 277
ctaggctttcttgaagcagatgaag

SEQ ID NO: 135112 - DNA, 25 bp, Artificial
  probe
  misc_feature (1)..(25): SEQ ID NO: 2147; WAN024CVM_at; Start 46; Stop 70
gaattattaaaaagcagtcagaagg

SEQ ID NO: 135113 - DNA, 25 bp, Artificial
  probe
  misc_feature (1)..(25): SEQ ID NO: 2147; WAN024CVM_at; Start 73; Stop 97
tggcaggctgcaatcaatcatcgtt

SEQ ID NO: 135114 - DNA, 25 bp, Artificial
  probe
  misc_feature (1)..(25): SEQ ID NO: 2147; WAN024CVM_at; Start 185; Stop 209
tatccatgctgggtgcctgcgtagc

SEQ ID NO: 135115 - DNA, 25 bp, Artificial
  probe
  misc_feature (1)..(25): SEQ ID NO: 2147; WAN024CVM_at; Start 514; Stop 538
cacagaggtcctttctttgcagagt

SEQ ID NO: 135116 - DNA, 25 bp, Artificial
  probe
  misc_feature (1)..(25): SEQ ID NO: 2147; WAN024CVM_at; Start 173; Stop 197
ttgatgccttcttatccatgctggg

SEQ ID NO: 135117 - DNA, 25 bp, Artificial
  probe
  misc_feature (1)..(25): SEQ ID NO: 2147; WAN024CVM_at; Start 523; Stop 547
cctttctttgcagagtgggttcaat

SEQ ID NO: 135118 - DNA, 25 bp, Artificial
  probe
  misc_feature (1)..(25): SEQ ID NO: 2147; WAN024CVM_at; Start 551; Stop 575
tggttgacgaactcaatcgtgtcgg

SEQ ID NO: 135119 - DNA, 25 bp, Artificial
  probe
  misc_feature (1)..(25): SEQ ID NO: 2147; WAN024CVM_at; Start 210; Stop 234
tcacgcagataaacttgaatccaag

SEQ ID NO: 135120 - DNA, 25 bp, Artificial
  probe
  misc_feature (1)..(25): SEQ ID NO: 2147; WAN024CVM_at; Start 24; Stop 48
tcagccaggtttgactgttggagaa

SEQ ID NO: 135121 - DNA, 25 bp, Artificial
  probe
  misc_feature (1)..(25): SEQ ID NO: 2147; WAN024CVM_at; Start 422; Stop 446
tgctggtcattgcagaaggtctcta

SEQ ID NO: 135122 - DNA, 25 bp, Artificial
  probe
  misc_feature (1)..(25): SEQ ID NO: 2147; WAN024CVM_at; Start 356; Stop 380
caaaagcctttcaggatctaatgta

SEQ ID NO: 135123 - DNA, 25 bp, Artificial
  probe
  misc_feature (1)..(25): SEQ ID NO: 2147; WAN024CVM_at; Start 196; Stop 220
ggtgcctgcgtagctcacgcagata

SEQ ID NO: 135124 - DNA, 25 bp, Artificial
  probe
  misc_feature (1)..(25): SEQ ID NO: 2147; WAN024CVM_at; Start 135; Stop 159
ggtcttaaaggactatctgattcaa

SEQ ID NO: 135125 - DNA, 25 bp, Artificial
  probe
  misc_feature (1)..(25): SEQ ID NO: 2147; WAN024CVM_at; Start 394; Stop 418
tcatcagactatgcccatcttttgg

SEQ ID NO: 135126 - DNA, 25 bp, Artificial
  probe
  misc_feature (1)..(25): SEQ ID NO: 2147; WAN024CVM_at; Start 273; Stop 297
tgaagatggttatttccaaaaggct

SEQ ID NO: 135127 - DNA, 25 bp, Artificial
  probe
  misc_feature (1)..(25): SEQ ID NO: 2147; WAN024CVM_at; Start 499; Stop 523
gaatggatcaatctccacagaggtc

SEQ ID NO: 135128 - DNA, 25 bp, Artificial
  probe
  misc_feature (1)..(25): SEQ ID NO: 2147; WAN024CVM_at; Start 86; Stop 110
tcaatcatcgttttgttaaggaact

SEQ ID NO: 135129 - DNA, 25 bp, Artificial
  probe
  misc_feature (1)..(25): SEQ ID NO: 2147; WAN024CVM_at; Start 433; Stop 457
gcagaaggtctctatttagactggg

SEQ ID NO: 135130 - DNA, 25 bp, Artificial
  probe
  misc_feature (1)..(25): SEQ ID NO: 2147; WAN024CVM_at; Start 157; Stop 181
caagattatcacttctttgatgcct

SEQ ID NO: 135131 - DNA, 25 bp, Artificial
  probe
  misc_feature (1)..(25): SEQ ID NO: 2147; WAN024CVM_at; Start 564; Stop 588
caatcgtgtcggtaaaaatcgagaa

SEQ ID NO: 135132 - DNA, 25 bp, Artificial
  probe
  misc_feature (1)..(25): SEQ ID NO: 2147; WAN024CVM_at; Start 225; Stop 249
tgaatccaagcttcgttttgccaag

SEQ ID NO: 135133 - DNA, 25 bp, Artificial
  probe
  misc_feature (1)..(25): SEQ ID NO: 2147; WAN024CVM_at; Start 238; Stop 262
cgttttgccaagcaactaggctttc

SEQ ID NO: 135134 - DNA, 25 bp, Artificial
  probe
  misc_feature (1)..(25): SEQ ID NO: 2147; WAN024CVM_at; Start 587; Stop 611
aagatttgacagaacttcagcaacg

SEQ ID NO: 135135 - DNA, 25 bp, Artificial
  probe
  misc_feature (1)..(25): SEQ ID NO: 2147; WAN024CVM_at; Start 538; Stop 562
tgggttcaatttctggttgacgaac

SEQ ID NO: 135136 - DNA, 25 bp, Artificial
  probe
  misc_feature (1)..(25): SEQ ID NO: 2147; WAN024CVM_at; Start 304; Stop 328
gagttaaaagtagcagagaatgact

SEQ ID NO: 135137 - DNA, 25 bp, Artificial
  probe
  misc_feature (1)..(25): SEQ ID NO: 2147; WAN024CVM_at; Start 8; Stop 32
cacaagactatgcatttcagccagg

SEQ ID NO: 135138 - DNA, 25 bp, Artificial
  probe
  misc_feature (1)..(25): SEQ ID NO: 2147; WAN024CVM_at; Start 476; Stop 500
tacctgaagtctatattcattcgga

SEQ ID NO: 135139 - DNA, 25 bp, Artificial
  probe
  misc_feature (1)..(25): SEQ ID NO: 1419; WAN024CVN_at; Start 63; Stop 87
tatcggcgatcatgttgccagttcg

SEQ ID NO: 135140 - DNA, 25 bp, Artificial
  probe
  misc_feature (1)..(25): SEQ ID NO: 1419; WAN024CVN_at; Start 257; Stop 281
tcggcctctactatttggagaacgg

SEQ ID NO: 135141 - DNA, 25 bp, Artificial
  probe
  misc_feature (1)..(25): SEQ ID NO: 1419; WAN024CVN_at; Start 626; Stop 650
caagagacagtgctagcctagaaga

SEQ ID NO: 135142 - DNA, 25 bp, Artificial
  probe
  misc_feature (1)..(25): SEQ ID NO: 1419; WAN024CVN_at; Start 676; Stop 700
aaagaagcctatggtttcaaggcca

SEQ ID NO: 135143 - DNA, 25 bp, Artificial
  probe
  misc_feature (1)..(25): SEQ ID NO: 1419; WAN024CVN_at; Start 322; Stop 346
catacgagtatcagccagattcggc

SEQ ID NO: 135144 - DNA, 25 bp, Artificial
  probe
  misc_feature (1)..(25): SEQ ID NO: 1419; WAN024CVN_at; Start 206; Stop 230
tgaaacagcaccaaatcgataccag

SEQ ID NO: 135145 - DNA, 25 bp, Artificial
  probe
  misc_feature (1)..(25): SEQ ID NO: 1419; WAN024CVN_at; Start 6; Stop 30
gaaaatattactgtttggcgaacca

SEQ ID NO: 135146 - DNA, 25 bp, Artificial
  probe
  misc_feature (1)..(25): SEQ ID NO: 1419; WAN024CVN_at; Start 96; Stop 120
tggcggatcagaaattaacatcgct

SEQ ID NO: 135147 - DNA, 25 bp, Artificial
  probe
  misc_feature (1)..(25): SEQ ID NO: 1419; WAN024CVN_at; Start 900; Stop 924
tgcgagcgcaactctcaaatgcact

SEQ ID NO: 135148 - DNA, 25 bp, Artificial
  probe
  misc_feature (1)..(25): SEQ ID NO: 1419; WAN024CVN_at; Start 163; Stop 187
gcactccctgccaacgagattggag

SEQ ID NO: 135149 - DNA, 25 bp, Artificial
  probe
  misc_feature (1)..(25): SEQ ID NO: 1419; WAN024CVN_at; Start 177; Stop 201
cgagattggagatcgttttctcaca

SEQ ID NO: 135150 - DNA, 25 bp, Artificial
  probe
  misc_feature (1)..(25): SEQ ID NO: 1419; WAN024CVN_at; Start 571; Stop 595
tattgcttcggtattgatcctctca

SEQ ID NO: 135151 - DNA, 25 bp, Artificial
  probe
  misc_feature (1)..(25): SEQ ID NO: 1419; WAN024CVN_at; Start 885; Stop 909
cattgactttgcagttgcgagcgca

SEQ ID NO: 135152 - DNA, 25 bp, Artificial
  probe
  misc_feature (1)..(25): SEQ ID NO: 1419; WAN024CVN_at; Start 974; Stop 998
tggcaaatgcacaagatatcattcg

SEQ ID NO: 135153 - DNA, 25 bp, Artificial
  probe
  misc_feature (1)..(25): SEQ ID NO: 1419; WAN024CVN_at; Start 81; Stop 105
cagttcgacttattttggcggatca

SEQ ID NO: 135154 - DNA, 25 bp, Artificial
  probe
  misc_feature (1)..(25): SEQ ID NO: 1419; WAN024CVN_at; Start 337; Stop 361
cagattcggccaaacatgctagata

SEQ ID NO: 135155 - DNA, 25 bp, Artificial
  probe
  misc_feature (1)..(25): SEQ ID NO: 1419; WAN024CVN_at; Start 800; Stop 824
cagtctatcaacgaattggtagcgg

SEQ ID NO: 135156 - DNA, 25 bp, Artificial
  probe
  misc_feature (1)..(25): SEQ ID NO: 1419; WAN024CVN_at; Start 480; Stop 504
tgtcgtttcaatggatctcaatctg

SEQ ID NO: 135157 - DNA, 25 bp, Artificial
  probe
  misc_feature (1)..(25): SEQ ID NO: 1419; WAN024CVN_at; Start 227; Stop 251
ccagttcaatctgtcggcttggcga

SEQ ID NO: 135158 - DNA, 25 bp, Artificial
  probe
  misc_feature (1)..(25): SEQ ID NO: 1419; WAN024CVN_at; Start 914; Stop 938
tcaaatgcactcttccaggagacca

SEQ ID NO: 135159 - DNA, 25 bp, Artificial
  probe
  misc_feature (1)..(25): SEQ ID NO: 1419; WAN024CVN_at; Start 516; Stop 540
gatttcagtcctagaagccaagtat

SEQ ID NO: 135160 - DNA, 25 bp, Artificial
  probe
  misc_feature (1)..(25): SEQ ID NO: 1419; WAN024CVN_at; Start 720; Stop 744
tagtgatgagcaagacaaaaatgtc

SEQ ID NO: 135161 - DNA, 25 bp, Artificial
  probe
  misc_feature (1)..(25): SEQ ID NO: 1419; WAN024CVN_at; Start 557; Stop 581
cacgttttactgactattgcttcgg

SEQ ID NO: 135162 - DNA, 25 bp, Artificial
  probe
  misc_feature (1)..(25): SEQ ID NO: 1419; WAN024CVN_at; Start 356; Stop 380
tagatatggattctctctttcaggg

SEQ ID NO: 135163 - DNA, 25 bp, Artificial
  probe
  misc_feature (1)..(25): SEQ ID NO: 1419; WAN024CVN_at; Start 586; Stop 610
gatcctctcatgattgatgaccaaa

SEQ ID NO: 135164 - DNA, 25 bp, Artificial
  probe
  misc_feature (1)..(25): SEQ ID NO: 1419; WAN024CVN_at; Start 274; Stop 298
gagaacggctttggttgtcgtcaaa

SEQ ID NO: 135165 - DNA, 25 bp, Artificial
  probe
  misc_feature (1)..(25): SEQ ID NO: 1419; WAN024CVN_at; Start 641; Stop 665
gcctagaagaggtggaaaatcgcat

SEQ ID NO: 135166 - DNA, 25 bp, Artificial
  probe
  misc_feature (1)..(25): SEQ ID NO: 1419; WAN024CVN_at; Start 298; Stop 322
agtgaagttttctacgatcgtaagc

SEQ ID NO: 135167 - DNA, 25 bp, Artificial
  probe
  misc_feature (1)..(25): SEQ ID NO: 1419; WAN024CVN_at; Start 47; Stop 71
cattagatgccaccagtatcggcga

SEQ ID NO: 135168 - DNA, 25 bp, Artificial
  probe
  misc_feature (1)..(25): SEQ ID NO: 1419; WAN024CVN_at; Start 735; Stop 759
caaaaatgtctatcaagcctatgct

SEQ ID NO: 135169 - DNA, 25 bp, Artificial
  probe
  misc_feature (1)..(25): SEQ ID NO: 1419; WAN024CVN_at; Start 826; Stop 850
gatgcctttatatctggtgcccttt

SEQ ID NO: 135170 - DNA, 25 bp, Artificial
  probe
  misc_feature (1)..(25): SEQ ID NO: 1419; WAN024CVN_at; Start 660; Stop 684
tcgcatgcgacttttaaaagaagcc

SEQ ID NO: 135171 - DNA, 25 bp, Artificial
  probe
  misc_feature (1)..(25): SEQ ID NO: 1419; WAN024CVN_at; Start 242; Stop 266
ggcttggcgatcgaatcggcctcta

SEQ ID NO: 135172 - DNA, 25 bp, Artificial
  probe
  misc_feature (1)..(25): SEQ ID NO: 1419; WAN024CVN_at; Start 778; Stop 802
gagtctgtccaactaaaaactgcag

SEQ ID NO: 135173 - DNA, 25 bp, Artificial
  probe
  misc_feature (1)..(25): SEQ ID NO: 6973; WAN024CVO_at; Start 131; Stop 155
atcagagactgcctgaaccccatgg

SEQ ID NO: 135174 - DNA, 25 bp, Artificial
  probe
  misc_feature (1)..(25): SEQ ID NO: 6973; WAN024CVO_at; Start 78; Stop 102
taacattgataaggaatgcgccagc

SEQ ID NO: 135175 - DNA, 25 bp, Artificial
  probe
  misc_feature (1)..(25): SEQ ID NO: 6973; WAN024CVO_at; Start 117; Stop 141
tacggacaaccctcatcagagactg

SEQ ID NO: 135176 - DNA, 25 bp, Artificial
  probe
  misc_feature (1)..(25): SEQ ID NO: 6973; WAN024CVO_at; Start 12; Stop 36
catacaggcccaaaaaggcaatgac

SEQ ID NO: 135177 - DNA, 25 bp, Artificial
  probe
  misc_feature (1)..(25): SEQ ID NO: 6973; WAN024CVO_at; Start 58; Stop 82
ggaaatagtttgaatacttataaca

SEQ ID NO: 135178 - DNA, 25 bp, Artificial
  probe
  misc_feature (1)..(25): SEQ ID NO: 6973; WAN024CVO_at; Start 36; Stop 60
caaaagtcagagtgttgataaggga

SEQ ID NO: 135179 - DNA, 25 bp, Artificial
  probe
  misc_feature (1)..(25): SEQ ID NO: 6973; WAN024CVO_at; Start 6; Stop 30
gaataacatacaggcccaaaaaggc

SEQ ID NO: 135180 - DNA, 25 bp, Artificial
  probe
  misc_feature (1)..(25): SEQ ID NO: 6973; WAN024CVO_at; Start 165; Stop 189
ggtcgtccttaattacactgatgta

SEQ ID NO: 135181 - DNA, 25 bp, Artificial
  probe
  misc_feature (1)..(25): SEQ ID NO: 6973; WAN024CVO_at; Start 193; Stop 217
ggcgttcatcatgtaggcagacagg

SEQ ID NO: 135182 - DNA, 25 bp, Artificial
  probe
  misc_feature (1)..(25): SEQ ID NO: 6973; WAN024CVO_at; Start 141; Stop 165
gcctgaaccccatggcatcatgcag

SEQ ID NO: 135183 - DNA, 25 bp, Artificial
  probe
  misc_feature (1)..(25): SEQ ID NO: 6973; WAN024CVO_at; Start 210; Stop 234
cagacaggtagctcaaggtgtcaga

SEQ ID NO: 135184 - DNA, 25 bp, Artificial
  probe
  misc_feature (1)..(25): SEQ ID NO: 6973; WAN024CVO_at; Start 91; Stop 115
gaatgcgccagccagattggcgaca

SEQ ID NO: 135185 - DNA, 25 bp, Artificial
  probe
  misc_feature (1)..(25): SEQ ID NO: 6973; WAN024CVO_at; Start 221; Stop 245
ctcaaggtgtcagagatgaggttga

SEQ ID NO: 135186 - DNA, 25 bp, Artificial
  probe
  misc_feature (1)..(25): SEQ ID NO: 6973; WAN024CVO_at; Start 83; Stop 107
ttgataaggaatgcgccagccagat

SEQ ID NO: 135187 - DNA, 25 bp, Artificial
  probe
  misc_feature (1)..(25): SEQ ID NO: 6973; WAN024CVO_at; Start 20; Stop 44
cccaaaaaggcaatgacaaaagtca

SEQ ID NO: 135188 - DNA, 25 bp, Artificial
  probe
  misc_feature (1)..(25): SEQ ID NO: 6973; WAN024CVO_at; Start 145; Stop 169
gaaccccatggcatcatgcaggtcg

SEQ ID NO: 135189 - DNA, 25 bp, Artificial
  probe
  misc_feature (1)..(25): SEQ ID NO: 6973; WAN024CVO_at; Start 112; Stop 136
gacaatacggacaaccctcatcaga

SEQ ID NO: 135190 - DNA, 25 bp, Artificial
  probe
  misc_feature (1)..(25): SEQ ID NO: 6973; WAN024CVO_at; Start 214; Stop 238
caggtagctcaaggtgtcagagatg

SEQ ID NO: 135191 - DNA, 25 bp, Artificial
  probe
  misc_feature (1)..(25): SEQ ID NO: 6973; WAN024CVO_at; Start 199; Stop 223
catcatgtaggcagacaggtagctc

SEQ ID NO: 135192 - DNA, 25 bp, Artificial
  probe
  misc_feature (1)..(25): SEQ ID NO: 6973; WAN024CVO_at; Start 177; Stop 201
ttacactgatgtagagggcgttcat

SEQ ID NO: 135193 - DNA, 25 bp, Artificial
  probe
  misc_feature (1)..(25): SEQ ID NO: 6973; WAN024CVO_at; Start 243; Stop 267
tgatgatgacaatcataatgactga

SEQ ID NO: 135194 - DNA, 25 bp, Artificial
  probe
  misc_feature (1)..(25): SEQ ID NO: 6973; WAN024CVO_at; Start 230; Stop 254
tcagagatgaggttgatgatgacaa

SEQ ID NO: 135195 - DNA, 25 bp, Artificial
  probe
  misc_feature (1)..(25): SEQ ID NO: 6973; WAN024CVO_at; Start 75; Stop 99
ttataacattgataaggaatgcgcc

SEQ ID NO: 135196 - DNA, 25 bp, Artificial
  probe
  misc_feature (1)..(25): SEQ ID NO: 6973; WAN024CVO_at; Start 28; Stop 52
ggcaatgacaaaagtcagagtgttg

SEQ ID NO: 135197 - DNA, 25 bp, Artificial
  probe
  misc_feature (1)..(25): SEQ ID NO: 6973; WAN024CVO_at; Start 186; Stop 210
tgtagagggcgttcatcatgtaggc

SEQ ID NO: 135198 - DNA, 25 bp, Artificial
  probe
  misc_feature (1)..(25): SEQ ID NO: 6973; WAN024CVO_at; Start 97; Stop 121
gccagccagattggcgacaatacgg

SEQ ID NO: 135199 - DNA, 25 bp, Artificial
  probe
  misc_feature (1)..(25): SEQ ID NO: 6973; WAN024CVO_at; Start 121; Stop 145
gacaaccctcatcagagactgcctg

SEQ ID NO: 135200 - DNA, 25 bp, Artificial
  probe
  misc_feature (1)..(25): SEQ ID NO: 6973; WAN024CVO_at; Start 87; Stop 111
taaggaatgcgccagccagattggc

SEQ ID NO: 135201 - DNA, 25 bp, Artificial
  probe
  misc_feature (1)..(25): SEQ ID NO: 6973; WAN024CVO_at; Start 2; Stop 26
tgtcgaataacatacaggcccaaaa

SEQ ID NO: 135202 - DNA, 25 bp, Artificial
  probe
  misc_feature (1)..(25): SEQ ID NO: 6973; WAN024CVO_at; Start 151; Stop 175
catggcatcatgcaggtcgtcctta

SEQ ID NO: 135203 - DNA, 25 bp, Artificial
  probe
  misc_feature (1)..(25): SEQ ID NO: 6973; WAN024CVO_at; Start 158; Stop 182
tcatgcaggtcgtccttaattacac

SEQ ID NO: 135204 - DNA, 25 bp, Artificial
  probe
  misc_feature (1)..(25): SEQ ID NO: 6973; WAN024CVO_at; Start 204; Stop 228
tgtaggcagacaggtagctcaaggt

SEQ ID NO: 135205 - DNA, 25 bp, Artificial
  probe
  misc_feature (1)..(25): SEQ ID NO: 6973; WAN024CVO_at; Start 105; Stop 129
gattggcgacaatacggacaaccct

SEQ ID NO: 135206 - DNA, 25 bp, Artificial
  probe
  misc_feature (1)..(25): SEQ ID NO: 6973; WAN024CVO_at; Start 43; Stop 67
cagagtgttgataagggaaatagtt

SEQ ID NO: 135207 - DNA, 25 bp, Artificial
  probe
  misc_feature (1)..(25): SEQ ID NO: 6644; WAN024CVP_at; Start 108; Stop 132
taatagacaccaatataccccatgc

SEQ ID NO: 135208 - DNA, 25 bp, Artificial
  probe
  misc_feature (1)..(25): SEQ ID NO: 6644; WAN024CVP_at; Start 135; Stop 159
cctattccgaagtcaaacaaatctg

SEQ ID NO: 135209 - DNA, 25 bp, Artificial
  probe
  misc_feature (1)..(25): SEQ ID NO: 6644; WAN024CVP_at; Start 178; Stop 202
gaaacatcagtaaaccgtgatcatc

SEQ ID NO: 135210 - DNA, 25 bp, Artificial
  probe
  misc_feature (1)..(25): SEQ ID NO: 6644; WAN024CVP_at; Start 2; Stop 26
tgatgaaaaacagctgtttagcagc

SEQ ID NO: 135211 - DNA, 25 bp, Artificial
  probe
  misc_feature (1)..(25): SEQ ID NO: 6644; WAN024CVP_at; Start 163; Stop 187
taccactatctccttgaaacatcag

SEQ ID NO: 135212 - DNA, 25 bp, Artificial
  probe
  misc_feature (1)..(25): SEQ ID NO: 6644; WAN024CVP_at; Start 245; Stop 269
cagtaatttgttttgattgtagaca

SEQ ID NO: 135213 - DNA, 25 bp, Artificial
  probe
  misc_feature (1)..(25): SEQ ID NO: 6644; WAN024CVP_at; Start 148; Stop 172
caaacaaatctgctttaccactatc

SEQ ID NO: 135214 - DNA, 25 bp, Artificial
  probe
  misc_feature (1)..(25): SEQ ID NO: 6644; WAN024CVP_at; Start 14; Stop 38
gctgtttagcagcaactgtctatat

SEQ ID NO: 135215 - DNA, 25 bp, Artificial
  probe
  misc_feature (1)..(25): SEQ ID NO: 6644; WAN024CVP_at; Start 6; Stop 30
gaaaaacagctgtttagcagcaact

SEQ ID NO: 135216 - DNA, 25 bp, Artificial
  probe
  misc_feature (1)..(25): SEQ ID NO: 6644; WAN024CVP_at; Start 72; Stop 96
tccttatgtctgcacatcgaatggg

SEQ ID NO: 135217 - DNA, 25 bp, Artificial
  probe
  misc_feature (1)..(25): SEQ ID NO: 6644; WAN024CVP_at; Start 80; Stop 104
tctgcacatcgaatgggaatttatt

SEQ ID NO: 135218 - DNA, 25 bp, Artificial
  probe
  misc_feature (1)..(25): SEQ ID NO: 6644; WAN024CVP_at; Start 29; Stop 53
ctgtctatatatgttgtttgtccaa

SEQ ID NO: 135219 - DNA, 25 bp, Artificial
  probe
  misc_feature (1)..(25): SEQ ID NO: 6644; WAN024CVP_at; Start 43; Stop 67
tgtttgtccaaaataatttcatact

SEQ ID NO: 135220 - DNA, 25 bp, Artificial
  probe
  misc_feature (1)..(25): SEQ ID NO: 6644; WAN024CVP_at; Start 210; Stop 234
gaacatgctaaaattacctgttgga

SEQ ID NO: 135221 - DNA, 25 bp, Artificial
  probe
  misc_feature (1)..(25): SEQ ID NO: 6644; WAN024CVP_at; Start 76; Stop 100
tatgtctgcacatcgaatgggaatt

SEQ ID NO: 135222 - DNA, 25 bp, Artificial
  probe
  misc_feature (1)..(25): SEQ ID NO: 6644; WAN024CVP_at; Start 193; Stop 217
cgtgatcatctcgttcagaacatgc

SEQ ID NO: 135223 - DNA, 25 bp, Artificial
  probe
  misc_feature (1)..(25): SEQ ID NO: 6644; WAN024CVP_at; Start 196; Stop 220
gatcatctcgttcagaacatgctaa

SEQ ID NO: 135224 - DNA, 25 bp, Artificial
  probe
  misc_feature (1)..(25): SEQ ID NO: 6644; WAN024CVP_at; Start 204; Stop 228
cgttcagaacatgctaaaattacct

SEQ ID NO: 135225 - DNA, 25 bp, Artificial
  probe
  misc_feature (1)..(25): SEQ ID NO: 6644; WAN024CVP_at; Start 9; Stop 33
aaacagctgtttagcagcaactgtc

SEQ ID NO: 135226 - DNA, 25 bp, Artificial
  probe
  misc_feature (1)..(25): SEQ ID NO: 6644; WAN024CVP_at; Start 185; Stop 209
cagtaaaccgtgatcatctcgttca

SEQ ID NO: 135227 - DNA, 25 bp, Artificial
  probe
  misc_feature (1)..(25): SEQ ID NO: 6644; WAN024CVP_at; Start 127; Stop 151
ccatgcttcctattccgaagtcaaa

SEQ ID NO: 135228 - DNA, 25 bp, Artificial
  probe
  misc_feature (1)..(25): SEQ ID NO: 6644; WAN024CVP_at; Start 213; Stop 237
catgctaaaattacctgttggattt

SEQ ID NO: 135229 - DNA, 25 bp, Artificial
  probe
  misc_feature (1)..(25): SEQ ID NO: 6644; WAN024CVP_at; Start 143; Stop 167
gaagtcaaacaaatctgctttacca

SEQ ID NO: 135230 - DNA, 25 bp, Artificial
  probe
  misc_feature (1)..(25): SEQ ID NO: 6644; WAN024CVP_at; Start 173; Stop 197
tccttgaaacatcagtaaaccgtga

SEQ ID NO: 135231 - DNA, 25 bp, Artificial
  probe
  misc_feature (1)..(25): SEQ ID NO: 6644; WAN024CVP_at; Start 249; Stop 273
aatttgttttgattgtagacagtgg

SEQ ID NO: 135232 - DNA, 25 bp, Artificial
  probe
  misc_feature (1)..(25): SEQ ID NO: 6644; WAN024CVP_at; Start 156; Stop 180
tctgctttaccactatctccttgaa

SEQ ID NO: 135233 - DNA, 25 bp, Artificial
  probe
  misc_feature (1)..(25): SEQ ID NO: 6644; WAN024CVP_at; Start 20; Stop 44
tagcagcaactgtctatatatgttg

SEQ ID NO: 135234 - DNA, 25 bp, Artificial
  probe
  misc_feature (1)..(25): SEQ ID NO: 6644; WAN024CVP_at; Start 137; Stop 161
tattccgaagtcaaacaaatctgct

SEQ ID NO: 135235 - DNA, 25 bp, Artificial
  probe
  misc_feature (1)..(25): SEQ ID NO: 6644; WAN024CVP_at; Start 95; Stop 119
ggaatttattatttaatagacacca

SEQ ID NO: 135236 - DNA, 25 bp, Artificial
  probe
  misc_feature (1)..(25): SEQ ID NO: 6644; WAN024CVP_at; Start 111; Stop 135
tagacaccaatataccccatgcttc

SEQ ID NO: 135237 - DNA, 25 bp, Artificial
  probe
  misc_feature (1)..(25): SEQ ID NO: 6644; WAN024CVP_at; Start 264; Stop 288
tagacagtggtttgtagtaagctag

SEQ ID NO: 135238 - DNA, 25 bp, Artificial
  probe
  misc_feature (1)..(25): SEQ ID NO: 6644; WAN024CVP_at; Start 121; Stop 145
tataccccatgcttcctattccgaa

SEQ ID NO: 135239 - DNA, 25 bp, Artificial
  probe
  misc_feature (1)..(25): SEQ ID NO: 6644; WAN024CVP_at; Start 188; Stop 212
taaaccgtgatcatctcgttcagaa

SEQ ID NO: 135240 - DNA, 25 bp, Artificial
  probe
  misc_feature (1)..(25): SEQ ID NO: 6644; WAN024CVP_at; Start 62; Stop 86
catacttttctccttatgtctgcac

SEQ ID NO: 135241 - DNA, 25 bp, Artificial
  probe
  misc_feature (1)..(25): SEQ ID NO: 3852; WAN024CVQ_at; Start 149; Stop 173
gggacacatccaagatggcaatcat

SEQ ID NO: 135242 - DNA, 25 bp, Artificial
  probe
  misc_feature (1)..(25): SEQ ID NO: 3852; WAN024CVQ_at; Start 221; Stop 245
gcacagccagcgactgtttaagatg

SEQ ID NO: 135243 - DNA, 25 bp, Artificial
  probe
  misc_feature (1)..(25): SEQ ID NO: 3852; WAN024CVQ_at; Start 13; Stop 37
tttttaaatagattactgctggtca

SEQ ID NO: 135244 - DNA, 25 bp, Artificial
  probe
  misc_feature (1)..(25): SEQ ID NO: 3852; WAN024CVQ_at; Start 94; Stop 118
ccaatgctcagttgtgctagtgtct

SEQ ID NO: 135245 - DNA, 25 bp, Artificial
  probe
  misc_feature (1)..(25): SEQ ID NO: 3852; WAN024CVQ_at; Start 23; Stop 47
gattactgctggtcatattgccaag

SEQ ID NO: 135246 - DNA, 25 bp, Artificial
  probe
  misc_feature (1)..(25): SEQ ID NO: 3852; WAN024CVQ_at; Start 203; Stop 227
tatcttttaacctcaggagcacagc

SEQ ID NO: 135247 - DNA, 25 bp, Artificial
  probe
  misc_feature (1)..(25): SEQ ID NO: 3852; WAN024CVQ_at; Start 167; Stop 191
caatcatactggtcgtcagaaacag

SEQ ID NO: 135248 - DNA, 25 bp, Artificial
  probe
  misc_feature (1)..(25): SEQ ID NO: 3852; WAN024CVQ_at; Start 106; Stop 130
tgtgctagtgtctgttggatgaagc

SEQ ID NO: 135249 - DNA, 25 bp, Artificial
  probe
  misc_feature (1)..(25): SEQ ID NO: 3852; WAN024CVQ_at; Start 40; Stop 64
ttgccaaggatagctccacaagaca

SEQ ID NO: 135250 - DNA, 25 bp, Artificial
  probe
  misc_feature (1)..(25): SEQ ID NO: 3852; WAN024CVQ_at; Start 170; Stop 194
tcatactggtcgtcagaaacagtag

SEQ ID NO: 135251 - DNA, 25 bp, Artificial
  probe
  misc_feature (1)..(25): SEQ ID NO: 3852; WAN024CVQ_at; Start 91; Stop 115
tgcccaatgctcagttgtgctagtg

SEQ ID NO: 135252 - DNA, 25 bp, Artificial
  probe
  misc_feature (1)..(25): SEQ ID NO: 3852; WAN024CVQ_at; Start 157; Stop 181
tccaagatggcaatcatactggtcg

SEQ ID NO: 135253 - DNA, 25 bp, Artificial
  probe
  misc_feature (1)..(25): SEQ ID NO: 3852; WAN024CVQ_at; Start 176; Stop 200
tggtcgtcagaaacagtagtatgac

SEQ ID NO: 135254 - DNA, 25 bp, Artificial
  probe
  misc_feature (1)..(25): SEQ ID NO: 3852; WAN024CVQ_at; Start 45; Stop 69
aaggatagctccacaagacatgatg

SEQ ID NO: 135255 - DNA, 25 bp, Artificial
  probe
  misc_feature (1)..(25): SEQ ID NO: 3852; WAN024CVQ_at; Start 56; Stop 80
cacaagacatgatgatggagagcag

SEQ ID NO: 135256 - DNA, 25 bp, Artificial
  probe
  misc_feature (1)..(25): SEQ ID NO: 3852; WAN024CVQ_at; Start 198; Stop 222
gacggtatcttttaacctcaggagc

SEQ ID NO: 135257 - DNA, 25 bp, Artificial
  probe
  misc_feature (1)..(25): SEQ ID NO: 3852; WAN024CVQ_at; Start 86; Stop 110
ggagttgcccaatgctcagttgtgc

SEQ ID NO: 135258 - DNA, 25 bp, Artificial
  probe
  misc_feature (1)..(25): SEQ ID NO: 3852; WAN024CVQ_at; Start 63; Stop 87
catgatgatggagagcagggcgagg

SEQ ID NO: 135259 - DNA, 25 bp, Artificial
  probe
  misc_feature (1)..(25): SEQ ID NO: 3852; WAN024CVQ_at; Start 29; Stop 53
tgctggtcatattgccaaggatagc

SEQ ID NO: 135260 - DNA, 25 bp, Artificial
  probe
  misc_feature (1)..(25): SEQ ID NO: 3852; WAN024CVQ_at; Start 182; Stop 206
tcagaaacagtagtatgacggtatc

SEQ ID NO: 135261 - DNA, 25 bp, Artificial
  probe
  misc_feature (1)..(25): SEQ ID NO: 3852; WAN024CVQ_at; Start 214; Stop 238
ctcaggagcacagccagcgactgtt

SEQ ID NO: 135262 - DNA, 25 bp, Artificial
  probe
  misc_feature (1)..(25): SEQ ID NO: 3852; WAN024CVQ_at; Start 48; Stop 72
gatagctccacaagacatgatgatg

SEQ ID NO: 135263 - DNA, 25 bp, Artificial
  probe
  misc_feature (1)..(25): SEQ ID NO: 3852; WAN024CVQ_at; Start 26; Stop 50
tactgctggtcatattgccaaggat

SEQ ID NO: 135264 - DNA, 25 bp, Artificial
  probe
  misc_feature (1)..(25): SEQ ID NO: 3852; WAN024CVQ_at; Start 78; Stop 102
cagggcgaggagttgcccaatgctc

SEQ ID NO: 135265 - DNA, 25 bp, Artificial
  probe
  misc_feature (1)..(25): SEQ ID NO: 3852; WAN024CVQ_at; Start 185; Stop 209
gaaacagtagtatgacggtatcttt

SEQ ID NO: 135266 - DNA, 25 bp, Artificial
  probe
  misc_feature (1)..(25): SEQ ID NO: 3852; WAN024CVQ_at; Start 218; Stop 242
ggagcacagccagcgactgtttaag

SEQ ID NO: 135267 - DNA, 25 bp, Artificial
  probe
  misc_feature (1)..(25): SEQ ID NO: 3852; WAN024CVQ_at; Start 225; Stop 249
agccagcgactgtttaagatgttga

SEQ ID NO: 135268 - DNA, 25 bp, Artificial
  probe
  misc_feature (1)..(25): SEQ ID NO: 3852; WAN024CVQ_at; Start 207; Stop 231
ttttaacctcaggagcacagccagc

SEQ ID NO: 135269 - DNA, 25 bp, Artificial
  probe
  misc_feature (1)..(25): SEQ ID NO: 3852; WAN024CVQ_at; Start 83; Stop 107
cgaggagttgcccaatgctcagttg

SEQ ID NO: 135270 - DNA, 25 bp, Artificial
  probe
  misc_feature (1)..(25): SEQ ID NO: 3852; WAN024CVQ_at; Start 134; Stop 158
gggcaatcagccgaggggacacatc

SEQ ID NO: 135271 - DNA, 25 bp, Artificial
  probe
  misc_feature (1)..(25): SEQ ID NO: 3852; WAN024CVQ_at; Start 100; Stop 124
ctcagttgtgctagtgtctgttgga

SEQ ID NO: 135272 - DNA, 25 bp, Artificial
  probe
  misc_feature (1)..(25): SEQ ID NO: 3852; WAN024CVQ_at; Start 195; Stop 219
tatgacggtatcttttaacctcagg

SEQ ID NO: 135273 - DNA, 25 bp, Artificial
  probe
  misc_feature (1)..(25): SEQ ID NO: 3852; WAN024CVQ_at; Start 120; Stop 144
ttggatgaagcggagggcaatcagc

SEQ ID NO: 135274 - DNA, 25 bp, Artificial
  probe
  misc_feature (1)..(25): SEQ ID NO: 3852; WAN024CVQ_at; Start 162; Stop 186
gatggcaatcatactggtcgtcaga

SEQ ID NO: 135275 - DNA, 25 bp, Artificial
  probe
  misc_feature (1)..(25): SEQ ID NO: 2740; WAN024CVR_at; Start 40; Stop 64
aagagtattgtcattggtaaattga

SEQ ID NO: 135276 - DNA, 25 bp, Artificial
  probe
  misc_feature (1)..(25): SEQ ID NO: 2740; WAN024CVR_at; Start 39; Stop 63
taagagtattgtcattggtaaattg

SEQ ID NO: 135277 - DNA, 25 bp, Artificial
  probe
  misc_feature (1)..(25): SEQ ID NO: 2740; WAN024CVR_at; Start 43; Stop 67
agtattgtcattggtaaattgatag

SEQ ID NO: 135278 - DNA, 25 bp, Artificial
  probe
  misc_feature (1)..(25): SEQ ID NO: 2740; WAN024CVR_at; Start 49; Stop 73
gtcattggtaaattgatagtatttt

SEQ ID NO: 135279 - DNA, 25 bp, Artificial
  probe
  misc_feature (1)..(25): SEQ ID NO: 2740; WAN024CVR_at; Start 44; Stop 68
gtattgtcattggtaaattgatagt

SEQ ID NO: 135280 - DNA, 25 bp, Artificial
  probe
  misc_feature (1)..(25): SEQ ID NO: 2740; WAN024CVR_at; Start 42; Stop 66
gagtattgtcattggtaaattgata

SEQ ID NO: 135281 - DNA, 25 bp, Artificial
  probe
  misc_feature (1)..(25): SEQ ID NO: 2740; WAN024CVR_at; Start 36; Stop 60
ttttaagagtattgtcattggtaaa

SEQ ID NO: 135282 - DNA, 25 bp, Artificial
  probe
  misc_feature (1)..(25): SEQ ID NO: 2740; WAN024CVR_at; Start 10; Stop 34
ttcccctatactattgtggatgaaa

SEQ ID NO: 135283 - DNA, 25 bp, Artificial
  probe
  misc_feature (1)..(25): SEQ ID NO: 2740; WAN024CVR_at; Start 50; Stop 74
tcattggtaaattgatagtatttta

SEQ ID NO: 135284 - DNA, 25 bp, Artificial
  probe
  misc_feature (1)..(25): SEQ ID NO: 2740; WAN024CVR_at; Start 37; Stop 61
tttaagagtattgtcattggtaaat

SEQ ID NO: 135285 - DNA, 25 bp, Artificial
  probe
  misc_feature (1)..(25): SEQ ID NO: 2740; WAN024CVR_at; Start 38; Stop 62
ttaagagtattgtcattggtaaatt

SEQ ID NO: 135286 - DNA, 25 bp, Artificial
  probe
  misc_feature (1)..(25): SEQ ID NO: 2740; WAN024CVR_at; Start 51; Stop 75
cattggtaaattgatagtattttat

SEQ ID NO: 135287 - DNA, 25 bp, Artificial
  probe
  misc_feature (1)..(25): SEQ ID NO: 2740; WAN024CVR_at; Start 48; Stop 72
tgtcattggtaaattgatagtattt

SEQ ID NO: 135288 - DNA, 25 bp, Artificial
  probe
  misc_feature (1)..(25): SEQ ID NO: 2740; WAN024CVR_at; Start 41; Stop 65
agagtattgtcattggtaaattgat

SEQ ID NO: 135289 - DNA, 25 bp, Artificial
  probe
  misc_feature (1)..(25): SEQ ID NO: 2740; WAN024CVR_at; Start 7; Stop 31
aatttcccctatactattgtggatg

SEQ ID NO: 135290 - DNA, 25 bp, Artificial
  probe
  misc_feature (1)..(25): SEQ ID NO: 2740; WAN024CVR_at; Start 6; Stop 30
aaatttcccctatactattgtggat

SEQ ID NO: 135291 - DNA, 25 bp, Artificial
  probe
  misc_feature (1)..(25): SEQ ID NO: 2740; WAN024CVR_at; Start 45; Stop 69
tattgtcattggtaaattgatagta

SEQ ID NO: 135292 - DNA, 25 bp, Artificial
  probe
  misc_feature (1)..(25): SEQ ID NO: 2740; WAN024CVR_at; Start 47; Stop 71
ttgtcattggtaaattgatagtatt

SEQ ID NO: 135293 - DNA, 25 bp, Artificial
  probe
  misc_feature (1)..(25): SEQ ID NO: 2740; WAN024CVR_at; Start 8; Stop 32
atttcccctatactattgtggatga

SEQ ID NO: 135294 - DNA, 25 bp, Artificial
  probe
  misc_feature (1)..(25): SEQ ID NO: 2740; WAN024CVR_at; Start 5; Stop 29
taaatttcccctatactattgtgga

SEQ ID NO: 135295 - DNA, 25 bp, Artificial
  probe
  misc_feature (1)..(25): SEQ ID NO: 2740; WAN024CVR_at; Start 46; Stop 70
attgtcattggtaaattgatagtat

SEQ ID NO: 135296 - DNA, 25 bp, Artificial
  probe
  misc_feature (1)..(25): SEQ ID NO: 2740; WAN024CVR_at; Start 9; Stop 33
tttcccctatactattgtggatgaa

SEQ ID NO: 135297 - DNA, 25 bp, Artificial
  probe
  misc_feature (1)..(25): SEQ ID NO: 4284; WAN024CVS_at; Start 2; Stop 26
tgtgtgtcgttctaattgtcactgc

SEQ ID NO: 135298 - DNA, 25 bp, Artificial
  probe
  misc_feature (1)..(25): SEQ ID NO: 4284; WAN024CVS_at; Start 117; Stop 141
tgataaattacttacgaaatttcca

SEQ ID NO: 135299 - DNA, 25 bp, Artificial
  probe
  misc_feature (1)..(25): SEQ ID NO: 4284; WAN024CVS_at; Start 6; Stop 30
tgtcgttctaattgtcactgccttc

SEQ ID NO: 135300 - DNA, 25 bp, Artificial
  probe
  misc_feature (1)..(25): SEQ ID NO: 4284; WAN024CVS_at; Start 139; Stop 163
ccaaattctgttgaagaagtgatcc

SEQ ID NO: 135301 - DNA, 25 bp, Artificial
  probe
  misc_feature (1)..(25): SEQ ID NO: 4284; WAN024CVS_at; Start 42; Stop 66
gagtattttagaatccagttctggg

SEQ ID NO: 135302 - DNA, 25 bp, Artificial
  probe
  misc_feature (1)..(25): SEQ ID NO: 4284; WAN024CVS_at; Start 131; Stop 155
cgaaatttccaaattctgttgaaga

SEQ ID NO: 135303 - DNA, 25 bp, Artificial
  probe
  misc_feature (1)..(25): SEQ ID NO: 4284; WAN024CVS_at; Start 9; Stop 33
cgttctaattgtcactgccttcttg

SEQ ID NO: 135304 - DNA, 25 bp, Artificial
  probe
  misc_feature (1)..(25): SEQ ID NO: 4284; WAN024CVS_at; Start 25; Stop 49
gccttcttgatgatagagagtattt

SEQ ID NO: 135305 - DNA, 25 bp, Artificial
  probe
  misc_feature (1)..(25): SEQ ID NO: 4284; WAN024CVS_at; Start 82; Stop 106
agaggaaacagtagtccagctattc

SEQ ID NO: 135306 - DNA, 25 bp, Artificial
  probe
  misc_feature (1)..(25): SEQ ID NO: 4284; WAN024CVS_at; Start 38; Stop 62
tagagagtattttagaatccagttc

SEQ ID NO: 135307 - DNA, 25 bp, Artificial
  probe
  misc_feature (1)..(25): SEQ ID NO: 4284; WAN024CVS_at; Start 77; Stop 101
tatttagaggaaacagtagtccagc

SEQ ID NO: 135308 - DNA, 25 bp, Artificial
  probe
  misc_feature (1)..(25): SEQ ID NO: 4284; WAN024CVS_at; Start 90; Stop 114
cagtagtccagctattccgtgttgg

SEQ ID NO: 135309 - DNA, 25 bp, Artificial
  probe
  misc_feature (1)..(25): SEQ ID NO: 4284; WAN024CVS_at; Start 157; Stop 181
gtgatccttccttcagaatttacag

SEQ ID NO: 135310 - DNA, 25 bp, Artificial
  probe
  misc_feature (1)..(25): SEQ ID NO: 4284; WAN024CVS_at; Start 97; Stop 121
ccagctattccgtgttggaatgata

SEQ ID NO: 135311 - DNA, 25 bp, Artificial
  probe
  misc_feature (1)..(25): SEQ ID NO: 4284; WAN024CVS_at; Start 151; Stop 175
gaagaagtgatccttccttcagaat

SEQ ID NO: 135312 - DNA, 25 bp, Artificial
  probe
  misc_feature (1)..(25): SEQ ID NO: 4284; WAN024CVS_at; Start 159; Stop 183
gatccttccttcagaatttacagtt

SEQ ID NO: 135313 - DNA, 25 bp, Artificial
  probe
  misc_feature (1)..(25): SEQ ID NO: 4284; WAN024CVS_at; Start 170; Stop 194
cagaatttacagttttatctagtaa

SEQ ID NO: 135314 - DNA, 25 bp, Artificial
  probe
  misc_feature (1)..(25): SEQ ID NO: 4284; WAN024CVS_at; Start 201; Stop 225
tagaacactattacattctgttttg

SEQ ID NO: 135315 - DNA, 25 bp, Artificial
  probe
  misc_feature (1)..(25): SEQ ID NO: 4284; WAN024CVS_at; Start 13; Stop 37
ctaattgtcactgccttcttgatga

SEQ ID NO: 135316 - DNA, 25 bp, Artificial
  probe
  misc_feature (1)..(25): SEQ ID NO: 4284; WAN024CVS_at; Start 154; Stop 178
gaagtgatccttccttcagaattta

SEQ ID NO: 135317 - DNA, 25 bp, Artificial
  probe
  misc_feature (1)..(25): SEQ ID NO: 4284; WAN024CVS_at; Start 142; Stop 166
aattctgttgaagaagtgatccttc

SEQ ID NO: 135318 - DNA, 25 bp, Artificial
  probe
  misc_feature (1)..(25): SEQ ID NO: 4284; WAN024CVS_at; Start 20; Stop 44
tcactgccttcttgatgatagagag

SEQ ID NO: 135319 - DNA, 25 bp, Artificial
  probe
  misc_feature (1)..(25): SEQ ID NO: 4284; WAN024CVS_at; Start 164; Stop 188
ttccttcagaatttacagttttatc

SEQ ID NO: 135320 - DNA, 25 bp, Artificial
  probe
  misc_feature (1)..(25): SEQ ID NO: 4284; WAN024CVS_at; Start 18; Stop 42
tgtcactgccttcttgatgatagag

SEQ ID NO: 135321 - DNA, 25 bp, Artificial
  probe
  misc_feature (1)..(25): SEQ ID NO: 4284; WAN024CVS_at; Start 86; Stop 110
gaaacagtagtccagctattccgtg

SEQ ID NO: 135322 - DNA, 25 bp, Artificial
  probe
  misc_feature (1)..(25): SEQ ID NO: 4284; WAN024CVS_at; Start 145; Stop 169
tctgttgaagaagtgatccttcctt

SEQ ID NO: 135323 - DNA, 25 bp, Artificial
  probe
  misc_feature (1)..(25): SEQ ID NO: 4284; WAN024CVS_at; Start 70; Stop 94
tacaatttatttagaggaaacagta

SEQ ID NO: 135324 - DNA, 25 bp, Artificial
  probe
  misc_feature (1)..(25): SEQ ID NO: 4284; WAN024CVS_at; Start 79; Stop 103
tttagaggaaacagtagtccagcta

SEQ ID NO: 135325 - DNA, 25 bp, Artificial
  probe
  misc_feature (1)..(25): SEQ ID NO: 4284; WAN024CVS_at; Start 105; Stop 129
tccgtgttggaatgataaattactt

SEQ ID NO: 135326 - DNA, 25 bp, Artificial
  probe
  misc_feature (1)..(25): SEQ ID NO: 4284; WAN024CVS_at; Start 49; Stop 73
ttagaatccagttctggggggtaca

SEQ ID NO: 135327 - DNA, 25 bp, Artificial
  probe
  misc_feature (1)..(25): SEQ ID NO: 4284; WAN024CVS_at; Start 92; Stop 116
gtagtccagctattccgtgttggaa

SEQ ID NO: 135328 - DNA, 25 bp, Artificial
  probe
  misc_feature (1)..(25): SEQ ID NO: 4284; WAN024CVS_at; Start 33; Stop 57
gatgatagagagtattttagaatcc

SEQ ID NO: 135329 - DNA, 25 bp, Artificial
  probe
  misc_feature (1)..(25): SEQ ID NO: 4284; WAN024CVS_at; Start 100; Stop 124
gctattccgtgttggaatgataaat

SEQ ID NO: 135330 - DNA, 25 bp, Artificial
  probe
  misc_feature (1)..(25): SEQ ID NO: 4284; WAN024CVS_at; Start 22; Stop 46
actgccttcttgatgatagagagta

SEQ ID NO: 135331 - DNA, 25 bp, Artificial
  probe
  misc_feature (1)..(25): SEQ ID NO: 2951; WAN024CVT_at; Start 492; Stop 516
tctggctggcgcattccttatcaat

SEQ ID NO: 135332 - DNA, 25 bp, Artificial
  probe
  misc_feature (1)..(25): SEQ ID NO: 2951; WAN024CVT_at; Start 1037; Stop 1061
gcctacaagcagctgtctttgccca

SEQ ID NO: 135333 - DNA, 25 bp, Artificial
  probe
  misc_feature (1)..(25): SEQ ID NO: 2951; WAN024CVT_at; Start 178; Stop 202
gagatggttcccctactatcgcaac

SEQ ID NO: 135334 - DNA, 25 bp, Artificial
  probe
  misc_feature (1)..(25): SEQ ID NO: 2951; WAN024CVT_at; Start 752; Stop 776
tggatgtgtcccctcggctgattgc

SEQ ID NO: 135335 - DNA, 25 bp, Artificial
  probe
  misc_feature (1)..(25): SEQ ID NO: 2951; WAN024CVT_at; Start 423; Stop 447
taaggacgacctgcatgatgccatg

SEQ ID NO: 135336 - DNA, 25 bp, Artificial
  probe
  misc_feature (1)..(25): SEQ ID NO: 2951; WAN024CVT_at; Start 663; Stop 687
tcaacatcttaaacagtcgctggct

SEQ ID NO: 135337 - DNA, 25 bp, Artificial
  probe
  misc_feature (1)..(25): SEQ ID NO: 2951; WAN024CVT_at; Start 148; Stop 172
ccgctagcgattttactgatttcca

SEQ ID NO: 135338 - DNA, 25 bp, Artificial
  probe
  misc_feature (1)..(25): SEQ ID NO: 2951; WAN024CVT_at; Start 894; Stop 918
taaaaatatccgtttcacgcacctc

SEQ ID NO: 135339 - DNA, 25 bp, Artificial
  probe
  misc_feature (1)..(25): SEQ ID NO: 2951; WAN024CVT_at; Start 1159; Stop 1183
tcgggcgtttcggtgcagttagcat

SEQ ID NO: 135340 - DNA, 25 bp, Artificial
  probe
  misc_feature (1)..(25): SEQ ID NO: 2951; WAN024CVT_at; Start 1083; Stop 1107
gacggtgggctctgctctgagcaca

SEQ ID NO: 135341 - DNA, 25 bp, Artificial
  probe
  misc_feature (1)..(25): SEQ ID NO: 2951; WAN024CVT_at; Start 85; Stop 109
tcattcggcgacagtattttctacc

SEQ ID NO: 135342 - DNA, 25 bp, Artificial
  probe
  misc_feature (1)..(25): SEQ ID NO: 2951; WAN024CVT_at; Start 861; Stop 885
tatccttggcaatatgaccagcagt

SEQ ID NO: 135343 - DNA, 25 bp, Artificial
  probe
  misc_feature (1)..(25): SEQ ID NO: 2951; WAN024CVT_at; Start 54; Stop 78
tagacagttgctgctaaacagctgt

SEQ ID NO: 135344 - DNA, 25 bp, Artificial
  probe
  misc_feature (1)..(25): SEQ ID NO: 2951; WAN024CVT_at; Start 243; Stop 267
caaacacgcactctggattgccaaa

SEQ ID NO: 135345 - DNA, 25 bp, Artificial
  probe
  misc_feature (1)..(25): SEQ ID NO: 2951; WAN024CVT_at; Start 1223; Stop 1247
gtcaatggttagtcaagttcaacac

SEQ ID NO: 135346 - DNA, 25 bp, Artificial
  probe
  misc_feature (1)..(25): SEQ ID NO: 2951; WAN024CVT_at; Start 795; Stop 819
gacactagcacaactgagcattggg

SEQ ID NO: 135347 - DNA, 25 bp, Artificial
  probe
  misc_feature (1)..(25): SEQ ID NO: 2951; WAN024CVT_at; Start 409; Stop 433
tacatcagtgtaattaaggacgacc

SEQ ID NO: 135348 - DNA, 25 bp, Artificial
  probe
  misc_feature (1)..(25): SEQ ID NO: 2951; WAN024CVT_at; Start 706; Stop 730
gataccgtcatactactgtttctga

SEQ ID NO: 135349 - DNA, 25 bp, Artificial
  probe
  misc_feature (1)..(25): SEQ ID NO: 2951; WAN024CVT_at; Start 1052; Stop 1076
tctttgcccatatccccagtgacaa

SEQ ID NO: 135350 - DNA, 25 bp, Artificial
  probe
  misc_feature (1)..(25): SEQ ID NO: 2951; WAN024CVT_at; Start 726; Stop 750
tctgacgaccagtatgattgccatc

SEQ ID NO: 135351 - DNA, 25 bp, Artificial
  probe
  misc_feature (1)..(25): SEQ ID NO: 2951; WAN024CVT_at; Start 379; Stop 403
tacctgtctgcctacatgatgaacg

SEQ ID NO: 135352 - DNA, 25 bp, Artificial
  probe
  misc_feature (1)..(25): SEQ ID NO: 2951; WAN024CVT_at; Start 396; Stop 420
gatgaacgccctctacatcagtgta

SEQ ID NO: 135353 - DNA, 25 bp, Artificial
  probe
  misc_feature (1)..(25): SEQ ID NO: 2951; WAN024CVT_at; Start 197; Stop 221
cgcaactctttctcgggattctagg

SEQ ID NO: 135354 - DNA, 25 bp, Artificial
  probe
  misc_feature (1)..(25): SEQ ID NO: 2951; WAN024CVT_at; Start 70; Stop 94
aacagctgtttttcatcattcggcg

SEQ ID NO: 135355 - DNA, 25 bp, Artificial
  probe
  misc_feature (1)..(25): SEQ ID NO: 2951; WAN024CVT_at; Start 992; Stop 1016
tgaccagtttcatcagttctacgat

SEQ ID NO: 135356 - DNA, 25 bp, Artificial
  probe
  misc_feature (1)..(25): SEQ ID NO: 2951; WAN024CVT_at; Start 364; Stop 388
tctgacaccttgagctacctgtctg

SEQ ID NO: 135357 - DNA, 25 bp, Artificial
  probe
  misc_feature (1)..(25): SEQ ID NO: 2951; WAN024CVT_at; Start 680; Stop 704
cgctggctgtgctcctgaggttaaa

SEQ ID NO: 135358 - DNA, 25 bp, Artificial
  probe
  misc_feature (1)..(25): SEQ ID NO: 2951; WAN024CVT_at; Start 1014; Stop 1038
gattatcggcattctcagccctcgc

SEQ ID NO: 135359 - DNA, 25 bp, Artificial
  probe
  misc_feature (1)..(25): SEQ ID NO: 2951; WAN024CVT_at; Start 624; Stop 648
tgaaatgtcacatacagcactgagt

SEQ ID NO: 135360 - DNA, 25 bp, Artificial
  probe
  misc_feature (1)..(25): SEQ ID NO: 2951; WAN024CVT_at; Start 909; Stop 933
cacgcacctcttggttttctgtgag

SEQ ID NO: 135361 - DNA, 25 bp, Artificial
  probe
  misc_feature (1)..(25): SEQ ID NO: 2951; WAN024CVT_at; Start 227; Stop 251
ttcaagaaaatagagtcaaacacgc

SEQ ID NO: 135362 - DNA, 25 bp, Artificial
  probe
  misc_feature (1)..(25): SEQ ID NO: 2951; WAN024CVT_at; Start 262; Stop 286
gccaaaatcaaaatcctgctctacg

SEQ ID NO: 135363 - DNA, 25 bp, Artificial
  probe
  misc_feature (1)..(25): SEQ ID NO: 2951; WAN024CVT_at; Start 129; Stop 153
ggctcagtacaatttcgctccgcta

SEQ ID NO: 135364 - DNA, 25 bp, Artificial
  probe
  misc_feature (1)..(25): SEQ ID NO: 2951; WAN024CVT_at; Start 453; Stop 477
caggcagtctctgatgagggttgtc

SEQ ID NO: 135365 - DNA, 25 bp, Artificial
  probe
  misc_feature (1)..(25): SEQ ID NO: 5673; WAN024CVU_at; Start 787; Stop 811
cacggtttactgatgtttcaaggag

SEQ ID NO: 135366 - DNA, 25 bp, Artificial
  probe
  misc_feature (1)..(25): SEQ ID NO: 5673; WAN024CVU_at; Start 824; Stop 848
cagatttgtttgacttcggaatagg

SEQ ID NO: 135367 - DNA, 25 bp, Artificial
  probe
  misc_feature (1)..(25): SEQ ID NO: 5673; WAN024CVU_at; Start 679; Stop 703
tattgccacggaataactagcttac

SEQ ID NO: 135368 - DNA, 25 bp, Artificial
  probe
  misc_feature (1)..(25): SEQ ID NO: 5673; WAN024CVU_at; Start 45; Stop 69
gaaggcagtgacaattagaacgaca

SEQ ID NO: 135369 - DNA, 25 bp, Artificial
  probe
  misc_feature (1)..(25): SEQ ID NO: 5673; WAN024CVU_at; Start 54; Stop 78
gacaattagaacgacacacacatat

SEQ ID NO: 135370 - DNA, 25 bp, Artificial
  probe
  misc_feature (1)..(25): SEQ ID NO: 5673; WAN024CVU_at; Start 637; Stop 661
caagaatttgtttttaaccatcatc

SEQ ID NO: 135371 - DNA, 25 bp, Artificial
  probe
  misc_feature (1)..(25): SEQ ID NO: 5673; WAN024CVU_at; Start 163; Stop 187
tatctacaattagcaaacgtcaccg

SEQ ID NO: 135372 - DNA, 25 bp, Artificial
  probe
  misc_feature (1)..(25): SEQ ID NO: 5673; WAN024CVU_at; Start 96; Stop 120
gctatttggtgatgcaggctatcta

SEQ ID NO: 135373 - DNA, 25 bp, Artificial
  probe
  misc_feature (1)..(25): SEQ ID NO: 5673; WAN024CVU_at; Start 240; Stop 264
gggaaaatctggtgtcctattatca

SEQ ID NO: 135374 - DNA, 25 bp, Artificial
  probe
  misc_feature (1)..(25): SEQ ID NO: 5673; WAN024CVU_at; Start 358; Stop 382
gatacagccaaagaaagcattttag

SEQ ID NO: 135375 - DNA, 25 bp, Artificial
  probe
  misc_feature (1)..(25): SEQ ID NO: 5673; WAN024CVU_at; Start 180; Stop 204
cgtcaccgctaaaaaattaatagag

SEQ ID NO: 135376 - DNA, 25 bp, Artificial
  probe
  misc_feature (1)..(25): SEQ ID NO: 5673; WAN024CVU_at; Start 227; Stop 251
tagactttgcattgggaaaatctgg

SEQ ID NO: 135377 - DNA, 25 bp, Artificial
  probe
  misc_feature (1)..(25): SEQ ID NO: 5673; WAN024CVU_at; Start 374; Stop 398
gcattttagactatagctttgctca

SEQ ID NO: 135378 - DNA, 25 bp, Artificial
  probe
  misc_feature (1)..(25): SEQ ID NO: 5673; WAN024CVU_at; Start 280; Stop 304
caatttaccaatgacaatactctta

SEQ ID NO: 135379 - DNA, 25 bp, Artificial
  probe
  misc_feature (1)..(25): SEQ ID NO: 5673; WAN024CVU_at; Start 213; Stop 237
tactctagaggaaatagactttgca

SEQ ID NO: 135380 - DNA, 25 bp, Artificial
  probe
  misc_feature (1)..(25): SEQ ID NO: 5673; WAN024CVU_at; Start 714; Stop 738
tgtctacaatcaaaacaaattactg

SEQ ID NO: 135381 - DNA, 25 bp, Artificial
  probe
  misc_feature (1)..(25): SEQ ID NO: 5673; WAN024CVU_at; Start 772; Stop 796
tctgaacgagatgatcacggtttac

SEQ ID NO: 135382 - DNA, 25 bp, Artificial
  probe
  misc_feature (1)..(25): SEQ ID NO: 5673; WAN024CVU_at; Start 588; Stop 612
tctttgtatgtacgattgtgacgga

SEQ ID NO: 135383 - DNA, 25 bp, Artificial
  probe
  misc_feature (1)..(25): SEQ ID NO: 5673; WAN024CVU_at; Start 565; Stop 589
ggaatttccggaataatcttatatc

SEQ ID NO: 135384 - DNA, 25 bp, Artificial
  probe
  misc_feature (1)..(25): SEQ ID NO: 5673; WAN024CVU_at; Start 665; Stop 689
aaatgatgacaggatattgccacgg

SEQ ID NO: 135385 - DNA, 25 bp, Artificial
  probe
  misc_feature (1)..(25): SEQ ID NO: 5673; WAN024CVU_at; Start 696; Stop 720
tagcttactacaaaccactgtctac

SEQ ID NO: 135386 - DNA, 25 bp, Artificial
  probe
  misc_feature (1)..(25): SEQ ID NO: 5673; WAN024CVU_at; Start 9; Stop 33
cccagaactggattctaaaatactc

SEQ ID NO: 135387 - DNA, 25 bp, Artificial
  probe
  misc_feature (1)..(25): SEQ ID NO: 5673; WAN024CVU_at; Start 82; Stop 106
tatcaatactcactgctatttggtg

SEQ ID NO: 135388 - DNA, 25 bp, Artificial
  probe
  misc_feature (1)..(25): SEQ ID NO: 5673; WAN024CVU_at; Start 425; Stop 449
tatttgcctattctaaagtcttaga

SEQ ID NO: 135389 - DNA, 25 bp, Artificial
  probe
  misc_feature (1)..(25): SEQ ID NO: 5673; WAN024CVU_at; Start 202; Stop 226
gagaattatgatactctagaggaaa

SEQ ID NO: 135390 - DNA, 25 bp, Artificial
  probe
  misc_feature (1)..(25): SEQ ID NO: 5673; WAN024CVU_at; Start 756; Stop 780
ggtaattttagcatgttctgaacga

SEQ ID NO: 135391 - DNA, 25 bp, Artificial
  probe
  misc_feature (1)..(25): SEQ ID NO: 5673; WAN024CVU_at; Start 32; Stop 56
tctctatcatcaagaaggcagtgac

SEQ ID NO: 135392 - DNA, 25 bp, Artificial
  probe
  misc_feature (1)..(25): SEQ ID NO: 5673; WAN024CVU_at; Start 110; Stop 134
caggctatctatggttactcctaca

SEQ ID NO: 135393 - DNA, 25 bp, Artificial
  probe
  misc_feature (1)..(25): SEQ ID NO: 5673; WAN024CVU_at; Start 343; Stop 367
tatttcctacaaagagatacagcca

SEQ ID NO: 135394 - DNA, 25 bp, Artificial
  probe
  misc_feature (1)..(25): SEQ ID NO: 5673; WAN024CVU_at; Start 798; Stop 822
gatgtttcaaggagatagtggtaaa

SEQ ID NO: 135395 - DNA, 25 bp, Artificial
  probe
  misc_feature (1)..(25): SEQ ID NO: 5673; WAN024CVU_at; Start 833; Stop 857
ttgacttcggaataggaagcatggg

SEQ ID NO: 135396 - DNA, 25 bp, Artificial
  probe
  misc_feature (1)..(25): SEQ ID NO: 5673; WAN024CVU_at; Start 856; Stop 880
gggtatattggtgtctattaactaa

SEQ ID NO: 135397 - DNA, 25 bp, Artificial
  probe
  misc_feature (1)..(25): SEQ ID NO: 5673; WAN024CVU_at; Start 600; Stop 624
cgattgtgacggaaacaaagatatt

SEQ ID NO: 135398 - DNA, 25 bp, Artificial
  probe
  misc_feature (1)..(25): SEQ ID NO: 5673; WAN024CVU_at; Start 385; Stop 409
tatagctttgctcatggatattgtg

SEQ ID NO: 135399 - DNA, 25 bp, Artificial
  probe
  misc_feature (1)..(25): SEQ ID NO: 2966; WAN024CVV_at; Start 204; Stop 228
gcgatatcatttgccgaaggttcaa

SEQ ID NO: 135400 - DNA, 25 bp, Artificial
  probe
  misc_feature (1)..(25): SEQ ID NO: 2966; WAN024CVV_at; Start 59; Stop 83
tagtccagggacacgttccaaggtc

SEQ ID NO: 135401 - DNA, 25 bp, Artificial
  probe
  misc_feature (1)..(25): SEQ ID NO: 2966; WAN024CVV_at; Start 148; Stop 172
cccaagattcgagtgtatgagaatg

SEQ ID NO: 135402 - DNA, 25 bp, Artificial
  probe
  misc_feature (1)..(25): SEQ ID NO: 2966; WAN024CVV_at; Start 218; Stop 242
cgaaggttcaaaggagtgaatacca

SEQ ID NO: 135403 - DNA, 25 bp, Artificial
  probe
  misc_feature (1)..(25): SEQ ID NO: 2966; WAN024CVV_at; Start 70; Stop 94
cacgttccaaggtcattccctcaga

SEQ ID NO: 135404 - DNA, 25 bp, Artificial
  probe
  misc_feature (1)..(25): SEQ ID NO: 2966; WAN024CVV_at; Start 139; Stop 163
gacttcctgcccaagattcgagtgt

SEQ ID NO: 135405 - DNA, 25 bp, Artificial
  probe
  misc_feature (1)..(25): SEQ ID NO: 2966; WAN024CVV_at; Start 9; Stop 33
gggtcatagagcgttttttcatcaa

SEQ ID NO: 135406 - DNA, 25 bp, Artificial
  probe
  misc_feature (1)..(25): SEQ ID NO: 2966; WAN024CVV_at; Start 270; Stop 294
ttcaagtcaccagatacttccttaa

SEQ ID NO: 135407 - DNA, 25 bp, Artificial
  probe
  misc_feature (1)..(25): SEQ ID NO: 2966; WAN024CVV_at; Start 44; Stop 68
tgcttccacatcctctagtccaggg

SEQ ID NO: 135408 - DNA, 25 bp, Artificial
  probe
  misc_feature (1)..(25): SEQ ID NO: 2966; WAN024CVV_at; Start 238; Stop 262
taccactacttgactgaatcatccg

SEQ ID NO: 135409 - DNA, 25 bp, Artificial
  probe
  misc_feature (1)..(25): SEQ ID NO: 2966; WAN024CVV_at; Start 4; Stop 28
tgtgagggtcatagagcgttttttc

SEQ ID NO: 135410 - DNA, 25 bp, Artificial
  probe
  misc_feature (1)..(25): SEQ ID NO: 2966; WAN024CVV_at; Start 50; Stop 74
cacatcctctagtccagggacacgt

SEQ ID NO: 135411 - DNA, 25 bp, Artificial
  probe
  misc_feature (1)..(25): SEQ ID NO: 2966; WAN024CVV_at; Start 127; Stop 151
gatttggatccagacttcctgccca

SEQ ID NO: 135412 - DNA, 25 bp, Artificial
  probe
  misc_feature (1)..(25): SEQ ID NO: 2966; WAN024CVV_at; Start 64; Stop 88
cagggacacgttccaaggtcattcc

SEQ ID NO: 135413 - DNA, 25 bp, Artificial
  probe
  misc_feature (1)..(25): SEQ ID NO: 2966; WAN024CVV_at; Start 230; Stop 254
ggagtgaataccactacttgactga

SEQ ID NO: 135414 - DNA, 25 bp, Artificial
  probe
  misc_feature (1)..(25): SEQ ID NO: 2966; WAN024CVV_at; Start 131; Stop 155
tggatccagacttcctgcccaagat

SEQ ID NO: 135415 - DNA, 25 bp, Artificial
  probe
  misc_feature (1)..(25): SEQ ID NO: 2966; WAN024CVV_at; Start 182; Stop 206
gacatctgcatcatagatggctgcg

SEQ ID NO: 135416 - DNA, 25 bp, Artificial
  probe
  misc_feature (1)..(25): SEQ ID NO: 2966; WAN024CVV_at; Start 80; Stop 104
ggtcattccctcagaagcctctaag

SEQ ID NO: 135417 - DNA, 25 bp, Artificial
  probe
  misc_feature (1)..(25): SEQ ID NO: 2966; WAN024CVV_at; Start 163; Stop 187
tatgagaatggtaaacaaagacatc

SEQ ID NO: 135418 - DNA, 25 bp, Artificial
  probe
  misc_feature (1)..(25): SEQ ID NO: 2966; WAN024CVV_at; Start 13; Stop 37
catagagcgttttttcatcaactcc

SEQ ID NO: 135419 - DNA, 25 bp, Artificial
  probe
  misc_feature (1)..(25): SEQ ID NO: 2966; WAN024CVV_at; Start 201; Stop 225
gctgcgatatcatttgccgaaggtt

SEQ ID NO: 135420 - DNA, 25 bp, Artificial
  probe
  misc_feature (1)..(25): SEQ ID NO: 2966; WAN024CVV_at; Start 188; Stop 212
tgcatcatagatggctgcgatatca

SEQ ID NO: 135421 - DNA, 25 bp, Artificial
  probe
  misc_feature (1)..(25): SEQ ID NO: 2966; WAN024CVV_at; Start 21; Stop 45
gttttttcatcaactccatcccctg

SEQ ID NO: 135422 - DNA, 25 bp, Artificial
  probe
  misc_feature (1)..(25): SEQ ID NO: 2966; WAN024CVV_at; Start 259; Stop 283
tccgaacatcattcaagtcaccaga

SEQ ID NO: 135423 - DNA, 25 bp, Artificial
  probe
  misc_feature (1)..(25): SEQ ID NO: 2966; WAN024CVV_at; Start 171; Stop 195
tggtaaacaaagacatctgcatcat

SEQ ID NO: 135424 - DNA, 25 bp, Artificial
  probe
  misc_feature (1)..(25): SEQ ID NO: 2966; WAN024CVV_at; Start 144; Stop 168
cctgcccaagattcgagtgtatgag

SEQ ID NO: 135425 - DNA, 25 bp, Artificial
  probe
  misc_feature (1)..(25): SEQ ID NO: 2966; WAN024CVV_at; Start 195; Stop 219
tagatggctgcgatatcatttgccg

SEQ ID NO: 135426 - DNA, 25 bp, Artificial
  probe
  misc_feature (1)..(25): SEQ ID NO: 2966; WAN024CVV_at; Start 211; Stop 235
catttgccgaaggttcaaaggagtg

SEQ ID NO: 135427 - DNA, 25 bp, Artificial
  probe
  misc_feature (1)..(25): SEQ ID NO: 2966; WAN024CVV_at; Start 222; Stop 246
ggttcaaaggagtgaataccactac

SEQ ID NO: 135428 - DNA, 25 bp, Artificial
  probe
  misc_feature (1)..(25): SEQ ID NO: 2966; WAN024CVV_at; Start 96; Stop 120
gcctctaagaccttcactttggatt

SEQ ID NO: 135429 - DNA, 25 bp, Artificial
  probe
  misc_feature (1)..(25): SEQ ID NO: 2966; WAN024CVV_at; Start 244; Stop 268
tacttgactgaatcatccgaacatc

SEQ ID NO: 135430 - DNA, 25 bp, Artificial
  probe
  misc_feature (1)..(25): SEQ ID NO: 2966; WAN024CVV_at; Start 93; Stop 117
gaagcctctaagaccttcactttgg

SEQ ID NO: 135431 - DNA, 25 bp, Artificial
  probe
  misc_feature (1)..(25): SEQ ID NO: 2966; WAN024CVV_at; Start 262; Stop 286
gaacatcattcaagtcaccagatac

SEQ ID NO: 135432 - DNA, 25 bp, Artificial
  probe
  misc_feature (1)..(25): SEQ ID NO: 2966; WAN024CVV_at; Start 121; Stop 145
tttttagatttggatccagacttcc

SEQ ID NO: 135433 - DNA, 25 bp, Artificial
  probe
  misc_feature (1)..(25): SEQ ID NO: 2693; WAN024CVW_at; Start 555; Stop 579
caaaaaagctcaggaattgactaag

SEQ ID NO: 135434 - DNA, 25 bp, Artificial
  probe
  misc_feature (1)..(25): SEQ ID NO: 2693; WAN024CVW_at; Start 4; Stop 28
gttaaggagttgttcatgaagaaac

SEQ ID NO: 135435 - DNA, 25 bp, Artificial
  probe
  misc_feature (1)..(25): SEQ ID NO: 2693; WAN024CVW_at; Start 617; Stop 641
catttgtaacacaacatacagcctt

SEQ ID NO: 135436 - DNA, 25 bp, Artificial
  probe
  misc_feature (1)..(25): SEQ ID NO: 2693; WAN024CVW_at; Start 140; Stop 164
tctacgctatggttaaggaagtatc

SEQ ID NO: 135437 - DNA, 25 bp, Artificial
  probe
  misc_feature (1)..(25): SEQ ID NO: 2693; WAN024CVW_at; Start 862; Stop 886
gacccacaaaatgacaagacctatt

SEQ ID NO: 135438 - DNA, 25 bp, Artificial
  probe
  misc_feature (1)..(25): SEQ ID NO: 2693; WAN024CVW_at; Start 454; Stop 478
cctgaaaaagctggagaagaagccc

SEQ ID NO: 135439 - DNA, 25 bp, Artificial
  probe
  misc_feature (1)..(25): SEQ ID NO: 2693; WAN024CVW_at; Start 443; Stop 467
catggctagatcctgaaaaagctgg

SEQ ID NO: 135440 - DNA, 25 bp, Artificial
  probe
  misc_feature (1)..(25): SEQ ID NO: 2693; WAN024CVW_at; Start 598; Stop 622
gaaaaagcgactcagaaaacatttg

SEQ ID NO: 135441 - DNA, 25 bp, Artificial
  probe
  misc_feature (1)..(25): SEQ ID NO: 2693; WAN024CVW_at; Start 805; Stop 829
gaaactcttgtcaaatcaacaggtg

SEQ ID NO: 135442 - DNA, 25 bp, Artificial
  probe
  misc_feature (1)..(25): SEQ ID NO: 2693; WAN024CVW_at; Start 123; Stop 147
gaccagtttttatcctatctacgct

SEQ ID NO: 135443 - DNA, 25 bp, Artificial
  probe
  misc_feature (1)..(25): SEQ ID NO: 2693; WAN024CVW_at; Start 280; Stop 304
catacactcgaatcttgggcaggaa

SEQ ID NO: 135444 - DNA, 25 bp, Artificial
  probe
  misc_feature (1)..(25): SEQ ID NO: 2693; WAN024CVW_at; Start 508; Stop 532
gatagtgagcataaagagacttatc

SEQ ID NO: 135445 - DNA, 25 bp, Artificial
  probe
  misc_feature (1)..(25): SEQ ID NO: 2693; WAN024CVW_at; Start 652; Stop 676
gcgaagagatttgggcttaatcaac

SEQ ID NO: 135446 - DNA, 25 bp, Artificial
  probe
  misc_feature (1)..(25): SEQ ID NO: 2693; WAN024CVW_at; Start 467; Stop 491
gagaagaagcccaaattatcgctga

SEQ ID NO: 135447 - DNA, 25 bp, Artificial
  probe
  misc_feature (1)..(25): SEQ ID NO: 2693; WAN024CVW_at; Start 182; Stop 206
ttcggatgattcagtcaagtagtgg

SEQ ID NO: 135448 - DNA, 25 bp, Artificial
  probe
  misc_feature (1)..(25): SEQ ID NO: 2693; WAN024CVW_at; Start 326; Stop 350
aatccaaagtgaaggtcttagaggc

SEQ ID NO: 135449 - DNA, 25 bp, Artificial
  probe
  misc_feature (1)..(25): SEQ ID NO: 2693; WAN024CVW_at; Start 430; Stop 454
tatgaccctcacacatggctagatc

SEQ ID NO: 135450 - DNA, 25 bp, Artificial
  probe
  misc_feature (1)..(25): SEQ ID NO: 2693; WAN024CVW_at; Start 355; Stop 379
gagggaatgaccttggaacgtgtcc

SEQ ID NO: 135451 - DNA, 25 bp, Artificial
  probe
  misc_feature (1)..(25): SEQ ID NO: 2693; WAN024CVW_at; Start 85; Stop 109
caaaaggaaagtcagacaggaaagg

SEQ ID NO: 135452 - DNA, 25 bp, Artificial
  probe
  misc_feature (1)..(25): SEQ ID NO: 2693; WAN024CVW_at; Start 494; Stop 518
aactttcagaggtggatagtgagca

SEQ ID NO: 135453 - DNA, 25 bp, Artificial
  probe
  misc_feature (1)..(25): SEQ ID NO: 2693; WAN024CVW_at; Start 220; Stop 244
gaaccttcggcaaatgatatcgcag

SEQ ID NO: 135454 - DNA, 25 bp, Artificial
  probe
  misc_feature (1)..(25): SEQ ID NO: 2693; WAN024CVW_at; Start 483; Stop 507
tatcgctgataaactttcagaggtg

SEQ ID NO: 135455 - DNA, 25 bp, Artificial
  probe
  misc_feature (1)..(25): SEQ ID NO: 2693; WAN024CVW_at; Start 341; Stop 365
tcttagaggcttctgagggaatgac

SEQ ID NO: 135456 - DNA, 25 bp, Artificial
  probe
  misc_feature (1)..(25): SEQ ID NO: 2693; WAN024CVW_at; Start 540; Stop 564
tgcgcaagcctttatcaaaaaagct

SEQ ID NO: 135457 - DNA, 25 bp, Artificial
  probe
  misc_feature (1)..(25): SEQ ID NO: 2693; WAN024CVW_at; Start 295; Stop 319
tgggcaggaagtctggatccaaatc

SEQ ID NO: 135458 - DNA, 25 bp, Artificial
  probe
  misc_feature (1)..(25): SEQ ID NO: 2693; WAN024CVW_at; Start 74; Stop 98
gggcttgtggtcaaaaggaaagtca

SEQ ID NO: 135459 - DNA, 25 bp, Artificial
  probe
  misc_feature (1)..(25): SEQ ID NO: 2693; WAN024CVW_at; Start 418; Stop 442
gaaaaaacgctctatgaccctcaca

SEQ ID NO: 135460 - DNA, 25 bp, Artificial
  probe
  misc_feature (1)..(25): SEQ ID NO: 2693; WAN024CVW_at; Start 636; Stop 660
agccttttcttatctagcgaagaga

SEQ ID NO: 135461 - DNA, 25 bp, Artificial
  probe
  misc_feature (1)..(25): SEQ ID NO: 2693; WAN024CVW_at; Start 267; Stop 291
tgtttaccattctcatacactcgaa

SEQ ID NO: 135462 - DNA, 25 bp, Artificial
  probe
  misc_feature (1)..(25): SEQ ID NO: 2693; WAN024CVW_at; Start 787; Stop 811
gcttcttcaaaagtagctgaaactc

SEQ ID NO: 135463 - DNA, 25 bp, Artificial
  probe
  misc_feature (1)..(25): SEQ ID NO: 2693; WAN024CVW_at; Start 161; Stop 185
tatctggtgacttgaatgatgttcg

SEQ ID NO: 135464 - DNA, 25 bp, Artificial
  probe
  misc_feature (1)..(25): SEQ ID NO: 2693; WAN024CVW_at; Start 230; Stop 254
caaatgatatcgcagccatctatga

SEQ ID NO: 135465 - DNA, 25 bp, Artificial
  probe
  misc_feature (1)..(25): SEQ ID NO: 2693; WAN024CVW_at; Start 691; Stop 715
atctctcctgaacaagaaccaagtc

SEQ ID NO: 135466 - DNA, 25 bp, Artificial
  probe
  misc_feature (1)..(25): SEQ ID NO: 2693; WAN024CVW_at; Start 665; Stop 689
ggcttaatcaacttggtattgcagg

SEQ ID NO: 135467 - DNA, 25 bp, Artificial
  probe
  misc_feature (1)..(25): SEQ ID NO: 5283; WAN024CVX_at; Start 67; Stop 91
tgcctcgatacctgggaagatgaag

SEQ ID NO: 135468 - DNA, 25 bp, Artificial
  probe
  misc_feature (1)..(25): SEQ ID NO: 5283; WAN024CVX_at; Start 65; Stop 89
cctgcctcgatacctgggaagatga

SEQ ID NO: 135469 - DNA, 25 bp, Artificial
  probe
  misc_feature (1)..(25): SEQ ID NO: 5283; WAN024CVX_at; Start 82; Stop 106
gaagatgaagacatttgcttgacca

SEQ ID NO: 135470 - DNA, 25 bp, Artificial
  probe
  misc_feature (1)..(25): SEQ ID NO: 5283; WAN024CVX_at; Start 72; Stop 96
cgatacctgggaagatgaagacatt

SEQ ID NO: 135471 - DNA, 25 bp, Artificial
  probe
  misc_feature (1)..(25): SEQ ID NO: 5283; WAN024CVX_at; Start 1; Stop 25
ttgcaaaacaggtcctacagccgca

SEQ ID NO: 135472 - DNA, 25 bp, Artificial
  probe
  misc_feature (1)..(25): SEQ ID NO: 5283; WAN024CVX_at; Start 184; Stop 208
ttcaaggtcaggacgcaagtcgtga

SEQ ID NO: 135473 - DNA, 25 bp, Artificial
  probe
  misc_feature (1)..(25): SEQ ID NO: 5283; WAN024CVX_at; Start 31; Stop 55
acccaggcgttcagccatcttgtaa

SEQ ID NO: 135474 - DNA, 25 bp, Artificial
  probe
  misc_feature (1)..(25): SEQ ID NO: 5283; WAN024CVX_at; Start 197; Stop 221
cgcaagtcgtgagcaattttagttg

SEQ ID NO: 135475 - DNA, 25 bp, Artificial
  probe
  misc_feature (1)..(25): SEQ ID NO: 5283; WAN024CVX_at; Start 85; Stop 109
gatgaagacatttgcttgaccagct

SEQ ID NO: 135476 - DNA, 25 bp, Artificial
  probe
  misc_feature (1)..(25): SEQ ID NO: 5283; WAN024CVX_at; Start 173; Stop 197
tcaccatcgatttcaaggtcaggac

SEQ ID NO: 135477 - DNA, 25 bp, Artificial
  probe
  misc_feature (1)..(25): SEQ ID NO: 5283; WAN024CVX_at; Start 220; Stop 244
tgcttcaacgaccttatcaacgctt

SEQ ID NO: 135478 - DNA, 25 bp, Artificial
  probe
  misc_feature (1)..(25): SEQ ID NO: 5283; WAN024CVX_at; Start 195; Stop 219
gacgcaagtcgtgagcaattttagt

SEQ ID NO: 135479 - DNA, 25 bp, Artificial
  probe
  misc_feature (1)..(25): SEQ ID NO: 5283; WAN024CVX_at; Start 30; Stop 54
cacccaggcgttcagccatcttgta

SEQ ID NO: 135480 - DNA, 25 bp, Artificial
  probe
  misc_feature (1)..(25): SEQ ID NO: 5283; WAN024CVX_at; Start 209; Stop 233
gcaattttagttgcttcaacgacct

SEQ ID NO: 135481 - DNA, 25 bp, Artificial
  probe
  misc_feature (1)..(25): SEQ ID NO: 5283; WAN024CVX_at; Start 179; Stop 203
tcgatttcaaggtcaggacgcaagt

SEQ ID NO: 135482 - DNA, 25 bp, Artificial
  probe
  misc_feature (1)..(25): SEQ ID NO: 5283; WAN024CVX_at; Start 224; Stop 248
tcaacgaccttatcaacgctttcac

SEQ ID NO: 135483 - DNA, 25 bp, Artificial
  probe
  misc_feature (1)..(25): SEQ ID NO: 5283; WAN024CVX_at; Start 228; Stop 252
cgaccttatcaacgctttcaccaaa

SEQ ID NO: 135484 - DNA, 25 bp, Artificial
  probe
  misc_feature (1)..(25): SEQ ID NO: 5283; WAN024CVX_at; Start 188; Stop 212
aggtcaggacgcaagtcgtgagcaa

SEQ ID NO: 135485 - DNA, 25 bp, Artificial
  probe
  misc_feature (1)..(25): SEQ ID NO: 5283; WAN024CVX_at; Start 7; Stop 31
aacaggtcctacagccgcaaagcca

SEQ ID NO: 135486 - DNA, 25 bp, Artificial
  probe
  misc_feature (1)..(25): SEQ ID NO: 5283; WAN024CVX_at; Start 177; Stop 201
catcgatttcaaggtcaggacgcaa

SEQ ID NO: 135487 - DNA, 25 bp, Artificial
  probe
  misc_feature (1)..(25): SEQ ID NO: 5283; WAN024CVX_at; Start 77; Stop 101
cctgggaagatgaagacatttgctt

SEQ ID NO: 135488 - DNA, 25 bp, Artificial
  probe
  misc_feature (1)..(25): SEQ ID NO: 5283; WAN024CVX_at; Start 191; Stop 215
tcaggacgcaagtcgtgagcaattt

SEQ ID NO: 135489 - DNA, 25 bp, Artificial
  probe
  misc_feature (1)..(25): SEQ ID NO: 5283; WAN024CVX_at; Start 234; Stop 258
tatcaacgctttcaccaaaccctga

SEQ ID NO: 135490 - DNA, 25 bp, Artificial
  probe
  misc_feature (1)..(25): SEQ ID NO: 5283; WAN024CVX_at; Start 216; Stop 240
tagttgcttcaacgaccttatcaac

SEQ ID NO: 135491 - DNA, 25 bp, Artificial
  probe
  misc_feature (1)..(25): SEQ ID NO: 5283; WAN024CVX_at; Start 158; Stop 182
gcatcaaattgcaactcaccatcga

SEQ ID NO: 135492 - DNA, 25 bp, Artificial
  probe
  misc_feature (1)..(25): SEQ ID NO: 5283; WAN024CVX_at; Start 70; Stop 94
ctcgatacctgggaagatgaagaca

SEQ ID NO: 135493 - DNA, 25 bp, Artificial
  probe
  misc_feature (1)..(25): SEQ ID NO: 5283; WAN024CVX_at; Start 87; Stop 111
tgaagacatttgcttgaccagctac

SEQ ID NO: 135494 - DNA, 25 bp, Artificial
  probe
  misc_feature (1)..(25): SEQ ID NO: 5283; WAN024CVX_at; Start 176; Stop 200
ccatcgatttcaaggtcaggacgca

SEQ ID NO: 135495 - DNA, 25 bp, Artificial
  probe
  misc_feature (1)..(25): SEQ ID NO: 5283; WAN024CVX_at; Start 181; Stop 205
gatttcaaggtcaggacgcaagtcg

SEQ ID NO: 135496 - DNA, 25 bp, Artificial
  probe
  misc_feature (1)..(25): SEQ ID NO: 5283; WAN024CVX_at; Start 167; Stop 191
tgcaactcaccatcgatttcaaggt

SEQ ID NO: 135497 - DNA, 25 bp, Artificial
  probe
  misc_feature (1)..(25): SEQ ID NO: 5283; WAN024CVX_at; Start 62; Stop 86
tttcctgcctcgatacctgggaaga

SEQ ID NO: 135498 - DNA, 25 bp, Artificial
  probe
  misc_feature (1)..(25): SEQ ID NO: 5283; WAN024CVX_at; Start 3; Stop 27
gcaaaacaggtcctacagccgcaaa

SEQ ID NO: 135499 - DNA, 25 bp, Artificial
  probe
  misc_feature (1)..(25): SEQ ID NO: 5283; WAN024CVX_at; Start 59; Stop 83
atatttcctgcctcgatacctggga

SEQ ID NO: 135500 - DNA, 25 bp, Artificial
  probe
  misc_feature (1)..(25): SEQ ID NO: 5283; WAN024CVX_at; Start 75; Stop 99
tacctgggaagatgaagacatttgc

SEQ ID NO: 135501 - DNA, 25 bp, Artificial
  probe
  misc_feature (1)..(25): SEQ ID NO: 2221; WAN024CVY_at; Start 933; Stop 957
caagttgaccctcatcacagcagct

SEQ ID NO: 135502 - DNA, 25 bp, Artificial
  probe
  misc_feature (1)..(25): SEQ ID NO: 2221; WAN024CVY_at; Start 356; Stop 380
gaatggtgtcaggagcgattcactc

SEQ ID NO: 135503 - DNA, 25 bp, Artificial
  probe
  misc_feature (1)..(25): SEQ ID NO: 2221; WAN024CVY_at; Start 677; Stop 701
tgcgtcctgaccttgaaatcgatgg

SEQ ID NO: 135504 - DNA, 25 bp, Artificial
  probe
  misc_feature (1)..(25): SEQ ID NO: 2221; WAN024CVY_at; Start 919; Stop 943
gcagatgatgtttacaagttgaccc

SEQ ID NO: 135505 - DNA, 25 bp, Artificial
  probe
  misc_feature (1)..(25): SEQ ID NO: 2221; WAN024CVY_at; Start 429; Stop 453
aaatgtaactcgtacttcaggagcc

SEQ ID NO: 135506 - DNA, 25 bp, Artificial
  probe
  misc_feature (1)..(25): SEQ ID NO: 2221; WAN024CVY_at; Start 695; Stop 719
tcgatggtgagttgcaatttgatgc

SEQ ID NO: 135507 - DNA, 25 bp, Artificial
  probe
  misc_feature (1)..(25): SEQ ID NO: 2221; WAN024CVY_at; Start 45; Stop 69
tgctcgtatcgttctccctgaaggg

SEQ ID NO: 135508 - DNA, 25 bp, Artificial
  probe
  misc_feature (1)..(25): SEQ ID NO: 2221; WAN024CVY_at; Start 267; Stop 291
caaaatgactgaagaagatgtacgc

SEQ ID NO: 135509 - DNA, 25 bp, Artificial
  probe
  misc_feature (1)..(25): SEQ ID NO: 2221; WAN024CVY_at; Start 540; Stop 564
tgccatcaactcagcaatcacagct

SEQ ID NO: 135510 - DNA, 25 bp, Artificial
  probe
  misc_feature (1)..(25): SEQ ID NO: 2221; WAN024CVY_at; Start 30; Stop 54
ccttgttggtaaaaatgctcgtatc

SEQ ID NO: 135511 - DNA, 25 bp, Artificial
  probe
  misc_feature (1)..(25): SEQ ID NO: 2221; WAN024CVY_at; Start 13; Stop 37
gaaagtctcaaagccaaccttgttg

SEQ ID NO: 135512 - DNA, 25 bp, Artificial
  probe
  misc_feature (1)..(25): SEQ ID NO: 2221; WAN024CVY_at; Start 662; Stop 686
aaattgctcacgacttgcgtcctga

SEQ ID NO: 135513 - DNA, 25 bp, Artificial
  probe
  misc_feature (1)..(25): SEQ ID NO: 2221; WAN024CVY_at; Start 576; Stop 600
catcgaacctaaaattgccatgttg

SEQ ID NO: 135514 - DNA, 25 bp, Artificial
  probe
  misc_feature (1)..(25): SEQ ID NO: 2221; WAN024CVY_at; Start 198; Stop 222
ggtcatcgaccctcaacattatcct

SEQ ID NO: 135515 - DNA, 25 bp, Artificial
  probe
  misc_feature (1)..(25): SEQ ID NO: 2221; WAN024CVY_at; Start 560; Stop 584
cagctaagatgtttggcatcgaacc

SEQ ID NO: 135516 - DNA, 25 bp, Artificial
  probe
  misc_feature (1)..(25): SEQ ID NO: 2221; WAN024CVY_at; Start 898; Stop 922
gatctttctcgtggatgtaatgcag

SEQ ID NO: 135517 - DNA, 25 bp, Artificial
  probe
  misc_feature (1)..(25): SEQ ID NO: 2221; WAN024CVY_at; Start 600; Stop 624
gagctattctactaaaggttcaggg

SEQ ID NO: 135518 - DNA, 25 bp, Artificial
  probe
  misc_feature (1)..(25): SEQ ID NO: 2221; WAN024CVY_at; Start 766; Stop 790
gtagctggtcaagcaaatgtcttca

SEQ ID NO: 135519 - DNA, 25 bp, Artificial
  probe
  misc_feature (1)..(25): SEQ ID NO: 2221; WAN024CVY_at; Start 289; Stop 313
cgcaaggttttggttgaagatgtca

SEQ ID NO: 135520 - DNA, 25 bp, Artificial
  probe
  misc_feature (1)..(25): SEQ ID NO: 2221; WAN024CVY_at; Start 788; Stop 812
tcatcttcccaggtatcgaggcagg

SEQ ID NO: 135521 - DNA, 25 bp, Artificial
  probe
  misc_feature (1)..(25): SEQ ID NO: 2221; WAN024CVY_at; Start 416; Stop 440
tcaaaactcgtccaaatgtaactcg

SEQ ID NO: 135522 - DNA, 25 bp, Artificial
  probe
  misc_feature (1)..(25): SEQ ID NO: 2221; WAN024CVY_at; Start 183; Stop 207
catggatggttatgaggtcatcgac

SEQ ID NO: 135523 - DNA, 25 bp, Artificial
  probe
  misc_feature (1)..(25): SEQ ID NO: 2221; WAN024CVY_at; Start 478; Stop 502
cgttacctatttggagactgtgcca

SEQ ID NO: 135524 - DNA, 25 bp, Artificial
  probe
  misc_feature (1)..(25): SEQ ID NO: 2221; WAN024CVY_at; Start 823; Stop 847
tacaagatggctgaacgcctgggtg

SEQ ID NO: 135525 - DNA, 25 bp, Artificial
  probe
  misc_feature (1)..(25): SEQ ID NO: 2221; WAN024CVY_at; Start 872; Stop 896
tgcaaggtttaaacaagccagttaa

SEQ ID NO: 135526 - DNA, 25 bp, Artificial
  probe
  misc_feature (1)..(25): SEQ ID NO: 2221; WAN024CVY_at; Start 632; Stop 656
aaagcgttgataaggtcgttgaagc

SEQ ID NO: 135527 - DNA, 25 bp, Artificial
  probe
  misc_feature (1)..(25): SEQ ID NO: 2221; WAN024CVY_at; Start 126; Stop 150
tcctgttttgcttggaaatcctgaa

SEQ ID NO: 135528 - DNA, 25 bp, Artificial
  probe
  misc_feature (1)..(25): SEQ ID NO: 2221; WAN024CVY_at; Start 448; Stop 472
ggagccttcctcatggttcgtggta

SEQ ID NO: 135529 - DNA, 25 bp, Artificial
  probe
  misc_feature (1)..(25): SEQ ID NO: 2221; WAN024CVY_at; Start 239; Stop 263
tttctgccttggtggagcgtcgcaa

SEQ ID NO: 135530 - DNA, 25 bp, Artificial
  probe
  misc_feature (1)..(25): SEQ ID NO: 2221; WAN024CVY_at; Start 948; Stop 972
cacagcagctcaagcagttcatcaa

SEQ ID NO: 135531 - DNA, 25 bp, Artificial
  probe
  misc_feature (1)..(25): SEQ ID NO: 2221; WAN024CVY_at; Start 370; Stop 394
gcgattcactcaacagcttcaacag

SEQ ID NO: 135532 - DNA, 25 bp, Artificial
  probe
  misc_feature (1)..(25): SEQ ID NO: 2221; WAN024CVY_at; Start 523; Stop 547
gaagccttggctgaaattgccatca

SEQ ID NO: 135533 - DNA, 25 bp, Artificial
  probe
  misc_feature (1)..(25): SEQ ID NO: 2221; WAN024CVY_at; Start 846; Stop 870
tggctttgcggctgtaggacctgtt

SEQ ID NO: 135534 - DNA, 25 bp, Artificial
  probe
  misc_feature (1)..(25): SEQ ID NO: 2221; WAN024CVY_at; Start 304; Stop 328
gaagatgtcaactactttggtgtga

SEQ ID NO: 135535 - DNA, 25 bp, Artificial
  probe
  misc_feature (1)..(25): SEQ ID NO: 7029; WAN024CVZ_at; Start 555; Stop 579
tgatcaaataaagcaagggaatcct

SEQ ID NO: 135536 - DNA, 25 bp, Artificial
  probe
  misc_feature (1)..(25): SEQ ID NO: 7029; WAN024CVZ_at; Start 301; Stop 325
gaagcagtcaaaactaacgttctag

SEQ ID NO: 135537 - DNA, 25 bp, Artificial
  probe
  misc_feature (1)..(25): SEQ ID NO: 7029; WAN024CVZ_at; Start 358; Stop 382
gctggagtaaaacaagtcatctgcc

SEQ ID NO: 135538 - DNA, 25 bp, Artificial
  probe
  misc_feature (1)..(25): SEQ ID NO: 7029; WAN024CVZ_at; Start 701; Stop 725
catgtaccattgaagtgttggcgca

SEQ ID NO: 135539 - DNA, 25 bp, Artificial
  probe
  misc_feature (1)..(25): SEQ ID NO: 7029; WAN024CVZ_at; Start 240; Stop 264
ggattacgtatttcatgctgctgca

SEQ ID NO: 135540 - DNA, 25 bp, Artificial
  probe
  misc_feature (1)..(25): SEQ ID NO: 7029; WAN024CVZ_at; Start 450; Stop 474
tgctgttgctaagtcaaggacggta

SEQ ID NO: 135541 - DNA, 25 bp, Artificial
  probe
  misc_feature (1)..(25): SEQ ID NO: 7029; WAN024CVZ_at; Start 568; Stop 592
caagggaatcctataacgattacgg

SEQ ID NO: 135542 - DNA, 25 bp, Artificial
  probe
  misc_feature (1)..(25): SEQ ID NO: 7029; WAN024CVZ_at; Start 716; Stop 740
tgttggcgcaagctgttacggaact

SEQ ID NO: 135543 - DNA, 25 bp, Artificial
  probe
  misc_feature (1)..(25): SEQ ID NO: 7029; WAN024CVZ_at; Start 912; Stop 936
tgccaaacgcaatcccttaatagag

SEQ ID NO: 135544 - DNA, 25 bp, Artificial
  probe
  misc_feature (1)..(25): SEQ ID NO: 7029; WAN024CVZ_at; Start 763; Stop 787
aaagtaatcgggattcgccacggtg

SEQ ID NO: 135545 - DNA, 25 bp, Artificial
  probe
  misc_feature (1)..(25): SEQ ID NO: 7029; WAN024CVZ_at; Start 951; Stop 975
tacagaactctggaatgtcgagcag

SEQ ID NO: 135546 - DNA, 25 bp, Artificial
  probe
  misc_feature (1)..(25): SEQ ID NO: 7029; WAN024CVZ_at; Start 810; Stop 834
gactactgaagaatgtacgaatgcc

SEQ ID NO: 135547 - DNA, 25 bp, Artificial
  probe
  misc_feature (1)..(25): SEQ ID NO: 7029; WAN024CVZ_at; Start 853; Stop 877
tatcgtgtgcctagcgataatcgag

SEQ ID NO: 135548 - DNA, 25 bp, Artificial
  probe
  misc_feature (1)..(25): SEQ ID NO: 7029; WAN024CVZ_at; Start 585; Stop 609
gattacggaacctagtatgactcgt

SEQ ID NO: 135549 - DNA, 25 bp, Artificial
  probe
  misc_feature (1)..(25): SEQ ID NO: 7029; WAN024CVZ_at; Start 529; Stop 553
cgtggttctgtgattcccctatgga

SEQ ID NO: 135550 - DNA, 25 bp, Artificial
  probe
  misc_feature (1)..(25): SEQ ID NO: 7029; WAN024CVZ_at; Start 674; Stop 698
gagatatcctagtacagaaagcacc

SEQ ID NO: 135551 - DNA, 25 bp, Artificial
  probe
  misc_feature (1)..(25): SEQ ID NO: 7029; WAN024CVZ_at; Start 286; Stop 310
gaatttttccctgtggaagcagtca

SEQ ID NO: 135552 - DNA, 25 bp, Artificial
  probe
  misc_feature (1)..(25): SEQ ID NO: 7029; WAN024CVZ_at; Start 214; Stop 238
tctgttaaaaatgctatgatcggtg

SEQ ID NO: 135553 - DNA, 25 bp, Artificial
  probe
  misc_feature (1)..(25): SEQ ID NO: 7029; WAN024CVZ_at; Start 617; Stop 641
tgtccttagaagaagcggtagacct

SEQ ID NO: 135554 - DNA, 25 bp, Artificial
  probe
  misc_feature (1)..(25): SEQ ID NO: 7029; WAN024CVZ_at; Start 734; Stop 758
cggaactttttgcacctaatcaaga

SEQ ID NO: 135555 - DNA, 25 bp, Artificial
  probe
  misc_feature (1)..(25): SEQ ID NO: 7029; WAN024CVZ_at; Start 89; Stop 113
cggaggtacgtatcttttcaagaga

SEQ ID NO: 135556 - DNA, 25 bp, Artificial
  probe
  misc_feature (1)..(25): SEQ ID NO: 7029; WAN024CVZ_at; Start 74; Stop 98
tgggaacagatatttcggaggtacg

SEQ ID NO: 135557 - DNA, 25 bp, Artificial
  probe
  misc_feature (1)..(25): SEQ ID NO: 7029; WAN024CVZ_at; Start 777; Stop 801
tcgccacggtgaaaagatgtatgaa

SEQ ID NO: 135558 - DNA, 25 bp, Artificial
  probe
  misc_feature (1)..(25): SEQ ID NO: 7029; WAN024CVZ_at; Start 393; Stop 417
taaggcagcctatcctgttaatgcg

SEQ ID NO: 135559 - DNA, 25 bp, Artificial
  probe
  misc_feature (1)..(25): SEQ ID NO: 7029; WAN024CVZ_at; Start 44; Stop 68
cattcgggaatgcagttctcaaacg

SEQ ID NO: 135560 - DNA, 25 bp, Artificial
  probe
  misc_feature (1)..(25): SEQ ID NO: 7029; WAN024CVZ_at; Start 1000; Stop 1024
ccctatattagggaagaattagcat

SEQ ID NO: 135561 - DNA, 25 bp, Artificial
  probe
  misc_feature (1)..(25): SEQ ID NO: 7029; WAN024CVZ_at; Start 825; Stop 849
tacgaatgccattgatttaggcggc

SEQ ID NO: 135562 - DNA, 25 bp, Artificial
  probe
  misc_feature (1)..(25): SEQ ID NO: 7029; WAN024CVZ_at; Start 179; Stop 203
tacgtttttacttaggagatgtgcg

SEQ ID NO: 135563 - DNA, 25 bp, Artificial
  probe
  misc_feature (1)..(25): SEQ ID NO: 7029; WAN024CVZ_at; Start 490; Stop 514
aaagtctgtgtaactcgctacggca

SEQ ID NO: 135564 - DNA, 25 bp, Artificial
  probe
  misc_feature (1)..(25): SEQ ID NO: 7029; WAN024CVZ_at; Start 158; Stop 182
tgccagaagtagctgataagatacg

SEQ ID NO: 135565 - DNA, 25 bp, Artificial
  probe
  misc_feature (1)..(25): SEQ ID NO: 7029; WAN024CVZ_at; Start 255; Stop 279
tgctgctgcattaaaacaagtccct

SEQ ID NO: 135566 - DNA, 25 bp, Artificial
  probe
  misc_feature (1)..(25): SEQ ID NO: 7029; WAN024CVZ_at; Start 966; Stop 990
tgtcgagcaggttaaggaaaaactc

SEQ ID NO: 135567 - DNA, 25 bp, Artificial
  probe
  misc_feature (1)..(25): SEQ ID NO: 7029; WAN024CVZ_at; Start 331; Stop 355
gaaaatattctcactgcagctatag

SEQ ID NO: 135568 - DNA, 25 bp, Artificial
  probe
  misc_feature (1)..(25): SEQ ID NO: 7029; WAN024CVZ_at; Start 411; Stop 435
taatgcgatgggaacctctaaggct

SEQ ID NO: 135569 - DNA, 25 bp, Artificial
  probe
  misc_feature (1)..(25): SEQ ID NO: 6753; WAN024CW2_at; Start 2; Stop 26
tgctcaggatttaccgtcctggact

SEQ ID NO: 135570 - DNA, 25 bp, Artificial
  probe
  misc_feature (1)..(25): SEQ ID NO: 6753; WAN024CW2_at; Start 148; Stop 172
gacattctccgttcccaaaatgtta

SEQ ID NO: 135571 - DNA, 25 bp, Artificial
  probe
  misc_feature (1)..(25): SEQ ID NO: 6753; WAN024CW2_at; Start 167; Stop 191
atgttagtttttaccgcttctacag

SEQ ID NO: 135572 - DNA, 25 bp, Artificial
  probe
  misc_feature (1)..(25): SEQ ID NO: 6753; WAN024CW2_at; Start 218; Stop 242
ttaagagcagcagcgtgaaaaacat

SEQ ID NO: 135573 - DNA, 25 bp, Artificial
  probe
  misc_feature (1)..(25): SEQ ID NO: 6753; WAN024CW2_at; Start 252; Stop 276
catgcatagcattttttaccgaagc

SEQ ID NO: 135574 - DNA, 25 bp, Artificial
  probe
  misc_feature (1)..(25): SEQ ID NO: 6753; WAN024CW2_at; Start 178; Stop 202
taccgcttctacagggaaaaattca

SEQ ID NO: 135575 - DNA, 25 bp, Artificial
  probe
  misc_feature (1)..(25): SEQ ID NO: 6753; WAN024CW2_at; Start 224; Stop 248
gcagcagcgtgaaaaacataatcca

SEQ ID NO: 135576 - DNA, 25 bp, Artificial
  probe
  misc_feature (1)..(25): SEQ ID NO: 6753; WAN024CW2_at; Start 71; Stop 95
gcattgacaggataagccgccttat

SEQ ID NO: 135577 - DNA, 25 bp, Artificial
  probe
  misc_feature (1)..(25): SEQ ID NO: 6753; WAN024CW2_at; Start 240; Stop 264
cataatccacaccatgcatagcatt

SEQ ID NO: 135578 - DNA, 25 bp, Artificial
  probe
  misc_feature (1)..(25): SEQ ID NO: 6753; WAN024CW2_at; Start 19; Stop 43
cctggacttagcaacagcaatcttt

SEQ ID NO: 135579 - DNA, 25 bp, Artificial
  probe
  misc_feature (1)..(25): SEQ ID NO: 6753; WAN024CW2_at; Start 186; Stop 210
ctacagggaaaaattcacaagaagg

SEQ ID NO: 135580 - DNA, 25 bp, Artificial
  probe
  misc_feature (1)..(25): SEQ ID NO: 6753; WAN024CW2_at; Start 232; Stop 256
gtgaaaaacataatccacaccatgc

SEQ ID NO: 135581 - DNA, 25 bp, Artificial
  probe
  misc_feature (1)..(25): SEQ ID NO: 6753; WAN024CW2_at; Start 125; Stop 149
ccagcttcgatagccgcagtgagga

SEQ ID NO: 135582 - DNA, 25 bp, Artificial
  probe
  misc_feature (1)..(25): SEQ ID NO: 6753; WAN024CW2_at; Start 109; Stop 133
gataacttgctttacaccagcttcg

SEQ ID NO: 135583 - DNA, 25 bp, Artificial
  probe
  misc_feature (1)..(25): SEQ ID NO: 6753; WAN024CW2_at; Start 182; Stop 206
gcttctacagggaaaaattcacaag

SEQ ID NO: 135584 - DNA, 25 bp, Artificial
  probe
  misc_feature (1)..(25): SEQ ID NO: 6753; WAN024CW2_at; Start 119; Stop 143
tttacaccagcttcgatagccgcag

SEQ ID NO: 135585 - DNA, 25 bp, Artificial
  probe
  misc_feature (1)..(25): SEQ ID NO: 6753; WAN024CW2_at; Start 29; Stop 53
gcaacagcaatcttttccatcatag

SEQ ID NO: 135586 - DNA, 25 bp, Artificial
  probe
  misc_feature (1)..(25): SEQ ID NO: 6753; WAN024CW2_at; Start 206; Stop 230
gaaggtacttgtttaagagcagcag

SEQ ID NO: 135587 - DNA, 25 bp, Artificial
  probe
  misc_feature (1)..(25): SEQ ID NO: 6753; WAN024CW2_at; Start 48; Stop 72
tcatagccttggatgttcccatagc

SEQ ID NO: 135588 - DNA, 25 bp, Artificial
  probe
  misc_feature (1)..(25): SEQ ID NO: 6753; WAN024CW2_at; Start 35; Stop 59
gcaatcttttccatcatagccttgg

SEQ ID NO: 135589 - DNA, 25 bp, Artificial
  probe
  misc_feature (1)..(25): SEQ ID NO: 6753; WAN024CW2_at; Start 53; Stop 77
gccttggatgttcccatagcattga

SEQ ID NO: 135590 - DNA, 25 bp, Artificial
  probe
  misc_feature (1)..(25): SEQ ID NO: 6753; WAN024CW2_at; Start 13; Stop 37
taccgtcctggacttagcaacagca

SEQ ID NO: 135591 - DNA, 25 bp, Artificial
  probe
  misc_feature (1)..(25): SEQ ID NO: 6753; WAN024CW2_at; Start 58; Stop 82
ggatgttcccatagcattgacagga

SEQ ID NO: 135592 - DNA, 25 bp, Artificial
  probe
  misc_feature (1)..(25): SEQ ID NO: 6753; WAN024CW2_at; Start 83; Stop 107
taagccgccttatctgtagaaagac

SEQ ID NO: 135593 - DNA, 25 bp, Artificial
  probe
  misc_feature (1)..(25): SEQ ID NO: 6753; WAN024CW2_at; Start 212; Stop 236
acttgtttaagagcagcagcgtgaa

SEQ ID NO: 135594 - DNA, 25 bp, Artificial
  probe
  misc_feature (1)..(25): SEQ ID NO: 6753; WAN024CW2_at; Start 86; Stop 110
gccgccttatctgtagaaagacaga

SEQ ID NO: 135595 - DNA, 25 bp, Artificial
  probe
  misc_feature (1)..(25): SEQ ID NO: 6753; WAN024CW2_at; Start 104; Stop 128
agacagataacttgctttacaccag

SEQ ID NO: 135596 - DNA, 25 bp, Artificial
  probe
  misc_feature (1)..(25): SEQ ID NO: 6753; WAN024CW2_at; Start 95; Stop 119
tctgtagaaagacagataacttgct

SEQ ID NO: 135597 - DNA, 25 bp, Artificial
  probe
  misc_feature (1)..(25): SEQ ID NO: 6753; WAN024CW2_at; Start 129; Stop 153
cttcgatagccgcagtgaggacatt

SEQ ID NO: 135598 - DNA, 25 bp, Artificial
  probe
  misc_feature (1)..(25): SEQ ID NO: 6753; WAN024CW2_at; Start 67; Stop 91
catagcattgacaggataagccgcc

SEQ ID NO: 135599 - DNA, 25 bp, Artificial
  probe
  misc_feature (1)..(25): SEQ ID NO: 6753; WAN024CW2_at; Start 141; Stop 165
cagtgaggacattctccgttcccaa

SEQ ID NO: 135600 - DNA, 25 bp, Artificial
  probe
  misc_feature (1)..(25): SEQ ID NO: 6753; WAN024CW2_at; Start 255; Stop 279
gcatagcattttttaccgaagctaa

SEQ ID NO: 135601 - DNA, 25 bp, Artificial
  probe
  misc_feature (1)..(25): SEQ ID NO: 6753; WAN024CW2_at; Start 135; Stop 159
tagccgcagtgaggacattctccgt

SEQ ID NO: 135602 - DNA, 25 bp, Artificial
  probe
  misc_feature (1)..(25): SEQ ID NO: 6753; WAN024CW2_at; Start 201; Stop 225
cacaagaaggtacttgtttaagagc

SEQ ID NO: 135603 - DNA, 25 bp, Artificial
  probe
  misc_feature (1)..(25): SEQ ID NO: 4106; WAN024CW3_at; Start 879; Stop 903
tcctagtgataatcgtaatcttaac

SEQ ID NO: 135604 - DNA, 25 bp, Artificial
  probe
  misc_feature (1)..(25): SEQ ID NO: 4106; WAN024CW3_at; Start 909; Stop 933
taagtatttcaaagatggtagtacg

SEQ ID NO: 135605 - DNA, 25 bp, Artificial
  probe
  misc_feature (1)..(25): SEQ ID NO: 4106; WAN024CW3_at; Start 576; Stop 600
gcaaattaagcaaggaaatgctctt

SEQ ID NO: 135606 - DNA, 25 bp, Artificial
  probe
  misc_feature (1)..(25): SEQ ID NO: 4106; WAN024CW3_at; Start 159; Stop 183
tgagtttcaggtaaaagtaccagaa

SEQ ID NO: 135607 - DNA, 25 bp, Artificial
  probe
  misc_feature (1)..(25): SEQ ID NO: 4106; WAN024CW3_at; Start 969; Stop 993
taccgatttgatggatgtagagcaa

SEQ ID NO: 135608 - DNA, 25 bp, Artificial
  probe
  misc_feature (1)..(25): SEQ ID NO: 4106; WAN024CW3_at; Start 950; Stop 974
cagaattcaatagtaataataccga

SEQ ID NO: 135609 - DNA, 25 bp, Artificial
  probe
  misc_feature (1)..(25): SEQ ID NO: 4106; WAN024CW3_at; Start 984; Stop 1008
tgtagagcaagttaaaagaaagttg

SEQ ID NO: 135610 - DNA, 25 bp, Artificial
  probe
  misc_feature (1)..(25): SEQ ID NO: 4106; WAN024CW3_at; Start 1007; Stop 1031
tgctagaattagatgaaatacagac

SEQ ID NO: 135611 - DNA, 25 bp, Artificial
  probe
  misc_feature (1)..(25): SEQ ID NO: 4106; WAN024CW3_at; Start 332; Stop 356
ctaacattttgggaacggagaatgt

SEQ ID NO: 135612 - DNA, 25 bp, Artificial
  probe
  misc_feature (1)..(25): SEQ ID NO: 4106; WAN024CW3_at; Start 385; Stop 409
aagcaagttatctgtctttctacag

SEQ ID NO: 135613 - DNA, 25 bp, Artificial
  probe
  misc_feature (1)..(25): SEQ ID NO: 4106; WAN024CW3_at; Start 514; Stop 538
tgtgtgactcgctatgggaatgttc

SEQ ID NO: 135614 - DNA, 25 bp, Artificial
  probe
  misc_feature (1)..(25): SEQ ID NO: 4106; WAN024CW3_at; Start 783; Stop 807
gattataggtattagacacggagaa

SEQ ID NO: 135615 - DNA, 25 bp, Artificial
  probe
  misc_feature (1)..(25): SEQ ID NO: 4106; WAN024CW3_at; Start 1018; Stop 1042
gatgaaatacagacagcaattcgtg

SEQ ID NO: 135616 - DNA, 25 bp, Artificial
  probe
  misc_feature (1)..(25): SEQ ID NO: 4106; WAN024CW3_at; Start 589; Stop 613
ggaaatgctcttacaattactgaac

SEQ ID NO: 135617 - DNA, 25 bp, Artificial
  probe
  misc_feature (1)..(25): SEQ ID NO: 4106; WAN024CW3_at; Start 751; Stop 775
tcagaaatttttgcctcagaacaag

SEQ ID NO: 135618 - DNA, 25 bp, Artificial
  probe
  misc_feature (1)..(25): SEQ ID NO: 4106; WAN024CW3_at; Start 737; Stop 761
tggctaaggctgtatcagaaatttt

SEQ ID NO: 135619 - DNA, 25 bp, Artificial
  probe
  misc_feature (1)..(25): SEQ ID NO: 4106; WAN024CW3_at; Start 147; Stop 171
tgatatgcgtcatgagtttcaggta

SEQ ID NO: 135620 - DNA, 25 bp, Artificial
  probe
  misc_feature (1)..(25): SEQ ID NO: 4106; WAN024CW3_at; Start 930; Stop 954
tacgaatagaaatttgttgacagaa

SEQ ID NO: 135621 - DNA, 25 bp, Artificial
  probe
  misc_feature (1)..(25): SEQ ID NO: 4106; WAN024CW3_at; Start 617; Stop 641
gcatgacacgttttgtgatgacatt

SEQ ID NO: 135622 - DNA, 25 bp, Artificial
  probe
  misc_feature (1)..(25): SEQ ID NO: 4106; WAN024CW3_at; Start 229; Stop 253
gcttcggtaaaaaatgctatgcatg

SEQ ID NO: 135623 - DNA, 25 bp, Artificial
  probe
  misc_feature (1)..(25): SEQ ID NO: 4106; WAN024CW3_at; Start 488; Stop 512
cggtaaatcctgagcatacaaagat

SEQ ID NO: 135624 - DNA, 25 bp, Artificial
  probe
  misc_feature (1)..(25): SEQ ID NO: 4106; WAN024CW3_at; Start 241; Stop 265
aatgctatgcatggtgtggattatg

SEQ ID NO: 135625 - DNA, 25 bp, Artificial
  probe
  misc_feature (1)..(25): SEQ ID NO: 4106; WAN024CW3_at; Start 1031; Stop 1055
cagcaattcgtgatatggtagcaga

SEQ ID NO: 135626 - DNA, 25 bp, Artificial
  probe
  misc_feature (1)..(25): SEQ ID NO: 4106; WAN024CW3_at; Start 668; Stop 692
ttgcatttgaagaagggaaatctgg

SEQ ID NO: 135627 - DNA, 25 bp, Artificial
  probe
  misc_feature (1)..(25): SEQ ID NO: 4106; WAN024CW3_at; Start 763; Stop 787
gcctcagaacaagatattaagatta

SEQ ID NO: 135628 - DNA, 25 bp, Artificial
  probe
  misc_feature (1)..(25): SEQ ID NO: 4106; WAN024CW3_at; Start 610; Stop 634
gaacctagcatgacacgttttgtga

SEQ ID NO: 135629 - DNA, 25 bp, Artificial
  probe
  misc_feature (1)..(25): SEQ ID NO: 4106; WAN024CW3_at; Start 14; Stop 38
tgtcacaatttacaggaaaaactct

SEQ ID NO: 135630 - DNA, 25 bp, Artificial
  probe
  misc_feature (1)..(25): SEQ ID NO: 4106; WAN024CW3_at; Start 314; Stop 338
ctgtagaagcggtaaaaactaacat

SEQ ID NO: 135631 - DNA, 25 bp, Artificial
  probe
  misc_feature (1)..(25): SEQ ID NO: 4106; WAN024CW3_at; Start 506; Stop 530
caaagatatgtgtgactcgctatgg

SEQ ID NO: 135632 - DNA, 25 bp, Artificial
  probe
  misc_feature (1)..(25): SEQ ID NO: 4106; WAN024CW3_at; Start 303; Stop 327
tgaatttttccctgtagaagcggta

SEQ ID NO: 135633 - DNA, 25 bp, Artificial
  probe
  misc_feature (1)..(25): SEQ ID NO: 4106; WAN024CW3_at; Start 602; Stop 626
caattactgaacctagcatgacacg

SEQ ID NO: 135634 - DNA, 25 bp, Artificial
  probe
  misc_feature (1)..(25): SEQ ID NO: 4106; WAN024CW3_at; Start 871; Stop 895
tatagagttcctagtgataatcgta

SEQ ID NO: 135635 - DNA, 25 bp, Artificial
  probe
  misc_feature (1)..(25): SEQ ID NO: 4106; WAN024CW3_at; Start 565; Stop 589
ctttggattgagcaaattaagcaag

SEQ ID NO: 135636 - DNA, 25 bp, Artificial
  probe
  misc_feature (1)..(25): SEQ ID NO: 4106; WAN024CW3_at; Start 214; Stop 238
gatgtgcgtgacttagcttcggtaa

SEQ ID NO: 135637 - DNA, 25 bp, Artificial
  probe
  misc_feature (1)..(25): SEQ ID NO: 6748; WAN024CW4_at; Start 2; Stop 26
tgctactaggcacaacagttacagc

SEQ ID NO: 135638 - DNA, 25 bp, Artificial
  probe
  misc_feature (1)..(25): SEQ ID NO: 6748; WAN024CW4_at; Start 293; Stop 317
gacttcctgttaggatcattatcaa

SEQ ID NO: 135639 - DNA, 25 bp, Artificial
  probe
  misc_feature (1)..(25): SEQ ID NO: 6748; WAN024CW4_at; Start 171; Stop 195
tacatttaatagaaatacagttact

SEQ ID NO: 135640 - DNA, 25 bp, Artificial
  probe
  misc_feature (1)..(25): SEQ ID NO: 6748; WAN024CW4_at; Start 246; Stop 270
tgtgtatactaaaaccaacgccaag

SEQ ID NO: 135641 - DNA, 25 bp, Artificial
  probe
  misc_feature (1)..(25): SEQ ID NO: 6748; WAN024CW4_at; Start 244; Stop 268
tgtgtgtatactaaaaccaacgcca

SEQ ID NO: 135642 - DNA, 25 bp, Artificial
  probe
  misc_feature (1)..(25): SEQ ID NO: 6748; WAN024CW4_at; Start 25; Stop 49
gcagaagctactgttaggctggtca

SEQ ID NO: 135643 - DNA, 25 bp, Artificial
  probe
  misc_feature (1)..(25): SEQ ID NO: 6748; WAN024CW4_at; Start 131; Stop 155
tagtattcaagtcgaaacggtgccc

SEQ ID NO: 135644 - DNA, 25 bp, Artificial
  probe
  misc_feature (1)..(25): SEQ ID NO: 6748; WAN024CW4_at; Start 103; Stop 127
gaaaaggaatcaaataagtatatac

SEQ ID NO: 135645 - DNA, 25 bp, Artificial
  probe
  misc_feature (1)..(25): SEQ ID NO: 6748; WAN024CW4_at; Start 303; Stop 327
taggatcattatcaaaattaggtaa

SEQ ID NO: 135646 - DNA, 25 bp, Artificial
  probe
  misc_feature (1)..(25): SEQ ID NO: 6748; WAN024CW4_at; Start 261; Stop 285
caacgccaagattgaaaacacctgg

SEQ ID NO: 135647 - DNA, 25 bp, Artificial
  probe
  misc_feature (1)..(25): SEQ ID NO: 6748; WAN024CW4_at; Start 233; Stop 257
tccctaaagattgtgtgtatactaa

SEQ ID NO: 135648 - DNA, 25 bp, Artificial
  probe
  misc_feature (1)..(25): SEQ ID NO: 6748; WAN024CW4_at; Start 48; Stop 72
cagtcccgactctgaaaatacttcc

SEQ ID NO: 135649 - DNA, 25 bp, Artificial
  probe
  misc_feature (1)..(25): SEQ ID NO: 6748; WAN024CW4_at; Start 250; Stop 274
tatactaaaaccaacgccaagattg

SEQ ID NO: 135650 - DNA, 25 bp, Artificial
  probe
  misc_feature (1)..(25): SEQ ID NO: 6748; WAN024CW4_at; Start 44; Stop 68
tggtcagtcccgactctgaaaatac

SEQ ID NO: 135651 - DNA, 25 bp, Artificial
  probe
  misc_feature (1)..(25): SEQ ID NO: 6748; WAN024CW4_at; Start 8; Stop 32
taggcacaacagttacagcagaagc

SEQ ID NO: 135652 - DNA, 25 bp, Artificial
  probe
  misc_feature (1)..(25): SEQ ID NO: 6748; WAN024CW4_at; Start 21; Stop 45
tacagcagaagctactgttaggctg

SEQ ID NO: 135653 - DNA, 25 bp, Artificial
  probe
  misc_feature (1)..(25): SEQ ID NO: 6748; WAN024CW4_at; Start 39; Stop 63
taggctggtcagtcccgactctgaa

SEQ ID NO: 135654 - DNA, 25 bp, Artificial
  probe
  misc_feature (1)..(25): SEQ ID NO: 6748; WAN024CW4_at; Start 89; Stop 113
caaaatctaatgaagaaaaggaatc

SEQ ID NO: 135655 - DNA, 25 bp, Artificial
  probe
  misc_feature (1)..(25): SEQ ID NO: 6748; WAN024CW4_at; Start 11; Stop 35
gcacaacagttacagcagaagctac

SEQ ID NO: 135656 - DNA, 25 bp, Artificial
  probe
  misc_feature (1)..(25): SEQ ID NO: 6748; WAN024CW4_at; Start 33; Stop 57
tactgttaggctggtcagtcccgac

SEQ ID NO: 135657 - DNA, 25 bp, Artificial
  probe
  misc_feature (1)..(25): SEQ ID NO: 6748; WAN024CW4_at; Start 66; Stop 90
tacttcccctagtatattctttaca

SEQ ID NO: 135658 - DNA, 25 bp, Artificial
  probe
  misc_feature (1)..(25): SEQ ID NO: 6748; WAN024CW4_at; Start 150; Stop 174
gtgccccctaataacaactaataca

SEQ ID NO: 135659 - DNA, 25 bp, Artificial
  probe
  misc_feature (1)..(25): SEQ ID NO: 6748; WAN024CW4_at; Start 277; Stop 301
aacacctggattttacgacttcctg

SEQ ID NO: 135660 - DNA, 25 bp, Artificial
  probe
  misc_feature (1)..(25): SEQ ID NO: 6748; WAN024CW4_at; Start 36; Stop 60
tgttaggctggtcagtcccgactct

SEQ ID NO: 135661 - DNA, 25 bp, Artificial
  probe
  misc_feature (1)..(25): SEQ ID NO: 6748; WAN024CW4_at; Start 185; Stop 209
atacagttactattaaaaatacaag

SEQ ID NO: 135662 - DNA, 25 bp, Artificial
  probe
  misc_feature (1)..(25): SEQ ID NO: 6748; WAN024CW4_at; Start 55; Stop 79
gactctgaaaatacttcccctagta

SEQ ID NO: 135663 - DNA, 25 bp, Artificial
  probe
  misc_feature (1)..(25): SEQ ID NO: 6748; WAN024CW4_at; Start 109; Stop 133
gaatcaaataagtatatacctatag

SEQ ID NO: 135664 - DNA, 25 bp, Artificial
  probe
  misc_feature (1)..(25): SEQ ID NO: 6748; WAN024CW4_at; Start 17; Stop 41
cagttacagcagaagctactgttag

SEQ ID NO: 135665 - DNA, 25 bp, Artificial
  probe
  misc_feature (1)..(25): SEQ ID NO: 6748; WAN024CW4_at; Start 225; Stop 249
aaaagtaatccctaaagattgtgtg

SEQ ID NO: 135666 - DNA, 25 bp, Artificial
  probe
  misc_feature (1)..(25): SEQ ID NO: 6748; WAN024CW4_at; Start 29; Stop 53
aagctactgttaggctggtcagtcc

SEQ ID NO: 135667 - DNA, 25 bp, Artificial
  probe
  misc_feature (1)..(25): SEQ ID NO: 6748; WAN024CW4_at; Start 125; Stop 149
tacctatagtattcaagtcgaaacg

SEQ ID NO: 135668 - DNA, 25 bp, Artificial
  probe
  misc_feature (1)..(25): SEQ ID NO: 6748; WAN024CW4_at; Start 283; Stop 307
tggattttacgacttcctgttagga

SEQ ID NO: 135669 - DNA, 25 bp, Artificial
  probe
  misc_feature (1)..(25): SEQ ID NO: 6748; WAN024CW4_at; Start 270; Stop 294
gattgaaaacacctggattttacga

SEQ ID NO: 135670 - DNA, 25 bp, Artificial
  probe
  misc_feature (1)..(25): SEQ ID NO: 6748; WAN024CW4_at; Start 265; Stop 289
gccaagattgaaaacacctggattt

SEQ ID NO: 135671 - DNA, 25 bp, Artificial
  probe
  misc_feature (1)..(25): SEQ ID NO: 1946; WAN024CW5_at; Start 968; Stop 992
tgaccagcctaacagtagcttctgc

SEQ ID NO: 135672 - DNA, 25 bp, Artificial
  probe
  misc_feature (1)..(25): SEQ ID NO: 1946; WAN024CW5_at; Start 268; Stop 292
gggtttcaaacaactctgctgtgga

SEQ ID NO: 135673 - DNA, 25 bp, Artificial
  probe
  misc_feature (1)..(25): SEQ ID NO: 1946; WAN024CW5_at; Start 1024; Stop 1048
gaatatgggatgacatttctacgca

SEQ ID NO: 135674 - DNA, 25 bp, Artificial
  probe
  misc_feature (1)..(25): SEQ ID NO: 1946; WAN024CW5_at; Start 645; Stop 669
gctgtcccgagttataaagcgtact

SEQ ID NO: 135675 - DNA, 25 bp, Artificial
  probe
  misc_feature (1)..(25): SEQ ID NO: 1946; WAN024CW5_at; Start 716; Stop 740
caggaagtcgtaaaatccaggtgtt

SEQ ID NO: 135676 - DNA, 25 bp, Artificial
  probe
  misc_feature (1)..(25): SEQ ID NO: 1946; WAN024CW5_at; Start 983; Stop 1007
tagcttctgctgtaactgttgtgcc

SEQ ID NO: 135677 - DNA, 25 bp, Artificial
  probe
  misc_feature (1)..(25): SEQ ID NO: 1946; WAN024CW5_at; Start 701; Stop 725
tgataatgatcctaacaggaagtcg

SEQ ID NO: 135678 - DNA, 25 bp, Artificial
  probe
  misc_feature (1)..(25): SEQ ID NO: 1946; WAN024CW5_at; Start 533; Stop 557
ttagagcggcgaatagctattcagc

SEQ ID NO: 135679 - DNA, 25 bp, Artificial
  probe
  misc_feature (1)..(25): SEQ ID NO: 1946; WAN024CW5_at; Start 746; Stop 770
tcttggcgttggttttagtatacac

SEQ ID NO: 135680 - DNA, 25 bp, Artificial
  probe
  misc_feature (1)..(25): SEQ ID NO: 1946; WAN024CW5_at; Start 59; Stop 83
tctgttacttgttctggactctcga

SEQ ID NO: 135681 - DNA, 25 bp, Artificial
  probe
  misc_feature (1)..(25): SEQ ID NO: 1946; WAN024CW5_at; Start 1103; Stop 1127
catcagcgacggttgttattaataa

SEQ ID NO: 135682 - DNA, 25 bp, Artificial
  probe
  misc_feature (1)..(25): SEQ ID NO: 1946; WAN024CW5_at; Start 1090; Stop 1114
ttttttgataaagcatcagcgacgg

SEQ ID NO: 135683 - DNA, 25 bp, Artificial
  probe
  misc_feature (1)..(25): SEQ ID NO: 1946; WAN024CW5_at; Start 1035; Stop 1059
gacatttctacgcactatcctatca

SEQ ID NO: 135684 - DNA, 25 bp, Artificial
  probe
  misc_feature (1)..(25): SEQ ID NO: 1946; WAN024CW5_at; Start 953; Stop 977
tttcagagtcgggactgaccagcct

SEQ ID NO: 135685 - DNA, 25 bp, Artificial
  probe
  misc_feature (1)..(25): SEQ ID NO: 1946; WAN024CW5_at; Start 548; Stop 572
gctattcagcatattcagaggcagc

SEQ ID NO: 135686 - DNA, 25 bp, Artificial
  probe
  misc_feature (1)..(25): SEQ ID NO: 1946; WAN024CW5_at; Start 284; Stop 308
tgctgtggagccctagtaacttcta

SEQ ID NO: 135687 - DNA, 25 bp, Artificial
  probe
  misc_feature (1)..(25): SEQ ID NO: 1946; WAN024CW5_at; Start 562; Stop 586
tcagaggcagctagttcaggaataa

SEQ ID NO: 135688 - DNA, 25 bp, Artificial
  probe
  misc_feature (1)..(25): SEQ ID NO: 1946; WAN024CW5_at; Start 15; Stop 39
tatttgtagagtgacactagtgaca

SEQ ID NO: 135689 - DNA, 25 bp, Artificial
  probe
  misc_feature (1)..(25): SEQ ID NO: 1946; WAN024CW5_at; Start 519; Stop 543
aacagtactagcagttagagcggcg

SEQ ID NO: 135690 - DNA, 25 bp, Artificial
  probe
  misc_feature (1)..(25): SEQ ID NO: 1946; WAN024CW5_at; Start 478; Stop 502
acaggagtgggctttatttctaggg

SEQ ID NO: 135691 - DNA, 25 bp, Artificial
  probe
  misc_feature (1)..(25): SEQ ID NO: 1946; WAN024CW5_at; Start 592; Stop 616
gatttaggagtacttatgcttcctg

SEQ ID NO: 135692 - DNA, 25 bp, Artificial
  probe
  misc_feature (1)..(25): SEQ ID NO: 1946; WAN024CW5_at; Start 761; Stop 785
tagtatacacacaatctttagggat

SEQ ID NO: 135693 - DNA, 25 bp, Artificial
  probe
  misc_feature (1)..(25): SEQ ID NO: 1946; WAN024CW5_at; Start 729; Stop 753
aatccaggtgttttcaatcttggcg

SEQ ID NO: 135694 - DNA, 25 bp, Artificial
  probe
  misc_feature (1)..(25): SEQ ID NO: 1946; WAN024CW5_at; Start 397; Stop 421
ggaaaggtacattatcattcagaag

SEQ ID NO: 135695 - DNA, 25 bp, Artificial
  probe
  misc_feature (1)..(25): SEQ ID NO: 1946; WAN024CW5_at; Start 74; Stop 98
ggactctcgataattggaataatgg

SEQ ID NO: 135696 - DNA, 25 bp, Artificial
  probe
  misc_feature (1)..(25): SEQ ID NO: 1946; WAN024CW5_at; Start 606; Stop 630
tatgcttcctggtgtgttctccttg

SEQ ID NO: 135697 - DNA, 25 bp, Artificial
  probe
  misc_feature (1)..(25): SEQ ID NO: 1946; WAN024CW5_at; Start 630; Stop 654
gttttattcagataagctgtcccga

SEQ ID NO: 135698 - DNA, 25 bp, Artificial
  probe
  misc_feature (1)..(25): SEQ ID NO: 1946; WAN024CW5_at; Start 459; Stop 483
caatgcgggtaggattttaacagga

SEQ ID NO: 135699 - DNA, 25 bp, Artificial
  probe
  misc_feature (1)..(25): SEQ ID NO: 1946; WAN024CW5_at; Start 1230; Stop 1254
tggatggcgattaaatttcagagct

SEQ ID NO: 135700 - DNA, 25 bp, Artificial
  probe
  misc_feature (1)..(25): SEQ ID NO: 1946; WAN024CW5_at; Start 862; Stop 886
gggcaccgtttcgacttgaatacta

SEQ ID NO: 135701 - DNA, 25 bp, Artificial
  probe
  misc_feature (1)..(25): SEQ ID NO: 1946; WAN024CW5_at; Start 412; Stop 436
cattcagaagtacaaaattatcagg

SEQ ID NO: 135702 - DNA, 25 bp, Artificial
  probe
  misc_feature (1)..(25): SEQ ID NO: 1946; WAN024CW5_at; Start 1139; Stop 1163
tacctgtaggctcttcttttgtgga

SEQ ID NO: 135703 - DNA, 25 bp, Artificial
  probe
  misc_feature (1)..(25): SEQ ID NO: 1946; WAN024CW5_at; Start 995; Stop 1019
taactgttgtgcctagtagcattcc

SEQ ID NO: 135704 - DNA, 25 bp, Artificial
  probe
  misc_feature (1)..(25): SEQ ID NO: 1946; WAN024CW5_at; Start 445; Stop 469
gagaaaattttgtacaatgcgggta

SEQ ID NO: 135705 - DNA, 25 bp, Artificial
  probe
  misc_feature (1)..(25): SEQ ID NO: 5370; WAN024CW6_at; Start 22; Stop 46
gatcagttctcgaacgcgtttttca

SEQ ID NO: 135706 - DNA, 25 bp, Artificial
  probe
  misc_feature (1)..(25): SEQ ID NO: 5370; WAN024CW6_at; Start 180; Stop 204
tatcattgagggtcggaatccgctt

SEQ ID NO: 135707 - DNA, 25 bp, Artificial
  probe
  misc_feature (1)..(25): SEQ ID NO: 5370; WAN024CW6_at; Start 206; Stop 230
ttttccagcttatccagaacatctg

SEQ ID NO: 135708 - DNA, 25 bp, Artificial
  probe
  misc_feature (1)..(25): SEQ ID NO: 5370; WAN024CW6_at; Start 310; Stop 334
gttttctgctatcttctcttccgga

SEQ ID NO: 135709 - DNA, 25 bp, Artificial
  probe
  misc_feature (1)..(25): SEQ ID NO: 5370; WAN024CW6_at; Start 80; Stop 104
gcaatgactggagtaattcccaaca

SEQ ID NO: 135710 - DNA, 25 bp, Artificial
  probe
  misc_feature (1)..(25): SEQ ID NO: 5370; WAN024CW6_at; Start 103; Stop 127
catcaagatcttgctcaaggcgcta

SEQ ID NO: 135711 - DNA, 25 bp, Artificial
  probe
  misc_feature (1)..(25): SEQ ID NO: 5370; WAN024CW6_at; Start 121; Stop 145
ggcgctatgaatatcgcgataagga

SEQ ID NO: 135712 - DNA, 25 bp, Artificial
  probe
  misc_feature (1)..(25): SEQ ID NO: 5370; WAN024CW6_at; Start 340; Stop 364
aaacatgcccttgcgacggtgagag

SEQ ID NO: 135713 - DNA, 25 bp, Artificial
  probe
  misc_feature (1)..(25): SEQ ID NO: 5370; WAN024CW6_at; Start 156; Stop 180
taaactctatcaaggcataacgact

SEQ ID NO: 135714 - DNA, 25 bp, Artificial
  probe
  misc_feature (1)..(25): SEQ ID NO: 5370; WAN024CW6_at; Start 234; Stop 258
tgtaataaatttcagccccgtaagc

SEQ ID NO: 135715 - DNA, 25 bp, Artificial
  probe
  misc_feature (1)..(25): SEQ ID NO: 5370; WAN024CW6_at; Start 245; Stop 269
tcagccccgtaagcaatgaccaagt

SEQ ID NO: 135716 - DNA, 25 bp, Artificial
  probe
  misc_feature (1)..(25): SEQ ID NO: 5370; WAN024CW6_at; Start 386; Stop 410
ccctgtctgtaggattctgccaaga

SEQ ID NO: 135717 - DNA, 25 bp, Artificial
  probe
  misc_feature (1)..(25): SEQ ID NO: 5370; WAN024CW6_at; Start 323; Stop 347
ttctcttccggagtttcaaacatgc

SEQ ID NO: 135718 - DNA, 25 bp, Artificial
  probe
  misc_feature (1)..(25): SEQ ID NO: 5370; WAN024CW6_at; Start 333; Stop 357
gagtttcaaacatgcccttgcgacg

SEQ ID NO: 135719 - DNA, 25 bp, Artificial
  probe
  misc_feature (1)..(25): SEQ ID NO: 5370; WAN024CW6_at; Start 281; Stop 305
tccttagctatttcccgaacctgaa

SEQ ID NO: 135720 - DNA, 25 bp, Artificial
  probe
  misc_feature (1)..(25): SEQ ID NO: 5370; WAN024CW6_at; Start 362; Stop 386
gaggtagaaacaatggttcgcaccc

SEQ ID NO: 135721 - DNA, 25 bp, Artificial
  probe
  misc_feature (1)..(25): SEQ ID NO: 5370; WAN024CW6_at; Start 295; Stop 319
ccgaacctgaagaaagttttctgct

SEQ ID NO: 135722 - DNA, 25 bp, Artificial
  probe
  misc_feature (1)..(25): SEQ ID NO: 5370; WAN024CW6_at; Start 48; Stop 72
tattttcaagagcatcatagcgctc

SEQ ID NO: 135723 - DNA, 25 bp, Artificial
  probe
  misc_feature (1)..(25): SEQ ID NO: 5370; WAN024CW6_at; Start 266; Stop 290
aagtcactcgccacttccttagcta

SEQ ID NO: 135724 - DNA, 25 bp, Artificial
  probe
  misc_feature (1)..(25): SEQ ID NO: 5370; WAN024CW6_at; Start 114; Stop 138
tgctcaaggcgctatgaatatcgcg

SEQ ID NO: 135725 - DNA, 25 bp, Artificial
  probe
  misc_feature (1)..(25): SEQ ID NO: 5370; WAN024CW6_at; Start 16; Stop 40
catatcgatcagttctcgaacgcgt

SEQ ID NO: 135726 - DNA, 25 bp, Artificial
  probe
  misc_feature (1)..(25): SEQ ID NO: 5370; WAN024CW6_at; Start 89; Stop 113
ggagtaattcccaacatcaagatct

SEQ ID NO: 135727 - DNA, 25 bp, Artificial
  probe
  misc_feature (1)..(25): SEQ ID NO: 5370; WAN024CW6_at; Start 349; Stop 373
cttgcgacggtgagaggtagaaaca

SEQ ID NO: 135728 - DNA, 25 bp, Artificial
  probe
  misc_feature (1)..(25): SEQ ID NO: 5370; WAN024CW6_at; Start 395; Stop 419
taggattctgccaagagagccttgc

SEQ ID NO: 135729 - DNA, 25 bp, Artificial
  probe
  misc_feature (1)..(25): SEQ ID NO: 5370; WAN024CW6_at; Start 219; Stop 243
ccagaacatctggtgtgtaataaat

SEQ ID NO: 135730 - DNA, 25 bp, Artificial
  probe
  misc_feature (1)..(25): SEQ ID NO: 5370; WAN024CW6_at; Start 147; Stop 171
tgttcatactaaactctatcaaggc

SEQ ID NO: 135731 - DNA, 25 bp, Artificial
  probe
  misc_feature (1)..(25): SEQ ID NO: 5370; WAN024CW6_at; Start 408; Stop 432
agagagccttgctttcctctcttga

SEQ ID NO: 135732 - DNA, 25 bp, Artificial
  probe
  misc_feature (1)..(25): SEQ ID NO: 5370; WAN024CW6_at; Start 132; Stop 156
tatcgcgataaggagtgttcatact

SEQ ID NO: 135733 - DNA, 25 bp, Artificial
  probe
  misc_feature (1)..(25): SEQ ID NO: 5370; WAN024CW6_at; Start 36; Stop 60
cgcgtttttcattattttcaagagc

SEQ ID NO: 135734 - DNA, 25 bp, Artificial
  probe
  misc_feature (1)..(25): SEQ ID NO: 5370; WAN024CW6_at; Start 254; Stop 278
taagcaatgaccaagtcactcgcca

SEQ ID NO: 135735 - DNA, 25 bp, Artificial
  probe
  misc_feature (1)..(25): SEQ ID NO: 5370; WAN024CW6_at; Start 169; Stop 193
ggcataacgactatcattgagggtc

SEQ ID NO: 135736 - DNA, 25 bp, Artificial
  probe
  misc_feature (1)..(25): SEQ ID NO: 5370; WAN024CW6_at; Start 1; Stop 25
ttgcgtgtaacagcccatatcgatc

SEQ ID NO: 135737 - DNA, 25 bp, Artificial
  probe
  misc_feature (1)..(25): SEQ ID NO: 5370; WAN024CW6_at; Start 65; Stop 89
tagcgctcaatgtgggcaatgactg

SEQ ID NO: 135738 - DNA, 25 bp, Artificial
  probe
  misc_feature (1)..(25): SEQ ID NO: 5370; WAN024CW6_at; Start 59; Stop 83
gcatcatagcgctcaatgtgggcaa

SEQ ID NO: 135739 - DNA, 25 bp, Artificial
  probe
  misc_feature (1)..(25): SEQ ID NO: 2354; WAN024CW7_at; Start 4; Stop 28
gatgataaaaggataggtaatggca

SEQ ID NO: 135740 - DNA, 25 bp, Artificial
  probe
  misc_feature (1)..(25): SEQ ID NO: 2354; WAN024CW7_at; Start 78; Stop 102
tcatctcccagcaaaggaaaaccga

SEQ ID NO: 135741 - DNA, 25 bp, Artificial
  probe
  misc_feature (1)..(25): SEQ ID NO: 2354; WAN024CW7_at; Start 30; Stop 54
tgcagagcctgacgttgaataccat

SEQ ID NO: 135742 - DNA, 25 bp, Artificial
  probe
  misc_feature (1)..(25): SEQ ID NO: 2354; WAN024CW7_at; Start 142; Stop 166
tgtgcaggtgaatatagaccaagtg

SEQ ID NO: 135743 - DNA, 25 bp, Artificial
  probe
  misc_feature (1)..(25): SEQ ID NO: 2354; WAN024CW7_at; Start 131; Stop 155
ggttcgaccagtgtgcaggtgaata

SEQ ID NO: 135744 - DNA, 25 bp, Artificial
  probe
  misc_feature (1)..(25): SEQ ID NO: 2354; WAN024CW7_at; Start 34; Stop 58
gagcctgacgttgaataccatcttc

SEQ ID NO: 135745 - DNA, 25 bp, Artificial
  probe
  misc_feature (1)..(25): SEQ ID NO: 2354; WAN024CW7_at; Start 187; Stop 211
caatcttgtatgaagtatgggcata

SEQ ID NO: 135746 - DNA, 25 bp, Artificial
  probe
  misc_feature (1)..(25): SEQ ID NO: 2354; WAN024CW7_at; Start 97; Stop 121
aaccgatatgagaaaaatggactcg

SEQ ID NO: 135747 - DNA, 25 bp, Artificial
  probe
  misc_feature (1)..(25): SEQ ID NO: 2354; WAN024CW7_at; Start 81; Stop 105
tctcccagcaaaggaaaaccgatat

SEQ ID NO: 135748 - DNA, 25 bp, Artificial
  probe
  misc_feature (1)..(25): SEQ ID NO: 2354; WAN024CW7_at; Start 45; Stop 69
tgaataccatcttccagactaccac

SEQ ID NO: 135749 - DNA, 25 bp, Artificial
  probe
  misc_feature (1)..(25): SEQ ID NO: 2354; WAN024CW7_at; Start 21; Stop 45
taatggcaatgcagagcctgacgtt

SEQ ID NO: 135750 - DNA, 25 bp, Artificial
  probe
  misc_feature (1)..(25): SEQ ID NO: 2354; WAN024CW7_at; Start 70; Stop 94
catacaaatcatctcccagcaaagg

SEQ ID NO: 135751 - DNA, 25 bp, Artificial
  probe
  misc_feature (1)..(25): SEQ ID NO: 2354; WAN024CW7_at; Start 185; Stop 209
tacaatcttgtatgaagtatgggca

SEQ ID NO: 135752 - DNA, 25 bp, Artificial
  probe
  misc_feature (1)..(25): SEQ ID NO: 2354; WAN024CW7_at; Start 163; Stop 187
agtgaatatttccataagaagctac

SEQ ID NO: 135753 - DNA, 25 bp, Artificial
  probe
  misc_feature (1)..(25): SEQ ID NO: 2354; WAN024CW7_at; Start 120; Stop 144
cggatttgatgggttcgaccagtgt

SEQ ID NO: 135754 - DNA, 25 bp, Artificial
  probe
  misc_feature (1)..(25): SEQ ID NO: 2354; WAN024CW7_at; Start 24; Stop 48
tggcaatgcagagcctgacgttgaa

SEQ ID NO: 135755 - DNA, 25 bp, Artificial
  probe
  misc_feature (1)..(25): SEQ ID NO: 2354; WAN024CW7_at; Start 201; Stop 225
gtatgggcatactttccgcctttag

SEQ ID NO: 135756 - DNA, 25 bp, Artificial
  probe
  misc_feature (1)..(25): SEQ ID NO: 2354; WAN024CW7_at; Start 146; Stop 170
caggtgaatatagaccaagtgaata

SEQ ID NO: 135757 - DNA, 25 bp, Artificial
  probe
  misc_feature (1)..(25): SEQ ID NO: 2354; WAN024CW7_at; Start 158; Stop 182
gaccaagtgaatatttccataagaa

SEQ ID NO: 135758 - DNA, 25 bp, Artificial
  probe
  misc_feature (1)..(25): SEQ ID NO: 2354; WAN024CW7_at; Start 103; Stop 127
tatgagaaaaatggactcggatttg

SEQ ID NO: 135759 - DNA, 25 bp, Artificial
  probe
  misc_feature (1)..(25): SEQ ID NO: 2354; WAN024CW7_at; Start 138; Stop 162
ccagtgtgcaggtgaatatagacca

SEQ ID NO: 135760 - DNA, 25 bp, Artificial
  probe
  misc_feature (1)..(25): SEQ ID NO: 2354; WAN024CW7_at; Start 197; Stop 221
tgaagtatgggcatactttccgcct

SEQ ID NO: 135761 - DNA, 25 bp, Artificial
  probe
  misc_feature (1)..(25): SEQ ID NO: 2354; WAN024CW7_at; Start 134; Stop 158
tcgaccagtgtgcaggtgaatatag

SEQ ID NO: 135762 - DNA, 25 bp, Artificial
  probe
  misc_feature (1)..(25): SEQ ID NO: 2354; WAN024CW7_at; Start 171; Stop 195
tttccataagaagctacaatcttgt

SEQ ID NO: 135763 - DNA, 25 bp, Artificial
  probe
  misc_feature (1)..(25): SEQ ID NO: 2354; WAN024CW7_at; Start 9; Stop 33
taaaaggataggtaatggcaatgca

SEQ ID NO: 135764 - DNA, 25 bp, Artificial
  probe
  misc_feature (1)..(25): SEQ ID NO: 2354; WAN024CW7_at; Start 116; Stop 140
gactcggatttgatgggttcgacca

SEQ ID NO: 135765 - DNA, 25 bp, Artificial
  probe
  misc_feature (1)..(25): SEQ ID NO: 2354; WAN024CW7_at; Start 15; Stop 39
gataggtaatggcaatgcagagcct

SEQ ID NO: 135766 - DNA, 25 bp, Artificial
  probe
  misc_feature (1)..(25): SEQ ID NO: 2354; WAN024CW7_at; Start 39; Stop 63
tgacgttgaataccatcttccagac

SEQ ID NO: 135767 - DNA, 25 bp, Artificial
  probe
  misc_feature (1)..(25): SEQ ID NO: 2354; WAN024CW7_at; Start 124; Stop 148
tttgatgggttcgaccagtgtgcag

SEQ ID NO: 135768 - DNA, 25 bp, Artificial
  probe
  misc_feature (1)..(25): SEQ ID NO: 2354; WAN024CW7_at; Start 54; Stop 78
tcttccagactaccaccatacaaat

SEQ ID NO: 135769 - DNA, 25 bp, Artificial
  probe
  misc_feature (1)..(25): SEQ ID NO: 2354; WAN024CW7_at; Start 112; Stop 136
aatggactcggatttgatgggttcg

SEQ ID NO: 135770 - DNA, 25 bp, Artificial
  probe
  misc_feature (1)..(25): SEQ ID NO: 2354; WAN024CW7_at; Start 27; Stop 51
caatgcagagcctgacgttgaatac

SEQ ID NO: 135771 - DNA, 25 bp, Artificial
  probe
  misc_feature (1)..(25): SEQ ID NO: 2354; WAN024CW7_at; Start 57; Stop 81
tccagactaccaccatacaaatcat

SEQ ID NO: 135772 - DNA, 25 bp, Artificial
  probe
  misc_feature (1)..(25): SEQ ID NO: 2354; WAN024CW7_at; Start 85; Stop 109
ccagcaaaggaaaaccgatatgaga

SEQ ID NO: 135773 - DNA, 25 bp, Artificial
  probe
  misc_feature (1)..(25): SEQ ID NO: 1590; WAN024CW8_at; Start 408; Stop 432
cttgatgctctttgccaagcacggt

SEQ ID NO: 135774 - DNA, 25 bp, Artificial
  probe
  misc_feature (1)..(25): SEQ ID NO: 1590; WAN024CW8_at; Start 229; Stop 253
gatattctctatgaggatgaccact

SEQ ID NO: 135775 - DNA, 25 bp, Artificial
  probe
  misc_feature (1)..(25): SEQ ID NO: 1590; WAN024CW8_at; Start 532; Stop 556
gaaattattgctccgattgcgcgtg

SEQ ID NO: 135776 - DNA, 25 bp, Artificial
  probe
  misc_feature (1)..(25): SEQ ID NO: 1590; WAN024CW8_at; Start 470; Stop 494
aatctatcgagaaacgctactttgc

SEQ ID NO: 135777 - DNA, 25 bp, Artificial
  probe
  misc_feature (1)..(25): SEQ ID NO: 1590; WAN024CW8_at; Start 672; Stop 696
tggtcgaacccatcaaatccgagtc

SEQ ID NO: 135778 - DNA, 25 bp, Artificial
  probe
  misc_feature (1)..(25): SEQ ID NO: 1590; WAN024CW8_at; Start 573; Stop 597
taccagacgagtggctaaaggcgga

SEQ ID NO: 135779 - DNA, 25 bp, Artificial
  probe
  misc_feature (1)..(25): SEQ ID NO: 1590; WAN024CW8_at; Start 312; Stop 336
taccattgccaattttatcaagggt

SEQ ID NO: 135780 - DNA, 25 bp, Artificial
  probe
  misc_feature (1)..(25): SEQ ID NO: 1590; WAN024CW8_at; Start 775; Stop 799
gctctgcattgccattacctatcct

SEQ ID NO: 135781 - DNA, 25 bp, Artificial
  probe
  misc_feature (1)..(25): SEQ ID NO: 1590; WAN024CW8_at; Start 3; Stop 27
gaggtttgaatttatcgcagatgaa

SEQ ID NO: 135782 - DNA, 25 bp, Artificial
  probe
  misc_feature (1)..(25): SEQ ID NO: 1590; WAN024CW8_at; Start 759; Stop 783
tggtattcaacgtcaggctctgcat

SEQ ID NO: 135783 - DNA, 25 bp, Artificial
  probe
  misc_feature (1)..(25): SEQ ID NO: 1590; WAN024CW8_at; Start 485; Stop 509
gctactttgctttggttaagggaga

SEQ ID NO: 135784 - DNA, 25 bp, Artificial
  probe
  misc_feature (1)..(25): SEQ ID NO: 1590; WAN024CW8_at; Start 261; Stop 285
cttgaataaaccctatggagtggct

SEQ ID NO: 135785 - DNA, 25 bp, Artificial
  probe
  misc_feature (1)..(25): SEQ ID NO: 1590; WAN024CW8_at; Start 436; Stop 460
gcccatgcacgattagacaagcagt

SEQ ID NO: 135786 - DNA, 25 bp, Artificial
  probe
  misc_feature (1)..(25): SEQ ID NO: 1590; WAN024CW8_at; Start 453; Stop 477
caagcagttgcagaagaaatctatc

SEQ ID NO: 135787 - DNA, 25 bp, Artificial
  probe
  misc_feature (1)..(25): SEQ ID NO: 1590; WAN024CW8_at; Start 559; Stop 583
gaagattccattattaccagacgag

SEQ ID NO: 135788 - DNA, 25 bp, Artificial
  probe
  misc_feature (1)..(25): SEQ ID NO: 1590; WAN024CW8_at; Start 274; Stop 298
tatggagtggcttctattcctagtg

SEQ ID NO: 135789 - DNA, 25 bp, Artificial
  probe
  misc_feature (1)..(25): SEQ ID NO: 1590; WAN024CW8_at; Start 642; Stop 666
tattcacttggtctatattcacctg

SEQ ID NO: 135790 - DNA, 25 bp, Artificial
  probe
  misc_feature (1)..(25): SEQ ID NO: 1590; WAN024CW8_at; Start 327; Stop 351
tatcaagggttactatgtcaagcaa

SEQ ID NO: 135791 - DNA, 25 bp, Artificial
  probe
  misc_feature (1)..(25): SEQ ID NO: 1590; WAN024CW8_at; Start 146; Stop 170
tattggacgttggagactacgttac

SEQ ID NO: 135792 - DNA, 25 bp, Artificial
  probe
  misc_feature (1)..(25): SEQ ID NO: 1590; WAN024CW8_at; Start 423; Stop 447
caagcacggttatgcccatgcacga

SEQ ID NO: 135793 - DNA, 25 bp, Artificial
  probe
  misc_feature (1)..(25): SEQ ID NO: 1590; WAN024CW8_at; Start 113; Stop 137
tggtcaataatcaaccgcaaaatgc

SEQ ID NO: 135794 - DNA, 25 bp, Artificial
  probe
  misc_feature (1)..(25): SEQ ID NO: 1590; WAN024CW8_at; Start 196; Stop 220
tttgaaaccttggaggctattgagc

SEQ ID NO: 135795 - DNA, 25 bp, Artificial
  probe
  misc_feature (1)..(25): SEQ ID NO: 1590; WAN024CW8_at; Start 828; Stop 852
gcagttagaaagtcccttgccggat

SEQ ID NO: 135796 - DNA, 25 bp, Artificial
  probe
  misc_feature (1)..(25): SEQ ID NO: 1590; WAN024CW8_at; Start 22; Stop 46
gatgaacatgtcaaggttaagacct

SEQ ID NO: 135797 - DNA, 25 bp, Artificial
  probe
  misc_feature (1)..(25): SEQ ID NO: 1590; WAN024CW8_at; Start 58; Stop 82
cacgaggtttctaagggattgctgg

SEQ ID NO: 135798 - DNA, 25 bp, Artificial
  probe
  misc_feature (1)..(25): SEQ ID NO: 1590; WAN024CW8_at; Start 130; Stop 154
caaaatgcaacgtatctattggacg

SEQ ID NO: 135799 - DNA, 25 bp, Artificial
  probe
  misc_feature (1)..(25): SEQ ID NO: 1590; WAN024CW8_at; Start 358; Stop 382
gaaaatcagcaggttcacattgtta

SEQ ID NO: 135800 - DNA, 25 bp, Artificial
  probe
  misc_feature (1)..(25): SEQ ID NO: 1590; WAN024CW8_at; Start 604; Stop 628
gcccatacttcatacaagattgtag

SEQ ID NO: 135801 - DNA, 25 bp, Artificial
  probe
  misc_feature (1)..(25): SEQ ID NO: 1590; WAN024CW8_at; Start 745; Stop 769
ggtagtctggaagatggtattcaac

SEQ ID NO: 135802 - DNA, 25 bp, Artificial
  probe
  misc_feature (1)..(25): SEQ ID NO: 1590; WAN024CW8_at; Start 373; Stop 397
cacattgttaccagactagataggg

SEQ ID NO: 135803 - DNA, 25 bp, Artificial
  probe
  misc_feature (1)..(25): SEQ ID NO: 1590; WAN024CW8_at; Start 243; Stop 267
ggatgaccactttctagtcttgaat

SEQ ID NO: 135804 - DNA, 25 bp, Artificial
  probe
  misc_feature (1)..(25): SEQ ID NO: 1590; WAN024CW8_at; Start 588; Stop 612
taaaggcggaaagtatgcccatact

SEQ ID NO: 135805 - DNA, 25 bp, Artificial
  probe
  misc_feature (1)..(25): SEQ ID NO: 1590; WAN024CW8_at; Start 544; Stop 568
ccgattgcgcgtgatgaagattcca

SEQ ID NO: 135806 - DNA, 25 bp, Artificial
  probe
  misc_feature (1)..(25): SEQ ID NO: 1590; WAN024CW8_at; Start 718; Stop 742
cctttgctgggagatgatttgtatg

SEQ ID NO: 135807 - DNA, 25 bp, Artificial
  probe
  misc_feature (1)..(25): SEQ ID NO: 5131; WAN024CW9_at; Start 361; Stop 385
ttccttgcgaaattctttcacacga

SEQ ID NO: 135808 - DNA, 25 bp, Artificial
  probe
  misc_feature (1)..(25): SEQ ID NO: 5131; WAN024CW9_at; Start 230; Stop 254
tcagtttggaggctgcgggcgagat

SEQ ID NO: 135809 - DNA, 25 bp, Artificial
  probe
  misc_feature (1)..(25): SEQ ID NO: 5131; WAN024CW9_at; Start 369; Stop 393
gaaattctttcacacgattcatctg

SEQ ID NO: 135810 - DNA, 25 bp, Artificial
  probe
  misc_feature (1)..(25): SEQ ID NO: 5131; WAN024CW9_at; Start 313; Stop 337
tctcgagacaccgatatccttggcg

SEQ ID NO: 135811 - DNA, 25 bp, Artificial
  probe
  misc_feature (1)..(25): SEQ ID NO: 5131; WAN024CW9_at; Start 245; Stop 269
cgggcgagattgagacagagttcca

SEQ ID NO: 135812 - DNA, 25 bp, Artificial
  probe
  misc_feature (1)..(25): SEQ ID NO: 5131; WAN024CW9_at; Start 129; Stop 153
aaataccgtatgtgcgtttgatcag

SEQ ID NO: 135813 - DNA, 25 bp, Artificial
  probe
  misc_feature (1)..(25): SEQ ID NO: 5131; WAN024CW9_at; Start 143; Stop 167
cgtttgatcagtttttcagtgaagg

SEQ ID NO: 135814 - DNA, 25 bp, Artificial
  probe
  misc_feature (1)..(25): SEQ ID NO: 5131; WAN024CW9_at; Start 272; Stop 296
gttggattgtacttgtcgttttcaa

SEQ ID NO: 135815 - DNA, 25 bp, Artificial
  probe
  misc_feature (1)..(25): SEQ ID NO: 5131; WAN024CW9_at; Start 73; Stop 97
gacttggttcccaatactatcggcc

SEQ ID NO: 135816 - DNA, 25 bp, Artificial
  probe
  misc_feature (1)..(25): SEQ ID NO: 5131; WAN024CW9_at; Start 40; Stop 64
tccgaaaatcatcagataaaagagg

SEQ ID NO: 135817 - DNA, 25 bp, Artificial
  probe
  misc_feature (1)..(25): SEQ ID NO: 5131; WAN024CW9_at; Start 132; Stop 156
taccgtatgtgcgtttgatcagttt

SEQ ID NO: 135818 - DNA, 25 bp, Artificial
  probe
  misc_feature (1)..(25): SEQ ID NO: 5131; WAN024CW9_at; Start 95; Stop 119
gcctcacgccgtttgtattcgtcaa

SEQ ID NO: 135819 - DNA, 25 bp, Artificial
  probe
  misc_feature (1)..(25): SEQ ID NO: 5131; WAN024CW9_at; Start 121; Stop 145
gggaccagaaataccgtatgtgcgt

SEQ ID NO: 135820 - DNA, 25 bp, Artificial
  probe
  misc_feature (1)..(25): SEQ ID NO: 5131; WAN024CW9_at; Start 106; Stop 130
tttgtattcgtcaaggggaccagaa

SEQ ID NO: 135821 - DNA, 25 bp, Artificial
  probe
  misc_feature (1)..(25): SEQ ID NO: 5131; WAN024CW9_at; Start 148; Stop 172
gatcagtttttcagtgaaggtttct

SEQ ID NO: 135822 - DNA, 25 bp, Artificial
  probe
  misc_feature (1)..(25): SEQ ID NO: 5131; WAN024CW9_at; Start 281; Stop 305
tacttgtcgttttcaatcatattga

SEQ ID NO: 135823 - DNA, 25 bp, Artificial
  probe
  misc_feature (1)..(25): SEQ ID NO: 5131; WAN024CW9_at; Start 98; Stop 122
tcacgccgtttgtattcgtcaaggg

SEQ ID NO: 135824 - DNA, 25 bp, Artificial
  probe
  misc_feature (1)..(25): SEQ ID NO: 5131; WAN024CW9_at; Start 125; Stop 149
ccagaaataccgtatgtgcgtttga

SEQ ID NO: 135825 - DNA, 25 bp, Artificial
  probe
  misc_feature (1)..(25): SEQ ID NO: 5131; WAN024CW9_at; Start 12; Stop 36
tataggccagaaggagtggaataag

SEQ ID NO: 135826 - DNA, 25 bp, Artificial
  probe
  misc_feature (1)..(25): SEQ ID NO: 5131; WAN024CW9_at; Start 78; Stop 102
ggttcccaatactatcggcctcacg

SEQ ID NO: 135827 - DNA, 25 bp, Artificial
  probe
  misc_feature (1)..(25): SEQ ID NO: 5131; WAN024CW9_at; Start 159; Stop 183
cagtgaaggtttcttttttcatgag

SEQ ID NO: 135828 - DNA, 25 bp, Artificial
  probe
  misc_feature (1)..(25): SEQ ID NO: 5131; WAN024CW9_at; Start 215; Stop 239
aagagactgttgaggtcagtttgga

SEQ ID NO: 135829 - DNA, 25 bp, Artificial
  probe
  misc_feature (1)..(25): SEQ ID NO: 5131; WAN024CW9_at; Start 85; Stop 109
aatactatcggcctcacgccgtttg

SEQ ID NO: 135830 - DNA, 25 bp, Artificial
  probe
  misc_feature (1)..(25): SEQ ID NO: 5131; WAN024CW9_at; Start 25; Stop 49
gagtggaataagatttccgaaaatc

SEQ ID NO: 135831 - DNA, 25 bp, Artificial
  probe
  misc_feature (1)..(25): SEQ ID NO: 5131; WAN024CW9_at; Start 2; Stop 26
tgagggtatttataggccagaagga

SEQ ID NO: 135832 - DNA, 25 bp, Artificial
  probe
  misc_feature (1)..(25): SEQ ID NO: 5131; WAN024CW9_at; Start 137; Stop 161
tatgtgcgtttgatcagtttttcag

SEQ ID NO: 135833 - DNA, 25 bp, Artificial
  probe
  misc_feature (1)..(25): SEQ ID NO: 5131; WAN024CW9_at; Start 18; Stop 42
ccagaaggagtggaataagatttcc

SEQ ID NO: 135834 - DNA, 25 bp, Artificial
  probe
  misc_feature (1)..(25): SEQ ID NO: 5131; WAN024CW9_at; Start 315; Stop 339
tcgagacaccgatatccttggcgag

SEQ ID NO: 135835 - DNA, 25 bp, Artificial
  probe
  misc_feature (1)..(25): SEQ ID NO: 5131; WAN024CW9_at; Start 177; Stop 201
tcatgagtttgctccttttttaaaa

SEQ ID NO: 135836 - DNA, 25 bp, Artificial
  probe
  misc_feature (1)..(25): SEQ ID NO: 5131; WAN024CW9_at; Start 67; Stop 91
gataaagacttggttcccaatacta

SEQ ID NO: 135837 - DNA, 25 bp, Artificial
  probe
  misc_feature (1)..(25): SEQ ID NO: 5131; WAN024CW9_at; Start 167; Stop 191
gtttcttttttcatgagtttgctcc

SEQ ID NO: 135838 - DNA, 25 bp, Artificial
  probe
  misc_feature (1)..(25): SEQ ID NO: 5131; WAN024CW9_at; Start 8; Stop 32
tatttataggccagaaggagtggaa

SEQ ID NO: 135839 - DNA, 25 bp, Artificial
  probe
  misc_feature (1)..(25): SEQ ID NO: 5131; WAN024CW9_at; Start 309; Stop 333
tctgtctcgagacaccgatatcctt

SEQ ID NO: 135840 - DNA, 25 bp, Artificial
  probe
  misc_feature (1)..(25): SEQ ID NO: 5131; WAN024CW9_at; Start 211; Stop 235
ccaaaagagactgttgaggtcagtt

SEQ ID NO: 135841 - DNA, 25 bp, Artificial
  probe
  misc_feature (1)..(25): SEQ ID NO: 641; WAN024CWA_at; Start 257; Stop 281
aaaaaacaggcatcacagtcattga

SEQ ID NO: 135842 - DNA, 25 bp, Artificial
  probe
  misc_feature (1)..(25): SEQ ID NO: 641; WAN024CWA_at; Start 305; Stop 329
aaagcaagcaactacactacccagg

SEQ ID NO: 135843 - DNA, 25 bp, Artificial
  probe
  misc_feature (1)..(25): SEQ ID NO: 641; WAN024CWA_at; Start 317; Stop 341
tacactacccaggtctgaaagcagg

SEQ ID NO: 135844 - DNA, 25 bp, Artificial
  probe
  misc_feature (1)..(25): SEQ ID NO: 641; WAN024CWA_at; Start 60; Stop 84
ccttgacgaatacaaacggcgtgag

SEQ ID NO: 135845 - DNA, 25 bp, Artificial
  probe
  misc_feature (1)..(25): SEQ ID NO: 641; WAN024CWA_at; Start 90; Stop 114
tagtattgggaaccaagtctttatc

SEQ ID NO: 135846 - DNA, 25 bp, Artificial
  probe
  misc_feature (1)..(25): SEQ ID NO: 641; WAN024CWA_at; Start 235; Stop 259
ggctatgtcacctaccaaatgaaaa

SEQ ID NO: 135847 - DNA, 25 bp, Artificial
  probe
  misc_feature (1)..(25): SEQ ID NO: 641; WAN024CWA_at; Start 465; Stop 489
tattttcttcggagcgagcatacag

SEQ ID NO: 135848 - DNA, 25 bp, Artificial
  probe
  misc_feature (1)..(25): SEQ ID NO: 641; WAN024CWA_at; Start 172; Stop 196
taccctcaagaagtggctctaatct

SEQ ID NO: 135849 - DNA, 25 bp, Artificial
  probe
  misc_feature (1)..(25): SEQ ID NO: 641; WAN024CWA_at; Start 199; Stop 223
cctcctctgattttagtgattgccc

SEQ ID NO: 135850 - DNA, 25 bp, Artificial
  probe
  misc_feature (1)..(25): SEQ ID NO: 641; WAN024CWA_at; Start 400; Stop 424
gaaggtcaggactattttcattctc

SEQ ID NO: 135851 - DNA, 25 bp, Artificial
  probe
  misc_feature (1)..(25): SEQ ID NO: 641; WAN024CWA_at; Start 280; Stop 304
gaaccagatatgctgaatgagaaag

SEQ ID NO: 135852 - DNA, 25 bp, Artificial
  probe
  misc_feature (1)..(25): SEQ ID NO: 641; WAN024CWA_at; Start 459; Stop 483
cggttctattttcttcggagcgagc

SEQ ID NO: 135853 - DNA, 25 bp, Artificial
  probe
  misc_feature (1)..(25): SEQ ID NO: 641; WAN024CWA_at; Start 493; Stop 517
ctcatctcccgtcgcattgcaaaaa

SEQ ID NO: 135854 - DNA, 25 bp, Artificial
  probe
  misc_feature (1)..(25): SEQ ID NO: 641; WAN024CWA_at; Start 293; Stop 317
tgaatgagaaagaaagcaagcaact

SEQ ID NO: 135855 - DNA, 25 bp, Artificial
  probe
  misc_feature (1)..(25): SEQ ID NO: 641; WAN024CWA_at; Start 519; Stop 543
taagaaaaatcaagatgaggatcta

SEQ ID NO: 135856 - DNA, 25 bp, Artificial
  probe
  misc_feature (1)..(25): SEQ ID NO: 641; WAN024CWA_at; Start 362; Stop 386
tgttttttataactcctcttctcag

SEQ ID NO: 135857 - DNA, 25 bp, Artificial
  probe
  misc_feature (1)..(25): SEQ ID NO: 641; WAN024CWA_at; Start 389; Stop 413
tactcatagatgaaggtcaggacta

SEQ ID NO: 135858 - DNA, 25 bp, Artificial
  probe
  misc_feature (1)..(25): SEQ ID NO: 641; WAN024CWA_at; Start 22; Stop 46
gaaaaactgatcaaacgcacatacg

SEQ ID NO: 135859 - DNA, 25 bp, Artificial
  probe
  misc_feature (1)..(25): SEQ ID NO: 641; WAN024CWA_at; Start 265; Stop 289
ggcatcacagtcattgaaccagata

SEQ ID NO: 135860 - DNA, 25 bp, Artificial
  probe
  misc_feature (1)..(25): SEQ ID NO: 641; WAN024CWA_at; Start 68; Stop 92
aatacaaacggcgtgaggccgatag

SEQ ID NO: 135861 - DNA, 25 bp, Artificial
  probe
  misc_feature (1)..(25): SEQ ID NO: 641; WAN024CWA_at; Start 207; Stop 231
gattttagtgattgccctcatcgct

SEQ ID NO: 135862 - DNA, 25 bp, Artificial
  probe
  misc_feature (1)..(25): SEQ ID NO: 641; WAN024CWA_at; Start 502; Stop 526
cgtcgcattgcaaaaactaagaaaa

SEQ ID NO: 135863 - DNA, 25 bp, Artificial
  probe
  misc_feature (1)..(25): SEQ ID NO: 641; WAN024CWA_at; Start 30; Stop 54
gatcaaacgcacatacggtatttct

SEQ ID NO: 135864 - DNA, 25 bp, Artificial
  probe
  misc_feature (1)..(25): SEQ ID NO: 641; WAN024CWA_at; Start 147; Stop 171
tattccactccttctggcctataaa

SEQ ID NO: 135865 - DNA, 25 bp, Artificial
  probe
  misc_feature (1)..(25): SEQ ID NO: 641; WAN024CWA_at; Start 337; Stop 361
gcaggtttgttctttggtctatgga

SEQ ID NO: 135866 - DNA, 25 bp, Artificial
  probe
  misc_feature (1)..(25): SEQ ID NO: 641; WAN024CWA_at; Start 437; Stop 461
gaaatggtgtatcaagtattctcgg

SEQ ID NO: 135867 - DNA, 25 bp, Artificial
  probe
  misc_feature (1)..(25): SEQ ID NO: 641; WAN024CWA_at; Start 10; Stop 34
gaaaccttcactgaaaaactgatca

SEQ ID NO: 135868 - DNA, 25 bp, Artificial
  probe
  misc_feature (1)..(25): SEQ ID NO: 641; WAN024CWA_at; Start 117; Stop 141
cctcttttatctgatgattttcgga

SEQ ID NO: 135869 - DNA, 25 bp, Artificial
  probe
  misc_feature (1)..(25): SEQ ID NO: 641; WAN024CWA_at; Start 421; Stop 445
tctcttctcactataagaaatggtg

SEQ ID NO: 135870 - DNA, 25 bp, Artificial
  probe
  misc_feature (1)..(25): SEQ ID NO: 641; WAN024CWA_at; Start 79; Stop 103
cgtgaggccgatagtattgggaacc

SEQ ID NO: 135871 - DNA, 25 bp, Artificial
  probe
  misc_feature (1)..(25): SEQ ID NO: 641; WAN024CWA_at; Start 442; Stop 466
ggtgtatcaagtattctcggttcta

SEQ ID NO: 135872 - DNA, 25 bp, Artificial
  probe
  misc_feature (1)..(25): SEQ ID NO: 641; WAN024CWA_at; Start 406; Stop 430
caggactattttcattctcttctca

SEQ ID NO: 135873 - DNA, 25 bp, Artificial
  probe
  misc_feature (1)..(25): SEQ ID NO: 641; WAN024CWA_at; Start 184; Stop 208
gtggctctaatctatcctcctctga

SEQ ID NO: 135874 - DNA, 25 bp, Artificial
  probe
  misc_feature (1)..(25): SEQ ID NO: 641; WAN024CWA_at; Start 162; Stop 186
ggcctataaataccctcaagaagtg

SEQ ID NO: 135875 - DNA, 25 bp, Artificial
  probe
  misc_feature (1)..(25): SEQ ID NO: 7382; WAN024CWB_at; Start 12; Stop 36
catgttcagttatcagagtgaaaat

SEQ ID NO: 135876 - DNA, 25 bp, Artificial
  probe
  misc_feature (1)..(25): SEQ ID NO: 7382; WAN024CWB_at; Start 44; Stop 68
tctacaaaatgaaaggcatgtctga

SEQ ID NO: 135877 - DNA, 25 bp, Artificial
  probe
  misc_feature (1)..(25): SEQ ID NO: 7382; WAN024CWB_at; Start 54; Stop 78
gaaaggcatgtctgagattaccctc

SEQ ID NO: 135878 - DNA, 25 bp, Artificial
  probe
  misc_feature (1)..(25): SEQ ID NO: 7382; WAN024CWB_at; Start 10; Stop 34
ctcatgttcagttatcagagtgaaa

SEQ ID NO: 135879 - DNA, 25 bp, Artificial
  probe
  misc_feature (1)..(25): SEQ ID NO: 7382; WAN024CWB_at; Start 3; Stop 27
gaaaaatctcatgttcagttatcag

SEQ ID NO: 135880 - DNA, 25 bp, Artificial
  probe
  misc_feature (1)..(25): SEQ ID NO: 7382; WAN024CWB_at; Start 36; Stop 60
tcttttcatctacaaaatgaaaggc

SEQ ID NO: 135881 - DNA, 25 bp, Artificial
  probe
  misc_feature (1)..(25): SEQ ID NO: 7382; WAN024CWB_at; Start 42; Stop 66
catctacaaaatgaaaggcatgtct

SEQ ID NO: 135882 - DNA, 25 bp, Artificial
  probe
  misc_feature (1)..(25): SEQ ID NO: 7382; WAN024CWB_at; Start 25; Stop 49
cagagtgaaaatcttttcatctaca

SEQ ID NO: 135883 - DNA, 25 bp, Artificial
  probe
  misc_feature (1)..(25): SEQ ID NO: 7382; WAN024CWB_at; Start 19; Stop 43
agttatcagagtgaaaatcttttca

SEQ ID NO: 135884 - DNA, 25 bp, Artificial
  probe
  misc_feature (1)..(25): SEQ ID NO: 7382; WAN024CWB_at; Start 7; Stop 31
aatctcatgttcagttatcagagtg

SEQ ID NO: 135885 - DNA, 25 bp, Artificial
  probe
  misc_feature (1)..(25): SEQ ID NO: 7382; WAN024CWB_at; Start 9; Stop 33
tctcatgttcagttatcagagtgaa

SEQ ID NO: 135886 - DNA, 25 bp, Artificial
  probe
  misc_feature (1)..(25): SEQ ID NO: 7382; WAN024CWB_at; Start 51; Stop 75
aatgaaaggcatgtctgagattacc

SEQ ID NO: 135887 - DNA, 25 bp, Artificial
  probe
  misc_feature (1)..(25): SEQ ID NO: 7382; WAN024CWB_at; Start 8; Stop 32
atctcatgttcagttatcagagtga

SEQ ID NO: 135888 - DNA, 25 bp, Artificial
  probe
  misc_feature (1)..(25): SEQ ID NO: 7382; WAN024CWB_at; Start 39; Stop 63
tttcatctacaaaatgaaaggcatg

SEQ ID NO: 135889 - DNA, 25 bp, Artificial
  probe
  misc_feature (1)..(25): SEQ ID NO: 7382; WAN024CWB_at; Start 46; Stop 70
tacaaaatgaaaggcatgtctgaga

SEQ ID NO: 135890 - DNA, 25 bp, Artificial
  probe
  misc_feature (1)..(25): SEQ ID NO: 7382; WAN024CWB_at; Start 5; Stop 29
aaaatctcatgttcagttatcagag

SEQ ID NO: 135891 - DNA, 25 bp, Artificial
  probe
  misc_feature (1)..(25): SEQ ID NO: 7382; WAN024CWB_at; Start 20; Stop 44
gttatcagagtgaaaatcttttcat

SEQ ID NO: 135892 - DNA, 25 bp, Artificial
  probe
  misc_feature (1)..(25): SEQ ID NO: 7382; WAN024CWB_at; Start 31; Stop 55
gaaaatcttttcatctacaaaatga

SEQ ID NO: 135893 - DNA, 25 bp, Artificial
  probe
  misc_feature (1)..(25): SEQ ID NO: 7382; WAN024CWB_at; Start 57; Stop 81
aggcatgtctgagattaccctctat

SEQ ID NO: 135894 - DNA, 25 bp, Artificial
  probe
  misc_feature (1)..(25): SEQ ID NO: 7382; WAN024CWB_at; Start 37; Stop 61
cttttcatctacaaaatgaaaggca

SEQ ID NO: 135895 - DNA, 25 bp, Artificial
  probe
  misc_feature (1)..(25): SEQ ID NO: 7382; WAN024CWB_at; Start 15; Stop 39
gttcagttatcagagtgaaaatctt

SEQ ID NO: 135896 - DNA, 25 bp, Artificial
  probe
  misc_feature (1)..(25): SEQ ID NO: 7382; WAN024CWB_at; Start 41; Stop 65
tcatctacaaaatgaaaggcatgtc

SEQ ID NO: 135897 - DNA, 25 bp, Artificial
  probe
  misc_feature (1)..(25): SEQ ID NO: 7382; WAN024CWB_at; Start 52; Stop 76
atgaaaggcatgtctgagattaccc

SEQ ID NO: 135898 - DNA, 25 bp, Artificial
  probe
  misc_feature (1)..(25): SEQ ID NO: 7382; WAN024CWB_at; Start 53; Stop 77
tgaaaggcatgtctgagattaccct

SEQ ID NO: 135899 - DNA, 25 bp, Artificial
  probe
  misc_feature (1)..(25): SEQ ID NO: 7382; WAN024CWB_at; Start 50; Stop 74
aaatgaaaggcatgtctgagattac

SEQ ID NO: 135900 - DNA, 25 bp, Artificial
  probe
  misc_feature (1)..(25): SEQ ID NO: 7382; WAN024CWB_at; Start 43; Stop 67
atctacaaaatgaaaggcatgtctg

SEQ ID NO: 135901 - DNA, 25 bp, Artificial
  probe
  misc_feature (1)..(25): SEQ ID NO: 7382; WAN024CWB_at; Start 55; Stop 79
aaaggcatgtctgagattaccctct

SEQ ID NO: 135902 - DNA, 25 bp, Artificial
  probe
  misc_feature (1)..(25): SEQ ID NO: 7382; WAN024CWB_at; Start 56; Stop 80
aaggcatgtctgagattaccctcta

SEQ ID NO: 135903 - DNA, 25 bp, Artificial
  probe
  misc_feature (1)..(25): SEQ ID NO: 7382; WAN024CWB_at; Start 45; Stop 69
ctacaaaatgaaaggcatgtctgag

SEQ ID NO: 135904 - DNA, 25 bp, Artificial
  probe
  misc_feature (1)..(25): SEQ ID NO: 7382; WAN024CWB_at; Start 48; Stop 72
caaaatgaaaggcatgtctgagatt

SEQ ID NO: 135905 - DNA, 25 bp, Artificial
  probe
  misc_feature (1)..(25): SEQ ID NO: 7382; WAN024CWB_at; Start 14; Stop 38
tgttcagttatcagagtgaaaatct

SEQ ID NO: 135906 - DNA, 25 bp, Artificial
  probe
  misc_feature (1)..(25): SEQ ID NO: 7382; WAN024CWB_at; Start 18; Stop 42
cagttatcagagtgaaaatcttttc

SEQ ID NO: 135907 - DNA, 25 bp, Artificial
  probe
  misc_feature (1)..(25): SEQ ID NO: 7382; WAN024CWB_at; Start 11; Stop 35
tcatgttcagttatcagagtgaaaa

SEQ ID NO: 135908 - DNA, 25 bp, Artificial
  probe
  misc_feature (1)..(25): SEQ ID NO: 7382; WAN024CWB_at; Start 4; Stop 28
aaaaatctcatgttcagttatcaga

SEQ ID NO: 135909 - DNA, 25 bp, Artificial
  probe
  misc_feature (1)..(25): SEQ ID NO: 6706; WAN024CWC_at; Start 56; Stop 80
gaactgaaattgctttgcgtgcact

SEQ ID NO: 135910 - DNA, 25 bp, Artificial
  probe
  misc_feature (1)..(25): SEQ ID NO: 6706; WAN024CWC_at; Start 63; Stop 87
aattgctttgcgtgcactaactaat

SEQ ID NO: 135911 - DNA, 25 bp, Artificial
  probe
  misc_feature (1)..(25): SEQ ID NO: 6706; WAN024CWC_at; Start 60; Stop 84
tgaaattgctttgcgtgcactaact

SEQ ID NO: 135912 - DNA, 25 bp, Artificial
  probe
  misc_feature (1)..(25): SEQ ID NO: 6706; WAN024CWC_at; Start 53; Stop 77
gaagaactgaaattgctttgcgtgc

SEQ ID NO: 135913 - DNA, 25 bp, Artificial
  probe
  misc_feature (1)..(25): SEQ ID NO: 6706; WAN024CWC_at; Start 62; Stop 86
aaattgctttgcgtgcactaactaa

SEQ ID NO: 135914 - DNA, 25 bp, Artificial
  probe
  misc_feature (1)..(25): SEQ ID NO: 6706; WAN024CWC_at; Start 57; Stop 81
aactgaaattgctttgcgtgcacta

SEQ ID NO: 135915 - DNA, 25 bp, Artificial
  probe
  misc_feature (1)..(25): SEQ ID NO: 6706; WAN024CWC_at; Start 58; Stop 82
actgaaattgctttgcgtgcactaa

SEQ ID NO: 135916 - DNA, 25 bp, Artificial
  probe
  misc_feature (1)..(25): SEQ ID NO: 6706; WAN024CWC_at; Start 54; Stop 78
aagaactgaaattgctttgcgtgca

SEQ ID NO: 135917 - DNA, 25 bp, Artificial
  probe
  misc_feature (1)..(25): SEQ ID NO: 6706; WAN024CWC_at; Start 59; Stop 83
ctgaaattgctttgcgtgcactaac

SEQ ID NO: 135918 - DNA, 25 bp, Artificial
  probe
  misc_feature (1)..(25): SEQ ID NO: 6706; WAN024CWC_at; Start 55; Stop 79
agaactgaaattgctttgcgtgcac

SEQ ID NO: 135919 - DNA, 25 bp, Artificial
  probe
  misc_feature (1)..(25): SEQ ID NO: 6706; WAN024CWC_at; Start 52; Stop 76
ggaagaactgaaattgctttgcgtg

SEQ ID NO: 135920 - DNA, 25 bp, Artificial
  probe
  misc_feature (1)..(25): SEQ ID NO: 6706; WAN024CWC_at; Start 61; Stop 85
gaaattgctttgcgtgcactaacta

SEQ ID NO: 135921 - DNA, 25 bp, Artificial
  probe
  misc_feature (1)..(25): SEQ ID NO: 5327; WAN024CWD_at; Start 40; Stop 64
tccgttgaacttttggccaagattc

SEQ ID NO: 135922 - DNA, 25 bp, Artificial
  probe
  misc_feature (1)..(25): SEQ ID NO: 5327; WAN024CWD_at; Start 46; Stop 70
gaacttttggccaagattccattaa

SEQ ID NO: 135923 - DNA, 25 bp, Artificial
  probe
  misc_feature (1)..(25): SEQ ID NO: 5327; WAN024CWD_at; Start 90; Stop 114
tgctacttcctttgcgactgtacga

SEQ ID NO: 135924 - DNA, 25 bp, Artificial
  probe
  misc_feature (1)..(25): SEQ ID NO: 5327; WAN024CWD_at; Start 82; Stop 106
cctttatctgctacttcctttgcga

SEQ ID NO: 135925 - DNA, 25 bp, Artificial
  probe
  misc_feature (1)..(25): SEQ ID NO: 5327; WAN024CWD_at; Start 108; Stop 132
tgtacgacgcttgataattcgcgat

SEQ ID NO: 135926 - DNA, 25 bp, Artificial
  probe
  misc_feature (1)..(25): SEQ ID NO: 5327; WAN024CWD_at; Start 54; Stop 78
ggccaagattccattaaccttgatt

SEQ ID NO: 135927 - DNA, 25 bp, Artificial
  probe
  misc_feature (1)..(25): SEQ ID NO: 5327; WAN024CWD_at; Start 110; Stop 134
tacgacgcttgataattcgcgatac

SEQ ID NO: 135928 - DNA, 25 bp, Artificial
  probe
  misc_feature (1)..(25): SEQ ID NO: 5327; WAN024CWD_at; Start 252; Stop 276
taataaactttctccaaaaatcagc

SEQ ID NO: 135929 - DNA, 25 bp, Artificial
  probe
  misc_feature (1)..(25): SEQ ID NO: 5327; WAN024CWD_at; Start 102; Stop 126
tgcgactgtacgacgcttgataatt

SEQ ID NO: 135930 - DNA, 25 bp, Artificial
  probe
  misc_feature (1)..(25): SEQ ID NO: 5327; WAN024CWD_at; Start 97; Stop 121
tcctttgcgactgtacgacgcttga

SEQ ID NO: 135931 - DNA, 25 bp, Artificial
  probe
  misc_feature (1)..(25): SEQ ID NO: 5327; WAN024CWD_at; Start 9; Stop 33
gcgaatttcaacttggtcattaact

SEQ ID NO: 135932 - DNA, 25 bp, Artificial
  probe
  misc_feature (1)..(25): SEQ ID NO: 5327; WAN024CWD_at; Start 5; Stop 29
caaagcgaatttcaacttggtcatt

SEQ ID NO: 135933 - DNA, 25 bp, Artificial
  probe
  misc_feature (1)..(25): SEQ ID NO: 5327; WAN024CWD_at; Start 112; Stop 136
cgacgcttgataattcgcgatactt

SEQ ID NO: 135934 - DNA, 25 bp, Artificial
  probe
  misc_feature (1)..(25): SEQ ID NO: 5327; WAN024CWD_at; Start 105; Stop 129
gactgtacgacgcttgataattcgc

SEQ ID NO: 135935 - DNA, 25 bp, Artificial
  probe
  misc_feature (1)..(25): SEQ ID NO: 5327; WAN024CWD_at; Start 99; Stop 123
ctttgcgactgtacgacgcttgata

SEQ ID NO: 135936 - DNA, 25 bp, Artificial
  probe
  misc_feature (1)..(25): SEQ ID NO: 5327; WAN024CWD_at; Start 1; Stop 25
ttgccaaagcgaatttcaacttggt

SEQ ID NO: 135937 - DNA, 25 bp, Artificial
  probe
  misc_feature (1)..(25): SEQ ID NO: 5327; WAN024CWD_at; Start 60; Stop 84
gattccattaaccttgattctacct

SEQ ID NO: 135938 - DNA, 25 bp, Artificial
  probe
  misc_feature (1)..(25): SEQ ID NO: 5327; WAN024CWD_at; Start 233; Stop 257
ccttagactcttttatctctaataa

SEQ ID NO: 135939 - DNA, 25 bp, Artificial
  probe
  misc_feature (1)..(25): SEQ ID NO: 5327; WAN024CWD_at; Start 148; Stop 172
tctaatctcatccttattacctcaa

SEQ ID NO: 135940 - DNA, 25 bp, Artificial
  probe
  misc_feature (1)..(25): SEQ ID NO: 5327; WAN024CWD_at; Start 93; Stop 117
tacttcctttgcgactgtacgacgc

SEQ ID NO: 135941 - DNA, 25 bp, Artificial
  probe
  misc_feature (1)..(25): SEQ ID NO: 5327; WAN024CWD_at; Start 199; Stop 223
tttatagaagaaaaatatcaaatgg

SEQ ID NO: 135942 - DNA, 25 bp, Artificial
  probe
  misc_feature (1)..(25): SEQ ID NO: 5327; WAN024CWD_at; Start 162; Stop 186
tattacctcaatttattattgtacc

SEQ ID NO: 135943 - DNA, 25 bp, Artificial
  probe
  misc_feature (1)..(25): SEQ ID NO: 5327; WAN024CWD_at; Start 22; Stop 46
tggtcattaactttcaagtccgttg

SEQ ID NO: 135944 - DNA, 25 bp, Artificial
  probe
  misc_feature (1)..(25): SEQ ID NO: 5327; WAN024CWD_at; Start 115; Stop 139
cgcttgataattcgcgatactttta

SEQ ID NO: 135945 - DNA, 25 bp, Artificial
  probe
  misc_feature (1)..(25): SEQ ID NO: 5327; WAN024CWD_at; Start 127; Stop 151
cgcgatacttttaaatatttatcta

SEQ ID NO: 135946 - DNA, 25 bp, Artificial
  probe
  misc_feature (1)..(25): SEQ ID NO: 5327; WAN024CWD_at; Start 51; Stop 75
tttggccaagattccattaaccttg

SEQ ID NO: 135947 - DNA, 25 bp, Artificial
  probe
  misc_feature (1)..(25): SEQ ID NO: 5327; WAN024CWD_at; Start 35; Stop 59
tcaagtccgttgaacttttggccaa

SEQ ID NO: 135948 - DNA, 25 bp, Artificial
  probe
  misc_feature (1)..(25): SEQ ID NO: 5327; WAN024CWD_at; Start 75; Stop 99
gattctacctttatctgctacttcc

SEQ ID NO: 135949 - DNA, 25 bp, Artificial
  probe
  misc_feature (1)..(25): SEQ ID NO: 5327; WAN024CWD_at; Start 86; Stop 110
tatctgctacttcctttgcgactgt

SEQ ID NO: 135950 - DNA, 25 bp, Artificial
  probe
  misc_feature (1)..(25): SEQ ID NO: 5327; WAN024CWD_at; Start 68; Stop 92
taaccttgattctacctttatctgc

SEQ ID NO: 135951 - DNA, 25 bp, Artificial
  probe
  misc_feature (1)..(25): SEQ ID NO: 5327; WAN024CWD_at; Start 182; Stop 206
gtaccatttttatctattttataga

SEQ ID NO: 135952 - DNA, 25 bp, Artificial
  probe
  misc_feature (1)..(25): SEQ ID NO: 5327; WAN024CWD_at; Start 42; Stop 66
cgttgaacttttggccaagattcca

SEQ ID NO: 135953 - DNA, 25 bp, Artificial
  probe
  misc_feature (1)..(25): SEQ ID NO: 5327; WAN024CWD_at; Start 120; Stop 144
gataattcgcgatacttttaaatat

SEQ ID NO: 135954 - DNA, 25 bp, Artificial
  probe
  misc_feature (1)..(25): SEQ ID NO: 5327; WAN024CWD_at; Start 36; Stop 60
caagtccgttgaacttttggccaag

SEQ ID NO: 135955 - DNA, 25 bp, Artificial
  probe
  misc_feature (1)..(25): SEQ ID NO: 4294; WAN024CWE_at; Start 149; Stop 173
tcttaaagccagagcccaattctgt

SEQ ID NO: 135956 - DNA, 25 bp, Artificial
  probe
  misc_feature (1)..(25): SEQ ID NO: 4294; WAN024CWE_at; Start 126; Stop 150
aatcgaaagatctcgcattgcaatc

SEQ ID NO: 135957 - DNA, 25 bp, Artificial
  probe
  misc_feature (1)..(25): SEQ ID NO: 4294; WAN024CWE_at; Start 102; Stop 126
tcctaaaagatttcctgctccacga

SEQ ID NO: 135958 - DNA, 25 bp, Artificial
  probe
  misc_feature (1)..(25): SEQ ID NO: 4294; WAN024CWE_at; Start 144; Stop 168
tgcaatcttaaagccagagcccaat

SEQ ID NO: 135959 - DNA, 25 bp, Artificial
  probe
  misc_feature (1)..(25): SEQ ID NO: 4294; WAN024CWE_at; Start 216; Stop 240
gattgatttttctggacgatacatg

SEQ ID NO: 135960 - DNA, 25 bp, Artificial
  probe
  misc_feature (1)..(25): SEQ ID NO: 4294; WAN024CWE_at; Start 197; Stop 221
tcttttcagagacttcactgattga

SEQ ID NO: 135961 - DNA, 25 bp, Artificial
  probe
  misc_feature (1)..(25): SEQ ID NO: 4294; WAN024CWE_at; Start 106; Stop 130
aaaagatttcctgctccacgaatcg

SEQ ID NO: 135962 - DNA, 25 bp, Artificial
  probe
  misc_feature (1)..(25): SEQ ID NO: 4294; WAN024CWE_at; Start 41; Stop 65
cctctaataactgcgaatacaattc

SEQ ID NO: 135963 - DNA, 25 bp, Artificial
  probe
  misc_feature (1)..(25): SEQ ID NO: 4294; WAN024CWE_at; Start 9; Stop 33
gttagcattaccgtttcgtttagca

SEQ ID NO: 135964 - DNA, 25 bp, Artificial
  probe
  misc_feature (1)..(25): SEQ ID NO: 4294; WAN024CWE_at; Start 13; Stop 37
gcattaccgtttcgtttagcaatag

SEQ ID NO: 135965 - DNA, 25 bp, Artificial
  probe
  misc_feature (1)..(25): SEQ ID NO: 4294; WAN024CWE_at; Start 203; Stop 227
cagagacttcactgattgatttttc

SEQ ID NO: 135966 - DNA, 25 bp, Artificial
  probe
  misc_feature (1)..(25): SEQ ID NO: 4294; WAN024CWE_at; Start 155; Stop 179
agccagagcccaattctgtaaatcc

SEQ ID NO: 135967 - DNA, 25 bp, Artificial
  probe
  misc_feature (1)..(25): SEQ ID NO: 4294; WAN024CWE_at; Start 141; Stop 165
cattgcaatcttaaagccagagccc

SEQ ID NO: 135968 - DNA, 25 bp, Artificial
  probe
  misc_feature (1)..(25): SEQ ID NO: 4294; WAN024CWE_at; Start 118; Stop 142
gctccacgaatcgaaagatctcgca

SEQ ID NO: 135969 - DNA, 25 bp, Artificial
  probe
  misc_feature (1)..(25): SEQ ID NO: 4294; WAN024CWE_at; Start 80; Stop 104
caatgaaaccagactgggattttcc

SEQ ID NO: 135970 - DNA, 25 bp, Artificial
  probe
  misc_feature (1)..(25): SEQ ID NO: 4294; WAN024CWE_at; Start 183; Stop 207
aatcgcttctaatctcttttcagag

SEQ ID NO: 135971 - DNA, 25 bp, Artificial
  probe
  misc_feature (1)..(25): SEQ ID NO: 4294; WAN024CWE_at; Start 65; Stop 89
caaaaccaacagaatcaatgaaacc

SEQ ID NO: 135972 - DNA, 25 bp, Artificial
  probe
  misc_feature (1)..(25): SEQ ID NO: 4294; WAN024CWE_at; Start 169; Stop 193
tctgtaaatcctttaatcgcttcta

SEQ ID NO: 135973 - DNA, 25 bp, Artificial
  probe
  misc_feature (1)..(25): SEQ ID NO: 4294; WAN024CWE_at; Start 53; Stop 77
gcgaatacaattcaaaaccaacaga

SEQ ID NO: 135974 - DNA, 25 bp, Artificial
  probe
  misc_feature (1)..(25): SEQ ID NO: 4294; WAN024CWE_at; Start 160; Stop 184
gagcccaattctgtaaatcctttaa

SEQ ID NO: 135975 - DNA, 25 bp, Artificial
  probe
  misc_feature (1)..(25): SEQ ID NO: 4294; WAN024CWE_at; Start 17; Stop 41
taccgtttcgtttagcaatagcttc

SEQ ID NO: 135976 - DNA, 25 bp, Artificial
  probe
  misc_feature (1)..(25): SEQ ID NO: 4294; WAN024CWE_at; Start 110; Stop 134
gatttcctgctccacgaatcgaaag

SEQ ID NO: 135977 - DNA, 25 bp, Artificial
  probe
  misc_feature (1)..(25): SEQ ID NO: 4294; WAN024CWE_at; Start 2; Stop 26
tgttagcgttagcattaccgtttcg

SEQ ID NO: 135978 - DNA, 25 bp, Artificial
  probe
  misc_feature (1)..(25): SEQ ID NO: 4294; WAN024CWE_at; Start 88; Stop 112
ccagactgggattttcctaaaagat

SEQ ID NO: 135979 - DNA, 25 bp, Artificial
  probe
  misc_feature (1)..(25): SEQ ID NO: 4294; WAN024CWE_at; Start 138; Stop 162
tcgcattgcaatcttaaagccagag

SEQ ID NO: 135980 - DNA, 25 bp, Artificial
  probe
  misc_feature (1)..(25): SEQ ID NO: 4294; WAN024CWE_at; Start 37; Stop 61
gcttcctctaataactgcgaataca

SEQ ID NO: 135981 - DNA, 25 bp, Artificial
  probe
  misc_feature (1)..(25): SEQ ID NO: 4294; WAN024CWE_at; Start 114; Stop 138
tcctgctccacgaatcgaaagatct

SEQ ID NO: 135982 - DNA, 25 bp, Artificial
  probe
  misc_feature (1)..(25): SEQ ID NO: 4294; WAN024CWE_at; Start 219; Stop 243
tgatttttctggacgatacatgaga

SEQ ID NO: 135983 - DNA, 25 bp, Artificial
  probe
  misc_feature (1)..(25): SEQ ID NO: 4294; WAN024CWE_at; Start 74; Stop 98
cagaatcaatgaaaccagactggga

SEQ ID NO: 135984 - DNA, 25 bp, Artificial
  probe
  misc_feature (1)..(25): SEQ ID NO: 4294; WAN024CWE_at; Start 134; Stop 158
gatctcgcattgcaatcttaaagcc

SEQ ID NO: 135985 - DNA, 25 bp, Artificial
  probe
  misc_feature (1)..(25): SEQ ID NO: 4294; WAN024CWE_at; Start 32; Stop 56
caatagcttcctctaataactgcga

SEQ ID NO: 135986 - DNA, 25 bp, Artificial
  probe
  misc_feature (1)..(25): SEQ ID NO: 4294; WAN024CWE_at; Start 20; Stop 44
cgtttcgtttagcaatagcttcctc

SEQ ID NO: 135987 - DNA, 25 bp, Artificial
  probe
  misc_feature (1)..(25): SEQ ID NO: 4294; WAN024CWE_at; Start 222; Stop 246
tttttctggacgatacatgagataa

SEQ ID NO: 135988 - DNA, 25 bp, Artificial
  probe
  misc_feature (1)..(25): SEQ ID NO: 4294; WAN024CWE_at; Start 122; Stop 146
cacgaatcgaaagatctcgcattgc

SEQ ID NO: 135989 - DNA, 25 bp, Artificial
  probe
  misc_feature (1)..(25): SEQ ID NO: 3263; WAN024CWF-3_at; Start 180; Stop 204
gactgaagttgctatgcgtgcagcc

SEQ ID NO: 135990 - DNA, 25 bp, Artificial
  probe
  misc_feature (1)..(25): SEQ ID NO: 3263; WAN024CWF-3_at; Start 1219; Stop 1243
gaagctattgctaaacgaaacggta

SEQ ID NO: 135991 - DNA, 25 bp, Artificial
  probe
  misc_feature (1)..(25): SEQ ID NO: 3263; WAN024CWF-3_at; Start 1595; Stop 1619
taacgaacttaaaagcaggcatcgc

SEQ ID NO: 135992 - DNA, 25 bp, Artificial
  probe
  misc_feature (1)..(25): SEQ ID NO: 3263; WAN024CWF-3_at; Start 1234; Stop 1258
cgaaacggtaatgctaacgctaaca

SEQ ID NO: 135993 - DNA, 25 bp, Artificial
  probe
  misc_feature (1)..(25): SEQ ID NO: 3263; WAN024CWF-3_at; Start 68; Stop 92
tcccttatgttgaaacggatgatca

SEQ ID NO: 135994 - DNA, 25 bp, Artificial
  probe
  misc_feature (1)..(25): SEQ ID NO: 3263; WAN024CWF-3_at; Start 967; Stop 991
tatcagttaagaggaagagtcggtc

SEQ ID NO: 135995 - DNA, 25 bp, Artificial
  probe
  misc_feature (1)..(25): SEQ ID NO: 3263; WAN024CWF-3_at; Start 1251; Stop 1275
cgctaacacaagaaccaaagggaat

SEQ ID NO: 135996 - DNA, 25 bp, Artificial
  probe
  misc_feature (1)..(25): SEQ ID NO: 3263; WAN024CWF-3_at; Start 1081; Stop 1105
ggatttacagaattgggctctggct

SEQ ID NO: 135997 - DNA, 25 bp, Artificial
  probe
  misc_feature (1)..(25): SEQ ID NO: 3263; WAN024CWF-3_at; Start 46; Stop 70
caagatgcctttgatgatgctttcc

SEQ ID NO: 135998 - DNA, 25 bp, Artificial
  probe
  misc_feature (1)..(25): SEQ ID NO: 3263; WAN024CWF-3_at; Start 1024; Stop 1048
tatcgtccagaaaaatcaatcagtg

SEQ ID NO: 135999 - DNA, 25 bp, Artificial
  probe
  misc_feature (1)..(25): SEQ ID NO: 3263; WAN024CWF-3_at; Start 113; Stop 137
tcaagagggatatgcaggcttctca

SEQ ID NO: 136000 - DNA, 25 bp, Artificial
  probe
  misc_feature (1)..(25): SEQ ID NO: 3263; WAN024CWF-3_at; Start 1409; Stop 1433
tgatagaccgttttggagaataccc

SEQ ID NO: 136001 - DNA, 25 bp, Artificial
  probe
  misc_feature (1)..(25): SEQ ID NO: 3263; WAN024CWF-3_at; Start 598; Stop 622
tctgttattgaaactccgccgacta

SEQ ID NO: 136002 - DNA, 25 bp, Artificial
  probe
  misc_feature (1)..(25): SEQ ID NO: 3263; WAN024CWF-3_at; Start 229; Stop 253
caggttgtcattctagttccgacga

SEQ ID NO: 136003 - DNA, 25 bp, Artificial
  probe
  misc_feature (1)..(25): SEQ ID NO: 3263; WAN024CWF-3_at; Start 246; Stop 270
tccgacgacggttttagcgcaacag

SEQ ID NO: 136004 - DNA, 25 bp, Artificial
  probe
  misc_feature (1)..(25): SEQ ID NO: 3263; WAN024CWF-3_at; Start 567; Stop 591
ccatatgtctatgctgggaatcaga

SEQ ID NO: 136005 - DNA, 25 bp, Artificial
  probe
  misc_feature (1)..(25): SEQ ID NO: 3263; WAN024CWF-3_at; Start 508; Stop 532
gaactgaagaaacaagtggatgtcc

SEQ ID NO: 136006 - DNA, 25 bp, Artificial
  probe
  misc_feature (1)..(25): SEQ ID NO: 3263; WAN024CWF-3_at; Start 801; Stop 825
tcatggtcgaatgagtgaagtccag

SEQ ID NO: 136007 - DNA, 25 bp, Artificial
  probe
  misc_feature (1)..(25): SEQ ID NO: 3263; WAN024CWF-3_at; Start 469; Stop 493
gaacagcgatttggtgtcaagcata

SEQ ID NO: 136008 - DNA, 25 bp, Artificial
  probe
  misc_feature (1)..(25): SEQ ID NO: 3263; WAN024CWF-3_at; Start 1424; Stop 1448
gagaatacccagatgtagtagccta

SEQ ID NO: 136009 - DNA, 25 bp, Artificial
  probe
  misc_feature (1)..(25): SEQ ID NO: 3263; WAN024CWF-3_at; Start 1123; Stop 1147
gatctttcgattcgtggagcaggaa

SEQ ID NO: 136010 - DNA, 25 bp, Artificial
  probe
  misc_feature (1)..(25): SEQ ID NO: 3263; WAN024CWF-3_at; Start 852; Stop 876
tgagggacaatacgatatcttggtg

SEQ ID NO: 136011 - DNA, 25 bp, Artificial
  probe
  misc_feature (1)..(25): SEQ ID NO: 3263; WAN024CWF-3_at; Start 1097; Stop 1121
gctctggctttaagattgcaatgcg

SEQ ID NO: 136012 - DNA, 25 bp, Artificial
  probe
  misc_feature (1)..(25): SEQ ID NO: 3263; WAN024CWF-3_at; Start 1485; Stop 1509
caaggtctttgttcaacgtgtggaa

SEQ ID NO: 136013 - DNA, 25 bp, Artificial
  probe
  misc_feature (1)..(25): SEQ ID NO: 3263; WAN024CWF-3_at; Start 669; Stop 693
cattcgtgatgctgtcttgcgtgaa

SEQ ID NO: 136014 - DNA, 25 bp, Artificial
  probe
  misc_feature (1)..(25): SEQ ID NO: 3263; WAN024CWF-3_at; Start 211; Stop 235
gcagtcaatgatcacaaacaggttg

SEQ ID NO: 136015 - DNA, 25 bp, Artificial
  probe
  misc_feature (1)..(25): SEQ ID NO: 3263; WAN024CWF-3_at; Start 933; Stop 957
tgaaaatgcggaccatatgggcttg

SEQ ID NO: 136016 - DNA, 25 bp, Artificial
  probe
  misc_feature (1)..(25): SEQ ID NO: 3263; WAN024CWF-3_at; Start 736; Stop 760
gacacaattgttcagaaggtttcag

SEQ ID NO: 136017 - DNA, 25 bp, Artificial
  probe
  misc_feature (1)..(25): SEQ ID NO: 3263; WAN024CWF-3_at; Start 195; Stop 219
gcgtgcagcctttaaagcagtcaat

SEQ ID NO: 136018 - DNA, 25 bp, Artificial
  probe
  misc_feature (1)..(25): SEQ ID NO: 3263; WAN024CWF-3_at; Start 11; Stop 35
tgaagggttttgctttctcagctga

SEQ ID NO: 136019 - DNA, 25 bp, Artificial
  probe
  misc_feature (1)..(25): SEQ ID NO: 3263; WAN024CWF-3_at; Start 262; Stop 286
gcgcaacagcactatacgaatttta

SEQ ID NO: 136020 - DNA, 25 bp, Artificial
  probe
  misc_feature (1)..(25): SEQ ID NO: 3263; WAN024CWF-3_at; Start 1610; Stop 1634
caggcatcgctgagaataagggatt

SEQ ID NO: 136021 - DNA, 25 bp, Artificial
  probe
  misc_feature (1)..(25): SEQ ID NO: 3263; WAN024CWF-3_at; Start 525; Stop 549
ggatgtcctaaccttgaccgctacg

SEQ ID NO: 136022 - DNA, 25 bp, Artificial
  probe
  misc_feature (1)..(25): SEQ ID NO: 3263; WAN024CWF-3_at; Start 1148; Stop 1172
atcttttaggaaaatcccagtctgg

SEQ ID NO: 136023 - DNA, 25 bp, Artificial
  probe
  misc_feature (1)..(25): SEQ ID NO: 2673; WAN024CWF-5_at; Start 293; Stop 317
ttatttcacgggttgaagccttgcg

SEQ ID NO: 136024 - DNA, 25 bp, Artificial
  probe
  misc_feature (1)..(25): SEQ ID NO: 2673; WAN024CWF-5_at; Start 383; Stop 407
taccgtctcccaatgcattcaaaga

SEQ ID NO: 136025 - DNA, 25 bp, Artificial
  probe
  misc_feature (1)..(25): SEQ ID NO: 2673; WAN024CWF-5_at; Start 472; Stop 496
gaaaatggctatcgaaaagttactc

SEQ ID NO: 136026 - DNA, 25 bp, Artificial
  probe
  misc_feature (1)..(25): SEQ ID NO: 2673; WAN024CWF-5_at; Start 1707; Stop 1731
taagaaccaggtagaggatatagct

SEQ ID NO: 136027 - DNA, 25 bp, Artificial
  probe
  misc_feature (1)..(25): SEQ ID NO: 2673; WAN024CWF-5_at; Start 90; Stop 114
tggtttatcaacatctactaaggct

SEQ ID NO: 136028 - DNA, 25 bp, Artificial
  probe
  misc_feature (1)..(25): SEQ ID NO: 2673; WAN024CWF-5_at; Start 167; Stop 191
caacttatggagaagcagaaggact

SEQ ID NO: 136029 - DNA, 25 bp, Artificial
  probe
  misc_feature (1)..(25): SEQ ID NO: 2673; WAN024CWF-5_at; Start 557; Stop 581
cccagttagaaccttgtcgaattga

SEQ ID NO: 136030 - DNA, 25 bp, Artificial
  probe
  misc_feature (1)..(25): SEQ ID NO: 2673; WAN024CWF-5_at; Start 263; Stop 287
tggagtttttgatgtcttcacagga

SEQ ID NO: 136031 - DNA, 25 bp, Artificial
  probe
  misc_feature (1)..(25): SEQ ID NO: 2673; WAN024CWF-5_at; Start 608; Stop 632
tcaggtcatttgaagtagaaacaca

SEQ ID NO: 136032 - DNA, 25 bp, Artificial
  probe
  misc_feature (1)..(25): SEQ ID NO: 2673; WAN024CWF-5_at; Start 1028; Stop 1052
tctataaaaaacaaagtccagtgac

SEQ ID NO: 136033 - DNA, 25 bp, Artificial
  probe
  misc_feature (1)..(25): SEQ ID NO: 2673; WAN024CWF-5_at; Start 839; Stop 863
tgtgctatgataagacatggactgt

SEQ ID NO: 136034 - DNA, 25 bp, Artificial
  probe
  misc_feature (1)..(25): SEQ ID NO: 2673; WAN024CWF-5_at; Start 1602; Stop 1626
cgtggaacagattcatctactgtcc

SEQ ID NO: 136035 - DNA, 25 bp, Artificial
  probe
  misc_feature (1)..(25): SEQ ID NO: 2673; WAN024CWF-5_at; Start 1205; Stop 1229
tgcagtctagcaattcaatgggaag

SEQ ID NO: 136036 - DNA, 25 bp, Artificial
  probe
  misc_feature (1)..(25): SEQ ID NO: 2673; WAN024CWF-5_at; Start 433; Stop 457
gaagaatatgatcaacacgcgttta

SEQ ID NO: 136037 - DNA, 25 bp, Artificial
  probe
  misc_feature (1)..(25): SEQ ID NO: 2673; WAN024CWF-5_at; Start 1108; Stop 1132
caattcaatcaatatcctatgcagg

SEQ ID NO: 136038 - DNA, 25 bp, Artificial
  probe
  misc_feature (1)..(25): SEQ ID NO: 2673; WAN024CWF-5_at; Start 508; Stop 532
cagggcgaatttagtcttcgaggag

SEQ ID NO: 136039 - DNA, 25 bp, Artificial
  probe
  misc_feature (1)..(25): SEQ ID NO: 2673; WAN024CWF-5_at; Start 1636; Stop 1660
tcaagtgatggtaaagctccaaaac

SEQ ID NO: 136040 - DNA, 25 bp, Artificial
  probe
  misc_feature (1)..(25): SEQ ID NO: 2673; WAN024CWF-5_at; Start 306; Stop 330
tgaagccttgcgttttttgactgat

SEQ ID NO: 136041 - DNA, 25 bp, Artificial
  probe
  misc_feature (1)..(25): SEQ ID NO: 2673; WAN024CWF-5_at; Start 1480; Stop 1504
tatgttgtccatcatatccatggga

SEQ ID NO: 136042 - DNA, 25 bp, Artificial
  probe
  misc_feature (1)..(25): SEQ ID NO: 2673; WAN024CWF-5_at; Start 1403; Stop 1427
taaagcgtcgttttcgaagacaaca

SEQ ID NO: 136043 - DNA, 25 bp, Artificial
  probe
  misc_feature (1)..(25): SEQ ID NO: 2673; WAN024CWF-5_at; Start 952; Stop 976
gcgcagtactttacagaagaattac

SEQ ID NO: 136044 - DNA, 25 bp, Artificial
  probe
  misc_feature (1)..(25): SEQ ID NO: 2673; WAN024CWF-5_at; Start 208; Stop 232
tctatcttgggtgaggaactcgtct

SEQ ID NO: 136045 - DNA, 25 bp, Artificial
  probe
  misc_feature (1)..(25): SEQ ID NO: 2673; WAN024CWF-5_at; Start 1421; Stop 1445
gacaacatgtttcaaatgcagagag

SEQ ID NO: 136046 - DNA, 25 bp, Artificial
  probe
  misc_feature (1)..(25): SEQ ID NO: 2673; WAN024CWF-5_at; Start 492; Stop 516
tactcaagtacaaactcagggcgaa

SEQ ID NO: 136047 - DNA, 25 bp, Artificial
  probe
  misc_feature (1)..(25): SEQ ID NO: 2673; WAN024CWF-5_at; Start 323; Stop 347
tgactgattcatctaagaaagggat

SEQ ID NO: 136048 - DNA, 25 bp, Artificial
  probe
  misc_feature (1)..(25): SEQ ID NO: 2673; WAN024CWF-5_at; Start 1187; Stop 1211
tggattacaccattattctgcagtc

SEQ ID NO: 136049 - DNA, 25 bp, Artificial
  probe
  misc_feature (1)..(25): SEQ ID NO: 2673; WAN024CWF-5_at; Start 368; Stop 392
caagtcgattgattttaccgtctcc

SEQ ID NO: 136050 - DNA, 25 bp, Artificial
  probe
  misc_feature (1)..(25): SEQ ID NO: 2673; WAN024CWF-5_at; Start 671; Stop 695
cagctagtgatatgcttttgagaga

SEQ ID NO: 136051 - DNA, 25 bp, Artificial
  probe
  misc_feature (1)..(25): SEQ ID NO: 2673; WAN024CWF-5_at; Start 235; Stop 259
ccatttttggtagatgatgctccta

SEQ ID NO: 136052 - DNA, 25 bp, Artificial
  probe
  misc_feature (1)..(25): SEQ ID NO: 2673; WAN024CWF-5_at; Start 1497; Stop 1521
ccatgggattggtcaatatctagga

SEQ ID NO: 136053 - DNA, 25 bp, Artificial
  probe
  misc_feature (1)..(25): SEQ ID NO: 2673; WAN024CWF-5_at; Start 1316; Stop 1340
taatagagggtaatctcagacatgg

SEQ ID NO: 136054 - DNA, 25 bp, Artificial
  probe
  misc_feature (1)..(25): SEQ ID NO: 2673; WAN024CWF-5_at; Start 448; Stop 472
cacgcgtttatccatcagttaaagg

SEQ ID NO: 136055 - DNA, 25 bp, Artificial
  probe
  misc_feature (1)..(25): SEQ ID NO: 2673; WAN024CWF-5_at; Start 700; Stop 724
gattatcaacgaggacagtcagctt

SEQ ID NO: 136056 - DNA, 25 bp, Artificial
  probe
  misc_feature (1)..(25): SEQ ID NO: 2673; WAN024CWF-5_at; Start 105; Stop 129
tactaaggctcttgcaattgcaagc

SEQ ID NO: 136057 - DNA, 25 bp, Artificial
  probe
  misc_feature (1)..(25): SEQ ID NO: 1550; WAN024CWG_at; Start 195; Stop 219
tagtacaaaaaaagaagatgcagca

SEQ ID NO: 136058 - DNA, 25 bp, Artificial
  probe
  misc_feature (1)..(25): SEQ ID NO: 1550; WAN024CWG_at; Start 146; Stop 170
ttcgctttggcaataagttgctgct

SEQ ID NO: 136059 - DNA, 25 bp, Artificial
  probe
  misc_feature (1)..(25): SEQ ID NO: 1550; WAN024CWG_at; Start 142; Stop 166
gaaattcgctttggcaataagttgc

SEQ ID NO: 136060 - DNA, 25 bp, Artificial
  probe
  misc_feature (1)..(25): SEQ ID NO: 1550; WAN024CWG_at; Start 20; Stop 44
taaaagtatcgcgaattatcaagcg

SEQ ID NO: 136061 - DNA, 25 bp, Artificial
  probe
  misc_feature (1)..(25): SEQ ID NO: 1550; WAN024CWG_at; Start 42; Stop 66
gcgtcgtacagtcgcaaaggaagta

SEQ ID NO: 136062 - DNA, 25 bp, Artificial
  probe
  misc_feature (1)..(25): SEQ ID NO: 1550; WAN024CWG_at; Start 240; Stop 264
tgaaacacgggtagaagaaaatgtc

SEQ ID NO: 136063 - DNA, 25 bp, Artificial
  probe
  misc_feature (1)..(25): SEQ ID NO: 1550; WAN024CWG_at; Start 90; Stop 114
taatggaatcttggccaaaagttca

SEQ ID NO: 136064 - DNA, 25 bp, Artificial
  probe
  misc_feature (1)..(25): SEQ ID NO: 1550; WAN024CWG_at; Start 132; Stop 156
tgaccaagttgaaattcgctttggc

SEQ ID NO: 136065 - DNA, 25 bp, Artificial
  probe
  misc_feature (1)..(25): SEQ ID NO: 1550; WAN024CWG_at; Start 53; Stop 77
tcgcaaaggaagtagcagataaagg

SEQ ID NO: 136066 - DNA, 25 bp, Artificial
  probe
  misc_feature (1)..(25): SEQ ID NO: 1550; WAN024CWG_at; Start 75; Stop 99
aggtagaatcaaggttaatggaatc

SEQ ID NO: 136067 - DNA, 25 bp, Artificial
  probe
  misc_feature (1)..(25): SEQ ID NO: 1550; WAN024CWG_at; Start 61; Stop 85
gaagtagcagataaaggtagaatca

SEQ ID NO: 136068 - DNA, 25 bp, Artificial
  probe
  misc_feature (1)..(25): SEQ ID NO: 1550; WAN024CWG_at; Start 48; Stop 72
tacagtcgcaaaggaagtagcagat

SEQ ID NO: 136069 - DNA, 25 bp, Artificial
  probe
  misc_feature (1)..(25): SEQ ID NO: 1550; WAN024CWG_at; Start 56; Stop 80
caaaggaagtagcagataaaggtag

SEQ ID NO: 136070 - DNA, 25 bp, Artificial
  probe
  misc_feature (1)..(25): SEQ ID NO: 1550; WAN024CWG_at; Start 81; Stop 105
aatcaaggttaatggaatcttggcc

SEQ ID NO: 136071 - DNA, 25 bp, Artificial
  probe
  misc_feature (1)..(25): SEQ ID NO: 1550; WAN024CWG_at; Start 84; Stop 108
caaggttaatggaatcttggccaaa

SEQ ID NO: 136072 - DNA, 25 bp, Artificial
  probe
  misc_feature (1)..(25): SEQ ID NO: 1550; WAN024CWG_at; Start 23; Stop 47
aagtatcgcgaattatcaagcgtcg

SEQ ID NO: 136073 - DNA, 25 bp, Artificial
  probe
  misc_feature (1)..(25): SEQ ID NO: 1550; WAN024CWG_at; Start 67; Stop 91
gcagataaaggtagaatcaaggtta

SEQ ID NO: 136074 - DNA, 25 bp, Artificial
  probe
  misc_feature (1)..(25): SEQ ID NO: 1550; WAN024CWG_at; Start 45; Stop 69
tcgtacagtcgcaaaggaagtagca

SEQ ID NO: 136075 - DNA, 25 bp, Artificial
  probe
  misc_feature (1)..(25): SEQ ID NO: 1550; WAN024CWG_at; Start 8; Stop 32
tagataaatatttaaaagtatcgcg

SEQ ID NO: 136076 - DNA, 25 bp, Artificial
  probe
  misc_feature (1)..(25): SEQ ID NO: 1550; WAN024CWG_at; Start 160; Stop 184
aagttgctgcttgtaaaagtactag

SEQ ID NO: 136077 - DNA, 25 bp, Artificial
  probe
  misc_feature (1)..(25): SEQ ID NO: 1550; WAN024CWG_at; Start 50; Stop 74
cagtcgcaaaggaagtagcagataa

SEQ ID NO: 136078 - DNA, 25 bp, Artificial
  probe
  misc_feature (1)..(25): SEQ ID NO: 1550; WAN024CWG_at; Start 171; Stop 195
tgtaaaagtactagagatgaaagat

SEQ ID NO: 136079 - DNA, 25 bp, Artificial
  probe
  misc_feature (1)..(25): SEQ ID NO: 1550; WAN024CWG_at; Start 39; Stop 63
caagcgtcgtacagtcgcaaaggaa

SEQ ID NO: 136080 - DNA, 25 bp, Artificial
  probe
  misc_feature (1)..(25): SEQ ID NO: 1550; WAN024CWG_at; Start 36; Stop 60
tatcaagcgtcgtacagtcgcaaag

SEQ ID NO: 136081 - DNA, 25 bp, Artificial
  probe
  misc_feature (1)..(25): SEQ ID NO: 1550; WAN024CWG_at; Start 165; Stop 189
gctgcttgtaaaagtactagagatg

SEQ ID NO: 136082 - DNA, 25 bp, Artificial
  probe
  misc_feature (1)..(25): SEQ ID NO: 1550; WAN024CWG_at; Start 234; Stop 258
tatcagtgaaacacgggtagaagaa

SEQ ID NO: 136083 - DNA, 25 bp, Artificial
  probe
  misc_feature (1)..(25): SEQ ID NO: 1550; WAN024CWG_at; Start 245; Stop 269
cacgggtagaagaaaatgtctaact

SEQ ID NO: 136084 - DNA, 25 bp, Artificial
  probe
  misc_feature (1)..(25): SEQ ID NO: 1550; WAN024CWG_at; Start 229; Stop 253
gaaattatcagtgaaacacgggtag

SEQ ID NO: 136085 - DNA, 25 bp, Artificial
  probe
  misc_feature (1)..(25): SEQ ID NO: 1550; WAN024CWG_at; Start 32; Stop 56
gaattatcaagcgtcgtacagtcgc

SEQ ID NO: 136086 - DNA, 25 bp, Artificial
  probe
  misc_feature (1)..(25): SEQ ID NO: 1550; WAN024CWG_at; Start 28; Stop 52
tcgcgaattatcaagcgtcgtacag

SEQ ID NO: 136087 - DNA, 25 bp, Artificial
  probe
  misc_feature (1)..(25): SEQ ID NO: 1550; WAN024CWG_at; Start 226; Stop 250
tatgaaattatcagtgaaacacggg

SEQ ID NO: 136088 - DNA, 25 bp, Artificial
  probe
  misc_feature (1)..(25): SEQ ID NO: 1550; WAN024CWG_at; Start 154; Stop 178
ggcaataagttgctgcttgtaaaag

SEQ ID NO: 136089 - DNA, 25 bp, Artificial
  probe
  misc_feature (1)..(25): SEQ ID NO: 1550; WAN024CWG_at; Start 136; Stop 160
caagttgaaattcgctttggcaata

SEQ ID NO: 136090 - DNA, 25 bp, Artificial
  probe
  misc_feature (1)..(25): SEQ ID NO: 1550; WAN024CWG_at; Start 181; Stop 205
ctagagatgaaagatagtacaaaaa

SEQ ID NO: 136091 - DNA, 25 bp, Artificial
  probe
  misc_feature (1)..(25): SEQ ID NO: 1036; WAN024CWH_at; Start 152; Stop 176
tcgcagctaatatccgtgaaaaagt

SEQ ID NO: 136092 - DNA, 25 bp, Artificial
  probe
  misc_feature (1)..(25): SEQ ID NO: 1036; WAN024CWH_at; Start 138; Stop 162
tcagttggacgctatcgcagctaat

SEQ ID NO: 136093 - DNA, 25 bp, Artificial
  probe
  misc_feature (1)..(25): SEQ ID NO: 1036; WAN024CWH_at; Start 48; Stop 72
gaaacgtgcggaggatatcctcgca

SEQ ID NO: 136094 - DNA, 25 bp, Artificial
  probe
  misc_feature (1)..(25): SEQ ID NO: 1036; WAN024CWH_at; Start 132; Stop 156
tagccgtcagttggacgctatcgca

SEQ ID NO: 136095 - DNA, 25 bp, Artificial
  probe
  misc_feature (1)..(25): SEQ ID NO: 1036; WAN024CWH_at; Start 145; Stop 169
gacgctatcgcagctaatatccgtg

SEQ ID NO: 136096 - DNA, 25 bp, Artificial
  probe
  misc_feature (1)..(25): SEQ ID NO: 1036; WAN024CWH_at; Start 20; Stop 44
tagaactagtcgtgaaagcggctga

SEQ ID NO: 136097 - DNA, 25 bp, Artificial
  probe
  misc_feature (1)..(25): SEQ ID NO: 1036; WAN024CWH_at; Start 268; Stop 292
ttttcagaagaaatgcgtgcccatt

SEQ ID NO: 136098 - DNA, 25 bp, Artificial
  probe
  misc_feature (1)..(25): SEQ ID NO: 1036; WAN024CWH_at; Start 85; Stop 109
gatttgactagtgtgacggactact

SEQ ID NO: 136099 - DNA, 25 bp, Artificial
  probe
  misc_feature (1)..(25): SEQ ID NO: 1036; WAN024CWH_at; Start 198; Stop 222
tagccatgtcgaaggcgatgcagct

SEQ ID NO: 136100 - DNA, 25 bp, Artificial
  probe
  misc_feature (1)..(25): SEQ ID NO: 1036; WAN024CWH_at; Start 306; Stop 330
gctatggcatgaggcgaattcagta

SEQ ID NO: 136101 - DNA, 25 bp, Artificial
  probe
  misc_feature (1)..(25): SEQ ID NO: 1036; WAN024CWH_at; Start 272; Stop 296
cagaagaaatgcgtgcccattataa

SEQ ID NO: 136102 - DNA, 25 bp, Artificial
  probe
  misc_feature (1)..(25): SEQ ID NO: 1036; WAN024CWH_at; Start 221; Stop 245
ctggaggctgggtcttactggacct

SEQ ID NO: 136103 - DNA, 25 bp, Artificial
  probe
  misc_feature (1)..(25): SEQ ID NO: 1036; WAN024CWH_at; Start 66; Stop 90
cctcgcacttgatgtacaagatttg

SEQ ID NO: 136104 - DNA, 25 bp, Artificial
  probe
  misc_feature (1)..(25): SEQ ID NO: 1036; WAN024CWH_at; Start 326; Stop 350
cagtagatatttcagaagctcttgc

SEQ ID NO: 136105 - DNA, 25 bp, Artificial
  probe
  misc_feature (1)..(25): SEQ ID NO: 1036; WAN024CWH_at; Start 312; Stop 336
gcatgaggcgaattcagtagatatt

SEQ ID NO: 136106 - DNA, 25 bp, Artificial
  probe
  misc_feature (1)..(25): SEQ ID NO: 1036; WAN024CWH_at; Start 161; Stop 185
atatccgtgaaaaagtagctcaagc

SEQ ID NO: 136107 - DNA, 25 bp, Artificial
  probe
  misc_feature (1)..(25): SEQ ID NO: 1036; WAN024CWH_at; Start 188; Stop 212
gctttaaaggtagccatgtcgaagg

SEQ ID NO: 136108 - DNA, 25 bp, Artificial
  probe
  misc_feature (1)..(25): SEQ ID NO: 1036; WAN024CWH_at; Start 61; Stop 85
gatatcctcgcacttgatgtacaag

SEQ ID NO: 136109 - DNA, 25 bp, Artificial
  probe
  misc_feature (1)..(25): SEQ ID NO: 1036; WAN024CWH_at; Start 206; Stop 230
tcgaaggcgatgcagctggaggctg

SEQ ID NO: 136110 - DNA, 25 bp, Artificial
  probe
  misc_feature (1)..(25): SEQ ID NO: 1036; WAN024CWH_at; Start 120; Stop 144
tagctcaatgaatagccgtcagttg

SEQ ID NO: 136111 - DNA, 25 bp, Artificial
  probe
  misc_feature (1)..(25): SEQ ID NO: 1036; WAN024CWH_at; Start 192; Stop 216
taaaggtagccatgtcgaaggcgat

SEQ ID NO: 136112 - DNA, 25 bp, Artificial
  probe
  misc_feature (1)..(25): SEQ ID NO: 1036; WAN024CWH_at; Start 57; Stop 81
ggaggatatcctcgcacttgatgta

SEQ ID NO: 136113 - DNA, 25 bp, Artificial
  probe
  misc_feature (1)..(25): SEQ ID NO: 1036; WAN024CWH_at; Start 23; Stop 47
aactagtcgtgaaagcggctgatga

SEQ ID NO: 136114 - DNA, 25 bp, Artificial
  probe
  misc_feature (1)..(25): SEQ ID NO: 1036; WAN024CWH_at; Start 264; Stop 288
tatcttttcagaagaaatgcgtgcc

SEQ ID NO: 136115 - DNA, 25 bp, Artificial
  probe
  misc_feature (1)..(25): SEQ ID NO: 1036; WAN024CWH_at; Start 125; Stop 149
caatgaatagccgtcagttggacgc

SEQ ID NO: 136116 - DNA, 25 bp, Artificial
  probe
  misc_feature (1)..(25): SEQ ID NO: 1036; WAN024CWH_at; Start 32; Stop 56
tgaaagcggctgatgagaaacgtgc

SEQ ID NO: 136117 - DNA, 25 bp, Artificial
  probe
  misc_feature (1)..(25): SEQ ID NO: 1036; WAN024CWH_at; Start 148; Stop 172
gctatcgcagctaatatccgtgaaa

SEQ ID NO: 136118 - DNA, 25 bp, Artificial
  probe
  misc_feature (1)..(25): SEQ ID NO: 1036; WAN024CWH_at; Start 329; Stop 353
tagatatttcagaagctcttgctta

SEQ ID NO: 136119 - DNA, 25 bp, Artificial
  probe
  misc_feature (1)..(25): SEQ ID NO: 1036; WAN024CWH_at; Start 81; Stop 105
acaagatttgactagtgtgacggac

SEQ ID NO: 136120 - DNA, 25 bp, Artificial
  probe
  misc_feature (1)..(25): SEQ ID NO: 1036; WAN024CWH_at; Start 17; Stop 41
tactagaactagtcgtgaaagcggc

SEQ ID NO: 136121 - DNA, 25 bp, Artificial
  probe
  misc_feature (1)..(25): SEQ ID NO: 1036; WAN024CWH_at; Start 298; Stop 322
ctagagaagctatggcatgaggcga

SEQ ID NO: 136122 - DNA, 25 bp, Artificial
  probe
  misc_feature (1)..(25): SEQ ID NO: 1036; WAN024CWH_at; Start 9; Stop 33
aaaagaattactagaactagtcgtg

SEQ ID NO: 136123 - DNA, 25 bp, Artificial
  probe
  misc_feature (1)..(25): SEQ ID NO: 1036; WAN024CWH_at; Start 43; Stop 67
gatgagaaacgtgcggaggatatcc

SEQ ID NO: 136124 - DNA, 25 bp, Artificial
  probe
  misc_feature (1)..(25): SEQ ID NO: 1036; WAN024CWH_at; Start 113; Stop 137
tcatcactagctcaatgaatagccg

SEQ ID NO: 136125 - DNA, 25 bp, Artificial
  probe
  misc_feature (1)..(25): SEQ ID NO: 2374; WAN024CWI_at; Start 83; Stop 107
tcaatgccctagaaggagagcttcc

SEQ ID NO: 136126 - DNA, 25 bp, Artificial
  probe
  misc_feature (1)..(25): SEQ ID NO: 2374; WAN024CWI_at; Start 94; Stop 118
gaaggagagcttcctcaaggttatg

SEQ ID NO: 136127 - DNA, 25 bp, Artificial
  probe
  misc_feature (1)..(25): SEQ ID NO: 2374; WAN024CWI_at; Start 105; Stop 129
tcctcaaggttatgaacgagatcag

SEQ ID NO: 136128 - DNA, 25 bp, Artificial
  probe
  misc_feature (1)..(25): SEQ ID NO: 2374; WAN024CWI_at; Start 243; Stop 267
agtgagcatgattccacaaaaggac

SEQ ID NO: 136129 - DNA, 25 bp, Artificial
  probe
  misc_feature (1)..(25): SEQ ID NO: 2374; WAN024CWI_at; Start 109; Stop 133
caaggttatgaacgagatcagattt

SEQ ID NO: 136130 - DNA, 25 bp, Artificial
  probe
  misc_feature (1)..(25): SEQ ID NO: 2374; WAN024CWI_at; Start 383; Stop 407
tctctgcaggcgaagtcggacacag

SEQ ID NO: 136131 - DNA, 25 bp, Artificial
  probe
  misc_feature (1)..(25): SEQ ID NO: 2374; WAN024CWI_at; Start 213; Stop 237
gaaactagctaaaatttctggcaat

SEQ ID NO: 136132 - DNA, 25 bp, Artificial
  probe
  misc_feature (1)..(25): SEQ ID NO: 2374; WAN024CWI_at; Start 404; Stop 428
acagcattatcgtcgcgccacaaga

SEQ ID NO: 136133 - DNA, 25 bp, Artificial
  probe
  misc_feature (1)..(25): SEQ ID NO: 2374; WAN024CWI_at; Start 428; Stop 452
acttggctagctttgtaaaggcaga

SEQ ID NO: 136134 - DNA, 25 bp, Artificial
  probe
  misc_feature (1)..(25): SEQ ID NO: 2374; WAN024CWI_at; Start 176; Stop 200
tcggaattgtccctatcactcagca

SEQ ID NO: 136135 - DNA, 25 bp, Artificial
  probe
  misc_feature (1)..(25): SEQ ID NO: 2374; WAN024CWI_at; Start 275; Stop 299
aaacaactggttacattcatggagc

SEQ ID NO: 136136 - DNA, 25 bp, Artificial
  probe
  misc_feature (1)..(25): SEQ ID NO: 2374; WAN024CWI_at; Start 167; Stop 191
gaccgattatcggaattgtccctat

SEQ ID NO: 136137 - DNA, 25 bp, Artificial
  probe
  misc_feature (1)..(25): SEQ ID NO: 2374; WAN024CWI_at; Start 124; Stop 148
gatcagattttcaaaaccttggcgc

SEQ ID NO: 136138 - DNA, 25 bp, Artificial
  probe
  misc_feature (1)..(25): SEQ ID NO: 2374; WAN024CWI_at; Start 375; Stop 399
aatgattgtctctgcaggcgaagtc

SEQ ID NO: 136139 - DNA, 25 bp, Artificial
  probe
  misc_feature (1)..(25): SEQ ID NO: 2374; WAN024CWI_at; Start 464; Stop 488
ttttggaggacatcaagtaactaat

SEQ ID NO: 136140 - DNA, 25 bp, Artificial
  probe
  misc_feature (1)..(25): SEQ ID NO: 2374; WAN024CWI_at; Start 456; Stop 480
tgtagatattttggaggacatcaag

SEQ ID NO: 136141 - DNA, 25 bp, Artificial
  probe
  misc_feature (1)..(25): SEQ ID NO: 2374; WAN024CWI_at; Start 411; Stop 435
tatcgtcgcgccacaagacttggct

SEQ ID NO: 136142 - DNA, 25 bp, Artificial
  probe
  misc_feature (1)..(25): SEQ ID NO: 2374; WAN024CWI_at; Start 347; Stop 371
tcgataaaattgctctagatttgga

SEQ ID NO: 136143 - DNA, 25 bp, Artificial
  probe
  misc_feature (1)..(25): SEQ ID NO: 2374; WAN024CWI_at; Start 138; Stop 162
aaccttggcgcttttgggagacaag

SEQ ID NO: 136144 - DNA, 25 bp, Artificial
  probe
  misc_feature (1)..(25): SEQ ID NO: 2374; WAN024CWI_at; Start 157; Stop 181
gacaagaccggaccgattatcggaa

SEQ ID NO: 136145 - DNA, 25 bp, Artificial
  probe
  misc_feature (1)..(25): SEQ ID NO: 2374; WAN024CWI_at; Start 249; Stop 273
catgattccacaaaaggacttagaa

SEQ ID NO: 136146 - DNA, 25 bp, Artificial
  probe
  misc_feature (1)..(25): SEQ ID NO: 2374; WAN024CWI_at; Start 228; Stop 252
ttctggcaataaaaaagtgagcatg

SEQ ID NO: 136147 - DNA, 25 bp, Artificial
  probe
  misc_feature (1)..(25): SEQ ID NO: 2374; WAN024CWI_at; Start 198; Stop 222
gcacttgtctgaaaagaaactagct

SEQ ID NO: 136148 - DNA, 25 bp, Artificial
  probe
  misc_feature (1)..(25): SEQ ID NO: 2374; WAN024CWI_at; Start 305; Stop 329
atcctgtcggaattcgtcagaaaca

SEQ ID NO: 136149 - DNA, 25 bp, Artificial
  probe
  misc_feature (1)..(25): SEQ ID NO: 2374; WAN024CWI_at; Start 300; Stop 324
caataatcctgtcggaattcgtcag

SEQ ID NO: 136150 - DNA, 25 bp, Artificial
  probe
  misc_feature (1)..(25): SEQ ID NO: 2374; WAN024CWI_at; Start 183; Stop 207
tgtccctatcactcagcacttgtct

SEQ ID NO: 136151 - DNA, 25 bp, Artificial
  probe
  misc_feature (1)..(25): SEQ ID NO: 2374; WAN024CWI_at; Start 394; Stop 418
gaagtcggacacagcattatcgtcg

SEQ ID NO: 136152 - DNA, 25 bp, Artificial
  probe
  misc_feature (1)..(25): SEQ ID NO: 2374; WAN024CWI_at; Start 424; Stop 448
caagacttggctagctttgtaaagg

SEQ ID NO: 136153 - DNA, 25 bp, Artificial
  probe
  misc_feature (1)..(25): SEQ ID NO: 2374; WAN024CWI_at; Start 145; Stop 169
gcgcttttgggagacaagaccggac

SEQ ID NO: 136154 - DNA, 25 bp, Artificial
  probe
  misc_feature (1)..(25): SEQ ID NO: 2374; WAN024CWI_at; Start 74; Stop 98
ggattcaaatcaatgccctagaagg

SEQ ID NO: 136155 - DNA, 25 bp, Artificial
  probe
  misc_feature (1)..(25): SEQ ID NO: 2374; WAN024CWI_at; Start 50; Stop 74
ctaaagcagctatccctcatcaggg

SEQ ID NO: 136156 - DNA, 25 bp, Artificial
  probe
  misc_feature (1)..(25): SEQ ID NO: 2374; WAN024CWI_at; Start 41; Stop 65
aaatcctatctaaagcagctatccc

SEQ ID NO: 136157 - DNA, 25 bp, Artificial
  probe
  misc_feature (1)..(25): SEQ ID NO: 2374; WAN024CWI_at; Start 290; Stop 314
ttcatggagccaataatcctgtcgg

SEQ ID NO: 136158 - DNA, 25 bp, Artificial
  probe
  misc_feature (1)..(25): SEQ ID NO: 2374; WAN024CWI_at; Start 152; Stop 176
tgggagacaagaccggaccgattat

SEQ ID NO: 136159 - DNA, 25 bp, Artificial
  probe
  misc_feature (1)..(25): SEQ ID NO: 5109; WAN024CWJ_at; Start 144; Stop 168
tgaggttaaagaccgcctctttcaa

SEQ ID NO: 136160 - DNA, 25 bp, Artificial
  probe
  misc_feature (1)..(25): SEQ ID NO: 5109; WAN024CWJ_at; Start 93; Stop 117
tggcaatctctgcacgcgcttcttc

SEQ ID NO: 136161 - DNA, 25 bp, Artificial
  probe
  misc_feature (1)..(25): SEQ ID NO: 5109; WAN024CWJ_at; Start 195; Stop 219
tagtcatggcaaccgttggcaagta

SEQ ID NO: 136162 - DNA, 25 bp, Artificial
  probe
  misc_feature (1)..(25): SEQ ID NO: 5109; WAN024CWJ_at; Start 150; Stop 174
taaagaccgcctctttcaaagcatc

SEQ ID NO: 136163 - DNA, 25 bp, Artificial
  probe
  misc_feature (1)..(25): SEQ ID NO: 5109; WAN024CWJ_at; Start 170; Stop 194
gcatccatagactctttggtgtagt

SEQ ID NO: 136164 - DNA, 25 bp, Artificial
  probe
  misc_feature (1)..(25): SEQ ID NO: 5109; WAN024CWJ_at; Start 137; Stop 161
gcctgactgaggttaaagaccgcct

SEQ ID NO: 136165 - DNA, 25 bp, Artificial
  probe
  misc_feature (1)..(25): SEQ ID NO: 5109; WAN024CWJ_at; Start 181; Stop 205
ctctttggtgtagttagtcatggca

SEQ ID NO: 136166 - DNA, 25 bp, Artificial
  probe
  misc_feature (1)..(25): SEQ ID NO: 5109; WAN024CWJ_at; Start 213; Stop 237
gcaagtagttcttcagagcattttc

SEQ ID NO: 136167 - DNA, 25 bp, Artificial
  probe
  misc_feature (1)..(25): SEQ ID NO: 5109; WAN024CWJ_at; Start 6; Stop 30
cctgagcaggagctgtaagacttgc

SEQ ID NO: 136168 - DNA, 25 bp, Artificial
  probe
  misc_feature (1)..(25): SEQ ID NO: 5109; WAN024CWJ_at; Start 140; Stop 164
tgactgaggttaaagaccgcctctt

SEQ ID NO: 136169 - DNA, 25 bp, Artificial
  probe
  misc_feature (1)..(25): SEQ ID NO: 5109; WAN024CWJ_at; Start 166; Stop 190
caaagcatccatagactctttggtg

SEQ ID NO: 136170 - DNA, 25 bp, Artificial
  probe
  misc_feature (1)..(25): SEQ ID NO: 5109; WAN024CWJ_at; Start 12; Stop 36
caggagctgtaagacttgcaaagtc

SEQ ID NO: 136171 - DNA, 25 bp, Artificial
  probe
  misc_feature (1)..(25): SEQ ID NO: 5109; WAN024CWJ_at; Start 113; Stop 137
tcttccacactgatatcatcatcgg

SEQ ID NO: 136172 - DNA, 25 bp, Artificial
  probe
  misc_feature (1)..(25): SEQ ID NO: 5109; WAN024CWJ_at; Start 132; Stop 156
catcggcctgactgaggttaaagac

SEQ ID NO: 136173 - DNA, 25 bp, Artificial
  probe
  misc_feature (1)..(25): SEQ ID NO: 5109; WAN024CWJ_at; Start 228; Stop 252
gagcattttctgtcaacatcttacc

SEQ ID NO: 136174 - DNA, 25 bp, Artificial
  probe
  misc_feature (1)..(25): SEQ ID NO: 5109; WAN024CWJ_at; Start 199; Stop 223
catggcaaccgttggcaagtagttc

SEQ ID NO: 136175 - DNA, 25 bp, Artificial
  probe
  misc_feature (1)..(25): SEQ ID NO: 5109; WAN024CWJ_at; Start 2; Stop 26
tgagcctgagcaggagctgtaagac

SEQ ID NO: 136176 - DNA, 25 bp, Artificial
  probe
  misc_feature (1)..(25): SEQ ID NO: 5109; WAN024CWJ_at; Start 30; Stop 54
caaagtcatctgctaccaaagccgt

SEQ ID NO: 136177 - DNA, 25 bp, Artificial
  probe
  misc_feature (1)..(25): SEQ ID NO: 5109; WAN024CWJ_at; Start 185; Stop 209
ttggtgtagttagtcatggcaaccg

SEQ ID NO: 136178 - DNA, 25 bp, Artificial
  probe
  misc_feature (1)..(25): SEQ ID NO: 5109; WAN024CWJ_at; Start 104; Stop 128
gcacgcgcttcttccacactgatat

SEQ ID NO: 136179 - DNA, 25 bp, Artificial
  probe
  misc_feature (1)..(25): SEQ ID NO: 5109; WAN024CWJ_at; Start 218; Stop 242
tagttcttcagagcattttctgtca

SEQ ID NO: 136180 - DNA, 25 bp, Artificial
  probe
  misc_feature (1)..(25): SEQ ID NO: 5109; WAN024CWJ_at; Start 57; Stop 81
tcttctgaaccaaagcattcttcaa

SEQ ID NO: 136181 - DNA, 25 bp, Artificial
  probe
  misc_feature (1)..(25): SEQ ID NO: 5109; WAN024CWJ_at; Start 123; Stop 147
tgatatcatcatcggcctgactgag

SEQ ID NO: 136182 - DNA, 25 bp, Artificial
  probe
  misc_feature (1)..(25): SEQ ID NO: 5109; WAN024CWJ_at; Start 86; Stop 110
tcaatcttggcaatctctgcacgcg

SEQ ID NO: 136183 - DNA, 25 bp, Artificial
  probe
  misc_feature (1)..(25): SEQ ID NO: 5109; WAN024CWJ_at; Start 204; Stop 228
caaccgttggcaagtagttcttcag

SEQ ID NO: 136184 - DNA, 25 bp, Artificial
  probe
  misc_feature (1)..(25): SEQ ID NO: 5109; WAN024CWJ_at; Start 158; Stop 182
gcctctttcaaagcatccatagact

SEQ ID NO: 136185 - DNA, 25 bp, Artificial
  probe
  misc_feature (1)..(25): SEQ ID NO: 5109; WAN024CWJ_at; Start 129; Stop 153
catcatcggcctgactgaggttaaa

SEQ ID NO: 136186 - DNA, 25 bp, Artificial
  probe
  misc_feature (1)..(25): SEQ ID NO: 5109; WAN024CWJ_at; Start 17; Stop 41
gctgtaagacttgcaaagtcatctg

SEQ ID NO: 136187 - DNA, 25 bp, Artificial
  probe
  misc_feature (1)..(25): SEQ ID NO: 5109; WAN024CWJ_at; Start 24; Stop 48
gacttgcaaagtcatctgctaccaa

SEQ ID NO: 136188 - DNA, 25 bp, Artificial
  probe
  misc_feature (1)..(25): SEQ ID NO: 5109; WAN024CWJ_at; Start 192; Stop 216
agttagtcatggcaaccgttggcaa

SEQ ID NO: 136189 - DNA, 25 bp, Artificial
  probe
  misc_feature (1)..(25): SEQ ID NO: 5109; WAN024CWJ_at; Start 189; Stop 213
tgtagttagtcatggcaaccgttgg

SEQ ID NO: 136190 - DNA, 25 bp, Artificial
  probe
  misc_feature (1)..(25): SEQ ID NO: 5109; WAN024CWJ_at; Start 90; Stop 114
tcttggcaatctctgcacgcgcttc

SEQ ID NO: 136191 - DNA, 25 bp, Artificial
  probe
  misc_feature (1)..(25): SEQ ID NO: 5109; WAN024CWJ_at; Start 234; Stop 258
tttctgtcaacatcttacctgttag

SEQ ID NO: 136192 - DNA, 25 bp, Artificial
  probe
  misc_feature (1)..(25): SEQ ID NO: 5109; WAN024CWJ_at; Start 208; Stop 232
cgttggcaagtagttcttcagagca

SEQ ID NO: 136193 - DNA, 25 bp, Artificial
  probe
  misc_feature (1)..(25): SEQ ID NO: 2461; WAN024CWK_at; Start 325; Stop 349
ccattcagagctgtggattcctaca

SEQ ID NO: 136194 - DNA, 25 bp, Artificial
  probe
  misc_feature (1)..(25): SEQ ID NO: 2461; WAN024CWK_at; Start 72; Stop 96
tgataccatccaaggtcataaggaa

SEQ ID NO: 136195 - DNA, 25 bp, Artificial
  probe
  misc_feature (1)..(25): SEQ ID NO: 2461; WAN024CWK_at; Start 132; Stop 156
tacggtaagctgtgatatccttaac

SEQ ID NO: 136196 - DNA, 25 bp, Artificial
  probe
  misc_feature (1)..(25): SEQ ID NO: 2461; WAN024CWK_at; Start 511; Stop 535
ggttacatcgatatgatcatctccg

SEQ ID NO: 136197 - DNA, 25 bp, Artificial
  probe
  misc_feature (1)..(25): SEQ ID NO: 2461; WAN024CWK_at; Start 464; Stop 488
gaaacaaatccatacatgtaaccct

SEQ ID NO: 136198 - DNA, 25 bp, Artificial
  probe
  misc_feature (1)..(25): SEQ ID NO: 2461; WAN024CWK_at; Start 252; Stop 276
taacaaccttagcacttggaagttc

SEQ ID NO: 136199 - DNA, 25 bp, Artificial
  probe
  misc_feature (1)..(25): SEQ ID NO: 2461; WAN024CWK_at; Start 450; Stop 474
caagcttatctgtagaaacaaatcc

SEQ ID NO: 136200 - DNA, 25 bp, Artificial
  probe
  misc_feature (1)..(25): SEQ ID NO: 2461; WAN024CWK_at; Start 497; Stop 521
tccttcattggattggttacatcga

SEQ ID NO: 136201 - DNA, 25 bp, Artificial
  probe
  misc_feature (1)..(25): SEQ ID NO: 2461; WAN024CWK_at; Start 225; Stop 249
tcttgtctgcattggcatcttcagt

SEQ ID NO: 136202 - DNA, 25 bp, Artificial
  probe
  misc_feature (1)..(25): SEQ ID NO: 2461; WAN024CWK_at; Start 30; Stop 54
gaacaccttgcccaagaccatctgt

SEQ ID NO: 136203 - DNA, 25 bp, Artificial
  probe
  misc_feature (1)..(25): SEQ ID NO: 2461; WAN024CWK_at; Start 426; Stop 450
gagagttactccaaacaccagcagc

SEQ ID NO: 136204 - DNA, 25 bp, Artificial
  probe
  misc_feature (1)..(25): SEQ ID NO: 2461; WAN024CWK_at; Start 81; Stop 105
ccaaggtcataaggaatgggttttg

SEQ ID NO: 136205 - DNA, 25 bp, Artificial
  probe
  misc_feature (1)..(25): SEQ ID NO: 2461; WAN024CWK_at; Start 413; Stop 437
ccatagctgttttgagagttactcc

SEQ ID NO: 136206 - DNA, 25 bp, Artificial
  probe
  misc_feature (1)..(25): SEQ ID NO: 2461; WAN024CWK_at; Start 94; Stop 118
gaatgggttttgtgcttgagaacca

SEQ ID NO: 136207 - DNA, 25 bp, Artificial
  probe
  misc_feature (1)..(25): SEQ ID NO: 2461; WAN024CWK_at; Start 282; Stop 306
tgtattctgggaaaacaatgccctt

SEQ ID NO: 136208 - DNA, 25 bp, Artificial
  probe
  misc_feature (1)..(25): SEQ ID NO: 2461; WAN024CWK_at; Start 380; Stop 404
gctgtcaaacgagtccagtcattcg

SEQ ID NO: 136209 - DNA, 25 bp, Artificial
  probe
  misc_feature (1)..(25): SEQ ID NO: 2461; WAN024CWK_at; Start 531; Stop 555
ctccgctgacatgcgtattgtttga

SEQ ID NO: 136210 - DNA, 25 bp, Artificial
  probe
  misc_feature (1)..(25): SEQ ID NO: 2461; WAN024CWK_at; Start 186; Stop 210
tgctacgataagcaatggcaccatc

SEQ ID NO: 136211 - DNA, 25 bp, Artificial
  probe
  misc_feature (1)..(25): SEQ ID NO: 2461; WAN024CWK_at; Start 297; Stop 321
caatgcccttataagctttttccca

SEQ ID NO: 136212 - DNA, 25 bp, Artificial
  probe
  misc_feature (1)..(25): SEQ ID NO: 2461; WAN024CWK_at; Start 441; Stop 465
caccagcagcaagcttatctgtaga

SEQ ID NO: 136213 - DNA, 25 bp, Artificial
  probe
  misc_feature (1)..(25): SEQ ID NO: 2461; WAN024CWK_at; Start 269; Stop 293
ggaagttccttcgtgtattctggga

SEQ ID NO: 136214 - DNA, 25 bp, Artificial
  probe
  misc_feature (1)..(25): SEQ ID NO: 2461; WAN024CWK_at; Start 348; Stop 372
catagttggcatttccgactgtttc

SEQ ID NO: 136215 - DNA, 25 bp, Artificial
  probe
  misc_feature (1)..(25): SEQ ID NO: 2461; WAN024CWK_at; Start 57; Stop 81
ggagattgattttcttgataccatc

SEQ ID NO: 136216 - DNA, 25 bp, Artificial
  probe
  misc_feature (1)..(25): SEQ ID NO: 2461; WAN024CWK_at; Start 239; Stop 263
gcatcttcagtgataacaaccttag

SEQ ID NO: 136217 - DNA, 25 bp, Artificial
  probe
  misc_feature (1)..(25): SEQ ID NO: 2461; WAN024CWK_at; Start 164; Stop 188
caaccttgaggattgttcataatgc

SEQ ID NO: 136218 - DNA, 25 bp, Artificial
  probe
  misc_feature (1)..(25): SEQ ID NO: 2461; WAN024CWK_at; Start 17; Stop 41
tatcctttaaggagaacaccttgcc

SEQ ID NO: 136219 - DNA, 25 bp, Artificial
  probe
  misc_feature (1)..(25): SEQ ID NO: 2461; WAN024CWK_at; Start 174; Stop 198
gattgttcataatgctacgataagc

SEQ ID NO: 136220 - DNA, 25 bp, Artificial
  probe
  misc_feature (1)..(25): SEQ ID NO: 2461; WAN024CWK_at; Start 3; Stop 27
ggccttcgctaccatatcctttaag

SEQ ID NO: 136221 - DNA, 25 bp, Artificial
  probe
  misc_feature (1)..(25): SEQ ID NO: 2461; WAN024CWK_at; Start 310; Stop 334
agctttttcccattgccattcagag

SEQ ID NO: 136222 - DNA, 25 bp, Artificial
  probe
  misc_feature (1)..(25): SEQ ID NO: 2461; WAN024CWK_at; Start 106; Stop 130
tgcttgagaaccaaagttcatcgcg

SEQ ID NO: 136223 - DNA, 25 bp, Artificial
  probe
  misc_feature (1)..(25): SEQ ID NO: 2461; WAN024CWK_at; Start 520; Stop 544
gatatgatcatctccgctgacatgc

SEQ ID NO: 136224 - DNA, 25 bp, Artificial
  probe
  misc_feature (1)..(25): SEQ ID NO: 2461; WAN024CWK_at; Start 119; Stop 143
aagttcatcgcgatacggtaagctg

SEQ ID NO: 136225 - DNA, 25 bp, Artificial
  probe
  misc_feature (1)..(25): SEQ ID NO: 2461; WAN024CWK_at; Start 398; Stop 422
tcattcgaaccaccaccatagctgt

SEQ ID NO: 136226 - DNA, 25 bp, Artificial
  probe
  misc_feature (1)..(25): SEQ ID NO: 2461; WAN024CWK_at; Start 334; Stop 358
gctgtggattcctacatagttggca

SEQ ID NO: 136227 - DNA, 25 bp, Artificial
  probe
  misc_feature (1)..(25): SEQ ID NO: 3438; WAN024CWL_at; Start 13; Stop 37
cgttatcattttgagcagttgagga

SEQ ID NO: 136228 - DNA, 25 bp, Artificial
  probe
  misc_feature (1)..(25): SEQ ID NO: 3438; WAN024CWL_at; Start 361; Stop 385
gactgcacgctatctgcaagaaccg

SEQ ID NO: 136229 - DNA, 25 bp, Artificial
  probe
  misc_feature (1)..(25): SEQ ID NO: 3438; WAN024CWL_at; Start 211; Stop 235
aatagttcttcttctgtcttaggtc

SEQ ID NO: 136230 - DNA, 25 bp, Artificial
  probe
  misc_feature (1)..(25): SEQ ID NO: 3438; WAN024CWL_at; Start 220; Stop 244
tcttctgtcttaggtccatctgtaa

SEQ ID NO: 136231 - DNA, 25 bp, Artificial
  probe
  misc_feature (1)..(25): SEQ ID NO: 3438; WAN024CWL_at; Start 335; Stop 359
cagctggtaagttcgccgtggaacc

SEQ ID NO: 136232 - DNA, 25 bp, Artificial
  probe
  misc_feature (1)..(25): SEQ ID NO: 3438; WAN024CWL_at; Start 230; Stop 254
taggtccatctgtaacttctggaga

SEQ ID NO: 136233 - DNA, 25 bp, Artificial
  probe
  misc_feature (1)..(25): SEQ ID NO: 3438; WAN024CWL_at; Start 371; Stop 395
tatctgcaagaaccggacttgtccc

SEQ ID NO: 136234 - DNA, 25 bp, Artificial
  probe
  misc_feature (1)..(25): SEQ ID NO: 3438; WAN024CWL_at; Start 352; Stop 376
gtggaaccagactgcacgctatctg

SEQ ID NO: 136235 - DNA, 25 bp, Artificial
  probe
  misc_feature (1)..(25): SEQ ID NO: 3438; WAN024CWL_at; Start 264; Stop 288
ttctcccaccttaggcgcttcaaaa

SEQ ID NO: 136236 - DNA, 25 bp, Artificial
  probe
  misc_feature (1)..(25): SEQ ID NO: 3438; WAN024CWL_at; Start 317; Stop 341
caagagcagtagctaaatcagctgg

SEQ ID NO: 136237 - DNA, 25 bp, Artificial
  probe
  misc_feature (1)..(25): SEQ ID NO: 3438; WAN024CWL_at; Start 328; Stop 352
gctaaatcagctggtaagttcgccg

SEQ ID NO: 136238 - DNA, 25 bp, Artificial
  probe
  misc_feature (1)..(25): SEQ ID NO: 3438; WAN024CWL_at; Start 19; Stop 43
cattttgagcagttgaggatagttg

SEQ ID NO: 136239 - DNA, 25 bp, Artificial
  probe
  misc_feature (1)..(25): SEQ ID NO: 3438; WAN024CWL_at; Start 295; Stop 319
ccatcattctcttttgctgttgcaa

SEQ ID NO: 136240 - DNA, 25 bp, Artificial
  probe
  misc_feature (1)..(25): SEQ ID NO: 3438; WAN024CWL_at; Start 46; Stop 70
tgtagcggacacctttttcttcttc

SEQ ID NO: 136241 - DNA, 25 bp, Artificial
  probe
  misc_feature (1)..(25): SEQ ID NO: 3438; WAN024CWL_at; Start 305; Stop 329
cttttgctgttgcaagagcagtagc

SEQ ID NO: 136242 - DNA, 25 bp, Artificial
  probe
  misc_feature (1)..(25): SEQ ID NO: 3438; WAN024CWL_at; Start 342; Stop 366
taagttcgccgtggaaccagactgc

SEQ ID NO: 136243 - DNA, 25 bp, Artificial
  probe
  misc_feature (1)..(25): SEQ ID NO: 3438; WAN024CWL_at; Start 149; Stop 173
tagcagctgcaggtttatcctcttt

SEQ ID NO: 136244 - DNA, 25 bp, Artificial
  probe
  misc_feature (1)..(25): SEQ ID NO: 3438; WAN024CWL_at; Start 346; Stop 370
ttcgccgtggaaccagactgcacgc

SEQ ID NO: 136245 - DNA, 25 bp, Artificial
  probe
  misc_feature (1)..(25): SEQ ID NO: 3438; WAN024CWL_at; Start 379; Stop 403
agaaccggacttgtcccaaagaatg

SEQ ID NO: 136246 - DNA, 25 bp, Artificial
  probe
  misc_feature (1)..(25): SEQ ID NO: 3438; WAN024CWL_at; Start 35; Stop 59
ggatagttggttgtagcggacacct

SEQ ID NO: 136247 - DNA, 25 bp, Artificial
  probe
  misc_feature (1)..(25): SEQ ID NO: 3438; WAN024CWL_at; Start 375; Stop 399
tgcaagaaccggacttgtcccaaag

SEQ ID NO: 136248 - DNA, 25 bp, Artificial
  probe
  misc_feature (1)..(25): SEQ ID NO: 3438; WAN024CWL_at; Start 152; Stop 176
cagctgcaggtttatcctcttttgg

SEQ ID NO: 136249 - DNA, 25 bp, Artificial
  probe
  misc_feature (1)..(25): SEQ ID NO: 3438; WAN024CWL_at; Start 416; Stop 440
taacagaagcaacacctaatgaaaa

SEQ ID NO: 136250 - DNA, 25 bp, Artificial
  probe
  misc_feature (1)..(25): SEQ ID NO: 3438; WAN024CWL_at; Start 331; Stop 355
aaatcagctggtaagttcgccgtgg

SEQ ID NO: 136251 - DNA, 25 bp, Artificial
  probe
  misc_feature (1)..(25): SEQ ID NO: 3438; WAN024CWL_at; Start 194; Stop 218
tttctttttcaagtgctaatagttc

SEQ ID NO: 136252 - DNA, 25 bp, Artificial
  probe
  misc_feature (1)..(25): SEQ ID NO: 3438; WAN024CWL_at; Start 3; Stop 27
ggtttacctgcgttatcattttgag

SEQ ID NO: 136253 - DNA, 25 bp, Artificial
  probe
  misc_feature (1)..(25): SEQ ID NO: 3438; WAN024CWL_at; Start 310; Stop 334
gctgttgcaagagcagtagctaaat

SEQ ID NO: 136254 - DNA, 25 bp, Artificial
  probe
  misc_feature (1)..(25): SEQ ID NO: 3438; WAN024CWL_at; Start 243; Stop 267
aacttctggagaaccttggtcttct

SEQ ID NO: 136255 - DNA, 25 bp, Artificial
  probe
  misc_feature (1)..(25): SEQ ID NO: 3438; WAN024CWL_at; Start 164; Stop 188
tatcctcttttggtttttcttcagc

SEQ ID NO: 136256 - DNA, 25 bp, Artificial
  probe
  misc_feature (1)..(25): SEQ ID NO: 3438; WAN024CWL_at; Start 258; Stop 282
ttggtcttctcccaccttaggcgct

SEQ ID NO: 136257 - DNA, 25 bp, Artificial
  probe
  misc_feature (1)..(25): SEQ ID NO: 3438; WAN024CWL_at; Start 423; Stop 447
agcaacacctaatgaaaatttccga

SEQ ID NO: 136258 - DNA, 25 bp, Artificial
  probe
  misc_feature (1)..(25): SEQ ID NO: 3438; WAN024CWL_at; Start 408; Stop 432
tccaatcataacagaagcaacacct

SEQ ID NO: 136259 - DNA, 25 bp, Artificial
  probe
  misc_feature (1)..(25): SEQ ID NO: 3438; WAN024CWL_at; Start 366; Stop 390
cacgctatctgcaagaaccggactt

SEQ ID NO: 136260 - DNA, 25 bp, Artificial
  probe
  misc_feature (1)..(25): SEQ ID NO: 3438; WAN024CWL_at; Start 238; Stop 262
tctgtaacttctggagaaccttggt

SEQ ID NO: 136261 - DNA, 25 bp, Artificial
  probe
  misc_feature (1)..(25): SEQ ID NO: 3962; WAN024CWM_at; Start 307; Stop 331
gctaacaactgttcgctcatcgtca

SEQ ID NO: 136262 - DNA, 25 bp, Artificial
  probe
  misc_feature (1)..(25): SEQ ID NO: 3962; WAN024CWM_at; Start 164; Stop 188
gggaaggcttggtcaatcactgctt

SEQ ID NO: 136263 - DNA, 25 bp, Artificial
  probe
  misc_feature (1)..(25): SEQ ID NO: 3962; WAN024CWM_at; Start 208; Stop 232
cgtgtcataagtcaccttgctatca

SEQ ID NO: 136264 - DNA, 25 bp, Artificial
  probe
  misc_feature (1)..(25): SEQ ID NO: 3962; WAN024CWM_at; Start 363; Stop 387
catttttaagatggtcattgaccgc

SEQ ID NO: 136265 - DNA, 25 bp, Artificial
  probe
  misc_feature (1)..(25): SEQ ID NO: 3962; WAN024CWM_at; Start 15; Stop 39
gaagcttcatcaagtactctgctgt

SEQ ID NO: 136266 - DNA, 25 bp, Artificial
  probe
  misc_feature (1)..(25): SEQ ID NO: 3962; WAN024CWM_at; Start 335; Stop 359
gagcccgccttgagaagaatcttct

SEQ ID NO: 136267 - DNA, 25 bp, Artificial
  probe
  misc_feature (1)..(25): SEQ ID NO: 3962; WAN024CWM_at; Start 371; Stop 395
agatggtcattgaccgcagctggta

SEQ ID NO: 136268 - DNA, 25 bp, Artificial
  probe
  misc_feature (1)..(25): SEQ ID NO: 3962; WAN024CWM_at; Start 369; Stop 393
taagatggtcattgaccgcagctgg

SEQ ID NO: 136269 - DNA, 25 bp, Artificial
  probe
  misc_feature (1)..(25): SEQ ID NO: 3962; WAN024CWM_at; Start 200; Stop 224
gactgaatcgtgtcataagtcacct

SEQ ID NO: 136270 - DNA, 25 bp, Artificial
  probe
  misc_feature (1)..(25): SEQ ID NO: 3962; WAN024CWM_at; Start 22; Stop 46
catcaagtactctgctgttgtctca

SEQ ID NO: 136271 - DNA, 25 bp, Artificial
  probe
  misc_feature (1)..(25): SEQ ID NO: 3962; WAN024CWM_at; Start 90; Stop 114
tgataaagacttggttgaactgttg

SEQ ID NO: 136272 - DNA, 25 bp, Artificial
  probe
  misc_feature (1)..(25): SEQ ID NO: 3962; WAN024CWM_at; Start 348; Stop 372
gaagaatcttcttctcatttttaag

SEQ ID NO: 136273 - DNA, 25 bp, Artificial
  probe
  misc_feature (1)..(25): SEQ ID NO: 3962; WAN024CWM_at; Start 225; Stop 249
tgctatcatcaacttcaggacctgt

SEQ ID NO: 136274 - DNA, 25 bp, Artificial
  probe
  misc_feature (1)..(25): SEQ ID NO: 3962; WAN024CWM_at; Start 147; Stop 171
tgtattccttgacacgagggaaggc

SEQ ID NO: 136275 - DNA, 25 bp, Artificial
  probe
  misc_feature (1)..(25): SEQ ID NO: 3962; WAN024CWM_at; Start 34; Stop 58
tgctgttgtctcattgattttctta

SEQ ID NO: 136276 - DNA, 25 bp, Artificial
  probe
  misc_feature (1)..(25): SEQ ID NO: 3962; WAN024CWM_at; Start 159; Stop 183
cacgagggaaggcttggtcaatcac

SEQ ID NO: 136277 - DNA, 25 bp, Artificial
  probe
  misc_feature (1)..(25): SEQ ID NO: 3962; WAN024CWM_at; Start 204; Stop 228
gaatcgtgtcataagtcaccttgct

SEQ ID NO: 136278 - DNA, 25 bp, Artificial
  probe
  misc_feature (1)..(25): SEQ ID NO: 3962; WAN024CWM_at; Start 73; Stop 97
ggtgattcggtggttattgataaag

SEQ ID NO: 136279 - DNA, 25 bp, Artificial
  probe
  misc_feature (1)..(25): SEQ ID NO: 3962; WAN024CWM_at; Start 332; Stop 356
taagagcccgccttgagaagaatct

SEQ ID NO: 136280 - DNA, 25 bp, Artificial
  probe
  misc_feature (1)..(25): SEQ ID NO: 3962; WAN024CWM_at; Start 26; Stop 50
aagtactctgctgttgtctcattga

SEQ ID NO: 136281 - DNA, 25 bp, Artificial
  probe
  misc_feature (1)..(25): SEQ ID NO: 3962; WAN024CWM_at; Start 152; Stop 176
tccttgacacgagggaaggcttggt

SEQ ID NO: 136282 - DNA, 25 bp, Artificial
  probe
  misc_feature (1)..(25): SEQ ID NO: 3962; WAN024CWM_at; Start 142; Stop 166
caagctgtattccttgacacgaggg

SEQ ID NO: 136283 - DNA, 25 bp, Artificial
  probe
  misc_feature (1)..(25): SEQ ID NO: 3962; WAN024CWM_at; Start 194; Stop 218
accttagactgaatcgtgtcataag

SEQ ID NO: 136284 - DNA, 25 bp, Artificial
  probe
  misc_feature (1)..(25): SEQ ID NO: 3962; WAN024CWM_at; Start 3; Stop 27
gagcatcatcgcgaagcttcatcaa

SEQ ID NO: 136285 - DNA, 25 bp, Artificial
  probe
  misc_feature (1)..(25): SEQ ID NO: 3962; WAN024CWM_at; Start 317; Stop 341
gttcgctcatcgtcataagagcccg

SEQ ID NO: 136286 - DNA, 25 bp, Artificial
  probe
  misc_feature (1)..(25): SEQ ID NO: 3962; WAN024CWM_at; Start 168; Stop 192
aggcttggtcaatcactgctttgag

SEQ ID NO: 136287 - DNA, 25 bp, Artificial
  probe
  misc_feature (1)..(25): SEQ ID NO: 3962; WAN024CWM_at; Start 11; Stop 35
tcgcgaagcttcatcaagtactctg

SEQ ID NO: 136288 - DNA, 25 bp, Artificial
  probe
  misc_feature (1)..(25): SEQ ID NO: 3962; WAN024CWM_at; Start 300; Stop 324
ttttaacgctaacaactgttcgctc

SEQ ID NO: 136289 - DNA, 25 bp, Artificial
  probe
  misc_feature (1)..(25): SEQ ID NO: 3962; WAN024CWM_at; Start 219; Stop 243
tcaccttgctatcatcaacttcagg

SEQ ID NO: 136290 - DNA, 25 bp, Artificial
  probe
  misc_feature (1)..(25): SEQ ID NO: 3962; WAN024CWM_at; Start 238; Stop 262
ttcaggacctgtttctttttcagca

SEQ ID NO: 136291 - DNA, 25 bp, Artificial
  probe
  misc_feature (1)..(25): SEQ ID NO: 3962; WAN024CWM_at; Start 49; Stop 73
gattttcttataagtgacttcaggg

SEQ ID NO: 136292 - DNA, 25 bp, Artificial
  probe
  misc_feature (1)..(25): SEQ ID NO: 3962; WAN024CWM_at; Start 324; Stop 348
catcgtcataagagcccgccttgag

SEQ ID NO: 136293 - DNA, 25 bp, Artificial
  probe
  misc_feature (1)..(25): SEQ ID NO: 3962; WAN024CWM_at; Start 258; Stop 282
cagcaggggtatcctctgtttttac

SEQ ID NO: 136294 - DNA, 25 bp, Artificial
  probe
  misc_feature (1)..(25): SEQ ID NO: 3962; WAN024CWM_at; Start 312; Stop 336
caactgttcgctcatcgtcataaga

SEQ ID NO: 136295 - DNA, 25 bp, Artificial
  probe
  misc_feature (1)..(25): SEQ ID NO: 3496; WAN024CWN-3_at; Start 765; Stop 789
caacggttgccatgactaactacac

SEQ ID NO: 136296 - DNA, 25 bp, Artificial
  probe
  misc_feature (1)..(25): SEQ ID NO: 3496; WAN024CWN-3_at; Start 783; Stop 807
actacaccaaagagtctatggatgc

SEQ ID NO: 136297 - DNA, 25 bp, Artificial
  probe
  misc_feature (1)..(25): SEQ ID NO: 3496; WAN024CWN-3_at; Start 165; Stop 189
aaaatgttgctcagggtatcttccc

SEQ ID NO: 136298 - DNA, 25 bp, Artificial
  probe
  misc_feature (1)..(25): SEQ ID NO: 3496; WAN024CWN-3_at; Start 850; Stop 874
tatcagtgtggaagaagcgcgtgca

SEQ ID NO: 136299 - DNA, 25 bp, Artificial
  probe
  misc_feature (1)..(25): SEQ ID NO: 3496; WAN024CWN-3_at; Start 1465; Stop 1489
gacggataaccatctcttgacggaa

SEQ ID NO: 136300 - DNA, 25 bp, Artificial
  probe
  misc_feature (1)..(25): SEQ ID NO: 3496; WAN024CWN-3_at; Start 627; Stop 651
caagtaatactcgtggtgattctgg

SEQ ID NO: 136301 - DNA, 25 bp, Artificial
  probe
  misc_feature (1)..(25): SEQ ID NO: 3496; WAN024CWN-3_at; Start 815; Stop 839
gaggcggtctttaacctcagtcagg

SEQ ID NO: 136302 - DNA, 25 bp, Artificial
  probe
  misc_feature (1)..(25): SEQ ID NO: 3496; WAN024CWN-3_at; Start 451; Stop 475
tgtagtcggtaagggagaattccag

SEQ ID NO: 136303 - DNA, 25 bp, Artificial
  probe
  misc_feature (1)..(25): SEQ ID NO: 3496; WAN024CWN-3_at; Start 750; Stop 774
tgaagaactacttgccaacggttgc

SEQ ID NO: 136304 - DNA, 25 bp, Artificial
  probe
  misc_feature (1)..(25): SEQ ID NO: 3496; WAN024CWN-3_at; Start 717; Stop 741
ccctaacaggtaagatgttgacaga

SEQ ID NO: 136305 - DNA, 25 bp, Artificial
  probe
  misc_feature (1)..(25): SEQ ID NO: 3496; WAN024CWN-3_at; Start 1163; Stop 1187
gatgagtctggcaaggagcatacct

SEQ ID NO: 136306 - DNA, 25 bp, Artificial
  probe
  misc_feature (1)..(25): SEQ ID NO: 3496; WAN024CWN-3_at; Start 464; Stop 488
ggagaattccagtcaggtcgtcgtg

SEQ ID NO: 136307 - DNA, 25 bp, Artificial
  probe
  misc_feature (1)..(25): SEQ ID NO: 3496; WAN024CWN-3_at; Start 1345; Stop 1369
ggtagcagaaacacctcttgacttg

SEQ ID NO: 136308 - DNA, 25 bp, Artificial
  probe
  misc_feature (1)..(25): SEQ ID NO: 3496; WAN024CWN-3_at; Start 1116; Stop 1140
gatcaggttcaaatggtaacttgcg

SEQ ID NO: 136309 - DNA, 25 bp, Artificial
  probe
  misc_feature (1)..(25): SEQ ID NO: 3496; WAN024CWN-3_at; Start 1480; Stop 1504
cttgacggaaagaatggtggaatac

SEQ ID NO: 136310 - DNA, 25 bp, Artificial
  probe
  misc_feature (1)..(25): SEQ ID NO: 3496; WAN024CWN-3_at; Start 1662; Stop 1686
tcttgccagcaacaggtgagagtca

SEQ ID NO: 136311 - DNA, 25 bp, Artificial
  probe
  misc_feature (1)..(25): SEQ ID NO: 3496; WAN024CWN-3_at; Start 643; Stop 667
tgattctggtggaaatgccaacttc

SEQ ID NO: 136312 - DNA, 25 bp, Artificial
  probe
  misc_feature (1)..(25): SEQ ID NO: 3496; WAN024CWN-3_at; Start 1329; Stop 1353
tctttactcgtccacaggtagcaga

SEQ ID NO: 136313 - DNA, 25 bp, Artificial
  probe
  misc_feature (1)..(25): SEQ ID NO: 3496; WAN024CWN-3_at; Start 1363; Stop 1387
tgacttgtcaggctatgaagcagct

SEQ ID NO: 136314 - DNA, 25 bp, Artificial
  probe
  misc_feature (1)..(25): SEQ ID NO: 3496; WAN024CWN-3_at; Start 1418; Stop 1442
gacaatcaagaggaagtagctagcg

SEQ ID NO: 136315 - DNA, 25 bp, Artificial
  probe
  misc_feature (1)..(25): SEQ ID NO: 3496; WAN024CWN-3_at; Start 603; Stop 627
taggtatctactcaactggaaatgc

SEQ ID NO: 136316 - DNA, 25 bp, Artificial
  probe
  misc_feature (1)..(25): SEQ ID NO: 3496; WAN024CWN-3_at; Start 923; Stop 947
acggctttggtagcagatgactttg

SEQ ID NO: 136317 - DNA, 25 bp, Artificial
  probe
  misc_feature (1)..(25): SEQ ID NO: 3496; WAN024CWN-3_at; Start 1449; Stop 1473
caagcatgaaatatgcgacggataa

SEQ ID NO: 136318 - DNA, 25 bp, Artificial
  probe
  misc_feature (1)..(25): SEQ ID NO: 3496; WAN024CWN-3_at; Start 1607; Stop 1631
ggtaagacgccagattataagcaag

SEQ ID NO: 136319 - DNA, 25 bp, Artificial
  probe
  misc_feature (1)..(25): SEQ ID NO: 3496; WAN024CWN-3_at; Start 436; Stop 460
caatacctatgcttttgtagtcggt

SEQ ID NO: 136320 - DNA, 25 bp, Artificial
  probe
  misc_feature (1)..(25): SEQ ID NO: 3496; WAN024CWN-3_at; Start 98; Stop 122
gaaaacaattcaagcatgtacggag

SEQ ID NO: 136321 - DNA, 25 bp, Artificial
  probe
  misc_feature (1)..(25): SEQ ID NO: 3496; WAN024CWN-3_at; Start 1434; Stop 1458
tagctagcgttcaggcaagcatgaa

SEQ ID NO: 136322 - DNA, 25 bp, Artificial
  probe
  misc_feature (1)..(25): SEQ ID NO: 3496; WAN024CWN-3_at; Start 1301; Stop 1325
gataaataccaatctgcagcggaac

SEQ ID NO: 136323 - DNA, 25 bp, Artificial
  probe
  misc_feature (1)..(25): SEQ ID NO: 3496; WAN024CWN-3_at; Start 658; Stop 682
tgccaacttccgtggttataacgac

SEQ ID NO: 136324 - DNA, 25 bp, Artificial
  probe
  misc_feature (1)..(25): SEQ ID NO: 3496; WAN024CWN-3_at; Start 515; Stop 539
catgaattgccaaatacttggacag

SEQ ID NO: 136325 - DNA, 25 bp, Artificial
  probe
  misc_feature (1)..(25): SEQ ID NO: 3496; WAN024CWN-3_at; Start 831; Stop 855
tcagtcaggccgatgatgatatcag

SEQ ID NO: 136326 - DNA, 25 bp, Artificial
  probe
  misc_feature (1)..(25): SEQ ID NO: 3496; WAN024CWN-3_at; Start 863; Stop 887
gaagcgcgtgcagagattgccaaga

SEQ ID NO: 136327 - DNA, 25 bp, Artificial
  probe
  misc_feature (1)..(25): SEQ ID NO: 3496; WAN024CWN-3_at; Start 128; Stop 152
catgatacaggtaaaggcaccttca

SEQ ID NO: 136328 - DNA, 25 bp, Artificial
  probe
  misc_feature (1)..(25): SEQ ID NO: 3496; WAN024CWN-3_at; Start 799; Stop 823
tatggatgctttgaaagaggcggtc

SEQ ID NO: 136329 - DNA, 25 bp, Artificial
  probe
  misc_feature (1)..(25): SEQ ID NO: 1172; WAN024CWN-5_at; Start 1568; Stop 1592
cgaatgactggactcgtttgacagc

SEQ ID NO: 136330 - DNA, 25 bp, Artificial
  probe
  misc_feature (1)..(25): SEQ ID NO: 1172; WAN024CWN-5_at; Start 1431; Stop 1455
tgtcagcggagatgatcatatcgat

SEQ ID NO: 136331 - DNA, 25 bp, Artificial
  probe
  misc_feature (1)..(25): SEQ ID NO: 1172; WAN024CWN-5_at; Start 1665; Stop 1689
taagggcattgttttcccagaatac

SEQ ID NO: 136332 - DNA, 25 bp, Artificial
  probe
  misc_feature (1)..(25): SEQ ID NO: 1172; WAN024CWN-5_at; Start 151; Stop 175
gctgatttagctactgctcttgcaa

SEQ ID NO: 136333 - DNA, 25 bp, Artificial
  probe
  misc_feature (1)..(25): SEQ ID NO: 1172; WAN024CWN-5_at; Start 451; Stop 475
tcctcaactgctcaaaatgataacg

SEQ ID NO: 136334 - DNA, 25 bp, Artificial
  probe
  misc_feature (1)..(25): SEQ ID NO: 1172; WAN024CWN-5_at; Start 567; Stop 591
aaagggcaaatcacgctttggtgtc

SEQ ID NO: 136335 - DNA, 25 bp, Artificial
  probe
  misc_feature (1)..(25): SEQ ID NO: 1172; WAN024CWN-5_at; Start 1032; Stop 1056
ccaagccttccctcgtgtcaaggaa

SEQ ID NO: 136336 - DNA, 25 bp, Artificial
  probe
  misc_feature (1)..(25): SEQ ID NO: 1172; WAN024CWN-5_at; Start 1596; Stop 1620
taaagaaacagtcggaaatgccaac

SEQ ID NO: 136337 - DNA, 25 bp, Artificial
  probe
  misc_feature (1)..(25): SEQ ID NO: 1172; WAN024CWN-5_at; Start 102; Stop 126
tccggttcttgcagatagcgtgcag

SEQ ID NO: 136338 - DNA, 25 bp, Artificial
  probe
  misc_feature (1)..(25): SEQ ID NO: 1172; WAN024CWN-5_at; Start 86; Stop 110
cattctttgggacaagtccggttct

SEQ ID NO: 136339 - DNA, 25 bp, Artificial
  probe
  misc_feature (1)..(25): SEQ ID NO: 1172; WAN024CWN-5_at; Start 1157; Stop 1181
tcaatgagacaacagcagagtactt

SEQ ID NO: 136340 - DNA, 25 bp, Artificial
  probe
  misc_feature (1)..(25): SEQ ID NO: 1172; WAN024CWN-5_at; Start 1287; Stop 1311
caatcaagtcactccaggtcaaaag

SEQ ID NO: 136341 - DNA, 25 bp, Artificial
  probe
  misc_feature (1)..(25): SEQ ID NO: 1172; WAN024CWN-5_at; Start 1522; Stop 1546
gctgctggtgtttggagtaactctc

SEQ ID NO: 136342 - DNA, 25 bp, Artificial
  probe
  misc_feature (1)..(25): SEQ ID NO: 1172; WAN024CWN-5_at; Start 170; Stop 194
ttgcaacagcaaaagagaatgatgg

SEQ ID NO: 136343 - DNA, 25 bp, Artificial
  probe
  misc_feature (1)..(25): SEQ ID NO: 1172; WAN024CWN-5_at; Start 1172; Stop 1196
cagagtacttgatgaagcttcgcga

SEQ ID NO: 136344 - DNA, 25 bp, Artificial
  probe
  misc_feature (1)..(25): SEQ ID NO: 1172; WAN024CWN-5_at; Start 517; Stop 541
gatgccaatggaaatgcaactgttg

SEQ ID NO: 136345 - DNA, 25 bp, Artificial
  probe
  misc_feature (1)..(25): SEQ ID NO: 1172; WAN024CWN-5_at; Start 250; Stop 274
gatggacctaagacagaagaagaac

SEQ ID NO: 136346 - DNA, 25 bp, Artificial
  probe
  misc_feature (1)..(25): SEQ ID NO: 1172; WAN024CWN-5_at; Start 1507; Stop 1531
tctacagataagcttgctgctggtg

SEQ ID NO: 136347 - DNA, 25 bp, Artificial
  probe
  misc_feature (1)..(25): SEQ ID NO: 1172; WAN024CWN-5_at; Start 1722; Stop 1746
cactgaagatgccaatgcagacaag

SEQ ID NO: 136348 - DNA, 25 bp, Artificial
  probe
  misc_feature (1)..(25): SEQ ID NO: 1172; WAN024CWN-5_at; Start 1648; Stop 1672
caatgggaaaaagcttataagggca

SEQ ID NO: 136349 - DNA, 25 bp, Artificial
  probe
  misc_feature (1)..(25): SEQ ID NO: 1172; WAN024CWN-5_at; Start 119; Stop 143
gcgtgcagtctggttccacggcgaa

SEQ ID NO: 136350 - DNA, 25 bp, Artificial
  probe
  misc_feature (1)..(25): SEQ ID NO: 1172; WAN024CWN-5_at; Start 1629; Stop 1653
aatccacagctctgaatggcaatgg

SEQ ID NO: 136351 - DNA, 25 bp, Artificial
  probe
  misc_feature (1)..(25): SEQ ID NO: 1172; WAN024CWN-5_at; Start 1200; Stop 1224
tgctcacttaatcaatgcggaaatg

SEQ ID NO: 136352 - DNA, 25 bp, Artificial
  probe
  misc_feature (1)..(25): SEQ ID NO: 1172; WAN024CWN-5_at; Start 1185; Stop 1209
gaagcttcgcgatgatgctcactta

SEQ ID NO: 136353 - DNA, 25 bp, Artificial
  probe
  misc_feature (1)..(25): SEQ ID NO: 1172; WAN024CWN-5_at; Start 414; Stop 438
tatccgagaagaaaaaggtgtccgc

SEQ ID NO: 136354 - DNA, 25 bp, Artificial
  probe
  misc_feature (1)..(25): SEQ ID NO: 1172; WAN024CWN-5_at; Start 401; Stop 425
agggaacagtcactatccgagaaga

SEQ ID NO: 136355 - DNA, 25 bp, Artificial
  probe
  misc_feature (1)..(25): SEQ ID NO: 1172; WAN024CWN-5_at; Start 1614; Stop 1638
tgccaactatgtaggaatccacagc

SEQ ID NO: 136356 - DNA, 25 bp, Artificial
  probe
  misc_feature (1)..(25): SEQ ID NO: 1172; WAN024CWN-5_at; Start 490; Stop 514
ctgtttgaaaagaagggcttgaccg

SEQ ID NO: 136357 - DNA, 25 bp, Artificial
  probe
  misc_feature (1)..(25): SEQ ID NO: 1172; WAN024CWN-5_at; Start 1710; Stop 1734
taaggttgttatcactgaagatgcc

SEQ ID NO: 136358 - DNA, 25 bp, Artificial
  probe
  misc_feature (1)..(25): SEQ ID NO: 1172; WAN024CWN-5_at; Start 1350; Stop 1374
cctcggcaatgctttagtctctgtt

SEQ ID NO: 136359 - DNA, 25 bp, Artificial
  probe
  misc_feature (1)..(25): SEQ ID NO: 1172; WAN024CWN-5_at; Start 504; Stop 528
gggcttgaccgttgatgccaatgga

SEQ ID NO: 136360 - DNA, 25 bp, Artificial
  probe
  misc_feature (1)..(25): SEQ ID NO: 1172; WAN024CWN-5_at; Start 1217; Stop 1241
cggaaatgacagtacgcttgcaagt

SEQ ID NO: 136361 - DNA, 25 bp, Artificial
  probe
  misc_feature (1)..(25): SEQ ID NO: 1172; WAN024CWN-5_at; Start 1415; Stop 1439
tgtcaaacaatacgcatgtcagcgg

SEQ ID NO: 136362 - DNA, 25 bp, Artificial
  probe
  misc_feature (1)..(25): SEQ ID NO: 1172; WAN024CWN-5_at; Start 1679; Stop 1703
tcccagaatacacgaaggaacttcc

SEQ ID NO: 136363 - DNA, 25 bp, Artificial
  probe
  misc_feature (1)..(25): SEQ ID NO: 3226; WAN024CWN-M_at; Start 1450; Stop 1474
catttcaggcgatgcttctaaggca

SEQ ID NO: 136364 - DNA, 25 bp, Artificial
  probe
  misc_feature (1)..(25): SEQ ID NO: 3226; WAN024CWN-M_at; Start 427; Stop 451
cattgatgctgcctatgacctagct

SEQ ID NO: 136365 - DNA, 25 bp, Artificial
  probe
  misc_feature (1)..(25): SEQ ID NO: 3226; WAN024CWN-M_at; Start 560; Stop 584
tgggctacccacgttcttgctaaag

SEQ ID NO: 136366 - DNA, 25 bp, Artificial
  probe
  misc_feature (1)..(25): SEQ ID NO: 3226; WAN024CWN-M_at; Start 290; Stop 314
tatggagctcatctaggtatccacg

SEQ ID NO: 136367 - DNA, 25 bp, Artificial
  probe
  misc_feature (1)..(25): SEQ ID NO: 3226; WAN024CWN-M_at; Start 303; Stop 327
taggtatccacgttaacgcttcaga

SEQ ID NO: 136368 - DNA, 25 bp, Artificial
  probe
  misc_feature (1)..(25): SEQ ID NO: 3226; WAN024CWN-M_at; Start 543; Stop 567
caggtgataacggtgcctgggctac

SEQ ID NO: 136369 - DNA, 25 bp, Artificial
  probe
  misc_feature (1)..(25): SEQ ID NO: 3226; WAN024CWN-M_at; Start 788; Stop 812
tatccactgctaggtggctacagca

SEQ ID NO: 136370 - DNA, 25 bp, Artificial
  probe
  misc_feature (1)..(25): SEQ ID NO: 3226; WAN024CWN-M_at; Start 445; Stop 469
cctagctcatggtcgtttggcacgt

SEQ ID NO: 136371 - DNA, 25 bp, Artificial
  probe
  misc_feature (1)..(25): SEQ ID NO: 3226; WAN024CWN-M_at; Start 659; Stop 683
tgggcagctgacttgacctacggtg

SEQ ID NO: 136372 - DNA, 25 bp, Artificial
  probe
  misc_feature (1)..(25): SEQ ID NO: 3226; WAN024CWN-M_at; Start 364; Stop 388
tctccgtaagaatccagatggaagc

SEQ ID NO: 136373 - DNA, 25 bp, Artificial
  probe
  misc_feature (1)..(25): SEQ ID NO: 3226; WAN024CWN-M_at; Start 955; Stop 979
taacggtagcacctataaatggact

SEQ ID NO: 136374 - DNA, 25 bp, Artificial
  probe
  misc_feature (1)..(25): SEQ ID NO: 3226; WAN024CWN-M_at; Start 970; Stop 994
taaatggactccagaaatgcgagtg

SEQ ID NO: 136375 - DNA, 25 bp, Artificial
  probe
  misc_feature (1)..(25): SEQ ID NO: 3226; WAN024CWN-M_at; Start 679; Stop 703
cggtggctacaccaataaaggtatc

SEQ ID NO: 136376 - DNA, 25 bp, Artificial
  probe
  misc_feature (1)..(25): SEQ ID NO: 3226; WAN024CWN-M_at; Start 1229; Stop 1253
gattgggcaaagagcaaggtttacc

SEQ ID NO: 136377 - DNA, 25 bp, Artificial
  probe
  misc_feature (1)..(25): SEQ ID NO: 3226; WAN024CWN-M_at; Start 403; Stop 427
gaactggctagatcaaggtatcaac

SEQ ID NO: 136378 - DNA, 25 bp, Artificial
  probe
  misc_feature (1)..(25): SEQ ID NO: 3226; WAN024CWN-M_at; Start 1202; Stop 1226
ggtgcaacaacttggacccttccaa

SEQ ID NO: 136379 - DNA, 25 bp, Artificial
  probe
  misc_feature (1)..(25): SEQ ID NO: 3226; WAN024CWN-M_at; Start 638; Stop 662
tacgactctaccttccatcactggg

SEQ ID NO: 136380 - DNA, 25 bp, Artificial
  probe
  misc_feature (1)..(25): SEQ ID NO: 3226; WAN024CWN-M_at; Start 803; Stop 827
ggctacagcatgaaagactttgaag

SEQ ID NO: 136381 - DNA, 25 bp, Artificial
  probe
  misc_feature (1)..(25): SEQ ID NO: 3226; WAN024CWN-M_at; Start 623; Stop 647
ggccatggtggtgagtacgactcta

SEQ ID NO: 136382 - DNA, 25 bp, Artificial
  probe
  misc_feature (1)..(25): SEQ ID NO: 3226; WAN024CWN-M_at; Start 1256; Stop 1280
tacaagctaactgaccaaggtaaga

SEQ ID NO: 136383 - DNA, 25 bp, Artificial
  probe
  misc_feature (1)..(25): SEQ ID NO: 3226; WAN024CWN-M_at; Start 728; Stop 752
cgtaaccaccaaaaagatgcttggg

SEQ ID NO: 136384 - DNA, 25 bp, Artificial
  probe
  misc_feature (1)..(25): SEQ ID NO: 3226; WAN024CWN-M_at; Start 923; Stop 947
tgggaaaatggtacaccggtgacta

SEQ ID NO: 136385 - DNA, 25 bp, Artificial
  probe
  misc_feature (1)..(25): SEQ ID NO: 3226; WAN024CWN-M_at; Start 694; Stop 718
taaaggtatcaacagtgccatcacc

SEQ ID NO: 136386 - DNA, 25 bp, Artificial
  probe
  misc_feature (1)..(25): SEQ ID NO: 3226; WAN024CWN-M_at; Start 386; Stop 410
agctatagctatggttggaactggc

SEQ ID NO: 136387 - DNA, 25 bp, Artificial
  probe
  misc_feature (1)..(25): SEQ ID NO: 3226; WAN024CWN-M_at; Start 1271; Stop 1295
caaggtaagacagaagagcaagaac

SEQ ID NO: 136388 - DNA, 25 bp, Artificial
  probe
  misc_feature (1)..(25): SEQ ID NO: 3226; WAN024CWN-M_at; Start 1376; Stop 1400
cctgaaatgtcatggagtgaaggca

SEQ ID NO: 136389 - DNA, 25 bp, Artificial
  probe
  misc_feature (1)..(25): SEQ ID NO: 3226; WAN024CWN-M_at; Start 1115; Stop 1139
gcttacttgactccttggaactggg

SEQ ID NO: 136390 - DNA, 25 bp, Artificial
  probe
  misc_feature (1)..(25): SEQ ID NO: 3226; WAN024CWN-M_at; Start 53; Stop 77
gatatcacagcttaccgtatcgcga

SEQ ID NO: 136391 - DNA, 25 bp, Artificial
  probe
  misc_feature (1)..(25): SEQ ID NO: 3226; WAN024CWN-M_at; Start 203; Stop 227
gactctggtcacttgaactatgctg

SEQ ID NO: 136392 - DNA, 25 bp, Artificial
  probe
  misc_feature (1)..(25): SEQ ID NO: 3226; WAN024CWN-M_at; Start 584; Stop 608
gaaattaacaaacaaggctggcgct

SEQ ID NO: 136393 - DNA, 25 bp, Artificial
  probe
  misc_feature (1)..(25): SEQ ID NO: 3226; WAN024CWN-M_at; Start 235; Stop 259
taagcgtatcggtggtgtcgaagac

SEQ ID NO: 136394 - DNA, 25 bp, Artificial
  probe
  misc_feature (1)..(25): SEQ ID NO: 3226; WAN024CWN-M_at; Start 497; Stop 521
gacggtctcgactttatctatgtgg

SEQ ID NO: 136395 - DNA, 25 bp, Artificial
  probe
  misc_feature (1)..(25): SEQ ID NO: 3226; WAN024CWN-M_at; Start 761; Stop 785
tacagaagttatggtggtgcagcca

SEQ ID NO: 136396 - DNA, 25 bp, Artificial
  probe
  misc_feature (1)..(25): SEQ ID NO: 3226; WAN024CWN-M_at; Start 254; Stop 278
gaagacttcaagaccctaattgaga

SEQ ID NO: 136397 - DNA, 25 bp, Artificial
  probe
  misc_feature (1)..(25): SEQ ID NO: 4940; WAN024CWO_at; Start 145; Stop 169
gcgttgctgagtcttaaatacatga

SEQ ID NO: 136398 - DNA, 25 bp, Artificial
  probe
  misc_feature (1)..(25): SEQ ID NO: 4940; WAN024CWO_at; Start 59; Stop 83
gcaatttccttgattcccataccga

SEQ ID NO: 136399 - DNA, 25 bp, Artificial
  probe
  misc_feature (1)..(25): SEQ ID NO: 4940; WAN024CWO_at; Start 199; Stop 223
catatctcctccaagggctgcctta

SEQ ID NO: 136400 - DNA, 25 bp, Artificial
  probe
  misc_feature (1)..(25): SEQ ID NO: 4940; WAN024CWO_at; Start 142; Stop 166
caagcgttgctgagtcttaaataca

SEQ ID NO: 136401 - DNA, 25 bp, Artificial
  probe
  misc_feature (1)..(25): SEQ ID NO: 4940; WAN024CWO_at; Start 30; Stop 54
tttcacggctaatcaagtcaacacg

SEQ ID NO: 136402 - DNA, 25 bp, Artificial
  probe
  misc_feature (1)..(25): SEQ ID NO: 4940; WAN024CWO_at; Start 124; Stop 148
gaactccttgtattccgccaagcgt

SEQ ID NO: 136403 - DNA, 25 bp, Artificial
  probe
  misc_feature (1)..(25): SEQ ID NO: 4940; WAN024CWO_at; Start 208; Stop 232
tccaagggctgccttaatccaagcc

SEQ ID NO: 136404 - DNA, 25 bp, Artificial
  probe
  misc_feature (1)..(25): SEQ ID NO: 4940; WAN024CWO_at; Start 3; Stop 27
gaagaacaactgcttcgactgcagc

SEQ ID NO: 136405 - DNA, 25 bp, Artificial
  probe
  misc_feature (1)..(25): SEQ ID NO: 4940; WAN024CWO_at; Start 70; Stop 94
gattcccataccgatgttacggcta

SEQ ID NO: 136406 - DNA, 25 bp, Artificial
  probe
  misc_feature (1)..(25): SEQ ID NO: 4940; WAN024CWO_at; Start 92; Stop 116
ctaagagcaaggtcagaaagttgcg

SEQ ID NO: 136407 - DNA, 25 bp, Artificial
  probe
  misc_feature (1)..(25): SEQ ID NO: 4940; WAN024CWO_at; Start 165; Stop 189
catgagcaggaaggataacaaagct

SEQ ID NO: 136408 - DNA, 25 bp, Artificial
  probe
  misc_feature (1)..(25): SEQ ID NO: 4940; WAN024CWO_at; Start 80; Stop 104
ccgatgttacggctaagagcaaggt

SEQ ID NO: 136409 - DNA, 25 bp, Artificial
  probe
  misc_feature (1)..(25): SEQ ID NO: 4940; WAN024CWO_at; Start 76; Stop 100
cataccgatgttacggctaagagca

SEQ ID NO: 136410 - DNA, 25 bp, Artificial
  probe
  misc_feature (1)..(25): SEQ ID NO: 4940; WAN024CWO_at; Start 131; Stop 155
ttgtattccgccaagcgttgctgag

SEQ ID NO: 136411 - DNA, 25 bp, Artificial
  probe
  misc_feature (1)..(25): SEQ ID NO: 4940; WAN024CWO_at; Start 13; Stop 37
tgcttcgactgcagctttttcacgg

SEQ ID NO: 136412 - DNA, 25 bp, Artificial
  probe
  misc_feature (1)..(25): SEQ ID NO: 4940; WAN024CWO_at; Start 245; Stop 269
gcccaagaccaagctgttttctgag

SEQ ID NO: 136413 - DNA, 25 bp, Artificial
  probe
  misc_feature (1)..(25): SEQ ID NO: 4940; WAN024CWO_at; Start 152; Stop 176
tgagtcttaaatacatgagcaggaa

SEQ ID NO: 136414 - DNA, 25 bp, Artificial
  probe
  misc_feature (1)..(25): SEQ ID NO: 4940; WAN024CWO_at; Start 261; Stop 285
ttttctgagttgcttgatgagctag

SEQ ID NO: 136415 - DNA, 25 bp, Artificial
  probe
  misc_feature (1)..(25): SEQ ID NO: 4940; WAN024CWO_at; Start 194; Stop 218
aagctcatatctcctccaagggctg

SEQ ID NO: 136416 - DNA, 25 bp, Artificial
  probe
  misc_feature (1)..(25): SEQ ID NO: 4940; WAN024CWO_at; Start 249; Stop 273
aagaccaagctgttttctgagttgc

SEQ ID NO: 136417 - DNA, 25 bp, Artificial
  probe
  misc_feature (1)..(25): SEQ ID NO: 4940; WAN024CWO_at; Start 89; Stop 113
cggctaagagcaaggtcagaaagtt

SEQ ID NO: 136418 - DNA, 25 bp, Artificial
  probe
  misc_feature (1)..(25): SEQ ID NO: 4940; WAN024CWO_at; Start 240; Stop 264
cacgcgcccaagaccaagctgtttt

SEQ ID NO: 136419 - DNA, 25 bp, Artificial
  probe
  misc_feature (1)..(25): SEQ ID NO: 4940; WAN024CWO_at; Start 170; Stop 194
gcaggaaggataacaaagctatcaa

SEQ ID NO: 136420 - DNA, 25 bp, Artificial
  probe
  misc_feature (1)..(25): SEQ ID NO: 4940; WAN024CWO_at; Start 17; Stop 41
tcgactgcagctttttcacggctaa

SEQ ID NO: 136421 - DNA, 25 bp, Artificial
  probe
  misc_feature (1)..(25): SEQ ID NO: 4940; WAN024CWO_at; Start 137; Stop 161
tccgccaagcgttgctgagtcttaa

SEQ ID NO: 136422 - DNA, 25 bp, Artificial
  probe
  misc_feature (1)..(25): SEQ ID NO: 4940; WAN024CWO_at; Start 228; Stop 252
aagcccagttttcacgcgcccaaga

SEQ ID NO: 136423 - DNA, 25 bp, Artificial
  probe
  misc_feature (1)..(25): SEQ ID NO: 4940; WAN024CWO_at; Start 258; Stop 282
ctgttttctgagttgcttgatgagc

SEQ ID NO: 136424 - DNA, 25 bp, Artificial
  probe
  misc_feature (1)..(25): SEQ ID NO: 4940; WAN024CWO_at; Start 177; Stop 201
ggataacaaagctatcaaagctcat

SEQ ID NO: 136425 - DNA, 25 bp, Artificial
  probe
  misc_feature (1)..(25): SEQ ID NO: 4940; WAN024CWO_at; Start 84; Stop 108
tgttacggctaagagcaaggtcaga

SEQ ID NO: 136426 - DNA, 25 bp, Artificial
  probe
  misc_feature (1)..(25): SEQ ID NO: 4940; WAN024CWO_at; Start 159; Stop 183
taaatacatgagcaggaaggataac

SEQ ID NO: 136427 - DNA, 25 bp, Artificial
  probe
  misc_feature (1)..(25): SEQ ID NO: 4940; WAN024CWO_at; Start 22; Stop 46
tgcagctttttcacggctaatcaag

SEQ ID NO: 136428 - DNA, 25 bp, Artificial
  probe
  misc_feature (1)..(25): SEQ ID NO: 4940; WAN024CWO_at; Start 119; Stop 143
tcaaagaactccttgtattccgcca

SEQ ID NO: 136429 - DNA, 25 bp, Artificial
  probe
  misc_feature (1)..(25): SEQ ID NO: 4940; WAN024CWO_at; Start 212; Stop 236
agggctgccttaatccaagcccagt

SEQ ID NO: 136430 - DNA, 25 bp, Artificial
  probe
  misc_feature (1)..(25): SEQ ID NO: 4940; WAN024CWO_at; Start 191; Stop 215
tcaaagctcatatctcctccaaggg

SEQ ID NO: 136431 - DNA, 25 bp, Artificial
  probe
  misc_feature (1)..(25): SEQ ID NO: 2505; WAN024CWP_at; Start 23; Stop 47
aagacctccttcttgactccatcaa

SEQ ID NO: 136432 - DNA, 25 bp, Artificial
  probe
  misc_feature (1)..(25): SEQ ID NO: 2505; WAN024CWP_at; Start 258; Stop 282
gaccagtgatggtcactttcccaga

SEQ ID NO: 136433 - DNA, 25 bp, Artificial
  probe
  misc_feature (1)..(25): SEQ ID NO: 2505; WAN024CWP_at; Start 168; Stop 192
caactgtaaatggacgagcttgacc

SEQ ID NO: 136434 - DNA, 25 bp, Artificial
  probe
  misc_feature (1)..(25): SEQ ID NO: 2505; WAN024CWP_at; Start 2; Stop 26
tggctctcgaactgagtagacaaga

SEQ ID NO: 136435 - DNA, 25 bp, Artificial
  probe
  misc_feature (1)..(25): SEQ ID NO: 2505; WAN024CWP_at; Start 222; Stop 246
ctttttggtggagggagatgcggtc

SEQ ID NO: 136436 - DNA, 25 bp, Artificial
  probe
  misc_feature (1)..(25): SEQ ID NO: 2505; WAN024CWP_at; Start 288; Stop 312
tcttggtctcacgactcaaatctaa

SEQ ID NO: 136437 - DNA, 25 bp, Artificial
  probe
  misc_feature (1)..(25): SEQ ID NO: 2505; WAN024CWP_at; Start 151; Stop 175
ggcttcattgtcatggtcaactgta

SEQ ID NO: 136438 - DNA, 25 bp, Artificial
  probe
  misc_feature (1)..(25): SEQ ID NO: 2505; WAN024CWP_at; Start 281; Stop 305
gaaaaagtcttggtctcacgactca

SEQ ID NO: 136439 - DNA, 25 bp, Artificial
  probe
  misc_feature (1)..(25): SEQ ID NO: 2505; WAN024CWP_at; Start 104; Stop 128
gcaagaaccaattcaacttgaccag

SEQ ID NO: 136440 - DNA, 25 bp, Artificial
  probe
  misc_feature (1)..(25): SEQ ID NO: 2505; WAN024CWP_at; Start 162; Stop 186
catggtcaactgtaaatggacgagc

SEQ ID NO: 136441 - DNA, 25 bp, Artificial
  probe
  misc_feature (1)..(25): SEQ ID NO: 2505; WAN024CWP_at; Start 93; Stop 117
taccagaaaaggcaagaaccaattc

SEQ ID NO: 136442 - DNA, 25 bp, Artificial
  probe
  misc_feature (1)..(25): SEQ ID NO: 2505; WAN024CWP_at; Start 235; Stop 259
ggagatgcggtcactctgtgcttga

SEQ ID NO: 136443 - DNA, 25 bp, Artificial
  probe
  misc_feature (1)..(25): SEQ ID NO: 2505; WAN024CWP_at; Start 128; Stop 152
gcctcagccaattcgatatgaaggg

SEQ ID NO: 136444 - DNA, 25 bp, Artificial
  probe
  misc_feature (1)..(25): SEQ ID NO: 2505; WAN024CWP_at; Start 147; Stop 171
gaagggcttcattgtcatggtcaac

SEQ ID NO: 136445 - DNA, 25 bp, Artificial
  probe
  misc_feature (1)..(25): SEQ ID NO: 2505; WAN024CWP_at; Start 42; Stop 66
catcaactgtataataagaagggta

SEQ ID NO: 136446 - DNA, 25 bp, Artificial
  probe
  misc_feature (1)..(25): SEQ ID NO: 2505; WAN024CWP_at; Start 70; Stop 94
ccctgtcatgttgtctgtaatttta

SEQ ID NO: 136447 - DNA, 25 bp, Artificial
  probe
  misc_feature (1)..(25): SEQ ID NO: 2505; WAN024CWP_at; Start 113; Stop 137
aattcaacttgaccagcctcagcca

SEQ ID NO: 136448 - DNA, 25 bp, Artificial
  probe
  misc_feature (1)..(25): SEQ ID NO: 2505; WAN024CWP_at; Start 183; Stop 207
gagcttgacctgcaacttctacaga

SEQ ID NO: 136449 - DNA, 25 bp, Artificial
  probe
  misc_feature (1)..(25): SEQ ID NO: 2505; WAN024CWP_at; Start 238; Stop 262
gatgcggtcactctgtgcttgacca

SEQ ID NO: 136450 - DNA, 25 bp, Artificial
  probe
  misc_feature (1)..(25): SEQ ID NO: 2505; WAN024CWP_at; Start 122; Stop 146
tgaccagcctcagccaattcgatat

SEQ ID NO: 136451 - DNA, 25 bp, Artificial
  probe
  misc_feature (1)..(25): SEQ ID NO: 2505; WAN024CWP_at; Start 134; Stop 158
gccaattcgatatgaagggcttcat

SEQ ID NO: 136452 - DNA, 25 bp, Artificial
  probe
  misc_feature (1)..(25): SEQ ID NO: 2505; WAN024CWP_at; Start 276; Stop 300
tcccagaaaaagtcttggtctcacg

SEQ ID NO: 136453 - DNA, 25 bp, Artificial
  probe
  misc_feature (1)..(25): SEQ ID NO: 2505; WAN024CWP_at; Start 178; Stop 202
tggacgagcttgacctgcaacttct

SEQ ID NO: 136454 - DNA, 25 bp, Artificial
  probe
  misc_feature (1)..(25): SEQ ID NO: 2505; WAN024CWP_at; Start 246; Stop 270
cactctgtgcttgaccagtgatggt

SEQ ID NO: 136455 - DNA, 25 bp, Artificial
  probe
  misc_feature (1)..(25): SEQ ID NO: 2505; WAN024CWP_at; Start 188; Stop 212
tgacctgcaacttctacagaggtga

SEQ ID NO: 136456 - DNA, 25 bp, Artificial
  probe
  misc_feature (1)..(25): SEQ ID NO: 2505; WAN024CWP_at; Start 85; Stop 109
tgtaattttaccagaaaaggcaaga

SEQ ID NO: 136457 - DNA, 25 bp, Artificial
  probe
  misc_feature (1)..(25): SEQ ID NO: 2505; WAN024CWP_at; Start 174; Stop 198
taaatggacgagcttgacctgcaac

SEQ ID NO: 136458 - DNA, 25 bp, Artificial
  probe
  misc_feature (1)..(25): SEQ ID NO: 2505; WAN024CWP_at; Start 195; Stop 219
caacttctacagaggtgatttccaa

SEQ ID NO: 136459 - DNA, 25 bp, Artificial
  probe
  misc_feature (1)..(25): SEQ ID NO: 2505; WAN024CWP_at; Start 53; Stop 77
taataagaagggtaaatccctgtca

SEQ ID NO: 136460 - DNA, 25 bp, Artificial
  probe
  misc_feature (1)..(25): SEQ ID NO: 2505; WAN024CWP_at; Start 8; Stop 32
tcgaactgagtagacaagacctcct

SEQ ID NO: 136461 - DNA, 25 bp, Artificial
  probe
  misc_feature (1)..(25): SEQ ID NO: 2505; WAN024CWP_at; Start 37; Stop 61
gactccatcaactgtataataagaa

SEQ ID NO: 136462 - DNA, 25 bp, Artificial
  probe
  misc_feature (1)..(25): SEQ ID NO: 2505; WAN024CWP_at; Start 263; Stop 287
gtgatggtcactttcccagaaaaag

SEQ ID NO: 136463 - DNA, 25 bp, Artificial
  probe
  misc_feature (1)..(25): SEQ ID NO: 2505; WAN024CWP_at; Start 62; Stop 86
gggtaaatccctgtcatgttgtctg

SEQ ID NO: 136464 - DNA, 25 bp, Artificial
  probe
  misc_feature (1)..(25): SEQ ID NO: 2505; WAN024CWP_at; Start 15; Stop 39
gagtagacaagacctccttcttgac

SEQ ID NO: 136465 - DNA, 25 bp, Artificial
  probe
  misc_feature (1)..(25): SEQ ID NO: 3071; WAN024CWQ_at; Start 234; Stop 258
gggcaacttgttgacggctagcaaa

SEQ ID NO: 136466 - DNA, 25 bp, Artificial
  probe
  misc_feature (1)..(25): SEQ ID NO: 3071; WAN024CWQ_at; Start 190; Stop 214
gaggttcccaaaccattggtgagcc

SEQ ID NO: 136467 - DNA, 25 bp, Artificial
  probe
  misc_feature (1)..(25): SEQ ID NO: 3071; WAN024CWQ_at; Start 183; Stop 207
tagtcacgaggttcccaaaccattg

SEQ ID NO: 136468 - DNA, 25 bp, Artificial
  probe
  misc_feature (1)..(25): SEQ ID NO: 3071; WAN024CWQ_at; Start 51; Stop 75
caagagcaagaggtactccacctgt

SEQ ID NO: 136469 - DNA, 25 bp, Artificial
  probe
  misc_feature (1)..(25): SEQ ID NO: 3071; WAN024CWQ_at; Start 39; Stop 63
tagcgtcacgttcaagagcaagagg

SEQ ID NO: 136470 - DNA, 25 bp, Artificial
  probe
  misc_feature (1)..(25): SEQ ID NO: 3071; WAN024CWQ_at; Start 259; Stop 283
tgtagagttctcatcgacaaccaag

SEQ ID NO: 136471 - DNA, 25 bp, Artificial
  probe
  misc_feature (1)..(25): SEQ ID NO: 3071; WAN024CWQ_at; Start 109; Stop 133
gatggtatccacacagacgtattcc

SEQ ID NO: 136472 - DNA, 25 bp, Artificial
  probe
  misc_feature (1)..(25): SEQ ID NO: 3071; WAN024CWQ_at; Start 103; Stop 127
tggttcgatggtatccacacagacg

SEQ ID NO: 136473 - DNA, 25 bp, Artificial
  probe
  misc_feature (1)..(25): SEQ ID NO: 3071; WAN024CWQ_at; Start 214; Stop 238
caattcatgggccacaacaagggca

SEQ ID NO: 136474 - DNA, 25 bp, Artificial
  probe
  misc_feature (1)..(25): SEQ ID NO: 3071; WAN024CWQ_at; Start 219; Stop 243
catgggccacaacaagggcaacttg

SEQ ID NO: 136475 - DNA, 25 bp, Artificial
  probe
  misc_feature (1)..(25): SEQ ID NO: 3071; WAN024CWQ_at; Start 246; Stop 270
gacggctagcaaatgtagagttctc

SEQ ID NO: 136476 - DNA, 25 bp, Artificial
  probe
  misc_feature (1)..(25): SEQ ID NO: 3071; WAN024CWQ_at; Start 96; Stop 120
tccagcttggttcgatggtatccac

SEQ ID NO: 136477 - DNA, 25 bp, Artificial
  probe
  misc_feature (1)..(25): SEQ ID NO: 3071; WAN024CWQ_at; Start 45; Stop 69
cacgttcaagagcaagaggtactcc

SEQ ID NO: 136478 - DNA, 25 bp, Artificial
  probe
  misc_feature (1)..(25): SEQ ID NO: 3071; WAN024CWQ_at; Start 280; Stop 304
caagtaaacttcacggtaggtcaca

SEQ ID NO: 136479 - DNA, 25 bp, Artificial
  probe
  misc_feature (1)..(25): SEQ ID NO: 3071; WAN024CWQ_at; Start 266; Stop 290
ttctcatcgacaaccaagtaaactt

SEQ ID NO: 136480 - DNA, 25 bp, Artificial
  probe
  misc_feature (1)..(25): SEQ ID NO: 3071; WAN024CWQ_at; Start 6; Stop 30
taacttcgacgtggacagactgaac

SEQ ID NO: 136481 - DNA, 25 bp, Artificial
  probe
  misc_feature (1)..(25): SEQ ID NO: 3071; WAN024CWQ_at; Start 57; Stop 81
caagaggtactccacctgtttggaa

SEQ ID NO: 136482 - DNA, 25 bp, Artificial
  probe
  misc_feature (1)..(25): SEQ ID NO: 3071; WAN024CWQ_at; Start 176; Stop 200
catttcatagtcacgaggttcccaa

SEQ ID NO: 136483 - DNA, 25 bp, Artificial
  probe
  misc_feature (1)..(25): SEQ ID NO: 3071; WAN024CWQ_at; Start 2; Stop 26
tgtttaacttcgacgtggacagact

SEQ ID NO: 136484 - DNA, 25 bp, Artificial
  probe
  misc_feature (1)..(25): SEQ ID NO: 3071; WAN024CWQ_at; Start 309; Stop 333
cccagttttccatagcaccagctga

SEQ ID NO: 136485 - DNA, 25 bp, Artificial
  probe
  misc_feature (1)..(25): SEQ ID NO: 3071; WAN024CWQ_at; Start 168; Stop 192
catcccaccatttcatagtcacgag

SEQ ID NO: 136486 - DNA, 25 bp, Artificial
  probe
  misc_feature (1)..(25): SEQ ID NO: 3071; WAN024CWQ_at; Start 156; Stop 180
tgagccaaaggtcatcccaccattt

SEQ ID NO: 136487 - DNA, 25 bp, Artificial
  probe
  misc_feature (1)..(25): SEQ ID NO: 3071; WAN024CWQ_at; Start 305; Stop 329
agaccccagttttccatagcaccag

SEQ ID NO: 136488 - DNA, 25 bp, Artificial
  probe
  misc_feature (1)..(25): SEQ ID NO: 3071; WAN024CWQ_at; Start 203; Stop 227
cattggtgagccaattcatgggcca

SEQ ID NO: 136489 - DNA, 25 bp, Artificial
  probe
  misc_feature (1)..(25): SEQ ID NO: 3071; WAN024CWQ_at; Start 150; Stop 174
tttcattgagccaaaggtcatccca

SEQ ID NO: 136490 - DNA, 25 bp, Artificial
  probe
  misc_feature (1)..(25): SEQ ID NO: 3071; WAN024CWQ_at; Start 299; Stop 323
gtcacaagaccccagttttccatag

SEQ ID NO: 136491 - DNA, 25 bp, Artificial
  probe
  misc_feature (1)..(25): SEQ ID NO: 3071; WAN024CWQ_at; Start 81; Stop 105
aatcttcaaagatattccagcttgg

SEQ ID NO: 136492 - DNA, 25 bp, Artificial
  probe
  misc_feature (1)..(25): SEQ ID NO: 3071; WAN024CWQ_at; Start 21; Stop 45
cagactgaacgccatcagtagcgtc

SEQ ID NO: 136493 - DNA, 25 bp, Artificial
  probe
  misc_feature (1)..(25): SEQ ID NO: 3071; WAN024CWQ_at; Start 68; Stop 92
ccacctgtttggaaatcttcaaaga

SEQ ID NO: 136494 - DNA, 25 bp, Artificial
  probe
  misc_feature (1)..(25): SEQ ID NO: 3071; WAN024CWQ_at; Start 124; Stop 148
gacgtattccatcatattagcgaaa

SEQ ID NO: 136495 - DNA, 25 bp, Artificial
  probe
  misc_feature (1)..(25): SEQ ID NO: 3071; WAN024CWQ_at; Start 138; Stop 162
tattagcgaaactttcattgagcca

SEQ ID NO: 136496 - DNA, 25 bp, Artificial
  probe
  misc_feature (1)..(25): SEQ ID NO: 3071; WAN024CWQ_at; Start 31; Stop 55
gccatcagtagcgtcacgttcaaga

SEQ ID NO: 136497 - DNA, 25 bp, Artificial
  probe
  misc_feature (1)..(25): SEQ ID NO: 3071; WAN024CWQ_at; Start 13; Stop 37
gacgtggacagactgaacgccatca

SEQ ID NO: 136498 - DNA, 25 bp, Artificial
  probe
  misc_feature (1)..(25): SEQ ID NO: 3071; WAN024CWQ_at; Start 289; Stop 313
ttcacggtaggtcacaagaccccag

SEQ ID NO: 136499 - DNA, 25 bp, Artificial
  probe
  misc_feature (1)..(25): SEQ ID NO: 731; WAN024CWR_at; Start 1099; Stop 1123
ctcaatttgggcttgaatagtctcc

SEQ ID NO: 136500 - DNA, 25 bp, Artificial
  probe
  misc_feature (1)..(25): SEQ ID NO: 731; WAN024CWR_at; Start 112; Stop 136
tatggttacttcaactcagtcgaca

SEQ ID NO: 136501 - DNA, 25 bp, Artificial
  probe
  misc_feature (1)..(25): SEQ ID NO: 731; WAN024CWR_at; Start 1049; Stop 1073
ccaatggctatgaaaaacgtatcac

SEQ ID NO: 136502 - DNA, 25 bp, Artificial
  probe
  misc_feature (1)..(25): SEQ ID NO: 731; WAN024CWR_at; Start 22; Stop 46
gctctatcttacatgggaattcgtg

SEQ ID NO: 136503 - DNA, 25 bp, Artificial
  probe
  misc_feature (1)..(25): SEQ ID NO: 731; WAN024CWR_at; Start 685; Stop 709
gatcgcctcttcctcgttaaaacag

SEQ ID NO: 136504 - DNA, 25 bp, Artificial
  probe
  misc_feature (1)..(25): SEQ ID NO: 731; WAN024CWR_at; Start 625; Stop 649
tttctccctctgacagccatgttag

SEQ ID NO: 136505 - DNA, 25 bp, Artificial
  probe
  misc_feature (1)..(25): SEQ ID NO: 731; WAN024CWR_at; Start 908; Stop 932
gactcatggttttaggaccaaatgc

SEQ ID NO: 136506 - DNA, 25 bp, Artificial
  probe
  misc_feature (1)..(25): SEQ ID NO: 731; WAN024CWR_at; Start 96; Stop 120
cttggaccgaactgactatggttac

SEQ ID NO: 136507 - DNA, 25 bp, Artificial
  probe
  misc_feature (1)..(25): SEQ ID NO: 731; WAN024CWR_at; Start 923; Stop 947
gaccaaatgccatcctactttacgg

SEQ ID NO: 136508 - DNA, 25 bp, Artificial
  probe
  misc_feature (1)..(25): SEQ ID NO: 731; WAN024CWR_at; Start 268; Stop 292
gcttgtacgattttgaccactgctg

SEQ ID NO: 136509 - DNA, 25 bp, Artificial
  probe
  misc_feature (1)..(25): SEQ ID NO: 731; WAN024CWR_at; Start 960; Stop 984
tatcggaggcggcatcttgacctct

SEQ ID NO: 136510 - DNA, 25 bp, Artificial
  probe
  misc_feature (1)..(25): SEQ ID NO: 731; WAN024CWR_at; Start 948; Stop 972
tagtgaaaaatatatcggaggcggc

SEQ ID NO: 136511 - DNA, 25 bp, Artificial
  probe
  misc_feature (1)..(25): SEQ ID NO: 731; WAN024CWR_at; Start 1232; Stop 1256
tccacttgggacatatctttagcta

SEQ ID NO: 136512 - DNA, 25 bp, Artificial
  probe
  misc_feature (1)..(25): SEQ ID NO: 731; WAN024CWR_at; Start 852; Stop 876
tctggttaatagaggtagtcgaatc

SEQ ID NO: 136513 - DNA, 25 bp, Artificial
  probe
  misc_feature (1)..(25): SEQ ID NO: 731; WAN024CWR_at; Start 701; Stop 725
ttaaaacagggattgatgtcaacgt

SEQ ID NO: 136514 - DNA, 25 bp, Artificial
  probe
  misc_feature (1)..(25): SEQ ID NO: 731; WAN024CWR_at; Start 439; Stop 463
aaaactgccttcatccgtatcctga

SEQ ID NO: 136515 - DNA, 25 bp, Artificial
  probe
  misc_feature (1)..(25): SEQ ID NO: 731; WAN024CWR_at; Start 388; Stop 412
tcaatcgaatgggtcaatgaagctc

SEQ ID NO: 136516 - DNA, 25 bp, Artificial
  probe
  misc_feature (1)..(25): SEQ ID NO: 731; WAN024CWR_at; Start 1437; Stop 1461
tgaatttttaaaccatgtcctagcc

SEQ ID NO: 136517 - DNA, 25 bp, Artificial
  probe
  misc_feature (1)..(25): SEQ ID NO: 731; WAN024CWR_at; Start 361; Stop 385
gggattcaactcattgcccagattt

SEQ ID NO: 136518 - DNA, 25 bp, Artificial
  probe
  misc_feature (1)..(25): SEQ ID NO: 731; WAN024CWR_at; Start 191; Stop 215
taagggctatcagtaatgtcaagga

SEQ ID NO: 136519 - DNA, 25 bp, Artificial
  probe
  misc_feature (1)..(25): SEQ ID NO: 731; WAN024CWR_at; Start 737; Stop 761
ccatagctcagcgaattgtgaccgt

SEQ ID NO: 136520 - DNA, 25 bp, Artificial
  probe
  misc_feature (1)..(25): SEQ ID NO: 731; WAN024CWR_at; Start 516; Stop 540
tacacttgtgatgagtttatcgacg

SEQ ID NO: 136521 - DNA, 25 bp, Artificial
  probe
  misc_feature (1)..(25): SEQ ID NO: 731; WAN024CWR_at; Start 785; Stop 809
caattggagtgagtgtgcctcgtct

SEQ ID NO: 136522 - DNA, 25 bp, Artificial
  probe
  misc_feature (1)..(25): SEQ ID NO: 731; WAN024CWR_at; Start 1218; Stop 1242
tagaaaacaactcatccacttggga

SEQ ID NO: 136523 - DNA, 25 bp, Artificial
  probe
  misc_feature (1)..(25): SEQ ID NO: 731; WAN024CWR_at; Start 282; Stop 306
gaccactgctgtctatatcctagcc

SEQ ID NO: 136524 - DNA, 25 bp, Artificial
  probe
  misc_feature (1)..(25): SEQ ID NO: 731; WAN024CWR_at; Start 532; Stop 556
ttatcgacgctgattaactacctga

SEQ ID NO: 136525 - DNA, 25 bp, Artificial
  probe
  misc_feature (1)..(25): SEQ ID NO: 731; WAN024CWR_at; Start 82; Stop 106
tatgtcgcgcgtgtcttggaccgaa

SEQ ID NO: 136526 - DNA, 25 bp, Artificial
  probe
  misc_feature (1)..(25): SEQ ID NO: 731; WAN024CWR_at; Start 155; Stop 179
tgccctttgcaacttatggtgtcta

SEQ ID NO: 136527 - DNA, 25 bp, Artificial
  probe
  misc_feature (1)..(25): SEQ ID NO: 731; WAN024CWR_at; Start 1085; Stop 1109
tctttgctgggctactcaatttggg

SEQ ID NO: 136528 - DNA, 25 bp, Artificial
  probe
  misc_feature (1)..(25): SEQ ID NO: 731; WAN024CWR_at; Start 640; Stop 664
gccatgttagtctttgccaatgcca

SEQ ID NO: 136529 - DNA, 25 bp, Artificial
  probe
  misc_feature (1)..(25): SEQ ID NO: 731; WAN024CWR_at; Start 800; Stop 824
tgcctcgtctcagttactatctggg

SEQ ID NO: 136530 - DNA, 25 bp, Artificial
  probe
  misc_feature (1)..(25): SEQ ID NO: 731; WAN024CWR_at; Start 325; Stop 349
gataatccaatcgtcaaaaaggtct

SEQ ID NO: 136531 - DNA, 25 bp, Artificial
  probe
  misc_feature (1)..(25): SEQ ID NO: 731; WAN024CWR_at; Start 68; Stop 92
tcctaactggaacctatgtcgcgcg

SEQ ID NO: 136532 - DNA, 25 bp, Artificial
  probe
  misc_feature (1)..(25): SEQ ID NO: 731; WAN024CWR_at; Start 832; Stop 856
gacaaagaagcctatgtttctctgg

SEQ ID NO: 136533 - DNA, 25 bp, Artificial
  probe
  misc_feature (1)..(25): SEQ ID NO: 1923; WAN024CWS_at; Start 355; Stop 379
cagttcgagagccattttgcgcgcg

SEQ ID NO: 136534 - DNA, 25 bp, Artificial
  probe
  misc_feature (1)..(25): SEQ ID NO: 1923; WAN024CWS_at; Start 195; Stop 219
tacagttgaccatgacaatgaagcc

SEQ ID NO: 136535 - DNA, 25 bp, Artificial
  probe
  misc_feature (1)..(25): SEQ ID NO: 1923; WAN024CWS_at; Start 276; Stop 300
taaaattacagacaacatgacaggg

SEQ ID NO: 136536 - DNA, 25 bp, Artificial
  probe
  misc_feature (1)..(25): SEQ ID NO: 1923; WAN024CWS_at; Start 1260; Stop 1284
ggatgcccttggtcaagcgtcagga

SEQ ID NO: 136537 - DNA, 25 bp, Artificial
  probe
  misc_feature (1)..(25): SEQ ID NO: 1923; WAN024CWS_at; Start 1450; Stop 1474
aaaggcttgcctgatacactcgaaa

SEQ ID NO: 136538 - DNA, 25 bp, Artificial
  probe
  misc_feature (1)..(25): SEQ ID NO: 1923; WAN024CWS_at; Start 893; Stop 917
ggtttgggaacctcgtgactatgaa

SEQ ID NO: 136539 - DNA, 25 bp, Artificial
  probe
  misc_feature (1)..(25): SEQ ID NO: 1923; WAN024CWS_at; Start 1301; Stop 1325
tcatggattcttggttggaacagcc

SEQ ID NO: 136540 - DNA, 25 bp, Artificial
  probe
  misc_feature (1)..(25): SEQ ID NO: 1923; WAN024CWS_at; Start 838; Stop 862
tttgctagccgtcaacaagttgccc

SEQ ID NO: 136541 - DNA, 25 bp, Artificial
  probe
  misc_feature (1)..(25): SEQ ID NO: 1923; WAN024CWS_at; Start 1031; Stop 1055
tacctcttgctcttgaacgtgacgc

SEQ ID NO: 136542 - DNA, 25 bp, Artificial
  probe
  misc_feature (1)..(25): SEQ ID NO: 1923; WAN024CWS_at; Start 615; Stop 639
ggtaggtgtctactcaaccaaagca

SEQ ID NO: 136543 - DNA, 25 bp, Artificial
  probe
  misc_feature (1)..(25): SEQ ID NO: 1923; WAN024CWS_at; Start 167; Stop 191
tagaagttgcaggtcaagctcgtcc

SEQ ID NO: 136544 - DNA, 25 bp, Artificial
  probe
  misc_feature (1)..(25): SEQ ID NO: 1923; WAN024CWS_at; Start 222; Stop 246
tcatatcgaattggctgaggctggt

SEQ ID NO: 136545 - DNA, 25 bp, Artificial
  probe
  misc_feature (1)..(25): SEQ ID NO: 1923; WAN024CWS_at; Start 1132; Stop 1156
gtctatgccaaaggaagccgtctca

SEQ ID NO: 136546 - DNA, 25 bp, Artificial
  probe
  misc_feature (1)..(25): SEQ ID NO: 1923; WAN024CWS_at; Start 1791; Stop 1815
tgaaggaacggatgctgaaacagcc

SEQ ID NO: 136547 - DNA, 25 bp, Artificial
  probe
  misc_feature (1)..(25): SEQ ID NO: 1923; WAN024CWS_at; Start 370; Stop 394
tttgcgcgcgaagctttcccatgtg

SEQ ID NO: 136548 - DNA, 25 bp, Artificial
  probe
  misc_feature (1)..(25): SEQ ID NO: 1923; WAN024CWS_at; Start 1242; Stop 1266
cattggtagtgacctttgggatgcc

SEQ ID NO: 136549 - DNA, 25 bp, Artificial
  probe
  misc_feature (1)..(25): SEQ ID NO: 1923; WAN024CWS_at; Start 2371; Stop 2395
tttaagactcagcaacgcttggcgg

SEQ ID NO: 136550 - DNA, 25 bp, Artificial
  probe
  misc_feature (1)..(25): SEQ ID NO: 1923; WAN024CWS_at; Start 2493; Stop 2517
tagccgtgaaaaagctgcagtcgaa

SEQ ID NO: 136551 - DNA, 25 bp, Artificial
  probe
  misc_feature (1)..(25): SEQ ID NO: 1923; WAN024CWS_at; Start 519; Stop 543
gaagtttgagacaacacctcgcatg

SEQ ID NO: 136552 - DNA, 25 bp, Artificial
  probe
  misc_feature (1)..(25): SEQ ID NO: 1923; WAN024CWS_at; Start 975; Stop 999
tgtggataccatcgaaccaagctgg

SEQ ID NO: 136553 - DNA, 25 bp, Artificial
  probe
  misc_feature (1)..(25): SEQ ID NO: 1923; WAN024CWS_at; Start 1425; Stop 1449
ggtggtgcccctcaatagcaactgg

SEQ ID NO: 136554 - DNA, 25 bp, Artificial
  probe
  misc_feature (1)..(25): SEQ ID NO: 1923; WAN024CWS_at; Start 1155; Stop 1179
catgcacatgcttcgccgttggcta

SEQ ID NO: 136555 - DNA, 25 bp, Artificial
  probe
  misc_feature (1)..(25): SEQ ID NO: 1923; WAN024CWS_at; Start 1522; Stop 1546
gaaggagctcttcgtctcaacactg

SEQ ID NO: 136556 - DNA, 25 bp, Artificial
  probe
  misc_feature (1)..(25): SEQ ID NO: 1923; WAN024CWS_at; Start 2318; Stop 2342
cccttggaggagatatgagctttga

SEQ ID NO: 136557 - DNA, 25 bp, Artificial
  probe
  misc_feature (1)..(25): SEQ ID NO: 1923; WAN024CWS_at; Start 2266; Stop 2290
cagaaaacagcttggtcttgggcgc

SEQ ID NO: 136558 - DNA, 25 bp, Artificial
  probe
  misc_feature (1)..(25): SEQ ID NO: 1923; WAN024CWS_at; Start 2281; Stop 2305
tcttgggcgcgtgaaaactgggctt

SEQ ID NO: 136559 - DNA, 25 bp, Artificial
  probe
  misc_feature (1)..(25): SEQ ID NO: 1923; WAN024CWS_at; Start 1108; Stop 1132
aatacactctttgacggcgctatcg

SEQ ID NO: 136560 - DNA, 25 bp, Artificial
  probe
  misc_feature (1)..(25): SEQ ID NO: 1923; WAN024CWS_at; Start 386; Stop 410
tcccatgtgtggatgagcctgaagc

SEQ ID NO: 136561 - DNA, 25 bp, Artificial
  probe
  misc_feature (1)..(25): SEQ ID NO: 1923; WAN024CWS_at; Start 1650; Stop 1674
agaacgtcgtttgttggctgaggca

SEQ ID NO: 136562 - DNA, 25 bp, Artificial
  probe
  misc_feature (1)..(25): SEQ ID NO: 1923; WAN024CWS_at; Start 1563; Stop 1587
tattaccgactatcaaggagacttg

SEQ ID NO: 136563 - DNA, 25 bp, Artificial
  probe
  misc_feature (1)..(25): SEQ ID NO: 1923; WAN024CWS_at; Start 1410; Stop 1434
caagaaccgtctctgggtggtgccc

SEQ ID NO: 136564 - DNA, 25 bp, Artificial
  probe
  misc_feature (1)..(25): SEQ ID NO: 1923; WAN024CWS_at; Start 1477; Stop 1501
gaaagtatcgaaatccctggctacg

SEQ ID NO: 136565 - DNA, 25 bp, Artificial
  probe
  misc_feature (1)..(25): SEQ ID NO: 1923; WAN024CWS_at; Start 1283; Stop 1307
gacgtgatgtcgcagccttcatgga

SEQ ID NO: 136566 - DNA, 25 bp, Artificial
  probe
  misc_feature (1)..(25): SEQ ID NO: 1923; WAN024CWS_at; Start 1976; Stop 2000
tcttcgcaacacacaaggagaatct

SEQ ID NO: 136567 - DNA, 25 bp, Artificial
  probe
  misc_feature (1)..(25): SEQ ID NO: 6828; WAN024CWT_at; Start 22; Stop 46
ataaacactagactcattatcaccc

SEQ ID NO: 136568 - DNA, 25 bp, Artificial
  probe
  misc_feature (1)..(25): SEQ ID NO: 6828; WAN024CWT_at; Start 69; Stop 93
taataaaaatattacagccactgct

SEQ ID NO: 136569 - DNA, 25 bp, Artificial
  probe
  misc_feature (1)..(25): SEQ ID NO: 6828; WAN024CWT_at; Start 3; Stop 27
ggagctagccattactgaaataaac

SEQ ID NO: 136570 - DNA, 25 bp, Artificial
  probe
  misc_feature (1)..(25): SEQ ID NO: 6828; WAN024CWT_at; Start 7; Stop 31
ctagccattactgaaataaacacta

SEQ ID NO: 136571 - DNA, 25 bp, Artificial
  probe
  misc_feature (1)..(25): SEQ ID NO: 6828; WAN024CWT_at; Start 38; Stop 62
ttatcacccaaaatgatatttggtt

SEQ ID NO: 136572 - DNA, 25 bp, Artificial
  probe
  misc_feature (1)..(25): SEQ ID NO: 6828; WAN024CWT_at; Start 4; Stop 28
gagctagccattactgaaataaaca

SEQ ID NO: 136573 - DNA, 25 bp, Artificial
  probe
  misc_feature (1)..(25): SEQ ID NO: 6828; WAN024CWT_at; Start 71; Stop 95
ataaaaatattacagccactgctaa

SEQ ID NO: 136574 - DNA, 25 bp, Artificial
  probe
  misc_feature (1)..(25): SEQ ID NO: 6828; WAN024CWT_at; Start 41; Stop 65
tcacccaaaatgatatttggtttaa

SEQ ID NO: 136575 - DNA, 25 bp, Artificial
  probe
  misc_feature (1)..(25): SEQ ID NO: 6828; WAN024CWT_at; Start 10; Stop 34
gccattactgaaataaacactagac

SEQ ID NO: 136576 - DNA, 25 bp, Artificial
  probe
  misc_feature (1)..(25): SEQ ID NO: 6828; WAN024CWT_at; Start 13; Stop 37
attactgaaataaacactagactca

SEQ ID NO: 136577 - DNA, 25 bp, Artificial
  probe
  misc_feature (1)..(25): SEQ ID NO: 6828; WAN024CWT_at; Start 37; Stop 61
attatcacccaaaatgatatttggt

SEQ ID NO: 136578 - DNA, 25 bp, Artificial
  probe
  misc_feature (1)..(25): SEQ ID NO: 6828; WAN024CWT_at; Start 20; Stop 44
aaataaacactagactcattatcac

SEQ ID NO: 136579 - DNA, 25 bp, Artificial
  probe
  misc_feature (1)..(25): SEQ ID NO: 6828; WAN024CWT_at; Start 42; Stop 66
cacccaaaatgatatttggtttaat

SEQ ID NO: 136580 - DNA, 25 bp, Artificial
  probe
  misc_feature (1)..(25): SEQ ID NO: 6828; WAN024CWT_at; Start 19; Stop 43
gaaataaacactagactcattatca

SEQ ID NO: 136581 - DNA, 25 bp, Artificial
  probe
  misc_feature (1)..(25): SEQ ID NO: 6828; WAN024CWT_at; Start 14; Stop 38
ttactgaaataaacactagactcat

SEQ ID NO: 136582 - DNA, 25 bp, Artificial
  probe
  misc_feature (1)..(25): SEQ ID NO: 6828; WAN024CWT_at; Start 5; Stop 29
agctagccattactgaaataaacac

SEQ ID NO: 136583 - DNA, 25 bp, Artificial
  probe
  misc_feature (1)..(25): SEQ ID NO: 6828; WAN024CWT_at; Start 21; Stop 45
aataaacactagactcattatcacc

SEQ ID NO: 136584 - DNA, 25 bp, Artificial
  probe
  misc_feature (1)..(25): SEQ ID NO: 6828; WAN024CWT_at; Start 17; Stop 41
ctgaaataaacactagactcattat

SEQ ID NO: 136585 - DNA, 25 bp, Artificial
  probe
  misc_feature (1)..(25): SEQ ID NO: 6828; WAN024CWT_at; Start 39; Stop 63
tatcacccaaaatgatatttggttt

SEQ ID NO: 136586 - DNA, 25 bp, Artificial
  probe
  misc_feature (1)..(25): SEQ ID NO: 6828; WAN024CWT_at; Start 45; Stop 69
ccaaaatgatatttggtttaataat

SEQ ID NO: 136587 - DNA, 25 bp, Artificial
  probe
  misc_feature (1)..(25): SEQ ID NO: 6828; WAN024CWT_at; Start 6; Stop 30
gctagccattactgaaataaacact

SEQ ID NO: 136588 - DNA, 25 bp, Artificial
  probe
  misc_feature (1)..(25): SEQ ID NO: 6828; WAN024CWT_at; Start 36; Stop 60
cattatcacccaaaatgatatttgg

SEQ ID NO: 136589 - DNA, 25 bp, Artificial
  probe
  misc_feature (1)..(25): SEQ ID NO: 6828; WAN024CWT_at; Start 9; Stop 33
agccattactgaaataaacactaga

SEQ ID NO: 136590 - DNA, 25 bp, Artificial
  probe
  misc_feature (1)..(25): SEQ ID NO: 6828; WAN024CWT_at; Start 2; Stop 26
tggagctagccattactgaaataaa

SEQ ID NO: 136591 - DNA, 25 bp, Artificial
  probe
  misc_feature (1)..(25): SEQ ID NO: 6828; WAN024CWT_at; Start 15; Stop 39
tactgaaataaacactagactcatt

SEQ ID NO: 136592 - DNA, 25 bp, Artificial
  probe
  misc_feature (1)..(25): SEQ ID NO: 6828; WAN024CWT_at; Start 18; Stop 42
tgaaataaacactagactcattatc

SEQ ID NO: 136593 - DNA, 25 bp, Artificial
  probe
  misc_feature (1)..(25): SEQ ID NO: 6828; WAN024CWT_at; Start 24; Stop 48
aaacactagactcattatcacccaa

SEQ ID NO: 136594 - DNA, 25 bp, Artificial
  probe
  misc_feature (1)..(25): SEQ ID NO: 6828; WAN024CWT_at; Start 16; Stop 40
actgaaataaacactagactcatta

SEQ ID NO: 136595 - DNA, 25 bp, Artificial
  probe
  misc_feature (1)..(25): SEQ ID NO: 6828; WAN024CWT_at; Start 23; Stop 47
taaacactagactcattatcaccca

SEQ ID NO: 136596 - DNA, 25 bp, Artificial
  probe
  misc_feature (1)..(25): SEQ ID NO: 6828; WAN024CWT_at; Start 35; Stop 59
tcattatcacccaaaatgatatttg

SEQ ID NO: 136597 - DNA, 25 bp, Artificial
  probe
  misc_feature (1)..(25): SEQ ID NO: 6828; WAN024CWT_at; Start 8; Stop 32
tagccattactgaaataaacactag

SEQ ID NO: 136598 - DNA, 25 bp, Artificial
  probe
  misc_feature (1)..(25): SEQ ID NO: 6828; WAN024CWT_at; Start 70; Stop 94
aataaaaatattacagccactgcta

SEQ ID NO: 136599 - DNA, 25 bp, Artificial
  probe
  misc_feature (1)..(25): SEQ ID NO: 6828; WAN024CWT_at; Start 12; Stop 36
cattactgaaataaacactagactc

SEQ ID NO: 136600 - DNA, 25 bp, Artificial
  probe
  misc_feature (1)..(25): SEQ ID NO: 6828; WAN024CWT_at; Start 72; Stop 96
taaaaatattacagccactgctaat

SEQ ID NO: 136601 - DNA, 25 bp, Artificial
  probe
  misc_feature (1)..(25): SEQ ID NO: 7396; WAN024CWU_at; Start 109; Stop 133
aatcctactgccacctgtaaaaatg

SEQ ID NO: 136602 - DNA, 25 bp, Artificial
  probe
  misc_feature (1)..(25): SEQ ID NO: 7396; WAN024CWU_at; Start 10; Stop 34
aagttttctatattcgcattgctag

SEQ ID NO: 136603 - DNA, 25 bp, Artificial
  probe
  misc_feature (1)..(25): SEQ ID NO: 7396; WAN024CWU_at; Start 176; Stop 200
tactaaaaagagaatttgcaaatac

SEQ ID NO: 136604 - DNA, 25 bp, Artificial
  probe
  misc_feature (1)..(25): SEQ ID NO: 7396; WAN024CWU_at; Start 122; Stop 146
cctgtaaaaatgatgcgaatgaatt

SEQ ID NO: 136605 - DNA, 25 bp, Artificial
  probe
  misc_feature (1)..(25): SEQ ID NO: 7396; WAN024CWU_at; Start 3; Stop 27
gaaagagaagttttctatattcgca

SEQ ID NO: 136606 - DNA, 25 bp, Artificial
  probe
  misc_feature (1)..(25): SEQ ID NO: 7396; WAN024CWU_at; Start 24; Stop 48
cgcattgctagttctaaattttaac

SEQ ID NO: 136607 - DNA, 25 bp, Artificial
  probe
  misc_feature (1)..(25): SEQ ID NO: 7396; WAN024CWU_at; Start 171; Stop 195
cgaaatactaaaaagagaatttgca

SEQ ID NO: 136608 - DNA, 25 bp, Artificial
  probe
  misc_feature (1)..(25): SEQ ID NO: 7396; WAN024CWU_at; Start 114; Stop 138
tactgccacctgtaaaaatgatgcg

SEQ ID NO: 136609 - DNA, 25 bp, Artificial
  probe
  misc_feature (1)..(25): SEQ ID NO: 7396; WAN024CWU_at; Start 201; Stop 225
aatcttatcatattctaccacttga

SEQ ID NO: 136610 - DNA, 25 bp, Artificial
  probe
  misc_feature (1)..(25): SEQ ID NO: 7396; WAN024CWU_at; Start 119; Stop 143
ccacctgtaaaaatgatgcgaatga

SEQ ID NO: 136611 - DNA, 25 bp, Artificial
  probe
  misc_feature (1)..(25): SEQ ID NO: 7396; WAN024CWU_at; Start 29; Stop 53
tgctagttctaaattttaacaacaa

SEQ ID NO: 136612 - DNA, 25 bp, Artificial
  probe
  misc_feature (1)..(25): SEQ ID NO: 7396; WAN024CWU_at; Start 118; Stop 142
gccacctgtaaaaatgatgcgaatg

SEQ ID NO: 136613 - DNA, 25 bp, Artificial
  probe
  misc_feature (1)..(25): SEQ ID NO: 7396; WAN024CWU_at; Start 67; Stop 91
gcaagtaaaaatatgcctatatcta

SEQ ID NO: 136614 - DNA, 25 bp, Artificial
  probe
  misc_feature (1)..(25): SEQ ID NO: 7396; WAN024CWU_at; Start 59; Stop 83
taaatagagcaagtaaaaatatgcc

SEQ ID NO: 136615 - DNA, 25 bp, Artificial
  probe
  misc_feature (1)..(25): SEQ ID NO: 7396; WAN024CWU_at; Start 154; Stop 178
gaatctaatactttatacgaaatac

SEQ ID NO: 136616 - DNA, 25 bp, Artificial
  probe
  misc_feature (1)..(25): SEQ ID NO: 7396; WAN024CWU_at; Start 102; Stop 126
taaaataaatcctactgccacctgt

SEQ ID NO: 136617 - DNA, 25 bp, Artificial
  probe
  misc_feature (1)..(25): SEQ ID NO: 7396; WAN024CWU_at; Start 81; Stop 105
gcctatatctatcttaaccaataaa

SEQ ID NO: 136618 - DNA, 25 bp, Artificial
  probe
  misc_feature (1)..(25): SEQ ID NO: 7396; WAN024CWU_at; Start 115; Stop 139
actgccacctgtaaaaatgatgcga

SEQ ID NO: 136619 - DNA, 25 bp, Artificial
  probe
  misc_feature (1)..(25): SEQ ID NO: 7396; WAN024CWU_at; Start 65; Stop 89
gagcaagtaaaaatatgcctatatc

SEQ ID NO: 136620 - DNA, 25 bp, Artificial
  probe
  misc_feature (1)..(25): SEQ ID NO: 7396; WAN024CWU_at; Start 48; Stop 72
caacaacaatataaatagagcaagt

SEQ ID NO: 136621 - DNA, 25 bp, Artificial
  probe
  misc_feature (1)..(25): SEQ ID NO: 7396; WAN024CWU_at; Start 187; Stop 211
gaatttgcaaatacaatcttatcat

SEQ ID NO: 136622 - DNA, 25 bp, Artificial
  probe
  misc_feature (1)..(25): SEQ ID NO: 7396; WAN024CWU_at; Start 44; Stop 68
ttaacaacaacaatataaatagagc

SEQ ID NO: 136623 - DNA, 25 bp, Artificial
  probe
  misc_feature (1)..(25): SEQ ID NO: 7396; WAN024CWU_at; Start 17; Stop 41
ctatattcgcattgctagttctaaa

SEQ ID NO: 136624 - DNA, 25 bp, Artificial
  probe
  misc_feature (1)..(25): SEQ ID NO: 7396; WAN024CWU_at; Start 135; Stop 159
tgcgaatgaattaaaaatagaatct

SEQ ID NO: 136625 - DNA, 25 bp, Artificial
  probe
  misc_feature (1)..(25): SEQ ID NO: 7396; WAN024CWU_at; Start 185; Stop 209
gagaatttgcaaatacaatcttatc

SEQ ID NO: 136626 - DNA, 25 bp, Artificial
  probe
  misc_feature (1)..(25): SEQ ID NO: 7396; WAN024CWU_at; Start 149; Stop 173
aaatagaatctaatactttatacga

SEQ ID NO: 136627 - DNA, 25 bp, Artificial
  probe
  misc_feature (1)..(25): SEQ ID NO: 7396; WAN024CWU_at; Start 104; Stop 128
aaataaatcctactgccacctgtaa

SEQ ID NO: 136628 - DNA, 25 bp, Artificial
  probe
  misc_feature (1)..(25): SEQ ID NO: 7396; WAN024CWU_at; Start 120; Stop 144
cacctgtaaaaatgatgcgaatgaa

SEQ ID NO: 136629 - DNA, 25 bp, Artificial
  probe
  misc_feature (1)..(25): SEQ ID NO: 7396; WAN024CWU_at; Start 157; Stop 181
tctaatactttatacgaaatactaa

SEQ ID NO: 136630 - DNA, 25 bp, Artificial
  probe
  misc_feature (1)..(25): SEQ ID NO: 7396; WAN024CWU_at; Start 7; Stop 31
gagaagttttctatattcgcattgc

SEQ ID NO: 136631 - DNA, 25 bp, Artificial
  probe
  misc_feature (1)..(25): SEQ ID NO: 7396; WAN024CWU_at; Start 76; Stop 100
aatatgcctatatctatcttaacca

SEQ ID NO: 136632 - DNA, 25 bp, Artificial
  probe
  misc_feature (1)..(25): SEQ ID NO: 7396; WAN024CWU_at; Start 111; Stop 135
tcctactgccacctgtaaaaatgat

SEQ ID NO: 136633 - DNA, 25 bp, Artificial
  probe
  misc_feature (1)..(25): SEQ ID NO: 7396; WAN024CWU_at; Start 116; Stop 140
ctgccacctgtaaaaatgatgcgaa

SEQ ID NO: 136634 - DNA, 25 bp, Artificial
  probe
  misc_feature (1)..(25): SEQ ID NO: 7396; WAN024CWU_at; Start 97; Stop 121
accaataaaataaatcctactgcca

SEQ ID NO: 136635 - DNA, 25 bp, Artificial
  probe
  misc_feature (1)..(25): SEQ ID NO: 697; WAN024CWV_at; Start 61; Stop 85
ttttatatagtagcattgtggcacg

SEQ ID NO: 136636 - DNA, 25 bp, Artificial
  probe
  misc_feature (1)..(25): SEQ ID NO: 697; WAN024CWV_at; Start 351; Stop 375
tcctcaagtggtagaatatgataag

SEQ ID NO: 136637 - DNA, 25 bp, Artificial
  probe
  misc_feature (1)..(25): SEQ ID NO: 697; WAN024CWV_at; Start 218; Stop 242
ttttggttcaattagcagtggctgt

SEQ ID NO: 136638 - DNA, 25 bp, Artificial
  probe
  misc_feature (1)..(25): SEQ ID NO: 697; WAN024CWV_at; Start 585; Stop 609
caagagagaagtgttgcaaggtaca

SEQ ID NO: 136639 - DNA, 25 bp, Artificial
  probe
  misc_feature (1)..(25): SEQ ID NO: 697; WAN024CWV_at; Start 709; Stop 733
tctattcgatattttgatggtccga

SEQ ID NO: 136640 - DNA, 25 bp, Artificial
  probe
  misc_feature (1)..(25): SEQ ID NO: 697; WAN024CWV_at; Start 1021; Stop 1045
tctattatttcttttggaatgccaa

SEQ ID NO: 136641 - DNA, 25 bp, Artificial
  probe
  misc_feature (1)..(25): SEQ ID NO: 697; WAN024CWV_at; Start 963; Stop 987
gttgtaccaacaaatacctccacat

SEQ ID NO: 136642 - DNA, 25 bp, Artificial
  probe
  misc_feature (1)..(25): SEQ ID NO: 697; WAN024CWV_at; Start 272; Stop 296
cattttgggtgataatgagtctagt

SEQ ID NO: 136643 - DNA, 25 bp, Artificial
  probe
  misc_feature (1)..(25): SEQ ID NO: 697; WAN024CWV_at; Start 789; Stop 813
gctagcgccaatcgtaataaaatat

SEQ ID NO: 136644 - DNA, 25 bp, Artificial
  probe
  misc_feature (1)..(25): SEQ ID NO: 697; WAN024CWV_at; Start 97; Stop 121
tattcttcgagcatgttcttaggaa

SEQ ID NO: 136645 - DNA, 25 bp, Artificial
  probe
  misc_feature (1)..(25): SEQ ID NO: 697; WAN024CWV_at; Start 77; Stop 101
tgtggcacgttagcaataattattc

SEQ ID NO: 136646 - DNA, 25 bp, Artificial
  probe
  misc_feature (1)..(25): SEQ ID NO: 697; WAN024CWV_at; Start 774; Stop 798
tatattgggaaatatgctagcgcca

SEQ ID NO: 136647 - DNA, 25 bp, Artificial
  probe
  misc_feature (1)..(25): SEQ ID NO: 697; WAN024CWV_at; Start 852; Stop 876
gaacggctcaagttggttagtagca

SEQ ID NO: 136648 - DNA, 25 bp, Artificial
  probe
  misc_feature (1)..(25): SEQ ID NO: 697; WAN024CWV_at; Start 163; Stop 187
ttttttggaccagttattgacagag

SEQ ID NO: 136649 - DNA, 25 bp, Artificial
  probe
  misc_feature (1)..(25): SEQ ID NO: 697; WAN024CWV_at; Start 437; Stop 461
cattcgcatcatttttacaggtggc

SEQ ID NO: 136650 - DNA, 25 bp, Artificial
  probe
  misc_feature (1)..(25): SEQ ID NO: 697; WAN024CWV_at; Start 181; Stop 205
gacagagtaaatccgcaaaaaattc

SEQ ID NO: 136651 - DNA, 25 bp, Artificial
  probe
  misc_feature (1)..(25): SEQ ID NO: 697; WAN024CWV_at; Start 1043; Stop 1067
caattggtagtttagttgcaggaac

SEQ ID NO: 136652 - DNA, 25 bp, Artificial
  probe
  misc_feature (1)..(25): SEQ ID NO: 697; WAN024CWV_at; Start 311; Stop 335
tggctagctccataagttacgtgat

SEQ ID NO: 136653 - DNA, 25 bp, Artificial
  probe
  misc_feature (1)..(25): SEQ ID NO: 697; WAN024CWV_at; Start 36; Stop 60
gattgttaacttagcagacagtgta

SEQ ID NO: 136654 - DNA, 25 bp, Artificial
  probe
  misc_feature (1)..(25): SEQ ID NO: 697; WAN024CWV_at; Start 139; Stop 163
tatctaccggatttgttactaatct

SEQ ID NO: 136655 - DNA, 25 bp, Artificial
  probe
  misc_feature (1)..(25): SEQ ID NO: 697; WAN024CWV_at; Start 453; Stop 477
acaggtggcagtaggatttatttta

SEQ ID NO: 136656 - DNA, 25 bp, Artificial
  probe
  misc_feature (1)..(25): SEQ ID NO: 697; WAN024CWV_at; Start 1059; Stop 1083
tgcaggaacgcttattgatttgaat

SEQ ID NO: 136657 - DNA, 25 bp, Artificial
  probe
  misc_feature (1)..(25): SEQ ID NO: 697; WAN024CWV_at; Start 533; Stop 557
taaaatttagaactagcaatgcgaa

SEQ ID NO: 136658 - DNA, 25 bp, Artificial
  probe
  misc_feature (1)..(25): SEQ ID NO: 697; WAN024CWV_at; Start 548; Stop 572
gcaatgcgaatatagaaaacttctc

SEQ ID NO: 136659 - DNA, 25 bp, Artificial
  probe
  misc_feature (1)..(25): SEQ ID NO: 697; WAN024CWV_at; Start 333; Stop 357
gatagaagatgtgttgattcctcaa

SEQ ID NO: 136660 - DNA, 25 bp, Artificial
  probe
  misc_feature (1)..(25): SEQ ID NO: 697; WAN024CWV_at; Start 753; Stop 777
aactattgctggtttgggtggtata

SEQ ID NO: 136661 - DNA, 25 bp, Artificial
  probe
  misc_feature (1)..(25): SEQ ID NO: 697; WAN024CWV_at; Start 999; Stop 1023
tagggtaaatactaccattgattct

SEQ ID NO: 136662 - DNA, 25 bp, Artificial
  probe
  misc_feature (1)..(25): SEQ ID NO: 697; WAN024CWV_at; Start 983; Stop 1007
cacatcaacttcttggtagggtaaa

SEQ ID NO: 136663 - DNA, 25 bp, Artificial
  probe
  misc_feature (1)..(25): SEQ ID NO: 697; WAN024CWV_at; Start 490; Stop 514
gatataggcatatttttacttgctc

SEQ ID NO: 136664 - DNA, 25 bp, Artificial
  probe
  misc_feature (1)..(25): SEQ ID NO: 697; WAN024CWV_at; Start 923; Stop 947
gttttatgtctaaaggagtcttcaa

SEQ ID NO: 136665 - DNA, 25 bp, Artificial
  probe
  misc_feature (1)..(25): SEQ ID NO: 697; WAN024CWV_at; Start 126; Stop 150
tattgcagtaaattatctaccggat

SEQ ID NO: 136666 - DNA, 25 bp, Artificial
  probe
  misc_feature (1)..(25): SEQ ID NO: 697; WAN024CWV_at; Start 297; Stop 321
gtttatttcagtaatggctagctcc

SEQ ID NO: 136667 - DNA, 25 bp, Artificial
  probe
  misc_feature (1)..(25): SEQ ID NO: 697; WAN024CWV_at; Start 679; Stop 703
tcatttcagacagtagttgtaccga

SEQ ID NO: 136668 - DNA, 25 bp, Artificial
  probe
  misc_feature (1)..(25): SEQ ID NO: 697; WAN024CWV_at; Start 814; Stop 838
ttaaaatcgaatcaaattgttggtg

SEQ ID NO: 136669 - DNA, 25 bp, Artificial
  probe
  misc_feature (1)..(25): SEQ ID NO: 1766; WAN024CWW_at; Start 127; Stop 151
acaggtgtaaactattatcaattga

SEQ ID NO: 136670 - DNA, 25 bp, Artificial
  probe
  misc_feature (1)..(25): SEQ ID NO: 1766; WAN024CWW_at; Start 118; Stop 142
gcctcaactacaggtgtaaactatt

SEQ ID NO: 136671 - DNA, 25 bp, Artificial
  probe
  misc_feature (1)..(25): SEQ ID NO: 1766; WAN024CWW_at; Start 119; Stop 143
cctcaactacaggtgtaaactatta

SEQ ID NO: 136672 - DNA, 25 bp, Artificial
  probe
  misc_feature (1)..(25): SEQ ID NO: 1766; WAN024CWW_at; Start 126; Stop 150
tacaggtgtaaactattatcaattg

SEQ ID NO: 136673 - DNA, 25 bp, Artificial
  probe
  misc_feature (1)..(25): SEQ ID NO: 1766; WAN024CWW_at; Start 53; Stop 77
tcaaaccacgggactcccacaagaa

SEQ ID NO: 136674 - DNA, 25 bp, Artificial
  probe
  misc_feature (1)..(25): SEQ ID NO: 1766; WAN024CWW_at; Start 5; Stop 29
tgtctagtaaggattctaaatgcta

SEQ ID NO: 136675 - DNA, 25 bp, Artificial
  probe
  misc_feature (1)..(25): SEQ ID NO: 1766; WAN024CWW_at; Start 153; Stop 177
aacaacagtttttacactcaattag

SEQ ID NO: 136676 - DNA, 25 bp, Artificial
  probe
  misc_feature (1)..(25): SEQ ID NO: 1766; WAN024CWW_at; Start 139; Stop 163
tattatcaattgaaaacaacagttt

SEQ ID NO: 136677 - DNA, 25 bp, Artificial
  probe
  misc_feature (1)..(25): SEQ ID NO: 1766; WAN024CWW_at; Start 130; Stop 154
ggtgtaaactattatcaattgaaaa

SEQ ID NO: 136678 - DNA, 25 bp, Artificial
  probe
  misc_feature (1)..(25): SEQ ID NO: 1766; WAN024CWW_at; Start 67; Stop 91
tcccacaagaaaggaaaatcctata

SEQ ID NO: 136679 - DNA, 25 bp, Artificial
  probe
  misc_feature (1)..(25): SEQ ID NO: 1766; WAN024CWW_at; Start 124; Stop 148
actacaggtgtaaactattatcaat

SEQ ID NO: 136680 - DNA, 25 bp, Artificial
  probe
  misc_feature (1)..(25): SEQ ID NO: 1766; WAN024CWW_at; Start 148; Stop 172
ttgaaaacaacagtttttacactca

SEQ ID NO: 136681 - DNA, 25 bp, Artificial
  probe
  misc_feature (1)..(25): SEQ ID NO: 1766; WAN024CWW_at; Start 140; Stop 164
attatcaattgaaaacaacagtttt

SEQ ID NO: 136682 - DNA, 25 bp, Artificial
  probe
  misc_feature (1)..(25): SEQ ID NO: 1766; WAN024CWW_at; Start 120; Stop 144
ctcaactacaggtgtaaactattat

SEQ ID NO: 136683 - DNA, 25 bp, Artificial
  probe
  misc_feature (1)..(25): SEQ ID NO: 1766; WAN024CWW_at; Start 121; Stop 145
tcaactacaggtgtaaactattatc

SEQ ID NO: 136684 - DNA, 25 bp, Artificial
  probe
  misc_feature (1)..(25): SEQ ID NO: 1766; WAN024CWW_at; Start 125; Stop 149
ctacaggtgtaaactattatcaatt

SEQ ID NO: 136685 - DNA, 25 bp, Artificial
  probe
  misc_feature (1)..(25): SEQ ID NO: 1766; WAN024CWW_at; Start 2; Stop 26
tgatgtctagtaaggattctaaatg

SEQ ID NO: 136686 - DNA, 25 bp, Artificial
  probe
  misc_feature (1)..(25): SEQ ID NO: 1766; WAN024CWW_at; Start 131; Stop 155
gtgtaaactattatcaattgaaaac

SEQ ID NO: 136687 - DNA, 25 bp, Artificial
  probe
  misc_feature (1)..(25): SEQ ID NO: 1766; WAN024CWW_at; Start 66; Stop 90
ctcccacaagaaaggaaaatcctat

SEQ ID NO: 136688 - DNA, 25 bp, Artificial
  probe
  misc_feature (1)..(25): SEQ ID NO: 1766; WAN024CWW_at; Start 122; Stop 146
caactacaggtgtaaactattatca

SEQ ID NO: 136689 - DNA, 25 bp, Artificial
  probe
  misc_feature (1)..(25): SEQ ID NO: 1766; WAN024CWW_at; Start 138; Stop 162
ctattatcaattgaaaacaacagtt

SEQ ID NO: 136690 - DNA, 25 bp, Artificial
  probe
  misc_feature (1)..(25): SEQ ID NO: 1766; WAN024CWW_at; Start 3; Stop 27
gatgtctagtaaggattctaaatgc

SEQ ID NO: 136691 - DNA, 25 bp, Artificial
  probe
  misc_feature (1)..(25): SEQ ID NO: 1766; WAN024CWW_at; Start 149; Stop 173
tgaaaacaacagtttttacactcaa

SEQ ID NO: 136692 - DNA, 25 bp, Artificial
  probe
  misc_feature (1)..(25): SEQ ID NO: 1766; WAN024CWW_at; Start 137; Stop 161
actattatcaattgaaaacaacagt

SEQ ID NO: 136693 - DNA, 25 bp, Artificial
  probe
  misc_feature (1)..(25): SEQ ID NO: 1766; WAN024CWW_at; Start 44; Stop 68
catcttatttcaaaccacgggactc

SEQ ID NO: 136694 - DNA, 25 bp, Artificial
  probe
  misc_feature (1)..(25): SEQ ID NO: 1766; WAN024CWW_at; Start 129; Stop 153
aggtgtaaactattatcaattgaaa

SEQ ID NO: 136695 - DNA, 25 bp, Artificial
  probe
  misc_feature (1)..(25): SEQ ID NO: 1766; WAN024CWW_at; Start 136; Stop 160
aactattatcaattgaaaacaacag

SEQ ID NO: 136696 - DNA, 25 bp, Artificial
  probe
  misc_feature (1)..(25): SEQ ID NO: 1766; WAN024CWW_at; Start 4; Stop 28
atgtctagtaaggattctaaatgct

SEQ ID NO: 136697 - DNA, 25 bp, Artificial
  probe
  misc_feature (1)..(25): SEQ ID NO: 1766; WAN024CWW_at; Start 128; Stop 152
caggtgtaaactattatcaattgaa

SEQ ID NO: 136698 - DNA, 25 bp, Artificial
  probe
  misc_feature (1)..(25): SEQ ID NO: 1766; WAN024CWW_at; Start 132; Stop 156
tgtaaactattatcaattgaaaaca

SEQ ID NO: 136699 - DNA, 25 bp, Artificial
  probe
  misc_feature (1)..(25): SEQ ID NO: 1766; WAN024CWW_at; Start 134; Stop 158
taaactattatcaattgaaaacaac

SEQ ID NO: 136700 - DNA, 25 bp, Artificial
  probe
  misc_feature (1)..(25): SEQ ID NO: 1766; WAN024CWW_at; Start 142; Stop 166
tatcaattgaaaacaacagttttta

SEQ ID NO: 136701 - DNA, 25 bp, Artificial
  probe
  misc_feature (1)..(25): SEQ ID NO: 1766; WAN024CWW_at; Start 144; Stop 168
tcaattgaaaacaacagtttttaca

SEQ ID NO: 136702 - DNA, 25 bp, Artificial
  probe
  misc_feature (1)..(25): SEQ ID NO: 1766; WAN024CWW_at; Start 123; Stop 147
aactacaggtgtaaactattatcaa

SEQ ID NO: 136703 - DNA, 25 bp, Artificial
  probe
  misc_feature (1)..(25): SEQ ID NO: 1121; WAN024CWX_at; Start 567; Stop 591
tgaaatcgctgctgagtcagttggg

SEQ ID NO: 136704 - DNA, 25 bp, Artificial
  probe
  misc_feature (1)..(25): SEQ ID NO: 1121; WAN024CWX_at; Start 682; Stop 706
tctgttgtaccgaaagattacacct

SEQ ID NO: 136705 - DNA, 25 bp, Artificial
  probe
  misc_feature (1)..(25): SEQ ID NO: 1121; WAN024CWX_at; Start 555; Stop 579
tgttcgtgaagatgaaatcgctgct

SEQ ID NO: 136706 - DNA, 25 bp, Artificial
  probe
  misc_feature (1)..(25): SEQ ID NO: 1121; WAN024CWX_at; Start 515; Stop 539
tgaacttcttgcgtagcccaattgg

SEQ ID NO: 136707 - DNA, 25 bp, Artificial
  probe
  misc_feature (1)..(25): SEQ ID NO: 1121; WAN024CWX_at; Start 481; Stop 505
tacttctttgtcgtgattacaacca

SEQ ID NO: 136708 - DNA, 25 bp, Artificial
  probe
  misc_feature (1)..(25): SEQ ID NO: 1121; WAN024CWX_at; Start 32; Stop 56
ggttactccttttgttagctggcta

SEQ ID NO: 136709 - DNA, 25 bp, Artificial
  probe
  misc_feature (1)..(25): SEQ ID NO: 1121; WAN024CWX_at; Start 901; Stop 925
tgggaactgagcctatcacgtttct

SEQ ID NO: 136710 - DNA, 25 bp, Artificial
  probe
  misc_feature (1)..(25): SEQ ID NO: 1121; WAN024CWX_at; Start 642; Stop 666
tgcaagtattgctgggtcacttcag

SEQ ID NO: 136711 - DNA, 25 bp, Artificial
  probe
  misc_feature (1)..(25): SEQ ID NO: 1121; WAN024CWX_at; Start 749; Stop 773
gactcggttccattacaggtgcgat

SEQ ID NO: 136712 - DNA, 25 bp, Artificial
  probe
  misc_feature (1)..(25): SEQ ID NO: 1121; WAN024CWX_at; Start 542; Stop 566
gttcaaccctctctgttcgtgaaga

SEQ ID NO: 136713 - DNA, 25 bp, Artificial
  probe
  misc_feature (1)..(25): SEQ ID NO: 1121; WAN024CWX_at; Start 266; Stop 290
ccttctttggagctatgcttgtagg

SEQ ID NO: 136714 - DNA, 25 bp, Artificial
  probe
  misc_feature (1)..(25): SEQ ID NO: 1121; WAN024CWX_at; Start 700; Stop 724
tacaccttcatcaactcaatcaacg

SEQ ID NO: 136715 - DNA, 25 bp, Artificial
  probe
  misc_feature (1)..(25): SEQ ID NO: 1121; WAN024CWX_at; Start 794; Stop 818
gaattttgaatatgcttctccaaga

SEQ ID NO: 136716 - DNA, 25 bp, Artificial
  probe
  misc_feature (1)..(25): SEQ ID NO: 1121; WAN024CWX_at; Start 80; Stop 104
cagtcggagtacttaatctattcta

SEQ ID NO: 136717 - DNA, 25 bp, Artificial
  probe
  misc_feature (1)..(25): SEQ ID NO: 1121; WAN024CWX_at; Start 255; Stop 279
aacctacggtgccttctttggagct

SEQ ID NO: 136718 - DNA, 25 bp, Artificial
  probe
  misc_feature (1)..(25): SEQ ID NO: 1121; WAN024CWX_at; Start 494; Stop 518
tgattacaaccattgcaaccttgaa

SEQ ID NO: 136719 - DNA, 25 bp, Artificial
  probe
  misc_feature (1)..(25): SEQ ID NO: 1121; WAN024CWX_at; Start 421; Stop 445
cttacaaatggtgcggcaggtatct

SEQ ID NO: 136720 - DNA, 25 bp, Artificial
  probe
  misc_feature (1)..(25): SEQ ID NO: 1121; WAN024CWX_at; Start 759; Stop 783
cattacaggtgcgattgtttcggct

SEQ ID NO: 136721 - DNA, 25 bp, Artificial
  probe
  misc_feature (1)..(25): SEQ ID NO: 1121; WAN024CWX_at; Start 63; Stop 87
gattagtgtactggtttcagtcgga

SEQ ID NO: 136722 - DNA, 25 bp, Artificial
  probe
  misc_feature (1)..(25): SEQ ID NO: 1121; WAN024CWX_at; Start 735; Stop 759
tgttgtatttggtggactcggttcc

SEQ ID NO: 136723 - DNA, 25 bp, Artificial
  probe
  misc_feature (1)..(25): SEQ ID NO: 1121; WAN024CWX_at; Start 188; Stop 212
cacttggtcatgctggtttcatggc

SEQ ID NO: 136724 - DNA, 25 bp, Artificial
  probe
  misc_feature (1)..(25): SEQ ID NO: 1121; WAN024CWX_at; Start 629; Stop 653
ttggtgccattactgcaagtattgc

SEQ ID NO: 136725 - DNA, 25 bp, Artificial
  probe
  misc_feature (1)..(25): SEQ ID NO: 1121; WAN024CWX_at; Start 837; Stop 861
gattatttacgctttggccttggta

SEQ ID NO: 136726 - DNA, 25 bp, Artificial
  probe
  misc_feature (1)..(25): SEQ ID NO: 1121; WAN024CWX_at; Start 392; Stop 416
tccgtatctttatcatcaatggtgg

SEQ ID NO: 136727 - DNA, 25 bp, Artificial
  probe
  misc_feature (1)..(25): SEQ ID NO: 1121; WAN024CWX_at; Start 875; Stop 899
tcagaccaggtggactccttggaac

SEQ ID NO: 136728 - DNA, 25 bp, Artificial
  probe
  misc_feature (1)..(25): SEQ ID NO: 1121; WAN024CWX_at; Start 175; Stop 199
tcaggacaattttcacttggtcatg

SEQ ID NO: 136729 - DNA, 25 bp, Artificial
  probe
  misc_feature (1)..(25): SEQ ID NO: 1121; WAN024CWX_at; Start 449; Stop 473
ggattcctaactttacaacttggca

SEQ ID NO: 136730 - DNA, 25 bp, Artificial
  probe
  misc_feature (1)..(25): SEQ ID NO: 1121; WAN024CWX_at; Start 810; Stop 834
tctccaagatgttgctagtgtgcgt

SEQ ID NO: 136731 - DNA, 25 bp, Artificial
  probe
  misc_feature (1)..(25): SEQ ID NO: 1121; WAN024CWX_at; Start 464; Stop 488
caacttggcaaatggtttacttctt

SEQ ID NO: 136732 - DNA, 25 bp, Artificial
  probe
  misc_feature (1)..(25): SEQ ID NO: 1121; WAN024CWX_at; Start 866; Stop 890
taatgattttcagaccaggtggact

SEQ ID NO: 136733 - DNA, 25 bp, Artificial
  probe
  misc_feature (1)..(25): SEQ ID NO: 1121; WAN024CWX_at; Start 315; Stop 339
cttacttgtcggcattccaaccttg

SEQ ID NO: 136734 - DNA, 25 bp, Artificial
  probe
  misc_feature (1)..(25): SEQ ID NO: 1121; WAN024CWX_at; Start 612; Stop 636
aatcatcgcttttgtctttggtgcc

SEQ ID NO: 136735 - DNA, 25 bp, Artificial
  probe
  misc_feature (1)..(25): SEQ ID NO: 1121; WAN024CWX_at; Start 135; Stop 159
tattattttggctgttggtctcaac

SEQ ID NO: 136736 - DNA, 25 bp, Artificial
  probe
  misc_feature (1)..(25): SEQ ID NO: 1121; WAN024CWX_at; Start 49; Stop 73
gctggctatagcttgattagtgtac

SEQ ID NO: 136737 - DNA, 25 bp, Artificial
  probe
  misc_feature (1)..(25): SEQ ID NO: 4019; WAN024CWY_at; Start 156; Stop 180
aagcaagcccagaccagtacagatg

SEQ ID NO: 136738 - DNA, 25 bp, Artificial
  probe
  misc_feature (1)..(25): SEQ ID NO: 4019; WAN024CWY_at; Start 143; Stop 167
aaaatcctcctacaagcaagcccag

SEQ ID NO: 136739 - DNA, 25 bp, Artificial
  probe
  misc_feature (1)..(25): SEQ ID NO: 4019; WAN024CWY_at; Start 194; Stop 218
actctttgattttctcgataattgc

SEQ ID NO: 136740 - DNA, 25 bp, Artificial
  probe
  misc_feature (1)..(25): SEQ ID NO: 4019; WAN024CWY_at; Start 121; Stop 145
tgtggagctggttttagcaggaaaa

SEQ ID NO: 136741 - DNA, 25 bp, Artificial
  probe
  misc_feature (1)..(25): SEQ ID NO: 4019; WAN024CWY_at; Start 201; Stop 225
gattttctcgataattgcttccata

SEQ ID NO: 136742 - DNA, 25 bp, Artificial
  probe
  misc_feature (1)..(25): SEQ ID NO: 4019; WAN024CWY_at; Start 132; Stop 156
ttttagcaggaaaaatcctcctaca

SEQ ID NO: 136743 - DNA, 25 bp, Artificial
  probe
  misc_feature (1)..(25): SEQ ID NO: 4019; WAN024CWY_at; Start 177; Stop 201
gatgacgatgattttatactctttg

SEQ ID NO: 136744 - DNA, 25 bp, Artificial
  probe
  misc_feature (1)..(25): SEQ ID NO: 4019; WAN024CWY_at; Start 173; Stop 197
tacagatgacgatgattttatactc

SEQ ID NO: 136745 - DNA, 25 bp, Artificial
  probe
  misc_feature (1)..(25): SEQ ID NO: 4019; WAN024CWY_at; Start 169; Stop 193
ccagtacagatgacgatgattttat

SEQ ID NO: 136746 - DNA, 25 bp, Artificial
  probe
  misc_feature (1)..(25): SEQ ID NO: 4019; WAN024CWY_at; Start 98; Stop 122
aattcgtctctttgacaggtgtttg

SEQ ID NO: 136747 - DNA, 25 bp, Artificial
  probe
  misc_feature (1)..(25): SEQ ID NO: 4019; WAN024CWY_at; Start 6; Stop 30
tagatcttgttcaaggggttcttcc

SEQ ID NO: 136748 - DNA, 25 bp, Artificial
  probe
  misc_feature (1)..(25): SEQ ID NO: 4019; WAN024CWY_at; Start 160; Stop 184
aagcccagaccagtacagatgacga

SEQ ID NO: 136749 - DNA, 25 bp, Artificial
  probe
  misc_feature (1)..(25): SEQ ID NO: 4019; WAN024CWY_at; Start 217; Stop 241
gcttccatattttctcctctcttag

SEQ ID NO: 136750 - DNA, 25 bp, Artificial
  probe
  misc_feature (1)..(25): SEQ ID NO: 4019; WAN024CWY_at; Start 162; Stop 186
gcccagaccagtacagatgacgatg

SEQ ID NO: 136751 - DNA, 25 bp, Artificial
  probe
  misc_feature (1)..(25): SEQ ID NO: 4019; WAN024CWY_at; Start 88; Stop 112
tcagcctgcaaattcgtctctttga

SEQ ID NO: 136752 - DNA, 25 bp, Artificial
  probe
  misc_feature (1)..(25): SEQ ID NO: 4019; WAN024CWY_at; Start 167; Stop 191
gaccagtacagatgacgatgatttt

SEQ ID NO: 136753 - DNA, 25 bp, Artificial
  probe
  misc_feature (1)..(25): SEQ ID NO: 4019; WAN024CWY_at; Start 135; Stop 159
tagcaggaaaaatcctcctacaagc

SEQ ID NO: 136754 - DNA, 25 bp, Artificial
  probe
  misc_feature (1)..(25): SEQ ID NO: 4019; WAN024CWY_at; Start 106; Stop 130
tctttgacaggtgtttgtggagctg

SEQ ID NO: 136755 - DNA, 25 bp, Artificial
  probe
  misc_feature (1)..(25): SEQ ID NO: 4019; WAN024CWY_at; Start 180; Stop 204
gacgatgattttatactctttgatt

SEQ ID NO: 136756 - DNA, 25 bp, Artificial
  probe
  misc_feature (1)..(25): SEQ ID NO: 4019; WAN024CWY_at; Start 102; Stop 126
cgtctctttgacaggtgtttgtgga

SEQ ID NO: 136757 - DNA, 25 bp, Artificial
  probe
  misc_feature (1)..(25): SEQ ID NO: 4019; WAN024CWY_at; Start 158; Stop 182
gcaagcccagaccagtacagatgac

SEQ ID NO: 136758 - DNA, 25 bp, Artificial
  probe
  misc_feature (1)..(25): SEQ ID NO: 4019; WAN024CWY_at; Start 95; Stop 119
gcaaattcgtctctttgacaggtgt

SEQ ID NO: 136759 - DNA, 25 bp, Artificial
  probe
  misc_feature (1)..(25): SEQ ID NO: 4019; WAN024CWY_at; Start 112; Stop 136
acaggtgtttgtggagctggtttta

SEQ ID NO: 136760 - DNA, 25 bp, Artificial
  probe
  misc_feature (1)..(25): SEQ ID NO: 4019; WAN024CWY_at; Start 85; Stop 109
acttcagcctgcaaattcgtctctt

SEQ ID NO: 136761 - DNA, 25 bp, Artificial
  probe
  misc_feature (1)..(25): SEQ ID NO: 4019; WAN024CWY_at; Start 104; Stop 128
tctctttgacaggtgtttgtggagc

SEQ ID NO: 136762 - DNA, 25 bp, Artificial
  probe
  misc_feature (1)..(25): SEQ ID NO: 4019; WAN024CWY_at; Start 91; Stop 115
gcctgcaaattcgtctctttgacag

SEQ ID NO: 136763 - DNA, 25 bp, Artificial
  probe
  misc_feature (1)..(25): SEQ ID NO: 4019; WAN024CWY_at; Start 228; Stop 252
ttctcctctcttagattattcgtaa

SEQ ID NO: 136764 - DNA, 25 bp, Artificial
  probe
  misc_feature (1)..(25): SEQ ID NO: 4019; WAN024CWY_at; Start 141; Stop 165
gaaaaatcctcctacaagcaagccc

SEQ ID NO: 136765 - DNA, 25 bp, Artificial
  probe
  misc_feature (1)..(25): SEQ ID NO: 4019; WAN024CWY_at; Start 125; Stop 149
gagctggttttagcaggaaaaatcc

SEQ ID NO: 136766 - DNA, 25 bp, Artificial
  probe
  misc_feature (1)..(25): SEQ ID NO: 4019; WAN024CWY_at; Start 153; Stop 177
tacaagcaagcccagaccagtacag

SEQ ID NO: 136767 - DNA, 25 bp, Artificial
  probe
  misc_feature (1)..(25): SEQ ID NO: 4019; WAN024CWY_at; Start 209; Stop 233
cgataattgcttccatattttctcc

SEQ ID NO: 136768 - DNA, 25 bp, Artificial
  probe
  misc_feature (1)..(25): SEQ ID NO: 4019; WAN024CWY_at; Start 164; Stop 188
ccagaccagtacagatgacgatgat

SEQ ID NO: 136769 - DNA, 25 bp, Artificial
  probe
  misc_feature (1)..(25): SEQ ID NO: 4019; WAN024CWY_at; Start 138; Stop 162
caggaaaaatcctcctacaagcaag

SEQ ID NO: 136770 - DNA, 25 bp, Artificial
  probe
  misc_feature (1)..(25): SEQ ID NO: 4019; WAN024CWY_at; Start 127; Stop 151
gctggttttagcaggaaaaatcctc

SEQ ID NO: 136771 - DNA, 25 bp, Artificial
  probe
  misc_feature (1)..(25): SEQ ID NO: 2215; WAN024CWZ_at; Start 47; Stop 71
tctgtactggtctgggcttgcttgt

SEQ ID NO: 136772 - DNA, 25 bp, Artificial
  probe
  misc_feature (1)..(25): SEQ ID NO: 2215; WAN024CWZ_at; Start 465; Stop 489
caatctcaacaaggccagtctggaa

SEQ ID NO: 136773 - DNA, 25 bp, Artificial
  probe
  misc_feature (1)..(25): SEQ ID NO: 2215; WAN024CWZ_at; Start 603; Stop 627
tggtggcaaaacaatagaaaagctt

SEQ ID NO: 136774 - DNA, 25 bp, Artificial
  probe
  misc_feature (1)..(25): SEQ ID NO: 2215; WAN024CWZ_at; Start 8; Stop 32
caattatcgagaaaatcaaagagta

SEQ ID NO: 136775 - DNA, 25 bp, Artificial
  probe
  misc_feature (1)..(25): SEQ ID NO: 2215; WAN024CWZ_at; Start 370; Stop 394
gaggctctggtttacgttcctacta

SEQ ID NO: 136776 - DNA, 25 bp, Artificial
  probe
  misc_feature (1)..(25): SEQ ID NO: 2215; WAN024CWZ_at; Start 459; Stop 483
gaaggtcaatctcaacaaggccagt

SEQ ID NO: 136777 - DNA, 25 bp, Artificial
  probe
  misc_feature (1)..(25): SEQ ID NO: 2215; WAN024CWZ_at; Start 218; Stop 242
taatcacagtagatgtcaaaggtgc

SEQ ID NO: 136778 - DNA, 25 bp, Artificial
  probe
  misc_feature (1)..(25): SEQ ID NO: 2215; WAN024CWZ_at; Start 575; Stop 599
tagacgagctcaagaaggtctctgg

SEQ ID NO: 136779 - DNA, 25 bp, Artificial
  probe
  misc_feature (1)..(25): SEQ ID NO: 2215; WAN024CWZ_at; Start 515; Stop 539
gaggaaaacgagctcaggacattat

SEQ ID NO: 136780 - DNA, 25 bp, Artificial
  probe
  misc_feature (1)..(25): SEQ ID NO: 2215; WAN024CWZ_at; Start 556; Stop 580
aatggcaagttcaagtcagtagacg

SEQ ID NO: 136781 - DNA, 25 bp, Artificial
  probe
  misc_feature (1)..(25): SEQ ID NO: 2215; WAN024CWZ_at; Start 309; Stop 333
tggtggcttgacagagcaagcagac

SEQ ID NO: 136782 - DNA, 25 bp, Artificial
  probe
  misc_feature (1)..(25): SEQ ID NO: 2215; WAN024CWZ_at; Start 544; Stop 568
catcgtgaggcaaatggcaagttca

SEQ ID NO: 136783 - DNA, 25 bp, Artificial
  probe
  misc_feature (1)..(25): SEQ ID NO: 2215; WAN024CWZ_at; Start 287; Stop 311
tcaatgatgctgttcagaaggctgg

SEQ ID NO: 136784 - DNA, 25 bp, Artificial
  probe
  misc_feature (1)..(25): SEQ ID NO: 2215; WAN024CWZ_at; Start 2; Stop 26
tggaagcaattatcgagaaaatcaa

SEQ ID NO: 136785 - DNA, 25 bp, Artificial
  probe
  misc_feature (1)..(25): SEQ ID NO: 2215; WAN024CWZ_at; Start 589; Stop 613
aaggtctctggcattggtggcaaaa

SEQ ID NO: 136786 - DNA, 25 bp, Artificial
  probe
  misc_feature (1)..(25): SEQ ID NO: 2215; WAN024CWZ_at; Start 261; Stop 285
ttatgacttgcctgtaggtagtcga

SEQ ID NO: 136787 - DNA, 25 bp, Artificial
  probe
  misc_feature (1)..(25): SEQ ID NO: 2215; WAN024CWZ_at; Start 329; Stop 353
cagacagcaagtcgctcaatctagc

SEQ ID NO: 136788 - DNA, 25 bp, Artificial
  probe
  misc_feature (1)..(25): SEQ ID NO: 2215; WAN024CWZ_at; Start 320; Stop 344
cagagcaagcagacagcaagtcgct

SEQ ID NO: 136789 - DNA, 25 bp, Artificial
  probe
  misc_feature (1)..(25): SEQ ID NO: 2215; WAN024CWZ_at; Start 568; Stop 592
aagtcagtagacgagctcaagaagg

SEQ ID NO: 136790 - DNA, 25 bp, Artificial
  probe
  misc_feature (1)..(25): SEQ ID NO: 2215; WAN024CWZ_at; Start 206; Stop 230
ttgaacaagatctaatcacagtaga

SEQ ID NO: 136791 - DNA, 25 bp, Artificial
  probe
  misc_feature (1)..(25): SEQ ID NO: 2215; WAN024CWZ_at; Start 24; Stop 48
caaagagtataaaatcatcgtcatc

SEQ ID NO: 136792 - DNA, 25 bp, Artificial
  probe
  misc_feature (1)..(25): SEQ ID NO: 2215; WAN024CWZ_at; Start 491; Stop 515
aactcaagcaggtcaagggactggg

SEQ ID NO: 136793 - DNA, 25 bp, Artificial
  probe
  misc_feature (1)..(25): SEQ ID NO: 2215; WAN024CWZ_at; Start 470; Stop 494
tcaacaaggccagtctggaagaact

SEQ ID NO: 136794 - DNA, 25 bp, Artificial
  probe
  misc_feature (1)..(25): SEQ ID NO: 2215; WAN024CWZ_at; Start 299; Stop 323
ttcagaaggctggtggcttgacaga

SEQ ID NO: 136795 - DNA, 25 bp, Artificial
  probe
  misc_feature (1)..(25): SEQ ID NO: 2215; WAN024CWZ_at; Start 447; Stop 471
aagcaaggaaaagaaggtcaatctc

SEQ ID NO: 136796 - DNA, 25 bp, Artificial
  probe
  misc_feature (1)..(25): SEQ ID NO: 2215; WAN024CWZ_at; Start 39; Stop 63
catcgtcatctgtactggtctgggc

SEQ ID NO: 136797 - DNA, 25 bp, Artificial
  probe
  misc_feature (1)..(25): SEQ ID NO: 2215; WAN024CWZ_at; Start 510; Stop 534
actgggaggaaaacgagctcaggac

SEQ ID NO: 136798 - DNA, 25 bp, Artificial
  probe
  misc_feature (1)..(25): SEQ ID NO: 2215; WAN024CWZ_at; Start 384; Stop 408
cgttcctactaagggagaagaagca

SEQ ID NO: 136799 - DNA, 25 bp, Artificial
  probe
  misc_feature (1)..(25): SEQ ID NO: 2215; WAN024CWZ_at; Start 388; Stop 412
cctactaagggagaagaagcagtta

SEQ ID NO: 136800 - DNA, 25 bp, Artificial
  probe
  misc_feature (1)..(25): SEQ ID NO: 2215; WAN024CWZ_at; Start 624; Stop 648
gcttaaagactatgttacagtggat

SEQ ID NO: 136801 - DNA, 25 bp, Artificial
  probe
  misc_feature (1)..(25): SEQ ID NO: 2215; WAN024CWZ_at; Start 233; Stop 257
tcaaaggtgctgtcaaatcgccagg

SEQ ID NO: 136802 - DNA, 25 bp, Artificial
  probe
  misc_feature (1)..(25): SEQ ID NO: 2215; WAN024CWZ_at; Start 248; Stop 272
aatcgccagggatttatgacttgcc

SEQ ID NO: 136803 - DNA, 25 bp, Artificial
  probe
  misc_feature (1)..(25): SEQ ID NO: 2215; WAN024CWZ_at; Start 483; Stop 507
tctggaagaactcaagcaggtcaag

SEQ ID NO: 136804 - DNA, 25 bp, Artificial
  probe
  misc_feature (1)..(25): SEQ ID NO: 2215; WAN024CWZ_at; Start 357; Stop 381
gaaagttagtgatgaggctctggtt

SEQ ID NO: 136805 - DNA, 25 bp, Artificial
  probe
  misc_feature (1)..(25): SEQ ID NO: 2138; WAN024CX2_at; Start 652; Stop 676
ctcggattagatgtagaaattaaac

SEQ ID NO: 136806 - DNA, 25 bp, Artificial
  probe
  misc_feature (1)..(25): SEQ ID NO: 2138; WAN024CX2_at; Start 570; Stop 594
tcttctgacagagaaaaaacaaaag

SEQ ID NO: 136807 - DNA, 25 bp, Artificial
  probe
  misc_feature (1)..(25): SEQ ID NO: 2138; WAN024CX2_at; Start 135; Stop 159
tgttcgtcaatctcctgttattggt

SEQ ID NO: 136808 - DNA, 25 bp, Artificial
  probe
  misc_feature (1)..(25): SEQ ID NO: 2138; WAN024CX2_at; Start 407; Stop 431
ccattcgtttactttccttgccaga

SEQ ID NO: 136809 - DNA, 25 bp, Artificial
  probe
  misc_feature (1)..(25): SEQ ID NO: 2138; WAN024CX2_at; Start 331; Stop 355
tctctcgtagagaaaggattcaccc

SEQ ID NO: 136810 - DNA, 25 bp, Artificial
  probe
  misc_feature (1)..(25): SEQ ID NO: 2138; WAN024CX2_at; Start 416; Stop 440
tactttccttgccagaacagattct

SEQ ID NO: 136811 - DNA, 25 bp, Artificial
  probe
  misc_feature (1)..(25): SEQ ID NO: 2138; WAN024CX2_at; Start 508; Stop 532
caacaagactatttctttcaacgga

SEQ ID NO: 136812 - DNA, 25 bp, Artificial
  probe
  misc_feature (1)..(25): SEQ ID NO: 2138; WAN024CX2_at; Start 618; Stop 642
catacaaaatgaagaaaaacagtta

SEQ ID NO: 136813 - DNA, 25 bp, Artificial
  probe
  misc_feature (1)..(25): SEQ ID NO: 2138; WAN024CX2_at; Start 175; Stop 199
ggagagagacgctatcgggcttcac

SEQ ID NO: 136814 - DNA, 25 bp, Artificial
  probe
  misc_feature (1)..(25): SEQ ID NO: 2138; WAN024CX2_at; Start 672; Stop 696
taaactatctaaaaaagacagtgga

SEQ ID NO: 136815 - DNA, 25 bp, Artificial
  probe
  misc_feature (1)..(25): SEQ ID NO: 2138; WAN024CX2_at; Start 286; Stop 310
cagagagaaaatttaaacccaatag

SEQ ID NO: 136816 - DNA, 25 bp, Artificial
  probe
  misc_feature (1)..(25): SEQ ID NO: 2138; WAN024CX2_at; Start 261; Stop 285
ggtccagtccattattgaaaattta

SEQ ID NO: 136817 - DNA, 25 bp, Artificial
  probe
  misc_feature (1)..(25): SEQ ID NO: 2138; WAN024CX2_at; Start 347; Stop 371
gattcacccatgctgaaattgcaga

SEQ ID NO: 136818 - DNA, 25 bp, Artificial
  probe
  misc_feature (1)..(25): SEQ ID NO: 2138; WAN024CX2_at; Start 93; Stop 117
agcacagtctatcaaagaaaatggg

SEQ ID NO: 136819 - DNA, 25 bp, Artificial
  probe
  misc_feature (1)..(25): SEQ ID NO: 2138; WAN024CX2_at; Start 730; Stop 754
tatagtagaattatcaacagcctga

SEQ ID NO: 136820 - DNA, 25 bp, Artificial
  probe
  misc_feature (1)..(25): SEQ ID NO: 2138; WAN024CX2_at; Start 215; Stop 239
ggtctatcccagctgttgttaaaca

SEQ ID NO: 136821 - DNA, 25 bp, Artificial
  probe
  misc_feature (1)..(25): SEQ ID NO: 2138; WAN024CX2_at; Start 522; Stop 546
ctttcaacggattatagaagaagat

SEQ ID NO: 136822 - DNA, 25 bp, Artificial
  probe
  misc_feature (1)..(25): SEQ ID NO: 2138; WAN024CX2_at; Start 187; Stop 211
tatcgggcttcacttttagctggtc

SEQ ID NO: 136823 - DNA, 25 bp, Artificial
  probe
  misc_feature (1)..(25): SEQ ID NO: 2138; WAN024CX2_at; Start 459; Stop 483
caaactatcacaagcccatgcgcgt

SEQ ID NO: 136824 - DNA, 25 bp, Artificial
  probe
  misc_feature (1)..(25): SEQ ID NO: 2138; WAN024CX2_at; Start 475; Stop 499
catgcgcgttccctagttgggttaa

SEQ ID NO: 136825 - DNA, 25 bp, Artificial
  probe
  misc_feature (1)..(25): SEQ ID NO: 2138; WAN024CX2_at; Start 304; Stop 328
ccaatagaagaagcacgcgcctatg

SEQ ID NO: 136826 - DNA, 25 bp, Artificial
  probe
  misc_feature (1)..(25): SEQ ID NO: 2138; WAN024CX2_at; Start 637; Stop 661
cagttaagaaaactactcggattag

SEQ ID NO: 136827 - DNA, 25 bp, Artificial
  probe
  misc_feature (1)..(25): SEQ ID NO: 2138; WAN024CX2_at; Start 52; Stop 76
caaccccgaaaagaatttgatagag

SEQ ID NO: 136828 - DNA, 25 bp, Artificial
  probe
  misc_feature (1)..(25): SEQ ID NO: 2138; WAN024CX2_at; Start 379; Stop 403
ggcaagtctcgtccatatatcagca

SEQ ID NO: 136829 - DNA, 25 bp, Artificial
  probe
  misc_feature (1)..(25): SEQ ID NO: 2138; WAN024CX2_at; Start 167; Stop 191
tccttgcaggagagagacgctatcg

SEQ ID NO: 136830 - DNA, 25 bp, Artificial
  probe
  misc_feature (1)..(25): SEQ ID NO: 2138; WAN024CX2_at; Start 247; Stop 271
gaccaagagatgatggtccagtcca

SEQ ID NO: 136831 - DNA, 25 bp, Artificial
  probe
  misc_feature (1)..(25): SEQ ID NO: 2138; WAN024CX2_at; Start 201; Stop 225
tttagctggtctacggtctatccca

SEQ ID NO: 136832 - DNA, 25 bp, Artificial
  probe
  misc_feature (1)..(25): SEQ ID NO: 2138; WAN024CX2_at; Start 299; Stop 323
taaacccaatagaagaagcacgcgc

SEQ ID NO: 136833 - DNA, 25 bp, Artificial
  probe
  misc_feature (1)..(25): SEQ ID NO: 2138; WAN024CX2_at; Start 117; Stop 141
ggtcattcaaccgattattgttcgt

SEQ ID NO: 136834 - DNA, 25 bp, Artificial
  probe
  misc_feature (1)..(25): SEQ ID NO: 2138; WAN024CX2_at; Start 389; Stop 413
gtccatatatcagcaactccattcg

SEQ ID NO: 136835 - DNA, 25 bp, Artificial
  probe
  misc_feature (1)..(25): SEQ ID NO: 2138; WAN024CX2_at; Start 445; Stop 469
gaagtagaaaatggcaaactatcac

SEQ ID NO: 136836 - DNA, 25 bp, Artificial
  probe
  misc_feature (1)..(25): SEQ ID NO: 2138; WAN024CX2_at; Start 153; Stop 177
tattggttatgaaatccttgcagga

SEQ ID NO: 136837 - DNA, 25 bp, Artificial
  probe
  misc_feature (1)..(25): SEQ ID NO: 2138; WAN024CX2_at; Start 234; Stop 258
taaacagatttcagaccaagagatg

SEQ ID NO: 136838 - DNA, 25 bp, Artificial
  probe
  misc_feature (1)..(25): SEQ ID NO: 2138; WAN024CX2_at; Start 85; Stop 109
gatgaactagcacagtctatcaaag

SEQ ID NO: 136839 - DNA, 25 bp, Artificial
  probe
  misc_feature (1)..(25): SEQ ID NO: 1711; WAN024CX3_at; Start 1474; Stop 1498
tttgatgaagaacgctggaaagcca

SEQ ID NO: 136840 - DNA, 25 bp, Artificial
  probe
  misc_feature (1)..(25): SEQ ID NO: 1711; WAN024CX3_at; Start 1344; Stop 1368
tgctgtcagtgcaaatacctggtac

SEQ ID NO: 136841 - DNA, 25 bp, Artificial
  probe
  misc_feature (1)..(25): SEQ ID NO: 1711; WAN024CX3_at; Start 1002; Stop 1026
gttacttcaacctgacaaacctgat

SEQ ID NO: 136842 - DNA, 25 bp, Artificial
  probe
  misc_feature (1)..(25): SEQ ID NO: 1711; WAN024CX3_at; Start 786; Stop 810
cctaggattgtggattggtccccga

SEQ ID NO: 136843 - DNA, 25 bp, Artificial
  probe
  misc_feature (1)..(25): SEQ ID NO: 1711; WAN024CX3_at; Start 895; Stop 919
tcaaatgatgtaaacgtggctgatt

SEQ ID NO: 136844 - DNA, 25 bp, Artificial
  probe
  misc_feature (1)..(25): SEQ ID NO: 1711; WAN024CX3_at; Start 161; Stop 185
cgagggatgatgttctttcgaagca

SEQ ID NO: 136845 - DNA, 25 bp, Artificial
  probe
  misc_feature (1)..(25): SEQ ID NO: 1711; WAN024CX3_at; Start 1732; Stop 1756
gatgagatagaattggcaccgtact

SEQ ID NO: 136846 - DNA, 25 bp, Artificial
  probe
  misc_feature (1)..(25): SEQ ID NO: 1711; WAN024CX3_at; Start 583; Stop 607
gaccatatgaccgatattacagagg

SEQ ID NO: 136847 - DNA, 25 bp, Artificial
  probe
  misc_feature (1)..(25): SEQ ID NO: 1711; WAN024CX3_at; Start 1359; Stop 1383
tacctggtacatggatcatcaaatg

SEQ ID NO: 136848 - DNA, 25 bp, Artificial
  probe
  misc_feature (1)..(25): SEQ ID NO: 1711; WAN024CX3_at; Start 1153; Stop 1177
cctagtccatggtttttacagtggg

SEQ ID NO: 136849 - DNA, 25 bp, Artificial
  probe
  misc_feature (1)..(25): SEQ ID NO: 1711; WAN024CX3_at; Start 807; Stop 831
ccgaggtggttataatgggacagaa

SEQ ID NO: 136850 - DNA, 25 bp, Artificial
  probe
  misc_feature (1)..(25): SEQ ID NO: 1711; WAN024CX3_at; Start 1313; Stop 1337
tgtggtcgctttataatcatgaacc

SEQ ID NO: 136851 - DNA, 25 bp, Artificial
  probe
  misc_feature (1)..(25): SEQ ID NO: 1711; WAN024CX3_at; Start 853; Stop 877
gaagcacatccagagttaaatattg

SEQ ID NO: 136852 - DNA, 25 bp, Artificial
  probe
  misc_feature (1)..(25): SEQ ID NO: 1711; WAN024CX3_at; Start 1420; Stop 1444
tttatttcaacaagagggaatgctt

SEQ ID NO: 136853 - DNA, 25 bp, Artificial
  probe
  misc_feature (1)..(25): SEQ ID NO: 1711; WAN024CX3_at; Start 1033; Stop 1057
ggaccgcacggtatgtataccatga

SEQ ID NO: 136854 - DNA, 25 bp, Artificial
  probe
  misc_feature (1)..(25): SEQ ID NO: 1711; WAN024CX3_at; Start 1746; Stop 1770
ggcaccgtactctatcgtgatactg

SEQ ID NO: 136855 - DNA, 25 bp, Artificial
  probe
  misc_feature (1)..(25): SEQ ID NO: 1711; WAN024CX3_at; Start 80; Stop 104
caatcgttagggaagagggagatac

SEQ ID NO: 136856 - DNA, 25 bp, Artificial
  probe
  misc_feature (1)..(25): SEQ ID NO: 1711; WAN024CX3_at; Start 38; Stop 62
cattggagaatggtataagactttc

SEQ ID NO: 136857 - DNA, 25 bp, Artificial
  probe
  misc_feature (1)..(25): SEQ ID NO: 1711; WAN024CX3_at; Start 325; Stop 349
gaattgggacaacctgtttatgcga

SEQ ID NO: 136858 - DNA, 25 bp, Artificial
  probe
  misc_feature (1)..(25): SEQ ID NO: 1711; WAN024CX3_at; Start 1506; Stop 1530
tgccgtcaaatggatagaggagaat

SEQ ID NO: 136859 - DNA, 25 bp, Artificial
  probe
  misc_feature (1)..(25): SEQ ID NO: 1711; WAN024CX3_at; Start 370; Stop 394
gaatttccaatgtctgaaaacaagg

SEQ ID NO: 136860 - DNA, 25 bp, Artificial
  probe
  misc_feature (1)..(25): SEQ ID NO: 1711; WAN024CX3_at; Start 1209; Stop 1233
tgtaggctttacagagaatgcaggt

SEQ ID NO: 136861 - DNA, 25 bp, Artificial
  probe
  misc_feature (1)..(25): SEQ ID NO: 1711; WAN024CX3_at; Start 563; Stop 587
aacagtataattcctggtatgacca

SEQ ID NO: 136862 - DNA, 25 bp, Artificial
  probe
  misc_feature (1)..(25): SEQ ID NO: 1711; WAN024CX3_at; Start 1491; Stop 1515
gaaagccaatgctcgtgccgtcaaa

SEQ ID NO: 136863 - DNA, 25 bp, Artificial
  probe
  misc_feature (1)..(25): SEQ ID NO: 1711; WAN024CX3_at; Start 1596; Stop 1620
taagtgtcacaatcagaagacttct

SEQ ID NO: 136864 - DNA, 25 bp, Artificial
  probe
  misc_feature (1)..(25): SEQ ID NO: 1711; WAN024CX3_at; Start 96; Stop 120
gggagatacgcgaattcaggtttct

SEQ ID NO: 136865 - DNA, 25 bp, Artificial
  probe
  misc_feature (1)..(25): SEQ ID NO: 1711; WAN024CX3_at; Start 1329; Stop 1353
tcatgaaccaatctatgctgtcagt

SEQ ID NO: 136866 - DNA, 25 bp, Artificial
  probe
  misc_feature (1)..(25): SEQ ID NO: 1711; WAN024CX3_at; Start 536; Stop 560
gaatagctcaacctagttatttccg

SEQ ID NO: 136867 - DNA, 25 bp, Artificial
  probe
  misc_feature (1)..(25): SEQ ID NO: 1711; WAN024CX3_at; Start 688; Stop 712
gatggttggacaaactatcaatcag

SEQ ID NO: 136868 - DNA, 25 bp, Artificial
  probe
  misc_feature (1)..(25): SEQ ID NO: 1711; WAN024CX3_at; Start 1297; Stop 1321
gagatacagttacctatgtggtcgc

SEQ ID NO: 136869 - DNA, 25 bp, Artificial
  probe
  misc_feature (1)..(25): SEQ ID NO: 1711; WAN024CX3_at; Start 385; Stop 409
gaaaacaaggtagatggtagacact

SEQ ID NO: 136870 - DNA, 25 bp, Artificial
  probe
  misc_feature (1)..(25): SEQ ID NO: 1711; WAN024CX3_at; Start 839; Stop 863
tgagtgattggttagaagcacatcc

SEQ ID NO: 136871 - DNA, 25 bp, Artificial
  probe
  misc_feature (1)..(25): SEQ ID NO: 1711; WAN024CX3_at; Start 1017; Stop 1041
caaacctgataagagtggaccgcac

SEQ ID NO: 136872 - DNA, 25 bp, Artificial
  probe
  misc_feature (1)..(25): SEQ ID NO: 1711; WAN024CX3_at; Start 143; Stop 167
tacgtttaatctttgaatcgaggga

SEQ ID NO: 136873 - DNA, 25 bp, Artificial
  probe
  misc_feature (1)..(25): SEQ ID NO: 774; WAN024CX4_at; Start 364; Stop 388
aatctttctgtcagttttggtcgcc

SEQ ID NO: 136874 - DNA, 25 bp, Artificial
  probe
  misc_feature (1)..(25): SEQ ID NO: 774; WAN024CX4_at; Start 59; Stop 83
tcgcagagtattcaaaacgaatttc

SEQ ID NO: 136875 - DNA, 25 bp, Artificial
  probe
  misc_feature (1)..(25): SEQ ID NO: 774; WAN024CX4_at; Start 42; Stop 66
gtatttaaaagatggtatcgcagag

SEQ ID NO: 136876 - DNA, 25 bp, Artificial
  probe
  misc_feature (1)..(25): SEQ ID NO: 774; WAN024CX4_at; Start 162; Stop 186
gattttagaaatagaaggtcagaga

SEQ ID NO: 136877 - DNA, 25 bp, Artificial
  probe
  misc_feature (1)..(25): SEQ ID NO: 774; WAN024CX4_at; Start 140; Stop 164
ccagtgaatcagaaaatcaaaagat

SEQ ID NO: 136878 - DNA, 25 bp, Artificial
  probe
  misc_feature (1)..(25): SEQ ID NO: 774; WAN024CX4_at; Start 52; Stop 76
gatggtatcgcagagtattcaaaac

SEQ ID NO: 136879 - DNA, 25 bp, Artificial
  probe
  misc_feature (1)..(25): SEQ ID NO: 774; WAN024CX4_at; Start 284; Stop 308
cttctataaaaggattttctactct

SEQ ID NO: 136880 - DNA, 25 bp, Artificial
  probe
  misc_feature (1)..(25): SEQ ID NO: 774; WAN024CX4_at; Start 216; Stop 240
cgttattgtgttagccattgaaggg

SEQ ID NO: 136881 - DNA, 25 bp, Artificial
  probe
  misc_feature (1)..(25): SEQ ID NO: 774; WAN024CX4_at; Start 120; Stop 144
tgaaaaaacaccagataaggccagt

SEQ ID NO: 136882 - DNA, 25 bp, Artificial
  probe
  misc_feature (1)..(25): SEQ ID NO: 774; WAN024CX4_at; Start 194; Stop 218
caaaaattgctgaccgtgatttcgt

SEQ ID NO: 136883 - DNA, 25 bp, Artificial
  probe
  misc_feature (1)..(25): SEQ ID NO: 774; WAN024CX4_at; Start 370; Stop 394
tctgtcagttttggtcgcctaacct

SEQ ID NO: 136884 - DNA, 25 bp, Artificial
  probe
  misc_feature (1)..(25): SEQ ID NO: 774; WAN024CX4_at; Start 135; Stop 159
taaggccagtgaatcagaaaatcaa

SEQ ID NO: 136885 - DNA, 25 bp, Artificial
  probe
  misc_feature (1)..(25): SEQ ID NO: 774; WAN024CX4_at; Start 447; Stop 471
tacgattcagcagggattcccctac

SEQ ID NO: 136886 - DNA, 25 bp, Artificial
  probe
  misc_feature (1)..(25): SEQ ID NO: 774; WAN024CX4_at; Start 436; Stop 460
tatcgcgcttttacgattcagcagg

SEQ ID NO: 136887 - DNA, 25 bp, Artificial
  probe
  misc_feature (1)..(25): SEQ ID NO: 774; WAN024CX4_at; Start 173; Stop 197
tagaaggtcagagaattttatcaaa

SEQ ID NO: 136888 - DNA, 25 bp, Artificial
  probe
  misc_feature (1)..(25): SEQ ID NO: 774; WAN024CX4_at; Start 15; Stop 39
tgtaacagttgggaaactgaaagaa

SEQ ID NO: 136889 - DNA, 25 bp, Artificial
  probe
  misc_feature (1)..(25): SEQ ID NO: 774; WAN024CX4_at; Start 264; Stop 288
tagtaagcagttagaagaaacttct

SEQ ID NO: 136890 - DNA, 25 bp, Artificial
  probe
  misc_feature (1)..(25): SEQ ID NO: 774; WAN024CX4_at; Start 453; Stop 477
tcagcagggattcccctaccataaa

SEQ ID NO: 136891 - DNA, 25 bp, Artificial
  probe
  misc_feature (1)..(25): SEQ ID NO: 774; WAN024CX4_at; Start 354; Stop 378
aaatagagccaatctttctgtcagt

SEQ ID NO: 136892 - DNA, 25 bp, Artificial
  probe
  misc_feature (1)..(25): SEQ ID NO: 774; WAN024CX4_at; Start 207; Stop 231
ccgtgatttcgttattgtgttagcc

SEQ ID NO: 136893 - DNA, 25 bp, Artificial
  probe
  misc_feature (1)..(25): SEQ ID NO: 774; WAN024CX4_at; Start 250; Stop 274
ttctcagaagaatttagtaagcagt

SEQ ID NO: 136894 - DNA, 25 bp, Artificial
  probe
  misc_feature (1)..(25): SEQ ID NO: 774; WAN024CX4_at; Start 444; Stop 468
ttttacgattcagcagggattcccc

SEQ ID NO: 136895 - DNA, 25 bp, Artificial
  probe
  misc_feature (1)..(25): SEQ ID NO: 774; WAN024CX4_at; Start 72; Stop 96
aaaacgaatttctagatttgctaag

SEQ ID NO: 136896 - DNA, 25 bp, Artificial
  probe
  misc_feature (1)..(25): SEQ ID NO: 774; WAN024CX4_at; Start 340; Stop 364
tcatcatctgtaaaaaatagagcca

SEQ ID NO: 136897 - DNA, 25 bp, Artificial
  probe
  misc_feature (1)..(25): SEQ ID NO: 774; WAN024CX4_at; Start 411; Stop 435
gagactagttcttgttgaacaaatc

SEQ ID NO: 136898 - DNA, 25 bp, Artificial
  probe
  misc_feature (1)..(25): SEQ ID NO: 774; WAN024CX4_at; Start 234; Stop 258
tgaagggaaaactttcttctcagaa

SEQ ID NO: 136899 - DNA, 25 bp, Artificial
  probe
  misc_feature (1)..(25): SEQ ID NO: 774; WAN024CX4_at; Start 188; Stop 212
ttttatcaaaaattgctgaccgtga

SEQ ID NO: 136900 - DNA, 25 bp, Artificial
  probe
  misc_feature (1)..(25): SEQ ID NO: 774; WAN024CX4_at; Start 222; Stop 246
tgtgttagccattgaagggaaaact

SEQ ID NO: 136901 - DNA, 25 bp, Artificial
  probe
  misc_feature (1)..(25): SEQ ID NO: 774; WAN024CX4_at; Start 426; Stop 450
tgaacaaatctatcgcgcttttacg

SEQ ID NO: 136902 - DNA, 25 bp, Artificial
  probe
  misc_feature (1)..(25): SEQ ID NO: 774; WAN024CX4_at; Start 130; Stop 154
ccagataaggccagtgaatcagaaa

SEQ ID NO: 136903 - DNA, 25 bp, Artificial
  probe
  misc_feature (1)..(25): SEQ ID NO: 774; WAN024CX4_at; Start 400; Stop 424
catcagttaatgagactagttcttg

SEQ ID NO: 136904 - DNA, 25 bp, Artificial
  probe
  misc_feature (1)..(25): SEQ ID NO: 774; WAN024CX4_at; Start 92; Stop 116
ctaagtttgaaatgattgagttatc

SEQ ID NO: 136905 - DNA, 25 bp, Artificial
  probe
  misc_feature (1)..(25): SEQ ID NO: 774; WAN024CX4_at; Start 109; Stop 133
gagttatcagatgaaaaaacaccag

SEQ ID NO: 136906 - DNA, 25 bp, Artificial
  probe
  misc_feature (1)..(25): SEQ ID NO: 774; WAN024CX4_at; Start 77; Stop 101
gaatttctagatttgctaagtttga

SEQ ID NO: 136907 - DNA, 25 bp, Artificial
  probe
  misc_feature (1)..(25): SEQ ID NO: 935; WAN024CX5_at; Start 509; Stop 533
tgcgcattattggtaagaattttgc

SEQ ID NO: 136908 - DNA, 25 bp, Artificial
  probe
  misc_feature (1)..(25): SEQ ID NO: 935; WAN024CX5_at; Start 418; Stop 442
gattatttcgactacaattacaagg

SEQ ID NO: 136909 - DNA, 25 bp, Artificial
  probe
  misc_feature (1)..(25): SEQ ID NO: 935; WAN024CX5_at; Start 682; Stop 706
catcgttgtcctatttcaagattaa

SEQ ID NO: 136910 - DNA, 25 bp, Artificial
  probe
  misc_feature (1)..(25): SEQ ID NO: 935; WAN024CX5_at; Start 557; Stop 581
cagatattcaggaaaaggacaaaca

SEQ ID NO: 136911 - DNA, 25 bp, Artificial
  probe
  misc_feature (1)..(25): SEQ ID NO: 935; WAN024CX5_at; Start 502; Stop 526
cataaattgcgcattattggtaaga

SEQ ID NO: 136912 - DNA, 25 bp, Artificial
  probe
  misc_feature (1)..(25): SEQ ID NO: 935; WAN024CX5_at; Start 27; Stop 51
tattgaacatcaagtgagactagag

SEQ ID NO: 136913 - DNA, 25 bp, Artificial
  probe
  misc_feature (1)..(25): SEQ ID NO: 935; WAN024CX5_at; Start 661; Stop 685
gaaattgttttctatgaagaccatc

SEQ ID NO: 136914 - DNA, 25 bp, Artificial
  probe
  misc_feature (1)..(25): SEQ ID NO: 935; WAN024CX5_at; Start 375; Stop 399
cttctacacgaagagtatgttactt

SEQ ID NO: 136915 - DNA, 25 bp, Artificial
  probe
  misc_feature (1)..(25): SEQ ID NO: 935; WAN024CX5_at; Start 542; Stop 566
tttatggtaccatgacagatattca

SEQ ID NO: 136916 - DNA, 25 bp, Artificial
  probe
  misc_feature (1)..(25): SEQ ID NO: 935; WAN024CX5_at; Start 464; Stop 488
accatgatattttgtatattgaaac

SEQ ID NO: 136917 - DNA, 25 bp, Artificial
  probe
  misc_feature (1)..(25): SEQ ID NO: 935; WAN024CX5_at; Start 58; Stop 82
ttggatgaaatttcgaaagaatcga

SEQ ID NO: 136918 - DNA, 25 bp, Artificial
  probe
  misc_feature (1)..(25): SEQ ID NO: 935; WAN024CX5_at; Start 676; Stop 700
gaagaccatcgttgtcctatttcaa

SEQ ID NO: 136919 - DNA, 25 bp, Artificial
  probe
  misc_feature (1)..(25): SEQ ID NO: 935; WAN024CX5_at; Start 110; Stop 134
gaaaagtccgtgaatttgaagaata

SEQ ID NO: 136920 - DNA, 25 bp, Artificial
  probe
  misc_feature (1)..(25): SEQ ID NO: 935; WAN024CX5_at; Start 17; Stop 41
tagaagatgttattgaacatcaagt

SEQ ID NO: 136921 - DNA, 25 bp, Artificial
  probe
  misc_feature (1)..(25): SEQ ID NO: 935; WAN024CX5_at; Start 180; Stop 204
tattcatggaattgagaaaaaggga

SEQ ID NO: 136922 - DNA, 25 bp, Artificial
  probe
  misc_feature (1)..(25): SEQ ID NO: 935; WAN024CX5_at; Start 406; Stop 430
gaagatgttgtagattatttcgact

SEQ ID NO: 136923 - DNA, 25 bp, Artificial
  probe
  misc_feature (1)..(25): SEQ ID NO: 935; WAN024CX5_at; Start 724; Stop 748
gatattttagagaaaaaatctcaaa

SEQ ID NO: 136924 - DNA, 25 bp, Artificial
  probe
  misc_feature (1)..(25): SEQ ID NO: 935; WAN024CX5_at; Start 34; Stop 58
catcaagtgagactagagagaatat

SEQ ID NO: 136925 - DNA, 25 bp, Artificial
  probe
  misc_feature (1)..(25): SEQ ID NO: 935; WAN024CX5_at; Start 184; Stop 208
catggaattgagaaaaagggatttg

SEQ ID NO: 136926 - DNA, 25 bp, Artificial
  probe
  misc_feature (1)..(25): SEQ ID NO: 935; WAN024CX5_at; Start 379; Stop 403
tacacgaagagtatgttacttgaaa

SEQ ID NO: 136927 - DNA, 25 bp, Artificial
  probe
  misc_feature (1)..(25): SEQ ID NO: 935; WAN024CX5_at; Start 117; Stop 141
ccgtgaatttgaagaatacattgaa

SEQ ID NO: 136928 - DNA, 25 bp, Artificial
  probe
  misc_feature (1)..(25): SEQ ID NO: 935; WAN024CX5_at; Start 638; Stop 662
gagaaattgatcgaaaaaacttaga

SEQ ID NO: 136929 - DNA, 25 bp, Artificial
  probe
  misc_feature (1)..(25): SEQ ID NO: 935; WAN024CX5_at; Start 668; Stop 692
ttttctatgaagaccatcgttgtcc

SEQ ID NO: 136930 - DNA, 25 bp, Artificial
  probe
  misc_feature (1)..(25): SEQ ID NO: 935; WAN024CX5_at; Start 535; Stop 559
aaagagttttatggtaccatgacag

SEQ ID NO: 136931 - DNA, 25 bp, Artificial
  probe
  misc_feature (1)..(25): SEQ ID NO: 935; WAN024CX5_at; Start 222; Stop 246
cattcgtcattacaatccttacgct

SEQ ID NO: 136932 - DNA, 25 bp, Artificial
  probe
  misc_feature (1)..(25): SEQ ID NO: 935; WAN024CX5_at; Start 448; Stop 472
gatttaaaaattccttaccatgata

SEQ ID NO: 136933 - DNA, 25 bp, Artificial
  probe
  misc_feature (1)..(25): SEQ ID NO: 935; WAN024CX5_at; Start 42; Stop 66
gagactagagagaatattggatgaa

SEQ ID NO: 136934 - DNA, 25 bp, Artificial
  probe
  misc_feature (1)..(25): SEQ ID NO: 935; WAN024CX5_at; Start 386; Stop 410
agagtatgttacttgaaaatgaaga

SEQ ID NO: 136935 - DNA, 25 bp, Artificial
  probe
  misc_feature (1)..(25): SEQ ID NO: 935; WAN024CX5_at; Start 308; Stop 332
cagccctagattttgttgataagga

SEQ ID NO: 136936 - DNA, 25 bp, Artificial
  probe
  misc_feature (1)..(25): SEQ ID NO: 935; WAN024CX5_at; Start 367; Stop 391
caaaatatcttctacacgaagagta

SEQ ID NO: 136937 - DNA, 25 bp, Artificial
  probe
  misc_feature (1)..(25): SEQ ID NO: 935; WAN024CX5_at; Start 94; Stop 118
tcatacaagacaacgggaaaagtcc

SEQ ID NO: 136938 - DNA, 25 bp, Artificial
  probe
  misc_feature (1)..(25): SEQ ID NO: 935; WAN024CX5_at; Start 168; Stop 192
cctagatatcgatattcatggaatt

SEQ ID NO: 136939 - DNA, 25 bp, Artificial
  probe
  misc_feature (1)..(25): SEQ ID NO: 935; WAN024CX5_at; Start 163; Stop 187
tatttcctagatatcgatattcatg

SEQ ID NO: 136940 - DNA, 25 bp, Artificial
  probe
  misc_feature (1)..(25): SEQ ID NO: 935; WAN024CX5_at; Start 87; Stop 111
tccaatatcatacaagacaacggga

SEQ ID NO: 136941 - DNA, 25 bp, Artificial
  probe
  misc_feature (1)..(25): SEQ ID NO: 1919; WAN024CX6_at; Start 344; Stop 368
aacttcatatcatgcttagtacaga

SEQ ID NO: 136942 - DNA, 25 bp, Artificial
  probe
  misc_feature (1)..(25): SEQ ID NO: 1919; WAN024CX6_at; Start 267; Stop 291
tctagagtcagaaccacttctggct

SEQ ID NO: 136943 - DNA, 25 bp, Artificial
  probe
  misc_feature (1)..(25): SEQ ID NO: 1919; WAN024CX6_at; Start 154; Stop 178
gataagtatgatatgattgagcact

SEQ ID NO: 136944 - DNA, 25 bp, Artificial
  probe
  misc_feature (1)..(25): SEQ ID NO: 1919; WAN024CX6_at; Start 335; Stop 359
tacgaaataaacttcatatcatgct

SEQ ID NO: 136945 - DNA, 25 bp, Artificial
  probe
  misc_feature (1)..(25): SEQ ID NO: 1919; WAN024CX6_at; Start 54; Stop 78
ggtacaattactgatggaacagcca

SEQ ID NO: 136946 - DNA, 25 bp, Artificial
  probe
  misc_feature (1)..(25): SEQ ID NO: 1919; WAN024CX6_at; Start 34; Stop 58
cgaactattgaaaatgctatggtac

SEQ ID NO: 136947 - DNA, 25 bp, Artificial
  probe
  misc_feature (1)..(25): SEQ ID NO: 1919; WAN024CX6_at; Start 506; Stop 530
cagacttccttatgaaaatgcttgg

SEQ ID NO: 136948 - DNA, 25 bp, Artificial
  probe
  misc_feature (1)..(25): SEQ ID NO: 1919; WAN024CX6_at; Start 253; Stop 277
gaagtttttgaatatctagagtcag

SEQ ID NO: 136949 - DNA, 25 bp, Artificial
  probe
  misc_feature (1)..(25): SEQ ID NO: 1919; WAN024CX6_at; Start 141; Stop 165
tactcactataaggataagtatgat

SEQ ID NO: 136950 - DNA, 25 bp, Artificial
  probe
  misc_feature (1)..(25): SEQ ID NO: 1919; WAN024CX6_at; Start 430; Stop 454
tatctaactcatgcactttttggtg

SEQ ID NO: 136951 - DNA, 25 bp, Artificial
  probe
  misc_feature (1)..(25): SEQ ID NO: 1919; WAN024CX6_at; Start 69; Stop 93
ggaacagccatttgataaaatttct

SEQ ID NO: 136952 - DNA, 25 bp, Artificial
  probe
  misc_feature (1)..(25): SEQ ID NO: 1919; WAN024CX6_at; Start 2; Stop 26
tgcaagaaagtaacaaacgcttaaa

SEQ ID NO: 136953 - DNA, 25 bp, Artificial
  probe
  misc_feature (1)..(25): SEQ ID NO: 1919; WAN024CX6_at; Start 96; Stop 120
tgtcaaattagtagaaaaagccgga

SEQ ID NO: 136954 - DNA, 25 bp, Artificial
  probe
  misc_feature (1)..(25): SEQ ID NO: 1919; WAN024CX6_at; Start 420; Stop 444
tagtagcatctatctaactcatgca

SEQ ID NO: 136955 - DNA, 25 bp, Artificial
  probe
  misc_feature (1)..(25): SEQ ID NO: 1919; WAN024CX6_at; Start 19; Stop 43
cgcttaaaaacaaagcgaactattg

SEQ ID NO: 136956 - DNA, 25 bp, Artificial
  probe
  misc_feature (1)..(25): SEQ ID NO: 1919; WAN024CX6_at; Start 223; Stop 247
catgctcatcacaaaagagacgcta

SEQ ID NO: 136957 - DNA, 25 bp, Artificial
  probe
  misc_feature (1)..(25): SEQ ID NO: 1919; WAN024CX6_at; Start 409; Stop 433
gaattagaatatagtagcatctatc

SEQ ID NO: 136958 - DNA, 25 bp, Artificial
  probe
  misc_feature (1)..(25): SEQ ID NO: 1919; WAN024CX6_at; Start 371; Stop 395
tacaaaagcgatttatgcaactgaa

SEQ ID NO: 136959 - DNA, 25 bp, Artificial
  probe
  misc_feature (1)..(25): SEQ ID NO: 1919; WAN024CX6_at; Start 210; Stop 234
tatttttcaaaaacatgctcatcac

SEQ ID NO: 136960 - DNA, 25 bp, Artificial
  probe
  misc_feature (1)..(25): SEQ ID NO: 1919; WAN024CX6_at; Start 491; Stop 515
gttctcaagaaataacagacttcct

SEQ ID NO: 136961 - DNA, 25 bp, Artificial
  probe
  misc_feature (1)..(25): SEQ ID NO: 1919; WAN024CX6_at; Start 450; Stop 474
tggtgtctgccaaacttggattgca

SEQ ID NO: 136962 - DNA, 25 bp, Artificial
  probe
  misc_feature (1)..(25): SEQ ID NO: 1919; WAN024CX6_at; Start 42; Stop 66
tgaaaatgctatggtacaattactg

SEQ ID NO: 136963 - DNA, 25 bp, Artificial
  probe
  misc_feature (1)..(25): SEQ ID NO: 1919; WAN024CX6_at; Start 239; Stop 263
gagacgctattttagaagtttttga

SEQ ID NO: 136964 - DNA, 25 bp, Artificial
  probe
  misc_feature (1)..(25): SEQ ID NO: 1919; WAN024CX6_at; Start 460; Stop 484
caaacttggattgcacatggaaaaa

SEQ ID NO: 136965 - DNA, 25 bp, Artificial
  probe
  misc_feature (1)..(25): SEQ ID NO: 1919; WAN024CX6_at; Start 513; Stop 537
ccttatgaaaatgcttggtgataca

SEQ ID NO: 136966 - DNA, 25 bp, Artificial
  probe
  misc_feature (1)..(25): SEQ ID NO: 1919; WAN024CX6_at; Start 168; Stop 192
gattgagcactatcaaagcaagcta

SEQ ID NO: 136967 - DNA, 25 bp, Artificial
  probe
  misc_feature (1)..(25): SEQ ID NO: 1919; WAN024CX6_at; Start 358; Stop 382
cttagtacagatttacaaaagcgat

SEQ ID NO: 136968 - DNA, 25 bp, Artificial
  probe
  misc_feature (1)..(25): SEQ ID NO: 1919; WAN024CX6_at; Start 112; Stop 136
aaagccggaattagtcgttccagct

SEQ ID NO: 136969 - DNA, 25 bp, Artificial
  probe
  misc_feature (1)..(25): SEQ ID NO: 1919; WAN024CX6_at; Start 383; Stop 407
ttatgcaactgaatctaaataccac

SEQ ID NO: 136970 - DNA, 25 bp, Artificial
  probe
  misc_feature (1)..(25): SEQ ID NO: 1919; WAN024CX6_at; Start 439; Stop 463
catgcactttttggtgtctgccaaa

SEQ ID NO: 136971 - DNA, 25 bp, Artificial
  probe
  misc_feature (1)..(25): SEQ ID NO: 1919; WAN024CX6_at; Start 131; Stop 155
ccagcttctatactcactataagga

SEQ ID NO: 136972 - DNA, 25 bp, Artificial
  probe
  misc_feature (1)..(25): SEQ ID NO: 1919; WAN024CX6_at; Start 182; Stop 206
aaagcaagctattccatacatttga

SEQ ID NO: 136973 - DNA, 25 bp, Artificial
  probe
  misc_feature (1)..(25): SEQ ID NO: 1919; WAN024CX6_at; Start 301; Stop 325
tctgaaaatgggactaaagaaatcc

SEQ ID NO: 136974 - DNA, 25 bp, Artificial
  probe
  misc_feature (1)..(25): SEQ ID NO: 1919; WAN024CX6_at; Start 119; Stop 143
gaattagtcgttccagcttctatac

SEQ ID NO: 136975 - DNA, 25 bp, Artificial
  probe
  misc_feature (1)..(25): SEQ ID NO: 7141; WAN024CX7_at; Start 18; Stop 42
gctagtaacatctccttgtatctct

SEQ ID NO: 136976 - DNA, 25 bp, Artificial
  probe
  misc_feature (1)..(25): SEQ ID NO: 7141; WAN024CX7_at; Start 31; Stop 55
ccttgtatctctgttaatccacttg

SEQ ID NO: 136977 - DNA, 25 bp, Artificial
  probe
  misc_feature (1)..(25): SEQ ID NO: 7141; WAN024CX7_at; Start 43; Stop 67
gttaatccacttgacaatcctatca

SEQ ID NO: 136978 - DNA, 25 bp, Artificial
  probe
  misc_feature (1)..(25): SEQ ID NO: 7141; WAN024CX7_at; Start 28; Stop 52
tctccttgtatctctgttaatccac

SEQ ID NO: 136979 - DNA, 25 bp, Artificial
  probe
  misc_feature (1)..(25): SEQ ID NO: 7141; WAN024CX7_at; Start 26; Stop 50
catctccttgtatctctgttaatcc

SEQ ID NO: 136980 - DNA, 25 bp, Artificial
  probe
  misc_feature (1)..(25): SEQ ID NO: 7141; WAN024CX7_at; Start 33; Stop 57
ttgtatctctgttaatccacttgac

SEQ ID NO: 136981 - DNA, 25 bp, Artificial
  probe
  misc_feature (1)..(25): SEQ ID NO: 7141; WAN024CX7_at; Start 50; Stop 74
cacttgacaatcctatcaaagaagt

SEQ ID NO: 136982 - DNA, 25 bp, Artificial
  probe
  misc_feature (1)..(25): SEQ ID NO: 7141; WAN024CX7_at; Start 35; Stop 59
gtatctctgttaatccacttgacaa

SEQ ID NO: 136983 - DNA, 25 bp, Artificial
  probe
  misc_feature (1)..(25): SEQ ID NO: 7141; WAN024CX7_at; Start 12; Stop 36
taatttgctagtaacatctccttgt

SEQ ID NO: 136984 - DNA, 25 bp, Artificial
  probe
  misc_feature (1)..(25): SEQ ID NO: 7141; WAN024CX7_at; Start 17; Stop 41
tgctagtaacatctccttgtatctc

SEQ ID NO: 136985 - DNA, 25 bp, Artificial
  probe
  misc_feature (1)..(25): SEQ ID NO: 7141; WAN024CX7_at; Start 3; Stop 27
ggcaggaactaatttgctagtaaca

SEQ ID NO: 136986 - DNA, 25 bp, Artificial
  probe
  misc_feature (1)..(25): SEQ ID NO: 7141; WAN024CX7_at; Start 40; Stop 64
tctgttaatccacttgacaatccta

SEQ ID NO: 136987 - DNA, 25 bp, Artificial
  probe
  misc_feature (1)..(25): SEQ ID NO: 7141; WAN024CX7_at; Start 66; Stop 90
caaagaagtagaagtaataggtgat

SEQ ID NO: 136988 - DNA, 25 bp, Artificial
  probe
  misc_feature (1)..(25): SEQ ID NO: 7141; WAN024CX7_at; Start 52; Stop 76
cttgacaatcctatcaaagaagtag

SEQ ID NO: 136989 - DNA, 25 bp, Artificial
  probe
  misc_feature (1)..(25): SEQ ID NO: 7141; WAN024CX7_at; Start 2; Stop 26
tggcaggaactaatttgctagtaac

SEQ ID NO: 136990 - DNA, 25 bp, Artificial
  probe
  misc_feature (1)..(25): SEQ ID NO: 7141; WAN024CX7_at; Start 20; Stop 44
tagtaacatctccttgtatctctgt

SEQ ID NO: 136991 - DNA, 25 bp, Artificial
  probe
  misc_feature (1)..(25): SEQ ID NO: 7141; WAN024CX7_at; Start 54; Stop 78
tgacaatcctatcaaagaagtagaa

SEQ ID NO: 136992 - DNA, 25 bp, Artificial
  probe
  misc_feature (1)..(25): SEQ ID NO: 7141; WAN024CX7_at; Start 34; Stop 58
tgtatctctgttaatccacttgaca

SEQ ID NO: 136993 - DNA, 25 bp, Artificial
  probe
  misc_feature (1)..(25): SEQ ID NO: 7141; WAN024CX7_at; Start 38; Stop 62
tctctgttaatccacttgacaatcc

SEQ ID NO: 136994 - DNA, 25 bp, Artificial
  probe
  misc_feature (1)..(25): SEQ ID NO: 7141; WAN024CX7_at; Start 48; Stop 72
tccacttgacaatcctatcaaagaa

SEQ ID NO: 136995 - DNA, 25 bp, Artificial
  probe
  misc_feature (1)..(25): SEQ ID NO: 7141; WAN024CX7_at; Start 15; Stop 39
tttgctagtaacatctccttgtatc

SEQ ID NO: 136996 - DNA, 25 bp, Artificial
  probe
  misc_feature (1)..(25): SEQ ID NO: 7141; WAN024CX7_at; Start 63; Stop 87
tatcaaagaagtagaagtaataggt

SEQ ID NO: 136997 - DNA, 25 bp, Artificial
  probe
  misc_feature (1)..(25): SEQ ID NO: 7141; WAN024CX7_at; Start 55; Stop 79
gacaatcctatcaaagaagtagaag

SEQ ID NO: 136998 - DNA, 25 bp, Artificial
  probe
  misc_feature (1)..(25): SEQ ID NO: 7141; WAN024CX7_at; Start 1; Stop 25
ctggcaggaactaatttgctagtaa

SEQ ID NO: 136999 - DNA, 25 bp, Artificial
  probe
  misc_feature (1)..(25): SEQ ID NO: 7141; WAN024CX7_at; Start 60; Stop 84
tcctatcaaagaagtagaagtaata

SEQ ID NO: 137000 - DNA, 25 bp, Artificial
  probe
  misc_feature (1)..(25): SEQ ID NO: 7141; WAN024CX7_at; Start 5; Stop 29
caggaactaatttgctagtaacatc

SEQ ID NO: 137001 - DNA, 25 bp, Artificial
  probe
  misc_feature (1)..(25): SEQ ID NO: 7141; WAN024CX7_at; Start 42; Stop 66
tgttaatccacttgacaatcctatc

SEQ ID NO: 137002 - DNA, 25 bp, Artificial
  probe
  misc_feature (1)..(25): SEQ ID NO: 7141; WAN024CX7_at; Start 69; Stop 93
agaagtagaagtaataggtgatact

SEQ ID NO: 137003 - DNA, 25 bp, Artificial
  probe
  misc_feature (1)..(25): SEQ ID NO: 7141; WAN024CX7_at; Start 46; Stop 70
aatccacttgacaatcctatcaaag

SEQ ID NO: 137004 - DNA, 25 bp, Artificial
  probe
  misc_feature (1)..(25): SEQ ID NO: 7141; WAN024CX7_at; Start 22; Stop 46
gtaacatctccttgtatctctgtta

SEQ ID NO: 137005 - DNA, 25 bp, Artificial
  probe
  misc_feature (1)..(25): SEQ ID NO: 7141; WAN024CX7_at; Start 11; Stop 35
ctaatttgctagtaacatctccttg

SEQ ID NO: 137006 - DNA, 25 bp, Artificial
  probe
  misc_feature (1)..(25): SEQ ID NO: 7141; WAN024CX7_at; Start 8; Stop 32
gaactaatttgctagtaacatctcc

SEQ ID NO: 137007 - DNA, 25 bp, Artificial
  probe
  misc_feature (1)..(25): SEQ ID NO: 7141; WAN024CX7_at; Start 13; Stop 37
aatttgctagtaacatctccttgta

SEQ ID NO: 137008 - DNA, 25 bp, Artificial
  probe
  misc_feature (1)..(25): SEQ ID NO: 7141; WAN024CX7_at; Start 57; Stop 81
caatcctatcaaagaagtagaagta

SEQ ID NO: 137009 - DNA, 25 bp, Artificial
  probe
  misc_feature (1)..(25): SEQ ID NO: 1726; WAN024CX8_at; Start 1; Stop 25
atgatcgggatttctcttattccag

SEQ ID NO: 137010 - DNA, 25 bp, Artificial
  probe
  misc_feature (1)..(25): SEQ ID NO: 1726; WAN024CX8_at; Start 41; Stop 65
tatttttgtcatcaatgtgggatcc

SEQ ID NO: 137011 - DNA, 25 bp, Artificial
  probe
  misc_feature (1)..(25): SEQ ID NO: 1726; WAN024CX8_at; Start 118; Stop 142
gcttcctataatggtaatactatgg

SEQ ID NO: 137012 - DNA, 25 bp, Artificial
  probe
  misc_feature (1)..(25): SEQ ID NO: 1726; WAN024CX8_at; Start 749; Stop 773
tgacagcaggagttggttaactaat

SEQ ID NO: 137013 - DNA, 25 bp, Artificial
  probe
  misc_feature (1)..(25): SEQ ID NO: 1726; WAN024CX8_at; Start 573; Stop 597
tagcaaattagttcctgccagtcag

SEQ ID NO: 137014 - DNA, 25 bp, Artificial
  probe
  misc_feature (1)..(25): SEQ ID NO: 1726; WAN024CX8_at; Start 649; Stop 673
cagggcgcaagtcaactaagtgaaa

SEQ ID NO: 137015 - DNA, 25 bp, Artificial
  probe
  misc_feature (1)..(25): SEQ ID NO: 1726; WAN024CX8_at; Start 50; Stop 74
catcaatgtgggatccatatgggca

SEQ ID NO: 137016 - DNA, 25 bp, Artificial
  probe
  misc_feature (1)..(25): SEQ ID NO: 1726; WAN024CX8_at; Start 672; Stop 696
aaaaaatgccaccttgacaggtagt

SEQ ID NO: 137017 - DNA, 25 bp, Artificial
  probe
  misc_feature (1)..(25): SEQ ID NO: 1726; WAN024CX8_at; Start 196; Stop 220
cattttgtagatgaagaggaaggaa

SEQ ID NO: 137018 - DNA, 25 bp, Artificial
  probe
  misc_feature (1)..(25): SEQ ID NO: 1726; WAN024CX8_at; Start 639; Stop 663
taaagtttctcagggcgcaagtcaa

SEQ ID NO: 137019 - DNA, 25 bp, Artificial
  probe
  misc_feature (1)..(25): SEQ ID NO: 1726; WAN024CX8_at; Start 65; Stop 89
catatgggcaattgtctgacttacc

SEQ ID NO: 137020 - DNA, 25 bp, Artificial
  probe
  misc_feature (1)..(25): SEQ ID NO: 1726; WAN024CX8_at; Start 397; Stop 421
tcggctcagtcaattgtagctttag

SEQ ID NO: 137021 - DNA, 25 bp, Artificial
  probe
  misc_feature (1)..(25): SEQ ID NO: 1726; WAN024CX8_at; Start 328; Stop 352
tcattgacaagtgagcaacaaactg

SEQ ID NO: 137022 - DNA, 25 bp, Artificial
  probe
  misc_feature (1)..(25): SEQ ID NO: 1726; WAN024CX8_at; Start 708; Stop 732
agtttcaggctcaaacaccttgaca

SEQ ID NO: 137023 - DNA, 25 bp, Artificial
  probe
  misc_feature (1)..(25): SEQ ID NO: 1726; WAN024CX8_at; Start 73; Stop 97
caattgtctgacttacctgtggcag

SEQ ID NO: 137024 - DNA, 25 bp, Artificial
  probe
  misc_feature (1)..(25): SEQ ID NO: 1726; WAN024CX8_at; Start 625; Stop 649
actacaggtgttgataaagtttctc

SEQ ID NO: 137025 - DNA, 25 bp, Artificial
  probe
  misc_feature (1)..(25): SEQ ID NO: 1726; WAN024CX8_at; Start 252; Stop 276
ggtagtgactttaccaagtgattta

SEQ ID NO: 137026 - DNA, 25 bp, Artificial
  probe
  misc_feature (1)..(25): SEQ ID NO: 1726; WAN024CX8_at; Start 311; Stop 335
cgacagcagcttatcaatcattgac

SEQ ID NO: 137027 - DNA, 25 bp, Artificial
  probe
  misc_feature (1)..(25): SEQ ID NO: 1726; WAN024CX8_at; Start 380; Stop 404
caactgatagtattcaatcggctca

SEQ ID NO: 137028 - DNA, 25 bp, Artificial
  probe
  misc_feature (1)..(25): SEQ ID NO: 1726; WAN024CX8_at; Start 361; Stop 385
gattctgtatctcaaaattcaactg

SEQ ID NO: 137029 - DNA, 25 bp, Artificial
  probe
  misc_feature (1)..(25): SEQ ID NO: 1726; WAN024CX8_at; Start 528; Stop 552
gataggattgtcaagtggattaaca

SEQ ID NO: 137030 - DNA, 25 bp, Artificial
  probe
  misc_feature (1)..(25): SEQ ID NO: 1726; WAN024CX8_at; Start 539; Stop 563
caagtggattaacagagatacaagg

SEQ ID NO: 137031 - DNA, 25 bp, Artificial
  probe
  misc_feature (1)..(25): SEQ ID NO: 1726; WAN024CX8_at; Start 723; Stop 747
caccttgacacaaaaatcttctaga

SEQ ID NO: 137032 - DNA, 25 bp, Artificial
  probe
  misc_feature (1)..(25): SEQ ID NO: 1726; WAN024CX8_at; Start 739; Stop 763
tcttctagattgacagcaggagttg

SEQ ID NO: 137033 - DNA, 25 bp, Artificial
  probe
  misc_feature (1)..(25): SEQ ID NO: 1726; WAN024CX8_at; Start 700; Stop 724
gataaactagtttcaggctcaaaca

SEQ ID NO: 137034 - DNA, 25 bp, Artificial
  probe
  misc_feature (1)..(25): SEQ ID NO: 1726; WAN024CX8_at; Start 231; Stop 255
ggaagatggcgattactatatggta

SEQ ID NO: 137035 - DNA, 25 bp, Artificial
  probe
  misc_feature (1)..(25): SEQ ID NO: 1726; WAN024CX8_at; Start 86; Stop 110
tacctgtggcagttgtaaataatga

SEQ ID NO: 137036 - DNA, 25 bp, Artificial
  probe
  misc_feature (1)..(25): SEQ ID NO: 1726; WAN024CX8_at; Start 683; Stop 707
ccttgacaggtagtttggataaact

SEQ ID NO: 137037 - DNA, 25 bp, Artificial
  probe
  misc_feature (1)..(25): SEQ ID NO: 1726; WAN024CX8_at; Start 140; Stop 164
tggcaataggaaaagacatggtgtc

SEQ ID NO: 137038 - DNA, 25 bp, Artificial
  probe
  misc_feature (1)..(25): SEQ ID NO: 1726; WAN024CX8_at; Start 99; Stop 123
tgtaaataatgataaagaggcttcc

SEQ ID NO: 137039 - DNA, 25 bp, Artificial
  probe
  misc_feature (1)..(25): SEQ ID NO: 1726; WAN024CX8_at; Start 610; Stop 634
ggtgtaaacgcatatactacaggtg

SEQ ID NO: 137040 - DNA, 25 bp, Artificial
  probe
  misc_feature (1)..(25): SEQ ID NO: 1726; WAN024CX8_at; Start 154; Stop 178
gacatggtgtccaatttaaaagaaa

SEQ ID NO: 137041 - DNA, 25 bp, Artificial
  probe
  misc_feature (1)..(25): SEQ ID NO: 1726; WAN024CX8_at; Start 600; Stop 624
gattgcatcaggtgtaaacgcatat

SEQ ID NO: 137042 - DNA, 25 bp, Artificial
  probe
  misc_feature (1)..(25): SEQ ID NO: 1726; WAN024CX8_at; Start 513; Stop 537
tacttctacttctttgataggattg

SEQ ID NO: 137043 - DNA, 25 bp, Artificial
  probe
  misc_feature (1)..(25): SEQ ID NO: 5511; WAN024CX9_at; Start 315; Stop 339
ccgttgggcttggttgaaatcttga

SEQ ID NO: 137044 - DNA, 25 bp, Artificial
  probe
  misc_feature (1)..(25): SEQ ID NO: 5511; WAN024CX9_at; Start 38; Stop 62
caaagttaacttctggattggaaga

SEQ ID NO: 137045 - DNA, 25 bp, Artificial
  probe
  misc_feature (1)..(25): SEQ ID NO: 5511; WAN024CX9_at; Start 204; Stop 228
tgtaaatggaatcgcaatagctcct

SEQ ID NO: 137046 - DNA, 25 bp, Artificial
  probe
  misc_feature (1)..(25): SEQ ID NO: 5511; WAN024CX9_at; Start 131; Stop 155
caacagaatctaaaaatgcagagat

SEQ ID NO: 137047 - DNA, 25 bp, Artificial
  probe
  misc_feature (1)..(25): SEQ ID NO: 5511; WAN024CX9_at; Start 290; Stop 314
tgccttcaggacgtcatccagagag

SEQ ID NO: 137048 - DNA, 25 bp, Artificial
  probe
  misc_feature (1)..(25): SEQ ID NO: 5511; WAN024CX9_at; Start 91; Stop 115
caaggactaggtaatgctagtgatc

SEQ ID NO: 137049 - DNA, 25 bp, Artificial
  probe
  misc_feature (1)..(25): SEQ ID NO: 5511; WAN024CX9_at; Start 202; Stop 226
cctgtaaatggaatcgcaatagctc

SEQ ID NO: 137050 - DNA, 25 bp, Artificial
  probe
  misc_feature (1)..(25): SEQ ID NO: 5511; WAN024CX9_at; Start 217; Stop 241
gcaatagctccttatatgatatcag

SEQ ID NO: 137051 - DNA, 25 bp, Artificial
  probe
  misc_feature (1)..(25): SEQ ID NO: 5511; WAN024CX9_at; Start 269; Stop 293
caaatatgatatttgcgaaattgcc

SEQ ID NO: 137052 - DNA, 25 bp, Artificial
  probe
  misc_feature (1)..(25): SEQ ID NO: 5511; WAN024CX9_at; Start 57; Stop 81
ggaagatttacagacaggacttgct

SEQ ID NO: 137053 - DNA, 25 bp, Artificial
  probe
  misc_feature (1)..(25): SEQ ID NO: 5511; WAN024CX9_at; Start 148; Stop 172
gcagagattttgtcaaatccactca

SEQ ID NO: 137054 - DNA, 25 bp, Artificial
  probe
  misc_feature (1)..(25): SEQ ID NO: 5511; WAN024CX9_at; Start 61; Stop 85
gatttacagacaggacttgcttctt

SEQ ID NO: 137055 - DNA, 25 bp, Artificial
  probe
  misc_feature (1)..(25): SEQ ID NO: 5511; WAN024CX9_at; Start 53; Stop 77
gattggaagatttacagacaggact

SEQ ID NO: 137056 - DNA, 25 bp, Artificial
  probe
  misc_feature (1)..(25): SEQ ID NO: 5511; WAN024CX9_at; Start 226; Stop 250
ccttatatgatatcagttgctcttt

SEQ ID NO: 137057 - DNA, 25 bp, Artificial
  probe
  misc_feature (1)..(25): SEQ ID NO: 5511; WAN024CX9_at; Start 79; Stop 103
gcttctttaggacaaggactaggta

SEQ ID NO: 137058 - DNA, 25 bp, Artificial
  probe
  misc_feature (1)..(25): SEQ ID NO: 5511; WAN024CX9_at; Start 193; Stop 217
gatcaagttcctgtaaatggaatcg

SEQ ID NO: 137059 - DNA, 25 bp, Artificial
  probe
  misc_feature (1)..(25): SEQ ID NO: 5511; WAN024CX9_at; Start 112; Stop 136
gatcaactcaaatcagtatcaacag

SEQ ID NO: 137060 - DNA, 25 bp, Artificial
  probe
  misc_feature (1)..(25): SEQ ID NO: 5511; WAN024CX9_at; Start 84; Stop 108
tttaggacaaggactaggtaatgct

SEQ ID NO: 137061 - DNA, 25 bp, Artificial
  probe
  misc_feature (1)..(25): SEQ ID NO: 5511; WAN024CX9_at; Start 73; Stop 97
ggacttgcttctttaggacaaggac

SEQ ID NO: 137062 - DNA, 25 bp, Artificial
  probe
  misc_feature (1)..(25): SEQ ID NO: 5511; WAN024CX9_at; Start 127; Stop 151
gtatcaacagaatctaaaaatgcag

SEQ ID NO: 137063 - DNA, 25 bp, Artificial
  probe
  misc_feature (1)..(25): SEQ ID NO: 5511; WAN024CX9_at; Start 179; Stop 203
caaaaacagacaatgatcaagttcc

SEQ ID NO: 137064 - DNA, 25 bp, Artificial
  probe
  misc_feature (1)..(25): SEQ ID NO: 5511; WAN024CX9_at; Start 312; Stop 336
gagccgttgggcttggttgaaatct

SEQ ID NO: 137065 - DNA, 25 bp, Artificial
  probe
  misc_feature (1)..(25): SEQ ID NO: 5511; WAN024CX9_at; Start 17; Stop 41
ggaaactagcagaaggtggaacaaa

SEQ ID NO: 137066 - DNA, 25 bp, Artificial
  probe
  misc_feature (1)..(25): SEQ ID NO: 5511; WAN024CX9_at; Start 211; Stop 235
ggaatcgcaatagctccttatatga

SEQ ID NO: 137067 - DNA, 25 bp, Artificial
  probe
  misc_feature (1)..(25): SEQ ID NO: 5511; WAN024CX9_at; Start 287; Stop 311
aattgccttcaggacgtcatccaga

SEQ ID NO: 137068 - DNA, 25 bp, Artificial
  probe
  misc_feature (1)..(25): SEQ ID NO: 5511; WAN024CX9_at; Start 23; Stop 47
tagcagaaggtggaacaaagttaac

SEQ ID NO: 137069 - DNA, 25 bp, Artificial
  probe
  misc_feature (1)..(25): SEQ ID NO: 5511; WAN024CX9_at; Start 163; Stop 187
aatccactcaatctttcaaaaacag

SEQ ID NO: 137070 - DNA, 25 bp, Artificial
  probe
  misc_feature (1)..(25): SEQ ID NO: 5511; WAN024CX9_at; Start 254; Stop 278
ttgcagcaatatcaacaaatatgat

SEQ ID NO: 137071 - DNA, 25 bp, Artificial
  probe
  misc_feature (1)..(25): SEQ ID NO: 5511; WAN024CX9_at; Start 295; Stop 319
tcaggacgtcatccagagagccgtt

SEQ ID NO: 137072 - DNA, 25 bp, Artificial
  probe
  misc_feature (1)..(25): SEQ ID NO: 5511; WAN024CX9_at; Start 283; Stop 307
gcgaaattgccttcaggacgtcatc

SEQ ID NO: 137073 - DNA, 25 bp, Artificial
  probe
  misc_feature (1)..(25): SEQ ID NO: 5511; WAN024CX9_at; Start 278; Stop 302
tatttgcgaaattgccttcaggacg

SEQ ID NO: 137074 - DNA, 25 bp, Artificial
  probe
  misc_feature (1)..(25): SEQ ID NO: 5511; WAN024CX9_at; Start 105; Stop 129
tgctagtgatcaactcaaatcagta

SEQ ID NO: 137075 - DNA, 25 bp, Artificial
  probe
  misc_feature (1)..(25): SEQ ID NO: 5511; WAN024CX9_at; Start 301; Stop 325
cgtcatccagagagccgttgggctt

SEQ ID NO: 137076 - DNA, 25 bp, Artificial
  probe
  misc_feature (1)..(25): SEQ ID NO: 5511; WAN024CX9_at; Start 98; Stop 122
taggtaatgctagtgatcaactcaa

SEQ ID NO: 137077 - DNA, 25 bp, Artificial
  probe
  misc_feature (1)..(25): SEQ ID NO: 1434; WAN024CXA_at; Start 324; Stop 348
gcgaaatccaacagtcaagacagag

SEQ ID NO: 137078 - DNA, 25 bp, Artificial
  probe
  misc_feature (1)..(25): SEQ ID NO: 1434; WAN024CXA_at; Start 177; Stop 201
tgtagagtctatcggaaatgtggct

SEQ ID NO: 137079 - DNA, 25 bp, Artificial
  probe
  misc_feature (1)..(25): SEQ ID NO: 1434; WAN024CXA_at; Start 939; Stop 963
tcaaaaaggtagtgaaagagcgcgt

SEQ ID NO: 137080 - DNA, 25 bp, Artificial
  probe
  misc_feature (1)..(25): SEQ ID NO: 1434; WAN024CXA_at; Start 447; Stop 471
tcctgttgggacagatcagaaacca

SEQ ID NO: 137081 - DNA, 25 bp, Artificial
  probe
  misc_feature (1)..(25): SEQ ID NO: 1434; WAN024CXA_at; Start 477; Stop 501
tgagcaaactcgtgaaattgttcgt

SEQ ID NO: 137082 - DNA, 25 bp, Artificial
  probe
  misc_feature (1)..(25): SEQ ID NO: 1434; WAN024CXA_at; Start 28; Stop 52
gaccgtccaacaggaaaattgcata

SEQ ID NO: 137083 - DNA, 25 bp, Artificial
  probe
  misc_feature (1)..(25): SEQ ID NO: 1434; WAN024CXA_at; Start 763; Stop 787
ggtcgtccagaagatgctcaagaaa

SEQ ID NO: 137084 - DNA, 25 bp, Artificial
  probe
  misc_feature (1)..(25): SEQ ID NO: 1434; WAN024CXA_at; Start 856; Stop 880
gaaatattagaacgtgaactgggtc

SEQ ID NO: 137085 - DNA, 25 bp, Artificial
  probe
  misc_feature (1)..(25): SEQ ID NO: 1434; WAN024CXA_at; Start 536; Stop 560
tagagccggaaggtatttatccaga

SEQ ID NO: 137086 - DNA, 25 bp, Artificial
  probe
  misc_feature (1)..(25): SEQ ID NO: 1434; WAN024CXA_at; Start 125; Stop 149
tcttggctgaccaacaagccttgac

SEQ ID NO: 137087 - DNA, 25 bp, Artificial
  probe
  misc_feature (1)..(25): SEQ ID NO: 1434; WAN024CXA_at; Start 112; Stop 136
gatatgtttgtgttcttggctgacc

SEQ ID NO: 137088 - DNA, 25 bp, Artificial
  probe
  misc_feature (1)..(25): SEQ ID NO: 1434; WAN024CXA_at; Start 139; Stop 163
caagccttgacagatcatgccaaag

SEQ ID NO: 137089 - DNA, 25 bp, Artificial
  probe
  misc_feature (1)..(25): SEQ ID NO: 1434; WAN024CXA_at; Start 12; Stop 36
cattattttaacaggagaccgtcca

SEQ ID NO: 137090 - DNA, 25 bp, Artificial
  probe
  misc_feature (1)..(25): SEQ ID NO: 1434; WAN024CXA_at; Start 871; Stop 895
gaactgggtcctattcgtgagcgcc

SEQ ID NO: 137091 - DNA, 25 bp, Artificial
  probe
  misc_feature (1)..(25): SEQ ID NO: 1434; WAN024CXA_at; Start 339; Stop 363
caagacagagatttctcagaaagga

SEQ ID NO: 137092 - DNA, 25 bp, Artificial
  probe
  misc_feature (1)..(25): SEQ ID NO: 1434; WAN024CXA_at; Start 826; Stop 850
ggtgatgtgaagaccaagcgttatc

SEQ ID NO: 137093 - DNA, 25 bp, Artificial
  probe
  misc_feature (1)..(25): SEQ ID NO: 1434; WAN024CXA_at; Start 640; Stop 664
gctgatgatgcggatactttgcgta

SEQ ID NO: 137094 - DNA, 25 bp, Artificial
  probe
  misc_feature (1)..(25): SEQ ID NO: 1434; WAN024CXA_at; Start 688; Stop 712
gatccagatcatatccgcgttgagg

SEQ ID NO: 137095 - DNA, 25 bp, Artificial
  probe
  misc_feature (1)..(25): SEQ ID NO: 1434; WAN024CXA_at; Start 519; Stop 543
taactgtgatgtcttggtagagccg

SEQ ID NO: 137096 - DNA, 25 bp, Artificial
  probe
  misc_feature (1)..(25): SEQ ID NO: 1434; WAN024CXA_at; Start 362; Stop 386
gatttggagaaagcattccgacagg

SEQ ID NO: 137097 - DNA, 25 bp, Artificial
  probe
  misc_feature (1)..(25): SEQ ID NO: 1434; WAN024CXA_at; Start 575; Stop 599
ggcgtttgcctggtttagatggaaa

SEQ ID NO: 137098 - DNA, 25 bp, Artificial
  probe
  misc_feature (1)..(25): SEQ ID NO: 1434; WAN024CXA_at; Start 392; Stop 416
tggtctatccaatcgctcaagcagc

SEQ ID NO: 137099 - DNA, 25 bp, Artificial
  probe
  misc_feature (1)..(25): SEQ ID NO: 1434; WAN024CXA_at; Start 249; Stop 273
tattcaaagccagattccagagttg

SEQ ID NO: 137100 - DNA, 25 bp, Artificial
  probe
  misc_feature (1)..(25): SEQ ID NO: 1434; WAN024CXA_at; Start 264; Stop 288
tccagagttggctgagttgtctatg

SEQ ID NO: 137101 - DNA, 25 bp, Artificial
  probe
  misc_feature (1)..(25): SEQ ID NO: 1434; WAN024CXA_at; Start 970; Stop 994
gcgggtcaaaccctatctgaggtaa

SEQ ID NO: 137102 - DNA, 25 bp, Artificial
  probe
  misc_feature (1)..(25): SEQ ID NO: 1434; WAN024CXA_at; Start 957; Stop 981
agcgcgtgaagttgcgggtcaaacc

SEQ ID NO: 137103 - DNA, 25 bp, Artificial
  probe
  misc_feature (1)..(25): SEQ ID NO: 1434; WAN024CXA_at; Start 702; Stop 726
ccgcgttgaggatccaggtaagatt

SEQ ID NO: 137104 - DNA, 25 bp, Artificial
  probe
  misc_feature (1)..(25): SEQ ID NO: 1434; WAN024CXA_at; Start 797; Stop 821
tgaaagaacgttatcaacgaggtgg

SEQ ID NO: 137105 - DNA, 25 bp, Artificial
  probe
  misc_feature (1)..(25): SEQ ID NO: 1434; WAN024CXA_at; Start 748; Stop 772
tatctagatgtttttggtcgtccag

SEQ ID NO: 137106 - DNA, 25 bp, Artificial
  probe
  misc_feature (1)..(25): SEQ ID NO: 1434; WAN024CXA_at; Start 157; Stop 181
gccaaagatcctcaaaccattgtag

SEQ ID NO: 137107 - DNA, 25 bp, Artificial
  probe
  misc_feature (1)..(25): SEQ ID NO: 1434; WAN024CXA_at; Start 308; Stop 332
cgttagcacgtttggagcgaaatcc

SEQ ID NO: 137108 - DNA, 25 bp, Artificial
  probe
  misc_feature (1)..(25): SEQ ID NO: 1434; WAN024CXA_at; Start 886; Stop 910
cgtgagcgccgtattgaatttgcta

SEQ ID NO: 137109 - DNA, 25 bp, Artificial
  probe
  misc_feature (1)..(25): SEQ ID NO: 1434; WAN024CXA_at; Start 416; Stop 440
ctgatatcacagctttcaaggctaa

SEQ ID NO: 137110 - DNA, 25 bp, Artificial
  probe
  misc_feature (1)..(25): SEQ ID NO: 1434; WAN024CXA_at; Start 378; Stop 402
tccgacaggattcttggtctatcca

SEQ ID NO: 137111 - DNA, 25 bp, Artificial
  probe
  misc_feature (1)..(25): SEQ ID NO: 7137; WAN024CXB_at; Start 47; Stop 71
tttgtttgtcagttatattgacaga

SEQ ID NO: 137112 - DNA, 25 bp, Artificial
  probe
  misc_feature (1)..(25): SEQ ID NO: 7137; WAN024CXB_at; Start 48; Stop 72
ttgtttgtcagttatattgacagaa

SEQ ID NO: 137113 - DNA, 25 bp, Artificial
  probe
  misc_feature (1)..(25): SEQ ID NO: 7137; WAN024CXB_at; Start 33; Stop 57
agattcggataagttttgtttgtca

SEQ ID NO: 137114 - DNA, 25 bp, Artificial
  probe
  misc_feature (1)..(25): SEQ ID NO: 7137; WAN024CXB_at; Start 34; Stop 58
gattcggataagttttgtttgtcag

SEQ ID NO: 137115 - DNA, 25 bp, Artificial
  probe
  misc_feature (1)..(25): SEQ ID NO: 7137; WAN024CXB_at; Start 22; Stop 46
gcaattttgaaagattcggataagt

SEQ ID NO: 137116 - DNA, 25 bp, Artificial
  probe
  misc_feature (1)..(25): SEQ ID NO: 7137; WAN024CXB_at; Start 14; Stop 38
tttctaaagcaattttgaaagattc

SEQ ID NO: 137117 - DNA, 25 bp, Artificial
  probe
  misc_feature (1)..(25): SEQ ID NO: 7137; WAN024CXB_at; Start 40; Stop 64
gataagttttgtttgtcagttatat

SEQ ID NO: 137118 - DNA, 25 bp, Artificial
  probe
  misc_feature (1)..(25): SEQ ID NO: 7137; WAN024CXB_at; Start 43; Stop 67
aagttttgtttgtcagttatattga

SEQ ID NO: 137119 - DNA, 25 bp, Artificial
  probe
  misc_feature (1)..(25): SEQ ID NO: 7137; WAN024CXB_at; Start 20; Stop 44
aagcaattttgaaagattcggataa

SEQ ID NO: 137120 - DNA, 25 bp, Artificial
  probe
  misc_feature (1)..(25): SEQ ID NO: 7137; WAN024CXB_at; Start 44; Stop 68
agttttgtttgtcagttatattgac

SEQ ID NO: 137121 - DNA, 25 bp, Artificial
  probe
  misc_feature (1)..(25): SEQ ID NO: 7137; WAN024CXB_at; Start 1; Stop 25
ctggatctacttttttctaaagcaa

SEQ ID NO: 137122 - DNA, 25 bp, Artificial
  probe
  misc_feature (1)..(25): SEQ ID NO: 7137; WAN024CXB_at; Start 49; Stop 73
tgtttgtcagttatattgacagaag

SEQ ID NO: 137123 - DNA, 25 bp, Artificial
  probe
  misc_feature (1)..(25): SEQ ID NO: 7137; WAN024CXB_at; Start 18; Stop 42
taaagcaattttgaaagattcggat

SEQ ID NO: 137124 - DNA, 25 bp, Artificial
  probe
  misc_feature (1)..(25): SEQ ID NO: 7137; WAN024CXB_at; Start 15; Stop 39
ttctaaagcaattttgaaagattcg

SEQ ID NO: 137125 - DNA, 25 bp, Artificial
  probe
  misc_feature (1)..(25): SEQ ID NO: 7137; WAN024CXB_at; Start 2; Stop 26
tggatctacttttttctaaagcaat

SEQ ID NO: 137126 - DNA, 25 bp, Artificial
  probe
  misc_feature (1)..(25): SEQ ID NO: 7137; WAN024CXB_at; Start 38; Stop 62
cggataagttttgtttgtcagttat

SEQ ID NO: 137127 - DNA, 25 bp, Artificial
  probe
  misc_feature (1)..(25): SEQ ID NO: 7137; WAN024CXB_at; Start 46; Stop 70
ttttgtttgtcagttatattgacag

SEQ ID NO: 137128 - DNA, 25 bp, Artificial
  probe
  misc_feature (1)..(25): SEQ ID NO: 7137; WAN024CXB_at; Start 41; Stop 65
ataagttttgtttgtcagttatatt

SEQ ID NO: 137129 - DNA, 25 bp, Artificial
  probe
  misc_feature (1)..(25): SEQ ID NO: 7137; WAN024CXB_at; Start 37; Stop 61
tcggataagttttgtttgtcagtta

SEQ ID NO: 137130 - DNA, 25 bp, Artificial
  probe
  misc_feature (1)..(25): SEQ ID NO: 7137; WAN024CXB_at; Start 45; Stop 69
gttttgtttgtcagttatattgaca

SEQ ID NO: 137131 - DNA, 25 bp, Artificial
  probe
  misc_feature (1)..(25): SEQ ID NO: 7137; WAN024CXB_at; Start 19; Stop 43
aaagcaattttgaaagattcggata

SEQ ID NO: 137132 - DNA, 25 bp, Artificial
  probe
  misc_feature (1)..(25): SEQ ID NO: 7137; WAN024CXB_at; Start 35; Stop 59
attcggataagttttgtttgtcagt

SEQ ID NO: 137133 - DNA, 25 bp, Artificial
  probe
  misc_feature (1)..(25): SEQ ID NO: 7137; WAN024CXB_at; Start 50; Stop 74
gtttgtcagttatattgacagaaga

SEQ ID NO: 137134 - DNA, 25 bp, Artificial
  probe
  misc_feature (1)..(25): SEQ ID NO: 7137; WAN024CXB_at; Start 39; Stop 63
ggataagttttgtttgtcagttata

SEQ ID NO: 137135 - DNA, 25 bp, Artificial
  probe
  misc_feature (1)..(25): SEQ ID NO: 7137; WAN024CXB_at; Start 42; Stop 66
taagttttgtttgtcagttatattg

SEQ ID NO: 137136 - DNA, 25 bp, Artificial
  probe
  misc_feature (1)..(25): SEQ ID NO: 7137; WAN024CXB_at; Start 23; Stop 47
caattttgaaagattcggataagtt

SEQ ID NO: 137137 - DNA, 25 bp, Artificial
  probe
  misc_feature (1)..(25): SEQ ID NO: 7137; WAN024CXB_at; Start 17; Stop 41
ctaaagcaattttgaaagattcgga

SEQ ID NO: 137138 - DNA, 25 bp, Artificial
  probe
  misc_feature (1)..(25): SEQ ID NO: 7137; WAN024CXB_at; Start 16; Stop 40
tctaaagcaattttgaaagattcgg

SEQ ID NO: 137139 - DNA, 25 bp, Artificial
  probe
  misc_feature (1)..(25): SEQ ID NO: 7137; WAN024CXB_at; Start 51; Stop 75
tttgtcagttatattgacagaagat

SEQ ID NO: 137140 - DNA, 25 bp, Artificial
  probe
  misc_feature (1)..(25): SEQ ID NO: 7137; WAN024CXB_at; Start 21; Stop 45
agcaattttgaaagattcggataag

SEQ ID NO: 137141 - DNA, 25 bp, Artificial
  probe
  misc_feature (1)..(25): SEQ ID NO: 7036; WAN024CXC_at; Start 53; Stop 77
gatgtggttataattggttaagtca

SEQ ID NO: 137142 - DNA, 25 bp, Artificial
  probe
  misc_feature (1)..(25): SEQ ID NO: 7036; WAN024CXC_at; Start 45; Stop 69
tgctttaggatgtggttataattgg

SEQ ID NO: 137143 - DNA, 25 bp, Artificial
  probe
  misc_feature (1)..(25): SEQ ID NO: 7036; WAN024CXC_at; Start 23; Stop 47
tgattttaggtaagtgtttctttgc

SEQ ID NO: 137144 - DNA, 25 bp, Artificial
  probe
  misc_feature (1)..(25): SEQ ID NO: 7036; WAN024CXC_at; Start 47; Stop 71
ctttaggatgtggttataattggtt

SEQ ID NO: 137145 - DNA, 25 bp, Artificial
  probe
  misc_feature (1)..(25): SEQ ID NO: 7036; WAN024CXC_at; Start 18; Stop 42
tgatctgattttaggtaagtgtttc

SEQ ID NO: 137146 - DNA, 25 bp, Artificial
  probe
  misc_feature (1)..(25): SEQ ID NO: 7036; WAN024CXC_at; Start 7; Stop 31
catctattttttgatctgattttag

SEQ ID NO: 137147 - DNA, 25 bp, Artificial
  probe
  misc_feature (1)..(25): SEQ ID NO: 7036; WAN024CXC_at; Start 52; Stop 76
ggatgtggttataattggttaagtc

SEQ ID NO: 137148 - DNA, 25 bp, Artificial
  probe
  misc_feature (1)..(25): SEQ ID NO: 7036; WAN024CXC_at; Start 36; Stop 60
gtgtttctttgctttaggatgtggt

SEQ ID NO: 137149 - DNA, 25 bp, Artificial
  probe
  misc_feature (1)..(25): SEQ ID NO: 7036; WAN024CXC_at; Start 37; Stop 61
tgtttctttgctttaggatgtggtt

SEQ ID NO: 137150 - DNA, 25 bp, Artificial
  probe
  misc_feature (1)..(25): SEQ ID NO: 7036; WAN024CXC_at; Start 66; Stop 90
ttggttaagtcagataagtagattg

SEQ ID NO: 137151 - DNA, 25 bp, Artificial
  probe
  misc_feature (1)..(25): SEQ ID NO: 7036; WAN024CXC_at; Start 39; Stop 63
tttctttgctttaggatgtggttat

SEQ ID NO: 137152 - DNA, 25 bp, Artificial
  probe
  misc_feature (1)..(25): SEQ ID NO: 7036; WAN024CXC_at; Start 63; Stop 87
taattggttaagtcagataagtaga

SEQ ID NO: 137153 - DNA, 25 bp, Artificial
  probe
  misc_feature (1)..(25): SEQ ID NO: 7036; WAN024CXC_at; Start 57; Stop 81
tggttataattggttaagtcagata

SEQ ID NO: 137154 - DNA, 25 bp, Artificial
  probe
  misc_feature (1)..(25): SEQ ID NO: 7036; WAN024CXC_at; Start 32; Stop 56
gtaagtgtttctttgctttaggatg

SEQ ID NO: 137155 - DNA, 25 bp, Artificial
  probe
  misc_feature (1)..(25): SEQ ID NO: 7036; WAN024CXC_at; Start 58; Stop 82
ggttataattggttaagtcagataa

SEQ ID NO: 137156 - DNA, 25 bp, Artificial
  probe
  misc_feature (1)..(25): SEQ ID NO: 7036; WAN024CXC_at; Start 33; Stop 57
taagtgtttctttgctttaggatgt

SEQ ID NO: 137157 - DNA, 25 bp, Artificial
  probe
  misc_feature (1)..(25): SEQ ID NO: 7036; WAN024CXC_at; Start 41; Stop 65
tctttgctttaggatgtggttataa

SEQ ID NO: 137158 - DNA, 25 bp, Artificial
  probe
  misc_feature (1)..(25): SEQ ID NO: 7036; WAN024CXC_at; Start 69; Stop 93
gttaagtcagataagtagattggct

SEQ ID NO: 137159 - DNA, 25 bp, Artificial
  probe
  misc_feature (1)..(25): SEQ ID NO: 7036; WAN024CXC_at; Start 1; Stop 25
atgtttcatctattttttgatctga

SEQ ID NO: 137160 - DNA, 25 bp, Artificial
  probe
  misc_feature (1)..(25): SEQ ID NO: 7036; WAN024CXC_at; Start 59; Stop 83
gttataattggttaagtcagataag

SEQ ID NO: 137161 - DNA, 25 bp, Artificial
  probe
  misc_feature (1)..(25): SEQ ID NO: 7036; WAN024CXC_at; Start 35; Stop 59
agtgtttctttgctttaggatgtgg

SEQ ID NO: 137162 - DNA, 25 bp, Artificial
  probe
  misc_feature (1)..(25): SEQ ID NO: 7036; WAN024CXC_at; Start 61; Stop 85
tataattggttaagtcagataagta

SEQ ID NO: 137163 - DNA, 25 bp, Artificial
  probe
  misc_feature (1)..(25): SEQ ID NO: 7036; WAN024CXC_at; Start 46; Stop 70
gctttaggatgtggttataattggt

SEQ ID NO: 137164 - DNA, 25 bp, Artificial
  probe
  misc_feature (1)..(25): SEQ ID NO: 7036; WAN024CXC_at; Start 55; Stop 79
tgtggttataattggttaagtcaga

SEQ ID NO: 137165 - DNA, 25 bp, Artificial
  probe
  misc_feature (1)..(25): SEQ ID NO: 7036; WAN024CXC_at; Start 19; Stop 43
gatctgattttaggtaagtgtttct

SEQ ID NO: 137166 - DNA, 25 bp, Artificial
  probe
  misc_feature (1)..(25): SEQ ID NO: 7036; WAN024CXC_at; Start 42; Stop 66
ctttgctttaggatgtggttataat

SEQ ID NO: 137167 - DNA, 25 bp, Artificial
  probe
  misc_feature (1)..(25): SEQ ID NO: 7036; WAN024CXC_at; Start 38; Stop 62
gtttctttgctttaggatgtggtta

SEQ ID NO: 137168 - DNA, 25 bp, Artificial
  probe
  misc_feature (1)..(25): SEQ ID NO: 7036; WAN024CXC_at; Start 40; Stop 64
ttctttgctttaggatgtggttata

SEQ ID NO: 137169 - DNA, 25 bp, Artificial
  probe
  misc_feature (1)..(25): SEQ ID NO: 7036; WAN024CXC_at; Start 64; Stop 88
aattggttaagtcagataagtagat

SEQ ID NO: 137170 - DNA, 25 bp, Artificial
  probe
  misc_feature (1)..(25): SEQ ID NO: 7036; WAN024CXC_at; Start 68; Stop 92
ggttaagtcagataagtagattggc

SEQ ID NO: 137171 - DNA, 25 bp, Artificial
  probe
  misc_feature (1)..(25): SEQ ID NO: 7036; WAN024CXC_at; Start 67; Stop 91
tggttaagtcagataagtagattgg

SEQ ID NO: 137172 - DNA, 25 bp, Artificial
  probe
  misc_feature (1)..(25): SEQ ID NO: 7036; WAN024CXC_at; Start 56; Stop 80
gtggttataattggttaagtcagat

SEQ ID NO: 137173 - DNA, 25 bp, Artificial
  probe
  misc_feature (1)..(25): SEQ ID NO: 7036; WAN024CXC_at; Start 50; Stop 74
taggatgtggttataattggttaag

SEQ ID NO: 137174 - DNA, 25 bp, Artificial
  probe
  misc_feature (1)..(25): SEQ ID NO: 7036; WAN024CXC_at; Start 34; Stop 58
aagtgtttctttgctttaggatgtg

SEQ ID NO: 137175 - DNA, 25 bp, Artificial
  probe
  misc_feature (1)..(25): SEQ ID NO: 2960; WAN024CXD_at; Start 459; Stop 483
taaccacatcctaaagcaaagaaac

SEQ ID NO: 137176 - DNA, 25 bp, Artificial
  probe
  misc_feature (1)..(25): SEQ ID NO: 2960; WAN024CXD_at; Start 683; Stop 707
taactgacaaacaaaacttatccga

SEQ ID NO: 137177 - DNA, 25 bp, Artificial
  probe
  misc_feature (1)..(25): SEQ ID NO: 2960; WAN024CXD_at; Start 803; Stop 827
taaatgggatggatgctagtttcgg

SEQ ID NO: 137178 - DNA, 25 bp, Artificial
  probe
  misc_feature (1)..(25): SEQ ID NO: 2960; WAN024CXD_at; Start 832; Stop 856
caaggtcaacatcgtagtctcgtcc

SEQ ID NO: 137179 - DNA, 25 bp, Artificial
  probe
  misc_feature (1)..(25): SEQ ID NO: 2960; WAN024CXD_at; Start 286; Stop 310
gttaatcacttaaaacaggcacgcc

SEQ ID NO: 137180 - DNA, 25 bp, Artificial
  probe
  misc_feature (1)..(25): SEQ ID NO: 2960; WAN024CXD_at; Start 372; Stop 396
taaaggagcaccttcgattcgacga

SEQ ID NO: 137181 - DNA, 25 bp, Artificial
  probe
  misc_feature (1)..(25): SEQ ID NO: 2960; WAN024CXD_at; Start 851; Stop 875
tcgtcctctcgataaaattagcaga

SEQ ID NO: 137182 - DNA, 25 bp, Artificial
  probe
  misc_feature (1)..(25): SEQ ID NO: 2960; WAN024CXD_at; Start 540; Stop 564
tcagctagttgattatggatgtcgt

SEQ ID NO: 137183 - DNA, 25 bp, Artificial
  probe
  misc_feature (1)..(25): SEQ ID NO: 2960; WAN024CXD_at; Start 1049; Stop 1073
taagtatcttcactattcaggatgg

SEQ ID NO: 137184 - DNA, 25 bp, Artificial
  probe
  misc_feature (1)..(25): SEQ ID NO: 2960; WAN024CXD_at; Start 639; Stop 663
tcagatcgaagagttgtcaatatcc

SEQ ID NO: 137185 - DNA, 25 bp, Artificial
  probe
  misc_feature (1)..(25): SEQ ID NO: 2960; WAN024CXD_at; Start 887; Stop 911
tggaaagcattaccacagaatctcc

SEQ ID NO: 137186 - DNA, 25 bp, Artificial
  probe
  misc_feature (1)..(25): SEQ ID NO: 2960; WAN024CXD_at; Start 594; Stop 618
aaaactagaatcatttgggcgtaag

SEQ ID NO: 137187 - DNA, 25 bp, Artificial
  probe
  misc_feature (1)..(25): SEQ ID NO: 2960; WAN024CXD_at; Start 3; Stop 27
gtggctacaacatctatctctcaag

SEQ ID NO: 137188 - DNA, 25 bp, Artificial
  probe
  misc_feature (1)..(25): SEQ ID NO: 2960; WAN024CXD_at; Start 301; Stop 325
caggcacgcctttcagattatgtag

SEQ ID NO: 137189 - DNA, 25 bp, Artificial
  probe
  misc_feature (1)..(25): SEQ ID NO: 2960; WAN024CXD_at; Start 235; Stop 259
ggatccattcccctagaaatcgaac

SEQ ID NO: 137190 - DNA, 25 bp, Artificial
  probe
  misc_feature (1)..(25): SEQ ID NO: 2960; WAN024CXD_at; Start 919; Stop 943
ctgcttgacgatgtgatgagtgaac

SEQ ID NO: 137191 - DNA, 25 bp, Artificial
  probe
  misc_feature (1)..(25): SEQ ID NO: 2960; WAN024CXD_at; Start 765; Stop 789
tggtgtcggtcctcatcgagatgac

SEQ ID NO: 137192 - DNA, 25 bp, Artificial
  probe
  misc_feature (1)..(25): SEQ ID NO: 2960; WAN024CXD_at; Start 1000; Stop 1024
tttatcacaacaacaagcttagacc

SEQ ID NO: 137193 - DNA, 25 bp, Artificial
  probe
  misc_feature (1)..(25): SEQ ID NO: 2960; WAN024CXD_at; Start 156; Stop 180
tcgaactcgaacagataaaaatctc

SEQ ID NO: 137194 - DNA, 25 bp, Artificial
  probe
  misc_feature (1)..(25): SEQ ID NO: 2960; WAN024CXD_at; Start 333; Stop 357
gaatgttgtcttatttgctcctgaa

SEQ ID NO: 137195 - DNA, 25 bp, Artificial
  probe
  misc_feature (1)..(25): SEQ ID NO: 2960; WAN024CXD_at; Start 625; Stop 649
tttgaactctctaatcagatcgaag

SEQ ID NO: 137196 - DNA, 25 bp, Artificial
  probe
  misc_feature (1)..(25): SEQ ID NO: 2960; WAN024CXD_at; Start 609; Stop 633
tgggcgtaagaaacattttgaactc

SEQ ID NO: 137197 - DNA, 25 bp, Artificial
  probe
  misc_feature (1)..(25): SEQ ID NO: 2960; WAN024CXD_at; Start 755; Stop 779
aaaagaatactggtgtcggtcctca

SEQ ID NO: 137198 - DNA, 25 bp, Artificial
  probe
  misc_feature (1)..(25): SEQ ID NO: 2960; WAN024CXD_at; Start 80; Stop 104
tctttttgggacgtaatgcacaagg

SEQ ID NO: 137199 - DNA, 25 bp, Artificial
  probe
  misc_feature (1)..(25): SEQ ID NO: 2960; WAN024CXD_at; Start 1019; Stop 1043
tagaccatcttcaaaatctgccaga

SEQ ID NO: 137200 - DNA, 25 bp, Artificial
  probe
  misc_feature (1)..(25): SEQ ID NO: 2960; WAN024CXD_at; Start 555; Stop 579
tggatgtcgtgtaatgaatcaccgc

SEQ ID NO: 137201 - DNA, 25 bp, Artificial
  probe
  misc_feature (1)..(25): SEQ ID NO: 2960; WAN024CXD_at; Start 936; Stop 960
gagtgaacttgacaacactagacag

SEQ ID NO: 137202 - DNA, 25 bp, Artificial
  probe
  misc_feature (1)..(25): SEQ ID NO: 2960; WAN024CXD_at; Start 398; Stop 422
aattcattgatatggaacttgggca

SEQ ID NO: 137203 - DNA, 25 bp, Artificial
  probe
  misc_feature (1)..(25): SEQ ID NO: 2960; WAN024CXD_at; Start 817; Stop 841
gctagtttcggaagccaaggtcaac

SEQ ID NO: 137204 - DNA, 25 bp, Artificial
  probe
  misc_feature (1)..(25): SEQ ID NO: 2960; WAN024CXD_at; Start 137; Stop 161
tagccttaacgcgtagtcatcgaac

SEQ ID NO: 137205 - DNA, 25 bp, Artificial
  probe
  misc_feature (1)..(25): SEQ ID NO: 2960; WAN024CXD_at; Start 871; Stop 895
gcagaaatcgaattaatggaaagca

SEQ ID NO: 137206 - DNA, 25 bp, Artificial
  probe
  misc_feature (1)..(25): SEQ ID NO: 2960; WAN024CXD_at; Start 103; Stop 127
ggaaaaacaaacatgttagaggcta

SEQ ID NO: 137207 - DNA, 25 bp, Artificial
  probe
  misc_feature (1)..(25): SEQ ID NO: 2960; WAN024CXD_at; Start 522; Stop 546
cctttctgtgttagatgatcagcta

SEQ ID NO: 137208 - DNA, 25 bp, Artificial
  probe
  misc_feature (1)..(25): SEQ ID NO: 2960; WAN024CXD_at; Start 196; Stop 220
gaacaacttcatctttcaggtctcg

SEQ ID NO: 137209 - DNA, 25 bp, Artificial
  probe
  misc_feature (1)..(25): SEQ ID NO: 2223; WAN024CXE_at; Start 177; Stop 201
ccctgacatgaacattgacatcttg

SEQ ID NO: 137210 - DNA, 25 bp, Artificial
  probe
  misc_feature (1)..(25): SEQ ID NO: 2223; WAN024CXE_at; Start 99; Stop 123
tgaacattctgtttactttaatagg

SEQ ID NO: 137211 - DNA, 25 bp, Artificial
  probe
  misc_feature (1)..(25): SEQ ID NO: 2223; WAN024CXE_at; Start 200; Stop 224
tgttgacacaacctacttctgaaga

SEQ ID NO: 137212 - DNA, 25 bp, Artificial
  probe
  misc_feature (1)..(25): SEQ ID NO: 2223; WAN024CXE_at; Start 343; Stop 367
caagctccacgattccctggtagat

SEQ ID NO: 137213 - DNA, 25 bp, Artificial
  probe
  misc_feature (1)..(25): SEQ ID NO: 2223; WAN024CXE_at; Start 257; Stop 281
aagaacggatcgctaaacttgtcaa

SEQ ID NO: 137214 - DNA, 25 bp, Artificial
  probe
  misc_feature (1)..(25): SEQ ID NO: 2223; WAN024CXE_at; Start 307; Stop 331
gacaaatcgaaacctgcttcatcac

SEQ ID NO: 137215 - DNA, 25 bp, Artificial
  probe
  misc_feature (1)..(25): SEQ ID NO: 2223; WAN024CXE_at; Start 303; Stop 327
aaaagacaaatcgaaacctgcttca

SEQ ID NO: 137216 - DNA, 25 bp, Artificial
  probe
  misc_feature (1)..(25): SEQ ID NO: 2223; WAN024CXE_at; Start 261; Stop 285
acggatcgctaaacttgtcaaaaag

SEQ ID NO: 137217 - DNA, 25 bp, Artificial
  probe
  misc_feature (1)..(25): SEQ ID NO: 2223; WAN024CXE_at; Start 71; Stop 95
gcggaggagctattaaatcatttct

SEQ ID NO: 137218 - DNA, 25 bp, Artificial
  probe
  misc_feature (1)..(25): SEQ ID NO: 2223; WAN024CXE_at; Start 267; Stop 291
cgctaaacttgtcaaaaagatgaat

SEQ ID NO: 137219 - DNA, 25 bp, Artificial
  probe
  misc_feature (1)..(25): SEQ ID NO: 2223; WAN024CXE_at; Start 65; Stop 89
cacatagcggaggagctattaaatc

SEQ ID NO: 137220 - DNA, 25 bp, Artificial
  probe
  misc_feature (1)..(25): SEQ ID NO: 2223; WAN024CXE_at; Start 226; Stop 250
caagatgaataccaagctgataaag

SEQ ID NO: 137221 - DNA, 25 bp, Artificial
  probe
  misc_feature (1)..(25): SEQ ID NO: 2223; WAN024CXE_at; Start 14; Stop 38
tatttgaagaatttattaccctcca

SEQ ID NO: 137222 - DNA, 25 bp, Artificial
  probe
  misc_feature (1)..(25): SEQ ID NO: 2223; WAN024CXE_at; Start 52; Stop 76
gaacttggaattacacatagcggag

SEQ ID NO: 137223 - DNA, 25 bp, Artificial
  probe
  misc_feature (1)..(25): SEQ ID NO: 2223; WAN024CXE_at; Start 85; Stop 109
aaatcatttctctctgaacattctg

SEQ ID NO: 137224 - DNA, 25 bp, Artificial
  probe
  misc_feature (1)..(25): SEQ ID NO: 2223; WAN024CXE_at; Start 231; Stop 255
tgaataccaagctgataaagttgaa

SEQ ID NO: 137225 - DNA, 25 bp, Artificial
  probe
  misc_feature (1)..(25): SEQ ID NO: 2223; WAN024CXE_at; Start 314; Stop 338
cgaaacctgcttcatcacctaaaag

SEQ ID NO: 137226 - DNA, 25 bp, Artificial
  probe
  misc_feature (1)..(25): SEQ ID NO: 2223; WAN024CXE_at; Start 48; Stop 72
caaagaacttggaattacacatagc

SEQ ID NO: 137227 - DNA, 25 bp, Artificial
  probe
  misc_feature (1)..(25): SEQ ID NO: 2223; WAN024CXE_at; Start 324; Stop 348
ttcatcacctaaaagccaacaagct

SEQ ID NO: 137228 - DNA, 25 bp, Artificial
  probe
  misc_feature (1)..(25): SEQ ID NO: 2223; WAN024CXE_at; Start 160; Stop 184
ggcgataaagttgacatccctgaca

SEQ ID NO: 137229 - DNA, 25 bp, Artificial
  probe
  misc_feature (1)..(25): SEQ ID NO: 2223; WAN024CXE_at; Start 243; Stop 267
tgataaagttgaaaaagaacggatc

SEQ ID NO: 137230 - DNA, 25 bp, Artificial
  probe
  misc_feature (1)..(25): SEQ ID NO: 2223; WAN024CXE_at; Start 220; Stop 244
gaagaacaagatgaataccaagctg

SEQ ID NO: 137231 - DNA, 25 bp, Artificial
  probe
  misc_feature (1)..(25): SEQ ID NO: 2223; WAN024CXE_at; Start 208; Stop 232
caacctacttctgaagaacaagatg

SEQ ID NO: 137232 - DNA, 25 bp, Artificial
  probe
  misc_feature (1)..(25): SEQ ID NO: 2223; WAN024CXE_at; Start 57; Stop 81
tggaattacacatagcggaggagct

SEQ ID NO: 137233 - DNA, 25 bp, Artificial
  probe
  misc_feature (1)..(25): SEQ ID NO: 2223; WAN024CXE_at; Start 333; Stop 357
taaaagccaacaagctccacgattc

SEQ ID NO: 137234 - DNA, 25 bp, Artificial
  probe
  misc_feature (1)..(25): SEQ ID NO: 2223; WAN024CXE_at; Start 19; Stop 43
gaagaatttattaccctccaagcac

SEQ ID NO: 137235 - DNA, 25 bp, Artificial
  probe
  misc_feature (1)..(25): SEQ ID NO: 2223; WAN024CXE_at; Start 340; Stop 364
caacaagctccacgattccctggta

SEQ ID NO: 137236 - DNA, 25 bp, Artificial
  probe
  misc_feature (1)..(25): SEQ ID NO: 2223; WAN024CXE_at; Start 350; Stop 374
cacgattccctggtagataactaat

SEQ ID NO: 137237 - DNA, 25 bp, Artificial
  probe
  misc_feature (1)..(25): SEQ ID NO: 2223; WAN024CXE_at; Start 155; Stop 179
gtattggcgataaagttgacatccc

SEQ ID NO: 137238 - DNA, 25 bp, Artificial
  probe
  misc_feature (1)..(25): SEQ ID NO: 2223; WAN024CXE_at; Start 186; Stop 210
gaacattgacatcttgttgacacaa

SEQ ID NO: 137239 - DNA, 25 bp, Artificial
  probe
  misc_feature (1)..(25): SEQ ID NO: 2223; WAN024CXE_at; Start 172; Stop 196
gacatccctgacatgaacattgaca

SEQ ID NO: 137240 - DNA, 25 bp, Artificial
  probe
  misc_feature (1)..(25): SEQ ID NO: 2223; WAN024CXE_at; Start 278; Stop 302
tcaaaaagatgaataagggagttaa

SEQ ID NO: 137241 - DNA, 25 bp, Artificial
  probe
  misc_feature (1)..(25): SEQ ID NO: 2223; WAN024CXE_at; Start 165; Stop 189
taaagttgacatccctgacatgaac

SEQ ID NO: 137242 - DNA, 25 bp, Artificial
  probe
  misc_feature (1)..(25): SEQ ID NO: 2223; WAN024CXE_at; Start 151; Stop 175
cttcgtattggcgataaagttgaca

SEQ ID NO: 137243 - DNA, 25 bp, Artificial
  probe
  misc_feature (1)..(25): SEQ ID NO: 642; WAN024CXF_at; Start 415; Stop 439
ttcttgctattacattggactttgc

SEQ ID NO: 137244 - DNA, 25 bp, Artificial
  probe
  misc_feature (1)..(25): SEQ ID NO: 642; WAN024CXF_at; Start 287; Stop 311
cagtgattatctgtcgtgagttagc

SEQ ID NO: 137245 - DNA, 25 bp, Artificial
  probe
  misc_feature (1)..(25): SEQ ID NO: 642; WAN024CXF_at; Start 467; Stop 491
tatttttcactatctactctggcta

SEQ ID NO: 137246 - DNA, 25 bp, Artificial
  probe
  misc_feature (1)..(25): SEQ ID NO: 642; WAN024CXF_at; Start 74; Stop 98
taacgataggaaattcgatagagag

SEQ ID NO: 137247 - DNA, 25 bp, Artificial
  probe
  misc_feature (1)..(25): SEQ ID NO: 642; WAN024CXF_at; Start 481; Stop 505
tactctggctatgactatttcaagg

SEQ ID NO: 137248 - DNA, 25 bp, Artificial
  probe
  misc_feature (1)..(25): SEQ ID NO: 642; WAN024CXF_at; Start 32; Stop 56
caataggtcgaattctctttatacc

SEQ ID NO: 137249 - DNA, 25 bp, Artificial
  probe
  misc_feature (1)..(25): SEQ ID NO: 642; WAN024CXF_at; Start 151; Stop 175
gatggatatttagctcgtaaatgga

SEQ ID NO: 137250 - DNA, 25 bp, Artificial
  probe
  misc_feature (1)..(25): SEQ ID NO: 642; WAN024CXF_at; Start 96; Stop 120
gagtcatatagttgcagctattatc

SEQ ID NO: 137251 - DNA, 25 bp, Artificial
  probe
  misc_feature (1)..(25): SEQ ID NO: 642; WAN024CXF_at; Start 489; Stop 513
ctatgactatttcaagggtagtgcc

SEQ ID NO: 137252 - DNA, 25 bp, Artificial
  probe
  misc_feature (1)..(25): SEQ ID NO: 642; WAN024CXF_at; Start 264; Stop 288
tatggctccggcttggattgttgca

SEQ ID NO: 137253 - DNA, 25 bp, Artificial
  probe
  misc_feature (1)..(25): SEQ ID NO: 642; WAN024CXF_at; Start 132; Stop 156
cagtattaccgactatttagatgga

SEQ ID NO: 137254 - DNA, 25 bp, Artificial
  probe
  misc_feature (1)..(25): SEQ ID NO: 642; WAN024CXF_at; Start 346; Stop 370
ggtggaacaattttagcagcagcaa

SEQ ID NO: 137255 - DNA, 25 bp, Artificial
  probe
  misc_feature (1)..(25): SEQ ID NO: 642; WAN024CXF_at; Start 17; Stop 41
ttcccaatctcttaacaataggtcg

SEQ ID NO: 137256 - DNA, 25 bp, Artificial
  probe
  misc_feature (1)..(25): SEQ ID NO: 642; WAN024CXF_at; Start 89; Stop 113
cgatagagagtcatatagttgcagc

SEQ ID NO: 137257 - DNA, 25 bp, Artificial
  probe
  misc_feature (1)..(25): SEQ ID NO: 642; WAN024CXF_at; Start 271; Stop 295
ccggcttggattgttgcagtgatta

SEQ ID NO: 137258 - DNA, 25 bp, Artificial
  probe
  misc_feature (1)..(25): SEQ ID NO: 642; WAN024CXF_at; Start 192; Stop 216
tggtaaatttgcagatcctatggcg

SEQ ID NO: 137259 - DNA, 25 bp, Artificial
  probe
  misc_feature (1)..(25): SEQ ID NO: 642; WAN024CXF_at; Start 234; Stop 258
gtcggcttttattatgttgattgag

SEQ ID NO: 137260 - DNA, 25 bp, Artificial
  probe
  misc_feature (1)..(25): SEQ ID NO: 642; WAN024CXF_at; Start 161; Stop 185
tagctcgtaaatggaatgtggtcag

SEQ ID NO: 137261 - DNA, 25 bp, Artificial
  probe
  misc_feature (1)..(25): SEQ ID NO: 642; WAN024CXF_at; Start 427; Stop 451
cattggactttgcttggtcaagttc

SEQ ID NO: 137262 - DNA, 25 bp, Artificial
  probe
  misc_feature (1)..(25): SEQ ID NO: 642; WAN024CXF_at; Start 112; Stop 136
gctattatctttgctgttgccagta

SEQ ID NO: 137263 - DNA, 25 bp, Artificial
  probe
  misc_feature (1)..(25): SEQ ID NO: 642; WAN024CXF_at; Start 383; Stop 407
ttaaaacttttagtcagatgtttgc

SEQ ID NO: 137264 - DNA, 25 bp, Artificial
  probe
  misc_feature (1)..(25): SEQ ID NO: 642; WAN024CXF_at; Start 354; Stop 378
aattttagcagcagcaatgcctgga

SEQ ID NO: 137265 - DNA, 25 bp, Artificial
  probe
  misc_feature (1)..(25): SEQ ID NO: 642; WAN024CXF_at; Start 327; Stop 351
gcttttattggttgaaactggtgga

SEQ ID NO: 137266 - DNA, 25 bp, Artificial
  probe
  misc_feature (1)..(25): SEQ ID NO: 642; WAN024CXF_at; Start 251; Stop 275
tgattgagttaggtatggctccggc

SEQ ID NO: 137267 - DNA, 25 bp, Artificial
  probe
  misc_feature (1)..(25): SEQ ID NO: 642; WAN024CXF_at; Start 173; Stop 197
ggaatgtggtcagtaattttggtaa

SEQ ID NO: 137268 - DNA, 25 bp, Artificial
  probe
  misc_feature (1)..(25): SEQ ID NO: 642; WAN024CXF_at; Start 338; Stop 362
ttgaaactggtggaacaattttagc

SEQ ID NO: 137269 - DNA, 25 bp, Artificial
  probe
  misc_feature (1)..(25): SEQ ID NO: 642; WAN024CXF_at; Start 205; Stop 229
gatcctatggcggataagttactag

SEQ ID NO: 137270 - DNA, 25 bp, Artificial
  probe
  misc_feature (1)..(25): SEQ ID NO: 642; WAN024CXF_at; Start 501; Stop 525
caagggtagtgcctatgtatttaaa

SEQ ID NO: 137271 - DNA, 25 bp, Artificial
  probe
  misc_feature (1)..(25): SEQ ID NO: 642; WAN024CXF_at; Start 364; Stop 388
gcagcaatgcctggaaaaattaaaa

SEQ ID NO: 137272 - DNA, 25 bp, Artificial
  probe
  misc_feature (1)..(25): SEQ ID NO: 642; WAN024CXF_at; Start 294; Stop 318
tatctgtcgtgagttagctgtgaca

SEQ ID NO: 137273 - DNA, 25 bp, Artificial
  probe
  misc_feature (1)..(25): SEQ ID NO: 642; WAN024CXF_at; Start 442; Stop 466
ggtcaagttctactttatgtagcct

SEQ ID NO: 137274 - DNA, 25 bp, Artificial
  probe
  misc_feature (1)..(25): SEQ ID NO: 642; WAN024CXF_at; Start 512; Stop 536
cctatgtatttaaagggacatttgg

SEQ ID NO: 137275 - DNA, 25 bp, Artificial
  probe
  misc_feature (1)..(25): SEQ ID NO: 642; WAN024CXF_at; Start 217; Stop 241
gataagttactagttatgtcggctt

SEQ ID NO: 137276 - DNA, 25 bp, Artificial
  probe
  misc_feature (1)..(25): SEQ ID NO: 642; WAN024CXF_at; Start 123; Stop 147
tgctgttgccagtattaccgactat

SEQ ID NO: 137277 - DNA, 25 bp, Artificial
  probe
  misc_feature (1)..(25): SEQ ID NO: 950; WAN024CXG_at; Start 799; Stop 823
ctagaggataagctatgggaattgc

SEQ ID NO: 137278 - DNA, 25 bp, Artificial
  probe
  misc_feature (1)..(25): SEQ ID NO: 950; WAN024CXG_at; Start 155; Stop 179
taattgatggcttactggaagcaga

SEQ ID NO: 137279 - DNA, 25 bp, Artificial
  probe
  misc_feature (1)..(25): SEQ ID NO: 950; WAN024CXG_at; Start 36; Stop 60
tcgctataaagaaaatcagaactac

SEQ ID NO: 137280 - DNA, 25 bp, Artificial
  probe
  misc_feature (1)..(25): SEQ ID NO: 950; WAN024CXG_at; Start 100; Stop 124
gaatggctttcgattgtagggcata

SEQ ID NO: 137281 - DNA, 25 bp, Artificial
  probe
  misc_feature (1)..(25): SEQ ID NO: 950; WAN024CXG_at; Start 322; Stop 346
gaaaatcagggactttctcgtcaag

SEQ ID NO: 137282 - DNA, 25 bp, Artificial
  probe
  misc_feature (1)..(25): SEQ ID NO: 950; WAN024CXG_at; Start 255; Stop 279
ggtttttcaaaatccagacaatcaa

SEQ ID NO: 137283 - DNA, 25 bp, Artificial
  probe
  misc_feature (1)..(25): SEQ ID NO: 950; WAN024CXG_at; Start 607; Stop 631
gaagtcgccatgagtgatcgcgtat

SEQ ID NO: 137284 - DNA, 25 bp, Artificial
  probe
  misc_feature (1)..(25): SEQ ID NO: 950; WAN024CXG_at; Start 488; Stop 512
tcttagatgaagcaacgagtatgtt

SEQ ID NO: 137285 - DNA, 25 bp, Artificial
  probe
  misc_feature (1)..(25): SEQ ID NO: 950; WAN024CXG_at; Start 195; Stop 219
aattgatggccaacgtttgactgag

SEQ ID NO: 137286 - DNA, 25 bp, Artificial
  probe
  misc_feature (1)..(25): SEQ ID NO: 950; WAN024CXG_at; Start 119; Stop 143
ggcataatggtagtggtaaatcaac

SEQ ID NO: 137287 - DNA, 25 bp, Artificial
  probe
  misc_feature (1)..(25): SEQ ID NO: 950; WAN024CXG_at; Start 524; Stop 548
ggcgtagagaacttattgggacagt

SEQ ID NO: 137288 - DNA, 25 bp, Artificial
  probe
  misc_feature (1)..(25): SEQ ID NO: 950; WAN024CXG_at; Start 396; Stop 420
ctttaaaaagagagagccagcgcgt

SEQ ID NO: 137289 - DNA, 25 bp, Artificial
  probe
  misc_feature (1)..(25): SEQ ID NO: 950; WAN024CXG_at; Start 287; Stop 311
gagcgactgttgaagatgatgttgc

SEQ ID NO: 137290 - DNA, 25 bp, Artificial
  probe
  misc_feature (1)..(25): SEQ ID NO: 950; WAN024CXG_at; Start 439; Stop 463
caacgtgtggccattgcaggtgttg

SEQ ID NO: 137291 - DNA, 25 bp, Artificial
  probe
  misc_feature (1)..(25): SEQ ID NO: 950; WAN024CXG_at; Start 537; Stop 561
tattgggacagtaaaaggaattcga

SEQ ID NO: 137292 - DNA, 25 bp, Artificial
  probe
  misc_feature (1)..(25): SEQ ID NO: 950; WAN024CXG_at; Start 231; Stop 255
gaatatacgtcgtcaaatcggtatg

SEQ ID NO: 137293 - DNA, 25 bp, Artificial
  probe
  misc_feature (1)..(25): SEQ ID NO: 950; WAN024CXG_at; Start 372; Stop 396
tctggctttagttggcatgttggac

SEQ ID NO: 137294 - DNA, 25 bp, Artificial
  probe
  misc_feature (1)..(25): SEQ ID NO: 950; WAN024CXG_at; Start 739; Stop 763
aaaaaatctttgagccagaatggct

SEQ ID NO: 137295 - DNA, 25 bp, Artificial
  probe
  misc_feature (1)..(25): SEQ ID NO: 950; WAN024CXG_at; Start 271; Stop 295
gacaatcaatttgttggagcgactg

SEQ ID NO: 137296 - DNA, 25 bp, Artificial
  probe
  misc_feature (1)..(25): SEQ ID NO: 950; WAN024CXG_at; Start 753; Stop 777
ccagaatggctatgatttacctgaa

SEQ ID NO: 137297 - DNA, 25 bp, Artificial
  probe
  misc_feature (1)..(25): SEQ ID NO: 950; WAN024CXG_at; Start 185; Stop 209
gagagattgtaattgatggccaacg

SEQ ID NO: 137298 - DNA, 25 bp, Artificial
  probe
  misc_feature (1)..(25): SEQ ID NO: 950; WAN024CXG_at; Start 340; Stop 364
cgtcaagaaatgaaaaagagagtgg

SEQ ID NO: 137299 - DNA, 25 bp, Artificial
  probe
  misc_feature (1)..(25): SEQ ID NO: 950; WAN024CXG_at; Start 52; Stop 76
cagaactactacgatgtgaaggata

SEQ ID NO: 137300 - DNA, 25 bp, Artificial
  probe
  misc_feature (1)..(25): SEQ ID NO: 950; WAN024CXG_at; Start 68; Stop 92
tgaaggatattacgtttcacgtgaa

SEQ ID NO: 137301 - DNA, 25 bp, Artificial
  probe
  misc_feature (1)..(25): SEQ ID NO: 950; WAN024CXG_at; Start 671; Stop 695
caagggagcttttctctcgaaatga

SEQ ID NO: 137302 - DNA, 25 bp, Artificial
  probe
  misc_feature (1)..(25): SEQ ID NO: 950; WAN024CXG_at; Start 595; Stop 619
catgatttggaagaagtcgccatga

SEQ ID NO: 137303 - DNA, 25 bp, Artificial
  probe
  misc_feature (1)..(25): SEQ ID NO: 950; WAN024CXG_at; Start 357; Stop 381
gagagtggaagaagctctggcttta

SEQ ID NO: 137304 - DNA, 25 bp, Artificial
  probe
  misc_feature (1)..(25): SEQ ID NO: 950; WAN024CXG_at; Start 781; Stop 805
tatttgacagaaagtgagctagagg

SEQ ID NO: 137305 - DNA, 25 bp, Artificial
  probe
  misc_feature (1)..(25): SEQ ID NO: 950; WAN024CXG_at; Start 423; Stop 447
atcaggtggccaaaagcaacgtgtg

SEQ ID NO: 137306 - DNA, 25 bp, Artificial
  probe
  misc_feature (1)..(25): SEQ ID NO: 950; WAN024CXG_at; Start 85; Stop 109
cacgtgaaacgtggagaatggcttt

SEQ ID NO: 137307 - DNA, 25 bp, Artificial
  probe
  misc_feature (1)..(25): SEQ ID NO: 950; WAN024CXG_at; Start 454; Stop 478
gcaggtgttgtagccctaagaccag

SEQ ID NO: 137308 - DNA, 25 bp, Artificial
  probe
  misc_feature (1)..(25): SEQ ID NO: 950; WAN024CXG_at; Start 655; Stop 679
gaatcaactagtagtccaagggagc

SEQ ID NO: 137309 - DNA, 25 bp, Artificial
  probe
  misc_feature (1)..(25): SEQ ID NO: 950; WAN024CXG_at; Start 622; Stop 646
gatcgcgtattggtcatgaaaaaag

SEQ ID NO: 137310 - DNA, 25 bp, Artificial
  probe
  misc_feature (1)..(25): SEQ ID NO: 950; WAN024CXG_at; Start 698; Stop 722
tagatcaaattggattagacgatcc

SEQ ID NO: 137311 - DNA, 25 bp, Artificial
  probe
  misc_feature (1)..(25): SEQ ID NO: 2173; WAN024CXH_at; Start 70; Stop 94
tattggaaacagaggccggtaagcc

SEQ ID NO: 137312 - DNA, 25 bp, Artificial
  probe
  misc_feature (1)..(25): SEQ ID NO: 2173; WAN024CXH_at; Start 17; Stop 41
taccaaatagagagcctgatacatc

SEQ ID NO: 137313 - DNA, 25 bp, Artificial
  probe
  misc_feature (1)..(25): SEQ ID NO: 2173; WAN024CXH_at; Start 111; Stop 135
gaaccatcgctttaatcggcaaact

SEQ ID NO: 137314 - DNA, 25 bp, Artificial
  probe
  misc_feature (1)..(25): SEQ ID NO: 2173; WAN024CXH_at; Start 261; Stop 285
caccagcttgcccaatacaaaggac

SEQ ID NO: 137315 - DNA, 25 bp, Artificial
  probe
  misc_feature (1)..(25): SEQ ID NO: 2173; WAN024CXH_at; Start 156; Stop 180
catctgggcgaatgggacggtcaat

SEQ ID NO: 137316 - DNA, 25 bp, Artificial
  probe
  misc_feature (1)..(25): SEQ ID NO: 2173; WAN024CXH_at; Start 40; Stop 64
tcaaatggctgcagacaaaagtccc

SEQ ID NO: 137317 - DNA, 25 bp, Artificial
  probe
  misc_feature (1)..(25): SEQ ID NO: 2173; WAN024CXH_at; Start 278; Stop 302
caaaggacaaagtcaggttgataac

SEQ ID NO: 137318 - DNA, 25 bp, Artificial
  probe
  misc_feature (1)..(25): SEQ ID NO: 2173; WAN024CXH_at; Start 24; Stop 48
tagagagcctgatacatcaaatggc

SEQ ID NO: 137319 - DNA, 25 bp, Artificial
  probe
  misc_feature (1)..(25): SEQ ID NO: 2173; WAN024CXH_at; Start 332; Stop 356
gatttgtgaaaaactgtcggcacct

SEQ ID NO: 137320 - DNA, 25 bp, Artificial
  probe
  misc_feature (1)..(25): SEQ ID NO: 2173; WAN024CXH_at; Start 105; Stop 129
tagcttgaaccatcgctttaatcgg

SEQ ID NO: 137321 - DNA, 25 bp, Artificial
  probe
  misc_feature (1)..(25): SEQ ID NO: 2173; WAN024CXH_at; Start 164; Stop 188
cgaatgggacggtcaatcggttgat

SEQ ID NO: 137322 - DNA, 25 bp, Artificial
  probe
  misc_feature (1)..(25): SEQ ID NO: 2173; WAN024CXH_at; Start 57; Stop 81
aaagtccctgccgtattggaaacag

SEQ ID NO: 137323 - DNA, 25 bp, Artificial
  probe
  misc_feature (1)..(25): SEQ ID NO: 2173; WAN024CXH_at; Start 248; Stop 272
aaactagttcttccaccagcttgcc

SEQ ID NO: 137324 - DNA, 25 bp, Artificial
  probe
  misc_feature (1)..(25): SEQ ID NO: 2173; WAN024CXH_at; Start 171; Stop 195
gacggtcaatcggttgattatcttc

SEQ ID NO: 137325 - DNA, 25 bp, Artificial
  probe
  misc_feature (1)..(25): SEQ ID NO: 2173; WAN024CXH_at; Start 53; Stop 77
gacaaaagtccctgccgtattggaa

SEQ ID NO: 137326 - DNA, 25 bp, Artificial
  probe
  misc_feature (1)..(25): SEQ ID NO: 2173; WAN024CXH_at; Start 336; Stop 360
tgtgaaaaactgtcggcacctctag

SEQ ID NO: 137327 - DNA, 25 bp, Artificial
  probe
  misc_feature (1)..(25): SEQ ID NO: 2173; WAN024CXH_at; Start 270; Stop 294
gcccaatacaaaggacaaagtcagg

SEQ ID NO: 137328 - DNA, 25 bp, Artificial
  probe
  misc_feature (1)..(25): SEQ ID NO: 2173; WAN024CXH_at; Start 237; Stop 261
gttcaggtgtcaaactagttcttcc

SEQ ID NO: 137329 - DNA, 25 bp, Artificial
  probe
  misc_feature (1)..(25): SEQ ID NO: 2173; WAN024CXH_at; Start 133; Stop 157
actactaaagtaggccgaagcacca

SEQ ID NO: 137330 - DNA, 25 bp, Artificial
  probe
  misc_feature (1)..(25): SEQ ID NO: 2173; WAN024CXH_at; Start 185; Stop 209
tgattatcttcgttatcagaaatgc

SEQ ID NO: 137331 - DNA, 25 bp, Artificial
  probe
  misc_feature (1)..(25): SEQ ID NO: 2173; WAN024CXH_at; Start 140; Stop 164
aagtaggccgaagcaccatctgggc

SEQ ID NO: 137332 - DNA, 25 bp, Artificial
  probe
  misc_feature (1)..(25): SEQ ID NO: 2173; WAN024CXH_at; Start 297; Stop 321
gataacgattcatctcttcttccaa

SEQ ID NO: 137333 - DNA, 25 bp, Artificial
  probe
  misc_feature (1)..(25): SEQ ID NO: 2173; WAN024CXH_at; Start 289; Stop 313
gtcaggttgataacgattcatctct

SEQ ID NO: 137334 - DNA, 25 bp, Artificial
  probe
  misc_feature (1)..(25): SEQ ID NO: 2173; WAN024CXH_at; Start 45; Stop 69
tggctgcagacaaaagtccctgccg

SEQ ID NO: 137335 - DNA, 25 bp, Artificial
  probe
  misc_feature (1)..(25): SEQ ID NO: 2173; WAN024CXH_at; Start 96; Stop 120
tcttttttatagcttgaaccatcgc

SEQ ID NO: 137336 - DNA, 25 bp, Artificial
  probe
  misc_feature (1)..(25): SEQ ID NO: 2173; WAN024CXH_at; Start 88; Stop 112
gtaagccctcttttttatagcttga

SEQ ID NO: 137337 - DNA, 25 bp, Artificial
  probe
  misc_feature (1)..(25): SEQ ID NO: 2173; WAN024CXH_at; Start 10; Stop 34
tcttttctaccaaatagagagcctg

SEQ ID NO: 137338 - DNA, 25 bp, Artificial
  probe
  misc_feature (1)..(25): SEQ ID NO: 2173; WAN024CXH_at; Start 123; Stop 147
taatcggcaaactactaaagtaggc

SEQ ID NO: 137339 - DNA, 25 bp, Artificial
  probe
  misc_feature (1)..(25): SEQ ID NO: 2173; WAN024CXH_at; Start 30; Stop 54
gcctgatacatcaaatggctgcaga

SEQ ID NO: 137340 - DNA, 25 bp, Artificial
  probe
  misc_feature (1)..(25): SEQ ID NO: 2173; WAN024CXH_at; Start 232; Stop 256
cactcgttcaggtgtcaaactagtt

SEQ ID NO: 137341 - DNA, 25 bp, Artificial
  probe
  misc_feature (1)..(25): SEQ ID NO: 2173; WAN024CXH_at; Start 317; Stop 341
tccaatacttgagcagatttgtgaa

SEQ ID NO: 137342 - DNA, 25 bp, Artificial
  probe
  misc_feature (1)..(25): SEQ ID NO: 2173; WAN024CXH_at; Start 148; Stop 172
cgaagcaccatctgggcgaatggga

SEQ ID NO: 137343 - DNA, 25 bp, Artificial
  probe
  misc_feature (1)..(25): SEQ ID NO: 2173; WAN024CXH_at; Start 63; Stop 87
cctgccgtattggaaacagaggccg

SEQ ID NO: 137344 - DNA, 25 bp, Artificial
  probe
  misc_feature (1)..(25): SEQ ID NO: 2173; WAN024CXH_at; Start 309; Stop 333
tctcttcttccaatacttgagcaga

SEQ ID NO: 137345 - DNA, 25 bp, Artificial
  probe
  misc_feature (1)..(25): SEQ ID NO: 926; WAN024CXI_at; Start 596; Stop 620
tagaacatggagatcaggaactcaa

SEQ ID NO: 137346 - DNA, 25 bp, Artificial
  probe
  misc_feature (1)..(25): SEQ ID NO: 926; WAN024CXI_at; Start 14; Stop 38
tgacaggttttgagccctttggagg

SEQ ID NO: 137347 - DNA, 25 bp, Artificial
  probe
  misc_feature (1)..(25): SEQ ID NO: 926; WAN024CXI_at; Start 543; Stop 567
tatgagtttagtggatattcggcga

SEQ ID NO: 137348 - DNA, 25 bp, Artificial
  probe
  misc_feature (1)..(25): SEQ ID NO: 926; WAN024CXI_at; Start 409; Stop 433
gggacttttgtctgcagccatttga

SEQ ID NO: 137349 - DNA, 25 bp, Artificial
  probe
  misc_feature (1)..(25): SEQ ID NO: 926; WAN024CXI_at; Start 505; Stop 529
atgatggaacaggtggtgaacagac

SEQ ID NO: 137350 - DNA, 25 bp, Artificial
  probe
  misc_feature (1)..(25): SEQ ID NO: 926; WAN024CXI_at; Start 157; Stop 181
gaagagatgaatcgttatcaacctg

SEQ ID NO: 137351 - DNA, 25 bp, Artificial
  probe
  misc_feature (1)..(25): SEQ ID NO: 926; WAN024CXI_at; Start 195; Stop 219
tattgggcaagctggtggaagaact

SEQ ID NO: 137352 - DNA, 25 bp, Artificial
  probe
  misc_feature (1)..(25): SEQ ID NO: 926; WAN024CXI_at; Start 439; Stop 463
caggctctctatttggtagaaaaga

SEQ ID NO: 137353 - DNA, 25 bp, Artificial
  probe
  misc_feature (1)..(25): SEQ ID NO: 926; WAN024CXI_at; Start 613; Stop 637
gaactcaagttggtaggcggagaaa

SEQ ID NO: 137354 - DNA, 25 bp, Artificial
  probe
  misc_feature (1)..(25): SEQ ID NO: 926; WAN024CXI_at; Start 325; Stop 349
gcctactttagtagtttgccgatta

SEQ ID NO: 137355 - DNA, 25 bp, Artificial
  probe
  misc_feature (1)..(25): SEQ ID NO: 926; WAN024CXI_at; Start 480; Stop 504
ggcaggttttatgcatattccttat

SEQ ID NO: 137356 - DNA, 25 bp, Artificial
  probe
  misc_feature (1)..(25): SEQ ID NO: 926; WAN024CXI_at; Start 432; Stop 456
gatgtatcaggctctctatttggta

SEQ ID NO: 137357 - DNA, 25 bp, Artificial
  probe
  misc_feature (1)..(25): SEQ ID NO: 926; WAN024CXI_at; Start 113; Stop 137
tagaggtgccgacagtttttcacaa

SEQ ID NO: 137358 - DNA, 25 bp, Artificial
  probe
  misc_feature (1)..(25): SEQ ID NO: 926; WAN024CXI_at; Start 499; Stop 523
ccttatatgatggaacaggtggtga

SEQ ID NO: 137359 - DNA, 25 bp, Artificial
  probe
  misc_feature (1)..(25): SEQ ID NO: 926; WAN024CXI_at; Start 383; Stop 407
taccggcctctgtttccaatacggc

SEQ ID NO: 137360 - DNA, 25 bp, Artificial
  probe
  misc_feature (1)..(25): SEQ ID NO: 926; WAN024CXI_at; Start 348; Stop 372
taaagcgatggttcaagctataaaa

SEQ ID NO: 137361 - DNA, 25 bp, Artificial
  probe
  misc_feature (1)..(25): SEQ ID NO: 926; WAN024CXI_at; Start 65; Stop 89
ccattaaaggtttaccagctgaaat

SEQ ID NO: 137362 - DNA, 25 bp, Artificial
  probe
  misc_feature (1)..(25): SEQ ID NO: 926; WAN024CXI_at; Start 212; Stop 236
gaagaactagtttgacacctgaacg

SEQ ID NO: 137363 - DNA, 25 bp, Artificial
  probe
  misc_feature (1)..(25): SEQ ID NO: 926; WAN024CXI_at; Start 142; Stop 166
gctcaagtattggaagaagagatga

SEQ ID NO: 137364 - DNA, 25 bp, Artificial
  probe
  misc_feature (1)..(25): SEQ ID NO: 926; WAN024CXI_at; Start 216; Stop 240
aactagtttgacacctgaacgagtg

SEQ ID NO: 137365 - DNA, 25 bp, Artificial
  probe
  misc_feature (1)..(25): SEQ ID NO: 926; WAN024CXI_at; Start 337; Stop 361
agtttgccgattaaagcgatggttc

SEQ ID NO: 137366 - DNA, 25 bp, Artificial
  probe
  misc_feature (1)..(25): SEQ ID NO: 926; WAN024CXI_at; Start 569; Stop 593
ggatagaagcagcaatcggcgctat

SEQ ID NO: 137367 - DNA, 25 bp, Artificial
  probe
  misc_feature (1)..(25): SEQ ID NO: 926; WAN024CXI_at; Start 181; Stop 205
gactttgtcctttgtattgggcaag

SEQ ID NO: 137368 - DNA, 25 bp, Artificial
  probe
  misc_feature (1)..(25): SEQ ID NO: 926; WAN024CXI_at; Start 280; Stop 304
gataatcaaccgattgaccgtccca

SEQ ID NO: 137369 - DNA, 25 bp, Artificial
  probe
  misc_feature (1)..(25): SEQ ID NO: 926; WAN024CXI_at; Start 607; Stop 631
gatcaggaactcaagttggtaggcg

SEQ ID NO: 137370 - DNA, 25 bp, Artificial
  probe
  misc_feature (1)..(25): SEQ ID NO: 926; WAN024CXI_at; Start 82; Stop 106
gctgaaatccatggtgctgaggtcc

SEQ ID NO: 137371 - DNA, 25 bp, Artificial
  probe
  misc_feature (1)..(25): SEQ ID NO: 926; WAN024CXI_at; Start 419; Stop 443
tctgcagccatttgatgtatcaggc

SEQ ID NO: 137372 - DNA, 25 bp, Artificial
  probe
  misc_feature (1)..(25): SEQ ID NO: 926; WAN024CXI_at; Start 271; Stop 295
gataacgaagataatcaaccgattg

SEQ ID NO: 137373 - DNA, 25 bp, Artificial
  probe
  misc_feature (1)..(25): SEQ ID NO: 926; WAN024CXI_at; Start 558; Stop 582
tattcggcgagggatagaagcagca

SEQ ID NO: 137374 - DNA, 25 bp, Artificial
  probe
  misc_feature (1)..(25): SEQ ID NO: 926; WAN024CXI_at; Start 165; Stop 189
gaatcgttatcaacctgactttgtc

SEQ ID NO: 137375 - DNA, 25 bp, Artificial
  probe
  misc_feature (1)..(25): SEQ ID NO: 926; WAN024CXI_at; Start 397; Stop 421
tccaatacggcagggacttttgtct

SEQ ID NO: 137376 - DNA, 25 bp, Artificial
  probe
  misc_feature (1)..(25): SEQ ID NO: 926; WAN024CXI_at; Start 6; Stop 30
agtattagtgacaggttttgagccc

SEQ ID NO: 137377 - DNA, 25 bp, Artificial
  probe
  misc_feature (1)..(25): SEQ ID NO: 926; WAN024CXI_at; Start 126; Stop 150
agtttttcacaaatctgctcaagta

SEQ ID NO: 137378 - DNA, 25 bp, Artificial
  probe
  misc_feature (1)..(25): SEQ ID NO: 926; WAN024CXI_at; Start 470; Stop 494
catatgttaaggcaggttttatgca

SEQ ID NO: 137379 - DNA, 25 bp, Artificial
  probe
  misc_feature (1)..(25): SEQ ID NO: 1527; WAN024CXJ_at; Start 301; Stop 325
cgttggacaagaatgctagctatga

SEQ ID NO: 137380 - DNA, 25 bp, Artificial
  probe
  misc_feature (1)..(25): SEQ ID NO: 1527; WAN024CXJ_at; Start 134; Stop 158
tcttatttgagacgatagaagtatc

SEQ ID NO: 137381 - DNA, 25 bp, Artificial
  probe
  misc_feature (1)..(25): SEQ ID NO: 1527; WAN024CXJ_at; Start 279; Stop 303
gaatagtgttattttgttgaatcgt

SEQ ID NO: 137382 - DNA, 25 bp, Artificial
  probe
  misc_feature (1)..(25): SEQ ID NO: 1527; WAN024CXJ_at; Start 408; Stop 432
tatagtctatagcttggtaccgacg

SEQ ID NO: 137383 - DNA, 25 bp, Artificial
  probe
  misc_feature (1)..(25): SEQ ID NO: 1527; WAN024CXJ_at; Start 338; Stop 362
tcctgtttgaaatgggtagttatct

SEQ ID NO: 137384 - DNA, 25 bp, Artificial
  probe
  misc_feature (1)..(25): SEQ ID NO: 1527; WAN024CXJ_at; Start 316; Stop 340
ctagctatgattgtgctgacattcc

SEQ ID NO: 137385 - DNA, 25 bp, Artificial
  probe
  misc_feature (1)..(25): SEQ ID NO: 1527; WAN024CXJ_at; Start 158; Stop 182
cagagtatctctacctagtctattg

SEQ ID NO: 137386 - DNA, 25 bp, Artificial
  probe
  misc_feature (1)..(25): SEQ ID NO: 1527; WAN024CXJ_at; Start 220; Stop 244
catctaatagggattacaactctct

SEQ ID NO: 137387 - DNA, 25 bp, Artificial
  probe
  misc_feature (1)..(25): SEQ ID NO: 1527; WAN024CXJ_at; Start 205; Stop 229
gatgtttactttttccatctaatag

SEQ ID NO: 137388 - DNA, 25 bp, Artificial
  probe
  misc_feature (1)..(25): SEQ ID NO: 1527; WAN024CXJ_at; Start 380; Stop 404
ggttgacagtagatagcatgtcgat

SEQ ID NO: 137389 - DNA, 25 bp, Artificial
  probe
  misc_feature (1)..(25): SEQ ID NO: 1527; WAN024CXJ_at; Start 293; Stop 317
tgttgaatcgttggacaagaatgct

SEQ ID NO: 137390 - DNA, 25 bp, Artificial
  probe
  misc_feature (1)..(25): SEQ ID NO: 1527; WAN024CXJ_at; Start 363; Stop 387
tttggcttttatggtagggttgaca

SEQ ID NO: 137391 - DNA, 25 bp, Artificial
  probe
  misc_feature (1)..(25): SEQ ID NO: 1527; WAN024CXJ_at; Start 58; Stop 82
gacgcccatattagccagcttctgg

SEQ ID NO: 137392 - DNA, 25 bp, Artificial
  probe
  misc_feature (1)..(25): SEQ ID NO: 1527; WAN024CXJ_at; Start 151; Stop 175
gaagtatcagagtatctctacctag

SEQ ID NO: 137393 - DNA, 25 bp, Artificial
  probe
  misc_feature (1)..(25): SEQ ID NO: 1527; WAN024CXJ_at; Start 69; Stop 93
tagccagcttctgggctcatttttc

SEQ ID NO: 137394 - DNA, 25 bp, Artificial
  probe
  misc_feature (1)..(25): SEQ ID NO: 1527; WAN024CXJ_at; Start 53; Stop 77
taattgacgcccatattagccagct

SEQ ID NO: 137395 - DNA, 25 bp, Artificial
  probe
  misc_feature (1)..(25): SEQ ID NO: 1527; WAN024CXJ_at; Start 103; Stop 127
catttggctagtcattttctttttc

SEQ ID NO: 137396 - DNA, 25 bp, Artificial
  probe
  misc_feature (1)..(25): SEQ ID NO: 1527; WAN024CXJ_at; Start 227; Stop 251
tagggattacaactctcttatttat

SEQ ID NO: 137397 - DNA, 25 bp, Artificial
  probe
  misc_feature (1)..(25): SEQ ID NO: 1527; WAN024CXJ_at; Start 262; Stop 286
gccttccttcataaattgaatagtg

SEQ ID NO: 137398 - DNA, 25 bp, Artificial
  probe
  misc_feature (1)..(25): SEQ ID NO: 1527; WAN024CXJ_at; Start 395; Stop 419
gcatgtcgatttttatagtctatag

SEQ ID NO: 137399 - DNA, 25 bp, Artificial
  probe
  misc_feature (1)..(25): SEQ ID NO: 1527; WAN024CXJ_at; Start 244; Stop 268
ttatttatcttattgggagccttcc

SEQ ID NO: 137400 - DNA, 25 bp, Artificial
  probe
  misc_feature (1)..(25): SEQ ID NO: 1527; WAN024CXJ_at; Start 17; Stop 41
gagttggagtatttttattgcttcc

SEQ ID NO: 137401 - DNA, 25 bp, Artificial
  probe
  misc_feature (1)..(25): SEQ ID NO: 1527; WAN024CXJ_at; Start 94; Stop 118
ccccatgtacatttggctagtcatt

SEQ ID NO: 137402 - DNA, 25 bp, Artificial
  probe
  misc_feature (1)..(25): SEQ ID NO: 1527; WAN024CXJ_at; Start 413; Stop 437
tctatagcttggtaccgacgatgat

SEQ ID NO: 137403 - DNA, 25 bp, Artificial
  probe
  misc_feature (1)..(25): SEQ ID NO: 1527; WAN024CXJ_at; Start 345; Stop 369
tgaaatgggtagttatcttttggct

SEQ ID NO: 137404 - DNA, 25 bp, Artificial
  probe
  misc_feature (1)..(25): SEQ ID NO: 1527; WAN024CXJ_at; Start 63; Stop 87
ccatattagccagcttctgggctca

SEQ ID NO: 137405 - DNA, 25 bp, Artificial
  probe
  misc_feature (1)..(25): SEQ ID NO: 1527; WAN024CXJ_at; Start 372; Stop 396
tatggtagggttgacagtagatagc

SEQ ID NO: 137406 - DNA, 25 bp, Artificial
  probe
  misc_feature (1)..(25): SEQ ID NO: 1527; WAN024CXJ_at; Start 41; Stop 65
ctttctttgttctaattgacgccca

SEQ ID NO: 137407 - DNA, 25 bp, Artificial
  probe
  misc_feature (1)..(25): SEQ ID NO: 1527; WAN024CXJ_at; Start 189; Stop 213
tataggcttggtttatgatgtttac

SEQ ID NO: 137408 - DNA, 25 bp, Artificial
  probe
  misc_feature (1)..(25): SEQ ID NO: 1527; WAN024CXJ_at; Start 5; Stop 29
gacagttgaagcgagttggagtatt

SEQ ID NO: 137409 - DNA, 25 bp, Artificial
  probe
  misc_feature (1)..(25): SEQ ID NO: 1527; WAN024CXJ_at; Start 324; Stop 348
gattgtgctgacattcctgtttgaa

SEQ ID NO: 137410 - DNA, 25 bp, Artificial
  probe
  misc_feature (1)..(25): SEQ ID NO: 1527; WAN024CXJ_at; Start 171; Stop 195
cctagtctattgttttgttataggc

SEQ ID NO: 137411 - DNA, 25 bp, Artificial
  probe
  misc_feature (1)..(25): SEQ ID NO: 1527; WAN024CXJ_at; Start 257; Stop 281
tgggagccttccttcataaattgaa

SEQ ID NO: 137412 - DNA, 25 bp, Artificial
  probe
  misc_feature (1)..(25): SEQ ID NO: 1527; WAN024CXJ_at; Start 419; Stop 443
gcttggtaccgacgatgattttaaa

SEQ ID NO: 137413 - DNA, 25 bp, Artificial
  probe
  misc_feature (1)..(25): SEQ ID NO: 2922; WAN024CXK_at; Start 143; Stop 167
cccttagcatgattgaaaaagctga

SEQ ID NO: 137414 - DNA, 25 bp, Artificial
  probe
  misc_feature (1)..(25): SEQ ID NO: 2922; WAN024CXK_at; Start 264; Stop 288
taaagtcgtcatcgttatgcctgaa

SEQ ID NO: 137415 - DNA, 25 bp, Artificial
  probe
  misc_feature (1)..(25): SEQ ID NO: 2922; WAN024CXK_at; Start 440; Stop 464
cagctaatccagaagtacacgaaag

SEQ ID NO: 137416 - DNA, 25 bp, Artificial
  probe
  misc_feature (1)..(25): SEQ ID NO: 2922; WAN024CXK_at; Start 868; Stop 892
ctagcaccagataacggtgaacgtt

SEQ ID NO: 137417 - DNA, 25 bp, Artificial
  probe
  misc_feature (1)..(25): SEQ ID NO: 2922; WAN024CXK_at; Start 344; Stop 368
taactcctggtagcgagggaatgaa

SEQ ID NO: 137418 - DNA, 25 bp, Artificial
  probe
  misc_feature (1)..(25): SEQ ID NO: 2922; WAN024CXK_at; Start 553; Stop 577
ggtgtttctcatgcactcaaatcag

SEQ ID NO: 137419 - DNA, 25 bp, Artificial
  probe
  misc_feature (1)..(25): SEQ ID NO: 2922; WAN024CXK_at; Start 163; Stop 187
gctgaacaagatggtattctgaaac

SEQ ID NO: 137420 - DNA, 25 bp, Artificial
  probe
  misc_feature (1)..(25): SEQ ID NO: 2922; WAN024CXK_at; Start 785; Stop 809
ttgtagggatttcctcagctgcagc

SEQ ID NO: 137421 - DNA, 25 bp, Artificial
  probe
  misc_feature (1)..(25): SEQ ID NO: 2922; WAN024CXK_at; Start 111; Stop 135
taatcctggttcatctgtaaaagac

SEQ ID NO: 137422 - DNA, 25 bp, Artificial
  probe
  misc_feature (1)..(25): SEQ ID NO: 2922; WAN024CXK_at; Start 20; Stop 44
ttactgaattaatcggtcaaacacc

SEQ ID NO: 137423 - DNA, 25 bp, Artificial
  probe
  misc_feature (1)..(25): SEQ ID NO: 2922; WAN024CXK_at; Start 233; Stop 257
gactttcatgggtaggtgctgctaa

SEQ ID NO: 137424 - DNA, 25 bp, Artificial
  probe
  misc_feature (1)..(25): SEQ ID NO: 2922; WAN024CXK_at; Start 379; Stop 403
gctaaggctcaagaaatcgctgctg

SEQ ID NO: 137425 - DNA, 25 bp, Artificial
  probe
  misc_feature (1)..(25): SEQ ID NO: 2922; WAN024CXK_at; Start 749; Stop 773
cactcggacgtgaaattggtggaaa

SEQ ID NO: 137426 - DNA, 25 bp, Artificial
  probe
  misc_feature (1)..(25): SEQ ID NO: 2922; WAN024CXK_at; Start 299; Stop 323
tagaacgacgtaaaattatccaagc

SEQ ID NO: 137427 - DNA, 25 bp, Artificial
  probe
  misc_feature (1)..(25): SEQ ID NO: 2922; WAN024CXK_at; Start 330; Stop 354
tgctgaactcgtcctaactcctggt

SEQ ID NO: 137428 - DNA, 25 bp, Artificial
  probe
  misc_feature (1)..(25): SEQ ID NO: 2922; WAN024CXK_at; Start 409; Stop 433
gatggtttccttcctcttcaatttg

SEQ ID NO: 137429 - DNA, 25 bp, Artificial
  probe
  misc_feature (1)..(25): SEQ ID NO: 2922; WAN024CXK_at; Start 799; Stop 823
tcagctgcagctatctacggagcca

SEQ ID NO: 137430 - DNA, 25 bp, Artificial
  probe
  misc_feature (1)..(25): SEQ ID NO: 2922; WAN024CXK_at; Start 56; Stop 80
ttaacaacatcgtgccagaaggtgc

SEQ ID NO: 137431 - DNA, 25 bp, Artificial
  probe
  misc_feature (1)..(25): SEQ ID NO: 2922; WAN024CXK_at; Start 283; Stop 307
cctgaaactatgagtgtagaacgac

SEQ ID NO: 137432 - DNA, 25 bp, Artificial
  probe
  misc_feature (1)..(25): SEQ ID NO: 2922; WAN024CXK_at; Start 654; Stop 678
caaaattcaaggtatctcagctgga

SEQ ID NO: 137433 - DNA, 25 bp, Artificial
  probe
  misc_feature (1)..(25): SEQ ID NO: 2922; WAN024CXK_at; Start 394; Stop 418
atcgctgctgaacgtgatggtttcc

SEQ ID NO: 137434 - DNA, 25 bp, Artificial
  probe
  misc_feature (1)..(25): SEQ ID NO: 2922; WAN024CXK_at; Start 455; Stop 479
tacacgaaagaacaacaggagctga

SEQ ID NO: 137435 - DNA, 25 bp, Artificial
  probe
  misc_feature (1)..(25): SEQ ID NO: 2922; WAN024CXK_at; Start 128; Stop 152
taaaagaccgtattgcccttagcat

SEQ ID NO: 137436 - DNA, 25 bp, Artificial
  probe
  misc_feature (1)..(25): SEQ ID NO: 2922; WAN024CXK_at; Start 692; Stop 716
cacttgatactaaagcctatgatgg

SEQ ID NO: 137437 - DNA, 25 bp, Artificial
  probe
  misc_feature (1)..(25): SEQ ID NO: 2922; WAN024CXK_at; Start 315; Stop 339
tatccaagcttatggtgctgaactc

SEQ ID NO: 137438 - DNA, 25 bp, Artificial
  probe
  misc_feature (1)..(25): SEQ ID NO: 2922; WAN024CXK_at; Start 70; Stop 94
ccagaaggtgctgcagacgtctata

SEQ ID NO: 137439 - DNA, 25 bp, Artificial
  probe
  misc_feature (1)..(25): SEQ ID NO: 2922; WAN024CXK_at; Start 85; Stop 109
gacgtctatataaagcttgaagcat

SEQ ID NO: 137440 - DNA, 25 bp, Artificial
  probe
  misc_feature (1)..(25): SEQ ID NO: 2922; WAN024CXK_at; Start 478; Stop 502
gagatactagctgctttcggtaaag

SEQ ID NO: 137441 - DNA, 25 bp, Artificial
  probe
  misc_feature (1)..(25): SEQ ID NO: 2922; WAN024CXK_at; Start 493; Stop 517
ttcggtaaagatggattagatgcct

SEQ ID NO: 137442 - DNA, 25 bp, Artificial
  probe
  misc_feature (1)..(25): SEQ ID NO: 2922; WAN024CXK_at; Start 511; Stop 535
gatgcctttgttgctggagtaggta

SEQ ID NO: 137443 - DNA, 25 bp, Artificial
  probe
  misc_feature (1)..(25): SEQ ID NO: 2922; WAN024CXK_at; Start 249; Stop 273
tgctgctaaagggtataaagtcgtc

SEQ ID NO: 137444 - DNA, 25 bp, Artificial
  probe
  misc_feature (1)..(25): SEQ ID NO: 2922; WAN024CXK_at; Start 366; Stop 390
gaaaggtgctattgctaaggctcaa

SEQ ID NO: 137445 - DNA, 25 bp, Artificial
  probe
  misc_feature (1)..(25): SEQ ID NO: 2922; WAN024CXK_at; Start 707; Stop 731
cctatgatggtatcgttcgtgtaac

SEQ ID NO: 137446 - DNA, 25 bp, Artificial
  probe
  misc_feature (1)..(25): SEQ ID NO: 2922; WAN024CXK_at; Start 427; Stop 451
caatttgacaatccagctaatccag

SEQ ID NO: 137447 - DNA, 25 bp, Artificial
  probe
  misc_feature (1)..(25): SEQ ID NO: 2239; WAN024CXL_at; Start 553; Stop 577
gcacttgtggagttttttaatggaa

SEQ ID NO: 137448 - DNA, 25 bp, Artificial
  probe
  misc_feature (1)..(25): SEQ ID NO: 2239; WAN024CXL_at; Start 538; Stop 562
gaaactattaaagctgcacttgtgg

SEQ ID NO: 137449 - DNA, 25 bp, Artificial
  probe
  misc_feature (1)..(25): SEQ ID NO: 2239; WAN024CXL_at; Start 111; Stop 135
cattactgccatcaaaaaagaacac

SEQ ID NO: 137450 - DNA, 25 bp, Artificial
  probe
  misc_feature (1)..(25): SEQ ID NO: 2239; WAN024CXL_at; Start 415; Stop 439
caaatgtcttatgctcagtaccaag

SEQ ID NO: 137451 - DNA, 25 bp, Artificial
  probe
  misc_feature (1)..(25): SEQ ID NO: 2239; WAN024CXL_at; Start 478; Stop 502
ctggatacaaactttacagatcaag

SEQ ID NO: 137452 - DNA, 25 bp, Artificial
  probe
  misc_feature (1)..(25): SEQ ID NO: 2239; WAN024CXL_at; Start 59; Stop 83
gctttatctgccatgccaagcgtgt

SEQ ID NO: 137453 - DNA, 25 bp, Artificial
  probe
  misc_feature (1)..(25): SEQ ID NO: 2239; WAN024CXL_at; Start 604; Stop 628
cgagaggttgaagttcctgtaaact

SEQ ID NO: 137454 - DNA, 25 bp, Artificial
  probe
  misc_feature (1)..(25): SEQ ID NO: 2239; WAN024CXL_at; Start 50; Stop 74
aaaaatctcgctttatctgccatgc

SEQ ID NO: 137455 - DNA, 25 bp, Artificial
  probe
  misc_feature (1)..(25): SEQ ID NO: 2239; WAN024CXL_at; Start 314; Stop 338
taggcgctggaggactaattcgtgc

SEQ ID NO: 137456 - DNA, 25 bp, Artificial
  probe
  misc_feature (1)..(25): SEQ ID NO: 2239; WAN024CXL_at; Start 122; Stop 146
tcaaaaaagaacactacaaagcgac

SEQ ID NO: 137457 - DNA, 25 bp, Artificial
  probe
  misc_feature (1)..(25): SEQ ID NO: 2239; WAN024CXL_at; Start 284; Stop 308
tcgtgacacgctactttggtggtat

SEQ ID NO: 137458 - DNA, 25 bp, Artificial
  probe
  misc_feature (1)..(25): SEQ ID NO: 2239; WAN024CXL_at; Start 326; Stop 350
gactaattcgtgcttacgccggcag

SEQ ID NO: 137459 - DNA, 25 bp, Artificial
  probe
  misc_feature (1)..(25): SEQ ID NO: 2239; WAN024CXL_at; Start 299; Stop 323
ttggtggtattaaactaggcgctgg

SEQ ID NO: 137460 - DNA, 25 bp, Artificial
  probe
  misc_feature (1)..(25): SEQ ID NO: 2239; WAN024CXL_at; Start 2; Stop 26
tggaatttaggacaattaaagagga

SEQ ID NO: 137461 - DNA, 25 bp, Artificial
  probe
  misc_feature (1)..(25): SEQ ID NO: 2239; WAN024CXL_at; Start 222; Stop 246
tactgctggtgttcccatgcttggg

SEQ ID NO: 137462 - DNA, 25 bp, Artificial
  probe
  misc_feature (1)..(25): SEQ ID NO: 2239; WAN024CXL_at; Start 430; Stop 454
cagtaccaagagtacagtaacttcc

SEQ ID NO: 137463 - DNA, 25 bp, Artificial
  probe
  misc_feature (1)..(25): SEQ ID NO: 2239; WAN024CXL_at; Start 213; Stop 237
gcctagtggtactgctggtgttccc

SEQ ID NO: 137464 - DNA, 25 bp, Artificial
  probe
  misc_feature (1)..(25): SEQ ID NO: 2239; WAN024CXL_at; Start 381; Stop 405
tattgaaataaaagaacaggctggc

SEQ ID NO: 137465 - DNA, 25 bp, Artificial
  probe
  misc_feature (1)..(25): SEQ ID NO: 2239; WAN024CXL_at; Start 178; Stop 202
cgtagtgaaattaaacgtacaagtg

SEQ ID NO: 137466 - DNA, 25 bp, Artificial
  probe
  misc_feature (1)..(25): SEQ ID NO: 2239; WAN024CXL_at; Start 70; Stop 94
catgccaagcgtgtttatagcgaag

SEQ ID NO: 137467 - DNA, 25 bp, Artificial
  probe
  misc_feature (1)..(25): SEQ ID NO: 2239; WAN024CXL_at; Start 136; Stop 160
tacaaagcgacacataactgctctg

SEQ ID NO: 137468 - DNA, 25 bp, Artificial
  probe
  misc_feature (1)..(25): SEQ ID NO: 2239; WAN024CXL_at; Start 339; Stop 363
ttacgccggcagtgtcgccttagct

SEQ ID NO: 137469 - DNA, 25 bp, Artificial
  probe
  misc_feature (1)..(25): SEQ ID NO: 2239; WAN024CXL_at; Start 492; Stop 516
tacagatcaagtcgatacgatgatt

SEQ ID NO: 137470 - DNA, 25 bp, Artificial
  probe
  misc_feature (1)..(25): SEQ ID NO: 2239; WAN024CXL_at; Start 259; Stop 283
cacaatctcaccaatgtctgtgtgg

SEQ ID NO: 137471 - DNA, 25 bp, Artificial
  probe
  misc_feature (1)..(25): SEQ ID NO: 2239; WAN024CXL_at; Start 353; Stop 377
tcgccttagctgtcaaagaaattgg

SEQ ID NO: 137472 - DNA, 25 bp, Artificial
  probe
  misc_feature (1)..(25): SEQ ID NO: 2239; WAN024CXL_at; Start 270; Stop 294
caatgtctgtgtggtcgtgacacgc

SEQ ID NO: 137473 - DNA, 25 bp, Artificial
  probe
  misc_feature (1)..(25): SEQ ID NO: 2239; WAN024CXL_at; Start 442; Stop 466
tacagtaacttccttaaagaacatg

SEQ ID NO: 137474 - DNA, 25 bp, Artificial
  probe
  misc_feature (1)..(25): SEQ ID NO: 2239; WAN024CXL_at; Start 245; Stop 269
gggtactagaaaatcacaatctcac

SEQ ID NO: 137475 - DNA, 25 bp, Artificial
  probe
  misc_feature (1)..(25): SEQ ID NO: 2239; WAN024CXL_at; Start 84; Stop 108
ttatagcgaagaagaggctcgtgac

SEQ ID NO: 137476 - DNA, 25 bp, Artificial
  probe
  misc_feature (1)..(25): SEQ ID NO: 2239; WAN024CXL_at; Start 193; Stop 217
cgtacaagtgatgatggtgagccta

SEQ ID NO: 137477 - DNA, 25 bp, Artificial
  probe
  misc_feature (1)..(25): SEQ ID NO: 2239; WAN024CXL_at; Start 397; Stop 421
caggctggcattgctattcaaatgt

SEQ ID NO: 137478 - DNA, 25 bp, Artificial
  probe
  misc_feature (1)..(25): SEQ ID NO: 2239; WAN024CXL_at; Start 590; Stop 614
ctgaccaaggtttacgagaggttga

SEQ ID NO: 137479 - DNA, 25 bp, Artificial
  probe
  misc_feature (1)..(25): SEQ ID NO: 2239; WAN024CXL_at; Start 97; Stop 121
gaggctcgtgacttcattactgcca

SEQ ID NO: 137480 - DNA, 25 bp, Artificial
  probe
  misc_feature (1)..(25): SEQ ID NO: 2239; WAN024CXL_at; Start 573; Stop 597
tggaaaagtcactttaactgaccaa

SEQ ID NO: 137481 - DNA, 25 bp, Artificial
  probe
  misc_feature (1)..(25): SEQ ID NO: 7525; WAN024CXM_at; Start 16; Stop 40
aatcgctctatgactgacttcaact

SEQ ID NO: 137482 - DNA, 25 bp, Artificial
  probe
  misc_feature (1)..(25): SEQ ID NO: 7525; WAN024CXM_at; Start 51; Stop 75
accaaagttgacaatcttgacactt

SEQ ID NO: 137483 - DNA, 25 bp, Artificial
  probe
  misc_feature (1)..(25): SEQ ID NO: 7525; WAN024CXM_at; Start 7; Stop 31
gtaagtaaaaatcgctctatgactg

SEQ ID NO: 137484 - DNA, 25 bp, Artificial
  probe
  misc_feature (1)..(25): SEQ ID NO: 7525; WAN024CXM_at; Start 50; Stop 74
caccaaagttgacaatcttgacact

SEQ ID NO: 137485 - DNA, 25 bp, Artificial
  probe
  misc_feature (1)..(25): SEQ ID NO: 7525; WAN024CXM_at; Start 48; Stop 72
tacaccaaagttgacaatcttgaca

SEQ ID NO: 137486 - DNA, 25 bp, Artificial
  probe
  misc_feature (1)..(25): SEQ ID NO: 7525; WAN024CXM_at; Start 26; Stop 50
tgactgacttcaactccctctttac

SEQ ID NO: 137487 - DNA, 25 bp, Artificial
  probe
  misc_feature (1)..(25): SEQ ID NO: 7525; WAN024CXM_at; Start 27; Stop 51
gactgacttcaactccctctttaca

SEQ ID NO: 137488 - DNA, 25 bp, Artificial
  probe
  misc_feature (1)..(25): SEQ ID NO: 7525; WAN024CXM_at; Start 10; Stop 34
agtaaaaatcgctctatgactgact

SEQ ID NO: 137489 - DNA, 25 bp, Artificial
  probe
  misc_feature (1)..(25): SEQ ID NO: 7525; WAN024CXM_at; Start 20; Stop 44
gctctatgactgacttcaactccct

SEQ ID NO: 137490 - DNA, 25 bp, Artificial
  probe
  misc_feature (1)..(25): SEQ ID NO: 7525; WAN024CXM_at; Start 40; Stop 64
tccctctttacaccaaagttgacaa

SEQ ID NO: 137491 - DNA, 25 bp, Artificial
  probe
  misc_feature (1)..(25): SEQ ID NO: 7525; WAN024CXM_at; Start 42; Stop 66
cctctttacaccaaagttgacaatc

SEQ ID NO: 137492 - DNA, 25 bp, Artificial
  probe
  misc_feature (1)..(25): SEQ ID NO: 7525; WAN024CXM_at; Start 13; Stop 37
aaaaatcgctctatgactgacttca

SEQ ID NO: 137493 - DNA, 25 bp, Artificial
  probe
  misc_feature (1)..(25): SEQ ID NO: 7525; WAN024CXM_at; Start 14; Stop 38
aaaatcgctctatgactgacttcaa

SEQ ID NO: 137494 - DNA, 25 bp, Artificial
  probe
  misc_feature (1)..(25): SEQ ID NO: 7525; WAN024CXM_at; Start 11; Stop 35
gtaaaaatcgctctatgactgactt

SEQ ID NO: 137495 - DNA, 25 bp, Artificial
  probe
  misc_feature (1)..(25): SEQ ID NO: 7525; WAN024CXM_at; Start 12; Stop 36
taaaaatcgctctatgactgacttc

SEQ ID NO: 137496 - DNA, 25 bp, Artificial
  probe
  misc_feature (1)..(25): SEQ ID NO: 7525; WAN024CXM_at; Start 45; Stop 69
ctttacaccaaagttgacaatcttg

SEQ ID NO: 137497 - DNA, 25 bp, Artificial
  probe
  misc_feature (1)..(25): SEQ ID NO: 7525; WAN024CXM_at; Start 49; Stop 73
acaccaaagttgacaatcttgacac

SEQ ID NO: 137498 - DNA, 25 bp, Artificial
  probe
  misc_feature (1)..(25): SEQ ID NO: 7525; WAN024CXM_at; Start 41; Stop 65
ccctctttacaccaaagttgacaat

SEQ ID NO: 137499 - DNA, 25 bp, Artificial
  probe
  misc_feature (1)..(25): SEQ ID NO: 7525; WAN024CXM_at; Start 9; Stop 33
aagtaaaaatcgctctatgactgac

SEQ ID NO: 137500 - DNA, 25 bp, Artificial
  probe
  misc_feature (1)..(25): SEQ ID NO: 7525; WAN024CXM_at; Start 22; Stop 46
tctatgactgacttcaactccctct

SEQ ID NO: 137501 - DNA, 25 bp, Artificial
  probe
  misc_feature (1)..(25): SEQ ID NO: 7525; WAN024CXM_at; Start 15; Stop 39
aaatcgctctatgactgacttcaac

SEQ ID NO: 137502 - DNA, 25 bp, Artificial
  probe
  misc_feature (1)..(25): SEQ ID NO: 7525; WAN024CXM_at; Start 36; Stop 60
caactccctctttacaccaaagttg

SEQ ID NO: 137503 - DNA, 25 bp, Artificial
  probe
  misc_feature (1)..(25): SEQ ID NO: 7525; WAN024CXM_at; Start 46; Stop 70
tttacaccaaagttgacaatcttga

SEQ ID NO: 137504 - DNA, 25 bp, Artificial
  probe
  misc_feature (1)..(25): SEQ ID NO: 7525; WAN024CXM_at; Start 5; Stop 29
ttgtaagtaaaaatcgctctatgac

SEQ ID NO: 137505 - DNA, 25 bp, Artificial
  probe
  misc_feature (1)..(25): SEQ ID NO: 7525; WAN024CXM_at; Start 3; Stop 27
gattgtaagtaaaaatcgctctatg

SEQ ID NO: 137506 - DNA, 25 bp, Artificial
  probe
  misc_feature (1)..(25): SEQ ID NO: 7525; WAN024CXM_at; Start 18; Stop 42
tcgctctatgactgacttcaactcc

SEQ ID NO: 137507 - DNA, 25 bp, Artificial
  probe
  misc_feature (1)..(25): SEQ ID NO: 7525; WAN024CXM_at; Start 54; Stop 78
aaagttgacaatcttgacactttgt

SEQ ID NO: 137508 - DNA, 25 bp, Artificial
  probe
  misc_feature (1)..(25): SEQ ID NO: 7525; WAN024CXM_at; Start 52; Stop 76
ccaaagttgacaatcttgacacttt

SEQ ID NO: 137509 - DNA, 25 bp, Artificial
  probe
  misc_feature (1)..(25): SEQ ID NO: 7525; WAN024CXM_at; Start 43; Stop 67
ctctttacaccaaagttgacaatct

SEQ ID NO: 137510 - DNA, 25 bp, Artificial
  probe
  misc_feature (1)..(25): SEQ ID NO: 7525; WAN024CXM_at; Start 47; Stop 71
ttacaccaaagttgacaatcttgac

SEQ ID NO: 137511 - DNA, 25 bp, Artificial
  probe
  misc_feature (1)..(25): SEQ ID NO: 7525; WAN024CXM_at; Start 6; Stop 30
tgtaagtaaaaatcgctctatgact

SEQ ID NO: 137512 - DNA, 25 bp, Artificial
  probe
  misc_feature (1)..(25): SEQ ID NO: 7525; WAN024CXM_at; Start 1; Stop 25
ttgattgtaagtaaaaatcgctcta

SEQ ID NO: 137513 - DNA, 25 bp, Artificial
  probe
  misc_feature (1)..(25): SEQ ID NO: 7525; WAN024CXM_at; Start 24; Stop 48
tatgactgacttcaactccctcttt

SEQ ID NO: 137514 - DNA, 25 bp, Artificial
  probe
  misc_feature (1)..(25): SEQ ID NO: 7525; WAN024CXM_at; Start 39; Stop 63
ctccctctttacaccaaagttgaca

SEQ ID NO: 137515 - DNA, 25 bp, Artificial
  probe
  misc_feature (1)..(25): SEQ ID NO: 1139; WAN024CXN_at; Start 563; Stop 587
tagatgatatctatactacaggagc

SEQ ID NO: 137516 - DNA, 25 bp, Artificial
  probe
  misc_feature (1)..(25): SEQ ID NO: 1139; WAN024CXN_at; Start 479; Stop 503
ctaaaaatcgttcagagcgcttggg

SEQ ID NO: 137517 - DNA, 25 bp, Artificial
  probe
  misc_feature (1)..(25): SEQ ID NO: 1139; WAN024CXN_at; Start 172; Stop 196
caagattgtcaactttggtgtaaag

SEQ ID NO: 137518 - DNA, 25 bp, Artificial
  probe
  misc_feature (1)..(25): SEQ ID NO: 1139; WAN024CXN_at; Start 2; Stop 26
tgaagtgcttgttatgtgggcagac

SEQ ID NO: 137519 - DNA, 25 bp, Artificial
  probe
  misc_feature (1)..(25): SEQ ID NO: 1139; WAN024CXN_at; Start 464; Stop 488
agagagccagttcttctaaaaatcg

SEQ ID NO: 137520 - DNA, 25 bp, Artificial
  probe
  misc_feature (1)..(25): SEQ ID NO: 1139; WAN024CXN_at; Start 226; Stop 250
tttacttacaatcaagctatgaagg

SEQ ID NO: 137521 - DNA, 25 bp, Artificial
  probe
  misc_feature (1)..(25): SEQ ID NO: 1139; WAN024CXN_at; Start 340; Stop 364
gagtatcaatttgttgtaattcccc

SEQ ID NO: 137522 - DNA, 25 bp, Artificial
  probe
  misc_feature (1)..(25): SEQ ID NO: 1139; WAN024CXN_at; Start 14; Stop 38
tatgtgggcagactatgaagactgt

SEQ ID NO: 137523 - DNA, 25 bp, Artificial
  probe
  misc_feature (1)..(25): SEQ ID NO: 1139; WAN024CXN_at; Start 48; Stop 72
tagtagtctcttacttctgaggaat

SEQ ID NO: 137524 - DNA, 25 bp, Artificial
  probe
  misc_feature (1)..(25): SEQ ID NO: 1139; WAN024CXN_at; Start 389; Stop 413
gaggatttaatcaggttgagggctt

SEQ ID NO: 137525 - DNA, 25 bp, Artificial
  probe
  misc_feature (1)..(25): SEQ ID NO: 1139; WAN024CXN_at; Start 124; Stop 148
gaagagaactgtccaaattgtatga

SEQ ID NO: 137526 - DNA, 25 bp, Artificial
  probe
  misc_feature (1)..(25): SEQ ID NO: 1139; WAN024CXN_at; Start 522; Stop 546
tattaaaagtggagtcactattcct

SEQ ID NO: 137527 - DNA, 25 bp, Artificial
  probe
  misc_feature (1)..(25): SEQ ID NO: 1139; WAN024CXN_at; Start 583; Stop 607
ggagcaactataaatcgtgttaaga

SEQ ID NO: 137528 - DNA, 25 bp, Artificial
  probe
  misc_feature (1)..(25): SEQ ID NO: 1139; WAN024CXN_at; Start 627; Stop 651
tgctaaggatgtaaaaacattttcc

SEQ ID NO: 137529 - DNA, 25 bp, Artificial
  probe
  misc_feature (1)..(25): SEQ ID NO: 1139; WAN024CXN_at; Start 160; Stop 184
tcaacaaagtgtcaagattgtcaac

SEQ ID NO: 137530 - DNA, 25 bp, Artificial
  probe
  misc_feature (1)..(25): SEQ ID NO: 1139; WAN024CXN_at; Start 598; Stop 622
cgtgttaagaaactgttggaagaag

SEQ ID NO: 137531 - DNA, 25 bp, Artificial
  probe
  misc_feature (1)..(25): SEQ ID NO: 1139; WAN024CXN_at; Start 258; Stop 282
cagtcggtataagtttgatggagac

SEQ ID NO: 137532 - DNA, 25 bp, Artificial
  probe
  misc_feature (1)..(25): SEQ ID NO: 1139; WAN024CXN_at; Start 76; Stop 100
gactcttgtctttgttcagactgtg

SEQ ID NO: 137533 - DNA, 25 bp, Artificial
  probe
  misc_feature (1)..(25): SEQ ID NO: 1139; WAN024CXN_at; Start 449; Stop 473
tagagaaaagagaagagagagccag

SEQ ID NO: 137534 - DNA, 25 bp, Artificial
  probe
  misc_feature (1)..(25): SEQ ID NO: 1139; WAN024CXN_at; Start 415; Stop 439
gtagaggcagcaggctttgagtatc

SEQ ID NO: 137535 - DNA, 25 bp, Artificial
  probe
  misc_feature (1)..(25): SEQ ID NO: 1139; WAN024CXN_at; Start 92; Stop 116
cagactgtgattctacttttgaaag

SEQ ID NO: 137536 - DNA, 25 bp, Artificial
  probe
  misc_feature (1)..(25): SEQ ID NO: 1139; WAN024CXN_at; Start 313; Stop 337
ttaagtgaggagttgaaaaagtaca

SEQ ID NO: 137537 - DNA, 25 bp, Artificial
  probe
  misc_feature (1)..(25): SEQ ID NO: 1139; WAN024CXN_at; Start 210; Stop 234
cagtcatagagcgatttttacttac

SEQ ID NO: 137538 - DNA, 25 bp, Artificial
  probe
  misc_feature (1)..(25): SEQ ID NO: 1139; WAN024CXN_at; Start 152; Stop 176
cagagttgtcaacaaagtgtcaaga

SEQ ID NO: 137539 - DNA, 25 bp, Artificial
  probe
  misc_feature (1)..(25): SEQ ID NO: 1139; WAN024CXN_at; Start 322; Stop 346
gagttgaaaaagtacaaagagtatc

SEQ ID NO: 137540 - DNA, 25 bp, Artificial
  probe
  misc_feature (1)..(25): SEQ ID NO: 1139; WAN024CXN_at; Start 20; Stop 44
ggcagactatgaagactgttttaac

SEQ ID NO: 137541 - DNA, 25 bp, Artificial
  probe
  misc_feature (1)..(25): SEQ ID NO: 1139; WAN024CXN_at; Start 352; Stop 376
gttgtaattcccctaagtcctgata

SEQ ID NO: 137542 - DNA, 25 bp, Artificial
  probe
  misc_feature (1)..(25): SEQ ID NO: 1139; WAN024CXN_at; Start 395; Stop 419
ttaatcaggttgagggcttggtaga

SEQ ID NO: 137543 - DNA, 25 bp, Artificial
  probe
  misc_feature (1)..(25): SEQ ID NO: 1139; WAN024CXN_at; Start 137; Stop 161
caaattgtatgaaaacagagttgtc

SEQ ID NO: 137544 - DNA, 25 bp, Artificial
  probe
  misc_feature (1)..(25): SEQ ID NO: 1139; WAN024CXN_at; Start 362; Stop 386
ccctaagtcctgatagatatgctaa

SEQ ID NO: 137545 - DNA, 25 bp, Artificial
  probe
  misc_feature (1)..(25): SEQ ID NO: 1139; WAN024CXN_at; Start 241; Stop 265
gctatgaaggattttttcagtcggt

SEQ ID NO: 137546 - DNA, 25 bp, Artificial
  probe
  misc_feature (1)..(25): SEQ ID NO: 1139; WAN024CXN_at; Start 576; Stop 600
tactacaggagcaactataaatcgt

SEQ ID NO: 137547 - DNA, 25 bp, Artificial
  probe
  misc_feature (1)..(25): SEQ ID NO: 1139; WAN024CXN_at; Start 274; Stop 298
gatggagacttcctgttaagaaaag

SEQ ID NO: 137548 - DNA, 25 bp, Artificial
  probe
  misc_feature (1)..(25): SEQ ID NO: 1139; WAN024CXN_at; Start 300; Stop 324
tttcgcttcatttttaagtgaggag

SEQ ID NO: 137549 - DNA, 25 bp, Artificial
  probe
  misc_feature (1)..(25): SEQ ID NO: 5032; WAN024CXO_at; Start 77; Stop 101
tgtccacgaactttttccaaagcac

SEQ ID NO: 137550 - DNA, 25 bp, Artificial
  probe
  misc_feature (1)..(25): SEQ ID NO: 5032; WAN024CXO_at; Start 9; Stop 33
ccaattgaccgatacgagtgatttt

SEQ ID NO: 137551 - DNA, 25 bp, Artificial
  probe
  misc_feature (1)..(25): SEQ ID NO: 5032; WAN024CXO_at; Start 54; Stop 78
tttcggctactacatcaaagctctg

SEQ ID NO: 137552 - DNA, 25 bp, Artificial
  probe
  misc_feature (1)..(25): SEQ ID NO: 5032; WAN024CXO_at; Start 17; Stop 41
ccgatacgagtgattttaaaggcag

SEQ ID NO: 137553 - DNA, 25 bp, Artificial
  probe
  misc_feature (1)..(25): SEQ ID NO: 5032; WAN024CXO_at; Start 148; Stop 172
tgcttccccaacaccatgaaaggca

SEQ ID NO: 137554 - DNA, 25 bp, Artificial
  probe
  misc_feature (1)..(25): SEQ ID NO: 5032; WAN024CXO_at; Start 184; Stop 208
tggattgtcctcaacagcattagcg

SEQ ID NO: 137555 - DNA, 25 bp, Artificial
  probe
  misc_feature (1)..(25): SEQ ID NO: 5032; WAN024CXO_at; Start 38; Stop 62
gcagttttcttaactgtttcggcta

SEQ ID NO: 137556 - DNA, 25 bp, Artificial
  probe
  misc_feature (1)..(25): SEQ ID NO: 5032; WAN024CXO_at; Start 23; Stop 47
cgagtgattttaaaggcagttttct

SEQ ID NO: 137557 - DNA, 25 bp, Artificial
  probe
  misc_feature (1)..(25): SEQ ID NO: 5032; WAN024CXO_at; Start 194; Stop 218
tcaacagcattagcgaatacaacca

SEQ ID NO: 137558 - DNA, 25 bp, Artificial
  probe
  misc_feature (1)..(25): SEQ ID NO: 5032; WAN024CXO_at; Start 64; Stop 88
tacatcaaagctctgtccacgaact

SEQ ID NO: 137559 - DNA, 25 bp, Artificial
  probe
  misc_feature (1)..(25): SEQ ID NO: 5032; WAN024CXO_at; Start 127; Stop 151
tccgacattgatgataacatctgct

SEQ ID NO: 137560 - DNA, 25 bp, Artificial
  probe
  misc_feature (1)..(25): SEQ ID NO: 5032; WAN024CXO_at; Start 166; Stop 190
aaaggcacccgccataaatggattg

SEQ ID NO: 137561 - DNA, 25 bp, Artificial
  probe
  misc_feature (1)..(25): SEQ ID NO: 5032; WAN024CXO_at; Start 206; Stop 230
gcgaatacaaccaacttggccactc

SEQ ID NO: 137562 - DNA, 25 bp, Artificial
  probe
  misc_feature (1)..(25): SEQ ID NO: 5032; WAN024CXO_at; Start 73; Stop 97
gctctgtccacgaactttttccaaa

SEQ ID NO: 137563 - DNA, 25 bp, Artificial
  probe
  misc_feature (1)..(25): SEQ ID NO: 5032; WAN024CXO_at; Start 5; Stop 29
ccaaccaattgaccgatacgagtga

SEQ ID NO: 137564 - DNA, 25 bp, Artificial
  probe
  misc_feature (1)..(25): SEQ ID NO: 5032; WAN024CXO_at; Start 178; Stop 202
cataaatggattgtcctcaacagca

SEQ ID NO: 137565 - DNA, 25 bp, Artificial
  probe
  misc_feature (1)..(25): SEQ ID NO: 5032; WAN024CXO_at; Start 200; Stop 224
gcattagcgaatacaaccaacttgg

SEQ ID NO: 137566 - DNA, 25 bp, Artificial
  probe
  misc_feature (1)..(25): SEQ ID NO: 5032; WAN024CXO_at; Start 116; Stop 140
ggaccagaaactccgacattgatga

SEQ ID NO: 137567 - DNA, 25 bp, Artificial
  probe
  misc_feature (1)..(25): SEQ ID NO: 5032; WAN024CXO_at; Start 161; Stop 185
ccatgaaaggcacccgccataaatg

SEQ ID NO: 137568 - DNA, 25 bp, Artificial
  probe
  misc_feature (1)..(25): SEQ ID NO: 5032; WAN024CXO_at; Start 119; Stop 143
ccagaaactccgacattgatgataa

SEQ ID NO: 137569 - DNA, 25 bp, Artificial
  probe
  misc_feature (1)..(25): SEQ ID NO: 5032; WAN024CXO_at; Start 61; Stop 85
tactacatcaaagctctgtccacga

SEQ ID NO: 137570 - DNA, 25 bp, Artificial
  probe
  misc_feature (1)..(25): SEQ ID NO: 5032; WAN024CXO_at; Start 186; Stop 210
gattgtcctcaacagcattagcgaa

SEQ ID NO: 137571 - DNA, 25 bp, Artificial
  probe
  misc_feature (1)..(25): SEQ ID NO: 5032; WAN024CXO_at; Start 189; Stop 213
tgtcctcaacagcattagcgaatac

SEQ ID NO: 137572 - DNA, 25 bp, Artificial
  probe
  misc_feature (1)..(25): SEQ ID NO: 5032; WAN024CXO_at; Start 216; Stop 240
ccaacttggccactcccatatctga

SEQ ID NO: 137573 - DNA, 25 bp, Artificial
  probe
  misc_feature (1)..(25): SEQ ID NO: 5032; WAN024CXO_at; Start 136; Stop 160
gatgataacatctgcttccccaaca

SEQ ID NO: 137574 - DNA, 25 bp, Artificial
  probe
  misc_feature (1)..(25): SEQ ID NO: 5032; WAN024CXO_at; Start 58; Stop 82
ggctactacatcaaagctctgtcca

SEQ ID NO: 137575 - DNA, 25 bp, Artificial
  probe
  misc_feature (1)..(25): SEQ ID NO: 5032; WAN024CXO_at; Start 146; Stop 170
tctgcttccccaacaccatgaaagg

SEQ ID NO: 137576 - DNA, 25 bp, Artificial
  probe
  misc_feature (1)..(25): SEQ ID NO: 5032; WAN024CXO_at; Start 111; Stop 135
caccaggaccagaaactccgacatt

SEQ ID NO: 137577 - DNA, 25 bp, Artificial
  probe
  misc_feature (1)..(25): SEQ ID NO: 5032; WAN024CXO_at; Start 48; Stop 72
taactgtttcggctactacatcaaa

SEQ ID NO: 137578 - DNA, 25 bp, Artificial
  probe
  misc_feature (1)..(25): SEQ ID NO: 5032; WAN024CXO_at; Start 203; Stop 227
ttagcgaatacaaccaacttggcca

SEQ ID NO: 137579 - DNA, 25 bp, Artificial
  probe
  misc_feature (1)..(25): SEQ ID NO: 5032; WAN024CXO_at; Start 2; Stop 26
tgaccaaccaattgaccgatacgag

SEQ ID NO: 137580 - DNA, 25 bp, Artificial
  probe
  misc_feature (1)..(25): SEQ ID NO: 5032; WAN024CXO_at; Start 176; Stop 200
gccataaatggattgtcctcaacag

SEQ ID NO: 137581 - DNA, 25 bp, Artificial
  probe
  misc_feature (1)..(25): SEQ ID NO: 5032; WAN024CXO_at; Start 170; Stop 194
gcacccgccataaatggattgtcct

SEQ ID NO: 137582 - DNA, 25 bp, Artificial
  probe
  misc_feature (1)..(25): SEQ ID NO: 5032; WAN024CXO_at; Start 122; Stop 146
gaaactccgacattgatgataacat

SEQ ID NO: 137583 - DNA, 25 bp, Artificial
  probe
  misc_feature (1)..(25): SEQ ID NO: 1137; WAN024CXP_at; Start 129; Stop 153
aacaccgattgctgcttcatccgca

SEQ ID NO: 137584 - DNA, 25 bp, Artificial
  probe
  misc_feature (1)..(25): SEQ ID NO: 1137; WAN024CXP_at; Start 169; Stop 193
gtttcagcaggcgtatcttctggga

SEQ ID NO: 137585 - DNA, 25 bp, Artificial
  probe
  misc_feature (1)..(25): SEQ ID NO: 1137; WAN024CXP_at; Start 142; Stop 166
gcttcatccgcaatcatagccgcaa

SEQ ID NO: 137586 - DNA, 25 bp, Artificial
  probe
  misc_feature (1)..(25): SEQ ID NO: 1137; WAN024CXP_at; Start 345; Stop 369
catcactccaccctttttaacttgg

SEQ ID NO: 137587 - DNA, 25 bp, Artificial
  probe
  misc_feature (1)..(25): SEQ ID NO: 1137; WAN024CXP_at; Start 87; Stop 111
tcctttgggaatgatacgaacagct

SEQ ID NO: 137588 - DNA, 25 bp, Artificial
  probe
  misc_feature (1)..(25): SEQ ID NO: 1137; WAN024CXP_at; Start 217; Stop 241
gaacagatagccgtcatagcttcta

SEQ ID NO: 137589 - DNA, 25 bp, Artificial
  probe
  misc_feature (1)..(25): SEQ ID NO: 1137; WAN024CXP_at; Start 308; Stop 332
taaaggcaccagataaaccaccgac

SEQ ID NO: 137590 - DNA, 25 bp, Artificial
  probe
  misc_feature (1)..(25): SEQ ID NO: 1137; WAN024CXP_at; Start 22; Stop 46
ccattaaccttcataacgggtgcag

SEQ ID NO: 137591 - DNA, 25 bp, Artificial
  probe
  misc_feature (1)..(25): SEQ ID NO: 1137; WAN024CXP_at; Start 2; Stop 26
tgaagtcgacagacgaagccccatt

SEQ ID NO: 137592 - DNA, 25 bp, Artificial
  probe
  misc_feature (1)..(25): SEQ ID NO: 1137; WAN024CXP_at; Start 373; Stop 397
ttcaagagggccaaggcagccgtcg

SEQ ID NO: 137593 - DNA, 25 bp, Artificial
  probe
  misc_feature (1)..(25): SEQ ID NO: 1137; WAN024CXP_at; Start 54; Stop 78
tagaccaccaaactcaatcatatcg

SEQ ID NO: 137594 - DNA, 25 bp, Artificial
  probe
  misc_feature (1)..(25): SEQ ID NO: 1137; WAN024CXP_at; Start 468; Stop 492
ggttggtgccaaactcaagtccaca

SEQ ID NO: 137595 - DNA, 25 bp, Artificial
  probe
  misc_feature (1)..(25): SEQ ID NO: 1137; WAN024CXP_at; Start 195; Stop 219
ggcaatcatatccaatccaacagaa

SEQ ID NO: 137596 - DNA, 25 bp, Artificial
  probe
  misc_feature (1)..(25): SEQ ID NO: 1137; WAN024CXP_at; Start 107; Stop 131
cagctgttgttttcatgttgataac

SEQ ID NO: 137597 - DNA, 25 bp, Artificial
  probe
  misc_feature (1)..(25): SEQ ID NO: 1137; WAN024CXP_at; Start 399; Stop 423
tccatgcgtgccaactgtttctagc

SEQ ID NO: 137598 - DNA, 25 bp, Artificial
  probe
  misc_feature (1)..(25): SEQ ID NO: 1137; WAN024CXP_at; Start 414; Stop 438
tgtttctagccccatttcctcaagg

SEQ ID NO: 137599 - DNA, 25 bp, Artificial
  probe
  misc_feature (1)..(25): SEQ ID NO: 1137; WAN024CXP_at; Start 321; Stop 345
taaaccaccgacttggttgcaggcc

SEQ ID NO: 137600 - DNA, 25 bp, Artificial
  probe
  misc_feature (1)..(25): SEQ ID NO: 1137; WAN024CXP_at; Start 240; Stop 264
tagtttttctaaattaagagagcca

SEQ ID NO: 137601 - DNA, 25 bp, Artificial
  probe
  misc_feature (1)..(25): SEQ ID NO: 1137; WAN024CXP_at; Start 254; Stop 278
taagagagccattttgcactgcagc

SEQ ID NO: 137602 - DNA, 25 bp, Artificial
  probe
  misc_feature (1)..(25): SEQ ID NO: 1137; WAN024CXP_at; Start 507; Stop 531
acccagtctctcactggccatttga

SEQ ID NO: 137603 - DNA, 25 bp, Artificial
  probe
  misc_feature (1)..(25): SEQ ID NO: 1137; WAN024CXP_at; Start 180; Stop 204
cgtatcttctgggatggcaatcata

SEQ ID NO: 137604 - DNA, 25 bp, Artificial
  probe
  misc_feature (1)..(25): SEQ ID NO: 1137; WAN024CXP_at; Start 295; Stop 319
tcagaaacagggataaaggcaccag

SEQ ID NO: 137605 - DNA, 25 bp, Artificial
  probe
  misc_feature (1)..(25): SEQ ID NO: 1137; WAN024CXP_at; Start 92; Stop 116
tgggaatgatacgaacagctgttgt

SEQ ID NO: 137606 - DNA, 25 bp, Artificial
  probe
  misc_feature (1)..(25): SEQ ID NO: 1137; WAN024CXP_at; Start 282; Stop 306
cattccttcatcctcagaaacaggg

SEQ ID NO: 137607 - DNA, 25 bp, Artificial
  probe
  misc_feature (1)..(25): SEQ ID NO: 1137; WAN024CXP_at; Start 120; Stop 144
catgttgataacaccgattgctgct

SEQ ID NO: 137608 - DNA, 25 bp, Artificial
  probe
  misc_feature (1)..(25): SEQ ID NO: 1137; WAN024CXP_at; Start 268; Stop 292
tgcactgcagcaatcattccttcat

SEQ ID NO: 137609 - DNA, 25 bp, Artificial
  probe
  misc_feature (1)..(25): SEQ ID NO: 1137; WAN024CXP_at; Start 421; Stop 445
agccccatttcctcaaggacacgtg

SEQ ID NO: 137610 - DNA, 25 bp, Artificial
  probe
  misc_feature (1)..(25): SEQ ID NO: 1137; WAN024CXP_at; Start 207; Stop 231
caatccaacagaacagatagccgtc

SEQ ID NO: 137611 - DNA, 25 bp, Artificial
  probe
  misc_feature (1)..(25): SEQ ID NO: 1137; WAN024CXP_at; Start 35; Stop 59
taacgggtgcagttcctaatagacc

SEQ ID NO: 137612 - DNA, 25 bp, Artificial
  probe
  misc_feature (1)..(25): SEQ ID NO: 1137; WAN024CXP_at; Start 361; Stop 385
ttaacttggtcgttcaagagggcca

SEQ ID NO: 137613 - DNA, 25 bp, Artificial
  probe
  misc_feature (1)..(25): SEQ ID NO: 1137; WAN024CXP_at; Start 385; Stop 409
aaggcagccgtcgttccatgcgtgc

SEQ ID NO: 137614 - DNA, 25 bp, Artificial
  probe
  misc_feature (1)..(25): SEQ ID NO: 1137; WAN024CXP_at; Start 477; Stop 501
caaactcaagtccacaataccaaac

SEQ ID NO: 137615 - DNA, 25 bp, Artificial
  probe
  misc_feature (1)..(25): SEQ ID NO: 1137; WAN024CXP_at; Start 226; Stop 250
gccgtcatagcttctagtttttcta

SEQ ID NO: 137616 - DNA, 25 bp, Artificial
  probe
  misc_feature (1)..(25): SEQ ID NO: 1137; WAN024CXP_at; Start 330; Stop 354
gacttggttgcaggccatcactcca

SEQ ID NO: 137617 - DNA, 25 bp, Artificial
  probe
  misc_feature (1)..(25): SEQ ID NO: 5188; WAN024CXQ_at; Start 49; Stop 73
caaaagagaaatccccatggtaatg

SEQ ID NO: 137618 - DNA, 25 bp, Artificial
  probe
  misc_feature (1)..(25): SEQ ID NO: 5188; WAN024CXQ_at; Start 193; Stop 217
gatttttacattcaaagtttgccca

SEQ ID NO: 137619 - DNA, 25 bp, Artificial
  probe
  misc_feature (1)..(25): SEQ ID NO: 5188; WAN024CXQ_at; Start 90; Stop 114
tttgctcctcaatcatggcgatggt

SEQ ID NO: 137620 - DNA, 25 bp, Artificial
  probe
  misc_feature (1)..(25): SEQ ID NO: 5188; WAN024CXQ_at; Start 56; Stop 80
gaaatccccatggtaatggttctaa

SEQ ID NO: 137621 - DNA, 25 bp, Artificial
  probe
  misc_feature (1)..(25): SEQ ID NO: 5188; WAN024CXQ_at; Start 85; Stop 109
gaagttttgctcctcaatcatggcg

SEQ ID NO: 137622 - DNA, 25 bp, Artificial
  probe
  misc_feature (1)..(25): SEQ ID NO: 5188; WAN024CXQ_at; Start 263; Stop 287
tcactagatacaacagccatcatcg

SEQ ID NO: 137623 - DNA, 25 bp, Artificial
  probe
  misc_feature (1)..(25): SEQ ID NO: 5188; WAN024CXQ_at; Start 162; Stop 186
tagcttcgaaaatcgctgcactctg

SEQ ID NO: 137624 - DNA, 25 bp, Artificial
  probe
  misc_feature (1)..(25): SEQ ID NO: 5188; WAN024CXQ_at; Start 107; Stop 131
gcgatggtttcagtaacttgtctaa

SEQ ID NO: 137625 - DNA, 25 bp, Artificial
  probe
  misc_feature (1)..(25): SEQ ID NO: 5188; WAN024CXQ_at; Start 314; Stop 338
gagatatcgtcaatattcaatccta

SEQ ID NO: 137626 - DNA, 25 bp, Artificial
  probe
  misc_feature (1)..(25): SEQ ID NO: 5188; WAN024CXQ_at; Start 221; Stop 245
gcttcaaattcattacgaagatagg

SEQ ID NO: 137627 - DNA, 25 bp, Artificial
  probe
  misc_feature (1)..(25): SEQ ID NO: 5188; WAN024CXQ_at; Start 1; Stop 25
ttgatagattttctccgcagcacga

SEQ ID NO: 137628 - DNA, 25 bp, Artificial
  probe
  misc_feature (1)..(25): SEQ ID NO: 5188; WAN024CXQ_at; Start 40; Stop 64
gatacagtccaaaagagaaatcccc

SEQ ID NO: 137629 - DNA, 25 bp, Artificial
  probe
  misc_feature (1)..(25): SEQ ID NO: 5188; WAN024CXQ_at; Start 231; Stop 255
cattacgaagataggtaaaatcttg

SEQ ID NO: 137630 - DNA, 25 bp, Artificial
  probe
  misc_feature (1)..(25): SEQ ID NO: 5188; WAN024CXQ_at; Start 34; Stop 58
tggatcgatacagtccaaaagagaa

SEQ ID NO: 137631 - DNA, 25 bp, Artificial
  probe
  misc_feature (1)..(25): SEQ ID NO: 5188; WAN024CXQ_at; Start 201; Stop 225
cattcaaagtttgcccaaaagcttc

SEQ ID NO: 137632 - DNA, 25 bp, Artificial
  probe
  misc_feature (1)..(25): SEQ ID NO: 5188; WAN024CXQ_at; Start 141; Stop 165
tgacctcctagatattatacatagc

SEQ ID NO: 137633 - DNA, 25 bp, Artificial
  probe
  misc_feature (1)..(25): SEQ ID NO: 5188; WAN024CXQ_at; Start 213; Stop 237
gcccaaaagcttcaaattcattacg

SEQ ID NO: 137634 - DNA, 25 bp, Artificial
  probe
  misc_feature (1)..(25): SEQ ID NO: 5188; WAN024CXQ_at; Start 136; Stop 160
catgatgacctcctagatattatac

SEQ ID NO: 137635 - DNA, 25 bp, Artificial
  probe
  misc_feature (1)..(25): SEQ ID NO: 5188; WAN024CXQ_at; Start 246; Stop 270
taaaatcttgcttttcatcactaga

SEQ ID NO: 137636 - DNA, 25 bp, Artificial
  probe
  misc_feature (1)..(25): SEQ ID NO: 5188; WAN024CXQ_at; Start 44; Stop 68
cagtccaaaagagaaatccccatgg

SEQ ID NO: 137637 - DNA, 25 bp, Artificial
  probe
  misc_feature (1)..(25): SEQ ID NO: 5188; WAN024CXQ_at; Start 305; Stop 329
acagtttgagagatatcgtcaatat

SEQ ID NO: 137638 - DNA, 25 bp, Artificial
  probe
  misc_feature (1)..(25): SEQ ID NO: 5188; WAN024CXQ_at; Start 99; Stop 123
caatcatggcgatggtttcagtaac

SEQ ID NO: 137639 - DNA, 25 bp, Artificial
  probe
  misc_feature (1)..(25): SEQ ID NO: 5188; WAN024CXQ_at; Start 175; Stop 199
cgctgcactctgaatattgattttt

SEQ ID NO: 137640 - DNA, 25 bp, Artificial
  probe
  misc_feature (1)..(25): SEQ ID NO: 5188; WAN024CXQ_at; Start 129; Stop 153
taatatccatgatgacctcctagat

SEQ ID NO: 137641 - DNA, 25 bp, Artificial
  probe
  misc_feature (1)..(25): SEQ ID NO: 5188; WAN024CXQ_at; Start 7; Stop 31
gattttctccgcagcacgattgata

SEQ ID NO: 137642 - DNA, 25 bp, Artificial
  probe
  misc_feature (1)..(25): SEQ ID NO: 5188; WAN024CXQ_at; Start 278; Stop 302
gccatcatcgtaaaatattcatcca

SEQ ID NO: 137643 - DNA, 25 bp, Artificial
  probe
  misc_feature (1)..(25): SEQ ID NO: 5188; WAN024CXQ_at; Start 169; Stop 193
gaaaatcgctgcactctgaatattg

SEQ ID NO: 137644 - DNA, 25 bp, Artificial
  probe
  misc_feature (1)..(25): SEQ ID NO: 5188; WAN024CXQ_at; Start 269; Stop 293
gatacaacagccatcatcgtaaaat

SEQ ID NO: 137645 - DNA, 25 bp, Artificial
  probe
  misc_feature (1)..(25): SEQ ID NO: 5188; WAN024CXQ_at; Start 156; Stop 180
tatacatagcttcgaaaatcgctgc

SEQ ID NO: 137646 - DNA, 25 bp, Artificial
  probe
  misc_feature (1)..(25): SEQ ID NO: 5188; WAN024CXQ_at; Start 63; Stop 87
ccatggtaatggttctaatatcgaa

SEQ ID NO: 137647 - DNA, 25 bp, Artificial
  probe
  misc_feature (1)..(25): SEQ ID NO: 5188; WAN024CXQ_at; Start 103; Stop 127
catggcgatggtttcagtaacttgt

SEQ ID NO: 137648 - DNA, 25 bp, Artificial
  probe
  misc_feature (1)..(25): SEQ ID NO: 5188; WAN024CXQ_at; Start 119; Stop 143
gtaacttgtctaatatccatgatga

SEQ ID NO: 137649 - DNA, 25 bp, Artificial
  probe
  misc_feature (1)..(25): SEQ ID NO: 5188; WAN024CXQ_at; Start 258; Stop 282
tttcatcactagatacaacagccat

SEQ ID NO: 137650 - DNA, 25 bp, Artificial
  probe
  misc_feature (1)..(25): SEQ ID NO: 5188; WAN024CXQ_at; Start 76; Stop 100
tctaatatcgaagttttgctcctca

SEQ ID NO: 137651 - DNA, 25 bp, Artificial
  probe
  misc_feature (1)..(25): SEQ ID NO: 5152; WAN024CXR_at; Start 315; Stop 339
caatattcagagtgcagcgattttc

SEQ ID NO: 137652 - DNA, 25 bp, Artificial
  probe
  misc_feature (1)..(25): SEQ ID NO: 5152; WAN024CXR_at; Start 130; Stop 154
tctggaattgttgcaggtgtttctg

SEQ ID NO: 137653 - DNA, 25 bp, Artificial
  probe
  misc_feature (1)..(25): SEQ ID NO: 5152; WAN024CXR_at; Start 151; Stop 175
tctggtaaaattgcagaattaggat

SEQ ID NO: 137654 - DNA, 25 bp, Artificial
  probe
  misc_feature (1)..(25): SEQ ID NO: 5152; WAN024CXR_at; Start 261; Stop 285
tacctatcttcgtaatgaatttgaa

SEQ ID NO: 137655 - DNA, 25 bp, Artificial
  probe
  misc_feature (1)..(25): SEQ ID NO: 5152; WAN024CXR_at; Start 28; Stop 52
tactatttgaaaagaatcctgttta

SEQ ID NO: 137656 - DNA, 25 bp, Artificial
  probe
  misc_feature (1)..(25): SEQ ID NO: 5152; WAN024CXR_at; Start 233; Stop 257
ttgtatctagtgatgaaaagcaaga

SEQ ID NO: 137657 - DNA, 25 bp, Artificial
  probe
  misc_feature (1)..(25): SEQ ID NO: 5152; WAN024CXR_at; Start 328; Stop 352
gcagcgattttcgaagctatgtata

SEQ ID NO: 137658 - DNA, 25 bp, Artificial
  probe
  misc_feature (1)..(25): SEQ ID NO: 5152; WAN024CXR_at; Start 324; Stop 348
gagtgcagcgattttcgaagctatg

SEQ ID NO: 137659 - DNA, 25 bp, Artificial
  probe
  misc_feature (1)..(25): SEQ ID NO: 5152; WAN024CXR_at; Start 280; Stop 304
tttgaagcttttgggcaaactttga

SEQ ID NO: 137660 - DNA, 25 bp, Artificial
  probe
  misc_feature (1)..(25): SEQ ID NO: 5152; WAN024CXR_at; Start 178; Stop 202
aatattgacgatatctctcaaactg

SEQ ID NO: 137661 - DNA, 25 bp, Artificial
  probe
  misc_feature (1)..(25): SEQ ID NO: 5152; WAN024CXR_at; Start 173; Stop 197
gattgaatattgacgatatctctca

SEQ ID NO: 137662 - DNA, 25 bp, Artificial
  probe
  misc_feature (1)..(25): SEQ ID NO: 5152; WAN024CXR_at; Start 318; Stop 342
tattcagagtgcagcgattttcgaa

SEQ ID NO: 137663 - DNA, 25 bp, Artificial
  probe
  misc_feature (1)..(25): SEQ ID NO: 5152; WAN024CXR_at; Start 24; Stop 48
gctatactatttgaaaagaatcctg

SEQ ID NO: 137664 - DNA, 25 bp, Artificial
  probe
  misc_feature (1)..(25): SEQ ID NO: 5152; WAN024CXR_at; Start 134; Stop 158
gaattgttgcaggtgtttctggtaa

SEQ ID NO: 137665 - DNA, 25 bp, Artificial
  probe
  misc_feature (1)..(25): SEQ ID NO: 5152; WAN024CXR_at; Start 248; Stop 272
aaaagcaagattttacctatcttcg

SEQ ID NO: 137666 - DNA, 25 bp, Artificial
  probe
  misc_feature (1)..(25): SEQ ID NO: 5152; WAN024CXR_at; Start 240; Stop 264
tagtgatgaaaagcaagattttacc

SEQ ID NO: 137667 - DNA, 25 bp, Artificial
  probe
  misc_feature (1)..(25): SEQ ID NO: 5152; WAN024CXR_at; Start 271; Stop 295
cgtaatgaatttgaagcttttgggc

SEQ ID NO: 137668 - DNA, 25 bp, Artificial
  probe
  misc_feature (1)..(25): SEQ ID NO: 5152; WAN024CXR_at; Start 35; Stop 59
tgaaaagaatcctgtttaatgttaa

SEQ ID NO: 137669 - DNA, 25 bp, Artificial
  probe
  misc_feature (1)..(25): SEQ ID NO: 5152; WAN024CXR_at; Start 77; Stop 101
agaattggagtttacttatgaaagc

SEQ ID NO: 137670 - DNA, 25 bp, Artificial
  probe
  misc_feature (1)..(25): SEQ ID NO: 5152; WAN024CXR_at; Start 308; Stop 332
taaaaatcaatattcagagtgcagc

SEQ ID NO: 137671 - DNA, 25 bp, Artificial
  probe
  misc_feature (1)..(25): SEQ ID NO: 5152; WAN024CXR_at; Start 322; Stop 346
cagagtgcagcgattttcgaagcta

SEQ ID NO: 137672 - DNA, 25 bp, Artificial
  probe
  misc_feature (1)..(25): SEQ ID NO: 5152; WAN024CXR_at; Start 12; Stop 36
cgttagaattatgctatactatttg

SEQ ID NO: 137673 - DNA, 25 bp, Artificial
  probe
  misc_feature (1)..(25): SEQ ID NO: 5152; WAN024CXR_at; Start 207; Stop 231
ggatgaatattttacgatgatggct

SEQ ID NO: 137674 - DNA, 25 bp, Artificial
  probe
  misc_feature (1)..(25): SEQ ID NO: 5152; WAN024CXR_at; Start 3; Stop 27
gagtattttcgttagaattatgcta

SEQ ID NO: 137675 - DNA, 25 bp, Artificial
  probe
  misc_feature (1)..(25): SEQ ID NO: 5152; WAN024CXR_at; Start 292; Stop 316
gggcaaactttgaatgtaaaaatca

SEQ ID NO: 137676 - DNA, 25 bp, Artificial
  probe
  misc_feature (1)..(25): SEQ ID NO: 5152; WAN024CXR_at; Start 107; Stop 131
taactgttgttggtaaagataaatc

SEQ ID NO: 137677 - DNA, 25 bp, Artificial
  probe
  misc_feature (1)..(25): SEQ ID NO: 5152; WAN024CXR_at; Start 310; Stop 334
aaaatcaatattcagagtgcagcga

SEQ ID NO: 137678 - DNA, 25 bp, Artificial
  probe
  misc_feature (1)..(25): SEQ ID NO: 5152; WAN024CXR_at; Start 335; Stop 359
ttttcgaagctatgtataatatcta

SEQ ID NO: 137679 - DNA, 25 bp, Artificial
  probe
  misc_feature (1)..(25): SEQ ID NO: 5152; WAN024CXR_at; Start 286; Stop 310
gcttttgggcaaactttgaatgtaa

SEQ ID NO: 137680 - DNA, 25 bp, Artificial
  probe
  misc_feature (1)..(25): SEQ ID NO: 5152; WAN024CXR_at; Start 143; Stop 167
caggtgtttctggtaaaattgcaga

SEQ ID NO: 137681 - DNA, 25 bp, Artificial
  probe
  misc_feature (1)..(25): SEQ ID NO: 5152; WAN024CXR_at; Start 163; Stop 187
gcagaattaggattgaatattgacg

SEQ ID NO: 137682 - DNA, 25 bp, Artificial
  probe
  misc_feature (1)..(25): SEQ ID NO: 5152; WAN024CXR_at; Start 110; Stop 134
ctgttgttggtaaagataaatctgg

SEQ ID NO: 137683 - DNA, 25 bp, Artificial
  probe
  misc_feature (1)..(25): SEQ ID NO: 5152; WAN024CXR_at; Start 276; Stop 300
tgaatttgaagcttttgggcaaact

SEQ ID NO: 137684 - DNA, 25 bp, Artificial
  probe
  misc_feature (1)..(25): SEQ ID NO: 5152; WAN024CXR_at; Start 124; Stop 148
gataaatctggaattgttgcaggtg

SEQ ID NO: 137685 - DNA, 25 bp, Artificial
  probe
  misc_feature (1)..(25): SEQ ID NO: 2343; WAN024CXS_at; Start 555; Stop 579
cgctaatgctgttgaggacaatcca

SEQ ID NO: 137686 - DNA, 25 bp, Artificial
  probe
  misc_feature (1)..(25): SEQ ID NO: 2343; WAN024CXS_at; Start 167; Stop 191
tagctgttggtgatgaaattgcggc

SEQ ID NO: 137687 - DNA, 25 bp, Artificial
  probe
  misc_feature (1)..(25): SEQ ID NO: 2343; WAN024CXS_at; Start 1056; Stop 1080
tatgacggctatctgttctgttgga

SEQ ID NO: 137688 - DNA, 25 bp, Artificial
  probe
  misc_feature (1)..(25): SEQ ID NO: 2343; WAN024CXS_at; Start 366; Stop 390
tcaaaagggagatgagattctcatc

SEQ ID NO: 137689 - DNA, 25 bp, Artificial
  probe
  misc_feature (1)..(25): SEQ ID NO: 2343; WAN024CXS_at; Start 972; Stop 996
tggtgcctttatccctgtttctgag

SEQ ID NO: 137690 - DNA, 25 bp, Artificial
  probe
  misc_feature (1)..(25): SEQ ID NO: 2343; WAN024CXS_at; Start 419; Stop 443
cggataaggtctgctcgtcagtcaa

SEQ ID NO: 137691 - DNA, 25 bp, Artificial
  probe
  misc_feature (1)..(25): SEQ ID NO: 2343; WAN024CXS_at; Start 197; Stop 221
tgggaattcctatcgttaataagcg

SEQ ID NO: 137692 - DNA, 25 bp, Artificial
  probe
  misc_feature (1)..(25): SEQ ID NO: 2343; WAN024CXS_at; Start 24; Stop 48
aaccatcgccatgattgaggagcaa

SEQ ID NO: 137693 - DNA, 25 bp, Artificial
  probe
  misc_feature (1)..(25): SEQ ID NO: 2343; WAN024CXS_at; Start 871; Stop 895
gaaacagttggcacgcatggaacga

SEQ ID NO: 137694 - DNA, 25 bp, Artificial
  probe
  misc_feature (1)..(25): SEQ ID NO: 2343; WAN024CXS_at; Start 798; Stop 822
tgtggacttgagtttggcaccaacc

SEQ ID NO: 137695 - DNA, 25 bp, Artificial
  probe
  misc_feature (1)..(25): SEQ ID NO: 2343; WAN024CXS_at; Start 992; Stop 1016
ctgaggatgaaggaatgattgctgc

SEQ ID NO: 137696 - DNA, 25 bp, Artificial
  probe
  misc_feature (1)..(25): SEQ ID NO: 2343; WAN024CXS_at; Start 435; Stop 459
gtcagtcaatatcggctcaaccaag

SEQ ID NO: 137697 - DNA, 25 bp, Artificial
  probe
  misc_feature (1)..(25): SEQ ID NO: 2343; WAN024CXS_at; Start 747; Stop 771
tcaattggttggtcaaatggccagt

SEQ ID NO: 137698 - DNA, 25 bp, Artificial
  probe
  misc_feature (1)..(25): SEQ ID NO: 2343; WAN024CXS_at; Start 1086; Stop 1110
tatgattgccatcccagaagatacg

SEQ ID NO: 137699 - DNA, 25 bp, Artificial
  probe
  misc_feature (1)..(25): SEQ ID NO: 2343; WAN024CXS_at; Start 626; Stop 650
tcaatgtcggagtttctggtcctgg

SEQ ID NO: 137700 - DNA, 25 bp, Artificial
  probe
  misc_feature (1)..(25): SEQ ID NO: 2343; WAN024CXS_at; Start 1125; Stop 1149
tgcggctatgattgcggatgaagca

SEQ ID NO: 137701 - DNA, 25 bp, Artificial
  probe
  misc_feature (1)..(25): SEQ ID NO: 2343; WAN024CXS_at; Start 228; Stop 252
ggtgacacctatttctctgattggg

SEQ ID NO: 137702 - DNA, 25 bp, Artificial
  probe
  misc_feature (1)..(25): SEQ ID NO: 2343; WAN024CXS_at; Start 182; Stop 206
aaattgcggctgagttgggaattcc

SEQ ID NO: 137703 - DNA, 25 bp, Artificial
  probe
  misc_feature (1)..(25): SEQ ID NO: 2343; WAN024CXS_at; Start 287; Stop 311
caaaagcgcttgataaggctgcgaa

SEQ ID NO: 137704 - DNA, 25 bp, Artificial
  probe
  misc_feature (1)..(25): SEQ ID NO: 2343; WAN024CXS_at; Start 478; Stop 502
gctgtggcagatatgggacgaatta

SEQ ID NO: 137705 - DNA, 25 bp, Artificial
  probe
  misc_feature (1)..(25): SEQ ID NO: 2343; WAN024CXS_at; Start 666; Stop 690
tttggaaaaagttcgtggacagagc

SEQ ID NO: 137706 - DNA, 25 bp, Artificial
  probe
  misc_feature (1)..(25): SEQ ID NO: 2343; WAN024CXS_at; Start 1011; Stop 1035
tgctgcagtgcaaaatggctctctt

SEQ ID NO: 137707 - DNA, 25 bp, Artificial
  probe
  misc_feature (1)..(25): SEQ ID NO: 2343; WAN024CXS_at; Start 818; Stop 842
caacccctgcggttggagactctgt

SEQ ID NO: 137708 - DNA, 25 bp, Artificial
  probe
  misc_feature (1)..(25): SEQ ID NO: 2343; WAN024CXS_at; Start 108; Stop 132
tatcaatcgtgctgcggagaaaatc

SEQ ID NO: 137709 - DNA, 25 bp, Artificial
  probe
  misc_feature (1)..(25): SEQ ID NO: 2343; WAN024CXS_at; Start 463; Stop 487
ggtattaatatgacggctgtggcag

SEQ ID NO: 137710 - DNA, 25 bp, Artificial
  probe
  misc_feature (1)..(25): SEQ ID NO: 2343; WAN024CXS_at; Start 1040; Stop 1064
tagaaaaactagaagctatgacggc

SEQ ID NO: 137711 - DNA, 25 bp, Artificial
  probe
  misc_feature (1)..(25): SEQ ID NO: 2343; WAN024CXS_at; Start 722; Stop 746
ctgcctttaaaatcactcgtatcgg

SEQ ID NO: 137712 - DNA, 25 bp, Artificial
  probe
  misc_feature (1)..(25): SEQ ID NO: 2343; WAN024CXS_at; Start 539; Stop 563
ccaagttggttgtattcgctaatgc

SEQ ID NO: 137713 - DNA, 25 bp, Artificial
  probe
  misc_feature (1)..(25): SEQ ID NO: 2343; WAN024CXS_at; Start 1278; Stop 1302
tgtcgacttcatctctcgcggtgga

SEQ ID NO: 137714 - DNA, 25 bp, Artificial
  probe
  misc_feature (1)..(25): SEQ ID NO: 2343; WAN024CXS_at; Start 571; Stop 595
gacaatccatttatggcgggtgcct

SEQ ID NO: 137715 - DNA, 25 bp, Artificial
  probe
  misc_feature (1)..(25): SEQ ID NO: 2343; WAN024CXS_at; Start 213; Stop 237
taataagcgtgtatcggtgacacct

SEQ ID NO: 137716 - DNA, 25 bp, Artificial
  probe
  misc_feature (1)..(25): SEQ ID NO: 2343; WAN024CXS_at; Start 9; Stop 33
tagacaagttactgaaaccatcgcc

SEQ ID NO: 137717 - DNA, 25 bp, Artificial
  probe
  misc_feature (1)..(25): SEQ ID NO: 2343; WAN024CXS_at; Start 685; Stop 709
cagagctttgatgtagtagccgaaa

SEQ ID NO: 137718 - DNA, 25 bp, Artificial
  probe
  misc_feature (1)..(25): SEQ ID NO: 2343; WAN024CXS_at; Start 252; Stop 276
ggcagcgacagatgcgacggactac

SEQ ID NO: 137719 - DNA, 25 bp, Artificial
  probe
  misc_feature (1)..(25): SEQ ID NO: 1781; WAN024CXT_at; Start 214; Stop 238
caagatatgtatggttcaattgacc

SEQ ID NO: 137720 - DNA, 25 bp, Artificial
  probe
  misc_feature (1)..(25): SEQ ID NO: 1781; WAN024CXT_at; Start 74; Stop 98
tcgaaaagatcgaaaagtacttcca

SEQ ID NO: 137721 - DNA, 25 bp, Artificial
  probe
  misc_feature (1)..(25): SEQ ID NO: 1781; WAN024CXT_at; Start 465; Stop 489
tgtggatgttgaagatcagacaacc

SEQ ID NO: 137722 - DNA, 25 bp, Artificial
  probe
  misc_feature (1)..(25): SEQ ID NO: 1781; WAN024CXT_at; Start 314; Stop 338
caactggtcaattatttacagatgc

SEQ ID NO: 137723 - DNA, 25 bp, Artificial
  probe
  misc_feature (1)..(25): SEQ ID NO: 1781; WAN024CXT_at; Start 223; Stop 247
tatggttcaattgaccttgtaactg

SEQ ID NO: 137724 - DNA, 25 bp, Artificial
  probe
  misc_feature (1)..(25): SEQ ID NO: 1781; WAN024CXT_at; Start 255; Stop 279
tgaacgtcagattcgtaaaaataaa

SEQ ID NO: 137725 - DNA, 25 bp, Artificial
  probe
  misc_feature (1)..(25): SEQ ID NO: 1781; WAN024CXT_at; Start 235; Stop 259
gaccttgtaactgataaaattgaac

SEQ ID NO: 137726 - DNA, 25 bp, Artificial
  probe
  misc_feature (1)..(25): SEQ ID NO: 1781; WAN024CXT_at; Start 192; Stop 216
tctccgcgcagaagatgtatctcaa

SEQ ID NO: 137727 - DNA, 25 bp, Artificial
  probe
  misc_feature (1)..(25): SEQ ID NO: 1781; WAN024CXT_at; Start 87; Stop 111
aaagtacttccaaccagaacaagag

SEQ ID NO: 137728 - DNA, 25 bp, Artificial
  probe
  misc_feature (1)..(25): SEQ ID NO: 1781; WAN024CXT_at; Start 100; Stop 124
ccagaacaagagttggatgcccgaa

SEQ ID NO: 137729 - DNA, 25 bp, Artificial
  probe
  misc_feature (1)..(25): SEQ ID NO: 1781; WAN024CXT_at; Start 300; Stop 324
taaaaataaggtagcaactggtcaa

SEQ ID NO: 137730 - DNA, 25 bp, Artificial
  probe
  misc_feature (1)..(25): SEQ ID NO: 1781; WAN024CXT_at; Start 106; Stop 130
caagagttggatgcccgaattaact

SEQ ID NO: 137731 - DNA, 25 bp, Artificial
  probe
  misc_feature (1)..(25): SEQ ID NO: 1781; WAN024CXT_at; Start 21; Stop 45
tggtgaaaacctagaagtaacagaa

SEQ ID NO: 137732 - DNA, 25 bp, Artificial
  probe
  misc_feature (1)..(25): SEQ ID NO: 1781; WAN024CXT_at; Start 12; Stop 36
tagtatccgtggtgaaaacctagaa

SEQ ID NO: 137733 - DNA, 25 bp, Artificial
  probe
  misc_feature (1)..(25): SEQ ID NO: 1781; WAN024CXT_at; Start 2; Stop 26
tgattaaatatagtatccgtggtga

SEQ ID NO: 137734 - DNA, 25 bp, Artificial
  probe
  misc_feature (1)..(25): SEQ ID NO: 1781; WAN024CXT_at; Start 62; Stop 86
tagtttctaaactcgaaaagatcga

SEQ ID NO: 137735 - DNA, 25 bp, Artificial
  probe
  misc_feature (1)..(25): SEQ ID NO: 1781; WAN024CXT_at; Start 485; Stop 509
caaccaatgtgatttatcgtcgtga

SEQ ID NO: 137736 - DNA, 25 bp, Artificial
  probe
  misc_feature (1)..(25): SEQ ID NO: 1781; WAN024CXT_at; Start 422; Stop 446
caattctacaaatggatttattggg

SEQ ID NO: 137737 - DNA, 25 bp, Artificial
  probe
  misc_feature (1)..(25): SEQ ID NO: 1781; WAN024CXT_at; Start 47; Stop 71
caattcgtgattatgtagtttctaa

SEQ ID NO: 137738 - DNA, 25 bp, Artificial
  probe
  misc_feature (1)..(25): SEQ ID NO: 1781; WAN024CXT_at; Start 41; Stop 65
cagaagcaattcgtgattatgtagt

SEQ ID NO: 137739 - DNA, 25 bp, Artificial
  probe
  misc_feature (1)..(25): SEQ ID NO: 1781; WAN024CXT_at; Start 246; Stop 270
tgataaaattgaacgtcagattcgt

SEQ ID NO: 137740 - DNA, 25 bp, Artificial
  probe
  misc_feature (1)..(25): SEQ ID NO: 1781; WAN024CXT_at; Start 180; Stop 204
tggatctattactctccgcgcagaa

SEQ ID NO: 137741 - DNA, 25 bp, Artificial
  probe
  misc_feature (1)..(25): SEQ ID NO: 1781; WAN024CXT_at; Start 330; Stop 354
tacagatgctttggtggaagattca

SEQ ID NO: 137742 - DNA, 25 bp, Artificial
  probe
  misc_feature (1)..(25): SEQ ID NO: 1781; WAN024CXT_at; Start 30; Stop 54
cctagaagtaacagaagcaattcgt

SEQ ID NO: 137743 - DNA, 25 bp, Artificial
  probe
  misc_feature (1)..(25): SEQ ID NO: 1781; WAN024CXT_at; Start 154; Stop 178
gctaaagtggaagtaacgattccgc

SEQ ID NO: 137744 - DNA, 25 bp, Artificial
  probe
  misc_feature (1)..(25): SEQ ID NO: 1781; WAN024CXT_at; Start 398; Stop 422
taaaaccaatggatttggaagaagc

SEQ ID NO: 137745 - DNA, 25 bp, Artificial
  probe
  misc_feature (1)..(25): SEQ ID NO: 1781; WAN024CXT_at; Start 472; Stop 496
gttgaagatcagacaaccaatgtga

SEQ ID NO: 137746 - DNA, 25 bp, Artificial
  probe
  misc_feature (1)..(25): SEQ ID NO: 1781; WAN024CXT_at; Start 198; Stop 222
cgcagaagatgtatctcaagatatg

SEQ ID NO: 137747 - DNA, 25 bp, Artificial
  probe
  misc_feature (1)..(25): SEQ ID NO: 1781; WAN024CXT_at; Start 360; Stop 384
tgtccagtctaaagttgttcgttca

SEQ ID NO: 137748 - DNA, 25 bp, Artificial
  probe
  misc_feature (1)..(25): SEQ ID NO: 1781; WAN024CXT_at; Start 499; Stop 523
tatcgtcgtgaggatggcgaaattg

SEQ ID NO: 137749 - DNA, 25 bp, Artificial
  probe
  misc_feature (1)..(25): SEQ ID NO: 1781; WAN024CXT_at; Start 413; Stop 437
tggaagaagcaattctacaaatgga

SEQ ID NO: 137750 - DNA, 25 bp, Artificial
  probe
  misc_feature (1)..(25): SEQ ID NO: 1781; WAN024CXT_at; Start 163; Stop 187
gaagtaacgattccgcttggatcta

SEQ ID NO: 137751 - DNA, 25 bp, Artificial
  probe
  misc_feature (1)..(25): SEQ ID NO: 1781; WAN024CXT_at; Start 512; Stop 536
atggcgaaattggtttgttagaggt

SEQ ID NO: 137752 - DNA, 25 bp, Artificial
  probe
  misc_feature (1)..(25): SEQ ID NO: 1781; WAN024CXT_at; Start 372; Stop 396
agttgttcgttcaaaacaaattgat

SEQ ID NO: 137753 - DNA, 25 bp, Artificial
  probe
  misc_feature (1)..(25): SEQ ID NO: 664; WAN024CXU_at; Start 813; Stop 837
tcatgatgagatagggaaagttgct

SEQ ID NO: 137754 - DNA, 25 bp, Artificial
  probe
  misc_feature (1)..(25): SEQ ID NO: 664; WAN024CXU_at; Start 400; Stop 424
tatgccaagcttggtgagaagcgtt

SEQ ID NO: 137755 - DNA, 25 bp, Artificial
  probe
  misc_feature (1)..(25): SEQ ID NO: 664; WAN024CXU_at; Start 1371; Stop 1395
tatcgaaagtggtgcaagtagtgcc

SEQ ID NO: 137756 - DNA, 25 bp, Artificial
  probe
  misc_feature (1)..(25): SEQ ID NO: 664; WAN024CXU_at; Start 1901; Stop 1925
ccttgtcagaagcaggtgaaaaact

SEQ ID NO: 137757 - DNA, 25 bp, Artificial
  probe
  misc_feature (1)..(25): SEQ ID NO: 664; WAN024CXU_at; Start 292; Stop 316
gagtggtttaatccctatgctgaat

SEQ ID NO: 137758 - DNA, 25 bp, Artificial
  probe
  misc_feature (1)..(25): SEQ ID NO: 664; WAN024CXU_at; Start 647; Stop 671
tttctcgtcgggtaagtatggatcg

SEQ ID NO: 137759 - DNA, 25 bp, Artificial
  probe
  misc_feature (1)..(25): SEQ ID NO: 664; WAN024CXU_at; Start 1716; Stop 1740
taaggcagcagatgccatgttagcc

SEQ ID NO: 137760 - DNA, 25 bp, Artificial
  probe
  misc_feature (1)..(25): SEQ ID NO: 664; WAN024CXU_at; Start 691; Stop 715
tacacggtgcttgagggcttgatga

SEQ ID NO: 137761 - DNA, 25 bp, Artificial
  probe
  misc_feature (1)..(25): SEQ ID NO: 664; WAN024CXU_at; Start 385; Stop 409
ggaaatccgtctacttatgccaagc

SEQ ID NO: 137762 - DNA, 25 bp, Artificial
  probe
  misc_feature (1)..(25): SEQ ID NO: 664; WAN024CXU_at; Start 1136; Stop 1160
tgtctccagatattgaacgagctgt

SEQ ID NO: 137763 - DNA, 25 bp, Artificial
  probe
  misc_feature (1)..(25): SEQ ID NO: 664; WAN024CXU_at; Start 1863; Stop 1887
ccactttaatttggcagcagctcaa

SEQ ID NO: 137764 - DNA, 25 bp, Artificial
  probe
  misc_feature (1)..(25): SEQ ID NO: 664; WAN024CXU_at; Start 1538; Stop 1562
ttgctagctatctcagaacgcgcgg

SEQ ID NO: 137765 - DNA, 25 bp, Artificial
  probe
  misc_feature (1)..(25): SEQ ID NO: 664; WAN024CXU_at; Start 207; Stop 231
ccaccaagcggaagaaagtttgaca

SEQ ID NO: 137766 - DNA, 25 bp, Artificial
  probe
  misc_feature (1)..(25): SEQ ID NO: 664; WAN024CXU_at; Start 1043; Stop 1067
tagacatggatgctttgggctctgc

SEQ ID NO: 137767 - DNA, 25 bp, Artificial
  probe
  misc_feature (1)..(25): SEQ ID NO: 664; WAN024CXU_at; Start 1492; Stop 1516
gatactaaaaatttcacctcgcgag

SEQ ID NO: 137768 - DNA, 25 bp, Artificial
  probe
  misc_feature (1)..(25): SEQ ID NO: 664; WAN024CXU_at; Start 963; Stop 987
tcgtacgcgcgctatgatgacagct

SEQ ID NO: 137769 - DNA, 25 bp, Artificial
  probe
  misc_feature (1)..(25): SEQ ID NO: 664; WAN024CXU_at; Start 1385; Stop 1409
caagtagtgccagtgagttggtaac

SEQ ID NO: 137770 - DNA, 25 bp, Artificial
  probe
  misc_feature (1)..(25): SEQ ID NO: 664; WAN024CXU_at; Start 1553; Stop 1577
gaacgcgcggaagtgatagtattgc

SEQ ID NO: 137771 - DNA, 25 bp, Artificial
  probe
  misc_feature (1)..(25): SEQ ID NO: 664; WAN024CXU_at; Start 369; Stop 393
tatcaaggcttcagtaggaaatccg

SEQ ID NO: 137772 - DNA, 25 bp, Artificial
  probe
  misc_feature (1)..(25): SEQ ID NO: 664; WAN024CXU_at; Start 192; Stop 216
gatacagtatgtaaaccaccaagcg

SEQ ID NO: 137773 - DNA, 25 bp, Artificial
  probe
  misc_feature (1)..(25): SEQ ID NO: 664; WAN024CXU_at; Start 927; Stop 951
tggtgggtctgctgcttcaatcaag

SEQ ID NO: 137774 - DNA, 25 bp, Artificial
  probe
  misc_feature (1)..(25): SEQ ID NO: 664; WAN024CXU_at; Start 1656; Stop 1680
ttcagatgtactaatagcagaggct

SEQ ID NO: 137775 - DNA, 25 bp, Artificial
  probe
  misc_feature (1)..(25): SEQ ID NO: 664; WAN024CXU_at; Start 676; Stop 700
tatctatttactgactacacggtgc

SEQ ID NO: 137776 - DNA, 25 bp, Artificial
  probe
  misc_feature (1)..(25): SEQ ID NO: 664; WAN024CXU_at; Start 1506; Stop 1530
cacctcgcgagtaactagtcggaca

SEQ ID NO: 137777 - DNA, 25 bp, Artificial
  probe
  misc_feature (1)..(25): SEQ ID NO: 664; WAN024CXU_at; Start 1248; Stop 1272
tgtagaccattcaaagacagcctta

SEQ ID NO: 137778 - DNA, 25 bp, Artificial
  probe
  misc_feature (1)..(25): SEQ ID NO: 664; WAN024CXU_at; Start 1791; Stop 1815
tatctctatctcagctcgaagtcgt

SEQ ID NO: 137779 - DNA, 25 bp, Artificial
  probe
  misc_feature (1)..(25): SEQ ID NO: 664; WAN024CXU_at; Start 473; Stop 497
tatccagggaacaagccataacaga

SEQ ID NO: 137780 - DNA, 25 bp, Artificial
  probe
  misc_feature (1)..(25): SEQ ID NO: 664; WAN024CXU_at; Start 983; Stop 1007
cagctatttcagataagattcggag

SEQ ID NO: 137781 - DNA, 25 bp, Artificial
  probe
  misc_feature (1)..(25): SEQ ID NO: 664; WAN024CXU_at; Start 1444; Stop 1468
cgtttgagtcgtatgcaagcaagtg

SEQ ID NO: 137782 - DNA, 25 bp, Artificial
  probe
  misc_feature (1)..(25): SEQ ID NO: 664; WAN024CXU_at; Start 1736; Stop 1760
tagccatgtcaggtattgaagcgag

SEQ ID NO: 137783 - DNA, 25 bp, Artificial
  probe
  misc_feature (1)..(25): SEQ ID NO: 664; WAN024CXU_at; Start 942; Stop 966
ttcaatcaagcgtacacggactcgt

SEQ ID NO: 137784 - DNA, 25 bp, Artificial
  probe
  misc_feature (1)..(25): SEQ ID NO: 664; WAN024CXU_at; Start 1070; Stop 1094
taggtatgcagttgttcgccagcaa

SEQ ID NO: 137785 - DNA, 25 bp, Artificial
  probe
  misc_feature (1)..(25): SEQ ID NO: 664; WAN024CXU_at; Start 751; Stop 775
gagtcgaaacagagacagttgccct

SEQ ID NO: 137786 - DNA, 25 bp, Artificial
  probe
  misc_feature (1)..(25): SEQ ID NO: 664; WAN024CXU_at; Start 1317; Stop 1341
tattgaccaccatagaagggatcag

SEQ ID NO: 137787 - DNA, 25 bp, Artificial
  probe
  misc_feature (1)..(25): SEQ ID NO: 5356; WAN024CXV_at; Start 56; Stop 80
ttagtcaagataatgaatcaaattc

SEQ ID NO: 137788 - DNA, 25 bp, Artificial
  probe
  misc_feature (1)..(25): SEQ ID NO: 5356; WAN024CXV_at; Start 60; Stop 84
tcaagataatgaatcaaattctttt

SEQ ID NO: 137789 - DNA, 25 bp, Artificial
  probe
  misc_feature (1)..(25): SEQ ID NO: 5356; WAN024CXV_at; Start 61; Stop 85
caagataatgaatcaaattcttttc

SEQ ID NO: 137790 - DNA, 25 bp, Artificial
  probe
  misc_feature (1)..(25): SEQ ID NO: 5356; WAN024CXV_at; Start 36; Stop 60
aagtgagaaaatttctcactttagt

SEQ ID NO: 137791 - DNA, 25 bp, Artificial
  probe
  misc_feature (1)..(25): SEQ ID NO: 5356; WAN024CXV_at; Start 31; Stop 55
agaaaaagtgagaaaatttctcact

SEQ ID NO: 137792 - DNA, 25 bp, Artificial
  probe
  misc_feature (1)..(25): SEQ ID NO: 5356; WAN024CXV_at; Start 40; Stop 64
gagaaaatttctcactttagtcaag

SEQ ID NO: 137793 - DNA, 25 bp, Artificial
  probe
  misc_feature (1)..(25): SEQ ID NO: 5356; WAN024CXV_at; Start 50; Stop 74
ctcactttagtcaagataatgaatc

SEQ ID NO: 137794 - DNA, 25 bp, Artificial
  probe
  misc_feature (1)..(25): SEQ ID NO: 5356; WAN024CXV_at; Start 54; Stop 78
ctttagtcaagataatgaatcaaat

SEQ ID NO: 137795 - DNA, 25 bp, Artificial
  probe
  misc_feature (1)..(25): SEQ ID NO: 5356; WAN024CXV_at; Start 38; Stop 62
gtgagaaaatttctcactttagtca

SEQ ID NO: 137796 - DNA, 25 bp, Artificial
  probe
  misc_feature (1)..(25): SEQ ID NO: 5356; WAN024CXV_at; Start 2; Stop 26
tgccttcacctaaattattcggaga

SEQ ID NO: 137797 - DNA, 25 bp, Artificial
  probe
  misc_feature (1)..(25): SEQ ID NO: 5356; WAN024CXV_at; Start 47; Stop 71
tttctcactttagtcaagataatga

SEQ ID NO: 137798 - DNA, 25 bp, Artificial
  probe
  misc_feature (1)..(25): SEQ ID NO: 5356; WAN024CXV_at; Start 41; Stop 65
agaaaatttctcactttagtcaaga

SEQ ID NO: 137799 - DNA, 25 bp, Artificial
  probe
  misc_feature (1)..(25): SEQ ID NO: 5356; WAN024CXV_at; Start 63; Stop 87
agataatgaatcaaattcttttctg

SEQ ID NO: 137800 - DNA, 25 bp, Artificial
  probe
  misc_feature (1)..(25): SEQ ID NO: 5356; WAN024CXV_at; Start 55; Stop 79
tttagtcaagataatgaatcaaatt

SEQ ID NO: 137801 - DNA, 25 bp, Artificial
  probe
  misc_feature (1)..(25): SEQ ID NO: 5356; WAN024CXV_at; Start 59; Stop 83
gtcaagataatgaatcaaattcttt

SEQ ID NO: 137802 - DNA, 25 bp, Artificial
  probe
  misc_feature (1)..(25): SEQ ID NO: 5356; WAN024CXV_at; Start 45; Stop 69
aatttctcactttagtcaagataat

SEQ ID NO: 137803 - DNA, 25 bp, Artificial
  probe
  misc_feature (1)..(25): SEQ ID NO: 5356; WAN024CXV_at; Start 1; Stop 25
ttgccttcacctaaattattcggag

SEQ ID NO: 137804 - DNA, 25 bp, Artificial
  probe
  misc_feature (1)..(25): SEQ ID NO: 5356; WAN024CXV_at; Start 52; Stop 76
cactttagtcaagataatgaatcaa

SEQ ID NO: 137805 - DNA, 25 bp, Artificial
  probe
  misc_feature (1)..(25): SEQ ID NO: 5356; WAN024CXV_at; Start 44; Stop 68
aaatttctcactttagtcaagataa

SEQ ID NO: 137806 - DNA, 25 bp, Artificial
  probe
  misc_feature (1)..(25): SEQ ID NO: 5356; WAN024CXV_at; Start 62; Stop 86
aagataatgaatcaaattcttttct

SEQ ID NO: 137807 - DNA, 25 bp, Artificial
  probe
  misc_feature (1)..(25): SEQ ID NO: 5356; WAN024CXV_at; Start 46; Stop 70
atttctcactttagtcaagataatg

SEQ ID NO: 137808 - DNA, 25 bp, Artificial
  probe
  misc_feature (1)..(25): SEQ ID NO: 5356; WAN024CXV_at; Start 3; Stop 27
gccttcacctaaattattcggagaa

SEQ ID NO: 137809 - DNA, 25 bp, Artificial
  probe
  misc_feature (1)..(25): SEQ ID NO: 5356; WAN024CXV_at; Start 42; Stop 66
gaaaatttctcactttagtcaagat

SEQ ID NO: 137810 - DNA, 25 bp, Artificial
  probe
  misc_feature (1)..(25): SEQ ID NO: 5356; WAN024CXV_at; Start 43; Stop 67
aaaatttctcactttagtcaagata

SEQ ID NO: 137811 - DNA, 25 bp, Artificial
  probe
  misc_feature (1)..(25): SEQ ID NO: 5356; WAN024CXV_at; Start 37; Stop 61
agtgagaaaatttctcactttagtc

SEQ ID NO: 137812 - DNA, 25 bp, Artificial
  probe
  misc_feature (1)..(25): SEQ ID NO: 5356; WAN024CXV_at; Start 49; Stop 73
tctcactttagtcaagataatgaat

SEQ ID NO: 137813 - DNA, 25 bp, Artificial
  probe
  misc_feature (1)..(25): SEQ ID NO: 5356; WAN024CXV_at; Start 39; Stop 63
tgagaaaatttctcactttagtcaa

SEQ ID NO: 137814 - DNA, 25 bp, Artificial
  probe
  misc_feature (1)..(25): SEQ ID NO: 5356; WAN024CXV_at; Start 48; Stop 72
ttctcactttagtcaagataatgaa

SEQ ID NO: 137815 - DNA, 25 bp, Artificial
  probe
  misc_feature (1)..(25): SEQ ID NO: 5356; WAN024CXV_at; Start 57; Stop 81
tagtcaagataatgaatcaaattct

SEQ ID NO: 137816 - DNA, 25 bp, Artificial
  probe
  misc_feature (1)..(25): SEQ ID NO: 5356; WAN024CXV_at; Start 51; Stop 75
tcactttagtcaagataatgaatca

SEQ ID NO: 137817 - DNA, 25 bp, Artificial
  probe
  misc_feature (1)..(25): SEQ ID NO: 5356; WAN024CXV_at; Start 53; Stop 77
actttagtcaagataatgaatcaaa

SEQ ID NO: 137818 - DNA, 25 bp, Artificial
  probe
  misc_feature (1)..(25): SEQ ID NO: 5356; WAN024CXV_at; Start 58; Stop 82
agtcaagataatgaatcaaattctt

SEQ ID NO: 137819 - DNA, 25 bp, Artificial
  probe
  misc_feature (1)..(25): SEQ ID NO: 2866; WAN024CXW_at; Start 216; Stop 240
tacttactcagatattcttacagaa

SEQ ID NO: 137820 - DNA, 25 bp, Artificial
  probe
  misc_feature (1)..(25): SEQ ID NO: 2866; WAN024CXW_at; Start 171; Stop 195
ggatgtggaaggagataaacaagtt

SEQ ID NO: 137821 - DNA, 25 bp, Artificial
  probe
  misc_feature (1)..(25): SEQ ID NO: 2866; WAN024CXW_at; Start 22; Stop 46
gtagccaagatgaaaaaaatcaaag

SEQ ID NO: 137822 - DNA, 25 bp, Artificial
  probe
  misc_feature (1)..(25): SEQ ID NO: 2866; WAN024CXW_at; Start 202; Stop 226
tacgttgaatcctttacttactcag

SEQ ID NO: 137823 - DNA, 25 bp, Artificial
  probe
  misc_feature (1)..(25): SEQ ID NO: 2866; WAN024CXW_at; Start 10; Stop 34
gcatttacagatgtagccaagatga

SEQ ID NO: 137824 - DNA, 25 bp, Artificial
  probe
  misc_feature (1)..(25): SEQ ID NO: 2866; WAN024CXW_at; Start 115; Stop 139
aatagattgggtaagctaattgaag

SEQ ID NO: 137825 - DNA, 25 bp, Artificial
  probe
  misc_feature (1)..(25): SEQ ID NO: 2866; WAN024CXW_at; Start 220; Stop 244
tactcagatattcttacagaaaaga

SEQ ID NO: 137826 - DNA, 25 bp, Artificial
  probe
  misc_feature (1)..(25): SEQ ID NO: 2866; WAN024CXW_at; Start 68; Stop 92
gacaagtcgtagaaatgactttgga

SEQ ID NO: 137827 - DNA, 25 bp, Artificial
  probe
  misc_feature (1)..(25): SEQ ID NO: 2866; WAN024CXW_at; Start 231; Stop 255
tcttacagaaaagaatttgattcat

SEQ ID NO: 137828 - DNA, 25 bp, Artificial
  probe
  misc_feature (1)..(25): SEQ ID NO: 2866; WAN024CXW_at; Start 57; Stop 81
ggcacatgagggacaagtcgtagaa

SEQ ID NO: 137829 - DNA, 25 bp, Artificial
  probe
  misc_feature (1)..(25): SEQ ID NO: 2866; WAN024CXW_at; Start 2; Stop 26
tgtcagatgcatttacagatgtagc

SEQ ID NO: 137830 - DNA, 25 bp, Artificial
  probe
  misc_feature (1)..(25): SEQ ID NO: 2866; WAN024CXW_at; Start 86; Stop 110
ctttggagaatggtcgtaagcgcca

SEQ ID NO: 137831 - DNA, 25 bp, Artificial
  probe
  misc_feature (1)..(25): SEQ ID NO: 2866; WAN024CXW_at; Start 122; Stop 146
tgggtaagctaattgaagtttatcc

SEQ ID NO: 137832 - DNA, 25 bp, Artificial
  probe
  misc_feature (1)..(25): SEQ ID NO: 2866; WAN024CXW_at; Start 5; Stop 29
cagatgcatttacagatgtagccaa

SEQ ID NO: 137833 - DNA, 25 bp, Artificial
  probe
  misc_feature (1)..(25): SEQ ID NO: 2866; WAN024CXW_at; Start 125; Stop 149
gtaagctaattgaagtttatccatc

SEQ ID NO: 137834 - DNA, 25 bp, Artificial
  probe
  misc_feature (1)..(25): SEQ ID NO: 2866; WAN024CXW_at; Start 84; Stop 108
gactttggagaatggtcgtaagcgc

SEQ ID NO: 137835 - DNA, 25 bp, Artificial
  probe
  misc_feature (1)..(25): SEQ ID NO: 2866; WAN024CXW_at; Start 49; Stop 73
gaaatcaaggcacatgagggacaag

SEQ ID NO: 137836 - DNA, 25 bp, Artificial
  probe
  misc_feature (1)..(25): SEQ ID NO: 2866; WAN024CXW_at; Start 74; Stop 98
tcgtagaaatgactttggagaatgg

SEQ ID NO: 137837 - DNA, 25 bp, Artificial
  probe
  misc_feature (1)..(25): SEQ ID NO: 2866; WAN024CXW_at; Start 77; Stop 101
tagaaatgactttggagaatggtcg

SEQ ID NO: 137838 - DNA, 25 bp, Artificial
  probe
  misc_feature (1)..(25): SEQ ID NO: 2866; WAN024CXW_at; Start 247; Stop 271
ttgattcattatcttgactaactaa

SEQ ID NO: 137839 - DNA, 25 bp, Artificial
  probe
  misc_feature (1)..(25): SEQ ID NO: 2866; WAN024CXW_at; Start 63; Stop 87
tgagggacaagtcgtagaaatgact

SEQ ID NO: 137840 - DNA, 25 bp, Artificial
  probe
  misc_feature (1)..(25): SEQ ID NO: 2866; WAN024CXW_at; Start 175; Stop 199
gtggaaggagataaacaagttaatg

SEQ ID NO: 137841 - DNA, 25 bp, Artificial
  probe
  misc_feature (1)..(25): SEQ ID NO: 2866; WAN024CXW_at; Start 47; Stop 71
aagaaatcaaggcacatgagggaca

SEQ ID NO: 137842 - DNA, 25 bp, Artificial
  probe
  misc_feature (1)..(25): SEQ ID NO: 2866; WAN024CXW_at; Start 100; Stop 124
cgtaagcgccaaaaaaatagattgg

SEQ ID NO: 137843 - DNA, 25 bp, Artificial
  probe
  misc_feature (1)..(25): SEQ ID NO: 2866; WAN024CXW_at; Start 13; Stop 37
tttacagatgtagccaagatgaaaa

SEQ ID NO: 137844 - DNA, 25 bp, Artificial
  probe
  misc_feature (1)..(25): SEQ ID NO: 2866; WAN024CXW_at; Start 204; Stop 228
cgttgaatcctttacttactcagat

SEQ ID NO: 137845 - DNA, 25 bp, Artificial
  probe
  misc_feature (1)..(25): SEQ ID NO: 2866; WAN024CXW_at; Start 51; Stop 75
aatcaaggcacatgagggacaagtc

SEQ ID NO: 137846 - DNA, 25 bp, Artificial
  probe
  misc_feature (1)..(25): SEQ ID NO: 2866; WAN024CXW_at; Start 59; Stop 83
cacatgagggacaagtcgtagaaat

SEQ ID NO: 137847 - DNA, 25 bp, Artificial
  probe
  misc_feature (1)..(25): SEQ ID NO: 2866; WAN024CXW_at; Start 243; Stop 267
gaatttgattcattatcttgactaa

SEQ ID NO: 137848 - DNA, 25 bp, Artificial
  probe
  misc_feature (1)..(25): SEQ ID NO: 2866; WAN024CXW_at; Start 89; Stop 113
tggagaatggtcgtaagcgccaaaa

SEQ ID NO: 137849 - DNA, 25 bp, Artificial
  probe
  misc_feature (1)..(25): SEQ ID NO: 2866; WAN024CXW_at; Start 7; Stop 31
gatgcatttacagatgtagccaaga

SEQ ID NO: 137850 - DNA, 25 bp, Artificial
  probe
  misc_feature (1)..(25): SEQ ID NO: 2866; WAN024CXW_at; Start 190; Stop 214
caagttaatgtttacgttgaatcct

SEQ ID NO: 137851 - DNA, 25 bp, Artificial
  probe
  misc_feature (1)..(25): SEQ ID NO: 2866; WAN024CXW_at; Start 91; Stop 115
gagaatggtcgtaagcgccaaaaaa

SEQ ID NO: 137852 - DNA, 25 bp, Artificial
  probe
  misc_feature (1)..(25): SEQ ID NO: 2866; WAN024CXW_at; Start 54; Stop 78
caaggcacatgagggacaagtcgta

SEQ ID NO: 137853 - DNA, 25 bp, Artificial
  probe
  misc_feature (1)..(25): SEQ ID NO: 1359; WAN024CXX_at; Start 22; Stop 46
cacgtcagttatgcctatggtcagg

SEQ ID NO: 137854 - DNA, 25 bp, Artificial
  probe
  misc_feature (1)..(25): SEQ ID NO: 1359; WAN024CXX_at; Start 35; Stop 59
cctatggtcaggagaggattttaga

SEQ ID NO: 137855 - DNA, 25 bp, Artificial
  probe
  misc_feature (1)..(25): SEQ ID NO: 1359; WAN024CXX_at; Start 180; Stop 204
tgtccttgatggtgaagaaaatccc

SEQ ID NO: 137856 - DNA, 25 bp, Artificial
  probe
  misc_feature (1)..(25): SEQ ID NO: 1359; WAN024CXX_at; Start 265; Stop 289
ggaaatatcattctgcccctcttga

SEQ ID NO: 137857 - DNA, 25 bp, Artificial
  probe
  misc_feature (1)..(25): SEQ ID NO: 1359; WAN024CXX_at; Start 372; Stop 396
gtatcctcatgaacttagcggtggg

SEQ ID NO: 137858 - DNA, 25 bp, Artificial
  probe
  misc_feature (1)..(25): SEQ ID NO: 1359; WAN024CXX_at; Start 496; Stop 520
gaactccacgcttggtatcttgaga

SEQ ID NO: 137859 - DNA, 25 bp, Artificial
  probe
  misc_feature (1)..(25): SEQ ID NO: 1359; WAN024CXX_at; Start 652; Stop 676
tctgaagatgaggacaaggaagtcc

SEQ ID NO: 137860 - DNA, 25 bp, Artificial
  probe
  misc_feature (1)..(25): SEQ ID NO: 1359; WAN024CXX_at; Start 555; Stop 579
cacgcatagtattgaggaggccctc

SEQ ID NO: 137861 - DNA, 25 bp, Artificial
  probe
  misc_feature (1)..(25): SEQ ID NO: 1359; WAN024CXX_at; Start 353; Stop 377
tgacagctgtaagagacaagtatcc

SEQ ID NO: 137862 - DNA, 25 bp, Artificial
  probe
  misc_feature (1)..(25): SEQ ID NO: 1359; WAN024CXX_at; Start 88; Stop 112
gaagtggtttccatcctaggcccaa

SEQ ID NO: 137863 - DNA, 25 bp, Artificial
  probe
  misc_feature (1)..(25): SEQ ID NO: 1359; WAN024CXX_at; Start 598; Stop 622
tatatcttgaaaaatcgccctgggc

SEQ ID NO: 137864 - DNA, 25 bp, Artificial
  probe
  misc_feature (1)..(25): SEQ ID NO: 1359; WAN024CXX_at; Start 307; Stop 331
gcagaagctatttcccgagcggata

SEQ ID NO: 137865 - DNA, 25 bp, Artificial
  probe
  misc_feature (1)..(25): SEQ ID NO: 1359; WAN024CXX_at; Start 291; Stop 315
tcaaaaggtggataaggcagaagct

SEQ ID NO: 137866 - DNA, 25 bp, Artificial
  probe
  misc_feature (1)..(25): SEQ ID NO: 1359; WAN024CXX_at; Start 613; Stop 637
cgccctgggcagattgtttcagaaa

SEQ ID NO: 137867 - DNA, 25 bp, Artificial
  probe
  misc_feature (1)..(25): SEQ ID NO: 1359; WAN024CXX_at; Start 404; Stop 428
agcgtgtagccttactccggaccta

SEQ ID NO: 137868 - DNA, 25 bp, Artificial
  probe
  misc_feature (1)..(25): SEQ ID NO: 1359; WAN024CXX_at; Start 450; Stop 474
tctcttagatgaggcctttagcgcc

SEQ ID NO: 137869 - DNA, 25 bp, Artificial
  probe
  misc_feature (1)..(25): SEQ ID NO: 1359; WAN024CXX_at; Start 5; Stop 29
cagaaattagactagagcacgtcag

SEQ ID NO: 137870 - DNA, 25 bp, Artificial
  probe
  misc_feature (1)..(25): SEQ ID NO: 1359; WAN024CXX_at; Start 250; Stop 274
cacaagacggtgcttggaaatatca

SEQ ID NO: 137871 - DNA, 25 bp, Artificial
  probe
  misc_feature (1)..(25): SEQ ID NO: 1359; WAN024CXX_at; Start 529; Stop 553
cagttgcagctaacaaccctgatca

SEQ ID NO: 137872 - DNA, 25 bp, Artificial
  probe
  misc_feature (1)..(25): SEQ ID NO: 1359; WAN024CXX_at; Start 131; Stop 155
ccctctttaatctaatcgctgggat

SEQ ID NO: 137873 - DNA, 25 bp, Artificial
  probe
  misc_feature (1)..(25): SEQ ID NO: 1359; WAN024CXX_at; Start 337; Stop 361
cttgcgaccttccagctgacagctg

SEQ ID NO: 137874 - DNA, 25 bp, Artificial
  probe
  misc_feature (1)..(25): SEQ ID NO: 1359; WAN024CXX_at; Start 235; Stop 259
gatctgctcttggagcacaagacgg

SEQ ID NO: 137875 - DNA, 25 bp, Artificial
  probe
  misc_feature (1)..(25): SEQ ID NO: 1359; WAN024CXX_at; Start 567; Stop 591
tgaggaggccctcaatctcagcgac

SEQ ID NO: 137876 - DNA, 25 bp, Artificial
  probe
  misc_feature (1)..(25): SEQ ID NO: 1359; WAN024CXX_at; Start 220; Stop 244
tatatgttgcaaaaggatctgctct

SEQ ID NO: 137877 - DNA, 25 bp, Artificial
  probe
  misc_feature (1)..(25): SEQ ID NO: 1359; WAN024CXX_at; Start 423; Stop 447
gacctacctttttgggcacaagctc

SEQ ID NO: 137878 - DNA, 25 bp, Artificial
  probe
  misc_feature (1)..(25): SEQ ID NO: 1359; WAN024CXX_at; Start 393; Stop 417
tgggatgcgccagcgtgtagcctta

SEQ ID NO: 137879 - DNA, 25 bp, Artificial
  probe
  misc_feature (1)..(25): SEQ ID NO: 1359; WAN024CXX_at; Start 51; Stop 75
gattttagaggatatcaacctacag

SEQ ID NO: 137880 - DNA, 25 bp, Artificial
  probe
  misc_feature (1)..(25): SEQ ID NO: 1359; WAN024CXX_at; Start 67; Stop 91
aacctacaggtgacttcaggcgaag

SEQ ID NO: 137881 - DNA, 25 bp, Artificial
  probe
  misc_feature (1)..(25): SEQ ID NO: 1359; WAN024CXX_at; Start 673; Stop 697
gtccaaaagattgcctacaaacgtc

SEQ ID NO: 137882 - DNA, 25 bp, Artificial
  probe
  misc_feature (1)..(25): SEQ ID NO: 1359; WAN024CXX_at; Start 481; Stop 505
gagatgacaaagatggaactccacg

SEQ ID NO: 137883 - DNA, 25 bp, Artificial
  probe
  misc_feature (1)..(25): SEQ ID NO: 1359; WAN024CXX_at; Start 322; Stop 346
cgagcggataaaattcttgcgacct

SEQ ID NO: 137884 - DNA, 25 bp, Artificial
  probe
  misc_feature (1)..(25): SEQ ID NO: 1359; WAN024CXX_at; Start 110; Stop 134
caagtggtgttggaaagaccaccct

SEQ ID NO: 137885 - DNA, 25 bp, Artificial
  probe
  misc_feature (1)..(25): SEQ ID NO: 1359; WAN024CXX_at; Start 160; Stop 184
gaagttcagtcagggagaattgtcc

SEQ ID NO: 137886 - DNA, 25 bp, Artificial
  probe
  misc_feature (1)..(25): SEQ ID NO: 1359; WAN024CXX_at; Start 465; Stop 489
ctttagcgccttggatgagatgaca

SEQ ID NO: 137887 - DNA, 25 bp, Artificial
  probe
  misc_feature (1)..(25): SEQ ID NO: 1025; WAN024CXY_at; Start 449; Stop 473
caaaggaattactggtactaaagtg

SEQ ID NO: 137888 - DNA, 25 bp, Artificial
  probe
  misc_feature (1)..(25): SEQ ID NO: 1025; WAN024CXY_at; Start 601; Stop 625
gctttagattgtatcgtgactgtga

SEQ ID NO: 137889 - DNA, 25 bp, Artificial
  probe
  misc_feature (1)..(25): SEQ ID NO: 1025; WAN024CXY_at; Start 568; Stop 592
gatgtctatattcgtactcttcgca

SEQ ID NO: 137890 - DNA, 25 bp, Artificial
  probe
  misc_feature (1)..(25): SEQ ID NO: 1025; WAN024CXY_at; Start 279; Stop 303
tgctgatgatcatgtgacaaaacct

SEQ ID NO: 137891 - DNA, 25 bp, Artificial
  probe
  misc_feature (1)..(25): SEQ ID NO: 1025; WAN024CXY_at; Start 430; Stop 454
gaagaaattgatctcaaaccaaagg

SEQ ID NO: 137892 - DNA, 25 bp, Artificial
  probe
  misc_feature (1)..(25): SEQ ID NO: 1025; WAN024CXY_at; Start 163; Stop 187
cctaggaagagtggttttgaagtgt

SEQ ID NO: 137893 - DNA, 25 bp, Artificial
  probe
  misc_feature (1)..(25): SEQ ID NO: 1025; WAN024CXY_at; Start 262; Stop 286
caggtatttgatctctatgctgatg

SEQ ID NO: 137894 - DNA, 25 bp, Artificial
  probe
  misc_feature (1)..(25): SEQ ID NO: 1025; WAN024CXY_at; Start 14; Stop 38
ttgcagatgacgaggaaatgattag

SEQ ID NO: 137895 - DNA, 25 bp, Artificial
  probe
  misc_feature (1)..(25): SEQ ID NO: 1025; WAN024CXY_at; Start 550; Stop 574
ccttgtgatagggtcgttgatgtct

SEQ ID NO: 137896 - DNA, 25 bp, Artificial
  probe
  misc_feature (1)..(25): SEQ ID NO: 1025; WAN024CXY_at; Start 580; Stop 604
cgtactcttcgcaaaaaattagctt

SEQ ID NO: 137897 - DNA, 25 bp, Artificial
  probe
  misc_feature (1)..(25): SEQ ID NO: 1025; WAN024CXY_at; Start 392; Stop 416
cagtggattttacctcttacaaagc

SEQ ID NO: 137898 - DNA, 25 bp, Artificial
  probe
  misc_feature (1)..(25): SEQ ID NO: 1025; WAN024CXY_at; Start 44; Stop 68
gaattgcagcatttctgacagaaga

SEQ ID NO: 137899 - DNA, 25 bp, Artificial
  probe
  misc_feature (1)..(25): SEQ ID NO: 1025; WAN024CXY_at; Start 438; Stop 462
tgatctcaaaccaaaggaattactg

SEQ ID NO: 137900 - DNA, 25 bp, Artificial
  probe
  misc_feature (1)..(25): SEQ ID NO: 1025; WAN024CXY_at; Start 84; Stop 108
tatggctaaggatggacaagaggtc

SEQ ID NO: 137901 - DNA, 25 bp, Artificial
  probe
  misc_feature (1)..(25): SEQ ID NO: 1025; WAN024CXY_at; Start 100; Stop 124
caagaggtcttggaaaaatttcaag

SEQ ID NO: 137902 - DNA, 25 bp, Artificial
  probe
  misc_feature (1)..(25): SEQ ID NO: 1025; WAN024CXY_at; Start 489; Stop 513
aaatcaagttttaagtagagagcag

SEQ ID NO: 137903 - DNA, 25 bp, Artificial
  probe
  misc_feature (1)..(25): SEQ ID NO: 1025; WAN024CXY_at; Start 535; Stop 559
gatgtagctgatttaccttgtgata

SEQ ID NO: 137904 - DNA, 25 bp, Artificial
  probe
  misc_feature (1)..(25): SEQ ID NO: 1025; WAN024CXY_at; Start 345; Stop 369
cagacgttactacgtcatagaggat

SEQ ID NO: 137905 - DNA, 25 bp, Artificial
  probe
  misc_feature (1)..(25): SEQ ID NO: 1025; WAN024CXY_at; Start 319; Stop 343
cttgtcaagcgtattaaggcgctta

SEQ ID NO: 137906 - DNA, 25 bp, Artificial
  probe
  misc_feature (1)..(25): SEQ ID NO: 1025; WAN024CXY_at; Start 219; Stop 243
tgtcatcgtcttgagtgctctggga

SEQ ID NO: 137907 - DNA, 25 bp, Artificial
  probe
  misc_feature (1)..(25): SEQ ID NO: 1025; WAN024CXY_at; Start 374; Stop 398
ggcgatatcaggatgtaacagtgga

SEQ ID NO: 137908 - DNA, 25 bp, Artificial
  probe
  misc_feature (1)..(25): SEQ ID NO: 1025; WAN024CXY_at; Start 334; Stop 358
aaggcgcttatcagacgttactacg

SEQ ID NO: 137909 - DNA, 25 bp, Artificial
  probe
  misc_feature (1)..(25): SEQ ID NO: 1025; WAN024CXY_at; Start 506; Stop 530
gagagcagatattggaagaaatttc

SEQ ID NO: 137910 - DNA, 25 bp, Artificial
  probe
  misc_feature (1)..(25): SEQ ID NO: 1025; WAN024CXY_at; Start 520; Stop 544
gaagaaatttcaaaagatgtagctg

SEQ ID NO: 137911 - DNA, 25 bp, Artificial
  probe
  misc_feature (1)..(25): SEQ ID NO: 1025; WAN024CXY_at; Start 149; Stop 173
tggatttaatgatgcctaggaagag

SEQ ID NO: 137912 - DNA, 25 bp, Artificial
  probe
  misc_feature (1)..(25): SEQ ID NO: 1025; WAN024CXY_at; Start 247; Stop 271
gaaactactcagtcacaggtatttg

SEQ ID NO: 137913 - DNA, 25 bp, Artificial
  probe
  misc_feature (1)..(25): SEQ ID NO: 1025; WAN024CXY_at; Start 234; Stop 258
tgctctgggagatgaaactactcag

SEQ ID NO: 137914 - DNA, 25 bp, Artificial
  probe
  misc_feature (1)..(25): SEQ ID NO: 1025; WAN024CXY_at; Start 53; Stop 77
catttctgacagaagagggttatca

SEQ ID NO: 137915 - DNA, 25 bp, Artificial
  probe
  misc_feature (1)..(25): SEQ ID NO: 1025; WAN024CXY_at; Start 122; Stop 146
aagatctccctatccatctcatggt

SEQ ID NO: 137916 - DNA, 25 bp, Artificial
  probe
  misc_feature (1)..(25): SEQ ID NO: 1025; WAN024CXY_at; Start 202; Stop 226
caaaagcacgatattcctgtcatcg

SEQ ID NO: 137917 - DNA, 25 bp, Artificial
  probe
  misc_feature (1)..(25): SEQ ID NO: 1025; WAN024CXY_at; Start 29; Stop 53
aaatgattagagaaggaattgcagc

SEQ ID NO: 137918 - DNA, 25 bp, Artificial
  probe
  misc_feature (1)..(25): SEQ ID NO: 1025; WAN024CXY_at; Start 3; Stop 27
gaacattttagttgcagatgacgag

SEQ ID NO: 137919 - DNA, 25 bp, Artificial
  probe
  misc_feature (1)..(25): SEQ ID NO: 1025; WAN024CXY_at; Start 462; Stop 486
ggtactaaagtgtttgattcagcat

SEQ ID NO: 137920 - DNA, 25 bp, Artificial
  probe
  misc_feature (1)..(25): SEQ ID NO: 1025; WAN024CXY_at; Start 67; Stop 91
gagggttatcatgtcattatggcta

SEQ ID NO: 137921 - DNA, 25 bp, Artificial
  probe
  misc_feature (1)..(25): SEQ ID NO: 1667; WAN024CXZ_at; Start 130; Stop 154
gaaaagtttaatgagagcgcaagag

SEQ ID NO: 137922 - DNA, 25 bp, Artificial
  probe
  misc_feature (1)..(25): SEQ ID NO: 1667; WAN024CXZ_at; Start 1140; Stop 1164
tacatgtgcgcctctaagtgaccaa

SEQ ID NO: 137923 - DNA, 25 bp, Artificial
  probe
  misc_feature (1)..(25): SEQ ID NO: 1667; WAN024CXZ_at; Start 652; Stop 676
gagttggaaagtcgtaatgagcaaa

SEQ ID NO: 137924 - DNA, 25 bp, Artificial
  probe
  misc_feature (1)..(25): SEQ ID NO: 1667; WAN024CXZ_at; Start 1288; Stop 1312
tttctcccttatgaacacggtatgg

SEQ ID NO: 137925 - DNA, 25 bp, Artificial
  probe
  misc_feature (1)..(25): SEQ ID NO: 1667; WAN024CXZ_at; Start 718; Stop 742
gcatcacatgagttgaaaacccctt

SEQ ID NO: 137926 - DNA, 25 bp, Artificial
  probe
  misc_feature (1)..(25): SEQ ID NO: 1667; WAN024CXZ_at; Start 542; Stop 566
tgcaagatttggatgacaatattcg

SEQ ID NO: 137927 - DNA, 25 bp, Artificial
  probe
  misc_feature (1)..(25): SEQ ID NO: 1667; WAN024CXZ_at; Start 1195; Stop 1219
cattctcaaatcgtgacagataagg

SEQ ID NO: 137928 - DNA, 25 bp, Artificial
  probe
  misc_feature (1)..(25): SEQ ID NO: 1667; WAN024CXZ_at; Start 41; Stop 65
gaagttttgcaattctaggtggtgt

SEQ ID NO: 137929 - DNA, 25 bp, Artificial
  probe
  misc_feature (1)..(25): SEQ ID NO: 1667; WAN024CXZ_at; Start 883; Stop 907
ttccaagagtggacagagtgtcgtg

SEQ ID NO: 137930 - DNA, 25 bp, Artificial
  probe
  misc_feature (1)..(25): SEQ ID NO: 1667; WAN024CXZ_at; Start 1029; Stop 1053
tagggcattggataaggttttgaca

SEQ ID NO: 137931 - DNA, 25 bp, Artificial
  probe
  misc_feature (1)..(25): SEQ ID NO: 1667; WAN024CXZ_at; Start 827; Stop 851
taaataagattgaccagatgagcca

SEQ ID NO: 137932 - DNA, 25 bp, Artificial
  probe
  misc_feature (1)..(25): SEQ ID NO: 1667; WAN024CXZ_at; Start 944; Stop 968
tatcacgttatcaagaattagctca

SEQ ID NO: 137933 - DNA, 25 bp, Artificial
  probe
  misc_feature (1)..(25): SEQ ID NO: 1667; WAN024CXZ_at; Start 487; Stop 511
tatactaaacgcttgctcaatcctc

SEQ ID NO: 137934 - DNA, 25 bp, Artificial
  probe
  misc_feature (1)..(25): SEQ ID NO: 1667; WAN024CXZ_at; Start 1208; Stop 1232
tgacagataaggatgaaagttccgg

SEQ ID NO: 137935 - DNA, 25 bp, Artificial
  probe
  misc_feature (1)..(25): SEQ ID NO: 1667; WAN024CXZ_at; Start 347; Stop 371
gtacagcagatggtaaacaggtaac

SEQ ID NO: 137936 - DNA, 25 bp, Artificial
  probe
  misc_feature (1)..(25): SEQ ID NO: 1667; WAN024CXZ_at; Start 159; Stop 183
tacggagtatttaaagactaagaca

SEQ ID NO: 137937 - DNA, 25 bp, Artificial
  probe
  misc_feature (1)..(25): SEQ ID NO: 1667; WAN024CXZ_at; Start 332; Stop 356
tagatatgtctgttagtacagcaga

SEQ ID NO: 137938 - DNA, 25 bp, Artificial
  probe
  misc_feature (1)..(25): SEQ ID NO: 1667; WAN024CXZ_at; Start 235; Stop 259
tctgctcaccttaaaagagatattg

SEQ ID NO: 137939 - DNA, 25 bp, Artificial
  probe
  misc_feature (1)..(25): SEQ ID NO: 1667; WAN024CXZ_at; Start 743; Stop 767
tagccagtcttagaattatcctaga

SEQ ID NO: 137940 - DNA, 25 bp, Artificial
  probe
  misc_feature (1)..(25): SEQ ID NO: 1667; WAN024CXZ_at; Start 1046; Stop 1070
ttttgacaaacctgattagtaatgc

SEQ ID NO: 137941 - DNA, 25 bp, Artificial
  probe
  misc_feature (1)..(25): SEQ ID NO: 1667; WAN024CXZ_at; Start 1154; Stop 1178
taagtgaccaagaactagaacattt

SEQ ID NO: 137942 - DNA, 25 bp, Artificial
  probe
  misc_feature (1)..(25): SEQ ID NO: 1667; WAN024CXZ_at; Start 1303; Stop 1327
cacggtatggaatttaagattagct

SEQ ID NO: 137943 - DNA, 25 bp, Artificial
  probe
  misc_feature (1)..(25): SEQ ID NO: 1667; WAN024CXZ_at; Start 870; Stop 894
ggagtcttctaaattccaagagtgg

SEQ ID NO: 137944 - DNA, 25 bp, Artificial
  probe
  misc_feature (1)..(25): SEQ ID NO: 1667; WAN024CXZ_at; Start 56; Stop 80
taggtggtgttggtctagtcattca

SEQ ID NO: 137945 - DNA, 25 bp, Artificial
  probe
  misc_feature (1)..(25): SEQ ID NO: 1667; WAN024CXZ_at; Start 273; Stop 297
ccctcttgtgcatgacttggatatt

SEQ ID NO: 137946 - DNA, 25 bp, Artificial
  probe
  misc_feature (1)..(25): SEQ ID NO: 1667; WAN024CXZ_at; Start 1228; Stop 1252
tccggtttgggtctttacattgtga

SEQ ID NO: 137947 - DNA, 25 bp, Artificial
  probe
  misc_feature (1)..(25): SEQ ID NO: 1667; WAN024CXZ_at; Start 962; Stop 986
tagctcattcaataggtgttacaat

SEQ ID NO: 137948 - DNA, 25 bp, Artificial
  probe
  misc_feature (1)..(25): SEQ ID NO: 1667; WAN024CXZ_at; Start 197; Stop 221
caagcttactccagtcttattcaaa

SEQ ID NO: 137949 - DNA, 25 bp, Artificial
  probe
  misc_feature (1)..(25): SEQ ID NO: 1667; WAN024CXZ_at; Start 144; Stop 168
gagcgcaagagtgtttacggagtat

SEQ ID NO: 137950 - DNA, 25 bp, Artificial
  probe
  misc_feature (1)..(25): SEQ ID NO: 1667; WAN024CXZ_at; Start 523; Stop 547
tcagaagtgactagtaaaatgcaag

SEQ ID NO: 137951 - DNA, 25 bp, Artificial
  probe
  misc_feature (1)..(25): SEQ ID NO: 1667; WAN024CXZ_at; Start 1014; Stop 1038
ggtcgtcatgagtcttagggcattg

SEQ ID NO: 137952 - DNA, 25 bp, Artificial
  probe
  misc_feature (1)..(25): SEQ ID NO: 1667; WAN024CXZ_at; Start 219; Stop 243
aaagtccttgaccatatctgctcac

SEQ ID NO: 137953 - DNA, 25 bp, Artificial
  probe
  misc_feature (1)..(25): SEQ ID NO: 1667; WAN024CXZ_at; Start 610; Stop 634
cagattaatggtatgtatgagcact

SEQ ID NO: 137954 - DNA, 25 bp, Artificial
  probe
  misc_feature (1)..(25): SEQ ID NO: 1667; WAN024CXZ_at; Start 903; Stop 927
tcgtgagaccttgactgttaagcca

SEQ ID NO: 137955 - DNA, 25 bp, Artificial
  probe
  misc_feature (1)..(25): SEQ ID NO: 2648; WAN024CY2_at; Start 87; Stop 111
caatggcgggaaagaatttggagtt

SEQ ID NO: 137956 - DNA, 25 bp, Artificial
  probe
  misc_feature (1)..(25): SEQ ID NO: 2648; WAN024CY2_at; Start 3; Stop 27
ggtattagcgattattttagtaaca

SEQ ID NO: 137957 - DNA, 25 bp, Artificial
  probe
  misc_feature (1)..(25): SEQ ID NO: 2648; WAN024CY2_at; Start 258; Stop 282
gattcacttgttgggagatatttgg

SEQ ID NO: 137958 - DNA, 25 bp, Artificial
  probe
  misc_feature (1)..(25): SEQ ID NO: 2648; WAN024CY2_at; Start 74; Stop 98
aacgaatccttagcaatggcgggaa

SEQ ID NO: 137959 - DNA, 25 bp, Artificial
  probe
  misc_feature (1)..(25): SEQ ID NO: 2648; WAN024CY2_at; Start 446; Stop 470
cagttattttgtatcgacgaatagc

SEQ ID NO: 137960 - DNA, 25 bp, Artificial
  probe
  misc_feature (1)..(25): SEQ ID NO: 2648; WAN024CY2_at; Start 107; Stop 131
gagttgagaatacaaaacgattaac

SEQ ID NO: 137961 - DNA, 25 bp, Artificial
  probe
  misc_feature (1)..(25): SEQ ID NO: 2648; WAN024CY2_at; Start 428; Stop 452
tagtttttccagtttatgcagttat

SEQ ID NO: 137962 - DNA, 25 bp, Artificial
  probe
  misc_feature (1)..(25): SEQ ID NO: 2648; WAN024CY2_at; Start 104; Stop 128
ttggagttgagaatacaaaacgatt

SEQ ID NO: 137963 - DNA, 25 bp, Artificial
  probe
  misc_feature (1)..(25): SEQ ID NO: 2648; WAN024CY2_at; Start 297; Stop 321
gcttgtcaataatcacaaatatgta

SEQ ID NO: 137964 - DNA, 25 bp, Artificial
  probe
  misc_feature (1)..(25): SEQ ID NO: 2648; WAN024CY2_at; Start 325; Stop 349
catatcttgtttaggacagtaaaac

SEQ ID NO: 137965 - DNA, 25 bp, Artificial
  probe
  misc_feature (1)..(25): SEQ ID NO: 2648; WAN024CY2_at; Start 386; Stop 410
ttggcttgaccttgttgagtcatgc

SEQ ID NO: 137966 - DNA, 25 bp, Artificial
  probe
  misc_feature (1)..(25): SEQ ID NO: 2648; WAN024CY2_at; Start 72; Stop 96
gaaacgaatccttagcaatggcggg

SEQ ID NO: 137967 - DNA, 25 bp, Artificial
  probe
  misc_feature (1)..(25): SEQ ID NO: 2648; WAN024CY2_at; Start 288; Stop 312
gaagcttatgcttgtcaataatcac

SEQ ID NO: 137968 - DNA, 25 bp, Artificial
  probe
  misc_feature (1)..(25): SEQ ID NO: 2648; WAN024CY2_at; Start 274; Stop 298
gatatttggacagtgaagcttatgc

SEQ ID NO: 137969 - DNA, 25 bp, Artificial
  probe
  misc_feature (1)..(25): SEQ ID NO: 2648; WAN024CY2_at; Start 376; Stop 400
cctgagttgattggcttgaccttgt

SEQ ID NO: 137970 - DNA, 25 bp, Artificial
  probe
  misc_feature (1)..(25): SEQ ID NO: 2648; WAN024CY2_at; Start 302; Stop 326
tcaataatcacaaatatgtagatca

SEQ ID NO: 137971 - DNA, 25 bp, Artificial
  probe
  misc_feature (1)..(25): SEQ ID NO: 2648; WAN024CY2_at; Start 281; Stop 305
ggacagtgaagcttatgcttgtcaa

SEQ ID NO: 137972 - DNA, 25 bp, Artificial
  probe
  misc_feature (1)..(25): SEQ ID NO: 2648; WAN024CY2_at; Start 52; Stop 76
aagcgttcgatagagaatgagaaac

SEQ ID NO: 137973 - DNA, 25 bp, Artificial
  probe
  misc_feature (1)..(25): SEQ ID NO: 2648; WAN024CY2_at; Start 84; Stop 108
tagcaatggcgggaaagaatttgga

SEQ ID NO: 137974 - DNA, 25 bp, Artificial
  probe
  misc_feature (1)..(25): SEQ ID NO: 2648; WAN024CY2_at; Start 58; Stop 82
tcgatagagaatgagaaacgaatcc

SEQ ID NO: 137975 - DNA, 25 bp, Artificial
  probe
  misc_feature (1)..(25): SEQ ID NO: 2648; WAN024CY2_at; Start 269; Stop 293
tgggagatatttggacagtgaagct

SEQ ID NO: 137976 - DNA, 25 bp, Artificial
  probe
  misc_feature (1)..(25): SEQ ID NO: 2648; WAN024CY2_at; Start 64; Stop 88
gagaatgagaaacgaatccttagca

SEQ ID NO: 137977 - DNA, 25 bp, Artificial
  probe
  misc_feature (1)..(25): SEQ ID NO: 2648; WAN024CY2_at; Start 442; Stop 466
tatgcagttattttgtatcgacgaa

SEQ ID NO: 137978 - DNA, 25 bp, Artificial
  probe
  misc_feature (1)..(25): SEQ ID NO: 2648; WAN024CY2_at; Start 459; Stop 483
tcgacgaatagctgaagaggaaaag

SEQ ID NO: 137979 - DNA, 25 bp, Artificial
  probe
  misc_feature (1)..(25): SEQ ID NO: 2648; WAN024CY2_at; Start 48; Stop 72
tttaaagcgttcgatagagaatgag

SEQ ID NO: 137980 - DNA, 25 bp, Artificial
  probe
  misc_feature (1)..(25): SEQ ID NO: 2648; WAN024CY2_at; Start 423; Stop 447
tgttttagtttttccagtttatgca

SEQ ID NO: 137981 - DNA, 25 bp, Artificial
  probe
  misc_feature (1)..(25): SEQ ID NO: 2648; WAN024CY2_at; Start 319; Stop 343
gtagatcatatcttgtttaggacag

SEQ ID NO: 137982 - DNA, 25 bp, Artificial
  probe
  misc_feature (1)..(25): SEQ ID NO: 2648; WAN024CY2_at; Start 135; Stop 159
ggctcatattgttttttatctctct

SEQ ID NO: 137983 - DNA, 25 bp, Artificial
  probe
  misc_feature (1)..(25): SEQ ID NO: 2648; WAN024CY2_at; Start 77; Stop 101
gaatccttagcaatggcgggaaaga

SEQ ID NO: 137984 - DNA, 25 bp, Artificial
  probe
  misc_feature (1)..(25): SEQ ID NO: 2648; WAN024CY2_at; Start 96; Stop 120
gaaagaatttggagttgagaataca

SEQ ID NO: 137985 - DNA, 25 bp, Artificial
  probe
  misc_feature (1)..(25): SEQ ID NO: 2648; WAN024CY2_at; Start 249; Stop 273
gatgttggtgattcacttgttggga

SEQ ID NO: 137986 - DNA, 25 bp, Artificial
  probe
  misc_feature (1)..(25): SEQ ID NO: 2648; WAN024CY2_at; Start 379; Stop 403
gagttgattggcttgaccttgttga

SEQ ID NO: 137987 - DNA, 25 bp, Artificial
  probe
  misc_feature (1)..(25): SEQ ID NO: 2648; WAN024CY2_at; Start 455; Stop 479
tgtatcgacgaatagctgaagagga

SEQ ID NO: 137988 - DNA, 25 bp, Artificial
  probe
  misc_feature (1)..(25): SEQ ID NO: 2648; WAN024CY2_at; Start 69; Stop 93
tgagaaacgaatccttagcaatggc

SEQ ID NO: 137989 - DNA, 25 bp, Artificial
  probe
  misc_feature (1)..(25): SEQ ID NO: 2811; WAN024CY3_at; Start 20; Stop 44
tggagaaagccgagtgtggtcaatt

SEQ ID NO: 137990 - DNA, 25 bp, Artificial
  probe
  misc_feature (1)..(25): SEQ ID NO: 2811; WAN024CY3_at; Start 917; Stop 941
gggattatacagaggaccatgtcac

SEQ ID NO: 137991 - DNA, 25 bp, Artificial
  probe
  misc_feature (1)..(25): SEQ ID NO: 2811; WAN024CY3_at; Start 128; Stop 152
taaccaaatatgtcaccctgctcaa

SEQ ID NO: 137992 - DNA, 25 bp, Artificial
  probe
  misc_feature (1)..(25): SEQ ID NO: 2811; WAN024CY3_at; Start 930; Stop 954
ggaccatgtcacctatgaactcagt

SEQ ID NO: 137993 - DNA, 25 bp, Artificial
  probe
  misc_feature (1)..(25): SEQ ID NO: 2811; WAN024CY3_at; Start 1221; Stop 1245
tgtcttttcaaggatggcagccatt

SEQ ID NO: 137994 - DNA, 25 bp, Artificial
  probe
  misc_feature (1)..(25): SEQ ID NO: 2811; WAN024CY3_at; Start 202; Stop 226
gaaaatctgcgtctgtctatcggtg

SEQ ID NO: 137995 - DNA, 25 bp, Artificial
  probe
  misc_feature (1)..(25): SEQ ID NO: 2811; WAN024CY3_at; Start 981; Stop 1005
taagggctatattttacaggatcgc

SEQ ID NO: 137996 - DNA, 25 bp, Artificial
  probe
  misc_feature (1)..(25): SEQ ID NO: 2811; WAN024CY3_at; Start 857; Stop 881
ggcagttggcagatttactgacgca

SEQ ID NO: 137997 - DNA, 25 bp, Artificial
  probe
  misc_feature (1)..(25): SEQ ID NO: 2811; WAN024CY3_at; Start 215; Stop 239
tgtctatcggtgcagctaccaaggg

SEQ ID NO: 137998 - DNA, 25 bp, Artificial
  probe
  misc_feature (1)..(25): SEQ ID NO: 2811; WAN024CY3_at; Start 1185; Stop 1209
tatgcggattggtctggatttgaca

SEQ ID NO: 137999 - DNA, 25 bp, Artificial
  probe
  misc_feature (1)..(25): SEQ ID NO: 2811; WAN024CY3_at; Start 526; Stop 550
ccagagagaaaacaggagattgcca

SEQ ID NO: 138000 - DNA, 25 bp, Artificial
  probe
  misc_feature (1)..(25): SEQ ID NO: 2811; WAN024CY3_at; Start 1011; Stop 1035
gtaccagttagagaatcgtcatcca

SEQ ID NO: 138001 - DNA, 25 bp, Artificial
  probe
  misc_feature (1)..(25): SEQ ID NO: 2811; WAN024CY3_at; Start 629; Stop 653
aacgtcttcgggtcaatgcttgtca

SEQ ID NO: 138002 - DNA, 25 bp, Artificial
  probe
  misc_feature (1)..(25): SEQ ID NO: 2811; WAN024CY3_at; Start 1123; Stop 1147
aagaagattctctgggaatggctcc

SEQ ID NO: 138003 - DNA, 25 bp, Artificial
  probe
  misc_feature (1)..(25): SEQ ID NO: 2811; WAN024CY3_at; Start 593; Stop 617
aattggacttggttctctgggctca

SEQ ID NO: 138004 - DNA, 25 bp, Artificial
  probe
  misc_feature (1)..(25): SEQ ID NO: 2811; WAN024CY3_at; Start 355; Stop 379
gaggctacgcttggtcgtcacttgg

SEQ ID NO: 138005 - DNA, 25 bp, Artificial
  probe
  misc_feature (1)..(25): SEQ ID NO: 2811; WAN024CY3_at; Start 739; Stop 763
gctgggcaacatattccactaggag

SEQ ID NO: 138006 - DNA, 25 bp, Artificial
  probe
  misc_feature (1)..(25): SEQ ID NO: 2811; WAN024CY3_at; Start 144; Stop 168
cctgctcaatgacaaggctttggat

SEQ ID NO: 138007 - DNA, 25 bp, Artificial
  probe
  misc_feature (1)..(25): SEQ ID NO: 2811; WAN024CY3_at; Start 507; Stop 531
ggaaggtcacatgcagaaaccagag

SEQ ID NO: 138008 - DNA, 25 bp, Artificial
  probe
  misc_feature (1)..(25): SEQ ID NO: 2811; WAN024CY3_at; Start 59; Stop 83
ttctattacaagagtctcagacgac

SEQ ID NO: 138009 - DNA, 25 bp, Artificial
  probe
  misc_feature (1)..(25): SEQ ID NO: 2811; WAN024CY3_at; Start 1053; Stop 1077
tgattttaaagagacagcagaggag

SEQ ID NO: 138010 - DNA, 25 bp, Artificial
  probe
  misc_feature (1)..(25): SEQ ID NO: 2811; WAN024CY3_at; Start 549; Stop 573
caatttagaggaaatctgcggtgca

SEQ ID NO: 138011 - DNA, 25 bp, Artificial
  probe
  misc_feature (1)..(25): SEQ ID NO: 2811; WAN024CY3_at; Start 1138; Stop 1162
gaatggctccagttaatcgaatata

SEQ ID NO: 138012 - DNA, 25 bp, Artificial
  probe
  misc_feature (1)..(25): SEQ ID NO: 2811; WAN024CY3_at; Start 995; Stop 1019
tacaggatcgctacaagtaccagtt

SEQ ID NO: 138013 - DNA, 25 bp, Artificial
  probe
  misc_feature (1)..(25): SEQ ID NO: 2811; WAN024CY3_at; Start 478; Stop 502
ttccgaaaggtctggtcgagtcagg

SEQ ID NO: 138014 - DNA, 25 bp, Artificial
  probe
  misc_feature (1)..(25): SEQ ID NO: 2811; WAN024CY3_at; Start 310; Stop 334
caacagtttttagcccatcagctgg

SEQ ID NO: 138015 - DNA, 25 bp, Artificial
  probe
  misc_feature (1)..(25): SEQ ID NO: 2811; WAN024CY3_at; Start 493; Stop 517
tcgagtcaggaatgggaaggtcaca

SEQ ID NO: 138016 - DNA, 25 bp, Artificial
  probe
  misc_feature (1)..(25): SEQ ID NO: 2811; WAN024CY3_at; Start 1169; Stop 1193
aaaacggtggccagcatatgcggat

SEQ ID NO: 138017 - DNA, 25 bp, Artificial
  probe
  misc_feature (1)..(25): SEQ ID NO: 2811; WAN024CY3_at; Start 708; Stop 732
tcgtttgctgagaaaggttccgtcc

SEQ ID NO: 138018 - DNA, 25 bp, Artificial
  probe
  misc_feature (1)..(25): SEQ ID NO: 2811; WAN024CY3_at; Start 370; Stop 394
cgtcacttggctggtttaaatcaga

SEQ ID NO: 138019 - DNA, 25 bp, Artificial
  probe
  misc_feature (1)..(25): SEQ ID NO: 2811; WAN024CY3_at; Start 291; Stop 315
ggtttatcttctctaccaccaacag

SEQ ID NO: 138020 - DNA, 25 bp, Artificial
  probe
  misc_feature (1)..(25): SEQ ID NO: 2811; WAN024CY3_at; Start 610; Stop 634
tgggctcacatcagtcaacaacgtc

SEQ ID NO: 138021 - DNA, 25 bp, Artificial
  probe
  misc_feature (1)..(25): SEQ ID NO: 2811; WAN024CY3_at; Start 946; Stop 970
gaactcagtcagctttgtgctcaag

SEQ ID NO: 138022 - DNA, 25 bp, Artificial
  probe
  misc_feature (1)..(25): SEQ ID NO: 2811; WAN024CY3_at; Start 1155; Stop 1179
cgaatatatggctgaaaacggtggc

SEQ ID NO: 138023 - DNA, 25 bp, Artificial
  probe
  misc_feature (1)..(25): SEQ ID NO: 4068; WAN024CY4_at; Start 22; Stop 46
gattatgtcaacgaattagacccaa

SEQ ID NO: 138024 - DNA, 25 bp, Artificial
  probe
  misc_feature (1)..(25): SEQ ID NO: 4068; WAN024CY4_at; Start 4; Stop 28
ccgaaatggtcaaatcctgattatg

SEQ ID NO: 138025 - DNA, 25 bp, Artificial
  probe
  misc_feature (1)..(25): SEQ ID NO: 4068; WAN024CY4_at; Start 73; Stop 97
cacaagtcacaaggcactttggaaa

SEQ ID NO: 138026 - DNA, 25 bp, Artificial
  probe
  misc_feature (1)..(25): SEQ ID NO: 4068; WAN024CY4_at; Start 123; Stop 147
ccaaaaacgtgaagaaatcgagcaa

SEQ ID NO: 138027 - DNA, 25 bp, Artificial
  probe
  misc_feature (1)..(25): SEQ ID NO: 4068; WAN024CY4_at; Start 175; Stop 199
caagagcttttgaaccgcttgaaca

SEQ ID NO: 138028 - DNA, 25 bp, Artificial
  probe
  misc_feature (1)..(25): SEQ ID NO: 4068; WAN024CY4_at; Start 27; Stop 51
tgtcaacgaattagacccaaaaatc

SEQ ID NO: 138029 - DNA, 25 bp, Artificial
  probe
  misc_feature (1)..(25): SEQ ID NO: 4068; WAN024CY4_at; Start 37; Stop 61
ttagacccaaaaatcgttgatatgc

SEQ ID NO: 138030 - DNA, 25 bp, Artificial
  probe
  misc_feature (1)..(25): SEQ ID NO: 4068; WAN024CY4_at; Start 33; Stop 57
cgaattagacccaaaaatcgttgat

SEQ ID NO: 138031 - DNA, 25 bp, Artificial
  probe
  misc_feature (1)..(25): SEQ ID NO: 4068; WAN024CY4_at; Start 98; Stop 122
ctcccgaggcgcaagcagaaatcgc

SEQ ID NO: 138032 - DNA, 25 bp, Artificial
  probe
  misc_feature (1)..(25): SEQ ID NO: 4068; WAN024CY4_at; Start 19; Stop 43
cctgattatgtcaacgaattagacc

SEQ ID NO: 138033 - DNA, 25 bp, Artificial
  probe
  misc_feature (1)..(25): SEQ ID NO: 4068; WAN024CY4_at; Start 86; Stop 110
gcactttggaaactcccgaggcgca

SEQ ID NO: 138034 - DNA, 25 bp, Artificial
  probe
  misc_feature (1)..(25): SEQ ID NO: 4068; WAN024CY4_at; Start 1; Stop 25
gtgccgaaatggtcaaatcctgatt

SEQ ID NO: 138035 - DNA, 25 bp, Artificial
  probe
  misc_feature (1)..(25): SEQ ID NO: 4068; WAN024CY4_at; Start 112; Stop 136
gcagaaatcgcccaaaaacgtgaag

SEQ ID NO: 138036 - DNA, 25 bp, Artificial
  probe
  misc_feature (1)..(25): SEQ ID NO: 4068; WAN024CY4_at; Start 67; Stop 91
gaatttcacaagtcacaaggcactt

SEQ ID NO: 138037 - DNA, 25 bp, Artificial
  probe
  misc_feature (1)..(25): SEQ ID NO: 4068; WAN024CY4_at; Start 44; Stop 68
caaaaatcgttgatatgctagtaga

SEQ ID NO: 138038 - DNA, 25 bp, Artificial
  probe
  misc_feature (1)..(25): SEQ ID NO: 4068; WAN024CY4_at; Start 120; Stop 144
cgcccaaaaacgtgaagaaatcgag

SEQ ID NO: 138039 - DNA, 25 bp, Artificial
  probe
  misc_feature (1)..(25): SEQ ID NO: 4068; WAN024CY4_at; Start 132; Stop 156
tgaagaaatcgagcaaaggagagct

SEQ ID NO: 138040 - DNA, 25 bp, Artificial
  probe
  misc_feature (1)..(25): SEQ ID NO: 4068; WAN024CY4_at; Start 79; Stop 103
tcacaaggcactttggaaactcccg

SEQ ID NO: 138041 - DNA, 25 bp, Artificial
  probe
  misc_feature (1)..(25): SEQ ID NO: 4068; WAN024CY4_at; Start 136; Stop 160
gaaatcgagcaaaggagagctgagc

SEQ ID NO: 138042 - DNA, 25 bp, Artificial
  probe
  misc_feature (1)..(25): SEQ ID NO: 4068; WAN024CY4_at; Start 140; Stop 164
tcgagcaaaggagagctgagcttga

SEQ ID NO: 138043 - DNA, 25 bp, Artificial
  probe
  misc_feature (1)..(25): SEQ ID NO: 4068; WAN024CY4_at; Start 103; Stop 127
gaggcgcaagcagaaatcgcccaaa

SEQ ID NO: 138044 - DNA, 25 bp, Artificial
  probe
  misc_feature (1)..(25): SEQ ID NO: 4068; WAN024CY4_at; Start 62; Stop 86
tagtagaatttcacaagtcacaagg

SEQ ID NO: 138045 - DNA, 25 bp, Artificial
  probe
  misc_feature (1)..(25): SEQ ID NO: 4068; WAN024CY4_at; Start 91; Stop 115
ttggaaactcccgaggcgcaagcag

SEQ ID NO: 138046 - DNA, 25 bp, Artificial
  probe
  misc_feature (1)..(25): SEQ ID NO: 4068; WAN024CY4_at; Start 82; Stop 106
caaggcactttggaaactcccgagg

SEQ ID NO: 138047 - DNA, 25 bp, Artificial
  probe
  misc_feature (1)..(25): SEQ ID NO: 4068; WAN024CY4_at; Start 171; Stop 195
aaaacaagagcttttgaaccgcttg

SEQ ID NO: 138048 - DNA, 25 bp, Artificial
  probe
  misc_feature (1)..(25): SEQ ID NO: 4068; WAN024CY4_at; Start 40; Stop 64
gacccaaaaatcgttgatatgctag

SEQ ID NO: 138049 - DNA, 25 bp, Artificial
  probe
  misc_feature (1)..(25): SEQ ID NO: 4068; WAN024CY4_at; Start 88; Stop 112
actttggaaactcccgaggcgcaag

SEQ ID NO: 138050 - DNA, 25 bp, Artificial
  probe
  misc_feature (1)..(25): SEQ ID NO: 4068; WAN024CY4_at; Start 51; Stop 75
cgttgatatgctagtagaatttcac

SEQ ID NO: 138051 - DNA, 25 bp, Artificial
  probe
  misc_feature (1)..(25): SEQ ID NO: 4068; WAN024CY4_at; Start 11; Stop 35
ggtcaaatcctgattatgtcaacga

SEQ ID NO: 138052 - DNA, 25 bp, Artificial
  probe
  misc_feature (1)..(25): SEQ ID NO: 4068; WAN024CY4_at; Start 128; Stop 152
aacgtgaagaaatcgagcaaaggag

SEQ ID NO: 138053 - DNA, 25 bp, Artificial
  probe
  misc_feature (1)..(25): SEQ ID NO: 4068; WAN024CY4_at; Start 70; Stop 94
tttcacaagtcacaaggcactttgg

SEQ ID NO: 138054 - DNA, 25 bp, Artificial
  probe
  misc_feature (1)..(25): SEQ ID NO: 4068; WAN024CY4_at; Start 65; Stop 89
tagaatttcacaagtcacaaggcac

SEQ ID NO: 138055 - DNA, 25 bp, Artificial
  probe
  misc_feature (1)..(25): SEQ ID NO: 4068; WAN024CY4_at; Start 177; Stop 201
agagcttttgaaccgcttgaacaaa

SEQ ID NO: 138056 - DNA, 25 bp, Artificial
  probe
  misc_feature (1)..(25): SEQ ID NO: 4068; WAN024CY4_at; Start 108; Stop 132
gcaagcagaaatcgcccaaaaacgt

SEQ ID NO: 138057 - DNA, 25 bp, Artificial
  probe
  misc_feature (1)..(25): SEQ ID NO: 3473; WAN024CY5_at; Start 382; Stop 406
tatatgattggtaggataggtgctt

SEQ ID NO: 138058 - DNA, 25 bp, Artificial
  probe
  misc_feature (1)..(25): SEQ ID NO: 3473; WAN024CY5_at; Start 230; Stop 254
gggcattttatatggcttatcaaaa

SEQ ID NO: 138059 - DNA, 25 bp, Artificial
  probe
  misc_feature (1)..(25): SEQ ID NO: 3473; WAN024CY5_at; Start 207; Stop 231
tgctgacggcgtctatatcaatggg

SEQ ID NO: 138060 - DNA, 25 bp, Artificial
  probe
  misc_feature (1)..(25): SEQ ID NO: 3473; WAN024CY5_at; Start 438; Stop 462
tggagcatattttggtatacaagct

SEQ ID NO: 138061 - DNA, 25 bp, Artificial
  probe
  misc_feature (1)..(25): SEQ ID NO: 3473; WAN024CY5_at; Start 284; Stop 308
gatcatacgatcctaatgtttggaa

SEQ ID NO: 138062 - DNA, 25 bp, Artificial
  probe
  misc_feature (1)..(25): SEQ ID NO: 3473; WAN024CY5_at; Start 71; Stop 95
ctaaagttgtatctggtgaggctca

SEQ ID NO: 138063 - DNA, 25 bp, Artificial
  probe
  misc_feature (1)..(25): SEQ ID NO: 3473; WAN024CY5_at; Start 255; Stop 279
gaatgaaatcgacctaaatatatct

SEQ ID NO: 138064 - DNA, 25 bp, Artificial
  probe
  misc_feature (1)..(25): SEQ ID NO: 3473; WAN024CY5_at; Start 141; Stop 165
tattttaagcgatgaagttcttgag

SEQ ID NO: 138065 - DNA, 25 bp, Artificial
  probe
  misc_feature (1)..(25): SEQ ID NO: 3473; WAN024CY5_at; Start 194; Stop 218
ctattgaacgacgtgctgacggcgt

SEQ ID NO: 138066 - DNA, 25 bp, Artificial
  probe
  misc_feature (1)..(25): SEQ ID NO: 3473; WAN024CY5_at; Start 523; Stop 547
catgttgctcaaagaaaatggaagt

SEQ ID NO: 138067 - DNA, 25 bp, Artificial
  probe
  misc_feature (1)..(25): SEQ ID NO: 3473; WAN024CY5_at; Start 56; Stop 80
gcttatcggcaaactctaaagttgt

SEQ ID NO: 138068 - DNA, 25 bp, Artificial
  probe
  misc_feature (1)..(25): SEQ ID NO: 3473; WAN024CY5_at; Start 352; Stop 376
gctaacttcatgactggtgctggaa

SEQ ID NO: 138069 - DNA, 25 bp, Artificial
  probe
  misc_feature (1)..(25): SEQ ID NO: 3473; WAN024CY5_at; Start 509; Stop 533
caagtacttatatccatgttgctca

SEQ ID NO: 138070 - DNA, 25 bp, Artificial
  probe
  misc_feature (1)..(25): SEQ ID NO: 3473; WAN024CY5_at; Start 552; Stop 576
cactgaatactatagaaactcaaac

SEQ ID NO: 138071 - DNA, 25 bp, Artificial
  probe
  misc_feature (1)..(25): SEQ ID NO: 3473; WAN024CY5_at; Start 45; Stop 69
tgctgatgatagcttatcggcaaac

SEQ ID NO: 138072 - DNA, 25 bp, Artificial
  probe
  misc_feature (1)..(25): SEQ ID NO: 3473; WAN024CY5_at; Start 363; Stop 387
gactggtgctggaatcagttatatg

SEQ ID NO: 138073 - DNA, 25 bp, Artificial
  probe
  misc_feature (1)..(25): SEQ ID NO: 3473; WAN024CY5_at; Start 423; Stop 447
gggtgcaataattggtggagcatat

SEQ ID NO: 138074 - DNA, 25 bp, Artificial
  probe
  misc_feature (1)..(25): SEQ ID NO: 3473; WAN024CY5_at; Start 466; Stop 490
cagtcttacttggattcacaaagcc

SEQ ID NO: 138075 - DNA, 25 bp, Artificial
  probe
  misc_feature (1)..(25): SEQ ID NO: 3473; WAN024CY5_at; Start 109; Stop 133
tcatcagtgcggttcggagatacgc

SEQ ID NO: 138076 - DNA, 25 bp, Artificial
  probe
  misc_feature (1)..(25): SEQ ID NO: 3473; WAN024CY5_at; Start 26; Stop 50
cccgtcgcttgtttgtttttgctga

SEQ ID NO: 138077 - DNA, 25 bp, Artificial
  probe
  misc_feature (1)..(25): SEQ ID NO: 3473; WAN024CY5_at; Start 323; Stop 347
tacatgggaataaacaagctaacac

SEQ ID NO: 138078 - DNA, 25 bp, Artificial
  probe
  misc_feature (1)..(25): SEQ ID NO: 3473; WAN024CY5_at; Start 451; Stop 475
ggtatacaagcttatcagtcttact

SEQ ID NO: 138079 - DNA, 25 bp, Artificial
  probe
  misc_feature (1)..(25): SEQ ID NO: 3473; WAN024CY5_at; Start 171; Stop 195
caatccagatggaagtgtagacact

SEQ ID NO: 138080 - DNA, 25 bp, Artificial
  probe
  misc_feature (1)..(25): SEQ ID NO: 3473; WAN024CY5_at; Start 537; Stop 561
aaaatggaagtttatcactgaatac

SEQ ID NO: 138081 - DNA, 25 bp, Artificial
  probe
  misc_feature (1)..(25): SEQ ID NO: 3473; WAN024CY5_at; Start 337; Stop 361
caagctaacacattcgctaacttca

SEQ ID NO: 138082 - DNA, 25 bp, Artificial
  probe
  misc_feature (1)..(25): SEQ ID NO: 3473; WAN024CY5_at; Start 80; Stop 104
tatctggtgaggctcagtttgagaa

SEQ ID NO: 138083 - DNA, 25 bp, Artificial
  probe
  misc_feature (1)..(25): SEQ ID NO: 3473; WAN024CY5_at; Start 118; Stop 142
cggttcggagatacgcaagtaaata

SEQ ID NO: 138084 - DNA, 25 bp, Artificial
  probe
  misc_feature (1)..(25): SEQ ID NO: 3473; WAN024CY5_at; Start 294; Stop 318
tcctaatgtttggaattacgtcaac

SEQ ID NO: 138085 - DNA, 25 bp, Artificial
  probe
  misc_feature (1)..(25): SEQ ID NO: 3473; WAN024CY5_at; Start 185; Stop 209
gtgtagacactattgaacgacgtgc

SEQ ID NO: 138086 - DNA, 25 bp, Artificial
  probe
  misc_feature (1)..(25): SEQ ID NO: 3473; WAN024CY5_at; Start 566; Stop 590
gaaactcaaactatactgggtatgt

SEQ ID NO: 138087 - DNA, 25 bp, Artificial
  probe
  misc_feature (1)..(25): SEQ ID NO: 3473; WAN024CY5_at; Start 488; Stop 512
gcccatatccatactacataacaag

SEQ ID NO: 138088 - DNA, 25 bp, Artificial
  probe
  misc_feature (1)..(25): SEQ ID NO: 3473; WAN024CY5_at; Start 244; Stop 268
gcttatcaaaagaatgaaatcgacc

SEQ ID NO: 138089 - DNA, 25 bp, Artificial
  probe
  misc_feature (1)..(25): SEQ ID NO: 3473; WAN024CY5_at; Start 306; Stop 330
gaattacgtcaacacaatacatggg

SEQ ID NO: 138090 - DNA, 25 bp, Artificial
  probe
  misc_feature (1)..(25): SEQ ID NO: 3473; WAN024CY5_at; Start 472; Stop 496
tacttggattcacaaagcccatatc

SEQ ID NO: 138091 - DNA, 25 bp, Artificial
  probe
  misc_feature (1)..(25): SEQ ID NO: 4896; WAN024CY6_at; Start 69; Stop 93
tgtattatcaaccaagattaaaaga

SEQ ID NO: 138092 - DNA, 25 bp, Artificial
  probe
  misc_feature (1)..(25): SEQ ID NO: 4896; WAN024CY6_at; Start 517; Stop 541
gaagaactcgttaatgttcccataa

SEQ ID NO: 138093 - DNA, 25 bp, Artificial
  probe
  misc_feature (1)..(25): SEQ ID NO: 4896; WAN024CY6_at; Start 504; Stop 528
taaggatagagctgaagaactcgtt

SEQ ID NO: 138094 - DNA, 25 bp, Artificial
  probe
  misc_feature (1)..(25): SEQ ID NO: 4896; WAN024CY6_at; Start 531; Stop 555
tgttcccataattccactaaatgat

SEQ ID NO: 138095 - DNA, 25 bp, Artificial
  probe
  misc_feature (1)..(25): SEQ ID NO: 4896; WAN024CY6_at; Start 500; Stop 524
caaataaggatagagctgaagaact

SEQ ID NO: 138096 - DNA, 25 bp, Artificial
  probe
  misc_feature (1)..(25): SEQ ID NO: 4896; WAN024CY6_at; Start 164; Stop 188
gtcaatttcctaatctaaacattga

SEQ ID NO: 138097 - DNA, 25 bp, Artificial
  probe
  misc_feature (1)..(25): SEQ ID NO: 4896; WAN024CY6_at; Start 186; Stop 210
tgattacttgctcctggacactgag

SEQ ID NO: 138098 - DNA, 25 bp, Artificial
  probe
  misc_feature (1)..(25): SEQ ID NO: 4896; WAN024CY6_at; Start 179; Stop 203
taaacattgattacttgctcctgga

SEQ ID NO: 138099 - DNA, 25 bp, Artificial
  probe
  misc_feature (1)..(25): SEQ ID NO: 4896; WAN024CY6_at; Start 160; Stop 184
caaagtcaatttcctaatctaaaca

SEQ ID NO: 138100 - DNA, 25 bp, Artificial
  probe
  misc_feature (1)..(25): SEQ ID NO: 4896; WAN024CY6_at; Start 406; Stop 430
gataattcagatcatcagataaaga

SEQ ID NO: 138101 - DNA, 25 bp, Artificial
  probe
  misc_feature (1)..(25): SEQ ID NO: 4896; WAN024CY6_at; Start 116; Stop 140
gagaaaattgggaaccgtacatgaa

SEQ ID NO: 138102 - DNA, 25 bp, Artificial
  probe
  misc_feature (1)..(25): SEQ ID NO: 4896; WAN024CY6_at; Start 493; Stop 517
gataaagcaaataaggatagagctg

SEQ ID NO: 138103 - DNA, 25 bp, Artificial
  probe
  misc_feature (1)..(25): SEQ ID NO: 4896; WAN024CY6_at; Start 96; Stop 120
tatcatttttacagtttttcgagaa

SEQ ID NO: 138104 - DNA, 25 bp, Artificial
  probe
  misc_feature (1)..(25): SEQ ID NO: 4896; WAN024CY6_at; Start 438; Stop 462
tggattaggactctttagtcagttt

SEQ ID NO: 138105 - DNA, 25 bp, Artificial
  probe
  misc_feature (1)..(25): SEQ ID NO: 4896; WAN024CY6_at; Start 181; Stop 205
aacattgattacttgctcctggaca

SEQ ID NO: 138106 - DNA, 25 bp, Artificial
  probe
  misc_feature (1)..(25): SEQ ID NO: 4896; WAN024CY6_at; Start 217; Stop 241
gatcttgatagctatctagatgctg

SEQ ID NO: 138107 - DNA, 25 bp, Artificial
  probe
  misc_feature (1)..(25): SEQ ID NO: 4896; WAN024CY6_at; Start 488; Stop 512
ggaatgataaagcaaataaggatag

SEQ ID NO: 138108 - DNA, 25 bp, Artificial
  probe
  misc_feature (1)..(25): SEQ ID NO: 4896; WAN024CY6_at; Start 536; Stop 560
ccataattccactaaatgatcattc

SEQ ID NO: 138109 - DNA, 25 bp, Artificial
  probe
  misc_feature (1)..(25): SEQ ID NO: 4896; WAN024CY6_at; Start 448; Stop 472
ctctttagtcagtttttaattagtg

SEQ ID NO: 138110 - DNA, 25 bp, Artificial
  probe
  misc_feature (1)..(25): SEQ ID NO: 4896; WAN024CY6_at; Start 512; Stop 536
gagctgaagaactcgttaatgttcc

SEQ ID NO: 138111 - DNA, 25 bp, Artificial
  probe
  misc_feature (1)..(25): SEQ ID NO: 4896; WAN024CY6_at; Start 61; Stop 85
gataaaattgtattatcaaccaaga

SEQ ID NO: 138112 - DNA, 25 bp, Artificial
  probe
  misc_feature (1)..(25): SEQ ID NO: 4896; WAN024CY6_at; Start 124; Stop 148
tgggaaccgtacatgaaaaagtaca

SEQ ID NO: 138113 - DNA, 25 bp, Artificial
  probe
  misc_feature (1)..(25): SEQ ID NO: 4896; WAN024CY6_at; Start 190; Stop 214
tacttgctcctggacactgagcaga

SEQ ID NO: 138114 - DNA, 25 bp, Artificial
  probe
  misc_feature (1)..(25): SEQ ID NO: 4896; WAN024CY6_at; Start 183; Stop 207
cattgattacttgctcctggacact

SEQ ID NO: 138115 - DNA, 25 bp, Artificial
  probe
  misc_feature (1)..(25): SEQ ID NO: 4896; WAN024CY6_at; Start 251; Stop 275
tcatcggtggtggaaatacggaaaa

SEQ ID NO: 138116 - DNA, 25 bp, Artificial
  probe
  misc_feature (1)..(25): SEQ ID NO: 4896; WAN024CY6_at; Start 195; Stop 219
gctcctggacactgagcagattgat

SEQ ID NO: 138117 - DNA, 25 bp, Artificial
  probe
  misc_feature (1)..(25): SEQ ID NO: 4896; WAN024CY6_at; Start 514; Stop 538
gctgaagaactcgttaatgttccca

SEQ ID NO: 138118 - DNA, 25 bp, Artificial
  probe
  misc_feature (1)..(25): SEQ ID NO: 4896; WAN024CY6_at; Start 211; Stop 235
cagattgatcttgatagctatctag

SEQ ID NO: 138119 - DNA, 25 bp, Artificial
  probe
  misc_feature (1)..(25): SEQ ID NO: 4896; WAN024CY6_at; Start 115; Stop 139
cgagaaaattgggaaccgtacatga

SEQ ID NO: 138120 - DNA, 25 bp, Artificial
  probe
  misc_feature (1)..(25): SEQ ID NO: 4896; WAN024CY6_at; Start 131; Stop 155
cgtacatgaaaaagtacacggaagt

SEQ ID NO: 138121 - DNA, 25 bp, Artificial
  probe
  misc_feature (1)..(25): SEQ ID NO: 4896; WAN024CY6_at; Start 508; Stop 532
gatagagctgaagaactcgttaatg

SEQ ID NO: 138122 - DNA, 25 bp, Artificial
  probe
  misc_feature (1)..(25): SEQ ID NO: 4896; WAN024CY6_at; Start 411; Stop 435
ttcagatcatcagataaagataaaa

SEQ ID NO: 138123 - DNA, 25 bp, Artificial
  probe
  misc_feature (1)..(25): SEQ ID NO: 4896; WAN024CY6_at; Start 198; Stop 222
cctggacactgagcagattgatctt

SEQ ID NO: 138124 - DNA, 25 bp, Artificial
  probe
  misc_feature (1)..(25): SEQ ID NO: 4896; WAN024CY6_at; Start 525; Stop 549
cgttaatgttcccataattccacta

SEQ ID NO: 138125 - DNA, 25 bp, Artificial
  probe
  misc_feature (1)..(25): SEQ ID NO: 5385; WAN024CY7_at; Start 7; Stop 31
gctgtctcatatctgactcctttcc

SEQ ID NO: 138126 - DNA, 25 bp, Artificial
  probe
  misc_feature (1)..(25): SEQ ID NO: 5385; WAN024CY7_at; Start 10; Stop 34
gtctcatatctgactcctttccttt

SEQ ID NO: 138127 - DNA, 25 bp, Artificial
  probe
  misc_feature (1)..(25): SEQ ID NO: 5385; WAN024CY7_at; Start 93; Stop 117
ttatatcacaagcaaaaaaagagtc

SEQ ID NO: 138128 - DNA, 25 bp, Artificial
  probe
  misc_feature (1)..(25): SEQ ID NO: 5385; WAN024CY7_at; Start 71; Stop 95
tgacattttgtttaccagttaatta

SEQ ID NO: 138129 - DNA, 25 bp, Artificial
  probe
  misc_feature (1)..(25): SEQ ID NO: 5385; WAN024CY7_at; Start 51; Stop 75
aagagaaaaatactattctttgaca

SEQ ID NO: 138130 - DNA, 25 bp, Artificial
  probe
  misc_feature (1)..(25): SEQ ID NO: 5385; WAN024CY7_at; Start 82; Stop 106
ttaccagttaattatatcacaagca

SEQ ID NO: 138131 - DNA, 25 bp, Artificial
  probe
  misc_feature (1)..(25): SEQ ID NO: 5385; WAN024CY7_at; Start 4; Stop 28
ctagctgtctcatatctgactcctt

SEQ ID NO: 138132 - DNA, 25 bp, Artificial
  probe
  misc_feature (1)..(25): SEQ ID NO: 5385; WAN024CY7_at; Start 80; Stop 104
gtttaccagttaattatatcacaag

SEQ ID NO: 138133 - DNA, 25 bp, Artificial
  probe
  misc_feature (1)..(25): SEQ ID NO: 5385; WAN024CY7_at; Start 53; Stop 77
gagaaaaatactattctttgacatt

SEQ ID NO: 138134 - DNA, 25 bp, Artificial
  probe
  misc_feature (1)..(25): SEQ ID NO: 5385; WAN024CY7_at; Start 1; Stop 25
ttgctagctgtctcatatctgactc

SEQ ID NO: 138135 - DNA, 25 bp, Artificial
  probe
  misc_feature (1)..(25): SEQ ID NO: 5385; WAN024CY7_at; Start 85; Stop 109
ccagttaattatatcacaagcaaaa

SEQ ID NO: 138136 - DNA, 25 bp, Artificial
  probe
  misc_feature (1)..(25): SEQ ID NO: 5385; WAN024CY7_at; Start 50; Stop 74
taagagaaaaatactattctttgac

SEQ ID NO: 138137 - DNA, 25 bp, Artificial
  probe
  misc_feature (1)..(25): SEQ ID NO: 5385; WAN024CY7_at; Start 83; Stop 107
taccagttaattatatcacaagcaa

SEQ ID NO: 138138 - DNA, 25 bp, Artificial
  probe
  misc_feature (1)..(25): SEQ ID NO: 5385; WAN024CY7_at; Start 9; Stop 33
tgtctcatatctgactcctttcctt

SEQ ID NO: 138139 - DNA, 25 bp, Artificial
  probe
  misc_feature (1)..(25): SEQ ID NO: 5385; WAN024CY7_at; Start 67; Stop 91
tctttgacattttgtttaccagtta

SEQ ID NO: 138140 - DNA, 25 bp, Artificial
  probe
  misc_feature (1)..(25): SEQ ID NO: 5385; WAN024CY7_at; Start 13; Stop 37
tcatatctgactcctttccttttag

SEQ ID NO: 138141 - DNA, 25 bp, Artificial
  probe
  misc_feature (1)..(25): SEQ ID NO: 5385; WAN024CY7_at; Start 87; Stop 111
agttaattatatcacaagcaaaaaa

SEQ ID NO: 138142 - DNA, 25 bp, Artificial
  probe
  misc_feature (1)..(25): SEQ ID NO: 5385; WAN024CY7_at; Start 5; Stop 29
tagctgtctcatatctgactccttt

SEQ ID NO: 138143 - DNA, 25 bp, Artificial
  probe
  misc_feature (1)..(25): SEQ ID NO: 5385; WAN024CY7_at; Start 64; Stop 88
tattctttgacattttgtttaccag

SEQ ID NO: 138144 - DNA, 25 bp, Artificial
  probe
  misc_feature (1)..(25): SEQ ID NO: 5385; WAN024CY7_at; Start 14; Stop 38
catatctgactcctttccttttaga

SEQ ID NO: 138145 - DNA, 25 bp, Artificial
  probe
  misc_feature (1)..(25): SEQ ID NO: 5385; WAN024CY7_at; Start 19; Stop 43
ctgactcctttccttttagacttct

SEQ ID NO: 138146 - DNA, 25 bp, Artificial
  probe
  misc_feature (1)..(25): SEQ ID NO: 5385; WAN024CY7_at; Start 16; Stop 40
tatctgactcctttccttttagact

SEQ ID NO: 138147 - DNA, 25 bp, Artificial
  probe
  misc_feature (1)..(25): SEQ ID NO: 5385; WAN024CY7_at; Start 86; Stop 110
cagttaattatatcacaagcaaaaa

SEQ ID NO: 138148 - DNA, 25 bp, Artificial
  probe
  misc_feature (1)..(25): SEQ ID NO: 5385; WAN024CY7_at; Start 3; Stop 27
gctagctgtctcatatctgactcct

SEQ ID NO: 138149 - DNA, 25 bp, Artificial
  probe
  misc_feature (1)..(25): SEQ ID NO: 5385; WAN024CY7_at; Start 20; Stop 44
tgactcctttccttttagacttctc

SEQ ID NO: 138150 - DNA, 25 bp, Artificial
  probe
  misc_feature (1)..(25): SEQ ID NO: 5385; WAN024CY7_at; Start 96; Stop 120
tatcacaagcaaaaaaagagtcaag

SEQ ID NO: 138151 - DNA, 25 bp, Artificial
  probe
  misc_feature (1)..(25): SEQ ID NO: 5385; WAN024CY7_at; Start 84; Stop 108
accagttaattatatcacaagcaaa

SEQ ID NO: 138152 - DNA, 25 bp, Artificial
  probe
  misc_feature (1)..(25): SEQ ID NO: 5385; WAN024CY7_at; Start 6; Stop 30
agctgtctcatatctgactcctttc

SEQ ID NO: 138153 - DNA, 25 bp, Artificial
  probe
  misc_feature (1)..(25): SEQ ID NO: 5385; WAN024CY7_at; Start 8; Stop 32
ctgtctcatatctgactcctttcct

SEQ ID NO: 138154 - DNA, 25 bp, Artificial
  probe
  misc_feature (1)..(25): SEQ ID NO: 5385; WAN024CY7_at; Start 99; Stop 123
cacaagcaaaaaaagagtcaagaaa

SEQ ID NO: 138155 - DNA, 25 bp, Artificial
  probe
  misc_feature (1)..(25): SEQ ID NO: 5385; WAN024CY7_at; Start 2; Stop 26
tgctagctgtctcatatctgactcc

SEQ ID NO: 138156 - DNA, 25 bp, Artificial
  probe
  misc_feature (1)..(25): SEQ ID NO: 5385; WAN024CY7_at; Start 15; Stop 39
atatctgactcctttccttttagac

SEQ ID NO: 138157 - DNA, 25 bp, Artificial
  probe
  misc_feature (1)..(25): SEQ ID NO: 5385; WAN024CY7_at; Start 18; Stop 42
tctgactcctttccttttagacttc

SEQ ID NO: 138158 - DNA, 25 bp, Artificial
  probe
  misc_feature (1)..(25): SEQ ID NO: 5385; WAN024CY7_at; Start 81; Stop 105
tttaccagttaattatatcacaagc

SEQ ID NO: 138159 - DNA, 25 bp, Artificial
  probe
  misc_feature (1)..(25): SEQ ID NO: 3428; WAN024CY8_at; Start 355; Stop 379
tatcagttgactgacttggctcgtc

SEQ ID NO: 138160 - DNA, 25 bp, Artificial
  probe
  misc_feature (1)..(25): SEQ ID NO: 3428; WAN024CY8_at; Start 207; Stop 231
gctcttgtcagaggaatctttaaca

SEQ ID NO: 138161 - DNA, 25 bp, Artificial
  probe
  misc_feature (1)..(25): SEQ ID NO: 3428; WAN024CY8_at; Start 270; Stop 294
ggcagttaccaaggccattaagtct

SEQ ID NO: 138162 - DNA, 25 bp, Artificial
  probe
  misc_feature (1)..(25): SEQ ID NO: 3428; WAN024CY8_at; Start 227; Stop 251
taacaaattcagaattggcccgtcg

SEQ ID NO: 138163 - DNA, 25 bp, Artificial
  probe
  misc_feature (1)..(25): SEQ ID NO: 3428; WAN024CY8_at; Start 119; Stop 143
ttttgcaggcggaaaatcagcatga

SEQ ID NO: 138164 - DNA, 25 bp, Artificial
  probe
  misc_feature (1)..(25): SEQ ID NO: 3428; WAN024CY8_at; Start 133; Stop 157
aatcagcatgaaatcctaataggtc

SEQ ID NO: 138165 - DNA, 25 bp, Artificial
  probe
  misc_feature (1)..(25): SEQ ID NO: 3428; WAN024CY8_at; Start 328; Stop 352
gattctaaagatgcgcgtgtgattt

SEQ ID NO: 138166 - DNA, 25 bp, Artificial
  probe
  misc_feature (1)..(25): SEQ ID NO: 3428; WAN024CY8_at; Start 105; Stop 129
tttgaatgaggtgattttgcaggcg

SEQ ID NO: 138167 - DNA, 25 bp, Artificial
  probe
  misc_feature (1)..(25): SEQ ID NO: 3428; WAN024CY8_at; Start 299; Stop 323
tcaaggaagggatgttggaaacatc

SEQ ID NO: 138168 - DNA, 25 bp, Artificial
  probe
  misc_feature (1)..(25): SEQ ID NO: 3428; WAN024CY8_at; Start 255; Stop 279
caatgtcagtcaggcggcagttacc

SEQ ID NO: 138169 - DNA, 25 bp, Artificial
  probe
  misc_feature (1)..(25): SEQ ID NO: 3428; WAN024CY8_at; Start 242; Stop 266
tggcccgtcgtctcaatgtcagtca

SEQ ID NO: 138170 - DNA, 25 bp, Artificial
  probe
  misc_feature (1)..(25): SEQ ID NO: 3428; WAN024CY8_at; Start 169; Stop 193
gaggtggccctgaccaatactcagg

SEQ ID NO: 138171 - DNA, 25 bp, Artificial
  probe
  misc_feature (1)..(25): SEQ ID NO: 3428; WAN024CY8_at; Start 391; Stop 415
gagcaccaccatcaccatgagcata

SEQ ID NO: 138172 - DNA, 25 bp, Artificial
  probe
  misc_feature (1)..(25): SEQ ID NO: 3428; WAN024CY8_at; Start 59; Stop 83
gaaaggagtcagatatgagacagct

SEQ ID NO: 138173 - DNA, 25 bp, Artificial
  probe
  misc_feature (1)..(25): SEQ ID NO: 3428; WAN024CY8_at; Start 179; Stop 203
tgaccaatactcaggagcatatcct

SEQ ID NO: 138174 - DNA, 25 bp, Artificial
  probe
  misc_feature (1)..(25): SEQ ID NO: 3428; WAN024CY8_at; Start 430; Stop 454
gaacaagtggcgactcagtttactc

SEQ ID NO: 138175 - DNA, 25 bp, Artificial
  probe
  misc_feature (1)..(25): SEQ ID NO: 3428; WAN024CY8_at; Start 196; Stop 220
catatccttatgctcttgtcagagg

SEQ ID NO: 138176 - DNA, 25 bp, Artificial
  probe
  misc_feature (1)..(25): SEQ ID NO: 3428; WAN024CY8_at; Start 249; Stop 273
tcgtctcaatgtcagtcaggcggca

SEQ ID NO: 138177 - DNA, 25 bp, Artificial
  probe
  misc_feature (1)..(25): SEQ ID NO: 3428; WAN024CY8_at; Start 322; Stop 346
tctaaagattctaaagatgcgcgtg

SEQ ID NO: 138178 - DNA, 25 bp, Artificial
  probe
  misc_feature (1)..(25): SEQ ID NO: 3428; WAN024CY8_at; Start 455; Stop 479
caaatgaacaaaaagtgattcagcg

SEQ ID NO: 138179 - DNA, 25 bp, Artificial
  probe
  misc_feature (1)..(25): SEQ ID NO: 3428; WAN024CY8_at; Start 2; Stop 26
tggtaaacaaaatgtcaaagaatag

SEQ ID NO: 138180 - DNA, 25 bp, Artificial
  probe
  misc_feature (1)..(25): SEQ ID NO: 3428; WAN024CY8_at; Start 285; Stop 309
cattaagtctttggtcaaggaaggg

SEQ ID NO: 138181 - DNA, 25 bp, Artificial
  probe
  misc_feature (1)..(25): SEQ ID NO: 3428; WAN024CY8_at; Start 438; Stop 462
ggcgactcagtttactccaaatgaa

SEQ ID NO: 138182 - DNA, 25 bp, Artificial
  probe
  misc_feature (1)..(25): SEQ ID NO: 3428; WAN024CY8_at; Start 374; Stop 398
ctcgtccaatcgctgaggagcacca

SEQ ID NO: 138183 - DNA, 25 bp, Artificial
  probe
  misc_feature (1)..(25): SEQ ID NO: 3428; WAN024CY8_at; Start 143; Stop 167
aaatcctaataggtcattgcactag

SEQ ID NO: 138184 - DNA, 25 bp, Artificial
  probe
  misc_feature (1)..(25): SEQ ID NO: 3428; WAN024CY8_at; Start 486; Stop 510
gactgctttagtaggagaaatcaaa

SEQ ID NO: 138185 - DNA, 25 bp, Artificial
  probe
  misc_feature (1)..(25): SEQ ID NO: 3428; WAN024CY8_at; Start 471; Stop 495
gattcagcggtttttgactgcttta

SEQ ID NO: 138186 - DNA, 25 bp, Artificial
  probe
  misc_feature (1)..(25): SEQ ID NO: 3428; WAN024CY8_at; Start 367; Stop 391
gacttggctcgtccaatcgctgagg

SEQ ID NO: 138187 - DNA, 25 bp, Artificial
  probe
  misc_feature (1)..(25): SEQ ID NO: 3428; WAN024CY8_at; Start 403; Stop 427
caccatgagcatacacttttaacct

SEQ ID NO: 138188 - DNA, 25 bp, Artificial
  probe
  misc_feature (1)..(25): SEQ ID NO: 3428; WAN024CY8_at; Start 419; Stop 443
ttttaacctatgaacaagtggcgac

SEQ ID NO: 138189 - DNA, 25 bp, Artificial
  probe
  misc_feature (1)..(25): SEQ ID NO: 3428; WAN024CY8_at; Start 341; Stop 365
cgcgtgtgattttttatcagttgac

SEQ ID NO: 138190 - DNA, 25 bp, Artificial
  probe
  misc_feature (1)..(25): SEQ ID NO: 3428; WAN024CY8_at; Start 264; Stop 288
tcaggcggcagttaccaaggccatt

SEQ ID NO: 138191 - DNA, 25 bp, Artificial
  probe
  misc_feature (1)..(25): SEQ ID NO: 3428; WAN024CY8_at; Start 45; Stop 69
gagaagtctaaaaggaaaggagtca

SEQ ID NO: 138192 - DNA, 25 bp, Artificial
  probe
  misc_feature (1)..(25): SEQ ID NO: 3428; WAN024CY8_at; Start 72; Stop 96
tatgagacagctagcaaaggatatc

SEQ ID NO: 138193 - DNA, 25 bp, Artificial
  probe
  misc_feature (1)..(25): SEQ ID NO: 6514; WAN024CY9_at; Start 256; Stop 280
gttgtaatgatgttggaaacctgga

SEQ ID NO: 138194 - DNA, 25 bp, Artificial
  probe
  misc_feature (1)..(25): SEQ ID NO: 6514; WAN024CY9_at; Start 56; Stop 80
taacatggagggtcaaaacacggtg

SEQ ID NO: 138195 - DNA, 25 bp, Artificial
  probe
  misc_feature (1)..(25): SEQ ID NO: 6514; WAN024CY9_at; Start 275; Stop 299
cctggaagaaggtcatttcaaagct

SEQ ID NO: 138196 - DNA, 25 bp, Artificial
  probe
  misc_feature (1)..(25): SEQ ID NO: 6514; WAN024CY9_at; Start 219; Stop 243
gggccagttggtaatatctccatat

SEQ ID NO: 138197 - DNA, 25 bp, Artificial
  probe
  misc_feature (1)..(25): SEQ ID NO: 6514; WAN024CY9_at; Start 113; Stop 137
caatttttgaaaggatgaggcctcg

SEQ ID NO: 138198 - DNA, 25 bp, Artificial
  probe
  misc_feature (1)..(25): SEQ ID NO: 6514; WAN024CY9_at; Start 266; Stop 290
tgttggaaacctggaagaaggtcat

SEQ ID NO: 138199 - DNA, 25 bp, Artificial
  probe
  misc_feature (1)..(25): SEQ ID NO: 6514; WAN024CY9_at; Start 41; Stop 65
caatcaccgttttattaacatggag

SEQ ID NO: 138200 - DNA, 25 bp, Artificial
  probe
  misc_feature (1)..(25): SEQ ID NO: 6514; WAN024CY9_at; Start 11; Stop 35
acttgagaatcttatgctgggtatc

SEQ ID NO: 138201 - DNA, 25 bp, Artificial
  probe
  misc_feature (1)..(25): SEQ ID NO: 6514; WAN024CY9_at; Start 3; Stop 27
gacaaagtacttgagaatcttatgc

SEQ ID NO: 138202 - DNA, 25 bp, Artificial
  probe
  misc_feature (1)..(25): SEQ ID NO: 6514; WAN024CY9_at; Start 82; Stop 106
ggcgataggattgacaaaatttggt

SEQ ID NO: 138203 - DNA, 25 bp, Artificial
  probe
  misc_feature (1)..(25): SEQ ID NO: 6514; WAN024CY9_at; Start 152; Stop 176
cacctgcagttgatccagcagagcc

SEQ ID NO: 138204 - DNA, 25 bp, Artificial
  probe
  misc_feature (1)..(25): SEQ ID NO: 6514; WAN024CY9_at; Start 53; Stop 77
tattaacatggagggtcaaaacacg

SEQ ID NO: 138205 - DNA, 25 bp, Artificial
  probe
  misc_feature (1)..(25): SEQ ID NO: 6514; WAN024CY9_at; Start 243; Stop 267
tccaaaaccagttgttgtaatgatg

SEQ ID NO: 138206 - DNA, 25 bp, Artificial
  probe
  misc_feature (1)..(25): SEQ ID NO: 6514; WAN024CY9_at; Start 172; Stop 196
gagccaccgattgccatgaggaaaa

SEQ ID NO: 138207 - DNA, 25 bp, Artificial
  probe
  misc_feature (1)..(25): SEQ ID NO: 6514; WAN024CY9_at; Start 175; Stop 199
ccaccgattgccatgaggaaaagga

SEQ ID NO: 138208 - DNA, 25 bp, Artificial
  probe
  misc_feature (1)..(25): SEQ ID NO: 6514; WAN024CY9_at; Start 143; Stop 167
tcttgagtccacctgcagttgatcc

SEQ ID NO: 138209 - DNA, 25 bp, Artificial
  probe
  misc_feature (1)..(25): SEQ ID NO: 6514; WAN024CY9_at; Start 169; Stop 193
gcagagccaccgattgccatgagga

SEQ ID NO: 138210 - DNA, 25 bp, Artificial
  probe
  misc_feature (1)..(25): SEQ ID NO: 6514; WAN024CY9_at; Start 233; Stop 257
tatctccatatccaaaaccagttgt

SEQ ID NO: 138211 - DNA, 25 bp, Artificial
  probe
  misc_feature (1)..(25): SEQ ID NO: 6514; WAN024CY9_at; Start 260; Stop 284
taatgatgttggaaacctggaagaa

SEQ ID NO: 138212 - DNA, 25 bp, Artificial
  probe
  misc_feature (1)..(25): SEQ ID NO: 6514; WAN024CY9_at; Start 183; Stop 207
tgccatgaggaaaaggaggataaac

SEQ ID NO: 138213 - DNA, 25 bp, Artificial
  probe
  misc_feature (1)..(25): SEQ ID NO: 6514; WAN024CY9_at; Start 26; Stop 50
gctgggtatctttgtcaatcaccgt

SEQ ID NO: 138214 - DNA, 25 bp, Artificial
  probe
  misc_feature (1)..(25): SEQ ID NO: 6514; WAN024CY9_at; Start 137; Stop 161
gaataatcttgagtccacctgcagt

SEQ ID NO: 138215 - DNA, 25 bp, Artificial
  probe
  misc_feature (1)..(25): SEQ ID NO: 6514; WAN024CY9_at; Start 17; Stop 41
gaatcttatgctgggtatctttgtc

SEQ ID NO: 138216 - DNA, 25 bp, Artificial
  probe
  misc_feature (1)..(25): SEQ ID NO: 6514; WAN024CY9_at; Start 147; Stop 171
gagtccacctgcagttgatccagca

SEQ ID NO: 138217 - DNA, 25 bp, Artificial
  probe
  misc_feature (1)..(25): SEQ ID NO: 6514; WAN024CY9_at; Start 160; Stop 184
gttgatccagcagagccaccgattg

SEQ ID NO: 138218 - DNA, 25 bp, Artificial
  probe
  misc_feature (1)..(25): SEQ ID NO: 6514; WAN024CY9_at; Start 282; Stop 306
gaaggtcatttcaaagctctttgaa

SEQ ID NO: 138219 - DNA, 25 bp, Artificial
  probe
  misc_feature (1)..(25): SEQ ID NO: 6514; WAN024CY9_at; Start 186; Stop 210
catgaggaaaaggaggataaactgg

SEQ ID NO: 138220 - DNA, 25 bp, Artificial
  probe
  misc_feature (1)..(25): SEQ ID NO: 6514; WAN024CY9_at; Start 68; Stop 92
tcaaaacacggtggggcgataggat

SEQ ID NO: 138221 - DNA, 25 bp, Artificial
  probe
  misc_feature (1)..(25): SEQ ID NO: 6514; WAN024CY9_at; Start 23; Stop 47
tatgctgggtatctttgtcaatcac

SEQ ID NO: 138222 - DNA, 25 bp, Artificial
  probe
  misc_feature (1)..(25): SEQ ID NO: 6514; WAN024CY9_at; Start 289; Stop 313
atttcaaagctctttgaaaaccctg

SEQ ID NO: 138223 - DNA, 25 bp, Artificial
  probe
  misc_feature (1)..(25): SEQ ID NO: 6514; WAN024CY9_at; Start 129; Stop 153
gaggcctcgaataatcttgagtcca

SEQ ID NO: 138224 - DNA, 25 bp, Artificial
  probe
  misc_feature (1)..(25): SEQ ID NO: 6514; WAN024CY9_at; Start 125; Stop 149
ggatgaggcctcgaataatcttgag

SEQ ID NO: 138225 - DNA, 25 bp, Artificial
  probe
  misc_feature (1)..(25): SEQ ID NO: 6514; WAN024CY9_at; Start 178; Stop 202
ccgattgccatgaggaaaaggagga

SEQ ID NO: 138226 - DNA, 25 bp, Artificial
  probe
  misc_feature (1)..(25): SEQ ID NO: 6514; WAN024CY9_at; Start 90; Stop 114
gattgacaaaatttggtttttggca

SEQ ID NO: 138227 - DNA, 25 bp, Artificial
  probe
  misc_feature (1)..(25): SEQ ID NO: 4333; WAN024CYA_at; Start 321; Stop 345
gatcaagactccctccttggcataa

SEQ ID NO: 138228 - DNA, 25 bp, Artificial
  probe
  misc_feature (1)..(25): SEQ ID NO: 4333; WAN024CYA_at; Start 284; Stop 308
caccaaagaaagaccaaaggatcca

SEQ ID NO: 138229 - DNA, 25 bp, Artificial
  probe
  misc_feature (1)..(25): SEQ ID NO: 4333; WAN024CYA_at; Start 332; Stop 356
cctccttggcataaatccgttgatt

SEQ ID NO: 138230 - DNA, 25 bp, Artificial
  probe
  misc_feature (1)..(25): SEQ ID NO: 4333; WAN024CYA_at; Start 291; Stop 315
gaaagaccaaaggatccaacagagg

SEQ ID NO: 138231 - DNA, 25 bp, Artificial
  probe
  misc_feature (1)..(25): SEQ ID NO: 4333; WAN024CYA_at; Start 31; Stop 55
aaaacaggacctggaacctcagcct

SEQ ID NO: 138232 - DNA, 25 bp, Artificial
  probe
  misc_feature (1)..(25): SEQ ID NO: 4333; WAN024CYA_at; Start 177; Stop 201
cgaaacgtcgttcaaaatacttgct

SEQ ID NO: 138233 - DNA, 25 bp, Artificial
  probe
  misc_feature (1)..(25): SEQ ID NO: 4333; WAN024CYA_at; Start 128; Stop 152
caatcaagtgggtaaaacttcgcca

SEQ ID NO: 138234 - DNA, 25 bp, Artificial
  probe
  misc_feature (1)..(25): SEQ ID NO: 4333; WAN024CYA_at; Start 298; Stop 322
caaaggatccaacagagggcaacga

SEQ ID NO: 138235 - DNA, 25 bp, Artificial
  probe
  misc_feature (1)..(25): SEQ ID NO: 4333; WAN024CYA_at; Start 20; Stop 44
caaccttgccaaaaacaggacctgg

SEQ ID NO: 138236 - DNA, 25 bp, Artificial
  probe
  misc_feature (1)..(25): SEQ ID NO: 4333; WAN024CYA_at; Start 308; Stop 332
aacagagggcaacgatcaagactcc

SEQ ID NO: 138237 - DNA, 25 bp, Artificial
  probe
  misc_feature (1)..(25): SEQ ID NO: 4333; WAN024CYA_at; Start 100; Stop 124
agtgcaaaaacaagcactcccatcc

SEQ ID NO: 138238 - DNA, 25 bp, Artificial
  probe
  misc_feature (1)..(25): SEQ ID NO: 4333; WAN024CYA_at; Start 119; Stop 143
ccatccctccaatcaagtgggtaaa

SEQ ID NO: 138239 - DNA, 25 bp, Artificial
  probe
  misc_feature (1)..(25): SEQ ID NO: 4333; WAN024CYA_at; Start 81; Stop 105
ggcattgtccataatagcaagtgca

SEQ ID NO: 138240 - DNA, 25 bp, Artificial
  probe
  misc_feature (1)..(25): SEQ ID NO: 4333; WAN024CYA_at; Start 140; Stop 164
taaaacttcgccagaagaggaggga

SEQ ID NO: 138241 - DNA, 25 bp, Artificial
  probe
  misc_feature (1)..(25): SEQ ID NO: 4333; WAN024CYA_at; Start 132; Stop 156
caagtgggtaaaacttcgccagaag

SEQ ID NO: 138242 - DNA, 25 bp, Artificial
  probe
  misc_feature (1)..(25): SEQ ID NO: 4333; WAN024CYA_at; Start 191; Stop 215
aaatacttgctccagtagttgtaaa

SEQ ID NO: 138243 - DNA, 25 bp, Artificial
  probe
  misc_feature (1)..(25): SEQ ID NO: 4333; WAN024CYA_at; Start 316; Stop 340
gcaacgatcaagactccctccttgg

SEQ ID NO: 138244 - DNA, 25 bp, Artificial
  probe
  misc_feature (1)..(25): SEQ ID NO: 4333; WAN024CYA_at; Start 347; Stop 371
tccgttgattttttggcttctgtaa

SEQ ID NO: 138245 - DNA, 25 bp, Artificial
  probe
  misc_feature (1)..(25): SEQ ID NO: 4333; WAN024CYA_at; Start 59; Stop 83
tcacctctaggtggctatttttggc

SEQ ID NO: 138246 - DNA, 25 bp, Artificial
  probe
  misc_feature (1)..(25): SEQ ID NO: 4333; WAN024CYA_at; Start 166; Stop 190
cggctgagaaccgaaacgtcgttca

SEQ ID NO: 138247 - DNA, 25 bp, Artificial
  probe
  misc_feature (1)..(25): SEQ ID NO: 4333; WAN024CYA_at; Start 143; Stop 167
aacttcgccagaagaggagggaacg

SEQ ID NO: 138248 - DNA, 25 bp, Artificial
  probe
  misc_feature (1)..(25): SEQ ID NO: 4333; WAN024CYA_at; Start 151; Stop 175
cagaagaggagggaacggctgagaa

SEQ ID NO: 138249 - DNA, 25 bp, Artificial
  probe
  misc_feature (1)..(25): SEQ ID NO: 4333; WAN024CYA_at; Start 295; Stop 319
gaccaaaggatccaacagagggcaa

SEQ ID NO: 138250 - DNA, 25 bp, Artificial
  probe
  misc_feature (1)..(25): SEQ ID NO: 4333; WAN024CYA_at; Start 95; Stop 119
tagcaagtgcaaaaacaagcactcc

SEQ ID NO: 138251 - DNA, 25 bp, Artificial
  probe
  misc_feature (1)..(25): SEQ ID NO: 4333; WAN024CYA_at; Start 66; Stop 90
taggtggctatttttggcattgtcc

SEQ ID NO: 138252 - DNA, 25 bp, Artificial
  probe
  misc_feature (1)..(25): SEQ ID NO: 4333; WAN024CYA_at; Start 6; Stop 30
ttttagtttggatacaaccttgcca

SEQ ID NO: 138253 - DNA, 25 bp, Artificial
  probe
  misc_feature (1)..(25): SEQ ID NO: 4333; WAN024CYA_at; Start 185; Stop 209
cgttcaaaatacttgctccagtagt

SEQ ID NO: 138254 - DNA, 25 bp, Artificial
  probe
  misc_feature (1)..(25): SEQ ID NO: 4333; WAN024CYA_at; Start 49; Stop 73
tcagccttcatcacctctaggtggc

SEQ ID NO: 138255 - DNA, 25 bp, Artificial
  probe
  misc_feature (1)..(25): SEQ ID NO: 4333; WAN024CYA_at; Start 326; Stop 350
agactccctccttggcataaatccg

SEQ ID NO: 138256 - DNA, 25 bp, Artificial
  probe
  misc_feature (1)..(25): SEQ ID NO: 4333; WAN024CYA_at; Start 37; Stop 61
ggacctggaacctcagccttcatca

SEQ ID NO: 138257 - DNA, 25 bp, Artificial
  probe
  misc_feature (1)..(25): SEQ ID NO: 4333; WAN024CYA_at; Start 251; Stop 275
tggggatttgcccagaaaagacaaa

SEQ ID NO: 138258 - DNA, 25 bp, Artificial
  probe
  misc_feature (1)..(25): SEQ ID NO: 4333; WAN024CYA_at; Start 217; Stop 241
ccagaactaatttcaaaaaaggcat

SEQ ID NO: 138259 - DNA, 25 bp, Artificial
  probe
  misc_feature (1)..(25): SEQ ID NO: 4333; WAN024CYA_at; Start 14; Stop 38
tggatacaaccttgccaaaaacagg

SEQ ID NO: 138260 - DNA, 25 bp, Artificial
  probe
  misc_feature (1)..(25): SEQ ID NO: 4333; WAN024CYA_at; Start 230; Stop 254
caaaaaaggcatcaataaggctggg

SEQ ID NO: 138261 - DNA, 25 bp, Artificial
  probe
  misc_feature (1)..(25): SEQ ID NO: 1163; WAN024CYB_at; Start 1268; Stop 1292
gcgctgtctttagctgtttcaataa

SEQ ID NO: 138262 - DNA, 25 bp, Artificial
  probe
  misc_feature (1)..(25): SEQ ID NO: 1163; WAN024CYB_at; Start 142; Stop 166
ctcgtattgttaggcggttcaggga

SEQ ID NO: 138263 - DNA, 25 bp, Artificial
  probe
  misc_feature (1)..(25): SEQ ID NO: 1163; WAN024CYB_at; Start 1309; Stop 1333
ggaaccacttctagtttctcaatct

SEQ ID NO: 138264 - DNA, 25 bp, Artificial
  probe
  misc_feature (1)..(25): SEQ ID NO: 1163; WAN024CYB_at; Start 1259; Stop 1283
tcgtgaccagcgctgtctttagctg

SEQ ID NO: 138265 - DNA, 25 bp, Artificial
  probe
  misc_feature (1)..(25): SEQ ID NO: 1163; WAN024CYB_at; Start 877; Stop 901
ctctacccagggttttcaaagagct

SEQ ID NO: 138266 - DNA, 25 bp, Artificial
  probe
  misc_feature (1)..(25): SEQ ID NO: 1163; WAN024CYB_at; Start 1421; Stop 1445
gaacttggtctaagagataactaat

SEQ ID NO: 138267 - DNA, 25 bp, Artificial
  probe
  misc_feature (1)..(25): SEQ ID NO: 1163; WAN024CYB_at; Start 186; Stop 210
tcaacggatttatgccaaggaggga

SEQ ID NO: 138268 - DNA, 25 bp, Artificial
  probe
  misc_feature (1)..(25): SEQ ID NO: 1163; WAN024CYB_at; Start 211; Stop 235
gtcttgatcgttgccctctgttgga

SEQ ID NO: 138269 - DNA, 25 bp, Artificial
  probe
  misc_feature (1)..(25): SEQ ID NO: 1163; WAN024CYB_at; Start 1295; Stop 1319
tcgggcctattctaggaaccacttc

SEQ ID NO: 138270 - DNA, 25 bp, Artificial
  probe
  misc_feature (1)..(25): SEQ ID NO: 1163; WAN024CYB_at; Start 91; Stop 115
taccgtgaatcgagccaagtcttta

SEQ ID NO: 138271 - DNA, 25 bp, Artificial
  probe
  misc_feature (1)..(25): SEQ ID NO: 1163; WAN024CYB_at; Start 397; Stop 421
tttacccacttgattggagggatgg

SEQ ID NO: 138272 - DNA, 25 bp, Artificial
  probe
  misc_feature (1)..(25): SEQ ID NO: 1163; WAN024CYB_at; Start 841; Stop 865
gtttctacaggcttgattagcctca

SEQ ID NO: 138273 - DNA, 25 bp, Artificial
  probe
  misc_feature (1)..(25): SEQ ID NO: 1163; WAN024CYB_at; Start 84; Stop 108
tgtctattaccgtgaatcgagccaa

SEQ ID NO: 138274 - DNA, 25 bp, Artificial
  probe
  misc_feature (1)..(25): SEQ ID NO: 1163; WAN024CYB_at; Start 373; Stop 397
cgttccctcctcttctggcgaagtt

SEQ ID NO: 138275 - DNA, 25 bp, Artificial
  probe
  misc_feature (1)..(25): SEQ ID NO: 1163; WAN024CYB_at; Start 132; Stop 156
catagggattctcgtattgttaggc

SEQ ID NO: 138276 - DNA, 25 bp, Artificial
  probe
  misc_feature (1)..(25): SEQ ID NO: 1163; WAN024CYB_at; Start 1182; Stop 1206
caagtactttgtcatctatgctatg

SEQ ID NO: 138277 - DNA, 25 bp, Artificial
  probe
  misc_feature (1)..(25): SEQ ID NO: 1163; WAN024CYB_at; Start 222; Stop 246
tgccctctgttggatcctttggtct

SEQ ID NO: 138278 - DNA, 25 bp, Artificial
  probe
  misc_feature (1)..(25): SEQ ID NO: 1163; WAN024CYB_at; Start 955; Stop 979
tatggagatattaccaactggcccc

SEQ ID NO: 138279 - DNA, 25 bp, Artificial
  probe
  misc_feature (1)..(25): SEQ ID NO: 1163; WAN024CYB_at; Start 1048; Stop 1072
ctcaagattattcgaggcctcatcc

SEQ ID NO: 138280 - DNA, 25 bp, Artificial
  probe
  misc_feature (1)..(25): SEQ ID NO: 1163; WAN024CYB_at; Start 436; Stop 460
gcacttgctattatggacaatgcca

SEQ ID NO: 138281 - DNA, 25 bp, Artificial
  probe
  misc_feature (1)..(25): SEQ ID NO: 1163; WAN024CYB_at; Start 200; Stop 224
ccaaggagggagtcttgatcgttgc

SEQ ID NO: 138282 - DNA, 25 bp, Artificial
  probe
  misc_feature (1)..(25): SEQ ID NO: 1163; WAN024CYB_at; Start 257; Stop 281
gtctcccctttgtcttttctgggca

SEQ ID NO: 138283 - DNA, 25 bp, Artificial
  probe
  misc_feature (1)..(25): SEQ ID NO: 1163; WAN024CYB_at; Start 384; Stop 408
cttctggcgaagttttacccacttg

SEQ ID NO: 138284 - DNA, 25 bp, Artificial
  probe
  misc_feature (1)..(25): SEQ ID NO: 1163; WAN024CYB_at; Start 938; Stop 962
caacaactggttttggatatggaga

SEQ ID NO: 138285 - DNA, 25 bp, Artificial
  probe
  misc_feature (1)..(25): SEQ ID NO: 1163; WAN024CYB_at; Start 923; Stop 947
tttccaacatcattacaacaactgg

SEQ ID NO: 138286 - DNA, 25 bp, Artificial
  probe
  misc_feature (1)..(25): SEQ ID NO: 1163; WAN024CYB_at; Start 421; Stop 445
ggagtgcttgtttttgcacttgcta

SEQ ID NO: 138287 - DNA, 25 bp, Artificial
  probe
  misc_feature (1)..(25): SEQ ID NO: 1163; WAN024CYB_at; Start 333; Stop 357
tactggagcaagtattttgaacgac

SEQ ID NO: 138288 - DNA, 25 bp, Artificial
  probe
  misc_feature (1)..(25): SEQ ID NO: 1163; WAN024CYB_at; Start 607; Stop 631
ggtatgcctctctacgatagttttg

SEQ ID NO: 138289 - DNA, 25 bp, Artificial
  probe
  misc_feature (1)..(25): SEQ ID NO: 1163; WAN024CYB_at; Start 11; Stop 35
gtatgattcgttacctcctttcaaa

SEQ ID NO: 138290 - DNA, 25 bp, Artificial
  probe
  misc_feature (1)..(25): SEQ ID NO: 1163; WAN024CYB_at; Start 1038; Stop 1062
tgcaggtggactcaagattattcga

SEQ ID NO: 138291 - DNA, 25 bp, Artificial
  probe
  misc_feature (1)..(25): SEQ ID NO: 1163; WAN024CYB_at; Start 122; Stop 146
tcttttcgaccatagggattctcgt

SEQ ID NO: 138292 - DNA, 25 bp, Artificial
  probe
  misc_feature (1)..(25): SEQ ID NO: 1163; WAN024CYB_at; Start 1024; Stop 1048
tctgctggatcaactgcaggtggac

SEQ ID NO: 138293 - DNA, 25 bp, Artificial
  probe
  misc_feature (1)..(25): SEQ ID NO: 1163; WAN024CYB_at; Start 911; Stop 935
ccttcttccaggtttccaacatcat

SEQ ID NO: 138294 - DNA, 25 bp, Artificial
  probe
  misc_feature (1)..(25): SEQ ID NO: 1163; WAN024CYB_at; Start 1061; Stop 1085
gaggcctcatcctttcaaaaattgc

SEQ ID NO: 138295 - DNA, 25 bp, Artificial
  probe
  misc_feature (1)..(25): SEQ ID NO: 6917; WAN024CYC_at; Start 54; Stop 78
tgtgcttgaaatcaaatctgccaca

SEQ ID NO: 138296 - DNA, 25 bp, Artificial
  probe
  misc_feature (1)..(25): SEQ ID NO: 6917; WAN024CYC_at; Start 38; Stop 62
catctggatatttcaatgtgcttga

SEQ ID NO: 138297 - DNA, 25 bp, Artificial
  probe
  misc_feature (1)..(25): SEQ ID NO: 6917; WAN024CYC_at; Start 73; Stop 97
gccacacttttagccatgttcattg

SEQ ID NO: 138298 - DNA, 25 bp, Artificial
  probe
  misc_feature (1)..(25): SEQ ID NO: 6917; WAN024CYC_at; Start 63; Stop 87
aatcaaatctgccacacttttagcc

SEQ ID NO: 138299 - DNA, 25 bp, Artificial
  probe
  misc_feature (1)..(25): SEQ ID NO: 6917; WAN024CYC_at; Start 21; Stop 45
acattccacaggttccccatctgga

SEQ ID NO: 138300 - DNA, 25 bp, Artificial
  probe
  misc_feature (1)..(25): SEQ ID NO: 6917; WAN024CYC_at; Start 34; Stop 58
tccccatctggatatttcaatgtgc

SEQ ID NO: 138301 - DNA, 25 bp, Artificial
  probe
  misc_feature (1)..(25): SEQ ID NO: 6917; WAN024CYC_at; Start 10; Stop 34
ggagaaatcacacattccacaggtt

SEQ ID NO: 138302 - DNA, 25 bp, Artificial
  probe
  misc_feature (1)..(25): SEQ ID NO: 6917; WAN024CYC_at; Start 31; Stop 55
ggttccccatctggatatttcaatg

SEQ ID NO: 138303 - DNA, 25 bp, Artificial
  probe
  misc_feature (1)..(25): SEQ ID NO: 6917; WAN024CYC_at; Start 51; Stop 75
caatgtgcttgaaatcaaatctgcc

SEQ ID NO: 138304 - DNA, 25 bp, Artificial
  probe
  misc_feature (1)..(25): SEQ ID NO: 6917; WAN024CYC_at; Start 56; Stop 80
tgcttgaaatcaaatctgccacact

SEQ ID NO: 138305 - DNA, 25 bp, Artificial
  probe
  misc_feature (1)..(25): SEQ ID NO: 6917; WAN024CYC_at; Start 57; Stop 81
gcttgaaatcaaatctgccacactt

SEQ ID NO: 138306 - DNA, 25 bp, Artificial
  probe
  misc_feature (1)..(25): SEQ ID NO: 6917; WAN024CYC_at; Start 5; Stop 29
tagatggagaaatcacacattccac

SEQ ID NO: 138307 - DNA, 25 bp, Artificial
  probe
  misc_feature (1)..(25): SEQ ID NO: 6917; WAN024CYC_at; Start 2; Stop 26
tggtagatggagaaatcacacattc

SEQ ID NO: 138308 - DNA, 25 bp, Artificial
  probe
  misc_feature (1)..(25): SEQ ID NO: 6917; WAN024CYC_at; Start 84; Stop 108
agccatgttcattgtttgtacttca

SEQ ID NO: 138309 - DNA, 25 bp, Artificial
  probe
  misc_feature (1)..(25): SEQ ID NO: 6917; WAN024CYC_at; Start 89; Stop 113
tgttcattgtttgtacttcaagtga

SEQ ID NO: 138310 - DNA, 25 bp, Artificial
  probe
  misc_feature (1)..(25): SEQ ID NO: 6917; WAN024CYC_at; Start 61; Stop 85
gaaatcaaatctgccacacttttag

SEQ ID NO: 138311 - DNA, 25 bp, Artificial
  probe
  misc_feature (1)..(25): SEQ ID NO: 6917; WAN024CYC_at; Start 3; Stop 27
ggtagatggagaaatcacacattcc

SEQ ID NO: 138312 - DNA, 25 bp, Artificial
  probe
  misc_feature (1)..(25): SEQ ID NO: 6917; WAN024CYC_at; Start 66; Stop 90
caaatctgccacacttttagccatg

SEQ ID NO: 138313 - DNA, 25 bp, Artificial
  probe
  misc_feature (1)..(25): SEQ ID NO: 6917; WAN024CYC_at; Start 77; Stop 101
cacttttagccatgttcattgtttg

SEQ ID NO: 138314 - DNA, 25 bp, Artificial
  probe
  misc_feature (1)..(25): SEQ ID NO: 6917; WAN024CYC_at; Start 70; Stop 94
tctgccacacttttagccatgttca

SEQ ID NO: 138315 - DNA, 25 bp, Artificial
  probe
  misc_feature (1)..(25): SEQ ID NO: 6917; WAN024CYC_at; Start 67; Stop 91
aaatctgccacacttttagccatgt

SEQ ID NO: 138316 - DNA, 25 bp, Artificial
  probe
  misc_feature (1)..(25): SEQ ID NO: 6917; WAN024CYC_at; Start 13; Stop 37
gaaatcacacattccacaggttccc

SEQ ID NO: 138317 - DNA, 25 bp, Artificial
  probe
  misc_feature (1)..(25): SEQ ID NO: 6917; WAN024CYC_at; Start 7; Stop 31
gatggagaaatcacacattccacag

SEQ ID NO: 138318 - DNA, 25 bp, Artificial
  probe
  misc_feature (1)..(25): SEQ ID NO: 6917; WAN024CYC_at; Start 11; Stop 35
gagaaatcacacattccacaggttc

SEQ ID NO: 138319 - DNA, 25 bp, Artificial
  probe
  misc_feature (1)..(25): SEQ ID NO: 6917; WAN024CYC_at; Start 23; Stop 47
attccacaggttccccatctggata

SEQ ID NO: 138320 - DNA, 25 bp, Artificial
  probe
  misc_feature (1)..(25): SEQ ID NO: 6917; WAN024CYC_at; Start 9; Stop 33
tggagaaatcacacattccacaggt

SEQ ID NO: 138321 - DNA, 25 bp, Artificial
  probe
  misc_feature (1)..(25): SEQ ID NO: 6917; WAN024CYC_at; Start 27; Stop 51
cacaggttccccatctggatatttc

SEQ ID NO: 138322 - DNA, 25 bp, Artificial
  probe
  misc_feature (1)..(25): SEQ ID NO: 6917; WAN024CYC_at; Start 29; Stop 53
caggttccccatctggatatttcaa

SEQ ID NO: 138323 - DNA, 25 bp, Artificial
  probe
  misc_feature (1)..(25): SEQ ID NO: 6917; WAN024CYC_at; Start 96; Stop 120
tgtttgtacttcaagtgattcgcgt

SEQ ID NO: 138324 - DNA, 25 bp, Artificial
  probe
  misc_feature (1)..(25): SEQ ID NO: 6917; WAN024CYC_at; Start 98; Stop 122
tttgtacttcaagtgattcgcgtac

SEQ ID NO: 138325 - DNA, 25 bp, Artificial
  probe
  misc_feature (1)..(25): SEQ ID NO: 6917; WAN024CYC_at; Start 75; Stop 99
cacacttttagccatgttcattgtt

SEQ ID NO: 138326 - DNA, 25 bp, Artificial
  probe
  misc_feature (1)..(25): SEQ ID NO: 6917; WAN024CYC_at; Start 93; Stop 117
cattgtttgtacttcaagtgattcg

SEQ ID NO: 138327 - DNA, 25 bp, Artificial
  probe
  misc_feature (1)..(25): SEQ ID NO: 6917; WAN024CYC_at; Start 102; Stop 126
tacttcaagtgattcgcgtacacct

SEQ ID NO: 138328 - DNA, 25 bp, Artificial
  probe
  misc_feature (1)..(25): SEQ ID NO: 6917; WAN024CYC_at; Start 86; Stop 110
ccatgttcattgtttgtacttcaag

SEQ ID NO: 138329 - DNA, 25 bp, Artificial
  probe
  misc_feature (1)..(25): SEQ ID NO: 1891; WAN024CYD_at; Start 1125; Stop 1149
tactttagagggtcgtgctgcagct

SEQ ID NO: 138330 - DNA, 25 bp, Artificial
  probe
  misc_feature (1)..(25): SEQ ID NO: 1891; WAN024CYD_at; Start 1506; Stop 1530
tccacgtttgacaggaaaaggtgct

SEQ ID NO: 138331 - DNA, 25 bp, Artificial
  probe
  misc_feature (1)..(25): SEQ ID NO: 1891; WAN024CYD_at; Start 1409; Stop 1433
tacaaattgcagaaggttacacact

SEQ ID NO: 138332 - DNA, 25 bp, Artificial
  probe
  misc_feature (1)..(25): SEQ ID NO: 1891; WAN024CYD_at; Start 816; Stop 840
ggttggtaacccaagacttgctgaa

SEQ ID NO: 138333 - DNA, 25 bp, Artificial
  probe
  misc_feature (1)..(25): SEQ ID NO: 1891; WAN024CYD_at; Start 1423; Stop 1447
ggttacacacttgaacttcctgaag

SEQ ID NO: 138334 - DNA, 25 bp, Artificial
  probe
  misc_feature (1)..(25): SEQ ID NO: 1891; WAN024CYD_at; Start 242; Stop 266
caattacagttacaccatgctggtg

SEQ ID NO: 138335 - DNA, 25 bp, Artificial
  probe
  misc_feature (1)..(25): SEQ ID NO: 1891; WAN024CYD_at; Start 1298; Stop 1322
caaaccgcgaatacttccgtggagg

SEQ ID NO: 138336 - DNA, 25 bp, Artificial
  probe
  misc_feature (1)..(25): SEQ ID NO: 1891; WAN024CYD_at; Start 585; Stop 609
ccaagaatacttaggaatgcgaaat

SEQ ID NO: 138337 - DNA, 25 bp, Artificial
  probe
  misc_feature (1)..(25): SEQ ID NO: 1891; WAN024CYD_at; Start 1226; Stop 1250
ttatgaaaccattctgggagttgga

SEQ ID NO: 138338 - DNA, 25 bp, Artificial
  probe
  misc_feature (1)..(25): SEQ ID NO: 1891; WAN024CYD_at; Start 39; Stop 63
tgatggtcgtcgtcaaggtgtacgc

SEQ ID NO: 138339 - DNA, 25 bp, Artificial
  probe
  misc_feature (1)..(25): SEQ ID NO: 1891; WAN024CYD_at; Start 497; Stop 521
caactggcttgatgagagacactgc

SEQ ID NO: 138340 - DNA, 25 bp, Artificial
  probe
  misc_feature (1)..(25): SEQ ID NO: 1891; WAN024CYD_at; Start 193; Stop 217
gaggctgcagcttcccatgagttgt

SEQ ID NO: 138341 - DNA, 25 bp, Artificial
  probe
  misc_feature (1)..(25): SEQ ID NO: 1891; WAN024CYD_at; Start 83; Stop 107
caatgaacatggctaaaagtgtggc

SEQ ID NO: 138342 - DNA, 25 bp, Artificial
  probe
  misc_feature (1)..(25): SEQ ID NO: 1891; WAN024CYD_at; Start 1394; Stop 1418
gggttggtccagtgctacaaattgc

SEQ ID NO: 138343 - DNA, 25 bp, Artificial
  probe
  misc_feature (1)..(25): SEQ ID NO: 1891; WAN024CYD_at; Start 611; Stop 635
aatcggtagatatgacggagttcac

SEQ ID NO: 138344 - DNA, 25 bp, Artificial
  probe
  misc_feature (1)..(25): SEQ ID NO: 1891; WAN024CYD_at; Start 992; Stop 1016
tatttgcgacagagaatgattcact

SEQ ID NO: 138345 - DNA, 25 bp, Artificial
  probe
  misc_feature (1)..(25): SEQ ID NO: 1891; WAN024CYD_at; Start 1467; Stop 1491
taatcgtacagatccaggatggcca

SEQ ID NO: 138346 - DNA, 25 bp, Artificial
  probe
  misc_feature (1)..(25): SEQ ID NO: 1891; WAN024CYD_at; Start 320; Stop 344
gatttaatgggacagaacgcccagg

SEQ ID NO: 138347 - DNA, 25 bp, Artificial
  probe
  misc_feature (1)..(25): SEQ ID NO: 1891; WAN024CYD_at; Start 1313; Stop 1337
tccgtggaggaggattctcaactcg

SEQ ID NO: 138348 - DNA, 25 bp, Artificial
  probe
  misc_feature (1)..(25): SEQ ID NO: 1891; WAN024CYD_at; Start 644; Stop 668
tggaccgtggtatttacgaccctga

SEQ ID NO: 138349 - DNA, 25 bp, Artificial
  probe
  misc_feature (1)..(25): SEQ ID NO: 1891; WAN024CYD_at; Start 1328; Stop 1352
tctcaactcgtttcttgacgaaggg

SEQ ID NO: 138350 - DNA, 25 bp, Artificial
  probe
  misc_feature (1)..(25): SEQ ID NO: 1891; WAN024CYD_at; Start 1563; Stop 1587
gggagctaatcacggagccataaca

SEQ ID NO: 138351 - DNA, 25 bp, Artificial
  probe
  misc_feature (1)..(25): SEQ ID NO: 1891; WAN024CYD_at; Start 512; Stop 536
gagacactgcttacctatcaatggg

SEQ ID NO: 138352 - DNA, 25 bp, Artificial
  probe
  misc_feature (1)..(25): SEQ ID NO: 1891; WAN024CYD_at; Start 1200; Stop 1224
tcaagctactcgagatggcaaacct

SEQ ID NO: 138353 - DNA, 25 bp, Artificial
  probe
  misc_feature (1)..(25): SEQ ID NO: 1891; WAN024CYD_at; Start 786; Stop 810
taagatgttcatgattggacgtgac

SEQ ID NO: 138354 - DNA, 25 bp, Artificial
  probe
  misc_feature (1)..(25): SEQ ID NO: 1891; WAN024CYD_at; Start 1715; Stop 1739
tagaatcagcagactatcgtgcatg

SEQ ID NO: 138355 - DNA, 25 bp, Artificial
  probe
  misc_feature (1)..(25): SEQ ID NO: 1891; WAN024CYD_at; Start 801; Stop 825
tggacgtgacttaatggttggtaac

SEQ ID NO: 138356 - DNA, 25 bp, Artificial
  probe
  misc_feature (1)..(25): SEQ ID NO: 1891; WAN024CYD_at; Start 1356; Stop 1380
tatgccagtaacaatggtacgtctc

SEQ ID NO: 138357 - DNA, 25 bp, Artificial
  probe
  misc_feature (1)..(25): SEQ ID NO: 1891; WAN024CYD_at; Start 878; Stop 902
tagtagctggtttccaaggtcaacg

SEQ ID NO: 138358 - DNA, 25 bp, Artificial
  probe
  misc_feature (1)..(25): SEQ ID NO: 1891; WAN024CYD_at; Start 862; Stop 886
gttggtcaccatgctttagtagctg

SEQ ID NO: 138359 - DNA, 25 bp, Artificial
  probe
  misc_feature (1)..(25): SEQ ID NO: 1891; WAN024CYD_at; Start 1276; Stop 1300
gaaaatacagacttcccaccagcaa

SEQ ID NO: 138360 - DNA, 25 bp, Artificial
  probe
  misc_feature (1)..(25): SEQ ID NO: 1891; WAN024CYD_at; Start 334; Stop 358
gaacgcccaggagctgtctatcttg

SEQ ID NO: 138361 - DNA, 25 bp, Artificial
  probe
  misc_feature (1)..(25): SEQ ID NO: 1891; WAN024CYD_at; Start 1184; Stop 1208
cattggatggtacaggtcaagctac

SEQ ID NO: 138362 - DNA, 25 bp, Artificial
  probe
  misc_feature (1)..(25): SEQ ID NO: 1891; WAN024CYD_at; Start 257; Stop 281
catgctggtgttatggtagtgaaac

SEQ ID NO: 138363 - DNA, 25 bp, Artificial
  probe
  misc_feature (1)..(25): SEQ ID NO: 2095; WAN024CYE_at; Start 345; Stop 369
tcttctctttggcagctgactggag

SEQ ID NO: 138364 - DNA, 25 bp, Artificial
  probe
  misc_feature (1)..(25): SEQ ID NO: 2095; WAN024CYE_at; Start 261; Stop 285
caccagcttctaagagtgccttaaa

SEQ ID NO: 138365 - DNA, 25 bp, Artificial
  probe
  misc_feature (1)..(25): SEQ ID NO: 2095; WAN024CYE_at; Start 80; Stop 104
gtagcaccgcagatatggaaatgtt

SEQ ID NO: 138366 - DNA, 25 bp, Artificial
  probe
  misc_feature (1)..(25): SEQ ID NO: 2095; WAN024CYE_at; Start 219; Stop 243
tactgctctcaagcggaataccgtc

SEQ ID NO: 138367 - DNA, 25 bp, Artificial
  probe
  misc_feature (1)..(25): SEQ ID NO: 2095; WAN024CYE_at; Start 237; Stop 261
taccgtcatcagagaaaccaaccgc

SEQ ID NO: 138368 - DNA, 25 bp, Artificial
  probe
  misc_feature (1)..(25): SEQ ID NO: 2095; WAN024CYE_at; Start 108; Stop 132
tagcaatattttcattaaagccaag

SEQ ID NO: 138369 - DNA, 25 bp, Artificial
  probe
  misc_feature (1)..(25): SEQ ID NO: 2095; WAN024CYE_at; Start 211; Stop 235
gacaatcttactgctctcaagcgga

SEQ ID NO: 138370 - DNA, 25 bp, Artificial
  probe
  misc_feature (1)..(25): SEQ ID NO: 2095; WAN024CYE_at; Start 146; Stop 170
cctggatcttcctcatgaaggctga

SEQ ID NO: 138371 - DNA, 25 bp, Artificial
  probe
  misc_feature (1)..(25): SEQ ID NO: 2095; WAN024CYE_at; Start 315; Stop 339
tagtaatggtcgcaactgtcttgac

SEQ ID NO: 138372 - DNA, 25 bp, Artificial
  probe
  misc_feature (1)..(25): SEQ ID NO: 2095; WAN024CYE_at; Start 199; Stop 223
catggcttccttgacaatcttactg

SEQ ID NO: 138373 - DNA, 25 bp, Artificial
  probe
  misc_feature (1)..(25): SEQ ID NO: 2095; WAN024CYE_at; Start 29; Stop 53
gcataggcaatcatgacatcacgcg

SEQ ID NO: 138374 - DNA, 25 bp, Artificial
  probe
  misc_feature (1)..(25): SEQ ID NO: 2095; WAN024CYE_at; Start 308; Stop 332
aagtttttagtaatggtcgcaactg

SEQ ID NO: 138375 - DNA, 25 bp, Artificial
  probe
  misc_feature (1)..(25): SEQ ID NO: 2095; WAN024CYE_at; Start 408; Stop 432
tggtattagccatcatgacgacagt

SEQ ID NO: 138376 - DNA, 25 bp, Artificial
  probe
  misc_feature (1)..(25): SEQ ID NO: 2095; WAN024CYE_at; Start 93; Stop 117
tatggaaatgttctctagcaatatt

SEQ ID NO: 138377 - DNA, 25 bp, Artificial
  probe
  misc_feature (1)..(25): SEQ ID NO: 2095; WAN024CYE_at; Start 322; Stop 346
ggtcgcaactgtcttgacattaatc

SEQ ID NO: 138378 - DNA, 25 bp, Artificial
  probe
  misc_feature (1)..(25): SEQ ID NO: 2095; WAN024CYE_at; Start 359; Stop 383
gctgactggagaactgcttgcaaag

SEQ ID NO: 138379 - DNA, 25 bp, Artificial
  probe
  misc_feature (1)..(25): SEQ ID NO: 2095; WAN024CYE_at; Start 119; Stop 143
tcattaaagccaagaacaccgttca

SEQ ID NO: 138380 - DNA, 25 bp, Artificial
  probe
  misc_feature (1)..(25): SEQ ID NO: 2095; WAN024CYE_at; Start 274; Stop 298
gagtgccttaaagtcagtcaagttt

SEQ ID NO: 138381 - DNA, 25 bp, Artificial
  probe
  misc_feature (1)..(25): SEQ ID NO: 2095; WAN024CYE_at; Start 373; Stop 397
tgcttgcaaagtctccacgtctgaa

SEQ ID NO: 138382 - DNA, 25 bp, Artificial
  probe
  misc_feature (1)..(25): SEQ ID NO: 2095; WAN024CYE_at; Start 47; Stop 71
tcacgcgccatcatagcgtactcag

SEQ ID NO: 138383 - DNA, 25 bp, Artificial
  probe
  misc_feature (1)..(25): SEQ ID NO: 2095; WAN024CYE_at; Start 131; Stop 155
agaacaccgttcaaacctggatctt

SEQ ID NO: 138384 - DNA, 25 bp, Artificial
  probe
  misc_feature (1)..(25): SEQ ID NO: 2095; WAN024CYE_at; Start 35; Stop 59
gcaatcatgacatcacgcgccatca

SEQ ID NO: 138385 - DNA, 25 bp, Artificial
  probe
  misc_feature (1)..(25): SEQ ID NO: 2095; WAN024CYE_at; Start 337; Stop 361
gacattaatcttctctttggcagct

SEQ ID NO: 138386 - DNA, 25 bp, Artificial
  probe
  misc_feature (1)..(25): SEQ ID NO: 2095; WAN024CYE_at; Start 159; Stop 183
catgaaggctgataaaggtattgag

SEQ ID NO: 138387 - DNA, 25 bp, Artificial
  probe
  misc_feature (1)..(25): SEQ ID NO: 2095; WAN024CYE_at; Start 423; Stop 447
tgacgacagtagtaaaaccacctgc

SEQ ID NO: 138388 - DNA, 25 bp, Artificial
  probe
  misc_feature (1)..(25): SEQ ID NO: 2095; WAN024CYE_at; Start 189; Stop 213
tggcttcctccatggcttccttgac

SEQ ID NO: 138389 - DNA, 25 bp, Artificial
  probe
  misc_feature (1)..(25): SEQ ID NO: 2095; WAN024CYE_at; Start 381; Stop 405
aagtctccacgtctgaaatggttgg

SEQ ID NO: 138390 - DNA, 25 bp, Artificial
  probe
  misc_feature (1)..(25): SEQ ID NO: 2095; WAN024CYE_at; Start 231; Stop 255
gcggaataccgtcatcagagaaacc

SEQ ID NO: 138391 - DNA, 25 bp, Artificial
  probe
  misc_feature (1)..(25): SEQ ID NO: 2095; WAN024CYE_at; Start 74; Stop 98
accccagtagcaccgcagatatgga

SEQ ID NO: 138392 - DNA, 25 bp, Artificial
  probe
  misc_feature (1)..(25): SEQ ID NO: 2095; WAN024CYE_at; Start 252; Stop 276
aaccaaccgcaccagcttctaagag

SEQ ID NO: 138393 - DNA, 25 bp, Artificial
  probe
  misc_feature (1)..(25): SEQ ID NO: 2095; WAN024CYE_at; Start 394; Stop 418
tgaaatggttggactggtattagcc

SEQ ID NO: 138394 - DNA, 25 bp, Artificial
  probe
  misc_feature (1)..(25): SEQ ID NO: 2095; WAN024CYE_at; Start 180; Stop 204
tgagttttttggcttcctccatggc

SEQ ID NO: 138395 - DNA, 25 bp, Artificial
  probe
  misc_feature (1)..(25): SEQ ID NO: 2095; WAN024CYE_at; Start 14; Stop 38
acatgggctttagttgcataggcaa

SEQ ID NO: 138396 - DNA, 25 bp, Artificial
  probe
  misc_feature (1)..(25): SEQ ID NO: 2095; WAN024CYE_at; Start 2; Stop 26
tgctggatgtgaacatgggctttag

SEQ ID NO: 138397 - DNA, 25 bp, Artificial
  probe
  misc_feature (1)..(25): SEQ ID NO: 2066; WAN024CYF_at; Start 891; Stop 915
cacagttattgcgactgaccacgcg

SEQ ID NO: 138398 - DNA, 25 bp, Artificial
  probe
  misc_feature (1)..(25): SEQ ID NO: 2066; WAN024CYF_at; Start 654; Stop 678
tgcctatgcaactaaagcccatgtt

SEQ ID NO: 138399 - DNA, 25 bp, Artificial
  probe
  misc_feature (1)..(25): SEQ ID NO: 2066; WAN024CYF_at; Start 185; Stop 209
tccgtgaacctggtcaaacacataa

SEQ ID NO: 138400 - DNA, 25 bp, Artificial
  probe
  misc_feature (1)..(25): SEQ ID NO: 2066; WAN024CYF_at; Start 108; Stop 132
cacggaagaaggagcagaaacgatt

SEQ ID NO: 138401 - DNA, 25 bp, Artificial
  probe
  misc_feature (1)..(25): SEQ ID NO: 2066; WAN024CYF_at; Start 760; Stop 784
gtagcgccacagcatttctctaaga

SEQ ID NO: 138402 - DNA, 25 bp, Artificial
  probe
  misc_feature (1)..(25): SEQ ID NO: 2066; WAN024CYF_at; Start 1131; Stop 1155
tatttttgatgccaaggctgaccgc

SEQ ID NO: 138403 - DNA, 25 bp, Artificial
  probe
  misc_feature (1)..(25): SEQ ID NO: 2066; WAN024CYF_at; Start 471; Stop 495
taagattgtcaaggaagccatggag

SEQ ID NO: 138404 - DNA, 25 bp, Artificial
  probe
  misc_feature (1)..(25): SEQ ID NO: 2066; WAN024CYF_at; Start 521; Stop 545
tcagccttcatgaggaagatccagg

SEQ ID NO: 138405 - DNA, 25 bp, Artificial
  probe
  misc_feature (1)..(25): SEQ ID NO: 2066; WAN024CYF_at; Start 939; Stop 963
tgttgaggatattaccaaagcgcca

SEQ ID NO: 138406 - DNA, 25 bp, Artificial
  probe
  misc_feature (1)..(25): SEQ ID NO: 2066; WAN024CYF_at; Start 325; Stop 349
cagtcagctgccaaagagaagatta

SEQ ID NO: 138407 - DNA, 25 bp, Artificial
  probe
  misc_feature (1)..(25): SEQ ID NO: 2066; WAN024CYF_at; Start 633; Stop 657
gatggcgcgtgatgtcatgattgcc

SEQ ID NO: 138408 - DNA, 25 bp, Artificial
  probe
  misc_feature (1)..(25): SEQ ID NO: 2066; WAN024CYF_at; Start 906; Stop 930
tgaccacgcgcctcatcatgtagat

SEQ ID NO: 138409 - DNA, 25 bp, Artificial
  probe
  misc_feature (1)..(25): SEQ ID NO: 2066; WAN024CYF_at; Start 812; Stop 836
gcaatgctaagatgaatccaccgct

SEQ ID NO: 138410 - DNA, 25 bp, Artificial
  probe
  misc_feature (1)..(25): SEQ ID NO: 2066; WAN024CYF_at; Start 456; Stop 480
tccgcttgagagcagtaagattgtc

SEQ ID NO: 138411 - DNA, 25 bp, Artificial
  probe
  misc_feature (1)..(25): SEQ ID NO: 2066; WAN024CYF_at; Start 1181; Stop 1205
aagcagctaattcaccattcatcgg

SEQ ID NO: 138412 - DNA, 25 bp, Artificial
  probe
  misc_feature (1)..(25): SEQ ID NO: 2066; WAN024CYF_at; Start 1231; Stop 1255
tataccatctgtaagggacaaatcg

SEQ ID NO: 138413 - DNA, 25 bp, Artificial
  probe
  misc_feature (1)..(25): SEQ ID NO: 2066; WAN024CYF_at; Start 295; Stop 319
tcagacgtggagactttgcaagcag

SEQ ID NO: 138414 - DNA, 25 bp, Artificial
  probe
  misc_feature (1)..(25): SEQ ID NO: 2066; WAN024CYF_at; Start 1058; Stop 1082
tgacatacaacccagccaagcttta

SEQ ID NO: 138415 - DNA, 25 bp, Artificial
  probe
  misc_feature (1)..(25): SEQ ID NO: 2066; WAN024CYF_at; Start 1199; Stop 1223
tcatcggtgaaaccttaaaagggca

SEQ ID NO: 138416 - DNA, 25 bp, Artificial
  probe
  misc_feature (1)..(25): SEQ ID NO: 2066; WAN024CYF_at; Start 422; Stop 446
aagctggtgcggttggtttctctga

SEQ ID NO: 138417 - DNA, 25 bp, Artificial
  probe
  misc_feature (1)..(25): SEQ ID NO: 2066; WAN024CYF_at; Start 745; Stop 769
gaagtcacagcagaagtagcgccac

SEQ ID NO: 138418 - DNA, 25 bp, Artificial
  probe
  misc_feature (1)..(25): SEQ ID NO: 2066; WAN024CYF_at; Start 436; Stop 460
ggtttctctgatgacggtattccgc

SEQ ID NO: 138419 - DNA, 25 bp, Artificial
  probe
  misc_feature (1)..(25): SEQ ID NO: 2066; WAN024CYF_at; Start 969; Stop 993
tatgactggcttagaaacatccctg

SEQ ID NO: 138420 - DNA, 25 bp, Artificial
  probe
  misc_feature (1)..(25): SEQ ID NO: 2066; WAN024CYF_at; Start 856; Stop 880
cgtgccgttatcgaaggtctcaaat

SEQ ID NO: 138421 - DNA, 25 bp, Artificial
  probe
  misc_feature (1)..(25): SEQ ID NO: 2066; WAN024CYF_at; Start 586; Stop 610
gaacatttccatatctgcggtgcta

SEQ ID NO: 138422 - DNA, 25 bp, Artificial
  probe
  misc_feature (1)..(25): SEQ ID NO: 2066; WAN024CYF_at; Start 871; Stop 895
ggtctcaaatcaggtgtcatcacag

SEQ ID NO: 138423 - DNA, 25 bp, Artificial
  probe
  misc_feature (1)..(25): SEQ ID NO: 2066; WAN024CYF_at; Start 954; Stop 978
caaagcgccatctggtatgactggc

SEQ ID NO: 138424 - DNA, 25 bp, Artificial
  probe
  misc_feature (1)..(25): SEQ ID NO: 2066; WAN024CYF_at; Start 837; Stop 861
tcgtttggaatcagaccgtcgtgcc

SEQ ID NO: 138425 - DNA, 25 bp, Artificial
  probe
  misc_feature (1)..(25): SEQ ID NO: 2066; WAN024CYF_at; Start 351; Stop 375
tgtcaagacagttgcgaccattact

SEQ ID NO: 138426 - DNA, 25 bp, Artificial
  probe
  misc_feature (1)..(25): SEQ ID NO: 2066; WAN024CYF_at; Start 487; Stop 511
gccatggaggaagccaaaaaactca

SEQ ID NO: 138427 - DNA, 25 bp, Artificial
  probe
  misc_feature (1)..(25): SEQ ID NO: 2066; WAN024CYF_at; Start 1108; Stop 1132
gagaatggtccagcagatatcacta

SEQ ID NO: 138428 - DNA, 25 bp, Artificial
  probe
  misc_feature (1)..(25): SEQ ID NO: 2066; WAN024CYF_at; Start 1094; Stop 1118
caggttacttggctgagaatggtcc

SEQ ID NO: 138429 - DNA, 25 bp, Artificial
  probe
  misc_feature (1)..(25): SEQ ID NO: 2066; WAN024CYF_at; Start 310; Stop 334
ttgcaagcagttctccagtcagctg

SEQ ID NO: 138430 - DNA, 25 bp, Artificial
  probe
  misc_feature (1)..(25): SEQ ID NO: 2066; WAN024CYF_at; Start 279; Stop 303
taccagtccaaccatttcagacgtg

SEQ ID NO: 138431 - DNA, 25 bp, Artificial
  probe
  misc_feature (1)..(25): SEQ ID NO: 2554; WAN024CYG_at; Start 242; Stop 266
tacaagagcttatgaataaagccgt

SEQ ID NO: 138432 - DNA, 25 bp, Artificial
  probe
  misc_feature (1)..(25): SEQ ID NO: 2554; WAN024CYG_at; Start 202; Stop 226
tacaacggaaaatcagaagtaattg

SEQ ID NO: 138433 - DNA, 25 bp, Artificial
  probe
  misc_feature (1)..(25): SEQ ID NO: 2554; WAN024CYG_at; Start 147; Stop 171
tcaaattaatgagcgtgtcgagaaa

SEQ ID NO: 138434 - DNA, 25 bp, Artificial
  probe
  misc_feature (1)..(25): SEQ ID NO: 2554; WAN024CYG_at; Start 3; Stop 27
gggagcattaggttactatgaagga

SEQ ID NO: 138435 - DNA, 25 bp, Artificial
  probe
  misc_feature (1)..(25): SEQ ID NO: 2554; WAN024CYG_at; Start 60; Stop 84
ccaagctgaagaagaaggcaaaccg

SEQ ID NO: 138436 - DNA, 25 bp, Artificial
  probe
  misc_feature (1)..(25): SEQ ID NO: 2554; WAN024CYG_at; Start 153; Stop 177
taatgagcgtgtcgagaaattaggt

SEQ ID NO: 138437 - DNA, 25 bp, Artificial
  probe
  misc_feature (1)..(25): SEQ ID NO: 2554; WAN024CYG_at; Start 250; Stop 274
cttatgaataaagccgttaaagacg

SEQ ID NO: 138438 - DNA, 25 bp, Artificial
  probe
  misc_feature (1)..(25): SEQ ID NO: 2554; WAN024CYG_at; Start 73; Stop 97
gaaggcaaaccgctatctgataaat

SEQ ID NO: 138439 - DNA, 25 bp, Artificial
  probe
  misc_feature (1)..(25): SEQ ID NO: 2554; WAN024CYG_at; Start 30; Stop 54
tgttccttatgtttcaaatcaatac

SEQ ID NO: 138440 - DNA, 25 bp, Artificial
  probe
  misc_feature (1)..(25): SEQ ID NO: 2554; WAN024CYG_at; Start 49; Stop 73
caatacaaaaaccaagctgaagaag

SEQ ID NO: 138441 - DNA, 25 bp, Artificial
  probe
  misc_feature (1)..(25): SEQ ID NO: 2554; WAN024CYG_at; Start 11; Stop 35
taggttactatgaaggatttgttcc

SEQ ID NO: 138442 - DNA, 25 bp, Artificial
  probe
  misc_feature (1)..(25): SEQ ID NO: 2554; WAN024CYG_at; Start 194; Stop 218
caataaattacaacggaaaatcaga

SEQ ID NO: 138443 - DNA, 25 bp, Artificial
  probe
  misc_feature (1)..(25): SEQ ID NO: 2554; WAN024CYG_at; Start 22; Stop 46
gaaggatttgttccttatgtttcaa

SEQ ID NO: 138444 - DNA, 25 bp, Artificial
  probe
  misc_feature (1)..(25): SEQ ID NO: 2554; WAN024CYG_at; Start 159; Stop 183
gcgtgtcgagaaattaggtaagtta

SEQ ID NO: 138445 - DNA, 25 bp, Artificial
  probe
  misc_feature (1)..(25): SEQ ID NO: 2554; WAN024CYG_at; Start 118; Stop 142
ggaaaaacatatgcagccttcaaaa

SEQ ID NO: 138446 - DNA, 25 bp, Artificial
  probe
  misc_feature (1)..(25): SEQ ID NO: 2554; WAN024CYG_at; Start 43; Stop 67
tcaaatcaatacaaaaaccaagctg

SEQ ID NO: 138447 - DNA, 25 bp, Artificial
  probe
  misc_feature (1)..(25): SEQ ID NO: 2554; WAN024CYG_at; Start 54; Stop 78
caaaaaccaagctgaagaagaaggc

SEQ ID NO: 138448 - DNA, 25 bp, Artificial
  probe
  misc_feature (1)..(25): SEQ ID NO: 2554; WAN024CYG_at; Start 67; Stop 91
gaagaagaaggcaaaccgctatctg

SEQ ID NO: 138449 - DNA, 25 bp, Artificial
  probe
  misc_feature (1)..(25): SEQ ID NO: 2554; WAN024CYG_at; Start 145; Stop 169
gatcaaattaatgagcgtgtcgaga

SEQ ID NO: 138450 - DNA, 25 bp, Artificial
  probe
  misc_feature (1)..(25): SEQ ID NO: 2554; WAN024CYG_at; Start 125; Stop 149
catatgcagccttcaaaaaagatca

SEQ ID NO: 138451 - DNA, 25 bp, Artificial
  probe
  misc_feature (1)..(25): SEQ ID NO: 2554; WAN024CYG_at; Start 260; Stop 284
aagccgttaaagacgaagtggctca

SEQ ID NO: 138452 - DNA, 25 bp, Artificial
  probe
  misc_feature (1)..(25): SEQ ID NO: 2554; WAN024CYG_at; Start 114; Stop 138
cttaggaaaaacatatgcagccttc

SEQ ID NO: 138453 - DNA, 25 bp, Artificial
  probe
  misc_feature (1)..(25): SEQ ID NO: 2554; WAN024CYG_at; Start 110; Stop 134
aaatcttaggaaaaacatatgcagc

SEQ ID NO: 138454 - DNA, 25 bp, Artificial
  probe
  misc_feature (1)..(25): SEQ ID NO: 2554; WAN024CYG_at; Start 61; Stop 85
caagctgaagaagaaggcaaaccgc

SEQ ID NO: 138455 - DNA, 25 bp, Artificial
  probe
  misc_feature (1)..(25): SEQ ID NO: 2554; WAN024CYG_at; Start 231; Stop 255
taaagaaaaattacaagagcttatg

SEQ ID NO: 138456 - DNA, 25 bp, Artificial
  probe
  misc_feature (1)..(25): SEQ ID NO: 2554; WAN024CYG_at; Start 267; Stop 291
taaagacgaagtggctcaaatatag

SEQ ID NO: 138457 - DNA, 25 bp, Artificial
  probe
  misc_feature (1)..(25): SEQ ID NO: 2554; WAN024CYG_at; Start 263; Stop 287
ccgttaaagacgaagtggctcaaat

SEQ ID NO: 138458 - DNA, 25 bp, Artificial
  probe
  misc_feature (1)..(25): SEQ ID NO: 2554; WAN024CYG_at; Start 82; Stop 106
ccgctatctgataaatatattttcg

SEQ ID NO: 138459 - DNA, 25 bp, Artificial
  probe
  misc_feature (1)..(25): SEQ ID NO: 2554; WAN024CYG_at; Start 215; Stop 239
cagaagtaattgatagtaaagaaaa

SEQ ID NO: 138460 - DNA, 25 bp, Artificial
  probe
  misc_feature (1)..(25): SEQ ID NO: 2554; WAN024CYG_at; Start 76; Stop 100
ggcaaaccgctatctgataaatata

SEQ ID NO: 138461 - DNA, 25 bp, Artificial
  probe
  misc_feature (1)..(25): SEQ ID NO: 2554; WAN024CYG_at; Start 70; Stop 94
gaagaaggcaaaccgctatctgata

SEQ ID NO: 138462 - DNA, 25 bp, Artificial
  probe
  misc_feature (1)..(25): SEQ ID NO: 2554; WAN024CYG_at; Start 156; Stop 180
tgagcgtgtcgagaaattaggtaag

SEQ ID NO: 138463 - DNA, 25 bp, Artificial
  probe
  misc_feature (1)..(25): SEQ ID NO: 2554; WAN024CYG_at; Start 64; Stop 88
gctgaagaagaaggcaaaccgctat

SEQ ID NO: 138464 - DNA, 25 bp, Artificial
  probe
  misc_feature (1)..(25): SEQ ID NO: 2554; WAN024CYG_at; Start 130; Stop 154
gcagccttcaaaaaagatcaaatta

SEQ ID NO: 138465 - DNA, 25 bp, Artificial
  probe
  misc_feature (1)..(25): SEQ ID NO: 4965; WAN024CYH_at; Start 68; Stop 92
cttcttcagcttggtttttgtatct

SEQ ID NO: 138466 - DNA, 25 bp, Artificial
  probe
  misc_feature (1)..(25): SEQ ID NO: 4965; WAN024CYH_at; Start 41; Stop 65
tatatttatcagatagcggtttgtc

SEQ ID NO: 138467 - DNA, 25 bp, Artificial
  probe
  misc_feature (1)..(25): SEQ ID NO: 4965; WAN024CYH_at; Start 70; Stop 94
tcttcagcttggtttttgtatctaa

SEQ ID NO: 138468 - DNA, 25 bp, Artificial
  probe
  misc_feature (1)..(25): SEQ ID NO: 4965; WAN024CYH_at; Start 75; Stop 99
agcttggtttttgtatctaactaat

SEQ ID NO: 138469 - DNA, 25 bp, Artificial
  probe
  misc_feature (1)..(25): SEQ ID NO: 4965; WAN024CYH_at; Start 7; Stop 31
gctgcttatgtttttcctaagattt

SEQ ID NO: 138470 - DNA, 25 bp, Artificial
  probe
  misc_feature (1)..(25): SEQ ID NO: 4965; WAN024CYH_at; Start 44; Stop 68
atttatcagatagcggtttgtcttc

SEQ ID NO: 138471 - DNA, 25 bp, Artificial
  probe
  misc_feature (1)..(25): SEQ ID NO: 4965; WAN024CYH_at; Start 56; Stop 80
gcggtttgtcttcttcttcagcttg

SEQ ID NO: 138472 - DNA, 25 bp, Artificial
  probe
  misc_feature (1)..(25): SEQ ID NO: 4965; WAN024CYH_at; Start 53; Stop 77
atagcggtttgtcttcttcttcagc

SEQ ID NO: 138473 - DNA, 25 bp, Artificial
  probe
  misc_feature (1)..(25): SEQ ID NO: 4965; WAN024CYH_at; Start 54; Stop 78
tagcggtttgtcttcttcttcagct

SEQ ID NO: 138474 - DNA, 25 bp, Artificial
  probe
  misc_feature (1)..(25): SEQ ID NO: 4965; WAN024CYH_at; Start 74; Stop 98
cagcttggtttttgtatctaactaa

SEQ ID NO: 138475 - DNA, 25 bp, Artificial
  probe
  misc_feature (1)..(25): SEQ ID NO: 4965; WAN024CYH_at; Start 60; Stop 84
tttgtcttcttcttcagcttggttt

SEQ ID NO: 138476 - DNA, 25 bp, Artificial
  probe
  misc_feature (1)..(25): SEQ ID NO: 4965; WAN024CYH_at; Start 71; Stop 95
cttcagcttggtttttgtatctaac

SEQ ID NO: 138477 - DNA, 25 bp, Artificial
  probe
  misc_feature (1)..(25): SEQ ID NO: 4965; WAN024CYH_at; Start 57; Stop 81
cggtttgtcttcttcttcagcttgg

SEQ ID NO: 138478 - DNA, 25 bp, Artificial
  probe
  misc_feature (1)..(25): SEQ ID NO: 4965; WAN024CYH_at; Start 61; Stop 85
ttgtcttcttcttcagcttggtttt

SEQ ID NO: 138479 - DNA, 25 bp, Artificial
  probe
  misc_feature (1)..(25): SEQ ID NO: 4965; WAN024CYH_at; Start 59; Stop 83
gtttgtcttcttcttcagcttggtt

SEQ ID NO: 138480 - DNA, 25 bp, Artificial
  probe
  misc_feature (1)..(25): SEQ ID NO: 4965; WAN024CYH_at; Start 50; Stop 74
cagatagcggtttgtcttcttcttc

SEQ ID NO: 138481 - DNA, 25 bp, Artificial
  probe
  misc_feature (1)..(25): SEQ ID NO: 4965; WAN024CYH_at; Start 55; Stop 79
agcggtttgtcttcttcttcagctt

SEQ ID NO: 138482 - DNA, 25 bp, Artificial
  probe
  misc_feature (1)..(25): SEQ ID NO: 4965; WAN024CYH_at; Start 4; Stop 28
aaggctgcttatgtttttcctaaga

SEQ ID NO: 138483 - DNA, 25 bp, Artificial
  probe
  misc_feature (1)..(25): SEQ ID NO: 4965; WAN024CYH_at; Start 5; Stop 29
aggctgcttatgtttttcctaagat

SEQ ID NO: 138484 - DNA, 25 bp, Artificial
  probe
  misc_feature (1)..(25): SEQ ID NO: 4965; WAN024CYH_at; Start 48; Stop 72
atcagatagcggtttgtcttcttct

SEQ ID NO: 138485 - DNA, 25 bp, Artificial
  probe
  misc_feature (1)..(25): SEQ ID NO: 4965; WAN024CYH_at; Start 6; Stop 30
ggctgcttatgtttttcctaagatt

SEQ ID NO: 138486 - DNA, 25 bp, Artificial
  probe
  misc_feature (1)..(25): SEQ ID NO: 4965; WAN024CYH_at; Start 39; Stop 63
aatatatttatcagatagcggtttg

SEQ ID NO: 138487 - DNA, 25 bp, Artificial
  probe
  misc_feature (1)..(25): SEQ ID NO: 4965; WAN024CYH_at; Start 3; Stop 27
gaaggctgcttatgtttttcctaag

SEQ ID NO: 138488 - DNA, 25 bp, Artificial
  probe
  misc_feature (1)..(25): SEQ ID NO: 4965; WAN024CYH_at; Start 47; Stop 71
tatcagatagcggtttgtcttcttc

SEQ ID NO: 138489 - DNA, 25 bp, Artificial
  probe
  misc_feature (1)..(25): SEQ ID NO: 4965; WAN024CYH_at; Start 2; Stop 26
tgaaggctgcttatgtttttcctaa

SEQ ID NO: 138490 - DNA, 25 bp, Artificial
  probe
  misc_feature (1)..(25): SEQ ID NO: 4965; WAN024CYH_at; Start 51; Stop 75
agatagcggtttgtcttcttcttca

SEQ ID NO: 138491 - DNA, 25 bp, Artificial
  probe
  misc_feature (1)..(25): SEQ ID NO: 4965; WAN024CYH_at; Start 43; Stop 67
tatttatcagatagcggtttgtctt

SEQ ID NO: 138492 - DNA, 25 bp, Artificial
  probe
  misc_feature (1)..(25): SEQ ID NO: 4965; WAN024CYH_at; Start 65; Stop 89
cttcttcttcagcttggtttttgta

SEQ ID NO: 138493 - DNA, 25 bp, Artificial
  probe
  misc_feature (1)..(25): SEQ ID NO: 4965; WAN024CYH_at; Start 42; Stop 66
atatttatcagatagcggtttgtct

SEQ ID NO: 138494 - DNA, 25 bp, Artificial
  probe
  misc_feature (1)..(25): SEQ ID NO: 4965; WAN024CYH_at; Start 52; Stop 76
gatagcggtttgtcttcttcttcag

SEQ ID NO: 138495 - DNA, 25 bp, Artificial
  probe
  misc_feature (1)..(25): SEQ ID NO: 4965; WAN024CYH_at; Start 49; Stop 73
tcagatagcggtttgtcttcttctt

SEQ ID NO: 138496 - DNA, 25 bp, Artificial
  probe
  misc_feature (1)..(25): SEQ ID NO: 4965; WAN024CYH_at; Start 63; Stop 87
gtcttcttcttcagcttggtttttg

SEQ ID NO: 138497 - DNA, 25 bp, Artificial
  probe
  misc_feature (1)..(25): SEQ ID NO: 4965; WAN024CYH_at; Start 58; Stop 82
ggtttgtcttcttcttcagcttggt

SEQ ID NO: 138498 - DNA, 25 bp, Artificial
  probe
  misc_feature (1)..(25): SEQ ID NO: 4965; WAN024CYH_at; Start 73; Stop 97
tcagcttggtttttgtatctaacta

SEQ ID NO: 138499 - DNA, 25 bp, Artificial
  probe
  misc_feature (1)..(25): SEQ ID NO: 738; WAN024CYI_at; Start 334; Stop 358
cgtggtgtccaagatgataaaggcc

SEQ ID NO: 138500 - DNA, 25 bp, Artificial
  probe
  misc_feature (1)..(25): SEQ ID NO: 738; WAN024CYI_at; Start 348; Stop 372
tgataaaggcccttcgctcgcagct

SEQ ID NO: 138501 - DNA, 25 bp, Artificial
  probe
  misc_feature (1)..(25): SEQ ID NO: 738; WAN024CYI_at; Start 405; Stop 429
tattcagttcaaaaagcgcgtacgc

SEQ ID NO: 138502 - DNA, 25 bp, Artificial
  probe
  misc_feature (1)..(25): SEQ ID NO: 738; WAN024CYI_at; Start 1148; Stop 1172
acagtcctgctatttcatccggtgg

SEQ ID NO: 138503 - DNA, 25 bp, Artificial
  probe
  misc_feature (1)..(25): SEQ ID NO: 738; WAN024CYI_at; Start 311; Stop 335
tcaaagacggctgggtattcggacg

SEQ ID NO: 138504 - DNA, 25 bp, Artificial
  probe
  misc_feature (1)..(25): SEQ ID NO: 738; WAN024CYI_at; Start 270; Stop 294
tgatgaagcagattggcagacaccg

SEQ ID NO: 138505 - DNA, 25 bp, Artificial
  probe
  misc_feature (1)..(25): SEQ ID NO: 738; WAN024CYI_at; Start 594; Stop 618
actagagcttgaagtaggaggcgcc

SEQ ID NO: 138506 - DNA, 25 bp, Artificial
  probe
  misc_feature (1)..(25): SEQ ID NO: 738; WAN024CYI_at; Start 1053; Stop 1077
cgaagagtttgactatctagcgcct

SEQ ID NO: 138507 - DNA, 25 bp, Artificial
  probe
  misc_feature (1)..(25): SEQ ID NO: 738; WAN024CYI_at; Start 209; Stop 233
aaatcggtcagggagcagagcttct

SEQ ID NO: 138508 - DNA, 25 bp, Artificial
  probe
  misc_feature (1)..(25): SEQ ID NO: 738; WAN024CYI_at; Start 725; Stop 749
taacggttctcggagtgccaaagca

SEQ ID NO: 138509 - DNA, 25 bp, Artificial
  probe
  misc_feature (1)..(25): SEQ ID NO: 738; WAN024CYI_at; Start 611; Stop 635
gaggcgcctttaacgttgtaccaga

SEQ ID NO: 138510 - DNA, 25 bp, Artificial
  probe
  misc_feature (1)..(25): SEQ ID NO: 738; WAN024CYI_at; Start 1098; Stop 1122
taaactcgttagcacactgatgcaa

SEQ ID NO: 138511 - DNA, 25 bp, Artificial
  probe
  misc_feature (1)..(25): SEQ ID NO: 738; WAN024CYI_at; Start 534; Stop 558
tctgacctatgctgaaaaagggctt

SEQ ID NO: 138512 - DNA, 25 bp, Artificial
  probe
  misc_feature (1)..(25): SEQ ID NO: 738; WAN024CYI_at; Start 96; Stop 120
tggaacaccttttggacaagcaatc

SEQ ID NO: 138513 - DNA, 25 bp, Artificial
  probe
  misc_feature (1)..(25): SEQ ID NO: 738; WAN024CYI_at; Start 376; Stop 400
tatgcagtaaaaagcttgctggacc

SEQ ID NO: 138514 - DNA, 25 bp, Artificial
  probe
  misc_feature (1)..(25): SEQ ID NO: 738; WAN024CYI_at; Start 627; Stop 651
tgtaccagacaaggccaactaccaa

SEQ ID NO: 138515 - DNA, 25 bp, Artificial
  probe
  misc_feature (1)..(25): SEQ ID NO: 738; WAN024CYI_at; Start 478; Stop 502
tacaataccatcgaagaacaggcca

SEQ ID NO: 138516 - DNA, 25 bp, Artificial
  probe
  misc_feature (1)..(25): SEQ ID NO: 738; WAN024CYI_at; Start 855; Stop 879
tcaagacggcacaggaagacaaatc

SEQ ID NO: 138517 - DNA, 25 bp, Artificial
  probe
  misc_feature (1)..(25): SEQ ID NO: 738; WAN024CYI_at; Start 1195; Stop 1219
ccaaattgtgtagccttcggcgcct

SEQ ID NO: 138518 - DNA, 25 bp, Artificial
  probe
  misc_feature (1)..(25): SEQ ID NO: 738; WAN024CYI_at; Start 1025; Stop 1049
gatgtgcacaaaactaccaactccg

SEQ ID NO: 138519 - DNA, 25 bp, Artificial
  probe
  misc_feature (1)..(25): SEQ ID NO: 738; WAN024CYI_at; Start 1306; Stop 1330
gaagccgtctatcgacttgcaactt

SEQ ID NO: 138520 - DNA, 25 bp, Artificial
  probe
  misc_feature (1)..(25): SEQ ID NO: 738; WAN024CYI_at; Start 193; Stop 217
tattacggatatgcagaaatcggtc

SEQ ID NO: 138521 - DNA, 25 bp, Artificial
  probe
  misc_feature (1)..(25): SEQ ID NO: 738; WAN024CYI_at; Start 80; Stop 104
tcaatgaaggagaaaatggaacacc

SEQ ID NO: 138522 - DNA, 25 bp, Artificial
  probe
  misc_feature (1)..(25): SEQ ID NO: 738; WAN024CYI_at; Start 285; Stop 309
gcagacaccgccatttgaagcaact

SEQ ID NO: 138523 - DNA, 25 bp, Artificial
  probe
  misc_feature (1)..(25): SEQ ID NO: 738; WAN024CYI_at; Start 888; Stop 912
tatagcagatgaaccttctggtcac

SEQ ID NO: 138524 - DNA, 25 bp, Artificial
  probe
  misc_feature (1)..(25): SEQ ID NO: 738; WAN024CYI_at; Start 554; Stop 578
ggcttctacaggtcaaacttcatgg

SEQ ID NO: 138525 - DNA, 25 bp, Artificial
  probe
  misc_feature (1)..(25): SEQ ID NO: 738; WAN024CYI_at; Start 907; Stop 931
ggtcacctatcctttaatgtcgcag

SEQ ID NO: 138526 - DNA, 25 bp, Artificial
  probe
  misc_feature (1)..(25): SEQ ID NO: 738; WAN024CYI_at; Start 461; Stop 485
ggcgctgcatggcacgctacaatac

SEQ ID NO: 138527 - DNA, 25 bp, Artificial
  probe
  misc_feature (1)..(25): SEQ ID NO: 738; WAN024CYI_at; Start 1252; Stop 1276
gcaaatgaatgtgccgttctagaag

SEQ ID NO: 138528 - DNA, 25 bp, Artificial
  probe
  misc_feature (1)..(25): SEQ ID NO: 738; WAN024CYI_at; Start 1271; Stop 1295
tagaagatttgtaccgtgctatgga

SEQ ID NO: 138529 - DNA, 25 bp, Artificial
  probe
  misc_feature (1)..(25): SEQ ID NO: 738; WAN024CYI_at; Start 1290; Stop 1314
tatggatatttatgccgaagccgtc

SEQ ID NO: 138530 - DNA, 25 bp, Artificial
  probe
  misc_feature (1)..(25): SEQ ID NO: 738; WAN024CYI_at; Start 569; Stop 593
aacttcatggccctggatcggatca

SEQ ID NO: 138531 - DNA, 25 bp, Artificial
  probe
  misc_feature (1)..(25): SEQ ID NO: 738; WAN024CYI_at; Start 766; Stop 790
caaggtatcaatgctgtcatccgac

SEQ ID NO: 138532 - DNA, 25 bp, Artificial
  probe
  misc_feature (1)..(25): SEQ ID NO: 738; WAN024CYI_at; Start 840; Stop 864
tgcaacacaagcaggtcaagacggc

SEQ ID NO: 138533 - DNA, 25 bp, Artificial
  probe
  misc_feature (1)..(25): SEQ ID NO: 2038; WAN024CYJ_at; Start 29; Stop 53
aagaatctggtgaacgcttgtacct

SEQ ID NO: 138534 - DNA, 25 bp, Artificial
  probe
  misc_feature (1)..(25): SEQ ID NO: 2038; WAN024CYJ_at; Start 103; Stop 127
tactcaccaaaacttcgcaaacacg

SEQ ID NO: 138535 - DNA, 25 bp, Artificial
  probe
  misc_feature (1)..(25): SEQ ID NO: 2038; WAN024CYJ_at; Start 14; Stop 38
ttacacttgaacacaaagaatctgg

SEQ ID NO: 138536 - DNA, 25 bp, Artificial
  probe
  misc_feature (1)..(25): SEQ ID NO: 2038; WAN024CYJ_at; Start 15; Stop 39
tacacttgaacacaaagaatctggt

SEQ ID NO: 138537 - DNA, 25 bp, Artificial
  probe
  misc_feature (1)..(25): SEQ ID NO: 2038; WAN024CYJ_at; Start 86; Stop 110
gccttcaattgaagaaatactcacc

SEQ ID NO: 138538 - DNA, 25 bp, Artificial
  probe
  misc_feature (1)..(25): SEQ ID NO: 2038; WAN024CYJ_at; Start 17; Stop 41
cacttgaacacaaagaatctggtga

SEQ ID NO: 138539 - DNA, 25 bp, Artificial
  probe
  misc_feature (1)..(25): SEQ ID NO: 2038; WAN024CYJ_at; Start 95; Stop 119
tgaagaaatactcaccaaaacttcg

SEQ ID NO: 138540 - DNA, 25 bp, Artificial
  probe
  misc_feature (1)..(25): SEQ ID NO: 2038; WAN024CYJ_at; Start 24; Stop 48
acacaaagaatctggtgaacgcttg

SEQ ID NO: 138541 - DNA, 25 bp, Artificial
  probe
  misc_feature (1)..(25): SEQ ID NO: 2038; WAN024CYJ_at; Start 71; Stop 95
gtaacactccagaccgccttcaatt

SEQ ID NO: 138542 - DNA, 25 bp, Artificial
  probe
  misc_feature (1)..(25): SEQ ID NO: 2038; WAN024CYJ_at; Start 34; Stop 58
tctggtgaacgcttgtaccttactt

SEQ ID NO: 138543 - DNA, 25 bp, Artificial
  probe
  misc_feature (1)..(25): SEQ ID NO: 2038; WAN024CYJ_at; Start 39; Stop 63
tgaacgcttgtaccttacttctaaa

SEQ ID NO: 138544 - DNA, 25 bp, Artificial
  probe
  misc_feature (1)..(25): SEQ ID NO: 2038; WAN024CYJ_at; Start 91; Stop 115
caattgaagaaatactcaccaaaac

SEQ ID NO: 138545 - DNA, 25 bp, Artificial
  probe
  misc_feature (1)..(25): SEQ ID NO: 2038; WAN024CYJ_at; Start 80; Stop 104
cagaccgccttcaattgaagaaata

SEQ ID NO: 138546 - DNA, 25 bp, Artificial
  probe
  misc_feature (1)..(25): SEQ ID NO: 2038; WAN024CYJ_at; Start 114; Stop 138
acttcgcaaacacgttgtgtttaca

SEQ ID NO: 138547 - DNA, 25 bp, Artificial
  probe
  misc_feature (1)..(25): SEQ ID NO: 2038; WAN024CYJ_at; Start 82; Stop 106
gaccgccttcaattgaagaaatact

SEQ ID NO: 138548 - DNA, 25 bp, Artificial
  probe
  misc_feature (1)..(25): SEQ ID NO: 2038; WAN024CYJ_at; Start 2; Stop 26
tgcgcgtaaatattacacttgaaca

SEQ ID NO: 138549 - DNA, 25 bp, Artificial
  probe
  misc_feature (1)..(25): SEQ ID NO: 2038; WAN024CYJ_at; Start 97; Stop 121
aagaaatactcaccaaaacttcgca

SEQ ID NO: 138550 - DNA, 25 bp, Artificial
  probe
  misc_feature (1)..(25): SEQ ID NO: 2038; WAN024CYJ_at; Start 5; Stop 29
gcgtaaatattacacttgaacacaa

SEQ ID NO: 138551 - DNA, 25 bp, Artificial
  probe
  misc_feature (1)..(25): SEQ ID NO: 2038; WAN024CYJ_at; Start 106; Stop 130
tcaccaaaacttcgcaaacacgttg

SEQ ID NO: 138552 - DNA, 25 bp, Artificial
  probe
  misc_feature (1)..(25): SEQ ID NO: 2038; WAN024CYJ_at; Start 37; Stop 61
ggtgaacgcttgtaccttacttcta

SEQ ID NO: 138553 - DNA, 25 bp, Artificial
  probe
  misc_feature (1)..(25): SEQ ID NO: 2038; WAN024CYJ_at; Start 110; Stop 134
caaaacttcgcaaacacgttgtgtt

SEQ ID NO: 138554 - DNA, 25 bp, Artificial
  probe
  misc_feature (1)..(25): SEQ ID NO: 2038; WAN024CYJ_at; Start 108; Stop 132
accaaaacttcgcaaacacgttgtg

SEQ ID NO: 138555 - DNA, 25 bp, Artificial
  probe
  misc_feature (1)..(25): SEQ ID NO: 2038; WAN024CYJ_at; Start 87; Stop 111
ccttcaattgaagaaatactcacca

SEQ ID NO: 138556 - DNA, 25 bp, Artificial
  probe
  misc_feature (1)..(25): SEQ ID NO: 2038; WAN024CYJ_at; Start 76; Stop 100
actccagaccgccttcaattgaaga

SEQ ID NO: 138557 - DNA, 25 bp, Artificial
  probe
  misc_feature (1)..(25): SEQ ID NO: 2038; WAN024CYJ_at; Start 27; Stop 51
caaagaatctggtgaacgcttgtac

SEQ ID NO: 138558 - DNA, 25 bp, Artificial
  probe
  misc_feature (1)..(25): SEQ ID NO: 2038; WAN024CYJ_at; Start 28; Stop 52
aaagaatctggtgaacgcttgtacc

SEQ ID NO: 138559 - DNA, 25 bp, Artificial
  probe
  misc_feature (1)..(25): SEQ ID NO: 2038; WAN024CYJ_at; Start 116; Stop 140
ttcgcaaacacgttgtgtttacaga

SEQ ID NO: 138560 - DNA, 25 bp, Artificial
  probe
  misc_feature (1)..(25): SEQ ID NO: 2038; WAN024CYJ_at; Start 7; Stop 31
gtaaatattacacttgaacacaaag

SEQ ID NO: 138561 - DNA, 25 bp, Artificial
  probe
  misc_feature (1)..(25): SEQ ID NO: 2038; WAN024CYJ_at; Start 99; Stop 123
gaaatactcaccaaaacttcgcaaa

SEQ ID NO: 138562 - DNA, 25 bp, Artificial
  probe
  misc_feature (1)..(25): SEQ ID NO: 2038; WAN024CYJ_at; Start 22; Stop 46
gaacacaaagaatctggtgaacgct

SEQ ID NO: 138563 - DNA, 25 bp, Artificial
  probe
  misc_feature (1)..(25): SEQ ID NO: 2038; WAN024CYJ_at; Start 31; Stop 55
gaatctggtgaacgcttgtacctta

SEQ ID NO: 138564 - DNA, 25 bp, Artificial
  probe
  misc_feature (1)..(25): SEQ ID NO: 2038; WAN024CYJ_at; Start 72; Stop 96
taacactccagaccgccttcaattg

SEQ ID NO: 138565 - DNA, 25 bp, Artificial
  probe
  misc_feature (1)..(25): SEQ ID NO: 2038; WAN024CYJ_at; Start 21; Stop 45
tgaacacaaagaatctggtgaacgc

SEQ ID NO: 138566 - DNA, 25 bp, Artificial
  probe
  misc_feature (1)..(25): SEQ ID NO: 2038; WAN024CYJ_at; Start 78; Stop 102
tccagaccgccttcaattgaagaaa

SEQ ID NO: 138567 - DNA, 25 bp, Artificial
  probe
  misc_feature (1)..(25): SEQ ID NO: 2433; WAN024CYK_at; Start 128; Stop 152
cacttaaaggatactacaaaggacg

SEQ ID NO: 138568 - DNA, 25 bp, Artificial
  probe
  misc_feature (1)..(25): SEQ ID NO: 2433; WAN024CYK_at; Start 48; Stop 72
tcgtacacactacaaagtaacagct

SEQ ID NO: 138569 - DNA, 25 bp, Artificial
  probe
  misc_feature (1)..(25): SEQ ID NO: 2433; WAN024CYK_at; Start 73; Stop 97
ccatctgtaaactttgacgaaacta

SEQ ID NO: 138570 - DNA, 25 bp, Artificial
  probe
  misc_feature (1)..(25): SEQ ID NO: 2433; WAN024CYK_at; Start 106; Stop 130
tactcacgttctcaccgtgtatcac

SEQ ID NO: 138571 - DNA, 25 bp, Artificial
  probe
  misc_feature (1)..(25): SEQ ID NO: 2433; WAN024CYK_at; Start 113; Stop 137
gttctcaccgtgtatcacttaaagg

SEQ ID NO: 138572 - DNA, 25 bp, Artificial
  probe
  misc_feature (1)..(25): SEQ ID NO: 2433; WAN024CYK_at; Start 40; Stop 64
aacaaacgtcgtacacactacaaag

SEQ ID NO: 138573 - DNA, 25 bp, Artificial
  probe
  misc_feature (1)..(25): SEQ ID NO: 2433; WAN024CYK_at; Start 55; Stop 79
cactacaaagtaacagctccatctg

SEQ ID NO: 138574 - DNA, 25 bp, Artificial
  probe
  misc_feature (1)..(25): SEQ ID NO: 2433; WAN024CYK_at; Start 19; Stop 43
cgcacttcaaaagcgaagaaaaaca

SEQ ID NO: 138575 - DNA, 25 bp, Artificial
  probe
  misc_feature (1)..(25): SEQ ID NO: 2433; WAN024CYK_at; Start 1; Stop 25
atggcagtacctgcacgtcgcactt

SEQ ID NO: 138576 - DNA, 25 bp, Artificial
  probe
  misc_feature (1)..(25): SEQ ID NO: 2433; WAN024CYK_at; Start 101; Stop 125
gagattactcacgttctcaccgtgt

SEQ ID NO: 138577 - DNA, 25 bp, Artificial
  probe
  misc_feature (1)..(25): SEQ ID NO: 2433; WAN024CYK_at; Start 60; Stop 84
caaagtaacagctccatctgtaaac

SEQ ID NO: 138578 - DNA, 25 bp, Artificial
  probe
  misc_feature (1)..(25): SEQ ID NO: 2433; WAN024CYK_at; Start 77; Stop 101
ctgtaaactttgacgaaactactgg

SEQ ID NO: 138579 - DNA, 25 bp, Artificial
  probe
  misc_feature (1)..(25): SEQ ID NO: 2433; WAN024CYK_at; Start 4; Stop 28
gcagtacctgcacgtcgcacttcaa

SEQ ID NO: 138580 - DNA, 25 bp, Artificial
  probe
  misc_feature (1)..(25): SEQ ID NO: 2433; WAN024CYK_at; Start 125; Stop 149
tatcacttaaaggatactacaaagg

SEQ ID NO: 138581 - DNA, 25 bp, Artificial
  probe
  misc_feature (1)..(25): SEQ ID NO: 2433; WAN024CYK_at; Start 46; Stop 70
cgtcgtacacactacaaagtaacag

SEQ ID NO: 138582 - DNA, 25 bp, Artificial
  probe
  misc_feature (1)..(25): SEQ ID NO: 2433; WAN024CYK_at; Start 68; Stop 92
cagctccatctgtaaactttgacga

SEQ ID NO: 138583 - DNA, 25 bp, Artificial
  probe
  misc_feature (1)..(25): SEQ ID NO: 2433; WAN024CYK_at; Start 117; Stop 141
tcaccgtgtatcacttaaaggatac

SEQ ID NO: 138584 - DNA, 25 bp, Artificial
  probe
  misc_feature (1)..(25): SEQ ID NO: 2433; WAN024CYK_at; Start 7; Stop 31
gtacctgcacgtcgcacttcaaaag

SEQ ID NO: 138585 - DNA, 25 bp, Artificial
  probe
  misc_feature (1)..(25): SEQ ID NO: 2433; WAN024CYK_at; Start 14; Stop 38
cacgtcgcacttcaaaagcgaagaa

SEQ ID NO: 138586 - DNA, 25 bp, Artificial
  probe
  misc_feature (1)..(25): SEQ ID NO: 2433; WAN024CYK_at; Start 91; Stop 115
gaaactactggagattactcacgtt

SEQ ID NO: 138587 - DNA, 25 bp, Artificial
  probe
  misc_feature (1)..(25): SEQ ID NO: 2433; WAN024CYK_at; Start 16; Stop 40
cgtcgcacttcaaaagcgaagaaaa

SEQ ID NO: 138588 - DNA, 25 bp, Artificial
  probe
  misc_feature (1)..(25): SEQ ID NO: 2433; WAN024CYK_at; Start 115; Stop 139
tctcaccgtgtatcacttaaaggat

SEQ ID NO: 138589 - DNA, 25 bp, Artificial
  probe
  misc_feature (1)..(25): SEQ ID NO: 2433; WAN024CYK_at; Start 80; Stop 104
taaactttgacgaaactactggaga

SEQ ID NO: 138590 - DNA, 25 bp, Artificial
  probe
  misc_feature (1)..(25): SEQ ID NO: 2433; WAN024CYK_at; Start 64; Stop 88
gtaacagctccatctgtaaactttg

SEQ ID NO: 138591 - DNA, 25 bp, Artificial
  probe
  misc_feature (1)..(25): SEQ ID NO: 2433; WAN024CYK_at; Start 42; Stop 66
caaacgtcgtacacactacaaagta

SEQ ID NO: 138592 - DNA, 25 bp, Artificial
  probe
  misc_feature (1)..(25): SEQ ID NO: 2433; WAN024CYK_at; Start 88; Stop 112
gacgaaactactggagattactcac

SEQ ID NO: 138593 - DNA, 25 bp, Artificial
  probe
  misc_feature (1)..(25): SEQ ID NO: 2433; WAN024CYK_at; Start 99; Stop 123
tggagattactcacgttctcaccgt

SEQ ID NO: 138594 - DNA, 25 bp, Artificial
  probe
  misc_feature (1)..(25): SEQ ID NO: 2433; WAN024CYK_at; Start 96; Stop 120
tactggagattactcacgttctcac

SEQ ID NO: 138595 - DNA, 25 bp, Artificial
  probe
  misc_feature (1)..(25): SEQ ID NO: 2433; WAN024CYK_at; Start 103; Stop 127
gattactcacgttctcaccgtgtat

SEQ ID NO: 138596 - DNA, 25 bp, Artificial
  probe
  misc_feature (1)..(25): SEQ ID NO: 2433; WAN024CYK_at; Start 70; Stop 94
gctccatctgtaaactttgacgaaa

SEQ ID NO: 138597 - DNA, 25 bp, Artificial
  probe
  misc_feature (1)..(25): SEQ ID NO: 2433; WAN024CYK_at; Start 51; Stop 75
tacacactacaaagtaacagctcca

SEQ ID NO: 138598 - DNA, 25 bp, Artificial
  probe
  misc_feature (1)..(25): SEQ ID NO: 2433; WAN024CYK_at; Start 161; Stop 185
ctaaagctgcatcagctgaataact

SEQ ID NO: 138599 - DNA, 25 bp, Artificial
  probe
  misc_feature (1)..(25): SEQ ID NO: 2433; WAN024CYK_at; Start 12; Stop 36
tgcacgtcgcacttcaaaagcgaag

SEQ ID NO: 138600 - DNA, 25 bp, Artificial
  probe
  misc_feature (1)..(25): SEQ ID NO: 2433; WAN024CYK_at; Start 84; Stop 108
ctttgacgaaactactggagattac

SEQ ID NO: 138601 - DNA, 25 bp, Artificial
  probe
  misc_feature (1)..(25): SEQ ID NO: 2508; WAN024CYL_at; Start 42; Stop 66
aacaaagttatacgctgcactcgca

SEQ ID NO: 138602 - DNA, 25 bp, Artificial
  probe
  misc_feature (1)..(25): SEQ ID NO: 2508; WAN024CYL_at; Start 122; Stop 146
cagagtgtgtcaagcaacggaagaa

SEQ ID NO: 138603 - DNA, 25 bp, Artificial
  probe
  misc_feature (1)..(25): SEQ ID NO: 2508; WAN024CYL_at; Start 40; Stop 64
tcaacaaagttatacgctgcactcg

SEQ ID NO: 138604 - DNA, 25 bp, Artificial
  probe
  misc_feature (1)..(25): SEQ ID NO: 2508; WAN024CYL_at; Start 141; Stop 165
gaagaaagacggaaaatacgtatca

SEQ ID NO: 138605 - DNA, 25 bp, Artificial
  probe
  misc_feature (1)..(25): SEQ ID NO: 2508; WAN024CYL_at; Start 116; Stop 140
tcctcacagagtgtgtcaagcaacg

SEQ ID NO: 138606 - DNA, 25 bp, Artificial
  probe
  misc_feature (1)..(25): SEQ ID NO: 2508; WAN024CYL_at; Start 148; Stop 172
gacggaaaatacgtatcagaaacca

SEQ ID NO: 138607 - DNA, 25 bp, Artificial
  probe
  misc_feature (1)..(25): SEQ ID NO: 2508; WAN024CYL_at; Start 63; Stop 87
cgcatcatgggcagaagacgacttt

SEQ ID NO: 138608 - DNA, 25 bp, Artificial
  probe
  misc_feature (1)..(25): SEQ ID NO: 2508; WAN024CYL_at; Start 112; Stop 136
tatctcctcacagagtgtgtcaagc

SEQ ID NO: 138609 - DNA, 25 bp, Artificial
  probe
  misc_feature (1)..(25): SEQ ID NO: 2508; WAN024CYL_at; Start 35; Stop 59
gactctcaacaaagttatacgctgc

SEQ ID NO: 138610 - DNA, 25 bp, Artificial
  probe
  misc_feature (1)..(25): SEQ ID NO: 2508; WAN024CYL_at; Start 57; Stop 81
tgcactcgcatcatgggcagaagac

SEQ ID NO: 138611 - DNA, 25 bp, Artificial
  probe
  misc_feature (1)..(25): SEQ ID NO: 2508; WAN024CYL_at; Start 161; Stop 185
tatcagaaaccattgacgaaccatt

SEQ ID NO: 138612 - DNA, 25 bp, Artificial
  probe
  misc_feature (1)..(25): SEQ ID NO: 2508; WAN024CYL_at; Start 71; Stop 95
gggcagaagacgactttcgttcagt

SEQ ID NO: 138613 - DNA, 25 bp, Artificial
  probe
  misc_feature (1)..(25): SEQ ID NO: 2508; WAN024CYL_at; Start 109; Stop 133
gaatatctcctcacagagtgtgtca

SEQ ID NO: 138614 - DNA, 25 bp, Artificial
  probe
  misc_feature (1)..(25): SEQ ID NO: 2508; WAN024CYL_at; Start 28; Stop 52
ccccttcgactctcaacaaagttat

SEQ ID NO: 138615 - DNA, 25 bp, Artificial
  probe
  misc_feature (1)..(25): SEQ ID NO: 2508; WAN024CYL_at; Start 166; Stop 190
gaaaccattgacgaaccatttgaga

SEQ ID NO: 138616 - DNA, 25 bp, Artificial
  probe
  misc_feature (1)..(25): SEQ ID NO: 2508; WAN024CYL_at; Start 59; Stop 83
cactcgcatcatgggcagaagacga

SEQ ID NO: 138617 - DNA, 25 bp, Artificial
  probe
  misc_feature (1)..(25): SEQ ID NO: 2508; WAN024CYL_at; Start 77; Stop 101
aagacgactttcgttcagtcaatgg

SEQ ID NO: 138618 - DNA, 25 bp, Artificial
  probe
  misc_feature (1)..(25): SEQ ID NO: 2508; WAN024CYL_at; Start 131; Stop 155
tcaagcaacggaagaaagacggaaa

SEQ ID NO: 138619 - DNA, 25 bp, Artificial
  probe
  misc_feature (1)..(25): SEQ ID NO: 2508; WAN024CYL_at; Start 54; Stop 78
cgctgcactcgcatcatgggcagaa

SEQ ID NO: 138620 - DNA, 25 bp, Artificial
  probe
  misc_feature (1)..(25): SEQ ID NO: 2508; WAN024CYL_at; Start 50; Stop 74
tatacgctgcactcgcatcatgggc

SEQ ID NO: 138621 - DNA, 25 bp, Artificial
  probe
  misc_feature (1)..(25): SEQ ID NO: 2508; WAN024CYL_at; Start 45; Stop 69
aaagttatacgctgcactcgcatca

SEQ ID NO: 138622 - DNA, 25 bp, Artificial
  probe
  misc_feature (1)..(25): SEQ ID NO: 2508; WAN024CYL_at; Start 65; Stop 89
catcatgggcagaagacgactttcg

SEQ ID NO: 138623 - DNA, 25 bp, Artificial
  probe
  misc_feature (1)..(25): SEQ ID NO: 2508; WAN024CYL_at; Start 120; Stop 144
cacagagtgtgtcaagcaacggaag

SEQ ID NO: 138624 - DNA, 25 bp, Artificial
  probe
  misc_feature (1)..(25): SEQ ID NO: 2508; WAN024CYL_at; Start 151; Stop 175
ggaaaatacgtatcagaaaccattg

SEQ ID NO: 138625 - DNA, 25 bp, Artificial
  probe
  misc_feature (1)..(25): SEQ ID NO: 2508; WAN024CYL_at; Start 48; Stop 72
gttatacgctgcactcgcatcatgg

SEQ ID NO: 138626 - DNA, 25 bp, Artificial
  probe
  misc_feature (1)..(25): SEQ ID NO: 2508; WAN024CYL_at; Start 170; Stop 194
ccattgacgaaccatttgagattga

SEQ ID NO: 138627 - DNA, 25 bp, Artificial
  probe
  misc_feature (1)..(25): SEQ ID NO: 2508; WAN024CYL_at; Start 74; Stop 98
cagaagacgactttcgttcagtcaa

SEQ ID NO: 138628 - DNA, 25 bp, Artificial
  probe
  misc_feature (1)..(25): SEQ ID NO: 2508; WAN024CYL_at; Start 68; Stop 92
catgggcagaagacgactttcgttc

SEQ ID NO: 138629 - DNA, 25 bp, Artificial
  probe
  misc_feature (1)..(25): SEQ ID NO: 2508; WAN024CYL_at; Start 103; Stop 127
caaatcgaatatctcctcacagagt

SEQ ID NO: 138630 - DNA, 25 bp, Artificial
  probe
  misc_feature (1)..(25): SEQ ID NO: 2508; WAN024CYL_at; Start 107; Stop 131
tcgaatatctcctcacagagtgtgt

SEQ ID NO: 138631 - DNA, 25 bp, Artificial
  probe
  misc_feature (1)..(25): SEQ ID NO: 2508; WAN024CYL_at; Start 127; Stop 151
tgtgtcaagcaacggaagaaagacg

SEQ ID NO: 138632 - DNA, 25 bp, Artificial
  probe
  misc_feature (1)..(25): SEQ ID NO: 2508; WAN024CYL_at; Start 177; Stop 201
cgaaccatttgagattgatatttaa

SEQ ID NO: 138633 - DNA, 25 bp, Artificial
  probe
  misc_feature (1)..(25): SEQ ID NO: 2508; WAN024CYL_at; Start 157; Stop 181
tacgtatcagaaaccattgacgaac

SEQ ID NO: 138634 - DNA, 25 bp, Artificial
  probe
  misc_feature (1)..(25): SEQ ID NO: 2508; WAN024CYL_at; Start 181; Stop 205
ccatttgagattgatatttaactaa

SEQ ID NO: 138635 - DNA, 25 bp, Artificial
  probe
  misc_feature (1)..(25): SEQ ID NO: 2978; WAN024CYM_at; Start 130; Stop 154
gcagatccaaatgcagctgatattt

SEQ ID NO: 138636 - DNA, 25 bp, Artificial
  probe
  misc_feature (1)..(25): SEQ ID NO: 2978; WAN024CYM_at; Start 87; Stop 111
gaatgtttcggatgtagaagttgaa

SEQ ID NO: 138637 - DNA, 25 bp, Artificial
  probe
  misc_feature (1)..(25): SEQ ID NO: 2978; WAN024CYM_at; Start 115; Stop 139
tatgatttaggtggagcagatccaa

SEQ ID NO: 138638 - DNA, 25 bp, Artificial
  probe
  misc_feature (1)..(25): SEQ ID NO: 2978; WAN024CYM_at; Start 17; Stop 41
cagcttgtggttcaggattaggttc

SEQ ID NO: 138639 - DNA, 25 bp, Artificial
  probe
  misc_feature (1)..(25): SEQ ID NO: 2978; WAN024CYM_at; Start 48; Stop 72
tatggtacagatgaatattgaatct

SEQ ID NO: 138640 - DNA, 25 bp, Artificial
  probe
  misc_feature (1)..(25): SEQ ID NO: 2978; WAN024CYM_at; Start 13; Stop 37
ggtacagcttgtggttcaggattag

SEQ ID NO: 138641 - DNA, 25 bp, Artificial
  probe
  misc_feature (1)..(25): SEQ ID NO: 2978; WAN024CYM_at; Start 126; Stop 150
tggagcagatccaaatgcagctgat

SEQ ID NO: 138642 - DNA, 25 bp, Artificial
  probe
  misc_feature (1)..(25): SEQ ID NO: 2978; WAN024CYM_at; Start 143; Stop 167
cagctgatatttggattgttggtcg

SEQ ID NO: 138643 - DNA, 25 bp, Artificial
  probe
  misc_feature (1)..(25): SEQ ID NO: 2978; WAN024CYM_at; Start 59; Stop 83
tgaatattgaatctgtattgagtga

SEQ ID NO: 138644 - DNA, 25 bp, Artificial
  probe
  misc_feature (1)..(25): SEQ ID NO: 2978; WAN024CYM_at; Start 166; Stop 190
cgtgatctagctgattcagctagtc

SEQ ID NO: 138645 - DNA, 25 bp, Artificial
  probe
  misc_feature (1)..(25): SEQ ID NO: 2978; WAN024CYM_at; Start 109; Stop 133
gaacattatgatttaggtggagcag

SEQ ID NO: 138646 - DNA, 25 bp, Artificial
  probe
  misc_feature (1)..(25): SEQ ID NO: 2978; WAN024CYM_at; Start 152; Stop 176
tttggattgttggtcgtgatctagc

SEQ ID NO: 138647 - DNA, 25 bp, Artificial
  probe
  misc_feature (1)..(25): SEQ ID NO: 2978; WAN024CYM_at; Start 219; Stop 243
tattattgatatggatgaactacga

SEQ ID NO: 138648 - DNA, 25 bp, Artificial
  probe
  misc_feature (1)..(25): SEQ ID NO: 2978; WAN024CYM_at; Start 74; Stop 98
tattgagtgatttgaatgtttcgga

SEQ ID NO: 138649 - DNA, 25 bp, Artificial
  probe
  misc_feature (1)..(25): SEQ ID NO: 2978; WAN024CYM_at; Start 41; Stop 65
caagttttatggtacagatgaatat

SEQ ID NO: 138650 - DNA, 25 bp, Artificial
  probe
  misc_feature (1)..(25): SEQ ID NO: 2978; WAN024CYM_at; Start 190; Stop 214
catcttggagatgttcgtatcttaa

SEQ ID NO: 138651 - DNA, 25 bp, Artificial
  probe
  misc_feature (1)..(25): SEQ ID NO: 2978; WAN024CYM_at; Start 196; Stop 220
ggagatgttcgtatcttaaatagta

SEQ ID NO: 138652 - DNA, 25 bp, Artificial
  probe
  misc_feature (1)..(25): SEQ ID NO: 2978; WAN024CYM_at; Start 2; Stop 26
tgttaaaaattggtacagcttgtgg

SEQ ID NO: 138653 - DNA, 25 bp, Artificial
  probe
  misc_feature (1)..(25): SEQ ID NO: 2978; WAN024CYM_at; Start 222; Stop 246
tattgatatggatgaactacgagaa

SEQ ID NO: 138654 - DNA, 25 bp, Artificial
  probe
  misc_feature (1)..(25): SEQ ID NO: 2978; WAN024CYM_at; Start 226; Stop 250
gatatggatgaactacgagaattaa

SEQ ID NO: 138655 - DNA, 25 bp, Artificial
  probe
  misc_feature (1)..(25): SEQ ID NO: 2978; WAN024CYM_at; Start 241; Stop 265
cgagaattaattactaaactttgtg

SEQ ID NO: 138656 - DNA, 25 bp, Artificial
  probe
  misc_feature (1)..(25): SEQ ID NO: 2978; WAN024CYM_at; Start 112; Stop 136
cattatgatttaggtggagcagatc

SEQ ID NO: 138657 - DNA, 25 bp, Artificial
  probe
  misc_feature (1)..(25): SEQ ID NO: 2978; WAN024CYM_at; Start 159; Stop 183
tgttggtcgtgatctagctgattca

SEQ ID NO: 138658 - DNA, 25 bp, Artificial
  probe
  misc_feature (1)..(25): SEQ ID NO: 2978; WAN024CYM_at; Start 122; Stop 146
taggtggagcagatccaaatgcagc

SEQ ID NO: 138659 - DNA, 25 bp, Artificial
  probe
  misc_feature (1)..(25): SEQ ID NO: 2978; WAN024CYM_at; Start 162; Stop 186
tggtcgtgatctagctgattcagct

SEQ ID NO: 138660 - DNA, 25 bp, Artificial
  probe
  misc_feature (1)..(25): SEQ ID NO: 2978; WAN024CYM_at; Start 8; Stop 32
aaattggtacagcttgtggttcagg

SEQ ID NO: 138661 - DNA, 25 bp, Artificial
  probe
  misc_feature (1)..(25): SEQ ID NO: 2978; WAN024CYM_at; Start 22; Stop 46
tgtggttcaggattaggttcaagtt

SEQ ID NO: 138662 - DNA, 25 bp, Artificial
  probe
  misc_feature (1)..(25): SEQ ID NO: 2978; WAN024CYM_at; Start 128; Stop 152
gagcagatccaaatgcagctgatat

SEQ ID NO: 138663 - DNA, 25 bp, Artificial
  probe
  misc_feature (1)..(25): SEQ ID NO: 2978; WAN024CYM_at; Start 155; Stop 179
ggattgttggtcgtgatctagctga

SEQ ID NO: 138664 - DNA, 25 bp, Artificial
  probe
  misc_feature (1)..(25): SEQ ID NO: 2978; WAN024CYM_at; Start 231; Stop 255
ggatgaactacgagaattaattact

SEQ ID NO: 138665 - DNA, 25 bp, Artificial
  probe
  misc_feature (1)..(25): SEQ ID NO: 2978; WAN024CYM_at; Start 182; Stop 206
cagctagtcatcttggagatgttcg

SEQ ID NO: 138666 - DNA, 25 bp, Artificial
  probe
  misc_feature (1)..(25): SEQ ID NO: 2978; WAN024CYM_at; Start 35; Stop 59
taggttcaagttttatggtacagat

SEQ ID NO: 138667 - DNA, 25 bp, Artificial
  probe
  misc_feature (1)..(25): SEQ ID NO: 2978; WAN024CYM_at; Start 259; Stop 283
ctttgtgaagaaaaaggacttatat

SEQ ID NO: 138668 - DNA, 25 bp, Artificial
  probe
  misc_feature (1)..(25): SEQ ID NO: 2978; WAN024CYM_at; Start 28; Stop 52
tcaggattaggttcaagttttatgg

SEQ ID NO: 138669 - DNA, 25 bp, Artificial
  probe
  misc_feature (1)..(25): SEQ ID NO: 1870; WAN024CYN_at; Start 470; Stop 494
gacaatgttgggaggctatacagtt

SEQ ID NO: 138670 - DNA, 25 bp, Artificial
  probe
  misc_feature (1)..(25): SEQ ID NO: 1870; WAN024CYN_at; Start 308; Stop 332
taccgtctcatcctgatagaaatct

SEQ ID NO: 138671 - DNA, 25 bp, Artificial
  probe
  misc_feature (1)..(25): SEQ ID NO: 1870; WAN024CYN_at; Start 293; Stop 317
caaatggaaccaaattaccgtctca

SEQ ID NO: 138672 - DNA, 25 bp, Artificial
  probe
  misc_feature (1)..(25): SEQ ID NO: 1870; WAN024CYN_at; Start 667; Stop 691
gggattgtccaattaaaacagtcaa

SEQ ID NO: 138673 - DNA, 25 bp, Artificial
  probe
  misc_feature (1)..(25): SEQ ID NO: 1870; WAN024CYN_at; Start 774; Stop 798
tcatcttcgccctactgtagaggag

SEQ ID NO: 138674 - DNA, 25 bp, Artificial
  probe
  misc_feature (1)..(25): SEQ ID NO: 1870; WAN024CYN_at; Start 579; Stop 603
taatccaggtgatttcgtagaaaaa

SEQ ID NO: 138675 - DNA, 25 bp, Artificial
  probe
  misc_feature (1)..(25): SEQ ID NO: 1870; WAN024CYN_at; Start 566; Stop 590
caaaggatatttgtaatccaggtga

SEQ ID NO: 138676 - DNA, 25 bp, Artificial
  probe
  misc_feature (1)..(25): SEQ ID NO: 1870; WAN024CYN_at; Start 701; Stop 725
cacctaagtgcattgtattagatac

SEQ ID NO: 138677 - DNA, 25 bp, Artificial
  probe
  misc_feature (1)..(25): SEQ ID NO: 1870; WAN024CYN_at; Start 653; Stop 677
gagaaatttatgaagggattgtcca

SEQ ID NO: 138678 - DNA, 25 bp, Artificial
  probe
  misc_feature (1)..(25): SEQ ID NO: 1870; WAN024CYN_at; Start 830; Stop 854
taagtcaggaattggaggaaacaga

SEQ ID NO: 138679 - DNA, 25 bp, Artificial
  probe
  misc_feature (1)..(25): SEQ ID NO: 1870; WAN024CYN_at; Start 623; Stop 647
aatccattagggtcaagggttcaga

SEQ ID NO: 138680 - DNA, 25 bp, Artificial
  probe
  misc_feature (1)..(25): SEQ ID NO: 1870; WAN024CYN_at; Start 370; Stop 394
caaggaattagtgttgcaactggac

SEQ ID NO: 138681 - DNA, 25 bp, Artificial
  probe
  misc_feature (1)..(25): SEQ ID NO: 1870; WAN024CYN_at; Start 486; Stop 510
tatacagtttgcttctcatcaacag

SEQ ID NO: 138682 - DNA, 25 bp, Artificial
  probe
  misc_feature (1)..(25): SEQ ID NO: 1870; WAN024CYN_at; Start 146; Stop 170
gtgaaataatgccaatgactccaga

SEQ ID NO: 138683 - DNA, 25 bp, Artificial
  probe
  misc_feature (1)..(25): SEQ ID NO: 1870; WAN024CYN_at; Start 439; Stop 463
gctattgttggagatggtgagttaa

SEQ ID NO: 138684 - DNA, 25 bp, Artificial
  probe
  misc_feature (1)..(25): SEQ ID NO: 1870; WAN024CYN_at; Start 97; Stop 121
cattacggaggaagtctgtctatcg

SEQ ID NO: 138685 - DNA, 25 bp, Artificial
  probe
  misc_feature (1)..(25): SEQ ID NO: 1870; WAN024CYN_at; Start 221; Stop 245
gaggaccagctctatacagtacact

SEQ ID NO: 138686 - DNA, 25 bp, Artificial
  probe
  misc_feature (1)..(25): SEQ ID NO: 1870; WAN024CYN_at; Start 35; Stop 59
gaaaatttgcgactaacatccgatt

SEQ ID NO: 138687 - DNA, 25 bp, Artificial
  probe
  misc_feature (1)..(25): SEQ ID NO: 1870; WAN024CYN_at; Start 402; Stop 426
tggtcagagaataagaaagagtccc

SEQ ID NO: 138688 - DNA, 25 bp, Artificial
  probe
  misc_feature (1)..(25): SEQ ID NO: 1870; WAN024CYN_at; Start 235; Stop 259
tacagtacactctatttgaatggtt

SEQ ID NO: 138689 - DNA, 25 bp, Artificial
  probe
  misc_feature (1)..(25): SEQ ID NO: 1870; WAN024CYN_at; Start 353; Stop 377
caacgggctctttaggacaaggaat

SEQ ID NO: 138690 - DNA, 25 bp, Artificial
  probe
  misc_feature (1)..(25): SEQ ID NO: 1870; WAN024CYN_at; Start 716; Stop 740
tattagatactattaaaggtcaagg

SEQ ID NO: 138691 - DNA, 25 bp, Artificial
  probe
  misc_feature (1)..(25): SEQ ID NO: 1870; WAN024CYN_at; Start 322; Stop 346
gatagaaatctaacgccaggcatag

SEQ ID NO: 138692 - DNA, 25 bp, Artificial
  probe
  misc_feature (1)..(25): SEQ ID NO: 1870; WAN024CYN_at; Start 66; Stop 90
tcttagaacattgaatcatcttgga

SEQ ID NO: 138693 - DNA, 25 bp, Artificial
  probe
  misc_feature (1)..(25): SEQ ID NO: 1870; WAN024CYN_at; Start 162; Stop 186
gactccagaaatatttgcagcacga

SEQ ID NO: 138694 - DNA, 25 bp, Artificial
  probe
  misc_feature (1)..(25): SEQ ID NO: 1870; WAN024CYN_at; Start 81; Stop 105
tcatcttggattcggacattacgga

SEQ ID NO: 138695 - DNA, 25 bp, Artificial
  probe
  misc_feature (1)..(25): SEQ ID NO: 1870; WAN024CYN_at; Start 550; Stop 574
caattagatggttttacaaaggata

SEQ ID NO: 138696 - DNA, 25 bp, Artificial
  probe
  misc_feature (1)..(25): SEQ ID NO: 1870; WAN024CYN_at; Start 177; Stop 201
tgcagcacgagatagagattatttc

SEQ ID NO: 138697 - DNA, 25 bp, Artificial
  probe
  misc_feature (1)..(25): SEQ ID NO: 1870; WAN024CYN_at; Start 386; Stop 410
caactggacttgcatatggtcagag

SEQ ID NO: 138698 - DNA, 25 bp, Artificial
  probe
  misc_feature (1)..(25): SEQ ID NO: 1870; WAN024CYN_at; Start 51; Stop 75
catccgattaaatactcttagaaca

SEQ ID NO: 138699 - DNA, 25 bp, Artificial
  probe
  misc_feature (1)..(25): SEQ ID NO: 1870; WAN024CYN_at; Start 744; Stop 768
tcaagagctggaagaaatgaaatcc

SEQ ID NO: 138700 - DNA, 25 bp, Artificial
  probe
  misc_feature (1)..(25): SEQ ID NO: 1870; WAN024CYN_at; Start 814; Stop 838
tcagttgtagaaagattaagtcagg

SEQ ID NO: 138701 - DNA, 25 bp, Artificial
  probe
  misc_feature (1)..(25): SEQ ID NO: 1870; WAN024CYN_at; Start 338; Stop 362
caggcatagatatgacaacgggctc

SEQ ID NO: 138702 - DNA, 25 bp, Artificial
  probe
  misc_feature (1)..(25): SEQ ID NO: 1870; WAN024CYN_at; Start 687; Stop 711
gtcaaataattcatcacctaagtgc

SEQ ID NO: 138703 - DNA, 25 bp, Artificial
  probe
  misc_feature (1)..(25): SEQ ID NO: 1742; WAN024CYO_at; Start 93; Stop 117
cgatttgtcaagttcgatggctact

SEQ ID NO: 138704 - DNA, 25 bp, Artificial
  probe
  misc_feature (1)..(25): SEQ ID NO: 1742; WAN024CYO_at; Start 84; Stop 108
cttagaagccgatttgtcaagttcg

SEQ ID NO: 138705 - DNA, 25 bp, Artificial
  probe
  misc_feature (1)..(25): SEQ ID NO: 1742; WAN024CYO_at; Start 454; Stop 478
cagacattagacttaaaaggactaa

SEQ ID NO: 138706 - DNA, 25 bp, Artificial
  probe
  misc_feature (1)..(25): SEQ ID NO: 1742; WAN024CYO_at; Start 211; Stop 235
gggtttagaccttatcttcatacat

SEQ ID NO: 138707 - DNA, 25 bp, Artificial
  probe
  misc_feature (1)..(25): SEQ ID NO: 1742; WAN024CYO_at; Start 747; Stop 771
tcagataggtggaattggcagtgct

SEQ ID NO: 138708 - DNA, 25 bp, Artificial
  probe
  misc_feature (1)..(25): SEQ ID NO: 1742; WAN024CYO_at; Start 731; Stop 755
ctgtagaaaaccacaatcagatagg

SEQ ID NO: 138709 - DNA, 25 bp, Artificial
  probe
  misc_feature (1)..(25): SEQ ID NO: 1742; WAN024CYO_at; Start 867; Stop 891
taatgagtatggtttgagtgaatcg

SEQ ID NO: 138710 - DNA, 25 bp, Artificial
  probe
  misc_feature (1)..(25): SEQ ID NO: 1742; WAN024CYO_at; Start 596; Stop 620
taatggttgctccaagtattcgagt

SEQ ID NO: 138711 - DNA, 25 bp, Artificial
  probe
  misc_feature (1)..(25): SEQ ID NO: 1742; WAN024CYO_at; Start 838; Stop 862
ggtcaagtagggaaaatggattatc

SEQ ID NO: 138712 - DNA, 25 bp, Artificial
  probe
  misc_feature (1)..(25): SEQ ID NO: 1742; WAN024CYO_at; Start 22; Stop 46
ttacggcatgtatatagagacttcc

SEQ ID NO: 138713 - DNA, 25 bp, Artificial
  probe
  misc_feature (1)..(25): SEQ ID NO: 1742; WAN024CYO_at; Start 162; Stop 186
gattatggaagcagaaatggtcggc

SEQ ID NO: 138714 - DNA, 25 bp, Artificial
  probe
  misc_feature (1)..(25): SEQ ID NO: 1742; WAN024CYO_at; Start 301; Stop 325
gatgccactgtgattggatcagatg

SEQ ID NO: 138715 - DNA, 25 bp, Artificial
  probe
  misc_feature (1)..(25): SEQ ID NO: 1742; WAN024CYO_at; Start 140; Stop 164
gagaccgttatgtgaatgttgggat

SEQ ID NO: 138716 - DNA, 25 bp, Artificial
  probe
  misc_feature (1)..(25): SEQ ID NO: 1742; WAN024CYO_at; Start 785; Stop 809
tctctgatgatggaataacaaaaat

SEQ ID NO: 138717 - DNA, 25 bp, Artificial
  probe
  misc_feature (1)..(25): SEQ ID NO: 1742; WAN024CYO_at; Start 668; Stop 692
tatttagaatcaaaccgataccaga

SEQ ID NO: 138718 - DNA, 25 bp, Artificial
  probe
  misc_feature (1)..(25): SEQ ID NO: 1742; WAN024CYO_at; Start 889; Stop 913
tcgaatataaaagagaaggttctag

SEQ ID NO: 138719 - DNA, 25 bp, Artificial
  probe
  misc_feature (1)..(25): SEQ ID NO: 1742; WAN024CYO_at; Start 272; Stop 296
tatttatttctcttggatacgcaca

SEQ ID NO: 138720 - DNA, 25 bp, Artificial
  probe
  misc_feature (1)..(25): SEQ ID NO: 1742; WAN024CYO_at; Start 517; Stop 541
tatcaaggtggagaagatttttcta

SEQ ID NO: 138721 - DNA, 25 bp, Artificial
  probe
  misc_feature (1)..(25): SEQ ID NO: 1742; WAN024CYO_at; Start 70; Stop 94
tctgatatagtagtcttagaagccg

SEQ ID NO: 138722 - DNA, 25 bp, Artificial
  probe
  misc_feature (1)..(25): SEQ ID NO: 1742; WAN024CYO_at; Start 607; Stop 631
ccaagtattcgagttgcagatgaac

SEQ ID NO: 138723 - DNA, 25 bp, Artificial
  probe
  misc_feature (1)..(25): SEQ ID NO: 1742; WAN024CYO_at; Start 38; Stop 62
gagacttccttttagaggctaatca

SEQ ID NO: 138724 - DNA, 25 bp, Artificial
  probe
  misc_feature (1)..(25): SEQ ID NO: 1742; WAN024CYO_at; Start 797; Stop 821
gaataacaaaaattcatcggatggg

SEQ ID NO: 138725 - DNA, 25 bp, Artificial
  probe
  misc_feature (1)..(25): SEQ ID NO: 1742; WAN024CYO_at; Start 684; Stop 708
gataccagaacagataaaaacaatg

SEQ ID NO: 138726 - DNA, 25 bp, Artificial
  probe
  misc_feature (1)..(25): SEQ ID NO: 1742; WAN024CYO_at; Start 483; Stop 507
tattcgaacaattagaaaagctcca

SEQ ID NO: 138727 - DNA, 25 bp, Artificial
  probe
  misc_feature (1)..(25): SEQ ID NO: 1742; WAN024CYO_at; Start 810; Stop 834
tcatcggatgggtgttcaagaaaga

SEQ ID NO: 138728 - DNA, 25 bp, Artificial
  probe
  misc_feature (1)..(25): SEQ ID NO: 1742; WAN024CYO_at; Start 622; Stop 646
gcagatgaactgtctaaattaggtt

SEQ ID NO: 138729 - DNA, 25 bp, Artificial
  probe
  misc_feature (1)..(25): SEQ ID NO: 1742; WAN024CYO_at; Start 176; Stop 200
aaatggtcggccttgcagcaggctt

SEQ ID NO: 138730 - DNA, 25 bp, Artificial
  probe
  misc_feature (1)..(25): SEQ ID NO: 1742; WAN024CYO_at; Start 311; Stop 335
tgattggatcagatgcaggagtaac

SEQ ID NO: 138731 - DNA, 25 bp, Artificial
  probe
  misc_feature (1)..(25): SEQ ID NO: 1742; WAN024CYO_at; Start 418; Stop 442
gcaactgatgatatccaatttcgtg

SEQ ID NO: 138732 - DNA, 25 bp, Artificial
  probe
  misc_feature (1)..(25): SEQ ID NO: 1742; WAN024CYO_at; Start 287; Stop 311
gatacgcacaattggatgccactgt

SEQ ID NO: 138733 - DNA, 25 bp, Artificial
  probe
  misc_feature (1)..(25): SEQ ID NO: 1742; WAN024CYO_at; Start 188; Stop 212
ttgcagcaggcttgtctattcaggg

SEQ ID NO: 138734 - DNA, 25 bp, Artificial
  probe
  misc_feature (1)..(25): SEQ ID NO: 1742; WAN024CYO_at; Start 569; Stop 593
aagatcttgtaatcgttgcttctgg

SEQ ID NO: 138735 - DNA, 25 bp, Artificial
  probe
  misc_feature (1)..(25): SEQ ID NO: 1742; WAN024CYO_at; Start 764; Stop 788
gcagtgctttatgtgaattattctc

SEQ ID NO: 138736 - DNA, 25 bp, Artificial
  probe
  misc_feature (1)..(25): SEQ ID NO: 1742; WAN024CYO_at; Start 356; Stop 380
cacatatgccatttgaagaaattgg

SEQ ID NO: 138737 - DNA, 25 bp, Artificial
  probe
  misc_feature (1)..(25): SEQ ID NO: 1538; WAN024CYP_at; Start 64; Stop 88
ctagagaaagtttttgatacagatg

SEQ ID NO: 138738 - DNA, 25 bp, Artificial
  probe
  misc_feature (1)..(25): SEQ ID NO: 1538; WAN024CYP_at; Start 272; Stop 296
ggtcgcctgcttggaaaatcacacg

SEQ ID NO: 138739 - DNA, 25 bp, Artificial
  probe
  misc_feature (1)..(25): SEQ ID NO: 1538; WAN024CYP_at; Start 303; Stop 327
tcgctatggccgtattgcccttgga

SEQ ID NO: 138740 - DNA, 25 bp, Artificial
  probe
  misc_feature (1)..(25): SEQ ID NO: 1538; WAN024CYP_at; Start 283; Stop 307
tggaaaatcacacgaatcagtcgct

SEQ ID NO: 138741 - DNA, 25 bp, Artificial
  probe
  misc_feature (1)..(25): SEQ ID NO: 1538; WAN024CYP_at; Start 95; Stop 119
tggatgtttacaatctaggtctgat

SEQ ID NO: 138742 - DNA, 25 bp, Artificial
  probe
  misc_feature (1)..(25): SEQ ID NO: 1538; WAN024CYP_at; Start 164; Stop 188
tgaccttcaccgatactgcctgtga

SEQ ID NO: 138743 - DNA, 25 bp, Artificial
  probe
  misc_feature (1)..(25): SEQ ID NO: 1538; WAN024CYP_at; Start 254; Stop 278
tcaaggttgaagttacctggtcgcc

SEQ ID NO: 138744 - DNA, 25 bp, Artificial
  probe
  misc_feature (1)..(25): SEQ ID NO: 1538; WAN024CYP_at; Start 105; Stop 129
caatctaggtctgatttatgaaatc

SEQ ID NO: 138745 - DNA, 25 bp, Artificial
  probe
  misc_feature (1)..(25): SEQ ID NO: 1538; WAN024CYP_at; Start 211; Stop 235
gaaatcgtggcaggtctgaaacaaa

SEQ ID NO: 138746 - DNA, 25 bp, Artificial
  probe
  misc_feature (1)..(25): SEQ ID NO: 1538; WAN024CYP_at; Start 69; Stop 93
gaaagtttttgatacagatgtggaa

SEQ ID NO: 138747 - DNA, 25 bp, Artificial
  probe
  misc_feature (1)..(25): SEQ ID NO: 1538; WAN024CYP_at; Start 262; Stop 286
gaagttacctggtcgcctgcttgga

SEQ ID NO: 138748 - DNA, 25 bp, Artificial
  probe
  misc_feature (1)..(25): SEQ ID NO: 1538; WAN024CYP_at; Start 15; Stop 39
caaaatcaatgaccgtgctttggcc

SEQ ID NO: 138749 - DNA, 25 bp, Artificial
  probe
  misc_feature (1)..(25): SEQ ID NO: 1538; WAN024CYP_at; Start 267; Stop 291
tacctggtcgcctgcttggaaaatc

SEQ ID NO: 138750 - DNA, 25 bp, Artificial
  probe
  misc_feature (1)..(25): SEQ ID NO: 1538; WAN024CYP_at; Start 161; Stop 185
tcatgaccttcaccgatactgcctg

SEQ ID NO: 138751 - DNA, 25 bp, Artificial
  probe
  misc_feature (1)..(25): SEQ ID NO: 1538; WAN024CYP_at; Start 152; Stop 176
gcaagattgtcatgaccttcaccga

SEQ ID NO: 138752 - DNA, 25 bp, Artificial
  probe
  misc_feature (1)..(25): SEQ ID NO: 1538; WAN024CYP_at; Start 21; Stop 45
caatgaccgtgctttggccttgcaa

SEQ ID NO: 138753 - DNA, 25 bp, Artificial
  probe
  misc_feature (1)..(25): SEQ ID NO: 1538; WAN024CYP_at; Start 156; Stop 180
gattgtcatgaccttcaccgatact

SEQ ID NO: 138754 - DNA, 25 bp, Artificial
  probe
  misc_feature (1)..(25): SEQ ID NO: 1538; WAN024CYP_at; Start 83; Stop 107
cagatgtggaattggatgtttacaa

SEQ ID NO: 138755 - DNA, 25 bp, Artificial
  probe
  misc_feature (1)..(25): SEQ ID NO: 1538; WAN024CYP_at; Start 219; Stop 243
ggcaggtctgaaacaaatcgagggt

SEQ ID NO: 138756 - DNA, 25 bp, Artificial
  probe
  misc_feature (1)..(25): SEQ ID NO: 1538; WAN024CYP_at; Start 9; Stop 33
cgatatcaaaatcaatgaccgtgct

SEQ ID NO: 138757 - DNA, 25 bp, Artificial
  probe
  misc_feature (1)..(25): SEQ ID NO: 1538; WAN024CYP_at; Start 276; Stop 300
gcctgcttggaaaatcacacgaatc

SEQ ID NO: 138758 - DNA, 25 bp, Artificial
  probe
  misc_feature (1)..(25): SEQ ID NO: 1538; WAN024CYP_at; Start 205; Stop 229
cctattgaaatcgtggcaggtctga

SEQ ID NO: 138759 - DNA, 25 bp, Artificial
  probe
  misc_feature (1)..(25): SEQ ID NO: 1538; WAN024CYP_at; Start 145; Stop 169
gggctctgcaagattgtcatgacct

SEQ ID NO: 138760 - DNA, 25 bp, Artificial
  probe
  misc_feature (1)..(25): SEQ ID NO: 1538; WAN024CYP_at; Start 29; Stop 53
gtgctttggccttgcaagaccaaat

SEQ ID NO: 138761 - DNA, 25 bp, Artificial
  probe
  misc_feature (1)..(25): SEQ ID NO: 1538; WAN024CYP_at; Start 222; Stop 246
aggtctgaaacaaatcgagggtatc

SEQ ID NO: 138762 - DNA, 25 bp, Artificial
  probe
  misc_feature (1)..(25): SEQ ID NO: 1538; WAN024CYP_at; Start 297; Stop 321
aatcagtcgctatggccgtattgcc

SEQ ID NO: 138763 - DNA, 25 bp, Artificial
  probe
  misc_feature (1)..(25): SEQ ID NO: 1538; WAN024CYP_at; Start 179; Stop 203
ctgcctgtgattgcgccgaaagcct

SEQ ID NO: 138764 - DNA, 25 bp, Artificial
  probe
  misc_feature (1)..(25): SEQ ID NO: 1538; WAN024CYP_at; Start 175; Stop 199
gatactgcctgtgattgcgccgaaa

SEQ ID NO: 138765 - DNA, 25 bp, Artificial
  probe
  misc_feature (1)..(25): SEQ ID NO: 1538; WAN024CYP_at; Start 3; Stop 27
gagagacgatatcaaaatcaatgac

SEQ ID NO: 138766 - DNA, 25 bp, Artificial
  probe
  misc_feature (1)..(25): SEQ ID NO: 1538; WAN024CYP_at; Start 129; Stop 153
caatctggatgaaacggggctctgc

SEQ ID NO: 138767 - DNA, 25 bp, Artificial
  probe
  misc_feature (1)..(25): SEQ ID NO: 1538; WAN024CYP_at; Start 248; Stop 272
aagatatcaaggttgaagttacctg

SEQ ID NO: 138768 - DNA, 25 bp, Artificial
  probe
  misc_feature (1)..(25): SEQ ID NO: 1538; WAN024CYP_at; Start 24; Stop 48
tgaccgtgctttggccttgcaagac

SEQ ID NO: 138769 - DNA, 25 bp, Artificial
  probe
  misc_feature (1)..(25): SEQ ID NO: 1538; WAN024CYP_at; Start 121; Stop 145
tatgaaatcaatctggatgaaacgg

SEQ ID NO: 138770 - DNA, 25 bp, Artificial
  probe
  misc_feature (1)..(25): SEQ ID NO: 1538; WAN024CYP_at; Start 290; Stop 314
tcacacgaatcagtcgctatggccg

SEQ ID NO: 138771 - DNA, 25 bp, Artificial
  probe
  misc_feature (1)..(25): SEQ ID NO: 5224; WAN024CYQ_at; Start 226; Stop 250
tcaacgtcaaagagcaagcaaccgt

SEQ ID NO: 138772 - DNA, 25 bp, Artificial
  probe
  misc_feature (1)..(25): SEQ ID NO: 5224; WAN024CYQ_at; Start 230; Stop 254
cgtcaaagagcaagcaaccgtggtg

SEQ ID NO: 138773 - DNA, 25 bp, Artificial
  probe
  misc_feature (1)..(25): SEQ ID NO: 5224; WAN024CYQ_at; Start 142; Stop 166
gttacacgggcacggacggatttca

SEQ ID NO: 138774 - DNA, 25 bp, Artificial
  probe
  misc_feature (1)..(25): SEQ ID NO: 5224; WAN024CYQ_at; Start 220; Stop 244
gacaaatcaacgtcaaagagcaagc

SEQ ID NO: 138775 - DNA, 25 bp, Artificial
  probe
  misc_feature (1)..(25): SEQ ID NO: 5224; WAN024CYQ_at; Start 87; Stop 111
taaatcacggaatttttcgactgtg

SEQ ID NO: 138776 - DNA, 25 bp, Artificial
  probe
  misc_feature (1)..(25): SEQ ID NO: 5224; WAN024CYQ_at; Start 43; Stop 67
tattcagtcatctctgggtactctt

SEQ ID NO: 138777 - DNA, 25 bp, Artificial
  probe
  misc_feature (1)..(25): SEQ ID NO: 5224; WAN024CYQ_at; Start 2; Stop 26
tgatgcgattgatttcggccaattc

SEQ ID NO: 138778 - DNA, 25 bp, Artificial
  probe
  misc_feature (1)..(25): SEQ ID NO: 5224; WAN024CYQ_at; Start 158; Stop 182
cggatttcacaccttttgattcaaa

SEQ ID NO: 138779 - DNA, 25 bp, Artificial
  probe
  misc_feature (1)..(25): SEQ ID NO: 5224; WAN024CYQ_at; Start 135; Stop 159
aatattggttacacgggcacggacg

SEQ ID NO: 138780 - DNA, 25 bp, Artificial
  probe
  misc_feature (1)..(25): SEQ ID NO: 5224; WAN024CYQ_at; Start 39; Stop 63
gacgtattcagtcatctctgggtac

SEQ ID NO: 138781 - DNA, 25 bp, Artificial
  probe
  misc_feature (1)..(25): SEQ ID NO: 5224; WAN024CYQ_at; Start 213; Stop 237
gaggactgacaaatcaacgtcaaag

SEQ ID NO: 138782 - DNA, 25 bp, Artificial
  probe
  misc_feature (1)..(25): SEQ ID NO: 5224; WAN024CYQ_at; Start 197; Stop 221
ccttaagggcatttgcgaggactga

SEQ ID NO: 138783 - DNA, 25 bp, Artificial
  probe
  misc_feature (1)..(25): SEQ ID NO: 5224; WAN024CYQ_at; Start 190; Stop 214
tttgaaaccttaagggcatttgcga

SEQ ID NO: 138784 - DNA, 25 bp, Artificial
  probe
  misc_feature (1)..(25): SEQ ID NO: 5224; WAN024CYQ_at; Start 25; Stop 49
tcttcttctgaaaagacgtattcag

SEQ ID NO: 138785 - DNA, 25 bp, Artificial
  probe
  misc_feature (1)..(25): SEQ ID NO: 5224; WAN024CYQ_at; Start 131; Stop 155
tgataatattggttacacgggcacg

SEQ ID NO: 138786 - DNA, 25 bp, Artificial
  probe
  misc_feature (1)..(25): SEQ ID NO: 5224; WAN024CYQ_at; Start 11; Stop 35
tgatttcggccaattcttcttctga

SEQ ID NO: 138787 - DNA, 25 bp, Artificial
  probe
  misc_feature (1)..(25): SEQ ID NO: 5224; WAN024CYQ_at; Start 201; Stop 225
aagggcatttgcgaggactgacaaa

SEQ ID NO: 138788 - DNA, 25 bp, Artificial
  probe
  misc_feature (1)..(25): SEQ ID NO: 5224; WAN024CYQ_at; Start 152; Stop 176
cacggacggatttcacaccttttga

SEQ ID NO: 138789 - DNA, 25 bp, Artificial
  probe
  misc_feature (1)..(25): SEQ ID NO: 5224; WAN024CYQ_at; Start 209; Stop 233
ttgcgaggactgacaaatcaacgtc

SEQ ID NO: 138790 - DNA, 25 bp, Artificial
  probe
  misc_feature (1)..(25): SEQ ID NO: 5224; WAN024CYQ_at; Start 49; Stop 73
gtcatctctgggtactcttttttca

SEQ ID NO: 138791 - DNA, 25 bp, Artificial
  probe
  misc_feature (1)..(25): SEQ ID NO: 5224; WAN024CYQ_at; Start 148; Stop 172
cgggcacggacggatttcacacctt

SEQ ID NO: 138792 - DNA, 25 bp, Artificial
  probe
  misc_feature (1)..(25): SEQ ID NO: 5224; WAN024CYQ_at; Start 18; Stop 42
ggccaattcttcttctgaaaagacg

SEQ ID NO: 138793 - DNA, 25 bp, Artificial
  probe
  misc_feature (1)..(25): SEQ ID NO: 5224; WAN024CYQ_at; Start 72; Stop 96
catgtattccaagagtaaatcacgg

SEQ ID NO: 138794 - DNA, 25 bp, Artificial
  probe
  misc_feature (1)..(25): SEQ ID NO: 5224; WAN024CYQ_at; Start 92; Stop 116
cacggaatttttcgactgtgatttt

SEQ ID NO: 138795 - DNA, 25 bp, Artificial
  probe
  misc_feature (1)..(25): SEQ ID NO: 5224; WAN024CYQ_at; Start 134; Stop 158
taatattggttacacgggcacggac

SEQ ID NO: 138796 - DNA, 25 bp, Artificial
  probe
  misc_feature (1)..(25): SEQ ID NO: 5224; WAN024CYQ_at; Start 34; Stop 58
gaaaagacgtattcagtcatctctg

SEQ ID NO: 138797 - DNA, 25 bp, Artificial
  probe
  misc_feature (1)..(25): SEQ ID NO: 5224; WAN024CYQ_at; Start 239; Stop 263
gcaagcaaccgtggtgcatgatacg

SEQ ID NO: 138798 - DNA, 25 bp, Artificial
  probe
  misc_feature (1)..(25): SEQ ID NO: 5224; WAN024CYQ_at; Start 58; Stop 82
gggtactcttttttcatgtattcca

SEQ ID NO: 138799 - DNA, 25 bp, Artificial
  probe
  misc_feature (1)..(25): SEQ ID NO: 5224; WAN024CYQ_at; Start 244; Stop 268
caaccgtggtgcatgatacggccgt

SEQ ID NO: 138800 - DNA, 25 bp, Artificial
  probe
  misc_feature (1)..(25): SEQ ID NO: 5224; WAN024CYQ_at; Start 81; Stop 105
caagagtaaatcacggaatttttcg

SEQ ID NO: 138801 - DNA, 25 bp, Artificial
  probe
  misc_feature (1)..(25): SEQ ID NO: 5224; WAN024CYQ_at; Start 233; Stop 257
caaagagcaagcaaccgtggtgcat

SEQ ID NO: 138802 - DNA, 25 bp, Artificial
  probe
  misc_feature (1)..(25): SEQ ID NO: 5224; WAN024CYQ_at; Start 248; Stop 272
cgtggtgcatgatacggccgttgat

SEQ ID NO: 138803 - DNA, 25 bp, Artificial
  probe
  misc_feature (1)..(25): SEQ ID NO: 5224; WAN024CYQ_at; Start 128; Stop 152
cattgataatattggttacacgggc

SEQ ID NO: 138804 - DNA, 25 bp, Artificial
  probe
  misc_feature (1)..(25): SEQ ID NO: 5224; WAN024CYQ_at; Start 250; Stop 274
tggtgcatgatacggccgttgatat

SEQ ID NO: 138805 - DNA, 25 bp, Artificial
  probe
  misc_feature (1)..(25): SEQ ID NO: 4262; WAN024CYR_at; Start 96; Stop 120
actgcaccacagagcgatttttgac

SEQ ID NO: 138806 - DNA, 25 bp, Artificial
  probe
  misc_feature (1)..(25): SEQ ID NO: 4262; WAN024CYR_at; Start 80; Stop 104
ccttcatggatggtcaactgcacca

SEQ ID NO: 138807 - DNA, 25 bp, Artificial
  probe
  misc_feature (1)..(25): SEQ ID NO: 4262; WAN024CYR_at; Start 18; Stop 42
gagacaacttatctacttggagacc

SEQ ID NO: 138808 - DNA, 25 bp, Artificial
  probe
  misc_feature (1)..(25): SEQ ID NO: 4262; WAN024CYR_at; Start 164; Stop 188
ttaccatcaatctcaagaccacggg

SEQ ID NO: 138809 - DNA, 25 bp, Artificial
  probe
  misc_feature (1)..(25): SEQ ID NO: 4262; WAN024CYR_at; Start 35; Stop 59
tggagaccaacagcttcaaacatct

SEQ ID NO: 138810 - DNA, 25 bp, Artificial
  probe
  misc_feature (1)..(25): SEQ ID NO: 4262; WAN024CYR_at; Start 281; Stop 305
gtaaagtccccatcattggtcaaaa

SEQ ID NO: 138811 - DNA, 25 bp, Artificial
  probe
  misc_feature (1)..(25): SEQ ID NO: 4262; WAN024CYR_at; Start 75; Stop 99
tacgcccttcatggatggtcaactg

SEQ ID NO: 138812 - DNA, 25 bp, Artificial
  probe
  misc_feature (1)..(25): SEQ ID NO: 4262; WAN024CYR_at; Start 239; Stop 263
taaaccttgtcaatctcattacgag

SEQ ID NO: 138813 - DNA, 25 bp, Artificial
  probe
  misc_feature (1)..(25): SEQ ID NO: 4262; WAN024CYR_at; Start 118; Stop 142
gactgggtccactttgagaatttca

SEQ ID NO: 138814 - DNA, 25 bp, Artificial
  probe
  misc_feature (1)..(25): SEQ ID NO: 4262; WAN024CYR_at; Start 135; Stop 159
gaatttcataaacagctggcttggt

SEQ ID NO: 138815 - DNA, 25 bp, Artificial
  probe
  misc_feature (1)..(25): SEQ ID NO: 4262; WAN024CYR_at; Start 209; Stop 233
ttattggccacacctttaacacgcg

SEQ ID NO: 138816 - DNA, 25 bp, Artificial
  probe
  misc_feature (1)..(25): SEQ ID NO: 4262; WAN024CYR_at; Start 212; Stop 236
ttggccacacctttaacacgcgcga

SEQ ID NO: 138817 - DNA, 25 bp, Artificial
  probe
  misc_feature (1)..(25): SEQ ID NO: 4262; WAN024CYR_at; Start 105; Stop 129
cagagcgatttttgactgggtccac

SEQ ID NO: 138818 - DNA, 25 bp, Artificial
  probe
  misc_feature (1)..(25): SEQ ID NO: 4262; WAN024CYR_at; Start 145; Stop 169
aacagctggcttggttttcttacca

SEQ ID NO: 138819 - DNA, 25 bp, Artificial
  probe
  misc_feature (1)..(25): SEQ ID NO: 4262; WAN024CYR_at; Start 149; Stop 173
gctggcttggttttcttaccatcaa

SEQ ID NO: 138820 - DNA, 25 bp, Artificial
  probe
  misc_feature (1)..(25): SEQ ID NO: 4262; WAN024CYR_at; Start 288; Stop 312
ccccatcattggtcaaaatcaagac

SEQ ID NO: 138821 - DNA, 25 bp, Artificial
  probe
  misc_feature (1)..(25): SEQ ID NO: 4262; WAN024CYR_at; Start 50; Stop 74
tcaaacatctttttaacctgatggt

SEQ ID NO: 138822 - DNA, 25 bp, Artificial
  probe
  misc_feature (1)..(25): SEQ ID NO: 4262; WAN024CYR_at; Start 69; Stop 93
gatggttacgcccttcatggatggt

SEQ ID NO: 138823 - DNA, 25 bp, Artificial
  probe
  misc_feature (1)..(25): SEQ ID NO: 4262; WAN024CYR_at; Start 275; Stop 299
tcgtctgtaaagtccccatcattgg

SEQ ID NO: 138824 - DNA, 25 bp, Artificial
  probe
  misc_feature (1)..(25): SEQ ID NO: 4262; WAN024CYR_at; Start 201; Stop 225
gattgtccttattggccacaccttt

SEQ ID NO: 138825 - DNA, 25 bp, Artificial
  probe
  misc_feature (1)..(25): SEQ ID NO: 4262; WAN024CYR_at; Start 253; Stop 277
ctcattacgagggtgaatcatctcg

SEQ ID NO: 138826 - DNA, 25 bp, Artificial
  probe
  misc_feature (1)..(25): SEQ ID NO: 4262; WAN024CYR_at; Start 88; Stop 112
gatggtcaactgcaccacagagcga

SEQ ID NO: 138827 - DNA, 25 bp, Artificial
  probe
  misc_feature (1)..(25): SEQ ID NO: 4262; WAN024CYR_at; Start 91; Stop 115
ggtcaactgcaccacagagcgattt

SEQ ID NO: 138828 - DNA, 25 bp, Artificial
  probe
  misc_feature (1)..(25): SEQ ID NO: 4262; WAN024CYR_at; Start 228; Stop 252
cacgcgcgacataaaccttgtcaat

SEQ ID NO: 138829 - DNA, 25 bp, Artificial
  probe
  misc_feature (1)..(25): SEQ ID NO: 4262; WAN024CYR_at; Start 27; Stop 51
tatctacttggagaccaacagcttc

SEQ ID NO: 138830 - DNA, 25 bp, Artificial
  probe
  misc_feature (1)..(25): SEQ ID NO: 4262; WAN024CYR_at; Start 9; Stop 33
aacgagtccgagacaacttatctac

SEQ ID NO: 138831 - DNA, 25 bp, Artificial
  probe
  misc_feature (1)..(25): SEQ ID NO: 4262; WAN024CYR_at; Start 2; Stop 26
tgtccgaaacgagtccgagacaact

SEQ ID NO: 138832 - DNA, 25 bp, Artificial
  probe
  misc_feature (1)..(25): SEQ ID NO: 4262; WAN024CYR_at; Start 130; Stop 154
tttgagaatttcataaacagctggc

SEQ ID NO: 138833 - DNA, 25 bp, Artificial
  probe
  misc_feature (1)..(25): SEQ ID NO: 4262; WAN024CYR_at; Start 267; Stop 291
gaatcatctcgtctgtaaagtcccc

SEQ ID NO: 138834 - DNA, 25 bp, Artificial
  probe
  misc_feature (1)..(25): SEQ ID NO: 4262; WAN024CYR_at; Start 63; Stop 87
taacctgatggttacgcccttcatg

SEQ ID NO: 138835 - DNA, 25 bp, Artificial
  probe
  misc_feature (1)..(25): SEQ ID NO: 4262; WAN024CYR_at; Start 224; Stop 248
ttaacacgcgcgacataaaccttgt

SEQ ID NO: 138836 - DNA, 25 bp, Artificial
  probe
  misc_feature (1)..(25): SEQ ID NO: 4262; WAN024CYR_at; Start 261; Stop 285
gagggtgaatcatctcgtctgtaaa

SEQ ID NO: 138837 - DNA, 25 bp, Artificial
  probe
  misc_feature (1)..(25): SEQ ID NO: 4262; WAN024CYR_at; Start 171; Stop 195
caatctcaagaccacgggtcaaggg

SEQ ID NO: 138838 - DNA, 25 bp, Artificial
  probe
  misc_feature (1)..(25): SEQ ID NO: 4262; WAN024CYR_at; Start 248; Stop 272
tcaatctcattacgagggtgaatca

SEQ ID NO: 138839 - DNA, 25 bp, Artificial
  probe
  misc_feature (1)..(25): SEQ ID NO: 1518; WAN024CYS_at; Start 236; Stop 260
gtcgcaagacggttgtcgacctctt

SEQ ID NO: 138840 - DNA, 25 bp, Artificial
  probe
  misc_feature (1)..(25): SEQ ID NO: 1518; WAN024CYS_at; Start 133; Stop 157
gacaaggtcgaagttgaaggtcaac

SEQ ID NO: 138841 - DNA, 25 bp, Artificial
  probe
  misc_feature (1)..(25): SEQ ID NO: 1518; WAN024CYS_at; Start 474; Stop 498
caagccagctgtttatgaaattctc

SEQ ID NO: 138842 - DNA, 25 bp, Artificial
  probe
  misc_feature (1)..(25): SEQ ID NO: 1518; WAN024CYS_at; Start 588; Stop 612
tggtctccaagtagataagttgtct

SEQ ID NO: 138843 - DNA, 25 bp, Artificial
  probe
  misc_feature (1)..(25): SEQ ID NO: 1518; WAN024CYS_at; Start 626; Stop 650
gacacctagacttgacaggactccg

SEQ ID NO: 138844 - DNA, 25 bp, Artificial
  probe
  misc_feature (1)..(25): SEQ ID NO: 1518; WAN024CYS_at; Start 459; Stop 483
tgatggtaagaaaaccaagccagct

SEQ ID NO: 138845 - DNA, 25 bp, Artificial
  probe
  misc_feature (1)..(25): SEQ ID NO: 1518; WAN024CYS_at; Start 148; Stop 172
gaaggtcaacctatctacaacgaag

SEQ ID NO: 138846 - DNA, 25 bp, Artificial
  probe
  misc_feature (1)..(25): SEQ ID NO: 1518; WAN024CYS_at; Start 542; Stop 566
tccatgaagggcgtaaccatcaggt

SEQ ID NO: 138847 - DNA, 25 bp, Artificial
  probe
  misc_feature (1)..(25): SEQ ID NO: 1518; WAN024CYS_at; Start 18; Stop 42
tattgcccacgcaggtgtggccagt

SEQ ID NO: 138848 - DNA, 25 bp, Artificial
  probe
  misc_feature (1)..(25): SEQ ID NO: 1518; WAN024CYS_at; Start 290; Stop 314
tgggtcgtttggactgggatacatc

SEQ ID NO: 138849 - DNA, 25 bp, Artificial
  probe
  misc_feature (1)..(25): SEQ ID NO: 1518; WAN024CYS_at; Start 38; Stop 62
ccagtaggagaaaagcagaagagct

SEQ ID NO: 138850 - DNA, 25 bp, Artificial
  probe
  misc_feature (1)..(25): SEQ ID NO: 1518; WAN024CYS_at; Start 682; Stop 706
gaaatcagccaactacacaccatgg

SEQ ID NO: 138851 - DNA, 25 bp, Artificial
  probe
  misc_feature (1)..(25): SEQ ID NO: 1518; WAN024CYS_at; Start 406; Stop 430
aaaggtgtggccaataaggacaatc

SEQ ID NO: 138852 - DNA, 25 bp, Artificial
  probe
  misc_feature (1)..(25): SEQ ID NO: 1518; WAN024CYS_at; Start 184; Stop 208
tatctgcttaacaaaccacgcggtg

SEQ ID NO: 138853 - DNA, 25 bp, Artificial
  probe
  misc_feature (1)..(25): SEQ ID NO: 1518; WAN024CYS_at; Start 615; Stop 639
gactcgtttcggacacctagacttg

SEQ ID NO: 138854 - DNA, 25 bp, Artificial
  probe
  misc_feature (1)..(25): SEQ ID NO: 1518; WAN024CYS_at; Start 9; Stop 33
caataagtatattgcccacgcaggt

SEQ ID NO: 138855 - DNA, 25 bp, Artificial
  probe
  misc_feature (1)..(25): SEQ ID NO: 1518; WAN024CYS_at; Start 94; Stop 118
caagtggtgcgtgaactagcaacca

SEQ ID NO: 138856 - DNA, 25 bp, Artificial
  probe
  misc_feature (1)..(25): SEQ ID NO: 1518; WAN024CYS_at; Start 363; Stop 387
tcaccctcgtaatgagattgacaag

SEQ ID NO: 138857 - DNA, 25 bp, Artificial
  probe
  misc_feature (1)..(25): SEQ ID NO: 1518; WAN024CYS_at; Start 440; Stop 464
tgacccgtggtcttgagattgatgg

SEQ ID NO: 138858 - DNA, 25 bp, Artificial
  probe
  misc_feature (1)..(25): SEQ ID NO: 1518; WAN024CYS_at; Start 343; Stop 367
gactttacagacgagatgattcacc

SEQ ID NO: 138859 - DNA, 25 bp, Artificial
  probe
  misc_feature (1)..(25): SEQ ID NO: 1518; WAN024CYS_at; Start 638; Stop 662
tgacaggactccgtccaggagaatc

SEQ ID NO: 138860 - DNA, 25 bp, Artificial
  probe
  misc_feature (1)..(25): SEQ ID NO: 1518; WAN024CYS_at; Start 249; Stop 273
tgtcgacctcttgcccaatgtcaaa

SEQ ID NO: 138861 - DNA, 25 bp, Artificial
  probe
  misc_feature (1)..(25): SEQ ID NO: 1518; WAN024CYS_at; Start 557; Stop 581
accatcaggttaaaaagatgtttga

SEQ ID NO: 138862 - DNA, 25 bp, Artificial
  probe
  misc_feature (1)..(25): SEQ ID NO: 1518; WAN024CYS_at; Start 378; Stop 402
gattgacaaggtttatgtcgcgcgt

SEQ ID NO: 138863 - DNA, 25 bp, Artificial
  probe
  misc_feature (1)..(25): SEQ ID NO: 1518; WAN024CYS_at; Start 603; Stop 627
taagttgtctcggactcgtttcgga

SEQ ID NO: 138864 - DNA, 25 bp, Artificial
  probe
  misc_feature (1)..(25): SEQ ID NO: 1518; WAN024CYS_at; Start 697; Stop 721
cacaccatggctgtaactaagaaat

SEQ ID NO: 138865 - DNA, 25 bp, Artificial
  probe
  misc_feature (1)..(25): SEQ ID NO: 1518; WAN024CYS_at; Start 395; Stop 419
tcgcgcgtgttaaaggtgtggccaa

SEQ ID NO: 138866 - DNA, 25 bp, Artificial
  probe
  misc_feature (1)..(25): SEQ ID NO: 1518; WAN024CYS_at; Start 530; Stop 554
tgcagttgaccatccatgaagggcg

SEQ ID NO: 138867 - DNA, 25 bp, Artificial
  probe
  misc_feature (1)..(25): SEQ ID NO: 1518; WAN024CYS_at; Start 573; Stop 597
gatgtttgaagctgttggtctccaa

SEQ ID NO: 138868 - DNA, 25 bp, Artificial
  probe
  misc_feature (1)..(25): SEQ ID NO: 1518; WAN024CYS_at; Start 110; Stop 134
tagcaaccactatcaagtcaggcga

SEQ ID NO: 138869 - DNA, 25 bp, Artificial
  probe
  misc_feature (1)..(25): SEQ ID NO: 1518; WAN024CYS_at; Start 122; Stop 146
tcaagtcaggcgacaaggtcgaagt

SEQ ID NO: 138870 - DNA, 25 bp, Artificial
  probe
  misc_feature (1)..(25): SEQ ID NO: 1518; WAN024CYS_at; Start 653; Stop 677
caggagaatcccgtcgtcttaataa

SEQ ID NO: 138871 - DNA, 25 bp, Artificial
  probe
  misc_feature (1)..(25): SEQ ID NO: 1518; WAN024CYS_at; Start 516; Stop 540
aaatcgctctgtggtgcagttgacc

SEQ ID NO: 138872 - DNA, 25 bp, Artificial
  probe
  misc_feature (1)..(25): SEQ ID NO: 1518; WAN024CYS_at; Start 487; Stop 511
tatgaaattctcaaagtggacccag

SEQ ID NO: 138873 - DNA, 25 bp, Artificial
  probe
  misc_feature (1)..(25): SEQ ID NO: 940; WAN024CYT_at; Start 840; Stop 864
tggtattgaagacgttgctgcagta

SEQ ID NO: 138874 - DNA, 25 bp, Artificial
  probe
  misc_feature (1)..(25): SEQ ID NO: 940; WAN024CYT_at; Start 130; Stop 154
ggtcgtcaccagaacactatcgaag

SEQ ID NO: 138875 - DNA, 25 bp, Artificial
  probe
  misc_feature (1)..(25): SEQ ID NO: 940; WAN024CYT_at; Start 116; Stop 140
catctatcattgttggtcgtcacca

SEQ ID NO: 138876 - DNA, 25 bp, Artificial
  probe
  misc_feature (1)..(25): SEQ ID NO: 940; WAN024CYT_at; Start 881; Stop 905
gggtgaaatacgaacgcgaagatgt

SEQ ID NO: 138877 - DNA, 25 bp, Artificial
  probe
  misc_feature (1)..(25): SEQ ID NO: 940; WAN024CYT_at; Start 383; Stop 407
gtaagaagttctgtggcaatgccca

SEQ ID NO: 138878 - DNA, 25 bp, Artificial
  probe
  misc_feature (1)..(25): SEQ ID NO: 940; WAN024CYT_at; Start 204; Stop 228
tattagtggtggtggagctgtttac

SEQ ID NO: 138879 - DNA, 25 bp, Artificial
  probe
  misc_feature (1)..(25): SEQ ID NO: 940; WAN024CYT_at; Start 433; Stop 457
caccacggttgcttgctctttgacg

SEQ ID NO: 138880 - DNA, 25 bp, Artificial
  probe
  misc_feature (1)..(25): SEQ ID NO: 940; WAN024CYT_at; Start 512; Stop 536
caaaaggtgtgaaatccgtccgtgc

SEQ ID NO: 138881 - DNA, 25 bp, Artificial
  probe
  misc_feature (1)..(25): SEQ ID NO: 940; WAN024CYT_at; Start 416; Stop 440
tcaacggccgtatcatgcaccacgg

SEQ ID NO: 138882 - DNA, 25 bp, Artificial
  probe
  misc_feature (1)..(25): SEQ ID NO: 940; WAN024CYT_at; Start 938; Stop 962
gctacttcgctggtattagccgtga

SEQ ID NO: 138883 - DNA, 25 bp, Artificial
  probe
  misc_feature (1)..(25): SEQ ID NO: 940; WAN024CYT_at; Start 454; Stop 478
gacgttgatttgtcagtcctcgcaa

SEQ ID NO: 138884 - DNA, 25 bp, Artificial
  probe
  misc_feature (1)..(25): SEQ ID NO: 940; WAN024CYT_at; Start 39; Stop 63
taatattgccttggaagaatacgcc

SEQ ID NO: 138885 - DNA, 25 bp, Artificial
  probe
  misc_feature (1)..(25): SEQ ID NO: 940; WAN024CYT_at; Start 66; Stop 90
taaacaccttttggatgaggatcaa

SEQ ID NO: 138886 - DNA, 25 bp, Artificial
  probe
  misc_feature (1)..(25): SEQ ID NO: 940; WAN024CYT_at; Start 144; Stop 168
cactatcgaagaaatcaaccgtgat

SEQ ID NO: 138887 - DNA, 25 bp, Artificial
  probe
  misc_feature (1)..(25): SEQ ID NO: 940; WAN024CYT_at; Start 346; Stop 370
gctgagttcacaggtcgtaatgacc

SEQ ID NO: 138888 - DNA, 25 bp, Artificial
  probe
  misc_feature (1)..(25): SEQ ID NO: 940; WAN024CYT_at; Start 304; Stop 328
tcaactccggttatcaataccctgg

SEQ ID NO: 138889 - DNA, 25 bp, Artificial
  probe
  misc_feature (1)..(25): SEQ ID NO: 940; WAN024CYT_at; Start 968; Stop 992
tcgctgaagcggtagttggataact

SEQ ID NO: 138890 - DNA, 25 bp, Artificial
  probe
  misc_feature (1)..(25): SEQ ID NO: 940; WAN024CYT_at; Start 912; Stop 936
ggcgctaaaaaccattgatatcaca

SEQ ID NO: 138891 - DNA, 25 bp, Artificial
  probe
  misc_feature (1)..(25): SEQ ID NO: 940; WAN024CYT_at; Start 954; Stop 978
tagccgtgaagaaatcgctgaagcg

SEQ ID NO: 138892 - DNA, 25 bp, Artificial
  probe
  misc_feature (1)..(25): SEQ ID NO: 940; WAN024CYT_at; Start 725; Stop 749
aatcacctgaatttaacgtccgtcg

SEQ ID NO: 138893 - DNA, 25 bp, Artificial
  probe
  misc_feature (1)..(25): SEQ ID NO: 940; WAN024CYT_at; Start 466; Stop 490
tcagtcctcgcaaatgcccttaagg

SEQ ID NO: 138894 - DNA, 25 bp, Artificial
  probe
  misc_feature (1)..(25): SEQ ID NO: 940; WAN024CYT_at; Start 179; Stop 203
aaaatggtattgaggtagttcgccg

SEQ ID NO: 138895 - DNA, 25 bp, Artificial
  probe
  misc_feature (1)..(25): SEQ ID NO: 940; WAN024CYT_at; Start 402; Stop 426
tgcccaagcctatatcaacggccgt

SEQ ID NO: 138896 - DNA, 25 bp, Artificial
  probe
  misc_feature (1)..(25): SEQ ID NO: 940; WAN024CYT_at; Start 159; Stop 183
caaccgtgattatgttcgcgaaaat

SEQ ID NO: 138897 - DNA, 25 bp, Artificial
  probe
  misc_feature (1)..(25): SEQ ID NO: 940; WAN024CYT_at; Start 897; Stop 921
cgaagatgttcttaaggcgctaaaa

SEQ ID NO: 138898 - DNA, 25 bp, Artificial
  probe
  misc_feature (1)..(25): SEQ ID NO: 940; WAN024CYT_at; Start 289; Stop 313
gacttcaagagcttctcaactccgg

SEQ ID NO: 138899 - DNA, 25 bp, Artificial
  probe
  misc_feature (1)..(25): SEQ ID NO: 940; WAN024CYT_at; Start 96; Stop 120
cctactttggattaacaagccatct

SEQ ID NO: 138900 - DNA, 25 bp, Artificial
  probe
  misc_feature (1)..(25): SEQ ID NO: 940; WAN024CYT_at; Start 625; Stop 649
tacccagagatgactgaatacgtct

SEQ ID NO: 138901 - DNA, 25 bp, Artificial
  probe
  misc_feature (1)..(25): SEQ ID NO: 940; WAN024CYT_at; Start 697; Stop 721
tttggaacttgggactggaactatg

SEQ ID NO: 138902 - DNA, 25 bp, Artificial
  probe
  misc_feature (1)..(25): SEQ ID NO: 940; WAN024CYT_at; Start 777; Stop 801
tgaagtctttgctaacgttactgaa

SEQ ID NO: 138903 - DNA, 25 bp, Artificial
  probe
  misc_feature (1)..(25): SEQ ID NO: 940; WAN024CYT_at; Start 709; Stop 733
gactggaactatggtaaatcacctg

SEQ ID NO: 138904 - DNA, 25 bp, Artificial
  probe
  misc_feature (1)..(25): SEQ ID NO: 940; WAN024CYT_at; Start 927; Stop 951
tgatatcacacgctacttcgctggt

SEQ ID NO: 138905 - DNA, 25 bp, Artificial
  probe
  misc_feature (1)..(25): SEQ ID NO: 940; WAN024CYT_at; Start 607; Stop 631
gaatacatgaaaaaagagtacccag

SEQ ID NO: 138906 - DNA, 25 bp, Artificial
  probe
  misc_feature (1)..(25): SEQ ID NO: 940; WAN024CYT_at; Start 260; Stop 284
tctccaaagaagatgaaaataaggc

SEQ ID NO: 138907 - DNA, 25 bp, Artificial
  probe
  misc_feature (1)..(25): SEQ ID NO: 6431; WAN024CYU_at; Start 54; Stop 78
agcgatttcggctgcctttcgaggc

SEQ ID NO: 138908 - DNA, 25 bp, Artificial
  probe
  misc_feature (1)..(25): SEQ ID NO: 6431; WAN024CYU_at; Start 79; Stop 103
aagacaatttccgttatgctaacta

SEQ ID NO: 138909 - DNA, 25 bp, Artificial
  probe
  misc_feature (1)..(25): SEQ ID NO: 6431; WAN024CYU_at; Start 64; Stop 88
gctgcctttcgaggcaagacaattt

SEQ ID NO: 138910 - DNA, 25 bp, Artificial
  probe
  misc_feature (1)..(25): SEQ ID NO: 6431; WAN024CYU_at; Start 61; Stop 85
tcggctgcctttcgaggcaagacaa

SEQ ID NO: 138911 - DNA, 25 bp, Artificial
  probe
  misc_feature (1)..(25): SEQ ID NO: 6431; WAN024CYU_at; Start 67; Stop 91
gcctttcgaggcaagacaatttccg

SEQ ID NO: 138912 - DNA, 25 bp, Artificial
  probe
  misc_feature (1)..(25): SEQ ID NO: 6431; WAN024CYU_at; Start 76; Stop 100
ggcaagacaatttccgttatgctaa

SEQ ID NO: 138913 - DNA, 25 bp, Artificial
  probe
  misc_feature (1)..(25): SEQ ID NO: 6431; WAN024CYU_at; Start 57; Stop 81
gatttcggctgcctttcgaggcaag

SEQ ID NO: 138914 - DNA, 25 bp, Artificial
  probe
  misc_feature (1)..(25): SEQ ID NO: 6431; WAN024CYU_at; Start 69; Stop 93
ctttcgaggcaagacaatttccgtt

SEQ ID NO: 138915 - DNA, 25 bp, Artificial
  probe
  misc_feature (1)..(25): SEQ ID NO: 6431; WAN024CYU_at; Start 63; Stop 87
ggctgcctttcgaggcaagacaatt

SEQ ID NO: 138916 - DNA, 25 bp, Artificial
  probe
  misc_feature (1)..(25): SEQ ID NO: 6431; WAN024CYU_at; Start 36; Stop 60
gcctgctttacgcttttcagcgatt

SEQ ID NO: 138917 - DNA, 25 bp, Artificial
  probe
  misc_feature (1)..(25): SEQ ID NO: 6431; WAN024CYU_at; Start 81; Stop 105
gacaatttccgttatgctaactaat

SEQ ID NO: 138918 - DNA, 25 bp, Artificial
  probe
  misc_feature (1)..(25): SEQ ID NO: 6431; WAN024CYU_at; Start 43; Stop 67
ttacgcttttcagcgatttcggctg

SEQ ID NO: 138919 - DNA, 25 bp, Artificial
  probe
  misc_feature (1)..(25): SEQ ID NO: 6431; WAN024CYU_at; Start 72; Stop 96
tcgaggcaagacaatttccgttatg

SEQ ID NO: 138920 - DNA, 25 bp, Artificial
  probe
  misc_feature (1)..(25): SEQ ID NO: 6431; WAN024CYU_at; Start 47; Stop 71
gcttttcagcgatttcggctgcctt

SEQ ID NO: 138921 - DNA, 25 bp, Artificial
  probe
  misc_feature (1)..(25): SEQ ID NO: 6431; WAN024CYU_at; Start 60; Stop 84
ttcggctgcctttcgaggcaagaca

SEQ ID NO: 138922 - DNA, 25 bp, Artificial
  probe
  misc_feature (1)..(25): SEQ ID NO: 6431; WAN024CYU_at; Start 68; Stop 92
cctttcgaggcaagacaatttccgt

SEQ ID NO: 138923 - DNA, 25 bp, Artificial
  probe
  misc_feature (1)..(25): SEQ ID NO: 6431; WAN024CYU_at; Start 55; Stop 79
gcgatttcggctgcctttcgaggca

SEQ ID NO: 138924 - DNA, 25 bp, Artificial
  probe
  misc_feature (1)..(25): SEQ ID NO: 6431; WAN024CYU_at; Start 1; Stop 25
atgaacttcaccggactcttttatt

SEQ ID NO: 138925 - DNA, 25 bp, Artificial
  probe
  misc_feature (1)..(25): SEQ ID NO: 6431; WAN024CYU_at; Start 50; Stop 74
tttcagcgatttcggctgcctttcg

SEQ ID NO: 138926 - DNA, 25 bp, Artificial
  probe
  misc_feature (1)..(25): SEQ ID NO: 6431; WAN024CYU_at; Start 27; Stop 51
tgaatttttgcctgctttacgcttt

SEQ ID NO: 138927 - DNA, 25 bp, Artificial
  probe
  misc_feature (1)..(25): SEQ ID NO: 6431; WAN024CYU_at; Start 77; Stop 101
gcaagacaatttccgttatgctaac

SEQ ID NO: 138928 - DNA, 25 bp, Artificial
  probe
  misc_feature (1)..(25): SEQ ID NO: 6431; WAN024CYU_at; Start 62; Stop 86
cggctgcctttcgaggcaagacaat

SEQ ID NO: 138929 - DNA, 25 bp, Artificial
  probe
  misc_feature (1)..(25): SEQ ID NO: 6431; WAN024CYU_at; Start 53; Stop 77
cagcgatttcggctgcctttcgagg

SEQ ID NO: 138930 - DNA, 25 bp, Artificial
  probe
  misc_feature (1)..(25): SEQ ID NO: 6431; WAN024CYU_at; Start 24; Stop 48
ttttgaatttttgcctgctttacgc

SEQ ID NO: 138931 - DNA, 25 bp, Artificial
  probe
  misc_feature (1)..(25): SEQ ID NO: 6431; WAN024CYU_at; Start 66; Stop 90
tgcctttcgaggcaagacaatttcc

SEQ ID NO: 138932 - DNA, 25 bp, Artificial
  probe
  misc_feature (1)..(25): SEQ ID NO: 6431; WAN024CYU_at; Start 45; Stop 69
acgcttttcagcgatttcggctgcc

SEQ ID NO: 138933 - DNA, 25 bp, Artificial
  probe
  misc_feature (1)..(25): SEQ ID NO: 6431; WAN024CYU_at; Start 59; Stop 83
tttcggctgcctttcgaggcaagac

SEQ ID NO: 138934 - DNA, 25 bp, Artificial
  probe
  misc_feature (1)..(25): SEQ ID NO: 6431; WAN024CYU_at; Start 41; Stop 65
ctttacgcttttcagcgatttcggc

SEQ ID NO: 138935 - DNA, 25 bp, Artificial
  probe
  misc_feature (1)..(25): SEQ ID NO: 6431; WAN024CYU_at; Start 74; Stop 98
gaggcaagacaatttccgttatgct

SEQ ID NO: 138936 - DNA, 25 bp, Artificial
  probe
  misc_feature (1)..(25): SEQ ID NO: 6431; WAN024CYU_at; Start 73; Stop 97
cgaggcaagacaatttccgttatgc

SEQ ID NO: 138937 - DNA, 25 bp, Artificial
  probe
  misc_feature (1)..(25): SEQ ID NO: 6431; WAN024CYU_at; Start 70; Stop 94
tttcgaggcaagacaatttccgtta

SEQ ID NO: 138938 - DNA, 25 bp, Artificial
  probe
  misc_feature (1)..(25): SEQ ID NO: 6431; WAN024CYU_at; Start 22; Stop 46
tattttgaatttttgcctgctttac

SEQ ID NO: 138939 - DNA, 25 bp, Artificial
  probe
  misc_feature (1)..(25): SEQ ID NO: 6431; WAN024CYU_at; Start 33; Stop 57
tttgcctgctttacgcttttcagcg

SEQ ID NO: 138940 - DNA, 25 bp, Artificial
  probe
  misc_feature (1)..(25): SEQ ID NO: 6431; WAN024CYU_at; Start 34; Stop 58
ttgcctgctttacgcttttcagcga

SEQ ID NO: 138941 - DNA, 25 bp, Artificial
  probe
  misc_feature (1)..(25): SEQ ID NO: 844; WAN024CYV_at; Start 125; Stop 149
ttgcaggtgtactgcgttttgggac

SEQ ID NO: 138942 - DNA, 25 bp, Artificial
  probe
  misc_feature (1)..(25): SEQ ID NO: 844; WAN024CYV_at; Start 117; Stop 141
tgctcctattgcaggtgtactgcgt

SEQ ID NO: 138943 - DNA, 25 bp, Artificial
  probe
  misc_feature (1)..(25): SEQ ID NO: 844; WAN024CYV_at; Start 85; Stop 109
gatttcttctataactatctagcag

SEQ ID NO: 138944 - DNA, 25 bp, Artificial
  probe
  misc_feature (1)..(25): SEQ ID NO: 844; WAN024CYV_at; Start 132; Stop 156
tgtactgcgttttgggacggcttac

SEQ ID NO: 138945 - DNA, 25 bp, Artificial
  probe
  misc_feature (1)..(25): SEQ ID NO: 844; WAN024CYV_at; Start 147; Stop 171
gacggcttacataacggaaattgtc

SEQ ID NO: 138946 - DNA, 25 bp, Artificial
  probe
  misc_feature (1)..(25): SEQ ID NO: 844; WAN024CYV_at; Start 73; Stop 97
gccttcaaaggcgatttcttctata

SEQ ID NO: 138947 - DNA, 25 bp, Artificial
  probe
  misc_feature (1)..(25): SEQ ID NO: 844; WAN024CYV_at; Start 47; Stop 71
ttttcatcattggagcgctagctta

SEQ ID NO: 138948 - DNA, 25 bp, Artificial
  probe
  misc_feature (1)..(25): SEQ ID NO: 844; WAN024CYV_at; Start 107; Stop 131
cagttgtctttgctcctattgcagg

SEQ ID NO: 138949 - DNA, 25 bp, Artificial
  probe
  misc_feature (1)..(25): SEQ ID NO: 844; WAN024CYV_at; Start 175; Stop 199
cctcgaaaggcagccgaaatcgctg

SEQ ID NO: 138950 - DNA, 25 bp, Artificial
  probe
  misc_feature (1)..(25): SEQ ID NO: 844; WAN024CYV_at; Start 40; Stop 64
gttctatttttcatcattggagcgc

SEQ ID NO: 138951 - DNA, 25 bp, Artificial
  probe
  misc_feature (1)..(25): SEQ ID NO: 844; WAN024CYV_at; Start 137; Stop 161
tgcgttttgggacggcttacataac

SEQ ID NO: 138952 - DNA, 25 bp, Artificial
  probe
  misc_feature (1)..(25): SEQ ID NO: 844; WAN024CYV_at; Start 59; Stop 83
gagcgctagcttatgccttcaaagg

SEQ ID NO: 138953 - DNA, 25 bp, Artificial
  probe
  misc_feature (1)..(25): SEQ ID NO: 844; WAN024CYV_at; Start 94; Stop 118
tataactatctagcagttgtctttg

SEQ ID NO: 138954 - DNA, 25 bp, Artificial
  probe
  misc_feature (1)..(25): SEQ ID NO: 844; WAN024CYV_at; Start 195; Stop 219
cgctgaaaagcgtaaagcaggcaaa

SEQ ID NO: 138955 - DNA, 25 bp, Artificial
  probe
  misc_feature (1)..(25): SEQ ID NO: 844; WAN024CYV_at; Start 170; Stop 194
tcttgcctcgaaaggcagccgaaat

SEQ ID NO: 138956 - DNA, 25 bp, Artificial
  probe
  misc_feature (1)..(25): SEQ ID NO: 844; WAN024CYV_at; Start 165; Stop 189
aattgtcttgcctcgaaaggcagcc

SEQ ID NO: 138957 - DNA, 25 bp, Artificial
  probe
  misc_feature (1)..(25): SEQ ID NO: 844; WAN024CYV_at; Start 78; Stop 102
caaaggcgatttcttctataactat

SEQ ID NO: 138958 - DNA, 25 bp, Artificial
  probe
  misc_feature (1)..(25): SEQ ID NO: 844; WAN024CYV_at; Start 209; Stop 233
aagcaggcaaaaattcaaaataact

SEQ ID NO: 138959 - DNA, 25 bp, Artificial
  probe
  misc_feature (1)..(25): SEQ ID NO: 844; WAN024CYV_at; Start 3; Stop 27
gaaacgagtaattttattagcagtg

SEQ ID NO: 138960 - DNA, 25 bp, Artificial
  probe
  misc_feature (1)..(25): SEQ ID NO: 844; WAN024CYV_at; Start 11; Stop 35
taattttattagcagtgattcaggc

SEQ ID NO: 138961 - DNA, 25 bp, Artificial
  probe
  misc_feature (1)..(25): SEQ ID NO: 844; WAN024CYV_at; Start 54; Stop 78
cattggagcgctagcttatgccttc

SEQ ID NO: 138962 - DNA, 25 bp, Artificial
  probe
  misc_feature (1)..(25): SEQ ID NO: 844; WAN024CYV_at; Start 44; Stop 68
tatttttcatcattggagcgctagc

SEQ ID NO: 138963 - DNA, 25 bp, Artificial
  probe
  misc_feature (1)..(25): SEQ ID NO: 844; WAN024CYV_at; Start 187; Stop 211
gccgaaatcgctgaaaagcgtaaag

SEQ ID NO: 138964 - DNA, 25 bp, Artificial
  probe
  misc_feature (1)..(25): SEQ ID NO: 844; WAN024CYV_at; Start 201; Stop 225
aaagcgtaaagcaggcaaaaattca

SEQ ID NO: 138965 - DNA, 25 bp, Artificial
  probe
  misc_feature (1)..(25): SEQ ID NO: 844; WAN024CYV_at; Start 156; Stop 180
cataacggaaattgtcttgcctcga

SEQ ID NO: 138966 - DNA, 25 bp, Artificial
  probe
  misc_feature (1)..(25): SEQ ID NO: 844; WAN024CYV_at; Start 100; Stop 124
tatctagcagttgtctttgctccta

SEQ ID NO: 138967 - DNA, 25 bp, Artificial
  probe
  misc_feature (1)..(25): SEQ ID NO: 844; WAN024CYV_at; Start 204; Stop 228
gcgtaaagcaggcaaaaattcaaaa

SEQ ID NO: 138968 - DNA, 25 bp, Artificial
  probe
  misc_feature (1)..(25): SEQ ID NO: 844; WAN024CYV_at; Start 168; Stop 192
tgtcttgcctcgaaaggcagccgaa

SEQ ID NO: 138969 - DNA, 25 bp, Artificial
  probe
  misc_feature (1)..(25): SEQ ID NO: 844; WAN024CYV_at; Start 158; Stop 182
taacggaaattgtcttgcctcgaaa

SEQ ID NO: 138970 - DNA, 25 bp, Artificial
  probe
  misc_feature (1)..(25): SEQ ID NO: 844; WAN024CYV_at; Start 111; Stop 135
tgtctttgctcctattgcaggtgta

SEQ ID NO: 138971 - DNA, 25 bp, Artificial
  probe
  misc_feature (1)..(25): SEQ ID NO: 844; WAN024CYV_at; Start 63; Stop 87
gctagcttatgccttcaaaggcgat

SEQ ID NO: 138972 - DNA, 25 bp, Artificial
  probe
  misc_feature (1)..(25): SEQ ID NO: 844; WAN024CYV_at; Start 14; Stop 38
ttttattagcagtgattcaggcagt

SEQ ID NO: 138973 - DNA, 25 bp, Artificial
  probe
  misc_feature (1)..(25): SEQ ID NO: 844; WAN024CYV_at; Start 161; Stop 185
cggaaattgtcttgcctcgaaaggc

SEQ ID NO: 138974 - DNA, 25 bp, Artificial
  probe
  misc_feature (1)..(25): SEQ ID NO: 844; WAN024CYV_at; Start 192; Stop 216
aatcgctgaaaagcgtaaagcaggc

SEQ ID NO: 138975 - DNA, 25 bp, Artificial
  probe
  misc_feature (1)..(25): SEQ ID NO: 1998; WAN024CYW_at; Start 877; Stop 901
gagcttggtcgtgtttcccttgaaa

SEQ ID NO: 138976 - DNA, 25 bp, Artificial
  probe
  misc_feature (1)..(25): SEQ ID NO: 1998; WAN024CYW_at; Start 416; Stop 440
tcgtcgcagaagaacagttcccctt

SEQ ID NO: 138977 - DNA, 25 bp, Artificial
  probe
  misc_feature (1)..(25): SEQ ID NO: 1998; WAN024CYW_at; Start 543; Stop 567
caaacgcattgcctttatcggagga

SEQ ID NO: 138978 - DNA, 25 bp, Artificial
  probe
  misc_feature (1)..(25): SEQ ID NO: 1998; WAN024CYW_at; Start 12; Stop 36
gattaaagacgtggccaaggctgct

SEQ ID NO: 138979 - DNA, 25 bp, Artificial
  probe
  misc_feature (1)..(25): SEQ ID NO: 1998; WAN024CYW_at; Start 244; Stop 268
tcggttctacgtggcatctctcaag

SEQ ID NO: 138980 - DNA, 25 bp, Artificial
  probe
  misc_feature (1)..(25): SEQ ID NO: 1998; WAN024CYW_at; Start 946; Stop 970
tgttaccgtcaattgatcgcccaca

SEQ ID NO: 138981 - DNA, 25 bp, Artificial
  probe
  misc_feature (1)..(25): SEQ ID NO: 1998; WAN024CYW_at; Start 75; Stop 99
taaatcaaccattagcgacgaaaca

SEQ ID NO: 138982 - DNA, 25 bp, Artificial
  probe
  misc_feature (1)..(25): SEQ ID NO: 1998; WAN024CYW_at; Start 525; Stop 549
tttcatcaaaaaaggctgcaaacgc

SEQ ID NO: 138983 - DNA, 25 bp, Artificial
  probe
  misc_feature (1)..(25): SEQ ID NO: 1998; WAN024CYW_at; Start 167; Stop 191
taagcagctatactcaggttatcgg

SEQ ID NO: 138984 - DNA, 25 bp, Artificial
  probe
  misc_feature (1)..(25): SEQ ID NO: 1998; WAN024CYW_at; Start 610; Stop 634
gaacaggcgcttaaacattacaaac

SEQ ID NO: 138985 - DNA, 25 bp, Artificial
  probe
  misc_feature (1)..(25): SEQ ID NO: 1998; WAN024CYW_at; Start 31; Stop 55
gctgctggtgtttcgccttcaaccg

SEQ ID NO: 138986 - DNA, 25 bp, Artificial
  probe
  misc_feature (1)..(25): SEQ ID NO: 1998; WAN024CYW_at; Start 204; Stop 228
tgatgactcagacgccttctaccag

SEQ ID NO: 138987 - DNA, 25 bp, Artificial
  probe
  misc_feature (1)..(25): SEQ ID NO: 1998; WAN024CYW_at; Start 800; Stop 824
tggatgtccctgttctcagctttga

SEQ ID NO: 138988 - DNA, 25 bp, Artificial
  probe
  misc_feature (1)..(25): SEQ ID NO: 1998; WAN024CYW_at; Start 595; Stop 619
cgtttaacaggctatgaacaggcgc

SEQ ID NO: 138989 - DNA, 25 bp, Artificial
  probe
  misc_feature (1)..(25): SEQ ID NO: 1998; WAN024CYW_at; Start 262; Stop 286
tctcaagtcgcatctgaaaaccact

SEQ ID NO: 138990 - DNA, 25 bp, Artificial
  probe
  misc_feature (1)..(25): SEQ ID NO: 1998; WAN024CYW_at; Start 701; Stop 725
gcaagcgattattcaagcacgatcc

SEQ ID NO: 138991 - DNA, 25 bp, Artificial
  probe
  misc_feature (1)..(25): SEQ ID NO: 1998; WAN024CYW_at; Start 352; Stop 376
tacggcaagcgtgtagatgggctaa

SEQ ID NO: 138992 - DNA, 25 bp, Artificial
  probe
  misc_feature (1)..(25): SEQ ID NO: 1998; WAN024CYW_at; Start 746; Stop 770
caaccgatagcctcctagctgaagg

SEQ ID NO: 138993 - DNA, 25 bp, Artificial
  probe
  misc_feature (1)..(25): SEQ ID NO: 1998; WAN024CYW_at; Start 338; Stop 362
tttcacaaatggtctacggcaagcg

SEQ ID NO: 138994 - DNA, 25 bp, Artificial
  probe
  misc_feature (1)..(25): SEQ ID NO: 1998; WAN024CYW_at; Start 482; Stop 506
tcgacaacgacaatgttcaagctgg

SEQ ID NO: 138995 - DNA, 25 bp, Artificial
  probe
  misc_feature (1)..(25): SEQ ID NO: 1998; WAN024CYW_at; Start 286; Stop 310
tatgccattcagatagcaacaggga

SEQ ID NO: 138996 - DNA, 25 bp, Artificial
  probe
  misc_feature (1)..(25): SEQ ID NO: 1998; WAN024CYW_at; Start 324; Stop 348
gcgtctcaacgctatttcacaaatg

SEQ ID NO: 138997 - DNA, 25 bp, Artificial
  probe
  misc_feature (1)..(25): SEQ ID NO: 1998; WAN024CYW_at; Start 815; Stop 839
tcagctttgactcggttaatcccaa

SEQ ID NO: 138998 - DNA, 25 bp, Artificial
  probe
  misc_feature (1)..(25): SEQ ID NO: 1998; WAN024CYW_at; Start 385; Stop 409
tatgcccaagaagaagaccctctcg

SEQ ID NO: 138999 - DNA, 25 bp, Artificial
  probe
  misc_feature (1)..(25): SEQ ID NO: 1998; WAN024CYW_at; Start 576; Stop 600
gctcttcgtgaccaaagaccgttta

SEQ ID NO: 139000 - DNA, 25 bp, Artificial
  probe
  misc_feature (1)..(25): SEQ ID NO: 1998; WAN024CYW_at; Start 558; Stop 582
tatcggaggaagtaaaaagctcttc

SEQ ID NO: 139001 - DNA, 25 bp, Artificial
  probe
  misc_feature (1)..(25): SEQ ID NO: 1998; WAN024CYW_at; Start 781; Stop 805
tatattgccaaacaccagctggatg

SEQ ID NO: 139002 - DNA, 25 bp, Artificial
  probe
  misc_feature (1)..(25): SEQ ID NO: 1998; WAN024CYW_at; Start 663; Stop 687
tgccgacgagtttctggaagaaaag

SEQ ID NO: 139003 - DNA, 25 bp, Artificial
  probe
  misc_feature (1)..(25): SEQ ID NO: 1998; WAN024CYW_at; Start 400; Stop 424
gaccctctcgtaaaactcgtcgcag

SEQ ID NO: 139004 - DNA, 25 bp, Artificial
  probe
  misc_feature (1)..(25): SEQ ID NO: 1998; WAN024CYW_at; Start 499; Stop 523
caagctggttttgatgcgactgaat

SEQ ID NO: 139005 - DNA, 25 bp, Artificial
  probe
  misc_feature (1)..(25): SEQ ID NO: 1998; WAN024CYW_at; Start 149; Stop 173
tcaacgctcgtagcttggtaagcag

SEQ ID NO: 139006 - DNA, 25 bp, Artificial
  probe
  misc_feature (1)..(25): SEQ ID NO: 1998; WAN024CYW_at; Start 844; Stop 868
aacttggcagcctatgtcgatatca

SEQ ID NO: 139007 - DNA, 25 bp, Artificial
  probe
  misc_feature (1)..(25): SEQ ID NO: 1998; WAN024CYW_at; Start 118; Stop 142
gctatgaaggaactcaactaccacc

SEQ ID NO: 139008 - DNA, 25 bp, Artificial
  probe
  misc_feature (1)..(25): SEQ ID NO: 1998; WAN024CYW_at; Start 648; Stop 672
caatcgcatctactttgccgacgag

SEQ ID NO: 139009 - DNA, 25 bp, Artificial
  probe
  misc_feature (1)..(25): SEQ ID NO: 2112; WAN024CYX_at; Start 518; Stop 542
gtgcgagcttcctctttggtttgaa

SEQ ID NO: 139010 - DNA, 25 bp, Artificial
  probe
  misc_feature (1)..(25): SEQ ID NO: 2112; WAN024CYX_at; Start 686; Stop 710
gattatttggccaaaatatgacaac

SEQ ID NO: 139011 - DNA, 25 bp, Artificial
  probe
  misc_feature (1)..(25): SEQ ID NO: 2112; WAN024CYX_at; Start 506; Stop 530
tcctagttctcggtgcgagcttcct

SEQ ID NO: 139012 - DNA, 25 bp, Artificial
  probe
  misc_feature (1)..(25): SEQ ID NO: 2112; WAN024CYX_at; Start 345; Stop 369
gcatttcgatacaaatgagctagtc

SEQ ID NO: 139013 - DNA, 25 bp, Artificial
  probe
  misc_feature (1)..(25): SEQ ID NO: 2112; WAN024CYX_at; Start 535; Stop 559
ggtttgaatttctttatcgtctctc

SEQ ID NO: 139014 - DNA, 25 bp, Artificial
  probe
  misc_feature (1)..(25): SEQ ID NO: 2112; WAN024CYX_at; Start 153; Stop 177
ccaggagacctatccgctagaaact

SEQ ID NO: 139015 - DNA, 25 bp, Artificial
  probe
  misc_feature (1)..(25): SEQ ID NO: 2112; WAN024CYX_at; Start 96; Stop 120
taccagtatcttccttatcagcttg

SEQ ID NO: 139016 - DNA, 25 bp, Artificial
  probe
  misc_feature (1)..(25): SEQ ID NO: 2112; WAN024CYX_at; Start 166; Stop 190
ccgctagaaacttttatcgataatg

SEQ ID NO: 139017 - DNA, 25 bp, Artificial
  probe
  misc_feature (1)..(25): SEQ ID NO: 2112; WAN024CYX_at; Start 429; Stop 453
tttcaaaagcaaagacagcttgacc

SEQ ID NO: 139018 - DNA, 25 bp, Artificial
  probe
  misc_feature (1)..(25): SEQ ID NO: 2112; WAN024CYX_at; Start 387; Stop 411
ggaactgacccgcatctcttaccga

SEQ ID NO: 139019 - DNA, 25 bp, Artificial
  probe
  misc_feature (1)..(25): SEQ ID NO: 2112; WAN024CYX_at; Start 437; Stop 461
gcaaagacagcttgacccaagcaat

SEQ ID NO: 139020 - DNA, 25 bp, Artificial
  probe
  misc_feature (1)..(25): SEQ ID NO: 2112; WAN024CYX_at; Start 300; Stop 324
gattggtccaagtcaaatcaaggaa

SEQ ID NO: 139021 - DNA, 25 bp, Artificial
  probe
  misc_feature (1)..(25): SEQ ID NO: 2112; WAN024CYX_at; Start 223; Stop 247
gatctctctgaacatgctacaattg

SEQ ID NO: 139022 - DNA, 25 bp, Artificial
  probe
  misc_feature (1)..(25): SEQ ID NO: 2112; WAN024CYX_at; Start 672; Stop 696
tacacttattttgggattatttggc

SEQ ID NO: 139023 - DNA, 25 bp, Artificial
  probe
  misc_feature (1)..(25): SEQ ID NO: 2112; WAN024CYX_at; Start 81; Stop 105
gtttcaacttctctttaccagtatc

SEQ ID NO: 139024 - DNA, 25 bp, Artificial
  probe
  misc_feature (1)..(25): SEQ ID NO: 2112; WAN024CYX_at; Start 360; Stop 384
tgagctagtcatcagcaaggaaagc

SEQ ID NO: 139025 - DNA, 25 bp, Artificial
  probe
  misc_feature (1)..(25): SEQ ID NO: 2112; WAN024CYX_at; Start 138; Stop 162
tatccaaaacagctcccaggagacc

SEQ ID NO: 139026 - DNA, 25 bp, Artificial
  probe
  misc_feature (1)..(25): SEQ ID NO: 2112; WAN024CYX_at; Start 466; Stop 490
aaagactggtaccaacaaaatcgtg

SEQ ID NO: 139027 - DNA, 25 bp, Artificial
  probe
  misc_feature (1)..(25): SEQ ID NO: 2112; WAN024CYX_at; Start 253; Stop 277
ggcacattaacttatactggaacag

SEQ ID NO: 139028 - DNA, 25 bp, Artificial
  probe
  misc_feature (1)..(25): SEQ ID NO: 2112; WAN024CYX_at; Start 180; Stop 204
tatcgataatgtctatgaacctctg

SEQ ID NO: 139029 - DNA, 25 bp, Artificial
  probe
  misc_feature (1)..(25): SEQ ID NO: 2112; WAN024CYX_at; Start 126; Stop 150
ggtacccattgctatccaaaacagc

SEQ ID NO: 139030 - DNA, 25 bp, Artificial
  probe
  misc_feature (1)..(25): SEQ ID NO: 2112; WAN024CYX_at; Start 481; Stop 505
caaaatcgtgtctatatcagcctct

SEQ ID NO: 139031 - DNA, 25 bp, Artificial
  probe
  misc_feature (1)..(25): SEQ ID NO: 2112; WAN024CYX_at; Start 641; Stop 665
tcttgaactgtttaggattgccgac

SEQ ID NO: 139032 - DNA, 25 bp, Artificial
  probe
  misc_feature (1)..(25): SEQ ID NO: 2112; WAN024CYX_at; Start 335; Stop 359
acttgcaactgcatttcgatacaaa

SEQ ID NO: 139033 - DNA, 25 bp, Artificial
  probe
  misc_feature (1)..(25): SEQ ID NO: 2112; WAN024CYX_at; Start 72; Stop 96
gctcaactggtttcaacttctcttt

SEQ ID NO: 139034 - DNA, 25 bp, Artificial
  probe
  misc_feature (1)..(25): SEQ ID NO: 2112; WAN024CYX_at; Start 493; Stop 517
tatatcagcctcttcctagttctcg

SEQ ID NO: 139035 - DNA, 25 bp, Artificial
  probe
  misc_feature (1)..(25): SEQ ID NO: 2112; WAN024CYX_at; Start 238; Stop 262
gctacaattgtcgatggcacattaa

SEQ ID NO: 139036 - DNA, 25 bp, Artificial
  probe
  misc_feature (1)..(25): SEQ ID NO: 2112; WAN024CYX_at; Start 402; Stop 426
ctcttaccgagccattcagactgag

SEQ ID NO: 139037 - DNA, 25 bp, Artificial
  probe
  misc_feature (1)..(25): SEQ ID NO: 2112; WAN024CYX_at; Start 111; Stop 135
tatcagcttgtctatggtacccatt

SEQ ID NO: 139038 - DNA, 25 bp, Artificial
  probe
  misc_feature (1)..(25): SEQ ID NO: 2112; WAN024CYX_at; Start 307; Stop 331
ccaagtcaaatcaaggaattaccta

SEQ ID NO: 139039 - DNA, 25 bp, Artificial
  probe
  misc_feature (1)..(25): SEQ ID NO: 2112; WAN024CYX_at; Start 212; Stop 236
aggttgtccaggatctctctgaaca

SEQ ID NO: 139040 - DNA, 25 bp, Artificial
  probe
  misc_feature (1)..(25): SEQ ID NO: 2112; WAN024CYX_at; Start 776; Stop 800
tccgtgatccaaattaccataaata

SEQ ID NO: 139041 - DNA, 25 bp, Artificial
  probe
  misc_feature (1)..(25): SEQ ID NO: 2112; WAN024CYX_at; Start 763; Stop 787
tataaaacacatttccgtgatccaa

SEQ ID NO: 139042 - DNA, 25 bp, Artificial
  probe
  misc_feature (1)..(25): SEQ ID NO: 2112; WAN024CYX_at; Start 375; Stop 399
caaggaaagcaaggaactgacccgc

SEQ ID NO: 139043 - DNA, 25 bp, Artificial
  probe
  misc_feature (1)..(25): SEQ ID NO: 4153; WAN024CYY_at; Start 755; Stop 779
cagaatcggaaaaaattgcggctat

SEQ ID NO: 139044 - DNA, 25 bp, Artificial
  probe
  misc_feature (1)..(25): SEQ ID NO: 4153; WAN024CYY_at; Start 447; Stop 471
gctgattgacgagtgtggtcctgaa

SEQ ID NO: 139045 - DNA, 25 bp, Artificial
  probe
  misc_feature (1)..(25): SEQ ID NO: 4153; WAN024CYY_at; Start 355; Stop 379
cagactttagtagcaattgaaccga

SEQ ID NO: 139046 - DNA, 25 bp, Artificial
  probe
  misc_feature (1)..(25): SEQ ID NO: 4153; WAN024CYY_at; Start 540; Stop 564
gcaagaaaaaggcttagagttggaa

SEQ ID NO: 139047 - DNA, 25 bp, Artificial
  probe
  misc_feature (1)..(25): SEQ ID NO: 4153; WAN024CYY_at; Start 477; Stop 501
ttttaagaacttaactcaagcaaca

SEQ ID NO: 139048 - DNA, 25 bp, Artificial
  probe
  misc_feature (1)..(25): SEQ ID NO: 4153; WAN024CYY_at; Start 684; Stop 708
cagagaatcagaatattggacttcc

SEQ ID NO: 139049 - DNA, 25 bp, Artificial
  probe
  misc_feature (1)..(25): SEQ ID NO: 4153; WAN024CYY_at; Start 460; Stop 484
tgtggtcctgaactttattttaaga

SEQ ID NO: 139050 - DNA, 25 bp, Artificial
  probe
  misc_feature (1)..(25): SEQ ID NO: 4153; WAN024CYY_at; Start 377; Stop 401
cgacaactaaaaaagtcatgtttgc

SEQ ID NO: 139051 - DNA, 25 bp, Artificial
  probe
  misc_feature (1)..(25): SEQ ID NO: 4153; WAN024CYY_at; Start 135; Stop 159
tatacttgaaaaacctcctcctaca

SEQ ID NO: 139052 - DNA, 25 bp, Artificial
  probe
  misc_feature (1)..(25): SEQ ID NO: 4153; WAN024CYY_at; Start 20; Stop 44
ggtttgaagtatctacagaaattgg

SEQ ID NO: 139053 - DNA, 25 bp, Artificial
  probe
  misc_feature (1)..(25): SEQ ID NO: 4153; WAN024CYY_at; Start 731; Stop 755
ggaatcaccattatttacaatggtc

SEQ ID NO: 139054 - DNA, 25 bp, Artificial
  probe
  misc_feature (1)..(25): SEQ ID NO: 4153; WAN024CYY_at; Start 766; Stop 790
aaaattgcggctattattcgagaat

SEQ ID NO: 139055 - DNA, 25 bp, Artificial
  probe
  misc_feature (1)..(25): SEQ ID NO: 4153; WAN024CYY_at; Start 497; Stop 521
caacatttagtcctgaaacgaataa

SEQ ID NO: 139056 - DNA, 25 bp, Artificial
  probe
  misc_feature (1)..(25): SEQ ID NO: 4153; WAN024CYY_at; Start 700; Stop 724
tggacttccaatactaaactcattt

SEQ ID NO: 139057 - DNA, 25 bp, Artificial
  probe
  misc_feature (1)..(25): SEQ ID NO: 4153; WAN024CYY_at; Start 583; Stop 607
cagatatctggagagattactgagg

SEQ ID NO: 139058 - DNA, 25 bp, Artificial
  probe
  misc_feature (1)..(25): SEQ ID NO: 4153; WAN024CYY_at; Start 183; Stop 207
tccgaacacaggtaggagtccgatt

SEQ ID NO: 139059 - DNA, 25 bp, Artificial
  probe
  misc_feature (1)..(25): SEQ ID NO: 4153; WAN024CYY_at; Start 151; Stop 175
cctcctacaattggttatttgacaa

SEQ ID NO: 139060 - DNA, 25 bp, Artificial
  probe
  misc_feature (1)..(25): SEQ ID NO: 4153; WAN024CYY_at; Start 593; Stop 617
gagagattactgaggaagattttga

SEQ ID NO: 139061 - DNA, 25 bp, Artificial
  probe
  misc_feature (1)..(25): SEQ ID NO: 4153; WAN024CYY_at; Start 362; Stop 386
tagtagcaattgaaccgacaactaa

SEQ ID NO: 139062 - DNA, 25 bp, Artificial
  probe
  misc_feature (1)..(25): SEQ ID NO: 4153; WAN024CYY_at; Start 454; Stop 478
gacgagtgtggtcctgaactttatt

SEQ ID NO: 139063 - DNA, 25 bp, Artificial
  probe
  misc_feature (1)..(25): SEQ ID NO: 4153; WAN024CYY_at; Start 170; Stop 194
tgacaattgattttccgaacacagg

SEQ ID NO: 139064 - DNA, 25 bp, Artificial
  probe
  misc_feature (1)..(25): SEQ ID NO: 4153; WAN024CYY_at; Start 669; Stop 693
tagagaaaaagagtacagagaatca

SEQ ID NO: 139065 - DNA, 25 bp, Artificial
  probe
  misc_feature (1)..(25): SEQ ID NO: 4153; WAN024CYY_at; Start 108; Stop 132
gctaccaagttatgaaaatttttca

SEQ ID NO: 139066 - DNA, 25 bp, Artificial
  probe
  misc_feature (1)..(25): SEQ ID NO: 4153; WAN024CYY_at; Start 327; Stop 351
caaattactcgagaaaccaattaag

SEQ ID NO: 139067 - DNA, 25 bp, Artificial
  probe
  misc_feature (1)..(25): SEQ ID NO: 4153; WAN024CYY_at; Start 492; Stop 516
tcaagcaacatttagtcctgaaacg

SEQ ID NO: 139068 - DNA, 25 bp, Artificial
  probe
  misc_feature (1)..(25): SEQ ID NO: 4153; WAN024CYY_at; Start 389; Stop 413
aagtcatgtttgctgatttttcaga

SEQ ID NO: 139069 - DNA, 25 bp, Artificial
  probe
  misc_feature (1)..(25): SEQ ID NO: 4153; WAN024CYY_at; Start 4; Stop 28
gatttctttatgaagaggtttgaag

SEQ ID NO: 139070 - DNA, 25 bp, Artificial
  probe
  misc_feature (1)..(25): SEQ ID NO: 4153; WAN024CYY_at; Start 98; Stop 122
gagcaggtttgctaccaagttatga

SEQ ID NO: 139071 - DNA, 25 bp, Artificial
  probe
  misc_feature (1)..(25): SEQ ID NO: 4153; WAN024CYY_at; Start 61; Stop 85
tatcaaaagcaaaagaaagtgctag

SEQ ID NO: 139072 - DNA, 25 bp, Artificial
  probe
  misc_feature (1)..(25): SEQ ID NO: 4153; WAN024CYY_at; Start 303; Stop 327
tagttggagtggaattttagcttgc

SEQ ID NO: 139073 - DNA, 25 bp, Artificial
  probe
  misc_feature (1)..(25): SEQ ID NO: 4153; WAN024CYY_at; Start 528; Stop 552
ctgggaattaatgcaagaaaaaggc

SEQ ID NO: 139074 - DNA, 25 bp, Artificial
  probe
  misc_feature (1)..(25): SEQ ID NO: 4153; WAN024CYY_at; Start 320; Stop 344
tagcttgcaaattactcgagaaacc

SEQ ID NO: 139075 - DNA, 25 bp, Artificial
  probe
  misc_feature (1)..(25): SEQ ID NO: 4153; WAN024CYY_at; Start 412; Stop 436
gaaaatccttatccagaaatggaag

SEQ ID NO: 139076 - DNA, 25 bp, Artificial
  probe
  misc_feature (1)..(25): SEQ ID NO: 4153; WAN024CYY_at; Start 742; Stop 766
tatttacaatggtcagaatcggaaa

SEQ ID NO: 139077 - DNA, 25 bp, Artificial
  probe
  misc_feature (1)..(25): SEQ ID NO: 1011; WAN024CYZ_at; Start 247; Stop 271
ggcgattatacaatcccacctacat

SEQ ID NO: 139078 - DNA, 25 bp, Artificial
  probe
  misc_feature (1)..(25): SEQ ID NO: 1011; WAN024CYZ_at; Start 38; Stop 62
cgtcaattgtgttaattgtatcagc

SEQ ID NO: 139079 - DNA, 25 bp, Artificial
  probe
  misc_feature (1)..(25): SEQ ID NO: 1011; WAN024CYZ_at; Start 505; Stop 529
gggacttatttagcacaattatggg

SEQ ID NO: 139080 - DNA, 25 bp, Artificial
  probe
  misc_feature (1)..(25): SEQ ID NO: 1011; WAN024CYZ_at; Start 326; Stop 350
tattagatactgcaatagctttagc

SEQ ID NO: 139081 - DNA, 25 bp, Artificial
  probe
  misc_feature (1)..(25): SEQ ID NO: 1011; WAN024CYZ_at; Start 135; Stop 159
tgtcacttctctaacagaagaacaa

SEQ ID NO: 139082 - DNA, 25 bp, Artificial
  probe
  misc_feature (1)..(25): SEQ ID NO: 1011; WAN024CYZ_at; Start 450; Stop 474
tagttggtttgtaaatgatgttgct

SEQ ID NO: 139083 - DNA, 25 bp, Artificial
  probe
  misc_feature (1)..(25): SEQ ID NO: 1011; WAN024CYZ_at; Start 425; Stop 449
gttcagcaatttctagatatctagg

SEQ ID NO: 139084 - DNA, 25 bp, Artificial
  probe
  misc_feature (1)..(25): SEQ ID NO: 1011; WAN024CYZ_at; Start 440; Stop 464
gatatctaggtagttggtttgtaaa

SEQ ID NO: 139085 - DNA, 25 bp, Artificial
  probe
  misc_feature (1)..(25): SEQ ID NO: 1011; WAN024CYZ_at; Start 65; Stop 89
ttccaagtgtttcagctgtatacgc

SEQ ID NO: 139086 - DNA, 25 bp, Artificial
  probe
  misc_feature (1)..(25): SEQ ID NO: 1011; WAN024CYZ_at; Start 47; Stop 71
tgttaattgtatcagcgattccaag

SEQ ID NO: 139087 - DNA, 25 bp, Artificial
  probe
  misc_feature (1)..(25): SEQ ID NO: 1011; WAN024CYZ_at; Start 192; Stop 216
tcatccagacgtctcacaacaatgg

SEQ ID NO: 139088 - DNA, 25 bp, Artificial
  probe
  misc_feature (1)..(25): SEQ ID NO: 1011; WAN024CYZ_at; Start 242; Stop 266
tacaaggcgattatacaatcccacc

SEQ ID NO: 139089 - DNA, 25 bp, Artificial
  probe
  misc_feature (1)..(25): SEQ ID NO: 1011; WAN024CYZ_at; Start 356; Stop 380
gaggaactactgcaggccttgcaaa

SEQ ID NO: 139090 - DNA, 25 bp, Artificial
  probe
  misc_feature (1)..(25): SEQ ID NO: 1011; WAN024CYZ_at; Start 214; Stop 238
tggatcaaagaagtaattaaccgac

SEQ ID NO: 139091 - DNA, 25 bp, Artificial
  probe
  misc_feature (1)..(25): SEQ ID NO: 1011; WAN024CYZ_at; Start 106; Stop 130
caaattgaaacaaatatggaacttc

SEQ ID NO: 139092 - DNA, 25 bp, Artificial
  probe
  misc_feature (1)..(25): SEQ ID NO: 1011; WAN024CYZ_at; Start 149; Stop 173
cagaagaacaaatcaatacacttgc

SEQ ID NO: 139093 - DNA, 25 bp, Artificial
  probe
  misc_feature (1)..(25): SEQ ID NO: 1011; WAN024CYZ_at; Start 77; Stop 101
cagctgtatacgcttctgaacaagt

SEQ ID NO: 139094 - DNA, 25 bp, Artificial
  probe
  misc_feature (1)..(25): SEQ ID NO: 1011; WAN024CYZ_at; Start 227; Stop 251
taattaaccgacaattacaaggcga

SEQ ID NO: 139095 - DNA, 25 bp, Artificial
  probe
  misc_feature (1)..(25): SEQ ID NO: 1011; WAN024CYZ_at; Start 303; Stop 327
tacagttaatcaaatgggtgctcta

SEQ ID NO: 139096 - DNA, 25 bp, Artificial
  probe
  misc_feature (1)..(25): SEQ ID NO: 1011; WAN024CYZ_at; Start 124; Stop 148
gaacttcaacctgtcacttctctaa

SEQ ID NO: 139097 - DNA, 25 bp, Artificial
  probe
  misc_feature (1)..(25): SEQ ID NO: 1011; WAN024CYZ_at; Start 314; Stop 338
aaatgggtgctctattagatactgc

SEQ ID NO: 139098 - DNA, 25 bp, Artificial
  probe
  misc_feature (1)..(25): SEQ ID NO: 1011; WAN024CYZ_at; Start 375; Stop 399
tgcaaatctaattaaagtaaaagga

SEQ ID NO: 139099 - DNA, 25 bp, Artificial
  probe
  misc_feature (1)..(25): SEQ ID NO: 1011; WAN024CYZ_at; Start 520; Stop 544
caattatgggataaaaatgatgcca

SEQ ID NO: 139100 - DNA, 25 bp, Artificial
  probe
  misc_feature (1)..(25): SEQ ID NO: 1011; WAN024CYZ_at; Start 292; Stop 316
tggcaaggtattacagttaatcaaa

SEQ ID NO: 139101 - DNA, 25 bp, Artificial
  probe
  misc_feature (1)..(25): SEQ ID NO: 1011; WAN024CYZ_at; Start 161; Stop 185
tcaatacacttgcaaacgaaatcca

SEQ ID NO: 139102 - DNA, 25 bp, Artificial
  probe
  misc_feature (1)..(25): SEQ ID NO: 1011; WAN024CYZ_at; Start 367; Stop 391
gcaggccttgcaaatctaattaaag

SEQ ID NO: 139103 - DNA, 25 bp, Artificial
  probe
  misc_feature (1)..(25): SEQ ID NO: 1011; WAN024CYZ_at; Start 531; Stop 555
taaaaatgatgccattcctaacaac

SEQ ID NO: 139104 - DNA, 25 bp, Artificial
  probe
  misc_feature (1)..(25): SEQ ID NO: 1011; WAN024CYZ_at; Start 353; Stop 377
taggaggaactactgcaggccttgc

SEQ ID NO: 139105 - DNA, 25 bp, Artificial
  probe
  misc_feature (1)..(25): SEQ ID NO: 1011; WAN024CYZ_at; Start 116; Stop 140
caaatatggaacttcaacctgtcac

SEQ ID NO: 139106 - DNA, 25 bp, Artificial
  probe
  misc_feature (1)..(25): SEQ ID NO: 1011; WAN024CYZ_at; Start 56; Stop 80
tatcagcgattccaagtgtttcagc

SEQ ID NO: 139107 - DNA, 25 bp, Artificial
  probe
  misc_feature (1)..(25): SEQ ID NO: 1011; WAN024CYZ_at; Start 486; Stop 510
tatgaatttattatcaccggggact

SEQ ID NO: 139108 - DNA, 25 bp, Artificial
  probe
  misc_feature (1)..(25): SEQ ID NO: 1011; WAN024CYZ_at; Start 178; Stop 202
gaaatccaatcttttcatccagacg

SEQ ID NO: 139109 - DNA, 25 bp, Artificial
  probe
  misc_feature (1)..(25): SEQ ID NO: 1011; WAN024CYZ_at; Start 410; Stop 434
caaaaagtgctattcgttcagcaat

SEQ ID NO: 139110 - DNA, 25 bp, Artificial
  probe
  misc_feature (1)..(25): SEQ ID NO: 1011; WAN024CYZ_at; Start 199; Stop 223
gacgtctcacaacaatggatcaaag

SEQ ID NO: 139111 - DNA, 25 bp, Artificial
  probe
  misc_feature (1)..(25): SEQ ID NO: 2975; WAN024CZ2_at; Start 113; Stop 137
aagaattctcttttcgtggtagcgt

SEQ ID NO: 139112 - DNA, 25 bp, Artificial
  probe
  misc_feature (1)..(25): SEQ ID NO: 2975; WAN024CZ2_at; Start 109; Stop 133
catcaagaattctcttttcgtggta

SEQ ID NO: 139113 - DNA, 25 bp, Artificial
  probe
  misc_feature (1)..(25): SEQ ID NO: 2975; WAN024CZ2_at; Start 25; Stop 49
tataaatggacggatttattttgga

SEQ ID NO: 139114 - DNA, 25 bp, Artificial
  probe
  misc_feature (1)..(25): SEQ ID NO: 2975; WAN024CZ2_at; Start 66; Stop 90
gacctgcctctatattggtaaccat

SEQ ID NO: 139115 - DNA, 25 bp, Artificial
  probe
  misc_feature (1)..(25): SEQ ID NO: 2975; WAN024CZ2_at; Start 64; Stop 88
ttgacctgcctctatattggtaacc

SEQ ID NO: 139116 - DNA, 25 bp, Artificial
  probe
  misc_feature (1)..(25): SEQ ID NO: 2975; WAN024CZ2_at; Start 99; Stop 123
tactctcaatcatcaagaattctct

SEQ ID NO: 139117 - DNA, 25 bp, Artificial
  probe
  misc_feature (1)..(25): SEQ ID NO: 2975; WAN024CZ2_at; Start 93; Stop 117
tttgtttactctcaatcatcaagaa

SEQ ID NO: 139118 - DNA, 25 bp, Artificial
  probe
  misc_feature (1)..(25): SEQ ID NO: 2975; WAN024CZ2_at; Start 18; Stop 42
ttcaaaatataaatggacggattta

SEQ ID NO: 139119 - DNA, 25 bp, Artificial
  probe
  misc_feature (1)..(25): SEQ ID NO: 2975; WAN024CZ2_at; Start 65; Stop 89
tgacctgcctctatattggtaacca

SEQ ID NO: 139120 - DNA, 25 bp, Artificial
  probe
  misc_feature (1)..(25): SEQ ID NO: 2975; WAN024CZ2_at; Start 72; Stop 96
cctctatattggtaaccatgatttg

SEQ ID NO: 139121 - DNA, 25 bp, Artificial
  probe
  misc_feature (1)..(25): SEQ ID NO: 2975; WAN024CZ2_at; Start 107; Stop 131
atcatcaagaattctcttttcgtgg

SEQ ID NO: 139122 - DNA, 25 bp, Artificial
  probe
  misc_feature (1)..(25): SEQ ID NO: 2975; WAN024CZ2_at; Start 84; Stop 108
taaccatgatttgtttactctcaat

SEQ ID NO: 139123 - DNA, 25 bp, Artificial
  probe
  misc_feature (1)..(25): SEQ ID NO: 2975; WAN024CZ2_at; Start 114; Stop 138
agaattctcttttcgtggtagcgtt

SEQ ID NO: 139124 - DNA, 25 bp, Artificial
  probe
  misc_feature (1)..(25): SEQ ID NO: 2975; WAN024CZ2_at; Start 82; Stop 106
ggtaaccatgatttgtttactctca

SEQ ID NO: 139125 - DNA, 25 bp, Artificial
  probe
  misc_feature (1)..(25): SEQ ID NO: 2975; WAN024CZ2_at; Start 53; Stop 77
tatttgttattttgacctgcctcta

SEQ ID NO: 139126 - DNA, 25 bp, Artificial
  probe
  misc_feature (1)..(25): SEQ ID NO: 2975; WAN024CZ2_at; Start 68; Stop 92
cctgcctctatattggtaaccatga

SEQ ID NO: 139127 - DNA, 25 bp, Artificial
  probe
  misc_feature (1)..(25): SEQ ID NO: 2975; WAN024CZ2_at; Start 63; Stop 87
tttgacctgcctctatattggtaac

SEQ ID NO: 139128 - DNA, 25 bp, Artificial
  probe
  misc_feature (1)..(25): SEQ ID NO: 2975; WAN024CZ2_at; Start 59; Stop 83
ttattttgacctgcctctatattgg

SEQ ID NO: 139129 - DNA, 25 bp, Artificial
  probe
  misc_feature (1)..(25): SEQ ID NO: 2975; WAN024CZ2_at; Start 144; Stop 168
tctggtactggccttatatcactta

SEQ ID NO: 139130 - DNA, 25 bp, Artificial
  probe
  misc_feature (1)..(25): SEQ ID NO: 2975; WAN024CZ2_at; Start 126; Stop 150
tcgtggtagcgtttggggtctggta

SEQ ID NO: 139131 - DNA, 25 bp, Artificial
  probe
  misc_feature (1)..(25): SEQ ID NO: 2975; WAN024CZ2_at; Start 141; Stop 165
gggtctggtactggccttatatcac

SEQ ID NO: 139132 - DNA, 25 bp, Artificial
  probe
  misc_feature (1)..(25): SEQ ID NO: 2975; WAN024CZ2_at; Start 116; Stop 140
aattctcttttcgtggtagcgtttg

SEQ ID NO: 139133 - DNA, 25 bp, Artificial
  probe
  misc_feature (1)..(25): SEQ ID NO: 2975; WAN024CZ2_at; Start 111; Stop 135
tcaagaattctcttttcgtggtagc

SEQ ID NO: 139134 - DNA, 25 bp, Artificial
  probe
  misc_feature (1)..(25): SEQ ID NO: 2975; WAN024CZ2_at; Start 69; Stop 93
ctgcctctatattggtaaccatgat

SEQ ID NO: 139135 - DNA, 25 bp, Artificial
  probe
  misc_feature (1)..(25): SEQ ID NO: 2975; WAN024CZ2_at; Start 61; Stop 85
attttgacctgcctctatattggta

SEQ ID NO: 139136 - DNA, 25 bp, Artificial
  probe
  misc_feature (1)..(25): SEQ ID NO: 2975; WAN024CZ2_at; Start 58; Stop 82
gttattttgacctgcctctatattg

SEQ ID NO: 139137 - DNA, 25 bp, Artificial
  probe
  misc_feature (1)..(25): SEQ ID NO: 2975; WAN024CZ2_at; Start 117; Stop 141
attctcttttcgtggtagcgtttgg

SEQ ID NO: 139138 - DNA, 25 bp, Artificial
  probe
  misc_feature (1)..(25): SEQ ID NO: 2975; WAN024CZ2_at; Start 101; Stop 125
ctctcaatcatcaagaattctcttt

SEQ ID NO: 139139 - DNA, 25 bp, Artificial
  probe
  misc_feature (1)..(25): SEQ ID NO: 2975; WAN024CZ2_at; Start 104; Stop 128
tcaatcatcaagaattctcttttcg

SEQ ID NO: 139140 - DNA, 25 bp, Artificial
  probe
  misc_feature (1)..(25): SEQ ID NO: 2975; WAN024CZ2_at; Start 91; Stop 115
gatttgtttactctcaatcatcaag

SEQ ID NO: 139141 - DNA, 25 bp, Artificial
  probe
  misc_feature (1)..(25): SEQ ID NO: 2975; WAN024CZ2_at; Start 55; Stop 79
tttgttattttgacctgcctctata

SEQ ID NO: 139142 - DNA, 25 bp, Artificial
  probe
  misc_feature (1)..(25): SEQ ID NO: 2975; WAN024CZ2_at; Start 71; Stop 95
gcctctatattggtaaccatgattt

SEQ ID NO: 139143 - DNA, 25 bp, Artificial
  probe
  misc_feature (1)..(25): SEQ ID NO: 2975; WAN024CZ2_at; Start 95; Stop 119
tgtttactctcaatcatcaagaatt

SEQ ID NO: 139144 - DNA, 25 bp, Artificial
  probe
  misc_feature (1)..(25): SEQ ID NO: 2975; WAN024CZ2_at; Start 112; Stop 136
caagaattctcttttcgtggtagcg

SEQ ID NO: 139145 - DNA, 25 bp, Artificial
  probe
  misc_feature (1)..(25): SEQ ID NO: 7624; WAN024CZ3_at; Start 9; Stop 33
tgagaagatatcaagcagaatatcc

SEQ ID NO: 139146 - DNA, 25 bp, Artificial
  probe
  misc_feature (1)..(25): SEQ ID NO: 7624; WAN024CZ3_at; Start 38; Stop 62
tagcgtcttttataggaagtcgtgc

SEQ ID NO: 139147 - DNA, 25 bp, Artificial
  probe
  misc_feature (1)..(25): SEQ ID NO: 7624; WAN024CZ3_at; Start 41; Stop 65
cgtcttttataggaagtcgtgccaa

SEQ ID NO: 139148 - DNA, 25 bp, Artificial
  probe
  misc_feature (1)..(25): SEQ ID NO: 7624; WAN024CZ3_at; Start 119; Stop 143
ggactgaatctttggagatgtcaaa

SEQ ID NO: 139149 - DNA, 25 bp, Artificial
  probe
  misc_feature (1)..(25): SEQ ID NO: 7624; WAN024CZ3_at; Start 20; Stop 44
caagcagaatatccatgttagcgtc

SEQ ID NO: 139150 - DNA, 25 bp, Artificial
  probe
  misc_feature (1)..(25): SEQ ID NO: 7624; WAN024CZ3_at; Start 51; Stop 75
aggaagtcgtgccaagtcgccaaca

SEQ ID NO: 139151 - DNA, 25 bp, Artificial
  probe
  misc_feature (1)..(25): SEQ ID NO: 7624; WAN024CZ3_at; Start 104; Stop 128
ttttagcagcgatttggactgaatc

SEQ ID NO: 139152 - DNA, 25 bp, Artificial
  probe
  misc_feature (1)..(25): SEQ ID NO: 7624; WAN024CZ3_at; Start 54; Stop 78
aagtcgtgccaagtcgccaacaaac

SEQ ID NO: 139153 - DNA, 25 bp, Artificial
  probe
  misc_feature (1)..(25): SEQ ID NO: 7624; WAN024CZ3_at; Start 123; Stop 147
tgaatctttggagatgtcaaaggca

SEQ ID NO: 139154 - DNA, 25 bp, Artificial
  probe
  misc_feature (1)..(25): SEQ ID NO: 7624; WAN024CZ3_at; Start 32; Stop 56
ccatgttagcgtcttttataggaag

SEQ ID NO: 139155 - DNA, 25 bp, Artificial
  probe
  misc_feature (1)..(25): SEQ ID NO: 7624; WAN024CZ3_at; Start 79; Stop 103
caattgactgcccagttgggttcac

SEQ ID NO: 139156 - DNA, 25 bp, Artificial
  probe
  misc_feature (1)..(25): SEQ ID NO: 7624; WAN024CZ3_at; Start 97; Stop 121
ggttcacttttagcagcgatttgga

SEQ ID NO: 139157 - DNA, 25 bp, Artificial
  probe
  misc_feature (1)..(25): SEQ ID NO: 7624; WAN024CZ3_at; Start 46; Stop 70
tttataggaagtcgtgccaagtcgc

SEQ ID NO: 139158 - DNA, 25 bp, Artificial
  probe
  misc_feature (1)..(25): SEQ ID NO: 7624; WAN024CZ3_at; Start 5; Stop 29
caggtgagaagatatcaagcagaat

SEQ ID NO: 139159 - DNA, 25 bp, Artificial
  probe
  misc_feature (1)..(25): SEQ ID NO: 7624; WAN024CZ3_at; Start 84; Stop 108
gactgcccagttgggttcactttta

SEQ ID NO: 139160 - DNA, 25 bp, Artificial
  probe
  misc_feature (1)..(25): SEQ ID NO: 7624; WAN024CZ3_at; Start 95; Stop 119
tgggttcacttttagcagcgatttg

SEQ ID NO: 139161 - DNA, 25 bp, Artificial
  probe
  misc_feature (1)..(25): SEQ ID NO: 7624; WAN024CZ3_at; Start 113; Stop 137
cgatttggactgaatctttggagat

SEQ ID NO: 139162 - DNA, 25 bp, Artificial
  probe
  misc_feature (1)..(25): SEQ ID NO: 7624; WAN024CZ3_at; Start 26; Stop 50
gaatatccatgttagcgtcttttat

SEQ ID NO: 139163 - DNA, 25 bp, Artificial
  probe
  misc_feature (1)..(25): SEQ ID NO: 7624; WAN024CZ3_at; Start 69; Stop 93
gccaacaaaccaattgactgcccag

SEQ ID NO: 139164 - DNA, 25 bp, Artificial
  probe
  misc_feature (1)..(25): SEQ ID NO: 7624; WAN024CZ3_at; Start 88; Stop 112
gcccagttgggttcacttttagcag

SEQ ID NO: 139165 - DNA, 25 bp, Artificial
  probe
  misc_feature (1)..(25): SEQ ID NO: 7624; WAN024CZ3_at; Start 17; Stop 41
tatcaagcagaatatccatgttagc

SEQ ID NO: 139166 - DNA, 25 bp, Artificial
  probe
  misc_feature (1)..(25): SEQ ID NO: 7624; WAN024CZ3_at; Start 64; Stop 88
aagtcgccaacaaaccaattgactg

SEQ ID NO: 139167 - DNA, 25 bp, Artificial
  probe
  misc_feature (1)..(25): SEQ ID NO: 7624; WAN024CZ3_at; Start 74; Stop 98
caaaccaattgactgcccagttggg

SEQ ID NO: 139168 - DNA, 25 bp, Artificial
  probe
  misc_feature (1)..(25): SEQ ID NO: 7624; WAN024CZ3_at; Start 61; Stop 85
gccaagtcgccaacaaaccaattga

SEQ ID NO: 139169 - DNA, 25 bp, Artificial
  probe
  misc_feature (1)..(25): SEQ ID NO: 7624; WAN024CZ3_at; Start 48; Stop 72
tataggaagtcgtgccaagtcgcca

SEQ ID NO: 139170 - DNA, 25 bp, Artificial
  probe
  misc_feature (1)..(25): SEQ ID NO: 7624; WAN024CZ3_at; Start 23; Stop 47
gcagaatatccatgttagcgtcttt

SEQ ID NO: 139171 - DNA, 25 bp, Artificial
  probe
  misc_feature (1)..(25): SEQ ID NO: 7624; WAN024CZ3_at; Start 107; Stop 131
tagcagcgatttggactgaatcttt

SEQ ID NO: 139172 - DNA, 25 bp, Artificial
  probe
  misc_feature (1)..(25): SEQ ID NO: 7624; WAN024CZ3_at; Start 1; Stop 25
ttggcaggtgagaagatatcaagca

SEQ ID NO: 139173 - DNA, 25 bp, Artificial
  probe
  misc_feature (1)..(25): SEQ ID NO: 7624; WAN024CZ3_at; Start 49; Stop 73
ataggaagtcgtgccaagtcgccaa

SEQ ID NO: 139174 - DNA, 25 bp, Artificial
  probe
  misc_feature (1)..(25): SEQ ID NO: 7624; WAN024CZ3_at; Start 91; Stop 115
cagttgggttcacttttagcagcga

SEQ ID NO: 139175 - DNA, 25 bp, Artificial
  probe
  misc_feature (1)..(25): SEQ ID NO: 7624; WAN024CZ3_at; Start 72; Stop 96
aacaaaccaattgactgcccagttg

SEQ ID NO: 139176 - DNA, 25 bp, Artificial
  probe
  misc_feature (1)..(25): SEQ ID NO: 7624; WAN024CZ3_at; Start 59; Stop 83
gtgccaagtcgccaacaaaccaatt

SEQ ID NO: 139177 - DNA, 25 bp, Artificial
  probe
  misc_feature (1)..(25): SEQ ID NO: 7624; WAN024CZ3_at; Start 110; Stop 134
cagcgatttggactgaatctttgga

SEQ ID NO: 139178 - DNA, 25 bp, Artificial
  probe
  misc_feature (1)..(25): SEQ ID NO: 7624; WAN024CZ3_at; Start 100; Stop 124
tcacttttagcagcgatttggactg

SEQ ID NO: 139179 - DNA, 25 bp, Artificial
  probe
  misc_feature (1)..(25): SEQ ID NO: 1195; WAN024CZ4_at; Start 532; Stop 556
cgcgttttatccaaagacggtatct

SEQ ID NO: 139180 - DNA, 25 bp, Artificial
  probe
  misc_feature (1)..(25): SEQ ID NO: 1195; WAN024CZ4_at; Start 70; Stop 94
caagaaaatctgactctgttagaga

SEQ ID NO: 139181 - DNA, 25 bp, Artificial
  probe
  misc_feature (1)..(25): SEQ ID NO: 1195; WAN024CZ4_at; Start 406; Stop 430
gctaaaagtgaacccaactgggcag

SEQ ID NO: 139182 - DNA, 25 bp, Artificial
  probe
  misc_feature (1)..(25): SEQ ID NO: 1195; WAN024CZ4_at; Start 252; Stop 276
tgctgtatctgacttgcttgcaagc

SEQ ID NO: 139183 - DNA, 25 bp, Artificial
  probe
  misc_feature (1)..(25): SEQ ID NO: 1195; WAN024CZ4_at; Start 221; Stop 245
tagaagccggcttttaccaagctat

SEQ ID NO: 139184 - DNA, 25 bp, Artificial
  probe
  misc_feature (1)..(25): SEQ ID NO: 1195; WAN024CZ4_at; Start 9; Stop 33
aaatctcaagcccaaacttcagcgt

SEQ ID NO: 139185 - DNA, 25 bp, Artificial
  probe
  misc_feature (1)..(25): SEQ ID NO: 1195; WAN024CZ4_at; Start 319; Stop 343
ggattctattctcgcaaactacaag

SEQ ID NO: 139186 - DNA, 25 bp, Artificial
  probe
  misc_feature (1)..(25): SEQ ID NO: 1195; WAN024CZ4_at; Start 547; Stop 571
gacggtatcttgataaaggttatcc

SEQ ID NO: 139187 - DNA, 25 bp, Artificial
  probe
  misc_feature (1)..(25): SEQ ID NO: 1195; WAN024CZ4_at; Start 634; Stop 658
tattctaaccaagatatcaaggagc

SEQ ID NO: 139188 - DNA, 25 bp, Artificial
  probe
  misc_feature (1)..(25): SEQ ID NO: 1195; WAN024CZ4_at; Start 23; Stop 47
aacttcagcgttttgcttctgcgac

SEQ ID NO: 139189 - DNA, 25 bp, Artificial
  probe
  misc_feature (1)..(25): SEQ ID NO: 1195; WAN024CZ4_at; Start 54; Stop 78
tgcctgtcctatctgtcaagaaaat

SEQ ID NO: 139190 - DNA, 25 bp, Artificial
  probe
  misc_feature (1)..(25): SEQ ID NO: 1195; WAN024CZ4_at; Start 681; Stop 705
cctatctagtcaaactgcctctctg

SEQ ID NO: 139191 - DNA, 25 bp, Artificial
  probe
  misc_feature (1)..(25): SEQ ID NO: 1195; WAN024CZ4_at; Start 596; Stop 620
tccgtcaaagagtacaggaccagct

SEQ ID NO: 139192 - DNA, 25 bp, Artificial
  probe
  misc_feature (1)..(25): SEQ ID NO: 1195; WAN024CZ4_at; Start 91; Stop 115
gagactaatttcaagtgctgcaacc

SEQ ID NO: 139193 - DNA, 25 bp, Artificial
  probe
  misc_feature (1)..(25): SEQ ID NO: 1195; WAN024CZ4_at; Start 305; Stop 329
tcggttgtggtgaaggattctattc

SEQ ID NO: 139194 - DNA, 25 bp, Artificial
  probe
  misc_feature (1)..(25): SEQ ID NO: 1195; WAN024CZ4_at; Start 749; Stop 773
tgactcctctcctctttcacgttga

SEQ ID NO: 139195 - DNA, 25 bp, Artificial
  probe
  misc_feature (1)..(25): SEQ ID NO: 1195; WAN024CZ4_at; Start 714; Stop 738
tatcacagcagaacaactccaagcc

SEQ ID NO: 139196 - DNA, 25 bp, Artificial
  probe
  misc_feature (1)..(25): SEQ ID NO: 1195; WAN024CZ4_at; Start 666; Stop 690
ggaacactttaccatcctatctagt

SEQ ID NO: 139197 - DNA, 25 bp, Artificial
  probe
  misc_feature (1)..(25): SEQ ID NO: 1195; WAN024CZ4_at; Start 511; Stop 535
gccaactatggagaatttcgtcgcg

SEQ ID NO: 139198 - DNA, 25 bp, Artificial
  probe
  misc_feature (1)..(25): SEQ ID NO: 1195; WAN024CZ4_at; Start 577; Stop 601
gaaaatcacctcaaagaaatccgtc

SEQ ID NO: 139199 - DNA, 25 bp, Artificial
  probe
  misc_feature (1)..(25): SEQ ID NO: 1195; WAN024CZ4_at; Start 564; Stop 588
ggttatcccaactgaaaatcacctc

SEQ ID NO: 139200 - DNA, 25 bp, Artificial
  probe
  misc_feature (1)..(25): SEQ ID NO: 1195; WAN024CZ4_at; Start 496; Stop 520
gatatcttctcacctgccaactatg

SEQ ID NO: 139201 - DNA, 25 bp, Artificial
  probe
  misc_feature (1)..(25): SEQ ID NO: 1195; WAN024CZ4_at; Start 290; Stop 314
caacaattttggatatcggttgtgg

SEQ ID NO: 139202 - DNA, 25 bp, Artificial
  probe
  misc_feature (1)..(25): SEQ ID NO: 1195; WAN024CZ4_at; Start 648; Stop 672
tatcaaggagcatttccaggaacac

SEQ ID NO: 139203 - DNA, 25 bp, Artificial
  probe
  misc_feature (1)..(25): SEQ ID NO: 1195; WAN024CZ4_at; Start 696; Stop 720
tgcctctctgactaagactatcaca

SEQ ID NO: 139204 - DNA, 25 bp, Artificial
  probe
  misc_feature (1)..(25): SEQ ID NO: 1195; WAN024CZ4_at; Start 120; Stop 144
ttcttttgacttggcgaaatttggc

SEQ ID NO: 139205 - DNA, 25 bp, Artificial
  probe
  misc_feature (1)..(25): SEQ ID NO: 1195; WAN024CZ4_at; Start 332; Stop 356
gcaaactacaagaaagtcactctga

SEQ ID NO: 139206 - DNA, 25 bp, Artificial
  probe
  misc_feature (1)..(25): SEQ ID NO: 1195; WAN024CZ4_at; Start 237; Stop 261
ccaagctatcttagatgctgtatct

SEQ ID NO: 139207 - DNA, 25 bp, Artificial
  probe
  misc_feature (1)..(25): SEQ ID NO: 1195; WAN024CZ4_at; Start 612; Stop 636
ggaccagctgacaaacaaggagtat

SEQ ID NO: 139208 - DNA, 25 bp, Artificial
  probe
  misc_feature (1)..(25): SEQ ID NO: 1195; WAN024CZ4_at; Start 104; Stop 128
agtgctgcaaccgtcattcttttga

SEQ ID NO: 139209 - DNA, 25 bp, Artificial
  probe
  misc_feature (1)..(25): SEQ ID NO: 1195; WAN024CZ4_at; Start 133; Stop 157
gcgaaatttggctatgtcaatctag

SEQ ID NO: 139210 - DNA, 25 bp, Artificial
  probe
  misc_feature (1)..(25): SEQ ID NO: 1195; WAN024CZ4_at; Start 728; Stop 752
aactccaagccctactcagtatgac

SEQ ID NO: 139211 - DNA, 25 bp, Artificial
  probe
  misc_feature (1)..(25): SEQ ID NO: 1195; WAN024CZ4_at; Start 380; Stop 404
tctccaaagattcagtccaaatcgc

SEQ ID NO: 139212 - DNA, 25 bp, Artificial
  probe
  misc_feature (1)..(25): SEQ ID NO: 1195; WAN024CZ4_at; Start 267; Stop 291
gcttgcaagctcaaaaactaccaca

SEQ ID NO: 139213 - DNA, 25 bp, Artificial
  probe
  misc_feature (1)..(25): SEQ ID NO: 6791; WAN024CZ5_at; Start 29; Stop 53
gcagattgtatcaaataaggcttga

SEQ ID NO: 139214 - DNA, 25 bp, Artificial
  probe
  misc_feature (1)..(25): SEQ ID NO: 6791; WAN024CZ5_at; Start 16; Stop 40
tcagatttatctggcagattgtatc

SEQ ID NO: 139215 - DNA, 25 bp, Artificial
  probe
  misc_feature (1)..(25): SEQ ID NO: 6791; WAN024CZ5_at; Start 37; Stop 61
tatcaaataaggcttgaaactgttt

SEQ ID NO: 139216 - DNA, 25 bp, Artificial
  probe
  misc_feature (1)..(25): SEQ ID NO: 6791; WAN024CZ5_at; Start 28; Stop 52
ggcagattgtatcaaataaggcttg

SEQ ID NO: 139217 - DNA, 25 bp, Artificial
  probe
  misc_feature (1)..(25): SEQ ID NO: 6791; WAN024CZ5_at; Start 49; Stop 73
cttgaaactgttttgaataggcgta

SEQ ID NO: 139218 - DNA, 25 bp, Artificial
  probe
  misc_feature (1)..(25): SEQ ID NO: 6791; WAN024CZ5_at; Start 3; Stop 27
ggaacagggagtatcagatttatct

SEQ ID NO: 139219 - DNA, 25 bp, Artificial
  probe
  misc_feature (1)..(25): SEQ ID NO: 6791; WAN024CZ5_at; Start 26; Stop 50
ctggcagattgtatcaaataaggct

SEQ ID NO: 139220 - DNA, 25 bp, Artificial
  probe
  misc_feature (1)..(25): SEQ ID NO: 6791; WAN024CZ5_at; Start 52; Stop 76
gaaactgttttgaataggcgtatag

SEQ ID NO: 139221 - DNA, 25 bp, Artificial
  probe
  misc_feature (1)..(25): SEQ ID NO: 6791; WAN024CZ5_at; Start 59; Stop 83
ttttgaataggcgtatagacttgag

SEQ ID NO: 139222 - DNA, 25 bp, Artificial
  probe
  misc_feature (1)..(25): SEQ ID NO: 6791; WAN024CZ5_at; Start 56; Stop 80
ctgttttgaataggcgtatagactt

SEQ ID NO: 139223 - DNA, 25 bp, Artificial
  probe
  misc_feature (1)..(25): SEQ ID NO: 6791; WAN024CZ5_at; Start 30; Stop 54
cagattgtatcaaataaggcttgaa

SEQ ID NO: 139224 - DNA, 25 bp, Artificial
  probe
  misc_feature (1)..(25): SEQ ID NO: 6791; WAN024CZ5_at; Start 7; Stop 31
cagggagtatcagatttatctggca

SEQ ID NO: 139225 - DNA, 25 bp, Artificial
  probe
  misc_feature (1)..(25): SEQ ID NO: 6791; WAN024CZ5_at; Start 54; Stop 78
aactgttttgaataggcgtatagac

SEQ ID NO: 139226 - DNA, 25 bp, Artificial
  probe
  misc_feature (1)..(25): SEQ ID NO: 6791; WAN024CZ5_at; Start 11; Stop 35
gagtatcagatttatctggcagatt

SEQ ID NO: 139227 - DNA, 25 bp, Artificial
  probe
  misc_feature (1)..(25): SEQ ID NO: 6791; WAN024CZ5_at; Start 40; Stop 64
caaataaggcttgaaactgttttga

SEQ ID NO: 139228 - DNA, 25 bp, Artificial
  probe
  misc_feature (1)..(25): SEQ ID NO: 6791; WAN024CZ5_at; Start 19; Stop 43
gatttatctggcagattgtatcaaa

SEQ ID NO: 139229 - DNA, 25 bp, Artificial
  probe
  misc_feature (1)..(25): SEQ ID NO: 6791; WAN024CZ5_at; Start 6; Stop 30
acagggagtatcagatttatctggc

SEQ ID NO: 139230 - DNA, 25 bp, Artificial
  probe
  misc_feature (1)..(25): SEQ ID NO: 6791; WAN024CZ5_at; Start 47; Stop 71
ggcttgaaactgttttgaataggcg

SEQ ID NO: 139231 - DNA, 25 bp, Artificial
  probe
  misc_feature (1)..(25): SEQ ID NO: 6791; WAN024CZ5_at; Start 4; Stop 28
gaacagggagtatcagatttatctg

SEQ ID NO: 139232 - DNA, 25 bp, Artificial
  probe
  misc_feature (1)..(25): SEQ ID NO: 6791; WAN024CZ5_at; Start 62; Stop 86
tgaataggcgtatagacttgagaat

SEQ ID NO: 139233 - DNA, 25 bp, Artificial
  probe
  misc_feature (1)..(25): SEQ ID NO: 6791; WAN024CZ5_at; Start 13; Stop 37
gtatcagatttatctggcagattgt

SEQ ID NO: 139234 - DNA, 25 bp, Artificial
  probe
  misc_feature (1)..(25): SEQ ID NO: 6791; WAN024CZ5_at; Start 55; Stop 79
actgttttgaataggcgtatagact

SEQ ID NO: 139235 - DNA, 25 bp, Artificial
  probe
  misc_feature (1)..(25): SEQ ID NO: 6791; WAN024CZ5_at; Start 34; Stop 58
ttgtatcaaataaggcttgaaactg

SEQ ID NO: 139236 - DNA, 25 bp, Artificial
  probe
  misc_feature (1)..(25): SEQ ID NO: 6791; WAN024CZ5_at; Start 23; Stop 47
tatctggcagattgtatcaaataag

SEQ ID NO: 139237 - DNA, 25 bp, Artificial
  probe
  misc_feature (1)..(25): SEQ ID NO: 6791; WAN024CZ5_at; Start 25; Stop 49
tctggcagattgtatcaaataaggc

SEQ ID NO: 139238 - DNA, 25 bp, Artificial
  probe
  misc_feature (1)..(25): SEQ ID NO: 6791; WAN024CZ5_at; Start 27; Stop 51
tggcagattgtatcaaataaggctt

SEQ ID NO: 139239 - DNA, 25 bp, Artificial
  probe
  misc_feature (1)..(25): SEQ ID NO: 6791; WAN024CZ5_at; Start 63; Stop 87
gaataggcgtatagacttgagaatt

SEQ ID NO: 139240 - DNA, 25 bp, Artificial
  probe
  misc_feature (1)..(25): SEQ ID NO: 6791; WAN024CZ5_at; Start 60; Stop 84
tttgaataggcgtatagacttgaga

SEQ ID NO: 139241 - DNA, 25 bp, Artificial
  probe
  misc_feature (1)..(25): SEQ ID NO: 6791; WAN024CZ5_at; Start 44; Stop 68
taaggcttgaaactgttttgaatag

SEQ ID NO: 139242 - DNA, 25 bp, Artificial
  probe
  misc_feature (1)..(25): SEQ ID NO: 6791; WAN024CZ5_at; Start 61; Stop 85
ttgaataggcgtatagacttgagaa

SEQ ID NO: 139243 - DNA, 25 bp, Artificial
  probe
  misc_feature (1)..(25): SEQ ID NO: 6791; WAN024CZ5_at; Start 35; Stop 59
tgtatcaaataaggcttgaaactgt

SEQ ID NO: 139244 - DNA, 25 bp, Artificial
  probe
  misc_feature (1)..(25): SEQ ID NO: 6791; WAN024CZ5_at; Start 9; Stop 33
gggagtatcagatttatctggcaga

SEQ ID NO: 139245 - DNA, 25 bp, Artificial
  probe
  misc_feature (1)..(25): SEQ ID NO: 6791; WAN024CZ5_at; Start 2; Stop 26
tggaacagggagtatcagatttatc

SEQ ID NO: 139246 - DNA, 25 bp, Artificial
  probe
  misc_feature (1)..(25): SEQ ID NO: 6791; WAN024CZ5_at; Start 32; Stop 56
gattgtatcaaataaggcttgaaac

SEQ ID NO: 139247 - DNA, 25 bp, Artificial
  probe
  misc_feature (1)..(25): SEQ ID NO: 5166; WAN024CZ6_at; Start 36; Stop 60
gtttcaattctatcgtgaacgaggg

SEQ ID NO: 139248 - DNA, 25 bp, Artificial
  probe
  misc_feature (1)..(25): SEQ ID NO: 5166; WAN024CZ6_at; Start 6; Stop 30
caatttaagcagtgtagatagtgag

SEQ ID NO: 139249 - DNA, 25 bp, Artificial
  probe
  misc_feature (1)..(25): SEQ ID NO: 5166; WAN024CZ6_at; Start 337; Stop 361
gccttatttgatacaatctgccaga

SEQ ID NO: 139250 - DNA, 25 bp, Artificial
  probe
  misc_feature (1)..(25): SEQ ID NO: 5166; WAN024CZ6_at; Start 192; Stop 216
gcagctagctggtgatgaagtaaag

SEQ ID NO: 139251 - DNA, 25 bp, Artificial
  probe
  misc_feature (1)..(25): SEQ ID NO: 5166; WAN024CZ6_at; Start 143; Stop 167
tacgtatgatgatgggctgtctggc

SEQ ID NO: 139252 - DNA, 25 bp, Artificial
  probe
  misc_feature (1)..(25): SEQ ID NO: 5166; WAN024CZ6_at; Start 316; Stop 340
gcctattcaaaacagtttcaagcct

SEQ ID NO: 139253 - DNA, 25 bp, Artificial
  probe
  misc_feature (1)..(25): SEQ ID NO: 5166; WAN024CZ6_at; Start 376; Stop 400
cctgttccatatagagctagagggc

SEQ ID NO: 139254 - DNA, 25 bp, Artificial
  probe
  misc_feature (1)..(25): SEQ ID NO: 5166; WAN024CZ6_at; Start 360; Stop 384
gataaatctgatactccctgttcca

SEQ ID NO: 139255 - DNA, 25 bp, Artificial
  probe
  misc_feature (1)..(25): SEQ ID NO: 5166; WAN024CZ6_at; Start 218; Stop 242
ccttgactatcaagcgttttcgacg

SEQ ID NO: 139256 - DNA, 25 bp, Artificial
  probe
  misc_feature (1)..(25): SEQ ID NO: 5166; WAN024CZ6_at; Start 64; Stop 88
gctgaaaactttatcaaagaaagga

SEQ ID NO: 139257 - DNA, 25 bp, Artificial
  probe
  misc_feature (1)..(25): SEQ ID NO: 5166; WAN024CZ6_at; Start 346; Stop 370
gatacaatctgccagataaatctga

SEQ ID NO: 139258 - DNA, 25 bp, Artificial
  probe
  misc_feature (1)..(25): SEQ ID NO: 5166; WAN024CZ6_at; Start 369; Stop 393
gatactccctgttccatatagagct

SEQ ID NO: 139259 - DNA, 25 bp, Artificial
  probe
  misc_feature (1)..(25): SEQ ID NO: 5166; WAN024CZ6_at; Start 403; Stop 427
gggaaaacatgcctaacagaactaa

SEQ ID NO: 139260 - DNA, 25 bp, Artificial
  probe
  misc_feature (1)..(25): SEQ ID NO: 5166; WAN024CZ6_at; Start 225; Stop 249
tatcaagcgttttcgacgtctcttc

SEQ ID NO: 139261 - DNA, 25 bp, Artificial
  probe
  misc_feature (1)..(25): SEQ ID NO: 5166; WAN024CZ6_at; Start 75; Stop 99
tatcaaagaaaggaaagcaggattc

SEQ ID NO: 139262 - DNA, 25 bp, Artificial
  probe
  misc_feature (1)..(25): SEQ ID NO: 5166; WAN024CZ6_at; Start 323; Stop 347
caaaacagtttcaagccttatttga

SEQ ID NO: 139263 - DNA, 25 bp, Artificial
  probe
  misc_feature (1)..(25): SEQ ID NO: 5166; WAN024CZ6_at; Start 55; Stop 79
cgagggaatgctgaaaactttatca

SEQ ID NO: 139264 - DNA, 25 bp, Artificial
  probe
  misc_feature (1)..(25): SEQ ID NO: 5166; WAN024CZ6_at; Start 379; Stop 403
gttccatatagagctagagggcagg

SEQ ID NO: 139265 - DNA, 25 bp, Artificial
  probe
  misc_feature (1)..(25): SEQ ID NO: 5166; WAN024CZ6_at; Start 284; Stop 308
gacgacatattctcaaattctcaag

SEQ ID NO: 139266 - DNA, 25 bp, Artificial
  probe
  misc_feature (1)..(25): SEQ ID NO: 5166; WAN024CZ6_at; Start 135; Stop 159
gaatgaagtacgtatgatgatgggc

SEQ ID NO: 139267 - DNA, 25 bp, Artificial
  probe
  misc_feature (1)..(25): SEQ ID NO: 5166; WAN024CZ6_at; Start 171; Stop 195
taatctctacctctttttaaagcag

SEQ ID NO: 139268 - DNA, 25 bp, Artificial
  probe
  misc_feature (1)..(25): SEQ ID NO: 5166; WAN024CZ6_at; Start 153; Stop 177
gatgggctgtctggcttataatctc

SEQ ID NO: 139269 - DNA, 25 bp, Artificial
  probe
  misc_feature (1)..(25): SEQ ID NO: 5166; WAN024CZ6_at; Start 239; Stop 263
gacgtctcttccttcatattgccgg

SEQ ID NO: 139270 - DNA, 25 bp, Artificial
  probe
  misc_feature (1)..(25): SEQ ID NO: 5166; WAN024CZ6_at; Start 81; Stop 105
agaaaggaaagcaggattctttggg

SEQ ID NO: 139271 - DNA, 25 bp, Artificial
  probe
  misc_feature (1)..(25): SEQ ID NO: 5166; WAN024CZ6_at; Start 263; Stop 287
gaaaatatgtctctactgctagacg

SEQ ID NO: 139272 - DNA, 25 bp, Artificial
  probe
  misc_feature (1)..(25): SEQ ID NO: 5166; WAN024CZ6_at; Start 274; Stop 298
tctactgctagacgacatattctca

SEQ ID NO: 139273 - DNA, 25 bp, Artificial
  probe
  misc_feature (1)..(25): SEQ ID NO: 5166; WAN024CZ6_at; Start 46; Stop 70
tatcgtgaacgagggaatgctgaaa

SEQ ID NO: 139274 - DNA, 25 bp, Artificial
  probe
  misc_feature (1)..(25): SEQ ID NO: 5166; WAN024CZ6_at; Start 104; Stop 128
gggataagacagatagttcgaccat

SEQ ID NO: 139275 - DNA, 25 bp, Artificial
  probe
  misc_feature (1)..(25): SEQ ID NO: 5166; WAN024CZ6_at; Start 121; Stop 145
tcgaccatgattaagaatgaagtac

SEQ ID NO: 139276 - DNA, 25 bp, Artificial
  probe
  misc_feature (1)..(25): SEQ ID NO: 5166; WAN024CZ6_at; Start 111; Stop 135
gacagatagttcgaccatgattaag

SEQ ID NO: 139277 - DNA, 25 bp, Artificial
  probe
  misc_feature (1)..(25): SEQ ID NO: 5166; WAN024CZ6_at; Start 157; Stop 181
ggctgtctggcttataatctctacc

SEQ ID NO: 139278 - DNA, 25 bp, Artificial
  probe
  misc_feature (1)..(25): SEQ ID NO: 5166; WAN024CZ6_at; Start 180; Stop 204
cctctttttaaagcagctagctggt

SEQ ID NO: 139279 - DNA, 25 bp, Artificial
  probe
  misc_feature (1)..(25): SEQ ID NO: 5166; WAN024CZ6_at; Start 258; Stop 282
tgccggaaaatatgtctctactgct

SEQ ID NO: 139280 - DNA, 25 bp, Artificial
  probe
  misc_feature (1)..(25): SEQ ID NO: 5166; WAN024CZ6_at; Start 245; Stop 269
tcttccttcatattgccggaaaata

SEQ ID NO: 139281 - DNA, 25 bp, Artificial
  probe
  misc_feature (1)..(25): SEQ ID NO: 1508; WAN024CZ7_at; Start 345; Stop 369
cgaagaacagttacaccaaatgggt

SEQ ID NO: 139282 - DNA, 25 bp, Artificial
  probe
  misc_feature (1)..(25): SEQ ID NO: 1508; WAN024CZ7_at; Start 448; Stop 472
caaaaagatgaacagattgaccaat

SEQ ID NO: 139283 - DNA, 25 bp, Artificial
  probe
  misc_feature (1)..(25): SEQ ID NO: 1508; WAN024CZ7_at; Start 100; Stop 124
ttagcctccaaagacaaggagatgg

SEQ ID NO: 139284 - DNA, 25 bp, Artificial
  probe
  misc_feature (1)..(25): SEQ ID NO: 1508; WAN024CZ7_at; Start 517; Stop 541
caagaaacctcaattcccaatggaa

SEQ ID NO: 139285 - DNA, 25 bp, Artificial
  probe
  misc_feature (1)..(25): SEQ ID NO: 1508; WAN024CZ7_at; Start 263; Stop 287
cagaccttgaacgtatgggagacca

SEQ ID NO: 139286 - DNA, 25 bp, Artificial
  probe
  misc_feature (1)..(25): SEQ ID NO: 1508; WAN024CZ7_at; Start 558; Stop 582
catagggcatctggaacgcttcgct

SEQ ID NO: 139287 - DNA, 25 bp, Artificial
  probe
  misc_feature (1)..(25): SEQ ID NO: 1508; WAN024CZ7_at; Start 203; Stop 227
ccttgcagcagccacaagtgtctga

SEQ ID NO: 139288 - DNA, 25 bp, Artificial
  probe
  misc_feature (1)..(25): SEQ ID NO: 1508; WAN024CZ7_at; Start 89; Stop 113
ccttactggccttagcctccaaaga

SEQ ID NO: 139289 - DNA, 25 bp, Artificial
  probe
  misc_feature (1)..(25): SEQ ID NO: 1508; WAN024CZ7_at; Start 307; Stop 331
gctgttttgcaactaaaagaaaatc

SEQ ID NO: 139290 - DNA, 25 bp, Artificial
  probe
  misc_feature (1)..(25): SEQ ID NO: 1508; WAN024CZ7_at; Start 56; Stop 80
tagggcaacttgtccttgaaacagc

SEQ ID NO: 139291 - DNA, 25 bp, Artificial
  probe
  misc_feature (1)..(25): SEQ ID NO: 1508; WAN024CZ7_at; Start 416; Stop 440
tgcaccaagcctcaaaagctattag

SEQ ID NO: 139292 - DNA, 25 bp, Artificial
  probe
  misc_feature (1)..(25): SEQ ID NO: 1508; WAN024CZ7_at; Start 481; Stop 505
gccttatcaaaggaaatcattggac

SEQ ID NO: 139293 - DNA, 25 bp, Artificial
  probe
  misc_feature (1)..(25): SEQ ID NO: 1508; WAN024CZ7_at; Start 586; Stop 610
tacattgctaacatttgtgaacgcc

SEQ ID NO: 139294 - DNA, 25 bp, Artificial
  probe
  misc_feature (1)..(25): SEQ ID NO: 1508; WAN024CZ7_at; Start 157; Stop 181
aaccaaggtcaaagcgctatcgaat

SEQ ID NO: 139295 - DNA, 25 bp, Artificial
  probe
  misc_feature (1)..(25): SEQ ID NO: 1508; WAN024CZ7_at; Start 609; Stop 633
cctagtctacctagaaacaggagaa

SEQ ID NO: 139296 - DNA, 25 bp, Artificial
  probe
  misc_feature (1)..(25): SEQ ID NO: 1508; WAN024CZ7_at; Start 243; Stop 267
tagcatcatgtcttcttgttcagac

SEQ ID NO: 139297 - DNA, 25 bp, Artificial
  probe
  misc_feature (1)..(25): SEQ ID NO: 1508; WAN024CZ7_at; Start 365; Stop 389
tgggtaaattatccctcagcatgct

SEQ ID NO: 139298 - DNA, 25 bp, Artificial
  probe
  misc_feature (1)..(25): SEQ ID NO: 1508; WAN024CZ7_at; Start 595; Stop 619
aacatttgtgaacgcctagtctacc

SEQ ID NO: 139299 - DNA, 25 bp, Artificial
  probe
  misc_feature (1)..(25): SEQ ID NO: 1508; WAN024CZ7_at; Start 335; Stop 359
tagcccctgacgaagaacagttaca

SEQ ID NO: 139300 - DNA, 25 bp, Artificial
  probe
  misc_feature (1)..(25): SEQ ID NO: 1508; WAN024CZ7_at; Start 547; Stop 571
tacctttatatcatagggcatctgg

SEQ ID NO: 139301 - DNA, 25 bp, Artificial
  probe
  misc_feature (1)..(25): SEQ ID NO: 1508; WAN024CZ7_at; Start 493; Stop 517
gaaatcattggacttatgaaagacc

SEQ ID NO: 139302 - DNA, 25 bp, Artificial
  probe
  misc_feature (1)..(25): SEQ ID NO: 1508; WAN024CZ7_at; Start 30; Stop 54
tgaattagaacaatcctttttagga

SEQ ID NO: 139303 - DNA, 25 bp, Artificial
  probe
  misc_feature (1)..(25): SEQ ID NO: 1508; WAN024CZ7_at; Start 129; Stop 153
gctaattatcaataaggatcatgct

SEQ ID NO: 139304 - DNA, 25 bp, Artificial
  probe
  misc_feature (1)..(25): SEQ ID NO: 1508; WAN024CZ7_at; Start 438; Stop 462
tagtattgctcaaaaagatgaacag

SEQ ID NO: 139305 - DNA, 25 bp, Artificial
  probe
  misc_feature (1)..(25): SEQ ID NO: 1508; WAN024CZ7_at; Start 401; Stop 425
tggttgcctttcctttgcaccaagc

SEQ ID NO: 139306 - DNA, 25 bp, Artificial
  probe
  misc_feature (1)..(25): SEQ ID NO: 1508; WAN024CZ7_at; Start 503; Stop 527
gacttatgaaagaccaagaaacctc

SEQ ID NO: 139307 - DNA, 25 bp, Artificial
  probe
  misc_feature (1)..(25): SEQ ID NO: 1508; WAN024CZ7_at; Start 114; Stop 138
caaggagatggcagagctaattatc

SEQ ID NO: 139308 - DNA, 25 bp, Artificial
  probe
  misc_feature (1)..(25): SEQ ID NO: 1508; WAN024CZ7_at; Start 322; Stop 346
aaagaaaatcaactagcccctgacg

SEQ ID NO: 139309 - DNA, 25 bp, Artificial
  probe
  misc_feature (1)..(25): SEQ ID NO: 1508; WAN024CZ7_at; Start 424; Stop 448
gcctcaaaagctattagtattgctc

SEQ ID NO: 139310 - DNA, 25 bp, Artificial
  probe
  misc_feature (1)..(25): SEQ ID NO: 1508; WAN024CZ7_at; Start 571; Stop 595
gaacgcttcgctgattacattgcta

SEQ ID NO: 139311 - DNA, 25 bp, Artificial
  probe
  misc_feature (1)..(25): SEQ ID NO: 1508; WAN024CZ7_at; Start 215; Stop 239
cacaagtgtctgaccttcgatttgt

SEQ ID NO: 139312 - DNA, 25 bp, Artificial
  probe
  misc_feature (1)..(25): SEQ ID NO: 1508; WAN024CZ7_at; Start 466; Stop 490
gaccaatattattatgccttatcaa

SEQ ID NO: 139313 - DNA, 25 bp, Artificial
  probe
  misc_feature (1)..(25): SEQ ID NO: 1508; WAN024CZ7_at; Start 16; Stop 40
gacttagaattgcatgaattagaac

SEQ ID NO: 139314 - DNA, 25 bp, Artificial
  probe
  misc_feature (1)..(25): SEQ ID NO: 1508; WAN024CZ7_at; Start 278; Stop 302
tgggagaccatatggcaggcattgc

SEQ ID NO: 139315 - DNA, 25 bp, Artificial
  probe
  misc_feature (1)..(25): SEQ ID NO: 2531; WAN024CZ8_at; Start 456; Stop 480
gcaacgcctttgcattgcgcgagct

SEQ ID NO: 139316 - DNA, 25 bp, Artificial
  probe
  misc_feature (1)..(25): SEQ ID NO: 2531; WAN024CZ8_at; Start 98; Stop 122
ccttgataggcccatctggttgtgg

SEQ ID NO: 139317 - DNA, 25 bp, Artificial
  probe
  misc_feature (1)..(25): SEQ ID NO: 2531; WAN024CZ8_at; Start 653; Stop 677
tcttaacaggagaaatttgcgaatt

SEQ ID NO: 139318 - DNA, 25 bp, Artificial
  probe
  misc_feature (1)..(25): SEQ ID NO: 2531; WAN024CZ8_at; Start 712; Stop 736
gatcagcgcacagaagactatattt

SEQ ID NO: 139319 - DNA, 25 bp, Artificial
  probe
  misc_feature (1)..(25): SEQ ID NO: 2531; WAN024CZ8_at; Start 556; Stop 580
gaagacctcattcagcaactaaaaa

SEQ ID NO: 139320 - DNA, 25 bp, Artificial
  probe
  misc_feature (1)..(25): SEQ ID NO: 2531; WAN024CZ8_at; Start 187; Stop 211
ggccaagtcctcttagatgagcaag

SEQ ID NO: 139321 - DNA, 25 bp, Artificial
  probe
  misc_feature (1)..(25): SEQ ID NO: 2531; WAN024CZ8_at; Start 500; Stop 524
ttctgttaatggatgagccgacttc

SEQ ID NO: 139322 - DNA, 25 bp, Artificial
  probe
  misc_feature (1)..(25): SEQ ID NO: 2531; WAN024CZ8_at; Start 85; Stop 109
agacagattactgccttgataggcc

SEQ ID NO: 139323 - DNA, 25 bp, Artificial
  probe
  misc_feature (1)..(25): SEQ ID NO: 2531; WAN024CZ8_at; Start 316; Stop 340
tatggcccaaggacacatggtattc

SEQ ID NO: 139324 - DNA, 25 bp, Artificial
  probe
  misc_feature (1)..(25): SEQ ID NO: 2531; WAN024CZ8_at; Start 274; Stop 298
cagcctaatccctttgccatgtcta

SEQ ID NO: 139325 - DNA, 25 bp, Artificial
  probe
  misc_feature (1)..(25): SEQ ID NO: 2531; WAN024CZ8_at; Start 526; Stop 550
gccttagaccctatctccactttaa

SEQ ID NO: 139326 - DNA, 25 bp, Artificial
  probe
  misc_feature (1)..(25): SEQ ID NO: 2531; WAN024CZ8_at; Start 567; Stop 591
tcagcaactaaaaaaggattatacg

SEQ ID NO: 139327 - DNA, 25 bp, Artificial
  probe
  misc_feature (1)..(25): SEQ ID NO: 2531; WAN024CZ8_at; Start 583; Stop 607
gattatacgattatcattgttaccc

SEQ ID NO: 139328 - DNA, 25 bp, Artificial
  probe
  misc_feature (1)..(25): SEQ ID NO: 2531; WAN024CZ8_at; Start 172; Stop 196
tcttgccatattgaaggccaagtcc

SEQ ID NO: 139329 - DNA, 25 bp, Artificial
  probe
  misc_feature (1)..(25): SEQ ID NO: 2531; WAN024CZ8_at; Start 541; Stop 565
tccactttaaaaattgaagacctca

SEQ ID NO: 139330 - DNA, 25 bp, Artificial
  probe
  misc_feature (1)..(25): SEQ ID NO: 2531; WAN024CZ8_at; Start 202; Stop 226
gatgagcaagatatttatagtagca

SEQ ID NO: 139331 - DNA, 25 bp, Artificial
  probe
  misc_feature (1)..(25): SEQ ID NO: 2531; WAN024CZ8_at; Start 445; Stop 469
ggcggtcagcagcaacgcctttgca

SEQ ID NO: 139332 - DNA, 25 bp, Artificial
  probe
  misc_feature (1)..(25): SEQ ID NO: 2531; WAN024CZ8_at; Start 695; Stop 719
tgtttaccaatccaaaagatcagcg

SEQ ID NO: 139333 - DNA, 25 bp, Artificial
  probe
  misc_feature (1)..(25): SEQ ID NO: 2531; WAN024CZ8_at; Start 600; Stop 624
tgttacccataacatgcaacaagct

SEQ ID NO: 139334 - DNA, 25 bp, Artificial
  probe
  misc_feature (1)..(25): SEQ ID NO: 2531; WAN024CZ8_at; Start 289; Stop 313
gccatgtctatctatgataacgtgg

SEQ ID NO: 139335 - DNA, 25 bp, Artificial
  probe
  misc_feature (1)..(25): SEQ ID NO: 2531; WAN024CZ8_at; Start 615; Stop 639
gcaacaagcttcacgtatttcagat

SEQ ID NO: 139336 - DNA, 25 bp, Artificial
  probe
  misc_feature (1)..(25): SEQ ID NO: 2531; WAN024CZ8_at; Start 253; Stop 277
cgtgtagggatggtttttcaacagc

SEQ ID NO: 139337 - DNA, 25 bp, Artificial
  probe
  misc_feature (1)..(25): SEQ ID NO: 2531; WAN024CZ8_at; Start 304; Stop 328
gataacgtggcttatggcccaagga

SEQ ID NO: 139338 - DNA, 25 bp, Artificial
  probe
  misc_feature (1)..(25): SEQ ID NO: 2531; WAN024CZ8_at; Start 347; Stop 371
aaaaacaattagatgccttagtgga

SEQ ID NO: 139339 - DNA, 25 bp, Artificial
  probe
  misc_feature (1)..(25): SEQ ID NO: 2531; WAN024CZ8_at; Start 66; Stop 90
ttcgattcaattaccagaaagacag

SEQ ID NO: 139340 - DNA, 25 bp, Artificial
  probe
  misc_feature (1)..(25): SEQ ID NO: 2531; WAN024CZ8_at; Start 329; Stop 353
cacatggtattcgagacaaaaaaca

SEQ ID NO: 139341 - DNA, 25 bp, Artificial
  probe
  misc_feature (1)..(25): SEQ ID NO: 2531; WAN024CZ8_at; Start 727; Stop 751
gactatatttcaggacggttcggat

SEQ ID NO: 139342 - DNA, 25 bp, Artificial
  probe
  misc_feature (1)..(25): SEQ ID NO: 2531; WAN024CZ8_at; Start 3; Stop 27
gggaacattttcagtcagacaccta

SEQ ID NO: 139343 - DNA, 25 bp, Artificial
  probe
  misc_feature (1)..(25): SEQ ID NO: 2531; WAN024CZ8_at; Start 415; Stop 439
gatcttaaaaagagtgccatgtcct

SEQ ID NO: 139344 - DNA, 25 bp, Artificial
  probe
  misc_feature (1)..(25): SEQ ID NO: 2531; WAN024CZ8_at; Start 471; Stop 495
tgcgcgagctttagcagtagaacct

SEQ ID NO: 139345 - DNA, 25 bp, Artificial
  probe
  misc_feature (1)..(25): SEQ ID NO: 2531; WAN024CZ8_at; Start 157; Stop 181
aacgatttggttccttcttgccata

SEQ ID NO: 139346 - DNA, 25 bp, Artificial
  probe
  misc_feature (1)..(25): SEQ ID NO: 2531; WAN024CZ8_at; Start 18; Stop 42
cagacacctagacttattttacggg

SEQ ID NO: 139347 - DNA, 25 bp, Artificial
  probe
  misc_feature (1)..(25): SEQ ID NO: 2531; WAN024CZ8_at; Start 511; Stop 535
gatgagccgacttcagccttagacc

SEQ ID NO: 139348 - DNA, 25 bp, Artificial
  probe
  misc_feature (1)..(25): SEQ ID NO: 2531; WAN024CZ8_at; Start 217; Stop 241
tatagtagcaaattcaaccttaatc

SEQ ID NO: 139349 - DNA, 25 bp, Artificial
  probe
  misc_feature (1)..(25): SEQ ID NO: 1962; WAN024CZ9_at; Start 262; Stop 286
tttacctggcttacgaacaggcgca

SEQ ID NO: 139350 - DNA, 25 bp, Artificial
  probe
  misc_feature (1)..(25): SEQ ID NO: 1962; WAN024CZ9_at; Start 477; Stop 501
caattgttgcaatgtaatcttttaa

SEQ ID NO: 139351 - DNA, 25 bp, Artificial
  probe
  misc_feature (1)..(25): SEQ ID NO: 1962; WAN024CZ9_at; Start 92; Stop 116
ccaccaagtttttcaatcatctcga

SEQ ID NO: 139352 - DNA, 25 bp, Artificial
  probe
  misc_feature (1)..(25): SEQ ID NO: 1962; WAN024CZ9_at; Start 355; Stop 379
catgtcgactttcttgtcagtagca

SEQ ID NO: 139353 - DNA, 25 bp, Artificial
  probe
  misc_feature (1)..(25): SEQ ID NO: 1962; WAN024CZ9_at; Start 276; Stop 300
gaacaggcgcaaaaccaattcccaa

SEQ ID NO: 139354 - DNA, 25 bp, Artificial
  probe
  misc_feature (1)..(25): SEQ ID NO: 1962; WAN024CZ9_at; Start 396; Stop 420
gaacagcgtagctataagcatttcc

SEQ ID NO: 139355 - DNA, 25 bp, Artificial
  probe
  misc_feature (1)..(25): SEQ ID NO: 1962; WAN024CZ9_at; Start 383; Stop 407
tgaacgatttcacgaacagcgtagc

SEQ ID NO: 139356 - DNA, 25 bp, Artificial
  probe
  misc_feature (1)..(25): SEQ ID NO: 1962; WAN024CZ9_at; Start 53; Stop 77
tcatccaattcaacaaggaaggcac

SEQ ID NO: 139357 - DNA, 25 bp, Artificial
  probe
  misc_feature (1)..(25): SEQ ID NO: 1962; WAN024CZ9_at; Start 172; Stop 196
ttgacctggcttaatggcatccgcg

SEQ ID NO: 139358 - DNA, 25 bp, Artificial
  probe
  misc_feature (1)..(25): SEQ ID NO: 1962; WAN024CZ9_at; Start 448; Stop 472
gaaggtaatgccttcctttggataa

SEQ ID NO: 139359 - DNA, 25 bp, Artificial
  probe
  misc_feature (1)..(25): SEQ ID NO: 1962; WAN024CZ9_at; Start 247; Stop 271
aacttcgcgtggcaatttacctggc

SEQ ID NO: 139360 - DNA, 25 bp, Artificial
  probe
  misc_feature (1)..(25): SEQ ID NO: 1962; WAN024CZ9_at; Start 106; Stop 130
aatcatctcgatagttgccttaaca

SEQ ID NO: 139361 - DNA, 25 bp, Artificial
  probe
  misc_feature (1)..(25): SEQ ID NO: 1962; WAN024CZ9_at; Start 66; Stop 90
caaggaaggcacaacctgccataac

SEQ ID NO: 139362 - DNA, 25 bp, Artificial
  probe
  misc_feature (1)..(25): SEQ ID NO: 1962; WAN024CZ9_at; Start 437; Stop 461
ctaatatcacggaaggtaatgcctt

SEQ ID NO: 139363 - DNA, 25 bp, Artificial
  probe
  misc_feature (1)..(25): SEQ ID NO: 1962; WAN024CZ9_at; Start 410; Stop 434
taagcatttccatcagccatcaaag

SEQ ID NO: 139364 - DNA, 25 bp, Artificial
  probe
  misc_feature (1)..(25): SEQ ID NO: 1962; WAN024CZ9_at; Start 126; Stop 150
taacagttccacctgtcgccaaaag

SEQ ID NO: 139365 - DNA, 25 bp, Artificial
  probe
  misc_feature (1)..(25): SEQ ID NO: 1962; WAN024CZ9_at; Start 314; Stop 338
ggacaacccacgataaatccacgag

SEQ ID NO: 139366 - DNA, 25 bp, Artificial
  probe
  misc_feature (1)..(25): SEQ ID NO: 1962; WAN024CZ9_at; Start 6; Stop 30
taagaactttgtagtcgtagtcacc

SEQ ID NO: 139367 - DNA, 25 bp, Artificial
  probe
  misc_feature (1)..(25): SEQ ID NO: 1962; WAN024CZ9_at; Start 26; Stop 50
tcaccaattttttcacggccgttca

SEQ ID NO: 139368 - DNA, 25 bp, Artificial
  probe
  misc_feature (1)..(25): SEQ ID NO: 1962; WAN024CZ9_at; Start 372; Stop 396
cagtagcatactgaacgatttcacg

SEQ ID NO: 139369 - DNA, 25 bp, Artificial
  probe
  misc_feature (1)..(25): SEQ ID NO: 1962; WAN024CZ9_at; Start 115; Stop 139
gatagttgccttaacagttccacct

SEQ ID NO: 139370 - DNA, 25 bp, Artificial
  probe
  misc_feature (1)..(25): SEQ ID NO: 1962; WAN024CZ9_at; Start 187; Stop 211
ggcatccgcgtgcatagtcaaggta

SEQ ID NO: 139371 - DNA, 25 bp, Artificial
  probe
  misc_feature (1)..(25): SEQ ID NO: 1962; WAN024CZ9_at; Start 325; Stop 349
gataaatccacgagcttcaggtccc

SEQ ID NO: 139372 - DNA, 25 bp, Artificial
  probe
  misc_feature (1)..(25): SEQ ID NO: 1962; WAN024CZ9_at; Start 80; Stop 104
cctgccataacaccaccaagttttt

SEQ ID NO: 139373 - DNA, 25 bp, Artificial
  probe
  misc_feature (1)..(25): SEQ ID NO: 1962; WAN024CZ9_at; Start 141; Stop 165
tcgccaaaaggtcatctacaataag

SEQ ID NO: 139374 - DNA, 25 bp, Artificial
  probe
  misc_feature (1)..(25): SEQ ID NO: 1962; WAN024CZ9_at; Start 304; Stop 328
aaaggcaactggacaacccacgata

SEQ ID NO: 139375 - DNA, 25 bp, Artificial
  probe
  misc_feature (1)..(25): SEQ ID NO: 1962; WAN024CZ9_at; Start 157; Stop 181
tacaataagaacacgttgacctggc

SEQ ID NO: 139376 - DNA, 25 bp, Artificial
  probe
  misc_feature (1)..(25): SEQ ID NO: 1962; WAN024CZ9_at; Start 338; Stop 362
gcttcaggtcccacgatcatgtcga

SEQ ID NO: 139377 - DNA, 25 bp, Artificial
  probe
  misc_feature (1)..(25): SEQ ID NO: 1962; WAN024CZ9_at; Start 38; Stop 62
tcacggccgttcaattcatccaatt

SEQ ID NO: 139378 - DNA, 25 bp, Artificial
  probe
  misc_feature (1)..(25): SEQ ID NO: 1962; WAN024CZ9_at; Start 231; Stop 255
catagtcagcagaaataacttcgcg

SEQ ID NO: 139379 - DNA, 25 bp, Artificial
  probe
  misc_feature (1)..(25): SEQ ID NO: 1962; WAN024CZ9_at; Start 291; Stop 315
caattcccaactcaaaggcaactgg

SEQ ID NO: 139380 - DNA, 25 bp, Artificial
  probe
  misc_feature (1)..(25): SEQ ID NO: 1962; WAN024CZ9_at; Start 201; Stop 225
tagtcaaggtatcgacaccgtactc

SEQ ID NO: 139381 - DNA, 25 bp, Artificial
  probe
  misc_feature (1)..(25): SEQ ID NO: 1962; WAN024CZ9_at; Start 216; Stop 240
caccgtactctttttcatagtcagc

SEQ ID NO: 139382 - DNA, 25 bp, Artificial
  probe
  misc_feature (1)..(25): SEQ ID NO: 1962; WAN024CZ9_at; Start 425; Stop 449
gccatcaaaggactaatatcacgga

SEQ ID NO: 139383 - DNA, 25 bp, Artificial
  probe
  misc_feature (1)..(25): SEQ ID NO: 4895; WAN024CZA_at; Start 352; Stop 376
caacgtgttcttattgtagatgacc

SEQ ID NO: 139384 - DNA, 25 bp, Artificial
  probe
  misc_feature (1)..(25): SEQ ID NO: 4895; WAN024CZA_at; Start 65; Stop 89
aaggcattaccttccgtgatattag

SEQ ID NO: 139385 - DNA, 25 bp, Artificial
  probe
  misc_feature (1)..(25): SEQ ID NO: 4895; WAN024CZA_at; Start 496; Stop 520
ggtgactacgactacaaagttctta

SEQ ID NO: 139386 - DNA, 25 bp, Artificial
  probe
  misc_feature (1)..(25): SEQ ID NO: 4895; WAN024CZA_at; Start 21; Stop 45
gaatttaaaagattacattgcaaca

SEQ ID NO: 139387 - DNA, 25 bp, Artificial
  probe
  misc_feature (1)..(25): SEQ ID NO: 4895; WAN024CZA_at; Start 263; Stop 287
aattgccacgcgaagttatttctgc

SEQ ID NO: 139388 - DNA, 25 bp, Artificial
  probe
  misc_feature (1)..(25): SEQ ID NO: 4895; WAN024CZA_at; Start 181; Stop 205
cctgaagctcgtggatttatcgtgg

SEQ ID NO: 139389 - DNA, 25 bp, Artificial
  probe
  misc_feature (1)..(25): SEQ ID NO: 4895; WAN024CZA_at; Start 196; Stop 220
tttatcgtgggttgtccagttgcct

SEQ ID NO: 139390 - DNA, 25 bp, Artificial
  probe
  misc_feature (1)..(25): SEQ ID NO: 4895; WAN024CZA_at; Start 291; Stop 315
ctatgaaaaagagtacggtgtcgat

SEQ ID NO: 139391 - DNA, 25 bp, Artificial
  probe
  misc_feature (1)..(25): SEQ ID NO: 4895; WAN024CZA_at; Start 240; Stop 264
tgcgcctgttcgtaagccaggtaaa

SEQ ID NO: 139392 - DNA, 25 bp, Artificial
  probe
  misc_feature (1)..(25): SEQ ID NO: 4895; WAN024CZA_at; Start 233; Stop 257
ttggttttgcgcctgttcgtaagcc

SEQ ID NO: 139393 - DNA, 25 bp, Artificial
  probe
  misc_feature (1)..(25): SEQ ID NO: 4895; WAN024CZA_at; Start 36; Stop 60
cattgcaacaattgaaaattatcca

SEQ ID NO: 139394 - DNA, 25 bp, Artificial
  probe
  misc_feature (1)..(25): SEQ ID NO: 4895; WAN024CZA_at; Start 450; Stop 474
tgccttccttgttgaattggatgaa

SEQ ID NO: 139395 - DNA, 25 bp, Artificial
  probe
  misc_feature (1)..(25): SEQ ID NO: 4895; WAN024CZA_at; Start 388; Stop 412
ggtggaactgttaaggcaactatcg

SEQ ID NO: 139396 - DNA, 25 bp, Artificial
  probe
  misc_feature (1)..(25): SEQ ID NO: 4895; WAN024CZA_at; Start 103; Stop 127
gatggaaatgcttatagctacgctg

SEQ ID NO: 139397 - DNA, 25 bp, Artificial
  probe
  misc_feature (1)..(25): SEQ ID NO: 4895; WAN024CZA_at; Start 252; Stop 276
taagccaggtaaattgccacgcgaa

SEQ ID NO: 139398 - DNA, 25 bp, Artificial
  probe
  misc_feature (1)..(25): SEQ ID NO: 4895; WAN024CZA_at; Start 109; Stop 133
aatgcttatagctacgctgttcgtg

SEQ ID NO: 139399 - DNA, 25 bp, Artificial
  probe
  misc_feature (1)..(25): SEQ ID NO: 4895; WAN024CZA_at; Start 52; Stop 76
aattatccaaaggaaggcattacct

SEQ ID NO: 139400 - DNA, 25 bp, Artificial
  probe
  misc_feature (1)..(25): SEQ ID NO: 4895; WAN024CZA_at; Start 373; Stop 397
gaccttttggcgacaggtggaactg

SEQ ID NO: 139401 - DNA, 25 bp, Artificial
  probe
  misc_feature (1)..(25): SEQ ID NO: 4895; WAN024CZA_at; Start 168; Stop 192
catgatcgtgggacctgaagctcgt

SEQ ID NO: 139402 - DNA, 25 bp, Artificial
  probe
  misc_feature (1)..(25): SEQ ID NO: 4895; WAN024CZA_at; Start 330; Stop 354
cgcggatgccattaagccaggtcaa

SEQ ID NO: 139403 - DNA, 25 bp, Artificial
  probe
  misc_feature (1)..(25): SEQ ID NO: 4895; WAN024CZA_at; Start 433; Stop 457
ggtgttatggcaggttgtgccttcc

SEQ ID NO: 139404 - DNA, 25 bp, Artificial
  probe
  misc_feature (1)..(25): SEQ ID NO: 4895; WAN024CZA_at; Start 464; Stop 488
aattggatgaattgaacggccgtga

SEQ ID NO: 139405 - DNA, 25 bp, Artificial
  probe
  misc_feature (1)..(25): SEQ ID NO: 4895; WAN024CZA_at; Start 399; Stop 423
taaggcaactatcgagatgattgaa

SEQ ID NO: 139406 - DNA, 25 bp, Artificial
  probe
  misc_feature (1)..(25): SEQ ID NO: 4895; WAN024CZA_at; Start 269; Stop 293
cacgcgaagttatttctgctgacta

SEQ ID NO: 139407 - DNA, 25 bp, Artificial
  probe
  misc_feature (1)..(25): SEQ ID NO: 4895; WAN024CZA_at; Start 90; Stop 114
tcctttgatggctgatggaaatgct

SEQ ID NO: 139408 - DNA, 25 bp, Artificial
  probe
  misc_feature (1)..(25): SEQ ID NO: 4895; WAN024CZA_at; Start 156; Stop 180
caagaaagtcgacatgatcgtggga

SEQ ID NO: 139409 - DNA, 25 bp, Artificial
  probe
  misc_feature (1)..(25): SEQ ID NO: 4895; WAN024CZA_at; Start 77; Stop 101
tccgtgatattagtcctttgatggc

SEQ ID NO: 139410 - DNA, 25 bp, Artificial
  probe
  misc_feature (1)..(25): SEQ ID NO: 4895; WAN024CZA_at; Start 338; Stop 362
ccattaagccaggtcaacgtgttct

SEQ ID NO: 139411 - DNA, 25 bp, Artificial
  probe
  misc_feature (1)..(25): SEQ ID NO: 4895; WAN024CZA_at; Start 361; Stop 385
cttattgtagatgaccttttggcga

SEQ ID NO: 139412 - DNA, 25 bp, Artificial
  probe
  misc_feature (1)..(25): SEQ ID NO: 4895; WAN024CZA_at; Start 283; Stop 307
tctgctgactatgaaaaagagtacg

SEQ ID NO: 139413 - DNA, 25 bp, Artificial
  probe
  misc_feature (1)..(25): SEQ ID NO: 4895; WAN024CZA_at; Start 324; Stop 348
tatgcacgcggatgccattaagcca

SEQ ID NO: 139414 - DNA, 25 bp, Artificial
  probe
  misc_feature (1)..(25): SEQ ID NO: 4895; WAN024CZA_at; Start 142; Stop 166
cagtatgctactgacaagaaagtcg

SEQ ID NO: 139415 - DNA, 25 bp, Artificial
  probe
  misc_feature (1)..(25): SEQ ID NO: 4895; WAN024CZA_at; Start 207; Stop 231
ttgtccagttgcctttgagttggga

SEQ ID NO: 139416 - DNA, 25 bp, Artificial
  probe
  misc_feature (1)..(25): SEQ ID NO: 4895; WAN024CZA_at; Start 441; Stop 465
ggcaggttgtgccttccttgttgaa

SEQ ID NO: 139417 - DNA, 25 bp, Artificial
  probe
  misc_feature (1)..(25): SEQ ID NO: 1492; WAN024CZB_at; Start 257; Stop 281
cagagtttaccttggtgcttcatac

SEQ ID NO: 139418 - DNA, 25 bp, Artificial
  probe
  misc_feature (1)..(25): SEQ ID NO: 1492; WAN024CZB_at; Start 396; Stop 420
cgttgccaaactcatggaagatcgt

SEQ ID NO: 139419 - DNA, 25 bp, Artificial
  probe
  misc_feature (1)..(25): SEQ ID NO: 1492; WAN024CZB_at; Start 11; Stop 35
gagatcgtcatcagttaataaaaaa

SEQ ID NO: 139420 - DNA, 25 bp, Artificial
  probe
  misc_feature (1)..(25): SEQ ID NO: 1492; WAN024CZB_at; Start 211; Stop 235
gatttggtggaatttttgtctcatc

SEQ ID NO: 139421 - DNA, 25 bp, Artificial
  probe
  misc_feature (1)..(25): SEQ ID NO: 1492; WAN024CZB_at; Start 103; Stop 127
tgtgtgacgcagacaaccttgtctc

SEQ ID NO: 139422 - DNA, 25 bp, Artificial
  probe
  misc_feature (1)..(25): SEQ ID NO: 1492; WAN024CZB_at; Start 227; Stop 251
tgtctcatcatttagaaggtgttgc

SEQ ID NO: 139423 - DNA, 25 bp, Artificial
  probe
  misc_feature (1)..(25): SEQ ID NO: 1492; WAN024CZB_at; Start 279; Stop 303
taccaaattgggagaagcctctgtt

SEQ ID NO: 139424 - DNA, 25 bp, Artificial
  probe
  misc_feature (1)..(25): SEQ ID NO: 1492; WAN024CZB_at; Start 195; Stop 219
tgagacagaaaagattgatttggtg

SEQ ID NO: 139425 - DNA, 25 bp, Artificial
  probe
  misc_feature (1)..(25): SEQ ID NO: 1492; WAN024CZB_at; Start 235; Stop 259
catttagaaggtgttgcaagagcag

SEQ ID NO: 139426 - DNA, 25 bp, Artificial
  probe
  misc_feature (1)..(25): SEQ ID NO: 1492; WAN024CZB_at; Start 328; Stop 352
aaggatgaatggattttaggaacag

SEQ ID NO: 139427 - DNA, 25 bp, Artificial
  probe
  misc_feature (1)..(25): SEQ ID NO: 1492; WAN024CZB_at; Start 86; Stop 110
tggaggcgcacaatgtttgtgtgac

SEQ ID NO: 139428 - DNA, 25 bp, Artificial
  probe
  misc_feature (1)..(25): SEQ ID NO: 1492; WAN024CZB_at; Start 388; Stop 412
gatcagcacgttgccaaactcatgg

SEQ ID NO: 139429 - DNA, 25 bp, Artificial
  probe
  misc_feature (1)..(25): SEQ ID NO: 1492; WAN024CZB_at; Start 378; Stop 402
tatttgtcgagatcagcacgttgcc

SEQ ID NO: 139430 - DNA, 25 bp, Artificial
  probe
  misc_feature (1)..(25): SEQ ID NO: 1492; WAN024CZB_at; Start 96; Stop 120
caatgtttgtgtgacgcagacaacc

SEQ ID NO: 139431 - DNA, 25 bp, Artificial
  probe
  misc_feature (1)..(25): SEQ ID NO: 1492; WAN024CZB_at; Start 269; Stop 293
tggtgcttcataccaaattgggaga

SEQ ID NO: 139432 - DNA, 25 bp, Artificial
  probe
  misc_feature (1)..(25): SEQ ID NO: 1492; WAN024CZB_at; Start 244; Stop 268
ggtgttgcaagagcagagtttacct

SEQ ID NO: 139433 - DNA, 25 bp, Artificial
  probe
  misc_feature (1)..(25): SEQ ID NO: 1492; WAN024CZB_at; Start 404; Stop 428
aactcatggaagatcgtttgctaga

SEQ ID NO: 139434 - DNA, 25 bp, Artificial
  probe
  misc_feature (1)..(25): SEQ ID NO: 1492; WAN024CZB_at; Start 339; Stop 363
gattttaggaacagttgctggtgcc

SEQ ID NO: 139435 - DNA, 25 bp, Artificial
  probe
  misc_feature (1)..(25): SEQ ID NO: 1492; WAN024CZB_at; Start 60; Stop 84
tacacaaaaagaaattcaagatcgg

SEQ ID NO: 139436 - DNA, 25 bp, Artificial
  probe
  misc_feature (1)..(25): SEQ ID NO: 1492; WAN024CZB_at; Start 169; Stop 193
gatatggtgtattatgtactagtaa

SEQ ID NO: 139437 - DNA, 25 bp, Artificial
  probe
  misc_feature (1)..(25): SEQ ID NO: 1492; WAN024CZB_at; Start 352; Stop 376
gttgctggtgccaataccttattgg

SEQ ID NO: 139438 - DNA, 25 bp, Artificial
  probe
  misc_feature (1)..(25): SEQ ID NO: 1492; WAN024CZB_at; Start 412; Stop 436
gaagatcgtttgctagatttgatga

SEQ ID NO: 139439 - DNA, 25 bp, Artificial
  probe
  misc_feature (1)..(25): SEQ ID NO: 1492; WAN024CZB_at; Start 137; Stop 161
gcgaaatcggcttgaccaaggtcaa

SEQ ID NO: 139440 - DNA, 25 bp, Artificial
  probe
  misc_feature (1)..(25): SEQ ID NO: 1492; WAN024CZB_at; Start 2; Stop 26
tgagaaaaagagatcgtcatcagtt

SEQ ID NO: 139441 - DNA, 25 bp, Artificial
  probe
  misc_feature (1)..(25): SEQ ID NO: 1492; WAN024CZB_at; Start 296; Stop 320
cctctgttttggcaaatattgtaga

SEQ ID NO: 139442 - DNA, 25 bp, Artificial
  probe
  misc_feature (1)..(25): SEQ ID NO: 1492; WAN024CZB_at; Start 427; Stop 451
gatttgatgaaagataagtaactaa

SEQ ID NO: 139443 - DNA, 25 bp, Artificial
  probe
  misc_feature (1)..(25): SEQ ID NO: 1492; WAN024CZB_at; Start 129; Stop 153
tgatttgcgcgaaatcggcttgacc

SEQ ID NO: 139444 - DNA, 25 bp, Artificial
  probe
  misc_feature (1)..(25): SEQ ID NO: 1492; WAN024CZB_at; Start 367; Stop 391
accttattggttatttgtcgagatc

SEQ ID NO: 139445 - DNA, 25 bp, Artificial
  probe
  misc_feature (1)..(25): SEQ ID NO: 1492; WAN024CZB_at; Start 289; Stop 313
ggagaagcctctgttttggcaaata

SEQ ID NO: 139446 - DNA, 25 bp, Artificial
  probe
  misc_feature (1)..(25): SEQ ID NO: 1492; WAN024CZB_at; Start 346; Stop 370
ggaacagttgctggtgccaatacct

SEQ ID NO: 139447 - DNA, 25 bp, Artificial
  probe
  misc_feature (1)..(25): SEQ ID NO: 1492; WAN024CZB_at; Start 112; Stop 136
cagacaaccttgtctcgtgatttgc

SEQ ID NO: 139448 - DNA, 25 bp, Artificial
  probe
  misc_feature (1)..(25): SEQ ID NO: 1492; WAN024CZB_at; Start 75; Stop 99
tcaagatcggttggaggcgcacaat

SEQ ID NO: 139449 - DNA, 25 bp, Artificial
  probe
  misc_feature (1)..(25): SEQ ID NO: 1492; WAN024CZB_at; Start 42; Stop 66
tactgaggagaaattaagtacacaa

SEQ ID NO: 139450 - DNA, 25 bp, Artificial
  probe
  misc_feature (1)..(25): SEQ ID NO: 1492; WAN024CZB_at; Start 152; Stop 176
ccaaggtcaagaaaaatgatatggt

SEQ ID NO: 139451 - DNA, 25 bp, Artificial
  probe
  misc_feature (1)..(25): SEQ ID NO: 2945; WAN024CZC_at; Start 950; Stop 974
taacgactcgaggaacagttgagtt

SEQ ID NO: 139452 - DNA, 25 bp, Artificial
  probe
  misc_feature (1)..(25): SEQ ID NO: 2945; WAN024CZC_at; Start 427; Stop 451
gcttatccacgctatcagatgttga

SEQ ID NO: 139453 - DNA, 25 bp, Artificial
  probe
  misc_feature (1)..(25): SEQ ID NO: 2945; WAN024CZC_at; Start 1183; Stop 1207
aaagacttactcctactagctgagg

SEQ ID NO: 139454 - DNA, 25 bp, Artificial
  probe
  misc_feature (1)..(25): SEQ ID NO: 2945; WAN024CZC_at; Start 69; Stop 93
tgtcggaattgagttggagtatcct

SEQ ID NO: 139455 - DNA, 25 bp, Artificial
  probe
  misc_feature (1)..(25): SEQ ID NO: 2945; WAN024CZC_at; Start 790; Stop 814
gcggaacgtgatgggcagacctatt

SEQ ID NO: 139456 - DNA, 25 bp, Artificial
  probe
  misc_feature (1)..(25): SEQ ID NO: 2945; WAN024CZC_at; Start 167; Stop 191
tggatctcaccgtagcaaaggtaga

SEQ ID NO: 139457 - DNA, 25 bp, Artificial
  probe
  misc_feature (1)..(25): SEQ ID NO: 2945; WAN024CZC_at; Start 520; Stop 544
tttatctgtgggagccaggttcagc

SEQ ID NO: 139458 - DNA, 25 bp, Artificial
  probe
  misc_feature (1)..(25): SEQ ID NO: 2945; WAN024CZC_at; Start 998; Stop 1022
ttgataggacttttgcttctgcagc

SEQ ID NO: 139459 - DNA, 25 bp, Artificial
  probe
  misc_feature (1)..(25): SEQ ID NO: 2945; WAN024CZC_at; Start 347; Stop 371
gaaagttagctgaatcaaatcatgc

SEQ ID NO: 139460 - DNA, 25 bp, Artificial
  probe
  misc_feature (1)..(25): SEQ ID NO: 2945; WAN024CZC_at; Start 535; Stop 559
caggttcagctggatatttcaaaaa

SEQ ID NO: 139461 - DNA, 25 bp, Artificial
  probe
  misc_feature (1)..(25): SEQ ID NO: 2945; WAN024CZC_at; Start 382; Stop 406
tgtggtatccatcccaactgggata

SEQ ID NO: 139462 - DNA, 25 bp, Artificial
  probe
  misc_feature (1)..(25): SEQ ID NO: 2945; WAN024CZC_at; Start 965; Stop 989
cagttgagtttcgtagtgtgtgtac

SEQ ID NO: 139463 - DNA, 25 bp, Artificial
  probe
  misc_feature (1)..(25): SEQ ID NO: 2945; WAN024CZC_at; Start 981; Stop 1005
tgtgtgtacacagccacttgatagg

SEQ ID NO: 139464 - DNA, 25 bp, Artificial
  probe
  misc_feature (1)..(25): SEQ ID NO: 2945; WAN024CZC_at; Start 902; Stop 926
cccaagagaaggattttgaaactca

SEQ ID NO: 139465 - DNA, 25 bp, Artificial
  probe
  misc_feature (1)..(25): SEQ ID NO: 2945; WAN024CZC_at; Start 297; Stop 321
gattcaagaggtcgaaaatcgtttc

SEQ ID NO: 139466 - DNA, 25 bp, Artificial
  probe
  misc_feature (1)..(25): SEQ ID NO: 2945; WAN024CZC_at; Start 602; Stop 626
cggctaaggcttatttatttgcaaa

SEQ ID NO: 139467 - DNA, 25 bp, Artificial
  probe
  misc_feature (1)..(25): SEQ ID NO: 2945; WAN024CZC_at; Start 685; Stop 709
gaatctatgcatggtatctatccag

SEQ ID NO: 139468 - DNA, 25 bp, Artificial
  probe
  misc_feature (1)..(25): SEQ ID NO: 2945; WAN024CZC_at; Start 250; Stop 274
gaagtttcctatacaacgattgagt

SEQ ID NO: 139469 - DNA, 25 bp, Artificial
  probe
  misc_feature (1)..(25): SEQ ID NO: 2945; WAN024CZC_at; Start 1058; Stop 1082
tagaagcttacttagaaacagcacc

SEQ ID NO: 139470 - DNA, 25 bp, Artificial
  probe
  misc_feature (1)..(25): SEQ ID NO: 2945; WAN024CZC_at; Start 719; Stop 743
gggtcaatgctagactccttaatga

SEQ ID NO: 139471 - DNA, 25 bp, Artificial
  probe
  misc_feature (1)..(25): SEQ ID NO: 2945; WAN024CZC_at; Start 193; Stop 217
gattttggcaatctgatccagttag

SEQ ID NO: 139472 - DNA, 25 bp, Artificial
  probe
  misc_feature (1)..(25): SEQ ID NO: 2945; WAN024CZC_at; Start 85; Stop 109
gagtatcctgttgcaagtttagaag

SEQ ID NO: 139473 - DNA, 25 bp, Artificial
  probe
  misc_feature (1)..(25): SEQ ID NO: 2945; WAN024CZC_at; Start 642; Stop 666
tgcggattgggatacgaaaatttca

SEQ ID NO: 139474 - DNA, 25 bp, Artificial
  probe
  misc_feature (1)..(25): SEQ ID NO: 2945; WAN024CZC_at; Start 211; Stop 235
cagttagtagatccgataagtcagg

SEQ ID NO: 139475 - DNA, 25 bp, Artificial
  probe
  misc_feature (1)..(25): SEQ ID NO: 2945; WAN024CZC_at; Start 919; Stop 943
gaaactcatcgtagttaccagtacc

SEQ ID NO: 139476 - DNA, 25 bp, Artificial
  probe
  misc_feature (1)..(25): SEQ ID NO: 2945; WAN024CZC_at; Start 1249; Stop 1273
cagcctttgagagaagaattgagcc

SEQ ID NO: 139477 - DNA, 25 bp, Artificial
  probe
  misc_feature (1)..(25): SEQ ID NO: 2945; WAN024CZC_at; Start 412; Stop 436
gagaattgtccagtggcttatccac

SEQ ID NO: 139478 - DNA, 25 bp, Artificial
  probe
  misc_feature (1)..(25): SEQ ID NO: 2945; WAN024CZC_at; Start 278; Stop 302
catttggtaaggctgaaacgattca

SEQ ID NO: 139479 - DNA, 25 bp, Artificial
  probe
  misc_feature (1)..(25): SEQ ID NO: 2945; WAN024CZC_at; Start 1234; Stop 1258
gaaatgacctatttacagcctttga

SEQ ID NO: 139480 - DNA, 25 bp, Artificial
  probe
  misc_feature (1)..(25): SEQ ID NO: 2945; WAN024CZC_at; Start 858; Stop 882
aatccaagcatttgctctgaatggg

SEQ ID NO: 139481 - DNA, 25 bp, Artificial
  probe
  misc_feature (1)..(25): SEQ ID NO: 2945; WAN024CZC_at; Start 775; Stop 799
tctgcgatttttactgcggaacgtg

SEQ ID NO: 139482 - DNA, 25 bp, Artificial
  probe
  misc_feature (1)..(25): SEQ ID NO: 2945; WAN024CZC_at; Start 52; Stop 76
gaaaatcctgaattgtttgtcggaa

SEQ ID NO: 139483 - DNA, 25 bp, Artificial
  probe
  misc_feature (1)..(25): SEQ ID NO: 2945; WAN024CZC_at; Start 1012; Stop 1036
gcttctgcagcttttcacttgggat

SEQ ID NO: 139484 - DNA, 25 bp, Artificial
  probe
  misc_feature (1)..(25): SEQ ID NO: 2945; WAN024CZC_at; Start 587; Stop 611
ttactcaaattgaagcggctaaggc

SEQ ID NO: 139485 - DNA, 25 bp, Artificial
  probe
  misc_feature (1)..(25): SEQ ID NO: 1902; WAN024CZD_at; Start 237; Stop 261
gaatgctcaggtagttttgatgcca

SEQ ID NO: 139486 - DNA, 25 bp, Artificial
  probe
  misc_feature (1)..(25): SEQ ID NO: 1902; WAN024CZD_at; Start 111; Stop 135
taaggagaaggtgagagagtttatc

SEQ ID NO: 139487 - DNA, 25 bp, Artificial
  probe
  misc_feature (1)..(25): SEQ ID NO: 1902; WAN024CZD_at; Start 203; Stop 227
taaatcaggtgcgtgcccagagtct

SEQ ID NO: 139488 - DNA, 25 bp, Artificial
  probe
  misc_feature (1)..(25): SEQ ID NO: 1902; WAN024CZD_at; Start 389; Stop 413
taaccagtcagagtggctttgtgcg

SEQ ID NO: 139489 - DNA, 25 bp, Artificial
  probe
  misc_feature (1)..(25): SEQ ID NO: 1902; WAN024CZD_at; Start 404; Stop 428
gctttgtgcggaagccaagtccaga

SEQ ID NO: 139490 - DNA, 25 bp, Artificial
  probe
  misc_feature (1)..(25): SEQ ID NO: 1902; WAN024CZD_at; Start 276; Stop 300
gctagcttgggcagacgaatcagga

SEQ ID NO: 139491 - DNA, 25 bp, Artificial
  probe
  misc_feature (1)..(25): SEQ ID NO: 1902; WAN024CZD_at; Start 164; Stop 188
tgcgggtggcagaagatagaaatct

SEQ ID NO: 139492 - DNA, 25 bp, Artificial
  probe
  misc_feature (1)..(25): SEQ ID NO: 1902; WAN024CZD_at; Start 590; Stop 614
cagatatttcccgtatttttgagac

SEQ ID NO: 139493 - DNA, 25 bp, Artificial
  probe
  misc_feature (1)..(25): SEQ ID NO: 1902; WAN024CZD_at; Start 493; Stop 517
cggactctggatgtggaatttgccc

SEQ ID NO: 139494 - DNA, 25 bp, Artificial
  probe
  misc_feature (1)..(25): SEQ ID NO: 1902; WAN024CZD_at; Start 65; Stop 89
tatcagggattgaggagacttttgc

SEQ ID NO: 139495 - DNA, 25 bp, Artificial
  probe
  misc_feature (1)..(25): SEQ ID NO: 1902; WAN024CZD_at; Start 11; Stop 35
cagcttttatttgggatttagacgg

SEQ ID NO: 139496 - DNA, 25 bp, Artificial
  probe
  misc_feature (1)..(25): SEQ ID NO: 1902; WAN024CZD_at; Start 509; Stop 533
aatttgcccagaatagtgggattca

SEQ ID NO: 139497 - DNA, 25 bp, Artificial
  probe
  misc_feature (1)..(25): SEQ ID NO: 1902; WAN024CZD_at; Start 417; Stop 441
gccaagtccagaagcggctacctat

SEQ ID NO: 139498 - DNA, 25 bp, Artificial
  probe
  misc_feature (1)..(25): SEQ ID NO: 1902; WAN024CZD_at; Start 36; Stop 60
gactttattggactcttacgaagcg

SEQ ID NO: 139499 - DNA, 25 bp, Artificial
  probe
  misc_feature (1)..(25): SEQ ID NO: 1902; WAN024CZD_at; Start 443; Stop 467
tgctagataagtatcagttgaattc

SEQ ID NO: 139500 - DNA, 25 bp, Artificial
  probe
  misc_feature (1)..(25): SEQ ID NO: 1902; WAN024CZD_at; Start 362; Stop 386
gggtggaatcctattttacagagat

SEQ ID NO: 139501 - DNA, 25 bp, Artificial
  probe
  misc_feature (1)..(25): SEQ ID NO: 1902; WAN024CZD_at; Start 76; Stop 100
gaggagacttttgctcagttttcta

SEQ ID NO: 139502 - DNA, 25 bp, Artificial
  probe
  misc_feature (1)..(25): SEQ ID NO: 1902; WAN024CZD_at; Start 142; Stop 166
tattcggtgcaagatttgcttgtgc

SEQ ID NO: 139503 - DNA, 25 bp, Artificial
  probe
  misc_feature (1)..(25): SEQ ID NO: 1902; WAN024CZD_at; Start 127; Stop 151
gagtttatcttcaagtattcggtgc

SEQ ID NO: 139504 - DNA, 25 bp, Artificial
  probe
  misc_feature (1)..(25): SEQ ID NO: 1902; WAN024CZD_at; Start 580; Stop 604
caagcgttagcagatatttcccgta

SEQ ID NO: 139505 - DNA, 25 bp, Artificial
  probe
  misc_feature (1)..(25): SEQ ID NO: 1902; WAN024CZD_at; Start 337; Stop 361
gcttttaccattctcaaggacttgg

SEQ ID NO: 139506 - DNA, 25 bp, Artificial
  probe
  misc_feature (1)..(25): SEQ ID NO: 1902; WAN024CZD_at; Start 567; Stop 591
gaatcacaggattcaagcgttagca

SEQ ID NO: 139507 - DNA, 25 bp, Artificial
  probe
  misc_feature (1)..(25): SEQ ID NO: 1902; WAN024CZD_at; Start 289; Stop 313
gacgaatcaggaattcagcagttta

SEQ ID NO: 139508 - DNA, 25 bp, Artificial
  probe
  misc_feature (1)..(25): SEQ ID NO: 1902; WAN024CZD_at; Start 195; Stop 219
tgaggtgctaaatcaggtgcgtgcc

SEQ ID NO: 139509 - DNA, 25 bp, Artificial
  probe
  misc_feature (1)..(25): SEQ ID NO: 1902; WAN024CZD_at; Start 218; Stop 242
cccagagtctggctgagaagaatgc

SEQ ID NO: 139510 - DNA, 25 bp, Artificial
  probe
  misc_feature (1)..(25): SEQ ID NO: 1902; WAN024CZD_at; Start 552; Stop 576
gtctacttatgaagggaatcacagg

SEQ ID NO: 139511 - DNA, 25 bp, Artificial
  probe
  misc_feature (1)..(25): SEQ ID NO: 1902; WAN024CZD_at; Start 50; Stop 74
cttacgaagcgattttatcagggat

SEQ ID NO: 139512 - DNA, 25 bp, Artificial
  probe
  misc_feature (1)..(25): SEQ ID NO: 1902; WAN024CZD_at; Start 91; Stop 115
cagttttctattccttatgataagg

SEQ ID NO: 139513 - DNA, 25 bp, Artificial
  probe
  misc_feature (1)..(25): SEQ ID NO: 1902; WAN024CZD_at; Start 427; Stop 451
gaagcggctacctatctgctagata

SEQ ID NO: 139514 - DNA, 25 bp, Artificial
  probe
  misc_feature (1)..(25): SEQ ID NO: 1902; WAN024CZD_at; Start 304; Stop 328
cagcagtttatatatactcataagg

SEQ ID NO: 139515 - DNA, 25 bp, Artificial
  probe
  misc_feature (1)..(25): SEQ ID NO: 1902; WAN024CZD_at; Start 328; Stop 352
gggaacaacgcttttaccattctca

SEQ ID NO: 139516 - DNA, 25 bp, Artificial
  probe
  misc_feature (1)..(25): SEQ ID NO: 1902; WAN024CZD_at; Start 244; Stop 268
caggtagttttgatgccaggtgcgc

SEQ ID NO: 139517 - DNA, 25 bp, Artificial
  probe
  misc_feature (1)..(25): SEQ ID NO: 1902; WAN024CZD_at; Start 182; Stop 206
gaaatctggatgttgaggtgctaaa

SEQ ID NO: 139518 - DNA, 25 bp, Artificial
  probe
  misc_feature (1)..(25): SEQ ID NO: 1902; WAN024CZD_at; Start 378; Stop 402
tacagagattttaaccagtcagagt

SEQ ID NO: 139519 - DNA, 25 bp, Artificial
  probe
  misc_feature (1)..(25): SEQ ID NO: 2842; WAN024CZE_at; Start 15; Stop 39
aacaacgatcgttgctttggagcat

SEQ ID NO: 139520 - DNA, 25 bp, Artificial
  probe
  misc_feature (1)..(25): SEQ ID NO: 2842; WAN024CZE_at; Start 120; Stop 144
ggctcatccgtcagtaagttcattg

SEQ ID NO: 139521 - DNA, 25 bp, Artificial
  probe
  misc_feature (1)..(25): SEQ ID NO: 2842; WAN024CZE_at; Start 249; Stop 273
gattggtgctgcgacttacggctct

SEQ ID NO: 139522 - DNA, 25 bp, Artificial
  probe
  misc_feature (1)..(25): SEQ ID NO: 2842; WAN024CZE_at; Start 265; Stop 289
tacggctctttaacagcggataaaa

SEQ ID NO: 139523 - DNA, 25 bp, Artificial
  probe
  misc_feature (1)..(25): SEQ ID NO: 2842; WAN024CZE_at; Start 175; Stop 199
ctaggagtctttctcttgtatgtca

SEQ ID NO: 139524 - DNA, 25 bp, Artificial
  probe
  misc_feature (1)..(25): SEQ ID NO: 2842; WAN024CZE_at; Start 73; Stop 97
caatcagatgcgactagtcgtgtat

SEQ ID NO: 139525 - DNA, 25 bp, Artificial
  probe
  misc_feature (1)..(25): SEQ ID NO: 2842; WAN024CZE_at; Start 106; Stop 130
gaaaaggaagaattggctcatccgt

SEQ ID NO: 139526 - DNA, 25 bp, Artificial
  probe
  misc_feature (1)..(25): SEQ ID NO: 2842; WAN024CZE_at; Start 2; Stop 26
tgtcaattattttaacaacgatcgt

SEQ ID NO: 139527 - DNA, 25 bp, Artificial
  probe
  misc_feature (1)..(25): SEQ ID NO: 2842; WAN024CZE_at; Start 134; Stop 158
taagttcattgttcaaaaatcaagg

SEQ ID NO: 139528 - DNA, 25 bp, Artificial
  probe
  misc_feature (1)..(25): SEQ ID NO: 2842; WAN024CZE_at; Start 21; Stop 45
gatcgttgctttggagcatttttac

SEQ ID NO: 139529 - DNA, 25 bp, Artificial
  probe
  misc_feature (1)..(25): SEQ ID NO: 2842; WAN024CZE_at; Start 160; Stop 184
atttataaggctctgctaggagtct

SEQ ID NO: 139530 - DNA, 25 bp, Artificial
  probe
  misc_feature (1)..(25): SEQ ID NO: 2842; WAN024CZE_at; Start 188; Stop 212
tcttgtatgtcatttatttctcaca

SEQ ID NO: 139531 - DNA, 25 bp, Artificial
  probe
  misc_feature (1)..(25): SEQ ID NO: 2842; WAN024CZE_at; Start 303; Stop 327
acaaggtggatcagctattttggcc

SEQ ID NO: 139532 - DNA, 25 bp, Artificial
  probe
  misc_feature (1)..(25): SEQ ID NO: 2842; WAN024CZE_at; Start 311; Stop 335
gatcagctattttggccttgattag

SEQ ID NO: 139533 - DNA, 25 bp, Artificial
  probe
  misc_feature (1)..(25): SEQ ID NO: 2842; WAN024CZE_at; Start 168; Stop 192
ggctctgctaggagtctttctcttg

SEQ ID NO: 139534 - DNA, 25 bp, Artificial
  probe
  misc_feature (1)..(25): SEQ ID NO: 2842; WAN024CZE_at; Start 115; Stop 139
gaattggctcatccgtcagtaagtt

SEQ ID NO: 139535 - DNA, 25 bp, Artificial
  probe
  misc_feature (1)..(25): SEQ ID NO: 2842; WAN024CZE_at; Start 49; Stop 73
ttttatttggaaagtattgccacgc

SEQ ID NO: 139536 - DNA, 25 bp, Artificial
  probe
  misc_feature (1)..(25): SEQ ID NO: 2842; WAN024CZE_at; Start 63; Stop 87
tattgccacgcaatcagatgcgact

SEQ ID NO: 139537 - DNA, 25 bp, Artificial
  probe
  misc_feature (1)..(25): SEQ ID NO: 2842; WAN024CZE_at; Start 112; Stop 136
gaagaattggctcatccgtcagtaa

SEQ ID NO: 139538 - DNA, 25 bp, Artificial
  probe
  misc_feature (1)..(25): SEQ ID NO: 2842; WAN024CZE_at; Start 261; Stop 285
gacttacggctctttaacagcggat

SEQ ID NO: 139539 - DNA, 25 bp, Artificial
  probe
  misc_feature (1)..(25): SEQ ID NO: 2842; WAN024CZE_at; Start 124; Stop 148
catccgtcagtaagttcattgttca

SEQ ID NO: 139540 - DNA, 25 bp, Artificial
  probe
  misc_feature (1)..(25): SEQ ID NO: 2842; WAN024CZE_at; Start 127; Stop 151
ccgtcagtaagttcattgttcaaaa

SEQ ID NO: 139541 - DNA, 25 bp, Artificial
  probe
  misc_feature (1)..(25): SEQ ID NO: 2842; WAN024CZE_at; Start 99; Stop 123
taatatggaaaaggaagaattggct

SEQ ID NO: 139542 - DNA, 25 bp, Artificial
  probe
  misc_feature (1)..(25): SEQ ID NO: 2842; WAN024CZE_at; Start 69; Stop 93
cacgcaatcagatgcgactagtcgt

SEQ ID NO: 139543 - DNA, 25 bp, Artificial
  probe
  misc_feature (1)..(25): SEQ ID NO: 2842; WAN024CZE_at; Start 246; Stop 270
tgtgattggtgctgcgacttacggc

SEQ ID NO: 139544 - DNA, 25 bp, Artificial
  probe
  misc_feature (1)..(25): SEQ ID NO: 2842; WAN024CZE_at; Start 165; Stop 189
taaggctctgctaggagtctttctc

SEQ ID NO: 139545 - DNA, 25 bp, Artificial
  probe
  misc_feature (1)..(25): SEQ ID NO: 2842; WAN024CZE_at; Start 321; Stop 345
tttggccttgattagtattttactc

SEQ ID NO: 139546 - DNA, 25 bp, Artificial
  probe
  misc_feature (1)..(25): SEQ ID NO: 2842; WAN024CZE_at; Start 253; Stop 277
ggtgctgcgacttacggctctttaa

SEQ ID NO: 139547 - DNA, 25 bp, Artificial
  probe
  misc_feature (1)..(25): SEQ ID NO: 2842; WAN024CZE_at; Start 258; Stop 282
tgcgacttacggctctttaacagcg

SEQ ID NO: 139548 - DNA, 25 bp, Artificial
  probe
  misc_feature (1)..(25): SEQ ID NO: 2842; WAN024CZE_at; Start 307; Stop 331
ggtggatcagctattttggccttga

SEQ ID NO: 139549 - DNA, 25 bp, Artificial
  probe
  misc_feature (1)..(25): SEQ ID NO: 2842; WAN024CZE_at; Start 86; Stop 110
ctagtcgtgtatttaatatggaaaa

SEQ ID NO: 139550 - DNA, 25 bp, Artificial
  probe
  misc_feature (1)..(25): SEQ ID NO: 2842; WAN024CZE_at; Start 239; Stop 263
tcttatttgtgattggtgctgcgac

SEQ ID NO: 139551 - DNA, 25 bp, Artificial
  probe
  misc_feature (1)..(25): SEQ ID NO: 2842; WAN024CZE_at; Start 58; Stop 82
gaaagtattgccacgcaatcagatg

SEQ ID NO: 139552 - DNA, 25 bp, Artificial
  probe
  misc_feature (1)..(25): SEQ ID NO: 2842; WAN024CZE_at; Start 294; Stop 318
tattttgaaacaaggtggatcagct

SEQ ID NO: 139553 - DNA, 25 bp, Artificial
  probe
  misc_feature (1)..(25): SEQ ID NO: 1046; WAN024CZF_at; Start 26; Stop 50
aaacaattcgtcaggagtcaaaaca

SEQ ID NO: 139554 - DNA, 25 bp, Artificial
  probe
  misc_feature (1)..(25): SEQ ID NO: 1046; WAN024CZF_at; Start 507; Stop 531
cgagcgtttcctcatggtctttgga

SEQ ID NO: 139555 - DNA, 25 bp, Artificial
  probe
  misc_feature (1)..(25): SEQ ID NO: 1046; WAN024CZF_at; Start 721; Stop 745
gatttacagcttcttccttggtact

SEQ ID NO: 139556 - DNA, 25 bp, Artificial
  probe
  misc_feature (1)..(25): SEQ ID NO: 1046; WAN024CZF_at; Start 489; Stop 513
tctctcatcagttgaaaccgagcgt

SEQ ID NO: 139557 - DNA, 25 bp, Artificial
  probe
  misc_feature (1)..(25): SEQ ID NO: 1046; WAN024CZF_at; Start 656; Stop 680
caagacgaatcctaaaaactagccg

SEQ ID NO: 139558 - DNA, 25 bp, Artificial
  probe
  misc_feature (1)..(25): SEQ ID NO: 1046; WAN024CZF_at; Start 43; Stop 67
tcaaaacattttcaggctgacaccc

SEQ ID NO: 139559 - DNA, 25 bp, Artificial
  probe
  misc_feature (1)..(25): SEQ ID NO: 1046; WAN024CZF_at; Start 457; Stop 481
gtcaccctacatcctgagtttccaa

SEQ ID NO: 139560 - DNA, 25 bp, Artificial
  probe
  misc_feature (1)..(25): SEQ ID NO: 1046; WAN024CZF_at; Start 389; Stop 413
tatggagtatccctaatttacttgg

SEQ ID NO: 139561 - DNA, 25 bp, Artificial
  probe
  misc_feature (1)..(25): SEQ ID NO: 1046; WAN024CZF_at; Start 259; Stop 283
tatgcaacactgacactcatgaaag

SEQ ID NO: 139562 - DNA, 25 bp, Artificial
  probe
  misc_feature (1)..(25): SEQ ID NO: 1046; WAN024CZF_at; Start 628; Stop 652
tatagtctagacctaggacaggtcc

SEQ ID NO: 139563 - DNA, 25 bp, Artificial
  probe
  misc_feature (1)..(25): SEQ ID NO: 1046; WAN024CZF_at; Start 160; Stop 184
gaacagccatttttcagcatacttg

SEQ ID NO: 139564 - DNA, 25 bp, Artificial
  probe
  misc_feature (1)..(25): SEQ ID NO: 1046; WAN024CZF_at; Start 736; Stop 760
ccttggtacttcctcaattggatta

SEQ ID NO: 139565 - DNA, 25 bp, Artificial
  probe
  misc_feature (1)..(25): SEQ ID NO: 1046; WAN024CZF_at; Start 601; Stop 625
tattcacaggtggaatttcttctct

SEQ ID NO: 139566 - DNA, 25 bp, Artificial
  probe
  misc_feature (1)..(25): SEQ ID NO: 1046; WAN024CZF_at; Start 310; Stop 334
aacagcctagctctctttgatgagg

SEQ ID NO: 139567 - DNA, 25 bp, Artificial
  probe
  misc_feature (1)..(25): SEQ ID NO: 1046; WAN024CZF_at; Start 245; Stop 269
tgaccagttccgtctatgcaacact

SEQ ID NO: 139568 - DNA, 25 bp, Artificial
  probe
  misc_feature (1)..(25): SEQ ID NO: 1046; WAN024CZF_at; Start 443; Stop 467
tagccaaaaaattcgtcaccctaca

SEQ ID NO: 139569 - DNA, 25 bp, Artificial
  probe
  misc_feature (1)..(25): SEQ ID NO: 1046; WAN024CZF_at; Start 545; Stop 569
caagtctcatcttgatcattgtagg

SEQ ID NO: 139570 - DNA, 25 bp, Artificial
  probe
  misc_feature (1)..(25): SEQ ID NO: 1046; WAN024CZF_at; Start 295; Stop 319
gagccatctgtaaaaaacagcctag

SEQ ID NO: 139571 - DNA, 25 bp, Artificial
  probe
  misc_feature (1)..(25): SEQ ID NO: 1046; WAN024CZF_at; Start 751; Stop 775
aattggattacctttggcattgcta

SEQ ID NO: 139572 - DNA, 25 bp, Artificial
  probe
  misc_feature (1)..(25): SEQ ID NO: 1046; WAN024CZF_at; Start 172; Stop 196
ttcagcatacttggccaaatacttc

SEQ ID NO: 139573 - DNA, 25 bp, Artificial
  probe
  misc_feature (1)..(25): SEQ ID NO: 1046; WAN024CZF_at; Start 140; Stop 164
ggatccacgggactgttttagaaca

SEQ ID NO: 139574 - DNA, 25 bp, Artificial
  probe
  misc_feature (1)..(25): SEQ ID NO: 1046; WAN024CZF_at; Start 766; Stop 790
ggcattgctagtttttcactcctac

SEQ ID NO: 139575 - DNA, 25 bp, Artificial
  probe
  misc_feature (1)..(25): SEQ ID NO: 1046; WAN024CZF_at; Start 522; Stop 546
ggtctttggactctactttcttgca

SEQ ID NO: 139576 - DNA, 25 bp, Artificial
  probe
  misc_feature (1)..(25): SEQ ID NO: 1046; WAN024CZF_at; Start 227; Stop 251
ttatcgggactattcttttgaccag

SEQ ID NO: 139577 - DNA, 25 bp, Artificial
  probe
  misc_feature (1)..(25): SEQ ID NO: 1046; WAN024CZF_at; Start 568; Stop 592
ggaaatatcctctatattccacagt

SEQ ID NO: 139578 - DNA, 25 bp, Artificial
  probe
  misc_feature (1)..(25): SEQ ID NO: 1046; WAN024CZF_at; Start 85; Stop 109
tatatccttcccagtatgctggtca

SEQ ID NO: 139579 - DNA, 25 bp, Artificial
  probe
  misc_feature (1)..(25): SEQ ID NO: 1046; WAN024CZF_at; Start 275; Stop 299
tcatgaaagattctaaaacggagcc

SEQ ID NO: 139580 - DNA, 25 bp, Artificial
  probe
  misc_feature (1)..(25): SEQ ID NO: 1046; WAN024CZF_at; Start 685; Stop 709
tttatgaagggctacaagttccagc

SEQ ID NO: 139581 - DNA, 25 bp, Artificial
  probe
  misc_feature (1)..(25): SEQ ID NO: 1046; WAN024CZF_at; Start 210; Stop 234
tcctctactagtctcctttatcggg

SEQ ID NO: 139582 - DNA, 25 bp, Artificial
  probe
  misc_feature (1)..(25): SEQ ID NO: 1046; WAN024CZF_at; Start 585; Stop 609
tccacagtattatgcctattcacag

SEQ ID NO: 139583 - DNA, 25 bp, Artificial
  probe
  misc_feature (1)..(25): SEQ ID NO: 1046; WAN024CZF_at; Start 642; Stop 666
aggacaggtcccaccaagacgaatc

SEQ ID NO: 139584 - DNA, 25 bp, Artificial
  probe
  misc_feature (1)..(25): SEQ ID NO: 1046; WAN024CZF_at; Start 126; Stop 150
taatcccttatctcggatccacggg

SEQ ID NO: 139585 - DNA, 25 bp, Artificial
  probe
  misc_feature (1)..(25): SEQ ID NO: 1046; WAN024CZF_at; Start 328; Stop 352
gatgaggagcgcttttctcaaacct

SEQ ID NO: 139586 - DNA, 25 bp, Artificial
  probe
  misc_feature (1)..(25): SEQ ID NO: 1046; WAN024CZF_at; Start 812; Stop 836
ttatgttttaccgagcagtattggc

SEQ ID NO: 139587 - DNA, 25 bp, Artificial
  probe
  misc_feature (1)..(25): SEQ ID NO: 1216; WAN024CZG_at; Start 279; Stop 303
tgagcaggttatcccagacgaaaaa

SEQ ID NO: 139588 - DNA, 25 bp, Artificial
  probe
  misc_feature (1)..(25): SEQ ID NO: 1216; WAN024CZG_at; Start 287; Stop 311
ttatcccagacgaaaaactacgctc

SEQ ID NO: 139589 - DNA, 25 bp, Artificial
  probe
  misc_feature (1)..(25): SEQ ID NO: 1216; WAN024CZG_at; Start 305; Stop 329
tacgctcaggctatgaaaaacaaac

SEQ ID NO: 139590 - DNA, 25 bp, Artificial
  probe
  misc_feature (1)..(25): SEQ ID NO: 1216; WAN024CZG_at; Start 323; Stop 347
aacaaaccagtcaggaaaggaatcg

SEQ ID NO: 139591 - DNA, 25 bp, Artificial
  probe
  misc_feature (1)..(25): SEQ ID NO: 1216; WAN024CZG_at; Start 91; Stop 115
aaatttgaccagtattatgatgctc

SEQ ID NO: 139592 - DNA, 25 bp, Artificial
  probe
  misc_feature (1)..(25): SEQ ID NO: 1216; WAN024CZG_at; Start 314; Stop 338
gctatgaaaaacaaaccagtcagga

SEQ ID NO: 139593 - DNA, 25 bp, Artificial
  probe
  misc_feature (1)..(25): SEQ ID NO: 1216; WAN024CZG_at; Start 277; Stop 301
gatgagcaggttatcccagacgaaa

SEQ ID NO: 139594 - DNA, 25 bp, Artificial
  probe
  misc_feature (1)..(25): SEQ ID NO: 1216; WAN024CZG_at; Start 241; Stop 265
tatttacaacaataccattctttgg

SEQ ID NO: 139595 - DNA, 25 bp, Artificial
  probe
  misc_feature (1)..(25): SEQ ID NO: 1216; WAN024CZG_at; Start 213; Stop 237
ccaacgctggtgtgatgaatgtgat

SEQ ID NO: 139596 - DNA, 25 bp, Artificial
  probe
  misc_feature (1)..(25): SEQ ID NO: 1216; WAN024CZG_at; Start 204; Stop 228
cccggaagaccaacgctggtgtgat

SEQ ID NO: 139597 - DNA, 25 bp, Artificial
  probe
  misc_feature (1)..(25): SEQ ID NO: 1216; WAN024CZG_at; Start 274; Stop 298
caggatgagcaggttatcccagacg

SEQ ID NO: 139598 - DNA, 25 bp, Artificial
  probe
  misc_feature (1)..(25): SEQ ID NO: 1216; WAN024CZG_at; Start 337; Stop 361
gaaaggaatcgttcttgccgtatga

SEQ ID NO: 139599 - DNA, 25 bp, Artificial
  probe
  misc_feature (1)..(25): SEQ ID NO: 1216; WAN024CZG_at; Start 327; Stop 351
aaccagtcaggaaaggaatcgttct

SEQ ID NO: 139600 - DNA, 25 bp, Artificial
  probe
  misc_feature (1)..(25): SEQ ID NO: 1216; WAN024CZG_at; Start 114; Stop 138
tctcaaatactacaaaacttgctgg

SEQ ID NO: 139601 - DNA, 25 bp, Artificial
  probe
  misc_feature (1)..(25): SEQ ID NO: 1216; WAN024CZG_at; Start 21; Stop 45
agaaatgtacggagattttgaaccg

SEQ ID NO: 139602 - DNA, 25 bp, Artificial
  probe
  misc_feature (1)..(25): SEQ ID NO: 1216; WAN024CZG_at; Start 290; Stop 314
tcccagacgaaaaactacgctcagg

SEQ ID NO: 139603 - DNA, 25 bp, Artificial
  probe
  misc_feature (1)..(25): SEQ ID NO: 1216; WAN024CZG_at; Start 346; Stop 370
cgttcttgccgtatgaaattaaaat

SEQ ID NO: 139604 - DNA, 25 bp, Artificial
  probe
  misc_feature (1)..(25): SEQ ID NO: 1216; WAN024CZG_at; Start 97; Stop 121
gaccagtattatgatgctctcaaat

SEQ ID NO: 139605 - DNA, 25 bp, Artificial
  probe
  misc_feature (1)..(25): SEQ ID NO: 1216; WAN024CZG_at; Start 310; Stop 334
tcaggctatgaaaaacaaaccagtc

SEQ ID NO: 139606 - DNA, 25 bp, Artificial
  probe
  misc_feature (1)..(25): SEQ ID NO: 1216; WAN024CZG_at; Start 254; Stop 278
accattctttggctcttttgcagga

SEQ ID NO: 139607 - DNA, 25 bp, Artificial
  probe
  misc_feature (1)..(25): SEQ ID NO: 1216; WAN024CZG_at; Start 78; Stop 102
tgtagcaagtagaaaatttgaccag

SEQ ID NO: 139608 - DNA, 25 bp, Artificial
  probe
  misc_feature (1)..(25): SEQ ID NO: 1216; WAN024CZG_at; Start 134; Stop 158
gctggtttagattggaacaagaatc

SEQ ID NO: 139609 - DNA, 25 bp, Artificial
  probe
  misc_feature (1)..(25): SEQ ID NO: 1216; WAN024CZG_at; Start 298; Stop 322
gaaaaactacgctcaggctatgaaa

SEQ ID NO: 139610 - DNA, 25 bp, Artificial
  probe
  misc_feature (1)..(25): SEQ ID NO: 1216; WAN024CZG_at; Start 26; Stop 50
tgtacggagattttgaaccgtggtg

SEQ ID NO: 139611 - DNA, 25 bp, Artificial
  probe
  misc_feature (1)..(25): SEQ ID NO: 1216; WAN024CZG_at; Start 268; Stop 292
cttttgcaggatgagcaggttatcc

SEQ ID NO: 139612 - DNA, 25 bp, Artificial
  probe
  misc_feature (1)..(25): SEQ ID NO: 1216; WAN024CZG_at; Start 128; Stop 152
aaacttgctggtttagattggaaca

SEQ ID NO: 139613 - DNA, 25 bp, Artificial
  probe
  misc_feature (1)..(25): SEQ ID NO: 1216; WAN024CZG_at; Start 333; Stop 357
tcaggaaaggaatcgttcttgccgt

SEQ ID NO: 139614 - DNA, 25 bp, Artificial
  probe
  misc_feature (1)..(25): SEQ ID NO: 1216; WAN024CZG_at; Start 3; Stop 27
gaatatgtatcgtgttatagaaatg

SEQ ID NO: 139615 - DNA, 25 bp, Artificial
  probe
  misc_feature (1)..(25): SEQ ID NO: 1216; WAN024CZG_at; Start 295; Stop 319
gacgaaaaactacgctcaggctatg

SEQ ID NO: 139616 - DNA, 25 bp, Artificial
  probe
  misc_feature (1)..(25): SEQ ID NO: 1216; WAN024CZG_at; Start 259; Stop 283
tctttggctcttttgcaggatgagc

SEQ ID NO: 139617 - DNA, 25 bp, Artificial
  probe
  misc_feature (1)..(25): SEQ ID NO: 1216; WAN024CZG_at; Start 160; Stop 184
cctctttataaaagtagaagcgact

SEQ ID NO: 139618 - DNA, 25 bp, Artificial
  probe
  misc_feature (1)..(25): SEQ ID NO: 1216; WAN024CZG_at; Start 108; Stop 132
tgatgctctcaaatactacaaaact

SEQ ID NO: 139619 - DNA, 25 bp, Artificial
  probe
  misc_feature (1)..(25): SEQ ID NO: 1216; WAN024CZG_at; Start 226; Stop 250
gatgaatgtgatgagtatttacaac

SEQ ID NO: 139620 - DNA, 25 bp, Artificial
  probe
  misc_feature (1)..(25): SEQ ID NO: 1216; WAN024CZG_at; Start 10; Stop 34
tatcgtgttatagaaatgtacggag

SEQ ID NO: 139621 - DNA, 25 bp, Artificial
  probe
  misc_feature (1)..(25): SEQ ID NO: 2704; WAN024CZH_at; Start 666; Stop 690
gacaggtgcgacagtcttttcaacc

SEQ ID NO: 139622 - DNA, 25 bp, Artificial
  probe
  misc_feature (1)..(25): SEQ ID NO: 2704; WAN024CZH_at; Start 76; Stop 100
aagttagacgcctatgagcttcata

SEQ ID NO: 139623 - DNA, 25 bp, Artificial
  probe
  misc_feature (1)..(25): SEQ ID NO: 2704; WAN024CZH_at; Start 671; Stop 695
gtgcgacagtcttttcaaccattca

SEQ ID NO: 139624 - DNA, 25 bp, Artificial
  probe
  misc_feature (1)..(25): SEQ ID NO: 2704; WAN024CZH_at; Start 169; Stop 193
cactttaagtttgtggcgggtatga

SEQ ID NO: 139625 - DNA, 25 bp, Artificial
  probe
  misc_feature (1)..(25): SEQ ID NO: 2704; WAN024CZH_at; Start 493; Stop 517
gaagatcctgtcgaaatcaagcagg

SEQ ID NO: 139626 - DNA, 25 bp, Artificial
  probe
  misc_feature (1)..(25): SEQ ID NO: 2704; WAN024CZH_at; Start 164; Stop 188
tcagtcactttaagtttgtggcggg

SEQ ID NO: 139627 - DNA, 25 bp, Artificial
  probe
  misc_feature (1)..(25): SEQ ID NO: 2704; WAN024CZH_at; Start 660; Stop 684
tagtttgacaggtgcgacagtcttt

SEQ ID NO: 139628 - DNA, 25 bp, Artificial
  probe
  misc_feature (1)..(25): SEQ ID NO: 2704; WAN024CZH_at; Start 342; Stop 366
gcatttttggtttcaggatattgaa

SEQ ID NO: 139629 - DNA, 25 bp, Artificial
  probe
  misc_feature (1)..(25): SEQ ID NO: 2704; WAN024CZH_at; Start 94; Stop 118
cttcatatgagggtaggagacgagc

SEQ ID NO: 139630 - DNA, 25 bp, Artificial
  probe
  misc_feature (1)..(25): SEQ ID NO: 2704; WAN024CZH_at; Start 3; Stop 27
ggttcaagaaattgcacaagaaatc

SEQ ID NO: 139631 - DNA, 25 bp, Artificial
  probe
  misc_feature (1)..(25): SEQ ID NO: 2704; WAN024CZH_at; Start 464; Stop 488
tctttaaaggacagcaagttatgtc

SEQ ID NO: 139632 - DNA, 25 bp, Artificial
  probe
  misc_feature (1)..(25): SEQ ID NO: 2704; WAN024CZH_at; Start 80; Stop 104
tagacgcctatgagcttcatatgag

SEQ ID NO: 139633 - DNA, 25 bp, Artificial
  probe
  misc_feature (1)..(25): SEQ ID NO: 2704; WAN024CZH_at; Start 8; Stop 32
aagaaattgcacaagaaatcattcg

SEQ ID NO: 139634 - DNA, 25 bp, Artificial
  probe
  misc_feature (1)..(25): SEQ ID NO: 2704; WAN024CZH_at; Start 495; Stop 519
agatcctgtcgaaatcaagcaggac

SEQ ID NO: 139635 - DNA, 25 bp, Artificial
  probe
  misc_feature (1)..(25): SEQ ID NO: 2704; WAN024CZH_at; Start 82; Stop 106
gacgcctatgagcttcatatgaggg

SEQ ID NO: 139636 - DNA, 25 bp, Artificial
  probe
  misc_feature (1)..(25): SEQ ID NO: 2704; WAN024CZH_at; Start 85; Stop 109
gcctatgagcttcatatgagggtag

SEQ ID NO: 139637 - DNA, 25 bp, Artificial
  probe
  misc_feature (1)..(25): SEQ ID NO: 2704; WAN024CZH_at; Start 772; Stop 796
caaggagtctgctaccagagattaa

SEQ ID NO: 139638 - DNA, 25 bp, Artificial
  probe
  misc_feature (1)..(25): SEQ ID NO: 2704; WAN024CZH_at; Start 777; Stop 801
agtctgctaccagagattaatcggg

SEQ ID NO: 139639 - DNA, 25 bp, Artificial
  probe
  misc_feature (1)..(25): SEQ ID NO: 2704; WAN024CZH_at; Start 650; Stop 674
tggtcagagctagtttgacaggtgc

SEQ ID NO: 139640 - DNA, 25 bp, Artificial
  probe
  misc_feature (1)..(25): SEQ ID NO: 2704; WAN024CZH_at; Start 802; Stop 826
ggaggaggaatcgttgactttgcaa

SEQ ID NO: 139641 - DNA, 25 bp, Artificial
  probe
  misc_feature (1)..(25): SEQ ID NO: 2704; WAN024CZH_at; Start 171; Stop 195
ctttaagtttgtggcgggtatgaat

SEQ ID NO: 139642 - DNA, 25 bp, Artificial
  probe
  misc_feature (1)..(25): SEQ ID NO: 2704; WAN024CZH_at; Start 104; Stop 128
gggtaggagacgagcgctgtaaaat

SEQ ID NO: 139643 - DNA, 25 bp, Artificial
  probe
  misc_feature (1)..(25): SEQ ID NO: 2704; WAN024CZH_at; Start 658; Stop 682
gctagtttgacaggtgcgacagtct

SEQ ID NO: 139644 - DNA, 25 bp, Artificial
  probe
  misc_feature (1)..(25): SEQ ID NO: 2704; WAN024CZH_at; Start 663; Stop 687
tttgacaggtgcgacagtcttttca

SEQ ID NO: 139645 - DNA, 25 bp, Artificial
  probe
  misc_feature (1)..(25): SEQ ID NO: 2704; WAN024CZH_at; Start 90; Stop 114
tgagcttcatatgagggtaggagac

SEQ ID NO: 139646 - DNA, 25 bp, Artificial
  probe
  misc_feature (1)..(25): SEQ ID NO: 2704; WAN024CZH_at; Start 641; Stop 665
cgcgtgcagtggtcagagctagttt

SEQ ID NO: 139647 - DNA, 25 bp, Artificial
  probe
  misc_feature (1)..(25): SEQ ID NO: 2704; WAN024CZH_at; Start 643; Stop 667
cgtgcagtggtcagagctagtttga

SEQ ID NO: 139648 - DNA, 25 bp, Artificial
  probe
  misc_feature (1)..(25): SEQ ID NO: 2704; WAN024CZH_at; Start 467; Stop 491
ttaaaggacagcaagttatgtccat

SEQ ID NO: 139649 - DNA, 25 bp, Artificial
  probe
  misc_feature (1)..(25): SEQ ID NO: 2704; WAN024CZH_at; Start 783; Stop 807
ctaccagagattaatcgggggagga

SEQ ID NO: 139650 - DNA, 25 bp, Artificial
  probe
  misc_feature (1)..(25): SEQ ID NO: 2704; WAN024CZH_at; Start 592; Stop 616
catcgaccagatctcttgattatcg

SEQ ID NO: 139651 - DNA, 25 bp, Artificial
  probe
  misc_feature (1)..(25): SEQ ID NO: 2704; WAN024CZH_at; Start 645; Stop 669
tgcagtggtcagagctagtttgaca

SEQ ID NO: 139652 - DNA, 25 bp, Artificial
  probe
  misc_feature (1)..(25): SEQ ID NO: 2704; WAN024CZH_at; Start 606; Stop 630
cttgattatcggagaaattcgtgac

SEQ ID NO: 139653 - DNA, 25 bp, Artificial
  probe
  misc_feature (1)..(25): SEQ ID NO: 2704; WAN024CZH_at; Start 654; Stop 678
cagagctagtttgacaggtgcgaca

SEQ ID NO: 139654 - DNA, 25 bp, Artificial
  probe
  misc_feature (1)..(25): SEQ ID NO: 2704; WAN024CZH_at; Start 566; Stop 590
aaaatctaatcaaactttccttgcg

SEQ ID NO: 139655 - DNA, 25 bp, Artificial
  probe
  misc_feature (1)..(25): SEQ ID NO: 823; WAN024CZI_at; Start 54; Stop 78
cttcctcgcaaacttggtatgtcaa

SEQ ID NO: 139656 - DNA, 25 bp, Artificial
  probe
  misc_feature (1)..(25): SEQ ID NO: 823; WAN024CZI_at; Start 47; Stop 71
aaaatatcttcctcgcaaacttggt

SEQ ID NO: 139657 - DNA, 25 bp, Artificial
  probe
  misc_feature (1)..(25): SEQ ID NO: 823; WAN024CZI_at; Start 137; Stop 161
gcacgggtctattagccttgcccct

SEQ ID NO: 139658 - DNA, 25 bp, Artificial
  probe
  misc_feature (1)..(25): SEQ ID NO: 823; WAN024CZI_at; Start 149; Stop 173
tagccttgcccctaacccctagcca

SEQ ID NO: 139659 - DNA, 25 bp, Artificial
  probe
  misc_feature (1)..(25): SEQ ID NO: 823; WAN024CZI_at; Start 136; Stop 160
ggcacgggtctattagccttgcccc

SEQ ID NO: 139660 - DNA, 25 bp, Artificial
  probe
  misc_feature (1)..(25): SEQ ID NO: 823; WAN024CZI_at; Start 131; Stop 155
gtggtggcacgggtctattagcctt

SEQ ID NO: 139661 - DNA, 25 bp, Artificial
  probe
  misc_feature (1)..(25): SEQ ID NO: 823; WAN024CZI_at; Start 158; Stop 182
ccctaacccctagccaagcaggcta

SEQ ID NO: 139662 - DNA, 25 bp, Artificial
  probe
  misc_feature (1)..(25): SEQ ID NO: 823; WAN024CZI_at; Start 121; Stop 145
ttagatttcggtggtggcacgggtc

SEQ ID NO: 139663 - DNA, 25 bp, Artificial
  probe
  misc_feature (1)..(25): SEQ ID NO: 823; WAN024CZI_at; Start 134; Stop 158
gtggcacgggtctattagccttgcc

SEQ ID NO: 139664 - DNA, 25 bp, Artificial
  probe
  misc_feature (1)..(25): SEQ ID NO: 823; WAN024CZI_at; Start 5; Stop 29
aacatgattttaaccacaaagcaga

SEQ ID NO: 139665 - DNA, 25 bp, Artificial
  probe
  misc_feature (1)..(25): SEQ ID NO: 823; WAN024CZI_at; Start 57; Stop 81
cctcgcaaacttggtatgtcaagca

SEQ ID NO: 139666 - DNA, 25 bp, Artificial
  probe
  misc_feature (1)..(25): SEQ ID NO: 823; WAN024CZI_at; Start 190; Stop 214
tactcttgtagacatttctgagaaa

SEQ ID NO: 139667 - DNA, 25 bp, Artificial
  probe
  misc_feature (1)..(25): SEQ ID NO: 823; WAN024CZI_at; Start 56; Stop 80
tcctcgcaaacttggtatgtcaagc

SEQ ID NO: 139668 - DNA, 25 bp, Artificial
  probe
  misc_feature (1)..(25): SEQ ID NO: 823; WAN024CZI_at; Start 7; Stop 31
catgattttaaccacaaagcagaaa

SEQ ID NO: 139669 - DNA, 25 bp, Artificial
  probe
  misc_feature (1)..(25): SEQ ID NO: 823; WAN024CZI_at; Start 51; Stop 75
tatcttcctcgcaaacttggtatgt

SEQ ID NO: 139670 - DNA, 25 bp, Artificial
  probe
  misc_feature (1)..(25): SEQ ID NO: 823; WAN024CZI_at; Start 58; Stop 82
ctcgcaaacttggtatgtcaagcag

SEQ ID NO: 139671 - DNA, 25 bp, Artificial
  probe
  misc_feature (1)..(25): SEQ ID NO: 823; WAN024CZI_at; Start 45; Stop 69
taaaaatatcttcctcgcaaacttg

SEQ ID NO: 139672 - DNA, 25 bp, Artificial
  probe
  misc_feature (1)..(25): SEQ ID NO: 823; WAN024CZI_at; Start 50; Stop 74
atatcttcctcgcaaacttggtatg

SEQ ID NO: 139673 - DNA, 25 bp, Artificial
  probe
  misc_feature (1)..(25): SEQ ID NO: 823; WAN024CZI_at; Start 193; Stop 217
tcttgtagacatttctgagaaaatg

SEQ ID NO: 139674 - DNA, 25 bp, Artificial
  probe
  misc_feature (1)..(25): SEQ ID NO: 823; WAN024CZI_at; Start 14; Stop 38
ttaaccacaaagcagaaactttcga

SEQ ID NO: 139675 - DNA, 25 bp, Artificial
  probe
  misc_feature (1)..(25): SEQ ID NO: 823; WAN024CZI_at; Start 138; Stop 162
cacgggtctattagccttgccccta

SEQ ID NO: 139676 - DNA, 25 bp, Artificial
  probe
  misc_feature (1)..(25): SEQ ID NO: 823; WAN024CZI_at; Start 9; Stop 33
tgattttaaccacaaagcagaaact

SEQ ID NO: 139677 - DNA, 25 bp, Artificial
  probe
  misc_feature (1)..(25): SEQ ID NO: 823; WAN024CZI_at; Start 53; Stop 77
tcttcctcgcaaacttggtatgtca

SEQ ID NO: 139678 - DNA, 25 bp, Artificial
  probe
  misc_feature (1)..(25): SEQ ID NO: 823; WAN024CZI_at; Start 135; Stop 159
tggcacgggtctattagccttgccc

SEQ ID NO: 139679 - DNA, 25 bp, Artificial
  probe
  misc_feature (1)..(25): SEQ ID NO: 823; WAN024CZI_at; Start 191; Stop 215
actcttgtagacatttctgagaaaa

SEQ ID NO: 139680 - DNA, 25 bp, Artificial
  probe
  misc_feature (1)..(25): SEQ ID NO: 823; WAN024CZI_at; Start 16; Stop 40
aaccacaaagcagaaactttcgatt

SEQ ID NO: 139681 - DNA, 25 bp, Artificial
  probe
  misc_feature (1)..(25): SEQ ID NO: 823; WAN024CZI_at; Start 132; Stop 156
tggtggcacgggtctattagccttg

SEQ ID NO: 139682 - DNA, 25 bp, Artificial
  probe
  misc_feature (1)..(25): SEQ ID NO: 823; WAN024CZI_at; Start 48; Stop 72
aaatatcttcctcgcaaacttggta

SEQ ID NO: 139683 - DNA, 25 bp, Artificial
  probe
  misc_feature (1)..(25): SEQ ID NO: 823; WAN024CZI_at; Start 46; Stop 70
aaaaatatcttcctcgcaaacttgg

SEQ ID NO: 139684 - DNA, 25 bp, Artificial
  probe
  misc_feature (1)..(25): SEQ ID NO: 823; WAN024CZI_at; Start 117; Stop 141
aattttagatttcggtggtggcacg

SEQ ID NO: 139685 - DNA, 25 bp, Artificial
  probe
  misc_feature (1)..(25): SEQ ID NO: 823; WAN024CZI_at; Start 43; Stop 67
cctaaaaatatcttcctcgcaaact

SEQ ID NO: 139686 - DNA, 25 bp, Artificial
  probe
  misc_feature (1)..(25): SEQ ID NO: 823; WAN024CZI_at; Start 199; Stop 223
agacatttctgagaaaatgttggag

SEQ ID NO: 139687 - DNA, 25 bp, Artificial
  probe
  misc_feature (1)..(25): SEQ ID NO: 823; WAN024CZI_at; Start 3; Stop 27
gaaacatgattttaaccacaaagca

SEQ ID NO: 139688 - DNA, 25 bp, Artificial
  probe
  misc_feature (1)..(25): SEQ ID NO: 823; WAN024CZI_at; Start 15; Stop 39
taaccacaaagcagaaactttcgat

SEQ ID NO: 139689 - DNA, 25 bp, Artificial
  probe
  misc_feature (1)..(25): SEQ ID NO: 3062; WAN024CZJ_at; Start 45; Stop 69
gaatatccagtttttggagcaagat

SEQ ID NO: 139690 - DNA, 25 bp, Artificial
  probe
  misc_feature (1)..(25): SEQ ID NO: 3062; WAN024CZJ_at; Start 109; Stop 133
gctgttagtcgggttcttcatcata

SEQ ID NO: 139691 - DNA, 25 bp, Artificial
  probe
  misc_feature (1)..(25): SEQ ID NO: 3062; WAN024CZJ_at; Start 30; Stop 54
gcagcaagcaatcaagaatatccag

SEQ ID NO: 139692 - DNA, 25 bp, Artificial
  probe
  misc_feature (1)..(25): SEQ ID NO: 3062; WAN024CZJ_at; Start 114; Stop 138
tagtcgggttcttcatcatatgcct

SEQ ID NO: 139693 - DNA, 25 bp, Artificial
  probe
  misc_feature (1)..(25): SEQ ID NO: 3062; WAN024CZJ_at; Start 241; Stop 265
gatttagctgaactggaaaacaagc

SEQ ID NO: 139694 - DNA, 25 bp, Artificial
  probe
  misc_feature (1)..(25): SEQ ID NO: 3062; WAN024CZJ_at; Start 127; Stop 151
catcatatgcctgatttggatgcgg

SEQ ID NO: 139695 - DNA, 25 bp, Artificial
  probe
  misc_feature (1)..(25): SEQ ID NO: 3062; WAN024CZJ_at; Start 78; Stop 102
aaatcccttggagaaagagtttgat

SEQ ID NO: 139696 - DNA, 25 bp, Artificial
  probe
  misc_feature (1)..(25): SEQ ID NO: 3062; WAN024CZJ_at; Start 27; Stop 51
ggagcagcaagcaatcaagaatatc

SEQ ID NO: 139697 - DNA, 25 bp, Artificial
  probe
  misc_feature (1)..(25): SEQ ID NO: 3062; WAN024CZJ_at; Start 42; Stop 66
caagaatatccagtttttggagcaa

SEQ ID NO: 139698 - DNA, 25 bp, Artificial
  probe
  misc_feature (1)..(25): SEQ ID NO: 3062; WAN024CZJ_at; Start 181; Stop 205
gaagatgggaaactcatcattgctg

SEQ ID NO: 139699 - DNA, 25 bp, Artificial
  probe
  misc_feature (1)..(25): SEQ ID NO: 3062; WAN024CZJ_at; Start 100; Stop 124
gattgccttgctgttagtcgggttc

SEQ ID NO: 139700 - DNA, 25 bp, Artificial
  probe
  misc_feature (1)..(25): SEQ ID NO: 3062; WAN024CZJ_at; Start 283; Stop 307
tcatctgtgcatagtcagattctct

SEQ ID NO: 139701 - DNA, 25 bp, Artificial
  probe
  misc_feature (1)..(25): SEQ ID NO: 3062; WAN024CZJ_at; Start 229; Stop 253
catcatggatttgatttagctgaac

SEQ ID NO: 139702 - DNA, 25 bp, Artificial
  probe
  misc_feature (1)..(25): SEQ ID NO: 3062; WAN024CZJ_at; Start 232; Stop 256
catggatttgatttagctgaactgg

SEQ ID NO: 139703 - DNA, 25 bp, Artificial
  probe
  misc_feature (1)..(25): SEQ ID NO: 3062; WAN024CZJ_at; Start 261; Stop 285
caagctaattgagcatggtttttca

SEQ ID NO: 139704 - DNA, 25 bp, Artificial
  probe
  misc_feature (1)..(25): SEQ ID NO: 3062; WAN024CZJ_at; Start 104; Stop 128
gccttgctgttagtcgggttcttca

SEQ ID NO: 139705 - DNA, 25 bp, Artificial
  probe
  misc_feature (1)..(25): SEQ ID NO: 3062; WAN024CZJ_at; Start 116; Stop 140
gtcgggttcttcatcatatgcctga

SEQ ID NO: 139706 - DNA, 25 bp, Artificial
  probe
  misc_feature (1)..(25): SEQ ID NO: 3062; WAN024CZJ_at; Start 88; Stop 112
gagaaagagtttgattgccttgctg

SEQ ID NO: 139707 - DNA, 25 bp, Artificial
  probe
  misc_feature (1)..(25): SEQ ID NO: 3062; WAN024CZJ_at; Start 247; Stop 271
gctgaactggaaaacaagctaattg

SEQ ID NO: 139708 - DNA, 25 bp, Artificial
  probe
  misc_feature (1)..(25): SEQ ID NO: 3062; WAN024CZJ_at; Start 172; Stop 196
catttgaaggaagatgggaaactca

SEQ ID NO: 139709 - DNA, 25 bp, Artificial
  probe
  misc_feature (1)..(25): SEQ ID NO: 3062; WAN024CZJ_at; Start 59; Stop 83
tggagcaagatttaccgaaaaatcc

SEQ ID NO: 139710 - DNA, 25 bp, Artificial
  probe
  misc_feature (1)..(25): SEQ ID NO: 3062; WAN024CZJ_at; Start 97; Stop 121
tttgattgccttgctgttagtcggg

SEQ ID NO: 139711 - DNA, 25 bp, Artificial
  probe
  misc_feature (1)..(25): SEQ ID NO: 3062; WAN024CZJ_at; Start 157; Stop 181
tcactgtttcatcaacatttgaagg

SEQ ID NO: 139712 - DNA, 25 bp, Artificial
  probe
  misc_feature (1)..(25): SEQ ID NO: 3062; WAN024CZJ_at; Start 165; Stop 189
tcatcaacatttgaaggaagatggg

SEQ ID NO: 139713 - DNA, 25 bp, Artificial
  probe
  misc_feature (1)..(25): SEQ ID NO: 3062; WAN024CZJ_at; Start 287; Stop 311
ctgtgcatagtcagattctctatag

SEQ ID NO: 139714 - DNA, 25 bp, Artificial
  probe
  misc_feature (1)..(25): SEQ ID NO: 3062; WAN024CZJ_at; Start 184; Stop 208
gatgggaaactcatcattgctgatt

SEQ ID NO: 139715 - DNA, 25 bp, Artificial
  probe
  misc_feature (1)..(25): SEQ ID NO: 3062; WAN024CZJ_at; Start 1; Stop 25
atgttggagcaagctcgtttgaaag

SEQ ID NO: 139716 - DNA, 25 bp, Artificial
  probe
  misc_feature (1)..(25): SEQ ID NO: 3062; WAN024CZJ_at; Start 216; Stop 240
gacagaagctaatcatcatggattt

SEQ ID NO: 139717 - DNA, 25 bp, Artificial
  probe
  misc_feature (1)..(25): SEQ ID NO: 3062; WAN024CZJ_at; Start 277; Stop 301
ggtttttcatctgtgcatagtcaga

SEQ ID NO: 139718 - DNA, 25 bp, Artificial
  probe
  misc_feature (1)..(25): SEQ ID NO: 3062; WAN024CZJ_at; Start 189; Stop 213
gaaactcatcattgctgattttacc

SEQ ID NO: 139719 - DNA, 25 bp, Artificial
  probe
  misc_feature (1)..(25): SEQ ID NO: 3062; WAN024CZJ_at; Start 82; Stop 106
cccttggagaaagagtttgattgcc

SEQ ID NO: 139720 - DNA, 25 bp, Artificial
  probe
  misc_feature (1)..(25): SEQ ID NO: 3062; WAN024CZJ_at; Start 33; Stop 57
gcaagcaatcaagaatatccagttt

SEQ ID NO: 139721 - DNA, 25 bp, Artificial
  probe
  misc_feature (1)..(25): SEQ ID NO: 3062; WAN024CZJ_at; Start 271; Stop 295
gagcatggtttttcatctgtgcata

SEQ ID NO: 139722 - DNA, 25 bp, Artificial
  probe
  misc_feature (1)..(25): SEQ ID NO: 3062; WAN024CZJ_at; Start 254; Stop 278
tggaaaacaagctaattgagcatgg

SEQ ID NO: 139723 - DNA, 25 bp, Artificial
  probe
  misc_feature (1)..(25): SEQ ID NO: 4873; WAN024CZK_at; Start 804; Stop 828
taacacaccagaagatatcagtcgt

SEQ ID NO: 139724 - DNA, 25 bp, Artificial
  probe
  misc_feature (1)..(25): SEQ ID NO: 4873; WAN024CZK_at; Start 261; Stop 285
caaggcttatgacgagattacaggt

SEQ ID NO: 139725 - DNA, 25 bp, Artificial
  probe
  misc_feature (1)..(25): SEQ ID NO: 4873; WAN024CZK_at; Start 46; Stop 70
gcaatcaatgcaggaagttcaagtt

SEQ ID NO: 139726 - DNA, 25 bp, Artificial
  probe
  misc_feature (1)..(25): SEQ ID NO: 4873; WAN024CZK_at; Start 1014; Stop 1038
cacagcaggtgtcggtgaaaatgca

SEQ ID NO: 139727 - DNA, 25 bp, Artificial
  probe
  misc_feature (1)..(25): SEQ ID NO: 4873; WAN024CZK_at; Start 983; Stop 1007
cagtgctaaatggagcagatgccat

SEQ ID NO: 139728 - DNA, 25 bp, Artificial
  probe
  misc_feature (1)..(25): SEQ ID NO: 4873; WAN024CZK_at; Start 420; Stop 444
tgccttcaaggaattgttgccagac

SEQ ID NO: 139729 - DNA, 25 bp, Artificial
  probe
  misc_feature (1)..(25): SEQ ID NO: 4873; WAN024CZK_at; Start 642; Stop 666
ctgtcatattggtaacggaggctca

SEQ ID NO: 139730 - DNA, 25 bp, Artificial
  probe
  misc_feature (1)..(25): SEQ ID NO: 4873; WAN024CZK_at; Start 998; Stop 1022
cagatgccattgttttcacagcagg

SEQ ID NO: 139731 - DNA, 25 bp, Artificial
  probe
  misc_feature (1)..(25): SEQ ID NO: 4873; WAN024CZK_at; Start 1109; Stop 1133
tctttggcgttacaggagacatctc

SEQ ID NO: 139732 - DNA, 25 bp, Artificial
  probe
  misc_feature (1)..(25): SEQ ID NO: 4873; WAN024CZK_at; Start 590; Stop 614
gagaagctgcaaaactcttgggacg

SEQ ID NO: 139733 - DNA, 25 bp, Artificial
  probe
  misc_feature (1)..(25): SEQ ID NO: 4873; WAN024CZK_at; Start 569; Stop 593
caagtcaccagtttgtagcaggaga

SEQ ID NO: 139734 - DNA, 25 bp, Artificial
  probe
  misc_feature (1)..(25): SEQ ID NO: 4873; WAN024CZK_at; Start 822; Stop 846
cagtcgtgttcttaaccgtgaatca

SEQ ID NO: 139735 - DNA, 25 bp, Artificial
  probe
  misc_feature (1)..(25): SEQ ID NO: 4873; WAN024CZK_at; Start 790; Stop 814
tatacagaggattttaacacaccag

SEQ ID NO: 139736 - DNA, 25 bp, Artificial
  probe
  misc_feature (1)..(25): SEQ ID NO: 4873; WAN024CZK_at; Start 876; Stop 900
cgatatgcgcgatatagaagcagct

SEQ ID NO: 139737 - DNA, 25 bp, Artificial
  probe
  misc_feature (1)..(25): SEQ ID NO: 4873; WAN024CZK_at; Start 968; Stop 992
tcggtcagtaccttgcagtgctaaa

SEQ ID NO: 139738 - DNA, 25 bp, Artificial
  probe
  misc_feature (1)..(25): SEQ ID NO: 4873; WAN024CZK_at; Start 862; Stop 886
tctgctaattctagcgatatgcgcg

SEQ ID NO: 139739 - DNA, 25 bp, Artificial
  probe
  misc_feature (1)..(25): SEQ ID NO: 4873; WAN024CZK_at; Start 476; Stop 500
tccacacaagtatgccagagaaagc

SEQ ID NO: 139740 - DNA, 25 bp, Artificial
  probe
  misc_feature (1)..(25): SEQ ID NO: 4873; WAN024CZK_at; Start 291; Stop 315
acatcgtgttgttgctggtggagaa

SEQ ID NO: 139741 - DNA, 25 bp, Artificial
  probe
  misc_feature (1)..(25): SEQ ID NO: 4873; WAN024CZK_at; Start 1031; Stop 1055
aaaatgcagagagtttccgtcgtga

SEQ ID NO: 139742 - DNA, 25 bp, Artificial
  probe
  misc_feature (1)..(25): SEQ ID NO: 4873; WAN024CZK_at; Start 549; Stop 573
taaatacggtgctcatggtacaagt

SEQ ID NO: 139743 - DNA, 25 bp, Artificial
  probe
  misc_feature (1)..(25): SEQ ID NO: 4873; WAN024CZK_at; Start 434; Stop 458
tgttgccagacattaccagtgtagt

SEQ ID NO: 139744 - DNA, 25 bp, Artificial
  probe
  misc_feature (1)..(25): SEQ ID NO: 4873; WAN024CZK_at; Start 678; Stop 702
gaaagccggcaaatctgtagacact

SEQ ID NO: 139745 - DNA, 25 bp, Artificial
  probe
  misc_feature (1)..(25): SEQ ID NO: 4873; WAN024CZK_at; Start 364; Stop 388
gaagagttgagtttgttggctcctc

SEQ ID NO: 139746 - DNA, 25 bp, Artificial
  probe
  misc_feature (1)..(25): SEQ ID NO: 4873; WAN024CZK_at; Start 1192; Stop 1216
gcccgtgacgttgaacgcttgaaaa

SEQ ID NO: 139747 - DNA, 25 bp, Artificial
  probe
  misc_feature (1)..(25): SEQ ID NO: 4873; WAN024CZK_at; Start 405; Stop 429
tgcagcaggtgttcgtgccttcaag

SEQ ID NO: 139748 - DNA, 25 bp, Artificial
  probe
  misc_feature (1)..(25): SEQ ID NO: 4873; WAN024CZK_at; Start 934; Stop 958
tatgaaatgtatgttgaccgtatcc

SEQ ID NO: 139749 - DNA, 25 bp, Artificial
  probe
  misc_feature (1)..(25): SEQ ID NO: 4873; WAN024CZK_at; Start 908; Stop 932
aagggaatcacgaggctagcttggc

SEQ ID NO: 139750 - DNA, 25 bp, Artificial
  probe
  misc_feature (1)..(25): SEQ ID NO: 4873; WAN024CZK_at; Start 837; Stop 861
ccgtgaatcaggtcttttgggagtt

SEQ ID NO: 139751 - DNA, 25 bp, Artificial
  probe
  misc_feature (1)..(25): SEQ ID NO: 4873; WAN024CZK_at; Start 657; Stop 681
cggaggctcaattacagctgtgaaa

SEQ ID NO: 139752 - DNA, 25 bp, Artificial
  probe
  misc_feature (1)..(25): SEQ ID NO: 4873; WAN024CZK_at; Start 1123; Stop 1147
ggagacatctcaacagaggcagcta

SEQ ID NO: 139753 - DNA, 25 bp, Artificial
  probe
  misc_feature (1)..(25): SEQ ID NO: 4873; WAN024CZK_at; Start 1138; Stop 1162
gaggcagctaaaatccgtgtcttgg

SEQ ID NO: 139754 - DNA, 25 bp, Artificial
  probe
  misc_feature (1)..(25): SEQ ID NO: 4873; WAN024CZK_at; Start 157; Stop 181
actgtaaaatttgacggccgttctg

SEQ ID NO: 139755 - DNA, 25 bp, Artificial
  probe
  misc_feature (1)..(25): SEQ ID NO: 4873; WAN024CZK_at; Start 729; Stop 753
tattatgatgggaacgcgtacaggg

SEQ ID NO: 139756 - DNA, 25 bp, Artificial
  probe
  misc_feature (1)..(25): SEQ ID NO: 4873; WAN024CZK_at; Start 1177; Stop 1201
gaagaattagtcattgcccgtgacg

SEQ ID NO: 139757 - DNA, 25 bp, Artificial
  probe
  misc_feature (1)..(25): SEQ ID NO: 3373; WAN024CZL_at; Start 556; Stop 580
gaagaaatcgtagaaggcttattga

SEQ ID NO: 139758 - DNA, 25 bp, Artificial
  probe
  misc_feature (1)..(25): SEQ ID NO: 3373; WAN024CZL_at; Start 483; Stop 507
gaaggtgagaagtcaagaagttcga

SEQ ID NO: 139759 - DNA, 25 bp, Artificial
  probe
  misc_feature (1)..(25): SEQ ID NO: 3373; WAN024CZL_at; Start 541; Stop 565
gaaaattcgtctgaagaagaaatcg

SEQ ID NO: 139760 - DNA, 25 bp, Artificial
  probe
  misc_feature (1)..(25): SEQ ID NO: 3373; WAN024CZL_at; Start 571; Stop 595
ggcttattgaagtcttattctaaaa

SEQ ID NO: 139761 - DNA, 25 bp, Artificial
  probe
  misc_feature (1)..(25): SEQ ID NO: 3373; WAN024CZL_at; Start 528; Stop 552
tgttcctatgacagaaaattcgtct

SEQ ID NO: 139762 - DNA, 25 bp, Artificial
  probe
  misc_feature (1)..(25): SEQ ID NO: 3373; WAN024CZL_at; Start 346; Stop 370
aaggatgagcaaacactgggcaagc

SEQ ID NO: 139763 - DNA, 25 bp, Artificial
  probe
  misc_feature (1)..(25): SEQ ID NO: 3373; WAN024CZL_at; Start 163; Stop 187
catccagaatggcaactccaacaga

SEQ ID NO: 139764 - DNA, 25 bp, Artificial
  probe
  misc_feature (1)..(25): SEQ ID NO: 3373; WAN024CZL_at; Start 460; Stop 484
gaaaagcgtcgtactttacgcgaga

SEQ ID NO: 139765 - DNA, 25 bp, Artificial
  probe
  misc_feature (1)..(25): SEQ ID NO: 3373; WAN024CZL_at; Start 351; Stop 375
tgagcaaacactgggcaagcaggcc

SEQ ID NO: 139766 - DNA, 25 bp, Artificial
  probe
  misc_feature (1)..(25): SEQ ID NO: 3373; WAN024CZL_at; Start 424; Stop 448
tctaatggtcaaagtcaacggtggg

SEQ ID NO: 139767 - DNA, 25 bp, Artificial
  probe
  misc_feature (1)..(25): SEQ ID NO: 3373; WAN024CZL_at; Start 519; Stop 543
gaaggtagatgttcctatgacagaa

SEQ ID NO: 139768 - DNA, 25 bp, Artificial
  probe
  misc_feature (1)..(25): SEQ ID NO: 3373; WAN024CZL_at; Start 195; Stop 219
gtggatgaatcaggcccagcgtttg

SEQ ID NO: 139769 - DNA, 25 bp, Artificial
  probe
  misc_feature (1)..(25): SEQ ID NO: 3373; WAN024CZL_at; Start 57; Stop 81
tcctgataaagcgggagcagagcga

SEQ ID NO: 139770 - DNA, 25 bp, Artificial
  probe
  misc_feature (1)..(25): SEQ ID NO: 3373; WAN024CZL_at; Start 403; Stop 427
gggatttattatctaacctactcta

SEQ ID NO: 139771 - DNA, 25 bp, Artificial
  probe
  misc_feature (1)..(25): SEQ ID NO: 3373; WAN024CZL_at; Start 71; Stop 95
gagcagagcgagagaagatgctggc

SEQ ID NO: 139772 - DNA, 25 bp, Artificial
  probe
  misc_feature (1)..(25): SEQ ID NO: 3373; WAN024CZL_at; Start 221; Stop 245
gaccacatttttgggtttatctaca

SEQ ID NO: 139773 - DNA, 25 bp, Artificial
  probe
  misc_feature (1)..(25): SEQ ID NO: 3373; WAN024CZL_at; Start 426; Stop 450
taatggtcaaagtcaacggtgggag

SEQ ID NO: 139774 - DNA, 25 bp, Artificial
  probe
  misc_feature (1)..(25): SEQ ID NO: 3373; WAN024CZL_at; Start 167; Stop 191
cagaatggcaactccaacagactag

SEQ ID NO: 139775 - DNA, 25 bp, Artificial
  probe
  misc_feature (1)..(25): SEQ ID NO: 3373; WAN024CZL_at; Start 563; Stop 587
tcgtagaaggcttattgaagtctta

SEQ ID NO: 139776 - DNA, 25 bp, Artificial
  probe
  misc_feature (1)..(25): SEQ ID NO: 3373; WAN024CZL_at; Start 409; Stop 433
tattatctaacctactctaatggtc

SEQ ID NO: 139777 - DNA, 25 bp, Artificial
  probe
  misc_feature (1)..(25): SEQ ID NO: 3373; WAN024CZL_at; Start 193; Stop 217
cagtggatgaatcaggcccagcgtt

SEQ ID NO: 139778 - DNA, 25 bp, Artificial
  probe
  misc_feature (1)..(25): SEQ ID NO: 3373; WAN024CZL_at; Start 476; Stop 500
tacgcgagaaggtgagaagtcaaga

SEQ ID NO: 139779 - DNA, 25 bp, Artificial
  probe
  misc_feature (1)..(25): SEQ ID NO: 3373; WAN024CZL_at; Start 335; Stop 359
tcgaacgtaagaaggatgagcaaac

SEQ ID NO: 139780 - DNA, 25 bp, Artificial
  probe
  misc_feature (1)..(25): SEQ ID NO: 3373; WAN024CZL_at; Start 550; Stop 574
tctgaagaagaaatcgtagaaggct

SEQ ID NO: 139781 - DNA, 25 bp, Artificial
  probe
  misc_feature (1)..(25): SEQ ID NO: 3373; WAN024CZL_at; Start 359; Stop 383
cactgggcaagcaggccaaagtttt

SEQ ID NO: 139782 - DNA, 25 bp, Artificial
  probe
  misc_feature (1)..(25): SEQ ID NO: 3373; WAN024CZL_at; Start 469; Stop 493
cgtactttacgcgagaaggtgagaa

SEQ ID NO: 139783 - DNA, 25 bp, Artificial
  probe
  misc_feature (1)..(25): SEQ ID NO: 3373; WAN024CZL_at; Start 589; Stop 613
tctaaaattcttccctattatctag

SEQ ID NO: 139784 - DNA, 25 bp, Artificial
  probe
  misc_feature (1)..(25): SEQ ID NO: 3373; WAN024CZL_at; Start 488; Stop 512
tgagaagtcaagaagttcgaaaagt

SEQ ID NO: 139785 - DNA, 25 bp, Artificial
  probe
  misc_feature (1)..(25): SEQ ID NO: 3373; WAN024CZL_at; Start 448; Stop 472
gaggcgaatgaagaaaagcgtcgta

SEQ ID NO: 139786 - DNA, 25 bp, Artificial
  probe
  misc_feature (1)..(25): SEQ ID NO: 3373; WAN024CZL_at; Start 505; Stop 529
cgaaaagttttagtgaaggtagatg

SEQ ID NO: 139787 - DNA, 25 bp, Artificial
  probe
  misc_feature (1)..(25): SEQ ID NO: 3373; WAN024CZL_at; Start 432; Stop 456
tcaaagtcaacggtgggaggcgaat

SEQ ID NO: 139788 - DNA, 25 bp, Artificial
  probe
  misc_feature (1)..(25): SEQ ID NO: 3373; WAN024CZL_at; Start 1; Stop 25
ctgatgttgaataagataagagact

SEQ ID NO: 139789 - DNA, 25 bp, Artificial
  probe
  misc_feature (1)..(25): SEQ ID NO: 3373; WAN024CZL_at; Start 325; Stop 349
gtcagtttcatcgaacgtaagaagg

SEQ ID NO: 139790 - DNA, 25 bp, Artificial
  probe
  misc_feature (1)..(25): SEQ ID NO: 3373; WAN024CZL_at; Start 342; Stop 366
taagaaggatgagcaaacactgggc

SEQ ID NO: 139791 - DNA, 25 bp, Artificial
  probe
  misc_feature (1)..(25): SEQ ID NO: 2691; WAN024CZM_at; Start 23; Stop 47
gcggaaatggaatgggttcatcaat

SEQ ID NO: 139792 - DNA, 25 bp, Artificial
  probe
  misc_feature (1)..(25): SEQ ID NO: 2691; WAN024CZM_at; Start 247; Stop 271
gaaatcaccgaaaaactcagtcaag

SEQ ID NO: 139793 - DNA, 25 bp, Artificial
  probe
  misc_feature (1)..(25): SEQ ID NO: 2691; WAN024CZM_at; Start 20; Stop 44
cgtgcggaaatggaatgggttcatc

SEQ ID NO: 139794 - DNA, 25 bp, Artificial
  probe
  misc_feature (1)..(25): SEQ ID NO: 2691; WAN024CZM_at; Start 104; Stop 128
cagtcaattcatgcagtgtcggtga

SEQ ID NO: 139795 - DNA, 25 bp, Artificial
  probe
  misc_feature (1)..(25): SEQ ID NO: 2691; WAN024CZM_at; Start 175; Stop 199
catttgattcaagaattggaagggc

SEQ ID NO: 139796 - DNA, 25 bp, Artificial
  probe
  misc_feature (1)..(25): SEQ ID NO: 2691; WAN024CZM_at; Start 251; Stop 275
tcaccgaaaaactcagtcaagcact

SEQ ID NO: 139797 - DNA, 25 bp, Artificial
  probe
  misc_feature (1)..(25): SEQ ID NO: 2691; WAN024CZM_at; Start 256; Stop 280
gaaaaactcagtcaagcactacagt

SEQ ID NO: 139798 - DNA, 25 bp, Artificial
  probe
  misc_feature (1)..(25): SEQ ID NO: 2691; WAN024CZM_at; Start 11; Stop 35
tattagcagcgtgcggaaatggaat

SEQ ID NO: 139799 - DNA, 25 bp, Artificial
  probe
  misc_feature (1)..(25): SEQ ID NO: 2691; WAN024CZM_at; Start 78; Stop 102
ccgtaagcttaatcaaacagatttt

SEQ ID NO: 139800 - DNA, 25 bp, Artificial
  probe
  misc_feature (1)..(25): SEQ ID NO: 2691; WAN024CZM_at; Start 136; Stop 160
ggtttagcagtaggatatgacatcg

SEQ ID NO: 139801 - DNA, 25 bp, Artificial
  probe
  misc_feature (1)..(25): SEQ ID NO: 2691; WAN024CZM_at; Start 184; Stop 208
caagaattggaagggcgaactaatg

SEQ ID NO: 139802 - DNA, 25 bp, Artificial
  probe
  misc_feature (1)..(25): SEQ ID NO: 2691; WAN024CZM_at; Start 60; Stop 84
gaaggttgaaaatgctctccgtaag

SEQ ID NO: 139803 - DNA, 25 bp, Artificial
  probe
  misc_feature (1)..(25): SEQ ID NO: 2691; WAN024CZM_at; Start 41; Stop 65
catcaatggttatcaagatgaaggt

SEQ ID NO: 139804 - DNA, 25 bp, Artificial
  probe
  misc_feature (1)..(25): SEQ ID NO: 2691; WAN024CZM_at; Start 117; Stop 141
cagtgtcggtgaagctaaaggttta

SEQ ID NO: 139805 - DNA, 25 bp, Artificial
  probe
  misc_feature (1)..(25): SEQ ID NO: 2691; WAN024CZM_at; Start 143; Stop 167
cagtaggatatgacatcgtaatcgc

SEQ ID NO: 139806 - DNA, 25 bp, Artificial
  probe
  misc_feature (1)..(25): SEQ ID NO: 2691; WAN024CZM_at; Start 223; Stop 247
cttgataacttgatggatgataaag

SEQ ID NO: 139807 - DNA, 25 bp, Artificial
  probe
  misc_feature (1)..(25): SEQ ID NO: 2691; WAN024CZM_at; Start 180; Stop 204
gattcaagaattggaagggcgaact

SEQ ID NO: 139808 - DNA, 25 bp, Artificial
  probe
  misc_feature (1)..(25): SEQ ID NO: 2691; WAN024CZM_at; Start 32; Stop 56
gaatgggttcatcaatggttatcaa

SEQ ID NO: 139809 - DNA, 25 bp, Artificial
  probe
  misc_feature (1)..(25): SEQ ID NO: 2691; WAN024CZM_at; Start 148; Stop 172
ggatatgacatcgtaatcgcttctc

SEQ ID NO: 139810 - DNA, 25 bp, Artificial
  probe
  misc_feature (1)..(25): SEQ ID NO: 2691; WAN024CZM_at; Start 113; Stop 137
catgcagtgtcggtgaagctaaagg

SEQ ID NO: 139811 - DNA, 25 bp, Artificial
  probe
  misc_feature (1)..(25): SEQ ID NO: 2691; WAN024CZM_at; Start 108; Stop 132
caattcatgcagtgtcggtgaagct

SEQ ID NO: 139812 - DNA, 25 bp, Artificial
  probe
  misc_feature (1)..(25): SEQ ID NO: 2691; WAN024CZM_at; Start 90; Stop 114
tcaaacagattttacagtcaattca

SEQ ID NO: 139813 - DNA, 25 bp, Artificial
  probe
  misc_feature (1)..(25): SEQ ID NO: 2691; WAN024CZM_at; Start 54; Stop 78
caagatgaaggttgaaaatgctctc

SEQ ID NO: 139814 - DNA, 25 bp, Artificial
  probe
  misc_feature (1)..(25): SEQ ID NO: 2691; WAN024CZM_at; Start 97; Stop 121
gattttacagtcaattcatgcagtg

SEQ ID NO: 139815 - DNA, 25 bp, Artificial
  probe
  misc_feature (1)..(25): SEQ ID NO: 2691; WAN024CZM_at; Start 102; Stop 126
tacagtcaattcatgcagtgtcggt

SEQ ID NO: 139816 - DNA, 25 bp, Artificial
  probe
  misc_feature (1)..(25): SEQ ID NO: 2691; WAN024CZM_at; Start 5; Stop 29
ttaaagtattagcagcgtgcggaaa

SEQ ID NO: 139817 - DNA, 25 bp, Artificial
  probe
  misc_feature (1)..(25): SEQ ID NO: 2691; WAN024CZM_at; Start 73; Stop 97
gctctccgtaagcttaatcaaacag

SEQ ID NO: 139818 - DNA, 25 bp, Artificial
  probe
  misc_feature (1)..(25): SEQ ID NO: 2691; WAN024CZM_at; Start 2; Stop 26
tggttaaagtattagcagcgtgcgg

SEQ ID NO: 139819 - DNA, 25 bp, Artificial
  probe
  misc_feature (1)..(25): SEQ ID NO: 2691; WAN024CZM_at; Start 153; Stop 177
tgacatcgtaatcgcttctcttcat

SEQ ID NO: 139820 - DNA, 25 bp, Artificial
  probe
  misc_feature (1)..(25): SEQ ID NO: 2691; WAN024CZM_at; Start 63; Stop 87
ggttgaaaatgctctccgtaagctt

SEQ ID NO: 139821 - DNA, 25 bp, Artificial
  probe
  misc_feature (1)..(25): SEQ ID NO: 2691; WAN024CZM_at; Start 232; Stop 256
ttgatggatgataaagaaatcaccg

SEQ ID NO: 139822 - DNA, 25 bp, Artificial
  probe
  misc_feature (1)..(25): SEQ ID NO: 2691; WAN024CZM_at; Start 263; Stop 287
tcagtcaagcactacagtaactaat

SEQ ID NO: 139823 - DNA, 25 bp, Artificial
  probe
  misc_feature (1)..(25): SEQ ID NO: 2691; WAN024CZM_at; Start 132; Stop 156
taaaggtttagcagtaggatatgac

SEQ ID NO: 139824 - DNA, 25 bp, Artificial
  probe
  misc_feature (1)..(25): SEQ ID NO: 2691; WAN024CZM_at; Start 163; Stop 187
atcgcttctcttcatttgattcaag

SEQ ID NO: 139825 - DNA, 25 bp, Artificial
  probe
  misc_feature (1)..(25): SEQ ID NO: 1275; WAN024CZN_at; Start 120; Stop 144
gccagagtattacgatgctatcatt

SEQ ID NO: 139826 - DNA, 25 bp, Artificial
  probe
  misc_feature (1)..(25): SEQ ID NO: 1275; WAN024CZN_at; Start 404; Stop 428
gccagactaaagaagatgtcttggc

SEQ ID NO: 139827 - DNA, 25 bp, Artificial
  probe
  misc_feature (1)..(25): SEQ ID NO: 1275; WAN024CZN_at; Start 322; Stop 346
tcaaaaattcacacaagtgtagcca

SEQ ID NO: 139828 - DNA, 25 bp, Artificial
  probe
  misc_feature (1)..(25): SEQ ID NO: 1275; WAN024CZN_at; Start 384; Stop 408
tattgcacgtttacaggcttgccag

SEQ ID NO: 139829 - DNA, 25 bp, Artificial
  probe
  misc_feature (1)..(25): SEQ ID NO: 1275; WAN024CZN_at; Start 340; Stop 364
gtagccattccacaaattattgccc

SEQ ID NO: 139830 - DNA, 25 bp, Artificial
  probe
  misc_feature (1)..(25): SEQ ID NO: 1275; WAN024CZN_at; Start 36; Stop 60
gatccgactaggtttagaggctaac

SEQ ID NO: 139831 - DNA, 25 bp, Artificial
  probe
  misc_feature (1)..(25): SEQ ID NO: 1275; WAN024CZN_at; Start 110; Stop 134
gggcaattttgccagagtattacga

SEQ ID NO: 139832 - DNA, 25 bp, Artificial
  probe
  misc_feature (1)..(25): SEQ ID NO: 1275; WAN024CZN_at; Start 296; Stop 320
ttttgttggcactagcagcaacaag

SEQ ID NO: 139833 - DNA, 25 bp, Artificial
  probe
  misc_feature (1)..(25): SEQ ID NO: 1275; WAN024CZN_at; Start 267; Stop 291
tgtattttcagatgggaaagaggta

SEQ ID NO: 139834 - DNA, 25 bp, Artificial
  probe
  misc_feature (1)..(25): SEQ ID NO: 1275; WAN024CZN_at; Start 179; Stop 203
tgatgccaggtatggctatgcccca

SEQ ID NO: 139835 - DNA, 25 bp, Artificial
  probe
  misc_feature (1)..(25): SEQ ID NO: 1275; WAN024CZN_at; Start 9; Stop 33
aaaacaagctttaattgacaatgac

SEQ ID NO: 139836 - DNA, 25 bp, Artificial
  probe
  misc_feature (1)..(25): SEQ ID NO: 1275; WAN024CZN_at; Start 31; Stop 55
gactcgatccgactaggtttagagg

SEQ ID NO: 139837 - DNA, 25 bp, Artificial
  probe
  misc_feature (1)..(25): SEQ ID NO: 1275; WAN024CZN_at; Start 330; Stop 354
tcacacaagtgtagccattccacaa

SEQ ID NO: 139838 - DNA, 25 bp, Artificial
  probe
  misc_feature (1)..(25): SEQ ID NO: 1275; WAN024CZN_at; Start 258; Stop 282
aaatcctgttgtattttcagatggg

SEQ ID NO: 139839 - DNA, 25 bp, Artificial
  probe
  misc_feature (1)..(25): SEQ ID NO: 1275; WAN024CZN_at; Start 144; Stop 168
tgaatcgactgaagagtatgggcct

SEQ ID NO: 139840 - DNA, 25 bp, Artificial
  probe
  misc_feature (1)..(25): SEQ ID NO: 1275; WAN024CZN_at; Start 192; Stop 216
ggctatgccccacgctagacctgaa

SEQ ID NO: 139841 - DNA, 25 bp, Artificial
  probe
  misc_feature (1)..(25): SEQ ID NO: 1275; WAN024CZN_at; Start 453; Stop 477
cccttatctcgaaggattggatttg

SEQ ID NO: 139842 - DNA, 25 bp, Artificial
  probe
  misc_feature (1)..(25): SEQ ID NO: 1275; WAN024CZN_at; Start 220; Stop 244
ggtgtgcaaagtgatgccttttcat

SEQ ID NO: 139843 - DNA, 25 bp, Artificial
  probe
  misc_feature (1)..(25): SEQ ID NO: 1275; WAN024CZN_at; Start 426; Stop 450
ggctatgattgaagaatctaaggat

SEQ ID NO: 139844 - DNA, 25 bp, Artificial
  probe
  misc_feature (1)..(25): SEQ ID NO: 1275; WAN024CZN_at; Start 170; Stop 194
actatatcttgatgccaggtatggc

SEQ ID NO: 139845 - DNA, 25 bp, Artificial
  probe
  misc_feature (1)..(25): SEQ ID NO: 1275; WAN024CZN_at; Start 459; Stop 483
tctcgaaggattggatttggaaagt

SEQ ID NO: 139846 - DNA, 25 bp, Artificial
  probe
  misc_feature (1)..(25): SEQ ID NO: 1275; WAN024CZN_at; Start 73; Stop 97
gcagtcaaggtagcagtagatccct

SEQ ID NO: 139847 - DNA, 25 bp, Artificial
  probe
  misc_feature (1)..(25): SEQ ID NO: 1275; WAN024CZN_at; Start 414; Stop 438
agaagatgtcttggctatgattgaa

SEQ ID NO: 139848 - DNA, 25 bp, Artificial
  probe
  misc_feature (1)..(25): SEQ ID NO: 1275; WAN024CZN_at; Start 25; Stop 49
gacaatgactcgatccgactaggtt

SEQ ID NO: 139849 - DNA, 25 bp, Artificial
  probe
  misc_feature (1)..(25): SEQ ID NO: 1275; WAN024CZN_at; Start 63; Stop 87
ttggaaagaagcagtcaaggtagca

SEQ ID NO: 139850 - DNA, 25 bp, Artificial
  probe
  misc_feature (1)..(25): SEQ ID NO: 1275; WAN024CZN_at; Start 160; Stop 184
tatgggccttactatatcttgatgc

SEQ ID NO: 139851 - DNA, 25 bp, Artificial
  probe
  misc_feature (1)..(25): SEQ ID NO: 1275; WAN024CZN_at; Start 376; Stop 400
gaagattctattgcacgtttacagg

SEQ ID NO: 139852 - DNA, 25 bp, Artificial
  probe
  misc_feature (1)..(25): SEQ ID NO: 1275; WAN024CZN_at; Start 290; Stop 314
tatctgttttgttggcactagcagc

SEQ ID NO: 139853 - DNA, 25 bp, Artificial
  probe
  misc_feature (1)..(25): SEQ ID NO: 1275; WAN024CZN_at; Start 149; Stop 173
cgactgaagagtatgggccttacta

SEQ ID NO: 139854 - DNA, 25 bp, Artificial
  probe
  misc_feature (1)..(25): SEQ ID NO: 1275; WAN024CZN_at; Start 185; Stop 209
caggtatggctatgccccacgctag

SEQ ID NO: 139855 - DNA, 25 bp, Artificial
  probe
  misc_feature (1)..(25): SEQ ID NO: 1275; WAN024CZN_at; Start 283; Stop 307
aaagaggtatctgttttgttggcac

SEQ ID NO: 139856 - DNA, 25 bp, Artificial
  probe
  misc_feature (1)..(25): SEQ ID NO: 1275; WAN024CZN_at; Start 395; Stop 419
tacaggcttgccagactaaagaaga

SEQ ID NO: 139857 - DNA, 25 bp, Artificial
  probe
  misc_feature (1)..(25): SEQ ID NO: 1275; WAN024CZN_at; Start 133; Stop 157
gatgctatcattgaatcgactgaag

SEQ ID NO: 139858 - DNA, 25 bp, Artificial
  probe
  misc_feature (1)..(25): SEQ ID NO: 1275; WAN024CZN_at; Start 20; Stop 44
taattgacaatgactcgatccgact

SEQ ID NO: 139859 - DNA, 25 bp, Artificial
  probe
  misc_feature (1)..(25): SEQ ID NO: 978; WAN024CZO_at; Start 553; Stop 577
gatgccgacttgcaaactctacaaa

SEQ ID NO: 139860 - DNA, 25 bp, Artificial
  probe
  misc_feature (1)..(25): SEQ ID NO: 978; WAN024CZO_at; Start 267; Stop 291
cattatttcgttatcaagtggacaa

SEQ ID NO: 139861 - DNA, 25 bp, Artificial
  probe
  misc_feature (1)..(25): SEQ ID NO: 978; WAN024CZO_at; Start 1120; Stop 1144
tatggaacactaaagggacaagtca

SEQ ID NO: 139862 - DNA, 25 bp, Artificial
  probe
  misc_feature (1)..(25): SEQ ID NO: 978; WAN024CZO_at; Start 400; Stop 424
tctaattctggtgaagaacaggaat

SEQ ID NO: 139863 - DNA, 25 bp, Artificial
  probe
  misc_feature (1)..(25): SEQ ID NO: 978; WAN024CZO_at; Start 747; Stop 771
caatattaaagatatgaaccgtacc

SEQ ID NO: 139864 - DNA, 25 bp, Artificial
  probe
  misc_feature (1)..(25): SEQ ID NO: 978; WAN024CZO_at; Start 1282; Stop 1306
gaagtgcggattgtctatgataaag

SEQ ID NO: 139865 - DNA, 25 bp, Artificial
  probe
  misc_feature (1)..(25): SEQ ID NO: 978; WAN024CZO_at; Start 244; Stop 268
gatatggtaaatgctggagatgtca

SEQ ID NO: 139866 - DNA, 25 bp, Artificial
  probe
  misc_feature (1)..(25): SEQ ID NO: 978; WAN024CZO_at; Start 48; Stop 72
tgataagagaccaccagcttttgcg

SEQ ID NO: 139867 - DNA, 25 bp, Artificial
  probe
  misc_feature (1)..(25): SEQ ID NO: 978; WAN024CZO_at; Start 852; Stop 876
taaaagtattacagagcttgaggct

SEQ ID NO: 139868 - DNA, 25 bp, Artificial
  probe
  misc_feature (1)..(25): SEQ ID NO: 978; WAN024CZO_at; Start 962; Stop 986
aacaaggaatgtctattcagcaggg

SEQ ID NO: 139869 - DNA, 25 bp, Artificial
  probe
  misc_feature (1)..(25): SEQ ID NO: 978; WAN024CZO_at; Start 988; Stop 1012
caaacgatagcagaagtttcaggga

SEQ ID NO: 139870 - DNA, 25 bp, Artificial
  probe
  misc_feature (1)..(25): SEQ ID NO: 978; WAN024CZO_at; Start 116; Stop 140
tggttggcgcagcttatatacccaa

SEQ ID NO: 139871 - DNA, 25 bp, Artificial
  probe
  misc_feature (1)..(25): SEQ ID NO: 978; WAN024CZO_at; Start 444; Stop 468
ctacctatctcagttaaattcggaa

SEQ ID NO: 139872 - DNA, 25 bp, Artificial
  probe
  misc_feature (1)..(25): SEQ ID NO: 978; WAN024CZO_at; Start 616; Stop 640
tccttatcagatacgacatcagctg

SEQ ID NO: 139873 - DNA, 25 bp, Artificial
  probe
  misc_feature (1)..(25): SEQ ID NO: 978; WAN024CZO_at; Start 823; Stop 847
gagttaggtactgctcgttcaaaca

SEQ ID NO: 139874 - DNA, 25 bp, Artificial
  probe
  misc_feature (1)..(25): SEQ ID NO: 978; WAN024CZO_at; Start 588; Stop 612
tcaacttcaacagcaaggagactcc

SEQ ID NO: 139875 - DNA, 25 bp, Artificial
  probe
  misc_feature (1)..(25): SEQ ID NO: 978; WAN024CZO_at; Start 1156; Stop 1180
tcaggaacaatttcccaagaaacga

SEQ ID NO: 139876 - DNA, 25 bp, Artificial
  probe
  misc_feature (1)..(25): SEQ ID NO: 978; WAN024CZO_at; Start 723; Stop 747
tagcgagattgatagtcaacaaagc

SEQ ID NO: 139877 - DNA, 25 bp, Artificial
  probe
  misc_feature (1)..(25): SEQ ID NO: 978; WAN024CZO_at; Start 102; Stop 126
cttaagcggtgcattggttggcgca

SEQ ID NO: 139878 - DNA, 25 bp, Artificial
  probe
  misc_feature (1)..(25): SEQ ID NO: 978; WAN024CZO_at; Start 1136; Stop 1160
gacaagtcagacagattgattcagg

SEQ ID NO: 139879 - DNA, 25 bp, Artificial
  probe
  misc_feature (1)..(25): SEQ ID NO: 978; WAN024CZO_at; Start 1267; Stop 1291
aaggatatgccagttgaagtgcgga

SEQ ID NO: 139880 - DNA, 25 bp, Artificial
  probe
  misc_feature (1)..(25): SEQ ID NO: 978; WAN024CZO_at; Start 429; Stop 453
tgggaaagttgaatactacctatct

SEQ ID NO: 139881 - DNA, 25 bp, Artificial
  probe
  misc_feature (1)..(25): SEQ ID NO: 978; WAN024CZO_at; Start 89; Stop 113
caactgctattatcttaagcggtgc

SEQ ID NO: 139882 - DNA, 25 bp, Artificial
  probe
  misc_feature (1)..(25): SEQ ID NO: 978; WAN024CZO_at; Start 176; Stop 200
taacaggtacagagttcctatcagc

SEQ ID NO: 139883 - DNA, 25 bp, Artificial
  probe
  misc_feature (1)..(25): SEQ ID NO: 978; WAN024CZO_at; Start 542; Stop 566
gaaatcagttagatgccgacttgca

SEQ ID NO: 139884 - DNA, 25 bp, Artificial
  probe
  misc_feature (1)..(25): SEQ ID NO: 978; WAN024CZO_at; Start 1079; Stop 1103
caaaagttgatgttgctattactgg

SEQ ID NO: 139885 - DNA, 25 bp, Artificial
  probe
  misc_feature (1)..(25): SEQ ID NO: 978; WAN024CZO_at; Start 888; Stop 912
ggcaacaggtcaagataaagctcat

SEQ ID NO: 139886 - DNA, 25 bp, Artificial
  probe
  misc_feature (1)..(25): SEQ ID NO: 978; WAN024CZO_at; Start 871; Stop 895
gaggctaatcttggagtggcaacag

SEQ ID NO: 139887 - DNA, 25 bp, Artificial
  probe
  misc_feature (1)..(25): SEQ ID NO: 978; WAN024CZO_at; Start 778; Stop 802
gatccaacttctcaggcttataata

SEQ ID NO: 139888 - DNA, 25 bp, Artificial
  probe
  misc_feature (1)..(25): SEQ ID NO: 978; WAN024CZO_at; Start 1188; Stop 1212
gaatattagcctctataaagtcatg

SEQ ID NO: 139889 - DNA, 25 bp, Artificial
  probe
  misc_feature (1)..(25): SEQ ID NO: 978; WAN024CZO_at; Start 287; Stop 311
gacaagaaggtttacaagcgagctc

SEQ ID NO: 139890 - DNA, 25 bp, Artificial
  probe
  misc_feature (1)..(25): SEQ ID NO: 978; WAN024CZO_at; Start 481; Stop 505
ggtacccagtattcaaagattcagg

SEQ ID NO: 139891 - DNA, 25 bp, Artificial
  probe
  misc_feature (1)..(25): SEQ ID NO: 978; WAN024CZO_at; Start 604; Stop 628
ggagactccccttccttatcagata

SEQ ID NO: 139892 - DNA, 25 bp, Artificial
  probe
  misc_feature (1)..(25): SEQ ID NO: 978; WAN024CZO_at; Start 762; Stop 786
gaaccgtacctataatgatccaact

SEQ ID NO: 139893 - DNA, 25 bp, Artificial
  probe
  misc_feature (1)..(25): SEQ ID NO: 1231; WAN024CZP_at; Start 107; Stop 131
taaataaactacaaaaaggctatga

SEQ ID NO: 139894 - DNA, 25 bp, Artificial
  probe
  misc_feature (1)..(25): SEQ ID NO: 1231; WAN024CZP_at; Start 191; Stop 215
caatagttcttgacgtagatggagt

SEQ ID NO: 139895 - DNA, 25 bp, Artificial
  probe
  misc_feature (1)..(25): SEQ ID NO: 1231; WAN024CZP_at; Start 280; Stop 304
gaaggcgcaattgaaaaataactaa

SEQ ID NO: 139896 - DNA, 25 bp, Artificial
  probe
  misc_feature (1)..(25): SEQ ID NO: 1231; WAN024CZP_at; Start 215; Stop 239
tttacttgacttttgaactagctgc

SEQ ID NO: 139897 - DNA, 25 bp, Artificial
  probe
  misc_feature (1)..(25): SEQ ID NO: 1231; WAN024CZP_at; Start 93; Stop 117
gcgtatggaaagcttaaataaacta

SEQ ID NO: 139898 - DNA, 25 bp, Artificial
  probe
  misc_feature (1)..(25): SEQ ID NO: 1231; WAN024CZP_at; Start 42; Stop 66
gatggccttgatgttctttatgcaa

SEQ ID NO: 139899 - DNA, 25 bp, Artificial
  probe
  misc_feature (1)..(25): SEQ ID NO: 1231; WAN024CZP_at; Start 237; Stop 261
tgctatcaagacagtattaccgctg

SEQ ID NO: 139900 - DNA, 25 bp, Artificial
  probe
  misc_feature (1)..(25): SEQ ID NO: 1231; WAN024CZP_at; Start 85; Stop 109
gctcaaaagcgtatggaaagcttaa

SEQ ID NO: 139901 - DNA, 25 bp, Artificial
  probe
  misc_feature (1)..(25): SEQ ID NO: 1231; WAN024CZP_at; Start 140; Stop 164
caatcggtggactttatggaacagt

SEQ ID NO: 139902 - DNA, 25 bp, Artificial
  probe
  misc_feature (1)..(25): SEQ ID NO: 1231; WAN024CZP_at; Start 208; Stop 232
gatggagtttacttgacttttgaac

SEQ ID NO: 139903 - DNA, 25 bp, Artificial
  probe
  misc_feature (1)..(25): SEQ ID NO: 1231; WAN024CZP_at; Start 275; Stop 299
cactagaaggcgcaattgaaaaata

SEQ ID NO: 139904 - DNA, 25 bp, Artificial
  probe
  misc_feature (1)..(25): SEQ ID NO: 1231; WAN024CZP_at; Start 169; Stop 193
gaagtagatacggagaagggaacaa

SEQ ID NO: 139905 - DNA, 25 bp, Artificial
  probe
  misc_feature (1)..(25): SEQ ID NO: 1231; WAN024CZP_at; Start 16; Stop 40
acttttttaatcatgcttgtaggta

SEQ ID NO: 139906 - DNA, 25 bp, Artificial
  probe
  misc_feature (1)..(25): SEQ ID NO: 1231; WAN024CZP_at; Start 229; Stop 253
gaactagctgctatcaagacagtat

SEQ ID NO: 139907 - DNA, 25 bp, Artificial
  probe
  misc_feature (1)..(25): SEQ ID NO: 1231; WAN024CZP_at; Start 261; Stop 285
gaaagaaacagcttcactagaaggc

SEQ ID NO: 139908 - DNA, 25 bp, Artificial
  probe
  misc_feature (1)..(25): SEQ ID NO: 1231; WAN024CZP_at; Start 62; Stop 86
tgcaacgttctcaaaagaaacaagc

SEQ ID NO: 139909 - DNA, 25 bp, Artificial
  probe
  misc_feature (1)..(25): SEQ ID NO: 1231; WAN024CZP_at; Start 243; Stop 267
caagacagtattaccgctgaaagaa

SEQ ID NO: 139910 - DNA, 25 bp, Artificial
  probe
  misc_feature (1)..(25): SEQ ID NO: 1231; WAN024CZP_at; Start 201; Stop 225
tgacgtagatggagtttacttgact

SEQ ID NO: 139911 - DNA, 25 bp, Artificial
  probe
  misc_feature (1)..(25): SEQ ID NO: 1231; WAN024CZP_at; Start 161; Stop 185
cagtcgatgaagtagatacggagaa

SEQ ID NO: 139912 - DNA, 25 bp, Artificial
  probe
  misc_feature (1)..(25): SEQ ID NO: 1231; WAN024CZP_at; Start 188; Stop 212
gaacaatagttcttgacgtagatgg

SEQ ID NO: 139913 - DNA, 25 bp, Artificial
  probe
  misc_feature (1)..(25): SEQ ID NO: 1231; WAN024CZP_at; Start 51; Stop 75
gatgttctttatgcaacgttctcaa

SEQ ID NO: 139914 - DNA, 25 bp, Artificial
  probe
  misc_feature (1)..(25): SEQ ID NO: 1231; WAN024CZP_at; Start 138; Stop 162
tacaatcggtggactttatggaaca

SEQ ID NO: 139915 - DNA, 25 bp, Artificial
  probe
  misc_feature (1)..(25): SEQ ID NO: 1231; WAN024CZP_at; Start 78; Stop 102
gaaacaagctcaaaagcgtatggaa

SEQ ID NO: 139916 - DNA, 25 bp, Artificial
  probe
  misc_feature (1)..(25): SEQ ID NO: 1231; WAN024CZP_at; Start 173; Stop 197
tagatacggagaagggaacaatagt

SEQ ID NO: 139917 - DNA, 25 bp, Artificial
  probe
  misc_feature (1)..(25): SEQ ID NO: 1231; WAN024CZP_at; Start 265; Stop 289
gaaacagcttcactagaaggcgcaa

SEQ ID NO: 139918 - DNA, 25 bp, Artificial
  probe
  misc_feature (1)..(25): SEQ ID NO: 1231; WAN024CZP_at; Start 221; Stop 245
tgacttttgaactagctgctatcaa

SEQ ID NO: 139919 - DNA, 25 bp, Artificial
  probe
  misc_feature (1)..(25): SEQ ID NO: 1231; WAN024CZP_at; Start 251; Stop 275
tattaccgctgaaagaaacagcttc

SEQ ID NO: 139920 - DNA, 25 bp, Artificial
  probe
  misc_feature (1)..(25): SEQ ID NO: 1231; WAN024CZP_at; Start 122; Stop 146
aaggctatgaagtgattacaatcgg

SEQ ID NO: 139921 - DNA, 25 bp, Artificial
  probe
  misc_feature (1)..(25): SEQ ID NO: 1231; WAN024CZP_at; Start 269; Stop 293
cagcttcactagaaggcgcaattga

SEQ ID NO: 139922 - DNA, 25 bp, Artificial
  probe
  misc_feature (1)..(25): SEQ ID NO: 1231; WAN024CZP_at; Start 127; Stop 151
tatgaagtgattacaatcggtggac

SEQ ID NO: 139923 - DNA, 25 bp, Artificial
  probe
  misc_feature (1)..(25): SEQ ID NO: 1231; WAN024CZP_at; Start 72; Stop 96
tcaaaagaaacaagctcaaaagcgt

SEQ ID NO: 139924 - DNA, 25 bp, Artificial
  probe
  misc_feature (1)..(25): SEQ ID NO: 1231; WAN024CZP_at; Start 144; Stop 168
cggtggactttatggaacagtcgat

SEQ ID NO: 139925 - DNA, 25 bp, Artificial
  probe
  misc_feature (1)..(25): SEQ ID NO: 1231; WAN024CZP_at; Start 156; Stop 180
tggaacagtcgatgaagtagatacg

SEQ ID NO: 139926 - DNA, 25 bp, Artificial
  probe
  misc_feature (1)..(25): SEQ ID NO: 1231; WAN024CZP_at; Start 27; Stop 51
catgcttgtaggtatgatggccttg

SEQ ID NO: 139927 - DNA, 25 bp, Artificial
  probe
  misc_feature (1)..(25): SEQ ID NO: 660; WAN024CZQ_at; Start 22; Stop 46
tgtctgggaaatatttgccgtagcc

SEQ ID NO: 139928 - DNA, 25 bp, Artificial
  probe
  misc_feature (1)..(25): SEQ ID NO: 660; WAN024CZQ_at; Start 325; Stop 349
gaaagtgttccagacccttggtata

SEQ ID NO: 139929 - DNA, 25 bp, Artificial
  probe
  misc_feature (1)..(25): SEQ ID NO: 660; WAN024CZQ_at; Start 6; Stop 30
aaaattagtctttgtctgtctggga

SEQ ID NO: 139930 - DNA, 25 bp, Artificial
  probe
  misc_feature (1)..(25): SEQ ID NO: 660; WAN024CZQ_at; Start 305; Stop 329
agatttactcattttcatctgaaag

SEQ ID NO: 139931 - DNA, 25 bp, Artificial
  probe
  misc_feature (1)..(25): SEQ ID NO: 660; WAN024CZQ_at; Start 17; Stop 41
ttgtctgtctgggaaatatttgccg

SEQ ID NO: 139932 - DNA, 25 bp, Artificial
  probe
  misc_feature (1)..(25): SEQ ID NO: 660; WAN024CZQ_at; Start 223; Stop 247
gaagcctttgattatattatcggaa

SEQ ID NO: 139933 - DNA, 25 bp, Artificial
  probe
  misc_feature (1)..(25): SEQ ID NO: 660; WAN024CZQ_at; Start 339; Stop 363
cccttggtatacaggagattttgaa

SEQ ID NO: 139934 - DNA, 25 bp, Artificial
  probe
  misc_feature (1)..(25): SEQ ID NO: 660; WAN024CZQ_at; Start 365; Stop 389
aaacctatcgacgtgttcaagaggg

SEQ ID NO: 139935 - DNA, 25 bp, Artificial
  probe
  misc_feature (1)..(25): SEQ ID NO: 660; WAN024CZQ_at; Start 129; Stop 153
tccgattcataaggggactcaggga

SEQ ID NO: 139936 - DNA, 25 bp, Artificial
  probe
  misc_feature (1)..(25): SEQ ID NO: 660; WAN024CZQ_at; Start 174; Stop 198
tccttatgacaagaacaagacatcg

SEQ ID NO: 139937 - DNA, 25 bp, Artificial
  probe
  misc_feature (1)..(25): SEQ ID NO: 660; WAN024CZQ_at; Start 320; Stop 344
catctgaaagtgttccagacccttg

SEQ ID NO: 139938 - DNA, 25 bp, Artificial
  probe
  misc_feature (1)..(25): SEQ ID NO: 660; WAN024CZQ_at; Start 361; Stop 385
gaagaaacctatcgacgtgttcaag

SEQ ID NO: 139939 - DNA, 25 bp, Artificial
  probe
  misc_feature (1)..(25): SEQ ID NO: 660; WAN024CZQ_at; Start 101; Stop 125
gagcaacttcctcttgggaacatgg

SEQ ID NO: 139940 - DNA, 25 bp, Artificial
  probe
  misc_feature (1)..(25): SEQ ID NO: 660; WAN024CZQ_at; Start 204; Stop 228
gattagtaaggaagattttgaagcc

SEQ ID NO: 139941 - DNA, 25 bp, Artificial
  probe
  misc_feature (1)..(25): SEQ ID NO: 660; WAN024CZQ_at; Start 333; Stop 357
tccagacccttggtatacaggagat

SEQ ID NO: 139942 - DNA, 25 bp, Artificial
  probe
  misc_feature (1)..(25): SEQ ID NO: 660; WAN024CZQ_at; Start 275; Stop 299
gtcagatgtgtccagtagactgtca

SEQ ID NO: 139943 - DNA, 25 bp, Artificial
  probe
  misc_feature (1)..(25): SEQ ID NO: 660; WAN024CZQ_at; Start 53; Stop 77
ccgagtttgttatgaaatcaatgac

SEQ ID NO: 139944 - DNA, 25 bp, Artificial
  probe
  misc_feature (1)..(25): SEQ ID NO: 660; WAN024CZQ_at; Start 283; Stop 307
tgtccagtagactgtcaagataaga

SEQ ID NO: 139945 - DNA, 25 bp, Artificial
  probe
  misc_feature (1)..(25): SEQ ID NO: 660; WAN024CZQ_at; Start 353; Stop 377
gagattttgaagaaacctatcgacg

SEQ ID NO: 139946 - DNA, 25 bp, Artificial
  probe
  misc_feature (1)..(25): SEQ ID NO: 660; WAN024CZQ_at; Start 231; Stop 255
tgattatattatcggaatggacgct

SEQ ID NO: 139947 - DNA, 25 bp, Artificial
  probe
  misc_feature (1)..(25): SEQ ID NO: 660; WAN024CZQ_at; Start 165; Stop 189
gtatgagattccttatgacaagaac

SEQ ID NO: 139948 - DNA, 25 bp, Artificial
  probe
  misc_feature (1)..(25): SEQ ID NO: 660; WAN024CZQ_at; Start 45; Stop 69
ccctatggccgagtttgttatgaaa

SEQ ID NO: 139949 - DNA, 25 bp, Artificial
  probe
  misc_feature (1)..(25): SEQ ID NO: 660; WAN024CZQ_at; Start 118; Stop 142
gaacatggcaatccgattcataagg

SEQ ID NO: 139950 - DNA, 25 bp, Artificial
  probe
  misc_feature (1)..(25): SEQ ID NO: 660; WAN024CZQ_at; Start 181; Stop 205
gacaagaacaagacatcgcttcaga

SEQ ID NO: 139951 - DNA, 25 bp, Artificial
  probe
  misc_feature (1)..(25): SEQ ID NO: 660; WAN024CZQ_at; Start 38; Stop 62
gccgtagccctatggccgagtttgt

SEQ ID NO: 139952 - DNA, 25 bp, Artificial
  probe
  misc_feature (1)..(25): SEQ ID NO: 660; WAN024CZQ_at; Start 237; Stop 261
tattatcggaatggacgcttcaaat

SEQ ID NO: 139953 - DNA, 25 bp, Artificial
  probe
  misc_feature (1)..(25): SEQ ID NO: 660; WAN024CZQ_at; Start 112; Stop 136
tcttgggaacatggcaatccgattc

SEQ ID NO: 139954 - DNA, 25 bp, Artificial
  probe
  misc_feature (1)..(25): SEQ ID NO: 660; WAN024CZQ_at; Start 109; Stop 133
tcctcttgggaacatggcaatccga

SEQ ID NO: 139955 - DNA, 25 bp, Artificial
  probe
  misc_feature (1)..(25): SEQ ID NO: 660; WAN024CZQ_at; Start 85; Stop 109
tacgaaatccaaagtcgagcaactt

SEQ ID NO: 139956 - DNA, 25 bp, Artificial
  probe
  misc_feature (1)..(25): SEQ ID NO: 660; WAN024CZQ_at; Start 192; Stop 216
gacatcgcttcagattagtaaggaa

SEQ ID NO: 139957 - DNA, 25 bp, Artificial
  probe
  misc_feature (1)..(25): SEQ ID NO: 660; WAN024CZQ_at; Start 391; Stop 415
tgtcaagcttggttagaacgtttag

SEQ ID NO: 139958 - DNA, 25 bp, Artificial
  probe
  misc_feature (1)..(25): SEQ ID NO: 660; WAN024CZQ_at; Start 290; Stop 314
tagactgtcaagataagatttactc

SEQ ID NO: 139959 - DNA, 25 bp, Artificial
  probe
  misc_feature (1)..(25): SEQ ID NO: 660; WAN024CZQ_at; Start 94; Stop 118
caaagtcgagcaacttcctcttggg

SEQ ID NO: 139960 - DNA, 25 bp, Artificial
  probe
  misc_feature (1)..(25): SEQ ID NO: 660; WAN024CZQ_at; Start 31; Stop 55
aatatttgccgtagccctatggccg

SEQ ID NO: 139961 - DNA, 25 bp, Artificial
  probe
  misc_feature (1)..(25): SEQ ID NO: 2516; WAN024CZR_at; Start 685; Stop 709
gaagcagcagccttcttcaaagcgc

SEQ ID NO: 139962 - DNA, 25 bp, Artificial
  probe
  misc_feature (1)..(25): SEQ ID NO: 2516; WAN024CZR_at; Start 208; Stop 232
gaccctgagtatggacttccagcaa

SEQ ID NO: 139963 - DNA, 25 bp, Artificial
  probe
  misc_feature (1)..(25): SEQ ID NO: 2516; WAN024CZR_at; Start 302; Stop 326
caaaacgcttgccagactgcttgga

SEQ ID NO: 139964 - DNA, 25 bp, Artificial
  probe
  misc_feature (1)..(25): SEQ ID NO: 2516; WAN024CZR_at; Start 1; Stop 25
atggctttaacagaacaaaaacgtg

SEQ ID NO: 139965 - DNA, 25 bp, Artificial
  probe
  misc_feature (1)..(25): SEQ ID NO: 2516; WAN024CZR_at; Start 65; Stop 89
cagctcttgcatttgaccaacgtgg

SEQ ID NO: 139966 - DNA, 25 bp, Artificial
  probe
  misc_feature (1)..(25): SEQ ID NO: 2516; WAN024CZR_at; Start 691; Stop 715
gcagccttcttcaaagcgcaagatg

SEQ ID NO: 139967 - DNA, 25 bp, Artificial
  probe
  misc_feature (1)..(25): SEQ ID NO: 2516; WAN024CZR_at; Start 79; Stop 103
gaccaacgtggtgctttgaaacgcc

SEQ ID NO: 139968 - DNA, 25 bp, Artificial
  probe
  misc_feature (1)..(25): SEQ ID NO: 2516; WAN024CZR_at; Start 772; Stop 796
caagatactcttgtatttgctcatg

SEQ ID NO: 139969 - DNA, 25 bp, Artificial
  probe
  misc_feature (1)..(25): SEQ ID NO: 2516; WAN024CZR_at; Start 200; Stop 224
tgcttcttgaccctgagtatggact

SEQ ID NO: 139970 - DNA, 25 bp, Artificial
  probe
  misc_feature (1)..(25): SEQ ID NO: 2516; WAN024CZR_at; Start 760; Stop 784
gctaaactcttccaagatactcttg

SEQ ID NO: 139971 - DNA, 25 bp, Artificial
  probe
  misc_feature (1)..(25): SEQ ID NO: 2516; WAN024CZR_at; Start 751; Stop 775
ggtgtatcagctaaactcttccaag

SEQ ID NO: 139972 - DNA, 25 bp, Artificial
  probe
  misc_feature (1)..(25): SEQ ID NO: 2516; WAN024CZR_at; Start 115; Stop 139
caccaaacagaagaaccaactgtgg

SEQ ID NO: 139973 - DNA, 25 bp, Artificial
  probe
  misc_feature (1)..(25): SEQ ID NO: 2516; WAN024CZR_at; Start 331; Stop 355
tggtctgcaaaacgtattaaagaag

SEQ ID NO: 139974 - DNA, 25 bp, Artificial
  probe
  misc_feature (1)..(25): SEQ ID NO: 2516; WAN024CZR_at; Start 901; Stop 925
cgcacaactggatttgaaaacattg

SEQ ID NO: 139975 - DNA, 25 bp, Artificial
  probe
  misc_feature (1)..(25): SEQ ID NO: 2516; WAN024CZR_at; Start 220; Stop 244
ggacttccagcaactaaagctcttg

SEQ ID NO: 139976 - DNA, 25 bp, Artificial
  probe
  misc_feature (1)..(25): SEQ ID NO: 2516; WAN024CZR_at; Start 85; Stop 109
cgtggtgctttgaaacgcctcatgg

SEQ ID NO: 139977 - DNA, 25 bp, Artificial
  probe
  misc_feature (1)..(25): SEQ ID NO: 2516; WAN024CZR_at; Start 374; Stop 398
aattcttgctttactatgatgtaga

SEQ ID NO: 139978 - DNA, 25 bp, Artificial
  probe
  misc_feature (1)..(25): SEQ ID NO: 2516; WAN024CZR_at; Start 782; Stop 806
ttgtatttgctcatgaatcaggtgc

SEQ ID NO: 139979 - DNA, 25 bp, Artificial
  probe
  misc_feature (1)..(25): SEQ ID NO: 2516; WAN024CZR_at; Start 49; Stop 73
gaaaatggtatcatctcagctcttg

SEQ ID NO: 139980 - DNA, 25 bp, Artificial
  probe
  misc_feature (1)..(25): SEQ ID NO: 2516; WAN024CZR_at; Start 739; Stop 763
tacttgagtgctggtgtatcagcta

SEQ ID NO: 139981 - DNA, 25 bp, Artificial
  probe
  misc_feature (1)..(25): SEQ ID NO: 2516; WAN024CZR_at; Start 570; Stop 594
tatgaaagtcttttcagacccacgc

SEQ ID NO: 139982 - DNA, 25 bp, Artificial
  probe
  misc_feature (1)..(25): SEQ ID NO: 2516; WAN024CZR_at; Start 812; Stop 836
ttaacggagttctttgtggccgtgc

SEQ ID NO: 139983 - DNA, 25 bp, Artificial
  probe
  misc_feature (1)..(25): SEQ ID NO: 2516; WAN024CZR_at; Start 247; Stop 271
gaaaaagctggtcttctccttgctt

SEQ ID NO: 139984 - DNA, 25 bp, Artificial
  probe
  misc_feature (1)..(25): SEQ ID NO: 2516; WAN024CZR_at; Start 275; Stop 299
aaaaaacaggttatgacacaacaag

SEQ ID NO: 139985 - DNA, 25 bp, Artificial
  probe
  misc_feature (1)..(25): SEQ ID NO: 2516; WAN024CZR_at; Start 230; Stop 254
caactaaagctcttgatgaaaaagc

SEQ ID NO: 139986 - DNA, 25 bp, Artificial
  probe
  misc_feature (1)..(25): SEQ ID NO: 2516; WAN024CZR_at; Start 158; Stop 182
aagtcttggtagcagatgaattgac

SEQ ID NO: 139987 - DNA, 25 bp, Artificial
  probe
  misc_feature (1)..(25): SEQ ID NO: 2516; WAN024CZR_at; Start 261; Stop 285
tctccttgcttatgaaaaaacaggt

SEQ ID NO: 139988 - DNA, 25 bp, Artificial
  probe
  misc_feature (1)..(25): SEQ ID NO: 2516; WAN024CZR_at; Start 466; Stop 490
gaagatatcccattcttccttgaaa

SEQ ID NO: 139989 - DNA, 25 bp, Artificial
  probe
  misc_feature (1)..(25): SEQ ID NO: 2516; WAN024CZR_at; Start 702; Stop 726
caaagcgcaagatgaagcaacgaac

SEQ ID NO: 139990 - DNA, 25 bp, Artificial
  probe
  misc_feature (1)..(25): SEQ ID NO: 2516; WAN024CZR_at; Start 32; Stop 56
tagaaaaactttctgatgaaaatgg

SEQ ID NO: 139991 - DNA, 25 bp, Artificial
  probe
  misc_feature (1)..(25): SEQ ID NO: 2516; WAN024CZR_at; Start 358; Stop 382
ggtgcagatgcagttaaattcttgc

SEQ ID NO: 139992 - DNA, 25 bp, Artificial
  probe
  misc_feature (1)..(25): SEQ ID NO: 2516; WAN024CZR_at; Start 611; Stop 635
tgaaagttgaagttcctgttaacat

SEQ ID NO: 139993 - DNA, 25 bp, Artificial
  probe
  misc_feature (1)..(25): SEQ ID NO: 2516; WAN024CZR_at; Start 452; Stop 476
ctgagtgtgtggctgaagatatccc

SEQ ID NO: 139994 - DNA, 25 bp, Artificial
  probe
  misc_feature (1)..(25): SEQ ID NO: 2516; WAN024CZR_at; Start 584; Stop 608
cagacccacgctttaacattgatgt

SEQ ID NO: 139995 - DNA, 25 bp, Artificial
  probe
  misc_feature (1)..(25): SEQ ID NO: 2332; WAN024CZS_at; Start 67; Stop 91
ggagcagccaaatcatcctttattg

SEQ ID NO: 139996 - DNA, 25 bp, Artificial
  probe
  misc_feature (1)..(25): SEQ ID NO: 2332; WAN024CZS_at; Start 288; Stop 312
gctatctaaagaattcatcgatctc

SEQ ID NO: 139997 - DNA, 25 bp, Artificial
  probe
  misc_feature (1)..(25): SEQ ID NO: 2332; WAN024CZS_at; Start 154; Stop 178
gaagactccttagtagaagcgcaca

SEQ ID NO: 139998 - DNA, 25 bp, Artificial
  probe
  misc_feature (1)..(25): SEQ ID NO: 2332; WAN024CZS_at; Start 63; Stop 87
tagtggagcagccaaatcatccttt

SEQ ID NO: 139999 - DNA, 25 bp, Artificial
  probe
  misc_feature (1)..(25): SEQ ID NO: 2332; WAN024CZS_at; Start 164; Stop 188
tagtagaagcgcacaagattcactc

SEQ ID NO: 140000 - DNA, 25 bp, Artificial
  probe
  misc_feature (1)..(25): SEQ ID NO: 2332; WAN024CZS_at; Start 28; Stop 52
gaaatggaatatatctgttttcagc

SEQ ID NO: 140001 - DNA, 25 bp, Artificial
  probe
  misc_feature (1)..(25): SEQ ID NO: 2332; WAN024CZS_at; Start 192; Stop 216
tctcatacaaaaagaagctactgga

SEQ ID NO: 140002 - DNA, 25 bp, Artificial
  probe
  misc_feature (1)..(25): SEQ ID NO: 2332; WAN024CZS_at; Start 89; Stop 113
ttgaagccatccaactagctaaggc

SEQ ID NO: 140003 - DNA, 25 bp, Artificial
  probe
  misc_feature (1)..(25): SEQ ID NO: 2332; WAN024CZS_at; Start 269; Stop 293
caacagagattattcagttgctatc

SEQ ID NO: 140004 - DNA, 25 bp, Artificial
  probe
  misc_feature (1)..(25): SEQ ID NO: 2332; WAN024CZS_at; Start 237; Stop 261
gctatttatgcatgcagaagaccaa

SEQ ID NO: 140005 - DNA, 25 bp, Artificial
  probe
  misc_feature (1)..(25): SEQ ID NO: 2332; WAN024CZS_at; Start 76; Stop 100
aaatcatcctttattgaagccatcc

SEQ ID NO: 140006 - DNA, 25 bp, Artificial
  probe
  misc_feature (1)..(25): SEQ ID NO: 2332; WAN024CZS_at; Start 6; Stop 30
taggagaaataagatgacagaagaa

SEQ ID NO: 140007 - DNA, 25 bp, Artificial
  probe
  misc_feature (1)..(25): SEQ ID NO: 2332; WAN024CZS_at; Start 18; Stop 42
gatgacagaagaaatggaatatatc

SEQ ID NO: 140008 - DNA, 25 bp, Artificial
  probe
  misc_feature (1)..(25): SEQ ID NO: 2332; WAN024CZS_at; Start 70; Stop 94
gcagccaaatcatcctttattgaag

SEQ ID NO: 140009 - DNA, 25 bp, Artificial
  probe
  misc_feature (1)..(25): SEQ ID NO: 2332; WAN024CZS_at; Start 283; Stop 307
cagttgctatctaaagaattcatcg

SEQ ID NO: 140010 - DNA, 25 bp, Artificial
  probe
  misc_feature (1)..(25): SEQ ID NO: 2332; WAN024CZS_at; Start 197; Stop 221
tacaaaaagaagctactggagaaaa

SEQ ID NO: 140011 - DNA, 25 bp, Artificial
  probe
  misc_feature (1)..(25): SEQ ID NO: 2332; WAN024CZS_at; Start 224; Stop 248
taggattctccttgctatttatgca

SEQ ID NO: 140012 - DNA, 25 bp, Artificial
  probe
  misc_feature (1)..(25): SEQ ID NO: 2332; WAN024CZS_at; Start 208; Stop 232
gctactggagaaaaaataggattct

SEQ ID NO: 140013 - DNA, 25 bp, Artificial
  probe
  misc_feature (1)..(25): SEQ ID NO: 2332; WAN024CZS_at; Start 53; Stop 77
tcattgccaatagtggagcagccaa

SEQ ID NO: 140014 - DNA, 25 bp, Artificial
  probe
  misc_feature (1)..(25): SEQ ID NO: 2332; WAN024CZS_at; Start 160; Stop 184
tccttagtagaagcgcacaagattc

SEQ ID NO: 140015 - DNA, 25 bp, Artificial
  probe
  misc_feature (1)..(25): SEQ ID NO: 2332; WAN024CZS_at; Start 60; Stop 84
caatagtggagcagccaaatcatcc

SEQ ID NO: 140016 - DNA, 25 bp, Artificial
  probe
  misc_feature (1)..(25): SEQ ID NO: 2332; WAN024CZS_at; Start 43; Stop 67
tgttttcagctcattgccaatagtg

SEQ ID NO: 140017 - DNA, 25 bp, Artificial
  probe
  misc_feature (1)..(25): SEQ ID NO: 2332; WAN024CZS_at; Start 256; Stop 280
gaccaaatggcttcaacagagatta

SEQ ID NO: 140018 - DNA, 25 bp, Artificial
  probe
  misc_feature (1)..(25): SEQ ID NO: 2332; WAN024CZS_at; Start 138; Stop 162
taaagttgaagaagcggaagactcc

SEQ ID NO: 140019 - DNA, 25 bp, Artificial
  probe
  misc_feature (1)..(25): SEQ ID NO: 2332; WAN024CZS_at; Start 157; Stop 181
gactccttagtagaagcgcacaaga

SEQ ID NO: 140020 - DNA, 25 bp, Artificial
  probe
  misc_feature (1)..(25): SEQ ID NO: 2332; WAN024CZS_at; Start 87; Stop 111
tattgaagccatccaactagctaag

SEQ ID NO: 140021 - DNA, 25 bp, Artificial
  probe
  misc_feature (1)..(25): SEQ ID NO: 2332; WAN024CZS_at; Start 217; Stop 241
gaaaaaataggattctccttgctat

SEQ ID NO: 140022 - DNA, 25 bp, Artificial
  probe
  misc_feature (1)..(25): SEQ ID NO: 2332; WAN024CZS_at; Start 243; Stop 267
tatgcatgcagaagaccaaatggct

SEQ ID NO: 140023 - DNA, 25 bp, Artificial
  probe
  misc_feature (1)..(25): SEQ ID NO: 2332; WAN024CZS_at; Start 298; Stop 322
gaattcatcgatctctatcaaaata

SEQ ID NO: 140024 - DNA, 25 bp, Artificial
  probe
  misc_feature (1)..(25): SEQ ID NO: 2332; WAN024CZS_at; Start 56; Stop 80
ttgccaatagtggagcagccaaatc

SEQ ID NO: 140025 - DNA, 25 bp, Artificial
  probe
  misc_feature (1)..(25): SEQ ID NO: 2332; WAN024CZS_at; Start 149; Stop 173
aagcggaagactccttagtagaagc

SEQ ID NO: 140026 - DNA, 25 bp, Artificial
  probe
  misc_feature (1)..(25): SEQ ID NO: 2332; WAN024CZS_at; Start 261; Stop 285
aatggcttcaacagagattattcag

SEQ ID NO: 140027 - DNA, 25 bp, Artificial
  probe
  misc_feature (1)..(25): SEQ ID NO: 2332; WAN024CZS_at; Start 143; Stop 167
ttgaagaagcggaagactccttagt

SEQ ID NO: 140028 - DNA, 25 bp, Artificial
  probe
  misc_feature (1)..(25): SEQ ID NO: 2332; WAN024CZS_at; Start 246; Stop 270
gcatgcagaagaccaaatggcttca

SEQ ID NO: 140029 - DNA, 25 bp, Artificial
  probe
  misc_feature (1)..(25): SEQ ID NO: 807; WAN024CZT_at; Start 142; Stop 166
gaagcagatgtcattctaattgggc

SEQ ID NO: 140030 - DNA, 25 bp, Artificial
  probe
  misc_feature (1)..(25): SEQ ID NO: 807; WAN024CZT_at; Start 216; Stop 240
ccctgtagataccattgatatgcgg

SEQ ID NO: 140031 - DNA, 25 bp, Artificial
  probe
  misc_feature (1)..(25): SEQ ID NO: 807; WAN024CZT_at; Start 169; Stop 193
caaattcgttatgagttacttgctg

SEQ ID NO: 140032 - DNA, 25 bp, Artificial
  probe
  misc_feature (1)..(25): SEQ ID NO: 807; WAN024CZT_at; Start 225; Stop 249
taccattgatatgcgggattacgga

SEQ ID NO: 140033 - DNA, 25 bp, Artificial
  probe
  misc_feature (1)..(25): SEQ ID NO: 807; WAN024CZT_at; Start 71; Stop 95
gtgcgactgaacgtgggattgaaat

SEQ ID NO: 140034 - DNA, 25 bp, Artificial
  probe
  misc_feature (1)..(25): SEQ ID NO: 807; WAN024CZT_at; Start 244; Stop 268
tacggaatgatgaatggagcaaaag

SEQ ID NO: 140035 - DNA, 25 bp, Artificial
  probe
  misc_feature (1)..(25): SEQ ID NO: 807; WAN024CZT_at; Start 59; Stop 83
aaatgcaacaaagtgcgactgaacg

SEQ ID NO: 140036 - DNA, 25 bp, Artificial
  probe
  misc_feature (1)..(25): SEQ ID NO: 807; WAN024CZT_at; Start 135; Stop 159
tatccatgaagcagatgtcattcta

SEQ ID NO: 140037 - DNA, 25 bp, Artificial
  probe
  misc_feature (1)..(25): SEQ ID NO: 807; WAN024CZT_at; Start 255; Stop 279
gaatggagcaaaagttctggaacaa

SEQ ID NO: 140038 - DNA, 25 bp, Artificial
  probe
  misc_feature (1)..(25): SEQ ID NO: 807; WAN024CZT_at; Start 155; Stop 179
ttctaattgggccacaaattcgtta

SEQ ID NO: 140039 - DNA, 25 bp, Artificial
  probe
  misc_feature (1)..(25): SEQ ID NO: 807; WAN024CZT_at; Start 181; Stop 205
gagttacttgctgtgaaagaaattg

SEQ ID NO: 140040 - DNA, 25 bp, Artificial
  probe
  misc_feature (1)..(25): SEQ ID NO: 807; WAN024CZT_at; Start 163; Stop 187
gggccacaaattcgttatgagttac

SEQ ID NO: 140041 - DNA, 25 bp, Artificial
  probe
  misc_feature (1)..(25): SEQ ID NO: 807; WAN024CZT_at; Start 231; Stop 255
tgatatgcgggattacggaatgatg

SEQ ID NO: 140042 - DNA, 25 bp, Artificial
  probe
  misc_feature (1)..(25): SEQ ID NO: 807; WAN024CZT_at; Start 223; Stop 247
gataccattgatatgcgggattacg

SEQ ID NO: 140043 - DNA, 25 bp, Artificial
  probe
  misc_feature (1)..(25): SEQ ID NO: 807; WAN024CZT_at; Start 56; Stop 80
aaaaaatgcaacaaagtgcgactga

SEQ ID NO: 140044 - DNA, 25 bp, Artificial
  probe
  misc_feature (1)..(25): SEQ ID NO: 807; WAN024CZT_at; Start 7; Stop 31
caaattttattagtatgtaatgcgg

SEQ ID NO: 140045 - DNA, 25 bp, Artificial
  probe
  misc_feature (1)..(25): SEQ ID NO: 807; WAN024CZT_at; Start 64; Stop 88
caacaaagtgcgactgaacgtggga

SEQ ID NO: 140046 - DNA, 25 bp, Artificial
  probe
  misc_feature (1)..(25): SEQ ID NO: 807; WAN024CZT_at; Start 262; Stop 286
gcaaaagttctggaacaagcacttg

SEQ ID NO: 140047 - DNA, 25 bp, Artificial
  probe
  misc_feature (1)..(25): SEQ ID NO: 807; WAN024CZT_at; Start 107; Stop 131
caaaatcaatgacagaagctaaaaa

SEQ ID NO: 140048 - DNA, 25 bp, Artificial
  probe
  misc_feature (1)..(25): SEQ ID NO: 807; WAN024CZT_at; Start 16; Stop 40
ttagtatgtaatgcgggaatgtcga

SEQ ID NO: 140049 - DNA, 25 bp, Artificial
  probe
  misc_feature (1)..(25): SEQ ID NO: 807; WAN024CZT_at; Start 251; Stop 275
tgatgaatggagcaaaagttctgga

SEQ ID NO: 140050 - DNA, 25 bp, Artificial
  probe
  misc_feature (1)..(25): SEQ ID NO: 807; WAN024CZT_at; Start 145; Stop 169
gcagatgtcattctaattgggccac

SEQ ID NO: 140051 - DNA, 25 bp, Artificial
  probe
  misc_feature (1)..(25): SEQ ID NO: 807; WAN024CZT_at; Start 101; Stop 125
tccaagcaaaatcaatgacagaagc

SEQ ID NO: 140052 - DNA, 25 bp, Artificial
  probe
  misc_feature (1)..(25): SEQ ID NO: 807; WAN024CZT_at; Start 234; Stop 258
tatgcgggattacggaatgatgaat

SEQ ID NO: 140053 - DNA, 25 bp, Artificial
  probe
  misc_feature (1)..(25): SEQ ID NO: 807; WAN024CZT_at; Start 175; Stop 199
cgttatgagttacttgctgtgaaag

SEQ ID NO: 140054 - DNA, 25 bp, Artificial
  probe
  misc_feature (1)..(25): SEQ ID NO: 807; WAN024CZT_at; Start 259; Stop 283
ggagcaaaagttctggaacaagcac

SEQ ID NO: 140055 - DNA, 25 bp, Artificial
  probe
  misc_feature (1)..(25): SEQ ID NO: 807; WAN024CZT_at; Start 133; Stop 157
aatatccatgaagcagatgtcattc

SEQ ID NO: 140056 - DNA, 25 bp, Artificial
  probe
  misc_feature (1)..(25): SEQ ID NO: 807; WAN024CZT_at; Start 97; Stop 121
tctatccaagcaaaatcaatgacag

SEQ ID NO: 140057 - DNA, 25 bp, Artificial
  probe
  misc_feature (1)..(25): SEQ ID NO: 807; WAN024CZT_at; Start 67; Stop 91
caaagtgcgactgaacgtgggattg

SEQ ID NO: 140058 - DNA, 25 bp, Artificial
  probe
  misc_feature (1)..(25): SEQ ID NO: 807; WAN024CZT_at; Start 219; Stop 243
tgtagataccattgatatgcgggat

SEQ ID NO: 140059 - DNA, 25 bp, Artificial
  probe
  misc_feature (1)..(25): SEQ ID NO: 807; WAN024CZT_at; Start 159; Stop 183
aattgggccacaaattcgttatgag

SEQ ID NO: 140060 - DNA, 25 bp, Artificial
  probe
  misc_feature (1)..(25): SEQ ID NO: 807; WAN024CZT_at; Start 240; Stop 264
ggattacggaatgatgaatggagca

SEQ ID NO: 140061 - DNA, 25 bp, Artificial
  probe
  misc_feature (1)..(25): SEQ ID NO: 807; WAN024CZT_at; Start 151; Stop 175
gtcattctaattgggccacaaattc

SEQ ID NO: 140062 - DNA, 25 bp, Artificial
  probe
  misc_feature (1)..(25): SEQ ID NO: 807; WAN024CZT_at; Start 148; Stop 172
gatgtcattctaattgggccacaaa

SEQ ID NO: 140063 - DNA, 25 bp, Artificial
  probe
  misc_feature (1)..(25): SEQ ID NO: 1605; WAN024CZU_at; Start 181; Stop 205
cgtgggcagggaacctttgttctct

SEQ ID NO: 140064 - DNA, 25 bp, Artificial
  probe
  misc_feature (1)..(25): SEQ ID NO: 1605; WAN024CZU_at; Start 361; Stop 385
gctttgcagagtccagtttataata

SEQ ID NO: 140065 - DNA, 25 bp, Artificial
  probe
  misc_feature (1)..(25): SEQ ID NO: 1605; WAN024CZU_at; Start 106; Stop 130
cagtttgcctgtagtcgaatgacga

SEQ ID NO: 140066 - DNA, 25 bp, Artificial
  probe
  misc_feature (1)..(25): SEQ ID NO: 1605; WAN024CZU_at; Start 90; Stop 114
aatgacattagctaaacagtttgcc

SEQ ID NO: 140067 - DNA, 25 bp, Artificial
  probe
  misc_feature (1)..(25): SEQ ID NO: 1605; WAN024CZU_at; Start 376; Stop 400
gtttataatatttaccgcctgcgta

SEQ ID NO: 140068 - DNA, 25 bp, Artificial
  probe
  misc_feature (1)..(25): SEQ ID NO: 1605; WAN024CZU_at; Start 746; Stop 770
gaagccaatcttttacagactctag

SEQ ID NO: 140069 - DNA, 25 bp, Artificial
  probe
  misc_feature (1)..(25): SEQ ID NO: 1605; WAN024CZU_at; Start 391; Stop 415
cgcctgcgtattattgacggtaaac

SEQ ID NO: 140070 - DNA, 25 bp, Artificial
  probe
  misc_feature (1)..(25): SEQ ID NO: 1605; WAN024CZU_at; Start 206; Stop 230
ctcgtggcagctcaaaaagaaaatt

SEQ ID NO: 140071 - DNA, 25 bp, Artificial
  probe
  misc_feature (1)..(25): SEQ ID NO: 1605; WAN024CZU_at; Start 61; Stop 85
tataccatgaacgaacaattgcctg

SEQ ID NO: 140072 - DNA, 25 bp, Artificial
  probe
  misc_feature (1)..(25): SEQ ID NO: 1605; WAN024CZU_at; Start 191; Stop 215
gaacctttgttctctctcgtggcag

SEQ ID NO: 140073 - DNA, 25 bp, Artificial
  probe
  misc_feature (1)..(25): SEQ ID NO: 1605; WAN024CZU_at; Start 353; Stop 377
tacaggtcgctttgcagagtccagt

SEQ ID NO: 140074 - DNA, 25 bp, Artificial
  probe
  misc_feature (1)..(25): SEQ ID NO: 1605; WAN024CZU_at; Start 295; Stop 319
gactcgaggattattcacttcaaat

SEQ ID NO: 140075 - DNA, 25 bp, Artificial
  probe
  misc_feature (1)..(25): SEQ ID NO: 1605; WAN024CZU_at; Start 423; Stop 447
tctggaacaaacttatatgagtacc

SEQ ID NO: 140076 - DNA, 25 bp, Artificial
  probe
  misc_feature (1)..(25): SEQ ID NO: 1605; WAN024CZU_at; Start 438; Stop 462
tatgagtaccgatgttattccaggt

SEQ ID NO: 140077 - DNA, 25 bp, Artificial
  probe
  misc_feature (1)..(25): SEQ ID NO: 1605; WAN024CZU_at; Start 556; Stop 580
tcttctagttcagaaaatgagcaac

SEQ ID NO: 140078 - DNA, 25 bp, Artificial
  probe
  misc_feature (1)..(25): SEQ ID NO: 1605; WAN024CZU_at; Start 661; Stop 685
tactcgattagtcgtcatcgctatg

SEQ ID NO: 140079 - DNA, 25 bp, Artificial
  probe
  misc_feature (1)..(25): SEQ ID NO: 1605; WAN024CZU_at; Start 25; Stop 49
tacaatgagattcgtgaaaagattc

SEQ ID NO: 140080 - DNA, 25 bp, Artificial
  probe
  misc_feature (1)..(25): SEQ ID NO: 1605; WAN024CZU_at; Start 72; Stop 96
cgaacaattgcctgatgaaatgaca

SEQ ID NO: 140081 - DNA, 25 bp, Artificial
  probe
  misc_feature (1)..(25): SEQ ID NO: 1605; WAN024CZU_at; Start 457; Stop 481
ccaggtattactgaagatattttac

SEQ ID NO: 140082 - DNA, 25 bp, Artificial
  probe
  misc_feature (1)..(25): SEQ ID NO: 1605; WAN024CZU_at; Start 646; Stop 670
ggaactccgtttgagtactcgatta

SEQ ID NO: 140083 - DNA, 25 bp, Artificial
  probe
  misc_feature (1)..(25): SEQ ID NO: 1605; WAN024CZU_at; Start 608; Stop 632
cggtatttgaagtagaacaagtggc

SEQ ID NO: 140084 - DNA, 25 bp, Artificial
  probe
  misc_feature (1)..(25): SEQ ID NO: 1605; WAN024CZU_at; Start 703; Stop 727
tcttttgcattacgacattcctcct

SEQ ID NO: 140085 - DNA, 25 bp, Artificial
  probe
  misc_feature (1)..(25): SEQ ID NO: 1605; WAN024CZU_at; Start 261; Stop 285
gacaaaaatatctgaagatgctcat

SEQ ID NO: 140086 - DNA, 25 bp, Artificial
  probe
  misc_feature (1)..(25): SEQ ID NO: 1605; WAN024CZU_at; Start 499; Stop 523
tacattgaaggaaagttaggattgc

SEQ ID NO: 140087 - DNA, 25 bp, Artificial
  probe
  misc_feature (1)..(25): SEQ ID NO: 1605; WAN024CZU_at; Start 629; Stop 653
tggcttatttggataacggaactcc

SEQ ID NO: 140088 - DNA, 25 bp, Artificial
  probe
  misc_feature (1)..(25): SEQ ID NO: 1605; WAN024CZU_at; Start 145; Stop 169
gacttgttagtttctgagggcttaa

SEQ ID NO: 140089 - DNA, 25 bp, Artificial
  probe
  misc_feature (1)..(25): SEQ ID NO: 1605; WAN024CZU_at; Start 279; Stop 303
tgctcattctacaattgactcgagg

SEQ ID NO: 140090 - DNA, 25 bp, Artificial
  probe
  misc_feature (1)..(25): SEQ ID NO: 1605; WAN024CZU_at; Start 405; Stop 429
tgacggtaaaccttatgttctggaa

SEQ ID NO: 140091 - DNA, 25 bp, Artificial
  probe
  misc_feature (1)..(25): SEQ ID NO: 1605; WAN024CZU_at; Start 121; Stop 145
cgaatgacgatcaaaaaagctttag

SEQ ID NO: 140092 - DNA, 25 bp, Artificial
  probe
  misc_feature (1)..(25): SEQ ID NO: 1605; WAN024CZU_at; Start 515; Stop 539
taggattgcatattgccagtgctac

SEQ ID NO: 140093 - DNA, 25 bp, Artificial
  probe
  misc_feature (1)..(25): SEQ ID NO: 1605; WAN024CZU_at; Start 338; Stop 362
ttttagcagaaaaactacaggtcgc

SEQ ID NO: 140094 - DNA, 25 bp, Artificial
  probe
  misc_feature (1)..(25): SEQ ID NO: 1605; WAN024CZU_at; Start 230; Stop 254
taatcgttccagaaagagatatccg

SEQ ID NO: 140095 - DNA, 25 bp, Artificial
  probe
  misc_feature (1)..(25): SEQ ID NO: 1605; WAN024CZU_at; Start 587; Stop 611
tgcagctccttccaacggaaccggt

SEQ ID NO: 140096 - DNA, 25 bp, Artificial
  probe
  misc_feature (1)..(25): SEQ ID NO: 1605; WAN024CZU_at; Start 571; Stop 595
aatgagcaacattacttgcagctcc

SEQ ID NO: 140097 - DNA, 25 bp, Artificial
  probe
  misc_feature (1)..(25): SEQ ID NO: 1128; WAN024CZV_at; Start 16; Stop 40
tatgaaaacagaactgtttcttttg

SEQ ID NO: 140098 - DNA, 25 bp, Artificial
  probe
  misc_feature (1)..(25): SEQ ID NO: 1128; WAN024CZV_at; Start 9; Stop 33
gaaagagtatgaaaacagaactgtt

SEQ ID NO: 140099 - DNA, 25 bp, Artificial
  probe
  misc_feature (1)..(25): SEQ ID NO: 1128; WAN024CZV_at; Start 79; Stop 103
atttcgtatagggtggatcatcgta

SEQ ID NO: 140100 - DNA, 25 bp, Artificial
  probe
  misc_feature (1)..(25): SEQ ID NO: 1128; WAN024CZV_at; Start 13; Stop 37
gagtatgaaaacagaactgtttctt

SEQ ID NO: 140101 - DNA, 25 bp, Artificial
  probe
  misc_feature (1)..(25): SEQ ID NO: 1128; WAN024CZV_at; Start 117; Stop 141
tatttcttttgatacttcgagttca

SEQ ID NO: 140102 - DNA, 25 bp, Artificial
  probe
  misc_feature (1)..(25): SEQ ID NO: 1128; WAN024CZV_at; Start 11; Stop 35
aagagtatgaaaacagaactgtttc

SEQ ID NO: 140103 - DNA, 25 bp, Artificial
  probe
  misc_feature (1)..(25): SEQ ID NO: 1128; WAN024CZV_at; Start 75; Stop 99
aaatatttcgtatagggtggatcat

SEQ ID NO: 140104 - DNA, 25 bp, Artificial
  probe
  misc_feature (1)..(25): SEQ ID NO: 1128; WAN024CZV_at; Start 72; Stop 96
agaaaatatttcgtatagggtggat

SEQ ID NO: 140105 - DNA, 25 bp, Artificial
  probe
  misc_feature (1)..(25): SEQ ID NO: 1128; WAN024CZV_at; Start 168; Stop 192
tggtacaggaaagtcaactttacta

SEQ ID NO: 140106 - DNA, 25 bp, Artificial
  probe
  misc_feature (1)..(25): SEQ ID NO: 1128; WAN024CZV_at; Start 74; Stop 98
aaaatatttcgtatagggtggatca

SEQ ID NO: 140107 - DNA, 25 bp, Artificial
  probe
  misc_feature (1)..(25): SEQ ID NO: 1128; WAN024CZV_at; Start 114; Stop 138
taatatttcttttgatacttcgagt

SEQ ID NO: 140108 - DNA, 25 bp, Artificial
  probe
  misc_feature (1)..(25): SEQ ID NO: 1128; WAN024CZV_at; Start 171; Stop 195
tacaggaaagtcaactttactacta

SEQ ID NO: 140109 - DNA, 25 bp, Artificial
  probe
  misc_feature (1)..(25): SEQ ID NO: 1128; WAN024CZV_at; Start 167; Stop 191
atggtacaggaaagtcaactttact

SEQ ID NO: 140110 - DNA, 25 bp, Artificial
  probe
  misc_feature (1)..(25): SEQ ID NO: 1128; WAN024CZV_at; Start 77; Stop 101
atatttcgtatagggtggatcatcg

SEQ ID NO: 140111 - DNA, 25 bp, Artificial
  probe
  misc_feature (1)..(25): SEQ ID NO: 1128; WAN024CZV_at; Start 23; Stop 47
acagaactgtttcttttgctattag

SEQ ID NO: 140112 - DNA, 25 bp, Artificial
  probe
  misc_feature (1)..(25): SEQ ID NO: 1128; WAN024CZV_at; Start 118; Stop 142
atttcttttgatacttcgagttcag

SEQ ID NO: 140113 - DNA, 25 bp, Artificial
  probe
  misc_feature (1)..(25): SEQ ID NO: 1128; WAN024CZV_at; Start 144; Stop 168
cgtgacattaattactggtaaaaat

SEQ ID NO: 140114 - DNA, 25 bp, Artificial
  probe
  misc_feature (1)..(25): SEQ ID NO: 1128; WAN024CZV_at; Start 159; Stop 183
tggtaaaaatggtacaggaaagtca

SEQ ID NO: 140115 - DNA, 25 bp, Artificial
  probe
  misc_feature (1)..(25): SEQ ID NO: 1128; WAN024CZV_at; Start 39; Stop 63
tgctattagttcaaaaggagaaaaa

SEQ ID NO: 140116 - DNA, 25 bp, Artificial
  probe
  misc_feature (1)..(25): SEQ ID NO: 1128; WAN024CZV_at; Start 8; Stop 32
ggaaagagtatgaaaacagaactgt

SEQ ID NO: 140117 - DNA, 25 bp, Artificial
  probe
  misc_feature (1)..(25): SEQ ID NO: 1128; WAN024CZV_at; Start 38; Stop 62
ttgctattagttcaaaaggagaaaa

SEQ ID NO: 140118 - DNA, 25 bp, Artificial
  probe
  misc_feature (1)..(25): SEQ ID NO: 1128; WAN024CZV_at; Start 37; Stop 61
tttgctattagttcaaaaggagaaa

SEQ ID NO: 140119 - DNA, 25 bp, Artificial
  probe
  misc_feature (1)..(25): SEQ ID NO: 1128; WAN024CZV_at; Start 7; Stop 31
gggaaagagtatgaaaacagaactg

SEQ ID NO: 140120 - DNA, 25 bp, Artificial
  probe
  misc_feature (1)..(25): SEQ ID NO: 1128; WAN024CZV_at; Start 34; Stop 58
tcttttgctattagttcaaaaggag

SEQ ID NO: 140121 - DNA, 25 bp, Artificial
  probe
  misc_feature (1)..(25): SEQ ID NO: 1128; WAN024CZV_at; Start 146; Stop 170
tgacattaattactggtaaaaatgg

SEQ ID NO: 140122 - DNA, 25 bp, Artificial
  probe
  misc_feature (1)..(25): SEQ ID NO: 1128; WAN024CZV_at; Start 76; Stop 100
aatatttcgtatagggtggatcatc

SEQ ID NO: 140123 - DNA, 25 bp, Artificial
  probe
  misc_feature (1)..(25): SEQ ID NO: 1128; WAN024CZV_at; Start 73; Stop 97
gaaaatatttcgtatagggtggatc

SEQ ID NO: 140124 - DNA, 25 bp, Artificial
  probe
  misc_feature (1)..(25): SEQ ID NO: 1128; WAN024CZV_at; Start 19; Stop 43
gaaaacagaactgtttcttttgcta

SEQ ID NO: 140125 - DNA, 25 bp, Artificial
  probe
  misc_feature (1)..(25): SEQ ID NO: 1128; WAN024CZV_at; Start 28; Stop 52
actgtttcttttgctattagttcaa

SEQ ID NO: 140126 - DNA, 25 bp, Artificial
  probe
  misc_feature (1)..(25): SEQ ID NO: 1128; WAN024CZV_at; Start 71; Stop 95
tagaaaatatttcgtatagggtgga

SEQ ID NO: 140127 - DNA, 25 bp, Artificial
  probe
  misc_feature (1)..(25): SEQ ID NO: 1128; WAN024CZV_at; Start 12; Stop 36
agagtatgaaaacagaactgtttct

SEQ ID NO: 140128 - DNA, 25 bp, Artificial
  probe
  misc_feature (1)..(25): SEQ ID NO: 1128; WAN024CZV_at; Start 24; Stop 48
cagaactgtttcttttgctattagt

SEQ ID NO: 140129 - DNA, 25 bp, Artificial
  probe
  misc_feature (1)..(25): SEQ ID NO: 1128; WAN024CZV_at; Start 112; Stop 136
gataatatttcttttgatacttcga

SEQ ID NO: 140130 - DNA, 25 bp, Artificial
  probe
  misc_feature (1)..(25): SEQ ID NO: 1128; WAN024CZV_at; Start 36; Stop 60
ttttgctattagttcaaaaggagaa

SEQ ID NO: 140131 - DNA, 25 bp, Artificial
  probe
  misc_feature (1)..(25): SEQ ID NO: 6576; WAN024CZW_at; Start 16; Stop 40
gatgaaaagggtgagatattagtag

SEQ ID NO: 140132 - DNA, 25 bp, Artificial
  probe
  misc_feature (1)..(25): SEQ ID NO: 6576; WAN024CZW_at; Start 48; Stop 72
gccaataacggtggctgttgtgagt

SEQ ID NO: 140133 - DNA, 25 bp, Artificial
  probe
  misc_feature (1)..(25): SEQ ID NO: 6576; WAN024CZW_at; Start 26; Stop 50
gtgagatattagtagatagagcgcc

SEQ ID NO: 140134 - DNA, 25 bp, Artificial
  probe
  misc_feature (1)..(25): SEQ ID NO: 6576; WAN024CZW_at; Start 33; Stop 57
attagtagatagagcgccaataacg

SEQ ID NO: 140135 - DNA, 25 bp, Artificial
  probe
  misc_feature (1)..(25): SEQ ID NO: 6576; WAN024CZW_at; Start 27; Stop 51
tgagatattagtagatagagcgcca

SEQ ID NO: 140136 - DNA, 25 bp, Artificial
  probe
  misc_feature (1)..(25): SEQ ID NO: 6576; WAN024CZW_at; Start 10; Stop 34
ccagctgatgaaaagggtgagatat

SEQ ID NO: 140137 - DNA, 25 bp, Artificial
  probe
  misc_feature (1)..(25): SEQ ID NO: 6576; WAN024CZW_at; Start 8; Stop 32
aaccagctgatgaaaagggtgagat

SEQ ID NO: 140138 - DNA, 25 bp, Artificial
  probe
  misc_feature (1)..(25): SEQ ID NO: 6576; WAN024CZW_at; Start 7; Stop 31
gaaccagctgatgaaaagggtgaga

SEQ ID NO: 140139 - DNA, 25 bp, Artificial
  probe
  misc_feature (1)..(25): SEQ ID NO: 6576; WAN024CZW_at; Start 39; Stop 63
agatagagcgccaataacggtggct

SEQ ID NO: 140140 - DNA, 25 bp, Artificial
  probe
  misc_feature (1)..(25): SEQ ID NO: 6576; WAN024CZW_at; Start 51; Stop 75
aataacggtggctgttgtgagtaag

SEQ ID NO: 140141 - DNA, 25 bp, Artificial
  probe
  misc_feature (1)..(25): SEQ ID NO: 6576; WAN024CZW_at; Start 19; Stop 43
gaaaagggtgagatattagtagata

SEQ ID NO: 140142 - DNA, 25 bp, Artificial
  probe
  misc_feature (1)..(25): SEQ ID NO: 6576; WAN024CZW_at; Start 30; Stop 54
gatattagtagatagagcgccaata

SEQ ID NO: 140143 - DNA, 25 bp, Artificial
  probe
  misc_feature (1)..(25): SEQ ID NO: 6576; WAN024CZW_at; Start 28; Stop 52
gagatattagtagatagagcgccaa

SEQ ID NO: 140144 - DNA, 25 bp, Artificial
  probe
  misc_feature (1)..(25): SEQ ID NO: 6576; WAN024CZW_at; Start 34; Stop 58
ttagtagatagagcgccaataacgg

SEQ ID NO: 140145 - DNA, 25 bp, Artificial
  probe
  misc_feature (1)..(25): SEQ ID NO: 6576; WAN024CZW_at; Start 5; Stop 29
gagaaccagctgatgaaaagggtga

SEQ ID NO: 140146 - DNA, 25 bp, Artificial
  probe
  misc_feature (1)..(25): SEQ ID NO: 6576; WAN024CZW_at; Start 12; Stop 36
agctgatgaaaagggtgagatatta

SEQ ID NO: 140147 - DNA, 25 bp, Artificial
  probe
  misc_feature (1)..(25): SEQ ID NO: 6576; WAN024CZW_at; Start 6; Stop 30
agaaccagctgatgaaaagggtgag

SEQ ID NO: 140148 - DNA, 25 bp, Artificial
  probe
  misc_feature (1)..(25): SEQ ID NO: 6576; WAN024CZW_at; Start 11; Stop 35
cagctgatgaaaagggtgagatatt

SEQ ID NO: 140149 - DNA, 25 bp, Artificial
  probe
  misc_feature (1)..(25): SEQ ID NO: 6576; WAN024CZW_at; Start 18; Stop 42
tgaaaagggtgagatattagtagat

SEQ ID NO: 140150 - DNA, 25 bp, Artificial
  probe
  misc_feature (1)..(25): SEQ ID NO: 6576; WAN024CZW_at; Start 32; Stop 56
tattagtagatagagcgccaataac

SEQ ID NO: 140151 - DNA, 25 bp, Artificial
  probe
  misc_feature (1)..(25): SEQ ID NO: 6576; WAN024CZW_at; Start 42; Stop 66
tagagcgccaataacggtggctgtt

SEQ ID NO: 140152 - DNA, 25 bp, Artificial
  probe
  misc_feature (1)..(25): SEQ ID NO: 6576; WAN024CZW_at; Start 43; Stop 67
agagcgccaataacggtggctgttg

SEQ ID NO: 140153 - DNA, 25 bp, Artificial
  probe
  misc_feature (1)..(25): SEQ ID NO: 6576; WAN024CZW_at; Start 25; Stop 49
ggtgagatattagtagatagagcgc

SEQ ID NO: 140154 - DNA, 25 bp, Artificial
  probe
  misc_feature (1)..(25): SEQ ID NO: 6576; WAN024CZW_at; Start 4; Stop 28
agagaaccagctgatgaaaagggtg

SEQ ID NO: 140155 - DNA, 25 bp, Artificial
  probe
  misc_feature (1)..(25): SEQ ID NO: 6576; WAN024CZW_at; Start 38; Stop 62
tagatagagcgccaataacggtggc

SEQ ID NO: 140156 - DNA, 25 bp, Artificial
  probe
  misc_feature (1)..(25): SEQ ID NO: 6576; WAN024CZW_at; Start 3; Stop 27
gagagaaccagctgatgaaaagggt

SEQ ID NO: 140157 - DNA, 25 bp, Artificial
  probe
  misc_feature (1)..(25): SEQ ID NO: 6576; WAN024CZW_at; Start 46; Stop 70
gcgccaataacggtggctgttgtga

SEQ ID NO: 140158 - DNA, 25 bp, Artificial
  probe
  misc_feature (1)..(25): SEQ ID NO: 6576; WAN024CZW_at; Start 41; Stop 65
atagagcgccaataacggtggctgt

SEQ ID NO: 140159 - DNA, 25 bp, Artificial
  probe
  misc_feature (1)..(25): SEQ ID NO: 6576; WAN024CZW_at; Start 1; Stop 25
atgagagaaccagctgatgaaaagg

SEQ ID NO: 140160 - DNA, 25 bp, Artificial
  probe
  misc_feature (1)..(25): SEQ ID NO: 6576; WAN024CZW_at; Start 40; Stop 64
gatagagcgccaataacggtggctg

SEQ ID NO: 140161 - DNA, 25 bp, Artificial
  probe
  misc_feature (1)..(25): SEQ ID NO: 6576; WAN024CZW_at; Start 50; Stop 74
caataacggtggctgttgtgagtaa

SEQ ID NO: 140162 - DNA, 25 bp, Artificial
  probe
  misc_feature (1)..(25): SEQ ID NO: 6576; WAN024CZW_at; Start 14; Stop 38
ctgatgaaaagggtgagatattagt

SEQ ID NO: 140163 - DNA, 25 bp, Artificial
  probe
  misc_feature (1)..(25): SEQ ID NO: 6576; WAN024CZW_at; Start 47; Stop 71
cgccaataacggtggctgttgtgag

SEQ ID NO: 140164 - DNA, 25 bp, Artificial
  probe
  misc_feature (1)..(25): SEQ ID NO: 6576; WAN024CZW_at; Start 29; Stop 53
agatattagtagatagagcgccaat

SEQ ID NO: 140165 - DNA, 25 bp, Artificial
  probe
  misc_feature (1)..(25): SEQ ID NO: 6669; WAN024CZX_at; Start 481; Stop 505
tatcgtttccaccaactcaatatac

SEQ ID NO: 140166 - DNA, 25 bp, Artificial
  probe
  misc_feature (1)..(25): SEQ ID NO: 6669; WAN024CZX_at; Start 484; Stop 508
cgtttccaccaactcaatatactga

SEQ ID NO: 140167 - DNA, 25 bp, Artificial
  probe
  misc_feature (1)..(25): SEQ ID NO: 6669; WAN024CZX_at; Start 567; Stop 591
agggtttggtgatacagatcccgat

SEQ ID NO: 140168 - DNA, 25 bp, Artificial
  probe
  misc_feature (1)..(25): SEQ ID NO: 6669; WAN024CZX_at; Start 546; Stop 570
tttactttgtgacaaggctgtaggg

SEQ ID NO: 140169 - DNA, 25 bp, Artificial
  probe
  misc_feature (1)..(25): SEQ ID NO: 6669; WAN024CZX_at; Start 565; Stop 589
gtagggtttggtgatacagatcccg

SEQ ID NO: 140170 - DNA, 25 bp, Artificial
  probe
  misc_feature (1)..(25): SEQ ID NO: 6669; WAN024CZX_at; Start 544; Stop 568
tttttactttgtgacaaggctgtag

SEQ ID NO: 140171 - DNA, 25 bp, Artificial
  probe
  misc_feature (1)..(25): SEQ ID NO: 6669; WAN024CZX_at; Start 498; Stop 522
caatatactgacctcttttgaaaaa

SEQ ID NO: 140172 - DNA, 25 bp, Artificial
  probe
  misc_feature (1)..(25): SEQ ID NO: 6669; WAN024CZX_at; Start 483; Stop 507
tcgtttccaccaactcaatatactg

SEQ ID NO: 140173 - DNA, 25 bp, Artificial
  probe
  misc_feature (1)..(25): SEQ ID NO: 6669; WAN024CZX_at; Start 371; Stop 395
ccctctgtcaaaaagtgtacaaaca

SEQ ID NO: 140174 - DNA, 25 bp, Artificial
  probe
  misc_feature (1)..(25): SEQ ID NO: 6669; WAN024CZX_at; Start 516; Stop 540
tgaaaaaatctttaccataaccaca

SEQ ID NO: 140175 - DNA, 25 bp, Artificial
  probe
  misc_feature (1)..(25): SEQ ID NO: 6669; WAN024CZX_at; Start 541; Stop 565
aaatttttactttgtgacaaggctg

SEQ ID NO: 140176 - DNA, 25 bp, Artificial
  probe
  misc_feature (1)..(25): SEQ ID NO: 6669; WAN024CZX_at; Start 487; Stop 511
ttccaccaactcaatatactgacct

SEQ ID NO: 140177 - DNA, 25 bp, Artificial
  probe
  misc_feature (1)..(25): SEQ ID NO: 6669; WAN024CZX_at; Start 475; Stop 499
gtattttatcgtttccaccaactca

SEQ ID NO: 140178 - DNA, 25 bp, Artificial
  probe
  misc_feature (1)..(25): SEQ ID NO: 6669; WAN024CZX_at; Start 449; Stop 473
tgataaccaaaggaataaaatatta

SEQ ID NO: 140179 - DNA, 25 bp, Artificial
  probe
  misc_feature (1)..(25): SEQ ID NO: 6669; WAN024CZX_at; Start 548; Stop 572
tactttgtgacaaggctgtagggtt

SEQ ID NO: 140180 - DNA, 25 bp, Artificial
  probe
  misc_feature (1)..(25): SEQ ID NO: 6669; WAN024CZX_at; Start 549; Stop 573
actttgtgacaaggctgtagggttt

SEQ ID NO: 140181 - DNA, 25 bp, Artificial
  probe
  misc_feature (1)..(25): SEQ ID NO: 6669; WAN024CZX_at; Start 472; Stop 496
tatgtattttatcgtttccaccaac

SEQ ID NO: 140182 - DNA, 25 bp, Artificial
  probe
  misc_feature (1)..(25): SEQ ID NO: 6669; WAN024CZX_at; Start 564; Stop 588
tgtagggtttggtgatacagatccc

SEQ ID NO: 140183 - DNA, 25 bp, Artificial
  probe
  misc_feature (1)..(25): SEQ ID NO: 6669; WAN024CZX_at; Start 365; Stop 389
cgattaccctctgtcaaaaagtgta

SEQ ID NO: 140184 - DNA, 25 bp, Artificial
  probe
  misc_feature (1)..(25): SEQ ID NO: 6669; WAN024CZX_at; Start 493; Stop 517
caactcaatatactgacctcttttg

SEQ ID NO: 140185 - DNA, 25 bp, Artificial
  probe
  misc_feature (1)..(25): SEQ ID NO: 6669; WAN024CZX_at; Start 569; Stop 593
ggtttggtgatacagatcccgattg

SEQ ID NO: 140186 - DNA, 25 bp, Artificial
  probe
  misc_feature (1)..(25): SEQ ID NO: 6669; WAN024CZX_at; Start 501; Stop 525
tatactgacctcttttgaaaaaatc

SEQ ID NO: 140187 - DNA, 25 bp, Artificial
  probe
  misc_feature (1)..(25): SEQ ID NO: 6669; WAN024CZX_at; Start 566; Stop 590
tagggtttggtgatacagatcccga

SEQ ID NO: 140188 - DNA, 25 bp, Artificial
  probe
  misc_feature (1)..(25): SEQ ID NO: 6669; WAN024CZX_at; Start 558; Stop 582
caaggctgtagggtttggtgataca

SEQ ID NO: 140189 - DNA, 25 bp, Artificial
  probe
  misc_feature (1)..(25): SEQ ID NO: 6669; WAN024CZX_at; Start 476; Stop 500
tattttatcgtttccaccaactcaa

SEQ ID NO: 140190 - DNA, 25 bp, Artificial
  probe
  misc_feature (1)..(25): SEQ ID NO: 6669; WAN024CZX_at; Start 366; Stop 390
gattaccctctgtcaaaaagtgtac

SEQ ID NO: 140191 - DNA, 25 bp, Artificial
  probe
  misc_feature (1)..(25): SEQ ID NO: 6669; WAN024CZX_at; Start 570; Stop 594
gtttggtgatacagatcccgattga

SEQ ID NO: 140192 - DNA, 25 bp, Artificial
  probe
  misc_feature (1)..(25): SEQ ID NO: 6669; WAN024CZX_at; Start 454; Stop 478
accaaaggaataaaatattatgtat

SEQ ID NO: 140193 - DNA, 25 bp, Artificial
  probe
  misc_feature (1)..(25): SEQ ID NO: 6669; WAN024CZX_at; Start 490; Stop 514
caccaactcaatatactgacctctt

SEQ ID NO: 140194 - DNA, 25 bp, Artificial
  probe
  misc_feature (1)..(25): SEQ ID NO: 6669; WAN024CZX_at; Start 368; Stop 392
ttaccctctgtcaaaaagtgtacaa

SEQ ID NO: 140195 - DNA, 25 bp, Artificial
  probe
  misc_feature (1)..(25): SEQ ID NO: 6669; WAN024CZX_at; Start 568; Stop 592
gggtttggtgatacagatcccgatt

SEQ ID NO: 140196 - DNA, 25 bp, Artificial
  probe
  misc_feature (1)..(25): SEQ ID NO: 6669; WAN024CZX_at; Start 369; Stop 393
taccctctgtcaaaaagtgtacaaa

SEQ ID NO: 140197 - DNA, 25 bp, Artificial
  probe
  misc_feature (1)..(25): SEQ ID NO: 6669; WAN024CZX_at; Start 485; Stop 509
gtttccaccaactcaatatactgac

SEQ ID NO: 140198 - DNA, 25 bp, Artificial
  probe
  misc_feature (1)..(25): SEQ ID NO: 6669; WAN024CZX_at; Start 469; Stop 493
tattatgtattttatcgtttccacc

SEQ ID NO: 140199 - DNA, 25 bp, Artificial
  probe
  misc_feature (1)..(25): SEQ ID NO: 5179; WAN024CZY_at; Start 30; Stop 54
ggaaaatgagatgcaacaagggaaa

SEQ ID NO: 140200 - DNA, 25 bp, Artificial
  probe
  misc_feature (1)..(25): SEQ ID NO: 5179; WAN024CZY_at; Start 108; Stop 132
ccttgctgaggagtggtggttggtc

SEQ ID NO: 140201 - DNA, 25 bp, Artificial
  probe
  misc_feature (1)..(25): SEQ ID NO: 5179; WAN024CZY_at; Start 22; Stop 46
gatgtttgggaaaatgagatgcaac

SEQ ID NO: 140202 - DNA, 25 bp, Artificial
  probe
  misc_feature (1)..(25): SEQ ID NO: 5179; WAN024CZY_at; Start 59; Stop 83
caaaccaaaaccatgctgctgatca

SEQ ID NO: 140203 - DNA, 25 bp, Artificial
  probe
  misc_feature (1)..(25): SEQ ID NO: 5179; WAN024CZY_at; Start 36; Stop 60
tgagatgcaacaagggaaaaagcca

SEQ ID NO: 140204 - DNA, 25 bp, Artificial
  probe
  misc_feature (1)..(25): SEQ ID NO: 5179; WAN024CZY_at; Start 79; Stop 103
gatcatgagcaaggtggtttgtctt

SEQ ID NO: 140205 - DNA, 25 bp, Artificial
  probe
  misc_feature (1)..(25): SEQ ID NO: 5179; WAN024CZY_at; Start 52; Stop 76
aaaaagccaaaccaaaaccatgctg

SEQ ID NO: 140206 - DNA, 25 bp, Artificial
  probe
  misc_feature (1)..(25): SEQ ID NO: 5179; WAN024CZY_at; Start 20; Stop 44
gcgatgtttgggaaaatgagatgca

SEQ ID NO: 140207 - DNA, 25 bp, Artificial
  probe
  misc_feature (1)..(25): SEQ ID NO: 5179; WAN024CZY_at; Start 7; Stop 31
agtagctatccaggcgatgtttggg

SEQ ID NO: 140208 - DNA, 25 bp, Artificial
  probe
  misc_feature (1)..(25): SEQ ID NO: 5179; WAN024CZY_at; Start 34; Stop 58
aatgagatgcaacaagggaaaaagc

SEQ ID NO: 140209 - DNA, 25 bp, Artificial
  probe
  misc_feature (1)..(25): SEQ ID NO: 5179; WAN024CZY_at; Start 64; Stop 88
caaaaccatgctgctgatcatgagc

SEQ ID NO: 140210 - DNA, 25 bp, Artificial
  probe
  misc_feature (1)..(25): SEQ ID NO: 5179; WAN024CZY_at; Start 74; Stop 98
ctgctgatcatgagcaaggtggttt

SEQ ID NO: 140211 - DNA, 25 bp, Artificial
  probe
  misc_feature (1)..(25): SEQ ID NO: 5179; WAN024CZY_at; Start 77; Stop 101
ctgatcatgagcaaggtggtttgtc

SEQ ID NO: 140212 - DNA, 25 bp, Artificial
  probe
  misc_feature (1)..(25): SEQ ID NO: 5179; WAN024CZY_at; Start 1; Stop 25
ttgataagtagctatccaggcgatg

SEQ ID NO: 140213 - DNA, 25 bp, Artificial
  probe
  misc_feature (1)..(25): SEQ ID NO: 5179; WAN024CZY_at; Start 85; Stop 109
gagcaaggtggtttgtctttgaacc

SEQ ID NO: 140214 - DNA, 25 bp, Artificial
  probe
  misc_feature (1)..(25): SEQ ID NO: 5179; WAN024CZY_at; Start 39; Stop 63
gatgcaacaagggaaaaagccaaac

SEQ ID NO: 140215 - DNA, 25 bp, Artificial
  probe
  misc_feature (1)..(25): SEQ ID NO: 5179; WAN024CZY_at; Start 26; Stop 50
tttgggaaaatgagatgcaacaagg

SEQ ID NO: 140216 - DNA, 25 bp, Artificial
  probe
  misc_feature (1)..(25): SEQ ID NO: 5179; WAN024CZY_at; Start 28; Stop 52
tgggaaaatgagatgcaacaaggga

SEQ ID NO: 140217 - DNA, 25 bp, Artificial
  probe
  misc_feature (1)..(25): SEQ ID NO: 5179; WAN024CZY_at; Start 94; Stop 118
ggtttgtctttgaaccttgctgagg

SEQ ID NO: 140218 - DNA, 25 bp, Artificial
  probe
  misc_feature (1)..(25): SEQ ID NO: 5179; WAN024CZY_at; Start 69; Stop 93
ccatgctgctgatcatgagcaaggt

SEQ ID NO: 140219 - DNA, 25 bp, Artificial
  probe
  misc_feature (1)..(25): SEQ ID NO: 5179; WAN024CZY_at; Start 66; Stop 90
aaaccatgctgctgatcatgagcaa

SEQ ID NO: 140220 - DNA, 25 bp, Artificial
  probe
  misc_feature (1)..(25): SEQ ID NO: 5179; WAN024CZY_at; Start 41; Stop 65
tgcaacaagggaaaaagccaaacca

SEQ ID NO: 140221 - DNA, 25 bp, Artificial
  probe
  misc_feature (1)..(25): SEQ ID NO: 5179; WAN024CZY_at; Start 100; Stop 124
tctttgaaccttgctgaggagtggt

SEQ ID NO: 140222 - DNA, 25 bp, Artificial
  probe
  misc_feature (1)..(25): SEQ ID NO: 5179; WAN024CZY_at; Start 11; Stop 35
gctatccaggcgatgtttgggaaaa

SEQ ID NO: 140223 - DNA, 25 bp, Artificial
  probe
  misc_feature (1)..(25): SEQ ID NO: 5179; WAN024CZY_at; Start 3; Stop 27
gataagtagctatccaggcgatgtt

SEQ ID NO: 140224 - DNA, 25 bp, Artificial
  probe
  misc_feature (1)..(25): SEQ ID NO: 5179; WAN024CZY_at; Start 16; Stop 40
ccaggcgatgtttgggaaaatgaga

SEQ ID NO: 140225 - DNA, 25 bp, Artificial
  probe
  misc_feature (1)..(25): SEQ ID NO: 5179; WAN024CZY_at; Start 72; Stop 96
tgctgctgatcatgagcaaggtggt

SEQ ID NO: 140226 - DNA, 25 bp, Artificial
  probe
  misc_feature (1)..(25): SEQ ID NO: 5179; WAN024CZY_at; Start 13; Stop 37
tatccaggcgatgtttgggaaaatg

SEQ ID NO: 140227 - DNA, 25 bp, Artificial
  probe
  misc_feature (1)..(25): SEQ ID NO: 5179; WAN024CZY_at; Start 120; Stop 144
gtggtggttggtcaatagtcaagga

SEQ ID NO: 140228 - DNA, 25 bp, Artificial
  probe
  misc_feature (1)..(25): SEQ ID NO: 5179; WAN024CZY_at; Start 98; Stop 122
tgtctttgaaccttgctgaggagtg

SEQ ID NO: 140229 - DNA, 25 bp, Artificial
  probe
  misc_feature (1)..(25): SEQ ID NO: 5179; WAN024CZY_at; Start 5; Stop 29
taagtagctatccaggcgatgtttg

SEQ ID NO: 140230 - DNA, 25 bp, Artificial
  probe
  misc_feature (1)..(25): SEQ ID NO: 5179; WAN024CZY_at; Start 57; Stop 81
gccaaaccaaaaccatgctgctgat

SEQ ID NO: 140231 - DNA, 25 bp, Artificial
  probe
  misc_feature (1)..(25): SEQ ID NO: 5179; WAN024CZY_at; Start 96; Stop 120
tttgtctttgaaccttgctgaggag

SEQ ID NO: 140232 - DNA, 25 bp, Artificial
  probe
  misc_feature (1)..(25): SEQ ID NO: 5179; WAN024CZY_at; Start 82; Stop 106
catgagcaaggtggtttgtctttga

SEQ ID NO: 140233 - DNA, 25 bp, Artificial
  probe
  misc_feature (1)..(25): SEQ ID NO: 1818; WAN024CZZ_at; Start 781; Stop 805
ggctttgtctcaatactcatggtct

SEQ ID NO: 140234 - DNA, 25 bp, Artificial
  probe
  misc_feature (1)..(25): SEQ ID NO: 1818; WAN024CZZ_at; Start 1008; Stop 1032
gatgtcactctttagttccacccta

SEQ ID NO: 140235 - DNA, 25 bp, Artificial
  probe
  misc_feature (1)..(25): SEQ ID NO: 1818; WAN024CZZ_at; Start 1059; Stop 1083
catcattgctatcatcagtgctcaa

SEQ ID NO: 140236 - DNA, 25 bp, Artificial
  probe
  misc_feature (1)..(25): SEQ ID NO: 1818; WAN024CZZ_at; Start 960; Stop 984
cattcctcatttctggttacctctg

SEQ ID NO: 140237 - DNA, 25 bp, Artificial
  probe
  misc_feature (1)..(25): SEQ ID NO: 1818; WAN024CZZ_at; Start 978; Stop 1002
acctctgttcttttgtgtgatagcc

SEQ ID NO: 140238 - DNA, 25 bp, Artificial
  probe
  misc_feature (1)..(25): SEQ ID NO: 1818; WAN024CZZ_at; Start 794; Stop 818
tactcatggtctgcctcgccttaag

SEQ ID NO: 140239 - DNA, 25 bp, Artificial
  probe
  misc_feature (1)..(25): SEQ ID NO: 1818; WAN024CZZ_at; Start 444; Stop 468
taatttgataaccagtagctcaggc

SEQ ID NO: 140240 - DNA, 25 bp, Artificial
  probe
  misc_feature (1)..(25): SEQ ID NO: 1818; WAN024CZZ_at; Start 647; Stop 671
tcctcagcaaggttcaaagacaaac

SEQ ID NO: 140241 - DNA, 25 bp, Artificial
  probe
  misc_feature (1)..(25): SEQ ID NO: 1818; WAN024CZZ_at; Start 821; Stop 845
tcaaattagggaagcaagaagccat

SEQ ID NO: 140242 - DNA, 25 bp, Artificial
  probe
  misc_feature (1)..(25): SEQ ID NO: 1818; WAN024CZZ_at; Start 1225; Stop 1249
aagcaaattattctgggtgtcccca

SEQ ID NO: 140243 - DNA, 25 bp, Artificial
  probe
  misc_feature (1)..(25): SEQ ID NO: 1818; WAN024CZZ_at; Start 1281; Stop 1305
gattctcatccttctagcttcctta

SEQ ID NO: 140244 - DNA, 25 bp, Artificial
  probe
  misc_feature (1)..(25): SEQ ID NO: 1818; WAN024CZZ_at; Start 665; Stop 689
gacaaaccaccttgctcatgatcag

SEQ ID NO: 140245 - DNA, 25 bp, Artificial
  probe
  misc_feature (1)..(25): SEQ ID NO: 1818; WAN024CZZ_at; Start 1239; Stop 1263
gggtgtccccatcagcttaagtttg

SEQ ID NO: 140246 - DNA, 25 bp, Artificial
  probe
  misc_feature (1)..(25): SEQ ID NO: 1818; WAN024CZZ_at; Start 1121; Stop 1145
ccgttattggcgctctatctactaa

SEQ ID NO: 140247 - DNA, 25 bp, Artificial
  probe
  misc_feature (1)..(25): SEQ ID NO: 1818; WAN024CZZ_at; Start 1031; Stop 1055
tatccgttgtagctccagccctctt

SEQ ID NO: 140248 - DNA, 25 bp, Artificial
  probe
  misc_feature (1)..(25): SEQ ID NO: 1818; WAN024CZZ_at; Start 731; Stop 755
ttttcccaaacatcgcctggatagc

SEQ ID NO: 140249 - DNA, 25 bp, Artificial
  probe
  misc_feature (1)..(25): SEQ ID NO: 1818; WAN024CZZ_at; Start 910; Stop 934
gcggtcaagtcaggtttagtcacac

SEQ ID NO: 140250 - DNA, 25 bp, Artificial
  probe
  misc_feature (1)..(25): SEQ ID NO: 1818; WAN024CZZ_at; Start 881; Stop 905
tctgcggcatgagcttactaatgtc

SEQ ID NO: 140251 - DNA, 25 bp, Artificial
  probe
  misc_feature (1)..(25): SEQ ID NO: 1818; WAN024CZZ_at; Start 1159; Stop 1183
tcatcagctggttctctcattcaac

SEQ ID NO: 140252 - DNA, 25 bp, Artificial
  probe
  misc_feature (1)..(25): SEQ ID NO: 1818; WAN024CZZ_at; Start 600; Stop 624
tagtaagggaagaacaaactcatcc

SEQ ID NO: 140253 - DNA, 25 bp, Artificial
  probe
  misc_feature (1)..(25): SEQ ID NO: 1818; WAN024CZZ_at; Start 459; Stop 483
tagctcaggcattgtctttcaaggc

SEQ ID NO: 140254 - DNA, 25 bp, Artificial
  probe
  misc_feature (1)..(25): SEQ ID NO: 1818; WAN024CZZ_at; Start 809; Stop 833
tcgccttaaggctcaaattagggaa

SEQ ID NO: 140255 - DNA, 25 bp, Artificial
  probe
  misc_feature (1)..(25): SEQ ID NO: 1818; WAN024CZZ_at; Start 1096; Stop 1120
gatattcacttactcacaacagcca

SEQ ID NO: 140256 - DNA, 25 bp, Artificial
  probe
  misc_feature (1)..(25): SEQ ID NO: 1818; WAN024CZZ_at; Start 526; Stop 550
ggcaatcatatctttatcgtcagca

SEQ ID NO: 140257 - DNA, 25 bp, Artificial
  probe
  misc_feature (1)..(25): SEQ ID NO: 1818; WAN024CZZ_at; Start 865; Stop 889
gctacaattatcatgctctgcggca

SEQ ID NO: 140258 - DNA, 25 bp, Artificial
  probe
  misc_feature (1)..(25): SEQ ID NO: 1818; WAN024CZZ_at; Start 478; Stop 502
caaggcctgtttaagcaaatgggat

SEQ ID NO: 140259 - DNA, 25 bp, Artificial
  probe
  misc_feature (1)..(25): SEQ ID NO: 1818; WAN024CZZ_at; Start 1144; Stop 1168
aatatctcacccttttcatcagctg

SEQ ID NO: 140260 - DNA, 25 bp, Artificial
  probe
  misc_feature (1)..(25): SEQ ID NO: 1818; WAN024CZZ_at; Start 993; Stop 1017
tgtgatagccggagtgatgtcactc

SEQ ID NO: 140261 - DNA, 25 bp, Artificial
  probe
  misc_feature (1)..(25): SEQ ID NO: 1818; WAN024CZZ_at; Start 896; Stop 920
tactaatgtctctagcggtcaagtc

SEQ ID NO: 140262 - DNA, 25 bp, Artificial
  probe
  misc_feature (1)..(25): SEQ ID NO: 1818; WAN024CZZ_at; Start 1184; Stop 1208
tctcacttcccaatatagaggaacg

SEQ ID NO: 140263 - DNA, 25 bp, Artificial
  probe
  misc_feature (1)..(25): SEQ ID NO: 1818; WAN024CZZ_at; Start 684; Stop 708
gatcagcagcatggttttggtttgg

SEQ ID NO: 140264 - DNA, 25 bp, Artificial
  probe
  misc_feature (1)..(25): SEQ ID NO: 1818; WAN024CZZ_at; Start 508; Stop 532
gagcaagctttttcacttggcaatc

SEQ ID NO: 140265 - DNA, 25 bp, Artificial
  probe
  misc_feature (1)..(25): SEQ ID NO: 1818; WAN024CZZ_at; Start 619; Stop 643
tcatccttgactattgaccaaccac

SEQ ID NO: 140266 - DNA, 25 bp, Artificial
  probe
  misc_feature (1)..(25): SEQ ID NO: 1818; WAN024CZZ_at; Start 926; Stop 950
tagtcacactgatagggcacctcat

SEQ ID NO: 140267 - DNA, 25 bp, Artificial
  probe
  misc_feature (1)..(25): SEQ ID NO: 2421; WAN024D22_at; Start 14; Stop 38
aagcaagcctagcttgtgcggtttg

SEQ ID NO: 140268 - DNA, 25 bp, Artificial
  probe
  misc_feature (1)..(25): SEQ ID NO: 2421; WAN024D22_at; Start 10; Stop 34
aaaaaagcaagcctagcttgtgcgg

SEQ ID NO: 140269 - DNA, 25 bp, Artificial
  probe
  misc_feature (1)..(25): SEQ ID NO: 2421; WAN024D22_at; Start 125; Stop 149
agtacactacacacagagaaacgag

SEQ ID NO: 140270 - DNA, 25 bp, Artificial
  probe
  misc_feature (1)..(25): SEQ ID NO: 2421; WAN024D22_at; Start 86; Stop 110
cacgactagaagtaaataaattttg

SEQ ID NO: 140271 - DNA, 25 bp, Artificial
  probe
  misc_feature (1)..(25): SEQ ID NO: 2421; WAN024D22_at; Start 17; Stop 41
caagcctagcttgtgcggtttgtgg

SEQ ID NO: 140272 - DNA, 25 bp, Artificial
  probe
  misc_feature (1)..(25): SEQ ID NO: 2421; WAN024D22_at; Start 37; Stop 61
tgtggttcgagaaactattcaatca

SEQ ID NO: 140273 - DNA, 25 bp, Artificial
  probe
  misc_feature (1)..(25): SEQ ID NO: 2421; WAN024D22_at; Start 28; Stop 52
tgtgcggtttgtggttcgagaaact

SEQ ID NO: 140274 - DNA, 25 bp, Artificial
  probe
  misc_feature (1)..(25): SEQ ID NO: 2421; WAN024D22_at; Start 107; Stop 131
tttgtaagcattgtggcaagtacac

SEQ ID NO: 140275 - DNA, 25 bp, Artificial
  probe
  misc_feature (1)..(25): SEQ ID NO: 2421; WAN024D22_at; Start 26; Stop 50
cttgtgcggtttgtggttcgagaaa

SEQ ID NO: 140276 - DNA, 25 bp, Artificial
  probe
  misc_feature (1)..(25): SEQ ID NO: 2421; WAN024D22_at; Start 49; Stop 73
aactattcaatcaagatcagcggaa

SEQ ID NO: 140277 - DNA, 25 bp, Artificial
  probe
  misc_feature (1)..(25): SEQ ID NO: 2421; WAN024D22_at; Start 40; Stop 64
ggttcgagaaactattcaatcaaga

SEQ ID NO: 140278 - DNA, 25 bp, Artificial
  probe
  misc_feature (1)..(25): SEQ ID NO: 2421; WAN024D22_at; Start 120; Stop 144
tggcaagtacactacacacagagaa

SEQ ID NO: 140279 - DNA, 25 bp, Artificial
  probe
  misc_feature (1)..(25): SEQ ID NO: 2421; WAN024D22_at; Start 81; Stop 105
gcctacacgactagaagtaaataaa

SEQ ID NO: 140280 - DNA, 25 bp, Artificial
  probe
  misc_feature (1)..(25): SEQ ID NO: 2421; WAN024D22_at; Start 118; Stop 142
tgtggcaagtacactacacacagag

SEQ ID NO: 140281 - DNA, 25 bp, Artificial
  probe
  misc_feature (1)..(25): SEQ ID NO: 2421; WAN024D22_at; Start 2; Stop 26
tggcactaaaaaaagcaagcctagc

SEQ ID NO: 140282 - DNA, 25 bp, Artificial
  probe
  misc_feature (1)..(25): SEQ ID NO: 2421; WAN024D22_at; Start 12; Stop 36
aaaagcaagcctagcttgtgcggtt

SEQ ID NO: 140283 - DNA, 25 bp, Artificial
  probe
  misc_feature (1)..(25): SEQ ID NO: 2421; WAN024D22_at; Start 123; Stop 147
caagtacactacacacagagaaacg

SEQ ID NO: 140284 - DNA, 25 bp, Artificial
  probe
  misc_feature (1)..(25): SEQ ID NO: 2421; WAN024D22_at; Start 102; Stop 126
taaattttgtaagcattgtggcaag

SEQ ID NO: 140285 - DNA, 25 bp, Artificial
  probe
  misc_feature (1)..(25): SEQ ID NO: 2421; WAN024D22_at; Start 78; Stop 102
caagcctacacgactagaagtaaat

SEQ ID NO: 140286 - DNA, 25 bp, Artificial
  probe
  misc_feature (1)..(25): SEQ ID NO: 2421; WAN024D22_at; Start 121; Stop 145
ggcaagtacactacacacagagaaa

SEQ ID NO: 140287 - DNA, 25 bp, Artificial
  probe
  misc_feature (1)..(25): SEQ ID NO: 2421; WAN024D22_at; Start 22; Stop 46
ctagcttgtgcggtttgtggttcga

SEQ ID NO: 140288 - DNA, 25 bp, Artificial
  probe
  misc_feature (1)..(25): SEQ ID NO: 2421; WAN024D22_at; Start 33; Stop 57
ggtttgtggttcgagaaactattca

SEQ ID NO: 140289 - DNA, 25 bp, Artificial
  probe
  misc_feature (1)..(25): SEQ ID NO: 2421; WAN024D22_at; Start 113; Stop 137
agcattgtggcaagtacactacaca

SEQ ID NO: 140290 - DNA, 25 bp, Artificial
  probe
  misc_feature (1)..(25): SEQ ID NO: 2421; WAN024D22_at; Start 109; Stop 133
tgtaagcattgtggcaagtacacta

SEQ ID NO: 140291 - DNA, 25 bp, Artificial
  probe
  misc_feature (1)..(25): SEQ ID NO: 2421; WAN024D22_at; Start 52; Stop 76
tattcaatcaagatcagcggaaacc

SEQ ID NO: 140292 - DNA, 25 bp, Artificial
  probe
  misc_feature (1)..(25): SEQ ID NO: 2421; WAN024D22_at; Start 99; Stop 123
aaataaattttgtaagcattgtggc

SEQ ID NO: 140293 - DNA, 25 bp, Artificial
  probe
  misc_feature (1)..(25): SEQ ID NO: 2421; WAN024D22_at; Start 111; Stop 135
taagcattgtggcaagtacactaca

SEQ ID NO: 140294 - DNA, 25 bp, Artificial
  probe
  misc_feature (1)..(25): SEQ ID NO: 2421; WAN024D22_at; Start 127; Stop 151
tacactacacacagagaaacgagat

SEQ ID NO: 140295 - DNA, 25 bp, Artificial
  probe
  misc_feature (1)..(25): SEQ ID NO: 2421; WAN024D22_at; Start 129; Stop 153
cactacacacagagaaacgagatag

SEQ ID NO: 140296 - DNA, 25 bp, Artificial
  probe
  misc_feature (1)..(25): SEQ ID NO: 2421; WAN024D22_at; Start 18; Stop 42
aagcctagcttgtgcggtttgtggt

SEQ ID NO: 140297 - DNA, 25 bp, Artificial
  probe
  misc_feature (1)..(25): SEQ ID NO: 2421; WAN024D22_at; Start 30; Stop 54
tgcggtttgtggttcgagaaactat

SEQ ID NO: 140298 - DNA, 25 bp, Artificial
  probe
  misc_feature (1)..(25): SEQ ID NO: 2421; WAN024D22_at; Start 45; Stop 69
gagaaactattcaatcaagatcagc

SEQ ID NO: 140299 - DNA, 25 bp, Artificial
  probe
  misc_feature (1)..(25): SEQ ID NO: 2421; WAN024D22_at; Start 115; Stop 139
cattgtggcaagtacactacacaca

SEQ ID NO: 140300 - DNA, 25 bp, Artificial
  probe
  misc_feature (1)..(25): SEQ ID NO: 2421; WAN024D22_at; Start 47; Stop 71
gaaactattcaatcaagatcagcgg

SEQ ID NO: 140301 - DNA, 25 bp, Artificial
  probe
  misc_feature (1)..(25): SEQ ID NO: 2055; WAN024D23_at; Start 18; Stop 42
tatttttagacttcttaaagacaca

SEQ ID NO: 140302 - DNA, 25 bp, Artificial
  probe
  misc_feature (1)..(25): SEQ ID NO: 2055; WAN024D23_at; Start 82; Stop 106
tctatcatggaatacacagctttct

SEQ ID NO: 140303 - DNA, 25 bp, Artificial
  probe
  misc_feature (1)..(25): SEQ ID NO: 2055; WAN024D23_at; Start 47; Stop 71
ggccaactcgcaaggaaagctggag

SEQ ID NO: 140304 - DNA, 25 bp, Artificial
  probe
  misc_feature (1)..(25): SEQ ID NO: 2055; WAN024D23_at; Start 46; Stop 70
tggccaactcgcaaggaaagctgga

SEQ ID NO: 140305 - DNA, 25 bp, Artificial
  probe
  misc_feature (1)..(25): SEQ ID NO: 2055; WAN024D23_at; Start 49; Stop 73
ccaactcgcaaggaaagctggagag

SEQ ID NO: 140306 - DNA, 25 bp, Artificial
  probe
  misc_feature (1)..(25): SEQ ID NO: 2055; WAN024D23_at; Start 48; Stop 72
gccaactcgcaaggaaagctggaga

SEQ ID NO: 140307 - DNA, 25 bp, Artificial
  probe
  misc_feature (1)..(25): SEQ ID NO: 2055; WAN024D23_at; Start 64; Stop 88
agctggagagattttcgttctatca

SEQ ID NO: 140308 - DNA, 25 bp, Artificial
  probe
  misc_feature (1)..(25): SEQ ID NO: 2055; WAN024D23_at; Start 138; Stop 162
gattgtttcaggtttgattcgattt

SEQ ID NO: 140309 - DNA, 25 bp, Artificial
  probe
  misc_feature (1)..(25): SEQ ID NO: 2055; WAN024D23_at; Start 87; Stop 111
catggaatacacagctttctttgta

SEQ ID NO: 140310 - DNA, 25 bp, Artificial
  probe
  misc_feature (1)..(25): SEQ ID NO: 2055; WAN024D23_at; Start 73; Stop 97
gattttcgttctatcatggaataca

SEQ ID NO: 140311 - DNA, 25 bp, Artificial
  probe
  misc_feature (1)..(25): SEQ ID NO: 2055; WAN024D23_at; Start 59; Stop 83
aggaaagctggagagattttcgttc

SEQ ID NO: 140312 - DNA, 25 bp, Artificial
  probe
  misc_feature (1)..(25): SEQ ID NO: 2055; WAN024D23_at; Start 53; Stop 77
ctcgcaaggaaagctggagagattt

SEQ ID NO: 140313 - DNA, 25 bp, Artificial
  probe
  misc_feature (1)..(25): SEQ ID NO: 2055; WAN024D23_at; Start 91; Stop 115
gaatacacagctttctttgtagtaa

SEQ ID NO: 140314 - DNA, 25 bp, Artificial
  probe
  misc_feature (1)..(25): SEQ ID NO: 2055; WAN024D23_at; Start 96; Stop 120
cacagctttctttgtagtaattatt

SEQ ID NO: 140315 - DNA, 25 bp, Artificial
  probe
  misc_feature (1)..(25): SEQ ID NO: 2055; WAN024D23_at; Start 76; Stop 100
tttcgttctatcatggaatacacag

SEQ ID NO: 140316 - DNA, 25 bp, Artificial
  probe
  misc_feature (1)..(25): SEQ ID NO: 2055; WAN024D23_at; Start 54; Stop 78
tcgcaaggaaagctggagagatttt

SEQ ID NO: 140317 - DNA, 25 bp, Artificial
  probe
  misc_feature (1)..(25): SEQ ID NO: 2055; WAN024D23_at; Start 145; Stop 169
tcaggtttgattcgatttattaaca

SEQ ID NO: 140318 - DNA, 25 bp, Artificial
  probe
  misc_feature (1)..(25): SEQ ID NO: 2055; WAN024D23_at; Start 50; Stop 74
caactcgcaaggaaagctggagaga

SEQ ID NO: 140319 - DNA, 25 bp, Artificial
  probe
  misc_feature (1)..(25): SEQ ID NO: 2055; WAN024D23_at; Start 84; Stop 108
tatcatggaatacacagctttcttt

SEQ ID NO: 140320 - DNA, 25 bp, Artificial
  probe
  misc_feature (1)..(25): SEQ ID NO: 2055; WAN024D23_at; Start 78; Stop 102
tcgttctatcatggaatacacagct

SEQ ID NO: 140321 - DNA, 25 bp, Artificial
  probe
  misc_feature (1)..(25): SEQ ID NO: 2055; WAN024D23_at; Start 61; Stop 85
gaaagctggagagattttcgttcta

SEQ ID NO: 140322 - DNA, 25 bp, Artificial
  probe
  misc_feature (1)..(25): SEQ ID NO: 2055; WAN024D23_at; Start 126; Stop 150
ttttgaccagttgattgtttcaggt

SEQ ID NO: 140323 - DNA, 25 bp, Artificial
  probe
  misc_feature (1)..(25): SEQ ID NO: 2055; WAN024D23_at; Start 79; Stop 103
cgttctatcatggaatacacagctt

SEQ ID NO: 140324 - DNA, 25 bp, Artificial
  probe
  misc_feature (1)..(25): SEQ ID NO: 2055; WAN024D23_at; Start 8; Stop 32
ttattggagatatttttagacttct

SEQ ID NO: 140325 - DNA, 25 bp, Artificial
  probe
  misc_feature (1)..(25): SEQ ID NO: 2055; WAN024D23_at; Start 123; Stop 147
catttttgaccagttgattgtttca

SEQ ID NO: 140326 - DNA, 25 bp, Artificial
  probe
  misc_feature (1)..(25): SEQ ID NO: 2055; WAN024D23_at; Start 111; Stop 135
agtaattatttacatttttgaccag

SEQ ID NO: 140327 - DNA, 25 bp, Artificial
  probe
  misc_feature (1)..(25): SEQ ID NO: 2055; WAN024D23_at; Start 71; Stop 95
gagattttcgttctatcatggaata

SEQ ID NO: 140328 - DNA, 25 bp, Artificial
  probe
  misc_feature (1)..(25): SEQ ID NO: 2055; WAN024D23_at; Start 69; Stop 93
gagagattttcgttctatcatggaa

SEQ ID NO: 140329 - DNA, 25 bp, Artificial
  probe
  misc_feature (1)..(25): SEQ ID NO: 2055; WAN024D23_at; Start 51; Stop 75
aactcgcaaggaaagctggagagat

SEQ ID NO: 140330 - DNA, 25 bp, Artificial
  probe
  misc_feature (1)..(25): SEQ ID NO: 2055; WAN024D23_at; Start 117; Stop 141
tatttacatttttgaccagttgatt

SEQ ID NO: 140331 - DNA, 25 bp, Artificial
  probe
  misc_feature (1)..(25): SEQ ID NO: 2055; WAN024D23_at; Start 90; Stop 114
ggaatacacagctttctttgtagta

SEQ ID NO: 140332 - DNA, 25 bp, Artificial
  probe
  misc_feature (1)..(25): SEQ ID NO: 2055; WAN024D23_at; Start 55; Stop 79
cgcaaggaaagctggagagattttc

SEQ ID NO: 140333 - DNA, 25 bp, Artificial
  probe
  misc_feature (1)..(25): SEQ ID NO: 2055; WAN024D23_at; Start 57; Stop 81
caaggaaagctggagagattttcgt

SEQ ID NO: 140334 - DNA, 25 bp, Artificial
  probe
  misc_feature (1)..(25): SEQ ID NO: 2055; WAN024D23_at; Start 68; Stop 92
ggagagattttcgttctatcatgga

SEQ ID NO: 140335 - DNA, 25 bp, Artificial
  probe
  misc_feature (1)..(25): SEQ ID NO: 2594; WAN024D24_at; Start 10; Stop 34
gaagagatgagaaataaaatgatta

SEQ ID NO: 140336 - DNA, 25 bp, Artificial
  probe
  misc_feature (1)..(25): SEQ ID NO: 2594; WAN024D24_at; Start 42; Stop 66
gagtttagtagtagcaggagttatg

SEQ ID NO: 140337 - DNA, 25 bp, Artificial
  probe
  misc_feature (1)..(25): SEQ ID NO: 2594; WAN024D24_at; Start 60; Stop 84
agttatgacctatctcatgttttcg

SEQ ID NO: 140338 - DNA, 25 bp, Artificial
  probe
  misc_feature (1)..(25): SEQ ID NO: 2594; WAN024D24_at; Start 58; Stop 82
ggagttatgacctatctcatgtttt

SEQ ID NO: 140339 - DNA, 25 bp, Artificial
  probe
  misc_feature (1)..(25): SEQ ID NO: 2594; WAN024D24_at; Start 66; Stop 90
gacctatctcatgttttcgggattg

SEQ ID NO: 140340 - DNA, 25 bp, Artificial
  probe
  misc_feature (1)..(25): SEQ ID NO: 2594; WAN024D24_at; Start 69; Stop 93
ctatctcatgttttcgggattggat

SEQ ID NO: 140341 - DNA, 25 bp, Artificial
  probe
  misc_feature (1)..(25): SEQ ID NO: 2594; WAN024D24_at; Start 35; Stop 59
ttgcaatgagtttagtagtagcagg

SEQ ID NO: 140342 - DNA, 25 bp, Artificial
  probe
  misc_feature (1)..(25): SEQ ID NO: 2594; WAN024D24_at; Start 70; Stop 94
tatctcatgttttcgggattggatg

SEQ ID NO: 140343 - DNA, 25 bp, Artificial
  probe
  misc_feature (1)..(25): SEQ ID NO: 2594; WAN024D24_at; Start 153; Stop 177
tgttagagaaggtttgaaattagtc

SEQ ID NO: 140344 - DNA, 25 bp, Artificial
  probe
  misc_feature (1)..(25): SEQ ID NO: 2594; WAN024D24_at; Start 65; Stop 89
tgacctatctcatgttttcgggatt

SEQ ID NO: 140345 - DNA, 25 bp, Artificial
  probe
  misc_feature (1)..(25): SEQ ID NO: 2594; WAN024D24_at; Start 5; Stop 29
gggaagaagagatgagaaataaaat

SEQ ID NO: 140346 - DNA, 25 bp, Artificial
  probe
  misc_feature (1)..(25): SEQ ID NO: 2594; WAN024D24_at; Start 56; Stop 80
caggagttatgacctatctcatgtt

SEQ ID NO: 140347 - DNA, 25 bp, Artificial
  probe
  misc_feature (1)..(25): SEQ ID NO: 2594; WAN024D24_at; Start 30; Stop 54
gattattgcaatgagtttagtagta

SEQ ID NO: 140348 - DNA, 25 bp, Artificial
  probe
  misc_feature (1)..(25): SEQ ID NO: 2594; WAN024D24_at; Start 148; Stop 172
tggcttgttagagaaggtttgaaat

SEQ ID NO: 140349 - DNA, 25 bp, Artificial
  probe
  misc_feature (1)..(25): SEQ ID NO: 2594; WAN024D24_at; Start 143; Stop 167
tgtcttggcttgttagagaaggttt

SEQ ID NO: 140350 - DNA, 25 bp, Artificial
  probe
  misc_feature (1)..(25): SEQ ID NO: 2594; WAN024D24_at; Start 38; Stop 62
caatgagtttagtagtagcaggagt

SEQ ID NO: 140351 - DNA, 25 bp, Artificial
  probe
  misc_feature (1)..(25): SEQ ID NO: 2594; WAN024D24_at; Start 145; Stop 169
tcttggcttgttagagaaggtttga

SEQ ID NO: 140352 - DNA, 25 bp, Artificial
  probe
  misc_feature (1)..(25): SEQ ID NO: 2594; WAN024D24_at; Start 67; Stop 91
acctatctcatgttttcgggattgg

SEQ ID NO: 140353 - DNA, 25 bp, Artificial
  probe
  misc_feature (1)..(25): SEQ ID NO: 2594; WAN024D24_at; Start 62; Stop 86
ttatgacctatctcatgttttcggg

SEQ ID NO: 140354 - DNA, 25 bp, Artificial
  probe
  misc_feature (1)..(25): SEQ ID NO: 2594; WAN024D24_at; Start 63; Stop 87
tatgacctatctcatgttttcggga

SEQ ID NO: 140355 - DNA, 25 bp, Artificial
  probe
  misc_feature (1)..(25): SEQ ID NO: 2594; WAN024D24_at; Start 68; Stop 92
cctatctcatgttttcgggattgga

SEQ ID NO: 140356 - DNA, 25 bp, Artificial
  probe
  misc_feature (1)..(25): SEQ ID NO: 2594; WAN024D24_at; Start 33; Stop 57
tattgcaatgagtttagtagtagca

SEQ ID NO: 140357 - DNA, 25 bp, Artificial
  probe
  misc_feature (1)..(25): SEQ ID NO: 2594; WAN024D24_at; Start 55; Stop 79
gcaggagttatgacctatctcatgt

SEQ ID NO: 140358 - DNA, 25 bp, Artificial
  probe
  misc_feature (1)..(25): SEQ ID NO: 2594; WAN024D24_at; Start 44; Stop 68
gtttagtagtagcaggagttatgac

SEQ ID NO: 140359 - DNA, 25 bp, Artificial
  probe
  misc_feature (1)..(25): SEQ ID NO: 2594; WAN024D24_at; Start 41; Stop 65
tgagtttagtagtagcaggagttat

SEQ ID NO: 140360 - DNA, 25 bp, Artificial
  probe
  misc_feature (1)..(25): SEQ ID NO: 2594; WAN024D24_at; Start 7; Stop 31
gaagaagagatgagaaataaaatga

SEQ ID NO: 140361 - DNA, 25 bp, Artificial
  probe
  misc_feature (1)..(25): SEQ ID NO: 2594; WAN024D24_at; Start 20; Stop 44
gaaataaaatgattattgcaatgag

SEQ ID NO: 140362 - DNA, 25 bp, Artificial
  probe
  misc_feature (1)..(25): SEQ ID NO: 2594; WAN024D24_at; Start 146; Stop 170
cttggcttgttagagaaggtttgaa

SEQ ID NO: 140363 - DNA, 25 bp, Artificial
  probe
  misc_feature (1)..(25): SEQ ID NO: 2594; WAN024D24_at; Start 36; Stop 60
tgcaatgagtttagtagtagcagga

SEQ ID NO: 140364 - DNA, 25 bp, Artificial
  probe
  misc_feature (1)..(25): SEQ ID NO: 2594; WAN024D24_at; Start 39; Stop 63
aatgagtttagtagtagcaggagtt

SEQ ID NO: 140365 - DNA, 25 bp, Artificial
  probe
  misc_feature (1)..(25): SEQ ID NO: 2594; WAN024D24_at; Start 150; Stop 174
gcttgttagagaaggtttgaaatta

SEQ ID NO: 140366 - DNA, 25 bp, Artificial
  probe
  misc_feature (1)..(25): SEQ ID NO: 2594; WAN024D24_at; Start 25; Stop 49
aaaatgattattgcaatgagtttag

SEQ ID NO: 140367 - DNA, 25 bp, Artificial
  probe
  misc_feature (1)..(25): SEQ ID NO: 2594; WAN024D24_at; Start 37; Stop 61
gcaatgagtttagtagtagcaggag

SEQ ID NO: 140368 - DNA, 25 bp, Artificial
  probe
  misc_feature (1)..(25): SEQ ID NO: 2594; WAN024D24_at; Start 72; Stop 96
tctcatgttttcgggattggatgag

SEQ ID NO: 140369 - DNA, 25 bp, Artificial
  probe
  misc_feature (1)..(25): SEQ ID NO: 6768; WAN024D25_at; Start 676; Stop 700
gaatcaatgcgtgaagttcgaacca

SEQ ID NO: 140370 - DNA, 25 bp, Artificial
  probe
  misc_feature (1)..(25): SEQ ID NO: 6768; WAN024D25_at; Start 820; Stop 844
caagaattggagtcaatggcttcta

SEQ ID NO: 140371 - DNA, 25 bp, Artificial
  probe
  misc_feature (1)..(25): SEQ ID NO: 6768; WAN024D25_at; Start 938; Stop 962
taacagtaagtgatgatggctgcgg

SEQ ID NO: 140372 - DNA, 25 bp, Artificial
  probe
  misc_feature (1)..(25): SEQ ID NO: 6768; WAN024D25_at; Start 952; Stop 976
gatggctgcggctttgcttttctaa

SEQ ID NO: 140373 - DNA, 25 bp, Artificial
  probe
  misc_feature (1)..(25): SEQ ID NO: 6768; WAN024D25_at; Start 784; Stop 808
gaaacggataaccaactagatactg

SEQ ID NO: 140374 - DNA, 25 bp, Artificial
  probe
  misc_feature (1)..(25): SEQ ID NO: 6768; WAN024D25_at; Start 1037; Stop 1061
taatcagtcagaaacatccaacgga

SEQ ID NO: 140375 - DNA, 25 bp, Artificial
  probe
  misc_feature (1)..(25): SEQ ID NO: 6768; WAN024D25_at; Start 843; Stop 867
tatgattttgcttgagttggtgacc

SEQ ID NO: 140376 - DNA, 25 bp, Artificial
  probe
  misc_feature (1)..(25): SEQ ID NO: 6768; WAN024D25_at; Start 722; Stop 746
gaactttgacatccgaactagagac

SEQ ID NO: 140377 - DNA, 25 bp, Artificial
  probe
  misc_feature (1)..(25): SEQ ID NO: 6768; WAN024D25_at; Start 428; Stop 452
tgactttgggctcggttcgaattcg

SEQ ID NO: 140378 - DNA, 25 bp, Artificial
  probe
  misc_feature (1)..(25): SEQ ID NO: 6768; WAN024D25_at; Start 446; Stop 470
gaattcgccttgtcgaggatttgaa

SEQ ID NO: 140379 - DNA, 25 bp, Artificial
  probe
  misc_feature (1)..(25): SEQ ID NO: 6768; WAN024D25_at; Start 573; Stop 597
tgctatgcttagtgtcaagacagat

SEQ ID NO: 140380 - DNA, 25 bp, Artificial
  probe
  misc_feature (1)..(25): SEQ ID NO: 6768; WAN024D25_at; Start 197; Stop 221
tggtctatgtagctgggaataccgc

SEQ ID NO: 140381 - DNA, 25 bp, Artificial
  probe
  misc_feature (1)..(25): SEQ ID NO: 6768; WAN024D25_at; Start 463; Stop 487
gatttgaaagaagctcaggtcaagc

SEQ ID NO: 140382 - DNA, 25 bp, Artificial
  probe
  misc_feature (1)..(25): SEQ ID NO: 6768; WAN024D25_at; Start 765; Stop 789
aattgctggaattgaggtggaaacg

SEQ ID NO: 140383 - DNA, 25 bp, Artificial
  probe
  misc_feature (1)..(25): SEQ ID NO: 6768; WAN024D25_at; Start 616; Stop 640
caaatgcaggcttatccacaagtgg

SEQ ID NO: 140384 - DNA, 25 bp, Artificial
  probe
  misc_feature (1)..(25): SEQ ID NO: 6768; WAN024D25_at; Start 56; Stop 80
tgattttccccatcctacctgtagt

SEQ ID NO: 140385 - DNA, 25 bp, Artificial
  probe
  misc_feature (1)..(25): SEQ ID NO: 6768; WAN024D25_at; Start 967; Stop 991
gcttttctaaaaggagatgagctcc

SEQ ID NO: 140386 - DNA, 25 bp, Artificial
  probe
  misc_feature (1)..(25): SEQ ID NO: 6768; WAN024D25_at; Start 1065; Stop 1089
gcaagttcgactaccttataaggag

SEQ ID NO: 140387 - DNA, 25 bp, Artificial
  probe
  misc_feature (1)..(25): SEQ ID NO: 6768; WAN024D25_at; Start 520; Stop 544
aatgagcgcaatcgtatcggtcagg

SEQ ID NO: 140388 - DNA, 25 bp, Artificial
  probe
  misc_feature (1)..(25): SEQ ID NO: 6768; WAN024D25_at; Start 313; Stop 337
gtatggacatttctccttgctcaag

SEQ ID NO: 140389 - DNA, 25 bp, Artificial
  probe
  misc_feature (1)..(25): SEQ ID NO: 6768; WAN024D25_at; Start 1051; Stop 1075
catccaacggaagtgcaagttcgac

SEQ ID NO: 140390 - DNA, 25 bp, Artificial
  probe
  misc_feature (1)..(25): SEQ ID NO: 6768; WAN024D25_at; Start 985; Stop 1009
gagctccatacaatccgagatcgtg

SEQ ID NO: 140391 - DNA, 25 bp, Artificial
  probe
  misc_feature (1)..(25): SEQ ID NO: 6768; WAN024D25_at; Start 88; Stop 112
gagcttcctgcttggcatttattgg

SEQ ID NO: 140392 - DNA, 25 bp, Artificial
  probe
  misc_feature (1)..(25): SEQ ID NO: 6768; WAN024D25_at; Start 875; Stop 899
tcaaacatgccaaagcgtctaaagc

SEQ ID NO: 140393 - DNA, 25 bp, Artificial
  probe
  misc_feature (1)..(25): SEQ ID NO: 6768; WAN024D25_at; Start 21; Stop 45
catacactatatgttttgggcaagt

SEQ ID NO: 140394 - DNA, 25 bp, Artificial
  probe
  misc_feature (1)..(25): SEQ ID NO: 6768; WAN024D25_at; Start 698; Stop 722
ccattgtggaaaatcttaagtctag

SEQ ID NO: 140395 - DNA, 25 bp, Artificial
  probe
  misc_feature (1)..(25): SEQ ID NO: 6768; WAN024D25_at; Start 146; Stop 170
ttttaataactaagaaccagcgcat

SEQ ID NO: 140396 - DNA, 25 bp, Artificial
  probe
  misc_feature (1)..(25): SEQ ID NO: 6768; WAN024D25_at; Start 504; Stop 528
tctattgctagcagaaaatgagcgc

SEQ ID NO: 140397 - DNA, 25 bp, Artificial
  probe
  misc_feature (1)..(25): SEQ ID NO: 6768; WAN024D25_at; Start 475; Stop 499
gctcaggtcaagcaaaatacccaga

SEQ ID NO: 140398 - DNA, 25 bp, Artificial
  probe
  misc_feature (1)..(25): SEQ ID NO: 6768; WAN024D25_at; Start 800; Stop 824
tagatactgctagccttactcaaga

SEQ ID NO: 140399 - DNA, 25 bp, Artificial
  probe
  misc_feature (1)..(25): SEQ ID NO: 6768; WAN024D25_at; Start 163; Stop 187
cagcgcatatcatggcttttctggg

SEQ ID NO: 140400 - DNA, 25 bp, Artificial
  probe
  misc_feature (1)..(25): SEQ ID NO: 6768; WAN024D25_at; Start 588; Stop 612
caagacagatctagccttgcagcta

SEQ ID NO: 140401 - DNA, 25 bp, Artificial
  probe
  misc_feature (1)..(25): SEQ ID NO: 6768; WAN024D25_at; Start 212; Stop 236
ggaataccgcctttgttgctgggaa

SEQ ID NO: 140402 - DNA, 25 bp, Artificial
  probe
  misc_feature (1)..(25): SEQ ID NO: 6768; WAN024D25_at; Start 1021; Stop 1045
tcaggagaagtaagtgtaatcagtc

SEQ ID NO: 140403 - DNA, 25 bp, Artificial
  probe
  misc_feature (1)..(25): SEQ ID NO: 2116; WAN024D26_at; Start 198; Stop 222
gacttatgtagttgggaatactgcc

SEQ ID NO: 140404 - DNA, 25 bp, Artificial
  probe
  misc_feature (1)..(25): SEQ ID NO: 2116; WAN024D26_at; Start 610; Stop 634
ttatttcagatggaggcttatccac

SEQ ID NO: 140405 - DNA, 25 bp, Artificial
  probe
  misc_feature (1)..(25): SEQ ID NO: 2116; WAN024D26_at; Start 650; Stop 674
taaaagaaattcaccagatcagcaa

SEQ ID NO: 140406 - DNA, 25 bp, Artificial
  probe
  misc_feature (1)..(25): SEQ ID NO: 2116; WAN024D26_at; Start 82; Stop 106
actgggtggctttctgcctggcatt

SEQ ID NO: 140407 - DNA, 25 bp, Artificial
  probe
  misc_feature (1)..(25): SEQ ID NO: 2116; WAN024D26_at; Start 89; Stop 113
ggctttctgcctggcatttattgat

SEQ ID NO: 140408 - DNA, 25 bp, Artificial
  probe
  misc_feature (1)..(25): SEQ ID NO: 2116; WAN024D26_at; Start 382; Stop 406
gagtttctattctatctacttgtaa

SEQ ID NO: 140409 - DNA, 25 bp, Artificial
  probe
  misc_feature (1)..(25): SEQ ID NO: 2116; WAN024D26_at; Start 659; Stop 683
ttcaccagatcagcaaggattccat

SEQ ID NO: 140410 - DNA, 25 bp, Artificial
  probe
  misc_feature (1)..(25): SEQ ID NO: 2116; WAN024D26_at; Start 618; Stop 642
gatggaggcttatccacaggtggaa

SEQ ID NO: 140411 - DNA, 25 bp, Artificial
  probe
  misc_feature (1)..(25): SEQ ID NO: 2116; WAN024D26_at; Start 645; Stop 669
ggaattaaaagaaattcaccagatc

SEQ ID NO: 140412 - DNA, 25 bp, Artificial
  probe
  misc_feature (1)..(25): SEQ ID NO: 2116; WAN024D26_at; Start 315; Stop 339
ctggacttttcttcttgctcaagtc

SEQ ID NO: 140413 - DNA, 25 bp, Artificial
  probe
  misc_feature (1)..(25): SEQ ID NO: 2116; WAN024D26_at; Start 503; Stop 527
atctattgcttgctgaaaatgaacg

SEQ ID NO: 140414 - DNA, 25 bp, Artificial
  probe
  misc_feature (1)..(25): SEQ ID NO: 2116; WAN024D26_at; Start 616; Stop 640
cagatggaggcttatccacaggtgg

SEQ ID NO: 140415 - DNA, 25 bp, Artificial
  probe
  misc_feature (1)..(25): SEQ ID NO: 2116; WAN024D26_at; Start 657; Stop 681
aattcaccagatcagcaaggattcc

SEQ ID NO: 140416 - DNA, 25 bp, Artificial
  probe
  misc_feature (1)..(25): SEQ ID NO: 2116; WAN024D26_at; Start 655; Stop 679
gaaattcaccagatcagcaaggatt

SEQ ID NO: 140417 - DNA, 25 bp, Artificial
  probe
  misc_feature (1)..(25): SEQ ID NO: 2116; WAN024D26_at; Start 94; Stop 118
tctgcctggcatttattgattgata

SEQ ID NO: 140418 - DNA, 25 bp, Artificial
  probe
  misc_feature (1)..(25): SEQ ID NO: 2116; WAN024D26_at; Start 603; Stop 627
cttgcagttatttcagatggaggct

SEQ ID NO: 140419 - DNA, 25 bp, Artificial
  probe
  misc_feature (1)..(25): SEQ ID NO: 2116; WAN024D26_at; Start 653; Stop 677
aagaaattcaccagatcagcaagga

SEQ ID NO: 140420 - DNA, 25 bp, Artificial
  probe
  misc_feature (1)..(25): SEQ ID NO: 2116; WAN024D26_at; Start 668; Stop 692
tcagcaaggattccatgaatgaagt

SEQ ID NO: 140421 - DNA, 25 bp, Artificial
  probe
  misc_feature (1)..(25): SEQ ID NO: 2116; WAN024D26_at; Start 80; Stop 104
tgactgggtggctttctgcctggca

SEQ ID NO: 140422 - DNA, 25 bp, Artificial
  probe
  misc_feature (1)..(25): SEQ ID NO: 2116; WAN024D26_at; Start 85; Stop 109
gggtggctttctgcctggcatttat

SEQ ID NO: 140423 - DNA, 25 bp, Artificial
  probe
  misc_feature (1)..(25): SEQ ID NO: 2116; WAN024D26_at; Start 376; Stop 400
gaagttgagtttctattctatctac

SEQ ID NO: 140424 - DNA, 25 bp, Artificial
  probe
  misc_feature (1)..(25): SEQ ID NO: 2116; WAN024D26_at; Start 308; Stop 332
tacatgtctggacttttcttcttgc

SEQ ID NO: 140425 - DNA, 25 bp, Artificial
  probe
  misc_feature (1)..(25): SEQ ID NO: 2116; WAN024D26_at; Start 25; Stop 49
cattatatgttttggatcagtttaa

SEQ ID NO: 140426 - DNA, 25 bp, Artificial
  probe
  misc_feature (1)..(25): SEQ ID NO: 2116; WAN024D26_at; Start 661; Stop 685
caccagatcagcaaggattccatga

SEQ ID NO: 140427 - DNA, 25 bp, Artificial
  probe
  misc_feature (1)..(25): SEQ ID NO: 2116; WAN024D26_at; Start 75; Stop 99
tgtagtgactgggtggctttctgcc

SEQ ID NO: 140428 - DNA, 25 bp, Artificial
  probe
  misc_feature (1)..(25): SEQ ID NO: 2116; WAN024D26_at; Start 607; Stop 631
cagttatttcagatggaggcttatc

SEQ ID NO: 140429 - DNA, 25 bp, Artificial
  probe
  misc_feature (1)..(25): SEQ ID NO: 2116; WAN024D26_at; Start 77; Stop 101
tagtgactgggtggctttctgcctg

SEQ ID NO: 140430 - DNA, 25 bp, Artificial
  probe
  misc_feature (1)..(25): SEQ ID NO: 2116; WAN024D26_at; Start 664; Stop 688
cagatcagcaaggattccatgaatg

SEQ ID NO: 140431 - DNA, 25 bp, Artificial
  probe
  misc_feature (1)..(25): SEQ ID NO: 2116; WAN024D26_at; Start 313; Stop 337
gtctggacttttcttcttgctcaag

SEQ ID NO: 140432 - DNA, 25 bp, Artificial
  probe
  misc_feature (1)..(25): SEQ ID NO: 2116; WAN024D26_at; Start 614; Stop 638
ttcagatggaggcttatccacaggt

SEQ ID NO: 140433 - DNA, 25 bp, Artificial
  probe
  misc_feature (1)..(25): SEQ ID NO: 2116; WAN024D26_at; Start 304; Stop 328
tctttacatgtctggacttttcttc

SEQ ID NO: 140434 - DNA, 25 bp, Artificial
  probe
  misc_feature (1)..(25): SEQ ID NO: 2116; WAN024D26_at; Start 605; Stop 629
tgcagttatttcagatggaggctta

SEQ ID NO: 140435 - DNA, 25 bp, Artificial
  probe
  misc_feature (1)..(25): SEQ ID NO: 2116; WAN024D26_at; Start 201; Stop 225
ttatgtagttgggaatactgccttt

SEQ ID NO: 140436 - DNA, 25 bp, Artificial
  probe
  misc_feature (1)..(25): SEQ ID NO: 2116; WAN024D26_at; Start 599; Stop 623
tagccttgcagttatttcagatgga

SEQ ID NO: 140437 - DNA, 25 bp, Artificial
  probe
  misc_feature (1)..(25): SEQ ID NO: 938; WAN024D27_at; Start 111; Stop 135
agcaatccaactattagaaaaggag

SEQ ID NO: 140438 - DNA, 25 bp, Artificial
  probe
  misc_feature (1)..(25): SEQ ID NO: 938; WAN024D27_at; Start 349; Stop 373
gtcctcgaaggacgcaaggagtatt

SEQ ID NO: 140439 - DNA, 25 bp, Artificial
  probe
  misc_feature (1)..(25): SEQ ID NO: 938; WAN024D27_at; Start 227; Stop 251
aggtggttgtggtgacgaccttcaa

SEQ ID NO: 140440 - DNA, 25 bp, Artificial
  probe
  misc_feature (1)..(25): SEQ ID NO: 938; WAN024D27_at; Start 550; Stop 574
ggtaatcgaacagaggcagctaata

SEQ ID NO: 140441 - DNA, 25 bp, Artificial
  probe
  misc_feature (1)..(25): SEQ ID NO: 938; WAN024D27_at; Start 358; Stop 382
ggacgcaaggagtattcgcctgaat

SEQ ID NO: 140442 - DNA, 25 bp, Artificial
  probe
  misc_feature (1)..(25): SEQ ID NO: 938; WAN024D27_at; Start 361; Stop 385
cgcaaggagtattcgcctgaattga

SEQ ID NO: 140443 - DNA, 25 bp, Artificial
  probe
  misc_feature (1)..(25): SEQ ID NO: 938; WAN024D27_at; Start 16; Stop 40
gcagaagatcaaagtatgttgcgag

SEQ ID NO: 140444 - DNA, 25 bp, Artificial
  probe
  misc_feature (1)..(25): SEQ ID NO: 938; WAN024D27_at; Start 260; Stop 284
ggtattttgaacgtgcggtcaaggc

SEQ ID NO: 140445 - DNA, 25 bp, Artificial
  probe
  misc_feature (1)..(25): SEQ ID NO: 938; WAN024D27_at; Start 353; Stop 377
tcgaaggacgcaaggagtattcgcc

SEQ ID NO: 140446 - DNA, 25 bp, Artificial
  probe
  misc_feature (1)..(25): SEQ ID NO: 938; WAN024D27_at; Start 322; Stop 346
gcagacctcatgcaaaccttgcaca

SEQ ID NO: 140447 - DNA, 25 bp, Artificial
  probe
  misc_feature (1)..(25): SEQ ID NO: 938; WAN024D27_at; Start 155; Stop 179
ttgacgtagaaatgcctgttaagac

SEQ ID NO: 140448 - DNA, 25 bp, Artificial
  probe
  misc_feature (1)..(25): SEQ ID NO: 938; WAN024D27_at; Start 109; Stop 133
gaagcaatccaactattagaaaagg

SEQ ID NO: 140449 - DNA, 25 bp, Artificial
  probe
  misc_feature (1)..(25): SEQ ID NO: 938; WAN024D27_at; Start 554; Stop 578
atcgaacagaggcagctaatatcgc

SEQ ID NO: 140450 - DNA, 25 bp, Artificial
  probe
  misc_feature (1)..(25): SEQ ID NO: 938; WAN024D27_at; Start 24; Stop 48
tcaaagtatgttgcgagatgccatg

SEQ ID NO: 140451 - DNA, 25 bp, Artificial
  probe
  misc_feature (1)..(25): SEQ ID NO: 938; WAN024D27_at; Start 335; Stop 359
aaaccttgcacaccgtcctcgaagg

SEQ ID NO: 140452 - DNA, 25 bp, Artificial
  probe
  misc_feature (1)..(25): SEQ ID NO: 938; WAN024D27_at; Start 345; Stop 369
caccgtcctcgaaggacgcaaggag

SEQ ID NO: 140453 - DNA, 25 bp, Artificial
  probe
  misc_feature (1)..(25): SEQ ID NO: 938; WAN024D27_at; Start 320; Stop 344
ttgcagacctcatgcaaaccttgca

SEQ ID NO: 140454 - DNA, 25 bp, Artificial
  probe
  misc_feature (1)..(25): SEQ ID NO: 938; WAN024D27_at; Start 552; Stop 576
taatcgaacagaggcagctaatatc

SEQ ID NO: 140455 - DNA, 25 bp, Artificial
  probe
  misc_feature (1)..(25): SEQ ID NO: 938; WAN024D27_at; Start 262; Stop 286
tattttgaacgtgcggtcaaggctg

SEQ ID NO: 140456 - DNA, 25 bp, Artificial
  probe
  misc_feature (1)..(25): SEQ ID NO: 938; WAN024D27_at; Start 223; Stop 247
acaaaggtggttgtggtgacgacct

SEQ ID NO: 140457 - DNA, 25 bp, Artificial
  probe
  misc_feature (1)..(25): SEQ ID NO: 938; WAN024D27_at; Start 22; Stop 46
gatcaaagtatgttgcgagatgcca

SEQ ID NO: 140458 - DNA, 25 bp, Artificial
  probe
  misc_feature (1)..(25): SEQ ID NO: 938; WAN024D27_at; Start 266; Stop 290
ttgaacgtgcggtcaaggctggagt

SEQ ID NO: 140459 - DNA, 25 bp, Artificial
  probe
  misc_feature (1)..(25): SEQ ID NO: 938; WAN024D27_at; Start 95; Stop 119
ccaagaatgggcaagaagcaatcca

SEQ ID NO: 140460 - DNA, 25 bp, Artificial
  probe
  misc_feature (1)..(25): SEQ ID NO: 938; WAN024D27_at; Start 355; Stop 379
gaaggacgcaaggagtattcgcctg

SEQ ID NO: 140461 - DNA, 25 bp, Artificial
  probe
  misc_feature (1)..(25): SEQ ID NO: 938; WAN024D27_at; Start 150; Stop 174
catccttgacgtagaaatgcctgtt

SEQ ID NO: 140462 - DNA, 25 bp, Artificial
  probe
  misc_feature (1)..(25): SEQ ID NO: 938; WAN024D27_at; Start 105; Stop 129
gcaagaagcaatccaactattagaa

SEQ ID NO: 140463 - DNA, 25 bp, Artificial
  probe
  misc_feature (1)..(25): SEQ ID NO: 938; WAN024D27_at; Start 511; Stop 535
cgaaactatgtcaccaatattcttt

SEQ ID NO: 140464 - DNA, 25 bp, Artificial
  probe
  misc_feature (1)..(25): SEQ ID NO: 938; WAN024D27_at; Start 366; Stop 390
ggagtattcgcctgaattgatggaa

SEQ ID NO: 140465 - DNA, 25 bp, Artificial
  probe
  misc_feature (1)..(25): SEQ ID NO: 938; WAN024D27_at; Start 103; Stop 127
gggcaagaagcaatccaactattag

SEQ ID NO: 140466 - DNA, 25 bp, Artificial
  probe
  misc_feature (1)..(25): SEQ ID NO: 938; WAN024D27_at; Start 341; Stop 365
tgcacaccgtcctcgaaggacgcaa

SEQ ID NO: 140467 - DNA, 25 bp, Artificial
  probe
  misc_feature (1)..(25): SEQ ID NO: 938; WAN024D27_at; Start 99; Stop 123
gaatgggcaagaagcaatccaacta

SEQ ID NO: 140468 - DNA, 25 bp, Artificial
  probe
  misc_feature (1)..(25): SEQ ID NO: 938; WAN024D27_at; Start 26; Stop 50
aaagtatgttgcgagatgccatgtg

SEQ ID NO: 140469 - DNA, 25 bp, Artificial
  probe
  misc_feature (1)..(25): SEQ ID NO: 938; WAN024D27_at; Start 231; Stop 255
ggttgtggtgacgaccttcaagcgt

SEQ ID NO: 140470 - DNA, 25 bp, Artificial
  probe
  misc_feature (1)..(25): SEQ ID NO: 938; WAN024D27_at; Start 152; Stop 176
tccttgacgtagaaatgcctgttaa

SEQ ID NO: 140471 - DNA, 25 bp, Artificial
  probe
  misc_feature (1)..(25): SEQ ID NO: 7171; WAN024D28_at; Start 33; Stop 57
tgaaagtgctgcacctgagcagtcc

SEQ ID NO: 140472 - DNA, 25 bp, Artificial
  probe
  misc_feature (1)..(25): SEQ ID NO: 7171; WAN024D28_at; Start 42; Stop 66
tgcacctgagcagtccaagactaca

SEQ ID NO: 140473 - DNA, 25 bp, Artificial
  probe
  misc_feature (1)..(25): SEQ ID NO: 7171; WAN024D28_at; Start 35; Stop 59
aaagtgctgcacctgagcagtccaa

SEQ ID NO: 140474 - DNA, 25 bp, Artificial
  probe
  misc_feature (1)..(25): SEQ ID NO: 7171; WAN024D28_at; Start 17; Stop 41
tgattcaagaacagcctgaaagtgc

SEQ ID NO: 140475 - DNA, 25 bp, Artificial
  probe
  misc_feature (1)..(25): SEQ ID NO: 7171; WAN024D28_at; Start 22; Stop 46
caagaacagcctgaaagtgctgcac

SEQ ID NO: 140476 - DNA, 25 bp, Artificial
  probe
  misc_feature (1)..(25): SEQ ID NO: 7171; WAN024D28_at; Start 28; Stop 52
cagcctgaaagtgctgcacctgagc

SEQ ID NO: 140477 - DNA, 25 bp, Artificial
  probe
  misc_feature (1)..(25): SEQ ID NO: 7171; WAN024D28_at; Start 15; Stop 39
ggtgattcaagaacagcctgaaagt

SEQ ID NO: 140478 - DNA, 25 bp, Artificial
  probe
  misc_feature (1)..(25): SEQ ID NO: 7171; WAN024D28_at; Start 44; Stop 68
cacctgagcagtccaagactacagg

SEQ ID NO: 140479 - DNA, 25 bp, Artificial
  probe
  misc_feature (1)..(25): SEQ ID NO: 7171; WAN024D28_at; Start 34; Stop 58
gaaagtgctgcacctgagcagtcca

SEQ ID NO: 140480 - DNA, 25 bp, Artificial
  probe
  misc_feature (1)..(25): SEQ ID NO: 7171; WAN024D28_at; Start 18; Stop 42
gattcaagaacagcctgaaagtgct

SEQ ID NO: 140481 - DNA, 25 bp, Artificial
  probe
  misc_feature (1)..(25): SEQ ID NO: 7171; WAN024D28_at; Start 39; Stop 63
tgctgcacctgagcagtccaagact

SEQ ID NO: 140482 - DNA, 25 bp, Artificial
  probe
  misc_feature (1)..(25): SEQ ID NO: 7171; WAN024D28_at; Start 53; Stop 77
agtccaagactacaggcttgccagc

SEQ ID NO: 140483 - DNA, 25 bp, Artificial
  probe
  misc_feature (1)..(25): SEQ ID NO: 7171; WAN024D28_at; Start 54; Stop 78
gtccaagactacaggcttgccagct

SEQ ID NO: 140484 - DNA, 25 bp, Artificial
  probe
  misc_feature (1)..(25): SEQ ID NO: 7171; WAN024D28_at; Start 37; Stop 61
agtgctgcacctgagcagtccaaga

SEQ ID NO: 140485 - DNA, 25 bp, Artificial
  probe
  misc_feature (1)..(25): SEQ ID NO: 7171; WAN024D28_at; Start 48; Stop 72
tgagcagtccaagactacaggcttg

SEQ ID NO: 140486 - DNA, 25 bp, Artificial
  probe
  misc_feature (1)..(25): SEQ ID NO: 7171; WAN024D28_at; Start 52; Stop 76
cagtccaagactacaggcttgccag

SEQ ID NO: 140487 - DNA, 25 bp, Artificial
  probe
  misc_feature (1)..(25): SEQ ID NO: 7171; WAN024D28_at; Start 14; Stop 38
gggtgattcaagaacagcctgaaag

SEQ ID NO: 140488 - DNA, 25 bp, Artificial
  probe
  misc_feature (1)..(25): SEQ ID NO: 7171; WAN024D28_at; Start 31; Stop 55
cctgaaagtgctgcacctgagcagt

SEQ ID NO: 140489 - DNA, 25 bp, Artificial
  probe
  misc_feature (1)..(25): SEQ ID NO: 7171; WAN024D28_at; Start 26; Stop 50
aacagcctgaaagtgctgcacctga

SEQ ID NO: 140490 - DNA, 25 bp, Artificial
  probe
  misc_feature (1)..(25): SEQ ID NO: 7171; WAN024D28_at; Start 21; Stop 45
tcaagaacagcctgaaagtgctgca

SEQ ID NO: 140491 - DNA, 25 bp, Artificial
  probe
  misc_feature (1)..(25): SEQ ID NO: 7171; WAN024D28_at; Start 25; Stop 49
gaacagcctgaaagtgctgcacctg

SEQ ID NO: 140492 - DNA, 25 bp, Artificial
  probe
  misc_feature (1)..(25): SEQ ID NO: 7171; WAN024D28_at; Start 50; Stop 74
agcagtccaagactacaggcttgcc

SEQ ID NO: 140493 - DNA, 25 bp, Artificial
  probe
  misc_feature (1)..(25): SEQ ID NO: 7171; WAN024D28_at; Start 29; Stop 53
agcctgaaagtgctgcacctgagca

SEQ ID NO: 140494 - DNA, 25 bp, Artificial
  probe
  misc_feature (1)..(25): SEQ ID NO: 7171; WAN024D28_at; Start 27; Stop 51
acagcctgaaagtgctgcacctgag

SEQ ID NO: 140495 - DNA, 25 bp, Artificial
  probe
  misc_feature (1)..(25): SEQ ID NO: 7171; WAN024D28_at; Start 51; Stop 75
gcagtccaagactacaggcttgcca

SEQ ID NO: 140496 - DNA, 25 bp, Artificial
  probe
  misc_feature (1)..(25): SEQ ID NO: 7171; WAN024D28_at; Start 46; Stop 70
cctgagcagtccaagactacaggct

SEQ ID NO: 140497 - DNA, 25 bp, Artificial
  probe
  misc_feature (1)..(25): SEQ ID NO: 7171; WAN024D28_at; Start 43; Stop 67
gcacctgagcagtccaagactacag

SEQ ID NO: 140498 - DNA, 25 bp, Artificial
  probe
  misc_feature (1)..(25): SEQ ID NO: 7171; WAN024D28_at; Start 49; Stop 73
gagcagtccaagactacaggcttgc

SEQ ID NO: 140499 - DNA, 25 bp, Artificial
  probe
  misc_feature (1)..(25): SEQ ID NO: 7171; WAN024D28_at; Start 20; Stop 44
ttcaagaacagcctgaaagtgctgc

SEQ ID NO: 140500 - DNA, 25 bp, Artificial
  probe
  misc_feature (1)..(25): SEQ ID NO: 7171; WAN024D28_at; Start 23; Stop 47
aagaacagcctgaaagtgctgcacc

SEQ ID NO: 140501 - DNA, 25 bp, Artificial
  probe
  misc_feature (1)..(25): SEQ ID NO: 7171; WAN024D28_at; Start 40; Stop 64
gctgcacctgagcagtccaagacta

SEQ ID NO: 140502 - DNA, 25 bp, Artificial
  probe
  misc_feature (1)..(25): SEQ ID NO: 7171; WAN024D28_at; Start 47; Stop 71
ctgagcagtccaagactacaggctt

SEQ ID NO: 140503 - DNA, 25 bp, Artificial
  probe
  misc_feature (1)..(25): SEQ ID NO: 7171; WAN024D28_at; Start 30; Stop 54
gcctgaaagtgctgcacctgagcag

SEQ ID NO: 140504 - DNA, 25 bp, Artificial
  probe
  misc_feature (1)..(25): SEQ ID NO: 7171; WAN024D28_at; Start 36; Stop 60
aagtgctgcacctgagcagtccaag

SEQ ID NO: 140505 - DNA, 25 bp, Artificial
  probe
  misc_feature (1)..(25): SEQ ID NO: 2358; WAN024D29_at; Start 17; Stop 41
tgactgttaaaatcataggtcacct

SEQ ID NO: 140506 - DNA, 25 bp, Artificial
  probe
  misc_feature (1)..(25): SEQ ID NO: 2358; WAN024D29_at; Start 2; Stop 26
tggatgggttcattgtgactgttaa

SEQ ID NO: 140507 - DNA, 25 bp, Artificial
  probe
  misc_feature (1)..(25): SEQ ID NO: 2358; WAN024D29_at; Start 289; Stop 313
tgtcatatcacgaaccaaggcagaa

SEQ ID NO: 140508 - DNA, 25 bp, Artificial
  probe
  misc_feature (1)..(25): SEQ ID NO: 2358; WAN024D29_at; Start 104; Stop 128
gtttgttgagcattgtgactttcaa

SEQ ID NO: 140509 - DNA, 25 bp, Artificial
  probe
  misc_feature (1)..(25): SEQ ID NO: 2358; WAN024D29_at; Start 419; Stop 443
ttaccaaagattgggtagtgagtcc

SEQ ID NO: 140510 - DNA, 25 bp, Artificial
  probe
  misc_feature (1)..(25): SEQ ID NO: 2358; WAN024D29_at; Start 303; Stop 327
ccaaggcagaacgaacacctggaac

SEQ ID NO: 140511 - DNA, 25 bp, Artificial
  probe
  misc_feature (1)..(25): SEQ ID NO: 2358; WAN024D29_at; Start 351; Stop 375
caacaccagtaccacagatacatac

SEQ ID NO: 140512 - DNA, 25 bp, Artificial
  probe
  misc_feature (1)..(25): SEQ ID NO: 2358; WAN024D29_at; Start 334; Stop 358
tacagcgttgttgataccaacacca

SEQ ID NO: 140513 - DNA, 25 bp, Artificial
  probe
  misc_feature (1)..(25): SEQ ID NO: 2358; WAN024D29_at; Start 346; Stop 370
gataccaacaccagtaccacagata

SEQ ID NO: 140514 - DNA, 25 bp, Artificial
  probe
  misc_feature (1)..(25): SEQ ID NO: 2358; WAN024D29_at; Start 198; Stop 222
cgatgatatcacacataagcaattc

SEQ ID NO: 140515 - DNA, 25 bp, Artificial
  probe
  misc_feature (1)..(25): SEQ ID NO: 2358; WAN024D29_at; Start 323; Stop 347
ggaactttatttacagcgttgttga

SEQ ID NO: 140516 - DNA, 25 bp, Artificial
  probe
  misc_feature (1)..(25): SEQ ID NO: 2358; WAN024D29_at; Start 80; Stop 104
aattctgtaaagaagtttgcgtctg

SEQ ID NO: 140517 - DNA, 25 bp, Artificial
  probe
  misc_feature (1)..(25): SEQ ID NO: 2358; WAN024D29_at; Start 315; Stop 339
gaacacctggaactttatttacagc

SEQ ID NO: 140518 - DNA, 25 bp, Artificial
  probe
  misc_feature (1)..(25): SEQ ID NO: 2358; WAN024D29_at; Start 276; Stop 300
cataaagggctgttgtcatatcacg

SEQ ID NO: 140519 - DNA, 25 bp, Artificial
  probe
  misc_feature (1)..(25): SEQ ID NO: 2358; WAN024D29_at; Start 459; Stop 483
taccaaagtcaatgacttcatatcc

SEQ ID NO: 140520 - DNA, 25 bp, Artificial
  probe
  misc_feature (1)..(25): SEQ ID NO: 2358; WAN024D29_at; Start 262; Stop 286
caattgttctttagcataaagggct

SEQ ID NO: 140521 - DNA, 25 bp, Artificial
  probe
  misc_feature (1)..(25): SEQ ID NO: 2358; WAN024D29_at; Start 91; Stop 115
gaagtttgcgtctgtttgttgagca

SEQ ID NO: 140522 - DNA, 25 bp, Artificial
  probe
  misc_feature (1)..(25): SEQ ID NO: 2358; WAN024D29_at; Start 300; Stop 324
gaaccaaggcagaacgaacacctgg

SEQ ID NO: 140523 - DNA, 25 bp, Artificial
  probe
  misc_feature (1)..(25): SEQ ID NO: 2358; WAN024D29_at; Start 432; Stop 456
ggtagtgagtccgtgtatggtcata

SEQ ID NO: 140524 - DNA, 25 bp, Artificial
  probe
  misc_feature (1)..(25): SEQ ID NO: 2358; WAN024D29_at; Start 75; Stop 99
caaggaattctgtaaagaagtttgc

SEQ ID NO: 140525 - DNA, 25 bp, Artificial
  probe
  misc_feature (1)..(25): SEQ ID NO: 2358; WAN024D29_at; Start 252; Stop 276
cgttagcgttcaattgttctttagc

SEQ ID NO: 140526 - DNA, 25 bp, Artificial
  probe
  misc_feature (1)..(25): SEQ ID NO: 2358; WAN024D29_at; Start 284; Stop 308
gctgttgtcatatcacgaaccaagg

SEQ ID NO: 140527 - DNA, 25 bp, Artificial
  probe
  misc_feature (1)..(25): SEQ ID NO: 2358; WAN024D29_at; Start 279; Stop 303
aaagggctgttgtcatatcacgaac

SEQ ID NO: 140528 - DNA, 25 bp, Artificial
  probe
  misc_feature (1)..(25): SEQ ID NO: 2358; WAN024D29_at; Start 206; Stop 230
tcacacataagcaattcaccagtaa

SEQ ID NO: 140529 - DNA, 25 bp, Artificial
  probe
  misc_feature (1)..(25): SEQ ID NO: 2358; WAN024D29_at; Start 393; Stop 417
cgctagttacagcttcccctacttt

SEQ ID NO: 140530 - DNA, 25 bp, Artificial
  probe
  misc_feature (1)..(25): SEQ ID NO: 2358; WAN024D29_at; Start 269; Stop 293
tctttagcataaagggctgttgtca

SEQ ID NO: 140531 - DNA, 25 bp, Artificial
  probe
  misc_feature (1)..(25): SEQ ID NO: 2358; WAN024D29_at; Start 423; Stop 447
caaagattgggtagtgagtccgtgt

SEQ ID NO: 140532 - DNA, 25 bp, Artificial
  probe
  misc_feature (1)..(25): SEQ ID NO: 2358; WAN024D29_at; Start 36; Stop 60
tcacctcttagtcgtggtattctcc

SEQ ID NO: 140533 - DNA, 25 bp, Artificial
  probe
  misc_feature (1)..(25): SEQ ID NO: 2358; WAN024D29_at; Start 294; Stop 318
tatcacgaaccaaggcagaacgaac

SEQ ID NO: 140534 - DNA, 25 bp, Artificial
  probe
  misc_feature (1)..(25): SEQ ID NO: 2358; WAN024D29_at; Start 29; Stop 53
tcataggtcacctcttagtcgtggt

SEQ ID NO: 140535 - DNA, 25 bp, Artificial
  probe
  misc_feature (1)..(25): SEQ ID NO: 2358; WAN024D29_at; Start 465; Stop 489
agtcaatgacttcatatccttttga

SEQ ID NO: 140536 - DNA, 25 bp, Artificial
  probe
  misc_feature (1)..(25): SEQ ID NO: 2358; WAN024D29_at; Start 343; Stop 367
gttgataccaacaccagtaccacag

SEQ ID NO: 140537 - DNA, 25 bp, Artificial
  probe
  misc_feature (1)..(25): SEQ ID NO: 2358; WAN024D29_at; Start 98; Stop 122
gcgtctgtttgttgagcattgtgac

SEQ ID NO: 140538 - DNA, 25 bp, Artificial
  probe
  misc_feature (1)..(25): SEQ ID NO: 2358; WAN024D29_at; Start 189; Stop 213
tgaaagcttcgatgatatcacacat

SEQ ID NO: 140539 - DNA, 25 bp, Artificial
  probe
  misc_feature (1)..(25): SEQ ID NO: 1522; WAN024D2A_at; Start 202; Stop 226
ggtgttggtatcaacaacgctgtaa

SEQ ID NO: 140540 - DNA, 25 bp, Artificial
  probe
  misc_feature (1)..(25): SEQ ID NO: 1522; WAN024D2A_at; Start 189; Stop 213
tatctgtggtactggtgttggtatc

SEQ ID NO: 140541 - DNA, 25 bp, Artificial
  probe
  misc_feature (1)..(25): SEQ ID NO: 1522; WAN024D2A_at; Start 433; Stop 457
gaaagtcacaatgctcaacaaacag

SEQ ID NO: 140542 - DNA, 25 bp, Artificial
  probe
  misc_feature (1)..(25): SEQ ID NO: 1522; WAN024D2A_at; Start 212; Stop 236
tcaacaacgctgtaaataaagttcc

SEQ ID NO: 140543 - DNA, 25 bp, Artificial
  probe
  misc_feature (1)..(25): SEQ ID NO: 1522; WAN024D2A_at; Start 254; Stop 278
tggttcgtgatatgacaacagccct

SEQ ID NO: 140544 - DNA, 25 bp, Artificial
  probe
  misc_feature (1)..(25): SEQ ID NO: 1522; WAN024D2A_at; Start 438; Stop 462
tcacaatgctcaacaaacagacgca

SEQ ID NO: 140545 - DNA, 25 bp, Artificial
  probe
  misc_feature (1)..(25): SEQ ID NO: 1522; WAN024D2A_at; Start 283; Stop 307
gctaaagaacaattgaacgctaacg

SEQ ID NO: 140546 - DNA, 25 bp, Artificial
  probe
  misc_feature (1)..(25): SEQ ID NO: 1522; WAN024D2A_at; Start 266; Stop 290
tgacaacagccctttatgctaaaga

SEQ ID NO: 140547 - DNA, 25 bp, Artificial
  probe
  misc_feature (1)..(25): SEQ ID NO: 1522; WAN024D2A_at; Start 244; Stop 268
cgttctgccttggttcgtgatatga

SEQ ID NO: 140548 - DNA, 25 bp, Artificial
  probe
  misc_feature (1)..(25): SEQ ID NO: 1522; WAN024D2A_at; Start 260; Stop 284
gtgatatgacaacagccctttatgc

SEQ ID NO: 140549 - DNA, 25 bp, Artificial
  probe
  misc_feature (1)..(25): SEQ ID NO: 1522; WAN024D2A_at; Start 198; Stop 222
tactggtgttggtatcaacaacgct

SEQ ID NO: 140550 - DNA, 25 bp, Artificial
  probe
  misc_feature (1)..(25): SEQ ID NO: 1522; WAN024D2A_at; Start 251; Stop 275
ccttggttcgtgatatgacaacagc

SEQ ID NO: 140551 - DNA, 25 bp, Artificial
  probe
  misc_feature (1)..(25): SEQ ID NO: 1522; WAN024D2A_at; Start 240; Stop 264
tgttcgttctgccttggttcgtgat

SEQ ID NO: 140552 - DNA, 25 bp, Artificial
  probe
  misc_feature (1)..(25): SEQ ID NO: 1522; WAN024D2A_at; Start 192; Stop 216
ctgtggtactggtgttggtatcaac

SEQ ID NO: 140553 - DNA, 25 bp, Artificial
  probe
  misc_feature (1)..(25): SEQ ID NO: 1522; WAN024D2A_at; Start 287; Stop 311
aagaacaattgaacgctaacgttat

SEQ ID NO: 140554 - DNA, 25 bp, Artificial
  probe
  misc_feature (1)..(25): SEQ ID NO: 1522; WAN024D2A_at; Start 142; Stop 166
aaagtaggggaagctgtaactagcg

SEQ ID NO: 140555 - DNA, 25 bp, Artificial
  probe
  misc_feature (1)..(25): SEQ ID NO: 1522; WAN024D2A_at; Start 63; Stop 87
tttgaaatcaaaaggatatgaagtc

SEQ ID NO: 140556 - DNA, 25 bp, Artificial
  probe
  misc_feature (1)..(25): SEQ ID NO: 1522; WAN024D2A_at; Start 236; Stop 260
caggtgttcgttctgccttggttcg

SEQ ID NO: 140557 - DNA, 25 bp, Artificial
  probe
  misc_feature (1)..(25): SEQ ID NO: 1522; WAN024D2A_at; Start 220; Stop 244
gctgtaaataaagttccaggtgttc

SEQ ID NO: 140558 - DNA, 25 bp, Artificial
  probe
  misc_feature (1)..(25): SEQ ID NO: 1522; WAN024D2A_at; Start 347; Stop 371
tgtgtgatatcatcgaagctttcat

SEQ ID NO: 140559 - DNA, 25 bp, Artificial
  probe
  misc_feature (1)..(25): SEQ ID NO: 1522; WAN024D2A_at; Start 37; Stop 61
gatgaaaaaatggcggtttcagaat

SEQ ID NO: 140560 - DNA, 25 bp, Artificial
  probe
  misc_feature (1)..(25): SEQ ID NO: 1522; WAN024D2A_at; Start 232; Stop 256
gttccaggtgttcgttctgccttgg

SEQ ID NO: 140561 - DNA, 25 bp, Artificial
  probe
  misc_feature (1)..(25): SEQ ID NO: 1522; WAN024D2A_at; Start 345; Stop 369
tatgtgtgatatcatcgaagctttc

SEQ ID NO: 140562 - DNA, 25 bp, Artificial
  probe
  misc_feature (1)..(25): SEQ ID NO: 1522; WAN024D2A_at; Start 330; Stop 354
tactggtgaattgcttatgtgtgat

SEQ ID NO: 140563 - DNA, 25 bp, Artificial
  probe
  misc_feature (1)..(25): SEQ ID NO: 1522; WAN024D2A_at; Start 444; Stop 468
tgctcaacaaacagacgcaaacttc

SEQ ID NO: 140564 - DNA, 25 bp, Artificial
  probe
  misc_feature (1)..(25): SEQ ID NO: 1522; WAN024D2A_at; Start 247; Stop 271
tctgccttggttcgtgatatgacaa

SEQ ID NO: 140565 - DNA, 25 bp, Artificial
  probe
  misc_feature (1)..(25): SEQ ID NO: 1522; WAN024D2A_at; Start 278; Stop 302
tttatgctaaagaacaattgaacgc

SEQ ID NO: 140566 - DNA, 25 bp, Artificial
  probe
  misc_feature (1)..(25): SEQ ID NO: 1522; WAN024D2A_at; Start 269; Stop 293
caacagccctttatgctaaagaaca

SEQ ID NO: 140567 - DNA, 25 bp, Artificial
  probe
  misc_feature (1)..(25): SEQ ID NO: 1522; WAN024D2A_at; Start 185; Stop 209
tatgtatctgtggtactggtgttgg

SEQ ID NO: 140568 - DNA, 25 bp, Artificial
  probe
  misc_feature (1)..(25): SEQ ID NO: 1522; WAN024D2A_at; Start 215; Stop 239
acaacgctgtaaataaagttccagg

SEQ ID NO: 140569 - DNA, 25 bp, Artificial
  probe
  misc_feature (1)..(25): SEQ ID NO: 1522; WAN024D2A_at; Start 77; Stop 101
gatatgaagtcattgactttggtac

SEQ ID NO: 140570 - DNA, 25 bp, Artificial
  probe
  misc_feature (1)..(25): SEQ ID NO: 1522; WAN024D2A_at; Start 257; Stop 281
ttcgtgatatgacaacagcccttta

SEQ ID NO: 140571 - DNA, 25 bp, Artificial
  probe
  misc_feature (1)..(25): SEQ ID NO: 1522; WAN024D2A_at; Start 337; Stop 361
gaattgcttatgtgtgatatcatcg

SEQ ID NO: 140572 - DNA, 25 bp, Artificial
  probe
  misc_feature (1)..(25): SEQ ID NO: 1522; WAN024D2A_at; Start 70; Stop 94
tcaaaaggatatgaagtcattgact

SEQ ID NO: 140573 - DNA, 25 bp, Artificial
  probe
  misc_feature (1)..(25): SEQ ID NO: 1869; WAN024D2B_at; Start 163; Stop 187
gctactggtttagtgggtggcaaac

SEQ ID NO: 140574 - DNA, 25 bp, Artificial
  probe
  misc_feature (1)..(25): SEQ ID NO: 1869; WAN024D2B_at; Start 111; Stop 135
taagggactcaatgttacccgagta

SEQ ID NO: 140575 - DNA, 25 bp, Artificial
  probe
  misc_feature (1)..(25): SEQ ID NO: 1869; WAN024D2B_at; Start 573; Stop 597
tcttggaagagaagtttctgaggat

SEQ ID NO: 140576 - DNA, 25 bp, Artificial
  probe
  misc_feature (1)..(25): SEQ ID NO: 1869; WAN024D2B_at; Start 86; Stop 110
tggatgtaaccaaaacggctggtgg

SEQ ID NO: 140577 - DNA, 25 bp, Artificial
  probe
  misc_feature (1)..(25): SEQ ID NO: 1869; WAN024D2B_at; Start 72; Stop 96
tgtcaatcgtgtggtggatgtaacc

SEQ ID NO: 140578 - DNA, 25 bp, Artificial
  probe
  misc_feature (1)..(25): SEQ ID NO: 1869; WAN024D2B_at; Start 870; Stop 894
tcatgtcaacatggccaactatcaa

SEQ ID NO: 140579 - DNA, 25 bp, Artificial
  probe
  misc_feature (1)..(25): SEQ ID NO: 1869; WAN024D2B_at; Start 151; Stop 175
gattctgttcttgctactggtttag

SEQ ID NO: 140580 - DNA, 25 bp, Artificial
  probe
  misc_feature (1)..(25): SEQ ID NO: 1869; WAN024D2B_at; Start 474; Stop 498
tgtagtcttggactgctcaggtgca

SEQ ID NO: 140581 - DNA, 25 bp, Artificial
  probe
  misc_feature (1)..(25): SEQ ID NO: 1869; WAN024D2B_at; Start 402; Stop 426
tagtctgccagctggccttccagtt

SEQ ID NO: 140582 - DNA, 25 bp, Artificial
  probe
  misc_feature (1)..(25): SEQ ID NO: 1869; WAN024D2B_at; Start 781; Stop 805
tcaggacttcttcacaaagaatcgg

SEQ ID NO: 140583 - DNA, 25 bp, Artificial
  probe
  misc_feature (1)..(25): SEQ ID NO: 1869; WAN024D2B_at; Start 296; Stop 320
cagaagttcttgaaaaaggtcctga

SEQ ID NO: 140584 - DNA, 25 bp, Artificial
  probe
  misc_feature (1)..(25): SEQ ID NO: 1869; WAN024D2B_at; Start 638; Stop 662
cagggattgaatggattatcgtttc

SEQ ID NO: 140585 - DNA, 25 bp, Artificial
  probe
  misc_feature (1)..(25): SEQ ID NO: 1869; WAN024D2B_at; Start 666; Stop 690
tggtgccaacggtacttttgccaaa

SEQ ID NO: 140586 - DNA, 25 bp, Artificial
  probe
  misc_feature (1)..(25): SEQ ID NO: 1869; WAN024D2B_at; Start 763; Stop 787
actgtggcaggaatttcttcaggac

SEQ ID NO: 140587 - DNA, 25 bp, Artificial
  probe
  misc_feature (1)..(25): SEQ ID NO: 1869; WAN024D2B_at; Start 678; Stop 702
tacttttgccaaacatggtgacact

SEQ ID NO: 140588 - DNA, 25 bp, Artificial
  probe
  misc_feature (1)..(25): SEQ ID NO: 1869; WAN024D2B_at; Start 306; Stop 330
tgaaaaaggtcctgaagtattggaa

SEQ ID NO: 140589 - DNA, 25 bp, Artificial
  probe
  misc_feature (1)..(25): SEQ ID NO: 1869; WAN024D2B_at; Start 691; Stop 715
catggtgacactttctacaaggtag

SEQ ID NO: 140590 - DNA, 25 bp, Artificial
  probe
  misc_feature (1)..(25): SEQ ID NO: 1869; WAN024D2B_at; Start 120; Stop 144
caatgttacccgagtactttcagaa

SEQ ID NO: 140591 - DNA, 25 bp, Artificial
  probe
  misc_feature (1)..(25): SEQ ID NO: 1869; WAN024D2B_at; Start 706; Stop 730
tacaaggtagatattcctagaattc

SEQ ID NO: 140592 - DNA, 25 bp, Artificial
  probe
  misc_feature (1)..(25): SEQ ID NO: 1869; WAN024D2B_at; Start 720; Stop 744
tcctagaattcaggtggtaaatcct

SEQ ID NO: 140593 - DNA, 25 bp, Artificial
  probe
  misc_feature (1)..(25): SEQ ID NO: 1869; WAN024D2B_at; Start 47; Stop 71
ccttggatgagttgaagattgatac

SEQ ID NO: 140594 - DNA, 25 bp, Artificial
  probe
  misc_feature (1)..(25): SEQ ID NO: 1869; WAN024D2B_at; Start 99; Stop 123
aacggctggtggtaagggactcaat

SEQ ID NO: 140595 - DNA, 25 bp, Artificial
  probe
  misc_feature (1)..(25): SEQ ID NO: 1869; WAN024D2B_at; Start 391; Stop 415
gccatctcaggtagtctgccagctg

SEQ ID NO: 140596 - DNA, 25 bp, Artificial
  probe
  misc_feature (1)..(25): SEQ ID NO: 1869; WAN024D2B_at; Start 795; Stop 819
caaagaatcggatgcagaattactc

SEQ ID NO: 140597 - DNA, 25 bp, Artificial
  probe
  misc_feature (1)..(25): SEQ ID NO: 1869; WAN024D2B_at; Start 278; Stop 302
tccacggagacaaccaaacagaagt

SEQ ID NO: 140598 - DNA, 25 bp, Artificial
  probe
  misc_feature (1)..(25): SEQ ID NO: 1869; WAN024D2B_at; Start 484; Stop 508
gactgctcaggtgcagcacttcagg

SEQ ID NO: 140599 - DNA, 25 bp, Artificial
  probe
  misc_feature (1)..(25): SEQ ID NO: 1869; WAN024D2B_at; Start 559; Stop 583
gaattgtctcagcttcttggaagag

SEQ ID NO: 140600 - DNA, 25 bp, Artificial
  probe
  misc_feature (1)..(25): SEQ ID NO: 1869; WAN024D2B_at; Start 651; Stop 675
gattatcgtttcacttggtgccaac

SEQ ID NO: 140601 - DNA, 25 bp, Artificial
  probe
  misc_feature (1)..(25): SEQ ID NO: 1869; WAN024D2B_at; Start 860; Stop 884
aaatgactggtcatgtcaacatggc

SEQ ID NO: 140602 - DNA, 25 bp, Artificial
  probe
  misc_feature (1)..(25): SEQ ID NO: 1869; WAN024D2B_at; Start 825; Stop 849
ggcaaatgtccttggtatgctcaat

SEQ ID NO: 140603 - DNA, 25 bp, Artificial
  probe
  misc_feature (1)..(25): SEQ ID NO: 1869; WAN024D2B_at; Start 34; Stop 58
gatatttcctatcccttggatgagt

SEQ ID NO: 140604 - DNA, 25 bp, Artificial
  probe
  misc_feature (1)..(25): SEQ ID NO: 1869; WAN024D2B_at; Start 735; Stop 759
ggtaaatcctgttggatctggagac

SEQ ID NO: 140605 - DNA, 25 bp, Artificial
  probe
  misc_feature (1)..(25): SEQ ID NO: 1869; WAN024D2B_at; Start 200; Stop 224
tggttgaacatatcgataatcaagt

SEQ ID NO: 140606 - DNA, 25 bp, Artificial
  probe
  misc_feature (1)..(25): SEQ ID NO: 1869; WAN024D2B_at; Start 811; Stop 835
gaattactcatcaaggcaaatgtcc

SEQ ID NO: 140607 - DNA, 25 bp, Artificial
  probe
  misc_feature (1)..(25): SEQ ID NO: 3853; WAN024D2C_at; Start 21; Stop 45
aagtaaacttcgtcgtgcgcgcaaa

SEQ ID NO: 140608 - DNA, 25 bp, Artificial
  probe
  misc_feature (1)..(25): SEQ ID NO: 3853; WAN024D2C_at; Start 23; Stop 47
gtaaacttcgtcgtgcgcgcaaaca

SEQ ID NO: 140609 - DNA, 25 bp, Artificial
  probe
  misc_feature (1)..(25): SEQ ID NO: 3853; WAN024D2C_at; Start 1; Stop 25
gtgaaacgtacttatcaaccaagta

SEQ ID NO: 140610 - DNA, 25 bp, Artificial
  probe
  misc_feature (1)..(25): SEQ ID NO: 3853; WAN024D2C_at; Start 91; Stop 115
ttggcagctcgtcgtcgtaaaggac

SEQ ID NO: 140611 - DNA, 25 bp, Artificial
  probe
  misc_feature (1)..(25): SEQ ID NO: 3853; WAN024D2C_at; Start 36; Stop 60
tgcgcgcaaacacggattccgtaac

SEQ ID NO: 140612 - DNA, 25 bp, Artificial
  probe
  misc_feature (1)..(25): SEQ ID NO: 3853; WAN024D2C_at; Start 20; Stop 44
caagtaaacttcgtcgtgcgcgcaa

SEQ ID NO: 140613 - DNA, 25 bp, Artificial
  probe
  misc_feature (1)..(25): SEQ ID NO: 3853; WAN024D2C_at; Start 33; Stop 57
tcgtgcgcgcaaacacggattccgt

SEQ ID NO: 140614 - DNA, 25 bp, Artificial
  probe
  misc_feature (1)..(25): SEQ ID NO: 3853; WAN024D2C_at; Start 60; Stop 84
ccgtatgtcaactaaaaatggtcgt

SEQ ID NO: 140615 - DNA, 25 bp, Artificial
  probe
  misc_feature (1)..(25): SEQ ID NO: 3853; WAN024D2C_at; Start 42; Stop 66
caaacacggattccgtaaccgtatg

SEQ ID NO: 140616 - DNA, 25 bp, Artificial
  probe
  misc_feature (1)..(25): SEQ ID NO: 3853; WAN024D2C_at; Start 79; Stop 103
ggtcgtcgcgtattggcagctcgtc

SEQ ID NO: 140617 - DNA, 25 bp, Artificial
  probe
  misc_feature (1)..(25): SEQ ID NO: 3853; WAN024D2C_at; Start 50; Stop 74
gattccgtaaccgtatgtcaactaa

SEQ ID NO: 140618 - DNA, 25 bp, Artificial
  probe
  misc_feature (1)..(25): SEQ ID NO: 3853; WAN024D2C_at; Start 65; Stop 89
tgtcaactaaaaatggtcgtcgcgt

SEQ ID NO: 140619 - DNA, 25 bp, Artificial
  probe
  misc_feature (1)..(25): SEQ ID NO: 3853; WAN024D2C_at; Start 112; Stop 136
ggacgcaaagttttggctgcataac

SEQ ID NO: 140620 - DNA, 25 bp, Artificial
  probe
  misc_feature (1)..(25): SEQ ID NO: 3853; WAN024D2C_at; Start 17; Stop 41
aaccaagtaaacttcgtcgtgcgcg

SEQ ID NO: 140621 - DNA, 25 bp, Artificial
  probe
  misc_feature (1)..(25): SEQ ID NO: 3853; WAN024D2C_at; Start 86; Stop 110
gcgtattggcagctcgtcgtcgtaa

SEQ ID NO: 140622 - DNA, 25 bp, Artificial
  probe
  misc_feature (1)..(25): SEQ ID NO: 3853; WAN024D2C_at; Start 81; Stop 105
tcgtcgcgtattggcagctcgtcgt

SEQ ID NO: 140623 - DNA, 25 bp, Artificial
  probe
  misc_feature (1)..(25): SEQ ID NO: 3853; WAN024D2C_at; Start 76; Stop 100
aatggtcgtcgcgtattggcagctc

SEQ ID NO: 140624 - DNA, 25 bp, Artificial
  probe
  misc_feature (1)..(25): SEQ ID NO: 3853; WAN024D2C_at; Start 55; Stop 79
cgtaaccgtatgtcaactaaaaatg

SEQ ID NO: 140625 - DNA, 25 bp, Artificial
  probe
  misc_feature (1)..(25): SEQ ID NO: 3853; WAN024D2C_at; Start 106; Stop 130
cgtaaaggacgcaaagttttggctg

SEQ ID NO: 140626 - DNA, 25 bp, Artificial
  probe
  misc_feature (1)..(25): SEQ ID NO: 3853; WAN024D2C_at; Start 25; Stop 49
aaacttcgtcgtgcgcgcaaacacg

SEQ ID NO: 140627 - DNA, 25 bp, Artificial
  probe
  misc_feature (1)..(25): SEQ ID NO: 3853; WAN024D2C_at; Start 108; Stop 132
taaaggacgcaaagttttggctgca

SEQ ID NO: 140628 - DNA, 25 bp, Artificial
  probe
  misc_feature (1)..(25): SEQ ID NO: 3853; WAN024D2C_at; Start 89; Stop 113
tattggcagctcgtcgtcgtaaagg

SEQ ID NO: 140629 - DNA, 25 bp, Artificial
  probe
  misc_feature (1)..(25): SEQ ID NO: 3853; WAN024D2C_at; Start 114; Stop 138
acgcaaagttttggctgcataacta

SEQ ID NO: 140630 - DNA, 25 bp, Artificial
  probe
  misc_feature (1)..(25): SEQ ID NO: 3853; WAN024D2C_at; Start 63; Stop 87
tatgtcaactaaaaatggtcgtcgc

SEQ ID NO: 140631 - DNA, 25 bp, Artificial
  probe
  misc_feature (1)..(25): SEQ ID NO: 3853; WAN024D2C_at; Start 94; Stop 118
gcagctcgtcgtcgtaaaggacgca

SEQ ID NO: 140632 - DNA, 25 bp, Artificial
  probe
  misc_feature (1)..(25): SEQ ID NO: 3853; WAN024D2C_at; Start 67; Stop 91
tcaactaaaaatggtcgtcgcgtat

SEQ ID NO: 140633 - DNA, 25 bp, Artificial
  probe
  misc_feature (1)..(25): SEQ ID NO: 3853; WAN024D2C_at; Start 46; Stop 70
cacggattccgtaaccgtatgtcaa

SEQ ID NO: 140634 - DNA, 25 bp, Artificial
  probe
  misc_feature (1)..(25): SEQ ID NO: 3853; WAN024D2C_at; Start 96; Stop 120
agctcgtcgtcgtaaaggacgcaaa

SEQ ID NO: 140635 - DNA, 25 bp, Artificial
  probe
  misc_feature (1)..(25): SEQ ID NO: 3853; WAN024D2C_at; Start 84; Stop 108
tcgcgtattggcagctcgtcgtcgt

SEQ ID NO: 140636 - DNA, 25 bp, Artificial
  probe
  misc_feature (1)..(25): SEQ ID NO: 3853; WAN024D2C_at; Start 73; Stop 97
aaaaatggtcgtcgcgtattggcag

SEQ ID NO: 140637 - DNA, 25 bp, Artificial
  probe
  misc_feature (1)..(25): SEQ ID NO: 3853; WAN024D2C_at; Start 98; Stop 122
ctcgtcgtcgtaaaggacgcaaagt

SEQ ID NO: 140638 - DNA, 25 bp, Artificial
  probe
  misc_feature (1)..(25): SEQ ID NO: 3853; WAN024D2C_at; Start 71; Stop 95
ctaaaaatggtcgtcgcgtattggc

SEQ ID NO: 140639 - DNA, 25 bp, Artificial
  probe
  misc_feature (1)..(25): SEQ ID NO: 3853; WAN024D2C_at; Start 30; Stop 54
tcgtcgtgcgcgcaaacacggattc

SEQ ID NO: 140640 - DNA, 25 bp, Artificial
  probe
  misc_feature (1)..(25): SEQ ID NO: 3853; WAN024D2C_at; Start 35; Stop 59
gtgcgcgcaaacacggattccgtaa

SEQ ID NO: 140641 - DNA, 25 bp, Artificial
  probe
  misc_feature (1)..(25): SEQ ID NO: 3372; WAN024D2D_at; Start 694; Stop 718
caagaaattatggataaaactcaag

SEQ ID NO: 140642 - DNA, 25 bp, Artificial
  probe
  misc_feature (1)..(25): SEQ ID NO: 3372; WAN024D2D_at; Start 245; Stop 269
tacgtgaaccaatctatggtaaaga

SEQ ID NO: 140643 - DNA, 25 bp, Artificial
  probe
  misc_feature (1)..(25): SEQ ID NO: 3372; WAN024D2D_at; Start 289; Stop 313
gaagcgtgtttggaagagatttata

SEQ ID NO: 140644 - DNA, 25 bp, Artificial
  probe
  misc_feature (1)..(25): SEQ ID NO: 3372; WAN024D2D_at; Start 740; Stop 764
tatttatgtttttgtggaagcaagc

SEQ ID NO: 140645 - DNA, 25 bp, Artificial
  probe
  misc_feature (1)..(25): SEQ ID NO: 3372; WAN024D2D_at; Start 24; Stop 48
taaagagattcggatagaaaaagga

SEQ ID NO: 140646 - DNA, 25 bp, Artificial
  probe
  misc_feature (1)..(25): SEQ ID NO: 3372; WAN024D2D_at; Start 319; Stop 343
tactttgataatcttcctaaagaag

SEQ ID NO: 140647 - DNA, 25 bp, Artificial
  probe
  misc_feature (1)..(25): SEQ ID NO: 3372; WAN024D2D_at; Start 231; Stop 255
gaaataccagattttacgtgaacca

SEQ ID NO: 140648 - DNA, 25 bp, Artificial
  probe
  misc_feature (1)..(25): SEQ ID NO: 3372; WAN024D2D_at; Start 675; Stop 699
tgattatctatcgtgtttacaagaa

SEQ ID NO: 140649 - DNA, 25 bp, Artificial
  probe
  misc_feature (1)..(25): SEQ ID NO: 3372; WAN024D2D_at; Start 334; Stop 358
cctaaagaagaacaattagcatgtg

SEQ ID NO: 140650 - DNA, 25 bp, Artificial
  probe
  misc_feature (1)..(25): SEQ ID NO: 3372; WAN024D2D_at; Start 84; Stop 108
actgacagttcgtcaactgtcgcga

SEQ ID NO: 140651 - DNA, 25 bp, Artificial
  probe
  misc_feature (1)..(25): SEQ ID NO: 3372; WAN024D2D_at; Start 804; Stop 828
ttatcagtcttctaaaacatttgcg

SEQ ID NO: 140652 - DNA, 25 bp, Artificial
  probe
  misc_feature (1)..(25): SEQ ID NO: 3372; WAN024D2D_at; Start 185; Stop 209
gccttatgccggatttttcagctct

SEQ ID NO: 140653 - DNA, 25 bp, Artificial
  probe
  misc_feature (1)..(25): SEQ ID NO: 3372; WAN024D2D_at; Start 385; Stop 409
tctagaactagaaggcctgaatatg

SEQ ID NO: 140654 - DNA, 25 bp, Artificial
  probe
  misc_feature (1)..(25): SEQ ID NO: 3372; WAN024D2D_at; Start 713; Stop 737
ctcaagattatcaaaagaaacctct

SEQ ID NO: 140655 - DNA, 25 bp, Artificial
  probe
  misc_feature (1)..(25): SEQ ID NO: 3372; WAN024D2D_at; Start 874; Stop 898
tggcaagaggatgtcaaaaaatatt

SEQ ID NO: 140656 - DNA, 25 bp, Artificial
  probe
  misc_feature (1)..(25): SEQ ID NO: 3372; WAN024D2D_at; Start 748; Stop 772
tttttgtggaagcaagcattaagag

SEQ ID NO: 140657 - DNA, 25 bp, Artificial
  probe
  misc_feature (1)..(25): SEQ ID NO: 3372; WAN024D2D_at; Start 506; Stop 530
tgctcattagaaaagatcttgccaa

SEQ ID NO: 140658 - DNA, 25 bp, Artificial
  probe
  misc_feature (1)..(25): SEQ ID NO: 3372; WAN024D2D_at; Start 552; Stop 576
gctaatgctctttcttttggaacag

SEQ ID NO: 140659 - DNA, 25 bp, Artificial
  probe
  misc_feature (1)..(25): SEQ ID NO: 3372; WAN024D2D_at; Start 350; Stop 374
tagcatgtgaagtattgcaggcgtg

SEQ ID NO: 140660 - DNA, 25 bp, Artificial
  probe
  misc_feature (1)..(25): SEQ ID NO: 3372; WAN024D2D_at; Start 860; Stop 884
aattgacagaggaatggcaagagga

SEQ ID NO: 140661 - DNA, 25 bp, Artificial
  probe
  misc_feature (1)..(25): SEQ ID NO: 3372; WAN024D2D_at; Start 58; Stop 82
ccagatttttgtggagatgagcaag

SEQ ID NO: 140662 - DNA, 25 bp, Artificial
  probe
  misc_feature (1)..(25): SEQ ID NO: 3372; WAN024D2D_at; Start 642; Stop 666
tcttgaaaaggtaggagtaactgat

SEQ ID NO: 140663 - DNA, 25 bp, Artificial
  probe
  misc_feature (1)..(25): SEQ ID NO: 3372; WAN024D2D_at; Start 409; Stop 433
gcagagttaatacttgaggaacata

SEQ ID NO: 140664 - DNA, 25 bp, Artificial
  probe
  misc_feature (1)..(25): SEQ ID NO: 3372; WAN024D2D_at; Start 170; Stop 194
gagttccagtttatagccttatgcc

SEQ ID NO: 140665 - DNA, 25 bp, Artificial
  probe
  misc_feature (1)..(25): SEQ ID NO: 3372; WAN024D2D_at; Start 274; Stop 298
gagtacgataagaaggaagcgtgtt

SEQ ID NO: 140666 - DNA, 25 bp, Artificial
  probe
  misc_feature (1)..(25): SEQ ID NO: 3372; WAN024D2D_at; Start 367; Stop 391
caggcgtgtttggatacttctagaa

SEQ ID NO: 140667 - DNA, 25 bp, Artificial
  probe
  misc_feature (1)..(25): SEQ ID NO: 3372; WAN024D2D_at; Start 115; Stop 139
agtggagcttcgcaaccgagtttgc

SEQ ID NO: 140668 - DNA, 25 bp, Artificial
  probe
  misc_feature (1)..(25): SEQ ID NO: 3372; WAN024D2D_at; Start 775; Stop 799
gaaagagattttagtttagctgaat

SEQ ID NO: 140669 - DNA, 25 bp, Artificial
  probe
  misc_feature (1)..(25): SEQ ID NO: 3372; WAN024D2D_at; Start 97; Stop 121
caactgtcgcgaattgaaagtggag

SEQ ID NO: 140670 - DNA, 25 bp, Artificial
  probe
  misc_feature (1)..(25): SEQ ID NO: 3372; WAN024D2D_at; Start 257; Stop 281
tctatggtaaagaagaggagtacga

SEQ ID NO: 140671 - DNA, 25 bp, Artificial
  probe
  misc_feature (1)..(25): SEQ ID NO: 3372; WAN024D2D_at; Start 612; Stop 636
tagagatactcttatttcaggaatg

SEQ ID NO: 140672 - DNA, 25 bp, Artificial
  probe
  misc_feature (1)..(25): SEQ ID NO: 3372; WAN024D2D_at; Start 628; Stop 652
tcaggaatgtgttgtcttgaaaagg

SEQ ID NO: 140673 - DNA, 25 bp, Artificial
  probe
  misc_feature (1)..(25): SEQ ID NO: 3372; WAN024D2D_at; Start 108; Stop 132
aattgaaagtggagcttcgcaaccg

SEQ ID NO: 140674 - DNA, 25 bp, Artificial
  probe
  misc_feature (1)..(25): SEQ ID NO: 3372; WAN024D2D_at; Start 395; Stop 419
gaaggcctgaatatgcagagttaat

SEQ ID NO: 140675 - DNA, 25 bp, Artificial
  probe
  misc_feature (1)..(25): SEQ ID NO: 1843; WAN024D2E_at; Start 580; Stop 604
aatcccctagtctggaataaggctg

SEQ ID NO: 140676 - DNA, 25 bp, Artificial
  probe
  misc_feature (1)..(25): SEQ ID NO: 1843; WAN024D2E_at; Start 529; Stop 553
ctcttggtggatttgaaagatgaaa

SEQ ID NO: 140677 - DNA, 25 bp, Artificial
  probe
  misc_feature (1)..(25): SEQ ID NO: 1843; WAN024D2E_at; Start 195; Stop 219
aaaaaccattcccactcgtgagtat

SEQ ID NO: 140678 - DNA, 25 bp, Artificial
  probe
  misc_feature (1)..(25): SEQ ID NO: 1843; WAN024D2E_at; Start 115; Stop 139
ggaaagacgacgctgctgaatatct

SEQ ID NO: 140679 - DNA, 25 bp, Artificial
  probe
  misc_feature (1)..(25): SEQ ID NO: 1843; WAN024D2E_at; Start 213; Stop 237
tgagtattttcgagaccagatgggc

SEQ ID NO: 140680 - DNA, 25 bp, Artificial
  probe
  misc_feature (1)..(25): SEQ ID NO: 1843; WAN024D2E_at; Start 297; Stop 321
gggttttgttggtcagaaaatctca

SEQ ID NO: 140681 - DNA, 25 bp, Artificial
  probe
  misc_feature (1)..(25): SEQ ID NO: 1843; WAN024D2E_at; Start 33; Stop 57
taatgaccgcgcgattttctctggt

SEQ ID NO: 140682 - DNA, 25 bp, Artificial
  probe
  misc_feature (1)..(25): SEQ ID NO: 1843; WAN024D2E_at; Start 446; Stop 470
ctattttgaaaaatccacccttgat

SEQ ID NO: 140683 - DNA, 25 bp, Artificial
  probe
  misc_feature (1)..(25): SEQ ID NO: 1843; WAN024D2E_at; Start 50; Stop 74
tctctggtttgaatctcaagctgga

SEQ ID NO: 140684 - DNA, 25 bp, Artificial
  probe
  misc_feature (1)..(25): SEQ ID NO: 1843; WAN024D2E_at; Start 516; Stop 540
ggaggttatgaatctcttggtggat

SEQ ID NO: 140685 - DNA, 25 bp, Artificial
  probe
  misc_feature (1)..(25): SEQ ID NO: 1843; WAN024D2E_at; Start 556; Stop 580
cgaattatcatcattgcgacccata

SEQ ID NO: 140686 - DNA, 25 bp, Artificial
  probe
  misc_feature (1)..(25): SEQ ID NO: 1843; WAN024D2E_at; Start 275; Stop 299
caatcaaagaaaatttggatttggg

SEQ ID NO: 140687 - DNA, 25 bp, Artificial
  probe
  misc_feature (1)..(25): SEQ ID NO: 1843; WAN024D2E_at; Start 22; Stop 46
gaaaagaaatttaatgaccgcgcga

SEQ ID NO: 140688 - DNA, 25 bp, Artificial
  probe
  misc_feature (1)..(25): SEQ ID NO: 1843; WAN024D2E_at; Start 424; Stop 448
caacgagttgcccttgctaagacta

SEQ ID NO: 140689 - DNA, 25 bp, Artificial
  probe
  misc_feature (1)..(25): SEQ ID NO: 1843; WAN024D2E_at; Start 475; Stop 499
gcagatgaaccaacagcagctcttg

SEQ ID NO: 140690 - DNA, 25 bp, Artificial
  probe
  misc_feature (1)..(25): SEQ ID NO: 1843; WAN024D2E_at; Start 456; Stop 480
aaatccacccttgattttggcagat

SEQ ID NO: 140691 - DNA, 25 bp, Artificial
  probe
  misc_feature (1)..(25): SEQ ID NO: 1843; WAN024D2E_at; Start 471; Stop 495
tttggcagatgaaccaacagcagct

SEQ ID NO: 140692 - DNA, 25 bp, Artificial
  probe
  misc_feature (1)..(25): SEQ ID NO: 1843; WAN024D2E_at; Start 416; Stop 440
gagaggcccaacgagttgcccttgc

SEQ ID NO: 140693 - DNA, 25 bp, Artificial
  probe
  misc_feature (1)..(25): SEQ ID NO: 1843; WAN024D2E_at; Start 611; Stop 635
tcattgatatgaggaaacttgctca

SEQ ID NO: 140694 - DNA, 25 bp, Artificial
  probe
  misc_feature (1)..(25): SEQ ID NO: 1843; WAN024D2E_at; Start 490; Stop 514
gcagctcttgatcctgaaaattcag

SEQ ID NO: 140695 - DNA, 25 bp, Artificial
  probe
  misc_feature (1)..(25): SEQ ID NO: 1843; WAN024D2E_at; Start 3; Stop 27
gattgatattcaaggattggaaaag

SEQ ID NO: 140696 - DNA, 25 bp, Artificial
  probe
  misc_feature (1)..(25): SEQ ID NO: 1843; WAN024D2E_at; Start 76; Stop 100
aagggcaaggtttatgccttaatcg

SEQ ID NO: 140697 - DNA, 25 bp, Artificial
  probe
  misc_feature (1)..(25): SEQ ID NO: 1843; WAN024D2E_at; Start 502; Stop 526
cctgaaaattcagaggaggttatga

SEQ ID NO: 140698 - DNA, 25 bp, Artificial
  probe
  misc_feature (1)..(25): SEQ ID NO: 1843; WAN024D2E_at; Start 324; Stop 348
agtagaacgtttggaaaggcaagtg

SEQ ID NO: 140699 - DNA, 25 bp, Artificial
  probe
  misc_feature (1)..(25): SEQ ID NO: 1843; WAN024D2E_at; Start 222; Stop 246
tcgagaccagatgggctatctcttt

SEQ ID NO: 140700 - DNA, 25 bp, Artificial
  probe
  misc_feature (1)..(25): SEQ ID NO: 1843; WAN024D2E_at; Start 309; Stop 333
tcagaaaatctcaaaagtagaacgt

SEQ ID NO: 140701 - DNA, 25 bp, Artificial
  probe
  misc_feature (1)..(25): SEQ ID NO: 1843; WAN024D2E_at; Start 369; Stop 393
tctagggtatttggatttagaacaa

SEQ ID NO: 140702 - DNA, 25 bp, Artificial
  probe
  misc_feature (1)..(25): SEQ ID NO: 1843; WAN024D2E_at; Start 430; Stop 454
gttgcccttgctaagactattttga

SEQ ID NO: 140703 - DNA, 25 bp, Artificial
  probe
  misc_feature (1)..(25): SEQ ID NO: 1843; WAN024D2E_at; Start 89; Stop 113
atgccttaatcggaaagagtggaag

SEQ ID NO: 140704 - DNA, 25 bp, Artificial
  probe
  misc_feature (1)..(25): SEQ ID NO: 1843; WAN024D2E_at; Start 256; Stop 280
ggcctcttagaaaaccaatcaatca

SEQ ID NO: 140705 - DNA, 25 bp, Artificial
  probe
  misc_feature (1)..(25): SEQ ID NO: 1843; WAN024D2E_at; Start 138; Stop 162
cttgggaaagctagaaaagatagat

SEQ ID NO: 140706 - DNA, 25 bp, Artificial
  probe
  misc_feature (1)..(25): SEQ ID NO: 1843; WAN024D2E_at; Start 570; Stop 594
tgcgacccataatcccctagtctgg

SEQ ID NO: 140707 - DNA, 25 bp, Artificial
  probe
  misc_feature (1)..(25): SEQ ID NO: 1843; WAN024D2E_at; Start 122; Stop 146
cgacgctgctgaatatcttgggaaa

SEQ ID NO: 140708 - DNA, 25 bp, Artificial
  probe
  misc_feature (1)..(25): SEQ ID NO: 1843; WAN024D2E_at; Start 64; Stop 88
ctcaagctggagaagggcaaggttt

SEQ ID NO: 140709 - DNA, 25 bp, Artificial
  probe
  misc_feature (1)..(25): SEQ ID NO: 1334; WAN024D2F_at; Start 311; Stop 335
tcaataaactgctcttgacgggtaa

SEQ ID NO: 140710 - DNA, 25 bp, Artificial
  probe
  misc_feature (1)..(25): SEQ ID NO: 1334; WAN024D2F_at; Start 357; Stop 381
tacggttgatgagacctatttgaaa

SEQ ID NO: 140711 - DNA, 25 bp, Artificial
  probe
  misc_feature (1)..(25): SEQ ID NO: 1334; WAN024D2F_at; Start 178; Stop 202
gatgacattattttcatcgcggaaa

SEQ ID NO: 140712 - DNA, 25 bp, Artificial
  probe
  misc_feature (1)..(25): SEQ ID NO: 1334; WAN024D2F_at; Start 228; Stop 252
tcaggacttgtatgaagcgactatg

SEQ ID NO: 140713 - DNA, 25 bp, Artificial
  probe
  misc_feature (1)..(25): SEQ ID NO: 1334; WAN024D2F_at; Start 451; Stop 475
aaatttacaaccaacttcacagaag

SEQ ID NO: 140714 - DNA, 25 bp, Artificial
  probe
  misc_feature (1)..(25): SEQ ID NO: 1334; WAN024D2F_at; Start 368; Stop 392
agacctatttgaaagtgagtcagca

SEQ ID NO: 140715 - DNA, 25 bp, Artificial
  probe
  misc_feature (1)..(25): SEQ ID NO: 1334; WAN024D2F_at; Start 222; Stop 246
tcaaggtcaggacttgtatgaagcg

SEQ ID NO: 140716 - DNA, 25 bp, Artificial
  probe
  misc_feature (1)..(25): SEQ ID NO: 1334; WAN024D2F_at; Start 25; Stop 49
gatatggacggaaccttcctagatg

SEQ ID NO: 140717 - DNA, 25 bp, Artificial
  probe
  misc_feature (1)..(25): SEQ ID NO: 1334; WAN024D2F_at; Start 560; Stop 584
ttgttctggactatgtcgataaggg

SEQ ID NO: 140718 - DNA, 25 bp, Artificial
  probe
  misc_feature (1)..(25): SEQ ID NO: 1334; WAN024D2F_at; Start 631; Stop 655
caggtcatggcttttggagacaatc

SEQ ID NO: 140719 - DNA, 25 bp, Artificial
  probe
  misc_feature (1)..(25): SEQ ID NO: 1334; WAN024D2F_at; Start 190; Stop 214
ttcatcgcggaaaatggcagtttgg

SEQ ID NO: 140720 - DNA, 25 bp, Artificial
  probe
  misc_feature (1)..(25): SEQ ID NO: 1334; WAN024D2F_at; Start 199; Stop 223
gaaaatggcagtttggtagagtatc

SEQ ID NO: 140721 - DNA, 25 bp, Artificial
  probe
  misc_feature (1)..(25): SEQ ID NO: 1334; WAN024D2F_at; Start 17; Stop 41
tagcaacggatatggacggaacctt

SEQ ID NO: 140722 - DNA, 25 bp, Artificial
  probe
  misc_feature (1)..(25): SEQ ID NO: 1334; WAN024D2F_at; Start 458; Stop 482
caaccaacttcacagaagaaacgct

SEQ ID NO: 140723 - DNA, 25 bp, Artificial
  probe
  misc_feature (1)..(25): SEQ ID NO: 1334; WAN024D2F_at; Start 420; Stop 444
gagtttggaagatatcacagatgac

SEQ ID NO: 140724 - DNA, 25 bp, Artificial
  probe
  misc_feature (1)..(25): SEQ ID NO: 1334; WAN024D2F_at; Start 654; Stop 678
tcttaatgacttacatatgatgcag

SEQ ID NO: 140725 - DNA, 25 bp, Artificial
  probe
  misc_feature (1)..(25): SEQ ID NO: 1334; WAN024D2F_at; Start 247; Stop 271
actatgtctcgtgacttttatctgg

SEQ ID NO: 140726 - DNA, 25 bp, Artificial
  probe
  misc_feature (1)..(25): SEQ ID NO: 1334; WAN024D2F_at; Start 435; Stop 459
cacagatgacattttcaaatttaca

SEQ ID NO: 140727 - DNA, 25 bp, Artificial
  probe
  misc_feature (1)..(25): SEQ ID NO: 1334; WAN024D2F_at; Start 679; Stop 703
gttgtgggacatcctgtagctcctg

SEQ ID NO: 140728 - DNA, 25 bp, Artificial
  probe
  misc_feature (1)..(25): SEQ ID NO: 1334; WAN024D2F_at; Start 413; Stop 437
aagtagcgagtttggaagatatcac

SEQ ID NO: 140729 - DNA, 25 bp, Artificial
  probe
  misc_feature (1)..(25): SEQ ID NO: 1334; WAN024D2F_at; Start 210; Stop 234
tttggtagagtatcaaggtcaggac

SEQ ID NO: 140730 - DNA, 25 bp, Artificial
  probe
  misc_feature (1)..(25): SEQ ID NO: 1334; WAN024D2F_at; Start 667; Stop 691
catatgatgcaggttgtgggacatc

SEQ ID NO: 140731 - DNA, 25 bp, Artificial
  probe
  misc_feature (1)..(25): SEQ ID NO: 1334; WAN024D2F_at; Start 553; Stop 577
attgatattgttctggactatgtcg

SEQ ID NO: 140732 - DNA, 25 bp, Artificial
  probe
  misc_feature (1)..(25): SEQ ID NO: 1334; WAN024D2F_at; Start 307; Stop 331
gatatcaataaactgctcttgacgg

SEQ ID NO: 140733 - DNA, 25 bp, Artificial
  probe
  misc_feature (1)..(25): SEQ ID NO: 1334; WAN024D2F_at; Start 128; Stop 152
cttcgggtcggggatttctgtctct

SEQ ID NO: 140734 - DNA, 25 bp, Artificial
  probe
  misc_feature (1)..(25): SEQ ID NO: 1334; WAN024D2F_at; Start 337; Stop 361
aagggttcatatgttctagatacgg

SEQ ID NO: 140735 - DNA, 25 bp, Artificial
  probe
  misc_feature (1)..(25): SEQ ID NO: 1334; WAN024D2F_at; Start 238; Stop 262
tatgaagcgactatgtctcgtgact

SEQ ID NO: 140736 - DNA, 25 bp, Artificial
  probe
  misc_feature (1)..(25): SEQ ID NO: 1334; WAN024D2F_at; Start 2; Stop 26
tgacaattaaactagtagcaacgga

SEQ ID NO: 140737 - DNA, 25 bp, Artificial
  probe
  misc_feature (1)..(25): SEQ ID NO: 1334; WAN024D2F_at; Start 725; Stop 749
tagaattagcaaagactgtgattgg

SEQ ID NO: 140738 - DNA, 25 bp, Artificial
  probe
  misc_feature (1)..(25): SEQ ID NO: 1334; WAN024D2F_at; Start 639; Stop 663
ggcttttggagacaatcttaatgac

SEQ ID NO: 140739 - DNA, 25 bp, Artificial
  probe
  misc_feature (1)..(25): SEQ ID NO: 1334; WAN024D2F_at; Start 399; Stop 423
tgaaaatatccaaaaagtagcgagt

SEQ ID NO: 140740 - DNA, 25 bp, Artificial
  probe
  misc_feature (1)..(25): SEQ ID NO: 1334; WAN024D2F_at; Start 351; Stop 375
tctagatacggttgatgagacctat

SEQ ID NO: 140741 - DNA, 25 bp, Artificial
  probe
  misc_feature (1)..(25): SEQ ID NO: 1334; WAN024D2F_at; Start 9; Stop 33
taaactagtagcaacggatatggac

SEQ ID NO: 140742 - DNA, 25 bp, Artificial
  probe
  misc_feature (1)..(25): SEQ ID NO: 1334; WAN024D2F_at; Start 620; Stop 644
tcacaatggatcaggtcatggcttt

SEQ ID NO: 140743 - DNA, 25 bp, Artificial
  probe
  misc_feature (1)..(25): SEQ ID NO: 1906; WAN024D2G_at; Start 118; Stop 142
gatggcacagtggaaatcttagccc

SEQ ID NO: 140744 - DNA, 25 bp, Artificial
  probe
  misc_feature (1)..(25): SEQ ID NO: 1906; WAN024D2G_at; Start 9; Stop 33
ggttagaatgattgcccaaggtagg

SEQ ID NO: 140745 - DNA, 25 bp, Artificial
  probe
  misc_feature (1)..(25): SEQ ID NO: 1906; WAN024D2G_at; Start 1; Stop 25
atgcaaaaggttagaatgattgccc

SEQ ID NO: 140746 - DNA, 25 bp, Artificial
  probe
  misc_feature (1)..(25): SEQ ID NO: 1906; WAN024D2G_at; Start 107; Stop 131
ggaataacgacgatggcacagtgga

SEQ ID NO: 140747 - DNA, 25 bp, Artificial
  probe
  misc_feature (1)..(25): SEQ ID NO: 1906; WAN024D2G_at; Start 6; Stop 30
aaaggttagaatgattgcccaaggt

SEQ ID NO: 140748 - DNA, 25 bp, Artificial
  probe
  misc_feature (1)..(25): SEQ ID NO: 1906; WAN024D2G_at; Start 112; Stop 136
aacgacgatggcacagtggaaatct

SEQ ID NO: 140749 - DNA, 25 bp, Artificial
  probe
  misc_feature (1)..(25): SEQ ID NO: 1906; WAN024D2G_at; Start 117; Stop 141
cgatggcacagtggaaatcttagcc

SEQ ID NO: 140750 - DNA, 25 bp, Artificial
  probe
  misc_feature (1)..(25): SEQ ID NO: 1906; WAN024D2G_at; Start 124; Stop 148
acagtggaaatcttagcccaagcag

SEQ ID NO: 140751 - DNA, 25 bp, Artificial
  probe
  misc_feature (1)..(25): SEQ ID NO: 1906; WAN024D2G_at; Start 166; Stop 190
gcaaaatttatccaagaaatccgaa

SEQ ID NO: 140752 - DNA, 25 bp, Artificial
  probe
  misc_feature (1)..(25): SEQ ID NO: 1906; WAN024D2G_at; Start 120; Stop 144
tggcacagtggaaatcttagcccaa

SEQ ID NO: 140753 - DNA, 25 bp, Artificial
  probe
  misc_feature (1)..(25): SEQ ID NO: 1906; WAN024D2G_at; Start 103; Stop 127
gtatggaataacgacgatggcacag

SEQ ID NO: 140754 - DNA, 25 bp, Artificial
  probe
  misc_feature (1)..(25): SEQ ID NO: 1906; WAN024D2G_at; Start 4; Stop 28
caaaaggttagaatgattgcccaag

SEQ ID NO: 140755 - DNA, 25 bp, Artificial
  probe
  misc_feature (1)..(25): SEQ ID NO: 1906; WAN024D2G_at; Start 164; Stop 188
tggcaaaatttatccaagaaatccg

SEQ ID NO: 140756 - DNA, 25 bp, Artificial
  probe
  misc_feature (1)..(25): SEQ ID NO: 1906; WAN024D2G_at; Start 10; Stop 34
gttagaatgattgcccaaggtaggg

SEQ ID NO: 140757 - DNA, 25 bp, Artificial
  probe
  misc_feature (1)..(25): SEQ ID NO: 1906; WAN024D2G_at; Start 37; Stop 61
cagggagtcggctttcgttggggtg

SEQ ID NO: 140758 - DNA, 25 bp, Artificial
  probe
  misc_feature (1)..(25): SEQ ID NO: 1906; WAN024D2G_at; Start 2; Stop 26
tgcaaaaggttagaatgattgccca

SEQ ID NO: 140759 - DNA, 25 bp, Artificial
  probe
  misc_feature (1)..(25): SEQ ID NO: 1906; WAN024D2G_at; Start 125; Stop 149
cagtggaaatcttagcccaagcaga

SEQ ID NO: 140760 - DNA, 25 bp, Artificial
  probe
  misc_feature (1)..(25): SEQ ID NO: 1906; WAN024D2G_at; Start 106; Stop 130
tggaataacgacgatggcacagtgg

SEQ ID NO: 140761 - DNA, 25 bp, Artificial
  probe
  misc_feature (1)..(25): SEQ ID NO: 1906; WAN024D2G_at; Start 126; Stop 150
agtggaaatcttagcccaagcagac

SEQ ID NO: 140762 - DNA, 25 bp, Artificial
  probe
  misc_feature (1)..(25): SEQ ID NO: 1906; WAN024D2G_at; Start 121; Stop 145
ggcacagtggaaatcttagcccaag

SEQ ID NO: 140763 - DNA, 25 bp, Artificial
  probe
  misc_feature (1)..(25): SEQ ID NO: 1906; WAN024D2G_at; Start 127; Stop 151
gtggaaatcttagcccaagcagact

SEQ ID NO: 140764 - DNA, 25 bp, Artificial
  probe
  misc_feature (1)..(25): SEQ ID NO: 1906; WAN024D2G_at; Start 109; Stop 133
aataacgacgatggcacagtggaaa

SEQ ID NO: 140765 - DNA, 25 bp, Artificial
  probe
  misc_feature (1)..(25): SEQ ID NO: 1906; WAN024D2G_at; Start 5; Stop 29
aaaaggttagaatgattgcccaagg

SEQ ID NO: 140766 - DNA, 25 bp, Artificial
  probe
  misc_feature (1)..(25): SEQ ID NO: 1906; WAN024D2G_at; Start 7; Stop 31
aaggttagaatgattgcccaaggta

SEQ ID NO: 140767 - DNA, 25 bp, Artificial
  probe
  misc_feature (1)..(25): SEQ ID NO: 1906; WAN024D2G_at; Start 108; Stop 132
gaataacgacgatggcacagtggaa

SEQ ID NO: 140768 - DNA, 25 bp, Artificial
  probe
  misc_feature (1)..(25): SEQ ID NO: 1906; WAN024D2G_at; Start 131; Stop 155
aaatcttagcccaagcagactcatc

SEQ ID NO: 140769 - DNA, 25 bp, Artificial
  probe
  misc_feature (1)..(25): SEQ ID NO: 1906; WAN024D2G_at; Start 114; Stop 138
cgacgatggcacagtggaaatctta

SEQ ID NO: 140770 - DNA, 25 bp, Artificial
  probe
  misc_feature (1)..(25): SEQ ID NO: 1906; WAN024D2G_at; Start 111; Stop 135
taacgacgatggcacagtggaaatc

SEQ ID NO: 140771 - DNA, 25 bp, Artificial
  probe
  misc_feature (1)..(25): SEQ ID NO: 1906; WAN024D2G_at; Start 115; Stop 139
gacgatggcacagtggaaatcttag

SEQ ID NO: 140772 - DNA, 25 bp, Artificial
  probe
  misc_feature (1)..(25): SEQ ID NO: 1906; WAN024D2G_at; Start 123; Stop 147
cacagtggaaatcttagcccaagca

SEQ ID NO: 140773 - DNA, 25 bp, Artificial
  probe
  misc_feature (1)..(25): SEQ ID NO: 1906; WAN024D2G_at; Start 130; Stop 154
gaaatcttagcccaagcagactcat

SEQ ID NO: 140774 - DNA, 25 bp, Artificial
  probe
  misc_feature (1)..(25): SEQ ID NO: 1906; WAN024D2G_at; Start 104; Stop 128
tatggaataacgacgatggcacagt

SEQ ID NO: 140775 - DNA, 25 bp, Artificial
  probe
  misc_feature (1)..(25): SEQ ID NO: 1906; WAN024D2G_at; Start 116; Stop 140
acgatggcacagtggaaatcttagc

SEQ ID NO: 140776 - DNA, 25 bp, Artificial
  probe
  misc_feature (1)..(25): SEQ ID NO: 1906; WAN024D2G_at; Start 122; Stop 146
gcacagtggaaatcttagcccaagc

SEQ ID NO: 140777 - DNA, 25 bp, Artificial
  probe
  misc_feature (1)..(25): SEQ ID NO: 601; WAN024D2H_at; Start 259; Stop 283
gagactacaggtggttcttccgatg

SEQ ID NO: 140778 - DNA, 25 bp, Artificial
  probe
  misc_feature (1)..(25): SEQ ID NO: 601; WAN024D2H_at; Start 653; Stop 677
gcaatgtcccaattagcttttcaac

SEQ ID NO: 140779 - DNA, 25 bp, Artificial
  probe
  misc_feature (1)..(25): SEQ ID NO: 601; WAN024D2H_at; Start 488; Stop 512
ccaaagacttgattgattacgtcag

SEQ ID NO: 140780 - DNA, 25 bp, Artificial
  probe
  misc_feature (1)..(25): SEQ ID NO: 601; WAN024D2H_at; Start 880; Stop 904
gataaccctgttagcgaagaagaac

SEQ ID NO: 140781 - DNA, 25 bp, Artificial
  probe
  misc_feature (1)..(25): SEQ ID NO: 601; WAN024D2H_at; Start 825; Stop 849
tgataagaaggttgtagcttcggct

SEQ ID NO: 140782 - DNA, 25 bp, Artificial
  probe
  misc_feature (1)..(25): SEQ ID NO: 601; WAN024D2H_at; Start 912; Stop 936
gcatccggacgcgaaaaacaactac

SEQ ID NO: 140783 - DNA, 25 bp, Artificial
  probe
  misc_feature (1)..(25): SEQ ID NO: 601; WAN024D2H_at; Start 756; Stop 780
taatggtcgtattgttgccggtaca

SEQ ID NO: 140784 - DNA, 25 bp, Artificial
  probe
  misc_feature (1)..(25): SEQ ID NO: 601; WAN024D2H_at; Start 310; Stop 334
tacatgcaaacatcgcaaaatatgg

SEQ ID NO: 140785 - DNA, 25 bp, Artificial
  probe
  misc_feature (1)..(25): SEQ ID NO: 601; WAN024D2H_at; Start 173; Stop 197
tcgttacggttggtgttcaacatgc

SEQ ID NO: 140786 - DNA, 25 bp, Artificial
  probe
  misc_feature (1)..(25): SEQ ID NO: 601; WAN024D2H_at; Start 157; Stop 181
gctggtgcctatcaattcgttacgg

SEQ ID NO: 140787 - DNA, 25 bp, Artificial
  probe
  misc_feature (1)..(25): SEQ ID NO: 601; WAN024D2H_at; Start 637; Stop 661
cgtacagaggtaatcagcaatgtcc

SEQ ID NO: 140788 - DNA, 25 bp, Artificial
  probe
  misc_feature (1)..(25): SEQ ID NO: 601; WAN024D2H_at; Start 791; Stop 815
accgcgatggtaatgtgggagacat

SEQ ID NO: 140789 - DNA, 25 bp, Artificial
  probe
  misc_feature (1)..(25): SEQ ID NO: 601; WAN024D2H_at; Start 450; Stop 474
tacagtcacagcagtcaatgatcag

SEQ ID NO: 140790 - DNA, 25 bp, Artificial
  probe
  misc_feature (1)..(25): SEQ ID NO: 601; WAN024D2H_at; Start 727; Stop 751
tatactcaaatagctcacccagatc

SEQ ID NO: 140791 - DNA, 25 bp, Artificial
  probe
  misc_feature (1)..(25): SEQ ID NO: 601; WAN024D2H_at; Start 543; Stop 567
cacctatgaagaggatgggcaaacc

SEQ ID NO: 140792 - DNA, 25 bp, Artificial
  probe
  misc_feature (1)..(25): SEQ ID NO: 601; WAN024D2H_at; Start 141; Stop 165
cacagaagataaggaagctggtgcc

SEQ ID NO: 140793 - DNA, 25 bp, Artificial
  probe
  misc_feature (1)..(25): SEQ ID NO: 601; WAN024D2H_at; Start 742; Stop 766
cacccagatcttcgtaatggtcgta

SEQ ID NO: 140794 - DNA, 25 bp, Artificial
  probe
  misc_feature (1)..(25): SEQ ID NO: 601; WAN024D2H_at; Start 112; Stop 136
gatattcgccaagtccttaaagtaa

SEQ ID NO: 140795 - DNA, 25 bp, Artificial
  probe
  misc_feature (1)..(25): SEQ ID NO: 601; WAN024D2H_at; Start 367; Stop 391
gatatcgaactcaagtactttggag

SEQ ID NO: 140796 - DNA, 25 bp, Artificial
  probe
  misc_feature (1)..(25): SEQ ID NO: 601; WAN024D2H_at; Start 354; Stop 378
aacagctggtaaggatatcgaactc

SEQ ID NO: 140797 - DNA, 25 bp, Artificial
  probe
  misc_feature (1)..(25): SEQ ID NO: 601; WAN024D2H_at; Start 989; Stop 1013
ccgttaaaaccctacaagatgcgat

SEQ ID NO: 140798 - DNA, 25 bp, Artificial
  probe
  misc_feature (1)..(25): SEQ ID NO: 601; WAN024D2H_at; Start 694; Stop 718
ccaagtgctggtctcatgtttagtc

SEQ ID NO: 140799 - DNA, 25 bp, Artificial
  probe
  misc_feature (1)..(25): SEQ ID NO: 601; WAN024D2H_at; Start 469; Stop 493
gatcagacctttgatagttccaaag

SEQ ID NO: 140800 - DNA, 25 bp, Artificial
  probe
  misc_feature (1)..(25): SEQ ID NO: 601; WAN024D2H_at; Start 668; Stop 692
gcttttcaacagctggtattggcgg

SEQ ID NO: 140801 - DNA, 25 bp, Artificial
  probe
  misc_feature (1)..(25): SEQ ID NO: 601; WAN024D2H_at; Start 325; Stop 349
caaaatatggccaagtatcaaggac

SEQ ID NO: 140802 - DNA, 25 bp, Artificial
  probe
  misc_feature (1)..(25): SEQ ID NO: 601; WAN024D2H_at; Start 931; Stop 955
aactaccaaacagccctagaagcgg

SEQ ID NO: 140803 - DNA, 25 bp, Artificial
  probe
  misc_feature (1)..(25): SEQ ID NO: 601; WAN024D2H_at; Start 224; Stop 248
ggttgacaccttttacagatattcg

SEQ ID NO: 140804 - DNA, 25 bp, Artificial
  probe
  misc_feature (1)..(25): SEQ ID NO: 601; WAN024D2H_at; Start 558; Stop 582
tgggcaaaccaagtctgcagaagga

SEQ ID NO: 140805 - DNA, 25 bp, Artificial
  probe
  misc_feature (1)..(25): SEQ ID NO: 601; WAN024D2H_at; Start 209; Stop 233
atatgatttatgcttggttgacacc

SEQ ID NO: 140806 - DNA, 25 bp, Artificial
  probe
  misc_feature (1)..(25): SEQ ID NO: 601; WAN024D2H_at; Start 775; Stop 799
ggtacaggtaccattgaccgcgatg

SEQ ID NO: 140807 - DNA, 25 bp, Artificial
  probe
  misc_feature (1)..(25): SEQ ID NO: 601; WAN024D2H_at; Start 97; Stop 121
ccaggtggttcggaagatattcgcc

SEQ ID NO: 140808 - DNA, 25 bp, Artificial
  probe
  misc_feature (1)..(25): SEQ ID NO: 601; WAN024D2H_at; Start 430; Stop 454
gggattctcaatatctctgatacag

SEQ ID NO: 140809 - DNA, 25 bp, Artificial
  probe
  misc_feature (1)..(25): SEQ ID NO: 601; WAN024D2H_at; Start 239; Stop 263
cagatattcgtagtgctcaggagac

SEQ ID NO: 140810 - DNA, 25 bp, Artificial
  probe
  misc_feature (1)..(25): SEQ ID NO: 601; WAN024D2H_at; Start 339; Stop 363
gtatcaaggactaaaaacagctggt

SEQ ID NO: 140811 - DNA, 25 bp, Artificial
  probe
  misc_feature (1)..(25): SEQ ID NO: 3410; WAN024D2I_at; Start 832; Stop 856
ccgaactggagaagtaactgtaact

SEQ ID NO: 140812 - DNA, 25 bp, Artificial
  probe
  misc_feature (1)..(25): SEQ ID NO: 3410; WAN024D2I_at; Start 312; Stop 336
caagtaagccctacgctgacaataa

SEQ ID NO: 140813 - DNA, 25 bp, Artificial
  probe
  misc_feature (1)..(25): SEQ ID NO: 3410; WAN024D2I_at; Start 639; Stop 663
aaaactactatgaaagcaaggtgcg

SEQ ID NO: 140814 - DNA, 25 bp, Artificial
  probe
  misc_feature (1)..(25): SEQ ID NO: 3410; WAN024D2I_at; Start 728; Stop 752
gatttagttccctcagcttcacaga

SEQ ID NO: 140815 - DNA, 25 bp, Artificial
  probe
  misc_feature (1)..(25): SEQ ID NO: 3410; WAN024D2I_at; Start 345; Stop 369
cagtgggcaaggaaactgttccaac

SEQ ID NO: 140816 - DNA, 25 bp, Artificial
  probe
  misc_feature (1)..(25): SEQ ID NO: 3410; WAN024D2I_at; Start 764; Stop 788
tcttcggatggagaattggaattca

SEQ ID NO: 140817 - DNA, 25 bp, Artificial
  probe
  misc_feature (1)..(25): SEQ ID NO: 3410; WAN024D2I_at; Start 600; Stop 624
cctgggcaaatcaggcacaagccga

SEQ ID NO: 140818 - DNA, 25 bp, Artificial
  probe
  misc_feature (1)..(25): SEQ ID NO: 3410; WAN024D2I_at; Start 207; Stop 231
tcttaacagacgcagtcaagagtca

SEQ ID NO: 140819 - DNA, 25 bp, Artificial
  probe
  misc_feature (1)..(25): SEQ ID NO: 3410; WAN024D2I_at; Start 816; Stop 840
gacttcaactggattaccgaactgg

SEQ ID NO: 140820 - DNA, 25 bp, Artificial
  probe
  misc_feature (1)..(25): SEQ ID NO: 3410; WAN024D2I_at; Start 583; Stop 607
cattgctgttcagacagcctgggca

SEQ ID NO: 140821 - DNA, 25 bp, Artificial
  probe
  misc_feature (1)..(25): SEQ ID NO: 3410; WAN024D2I_at; Start 677; Stop 701
caaaacaagcgtgtccgttaccgtg

SEQ ID NO: 140822 - DNA, 25 bp, Artificial
  probe
  misc_feature (1)..(25): SEQ ID NO: 3410; WAN024D2I_at; Start 655; Stop 679
caaggtgcgtaaagccttggaccaa

SEQ ID NO: 140823 - DNA, 25 bp, Artificial
  probe
  misc_feature (1)..(25): SEQ ID NO: 3410; WAN024D2I_at; Start 464; Stop 488
catcaggtcaagaatctaaagggct

SEQ ID NO: 140824 - DNA, 25 bp, Artificial
  probe
  misc_feature (1)..(25): SEQ ID NO: 3410; WAN024D2I_at; Start 328; Stop 352
tgacaataaaacaaagacagtgggc

SEQ ID NO: 140825 - DNA, 25 bp, Artificial
  probe
  misc_feature (1)..(25): SEQ ID NO: 3410; WAN024D2I_at; Start 480; Stop 504
taaagggctcttatacccatgcagt

SEQ ID NO: 140826 - DNA, 25 bp, Artificial
  probe
  misc_feature (1)..(25): SEQ ID NO: 3410; WAN024D2I_at; Start 547; Stop 571
ggatggttttgatgcctcaacaagc

SEQ ID NO: 140827 - DNA, 25 bp, Artificial
  probe
  misc_feature (1)..(25): SEQ ID NO: 3410; WAN024D2I_at; Start 192; Stop 216
cattggcagagagtgtcttaacaga

SEQ ID NO: 140828 - DNA, 25 bp, Artificial
  probe
  misc_feature (1)..(25): SEQ ID NO: 3410; WAN024D2I_at; Start 508; Stop 532
tagaggtcatttgttaggctatgcc

SEQ ID NO: 140829 - DNA, 25 bp, Artificial
  probe
  misc_feature (1)..(25): SEQ ID NO: 3410; WAN024D2I_at; Start 94; Stop 118
tacagggagctattatatcaagcag

SEQ ID NO: 140830 - DNA, 25 bp, Artificial
  probe
  misc_feature (1)..(25): SEQ ID NO: 3410; WAN024D2I_at; Start 415; Stop 439
tcgtaaagaaactgggaatggttca

SEQ ID NO: 140831 - DNA, 25 bp, Artificial
  probe
  misc_feature (1)..(25): SEQ ID NO: 3410; WAN024D2I_at; Start 430; Stop 454
gaatggttcaacttcttggactcct

SEQ ID NO: 140832 - DNA, 25 bp, Artificial
  probe
  misc_feature (1)..(25): SEQ ID NO: 3410; WAN024D2I_at; Start 615; Stop 639
cacaagccgagtattcgactggtca

SEQ ID NO: 140833 - DNA, 25 bp, Artificial
  probe
  misc_feature (1)..(25): SEQ ID NO: 3410; WAN024D2I_at; Start 176; Stop 200
gaagctcctagtcaagcattggcag

SEQ ID NO: 140834 - DNA, 25 bp, Artificial
  probe
  misc_feature (1)..(25): SEQ ID NO: 3410; WAN024D2I_at; Start 525; Stop 549
gctatgccttaatcggtggtttgga

SEQ ID NO: 140835 - DNA, 25 bp, Artificial
  probe
  misc_feature (1)..(25): SEQ ID NO: 3410; WAN024D2I_at; Start 710; Stop 734
tactacgcttcaaacgaggatttag

SEQ ID NO: 140836 - DNA, 25 bp, Artificial
  probe
  misc_feature (1)..(25): SEQ ID NO: 3410; WAN024D2I_at; Start 254; Stop 278
aatggctcaggtgcttttatcgtca

SEQ ID NO: 140837 - DNA, 25 bp, Artificial
  probe
  misc_feature (1)..(25): SEQ ID NO: 3410; WAN024D2I_at; Start 79; Stop 103
gttattgcttttgtctacagggagc

SEQ ID NO: 140838 - DNA, 25 bp, Artificial
  probe
  misc_feature (1)..(25): SEQ ID NO: 3410; WAN024D2I_at; Start 361; Stop 385
tgttccaaccgtagctaatgccctc

SEQ ID NO: 140839 - DNA, 25 bp, Artificial
  probe
  misc_feature (1)..(25): SEQ ID NO: 3410; WAN024D2I_at; Start 493; Stop 517
tacccatgcagtcgatagaggtcat

SEQ ID NO: 140840 - DNA, 25 bp, Artificial
  probe
  misc_feature (1)..(25): SEQ ID NO: 3410; WAN024D2I_at; Start 54; Stop 78
gacagacactaatcggactgctagt

SEQ ID NO: 140841 - DNA, 25 bp, Artificial
  probe
  misc_feature (1)..(25): SEQ ID NO: 3410; WAN024D2I_at; Start 447; Stop 471
ggactcctccaggttggcatcaggt

SEQ ID NO: 140842 - DNA, 25 bp, Artificial
  probe
  misc_feature (1)..(25): SEQ ID NO: 3410; WAN024D2I_at; Start 787; Stop 811
caatgttctagttcccaatgttcaa

SEQ ID NO: 140843 - DNA, 25 bp, Artificial
  probe
  misc_feature (1)..(25): SEQ ID NO: 3410; WAN024D2I_at; Start 395; Stop 419
gccactcgtcagtacaagaatcgta

SEQ ID NO: 140844 - DNA, 25 bp, Artificial
  probe
  misc_feature (1)..(25): SEQ ID NO: 3410; WAN024D2I_at; Start 297; Stop 321
tagatgccaaggtttcaagtaagcc

SEQ ID NO: 140845 - DNA, 25 bp, Artificial
  probe
  misc_feature (1)..(25): SEQ ID NO: 3336; WAN024D2J_at; Start 243; Stop 267
catttctggtcccaaagtaatcgaa

SEQ ID NO: 140846 - DNA, 25 bp, Artificial
  probe
  misc_feature (1)..(25): SEQ ID NO: 3336; WAN024D2J_at; Start 388; Stop 412
gattcagaagagtcagctaagcgag

SEQ ID NO: 140847 - DNA, 25 bp, Artificial
  probe
  misc_feature (1)..(25): SEQ ID NO: 3336; WAN024D2J_at; Start 100; Stop 124
cgtggatttacaatcgaaaaattgg

SEQ ID NO: 140848 - DNA, 25 bp, Artificial
  probe
  misc_feature (1)..(25): SEQ ID NO: 3336; WAN024D2J_at; Start 124; Stop 148
gagtttcgttcacaggtttcagaag

SEQ ID NO: 140849 - DNA, 25 bp, Artificial
  probe
  misc_feature (1)..(25): SEQ ID NO: 3336; WAN024D2J_at; Start 221; Stop 245
caggtccagttcttgtgggtgtcat

SEQ ID NO: 140850 - DNA, 25 bp, Artificial
  probe
  misc_feature (1)..(25): SEQ ID NO: 3336; WAN024D2J_at; Start 10; Stop 34
gagacgggtatggaacaaacattct

SEQ ID NO: 140851 - DNA, 25 bp, Artificial
  probe
  misc_feature (1)..(25): SEQ ID NO: 3336; WAN024D2J_at; Start 1; Stop 25
ctgacaaaggagacgggtatggaac

SEQ ID NO: 140852 - DNA, 25 bp, Artificial
  probe
  misc_feature (1)..(25): SEQ ID NO: 3336; WAN024D2J_at; Start 87; Stop 111
gcgcatcgaacaacgtggatttaca

SEQ ID NO: 140853 - DNA, 25 bp, Artificial
  probe
  misc_feature (1)..(25): SEQ ID NO: 3336; WAN024D2J_at; Start 379; Stop 403
catggttcagattcagaagagtcag

SEQ ID NO: 140854 - DNA, 25 bp, Artificial
  probe
  misc_feature (1)..(25): SEQ ID NO: 3336; WAN024D2J_at; Start 16; Stop 40
ggtatggaacaaacattctttatca

SEQ ID NO: 140855 - DNA, 25 bp, Artificial
  probe
  misc_feature (1)..(25): SEQ ID NO: 3336; WAN024D2J_at; Start 408; Stop 432
gcgagaaattgctctttggttttaa

SEQ ID NO: 140856 - DNA, 25 bp, Artificial
  probe
  misc_feature (1)..(25): SEQ ID NO: 3336; WAN024D2J_at; Start 169; Stop 193
caggacttggttggtcagagttttt

SEQ ID NO: 140857 - DNA, 25 bp, Artificial
  probe
  misc_feature (1)..(25): SEQ ID NO: 3336; WAN024D2J_at; Start 365; Stop 389
tccaaaatgttgtacatggttcaga

SEQ ID NO: 140858 - DNA, 25 bp, Artificial
  probe
  misc_feature (1)..(25): SEQ ID NO: 3336; WAN024D2J_at; Start 285; Stop 309
gggtgcaactcgtccagaagaagct

SEQ ID NO: 140859 - DNA, 25 bp, Artificial
  probe
  misc_feature (1)..(25): SEQ ID NO: 3336; WAN024D2J_at; Start 67; Stop 91
ctagtgggtgaagtgttaaagcgca

SEQ ID NO: 140860 - DNA, 25 bp, Artificial
  probe
  misc_feature (1)..(25): SEQ ID NO: 3336; WAN024D2J_at; Start 163; Stop 187
cactatcaggacttggttggtcaga

SEQ ID NO: 140861 - DNA, 25 bp, Artificial
  probe
  misc_feature (1)..(25): SEQ ID NO: 3336; WAN024D2J_at; Start 153; Stop 177
gattgaccagcactatcaggacttg

SEQ ID NO: 140862 - DNA, 25 bp, Artificial
  probe
  misc_feature (1)..(25): SEQ ID NO: 3336; WAN024D2J_at; Start 336; Stop 360
tgcaaaagctgctggagaaaatgag

SEQ ID NO: 140863 - DNA, 25 bp, Artificial
  probe
  misc_feature (1)..(25): SEQ ID NO: 3336; WAN024D2J_at; Start 215; Stop 239
tgacttcaggtccagttcttgtggg

SEQ ID NO: 140864 - DNA, 25 bp, Artificial
  probe
  misc_feature (1)..(25): SEQ ID NO: 3336; WAN024D2J_at; Start 80; Stop 104
tgttaaagcgcatcgaacaacgtgg

SEQ ID NO: 140865 - DNA, 25 bp, Artificial
  probe
  misc_feature (1)..(25): SEQ ID NO: 3336; WAN024D2J_at; Start 205; Stop 229
cgtgaattcatgacttcaggtccag

SEQ ID NO: 140866 - DNA, 25 bp, Artificial
  probe
  misc_feature (1)..(25): SEQ ID NO: 3336; WAN024D2J_at; Start 31; Stop 55
ttctttatcatcaaaccagatggtg

SEQ ID NO: 140867 - DNA, 25 bp, Artificial
  probe
  misc_feature (1)..(25): SEQ ID NO: 3336; WAN024D2J_at; Start 114; Stop 138
cgaaaaattggagtttcgttcacag

SEQ ID NO: 140868 - DNA, 25 bp, Artificial
  probe
  misc_feature (1)..(25): SEQ ID NO: 3336; WAN024D2J_at; Start 399; Stop 423
gtcagctaagcgagaaattgctctt

SEQ ID NO: 140869 - DNA, 25 bp, Artificial
  probe
  misc_feature (1)..(25): SEQ ID NO: 3336; WAN024D2J_at; Start 308; Stop 332
ctttaccaggcactattcgaggtga

SEQ ID NO: 140870 - DNA, 25 bp, Artificial
  probe
  misc_feature (1)..(25): SEQ ID NO: 3336; WAN024D2J_at; Start 198; Stop 222
accgattcgtgaattcatgacttca

SEQ ID NO: 140871 - DNA, 25 bp, Artificial
  probe
  misc_feature (1)..(25): SEQ ID NO: 3336; WAN024D2J_at; Start 46; Stop 70
ccagatggtgtaaaaagagggctag

SEQ ID NO: 140872 - DNA, 25 bp, Artificial
  probe
  misc_feature (1)..(25): SEQ ID NO: 3336; WAN024D2J_at; Start 142; Stop 166
tcagaagagttgattgaccagcact

SEQ ID NO: 140873 - DNA, 25 bp, Artificial
  probe
  misc_feature (1)..(25): SEQ ID NO: 3336; WAN024D2J_at; Start 294; Stop 318
tcgtccagaagaagctttaccaggc

SEQ ID NO: 140874 - DNA, 25 bp, Artificial
  probe
  misc_feature (1)..(25): SEQ ID NO: 3336; WAN024D2J_at; Start 234; Stop 258
tgtgggtgtcatttctggtcccaaa

SEQ ID NO: 140875 - DNA, 25 bp, Artificial
  probe
  misc_feature (1)..(25): SEQ ID NO: 3336; WAN024D2J_at; Start 258; Stop 282
agtaatcgaaacttggcggaccatg

SEQ ID NO: 140876 - DNA, 25 bp, Artificial
  probe
  misc_feature (1)..(25): SEQ ID NO: 3336; WAN024D2J_at; Start 304; Stop 328
gaagctttaccaggcactattcgag

SEQ ID NO: 140877 - DNA, 25 bp, Artificial
  probe
  misc_feature (1)..(25): SEQ ID NO: 3336; WAN024D2J_at; Start 264; Stop 288
cgaaacttggcggaccatgatgggt

SEQ ID NO: 140878 - DNA, 25 bp, Artificial
  probe
  misc_feature (1)..(25): SEQ ID NO: 3336; WAN024D2J_at; Start 276; Stop 300
gaccatgatgggtgcaactcgtcca

SEQ ID NO: 140879 - DNA, 25 bp, Artificial
  probe
  misc_feature (1)..(25): SEQ ID NO: 662; WAN024D2K_at; Start 110; Stop 134
ctctcagaatcaataatagtgtagg

SEQ ID NO: 140880 - DNA, 25 bp, Artificial
  probe
  misc_feature (1)..(25): SEQ ID NO: 662; WAN024D2K_at; Start 11; Stop 35
tcgacaattatattattgagaagcc

SEQ ID NO: 140881 - DNA, 25 bp, Artificial
  probe
  misc_feature (1)..(25): SEQ ID NO: 662; WAN024D2K_at; Start 24; Stop 48
tattgagaagccttgcgattctaat

SEQ ID NO: 140882 - DNA, 25 bp, Artificial
  probe
  misc_feature (1)..(25): SEQ ID NO: 662; WAN024D2K_at; Start 30; Stop 54
gaagccttgcgattctaattcagat

SEQ ID NO: 140883 - DNA, 25 bp, Artificial
  probe
  misc_feature (1)..(25): SEQ ID NO: 662; WAN024D2K_at; Start 201; Stop 225
tattgtgaaagtcaaagatgatgat

SEQ ID NO: 140884 - DNA, 25 bp, Artificial
  probe
  misc_feature (1)..(25): SEQ ID NO: 662; WAN024D2K_at; Start 52; Stop 76
gataaactgcaaaaaatcttaataa

SEQ ID NO: 140885 - DNA, 25 bp, Artificial
  probe
  misc_feature (1)..(25): SEQ ID NO: 662; WAN024D2K_at; Start 213; Stop 237
caaagatgatgataaagttgagtgg

SEQ ID NO: 140886 - DNA, 25 bp, Artificial
  probe
  misc_feature (1)..(25): SEQ ID NO: 662; WAN024D2K_at; Start 28; Stop 52
gagaagccttgcgattctaattcag

SEQ ID NO: 140887 - DNA, 25 bp, Artificial
  probe
  misc_feature (1)..(25): SEQ ID NO: 662; WAN024D2K_at; Start 196; Stop 220
gaagatattgtgaaagtcaaagatg

SEQ ID NO: 140888 - DNA, 25 bp, Artificial
  probe
  misc_feature (1)..(25): SEQ ID NO: 662; WAN024D2K_at; Start 45; Stop 69
taattcagataaactgcaaaaaatc

SEQ ID NO: 140889 - DNA, 25 bp, Artificial
  probe
  misc_feature (1)..(25): SEQ ID NO: 662; WAN024D2K_at; Start 16; Stop 40
aattatattattgagaagccttgcg

SEQ ID NO: 140890 - DNA, 25 bp, Artificial
  probe
  misc_feature (1)..(25): SEQ ID NO: 662; WAN024D2K_at; Start 37; Stop 61
tgcgattctaattcagataaactgc

SEQ ID NO: 140891 - DNA, 25 bp, Artificial
  probe
  misc_feature (1)..(25): SEQ ID NO: 662; WAN024D2K_at; Start 111; Stop 135
tctcagaatcaataatagtgtagga

SEQ ID NO: 140892 - DNA, 25 bp, Artificial
  probe
  misc_feature (1)..(25): SEQ ID NO: 662; WAN024D2K_at; Start 219; Stop 243
tgatgataaagttgagtggaatttg

SEQ ID NO: 140893 - DNA, 25 bp, Artificial
  probe
  misc_feature (1)..(25): SEQ ID NO: 662; WAN024D2K_at; Start 175; Stop 199
tttattccatgttattttgaggaag

SEQ ID NO: 140894 - DNA, 25 bp, Artificial
  probe
  misc_feature (1)..(25): SEQ ID NO: 662; WAN024D2K_at; Start 124; Stop 148
aatagtgtaggagagattttcctcc

SEQ ID NO: 140895 - DNA, 25 bp, Artificial
  probe
  misc_feature (1)..(25): SEQ ID NO: 662; WAN024D2K_at; Start 206; Stop 230
tgaaagtcaaagatgatgataaagt

SEQ ID NO: 140896 - DNA, 25 bp, Artificial
  probe
  misc_feature (1)..(25): SEQ ID NO: 662; WAN024D2K_at; Start 193; Stop 217
gaggaagatattgtgaaagtcaaag

SEQ ID NO: 140897 - DNA, 25 bp, Artificial
  probe
  misc_feature (1)..(25): SEQ ID NO: 662; WAN024D2K_at; Start 114; Stop 138
cagaatcaataatagtgtaggagag

SEQ ID NO: 140898 - DNA, 25 bp, Artificial
  probe
  misc_feature (1)..(25): SEQ ID NO: 662; WAN024D2K_at; Start 252; Stop 276
tcaaaaatttagagcatttttggct

SEQ ID NO: 140899 - DNA, 25 bp, Artificial
  probe
  misc_feature (1)..(25): SEQ ID NO: 662; WAN024D2K_at; Start 21; Stop 45
tattattgagaagccttgcgattct

SEQ ID NO: 140900 - DNA, 25 bp, Artificial
  probe
  misc_feature (1)..(25): SEQ ID NO: 662; WAN024D2K_at; Start 49; Stop 73
tcagataaactgcaaaaaatcttaa

SEQ ID NO: 140901 - DNA, 25 bp, Artificial
  probe
  misc_feature (1)..(25): SEQ ID NO: 662; WAN024D2K_at; Start 33; Stop 57
gccttgcgattctaattcagataaa

SEQ ID NO: 140902 - DNA, 25 bp, Artificial
  probe
  misc_feature (1)..(25): SEQ ID NO: 662; WAN024D2K_at; Start 132; Stop 156
aggagagattttcctcctacaaccg

SEQ ID NO: 140903 - DNA, 25 bp, Artificial
  probe
  misc_feature (1)..(25): SEQ ID NO: 662; WAN024D2K_at; Start 189; Stop 213
ttttgaggaagatattgtgaaagtc

SEQ ID NO: 140904 - DNA, 25 bp, Artificial
  probe
  misc_feature (1)..(25): SEQ ID NO: 662; WAN024D2K_at; Start 242; Stop 266
tgttagaatttcaaaaatttagagc

SEQ ID NO: 140905 - DNA, 25 bp, Artificial
  probe
  misc_feature (1)..(25): SEQ ID NO: 662; WAN024D2K_at; Start 40; Stop 64
gattctaattcagataaactgcaaa

SEQ ID NO: 140906 - DNA, 25 bp, Artificial
  probe
  misc_feature (1)..(25): SEQ ID NO: 662; WAN024D2K_at; Start 173; Stop 197
tctttattccatgttattttgagga

SEQ ID NO: 140907 - DNA, 25 bp, Artificial
  probe
  misc_feature (1)..(25): SEQ ID NO: 662; WAN024D2K_at; Start 232; Stop 256
gagtggaatttgttagaatttcaaa

SEQ ID NO: 140908 - DNA, 25 bp, Artificial
  probe
  misc_feature (1)..(25): SEQ ID NO: 662; WAN024D2K_at; Start 123; Stop 147
taatagtgtaggagagattttcctc

SEQ ID NO: 140909 - DNA, 25 bp, Artificial
  probe
  misc_feature (1)..(25): SEQ ID NO: 662; WAN024D2K_at; Start 225; Stop 249
taaagttgagtggaatttgttagaa

SEQ ID NO: 140910 - DNA, 25 bp, Artificial
  probe
  misc_feature (1)..(25): SEQ ID NO: 662; WAN024D2K_at; Start 18; Stop 42
ttatattattgagaagccttgcgat

SEQ ID NO: 140911 - DNA, 25 bp, Artificial
  probe
  misc_feature (1)..(25): SEQ ID NO: 662; WAN024D2K_at; Start 120; Stop 144
caataatagtgtaggagagattttc

SEQ ID NO: 140912 - DNA, 25 bp, Artificial
  probe
  misc_feature (1)..(25): SEQ ID NO: 662; WAN024D2K_at; Start 58; Stop 82
ctgcaaaaaatcttaataattgaaa

SEQ ID NO: 140913 - DNA, 25 bp, Artificial
  probe
  misc_feature (1)..(25): SEQ ID NO: 1624; WAN024D2L_at; Start 173; Stop 197
caggtcaggatcgttttgtgtataa

SEQ ID NO: 140914 - DNA, 25 bp, Artificial
  probe
  misc_feature (1)..(25): SEQ ID NO: 1624; WAN024D2L_at; Start 155; Stop 179
cggtaggttatttagaatcaggtca

SEQ ID NO: 140915 - DNA, 25 bp, Artificial
  probe
  misc_feature (1)..(25): SEQ ID NO: 1624; WAN024D2L_at; Start 358; Stop 382
caaggcattgaaaattgggtctcag

SEQ ID NO: 140916 - DNA, 25 bp, Artificial
  probe
  misc_feature (1)..(25): SEQ ID NO: 1624; WAN024D2L_at; Start 514; Stop 538
tactttgaagaatttagacgtgcca

SEQ ID NO: 140917 - DNA, 25 bp, Artificial
  probe
  misc_feature (1)..(25): SEQ ID NO: 1624; WAN024D2L_at; Start 497; Stop 521
acactatgaataggctctactttga

SEQ ID NO: 140918 - DNA, 25 bp, Artificial
  probe
  misc_feature (1)..(25): SEQ ID NO: 1624; WAN024D2L_at; Start 720; Stop 744
aatgcagaaagaaaacaagatgtcc

SEQ ID NO: 140919 - DNA, 25 bp, Artificial
  probe
  misc_feature (1)..(25): SEQ ID NO: 1624; WAN024D2L_at; Start 437; Stop 461
aacgttgggtaatgctagcaggagc

SEQ ID NO: 140920 - DNA, 25 bp, Artificial
  probe
  misc_feature (1)..(25): SEQ ID NO: 1624; WAN024D2L_at; Start 139; Stop 163
cagcaaatgactgctacggtaggtt

SEQ ID NO: 140921 - DNA, 25 bp, Artificial
  probe
  misc_feature (1)..(25): SEQ ID NO: 1624; WAN024D2L_at; Start 214; Stop 238
taccagcagtttttgaaagatccaa

SEQ ID NO: 140922 - DNA, 25 bp, Artificial
  probe
  misc_feature (1)..(25): SEQ ID NO: 1624; WAN024D2L_at; Start 43; Stop 67
ttattgctgcctgaacacctccgtt

SEQ ID NO: 140923 - DNA, 25 bp, Artificial
  probe
  misc_feature (1)..(25): SEQ ID NO: 1624; WAN024D2L_at; Start 601; Stop 625
caactgggtgtgtttttactgggat

SEQ ID NO: 140924 - DNA, 25 bp, Artificial
  probe
  misc_feature (1)..(25): SEQ ID NO: 1624; WAN024D2L_at; Start 306; Stop 330
gaactacgttctctttaatcaattg

SEQ ID NO: 140925 - DNA, 25 bp, Artificial
  probe
  misc_feature (1)..(25): SEQ ID NO: 1624; WAN024D2L_at; Start 247; Stop 271
gttataacaccccaatcaactggtc

SEQ ID NO: 140926 - DNA, 25 bp, Artificial
  probe
  misc_feature (1)..(25): SEQ ID NO: 1624; WAN024D2L_at; Start 53; Stop 77
ctgaacacctccgttcagaggaaga

SEQ ID NO: 140927 - DNA, 25 bp, Artificial
  probe
  misc_feature (1)..(25): SEQ ID NO: 1624; WAN024D2L_at; Start 704; Stop 728
tacagttacatgtccaaatgcagaa

SEQ ID NO: 140928 - DNA, 25 bp, Artificial
  probe
  misc_feature (1)..(25): SEQ ID NO: 1624; WAN024D2L_at; Start 200; Stop 224
cgacccctatttcttaccagcagtt

SEQ ID NO: 140929 - DNA, 25 bp, Artificial
  probe
  misc_feature (1)..(25): SEQ ID NO: 1624; WAN024D2L_at; Start 455; Stop 479
caggagctgtgcttgggattgcaac

SEQ ID NO: 140930 - DNA, 25 bp, Artificial
  probe
  misc_feature (1)..(25): SEQ ID NO: 1624; WAN024D2L_at; Start 32; Stop 56
gggagtttgtcttattgctgcctga

SEQ ID NO: 140931 - DNA, 25 bp, Artificial
  probe
  misc_feature (1)..(25): SEQ ID NO: 1624; WAN024D2L_at; Start 584; Stop 608
gcacttatctctttgctcaactggg

SEQ ID NO: 140932 - DNA, 25 bp, Artificial
  probe
  misc_feature (1)..(25): SEQ ID NO: 1624; WAN024D2L_at; Start 93; Stop 117
ttttgaagacgacttaaccagtcgc

SEQ ID NO: 140933 - DNA, 25 bp, Artificial
  probe
  misc_feature (1)..(25): SEQ ID NO: 1624; WAN024D2L_at; Start 262; Stop 286
tcaactggtccacagtccattttgt

SEQ ID NO: 140934 - DNA, 25 bp, Artificial
  probe
  misc_feature (1)..(25): SEQ ID NO: 1624; WAN024D2L_at; Start 551; Stop 575
gcattgcaggtctcaggttcttaga

SEQ ID NO: 140935 - DNA, 25 bp, Artificial
  probe
  misc_feature (1)..(25): SEQ ID NO: 1624; WAN024D2L_at; Start 394; Stop 418
ggttaccacaactacatcacattat

SEQ ID NO: 140936 - DNA, 25 bp, Artificial
  probe
  misc_feature (1)..(25): SEQ ID NO: 1624; WAN024D2L_at; Start 566; Stop 590
ggttcttagaaatccatcgcactta

SEQ ID NO: 140937 - DNA, 25 bp, Artificial
  probe
  misc_feature (1)..(25): SEQ ID NO: 1624; WAN024D2L_at; Start 277; Stop 301
tccattttgttttggatagacgcag

SEQ ID NO: 140938 - DNA, 25 bp, Artificial
  probe
  misc_feature (1)..(25): SEQ ID NO: 1624; WAN024D2L_at; Start 333; Stop 357
tgatgcccaggagcttatccagaga

SEQ ID NO: 140939 - DNA, 25 bp, Artificial
  probe
  misc_feature (1)..(25): SEQ ID NO: 1624; WAN024D2L_at; Start 345; Stop 369
gcttatccagagacaaggcattgaa

SEQ ID NO: 140940 - DNA, 25 bp, Artificial
  probe
  misc_feature (1)..(25): SEQ ID NO: 1624; WAN024D2L_at; Start 543; Stop 567
tatcaaacgcattgcaggtctcagg

SEQ ID NO: 140941 - DNA, 25 bp, Artificial
  probe
  misc_feature (1)..(25): SEQ ID NO: 1624; WAN024D2L_at; Start 289; Stop 313
tggatagacgcagtacagaactacg

SEQ ID NO: 140942 - DNA, 25 bp, Artificial
  probe
  misc_feature (1)..(25): SEQ ID NO: 1624; WAN024D2L_at; Start 321; Stop 345
taatcaattgtctgatgcccaggag

SEQ ID NO: 140943 - DNA, 25 bp, Artificial
  probe
  misc_feature (1)..(25): SEQ ID NO: 1624; WAN024D2L_at; Start 374; Stop 398
gggtctcagaaatgcaaacaggtta

SEQ ID NO: 140944 - DNA, 25 bp, Artificial
  probe
  misc_feature (1)..(25): SEQ ID NO: 1624; WAN024D2L_at; Start 421; Stop 445
gataatatccagagggaacgttggg

SEQ ID NO: 140945 - DNA, 25 bp, Artificial
  probe
  misc_feature (1)..(25): SEQ ID NO: 1624; WAN024D2L_at; Start 123; Stop 147
tagtcaagatgaacgacagcaaatg

SEQ ID NO: 140946 - DNA, 25 bp, Artificial
  probe
  misc_feature (1)..(25): SEQ ID NO: 1624; WAN024D2L_at; Start 528; Stop 552
tagacgtgccatttttatcaaacgc

SEQ ID NO: 140947 - DNA, 25 bp, Artificial
  probe
  misc_feature (1)..(25): SEQ ID NO: 1097; WAN024D2M_at; Start 676; Stop 700
catggtacggctgttgtagctcaaa

SEQ ID NO: 140948 - DNA, 25 bp, Artificial
  probe
  misc_feature (1)..(25): SEQ ID NO: 1097; WAN024D2M_at; Start 1167; Stop 1191
tgcgcctgcaggctcaacattatct

SEQ ID NO: 140949 - DNA, 25 bp, Artificial
  probe
  misc_feature (1)..(25): SEQ ID NO: 1097; WAN024D2M_at; Start 985; Stop 1009
tccctaaatgtatcaaatcagtcag

SEQ ID NO: 140950 - DNA, 25 bp, Artificial
  probe
  misc_feature (1)..(25): SEQ ID NO: 1097; WAN024D2M_at; Start 107; Stop 131
taactcacactcagactagcgaaag

SEQ ID NO: 140951 - DNA, 25 bp, Artificial
  probe
  misc_feature (1)..(25): SEQ ID NO: 1097; WAN024D2M_at; Start 717; Stop 741
tattaatggagtaaatcctcacgtt

SEQ ID NO: 140952 - DNA, 25 bp, Artificial
  probe
  misc_feature (1)..(25): SEQ ID NO: 1097; WAN024D2M_at; Start 1255; Stop 1279
tcggcaacactaggaggatatacgt

SEQ ID NO: 140953 - DNA, 25 bp, Artificial
  probe
  misc_feature (1)..(25): SEQ ID NO: 1097; WAN024D2M_at; Start 964; Stop 988
gtagctgcattagggaatgactccc

SEQ ID NO: 140954 - DNA, 25 bp, Artificial
  probe
  misc_feature (1)..(25): SEQ ID NO: 1097; WAN024D2M_at; Start 524; Stop 548
ttgctattttagattcaggagtcga

SEQ ID NO: 140955 - DNA, 25 bp, Artificial
  probe
  misc_feature (1)..(25): SEQ ID NO: 1097; WAN024D2M_at; Start 1084; Stop 1108
tcatctacaatttcggtcggaggca

SEQ ID NO: 140956 - DNA, 25 bp, Artificial
  probe
  misc_feature (1)..(25): SEQ ID NO: 1097; WAN024D2M_at; Start 1288; Stop 1312
ggaaactcatttgctgctcctaaag

SEQ ID NO: 140957 - DNA, 25 bp, Artificial
  probe
  misc_feature (1)..(25): SEQ ID NO: 1097; WAN024D2M_at; Start 921; Stop 945
taaaaaggctattgattacgcgaat

SEQ ID NO: 140958 - DNA, 25 bp, Artificial
  probe
  misc_feature (1)..(25): SEQ ID NO: 1097; WAN024D2M_at; Start 768; Stop 792
taagtcgtcagctagtccagattgg

SEQ ID NO: 140959 - DNA, 25 bp, Artificial
  probe
  misc_feature (1)..(25): SEQ ID NO: 1097; WAN024D2M_at; Start 756; Stop 780
tagaatatttggtaagtcgtcagct

SEQ ID NO: 140960 - DNA, 25 bp, Artificial
  probe
  misc_feature (1)..(25): SEQ ID NO: 1097; WAN024D2M_at; Start 460; Stop 484
gataaagttactggtggaggcgaaa

SEQ ID NO: 140961 - DNA, 25 bp, Artificial
  probe
  misc_feature (1)..(25): SEQ ID NO: 1097; WAN024D2M_at; Start 661; Stop 685
caagatagattaggtcatggtacgg

SEQ ID NO: 140962 - DNA, 25 bp, Artificial
  probe
  misc_feature (1)..(25): SEQ ID NO: 1097; WAN024D2M_at; Start 408; Stop 432
tgacaaagataacttagaatcgtcg

SEQ ID NO: 140963 - DNA, 25 bp, Artificial
  probe
  misc_feature (1)..(25): SEQ ID NO: 1097; WAN024D2M_at; Start 64; Stop 88
tctgttactgctcaagaaataccta

SEQ ID NO: 140964 - DNA, 25 bp, Artificial
  probe
  misc_feature (1)..(25): SEQ ID NO: 1097; WAN024D2M_at; Start 600; Stop 624
tgtccccaataaaggatatttagga

SEQ ID NO: 140965 - DNA, 25 bp, Artificial
  probe
  misc_feature (1)..(25): SEQ ID NO: 1097; WAN024D2M_at; Start 539; Stop 563
caggagtcgatttacaaaatactgg

SEQ ID NO: 140966 - DNA, 25 bp, Artificial
  probe
  misc_feature (1)..(25): SEQ ID NO: 1097; WAN024D2M_at; Start 1492; Stop 1516
gaacaaagttgggatagtttcatag

SEQ ID NO: 140967 - DNA, 25 bp, Artificial
  probe
  misc_feature (1)..(25): SEQ ID NO: 1097; WAN024D2M_at; Start 93; Stop 117
tcttgatggcaatataactcacact

SEQ ID NO: 140968 - DNA, 25 bp, Artificial
  probe
  misc_feature (1)..(25): SEQ ID NO: 1097; WAN024D2M_at; Start 1101; Stop 1125
cggaggcatagatcgcttaggtaat

SEQ ID NO: 140969 - DNA, 25 bp, Artificial
  probe
  misc_feature (1)..(25): SEQ ID NO: 1097; WAN024D2M_at; Start 1271; Stop 1295
gatatacgtatctttatggaaactc

SEQ ID NO: 140970 - DNA, 25 bp, Artificial
  probe
  misc_feature (1)..(25): SEQ ID NO: 1097; WAN024D2M_at; Start 1150; Stop 1174
gattctgatgcaatatatgcgcctg

SEQ ID NO: 140971 - DNA, 25 bp, Artificial
  probe
  misc_feature (1)..(25): SEQ ID NO: 1097; WAN024D2M_at; Start 1666; Stop 1690
caagtcagtttagttggagtattac

SEQ ID NO: 140972 - DNA, 25 bp, Artificial
  probe
  misc_feature (1)..(25): SEQ ID NO: 1097; WAN024D2M_at; Start 1306; Stop 1330
cctaaagtttctggtgcgattgcaa

SEQ ID NO: 140973 - DNA, 25 bp, Artificial
  probe
  misc_feature (1)..(25): SEQ ID NO: 1097; WAN024D2M_at; Start 1240; Stop 1264
gaagattggattttttcggcaacac

SEQ ID NO: 140974 - DNA, 25 bp, Artificial
  probe
  misc_feature (1)..(25): SEQ ID NO: 1097; WAN024D2M_at; Start 387; Stop 411
tagaggaggaaatatagagcatgac

SEQ ID NO: 140975 - DNA, 25 bp, Artificial
  probe
  misc_feature (1)..(25): SEQ ID NO: 1097; WAN024D2M_at; Start 1602; Stop 1626
tgcccgagaagggtactctcaaaat

SEQ ID NO: 140976 - DNA, 25 bp, Artificial
  probe
  misc_feature (1)..(25): SEQ ID NO: 1097; WAN024D2M_at; Start 880; Stop 904
tatgaggacggaacaaatgattttg

SEQ ID NO: 140977 - DNA, 25 bp, Artificial
  probe
  misc_feature (1)..(25): SEQ ID NO: 1097; WAN024D2M_at; Start 1051; Stop 1075
ccaggattagtagttgatgttccaa

SEQ ID NO: 140978 - DNA, 25 bp, Artificial
  probe
  misc_feature (1)..(25): SEQ ID NO: 1097; WAN024D2M_at; Start 265; Stop 289
tgttgtaaattggaacttgaaccac

SEQ ID NO: 140979 - DNA, 25 bp, Artificial
  probe
  misc_feature (1)..(25): SEQ ID NO: 1097; WAN024D2M_at; Start 1590; Stop 1614
tattattactattgcccgagaaggg

SEQ ID NO: 140980 - DNA, 25 bp, Artificial
  probe
  misc_feature (1)..(25): SEQ ID NO: 1097; WAN024D2M_at; Start 139; Stop 163
gaatctgatgaaaaacaggttgact

SEQ ID NO: 140981 - DNA, 25 bp, Artificial
  probe
  misc_feature (1)..(25): SEQ ID NO: 3848; WAN024D2N_at; Start 111; Stop 135
aatctacccatcatccagatctgga

SEQ ID NO: 140982 - DNA, 25 bp, Artificial
  probe
  misc_feature (1)..(25): SEQ ID NO: 3848; WAN024D2N_at; Start 1231; Stop 1255
gtagcaataagtacagtctcaccat

SEQ ID NO: 140983 - DNA, 25 bp, Artificial
  probe
  misc_feature (1)..(25): SEQ ID NO: 3848; WAN024D2N_at; Start 1202; Stop 1226
cattcgaacaattgacgttaggaca

SEQ ID NO: 140984 - DNA, 25 bp, Artificial
  probe
  misc_feature (1)..(25): SEQ ID NO: 3848; WAN024D2N_at; Start 1788; Stop 1812
gacaatcatcgctgaagaaggtaat

SEQ ID NO: 140985 - DNA, 25 bp, Artificial
  probe
  misc_feature (1)..(25): SEQ ID NO: 3848; WAN024D2N_at; Start 1514; Stop 1538
caggttcaggtaagagtacattagc

SEQ ID NO: 140986 - DNA, 25 bp, Artificial
  probe
  misc_feature (1)..(25): SEQ ID NO: 3848; WAN024D2N_at; Start 2043; Stop 2067
gattgggacccatagagaacttctt

SEQ ID NO: 140987 - DNA, 25 bp, Artificial
  probe
  misc_feature (1)..(25): SEQ ID NO: 3848; WAN024D2N_at; Start 1698; Stop 1722
tggacactttgtttcagatgaagaa

SEQ ID NO: 140988 - DNA, 25 bp, Artificial
  probe
  misc_feature (1)..(25): SEQ ID NO: 3848; WAN024D2N_at; Start 1087; Stop 1111
cagctcatcataggtcgaaaacttg

SEQ ID NO: 140989 - DNA, 25 bp, Artificial
  probe
  misc_feature (1)..(25): SEQ ID NO: 3848; WAN024D2N_at; Start 1936; Stop 1960
tcttacttaagtgaaatcggtacca

SEQ ID NO: 140990 - DNA, 25 bp, Artificial
  probe
  misc_feature (1)..(25): SEQ ID NO: 3848; WAN024D2N_at; Start 314; Stop 338
caaaaggcaggcagagaatgtcaat

SEQ ID NO: 140991 - DNA, 25 bp, Artificial
  probe
  misc_feature (1)..(25): SEQ ID NO: 3848; WAN024D2N_at; Start 37; Stop 61
gaatgtggattagcatgctgtgcca

SEQ ID NO: 140992 - DNA, 25 bp, Artificial
  probe
  misc_feature (1)..(25): SEQ ID NO: 3848; WAN024D2N_at; Start 298; Stop 322
tatattttagatcctgcaaaaggca

SEQ ID NO: 140993 - DNA, 25 bp, Artificial
  probe
  misc_feature (1)..(25): SEQ ID NO: 3848; WAN024D2N_at; Start 1847; Stop 1871
tagctcgttgtcttttgtcgaaacc

SEQ ID NO: 140994 - DNA, 25 bp, Artificial
  probe
  misc_feature (1)..(25): SEQ ID NO: 3848; WAN024D2N_at; Start 2068; Stop 2092
gaactaggaggcatttataagcaat

SEQ ID NO: 140995 - DNA, 25 bp, Artificial
  probe
  misc_feature (1)..(25): SEQ ID NO: 3848; WAN024D2N_at; Start 1809; Stop 1833
taataacttttctggagggcagcag

SEQ ID NO: 140996 - DNA, 25 bp, Artificial
  probe
  misc_feature (1)..(25): SEQ ID NO: 3848; WAN024D2N_at; Start 552; Stop 576
caaggacgattcgtattcgtctaga

SEQ ID NO: 140997 - DNA, 25 bp, Artificial
  probe
  misc_feature (1)..(25): SEQ ID NO: 3848; WAN024D2N_at; Start 1881; Stop 1905
tgttttggacgaagcaacaagtagt

SEQ ID NO: 140998 - DNA, 25 bp, Artificial
  probe
  misc_feature (1)..(25): SEQ ID NO: 3848; WAN024D2N_at; Start 1982; Stop 2006
gactagatactatcaagtctgcaga

SEQ ID NO: 140999 - DNA, 25 bp, Artificial
  probe
  misc_feature (1)..(25): SEQ ID NO: 3848; WAN024D2N_at; Start 1360; Stop 1384
ttaattccagaaagagtcagtcaag

SEQ ID NO: 141000 - DNA, 25 bp, Artificial
  probe
  misc_feature (1)..(25): SEQ ID NO: 3848; WAN024D2N_at; Start 1672; Stop 1696
ggtaccttaagagagaatttgacat

SEQ ID NO: 141001 - DNA, 25 bp, Artificial
  probe
  misc_feature (1)..(25): SEQ ID NO: 3848; WAN024D2N_at; Start 1498; Stop 1522
gctattgttggagaatcaggttcag

SEQ ID NO: 141002 - DNA, 25 bp, Artificial
  probe
  misc_feature (1)..(25): SEQ ID NO: 3848; WAN024D2N_at; Start 536; Stop 560
taattgacacgaatttcaaggacga

SEQ ID NO: 141003 - DNA, 25 bp, Artificial
  probe
  misc_feature (1)..(25): SEQ ID NO: 3848; WAN024D2N_at; Start 236; Stop 260
tcatttgcttctgggagagttctca

SEQ ID NO: 141004 - DNA, 25 bp, Artificial
  probe
  misc_feature (1)..(25): SEQ ID NO: 3848; WAN024D2N_at; Start 203; Stop 227
cggtaagagatttaaaaccgctcag

SEQ ID NO: 141005 - DNA, 25 bp, Artificial
  probe
  misc_feature (1)..(25): SEQ ID NO: 3848; WAN024D2N_at; Start 2030; Stop 2054
gtgaaattgtagagattgggaccca

SEQ ID NO: 141006 - DNA, 25 bp, Artificial
  probe
  misc_feature (1)..(25): SEQ ID NO: 3848; WAN024D2N_at; Start 1963; Stop 1987
aagattttaattgcccatcgactag

SEQ ID NO: 141007 - DNA, 25 bp, Artificial
  probe
  misc_feature (1)..(25): SEQ ID NO: 3848; WAN024D2N_at; Start 1639; Stop 1663
ggagcagtgttacaaaattcaaccc

SEQ ID NO: 141008 - DNA, 25 bp, Artificial
  probe
  misc_feature (1)..(25): SEQ ID NO: 3848; WAN024D2N_at; Start 405; Stop 429
tcgtaaagataataagaagtcgcct

SEQ ID NO: 141009 - DNA, 25 bp, Artificial
  probe
  misc_feature (1)..(25): SEQ ID NO: 3848; WAN024D2N_at; Start 50; Stop 74
catgctgtgccatgatattgaacta

SEQ ID NO: 141010 - DNA, 25 bp, Artificial
  probe
  misc_feature (1)..(25): SEQ ID NO: 3848; WAN024D2N_at; Start 2055; Stop 2079
tagagaacttcttgaactaggaggc

SEQ ID NO: 141011 - DNA, 25 bp, Artificial
  probe
  misc_feature (1)..(25): SEQ ID NO: 3848; WAN024D2N_at; Start 95; Stop 119
taaatgaactacgtgaaatctaccc

SEQ ID NO: 141012 - DNA, 25 bp, Artificial
  probe
  misc_feature (1)..(25): SEQ ID NO: 3848; WAN024D2N_at; Start 1024; Stop 1048
gatattaagctaactggagaagagg

SEQ ID NO: 141013 - DNA, 25 bp, Artificial
  probe
  misc_feature (1)..(25): SEQ ID NO: 3848; WAN024D2N_at; Start 1823; Stop 1847
gagggcagcagcaaatgatactttt

SEQ ID NO: 141014 - DNA, 25 bp, Artificial
  probe
  misc_feature (1)..(25): SEQ ID NO: 3848; WAN024D2N_at; Start 1774; Stop 1798
cctcttggattagagacaatcatcg

SEQ ID NO: 141015 - DNA, 25 bp, Artificial
  probe
  misc_feature (1)..(25): SEQ ID NO: 3048; WAN024D2O_at; Start 531; Stop 555
tgcgaacagtctctataataatcct

SEQ ID NO: 141016 - DNA, 25 bp, Artificial
  probe
  misc_feature (1)..(25): SEQ ID NO: 3048; WAN024D2O_at; Start 642; Stop 666
ctttgaagtgaaaggtgaagggtca

SEQ ID NO: 141017 - DNA, 25 bp, Artificial
  probe
  misc_feature (1)..(25): SEQ ID NO: 3048; WAN024D2O_at; Start 655; Stop 679
ggtgaagggtcagcatttacaattg

SEQ ID NO: 141018 - DNA, 25 bp, Artificial
  probe
  misc_feature (1)..(25): SEQ ID NO: 3048; WAN024D2O_at; Start 388; Stop 412
gtgccgtacgcatcagaatttttta

SEQ ID NO: 141019 - DNA, 25 bp, Artificial
  probe
  misc_feature (1)..(25): SEQ ID NO: 3048; WAN024D2O_at; Start 239; Stop 263
aatttccagtgttattagcattcgg

SEQ ID NO: 141020 - DNA, 25 bp, Artificial
  probe
  misc_feature (1)..(25): SEQ ID NO: 3048; WAN024D2O_at; Start 464; Stop 488
cagatggcaatgctattagagagat

SEQ ID NO: 141021 - DNA, 25 bp, Artificial
  probe
  misc_feature (1)..(25): SEQ ID NO: 3048; WAN024D2O_at; Start 903; Stop 927
tattttgaacaaggaggaagtattg

SEQ ID NO: 141022 - DNA, 25 bp, Artificial
  probe
  misc_feature (1)..(25): SEQ ID NO: 3048; WAN024D2O_at; Start 667; Stop 691
gcatttacaattgctaatcatgaag

SEQ ID NO: 141023 - DNA, 25 bp, Artificial
  probe
  misc_feature (1)..(25): SEQ ID NO: 3048; WAN024D2O_at; Start 566; Stop 590
tcgacgattttgcaaaattaacctc

SEQ ID NO: 141024 - DNA, 25 bp, Artificial
  probe
  misc_feature (1)..(25): SEQ ID NO: 3048; WAN024D2O_at; Start 754; Stop 778
tctgattggattattccacagaact

SEQ ID NO: 141025 - DNA, 25 bp, Artificial
  probe
  misc_feature (1)..(25): SEQ ID NO: 3048; WAN024D2O_at; Start 500; Stop 524
caaaagattcaaaaacatatcagag

SEQ ID NO: 141026 - DNA, 25 bp, Artificial
  probe
  misc_feature (1)..(25): SEQ ID NO: 3048; WAN024D2O_at; Start 360; Stop 384
tgtcgcaatattagcacttttggga

SEQ ID NO: 141027 - DNA, 25 bp, Artificial
  probe
  misc_feature (1)..(25): SEQ ID NO: 3048; WAN024D2O_at; Start 437; Stop 461
ttacggtatgtttaccaattgatgg

SEQ ID NO: 141028 - DNA, 25 bp, Artificial
  probe
  misc_feature (1)..(25): SEQ ID NO: 3048; WAN024D2O_at; Start 128; Stop 152
caattacattacatgaactaggtca

SEQ ID NO: 141029 - DNA, 25 bp, Artificial
  probe
  misc_feature (1)..(25): SEQ ID NO: 3048; WAN024D2O_at; Start 769; Stop 793
ccacagaacttatctttagaagaag

SEQ ID NO: 141030 - DNA, 25 bp, Artificial
  probe
  misc_feature (1)..(25): SEQ ID NO: 3048; WAN024D2O_at; Start 180; Stop 204
taaactagagatgcttgctactccc

SEQ ID NO: 141031 - DNA, 25 bp, Artificial
  probe
  misc_feature (1)..(25): SEQ ID NO: 3048; WAN024D2O_at; Start 42; Stop 66
gattccgttattgttcctattattg

SEQ ID NO: 141032 - DNA, 25 bp, Artificial
  probe
  misc_feature (1)..(25): SEQ ID NO: 3048; WAN024D2O_at; Start 547; Stop 571
aataatccttatataacaatcgacg

SEQ ID NO: 141033 - DNA, 25 bp, Artificial
  probe
  misc_feature (1)..(25): SEQ ID NO: 3048; WAN024D2O_at; Start 341; Stop 365
gaggtggagctaacctaattgtcgc

SEQ ID NO: 141034 - DNA, 25 bp, Artificial
  probe
  misc_feature (1)..(25): SEQ ID NO: 3048; WAN024D2O_at; Start 254; Stop 278
tagcattcggttattgtcaaatgag

SEQ ID NO: 141035 - DNA, 25 bp, Artificial
  probe
  misc_feature (1)..(25): SEQ ID NO: 3048; WAN024D2O_at; Start 189; Stop 213
gatgcttgctactccctttttcttc

SEQ ID NO: 141036 - DNA, 25 bp, Artificial
  probe
  misc_feature (1)..(25): SEQ ID NO: 3048; WAN024D2O_at; Start 629; Stop 653
tgataaacctttactttgaagtgaa

SEQ ID NO: 141037 - DNA, 25 bp, Artificial
  probe
  misc_feature (1)..(25): SEQ ID NO: 3048; WAN024D2O_at; Start 375; Stop 399
acttttgggatttgtgccgtacgca

SEQ ID NO: 141038 - DNA, 25 bp, Artificial
  probe
  misc_feature (1)..(25): SEQ ID NO: 3048; WAN024D2O_at; Start 740; Stop 764
tactacataaatcttctgattggat

SEQ ID NO: 141039 - DNA, 25 bp, Artificial
  probe
  misc_feature (1)..(25): SEQ ID NO: 3048; WAN024D2O_at; Start 456; Stop 480
tgatggaacagatggcaatgctatt

SEQ ID NO: 141040 - DNA, 25 bp, Artificial
  probe
  misc_feature (1)..(25): SEQ ID NO: 3048; WAN024D2O_at; Start 310; Stop 334
gataggaatttggtgttctacttct

SEQ ID NO: 141041 - DNA, 25 bp, Artificial
  probe
  misc_feature (1)..(25): SEQ ID NO: 3048; WAN024D2O_at; Start 894; Stop 918
tatcgactttattttgaacaaggag

SEQ ID NO: 141042 - DNA, 25 bp, Artificial
  probe
  misc_feature (1)..(25): SEQ ID NO: 3048; WAN024D2O_at; Start 27; Stop 51
catatatttatgtttgattccgtta

SEQ ID NO: 141043 - DNA, 25 bp, Artificial
  probe
  misc_feature (1)..(25): SEQ ID NO: 3048; WAN024D2O_at; Start 801; Stop 825
taccttgtcaaactatatttactcg

SEQ ID NO: 141044 - DNA, 25 bp, Artificial
  probe
  misc_feature (1)..(25): SEQ ID NO: 3048; WAN024D2O_at; Start 517; Stop 541
tatcagagattctttgcgaacagtc

SEQ ID NO: 141045 - DNA, 25 bp, Artificial
  probe
  misc_feature (1)..(25): SEQ ID NO: 3048; WAN024D2O_at; Start 346; Stop 370
ggagctaacctaattgtcgcaatat

SEQ ID NO: 141046 - DNA, 25 bp, Artificial
  probe
  misc_feature (1)..(25): SEQ ID NO: 3048; WAN024D2O_at; Start 709; Stop 733
caggaaaatattatccatgagtact

SEQ ID NO: 141047 - DNA, 25 bp, Artificial
  probe
  misc_feature (1)..(25): SEQ ID NO: 3048; WAN024D2O_at; Start 876; Stop 900
ttttagacaagaagaaattatcgac

SEQ ID NO: 141048 - DNA, 25 bp, Artificial
  probe
  misc_feature (1)..(25): SEQ ID NO: 3048; WAN024D2O_at; Start 145; Stop 169
ctaggtcattttttagtgggaagat

SEQ ID NO: 141049 - DNA, 25 bp, Artificial
  probe
  misc_feature (1)..(25): SEQ ID NO: 6840; WAN024D2P_at; Start 64; Stop 88
acagatggcggaattgcagataaca

SEQ ID NO: 141050 - DNA, 25 bp, Artificial
  probe
  misc_feature (1)..(25): SEQ ID NO: 6840; WAN024D2P_at; Start 41; Stop 65
caaatgtggtcttagataaagaaac

SEQ ID NO: 141051 - DNA, 25 bp, Artificial
  probe
  misc_feature (1)..(25): SEQ ID NO: 6840; WAN024D2P_at; Start 25; Stop 49
atatccccagttaaaccaaatgtgg

SEQ ID NO: 141052 - DNA, 25 bp, Artificial
  probe
  misc_feature (1)..(25): SEQ ID NO: 6840; WAN024D2P_at; Start 11; Stop 35
caatgaaatatcctatatccccagt

SEQ ID NO: 141053 - DNA, 25 bp, Artificial
  probe
  misc_feature (1)..(25): SEQ ID NO: 6840; WAN024D2P_at; Start 62; Stop 86
aaacagatggcggaattgcagataa

SEQ ID NO: 141054 - DNA, 25 bp, Artificial
  probe
  misc_feature (1)..(25): SEQ ID NO: 6840; WAN024D2P_at; Start 82; Stop 106
gataacattttattgtacagtctaa

SEQ ID NO: 141055 - DNA, 25 bp, Artificial
  probe
  misc_feature (1)..(25): SEQ ID NO: 6840; WAN024D2P_at; Start 87; Stop 111
cattttattgtacagtctaactaat

SEQ ID NO: 141056 - DNA, 25 bp, Artificial
  probe
  misc_feature (1)..(25): SEQ ID NO: 6840; WAN024D2P_at; Start 36; Stop 60
taaaccaaatgtggtcttagataaa

SEQ ID NO: 141057 - DNA, 25 bp, Artificial
  probe
  misc_feature (1)..(25): SEQ ID NO: 6840; WAN024D2P_at; Start 65; Stop 89
cagatggcggaattgcagataacat

SEQ ID NO: 141058 - DNA, 25 bp, Artificial
  probe
  misc_feature (1)..(25): SEQ ID NO: 6840; WAN024D2P_at; Start 38; Stop 62
aaccaaatgtggtcttagataaaga

SEQ ID NO: 141059 - DNA, 25 bp, Artificial
  probe
  misc_feature (1)..(25): SEQ ID NO: 6840; WAN024D2P_at; Start 71; Stop 95
gcggaattgcagataacattttatt

SEQ ID NO: 141060 - DNA, 25 bp, Artificial
  probe
  misc_feature (1)..(25): SEQ ID NO: 6840; WAN024D2P_at; Start 67; Stop 91
gatggcggaattgcagataacattt

SEQ ID NO: 141061 - DNA, 25 bp, Artificial
  probe
  misc_feature (1)..(25): SEQ ID NO: 6840; WAN024D2P_at; Start 43; Stop 67
aatgtggtcttagataaagaaacag

SEQ ID NO: 141062 - DNA, 25 bp, Artificial
  probe
  misc_feature (1)..(25): SEQ ID NO: 6840; WAN024D2P_at; Start 31; Stop 55
ccagttaaaccaaatgtggtcttag

SEQ ID NO: 141063 - DNA, 25 bp, Artificial
  probe
  misc_feature (1)..(25): SEQ ID NO: 6840; WAN024D2P_at; Start 51; Stop 75
cttagataaagaaacagatggcgga

SEQ ID NO: 141064 - DNA, 25 bp, Artificial
  probe
  misc_feature (1)..(25): SEQ ID NO: 6840; WAN024D2P_at; Start 55; Stop 79
gataaagaaacagatggcggaattg

SEQ ID NO: 141065 - DNA, 25 bp, Artificial
  probe
  misc_feature (1)..(25): SEQ ID NO: 6840; WAN024D2P_at; Start 58; Stop 82
aaagaaacagatggcggaattgcag

SEQ ID NO: 141066 - DNA, 25 bp, Artificial
  probe
  misc_feature (1)..(25): SEQ ID NO: 6840; WAN024D2P_at; Start 8; Stop 32
gaacaatgaaatatcctatatcccc

SEQ ID NO: 141067 - DNA, 25 bp, Artificial
  probe
  misc_feature (1)..(25): SEQ ID NO: 6840; WAN024D2P_at; Start 53; Stop 77
tagataaagaaacagatggcggaat

SEQ ID NO: 141068 - DNA, 25 bp, Artificial
  probe
  misc_feature (1)..(25): SEQ ID NO: 6840; WAN024D2P_at; Start 69; Stop 93
tggcggaattgcagataacatttta

SEQ ID NO: 141069 - DNA, 25 bp, Artificial
  probe
  misc_feature (1)..(25): SEQ ID NO: 6840; WAN024D2P_at; Start 14; Stop 38
tgaaatatcctatatccccagttaa

SEQ ID NO: 141070 - DNA, 25 bp, Artificial
  probe
  misc_feature (1)..(25): SEQ ID NO: 6840; WAN024D2P_at; Start 48; Stop 72
ggtcttagataaagaaacagatggc

SEQ ID NO: 141071 - DNA, 25 bp, Artificial
  probe
  misc_feature (1)..(25): SEQ ID NO: 6840; WAN024D2P_at; Start 63; Stop 87
aacagatggcggaattgcagataac

SEQ ID NO: 141072 - DNA, 25 bp, Artificial
  probe
  misc_feature (1)..(25): SEQ ID NO: 6840; WAN024D2P_at; Start 2; Stop 26
tggatagaacaatgaaatatcctat

SEQ ID NO: 141073 - DNA, 25 bp, Artificial
  probe
  misc_feature (1)..(25): SEQ ID NO: 6840; WAN024D2P_at; Start 52; Stop 76
ttagataaagaaacagatggcggaa

SEQ ID NO: 141074 - DNA, 25 bp, Artificial
  probe
  misc_feature (1)..(25): SEQ ID NO: 6840; WAN024D2P_at; Start 50; Stop 74
tcttagataaagaaacagatggcgg

SEQ ID NO: 141075 - DNA, 25 bp, Artificial
  probe
  misc_feature (1)..(25): SEQ ID NO: 6840; WAN024D2P_at; Start 57; Stop 81
taaagaaacagatggcggaattgca

SEQ ID NO: 141076 - DNA, 25 bp, Artificial
  probe
  misc_feature (1)..(25): SEQ ID NO: 6840; WAN024D2P_at; Start 79; Stop 103
gcagataacattttattgtacagtc

SEQ ID NO: 141077 - DNA, 25 bp, Artificial
  probe
  misc_feature (1)..(25): SEQ ID NO: 6840; WAN024D2P_at; Start 6; Stop 30
tagaacaatgaaatatcctatatcc

SEQ ID NO: 141078 - DNA, 25 bp, Artificial
  probe
  misc_feature (1)..(25): SEQ ID NO: 6840; WAN024D2P_at; Start 32; Stop 56
cagttaaaccaaatgtggtcttaga

SEQ ID NO: 141079 - DNA, 25 bp, Artificial
  probe
  misc_feature (1)..(25): SEQ ID NO: 6840; WAN024D2P_at; Start 24; Stop 48
tatatccccagttaaaccaaatgtg

SEQ ID NO: 141080 - DNA, 25 bp, Artificial
  probe
  misc_feature (1)..(25): SEQ ID NO: 6840; WAN024D2P_at; Start 70; Stop 94
ggcggaattgcagataacattttat

SEQ ID NO: 141081 - DNA, 25 bp, Artificial
  probe
  misc_feature (1)..(25): SEQ ID NO: 6840; WAN024D2P_at; Start 85; Stop 109
aacattttattgtacagtctaacta

SEQ ID NO: 141082 - DNA, 25 bp, Artificial
  probe
  misc_feature (1)..(25): SEQ ID NO: 6840; WAN024D2P_at; Start 15; Stop 39
gaaatatcctatatccccagttaaa

SEQ ID NO: 141083 - DNA, 25 bp, Artificial
  probe
  misc_feature (1)..(25): SEQ ID NO: 941; WAN024D2Q_at; Start 541; Stop 565
gaatcggagcagcaacggtacaaat

SEQ ID NO: 141084 - DNA, 25 bp, Artificial
  probe
  misc_feature (1)..(25): SEQ ID NO: 941; WAN024D2Q_at; Start 873; Stop 897
tattgctgagtatatccgaaaggtt

SEQ ID NO: 141085 - DNA, 25 bp, Artificial
  probe
  misc_feature (1)..(25): SEQ ID NO: 941; WAN024D2Q_at; Start 911; Stop 935
ggataagaatacctcgaactattgc

SEQ ID NO: 141086 - DNA, 25 bp, Artificial
  probe
  misc_feature (1)..(25): SEQ ID NO: 941; WAN024D2Q_at; Start 2927; Stop 2951
taaggtatatcgcactgaatcagaa

SEQ ID NO: 141087 - DNA, 25 bp, Artificial
  probe
  misc_feature (1)..(25): SEQ ID NO: 941; WAN024D2Q_at; Start 2949; Stop 2973
gaatgacaaaaagatagttatcccc

SEQ ID NO: 141088 - DNA, 25 bp, Artificial
  probe
  misc_feature (1)..(25): SEQ ID NO: 941; WAN024D2Q_at; Start 1367; Stop 1391
aaaacctgcctgttcgggatggtga

SEQ ID NO: 141089 - DNA, 25 bp, Artificial
  probe
  misc_feature (1)..(25): SEQ ID NO: 941; WAN024D2Q_at; Start 1161; Stop 1185
gagtttgctggataccctgtttcac

SEQ ID NO: 141090 - DNA, 25 bp, Artificial
  probe
  misc_feature (1)..(25): SEQ ID NO: 941; WAN024D2Q_at; Start 614; Stop 638
acaaatatcccgttttactgaggca

SEQ ID NO: 141091 - DNA, 25 bp, Artificial
  probe
  misc_feature (1)..(25): SEQ ID NO: 941; WAN024D2Q_at; Start 2691; Stop 2715
tccagagggaattgtagctagttta

SEQ ID NO: 141092 - DNA, 25 bp, Artificial
  probe
  misc_feature (1)..(25): SEQ ID NO: 941; WAN024D2Q_at; Start 1858; Stop 1882
tattttccaagctttgatcagcgaa

SEQ ID NO: 141093 - DNA, 25 bp, Artificial
  probe
  misc_feature (1)..(25): SEQ ID NO: 941; WAN024D2Q_at; Start 2724; Stop 2748
tacattttgccatggaagtatggcc

SEQ ID NO: 141094 - DNA, 25 bp, Artificial
  probe
  misc_feature (1)..(25): SEQ ID NO: 941; WAN024D2Q_at; Start 195; Stop 219
cactgtgaactatgattataccgag

SEQ ID NO: 141095 - DNA, 25 bp, Artificial
  probe
  misc_feature (1)..(25): SEQ ID NO: 941; WAN024D2Q_at; Start 1196; Stop 1220
gaactttgcttcttccaacagaggg

SEQ ID NO: 141096 - DNA, 25 bp, Artificial
  probe
  misc_feature (1)..(25): SEQ ID NO: 941; WAN024D2Q_at; Start 211; Stop 235
tataccgaggaacagataagactat

SEQ ID NO: 141097 - DNA, 25 bp, Artificial
  probe
  misc_feature (1)..(25): SEQ ID NO: 941; WAN024D2Q_at; Start 760; Stop 784
tttggaaagggtgatacacacagcc

SEQ ID NO: 141098 - DNA, 25 bp, Artificial
  probe
  misc_feature (1)..(25): SEQ ID NO: 941; WAN024D2Q_at; Start 2514; Stop 2538
ttttggccatggactatcaggtgta

SEQ ID NO: 141099 - DNA, 25 bp, Artificial
  probe
  misc_feature (1)..(25): SEQ ID NO: 941; WAN024D2Q_at; Start 644; Stop 668
cggagtcttgtcttcggttctatac

SEQ ID NO: 141100 - DNA, 25 bp, Artificial
  probe
  misc_feature (1)..(25): SEQ ID NO: 941; WAN024D2Q_at; Start 629; Stop 653
tactgaggcaaatatcggagtcttg

SEQ ID NO: 141101 - DNA, 25 bp, Artificial
  probe
  misc_feature (1)..(25): SEQ ID NO: 941; WAN024D2Q_at; Start 1180; Stop 1204
tttcacagggtgactcgaactttgc

SEQ ID NO: 141102 - DNA, 25 bp, Artificial
  probe
  misc_feature (1)..(25): SEQ ID NO: 941; WAN024D2Q_at; Start 801; Stop 825
gatactcttctttgatgacgcgaaa

SEQ ID NO: 141103 - DNA, 25 bp, Artificial
  probe
  misc_feature (1)..(25): SEQ ID NO: 941; WAN024D2Q_at; Start 2897; Stop 2921
caggtgtgactggtattgcttatac

SEQ ID NO: 141104 - DNA, 25 bp, Artificial
  probe
  misc_feature (1)..(25): SEQ ID NO: 941; WAN024D2Q_at; Start 926; Stop 950
gaactattgcttattcggatcacag

SEQ ID NO: 141105 - DNA, 25 bp, Artificial
  probe
  misc_feature (1)..(25): SEQ ID NO: 941; WAN024D2Q_at; Start 2848; Stop 2872
gagtatcgtatcgtccaaacaagca

SEQ ID NO: 141106 - DNA, 25 bp, Artificial
  probe
  misc_feature (1)..(25): SEQ ID NO: 941; WAN024D2Q_at; Start 1251; Stop 1275
gatgagtgctcttacaggaaatttt

SEQ ID NO: 141107 - DNA, 25 bp, Artificial
  probe
  misc_feature (1)..(25): SEQ ID NO: 941; WAN024D2Q_at; Start 2673; Stop 2697
taatcatccccaaagtgttccagag

SEQ ID NO: 141108 - DNA, 25 bp, Artificial
  probe
  misc_feature (1)..(25): SEQ ID NO: 941; WAN024D2Q_at; Start 2045; Stop 2069
ctaaatggtgtcttgaacaaacggg

SEQ ID NO: 141109 - DNA, 25 bp, Artificial
  probe
  misc_feature (1)..(25): SEQ ID NO: 941; WAN024D2Q_at; Start 2163; Stop 2187
taaaatgttatctgcaattccgcca

SEQ ID NO: 141110 - DNA, 25 bp, Artificial
  probe
  misc_feature (1)..(25): SEQ ID NO: 941; WAN024D2Q_at; Start 2761; Stop 2785
tacatcgactacatgaaagaaatgg

SEQ ID NO: 141111 - DNA, 25 bp, Artificial
  probe
  misc_feature (1)..(25): SEQ ID NO: 941; WAN024D2Q_at; Start 1612; Stop 1636
aaagcattggaaaatctctggagca

SEQ ID NO: 141112 - DNA, 25 bp, Artificial
  probe
  misc_feature (1)..(25): SEQ ID NO: 941; WAN024D2Q_at; Start 1518; Stop 1542
gacaagggtactttttagagacaca

SEQ ID NO: 141113 - DNA, 25 bp, Artificial
  probe
  misc_feature (1)..(25): SEQ ID NO: 941; WAN024D2Q_at; Start 2269; Stop 2293
gatacaaatactctcgcatgcttaa

SEQ ID NO: 141114 - DNA, 25 bp, Artificial
  probe
  misc_feature (1)..(25): SEQ ID NO: 941; WAN024D2Q_at; Start 1663; Stop 1687
gcaagcgaatgtgaacaaatgaggt

SEQ ID NO: 141115 - DNA, 25 bp, Artificial
  probe
  misc_feature (1)..(25): SEQ ID NO: 941; WAN024D2Q_at; Start 2602; Stop 2626
caactagttcctagggagaaaatca

SEQ ID NO: 141116 - DNA, 25 bp, Artificial
  probe
  misc_feature (1)..(25): SEQ ID NO: 941; WAN024D2Q_at; Start 1645; Stop 1669
tctaatcaaggtattgtagcaagcg

SEQ ID NO: 141117 - DNA, 25 bp, Artificial
  probe
  misc_feature (1)..(25): SEQ ID NO: 693; WAN024D2R_at; Start 75; Stop 99
cacagatggtgctgaccctagatca

SEQ ID NO: 141118 - DNA, 25 bp, Artificial
  probe
  misc_feature (1)..(25): SEQ ID NO: 693; WAN024D2R_at; Start 5; Stop 29
aaaatgattttgtaatcggaaagag

SEQ ID NO: 141119 - DNA, 25 bp, Artificial
  probe
  misc_feature (1)..(25): SEQ ID NO: 693; WAN024D2R_at; Start 20; Stop 44
tcggaaagagtttgaaagaattatc

SEQ ID NO: 141120 - DNA, 25 bp, Artificial
  probe
  misc_feature (1)..(25): SEQ ID NO: 693; WAN024D2R_at; Start 77; Stop 101
cagatggtgctgaccctagatcaac

SEQ ID NO: 141121 - DNA, 25 bp, Artificial
  probe
  misc_feature (1)..(25): SEQ ID NO: 693; WAN024D2R_at; Start 53; Stop 77
aaatgcaattggtttatggtggcac

SEQ ID NO: 141122 - DNA, 25 bp, Artificial
  probe
  misc_feature (1)..(25): SEQ ID NO: 693; WAN024D2R_at; Start 151; Stop 175
gctcagactcgttgtggcaaagaca

SEQ ID NO: 141123 - DNA, 25 bp, Artificial
  probe
  misc_feature (1)..(25): SEQ ID NO: 693; WAN024D2R_at; Start 148; Stop 172
tcagctcagactcgttgtggcaaag

SEQ ID NO: 141124 - DNA, 25 bp, Artificial
  probe
  misc_feature (1)..(25): SEQ ID NO: 693; WAN024D2R_at; Start 43; Stop 67
tctcttgaagaaatgcaattggttt

SEQ ID NO: 141125 - DNA, 25 bp, Artificial
  probe
  misc_feature (1)..(25): SEQ ID NO: 693; WAN024D2R_at; Start 41; Stop 65
tatctcttgaagaaatgcaattggt

SEQ ID NO: 141126 - DNA, 25 bp, Artificial
  probe
  misc_feature (1)..(25): SEQ ID NO: 693; WAN024D2R_at; Start 72; Stop 96
tggcacagatggtgctgaccctaga

SEQ ID NO: 141127 - DNA, 25 bp, Artificial
  probe
  misc_feature (1)..(25): SEQ ID NO: 693; WAN024D2R_at; Start 67; Stop 91
tatggtggcacagatggtgctgacc

SEQ ID NO: 141128 - DNA, 25 bp, Artificial
  probe
  misc_feature (1)..(25): SEQ ID NO: 693; WAN024D2R_at; Start 165; Stop 189
tggcaaagacaacaagaaaaaataa

SEQ ID NO: 141129 - DNA, 25 bp, Artificial
  probe
  misc_feature (1)..(25): SEQ ID NO: 693; WAN024D2R_at; Start 84; Stop 108
tgctgaccctagatcaacaattata

SEQ ID NO: 141130 - DNA, 25 bp, Artificial
  probe
  misc_feature (1)..(25): SEQ ID NO: 693; WAN024D2R_at; Start 145; Stop 169
gggtcagctcagactcgttgtggca

SEQ ID NO: 141131 - DNA, 25 bp, Artificial
  probe
  misc_feature (1)..(25): SEQ ID NO: 693; WAN024D2R_at; Start 82; Stop 106
ggtgctgaccctagatcaacaatta

SEQ ID NO: 141132 - DNA, 25 bp, Artificial
  probe
  misc_feature (1)..(25): SEQ ID NO: 693; WAN024D2R_at; Start 122; Stop 146
taagttttattgcatcatatttggg

SEQ ID NO: 141133 - DNA, 25 bp, Artificial
  probe
  misc_feature (1)..(25): SEQ ID NO: 693; WAN024D2R_at; Start 15; Stop 39
tgtaatcggaaagagtttgaaagaa

SEQ ID NO: 141134 - DNA, 25 bp, Artificial
  probe
  misc_feature (1)..(25): SEQ ID NO: 693; WAN024D2R_at; Start 87; Stop 111
tgaccctagatcaacaattatatgt

SEQ ID NO: 141135 - DNA, 25 bp, Artificial
  probe
  misc_feature (1)..(25): SEQ ID NO: 693; WAN024D2R_at; Start 159; Stop 183
tcgttgtggcaaagacaacaagaaa

SEQ ID NO: 141136 - DNA, 25 bp, Artificial
  probe
  misc_feature (1)..(25): SEQ ID NO: 693; WAN024D2R_at; Start 58; Stop 82
caattggtttatggtggcacagatg

SEQ ID NO: 141137 - DNA, 25 bp, Artificial
  probe
  misc_feature (1)..(25): SEQ ID NO: 693; WAN024D2R_at; Start 156; Stop 180
gactcgttgtggcaaagacaacaag

SEQ ID NO: 141138 - DNA, 25 bp, Artificial
  probe
  misc_feature (1)..(25): SEQ ID NO: 693; WAN024D2R_at; Start 95; Stop 119
gatcaacaattatatgttctgctac

SEQ ID NO: 141139 - DNA, 25 bp, Artificial
  probe
  misc_feature (1)..(25): SEQ ID NO: 693; WAN024D2R_at; Start 109; Stop 133
tgttctgctacattaagttttattg

SEQ ID NO: 141140 - DNA, 25 bp, Artificial
  probe
  misc_feature (1)..(25): SEQ ID NO: 693; WAN024D2R_at; Start 147; Stop 171
gtcagctcagactcgttgtggcaaa

SEQ ID NO: 141141 - DNA, 25 bp, Artificial
  probe
  misc_feature (1)..(25): SEQ ID NO: 693; WAN024D2R_at; Start 27; Stop 51
gagtttgaaagaattatctcttgaa

SEQ ID NO: 141142 - DNA, 25 bp, Artificial
  probe
  misc_feature (1)..(25): SEQ ID NO: 693; WAN024D2R_at; Start 69; Stop 93
tggtggcacagatggtgctgaccct

SEQ ID NO: 141143 - DNA, 25 bp, Artificial
  probe
  misc_feature (1)..(25): SEQ ID NO: 693; WAN024D2R_at; Start 163; Stop 187
tgtggcaaagacaacaagaaaaaat

SEQ ID NO: 141144 - DNA, 25 bp, Artificial
  probe
  misc_feature (1)..(25): SEQ ID NO: 693; WAN024D2R_at; Start 101; Stop 125
caattatatgttctgctacattaag

SEQ ID NO: 141145 - DNA, 25 bp, Artificial
  probe
  misc_feature (1)..(25): SEQ ID NO: 693; WAN024D2R_at; Start 9; Stop 33
tgattttgtaatcggaaagagtttg

SEQ ID NO: 141146 - DNA, 25 bp, Artificial
  probe
  misc_feature (1)..(25): SEQ ID NO: 693; WAN024D2R_at; Start 154; Stop 178
cagactcgttgtggcaaagacaaca

SEQ ID NO: 141147 - DNA, 25 bp, Artificial
  probe
  misc_feature (1)..(25): SEQ ID NO: 693; WAN024D2R_at; Start 149; Stop 173
cagctcagactcgttgtggcaaaga

SEQ ID NO: 141148 - DNA, 25 bp, Artificial
  probe
  misc_feature (1)..(25): SEQ ID NO: 693; WAN024D2R_at; Start 115; Stop 139
gctacattaagttttattgcatcat

SEQ ID NO: 141149 - DNA, 25 bp, Artificial
  probe
  misc_feature (1)..(25): SEQ ID NO: 693; WAN024D2R_at; Start 56; Stop 80
tgcaattggtttatggtggcacaga

SEQ ID NO: 141150 - DNA, 25 bp, Artificial
  probe
  misc_feature (1)..(25): SEQ ID NO: 693; WAN024D2R_at; Start 78; Stop 102
agatggtgctgaccctagatcaaca

SEQ ID NO: 141151 - DNA, 25 bp, Artificial
  probe
  misc_feature (1)..(25): SEQ ID NO: 1395; WAN024D2S_at; Start 79; Stop 103
tatggtgcatctgatggtgcagagc

SEQ ID NO: 141152 - DNA, 25 bp, Artificial
  probe
  misc_feature (1)..(25): SEQ ID NO: 1395; WAN024D2S_at; Start 50; Stop 74
cattgtctgctgatgaaatgagttt

SEQ ID NO: 141153 - DNA, 25 bp, Artificial
  probe
  misc_feature (1)..(25): SEQ ID NO: 1395; WAN024D2S_at; Start 133; Stop 157
aaatcagctgcagctagctcgaaag

SEQ ID NO: 141154 - DNA, 25 bp, Artificial
  probe
  misc_feature (1)..(25): SEQ ID NO: 1395; WAN024D2S_at; Start 160; Stop 184
tgcattagtgcagctgtttctggta

SEQ ID NO: 141155 - DNA, 25 bp, Artificial
  probe
  misc_feature (1)..(25): SEQ ID NO: 1395; WAN024D2S_at; Start 93; Stop 117
tggtgcagagccacgttggacgcct

SEQ ID NO: 141156 - DNA, 25 bp, Artificial
  probe
  misc_feature (1)..(25): SEQ ID NO: 1395; WAN024D2S_at; Start 53; Stop 77
tgtctgctgatgaaatgagtttaat

SEQ ID NO: 141157 - DNA, 25 bp, Artificial
  probe
  misc_feature (1)..(25): SEQ ID NO: 1395; WAN024D2S_at; Start 89; Stop 113
ctgatggtgcagagccacgttggac

SEQ ID NO: 141158 - DNA, 25 bp, Artificial
  probe
  misc_feature (1)..(25): SEQ ID NO: 1395; WAN024D2S_at; Start 96; Stop 120
tgcagagccacgttggacgcctact

SEQ ID NO: 141159 - DNA, 25 bp, Artificial
  probe
  misc_feature (1)..(25): SEQ ID NO: 1395; WAN024D2S_at; Start 142; Stop 166
gcagctagctcgaaagtatgcatta

SEQ ID NO: 141160 - DNA, 25 bp, Artificial
  probe
  misc_feature (1)..(25): SEQ ID NO: 1395; WAN024D2S_at; Start 121; Stop 145
cctattattttgaaatcagctgcag

SEQ ID NO: 141161 - DNA, 25 bp, Artificial
  probe
  misc_feature (1)..(25): SEQ ID NO: 1395; WAN024D2S_at; Start 190; Stop 214
gggctagttagctacaataatgatt

SEQ ID NO: 141162 - DNA, 25 bp, Artificial
  probe
  misc_feature (1)..(25): SEQ ID NO: 1395; WAN024D2S_at; Start 129; Stop 153
tttgaaatcagctgcagctagctcg

SEQ ID NO: 141163 - DNA, 25 bp, Artificial
  probe
  misc_feature (1)..(25): SEQ ID NO: 1395; WAN024D2S_at; Start 111; Stop 135
gacgcctactcctattattttgaaa

SEQ ID NO: 141164 - DNA, 25 bp, Artificial
  probe
  misc_feature (1)..(25): SEQ ID NO: 1395; WAN024D2S_at; Start 74; Stop 98
taatttatggtgcatctgatggtgc

SEQ ID NO: 141165 - DNA, 25 bp, Artificial
  probe
  misc_feature (1)..(25): SEQ ID NO: 1395; WAN024D2S_at; Start 109; Stop 133
tggacgcctactcctattattttga

SEQ ID NO: 141166 - DNA, 25 bp, Artificial
  probe
  misc_feature (1)..(25): SEQ ID NO: 1395; WAN024D2S_at; Start 101; Stop 125
agccacgttggacgcctactcctat

SEQ ID NO: 141167 - DNA, 25 bp, Artificial
  probe
  misc_feature (1)..(25): SEQ ID NO: 1395; WAN024D2S_at; Start 152; Stop 176
cgaaagtatgcattagtgcagctgt

SEQ ID NO: 141168 - DNA, 25 bp, Artificial
  probe
  misc_feature (1)..(25): SEQ ID NO: 1395; WAN024D2S_at; Start 139; Stop 163
gctgcagctagctcgaaagtatgca

SEQ ID NO: 141169 - DNA, 25 bp, Artificial
  probe
  misc_feature (1)..(25): SEQ ID NO: 1395; WAN024D2S_at; Start 131; Stop 155
tgaaatcagctgcagctagctcgaa

SEQ ID NO: 141170 - DNA, 25 bp, Artificial
  probe
  misc_feature (1)..(25): SEQ ID NO: 1395; WAN024D2S_at; Start 197; Stop 221
ttagctacaataatgattgtttggg

SEQ ID NO: 141171 - DNA, 25 bp, Artificial
  probe
  misc_feature (1)..(25): SEQ ID NO: 1395; WAN024D2S_at; Start 145; Stop 169
gctagctcgaaagtatgcattagtg

SEQ ID NO: 141172 - DNA, 25 bp, Artificial
  probe
  misc_feature (1)..(25): SEQ ID NO: 1395; WAN024D2S_at; Start 149; Stop 173
gctcgaaagtatgcattagtgcagc

SEQ ID NO: 141173 - DNA, 25 bp, Artificial
  probe
  misc_feature (1)..(25): SEQ ID NO: 1395; WAN024D2S_at; Start 44; Stop 68
taaaatcattgtctgctgatgaaat

SEQ ID NO: 141174 - DNA, 25 bp, Artificial
  probe
  misc_feature (1)..(25): SEQ ID NO: 1395; WAN024D2S_at; Start 158; Stop 182
tatgcattagtgcagctgtttctgg

SEQ ID NO: 141175 - DNA, 25 bp, Artificial
  probe
  misc_feature (1)..(25): SEQ ID NO: 1395; WAN024D2S_at; Start 147; Stop 171
tagctcgaaagtatgcattagtgca

SEQ ID NO: 141176 - DNA, 25 bp, Artificial
  probe
  misc_feature (1)..(25): SEQ ID NO: 1395; WAN024D2S_at; Start 37; Stop 61
aaaagtttaaaatcattgtctgctg

SEQ ID NO: 141177 - DNA, 25 bp, Artificial
  probe
  misc_feature (1)..(25): SEQ ID NO: 1395; WAN024D2S_at; Start 65; Stop 89
aaatgagtttaatttatggtgcatc

SEQ ID NO: 141178 - DNA, 25 bp, Artificial
  probe
  misc_feature (1)..(25): SEQ ID NO: 1395; WAN024D2S_at; Start 104; Stop 128
cacgttggacgcctactcctattat

SEQ ID NO: 141179 - DNA, 25 bp, Artificial
  probe
  misc_feature (1)..(25): SEQ ID NO: 1395; WAN024D2S_at; Start 84; Stop 108
tgcatctgatggtgcagagccacgt

SEQ ID NO: 141180 - DNA, 25 bp, Artificial
  probe
  misc_feature (1)..(25): SEQ ID NO: 1395; WAN024D2S_at; Start 81; Stop 105
tggtgcatctgatggtgcagagcca

SEQ ID NO: 141181 - DNA, 25 bp, Artificial
  probe
  misc_feature (1)..(25): SEQ ID NO: 1395; WAN024D2S_at; Start 136; Stop 160
tcagctgcagctagctcgaaagtat

SEQ ID NO: 141182 - DNA, 25 bp, Artificial
  probe
  misc_feature (1)..(25): SEQ ID NO: 1395; WAN024D2S_at; Start 165; Stop 189
tagtgcagctgtttctggtattggg

SEQ ID NO: 141183 - DNA, 25 bp, Artificial
  probe
  misc_feature (1)..(25): SEQ ID NO: 1395; WAN024D2S_at; Start 86; Stop 110
catctgatggtgcagagccacgttg

SEQ ID NO: 141184 - DNA, 25 bp, Artificial
  probe
  misc_feature (1)..(25): SEQ ID NO: 1395; WAN024D2S_at; Start 126; Stop 150
tattttgaaatcagctgcagctagc

SEQ ID NO: 141185 - DNA, 25 bp, Artificial
  probe
  misc_feature (1)..(25): SEQ ID NO: 6436; WAN024D2T_at; Start 31; Stop 55
gctatattagtattactaggtgttt

SEQ ID NO: 141186 - DNA, 25 bp, Artificial
  probe
  misc_feature (1)..(25): SEQ ID NO: 6436; WAN024D2T_at; Start 22; Stop 46
caaaaattagctatattagtattac

SEQ ID NO: 141187 - DNA, 25 bp, Artificial
  probe
  misc_feature (1)..(25): SEQ ID NO: 6436; WAN024D2T_at; Start 36; Stop 60
attagtattactaggtgtttttatg

SEQ ID NO: 141188 - DNA, 25 bp, Artificial
  probe
  misc_feature (1)..(25): SEQ ID NO: 6436; WAN024D2T_at; Start 21; Stop 45
tcaaaaattagctatattagtatta

SEQ ID NO: 141189 - DNA, 25 bp, Artificial
  probe
  misc_feature (1)..(25): SEQ ID NO: 6436; WAN024D2T_at; Start 10; Stop 34
aatcgtggaattcaaaaattagcta

SEQ ID NO: 141190 - DNA, 25 bp, Artificial
  probe
  misc_feature (1)..(25): SEQ ID NO: 6436; WAN024D2T_at; Start 30; Stop 54
agctatattagtattactaggtgtt

SEQ ID NO: 141191 - DNA, 25 bp, Artificial
  probe
  misc_feature (1)..(25): SEQ ID NO: 6436; WAN024D2T_at; Start 18; Stop 42
aattcaaaaattagctatattagta

SEQ ID NO: 141192 - DNA, 25 bp, Artificial
  probe
  misc_feature (1)..(25): SEQ ID NO: 6436; WAN024D2T_at; Start 27; Stop 51
attagctatattagtattactaggt

SEQ ID NO: 141193 - DNA, 25 bp, Artificial
  probe
  misc_feature (1)..(25): SEQ ID NO: 6436; WAN024D2T_at; Start 14; Stop 38
gtggaattcaaaaattagctatatt

SEQ ID NO: 141194 - DNA, 25 bp, Artificial
  probe
  misc_feature (1)..(25): SEQ ID NO: 6436; WAN024D2T_at; Start 28; Stop 52
ttagctatattagtattactaggtg

SEQ ID NO: 141195 - DNA, 25 bp, Artificial
  probe
  misc_feature (1)..(25): SEQ ID NO: 6436; WAN024D2T_at; Start 20; Stop 44
ttcaaaaattagctatattagtatt

SEQ ID NO: 141196 - DNA, 25 bp, Artificial
  probe
  misc_feature (1)..(25): SEQ ID NO: 6436; WAN024D2T_at; Start 32; Stop 56
ctatattagtattactaggtgtttt

SEQ ID NO: 141197 - DNA, 25 bp, Artificial
  probe
  misc_feature (1)..(25): SEQ ID NO: 6436; WAN024D2T_at; Start 12; Stop 36
tcgtggaattcaaaaattagctata

SEQ ID NO: 141198 - DNA, 25 bp, Artificial
  probe
  misc_feature (1)..(25): SEQ ID NO: 6436; WAN024D2T_at; Start 9; Stop 33
aaatcgtggaattcaaaaattagct

SEQ ID NO: 141199 - DNA, 25 bp, Artificial
  probe
  misc_feature (1)..(25): SEQ ID NO: 6436; WAN024D2T_at; Start 15; Stop 39
tggaattcaaaaattagctatatta

SEQ ID NO: 141200 - DNA, 25 bp, Artificial
  probe
  misc_feature (1)..(25): SEQ ID NO: 6436; WAN024D2T_at; Start 23; Stop 47
aaaaattagctatattagtattact

SEQ ID NO: 141201 - DNA, 25 bp, Artificial
  probe
  misc_feature (1)..(25): SEQ ID NO: 6436; WAN024D2T_at; Start 26; Stop 50
aattagctatattagtattactagg

SEQ ID NO: 141202 - DNA, 25 bp, Artificial
  probe
  misc_feature (1)..(25): SEQ ID NO: 6436; WAN024D2T_at; Start 16; Stop 40
ggaattcaaaaattagctatattag

SEQ ID NO: 141203 - DNA, 25 bp, Artificial
  probe
  misc_feature (1)..(25): SEQ ID NO: 6436; WAN024D2T_at; Start 2; Stop 26
tgaagaaaaatcgtggaattcaaaa

SEQ ID NO: 141204 - DNA, 25 bp, Artificial
  probe
  misc_feature (1)..(25): SEQ ID NO: 6436; WAN024D2T_at; Start 24; Stop 48
aaaattagctatattagtattacta

SEQ ID NO: 141205 - DNA, 25 bp, Artificial
  probe
  misc_feature (1)..(25): SEQ ID NO: 6436; WAN024D2T_at; Start 29; Stop 53
tagctatattagtattactaggtgt

SEQ ID NO: 141206 - DNA, 25 bp, Artificial
  probe
  misc_feature (1)..(25): SEQ ID NO: 6436; WAN024D2T_at; Start 11; Stop 35
atcgtggaattcaaaaattagctat

SEQ ID NO: 141207 - DNA, 25 bp, Artificial
  probe
  misc_feature (1)..(25): SEQ ID NO: 6436; WAN024D2T_at; Start 13; Stop 37
cgtggaattcaaaaattagctatat

SEQ ID NO: 141208 - DNA, 25 bp, Artificial
  probe
  misc_feature (1)..(25): SEQ ID NO: 6436; WAN024D2T_at; Start 25; Stop 49
aaattagctatattagtattactag

SEQ ID NO: 141209 - DNA, 25 bp, Artificial
  probe
  misc_feature (1)..(25): SEQ ID NO: 6436; WAN024D2T_at; Start 1; Stop 25
atgaagaaaaatcgtggaattcaaa

SEQ ID NO: 141210 - DNA, 25 bp, Artificial
  probe
  misc_feature (1)..(25): SEQ ID NO: 6436; WAN024D2T_at; Start 19; Stop 43
attcaaaaattagctatattagtat

SEQ ID NO: 141211 - DNA, 25 bp, Artificial
  probe
  misc_feature (1)..(25): SEQ ID NO: 6436; WAN024D2T_at; Start 17; Stop 41
gaattcaaaaattagctatattagt

SEQ ID NO: 141212 - DNA, 25 bp, Artificial
  probe
  misc_feature (1)..(25): SEQ ID NO: 1490; WAN024D2U_at; Start 130; Stop 154
caaaagaagtccaatggtcttgatg

SEQ ID NO: 141213 - DNA, 25 bp, Artificial
  probe
  misc_feature (1)..(25): SEQ ID NO: 1490; WAN024D2U_at; Start 31; Stop 55
gttacatttgcattgctaggtgttt

SEQ ID NO: 141214 - DNA, 25 bp, Artificial
  probe
  misc_feature (1)..(25): SEQ ID NO: 1490; WAN024D2U_at; Start 124; Stop 148
caatcgcaaaagaagtccaatggtc

SEQ ID NO: 141215 - DNA, 25 bp, Artificial
  probe
  misc_feature (1)..(25): SEQ ID NO: 1490; WAN024D2U_at; Start 36; Stop 60
atttgcattgctaggtgtttttatg

SEQ ID NO: 141216 - DNA, 25 bp, Artificial
  probe
  misc_feature (1)..(25): SEQ ID NO: 1490; WAN024D2U_at; Start 148; Stop 172
cttgatgttgggaaggcggattaac

SEQ ID NO: 141217 - DNA, 25 bp, Artificial
  probe
  misc_feature (1)..(25): SEQ ID NO: 1490; WAN024D2U_at; Start 125; Stop 149
aatcgcaaaagaagtccaatggtct

SEQ ID NO: 141218 - DNA, 25 bp, Artificial
  probe
  misc_feature (1)..(25): SEQ ID NO: 1490; WAN024D2U_at; Start 135; Stop 159
gaagtccaatggtcttgatgttggg

SEQ ID NO: 141219 - DNA, 25 bp, Artificial
  probe
  misc_feature (1)..(25): SEQ ID NO: 1490; WAN024D2U_at; Start 123; Stop 147
gcaatcgcaaaagaagtccaatggt

SEQ ID NO: 141220 - DNA, 25 bp, Artificial
  probe
  misc_feature (1)..(25): SEQ ID NO: 1490; WAN024D2U_at; Start 116; Stop 140
ttcgagtgcaatcgcaaaagaagtc

SEQ ID NO: 141221 - DNA, 25 bp, Artificial
  probe
  misc_feature (1)..(25): SEQ ID NO: 1490; WAN024D2U_at; Start 126; Stop 150
atcgcaaaagaagtccaatggtctt

SEQ ID NO: 141222 - DNA, 25 bp, Artificial
  probe
  misc_feature (1)..(25): SEQ ID NO: 1490; WAN024D2U_at; Start 147; Stop 171
tcttgatgttgggaaggcggattaa

SEQ ID NO: 141223 - DNA, 25 bp, Artificial
  probe
  misc_feature (1)..(25): SEQ ID NO: 1490; WAN024D2U_at; Start 136; Stop 160
aagtccaatggtcttgatgttggga

SEQ ID NO: 141224 - DNA, 25 bp, Artificial
  probe
  misc_feature (1)..(25): SEQ ID NO: 1490; WAN024D2U_at; Start 133; Stop 157
aagaagtccaatggtcttgatgttg

SEQ ID NO: 141225 - DNA, 25 bp, Artificial
  probe
  misc_feature (1)..(25): SEQ ID NO: 1490; WAN024D2U_at; Start 127; Stop 151
tcgcaaaagaagtccaatggtcttg

SEQ ID NO: 141226 - DNA, 25 bp, Artificial
  probe
  misc_feature (1)..(25): SEQ ID NO: 1490; WAN024D2U_at; Start 137; Stop 161
agtccaatggtcttgatgttgggaa

SEQ ID NO: 141227 - DNA, 25 bp, Artificial
  probe
  misc_feature (1)..(25): SEQ ID NO: 1490; WAN024D2U_at; Start 28; Stop 52
ttagttacatttgcattgctaggtg

SEQ ID NO: 141228 - DNA, 25 bp, Artificial
  probe
  misc_feature (1)..(25): SEQ ID NO: 1490; WAN024D2U_at; Start 149; Stop 173
ttgatgttgggaaggcggattaact

SEQ ID NO: 141229 - DNA, 25 bp, Artificial
  probe
  misc_feature (1)..(25): SEQ ID NO: 1490; WAN024D2U_at; Start 118; Stop 142
cgagtgcaatcgcaaaagaagtcca

SEQ ID NO: 141230 - DNA, 25 bp, Artificial
  probe
  misc_feature (1)..(25): SEQ ID NO: 1490; WAN024D2U_at; Start 114; Stop 138
gattcgagtgcaatcgcaaaagaag

SEQ ID NO: 141231 - DNA, 25 bp, Artificial
  probe
  misc_feature (1)..(25): SEQ ID NO: 1490; WAN024D2U_at; Start 128; Stop 152
cgcaaaagaagtccaatggtcttga

SEQ ID NO: 141232 - DNA, 25 bp, Artificial
  probe
  misc_feature (1)..(25): SEQ ID NO: 1490; WAN024D2U_at; Start 26; Stop 50
aattagttacatttgcattgctagg

SEQ ID NO: 141233 - DNA, 25 bp, Artificial
  probe
  misc_feature (1)..(25): SEQ ID NO: 1490; WAN024D2U_at; Start 122; Stop 146
tgcaatcgcaaaagaagtccaatgg

SEQ ID NO: 141234 - DNA, 25 bp, Artificial
  probe
  misc_feature (1)..(25): SEQ ID NO: 1490; WAN024D2U_at; Start 29; Stop 53
tagttacatttgcattgctaggtgt

SEQ ID NO: 141235 - DNA, 25 bp, Artificial
  probe
  misc_feature (1)..(25): SEQ ID NO: 1490; WAN024D2U_at; Start 35; Stop 59
catttgcattgctaggtgtttttat

SEQ ID NO: 141236 - DNA, 25 bp, Artificial
  probe
  misc_feature (1)..(25): SEQ ID NO: 1490; WAN024D2U_at; Start 151; Stop 175
gatgttgggaaggcggattaactaa

SEQ ID NO: 141237 - DNA, 25 bp, Artificial
  probe
  misc_feature (1)..(25): SEQ ID NO: 1490; WAN024D2U_at; Start 119; Stop 143
gagtgcaatcgcaaaagaagtccaa

SEQ ID NO: 141238 - DNA, 25 bp, Artificial
  probe
  misc_feature (1)..(25): SEQ ID NO: 1490; WAN024D2U_at; Start 150; Stop 174
tgatgttgggaaggcggattaacta

SEQ ID NO: 141239 - DNA, 25 bp, Artificial
  probe
  misc_feature (1)..(25): SEQ ID NO: 1490; WAN024D2U_at; Start 138; Stop 162
gtccaatggtcttgatgttgggaag

SEQ ID NO: 141240 - DNA, 25 bp, Artificial
  probe
  misc_feature (1)..(25): SEQ ID NO: 1490; WAN024D2U_at; Start 129; Stop 153
gcaaaagaagtccaatggtcttgat

SEQ ID NO: 141241 - DNA, 25 bp, Artificial
  probe
  misc_feature (1)..(25): SEQ ID NO: 1490; WAN024D2U_at; Start 121; Stop 145
gtgcaatcgcaaaagaagtccaatg

SEQ ID NO: 141242 - DNA, 25 bp, Artificial
  probe
  misc_feature (1)..(25): SEQ ID NO: 1490; WAN024D2U_at; Start 139; Stop 163
tccaatggtcttgatgttgggaagg

SEQ ID NO: 141243 - DNA, 25 bp, Artificial
  probe
  misc_feature (1)..(25): SEQ ID NO: 1490; WAN024D2U_at; Start 140; Stop 164
ccaatggtcttgatgttgggaaggc

SEQ ID NO: 141244 - DNA, 25 bp, Artificial
  probe
  misc_feature (1)..(25): SEQ ID NO: 1490; WAN024D2U_at; Start 120; Stop 144
agtgcaatcgcaaaagaagtccaat

SEQ ID NO: 141245 - DNA, 25 bp, Artificial
  probe
  misc_feature (1)..(25): SEQ ID NO: 1490; WAN024D2U_at; Start 131; Stop 155
aaaagaagtccaatggtcttgatgt

SEQ ID NO: 141246 - DNA, 25 bp, Artificial
  probe
  misc_feature (1)..(25): SEQ ID NO: 1198; WAN024D2V_at; Start 714; Stop 738
tattcttgtaggaaatgctggagcc

SEQ ID NO: 141247 - DNA, 25 bp, Artificial
  probe
  misc_feature (1)..(25): SEQ ID NO: 1198; WAN024D2V_at; Start 65; Stop 89
ttgcagaaggaatttgtgaacaaag

SEQ ID NO: 141248 - DNA, 25 bp, Artificial
  probe
  misc_feature (1)..(25): SEQ ID NO: 1198; WAN024D2V_at; Start 431; Stop 455
caaatactctgatttatttaaaggc

SEQ ID NO: 141249 - DNA, 25 bp, Artificial
  probe
  misc_feature (1)..(25): SEQ ID NO: 1198; WAN024D2V_at; Start 3; Stop 27
gaatacactcgcagagaaattcaga

SEQ ID NO: 141250 - DNA, 25 bp, Artificial
  probe
  misc_feature (1)..(25): SEQ ID NO: 1198; WAN024D2V_at; Start 24; Stop 48
cagattgaaaagaaaagagttgaga

SEQ ID NO: 141251 - DNA, 25 bp, Artificial
  probe
  misc_feature (1)..(25): SEQ ID NO: 1198; WAN024D2V_at; Start 804; Stop 828
taacaatcctttaatgttgatgaag

SEQ ID NO: 141252 - DNA, 25 bp, Artificial
  probe
  misc_feature (1)..(25): SEQ ID NO: 1198; WAN024D2V_at; Start 54; Stop 78
ccaacaaactcttgcagaaggaatt

SEQ ID NO: 141253 - DNA, 25 bp, Artificial
  probe
  misc_feature (1)..(25): SEQ ID NO: 1198; WAN024D2V_at; Start 717; Stop 741
tcttgtaggaaatgctggagccaaa

SEQ ID NO: 141254 - DNA, 25 bp, Artificial
  probe
  misc_feature (1)..(25): SEQ ID NO: 1198; WAN024D2V_at; Start 825; Stop 849
gaagatagaaaattatttgaaggaa

SEQ ID NO: 141255 - DNA, 25 bp, Artificial
  probe
  misc_feature (1)..(25): SEQ ID NO: 1198; WAN024D2V_at; Start 811; Stop 835
cctttaatgttgatgaagatagaaa

SEQ ID NO: 141256 - DNA, 25 bp, Artificial
  probe
  misc_feature (1)..(25): SEQ ID NO: 1198; WAN024D2V_at; Start 476; Stop 500
tctattccttagtgggtcgtgaaca

SEQ ID NO: 141257 - DNA, 25 bp, Artificial
  probe
  misc_feature (1)..(25): SEQ ID NO: 1198; WAN024D2V_at; Start 500; Stop 524
aagaatatgaggcaaactactctca

SEQ ID NO: 141258 - DNA, 25 bp, Artificial
  probe
  misc_feature (1)..(25): SEQ ID NO: 1198; WAN024D2V_at; Start 492; Stop 516
tcgtgaacaagaatatgaggcaaac

SEQ ID NO: 141259 - DNA, 25 bp, Artificial
  probe
  misc_feature (1)..(25): SEQ ID NO: 1198; WAN024D2V_at; Start 11; Stop 35
tcgcagagaaattcagattgaaaag

SEQ ID NO: 141260 - DNA, 25 bp, Artificial
  probe
  misc_feature (1)..(25): SEQ ID NO: 1198; WAN024D2V_at; Start 789; Stop 813
gttatgtaagatttataacaatcct

SEQ ID NO: 141261 - DNA, 25 bp, Artificial
  probe
  misc_feature (1)..(25): SEQ ID NO: 1198; WAN024D2V_at; Start 505; Stop 529
tatgaggcaaactactctcatttaa

SEQ ID NO: 141262 - DNA, 25 bp, Artificial
  probe
  misc_feature (1)..(25): SEQ ID NO: 1198; WAN024D2V_at; Start 482; Stop 506
ccttagtgggtcgtgaacaagaata

SEQ ID NO: 141263 - DNA, 25 bp, Artificial
  probe
  misc_feature (1)..(25): SEQ ID NO: 1198; WAN024D2V_at; Start 727; Stop 751
aatgctggagccaaatttctagaca

SEQ ID NO: 141264 - DNA, 25 bp, Artificial
  probe
  misc_feature (1)..(25): SEQ ID NO: 1198; WAN024D2V_at; Start 43; Stop 67
ttgagactctcccaacaaactcttg

SEQ ID NO: 141265 - DNA, 25 bp, Artificial
  probe
  misc_feature (1)..(25): SEQ ID NO: 1198; WAN024D2V_at; Start 8; Stop 32
cactcgcagagaaattcagattgaa

SEQ ID NO: 141266 - DNA, 25 bp, Artificial
  probe
  misc_feature (1)..(25): SEQ ID NO: 1198; WAN024D2V_at; Start 62; Stop 86
ctcttgcagaaggaatttgtgaaca

SEQ ID NO: 141267 - DNA, 25 bp, Artificial
  probe
  misc_feature (1)..(25): SEQ ID NO: 1198; WAN024D2V_at; Start 467; Stop 491
tatctaatttctattccttagtggg

SEQ ID NO: 141268 - DNA, 25 bp, Artificial
  probe
  misc_feature (1)..(25): SEQ ID NO: 1198; WAN024D2V_at; Start 662; Stop 686
cgattgaactctgtaaacaaagaca

SEQ ID NO: 141269 - DNA, 25 bp, Artificial
  probe
  misc_feature (1)..(25): SEQ ID NO: 1198; WAN024D2V_at; Start 720; Stop 744
tgtaggaaatgctggagccaaattt

SEQ ID NO: 141270 - DNA, 25 bp, Artificial
  probe
  misc_feature (1)..(25): SEQ ID NO: 1198; WAN024D2V_at; Start 50; Stop 74
tctcccaacaaactcttgcagaagg

SEQ ID NO: 141271 - DNA, 25 bp, Artificial
  probe
  misc_feature (1)..(25): SEQ ID NO: 1198; WAN024D2V_at; Start 404; Stop 428
tggaaaatatattattaaaagtctc

SEQ ID NO: 141272 - DNA, 25 bp, Artificial
  probe
  misc_feature (1)..(25): SEQ ID NO: 1198; WAN024D2V_at; Start 776; Stop 800
tagaagcaagagagttatgtaagat

SEQ ID NO: 141273 - DNA, 25 bp, Artificial
  probe
  misc_feature (1)..(25): SEQ ID NO: 1198; WAN024D2V_at; Start 35; Stop 59
gaaaagagttgagactctcccaaca

SEQ ID NO: 141274 - DNA, 25 bp, Artificial
  probe
  misc_feature (1)..(25): SEQ ID NO: 1198; WAN024D2V_at; Start 761; Stop 785
tcaaaaattattatatagaagcaag

SEQ ID NO: 141275 - DNA, 25 bp, Artificial
  probe
  misc_feature (1)..(25): SEQ ID NO: 1198; WAN024D2V_at; Start 673; Stop 697
tgtaaacaaagacagacaagctacc

SEQ ID NO: 141276 - DNA, 25 bp, Artificial
  probe
  misc_feature (1)..(25): SEQ ID NO: 1198; WAN024D2V_at; Start 496; Stop 520
gaacaagaatatgaggcaaactact

SEQ ID NO: 141277 - DNA, 25 bp, Artificial
  probe
  misc_feature (1)..(25): SEQ ID NO: 1198; WAN024D2V_at; Start 710; Stop 734
tacttattcttgtaggaaatgctgg

SEQ ID NO: 141278 - DNA, 25 bp, Artificial
  probe
  misc_feature (1)..(25): SEQ ID NO: 1198; WAN024D2V_at; Start 675; Stop 699
taaacaaagacagacaagctaccaa

SEQ ID NO: 141279 - DNA, 25 bp, Artificial
  probe
  misc_feature (1)..(25): SEQ ID NO: 1198; WAN024D2V_at; Start 488; Stop 512
tgggtcgtgaacaagaatatgaggc

SEQ ID NO: 141280 - DNA, 25 bp, Artificial
  probe
  misc_feature (1)..(25): SEQ ID NO: 2467; WAN024D2W_at; Start 194; Stop 218
tccgcctgttgactgagcaattctg

SEQ ID NO: 141281 - DNA, 25 bp, Artificial
  probe
  misc_feature (1)..(25): SEQ ID NO: 2467; WAN024D2W_at; Start 128; Stop 152
tcatccaactcaaactgcttgcgaa

SEQ ID NO: 141282 - DNA, 25 bp, Artificial
  probe
  misc_feature (1)..(25): SEQ ID NO: 2467; WAN024D2W_at; Start 126; Stop 150
tatcatccaactcaaactgcttgcg

SEQ ID NO: 141283 - DNA, 25 bp, Artificial
  probe
  misc_feature (1)..(25): SEQ ID NO: 2467; WAN024D2W_at; Start 141; Stop 165
actgcttgcgaatcaaaccttgttg

SEQ ID NO: 141284 - DNA, 25 bp, Artificial
  probe
  misc_feature (1)..(25): SEQ ID NO: 2467; WAN024D2W_at; Start 196; Stop 220
cgcctgttgactgagcaattctgta

SEQ ID NO: 141285 - DNA, 25 bp, Artificial
  probe
  misc_feature (1)..(25): SEQ ID NO: 2467; WAN024D2W_at; Start 191; Stop 215
tcttccgcctgttgactgagcaatt

SEQ ID NO: 141286 - DNA, 25 bp, Artificial
  probe
  misc_feature (1)..(25): SEQ ID NO: 2467; WAN024D2W_at; Start 145; Stop 169
cttgcgaatcaaaccttgttggaga

SEQ ID NO: 141287 - DNA, 25 bp, Artificial
  probe
  misc_feature (1)..(25): SEQ ID NO: 2467; WAN024D2W_at; Start 207; Stop 231
tgagcaattctgtatcaaccttctc

SEQ ID NO: 141288 - DNA, 25 bp, Artificial
  probe
  misc_feature (1)..(25): SEQ ID NO: 2467; WAN024D2W_at; Start 139; Stop 163
aaactgcttgcgaatcaaaccttgt

SEQ ID NO: 141289 - DNA, 25 bp, Artificial
  probe
  misc_feature (1)..(25): SEQ ID NO: 2467; WAN024D2W_at; Start 144; Stop 168
gcttgcgaatcaaaccttgttggag

SEQ ID NO: 141290 - DNA, 25 bp, Artificial
  probe
  misc_feature (1)..(25): SEQ ID NO: 2467; WAN024D2W_at; Start 198; Stop 222
cctgttgactgagcaattctgtatc

SEQ ID NO: 141291 - DNA, 25 bp, Artificial
  probe
  misc_feature (1)..(25): SEQ ID NO: 2467; WAN024D2W_at; Start 147; Stop 171
tgcgaatcaaaccttgttggagatt

SEQ ID NO: 141292 - DNA, 25 bp, Artificial
  probe
  misc_feature (1)..(25): SEQ ID NO: 2467; WAN024D2W_at; Start 180; Stop 204
gagttttggattcttccgcctgttg

SEQ ID NO: 141293 - DNA, 25 bp, Artificial
  probe
  misc_feature (1)..(25): SEQ ID NO: 2467; WAN024D2W_at; Start 136; Stop 160
ctcaaactgcttgcgaatcaaacct

SEQ ID NO: 141294 - DNA, 25 bp, Artificial
  probe
  misc_feature (1)..(25): SEQ ID NO: 2467; WAN024D2W_at; Start 188; Stop 212
gattcttccgcctgttgactgagca

SEQ ID NO: 141295 - DNA, 25 bp, Artificial
  probe
  misc_feature (1)..(25): SEQ ID NO: 2467; WAN024D2W_at; Start 212; Stop 236
aattctgtatcaaccttctcaagat

SEQ ID NO: 141296 - DNA, 25 bp, Artificial
  probe
  misc_feature (1)..(25): SEQ ID NO: 2467; WAN024D2W_at; Start 150; Stop 174
gaatcaaaccttgttggagatttgt

SEQ ID NO: 141297 - DNA, 25 bp, Artificial
  probe
  misc_feature (1)..(25): SEQ ID NO: 2467; WAN024D2W_at; Start 20; Stop 44
accttttctttcttggcttcagcac

SEQ ID NO: 141298 - DNA, 25 bp, Artificial
  probe
  misc_feature (1)..(25): SEQ ID NO: 2467; WAN024D2W_at; Start 189; Stop 213
attcttccgcctgttgactgagcaa

SEQ ID NO: 141299 - DNA, 25 bp, Artificial
  probe
  misc_feature (1)..(25): SEQ ID NO: 2467; WAN024D2W_at; Start 152; Stop 176
atcaaaccttgttggagatttgttt

SEQ ID NO: 141300 - DNA, 25 bp, Artificial
  probe
  misc_feature (1)..(25): SEQ ID NO: 2467; WAN024D2W_at; Start 133; Stop 157
caactcaaactgcttgcgaatcaaa

SEQ ID NO: 141301 - DNA, 25 bp, Artificial
  probe
  misc_feature (1)..(25): SEQ ID NO: 2467; WAN024D2W_at; Start 203; Stop 227
tgactgagcaattctgtatcaacct

SEQ ID NO: 141302 - DNA, 25 bp, Artificial
  probe
  misc_feature (1)..(25): SEQ ID NO: 2467; WAN024D2W_at; Start 179; Stop 203
tgagttttggattcttccgcctgtt

SEQ ID NO: 141303 - DNA, 25 bp, Artificial
  probe
  misc_feature (1)..(25): SEQ ID NO: 2467; WAN024D2W_at; Start 21; Stop 45
ccttttctttcttggcttcagcacg

SEQ ID NO: 141304 - DNA, 25 bp, Artificial
  probe
  misc_feature (1)..(25): SEQ ID NO: 2467; WAN024D2W_at; Start 143; Stop 167
tgcttgcgaatcaaaccttgttgga

SEQ ID NO: 141305 - DNA, 25 bp, Artificial
  probe
  misc_feature (1)..(25): SEQ ID NO: 2467; WAN024D2W_at; Start 138; Stop 162
caaactgcttgcgaatcaaaccttg

SEQ ID NO: 141306 - DNA, 25 bp, Artificial
  probe
  misc_feature (1)..(25): SEQ ID NO: 2467; WAN024D2W_at; Start 199; Stop 223
ctgttgactgagcaattctgtatca

SEQ ID NO: 141307 - DNA, 25 bp, Artificial
  probe
  misc_feature (1)..(25): SEQ ID NO: 2467; WAN024D2W_at; Start 192; Stop 216
cttccgcctgttgactgagcaattc

SEQ ID NO: 141308 - DNA, 25 bp, Artificial
  probe
  misc_feature (1)..(25): SEQ ID NO: 2467; WAN024D2W_at; Start 187; Stop 211
ggattcttccgcctgttgactgagc

SEQ ID NO: 141309 - DNA, 25 bp, Artificial
  probe
  misc_feature (1)..(25): SEQ ID NO: 2467; WAN024D2W_at; Start 210; Stop 234
gcaattctgtatcaaccttctcaag

SEQ ID NO: 141310 - DNA, 25 bp, Artificial
  probe
  misc_feature (1)..(25): SEQ ID NO: 2467; WAN024D2W_at; Start 204; Stop 228
gactgagcaattctgtatcaacctt

SEQ ID NO: 141311 - DNA, 25 bp, Artificial
  probe
  misc_feature (1)..(25): SEQ ID NO: 2467; WAN024D2W_at; Start 135; Stop 159
actcaaactgcttgcgaatcaaacc

SEQ ID NO: 141312 - DNA, 25 bp, Artificial
  probe
  misc_feature (1)..(25): SEQ ID NO: 2467; WAN024D2W_at; Start 131; Stop 155
tccaactcaaactgcttgcgaatca

SEQ ID NO: 141313 - DNA, 25 bp, Artificial
  probe
  misc_feature (1)..(25): SEQ ID NO: 2467; WAN024D2W_at; Start 182; Stop 206
gttttggattcttccgcctgttgac

SEQ ID NO: 141314 - DNA, 25 bp, Artificial
  probe
  misc_feature (1)..(25): SEQ ID NO: 5349; WAN024D2X_at; Start 291; Stop 315
gaatacgtgcctgctctccttgaga

SEQ ID NO: 141315 - DNA, 25 bp, Artificial
  probe
  misc_feature (1)..(25): SEQ ID NO: 5349; WAN024D2X_at; Start 8; Stop 32
tgcagttctgtcttaagcaagcgag

SEQ ID NO: 141316 - DNA, 25 bp, Artificial
  probe
  misc_feature (1)..(25): SEQ ID NO: 5349; WAN024D2X_at; Start 284; Stop 308
tgctcctgaatacgtgcctgctctc

SEQ ID NO: 141317 - DNA, 25 bp, Artificial
  probe
  misc_feature (1)..(25): SEQ ID NO: 5349; WAN024D2X_at; Start 243; Stop 267
caacttgctgactagtttgctgata

SEQ ID NO: 141318 - DNA, 25 bp, Artificial
  probe
  misc_feature (1)..(25): SEQ ID NO: 5349; WAN024D2X_at; Start 239; Stop 263
tcttcaacttgctgactagtttgct

SEQ ID NO: 141319 - DNA, 25 bp, Artificial
  probe
  misc_feature (1)..(25): SEQ ID NO: 5349; WAN024D2X_at; Start 282; Stop 306
cttgctcctgaatacgtgcctgctc

SEQ ID NO: 141320 - DNA, 25 bp, Artificial
  probe
  misc_feature (1)..(25): SEQ ID NO: 5349; WAN024D2X_at; Start 36; Stop 60
gcgccacctcttcctgcaaattttg

SEQ ID NO: 141321 - DNA, 25 bp, Artificial
  probe
  misc_feature (1)..(25): SEQ ID NO: 5349; WAN024D2X_at; Start 233; Stop 257
tccagttcttcaacttgctgactag

SEQ ID NO: 141322 - DNA, 25 bp, Artificial
  probe
  misc_feature (1)..(25): SEQ ID NO: 5349; WAN024D2X_at; Start 42; Stop 66
cctcttcctgcaaattttgatagcg

SEQ ID NO: 141323 - DNA, 25 bp, Artificial
  probe
  misc_feature (1)..(25): SEQ ID NO: 5349; WAN024D2X_at; Start 276; Stop 300
acaagccttgctcctgaatacgtgc

SEQ ID NO: 141324 - DNA, 25 bp, Artificial
  probe
  misc_feature (1)..(25): SEQ ID NO: 5349; WAN024D2X_at; Start 228; Stop 252
gagtttccagttcttcaacttgctg

SEQ ID NO: 141325 - DNA, 25 bp, Artificial
  probe
  misc_feature (1)..(25): SEQ ID NO: 5349; WAN024D2X_at; Start 248; Stop 272
tgctgactagtttgctgataagcga

SEQ ID NO: 141326 - DNA, 25 bp, Artificial
  probe
  misc_feature (1)..(25): SEQ ID NO: 5349; WAN024D2X_at; Start 16; Stop 40
tgtcttaagcaagcgagcttgcgcc

SEQ ID NO: 141327 - DNA, 25 bp, Artificial
  probe
  misc_feature (1)..(25): SEQ ID NO: 5349; WAN024D2X_at; Start 10; Stop 34
cagttctgtcttaagcaagcgagct

SEQ ID NO: 141328 - DNA, 25 bp, Artificial
  probe
  misc_feature (1)..(25): SEQ ID NO: 5349; WAN024D2X_at; Start 292; Stop 316
aatacgtgcctgctctccttgagat

SEQ ID NO: 141329 - DNA, 25 bp, Artificial
  probe
  misc_feature (1)..(25): SEQ ID NO: 5349; WAN024D2X_at; Start 54; Stop 78
aattttgatagcgttcttggatggc

SEQ ID NO: 141330 - DNA, 25 bp, Artificial
  probe
  misc_feature (1)..(25): SEQ ID NO: 5349; WAN024D2X_at; Start 2; Stop 26
tgcccttgcagttctgtcttaagca

SEQ ID NO: 141331 - DNA, 25 bp, Artificial
  probe
  misc_feature (1)..(25): SEQ ID NO: 5349; WAN024D2X_at; Start 277; Stop 301
caagccttgctcctgaatacgtgcc

SEQ ID NO: 141332 - DNA, 25 bp, Artificial
  probe
  misc_feature (1)..(25): SEQ ID NO: 5349; WAN024D2X_at; Start 100; Stop 124
ttcaatctcagcttccagattttgc

SEQ ID NO: 141333 - DNA, 25 bp, Artificial
  probe
  misc_feature (1)..(25): SEQ ID NO: 5349; WAN024D2X_at; Start 212; Stop 236
tcttggagtttccaaagagtttcca

SEQ ID NO: 141334 - DNA, 25 bp, Artificial
  probe
  misc_feature (1)..(25): SEQ ID NO: 5349; WAN024D2X_at; Start 162; Stop 186
tttccttatccgcttgccaatctcc

SEQ ID NO: 141335 - DNA, 25 bp, Artificial
  probe
  misc_feature (1)..(25): SEQ ID NO: 5349; WAN024D2X_at; Start 202; Stop 226
tatttcctcttcttggagtttccaa

SEQ ID NO: 141336 - DNA, 25 bp, Artificial
  probe
  misc_feature (1)..(25): SEQ ID NO: 5349; WAN024D2X_at; Start 294; Stop 318
tacgtgcctgctctccttgagattt

SEQ ID NO: 141337 - DNA, 25 bp, Artificial
  probe
  misc_feature (1)..(25): SEQ ID NO: 5349; WAN024D2X_at; Start 20; Stop 44
ttaagcaagcgagcttgcgccacct

SEQ ID NO: 141338 - DNA, 25 bp, Artificial
  probe
  misc_feature (1)..(25): SEQ ID NO: 5349; WAN024D2X_at; Start 250; Stop 274
ctgactagtttgctgataagcgagg

SEQ ID NO: 141339 - DNA, 25 bp, Artificial
  probe
  misc_feature (1)..(25): SEQ ID NO: 5349; WAN024D2X_at; Start 38; Stop 62
gccacctcttcctgcaaattttgat

SEQ ID NO: 141340 - DNA, 25 bp, Artificial
  probe
  misc_feature (1)..(25): SEQ ID NO: 5349; WAN024D2X_at; Start 102; Stop 126
caatctcagcttccagattttgctt

SEQ ID NO: 141341 - DNA, 25 bp, Artificial
  probe
  misc_feature (1)..(25): SEQ ID NO: 5349; WAN024D2X_at; Start 222; Stop 246
tccaaagagtttccagttcttcaac

SEQ ID NO: 141342 - DNA, 25 bp, Artificial
  probe
  misc_feature (1)..(25): SEQ ID NO: 5349; WAN024D2X_at; Start 13; Stop 37
ttctgtcttaagcaagcgagcttgc

SEQ ID NO: 141343 - DNA, 25 bp, Artificial
  probe
  misc_feature (1)..(25): SEQ ID NO: 5349; WAN024D2X_at; Start 23; Stop 47
agcaagcgagcttgcgccacctctt

SEQ ID NO: 141344 - DNA, 25 bp, Artificial
  probe
  misc_feature (1)..(25): SEQ ID NO: 5349; WAN024D2X_at; Start 195; Stop 219
gacgatctatttcctcttcttggag

SEQ ID NO: 141345 - DNA, 25 bp, Artificial
  probe
  misc_feature (1)..(25): SEQ ID NO: 5349; WAN024D2X_at; Start 280; Stop 304
gccttgctcctgaatacgtgcctgc

SEQ ID NO: 141346 - DNA, 25 bp, Artificial
  probe
  misc_feature (1)..(25): SEQ ID NO: 5349; WAN024D2X_at; Start 48; Stop 72
cctgcaaattttgatagcgttcttg

SEQ ID NO: 141347 - DNA, 25 bp, Artificial
  probe
  misc_feature (1)..(25): SEQ ID NO: 5349; WAN024D2X_at; Start 206; Stop 230
tcctcttcttggagtttccaaagag

SEQ ID NO: 141348 - DNA, 25 bp, Artificial
  probe
  misc_feature (1)..(25): SEQ ID NO: 5552; WAN024D2Y_at; Start 391; Stop 415
agacttgaacccctgaatttcgatt

SEQ ID NO: 141349 - DNA, 25 bp, Artificial
  probe
  misc_feature (1)..(25): SEQ ID NO: 5552; WAN024D2Y_at; Start 255; Stop 279
ccccacggagactcttgacactaga

SEQ ID NO: 141350 - DNA, 25 bp, Artificial
  probe
  misc_feature (1)..(25): SEQ ID NO: 5552; WAN024D2Y_at; Start 163; Stop 187
tccgtcatgattatccagagtcaca

SEQ ID NO: 141351 - DNA, 25 bp, Artificial
  probe
  misc_feature (1)..(25): SEQ ID NO: 5552; WAN024D2Y_at; Start 25; Stop 49
tcgtcccaatccagtatccaagaag

SEQ ID NO: 141352 - DNA, 25 bp, Artificial
  probe
  misc_feature (1)..(25): SEQ ID NO: 5552; WAN024D2Y_at; Start 261; Stop 285
ggagactcttgacactagactcccc

SEQ ID NO: 141353 - DNA, 25 bp, Artificial
  probe
  misc_feature (1)..(25): SEQ ID NO: 5552; WAN024D2Y_at; Start 186; Stop 210
caactacagaagcataattgagcgg

SEQ ID NO: 141354 - DNA, 25 bp, Artificial
  probe
  misc_feature (1)..(25): SEQ ID NO: 5552; WAN024D2Y_at; Start 367; Stop 391
aacgaccttggtcttatcagcaaaa

SEQ ID NO: 141355 - DNA, 25 bp, Artificial
  probe
  misc_feature (1)..(25): SEQ ID NO: 5552; WAN024D2Y_at; Start 14; Stop 38
gagaaggaatctcgtcccaatccag

SEQ ID NO: 141356 - DNA, 25 bp, Artificial
  probe
  misc_feature (1)..(25): SEQ ID NO: 5552; WAN024D2Y_at; Start 332; Stop 356
ttgggtccaacaactgccgtcacac

SEQ ID NO: 141357 - DNA, 25 bp, Artificial
  probe
  misc_feature (1)..(25): SEQ ID NO: 5552; WAN024D2Y_at; Start 149; Stop 173
gcatccttgataaatccgtcatgat

SEQ ID NO: 141358 - DNA, 25 bp, Artificial
  probe
  misc_feature (1)..(25): SEQ ID NO: 5552; WAN024D2Y_at; Start 346; Stop 370
tgccgtcacaccttggtcaaaaacg

SEQ ID NO: 141359 - DNA, 25 bp, Artificial
  probe
  misc_feature (1)..(25): SEQ ID NO: 5552; WAN024D2Y_at; Start 286; Stop 310
caaagcccaacgcagactttctgta

SEQ ID NO: 141360 - DNA, 25 bp, Artificial
  probe
  misc_feature (1)..(25): SEQ ID NO: 5552; WAN024D2Y_at; Start 53; Stop 77
tcatgaatatcacgcagacggactt

SEQ ID NO: 141361 - DNA, 25 bp, Artificial
  probe
  misc_feature (1)..(25): SEQ ID NO: 5552; WAN024D2Y_at; Start 342; Stop 366
caactgccgtcacaccttggtcaaa

SEQ ID NO: 141362 - DNA, 25 bp, Artificial
  probe
  misc_feature (1)..(25): SEQ ID NO: 5552; WAN024D2Y_at; Start 67; Stop 91
cagacggactttcttgccgtcaatc

SEQ ID NO: 141363 - DNA, 25 bp, Artificial
  probe
  misc_feature (1)..(25): SEQ ID NO: 5552; WAN024D2Y_at; Start 326; Stop 350
gatccattgggtccaacaactgccg

SEQ ID NO: 141364 - DNA, 25 bp, Artificial
  probe
  misc_feature (1)..(25): SEQ ID NO: 5552; WAN024D2Y_at; Start 352; Stop 376
cacaccttggtcaaaaacgaccttg

SEQ ID NO: 141365 - DNA, 25 bp, Artificial
  probe
  misc_feature (1)..(25): SEQ ID NO: 5552; WAN024D2Y_at; Start 2; Stop 26
tgggaaataatagagaaggaatctc

SEQ ID NO: 141366 - DNA, 25 bp, Artificial
  probe
  misc_feature (1)..(25): SEQ ID NO: 5552; WAN024D2Y_at; Start 317; Stop 341
gactttccagatccattgggtccaa

SEQ ID NO: 141367 - DNA, 25 bp, Artificial
  probe
  misc_feature (1)..(25): SEQ ID NO: 5552; WAN024D2Y_at; Start 194; Stop 218
gaagcataattgagcggtttgcgac

SEQ ID NO: 141368 - DNA, 25 bp, Artificial
  probe
  misc_feature (1)..(25): SEQ ID NO: 5552; WAN024D2Y_at; Start 312; Stop 336
tattggactttccagatccattggg

SEQ ID NO: 141369 - DNA, 25 bp, Artificial
  probe
  misc_feature (1)..(25): SEQ ID NO: 5552; WAN024D2Y_at; Start 142; Stop 166
ttgacctgcatccttgataaatccg

SEQ ID NO: 141370 - DNA, 25 bp, Artificial
  probe
  misc_feature (1)..(25): SEQ ID NO: 5552; WAN024D2Y_at; Start 46; Stop 70
gaagaggtcatgaatatcacgcaga

SEQ ID NO: 141371 - DNA, 25 bp, Artificial
  probe
  misc_feature (1)..(25): SEQ ID NO: 5552; WAN024D2Y_at; Start 381; Stop 405
tatcagcaaaagacttgaacccctg

SEQ ID NO: 141372 - DNA, 25 bp, Artificial
  probe
  misc_feature (1)..(25): SEQ ID NO: 5552; WAN024D2Y_at; Start 300; Stop 324
gactttctgtaatattggactttcc

SEQ ID NO: 141373 - DNA, 25 bp, Artificial
  probe
  misc_feature (1)..(25): SEQ ID NO: 5552; WAN024D2Y_at; Start 122; Stop 146
tggcgttccaccctgatttcttgac

SEQ ID NO: 141374 - DNA, 25 bp, Artificial
  probe
  misc_feature (1)..(25): SEQ ID NO: 5552; WAN024D2Y_at; Start 61; Stop 85
atcacgcagacggactttcttgccg

SEQ ID NO: 141375 - DNA, 25 bp, Artificial
  probe
  misc_feature (1)..(25): SEQ ID NO: 5552; WAN024D2Y_at; Start 31; Stop 55
caatccagtatccaagaagaggtca

SEQ ID NO: 141376 - DNA, 25 bp, Artificial
  probe
  misc_feature (1)..(25): SEQ ID NO: 5552; WAN024D2Y_at; Start 174; Stop 198
tatccagagtcacaactacagaagc

SEQ ID NO: 141377 - DNA, 25 bp, Artificial
  probe
  misc_feature (1)..(25): SEQ ID NO: 5552; WAN024D2Y_at; Start 95; Stop 119
tattcgctatctccactacgataga

SEQ ID NO: 141378 - DNA, 25 bp, Artificial
  probe
  misc_feature (1)..(25): SEQ ID NO: 5552; WAN024D2Y_at; Start 41; Stop 65
tccaagaagaggtcatgaatatcac

SEQ ID NO: 141379 - DNA, 25 bp, Artificial
  probe
  misc_feature (1)..(25): SEQ ID NO: 5552; WAN024D2Y_at; Start 198; Stop 222
cataattgagcggtttgcgactttc

SEQ ID NO: 141380 - DNA, 25 bp, Artificial
  probe
  misc_feature (1)..(25): SEQ ID NO: 5552; WAN024D2Y_at; Start 82; Stop 106
gccgtcaatcttgtattcgctatct

SEQ ID NO: 141381 - DNA, 25 bp, Artificial
  probe
  misc_feature (1)..(25): SEQ ID NO: 5552; WAN024D2Y_at; Start 136; Stop 160
gatttcttgacctgcatccttgata

SEQ ID NO: 141382 - DNA, 25 bp, Artificial
  probe
  misc_feature (1)..(25): SEQ ID NO: 3704; WAN024D2Z-3_at; Start 376; Stop 400
tctcaaggagagcaggcacgtattc

SEQ ID NO: 141383 - DNA, 25 bp, Artificial
  probe
  misc_feature (1)..(25): SEQ ID NO: 3704; WAN024D2Z-3_at; Start 391; Stop 415
gcacgtattcaggagcaaggcttgt

SEQ ID NO: 141384 - DNA, 25 bp, Artificial
  probe
  misc_feature (1)..(25): SEQ ID NO: 3704; WAN024D2Z-3_at; Start 678; Stop 702
actgcaagggcaaaaacgttatgaa

SEQ ID NO: 141385 - DNA, 25 bp, Artificial
  probe
  misc_feature (1)..(25): SEQ ID NO: 3704; WAN024D2Z-3_at; Start 505; Stop 529
ggagattggcaagcggataaggaaa

SEQ ID NO: 141386 - DNA, 25 bp, Artificial
  probe
  misc_feature (1)..(25): SEQ ID NO: 3704; WAN024D2Z-3_at; Start 93; Stop 117
tacgacggctatctttgataccgta

SEQ ID NO: 141387 - DNA, 25 bp, Artificial
  probe
  misc_feature (1)..(25): SEQ ID NO: 3704; WAN024D2Z-3_at; Start 77; Stop 101
tcaagaacttgctagctacgacggc

SEQ ID NO: 141388 - DNA, 25 bp, Artificial
  probe
  misc_feature (1)..(25): SEQ ID NO: 3704; WAN024D2Z-3_at; Start 55; Stop 79
gatactagactggaagccattttca

SEQ ID NO: 141389 - DNA, 25 bp, Artificial
  probe
  misc_feature (1)..(25): SEQ ID NO: 3704; WAN024D2Z-3_at; Start 373; Stop 397
aaatctcaaggagagcaggcacgta

SEQ ID NO: 141390 - DNA, 25 bp, Artificial
  probe
  misc_feature (1)..(25): SEQ ID NO: 3704; WAN024D2Z-3_at; Start 1685; Stop 1709
tctatggagtgaccatgcaagaatc

SEQ ID NO: 141391 - DNA, 25 bp, Artificial
  probe
  misc_feature (1)..(25): SEQ ID NO: 3704; WAN024D2Z-3_at; Start 467; Stop 491
ggaaactccaagaagaggaaataga

SEQ ID NO: 141392 - DNA, 25 bp, Artificial
  probe
  misc_feature (1)..(25): SEQ ID NO: 3704; WAN024D2Z-3_at; Start 253; Stop 277
gaactggagcaattacaaaaagaaa

SEQ ID NO: 141393 - DNA, 25 bp, Artificial
  probe
  misc_feature (1)..(25): SEQ ID NO: 3704; WAN024D2Z-3_at; Start 417; Stop 441
cctcgcttatcagcaaactagtcag

SEQ ID NO: 141394 - DNA, 25 bp, Artificial
  probe
  misc_feature (1)..(25): SEQ ID NO: 3704; WAN024D2Z-3_at; Start 5; Stop 29
tcgctgtaagcccaggtttccttgg

SEQ ID NO: 141395 - DNA, 25 bp, Artificial
  probe
  misc_feature (1)..(25): SEQ ID NO: 3704; WAN024D2Z-3_at; Start 11; Stop 35
taagcccaggtttccttgggatggc

SEQ ID NO: 141396 - DNA, 25 bp, Artificial
  probe
  misc_feature (1)..(25): SEQ ID NO: 3704; WAN024D2Z-3_at; Start 1610; Stop 1634
tcaaccgctttgacaaggacagcca

SEQ ID NO: 141397 - DNA, 25 bp, Artificial
  probe
  misc_feature (1)..(25): SEQ ID NO: 3704; WAN024D2Z-3_at; Start 1; Stop 25
gctatcgctgtaagcccaggtttcc

SEQ ID NO: 141398 - DNA, 25 bp, Artificial
  probe
  misc_feature (1)..(25): SEQ ID NO: 3704; WAN024D2Z-3_at; Start 81; Stop 105
gaacttgctagctacgacggctatc

SEQ ID NO: 141399 - DNA, 25 bp, Artificial
  probe
  misc_feature (1)..(25): SEQ ID NO: 3704; WAN024D2Z-3_at; Start 16; Stop 40
ccaggtttccttgggatggcagatg

SEQ ID NO: 141400 - DNA, 25 bp, Artificial
  probe
  misc_feature (1)..(25): SEQ ID NO: 3704; WAN024D2Z-3_at; Start 568; Stop 592
caaaatctggaagctgagattgaag

SEQ ID NO: 141401 - DNA, 25 bp, Artificial
  probe
  misc_feature (1)..(25): SEQ ID NO: 3704; WAN024D2Z-3_at; Start 245; Stop 269
tcaagccagaactggagcaattaca

SEQ ID NO: 141402 - DNA, 25 bp, Artificial
  probe
  misc_feature (1)..(25): SEQ ID NO: 3704; WAN024D2Z-3_at; Start 91; Stop 115
gctacgacggctatctttgataccg

SEQ ID NO: 141403 - DNA, 25 bp, Artificial
  probe
  misc_feature (1)..(25): SEQ ID NO: 3704; WAN024D2Z-3_at; Start 387; Stop 411
gcaggcacgtattcaggagcaaggc

SEQ ID NO: 141404 - DNA, 25 bp, Artificial
  probe
  misc_feature (1)..(25): SEQ ID NO: 3704; WAN024D2Z-3_at; Start 459; Stop 483
aactctttggaaactccaagaagag

SEQ ID NO: 141405 - DNA, 25 bp, Artificial
  probe
  misc_feature (1)..(25): SEQ ID NO: 3704; WAN024D2Z-3_at; Start 20; Stop 44
gtttccttgggatggcagatgagtt

SEQ ID NO: 141406 - DNA, 25 bp, Artificial
  probe
  misc_feature (1)..(25): SEQ ID NO: 3704; WAN024D2Z-3_at; Start 1651; Stop 1675
caccgtaagggaaccatggcagcgg

SEQ ID NO: 141407 - DNA, 25 bp, Artificial
  probe
  misc_feature (1)..(25): SEQ ID NO: 3704; WAN024D2Z-3_at; Start 383; Stop 407
gagagcaggcacgtattcaggagca

SEQ ID NO: 141408 - DNA, 25 bp, Artificial
  probe
  misc_feature (1)..(25): SEQ ID NO: 3704; WAN024D2Z-3_at; Start 1327; Stop 1351
attcgtgagtcctttaaagtgacct

SEQ ID NO: 141409 - DNA, 25 bp, Artificial
  probe
  misc_feature (1)..(25): SEQ ID NO: 3704; WAN024D2Z-3_at; Start 428; Stop 452
agcaaactagtcagcaagttgaaga

SEQ ID NO: 141410 - DNA, 25 bp, Artificial
  probe
  misc_feature (1)..(25): SEQ ID NO: 3704; WAN024D2Z-3_at; Start 421; Stop 445
gcttatcagcaaactagtcagcaag

SEQ ID NO: 141411 - DNA, 25 bp, Artificial
  probe
  misc_feature (1)..(25): SEQ ID NO: 3704; WAN024D2Z-3_at; Start 1601; Stop 1625
gggattacctcaaccgctttgacaa

SEQ ID NO: 141412 - DNA, 25 bp, Artificial
  probe
  misc_feature (1)..(25): SEQ ID NO: 3704; WAN024D2Z-3_at; Start 62; Stop 86
gactggaagccattttcaagaactt

SEQ ID NO: 141413 - DNA, 25 bp, Artificial
  probe
  misc_feature (1)..(25): SEQ ID NO: 3704; WAN024D2Z-3_at; Start 249; Stop 273
gccagaactggagcaattacaaaaa

SEQ ID NO: 141414 - DNA, 25 bp, Artificial
  probe
  misc_feature (1)..(25): SEQ ID NO: 3704; WAN024D2Z-3_at; Start 1613; Stop 1637
accgctttgacaaggacagccagtt

SEQ ID NO: 141415 - DNA, 25 bp, Artificial
  probe
  misc_feature (1)..(25): SEQ ID NO: 3704; WAN024D2Z-3_at; Start 424; Stop 448
tatcagcaaactagtcagcaagttg

SEQ ID NO: 141416 - DNA, 25 bp, Artificial
  probe
  misc_feature (1)..(25): SEQ ID NO: 2810; WAN024D2Z-5_at; Start 117; Stop 141
tattacagaaagtctgcgttgggct

SEQ ID NO: 141417 - DNA, 25 bp, Artificial
  probe
  misc_feature (1)..(25): SEQ ID NO: 2810; WAN024D2Z-5_at; Start 1560; Stop 1584
tattggtgcagtcagtgagcatctg

SEQ ID NO: 141418 - DNA, 25 bp, Artificial
  probe
  misc_feature (1)..(25): SEQ ID NO: 2810; WAN024D2Z-5_at; Start 561; Stop 585
tctggaccgcttagaggacattatc

SEQ ID NO: 141419 - DNA, 25 bp, Artificial
  probe
  misc_feature (1)..(25): SEQ ID NO: 2810; WAN024D2Z-5_at; Start 1040; Stop 1064
ctctgttagagggaaatctagtcca

SEQ ID NO: 141420 - DNA, 25 bp, Artificial
  probe
  misc_feature (1)..(25): SEQ ID NO: 2810; WAN024D2Z-5_at; Start 1191; Stop 1215
ccagttgacccgtattgagaatgag

SEQ ID NO: 141421 - DNA, 25 bp, Artificial
  probe
  misc_feature (1)..(25): SEQ ID NO: 2810; WAN024D2Z-5_at; Start 60; Stop 84
cgtttttgaccaaggtgtgacggca

SEQ ID NO: 141422 - DNA, 25 bp, Artificial
  probe
  misc_feature (1)..(25): SEQ ID NO: 2810; WAN024D2Z-5_at; Start 1252; Stop 1276
gatcaactagaaaagctgaaagagc

SEQ ID NO: 141423 - DNA, 25 bp, Artificial
  probe
  misc_feature (1)..(25): SEQ ID NO: 2810; WAN024D2Z-5_at; Start 547; Stop 571
caaactcaggataatctggaccgct

SEQ ID NO: 141424 - DNA, 25 bp, Artificial
  probe
  misc_feature (1)..(25): SEQ ID NO: 2810; WAN024D2Z-5_at; Start 1171; Stop 1195
gaagaagcggatgtctcaaaccagt

SEQ ID NO: 141425 - DNA, 25 bp, Artificial
  probe
  misc_feature (1)..(25): SEQ ID NO: 2810; WAN024D2Z-5_at; Start 1371; Stop 1395
tattgccaaggagcaagaggagcag

SEQ ID NO: 141426 - DNA, 25 bp, Artificial
  probe
  misc_feature (1)..(25): SEQ ID NO: 2810; WAN024D2Z-5_at; Start 229; Stop 253
tatgcttctgtagttgtgactctgg

SEQ ID NO: 141427 - DNA, 25 bp, Artificial
  probe
  misc_feature (1)..(25): SEQ ID NO: 2810; WAN024D2Z-5_at; Start 92; Stop 116
gacccaatggatctggaaagtccaa

SEQ ID NO: 141428 - DNA, 25 bp, Artificial
  probe
  misc_feature (1)..(25): SEQ ID NO: 2810; WAN024D2Z-5_at; Start 1210; Stop 1234
aatgagttggaaaatagtcgtcagc

SEQ ID NO: 141429 - DNA, 25 bp, Artificial
  probe
  misc_feature (1)..(25): SEQ ID NO: 2810; WAN024D2Z-5_at; Start 1392; Stop 1416
gcagaaaacttcctatcaagctcaa

SEQ ID NO: 141430 - DNA, 25 bp, Artificial
  probe
  misc_feature (1)..(25): SEQ ID NO: 2810; WAN024D2Z-5_at; Start 1155; Stop 1179
tgtagctcttttacaagaagaagcg

SEQ ID NO: 141431 - DNA, 25 bp, Artificial
  probe
  misc_feature (1)..(25): SEQ ID NO: 2810; WAN024D2Z-5_at; Start 594; Stop 618
ggataatcaaatcaagcctcttgag

SEQ ID NO: 141432 - DNA, 25 bp, Artificial
  probe
  misc_feature (1)..(25): SEQ ID NO: 2810; WAN024D2Z-5_at; Start 1114; Stop 1138
gacgatcctgatcagatgattgagc

SEQ ID NO: 141433 - DNA, 25 bp, Artificial
  probe
  misc_feature (1)..(25): SEQ ID NO: 2810; WAN024D2Z-5_at; Start 1741; Stop 1765
aaggcgcgtacgatttctagtcaga

SEQ ID NO: 141434 - DNA, 25 bp, Artificial
  probe
  misc_feature (1)..(25): SEQ ID NO: 2810; WAN024D2Z-5_at; Start 272; Stop 296
tcaaggatgcaggtcaagaaatcag

SEQ ID NO: 141435 - DNA, 25 bp, Artificial
  probe
  misc_feature (1)..(25): SEQ ID NO: 2810; WAN024D2Z-5_at; Start 612; Stop 636
tcttgagaagcaagctgagaatgcc

SEQ ID NO: 141436 - DNA, 25 bp, Artificial
  probe
  misc_feature (1)..(25): SEQ ID NO: 2810; WAN024D2Z-5_at; Start 843; Stop 867
tgaaatggccaaagaccaaggcagt

SEQ ID NO: 141437 - DNA, 25 bp, Artificial
  probe
  misc_feature (1)..(25): SEQ ID NO: 2810; WAN024D2Z-5_at; Start 1128; Stop 1152
gatgattgagctcttacgtgaacgc

SEQ ID NO: 141438 - DNA, 25 bp, Artificial
  probe
  misc_feature (1)..(25): SEQ ID NO: 2810; WAN024D2Z-5_at; Start 1083; Stop 1107
tcgtttagaagctgaattgctggct

SEQ ID NO: 141439 - DNA, 25 bp, Artificial
  probe
  misc_feature (1)..(25): SEQ ID NO: 2810; WAN024D2Z-5_at; Start 1545; Stop 1569
tcgcctaggtgggattattggtgca

SEQ ID NO: 141440 - DNA, 25 bp, Artificial
  probe
  misc_feature (1)..(25): SEQ ID NO: 2810; WAN024D2Z-5_at; Start 1225; Stop 1249
agtcgtcagctttctcaaaaacaag

SEQ ID NO: 141441 - DNA, 25 bp, Artificial
  probe
  misc_feature (1)..(25): SEQ ID NO: 2810; WAN024D2Z-5_at; Start 905; Stop 929
gaaaattagccctatcgaaactgga

SEQ ID NO: 141442 - DNA, 25 bp, Artificial
  probe
  misc_feature (1)..(25): SEQ ID NO: 2810; WAN024D2Z-5_at; Start 75; Stop 99
tgtgacggcagttgttggacccaat

SEQ ID NO: 141443 - DNA, 25 bp, Artificial
  probe
  misc_feature (1)..(25): SEQ ID NO: 2810; WAN024D2Z-5_at; Start 1510; Stop 1534
tatgcaggtgttaagagtgttctcc

SEQ ID NO: 141444 - DNA, 25 bp, Artificial
  probe
  misc_feature (1)..(25): SEQ ID NO: 2810; WAN024D2Z-5_at; Start 627; Stop 651
tgagaatgcccgtaagtttttagac

SEQ ID NO: 141445 - DNA, 25 bp, Artificial
  probe
  misc_feature (1)..(25): SEQ ID NO: 2810; WAN024D2Z-5_at; Start 149; Stop 173
agtctagtgtcaagagtctccgtgg

SEQ ID NO: 141446 - DNA, 25 bp, Artificial
  probe
  misc_feature (1)..(25): SEQ ID NO: 2810; WAN024D2Z-5_at; Start 1530; Stop 1554
tctccaagaaaaagatcgcctaggt

SEQ ID NO: 141447 - DNA, 25 bp, Artificial
  probe
  misc_feature (1)..(25): SEQ ID NO: 2810; WAN024D2Z-5_at; Start 1458; Stop 1482
gcaggccagagctcaaagtttggaa

SEQ ID NO: 141448 - DNA, 25 bp, Artificial
  probe
  misc_feature (1)..(25): SEQ ID NO: 2810; WAN024D2Z-5_at; Start 37; Stop 61
tcttttgctgataagaccaaggtcg

SEQ ID NO: 141449 - DNA, 25 bp, Artificial
  probe
  misc_feature (1)..(25): SEQ ID NO: 2810; WAN024D2Z-5_at; Start 1097; Stop 1121
aattgctggctttctcagacgatcc

SEQ ID NO: 141450 - DNA, 25 bp, Artificial
  probe
  misc_feature (1)..(25): SEQ ID NO: 2765; WAN024D32_at; Start 117; Stop 141
tactaaaggacttgcaaaaggatta

SEQ ID NO: 141451 - DNA, 25 bp, Artificial
  probe
  misc_feature (1)..(25): SEQ ID NO: 2765; WAN024D32_at; Start 417; Stop 441
gttagaggagcttcaatatggagta

SEQ ID NO: 141452 - DNA, 25 bp, Artificial
  probe
  misc_feature (1)..(25): SEQ ID NO: 2765; WAN024D32_at; Start 322; Stop 346
gccttgccagatgcttatttagaat

SEQ ID NO: 141453 - DNA, 25 bp, Artificial
  probe
  misc_feature (1)..(25): SEQ ID NO: 2765; WAN024D32_at; Start 279; Stop 303
tggcggcgtgactgttattgagtgg

SEQ ID NO: 141454 - DNA, 25 bp, Artificial
  probe
  misc_feature (1)..(25): SEQ ID NO: 2765; WAN024D32_at; Start 314; Stop 338
taggagatgccttgccagatgctta

SEQ ID NO: 141455 - DNA, 25 bp, Artificial
  probe
  misc_feature (1)..(25): SEQ ID NO: 2765; WAN024D32_at; Start 199; Stop 223
cgacttccactttatcacctagatg

SEQ ID NO: 141456 - DNA, 25 bp, Artificial
  probe
  misc_feature (1)..(25): SEQ ID NO: 2765; WAN024D32_at; Start 15; Stop 39
tgaagaagagttgcaagccttaggg

SEQ ID NO: 141457 - DNA, 25 bp, Artificial
  probe
  misc_feature (1)..(25): SEQ ID NO: 2765; WAN024D32_at; Start 359; Stop 383
aagaagcagatggacgccgtttaaa

SEQ ID NO: 141458 - DNA, 25 bp, Artificial
  probe
  misc_feature (1)..(25): SEQ ID NO: 2765; WAN024D32_at; Start 244; Stop 268
gctgattctatcgacttggatgagt

SEQ ID NO: 141459 - DNA, 25 bp, Artificial
  probe
  misc_feature (1)..(25): SEQ ID NO: 2765; WAN024D32_at; Start 384; Stop 408
ttttcaggcaaagggtttgcgtgct

SEQ ID NO: 141460 - DNA, 25 bp, Artificial
  probe
  misc_feature (1)..(25): SEQ ID NO: 2765; WAN024D32_at; Start 214; Stop 238
cacctagatgtttatcgtattgaag

SEQ ID NO: 141461 - DNA, 25 bp, Artificial
  probe
  misc_feature (1)..(25): SEQ ID NO: 2765; WAN024D32_at; Start 268; Stop 292
tttatctttggtggcggcgtgactg

SEQ ID NO: 141462 - DNA, 25 bp, Artificial
  probe
  misc_feature (1)..(25): SEQ ID NO: 2765; WAN024D32_at; Start 409; Stop 433
gagaaattgttagaggagcttcaat

SEQ ID NO: 141463 - DNA, 25 bp, Artificial
  probe
  misc_feature (1)..(25): SEQ ID NO: 2765; WAN024D32_at; Start 369; Stop 393
tggacgccgtttaaattttcaggca

SEQ ID NO: 141464 - DNA, 25 bp, Artificial
  probe
  misc_feature (1)..(25): SEQ ID NO: 2765; WAN024D32_at; Start 170; Stop 194
cctatactatcgtgagagagtatga

SEQ ID NO: 141465 - DNA, 25 bp, Artificial
  probe
  misc_feature (1)..(25): SEQ ID NO: 2765; WAN024D32_at; Start 303; Stop 327
gggaaatctcttaggagatgccttg

SEQ ID NO: 141466 - DNA, 25 bp, Artificial
  probe
  misc_feature (1)..(25): SEQ ID NO: 2765; WAN024D32_at; Start 193; Stop 217
gaaggtcgacttccactttatcacc

SEQ ID NO: 141467 - DNA, 25 bp, Artificial
  probe
  misc_feature (1)..(25): SEQ ID NO: 2765; WAN024D32_at; Start 176; Stop 200
ctatcgtgagagagtatgaaggtcg

SEQ ID NO: 141468 - DNA, 25 bp, Artificial
  probe
  misc_feature (1)..(25): SEQ ID NO: 2765; WAN024D32_at; Start 9; Stop 33
aaaaaatgaagaagagttgcaagcc

SEQ ID NO: 141469 - DNA, 25 bp, Artificial
  probe
  misc_feature (1)..(25): SEQ ID NO: 2765; WAN024D32_at; Start 392; Stop 416
caaagggtttgcgtgctgagaaatt

SEQ ID NO: 141470 - DNA, 25 bp, Artificial
  probe
  misc_feature (1)..(25): SEQ ID NO: 2765; WAN024D32_at; Start 398; Stop 422
gtttgcgtgctgagaaattgttaga

SEQ ID NO: 141471 - DNA, 25 bp, Artificial
  probe
  misc_feature (1)..(25): SEQ ID NO: 2765; WAN024D32_at; Start 61; Stop 85
gcaaagaatgatgttttaatcttaa

SEQ ID NO: 141472 - DNA, 25 bp, Artificial
  probe
  misc_feature (1)..(25): SEQ ID NO: 2765; WAN024D32_at; Start 365; Stop 389
cagatggacgccgtttaaattttca

SEQ ID NO: 141473 - DNA, 25 bp, Artificial
  probe
  misc_feature (1)..(25): SEQ ID NO: 2765; WAN024D32_at; Start 122; Stop 146
aaggacttgcaaaaggattacagat

SEQ ID NO: 141474 - DNA, 25 bp, Artificial
  probe
  misc_feature (1)..(25): SEQ ID NO: 2765; WAN024D32_at; Start 40; Stop 64
gagcgtttgggccatctattagcaa

SEQ ID NO: 141475 - DNA, 25 bp, Artificial
  probe
  misc_feature (1)..(25): SEQ ID NO: 2765; WAN024D32_at; Start 254; Stop 278
tcgacttggatgagtttatctttgg

SEQ ID NO: 141476 - DNA, 25 bp, Artificial
  probe
  misc_feature (1)..(25): SEQ ID NO: 2765; WAN024D32_at; Start 228; Stop 252
tcgtattgaaggagatgctgattct

SEQ ID NO: 141477 - DNA, 25 bp, Artificial
  probe
  misc_feature (1)..(25): SEQ ID NO: 2765; WAN024D32_at; Start 343; Stop 367
gaattggaaattctaaaagaagcag

SEQ ID NO: 141478 - DNA, 25 bp, Artificial
  probe
  misc_feature (1)..(25): SEQ ID NO: 2765; WAN024D32_at; Start 185; Stop 209
gagagtatgaaggtcgacttccact

SEQ ID NO: 141479 - DNA, 25 bp, Artificial
  probe
  misc_feature (1)..(25): SEQ ID NO: 2765; WAN024D32_at; Start 89; Stop 113
gagaactgggtgcaggtaaaacgac

SEQ ID NO: 141480 - DNA, 25 bp, Artificial
  probe
  misc_feature (1)..(25): SEQ ID NO: 2765; WAN024D32_at; Start 354; Stop 378
tctaaaagaagcagatggacgccgt

SEQ ID NO: 141481 - DNA, 25 bp, Artificial
  probe
  misc_feature (1)..(25): SEQ ID NO: 2765; WAN024D32_at; Start 48; Stop 72
gggccatctattagcaaagaatgat

SEQ ID NO: 141482 - DNA, 25 bp, Artificial
  probe
  misc_feature (1)..(25): SEQ ID NO: 2765; WAN024D32_at; Start 239; Stop 263
gagatgctgattctatcgacttgga

SEQ ID NO: 141483 - DNA, 25 bp, Artificial
  probe
  misc_feature (1)..(25): SEQ ID NO: 2765; WAN024D32_at; Start 309; Stop 333
tctcttaggagatgccttgccagat

SEQ ID NO: 141484 - DNA, 25 bp, Artificial
  probe
  misc_feature (1)..(25): SEQ ID NO: 2299; WAN024D33_at; Start 475; Stop 499
gggaaatttatcgatgtttacttga

SEQ ID NO: 141485 - DNA, 25 bp, Artificial
  probe
  misc_feature (1)..(25): SEQ ID NO: 2299; WAN024D33_at; Start 273; Stop 297
cattgtgattggaaaaagatattgg

SEQ ID NO: 141486 - DNA, 25 bp, Artificial
  probe
  misc_feature (1)..(25): SEQ ID NO: 2299; WAN024D33_at; Start 160; Stop 184
gctagttcggacaatcagataacct

SEQ ID NO: 141487 - DNA, 25 bp, Artificial
  probe
  misc_feature (1)..(25): SEQ ID NO: 2299; WAN024D33_at; Start 378; Stop 402
gactgtccaaactcgtaatcaagca

SEQ ID NO: 141488 - DNA, 25 bp, Artificial
  probe
  misc_feature (1)..(25): SEQ ID NO: 2299; WAN024D33_at; Start 138; Stop 162
ggaaatattcctcaacaagcaagct

SEQ ID NO: 141489 - DNA, 25 bp, Artificial
  probe
  misc_feature (1)..(25): SEQ ID NO: 2299; WAN024D33_at; Start 419; Stop 443
aaaagcatggctttgtcattgaagg

SEQ ID NO: 141490 - DNA, 25 bp, Artificial
  probe
  misc_feature (1)..(25): SEQ ID NO: 2299; WAN024D33_at; Start 487; Stop 511
gatgtttacttgatgggtaaactga

SEQ ID NO: 141491 - DNA, 25 bp, Artificial
  probe
  misc_feature (1)..(25): SEQ ID NO: 2299; WAN024D33_at; Start 390; Stop 414
tcgtaatcaagcagcagtccatctt

SEQ ID NO: 141492 - DNA, 25 bp, Artificial
  probe
  misc_feature (1)..(25): SEQ ID NO: 2299; WAN024D33_at; Start 335; Stop 359
tagagtgggcacaagcaagtggcat

SEQ ID NO: 141493 - DNA, 25 bp, Artificial
  probe
  misc_feature (1)..(25): SEQ ID NO: 2299; WAN024D33_at; Start 95; Stop 119
ccagcctagacggagatggtattct

SEQ ID NO: 141494 - DNA, 25 bp, Artificial
  probe
  misc_feature (1)..(25): SEQ ID NO: 2299; WAN024D33_at; Start 36; Stop 60
caaagatgcagctgaattagtggcc

SEQ ID NO: 141495 - DNA, 25 bp, Artificial
  probe
  misc_feature (1)..(25): SEQ ID NO: 2299; WAN024D33_at; Start 153; Stop 177
caagcaagctagttcggacaatcag

SEQ ID NO: 141496 - DNA, 25 bp, Artificial
  probe
  misc_feature (1)..(25): SEQ ID NO: 2299; WAN024D33_at; Start 14; Stop 38
tgctcattagggaagcagagcccaa

SEQ ID NO: 141497 - DNA, 25 bp, Artificial
  probe
  misc_feature (1)..(25): SEQ ID NO: 2299; WAN024D33_at; Start 66; Stop 90
aaatcgtgtgagtttggagacagac

SEQ ID NO: 141498 - DNA, 25 bp, Artificial
  probe
  misc_feature (1)..(25): SEQ ID NO: 2299; WAN024D33_at; Start 262; Stop 286
ggagatctcttcattgtgattggaa

SEQ ID NO: 141499 - DNA, 25 bp, Artificial
  probe
  misc_feature (1)..(25): SEQ ID NO: 2299; WAN024D33_at; Start 363; Stop 387
gcgtcgtctccaactgactgtccaa

SEQ ID NO: 141500 - DNA, 25 bp, Artificial
  probe
  misc_feature (1)..(25): SEQ ID NO: 2299; WAN024D33_at; Start 43; Stop 67
gcagctgaattagtggcctttttaa

SEQ ID NO: 141501 - DNA, 25 bp, Artificial
  probe
  misc_feature (1)..(25): SEQ ID NO: 2299; WAN024D33_at; Start 203; Stop 227
gcaaaattgctggtattgtaaatat

SEQ ID NO: 141502 - DNA, 25 bp, Artificial
  probe
  misc_feature (1)..(25): SEQ ID NO: 2299; WAN024D33_at; Start 434; Stop 458
tcattgaaggtagccaagagcgtgg

SEQ ID NO: 141503 - DNA, 25 bp, Artificial
  probe
  misc_feature (1)..(25): SEQ ID NO: 2299; WAN024D33_at; Start 175; Stop 199
cagataaccttacttgcattcttaa

SEQ ID NO: 141504 - DNA, 25 bp, Artificial
  probe
  misc_feature (1)..(25): SEQ ID NO: 2299; WAN024D33_at; Start 250; Stop 274
gtccgtcatattggagatctcttca

SEQ ID NO: 141505 - DNA, 25 bp, Artificial
  probe
  misc_feature (1)..(25): SEQ ID NO: 2299; WAN024D33_at; Start 308; Stop 332
tgggaagtttgttgctagaagaagc

SEQ ID NO: 141506 - DNA, 25 bp, Artificial
  probe
  misc_feature (1)..(25): SEQ ID NO: 2299; WAN024D33_at; Start 290; Stop 314
gatattggaataatggcttgggaag

SEQ ID NO: 141507 - DNA, 25 bp, Artificial
  probe
  misc_feature (1)..(25): SEQ ID NO: 2299; WAN024D33_at; Start 3; Stop 27
ggagtatgaattgctcattagggaa

SEQ ID NO: 141508 - DNA, 25 bp, Artificial
  probe
  misc_feature (1)..(25): SEQ ID NO: 2299; WAN024D33_at; Start 123; Stop 147
gactagtgaggagatggaaatattc

SEQ ID NO: 141509 - DNA, 25 bp, Artificial
  probe
  misc_feature (1)..(25): SEQ ID NO: 2299; WAN024D33_at; Start 25; Stop 49
gaagcagagcccaaagatgcagctg

SEQ ID NO: 141510 - DNA, 25 bp, Artificial
  probe
  misc_feature (1)..(25): SEQ ID NO: 2299; WAN024D33_at; Start 458; Stop 482
gggcatatatagaagaagggaaatt

SEQ ID NO: 141511 - DNA, 25 bp, Artificial
  probe
  misc_feature (1)..(25): SEQ ID NO: 2299; WAN024D33_at; Start 109; Stop 133
gatggtattctcttgactagtgagg

SEQ ID NO: 141512 - DNA, 25 bp, Artificial
  probe
  misc_feature (1)..(25): SEQ ID NO: 2299; WAN024D33_at; Start 350; Stop 374
caagtggcattctgcgtcgtctcca

SEQ ID NO: 141513 - DNA, 25 bp, Artificial
  probe
  misc_feature (1)..(25): SEQ ID NO: 2299; WAN024D33_at; Start 400; Stop 424
gcagcagtccatctttatcaaaagc

SEQ ID NO: 141514 - DNA, 25 bp, Artificial
  probe
  misc_feature (1)..(25): SEQ ID NO: 2299; WAN024D33_at; Start 190; Stop 214
gcattcttaaatggcaaaattgctg

SEQ ID NO: 141515 - DNA, 25 bp, Artificial
  probe
  misc_feature (1)..(25): SEQ ID NO: 2299; WAN024D33_at; Start 53; Stop 77
tagtggcctttttaaatcgtgtgag

SEQ ID NO: 141516 - DNA, 25 bp, Artificial
  probe
  misc_feature (1)..(25): SEQ ID NO: 2299; WAN024D33_at; Start 238; Stop 262
cagcgtaagagagtccgtcatattg

SEQ ID NO: 141517 - DNA, 25 bp, Artificial
  probe
  misc_feature (1)..(25): SEQ ID NO: 2299; WAN024D33_at; Start 322; Stop 346
ctagaagaagcgatagagtgggcac

SEQ ID NO: 141518 - DNA, 25 bp, Artificial
  probe
  misc_feature (1)..(25): SEQ ID NO: 2688; WAN024D34_at; Start 19; Stop 43
ggaatggtgctagctttactttctg

SEQ ID NO: 141519 - DNA, 25 bp, Artificial
  probe
  misc_feature (1)..(25): SEQ ID NO: 2688; WAN024D34_at; Start 506; Stop 530
gtttcccaatttctatcagtgacca

SEQ ID NO: 141520 - DNA, 25 bp, Artificial
  probe
  misc_feature (1)..(25): SEQ ID NO: 2688; WAN024D34_at; Start 926; Stop 950
tgggacaagaagaagttactcagct

SEQ ID NO: 141521 - DNA, 25 bp, Artificial
  probe
  misc_feature (1)..(25): SEQ ID NO: 2688; WAN024D34_at; Start 377; Stop 401
cagagcttgctatagaaaccattca

SEQ ID NO: 141522 - DNA, 25 bp, Artificial
  probe
  misc_feature (1)..(25): SEQ ID NO: 2688; WAN024D34_at; Start 666; Stop 690
tcaaaaagtcatggaaaaagctctc

SEQ ID NO: 141523 - DNA, 25 bp, Artificial
  probe
  misc_feature (1)..(25): SEQ ID NO: 2688; WAN024D34_at; Start 336; Stop 360
tcatgaagcgaaactgaactcagca

SEQ ID NO: 141524 - DNA, 25 bp, Artificial
  probe
  misc_feature (1)..(25): SEQ ID NO: 2688; WAN024D34_at; Start 359; Stop 383
catatgcagatggtggagcagagct

SEQ ID NO: 141525 - DNA, 25 bp, Artificial
  probe
  misc_feature (1)..(25): SEQ ID NO: 2688; WAN024D34_at; Start 992; Stop 1016
cacctgttggtgatgaagataatta

SEQ ID NO: 141526 - DNA, 25 bp, Artificial
  probe
  misc_feature (1)..(25): SEQ ID NO: 2688; WAN024D34_at; Start 469; Stop 493
gatgcagtaggaggtattacagtca

SEQ ID NO: 141527 - DNA, 25 bp, Artificial
  probe
  misc_feature (1)..(25): SEQ ID NO: 2688; WAN024D34_at; Start 488; Stop 512
cagtcaataatatcctaggtttccc

SEQ ID NO: 141528 - DNA, 25 bp, Artificial
  probe
  misc_feature (1)..(25): SEQ ID NO: 2688; WAN024D34_at; Start 168; Stop 192
cattctgttaatgggagtggacacc

SEQ ID NO: 141529 - DNA, 25 bp, Artificial
  probe
  misc_feature (1)..(25): SEQ ID NO: 2688; WAN024D34_at; Start 978; Stop 1002
tttatttggcagagcacctgttggt

SEQ ID NO: 141530 - DNA, 25 bp, Artificial
  probe
  misc_feature (1)..(25): SEQ ID NO: 2688; WAN024D34_at; Start 849; Stop 873
gatacttcaaggtgtttcttaccag

SEQ ID NO: 141531 - DNA, 25 bp, Artificial
  probe
  misc_feature (1)..(25): SEQ ID NO: 2688; WAN024D34_at; Start 144; Stop 168
tattgaagcgactgaacctctaacc

SEQ ID NO: 141532 - DNA, 25 bp, Artificial
  probe
  misc_feature (1)..(25): SEQ ID NO: 2688; WAN024D34_at; Start 605; Stop 629
gaatgcgttaccaagatcctgaggg

SEQ ID NO: 141533 - DNA, 25 bp, Artificial
  probe
  misc_feature (1)..(25): SEQ ID NO: 2688; WAN024D34_at; Start 290; Stop 314
tagagcgggatattctgacgcgcat

SEQ ID NO: 141534 - DNA, 25 bp, Artificial
  probe
  misc_feature (1)..(25): SEQ ID NO: 2688; WAN024D34_at; Start 236; Stop 260
gcatgatcttgatgacagtgaatcc

SEQ ID NO: 141535 - DNA, 25 bp, Artificial
  probe
  misc_feature (1)..(25): SEQ ID NO: 2688; WAN024D34_at; Start 521; Stop 545
tcagtgaccaagaagaatttaatac

SEQ ID NO: 141536 - DNA, 25 bp, Artificial
  probe
  misc_feature (1)..(25): SEQ ID NO: 2688; WAN024D34_at; Start 320; Stop 344
cagggaatggtcaggctcatgaagc

SEQ ID NO: 141537 - DNA, 25 bp, Artificial
  probe
  misc_feature (1)..(25): SEQ ID NO: 2688; WAN024D34_at; Start 275; Stop 299
caacaatgatgagtttagagcggga

SEQ ID NO: 141538 - DNA, 25 bp, Artificial
  probe
  misc_feature (1)..(25): SEQ ID NO: 2688; WAN024D34_at; Start 832; Stop 856
ttgcagggtgaaggagagatacttc

SEQ ID NO: 141539 - DNA, 25 bp, Artificial
  probe
  misc_feature (1)..(25): SEQ ID NO: 2688; WAN024D34_at; Start 583; Stop 607
gaagaagccctagtctatgcacgaa

SEQ ID NO: 141540 - DNA, 25 bp, Artificial
  probe
  misc_feature (1)..(25): SEQ ID NO: 2688; WAN024D34_at; Start 940; Stop 964
gttactcagcttgaaaccaatgcgg

SEQ ID NO: 141541 - DNA, 25 bp, Artificial
  probe
  misc_feature (1)..(25): SEQ ID NO: 2688; WAN024D34_at; Start 418; Stop 442
catattgatcgctatgtgatggtca

SEQ ID NO: 141542 - DNA, 25 bp, Artificial
  probe
  misc_feature (1)..(25): SEQ ID NO: 2688; WAN024D34_at; Start 730; Stop 754
gctttgagtgacaatatgcagacca

SEQ ID NO: 141543 - DNA, 25 bp, Artificial
  probe
  misc_feature (1)..(25): SEQ ID NO: 2688; WAN024D34_at; Start 866; Stop 890
cttaccagattgtttcgagagcaca

SEQ ID NO: 141544 - DNA, 25 bp, Artificial
  probe
  misc_feature (1)..(25): SEQ ID NO: 2688; WAN024D34_at; Start 634; Stop 658
tatggtcgtcaaaaacgtcaacgtg

SEQ ID NO: 141545 - DNA, 25 bp, Artificial
  probe
  misc_feature (1)..(25): SEQ ID NO: 2688; WAN024D34_at; Start 911; Stop 935
tactccgacgttctttgggacaaga

SEQ ID NO: 141546 - DNA, 25 bp, Artificial
  probe
  misc_feature (1)..(25): SEQ ID NO: 2688; WAN024D34_at; Start 881; Stop 905
cgagagcacatatgttggaaatgca

SEQ ID NO: 141547 - DNA, 25 bp, Artificial
  probe
  misc_feature (1)..(25): SEQ ID NO: 2688; WAN024D34_at; Start 305; Stop 329
tgacgcgcattgaatcagggaatgg

SEQ ID NO: 141548 - DNA, 25 bp, Artificial
  probe
  misc_feature (1)..(25): SEQ ID NO: 2688; WAN024D34_at; Start 215; Stop 239
cttgggtcggtagaagtgatagcat

SEQ ID NO: 141549 - DNA, 25 bp, Artificial
  probe
  misc_feature (1)..(25): SEQ ID NO: 2688; WAN024D34_at; Start 810; Stop 834
taaaaccattgaaactcagcagttg

SEQ ID NO: 141550 - DNA, 25 bp, Artificial
  probe
  misc_feature (1)..(25): SEQ ID NO: 2688; WAN024D34_at; Start 762; Stop 786
tttgtctgcaaaaagtatccctaac

SEQ ID NO: 141551 - DNA, 25 bp, Artificial
  probe
  misc_feature (1)..(25): SEQ ID NO: 2688; WAN024D34_at; Start 73; Stop 97
tatactatttatcaacaagggacag

SEQ ID NO: 141552 - DNA, 25 bp, Artificial
  probe
  misc_feature (1)..(25): SEQ ID NO: 893; WAN024D35_at; Start 781; Stop 805
gaaactagtttagccagcattgtgg

SEQ ID NO: 141553 - DNA, 25 bp, Artificial
  probe
  misc_feature (1)..(25): SEQ ID NO: 893; WAN024D35_at; Start 260; Stop 284
aagcattagtctttgatcctcaggc

SEQ ID NO: 141554 - DNA, 25 bp, Artificial
  probe
  misc_feature (1)..(25): SEQ ID NO: 893; WAN024D35_at; Start 691; Stop 715
caagcgctggatatcttggaaaatc

SEQ ID NO: 141555 - DNA, 25 bp, Artificial
  probe
  misc_feature (1)..(25): SEQ ID NO: 893; WAN024D35_at; Start 1215; Stop 1239
gcatgcctttaacctagttcgcaag

SEQ ID NO: 141556 - DNA, 25 bp, Artificial
  probe
  misc_feature (1)..(25): SEQ ID NO: 893; WAN024D35_at; Start 325; Stop 349
tatgcccgaacaccgaataacgaaa

SEQ ID NO: 141557 - DNA, 25 bp, Artificial
  probe
  misc_feature (1)..(25): SEQ ID NO: 893; WAN024D35_at; Start 370; Stop 394
ggagcgattccactgccaaacgaaa

SEQ ID NO: 141558 - DNA, 25 bp, Artificial
  probe
  misc_feature (1)..(25): SEQ ID NO: 893; WAN024D35_at; Start 724; Stop 748
gactgccagactttcgaaggaattt

SEQ ID NO: 141559 - DNA, 25 bp, Artificial
  probe
  misc_feature (1)..(25): SEQ ID NO: 893; WAN024D35_at; Start 415; Stop 439
aaattagaagtagacggagtgacct

SEQ ID NO: 141560 - DNA, 25 bp, Artificial
  probe
  misc_feature (1)..(25): SEQ ID NO: 893; WAN024D35_at; Start 356; Stop 380
ctcaaattgtagaaggagcgattcc

SEQ ID NO: 141561 - DNA, 25 bp, Artificial
  probe
  misc_feature (1)..(25): SEQ ID NO: 893; WAN024D35_at; Start 113; Stop 137
ttcagacggctgtaggagacaatga

SEQ ID NO: 141562 - DNA, 25 bp, Artificial
  probe
  misc_feature (1)..(25): SEQ ID NO: 893; WAN024D35_at; Start 431; Stop 455
gagtgacctatgtcgtccttccagg

SEQ ID NO: 141563 - DNA, 25 bp, Artificial
  probe
  misc_feature (1)..(25): SEQ ID NO: 893; WAN024D35_at; Start 595; Stop 619
gataatcagatcgatcctaccttgg

SEQ ID NO: 141564 - DNA, 25 bp, Artificial
  probe
  misc_feature (1)..(25): SEQ ID NO: 893; WAN024D35_at; Start 157; Stop 181
cttgagattgccagtcaacgtagca

SEQ ID NO: 141565 - DNA, 25 bp, Artificial
  probe
  misc_feature (1)..(25): SEQ ID NO: 893; WAN024D35_at; Start 672; Stop 696
cagtcaagaagaggcgaatcaagcg

SEQ ID NO: 141566 - DNA, 25 bp, Artificial
  probe
  misc_feature (1)..(25): SEQ ID NO: 893; WAN024D35_at; Start 541; Stop 565
cgtttctttgggattggcgagagcc

SEQ ID NO: 141567 - DNA, 25 bp, Artificial
  probe
  misc_feature (1)..(25): SEQ ID NO: 893; WAN024D35_at; Start 625; Stop 649
tatgccaagacaggagaagtcactc

SEQ ID NO: 141568 - DNA, 25 bp, Artificial
  probe
  misc_feature (1)..(25): SEQ ID NO: 893; WAN024D35_at; Start 212; Stop 236
caactgaggacgacctaaccaaaca

SEQ ID NO: 141569 - DNA, 25 bp, Artificial
  probe
  misc_feature (1)..(25): SEQ ID NO: 893; WAN024D35_at; Start 1032; Stop 1056
ggcacgaagcaagacccagtctgat

SEQ ID NO: 141570 - DNA, 25 bp, Artificial
  probe
  misc_feature (1)..(25): SEQ ID NO: 893; WAN024D35_at; Start 456; Stop 480
tccgccaagtgaattgaaacccatg

SEQ ID NO: 141571 - DNA, 25 bp, Artificial
  probe
  misc_feature (1)..(25): SEQ ID NO: 893; WAN024D35_at; Start 383; Stop 407
tgccaaacgaaacaggactggctgt

SEQ ID NO: 141572 - DNA, 25 bp, Artificial
  probe
  misc_feature (1)..(25): SEQ ID NO: 893; WAN024D35_at; Start 1092; Stop 1116
tagcctagaaggacacccagttggg

SEQ ID NO: 141573 - DNA, 25 bp, Artificial
  probe
  misc_feature (1)..(25): SEQ ID NO: 893; WAN024D35_at; Start 1116; Stop 1140
gacagtcttcataggcttggcgcaa

SEQ ID NO: 141574 - DNA, 25 bp, Artificial
  probe
  misc_feature (1)..(25): SEQ ID NO: 893; WAN024D35_at; Start 819; Stop 843
aaggcaagggaaaaccatcgcggct

SEQ ID NO: 141575 - DNA, 25 bp, Artificial
  probe
  misc_feature (1)..(25): SEQ ID NO: 893; WAN024D35_at; Start 57; Stop 81
caccaatgcccagtttttgtcggaa

SEQ ID NO: 141576 - DNA, 25 bp, Artificial
  probe
  misc_feature (1)..(25): SEQ ID NO: 893; WAN024D35_at; Start 398; Stop 422
gactggctgttggaggaaaattaga

SEQ ID NO: 141577 - DNA, 25 bp, Artificial
  probe
  misc_feature (1)..(25): SEQ ID NO: 893; WAN024D35_at; Start 492; Stop 516
acttctacccaagttgatgacaggg

SEQ ID NO: 141578 - DNA, 25 bp, Artificial
  probe
  misc_feature (1)..(25): SEQ ID NO: 893; WAN024D35_at; Start 277; Stop 301
cctcaggctcaggagaagttggata

SEQ ID NO: 141579 - DNA, 25 bp, Artificial
  probe
  misc_feature (1)..(25): SEQ ID NO: 893; WAN024D35_at; Start 862; Stop 886
ggtcttttccaagctaccgtggcga

SEQ ID NO: 141580 - DNA, 25 bp, Artificial
  probe
  misc_feature (1)..(25): SEQ ID NO: 893; WAN024D35_at; Start 1015; Stop 1039
cagaagatggctgagcaggcacgaa

SEQ ID NO: 141581 - DNA, 25 bp, Artificial
  probe
  misc_feature (1)..(25): SEQ ID NO: 893; WAN024D35_at; Start 7; Stop 31
gcagaaatcattgctgttggaacag

SEQ ID NO: 141582 - DNA, 25 bp, Artificial
  probe
  misc_feature (1)..(25): SEQ ID NO: 893; WAN024D35_at; Start 709; Stop 733
gaaaatcaaatcttggactgccaga

SEQ ID NO: 141583 - DNA, 25 bp, Artificial
  probe
  misc_feature (1)..(25): SEQ ID NO: 893; WAN024D35_at; Start 656; Stop 680
tgtcaacaaaggctagcagtcaaga

SEQ ID NO: 141584 - DNA, 25 bp, Artificial
  probe
  misc_feature (1)..(25): SEQ ID NO: 893; WAN024D35_at; Start 74; Stop 98
tgtcggaaaaactagctgagattgg

SEQ ID NO: 141585 - DNA, 25 bp, Artificial
  probe
  misc_feature (1)..(25): SEQ ID NO: 893; WAN024D35_at; Start 640; Stop 664
gaagtcactctacgtctgtcaacaa

SEQ ID NO: 141586 - DNA, 25 bp, Artificial
  probe
  misc_feature (1)..(25): SEQ ID NO: 7425; WAN024D36_at; Start 22; Stop 46
gagaaaaacgagatcctagccccaa

SEQ ID NO: 141587 - DNA, 25 bp, Artificial
  probe
  misc_feature (1)..(25): SEQ ID NO: 7425; WAN024D36_at; Start 58; Stop 82
ttgatagctggcaaagggatgcccc

SEQ ID NO: 141588 - DNA, 25 bp, Artificial
  probe
  misc_feature (1)..(25): SEQ ID NO: 7425; WAN024D36_at; Start 2; Stop 26
tgaagatagaaagtagatttgagaa

SEQ ID NO: 141589 - DNA, 25 bp, Artificial
  probe
  misc_feature (1)..(25): SEQ ID NO: 7425; WAN024D36_at; Start 52; Stop 76
ttccaattgatagctggcaaaggga

SEQ ID NO: 141590 - DNA, 25 bp, Artificial
  probe
  misc_feature (1)..(25): SEQ ID NO: 7425; WAN024D36_at; Start 38; Stop 62
tagccccaagtaatttccaattgat

SEQ ID NO: 141591 - DNA, 25 bp, Artificial
  probe
  misc_feature (1)..(25): SEQ ID NO: 7425; WAN024D36_at; Start 49; Stop 73
aatttccaattgatagctggcaaag

SEQ ID NO: 141592 - DNA, 25 bp, Artificial
  probe
  misc_feature (1)..(25): SEQ ID NO: 7425; WAN024D36_at; Start 55; Stop 79
caattgatagctggcaaagggatgc

SEQ ID NO: 141593 - DNA, 25 bp, Artificial
  probe
  misc_feature (1)..(25): SEQ ID NO: 7425; WAN024D36_at; Start 23; Stop 47
agaaaaacgagatcctagccccaag

SEQ ID NO: 141594 - DNA, 25 bp, Artificial
  probe
  misc_feature (1)..(25): SEQ ID NO: 7425; WAN024D36_at; Start 33; Stop 57
gatcctagccccaagtaatttccaa

SEQ ID NO: 141595 - DNA, 25 bp, Artificial
  probe
  misc_feature (1)..(25): SEQ ID NO: 7425; WAN024D36_at; Start 36; Stop 60
cctagccccaagtaatttccaattg

SEQ ID NO: 141596 - DNA, 25 bp, Artificial
  probe
  misc_feature (1)..(25): SEQ ID NO: 7425; WAN024D36_at; Start 42; Stop 66
cccaagtaatttccaattgatagct

SEQ ID NO: 141597 - DNA, 25 bp, Artificial
  probe
  misc_feature (1)..(25): SEQ ID NO: 7425; WAN024D36_at; Start 61; Stop 85
atagctggcaaagggatgcccctct

SEQ ID NO: 141598 - DNA, 25 bp, Artificial
  probe
  misc_feature (1)..(25): SEQ ID NO: 7425; WAN024D36_at; Start 20; Stop 44
ttgagaaaaacgagatcctagcccc

SEQ ID NO: 141599 - DNA, 25 bp, Artificial
  probe
  misc_feature (1)..(25): SEQ ID NO: 7425; WAN024D36_at; Start 46; Stop 70
agtaatttccaattgatagctggca

SEQ ID NO: 141600 - DNA, 25 bp, Artificial
  probe
  misc_feature (1)..(25): SEQ ID NO: 7425; WAN024D36_at; Start 65; Stop 89
ctggcaaagggatgcccctcttgat

SEQ ID NO: 141601 - DNA, 25 bp, Artificial
  probe
  misc_feature (1)..(25): SEQ ID NO: 7425; WAN024D36_at; Start 59; Stop 83
tgatagctggcaaagggatgcccct

SEQ ID NO: 141602 - DNA, 25 bp, Artificial
  probe
  misc_feature (1)..(25): SEQ ID NO: 7425; WAN024D36_at; Start 32; Stop 56
agatcctagccccaagtaatttcca

SEQ ID NO: 141603 - DNA, 25 bp, Artificial
  probe
  misc_feature (1)..(25): SEQ ID NO: 7425; WAN024D36_at; Start 57; Stop 81
attgatagctggcaaagggatgccc

SEQ ID NO: 141604 - DNA, 25 bp, Artificial
  probe
  misc_feature (1)..(25): SEQ ID NO: 7425; WAN024D36_at; Start 19; Stop 43
tttgagaaaaacgagatcctagccc

SEQ ID NO: 141605 - DNA, 25 bp, Artificial
  probe
  misc_feature (1)..(25): SEQ ID NO: 7425; WAN024D36_at; Start 10; Stop 34
gaaagtagatttgagaaaaacgaga

SEQ ID NO: 141606 - DNA, 25 bp, Artificial
  probe
  misc_feature (1)..(25): SEQ ID NO: 7425; WAN024D36_at; Start 69; Stop 93
caaagggatgcccctcttgattttg

SEQ ID NO: 141607 - DNA, 25 bp, Artificial
  probe
  misc_feature (1)..(25): SEQ ID NO: 7425; WAN024D36_at; Start 21; Stop 45
tgagaaaaacgagatcctagcccca

SEQ ID NO: 141608 - DNA, 25 bp, Artificial
  probe
  misc_feature (1)..(25): SEQ ID NO: 7425; WAN024D36_at; Start 44; Stop 68
caagtaatttccaattgatagctgg

SEQ ID NO: 141609 - DNA, 25 bp, Artificial
  probe
  misc_feature (1)..(25): SEQ ID NO: 7425; WAN024D36_at; Start 27; Stop 51
aaacgagatcctagccccaagtaat

SEQ ID NO: 141610 - DNA, 25 bp, Artificial
  probe
  misc_feature (1)..(25): SEQ ID NO: 7425; WAN024D36_at; Start 14; Stop 38
gtagatttgagaaaaacgagatcct

SEQ ID NO: 141611 - DNA, 25 bp, Artificial
  probe
  misc_feature (1)..(25): SEQ ID NO: 7425; WAN024D36_at; Start 54; Stop 78
ccaattgatagctggcaaagggatg

SEQ ID NO: 141612 - DNA, 25 bp, Artificial
  probe
  misc_feature (1)..(25): SEQ ID NO: 7425; WAN024D36_at; Start 60; Stop 84
gatagctggcaaagggatgcccctc

SEQ ID NO: 141613 - DNA, 25 bp, Artificial
  probe
  misc_feature (1)..(25): SEQ ID NO: 7425; WAN024D36_at; Start 64; Stop 88
gctggcaaagggatgcccctcttga

SEQ ID NO: 141614 - DNA, 25 bp, Artificial
  probe
  misc_feature (1)..(25): SEQ ID NO: 7425; WAN024D36_at; Start 47; Stop 71
gtaatttccaattgatagctggcaa

SEQ ID NO: 141615 - DNA, 25 bp, Artificial
  probe
  misc_feature (1)..(25): SEQ ID NO: 7425; WAN024D36_at; Start 51; Stop 75
tttccaattgatagctggcaaaggg

SEQ ID NO: 141616 - DNA, 25 bp, Artificial
  probe
  misc_feature (1)..(25): SEQ ID NO: 7425; WAN024D36_at; Start 17; Stop 41
gatttgagaaaaacgagatcctagc

SEQ ID NO: 141617 - DNA, 25 bp, Artificial
  probe
  misc_feature (1)..(25): SEQ ID NO: 7425; WAN024D36_at; Start 63; Stop 87
agctggcaaagggatgcccctcttg

SEQ ID NO: 141618 - DNA, 25 bp, Artificial
  probe
  misc_feature (1)..(25): SEQ ID NO: 7425; WAN024D36_at; Start 40; Stop 64
gccccaagtaatttccaattgatag

SEQ ID NO: 141619 - DNA, 25 bp, Artificial
  probe
  misc_feature (1)..(25): SEQ ID NO: 7425; WAN024D36_at; Start 13; Stop 37
agtagatttgagaaaaacgagatcc

SEQ ID NO: 141620 - DNA, 25 bp, Artificial
  probe
  misc_feature (1)..(25): SEQ ID NO: 5336; WAN024D37_at; Start 21; Stop 45
attacttggggctaggctcatgtct

SEQ ID NO: 141621 - DNA, 25 bp, Artificial
  probe
  misc_feature (1)..(25): SEQ ID NO: 5336; WAN024D37_at; Start 46; Stop 70
ttttcaaatttagctatctatcttc

SEQ ID NO: 141622 - DNA, 25 bp, Artificial
  probe
  misc_feature (1)..(25): SEQ ID NO: 5336; WAN024D37_at; Start 30; Stop 54
ggctaggctcatgtctttttcaaat

SEQ ID NO: 141623 - DNA, 25 bp, Artificial
  probe
  misc_feature (1)..(25): SEQ ID NO: 5336; WAN024D37_at; Start 55; Stop 79
ttagctatctatcttcttggatcgg

SEQ ID NO: 141624 - DNA, 25 bp, Artificial
  probe
  misc_feature (1)..(25): SEQ ID NO: 5336; WAN024D37_at; Start 28; Stop 52
ggggctaggctcatgtctttttcaa

SEQ ID NO: 141625 - DNA, 25 bp, Artificial
  probe
  misc_feature (1)..(25): SEQ ID NO: 5336; WAN024D37_at; Start 60; Stop 84
tatctatcttcttggatcggcttcc

SEQ ID NO: 141626 - DNA, 25 bp, Artificial
  probe
  misc_feature (1)..(25): SEQ ID NO: 5336; WAN024D37_at; Start 54; Stop 78
tttagctatctatcttcttggatcg

SEQ ID NO: 141627 - DNA, 25 bp, Artificial
  probe
  misc_feature (1)..(25): SEQ ID NO: 5336; WAN024D37_at; Start 59; Stop 83
ctatctatcttcttggatcggcttc

SEQ ID NO: 141628 - DNA, 25 bp, Artificial
  probe
  misc_feature (1)..(25): SEQ ID NO: 5336; WAN024D37_at; Start 24; Stop 48
acttggggctaggctcatgtctttt

SEQ ID NO: 141629 - DNA, 25 bp, Artificial
  probe
  misc_feature (1)..(25): SEQ ID NO: 5336; WAN024D37_at; Start 51; Stop 75
aaatttagctatctatcttcttgga

SEQ ID NO: 141630 - DNA, 25 bp, Artificial
  probe
  misc_feature (1)..(25): SEQ ID NO: 5336; WAN024D37_at; Start 53; Stop 77
atttagctatctatcttcttggatc

SEQ ID NO: 141631 - DNA, 25 bp, Artificial
  probe
  misc_feature (1)..(25): SEQ ID NO: 5336; WAN024D37_at; Start 57; Stop 81
agctatctatcttcttggatcggct

SEQ ID NO: 141632 - DNA, 25 bp, Artificial
  probe
  misc_feature (1)..(25): SEQ ID NO: 5336; WAN024D37_at; Start 22; Stop 46
ttacttggggctaggctcatgtctt

SEQ ID NO: 141633 - DNA, 25 bp, Artificial
  probe
  misc_feature (1)..(25): SEQ ID NO: 5336; WAN024D37_at; Start 23; Stop 47
tacttggggctaggctcatgtcttt

SEQ ID NO: 141634 - DNA, 25 bp, Artificial
  probe
  misc_feature (1)..(25): SEQ ID NO: 5336; WAN024D37_at; Start 27; Stop 51
tggggctaggctcatgtctttttca

SEQ ID NO: 141635 - DNA, 25 bp, Artificial
  probe
  misc_feature (1)..(25): SEQ ID NO: 5336; WAN024D37_at; Start 29; Stop 53
gggctaggctcatgtctttttcaaa

SEQ ID NO: 141636 - DNA, 25 bp, Artificial
  probe
  misc_feature (1)..(25): SEQ ID NO: 5336; WAN024D37_at; Start 47; Stop 71
tttcaaatttagctatctatcttct

SEQ ID NO: 141637 - DNA, 25 bp, Artificial
  probe
  misc_feature (1)..(25): SEQ ID NO: 5336; WAN024D37_at; Start 56; Stop 80
tagctatctatcttcttggatcggc

SEQ ID NO: 141638 - DNA, 25 bp, Artificial
  probe
  misc_feature (1)..(25): SEQ ID NO: 5336; WAN024D37_at; Start 26; Stop 50
ttggggctaggctcatgtctttttc

SEQ ID NO: 141639 - DNA, 25 bp, Artificial
  probe
  misc_feature (1)..(25): SEQ ID NO: 5336; WAN024D37_at; Start 58; Stop 82
gctatctatcttcttggatcggctt

SEQ ID NO: 141640 - DNA, 25 bp, Artificial
  probe
  misc_feature (1)..(25): SEQ ID NO: 5336; WAN024D37_at; Start 48; Stop 72
ttcaaatttagctatctatcttctt

SEQ ID NO: 141641 - DNA, 25 bp, Artificial
  probe
  misc_feature (1)..(25): SEQ ID NO: 5336; WAN024D37_at; Start 49; Stop 73
tcaaatttagctatctatcttcttg

SEQ ID NO: 141642 - DNA, 25 bp, Artificial
  probe
  misc_feature (1)..(25): SEQ ID NO: 5336; WAN024D37_at; Start 25; Stop 49
cttggggctaggctcatgtcttttt

SEQ ID NO: 141643 - DNA, 25 bp, Artificial
  probe
  misc_feature (1)..(25): SEQ ID NO: 5336; WAN024D37_at; Start 52; Stop 76
aatttagctatctatcttcttggat

SEQ ID NO: 141644 - DNA, 25 bp, Artificial
  probe
  misc_feature (1)..(25): SEQ ID NO: 5336; WAN024D37_at; Start 20; Stop 44
aattacttggggctaggctcatgtc

SEQ ID NO: 141645 - DNA, 25 bp, Artificial
  probe
  misc_feature (1)..(25): SEQ ID NO: 5336; WAN024D37_at; Start 50; Stop 74
caaatttagctatctatcttcttgg

SEQ ID NO: 141646 - DNA, 25 bp, Artificial
  probe
  misc_feature (1)..(25): SEQ ID NO: 5336; WAN024D37_at; Start 31; Stop 55
gctaggctcatgtctttttcaaatt

SEQ ID NO: 141647 - DNA, 25 bp, Artificial
  probe
  misc_feature (1)..(25): SEQ ID NO: 3417; WAN024D38_at; Start 167; Stop 191
tagaattagagcctgtgaagtcaac

SEQ ID NO: 141648 - DNA, 25 bp, Artificial
  probe
  misc_feature (1)..(25): SEQ ID NO: 3417; WAN024D38_at; Start 100; Stop 124
ggagatgaaaagttatcggctataa

SEQ ID NO: 141649 - DNA, 25 bp, Artificial
  probe
  misc_feature (1)..(25): SEQ ID NO: 3417; WAN024D38_at; Start 60; Stop 84
gcatttgaatgaccttacccgtttg

SEQ ID NO: 141650 - DNA, 25 bp, Artificial
  probe
  misc_feature (1)..(25): SEQ ID NO: 3417; WAN024D38_at; Start 159; Stop 183
ctttgtgatagaattagagcctgtg

SEQ ID NO: 141651 - DNA, 25 bp, Artificial
  probe
  misc_feature (1)..(25): SEQ ID NO: 3417; WAN024D38_at; Start 164; Stop 188
tgatagaattagagcctgtgaagtc

SEQ ID NO: 141652 - DNA, 25 bp, Artificial
  probe
  misc_feature (1)..(25): SEQ ID NO: 3417; WAN024D38_at; Start 127; Stop 151
tcaagtagtgcggtaaaagcagaca

SEQ ID NO: 141653 - DNA, 25 bp, Artificial
  probe
  misc_feature (1)..(25): SEQ ID NO: 3417; WAN024D38_at; Start 172; Stop 196
ttagagcctgtgaagtcaactattc

SEQ ID NO: 141654 - DNA, 25 bp, Artificial
  probe
  misc_feature (1)..(25): SEQ ID NO: 3417; WAN024D38_at; Start 175; Stop 199
gagcctgtgaagtcaactattcttc

SEQ ID NO: 141655 - DNA, 25 bp, Artificial
  probe
  misc_feature (1)..(25): SEQ ID NO: 3417; WAN024D38_at; Start 42; Stop 66
aagtaagtccattaaaaagcatttg

SEQ ID NO: 141656 - DNA, 25 bp, Artificial
  probe
  misc_feature (1)..(25): SEQ ID NO: 3417; WAN024D38_at; Start 137; Stop 161
cggtaaaagcagacatgcaccgctt

SEQ ID NO: 141657 - DNA, 25 bp, Artificial
  probe
  misc_feature (1)..(25): SEQ ID NO: 3417; WAN024D38_at; Start 79; Stop 103
cgtttgacagcttccttgctaggag

SEQ ID NO: 141658 - DNA, 25 bp, Artificial
  probe
  misc_feature (1)..(25): SEQ ID NO: 3417; WAN024D38_at; Start 154; Stop 178
caccgctttgtgatagaattagagc

SEQ ID NO: 141659 - DNA, 25 bp, Artificial
  probe
  misc_feature (1)..(25): SEQ ID NO: 3417; WAN024D38_at; Start 215; Stop 239
cattggatcaaaatgaaatttttga

SEQ ID NO: 141660 - DNA, 25 bp, Artificial
  probe
  misc_feature (1)..(25): SEQ ID NO: 3417; WAN024D38_at; Start 147; Stop 171
agacatgcaccgctttgtgatagaa

SEQ ID NO: 141661 - DNA, 25 bp, Artificial
  probe
  misc_feature (1)..(25): SEQ ID NO: 3417; WAN024D38_at; Start 118; Stop 142
gctataacatcaagtagtgcggtaa

SEQ ID NO: 141662 - DNA, 25 bp, Artificial
  probe
  misc_feature (1)..(25): SEQ ID NO: 3417; WAN024D38_at; Start 113; Stop 137
tatcggctataacatcaagtagtgc

SEQ ID NO: 141663 - DNA, 25 bp, Artificial
  probe
  misc_feature (1)..(25): SEQ ID NO: 3417; WAN024D38_at; Start 69; Stop 93
tgaccttacccgtttgacagcttcc

SEQ ID NO: 141664 - DNA, 25 bp, Artificial
  probe
  misc_feature (1)..(25): SEQ ID NO: 3417; WAN024D38_at; Start 150; Stop 174
catgcaccgctttgtgatagaatta

SEQ ID NO: 141665 - DNA, 25 bp, Artificial
  probe
  misc_feature (1)..(25): SEQ ID NO: 3417; WAN024D38_at; Start 169; Stop 193
gaattagagcctgtgaagtcaacta

SEQ ID NO: 141666 - DNA, 25 bp, Artificial
  probe
  misc_feature (1)..(25): SEQ ID NO: 3417; WAN024D38_at; Start 84; Stop 108
gacagcttccttgctaggagatgaa

SEQ ID NO: 141667 - DNA, 25 bp, Artificial
  probe
  misc_feature (1)..(25): SEQ ID NO: 3417; WAN024D38_at; Start 122; Stop 146
taacatcaagtagtgcggtaaaagc

SEQ ID NO: 141668 - DNA, 25 bp, Artificial
  probe
  misc_feature (1)..(25): SEQ ID NO: 3417; WAN024D38_at; Start 132; Stop 156
tagtgcggtaaaagcagacatgcac

SEQ ID NO: 141669 - DNA, 25 bp, Artificial
  probe
  misc_feature (1)..(25): SEQ ID NO: 3417; WAN024D38_at; Start 178; Stop 202
cctgtgaagtcaactattcttcaaa

SEQ ID NO: 141670 - DNA, 25 bp, Artificial
  probe
  misc_feature (1)..(25): SEQ ID NO: 3417; WAN024D38_at; Start 96; Stop 120
gctaggagatgaaaagttatcggct

SEQ ID NO: 141671 - DNA, 25 bp, Artificial
  probe
  misc_feature (1)..(25): SEQ ID NO: 3417; WAN024D38_at; Start 115; Stop 139
tcggctataacatcaagtagtgcgg

SEQ ID NO: 141672 - DNA, 25 bp, Artificial
  probe
  misc_feature (1)..(25): SEQ ID NO: 3417; WAN024D38_at; Start 140; Stop 164
taaaagcagacatgcaccgctttgt

SEQ ID NO: 141673 - DNA, 25 bp, Artificial
  probe
  misc_feature (1)..(25): SEQ ID NO: 3417; WAN024D38_at; Start 88; Stop 112
gcttccttgctaggagatgaaaagt

SEQ ID NO: 141674 - DNA, 25 bp, Artificial
  probe
  misc_feature (1)..(25): SEQ ID NO: 3417; WAN024D38_at; Start 156; Stop 180
ccgctttgtgatagaattagagcct

SEQ ID NO: 141675 - DNA, 25 bp, Artificial
  probe
  misc_feature (1)..(25): SEQ ID NO: 3417; WAN024D38_at; Start 65; Stop 89
tgaatgaccttacccgtttgacagc

SEQ ID NO: 141676 - DNA, 25 bp, Artificial
  probe
  misc_feature (1)..(25): SEQ ID NO: 3417; WAN024D38_at; Start 74; Stop 98
ttacccgtttgacagcttccttgct

SEQ ID NO: 141677 - DNA, 25 bp, Artificial
  probe
  misc_feature (1)..(25): SEQ ID NO: 3417; WAN024D38_at; Start 207; Stop 231
tgacatttcattggatcaaaatgaa

SEQ ID NO: 141678 - DNA, 25 bp, Artificial
  probe
  misc_feature (1)..(25): SEQ ID NO: 3417; WAN024D38_at; Start 144; Stop 168
agcagacatgcaccgctttgtgata

SEQ ID NO: 141679 - DNA, 25 bp, Artificial
  probe
  misc_feature (1)..(25): SEQ ID NO: 3417; WAN024D38_at; Start 92; Stop 116
ccttgctaggagatgaaaagttatc

SEQ ID NO: 141680 - DNA, 25 bp, Artificial
  probe
  misc_feature (1)..(25): SEQ ID NO: 3417; WAN024D38_at; Start 56; Stop 80
aaaagcatttgaatgaccttacccg

SEQ ID NO: 141681 - DNA, 25 bp, Artificial
  probe
  misc_feature (1)..(25): SEQ ID NO: 905; WAN024D39_at; Start 26; Stop 50
cagaagaaatgtacctgacagagcg

SEQ ID NO: 141682 - DNA, 25 bp, Artificial
  probe
  misc_feature (1)..(25): SEQ ID NO: 905; WAN024D39_at; Start 268; Stop 292
tggatttcttaccaaaaaactgcgc

SEQ ID NO: 141683 - DNA, 25 bp, Artificial
  probe
  misc_feature (1)..(25): SEQ ID NO: 905; WAN024D39_at; Start 35; Stop 59
tgtacctgacagagcgattagacgt

SEQ ID NO: 141684 - DNA, 25 bp, Artificial
  probe
  misc_feature (1)..(25): SEQ ID NO: 905; WAN024D39_at; Start 355; Stop 379
aaggcttttgccctatttgtcaaga

SEQ ID NO: 141685 - DNA, 25 bp, Artificial
  probe
  misc_feature (1)..(25): SEQ ID NO: 905; WAN024D39_at; Start 81; Stop 105
gaaaagcgttcaacatcgtaggcgc

SEQ ID NO: 141686 - DNA, 25 bp, Artificial
  probe
  misc_feature (1)..(25): SEQ ID NO: 905; WAN024D39_at; Start 197; Stop 221
tttcggttgccttatccagtctcgg

SEQ ID NO: 141687 - DNA, 25 bp, Artificial
  probe
  misc_feature (1)..(25): SEQ ID NO: 905; WAN024D39_at; Start 171; Stop 195
tatgccaggtgatcgctaccgtttg

SEQ ID NO: 141688 - DNA, 25 bp, Artificial
  probe
  misc_feature (1)..(25): SEQ ID NO: 905; WAN024D39_at; Start 395; Stop 419
tctcagaggagattaaccagtggga

SEQ ID NO: 141689 - DNA, 25 bp, Artificial
  probe
  misc_feature (1)..(25): SEQ ID NO: 905; WAN024D39_at; Start 322; Stop 346
caatgccaaacggagaaatatgcag

SEQ ID NO: 141690 - DNA, 25 bp, Artificial
  probe
  misc_feature (1)..(25): SEQ ID NO: 905; WAN024D39_at; Start 248; Stop 272
tgtataatgcaaaggaaaattggat

SEQ ID NO: 141691 - DNA, 25 bp, Artificial
  probe
  misc_feature (1)..(25): SEQ ID NO: 905; WAN024D39_at; Start 280; Stop 304
caaaaaactgcgcaactcctggaga

SEQ ID NO: 141692 - DNA, 25 bp, Artificial
  probe
  misc_feature (1)..(25): SEQ ID NO: 905; WAN024D39_at; Start 2; Stop 26
tgaaaggagttacgaatatgacgcc

SEQ ID NO: 141693 - DNA, 25 bp, Artificial
  probe
  misc_feature (1)..(25): SEQ ID NO: 905; WAN024D39_at; Start 211; Stop 235
tccagtctcggcttgctgtgtgagg

SEQ ID NO: 141694 - DNA, 25 bp, Artificial
  probe
  misc_feature (1)..(25): SEQ ID NO: 905; WAN024D39_at; Start 408; Stop 432
taaccagtgggaaagtatccagtca

SEQ ID NO: 141695 - DNA, 25 bp, Artificial
  probe
  misc_feature (1)..(25): SEQ ID NO: 905; WAN024D39_at; Start 380; Stop 404
catgcgaaggtcttatctcagagga

SEQ ID NO: 141696 - DNA, 25 bp, Artificial
  probe
  misc_feature (1)..(25): SEQ ID NO: 905; WAN024D39_at; Start 128; Stop 152
aaatcgtggcaggtttcctcatagc

SEQ ID NO: 141697 - DNA, 25 bp, Artificial
  probe
  misc_feature (1)..(25): SEQ ID NO: 905; WAN024D39_at; Start 336; Stop 360
gaaatatgcaggaaagaccaaggct

SEQ ID NO: 141698 - DNA, 25 bp, Artificial
  probe
  misc_feature (1)..(25): SEQ ID NO: 905; WAN024D39_at; Start 116; Stop 140
taaaaataacagaaatcgtggcagg

SEQ ID NO: 141699 - DNA, 25 bp, Artificial
  probe
  misc_feature (1)..(25): SEQ ID NO: 905; WAN024D39_at; Start 139; Stop 163
ggtttcctcatagctgtcttttgtg

SEQ ID NO: 141700 - DNA, 25 bp, Artificial
  probe
  misc_feature (1)..(25): SEQ ID NO: 905; WAN024D39_at; Start 344; Stop 368
caggaaagaccaaggcttttgccct

SEQ ID NO: 141701 - DNA, 25 bp, Artificial
  probe
  misc_feature (1)..(25): SEQ ID NO: 905; WAN024D39_at; Start 18; Stop 42
tatgacgccagaagaaatgtacctg

SEQ ID NO: 141702 - DNA, 25 bp, Artificial
  probe
  misc_feature (1)..(25): SEQ ID NO: 905; WAN024D39_at; Start 55; Stop 79
gacgtacagatagctcattttttaa

SEQ ID NO: 141703 - DNA, 25 bp, Artificial
  probe
  misc_feature (1)..(25): SEQ ID NO: 905; WAN024D39_at; Start 452; Stop 476
cagatgctccagttaaaaaagagta

SEQ ID NO: 141704 - DNA, 25 bp, Artificial
  probe
  misc_feature (1)..(25): SEQ ID NO: 905; WAN024D39_at; Start 295; Stop 319
ctcctggagaaagaaaaattcctct

SEQ ID NO: 141705 - DNA, 25 bp, Artificial
  probe
  misc_feature (1)..(25): SEQ ID NO: 905; WAN024D39_at; Start 181; Stop 205
gatcgctaccgtttgatttcggttg

SEQ ID NO: 141706 - DNA, 25 bp, Artificial
  probe
  misc_feature (1)..(25): SEQ ID NO: 905; WAN024D39_at; Start 44; Stop 68
cagagcgattagacgtacagatagc

SEQ ID NO: 141707 - DNA, 25 bp, Artificial
  probe
  misc_feature (1)..(25): SEQ ID NO: 905; WAN024D39_at; Start 8; Stop 32
gagttacgaatatgacgccagaaga

SEQ ID NO: 141708 - DNA, 25 bp, Artificial
  probe
  misc_feature (1)..(25): SEQ ID NO: 905; WAN024D39_at; Start 445; Stop 469
gctagtgcagatgctccagttaaaa

SEQ ID NO: 141709 - DNA, 25 bp, Artificial
  probe
  misc_feature (1)..(25): SEQ ID NO: 905; WAN024D39_at; Start 155; Stop 179
tcttttgtgctattcctatgccagg

SEQ ID NO: 141710 - DNA, 25 bp, Artificial
  probe
  misc_feature (1)..(25): SEQ ID NO: 905; WAN024D39_at; Start 310; Stop 334
aaattcctctatcaatgccaaacgg

SEQ ID NO: 141711 - DNA, 25 bp, Artificial
  probe
  misc_feature (1)..(25): SEQ ID NO: 905; WAN024D39_at; Start 365; Stop 389
ccctatttgtcaagacatgcgaagg

SEQ ID NO: 141712 - DNA, 25 bp, Artificial
  probe
  misc_feature (1)..(25): SEQ ID NO: 905; WAN024D39_at; Start 423; Stop 447
tatccagtcaaaagaagtggcagct

SEQ ID NO: 141713 - DNA, 25 bp, Artificial
  probe
  misc_feature (1)..(25): SEQ ID NO: 905; WAN024D39_at; Start 94; Stop 118
catcgtaggcgctataaggtattaa

SEQ ID NO: 141714 - DNA, 25 bp, Artificial
  probe
  misc_feature (1)..(25): SEQ ID NO: 905; WAN024D39_at; Start 437; Stop 461
aagtggcagctagtgcagatgctcc

SEQ ID NO: 141715 - DNA, 25 bp, Artificial
  probe
  misc_feature (1)..(25): SEQ ID NO: 2926; WAN024D3A_at; Start 490; Stop 514
gatgctactaaattgacagcgcgcc

SEQ ID NO: 141716 - DNA, 25 bp, Artificial
  probe
  misc_feature (1)..(25): SEQ ID NO: 2926; WAN024D3A_at; Start 504; Stop 528
gacagcgcgccaaactcaaactttg

SEQ ID NO: 141717 - DNA, 25 bp, Artificial
  probe
  misc_feature (1)..(25): SEQ ID NO: 2926; WAN024D3A_at; Start 248; Stop 272
tcaaggctaaccaagaagtatcagc

SEQ ID NO: 141718 - DNA, 25 bp, Artificial
  probe
  misc_feature (1)..(25): SEQ ID NO: 2926; WAN024D3A_at; Start 66; Stop 90
gagcgcgacccagtgccagatattt

SEQ ID NO: 141719 - DNA, 25 bp, Artificial
  probe
  misc_feature (1)..(25): SEQ ID NO: 2926; WAN024D3A_at; Start 176; Stop 200
tctcgcagttagagaaaaatttgct

SEQ ID NO: 141720 - DNA, 25 bp, Artificial
  probe
  misc_feature (1)..(25): SEQ ID NO: 2926; WAN024D3A_at; Start 112; Stop 136
gagctcttatttgctagagaaagcg

SEQ ID NO: 141721 - DNA, 25 bp, Artificial
  probe
  misc_feature (1)..(25): SEQ ID NO: 2926; WAN024D3A_at; Start 46; Stop 70
gaagccgataaggaaaagatgagcg

SEQ ID NO: 141722 - DNA, 25 bp, Artificial
  probe
  misc_feature (1)..(25): SEQ ID NO: 2926; WAN024D3A_at; Start 236; Stop 260
ggaaagtaactctcaaggctaacca

SEQ ID NO: 141723 - DNA, 25 bp, Artificial
  probe
  misc_feature (1)..(25): SEQ ID NO: 2926; WAN024D3A_at; Start 193; Stop 217
aatttgctttctggagtttcccgat

SEQ ID NO: 141724 - DNA, 25 bp, Artificial
  probe
  misc_feature (1)..(25): SEQ ID NO: 2926; WAN024D3A_at; Start 307; Stop 331
caatcagattggcaggagttagctc

SEQ ID NO: 141725 - DNA, 25 bp, Artificial
  probe
  misc_feature (1)..(25): SEQ ID NO: 2926; WAN024D3A_at; Start 550; Stop 574
gacttggtcaatcctgtctatgtta

SEQ ID NO: 141726 - DNA, 25 bp, Artificial
  probe
  misc_feature (1)..(25): SEQ ID NO: 2926; WAN024D3A_at; Start 433; Stop 457
gagaaggattatattgtcaaggtta

SEQ ID NO: 141727 - DNA, 25 bp, Artificial
  probe
  misc_feature (1)..(25): SEQ ID NO: 2926; WAN024D3A_at; Start 403; Stop 427
catctgatgtggatttaccagtcag

SEQ ID NO: 141728 - DNA, 25 bp, Artificial
  probe
  misc_feature (1)..(25): SEQ ID NO: 2926; WAN024D3A_at; Start 271; Stop 295
gctcgcaaagccctttttctagcct

SEQ ID NO: 141729 - DNA, 25 bp, Artificial
  probe
  misc_feature (1)..(25): SEQ ID NO: 2926; WAN024D3A_at; Start 354; Stop 378
tatcgggaggcttgaaaatccttct

SEQ ID NO: 141730 - DNA, 25 bp, Artificial
  probe
  misc_feature (1)..(25): SEQ ID NO: 2926; WAN024D3A_at; Start 380; Stop 404
tcttgagttctcaggacagacaaca

SEQ ID NO: 141731 - DNA, 25 bp, Artificial
  probe
  misc_feature (1)..(25): SEQ ID NO: 2926; WAN024D3A_at; Start 461; Stop 485
gcgacaagcattttgtattgaagag

SEQ ID NO: 141732 - DNA, 25 bp, Artificial
  probe
  misc_feature (1)..(25): SEQ ID NO: 2926; WAN024D3A_at; Start 520; Stop 544
caaactttggaaattctgagtcaat

SEQ ID NO: 141733 - DNA, 25 bp, Artificial
  probe
  misc_feature (1)..(25): SEQ ID NO: 2926; WAN024D3A_at; Start 124; Stop 148
gctagagaaagcgacatgaaagact

SEQ ID NO: 141734 - DNA, 25 bp, Artificial
  probe
  misc_feature (1)..(25): SEQ ID NO: 2926; WAN024D3A_at; Start 566; Stop 590
tctatgttacattaggagaaaaggg

SEQ ID NO: 141735 - DNA, 25 bp, Artificial
  probe
  misc_feature (1)..(25): SEQ ID NO: 2926; WAN024D3A_at; Start 418; Stop 442
taccagtcagctttggagaaggatt

SEQ ID NO: 141736 - DNA, 25 bp, Artificial
  probe
  misc_feature (1)..(25): SEQ ID NO: 2926; WAN024D3A_at; Start 18; Stop 42
cctgtcgcccttgctctggttaaaa

SEQ ID NO: 141737 - DNA, 25 bp, Artificial
  probe
  misc_feature (1)..(25): SEQ ID NO: 2926; WAN024D3A_at; Start 52; Stop 76
gataaggaaaagatgagcgcgaccc

SEQ ID NO: 141738 - DNA, 25 bp, Artificial
  probe
  misc_feature (1)..(25): SEQ ID NO: 2926; WAN024D3A_at; Start 91; Stop 115
ttcttttactatcaaatgtttgagc

SEQ ID NO: 141739 - DNA, 25 bp, Artificial
  probe
  misc_feature (1)..(25): SEQ ID NO: 2926; WAN024D3A_at; Start 144; Stop 168
agacttatgtctgggaacgaaaggt

SEQ ID NO: 141740 - DNA, 25 bp, Artificial
  probe
  misc_feature (1)..(25): SEQ ID NO: 2926; WAN024D3A_at; Start 165; Stop 189
aggtttttatttctcgcagttagag

SEQ ID NO: 141741 - DNA, 25 bp, Artificial
  probe
  misc_feature (1)..(25): SEQ ID NO: 2926; WAN024D3A_at; Start 534; Stop 558
tctgagtcaatcagaagacttggtc

SEQ ID NO: 141742 - DNA, 25 bp, Artificial
  probe
  misc_feature (1)..(25): SEQ ID NO: 2926; WAN024D3A_at; Start 340; Stop 364
gatttttatcagactatcgggaggc

SEQ ID NO: 141743 - DNA, 25 bp, Artificial
  probe
  misc_feature (1)..(25): SEQ ID NO: 2926; WAN024D3A_at; Start 390; Stop 414
tcaggacagacaacatctgatgtgg

SEQ ID NO: 141744 - DNA, 25 bp, Artificial
  probe
  misc_feature (1)..(25): SEQ ID NO: 2926; WAN024D3A_at; Start 262; Stop 286
gaagtatcagctcgcaaagcccttt

SEQ ID NO: 141745 - DNA, 25 bp, Artificial
  probe
  misc_feature (1)..(25): SEQ ID NO: 2926; WAN024D3A_at; Start 138; Stop 162
catgaaagacttatgtctgggaacg

SEQ ID NO: 141746 - DNA, 25 bp, Artificial
  probe
  misc_feature (1)..(25): SEQ ID NO: 2926; WAN024D3A_at; Start 72; Stop 96
gacccagtgccagatatttttcttt

SEQ ID NO: 141747 - DNA, 25 bp, Artificial
  probe
  misc_feature (1)..(25): SEQ ID NO: 2926; WAN024D3A_at; Start 370; Stop 394
aatccttctctcttgagttctcagg

SEQ ID NO: 141748 - DNA, 25 bp, Artificial
  probe
  misc_feature (1)..(25): SEQ ID NO: 2926; WAN024D3A_at; Start 474; Stop 498
tgtattgaagagacaagatgctact

SEQ ID NO: 141749 - DNA, 25 bp, Artificial
  probe
  misc_feature (1)..(25): SEQ ID NO: 2393; WAN024D3B_at; Start 891; Stop 915
ttcgggtgcccgagttgtaacaggc

SEQ ID NO: 141750 - DNA, 25 bp, Artificial
  probe
  misc_feature (1)..(25): SEQ ID NO: 2393; WAN024D3B_at; Start 198; Stop 222
cgacagtcgcctctatcctggagca

SEQ ID NO: 141751 - DNA, 25 bp, Artificial
  probe
  misc_feature (1)..(25): SEQ ID NO: 2393; WAN024D3B_at; Start 132; Stop 156
tgttatcgaaagaaagaagcggagc

SEQ ID NO: 141752 - DNA, 25 bp, Artificial
  probe
  misc_feature (1)..(25): SEQ ID NO: 2393; WAN024D3B_at; Start 426; Stop 450
taatgtcccagctagaatgcagtat

SEQ ID NO: 141753 - DNA, 25 bp, Artificial
  probe
  misc_feature (1)..(25): SEQ ID NO: 2393; WAN024D3B_at; Start 943; Stop 967
caagaaggcagtcgctttacagcag

SEQ ID NO: 141754 - DNA, 25 bp, Artificial
  probe
  misc_feature (1)..(25): SEQ ID NO: 2393; WAN024D3B_at; Start 1005; Stop 1029
tttacgtgacaatgtagttgcgacc

SEQ ID NO: 141755 - DNA, 25 bp, Artificial
  probe
  misc_feature (1)..(25): SEQ ID NO: 2393; WAN024D3B_at; Start 220; Stop 244
gcacttctcgtagtggatgagacct

SEQ ID NO: 141756 - DNA, 25 bp, Artificial
  probe
  misc_feature (1)..(25): SEQ ID NO: 2393; WAN024D3B_at; Start 380; Stop 404
taaacgatttgttggctaagtggca

SEQ ID NO: 141757 - DNA, 25 bp, Artificial
  probe
  misc_feature (1)..(25): SEQ ID NO: 2393; WAN024D3B_at; Start 183; Stop 207
tgtaacagctaccaacgacagtcgc

SEQ ID NO: 141758 - DNA, 25 bp, Artificial
  probe
  misc_feature (1)..(25): SEQ ID NO: 2393; WAN024D3B_at; Start 709; Stop 733
atttcgagtgttgcttatgggcgcc

SEQ ID NO: 141759 - DNA, 25 bp, Artificial
  probe
  misc_feature (1)..(25): SEQ ID NO: 2393; WAN024D3B_at; Start 1060; Stop 1084
aaggttacagcttacagaaacggag

SEQ ID NO: 141760 - DNA, 25 bp, Artificial
  probe
  misc_feature (1)..(25): SEQ ID NO: 2393; WAN024D3B_at; Start 1247; Stop 1271
ggaatgttcgtaatctctctgtcaa

SEQ ID NO: 141761 - DNA, 25 bp, Artificial
  probe
  misc_feature (1)..(25): SEQ ID NO: 2393; WAN024D3B_at; Start 724; Stop 748
tatgggcgccaagtctatctcaagt

SEQ ID NO: 141762 - DNA, 25 bp, Artificial
  probe
  misc_feature (1)..(25): SEQ ID NO: 2393; WAN024D3B_at; Start 1272; Stop 1296
aattagagagtgtaccgggcttgcc

SEQ ID NO: 141763 - DNA, 25 bp, Artificial
  probe
  misc_feature (1)..(25): SEQ ID NO: 2393; WAN024D3B_at; Start 1180; Stop 1204
cctaaggcttgggacagaaatgggc

SEQ ID NO: 141764 - DNA, 25 bp, Artificial
  probe
  misc_feature (1)..(25): SEQ ID NO: 2393; WAN024D3B_at; Start 462; Stop 486
ggctcacagcatggaacaactcaag

SEQ ID NO: 141765 - DNA, 25 bp, Artificial
  probe
  misc_feature (1)..(25): SEQ ID NO: 2393; WAN024D3B_at; Start 112; Stop 136
cagctacccgatgagtttgttgtta

SEQ ID NO: 141766 - DNA, 25 bp, Artificial
  probe
  misc_feature (1)..(25): SEQ ID NO: 2393; WAN024D3B_at; Start 845; Stop 869
tggacaatacagaagtgaaggcggt

SEQ ID NO: 141767 - DNA, 25 bp, Artificial
  probe
  misc_feature (1)..(25): SEQ ID NO: 2393; WAN024D3B_at; Start 1322; Stop 1346
aaaaaaccgatttgccactagtgcg

SEQ ID NO: 141768 - DNA, 25 bp, Artificial
  probe
  misc_feature (1)..(25): SEQ ID NO: 2393; WAN024D3B_at; Start 810; Stop 834
caaggtagctcctcagacagagtgg

SEQ ID NO: 141769 - DNA, 25 bp, Artificial
  probe
  misc_feature (1)..(25): SEQ ID NO: 2393; WAN024D3B_at; Start 147; Stop 171
gaagcggagcttgtcgacaaataca

SEQ ID NO: 141770 - DNA, 25 bp, Artificial
  probe
  misc_feature (1)..(25): SEQ ID NO: 2393; WAN024D3B_at; Start 324; Stop 348
tagcgatagctttctccaagtggaa

SEQ ID NO: 141771 - DNA, 25 bp, Artificial
  probe
  misc_feature (1)..(25): SEQ ID NO: 2393; WAN024D3B_at; Start 680; Stop 704
gaatttctgcagagcgtcctttggt

SEQ ID NO: 141772 - DNA, 25 bp, Artificial
  probe
  misc_feature (1)..(25): SEQ ID NO: 2393; WAN024D3B_at; Start 960; Stop 984
tacagcagatcatccaggcttgccg

SEQ ID NO: 141773 - DNA, 25 bp, Artificial
  probe
  misc_feature (1)..(25): SEQ ID NO: 2393; WAN024D3B_at; Start 1149; Stop 1173
ctatgatcatcaaggtaaggaagtc

SEQ ID NO: 141774 - DNA, 25 bp, Artificial
  probe
  misc_feature (1)..(25): SEQ ID NO: 2393; WAN024D3B_at; Start 1088; Stop 1112
tactgctggatcatagtggtgccta

SEQ ID NO: 141775 - DNA, 25 bp, Artificial
  probe
  misc_feature (1)..(25): SEQ ID NO: 2393; WAN024D3B_at; Start 240; Stop 264
gaccttgttagagaataatcccact

SEQ ID NO: 141776 - DNA, 25 bp, Artificial
  probe
  misc_feature (1)..(25): SEQ ID NO: 2393; WAN024D3B_at; Start 1337; Stop 1361
cactagtgcgtaagcggacgatttc

SEQ ID NO: 141777 - DNA, 25 bp, Artificial
  probe
  misc_feature (1)..(25): SEQ ID NO: 2393; WAN024D3B_at; Start 51; Stop 75
aaagaaactcttgacccatcaggga

SEQ ID NO: 141778 - DNA, 25 bp, Artificial
  probe
  misc_feature (1)..(25): SEQ ID NO: 2393; WAN024D3B_at; Start 91; Stop 115
cgtttcatcaaagagggtaatcagc

SEQ ID NO: 141779 - DNA, 25 bp, Artificial
  probe
  misc_feature (1)..(25): SEQ ID NO: 2393; WAN024D3B_at; Start 1369; Stop 1393
ggaacaactctctatcctcaggtag

SEQ ID NO: 141780 - DNA, 25 bp, Artificial
  probe
  misc_feature (1)..(25): SEQ ID NO: 2393; WAN024D3B_at; Start 412; Stop 436
tatggtcaggtcaataatgtcccag

SEQ ID NO: 141781 - DNA, 25 bp, Artificial
  probe
  misc_feature (1)..(25): SEQ ID NO: 2393; WAN024D3B_at; Start 627; Stop 651
tccaggagatgtgtttcaagatact

SEQ ID NO: 141782 - DNA, 25 bp, Artificial
  probe
  misc_feature (1)..(25): SEQ ID NO: 2393; WAN024D3B_at; Start 310; Stop 334
cctggtttggcaagtagcgatagct

SEQ ID NO: 141783 - DNA, 25 bp, Artificial
  probe
  misc_feature (1)..(25): SEQ ID NO: 2548; WAN024D3C_at; Start 580; Stop 604
gtgactgaattggaaatgattcctc

SEQ ID NO: 141784 - DNA, 25 bp, Artificial
  probe
  misc_feature (1)..(25): SEQ ID NO: 2548; WAN024D3C_at; Start 348; Stop 372
aaacggcggaaacatgggcgcttca

SEQ ID NO: 141785 - DNA, 25 bp, Artificial
  probe
  misc_feature (1)..(25): SEQ ID NO: 2548; WAN024D3C_at; Start 134; Stop 158
cagctttgaaattcgttatcgaccg

SEQ ID NO: 141786 - DNA, 25 bp, Artificial
  probe
  misc_feature (1)..(25): SEQ ID NO: 2548; WAN024D3C_at; Start 564; Stop 588
tattgaagaattccaagtgactgaa

SEQ ID NO: 141787 - DNA, 25 bp, Artificial
  probe
  misc_feature (1)..(25): SEQ ID NO: 2548; WAN024D3C_at; Start 224; Stop 248
cagacgaaacctttacagaaggacg

SEQ ID NO: 141788 - DNA, 25 bp, Artificial
  probe
  misc_feature (1)..(25): SEQ ID NO: 2548; WAN024D3C_at; Start 283; Stop 307
attgtggatactttgacttctaacg

SEQ ID NO: 141789 - DNA, 25 bp, Artificial
  probe
  misc_feature (1)..(25): SEQ ID NO: 2548; WAN024D3C_at; Start 484; Stop 508
gaagcacaagaaggtacaatcacag

SEQ ID NO: 141790 - DNA, 25 bp, Artificial
  probe
  misc_feature (1)..(25): SEQ ID NO: 2548; WAN024D3C_at; Start 16; Stop 40
gccaatatcgtagccaagaaaacgg

SEQ ID NO: 141791 - DNA, 25 bp, Artificial
  probe
  misc_feature (1)..(25): SEQ ID NO: 2548; WAN024D3C_at; Start 149; Stop 173
ttatcgaccgtgctaaacaagccca

SEQ ID NO: 141792 - DNA, 25 bp, Artificial
  probe
  misc_feature (1)..(25): SEQ ID NO: 2548; WAN024D3C_at; Start 29; Stop 53
ccaagaaaacggctaaagatggagc

SEQ ID NO: 141793 - DNA, 25 bp, Artificial
  probe
  misc_feature (1)..(25): SEQ ID NO: 2548; WAN024D3C_at; Start 310; Stop 334
aaccgtacagcagccaatgtccgtg

SEQ ID NO: 141794 - DNA, 25 bp, Artificial
  probe
  misc_feature (1)..(25): SEQ ID NO: 2548; WAN024D3C_at; Start 262; Stop 286
gggccaaatggctctatgctaattg

SEQ ID NO: 141795 - DNA, 25 bp, Artificial
  probe
  misc_feature (1)..(25): SEQ ID NO: 2548; WAN024D3C_at; Start 162; Stop 186
taaacaagcccaagtgccaaaacac

SEQ ID NO: 141796 - DNA, 25 bp, Artificial
  probe
  misc_feature (1)..(25): SEQ ID NO: 2548; WAN024D3C_at; Start 79; Stop 103
ggtgtagaaatctatgtagcagcta

SEQ ID NO: 141797 - DNA, 25 bp, Artificial
  probe
  misc_feature (1)..(25): SEQ ID NO: 2548; WAN024D3C_at; Start 191; Stop 215
tcgataaagcgattgataaagccaa

SEQ ID NO: 141798 - DNA, 25 bp, Artificial
  probe
  misc_feature (1)..(25): SEQ ID NO: 2548; WAN024D3C_at; Start 683; Stop 707
tccaaaagatttatacgaacgtaga

SEQ ID NO: 141799 - DNA, 25 bp, Artificial
  probe
  misc_feature (1)..(25): SEQ ID NO: 2548; WAN024D3C_at; Start 1; Stop 25
atgggacgtaaatgggccaatatcg

SEQ ID NO: 141800 - DNA, 25 bp, Artificial
  probe
  misc_feature (1)..(25): SEQ ID NO: 2548; WAN024D3C_at; Start 672; Stop 696
cgacgaagacgtccaaaagatttat

SEQ ID NO: 141801 - DNA, 25 bp, Artificial
  probe
  misc_feature (1)..(25): SEQ ID NO: 2548; WAN024D3C_at; Start 175; Stop 199
gtgccaaaacacattatcgataaag

SEQ ID NO: 141802 - DNA, 25 bp, Artificial
  probe
  misc_feature (1)..(25): SEQ ID NO: 2548; WAN024D3C_at; Start 408; Stop 432
tattgtatttggaggtgaagatgcg

SEQ ID NO: 141803 - DNA, 25 bp, Artificial
  probe
  misc_feature (1)..(25): SEQ ID NO: 2548; WAN024D3C_at; Start 112; Stop 136
gatccagatccagaatcaaactcag

SEQ ID NO: 141804 - DNA, 25 bp, Artificial
  probe
  misc_feature (1)..(25): SEQ ID NO: 2548; WAN024D3C_at; Start 608; Stop 632
cagaagtggaattgtcaggcgaaga

SEQ ID NO: 141805 - DNA, 25 bp, Artificial
  probe
  misc_feature (1)..(25): SEQ ID NO: 2548; WAN024D3C_at; Start 333; Stop 357
tgcagcctttggtaaaaacggcgga

SEQ ID NO: 141806 - DNA, 25 bp, Artificial
  probe
  misc_feature (1)..(25): SEQ ID NO: 2548; WAN024D3C_at; Start 498; Stop 522
tacaatcacagtttacacagcgcca

SEQ ID NO: 141807 - DNA, 25 bp, Artificial
  probe
  misc_feature (1)..(25): SEQ ID NO: 2548; WAN024D3C_at; Start 623; Stop 647
caggcgaagaccttgaaacctttga

SEQ ID NO: 141808 - DNA, 25 bp, Artificial
  probe
  misc_feature (1)..(25): SEQ ID NO: 2548; WAN024D3C_at; Start 517; Stop 541
gcgccaactgaccttcacaaggcta

SEQ ID NO: 141809 - DNA, 25 bp, Artificial
  probe
  misc_feature (1)..(25): SEQ ID NO: 2548; WAN024D3C_at; Start 447; Stop 471
gcaattgctcgaagcggatgtggat

SEQ ID NO: 141810 - DNA, 25 bp, Artificial
  probe
  misc_feature (1)..(25): SEQ ID NO: 2548; WAN024D3C_at; Start 95; Stop 119
tagcagctaaaaaaggtgatccaga

SEQ ID NO: 141811 - DNA, 25 bp, Artificial
  probe
  misc_feature (1)..(25): SEQ ID NO: 2548; WAN024D3C_at; Start 364; Stop 388
ggcgcttcaggttctgtttcttacc

SEQ ID NO: 141812 - DNA, 25 bp, Artificial
  probe
  misc_feature (1)..(25): SEQ ID NO: 2548; WAN024D3C_at; Start 550; Stop 574
ctccgtgagtctggtattgaagaat

SEQ ID NO: 141813 - DNA, 25 bp, Artificial
  probe
  misc_feature (1)..(25): SEQ ID NO: 2548; WAN024D3C_at; Start 205; Stop 229
gataaagccaaaggaaacacagacg

SEQ ID NO: 141814 - DNA, 25 bp, Artificial
  probe
  misc_feature (1)..(25): SEQ ID NO: 2548; WAN024D3C_at; Start 427; Stop 451
gatgcggacgcagtctttgagcaat

SEQ ID NO: 141815 - DNA, 25 bp, Artificial
  probe
  misc_feature (1)..(25): SEQ ID NO: 2548; WAN024D3C_at; Start 467; Stop 491
tggatgtggatgacgtagaagcaca

SEQ ID NO: 141816 - DNA, 25 bp, Artificial
  probe
  misc_feature (1)..(25): SEQ ID NO: 2548; WAN024D3C_at; Start 324; Stop 348
caatgtccgtgcagcctttggtaaa

SEQ ID NO: 141817 - DNA, 25 bp, Artificial
  probe
  misc_feature (1)..(25): SEQ ID NO: 1945; WAN024D3D_at; Start 1168; Stop 1192
gcagtttcggctagtgttggtatga

SEQ ID NO: 141818 - DNA, 25 bp, Artificial
  probe
  misc_feature (1)..(25): SEQ ID NO: 1945; WAN024D3D_at; Start 953; Stop 977
gcactcgtgagattggtcttcgtaa

SEQ ID NO: 141819 - DNA, 25 bp, Artificial
  probe
  misc_feature (1)..(25): SEQ ID NO: 1945; WAN024D3D_at; Start 30; Stop 54
tatcatggctcacaagatgcgttct

SEQ ID NO: 141820 - DNA, 25 bp, Artificial
  probe
  misc_feature (1)..(25): SEQ ID NO: 1945; WAN024D3D_at; Start 1044; Stop 1068
gttaggtggcttaattggcttgaca

SEQ ID NO: 141821 - DNA, 25 bp, Artificial
  probe
  misc_feature (1)..(25): SEQ ID NO: 1945; WAN024D3D_at; Start 387; Stop 411
gaatgctaatttgacaggtggaaac

SEQ ID NO: 141822 - DNA, 25 bp, Artificial
  probe
  misc_feature (1)..(25): SEQ ID NO: 1945; WAN024D3D_at; Start 49; Stop 73
cgttctttgcttactatgattggga

SEQ ID NO: 141823 - DNA, 25 bp, Artificial
  probe
  misc_feature (1)..(25): SEQ ID NO: 1945; WAN024D3D_at; Start 298; Stop 322
caagaggcagctaaactgaagggag

SEQ ID NO: 141824 - DNA, 25 bp, Artificial
  probe
  misc_feature (1)..(25): SEQ ID NO: 1945; WAN024D3D_at; Start 1127; Stop 1151
tagaagttggagtatcaatcccagt

SEQ ID NO: 141825 - DNA, 25 bp, Artificial
  probe
  misc_feature (1)..(25): SEQ ID NO: 1945; WAN024D3D_at; Start 264; Stop 288
tgttgaaccgccaaaaccgcaagaa

SEQ ID NO: 141826 - DNA, 25 bp, Artificial
  probe
  misc_feature (1)..(25): SEQ ID NO: 1945; WAN024D3D_at; Start 629; Stop 653
aaatatatgggtttggtggcttgcc

SEQ ID NO: 141827 - DNA, 25 bp, Artificial
  probe
  misc_feature (1)..(25): SEQ ID NO: 1945; WAN024D3D_at; Start 348; Stop 372
aacgaatgccatcttgacctatcaa

SEQ ID NO: 141828 - DNA, 25 bp, Artificial
  probe
  misc_feature (1)..(25): SEQ ID NO: 1945; WAN024D3D_at; Start 1065; Stop 1089
gacaattgcaagtggtttaactgcc

SEQ ID NO: 141829 - DNA, 25 bp, Artificial
  probe
  misc_feature (1)..(25): SEQ ID NO: 1945; WAN024D3D_at; Start 938; Stop 962
tttcggtgacagagcgcactcgtga

SEQ ID NO: 141830 - DNA, 25 bp, Artificial
  probe
  misc_feature (1)..(25): SEQ ID NO: 1945; WAN024D3D_at; Start 568; Stop 592
gtcaatggatttagttaccgggtca

SEQ ID NO: 141831 - DNA, 25 bp, Artificial
  probe
  misc_feature (1)..(25): SEQ ID NO: 1945; WAN024D3D_at; Start 1188; Stop 1212
tatgatttttggagtcttgccagcc

SEQ ID NO: 141832 - DNA, 25 bp, Artificial
  probe
  misc_feature (1)..(25): SEQ ID NO: 1945; WAN024D3D_at; Start 1202; Stop 1226
tcttgccagccaacaaggcatcgaa

SEQ ID NO: 141833 - DNA, 25 bp, Artificial
  probe
  misc_feature (1)..(25): SEQ ID NO: 1945; WAN024D3D_at; Start 405; Stop 429
tggaaacagaacttacatggacgct

SEQ ID NO: 141834 - DNA, 25 bp, Artificial
  probe
  misc_feature (1)..(25): SEQ ID NO: 1945; WAN024D3D_at; Start 101; Stop 125
tgattatggctttgggtgattccct

SEQ ID NO: 141835 - DNA, 25 bp, Artificial
  probe
  misc_feature (1)..(25): SEQ ID NO: 1945; WAN024D3D_at; Start 907; Stop 931
ggaggaactggtgtcatgaacatca

SEQ ID NO: 141836 - DNA, 25 bp, Artificial
  probe
  misc_feature (1)..(25): SEQ ID NO: 1945; WAN024D3D_at; Start 801; Stop 825
agaataccaggtggcagatgagtcc

SEQ ID NO: 141837 - DNA, 25 bp, Artificial
  probe
  misc_feature (1)..(25): SEQ ID NO: 1945; WAN024D3D_at; Start 115; Stop 139
ggtgattccctatctcgtcaagtca

SEQ ID NO: 141838 - DNA, 25 bp, Artificial
  probe
  misc_feature (1)..(25): SEQ ID NO: 1945; WAN024D3D_at; Start 924; Stop 948
gaacatcatgctggtttcggtgaca

SEQ ID NO: 141839 - DNA, 25 bp, Artificial
  probe
  misc_feature (1)..(25): SEQ ID NO: 1945; WAN024D3D_at; Start 1024; Stop 1048
gaatccatgattttgaccttgttag

SEQ ID NO: 141840 - DNA, 25 bp, Artificial
  probe
  misc_feature (1)..(25): SEQ ID NO: 1945; WAN024D3D_at; Start 783; Stop 807
tgcaggcttacaacagggagaatac

SEQ ID NO: 141841 - DNA, 25 bp, Artificial
  probe
  misc_feature (1)..(25): SEQ ID NO: 1945; WAN024D3D_at; Start 887; Stop 911
cagggatttctctctttgttggagg

SEQ ID NO: 141842 - DNA, 25 bp, Artificial
  probe
  misc_feature (1)..(25): SEQ ID NO: 1945; WAN024D3D_at; Start 439; Stop 463
gaaattattgcaggtcgtagtctga

SEQ ID NO: 141843 - DNA, 25 bp, Artificial
  probe
  misc_feature (1)..(25): SEQ ID NO: 1945; WAN024D3D_at; Start 766; Stop 790
cgaaaaatgacagagcttgcaggct

SEQ ID NO: 141844 - DNA, 25 bp, Artificial
  probe
  misc_feature (1)..(25): SEQ ID NO: 1945; WAN024D3D_at; Start 719; Stop 743
gagtgaatgataccagtttaacccc

SEQ ID NO: 141845 - DNA, 25 bp, Artificial
  probe
  misc_feature (1)..(25): SEQ ID NO: 1945; WAN024D3D_at; Start 867; Stop 891
gacgattattagttccatcgcaggg

SEQ ID NO: 141846 - DNA, 25 bp, Artificial
  probe
  misc_feature (1)..(25): SEQ ID NO: 1945; WAN024D3D_at; Start 454; Stop 478
cgtagtctgagagagcaagatttca

SEQ ID NO: 141847 - DNA, 25 bp, Artificial
  probe
  misc_feature (1)..(25): SEQ ID NO: 1945; WAN024D3D_at; Start 743; Stop 767
caactctgggtccagaactggcacg

SEQ ID NO: 141848 - DNA, 25 bp, Artificial
  probe
  misc_feature (1)..(25): SEQ ID NO: 1945; WAN024D3D_at; Start 1153; Stop 1177
gccctatttagtcttgcagtttcgg

SEQ ID NO: 141849 - DNA, 25 bp, Artificial
  probe
  misc_feature (1)..(25): SEQ ID NO: 1945; WAN024D3D_at; Start 643; Stop 667
ggtggcttgcctattactaccaata

SEQ ID NO: 141850 - DNA, 25 bp, Artificial
  probe
  misc_feature (1)..(25): SEQ ID NO: 1945; WAN024D3D_at; Start 1223; Stop 1247
cgaaacttgatccaattgaagccct

SEQ ID NO: 141851 - DNA, 25 bp, Artificial
  probe
  misc_feature (1)..(25): SEQ ID NO: 696; WAN024D3E_at; Start 306; Stop 330
gcccagtcgccatgtcttttcggca

SEQ ID NO: 141852 - DNA, 25 bp, Artificial
  probe
  misc_feature (1)..(25): SEQ ID NO: 696; WAN024D3E_at; Start 314; Stop 338
gccatgtcttttcggcaactatcat

SEQ ID NO: 141853 - DNA, 25 bp, Artificial
  probe
  misc_feature (1)..(25): SEQ ID NO: 696; WAN024D3E_at; Start 367; Stop 391
cctattggcttagtatgcttgatct

SEQ ID NO: 141854 - DNA, 25 bp, Artificial
  probe
  misc_feature (1)..(25): SEQ ID NO: 696; WAN024D3E_at; Start 69; Stop 93
cctattacgcagtttcaatcgtttg

SEQ ID NO: 141855 - DNA, 25 bp, Artificial
  probe
  misc_feature (1)..(25): SEQ ID NO: 696; WAN024D3E_at; Start 105; Stop 129
catgcccctggtctatctgatcttg

SEQ ID NO: 141856 - DNA, 25 bp, Artificial
  probe
  misc_feature (1)..(25): SEQ ID NO: 696; WAN024D3E_at; Start 342; Stop 366
catggcctgtctgcatgctagtcta

SEQ ID NO: 141857 - DNA, 25 bp, Artificial
  probe
  misc_feature (1)..(25): SEQ ID NO: 696; WAN024D3E_at; Start 139; Stop 163
acttacctgcaactaggacttggtc

SEQ ID NO: 141858 - DNA, 25 bp, Artificial
  probe
  misc_feature (1)..(25): SEQ ID NO: 696; WAN024D3E_at; Start 82; Stop 106
ttcaatcgtttgatgacagtcgcca

SEQ ID NO: 141859 - DNA, 25 bp, Artificial
  probe
  misc_feature (1)..(25): SEQ ID NO: 696; WAN024D3E_at; Start 113; Stop 137
tggtctatctgatcttgctagtcac

SEQ ID NO: 141860 - DNA, 25 bp, Artificial
  probe
  misc_feature (1)..(25): SEQ ID NO: 696; WAN024D3E_at; Start 441; Stop 465
caaggatgtcttggttggctatgct

SEQ ID NO: 141861 - DNA, 25 bp, Artificial
  probe
  misc_feature (1)..(25): SEQ ID NO: 696; WAN024D3E_at; Start 150; Stop 174
actaggacttggtcagcaagttggg

SEQ ID NO: 141862 - DNA, 25 bp, Artificial
  probe
  misc_feature (1)..(25): SEQ ID NO: 696; WAN024D3E_at; Start 2; Stop 26
tgaaaaattatcaagaatggtatcg

SEQ ID NO: 141863 - DNA, 25 bp, Artificial
  probe
  misc_feature (1)..(25): SEQ ID NO: 696; WAN024D3E_at; Start 426; Stop 450
gggtgttcattatcccaaggatgtc

SEQ ID NO: 141864 - DNA, 25 bp, Artificial
  probe
  misc_feature (1)..(25): SEQ ID NO: 696; WAN024D3E_at; Start 186; Stop 210
tattcctgcatcaggttttgtggcc

SEQ ID NO: 141865 - DNA, 25 bp, Artificial
  probe
  misc_feature (1)..(25): SEQ ID NO: 696; WAN024D3E_at; Start 299; Stop 323
ggtcgatgcccagtcgccatgtctt

SEQ ID NO: 141866 - DNA, 25 bp, Artificial
  probe
  misc_feature (1)..(25): SEQ ID NO: 696; WAN024D3E_at; Start 450; Stop 474
cttggttggctatgcttgtggtttg

SEQ ID NO: 141867 - DNA, 25 bp, Artificial
  probe
  misc_feature (1)..(25): SEQ ID NO: 696; WAN024D3E_at; Start 237; Stop 261
tcacccgagaccttatgaaacttgg

SEQ ID NO: 141868 - DNA, 25 bp, Artificial
  probe
  misc_feature (1)..(25): SEQ ID NO: 696; WAN024D3E_at; Start 144; Stop 168
cctgcaactaggacttggtcagcaa

SEQ ID NO: 141869 - DNA, 25 bp, Artificial
  probe
  misc_feature (1)..(25): SEQ ID NO: 696; WAN024D3E_at; Start 10; Stop 34
tatcaagaatggtatcgaaatatca

SEQ ID NO: 141870 - DNA, 25 bp, Artificial
  probe
  misc_feature (1)..(25): SEQ ID NO: 696; WAN024D3E_at; Start 206; Stop 230
tggccttgtccctgtttcgtaagaa

SEQ ID NO: 141871 - DNA, 25 bp, Artificial
  probe
  misc_feature (1)..(25): SEQ ID NO: 696; WAN024D3E_at; Start 323; Stop 347
tttcggcaactatcatctccatggc

SEQ ID NO: 141872 - DNA, 25 bp, Artificial
  probe
  misc_feature (1)..(25): SEQ ID NO: 696; WAN024D3E_at; Start 56; Stop 80
caattcttttattcctattacgcag

SEQ ID NO: 141873 - DNA, 25 bp, Artificial
  probe
  misc_feature (1)..(25): SEQ ID NO: 696; WAN024D3E_at; Start 173; Stop 197
gggtttatgtgcttattcctgcatc

SEQ ID NO: 141874 - DNA, 25 bp, Artificial
  probe
  misc_feature (1)..(25): SEQ ID NO: 696; WAN024D3E_at; Start 90; Stop 114
tttgatgacagtcgccatgcccctg

SEQ ID NO: 141875 - DNA, 25 bp, Artificial
  probe
  misc_feature (1)..(25): SEQ ID NO: 696; WAN024D3E_at; Start 263; Stop 287
atatctgtccccttcttgataagga

SEQ ID NO: 141876 - DNA, 25 bp, Artificial
  probe
  misc_feature (1)..(25): SEQ ID NO: 696; WAN024D3E_at; Start 355; Stop 379
catgctagtctacctattggcttag

SEQ ID NO: 141877 - DNA, 25 bp, Artificial
  probe
  misc_feature (1)..(25): SEQ ID NO: 696; WAN024D3E_at; Start 346; Stop 370
gcctgtctgcatgctagtctaccta

SEQ ID NO: 141878 - DNA, 25 bp, Artificial
  probe
  misc_feature (1)..(25): SEQ ID NO: 696; WAN024D3E_at; Start 383; Stop 407
gcttgatcttttcagctttgctggg

SEQ ID NO: 141879 - DNA, 25 bp, Artificial
  probe
  misc_feature (1)..(25): SEQ ID NO: 696; WAN024D3E_at; Start 194; Stop 218
catcaggttttgtggccttgtccct

SEQ ID NO: 141880 - DNA, 25 bp, Artificial
  probe
  misc_feature (1)..(25): SEQ ID NO: 696; WAN024D3E_at; Start 333; Stop 357
tatcatctccatggcctgtctgcat

SEQ ID NO: 141881 - DNA, 25 bp, Artificial
  probe
  misc_feature (1)..(25): SEQ ID NO: 696; WAN024D3E_at; Start 276; Stop 300
tcttgataaggatagttcgggacgg

SEQ ID NO: 141882 - DNA, 25 bp, Artificial
  probe
  misc_feature (1)..(25): SEQ ID NO: 696; WAN024D3E_at; Start 218; Stop 242
tgtttcgtaagaaaatcaatcaccc

SEQ ID NO: 141883 - DNA, 25 bp, Artificial
  probe
  misc_feature (1)..(25): SEQ ID NO: 696; WAN024D3E_at; Start 225; Stop 249
taagaaaatcaatcacccgagacct

SEQ ID NO: 141884 - DNA, 25 bp, Artificial
  probe
  misc_feature (1)..(25): SEQ ID NO: 696; WAN024D3E_at; Start 288; Stop 312
tagttcgggacggtcgatgcccagt

SEQ ID NO: 141885 - DNA, 25 bp, Artificial
  probe
  misc_feature (1)..(25): SEQ ID NO: 672; WAN024D3F_at; Start 159; Stop 183
tctcacttcggcagtttttacaggt

SEQ ID NO: 141886 - DNA, 25 bp, Artificial
  probe
  misc_feature (1)..(25): SEQ ID NO: 672; WAN024D3F_at; Start 238; Stop 262
cattctcttatttgggctagcatct

SEQ ID NO: 141887 - DNA, 25 bp, Artificial
  probe
  misc_feature (1)..(25): SEQ ID NO: 672; WAN024D3F_at; Start 41; Stop 65
cagcttggatcttgctgcaagggaa

SEQ ID NO: 141888 - DNA, 25 bp, Artificial
  probe
  misc_feature (1)..(25): SEQ ID NO: 672; WAN024D3F_at; Start 464; Stop 488
cagagatgctaggtgattttgcaac

SEQ ID NO: 141889 - DNA, 25 bp, Artificial
  probe
  misc_feature (1)..(25): SEQ ID NO: 672; WAN024D3F_at; Start 375; Stop 399
tagcgggaccttctataagcaagat

SEQ ID NO: 141890 - DNA, 25 bp, Artificial
  probe
  misc_feature (1)..(25): SEQ ID NO: 672; WAN024D3F_at; Start 514; Stop 538
aatgcaaccgtctatgttccacaac

SEQ ID NO: 141891 - DNA, 25 bp, Artificial
  probe
  misc_feature (1)..(25): SEQ ID NO: 672; WAN024D3F_at; Start 351; Stop 375
cacggataaggaagtcgcttttggt

SEQ ID NO: 141892 - DNA, 25 bp, Artificial
  probe
  misc_feature (1)..(25): SEQ ID NO: 672; WAN024D3F_at; Start 25; Stop 49
gttttattggttttagcagcttgga

SEQ ID NO: 141893 - DNA, 25 bp, Artificial
  probe
  misc_feature (1)..(25): SEQ ID NO: 672; WAN024D3F_at; Start 344; Stop 368
cagtcgtcacggataaggaagtcgc

SEQ ID NO: 141894 - DNA, 25 bp, Artificial
  probe
  misc_feature (1)..(25): SEQ ID NO: 672; WAN024D3F_at; Start 285; Stop 309
tctgacgcattcaagtaagttctgg

SEQ ID NO: 141895 - DNA, 25 bp, Artificial
  probe
  misc_feature (1)..(25): SEQ ID NO: 672; WAN024D3F_at; Start 269; Stop 293
tacttggtgttggttatctgacgca

SEQ ID NO: 141896 - DNA, 25 bp, Artificial
  probe
  misc_feature (1)..(25): SEQ ID NO: 672; WAN024D3F_at; Start 449; Stop 473
tctactatgataatgcagagatgct

SEQ ID NO: 141897 - DNA, 25 bp, Artificial
  probe
  misc_feature (1)..(25): SEQ ID NO: 672; WAN024D3F_at; Start 134; Stop 158
ccattgagtccatccttagacgtca

SEQ ID NO: 141898 - DNA, 25 bp, Artificial
  probe
  misc_feature (1)..(25): SEQ ID NO: 672; WAN024D3F_at; Start 562; Stop 586
gaaacctcctttggtgcagctaagg

SEQ ID NO: 141899 - DNA, 25 bp, Artificial
  probe
  misc_feature (1)..(25): SEQ ID NO: 672; WAN024D3F_at; Start 221; Stop 245
tgttaccagttaccaatcattctct

SEQ ID NO: 141900 - DNA, 25 bp, Artificial
  probe
  misc_feature (1)..(25): SEQ ID NO: 672; WAN024D3F_at; Start 598; Stop 622
gtagccccaaccagcaaaaccttga

SEQ ID NO: 141901 - DNA, 25 bp, Artificial
  probe
  misc_feature (1)..(25): SEQ ID NO: 672; WAN024D3F_at; Start 195; Stop 219
catcattgcaaattacgcttatgac

SEQ ID NO: 141902 - DNA, 25 bp, Artificial
  probe
  misc_feature (1)..(25): SEQ ID NO: 672; WAN024D3F_at; Start 365; Stop 389
tcgcttttggtagcgggaccttcta

SEQ ID NO: 141903 - DNA, 25 bp, Artificial
  probe
  misc_feature (1)..(25): SEQ ID NO: 672; WAN024D3F_at; Start 295; Stop 319
tcaagtaagttctggaatgaaaaaa

SEQ ID NO: 141904 - DNA, 25 bp, Artificial
  probe
  misc_feature (1)..(25): SEQ ID NO: 672; WAN024D3F_at; Start 149; Stop 173
ttagacgtcatctcacttcggcagt

SEQ ID NO: 141905 - DNA, 25 bp, Artificial
  probe
  misc_feature (1)..(25): SEQ ID NO: 672; WAN024D3F_at; Start 583; Stop 607
aaggctgacgctcctgtagccccaa

SEQ ID NO: 141906 - DNA, 25 bp, Artificial
  probe
  misc_feature (1)..(25): SEQ ID NO: 672; WAN024D3F_at; Start 91; Stop 115
aaaatatggcctttactaggtattg

SEQ ID NO: 141907 - DNA, 25 bp, Artificial
  probe
  misc_feature (1)..(25): SEQ ID NO: 672; WAN024D3F_at; Start 400; Stop 424
caagatctcgtagatgaccaagtgg

SEQ ID NO: 141908 - DNA, 25 bp, Artificial
  probe
  misc_feature (1)..(25): SEQ ID NO: 672; WAN024D3F_at; Start 205; Stop 229
aattacgcttatgacttgttaccag

SEQ ID NO: 141909 - DNA, 25 bp, Artificial
  probe
  misc_feature (1)..(25): SEQ ID NO: 672; WAN024D3F_at; Start 412; Stop 436
gatgaccaagtggaagtcgcttttg

SEQ ID NO: 141910 - DNA, 25 bp, Artificial
  probe
  misc_feature (1)..(25): SEQ ID NO: 672; WAN024D3F_at; Start 124; Stop 148
gcttataagtccattgagtccatcc

SEQ ID NO: 141911 - DNA, 25 bp, Artificial
  probe
  misc_feature (1)..(25): SEQ ID NO: 672; WAN024D3F_at; Start 77; Stop 101
cttctttggatggtaaaatatggcc

SEQ ID NO: 141912 - DNA, 25 bp, Artificial
  probe
  misc_feature (1)..(25): SEQ ID NO: 672; WAN024D3F_at; Start 53; Stop 77
tgctgcaagggaattttggaattcc

SEQ ID NO: 141913 - DNA, 25 bp, Artificial
  probe
  misc_feature (1)..(25): SEQ ID NO: 672; WAN024D3F_at; Start 253; Stop 277
gctagcatcttggtggtacttggtg

SEQ ID NO: 141914 - DNA, 25 bp, Artificial
  probe
  misc_feature (1)..(25): SEQ ID NO: 672; WAN024D3F_at; Start 535; Stop 559
caacactggcgtgtagatttgaaag

SEQ ID NO: 141915 - DNA, 25 bp, Artificial
  probe
  misc_feature (1)..(25): SEQ ID NO: 672; WAN024D3F_at; Start 546; Stop 570
tgtagatttgaaagtagaaacctcc

SEQ ID NO: 141916 - DNA, 25 bp, Artificial
  probe
  misc_feature (1)..(25): SEQ ID NO: 672; WAN024D3F_at; Start 385; Stop 409
ttctataagcaagatcaagatctcg

SEQ ID NO: 141917 - DNA, 25 bp, Artificial
  probe
  misc_feature (1)..(25): SEQ ID NO: 672; WAN024D3F_at; Start 577; Stop 601
gcagctaaggctgacgctcctgtag

SEQ ID NO: 141918 - DNA, 25 bp, Artificial
  probe
  misc_feature (1)..(25): SEQ ID NO: 672; WAN024D3F_at; Start 526; Stop 550
tatgttccacaacactggcgtgtag

SEQ ID NO: 141919 - DNA, 25 bp, Artificial
  probe
  misc_feature (1)..(25): SEQ ID NO: 5551; WAN024D3G_at; Start 29; Stop 53
actacagcgtagatgatgtagtgtc

SEQ ID NO: 141920 - DNA, 25 bp, Artificial
  probe
  misc_feature (1)..(25): SEQ ID NO: 5551; WAN024D3G_at; Start 163; Stop 187
agttcttctggttccatgattgcga

SEQ ID NO: 141921 - DNA, 25 bp, Artificial
  probe
  misc_feature (1)..(25): SEQ ID NO: 5551; WAN024D3G_at; Start 172; Stop 196
ggttccatgattgcgaatgattggg

SEQ ID NO: 141922 - DNA, 25 bp, Artificial
  probe
  misc_feature (1)..(25): SEQ ID NO: 5551; WAN024D3G_at; Start 97; Stop 121
tttaattgctcaggaaccatgaaag

SEQ ID NO: 141923 - DNA, 25 bp, Artificial
  probe
  misc_feature (1)..(25): SEQ ID NO: 5551; WAN024D3G_at; Start 186; Stop 210
gaatgattgggtcaaagacaatggc

SEQ ID NO: 141924 - DNA, 25 bp, Artificial
  probe
  misc_feature (1)..(25): SEQ ID NO: 5551; WAN024D3G_at; Start 94; Stop 118
gcctttaattgctcaggaaccatga

SEQ ID NO: 141925 - DNA, 25 bp, Artificial
  probe
  misc_feature (1)..(25): SEQ ID NO: 5551; WAN024D3G_at; Start 149; Stop 173
aatggtattatgtaagttcttctgg

SEQ ID NO: 141926 - DNA, 25 bp, Artificial
  probe
  misc_feature (1)..(25): SEQ ID NO: 5551; WAN024D3G_at; Start 136; Stop 160
tatgacaagggagaatggtattatg

SEQ ID NO: 141927 - DNA, 25 bp, Artificial
  probe
  misc_feature (1)..(25): SEQ ID NO: 5551; WAN024D3G_at; Start 176; Stop 200
ccatgattgcgaatgattgggtcaa

SEQ ID NO: 141928 - DNA, 25 bp, Artificial
  probe
  misc_feature (1)..(25): SEQ ID NO: 5551; WAN024D3G_at; Start 16; Stop 40
gatgtatctatgtactacagcgtag

SEQ ID NO: 141929 - DNA, 25 bp, Artificial
  probe
  misc_feature (1)..(25): SEQ ID NO: 5551; WAN024D3G_at; Start 99; Stop 123
taattgctcaggaaccatgaaagtc

SEQ ID NO: 141930 - DNA, 25 bp, Artificial
  probe
  misc_feature (1)..(25): SEQ ID NO: 5551; WAN024D3G_at; Start 102; Stop 126
ttgctcaggaaccatgaaagtcagt

SEQ ID NO: 141931 - DNA, 25 bp, Artificial
  probe
  misc_feature (1)..(25): SEQ ID NO: 5551; WAN024D3G_at; Start 13; Stop 37
tttgatgtatctatgtactacagcg

SEQ ID NO: 141932 - DNA, 25 bp, Artificial
  probe
  misc_feature (1)..(25): SEQ ID NO: 5551; WAN024D3G_at; Start 182; Stop 206
ttgcgaatgattgggtcaaagacaa

SEQ ID NO: 141933 - DNA, 25 bp, Artificial
  probe
  misc_feature (1)..(25): SEQ ID NO: 5551; WAN024D3G_at; Start 161; Stop 185
taagttcttctggttccatgattgc

SEQ ID NO: 141934 - DNA, 25 bp, Artificial
  probe
  misc_feature (1)..(25): SEQ ID NO: 5551; WAN024D3G_at; Start 132; Stop 156
ggtttatgacaagggagaatggtat

SEQ ID NO: 141935 - DNA, 25 bp, Artificial
  probe
  misc_feature (1)..(25): SEQ ID NO: 5551; WAN024D3G_at; Start 192; Stop 216
ttgggtcaaagacaatggcaagcta

SEQ ID NO: 141936 - DNA, 25 bp, Artificial
  probe
  misc_feature (1)..(25): SEQ ID NO: 5551; WAN024D3G_at; Start 104; Stop 128
gctcaggaaccatgaaagtcagtac

SEQ ID NO: 141937 - DNA, 25 bp, Artificial
  probe
  misc_feature (1)..(25): SEQ ID NO: 5551; WAN024D3G_at; Start 106; Stop 130
tcaggaaccatgaaagtcagtactt

SEQ ID NO: 141938 - DNA, 25 bp, Artificial
  probe
  misc_feature (1)..(25): SEQ ID NO: 5551; WAN024D3G_at; Start 126; Stop 150
tacttgggtttatgacaagggagaa

SEQ ID NO: 141939 - DNA, 25 bp, Artificial
  probe
  misc_feature (1)..(25): SEQ ID NO: 5551; WAN024D3G_at; Start 25; Stop 49
atgtactacagcgtagatgatgtag

SEQ ID NO: 141940 - DNA, 25 bp, Artificial
  probe
  misc_feature (1)..(25): SEQ ID NO: 5551; WAN024D3G_at; Start 22; Stop 46
tctatgtactacagcgtagatgatg

SEQ ID NO: 141941 - DNA, 25 bp, Artificial
  probe
  misc_feature (1)..(25): SEQ ID NO: 5551; WAN024D3G_at; Start 109; Stop 133
ggaaccatgaaagtcagtacttggg

SEQ ID NO: 141942 - DNA, 25 bp, Artificial
  probe
  misc_feature (1)..(25): SEQ ID NO: 5551; WAN024D3G_at; Start 113; Stop 137
ccatgaaagtcagtacttgggttta

SEQ ID NO: 141943 - DNA, 25 bp, Artificial
  probe
  misc_feature (1)..(25): SEQ ID NO: 5551; WAN024D3G_at; Start 167; Stop 191
cttctggttccatgattgcgaatga

SEQ ID NO: 141944 - DNA, 25 bp, Artificial
  probe
  misc_feature (1)..(25): SEQ ID NO: 5551; WAN024D3G_at; Start 117; Stop 141
gaaagtcagtacttgggtttatgac

SEQ ID NO: 141945 - DNA, 25 bp, Artificial
  probe
  misc_feature (1)..(25): SEQ ID NO: 5551; WAN024D3G_at; Start 123; Stop 147
cagtacttgggtttatgacaaggga

SEQ ID NO: 141946 - DNA, 25 bp, Artificial
  probe
  misc_feature (1)..(25): SEQ ID NO: 5551; WAN024D3G_at; Start 90; Stop 114
ttttgcctttaattgctcaggaacc

SEQ ID NO: 141947 - DNA, 25 bp, Artificial
  probe
  misc_feature (1)..(25): SEQ ID NO: 5551; WAN024D3G_at; Start 180; Stop 204
gattgcgaatgattgggtcaaagac

SEQ ID NO: 141948 - DNA, 25 bp, Artificial
  probe
  misc_feature (1)..(25): SEQ ID NO: 5551; WAN024D3G_at; Start 141; Stop 165
caagggagaatggtattatgtaagt

SEQ ID NO: 141949 - DNA, 25 bp, Artificial
  probe
  misc_feature (1)..(25): SEQ ID NO: 5551; WAN024D3G_at; Start 157; Stop 181
tatgtaagttcttctggttccatga

SEQ ID NO: 141950 - DNA, 25 bp, Artificial
  probe
  misc_feature (1)..(25): SEQ ID NO: 5551; WAN024D3G_at; Start 190; Stop 214
gattgggtcaaagacaatggcaagc

SEQ ID NO: 141951 - DNA, 25 bp, Artificial
  probe
  misc_feature (1)..(25): SEQ ID NO: 5551; WAN024D3G_at; Start 3; Stop 27
ggcttttacgtttgatgtatctatg

SEQ ID NO: 141952 - DNA, 25 bp, Artificial
  probe
  misc_feature (1)..(25): SEQ ID NO: 5551; WAN024D3G_at; Start 154; Stop 178
tattatgtaagttcttctggttcca

SEQ ID NO: 141953 - DNA, 25 bp, Artificial
  probe
  misc_feature (1)..(25): SEQ ID NO: 1253; WAN024D3H_at; Start 97; Stop 121
cgtaagctcatgaagactcaggaag

SEQ ID NO: 141954 - DNA, 25 bp, Artificial
  probe
  misc_feature (1)..(25): SEQ ID NO: 1253; WAN024D3H_at; Start 132; Stop 156
gattgtgcgagaccatttttccgac

SEQ ID NO: 141955 - DNA, 25 bp, Artificial
  probe
  misc_feature (1)..(25): SEQ ID NO: 1253; WAN024D3H_at; Start 108; Stop 132
gaagactcaggaagagttgacagag

SEQ ID NO: 141956 - DNA, 25 bp, Artificial
  probe
  misc_feature (1)..(25): SEQ ID NO: 1253; WAN024D3H_at; Start 251; Stop 275
cctttgtctatgaaaatgaagacct

SEQ ID NO: 141957 - DNA, 25 bp, Artificial
  probe
  misc_feature (1)..(25): SEQ ID NO: 1253; WAN024D3H_at; Start 181; Stop 205
gttcaagtttacgaaagcagtctgg

SEQ ID NO: 141958 - DNA, 25 bp, Artificial
  probe
  misc_feature (1)..(25): SEQ ID NO: 1253; WAN024D3H_at; Start 273; Stop 297
cctagtctatgaggaggaagtctta

SEQ ID NO: 141959 - DNA, 25 bp, Artificial
  probe
  misc_feature (1)..(25): SEQ ID NO: 1253; WAN024D3H_at; Start 94; Stop 118
gaccgtaagctcatgaagactcagg

SEQ ID NO: 141960 - DNA, 25 bp, Artificial
  probe
  misc_feature (1)..(25): SEQ ID NO: 1253; WAN024D3H_at; Start 184; Stop 208
caagtttacgaaagcagtctggaga

SEQ ID NO: 141961 - DNA, 25 bp, Artificial
  probe
  misc_feature (1)..(25): SEQ ID NO: 1253; WAN024D3H_at; Start 81; Stop 105
aaaagttgcagatgaccgtaagctc

SEQ ID NO: 141962 - DNA, 25 bp, Artificial
  probe
  misc_feature (1)..(25): SEQ ID NO: 1253; WAN024D3H_at; Start 215; Stop 239
ttggtggcgtcatttttgaggatgg

SEQ ID NO: 141963 - DNA, 25 bp, Artificial
  probe
  misc_feature (1)..(25): SEQ ID NO: 1253; WAN024D3H_at; Start 6; Stop 30
tggtatgaaagctaaaaaaatgtgg

SEQ ID NO: 141964 - DNA, 25 bp, Artificial
  probe
  misc_feature (1)..(25): SEQ ID NO: 1253; WAN024D3H_at; Start 208; Stop 232
agcttggttggtggcgtcatttttg

SEQ ID NO: 141965 - DNA, 25 bp, Artificial
  probe
  misc_feature (1)..(25): SEQ ID NO: 1253; WAN024D3H_at; Start 267; Stop 291
tgaagacctagtctatgaggaggaa

SEQ ID NO: 141966 - DNA, 25 bp, Artificial
  probe
  misc_feature (1)..(25): SEQ ID NO: 1253; WAN024D3H_at; Start 188; Stop 212
tttacgaaagcagtctggagagctt

SEQ ID NO: 141967 - DNA, 25 bp, Artificial
  probe
  misc_feature (1)..(25): SEQ ID NO: 1253; WAN024D3H_at; Start 241; Stop 265
cgtcattatacctttgtctatgaaa

SEQ ID NO: 141968 - DNA, 25 bp, Artificial
  probe
  misc_feature (1)..(25): SEQ ID NO: 1253; WAN024D3H_at; Start 135; Stop 159
tgtgcgagaccatttttccgacatg

SEQ ID NO: 141969 - DNA, 25 bp, Artificial
  probe
  misc_feature (1)..(25): SEQ ID NO: 1253; WAN024D3H_at; Start 41; Stop 65
tggctctgctaggtatcggaagcct

SEQ ID NO: 141970 - DNA, 25 bp, Artificial
  probe
  misc_feature (1)..(25): SEQ ID NO: 1253; WAN024D3H_at; Start 77; Stop 101
cgaaaaaagttgcagatgaccgtaa

SEQ ID NO: 141971 - DNA, 25 bp, Artificial
  probe
  misc_feature (1)..(25): SEQ ID NO: 1253; WAN024D3H_at; Start 178; Stop 202
tatgttcaagtttacgaaagcagtc

SEQ ID NO: 141972 - DNA, 25 bp, Artificial
  probe
  misc_feature (1)..(25): SEQ ID NO: 1253; WAN024D3H_at; Start 104; Stop 128
tcatgaagactcaggaagagttgac

SEQ ID NO: 141973 - DNA, 25 bp, Artificial
  probe
  misc_feature (1)..(25): SEQ ID NO: 1253; WAN024D3H_at; Start 192; Stop 216
cgaaagcagtctggagagcttggtt

SEQ ID NO: 141974 - DNA, 25 bp, Artificial
  probe
  misc_feature (1)..(25): SEQ ID NO: 1253; WAN024D3H_at; Start 44; Stop 68
ctctgctaggtatcggaagccttgc

SEQ ID NO: 141975 - DNA, 25 bp, Artificial
  probe
  misc_feature (1)..(25): SEQ ID NO: 1253; WAN024D3H_at; Start 137; Stop 161
tgcgagaccatttttccgacatggg

SEQ ID NO: 141976 - DNA, 25 bp, Artificial
  probe
  misc_feature (1)..(25): SEQ ID NO: 1253; WAN024D3H_at; Start 99; Stop 123
taagctcatgaagactcaggaagag

SEQ ID NO: 141977 - DNA, 25 bp, Artificial
  probe
  misc_feature (1)..(25): SEQ ID NO: 1253; WAN024D3H_at; Start 206; Stop 230
agagcttggttggtggcgtcatttt

SEQ ID NO: 141978 - DNA, 25 bp, Artificial
  probe
  misc_feature (1)..(25): SEQ ID NO: 1253; WAN024D3H_at; Start 128; Stop 152
cagagattgtgcgagaccatttttc

SEQ ID NO: 141979 - DNA, 25 bp, Artificial
  probe
  misc_feature (1)..(25): SEQ ID NO: 1253; WAN024D3H_at; Start 121; Stop 145
gagttgacagagattgtgcgagacc

SEQ ID NO: 141980 - DNA, 25 bp, Artificial
  probe
  misc_feature (1)..(25): SEQ ID NO: 1253; WAN024D3H_at; Start 271; Stop 295
gacctagtctatgaggaggaagtct

SEQ ID NO: 141981 - DNA, 25 bp, Artificial
  probe
  misc_feature (1)..(25): SEQ ID NO: 1253; WAN024D3H_at; Start 262; Stop 286
gaaaatgaagacctagtctatgagg

SEQ ID NO: 141982 - DNA, 25 bp, Artificial
  probe
  misc_feature (1)..(25): SEQ ID NO: 1253; WAN024D3H_at; Start 151; Stop 175
tccgacatgggggaaattgcgaccc

SEQ ID NO: 141983 - DNA, 25 bp, Artificial
  probe
  misc_feature (1)..(25): SEQ ID NO: 1253; WAN024D3H_at; Start 83; Stop 107
aagttgcagatgaccgtaagctcat

SEQ ID NO: 141984 - DNA, 25 bp, Artificial
  probe
  misc_feature (1)..(25): SEQ ID NO: 1253; WAN024D3H_at; Start 14; Stop 38
aagctaaaaaaatgtggatggcagg

SEQ ID NO: 141985 - DNA, 25 bp, Artificial
  probe
  misc_feature (1)..(25): SEQ ID NO: 1253; WAN024D3H_at; Start 115; Stop 139
caggaagagttgacagagattgtgc

SEQ ID NO: 141986 - DNA, 25 bp, Artificial
  probe
  misc_feature (1)..(25): SEQ ID NO: 1253; WAN024D3H_at; Start 125; Stop 149
tgacagagattgtgcgagaccattt

SEQ ID NO: 141987 - DNA, 25 bp, Artificial
  probe
  misc_feature (1)..(25): SEQ ID NO: 5280; WAN024D3I_at; Start 203; Stop 227
gtttatccatgtctgtatctctcta

SEQ ID NO: 141988 - DNA, 25 bp, Artificial
  probe
  misc_feature (1)..(25): SEQ ID NO: 5280; WAN024D3I_at; Start 17; Stop 41
tcttggaacagtctttgtgctcaat

SEQ ID NO: 141989 - DNA, 25 bp, Artificial
  probe
  misc_feature (1)..(25): SEQ ID NO: 5280; WAN024D3I_at; Start 149; Stop 173
gggttgattcaacaaaattctggcg

SEQ ID NO: 141990 - DNA, 25 bp, Artificial
  probe
  misc_feature (1)..(25): SEQ ID NO: 5280; WAN024D3I_at; Start 162; Stop 186
aaaattctggcgcatggcatccagc

SEQ ID NO: 141991 - DNA, 25 bp, Artificial
  probe
  misc_feature (1)..(25): SEQ ID NO: 5280; WAN024D3I_at; Start 101; Stop 125
ttttgctcatatgcgcttggtctag

SEQ ID NO: 141992 - DNA, 25 bp, Artificial
  probe
  misc_feature (1)..(25): SEQ ID NO: 5280; WAN024D3I_at; Start 21; Stop 45
ggaacagtctttgtgctcaattttt

SEQ ID NO: 141993 - DNA, 25 bp, Artificial
  probe
  misc_feature (1)..(25): SEQ ID NO: 5280; WAN024D3I_at; Start 6; Stop 30
tttttggtcaatcttggaacagtct

SEQ ID NO: 141994 - DNA, 25 bp, Artificial
  probe
  misc_feature (1)..(25): SEQ ID NO: 5280; WAN024D3I_at; Start 167; Stop 191
tctggcgcatggcatccagcttttc

SEQ ID NO: 141995 - DNA, 25 bp, Artificial
  probe
  misc_feature (1)..(25): SEQ ID NO: 5280; WAN024D3I_at; Start 32; Stop 56
tgtgctcaatttttctctggcaccg

SEQ ID NO: 141996 - DNA, 25 bp, Artificial
  probe
  misc_feature (1)..(25): SEQ ID NO: 5280; WAN024D3I_at; Start 156; Stop 180
ttcaacaaaattctggcgcatggca

SEQ ID NO: 141997 - DNA, 25 bp, Artificial
  probe
  misc_feature (1)..(25): SEQ ID NO: 5280; WAN024D3I_at; Start 164; Stop 188
aattctggcgcatggcatccagctt

SEQ ID NO: 141998 - DNA, 25 bp, Artificial
  probe
  misc_feature (1)..(25): SEQ ID NO: 5280; WAN024D3I_at; Start 28; Stop 52
tctttgtgctcaatttttctctggc

SEQ ID NO: 141999 - DNA, 25 bp, Artificial
  probe
  misc_feature (1)..(25): SEQ ID NO: 5280; WAN024D3I_at; Start 55; Stop 79
cgttccatttcaagagcaactaatt

SEQ ID NO: 142000 - DNA, 25 bp, Artificial
  probe
  misc_feature (1)..(25): SEQ ID NO: 5280; WAN024D3I_at; Start 172; Stop 196
cgcatggcatccagcttttcgtgta

SEQ ID NO: 142001 - DNA, 25 bp, Artificial
  probe
  misc_feature (1)..(25): SEQ ID NO: 5280; WAN024D3I_at; Start 105; Stop 129
gctcatatgcgcttggtctagcacg

SEQ ID NO: 142002 - DNA, 25 bp, Artificial
  probe
  misc_feature (1)..(25): SEQ ID NO: 5280; WAN024D3I_at; Start 139; Stop 163
cgttcgtggtgggttgattcaacaa

SEQ ID NO: 142003 - DNA, 25 bp, Artificial
  probe
  misc_feature (1)..(25): SEQ ID NO: 5280; WAN024D3I_at; Start 198; Stop 222
gtattgtttatccatgtctgtatct

SEQ ID NO: 142004 - DNA, 25 bp, Artificial
  probe
  misc_feature (1)..(25): SEQ ID NO: 5280; WAN024D3I_at; Start 109; Stop 133
atatgcgcttggtctagcacgccca

SEQ ID NO: 142005 - DNA, 25 bp, Artificial
  probe
  misc_feature (1)..(25): SEQ ID NO: 5280; WAN024D3I_at; Start 11; Stop 35
ggtcaatcttggaacagtctttgtg

SEQ ID NO: 142006 - DNA, 25 bp, Artificial
  probe
  misc_feature (1)..(25): SEQ ID NO: 5280; WAN024D3I_at; Start 3; Stop 27
gattttttggtcaatcttggaacag

SEQ ID NO: 142007 - DNA, 25 bp, Artificial
  probe
  misc_feature (1)..(25): SEQ ID NO: 5280; WAN024D3I_at; Start 47; Stop 71
tctggcaccgttccatttcaagagc

SEQ ID NO: 142008 - DNA, 25 bp, Artificial
  probe
  misc_feature (1)..(25): SEQ ID NO: 5280; WAN024D3I_at; Start 151; Stop 175
gttgattcaacaaaattctggcgca

SEQ ID NO: 142009 - DNA, 25 bp, Artificial
  probe
  misc_feature (1)..(25): SEQ ID NO: 5280; WAN024D3I_at; Start 9; Stop 33
ttggtcaatcttggaacagtctttg

SEQ ID NO: 142010 - DNA, 25 bp, Artificial
  probe
  misc_feature (1)..(25): SEQ ID NO: 5280; WAN024D3I_at; Start 107; Stop 131
tcatatgcgcttggtctagcacgcc

SEQ ID NO: 142011 - DNA, 25 bp, Artificial
  probe
  misc_feature (1)..(25): SEQ ID NO: 5280; WAN024D3I_at; Start 154; Stop 178
gattcaacaaaattctggcgcatgg

SEQ ID NO: 142012 - DNA, 25 bp, Artificial
  probe
  misc_feature (1)..(25): SEQ ID NO: 5280; WAN024D3I_at; Start 158; Stop 182
caacaaaattctggcgcatggcatc

SEQ ID NO: 142013 - DNA, 25 bp, Artificial
  probe
  misc_feature (1)..(25): SEQ ID NO: 5280; WAN024D3I_at; Start 92; Stop 116
taagcatttttttgctcatatgcgc

SEQ ID NO: 142014 - DNA, 25 bp, Artificial
  probe
  misc_feature (1)..(25): SEQ ID NO: 5280; WAN024D3I_at; Start 50; Stop 74
ggcaccgttccatttcaagagcaac

SEQ ID NO: 142015 - DNA, 25 bp, Artificial
  probe
  misc_feature (1)..(25): SEQ ID NO: 5280; WAN024D3I_at; Start 14; Stop 38
caatcttggaacagtctttgtgctc

SEQ ID NO: 142016 - DNA, 25 bp, Artificial
  probe
  misc_feature (1)..(25): SEQ ID NO: 5280; WAN024D3I_at; Start 170; Stop 194
ggcgcatggcatccagcttttcgtg

SEQ ID NO: 142017 - DNA, 25 bp, Artificial
  probe
  misc_feature (1)..(25): SEQ ID NO: 5280; WAN024D3I_at; Start 38; Stop 62
caatttttctctggcaccgttccat

SEQ ID NO: 142018 - DNA, 25 bp, Artificial
  probe
  misc_feature (1)..(25): SEQ ID NO: 5280; WAN024D3I_at; Start 52; Stop 76
caccgttccatttcaagagcaacta

SEQ ID NO: 142019 - DNA, 25 bp, Artificial
  probe
  misc_feature (1)..(25): SEQ ID NO: 5280; WAN024D3I_at; Start 60; Stop 84
catttcaagagcaactaattttttc

SEQ ID NO: 142020 - DNA, 25 bp, Artificial
  probe
  misc_feature (1)..(25): SEQ ID NO: 5280; WAN024D3I_at; Start 35; Stop 59
gctcaatttttctctggcaccgttc

SEQ ID NO: 142021 - DNA, 25 bp, Artificial
  probe
  misc_feature (1)..(25): SEQ ID NO: 5342; WAN024D3J_at; Start 79; Stop 103
gagtccttcgcccttaagaatattg

SEQ ID NO: 142022 - DNA, 25 bp, Artificial
  probe
  misc_feature (1)..(25): SEQ ID NO: 5342; WAN024D3J_at; Start 169; Stop 193
aagggctgccccaacagccaagcaa

SEQ ID NO: 142023 - DNA, 25 bp, Artificial
  probe
  misc_feature (1)..(25): SEQ ID NO: 5342; WAN024D3J_at; Start 154; Stop 178
caagtccgtaggaccaagggctgcc

SEQ ID NO: 142024 - DNA, 25 bp, Artificial
  probe
  misc_feature (1)..(25): SEQ ID NO: 5342; WAN024D3J_at; Start 199; Stop 223
caagggaaggctgaaccaaagaaga

SEQ ID NO: 142025 - DNA, 25 bp, Artificial
  probe
  misc_feature (1)..(25): SEQ ID NO: 5342; WAN024D3J_at; Start 278; Stop 302
taaacaatgattcgccagtgtttta

SEQ ID NO: 142026 - DNA, 25 bp, Artificial
  probe
  misc_feature (1)..(25): SEQ ID NO: 5342; WAN024D3J_at; Start 194; Stop 218
gctgccaagggaaggctgaaccaaa

SEQ ID NO: 142027 - DNA, 25 bp, Artificial
  probe
  misc_feature (1)..(25): SEQ ID NO: 5342; WAN024D3J_at; Start 83; Stop 107
ccttcgcccttaagaatattggaca

SEQ ID NO: 142028 - DNA, 25 bp, Artificial
  probe
  misc_feature (1)..(25): SEQ ID NO: 5342; WAN024D3J_at; Start 122; Stop 146
ctaaaacgctccgaaagagaggcaa

SEQ ID NO: 142029 - DNA, 25 bp, Artificial
  probe
  misc_feature (1)..(25): SEQ ID NO: 5342; WAN024D3J_at; Start 204; Stop 228
gaaggctgaaccaaagaagatgggc

SEQ ID NO: 142030 - DNA, 25 bp, Artificial
  probe
  misc_feature (1)..(25): SEQ ID NO: 5342; WAN024D3J_at; Start 96; Stop 120
gaatattggacacgcgcttaggaaa

SEQ ID NO: 142031 - DNA, 25 bp, Artificial
  probe
  misc_feature (1)..(25): SEQ ID NO: 5342; WAN024D3J_at; Start 34; Stop 58
tgtcaaagctacctgaaaagccacc

SEQ ID NO: 142032 - DNA, 25 bp, Artificial
  probe
  misc_feature (1)..(25): SEQ ID NO: 5342; WAN024D3J_at; Start 102; Stop 126
tggacacgcgcttaggaaagctaaa

SEQ ID NO: 142033 - DNA, 25 bp, Artificial
  probe
  misc_feature (1)..(25): SEQ ID NO: 5342; WAN024D3J_at; Start 151; Stop 175
caccaagtccgtaggaccaagggct

SEQ ID NO: 142034 - DNA, 25 bp, Artificial
  probe
  misc_feature (1)..(25): SEQ ID NO: 5342; WAN024D3J_at; Start 139; Stop 163
agaggcaaaggccaccaagtccgta

SEQ ID NO: 142035 - DNA, 25 bp, Artificial
  probe
  misc_feature (1)..(25): SEQ ID NO: 5342; WAN024D3J_at; Start 273; Stop 297
tgagataaacaatgattcgccagtg

SEQ ID NO: 142036 - DNA, 25 bp, Artificial
  probe
  misc_feature (1)..(25): SEQ ID NO: 5342; WAN024D3J_at; Start 229; Stop 253
caagccacccaaactcagggtcgag

SEQ ID NO: 142037 - DNA, 25 bp, Artificial
  probe
  misc_feature (1)..(25): SEQ ID NO: 5342; WAN024D3J_at; Start 129; Stop 153
gctccgaaagagaggcaaaggccac

SEQ ID NO: 142038 - DNA, 25 bp, Artificial
  probe
  misc_feature (1)..(25): SEQ ID NO: 5342; WAN024D3J_at; Start 1; Stop 25
ttgccccagagaaaaagctccagtt

SEQ ID NO: 142039 - DNA, 25 bp, Artificial
  probe
  misc_feature (1)..(25): SEQ ID NO: 5342; WAN024D3J_at; Start 217; Stop 241
aagaagatgggccaagccacccaaa

SEQ ID NO: 142040 - DNA, 25 bp, Artificial
  probe
  misc_feature (1)..(25): SEQ ID NO: 5342; WAN024D3J_at; Start 134; Stop 158
gaaagagaggcaaaggccaccaagt

SEQ ID NO: 142041 - DNA, 25 bp, Artificial
  probe
  misc_feature (1)..(25): SEQ ID NO: 5342; WAN024D3J_at; Start 68; Stop 92
gcatcattcaagagtccttcgccct

SEQ ID NO: 142042 - DNA, 25 bp, Artificial
  probe
  misc_feature (1)..(25): SEQ ID NO: 5342; WAN024D3J_at; Start 244; Stop 268
cagggtcgagataaaaatcactgga

SEQ ID NO: 142043 - DNA, 25 bp, Artificial
  probe
  misc_feature (1)..(25): SEQ ID NO: 5342; WAN024D3J_at; Start 47; Stop 71
tgaaaagccaccaaaccagaagcat

SEQ ID NO: 142044 - DNA, 25 bp, Artificial
  probe
  misc_feature (1)..(25): SEQ ID NO: 5342; WAN024D3J_at; Start 25; Stop 49
tgtccaagctgtcaaagctacctga

SEQ ID NO: 142045 - DNA, 25 bp, Artificial
  probe
  misc_feature (1)..(25): SEQ ID NO: 5342; WAN024D3J_at; Start 19; Stop 43
tccagttgtccaagctgtcaaagct

SEQ ID NO: 142046 - DNA, 25 bp, Artificial
  probe
  misc_feature (1)..(25): SEQ ID NO: 5342; WAN024D3J_at; Start 258; Stop 282
aaatcactggaaatatgagataaac

SEQ ID NO: 142047 - DNA, 25 bp, Artificial
  probe
  misc_feature (1)..(25): SEQ ID NO: 5342; WAN024D3J_at; Start 180; Stop 204
caacagccaagcaagctgccaaggg

SEQ ID NO: 142048 - DNA, 25 bp, Artificial
  probe
  misc_feature (1)..(25): SEQ ID NO: 5342; WAN024D3J_at; Start 111; Stop 135
gcttaggaaagctaaaacgctccga

SEQ ID NO: 142049 - DNA, 25 bp, Artificial
  probe
  misc_feature (1)..(25): SEQ ID NO: 5342; WAN024D3J_at; Start 57; Stop 81
ccaaaccagaagcatcattcaagag

SEQ ID NO: 142050 - DNA, 25 bp, Artificial
  probe
  misc_feature (1)..(25): SEQ ID NO: 5342; WAN024D3J_at; Start 211; Stop 235
gaaccaaagaagatgggccaagcca

SEQ ID NO: 142051 - DNA, 25 bp, Artificial
  probe
  misc_feature (1)..(25): SEQ ID NO: 5342; WAN024D3J_at; Start 11; Stop 35
gaaaaagctccagttgtccaagctg

SEQ ID NO: 142052 - DNA, 25 bp, Artificial
  probe
  misc_feature (1)..(25): SEQ ID NO: 5342; WAN024D3J_at; Start 185; Stop 209
gccaagcaagctgccaagggaaggc

SEQ ID NO: 142053 - DNA, 25 bp, Artificial
  probe
  misc_feature (1)..(25): SEQ ID NO: 5342; WAN024D3J_at; Start 238; Stop 262
caaactcagggtcgagataaaaatc

SEQ ID NO: 142054 - DNA, 25 bp, Artificial
  probe
  misc_feature (1)..(25): SEQ ID NO: 5342; WAN024D3J_at; Start 75; Stop 99
tcaagagtccttcgcccttaagaat

SEQ ID NO: 142055 - DNA, 25 bp, Artificial
  probe
  misc_feature (1)..(25): SEQ ID NO: 2310; WAN024D3K_at; Start 219; Stop 243
gaaggagatatttgaatcctgttgt

SEQ ID NO: 142056 - DNA, 25 bp, Artificial
  probe
  misc_feature (1)..(25): SEQ ID NO: 2310; WAN024D3K_at; Start 36; Stop 60
catgcgccagaattttgttgaatca

SEQ ID NO: 142057 - DNA, 25 bp, Artificial
  probe
  misc_feature (1)..(25): SEQ ID NO: 2310; WAN024D3K_at; Start 80; Stop 104
tgggcgtgctagaccaagcgcatat

SEQ ID NO: 142058 - DNA, 25 bp, Artificial
  probe
  misc_feature (1)..(25): SEQ ID NO: 2310; WAN024D3K_at; Start 154; Stop 178
gaacggtgccagagaaaaattgagc

SEQ ID NO: 142059 - DNA, 25 bp, Artificial
  probe
  misc_feature (1)..(25): SEQ ID NO: 2310; WAN024D3K_at; Start 89; Stop 113
tagaccaagcgcatatgagcaaaaa

SEQ ID NO: 142060 - DNA, 25 bp, Artificial
  probe
  misc_feature (1)..(25): SEQ ID NO: 2310; WAN024D3K_at; Start 24; Stop 48
aaagctggatgccatgcgccagaat

SEQ ID NO: 142061 - DNA, 25 bp, Artificial
  probe
  misc_feature (1)..(25): SEQ ID NO: 2310; WAN024D3K_at; Start 168; Stop 192
aaaaattgagcacaaagactgttcc

SEQ ID NO: 142062 - DNA, 25 bp, Artificial
  probe
  misc_feature (1)..(25): SEQ ID NO: 2310; WAN024D3K_at; Start 180; Stop 204
caaagactgttccaagattgaccaa

SEQ ID NO: 142063 - DNA, 25 bp, Artificial
  probe
  misc_feature (1)..(25): SEQ ID NO: 2310; WAN024D3K_at; Start 39; Stop 63
gcgccagaattttgttgaatcaacc

SEQ ID NO: 142064 - DNA, 25 bp, Artificial
  probe
  misc_feature (1)..(25): SEQ ID NO: 2310; WAN024D3K_at; Start 157; Stop 181
cggtgccagagaaaaattgagcaca

SEQ ID NO: 142065 - DNA, 25 bp, Artificial
  probe
  misc_feature (1)..(25): SEQ ID NO: 2310; WAN024D3K_at; Start 165; Stop 189
gagaaaaattgagcacaaagactgt

SEQ ID NO: 142066 - DNA, 25 bp, Artificial
  probe
  misc_feature (1)..(25): SEQ ID NO: 2310; WAN024D3K_at; Start 97; Stop 121
gcgcatatgagcaaaaaaatgctta

SEQ ID NO: 142067 - DNA, 25 bp, Artificial
  probe
  misc_feature (1)..(25): SEQ ID NO: 2310; WAN024D3K_at; Start 161; Stop 185
gccagagaaaaattgagcacaaaga

SEQ ID NO: 142068 - DNA, 25 bp, Artificial
  probe
  misc_feature (1)..(25): SEQ ID NO: 2310; WAN024D3K_at; Start 129; Stop 153
gaaaaaattagttgctcttgaaatg

SEQ ID NO: 142069 - DNA, 25 bp, Artificial
  probe
  misc_feature (1)..(25): SEQ ID NO: 2310; WAN024D3K_at; Start 27; Stop 51
gctggatgccatgcgccagaatttt

SEQ ID NO: 142070 - DNA, 25 bp, Artificial
  probe
  misc_feature (1)..(25): SEQ ID NO: 2310; WAN024D3K_at; Start 187; Stop 211
tgttccaagattgaccaaaaaatca

SEQ ID NO: 142071 - DNA, 25 bp, Artificial
  probe
  misc_feature (1)..(25): SEQ ID NO: 2310; WAN024D3K_at; Start 195; Stop 219
gattgaccaaaaaatcaaagagcag

SEQ ID NO: 142072 - DNA, 25 bp, Artificial
  probe
  misc_feature (1)..(25): SEQ ID NO: 2310; WAN024D3K_at; Start 19; Stop 43
cacgaaaagctggatgccatgcgcc

SEQ ID NO: 142073 - DNA, 25 bp, Artificial
  probe
  misc_feature (1)..(25): SEQ ID NO: 2310; WAN024D3K_at; Start 31; Stop 55
gatgccatgcgccagaattttgttg

SEQ ID NO: 142074 - DNA, 25 bp, Artificial
  probe
  misc_feature (1)..(25): SEQ ID NO: 2310; WAN024D3K_at; Start 175; Stop 199
gagcacaaagactgttccaagattg

SEQ ID NO: 142075 - DNA, 25 bp, Artificial
  probe
  misc_feature (1)..(25): SEQ ID NO: 2310; WAN024D3K_at; Start 184; Stop 208
gactgttccaagattgaccaaaaaa

SEQ ID NO: 142076 - DNA, 25 bp, Artificial
  probe
  misc_feature (1)..(25): SEQ ID NO: 2310; WAN024D3K_at; Start 144; Stop 168
tcttgaaatggaacggtgccagaga

SEQ ID NO: 142077 - DNA, 25 bp, Artificial
  probe
  misc_feature (1)..(25): SEQ ID NO: 2310; WAN024D3K_at; Start 214; Stop 238
gagcagaaggagatatttgaatcct

SEQ ID NO: 142078 - DNA, 25 bp, Artificial
  probe
  misc_feature (1)..(25): SEQ ID NO: 2310; WAN024D3K_at; Start 33; Stop 57
tgccatgcgccagaattttgttgaa

SEQ ID NO: 142079 - DNA, 25 bp, Artificial
  probe
  misc_feature (1)..(25): SEQ ID NO: 2310; WAN024D3K_at; Start 115; Stop 139
atgcttaaaatcaagaaaaaattag

SEQ ID NO: 142080 - DNA, 25 bp, Artificial
  probe
  misc_feature (1)..(25): SEQ ID NO: 2310; WAN024D3K_at; Start 22; Stop 46
gaaaagctggatgccatgcgccaga

SEQ ID NO: 142081 - DNA, 25 bp, Artificial
  probe
  misc_feature (1)..(25): SEQ ID NO: 2310; WAN024D3K_at; Start 82; Stop 106
ggcgtgctagaccaagcgcatatga

SEQ ID NO: 142082 - DNA, 25 bp, Artificial
  probe
  misc_feature (1)..(25): SEQ ID NO: 2310; WAN024D3K_at; Start 17; Stop 41
tacacgaaaagctggatgccatgcg

SEQ ID NO: 142083 - DNA, 25 bp, Artificial
  probe
  misc_feature (1)..(25): SEQ ID NO: 2310; WAN024D3K_at; Start 207; Stop 231
aatcaaagagcagaaggagatattt

SEQ ID NO: 142084 - DNA, 25 bp, Artificial
  probe
  misc_feature (1)..(25): SEQ ID NO: 2310; WAN024D3K_at; Start 84; Stop 108
cgtgctagaccaagcgcatatgagc

SEQ ID NO: 142085 - DNA, 25 bp, Artificial
  probe
  misc_feature (1)..(25): SEQ ID NO: 2310; WAN024D3K_at; Start 133; Stop 157
aaattagttgctcttgaaatggaac

SEQ ID NO: 142086 - DNA, 25 bp, Artificial
  probe
  misc_feature (1)..(25): SEQ ID NO: 2310; WAN024D3K_at; Start 171; Stop 195
aattgagcacaaagactgttccaag

SEQ ID NO: 142087 - DNA, 25 bp, Artificial
  probe
  misc_feature (1)..(25): SEQ ID NO: 2310; WAN024D3K_at; Start 178; Stop 202
cacaaagactgttccaagattgacc

SEQ ID NO: 142088 - DNA, 25 bp, Artificial
  probe
  misc_feature (1)..(25): SEQ ID NO: 2310; WAN024D3K_at; Start 148; Stop 172
gaaatggaacggtgccagagaaaaa

SEQ ID NO: 142089 - DNA, 25 bp, Artificial
  probe
  misc_feature (1)..(25): SEQ ID NO: 4997; WAN024D3L_at; Start 1871; Stop 1895
gaacgggttatcaatcgtgtcaaac

SEQ ID NO: 142090 - DNA, 25 bp, Artificial
  probe
  misc_feature (1)..(25): SEQ ID NO: 4997; WAN024D3L_at; Start 846; Stop 870
ccgagacggtctggcatacagtgac

SEQ ID NO: 142091 - DNA, 25 bp, Artificial
  probe
  misc_feature (1)..(25): SEQ ID NO: 4997; WAN024D3L_at; Start 1569; Stop 1593
gaatcaatcgtaaacttgcctcaag

SEQ ID NO: 142092 - DNA, 25 bp, Artificial
  probe
  misc_feature (1)..(25): SEQ ID NO: 4997; WAN024D3L_at; Start 1529; Stop 1553
taccgagtttaccaacgttatctga

SEQ ID NO: 142093 - DNA, 25 bp, Artificial
  probe
  misc_feature (1)..(25): SEQ ID NO: 4997; WAN024D3L_at; Start 1117; Stop 1141
taagggaacggtgtcgattgctacg

SEQ ID NO: 142094 - DNA, 25 bp, Artificial
  probe
  misc_feature (1)..(25): SEQ ID NO: 4997; WAN024D3L_at; Start 259; Stop 283
tacggctattttaaaacactggcga

SEQ ID NO: 142095 - DNA, 25 bp, Artificial
  probe
  misc_feature (1)..(25): SEQ ID NO: 4997; WAN024D3L_at; Start 225; Stop 249
ccttgcttttccgagaggctgaaga

SEQ ID NO: 142096 - DNA, 25 bp, Artificial
  probe
  misc_feature (1)..(25): SEQ ID NO: 4997; WAN024D3L_at; Start 1051; Stop 1075
ccgacgcctcaagaaaaagctaaat

SEQ ID NO: 142097 - DNA, 25 bp, Artificial
  probe
  misc_feature (1)..(25): SEQ ID NO: 4997; WAN024D3L_at; Start 804; Stop 828
tcaagaaaatcacgctcctcgaagc

SEQ ID NO: 142098 - DNA, 25 bp, Artificial
  probe
  misc_feature (1)..(25): SEQ ID NO: 4997; WAN024D3L_at; Start 1359; Stop 1383
ccctctatgcggctattgacaatta

SEQ ID NO: 142099 - DNA, 25 bp, Artificial
  probe
  misc_feature (1)..(25): SEQ ID NO: 4997; WAN024D3L_at; Start 1409; Stop 1433
ttaagccaagaaaaccaggatgatc

SEQ ID NO: 142100 - DNA, 25 bp, Artificial
  probe
  misc_feature (1)..(25): SEQ ID NO: 4997; WAN024D3L_at; Start 1698; Stop 1722
gccgtctccgtgctcttgattatga

SEQ ID NO: 142101 - DNA, 25 bp, Artificial
  probe
  misc_feature (1)..(25): SEQ ID NO: 4997; WAN024D3L_at; Start 1081; Stop 1105
tatgaaggacatgtttctcttgacc

SEQ ID NO: 142102 - DNA, 25 bp, Artificial
  probe
  misc_feature (1)..(25): SEQ ID NO: 4997; WAN024D3L_at; Start 1934; Stop 1958
gagcgcaagttgattttcgaatacg

SEQ ID NO: 142103 - DNA, 25 bp, Artificial
  probe
  misc_feature (1)..(25): SEQ ID NO: 4997; WAN024D3L_at; Start 16; Stop 40
aaaaagattaaggaggacgtgcgtg

SEQ ID NO: 142104 - DNA, 25 bp, Artificial
  probe
  misc_feature (1)..(25): SEQ ID NO: 4997; WAN024D3L_at; Start 1773; Stop 1797
tggaaaacctgaagggagtctacag

SEQ ID NO: 142105 - DNA, 25 bp, Artificial
  probe
  misc_feature (1)..(25): SEQ ID NO: 4997; WAN024D3L_at; Start 531; Stop 555
ctttgacagcttggacaactggagc

SEQ ID NO: 142106 - DNA, 25 bp, Artificial
  probe
  misc_feature (1)..(25): SEQ ID NO: 4997; WAN024D3L_at; Start 354; Stop 378
tttggttcagccttcccttggcagc

SEQ ID NO: 142107 - DNA, 25 bp, Artificial
  probe
  misc_feature (1)..(25): SEQ ID NO: 4997; WAN024D3L_at; Start 324; Stop 348
ccctgagtttgggtggcttggccca

SEQ ID NO: 142108 - DNA, 25 bp, Artificial
  probe
  misc_feature (1)..(25): SEQ ID NO: 4997; WAN024D3L_at; Start 31; Stop 55
gacgtgcgtggaattactgatttac

SEQ ID NO: 142109 - DNA, 25 bp, Artificial
  probe
  misc_feature (1)..(25): SEQ ID NO: 4997; WAN024D3L_at; Start 1819; Stop 1843
gcaggagtctcgtcttcgagaaaca

SEQ ID NO: 142110 - DNA, 25 bp, Artificial
  probe
  misc_feature (1)..(25): SEQ ID NO: 4997; WAN024D3L_at; Start 469; Stop 493
caatattcttaagggcgaaggactc

SEQ ID NO: 142111 - DNA, 25 bp, Artificial
  probe
  misc_feature (1)..(25): SEQ ID NO: 4997; WAN024D3L_at; Start 1132; Stop 1156
gattgctacgattctcttgatacca

SEQ ID NO: 142112 - DNA, 25 bp, Artificial
  probe
  misc_feature (1)..(25): SEQ ID NO: 4997; WAN024D3L_at; Start 2030; Stop 2054
tccttgaaggaagctgccaataccc

SEQ ID NO: 142113 - DNA, 25 bp, Artificial
  probe
  misc_feature (1)..(25): SEQ ID NO: 4997; WAN024D3L_at; Start 617; Stop 641
ggatttttaacagccatgaccaacc

SEQ ID NO: 142114 - DNA, 25 bp, Artificial
  probe
  misc_feature (1)..(25): SEQ ID NO: 4997; WAN024D3L_at; Start 406; Stop 430
tcctacggacttggtggcctttgcc

SEQ ID NO: 142115 - DNA, 25 bp, Artificial
  probe
  misc_feature (1)..(25): SEQ ID NO: 4997; WAN024D3L_at; Start 1715; Stop 1739
gattatgaccaaattgcagagctct

SEQ ID NO: 142116 - DNA, 25 bp, Artificial
  probe
  misc_feature (1)..(25): SEQ ID NO: 4997; WAN024D3L_at; Start 862; Stop 886
tacagtgacctttatgctcaacggt

SEQ ID NO: 142117 - DNA, 25 bp, Artificial
  probe
  misc_feature (1)..(25): SEQ ID NO: 4997; WAN024D3L_at; Start 1034; Stop 1058
tattatgcctatagaacccgacgcc

SEQ ID NO: 142118 - DNA, 25 bp, Artificial
  probe
  misc_feature (1)..(25): SEQ ID NO: 4997; WAN024D3L_at; Start 448; Stop 472
tagctttcctaagcgcgtgtccaat

SEQ ID NO: 142119 - DNA, 25 bp, Artificial
  probe
  misc_feature (1)..(25): SEQ ID NO: 4997; WAN024D3L_at; Start 825; Stop 849
aagcccaagtggatacggtgaccga

SEQ ID NO: 142120 - DNA, 25 bp, Artificial
  probe
  misc_feature (1)..(25): SEQ ID NO: 4997; WAN024D3L_at; Start 306; Stop 330
cagtgatttttatctcgaccctgag

SEQ ID NO: 142121 - DNA, 25 bp, Artificial
  probe
  misc_feature (1)..(25): SEQ ID NO: 4997; WAN024D3L_at; Start 1918; Stop 1942
gagaggctattatctggagcgcaag

SEQ ID NO: 142122 - DNA, 25 bp, Artificial
  probe
  misc_feature (1)..(25): SEQ ID NO: 4997; WAN024D3L_at; Start 1855; Stop 1879
cagtggtgcctttgtcgaacgggtt

SEQ ID NO: 142123 - DNA, 25 bp, Artificial
  probe
  misc_feature (1)..(25): SEQ ID NO: 2040; WAN024D3M_at; Start 827; Stop 851
cggatatagcaagcgctcttagaga

SEQ ID NO: 142124 - DNA, 25 bp, Artificial
  probe
  misc_feature (1)..(25): SEQ ID NO: 2040; WAN024D3M_at; Start 839; Stop 863
gcgctcttagagaatatctttaact

SEQ ID NO: 142125 - DNA, 25 bp, Artificial
  probe
  misc_feature (1)..(25): SEQ ID NO: 2040; WAN024D3M_at; Start 722; Stop 746
tcaaggaacttgataagcaatatac

SEQ ID NO: 142126 - DNA, 25 bp, Artificial
  probe
  misc_feature (1)..(25): SEQ ID NO: 2040; WAN024D3M_at; Start 61; Stop 85
cacattttgagttataatagagcta

SEQ ID NO: 142127 - DNA, 25 bp, Artificial
  probe
  misc_feature (1)..(25): SEQ ID NO: 2040; WAN024D3M_at; Start 428; Stop 452
ccaatcaactttcaggagacaaggg

SEQ ID NO: 142128 - DNA, 25 bp, Artificial
  probe
  misc_feature (1)..(25): SEQ ID NO: 2040; WAN024D3M_at; Start 783; Stop 807
gcagcgtttaactcaagttttagca

SEQ ID NO: 142129 - DNA, 25 bp, Artificial
  probe
  misc_feature (1)..(25): SEQ ID NO: 2040; WAN024D3M_at; Start 561; Stop 585
taaactattgaaaaaatatgaggga

SEQ ID NO: 142130 - DNA, 25 bp, Artificial
  probe
  misc_feature (1)..(25): SEQ ID NO: 2040; WAN024D3M_at; Start 627; Stop 651
cttgactaacaagggcttctcttat

SEQ ID NO: 142131 - DNA, 25 bp, Artificial
  probe
  misc_feature (1)..(25): SEQ ID NO: 2040; WAN024D3M_at; Start 143; Stop 167
gcgacaaatgctatatcaccgaaga

SEQ ID NO: 142132 - DNA, 25 bp, Artificial
  probe
  misc_feature (1)..(25): SEQ ID NO: 2040; WAN024D3M_at; Start 763; Stop 787
tatgaaggatacgaactgaagcagc

SEQ ID NO: 142133 - DNA, 25 bp, Artificial
  probe
  misc_feature (1)..(25): SEQ ID NO: 2040; WAN024D3M_at; Start 18; Stop 42
tggtattttttgtttcactttcaga

SEQ ID NO: 142134 - DNA, 25 bp, Artificial
  probe
  misc_feature (1)..(25): SEQ ID NO: 2040; WAN024D3M_at; Start 222; Stop 246
gaaagagattcaagactttgctcaa

SEQ ID NO: 142135 - DNA, 25 bp, Artificial
  probe
  misc_feature (1)..(25): SEQ ID NO: 2040; WAN024D3M_at; Start 712; Stop 736
gaactcatcttcaaggaacttgata

SEQ ID NO: 142136 - DNA, 25 bp, Artificial
  probe
  misc_feature (1)..(25): SEQ ID NO: 2040; WAN024D3M_at; Start 47; Stop 71
tacccctatcttatcacattttgag

SEQ ID NO: 142137 - DNA, 25 bp, Artificial
  probe
  misc_feature (1)..(25): SEQ ID NO: 2040; WAN024D3M_at; Start 605; Stop 629
tgcaagataagattatccagaactt

SEQ ID NO: 142138 - DNA, 25 bp, Artificial
  probe
  misc_feature (1)..(25): SEQ ID NO: 2040; WAN024D3M_at; Start 575; Stop 599
aatatgagggaaaacttccagctcg

SEQ ID NO: 142139 - DNA, 25 bp, Artificial
  probe
  misc_feature (1)..(25): SEQ ID NO: 2040; WAN024D3M_at; Start 196; Stop 220
gataaggtgataagcgaagaggaat

SEQ ID NO: 142140 - DNA, 25 bp, Artificial
  probe
  misc_feature (1)..(25): SEQ ID NO: 2040; WAN024D3M_at; Start 235; Stop 259
gactttgctcaattttcttatggta

SEQ ID NO: 142141 - DNA, 25 bp, Artificial
  probe
  misc_feature (1)..(25): SEQ ID NO: 2040; WAN024D3M_at; Start 730; Stop 754
cttgataagcaatatactaagtatg

SEQ ID NO: 142142 - DNA, 25 bp, Artificial
  probe
  misc_feature (1)..(25): SEQ ID NO: 2040; WAN024D3M_at; Start 139; Stop 163
aatggcgacaaatgctatatcaccg

SEQ ID NO: 142143 - DNA, 25 bp, Artificial
  probe
  misc_feature (1)..(25): SEQ ID NO: 2040; WAN024D3M_at; Start 28; Stop 52
tgtttcactttcagattcatacccc

SEQ ID NO: 142144 - DNA, 25 bp, Artificial
  probe
  misc_feature (1)..(25): SEQ ID NO: 2040; WAN024D3M_at; Start 618; Stop 642
tatccagaacttgactaacaagggc

SEQ ID NO: 142145 - DNA, 25 bp, Artificial
  probe
  misc_feature (1)..(25): SEQ ID NO: 2040; WAN024D3M_at; Start 129; Stop 153
ggagcttgataatggcgacaaatgc

SEQ ID NO: 142146 - DNA, 25 bp, Artificial
  probe
  misc_feature (1)..(25): SEQ ID NO: 2040; WAN024D3M_at; Start 820; Stop 844
gatttttcggatatagcaagcgctc

SEQ ID NO: 142147 - DNA, 25 bp, Artificial
  probe
  misc_feature (1)..(25): SEQ ID NO: 2040; WAN024D3M_at; Start 811; Stop 835
aagggctacgatttttcggatatag

SEQ ID NO: 142148 - DNA, 25 bp, Artificial
  probe
  misc_feature (1)..(25): SEQ ID NO: 2040; WAN024D3M_at; Start 80; Stop 104
gagctatgaaaatcacaaaacttga

SEQ ID NO: 142149 - DNA, 25 bp, Artificial
  probe
  misc_feature (1)..(25): SEQ ID NO: 2040; WAN024D3M_at; Start 170; Stop 194
caattgttcgttttatgttatcgag

SEQ ID NO: 142150 - DNA, 25 bp, Artificial
  probe
  misc_feature (1)..(25): SEQ ID NO: 2040; WAN024D3M_at; Start 772; Stop 796
tacgaactgaagcagcgtttaactc

SEQ ID NO: 142151 - DNA, 25 bp, Artificial
  probe
  misc_feature (1)..(25): SEQ ID NO: 2040; WAN024D3M_at; Start 272; Stop 296
tctaccacttatcctttaaagcacg

SEQ ID NO: 142152 - DNA, 25 bp, Artificial
  probe
  misc_feature (1)..(25): SEQ ID NO: 2040; WAN024D3M_at; Start 124; Stop 148
ctgatggagcttgataatggcgaca

SEQ ID NO: 142153 - DNA, 25 bp, Artificial
  probe
  misc_feature (1)..(25): SEQ ID NO: 2040; WAN024D3M_at; Start 796; Stop 820
caagttttagcacgaaagggctacg

SEQ ID NO: 142154 - DNA, 25 bp, Artificial
  probe
  misc_feature (1)..(25): SEQ ID NO: 2040; WAN024D3M_at; Start 579; Stop 603
tgagggaaaacttccagctcgtgcc

SEQ ID NO: 142155 - DNA, 25 bp, Artificial
  probe
  misc_feature (1)..(25): SEQ ID NO: 2040; WAN024D3M_at; Start 188; Stop 212
tatcgagagataaggtgataagcga

SEQ ID NO: 142156 - DNA, 25 bp, Artificial
  probe
  misc_feature (1)..(25): SEQ ID NO: 2040; WAN024D3M_at; Start 206; Stop 230
taagcgaagaggaattgaaagagat

SEQ ID NO: 142157 - DNA, 25 bp, Artificial
  probe
  misc_feature (1)..(25): SEQ ID NO: 1239; WAN024D3N_at; Start 368; Stop 392
tgcaggaaccaaaatattacagagc

SEQ ID NO: 142158 - DNA, 25 bp, Artificial
  probe
  misc_feature (1)..(25): SEQ ID NO: 1239; WAN024D3N_at; Start 607; Stop 631
cgcgcgagaaagaccggacaggttc

SEQ ID NO: 142159 - DNA, 25 bp, Artificial
  probe
  misc_feature (1)..(25): SEQ ID NO: 1239; WAN024D3N_at; Start 1138; Stop 1162
gttgacccaccacgtacaggtctgg

SEQ ID NO: 142160 - DNA, 25 bp, Artificial
  probe
  misc_feature (1)..(25): SEQ ID NO: 1239; WAN024D3N_at; Start 1219; Stop 1243
tcttgtaatgtttcgaccttggctc

SEQ ID NO: 142161 - DNA, 25 bp, Artificial
  probe
  misc_feature (1)..(25): SEQ ID NO: 1239; WAN024D3N_at; Start 239; Stop 263
gaggctgccaaatcatgcacctgca

SEQ ID NO: 142162 - DNA, 25 bp, Artificial
  probe
  misc_feature (1)..(25): SEQ ID NO: 1239; WAN024D3N_at; Start 549; Stop 573
ccagattccaatcacggatgagaga

SEQ ID NO: 142163 - DNA, 25 bp, Artificial
  probe
  misc_feature (1)..(25): SEQ ID NO: 1239; WAN024D3N_at; Start 1092; Stop 1116
tattcctcgttggtacaaggaaggc

SEQ ID NO: 142164 - DNA, 25 bp, Artificial
  probe
  misc_feature (1)..(25): SEQ ID NO: 1239; WAN024D3N_at; Start 1014; Stop 1038
tattgaagatgccaagcgaaatgct

SEQ ID NO: 142165 - DNA, 25 bp, Artificial
  probe
  misc_feature (1)..(25): SEQ ID NO: 1239; WAN024D3N_at; Start 485; Stop 509
gcctggtacaagataaggaaaccca

SEQ ID NO: 142166 - DNA, 25 bp, Artificial
  probe
  misc_feature (1)..(25): SEQ ID NO: 1239; WAN024D3N_at; Start 1076; Stop 1100
gaacggcagaagagattattcctcg

SEQ ID NO: 142167 - DNA, 25 bp, Artificial
  probe
  misc_feature (1)..(25): SEQ ID NO: 1239; WAN024D3N_at; Start 1297; Stop 1321
gatatgttcccacatacagctcgaa

SEQ ID NO: 142168 - DNA, 25 bp, Artificial
  probe
  misc_feature (1)..(25): SEQ ID NO: 1239; WAN024D3N_at; Start 270; Stop 294
taagcagctggagttcaagacggac

SEQ ID NO: 142169 - DNA, 25 bp, Artificial
  probe
  misc_feature (1)..(25): SEQ ID NO: 1239; WAN024D3N_at; Start 288; Stop 312
gacggacttacttcatcaagcgctg

SEQ ID NO: 142170 - DNA, 25 bp, Artificial
  probe
  misc_feature (1)..(25): SEQ ID NO: 1239; WAN024D3N_at; Start 1233; Stop 1257
gaccttggctcgtgatttggtacgc

SEQ ID NO: 142171 - DNA, 25 bp, Artificial
  probe
  misc_feature (1)..(25): SEQ ID NO: 1239; WAN024D3N_at; Start 698; Stop 722
tcccagaagttgtgacagtagctgt

SEQ ID NO: 142172 - DNA, 25 bp, Artificial
  probe
  misc_feature (1)..(25): SEQ ID NO: 1239; WAN024D3N_at; Start 420; Stop 444
taaaaatcaggtcaaggcgggctta

SEQ ID NO: 142173 - DNA, 25 bp, Artificial
  probe
  misc_feature (1)..(25): SEQ ID NO: 1239; WAN024D3N_at; Start 98; Stop 122
taccaggagctctcaaaggcgaaga

SEQ ID NO: 142174 - DNA, 25 bp, Artificial
  probe
  misc_feature (1)..(25): SEQ ID NO: 1239; WAN024D3N_at; Start 502; Stop 526
gaaacccaagtgattgctaatcgct

SEQ ID NO: 142175 - DNA, 25 bp, Artificial
  probe
  misc_feature (1)..(25): SEQ ID NO: 1239; WAN024D3N_at; Start 83; Stop 107
aaacattagtctttgtaccaggagc

SEQ ID NO: 142176 - DNA, 25 bp, Artificial
  probe
  misc_feature (1)..(25): SEQ ID NO: 1239; WAN024D3N_at; Start 1124; Stop 1148
cagatgctttgattgttgacccacc

SEQ ID NO: 142177 - DNA, 25 bp, Artificial
  probe
  misc_feature (1)..(25): SEQ ID NO: 1239; WAN024D3N_at; Start 726; Stop 750
tacaaatacagctaaaaccagtgag

SEQ ID NO: 142178 - DNA, 25 bp, Artificial
  probe
  misc_feature (1)..(25): SEQ ID NO: 1239; WAN024D3N_at; Start 633; Stop 657
gattattattgttacaaaccgccag

SEQ ID NO: 142179 - DNA, 25 bp, Artificial
  probe
  misc_feature (1)..(25): SEQ ID NO: 1239; WAN024D3N_at; Start 224; Stop 248
tttataatgaatgcggaggctgcca

SEQ ID NO: 142180 - DNA, 25 bp, Artificial
  probe
  misc_feature (1)..(25): SEQ ID NO: 1239; WAN024D3N_at; Start 1107; Stop 1131
caaggaaggctaccgagcagatgct

SEQ ID NO: 142181 - DNA, 25 bp, Artificial
  probe
  misc_feature (1)..(25): SEQ ID NO: 1239; WAN024D3N_at; Start 173; Stop 197
tactgaaggtcaacaagaagtctaa

SEQ ID NO: 142182 - DNA, 25 bp, Artificial
  probe
  misc_feature (1)..(25): SEQ ID NO: 1239; WAN024D3N_at; Start 909; Stop 933
taaagaagaccatttgattgacgct

SEQ ID NO: 142183 - DNA, 25 bp, Artificial
  probe
  misc_feature (1)..(25): SEQ ID NO: 1239; WAN024D3N_at; Start 470; Stop 494
tagagttgaaagactgcctggtaca

SEQ ID NO: 142184 - DNA, 25 bp, Artificial
  probe
  misc_feature (1)..(25): SEQ ID NO: 1239; WAN024D3N_at; Start 39; Stop 63
caagcgcatgggaattaacggtgag

SEQ ID NO: 142185 - DNA, 25 bp, Artificial
  probe
  misc_feature (1)..(25): SEQ ID NO: 1239; WAN024D3N_at; Start 814; Stop 838
tatgaattttcactatcccctcgag

SEQ ID NO: 142186 - DNA, 25 bp, Artificial
  probe
  misc_feature (1)..(25): SEQ ID NO: 1239; WAN024D3N_at; Start 435; Stop 459
ggcgggcttatatgcacaaaactct

SEQ ID NO: 142187 - DNA, 25 bp, Artificial
  probe
  misc_feature (1)..(25): SEQ ID NO: 1239; WAN024D3N_at; Start 309; Stop 333
gctgaaaaaatttgctcctgcagga

SEQ ID NO: 142188 - DNA, 25 bp, Artificial
  probe
  misc_feature (1)..(25): SEQ ID NO: 1239; WAN024D3N_at; Start 591; Stop 615
tactattatggtccgacgcgcgaga

SEQ ID NO: 142189 - DNA, 25 bp, Artificial
  probe
  misc_feature (1)..(25): SEQ ID NO: 1239; WAN024D3N_at; Start 1059; Stop 1083
tactcattatgaagctggaacggca

SEQ ID NO: 142190 - DNA, 25 bp, Artificial
  probe
  misc_feature (1)..(25): SEQ ID NO: 1239; WAN024D3N_at; Start 354; Stop 378
tccaactattggaatgcaggaacca

SEQ ID NO: 142191 - DNA, 25 bp, Artificial
  probe
  misc_feature (1)..(25): SEQ ID NO: 958; WAN024D3O_at; Start 274; Stop 298
gaagcaattgatttaggccatgaag

SEQ ID NO: 142192 - DNA, 25 bp, Artificial
  probe
  misc_feature (1)..(25): SEQ ID NO: 958; WAN024D3O_at; Start 254; Stop 278
caacacaactagatgcaaaagaagc

SEQ ID NO: 142193 - DNA, 25 bp, Artificial
  probe
  misc_feature (1)..(25): SEQ ID NO: 958; WAN024D3O_at; Start 433; Stop 457
tacacactacttgtagctggagctg

SEQ ID NO: 142194 - DNA, 25 bp, Artificial
  probe
  misc_feature (1)..(25): SEQ ID NO: 958; WAN024D3O_at; Start 70; Stop 94
gcagaaaaactatccctaagccgaa

SEQ ID NO: 142195 - DNA, 25 bp, Artificial
  probe
  misc_feature (1)..(25): SEQ ID NO: 958; WAN024D3O_at; Start 841; Stop 865
gacatctcagaaaatggaaaacttt

SEQ ID NO: 142196 - DNA, 25 bp, Artificial
  probe
  misc_feature (1)..(25): SEQ ID NO: 958; WAN024D3O_at; Start 528; Stop 552
caatcataaaattggaggaatcctt

SEQ ID NO: 142197 - DNA, 25 bp, Artificial
  probe
  misc_feature (1)..(25): SEQ ID NO: 958; WAN024D3O_at; Start 49; Stop 73
tatatcagcggagaaaaaatcgcag

SEQ ID NO: 142198 - DNA, 25 bp, Artificial
  probe
  misc_feature (1)..(25): SEQ ID NO: 958; WAN024D3O_at; Start 559; Stop 583
gcaatgacctctgtagaaactggct

SEQ ID NO: 142199 - DNA, 25 bp, Artificial
  probe
  misc_feature (1)..(25): SEQ ID NO: 958; WAN024D3O_at; Start 828; Stop 852
gggacttgctaaagacatctcagaa

SEQ ID NO: 142200 - DNA, 25 bp, Artificial
  probe
  misc_feature (1)..(25): SEQ ID NO: 958; WAN024D3O_at; Start 316; Stop 340
gcttcctatcaaacagcaggccgag

SEQ ID NO: 142201 - DNA, 25 bp, Artificial
  probe
  misc_feature (1)..(25): SEQ ID NO: 958; WAN024D3O_at; Start 177; Stop 201
gaatggtgaccttattcttccagag

SEQ ID NO: 142202 - DNA, 25 bp, Artificial
  probe
  misc_feature (1)..(25): SEQ ID NO: 958; WAN024D3O_at; Start 15; Stop 39
agctgtctaccaaatcctatctaaa

SEQ ID NO: 142203 - DNA, 25 bp, Artificial
  probe
  misc_feature (1)..(25): SEQ ID NO: 958; WAN024D3O_at; Start 588; Stop 612
cacagatatcattattggagtaggt

SEQ ID NO: 142204 - DNA, 25 bp, Artificial
  probe
  misc_feature (1)..(25): SEQ ID NO: 958; WAN024D3O_at; Start 730; Stop 754
ttcgaaacaccagcagaagagctat

SEQ ID NO: 142205 - DNA, 25 bp, Artificial
  probe
  misc_feature (1)..(25): SEQ ID NO: 958; WAN024D3O_at; Start 907; Stop 931
ggcgaaatttctctcaatagttgga

SEQ ID NO: 142206 - DNA, 25 bp, Artificial
  probe
  misc_feature (1)..(25): SEQ ID NO: 958; WAN024D3O_at; Start 672; Stop 696
taaagctacagctcctataacaagg

SEQ ID NO: 142207 - DNA, 25 bp, Artificial
  probe
  misc_feature (1)..(25): SEQ ID NO: 958; WAN024D3O_at; Start 211; Stop 235
gaaaatcttccaattaaagtcagct

SEQ ID NO: 142208 - DNA, 25 bp, Artificial
  probe
  misc_feature (1)..(25): SEQ ID NO: 958; WAN024D3O_at; Start 353; Stop 377
gttccttctactcaccacaaggtgg

SEQ ID NO: 142209 - DNA, 25 bp, Artificial
  probe
  misc_feature (1)..(25): SEQ ID NO: 958; WAN024D3O_at; Start 382; Stop 406
tatatgacactccatcttaaaccaa

SEQ ID NO: 142210 - DNA, 25 bp, Artificial
  probe
  misc_feature (1)..(25): SEQ ID NO: 958; WAN024D3O_at; Start 113; Stop 137
tcaagcgactagaacaagaaggcat

SEQ ID NO: 142211 - DNA, 25 bp, Artificial
  probe
  misc_feature (1)..(25): SEQ ID NO: 958; WAN024D3O_at; Start 742; Stop 766
gcagaagagctattatacctataca

SEQ ID NO: 142212 - DNA, 25 bp, Artificial
  probe
  misc_feature (1)..(25): SEQ ID NO: 958; WAN024D3O_at; Start 889; Stop 913
gaaatctggctaaatagtggcgaaa

SEQ ID NO: 142213 - DNA, 25 bp, Artificial
  probe
  misc_feature (1)..(25): SEQ ID NO: 958; WAN024D3O_at; Start 780; Stop 804
cattctaggaaaagaagtcactttc

SEQ ID NO: 142214 - DNA, 25 bp, Artificial
  probe
  misc_feature (1)..(25): SEQ ID NO: 958; WAN024D3O_at; Start 658; Stop 682
gctgccagcttatttaaagctacag

SEQ ID NO: 142215 - DNA, 25 bp, Artificial
  probe
  misc_feature (1)..(25): SEQ ID NO: 958; WAN024D3O_at; Start 193; Stop 217
cttccagagattctagaagaaaatc

SEQ ID NO: 142216 - DNA, 25 bp, Artificial
  probe
  misc_feature (1)..(25): SEQ ID NO: 958; WAN024D3O_at; Start 765; Stop 789
caaaaaacagtcattcattctagga

SEQ ID NO: 142217 - DNA, 25 bp, Artificial
  probe
  misc_feature (1)..(25): SEQ ID NO: 958; WAN024D3O_at; Start 542; Stop 566
gaggaatccttactgaagcaatgac

SEQ ID NO: 142218 - DNA, 25 bp, Artificial
  probe
  misc_feature (1)..(25): SEQ ID NO: 958; WAN024D3O_at; Start 3; Stop 27
gaaatcctaccaagctgtctaccaa

SEQ ID NO: 142219 - DNA, 25 bp, Artificial
  probe
  misc_feature (1)..(25): SEQ ID NO: 958; WAN024D3O_at; Start 874; Stop 898
tgtgataacggaaaagaaatctggc

SEQ ID NO: 142220 - DNA, 25 bp, Artificial
  probe
  misc_feature (1)..(25): SEQ ID NO: 958; WAN024D3O_at; Start 699; Stop 723
tgaattgatcatagaaatctggcgt

SEQ ID NO: 142221 - DNA, 25 bp, Artificial
  probe
  misc_feature (1)..(25): SEQ ID NO: 958; WAN024D3O_at; Start 574; Stop 598
gaaactggcttagtcacagatatca

SEQ ID NO: 142222 - DNA, 25 bp, Artificial
  probe
  misc_feature (1)..(25): SEQ ID NO: 958; WAN024D3O_at; Start 34; Stop 58
tctaaagaaaccgactatatcagcg

SEQ ID NO: 142223 - DNA, 25 bp, Artificial
  probe
  misc_feature (1)..(25): SEQ ID NO: 958; WAN024D3O_at; Start 813; Stop 837
gcaaaaagactacaagggacttgct

SEQ ID NO: 142224 - DNA, 25 bp, Artificial
  probe
  misc_feature (1)..(25): SEQ ID NO: 958; WAN024D3O_at; Start 621; Stop 645
cactattaaagacttccctcaggaa

SEQ ID NO: 142225 - DNA, 25 bp, Artificial
  probe
  misc_feature (1)..(25): SEQ ID NO: 3126; WAN024D3P_at; Start 611; Stop 635
gctacttatcaagcgtattcaaaga

SEQ ID NO: 142226 - DNA, 25 bp, Artificial
  probe
  misc_feature (1)..(25): SEQ ID NO: 3126; WAN024D3P_at; Start 366; Stop 390
aaaactcatctcagacattgtccgc

SEQ ID NO: 142227 - DNA, 25 bp, Artificial
  probe
  misc_feature (1)..(25): SEQ ID NO: 3126; WAN024D3P_at; Start 450; Stop 474
tgaactgatgtttcatctgggaact

SEQ ID NO: 142228 - DNA, 25 bp, Artificial
  probe
  misc_feature (1)..(25): SEQ ID NO: 3126; WAN024D3P_at; Start 703; Stop 727
gaaaatacccaagagtccatcaagg

SEQ ID NO: 142229 - DNA, 25 bp, Artificial
  probe
  misc_feature (1)..(25): SEQ ID NO: 3126; WAN024D3P_at; Start 592; Stop 616
gaactatccgttcacagaagctact

SEQ ID NO: 142230 - DNA, 25 bp, Artificial
  probe
  misc_feature (1)..(25): SEQ ID NO: 3126; WAN024D3P_at; Start 37; Stop 61
gaccttgccctaagcttttatggat

SEQ ID NO: 142231 - DNA, 25 bp, Artificial
  probe
  misc_feature (1)..(25): SEQ ID NO: 3126; WAN024D3P_at; Start 381; Stop 405
cattgtccgcttcgctcagattaca

SEQ ID NO: 142232 - DNA, 25 bp, Artificial
  probe
  misc_feature (1)..(25): SEQ ID NO: 3126; WAN024D3P_at; Start 736; Stop 760
tactcggtaggtttttcagatccac

SEQ ID NO: 142233 - DNA, 25 bp, Artificial
  probe
  misc_feature (1)..(25): SEQ ID NO: 3126; WAN024D3P_at; Start 253; Stop 277
tactactggttaggaatcactggag

SEQ ID NO: 142234 - DNA, 25 bp, Artificial
  probe
  misc_feature (1)..(25): SEQ ID NO: 3126; WAN024D3P_at; Start 415; Stop 439
gaattagctcaactccatatcatgg

SEQ ID NO: 142235 - DNA, 25 bp, Artificial
  probe
  misc_feature (1)..(25): SEQ ID NO: 3126; WAN024D3P_at; Start 649; Stop 673
tcacccaaagaatacctactctacg

SEQ ID NO: 142236 - DNA, 25 bp, Artificial
  probe
  misc_feature (1)..(25): SEQ ID NO: 3126; WAN024D3P_at; Start 76; Stop 100
cctaattactcttttggtccagcca

SEQ ID NO: 142237 - DNA, 25 bp, Artificial
  probe
  misc_feature (1)..(25): SEQ ID NO: 3126; WAN024D3P_at; Start 547; Stop 571
gatagccactatcctcaatcactta

SEQ ID NO: 142238 - DNA, 25 bp, Artificial
  probe
  misc_feature (1)..(25): SEQ ID NO: 3126; WAN024D3P_at; Start 63; Stop 87
tgaggaatgcacacctaattactct

SEQ ID NO: 142239 - DNA, 25 bp, Artificial
  probe
  misc_feature (1)..(25): SEQ ID NO: 3126; WAN024D3P_at; Start 817; Stop 841
aaagaatactctcaataccaactag

SEQ ID NO: 142240 - DNA, 25 bp, Artificial
  probe
  misc_feature (1)..(25): SEQ ID NO: 3126; WAN024D3P_at; Start 516; Stop 540
ccaactctatcttgaatgcaaacga

SEQ ID NO: 142241 - DNA, 25 bp, Artificial
  probe
  misc_feature (1)..(25): SEQ ID NO: 3126; WAN024D3P_at; Start 677; Stop 701
gaatgcaccgagctagacaacttct

SEQ ID NO: 142242 - DNA, 25 bp, Artificial
  probe
  misc_feature (1)..(25): SEQ ID NO: 3126; WAN024D3P_at; Start 532; Stop 556
tgcaaacgattaattgatagccact

SEQ ID NO: 142243 - DNA, 25 bp, Artificial
  probe
  misc_feature (1)..(25): SEQ ID NO: 3126; WAN024D3P_at; Start 325; Stop 349
tatctcatccaatctgaaacttgtc

SEQ ID NO: 142244 - DNA, 25 bp, Artificial
  probe
  misc_feature (1)..(25): SEQ ID NO: 3126; WAN024D3P_at; Start 208; Stop 232
gaggaactaaccttttatcaagcag

SEQ ID NO: 142245 - DNA, 25 bp, Artificial
  probe
  misc_feature (1)..(25): SEQ ID NO: 3126; WAN024D3P_at; Start 752; Stop 776
cagatccactccatttttcgaaagc

SEQ ID NO: 142246 - DNA, 25 bp, Artificial
  probe
  misc_feature (1)..(25): SEQ ID NO: 3126; WAN024D3P_at; Start 801; Stop 825
tccaagtcatacaagaaaagaatac

SEQ ID NO: 142247 - DNA, 25 bp, Artificial
  probe
  misc_feature (1)..(25): SEQ ID NO: 3126; WAN024D3P_at; Start 53; Stop 77
tttatggatatgaggaatgcacacc

SEQ ID NO: 142248 - DNA, 25 bp, Artificial
  probe
  misc_feature (1)..(25): SEQ ID NO: 3126; WAN024D3P_at; Start 665; Stop 689
tactctacgttcgaatgcaccgagc

SEQ ID NO: 142249 - DNA, 25 bp, Artificial
  probe
  misc_feature (1)..(25): SEQ ID NO: 3126; WAN024D3P_at; Start 720; Stop 744
catcaaggtaattgcatactcggta

SEQ ID NO: 142250 - DNA, 25 bp, Artificial
  probe
  misc_feature (1)..(25): SEQ ID NO: 3126; WAN024D3P_at; Start 340; Stop 364
gaaacttgtcatacccagactactg

SEQ ID NO: 142251 - DNA, 25 bp, Artificial
  probe
  misc_feature (1)..(25): SEQ ID NO: 3126; WAN024D3P_at; Start 577; Stop 601
caagatttagcaaaagaactatccg

SEQ ID NO: 142252 - DNA, 25 bp, Artificial
  probe
  misc_feature (1)..(25): SEQ ID NO: 3126; WAN024D3P_at; Start 8; Stop 32
ttttttcagaataccagactggaac

SEQ ID NO: 142253 - DNA, 25 bp, Artificial
  probe
  misc_feature (1)..(25): SEQ ID NO: 3126; WAN024D3P_at; Start 223; Stop 247
tatcaagcagatagtaaagaacctt

SEQ ID NO: 142254 - DNA, 25 bp, Artificial
  probe
  misc_feature (1)..(25): SEQ ID NO: 3126; WAN024D3P_at; Start 435; Stop 459
catgggacaacttcatgaactgatg

SEQ ID NO: 142255 - DNA, 25 bp, Artificial
  probe
  misc_feature (1)..(25): SEQ ID NO: 3126; WAN024D3P_at; Start 495; Stop 519
aaagaatatttcatcaacccaccaa

SEQ ID NO: 142256 - DNA, 25 bp, Artificial
  probe
  misc_feature (1)..(25): SEQ ID NO: 3126; WAN024D3P_at; Start 468; Stop 492
gggaactattgctcccaatcagaaa

SEQ ID NO: 142257 - DNA, 25 bp, Artificial
  probe
  misc_feature (1)..(25): SEQ ID NO: 3126; WAN024D3P_at; Start 692; Stop 716
gacaacttctcgaaaatacccaaga

SEQ ID NO: 142258 - DNA, 25 bp, Artificial
  probe
  misc_feature (1)..(25): SEQ ID NO: 3126; WAN024D3P_at; Start 91; Stop 115
ggtccagccattcgtgatacatacg

SEQ ID NO: 142259 - DNA, 25 bp, Artificial
  probe
  misc_feature (1)..(25): SEQ ID NO: 1072; WAN024D3Q_at; Start 567; Stop 591
tctcatggacattggcaaagaccct

SEQ ID NO: 142260 - DNA, 25 bp, Artificial
  probe
  misc_feature (1)..(25): SEQ ID NO: 1072; WAN024D3Q_at; Start 32; Stop 56
tccaagaaaccattcaaaacgagac

SEQ ID NO: 142261 - DNA, 25 bp, Artificial
  probe
  misc_feature (1)..(25): SEQ ID NO: 1072; WAN024D3Q_at; Start 239; Stop 263
ccagctaccaagaactagttaaaga

SEQ ID NO: 142262 - DNA, 25 bp, Artificial
  probe
  misc_feature (1)..(25): SEQ ID NO: 1072; WAN024D3Q_at; Start 132; Stop 156
aaaggccctgtctctcctccaagag

SEQ ID NO: 142263 - DNA, 25 bp, Artificial
  probe
  misc_feature (1)..(25): SEQ ID NO: 1072; WAN024D3Q_at; Start 20; Stop 44
tatttaagcaaatccaagaaaccat

SEQ ID NO: 142264 - DNA, 25 bp, Artificial
  probe
  misc_feature (1)..(25): SEQ ID NO: 1072; WAN024D3Q_at; Start 642; Stop 666
tcagtttaccgaaagtcgccataag

SEQ ID NO: 142265 - DNA, 25 bp, Artificial
  probe
  misc_feature (1)..(25): SEQ ID NO: 1072; WAN024D3Q_at; Start 614; Stop 638
aagtctatctccaagacggacgcca

SEQ ID NO: 142266 - DNA, 25 bp, Artificial
  probe
  misc_feature (1)..(25): SEQ ID NO: 1072; WAN024D3Q_at; Start 226; Stop 250
gtatccaacctaaccagctaccaag

SEQ ID NO: 142267 - DNA, 25 bp, Artificial
  probe
  misc_feature (1)..(25): SEQ ID NO: 1072; WAN024D3Q_at; Start 293; Stop 317
tcagtctggacaagattattattga

SEQ ID NO: 142268 - DNA, 25 bp, Artificial
  probe
  misc_feature (1)..(25): SEQ ID NO: 1072; WAN024D3Q_at; Start 119; Stop 143
gtgataccgtccgaaaggccctgtc

SEQ ID NO: 142269 - DNA, 25 bp, Artificial
  probe
  misc_feature (1)..(25): SEQ ID NO: 1072; WAN024D3Q_at; Start 208; Stop 232
gaaaccgtcaatttccctgtatcca

SEQ ID NO: 142270 - DNA, 25 bp, Artificial
  probe
  misc_feature (1)..(25): SEQ ID NO: 1072; WAN024D3Q_at; Start 517; Stop 541
tatgctcagaaggaaatcaccattg

SEQ ID NO: 142271 - DNA, 25 bp, Artificial
  probe
  misc_feature (1)..(25): SEQ ID NO: 1072; WAN024D3Q_at; Start 345; Stop 369
cccagagtttcggatggtttggaag

SEQ ID NO: 142272 - DNA, 25 bp, Artificial
  probe
  misc_feature (1)..(25): SEQ ID NO: 1072; WAN024D3Q_at; Start 463; Stop 487
gctgagcagtctatctattcttata

SEQ ID NO: 142273 - DNA, 25 bp, Artificial
  probe
  misc_feature (1)..(25): SEQ ID NO: 1072; WAN024D3Q_at; Start 680; Stop 704
gatttgtagattttgcaaaacgcaa

SEQ ID NO: 142274 - DNA, 25 bp, Artificial
  probe
  misc_feature (1)..(25): SEQ ID NO: 1072; WAN024D3Q_at; Start 254; Stop 278
tagttaaagaacttggactgcgctc

SEQ ID NO: 142275 - DNA, 25 bp, Artificial
  probe
  misc_feature (1)..(25): SEQ ID NO: 1072; WAN024D3Q_at; Start 147; Stop 171
cctccaagaggaaggattgatcaaa

SEQ ID NO: 142276 - DNA, 25 bp, Artificial
  probe
  misc_feature (1)..(25): SEQ ID NO: 1072; WAN024D3Q_at; Start 95; Stop 119
ttatggagcaatatcaagtgagtcg

SEQ ID NO: 142277 - DNA, 25 bp, Artificial
  probe
  misc_feature (1)..(25): SEQ ID NO: 1072; WAN024D3Q_at; Start 374; Stop 398
tccgccagcgtgtggtggatgatct

SEQ ID NO: 142278 - DNA, 25 bp, Artificial
  probe
  misc_feature (1)..(25): SEQ ID NO: 1072; WAN024D3Q_at; Start 389; Stop 413
tggatgatctggtatccgttctgga

SEQ ID NO: 142279 - DNA, 25 bp, Artificial
  probe
  misc_feature (1)..(25): SEQ ID NO: 1072; WAN024D3Q_at; Start 282; Stop 306
aaccaacgtggtcagtctggacaag

SEQ ID NO: 142280 - DNA, 25 bp, Artificial
  probe
  misc_feature (1)..(25): SEQ ID NO: 1072; WAN024D3Q_at; Start 625; Stop 649
caagacggacgccaatttcagttta

SEQ ID NO: 142281 - DNA, 25 bp, Artificial
  probe
  misc_feature (1)..(25): SEQ ID NO: 1072; WAN024D3Q_at; Start 80; Stop 104
ctagcgagcacgaccttatggagca

SEQ ID NO: 142282 - DNA, 25 bp, Artificial
  probe
  misc_feature (1)..(25): SEQ ID NO: 1072; WAN024D3Q_at; Start 551; Stop 575
gcgaccgagacaagattctcatgga

SEQ ID NO: 142283 - DNA, 25 bp, Artificial
  probe
  misc_feature (1)..(25): SEQ ID NO: 1072; WAN024D3Q_at; Start 580; Stop 604
ggcaaagacccttatgtcgtttcga

SEQ ID NO: 142284 - DNA, 25 bp, Artificial
  probe
  misc_feature (1)..(25): SEQ ID NO: 1072; WAN024D3Q_at; Start 501; Stop 525
caaactccttattgattatgctcag

SEQ ID NO: 142285 - DNA, 25 bp, Artificial
  probe
  misc_feature (1)..(25): SEQ ID NO: 1072; WAN024D3Q_at; Start 484; Stop 508
tatatagaaaatggcctcaaactcc

SEQ ID NO: 142286 - DNA, 25 bp, Artificial
  probe
  misc_feature (1)..(25): SEQ ID NO: 1072; WAN024D3Q_at; Start 538; Stop 562
attgaccactcaagcgaccgagaca

SEQ ID NO: 142287 - DNA, 25 bp, Artificial
  probe
  misc_feature (1)..(25): SEQ ID NO: 1072; WAN024D3Q_at; Start 269; Stop 293
gactgcgctctaaaaccaacgtggt

SEQ ID NO: 142288 - DNA, 25 bp, Artificial
  probe
  misc_feature (1)..(25): SEQ ID NO: 1072; WAN024D3Q_at; Start 183; Stop 207
gcaaggttctcaagtcgtcaaagaa

SEQ ID NO: 142289 - DNA, 25 bp, Artificial
  probe
  misc_feature (1)..(25): SEQ ID NO: 1072; WAN024D3Q_at; Start 109; Stop 133
caagtgagtcgtgataccgtccgaa

SEQ ID NO: 142290 - DNA, 25 bp, Artificial
  probe
  misc_feature (1)..(25): SEQ ID NO: 1072; WAN024D3Q_at; Start 529; Stop 553
gaaatcaccattgaccactcaagcg

SEQ ID NO: 142291 - DNA, 25 bp, Artificial
  probe
  misc_feature (1)..(25): SEQ ID NO: 1072; WAN024D3Q_at; Start 601; Stop 625
tcgattaaatcaaaagtctatctcc

SEQ ID NO: 142292 - DNA, 25 bp, Artificial
  probe
  misc_feature (1)..(25): SEQ ID NO: 1072; WAN024D3Q_at; Start 47; Stop 71
aaaacgagacttacgctgtcggaga

SEQ ID NO: 142293 - DNA, 25 bp, Artificial
  probe
  misc_feature (1)..(25): SEQ ID NO: 5490; WAN024D3R_at; Start 97; Stop 121
tataacttctttggttacctggcta

SEQ ID NO: 142294 - DNA, 25 bp, Artificial
  probe
  misc_feature (1)..(25): SEQ ID NO: 5490; WAN024D3R_at; Start 287; Stop 311
tctggtctggtttcaacattggcag

SEQ ID NO: 142295 - DNA, 25 bp, Artificial
  probe
  misc_feature (1)..(25): SEQ ID NO: 5490; WAN024D3R_at; Start 50; Stop 74
tcatcacccttgtgagttacaggag

SEQ ID NO: 142296 - DNA, 25 bp, Artificial
  probe
  misc_feature (1)..(25): SEQ ID NO: 5490; WAN024D3R_at; Start 269; Stop 293
tcagttcttgtgatgagttctggtc

SEQ ID NO: 142297 - DNA, 25 bp, Artificial
  probe
  misc_feature (1)..(25): SEQ ID NO: 5490; WAN024D3R_at; Start 178; Stop 202
tcgttcacctttgactcctgctgtg

SEQ ID NO: 142298 - DNA, 25 bp, Artificial
  probe
  misc_feature (1)..(25): SEQ ID NO: 5490; WAN024D3R_at; Start 306; Stop 330
tggcagccacttcattttcatctag

SEQ ID NO: 142299 - DNA, 25 bp, Artificial
  probe
  misc_feature (1)..(25): SEQ ID NO: 5490; WAN024D3R_at; Start 174; Stop 198
gagttcgttcacctttgactcctgc

SEQ ID NO: 142300 - DNA, 25 bp, Artificial
  probe
  misc_feature (1)..(25): SEQ ID NO: 5490; WAN024D3R_at; Start 280; Stop 304
gatgagttctggtctggtttcaaca

SEQ ID NO: 142301 - DNA, 25 bp, Artificial
  probe
  misc_feature (1)..(25): SEQ ID NO: 5490; WAN024D3R_at; Start 247; Stop 271
gataacttcaaatggaatttcttca

SEQ ID NO: 142302 - DNA, 25 bp, Artificial
  probe
  misc_feature (1)..(25): SEQ ID NO: 5490; WAN024D3R_at; Start 40; Stop 64
aagaccactttcatcacccttgtga

SEQ ID NO: 142303 - DNA, 25 bp, Artificial
  probe
  misc_feature (1)..(25): SEQ ID NO: 5490; WAN024D3R_at; Start 115; Stop 139
ctggctatcaaggactgtttctgtt

SEQ ID NO: 142304 - DNA, 25 bp, Artificial
  probe
  misc_feature (1)..(25): SEQ ID NO: 5490; WAN024D3R_at; Start 8; Stop 32
tccagtctaggttttacctcagtag

SEQ ID NO: 142305 - DNA, 25 bp, Artificial
  probe
  misc_feature (1)..(25): SEQ ID NO: 5490; WAN024D3R_at; Start 112; Stop 136
tacctggctatcaaggactgtttct

SEQ ID NO: 142306 - DNA, 25 bp, Artificial
  probe
  misc_feature (1)..(25): SEQ ID NO: 5490; WAN024D3R_at; Start 168; Stop 192
tgtaatgagttcgttcacctttgac

SEQ ID NO: 142307 - DNA, 25 bp, Artificial
  probe
  misc_feature (1)..(25): SEQ ID NO: 5490; WAN024D3R_at; Start 15; Stop 39
taggttttacctcagtagttggtgc

SEQ ID NO: 142308 - DNA, 25 bp, Artificial
  probe
  misc_feature (1)..(25): SEQ ID NO: 5490; WAN024D3R_at; Start 162; Stop 186
cagagatgtaatgagttcgttcacc

SEQ ID NO: 142309 - DNA, 25 bp, Artificial
  probe
  misc_feature (1)..(25): SEQ ID NO: 5490; WAN024D3R_at; Start 190; Stop 214
gactcctgctgtgataatattttcc

SEQ ID NO: 142310 - DNA, 25 bp, Artificial
  probe
  misc_feature (1)..(25): SEQ ID NO: 5490; WAN024D3R_at; Start 184; Stop 208
acctttgactcctgctgtgataata

SEQ ID NO: 142311 - DNA, 25 bp, Artificial
  probe
  misc_feature (1)..(25): SEQ ID NO: 5490; WAN024D3R_at; Start 1; Stop 25
ttggatatccagtctaggttttacc

SEQ ID NO: 142312 - DNA, 25 bp, Artificial
  probe
  misc_feature (1)..(25): SEQ ID NO: 5490; WAN024D3R_at; Start 22; Stop 46
tacctcagtagttggtgcaagacca

SEQ ID NO: 142313 - DNA, 25 bp, Artificial
  probe
  misc_feature (1)..(25): SEQ ID NO: 5490; WAN024D3R_at; Start 31; Stop 55
agttggtgcaagaccactttcatca

SEQ ID NO: 142314 - DNA, 25 bp, Artificial
  probe
  misc_feature (1)..(25): SEQ ID NO: 5490; WAN024D3R_at; Start 122; Stop 146
tcaaggactgtttctgttgtttttc

SEQ ID NO: 142315 - DNA, 25 bp, Artificial
  probe
  misc_feature (1)..(25): SEQ ID NO: 5490; WAN024D3R_at; Start 226; Stop 250
gaggttaggattttctttcttgata

SEQ ID NO: 142316 - DNA, 25 bp, Artificial
  probe
  misc_feature (1)..(25): SEQ ID NO: 5490; WAN024D3R_at; Start 108; Stop 132
tggttacctggctatcaaggactgt

SEQ ID NO: 142317 - DNA, 25 bp, Artificial
  probe
  misc_feature (1)..(25): SEQ ID NO: 5490; WAN024D3R_at; Start 27; Stop 51
cagtagttggtgcaagaccactttc

SEQ ID NO: 142318 - DNA, 25 bp, Artificial
  probe
  misc_feature (1)..(25): SEQ ID NO: 5490; WAN024D3R_at; Start 295; Stop 319
ggtttcaacattggcagccacttca

SEQ ID NO: 142319 - DNA, 25 bp, Artificial
  probe
  misc_feature (1)..(25): SEQ ID NO: 5490; WAN024D3R_at; Start 195; Stop 219
ctgctgtgataatattttcctgacc

SEQ ID NO: 142320 - DNA, 25 bp, Artificial
  probe
  misc_feature (1)..(25): SEQ ID NO: 5490; WAN024D3R_at; Start 261; Stop 285
gaatttcttcagttcttgtgatgag

SEQ ID NO: 142321 - DNA, 25 bp, Artificial
  probe
  misc_feature (1)..(25): SEQ ID NO: 5490; WAN024D3R_at; Start 142; Stop 166
ttttccattttcagtgagtacagag

SEQ ID NO: 142322 - DNA, 25 bp, Artificial
  probe
  misc_feature (1)..(25): SEQ ID NO: 5490; WAN024D3R_at; Start 292; Stop 316
tctggtttcaacattggcagccact

SEQ ID NO: 142323 - DNA, 25 bp, Artificial
  probe
  misc_feature (1)..(25): SEQ ID NO: 5490; WAN024D3R_at; Start 146; Stop 170
ccattttcagtgagtacagagatgt

SEQ ID NO: 142324 - DNA, 25 bp, Artificial
  probe
  misc_feature (1)..(25): SEQ ID NO: 5490; WAN024D3R_at; Start 239; Stop 263
tctttcttgataacttcaaatggaa

SEQ ID NO: 142325 - DNA, 25 bp, Artificial
  probe
  misc_feature (1)..(25): SEQ ID NO: 5490; WAN024D3R_at; Start 76; Stop 100
gccaacttcaaccacttggtttata

SEQ ID NO: 142326 - DNA, 25 bp, Artificial
  probe
  misc_feature (1)..(25): SEQ ID NO: 5490; WAN024D3R_at; Start 156; Stop 180
tgagtacagagatgtaatgagttcg

SEQ ID NO: 142327 - DNA, 25 bp, Artificial
  probe
  misc_feature (1)..(25): SEQ ID NO: 4954; WAN024D3S_at; Start 36; Stop 60
tgttggcatattcggcaaatttgcc

SEQ ID NO: 142328 - DNA, 25 bp, Artificial
  probe
  misc_feature (1)..(25): SEQ ID NO: 4954; WAN024D3S_at; Start 108; Stop 132
catcgttggcgtattcgtcagtacc

SEQ ID NO: 142329 - DNA, 25 bp, Artificial
  probe
  misc_feature (1)..(25): SEQ ID NO: 4954; WAN024D3S_at; Start 122; Stop 146
tcgtcagtaccaaagttgaaaatct

SEQ ID NO: 142330 - DNA, 25 bp, Artificial
  probe
  misc_feature (1)..(25): SEQ ID NO: 4954; WAN024D3S_at; Start 167; Stop 191
tccatgtatttaccgatgagggctt

SEQ ID NO: 142331 - DNA, 25 bp, Artificial
  probe
  misc_feature (1)..(25): SEQ ID NO: 4954; WAN024D3S_at; Start 97; Stop 121
ggcactagtcgcatcgttggcgtat

SEQ ID NO: 142332 - DNA, 25 bp, Artificial
  probe
  misc_feature (1)..(25): SEQ ID NO: 4954; WAN024D3S_at; Start 179; Stop 203
ccgatgagggcttttacaaagttca

SEQ ID NO: 142333 - DNA, 25 bp, Artificial
  probe
  misc_feature (1)..(25): SEQ ID NO: 4954; WAN024D3S_at; Start 21; Stop 45
ccatagctgcgagggtgttggcata

SEQ ID NO: 142334 - DNA, 25 bp, Artificial
  probe
  misc_feature (1)..(25): SEQ ID NO: 4954; WAN024D3S_at; Start 183; Stop 207
tgagggcttttacaaagttcatcgc

SEQ ID NO: 142335 - DNA, 25 bp, Artificial
  probe
  misc_feature (1)..(25): SEQ ID NO: 4954; WAN024D3S_at; Start 24; Stop 48
tagctgcgagggtgttggcatattc

SEQ ID NO: 142336 - DNA, 25 bp, Artificial
  probe
  misc_feature (1)..(25): SEQ ID NO: 4954; WAN024D3S_at; Start 83; Stop 107
tagtaccagccttgggcactagtcg

SEQ ID NO: 142337 - DNA, 25 bp, Artificial
  probe
  misc_feature (1)..(25): SEQ ID NO: 4954; WAN024D3S_at; Start 14; Stop 38
tctttggccatagctgcgagggtgt

SEQ ID NO: 142338 - DNA, 25 bp, Artificial
  probe
  misc_feature (1)..(25): SEQ ID NO: 4954; WAN024D3S_at; Start 31; Stop 55
gagggtgttggcatattcggcaaat

SEQ ID NO: 142339 - DNA, 25 bp, Artificial
  probe
  misc_feature (1)..(25): SEQ ID NO: 4954; WAN024D3S_at; Start 111; Stop 135
cgttggcgtattcgtcagtaccaaa

SEQ ID NO: 142340 - DNA, 25 bp, Artificial
  probe
  misc_feature (1)..(25): SEQ ID NO: 4954; WAN024D3S_at; Start 51; Stop 75
caaatttgccatagagttgatacca

SEQ ID NO: 142341 - DNA, 25 bp, Artificial
  probe
  misc_feature (1)..(25): SEQ ID NO: 4954; WAN024D3S_at; Start 74; Stop 98
cacttgaggtagtaccagccttggg

SEQ ID NO: 142342 - DNA, 25 bp, Artificial
  probe
  misc_feature (1)..(25): SEQ ID NO: 4954; WAN024D3S_at; Start 193; Stop 217
tacaaagttcatcgcttcttcgttt

SEQ ID NO: 142343 - DNA, 25 bp, Artificial
  probe
  misc_feature (1)..(25): SEQ ID NO: 4954; WAN024D3S_at; Start 78; Stop 102
tgaggtagtaccagccttgggcact

SEQ ID NO: 142344 - DNA, 25 bp, Artificial
  probe
  misc_feature (1)..(25): SEQ ID NO: 4954; WAN024D3S_at; Start 69; Stop 93
gataccacttgaggtagtaccagcc

SEQ ID NO: 142345 - DNA, 25 bp, Artificial
  probe
  misc_feature (1)..(25): SEQ ID NO: 4954; WAN024D3S_at; Start 173; Stop 197
tatttaccgatgagggcttttacaa

SEQ ID NO: 142346 - DNA, 25 bp, Artificial
  probe
  misc_feature (1)..(25): SEQ ID NO: 4954; WAN024D3S_at; Start 2; Stop 26
tgaagccctctttctttggccatag

SEQ ID NO: 142347 - DNA, 25 bp, Artificial
  probe
  misc_feature (1)..(25): SEQ ID NO: 4954; WAN024D3S_at; Start 58; Stop 82
gccatagagttgataccacttgagg

SEQ ID NO: 142348 - DNA, 25 bp, Artificial
  probe
  misc_feature (1)..(25): SEQ ID NO: 4954; WAN024D3S_at; Start 157; Stop 181
tgcaaagaagtccatgtatttaccg

SEQ ID NO: 142349 - DNA, 25 bp, Artificial
  probe
  misc_feature (1)..(25): SEQ ID NO: 4954; WAN024D3S_at; Start 62; Stop 86
tagagttgataccacttgaggtagt

SEQ ID NO: 142350 - DNA, 25 bp, Artificial
  probe
  misc_feature (1)..(25): SEQ ID NO: 4954; WAN024D3S_at; Start 136; Stop 160
gttgaaaatctttgttttacctgca

SEQ ID NO: 142351 - DNA, 25 bp, Artificial
  probe
  misc_feature (1)..(25): SEQ ID NO: 4954; WAN024D3S_at; Start 163; Stop 187
gaagtccatgtatttaccgatgagg

SEQ ID NO: 142352 - DNA, 25 bp, Artificial
  probe
  misc_feature (1)..(25): SEQ ID NO: 4954; WAN024D3S_at; Start 148; Stop 172
tgttttacctgcaaagaagtccatg

SEQ ID NO: 142353 - DNA, 25 bp, Artificial
  probe
  misc_feature (1)..(25): SEQ ID NO: 4954; WAN024D3S_at; Start 102; Stop 126
tagtcgcatcgttggcgtattcgtc

SEQ ID NO: 142354 - DNA, 25 bp, Artificial
  probe
  misc_feature (1)..(25): SEQ ID NO: 4954; WAN024D3S_at; Start 93; Stop 117
cttgggcactagtcgcatcgttggc

SEQ ID NO: 142355 - DNA, 25 bp, Artificial
  probe
  misc_feature (1)..(25): SEQ ID NO: 4954; WAN024D3S_at; Start 116; Stop 140
gcgtattcgtcagtaccaaagttga

SEQ ID NO: 142356 - DNA, 25 bp, Artificial
  probe
  misc_feature (1)..(25): SEQ ID NO: 4954; WAN024D3S_at; Start 202; Stop 226
catcgcttcttcgtttttcaagtcc

SEQ ID NO: 142357 - DNA, 25 bp, Artificial
  probe
  misc_feature (1)..(25): SEQ ID NO: 4954; WAN024D3S_at; Start 10; Stop 34
tctttctttggccatagctgcgagg

SEQ ID NO: 142358 - DNA, 25 bp, Artificial
  probe
  misc_feature (1)..(25): SEQ ID NO: 4954; WAN024D3S_at; Start 209; Stop 233
tcttcgtttttcaagtccatagttg

SEQ ID NO: 142359 - DNA, 25 bp, Artificial
  probe
  misc_feature (1)..(25): SEQ ID NO: 4954; WAN024D3S_at; Start 187; Stop 211
ggcttttacaaagttcatcgcttct

SEQ ID NO: 142360 - DNA, 25 bp, Artificial
  probe
  misc_feature (1)..(25): SEQ ID NO: 4954; WAN024D3S_at; Start 89; Stop 113
cagccttgggcactagtcgcatcgt

SEQ ID NO: 142361 - DNA, 25 bp, Artificial
  probe
  misc_feature (1)..(25): SEQ ID NO: 5119; WAN024D3T_at; Start 191; Stop 215
tgctctgcagattcataatcagctg

SEQ ID NO: 142362 - DNA, 25 bp, Artificial
  probe
  misc_feature (1)..(25): SEQ ID NO: 5119; WAN024D3T_at; Start 206; Stop 230
taatcagctgcgaagtattcagcgt

SEQ ID NO: 142363 - DNA, 25 bp, Artificial
  probe
  misc_feature (1)..(25): SEQ ID NO: 5119; WAN024D3T_at; Start 96; Stop 120
tatcgagagagcgaatagctttttc

SEQ ID NO: 142364 - DNA, 25 bp, Artificial
  probe
  misc_feature (1)..(25): SEQ ID NO: 5119; WAN024D3T_at; Start 66; Stop 90
tcgtatcttgttgggcacggctaag

SEQ ID NO: 142365 - DNA, 25 bp, Artificial
  probe
  misc_feature (1)..(25): SEQ ID NO: 5119; WAN024D3T_at; Start 142; Stop 166
gctttctgcagtataacggttcagg

SEQ ID NO: 142366 - DNA, 25 bp, Artificial
  probe
  misc_feature (1)..(25): SEQ ID NO: 5119; WAN024D3T_at; Start 70; Stop 94
atcttgttgggcacggctaaggttg

SEQ ID NO: 142367 - DNA, 25 bp, Artificial
  probe
  misc_feature (1)..(25): SEQ ID NO: 5119; WAN024D3T_at; Start 85; Stop 109
gctaaggttgctatcgagagagcga

SEQ ID NO: 142368 - DNA, 25 bp, Artificial
  probe
  misc_feature (1)..(25): SEQ ID NO: 5119; WAN024D3T_at; Start 139; Stop 163
gacgctttctgcagtataacggttc

SEQ ID NO: 142369 - DNA, 25 bp, Artificial
  probe
  misc_feature (1)..(25): SEQ ID NO: 5119; WAN024D3T_at; Start 81; Stop 105
cacggctaaggttgctatcgagaga

SEQ ID NO: 142370 - DNA, 25 bp, Artificial
  probe
  misc_feature (1)..(25): SEQ ID NO: 5119; WAN024D3T_at; Start 173; Stop 197
ggtacctcgttaagtgcttgctctg

SEQ ID NO: 142371 - DNA, 25 bp, Artificial
  probe
  misc_feature (1)..(25): SEQ ID NO: 5119; WAN024D3T_at; Start 225; Stop 249
cagcgttggcatttgcaaaatgacg

SEQ ID NO: 142372 - DNA, 25 bp, Artificial
  probe
  misc_feature (1)..(25): SEQ ID NO: 5119; WAN024D3T_at; Start 103; Stop 127
agagcgaatagctttttcagcttct

SEQ ID NO: 142373 - DNA, 25 bp, Artificial
  probe
  misc_feature (1)..(25): SEQ ID NO: 5119; WAN024D3T_at; Start 198; Stop 222
cagattcataatcagctgcgaagta

SEQ ID NO: 142374 - DNA, 25 bp, Artificial
  probe
  misc_feature (1)..(25): SEQ ID NO: 5119; WAN024D3T_at; Start 169; Stop 193
ttttggtacctcgttaagtgcttgc

SEQ ID NO: 142375 - DNA, 25 bp, Artificial
  probe
  misc_feature (1)..(25): SEQ ID NO: 5119; WAN024D3T_at; Start 90; Stop 114
ggttgctatcgagagagcgaatagc

SEQ ID NO: 142376 - DNA, 25 bp, Artificial
  probe
  misc_feature (1)..(25): SEQ ID NO: 5119; WAN024D3T_at; Start 210; Stop 234
cagctgcgaagtattcagcgttggc

SEQ ID NO: 142377 - DNA, 25 bp, Artificial
  probe
  misc_feature (1)..(25): SEQ ID NO: 5119; WAN024D3T_at; Start 76; Stop 100
ttgggcacggctaaggttgctatcg

SEQ ID NO: 142378 - DNA, 25 bp, Artificial
  probe
  misc_feature (1)..(25): SEQ ID NO: 5119; WAN024D3T_at; Start 39; Stop 63
cttgaagtttagcaatggcttgatc

SEQ ID NO: 142379 - DNA, 25 bp, Artificial
  probe
  misc_feature (1)..(25): SEQ ID NO: 5119; WAN024D3T_at; Start 63; Stop 87
caatcgtatcttgttgggcacggct

SEQ ID NO: 142380 - DNA, 25 bp, Artificial
  probe
  misc_feature (1)..(25): SEQ ID NO: 5119; WAN024D3T_at; Start 220; Stop 244
gtattcagcgttggcatttgcaaaa

SEQ ID NO: 142381 - DNA, 25 bp, Artificial
  probe
  misc_feature (1)..(25): SEQ ID NO: 5119; WAN024D3T_at; Start 241; Stop 265
aaaatgacgcatgagtttgaagagg

SEQ ID NO: 142382 - DNA, 25 bp, Artificial
  probe
  misc_feature (1)..(25): SEQ ID NO: 5119; WAN024D3T_at; Start 33; Stop 57
cagtttcttgaagtttagcaatggc

SEQ ID NO: 142383 - DNA, 25 bp, Artificial
  probe
  misc_feature (1)..(25): SEQ ID NO: 5119; WAN024D3T_at; Start 217; Stop 241
gaagtattcagcgttggcatttgca

SEQ ID NO: 142384 - DNA, 25 bp, Artificial
  probe
  misc_feature (1)..(25): SEQ ID NO: 5119; WAN024D3T_at; Start 177; Stop 201
cctcgttaagtgcttgctctgcaga

SEQ ID NO: 142385 - DNA, 25 bp, Artificial
  probe
  misc_feature (1)..(25): SEQ ID NO: 5119; WAN024D3T_at; Start 15; Stop 39
tgagggtcaagttgttgacagtttc

SEQ ID NO: 142386 - DNA, 25 bp, Artificial
  probe
  misc_feature (1)..(25): SEQ ID NO: 5119; WAN024D3T_at; Start 48; Stop 72
tagcaatggcttgatcaatcgtatc

SEQ ID NO: 142387 - DNA, 25 bp, Artificial
  probe
  misc_feature (1)..(25): SEQ ID NO: 5119; WAN024D3T_at; Start 233; Stop 257
gcatttgcaaaatgacgcatgagtt

SEQ ID NO: 142388 - DNA, 25 bp, Artificial
  probe
  misc_feature (1)..(25): SEQ ID NO: 5119; WAN024D3T_at; Start 22; Stop 46
caagttgttgacagtttcttgaagt

SEQ ID NO: 142389 - DNA, 25 bp, Artificial
  probe
  misc_feature (1)..(25): SEQ ID NO: 5119; WAN024D3T_at; Start 6; Stop 30
cttcaggcgtgagggtcaagttgtt

SEQ ID NO: 142390 - DNA, 25 bp, Artificial
  probe
  misc_feature (1)..(25): SEQ ID NO: 5119; WAN024D3T_at; Start 59; Stop 83
tgatcaatcgtatcttgttgggcac

SEQ ID NO: 142391 - DNA, 25 bp, Artificial
  probe
  misc_feature (1)..(25): SEQ ID NO: 5119; WAN024D3T_at; Start 146; Stop 170
tctgcagtataacggttcaggtctt

SEQ ID NO: 142392 - DNA, 25 bp, Artificial
  probe
  misc_feature (1)..(25): SEQ ID NO: 5119; WAN024D3T_at; Start 150; Stop 174
cagtataacggttcaggtcttttgg

SEQ ID NO: 142393 - DNA, 25 bp, Artificial
  probe
  misc_feature (1)..(25): SEQ ID NO: 5119; WAN024D3T_at; Start 100; Stop 124
gagagagcgaatagctttttcagct

SEQ ID NO: 142394 - DNA, 25 bp, Artificial
  probe
  misc_feature (1)..(25): SEQ ID NO: 5119; WAN024D3T_at; Start 183; Stop 207
taagtgcttgctctgcagattcata

SEQ ID NO: 142395 - DNA, 25 bp, Artificial
  probe
  misc_feature (1)..(25): SEQ ID NO: 4077; WAN024D3U_at; Start 98; Stop 122
tgaagcacactccaacctttagcat

SEQ ID NO: 142396 - DNA, 25 bp, Artificial
  probe
  misc_feature (1)..(25): SEQ ID NO: 4077; WAN024D3U_at; Start 81; Stop 105
gatagtatttatcagcttgaagcac

SEQ ID NO: 142397 - DNA, 25 bp, Artificial
  probe
  misc_feature (1)..(25): SEQ ID NO: 4077; WAN024D3U_at; Start 95; Stop 119
gcttgaagcacactccaacctttag

SEQ ID NO: 142398 - DNA, 25 bp, Artificial
  probe
  misc_feature (1)..(25): SEQ ID NO: 4077; WAN024D3U_at; Start 147; Stop 171
caagtccgatgttgaagatttcagt

SEQ ID NO: 142399 - DNA, 25 bp, Artificial
  probe
  misc_feature (1)..(25): SEQ ID NO: 4077; WAN024D3U_at; Start 122; Stop 146
tctgtcgcatcattggcatattcat

SEQ ID NO: 142400 - DNA, 25 bp, Artificial
  probe
  misc_feature (1)..(25): SEQ ID NO: 4077; WAN024D3U_at; Start 185; Stop 209
taagcagcatacttgtcgataaggg

SEQ ID NO: 142401 - DNA, 25 bp, Artificial
  probe
  misc_feature (1)..(25): SEQ ID NO: 4077; WAN024D3U_at; Start 2; Stop 26
tgcgattttacaatacgagcgaggt

SEQ ID NO: 142402 - DNA, 25 bp, Artificial
  probe
  misc_feature (1)..(25): SEQ ID NO: 4077; WAN024D3U_at; Start 86; Stop 110
tatttatcagcttgaagcacactcc

SEQ ID NO: 142403 - DNA, 25 bp, Artificial
  probe
  misc_feature (1)..(25): SEQ ID NO: 4077; WAN024D3U_at; Start 19; Stop 43
agcgaggtcattggcgtaggcaata

SEQ ID NO: 142404 - DNA, 25 bp, Artificial
  probe
  misc_feature (1)..(25): SEQ ID NO: 4077; WAN024D3U_at; Start 132; Stop 156
cattggcatattcatcaagtccgat

SEQ ID NO: 142405 - DNA, 25 bp, Artificial
  probe
  misc_feature (1)..(25): SEQ ID NO: 4077; WAN024D3U_at; Start 12; Stop 36
caatacgagcgaggtcattggcgta

SEQ ID NO: 142406 - DNA, 25 bp, Artificial
  probe
  misc_feature (1)..(25): SEQ ID NO: 4077; WAN024D3U_at; Start 160; Stop 184
gaagatttcagtctttttcgcgaaa

SEQ ID NO: 142407 - DNA, 25 bp, Artificial
  probe
  misc_feature (1)..(25): SEQ ID NO: 4077; WAN024D3U_at; Start 137; Stop 161
gcatattcatcaagtccgatgttga

SEQ ID NO: 142408 - DNA, 25 bp, Artificial
  probe
  misc_feature (1)..(25): SEQ ID NO: 4077; WAN024D3U_at; Start 63; Stop 87
cagggtagccttcgtttggatagta

SEQ ID NO: 142409 - DNA, 25 bp, Artificial
  probe
  misc_feature (1)..(25): SEQ ID NO: 4077; WAN024D3U_at; Start 10; Stop 34
tacaatacgagcgaggtcattggcg

SEQ ID NO: 142410 - DNA, 25 bp, Artificial
  probe
  misc_feature (1)..(25): SEQ ID NO: 4077; WAN024D3U_at; Start 117; Stop 141
tagcatctgtcgcatcattggcata

SEQ ID NO: 142411 - DNA, 25 bp, Artificial
  probe
  misc_feature (1)..(25): SEQ ID NO: 4077; WAN024D3U_at; Start 204; Stop 228
taagggcttttgtaaaagcgacagc

SEQ ID NO: 142412 - DNA, 25 bp, Artificial
  probe
  misc_feature (1)..(25): SEQ ID NO: 4077; WAN024D3U_at; Start 216; Stop 240
taaaagcgacagcttgttcgttgtc

SEQ ID NO: 142413 - DNA, 25 bp, Artificial
  probe
  misc_feature (1)..(25): SEQ ID NO: 4077; WAN024D3U_at; Start 223; Stop 247
gacagcttgttcgttgtcaagatcg

SEQ ID NO: 142414 - DNA, 25 bp, Artificial
  probe
  misc_feature (1)..(25): SEQ ID NO: 4077; WAN024D3U_at; Start 4; Stop 28
cgattttacaatacgagcgaggtca

SEQ ID NO: 142415 - DNA, 25 bp, Artificial
  probe
  misc_feature (1)..(25): SEQ ID NO: 4077; WAN024D3U_at; Start 233; Stop 257
tcgttgtcaagatcgacagtacggg

SEQ ID NO: 142416 - DNA, 25 bp, Artificial
  probe
  misc_feature (1)..(25): SEQ ID NO: 4077; WAN024D3U_at; Start 52; Stop 76
atagccttttacagggtagccttcg

SEQ ID NO: 142417 - DNA, 25 bp, Artificial
  probe
  misc_feature (1)..(25): SEQ ID NO: 4077; WAN024D3U_at; Start 114; Stop 138
ctttagcatctgtcgcatcattggc

SEQ ID NO: 142418 - DNA, 25 bp, Artificial
  probe
  misc_feature (1)..(25): SEQ ID NO: 4077; WAN024D3U_at; Start 109; Stop 133
ccaacctttagcatctgtcgcatca

SEQ ID NO: 142419 - DNA, 25 bp, Artificial
  probe
  misc_feature (1)..(25): SEQ ID NO: 4077; WAN024D3U_at; Start 27; Stop 51
cattggcgtaggcaataaatttttc

SEQ ID NO: 142420 - DNA, 25 bp, Artificial
  probe
  misc_feature (1)..(25): SEQ ID NO: 4077; WAN024D3U_at; Start 188; Stop 212
gcagcatacttgtcgataagggctt

SEQ ID NO: 142421 - DNA, 25 bp, Artificial
  probe
  misc_feature (1)..(25): SEQ ID NO: 4077; WAN024D3U_at; Start 237; Stop 261
tgtcaagatcgacagtacgggctga

SEQ ID NO: 142422 - DNA, 25 bp, Artificial
  probe
  misc_feature (1)..(25): SEQ ID NO: 4077; WAN024D3U_at; Start 67; Stop 91
gtagccttcgtttggatagtattta

SEQ ID NO: 142423 - DNA, 25 bp, Artificial
  probe
  misc_feature (1)..(25): SEQ ID NO: 4077; WAN024D3U_at; Start 48; Stop 72
tttcatagccttttacagggtagcc

SEQ ID NO: 142424 - DNA, 25 bp, Artificial
  probe
  misc_feature (1)..(25): SEQ ID NO: 4077; WAN024D3U_at; Start 33; Stop 57
cgtaggcaataaatttttcatagcc

SEQ ID NO: 142425 - DNA, 25 bp, Artificial
  probe
  misc_feature (1)..(25): SEQ ID NO: 4077; WAN024D3U_at; Start 172; Stop 196
ctttttcgcgaaataagcagcatac

SEQ ID NO: 142426 - DNA, 25 bp, Artificial
  probe
  misc_feature (1)..(25): SEQ ID NO: 4077; WAN024D3U_at; Start 209; Stop 233
gcttttgtaaaagcgacagcttgtt

SEQ ID NO: 142427 - DNA, 25 bp, Artificial
  probe
  misc_feature (1)..(25): SEQ ID NO: 4077; WAN024D3U_at; Start 192; Stop 216
catacttgtcgataagggcttttgt

SEQ ID NO: 142428 - DNA, 25 bp, Artificial
  probe
  misc_feature (1)..(25): SEQ ID NO: 4077; WAN024D3U_at; Start 177; Stop 201
tcgcgaaataagcagcatacttgtc

SEQ ID NO: 142429 - DNA, 25 bp, Artificial
  probe
  misc_feature (1)..(25): SEQ ID NO: 1864; WAN024D3V_at; Start 292; Stop 316
tctgctttatcactaggagttgaac

SEQ ID NO: 142430 - DNA, 25 bp, Artificial
  probe
  misc_feature (1)..(25): SEQ ID NO: 1864; WAN024D3V_at; Start 339; Stop 363
ttctgtttttggaagactagctacc

SEQ ID NO: 142431 - DNA, 25 bp, Artificial
  probe
  misc_feature (1)..(25): SEQ ID NO: 1864; WAN024D3V_at; Start 79; Stop 103
tcatttacagttgcagcacgttcct

SEQ ID NO: 142432 - DNA, 25 bp, Artificial
  probe
  misc_feature (1)..(25): SEQ ID NO: 1864; WAN024D3V_at; Start 85; Stop 109
acagttgcagcacgttcctttcctg

SEQ ID NO: 142433 - DNA, 25 bp, Artificial
  probe
  misc_feature (1)..(25): SEQ ID NO: 1864; WAN024D3V_at; Start 3; Stop 27
gatttccttgagctgttctggtgag

SEQ ID NO: 142434 - DNA, 25 bp, Artificial
  probe
  misc_feature (1)..(25): SEQ ID NO: 1864; WAN024D3V_at; Start 390; Stop 414
tacagtttttggagcttctggttga

SEQ ID NO: 142435 - DNA, 25 bp, Artificial
  probe
  misc_feature (1)..(25): SEQ ID NO: 1864; WAN024D3V_at; Start 14; Stop 38
gctgttctggtgagaaatatttacg

SEQ ID NO: 142436 - DNA, 25 bp, Artificial
  probe
  misc_feature (1)..(25): SEQ ID NO: 1864; WAN024D3V_at; Start 368; Stop 392
cagtagctggagtttctgtttctac

SEQ ID NO: 142437 - DNA, 25 bp, Artificial
  probe
  misc_feature (1)..(25): SEQ ID NO: 1864; WAN024D3V_at; Start 360; Stop 384
taccttatcagtagctggagtttct

SEQ ID NO: 142438 - DNA, 25 bp, Artificial
  probe
  misc_feature (1)..(25): SEQ ID NO: 1864; WAN024D3V_at; Start 249; Stop 273
tttattagcagtttctttttcagca

SEQ ID NO: 142439 - DNA, 25 bp, Artificial
  probe
  misc_feature (1)..(25): SEQ ID NO: 1864; WAN024D3V_at; Start 39; Stop 63
tccagcatcaatagaaacaattttc

SEQ ID NO: 142440 - DNA, 25 bp, Artificial
  probe
  misc_feature (1)..(25): SEQ ID NO: 1864; WAN024D3V_at; Start 25; Stop 49
gagaaatatttacgtccagcatcaa

SEQ ID NO: 142441 - DNA, 25 bp, Artificial
  probe
  misc_feature (1)..(25): SEQ ID NO: 1864; WAN024D3V_at; Start 266; Stop 290
tttcagcagaagttggagttaccac

SEQ ID NO: 142442 - DNA, 25 bp, Artificial
  probe
  misc_feature (1)..(25): SEQ ID NO: 1864; WAN024D3V_at; Start 190; Stop 214
gactctttagaatcaacctctttcg

SEQ ID NO: 142443 - DNA, 25 bp, Artificial
  probe
  misc_feature (1)..(25): SEQ ID NO: 1864; WAN024D3V_at; Start 153; Stop 177
tttagctggtttatccttgtcagtc

SEQ ID NO: 142444 - DNA, 25 bp, Artificial
  probe
  misc_feature (1)..(25): SEQ ID NO: 1864; WAN024D3V_at; Start 383; Stop 407
ctgtttctacagtttttggagcttc

SEQ ID NO: 142445 - DNA, 25 bp, Artificial
  probe
  misc_feature (1)..(25): SEQ ID NO: 1864; WAN024D3V_at; Start 299; Stop 323
tatcactaggagttgaactaacttc

SEQ ID NO: 142446 - DNA, 25 bp, Artificial
  probe
  misc_feature (1)..(25): SEQ ID NO: 1864; WAN024D3V_at; Start 308; Stop 332
gagttgaactaacttcctcttgtgg

SEQ ID NO: 142447 - DNA, 25 bp, Artificial
  probe
  misc_feature (1)..(25): SEQ ID NO: 1864; WAN024D3V_at; Start 74; Stop 98
gtttttcatttacagttgcagcacg

SEQ ID NO: 142448 - DNA, 25 bp, Artificial
  probe
  misc_feature (1)..(25): SEQ ID NO: 1864; WAN024D3V_at; Start 176; Stop 200
tcttgtctgtatttgactctttaga

SEQ ID NO: 142449 - DNA, 25 bp, Artificial
  probe
  misc_feature (1)..(25): SEQ ID NO: 1864; WAN024D3V_at; Start 35; Stop 59
tacgtccagcatcaatagaaacaat

SEQ ID NO: 142450 - DNA, 25 bp, Artificial
  probe
  misc_feature (1)..(25): SEQ ID NO: 1864; WAN024D3V_at; Start 7; Stop 31
tccttgagctgttctggtgagaaat

SEQ ID NO: 142451 - DNA, 25 bp, Artificial
  probe
  misc_feature (1)..(25): SEQ ID NO: 1864; WAN024D3V_at; Start 199; Stop 223
gaatcaacctctttcgcttcttcct

SEQ ID NO: 142452 - DNA, 25 bp, Artificial
  probe
  misc_feature (1)..(25): SEQ ID NO: 1864; WAN024D3V_at; Start 346; Stop 370
tttggaagactagctaccttatcag

SEQ ID NO: 142453 - DNA, 25 bp, Artificial
  probe
  misc_feature (1)..(25): SEQ ID NO: 1864; WAN024D3V_at; Start 263; Stop 287
ctttttcagcagaagttggagttac

SEQ ID NO: 142454 - DNA, 25 bp, Artificial
  probe
  misc_feature (1)..(25): SEQ ID NO: 1864; WAN024D3V_at; Start 120; Stop 144
cggtttgtcagcctctgctttcgct

SEQ ID NO: 142455 - DNA, 25 bp, Artificial
  probe
  misc_feature (1)..(25): SEQ ID NO: 1864; WAN024D3V_at; Start 349; Stop 373
ggaagactagctaccttatcagtag

SEQ ID NO: 142456 - DNA, 25 bp, Artificial
  probe
  misc_feature (1)..(25): SEQ ID NO: 1864; WAN024D3V_at; Start 136; Stop 160
gctttcgcttcatcttttttagctg

SEQ ID NO: 142457 - DNA, 25 bp, Artificial
  probe
  misc_feature (1)..(25): SEQ ID NO: 1864; WAN024D3V_at; Start 69; Stop 93
cgctagtttttcatttacagttgca

SEQ ID NO: 142458 - DNA, 25 bp, Artificial
  probe
  misc_feature (1)..(25): SEQ ID NO: 1864; WAN024D3V_at; Start 160; Stop 184
ggtttatccttgtcagtcttgtctg

SEQ ID NO: 142459 - DNA, 25 bp, Artificial
  probe
  misc_feature (1)..(25): SEQ ID NO: 1864; WAN024D3V_at; Start 125; Stop 149
tgtcagcctctgctttcgcttcatc

SEQ ID NO: 142460 - DNA, 25 bp, Artificial
  probe
  misc_feature (1)..(25): SEQ ID NO: 1864; WAN024D3V_at; Start 319; Stop 343
acttcctcttgtggtttttcttctg

SEQ ID NO: 142461 - DNA, 25 bp, Artificial
  probe
  misc_feature (1)..(25): SEQ ID NO: 1864; WAN024D3V_at; Start 213; Stop 237
cgcttcttcctttttagggctagct

SEQ ID NO: 142462 - DNA, 25 bp, Artificial
  probe
  misc_feature (1)..(25): SEQ ID NO: 1864; WAN024D3V_at; Start 167; Stop 191
ccttgtcagtcttgtctgtatttga

SEQ ID NO: 142463 - DNA, 25 bp, Artificial
  probe
  misc_feature (1)..(25): SEQ ID NO: 4475; WAN024D3W-3_at; Start 765; Stop 789
caacggtgactggtattatgttata

SEQ ID NO: 142464 - DNA, 25 bp, Artificial
  probe
  misc_feature (1)..(25): SEQ ID NO: 4475; WAN024D3W-3_at; Start 4; Stop 28
tttactctggaccagctcaaacgca

SEQ ID NO: 142465 - DNA, 25 bp, Artificial
  probe
  misc_feature (1)..(25): SEQ ID NO: 4475; WAN024D3W-3_at; Start 2; Stop 26
actttactctggaccagctcaaacg

SEQ ID NO: 142466 - DNA, 25 bp, Artificial
  probe
  misc_feature (1)..(25): SEQ ID NO: 4475; WAN024D3W-3_at; Start 798; Stop 822
caaacaagatgaagcttaccctctt

SEQ ID NO: 142467 - DNA, 25 bp, Artificial
  probe
  misc_feature (1)..(25): SEQ ID NO: 4475; WAN024D3W-3_at; Start 9; Stop 33
tctggaccagctcaaacgcatcgta

SEQ ID NO: 142468 - DNA, 25 bp, Artificial
  probe
  misc_feature (1)..(25): SEQ ID NO: 4475; WAN024D3W-3_at; Start 786; Stop 810
tataggcaatcacaaacaagatgaa

SEQ ID NO: 142469 - DNA, 25 bp, Artificial
  probe
  misc_feature (1)..(25): SEQ ID NO: 4475; WAN024D3W-3_at; Start 784; Stop 808
gttataggcaatcacaaacaagatg

SEQ ID NO: 142470 - DNA, 25 bp, Artificial
  probe
  misc_feature (1)..(25): SEQ ID NO: 4475; WAN024D3W-3_at; Start 774; Stop 798
ctggtattatgttataggcaatcac

SEQ ID NO: 142471 - DNA, 25 bp, Artificial
  probe
  misc_feature (1)..(25): SEQ ID NO: 4475; WAN024D3W-3_at; Start 776; Stop 800
ggtattatgttataggcaatcacaa

SEQ ID NO: 142472 - DNA, 25 bp, Artificial
  probe
  misc_feature (1)..(25): SEQ ID NO: 4475; WAN024D3W-3_at; Start 796; Stop 820
cacaaacaagatgaagcttaccctc

SEQ ID NO: 142473 - DNA, 25 bp, Artificial
  probe
  misc_feature (1)..(25): SEQ ID NO: 4475; WAN024D3W-3_at; Start 843; Stop 867
tggtaaagttccattcaatcaacta

SEQ ID NO: 142474 - DNA, 25 bp, Artificial
  probe
  misc_feature (1)..(25): SEQ ID NO: 4475; WAN024D3W-3_at; Start 829; Stop 853
gcagttgaaaattctggtaaagttc

SEQ ID NO: 142475 - DNA, 25 bp, Artificial
  probe
  misc_feature (1)..(25): SEQ ID NO: 4475; WAN024D3W-3_at; Start 808; Stop 832
gaagcttaccctctttcaaaagcag

SEQ ID NO: 142476 - DNA, 25 bp, Artificial
  probe
  misc_feature (1)..(25): SEQ ID NO: 4475; WAN024D3W-3_at; Start 772; Stop 796
gactggtattatgttataggcaatc

SEQ ID NO: 142477 - DNA, 25 bp, Artificial
  probe
  misc_feature (1)..(25): SEQ ID NO: 4475; WAN024D3W-3_at; Start 824; Stop 848
caaaagcagttgaaaattctggtaa

SEQ ID NO: 142478 - DNA, 25 bp, Artificial
  probe
  misc_feature (1)..(25): SEQ ID NO: 4475; WAN024D3W-3_at; Start 811; Stop 835
gcttaccctctttcaaaagcagttg

SEQ ID NO: 142479 - DNA, 25 bp, Artificial
  probe
  misc_feature (1)..(25): SEQ ID NO: 4475; WAN024D3W-3_at; Start 781; Stop 805
tatgttataggcaatcacaaacaag

SEQ ID NO: 142480 - DNA, 25 bp, Artificial
  probe
  misc_feature (1)..(25): SEQ ID NO: 4475; WAN024D3W-3_at; Start 804; Stop 828
agatgaagcttaccctctttcaaaa

SEQ ID NO: 142481 - DNA, 25 bp, Artificial
  probe
  misc_feature (1)..(25): SEQ ID NO: 4475; WAN024D3W-3_at; Start 822; Stop 846
ttcaaaagcagttgaaaattctggt

SEQ ID NO: 142482 - DNA, 25 bp, Artificial
  probe
  misc_feature (1)..(25): SEQ ID NO: 4475; WAN024D3W-3_at; Start 788; Stop 812
taggcaatcacaaacaagatgaagc

SEQ ID NO: 142483 - DNA, 25 bp, Artificial
  probe
  misc_feature (1)..(25): SEQ ID NO: 4475; WAN024D3W-3_at; Start 5; Stop 29
ttactctggaccagctcaaacgcat

SEQ ID NO: 142484 - DNA, 25 bp, Artificial
  probe
  misc_feature (1)..(25): SEQ ID NO: 4475; WAN024D3W-3_at; Start 792; Stop 816
caatcacaaacaagatgaagcttac

SEQ ID NO: 142485 - DNA, 25 bp, Artificial
  probe
  misc_feature (1)..(25): SEQ ID NO: 4475; WAN024D3W-3_at; Start 778; Stop 802
tattatgttataggcaatcacaaac

SEQ ID NO: 142486 - DNA, 25 bp, Artificial
  probe
  misc_feature (1)..(25): SEQ ID NO: 4475; WAN024D3W-3_at; Start 841; Stop 865
tctggtaaagttccattcaatcaac

SEQ ID NO: 142487 - DNA, 25 bp, Artificial
  probe
  misc_feature (1)..(25): SEQ ID NO: 4475; WAN024D3W-3_at; Start 790; Stop 814
ggcaatcacaaacaagatgaagctt

SEQ ID NO: 142488 - DNA, 25 bp, Artificial
  probe
  misc_feature (1)..(25): SEQ ID NO: 4475; WAN024D3W-3_at; Start 11; Stop 35
tggaccagctcaaacgcatcgtaga

SEQ ID NO: 142489 - DNA, 25 bp, Artificial
  probe
  misc_feature (1)..(25): SEQ ID NO: 4475; WAN024D3W-3_at; Start 835; Stop 859
gaaaattctggtaaagttccattca

SEQ ID NO: 142490 - DNA, 25 bp, Artificial
  probe
  misc_feature (1)..(25): SEQ ID NO: 4475; WAN024D3W-3_at; Start 768; Stop 792
cggtgactggtattatgttataggc

SEQ ID NO: 142491 - DNA, 25 bp, Artificial
  probe
  misc_feature (1)..(25): SEQ ID NO: 4475; WAN024D3W-3_at; Start 7; Stop 31
actctggaccagctcaaacgcatcg

SEQ ID NO: 142492 - DNA, 25 bp, Artificial
  probe
  misc_feature (1)..(25): SEQ ID NO: 4475; WAN024D3W-3_at; Start 800; Stop 824
aacaagatgaagcttaccctctttc

SEQ ID NO: 142493 - DNA, 25 bp, Artificial
  probe
  misc_feature (1)..(25): SEQ ID NO: 4475; WAN024D3W-3_at; Start 795; Stop 819
tcacaaacaagatgaagcttaccct

SEQ ID NO: 142494 - DNA, 25 bp, Artificial
  probe
  misc_feature (1)..(25): SEQ ID NO: 4475; WAN024D3W-3_at; Start 826; Stop 850
aaagcagttgaaaattctggtaaag

SEQ ID NO: 142495 - DNA, 25 bp, Artificial
  probe
  misc_feature (1)..(25): SEQ ID NO: 4475; WAN024D3W-3_at; Start 814; Stop 838
taccctctttcaaaagcagttgaaa

SEQ ID NO: 142496 - DNA, 25 bp, Artificial
  probe
  misc_feature (1)..(25): SEQ ID NO: 4475; WAN024D3W-3_at; Start 802; Stop 826
caagatgaagcttaccctctttcaa

SEQ ID NO: 142497 - DNA, 25 bp, Artificial
  probe
  misc_feature (1)..(25): SEQ ID NO: 5065; WAN024D3W-5_at; Start 23; Stop 47
ataaaataaaggcgttgatttatat

SEQ ID NO: 142498 - DNA, 25 bp, Artificial
  probe
  misc_feature (1)..(25): SEQ ID NO: 5065; WAN024D3W-5_at; Start 6; Stop 30
tctcgttaatataagaaataaaata

SEQ ID NO: 142499 - DNA, 25 bp, Artificial
  probe
  misc_feature (1)..(25): SEQ ID NO: 5065; WAN024D3W-5_at; Start 2; Stop 26
tgactctcgttaatataagaaataa

SEQ ID NO: 142500 - DNA, 25 bp, Artificial
  probe
  misc_feature (1)..(25): SEQ ID NO: 5065; WAN024D3W-5_at; Start 1; Stop 25
ttgactctcgttaatataagaaata

SEQ ID NO: 142501 - DNA, 25 bp, Artificial
  probe
  misc_feature (1)..(25): SEQ ID NO: 5065; WAN024D3W-5_at; Start 27; Stop 51
aataaaggcgttgatttatataatc

SEQ ID NO: 142502 - DNA, 25 bp, Artificial
  probe
  misc_feature (1)..(25): SEQ ID NO: 5065; WAN024D3W-5_at; Start 24; Stop 48
taaaataaaggcgttgatttatata

SEQ ID NO: 142503 - DNA, 25 bp, Artificial
  probe
  misc_feature (1)..(25): SEQ ID NO: 5065; WAN024D3W-5_at; Start 5; Stop 29
ctctcgttaatataagaaataaaat

SEQ ID NO: 142504 - DNA, 25 bp, Artificial
  probe
  misc_feature (1)..(25): SEQ ID NO: 5065; WAN024D3W-5_at; Start 26; Stop 50
aaataaaggcgttgatttatataat

SEQ ID NO: 142505 - DNA, 25 bp, Artificial
  probe
  misc_feature (1)..(25): SEQ ID NO: 5065; WAN024D3W-5_at; Start 3; Stop 27
gactctcgttaatataagaaataaa

SEQ ID NO: 142506 - DNA, 25 bp, Artificial
  probe
  misc_feature (1)..(25): SEQ ID NO: 810; WAN024D3X_at; Start 413; Stop 437
gccaaaaattgacccagtctcatta

SEQ ID NO: 142507 - DNA, 25 bp, Artificial
  probe
  misc_feature (1)..(25): SEQ ID NO: 810; WAN024D3X_at; Start 511; Stop 535
aattatgattttctaaagaagagcc

SEQ ID NO: 142508 - DNA, 25 bp, Artificial
  probe
  misc_feature (1)..(25): SEQ ID NO: 810; WAN024D3X_at; Start 462; Stop 486
tatccctaccaagaatgaagaagtg

SEQ ID NO: 142509 - DNA, 25 bp, Artificial
  probe
  misc_feature (1)..(25): SEQ ID NO: 810; WAN024D3X_at; Start 438; Stop 462
tatcttggcggaagaagttcattct

SEQ ID NO: 142510 - DNA, 25 bp, Artificial
  probe
  misc_feature (1)..(25): SEQ ID NO: 810; WAN024D3X_at; Start 405; Stop 429
caaatatagccaaaaattgacccag

SEQ ID NO: 142511 - DNA, 25 bp, Artificial
  probe
  misc_feature (1)..(25): SEQ ID NO: 810; WAN024D3X_at; Start 520; Stop 544
tttctaaagaagagccaaatctaca

SEQ ID NO: 142512 - DNA, 25 bp, Artificial
  probe
  misc_feature (1)..(25): SEQ ID NO: 810; WAN024D3X_at; Start 451; Stop 475
gaagttcattctatccctaccaaga

SEQ ID NO: 142513 - DNA, 25 bp, Artificial
  probe
  misc_feature (1)..(25): SEQ ID NO: 810; WAN024D3X_at; Start 231; Stop 255
gagctatgcggaggtggcgcgtgaa

SEQ ID NO: 142514 - DNA, 25 bp, Artificial
  probe
  misc_feature (1)..(25): SEQ ID NO: 810; WAN024D3X_at; Start 216; Stop 240
taaaaaagaaggaaagagctatgcg

SEQ ID NO: 142515 - DNA, 25 bp, Artificial
  probe
  misc_feature (1)..(25): SEQ ID NO: 810; WAN024D3X_at; Start 481; Stop 505
gaagtgtcagcacctgctccaaaga

SEQ ID NO: 142516 - DNA, 25 bp, Artificial
  probe
  misc_feature (1)..(25): SEQ ID NO: 810; WAN024D3X_at; Start 559; Stop 583
caaacagaacaagaacgtcgggttg

SEQ ID NO: 142517 - DNA, 25 bp, Artificial
  probe
  misc_feature (1)..(25): SEQ ID NO: 810; WAN024D3X_at; Start 160; Stop 184
ccagtaaaaccgattgaaaagcaag

SEQ ID NO: 142518 - DNA, 25 bp, Artificial
  probe
  misc_feature (1)..(25): SEQ ID NO: 810; WAN024D3X_at; Start 66; Stop 90
gaatctctatgatgagtctgatctg

SEQ ID NO: 142519 - DNA, 25 bp, Artificial
  probe
  misc_feature (1)..(25): SEQ ID NO: 810; WAN024D3X_at; Start 568; Stop 592
caagaacgtcgggttgcccaagagt

SEQ ID NO: 142520 - DNA, 25 bp, Artificial
  probe
  misc_feature (1)..(25): SEQ ID NO: 810; WAN024D3X_at; Start 318; Stop 342
tgcgagacgtcattctcagcccagt

SEQ ID NO: 142521 - DNA, 25 bp, Artificial
  probe
  misc_feature (1)..(25): SEQ ID NO: 810; WAN024D3X_at; Start 122; Stop 146
aaaattatttagaatgggctcctat

SEQ ID NO: 142522 - DNA, 25 bp, Artificial
  probe
  misc_feature (1)..(25): SEQ ID NO: 810; WAN024D3X_at; Start 82; Stop 106
tctgatctgatcagtaatatcaagg

SEQ ID NO: 142523 - DNA, 25 bp, Artificial
  probe
  misc_feature (1)..(25): SEQ ID NO: 810; WAN024D3X_at; Start 306; Stop 330
ggatttcagccttgcgagacgtcat

SEQ ID NO: 142524 - DNA, 25 bp, Artificial
  probe
  misc_feature (1)..(25): SEQ ID NO: 810; WAN024D3X_at; Start 493; Stop 517
cctgctccaaagaaaaacaattatg

SEQ ID NO: 142525 - DNA, 25 bp, Artificial
  probe
  misc_feature (1)..(25): SEQ ID NO: 810; WAN024D3X_at; Start 470; Stop 494
ccaagaatgaagaagtgtcagcacc

SEQ ID NO: 142526 - DNA, 25 bp, Artificial
  probe
  misc_feature (1)..(25): SEQ ID NO: 810; WAN024D3X_at; Start 19; Stop 43
ccattggtgtcagatgacgaggtca

SEQ ID NO: 142527 - DNA, 25 bp, Artificial
  probe
  misc_feature (1)..(25): SEQ ID NO: 810; WAN024D3X_at; Start 92; Stop 116
tcagtaatatcaagggtgagtatcg

SEQ ID NO: 142528 - DNA, 25 bp, Artificial
  probe
  misc_feature (1)..(25): SEQ ID NO: 810; WAN024D3X_at; Start 101; Stop 125
tcaagggtgagtatcgagataaaaa

SEQ ID NO: 142529 - DNA, 25 bp, Artificial
  probe
  misc_feature (1)..(25): SEQ ID NO: 810; WAN024D3X_at; Start 427; Stop 451
cagtctcattatatcttggcggaag

SEQ ID NO: 142530 - DNA, 25 bp, Artificial
  probe
  misc_feature (1)..(25): SEQ ID NO: 810; WAN024D3X_at; Start 582; Stop 606
tgcccaagagttgaatctgaccaga

SEQ ID NO: 142531 - DNA, 25 bp, Artificial
  probe
  misc_feature (1)..(25): SEQ ID NO: 810; WAN024D3X_at; Start 299; Stop 323
taactcaggatttcagccttgcgag

SEQ ID NO: 142532 - DNA, 25 bp, Artificial
  probe
  misc_feature (1)..(25): SEQ ID NO: 810; WAN024D3X_at; Start 36; Stop 60
cgaggtcatgttgactgaaatgcca

SEQ ID NO: 142533 - DNA, 25 bp, Artificial
  probe
  misc_feature (1)..(25): SEQ ID NO: 810; WAN024D3X_at; Start 593; Stop 617
tgaatctgaccagaatgacagaata

SEQ ID NO: 142534 - DNA, 25 bp, Artificial
  probe
  misc_feature (1)..(25): SEQ ID NO: 810; WAN024D3X_at; Start 384; Stop 408
ggaaaatcctggtgaatttgtcaaa

SEQ ID NO: 142535 - DNA, 25 bp, Artificial
  probe
  misc_feature (1)..(25): SEQ ID NO: 810; WAN024D3X_at; Start 52; Stop 76
gaaatgccagtcatgaatctctatg

SEQ ID NO: 142536 - DNA, 25 bp, Artificial
  probe
  misc_feature (1)..(25): SEQ ID NO: 810; WAN024D3X_at; Start 3; Stop 27
gaaacaagaacgatttccattggtg

SEQ ID NO: 142537 - DNA, 25 bp, Artificial
  probe
  misc_feature (1)..(25): SEQ ID NO: 810; WAN024D3X_at; Start 270; Stop 294
cttgaaaaagaaacgctctgctaac

SEQ ID NO: 142538 - DNA, 25 bp, Artificial
  probe
  misc_feature (1)..(25): SEQ ID NO: 810; WAN024D3X_at; Start 342; Stop 366
tctagttagacagggcaatcaaccg

SEQ ID NO: 142539 - DNA, 25 bp, Artificial
  probe
  misc_feature (1)..(25): SEQ ID NO: 810; WAN024D3X_at; Start 328; Stop 352
cattctcagcccagtctagttagac

SEQ ID NO: 142540 - DNA, 25 bp, Artificial
  probe
  misc_feature (1)..(25): SEQ ID NO: 3190; WAN024D3Y-3_at; Start 745; Stop 769
caacggtgactggtactacattctt

SEQ ID NO: 142541 - DNA, 25 bp, Artificial
  probe
  misc_feature (1)..(25): SEQ ID NO: 3190; WAN024D3Y-3_at; Start 820; Stop 844
tactggaaaaacaccattcaatcaa

SEQ ID NO: 142542 - DNA, 25 bp, Artificial
  probe
  misc_feature (1)..(25): SEQ ID NO: 3190; WAN024D3Y-3_at; Start 802; Stop 826
caagaaagctattgagaatactgga

SEQ ID NO: 142543 - DNA, 25 bp, Artificial
  probe
  misc_feature (1)..(25): SEQ ID NO: 3190; WAN024D3Y-3_at; Start 782; Stop 806
gaagatggtggtggtttcctcaaga

SEQ ID NO: 142544 - DNA, 25 bp, Artificial
  probe
  misc_feature (1)..(25): SEQ ID NO: 3190; WAN024D3Y-3_at; Start 747; Stop 771
acggtgactggtactacattcttgg

SEQ ID NO: 142545 - DNA, 25 bp, Artificial
  probe
  misc_feature (1)..(25): SEQ ID NO: 3190; WAN024D3Y-3_at; Start 752; Stop 776
gactggtactacattcttggtcaaa

SEQ ID NO: 142546 - DNA, 25 bp, Artificial
  probe
  misc_feature (1)..(25): SEQ ID NO: 3190; WAN024D3Y-3_at; Start 780; Stop 804
cagaagatggtggtggtttcctcaa

SEQ ID NO: 142547 - DNA, 25 bp, Artificial
  probe
  misc_feature (1)..(25): SEQ ID NO: 3190; WAN024D3Y-3_at; Start 767; Stop 791
cttggtcaaaaaccagaagatggtg

SEQ ID NO: 142548 - DNA, 25 bp, Artificial
  probe
  misc_feature (1)..(25): SEQ ID NO: 3190; WAN024D3Y-3_at; Start 783; Stop 807
aagatggtggtggtttcctcaagaa

SEQ ID NO: 142549 - DNA, 25 bp, Artificial
  probe
  misc_feature (1)..(25): SEQ ID NO: 3190; WAN024D3Y-3_at; Start 753; Stop 777
actggtactacattcttggtcaaaa

SEQ ID NO: 142550 - DNA, 25 bp, Artificial
  probe
  misc_feature (1)..(25): SEQ ID NO: 3190; WAN024D3Y-3_at; Start 813; Stop 837
ttgagaatactggaaaaacaccatt

SEQ ID NO: 142551 - DNA, 25 bp, Artificial
  probe
  misc_feature (1)..(25): SEQ ID NO: 3190; WAN024D3Y-3_at; Start 763; Stop 787
cattcttggtcaaaaaccagaagat

SEQ ID NO: 142552 - DNA, 25 bp, Artificial
  probe
  misc_feature (1)..(25): SEQ ID NO: 3190; WAN024D3Y-3_at; Start 749; Stop 773
ggtgactggtactacattcttggtc

SEQ ID NO: 142553 - DNA, 25 bp, Artificial
  probe
  misc_feature (1)..(25): SEQ ID NO: 3190; WAN024D3Y-3_at; Start 817; Stop 841
gaatactggaaaaacaccattcaat

SEQ ID NO: 142554 - DNA, 25 bp, Artificial
  probe
  misc_feature (1)..(25): SEQ ID NO: 3190; WAN024D3Y-3_at; Start 769; Stop 793
tggtcaaaaaccagaagatggtggt

SEQ ID NO: 142555 - DNA, 25 bp, Artificial
  probe
  misc_feature (1)..(25): SEQ ID NO: 3190; WAN024D3Y-3_at; Start 794; Stop 818
ggtttcctcaagaaagctattgaga

SEQ ID NO: 142556 - DNA, 25 bp, Artificial
  probe
  misc_feature (1)..(25): SEQ ID NO: 3190; WAN024D3Y-3_at; Start 758; Stop 782
tactacattcttggtcaaaaaccag

SEQ ID NO: 142557 - DNA, 25 bp, Artificial
  probe
  misc_feature (1)..(25): SEQ ID NO: 3190; WAN024D3Y-3_at; Start 811; Stop 835
tattgagaatactggaaaaacacca

SEQ ID NO: 142558 - DNA, 25 bp, Artificial
  probe
  misc_feature (1)..(25): SEQ ID NO: 3190; WAN024D3Y-3_at; Start 765; Stop 789
ttcttggtcaaaaaccagaagatgg

SEQ ID NO: 142559 - DNA, 25 bp, Artificial
  probe
  misc_feature (1)..(25): SEQ ID NO: 3190; WAN024D3Y-3_at; Start 798; Stop 822
tcctcaagaaagctattgagaatac

SEQ ID NO: 142560 - DNA, 25 bp, Artificial
  probe
  misc_feature (1)..(25): SEQ ID NO: 3190; WAN024D3Y-3_at; Start 784; Stop 808
agatggtggtggtttcctcaagaaa

SEQ ID NO: 142561 - DNA, 25 bp, Artificial
  probe
  misc_feature (1)..(25): SEQ ID NO: 3190; WAN024D3Y-3_at; Start 791; Stop 815
ggtggtttcctcaagaaagctattg

SEQ ID NO: 142562 - DNA, 25 bp, Artificial
  probe
  misc_feature (1)..(25): SEQ ID NO: 3190; WAN024D3Y-3_at; Start 789; Stop 813
gtggtggtttcctcaagaaagctat

SEQ ID NO: 142563 - DNA, 25 bp, Artificial
  probe
  misc_feature (1)..(25): SEQ ID NO: 3190; WAN024D3Y-3_at; Start 772; Stop 796
tcaaaaaccagaagatggtggtggt

SEQ ID NO: 142564 - DNA, 25 bp, Artificial
  probe
  misc_feature (1)..(25): SEQ ID NO: 3190; WAN024D3Y-3_at; Start 805; Stop 829
gaaagctattgagaatactggaaaa

SEQ ID NO: 142565 - DNA, 25 bp, Artificial
  probe
  misc_feature (1)..(25): SEQ ID NO: 3190; WAN024D3Y-3_at; Start 823; Stop 847
tggaaaaacaccattcaatcaacta

SEQ ID NO: 142566 - DNA, 25 bp, Artificial
  probe
  misc_feature (1)..(25): SEQ ID NO: 3190; WAN024D3Y-3_at; Start 785; Stop 809
gatggtggtggtttcctcaagaaag

SEQ ID NO: 142567 - DNA, 25 bp, Artificial
  probe
  misc_feature (1)..(25): SEQ ID NO: 3190; WAN024D3Y-3_at; Start 779; Stop 803
ccagaagatggtggtggtttcctca

SEQ ID NO: 142568 - DNA, 25 bp, Artificial
  probe
  misc_feature (1)..(25): SEQ ID NO: 3190; WAN024D3Y-3_at; Start 809; Stop 833
gctattgagaatactggaaaaacac

SEQ ID NO: 142569 - DNA, 25 bp, Artificial
  probe
  misc_feature (1)..(25): SEQ ID NO: 3190; WAN024D3Y-3_at; Start 787; Stop 811
tggtggtggtttcctcaagaaagct

SEQ ID NO: 142570 - DNA, 25 bp, Artificial
  probe
  misc_feature (1)..(25): SEQ ID NO: 3190; WAN024D3Y-3_at; Start 755; Stop 779
tggtactacattcttggtcaaaaac

SEQ ID NO: 142571 - DNA, 25 bp, Artificial
  probe
  misc_feature (1)..(25): SEQ ID NO: 3190; WAN024D3Y-3_at; Start 761; Stop 785
tacattcttggtcaaaaaccagaag

SEQ ID NO: 142572 - DNA, 25 bp, Artificial
  probe
  misc_feature (1)..(25): SEQ ID NO: 3190; WAN024D3Y-3_at; Start 788; Stop 812
ggtggtggtttcctcaagaaagcta

SEQ ID NO: 142573 - DNA, 25 bp, Artificial
  probe
  misc_feature (1)..(25): SEQ ID NO: 3190; WAN024D3Y-3_at; Start 815; Stop 839
gagaatactggaaaaacaccattca

SEQ ID NO: 142574 - DNA, 25 bp, Artificial
  probe
  misc_feature (1)..(25): SEQ ID NO: 5256; WAN024D3Y-5_at; Start 1963; Stop 1987
gatgctggacgcaaatactttactc

SEQ ID NO: 142575 - DNA, 25 bp, Artificial
  probe
  misc_feature (1)..(25): SEQ ID NO: 5256; WAN024D3Y-5_at; Start 1973; Stop 1997
gcaaatactttactctgaaccagct

SEQ ID NO: 142576 - DNA, 25 bp, Artificial
  probe
  misc_feature (1)..(25): SEQ ID NO: 5256; WAN024D3Y-5_at; Start 1972; Stop 1996
cgcaaatactttactctgaaccagc

SEQ ID NO: 142577 - DNA, 25 bp, Artificial
  probe
  misc_feature (1)..(25): SEQ ID NO: 5256; WAN024D3Y-5_at; Start 1971; Stop 1995
acgcaaatactttactctgaaccag

SEQ ID NO: 142578 - DNA, 25 bp, Artificial
  probe
  misc_feature (1)..(25): SEQ ID NO: 5256; WAN024D3Y-5_at; Start 1965; Stop 1989
tgctggacgcaaatactttactctg

SEQ ID NO: 142579 - DNA, 25 bp, Artificial
  probe
  misc_feature (1)..(25): SEQ ID NO: 5256; WAN024D3Y-5_at; Start 1968; Stop 1992
tggacgcaaatactttactctgaac

SEQ ID NO: 142580 - DNA, 25 bp, Artificial
  probe
  misc_feature (1)..(25): SEQ ID NO: 5256; WAN024D3Y-5_at; Start 1964; Stop 1988
atgctggacgcaaatactttactct

SEQ ID NO: 142581 - DNA, 25 bp, Artificial
  probe
  misc_feature (1)..(25): SEQ ID NO: 5256; WAN024D3Y-5_at; Start 1969; Stop 1993
ggacgcaaatactttactctgaacc

SEQ ID NO: 142582 - DNA, 25 bp, Artificial
  probe
  misc_feature (1)..(25): SEQ ID NO: 5256; WAN024D3Y-5_at; Start 1967; Stop 1991
ctggacgcaaatactttactctgaa

SEQ ID NO: 142583 - DNA, 25 bp, Artificial
  probe
  misc_feature (1)..(25): SEQ ID NO: 5256; WAN024D3Y-5_at; Start 1966; Stop 1990
gctggacgcaaatactttactctga

SEQ ID NO: 142584 - DNA, 25 bp, Artificial
  probe
  misc_feature (1)..(25): SEQ ID NO: 5256; WAN024D3Y-5_at; Start 1970; Stop 1994
gacgcaaatactttactctgaacca

SEQ ID NO: 142585 - DNA, 25 bp, Artificial
  probe
  misc_feature (1)..(25): SEQ ID NO: 1983; WAN024D3Z_at; Start 408; Stop 432
caaggttgcggacatcaatctggat

SEQ ID NO: 142586 - DNA, 25 bp, Artificial
  probe
  misc_feature (1)..(25): SEQ ID NO: 1983; WAN024D3Z_at; Start 379; Stop 403
gggctcttgcccagtgagattttag

SEQ ID NO: 142587 - DNA, 25 bp, Artificial
  probe
  misc_feature (1)..(25): SEQ ID NO: 1983; WAN024D3Z_at; Start 182; Stop 206
agcgaaagatttcggcctgtaacca

SEQ ID NO: 142588 - DNA, 25 bp, Artificial
  probe
  misc_feature (1)..(25): SEQ ID NO: 1983; WAN024D3Z_at; Start 637; Stop 661
cgtgaacagtttattctaagacaaa

SEQ ID NO: 142589 - DNA, 25 bp, Artificial
  probe
  misc_feature (1)..(25): SEQ ID NO: 1983; WAN024D3Z_at; Start 124; Stop 148
gagaccagtctcaagatttaccaag

SEQ ID NO: 142590 - DNA, 25 bp, Artificial
  probe
  misc_feature (1)..(25): SEQ ID NO: 1983; WAN024D3Z_at; Start 71; Stop 95
cctataagtatgatttggagcaatt

SEQ ID NO: 142591 - DNA, 25 bp, Artificial
  probe
  misc_feature (1)..(25): SEQ ID NO: 1983; WAN024D3Z_at; Start 580; Stop 604
cagttagaatcttttgtcaaggaga

SEQ ID NO: 142592 - DNA, 25 bp, Artificial
  probe
  misc_feature (1)..(25): SEQ ID NO: 1983; WAN024D3Z_at; Start 607; Stop 631
ggttttccatccttatcagctcaag

SEQ ID NO: 142593 - DNA, 25 bp, Artificial
  probe
  misc_feature (1)..(25): SEQ ID NO: 1983; WAN024D3Z_at; Start 652; Stop 676
ctaagacaaatagaaaacaaggtcg

SEQ ID NO: 142594 - DNA, 25 bp, Artificial
  probe
  misc_feature (1)..(25): SEQ ID NO: 1983; WAN024D3Z_at; Start 449; Stop 473
tcagcaaggcttcccaacagaggat

SEQ ID NO: 142595 - DNA, 25 bp, Artificial
  probe
  misc_feature (1)..(25): SEQ ID NO: 1983; WAN024D3Z_at; Start 497; Stop 521
tttcagaattggaacccttgatggg

SEQ ID NO: 142596 - DNA, 25 bp, Artificial
  probe
  misc_feature (1)..(25): SEQ ID NO: 1983; WAN024D3Z_at; Start 91; Stop 115
caatttttagacatggtaggtgagc

SEQ ID NO: 142597 - DNA, 25 bp, Artificial
  probe
  misc_feature (1)..(25): SEQ ID NO: 1983; WAN024D3Z_at; Start 223; Stop 247
tatcaaaaaggagaggtggacagct

SEQ ID NO: 142598 - DNA, 25 bp, Artificial
  probe
  misc_feature (1)..(25): SEQ ID NO: 1983; WAN024D3Z_at; Start 564; Stop 588
tcagtgggcctttcgtcagttagaa

SEQ ID NO: 142599 - DNA, 25 bp, Artificial
  probe
  misc_feature (1)..(25): SEQ ID NO: 1983; WAN024D3Z_at; Start 274; Stop 298
gctgaaaagaagacggaaaagccag

SEQ ID NO: 142600 - DNA, 25 bp, Artificial
  probe
  misc_feature (1)..(25): SEQ ID NO: 1983; WAN024D3Z_at; Start 155; Stop 179
tagccaatctaaaaatcagcgccca

SEQ ID NO: 142601 - DNA, 25 bp, Artificial
  probe
  misc_feature (1)..(25): SEQ ID NO: 1983; WAN024D3Z_at; Start 489; Stop 513
ggccttgctttcagaattggaaccc

SEQ ID NO: 142602 - DNA, 25 bp, Artificial
  probe
  misc_feature (1)..(25): SEQ ID NO: 1983; WAN024D3Z_at; Start 343; Stop 367
gagggccgcttgctagcgctcttaa

SEQ ID NO: 142603 - DNA, 25 bp, Artificial
  probe
  misc_feature (1)..(25): SEQ ID NO: 1983; WAN024D3Z_at; Start 305; Stop 329
tatacctagactctttttggcagga

SEQ ID NO: 142604 - DNA, 25 bp, Artificial
  probe
  misc_feature (1)..(25): SEQ ID NO: 1983; WAN024D3Z_at; Start 289; Stop 313
gaaaagccagagattctatacctag

SEQ ID NO: 142605 - DNA, 25 bp, Artificial
  probe
  misc_feature (1)..(25): SEQ ID NO: 1983; WAN024D3Z_at; Start 669; Stop 693
caaggtcgatttgtacgaaattgca

SEQ ID NO: 142606 - DNA, 25 bp, Artificial
  probe
  misc_feature (1)..(25): SEQ ID NO: 1983; WAN024D3Z_at; Start 622; Stop 646
tcagctcaagtcttacgtgaacagt

SEQ ID NO: 142607 - DNA, 25 bp, Artificial
  probe
  misc_feature (1)..(25): SEQ ID NO: 1983; WAN024D3Z_at; Start 549; Stop 573
gaaaccctattctcgtcagtgggcc

SEQ ID NO: 142608 - DNA, 25 bp, Artificial
  probe
  misc_feature (1)..(25): SEQ ID NO: 1983; WAN024D3Z_at; Start 356; Stop 380
tagcgctcttaatcctagaaatggg

SEQ ID NO: 142609 - DNA, 25 bp, Artificial
  probe
  misc_feature (1)..(25): SEQ ID NO: 1983; WAN024D3Z_at; Start 396; Stop 420
gattttagccatcaaggttgcggac

SEQ ID NO: 142610 - DNA, 25 bp, Artificial
  probe
  misc_feature (1)..(25): SEQ ID NO: 1983; WAN024D3Z_at; Start 319; Stop 343
ttttggcaggaaagcgaccatccag

SEQ ID NO: 142611 - DNA, 25 bp, Artificial
  probe
  misc_feature (1)..(25): SEQ ID NO: 1983; WAN024D3Z_at; Start 594; Stop 618
tgtcaaggagaaaggttttccatcc

SEQ ID NO: 142612 - DNA, 25 bp, Artificial
  probe
  misc_feature (1)..(25): SEQ ID NO: 1983; WAN024D3Z_at; Start 170; Stop 194
tcagcgcccagaagcgaaagatttc

SEQ ID NO: 142613 - DNA, 25 bp, Artificial
  probe
  misc_feature (1)..(25): SEQ ID NO: 1983; WAN024D3Z_at; Start 713; Stop 737
cagtcctgaccttagaaaaatatag

SEQ ID NO: 142614 - DNA, 25 bp, Artificial
  probe
  misc_feature (1)..(25): SEQ ID NO: 1983; WAN024D3Z_at; Start 237; Stop 261
ggtggacagcttttaccgcttggaa

SEQ ID NO: 142615 - DNA, 25 bp, Artificial
  probe
  misc_feature (1)..(25): SEQ ID NO: 1983; WAN024D3Z_at; Start 140; Stop 164
tttaccaagcccagctagccaatct

SEQ ID NO: 142616 - DNA, 25 bp, Artificial
  probe
  misc_feature (1)..(25): SEQ ID NO: 1983; WAN024D3Z_at; Start 107; Stop 131
taggtgagcggatttctgagaccag

SEQ ID NO: 142617 - DNA, 25 bp, Artificial
  probe
  misc_feature (1)..(25): SEQ ID NO: 1983; WAN024D3Z_at; Start 54; Stop 78
tgtcaattccaagcagtcctataag

SEQ ID NO: 142618 - DNA, 25 bp, Artificial
  probe
  misc_feature (1)..(25): SEQ ID NO: 1983; WAN024D3Z_at; Start 463; Stop 487
caacagaggattgtcaccattccca

SEQ ID NO: 142619 - DNA, 25 bp, Artificial
  probe
  misc_feature (1)..(25): SEQ ID NO: 841; WAN024D42_at; Start 74; Stop 98
gctttgagctgacttgttccaacta

SEQ ID NO: 142620 - DNA, 25 bp, Artificial
  probe
  misc_feature (1)..(25): SEQ ID NO: 841; WAN024D42_at; Start 89; Stop 113
gttccaactacatgattcaggctat

SEQ ID NO: 142621 - DNA, 25 bp, Artificial
  probe
  misc_feature (1)..(25): SEQ ID NO: 841; WAN024D42_at; Start 146; Stop 170
gcttggctcggattttacgttgtca

SEQ ID NO: 142622 - DNA, 25 bp, Artificial
  probe
  misc_feature (1)..(25): SEQ ID NO: 841; WAN024D42_at; Start 63; Stop 87
accctcttgtcgctttgagctgact

SEQ ID NO: 142623 - DNA, 25 bp, Artificial
  probe
  misc_feature (1)..(25): SEQ ID NO: 841; WAN024D42_at; Start 145; Stop 169
ggcttggctcggattttacgttgtc

SEQ ID NO: 142624 - DNA, 25 bp, Artificial
  probe
  misc_feature (1)..(25): SEQ ID NO: 841; WAN024D42_at; Start 162; Stop 186
acgttgtcatccctggtcgaaaaca

SEQ ID NO: 142625 - DNA, 25 bp, Artificial
  probe
  misc_feature (1)..(25): SEQ ID NO: 841; WAN024D42_at; Start 33; Stop 57
ttaccaacgttttatctcaccagtc

SEQ ID NO: 142626 - DNA, 25 bp, Artificial
  probe
  misc_feature (1)..(25): SEQ ID NO: 841; WAN024D42_at; Start 166; Stop 190
tgtcatccctggtcgaaaacaggta

SEQ ID NO: 142627 - DNA, 25 bp, Artificial
  probe
  misc_feature (1)..(25): SEQ ID NO: 841; WAN024D42_at; Start 158; Stop 182
ttttacgttgtcatccctggtcgaa

SEQ ID NO: 142628 - DNA, 25 bp, Artificial
  probe
  misc_feature (1)..(25): SEQ ID NO: 841; WAN024D42_at; Start 86; Stop 110
cttgttccaactacatgattcaggc

SEQ ID NO: 142629 - DNA, 25 bp, Artificial
  probe
  misc_feature (1)..(25): SEQ ID NO: 841; WAN024D42_at; Start 153; Stop 177
tcggattttacgttgtcatccctgg

SEQ ID NO: 142630 - DNA, 25 bp, Artificial
  probe
  misc_feature (1)..(25): SEQ ID NO: 841; WAN024D42_at; Start 95; Stop 119
actacatgattcaggctattgaaaa

SEQ ID NO: 142631 - DNA, 25 bp, Artificial
  probe
  misc_feature (1)..(25): SEQ ID NO: 841; WAN024D42_at; Start 136; Stop 160
gtattgatgggcttggctcggattt

SEQ ID NO: 142632 - DNA, 25 bp, Artificial
  probe
  misc_feature (1)..(25): SEQ ID NO: 841; WAN024D42_at; Start 71; Stop 95
gtcgctttgagctgacttgttccaa

SEQ ID NO: 142633 - DNA, 25 bp, Artificial
  probe
  misc_feature (1)..(25): SEQ ID NO: 841; WAN024D42_at; Start 24; Stop 48
tgtgcgcttttaccaacgttttatc

SEQ ID NO: 142634 - DNA, 25 bp, Artificial
  probe
  misc_feature (1)..(25): SEQ ID NO: 841; WAN024D42_at; Start 76; Stop 100
tttgagctgacttgttccaactaca

SEQ ID NO: 142635 - DNA, 25 bp, Artificial
  probe
  misc_feature (1)..(25): SEQ ID NO: 841; WAN024D42_at; Start 141; Stop 165
gatgggcttggctcggattttacgt

SEQ ID NO: 142636 - DNA, 25 bp, Artificial
  probe
  misc_feature (1)..(25): SEQ ID NO: 841; WAN024D42_at; Start 156; Stop 180
gattttacgttgtcatccctggtcg

SEQ ID NO: 142637 - DNA, 25 bp, Artificial
  probe
  misc_feature (1)..(25): SEQ ID NO: 841; WAN024D42_at; Start 58; Stop 82
tttccaccctcttgtcgctttgagc

SEQ ID NO: 142638 - DNA, 25 bp, Artificial
  probe
  misc_feature (1)..(25): SEQ ID NO: 841; WAN024D42_at; Start 169; Stop 193
catccctggtcgaaaacaggtaagg

SEQ ID NO: 142639 - DNA, 25 bp, Artificial
  probe
  misc_feature (1)..(25): SEQ ID NO: 841; WAN024D42_at; Start 168; Stop 192
tcatccctggtcgaaaacaggtaag

SEQ ID NO: 142640 - DNA, 25 bp, Artificial
  probe
  misc_feature (1)..(25): SEQ ID NO: 841; WAN024D42_at; Start 37; Stop 61
caacgttttatctcaccagtctttc

SEQ ID NO: 142641 - DNA, 25 bp, Artificial
  probe
  misc_feature (1)..(25): SEQ ID NO: 841; WAN024D42_at; Start 160; Stop 184
ttacgttgtcatccctggtcgaaaa

SEQ ID NO: 142642 - DNA, 25 bp, Artificial
  probe
  misc_feature (1)..(25): SEQ ID NO: 841; WAN024D42_at; Start 150; Stop 174
ggctcggattttacgttgtcatccc

SEQ ID NO: 142643 - DNA, 25 bp, Artificial
  probe
  misc_feature (1)..(25): SEQ ID NO: 841; WAN024D42_at; Start 65; Stop 89
cctcttgtcgctttgagctgacttg

SEQ ID NO: 142644 - DNA, 25 bp, Artificial
  probe
  misc_feature (1)..(25): SEQ ID NO: 841; WAN024D42_at; Start 40; Stop 64
cgttttatctcaccagtctttccac

SEQ ID NO: 142645 - DNA, 25 bp, Artificial
  probe
  misc_feature (1)..(25): SEQ ID NO: 841; WAN024D42_at; Start 61; Stop 85
ccaccctcttgtcgctttgagctga

SEQ ID NO: 142646 - DNA, 25 bp, Artificial
  probe
  misc_feature (1)..(25): SEQ ID NO: 841; WAN024D42_at; Start 79; Stop 103
gagctgacttgttccaactacatga

SEQ ID NO: 142647 - DNA, 25 bp, Artificial
  probe
  misc_feature (1)..(25): SEQ ID NO: 841; WAN024D42_at; Start 164; Stop 188
gttgtcatccctggtcgaaaacagg

SEQ ID NO: 142648 - DNA, 25 bp, Artificial
  probe
  misc_feature (1)..(25): SEQ ID NO: 841; WAN024D42_at; Start 81; Stop 105
gctgacttgttccaactacatgatt

SEQ ID NO: 142649 - DNA, 25 bp, Artificial
  probe
  misc_feature (1)..(25): SEQ ID NO: 841; WAN024D42_at; Start 92; Stop 116
ccaactacatgattcaggctattga

SEQ ID NO: 142650 - DNA, 25 bp, Artificial
  probe
  misc_feature (1)..(25): SEQ ID NO: 841; WAN024D42_at; Start 84; Stop 108
gacttgttccaactacatgattcag

SEQ ID NO: 142651 - DNA, 25 bp, Artificial
  probe
  misc_feature (1)..(25): SEQ ID NO: 841; WAN024D42_at; Start 55; Stop 79
gtctttccaccctcttgtcgctttg

SEQ ID NO: 142652 - DNA, 25 bp, Artificial
  probe
  misc_feature (1)..(25): SEQ ID NO: 841; WAN024D42_at; Start 101; Stop 125
tgattcaggctattgaaaaacatgg

SEQ ID NO: 142653 - DNA, 25 bp, Artificial
  probe
  misc_feature (1)..(25): SEQ ID NO: 3051; WAN024D43_at; Start 167; Stop 191
catcagcagatttgtttgagtataa

SEQ ID NO: 142654 - DNA, 25 bp, Artificial
  probe
  misc_feature (1)..(25): SEQ ID NO: 3051; WAN024D43_at; Start 153; Stop 177
tgatactgcatttgcatcagcagat

SEQ ID NO: 142655 - DNA, 25 bp, Artificial
  probe
  misc_feature (1)..(25): SEQ ID NO: 3051; WAN024D43_at; Start 67; Stop 91
caaaaagattatgtagatgaacgtc

SEQ ID NO: 142656 - DNA, 25 bp, Artificial
  probe
  misc_feature (1)..(25): SEQ ID NO: 3051; WAN024D43_at; Start 629; Stop 653
tcgaagaagctaaatatcaagatat

SEQ ID NO: 142657 - DNA, 25 bp, Artificial
  probe
  misc_feature (1)..(25): SEQ ID NO: 3051; WAN024D43_at; Start 402; Stop 426
tagtcattcctttccaattcagatg

SEQ ID NO: 142658 - DNA, 25 bp, Artificial
  probe
  misc_feature (1)..(25): SEQ ID NO: 3051; WAN024D43_at; Start 645; Stop 669
tcaagatattcctaatttttcagaa

SEQ ID NO: 142659 - DNA, 25 bp, Artificial
  probe
  misc_feature (1)..(25): SEQ ID NO: 3051; WAN024D43_at; Start 566; Stop 590
gaactggtcagttacacttgattca

SEQ ID NO: 142660 - DNA, 25 bp, Artificial
  probe
  misc_feature (1)..(25): SEQ ID NO: 3051; WAN024D43_at; Start 25; Stop 49
tcgcttgaggcacaaaaaattgtag

SEQ ID NO: 142661 - DNA, 25 bp, Artificial
  probe
  misc_feature (1)..(25): SEQ ID NO: 3051; WAN024D43_at; Start 580; Stop 604
cacttgattcaagatttgtctgagt

SEQ ID NO: 142662 - DNA, 25 bp, Artificial
  probe
  misc_feature (1)..(25): SEQ ID NO: 3051; WAN024D43_at; Start 415; Stop 439
ccaattcagatggagttagtttctg

SEQ ID NO: 142663 - DNA, 25 bp, Artificial
  probe
  misc_feature (1)..(25): SEQ ID NO: 3051; WAN024D43_at; Start 44; Stop 68
ttgtagatactttgatgaaagggca

SEQ ID NO: 142664 - DNA, 25 bp, Artificial
  probe
  misc_feature (1)..(25): SEQ ID NO: 3051; WAN024D43_at; Start 56; Stop 80
tgatgaaagggcaaaaagattatgt

SEQ ID NO: 142665 - DNA, 25 bp, Artificial
  probe
  misc_feature (1)..(25): SEQ ID NO: 3051; WAN024D43_at; Start 184; Stop 208
gagtataaattacaattagcaggac

SEQ ID NO: 142666 - DNA, 25 bp, Artificial
  probe
  misc_feature (1)..(25): SEQ ID NO: 3051; WAN024D43_at; Start 12; Stop 36
ggatctctttgattcgcttgaggca

SEQ ID NO: 142667 - DNA, 25 bp, Artificial
  probe
  misc_feature (1)..(25): SEQ ID NO: 3051; WAN024D43_at; Start 614; Stop 638
caagttcgtaccatttcgaagaagc

SEQ ID NO: 142668 - DNA, 25 bp, Artificial
  probe
  misc_feature (1)..(25): SEQ ID NO: 3051; WAN024D43_at; Start 107; Stop 131
caatgatagtgtcgaatggttatgc

SEQ ID NO: 142669 - DNA, 25 bp, Artificial
  probe
  misc_feature (1)..(25): SEQ ID NO: 3051; WAN024D43_at; Start 130; Stop 154
gcatggacgcgacctaatcatattg

SEQ ID NO: 142670 - DNA, 25 bp, Artificial
  probe
  misc_feature (1)..(25): SEQ ID NO: 3051; WAN024D43_at; Start 92; Stop 116
tagaaaaaagagagacaatgatagt

SEQ ID NO: 142671 - DNA, 25 bp, Artificial
  probe
  misc_feature (1)..(25): SEQ ID NO: 3051; WAN024D43_at; Start 511; Stop 535
gaggcggactcagaaaacaatatta

SEQ ID NO: 142672 - DNA, 25 bp, Artificial
  probe
  misc_feature (1)..(25): SEQ ID NO: 3051; WAN024D43_at; Start 193; Stop 217
ttacaattagcaggacagacttggg

SEQ ID NO: 142673 - DNA, 25 bp, Artificial
  probe
  misc_feature (1)..(25): SEQ ID NO: 3051; WAN024D43_at; Start 451; Stop 475
caagaaattgaacaagctactaaaa

SEQ ID NO: 142674 - DNA, 25 bp, Artificial
  probe
  misc_feature (1)..(25): SEQ ID NO: 3051; WAN024D43_at; Start 231; Stop 255
tgaaacaaatacagaaaaatatggg

SEQ ID NO: 142675 - DNA, 25 bp, Artificial
  probe
  misc_feature (1)..(25): SEQ ID NO: 3051; WAN024D43_at; Start 373; Stop 397
caacattcttcctacaaaaatgatg

SEQ ID NO: 142676 - DNA, 25 bp, Artificial
  probe
  misc_feature (1)..(25): SEQ ID NO: 3051; WAN024D43_at; Start 463; Stop 487
caagctactaaaaattcgaatatcg

SEQ ID NO: 142677 - DNA, 25 bp, Artificial
  probe
  misc_feature (1)..(25): SEQ ID NO: 3051; WAN024D43_at; Start 498; Stop 522
gattttaacttatgaggcggactca

SEQ ID NO: 142678 - DNA, 25 bp, Artificial
  probe
  misc_feature (1)..(25): SEQ ID NO: 3051; WAN024D43_at; Start 701; Stop 725
caagaatagaaaaacaagaaggtca

SEQ ID NO: 142679 - DNA, 25 bp, Artificial
  probe
  misc_feature (1)..(25): SEQ ID NO: 3051; WAN024D43_at; Start 601; Stop 625
gagtatattcaatcaagttcgtacc

SEQ ID NO: 142680 - DNA, 25 bp, Artificial
  probe
  misc_feature (1)..(25): SEQ ID NO: 3051; WAN024D43_at; Start 138; Stop 162
gcgacctaatcatattgatactgca

SEQ ID NO: 142681 - DNA, 25 bp, Artificial
  probe
  misc_feature (1)..(25): SEQ ID NO: 3051; WAN024D43_at; Start 536; Stop 560
tatctgtagatgttgttatgcctga

SEQ ID NO: 142682 - DNA, 25 bp, Artificial
  probe
  misc_feature (1)..(25): SEQ ID NO: 3051; WAN024D43_at; Start 551; Stop 575
ttatgcctgatgcacgaactggtca

SEQ ID NO: 142683 - DNA, 25 bp, Artificial
  probe
  misc_feature (1)..(25): SEQ ID NO: 3051; WAN024D43_at; Start 436; Stop 460
tctgatgaaatgattcaagaaattg

SEQ ID NO: 142684 - DNA, 25 bp, Artificial
  probe
  misc_feature (1)..(25): SEQ ID NO: 3051; WAN024D43_at; Start 120; Stop 144
gaatggttatgcatggacgcgacct

SEQ ID NO: 142685 - DNA, 25 bp, Artificial
  probe
  misc_feature (1)..(25): SEQ ID NO: 3051; WAN024D43_at; Start 82; Stop 106
gatgaacgtctagaaaaaagagaga

SEQ ID NO: 142686 - DNA, 25 bp, Artificial
  probe
  misc_feature (1)..(25): SEQ ID NO: 3051; WAN024D43_at; Start 664; Stop 688
tcagaattatcggaaacagaagatt

SEQ ID NO: 142687 - DNA, 25 bp, Artificial
  probe
  misc_feature (1)..(25): SEQ ID NO: 2965; WAN024D44_at; Start 900; Stop 924
gattgcccaacctctttatgacctt

SEQ ID NO: 142688 - DNA, 25 bp, Artificial
  probe
  misc_feature (1)..(25): SEQ ID NO: 2965; WAN024D44_at; Start 492; Stop 516
tgagcaccagttgccaagtgtcaat

SEQ ID NO: 142689 - DNA, 25 bp, Artificial
  probe
  misc_feature (1)..(25): SEQ ID NO: 2965; WAN024D44_at; Start 738; Stop 762
gatttcatcaaatgcaactgcagca

SEQ ID NO: 142690 - DNA, 25 bp, Artificial
  probe
  misc_feature (1)..(25): SEQ ID NO: 2965; WAN024D44_at; Start 533; Stop 557
caacaattgatgcagtgagttacct

SEQ ID NO: 142691 - DNA, 25 bp, Artificial
  probe
  misc_feature (1)..(25): SEQ ID NO: 2965; WAN024D44_at; Start 72; Stop 96
tgaagcaggtgtttccatggcgacg

SEQ ID NO: 142692 - DNA, 25 bp, Artificial
  probe
  misc_feature (1)..(25): SEQ ID NO: 2965; WAN024D44_at; Start 754; Stop 778
actgcagcagttgtgacaggtgatg

SEQ ID NO: 142693 - DNA, 25 bp, Artificial
  probe
  misc_feature (1)..(25): SEQ ID NO: 2965; WAN024D44_at; Start 418; Stop 442
cacttgacagataaaattcgctcag

SEQ ID NO: 142694 - DNA, 25 bp, Artificial
  probe
  misc_feature (1)..(25): SEQ ID NO: 2965; WAN024D44_at; Start 1012; Stop 1036
gaacgtagctcaacacgaaaacgta

SEQ ID NO: 142695 - DNA, 25 bp, Artificial
  probe
  misc_feature (1)..(25): SEQ ID NO: 2965; WAN024D44_at; Start 442; Stop 466
gaattttcgcgttcacgtactccga

SEQ ID NO: 142696 - DNA, 25 bp, Artificial
  probe
  misc_feature (1)..(25): SEQ ID NO: 2965; WAN024D44_at; Start 95; Stop 119
cggtcagccgtgtggtcaatggcaa

SEQ ID NO: 142697 - DNA, 25 bp, Artificial
  probe
  misc_feature (1)..(25): SEQ ID NO: 2965; WAN024D44_at; Start 551; Stop 575
gttaccttgctaaagaaaatgagcg

SEQ ID NO: 142698 - DNA, 25 bp, Artificial
  probe
  misc_feature (1)..(25): SEQ ID NO: 2965; WAN024D44_at; Start 944; Stop 968
tgttgaccaagattatgcataagga

SEQ ID NO: 142699 - DNA, 25 bp, Artificial
  probe
  misc_feature (1)..(25): SEQ ID NO: 2965; WAN024D44_at; Start 376; Stop 400
ctcttttcaaagcaggtagatggca

SEQ ID NO: 142700 - DNA, 25 bp, Artificial
  probe
  misc_feature (1)..(25): SEQ ID NO: 2965; WAN024D44_at; Start 328; Stop 352
gctaatagcgatgaagataacgaga

SEQ ID NO: 142701 - DNA, 25 bp, Artificial
  probe
  misc_feature (1)..(25): SEQ ID NO: 2965; WAN024D44_at; Start 175; Stop 199
gattatcgtccaaatgcagttgcgc

SEQ ID NO: 142702 - DNA, 25 bp, Artificial
  probe
  misc_feature (1)..(25): SEQ ID NO: 2965; WAN024D44_at; Start 588; Stop 612
tagcggtccgctagtggatgacatc

SEQ ID NO: 142703 - DNA, 25 bp, Artificial
  probe
  misc_feature (1)..(25): SEQ ID NO: 2965; WAN024D44_at; Start 457; Stop 481
cgtactccgattgttctcgcaggaa

SEQ ID NO: 142704 - DNA, 25 bp, Artificial
  probe
  misc_feature (1)..(25): SEQ ID NO: 2965; WAN024D44_at; Start 32; Stop 56
tgaatgcagatgatacagtaaccat

SEQ ID NO: 142705 - DNA, 25 bp, Artificial
  probe
  misc_feature (1)..(25): SEQ ID NO: 2965; WAN024D44_at; Start 785; Stop 809
cagcaggagtcttgaacggtttggc

SEQ ID NO: 142706 - DNA, 25 bp, Artificial
  probe
  misc_feature (1)..(25): SEQ ID NO: 2965; WAN024D44_at; Start 355; Stop 379
gaagtttctgttgtcaataccctct

SEQ ID NO: 142707 - DNA, 25 bp, Artificial
  probe
  misc_feature (1)..(25): SEQ ID NO: 2965; WAN024D44_at; Start 476; Stop 500
caggaactgtcgatgttgagcacca

SEQ ID NO: 142708 - DNA, 25 bp, Artificial
  probe
  misc_feature (1)..(25): SEQ ID NO: 2965; WAN024D44_at; Start 572; Stop 596
agcgtattgctttcgttagcggtcc

SEQ ID NO: 142709 - DNA, 25 bp, Artificial
  probe
  misc_feature (1)..(25): SEQ ID NO: 2965; WAN024D44_at; Start 195; Stop 219
tgcgcgtggtcttgcaagtaaaaag

SEQ ID NO: 142710 - DNA, 25 bp, Artificial
  probe
  misc_feature (1)..(25): SEQ ID NO: 2965; WAN024D44_at; Start 603; Stop 627
ggatgacatcaatggtaaggttcgt

SEQ ID NO: 142711 - DNA, 25 bp, Artificial
  probe
  misc_feature (1)..(25): SEQ ID NO: 2965; WAN024D44_at; Start 959; Stop 983
tgcataaggaagagttggaagaacg

SEQ ID NO: 142712 - DNA, 25 bp, Artificial
  probe
  misc_feature (1)..(25): SEQ ID NO: 2965; WAN024D44_at; Start 722; Stop 746
ccttagcagagcgtttgatttcatc

SEQ ID NO: 142713 - DNA, 25 bp, Artificial
  probe
  misc_feature (1)..(25): SEQ ID NO: 2965; WAN024D44_at; Start 995; Stop 1019
tacctcatggtttgacagaacgtag

SEQ ID NO: 142714 - DNA, 25 bp, Artificial
  probe
  misc_feature (1)..(25): SEQ ID NO: 2965; WAN024D44_at; Start 884; Stop 908
gtccaaacttgacaacgattgccca

SEQ ID NO: 142715 - DNA, 25 bp, Artificial
  probe
  misc_feature (1)..(25): SEQ ID NO: 2965; WAN024D44_at; Start 852; Stop 876
tagtgatgattcacaaatctcacgc

SEQ ID NO: 142716 - DNA, 25 bp, Artificial
  probe
  misc_feature (1)..(25): SEQ ID NO: 2965; WAN024D44_at; Start 230; Stop 254
tcggtgtcgtgattccaaatattac

SEQ ID NO: 142717 - DNA, 25 bp, Artificial
  probe
  misc_feature (1)..(25): SEQ ID NO: 2965; WAN024D44_at; Start 979; Stop 1003
gaacgtgaagttctcttacctcatg

SEQ ID NO: 142718 - DNA, 25 bp, Artificial
  probe
  misc_feature (1)..(25): SEQ ID NO: 2965; WAN024D44_at; Start 313; Stop 337
tacaatattgtcctagctaatagcg

SEQ ID NO: 142719 - DNA, 25 bp, Artificial
  probe
  misc_feature (1)..(25): SEQ ID NO: 2965; WAN024D44_at; Start 54; Stop 78
catttatgatgtcgctcgtgaagca

SEQ ID NO: 142720 - DNA, 25 bp, Artificial
  probe
  misc_feature (1)..(25): SEQ ID NO: 2965; WAN024D44_at; Start 706; Stop 730
tatgatgatggttacgccttagcag

SEQ ID NO: 142721 - DNA, 25 bp, Artificial
  probe
  misc_feature (1)..(25): SEQ ID NO: 1948; WAN024D45_at; Start 584; Stop 608
tctttcgaaaagcagtcgttctaga

SEQ ID NO: 142722 - DNA, 25 bp, Artificial
  probe
  misc_feature (1)..(25): SEQ ID NO: 1948; WAN024D45_at; Start 859; Stop 883
gaacgagtctttgcactggaaattc

SEQ ID NO: 142723 - DNA, 25 bp, Artificial
  probe
  misc_feature (1)..(25): SEQ ID NO: 1948; WAN024D45_at; Start 405; Stop 429
cctgctgatctgtctagcgctcaga

SEQ ID NO: 142724 - DNA, 25 bp, Artificial
  probe
  misc_feature (1)..(25): SEQ ID NO: 1948; WAN024D45_at; Start 42; Stop 66
cattattcttgccatcggagcttgt

SEQ ID NO: 142725 - DNA, 25 bp, Artificial
  probe
  misc_feature (1)..(25): SEQ ID NO: 1948; WAN024D45_at; Start 364; Stop 388
ggttacttgaagacactgatgaagc

SEQ ID NO: 142726 - DNA, 25 bp, Artificial
  probe
  misc_feature (1)..(25): SEQ ID NO: 1948; WAN024D45_at; Start 377; Stop 401
cactgatgaagcaagacctggtctt

SEQ ID NO: 142727 - DNA, 25 bp, Artificial
  probe
  misc_feature (1)..(25): SEQ ID NO: 1948; WAN024D45_at; Start 599; Stop 623
tcgttctagatgtcttgcacctgca

SEQ ID NO: 142728 - DNA, 25 bp, Artificial
  probe
  misc_feature (1)..(25): SEQ ID NO: 1948; WAN024D45_at; Start 105; Stop 129
tgcttggaagttgcgttcccaaaag

SEQ ID NO: 142729 - DNA, 25 bp, Artificial
  probe
  misc_feature (1)..(25): SEQ ID NO: 1948; WAN024D45_at; Start 703; Stop 727
tcaacggccactgccttggtaggac

SEQ ID NO: 142730 - DNA, 25 bp, Artificial
  probe
  misc_feature (1)..(25): SEQ ID NO: 1948; WAN024D45_at; Start 207; Stop 231
cctgacgcctagtattttgggaatt

SEQ ID NO: 142731 - DNA, 25 bp, Artificial
  probe
  misc_feature (1)..(25): SEQ ID NO: 1948; WAN024D45_at; Start 720; Stop 744
ggtaggacctatggccttcttcggc

SEQ ID NO: 142732 - DNA, 25 bp, Artificial
  probe
  misc_feature (1)..(25): SEQ ID NO: 1948; WAN024D45_at; Start 897; Stop 921
cattgagagtgtgggtggcttctta

SEQ ID NO: 142733 - DNA, 25 bp, Artificial
  probe
  misc_feature (1)..(25): SEQ ID NO: 1948; WAN024D45_at; Start 258; Stop 282
cctactactggtttttgaaagcaag

SEQ ID NO: 142734 - DNA, 25 bp, Artificial
  probe
  misc_feature (1)..(25): SEQ ID NO: 1948; WAN024D45_at; Start 155; Stop 179
tcgcgactgggatttcgaccattag

SEQ ID NO: 142735 - DNA, 25 bp, Artificial
  probe
  misc_feature (1)..(25): SEQ ID NO: 1948; WAN024D45_at; Start 274; Stop 298
gaaagcaagtttcttcaacttggca

SEQ ID NO: 142736 - DNA, 25 bp, Artificial
  probe
  misc_feature (1)..(25): SEQ ID NO: 1948; WAN024D45_at; Start 19; Stop 43
cataccaagctcttctggattctca

SEQ ID NO: 142737 - DNA, 25 bp, Artificial
  probe
  misc_feature (1)..(25): SEQ ID NO: 1948; WAN024D45_at; Start 290; Stop 314
aacttggcaaatcccctatcttaga

SEQ ID NO: 142738 - DNA, 25 bp, Artificial
  probe
  misc_feature (1)..(25): SEQ ID NO: 1948; WAN024D45_at; Start 225; Stop 249
gggaattgaatccttctacgtccta

SEQ ID NO: 142739 - DNA, 25 bp, Artificial
  probe
  misc_feature (1)..(25): SEQ ID NO: 1948; WAN024D45_at; Start 3; Stop 27
gcagactaaaagcaaacataccaag

SEQ ID NO: 142740 - DNA, 25 bp, Artificial
  probe
  misc_feature (1)..(25): SEQ ID NO: 1948; WAN024D45_at; Start 752; Stop 776
tggccaacctcacctacctgattgt

SEQ ID NO: 142741 - DNA, 25 bp, Artificial
  probe
  misc_feature (1)..(25): SEQ ID NO: 1948; WAN024D45_at; Start 771; Stop 795
gattgtcaaagactatcagcacaag

SEQ ID NO: 142742 - DNA, 25 bp, Artificial
  probe
  misc_feature (1)..(25): SEQ ID NO: 1948; WAN024D45_at; Start 192; Stop 216
gacggaaaatcgcttcctgacgcct

SEQ ID NO: 142743 - DNA, 25 bp, Artificial
  probe
  misc_feature (1)..(25): SEQ ID NO: 1948; WAN024D45_at; Start 139; Stop 163
tatctcttggtagccatcgcgactg

SEQ ID NO: 142744 - DNA, 25 bp, Artificial
  probe
  misc_feature (1)..(25): SEQ ID NO: 1948; WAN024D45_at; Start 643; Stop 667
ttgggactcgatgttgaaaaagaac

SEQ ID NO: 142745 - DNA, 25 bp, Artificial
  probe
  misc_feature (1)..(25): SEQ ID NO: 1948; WAN024D45_at; Start 419; Stop 443
tagcgctcagaagtctctttcgaaa

SEQ ID NO: 142746 - DNA, 25 bp, Artificial
  probe
  misc_feature (1)..(25): SEQ ID NO: 1948; WAN024D45_at; Start 685; Stop 709
ggaatcgtgcttttgacctcaacgg

SEQ ID NO: 142747 - DNA, 25 bp, Artificial
  probe
  misc_feature (1)..(25): SEQ ID NO: 1948; WAN024D45_at; Start 76; Stop 100
ttttggcccatcactcacttgtcag

SEQ ID NO: 142748 - DNA, 25 bp, Artificial
  probe
  misc_feature (1)..(25): SEQ ID NO: 1948; WAN024D45_at; Start 61; Stop 85
gcttgtcttctctacttttggccca

SEQ ID NO: 142749 - DNA, 25 bp, Artificial
  probe
  misc_feature (1)..(25): SEQ ID NO: 1948; WAN024D45_at; Start 844; Stop 868
gggcaagccttgattgaacgagtct

SEQ ID NO: 142750 - DNA, 25 bp, Artificial
  probe
  misc_feature (1)..(25): SEQ ID NO: 1948; WAN024D45_at; Start 628; Stop 652
gaaacggctcagatattgggactcg

SEQ ID NO: 142751 - DNA, 25 bp, Artificial
  probe
  misc_feature (1)..(25): SEQ ID NO: 1948; WAN024D45_at; Start 613; Stop 637
ttgcacctgcaaagagaaacggctc

SEQ ID NO: 142752 - DNA, 25 bp, Artificial
  probe
  misc_feature (1)..(25): SEQ ID NO: 1948; WAN024D45_at; Start 790; Stop 814
cacaagttactctttatagtggcca

SEQ ID NO: 142753 - DNA, 25 bp, Artificial
  probe
  misc_feature (1)..(25): SEQ ID NO: 1948; WAN024D45_at; Start 463; Stop 487
gtcctaatggatccaaacgaatacg

SEQ ID NO: 142754 - DNA, 25 bp, Artificial
  probe
  misc_feature (1)..(25): SEQ ID NO: 1948; WAN024D45_at; Start 90; Stop 114
tcacttgtcagcctttgcttggaag

SEQ ID NO: 142755 - DNA, 25 bp, Artificial
  probe
  misc_feature (1)..(25): SEQ ID NO: 1392; WAN024D46_at; Start 136; Stop 160
cgtgctagctttaaagaactggatg

SEQ ID NO: 142756 - DNA, 25 bp, Artificial
  probe
  misc_feature (1)..(25): SEQ ID NO: 1392; WAN024D46_at; Start 502; Stop 526
attttccgttactttaatgttgctg

SEQ ID NO: 142757 - DNA, 25 bp, Artificial
  probe
  misc_feature (1)..(25): SEQ ID NO: 1392; WAN024D46_at; Start 454; Stop 478
gaacgaatgatttactggatggcca

SEQ ID NO: 142758 - DNA, 25 bp, Artificial
  probe
  misc_feature (1)..(25): SEQ ID NO: 1392; WAN024D46_at; Start 153; Stop 177
actggatgtttatgatgctagcgcc

SEQ ID NO: 142759 - DNA, 25 bp, Artificial
  probe
  misc_feature (1)..(25): SEQ ID NO: 1392; WAN024D46_at; Start 650; Stop 674
cacgtgacggttcatgtattcgaga

SEQ ID NO: 142760 - DNA, 25 bp, Artificial
  probe
  misc_feature (1)..(25): SEQ ID NO: 1392; WAN024D46_at; Start 469; Stop 493
tggatggccaatcgctacgactgga

SEQ ID NO: 142761 - DNA, 25 bp, Artificial
  probe
  misc_feature (1)..(25): SEQ ID NO: 1392; WAN024D46_at; Start 629; Stop 653
tatttggagatgactacgatacacg

SEQ ID NO: 142762 - DNA, 25 bp, Artificial
  probe
  misc_feature (1)..(25): SEQ ID NO: 1392; WAN024D46_at; Start 434; Stop 458
cagagacaaaactgatgggcgaacg

SEQ ID NO: 142763 - DNA, 25 bp, Artificial
  probe
  misc_feature (1)..(25): SEQ ID NO: 1392; WAN024D46_at; Start 370; Stop 394
ggaaataactgtattgacaagccgg

SEQ ID NO: 142764 - DNA, 25 bp, Artificial
  probe
  misc_feature (1)..(25): SEQ ID NO: 1392; WAN024D46_at; Start 635; Stop 659
gagatgactacgatacacgtgacgg

SEQ ID NO: 142765 - DNA, 25 bp, Artificial
  probe
  misc_feature (1)..(25): SEQ ID NO: 1392; WAN024D46_at; Start 586; Stop 610
aatatcaacaagaccgcattgggac

SEQ ID NO: 142766 - DNA, 25 bp, Artificial
  probe
  misc_feature (1)..(25): SEQ ID NO: 1392; WAN024D46_at; Start 165; Stop 189
tgatgctagcgccttaaaggcttac

SEQ ID NO: 142767 - DNA, 25 bp, Artificial
  probe
  misc_feature (1)..(25): SEQ ID NO: 1392; WAN024D46_at; Start 480; Stop 504
tcgctacgactggaaatatgttatt

SEQ ID NO: 142768 - DNA, 25 bp, Artificial
  probe
  misc_feature (1)..(25): SEQ ID NO: 1392; WAN024D46_at; Start 263; Stop 287
caagtaaatacttcactgccaacgt

SEQ ID NO: 142769 - DNA, 25 bp, Artificial
  probe
  misc_feature (1)..(25): SEQ ID NO: 1392; WAN024D46_at; Start 12; Stop 36
aattcttgttacaggtgggactagc

SEQ ID NO: 142770 - DNA, 25 bp, Artificial
  probe
  misc_feature (1)..(25): SEQ ID NO: 1392; WAN024D46_at; Start 358; Stop 382
gcttctctctatggaaataactgta

SEQ ID NO: 142771 - DNA, 25 bp, Artificial
  probe
  misc_feature (1)..(25): SEQ ID NO: 1392; WAN024D46_at; Start 307; Stop 331
ctcaaagtcttatctgaagttggca

SEQ ID NO: 142772 - DNA, 25 bp, Artificial
  probe
  misc_feature (1)..(25): SEQ ID NO: 1392; WAN024D46_at; Start 227; Stop 251
caggtgaaattgttgtgagcgaaag

SEQ ID NO: 142773 - DNA, 25 bp, Artificial
  probe
  misc_feature (1)..(25): SEQ ID NO: 1392; WAN024D46_at; Start 578; Stop 602
tcattccaaatatcaacaagaccgc

SEQ ID NO: 142774 - DNA, 25 bp, Artificial
  probe
  misc_feature (1)..(25): SEQ ID NO: 1392; WAN024D46_at; Start 670; Stop 694
cgagattacatttatgtcttggacc

SEQ ID NO: 142775 - DNA, 25 bp, Artificial
  probe
  misc_feature (1)..(25): SEQ ID NO: 1392; WAN024D46_at; Start 271; Stop 295
tacttcactgccaacgttgctggta

SEQ ID NO: 142776 - DNA, 25 bp, Artificial
  probe
  misc_feature (1)..(25): SEQ ID NO: 1392; WAN024D46_at; Start 53; Stop 77
ccgttaaagctcttttaaatgctgg

SEQ ID NO: 142777 - DNA, 25 bp, Artificial
  probe
  misc_feature (1)..(25): SEQ ID NO: 1392; WAN024D46_at; Start 297; Stop 321
gaaccaagttctcaaagtcttatct

SEQ ID NO: 142778 - DNA, 25 bp, Artificial
  probe
  misc_feature (1)..(25): SEQ ID NO: 1392; WAN024D46_at; Start 37; Stop 61
tacattggctcccataccgttaaag

SEQ ID NO: 142779 - DNA, 25 bp, Artificial
  probe
  misc_feature (1)..(25): SEQ ID NO: 1392; WAN024D46_at; Start 561; Stop 585
gaaaaatccaactcacatcattcca

SEQ ID NO: 142780 - DNA, 25 bp, Artificial
  probe
  misc_feature (1)..(25): SEQ ID NO: 1392; WAN024D46_at; Start 99; Stop 123
taatctctccacaggaaatcgagcg

SEQ ID NO: 142781 - DNA, 25 bp, Artificial
  probe
  misc_feature (1)..(25): SEQ ID NO: 1392; WAN024D46_at; Start 533; Stop 557
aaatggatgcttcaaacggtctgcg

SEQ ID NO: 142782 - DNA, 25 bp, Artificial
  probe
  misc_feature (1)..(25): SEQ ID NO: 1392; WAN024D46_at; Start 336; Stop 360
aaaaatcatgttctcttcgactgct

SEQ ID NO: 142783 - DNA, 25 bp, Artificial
  probe
  misc_feature (1)..(25): SEQ ID NO: 1392; WAN024D46_at; Start 547; Stop 571
aacggtctgcgtgtgaaaaatccaa

SEQ ID NO: 142784 - DNA, 25 bp, Artificial
  probe
  misc_feature (1)..(25): SEQ ID NO: 1392; WAN024D46_at; Start 677; Stop 701
acatttatgtcttggaccttgcata

SEQ ID NO: 142785 - DNA, 25 bp, Artificial
  probe
  misc_feature (1)..(25): SEQ ID NO: 1392; WAN024D46_at; Start 349; Stop 373
tcttcgactgcttctctctatggaa

SEQ ID NO: 142786 - DNA, 25 bp, Artificial
  probe
  misc_feature (1)..(25): SEQ ID NO: 1392; WAN024D46_at; Start 21; Stop 45
tacaggtgggactagctacattggc

SEQ ID NO: 142787 - DNA, 25 bp, Artificial
  probe
  misc_feature (1)..(25): SEQ ID NO: 1392; WAN024D46_at; Start 444; Stop 468
actgatgggcgaacgaatgatttac

SEQ ID NO: 142788 - DNA, 25 bp, Artificial
  probe
  misc_feature (1)..(25): SEQ ID NO: 1392; WAN024D46_at; Start 196; Stop 220
gaaaatcagattgatgctgtcctcc

SEQ ID NO: 142789 - DNA, 25 bp, Artificial
  probe
  misc_feature (1)..(25): SEQ ID NO: 1323; WAN024D47_at; Start 778; Stop 802
gatccaggtcacttgcttctcccag

SEQ ID NO: 142790 - DNA, 25 bp, Artificial
  probe
  misc_feature (1)..(25): SEQ ID NO: 1323; WAN024D47_at; Start 561; Stop 585
catggtaagcgagctagctgaagct

SEQ ID NO: 142791 - DNA, 25 bp, Artificial
  probe
  misc_feature (1)..(25): SEQ ID NO: 1323; WAN024D47_at; Start 1009; Stop 1033
caagccttggtgaagaaattggatc

SEQ ID NO: 142792 - DNA, 25 bp, Artificial
  probe
  misc_feature (1)..(25): SEQ ID NO: 1323; WAN024D47_at; Start 273; Stop 297
gaaccccatggtggttagcagccaa

SEQ ID NO: 142793 - DNA, 25 bp, Artificial
  probe
  misc_feature (1)..(25): SEQ ID NO: 1323; WAN024D47_at; Start 669; Stop 693
tacaaccaagtttgacccagaagtc

SEQ ID NO: 142794 - DNA, 25 bp, Artificial
  probe
  misc_feature (1)..(25): SEQ ID NO: 1323; WAN024D47_at; Start 219; Stop 243
ggtcagcgaaatcaagccagatggt

SEQ ID NO: 142795 - DNA, 25 bp, Artificial
  probe
  misc_feature (1)..(25): SEQ ID NO: 1323; WAN024D47_at; Start 32; Stop 56
taacagaacttgctgcagtctcagg

SEQ ID NO: 142796 - DNA, 25 bp, Artificial
  probe
  misc_feature (1)..(25): SEQ ID NO: 1323; WAN024D47_at; Start 852; Stop 876
ccaatactactgtggtaaaggcgga

SEQ ID NO: 142797 - DNA, 25 bp, Artificial
  probe
  misc_feature (1)..(25): SEQ ID NO: 1323; WAN024D47_at; Start 236; Stop 260
cagatggtaccttccgtgtcgtaga

SEQ ID NO: 142798 - DNA, 25 bp, Artificial
  probe
  misc_feature (1)..(25): SEQ ID NO: 1323; WAN024D47_at; Start 99; Stop 123
accgcatgtggatgaagtggtgaca

SEQ ID NO: 142799 - DNA, 25 bp, Artificial
  probe
  misc_feature (1)..(25): SEQ ID NO: 1323; WAN024D47_at; Start 256; Stop 280
gtagaaatcggtggctggaacccca

SEQ ID NO: 142800 - DNA, 25 bp, Artificial
  probe
  misc_feature (1)..(25): SEQ ID NO: 1323; WAN024D47_at; Start 923; Stop 947
caactatcggtgtctgcgctcgtta

SEQ ID NO: 142801 - DNA, 25 bp, Artificial
  probe
  misc_feature (1)..(25): SEQ ID NO: 1323; WAN024D47_at; Start 390; Stop 414
catgccagccattgccgatatcgtt

SEQ ID NO: 142802 - DNA, 25 bp, Artificial
  probe
  misc_feature (1)..(25): SEQ ID NO: 1323; WAN024D47_at; Start 545; Stop 569
accgctacggtgtcctcatggtaag

SEQ ID NO: 142803 - DNA, 25 bp, Artificial
  probe
  misc_feature (1)..(25): SEQ ID NO: 1323; WAN024D47_at; Start 618; Stop 642
tctgggttctaacgtccaagaagaa

SEQ ID NO: 142804 - DNA, 25 bp, Artificial
  probe
  misc_feature (1)..(25): SEQ ID NO: 1323; WAN024D47_at; Start 448; Stop 472
gaaagttttggcatccgtcctggtg

SEQ ID NO: 142805 - DNA, 25 bp, Artificial
  probe
  misc_feature (1)..(25): SEQ ID NO: 1323; WAN024D47_at; Start 530; Stop 554
caaaagcttgggataaccgctacgg

SEQ ID NO: 142806 - DNA, 25 bp, Artificial
  probe
  misc_feature (1)..(25): SEQ ID NO: 1323; WAN024D47_at; Start 156; Stop 180
ttcagaagctgtggatgcaccgcgc

SEQ ID NO: 142807 - DNA, 25 bp, Artificial
  probe
  misc_feature (1)..(25): SEQ ID NO: 1323; WAN024D47_at; Start 354; Stop 378
tcctccgcatttgactcgtggaaag

SEQ ID NO: 142808 - DNA, 25 bp, Artificial
  probe
  misc_feature (1)..(25): SEQ ID NO: 1323; WAN024D47_at; Start 204; Stop 228
cgaagttggttttatggtcagcgaa

SEQ ID NO: 142809 - DNA, 25 bp, Artificial
  probe
  misc_feature (1)..(25): SEQ ID NO: 1323; WAN024D47_at; Start 686; Stop 710
cagaagtcttcctcgcagttgattg

SEQ ID NO: 142810 - DNA, 25 bp, Artificial
  probe
  misc_feature (1)..(25): SEQ ID NO: 1323; WAN024D47_at; Start 50; Stop 74
tctcaggtcatgaagcgcctgtccg

SEQ ID NO: 142811 - DNA, 25 bp, Artificial
  probe
  misc_feature (1)..(25): SEQ ID NO: 1323; WAN024D47_at; Start 867; Stop 891
taaaggcggaacagatgcaggtgca

SEQ ID NO: 142812 - DNA, 25 bp, Artificial
  probe
  misc_feature (1)..(25): SEQ ID NO: 1323; WAN024D47_at; Start 638; Stop 662
aagaagttggtctgcgtggcgctca

SEQ ID NO: 142813 - DNA, 25 bp, Artificial
  probe
  misc_feature (1)..(25): SEQ ID NO: 1323; WAN024D47_at; Start 312; Stop 336
gactcgtgatggtcatgaaattcct

SEQ ID NO: 142814 - DNA, 25 bp, Artificial
  probe
  misc_feature (1)..(25): SEQ ID NO: 1323; WAN024D47_at; Start 991; Stop 1015
gaagcgcaagctttcttacaagcct

SEQ ID NO: 142815 - DNA, 25 bp, Artificial
  probe
  misc_feature (1)..(25): SEQ ID NO: 1323; WAN024D47_at; Start 79; Stop 103
tatcttcgtgaaaagttgacaccgc

SEQ ID NO: 142816 - DNA, 25 bp, Artificial
  probe
  misc_feature (1)..(25): SEQ ID NO: 1323; WAN024D47_at; Start 974; Stop 998
caatggatgacttcctagaagcgca

SEQ ID NO: 142817 - DNA, 25 bp, Artificial
  probe
  misc_feature (1)..(25): SEQ ID NO: 1323; WAN024D47_at; Start 599; Stop 623
aactcggcaatgaactctatctggg

SEQ ID NO: 142818 - DNA, 25 bp, Artificial
  probe
  misc_feature (1)..(25): SEQ ID NO: 1323; WAN024D47_at; Start 701; Stop 725
cagttgattgctcaccagcaggtga

SEQ ID NO: 142819 - DNA, 25 bp, Artificial
  probe
  misc_feature (1)..(25): SEQ ID NO: 1323; WAN024D47_at; Start 889; Stop 913
gcagctcatctgaaaaatggtggtg

SEQ ID NO: 142820 - DNA, 25 bp, Artificial
  probe
  misc_feature (1)..(25): SEQ ID NO: 1323; WAN024D47_at; Start 426; Stop 450
ttttgcggacaaggctgaggcagaa

SEQ ID NO: 142821 - DNA, 25 bp, Artificial
  probe
  misc_feature (1)..(25): SEQ ID NO: 1323; WAN024D47_at; Start 738; Stop 762
tcaaggcaagattggagatggaacc

SEQ ID NO: 142822 - DNA, 25 bp, Artificial
  probe
  misc_feature (1)..(25): SEQ ID NO: 1323; WAN024D47_at; Start 724; Stop 748
gatgtctacggtggtcaaggcaaga

SEQ ID NO: 142823 - DNA, 25 bp, Artificial
  probe
  misc_feature (1)..(25): SEQ ID NO: 889; WAN024D48_at; Start 58; Stop 82
caaaagttactgagtcaagatcctg

SEQ ID NO: 142824 - DNA, 25 bp, Artificial
  probe
  misc_feature (1)..(25): SEQ ID NO: 889; WAN024D48_at; Start 153; Stop 177
tgcgacagatatcgcgcttgcgact

SEQ ID NO: 142825 - DNA, 25 bp, Artificial
  probe
  misc_feature (1)..(25): SEQ ID NO: 889; WAN024D48_at; Start 359; Stop 383
gattttcagaggaagaaattcacca

SEQ ID NO: 142826 - DNA, 25 bp, Artificial
  probe
  misc_feature (1)..(25): SEQ ID NO: 889; WAN024D48_at; Start 137; Stop 161
aaactggctgcgcaactgcgacaga

SEQ ID NO: 142827 - DNA, 25 bp, Artificial
  probe
  misc_feature (1)..(25): SEQ ID NO: 889; WAN024D48_at; Start 200; Stop 224
cgactatgataaaaaagctagagga

SEQ ID NO: 142828 - DNA, 25 bp, Artificial
  probe
  misc_feature (1)..(25): SEQ ID NO: 889; WAN024D48_at; Start 336; Stop 360
attggatactatcttttacaaagga

SEQ ID NO: 142829 - DNA, 25 bp, Artificial
  probe
  misc_feature (1)..(25): SEQ ID NO: 889; WAN024D48_at; Start 98; Stop 122
gtgaacagggcaagattttagcggt

SEQ ID NO: 142830 - DNA, 25 bp, Artificial
  probe
  misc_feature (1)..(25): SEQ ID NO: 889; WAN024D48_at; Start 321; Stop 345
tcgtgtcagtcagaaattggatact

SEQ ID NO: 142831 - DNA, 25 bp, Artificial
  probe
  misc_feature (1)..(25): SEQ ID NO: 889; WAN024D48_at; Start 258; Stop 282
agacaagcgtaagaagtatttagtt

SEQ ID NO: 142832 - DNA, 25 bp, Artificial
  probe
  misc_feature (1)..(25): SEQ ID NO: 889; WAN024D48_at; Start 231; Stop 255
gcttgtaattgttagtccgtgtgga

SEQ ID NO: 142833 - DNA, 25 bp, Artificial
  probe
  misc_feature (1)..(25): SEQ ID NO: 889; WAN024D48_at; Start 28; Stop 52
catattcgtttgttgaatgggcgga

SEQ ID NO: 142834 - DNA, 25 bp, Artificial
  probe
  misc_feature (1)..(25): SEQ ID NO: 889; WAN024D48_at; Start 72; Stop 96
tcaagatcctgaggctctttatagg

SEQ ID NO: 142835 - DNA, 25 bp, Artificial
  probe
  misc_feature (1)..(25): SEQ ID NO: 889; WAN024D48_at; Start 367; Stop 391
gaggaagaaattcaccaatttgaag

SEQ ID NO: 142836 - DNA, 25 bp, Artificial
  probe
  misc_feature (1)..(25): SEQ ID NO: 889; WAN024D48_at; Start 226; Stop 250
caaaagcttgtaattgttagtccgt

SEQ ID NO: 142837 - DNA, 25 bp, Artificial
  probe
  misc_feature (1)..(25): SEQ ID NO: 889; WAN024D48_at; Start 13; Stop 37
catttgctagcccatcatattcgtt

SEQ ID NO: 142838 - DNA, 25 bp, Artificial
  probe
  misc_feature (1)..(25): SEQ ID NO: 889; WAN024D48_at; Start 65; Stop 89
tactgagtcaagatcctgaggctct

SEQ ID NO: 142839 - DNA, 25 bp, Artificial
  probe
  misc_feature (1)..(25): SEQ ID NO: 889; WAN024D48_at; Start 125; Stop 149
tatggaatagtgaaactggctgcgc

SEQ ID NO: 142840 - DNA, 25 bp, Artificial
  probe
  misc_feature (1)..(25): SEQ ID NO: 889; WAN024D48_at; Start 378; Stop 402
tcaccaatttgaaggttttcaagaa

SEQ ID NO: 142841 - DNA, 25 bp, Artificial
  probe
  misc_feature (1)..(25): SEQ ID NO: 889; WAN024D48_at; Start 289; Stop 313
gagttaggcaagtcccagaaagaag

SEQ ID NO: 142842 - DNA, 25 bp, Artificial
  probe
  misc_feature (1)..(25): SEQ ID NO: 889; WAN024D48_at; Start 350; Stop 374
tttacaaaggattttcagaggaaga

SEQ ID NO: 142843 - DNA, 25 bp, Artificial
  probe
  misc_feature (1)..(25): SEQ ID NO: 889; WAN024D48_at; Start 86; Stop 110
ctctttataggggtgaacagggcaa

SEQ ID NO: 142844 - DNA, 25 bp, Artificial
  probe
  misc_feature (1)..(25): SEQ ID NO: 889; WAN024D48_at; Start 133; Stop 157
agtgaaactggctgcgcaactgcga

SEQ ID NO: 142845 - DNA, 25 bp, Artificial
  probe
  misc_feature (1)..(25): SEQ ID NO: 889; WAN024D48_at; Start 142; Stop 166
ggctgcgcaactgcgacagatatcg

SEQ ID NO: 142846 - DNA, 25 bp, Artificial
  probe
  misc_feature (1)..(25): SEQ ID NO: 889; WAN024D48_at; Start 106; Stop 130
ggcaagattttagcggttttatgga

SEQ ID NO: 142847 - DNA, 25 bp, Artificial
  probe
  misc_feature (1)..(25): SEQ ID NO: 889; WAN024D48_at; Start 129; Stop 153
gaatagtgaaactggctgcgcaact

SEQ ID NO: 142848 - DNA, 25 bp, Artificial
  probe
  misc_feature (1)..(25): SEQ ID NO: 889; WAN024D48_at; Start 283; Stop 307
ttaacggagttaggcaagtcccaga

SEQ ID NO: 142849 - DNA, 25 bp, Artificial
  probe
  misc_feature (1)..(25): SEQ ID NO: 889; WAN024D48_at; Start 419; Stop 443
tgaaagagaagggaaatgaggttta

SEQ ID NO: 142850 - DNA, 25 bp, Artificial
  probe
  misc_feature (1)..(25): SEQ ID NO: 889; WAN024D48_at; Start 252; Stop 276
tggaaaagacaagcgtaagaagtat

SEQ ID NO: 142851 - DNA, 25 bp, Artificial
  probe
  misc_feature (1)..(25): SEQ ID NO: 889; WAN024D48_at; Start 293; Stop 317
taggcaagtcccagaaagaagtggg

SEQ ID NO: 142852 - DNA, 25 bp, Artificial
  probe
  misc_feature (1)..(25): SEQ ID NO: 889; WAN024D48_at; Start 246; Stop 270
tccgtgtggaaaagacaagcgtaag

SEQ ID NO: 142853 - DNA, 25 bp, Artificial
  probe
  misc_feature (1)..(25): SEQ ID NO: 889; WAN024D48_at; Start 316; Stop 340
gggcatcgtgtcagtcagaaattgg

SEQ ID NO: 142854 - DNA, 25 bp, Artificial
  probe
  misc_feature (1)..(25): SEQ ID NO: 889; WAN024D48_at; Start 216; Stop 240
gctagaggaacaaaagcttgtaatt

SEQ ID NO: 142855 - DNA, 25 bp, Artificial
  probe
  misc_feature (1)..(25): SEQ ID NO: 889; WAN024D48_at; Start 243; Stop 267
tagtccgtgtggaaaagacaagcgt

SEQ ID NO: 142856 - DNA, 25 bp, Artificial
  probe
  misc_feature (1)..(25): SEQ ID NO: 889; WAN024D48_at; Start 18; Stop 42
gctagcccatcatattcgtttgttg

SEQ ID NO: 142857 - DNA, 25 bp, Artificial
  probe
  misc_feature (1)..(25): SEQ ID NO: 1748; WAN024D49_at; Start 646; Stop 670
gaacagtggatattctgggcggcta

SEQ ID NO: 142858 - DNA, 25 bp, Artificial
  probe
  misc_feature (1)..(25): SEQ ID NO: 1748; WAN024D49_at; Start 516; Stop 540
cattagtgtgctttggtggttggcc

SEQ ID NO: 142859 - DNA, 25 bp, Artificial
  probe
  misc_feature (1)..(25): SEQ ID NO: 1748; WAN024D49_at; Start 376; Stop 400
gaggtgctgacgacactttacttca

SEQ ID NO: 142860 - DNA, 25 bp, Artificial
  probe
  misc_feature (1)..(25): SEQ ID NO: 1748; WAN024D49_at; Start 588; Stop 612
ttcaatcacagatgcaaccaatggg

SEQ ID NO: 142861 - DNA, 25 bp, Artificial
  probe
  misc_feature (1)..(25): SEQ ID NO: 1748; WAN024D49_at; Start 358; Stop 382
cagaaaggcttttatggtgaggtgc

SEQ ID NO: 142862 - DNA, 25 bp, Artificial
  probe
  misc_feature (1)..(25): SEQ ID NO: 1748; WAN024D49_at; Start 548; Stop 572
tcatttatcagtctattggtgccaa

SEQ ID NO: 142863 - DNA, 25 bp, Artificial
  probe
  misc_feature (1)..(25): SEQ ID NO: 1748; WAN024D49_at; Start 759; Stop 783
ttggtatcaatggagcaaggcagct

SEQ ID NO: 142864 - DNA, 25 bp, Artificial
  probe
  misc_feature (1)..(25): SEQ ID NO: 1748; WAN024D49_at; Start 409; Stop 433
cagccaattggacttctagtttgga

SEQ ID NO: 142865 - DNA, 25 bp, Artificial
  probe
  misc_feature (1)..(25): SEQ ID NO: 1748; WAN024D49_at; Start 774; Stop 798
caaggcagctaagcagaatactgat

SEQ ID NO: 142866 - DNA, 25 bp, Artificial
  probe
  misc_feature (1)..(25): SEQ ID NO: 1748; WAN024D49_at; Start 145; Stop 169
gcccatcgtagttttgcccagtgga

SEQ ID NO: 142867 - DNA, 25 bp, Artificial
  probe
  misc_feature (1)..(25): SEQ ID NO: 1748; WAN024D49_at; Start 41; Stop 65
aaacaaccctaggtgaaatgtcagg

SEQ ID NO: 142868 - DNA, 25 bp, Artificial
  probe
  misc_feature (1)..(25): SEQ ID NO: 1748; WAN024D49_at; Start 217; Stop 241
tacgaacatcgtattgttgactgga

SEQ ID NO: 142869 - DNA, 25 bp, Artificial
  probe
  misc_feature (1)..(25): SEQ ID NO: 1748; WAN024D49_at; Start 131; Stop 155
gggatgacctctttgcccatcgtag

SEQ ID NO: 142870 - DNA, 25 bp, Artificial
  probe
  misc_feature (1)..(25): SEQ ID NO: 1748; WAN024D49_at; Start 278; Stop 302
taatctttgtatcggaaggtcgagc

SEQ ID NO: 142871 - DNA, 25 bp, Artificial
  probe
  misc_feature (1)..(25): SEQ ID NO: 1748; WAN024D49_at; Start 185; Stop 209
taggaagttttcctctctggctgga

SEQ ID NO: 142872 - DNA, 25 bp, Artificial
  probe
  misc_feature (1)..(25): SEQ ID NO: 1748; WAN024D49_at; Start 423; Stop 447
tctagtttggatttatcaggcacag

SEQ ID NO: 142873 - DNA, 25 bp, Artificial
  probe
  misc_feature (1)..(25): SEQ ID NO: 1748; WAN024D49_at; Start 471; Stop 495
tgtcgcgcgtaaactggacggcaag

SEQ ID NO: 142874 - DNA, 25 bp, Artificial
  probe
  misc_feature (1)..(25): SEQ ID NO: 1748; WAN024D49_at; Start 744; Stop 768
taacagtctagttggttggtatcaa

SEQ ID NO: 142875 - DNA, 25 bp, Artificial
  probe
  misc_feature (1)..(25): SEQ ID NO: 1748; WAN024D49_at; Start 70; Stop 94
taccgtcgtatggttgcggctatgg

SEQ ID NO: 142876 - DNA, 25 bp, Artificial
  probe
  misc_feature (1)..(25): SEQ ID NO: 1748; WAN024D49_at; Start 343; Stop 367
cttattttggccctacagaaaggct

SEQ ID NO: 142877 - DNA, 25 bp, Artificial
  probe
  misc_feature (1)..(25): SEQ ID NO: 1748; WAN024D49_at; Start 55; Stop 79
gaaatgtcaggtggttaccgtcgta

SEQ ID NO: 142878 - DNA, 25 bp, Artificial
  probe
  misc_feature (1)..(25): SEQ ID NO: 1748; WAN024D49_at; Start 626; Stop 650
tcatgacagctgtttaccgtgaaca

SEQ ID NO: 142879 - DNA, 25 bp, Artificial
  probe
  misc_feature (1)..(25): SEQ ID NO: 1748; WAN024D49_at; Start 457; Stop 481
gaaaagcaggagtttgtcgcgcgta

SEQ ID NO: 142880 - DNA, 25 bp, Artificial
  probe
  misc_feature (1)..(25): SEQ ID NO: 1748; WAN024D49_at; Start 492; Stop 516
caagggctggacaaagtatctttcc

SEQ ID NO: 142881 - DNA, 25 bp, Artificial
  probe
  misc_feature (1)..(25): SEQ ID NO: 1748; WAN024D49_at; Start 240; Stop 264
gattgggatgatttgtagcttgaca

SEQ ID NO: 142882 - DNA, 25 bp, Artificial
  probe
  misc_feature (1)..(25): SEQ ID NO: 1748; WAN024D49_at; Start 101; Stop 125
taggattttcaggaactatgaaggc

SEQ ID NO: 142883 - DNA, 25 bp, Artificial
  probe
  misc_feature (1)..(25): SEQ ID NO: 1748; WAN024D49_at; Start 699; Stop 723
gggagaaagcctgcaaattcaaggg

SEQ ID NO: 142884 - DNA, 25 bp, Artificial
  probe
  misc_feature (1)..(25): SEQ ID NO: 1748; WAN024D49_at; Start 200; Stop 224
tctggctggagttggtttacgaaca

SEQ ID NO: 142885 - DNA, 25 bp, Artificial
  probe
  misc_feature (1)..(25): SEQ ID NO: 1748; WAN024D49_at; Start 439; Stop 463
caggcacagtttaagaaggaaaagc

SEQ ID NO: 142886 - DNA, 25 bp, Artificial
  probe
  misc_feature (1)..(25): SEQ ID NO: 1748; WAN024D49_at; Start 394; Stop 418
tacttcacagtcatgcagccaattg

SEQ ID NO: 142887 - DNA, 25 bp, Artificial
  probe
  misc_feature (1)..(25): SEQ ID NO: 1748; WAN024D49_at; Start 290; Stop 314
cggaaggtcgagcaagtaattatct

SEQ ID NO: 142888 - DNA, 25 bp, Artificial
  probe
  misc_feature (1)..(25): SEQ ID NO: 1748; WAN024D49_at; Start 117; Stop 141
tatgaaggctatctgggatgacctc

SEQ ID NO: 142889 - DNA, 25 bp, Artificial
  probe
  misc_feature (1)..(25): SEQ ID NO: 1748; WAN024D49_at; Start 564; Stop 588
tggtgccaatcgtccctatcgtgat

SEQ ID NO: 142890 - DNA, 25 bp, Artificial
  probe
  misc_feature (1)..(25): SEQ ID NO: 1748; WAN024D49_at; Start 614; Stop 638
tagggcaaatcctcatgacagctgt

SEQ ID NO: 142891 - DNA, 25 bp, Artificial
  probe
  misc_feature (1)..(25): SEQ ID NO: 2492; WAN024D4A_at; Start 720; Stop 744
gccagcatttttcgcagccagcgat

SEQ ID NO: 142892 - DNA, 25 bp, Artificial
  probe
  misc_feature (1)..(25): SEQ ID NO: 2492; WAN024D4A_at; Start 850; Stop 874
tatcctcccctctctagtattacag

SEQ ID NO: 142893 - DNA, 25 bp, Artificial
  probe
  misc_feature (1)..(25): SEQ ID NO: 2492; WAN024D4A_at; Start 370; Stop 394
cgagctcagatttctgcctttgaag

SEQ ID NO: 142894 - DNA, 25 bp, Artificial
  probe
  misc_feature (1)..(25): SEQ ID NO: 2492; WAN024D4A_at; Start 655; Stop 679
tttactgcccagtctggctatgact

SEQ ID NO: 142895 - DNA, 25 bp, Artificial
  probe
  misc_feature (1)..(25): SEQ ID NO: 2492; WAN024D4A_at; Start 249; Stop 273
tcgcctaggaatagaaaaaagagcc

SEQ ID NO: 142896 - DNA, 25 bp, Artificial
  probe
  misc_feature (1)..(25): SEQ ID NO: 2492; WAN024D4A_at; Start 326; Stop 350
taagcgaggaagtgattgggattct

SEQ ID NO: 142897 - DNA, 25 bp, Artificial
  probe
  misc_feature (1)..(25): SEQ ID NO: 2492; WAN024D4A_at; Start 3; Stop 27
ggctaccttaaaagacattgcacag

SEQ ID NO: 142898 - DNA, 25 bp, Artificial
  probe
  misc_feature (1)..(25): SEQ ID NO: 2492; WAN024D4A_at; Start 794; Stop 818
tgccagatcgcgtcagcctcatttc

SEQ ID NO: 142899 - DNA, 25 bp, Artificial
  probe
  misc_feature (1)..(25): SEQ ID NO: 2492; WAN024D4A_at; Start 338; Stop 362
tgattgggattctctgcatcggaaa

SEQ ID NO: 142900 - DNA, 25 bp, Artificial
  probe
  misc_feature (1)..(25): SEQ ID NO: 2492; WAN024D4A_at; Start 133; Stop 157
ctgggctacaccaagcacctcaaga

SEQ ID NO: 142901 - DNA, 25 bp, Artificial
  probe
  misc_feature (1)..(25): SEQ ID NO: 2492; WAN024D4A_at; Start 259; Stop 283
atagaaaaaagagcccaagagttgg

SEQ ID NO: 142902 - DNA, 25 bp, Artificial
  probe
  misc_feature (1)..(25): SEQ ID NO: 2492; WAN024D4A_at; Start 705; Stop 729
gggagaccaacttccgccagcattt

SEQ ID NO: 142903 - DNA, 25 bp, Artificial
  probe
  misc_feature (1)..(25): SEQ ID NO: 2492; WAN024D4A_at; Start 691; Stop 715
gccattcagagcttgggagaccaac

SEQ ID NO: 142904 - DNA, 25 bp, Artificial
  probe
  misc_feature (1)..(25): SEQ ID NO: 2492; WAN024D4A_at; Start 747; Stop 771
tttagctatcggtgccctccgtgcc

SEQ ID NO: 142905 - DNA, 25 bp, Artificial
  probe
  misc_feature (1)..(25): SEQ ID NO: 2492; WAN024D4A_at; Start 143; Stop 167
ccaagcacctcaagacaggcgagtc

SEQ ID NO: 142906 - DNA, 25 bp, Artificial
  probe
  misc_feature (1)..(25): SEQ ID NO: 2492; WAN024D4A_at; Start 731; Stop 755
tcgcagccagcgatagtttagctat

SEQ ID NO: 142907 - DNA, 25 bp, Artificial
  probe
  misc_feature (1)..(25): SEQ ID NO: 2492; WAN024D4A_at; Start 73; Stop 97
gaccagagcctatctgttacagaag

SEQ ID NO: 142908 - DNA, 25 bp, Artificial
  probe
  misc_feature (1)..(25): SEQ ID NO: 2492; WAN024D4A_at; Start 235; Stop 259
tactactaccagattcgcctaggaa

SEQ ID NO: 142909 - DNA, 25 bp, Artificial
  probe
  misc_feature (1)..(25): SEQ ID NO: 2492; WAN024D4A_at; Start 87; Stop 111
tgttacagaagaaaccagacaccgt

SEQ ID NO: 142910 - DNA, 25 bp, Artificial
  probe
  misc_feature (1)..(25): SEQ ID NO: 2492; WAN024D4A_at; Start 172; Stop 196
aaacccaagcaaaagattgccatta

SEQ ID NO: 142911 - DNA, 25 bp, Artificial
  probe
  misc_feature (1)..(25): SEQ ID NO: 2492; WAN024D4A_at; Start 378; Stop 402
gatttctgcctttgaagaataccaa

SEQ ID NO: 142912 - DNA, 25 bp, Artificial
  probe
  misc_feature (1)..(25): SEQ ID NO: 2492; WAN024D4A_at; Start 980; Stop 1004
taagagaaagtaccctaaatcaaga

SEQ ID NO: 142913 - DNA, 25 bp, Artificial
  probe
  misc_feature (1)..(25): SEQ ID NO: 2492; WAN024D4A_at; Start 26; Stop 50
agctagcctctgtctctatcgcgac

SEQ ID NO: 142914 - DNA, 25 bp, Artificial
  probe
  misc_feature (1)..(25): SEQ ID NO: 2492; WAN024D4A_at; Start 11; Stop 35
taaaagacattgcacagctagcctc

SEQ ID NO: 142915 - DNA, 25 bp, Artificial
  probe
  misc_feature (1)..(25): SEQ ID NO: 2492; WAN024D4A_at; Start 699; Stop 723
gagcttgggagaccaacttccgcca

SEQ ID NO: 142916 - DNA, 25 bp, Artificial
  probe
  misc_feature (1)..(25): SEQ ID NO: 2492; WAN024D4A_at; Start 289; Stop 313
gatatcttgcgctattttaatgacc

SEQ ID NO: 142917 - DNA, 25 bp, Artificial
  probe
  misc_feature (1)..(25): SEQ ID NO: 2492; WAN024D4A_at; Start 31; Stop 55
gcctctgtctctatcgcgaccgtat

SEQ ID NO: 142918 - DNA, 25 bp, Artificial
  probe
  misc_feature (1)..(25): SEQ ID NO: 2492; WAN024D4A_at; Start 832; Stop 856
agtctgaccaaacaggtctatcctc

SEQ ID NO: 142919 - DNA, 25 bp, Artificial
  probe
  misc_feature (1)..(25): SEQ ID NO: 2492; WAN024D4A_at; Start 869; Stop 893
ttacagtttatactgaagaaatggg

SEQ ID NO: 142920 - DNA, 25 bp, Artificial
  probe
  misc_feature (1)..(25): SEQ ID NO: 2492; WAN024D4A_at; Start 895; Stop 919
cgagcaggtatggatattcttaaca

SEQ ID NO: 142921 - DNA, 25 bp, Artificial
  probe
  misc_feature (1)..(25): SEQ ID NO: 2492; WAN024D4A_at; Start 226; Stop 250
gacgacctctactactaccagattc

SEQ ID NO: 142922 - DNA, 25 bp, Artificial
  probe
  misc_feature (1)..(25): SEQ ID NO: 2492; WAN024D4A_at; Start 743; Stop 767
atagtttagctatcggtgccctccg

SEQ ID NO: 142923 - DNA, 25 bp, Artificial
  probe
  misc_feature (1)..(25): SEQ ID NO: 2492; WAN024D4A_at; Start 482; Stop 506
aacaggttgtcgattatttcctcag

SEQ ID NO: 142924 - DNA, 25 bp, Artificial
  probe
  misc_feature (1)..(25): SEQ ID NO: 2492; WAN024D4A_at; Start 104; Stop 128
gacaccgtattttaaccgttgctga

SEQ ID NO: 142925 - DNA, 25 bp, Artificial
  probe
  misc_feature (1)..(25): SEQ ID NO: 707; WAN024D4B_at; Start 145; Stop 169
tctgaaaatatgaaatttggtgacg

SEQ ID NO: 142926 - DNA, 25 bp, Artificial
  probe
  misc_feature (1)..(25): SEQ ID NO: 707; WAN024D4B_at; Start 101; Stop 125
taatcgtctgtaccttatcagatcc

SEQ ID NO: 142927 - DNA, 25 bp, Artificial
  probe
  misc_feature (1)..(25): SEQ ID NO: 707; WAN024D4B_at; Start 212; Stop 236
taggagataaattgccagagtggct

SEQ ID NO: 142928 - DNA, 25 bp, Artificial
  probe
  misc_feature (1)..(25): SEQ ID NO: 707; WAN024D4B_at; Start 54; Stop 78
catctggcctgattatgaaactgaa

SEQ ID NO: 142929 - DNA, 25 bp, Artificial
  probe
  misc_feature (1)..(25): SEQ ID NO: 707; WAN024D4B_at; Start 311; Stop 335
tagaaattacagaaactttatcacg

SEQ ID NO: 142930 - DNA, 25 bp, Artificial
  probe
  misc_feature (1)..(25): SEQ ID NO: 707; WAN024D4B_at; Start 266; Stop 290
taggtgaattattggaaagcaatct

SEQ ID NO: 142931 - DNA, 25 bp, Artificial
  probe
  misc_feature (1)..(25): SEQ ID NO: 707; WAN024D4B_at; Start 88; Stop 112
gataacctaagtttaatcgtctgta

SEQ ID NO: 142932 - DNA, 25 bp, Artificial
  probe
  misc_feature (1)..(25): SEQ ID NO: 707; WAN024D4B_at; Start 233; Stop 257
ggctacatagctcctatcatagatt

SEQ ID NO: 142933 - DNA, 25 bp, Artificial
  probe
  misc_feature (1)..(25): SEQ ID NO: 707; WAN024D4B_at; Start 329; Stop 353
tatcacgtttagtaagtatagaggc

SEQ ID NO: 142934 - DNA, 25 bp, Artificial
  probe
  misc_feature (1)..(25): SEQ ID NO: 707; WAN024D4B_at; Start 355; Stop 379
gaaaatccagatgaagccgaacgac

SEQ ID NO: 142935 - DNA, 25 bp, Artificial
  probe
  misc_feature (1)..(25): SEQ ID NO: 707; WAN024D4B_at; Start 74; Stop 98
ctgaaagccgttacgataacctaag

SEQ ID NO: 142936 - DNA, 25 bp, Artificial
  probe
  misc_feature (1)..(25): SEQ ID NO: 707; WAN024D4B_at; Start 383; Stop 407
taagagaaaagtataagagttgtga

SEQ ID NO: 142937 - DNA, 25 bp, Artificial
  probe
  misc_feature (1)..(25): SEQ ID NO: 707; WAN024D4B_at; Start 109; Stop 133
tgtaccttatcagatcccgattgtg

SEQ ID NO: 142938 - DNA, 25 bp, Artificial
  probe
  misc_feature (1)..(25): SEQ ID NO: 707; WAN024D4B_at; Start 124; Stop 148
cccgattgtgtgagatggttatctg

SEQ ID NO: 142939 - DNA, 25 bp, Artificial
  probe
  misc_feature (1)..(25): SEQ ID NO: 707; WAN024D4B_at; Start 250; Stop 274
catagattattgttaataggtgaat

SEQ ID NO: 142940 - DNA, 25 bp, Artificial
  probe
  misc_feature (1)..(25): SEQ ID NO: 707; WAN024D4B_at; Start 118; Stop 142
tcagatcccgattgtgtgagatggt

SEQ ID NO: 142941 - DNA, 25 bp, Artificial
  probe
  misc_feature (1)..(25): SEQ ID NO: 707; WAN024D4B_at; Start 2; Stop 26
tgaaaacgaaacaacttgttgcatc

SEQ ID NO: 142942 - DNA, 25 bp, Artificial
  probe
  misc_feature (1)..(25): SEQ ID NO: 707; WAN024D4B_at; Start 341; Stop 365
taagtatagaggctgaaaatccaga

SEQ ID NO: 142943 - DNA, 25 bp, Artificial
  probe
  misc_feature (1)..(25): SEQ ID NO: 707; WAN024D4B_at; Start 369; Stop 393
agccgaacgacttgtaagagaaaag

SEQ ID NO: 142944 - DNA, 25 bp, Artificial
  probe
  misc_feature (1)..(25): SEQ ID NO: 707; WAN024D4B_at; Start 64; Stop 88
gattatgaaactgaaagccgttacg

SEQ ID NO: 142945 - DNA, 25 bp, Artificial
  probe
  misc_feature (1)..(25): SEQ ID NO: 707; WAN024D4B_at; Start 414; Stop 438
tcttgatgcagatgattttcaggac

SEQ ID NO: 142946 - DNA, 25 bp, Artificial
  probe
  misc_feature (1)..(25): SEQ ID NO: 707; WAN024D4B_at; Start 361; Stop 385
ccagatgaagccgaacgacttgtaa

SEQ ID NO: 142947 - DNA, 25 bp, Artificial
  probe
  misc_feature (1)..(25): SEQ ID NO: 707; WAN024D4B_at; Start 435; Stop 459
ggactatgacactagcatatatgaa

SEQ ID NO: 142948 - DNA, 25 bp, Artificial
  probe
  misc_feature (1)..(25): SEQ ID NO: 707; WAN024D4B_at; Start 427; Stop 451
gattttcaggactatgacactagca

SEQ ID NO: 142949 - DNA, 25 bp, Artificial
  probe
  misc_feature (1)..(25): SEQ ID NO: 707; WAN024D4B_at; Start 169; Stop 193
gaaaaacaactagctttgatgaagg

SEQ ID NO: 142950 - DNA, 25 bp, Artificial
  probe
  misc_feature (1)..(25): SEQ ID NO: 707; WAN024D4B_at; Start 162; Stop 186
tggtgacgaaaaacaactagctttg

SEQ ID NO: 142951 - DNA, 25 bp, Artificial
  probe
  misc_feature (1)..(25): SEQ ID NO: 707; WAN024D4B_at; Start 224; Stop 248
tgccagagtggctacatagctccta

SEQ ID NO: 142952 - DNA, 25 bp, Artificial
  probe
  misc_feature (1)..(25): SEQ ID NO: 707; WAN024D4B_at; Start 278; Stop 302
tggaaagcaatctaaaactgaaaaa

SEQ ID NO: 142953 - DNA, 25 bp, Artificial
  probe
  misc_feature (1)..(25): SEQ ID NO: 707; WAN024D4B_at; Start 40; Stop 64
gatttcttaaaagtcatctggcctg

SEQ ID NO: 142954 - DNA, 25 bp, Artificial
  probe
  misc_feature (1)..(25): SEQ ID NO: 707; WAN024D4B_at; Start 13; Stop 37
caacttgttgcatcagaagaggtgt

SEQ ID NO: 142955 - DNA, 25 bp, Artificial
  probe
  misc_feature (1)..(25): SEQ ID NO: 707; WAN024D4B_at; Start 296; Stop 320
tgaaaaagtatacagtagaaattac

SEQ ID NO: 142956 - DNA, 25 bp, Artificial
  probe
  misc_feature (1)..(25): SEQ ID NO: 707; WAN024D4B_at; Start 182; Stop 206
ctttgatgaaggaaaaatatgggtg

SEQ ID NO: 142957 - DNA, 25 bp, Artificial
  probe
  misc_feature (1)..(25): SEQ ID NO: 707; WAN024D4B_at; Start 399; Stop 423
gagttgtgaaattgttcttgatgca

SEQ ID NO: 142958 - DNA, 25 bp, Artificial
  probe
  misc_feature (1)..(25): SEQ ID NO: 707; WAN024D4B_at; Start 22; Stop 46
gcatcagaagaggtgtatgatttct

SEQ ID NO: 142959 - DNA, 25 bp, Artificial
  probe
  misc_feature (1)..(25): SEQ ID NO: 2620; WAN024D4C_at; Start 211; Stop 235
caaatatttgaaactgctttactcg

SEQ ID NO: 142960 - DNA, 25 bp, Artificial
  probe
  misc_feature (1)..(25): SEQ ID NO: 2620; WAN024D4C_at; Start 127; Stop 151
gagataggttattcagtctcagaag

SEQ ID NO: 142961 - DNA, 25 bp, Artificial
  probe
  misc_feature (1)..(25): SEQ ID NO: 2620; WAN024D4C_at; Start 204; Stop 228
tcttaaacaaatatttgaaactgct

SEQ ID NO: 142962 - DNA, 25 bp, Artificial
  probe
  misc_feature (1)..(25): SEQ ID NO: 2620; WAN024D4C_at; Start 124; Stop 148
gaggagataggttattcagtctcag

SEQ ID NO: 142963 - DNA, 25 bp, Artificial
  probe
  misc_feature (1)..(25): SEQ ID NO: 2620; WAN024D4C_at; Start 144; Stop 168
ctcagaagttgtacatattttatca

SEQ ID NO: 142964 - DNA, 25 bp, Artificial
  probe
  misc_feature (1)..(25): SEQ ID NO: 2620; WAN024D4C_at; Start 25; Stop 49
tcgatacaaggaagttccgtagaaa

SEQ ID NO: 142965 - DNA, 25 bp, Artificial
  probe
  misc_feature (1)..(25): SEQ ID NO: 2620; WAN024D4C_at; Start 97; Stop 121
ggagctacagatttatataattcta

SEQ ID NO: 142966 - DNA, 25 bp, Artificial
  probe
  misc_feature (1)..(25): SEQ ID NO: 2620; WAN024D4C_at; Start 31; Stop 55
caaggaagttccgtagaaaatgagg

SEQ ID NO: 142967 - DNA, 25 bp, Artificial
  probe
  misc_feature (1)..(25): SEQ ID NO: 2620; WAN024D4C_at; Start 243; Stop 267
agatgaaatcggtttaaactcatat

SEQ ID NO: 142968 - DNA, 25 bp, Artificial
  probe
  misc_feature (1)..(25): SEQ ID NO: 2620; WAN024D4C_at; Start 131; Stop 155
taggttattcagtctcagaagttgt

SEQ ID NO: 142969 - DNA, 25 bp, Artificial
  probe
  misc_feature (1)..(25): SEQ ID NO: 2620; WAN024D4C_at; Start 232; Stop 256
ctcgaggttaaagatgaaatcggtt

SEQ ID NO: 142970 - DNA, 25 bp, Artificial
  probe
  misc_feature (1)..(25): SEQ ID NO: 2620; WAN024D4C_at; Start 118; Stop 142
tctaaagaggagataggttattcag

SEQ ID NO: 142971 - DNA, 25 bp, Artificial
  probe
  misc_feature (1)..(25): SEQ ID NO: 2620; WAN024D4C_at; Start 225; Stop 249
tgctttactcgaggttaaagatgaa

SEQ ID NO: 142972 - DNA, 25 bp, Artificial
  probe
  misc_feature (1)..(25): SEQ ID NO: 2620; WAN024D4C_at; Start 19; Stop 43
atttgttcgatacaaggaagttccg

SEQ ID NO: 142973 - DNA, 25 bp, Artificial
  probe
  misc_feature (1)..(25): SEQ ID NO: 2620; WAN024D4C_at; Start 230; Stop 254
tactcgaggttaaagatgaaatcgg

SEQ ID NO: 142974 - DNA, 25 bp, Artificial
  probe
  misc_feature (1)..(25): SEQ ID NO: 2620; WAN024D4C_at; Start 215; Stop 239
tatttgaaactgctttactcgaggt

SEQ ID NO: 142975 - DNA, 25 bp, Artificial
  probe
  misc_feature (1)..(25): SEQ ID NO: 2620; WAN024D4C_at; Start 60; Stop 84
tgtaggttcacaaaatcagtatttt

SEQ ID NO: 142976 - DNA, 25 bp, Artificial
  probe
  misc_feature (1)..(25): SEQ ID NO: 2620; WAN024D4C_at; Start 120; Stop 144
taaagaggagataggttattcagtc

SEQ ID NO: 142977 - DNA, 25 bp, Artificial
  probe
  misc_feature (1)..(25): SEQ ID NO: 2620; WAN024D4C_at; Start 213; Stop 237
aatatttgaaactgctttactcgag

SEQ ID NO: 142978 - DNA, 25 bp, Artificial
  probe
  misc_feature (1)..(25): SEQ ID NO: 2620; WAN024D4C_at; Start 174; Stop 198
tttgtcggttaattgtaaagaatca

SEQ ID NO: 142979 - DNA, 25 bp, Artificial
  probe
  misc_feature (1)..(25): SEQ ID NO: 2620; WAN024D4C_at; Start 116; Stop 140
attctaaagaggagataggttattc

SEQ ID NO: 142980 - DNA, 25 bp, Artificial
  probe
  misc_feature (1)..(25): SEQ ID NO: 2620; WAN024D4C_at; Start 136; Stop 160
tattcagtctcagaagttgtacata

SEQ ID NO: 142981 - DNA, 25 bp, Artificial
  probe
  misc_feature (1)..(25): SEQ ID NO: 2620; WAN024D4C_at; Start 22; Stop 46
tgttcgatacaaggaagttccgtag

SEQ ID NO: 142982 - DNA, 25 bp, Artificial
  probe
  misc_feature (1)..(25): SEQ ID NO: 2620; WAN024D4C_at; Start 9; Stop 33
gataaataaaatttgttcgatacaa

SEQ ID NO: 142983 - DNA, 25 bp, Artificial
  probe
  misc_feature (1)..(25): SEQ ID NO: 2620; WAN024D4C_at; Start 140; Stop 164
cagtctcagaagttgtacatatttt

SEQ ID NO: 142984 - DNA, 25 bp, Artificial
  probe
  misc_feature (1)..(25): SEQ ID NO: 2620; WAN024D4C_at; Start 219; Stop 243
tgaaactgctttactcgaggttaaa

SEQ ID NO: 142985 - DNA, 25 bp, Artificial
  probe
  misc_feature (1)..(25): SEQ ID NO: 2620; WAN024D4C_at; Start 133; Stop 157
ggttattcagtctcagaagttgtac

SEQ ID NO: 142986 - DNA, 25 bp, Artificial
  probe
  misc_feature (1)..(25): SEQ ID NO: 2620; WAN024D4C_at; Start 129; Stop 153
gataggttattcagtctcagaagtt

SEQ ID NO: 142987 - DNA, 25 bp, Artificial
  probe
  misc_feature (1)..(25): SEQ ID NO: 2620; WAN024D4C_at; Start 240; Stop 264
taaagatgaaatcggtttaaactca

SEQ ID NO: 142988 - DNA, 25 bp, Artificial
  probe
  misc_feature (1)..(25): SEQ ID NO: 2620; WAN024D4C_at; Start 217; Stop 241
tttgaaactgctttactcgaggtta

SEQ ID NO: 142989 - DNA, 25 bp, Artificial
  probe
  misc_feature (1)..(25): SEQ ID NO: 2620; WAN024D4C_at; Start 176; Stop 200
tgtcggttaattgtaaagaatcaaa

SEQ ID NO: 142990 - DNA, 25 bp, Artificial
  probe
  misc_feature (1)..(25): SEQ ID NO: 2620; WAN024D4C_at; Start 110; Stop 134
tatataattctaaagaggagatagg

SEQ ID NO: 142991 - DNA, 25 bp, Artificial
  probe
  misc_feature (1)..(25): SEQ ID NO: 2620; WAN024D4C_at; Start 21; Stop 45
ttgttcgatacaaggaagttccgta

SEQ ID NO: 142992 - DNA, 25 bp, Artificial
  probe
  misc_feature (1)..(25): SEQ ID NO: 2620; WAN024D4C_at; Start 34; Stop 58
ggaagttccgtagaaaatgaggata

SEQ ID NO: 142993 - DNA, 25 bp, Artificial
  probe
  misc_feature (1)..(25): SEQ ID NO: 6670; WAN024D4D_at; Start 25; Stop 49
ctttcagttctaattcgagttcgtg

SEQ ID NO: 142994 - DNA, 25 bp, Artificial
  probe
  misc_feature (1)..(25): SEQ ID NO: 6670; WAN024D4D_at; Start 28; Stop 52
tcagttctaattcgagttcgtggcg

SEQ ID NO: 142995 - DNA, 25 bp, Artificial
  probe
  misc_feature (1)..(25): SEQ ID NO: 6670; WAN024D4D_at; Start 19; Stop 43
atttccctttcagttctaattcgag

SEQ ID NO: 142996 - DNA, 25 bp, Artificial
  probe
  misc_feature (1)..(25): SEQ ID NO: 6670; WAN024D4D_at; Start 34; Stop 58
ctaattcgagttcgtggcgactgta

SEQ ID NO: 142997 - DNA, 25 bp, Artificial
  probe
  misc_feature (1)..(25): SEQ ID NO: 6670; WAN024D4D_at; Start 47; Stop 71
gtggcgactgtatgaaaaatcccca

SEQ ID NO: 142998 - DNA, 25 bp, Artificial
  probe
  misc_feature (1)..(25): SEQ ID NO: 6670; WAN024D4D_at; Start 54; Stop 78
ctgtatgaaaaatccccacgcaaaa

SEQ ID NO: 142999 - DNA, 25 bp, Artificial
  probe
  misc_feature (1)..(25): SEQ ID NO: 6670; WAN024D4D_at; Start 30; Stop 54
agttctaattcgagttcgtggcgac

SEQ ID NO: 143000 - DNA, 25 bp, Artificial
  probe
  misc_feature (1)..(25): SEQ ID NO: 6670; WAN024D4D_at; Start 37; Stop 61
attcgagttcgtggcgactgtatga

SEQ ID NO: 143001 - DNA, 25 bp, Artificial
  probe
  misc_feature (1)..(25): SEQ ID NO: 6670; WAN024D4D_at; Start 35; Stop 59
taattcgagttcgtggcgactgtat

SEQ ID NO: 143002 - DNA, 25 bp, Artificial
  probe
  misc_feature (1)..(25): SEQ ID NO: 6670; WAN024D4D_at; Start 49; Stop 73
ggcgactgtatgaaaaatccccacg

SEQ ID NO: 143003 - DNA, 25 bp, Artificial
  probe
  misc_feature (1)..(25): SEQ ID NO: 6670; WAN024D4D_at; Start 48; Stop 72
tggcgactgtatgaaaaatccccac

SEQ ID NO: 143004 - DNA, 25 bp, Artificial
  probe
  misc_feature (1)..(25): SEQ ID NO: 6670; WAN024D4D_at; Start 18; Stop 42
catttccctttcagttctaattcga

SEQ ID NO: 143005 - DNA, 25 bp, Artificial
  probe
  misc_feature (1)..(25): SEQ ID NO: 6670; WAN024D4D_at; Start 23; Stop 47
ccctttcagttctaattcgagttcg

SEQ ID NO: 143006 - DNA, 25 bp, Artificial
  probe
  misc_feature (1)..(25): SEQ ID NO: 6670; WAN024D4D_at; Start 45; Stop 69
tcgtggcgactgtatgaaaaatccc

SEQ ID NO: 143007 - DNA, 25 bp, Artificial
  probe
  misc_feature (1)..(25): SEQ ID NO: 6670; WAN024D4D_at; Start 44; Stop 68
ttcgtggcgactgtatgaaaaatcc

SEQ ID NO: 143008 - DNA, 25 bp, Artificial
  probe
  misc_feature (1)..(25): SEQ ID NO: 6670; WAN024D4D_at; Start 32; Stop 56
ttctaattcgagttcgtggcgactg

SEQ ID NO: 143009 - DNA, 25 bp, Artificial
  probe
  misc_feature (1)..(25): SEQ ID NO: 6670; WAN024D4D_at; Start 53; Stop 77
actgtatgaaaaatccccacgcaaa

SEQ ID NO: 143010 - DNA, 25 bp, Artificial
  probe
  misc_feature (1)..(25): SEQ ID NO: 6670; WAN024D4D_at; Start 46; Stop 70
cgtggcgactgtatgaaaaatcccc

SEQ ID NO: 143011 - DNA, 25 bp, Artificial
  probe
  misc_feature (1)..(25): SEQ ID NO: 6670; WAN024D4D_at; Start 27; Stop 51
ttcagttctaattcgagttcgtggc

SEQ ID NO: 143012 - DNA, 25 bp, Artificial
  probe
  misc_feature (1)..(25): SEQ ID NO: 6670; WAN024D4D_at; Start 41; Stop 65
gagttcgtggcgactgtatgaaaaa

SEQ ID NO: 143013 - DNA, 25 bp, Artificial
  probe
  misc_feature (1)..(25): SEQ ID NO: 6670; WAN024D4D_at; Start 52; Stop 76
gactgtatgaaaaatccccacgcaa

SEQ ID NO: 143014 - DNA, 25 bp, Artificial
  probe
  misc_feature (1)..(25): SEQ ID NO: 6670; WAN024D4D_at; Start 7; Stop 31
cgttccattgtcatttccctttcag

SEQ ID NO: 143015 - DNA, 25 bp, Artificial
  probe
  misc_feature (1)..(25): SEQ ID NO: 6670; WAN024D4D_at; Start 29; Stop 53
cagttctaattcgagttcgtggcga

SEQ ID NO: 143016 - DNA, 25 bp, Artificial
  probe
  misc_feature (1)..(25): SEQ ID NO: 6670; WAN024D4D_at; Start 50; Stop 74
gcgactgtatgaaaaatccccacgc

SEQ ID NO: 143017 - DNA, 25 bp, Artificial
  probe
  misc_feature (1)..(25): SEQ ID NO: 6670; WAN024D4D_at; Start 3; Stop 27
gattcgttccattgtcatttccctt

SEQ ID NO: 143018 - DNA, 25 bp, Artificial
  probe
  misc_feature (1)..(25): SEQ ID NO: 6670; WAN024D4D_at; Start 36; Stop 60
aattcgagttcgtggcgactgtatg

SEQ ID NO: 143019 - DNA, 25 bp, Artificial
  probe
  misc_feature (1)..(25): SEQ ID NO: 6670; WAN024D4D_at; Start 11; Stop 35
ccattgtcatttccctttcagttct

SEQ ID NO: 143020 - DNA, 25 bp, Artificial
  probe
  misc_feature (1)..(25): SEQ ID NO: 6670; WAN024D4D_at; Start 8; Stop 32
gttccattgtcatttccctttcagt

SEQ ID NO: 143021 - DNA, 25 bp, Artificial
  probe
  misc_feature (1)..(25): SEQ ID NO: 6670; WAN024D4D_at; Start 43; Stop 67
gttcgtggcgactgtatgaaaaatc

SEQ ID NO: 143022 - DNA, 25 bp, Artificial
  probe
  misc_feature (1)..(25): SEQ ID NO: 6670; WAN024D4D_at; Start 1; Stop 25
atgattcgttccattgtcatttccc

SEQ ID NO: 143023 - DNA, 25 bp, Artificial
  probe
  misc_feature (1)..(25): SEQ ID NO: 6670; WAN024D4D_at; Start 40; Stop 64
cgagttcgtggcgactgtatgaaaa

SEQ ID NO: 143024 - DNA, 25 bp, Artificial
  probe
  misc_feature (1)..(25): SEQ ID NO: 6670; WAN024D4D_at; Start 33; Stop 57
tctaattcgagttcgtggcgactgt

SEQ ID NO: 143025 - DNA, 25 bp, Artificial
  probe
  misc_feature (1)..(25): SEQ ID NO: 6670; WAN024D4D_at; Start 31; Stop 55
gttctaattcgagttcgtggcgact

SEQ ID NO: 143026 - DNA, 25 bp, Artificial
  probe
  misc_feature (1)..(25): SEQ ID NO: 6670; WAN024D4D_at; Start 51; Stop 75
cgactgtatgaaaaatccccacgca

SEQ ID NO: 143027 - DNA, 25 bp, Artificial
  probe
  misc_feature (1)..(25): SEQ ID NO: 5647; WAN024D4E_at; Start 22; Stop 46
ggcctcttgactgcgctcactataa

SEQ ID NO: 143028 - DNA, 25 bp, Artificial
  probe
  misc_feature (1)..(25): SEQ ID NO: 5647; WAN024D4E_at; Start 61; Stop 85
gacatgtatcttctccttcttgtgg

SEQ ID NO: 143029 - DNA, 25 bp, Artificial
  probe
  misc_feature (1)..(25): SEQ ID NO: 5647; WAN024D4E_at; Start 66; Stop 90
gtatcttctccttcttgtggtcaaa

SEQ ID NO: 143030 - DNA, 25 bp, Artificial
  probe
  misc_feature (1)..(25): SEQ ID NO: 5647; WAN024D4E_at; Start 147; Stop 171
cagggatttgaccaatttcttcata

SEQ ID NO: 143031 - DNA, 25 bp, Artificial
  probe
  misc_feature (1)..(25): SEQ ID NO: 5647; WAN024D4E_at; Start 183; Stop 207
tatcgtaacccacaaaaccaatggc

SEQ ID NO: 143032 - DNA, 25 bp, Artificial
  probe
  misc_feature (1)..(25): SEQ ID NO: 5647; WAN024D4E_at; Start 16; Stop 40
ttccaaggcctcttgactgcgctca

SEQ ID NO: 143033 - DNA, 25 bp, Artificial
  probe
  misc_feature (1)..(25): SEQ ID NO: 5647; WAN024D4E_at; Start 129; Stop 153
gcgtcccaattgtatcctcagggat

SEQ ID NO: 143034 - DNA, 25 bp, Artificial
  probe
  misc_feature (1)..(25): SEQ ID NO: 5647; WAN024D4E_at; Start 116; Stop 140
aaatgcatgtctggcgtcccaattg

SEQ ID NO: 143035 - DNA, 25 bp, Artificial
  probe
  misc_feature (1)..(25): SEQ ID NO: 5647; WAN024D4E_at; Start 124; Stop 148
gtctggcgtcccaattgtatcctca

SEQ ID NO: 143036 - DNA, 25 bp, Artificial
  probe
  misc_feature (1)..(25): SEQ ID NO: 5647; WAN024D4E_at; Start 111; Stop 135
caaagaaatgcatgtctggcgtccc

SEQ ID NO: 143037 - DNA, 25 bp, Artificial
  probe
  misc_feature (1)..(25): SEQ ID NO: 5647; WAN024D4E_at; Start 49; Stop 73
tgcatcctctatgacatgtatcttc

SEQ ID NO: 143038 - DNA, 25 bp, Artificial
  probe
  misc_feature (1)..(25): SEQ ID NO: 5647; WAN024D4E_at; Start 155; Stop 179
tgaccaatttcttcataaagcgaaa

SEQ ID NO: 143039 - DNA, 25 bp, Artificial
  probe
  misc_feature (1)..(25): SEQ ID NO: 5647; WAN024D4E_at; Start 201; Stop 225
caatggctccaccaccaaaaggtag

SEQ ID NO: 143040 - DNA, 25 bp, Artificial
  probe
  misc_feature (1)..(25): SEQ ID NO: 5647; WAN024D4E_at; Start 13; Stop 37
tttttccaaggcctcttgactgcgc

SEQ ID NO: 143041 - DNA, 25 bp, Artificial
  probe
  misc_feature (1)..(25): SEQ ID NO: 5647; WAN024D4E_at; Start 10; Stop 34
ggatttttccaaggcctcttgactg

SEQ ID NO: 143042 - DNA, 25 bp, Artificial
  probe
  misc_feature (1)..(25): SEQ ID NO: 5647; WAN024D4E_at; Start 144; Stop 168
cctcagggatttgaccaatttcttc

SEQ ID NO: 143043 - DNA, 25 bp, Artificial
  probe
  misc_feature (1)..(25): SEQ ID NO: 5647; WAN024D4E_at; Start 6; Stop 30
tcaaggatttttccaaggcctcttg

SEQ ID NO: 143044 - DNA, 25 bp, Artificial
  probe
  misc_feature (1)..(25): SEQ ID NO: 5647; WAN024D4E_at; Start 113; Stop 137
aagaaatgcatgtctggcgtcccaa

SEQ ID NO: 143045 - DNA, 25 bp, Artificial
  probe
  misc_feature (1)..(25): SEQ ID NO: 5647; WAN024D4E_at; Start 174; Stop 198
gcgaaatcatatcgtaacccacaaa

SEQ ID NO: 143046 - DNA, 25 bp, Artificial
  probe
  misc_feature (1)..(25): SEQ ID NO: 5647; WAN024D4E_at; Start 170; Stop 194
taaagcgaaatcatatcgtaaccca

SEQ ID NO: 143047 - DNA, 25 bp, Artificial
  probe
  misc_feature (1)..(25): SEQ ID NO: 5647; WAN024D4E_at; Start 100; Stop 124
gctctcatagacaaagaaatgcatg

SEQ ID NO: 143048 - DNA, 25 bp, Artificial
  probe
  misc_feature (1)..(25): SEQ ID NO: 5647; WAN024D4E_at; Start 187; Stop 211
gtaacccacaaaaccaatggctcca

SEQ ID NO: 143049 - DNA, 25 bp, Artificial
  probe
  misc_feature (1)..(25): SEQ ID NO: 5647; WAN024D4E_at; Start 96; Stop 120
tatagctctcatagacaaagaaatg

SEQ ID NO: 143050 - DNA, 25 bp, Artificial
  probe
  misc_feature (1)..(25): SEQ ID NO: 5647; WAN024D4E_at; Start 121; Stop 145
catgtctggcgtcccaattgtatcc

SEQ ID NO: 143051 - DNA, 25 bp, Artificial
  probe
  misc_feature (1)..(25): SEQ ID NO: 5647; WAN024D4E_at; Start 141; Stop 165
tatcctcagggatttgaccaatttc

SEQ ID NO: 143052 - DNA, 25 bp, Artificial
  probe
  misc_feature (1)..(25): SEQ ID NO: 5647; WAN024D4E_at; Start 164; Stop 188
tcttcataaagcgaaatcatatcgt

SEQ ID NO: 143053 - DNA, 25 bp, Artificial
  probe
  misc_feature (1)..(25): SEQ ID NO: 5647; WAN024D4E_at; Start 69; Stop 93
tcttctccttcttgtggtcaaagac

SEQ ID NO: 143054 - DNA, 25 bp, Artificial
  probe
  misc_feature (1)..(25): SEQ ID NO: 5647; WAN024D4E_at; Start 53; Stop 77
tcctctatgacatgtatcttctcct

SEQ ID NO: 143055 - DNA, 25 bp, Artificial
  probe
  misc_feature (1)..(25): SEQ ID NO: 5647; WAN024D4E_at; Start 185; Stop 209
tcgtaacccacaaaaccaatggctc

SEQ ID NO: 143056 - DNA, 25 bp, Artificial
  probe
  misc_feature (1)..(25): SEQ ID NO: 5647; WAN024D4E_at; Start 102; Stop 126
tctcatagacaaagaaatgcatgtc

SEQ ID NO: 143057 - DNA, 25 bp, Artificial
  probe
  misc_feature (1)..(25): SEQ ID NO: 5647; WAN024D4E_at; Start 127; Stop 151
tggcgtcccaattgtatcctcaggg

SEQ ID NO: 143058 - DNA, 25 bp, Artificial
  probe
  misc_feature (1)..(25): SEQ ID NO: 5647; WAN024D4E_at; Start 19; Stop 43
caaggcctcttgactgcgctcacta

SEQ ID NO: 143059 - DNA, 25 bp, Artificial
  probe
  misc_feature (1)..(25): SEQ ID NO: 5647; WAN024D4E_at; Start 107; Stop 131
tagacaaagaaatgcatgtctggcg

SEQ ID NO: 143060 - DNA, 25 bp, Artificial
  probe
  misc_feature (1)..(25): SEQ ID NO: 5647; WAN024D4E_at; Start 135; Stop 159
caattgtatcctcagggatttgacc

SEQ ID NO: 143061 - DNA, 25 bp, Artificial
  probe
  misc_feature (1)..(25): SEQ ID NO: 5610; WAN024D4F_at; Start 210; Stop 234
cagaaacggttccagcaggaagcgt

SEQ ID NO: 143062 - DNA, 25 bp, Artificial
  probe
  misc_feature (1)..(25): SEQ ID NO: 5610; WAN024D4F_at; Start 612; Stop 636
cgcggagatttctgtagaagtcaaa

SEQ ID NO: 143063 - DNA, 25 bp, Artificial
  probe
  misc_feature (1)..(25): SEQ ID NO: 5610; WAN024D4F_at; Start 3; Stop 27
ggtattcgttttgggcgatagagtc

SEQ ID NO: 143064 - DNA, 25 bp, Artificial
  probe
  misc_feature (1)..(25): SEQ ID NO: 5610; WAN024D4F_at; Start 449; Stop 473
aaggccttgtcttcttcatccgtag

SEQ ID NO: 143065 - DNA, 25 bp, Artificial
  probe
  misc_feature (1)..(25): SEQ ID NO: 5610; WAN024D4F_at; Start 19; Stop 43
gatagagtcgtagacaatccctgcc

SEQ ID NO: 143066 - DNA, 25 bp, Artificial
  probe
  misc_feature (1)..(25): SEQ ID NO: 5610; WAN024D4F_at; Start 397; Stop 421
caacattcgatgttctgctgtttcc

SEQ ID NO: 143067 - DNA, 25 bp, Artificial
  probe
  misc_feature (1)..(25): SEQ ID NO: 5610; WAN024D4F_at; Start 255; Stop 279
cagtgagttctgcaagcaaacgccc

SEQ ID NO: 143068 - DNA, 25 bp, Artificial
  probe
  misc_feature (1)..(25): SEQ ID NO: 5610; WAN024D4F_at; Start 412; Stop 436
tgctgtttccttctcatcagagagg

SEQ ID NO: 143069 - DNA, 25 bp, Artificial
  probe
  misc_feature (1)..(25): SEQ ID NO: 5610; WAN024D4F_at; Start 511; Stop 535
cacgatgccatttttgacagaaacc

SEQ ID NO: 143070 - DNA, 25 bp, Artificial
  probe
  misc_feature (1)..(25): SEQ ID NO: 5610; WAN024D4F_at; Start 164; Stop 188
gtttccagttcatagatacgtctca

SEQ ID NO: 143071 - DNA, 25 bp, Artificial
  probe
  misc_feature (1)..(25): SEQ ID NO: 5610; WAN024D4F_at; Start 425; Stop 449
tcatcagagaggaggtcagtcgcca

SEQ ID NO: 143072 - DNA, 25 bp, Artificial
  probe
  misc_feature (1)..(25): SEQ ID NO: 5610; WAN024D4F_at; Start 76; Stop 100
aatcatggttcggatggcgatggcc

SEQ ID NO: 143073 - DNA, 25 bp, Artificial
  probe
  misc_feature (1)..(25): SEQ ID NO: 5610; WAN024D4F_at; Start 362; Stop 386
gagatgcggccaatatcgttacgcc

SEQ ID NO: 143074 - DNA, 25 bp, Artificial
  probe
  misc_feature (1)..(25): SEQ ID NO: 5610; WAN024D4F_at; Start 225; Stop 249
caggaagcgttgctttcaaggcatc

SEQ ID NO: 143075 - DNA, 25 bp, Artificial
  probe
  misc_feature (1)..(25): SEQ ID NO: 5610; WAN024D4F_at; Start 240; Stop 264
tcaaggcatccatggcagtgagttc

SEQ ID NO: 143076 - DNA, 25 bp, Artificial
  probe
  misc_feature (1)..(25): SEQ ID NO: 5610; WAN024D4F_at; Start 180; Stop 204
tacgtctcatcgctcgaatctttgg

SEQ ID NO: 143077 - DNA, 25 bp, Artificial
  probe
  misc_feature (1)..(25): SEQ ID NO: 5610; WAN024D4F_at; Start 124; Stop 148
caagtagccgattgccccagcgtat

SEQ ID NO: 143078 - DNA, 25 bp, Artificial
  probe
  misc_feature (1)..(25): SEQ ID NO: 5610; WAN024D4F_at; Start 269; Stop 293
agcaaacgccccttgactacgctgg

SEQ ID NO: 143079 - DNA, 25 bp, Artificial
  probe
  misc_feature (1)..(25): SEQ ID NO: 5610; WAN024D4F_at; Start 92; Stop 116
gcgatggccaaatccatatcacccg

SEQ ID NO: 143080 - DNA, 25 bp, Artificial
  probe
  misc_feature (1)..(25): SEQ ID NO: 5610; WAN024D4F_at; Start 301; Stop 325
catgacgtagcggaagagctccact

SEQ ID NO: 143081 - DNA, 25 bp, Artificial
  probe
  misc_feature (1)..(25): SEQ ID NO: 5610; WAN024D4F_at; Start 551; Stop 575
gctccgatgatttgataatccccaa

SEQ ID NO: 143082 - DNA, 25 bp, Artificial
  probe
  misc_feature (1)..(25): SEQ ID NO: 5610; WAN024D4F_at; Start 109; Stop 133
atcacccgtcgcagacaagtagccg

SEQ ID NO: 143083 - DNA, 25 bp, Artificial
  probe
  misc_feature (1)..(25): SEQ ID NO: 5610; WAN024D4F_at; Start 635; Stop 659
aatggatttccagtaacttctgctg

SEQ ID NO: 143084 - DNA, 25 bp, Artificial
  probe
  misc_feature (1)..(25): SEQ ID NO: 5610; WAN024D4F_at; Start 495; Stop 519
caatcggattggttgtcacgatgcc

SEQ ID NO: 143085 - DNA, 25 bp, Artificial
  probe
  misc_feature (1)..(25): SEQ ID NO: 5610; WAN024D4F_at; Start 332; Stop 356
tacttagtgacttggacactggtcg

SEQ ID NO: 143086 - DNA, 25 bp, Artificial
  probe
  misc_feature (1)..(25): SEQ ID NO: 5610; WAN024D4F_at; Start 316; Stop 340
gagctccacttccatatacttagtg

SEQ ID NO: 143087 - DNA, 25 bp, Artificial
  probe
  misc_feature (1)..(25): SEQ ID NO: 5610; WAN024D4F_at; Start 283; Stop 307
gactacgctggtcaaatgcatgacg

SEQ ID NO: 143088 - DNA, 25 bp, Artificial
  probe
  misc_feature (1)..(25): SEQ ID NO: 5610; WAN024D4F_at; Start 384; Stop 408
gccccaagtctaccaacattcgatg

SEQ ID NO: 143089 - DNA, 25 bp, Artificial
  probe
  misc_feature (1)..(25): SEQ ID NO: 5610; WAN024D4F_at; Start 195; Stop 219
gaatctttggtgctccagaaacggt

SEQ ID NO: 143090 - DNA, 25 bp, Artificial
  probe
  misc_feature (1)..(25): SEQ ID NO: 5610; WAN024D4F_at; Start 43; Stop 67
cccagcctgcacataggctctttga

SEQ ID NO: 143091 - DNA, 25 bp, Artificial
  probe
  misc_feature (1)..(25): SEQ ID NO: 5610; WAN024D4F_at; Start 348; Stop 372
cactggtcgtttcagagatgcggcc

SEQ ID NO: 143092 - DNA, 25 bp, Artificial
  probe
  misc_feature (1)..(25): SEQ ID NO: 5610; WAN024D4F_at; Start 436; Stop 460
gaggtcagtcgccaaggccttgtct

SEQ ID NO: 143093 - DNA, 25 bp, Artificial
  probe
  misc_feature (1)..(25): SEQ ID NO: 5610; WAN024D4F_at; Start 535; Stop 559
caaactttctggactagctccgatg

SEQ ID NO: 143094 - DNA, 25 bp, Artificial
  probe
  misc_feature (1)..(25): SEQ ID NO: 5610; WAN024D4F_at; Start 481; Stop 505
tggtcgcgtccctgcaatcggattg

SEQ ID NO: 143095 - DNA, 25 bp, Artificial
  probe
  misc_feature (1)..(25): SEQ ID NO: 5136; WAN024D4G_at; Start 121; Stop 145
ggagatgtcttatcaccaatcttgg

SEQ ID NO: 143096 - DNA, 25 bp, Artificial
  probe
  misc_feature (1)..(25): SEQ ID NO: 5136; WAN024D4G_at; Start 975; Stop 999
cctctctgatgagaaggaaacagca

SEQ ID NO: 143097 - DNA, 25 bp, Artificial
  probe
  misc_feature (1)..(25): SEQ ID NO: 5136; WAN024D4G_at; Start 673; Stop 697
tttgagggaatggtagaaacagctc

SEQ ID NO: 143098 - DNA, 25 bp, Artificial
  probe
  misc_feature (1)..(25): SEQ ID NO: 5136; WAN024D4G_at; Start 1147; Stop 1171
gaactcactgccatggatgccttga

SEQ ID NO: 143099 - DNA, 25 bp, Artificial
  probe
  misc_feature (1)..(25): SEQ ID NO: 5136; WAN024D4G_at; Start 106; Stop 130
gaacgaatcattcatggagatgtct

SEQ ID NO: 143100 - DNA, 25 bp, Artificial
  probe
  misc_feature (1)..(25): SEQ ID NO: 5136; WAN024D4G_at; Start 490; Stop 514
tttgaccacaagaaggagaagatac

SEQ ID NO: 143101 - DNA, 25 bp, Artificial
  probe
  misc_feature (1)..(25): SEQ ID NO: 5136; WAN024D4G_at; Start 574; Stop 598
aaccaagtgcttgaggaattacgca

SEQ ID NO: 143102 - DNA, 25 bp, Artificial
  probe
  misc_feature (1)..(25): SEQ ID NO: 5136; WAN024D4G_at; Start 888; Stop 912
aaatggcatcgtgacaaccaatccg

SEQ ID NO: 143103 - DNA, 25 bp, Artificial
  probe
  misc_feature (1)..(25): SEQ ID NO: 5136; WAN024D4G_at; Start 136; Stop 160
ccaatcttggcttatatgcgcttaa

SEQ ID NO: 143104 - DNA, 25 bp, Artificial
  probe
  misc_feature (1)..(25): SEQ ID NO: 5136; WAN024D4G_at; Start 963; Stop 987
ggcgactgacctcctctctgatgag

SEQ ID NO: 143105 - DNA, 25 bp, Artificial
  probe
  misc_feature (1)..(25): SEQ ID NO: 5136; WAN024D4G_at; Start 1387; Stop 1411
tctatcgcccaaaacgaataccaag

SEQ ID NO: 143106 - DNA, 25 bp, Artificial
  probe
  misc_feature (1)..(25): SEQ ID NO: 5136; WAN024D4G_at; Start 181; Stop 205
ttagagagtattccgagagacaagg

SEQ ID NO: 143107 - DNA, 25 bp, Artificial
  probe
  misc_feature (1)..(25): SEQ ID NO: 5136; WAN024D4G_at; Start 5; Stop 29
ggtggcaccgcgaatttcgtcctca

SEQ ID NO: 143108 - DNA, 25 bp, Artificial
  probe
  misc_feature (1)..(25): SEQ ID NO: 5136; WAN024D4G_at; Start 1370; Stop 1394
cagggattgtctacgactctatcgc

SEQ ID NO: 143109 - DNA, 25 bp, Artificial
  probe
  misc_feature (1)..(25): SEQ ID NO: 5136; WAN024D4G_at; Start 874; Stop 898
ttggtttctgtcaaaaatggcatcg

SEQ ID NO: 143110 - DNA, 25 bp, Artificial
  probe
  misc_feature (1)..(25): SEQ ID NO: 5136; WAN024D4G_at; Start 506; Stop 530
agaagatacatgtcatagaggatgc

SEQ ID NO: 143111 - DNA, 25 bp, Artificial
  probe
  misc_feature (1)..(25): SEQ ID NO: 5136; WAN024D4G_at; Start 21; Stop 45
tcgtcctcacgcaagttattttgcg

SEQ ID NO: 143112 - DNA, 25 bp, Artificial
  probe
  misc_feature (1)..(25): SEQ ID NO: 5136; WAN024D4G_at; Start 1071; Stop 1095
cactaagtatatggaagtggagctc

SEQ ID NO: 143113 - DNA, 25 bp, Artificial
  probe
  misc_feature (1)..(25): SEQ ID NO: 5136; WAN024D4G_at; Start 560; Stop 584
tggaaaaatccttgaaccaagtgct

SEQ ID NO: 143114 - DNA, 25 bp, Artificial
  probe
  misc_feature (1)..(25): SEQ ID NO: 5136; WAN024D4G_at; Start 413; Stop 437
aagaaattggtcaaatccctgagga

SEQ ID NO: 143115 - DNA, 25 bp, Artificial
  probe
  misc_feature (1)..(25): SEQ ID NO: 5136; WAN024D4G_at; Start 456; Stop 480
catgcatttctttgtctatgagagc

SEQ ID NO: 143116 - DNA, 25 bp, Artificial
  probe
  misc_feature (1)..(25): SEQ ID NO: 5136; WAN024D4G_at; Start 937; Stop 961
gctacggatgaagaagacaaggcct

SEQ ID NO: 143117 - DNA, 25 bp, Artificial
  probe
  misc_feature (1)..(25): SEQ ID NO: 5136; WAN024D4G_at; Start 428; Stop 452
tccctgaggatacaattgggacgcc

SEQ ID NO: 143118 - DNA, 25 bp, Artificial
  probe
  misc_feature (1)..(25): SEQ ID NO: 5136; WAN024D4G_at; Start 589; Stop 613
gaattacgcattcctgctccaaatg

SEQ ID NO: 143119 - DNA, 25 bp, Artificial
  probe
  misc_feature (1)..(25): SEQ ID NO: 5136; WAN024D4G_at; Start 903; Stop 927
aaccaatccgattgcagggacgcga

SEQ ID NO: 143120 - DNA, 25 bp, Artificial
  probe
  misc_feature (1)..(25): SEQ ID NO: 5136; WAN024D4G_at; Start 775; Stop 799
tttgacttctacagaaatctccgcg

SEQ ID NO: 143121 - DNA, 25 bp, Artificial
  probe
  misc_feature (1)..(25): SEQ ID NO: 5136; WAN024D4G_at; Start 657; Stop 681
tatcgctccacataagtttgaggga

SEQ ID NO: 143122 - DNA, 25 bp, Artificial
  probe
  misc_feature (1)..(25): SEQ ID NO: 5136; WAN024D4G_at; Start 1436; Stop 1460
tgactagaattggagaactaagacc

SEQ ID NO: 143123 - DNA, 25 bp, Artificial
  probe
  misc_feature (1)..(25): SEQ ID NO: 5136; WAN024D4G_at; Start 949; Stop 973
gaagacaaggccttggcgactgacc

SEQ ID NO: 143124 - DNA, 25 bp, Artificial
  probe
  misc_feature (1)..(25): SEQ ID NO: 5136; WAN024D4G_at; Start 688; Stop 712
gaaacagctcgtgacttgattcgta

SEQ ID NO: 143125 - DNA, 25 bp, Artificial
  probe
  misc_feature (1)..(25): SEQ ID NO: 5136; WAN024D4G_at; Start 1223; Stop 1247
tgagacgtatctatgaactggaaac

SEQ ID NO: 143126 - DNA, 25 bp, Artificial
  probe
  misc_feature (1)..(25): SEQ ID NO: 5136; WAN024D4G_at; Start 1344; Stop 1368
tcaaagagcctatgtgcaggctggg

SEQ ID NO: 143127 - DNA, 25 bp, Artificial
  probe
  misc_feature (1)..(25): SEQ ID NO: 5136; WAN024D4G_at; Start 1274; Stop 1298
caatcggctacttgtctgcgacggg

SEQ ID NO: 143128 - DNA, 25 bp, Artificial
  probe
  misc_feature (1)..(25): SEQ ID NO: 5136; WAN024D4G_at; Start 1292; Stop 1316
cgacgggtgatatggatttggccat

SEQ ID NO: 143129 - DNA, 25 bp, Artificial
  probe
  misc_feature (1)..(25): SEQ ID NO: 671; WAN024D4H_at; Start 534; Stop 558
taaagtcagagcagaattaactgaa

SEQ ID NO: 143130 - DNA, 25 bp, Artificial
  probe
  misc_feature (1)..(25): SEQ ID NO: 671; WAN024D4H_at; Start 169; Stop 193
ccaaggaattctattcacatgactg

SEQ ID NO: 143131 - DNA, 25 bp, Artificial
  probe
  misc_feature (1)..(25): SEQ ID NO: 671; WAN024D4H_at; Start 50; Stop 74
atttccctgggaatacagttgtagc

SEQ ID NO: 143132 - DNA, 25 bp, Artificial
  probe
  misc_feature (1)..(25): SEQ ID NO: 671; WAN024D4H_at; Start 223; Stop 247
gaaacggagttttggagcagtaatc

SEQ ID NO: 143133 - DNA, 25 bp, Artificial
  probe
  misc_feature (1)..(25): SEQ ID NO: 671; WAN024D4H_at; Start 308; Stop 332
ttccattgttggatgaagaaattca

SEQ ID NO: 143134 - DNA, 25 bp, Artificial
  probe
  misc_feature (1)..(25): SEQ ID NO: 671; WAN024D4H_at; Start 588; Stop 612
tgtaaaccgtattgactatactgta

SEQ ID NO: 143135 - DNA, 25 bp, Artificial
  probe
  misc_feature (1)..(25): SEQ ID NO: 671; WAN024D4H_at; Start 504; Stop 528
tctaaccgaagaggaggaagaagag

SEQ ID NO: 143136 - DNA, 25 bp, Artificial
  probe
  misc_feature (1)..(25): SEQ ID NO: 671; WAN024D4H_at; Start 132; Stop 156
tagagaattaccatttatcgataag

SEQ ID NO: 143137 - DNA, 25 bp, Artificial
  probe
  misc_feature (1)..(25): SEQ ID NO: 671; WAN024D4H_at; Start 84; Stop 108
tactaaacaagatttgatggaagtt

SEQ ID NO: 143138 - DNA, 25 bp, Artificial
  probe
  misc_feature (1)..(25): SEQ ID NO: 671; WAN024D4H_at; Start 421; Stop 445
tatgtctcagaaaaagcaggtgttt

SEQ ID NO: 143139 - DNA, 25 bp, Artificial
  probe
  misc_feature (1)..(25): SEQ ID NO: 671; WAN024D4H_at; Start 266; Stop 290
tacaggaaatacatgattactttgc

SEQ ID NO: 143140 - DNA, 25 bp, Artificial
  probe
  misc_feature (1)..(25): SEQ ID NO: 671; WAN024D4H_at; Start 236; Stop 260
ggagcagtaatcttcctctagatac

SEQ ID NO: 143141 - DNA, 25 bp, Artificial
  probe
  misc_feature (1)..(25): SEQ ID NO: 671; WAN024D4H_at; Start 40; Stop 64
gaatttaatcatttccctgggaata

SEQ ID NO: 143142 - DNA, 25 bp, Artificial
  probe
  misc_feature (1)..(25): SEQ ID NO: 671; WAN024D4H_at; Start 440; Stop 464
gtgtttgtttccctaatcatgatag

SEQ ID NO: 143143 - DNA, 25 bp, Artificial
  probe
  misc_feature (1)..(25): SEQ ID NO: 671; WAN024D4H_at; Start 120; Stop 144
tcaatcacgttatagagaattacca

SEQ ID NO: 143144 - DNA, 25 bp, Artificial
  probe
  misc_feature (1)..(25): SEQ ID NO: 671; WAN024D4H_at; Start 206; Stop 230
tgtgccatgaaaatcgtgaaacgga

SEQ ID NO: 143145 - DNA, 25 bp, Artificial
  probe
  misc_feature (1)..(25): SEQ ID NO: 671; WAN024D4H_at; Start 604; Stop 628
tatactgtatttgaagatatgagac

SEQ ID NO: 143146 - DNA, 25 bp, Artificial
  probe
  misc_feature (1)..(25): SEQ ID NO: 671; WAN024D4H_at; Start 475; Stop 499
catatttcaattgggtatcttcgga

SEQ ID NO: 143147 - DNA, 25 bp, Artificial
  probe
  misc_feature (1)..(25): SEQ ID NO: 671; WAN024D4H_at; Start 392; Stop 416
ctgcaaagagattagaagaaattcg

SEQ ID NO: 143148 - DNA, 25 bp, Artificial
  probe
  misc_feature (1)..(25): SEQ ID NO: 671; WAN024D4H_at; Start 624; Stop 648
gagacaatttgttccatatcacgaa

SEQ ID NO: 143149 - DNA, 25 bp, Artificial
  probe
  misc_feature (1)..(25): SEQ ID NO: 671; WAN024D4H_at; Start 523; Stop 547
gaagagtttactaaagtcagagcag

SEQ ID NO: 143150 - DNA, 25 bp, Artificial
  probe
  misc_feature (1)..(25): SEQ ID NO: 671; WAN024D4H_at; Start 280; Stop 304
gattactttgctaaacaacttgaaa

SEQ ID NO: 143151 - DNA, 25 bp, Artificial
  probe
  misc_feature (1)..(25): SEQ ID NO: 671; WAN024D4H_at; Start 14; Stop 38
caaaaattaagttcaaagagaatgg

SEQ ID NO: 143152 - DNA, 25 bp, Artificial
  probe
  misc_feature (1)..(25): SEQ ID NO: 671; WAN024D4H_at; Start 322; Stop 346
gaagaaattcatatgcgtataactg

SEQ ID NO: 143153 - DNA, 25 bp, Artificial
  probe
  misc_feature (1)..(25): SEQ ID NO: 671; WAN024D4H_at; Start 365; Stop 389
tactagttgaacctgcagatgaagc

SEQ ID NO: 143154 - DNA, 25 bp, Artificial
  probe
  misc_feature (1)..(25): SEQ ID NO: 671; WAN024D4H_at; Start 250; Stop 274
cctctagatacacctttacaggaaa

SEQ ID NO: 143155 - DNA, 25 bp, Artificial
  probe
  misc_feature (1)..(25): SEQ ID NO: 671; WAN024D4H_at; Start 406; Stop 430
gaagaaattcgtacttatgtctcag

SEQ ID NO: 143156 - DNA, 25 bp, Artificial
  probe
  misc_feature (1)..(25): SEQ ID NO: 671; WAN024D4H_at; Start 191; Stop 215
ctgtaattgaattgttgtgccatga

SEQ ID NO: 143157 - DNA, 25 bp, Artificial
  probe
  misc_feature (1)..(25): SEQ ID NO: 671; WAN024D4H_at; Start 335; Stop 359
tgcgtataactgaaatgggaaaaca

SEQ ID NO: 143158 - DNA, 25 bp, Artificial
  probe
  misc_feature (1)..(25): SEQ ID NO: 671; WAN024D4H_at; Start 380; Stop 404
cagatgaagcttctgcaaagagatt

SEQ ID NO: 143159 - DNA, 25 bp, Artificial
  probe
  misc_feature (1)..(25): SEQ ID NO: 671; WAN024D4H_at; Start 350; Stop 374
tgggaaaacaaaacatactagttga

SEQ ID NO: 143160 - DNA, 25 bp, Artificial
  probe
  misc_feature (1)..(25): SEQ ID NO: 671; WAN024D4H_at; Start 488; Stop 512
ggtatcttcggattcctctaaccga

SEQ ID NO: 143161 - DNA, 25 bp, Artificial
  probe
  misc_feature (1)..(25): SEQ ID NO: 671; WAN024D4H_at; Start 568; Stop 592
gagaagattccaactattactgtaa

SEQ ID NO: 143162 - DNA, 25 bp, Artificial
  probe
  misc_feature (1)..(25): SEQ ID NO: 671; WAN024D4H_at; Start 63; Stop 87
tacagttgtagcaaatctttatact

SEQ ID NO: 143163 - DNA, 25 bp, Artificial
  probe
  misc_feature (1)..(25): SEQ ID NO: 622; WAN024D4I_at; Start 1000; Stop 1024
gactgggaagctgttggaaagcatt

SEQ ID NO: 143164 - DNA, 25 bp, Artificial
  probe
  misc_feature (1)..(25): SEQ ID NO: 622; WAN024D4I_at; Start 229; Stop 253
gctggcgctcaattagcagaccgtg

SEQ ID NO: 143165 - DNA, 25 bp, Artificial
  probe
  misc_feature (1)..(25): SEQ ID NO: 622; WAN024D4I_at; Start 258; Stop 282
tgctgagaagaataatgcagttgca

SEQ ID NO: 143166 - DNA, 25 bp, Artificial
  probe
  misc_feature (1)..(25): SEQ ID NO: 622; WAN024D4I_at; Start 172; Stop 196
gattggttaactgctaaagcaaaag

SEQ ID NO: 143167 - DNA, 25 bp, Artificial
  probe
  misc_feature (1)..(25): SEQ ID NO: 622; WAN024D4I_at; Start 967; Stop 991
aaatttgttgatcaagtgaaaccac

SEQ ID NO: 143168 - DNA, 25 bp, Artificial
  probe
  misc_feature (1)..(25): SEQ ID NO: 622; WAN024D4I_at; Start 34; Stop 58
gcaacgggagttgctcttactacac

SEQ ID NO: 143169 - DNA, 25 bp, Artificial
  probe
  misc_feature (1)..(25): SEQ ID NO: 622; WAN024D4I_at; Start 841; Stop 865
caagcgttagctaaagaatttattg

SEQ ID NO: 143170 - DNA, 25 bp, Artificial
  probe
  misc_feature (1)..(25): SEQ ID NO: 622; WAN024D4I_at; Start 158; Stop 182
caaatggtcgtggtgattggttaac

SEQ ID NO: 143171 - DNA, 25 bp, Artificial
  probe
  misc_feature (1)..(25): SEQ ID NO: 622; WAN024D4I_at; Start 73; Stop 97
ggaggttcaaattctacgactgctt

SEQ ID NO: 143172 - DNA, 25 bp, Artificial
  probe
  misc_feature (1)..(25): SEQ ID NO: 622; WAN024D4I_at; Start 1016; Stop 1040
gaaagcatttggatgaatgggtaga

SEQ ID NO: 143173 - DNA, 25 bp, Artificial
  probe
  misc_feature (1)..(25): SEQ ID NO: 622; WAN024D4I_at; Start 868; Stop 892
tggtttggtcaatcagaaattcaag

SEQ ID NO: 143174 - DNA, 25 bp, Artificial
  probe
  misc_feature (1)..(25): SEQ ID NO: 622; WAN024D4I_at; Start 140; Stop 164
tctattcgaactcagtctcaaatgg

SEQ ID NO: 143175 - DNA, 25 bp, Artificial
  probe
  misc_feature (1)..(25): SEQ ID NO: 622; WAN024D4I_at; Start 244; Stop 268
gcagaccgtgttattgctgagaaga

SEQ ID NO: 143176 - DNA, 25 bp, Artificial
  probe
  misc_feature (1)..(25): SEQ ID NO: 622; WAN024D4I_at; Start 767; Stop 791
tcaaagttatgactcctgagattgg

SEQ ID NO: 143177 - DNA, 25 bp, Artificial
  probe
  misc_feature (1)..(25): SEQ ID NO: 622; WAN024D4I_at; Start 324; Stop 348
tagagatcaaaaattactagtacag

SEQ ID NO: 143178 - DNA, 25 bp, Artificial
  probe
  misc_feature (1)..(25): SEQ ID NO: 622; WAN024D4I_at; Start 776; Stop 800
tgactcctgagattggtgtaccatt

SEQ ID NO: 143179 - DNA, 25 bp, Artificial
  probe
  misc_feature (1)..(25): SEQ ID NO: 622; WAN024D4I_at; Start 190; Stop 214
gcaaaagaagctggttttaatataa

SEQ ID NO: 143180 - DNA, 25 bp, Artificial
  probe
  misc_feature (1)..(25): SEQ ID NO: 622; WAN024D4I_at; Start 287; Stop 311
tggtatttggaattggtgctgttga

SEQ ID NO: 143181 - DNA, 25 bp, Artificial
  probe
  misc_feature (1)..(25): SEQ ID NO: 622; WAN024D4I_at; Start 355; Stop 379
cctaaatggttagataaaattgatc

SEQ ID NO: 143182 - DNA, 25 bp, Artificial
  probe
  misc_feature (1)..(25): SEQ ID NO: 622; WAN024D4I_at; Start 808; Stop 832
gaacaaactatggttttaagcacta

SEQ ID NO: 143183 - DNA, 25 bp, Artificial
  probe
  misc_feature (1)..(25): SEQ ID NO: 622; WAN024D4I_at; Start 147; Stop 171
gaactcagtctcaaatggtcgtggt

SEQ ID NO: 143184 - DNA, 25 bp, Artificial
  probe
  misc_feature (1)..(25): SEQ ID NO: 622; WAN024D4I_at; Start 273; Stop 297
tgcagttgcagatatggtatttgga

SEQ ID NO: 143185 - DNA, 25 bp, Artificial
  probe
  misc_feature (1)..(25): SEQ ID NO: 622; WAN024D4I_at; Start 340; Stop 364
ctagtacagtacaagcctaaatggt

SEQ ID NO: 143186 - DNA, 25 bp, Artificial
  probe
  misc_feature (1)..(25): SEQ ID NO: 622; WAN024D4I_at; Start 982; Stop 1006
gtgaaaccacaaaatattgactggg

SEQ ID NO: 143187 - DNA, 25 bp, Artificial
  probe
  misc_feature (1)..(25): SEQ ID NO: 622; WAN024D4I_at; Start 54; Stop 78
tacacttgctgcttgctctggaggt

SEQ ID NO: 143188 - DNA, 25 bp, Artificial
  probe
  misc_feature (1)..(25): SEQ ID NO: 622; WAN024D4I_at; Start 67; Stop 91
tgctctggaggttcaaattctacga

SEQ ID NO: 143189 - DNA, 25 bp, Artificial
  probe
  misc_feature (1)..(25): SEQ ID NO: 622; WAN024D4I_at; Start 41; Stop 65
gagttgctcttactacacttgctgc

SEQ ID NO: 143190 - DNA, 25 bp, Artificial
  probe
  misc_feature (1)..(25): SEQ ID NO: 622; WAN024D4I_at; Start 12; Stop 36
gaaagtttggtctactgtacttgca

SEQ ID NO: 143191 - DNA, 25 bp, Artificial
  probe
  misc_feature (1)..(25): SEQ ID NO: 622; WAN024D4I_at; Start 103; Stop 127
tctgaagaaaaagctgataaaagtc

SEQ ID NO: 143192 - DNA, 25 bp, Artificial
  probe
  misc_feature (1)..(25): SEQ ID NO: 622; WAN024D4I_at; Start 828; Stop 852
cactagtaaaaaacaagcgttagct

SEQ ID NO: 143193 - DNA, 25 bp, Artificial
  probe
  misc_feature (1)..(25): SEQ ID NO: 622; WAN024D4I_at; Start 790; Stop 814
ggtgtaccatttgtaactgaacaaa

SEQ ID NO: 143194 - DNA, 25 bp, Artificial
  probe
  misc_feature (1)..(25): SEQ ID NO: 622; WAN024D4I_at; Start 989; Stop 1013
cacaaaatattgactgggaagctgt

SEQ ID NO: 143195 - DNA, 25 bp, Artificial
  probe
  misc_feature (1)..(25): SEQ ID NO: 622; WAN024D4I_at; Start 19; Stop 43
tggtctactgtacttgcaacgggag

SEQ ID NO: 143196 - DNA, 25 bp, Artificial
  probe
  misc_feature (1)..(25): SEQ ID NO: 622; WAN024D4I_at; Start 87; Stop 111
tacgactgcttcttcatctgaagaa

SEQ ID NO: 143197 - DNA, 25 bp, Artificial
  probe
  misc_feature (1)..(25): SEQ ID NO: 890; WAN024D4J_at; Start 141; Stop 165
gataacaaatgttatctttaaagaa

SEQ ID NO: 143198 - DNA, 25 bp, Artificial
  probe
  misc_feature (1)..(25): SEQ ID NO: 890; WAN024D4J_at; Start 52; Stop 76
aataattgtttgatacaagtataca

SEQ ID NO: 143199 - DNA, 25 bp, Artificial
  probe
  misc_feature (1)..(25): SEQ ID NO: 890; WAN024D4J_at; Start 291; Stop 315
tcgtgaagttggaaacattcttaaa

SEQ ID NO: 143200 - DNA, 25 bp, Artificial
  probe
  misc_feature (1)..(25): SEQ ID NO: 890; WAN024D4J_at; Start 183; Stop 207
aaaatgttacattgacaggctatta

SEQ ID NO: 143201 - DNA, 25 bp, Artificial
  probe
  misc_feature (1)..(25): SEQ ID NO: 890; WAN024D4J_at; Start 283; Stop 307
tttatttgtcgtgaagttggaaaca

SEQ ID NO: 143202 - DNA, 25 bp, Artificial
  probe
  misc_feature (1)..(25): SEQ ID NO: 890; WAN024D4J_at; Start 114; Stop 138
tgcctttcatttacctcctgatgag

SEQ ID NO: 143203 - DNA, 25 bp, Artificial
  probe
  misc_feature (1)..(25): SEQ ID NO: 890; WAN024D4J_at; Start 115; Stop 139
gcctttcatttacctcctgatgagt

SEQ ID NO: 143204 - DNA, 25 bp, Artificial
  probe
  misc_feature (1)..(25): SEQ ID NO: 890; WAN024D4J_at; Start 309; Stop 333
tcttaaaaataaaggtgtgaaatgc

SEQ ID NO: 143205 - DNA, 25 bp, Artificial
  probe
  misc_feature (1)..(25): SEQ ID NO: 890; WAN024D4J_at; Start 107; Stop 131
tggtgtttgcctttcatttacctcc

SEQ ID NO: 143206 - DNA, 25 bp, Artificial
  probe
  misc_feature (1)..(25): SEQ ID NO: 890; WAN024D4J_at; Start 17; Stop 41
tcaattttgatttaggtaaaataga

SEQ ID NO: 143207 - DNA, 25 bp, Artificial
  probe
  misc_feature (1)..(25): SEQ ID NO: 890; WAN024D4J_at; Start 287; Stop 311
tttgtcgtgaagttggaaacattct

SEQ ID NO: 143208 - DNA, 25 bp, Artificial
  probe
  misc_feature (1)..(25): SEQ ID NO: 890; WAN024D4J_at; Start 326; Stop 350
tgaaatgcaatttaaacttttttga

SEQ ID NO: 143209 - DNA, 25 bp, Artificial
  probe
  misc_feature (1)..(25): SEQ ID NO: 890; WAN024D4J_at; Start 273; Stop 297
ctcatatgaatttatttgtcgtgaa

SEQ ID NO: 143210 - DNA, 25 bp, Artificial
  probe
  misc_feature (1)..(25): SEQ ID NO: 890; WAN024D4J_at; Start 312; Stop 336
taaaaataaaggtgtgaaatgcaat

SEQ ID NO: 143211 - DNA, 25 bp, Artificial
  probe
  misc_feature (1)..(25): SEQ ID NO: 890; WAN024D4J_at; Start 63; Stop 87
gatacaagtatacaaatttatttct

SEQ ID NO: 143212 - DNA, 25 bp, Artificial
  probe
  misc_feature (1)..(25): SEQ ID NO: 890; WAN024D4J_at; Start 96; Stop 120
tatttgtgaaatggtgtttgccttt

SEQ ID NO: 143213 - DNA, 25 bp, Artificial
  probe
  misc_feature (1)..(25): SEQ ID NO: 890; WAN024D4J_at; Start 179; Stop 203
tgttaaaatgttacattgacaggct

SEQ ID NO: 143214 - DNA, 25 bp, Artificial
  probe
  misc_feature (1)..(25): SEQ ID NO: 890; WAN024D4J_at; Start 117; Stop 141
ctttcatttacctcctgatgagttg

SEQ ID NO: 143215 - DNA, 25 bp, Artificial
  probe
  misc_feature (1)..(25): SEQ ID NO: 890; WAN024D4J_at; Start 127; Stop 151
cctcctgatgagttgataacaaatg

SEQ ID NO: 143216 - DNA, 25 bp, Artificial
  probe
  misc_feature (1)..(25): SEQ ID NO: 890; WAN024D4J_at; Start 93; Stop 117
tgatatttgtgaaatggtgtttgcc

SEQ ID NO: 143217 - DNA, 25 bp, Artificial
  probe
  misc_feature (1)..(25): SEQ ID NO: 890; WAN024D4J_at; Start 280; Stop 304
gaatttatttgtcgtgaagttggaa

SEQ ID NO: 143218 - DNA, 25 bp, Artificial
  probe
  misc_feature (1)..(25): SEQ ID NO: 890; WAN024D4J_at; Start 220; Stop 244
aatcctacacattttactgaaaaag

SEQ ID NO: 143219 - DNA, 25 bp, Artificial
  probe
  misc_feature (1)..(25): SEQ ID NO: 890; WAN024D4J_at; Start 206; Stop 230
tatatgtttttataaatcctacaca

SEQ ID NO: 143220 - DNA, 25 bp, Artificial
  probe
  misc_feature (1)..(25): SEQ ID NO: 890; WAN024D4J_at; Start 125; Stop 149
tacctcctgatgagttgataacaaa

SEQ ID NO: 143221 - DNA, 25 bp, Artificial
  probe
  misc_feature (1)..(25): SEQ ID NO: 890; WAN024D4J_at; Start 172; Stop 196
aactctatgttaaaatgttacattg

SEQ ID NO: 143222 - DNA, 25 bp, Artificial
  probe
  misc_feature (1)..(25): SEQ ID NO: 890; WAN024D4J_at; Start 227; Stop 251
cacattttactgaaaaagttaatct

SEQ ID NO: 143223 - DNA, 25 bp, Artificial
  probe
  misc_feature (1)..(25): SEQ ID NO: 890; WAN024D4J_at; Start 192; Stop 216
cattgacaggctattatatgttttt

SEQ ID NO: 143224 - DNA, 25 bp, Artificial
  probe
  misc_feature (1)..(25): SEQ ID NO: 890; WAN024D4J_at; Start 110; Stop 134
tgtttgcctttcatttacctcctga

SEQ ID NO: 143225 - DNA, 25 bp, Artificial
  probe
  misc_feature (1)..(25): SEQ ID NO: 890; WAN024D4J_at; Start 289; Stop 313
tgtcgtgaagttggaaacattctta

SEQ ID NO: 143226 - DNA, 25 bp, Artificial
  probe
  misc_feature (1)..(25): SEQ ID NO: 890; WAN024D4J_at; Start 187; Stop 211
tgttacattgacaggctattatatg

SEQ ID NO: 143227 - DNA, 25 bp, Artificial
  probe
  misc_feature (1)..(25): SEQ ID NO: 890; WAN024D4J_at; Start 130; Stop 154
cctgatgagttgataacaaatgtta

SEQ ID NO: 143228 - DNA, 25 bp, Artificial
  probe
  misc_feature (1)..(25): SEQ ID NO: 890; WAN024D4J_at; Start 318; Stop 342
taaaggtgtgaaatgcaatttaaac

SEQ ID NO: 143229 - DNA, 25 bp, Artificial
  probe
  misc_feature (1)..(25): SEQ ID NO: 890; WAN024D4J_at; Start 103; Stop 127
gaaatggtgtttgcctttcatttac

SEQ ID NO: 143230 - DNA, 25 bp, Artificial
  probe
  misc_feature (1)..(25): SEQ ID NO: 890; WAN024D4J_at; Start 121; Stop 145
catttacctcctgatgagttgataa

SEQ ID NO: 143231 - DNA, 25 bp, Artificial
  probe
  misc_feature (1)..(25): SEQ ID NO: 691; WAN024D4K_at; Start 944; Stop 968
gggaaagtgtcacatctgttgaagt

SEQ ID NO: 143232 - DNA, 25 bp, Artificial
  probe
  misc_feature (1)..(25): SEQ ID NO: 691; WAN024D4K_at; Start 664; Stop 688
tatggcttatctacaattgattcag

SEQ ID NO: 143233 - DNA, 25 bp, Artificial
  probe
  misc_feature (1)..(25): SEQ ID NO: 691; WAN024D4K_at; Start 399; Stop 423
aagtgtagatgatatcagaattcag

SEQ ID NO: 143234 - DNA, 25 bp, Artificial
  probe
  misc_feature (1)..(25): SEQ ID NO: 691; WAN024D4K_at; Start 43; Stop 67
gcacgtttatcaggtttttctccaa

SEQ ID NO: 143235 - DNA, 25 bp, Artificial
  probe
  misc_feature (1)..(25): SEQ ID NO: 691; WAN024D4K_at; Start 522; Stop 546
tatgatgaaagctgtaactgaagaa

SEQ ID NO: 143236 - DNA, 25 bp, Artificial
  probe
  misc_feature (1)..(25): SEQ ID NO: 691; WAN024D4K_at; Start 257; Stop 281
cgctgttagataaagtgttacggac

SEQ ID NO: 143237 - DNA, 25 bp, Artificial
  probe
  misc_feature (1)..(25): SEQ ID NO: 691; WAN024D4K_at; Start 574; Stop 598
ggaggagaatcccatgttaataagg

SEQ ID NO: 143238 - DNA, 25 bp, Artificial
  probe
  misc_feature (1)..(25): SEQ ID NO: 691; WAN024D4K_at; Start 24; Stop 48
ggtaactatttatgatattgcacgt

SEQ ID NO: 143239 - DNA, 25 bp, Artificial
  probe
  misc_feature (1)..(25): SEQ ID NO: 691; WAN024D4K_at; Start 152; Stop 176
cgtatattccaaatgcgtatgcaaa

SEQ ID NO: 143240 - DNA, 25 bp, Artificial
  probe
  misc_feature (1)..(25): SEQ ID NO: 691; WAN024D4K_at; Start 121; Stop 145
caagcgattcaaaaagttatagagg

SEQ ID NO: 143241 - DNA, 25 bp, Artificial
  probe
  misc_feature (1)..(25): SEQ ID NO: 691; WAN024D4K_at; Start 102; Stop 126
tgttaaagaagaaacttatcaagcg

SEQ ID NO: 143242 - DNA, 25 bp, Artificial
  probe
  misc_feature (1)..(25): SEQ ID NO: 691; WAN024D4K_at; Start 346; Stop 370
tcaattatatcaagcacaggtagcc

SEQ ID NO: 143243 - DNA, 25 bp, Artificial
  probe
  misc_feature (1)..(25): SEQ ID NO: 691; WAN024D4K_at; Start 469; Stop 493
caaacgtctggagtagtctatgtat

SEQ ID NO: 143244 - DNA, 25 bp, Artificial
  probe
  misc_feature (1)..(25): SEQ ID NO: 691; WAN024D4K_at; Start 316; Stop 340
tactttggagaggaggatacaatta

SEQ ID NO: 143245 - DNA, 25 bp, Artificial
  probe
  misc_feature (1)..(25): SEQ ID NO: 691; WAN024D4K_at; Start 686; Stop 710
cagtttattcttatgcaatgcagca

SEQ ID NO: 143246 - DNA, 25 bp, Artificial
  probe
  misc_feature (1)..(25): SEQ ID NO: 691; WAN024D4K_at; Start 508; Stop 532
caagctacttatgatatgatgaaag

SEQ ID NO: 143247 - DNA, 25 bp, Artificial
  probe
  misc_feature (1)..(25): SEQ ID NO: 691; WAN024D4K_at; Start 713; Stop 737
tgactacccaaaattatccggacat

SEQ ID NO: 143248 - DNA, 25 bp, Artificial
  probe
  misc_feature (1)..(25): SEQ ID NO: 691; WAN024D4K_at; Start 439; Stop 463
catatgccttttcttgttttcggtg

SEQ ID NO: 143249 - DNA, 25 bp, Artificial
  probe
  misc_feature (1)..(25): SEQ ID NO: 691; WAN024D4K_at; Start 902; Stop 926
tggctaaagaaatgatagaaggtgt

SEQ ID NO: 143250 - DNA, 25 bp, Artificial
  probe
  misc_feature (1)..(25): SEQ ID NO: 691; WAN024D4K_at; Start 77; Stop 101
cacgagttattaatggtggagtaaa

SEQ ID NO: 143251 - DNA, 25 bp, Artificial
  probe
  misc_feature (1)..(25): SEQ ID NO: 691; WAN024D4K_at; Start 301; Stop 325
aatgctatagttgagtactttggag

SEQ ID NO: 143252 - DNA, 25 bp, Artificial
  probe
  misc_feature (1)..(25): SEQ ID NO: 691; WAN024D4K_at; Start 954; Stop 978
cacatctgttgaagtttctcctaaa

SEQ ID NO: 143253 - DNA, 25 bp, Artificial
  probe
  misc_feature (1)..(25): SEQ ID NO: 691; WAN024D4K_at; Start 778; Stop 802
cgtgcgtgctatgagaaaggaattc

SEQ ID NO: 143254 - DNA, 25 bp, Artificial
  probe
  misc_feature (1)..(25): SEQ ID NO: 691; WAN024D4K_at; Start 765; Stop 789
tcagggcttgattcgtgcgtgctat

SEQ ID NO: 143255 - DNA, 25 bp, Artificial
  probe
  misc_feature (1)..(25): SEQ ID NO: 691; WAN024D4K_at; Start 242; Stop 266
taatttggtttcatacgctgttaga

SEQ ID NO: 143256 - DNA, 25 bp, Artificial
  probe
  misc_feature (1)..(25): SEQ ID NO: 691; WAN024D4K_at; Start 423; Stop 447
gtatttaaagaagaaccatatgcct

SEQ ID NO: 143257 - DNA, 25 bp, Artificial
  probe
  misc_feature (1)..(25): SEQ ID NO: 691; WAN024D4K_at; Start 700; Stop 724
gcaatgcagcacttgactacccaaa

SEQ ID NO: 143258 - DNA, 25 bp, Artificial
  probe
  misc_feature (1)..(25): SEQ ID NO: 691; WAN024D4K_at; Start 455; Stop 479
ttttcggtgaatctcaaacgtctgg

SEQ ID NO: 143259 - DNA, 25 bp, Artificial
  probe
  misc_feature (1)..(25): SEQ ID NO: 691; WAN024D4K_at; Start 555; Stop 579
aaatatgtggttgcttatgggagga

SEQ ID NO: 143260 - DNA, 25 bp, Artificial
  probe
  misc_feature (1)..(25): SEQ ID NO: 691; WAN024D4K_at; Start 610; Stop 634
ggtgtgcgttcttttctgaatgata

SEQ ID NO: 143261 - DNA, 25 bp, Artificial
  probe
  misc_feature (1)..(25): SEQ ID NO: 691; WAN024D4K_at; Start 754; Stop 778
gatgaaaaggttcagggcttgattc

SEQ ID NO: 143262 - DNA, 25 bp, Artificial
  probe
  misc_feature (1)..(25): SEQ ID NO: 691; WAN024D4K_at; Start 972; Stop 996
tcctaaatttgttaggagacagagt

SEQ ID NO: 143263 - DNA, 25 bp, Artificial
  probe
  misc_feature (1)..(25): SEQ ID NO: 691; WAN024D4K_at; Start 61; Stop 85
tctccaaaaacagtttcacgagtta

SEQ ID NO: 143264 - DNA, 25 bp, Artificial
  probe
  misc_feature (1)..(25): SEQ ID NO: 691; WAN024D4K_at; Start 360; Stop 384
cacaggtagcctagtagatggtgtt

SEQ ID NO: 143265 - DNA, 25 bp, Artificial
  probe
  misc_feature (1)..(25): SEQ ID NO: 5000; WAN024D4L_at; Start 65; Stop 89
gcaacctcgtggtgactcgcttcta

SEQ ID NO: 143266 - DNA, 25 bp, Artificial
  probe
  misc_feature (1)..(25): SEQ ID NO: 5000; WAN024D4L_at; Start 18; Stop 42
cacggagaacttcatcgtacttaaa

SEQ ID NO: 143267 - DNA, 25 bp, Artificial
  probe
  misc_feature (1)..(25): SEQ ID NO: 5000; WAN024D4L_at; Start 72; Stop 96
cgtggtgactcgcttctacttcaaa

SEQ ID NO: 143268 - DNA, 25 bp, Artificial
  probe
  misc_feature (1)..(25): SEQ ID NO: 5000; WAN024D4L_at; Start 22; Stop 46
gagaacttcatcgtacttaaagtca

SEQ ID NO: 143269 - DNA, 25 bp, Artificial
  probe
  misc_feature (1)..(25): SEQ ID NO: 5000; WAN024D4L_at; Start 192; Stop 216
caagtgttgggtccccattttcatc

SEQ ID NO: 143270 - DNA, 25 bp, Artificial
  probe
  misc_feature (1)..(25): SEQ ID NO: 5000; WAN024D4L_at; Start 67; Stop 91
aacctcgtggtgactcgcttctact

SEQ ID NO: 143271 - DNA, 25 bp, Artificial
  probe
  misc_feature (1)..(25): SEQ ID NO: 5000; WAN024D4L_at; Start 138; Stop 162
tgtccgcaaggtcagtaggtgccaa

SEQ ID NO: 143272 - DNA, 25 bp, Artificial
  probe
  misc_feature (1)..(25): SEQ ID NO: 5000; WAN024D4L_at; Start 164; Stop 188
tcaaagtagccacccttgtcattca

SEQ ID NO: 143273 - DNA, 25 bp, Artificial
  probe
  misc_feature (1)..(25): SEQ ID NO: 5000; WAN024D4L_at; Start 1; Stop 25
ttgaatcttatcacaagcacggaga

SEQ ID NO: 143274 - DNA, 25 bp, Artificial
  probe
  misc_feature (1)..(25): SEQ ID NO: 5000; WAN024D4L_at; Start 123; Stop 147
tctcacgacgtgtgttgtccgcaag

SEQ ID NO: 143275 - DNA, 25 bp, Artificial
  probe
  misc_feature (1)..(25): SEQ ID NO: 5000; WAN024D4L_at; Start 78; Stop 102
gactcgcttctacttcaaatcccat

SEQ ID NO: 143276 - DNA, 25 bp, Artificial
  probe
  misc_feature (1)..(25): SEQ ID NO: 5000; WAN024D4L_at; Start 97; Stop 121
tcccattttggtcaagacattcaca

SEQ ID NO: 143277 - DNA, 25 bp, Artificial
  probe
  misc_feature (1)..(25): SEQ ID NO: 5000; WAN024D4L_at; Start 128; Stop 152
cgacgtgtgttgtccgcaaggtcag

SEQ ID NO: 143278 - DNA, 25 bp, Artificial
  probe
  misc_feature (1)..(25): SEQ ID NO: 5000; WAN024D4L_at; Start 62; Stop 86
accgcaacctcgtggtgactcgctt

SEQ ID NO: 143279 - DNA, 25 bp, Artificial
  probe
  misc_feature (1)..(25): SEQ ID NO: 5000; WAN024D4L_at; Start 112; Stop 136
gacattcacaatctcacgacgtgtg

SEQ ID NO: 143280 - DNA, 25 bp, Artificial
  probe
  misc_feature (1)..(25): SEQ ID NO: 5000; WAN024D4L_at; Start 126; Stop 150
cacgacgtgtgttgtccgcaaggtc

SEQ ID NO: 143281 - DNA, 25 bp, Artificial
  probe
  misc_feature (1)..(25): SEQ ID NO: 5000; WAN024D4L_at; Start 183; Stop 207
cattcacttcaagtgttgggtcccc

SEQ ID NO: 143282 - DNA, 25 bp, Artificial
  probe
  misc_feature (1)..(25): SEQ ID NO: 5000; WAN024D4L_at; Start 204; Stop 228
ccccattttcatccaacttaaatag

SEQ ID NO: 143283 - DNA, 25 bp, Artificial
  probe
  misc_feature (1)..(25): SEQ ID NO: 5000; WAN024D4L_at; Start 56; Stop 80
tgtccaaccgcaacctcgtggtgac

SEQ ID NO: 143284 - DNA, 25 bp, Artificial
  probe
  misc_feature (1)..(25): SEQ ID NO: 5000; WAN024D4L_at; Start 170; Stop 194
tagccacccttgtcattcacttcaa

SEQ ID NO: 143285 - DNA, 25 bp, Artificial
  probe
  misc_feature (1)..(25): SEQ ID NO: 5000; WAN024D4L_at; Start 41; Stop 65
aagtcaatctcatgctgtccaaccg

SEQ ID NO: 143286 - DNA, 25 bp, Artificial
  probe
  misc_feature (1)..(25): SEQ ID NO: 5000; WAN024D4L_at; Start 75; Stop 99
ggtgactcgcttctacttcaaatcc

SEQ ID NO: 143287 - DNA, 25 bp, Artificial
  probe
  misc_feature (1)..(25): SEQ ID NO: 5000; WAN024D4L_at; Start 92; Stop 116
tcaaatcccattttggtcaagacat

SEQ ID NO: 143288 - DNA, 25 bp, Artificial
  probe
  misc_feature (1)..(25): SEQ ID NO: 5000; WAN024D4L_at; Start 199; Stop 223
tgggtccccattttcatccaactta

SEQ ID NO: 143289 - DNA, 25 bp, Artificial
  probe
  misc_feature (1)..(25): SEQ ID NO: 5000; WAN024D4L_at; Start 3; Stop 27
gaatcttatcacaagcacggagaac

SEQ ID NO: 143290 - DNA, 25 bp, Artificial
  probe
  misc_feature (1)..(25): SEQ ID NO: 5000; WAN024D4L_at; Start 135; Stop 159
tgttgtccgcaaggtcagtaggtgc

SEQ ID NO: 143291 - DNA, 25 bp, Artificial
  probe
  misc_feature (1)..(25): SEQ ID NO: 5000; WAN024D4L_at; Start 11; Stop 35
tcacaagcacggagaacttcatcgt

SEQ ID NO: 143292 - DNA, 25 bp, Artificial
  probe
  misc_feature (1)..(25): SEQ ID NO: 5000; WAN024D4L_at; Start 6; Stop 30
tcttatcacaagcacggagaacttc

SEQ ID NO: 143293 - DNA, 25 bp, Artificial
  probe
  misc_feature (1)..(25): SEQ ID NO: 5000; WAN024D4L_at; Start 186; Stop 210
tcacttcaagtgttgggtccccatt

SEQ ID NO: 143294 - DNA, 25 bp, Artificial
  probe
  misc_feature (1)..(25): SEQ ID NO: 5000; WAN024D4L_at; Start 33; Stop 57
cgtacttaaagtcaatctcatgctg

SEQ ID NO: 143295 - DNA, 25 bp, Artificial
  probe
  misc_feature (1)..(25): SEQ ID NO: 5000; WAN024D4L_at; Start 14; Stop 38
caagcacggagaacttcatcgtact

SEQ ID NO: 143296 - DNA, 25 bp, Artificial
  probe
  misc_feature (1)..(25): SEQ ID NO: 5000; WAN024D4L_at; Start 105; Stop 129
tggtcaagacattcacaatctcacg

SEQ ID NO: 143297 - DNA, 25 bp, Artificial
  probe
  misc_feature (1)..(25): SEQ ID NO: 5000; WAN024D4L_at; Start 110; Stop 134
aagacattcacaatctcacgacgtg

SEQ ID NO: 143298 - DNA, 25 bp, Artificial
  probe
  misc_feature (1)..(25): SEQ ID NO: 5000; WAN024D4L_at; Start 44; Stop 68
tcaatctcatgctgtccaaccgcaa

SEQ ID NO: 143299 - DNA, 25 bp, Artificial
  probe
  misc_feature (1)..(25): SEQ ID NO: 3934; WAN024D4M_at; Start 33; Stop 57
ggtcacccgcaaatggttcaccttc

SEQ ID NO: 143300 - DNA, 25 bp, Artificial
  probe
  misc_feature (1)..(25): SEQ ID NO: 3934; WAN024D4M_at; Start 130; Stop 154
atccaagtccgggtacaagtacata

SEQ ID NO: 143301 - DNA, 25 bp, Artificial
  probe
  misc_feature (1)..(25): SEQ ID NO: 3934; WAN024D4M_at; Start 158; Stop 182
gactcattgatacgtacaaaacctt

SEQ ID NO: 143302 - DNA, 25 bp, Artificial
  probe
  misc_feature (1)..(25): SEQ ID NO: 3934; WAN024D4M_at; Start 43; Stop 67
aaatggttcaccttctgttgtatag

SEQ ID NO: 143303 - DNA, 25 bp, Artificial
  probe
  misc_feature (1)..(25): SEQ ID NO: 3934; WAN024D4M_at; Start 118; Stop 142
gactgtccatgtatccaagtccggg

SEQ ID NO: 143304 - DNA, 25 bp, Artificial
  probe
  misc_feature (1)..(25): SEQ ID NO: 3934; WAN024D4M_at; Start 113; Stop 137
gggaagactgtccatgtatccaagt

SEQ ID NO: 143305 - DNA, 25 bp, Artificial
  probe
  misc_feature (1)..(25): SEQ ID NO: 3934; WAN024D4M_at; Start 3; Stop 27
gacgaagagctcgtttcaaattacc

SEQ ID NO: 143306 - DNA, 25 bp, Artificial
  probe
  misc_feature (1)..(25): SEQ ID NO: 3934; WAN024D4M_at; Start 13; Stop 37
tcgtttcaaattaccacgagggtca

SEQ ID NO: 143307 - DNA, 25 bp, Artificial
  probe
  misc_feature (1)..(25): SEQ ID NO: 3934; WAN024D4M_at; Start 38; Stop 62
cccgcaaatggttcaccttctgttg

SEQ ID NO: 143308 - DNA, 25 bp, Artificial
  probe
  misc_feature (1)..(25): SEQ ID NO: 3934; WAN024D4M_at; Start 23; Stop 47
ttaccacgagggtcacccgcaaatg

SEQ ID NO: 143309 - DNA, 25 bp, Artificial
  probe
  misc_feature (1)..(25): SEQ ID NO: 3934; WAN024D4M_at; Start 94; Stop 118
tccattttcatctccccaagggaag

SEQ ID NO: 143310 - DNA, 25 bp, Artificial
  probe
  misc_feature (1)..(25): SEQ ID NO: 3934; WAN024D4M_at; Start 191; Stop 215
gatccatcaaacataaccttgttcg

SEQ ID NO: 143311 - DNA, 25 bp, Artificial
  probe
  misc_feature (1)..(25): SEQ ID NO: 3934; WAN024D4M_at; Start 30; Stop 54
gagggtcacccgcaaatggttcacc

SEQ ID NO: 143312 - DNA, 25 bp, Artificial
  probe
  misc_feature (1)..(25): SEQ ID NO: 3934; WAN024D4M_at; Start 76; Stop 100
gatcagacctgcaacacttccattt

SEQ ID NO: 143313 - DNA, 25 bp, Artificial
  probe
  misc_feature (1)..(25): SEQ ID NO: 3934; WAN024D4M_at; Start 125; Stop 149
catgtatccaagtccgggtacaagt

SEQ ID NO: 143314 - DNA, 25 bp, Artificial
  probe
  misc_feature (1)..(25): SEQ ID NO: 3934; WAN024D4M_at; Start 67; Stop 91
gacatcacagatcagacctgcaaca

SEQ ID NO: 143315 - DNA, 25 bp, Artificial
  probe
  misc_feature (1)..(25): SEQ ID NO: 3934; WAN024D4M_at; Start 110; Stop 134
caagggaagactgtccatgtatcca

SEQ ID NO: 143316 - DNA, 25 bp, Artificial
  probe
  misc_feature (1)..(25): SEQ ID NO: 3934; WAN024D4M_at; Start 104; Stop 128
tctccccaagggaagactgtccatg

SEQ ID NO: 143317 - DNA, 25 bp, Artificial
  probe
  misc_feature (1)..(25): SEQ ID NO: 3934; WAN024D4M_at; Start 166; Stop 190
gatacgtacaaaaccttcaatagaa

SEQ ID NO: 143318 - DNA, 25 bp, Artificial
  probe
  misc_feature (1)..(25): SEQ ID NO: 3934; WAN024D4M_at; Start 121; Stop 145
tgtccatgtatccaagtccgggtac

SEQ ID NO: 143319 - DNA, 25 bp, Artificial
  probe
  misc_feature (1)..(25): SEQ ID NO: 3934; WAN024D4M_at; Start 143; Stop 167
tacaagtacatatccgactcattga

SEQ ID NO: 143320 - DNA, 25 bp, Artificial
  probe
  misc_feature (1)..(25): SEQ ID NO: 3934; WAN024D4M_at; Start 51; Stop 75
caccttctgttgtatagacatcaca

SEQ ID NO: 143321 - DNA, 25 bp, Artificial
  probe
  misc_feature (1)..(25): SEQ ID NO: 3934; WAN024D4M_at; Start 151; Stop 175
catatccgactcattgatacgtaca

SEQ ID NO: 143322 - DNA, 25 bp, Artificial
  probe
  misc_feature (1)..(25): SEQ ID NO: 3934; WAN024D4M_at; Start 63; Stop 87
tatagacatcacagatcagacctgc

SEQ ID NO: 143323 - DNA, 25 bp, Artificial
  probe
  misc_feature (1)..(25): SEQ ID NO: 3934; WAN024D4M_at; Start 60; Stop 84
ttgtatagacatcacagatcagacc

SEQ ID NO: 143324 - DNA, 25 bp, Artificial
  probe
  misc_feature (1)..(25): SEQ ID NO: 3934; WAN024D4M_at; Start 98; Stop 122
ttttcatctccccaagggaagactg

SEQ ID NO: 143325 - DNA, 25 bp, Artificial
  probe
  misc_feature (1)..(25): SEQ ID NO: 3934; WAN024D4M_at; Start 79; Stop 103
cagacctgcaacacttccattttca

SEQ ID NO: 143326 - DNA, 25 bp, Artificial
  probe
  misc_feature (1)..(25): SEQ ID NO: 3934; WAN024D4M_at; Start 198; Stop 222
caaacataaccttgttcgacaagac

SEQ ID NO: 143327 - DNA, 25 bp, Artificial
  probe
  misc_feature (1)..(25): SEQ ID NO: 3934; WAN024D4M_at; Start 179; Stop 203
ccttcaatagaagatccatcaaaca

SEQ ID NO: 143328 - DNA, 25 bp, Artificial
  probe
  misc_feature (1)..(25): SEQ ID NO: 3934; WAN024D4M_at; Start 134; Stop 158
aagtccgggtacaagtacatatccg

SEQ ID NO: 143329 - DNA, 25 bp, Artificial
  probe
  misc_feature (1)..(25): SEQ ID NO: 3934; WAN024D4M_at; Start 207; Stop 231
ccttgttcgacaagaccttatctaa

SEQ ID NO: 143330 - DNA, 25 bp, Artificial
  probe
  misc_feature (1)..(25): SEQ ID NO: 3934; WAN024D4M_at; Start 188; Stop 212
gaagatccatcaaacataaccttgt

SEQ ID NO: 143331 - DNA, 25 bp, Artificial
  probe
  misc_feature (1)..(25): SEQ ID NO: 3934; WAN024D4M_at; Start 6; Stop 30
gaagagctcgtttcaaattaccacg

SEQ ID NO: 143332 - DNA, 25 bp, Artificial
  probe
  misc_feature (1)..(25): SEQ ID NO: 3934; WAN024D4M_at; Start 140; Stop 164
gggtacaagtacatatccgactcat

SEQ ID NO: 143333 - DNA, 25 bp, Artificial
  probe
  misc_feature (1)..(25): SEQ ID NO: 1981; WAN024D4N_at; Start 1099; Stop 1123
gaagcaccagctcctatcgaagaaa

SEQ ID NO: 143334 - DNA, 25 bp, Artificial
  probe
  misc_feature (1)..(25): SEQ ID NO: 1981; WAN024D4N_at; Start 542; Stop 566
gatttgaagtagaagcgagtcacca

SEQ ID NO: 143335 - DNA, 25 bp, Artificial
  probe
  misc_feature (1)..(25): SEQ ID NO: 1981; WAN024D4N_at; Start 797; Stop 821
caaaaggaatgcagttgtcagaaac

SEQ ID NO: 143336 - DNA, 25 bp, Artificial
  probe
  misc_feature (1)..(25): SEQ ID NO: 1981; WAN024D4N_at; Start 1129; Stop 1153
tacatcatgacagcagaagagcgca

SEQ ID NO: 143337 - DNA, 25 bp, Artificial
  probe
  misc_feature (1)..(25): SEQ ID NO: 1981; WAN024D4N_at; Start 818; Stop 842
aaacagcttaccatttcctaggcgg

SEQ ID NO: 143338 - DNA, 25 bp, Artificial
  probe
  misc_feature (1)..(25): SEQ ID NO: 1981; WAN024D4N_at; Start 10; Stop 34
acagctgcagatattcgtcgtgaag

SEQ ID NO: 143339 - DNA, 25 bp, Artificial
  probe
  misc_feature (1)..(25): SEQ ID NO: 1981; WAN024D4N_at; Start 1262; Stop 1286
tccttgaagccaaacgaatcgaatg

SEQ ID NO: 143340 - DNA, 25 bp, Artificial
  probe
  misc_feature (1)..(25): SEQ ID NO: 1981; WAN024D4N_at; Start 493; Stop 517
cttgcggacaacacacgtcgtgaga

SEQ ID NO: 143341 - DNA, 25 bp, Artificial
  probe
  misc_feature (1)..(25): SEQ ID NO: 1981; WAN024D4N_at; Start 196; Stop 220
gagtcggatatgtacttgtacccgg

SEQ ID NO: 143342 - DNA, 25 bp, Artificial
  probe
  misc_feature (1)..(25): SEQ ID NO: 1981; WAN024D4N_at; Start 214; Stop 238
tacccggacttggatacatggacag

SEQ ID NO: 143343 - DNA, 25 bp, Artificial
  probe
  misc_feature (1)..(25): SEQ ID NO: 1981; WAN024D4N_at; Start 1278; Stop 1302
aatcgaatgggcaagttatgcaacc

SEQ ID NO: 143344 - DNA, 25 bp, Artificial
  probe
  misc_feature (1)..(25): SEQ ID NO: 1981; WAN024D4N_at; Start 561; Stop 585
tcaccacgaggttgcggttggacag

SEQ ID NO: 143345 - DNA, 25 bp, Artificial
  probe
  misc_feature (1)..(25): SEQ ID NO: 1981; WAN024D4N_at; Start 339; Stop 363
gaaacgagctcttcgtcacatggaa

SEQ ID NO: 143346 - DNA, 25 bp, Artificial
  probe
  misc_feature (1)..(25): SEQ ID NO: 1981; WAN024D4N_at; Start 387; Stop 411
ccttggtccagagccagaattcttc

SEQ ID NO: 143347 - DNA, 25 bp, Artificial
  probe
  misc_feature (1)..(25): SEQ ID NO: 1981; WAN024D4N_at; Start 1150; Stop 1174
cgcaaggaagctggtattacagacc

SEQ ID NO: 143348 - DNA, 25 bp, Artificial
  probe
  misc_feature (1)..(25): SEQ ID NO: 1981; WAN024D4N_at; Start 685; Stop 709
tacgcaacatttatggcgaagccaa

SEQ ID NO: 143349 - DNA, 25 bp, Artificial
  probe
  misc_feature (1)..(25): SEQ ID NO: 1981; WAN024D4N_at; Start 1024; Stop 1048
gatccaatggcgaacccttacgttg

SEQ ID NO: 143350 - DNA, 25 bp, Artificial
  probe
  misc_feature (1)..(25): SEQ ID NO: 1981; WAN024D4N_at; Start 1005; Stop 1029
tcttgagttgcgttcagtggatcca

SEQ ID NO: 143351 - DNA, 25 bp, Artificial
  probe
  misc_feature (1)..(25): SEQ ID NO: 1981; WAN024D4N_at; Start 478; Stop 502
ttggcacctactgaccttgcggaca

SEQ ID NO: 143352 - DNA, 25 bp, Artificial
  probe
  misc_feature (1)..(25): SEQ ID NO: 1981; WAN024D4N_at; Start 954; Stop 978
taaccgttcgccacttgtgcgcgta

SEQ ID NO: 143353 - DNA, 25 bp, Artificial
  probe
  misc_feature (1)..(25): SEQ ID NO: 1981; WAN024D4N_at; Start 754; Stop 778
tttgatgcagaaggaaataacgcct

SEQ ID NO: 143354 - DNA, 25 bp, Artificial
  probe
  misc_feature (1)..(25): SEQ ID NO: 1981; WAN024D4N_at; Start 610; Stop 634
gaagttctccgtgcttgtgataaga

SEQ ID NO: 143355 - DNA, 25 bp, Artificial
  probe
  misc_feature (1)..(25): SEQ ID NO: 1981; WAN024D4N_at; Start 1216; Stop 1240
gatgaagtggttaaagctgctctcg

SEQ ID NO: 143356 - DNA, 25 bp, Artificial
  probe
  misc_feature (1)..(25): SEQ ID NO: 1981; WAN024D4N_at; Start 833; Stop 857
tcctaggcggtttgatcaagcatgc

SEQ ID NO: 143357 - DNA, 25 bp, Artificial
  probe
  misc_feature (1)..(25): SEQ ID NO: 1981; WAN024D4N_at; Start 986; Stop 1010
cacgtggtatgggaactcgtcttga

SEQ ID NO: 143358 - DNA, 25 bp, Artificial
  probe
  misc_feature (1)..(25): SEQ ID NO: 1981; WAN024D4N_at; Start 969; Stop 993
tgtgcgcgtacctgcttcacgtggt

SEQ ID NO: 143359 - DNA, 25 bp, Artificial
  probe
  misc_feature (1)..(25): SEQ ID NO: 1981; WAN024D4N_at; Start 311; Stop 335
catttgcgggtgaccctcgtggtaa

SEQ ID NO: 143360 - DNA, 25 bp, Artificial
  probe
  misc_feature (1)..(25): SEQ ID NO: 1981; WAN024D4N_at; Start 663; Stop 687
cattgctcgcaaacacggactttac

SEQ ID NO: 143361 - DNA, 25 bp, Artificial
  probe
  misc_feature (1)..(25): SEQ ID NO: 1981; WAN024D4N_at; Start 1294; Stop 1318
tatgcaaccttcgtttcacaatggg

SEQ ID NO: 143362 - DNA, 25 bp, Artificial
  probe
  misc_feature (1)..(25): SEQ ID NO: 1981; WAN024D4N_at; Start 226; Stop 250
gatacatggacagtcttcccttggg

SEQ ID NO: 143363 - DNA, 25 bp, Artificial
  probe
  misc_feature (1)..(25): SEQ ID NO: 1981; WAN024D4N_at; Start 1086; Stop 1110
tgaaaataaaatcgaagcaccagct

SEQ ID NO: 143364 - DNA, 25 bp, Artificial
  probe
  misc_feature (1)..(25): SEQ ID NO: 1981; WAN024D4N_at; Start 904; Stop 928
cgtttggttccaggttatgaagcgc

SEQ ID NO: 143365 - DNA, 25 bp, Artificial
  probe
  misc_feature (1)..(25): SEQ ID NO: 1981; WAN024D4N_at; Start 296; Stop 320
caacagaaggtgaaccatttgcggg

SEQ ID NO: 143366 - DNA, 25 bp, Artificial
  probe
  misc_feature (1)..(25): SEQ ID NO: 1981; WAN024D4N_at; Start 936; Stop 960
cattgcttgggctggtcgtaaccgt

SEQ ID NO: 143367 - DNA, 25 bp, Artificial
  probe
  misc_feature (1)..(25): SEQ ID NO: 3072; WAN024D4O_at; Start 733; Stop 757
aaatttgaagagagggttggcaagc

SEQ ID NO: 143368 - DNA, 25 bp, Artificial
  probe
  misc_feature (1)..(25): SEQ ID NO: 3072; WAN024D4O_at; Start 656; Stop 680
aagatggcgatcgtttggagcaaga

SEQ ID NO: 143369 - DNA, 25 bp, Artificial
  probe
  misc_feature (1)..(25): SEQ ID NO: 3072; WAN024D4O_at; Start 1087; Stop 1111
caagaagatagaagaacagatcgat

SEQ ID NO: 143370 - DNA, 25 bp, Artificial
  probe
  misc_feature (1)..(25): SEQ ID NO: 3072; WAN024D4O_at; Start 130; Stop 154
ttatcaaccaaaatgcatttggcca

SEQ ID NO: 143371 - DNA, 25 bp, Artificial
  probe
  misc_feature (1)..(25): SEQ ID NO: 3072; WAN024D4O_at; Start 951; Stop 975
caaagtaaagagtattctggacgtc

SEQ ID NO: 143372 - DNA, 25 bp, Artificial
  probe
  misc_feature (1)..(25): SEQ ID NO: 3072; WAN024D4O_at; Start 181; Stop 205
tttgaacaggaagaagagagcattc

SEQ ID NO: 143373 - DNA, 25 bp, Artificial
  probe
  misc_feature (1)..(25): SEQ ID NO: 3072; WAN024D4O_at; Start 844; Stop 868
ggattattgactccaaagcaacatt

SEQ ID NO: 143374 - DNA, 25 bp, Artificial
  probe
  misc_feature (1)..(25): SEQ ID NO: 3072; WAN024D4O_at; Start 810; Stop 834
gatacaggctttagagtatcgagct

SEQ ID NO: 143375 - DNA, 25 bp, Artificial
  probe
  misc_feature (1)..(25): SEQ ID NO: 3072; WAN024D4O_at; Start 607; Stop 631
gctcatgagctaggacatattcttt

SEQ ID NO: 143376 - DNA, 25 bp, Artificial
  probe
  misc_feature (1)..(25): SEQ ID NO: 3072; WAN024D4O_at; Start 748; Stop 772
gttggcaagcgtgtcagcaatcctg

SEQ ID NO: 143377 - DNA, 25 bp, Artificial
  probe
  misc_feature (1)..(25): SEQ ID NO: 3072; WAN024D4O_at; Start 478; Stop 502
tcaggcatctatatcgtggaacgat

SEQ ID NO: 143378 - DNA, 25 bp, Artificial
  probe
  misc_feature (1)..(25): SEQ ID NO: 3072; WAN024D4O_at; Start 966; Stop 990
tctggacgtcgttttgagtaatcat

SEQ ID NO: 143379 - DNA, 25 bp, Artificial
  probe
  misc_feature (1)..(25): SEQ ID NO: 3072; WAN024D4O_at; Start 145; Stop 169
catttggccaaccaatttcatgttg

SEQ ID NO: 143380 - DNA, 25 bp, Artificial
  probe
  misc_feature (1)..(25): SEQ ID NO: 3072; WAN024D4O_at; Start 217; Stop 241
tctgtaattgcctttagaaatgcag

SEQ ID NO: 143381 - DNA, 25 bp, Artificial
  probe
  misc_feature (1)..(25): SEQ ID NO: 3072; WAN024D4O_at; Start 794; Stop 818
cggatttgaatgtttcgatacaggc

SEQ ID NO: 143382 - DNA, 25 bp, Artificial
  probe
  misc_feature (1)..(25): SEQ ID NO: 3072; WAN024D4O_at; Start 245; Stop 269
tagcaacacggaaaacaatagatat

SEQ ID NO: 143383 - DNA, 25 bp, Artificial
  probe
  misc_feature (1)..(25): SEQ ID NO: 3072; WAN024D4O_at; Start 888; Stop 912
tgcgcaaaaaggttacaaaatgatt

SEQ ID NO: 143384 - DNA, 25 bp, Artificial
  probe
  misc_feature (1)..(25): SEQ ID NO: 3072; WAN024D4O_at; Start 98; Stop 122
ggcagtttgagtccaacgaaacgaa

SEQ ID NO: 143385 - DNA, 25 bp, Artificial
  probe
  misc_feature (1)..(25): SEQ ID NO: 3072; WAN024D4O_at; Start 593; Stop 617
gaaattttgacttagctcatgagct

SEQ ID NO: 143386 - DNA, 25 bp, Artificial
  probe
  misc_feature (1)..(25): SEQ ID NO: 3072; WAN024D4O_at; Start 981; Stop 1005
gagtaatcatctagtcagtctagcg

SEQ ID NO: 143387 - DNA, 25 bp, Artificial
  probe
  misc_feature (1)..(25): SEQ ID NO: 3072; WAN024D4O_at; Start 514; Stop 538
caagctgatgcttatagcgcatggt

SEQ ID NO: 143388 - DNA, 25 bp, Artificial
  probe
  misc_feature (1)..(25): SEQ ID NO: 3072; WAN024D4O_at; Start 62; Stop 86
tagctcagagaattaatttaacgga

SEQ ID NO: 143389 - DNA, 25 bp, Artificial
  probe
  misc_feature (1)..(25): SEQ ID NO: 3072; WAN024D4O_at; Start 231; Stop 255
tagaaatgcagacctagcaacacgg

SEQ ID NO: 143390 - DNA, 25 bp, Artificial
  probe
  misc_feature (1)..(25): SEQ ID NO: 3072; WAN024D4O_at; Start 463; Stop 487
tataaattagaacgttcaggcatct

SEQ ID NO: 143391 - DNA, 25 bp, Artificial
  probe
  misc_feature (1)..(25): SEQ ID NO: 3072; WAN024D4O_at; Start 533; Stop 557
catggtcaaaattgggaagacctta

SEQ ID NO: 143392 - DNA, 25 bp, Artificial
  probe
  misc_feature (1)..(25): SEQ ID NO: 3072; WAN024D4O_at; Start 410; Stop 434
ctctttatgccagggaaaaattagg

SEQ ID NO: 143393 - DNA, 25 bp, Artificial
  probe
  misc_feature (1)..(25): SEQ ID NO: 3072; WAN024D4O_at; Start 78; Stop 102
tttaacggaacaagccatttggcag

SEQ ID NO: 143394 - DNA, 25 bp, Artificial
  probe
  misc_feature (1)..(25): SEQ ID NO: 3072; WAN024D4O_at; Start 1103; Stop 1127
cagatcgatttgataacatcatccc

SEQ ID NO: 143395 - DNA, 25 bp, Artificial
  probe
  misc_feature (1)..(25): SEQ ID NO: 3072; WAN024D4O_at; Start 996; Stop 1020
cagtctagcgactataatgtctaaa

SEQ ID NO: 143396 - DNA, 25 bp, Artificial
  probe
  misc_feature (1)..(25): SEQ ID NO: 3072; WAN024D4O_at; Start 379; Stop 403
tatcataagggagaatccattgagg

SEQ ID NO: 143397 - DNA, 25 bp, Artificial
  probe
  misc_feature (1)..(25): SEQ ID NO: 3072; WAN024D4O_at; Start 395; Stop 419
ccattgaggaattggctctttatgc

SEQ ID NO: 143398 - DNA, 25 bp, Artificial
  probe
  misc_feature (1)..(25): SEQ ID NO: 3072; WAN024D4O_at; Start 869; Stop 893
cttacttttatcgtcaaattgcgca

SEQ ID NO: 143399 - DNA, 25 bp, Artificial
  probe
  misc_feature (1)..(25): SEQ ID NO: 3072; WAN024D4O_at; Start 694; Stop 718
gcatcatgttttttattgccaaaag

SEQ ID NO: 143400 - DNA, 25 bp, Artificial
  probe
  misc_feature (1)..(25): SEQ ID NO: 3072; WAN024D4O_at; Start 47; Stop 71
taagtagagcagaattagctcagag

SEQ ID NO: 143401 - DNA, 25 bp, Artificial
  probe
  misc_feature (1)..(25): SEQ ID NO: 2872; WAN024D4P_at; Start 17; Stop 41
aattaaatcaagctaaaggttctat

SEQ ID NO: 143402 - DNA, 25 bp, Artificial
  probe
  misc_feature (1)..(25): SEQ ID NO: 2872; WAN024D4P_at; Start 178; Stop 202
aacatgttgagtggcgacgataaat

SEQ ID NO: 143403 - DNA, 25 bp, Artificial
  probe
  misc_feature (1)..(25): SEQ ID NO: 2872; WAN024D4P_at; Start 162; Stop 186
tgtagaaggtgttaaaaacatgttg

SEQ ID NO: 143404 - DNA, 25 bp, Artificial
  probe
  misc_feature (1)..(25): SEQ ID NO: 2872; WAN024D4P_at; Start 183; Stop 207
gttgagtggcgacgataaataacta

SEQ ID NO: 143405 - DNA, 25 bp, Artificial
  probe
  misc_feature (1)..(25): SEQ ID NO: 2872; WAN024D4P_at; Start 164; Stop 188
tagaaggtgttaaaaacatgttgag

SEQ ID NO: 143406 - DNA, 25 bp, Artificial
  probe
  misc_feature (1)..(25): SEQ ID NO: 2872; WAN024D4P_at; Start 143; Stop 167
aagacgctgtagaaggtgctgtaga

SEQ ID NO: 143407 - DNA, 25 bp, Artificial
  probe
  misc_feature (1)..(25): SEQ ID NO: 2872; WAN024D4P_at; Start 2; Stop 26
tgtcagtagaagaaaaattaaatca

SEQ ID NO: 143408 - DNA, 25 bp, Artificial
  probe
  misc_feature (1)..(25): SEQ ID NO: 2872; WAN024D4P_at; Start 173; Stop 197
ttaaaaacatgttgagtggcgacga

SEQ ID NO: 143409 - DNA, 25 bp, Artificial
  probe
  misc_feature (1)..(25): SEQ ID NO: 2872; WAN024D4P_at; Start 174; Stop 198
taaaaacatgttgagtggcgacgat

SEQ ID NO: 143410 - DNA, 25 bp, Artificial
  probe
  misc_feature (1)..(25): SEQ ID NO: 2872; WAN024D4P_at; Start 166; Stop 190
gaaggtgttaaaaacatgttgagtg

SEQ ID NO: 143411 - DNA, 25 bp, Artificial
  probe
  misc_feature (1)..(25): SEQ ID NO: 2872; WAN024D4P_at; Start 145; Stop 169
gacgctgtagaaggtgctgtagaag

SEQ ID NO: 143412 - DNA, 25 bp, Artificial
  probe
  misc_feature (1)..(25): SEQ ID NO: 2872; WAN024D4P_at; Start 144; Stop 168
agacgctgtagaaggtgctgtagaa

SEQ ID NO: 143413 - DNA, 25 bp, Artificial
  probe
  misc_feature (1)..(25): SEQ ID NO: 2872; WAN024D4P_at; Start 5; Stop 29
cagtagaagaaaaattaaatcaagc

SEQ ID NO: 143414 - DNA, 25 bp, Artificial
  probe
  misc_feature (1)..(25): SEQ ID NO: 2872; WAN024D4P_at; Start 20; Stop 44
taaatcaagctaaaggttctattaa

SEQ ID NO: 143415 - DNA, 25 bp, Artificial
  probe
  misc_feature (1)..(25): SEQ ID NO: 2872; WAN024D4P_at; Start 43; Stop 67
aaagaaggtgttgggaaagccatcg

SEQ ID NO: 143416 - DNA, 25 bp, Artificial
  probe
  misc_feature (1)..(25): SEQ ID NO: 2872; WAN024D4P_at; Start 184; Stop 208
ttgagtggcgacgataaataactaa

SEQ ID NO: 143417 - DNA, 25 bp, Artificial
  probe
  misc_feature (1)..(25): SEQ ID NO: 2872; WAN024D4P_at; Start 177; Stop 201
aaacatgttgagtggcgacgataaa

SEQ ID NO: 143418 - DNA, 25 bp, Artificial
  probe
  misc_feature (1)..(25): SEQ ID NO: 2872; WAN024D4P_at; Start 160; Stop 184
gctgtagaaggtgttaaaaacatgt

SEQ ID NO: 143419 - DNA, 25 bp, Artificial
  probe
  misc_feature (1)..(25): SEQ ID NO: 2872; WAN024D4P_at; Start 52; Stop 76
gttgggaaagccatcggtgatgaaa

SEQ ID NO: 143420 - DNA, 25 bp, Artificial
  probe
  misc_feature (1)..(25): SEQ ID NO: 2872; WAN024D4P_at; Start 159; Stop 183
tgctgtagaaggtgttaaaaacatg

SEQ ID NO: 143421 - DNA, 25 bp, Artificial
  probe
  misc_feature (1)..(25): SEQ ID NO: 2872; WAN024D4P_at; Start 185; Stop 209
tgagtggcgacgataaataactaat

SEQ ID NO: 143422 - DNA, 25 bp, Artificial
  probe
  misc_feature (1)..(25): SEQ ID NO: 2872; WAN024D4P_at; Start 56; Stop 80
ggaaagccatcggtgatgaaaaaat

SEQ ID NO: 143423 - DNA, 25 bp, Artificial
  probe
  misc_feature (1)..(25): SEQ ID NO: 2872; WAN024D4P_at; Start 168; Stop 192
aggtgttaaaaacatgttgagtggc

SEQ ID NO: 143424 - DNA, 25 bp, Artificial
  probe
  misc_feature (1)..(25): SEQ ID NO: 2872; WAN024D4P_at; Start 142; Stop 166
aaagacgctgtagaaggtgctgtag

SEQ ID NO: 143425 - DNA, 25 bp, Artificial
  probe
  misc_feature (1)..(25): SEQ ID NO: 2872; WAN024D4P_at; Start 54; Stop 78
tgggaaagccatcggtgatgaaaaa

SEQ ID NO: 143426 - DNA, 25 bp, Artificial
  probe
  misc_feature (1)..(25): SEQ ID NO: 2872; WAN024D4P_at; Start 172; Stop 196
gttaaaaacatgttgagtggcgacg

SEQ ID NO: 143427 - DNA, 25 bp, Artificial
  probe
  misc_feature (1)..(25): SEQ ID NO: 2872; WAN024D4P_at; Start 169; Stop 193
ggtgttaaaaacatgttgagtggcg

SEQ ID NO: 143428 - DNA, 25 bp, Artificial
  probe
  misc_feature (1)..(25): SEQ ID NO: 2872; WAN024D4P_at; Start 42; Stop 66
taaagaaggtgttgggaaagccatc

SEQ ID NO: 143429 - DNA, 25 bp, Artificial
  probe
  misc_feature (1)..(25): SEQ ID NO: 2872; WAN024D4P_at; Start 171; Stop 195
tgttaaaaacatgttgagtggcgac

SEQ ID NO: 143430 - DNA, 25 bp, Artificial
  probe
  misc_feature (1)..(25): SEQ ID NO: 2872; WAN024D4P_at; Start 175; Stop 199
aaaaacatgttgagtggcgacgata

SEQ ID NO: 143431 - DNA, 25 bp, Artificial
  probe
  misc_feature (1)..(25): SEQ ID NO: 2872; WAN024D4P_at; Start 176; Stop 200
aaaacatgttgagtggcgacgataa

SEQ ID NO: 143432 - DNA, 25 bp, Artificial
  probe
  misc_feature (1)..(25): SEQ ID NO: 2872; WAN024D4P_at; Start 57; Stop 81
gaaagccatcggtgatgaaaaaatg

SEQ ID NO: 143433 - DNA, 25 bp, Artificial
  probe
  misc_feature (1)..(25): SEQ ID NO: 2872; WAN024D4P_at; Start 53; Stop 77
ttgggaaagccatcggtgatgaaaa

SEQ ID NO: 143434 - DNA, 25 bp, Artificial
  probe
  misc_feature (1)..(25): SEQ ID NO: 2872; WAN024D4P_at; Start 182; Stop 206
tgttgagtggcgacgataaataact

SEQ ID NO: 143435 - DNA, 25 bp, Artificial
  probe
  misc_feature (1)..(25): SEQ ID NO: 2233; WAN024D4Q_at; Start 100; Stop 124
tttgtattgattttaggagcactgg

SEQ ID NO: 143436 - DNA, 25 bp, Artificial
  probe
  misc_feature (1)..(25): SEQ ID NO: 2233; WAN024D4Q_at; Start 73; Stop 97
gtctcctttggcttcttcaaaacaa

SEQ ID NO: 143437 - DNA, 25 bp, Artificial
  probe
  misc_feature (1)..(25): SEQ ID NO: 2233; WAN024D4Q_at; Start 47; Stop 71
taggcgtatttctggcttgtttgat

SEQ ID NO: 143438 - DNA, 25 bp, Artificial
  probe
  misc_feature (1)..(25): SEQ ID NO: 2233; WAN024D4Q_at; Start 42; Stop 66
tctcataggcgtatttctggcttgt

SEQ ID NO: 143439 - DNA, 25 bp, Artificial
  probe
  misc_feature (1)..(25): SEQ ID NO: 2233; WAN024D4Q_at; Start 64; Stop 88
tgtttgattgtctcctttggcttct

SEQ ID NO: 143440 - DNA, 25 bp, Artificial
  probe
  misc_feature (1)..(25): SEQ ID NO: 2233; WAN024D4Q_at; Start 23; Stop 47
gatatccaattatcgctggtctcat

SEQ ID NO: 143441 - DNA, 25 bp, Artificial
  probe
  misc_feature (1)..(25): SEQ ID NO: 2233; WAN024D4Q_at; Start 32; Stop 56
ttatcgctggtctcataggcgtatt

SEQ ID NO: 143442 - DNA, 25 bp, Artificial
  probe
  misc_feature (1)..(25): SEQ ID NO: 2233; WAN024D4Q_at; Start 51; Stop 75
cgtatttctggcttgtttgattgtc

SEQ ID NO: 143443 - DNA, 25 bp, Artificial
  probe
  misc_feature (1)..(25): SEQ ID NO: 2233; WAN024D4Q_at; Start 102; Stop 126
tgtattgattttaggagcactggga

SEQ ID NO: 143444 - DNA, 25 bp, Artificial
  probe
  misc_feature (1)..(25): SEQ ID NO: 2233; WAN024D4Q_at; Start 123; Stop 147
gggagttgcagctggattatatatc

SEQ ID NO: 143445 - DNA, 25 bp, Artificial
  probe
  misc_feature (1)..(25): SEQ ID NO: 2233; WAN024D4Q_at; Start 35; Stop 59
tcgctggtctcataggcgtatttct

SEQ ID NO: 143446 - DNA, 25 bp, Artificial
  probe
  misc_feature (1)..(25): SEQ ID NO: 2233; WAN024D4Q_at; Start 27; Stop 51
tccaattatcgctggtctcataggc

SEQ ID NO: 143447 - DNA, 25 bp, Artificial
  probe
  misc_feature (1)..(25): SEQ ID NO: 2233; WAN024D4Q_at; Start 130; Stop 154
gcagctggattatatatcgaaaaaa

SEQ ID NO: 143448 - DNA, 25 bp, Artificial
  probe
  misc_feature (1)..(25): SEQ ID NO: 2233; WAN024D4Q_at; Start 76; Stop 100
tcctttggcttcttcaaaacaatat

SEQ ID NO: 143449 - DNA, 25 bp, Artificial
  probe
  misc_feature (1)..(25): SEQ ID NO: 2233; WAN024D4Q_at; Start 19; Stop 43
tatcgatatccaattatcgctggtc

SEQ ID NO: 143450 - DNA, 25 bp, Artificial
  probe
  misc_feature (1)..(25): SEQ ID NO: 2233; WAN024D4Q_at; Start 127; Stop 151
gttgcagctggattatatatcgaaa

SEQ ID NO: 143451 - DNA, 25 bp, Artificial
  probe
  misc_feature (1)..(25): SEQ ID NO: 2233; WAN024D4Q_at; Start 2; Stop 26
tggaatggcttaaacaatatcgata

SEQ ID NO: 143452 - DNA, 25 bp, Artificial
  probe
  misc_feature (1)..(25): SEQ ID NO: 2233; WAN024D4Q_at; Start 82; Stop 106
ggcttcttcaaaacaatatttgtat

SEQ ID NO: 143453 - DNA, 25 bp, Artificial
  probe
  misc_feature (1)..(25): SEQ ID NO: 2233; WAN024D4Q_at; Start 8; Stop 32
ggcttaaacaatatcgatatccaat

SEQ ID NO: 143454 - DNA, 25 bp, Artificial
  probe
  misc_feature (1)..(25): SEQ ID NO: 2233; WAN024D4Q_at; Start 121; Stop 145
ctgggagttgcagctggattatata

SEQ ID NO: 143455 - DNA, 25 bp, Artificial
  probe
  misc_feature (1)..(25): SEQ ID NO: 2233; WAN024D4Q_at; Start 125; Stop 149
gagttgcagctggattatatatcga

SEQ ID NO: 143456 - DNA, 25 bp, Artificial
  probe
  misc_feature (1)..(25): SEQ ID NO: 2233; WAN024D4Q_at; Start 17; Stop 41
aatatcgatatccaattatcgctgg

SEQ ID NO: 143457 - DNA, 25 bp, Artificial
  probe
  misc_feature (1)..(25): SEQ ID NO: 2233; WAN024D4Q_at; Start 5; Stop 29
aatggcttaaacaatatcgatatcc

SEQ ID NO: 143458 - DNA, 25 bp, Artificial
  probe
  misc_feature (1)..(25): SEQ ID NO: 2233; WAN024D4Q_at; Start 29; Stop 53
caattatcgctggtctcataggcgt

SEQ ID NO: 143459 - DNA, 25 bp, Artificial
  probe
  misc_feature (1)..(25): SEQ ID NO: 2233; WAN024D4Q_at; Start 69; Stop 93
gattgtctcctttggcttcttcaaa

SEQ ID NO: 143460 - DNA, 25 bp, Artificial
  probe
  misc_feature (1)..(25): SEQ ID NO: 2233; WAN024D4Q_at; Start 60; Stop 84
ggcttgtttgattgtctcctttggc

SEQ ID NO: 143461 - DNA, 25 bp, Artificial
  probe
  misc_feature (1)..(25): SEQ ID NO: 2233; WAN024D4Q_at; Start 37; Stop 61
gctggtctcataggcgtatttctgg

SEQ ID NO: 143462 - DNA, 25 bp, Artificial
  probe
  misc_feature (1)..(25): SEQ ID NO: 2233; WAN024D4Q_at; Start 40; Stop 64
ggtctcataggcgtatttctggctt

SEQ ID NO: 143463 - DNA, 25 bp, Artificial
  probe
  misc_feature (1)..(25): SEQ ID NO: 2233; WAN024D4Q_at; Start 117; Stop 141
agcactgggagttgcagctggatta

SEQ ID NO: 143464 - DNA, 25 bp, Artificial
  probe
  misc_feature (1)..(25): SEQ ID NO: 2233; WAN024D4Q_at; Start 97; Stop 121
atatttgtattgattttaggagcac

SEQ ID NO: 143465 - DNA, 25 bp, Artificial
  probe
  misc_feature (1)..(25): SEQ ID NO: 2233; WAN024D4Q_at; Start 45; Stop 69
cataggcgtatttctggcttgtttg

SEQ ID NO: 143466 - DNA, 25 bp, Artificial
  probe
  misc_feature (1)..(25): SEQ ID NO: 2233; WAN024D4Q_at; Start 54; Stop 78
atttctggcttgtttgattgtctcc

SEQ ID NO: 143467 - DNA, 25 bp, Artificial
  probe
  misc_feature (1)..(25): SEQ ID NO: 2233; WAN024D4Q_at; Start 30; Stop 54
aattatcgctggtctcataggcgta

SEQ ID NO: 143468 - DNA, 25 bp, Artificial
  probe
  misc_feature (1)..(25): SEQ ID NO: 2233; WAN024D4Q_at; Start 119; Stop 143
cactgggagttgcagctggattata

SEQ ID NO: 143469 - DNA, 25 bp, Artificial
  probe
  misc_feature (1)..(25): SEQ ID NO: 5678; WAN024D4R_at; Start 400; Stop 424
ggtaaaattcttccttcagacaaca

SEQ ID NO: 143470 - DNA, 25 bp, Artificial
  probe
  misc_feature (1)..(25): SEQ ID NO: 5678; WAN024D4R_at; Start 312; Stop 336
tagaagtttggtgagtgatcataga

SEQ ID NO: 143471 - DNA, 25 bp, Artificial
  probe
  misc_feature (1)..(25): SEQ ID NO: 5678; WAN024D4R_at; Start 391; Stop 415
catgtagaaggtaaaattcttcctt

SEQ ID NO: 143472 - DNA, 25 bp, Artificial
  probe
  misc_feature (1)..(25): SEQ ID NO: 5678; WAN024D4R_at; Start 473; Stop 497
agcagttttttggtattgagcgtca

SEQ ID NO: 143473 - DNA, 25 bp, Artificial
  probe
  misc_feature (1)..(25): SEQ ID NO: 5678; WAN024D4R_at; Start 241; Stop 265
tacttggaaatccaacttgaaacta

SEQ ID NO: 143474 - DNA, 25 bp, Artificial
  probe
  misc_feature (1)..(25): SEQ ID NO: 5678; WAN024D4R_at; Start 348; Stop 372
cccaactgttcatgtaaatttacga

SEQ ID NO: 143475 - DNA, 25 bp, Artificial
  probe
  misc_feature (1)..(25): SEQ ID NO: 5678; WAN024D4R_at; Start 414; Stop 438
ttcagacaacatcgctgacagatgc

SEQ ID NO: 143476 - DNA, 25 bp, Artificial
  probe
  misc_feature (1)..(25): SEQ ID NO: 5678; WAN024D4R_at; Start 496; Stop 520
caagtaaaacttgaagttgcagtaa

SEQ ID NO: 143477 - DNA, 25 bp, Artificial
  probe
  misc_feature (1)..(25): SEQ ID NO: 5678; WAN024D4R_at; Start 50; Stop 74
taatcttgacaattttccttcctgt

SEQ ID NO: 143478 - DNA, 25 bp, Artificial
  probe
  misc_feature (1)..(25): SEQ ID NO: 5678; WAN024D4R_at; Start 552; Stop 576
gactgttagtcgtgtgaagtaacta

SEQ ID NO: 143479 - DNA, 25 bp, Artificial
  probe
  misc_feature (1)..(25): SEQ ID NO: 5678; WAN024D4R_at; Start 378; Stop 402
taaatgtttcgttcatgtagaaggt

SEQ ID NO: 143480 - DNA, 25 bp, Artificial
  probe
  misc_feature (1)..(25): SEQ ID NO: 5678; WAN024D4R_at; Start 108; Stop 132
tattcatctacttagctggagacag

SEQ ID NO: 143481 - DNA, 25 bp, Artificial
  probe
  misc_feature (1)..(25): SEQ ID NO: 5678; WAN024D4R_at; Start 278; Stop 302
taaaattaaagaattcggcaatcga

SEQ ID NO: 143482 - DNA, 25 bp, Artificial
  probe
  misc_feature (1)..(25): SEQ ID NO: 5678; WAN024D4R_at; Start 151; Stop 175
tatcttgctagatatgtcttttggg

SEQ ID NO: 143483 - DNA, 25 bp, Artificial
  probe
  misc_feature (1)..(25): SEQ ID NO: 5678; WAN024D4R_at; Start 65; Stop 89
tccttcctgttttgatagattatca

SEQ ID NO: 143484 - DNA, 25 bp, Artificial
  probe
  misc_feature (1)..(25): SEQ ID NO: 5678; WAN024D4R_at; Start 91; Stop 115
caagttagtgatctaggtattcatc

SEQ ID NO: 143485 - DNA, 25 bp, Artificial
  probe
  misc_feature (1)..(25): SEQ ID NO: 5678; WAN024D4R_at; Start 328; Stop 352
gatcatagattgatcaagaacccaa

SEQ ID NO: 143486 - DNA, 25 bp, Artificial
  probe
  misc_feature (1)..(25): SEQ ID NO: 5678; WAN024D4R_at; Start 6; Stop 30
tatgtcaaaagcaaagaaaatatgt

SEQ ID NO: 143487 - DNA, 25 bp, Artificial
  probe
  misc_feature (1)..(25): SEQ ID NO: 5678; WAN024D4R_at; Start 82; Stop 106
gattatcatcaagttagtgatctag

SEQ ID NO: 143488 - DNA, 25 bp, Artificial
  probe
  misc_feature (1)..(25): SEQ ID NO: 5678; WAN024D4R_at; Start 335; Stop 359
gattgatcaagaacccaactgttca

SEQ ID NO: 143489 - DNA, 25 bp, Artificial
  probe
  misc_feature (1)..(25): SEQ ID NO: 5678; WAN024D4R_at; Start 292; Stop 316
tcggcaatcgaaggttttgttagaa

SEQ ID NO: 143490 - DNA, 25 bp, Artificial
  probe
  misc_feature (1)..(25): SEQ ID NO: 5678; WAN024D4R_at; Start 137; Stop 161
ccgtagttgaattctatcttgctag

SEQ ID NO: 143491 - DNA, 25 bp, Artificial
  probe
  misc_feature (1)..(25): SEQ ID NO: 5678; WAN024D4R_at; Start 209; Stop 233
ccattttagttgtgatgttttatcc

SEQ ID NO: 143492 - DNA, 25 bp, Artificial
  probe
  misc_feature (1)..(25): SEQ ID NO: 5678; WAN024D4R_at; Start 104; Stop 128
taggtattcatctacttagctggag

SEQ ID NO: 143493 - DNA, 25 bp, Artificial
  probe
  misc_feature (1)..(25): SEQ ID NO: 5678; WAN024D4R_at; Start 453; Stop 477
tgaaataactaatggattgaagcag

SEQ ID NO: 143494 - DNA, 25 bp, Artificial
  probe
  misc_feature (1)..(25): SEQ ID NO: 5678; WAN024D4R_at; Start 507; Stop 531
tgaagttgcagtaaaaaattaccaa

SEQ ID NO: 143495 - DNA, 25 bp, Artificial
  probe
  misc_feature (1)..(25): SEQ ID NO: 5678; WAN024D4R_at; Start 175; Stop 199
gggacagtggttctatcaactttag

SEQ ID NO: 143496 - DNA, 25 bp, Artificial
  probe
  misc_feature (1)..(25): SEQ ID NO: 5678; WAN024D4R_at; Start 430; Stop 454
gacagatgccaaataattcaaaatg

SEQ ID NO: 143497 - DNA, 25 bp, Artificial
  probe
  misc_feature (1)..(25): SEQ ID NO: 5678; WAN024D4R_at; Start 461; Stop 485
ctaatggattgaagcagttttttgg

SEQ ID NO: 143498 - DNA, 25 bp, Artificial
  probe
  misc_feature (1)..(25): SEQ ID NO: 5678; WAN024D4R_at; Start 219; Stop 243
tgtgatgttttatcctaaacgttac

SEQ ID NO: 143499 - DNA, 25 bp, Artificial
  probe
  misc_feature (1)..(25): SEQ ID NO: 5678; WAN024D4R_at; Start 253; Stop 277
caacttgaaactaaaaacgatacat

SEQ ID NO: 143500 - DNA, 25 bp, Artificial
  probe
  misc_feature (1)..(25): SEQ ID NO: 5678; WAN024D4R_at; Start 425; Stop 449
tcgctgacagatgccaaataattca

SEQ ID NO: 143501 - DNA, 25 bp, Artificial
  probe
  misc_feature (1)..(25): SEQ ID NO: 5678; WAN024D4R_at; Start 539; Stop 563
ctcaaaacaaaaagactgttagtcg

SEQ ID NO: 143502 - DNA, 25 bp, Artificial
  probe
  misc_feature (1)..(25): SEQ ID NO: 5678; WAN024D4R_at; Start 484; Stop 508
ggtattgagcgtcaagtaaaacttg

SEQ ID NO: 143503 - DNA, 25 bp, Artificial
  probe
  misc_feature (1)..(25): SEQ ID NO: 1751; WAN024D4S_at; Start 821; Stop 845
gagagtatccaatgcttttgagtgg

SEQ ID NO: 143504 - DNA, 25 bp, Artificial
  probe
  misc_feature (1)..(25): SEQ ID NO: 1751; WAN024D4S_at; Start 712; Stop 736
gaaggatacttcaactccaaagaga

SEQ ID NO: 143505 - DNA, 25 bp, Artificial
  probe
  misc_feature (1)..(25): SEQ ID NO: 1751; WAN024D4S_at; Start 626; Stop 650
caaacgatgaaatgttgccatatgc

SEQ ID NO: 143506 - DNA, 25 bp, Artificial
  probe
  misc_feature (1)..(25): SEQ ID NO: 1751; WAN024D4S_at; Start 951; Stop 975
tagttggcaattagctgtgacgaca

SEQ ID NO: 143507 - DNA, 25 bp, Artificial
  probe
  misc_feature (1)..(25): SEQ ID NO: 1751; WAN024D4S_at; Start 671; Stop 695
caaataatggttctgtcgtaaacga

SEQ ID NO: 143508 - DNA, 25 bp, Artificial
  probe
  misc_feature (1)..(25): SEQ ID NO: 1751; WAN024D4S_at; Start 1165; Stop 1189
ccagttgttgtagcatatcctcagg

SEQ ID NO: 143509 - DNA, 25 bp, Artificial
  probe
  misc_feature (1)..(25): SEQ ID NO: 1751; WAN024D4S_at; Start 136; Stop 160
gaaacaaatgaaggaaaagcttggc

SEQ ID NO: 143510 - DNA, 25 bp, Artificial
  probe
  misc_feature (1)..(25): SEQ ID NO: 1751; WAN024D4S_at; Start 116; Stop 140
tctgggtacaattctctgacgaaac

SEQ ID NO: 143511 - DNA, 25 bp, Artificial
  probe
  misc_feature (1)..(25): SEQ ID NO: 1751; WAN024D4S_at; Start 38; Stop 62
ggctatcgttagctatacttgcagg

SEQ ID NO: 143512 - DNA, 25 bp, Artificial
  probe
  misc_feature (1)..(25): SEQ ID NO: 1751; WAN024D4S_at; Start 295; Stop 319
gatgttattacccttgatggaccaa

SEQ ID NO: 143513 - DNA, 25 bp, Artificial
  probe
  misc_feature (1)..(25): SEQ ID NO: 1751; WAN024D4S_at; Start 935; Stop 959
tagtatccccttcaggtagttggca

SEQ ID NO: 143514 - DNA, 25 bp, Artificial
  probe
  misc_feature (1)..(25): SEQ ID NO: 1751; WAN024D4S_at; Start 71; Stop 95
gaggaactaactcaaaacaagcgag

SEQ ID NO: 143515 - DNA, 25 bp, Artificial
  probe
  misc_feature (1)..(25): SEQ ID NO: 1751; WAN024D4S_at; Start 53; Stop 77
tacttgcaggttgtagtggaggaac

SEQ ID NO: 143516 - DNA, 25 bp, Artificial
  probe
  misc_feature (1)..(25): SEQ ID NO: 1751; WAN024D4S_at; Start 398; Stop 422
tggacagtattaaacaacagggaac

SEQ ID NO: 143517 - DNA, 25 bp, Artificial
  probe
  misc_feature (1)..(25): SEQ ID NO: 1751; WAN024D4S_at; Start 310; Stop 334
gatggaccaaatacggcagcttatg

SEQ ID NO: 143518 - DNA, 25 bp, Artificial
  probe
  misc_feature (1)..(25): SEQ ID NO: 1751; WAN024D4S_at; Start 220; Stop 244
tatattcctcgtagtggtagtggtg

SEQ ID NO: 143519 - DNA, 25 bp, Artificial
  probe
  misc_feature (1)..(25): SEQ ID NO: 1751; WAN024D4S_at; Start 1186; Stop 1210
caggtttctcgagcttttcaacaag

SEQ ID NO: 143520 - DNA, 25 bp, Artificial
  probe
  misc_feature (1)..(25): SEQ ID NO: 1751; WAN024D4S_at; Start 841; Stop 865
agtggttcttggacgattgctgaca

SEQ ID NO: 143521 - DNA, 25 bp, Artificial
  probe
  misc_feature (1)..(25): SEQ ID NO: 1751; WAN024D4S_at; Start 727; Stop 751
tccaaagagagtgtagaagcagttc

SEQ ID NO: 143522 - DNA, 25 bp, Artificial
  probe
  misc_feature (1)..(25): SEQ ID NO: 1751; WAN024D4S_at; Start 494; Stop 518
tcaaagaggccggaattgcggaatc

SEQ ID NO: 143523 - DNA, 25 bp, Artificial
  probe
  misc_feature (1)..(25): SEQ ID NO: 1751; WAN024D4S_at; Start 511; Stop 535
gcggaatcagagcttccaacgctag

SEQ ID NO: 143524 - DNA, 25 bp, Artificial
  probe
  misc_feature (1)..(25): SEQ ID NO: 1751; WAN024D4S_at; Start 1102; Stop 1126
gataaagtatccgaaccaatgcgtt

SEQ ID NO: 143525 - DNA, 25 bp, Artificial
  probe
  misc_feature (1)..(25): SEQ ID NO: 1751; WAN024D4S_at; Start 974; Stop 998
caaaatctgataaaaaagaggccgc

SEQ ID NO: 143526 - DNA, 25 bp, Artificial
  probe
  misc_feature (1)..(25): SEQ ID NO: 1751; WAN024D4S_at; Start 542; Stop 566
catggacatgggacgaatttaatac

SEQ ID NO: 143527 - DNA, 25 bp, Artificial
  probe
  misc_feature (1)..(25): SEQ ID NO: 1751; WAN024D4S_at; Start 101; Stop 125
caaatgatattaaagtctgggtaca

SEQ ID NO: 143528 - DNA, 25 bp, Artificial
  probe
  misc_feature (1)..(25): SEQ ID NO: 1751; WAN024D4S_at; Start 248; Stop 272
gatatgaagacaaggttaatgctgc

SEQ ID NO: 143529 - DNA, 25 bp, Artificial
  probe
  misc_feature (1)..(25): SEQ ID NO: 1751; WAN024D4S_at; Start 1147; Stop 1171
aaaacagctcatgctcgcccagttg

SEQ ID NO: 143530 - DNA, 25 bp, Artificial
  probe
  misc_feature (1)..(25): SEQ ID NO: 1751; WAN024D4S_at; Start 1269; Stop 1293
tcgtacaaaagaaatgcaaactgct

SEQ ID NO: 143531 - DNA, 25 bp, Artificial
  probe
  misc_feature (1)..(25): SEQ ID NO: 1751; WAN024D4S_at; Start 686; Stop 710
tcgtaaacgaagatggaacaaaggc

SEQ ID NO: 143532 - DNA, 25 bp, Artificial
  probe
  misc_feature (1)..(25): SEQ ID NO: 1751; WAN024D4S_at; Start 1251; Stop 1275
gcaaaaagtcttggatactcgtaca

SEQ ID NO: 143533 - DNA, 25 bp, Artificial
  probe
  misc_feature (1)..(25): SEQ ID NO: 1751; WAN024D4S_at; Start 527; Stop 551
caacgctagaaaagccatggacatg

SEQ ID NO: 143534 - DNA, 25 bp, Artificial
  probe
  misc_feature (1)..(25): SEQ ID NO: 1751; WAN024D4S_at; Start 991; Stop 1015
gaggccgcatctgaatttgttaaat

SEQ ID NO: 143535 - DNA, 25 bp, Artificial
  probe
  misc_feature (1)..(25): SEQ ID NO: 1751; WAN024D4S_at; Start 1117; Stop 1141
ccaatgcgtttcttgatggaacaaa

SEQ ID NO: 143536 - DNA, 25 bp, Artificial
  probe
  misc_feature (1)..(25): SEQ ID NO: 1751; WAN024D4S_at; Start 775; Stop 799
gaaggctatacaactgttagtccag

SEQ ID NO: 143537 - DNA, 25 bp, Artificial
  probe
  misc_feature (1)..(25): SEQ ID NO: 1443; WAN024D4T_at; Start 439; Stop 463
cgtcttgcagttattattccaggat

SEQ ID NO: 143538 - DNA, 25 bp, Artificial
  probe
  misc_feature (1)..(25): SEQ ID NO: 1443; WAN024D4T_at; Start 592; Stop 616
tctaaacctgcagttgctacagttg

SEQ ID NO: 143539 - DNA, 25 bp, Artificial
  probe
  misc_feature (1)..(25): SEQ ID NO: 1443; WAN024D4T_at; Start 375; Stop 399
tccagtggaaactgtgttaattcca

SEQ ID NO: 143540 - DNA, 25 bp, Artificial
  probe
  misc_feature (1)..(25): SEQ ID NO: 1443; WAN024D4T_at; Start 148; Stop 172
tggcaagccttcttaccaagtttaa

SEQ ID NO: 143541 - DNA, 25 bp, Artificial
  probe
  misc_feature (1)..(25): SEQ ID NO: 1443; WAN024D4T_at; Start 788; Stop 812
tggtctatgtagtcgctcagaaata

SEQ ID NO: 143542 - DNA, 25 bp, Artificial
  probe
  misc_feature (1)..(25): SEQ ID NO: 1443; WAN024D4T_at; Start 770; Stop 794
caacgattccgttgattttggtcta

SEQ ID NO: 143543 - DNA, 25 bp, Artificial
  probe
  misc_feature (1)..(25): SEQ ID NO: 1443; WAN024D4T_at; Start 246; Stop 270
cattttttatgctggaacgtttgct

SEQ ID NO: 143544 - DNA, 25 bp, Artificial
  probe
  misc_feature (1)..(25): SEQ ID NO: 1443; WAN024D4T_at; Start 222; Stop 246
tatttttacatatctagggaacagc

SEQ ID NO: 143545 - DNA, 25 bp, Artificial
  probe
  misc_feature (1)..(25): SEQ ID NO: 1443; WAN024D4T_at; Start 293; Stop 317
cactggccggtttcgcttttgcaaa

SEQ ID NO: 143546 - DNA, 25 bp, Artificial
  probe
  misc_feature (1)..(25): SEQ ID NO: 1443; WAN024D4T_at; Start 691; Stop 715
tcaatgcaggttgcaattacaacta

SEQ ID NO: 143547 - DNA, 25 bp, Artificial
  probe
  misc_feature (1)..(25): SEQ ID NO: 1443; WAN024D4T_at; Start 756; Stop 780
tgtattaactatttcaacgattccg

SEQ ID NO: 143548 - DNA, 25 bp, Artificial
  probe
  misc_feature (1)..(25): SEQ ID NO: 1443; WAN024D4T_at; Start 741; Stop 765
caatcaggtaatggctgtattaact

SEQ ID NO: 143549 - DNA, 25 bp, Artificial
  probe
  misc_feature (1)..(25): SEQ ID NO: 1443; WAN024D4T_at; Start 509; Stop 533
caattccagaagagattcttgagtc

SEQ ID NO: 143550 - DNA, 25 bp, Artificial
  probe
  misc_feature (1)..(25): SEQ ID NO: 1443; WAN024D4T_at; Start 676; Stop 700
gattcttctaaattttcaatgcagg

SEQ ID NO: 143551 - DNA, 25 bp, Artificial
  probe
  misc_feature (1)..(25): SEQ ID NO: 1443; WAN024D4T_at; Start 724; Stop 748
actcaaccagtttatatcaatcagg

SEQ ID NO: 143552 - DNA, 25 bp, Artificial
  probe
  misc_feature (1)..(25): SEQ ID NO: 1443; WAN024D4T_at; Start 424; Stop 448
ggtttggtcaataatcgtcttgcag

SEQ ID NO: 143553 - DNA, 25 bp, Artificial
  probe
  misc_feature (1)..(25): SEQ ID NO: 1443; WAN024D4T_at; Start 9; Stop 33
gatgaaacgatttaaaccaacaaca

SEQ ID NO: 143554 - DNA, 25 bp, Artificial
  probe
  misc_feature (1)..(25): SEQ ID NO: 1443; WAN024D4T_at; Start 48; Stop 72
tctgttaactttattggcaggactc

SEQ ID NO: 143555 - DNA, 25 bp, Artificial
  probe
  misc_feature (1)..(25): SEQ ID NO: 1443; WAN024D4T_at; Start 98; Stop 122
tagtttcagctatgaagccagaagc

SEQ ID NO: 143556 - DNA, 25 bp, Artificial
  probe
  misc_feature (1)..(25): SEQ ID NO: 1443; WAN024D4T_at; Start 279; Stop 303
tattattgtcaatgcactggccggt

SEQ ID NO: 143557 - DNA, 25 bp, Artificial
  probe
  misc_feature (1)..(25): SEQ ID NO: 1443; WAN024D4T_at; Start 813; Stop 837
tattgttcaaggtctgggtggttcc

SEQ ID NO: 143558 - DNA, 25 bp, Artificial
  probe
  misc_feature (1)..(25): SEQ ID NO: 1443; WAN024D4T_at; Start 313; Stop 337
gcaaaagtcaatttttcaggtaaga

SEQ ID NO: 143559 - DNA, 25 bp, Artificial
  probe
  misc_feature (1)..(25): SEQ ID NO: 1443; WAN024D4T_at; Start 635; Stop 659
caagctggaatgattatatctggcc

SEQ ID NO: 143560 - DNA, 25 bp, Artificial
  probe
  misc_feature (1)..(25): SEQ ID NO: 1443; WAN024D4T_at; Start 64; Stop 88
gcaggactcttcctttttcctatgg

SEQ ID NO: 143561 - DNA, 25 bp, Artificial
  probe
  misc_feature (1)..(25): SEQ ID NO: 1443; WAN024D4T_at; Start 579; Stop 603
tatgcttccaatgtctaaacctgca

SEQ ID NO: 143562 - DNA, 25 bp, Artificial
  probe
  misc_feature (1)..(25): SEQ ID NO: 1443; WAN024D4T_at; Start 525; Stop 549
tcttgagtctgcaaagatggacgga

SEQ ID NO: 143563 - DNA, 25 bp, Artificial
  probe
  misc_feature (1)..(25): SEQ ID NO: 1443; WAN024D4T_at; Start 656; Stop 680
ggccattgatggttttgacagattc

SEQ ID NO: 143564 - DNA, 25 bp, Artificial
  probe
  misc_feature (1)..(25): SEQ ID NO: 1443; WAN024D4T_at; Start 114; Stop 138
gccagaagcggatgtttataaaaat

SEQ ID NO: 143565 - DNA, 25 bp, Artificial
  probe
  misc_feature (1)..(25): SEQ ID NO: 1443; WAN024D4T_at; Start 82; Stop 106
cctatggtttggatggtagtttcag

SEQ ID NO: 143566 - DNA, 25 bp, Artificial
  probe
  misc_feature (1)..(25): SEQ ID NO: 1443; WAN024D4T_at; Start 163; Stop 187
ccaagtttaaatcccgctgattggt

SEQ ID NO: 143567 - DNA, 25 bp, Artificial
  probe
  misc_feature (1)..(25): SEQ ID NO: 1443; WAN024D4T_at; Start 457; Stop 481
ccaggattggcgagtgtatttaata

SEQ ID NO: 143568 - DNA, 25 bp, Artificial
  probe
  misc_feature (1)..(25): SEQ ID NO: 1443; WAN024D4T_at; Start 540; Stop 564
gatggacggagcaagtatcgttaga

SEQ ID NO: 143569 - DNA, 25 bp, Artificial
  probe
  misc_feature (1)..(25): SEQ ID NO: 1443; WAN024D4T_at; Start 132; Stop 156
taaaaatttgactagttggcaagcc

SEQ ID NO: 143570 - DNA, 25 bp, Artificial
  probe
  misc_feature (1)..(25): SEQ ID NO: 1443; WAN024D4T_at; Start 193; Stop 217
ccttatcaggaagtatttgagcgct

SEQ ID NO: 143571 - DNA, 25 bp, Artificial
  probe
  misc_feature (1)..(25): SEQ ID NO: 7017; WAN024D4U_at; Start 239; Stop 263
cgtttacggtagatatagtcattca

SEQ ID NO: 143572 - DNA, 25 bp, Artificial
  probe
  misc_feature (1)..(25): SEQ ID NO: 7017; WAN024D4U_at; Start 9; Stop 33
caggcttatattgagtattaacgag

SEQ ID NO: 143573 - DNA, 25 bp, Artificial
  probe
  misc_feature (1)..(25): SEQ ID NO: 7017; WAN024D4U_at; Start 380; Stop 404
catttggcatcatcaggcatggttg

SEQ ID NO: 143574 - DNA, 25 bp, Artificial
  probe
  misc_feature (1)..(25): SEQ ID NO: 7017; WAN024D4U_at; Start 279; Stop 303
gggcaatcttgtccaaatcttcctg

SEQ ID NO: 143575 - DNA, 25 bp, Artificial
  probe
  misc_feature (1)..(25): SEQ ID NO: 7017; WAN024D4U_at; Start 177; Stop 201
caagttctttcttgtaatcatccca

SEQ ID NO: 143576 - DNA, 25 bp, Artificial
  probe
  misc_feature (1)..(25): SEQ ID NO: 7017; WAN024D4U_at; Start 68; Stop 92
tctactgtgtatttcttatctccca

SEQ ID NO: 143577 - DNA, 25 bp, Artificial
  probe
  misc_feature (1)..(25): SEQ ID NO: 7017; WAN024D4U_at; Start 129; Stop 153
cgtagtatttttgtttaatagcgag

SEQ ID NO: 143578 - DNA, 25 bp, Artificial
  probe
  misc_feature (1)..(25): SEQ ID NO: 7017; WAN024D4U_at; Start 252; Stop 276
tatagtcattcatatctgcttcgat

SEQ ID NO: 143579 - DNA, 25 bp, Artificial
  probe
  misc_feature (1)..(25): SEQ ID NO: 7017; WAN024D4U_at; Start 144; Stop 168
taatagcgaggtaatcagaaagtcc

SEQ ID NO: 143580 - DNA, 25 bp, Artificial
  probe
  misc_feature (1)..(25): SEQ ID NO: 7017; WAN024D4U_at; Start 157; Stop 181
atcagaaagtccgtatttttcaagt

SEQ ID NO: 143581 - DNA, 25 bp, Artificial
  probe
  misc_feature (1)..(25): SEQ ID NO: 7017; WAN024D4U_at; Start 200; Stop 224
cactcagtatcaatattgccattta

SEQ ID NO: 143582 - DNA, 25 bp, Artificial
  probe
  misc_feature (1)..(25): SEQ ID NO: 7017; WAN024D4U_at; Start 337; Stop 361
gctcatgtaaggaacataatattct

SEQ ID NO: 143583 - DNA, 25 bp, Artificial
  probe
  misc_feature (1)..(25): SEQ ID NO: 7017; WAN024D4U_at; Start 289; Stop 313
gtccaaatcttcctgtgtcataaag

SEQ ID NO: 143584 - DNA, 25 bp, Artificial
  probe
  misc_feature (1)..(25): SEQ ID NO: 7017; WAN024D4U_at; Start 266; Stop 290
tctgcttcgatatgggcaatcttgt

SEQ ID NO: 143585 - DNA, 25 bp, Artificial
  probe
  misc_feature (1)..(25): SEQ ID NO: 7017; WAN024D4U_at; Start 356; Stop 380
tattctttgataagatccaaacgcc

SEQ ID NO: 143586 - DNA, 25 bp, Artificial
  probe
  misc_feature (1)..(25): SEQ ID NO: 7017; WAN024D4U_at; Start 363; Stop 387
tgataagatccaaacgccatttggc

SEQ ID NO: 143587 - DNA, 25 bp, Artificial
  probe
  misc_feature (1)..(25): SEQ ID NO: 7017; WAN024D4U_at; Start 149; Stop 173
gcgaggtaatcagaaagtccgtatt

SEQ ID NO: 143588 - DNA, 25 bp, Artificial
  probe
  misc_feature (1)..(25): SEQ ID NO: 7017; WAN024D4U_at; Start 390; Stop 414
catcaggcatggttgttactttacc

SEQ ID NO: 143589 - DNA, 25 bp, Artificial
  probe
  misc_feature (1)..(25): SEQ ID NO: 7017; WAN024D4U_at; Start 331; Stop 355
gacattgctcatgtaaggaacataa

SEQ ID NO: 143590 - DNA, 25 bp, Artificial
  probe
  misc_feature (1)..(25): SEQ ID NO: 7017; WAN024D4U_at; Start 226; Stop 250
aatccattcagcacgtttacggtag

SEQ ID NO: 143591 - DNA, 25 bp, Artificial
  probe
  misc_feature (1)..(25): SEQ ID NO: 7017; WAN024D4U_at; Start 84; Stop 108
tatctcccataatcaacctctagtt

SEQ ID NO: 143592 - DNA, 25 bp, Artificial
  probe
  misc_feature (1)..(25): SEQ ID NO: 7017; WAN024D4U_at; Start 300; Stop 324
cctgtgtcataaagactcttggata

SEQ ID NO: 143593 - DNA, 25 bp, Artificial
  probe
  misc_feature (1)..(25): SEQ ID NO: 7017; WAN024D4U_at; Start 24; Stop 48
tattaacgagatgtttattttctgc

SEQ ID NO: 143594 - DNA, 25 bp, Artificial
  probe
  misc_feature (1)..(25): SEQ ID NO: 7017; WAN024D4U_at; Start 111; Stop 135
tgtttgcttggtattggtcgtagta

SEQ ID NO: 143595 - DNA, 25 bp, Artificial
  probe
  misc_feature (1)..(25): SEQ ID NO: 7017; WAN024D4U_at; Start 373; Stop 397
caaacgccatttggcatcatcaggc

SEQ ID NO: 143596 - DNA, 25 bp, Artificial
  probe
  misc_feature (1)..(25): SEQ ID NO: 7017; WAN024D4U_at; Start 217; Stop 241
gccatttacaatccattcagcacgt

SEQ ID NO: 143597 - DNA, 25 bp, Artificial
  probe
  misc_feature (1)..(25): SEQ ID NO: 7017; WAN024D4U_at; Start 54; Stop 78
aacgattggctttttctactgtgta

SEQ ID NO: 143598 - DNA, 25 bp, Artificial
  probe
  misc_feature (1)..(25): SEQ ID NO: 7017; WAN024D4U_at; Start 39; Stop 63
tattttctgctataaaacgattggc

SEQ ID NO: 143599 - DNA, 25 bp, Artificial
  probe
  misc_feature (1)..(25): SEQ ID NO: 7017; WAN024D4U_at; Start 327; Stop 351
tattgacattgctcatgtaaggaac

SEQ ID NO: 143600 - DNA, 25 bp, Artificial
  probe
  misc_feature (1)..(25): SEQ ID NO: 7017; WAN024D4U_at; Start 97; Stop 121
caacctctagtttttgtttgcttgg

SEQ ID NO: 143601 - DNA, 25 bp, Artificial
  probe
  misc_feature (1)..(25): SEQ ID NO: 7017; WAN024D4U_at; Start 313; Stop 337
gactcttggatagttattgacattg

SEQ ID NO: 143602 - DNA, 25 bp, Artificial
  probe
  misc_feature (1)..(25): SEQ ID NO: 7017; WAN024D4U_at; Start 399; Stop 423
tggttgttactttaccatagtatga

SEQ ID NO: 143603 - DNA, 25 bp, Artificial
  probe
  misc_feature (1)..(25): SEQ ID NO: 7017; WAN024D4U_at; Start 186; Stop 210
tcttgtaatcatcccactcagtatc

SEQ ID NO: 143604 - DNA, 25 bp, Artificial
  probe
  misc_feature (1)..(25): SEQ ID NO: 7017; WAN024D4U_at; Start 194; Stop 218
tcatcccactcagtatcaatattgc

SEQ ID NO: 143605 - DNA, 25 bp, Artificial
  probe
  misc_feature (1)..(25): SEQ ID NO: 6987; WAN024D4V_at; Start 161; Stop 185
ggatagcatctggtaaatcaccact

SEQ ID NO: 143606 - DNA, 25 bp, Artificial
  probe
  misc_feature (1)..(25): SEQ ID NO: 6987; WAN024D4V_at; Start 32; Stop 56
tgtactctggtttctcatccaaaat

SEQ ID NO: 143607 - DNA, 25 bp, Artificial
  probe
  misc_feature (1)..(25): SEQ ID NO: 6987; WAN024D4V_at; Start 158; Stop 182
tgtggatagcatctggtaaatcacc

SEQ ID NO: 143608 - DNA, 25 bp, Artificial
  probe
  misc_feature (1)..(25): SEQ ID NO: 6987; WAN024D4V_at; Start 166; Stop 190
gcatctggtaaatcaccactagaaa

SEQ ID NO: 143609 - DNA, 25 bp, Artificial
  probe
  misc_feature (1)..(25): SEQ ID NO: 6987; WAN024D4V_at; Start 37; Stop 61
tctggtttctcatccaaaattttct

SEQ ID NO: 143610 - DNA, 25 bp, Artificial
  probe
  misc_feature (1)..(25): SEQ ID NO: 6987; WAN024D4V_at; Start 131; Stop 155
tcaagtccacatctgaagctccgtc

SEQ ID NO: 143611 - DNA, 25 bp, Artificial
  probe
  misc_feature (1)..(25): SEQ ID NO: 6987; WAN024D4V_at; Start 148; Stop 172
gctccgtcgttgtggatagcatctg

SEQ ID NO: 143612 - DNA, 25 bp, Artificial
  probe
  misc_feature (1)..(25): SEQ ID NO: 6987; WAN024D4V_at; Start 109; Stop 133
acaccttttttagcccagttcatca

SEQ ID NO: 143613 - DNA, 25 bp, Artificial
  probe
  misc_feature (1)..(25): SEQ ID NO: 6987; WAN024D4V_at; Start 2; Stop 26
tgtgcccatcaggtgctgtcatcaa

SEQ ID NO: 143614 - DNA, 25 bp, Artificial
  probe
  misc_feature (1)..(25): SEQ ID NO: 6987; WAN024D4V_at; Start 204; Stop 228
tttttctgcaaagtcggattggtag

SEQ ID NO: 143615 - DNA, 25 bp, Artificial
  probe
  misc_feature (1)..(25): SEQ ID NO: 6987; WAN024D4V_at; Start 18; Stop 42
tgtcatcaaggccttgtactctggt

SEQ ID NO: 143616 - DNA, 25 bp, Artificial
  probe
  misc_feature (1)..(25): SEQ ID NO: 6987; WAN024D4V_at; Start 91; Stop 115
tcttcaactggaataataacacctt

SEQ ID NO: 143617 - DNA, 25 bp, Artificial
  probe
  misc_feature (1)..(25): SEQ ID NO: 6987; WAN024D4V_at; Start 195; Stop 219
caagttacgtttttctgcaaagtcg

SEQ ID NO: 143618 - DNA, 25 bp, Artificial
  probe
  misc_feature (1)..(25): SEQ ID NO: 6987; WAN024D4V_at; Start 152; Stop 176
cgtcgttgtggatagcatctggtaa

SEQ ID NO: 143619 - DNA, 25 bp, Artificial
  probe
  misc_feature (1)..(25): SEQ ID NO: 6987; WAN024D4V_at; Start 119; Stop 143
tagcccagttcatcaagtccacatc

SEQ ID NO: 143620 - DNA, 25 bp, Artificial
  probe
  misc_feature (1)..(25): SEQ ID NO: 6987; WAN024D4V_at; Start 114; Stop 138
ttttttagcccagttcatcaagtcc

SEQ ID NO: 143621 - DNA, 25 bp, Artificial
  probe
  misc_feature (1)..(25): SEQ ID NO: 6987; WAN024D4V_at; Start 65; Stop 89
gatttggcatgtatttatcaatcaa

SEQ ID NO: 143622 - DNA, 25 bp, Artificial
  probe
  misc_feature (1)..(25): SEQ ID NO: 6987; WAN024D4V_at; Start 28; Stop 52
gccttgtactctggtttctcatcca

SEQ ID NO: 143623 - DNA, 25 bp, Artificial
  probe
  misc_feature (1)..(25): SEQ ID NO: 6987; WAN024D4V_at; Start 202; Stop 226
cgtttttctgcaaagtcggattggt

SEQ ID NO: 143624 - DNA, 25 bp, Artificial
  probe
  misc_feature (1)..(25): SEQ ID NO: 6987; WAN024D4V_at; Start 117; Stop 141
tttagcccagttcatcaagtccaca

SEQ ID NO: 143625 - DNA, 25 bp, Artificial
  probe
  misc_feature (1)..(25): SEQ ID NO: 6987; WAN024D4V_at; Start 7; Stop 31
ccatcaggtgctgtcatcaaggcct

SEQ ID NO: 143626 - DNA, 25 bp, Artificial
  probe
  misc_feature (1)..(25): SEQ ID NO: 6987; WAN024D4V_at; Start 4; Stop 28
tgcccatcaggtgctgtcatcaagg

SEQ ID NO: 143627 - DNA, 25 bp, Artificial
  probe
  misc_feature (1)..(25): SEQ ID NO: 6987; WAN024D4V_at; Start 13; Stop 37
ggtgctgtcatcaaggccttgtact

SEQ ID NO: 143628 - DNA, 25 bp, Artificial
  probe
  misc_feature (1)..(25): SEQ ID NO: 6987; WAN024D4V_at; Start 80; Stop 104
tatcaatcaaatcttcaactggaat

SEQ ID NO: 143629 - DNA, 25 bp, Artificial
  probe
  misc_feature (1)..(25): SEQ ID NO: 6987; WAN024D4V_at; Start 181; Stop 205
ccactagaaatatccaagttacgtt

SEQ ID NO: 143630 - DNA, 25 bp, Artificial
  probe
  misc_feature (1)..(25): SEQ ID NO: 6987; WAN024D4V_at; Start 24; Stop 48
caaggccttgtactctggtttctca

SEQ ID NO: 143631 - DNA, 25 bp, Artificial
  probe
  misc_feature (1)..(25): SEQ ID NO: 6987; WAN024D4V_at; Start 124; Stop 148
cagttcatcaagtccacatctgaag

SEQ ID NO: 143632 - DNA, 25 bp, Artificial
  probe
  misc_feature (1)..(25): SEQ ID NO: 6987; WAN024D4V_at; Start 174; Stop 198
taaatcaccactagaaatatccaag

SEQ ID NO: 143633 - DNA, 25 bp, Artificial
  probe
  misc_feature (1)..(25): SEQ ID NO: 6987; WAN024D4V_at; Start 51; Stop 75
caaaattttcttaagatttggcatg

SEQ ID NO: 143634 - DNA, 25 bp, Artificial
  probe
  misc_feature (1)..(25): SEQ ID NO: 6987; WAN024D4V_at; Start 11; Stop 35
caggtgctgtcatcaaggccttgta

SEQ ID NO: 143635 - DNA, 25 bp, Artificial
  probe
  misc_feature (1)..(25): SEQ ID NO: 6987; WAN024D4V_at; Start 144; Stop 168
tgaagctccgtcgttgtggatagca

SEQ ID NO: 143636 - DNA, 25 bp, Artificial
  probe
  misc_feature (1)..(25): SEQ ID NO: 6987; WAN024D4V_at; Start 139; Stop 163
acatctgaagctccgtcgttgtgga

SEQ ID NO: 143637 - DNA, 25 bp, Artificial
  probe
  misc_feature (1)..(25): SEQ ID NO: 6987; WAN024D4V_at; Start 135; Stop 159
gtccacatctgaagctccgtcgttg

SEQ ID NO: 143638 - DNA, 25 bp, Artificial
  probe
  misc_feature (1)..(25): SEQ ID NO: 6987; WAN024D4V_at; Start 192; Stop 216
atccaagttacgtttttctgcaaag

SEQ ID NO: 143639 - DNA, 25 bp, Artificial
  probe
  misc_feature (1)..(25): SEQ ID NO: 981; WAN024D4W_at; Start 1471; Stop 1495
taccgtaaacgtgctgaatggattg

SEQ ID NO: 143640 - DNA, 25 bp, Artificial
  probe
  misc_feature (1)..(25): SEQ ID NO: 981; WAN024D4W_at; Start 208; Stop 232
caacgtttggagaaggaaactggcg

SEQ ID NO: 143641 - DNA, 25 bp, Artificial
  probe
  misc_feature (1)..(25): SEQ ID NO: 981; WAN024D4W_at; Start 162; Stop 186
cagttcaccgttatctcctaaagac

SEQ ID NO: 143642 - DNA, 25 bp, Artificial
  probe
  misc_feature (1)..(25): SEQ ID NO: 981; WAN024D4W_at; Start 830; Stop 854
ttatccgtcaattgcaagaaaaagg

SEQ ID NO: 143643 - DNA, 25 bp, Artificial
  probe
  misc_feature (1)..(25): SEQ ID NO: 981; WAN024D4W_at; Start 1457; Stop 1481
tgaatgactatatctaccgtaaacg

SEQ ID NO: 143644 - DNA, 25 bp, Artificial
  probe
  misc_feature (1)..(25): SEQ ID NO: 981; WAN024D4W_at; Start 1004; Stop 1028
caagtggtcaaaaacacgtagctcg

SEQ ID NO: 143645 - DNA, 25 bp, Artificial
  probe
  misc_feature (1)..(25): SEQ ID NO: 981; WAN024D4W_at; Start 1258; Stop 1282
caaaagactgaagtaggaggaccac

SEQ ID NO: 143646 - DNA, 25 bp, Artificial
  probe
  misc_feature (1)..(25): SEQ ID NO: 981; WAN024D4W_at; Start 645; Stop 669
tccaaatggaaatggagaggctgat

SEQ ID NO: 143647 - DNA, 25 bp, Artificial
  probe
  misc_feature (1)..(25): SEQ ID NO: 981; WAN024D4W_at; Start 1033; Stop 1057
aacggtatgggatttgcacgtgaca

SEQ ID NO: 143648 - DNA, 25 bp, Artificial
  probe
  misc_feature (1)..(25): SEQ ID NO: 981; WAN024D4W_at; Start 50; Stop 74
tagcagtacttgcagcctgtggctc

SEQ ID NO: 143649 - DNA, 25 bp, Artificial
  probe
  misc_feature (1)..(25): SEQ ID NO: 981; WAN024D4W_at; Start 452; Stop 476
ccttgatgacagcacctgatgggca

SEQ ID NO: 143650 - DNA, 25 bp, Artificial
  probe
  misc_feature (1)..(25): SEQ ID NO: 981; WAN024D4W_at; Start 223; Stop 247
gaaactggcgttcatattgactgga

SEQ ID NO: 143651 - DNA, 25 bp, Artificial
  probe
  misc_feature (1)..(25): SEQ ID NO: 981; WAN024D4W_at; Start 1226; Stop 1250
cactaaacggaactgcaccagcaga

SEQ ID NO: 143652 - DNA, 25 bp, Artificial
  probe
  misc_feature (1)..(25): SEQ ID NO: 981; WAN024D4W_at; Start 1547; Stop 1571
aatacggactttctgattacctcgc

SEQ ID NO: 143653 - DNA, 25 bp, Artificial
  probe
  misc_feature (1)..(25): SEQ ID NO: 981; WAN024D4W_at; Start 1240; Stop 1264
gcaccagcagaacttcgtcaaaaga

SEQ ID NO: 143654 - DNA, 25 bp, Artificial
  probe
  misc_feature (1)..(25): SEQ ID NO: 981; WAN024D4W_at; Start 339; Stop 363
tgtggacttgatgaactgggctaaa

SEQ ID NO: 143655 - DNA, 25 bp, Artificial
  probe
  misc_feature (1)..(25): SEQ ID NO: 981; WAN024D4W_at; Start 1335; Stop 1359
caaatggcgtttggatcttatcaaa

SEQ ID NO: 143656 - DNA, 25 bp, Artificial
  probe
  misc_feature (1)..(25): SEQ ID NO: 981; WAN024D4W_at; Start 432; Stop 456
tgagaaaccagagtacaaggccttg

SEQ ID NO: 143657 - DNA, 25 bp, Artificial
  probe
  misc_feature (1)..(25): SEQ ID NO: 981; WAN024D4W_at; Start 1048; Stop 1072
gcacgtgacaagatggttattacca

SEQ ID NO: 143658 - DNA, 25 bp, Artificial
  probe
  misc_feature (1)..(25): SEQ ID NO: 981; WAN024D4W_at; Start 321; Stop 345
caacgacggagcttcagatgtggac

SEQ ID NO: 143659 - DNA, 25 bp, Artificial
  probe
  misc_feature (1)..(25): SEQ ID NO: 981; WAN024D4W_at; Start 264; Stop 288
ctttgcagaaaaacgtaacttggat

SEQ ID NO: 143660 - DNA, 25 bp, Artificial
  probe
  misc_feature (1)..(25): SEQ ID NO: 981; WAN024D4W_at; Start 1399; Stop 1423
ccaagagtctttatgacacaggaag

SEQ ID NO: 143661 - DNA, 25 bp, Artificial
  probe
  misc_feature (1)..(25): SEQ ID NO: 981; WAN024D4W_at; Start 1018; Stop 1042
cacgtagctcgtacaaacggtatgg

SEQ ID NO: 143662 - DNA, 25 bp, Artificial
  probe
  misc_feature (1)..(25): SEQ ID NO: 981; WAN024D4W_at; Start 1420; Stop 1444
gaagatttggacaagattgcccata

SEQ ID NO: 143663 - DNA, 25 bp, Artificial
  probe
  misc_feature (1)..(25): SEQ ID NO: 981; WAN024D4W_at; Start 570; Stop 594
taagaaacttggtcttgaaatgcca

SEQ ID NO: 143664 - DNA, 25 bp, Artificial
  probe
  misc_feature (1)..(25): SEQ ID NO: 981; WAN024D4W_at; Start 147; Stop 171
gaagtttatgacagccagttcaccg

SEQ ID NO: 143665 - DNA, 25 bp, Artificial
  probe
  misc_feature (1)..(25): SEQ ID NO: 981; WAN024D4W_at; Start 73; Stop 97
tcaaaaaatacagcttcaagtccag

SEQ ID NO: 143666 - DNA, 25 bp, Artificial
  probe
  misc_feature (1)..(25): SEQ ID NO: 981; WAN024D4W_at; Start 864; Stop 888
taaagaagctttcgaacatgattgg

SEQ ID NO: 143667 - DNA, 25 bp, Artificial
  probe
  misc_feature (1)..(25): SEQ ID NO: 981; WAN024D4W_at; Start 111; Stop 135
aggtgtaacattcccgcttcaagaa

SEQ ID NO: 143668 - DNA, 25 bp, Artificial
  probe
  misc_feature (1)..(25): SEQ ID NO: 981; WAN024D4W_at; Start 989; Stop 1013
cagtacttgctggaccaagtggtca

SEQ ID NO: 143669 - DNA, 25 bp, Artificial
  probe
  misc_feature (1)..(25): SEQ ID NO: 981; WAN024D4W_at; Start 1194; Stop 1218
ggatcaagcgtcaaatagtctaaaa

SEQ ID NO: 143670 - DNA, 25 bp, Artificial
  probe
  misc_feature (1)..(25): SEQ ID NO: 981; WAN024D4W_at; Start 1106; Stop 1130
ggattgatgcacaatacgctccact

SEQ ID NO: 143671 - DNA, 25 bp, Artificial
  probe
  misc_feature (1)..(25): SEQ ID NO: 981; WAN024D4W_at; Start 305; Stop 329
taccagatgctatccacaacgacgg

SEQ ID NO: 143672 - DNA, 25 bp, Artificial
  probe
  misc_feature (1)..(25): SEQ ID NO: 981; WAN024D4W_at; Start 244; Stop 268
tggaccaactaccaatccgactttg

SEQ ID NO: 143673 - DNA, 25 bp, Artificial
  probe
  misc_feature (1)..(25): SEQ ID NO: 5242; WAN024D4X_at; Start 1171; Stop 1195
caggacactagtcgacggtatgtag

SEQ ID NO: 143674 - DNA, 25 bp, Artificial
  probe
  misc_feature (1)..(25): SEQ ID NO: 5242; WAN024D4X_at; Start 34; Stop 58
aaagccaatcgttttatagcagaaa

SEQ ID NO: 143675 - DNA, 25 bp, Artificial
  probe
  misc_feature (1)..(25): SEQ ID NO: 5242; WAN024D4X_at; Start 1299; Stop 1323
gccagctgagctatcacgaattgat

SEQ ID NO: 143676 - DNA, 25 bp, Artificial
  probe
  misc_feature (1)..(25): SEQ ID NO: 5242; WAN024D4X_at; Start 814; Stop 838
tcagttcaagaaattgatcatggcc

SEQ ID NO: 143677 - DNA, 25 bp, Artificial
  probe
  misc_feature (1)..(25): SEQ ID NO: 5242; WAN024D4X_at; Start 691; Stop 715
aaagattgccttattatgtcaccca

SEQ ID NO: 143678 - DNA, 25 bp, Artificial
  probe
  misc_feature (1)..(25): SEQ ID NO: 5242; WAN024D4X_at; Start 91; Stop 115
gaagaacatttttcagctgagattg

SEQ ID NO: 143679 - DNA, 25 bp, Artificial
  probe
  misc_feature (1)..(25): SEQ ID NO: 5242; WAN024D4X_at; Start 829; Stop 853
gatcatggccaagacttctatgcgc

SEQ ID NO: 143680 - DNA, 25 bp, Artificial
  probe
  misc_feature (1)..(25): SEQ ID NO: 5242; WAN024D4X_at; Start 374; Stop 398
ccggtgtccgccaagtgcaaaatat

SEQ ID NO: 143681 - DNA, 25 bp, Artificial
  probe
  misc_feature (1)..(25): SEQ ID NO: 5242; WAN024D4X_at; Start 216; Stop 240
gggacatgctaaaagtaaggacttg

SEQ ID NO: 143682 - DNA, 25 bp, Artificial
  probe
  misc_feature (1)..(25): SEQ ID NO: 5242; WAN024D4X_at; Start 757; Stop 781
tcatcgcttttgttcacgggtaagg

SEQ ID NO: 143683 - DNA, 25 bp, Artificial
  probe
  misc_feature (1)..(25): SEQ ID NO: 5242; WAN024D4X_at; Start 592; Stop 616
gataacctagtagaatggcagttcg

SEQ ID NO: 143684 - DNA, 25 bp, Artificial
  probe
  misc_feature (1)..(25): SEQ ID NO: 5242; WAN024D4X_at; Start 714; Stop 738
catgcgttatcagcgtgagggagac

SEQ ID NO: 143685 - DNA, 25 bp, Artificial
  probe
  misc_feature (1)..(25): SEQ ID NO: 5242; WAN024D4X_at; Start 1285; Stop 1309
tattacttaacggtgccagctgagc

SEQ ID NO: 143686 - DNA, 25 bp, Artificial
  probe
  misc_feature (1)..(25): SEQ ID NO: 5242; WAN024D4X_at; Start 608; Stop 632
ggcagttcgaatccatctttttaaa

SEQ ID NO: 143687 - DNA, 25 bp, Artificial
  probe
  misc_feature (1)..(25): SEQ ID NO: 5242; WAN024D4X_at; Start 407; Stop 431
cagatgacgggattcactttgaaaa

SEQ ID NO: 143688 - DNA, 25 bp, Artificial
  probe
  misc_feature (1)..(25): SEQ ID NO: 5242; WAN024D4X_at; Start 658; Stop 682
tgggaatgcccagattacttcgagt

SEQ ID NO: 143689 - DNA, 25 bp, Artificial
  probe
  misc_feature (1)..(25): SEQ ID NO: 5242; WAN024D4X_at; Start 480; Stop 504
gattgctgctgatttccgtgatcca

SEQ ID NO: 143690 - DNA, 25 bp, Artificial
  probe
  misc_feature (1)..(25): SEQ ID NO: 5242; WAN024D4X_at; Start 313; Stop 337
tctgccattgtcaaggatgatcgcc

SEQ ID NO: 143691 - DNA, 25 bp, Artificial
  probe
  misc_feature (1)..(25): SEQ ID NO: 5242; WAN024D4X_at; Start 991; Stop 1015
gatggcaaactaagacaattccctg

SEQ ID NO: 143692 - DNA, 25 bp, Artificial
  probe
  misc_feature (1)..(25): SEQ ID NO: 5242; WAN024D4X_at; Start 1155; Stop 1179
tctaggtgaagaagaacaggacact

SEQ ID NO: 143693 - DNA, 25 bp, Artificial
  probe
  misc_feature (1)..(25): SEQ ID NO: 5242; WAN024D4X_at; Start 887; Stop 911
tcctgattgcttggatgcagacatg

SEQ ID NO: 143694 - DNA, 25 bp, Artificial
  probe
  misc_feature (1)..(25): SEQ ID NO: 5242; WAN024D4X_at; Start 676; Stop 700
ttcgagttagatgggaaagattgcc

SEQ ID NO: 143695 - DNA, 25 bp, Artificial
  probe
  misc_feature (1)..(25): SEQ ID NO: 5242; WAN024D4X_at; Start 245; Stop 269
cttgggagcacttgccagtggcact

SEQ ID NO: 143696 - DNA, 25 bp, Artificial
  probe
  misc_feature (1)..(25): SEQ ID NO: 5242; WAN024D4X_at; Start 328; Stop 352
gatgatcgcctctggctcatgtaca

SEQ ID NO: 143697 - DNA, 25 bp, Artificial
  probe
  misc_feature (1)..(25): SEQ ID NO: 5242; WAN024D4X_at; Start 510; Stop 534
ctttgaaaaagatggacgctattac

SEQ ID NO: 143698 - DNA, 25 bp, Artificial
  probe
  misc_feature (1)..(25): SEQ ID NO: 5242; WAN024D4X_at; Start 730; Stop 754
gagggagactcatatcataacatca

SEQ ID NO: 143699 - DNA, 25 bp, Artificial
  probe
  misc_feature (1)..(25): SEQ ID NO: 5242; WAN024D4X_at; Start 845; Stop 869
tctatgcgcctcaaacattgttgga

SEQ ID NO: 143700 - DNA, 25 bp, Artificial
  probe
  misc_feature (1)..(25): SEQ ID NO: 5242; WAN024D4X_at; Start 569; Stop 593
gctgtatcgttctactagggtccga

SEQ ID NO: 143701 - DNA, 25 bp, Artificial
  probe
  misc_feature (1)..(25): SEQ ID NO: 5242; WAN024D4X_at; Start 294; Stop 318
aaatggttgtttctcaggctctgcc

SEQ ID NO: 143702 - DNA, 25 bp, Artificial
  probe
  misc_feature (1)..(25): SEQ ID NO: 5242; WAN024D4X_at; Start 1117; Stop 1141
caagtttacattgatcgtagccatc

SEQ ID NO: 143703 - DNA, 25 bp, Artificial
  probe
  misc_feature (1)..(25): SEQ ID NO: 5242; WAN024D4X_at; Start 231; Stop 255
taaggacttggtgacttgggagcac

SEQ ID NO: 143704 - DNA, 25 bp, Artificial
  probe
  misc_feature (1)..(25): SEQ ID NO: 5242; WAN024D4X_at; Start 107; Stop 131
ctgagattggttggatcaatgatcc

SEQ ID NO: 143705 - DNA, 25 bp, Artificial
  probe
  misc_feature (1)..(25): SEQ ID NO: 5242; WAN024D4X_at; Start 1047; Stop 1071
taaagattgtcattaccacttagga

SEQ ID NO: 143706 - DNA, 25 bp, Artificial
  probe
  misc_feature (1)..(25): SEQ ID NO: 5242; WAN024D4X_at; Start 1258; Stop 1282
caaggtgaagcaagcttgactgcaa

SEQ ID NO: 143707 - DNA, 25 bp, Artificial
  probe
  misc_feature (1)..(25): SEQ ID NO: 2685; WAN024D4Y_at; Start 85; Stop 109
actagaggcggtaaaggctcccata

SEQ ID NO: 143708 - DNA, 25 bp, Artificial
  probe
  misc_feature (1)..(25): SEQ ID NO: 2685; WAN024D4Y_at; Start 128; Stop 152
gggaaagacctatcacaatccttca

SEQ ID NO: 143709 - DNA, 25 bp, Artificial
  probe
  misc_feature (1)..(25): SEQ ID NO: 2685; WAN024D4Y_at; Start 29; Stop 53
tgcctatgacacaaaaagagatggt

SEQ ID NO: 143710 - DNA, 25 bp, Artificial
  probe
  misc_feature (1)..(25): SEQ ID NO: 2685; WAN024D4Y_at; Start 14; Stop 38
gaggtaaaagcgctatgcctatgac

SEQ ID NO: 143711 - DNA, 25 bp, Artificial
  probe
  misc_feature (1)..(25): SEQ ID NO: 2685; WAN024D4Y_at; Start 20; Stop 44
aaagcgctatgcctatgacacaaaa

SEQ ID NO: 143712 - DNA, 25 bp, Artificial
  probe
  misc_feature (1)..(25): SEQ ID NO: 2685; WAN024D4Y_at; Start 60; Stop 84
ccttacggcccatggttggataaag

SEQ ID NO: 143713 - DNA, 25 bp, Artificial
  probe
  misc_feature (1)..(25): SEQ ID NO: 2685; WAN024D4Y_at; Start 38; Stop 62
cacaaaaagagatggttaaactcct

SEQ ID NO: 143714 - DNA, 25 bp, Artificial
  probe
  misc_feature (1)..(25): SEQ ID NO: 2685; WAN024D4Y_at; Start 58; Stop 82
ctccttacggcccatggttggataa

SEQ ID NO: 143715 - DNA, 25 bp, Artificial
  probe
  misc_feature (1)..(25): SEQ ID NO: 2685; WAN024D4Y_at; Start 23; Stop 47
gcgctatgcctatgacacaaaaaga

SEQ ID NO: 143716 - DNA, 25 bp, Artificial
  probe
  misc_feature (1)..(25): SEQ ID NO: 2685; WAN024D4Y_at; Start 4; Stop 28
gtgttgtcaggaggtaaaagcgcta

SEQ ID NO: 143717 - DNA, 25 bp, Artificial
  probe
  misc_feature (1)..(25): SEQ ID NO: 2685; WAN024D4Y_at; Start 31; Stop 55
cctatgacacaaaaagagatggtta

SEQ ID NO: 143718 - DNA, 25 bp, Artificial
  probe
  misc_feature (1)..(25): SEQ ID NO: 2685; WAN024D4Y_at; Start 165; Stop 189
taagtacactgaaagagggataaga

SEQ ID NO: 143719 - DNA, 25 bp, Artificial
  probe
  misc_feature (1)..(25): SEQ ID NO: 2685; WAN024D4Y_at; Start 67; Stop 91
gcccatggttggataaagactagag

SEQ ID NO: 143720 - DNA, 25 bp, Artificial
  probe
  misc_feature (1)..(25): SEQ ID NO: 2685; WAN024D4Y_at; Start 83; Stop 107
agactagaggcggtaaaggctccca

SEQ ID NO: 143721 - DNA, 25 bp, Artificial
  probe
  misc_feature (1)..(25): SEQ ID NO: 2685; WAN024D4Y_at; Start 105; Stop 129
ccatattaaaatggaaaagcaaggg

SEQ ID NO: 143722 - DNA, 25 bp, Artificial
  probe
  misc_feature (1)..(25): SEQ ID NO: 2685; WAN024D4Y_at; Start 87; Stop 111
tagaggcggtaaaggctcccatatt

SEQ ID NO: 143723 - DNA, 25 bp, Artificial
  probe
  misc_feature (1)..(25): SEQ ID NO: 2685; WAN024D4Y_at; Start 95; Stop 119
gtaaaggctcccatattaaaatgga

SEQ ID NO: 143724 - DNA, 25 bp, Artificial
  probe
  misc_feature (1)..(25): SEQ ID NO: 2685; WAN024D4Y_at; Start 63; Stop 87
tacggcccatggttggataaagact

SEQ ID NO: 143725 - DNA, 25 bp, Artificial
  probe
  misc_feature (1)..(25): SEQ ID NO: 2685; WAN024D4Y_at; Start 100; Stop 124
ggctcccatattaaaatggaaaagc

SEQ ID NO: 143726 - DNA, 25 bp, Artificial
  probe
  misc_feature (1)..(25): SEQ ID NO: 2685; WAN024D4Y_at; Start 11; Stop 35
caggaggtaaaagcgctatgcctat

SEQ ID NO: 143727 - DNA, 25 bp, Artificial
  probe
  misc_feature (1)..(25): SEQ ID NO: 2685; WAN024D4Y_at; Start 78; Stop 102
gataaagactagaggcggtaaaggc

SEQ ID NO: 143728 - DNA, 25 bp, Artificial
  probe
  misc_feature (1)..(25): SEQ ID NO: 2685; WAN024D4Y_at; Start 17; Stop 41
gtaaaagcgctatgcctatgacaca

SEQ ID NO: 143729 - DNA, 25 bp, Artificial
  probe
  misc_feature (1)..(25): SEQ ID NO: 2685; WAN024D4Y_at; Start 185; Stop 209
taagaaagcaagctgggttgtaact

SEQ ID NO: 143730 - DNA, 25 bp, Artificial
  probe
  misc_feature (1)..(25): SEQ ID NO: 2685; WAN024D4Y_at; Start 176; Stop 200
aaagagggataagaaagcaagctgg

SEQ ID NO: 143731 - DNA, 25 bp, Artificial
  probe
  misc_feature (1)..(25): SEQ ID NO: 2685; WAN024D4Y_at; Start 169; Stop 193
tacactgaaagagggataagaaagc

SEQ ID NO: 143732 - DNA, 25 bp, Artificial
  probe
  misc_feature (1)..(25): SEQ ID NO: 2685; WAN024D4Y_at; Start 65; Stop 89
cggcccatggttggataaagactag

SEQ ID NO: 143733 - DNA, 25 bp, Artificial
  probe
  misc_feature (1)..(25): SEQ ID NO: 2685; WAN024D4Y_at; Start 70; Stop 94
catggttggataaagactagaggcg

SEQ ID NO: 143734 - DNA, 25 bp, Artificial
  probe
  misc_feature (1)..(25): SEQ ID NO: 2685; WAN024D4Y_at; Start 49; Stop 73
atggttaaactccttacggcccatg

SEQ ID NO: 143735 - DNA, 25 bp, Artificial
  probe
  misc_feature (1)..(25): SEQ ID NO: 2685; WAN024D4Y_at; Start 173; Stop 197
ctgaaagagggataagaaagcaagc

SEQ ID NO: 143736 - DNA, 25 bp, Artificial
  probe
  misc_feature (1)..(25): SEQ ID NO: 2685; WAN024D4Y_at; Start 187; Stop 211
agaaagcaagctgggttgtaactaa

SEQ ID NO: 143737 - DNA, 25 bp, Artificial
  probe
  misc_feature (1)..(25): SEQ ID NO: 2685; WAN024D4Y_at; Start 132; Stop 156
aagacctatcacaatccttcatggt

SEQ ID NO: 143738 - DNA, 25 bp, Artificial
  probe
  misc_feature (1)..(25): SEQ ID NO: 2685; WAN024D4Y_at; Start 8; Stop 32
tgtcaggaggtaaaagcgctatgcc

SEQ ID NO: 143739 - DNA, 25 bp, Artificial
  probe
  misc_feature (1)..(25): SEQ ID NO: 2685; WAN024D4Y_at; Start 159; Stop 183
gctgaataagtacactgaaagaggg

SEQ ID NO: 143740 - DNA, 25 bp, Artificial
  probe
  misc_feature (1)..(25): SEQ ID NO: 2685; WAN024D4Y_at; Start 25; Stop 49
gctatgcctatgacacaaaaagaga

SEQ ID NO: 143741 - DNA, 25 bp, Artificial
  probe
  misc_feature (1)..(25): SEQ ID NO: 3018; WAN024D4Z_at; Start 400; Stop 424
aacttttctcagactttgacagacg

SEQ ID NO: 143742 - DNA, 25 bp, Artificial
  probe
  misc_feature (1)..(25): SEQ ID NO: 3018; WAN024D4Z_at; Start 409; Stop 433
cagactttgacagacgctattgcag

SEQ ID NO: 143743 - DNA, 25 bp, Artificial
  probe
  misc_feature (1)..(25): SEQ ID NO: 3018; WAN024D4Z_at; Start 426; Stop 450
tattgcagataagaaagttcaagcc

SEQ ID NO: 143744 - DNA, 25 bp, Artificial
  probe
  misc_feature (1)..(25): SEQ ID NO: 3018; WAN024D4Z_at; Start 316; Stop 340
gaatacctaggaagtcaggaaccca

SEQ ID NO: 143745 - DNA, 25 bp, Artificial
  probe
  misc_feature (1)..(25): SEQ ID NO: 3018; WAN024D4Z_at; Start 212; Stop 236
gcttgtctttaattgataatgatcc

SEQ ID NO: 143746 - DNA, 25 bp, Artificial
  probe
  misc_feature (1)..(25): SEQ ID NO: 3018; WAN024D4Z_at; Start 86; Stop 110
aatactcagctacacaaggagaggg

SEQ ID NO: 143747 - DNA, 25 bp, Artificial
  probe
  misc_feature (1)..(25): SEQ ID NO: 3018; WAN024D4Z_at; Start 140; Stop 164
agtggctagggataactgttgcaga

SEQ ID NO: 143748 - DNA, 25 bp, Artificial
  probe
  misc_feature (1)..(25): SEQ ID NO: 3018; WAN024D4Z_at; Start 33; Stop 57
tgacgacacagacggaacagaagcg

SEQ ID NO: 143749 - DNA, 25 bp, Artificial
  probe
  misc_feature (1)..(25): SEQ ID NO: 3018; WAN024D4Z_at; Start 250; Stop 274
gaagatttcgtgtcaacctatgacc

SEQ ID NO: 143750 - DNA, 25 bp, Artificial
  probe
  misc_feature (1)..(25): SEQ ID NO: 3018; WAN024D4Z_at; Start 258; Stop 282
cgtgtcaacctatgaccttgataaa

SEQ ID NO: 143751 - DNA, 25 bp, Artificial
  probe
  misc_feature (1)..(25): SEQ ID NO: 3018; WAN024D4Z_at; Start 23; Stop 47
tattttattatgacgacacagacgg

SEQ ID NO: 143752 - DNA, 25 bp, Artificial
  probe
  misc_feature (1)..(25): SEQ ID NO: 3018; WAN024D4Z_at; Start 2; Stop 26
tgttagttacgtatccagctttatt

SEQ ID NO: 143753 - DNA, 25 bp, Artificial
  probe
  misc_feature (1)..(25): SEQ ID NO: 3018; WAN024D4Z_at; Start 28; Stop 52
tattatgacgacacagacggaacag

SEQ ID NO: 143754 - DNA, 25 bp, Artificial
  probe
  misc_feature (1)..(25): SEQ ID NO: 3018; WAN024D4Z_at; Start 292; Stop 316
tctatggtatctgttgatgtatcag

SEQ ID NO: 143755 - DNA, 25 bp, Artificial
  probe
  misc_feature (1)..(25): SEQ ID NO: 3018; WAN024D4Z_at; Start 307; Stop 331
gatgtatcagaatacctaggaagtc

SEQ ID NO: 143756 - DNA, 25 bp, Artificial
  probe
  misc_feature (1)..(25): SEQ ID NO: 3018; WAN024D4Z_at; Start 263; Stop 287
caacctatgaccttgataaatcttt

SEQ ID NO: 143757 - DNA, 25 bp, Artificial
  probe
  misc_feature (1)..(25): SEQ ID NO: 3018; WAN024D4Z_at; Start 362; Stop 386
caaaatgggcagataagttgggacg

SEQ ID NO: 143758 - DNA, 25 bp, Artificial
  probe
  misc_feature (1)..(25): SEQ ID NO: 3018; WAN024D4Z_at; Start 280; Stop 304
aaatcttttatttctatggtatctg

SEQ ID NO: 143759 - DNA, 25 bp, Artificial
  probe
  misc_feature (1)..(25): SEQ ID NO: 3018; WAN024D4Z_at; Start 61; Stop 85
tattttgtccatttcccagattttg

SEQ ID NO: 143760 - DNA, 25 bp, Artificial
  probe
  misc_feature (1)..(25): SEQ ID NO: 3018; WAN024D4Z_at; Start 75; Stop 99
cccagattttgaatactcagctaca

SEQ ID NO: 143761 - DNA, 25 bp, Artificial
  probe
  misc_feature (1)..(25): SEQ ID NO: 3018; WAN024D4Z_at; Start 224; Stop 248
ttgataatgatccttttaaagatga

SEQ ID NO: 143762 - DNA, 25 bp, Artificial
  probe
  misc_feature (1)..(25): SEQ ID NO: 3018; WAN024D4Z_at; Start 110; Stop 134
ggatttctgaggctttggctatggg

SEQ ID NO: 143763 - DNA, 25 bp, Artificial
  probe
  misc_feature (1)..(25): SEQ ID NO: 3018; WAN024D4Z_at; Start 39; Stop 63
cacagacggaacagaagcgacttat

SEQ ID NO: 143764 - DNA, 25 bp, Artificial
  probe
  misc_feature (1)..(25): SEQ ID NO: 3018; WAN024D4Z_at; Start 174; Stop 198
gagtgatggagagttacctcagcca

SEQ ID NO: 143765 - DNA, 25 bp, Artificial
  probe
  misc_feature (1)..(25): SEQ ID NO: 3018; WAN024D4Z_at; Start 319; Stop 343
tacctaggaagtcaggaacccatta

SEQ ID NO: 143766 - DNA, 25 bp, Artificial
  probe
  misc_feature (1)..(25): SEQ ID NO: 3018; WAN024D4Z_at; Start 47; Stop 71
gaacagaagcgacttattttgtcca

SEQ ID NO: 143767 - DNA, 25 bp, Artificial
  probe
  misc_feature (1)..(25): SEQ ID NO: 3018; WAN024D4Z_at; Start 167; Stop 191
tgatagagagtgatggagagttacc

SEQ ID NO: 143768 - DNA, 25 bp, Artificial
  probe
  misc_feature (1)..(25): SEQ ID NO: 3018; WAN024D4Z_at; Start 433; Stop 457
gataagaaagttcaagcctaactaa

SEQ ID NO: 143769 - DNA, 25 bp, Artificial
  probe
  misc_feature (1)..(25): SEQ ID NO: 3018; WAN024D4Z_at; Start 55; Stop 79
gcgacttattttgtccatttcccag

SEQ ID NO: 143770 - DNA, 25 bp, Artificial
  probe
  misc_feature (1)..(25): SEQ ID NO: 3018; WAN024D4Z_at; Start 235; Stop 259
ccttttaaagatgatgaagatttcg

SEQ ID NO: 143771 - DNA, 25 bp, Artificial
  probe
  misc_feature (1)..(25): SEQ ID NO: 3018; WAN024D4Z_at; Start 417; Stop 441
gacagacgctattgcagataagaaa

SEQ ID NO: 143772 - DNA, 25 bp, Artificial
  probe
  misc_feature (1)..(25): SEQ ID NO: 3018; WAN024D4Z_at; Start 16; Stop 40
ccagctttattttattatgacgaca

SEQ ID NO: 143773 - DNA, 25 bp, Artificial
  probe
  misc_feature (1)..(25): SEQ ID NO: 3018; WAN024D4Z_at; Start 152; Stop 176
taactgttgcagatttgatagagag

SEQ ID NO: 143774 - DNA, 25 bp, Artificial
  probe
  misc_feature (1)..(25): SEQ ID NO: 3018; WAN024D4Z_at; Start 182; Stop 206
gagagttacctcagccatcagatat

SEQ ID NO: 143775 - DNA, 25 bp, Artificial
  probe
  misc_feature (1)..(25): SEQ ID NO: 2398; WAN024D52_at; Start 379; Stop 403
gaggaatttgtcatggaatggaacc

SEQ ID NO: 143776 - DNA, 25 bp, Artificial
  probe
  misc_feature (1)..(25): SEQ ID NO: 2398; WAN024D52_at; Start 98; Stop 122
tagaagtgagttttctattggaagc

SEQ ID NO: 143777 - DNA, 25 bp, Artificial
  probe
  misc_feature (1)..(25): SEQ ID NO: 2398; WAN024D52_at; Start 180; Stop 204
cattctttttgaggaagcggtcctt

SEQ ID NO: 143778 - DNA, 25 bp, Artificial
  probe
  misc_feature (1)..(25): SEQ ID NO: 2398; WAN024D52_at; Start 382; Stop 406
gaatttgtcatggaatggaaccaag

SEQ ID NO: 143779 - DNA, 25 bp, Artificial
  probe
  misc_feature (1)..(25): SEQ ID NO: 2398; WAN024D52_at; Start 94; Stop 118
gcggtagaagtgagttttctattgg

SEQ ID NO: 143780 - DNA, 25 bp, Artificial
  probe
  misc_feature (1)..(25): SEQ ID NO: 2398; WAN024D52_at; Start 144; Stop 168
gatggtggatgaagacggagaggtt

SEQ ID NO: 143781 - DNA, 25 bp, Artificial
  probe
  misc_feature (1)..(25): SEQ ID NO: 2398; WAN024D52_at; Start 399; Stop 423
gaaccaagaagtctttgaagaagga

SEQ ID NO: 143782 - DNA, 25 bp, Artificial
  probe
  misc_feature (1)..(25): SEQ ID NO: 2398; WAN024D52_at; Start 392; Stop 416
tggaatggaaccaagaagtctttga

SEQ ID NO: 143783 - DNA, 25 bp, Artificial
  probe
  misc_feature (1)..(25): SEQ ID NO: 2398; WAN024D52_at; Start 319; Stop 343
aaagatactgctgaggttgggctag

SEQ ID NO: 143784 - DNA, 25 bp, Artificial
  probe
  misc_feature (1)..(25): SEQ ID NO: 2398; WAN024D52_at; Start 175; Stop 199
gatgacattctttttgaggaagcgg

SEQ ID NO: 143785 - DNA, 25 bp, Artificial
  probe
  misc_feature (1)..(25): SEQ ID NO: 2398; WAN024D52_at; Start 27; Stop 51
tttagaggaagagttggacaagaac

SEQ ID NO: 143786 - DNA, 25 bp, Artificial
  probe
  misc_feature (1)..(25): SEQ ID NO: 2398; WAN024D52_at; Start 47; Stop 71
agaactttccctttgactttgagat

SEQ ID NO: 143787 - DNA, 25 bp, Artificial
  probe
  misc_feature (1)..(25): SEQ ID NO: 2398; WAN024D52_at; Start 31; Stop 55
gaggaagagttggacaagaactttc

SEQ ID NO: 143788 - DNA, 25 bp, Artificial
  probe
  misc_feature (1)..(25): SEQ ID NO: 2398; WAN024D52_at; Start 376; Stop 400
gcagaggaatttgtcatggaatgga

SEQ ID NO: 143789 - DNA, 25 bp, Artificial
  probe
  misc_feature (1)..(25): SEQ ID NO: 2398; WAN024D52_at; Start 371; Stop 395
cagaagcagaggaatttgtcatgga

SEQ ID NO: 143790 - DNA, 25 bp, Artificial
  probe
  misc_feature (1)..(25): SEQ ID NO: 2398; WAN024D52_at; Start 397; Stop 421
tggaaccaagaagtctttgaagaag

SEQ ID NO: 143791 - DNA, 25 bp, Artificial
  probe
  misc_feature (1)..(25): SEQ ID NO: 2398; WAN024D52_at; Start 390; Stop 414
catggaatggaaccaagaagtcttt

SEQ ID NO: 143792 - DNA, 25 bp, Artificial
  probe
  misc_feature (1)..(25): SEQ ID NO: 2398; WAN024D52_at; Start 320; Stop 344
aagatactgctgaggttgggctaga

SEQ ID NO: 143793 - DNA, 25 bp, Artificial
  probe
  misc_feature (1)..(25): SEQ ID NO: 2398; WAN024D52_at; Start 389; Stop 413
tcatggaatggaaccaagaagtctt

SEQ ID NO: 143794 - DNA, 25 bp, Artificial
  probe
  misc_feature (1)..(25): SEQ ID NO: 2398; WAN024D52_at; Start 373; Stop 397
gaagcagaggaatttgtcatggaat

SEQ ID NO: 143795 - DNA, 25 bp, Artificial
  probe
  misc_feature (1)..(25): SEQ ID NO: 2398; WAN024D52_at; Start 173; Stop 197
cagatgacattctttttgaggaagc

SEQ ID NO: 143796 - DNA, 25 bp, Artificial
  probe
  misc_feature (1)..(25): SEQ ID NO: 2398; WAN024D52_at; Start 385; Stop 409
tttgtcatggaatggaaccaagaag

SEQ ID NO: 143797 - DNA, 25 bp, Artificial
  probe
  misc_feature (1)..(25): SEQ ID NO: 2398; WAN024D52_at; Start 45; Stop 69
caagaactttccctttgactttgag

SEQ ID NO: 143798 - DNA, 25 bp, Artificial
  probe
  misc_feature (1)..(25): SEQ ID NO: 2398; WAN024D52_at; Start 321; Stop 345
agatactgctgaggttgggctagat

SEQ ID NO: 143799 - DNA, 25 bp, Artificial
  probe
  misc_feature (1)..(25): SEQ ID NO: 2398; WAN024D52_at; Start 29; Stop 53
tagaggaagagttggacaagaactt

SEQ ID NO: 143800 - DNA, 25 bp, Artificial
  probe
  misc_feature (1)..(25): SEQ ID NO: 2398; WAN024D52_at; Start 124; Stop 148
caaaatgctgcaggtgtggagatgg

SEQ ID NO: 143801 - DNA, 25 bp, Artificial
  probe
  misc_feature (1)..(25): SEQ ID NO: 2398; WAN024D52_at; Start 370; Stop 394
ccagaagcagaggaatttgtcatgg

SEQ ID NO: 143802 - DNA, 25 bp, Artificial
  probe
  misc_feature (1)..(25): SEQ ID NO: 2398; WAN024D52_at; Start 381; Stop 405
ggaatttgtcatggaatggaaccaa

SEQ ID NO: 143803 - DNA, 25 bp, Artificial
  probe
  misc_feature (1)..(25): SEQ ID NO: 2398; WAN024D52_at; Start 178; Stop 202
gacattctttttgaggaagcggtcc

SEQ ID NO: 143804 - DNA, 25 bp, Artificial
  probe
  misc_feature (1)..(25): SEQ ID NO: 2398; WAN024D52_at; Start 177; Stop 201
tgacattctttttgaggaagcggtc

SEQ ID NO: 143805 - DNA, 25 bp, Artificial
  probe
  misc_feature (1)..(25): SEQ ID NO: 2398; WAN024D52_at; Start 50; Stop 74
actttccctttgactttgagattag

SEQ ID NO: 143806 - DNA, 25 bp, Artificial
  probe
  misc_feature (1)..(25): SEQ ID NO: 2398; WAN024D52_at; Start 138; Stop 162
tgtggagatggtggatgaagacgga

SEQ ID NO: 143807 - DNA, 25 bp, Artificial
  probe
  misc_feature (1)..(25): SEQ ID NO: 2398; WAN024D52_at; Start 387; Stop 411
tgtcatggaatggaaccaagaagtc

SEQ ID NO: 143808 - DNA, 25 bp, Artificial
  probe
  misc_feature (1)..(25): SEQ ID NO: 2398; WAN024D52_at; Start 394; Stop 418
gaatggaaccaagaagtctttgaag

SEQ ID NO: 143809 - DNA, 25 bp, Artificial
  probe
  misc_feature (1)..(25): SEQ ID NO: 6882; WAN024D53_at; Start 73; Stop 97
tgccaagatggtcacatcgtgattg

SEQ ID NO: 143810 - DNA, 25 bp, Artificial
  probe
  misc_feature (1)..(25): SEQ ID NO: 6882; WAN024D53_at; Start 87; Stop 111
catcgtgattgtagcggttaaatcc

SEQ ID NO: 143811 - DNA, 25 bp, Artificial
  probe
  misc_feature (1)..(25): SEQ ID NO: 6882; WAN024D53_at; Start 201; Stop 225
tcacacggatcaaatctggaagacc

SEQ ID NO: 143812 - DNA, 25 bp, Artificial
  probe
  misc_feature (1)..(25): SEQ ID NO: 6882; WAN024D53_at; Start 157; Stop 181
ggccatagctgtttccccaacaagg

SEQ ID NO: 143813 - DNA, 25 bp, Artificial
  probe
  misc_feature (1)..(25): SEQ ID NO: 6882; WAN024D53_at; Start 177; Stop 201
caagggaaatcaaggtcacagtcgt

SEQ ID NO: 143814 - DNA, 25 bp, Artificial
  probe
  misc_feature (1)..(25): SEQ ID NO: 6882; WAN024D53_at; Start 66; Stop 90
taatggttgccaagatggtcacatc

SEQ ID NO: 143815 - DNA, 25 bp, Artificial
  probe
  misc_feature (1)..(25): SEQ ID NO: 6882; WAN024D53_at; Start 184; Stop 208
aatcaaggtcacagtcgtcacacgg

SEQ ID NO: 143816 - DNA, 25 bp, Artificial
  probe
  misc_feature (1)..(25): SEQ ID NO: 6882; WAN024D53_at; Start 113; Stop 137
taagcgatggctacgttaccgatac

SEQ ID NO: 143817 - DNA, 25 bp, Artificial
  probe
  misc_feature (1)..(25): SEQ ID NO: 6882; WAN024D53_at; Start 164; Stop 188
gctgtttccccaacaagggaaatca

SEQ ID NO: 143818 - DNA, 25 bp, Artificial
  probe
  misc_feature (1)..(25): SEQ ID NO: 6882; WAN024D53_at; Start 109; Stop 133
tccataagcgatggctacgttaccg

SEQ ID NO: 143819 - DNA, 25 bp, Artificial
  probe
  misc_feature (1)..(25): SEQ ID NO: 6882; WAN024D53_at; Start 159; Stop 183
ccatagctgtttccccaacaaggga

SEQ ID NO: 143820 - DNA, 25 bp, Artificial
  probe
  misc_feature (1)..(25): SEQ ID NO: 6882; WAN024D53_at; Start 29; Stop 53
cccaagaattggattgcaaagataa

SEQ ID NO: 143821 - DNA, 25 bp, Artificial
  probe
  misc_feature (1)..(25): SEQ ID NO: 6882; WAN024D53_at; Start 61; Stop 85
gataataatggttgccaagatggtc

SEQ ID NO: 143822 - DNA, 25 bp, Artificial
  probe
  misc_feature (1)..(25): SEQ ID NO: 6882; WAN024D53_at; Start 190; Stop 214
ggtcacagtcgtcacacggatcaaa

SEQ ID NO: 143823 - DNA, 25 bp, Artificial
  probe
  misc_feature (1)..(25): SEQ ID NO: 6882; WAN024D53_at; Start 98; Stop 122
tagcggttaaatccataagcgatgg

SEQ ID NO: 143824 - DNA, 25 bp, Artificial
  probe
  misc_feature (1)..(25): SEQ ID NO: 6882; WAN024D53_at; Start 22; Stop 46
gaaatctcccaagaattggattgca

SEQ ID NO: 143825 - DNA, 25 bp, Artificial
  probe
  misc_feature (1)..(25): SEQ ID NO: 6882; WAN024D53_at; Start 142; Stop 166
agctccaaccgcaccggccatagct

SEQ ID NO: 143826 - DNA, 25 bp, Artificial
  probe
  misc_feature (1)..(25): SEQ ID NO: 6882; WAN024D53_at; Start 115; Stop 139
agcgatggctacgttaccgatacca

SEQ ID NO: 143827 - DNA, 25 bp, Artificial
  probe
  misc_feature (1)..(25): SEQ ID NO: 6882; WAN024D53_at; Start 172; Stop 196
cccaacaagggaaatcaaggtcaca

SEQ ID NO: 143828 - DNA, 25 bp, Artificial
  probe
  misc_feature (1)..(25): SEQ ID NO: 6882; WAN024D53_at; Start 196; Stop 220
agtcgtcacacggatcaaatctgga

SEQ ID NO: 143829 - DNA, 25 bp, Artificial
  probe
  misc_feature (1)..(25): SEQ ID NO: 6882; WAN024D53_at; Start 180; Stop 204
gggaaatcaaggtcacagtcgtcac

SEQ ID NO: 143830 - DNA, 25 bp, Artificial
  probe
  misc_feature (1)..(25): SEQ ID NO: 6882; WAN024D53_at; Start 207; Stop 231
ggatcaaatctggaagaccttctga

SEQ ID NO: 143831 - DNA, 25 bp, Artificial
  probe
  misc_feature (1)..(25): SEQ ID NO: 6882; WAN024D53_at; Start 104; Stop 128
ttaaatccataagcgatggctacgt

SEQ ID NO: 143832 - DNA, 25 bp, Artificial
  probe
  misc_feature (1)..(25): SEQ ID NO: 6882; WAN024D53_at; Start 10; Stop 34
tttcttagtcaagaaatctcccaag

SEQ ID NO: 143833 - DNA, 25 bp, Artificial
  probe
  misc_feature (1)..(25): SEQ ID NO: 6882; WAN024D53_at; Start 84; Stop 108
tcacatcgtgattgtagcggttaaa

SEQ ID NO: 143834 - DNA, 25 bp, Artificial
  probe
  misc_feature (1)..(25): SEQ ID NO: 6882; WAN024D53_at; Start 38; Stop 62
tggattgcaaagataatcaaaatga

SEQ ID NO: 143835 - DNA, 25 bp, Artificial
  probe
  misc_feature (1)..(25): SEQ ID NO: 6882; WAN024D53_at; Start 186; Stop 210
tcaaggtcacagtcgtcacacggat

SEQ ID NO: 143836 - DNA, 25 bp, Artificial
  probe
  misc_feature (1)..(25): SEQ ID NO: 6882; WAN024D53_at; Start 204; Stop 228
cacggatcaaatctggaagaccttc

SEQ ID NO: 143837 - DNA, 25 bp, Artificial
  probe
  misc_feature (1)..(25): SEQ ID NO: 6882; WAN024D53_at; Start 94; Stop 118
attgtagcggttaaatccataagcg

SEQ ID NO: 143838 - DNA, 25 bp, Artificial
  probe
  misc_feature (1)..(25): SEQ ID NO: 6882; WAN024D53_at; Start 79; Stop 103
gatggtcacatcgtgattgtagcgg

SEQ ID NO: 143839 - DNA, 25 bp, Artificial
  probe
  misc_feature (1)..(25): SEQ ID NO: 6882; WAN024D53_at; Start 55; Stop 79
caaaatgataataatggttgccaag

SEQ ID NO: 143840 - DNA, 25 bp, Artificial
  probe
  misc_feature (1)..(25): SEQ ID NO: 6882; WAN024D53_at; Start 15; Stop 39
tagtcaagaaatctcccaagaattg

SEQ ID NO: 143841 - DNA, 25 bp, Artificial
  probe
  misc_feature (1)..(25): SEQ ID NO: 6882; WAN024D53_at; Start 119; Stop 143
atggctacgttaccgataccaccag

SEQ ID NO: 143842 - DNA, 25 bp, Artificial
  probe
  misc_feature (1)..(25): SEQ ID NO: 6882; WAN024D53_at; Start 69; Stop 93
tggttgccaagatggtcacatcgtg

SEQ ID NO: 143843 - DNA, 25 bp, Artificial
  probe
  misc_feature (1)..(25): SEQ ID NO: 2228; WAN024D54_at; Start 243; Stop 267
ctttatcatcctcttggcaatcttg

SEQ ID NO: 143844 - DNA, 25 bp, Artificial
  probe
  misc_feature (1)..(25): SEQ ID NO: 2228; WAN024D54_at; Start 582; Stop 606
taaccgctacaatcacgatgtgacc

SEQ ID NO: 143845 - DNA, 25 bp, Artificial
  probe
  misc_feature (1)..(25): SEQ ID NO: 2228; WAN024D54_at; Start 407; Stop 431
cggctcaagcgagcggagcgacttt

SEQ ID NO: 143846 - DNA, 25 bp, Artificial
  probe
  misc_feature (1)..(25): SEQ ID NO: 2228; WAN024D54_at; Start 174; Stop 198
tggtgtcttggagaataaagtcgta

SEQ ID NO: 143847 - DNA, 25 bp, Artificial
  probe
  misc_feature (1)..(25): SEQ ID NO: 2228; WAN024D54_at; Start 479; Stop 503
tccgtgtgacgactgtgaccttgat

SEQ ID NO: 143848 - DNA, 25 bp, Artificial
  probe
  misc_feature (1)..(25): SEQ ID NO: 2228; WAN024D54_at; Start 595; Stop 619
cacgatgtgaccatcttggcaacca

SEQ ID NO: 143849 - DNA, 25 bp, Artificial
  probe
  misc_feature (1)..(25): SEQ ID NO: 2228; WAN024D54_at; Start 229; Stop 253
tttcgtgcggttccctttatcatcc

SEQ ID NO: 143850 - DNA, 25 bp, Artificial
  probe
  misc_feature (1)..(25): SEQ ID NO: 2228; WAN024D54_at; Start 200; Stop 224
tctggattttagacaaaattacctc

SEQ ID NO: 143851 - DNA, 25 bp, Artificial
  probe
  misc_feature (1)..(25): SEQ ID NO: 2228; WAN024D54_at; Start 492; Stop 516
tgtgaccttgatttcccttgttggg

SEQ ID NO: 143852 - DNA, 25 bp, Artificial
  probe
  misc_feature (1)..(25): SEQ ID NO: 2228; WAN024D54_at; Start 309; Stop 333
aaatgcagcccttgtcccactttct

SEQ ID NO: 143853 - DNA, 25 bp, Artificial
  probe
  misc_feature (1)..(25): SEQ ID NO: 2228; WAN024D54_at; Start 189; Stop 213
taaagtcgtattctggattttagac

SEQ ID NO: 143854 - DNA, 25 bp, Artificial
  probe
  misc_feature (1)..(25): SEQ ID NO: 2228; WAN024D54_at; Start 258; Stop 282
ggcaatcttgtcaccactttctcac

SEQ ID NO: 143855 - DNA, 25 bp, Artificial
  probe
  misc_feature (1)..(25): SEQ ID NO: 2228; WAN024D54_at; Start 338; Stop 362
cagtctttgccttctttgcccgtca

SEQ ID NO: 143856 - DNA, 25 bp, Artificial
  probe
  misc_feature (1)..(25): SEQ ID NO: 2228; WAN024D54_at; Start 133; Stop 157
gggctagtggcaggtctctttctcg

SEQ ID NO: 143857 - DNA, 25 bp, Artificial
  probe
  misc_feature (1)..(25): SEQ ID NO: 2228; WAN024D54_at; Start 324; Stop 348
cccactttcttttgcagtctttgcc

SEQ ID NO: 143858 - DNA, 25 bp, Artificial
  probe
  misc_feature (1)..(25): SEQ ID NO: 2228; WAN024D54_at; Start 110; Stop 134
ccttcattatcggaggcttcttggg

SEQ ID NO: 143859 - DNA, 25 bp, Artificial
  probe
  misc_feature (1)..(25): SEQ ID NO: 2228; WAN024D54_at; Start 142; Stop 166
gcaggtctctttctcgtcttgacag

SEQ ID NO: 143860 - DNA, 25 bp, Artificial
  probe
  misc_feature (1)..(25): SEQ ID NO: 2228; WAN024D54_at; Start 431; Stop 455
tctgggacatcgtgggtgtttacct

SEQ ID NO: 143861 - DNA, 25 bp, Artificial
  probe
  misc_feature (1)..(25): SEQ ID NO: 2228; WAN024D54_at; Start 567; Stop 591
catcgcttatggatttaaccgctac

SEQ ID NO: 143862 - DNA, 25 bp, Artificial
  probe
  misc_feature (1)..(25): SEQ ID NO: 2228; WAN024D54_at; Start 12; Stop 36
gattcaaacctatttaccaaatgtc

SEQ ID NO: 143863 - DNA, 25 bp, Artificial
  probe
  misc_feature (1)..(25): SEQ ID NO: 2228; WAN024D54_at; Start 443; Stop 467
tgggtgtttacctatcagaaggtct

SEQ ID NO: 143864 - DNA, 25 bp, Artificial
  probe
  misc_feature (1)..(25): SEQ ID NO: 2228; WAN024D54_at; Start 516; Stop 540
ggaaacagctatggccggtgcggtt

SEQ ID NO: 143865 - DNA, 25 bp, Artificial
  probe
  misc_feature (1)..(25): SEQ ID NO: 2228; WAN024D54_at; Start 417; Stop 441
gagcggagcgactttctgggacatc

SEQ ID NO: 143866 - DNA, 25 bp, Artificial
  probe
  misc_feature (1)..(25): SEQ ID NO: 2228; WAN024D54_at; Start 152; Stop 176
ttctcgtcttgacagcgccaggtgg

SEQ ID NO: 143867 - DNA, 25 bp, Artificial
  probe
  misc_feature (1)..(25): SEQ ID NO: 2228; WAN024D54_at; Start 551; Stop 575
gtatcggtaacgtagccatcgctta

SEQ ID NO: 143868 - DNA, 25 bp, Artificial
  probe
  misc_feature (1)..(25): SEQ ID NO: 2228; WAN024D54_at; Start 458; Stop 482
cagaaggtcttccagatttgatccg

SEQ ID NO: 143869 - DNA, 25 bp, Artificial
  probe
  misc_feature (1)..(25): SEQ ID NO: 2228; WAN024D54_at; Start 545; Stop 569
ctggtggtatcggtaacgtagccat

SEQ ID NO: 143870 - DNA, 25 bp, Artificial
  probe
  misc_feature (1)..(25): SEQ ID NO: 2228; WAN024D54_at; Start 167; Stop 191
cgccaggtggtgtcttggagaataa

SEQ ID NO: 143871 - DNA, 25 bp, Artificial
  probe
  misc_feature (1)..(25): SEQ ID NO: 2228; WAN024D54_at; Start 296; Stop 320
caagtatcgggccaaatgcagccct

SEQ ID NO: 143872 - DNA, 25 bp, Artificial
  probe
  misc_feature (1)..(25): SEQ ID NO: 2228; WAN024D54_at; Start 350; Stop 374
tctttgcccgtcaggtgcaggttgt

SEQ ID NO: 143873 - DNA, 25 bp, Artificial
  probe
  misc_feature (1)..(25): SEQ ID NO: 2228; WAN024D54_at; Start 213; Stop 237
caaaattacctcaatttttcgtgcg

SEQ ID NO: 143874 - DNA, 25 bp, Artificial
  probe
  misc_feature (1)..(25): SEQ ID NO: 2228; WAN024D54_at; Start 99; Stop 123
gacagttctttccttcattatcgga

SEQ ID NO: 143875 - DNA, 25 bp, Artificial
  probe
  misc_feature (1)..(25): SEQ ID NO: 2228; WAN024D54_at; Start 360; Stop 384
tcaggtgcaggttgtcttggctgaa

SEQ ID NO: 143876 - DNA, 25 bp, Artificial
  probe
  misc_feature (1)..(25): SEQ ID NO: 2228; WAN024D54_at; Start 468; Stop 492
tccagatttgatccgtgtgacgact

SEQ ID NO: 143877 - DNA, 25 bp, Artificial
  probe
  misc_feature (1)..(25): SEQ ID NO: 3069; WAN024D55_at; Start 47; Stop 71
taaaagagaatgtcaagaaaaatga

SEQ ID NO: 143878 - DNA, 25 bp, Artificial
  probe
  misc_feature (1)..(25): SEQ ID NO: 3069; WAN024D55_at; Start 44; Stop 68
ttataaaagagaatgtcaagaaaaa

SEQ ID NO: 143879 - DNA, 25 bp, Artificial
  probe
  misc_feature (1)..(25): SEQ ID NO: 3069; WAN024D55_at; Start 50; Stop 74
aagagaatgtcaagaaaaatgattg

SEQ ID NO: 143880 - DNA, 25 bp, Artificial
  probe
  misc_feature (1)..(25): SEQ ID NO: 3069; WAN024D55_at; Start 38; Stop 62
tactccttataaaagagaatgtcaa

SEQ ID NO: 143881 - DNA, 25 bp, Artificial
  probe
  misc_feature (1)..(25): SEQ ID NO: 3069; WAN024D55_at; Start 66; Stop 90
aaatgattgcgcacgcaactttttt

SEQ ID NO: 143882 - DNA, 25 bp, Artificial
  probe
  misc_feature (1)..(25): SEQ ID NO: 3069; WAN024D55_at; Start 45; Stop 69
tataaaagagaatgtcaagaaaaat

SEQ ID NO: 143883 - DNA, 25 bp, Artificial
  probe
  misc_feature (1)..(25): SEQ ID NO: 3069; WAN024D55_at; Start 58; Stop 82
gtcaagaaaaatgattgcgcacgca

SEQ ID NO: 143884 - DNA, 25 bp, Artificial
  probe
  misc_feature (1)..(25): SEQ ID NO: 3069; WAN024D55_at; Start 36; Stop 60
tttactccttataaaagagaatgtc

SEQ ID NO: 143885 - DNA, 25 bp, Artificial
  probe
  misc_feature (1)..(25): SEQ ID NO: 3069; WAN024D55_at; Start 24; Stop 48
tgctaactttattttactccttata

SEQ ID NO: 143886 - DNA, 25 bp, Artificial
  probe
  misc_feature (1)..(25): SEQ ID NO: 3069; WAN024D55_at; Start 63; Stop 87
gaaaaatgattgcgcacgcaacttt

SEQ ID NO: 143887 - DNA, 25 bp, Artificial
  probe
  misc_feature (1)..(25): SEQ ID NO: 3069; WAN024D55_at; Start 54; Stop 78
gaatgtcaagaaaaatgattgcgca

SEQ ID NO: 143888 - DNA, 25 bp, Artificial
  probe
  misc_feature (1)..(25): SEQ ID NO: 3069; WAN024D55_at; Start 11; Stop 35
ctcctttgtttaatgctaactttat

SEQ ID NO: 143889 - DNA, 25 bp, Artificial
  probe
  misc_feature (1)..(25): SEQ ID NO: 3069; WAN024D55_at; Start 41; Stop 65
tccttataaaagagaatgtcaagaa

SEQ ID NO: 143890 - DNA, 25 bp, Artificial
  probe
  misc_feature (1)..(25): SEQ ID NO: 3069; WAN024D55_at; Start 40; Stop 64
ctccttataaaagagaatgtcaaga

SEQ ID NO: 143891 - DNA, 25 bp, Artificial
  probe
  misc_feature (1)..(25): SEQ ID NO: 3069; WAN024D55_at; Start 67; Stop 91
aatgattgcgcacgcaacttttttt

SEQ ID NO: 143892 - DNA, 25 bp, Artificial
  probe
  misc_feature (1)..(25): SEQ ID NO: 3069; WAN024D55_at; Start 42; Stop 66
ccttataaaagagaatgtcaagaaa

SEQ ID NO: 143893 - DNA, 25 bp, Artificial
  probe
  misc_feature (1)..(25): SEQ ID NO: 3069; WAN024D55_at; Start 43; Stop 67
cttataaaagagaatgtcaagaaaa

SEQ ID NO: 143894 - DNA, 25 bp, Artificial
  probe
  misc_feature (1)..(25): SEQ ID NO: 3069; WAN024D55_at; Start 48; Stop 72
aaaagagaatgtcaagaaaaatgat

SEQ ID NO: 143895 - DNA, 25 bp, Artificial
  probe
  misc_feature (1)..(25): SEQ ID NO: 3069; WAN024D55_at; Start 61; Stop 85
aagaaaaatgattgcgcacgcaact

SEQ ID NO: 143896 - DNA, 25 bp, Artificial
  probe
  misc_feature (1)..(25): SEQ ID NO: 3069; WAN024D55_at; Start 56; Stop 80
atgtcaagaaaaatgattgcgcacg

SEQ ID NO: 143897 - DNA, 25 bp, Artificial
  probe
  misc_feature (1)..(25): SEQ ID NO: 3069; WAN024D55_at; Start 37; Stop 61
ttactccttataaaagagaatgtca

SEQ ID NO: 143898 - DNA, 25 bp, Artificial
  probe
  misc_feature (1)..(25): SEQ ID NO: 3069; WAN024D55_at; Start 62; Stop 86
agaaaaatgattgcgcacgcaactt

SEQ ID NO: 143899 - DNA, 25 bp, Artificial
  probe
  misc_feature (1)..(25): SEQ ID NO: 3069; WAN024D55_at; Start 55; Stop 79
aatgtcaagaaaaatgattgcgcac

SEQ ID NO: 143900 - DNA, 25 bp, Artificial
  probe
  misc_feature (1)..(25): SEQ ID NO: 3069; WAN024D55_at; Start 39; Stop 63
actccttataaaagagaatgtcaag

SEQ ID NO: 143901 - DNA, 25 bp, Artificial
  probe
  misc_feature (1)..(25): SEQ ID NO: 3069; WAN024D55_at; Start 57; Stop 81
tgtcaagaaaaatgattgcgcacgc

SEQ ID NO: 143902 - DNA, 25 bp, Artificial
  probe
  misc_feature (1)..(25): SEQ ID NO: 3069; WAN024D55_at; Start 52; Stop 76
gagaatgtcaagaaaaatgattgcg

SEQ ID NO: 143903 - DNA, 25 bp, Artificial
  probe
  misc_feature (1)..(25): SEQ ID NO: 3069; WAN024D55_at; Start 53; Stop 77
agaatgtcaagaaaaatgattgcgc

SEQ ID NO: 143904 - DNA, 25 bp, Artificial
  probe
  misc_feature (1)..(25): SEQ ID NO: 3069; WAN024D55_at; Start 59; Stop 83
tcaagaaaaatgattgcgcacgcaa

SEQ ID NO: 143905 - DNA, 25 bp, Artificial
  probe
  misc_feature (1)..(25): SEQ ID NO: 3069; WAN024D55_at; Start 46; Stop 70
ataaaagagaatgtcaagaaaaatg

SEQ ID NO: 143906 - DNA, 25 bp, Artificial
  probe
  misc_feature (1)..(25): SEQ ID NO: 3069; WAN024D55_at; Start 60; Stop 84
caagaaaaatgattgcgcacgcaac

SEQ ID NO: 143907 - DNA, 25 bp, Artificial
  probe
  misc_feature (1)..(25): SEQ ID NO: 3069; WAN024D55_at; Start 70; Stop 94
gattgcgcacgcaacttttttttaa

SEQ ID NO: 143908 - DNA, 25 bp, Artificial
  probe
  misc_feature (1)..(25): SEQ ID NO: 3069; WAN024D55_at; Start 49; Stop 73
aaagagaatgtcaagaaaaatgatt

SEQ ID NO: 143909 - DNA, 25 bp, Artificial
  probe
  misc_feature (1)..(25): SEQ ID NO: 3069; WAN024D55_at; Start 65; Stop 89
aaaatgattgcgcacgcaacttttt

SEQ ID NO: 143910 - DNA, 25 bp, Artificial
  probe
  misc_feature (1)..(25): SEQ ID NO: 3069; WAN024D55_at; Start 51; Stop 75
agagaatgtcaagaaaaatgattgc

SEQ ID NO: 143911 - DNA, 25 bp, Artificial
  probe
  misc_feature (1)..(25): SEQ ID NO: 5368; WAN024D56_at; Start 268; Stop 292
tatctcatgaaacaagatttaagcc

SEQ ID NO: 143912 - DNA, 25 bp, Artificial
  probe
  misc_feature (1)..(25): SEQ ID NO: 5368; WAN024D56_at; Start 163; Stop 187
caacaagcttgccttatcggcgtcg

SEQ ID NO: 143913 - DNA, 25 bp, Artificial
  probe
  misc_feature (1)..(25): SEQ ID NO: 5368; WAN024D56_at; Start 235; Stop 259
gactaccatgggacttatggagata

SEQ ID NO: 143914 - DNA, 25 bp, Artificial
  probe
  misc_feature (1)..(25): SEQ ID NO: 5368; WAN024D56_at; Start 145; Stop 169
gaagactttgaacgttcgcaacaag

SEQ ID NO: 143915 - DNA, 25 bp, Artificial
  probe
  misc_feature (1)..(25): SEQ ID NO: 5368; WAN024D56_at; Start 226; Stop 250
cataatttggactaccatgggactt

SEQ ID NO: 143916 - DNA, 25 bp, Artificial
  probe
  misc_feature (1)..(25): SEQ ID NO: 5368; WAN024D56_at; Start 122; Stop 146
gaactgtgactttcgagtcttatga

SEQ ID NO: 143917 - DNA, 25 bp, Artificial
  probe
  misc_feature (1)..(25): SEQ ID NO: 5368; WAN024D56_at; Start 7; Stop 31
gcgcaatcatttttcttgacattct

SEQ ID NO: 143918 - DNA, 25 bp, Artificial
  probe
  misc_feature (1)..(25): SEQ ID NO: 5368; WAN024D56_at; Start 126; Stop 150
tgtgactttcgagtcttatgaagac

SEQ ID NO: 143919 - DNA, 25 bp, Artificial
  probe
  misc_feature (1)..(25): SEQ ID NO: 5368; WAN024D56_at; Start 36; Stop 60
tataaggagtaaaataaagttagca

SEQ ID NO: 143920 - DNA, 25 bp, Artificial
  probe
  misc_feature (1)..(25): SEQ ID NO: 5368; WAN024D56_at; Start 154; Stop 178
gaacgttcgcaacaagcttgcctta

SEQ ID NO: 143921 - DNA, 25 bp, Artificial
  probe
  misc_feature (1)..(25): SEQ ID NO: 5368; WAN024D56_at; Start 110; Stop 134
gcaagaacgaaagaactgtgacttt

SEQ ID NO: 143922 - DNA, 25 bp, Artificial
  probe
  misc_feature (1)..(25): SEQ ID NO: 5368; WAN024D56_at; Start 84; Stop 108
gattgaaattacctatatagatgcc

SEQ ID NO: 143923 - DNA, 25 bp, Artificial
  probe
  misc_feature (1)..(25): SEQ ID NO: 5368; WAN024D56_at; Start 167; Stop 191
aagcttgccttatcggcgtcgcaga

SEQ ID NO: 143924 - DNA, 25 bp, Artificial
  probe
  misc_feature (1)..(25): SEQ ID NO: 5368; WAN024D56_at; Start 105; Stop 129
tgccagcaagaacgaaagaactgtg

SEQ ID NO: 143925 - DNA, 25 bp, Artificial
  probe
  misc_feature (1)..(25): SEQ ID NO: 5368; WAN024D56_at; Start 93; Stop 117
tacctatatagatgccagcaagaac

SEQ ID NO: 143926 - DNA, 25 bp, Artificial
  probe
  misc_feature (1)..(25): SEQ ID NO: 5368; WAN024D56_at; Start 240; Stop 264
ccatgggacttatggagatatcttc

SEQ ID NO: 143927 - DNA, 25 bp, Artificial
  probe
  misc_feature (1)..(25): SEQ ID NO: 5368; WAN024D56_at; Start 2; Stop 26
tgcgtgcgcaatcatttttcttgac

SEQ ID NO: 143928 - DNA, 25 bp, Artificial
  probe
  misc_feature (1)..(25): SEQ ID NO: 5368; WAN024D56_at; Start 158; Stop 182
gttcgcaacaagcttgccttatcgg

SEQ ID NO: 143929 - DNA, 25 bp, Artificial
  probe
  misc_feature (1)..(25): SEQ ID NO: 5368; WAN024D56_at; Start 253; Stop 277
ggagatatcttcttctatctcatga

SEQ ID NO: 143930 - DNA, 25 bp, Artificial
  probe
  misc_feature (1)..(25): SEQ ID NO: 5368; WAN024D56_at; Start 24; Stop 48
gacattctcttttataaggagtaaa

SEQ ID NO: 143931 - DNA, 25 bp, Artificial
  probe
  misc_feature (1)..(25): SEQ ID NO: 5368; WAN024D56_at; Start 188; Stop 212
cagactactaccctgtccaaaaatt

SEQ ID NO: 143932 - DNA, 25 bp, Artificial
  probe
  misc_feature (1)..(25): SEQ ID NO: 5368; WAN024D56_at; Start 179; Stop 203
tcggcgtcgcagactactaccctgt

SEQ ID NO: 143933 - DNA, 25 bp, Artificial
  probe
  misc_feature (1)..(25): SEQ ID NO: 5368; WAN024D56_at; Start 139; Stop 163
tcttatgaagactttgaacgttcgc

SEQ ID NO: 143934 - DNA, 25 bp, Artificial
  probe
  misc_feature (1)..(25): SEQ ID NO: 5368; WAN024D56_at; Start 283; Stop 307
gatttaagccaatataactaactaa

SEQ ID NO: 143935 - DNA, 25 bp, Artificial
  probe
  misc_feature (1)..(25): SEQ ID NO: 5368; WAN024D56_at; Start 49; Stop 73
ataaagttagcattaaacaaaggag

SEQ ID NO: 143936 - DNA, 25 bp, Artificial
  probe
  misc_feature (1)..(25): SEQ ID NO: 5368; WAN024D56_at; Start 184; Stop 208
gtcgcagactactaccctgtccaaa

SEQ ID NO: 143937 - DNA, 25 bp, Artificial
  probe
  misc_feature (1)..(25): SEQ ID NO: 5368; WAN024D56_at; Start 245; Stop 269
ggacttatggagatatcttcttcta

SEQ ID NO: 143938 - DNA, 25 bp, Artificial
  probe
  misc_feature (1)..(25): SEQ ID NO: 5368; WAN024D56_at; Start 151; Stop 175
tttgaacgttcgcaacaagcttgcc

SEQ ID NO: 143939 - DNA, 25 bp, Artificial
  probe
  misc_feature (1)..(25): SEQ ID NO: 5368; WAN024D56_at; Start 173; Stop 197
gccttatcggcgtcgcagactacta

SEQ ID NO: 143940 - DNA, 25 bp, Artificial
  probe
  misc_feature (1)..(25): SEQ ID NO: 5368; WAN024D56_at; Start 231; Stop 255
tttggactaccatgggacttatgga

SEQ ID NO: 143941 - DNA, 25 bp, Artificial
  probe
  misc_feature (1)..(25): SEQ ID NO: 5368; WAN024D56_at; Start 20; Stop 44
tcttgacattctcttttataaggag

SEQ ID NO: 143942 - DNA, 25 bp, Artificial
  probe
  misc_feature (1)..(25): SEQ ID NO: 5368; WAN024D56_at; Start 88; Stop 112
gaaattacctatatagatgccagca

SEQ ID NO: 143943 - DNA, 25 bp, Artificial
  probe
  misc_feature (1)..(25): SEQ ID NO: 5368; WAN024D56_at; Start 276; Stop 300
gaaacaagatttaagccaatataac

SEQ ID NO: 143944 - DNA, 25 bp, Artificial
  probe
  misc_feature (1)..(25): SEQ ID NO: 5368; WAN024D56_at; Start 101; Stop 125
tagatgccagcaagaacgaaagaac

SEQ ID NO: 143945 - DNA, 25 bp, Artificial
  probe
  misc_feature (1)..(25): SEQ ID NO: 2034; WAN024D57_at; Start 367; Stop 391
tttatctgcctgacaaatgatgggc

SEQ ID NO: 143946 - DNA, 25 bp, Artificial
  probe
  misc_feature (1)..(25): SEQ ID NO: 2034; WAN024D57_at; Start 100; Stop 124
tggtttgacttcaatcggcgtcaga

SEQ ID NO: 143947 - DNA, 25 bp, Artificial
  probe
  misc_feature (1)..(25): SEQ ID NO: 2034; WAN024D57_at; Start 157; Stop 181
gcccaacagagcgagcaaagtctga

SEQ ID NO: 143948 - DNA, 25 bp, Artificial
  probe
  misc_feature (1)..(25): SEQ ID NO: 2034; WAN024D57_at; Start 269; Stop 293
tgagcccgagcgcagtttctaggat

SEQ ID NO: 143949 - DNA, 25 bp, Artificial
  probe
  misc_feature (1)..(25): SEQ ID NO: 2034; WAN024D57_at; Start 201; Stop 225
gctctactatctggacttggctgaa

SEQ ID NO: 143950 - DNA, 25 bp, Artificial
  probe
  misc_feature (1)..(25): SEQ ID NO: 2034; WAN024D57_at; Start 12; Stop 36
tcttgtgacgcagagactgcccgtt

SEQ ID NO: 143951 - DNA, 25 bp, Artificial
  probe
  misc_feature (1)..(25): SEQ ID NO: 2034; WAN024D57_at; Start 216; Stop 240
cttggctgaagaaaaatctctacgc

SEQ ID NO: 143952 - DNA, 25 bp, Artificial
  probe
  misc_feature (1)..(25): SEQ ID NO: 2034; WAN024D57_at; Start 380; Stop 404
caaatgatgggcaaaagacactggc

SEQ ID NO: 143953 - DNA, 25 bp, Artificial
  probe
  misc_feature (1)..(25): SEQ ID NO: 2034; WAN024D57_at; Start 144; Stop 168
ggaagagaccattgcccaacagagc

SEQ ID NO: 143954 - DNA, 25 bp, Artificial
  probe
  misc_feature (1)..(25): SEQ ID NO: 2034; WAN024D57_at; Start 356; Stop 380
gacgctctagttttatctgcctgac

SEQ ID NO: 143955 - DNA, 25 bp, Artificial
  probe
  misc_feature (1)..(25): SEQ ID NO: 2034; WAN024D57_at; Start 232; Stop 256
tctctacgccagattgacctgccag

SEQ ID NO: 143956 - DNA, 25 bp, Artificial
  probe
  misc_feature (1)..(25): SEQ ID NO: 2034; WAN024D57_at; Start 393; Stop 417
aaagacactggcctcgctacaaaag

SEQ ID NO: 143957 - DNA, 25 bp, Artificial
  probe
  misc_feature (1)..(25): SEQ ID NO: 2034; WAN024D57_at; Start 40; Stop 64
ggactttcttctatttatgactcta

SEQ ID NO: 143958 - DNA, 25 bp, Artificial
  probe
  misc_feature (1)..(25): SEQ ID NO: 2034; WAN024D57_at; Start 410; Stop 434
tacaaaagactgtcgaagaaagctt

SEQ ID NO: 143959 - DNA, 25 bp, Artificial
  probe
  misc_feature (1)..(25): SEQ ID NO: 2034; WAN024D57_at; Start 26; Stop 50
gactgcccgttaatggactttcttc

SEQ ID NO: 143960 - DNA, 25 bp, Artificial
  probe
  misc_feature (1)..(25): SEQ ID NO: 2034; WAN024D57_at; Start 73; Stop 97
ggagacactatgacctatttggaaa

SEQ ID NO: 143961 - DNA, 25 bp, Artificial
  probe
  misc_feature (1)..(25): SEQ ID NO: 2034; WAN024D57_at; Start 279; Stop 303
cgcagtttctaggatggtggctcgc

SEQ ID NO: 143962 - DNA, 25 bp, Artificial
  probe
  misc_feature (1)..(25): SEQ ID NO: 2034; WAN024D57_at; Start 114; Stop 138
tcggcgtcagaaagaaattgaaagt

SEQ ID NO: 143963 - DNA, 25 bp, Artificial
  probe
  misc_feature (1)..(25): SEQ ID NO: 2034; WAN024D57_at; Start 401; Stop 425
tggcctcgctacaaaagactgtcga

SEQ ID NO: 143964 - DNA, 25 bp, Artificial
  probe
  misc_feature (1)..(25): SEQ ID NO: 2034; WAN024D57_at; Start 3; Stop 27
gcgcaatcatcttgtgacgcagaga

SEQ ID NO: 143965 - DNA, 25 bp, Artificial
  probe
  misc_feature (1)..(25): SEQ ID NO: 2034; WAN024D57_at; Start 94; Stop 118
gaaaaatggtttgacttcaatcggc

SEQ ID NO: 143966 - DNA, 25 bp, Artificial
  probe
  misc_feature (1)..(25): SEQ ID NO: 2034; WAN024D57_at; Start 165; Stop 189
gagcgagcaaagtctgaccttgaaa

SEQ ID NO: 143967 - DNA, 25 bp, Artificial
  probe
  misc_feature (1)..(25): SEQ ID NO: 2034; WAN024D57_at; Start 179; Stop 203
tgaccttgaaagagttctacctgct

SEQ ID NO: 143968 - DNA, 25 bp, Artificial
  probe
  misc_feature (1)..(25): SEQ ID NO: 2034; WAN024D57_at; Start 243; Stop 267
gattgacctgccagataagcttcat

SEQ ID NO: 143969 - DNA, 25 bp, Artificial
  probe
  misc_feature (1)..(25): SEQ ID NO: 2034; WAN024D57_at; Start 293; Stop 317
tggtggctcgcttggaagctaaaaa

SEQ ID NO: 143970 - DNA, 25 bp, Artificial
  probe
  misc_feature (1)..(25): SEQ ID NO: 2034; WAN024D57_at; Start 190; Stop 214
gagttctacctgctctactatctgg

SEQ ID NO: 143971 - DNA, 25 bp, Artificial
  probe
  misc_feature (1)..(25): SEQ ID NO: 2034; WAN024D57_at; Start 300; Stop 324
tcgcttggaagctaaaaattgcggt

SEQ ID NO: 143972 - DNA, 25 bp, Artificial
  probe
  misc_feature (1)..(25): SEQ ID NO: 2034; WAN024D57_at; Start 57; Stop 81
tgactctaaaaagaaaggagacact

SEQ ID NO: 143973 - DNA, 25 bp, Artificial
  probe
  misc_feature (1)..(25): SEQ ID NO: 2034; WAN024D57_at; Start 256; Stop 280
gataagcttcatctgagcccgagcg

SEQ ID NO: 143974 - DNA, 25 bp, Artificial
  probe
  misc_feature (1)..(25): SEQ ID NO: 2034; WAN024D57_at; Start 341; Stop 365
gttgccatcaagatagacgctctag

SEQ ID NO: 143975 - DNA, 25 bp, Artificial
  probe
  misc_feature (1)..(25): SEQ ID NO: 2034; WAN024D57_at; Start 326; Stop 350
tactcagtcgcatgtgttgccatca

SEQ ID NO: 143976 - DNA, 25 bp, Artificial
  probe
  misc_feature (1)..(25): SEQ ID NO: 2034; WAN024D57_at; Start 127; Stop 151
gaaattgaaagtctcttggaagaga

SEQ ID NO: 143977 - DNA, 25 bp, Artificial
  probe
  misc_feature (1)..(25): SEQ ID NO: 2034; WAN024D57_at; Start 439; Stop 463
gcaggtttggatttcttgatttaac

SEQ ID NO: 143978 - DNA, 25 bp, Artificial
  probe
  misc_feature (1)..(25): SEQ ID NO: 2034; WAN024D57_at; Start 336; Stop 360
catgtgttgccatcaagatagacgc

SEQ ID NO: 143979 - DNA, 25 bp, Artificial
  probe
  misc_feature (1)..(25): SEQ ID NO: 5618; WAN024D58_at; Start 526; Stop 550
ccaaggcttagcagttcctttccta

SEQ ID NO: 143980 - DNA, 25 bp, Artificial
  probe
  misc_feature (1)..(25): SEQ ID NO: 5618; WAN024D58_at; Start 217; Stop 241
ttgcacatcaaaacaagccttccga

SEQ ID NO: 143981 - DNA, 25 bp, Artificial
  probe
  misc_feature (1)..(25): SEQ ID NO: 5618; WAN024D58_at; Start 277; Stop 301
atttccgacaaaacttcccctcatg

SEQ ID NO: 143982 - DNA, 25 bp, Artificial
  probe
  misc_feature (1)..(25): SEQ ID NO: 5618; WAN024D58_at; Start 115; Stop 139
tacagctgtatcaggcgatttttcc

SEQ ID NO: 143983 - DNA, 25 bp, Artificial
  probe
  misc_feature (1)..(25): SEQ ID NO: 5618; WAN024D58_at; Start 87; Stop 111
accacttttgattgccttcatggcg

SEQ ID NO: 143984 - DNA, 25 bp, Artificial
  probe
  misc_feature (1)..(25): SEQ ID NO: 5618; WAN024D58_at; Start 76; Stop 100
caagacggcataccacttttgattg

SEQ ID NO: 143985 - DNA, 25 bp, Artificial
  probe
  misc_feature (1)..(25): SEQ ID NO: 5618; WAN024D58_at; Start 235; Stop 259
cttccgaatctggtaaagaatctcc

SEQ ID NO: 143986 - DNA, 25 bp, Artificial
  probe
  misc_feature (1)..(25): SEQ ID NO: 5618; WAN024D58_at; Start 391; Stop 415
gacaaagtcaccttgcaaaatctgg

SEQ ID NO: 143987 - DNA, 25 bp, Artificial
  probe
  misc_feature (1)..(25): SEQ ID NO: 5618; WAN024D58_at; Start 100; Stop 124
gccttcatggcgcaatacagctgta

SEQ ID NO: 143988 - DNA, 25 bp, Artificial
  probe
  misc_feature (1)..(25): SEQ ID NO: 5618; WAN024D58_at; Start 325; Stop 349
gaggtcaccagtctcttggtcaaag

SEQ ID NO: 143989 - DNA, 25 bp, Artificial
  probe
  misc_feature (1)..(25): SEQ ID NO: 5618; WAN024D58_at; Start 263; Stop 287
caagcctcacggacatttccgacaa

SEQ ID NO: 143990 - DNA, 25 bp, Artificial
  probe
  misc_feature (1)..(25): SEQ ID NO: 5618; WAN024D58_at; Start 184; Stop 208
catgatacgcttagtctgatgacag

SEQ ID NO: 143991 - DNA, 25 bp, Artificial
  probe
  misc_feature (1)..(25): SEQ ID NO: 5618; WAN024D58_at; Start 513; Stop 537
tgaaaactgctacccaaggcttagc

SEQ ID NO: 143992 - DNA, 25 bp, Artificial
  probe
  misc_feature (1)..(25): SEQ ID NO: 5618; WAN024D58_at; Start 43; Stop 67
gcccttttccagcttattccaagag

SEQ ID NO: 143993 - DNA, 25 bp, Artificial
  probe
  misc_feature (1)..(25): SEQ ID NO: 5618; WAN024D58_at; Start 170; Stop 194
tcctgaacttgagtcatgatacgct

SEQ ID NO: 143994 - DNA, 25 bp, Artificial
  probe
  misc_feature (1)..(25): SEQ ID NO: 5618; WAN024D58_at; Start 376; Stop 400
gatggacacagtcatgacaaagtca

SEQ ID NO: 143995 - DNA, 25 bp, Artificial
  probe
  misc_feature (1)..(25): SEQ ID NO: 5618; WAN024D58_at; Start 225; Stop 249
caaaacaagccttccgaatctggta

SEQ ID NO: 143996 - DNA, 25 bp, Artificial
  probe
  misc_feature (1)..(25): SEQ ID NO: 5618; WAN024D58_at; Start 6; Stop 30
catgcttgaggttgactgcttccac

SEQ ID NO: 143997 - DNA, 25 bp, Artificial
  probe
  misc_feature (1)..(25): SEQ ID NO: 5618; WAN024D58_at; Start 19; Stop 43
gactgcttccacttgtccttctctg

SEQ ID NO: 143998 - DNA, 25 bp, Artificial
  probe
  misc_feature (1)..(25): SEQ ID NO: 5618; WAN024D58_at; Start 502; Stop 526
caaacataagttgaaaactgctacc

SEQ ID NO: 143999 - DNA, 25 bp, Artificial
  probe
  misc_feature (1)..(25): SEQ ID NO: 5618; WAN024D58_at; Start 298; Stop 322
catgctttccatataaacgtgagga

SEQ ID NO: 144000 - DNA, 25 bp, Artificial
  probe
  misc_feature (1)..(25): SEQ ID NO: 5618; WAN024D58_at; Start 309; Stop 333
tataaacgtgaggatagaggtcacc

SEQ ID NO: 144001 - DNA, 25 bp, Artificial
  probe
  misc_feature (1)..(25): SEQ ID NO: 5618; WAN024D58_at; Start 151; Stop 175
caactggtttccatacttttcctga

SEQ ID NO: 144002 - DNA, 25 bp, Artificial
  probe
  misc_feature (1)..(25): SEQ ID NO: 5618; WAN024D58_at; Start 250; Stop 274
aagaatctccagacaagcctcacgg

SEQ ID NO: 144003 - DNA, 25 bp, Artificial
  probe
  misc_feature (1)..(25): SEQ ID NO: 5618; WAN024D58_at; Start 198; Stop 222
tctgatgacagataaaatcttgcac

SEQ ID NO: 144004 - DNA, 25 bp, Artificial
  probe
  misc_feature (1)..(25): SEQ ID NO: 5618; WAN024D58_at; Start 464; Stop 488
gccttttccttgattaaattgatag

SEQ ID NO: 144005 - DNA, 25 bp, Artificial
  probe
  misc_feature (1)..(25): SEQ ID NO: 5618; WAN024D58_at; Start 405; Stop 429
gcaaaatctggcaactatatgtcca

SEQ ID NO: 144006 - DNA, 25 bp, Artificial
  probe
  misc_feature (1)..(25): SEQ ID NO: 5618; WAN024D58_at; Start 125; Stop 149
tcaggcgatttttcccacagatact

SEQ ID NO: 144007 - DNA, 25 bp, Artificial
  probe
  misc_feature (1)..(25): SEQ ID NO: 5618; WAN024D58_at; Start 60; Stop 84
tccaagagattttcatcaagacggc

SEQ ID NO: 144008 - DNA, 25 bp, Artificial
  probe
  misc_feature (1)..(25): SEQ ID NO: 5618; WAN024D58_at; Start 443; Stop 467
tctataaaaccataatcatgagcct

SEQ ID NO: 144009 - DNA, 25 bp, Artificial
  probe
  misc_feature (1)..(25): SEQ ID NO: 5618; WAN024D58_at; Start 139; Stop 163
ccacagatactccaactggtttcca

SEQ ID NO: 144010 - DNA, 25 bp, Artificial
  probe
  misc_feature (1)..(25): SEQ ID NO: 5618; WAN024D58_at; Start 67; Stop 91
gattttcatcaagacggcataccac

SEQ ID NO: 144011 - DNA, 25 bp, Artificial
  probe
  misc_feature (1)..(25): SEQ ID NO: 5618; WAN024D58_at; Start 361; Stop 385
cacattatcagcagtgatggacaca

SEQ ID NO: 144012 - DNA, 25 bp, Artificial
  probe
  misc_feature (1)..(25): SEQ ID NO: 5618; WAN024D58_at; Start 452; Stop 476
ccataatcatgagccttttccttga

SEQ ID NO: 144013 - DNA, 25 bp, Artificial
  probe
  misc_feature (1)..(25): SEQ ID NO: 3395; WAN024D59_at; Start 561; Stop 585
gggatttatccagccttccatatga

SEQ ID NO: 144014 - DNA, 25 bp, Artificial
  probe
  misc_feature (1)..(25): SEQ ID NO: 3395; WAN024D59_at; Start 267; Stop 291
gaggcttgtctggagattctttacc

SEQ ID NO: 144015 - DNA, 25 bp, Artificial
  probe
  misc_feature (1)..(25): SEQ ID NO: 3395; WAN024D59_at; Start 138; Stop 162
gactttgtcatgactgtgtccatca

SEQ ID NO: 144016 - DNA, 25 bp, Artificial
  probe
  misc_feature (1)..(25): SEQ ID NO: 3395; WAN024D59_at; Start 244; Stop 268
gaagttttgtcggaaatgtccgtga

SEQ ID NO: 144017 - DNA, 25 bp, Artificial
  probe
  misc_feature (1)..(25): SEQ ID NO: 3395; WAN024D59_at; Start 187; Stop 211
tctttgaccaagagactggtgacct

SEQ ID NO: 144018 - DNA, 25 bp, Artificial
  probe
  misc_feature (1)..(25): SEQ ID NO: 3395; WAN024D59_at; Start 257; Stop 281
aaatgtccgtgaggcttgtctggag

SEQ ID NO: 144019 - DNA, 25 bp, Artificial
  probe
  misc_feature (1)..(25): SEQ ID NO: 3395; WAN024D59_at; Start 5; Stop 29
tagccttgggtagcagttttcactt

SEQ ID NO: 144020 - DNA, 25 bp, Artificial
  probe
  misc_feature (1)..(25): SEQ ID NO: 3395; WAN024D59_at; Start 88; Stop 112
ttatagaaaatagcgaagtctggac

SEQ ID NO: 144021 - DNA, 25 bp, Artificial
  probe
  misc_feature (1)..(25): SEQ ID NO: 3395; WAN024D59_at; Start 453; Stop 477
gccgtcttgatgaaaatctcttgga

SEQ ID NO: 144022 - DNA, 25 bp, Artificial
  probe
  misc_feature (1)..(25): SEQ ID NO: 3395; WAN024D59_at; Start 398; Stop 422
ggaaaaatcgcctgatacagctgta

SEQ ID NO: 144023 - DNA, 25 bp, Artificial
  probe
  misc_feature (1)..(25): SEQ ID NO: 3395; WAN024D59_at; Start 316; Stop 340
tgcaagattttatctgtcatcagac

SEQ ID NO: 144024 - DNA, 25 bp, Artificial
  probe
  misc_feature (1)..(25): SEQ ID NO: 3395; WAN024D59_at; Start 122; Stop 146
ccagattttgcaaggtgactttgtc

SEQ ID NO: 144025 - DNA, 25 bp, Artificial
  probe
  misc_feature (1)..(25): SEQ ID NO: 3395; WAN024D59_at; Start 441; Stop 465
caaaagtggtatgccgtcttgatga

SEQ ID NO: 144026 - DNA, 25 bp, Artificial
  probe
  misc_feature (1)..(25): SEQ ID NO: 3395; WAN024D59_at; Start 521; Stop 545
cctcaagcatgaccaagtagctaat

SEQ ID NO: 144027 - DNA, 25 bp, Artificial
  probe
  misc_feature (1)..(25): SEQ ID NO: 3395; WAN024D59_at; Start 385; Stop 409
tggagtatctgtgggaaaaatcgcc

SEQ ID NO: 144028 - DNA, 25 bp, Artificial
  probe
  misc_feature (1)..(25): SEQ ID NO: 3395; WAN024D59_at; Start 63; Stop 87
caagaaaaggctcatgattatggtt

SEQ ID NO: 144029 - DNA, 25 bp, Artificial
  probe
  misc_feature (1)..(25): SEQ ID NO: 3395; WAN024D59_at; Start 152; Stop 176
tgtgtccatcactgctgataatgtg

SEQ ID NO: 144030 - DNA, 25 bp, Artificial
  probe
  misc_feature (1)..(25): SEQ ID NO: 3395; WAN024D59_at; Start 100; Stop 124
gcgaagtctggacatatagttgcca

SEQ ID NO: 144031 - DNA, 25 bp, Artificial
  probe
  misc_feature (1)..(25): SEQ ID NO: 3395; WAN024D59_at; Start 622; Stop 646
ctttatcagatgaagaagtactgga

SEQ ID NO: 144032 - DNA, 25 bp, Artificial
  probe
  misc_feature (1)..(25): SEQ ID NO: 3395; WAN024D59_at; Start 587; Stop 611
caagcgctactggattagtgtgtcc

SEQ ID NO: 144033 - DNA, 25 bp, Artificial
  probe
  misc_feature (1)..(25): SEQ ID NO: 3395; WAN024D59_at; Start 198; Stop 222
gagactggtgacctctatcctcacg

SEQ ID NO: 144034 - DNA, 25 bp, Artificial
  probe
  misc_feature (1)..(25): SEQ ID NO: 3395; WAN024D59_at; Start 538; Stop 562
tagctaatttgctttcacaaaaggg

SEQ ID NO: 144035 - DNA, 25 bp, Artificial
  probe
  misc_feature (1)..(25): SEQ ID NO: 3395; WAN024D59_at; Start 507; Stop 531
gtggaagcagtcaacctcaagcatg

SEQ ID NO: 144036 - DNA, 25 bp, Artificial
  probe
  misc_feature (1)..(25): SEQ ID NO: 3395; WAN024D59_at; Start 352; Stop 376
tgactcaagttcaggaaaagtatgg

SEQ ID NO: 144037 - DNA, 25 bp, Artificial
  probe
  misc_feature (1)..(25): SEQ ID NO: 3395; WAN024D59_at; Start 336; Stop 360
cagactaagcgtatcatgactcaag

SEQ ID NO: 144038 - DNA, 25 bp, Artificial
  probe
  misc_feature (1)..(25): SEQ ID NO: 3395; WAN024D59_at; Start 51; Stop 75
tatcaatttaatcaagaaaaggctc

SEQ ID NO: 144039 - DNA, 25 bp, Artificial
  probe
  misc_feature (1)..(25): SEQ ID NO: 3395; WAN024D59_at; Start 471; Stop 495
tcttggaataagctggaaaagggca

SEQ ID NO: 144040 - DNA, 25 bp, Artificial
  probe
  misc_feature (1)..(25): SEQ ID NO: 3395; WAN024D59_at; Start 281; Stop 305
gattctttaccagattcggaaggct

SEQ ID NO: 144041 - DNA, 25 bp, Artificial
  probe
  misc_feature (1)..(25): SEQ ID NO: 3395; WAN024D59_at; Start 413; Stop 437
tacagctgtattgcgccatgaaggc

SEQ ID NO: 144042 - DNA, 25 bp, Artificial
  probe
  misc_feature (1)..(25): SEQ ID NO: 3395; WAN024D59_at; Start 426; Stop 450
cgccatgaaggcaatcaaaagtggt

SEQ ID NO: 144043 - DNA, 25 bp, Artificial
  probe
  misc_feature (1)..(25): SEQ ID NO: 3395; WAN024D59_at; Start 296; Stop 320
tcggaaggcttgttttgatgtgcaa

SEQ ID NO: 144044 - DNA, 25 bp, Artificial
  probe
  misc_feature (1)..(25): SEQ ID NO: 3395; WAN024D59_at; Start 494; Stop 518
cagagaaggacaagtggaagcagtc

SEQ ID NO: 144045 - DNA, 25 bp, Artificial
  probe
  misc_feature (1)..(25): SEQ ID NO: 3395; WAN024D59_at; Start 574; Stop 598
ccttccatatgagcaagcgctactg

SEQ ID NO: 144046 - DNA, 25 bp, Artificial
  probe
  misc_feature (1)..(25): SEQ ID NO: 3395; WAN024D59_at; Start 602; Stop 626
tagtgtgtcccttgatgatacttta

SEQ ID NO: 144047 - DNA, 25 bp, Artificial
  probe
  misc_feature (1)..(25): SEQ ID NO: 3370; WAN024D5A_at; Start 184; Stop 208
gctaaaaagttgtcagatcaggaat

SEQ ID NO: 144048 - DNA, 25 bp, Artificial
  probe
  misc_feature (1)..(25): SEQ ID NO: 3370; WAN024D5A_at; Start 86; Stop 110
cccattgtctaggtgtggagcgtgc

SEQ ID NO: 144049 - DNA, 25 bp, Artificial
  probe
  misc_feature (1)..(25): SEQ ID NO: 3370; WAN024D5A_at; Start 190; Stop 214
aagttgtcagatcaggaatttctag

SEQ ID NO: 144050 - DNA, 25 bp, Artificial
  probe
  misc_feature (1)..(25): SEQ ID NO: 3370; WAN024D5A_at; Start 370; Stop 394
caaatgacagacctagataaggtca

SEQ ID NO: 144051 - DNA, 25 bp, Artificial
  probe
  misc_feature (1)..(25): SEQ ID NO: 3370; WAN024D5A_at; Start 504; Stop 528
taccgtggagtatctagctcatcag

SEQ ID NO: 144052 - DNA, 25 bp, Artificial
  probe
  misc_feature (1)..(25): SEQ ID NO: 3370; WAN024D5A_at; Start 401; Stop 425
tcgcagactatatcgagcacaatcg

SEQ ID NO: 144053 - DNA, 25 bp, Artificial
  probe
  misc_feature (1)..(25): SEQ ID NO: 3370; WAN024D5A_at; Start 464; Stop 488
gtctatcgctcaataaggcggtggc

SEQ ID NO: 144054 - DNA, 25 bp, Artificial
  probe
  misc_feature (1)..(25): SEQ ID NO: 3370; WAN024D5A_at; Start 490; Stop 514
tacgaaacagctcgtaccgtggagt

SEQ ID NO: 144055 - DNA, 25 bp, Artificial
  probe
  misc_feature (1)..(25): SEQ ID NO: 3370; WAN024D5A_at; Start 292; Stop 316
tacaaaattcaggaagatttggatt

SEQ ID NO: 144056 - DNA, 25 bp, Artificial
  probe
  misc_feature (1)..(25): SEQ ID NO: 3370; WAN024D5A_at; Start 444; Stop 468
tgtggcgcgtgagattgcaagtcta

SEQ ID NO: 144057 - DNA, 25 bp, Artificial
  probe
  misc_feature (1)..(25): SEQ ID NO: 3370; WAN024D5A_at; Start 460; Stop 484
gcaagtctatcgctcaataaggcgg

SEQ ID NO: 144058 - DNA, 25 bp, Artificial
  probe
  misc_feature (1)..(25): SEQ ID NO: 3370; WAN024D5A_at; Start 41; Stop 65
ccttgttggaaaaaatggcagagct

SEQ ID NO: 144059 - DNA, 25 bp, Artificial
  probe
  misc_feature (1)..(25): SEQ ID NO: 3370; WAN024D5A_at; Start 514; Stop 538
tatctagctcatcagggattcccca

SEQ ID NO: 144060 - DNA, 25 bp, Artificial
  probe
  misc_feature (1)..(25): SEQ ID NO: 3370; WAN024D5A_at; Start 279; Stop 303
tatggtcggaatttacaaaattcag

SEQ ID NO: 144061 - DNA, 25 bp, Artificial
  probe
  misc_feature (1)..(25): SEQ ID NO: 3370; WAN024D5A_at; Start 552; Stop 576
ccttgaaacctataacgcctttgtg

SEQ ID NO: 144062 - DNA, 25 bp, Artificial
  probe
  misc_feature (1)..(25): SEQ ID NO: 3370; WAN024D5A_at; Start 150; Stop 174
gaaagcaagtctagcaggtcttctt

SEQ ID NO: 144063 - DNA, 25 bp, Artificial
  probe
  misc_feature (1)..(25): SEQ ID NO: 3370; WAN024D5A_at; Start 395; Stop 419
tctacgtcgcagactatatcgagca

SEQ ID NO: 144064 - DNA, 25 bp, Artificial
  probe
  misc_feature (1)..(25): SEQ ID NO: 3370; WAN024D5A_at; Start 264; Stop 288
taatgtctggcatggtatggtcgga

SEQ ID NO: 144065 - DNA, 25 bp, Artificial
  probe
  misc_feature (1)..(25): SEQ ID NO: 3370; WAN024D5A_at; Start 171; Stop 195
tcttcatgactatgctaaaaagttg

SEQ ID NO: 144066 - DNA, 25 bp, Artificial
  probe
  misc_feature (1)..(25): SEQ ID NO: 3370; WAN024D5A_at; Start 564; Stop 588
taacgcctttgtgcactatttgaaa

SEQ ID NO: 144067 - DNA, 25 bp, Artificial
  probe
  misc_feature (1)..(25): SEQ ID NO: 3370; WAN024D5A_at; Start 16; Stop 40
gactatatcaactgctcccgtgagg

SEQ ID NO: 144068 - DNA, 25 bp, Artificial
  probe
  misc_feature (1)..(25): SEQ ID NO: 3370; WAN024D5A_at; Start 73; Stop 97
gagaaacgtctaacccattgtctag

SEQ ID NO: 144069 - DNA, 25 bp, Artificial
  probe
  misc_feature (1)..(25): SEQ ID NO: 3370; WAN024D5A_at; Start 68; Stop 92
tacctgagaaacgtctaacccattg

SEQ ID NO: 144070 - DNA, 25 bp, Artificial
  probe
  misc_feature (1)..(25): SEQ ID NO: 3370; WAN024D5A_at; Start 26; Stop 50
actgctcccgtgaggccttgttgga

SEQ ID NO: 144071 - DNA, 25 bp, Artificial
  probe
  misc_feature (1)..(25): SEQ ID NO: 3370; WAN024D5A_at; Start 520; Stop 544
gctcatcagggattccccatctatc

SEQ ID NO: 144072 - DNA, 25 bp, Artificial
  probe
  misc_feature (1)..(25): SEQ ID NO: 3370; WAN024D5A_at; Start 364; Stop 388
gctggtcaaatgacagacctagata

SEQ ID NO: 144073 - DNA, 25 bp, Artificial
  probe
  misc_feature (1)..(25): SEQ ID NO: 3370; WAN024D5A_at; Start 270; Stop 294
ctggcatggtatggtcggaatttac

SEQ ID NO: 144074 - DNA, 25 bp, Artificial
  probe
  misc_feature (1)..(25): SEQ ID NO: 3370; WAN024D5A_at; Start 122; Stop 146
tagctcagcgctttggtgtagatgt

SEQ ID NO: 144075 - DNA, 25 bp, Artificial
  probe
  misc_feature (1)..(25): SEQ ID NO: 3370; WAN024D5A_at; Start 161; Stop 185
tagcaggtcttcttcatgactatgc

SEQ ID NO: 144076 - DNA, 25 bp, Artificial
  probe
  misc_feature (1)..(25): SEQ ID NO: 3370; WAN024D5A_at; Start 497; Stop 521
cagctcgtaccgtggagtatctagc

SEQ ID NO: 144077 - DNA, 25 bp, Artificial
  probe
  misc_feature (1)..(25): SEQ ID NO: 3370; WAN024D5A_at; Start 56; Stop 80
tggcagagcttctacctgagaaacg

SEQ ID NO: 144078 - DNA, 25 bp, Artificial
  probe
  misc_feature (1)..(25): SEQ ID NO: 3370; WAN024D5A_at; Start 49; Stop 73
gaaaaaatggcagagcttctacctg

SEQ ID NO: 144079 - DNA, 25 bp, Artificial
  probe
  misc_feature (1)..(25): SEQ ID NO: 3370; WAN024D5A_at; Start 3; Stop 27
gatgtcctatcaagactatatcaac

SEQ ID NO: 144080 - DNA, 25 bp, Artificial
  probe
  misc_feature (1)..(25): SEQ ID NO: 3370; WAN024D5A_at; Start 385; Stop 409
gataaggtcatctacgtcgcagact

SEQ ID NO: 144081 - DNA, 25 bp, Artificial
  probe
  misc_feature (1)..(25): SEQ ID NO: 1085; WAN024D5B_at; Start 184; Stop 208
tctgcgcttttaaatcgaaaacctg

SEQ ID NO: 144082 - DNA, 25 bp, Artificial
  probe
  misc_feature (1)..(25): SEQ ID NO: 1085; WAN024D5B_at; Start 384; Stop 408
aggtgctgtcacaacctttgatggg

SEQ ID NO: 144083 - DNA, 25 bp, Artificial
  probe
  misc_feature (1)..(25): SEQ ID NO: 1085; WAN024D5B_at; Start 153; Stop 177
tgaagctcaaacatcagaagattgg

SEQ ID NO: 144084 - DNA, 25 bp, Artificial
  probe
  misc_feature (1)..(25): SEQ ID NO: 1085; WAN024D5B_at; Start 21; Stop 45
cattgatgttcagaatgttttagta

SEQ ID NO: 144085 - DNA, 25 bp, Artificial
  probe
  misc_feature (1)..(25): SEQ ID NO: 1085; WAN024D5B_at; Start 358; Stop 382
tatggctatcagcttattgttccag

SEQ ID NO: 144086 - DNA, 25 bp, Artificial
  probe
  misc_feature (1)..(25): SEQ ID NO: 1085; WAN024D5B_at; Start 51; Stop 75
tgggttccagacaaaaagtctattg

SEQ ID NO: 144087 - DNA, 25 bp, Artificial
  probe
  misc_feature (1)..(25): SEQ ID NO: 1085; WAN024D5B_at; Start 85; Stop 109
tcttatttacaaaaccaggctagaa

SEQ ID NO: 144088 - DNA, 25 bp, Artificial
  probe
  misc_feature (1)..(25): SEQ ID NO: 1085; WAN024D5B_at; Start 345; Stop 369
ggttgcctttgaatatggctatcag

SEQ ID NO: 144089 - DNA, 25 bp, Artificial
  probe
  misc_feature (1)..(25): SEQ ID NO: 1085; WAN024D5B_at; Start 90; Stop 114
tttacaaaaccaggctagaagcaag

SEQ ID NO: 144090 - DNA, 25 bp, Artificial
  probe
  misc_feature (1)..(25): SEQ ID NO: 1085; WAN024D5B_at; Start 333; Stop 357
tacctctgtcaaggttgcctttgaa

SEQ ID NO: 144091 - DNA, 25 bp, Artificial
  probe
  misc_feature (1)..(25): SEQ ID NO: 1085; WAN024D5B_at; Start 123; Stop 147
aattatctatgttcaacatattgag

SEQ ID NO: 144092 - DNA, 25 bp, Artificial
  probe
  misc_feature (1)..(25): SEQ ID NO: 1085; WAN024D5B_at; Start 417; Stop 441
tccagcagaaacgattaatgaattt

SEQ ID NO: 144093 - DNA, 25 bp, Artificial
  probe
  misc_feature (1)..(25): SEQ ID NO: 1085; WAN024D5B_at; Start 39; Stop 63
tttagtagaaactgggttccagaca

SEQ ID NO: 144094 - DNA, 25 bp, Artificial
  probe
  misc_feature (1)..(25): SEQ ID NO: 1085; WAN024D5B_at; Start 304; Stop 328
tgtggtatgcagacagaatattgtg

SEQ ID NO: 144095 - DNA, 25 bp, Artificial
  probe
  misc_feature (1)..(25): SEQ ID NO: 1085; WAN024D5B_at; Start 3; Stop 27
gaagacggcttttataatcattgat

SEQ ID NO: 144096 - DNA, 25 bp, Artificial
  probe
  misc_feature (1)..(25): SEQ ID NO: 1085; WAN024D5B_at; Start 293; Stop 317
aattagttttatgtggtatgcagac

SEQ ID NO: 144097 - DNA, 25 bp, Artificial
  probe
  misc_feature (1)..(25): SEQ ID NO: 1085; WAN024D5B_at; Start 375; Stop 399
tgttccagaaggtgctgtcacaacc

SEQ ID NO: 144098 - DNA, 25 bp, Artificial
  probe
  misc_feature (1)..(25): SEQ ID NO: 1085; WAN024D5B_at; Start 157; Stop 181
gctcaaacatcagaagattggcagt

SEQ ID NO: 144099 - DNA, 25 bp, Artificial
  probe
  misc_feature (1)..(25): SEQ ID NO: 1085; WAN024D5B_at; Start 254; Stop 278
ctggcttaaaagaatacttggataa

SEQ ID NO: 144100 - DNA, 25 bp, Artificial
  probe
  misc_feature (1)..(25): SEQ ID NO: 1085; WAN024D5B_at; Start 426; Stop 450
aacgattaatgaattttatgaggac

SEQ ID NO: 144101 - DNA, 25 bp, Artificial
  probe
  misc_feature (1)..(25): SEQ ID NO: 1085; WAN024D5B_at; Start 372; Stop 396
tattgttccagaaggtgctgtcaca

SEQ ID NO: 144102 - DNA, 25 bp, Artificial
  probe
  misc_feature (1)..(25): SEQ ID NO: 1085; WAN024D5B_at; Start 407; Stop 431
gggatgacattccagcagaaacgat

SEQ ID NO: 144103 - DNA, 25 bp, Artificial
  probe
  misc_feature (1)..(25): SEQ ID NO: 1085; WAN024D5B_at; Start 99; Stop 123
ccaggctagaagcaagaatattgaa

SEQ ID NO: 144104 - DNA, 25 bp, Artificial
  probe
  misc_feature (1)..(25): SEQ ID NO: 1085; WAN024D5B_at; Start 30; Stop 54
tcagaatgttttagtagaaactggg

SEQ ID NO: 144105 - DNA, 25 bp, Artificial
  probe
  misc_feature (1)..(25): SEQ ID NO: 1085; WAN024D5B_at; Start 249; Stop 273
agaaactggcttaaaagaatacttg

SEQ ID NO: 144106 - DNA, 25 bp, Artificial
  probe
  misc_feature (1)..(25): SEQ ID NO: 1085; WAN024D5B_at; Start 327; Stop 351
tgtggatacctctgtcaaggttgcc

SEQ ID NO: 144107 - DNA, 25 bp, Artificial
  probe
  misc_feature (1)..(25): SEQ ID NO: 1085; WAN024D5B_at; Start 166; Stop 190
tcagaagattggcagttatctgcgc

SEQ ID NO: 144108 - DNA, 25 bp, Artificial
  probe
  misc_feature (1)..(25): SEQ ID NO: 1085; WAN024D5B_at; Start 481; Stop 505
gattacaaacatattttctaactaa

SEQ ID NO: 144109 - DNA, 25 bp, Artificial
  probe
  misc_feature (1)..(25): SEQ ID NO: 1085; WAN024D5B_at; Start 178; Stop 202
cagttatctgcgcttttaaatcgaa

SEQ ID NO: 144110 - DNA, 25 bp, Artificial
  probe
  misc_feature (1)..(25): SEQ ID NO: 1085; WAN024D5B_at; Start 322; Stop 346
tattgtgtggatacctctgtcaagg

SEQ ID NO: 144111 - DNA, 25 bp, Artificial
  probe
  misc_feature (1)..(25): SEQ ID NO: 1085; WAN024D5B_at; Start 234; Stop 258
taacagtattttcaaagaaactggc

SEQ ID NO: 144112 - DNA, 25 bp, Artificial
  probe
  misc_feature (1)..(25): SEQ ID NO: 1085; WAN024D5B_at; Start 366; Stop 390
tcagcttattgttccagaaggtgct

SEQ ID NO: 144113 - DNA, 25 bp, Artificial
  probe
  misc_feature (1)..(25): SEQ ID NO: 1085; WAN024D5B_at; Start 439; Stop 463
ttttatgaggacatttgggaggagc

SEQ ID NO: 144114 - DNA, 25 bp, Artificial
  probe
  misc_feature (1)..(25): SEQ ID NO: 1085; WAN024D5B_at; Start 315; Stop 339
gacagaatattgtgtggatacctct

SEQ ID NO: 144115 - DNA, 25 bp, Artificial
  probe
  misc_feature (1)..(25): SEQ ID NO: 2102; WAN024D5C_at; Start 21; Stop 45
agatgcctgggcagattattgctac

SEQ ID NO: 144116 - DNA, 25 bp, Artificial
  probe
  misc_feature (1)..(25): SEQ ID NO: 2102; WAN024D5C_at; Start 170; Stop 194
cacggcgtattgatgcagaaaatcg

SEQ ID NO: 144117 - DNA, 25 bp, Artificial
  probe
  misc_feature (1)..(25): SEQ ID NO: 2102; WAN024D5C_at; Start 24; Stop 48
tgcctgggcagattattgctactgg

SEQ ID NO: 144118 - DNA, 25 bp, Artificial
  probe
  misc_feature (1)..(25): SEQ ID NO: 2102; WAN024D5C_at; Start 172; Stop 196
cggcgtattgatgcagaaaatcgct

SEQ ID NO: 144119 - DNA, 25 bp, Artificial
  probe
  misc_feature (1)..(25): SEQ ID NO: 2102; WAN024D5C_at; Start 156; Stop 180
ccaaggagcctggtcacggcgtatt

SEQ ID NO: 144120 - DNA, 25 bp, Artificial
  probe
  misc_feature (1)..(25): SEQ ID NO: 2102; WAN024D5C_at; Start 154; Stop 178
taccaaggagcctggtcacggcgta

SEQ ID NO: 144121 - DNA, 25 bp, Artificial
  probe
  misc_feature (1)..(25): SEQ ID NO: 2102; WAN024D5C_at; Start 15; Stop 39
tacagaagatgcctgggcagattat

SEQ ID NO: 144122 - DNA, 25 bp, Artificial
  probe
  misc_feature (1)..(25): SEQ ID NO: 2102; WAN024D5C_at; Start 221; Stop 245
gcgtggctttcttgtcctttaaaga

SEQ ID NO: 144123 - DNA, 25 bp, Artificial
  probe
  misc_feature (1)..(25): SEQ ID NO: 2102; WAN024D5C_at; Start 219; Stop 243
tagcgtggctttcttgtcctttaaa

SEQ ID NO: 144124 - DNA, 25 bp, Artificial
  probe
  misc_feature (1)..(25): SEQ ID NO: 2102; WAN024D5C_at; Start 159; Stop 183
aggagcctggtcacggcgtattgat

SEQ ID NO: 144125 - DNA, 25 bp, Artificial
  probe
  misc_feature (1)..(25): SEQ ID NO: 2102; WAN024D5C_at; Start 169; Stop 193
tcacggcgtattgatgcagaaaatc

SEQ ID NO: 144126 - DNA, 25 bp, Artificial
  probe
  misc_feature (1)..(25): SEQ ID NO: 2102; WAN024D5C_at; Start 148; Stop 172
tatgattaccaaggagcctggtcac

SEQ ID NO: 144127 - DNA, 25 bp, Artificial
  probe
  misc_feature (1)..(25): SEQ ID NO: 2102; WAN024D5C_at; Start 164; Stop 188
cctggtcacggcgtattgatgcaga

SEQ ID NO: 144128 - DNA, 25 bp, Artificial
  probe
  misc_feature (1)..(25): SEQ ID NO: 2102; WAN024D5C_at; Start 10; Stop 34
aagtttacagaagatgcctgggcag

SEQ ID NO: 144129 - DNA, 25 bp, Artificial
  probe
  misc_feature (1)..(25): SEQ ID NO: 2102; WAN024D5C_at; Start 233; Stop 257
tgtcctttaaagatcattactaact

SEQ ID NO: 144130 - DNA, 25 bp, Artificial
  probe
  misc_feature (1)..(25): SEQ ID NO: 2102; WAN024D5C_at; Start 143; Stop 167
tcaaatatgattaccaaggagcctg

SEQ ID NO: 144131 - DNA, 25 bp, Artificial
  probe
  misc_feature (1)..(25): SEQ ID NO: 2102; WAN024D5C_at; Start 26; Stop 50
cctgggcagattattgctactggca

SEQ ID NO: 144132 - DNA, 25 bp, Artificial
  probe
  misc_feature (1)..(25): SEQ ID NO: 2102; WAN024D5C_at; Start 192; Stop 216
tcgcttgatttatatgatggatgga

SEQ ID NO: 144133 - DNA, 25 bp, Artificial
  probe
  misc_feature (1)..(25): SEQ ID NO: 2102; WAN024D5C_at; Start 225; Stop 249
ggctttcttgtcctttaaagatcat

SEQ ID NO: 144134 - DNA, 25 bp, Artificial
  probe
  misc_feature (1)..(25): SEQ ID NO: 2102; WAN024D5C_at; Start 146; Stop 170
aatatgattaccaaggagcctggtc

SEQ ID NO: 144135 - DNA, 25 bp, Artificial
  probe
  misc_feature (1)..(25): SEQ ID NO: 2102; WAN024D5C_at; Start 12; Stop 36
gtttacagaagatgcctgggcagat

SEQ ID NO: 144136 - DNA, 25 bp, Artificial
  probe
  misc_feature (1)..(25): SEQ ID NO: 2102; WAN024D5C_at; Start 177; Stop 201
tattgatgcagaaaatcgcttgatt

SEQ ID NO: 144137 - DNA, 25 bp, Artificial
  probe
  misc_feature (1)..(25): SEQ ID NO: 2102; WAN024D5C_at; Start 181; Stop 205
gatgcagaaaatcgcttgatttata

SEQ ID NO: 144138 - DNA, 25 bp, Artificial
  probe
  misc_feature (1)..(25): SEQ ID NO: 2102; WAN024D5C_at; Start 8; Stop 32
tcaagtttacagaagatgcctgggc

SEQ ID NO: 144139 - DNA, 25 bp, Artificial
  probe
  misc_feature (1)..(25): SEQ ID NO: 2102; WAN024D5C_at; Start 187; Stop 211
gaaaatcgcttgatttatatgatgg

SEQ ID NO: 144140 - DNA, 25 bp, Artificial
  probe
  misc_feature (1)..(25): SEQ ID NO: 2102; WAN024D5C_at; Start 166; Stop 190
tggtcacggcgtattgatgcagaaa

SEQ ID NO: 144141 - DNA, 25 bp, Artificial
  probe
  misc_feature (1)..(25): SEQ ID NO: 2102; WAN024D5C_at; Start 139; Stop 163
ccactcaaatatgattaccaaggag

SEQ ID NO: 144142 - DNA, 25 bp, Artificial
  probe
  misc_feature (1)..(25): SEQ ID NO: 2102; WAN024D5C_at; Start 236; Stop 260
cctttaaagatcattactaactaat

SEQ ID NO: 144143 - DNA, 25 bp, Artificial
  probe
  misc_feature (1)..(25): SEQ ID NO: 2102; WAN024D5C_at; Start 151; Stop 175
gattaccaaggagcctggtcacggc

SEQ ID NO: 144144 - DNA, 25 bp, Artificial
  probe
  misc_feature (1)..(25): SEQ ID NO: 2102; WAN024D5C_at; Start 175; Stop 199
cgtattgatgcagaaaatcgcttga

SEQ ID NO: 144145 - DNA, 25 bp, Artificial
  probe
  misc_feature (1)..(25): SEQ ID NO: 2102; WAN024D5C_at; Start 29; Stop 53
gggcagattattgctactggcaaaa

SEQ ID NO: 144146 - DNA, 25 bp, Artificial
  probe
  misc_feature (1)..(25): SEQ ID NO: 2102; WAN024D5C_at; Start 144; Stop 168
caaatatgattaccaaggagcctgg

SEQ ID NO: 144147 - DNA, 25 bp, Artificial
  probe
  misc_feature (1)..(25): SEQ ID NO: 2102; WAN024D5C_at; Start 150; Stop 174
tgattaccaaggagcctggtcacgg

SEQ ID NO: 144148 - DNA, 25 bp, Artificial
  probe
  misc_feature (1)..(25): SEQ ID NO: 2102; WAN024D5C_at; Start 153; Stop 177
ttaccaaggagcctggtcacggcgt

SEQ ID NO: 144149 - DNA, 25 bp, Artificial
  probe
  misc_feature (1)..(25): SEQ ID NO: 5602; WAN024D5D_at; Start 182; Stop 206
tgacgatccgtcttgacattctcaa

SEQ ID NO: 144150 - DNA, 25 bp, Artificial
  probe
  misc_feature (1)..(25): SEQ ID NO: 5602; WAN024D5D_at; Start 190; Stop 214
cgtcttgacattctcaatcaggtat

SEQ ID NO: 144151 - DNA, 25 bp, Artificial
  probe
  misc_feature (1)..(25): SEQ ID NO: 5602; WAN024D5D_at; Start 81; Stop 105
tgatagtcccttcaacacgtcctgc

SEQ ID NO: 144152 - DNA, 25 bp, Artificial
  probe
  misc_feature (1)..(25): SEQ ID NO: 5602; WAN024D5D_at; Start 27; Stop 51
gagccactgcaatttcttccaaagc

SEQ ID NO: 144153 - DNA, 25 bp, Artificial
  probe
  misc_feature (1)..(25): SEQ ID NO: 5602; WAN024D5D_at; Start 161; Stop 185
cagtgaggcgaatagatgatctgac

SEQ ID NO: 144154 - DNA, 25 bp, Artificial
  probe
  misc_feature (1)..(25): SEQ ID NO: 5602; WAN024D5D_at; Start 136; Stop 160
cactgccattccgaggtcatcatga

SEQ ID NO: 144155 - DNA, 25 bp, Artificial
  probe
  misc_feature (1)..(25): SEQ ID NO: 5602; WAN024D5D_at; Start 127; Stop 151
gctatttgccactgccattccgagg

SEQ ID NO: 144156 - DNA, 25 bp, Artificial
  probe
  misc_feature (1)..(25): SEQ ID NO: 5602; WAN024D5D_at; Start 196; Stop 220
gacattctcaatcaggtatttgaag

SEQ ID NO: 144157 - DNA, 25 bp, Artificial
  probe
  misc_feature (1)..(25): SEQ ID NO: 5602; WAN024D5D_at; Start 95; Stop 119
acacgtcctgcaccattcttgacag

SEQ ID NO: 144158 - DNA, 25 bp, Artificial
  probe
  misc_feature (1)..(25): SEQ ID NO: 5602; WAN024D5D_at; Start 131; Stop 155
tttgccactgccattccgaggtcat

SEQ ID NO: 144159 - DNA, 25 bp, Artificial
  probe
  misc_feature (1)..(25): SEQ ID NO: 5602; WAN024D5D_at; Start 44; Stop 68
tccaaagcagcattttcagctcgct

SEQ ID NO: 144160 - DNA, 25 bp, Artificial
  probe
  misc_feature (1)..(25): SEQ ID NO: 5602; WAN024D5D_at; Start 145; Stop 169
tccgaggtcatcatgacagtgaggc

SEQ ID NO: 144161 - DNA, 25 bp, Artificial
  probe
  misc_feature (1)..(25): SEQ ID NO: 5602; WAN024D5D_at; Start 240; Stop 264
gtgtggtaaatcctatattttctga

SEQ ID NO: 144162 - DNA, 25 bp, Artificial
  probe
  misc_feature (1)..(25): SEQ ID NO: 5602; WAN024D5D_at; Start 21; Stop 45
tattgagagccactgcaatttcttc

SEQ ID NO: 144163 - DNA, 25 bp, Artificial
  probe
  misc_feature (1)..(25): SEQ ID NO: 5602; WAN024D5D_at; Start 1; Stop 25
ttggtagtaatcttggcgaatattg

SEQ ID NO: 144164 - DNA, 25 bp, Artificial
  probe
  misc_feature (1)..(25): SEQ ID NO: 5602; WAN024D5D_at; Start 114; Stop 138
tgacagcagcaaggctatttgccac

SEQ ID NO: 144165 - DNA, 25 bp, Artificial
  probe
  misc_feature (1)..(25): SEQ ID NO: 5602; WAN024D5D_at; Start 15; Stop 39
ggcgaatattgagagccactgcaat

SEQ ID NO: 144166 - DNA, 25 bp, Artificial
  probe
  misc_feature (1)..(25): SEQ ID NO: 5602; WAN024D5D_at; Start 140; Stop 164
gccattccgaggtcatcatgacagt

SEQ ID NO: 144167 - DNA, 25 bp, Artificial
  probe
  misc_feature (1)..(25): SEQ ID NO: 5602; WAN024D5D_at; Start 8; Stop 32
taatcttggcgaatattgagagcca

SEQ ID NO: 144168 - DNA, 25 bp, Artificial
  probe
  misc_feature (1)..(25): SEQ ID NO: 5602; WAN024D5D_at; Start 60; Stop 84
cagctcgctccctaataccattgat

SEQ ID NO: 144169 - DNA, 25 bp, Artificial
  probe
  misc_feature (1)..(25): SEQ ID NO: 5602; WAN024D5D_at; Start 111; Stop 135
tcttgacagcagcaaggctatttgc

SEQ ID NO: 144170 - DNA, 25 bp, Artificial
  probe
  misc_feature (1)..(25): SEQ ID NO: 5602; WAN024D5D_at; Start 175; Stop 199
gatgatctgacgatccgtcttgaca

SEQ ID NO: 144171 - DNA, 25 bp, Artificial
  probe
  misc_feature (1)..(25): SEQ ID NO: 5602; WAN024D5D_at; Start 75; Stop 99
taccattgatagtcccttcaacacg

SEQ ID NO: 144172 - DNA, 25 bp, Artificial
  probe
  misc_feature (1)..(25): SEQ ID NO: 5602; WAN024D5D_at; Start 152; Stop 176
tcatcatgacagtgaggcgaataga

SEQ ID NO: 144173 - DNA, 25 bp, Artificial
  probe
  misc_feature (1)..(25): SEQ ID NO: 5602; WAN024D5D_at; Start 103; Stop 127
tgcaccattcttgacagcagcaagg

SEQ ID NO: 144174 - DNA, 25 bp, Artificial
  probe
  misc_feature (1)..(25): SEQ ID NO: 5602; WAN024D5D_at; Start 170; Stop 194
gaatagatgatctgacgatccgtct

SEQ ID NO: 144175 - DNA, 25 bp, Artificial
  probe
  misc_feature (1)..(25): SEQ ID NO: 5602; WAN024D5D_at; Start 52; Stop 76
agcattttcagctcgctccctaata

SEQ ID NO: 144176 - DNA, 25 bp, Artificial
  probe
  misc_feature (1)..(25): SEQ ID NO: 5602; WAN024D5D_at; Start 119; Stop 143
gcagcaaggctatttgccactgcca

SEQ ID NO: 144177 - DNA, 25 bp, Artificial
  probe
  misc_feature (1)..(25): SEQ ID NO: 5602; WAN024D5D_at; Start 66; Stop 90
gctccctaataccattgatagtccc

SEQ ID NO: 144178 - DNA, 25 bp, Artificial
  probe
  misc_feature (1)..(25): SEQ ID NO: 5602; WAN024D5D_at; Start 47; Stop 71
aaagcagcattttcagctcgctccc

SEQ ID NO: 144179 - DNA, 25 bp, Artificial
  probe
  misc_feature (1)..(25): SEQ ID NO: 5602; WAN024D5D_at; Start 34; Stop 58
tgcaatttcttccaaagcagcattt

SEQ ID NO: 144180 - DNA, 25 bp, Artificial
  probe
  misc_feature (1)..(25): SEQ ID NO: 5602; WAN024D5D_at; Start 11; Stop 35
tcttggcgaatattgagagccactg

SEQ ID NO: 144181 - DNA, 25 bp, Artificial
  probe
  misc_feature (1)..(25): SEQ ID NO: 5602; WAN024D5D_at; Start 158; Stop 182
tgacagtgaggcgaatagatgatct

SEQ ID NO: 144182 - DNA, 25 bp, Artificial
  probe
  misc_feature (1)..(25): SEQ ID NO: 5602; WAN024D5D_at; Start 186; Stop 210
gatccgtcttgacattctcaatcag

SEQ ID NO: 144183 - DNA, 25 bp, Artificial
  probe
  misc_feature (1)..(25): SEQ ID NO: 4203; WAN024D5E_at; Start 4; Stop 28
gtaagaaacactgcgtcccatctca

SEQ ID NO: 144184 - DNA, 25 bp, Artificial
  probe
  misc_feature (1)..(25): SEQ ID NO: 4203; WAN024D5E_at; Start 196; Stop 220
gatagtgtaggacaccaaacgaaca

SEQ ID NO: 144185 - DNA, 25 bp, Artificial
  probe
  misc_feature (1)..(25): SEQ ID NO: 4203; WAN024D5E_at; Start 252; Stop 276
agattgcttcaacggaaccttgccc

SEQ ID NO: 144186 - DNA, 25 bp, Artificial
  probe
  misc_feature (1)..(25): SEQ ID NO: 4203; WAN024D5E_at; Start 249; Stop 273
taaagattgcttcaacggaaccttg

SEQ ID NO: 144187 - DNA, 25 bp, Artificial
  probe
  misc_feature (1)..(25): SEQ ID NO: 4203; WAN024D5E_at; Start 2; Stop 26
tggtaagaaacactgcgtcccatct

SEQ ID NO: 144188 - DNA, 25 bp, Artificial
  probe
  misc_feature (1)..(25): SEQ ID NO: 4203; WAN024D5E_at; Start 203; Stop 227
taggacaccaaacgaacagattggt

SEQ ID NO: 144189 - DNA, 25 bp, Artificial
  probe
  misc_feature (1)..(25): SEQ ID NO: 4203; WAN024D5E_at; Start 131; Stop 155
gtatctctgttttcaacagtgacca

SEQ ID NO: 144190 - DNA, 25 bp, Artificial
  probe
  misc_feature (1)..(25): SEQ ID NO: 4203; WAN024D5E_at; Start 208; Stop 232
caccaaacgaacagattggttaaag

SEQ ID NO: 144191 - DNA, 25 bp, Artificial
  probe
  misc_feature (1)..(25): SEQ ID NO: 4203; WAN024D5E_at; Start 86; Stop 110
ttcaacacatcaaaatcaagccctg

SEQ ID NO: 144192 - DNA, 25 bp, Artificial
  probe
  misc_feature (1)..(25): SEQ ID NO: 4203; WAN024D5E_at; Start 270; Stop 294
cttgccctgtcgcattaaattcgac

SEQ ID NO: 144193 - DNA, 25 bp, Artificial
  probe
  misc_feature (1)..(25): SEQ ID NO: 4203; WAN024D5E_at; Start 219; Stop 243
cagattggttaaagaacttatcgat

SEQ ID NO: 144194 - DNA, 25 bp, Artificial
  probe
  misc_feature (1)..(25): SEQ ID NO: 4203; WAN024D5E_at; Start 290; Stop 314
tcgactttctcaccatccatattgg

SEQ ID NO: 144195 - DNA, 25 bp, Artificial
  probe
  misc_feature (1)..(25): SEQ ID NO: 4203; WAN024D5E_at; Start 22; Stop 46
catctcacctgcattctctttttga

SEQ ID NO: 144196 - DNA, 25 bp, Artificial
  probe
  misc_feature (1)..(25): SEQ ID NO: 4203; WAN024D5E_at; Start 101; Stop 125
tcaagccctgctgcattaaagatgg

SEQ ID NO: 144197 - DNA, 25 bp, Artificial
  probe
  misc_feature (1)..(25): SEQ ID NO: 4203; WAN024D5E_at; Start 29; Stop 53
cctgcattctctttttgaacaaagg

SEQ ID NO: 144198 - DNA, 25 bp, Artificial
  probe
  misc_feature (1)..(25): SEQ ID NO: 4203; WAN024D5E_at; Start 285; Stop 309
taaattcgactttctcaccatccat

SEQ ID NO: 144199 - DNA, 25 bp, Artificial
  probe
  misc_feature (1)..(25): SEQ ID NO: 4203; WAN024D5E_at; Start 265; Stop 289
ggaaccttgccctgtcgcattaaat

SEQ ID NO: 144200 - DNA, 25 bp, Artificial
  probe
  misc_feature (1)..(25): SEQ ID NO: 4203; WAN024D5E_at; Start 73; Stop 97
aatagcagaagccttcaacacatca

SEQ ID NO: 144201 - DNA, 25 bp, Artificial
  probe
  misc_feature (1)..(25): SEQ ID NO: 4203; WAN024D5E_at; Start 222; Stop 246
attggttaaagaacttatcgatagc

SEQ ID NO: 144202 - DNA, 25 bp, Artificial
  probe
  misc_feature (1)..(25): SEQ ID NO: 4203; WAN024D5E_at; Start 45; Stop 69
gaacaaaggtattagcgtttatata

SEQ ID NO: 144203 - DNA, 25 bp, Artificial
  probe
  misc_feature (1)..(25): SEQ ID NO: 4203; WAN024D5E_at; Start 124; Stop 148
ggtttctgtatctctgttttcaaca

SEQ ID NO: 144204 - DNA, 25 bp, Artificial
  probe
  misc_feature (1)..(25): SEQ ID NO: 4203; WAN024D5E_at; Start 113; Stop 137
gcattaaagatggtttctgtatctc

SEQ ID NO: 144205 - DNA, 25 bp, Artificial
  probe
  misc_feature (1)..(25): SEQ ID NO: 4203; WAN024D5E_at; Start 105; Stop 129
gccctgctgcattaaagatggtttc

SEQ ID NO: 144206 - DNA, 25 bp, Artificial
  probe
  misc_feature (1)..(25): SEQ ID NO: 4203; WAN024D5E_at; Start 260; Stop 284
tcaacggaaccttgccctgtcgcat

SEQ ID NO: 144207 - DNA, 25 bp, Artificial
  probe
  misc_feature (1)..(25): SEQ ID NO: 4203; WAN024D5E_at; Start 294; Stop 318
ctttctcaccatccatattggctag

SEQ ID NO: 144208 - DNA, 25 bp, Artificial
  probe
  misc_feature (1)..(25): SEQ ID NO: 4203; WAN024D5E_at; Start 201; Stop 225
tgtaggacaccaaacgaacagattg

SEQ ID NO: 144209 - DNA, 25 bp, Artificial
  probe
  misc_feature (1)..(25): SEQ ID NO: 4203; WAN024D5E_at; Start 255; Stop 279
ttgcttcaacggaaccttgccctgt

SEQ ID NO: 144210 - DNA, 25 bp, Artificial
  probe
  misc_feature (1)..(25): SEQ ID NO: 4203; WAN024D5E_at; Start 280; Stop 304
cgcattaaattcgactttctcacca

SEQ ID NO: 144211 - DNA, 25 bp, Artificial
  probe
  misc_feature (1)..(25): SEQ ID NO: 4203; WAN024D5E_at; Start 37; Stop 61
ctctttttgaacaaaggtattagcg

SEQ ID NO: 144212 - DNA, 25 bp, Artificial
  probe
  misc_feature (1)..(25): SEQ ID NO: 4203; WAN024D5E_at; Start 91; Stop 115
cacatcaaaatcaagccctgctgca

SEQ ID NO: 144213 - DNA, 25 bp, Artificial
  probe
  misc_feature (1)..(25): SEQ ID NO: 4203; WAN024D5E_at; Start 141; Stop 165
tttcaacagtgaccaaaacccgatc

SEQ ID NO: 144214 - DNA, 25 bp, Artificial
  probe
  misc_feature (1)..(25): SEQ ID NO: 4203; WAN024D5E_at; Start 77; Stop 101
gcagaagccttcaacacatcaaaat

SEQ ID NO: 144215 - DNA, 25 bp, Artificial
  probe
  misc_feature (1)..(25): SEQ ID NO: 4203; WAN024D5E_at; Start 107; Stop 131
cctgctgcattaaagatggtttctg

SEQ ID NO: 144216 - DNA, 25 bp, Artificial
  probe
  misc_feature (1)..(25): SEQ ID NO: 4203; WAN024D5E_at; Start 146; Stop 170
acagtgaccaaaacccgatcctggg

SEQ ID NO: 144217 - DNA, 25 bp, Artificial
  probe
  misc_feature (1)..(25): SEQ ID NO: 1051; WAN024D5F_at; Start 908; Stop 932
cccaggatcgggttttggtcactgt

SEQ ID NO: 144218 - DNA, 25 bp, Artificial
  probe
  misc_feature (1)..(25): SEQ ID NO: 1051; WAN024D5F_at; Start 390; Stop 414
caaagccgtcgttggtggcaatacc

SEQ ID NO: 144219 - DNA, 25 bp, Artificial
  probe
  misc_feature (1)..(25): SEQ ID NO: 1051; WAN024D5F_at; Start 188; Stop 212
ctgtcaagaatggtgcaggacgtgt

SEQ ID NO: 144220 - DNA, 25 bp, Artificial
  probe
  misc_feature (1)..(25): SEQ ID NO: 1051; WAN024D5F_at; Start 301; Stop 325
taccaagtagaaaccagtattgtcc

SEQ ID NO: 144221 - DNA, 25 bp, Artificial
  probe
  misc_feature (1)..(25): SEQ ID NO: 1051; WAN024D5F_at; Start 283; Stop 307
aatattcgccaagattactaccaag

SEQ ID NO: 144222 - DNA, 25 bp, Artificial
  probe
  misc_feature (1)..(25): SEQ ID NO: 1051; WAN024D5F_at; Start 949; Stop 973
gaaaccatctttaatgcagcagggc

SEQ ID NO: 144223 - DNA, 25 bp, Artificial
  probe
  misc_feature (1)..(25): SEQ ID NO: 1051; WAN024D5F_at; Start 172; Stop 196
gcaaatagccttgctgctgtcaaga

SEQ ID NO: 144224 - DNA, 25 bp, Artificial
  probe
  misc_feature (1)..(25): SEQ ID NO: 1051; WAN024D5F_at; Start 571; Stop 595
tttacagaagaggatatcaaaccac

SEQ ID NO: 144225 - DNA, 25 bp, Artificial
  probe
  misc_feature (1)..(25): SEQ ID NO: 1051; WAN024D5F_at; Start 735; Stop 759
taatgacattgaagcgctcgttagc

SEQ ID NO: 144226 - DNA, 25 bp, Artificial
  probe
  misc_feature (1)..(25): SEQ ID NO: 1051; WAN024D5F_at; Start 94; Stop 118
tacctgattgagaatgtcaagacgg

SEQ ID NO: 144227 - DNA, 25 bp, Artificial
  probe
  misc_feature (1)..(25): SEQ ID NO: 1051; WAN024D5F_at; Start 542; Stop 566
ttgagaaactgagagaattggccct

SEQ ID NO: 144228 - DNA, 25 bp, Artificial
  probe
  misc_feature (1)..(25): SEQ ID NO: 1051; WAN024D5F_at; Start 750; Stop 774
gctcgttagcctagccaatatggat

SEQ ID NO: 144229 - DNA, 25 bp, Artificial
  probe
  misc_feature (1)..(25): SEQ ID NO: 1051; WAN024D5F_at; Start 853; Stop 877
caatctgttcgtttggtgtcctaca

SEQ ID NO: 144230 - DNA, 25 bp, Artificial
  probe
  misc_feature (1)..(25): SEQ ID NO: 1051; WAN024D5F_at; Start 138; Stop 162
gcctcactgtcatgatgacctcgga

SEQ ID NO: 144231 - DNA, 25 bp, Artificial
  probe
  misc_feature (1)..(25): SEQ ID NO: 1051; WAN024D5F_at; Start 1066; Stop 1090
gtttcttaccacgatatgcctagtg

SEQ ID NO: 144232 - DNA, 25 bp, Artificial
  probe
  misc_feature (1)..(25): SEQ ID NO: 1051; WAN024D5F_at; Start 442; Stop 466
gatggagtccttaaaaatcctctca

SEQ ID NO: 144233 - DNA, 25 bp, Artificial
  probe
  misc_feature (1)..(25): SEQ ID NO: 1051; WAN024D5F_at; Start 349; Stop 373
gaaatggtttctcgcttctctggta

SEQ ID NO: 144234 - DNA, 25 bp, Artificial
  probe
  misc_feature (1)..(25): SEQ ID NO: 1051; WAN024D5F_at; Start 79; Stop 103
ggtgccatcttcaaatacctgattg

SEQ ID NO: 144235 - DNA, 25 bp, Artificial
  probe
  misc_feature (1)..(25): SEQ ID NO: 1051; WAN024D5F_at; Start 222; Stop 246
tatcaatggtattagggagcgagct

SEQ ID NO: 144236 - DNA, 25 bp, Artificial
  probe
  misc_feature (1)..(25): SEQ ID NO: 1051; WAN024D5F_at; Start 790; Stop 814
tttaatgcgacagggcaaggttccg

SEQ ID NO: 144237 - DNA, 25 bp, Artificial
  probe
  misc_feature (1)..(25): SEQ ID NO: 1051; WAN024D5F_at; Start 595; Stop 619
ctctttgctaagttcaaggcactgg

SEQ ID NO: 144238 - DNA, 25 bp, Artificial
  probe
  misc_feature (1)..(25): SEQ ID NO: 1051; WAN024D5F_at; Start 765; Stop 789
caatatggatggtgagaaagtcgaa

SEQ ID NO: 144239 - DNA, 25 bp, Artificial
  probe
  misc_feature (1)..(25): SEQ ID NO: 1051; WAN024D5F_at; Start 654; Stop 678
tcgagctttggtagctggaaccatg

SEQ ID NO: 144240 - DNA, 25 bp, Artificial
  probe
  misc_feature (1)..(25): SEQ ID NO: 1051; WAN024D5F_at; Start 1025; Stop 1049
cctttgttcaaaaagagaatgcagg

SEQ ID NO: 144241 - DNA, 25 bp, Artificial
  probe
  misc_feature (1)..(25): SEQ ID NO: 1051; WAN024D5F_at; Start 678; Stop 702
ggttgaaaatccagaaggcttccac

SEQ ID NO: 144242 - DNA, 25 bp, Artificial
  probe
  misc_feature (1)..(25): SEQ ID NO: 1051; WAN024D5F_at; Start 556; Stop 580
gaattggccctagattttacagaag

SEQ ID NO: 144243 - DNA, 25 bp, Artificial
  probe
  misc_feature (1)..(25): SEQ ID NO: 1051; WAN024D5F_at; Start 526; Stop 550
ggtcgccatgcttttgttgagaaac

SEQ ID NO: 144244 - DNA, 25 bp, Artificial
  probe
  misc_feature (1)..(25): SEQ ID NO: 1051; WAN024D5F_at; Start 469; Stop 493
tatgagatcatcacacctgaattgg

SEQ ID NO: 144245 - DNA, 25 bp, Artificial
  probe
  misc_feature (1)..(25): SEQ ID NO: 1051; WAN024D5F_at; Start 427; Stop 451
tctggtattcaccaagatggagtcc

SEQ ID NO: 144246 - DNA, 25 bp, Artificial
  probe
  misc_feature (1)..(25): SEQ ID NO: 1051; WAN024D5F_at; Start 153; Stop 177
tgacctcggaatggcagtggcaaat

SEQ ID NO: 144247 - DNA, 25 bp, Artificial
  probe
  misc_feature (1)..(25): SEQ ID NO: 1051; WAN024D5F_at; Start 330; Stop 354
tgagaccatcaatacgtcagaaatg

SEQ ID NO: 144248 - DNA, 25 bp, Artificial
  probe
  misc_feature (1)..(25): SEQ ID NO: 1051; WAN024D5F_at; Start 1051; Stop 1075
gagatgggacgcagtgtttcttacc

SEQ ID NO: 144249 - DNA, 25 bp, Artificial
  probe
  misc_feature (1)..(25): SEQ ID NO: 1051; WAN024D5F_at; Start 709; Stop 733
gatttacaacttcaaactcatgcag

SEQ ID NO: 144250 - DNA, 25 bp, Artificial
  probe
  misc_feature (1)..(25): SEQ ID NO: 1051; WAN024D5F_at; Start 108; Stop 132
tgtcaagacggatcgtcagatcatc

SEQ ID NO: 144251 - DNA, 25 bp, Artificial
  probe
  misc_feature (1)..(25): SEQ ID NO: 1304; WAN024D5G_at; Start 465; Stop 489
gatcacagatgaggacaatgttggc

SEQ ID NO: 144252 - DNA, 25 bp, Artificial
  probe
  misc_feature (1)..(25): SEQ ID NO: 1304; WAN024D5G_at; Start 146; Stop 170
cagtcaagcaggctgccaaggaagc

SEQ ID NO: 144253 - DNA, 25 bp, Artificial
  probe
  misc_feature (1)..(25): SEQ ID NO: 1304; WAN024D5G_at; Start 453; Stop 477
tcgcagcattccgatcacagatgag

SEQ ID NO: 144254 - DNA, 25 bp, Artificial
  probe
  misc_feature (1)..(25): SEQ ID NO: 1304; WAN024D5G_at; Start 559; Stop 583
ggtgatatcaaacctgaaccgcagg

SEQ ID NO: 144255 - DNA, 25 bp, Artificial
  probe
  misc_feature (1)..(25): SEQ ID NO: 1304; WAN024D5G_at; Start 715; Stop 739
aagggcgaccgctttaagatttatg

SEQ ID NO: 144256 - DNA, 25 bp, Artificial
  probe
  misc_feature (1)..(25): SEQ ID NO: 1304; WAN024D5G_at; Start 267; Stop 291
tgggcagtttctcccaagcaaactc

SEQ ID NO: 144257 - DNA, 25 bp, Artificial
  probe
  misc_feature (1)..(25): SEQ ID NO: 1304; WAN024D5G_at; Start 800; Stop 824
aattgattgtcgcaacggctgaagg

SEQ ID NO: 144258 - DNA, 25 bp, Artificial
  probe
  misc_feature (1)..(25): SEQ ID NO: 1304; WAN024D5G_at; Start 759; Stop 783
tcagggaaatccaggtgagattctc

SEQ ID NO: 144259 - DNA, 25 bp, Artificial
  probe
  misc_feature (1)..(25): SEQ ID NO: 1304; WAN024D5G_at; Start 103; Stop 127
ccagaccgtgctgttggtcgtaaaa

SEQ ID NO: 144260 - DNA, 25 bp, Artificial
  probe
  misc_feature (1)..(25): SEQ ID NO: 1304; WAN024D5G_at; Start 839; Stop 863
aacaagtgcagccagctggtaagcc

SEQ ID NO: 144261 - DNA, 25 bp, Artificial
  probe
  misc_feature (1)..(25): SEQ ID NO: 1304; WAN024D5G_at; Start 234; Stop 258
gctaggagcagatggaattgtgact

SEQ ID NO: 144262 - DNA, 25 bp, Artificial
  probe
  misc_feature (1)..(25): SEQ ID NO: 1304; WAN024D5G_at; Start 672; Stop 696
aattcgtggaatgaacccctggcct

SEQ ID NO: 144263 - DNA, 25 bp, Artificial
  probe
  misc_feature (1)..(25): SEQ ID NO: 1304; WAN024D5G_at; Start 248; Stop 272
gaattgtgactgctgcttttgggca

SEQ ID NO: 144264 - DNA, 25 bp, Artificial
  probe
  misc_feature (1)..(25): SEQ ID NO: 1304; WAN024D5G_at; Start 824; Stop 848
gggctctatccctcaaacaagtgca

SEQ ID NO: 144265 - DNA, 25 bp, Artificial
  probe
  misc_feature (1)..(25): SEQ ID NO: 1304; WAN024D5G_at; Start 916; Stop 940
ggagaacgatttggtgactaactaa

SEQ ID NO: 144266 - DNA, 25 bp, Artificial
  probe
  misc_feature (1)..(25): SEQ ID NO: 1304; WAN024D5G_at; Start 640; Stop 664
tggaacaaaaccaatcgtcaactct

SEQ ID NO: 144267 - DNA, 25 bp, Artificial
  probe
  misc_feature (1)..(25): SEQ ID NO: 1304; WAN024D5G_at; Start 854; Stop 878
ctggtaagcctaagatggacattgc

SEQ ID NO: 144268 - DNA, 25 bp, Artificial
  probe
  misc_feature (1)..(25): SEQ ID NO: 1304; WAN024D5G_at; Start 746; Stop 770
taccagtagaaggtcagggaaatcc

SEQ ID NO: 144269 - DNA, 25 bp, Artificial
  probe
  misc_feature (1)..(25): SEQ ID NO: 1304; WAN024D5G_at; Start 574; Stop 598
gaaccgcaggatacgagtcaggtta

SEQ ID NO: 144270 - DNA, 25 bp, Artificial
  probe
  misc_feature (1)..(25): SEQ ID NO: 1304; WAN024D5G_at; Start 391; Stop 415
gaagctggtgtgaccatcatggaaa

SEQ ID NO: 144271 - DNA, 25 bp, Artificial
  probe
  misc_feature (1)..(25): SEQ ID NO: 1304; WAN024D5G_at; Start 898; Stop 922
ggacgtacattgactgtaggagaac

SEQ ID NO: 144272 - DNA, 25 bp, Artificial
  probe
  misc_feature (1)..(25): SEQ ID NO: 1304; WAN024D5G_at; Start 336; Stop 360
tcctagacaccgtggtggtgcgcct

SEQ ID NO: 144273 - DNA, 25 bp, Artificial
  probe
  misc_feature (1)..(25): SEQ ID NO: 1304; WAN024D5G_at; Start 730; Stop 754
aagatttatgaagccctaccagtag

SEQ ID NO: 144274 - DNA, 25 bp, Artificial
  probe
  misc_feature (1)..(25): SEQ ID NO: 1304; WAN024D5G_at; Start 304; Stop 328
gactttgctgtcaacgttcatgcct

SEQ ID NO: 144275 - DNA, 25 bp, Artificial
  probe
  misc_feature (1)..(25): SEQ ID NO: 1304; WAN024D5G_at; Start 67; Stop 91
gatgaccgttacgaaattctagccg

SEQ ID NO: 144276 - DNA, 25 bp, Artificial
  probe
  misc_feature (1)..(25): SEQ ID NO: 1304; WAN024D5G_at; Start 284; Stop 308
gcaaactccttgatagcatggactt

SEQ ID NO: 144277 - DNA, 25 bp, Artificial
  probe
  misc_feature (1)..(25): SEQ ID NO: 1304; WAN024D5G_at; Start 590; Stop 614
gtcaggttaccttctctccaaatat

SEQ ID NO: 144278 - DNA, 25 bp, Artificial
  probe
  misc_feature (1)..(25): SEQ ID NO: 1304; WAN024D5G_at; Start 50; Stop 74
taaaaggacttttgacagatgaccg

SEQ ID NO: 144279 - DNA, 25 bp, Artificial
  probe
  misc_feature (1)..(25): SEQ ID NO: 1304; WAN024D5G_at; Start 491; Stop 515
ccttgtttgaaaaattggcgctagt

SEQ ID NO: 144280 - DNA, 25 bp, Artificial
  probe
  misc_feature (1)..(25): SEQ ID NO: 1304; WAN024D5G_at; Start 352; Stop 376
ggtgcgcctatccattatgccttga

SEQ ID NO: 144281 - DNA, 25 bp, Artificial
  probe
  misc_feature (1)..(25): SEQ ID NO: 1304; WAN024D5G_at; Start 436; Stop 460
ggagatatgatttctcgtcgcagca

SEQ ID NO: 144282 - DNA, 25 bp, Artificial
  probe
  misc_feature (1)..(25): SEQ ID NO: 1304; WAN024D5G_at; Start 523; Stop 547
gatttgcttttggacactctgcctg

SEQ ID NO: 144283 - DNA, 25 bp, Artificial
  probe
  misc_feature (1)..(25): SEQ ID NO: 1304; WAN024D5G_at; Start 541; Stop 565
ctgcctgcctatattgctggtgata

SEQ ID NO: 144284 - DNA, 25 bp, Artificial
  probe
  misc_feature (1)..(25): SEQ ID NO: 1304; WAN024D5G_at; Start 130; Stop 154
gttatccaagaaaccccagtcaagc

SEQ ID NO: 144285 - DNA, 25 bp, Artificial
  probe
  misc_feature (1)..(25): SEQ ID NO: 7653; WAN024D5H_at; Start 63; Stop 87
gtctggtgttggtaagccatctccc

SEQ ID NO: 144286 - DNA, 25 bp, Artificial
  probe
  misc_feature (1)..(25): SEQ ID NO: 7653; WAN024D5H_at; Start 32; Stop 56
tttttctaaagactgtaaatcgctc

SEQ ID NO: 144287 - DNA, 25 bp, Artificial
  probe
  misc_feature (1)..(25): SEQ ID NO: 7653; WAN024D5H_at; Start 53; Stop 77
gctcttccatgtctggtgttggtaa

SEQ ID NO: 144288 - DNA, 25 bp, Artificial
  probe
  misc_feature (1)..(25): SEQ ID NO: 7653; WAN024D5H_at; Start 62; Stop 86
tgtctggtgttggtaagccatctcc

SEQ ID NO: 144289 - DNA, 25 bp, Artificial
  probe
  misc_feature (1)..(25): SEQ ID NO: 7653; WAN024D5H_at; Start 38; Stop 62
taaagactgtaaatcgctcttccat

SEQ ID NO: 144290 - DNA, 25 bp, Artificial
  probe
  misc_feature (1)..(25): SEQ ID NO: 7653; WAN024D5H_at; Start 1; Stop 25
ttggtgctttctcaagtttctattc

SEQ ID NO: 144291 - DNA, 25 bp, Artificial
  probe
  misc_feature (1)..(25): SEQ ID NO: 7653; WAN024D5H_at; Start 75; Stop 99
taagccatctcccaaaacttggctt

SEQ ID NO: 144292 - DNA, 25 bp, Artificial
  probe
  misc_feature (1)..(25): SEQ ID NO: 7653; WAN024D5H_at; Start 73; Stop 97
ggtaagccatctcccaaaacttggc

SEQ ID NO: 144293 - DNA, 25 bp, Artificial
  probe
  misc_feature (1)..(25): SEQ ID NO: 7653; WAN024D5H_at; Start 85; Stop 109
cccaaaacttggcttccatatgaac

SEQ ID NO: 144294 - DNA, 25 bp, Artificial
  probe
  misc_feature (1)..(25): SEQ ID NO: 7653; WAN024D5H_at; Start 58; Stop 82
tccatgtctggtgttggtaagccat

SEQ ID NO: 144295 - DNA, 25 bp, Artificial
  probe
  misc_feature (1)..(25): SEQ ID NO: 7653; WAN024D5H_at; Start 10; Stop 34
tctcaagtttctattcttctccttt

SEQ ID NO: 144296 - DNA, 25 bp, Artificial
  probe
  misc_feature (1)..(25): SEQ ID NO: 7653; WAN024D5H_at; Start 57; Stop 81
ttccatgtctggtgttggtaagcca

SEQ ID NO: 144297 - DNA, 25 bp, Artificial
  probe
  misc_feature (1)..(25): SEQ ID NO: 7653; WAN024D5H_at; Start 60; Stop 84
catgtctggtgttggtaagccatct

SEQ ID NO: 144298 - DNA, 25 bp, Artificial
  probe
  misc_feature (1)..(25): SEQ ID NO: 7653; WAN024D5H_at; Start 80; Stop 104
catctcccaaaacttggcttccata

SEQ ID NO: 144299 - DNA, 25 bp, Artificial
  probe
  misc_feature (1)..(25): SEQ ID NO: 7653; WAN024D5H_at; Start 36; Stop 60
tctaaagactgtaaatcgctcttcc

SEQ ID NO: 144300 - DNA, 25 bp, Artificial
  probe
  misc_feature (1)..(25): SEQ ID NO: 7653; WAN024D5H_at; Start 52; Stop 76
cgctcttccatgtctggtgttggta

SEQ ID NO: 144301 - DNA, 25 bp, Artificial
  probe
  misc_feature (1)..(25): SEQ ID NO: 7653; WAN024D5H_at; Start 66; Stop 90
tggtgttggtaagccatctcccaaa

SEQ ID NO: 144302 - DNA, 25 bp, Artificial
  probe
  misc_feature (1)..(25): SEQ ID NO: 7653; WAN024D5H_at; Start 6; Stop 30
gctttctcaagtttctattcttctc

SEQ ID NO: 144303 - DNA, 25 bp, Artificial
  probe
  misc_feature (1)..(25): SEQ ID NO: 7653; WAN024D5H_at; Start 55; Stop 79
tcttccatgtctggtgttggtaagc

SEQ ID NO: 144304 - DNA, 25 bp, Artificial
  probe
  misc_feature (1)..(25): SEQ ID NO: 7653; WAN024D5H_at; Start 50; Stop 74
atcgctcttccatgtctggtgttgg

SEQ ID NO: 144305 - DNA, 25 bp, Artificial
  probe
  misc_feature (1)..(25): SEQ ID NO: 7653; WAN024D5H_at; Start 48; Stop 72
aaatcgctcttccatgtctggtgtt

SEQ ID NO: 144306 - DNA, 25 bp, Artificial
  probe
  misc_feature (1)..(25): SEQ ID NO: 7653; WAN024D5H_at; Start 49; Stop 73
aatcgctcttccatgtctggtgttg

SEQ ID NO: 144307 - DNA, 25 bp, Artificial
  probe
  misc_feature (1)..(25): SEQ ID NO: 7653; WAN024D5H_at; Start 82; Stop 106
tctcccaaaacttggcttccatatg

SEQ ID NO: 144308 - DNA, 25 bp, Artificial
  probe
  misc_feature (1)..(25): SEQ ID NO: 7653; WAN024D5H_at; Start 59; Stop 83
ccatgtctggtgttggtaagccatc

SEQ ID NO: 144309 - DNA, 25 bp, Artificial
  probe
  misc_feature (1)..(25): SEQ ID NO: 7653; WAN024D5H_at; Start 65; Stop 89
ctggtgttggtaagccatctcccaa

SEQ ID NO: 144310 - DNA, 25 bp, Artificial
  probe
  misc_feature (1)..(25): SEQ ID NO: 7653; WAN024D5H_at; Start 43; Stop 67
actgtaaatcgctcttccatgtctg

SEQ ID NO: 144311 - DNA, 25 bp, Artificial
  probe
  misc_feature (1)..(25): SEQ ID NO: 7653; WAN024D5H_at; Start 69; Stop 93
tgttggtaagccatctcccaaaact

SEQ ID NO: 144312 - DNA, 25 bp, Artificial
  probe
  misc_feature (1)..(25): SEQ ID NO: 7653; WAN024D5H_at; Start 33; Stop 57
ttttctaaagactgtaaatcgctct

SEQ ID NO: 144313 - DNA, 25 bp, Artificial
  probe
  misc_feature (1)..(25): SEQ ID NO: 7653; WAN024D5H_at; Start 72; Stop 96
tggtaagccatctcccaaaacttgg

SEQ ID NO: 144314 - DNA, 25 bp, Artificial
  probe
  misc_feature (1)..(25): SEQ ID NO: 7653; WAN024D5H_at; Start 40; Stop 64
aagactgtaaatcgctcttccatgt

SEQ ID NO: 144315 - DNA, 25 bp, Artificial
  probe
  misc_feature (1)..(25): SEQ ID NO: 7653; WAN024D5H_at; Start 87; Stop 111
caaaacttggcttccatatgaacac

SEQ ID NO: 144316 - DNA, 25 bp, Artificial
  probe
  misc_feature (1)..(25): SEQ ID NO: 7653; WAN024D5H_at; Start 64; Stop 88
tctggtgttggtaagccatctccca

SEQ ID NO: 144317 - DNA, 25 bp, Artificial
  probe
  misc_feature (1)..(25): SEQ ID NO: 7653; WAN024D5H_at; Start 44; Stop 68
ctgtaaatcgctcttccatgtctgg

SEQ ID NO: 144318 - DNA, 25 bp, Artificial
  probe
  misc_feature (1)..(25): SEQ ID NO: 7653; WAN024D5H_at; Start 24; Stop 48
tcttctcctttttctaaagactgta

SEQ ID NO: 144319 - DNA, 25 bp, Artificial
  probe
  misc_feature (1)..(25): SEQ ID NO: 2238; WAN024D5I_at; Start 288; Stop 312
cgaccaggaaatggagcaacatcca

SEQ ID NO: 144320 - DNA, 25 bp, Artificial
  probe
  misc_feature (1)..(25): SEQ ID NO: 2238; WAN024D5I_at; Start 438; Stop 462
taatcttaaaccatcaccaaatcct

SEQ ID NO: 144321 - DNA, 25 bp, Artificial
  probe
  misc_feature (1)..(25): SEQ ID NO: 2238; WAN024D5I_at; Start 425; Stop 449
taggcaaatcacttaatcttaaacc

SEQ ID NO: 144322 - DNA, 25 bp, Artificial
  probe
  misc_feature (1)..(25): SEQ ID NO: 2238; WAN024D5I_at; Start 11; Stop 35
cagatattgcgatggaattatccaa

SEQ ID NO: 144323 - DNA, 25 bp, Artificial
  probe
  misc_feature (1)..(25): SEQ ID NO: 2238; WAN024D5I_at; Start 340; Stop 364
tctcatatttataggcaatttgcag

SEQ ID NO: 144324 - DNA, 25 bp, Artificial
  probe
  misc_feature (1)..(25): SEQ ID NO: 2238; WAN024D5I_at; Start 604; Stop 628
gttcatatggaagccaagttttggg

SEQ ID NO: 144325 - DNA, 25 bp, Artificial
  probe
  misc_feature (1)..(25): SEQ ID NO: 2238; WAN024D5I_at; Start 237; Stop 261
ggagggtgagttatttattcgccaa

SEQ ID NO: 144326 - DNA, 25 bp, Artificial
  probe
  misc_feature (1)..(25): SEQ ID NO: 2238; WAN024D5I_at; Start 295; Stop 319
gaaatggagcaacatccaatcgctc

SEQ ID NO: 144327 - DNA, 25 bp, Artificial
  probe
  misc_feature (1)..(25): SEQ ID NO: 2238; WAN024D5I_at; Start 487; Stop 511
tatattacggatgagttagagcaac

SEQ ID NO: 144328 - DNA, 25 bp, Artificial
  probe
  misc_feature (1)..(25): SEQ ID NO: 2238; WAN024D5I_at; Start 410; Stop 434
ggttataccatgatataggcaaatc

SEQ ID NO: 144329 - DNA, 25 bp, Artificial
  probe
  misc_feature (1)..(25): SEQ ID NO: 2238; WAN024D5I_at; Start 187; Stop 211
tcaaaccaagagatgaaaagactct

SEQ ID NO: 144330 - DNA, 25 bp, Artificial
  probe
  misc_feature (1)..(25): SEQ ID NO: 2238; WAN024D5I_at; Start 534; Stop 558
ggtcaatcagctctatcgagaaagt

SEQ ID NO: 144331 - DNA, 25 bp, Artificial
  probe
  misc_feature (1)..(25): SEQ ID NO: 2238; WAN024D5I_at; Start 637; Stop 661
taccaacaccagacatggaagagcg

SEQ ID NO: 144332 - DNA, 25 bp, Artificial
  probe
  misc_feature (1)..(25): SEQ ID NO: 2238; WAN024D5I_at; Start 252; Stop 276
tattcgccaacaatttttcaaggaa

SEQ ID NO: 144333 - DNA, 25 bp, Artificial
  probe
  misc_feature (1)..(25): SEQ ID NO: 2238; WAN024D5I_at; Start 657; Stop 681
gagcgatttacagtctttagaaaaa

SEQ ID NO: 144334 - DNA, 25 bp, Artificial
  probe
  misc_feature (1)..(25): SEQ ID NO: 2238; WAN024D5I_at; Start 472; Stop 496
caatggattgaaacttatattacgg

SEQ ID NO: 144335 - DNA, 25 bp, Artificial
  probe
  misc_feature (1)..(25): SEQ ID NO: 2238; WAN024D5I_at; Start 667; Stop 691
cagtctttagaaaaaggagaagaat

SEQ ID NO: 144336 - DNA, 25 bp, Artificial
  probe
  misc_feature (1)..(25): SEQ ID NO: 2238; WAN024D5I_at; Start 502; Stop 526
ttagagcaacagatcagagaggagg

SEQ ID NO: 144337 - DNA, 25 bp, Artificial
  probe
  misc_feature (1)..(25): SEQ ID NO: 2238; WAN024D5I_at; Start 206; Stop 230
gactcttgaaacaaaatgctcaggg

SEQ ID NO: 144338 - DNA, 25 bp, Artificial
  probe
  misc_feature (1)..(25): SEQ ID NO: 2238; WAN024D5I_at; Start 3; Stop 27
ggaatttacagatattgcgatggaa

SEQ ID NO: 144339 - DNA, 25 bp, Artificial
  probe
  misc_feature (1)..(25): SEQ ID NO: 2238; WAN024D5I_at; Start 118; Stop 142
tacctgattcaggatgcctactatc

SEQ ID NO: 144340 - DNA, 25 bp, Artificial
  probe
  misc_feature (1)..(25): SEQ ID NO: 2238; WAN024D5I_at; Start 105; Stop 129
cattttccgctattacctgattcag

SEQ ID NO: 144341 - DNA, 25 bp, Artificial
  probe
  misc_feature (1)..(25): SEQ ID NO: 2238; WAN024D5I_at; Start 90; Stop 114
gaatttagaacctgccattttccgc

SEQ ID NO: 144342 - DNA, 25 bp, Artificial
  probe
  misc_feature (1)..(25): SEQ ID NO: 2238; WAN024D5I_at; Start 174; Stop 198
ggctgataagacttcaaaccaagag

SEQ ID NO: 144343 - DNA, 25 bp, Artificial
  probe
  misc_feature (1)..(25): SEQ ID NO: 2238; WAN024D5I_at; Start 262; Stop 286
caatttttcaaggaattggaaatca

SEQ ID NO: 144344 - DNA, 25 bp, Artificial
  probe
  misc_feature (1)..(25): SEQ ID NO: 2238; WAN024D5I_at; Start 595; Stop 619
cacatcagtgttcatatggaagcca

SEQ ID NO: 144345 - DNA, 25 bp, Artificial
  probe
  misc_feature (1)..(25): SEQ ID NO: 2238; WAN024D5I_at; Start 308; Stop 332
atccaatcgctccaacctgttatca

SEQ ID NO: 144346 - DNA, 25 bp, Artificial
  probe
  misc_feature (1)..(25): SEQ ID NO: 2238; WAN024D5I_at; Start 387; Stop 411
tgcaagcttgcttccttgtccttgg

SEQ ID NO: 144347 - DNA, 25 bp, Artificial
  probe
  misc_feature (1)..(25): SEQ ID NO: 2238; WAN024D5I_at; Start 320; Stop 344
caacctgttatcattacatttctca

SEQ ID NO: 144348 - DNA, 25 bp, Artificial
  probe
  misc_feature (1)..(25): SEQ ID NO: 2238; WAN024D5I_at; Start 215; Stop 239
aacaaaatgctcagggtttagtgga

SEQ ID NO: 144349 - DNA, 25 bp, Artificial
  probe
  misc_feature (1)..(25): SEQ ID NO: 2238; WAN024D5I_at; Start 645; Stop 669
ccagacatggaagagcgatttacag

SEQ ID NO: 144350 - DNA, 25 bp, Artificial
  probe
  misc_feature (1)..(25): SEQ ID NO: 2238; WAN024D5I_at; Start 396; Stop 420
gcttccttgtccttggttataccat

SEQ ID NO: 144351 - DNA, 25 bp, Artificial
  probe
  misc_feature (1)..(25): SEQ ID NO: 2238; WAN024D5I_at; Start 454; Stop 478
ccaaatcctctctatcaacaatgga

SEQ ID NO: 144352 - DNA, 25 bp, Artificial
  probe
  misc_feature (1)..(25): SEQ ID NO: 2238; WAN024D5I_at; Start 123; Stop 147
gattcaggatgcctactatctgaag

SEQ ID NO: 144353 - DNA, 25 bp, Artificial
  probe
  misc_feature (1)..(25): SEQ ID NO: 1925; WAN024D5J_at; Start 246; Stop 270
ctatctcttttctcccgagtatggg

SEQ ID NO: 144354 - DNA, 25 bp, Artificial
  probe
  misc_feature (1)..(25): SEQ ID NO: 1925; WAN024D5J_at; Start 774; Stop 798
agttagtttactacttatcttgcag

SEQ ID NO: 144355 - DNA, 25 bp, Artificial
  probe
  misc_feature (1)..(25): SEQ ID NO: 1925; WAN024D5J_at; Start 418; Stop 442
cctagtcagtttgcttccagtttaa

SEQ ID NO: 144356 - DNA, 25 bp, Artificial
  probe
  misc_feature (1)..(25): SEQ ID NO: 1925; WAN024D5J_at; Start 601; Stop 625
aatctgctcattattacgcccttga

SEQ ID NO: 144357 - DNA, 25 bp, Artificial
  probe
  misc_feature (1)..(25): SEQ ID NO: 1925; WAN024D5J_at; Start 567; Stop 591
caagaaagcttctcttatgcaacga

SEQ ID NO: 144358 - DNA, 25 bp, Artificial
  probe
  misc_feature (1)..(25): SEQ ID NO: 1925; WAN024D5J_at; Start 35; Stop 59
atactgtgattcatcgcttgtcagg

SEQ ID NO: 144359 - DNA, 25 bp, Artificial
  probe
  misc_feature (1)..(25): SEQ ID NO: 1925; WAN024D5J_at; Start 22; Stop 46
taccagcatagagatactgtgattc

SEQ ID NO: 144360 - DNA, 25 bp, Artificial
  probe
  misc_feature (1)..(25): SEQ ID NO: 1925; WAN024D5J_at; Start 612; Stop 636
tattacgcccttgatttttagctcg

SEQ ID NO: 144361 - DNA, 25 bp, Artificial
  probe
  misc_feature (1)..(25): SEQ ID NO: 1925; WAN024D5J_at; Start 750; Stop 774
gctcttggcaaccttgtttttagta

SEQ ID NO: 144362 - DNA, 25 bp, Artificial
  probe
  misc_feature (1)..(25): SEQ ID NO: 1925; WAN024D5J_at; Start 434; Stop 458
ccagtttaaatcaaattggtgtgcc

SEQ ID NO: 144363 - DNA, 25 bp, Artificial
  probe
  misc_feature (1)..(25): SEQ ID NO: 1925; WAN024D5J_at; Start 3; Stop 27
gcaagctaaattaatcggttaccag

SEQ ID NO: 144364 - DNA, 25 bp, Artificial
  probe
  misc_feature (1)..(25): SEQ ID NO: 1925; WAN024D5J_at; Start 382; Stop 406
attcctctggctattatctttttga

SEQ ID NO: 144365 - DNA, 25 bp, Artificial
  probe
  misc_feature (1)..(25): SEQ ID NO: 1925; WAN024D5J_at; Start 30; Stop 54
tagagatactgtgattcatcgcttg

SEQ ID NO: 144366 - DNA, 25 bp, Artificial
  probe
  misc_feature (1)..(25): SEQ ID NO: 1925; WAN024D5J_at; Start 503; Stop 527
cagatttgcaggaagaattctttac

SEQ ID NO: 144367 - DNA, 25 bp, Artificial
  probe
  misc_feature (1)..(25): SEQ ID NO: 1925; WAN024D5J_at; Start 228; Stop 252
tttaaacgttttgatggtctatctc

SEQ ID NO: 144368 - DNA, 25 bp, Artificial
  probe
  misc_feature (1)..(25): SEQ ID NO: 1925; WAN024D5J_at; Start 493; Stop 517
cgctatattccagatttgcaggaag

SEQ ID NO: 144369 - DNA, 25 bp, Artificial
  probe
  misc_feature (1)..(25): SEQ ID NO: 1925; WAN024D5J_at; Start 683; Stop 707
ttgggaaagagaaaaaacgcacatg

SEQ ID NO: 144370 - DNA, 25 bp, Artificial
  probe
  misc_feature (1)..(25): SEQ ID NO: 1925; WAN024D5J_at; Start 576; Stop 600
ttctcttatgcaacgaatcaaaggc

SEQ ID NO: 144371 - DNA, 25 bp, Artificial
  probe
  misc_feature (1)..(25): SEQ ID NO: 1925; WAN024D5J_at; Start 586; Stop 610
caacgaatcaaaggcaatctgctca

SEQ ID NO: 144372 - DNA, 25 bp, Artificial
  probe
  misc_feature (1)..(25): SEQ ID NO: 1925; WAN024D5J_at; Start 290; Stop 314
gaagtgtgatttggcagggaatcgg

SEQ ID NO: 144373 - DNA, 25 bp, Artificial
  probe
  misc_feature (1)..(25): SEQ ID NO: 1925; WAN024D5J_at; Start 631; Stop 655
agctcgctagaacgcattgatacca

SEQ ID NO: 144374 - DNA, 25 bp, Artificial
  probe
  misc_feature (1)..(25): SEQ ID NO: 1925; WAN024D5J_at; Start 99; Stop 123
ggccatgattagctatgataccaga

SEQ ID NO: 144375 - DNA, 25 bp, Artificial
  probe
  misc_feature (1)..(25): SEQ ID NO: 1925; WAN024D5J_at; Start 337; Stop 361
gagctcttttatctgctaaatttgg

SEQ ID NO: 144376 - DNA, 25 bp, Artificial
  probe
  misc_feature (1)..(25): SEQ ID NO: 1925; WAN024D5J_at; Start 700; Stop 724
cgcacatggtatagttatcaggcct

SEQ ID NO: 144377 - DNA, 25 bp, Artificial
  probe
  misc_feature (1)..(25): SEQ ID NO: 1925; WAN024D5J_at; Start 734; Stop 758
gagactatattaccttgctcttggc

SEQ ID NO: 144378 - DNA, 25 bp, Artificial
  probe
  misc_feature (1)..(25): SEQ ID NO: 1925; WAN024D5J_at; Start 240; Stop 264
gatggtctatctcttttctcccgag

SEQ ID NO: 144379 - DNA, 25 bp, Artificial
  probe
  misc_feature (1)..(25): SEQ ID NO: 1925; WAN024D5J_at; Start 741; Stop 765
tattaccttgctcttggcaaccttg

SEQ ID NO: 144380 - DNA, 25 bp, Artificial
  probe
  misc_feature (1)..(25): SEQ ID NO: 1925; WAN024D5J_at; Start 687; Stop 711
gaaagagaaaaaacgcacatggtat

SEQ ID NO: 144381 - DNA, 25 bp, Artificial
  probe
  misc_feature (1)..(25): SEQ ID NO: 1925; WAN024D5J_at; Start 487; Stop 511
accttgcgctatattccagatttgc

SEQ ID NO: 144382 - DNA, 25 bp, Artificial
  probe
  misc_feature (1)..(25): SEQ ID NO: 1925; WAN024D5J_at; Start 92; Stop 116
cattggcggccatgattagctatga

SEQ ID NO: 144383 - DNA, 25 bp, Artificial
  probe
  misc_feature (1)..(25): SEQ ID NO: 1925; WAN024D5J_at; Start 794; Stop 818
tgcagaatcagggacgattttacaa

SEQ ID NO: 144384 - DNA, 25 bp, Artificial
  probe
  misc_feature (1)..(25): SEQ ID NO: 1925; WAN024D5J_at; Start 618; Stop 642
gcccttgatttttagctcgctagaa

SEQ ID NO: 144385 - DNA, 25 bp, Artificial
  probe
  misc_feature (1)..(25): SEQ ID NO: 1925; WAN024D5J_at; Start 14; Stop 38
taatcggttaccagcatagagatac

SEQ ID NO: 144386 - DNA, 25 bp, Artificial
  probe
  misc_feature (1)..(25): SEQ ID NO: 1925; WAN024D5J_at; Start 785; Stop 809
tacttatcttgcagaatcagggacg

SEQ ID NO: 144387 - DNA, 25 bp, Artificial
  probe
  misc_feature (1)..(25): SEQ ID NO: 3108; WAN024D5K_at; Start 233; Stop 257
aaggtagtgtctacgaccgacaagg

SEQ ID NO: 144388 - DNA, 25 bp, Artificial
  probe
  misc_feature (1)..(25): SEQ ID NO: 3108; WAN024D5K_at; Start 294; Stop 318
tatcatcacagccaaactaatcggt

SEQ ID NO: 144389 - DNA, 25 bp, Artificial
  probe
  misc_feature (1)..(25): SEQ ID NO: 3108; WAN024D5K_at; Start 441; Stop 465
ccctcagatctttcttacaggtata

SEQ ID NO: 144390 - DNA, 25 bp, Artificial
  probe
  misc_feature (1)..(25): SEQ ID NO: 3108; WAN024D5K_at; Start 490; Stop 514
ggaatcctctgcatctacctggcta

SEQ ID NO: 144391 - DNA, 25 bp, Artificial
  probe
  misc_feature (1)..(25): SEQ ID NO: 3108; WAN024D5K_at; Start 264; Stop 288
gactttgaccttgccagtttctgaa

SEQ ID NO: 144392 - DNA, 25 bp, Artificial
  probe
  misc_feature (1)..(25): SEQ ID NO: 3108; WAN024D5K_at; Start 654; Stop 678
caatgaccatttctatatgggagca

SEQ ID NO: 144393 - DNA, 25 bp, Artificial
  probe
  misc_feature (1)..(25): SEQ ID NO: 3108; WAN024D5K_at; Start 309; Stop 333
actaatcggtgcctttatctggtca

SEQ ID NO: 144394 - DNA, 25 bp, Artificial
  probe
  misc_feature (1)..(25): SEQ ID NO: 3108; WAN024D5K_at; Start 61; Stop 85
tacgcagccgtgctagtcctttctg

SEQ ID NO: 144395 - DNA, 25 bp, Artificial
  probe
  misc_feature (1)..(25): SEQ ID NO: 3108; WAN024D5K_at; Start 48; Stop 72
gtatttagccctctacgcagccgtg

SEQ ID NO: 144396 - DNA, 25 bp, Artificial
  probe
  misc_feature (1)..(25): SEQ ID NO: 3108; WAN024D5K_at; Start 383; Stop 407
taacagctccagaatggattcctct

SEQ ID NO: 144397 - DNA, 25 bp, Artificial
  probe
  misc_feature (1)..(25): SEQ ID NO: 3108; WAN024D5K_at; Start 669; Stop 693
tatgggagcaggtatagccattgtt

SEQ ID NO: 144398 - DNA, 25 bp, Artificial
  probe
  misc_feature (1)..(25): SEQ ID NO: 3108; WAN024D5K_at; Start 339; Stop 363
tagcaccgctgtattggctctaagt

SEQ ID NO: 144399 - DNA, 25 bp, Artificial
  probe
  misc_feature (1)..(25): SEQ ID NO: 3108; WAN024D5K_at; Start 219; Stop 243
tattaaacgcttcaaaggtagtgtc

SEQ ID NO: 144400 - DNA, 25 bp, Artificial
  probe
  misc_feature (1)..(25): SEQ ID NO: 3108; WAN024D5K_at; Start 535; Stop 559
aatgaataccgtacagcactcgctg

SEQ ID NO: 144401 - DNA, 25 bp, Artificial
  probe
  misc_feature (1)..(25): SEQ ID NO: 3108; WAN024D5K_at; Start 505; Stop 529
tacctggctatttccattggacagc

SEQ ID NO: 144402 - DNA, 25 bp, Artificial
  probe
  misc_feature (1)..(25): SEQ ID NO: 3108; WAN024D5K_at; Start 708; Stop 732
catagctatcttttatctcggaacc

SEQ ID NO: 144403 - DNA, 25 bp, Artificial
  probe
  misc_feature (1)..(25): SEQ ID NO: 3108; WAN024D5K_at; Start 139; Stop 163
caggctactatgctactttttctag

SEQ ID NO: 144404 - DNA, 25 bp, Artificial
  probe
  misc_feature (1)..(25): SEQ ID NO: 3108; WAN024D5K_at; Start 203; Stop 227
caaccattttcttgattattaaacg

SEQ ID NO: 144405 - DNA, 25 bp, Artificial
  probe
  misc_feature (1)..(25): SEQ ID NO: 3108; WAN024D5K_at; Start 354; Stop 378
ggctctaagtgctgttattattctg

SEQ ID NO: 144406 - DNA, 25 bp, Artificial
  probe
  misc_feature (1)..(25): SEQ ID NO: 3108; WAN024D5K_at; Start 92; Stop 116
tcggaatacagacacaaggctttaa

SEQ ID NO: 144407 - DNA, 25 bp, Artificial
  probe
  misc_feature (1)..(25): SEQ ID NO: 3108; WAN024D5K_at; Start 424; Stop 448
tttgtagaaacacatctccctcaga

SEQ ID NO: 144408 - DNA, 25 bp, Artificial
  probe
  misc_feature (1)..(25): SEQ ID NO: 3108; WAN024D5K_at; Start 324; Stop 348
tatctggtcattgattagcaccgct

SEQ ID NO: 144409 - DNA, 25 bp, Artificial
  probe
  misc_feature (1)..(25): SEQ ID NO: 3108; WAN024D5K_at; Start 570; Stop 594
cattggtatccaaatcgtcattgga

SEQ ID NO: 144410 - DNA, 25 bp, Artificial
  probe
  misc_feature (1)..(25): SEQ ID NO: 3108; WAN024D5K_at; Start 521; Stop 545
ttggacagcttttcaatgaataccg

SEQ ID NO: 144411 - DNA, 25 bp, Artificial
  probe
  misc_feature (1)..(25): SEQ ID NO: 3108; WAN024D5K_at; Start 456; Stop 480
tacaggtatatccttcctactaaat

SEQ ID NO: 144412 - DNA, 25 bp, Artificial
  probe
  misc_feature (1)..(25): SEQ ID NO: 3108; WAN024D5K_at; Start 36; Stop 60
tgttaacaagtggtatttagccctc

SEQ ID NO: 144413 - DNA, 25 bp, Artificial
  probe
  misc_feature (1)..(25): SEQ ID NO: 3108; WAN024D5K_at; Start 168; Stop 192
agtctttggtggcttgatgcttaca

SEQ ID NO: 144414 - DNA, 25 bp, Artificial
  probe
  misc_feature (1)..(25): SEQ ID NO: 3108; WAN024D5K_at; Start 399; Stop 423
gattcctctttcttatgtgattaca

SEQ ID NO: 144415 - DNA, 25 bp, Artificial
  probe
  misc_feature (1)..(25): SEQ ID NO: 3108; WAN024D5K_at; Start 280; Stop 304
gtttctgaacaccatatcatcacag

SEQ ID NO: 144416 - DNA, 25 bp, Artificial
  probe
  misc_feature (1)..(25): SEQ ID NO: 3108; WAN024D5K_at; Start 622; Stop 646
tctaatttctatgtcaattcactgg

SEQ ID NO: 144417 - DNA, 25 bp, Artificial
  probe
  misc_feature (1)..(25): SEQ ID NO: 3108; WAN024D5K_at; Start 247; Stop 271
gaccgacaaggctatctgactttga

SEQ ID NO: 144418 - DNA, 25 bp, Artificial
  probe
  misc_feature (1)..(25): SEQ ID NO: 3108; WAN024D5K_at; Start 637; Stop 661
aattcactggtaggactcaatgacc

SEQ ID NO: 144419 - DNA, 25 bp, Artificial
  probe
  misc_feature (1)..(25): SEQ ID NO: 3108; WAN024D5K_at; Start 369; Stop 393
tattattctggctttaacagctcca

SEQ ID NO: 144420 - DNA, 25 bp, Artificial
  probe
  misc_feature (1)..(25): SEQ ID NO: 3108; WAN024D5K_at; Start 725; Stop 749
tcggaacctactacatcttgagaaa

SEQ ID NO: 144421 - DNA, 25 bp, Artificial
  probe
  misc_feature (1)..(25): SEQ ID NO: 4021; WAN024D5L_at; Start 196; Stop 220
caaggacgtgtcctcatcaacgaca

SEQ ID NO: 144422 - DNA, 25 bp, Artificial
  probe
  misc_feature (1)..(25): SEQ ID NO: 4021; WAN024D5L_at; Start 376; Stop 400
ggcattgatgaaaatagtcgtctca

SEQ ID NO: 144423 - DNA, 25 bp, Artificial
  probe
  misc_feature (1)..(25): SEQ ID NO: 4021; WAN024D5L_at; Start 433; Stop 457
caactgattttggttatgagccgtg

SEQ ID NO: 144424 - DNA, 25 bp, Artificial
  probe
  misc_feature (1)..(25): SEQ ID NO: 4021; WAN024D5L_at; Start 109; Stop 133
gctggaaaaattgtcggccttcttg

SEQ ID NO: 144425 - DNA, 25 bp, Artificial
  probe
  misc_feature (1)..(25): SEQ ID NO: 4021; WAN024D5L_at; Start 61; Stop 85
tcatatggagcaacaccagcccttg

SEQ ID NO: 144426 - DNA, 25 bp, Artificial
  probe
  misc_feature (1)..(25): SEQ ID NO: 4021; WAN024D5L_at; Start 609; Stop 633
tgaaattgtcttcctaaaagacgga

SEQ ID NO: 144427 - DNA, 25 bp, Artificial
  probe
  misc_feature (1)..(25): SEQ ID NO: 4021; WAN024D5L_at; Start 297; Stop 321
caaagaagccctaacctacttcaag

SEQ ID NO: 144428 - DNA, 25 bp, Artificial
  probe
  misc_feature (1)..(25): SEQ ID NO: 4021; WAN024D5L_at; Start 273; Stop 297
ctatctcaatgagcaaatgaaggtc

SEQ ID NO: 144429 - DNA, 25 bp, Artificial
  probe
  misc_feature (1)..(25): SEQ ID NO: 4021; WAN024D5L_at; Start 46; Stop 70
gaaaatgtatccaaatcatatggag

SEQ ID NO: 144430 - DNA, 25 bp, Artificial
  probe
  misc_feature (1)..(25): SEQ ID NO: 4021; WAN024D5L_at; Start 90; Stop 114
tgtttctcttgacattccagctgga

SEQ ID NO: 144431 - DNA, 25 bp, Artificial
  probe
  misc_feature (1)..(25): SEQ ID NO: 4021; WAN024D5L_at; Start 455; Stop 479
gtgatgctcgtctctatgttttgga

SEQ ID NO: 144432 - DNA, 25 bp, Artificial
  probe
  misc_feature (1)..(25): SEQ ID NO: 4021; WAN024D5L_at; Start 495; Stop 519
ggtggatccagcagcccgtgcttat

SEQ ID NO: 144433 - DNA, 25 bp, Artificial
  probe
  misc_feature (1)..(25): SEQ ID NO: 4021; WAN024D5L_at; Start 16; Stop 40
gagtttaagcctatgtcattactag

SEQ ID NO: 144434 - DNA, 25 bp, Artificial
  probe
  misc_feature (1)..(25): SEQ ID NO: 4021; WAN024D5L_at; Start 170; Stop 194
taattaatggcctcttacaaccaga

SEQ ID NO: 144435 - DNA, 25 bp, Artificial
  probe
  misc_feature (1)..(25): SEQ ID NO: 4021; WAN024D5L_at; Start 577; Stop 601
cacttgatttctgatatcgagccaa

SEQ ID NO: 144436 - DNA, 25 bp, Artificial
  probe
  misc_feature (1)..(25): SEQ ID NO: 4021; WAN024D5L_at; Start 346; Stop 370
gaacgcgcccatcatctacttgcag

SEQ ID NO: 144437 - DNA, 25 bp, Artificial
  probe
  misc_feature (1)..(25): SEQ ID NO: 4021; WAN024D5L_at; Start 505; Stop 529
gcagcccgtgcttatatcctcaata

SEQ ID NO: 144438 - DNA, 25 bp, Artificial
  probe
  misc_feature (1)..(25): SEQ ID NO: 4021; WAN024D5L_at; Start 239; Stop 263
ccaaggccgttgtagcttatttgcc

SEQ ID NO: 144439 - DNA, 25 bp, Artificial
  probe
  misc_feature (1)..(25): SEQ ID NO: 4021; WAN024D5L_at; Start 228; Stop 252
aagcccagcaaccaaggccgttgta

SEQ ID NO: 144440 - DNA, 25 bp, Artificial
  probe
  misc_feature (1)..(25): SEQ ID NO: 4021; WAN024D5L_at; Start 253; Stop 277
gcttatttgcctgatacgacctatc

SEQ ID NO: 144441 - DNA, 25 bp, Artificial
  probe
  misc_feature (1)..(25): SEQ ID NO: 4021; WAN024D5L_at; Start 285; Stop 309
gcaaatgaaggtcaaagaagcccta

SEQ ID NO: 144442 - DNA, 25 bp, Artificial
  probe
  misc_feature (1)..(25): SEQ ID NO: 4021; WAN024D5L_at; Start 528; Stop 552
taccattatcaacaactactcacca

SEQ ID NO: 144443 - DNA, 25 bp, Artificial
  probe
  misc_feature (1)..(25): SEQ ID NO: 4021; WAN024D5L_at; Start 331; Stop 355
aaagatttcaatcttgaacgcgccc

SEQ ID NO: 144444 - DNA, 25 bp, Artificial
  probe
  misc_feature (1)..(25): SEQ ID NO: 4021; WAN024D5L_at; Start 444; Stop 468
ggttatgagccgtgatgctcgtctc

SEQ ID NO: 144445 - DNA, 25 bp, Artificial
  probe
  misc_feature (1)..(25): SEQ ID NO: 4021; WAN024D5L_at; Start 141; Stop 165
cggctcaggaaaaacaaccctgatt

SEQ ID NO: 144446 - DNA, 25 bp, Artificial
  probe
  misc_feature (1)..(25): SEQ ID NO: 4021; WAN024D5L_at; Start 391; Stop 415
agtcgtctcaagaaactatcaaaag

SEQ ID NO: 144447 - DNA, 25 bp, Artificial
  probe
  misc_feature (1)..(25): SEQ ID NO: 4021; WAN024D5L_at; Start 594; Stop 618
cgagccaatcttggatgaaattgtc

SEQ ID NO: 144448 - DNA, 25 bp, Artificial
  probe
  misc_feature (1)..(25): SEQ ID NO: 4021; WAN024D5L_at; Start 206; Stop 230
tcctcatcaacgacatggacccaag

SEQ ID NO: 144449 - DNA, 25 bp, Artificial
  probe
  misc_feature (1)..(25): SEQ ID NO: 4021; WAN024D5L_at; Start 544; Stop 568
tactcaccaacttctaccgttttga

SEQ ID NO: 144450 - DNA, 25 bp, Artificial
  probe
  misc_feature (1)..(25): SEQ ID NO: 4021; WAN024D5L_at; Start 362; Stop 386
tacttgcagacctgggcattgatga

SEQ ID NO: 144451 - DNA, 25 bp, Artificial
  probe
  misc_feature (1)..(25): SEQ ID NO: 4021; WAN024D5L_at; Start 126; Stop 150
ccttcttgggccaaacggctcagga

SEQ ID NO: 144452 - DNA, 25 bp, Artificial
  probe
  misc_feature (1)..(25): SEQ ID NO: 4021; WAN024D5L_at; Start 185; Stop 209
tacaaccagatcaaggacgtgtcct

SEQ ID NO: 144453 - DNA, 25 bp, Artificial
  probe
  misc_feature (1)..(25): SEQ ID NO: 4021; WAN024D5L_at; Start 560; Stop 584
ccgttttgatttctacccacttgat

SEQ ID NO: 144454 - DNA, 25 bp, Artificial
  probe
  misc_feature (1)..(25): SEQ ID NO: 4021; WAN024D5L_at; Start 74; Stop 98
caccagcccttgaaaatgtttctct

SEQ ID NO: 144455 - DNA, 25 bp, Artificial
  probe
  misc_feature (1)..(25): SEQ ID NO: 2893; WAN024D5M_at; Start 332; Stop 356
caggcgtagtcagtgattatattaa

SEQ ID NO: 144456 - DNA, 25 bp, Artificial
  probe
  misc_feature (1)..(25): SEQ ID NO: 2893; WAN024D5M_at; Start 104; Stop 128
caaccgtgagggagctagctagcga

SEQ ID NO: 144457 - DNA, 25 bp, Artificial
  probe
  misc_feature (1)..(25): SEQ ID NO: 2893; WAN024D5M_at; Start 116; Stop 140
agctagctagcgaggctggtgtcaa

SEQ ID NO: 144458 - DNA, 25 bp, Artificial
  probe
  misc_feature (1)..(25): SEQ ID NO: 2893; WAN024D5M_at; Start 66; Stop 90
gattgtttcccatacactggaaccc

SEQ ID NO: 144459 - DNA, 25 bp, Artificial
  probe
  misc_feature (1)..(25): SEQ ID NO: 2893; WAN024D5M_at; Start 247; Stop 271
cagtcacgcaaacaattatcagaag

SEQ ID NO: 144460 - DNA, 25 bp, Artificial
  probe
  misc_feature (1)..(25): SEQ ID NO: 2893; WAN024D5M_at; Start 158; Stop 182
gagccttatcagaccttgaacgaga

SEQ ID NO: 144461 - DNA, 25 bp, Artificial
  probe
  misc_feature (1)..(25): SEQ ID NO: 2893; WAN024D5M_at; Start 214; Stop 238
cgatttgtgactaaggataaggagc

SEQ ID NO: 144462 - DNA, 25 bp, Artificial
  probe
  misc_feature (1)..(25): SEQ ID NO: 2893; WAN024D5M_at; Start 26; Stop 50
aacccatctatttacagattatgga

SEQ ID NO: 144463 - DNA, 25 bp, Artificial
  probe
  misc_feature (1)..(25): SEQ ID NO: 2893; WAN024D5M_at; Start 78; Stop 102
tacactggaacccaatcaacaactt

SEQ ID NO: 144464 - DNA, 25 bp, Artificial
  probe
  misc_feature (1)..(25): SEQ ID NO: 2893; WAN024D5M_at; Start 57; Stop 81
caagcttcagattgtttcccataca

SEQ ID NO: 144465 - DNA, 25 bp, Artificial
  probe
  misc_feature (1)..(25): SEQ ID NO: 2893; WAN024D5M_at; Start 181; Stop 205
gaaggatttgtctacagcaagcgaa

SEQ ID NO: 144466 - DNA, 25 bp, Artificial
  probe
  misc_feature (1)..(25): SEQ ID NO: 2893; WAN024D5M_at; Start 274; Stop 298
gaattggaacacttcgtttcctcca

SEQ ID NO: 144467 - DNA, 25 bp, Artificial
  probe
  misc_feature (1)..(25): SEQ ID NO: 2893; WAN024D5M_at; Start 221; Stop 245
tgactaaggataaggagctaatcgc

SEQ ID NO: 144468 - DNA, 25 bp, Artificial
  probe
  misc_feature (1)..(25): SEQ ID NO: 2893; WAN024D5M_at; Start 12; Stop 36
atttgacaacaaaaaacccatctat

SEQ ID NO: 144469 - DNA, 25 bp, Artificial
  probe
  misc_feature (1)..(25): SEQ ID NO: 2893; WAN024D5M_at; Start 253; Stop 277
cgcaaacaattatcagaagaagaat

SEQ ID NO: 144470 - DNA, 25 bp, Artificial
  probe
  misc_feature (1)..(25): SEQ ID NO: 2893; WAN024D5M_at; Start 136; Stop 160
gtcaatcccaataccatccaaagag

SEQ ID NO: 144471 - DNA, 25 bp, Artificial
  probe
  misc_feature (1)..(25): SEQ ID NO: 2893; WAN024D5M_at; Start 121; Stop 145
gctagcgaggctggtgtcaatccca

SEQ ID NO: 144472 - DNA, 25 bp, Artificial
  probe
  misc_feature (1)..(25): SEQ ID NO: 2893; WAN024D5M_at; Start 189; Stop 213
tgtctacagcaagcgaacaactgga

SEQ ID NO: 144473 - DNA, 25 bp, Artificial
  probe
  misc_feature (1)..(25): SEQ ID NO: 2893; WAN024D5M_at; Start 308; Stop 332
ttggctatgaaaaagaagaactacc

SEQ ID NO: 144474 - DNA, 25 bp, Artificial
  probe
  misc_feature (1)..(25): SEQ ID NO: 2893; WAN024D5M_at; Start 98; Stop 122
aacttccaaccgtgagggagctagc

SEQ ID NO: 144475 - DNA, 25 bp, Artificial
  probe
  misc_feature (1)..(25): SEQ ID NO: 2893; WAN024D5M_at; Start 315; Stop 339
tgaaaaagaagaactaccaggcgta

SEQ ID NO: 144476 - DNA, 25 bp, Artificial
  probe
  misc_feature (1)..(25): SEQ ID NO: 2893; WAN024D5M_at; Start 145; Stop 169
aataccatccaaagagccttatcag

SEQ ID NO: 144477 - DNA, 25 bp, Artificial
  probe
  misc_feature (1)..(25): SEQ ID NO: 2893; WAN024D5M_at; Start 2; Stop 26
tgtcctggacatttgacaacaaaaa

SEQ ID NO: 144478 - DNA, 25 bp, Artificial
  probe
  misc_feature (1)..(25): SEQ ID NO: 2893; WAN024D5M_at; Start 193; Stop 217
tacagcaagcgaacaactggacgat

SEQ ID NO: 144479 - DNA, 25 bp, Artificial
  probe
  misc_feature (1)..(25): SEQ ID NO: 2893; WAN024D5M_at; Start 174; Stop 198
tgaacgagaaggatttgtctacagc

SEQ ID NO: 144480 - DNA, 25 bp, Artificial
  probe
  misc_feature (1)..(25): SEQ ID NO: 2893; WAN024D5M_at; Start 164; Stop 188
tatcagaccttgaacgagaaggatt

SEQ ID NO: 144481 - DNA, 25 bp, Artificial
  probe
  misc_feature (1)..(25): SEQ ID NO: 2893; WAN024D5M_at; Start 287; Stop 311
tcgtttcctccatgacccattttgg

SEQ ID NO: 144482 - DNA, 25 bp, Artificial
  probe
  misc_feature (1)..(25): SEQ ID NO: 2893; WAN024D5M_at; Start 198; Stop 222
caagcgaacaactggacgatttgtg

SEQ ID NO: 144483 - DNA, 25 bp, Artificial
  probe
  misc_feature (1)..(25): SEQ ID NO: 2893; WAN024D5M_at; Start 127; Stop 151
gaggctggtgtcaatcccaatacca

SEQ ID NO: 144484 - DNA, 25 bp, Artificial
  probe
  misc_feature (1)..(25): SEQ ID NO: 2893; WAN024D5M_at; Start 296; Stop 320
ccatgacccattttggctatgaaaa

SEQ ID NO: 144485 - DNA, 25 bp, Artificial
  probe
  misc_feature (1)..(25): SEQ ID NO: 2893; WAN024D5M_at; Start 328; Stop 352
ctaccaggcgtagtcagtgattata

SEQ ID NO: 144486 - DNA, 25 bp, Artificial
  probe
  misc_feature (1)..(25): SEQ ID NO: 2893; WAN024D5M_at; Start 206; Stop 230
caactggacgatttgtgactaagga

SEQ ID NO: 144487 - DNA, 25 bp, Artificial
  probe
  misc_feature (1)..(25): SEQ ID NO: 2893; WAN024D5M_at; Start 322; Stop 346
gaagaactaccaggcgtagtcagtg

SEQ ID NO: 144488 - DNA, 25 bp, Artificial
  probe
  misc_feature (1)..(25): SEQ ID NO: 2893; WAN024D5M_at; Start 91; Stop 115
aatcaacaacttccaaccgtgaggg

SEQ ID NO: 144489 - DNA, 25 bp, Artificial
  probe
  misc_feature (1)..(25): SEQ ID NO: 1994; WAN024D5N_at; Start 6; Stop 30
ccaaattgatgaagagagcctgact

SEQ ID NO: 144490 - DNA, 25 bp, Artificial
  probe
  misc_feature (1)..(25): SEQ ID NO: 1994; WAN024D5N_at; Start 271; Stop 295
aaggaaatcgctgtaccaatcaagg

SEQ ID NO: 144491 - DNA, 25 bp, Artificial
  probe
  misc_feature (1)..(25): SEQ ID NO: 1994; WAN024D5N_at; Start 48; Stop 72
gaacttcacgggaatcatctgccat

SEQ ID NO: 144492 - DNA, 25 bp, Artificial
  probe
  misc_feature (1)..(25): SEQ ID NO: 1994; WAN024D5N_at; Start 237; Stop 261
gaattcctgcttgattaaaaatcga

SEQ ID NO: 144493 - DNA, 25 bp, Artificial
  probe
  misc_feature (1)..(25): SEQ ID NO: 1994; WAN024D5N_at; Start 67; Stop 91
tgccatgacaggtttgcatcccaga

SEQ ID NO: 144494 - DNA, 25 bp, Artificial
  probe
  misc_feature (1)..(25): SEQ ID NO: 1994; WAN024D5N_at; Start 72; Stop 96
tgacaggtttgcatcccagagccaa

SEQ ID NO: 144495 - DNA, 25 bp, Artificial
  probe
  misc_feature (1)..(25): SEQ ID NO: 1994; WAN024D5N_at; Start 287; Stop 311
caatcaaggttgctccgaaaaatcg

SEQ ID NO: 144496 - DNA, 25 bp, Artificial
  probe
  misc_feature (1)..(25): SEQ ID NO: 1994; WAN024D5N_at; Start 82; Stop 106
gcatcccagagccaaaatcccattt

SEQ ID NO: 144497 - DNA, 25 bp, Artificial
  probe
  misc_feature (1)..(25): SEQ ID NO: 1994; WAN024D5N_at; Start 33; Stop 57
gcttagtaaaatcaagaacttcacg

SEQ ID NO: 144498 - DNA, 25 bp, Artificial
  probe
  misc_feature (1)..(25): SEQ ID NO: 1994; WAN024D5N_at; Start 280; Stop 304
gctgtaccaatcaaggttgctccga

SEQ ID NO: 144499 - DNA, 25 bp, Artificial
  probe
  misc_feature (1)..(25): SEQ ID NO: 1994; WAN024D5N_at; Start 129; Stop 153
cattggtaatgcagtgaatgaggga

SEQ ID NO: 144500 - DNA, 25 bp, Artificial
  probe
  misc_feature (1)..(25): SEQ ID NO: 1994; WAN024D5N_at; Start 13; Stop 37
gatgaagagagcctgactttgctta

SEQ ID NO: 144501 - DNA, 25 bp, Artificial
  probe
  misc_feature (1)..(25): SEQ ID NO: 1994; WAN024D5N_at; Start 172; Stop 196
gggatttgtaaattcctgcatcagt

SEQ ID NO: 144502 - DNA, 25 bp, Artificial
  probe
  misc_feature (1)..(25): SEQ ID NO: 1994; WAN024D5N_at; Start 189; Stop 213
gcatcagtctatcctttcactaaag

SEQ ID NO: 144503 - DNA, 25 bp, Artificial
  probe
  misc_feature (1)..(25): SEQ ID NO: 1994; WAN024D5N_at; Start 291; Stop 315
caaggttgctccgaaaaatcgaggc

SEQ ID NO: 144504 - DNA, 25 bp, Artificial
  probe
  misc_feature (1)..(25): SEQ ID NO: 1994; WAN024D5N_at; Start 221; Stop 245
cctgcacttttttaaagaattcctg

SEQ ID NO: 144505 - DNA, 25 bp, Artificial
  probe
  misc_feature (1)..(25): SEQ ID NO: 1994; WAN024D5N_at; Start 204; Stop 228
ttcactaaagaaatatccctgcact

SEQ ID NO: 144506 - DNA, 25 bp, Artificial
  probe
  misc_feature (1)..(25): SEQ ID NO: 1994; WAN024D5N_at; Start 104; Stop 128
tttgccagcatctcacaagaaatct

SEQ ID NO: 144507 - DNA, 25 bp, Artificial
  probe
  misc_feature (1)..(25): SEQ ID NO: 1994; WAN024D5N_at; Start 242; Stop 266
cctgcttgattaaaaatcgaaaggc

SEQ ID NO: 144508 - DNA, 25 bp, Artificial
  probe
  misc_feature (1)..(25): SEQ ID NO: 1994; WAN024D5N_at; Start 54; Stop 78
cacgggaatcatctgccatgacagg

SEQ ID NO: 144509 - DNA, 25 bp, Artificial
  probe
  misc_feature (1)..(25): SEQ ID NO: 1994; WAN024D5N_at; Start 39; Stop 63
taaaatcaagaacttcacgggaatc

SEQ ID NO: 144510 - DNA, 25 bp, Artificial
  probe
  misc_feature (1)..(25): SEQ ID NO: 1994; WAN024D5N_at; Start 152; Stop 176
gaactagagcctataggaaagggat

SEQ ID NO: 144511 - DNA, 25 bp, Artificial
  probe
  misc_feature (1)..(25): SEQ ID NO: 1994; WAN024D5N_at; Start 158; Stop 182
gagcctataggaaagggatttgtaa

SEQ ID NO: 144512 - DNA, 25 bp, Artificial
  probe
  misc_feature (1)..(25): SEQ ID NO: 1994; WAN024D5N_at; Start 2; Stop 26
tgccccaaattgatgaagagagcct

SEQ ID NO: 144513 - DNA, 25 bp, Artificial
  probe
  misc_feature (1)..(25): SEQ ID NO: 1994; WAN024D5N_at; Start 178; Stop 202
tgtaaattcctgcatcagtctatcc

SEQ ID NO: 144514 - DNA, 25 bp, Artificial
  probe
  misc_feature (1)..(25): SEQ ID NO: 1994; WAN024D5N_at; Start 111; Stop 135
gcatctcacaagaaatctcattggt

SEQ ID NO: 144515 - DNA, 25 bp, Artificial
  probe
  misc_feature (1)..(25): SEQ ID NO: 1994; WAN024D5N_at; Start 144; Stop 168
gaatgagggaactagagcctatagg

SEQ ID NO: 144516 - DNA, 25 bp, Artificial
  probe
  misc_feature (1)..(25): SEQ ID NO: 1994; WAN024D5N_at; Start 119; Stop 143
caagaaatctcattggtaatgcagt

SEQ ID NO: 144517 - DNA, 25 bp, Artificial
  probe
  misc_feature (1)..(25): SEQ ID NO: 1994; WAN024D5N_at; Start 60; Stop 84
aatcatctgccatgacaggtttgca

SEQ ID NO: 144518 - DNA, 25 bp, Artificial
  probe
  misc_feature (1)..(25): SEQ ID NO: 1994; WAN024D5N_at; Start 90; Stop 114
gagccaaaatcccatttgccagcat

SEQ ID NO: 144519 - DNA, 25 bp, Artificial
  probe
  misc_feature (1)..(25): SEQ ID NO: 1994; WAN024D5N_at; Start 19; Stop 43
gagagcctgactttgcttagtaaaa

SEQ ID NO: 144520 - DNA, 25 bp, Artificial
  probe
  misc_feature (1)..(25): SEQ ID NO: 1994; WAN024D5N_at; Start 258; Stop 282
tcgaaaggcaataaaggaaatcgct

SEQ ID NO: 144521 - DNA, 25 bp, Artificial
  probe
  misc_feature (1)..(25): SEQ ID NO: 1994; WAN024D5N_at; Start 297; Stop 321
tgctccgaaaaatcgaggcgtgtag

SEQ ID NO: 144522 - DNA, 25 bp, Artificial
  probe
  misc_feature (1)..(25): SEQ ID NO: 1994; WAN024D5N_at; Start 138; Stop 162
tgcagtgaatgagggaactagagcc

SEQ ID NO: 144523 - DNA, 25 bp, Artificial
  probe
  misc_feature (1)..(25): SEQ ID NO: 4374; WAN024D5O_at; Start 74; Stop 98
cttgtgagatgctggcaaatgggat

SEQ ID NO: 144524 - DNA, 25 bp, Artificial
  probe
  misc_feature (1)..(25): SEQ ID NO: 4374; WAN024D5O_at; Start 642; Stop 666
tgaagcttcttgcttagcagtctct

SEQ ID NO: 144525 - DNA, 25 bp, Artificial
  probe
  misc_feature (1)..(25): SEQ ID NO: 4374; WAN024D5O_at; Start 700; Stop 724
caaggaatgggattggaagaatttc

SEQ ID NO: 144526 - DNA, 25 bp, Artificial
  probe
  misc_feature (1)..(25): SEQ ID NO: 4374; WAN024D5O_at; Start 727; Stop 751
taccaagtactcaatcagctttcgc

SEQ ID NO: 144527 - DNA, 25 bp, Artificial
  probe
  misc_feature (1)..(25): SEQ ID NO: 4374; WAN024D5O_at; Start 62; Stop 86
ccaatgagatttcttgtgagatgct

SEQ ID NO: 144528 - DNA, 25 bp, Artificial
  probe
  misc_feature (1)..(25): SEQ ID NO: 4374; WAN024D5O_at; Start 772; Stop 796
tggctagataccatcaaaggagagg

SEQ ID NO: 144529 - DNA, 25 bp, Artificial
  probe
  misc_feature (1)..(25): SEQ ID NO: 4374; WAN024D5O_at; Start 100; Stop 124
ttggctctgggatgcaaacctgtca

SEQ ID NO: 144530 - DNA, 25 bp, Artificial
  probe
  misc_feature (1)..(25): SEQ ID NO: 4374; WAN024D5O_at; Start 759; Stop 783
aagagatgaaaattggctagatacc

SEQ ID NO: 144531 - DNA, 25 bp, Artificial
  probe
  misc_feature (1)..(25): SEQ ID NO: 4374; WAN024D5O_at; Start 630; Stop 654
aaagactggttttgaagcttcttgc

SEQ ID NO: 144532 - DNA, 25 bp, Artificial
  probe
  misc_feature (1)..(25): SEQ ID NO: 4374; WAN024D5O_at; Start 347; Stop 371
ttaaaggaaacatgtcagaaattcg

SEQ ID NO: 144533 - DNA, 25 bp, Artificial
  probe
  misc_feature (1)..(25): SEQ ID NO: 4374; WAN024D5O_at; Start 782; Stop 806
ccatcaaaggagaggtttatgaata

SEQ ID NO: 144534 - DNA, 25 bp, Artificial
  probe
  misc_feature (1)..(25): SEQ ID NO: 4374; WAN024D5O_at; Start 25; Stop 49
tttcctataggctctagttccctca

SEQ ID NO: 144535 - DNA, 25 bp, Artificial
  probe
  misc_feature (1)..(25): SEQ ID NO: 4374; WAN024D5O_at; Start 656; Stop 680
tagcagtctcttatctcaatatcgc

SEQ ID NO: 144536 - DNA, 25 bp, Artificial
  probe
  misc_feature (1)..(25): SEQ ID NO: 4374; WAN024D5O_at; Start 90; Stop 114
aaatgggattttggctctgggatgc

SEQ ID NO: 144537 - DNA, 25 bp, Artificial
  probe
  misc_feature (1)..(25): SEQ ID NO: 4374; WAN024D5O_at; Start 454; Stop 478
ttgaaagactggtgtcagacctatc

SEQ ID NO: 144538 - DNA, 25 bp, Artificial
  probe
  misc_feature (1)..(25): SEQ ID NO: 4374; WAN024D5O_at; Start 414; Stop 438
gagtgctaaagatcaagaaacggag

SEQ ID NO: 144539 - DNA, 25 bp, Artificial
  probe
  misc_feature (1)..(25): SEQ ID NO: 4374; WAN024D5O_at; Start 565; Stop 589
ttagactggataacagggacaggag

SEQ ID NO: 144540 - DNA, 25 bp, Artificial
  probe
  misc_feature (1)..(25): SEQ ID NO: 4374; WAN024D5O_at; Start 715; Stop 739
gaagaatttcgttaccaagtactca

SEQ ID NO: 144541 - DNA, 25 bp, Artificial
  probe
  misc_feature (1)..(25): SEQ ID NO: 4374; WAN024D5O_at; Start 359; Stop 383
tgtcagaaattcgaagtcttgttgg

SEQ ID NO: 144542 - DNA, 25 bp, Artificial
  probe
  misc_feature (1)..(25): SEQ ID NO: 4374; WAN024D5O_at; Start 404; Stop 428
gggtcgatgcgagtgctaaagatca

SEQ ID NO: 144543 - DNA, 25 bp, Artificial
  probe
  misc_feature (1)..(25): SEQ ID NO: 4374; WAN024D5O_at; Start 32; Stop 56
taggctctagttccctcattcactg

SEQ ID NO: 144544 - DNA, 25 bp, Artificial
  probe
  misc_feature (1)..(25): SEQ ID NO: 4374; WAN024D5O_at; Start 443; Stop 467
tgcttcaagtcttgaaagactggtg

SEQ ID NO: 144545 - DNA, 25 bp, Artificial
  probe
  misc_feature (1)..(25): SEQ ID NO: 4374; WAN024D5O_at; Start 621; Stop 645
cagccaaggaaagactggttttgaa

SEQ ID NO: 144546 - DNA, 25 bp, Artificial
  probe
  misc_feature (1)..(25): SEQ ID NO: 4374; WAN024D5O_at; Start 614; Stop 638
tttttctcagccaaggaaagactgg

SEQ ID NO: 144547 - DNA, 25 bp, Artificial
  probe
  misc_feature (1)..(25): SEQ ID NO: 4374; WAN024D5O_at; Start 427; Stop 451
caagaaacggaggatttgcttcaag

SEQ ID NO: 144548 - DNA, 25 bp, Artificial
  probe
  misc_feature (1)..(25): SEQ ID NO: 4374; WAN024D5O_at; Start 687; Stop 711
gaaaatagttgttcaaggaatggga

SEQ ID NO: 144549 - DNA, 25 bp, Artificial
  probe
  misc_feature (1)..(25): SEQ ID NO: 4374; WAN024D5O_at; Start 368; Stop 392
ttcgaagtcttgttggattaaagca

SEQ ID NO: 144550 - DNA, 25 bp, Artificial
  probe
  misc_feature (1)..(25): SEQ ID NO: 4374; WAN024D5O_at; Start 677; Stop 701
tcgctgctgagaaaatagttgttca

SEQ ID NO: 144551 - DNA, 25 bp, Artificial
  probe
  misc_feature (1)..(25): SEQ ID NO: 4374; WAN024D5O_at; Start 752; Stop 776
tcctaagaagagatgaaaattggct

SEQ ID NO: 144552 - DNA, 25 bp, Artificial
  probe
  misc_feature (1)..(25): SEQ ID NO: 4374; WAN024D5O_at; Start 290; Stop 314
cttcatccattcgtaagagcttagt

SEQ ID NO: 144553 - DNA, 25 bp, Artificial
  probe
  misc_feature (1)..(25): SEQ ID NO: 4374; WAN024D5O_at; Start 104; Stop 128
ctctgggatgcaaacctgtcatggc

SEQ ID NO: 144554 - DNA, 25 bp, Artificial
  probe
  misc_feature (1)..(25): SEQ ID NO: 4374; WAN024D5O_at; Start 671; Stop 695
tcaatatcgctgctgagaaaatagt

SEQ ID NO: 144555 - DNA, 25 bp, Artificial
  probe
  misc_feature (1)..(25): SEQ ID NO: 4374; WAN024D5O_at; Start 739; Stop 763
aatcagctttcgctcctaagaagag

SEQ ID NO: 144556 - DNA, 25 bp, Artificial
  probe
  misc_feature (1)..(25): SEQ ID NO: 4374; WAN024D5O_at; Start 562; Stop 586
gaattagactggataacagggacag

SEQ ID NO: 144557 - DNA, 25 bp, Artificial
  probe
  misc_feature (1)..(25): SEQ ID NO: 5967; WAN024D5P_at; Start 179; Stop 203
cagcctttatccgtatgacgactca

SEQ ID NO: 144558 - DNA, 25 bp, Artificial
  probe
  misc_feature (1)..(25): SEQ ID NO: 5967; WAN024D5P_at; Start 422; Stop 446
ccttgattggtacagcgatttcctt

SEQ ID NO: 144559 - DNA, 25 bp, Artificial
  probe
  misc_feature (1)..(25): SEQ ID NO: 5967; WAN024D5P_at; Start 413; Stop 437
tcggagcaaccttgattggtacagc

SEQ ID NO: 144560 - DNA, 25 bp, Artificial
  probe
  misc_feature (1)..(25): SEQ ID NO: 5967; WAN024D5P_at; Start 235; Stop 259
acttttggagcccttctagcaggtc

SEQ ID NO: 144561 - DNA, 25 bp, Artificial
  probe
  misc_feature (1)..(25): SEQ ID NO: 5967; WAN024D5P_at; Start 184; Stop 208
tttatccgtatgacgactcaaggga

SEQ ID NO: 144562 - DNA, 25 bp, Artificial
  probe
  misc_feature (1)..(25): SEQ ID NO: 5967; WAN024D5P_at; Start 61; Stop 85
gatgtagtccttacacctatctttc

SEQ ID NO: 144563 - DNA, 25 bp, Artificial
  probe
  misc_feature (1)..(25): SEQ ID NO: 5967; WAN024D5P_at; Start 251; Stop 275
tagcaggtctcttttataagtacgg

SEQ ID NO: 144564 - DNA, 25 bp, Artificial
  probe
  misc_feature (1)..(25): SEQ ID NO: 5967; WAN024D5P_at; Start 254; Stop 278
caggtctcttttataagtacggtcg

SEQ ID NO: 144565 - DNA, 25 bp, Artificial
  probe
  misc_feature (1)..(25): SEQ ID NO: 5967; WAN024D5P_at; Start 410; Stop 434
ttttcggagcaaccttgattggtac

SEQ ID NO: 144566 - DNA, 25 bp, Artificial
  probe
  misc_feature (1)..(25): SEQ ID NO: 5967; WAN024D5P_at; Start 195; Stop 219
gacgactcaagggattccgccttta

SEQ ID NO: 144567 - DNA, 25 bp, Artificial
  probe
  misc_feature (1)..(25): SEQ ID NO: 5967; WAN024D5P_at; Start 468; Stop 492
caagcaggaattctttaaaaaagtg

SEQ ID NO: 144568 - DNA, 25 bp, Artificial
  probe
  misc_feature (1)..(25): SEQ ID NO: 5967; WAN024D5P_at; Start 416; Stop 440
gagcaaccttgattggtacagcgat

SEQ ID NO: 144569 - DNA, 25 bp, Artificial
  probe
  misc_feature (1)..(25): SEQ ID NO: 5967; WAN024D5P_at; Start 224; Stop 248
tcacaggagcgacttttggagccct

SEQ ID NO: 144570 - DNA, 25 bp, Artificial
  probe
  misc_feature (1)..(25): SEQ ID NO: 5967; WAN024D5P_at; Start 107; Stop 131
tgtccagtgtagtcaatattctagc

SEQ ID NO: 144571 - DNA, 25 bp, Artificial
  probe
  misc_feature (1)..(25): SEQ ID NO: 5967; WAN024D5P_at; Start 222; Stop 246
tctcacaggagcgacttttggagcc

SEQ ID NO: 144572 - DNA, 25 bp, Artificial
  probe
  misc_feature (1)..(25): SEQ ID NO: 5967; WAN024D5P_at; Start 54; Stop 78
tgcccttgatgtagtccttacacct

SEQ ID NO: 144573 - DNA, 25 bp, Artificial
  probe
  misc_feature (1)..(25): SEQ ID NO: 5967; WAN024D5P_at; Start 419; Stop 443
caaccttgattggtacagcgatttc

SEQ ID NO: 144574 - DNA, 25 bp, Artificial
  probe
  misc_feature (1)..(25): SEQ ID NO: 5967; WAN024D5P_at; Start 103; Stop 127
ccgatgtccagtgtagtcaatattc

SEQ ID NO: 144575 - DNA, 25 bp, Artificial
  probe
  misc_feature (1)..(25): SEQ ID NO: 5967; WAN024D5P_at; Start 428; Stop 452
ttggtacagcgatttcctttattgc

SEQ ID NO: 144576 - DNA, 25 bp, Artificial
  probe
  misc_feature (1)..(25): SEQ ID NO: 5967; WAN024D5P_at; Start 227; Stop 251
caggagcgacttttggagcccttct

SEQ ID NO: 144577 - DNA, 25 bp, Artificial
  probe
  misc_feature (1)..(25): SEQ ID NO: 5967; WAN024D5P_at; Start 192; Stop 216
tatgacgactcaagggattccgcct

SEQ ID NO: 144578 - DNA, 25 bp, Artificial
  probe
  misc_feature (1)..(25): SEQ ID NO: 5967; WAN024D5P_at; Start 232; Stop 256
gcgacttttggagcccttctagcag

SEQ ID NO: 144579 - DNA, 25 bp, Artificial
  probe
  misc_feature (1)..(25): SEQ ID NO: 5967; WAN024D5P_at; Start 458; Stop 482
gatttttaatcaagcaggaattctt

SEQ ID NO: 144580 - DNA, 25 bp, Artificial
  probe
  misc_feature (1)..(25): SEQ ID NO: 5967; WAN024D5P_at; Start 404; Stop 428
ctcgatttttcggagcaaccttgat

SEQ ID NO: 144581 - DNA, 25 bp, Artificial
  probe
  misc_feature (1)..(25): SEQ ID NO: 5967; WAN024D5P_at; Start 238; Stop 262
tttggagcccttctagcaggtctct

SEQ ID NO: 144582 - DNA, 25 bp, Artificial
  probe
  misc_feature (1)..(25): SEQ ID NO: 5967; WAN024D5P_at; Start 96; Stop 120
aatggcaccgatgtccagtgtagtc

SEQ ID NO: 144583 - DNA, 25 bp, Artificial
  probe
  misc_feature (1)..(25): SEQ ID NO: 5967; WAN024D5P_at; Start 140; Stop 164
tgatgggacctgtttatgccttggc

SEQ ID NO: 144584 - DNA, 25 bp, Artificial
  probe
  misc_feature (1)..(25): SEQ ID NO: 5967; WAN024D5P_at; Start 90; Stop 114
tgagggaatggcaccgatgtccagt

SEQ ID NO: 144585 - DNA, 25 bp, Artificial
  probe
  misc_feature (1)..(25): SEQ ID NO: 5967; WAN024D5P_at; Start 407; Stop 431
gatttttcggagcaaccttgattgg

SEQ ID NO: 144586 - DNA, 25 bp, Artificial
  probe
  misc_feature (1)..(25): SEQ ID NO: 5967; WAN024D5P_at; Start 242; Stop 266
gagcccttctagcaggtctctttta

SEQ ID NO: 144587 - DNA, 25 bp, Artificial
  probe
  misc_feature (1)..(25): SEQ ID NO: 5967; WAN024D5P_at; Start 230; Stop 254
gagcgacttttggagcccttctagc

SEQ ID NO: 144588 - DNA, 25 bp, Artificial
  probe
  misc_feature (1)..(25): SEQ ID NO: 5967; WAN024D5P_at; Start 189; Stop 213
ccgtatgacgactcaagggattccg

SEQ ID NO: 144589 - DNA, 25 bp, Artificial
  probe
  misc_feature (1)..(25): SEQ ID NO: 5967; WAN024D5P_at; Start 99; Stop 123
ggcaccgatgtccagtgtagtcaat

SEQ ID NO: 144590 - DNA, 25 bp, Artificial
  probe
  misc_feature (1)..(25): SEQ ID NO: 5967; WAN024D5P_at; Start 134; Stop 158
gaatcatgatgggacctgtttatgc

SEQ ID NO: 144591 - DNA, 25 bp, Artificial
  probe
  misc_feature (1)..(25): SEQ ID NO: 800; WAN024D5Q_at; Start 126; Stop 150
gagaacaggttatttgactaaagaa

SEQ ID NO: 144592 - DNA, 25 bp, Artificial
  probe
  misc_feature (1)..(25): SEQ ID NO: 800; WAN024D5Q_at; Start 287; Stop 311
ctcatggtaattgggcaacggttgg

SEQ ID NO: 144593 - DNA, 25 bp, Artificial
  probe
  misc_feature (1)..(25): SEQ ID NO: 800; WAN024D5Q_at; Start 356; Stop 380
tatcagctgccatttcaggtagttg

SEQ ID NO: 144594 - DNA, 25 bp, Artificial
  probe
  misc_feature (1)..(25): SEQ ID NO: 800; WAN024D5Q_at; Start 364; Stop 388
gccatttcaggtagttggtcaccaa

SEQ ID NO: 144595 - DNA, 25 bp, Artificial
  probe
  misc_feature (1)..(25): SEQ ID NO: 800; WAN024D5Q_at; Start 153; Stop 177
tgaaggtgcggaatatatcatgaac

SEQ ID NO: 144596 - DNA, 25 bp, Artificial
  probe
  misc_feature (1)..(25): SEQ ID NO: 800; WAN024D5Q_at; Start 319; Stop 343
tatgcagcagatatggcaagacaaa

SEQ ID NO: 144597 - DNA, 25 bp, Artificial
  probe
  misc_feature (1)..(25): SEQ ID NO: 800; WAN024D5Q_at; Start 254; Stop 278
gagaatcgttaacaacctgtggtac

SEQ ID NO: 144598 - DNA, 25 bp, Artificial
  probe
  misc_feature (1)..(25): SEQ ID NO: 800; WAN024D5Q_at; Start 68; Stop 92
tcgtagaagcaaatcagataggtgc

SEQ ID NO: 144599 - DNA, 25 bp, Artificial
  probe
  misc_feature (1)..(25): SEQ ID NO: 800; WAN024D5Q_at; Start 30; Stop 54
tattcctgttttaatgataagtgct

SEQ ID NO: 144600 - DNA, 25 bp, Artificial
  probe
  misc_feature (1)..(25): SEQ ID NO: 800; WAN024D5Q_at; Start 283; Stop 307
tcaactcatggtaattgggcaacgg

SEQ ID NO: 144601 - DNA, 25 bp, Artificial
  probe
  misc_feature (1)..(25): SEQ ID NO: 800; WAN024D5Q_at; Start 246; Stop 270
tcgtagtggagaatcgttaacaacc

SEQ ID NO: 144602 - DNA, 25 bp, Artificial
  probe
  misc_feature (1)..(25): SEQ ID NO: 800; WAN024D5Q_at; Start 302; Stop 326
caacggttggctatgtttatgcagc

SEQ ID NO: 144603 - DNA, 25 bp, Artificial
  probe
  misc_feature (1)..(25): SEQ ID NO: 800; WAN024D5Q_at; Start 209; Stop 233
ctgttaagcatcgtatagtaaattc

SEQ ID NO: 144604 - DNA, 25 bp, Artificial
  probe
  misc_feature (1)..(25): SEQ ID NO: 800; WAN024D5Q_at; Start 139; Stop 163
ttgactaaagaaaatgaaggtgcgg

SEQ ID NO: 144605 - DNA, 25 bp, Artificial
  probe
  misc_feature (1)..(25): SEQ ID NO: 800; WAN024D5Q_at; Start 350; Stop 374
gggatttatcagctgccatttcagg

SEQ ID NO: 144606 - DNA, 25 bp, Artificial
  probe
  misc_feature (1)..(25): SEQ ID NO: 800; WAN024D5Q_at; Start 13; Stop 37
aaattattgaaaatggttattcctg

SEQ ID NO: 144607 - DNA, 25 bp, Artificial
  probe
  misc_feature (1)..(25): SEQ ID NO: 800; WAN024D5Q_at; Start 271; Stop 295
tgtggtactcgttcaactcatggta

SEQ ID NO: 144608 - DNA, 25 bp, Artificial
  probe
  misc_feature (1)..(25): SEQ ID NO: 800; WAN024D5Q_at; Start 41; Stop 65
taatgataagtgctgttggaactac

SEQ ID NO: 144609 - DNA, 25 bp, Artificial
  probe
  misc_feature (1)..(25): SEQ ID NO: 800; WAN024D5Q_at; Start 369; Stop 393
ttcaggtagttggtcaccaaattaa

SEQ ID NO: 144610 - DNA, 25 bp, Artificial
  probe
  misc_feature (1)..(25): SEQ ID NO: 800; WAN024D5Q_at; Start 49; Stop 73
agtgctgttggaactactttcgtag

SEQ ID NO: 144611 - DNA, 25 bp, Artificial
  probe
  misc_feature (1)..(25): SEQ ID NO: 800; WAN024D5Q_at; Start 157; Stop 181
ggtgcggaatatatcatgaacttaa

SEQ ID NO: 144612 - DNA, 25 bp, Artificial
  probe
  misc_feature (1)..(25): SEQ ID NO: 800; WAN024D5Q_at; Start 232; Stop 256
tctaatggagaagctcgtagtggag

SEQ ID NO: 144613 - DNA, 25 bp, Artificial
  probe
  misc_feature (1)..(25): SEQ ID NO: 800; WAN024D5Q_at; Start 187; Stop 211
tgtagaaatttacatcccatgactg

SEQ ID NO: 144614 - DNA, 25 bp, Artificial
  probe
  misc_feature (1)..(25): SEQ ID NO: 800; WAN024D5Q_at; Start 58; Stop 82
ggaactactttcgtagaagcaaatc

SEQ ID NO: 144615 - DNA, 25 bp, Artificial
  probe
  misc_feature (1)..(25): SEQ ID NO: 800; WAN024D5Q_at; Start 111; Stop 135
tactaccagttataagagaacaggt

SEQ ID NO: 144616 - DNA, 25 bp, Artificial
  probe
  misc_feature (1)..(25): SEQ ID NO: 800; WAN024D5Q_at; Start 202; Stop 226
cccatgactgttaagcatcgtatag

SEQ ID NO: 144617 - DNA, 25 bp, Artificial
  probe
  misc_feature (1)..(25): SEQ ID NO: 800; WAN024D5Q_at; Start 170; Stop 194
tcatgaacttaaatccttgtagaaa

SEQ ID NO: 144618 - DNA, 25 bp, Artificial
  probe
  misc_feature (1)..(25): SEQ ID NO: 800; WAN024D5Q_at; Start 197; Stop 221
tacatcccatgactgttaagcatcg

SEQ ID NO: 144619 - DNA, 25 bp, Artificial
  probe
  misc_feature (1)..(25): SEQ ID NO: 800; WAN024D5Q_at; Start 312; Stop 336
ctatgtttatgcagcagatatggca

SEQ ID NO: 144620 - DNA, 25 bp, Artificial
  probe
  misc_feature (1)..(25): SEQ ID NO: 800; WAN024D5Q_at; Start 330; Stop 354
tatggcaagacaaaattggtgggat

SEQ ID NO: 144621 - DNA, 25 bp, Artificial
  probe
  misc_feature (1)..(25): SEQ ID NO: 800; WAN024D5Q_at; Start 266; Stop 290
caacctgtggtactcgttcaactca

SEQ ID NO: 144622 - DNA, 25 bp, Artificial
  probe
  misc_feature (1)..(25): SEQ ID NO: 800; WAN024D5Q_at; Start 342; Stop 366
aaattggtgggatttatcagctgcc

SEQ ID NO: 144623 - DNA, 25 bp, Artificial
  probe
  misc_feature (1)..(25): SEQ ID NO: 800; WAN024D5Q_at; Start 224; Stop 248
tagtaaattctaatggagaagctcg

SEQ ID NO: 144624 - DNA, 25 bp, Artificial
  probe
  misc_feature (1)..(25): SEQ ID NO: 800; WAN024D5Q_at; Start 77; Stop 101
caaatcagataggtgcttttagtaa

SEQ ID NO: 144625 - DNA, 25 bp, Artificial
  probe
  misc_feature (1)..(25): SEQ ID NO: 1662; WAN024D5R_at; Start 607; Stop 631
gtcgaaaatggacatatacaaatgt

SEQ ID NO: 144626 - DNA, 25 bp, Artificial
  probe
  misc_feature (1)..(25): SEQ ID NO: 1662; WAN024D5R_at; Start 220; Stop 244
caggatgcaggaattttaattgaaa

SEQ ID NO: 144627 - DNA, 25 bp, Artificial
  probe
  misc_feature (1)..(25): SEQ ID NO: 1662; WAN024D5R_at; Start 413; Stop 437
tggccttgattcaagcctttatttc

SEQ ID NO: 144628 - DNA, 25 bp, Artificial
  probe
  misc_feature (1)..(25): SEQ ID NO: 1662; WAN024D5R_at; Start 439; Stop 463
tctccttctatactctttctcgatg

SEQ ID NO: 144629 - DNA, 25 bp, Artificial
  probe
  misc_feature (1)..(25): SEQ ID NO: 1662; WAN024D5R_at; Start 397; Stop 421
ggaacaaagcaaaaaatggccttga

SEQ ID NO: 144630 - DNA, 25 bp, Artificial
  probe
  misc_feature (1)..(25): SEQ ID NO: 1662; WAN024D5R_at; Start 240; Stop 264
tgaaaaagtcgagtttttatctcat

SEQ ID NO: 144631 - DNA, 25 bp, Artificial
  probe
  misc_feature (1)..(25): SEQ ID NO: 1662; WAN024D5R_at; Start 338; Stop 362
ggattcaatactatgatttacagga

SEQ ID NO: 144632 - DNA, 25 bp, Artificial
  probe
  misc_feature (1)..(25): SEQ ID NO: 1662; WAN024D5R_at; Start 580; Stop 604
tcagacctttgtacagatgtattag

SEQ ID NO: 144633 - DNA, 25 bp, Artificial
  probe
  misc_feature (1)..(25): SEQ ID NO: 1662; WAN024D5R_at; Start 46; Stop 70
cctattttaaatcagttgaatttgg

SEQ ID NO: 144634 - DNA, 25 bp, Artificial
  probe
  misc_feature (1)..(25): SEQ ID NO: 1662; WAN024D5R_at; Start 449; Stop 473
tactctttctcgatgaacctatgaa

SEQ ID NO: 144635 - DNA, 25 bp, Artificial
  probe
  misc_feature (1)..(25): SEQ ID NO: 1662; WAN024D5R_at; Start 405; Stop 429
gcaaaaaatggccttgattcaagcc

SEQ ID NO: 144636 - DNA, 25 bp, Artificial
  probe
  misc_feature (1)..(25): SEQ ID NO: 1662; WAN024D5R_at; Start 269; Stop 293
ccctgagagaaaatttggaactgtt

SEQ ID NO: 144637 - DNA, 25 bp, Artificial
  probe
  misc_feature (1)..(25): SEQ ID NO: 1662; WAN024D5R_at; Start 538; Stop 562
aatggtctggttatcctgacgtcgc

SEQ ID NO: 144638 - DNA, 25 bp, Artificial
  probe
  misc_feature (1)..(25): SEQ ID NO: 1662; WAN024D5R_at; Start 76; Stop 100
caatcaggaaaaatttatggactta

SEQ ID NO: 144639 - DNA, 25 bp, Artificial
  probe
  misc_feature (1)..(25): SEQ ID NO: 1662; WAN024D5R_at; Start 6; Stop 30
acttgaaattataaatggacagaaa

SEQ ID NO: 144640 - DNA, 25 bp, Artificial
  probe
  misc_feature (1)..(25): SEQ ID NO: 1662; WAN024D5R_at; Start 21; Stop 45
tggacagaaaatttatgggaaaaga

SEQ ID NO: 144641 - DNA, 25 bp, Artificial
  probe
  misc_feature (1)..(25): SEQ ID NO: 1662; WAN024D5R_at; Start 552; Stop 576
cctgacgtcgcacatatcggaagat

SEQ ID NO: 144642 - DNA, 25 bp, Artificial
  probe
  misc_feature (1)..(25): SEQ ID NO: 1662; WAN024D5R_at; Start 463; Stop 487
gaacctatgaatgctttggatgaga

SEQ ID NO: 144643 - DNA, 25 bp, Artificial
  probe
  misc_feature (1)..(25): SEQ ID NO: 1662; WAN024D5R_at; Start 531; Stop 555
aaaagaaaatggtctggttatcctg

SEQ ID NO: 144644 - DNA, 25 bp, Artificial
  probe
  misc_feature (1)..(25): SEQ ID NO: 1662; WAN024D5R_at; Start 62; Stop 86
tgaatttggtgtttcaatcaggaaa

SEQ ID NO: 144645 - DNA, 25 bp, Artificial
  probe
  misc_feature (1)..(25): SEQ ID NO: 1662; WAN024D5R_at; Start 257; Stop 281
tatctcatttatccctgagagaaaa

SEQ ID NO: 144646 - DNA, 25 bp, Artificial
  probe
  misc_feature (1)..(25): SEQ ID NO: 1662; WAN024D5R_at; Start 543; Stop 567
tctggttatcctgacgtcgcacata

SEQ ID NO: 144647 - DNA, 25 bp, Artificial
  probe
  misc_feature (1)..(25): SEQ ID NO: 1662; WAN024D5R_at; Start 284; Stop 308
tggaactgttaaggtatttttcatc

SEQ ID NO: 144648 - DNA, 25 bp, Artificial
  probe
  misc_feature (1)..(25): SEQ ID NO: 1662; WAN024D5R_at; Start 504; Stop 528
caaacaggtcattttatcttacctg

SEQ ID NO: 144649 - DNA, 25 bp, Artificial
  probe
  misc_feature (1)..(25): SEQ ID NO: 1662; WAN024D5R_at; Start 207; Stop 231
aaatcattatattcaggatgcagga

SEQ ID NO: 144650 - DNA, 25 bp, Artificial
  probe
  misc_feature (1)..(25): SEQ ID NO: 1662; WAN024D5R_at; Start 566; Stop 590
tatcggaagatatttcagacctttg

SEQ ID NO: 144651 - DNA, 25 bp, Artificial
  probe
  misc_feature (1)..(25): SEQ ID NO: 1662; WAN024D5R_at; Start 93; Stop 117
tggacttaaaggtgataatggatct

SEQ ID NO: 144652 - DNA, 25 bp, Artificial
  probe
  misc_feature (1)..(25): SEQ ID NO: 1662; WAN024D5R_at; Start 346; Stop 370
tactatgatttacaggaatttgaag

SEQ ID NO: 144653 - DNA, 25 bp, Artificial
  probe
  misc_feature (1)..(25): SEQ ID NO: 1662; WAN024D5R_at; Start 159; Stop 183
gcttgacaaaggaaaagttcttcaa

SEQ ID NO: 144654 - DNA, 25 bp, Artificial
  probe
  misc_feature (1)..(25): SEQ ID NO: 1662; WAN024D5R_at; Start 317; Stop 341
cggaaaaaagaattgcctattggat

SEQ ID NO: 144655 - DNA, 25 bp, Artificial
  probe
  misc_feature (1)..(25): SEQ ID NO: 1662; WAN024D5R_at; Start 326; Stop 350
gaattgcctattggattcaatacta

SEQ ID NO: 144656 - DNA, 25 bp, Artificial
  probe
  misc_feature (1)..(25): SEQ ID NO: 1662; WAN024D5R_at; Start 574; Stop 598
gatatttcagacctttgtacagatg

SEQ ID NO: 144657 - DNA, 25 bp, Artificial
  probe
  misc_feature (1)..(25): SEQ ID NO: 1662; WAN024D5R_at; Start 151; Stop 175
tatattaagcttgacaaaggaaaag

SEQ ID NO: 144658 - DNA, 25 bp, Artificial
  probe
  misc_feature (1)..(25): SEQ ID NO: 1662; WAN024D5R_at; Start 593; Stop 617
cagatgtattagttgtcgaaaatgg

SEQ ID NO: 144659 - DNA, 25 bp, Artificial
  probe
  misc_feature (1)..(25): SEQ ID NO: 6332; WAN024D5S_at; Start 35; Stop 59
tttggactgctttaatttgtgggaa

SEQ ID NO: 144660 - DNA, 25 bp, Artificial
  probe
  misc_feature (1)..(25): SEQ ID NO: 6332; WAN024D5S_at; Start 204; Stop 228
caatgggataatctcatctactgat

SEQ ID NO: 144661 - DNA, 25 bp, Artificial
  probe
  misc_feature (1)..(25): SEQ ID NO: 6332; WAN024D5S_at; Start 150; Stop 174
gacttcgcgctctgcttctgtcaat

SEQ ID NO: 144662 - DNA, 25 bp, Artificial
  probe
  misc_feature (1)..(25): SEQ ID NO: 6332; WAN024D5S_at; Start 158; Stop 182
gctctgcttctgtcaattctgggaa

SEQ ID NO: 144663 - DNA, 25 bp, Artificial
  probe
  misc_feature (1)..(25): SEQ ID NO: 6332; WAN024D5S_at; Start 64; Stop 88
ttttctgtcacaaattcatcatctg

SEQ ID NO: 144664 - DNA, 25 bp, Artificial
  probe
  misc_feature (1)..(25): SEQ ID NO: 6332; WAN024D5S_at; Start 189; Stop 213
gaagaaaagatctgtcaatgggata

SEQ ID NO: 144665 - DNA, 25 bp, Artificial
  probe
  misc_feature (1)..(25): SEQ ID NO: 6332; WAN024D5S_at; Start 180; Stop 204
gaaatctgagaagaaaagatctgtc

SEQ ID NO: 144666 - DNA, 25 bp, Artificial
  probe
  misc_feature (1)..(25): SEQ ID NO: 6332; WAN024D5S_at; Start 129; Stop 153
tggaactgtttcacccgtcatgact

SEQ ID NO: 144667 - DNA, 25 bp, Artificial
  probe
  misc_feature (1)..(25): SEQ ID NO: 6332; WAN024D5S_at; Start 184; Stop 208
tctgagaagaaaagatctgtcaatg

SEQ ID NO: 144668 - DNA, 25 bp, Artificial
  probe
  misc_feature (1)..(25): SEQ ID NO: 6332; WAN024D5S_at; Start 110; Stop 134
tgaatgcttcaagaactgttggaac

SEQ ID NO: 144669 - DNA, 25 bp, Artificial
  probe
  misc_feature (1)..(25): SEQ ID NO: 6332; WAN024D5S_at; Start 222; Stop 246
tactgatttcatttgtggtttatag

SEQ ID NO: 144670 - DNA, 25 bp, Artificial
  probe
  misc_feature (1)..(25): SEQ ID NO: 6332; WAN024D5S_at; Start 163; Stop 187
gcttctgtcaattctgggaaatctg

SEQ ID NO: 144671 - DNA, 25 bp, Artificial
  probe
  misc_feature (1)..(25): SEQ ID NO: 6332; WAN024D5S_at; Start 79; Stop 103
tcatcatctgtcatcgcttcaagtt

SEQ ID NO: 144672 - DNA, 25 bp, Artificial
  probe
  misc_feature (1)..(25): SEQ ID NO: 6332; WAN024D5S_at; Start 70; Stop 94
gtcacaaattcatcatctgtcatcg

SEQ ID NO: 144673 - DNA, 25 bp, Artificial
  probe
  misc_feature (1)..(25): SEQ ID NO: 6332; WAN024D5S_at; Start 192; Stop 216
gaaaagatctgtcaatgggataatc

SEQ ID NO: 144674 - DNA, 25 bp, Artificial
  probe
  misc_feature (1)..(25): SEQ ID NO: 6332; WAN024D5S_at; Start 176; Stop 200
ctgggaaatctgagaagaaaagatc

SEQ ID NO: 144675 - DNA, 25 bp, Artificial
  probe
  misc_feature (1)..(25): SEQ ID NO: 6332; WAN024D5S_at; Start 135; Stop 159
tgtttcacccgtcatgacttcgcgc

SEQ ID NO: 144676 - DNA, 25 bp, Artificial
  probe
  misc_feature (1)..(25): SEQ ID NO: 6332; WAN024D5S_at; Start 39; Stop 63
gactgctttaatttgtgggaagata

SEQ ID NO: 144677 - DNA, 25 bp, Artificial
  probe
  misc_feature (1)..(25): SEQ ID NO: 6332; WAN024D5S_at; Start 208; Stop 232
gggataatctcatctactgatttca

SEQ ID NO: 144678 - DNA, 25 bp, Artificial
  probe
  misc_feature (1)..(25): SEQ ID NO: 6332; WAN024D5S_at; Start 75; Stop 99
aaattcatcatctgtcatcgcttca

SEQ ID NO: 144679 - DNA, 25 bp, Artificial
  probe
  misc_feature (1)..(25): SEQ ID NO: 6332; WAN024D5S_at; Start 136; Stop 160
gtttcacccgtcatgacttcgcgct

SEQ ID NO: 144680 - DNA, 25 bp, Artificial
  probe
  misc_feature (1)..(25): SEQ ID NO: 6332; WAN024D5S_at; Start 171; Stop 195
caattctgggaaatctgagaagaaa

SEQ ID NO: 144681 - DNA, 25 bp, Artificial
  probe
  misc_feature (1)..(25): SEQ ID NO: 6332; WAN024D5S_at; Start 87; Stop 111
tgtcatcgcttcaagttttgctttg

SEQ ID NO: 144682 - DNA, 25 bp, Artificial
  probe
  misc_feature (1)..(25): SEQ ID NO: 6332; WAN024D5S_at; Start 114; Stop 138
tgcttcaagaactgttggaactgtt

SEQ ID NO: 144683 - DNA, 25 bp, Artificial
  probe
  misc_feature (1)..(25): SEQ ID NO: 6332; WAN024D5S_at; Start 20; Stop 44
taatacctgtttctttttggactgc

SEQ ID NO: 144684 - DNA, 25 bp, Artificial
  probe
  misc_feature (1)..(25): SEQ ID NO: 6332; WAN024D5S_at; Start 147; Stop 171
catgacttcgcgctctgcttctgtc

SEQ ID NO: 144685 - DNA, 25 bp, Artificial
  probe
  misc_feature (1)..(25): SEQ ID NO: 6332; WAN024D5S_at; Start 98; Stop 122
caagttttgctttgaatgcttcaag

SEQ ID NO: 144686 - DNA, 25 bp, Artificial
  probe
  misc_feature (1)..(25): SEQ ID NO: 6332; WAN024D5S_at; Start 116; Stop 140
cttcaagaactgttggaactgtttc

SEQ ID NO: 144687 - DNA, 25 bp, Artificial
  probe
  misc_feature (1)..(25): SEQ ID NO: 6332; WAN024D5S_at; Start 215; Stop 239
tctcatctactgatttcatttgtgg

SEQ ID NO: 144688 - DNA, 25 bp, Artificial
  probe
  misc_feature (1)..(25): SEQ ID NO: 6332; WAN024D5S_at; Start 199; Stop 223
tctgtcaatgggataatctcatcta

SEQ ID NO: 144689 - DNA, 25 bp, Artificial
  probe
  misc_feature (1)..(25): SEQ ID NO: 6332; WAN024D5S_at; Start 83; Stop 107
catctgtcatcgcttcaagttttgc

SEQ ID NO: 144690 - DNA, 25 bp, Artificial
  probe
  misc_feature (1)..(25): SEQ ID NO: 6332; WAN024D5S_at; Start 155; Stop 179
cgcgctctgcttctgtcaattctgg

SEQ ID NO: 144691 - DNA, 25 bp, Artificial
  probe
  misc_feature (1)..(25): SEQ ID NO: 6332; WAN024D5S_at; Start 166; Stop 190
tctgtcaattctgggaaatctgaga

SEQ ID NO: 144692 - DNA, 25 bp, Artificial
  probe
  misc_feature (1)..(25): SEQ ID NO: 6332; WAN024D5S_at; Start 53; Stop 77
gtgggaagatattttctgtcacaaa

SEQ ID NO: 144693 - DNA, 25 bp, Artificial
  probe
  misc_feature (1)..(25): SEQ ID NO: 3933; WAN024D5T_at; Start 216; Stop 240
ccatatcatgccacttgtagatacc

SEQ ID NO: 144694 - DNA, 25 bp, Artificial
  probe
  misc_feature (1)..(25): SEQ ID NO: 3933; WAN024D5T_at; Start 203; Stop 227
atatcgcctttgaccatatcatgcc

SEQ ID NO: 144695 - DNA, 25 bp, Artificial
  probe
  misc_feature (1)..(25): SEQ ID NO: 3933; WAN024D5T_at; Start 206; Stop 230
tcgcctttgaccatatcatgccact

SEQ ID NO: 144696 - DNA, 25 bp, Artificial
  probe
  misc_feature (1)..(25): SEQ ID NO: 3933; WAN024D5T_at; Start 181; Stop 205
gatattgccaccttcaaattcgata

SEQ ID NO: 144697 - DNA, 25 bp, Artificial
  probe
  misc_feature (1)..(25): SEQ ID NO: 3933; WAN024D5T_at; Start 81; Stop 105
cacggataacatgagagatttgcat

SEQ ID NO: 144698 - DNA, 25 bp, Artificial
  probe
  misc_feature (1)..(25): SEQ ID NO: 3933; WAN024D5T_at; Start 194; Stop 218
tcaaattcgatatcgcctttgacca

SEQ ID NO: 144699 - DNA, 25 bp, Artificial
  probe
  misc_feature (1)..(25): SEQ ID NO: 3933; WAN024D5T_at; Start 213; Stop 237
tgaccatatcatgccacttgtagat

SEQ ID NO: 144700 - DNA, 25 bp, Artificial
  probe
  misc_feature (1)..(25): SEQ ID NO: 3933; WAN024D5T_at; Start 178; Stop 202
accgatattgccaccttcaaattcg

SEQ ID NO: 144701 - DNA, 25 bp, Artificial
  probe
  misc_feature (1)..(25): SEQ ID NO: 3933; WAN024D5T_at; Start 209; Stop 233
cctttgaccatatcatgccacttgt

SEQ ID NO: 144702 - DNA, 25 bp, Artificial
  probe
  misc_feature (1)..(25): SEQ ID NO: 3933; WAN024D5T_at; Start 202; Stop 226
gatatcgcctttgaccatatcatgc

SEQ ID NO: 144703 - DNA, 25 bp, Artificial
  probe
  misc_feature (1)..(25): SEQ ID NO: 3933; WAN024D5T_at; Start 208; Stop 232
gcctttgaccatatcatgccacttg

SEQ ID NO: 144704 - DNA, 25 bp, Artificial
  probe
  misc_feature (1)..(25): SEQ ID NO: 3933; WAN024D5T_at; Start 180; Stop 204
cgatattgccaccttcaaattcgat

SEQ ID NO: 144705 - DNA, 25 bp, Artificial
  probe
  misc_feature (1)..(25): SEQ ID NO: 3933; WAN024D5T_at; Start 84; Stop 108
ggataacatgagagatttgcatatc

SEQ ID NO: 144706 - DNA, 25 bp, Artificial
  probe
  misc_feature (1)..(25): SEQ ID NO: 3933; WAN024D5T_at; Start 83; Stop 107
cggataacatgagagatttgcatat

SEQ ID NO: 144707 - DNA, 25 bp, Artificial
  probe
  misc_feature (1)..(25): SEQ ID NO: 3933; WAN024D5T_at; Start 179; Stop 203
ccgatattgccaccttcaaattcga

SEQ ID NO: 144708 - DNA, 25 bp, Artificial
  probe
  misc_feature (1)..(25): SEQ ID NO: 3933; WAN024D5T_at; Start 195; Stop 219
caaattcgatatcgcctttgaccat

SEQ ID NO: 144709 - DNA, 25 bp, Artificial
  probe
  misc_feature (1)..(25): SEQ ID NO: 3933; WAN024D5T_at; Start 211; Stop 235
tttgaccatatcatgccacttgtag

SEQ ID NO: 144710 - DNA, 25 bp, Artificial
  probe
  misc_feature (1)..(25): SEQ ID NO: 3933; WAN024D5T_at; Start 80; Stop 104
ccacggataacatgagagatttgca

SEQ ID NO: 144711 - DNA, 25 bp, Artificial
  probe
  misc_feature (1)..(25): SEQ ID NO: 3933; WAN024D5T_at; Start 186; Stop 210
tgccaccttcaaattcgatatcgcc

SEQ ID NO: 144712 - DNA, 25 bp, Artificial
  probe
  misc_feature (1)..(25): SEQ ID NO: 3933; WAN024D5T_at; Start 190; Stop 214
accttcaaattcgatatcgcctttg

SEQ ID NO: 144713 - DNA, 25 bp, Artificial
  probe
  misc_feature (1)..(25): SEQ ID NO: 3933; WAN024D5T_at; Start 184; Stop 208
attgccaccttcaaattcgatatcg

SEQ ID NO: 144714 - DNA, 25 bp, Artificial
  probe
  misc_feature (1)..(25): SEQ ID NO: 3933; WAN024D5T_at; Start 217; Stop 241
catatcatgccacttgtagatacct

SEQ ID NO: 144715 - DNA, 25 bp, Artificial
  probe
  misc_feature (1)..(25): SEQ ID NO: 3933; WAN024D5T_at; Start 170; Stop 194
cagtcaccaccgatattgccacctt

SEQ ID NO: 144716 - DNA, 25 bp, Artificial
  probe
  misc_feature (1)..(25): SEQ ID NO: 3933; WAN024D5T_at; Start 191; Stop 215
ccttcaaattcgatatcgcctttga

SEQ ID NO: 144717 - DNA, 25 bp, Artificial
  probe
  misc_feature (1)..(25): SEQ ID NO: 3933; WAN024D5T_at; Start 204; Stop 228
tatcgcctttgaccatatcatgcca

SEQ ID NO: 144718 - DNA, 25 bp, Artificial
  probe
  misc_feature (1)..(25): SEQ ID NO: 3933; WAN024D5T_at; Start 79; Stop 103
tccacggataacatgagagatttgc

SEQ ID NO: 144719 - DNA, 25 bp, Artificial
  probe
  misc_feature (1)..(25): SEQ ID NO: 3933; WAN024D5T_at; Start 212; Stop 236
ttgaccatatcatgccacttgtaga

SEQ ID NO: 144720 - DNA, 25 bp, Artificial
  probe
  misc_feature (1)..(25): SEQ ID NO: 3933; WAN024D5T_at; Start 183; Stop 207
tattgccaccttcaaattcgatatc

SEQ ID NO: 144721 - DNA, 25 bp, Artificial
  probe
  misc_feature (1)..(25): SEQ ID NO: 3933; WAN024D5T_at; Start 77; Stop 101
tctccacggataacatgagagattt

SEQ ID NO: 144722 - DNA, 25 bp, Artificial
  probe
  misc_feature (1)..(25): SEQ ID NO: 3933; WAN024D5T_at; Start 188; Stop 212
ccaccttcaaattcgatatcgcctt

SEQ ID NO: 144723 - DNA, 25 bp, Artificial
  probe
  misc_feature (1)..(25): SEQ ID NO: 3933; WAN024D5T_at; Start 219; Stop 243
tatcatgccacttgtagatacctga

SEQ ID NO: 144724 - DNA, 25 bp, Artificial
  probe
  misc_feature (1)..(25): SEQ ID NO: 3933; WAN024D5T_at; Start 199; Stop 223
ttcgatatcgcctttgaccatatca

SEQ ID NO: 144725 - DNA, 25 bp, Artificial
  probe
  misc_feature (1)..(25): SEQ ID NO: 3933; WAN024D5T_at; Start 187; Stop 211
gccaccttcaaattcgatatcgcct

SEQ ID NO: 144726 - DNA, 25 bp, Artificial
  probe
  misc_feature (1)..(25): SEQ ID NO: 3933; WAN024D5T_at; Start 201; Stop 225
cgatatcgcctttgaccatatcatg

SEQ ID NO: 144727 - DNA, 25 bp, Artificial
  probe
  misc_feature (1)..(25): SEQ ID NO: 2818; WAN024D5U_at; Start 1352; Stop 1376
cagtttcaggcgaaatgcatgggcc

SEQ ID NO: 144728 - DNA, 25 bp, Artificial
  probe
  misc_feature (1)..(25): SEQ ID NO: 2818; WAN024D5U_at; Start 229; Stop 253
catgagaattatcgccagtctgagc

SEQ ID NO: 144729 - DNA, 25 bp, Artificial
  probe
  misc_feature (1)..(25): SEQ ID NO: 2818; WAN024D5U_at; Start 181; Stop 205
gaaaaccttcgctggttaggcatgg

SEQ ID NO: 144730 - DNA, 25 bp, Artificial
  probe
  misc_feature (1)..(25): SEQ ID NO: 2818; WAN024D5U_at; Start 1337; Stop 1361
tgcctattcgtatcgcagtttcagg

SEQ ID NO: 144731 - DNA, 25 bp, Artificial
  probe
  misc_feature (1)..(25): SEQ ID NO: 2818; WAN024D5U_at; Start 484; Stop 508
gagtcaggtatctacaagtggcatg

SEQ ID NO: 144732 - DNA, 25 bp, Artificial
  probe
  misc_feature (1)..(25): SEQ ID NO: 2818; WAN024D5U_at; Start 627; Stop 651
gcaaatctctcatgttatccgtgga

SEQ ID NO: 144733 - DNA, 25 bp, Artificial
  probe
  misc_feature (1)..(25): SEQ ID NO: 2818; WAN024D5U_at; Start 211; Stop 235
gatgaaagtccagaatcacatgaga

SEQ ID NO: 144734 - DNA, 25 bp, Artificial
  probe
  misc_feature (1)..(25): SEQ ID NO: 2818; WAN024D5U_at; Start 816; Stop 840
gaaaggttaccttccagaagcagtc

SEQ ID NO: 144735 - DNA, 25 bp, Artificial
  probe
  misc_feature (1)..(25): SEQ ID NO: 2818; WAN024D5U_at; Start 95; Stop 119
cgcgccatcatggtggaacatttct

SEQ ID NO: 144736 - DNA, 25 bp, Artificial
  probe
  misc_feature (1)..(25): SEQ ID NO: 2818; WAN024D5U_at; Start 1115; Stop 1139
tagatgagattatcccattgacaga

SEQ ID NO: 144737 - DNA, 25 bp, Artificial
  probe
  misc_feature (1)..(25): SEQ ID NO: 2818; WAN024D5U_at; Start 1187; Stop 1211
tcatgacgggtgaaacagttccaac

SEQ ID NO: 144738 - DNA, 25 bp, Artificial
  probe
  misc_feature (1)..(25): SEQ ID NO: 2818; WAN024D5U_at; Start 850; Stop 874
attgctcttcttggttggaacccag

SEQ ID NO: 144739 - DNA, 25 bp, Artificial
  probe
  misc_feature (1)..(25): SEQ ID NO: 2818; WAN024D5U_at; Start 1084; Stop 1108
gttgagctctataaaccacaaatga

SEQ ID NO: 144740 - DNA, 25 bp, Artificial
  probe
  misc_feature (1)..(25): SEQ ID NO: 2818; WAN024D5U_at; Start 1037; Stop 1061
cattcttagaggaagcaggccgttt

SEQ ID NO: 144741 - DNA, 25 bp, Artificial
  probe
  misc_feature (1)..(25): SEQ ID NO: 2818; WAN024D5U_at; Start 135; Stop 159
tactgaccgtaaacgccatgtcgag

SEQ ID NO: 144742 - DNA, 25 bp, Artificial
  probe
  misc_feature (1)..(25): SEQ ID NO: 2818; WAN024D5U_at; Start 1367; Stop 1391
tgcatgggccagaattaccagatac

SEQ ID NO: 144743 - DNA, 25 bp, Artificial
  probe
  misc_feature (1)..(25): SEQ ID NO: 2818; WAN024D5U_at; Start 1389; Stop 1413
tacaattttcttgcttggacgtgaa

SEQ ID NO: 144744 - DNA, 25 bp, Artificial
  probe
  misc_feature (1)..(25): SEQ ID NO: 2818; WAN024D5U_at; Start 20; Stop 44
tacgttacgcaccaagtccaacagg

SEQ ID NO: 144745 - DNA, 25 bp, Artificial
  probe
  misc_feature (1)..(25): SEQ ID NO: 2818; WAN024D5U_at; Start 1167; Stop 1191
gacagaagcagagcgcgaagtcatg

SEQ ID NO: 144746 - DNA, 25 bp, Artificial
  probe
  misc_feature (1)..(25): SEQ ID NO: 2818; WAN024D5U_at; Start 323; Stop 347
cagaagaagagttggcagctgaacg

SEQ ID NO: 144747 - DNA, 25 bp, Artificial
  probe
  misc_feature (1)..(25): SEQ ID NO: 2818; WAN024D5U_at; Start 110; Stop 134
gaacatttctcatccgtatcgaaga

SEQ ID NO: 144748 - DNA, 25 bp, Artificial
  probe
  misc_feature (1)..(25): SEQ ID NO: 2818; WAN024D5U_at; Start 150; Stop 174
ccatgtcgaggatggtgaacgttca

SEQ ID NO: 144749 - DNA, 25 bp, Artificial
  probe
  misc_feature (1)..(25): SEQ ID NO: 2818; WAN024D5U_at; Start 197; Stop 221
taggcatggattgggatgaaagtcc

SEQ ID NO: 144750 - DNA, 25 bp, Artificial
  probe
  misc_feature (1)..(25): SEQ ID NO: 2818; WAN024D5U_at; Start 1151; Stop 1175
cagatttcccagaattgacagaagc

SEQ ID NO: 144751 - DNA, 25 bp, Artificial
  probe
  misc_feature (1)..(25): SEQ ID NO: 2818; WAN024D5U_at; Start 1231; Stop 1255
gcaaaacttgaagcgatgacagatg

SEQ ID NO: 144752 - DNA, 25 bp, Artificial
  probe
  misc_feature (1)..(25): SEQ ID NO: 2818; WAN024D5U_at; Start 282; Stop 306
ccaactattagctgaaggaaaagcc

SEQ ID NO: 144753 - DNA, 25 bp, Artificial
  probe
  misc_feature (1)..(25): SEQ ID NO: 2818; WAN024D5U_at; Start 469; Stop 493
cgtttggctgtcaatgagtcaggta

SEQ ID NO: 144754 - DNA, 25 bp, Artificial
  probe
  misc_feature (1)..(25): SEQ ID NO: 2818; WAN024D5U_at; Start 918; Stop 942
ttttgatgaaaaccgcctcagcaag

SEQ ID NO: 144755 - DNA, 25 bp, Artificial
  probe
  misc_feature (1)..(25): SEQ ID NO: 2818; WAN024D5U_at; Start 355; Stop 379
caagaagtagctggcgaaacaccac

SEQ ID NO: 144756 - DNA, 25 bp, Artificial
  probe
  misc_feature (1)..(25): SEQ ID NO: 2818; WAN024D5U_at; Start 2; Stop 26
tgtcaaaagatatccgcgtacgtta

SEQ ID NO: 144757 - DNA, 25 bp, Artificial
  probe
  misc_feature (1)..(25): SEQ ID NO: 2818; WAN024D5U_at; Start 370; Stop 394
gaaacaccacgctacatcaatgaat

SEQ ID NO: 144758 - DNA, 25 bp, Artificial
  probe
  misc_feature (1)..(25): SEQ ID NO: 2818; WAN024D5U_at; Start 1054; Stop 1078
ggccgtttgactgacaaggctgaaa

SEQ ID NO: 144759 - DNA, 25 bp, Artificial
  probe
  misc_feature (1)..(25): SEQ ID NO: 2818; WAN024D5U_at; Start 940; Stop 964
aagtcaccagcagcctttgatcaga

SEQ ID NO: 144760 - DNA, 25 bp, Artificial
  probe
  misc_feature (1)..(25): SEQ ID NO: 2818; WAN024D5U_at; Start 41; Stop 65
caggactactacacatcggaaatgc

SEQ ID NO: 144761 - DNA, 25 bp, Artificial
  probe
  misc_feature (1)..(25): SEQ ID NO: 7163; WAN024D5V_at; Start 11; Stop 35
aaactgtcaaaagtagttcaacttg

SEQ ID NO: 144762 - DNA, 25 bp, Artificial
  probe
  misc_feature (1)..(25): SEQ ID NO: 7163; WAN024D5V_at; Start 43; Stop 67
ctctgcttttttgtcttgaatgcct

SEQ ID NO: 144763 - DNA, 25 bp, Artificial
  probe
  misc_feature (1)..(25): SEQ ID NO: 7163; WAN024D5V_at; Start 96; Stop 120
gcttcaatcccttctctctatctgt

SEQ ID NO: 144764 - DNA, 25 bp, Artificial
  probe
  misc_feature (1)..(25): SEQ ID NO: 7163; WAN024D5V_at; Start 28; Stop 52
tcaacttgtctttttctctgctttt

SEQ ID NO: 144765 - DNA, 25 bp, Artificial
  probe
  misc_feature (1)..(25): SEQ ID NO: 7163; WAN024D5V_at; Start 54; Stop 78
tgtcttgaatgccttaaatatcata

SEQ ID NO: 144766 - DNA, 25 bp, Artificial
  probe
  misc_feature (1)..(25): SEQ ID NO: 7163; WAN024D5V_at; Start 15; Stop 39
tgtcaaaagtagttcaacttgtctt

SEQ ID NO: 144767 - DNA, 25 bp, Artificial
  probe
  misc_feature (1)..(25): SEQ ID NO: 7163; WAN024D5V_at; Start 57; Stop 81
cttgaatgccttaaatatcatatta

SEQ ID NO: 144768 - DNA, 25 bp, Artificial
  probe
  misc_feature (1)..(25): SEQ ID NO: 7163; WAN024D5V_at; Start 64; Stop 88
gccttaaatatcatattattcccct

SEQ ID NO: 144769 - DNA, 25 bp, Artificial
  probe
  misc_feature (1)..(25): SEQ ID NO: 7163; WAN024D5V_at; Start 72; Stop 96
tatcatattattccccttttctaag

SEQ ID NO: 144770 - DNA, 25 bp, Artificial
  probe
  misc_feature (1)..(25): SEQ ID NO: 7163; WAN024D5V_at; Start 95; Stop 119
agcttcaatcccttctctctatctg

SEQ ID NO: 144771 - DNA, 25 bp, Artificial
  probe
  misc_feature (1)..(25): SEQ ID NO: 7163; WAN024D5V_at; Start 52; Stop 76
tttgtcttgaatgccttaaatatca

SEQ ID NO: 144772 - DNA, 25 bp, Artificial
  probe
  misc_feature (1)..(25): SEQ ID NO: 7163; WAN024D5V_at; Start 55; Stop 79
gtcttgaatgccttaaatatcatat

SEQ ID NO: 144773 - DNA, 25 bp, Artificial
  probe
  misc_feature (1)..(25): SEQ ID NO: 7163; WAN024D5V_at; Start 44; Stop 68
tctgcttttttgtcttgaatgcctt

SEQ ID NO: 144774 - DNA, 25 bp, Artificial
  probe
  misc_feature (1)..(25): SEQ ID NO: 7163; WAN024D5V_at; Start 45; Stop 69
ctgcttttttgtcttgaatgcctta

SEQ ID NO: 144775 - DNA, 25 bp, Artificial
  probe
  misc_feature (1)..(25): SEQ ID NO: 7163; WAN024D5V_at; Start 24; Stop 48
tagttcaacttgtctttttctctgc

SEQ ID NO: 144776 - DNA, 25 bp, Artificial
  probe
  misc_feature (1)..(25): SEQ ID NO: 7163; WAN024D5V_at; Start 80; Stop 104
tattccccttttctaagcttcaatc

SEQ ID NO: 144777 - DNA, 25 bp, Artificial
  probe
  misc_feature (1)..(25): SEQ ID NO: 7163; WAN024D5V_at; Start 63; Stop 87
tgccttaaatatcatattattcccc

SEQ ID NO: 144778 - DNA, 25 bp, Artificial
  probe
  misc_feature (1)..(25): SEQ ID NO: 7163; WAN024D5V_at; Start 13; Stop 37
actgtcaaaagtagttcaacttgtc

SEQ ID NO: 144779 - DNA, 25 bp, Artificial
  probe
  misc_feature (1)..(25): SEQ ID NO: 7163; WAN024D5V_at; Start 99; Stop 123
tcaatcccttctctctatctgttat

SEQ ID NO: 144780 - DNA, 25 bp, Artificial
  probe
  misc_feature (1)..(25): SEQ ID NO: 7163; WAN024D5V_at; Start 75; Stop 99
catattattccccttttctaagctt

SEQ ID NO: 144781 - DNA, 25 bp, Artificial
  probe
  misc_feature (1)..(25): SEQ ID NO: 7163; WAN024D5V_at; Start 42; Stop 66
tctctgcttttttgtcttgaatgcc

SEQ ID NO: 144782 - DNA, 25 bp, Artificial
  probe
  misc_feature (1)..(25): SEQ ID NO: 7163; WAN024D5V_at; Start 100; Stop 124
caatcccttctctctatctgttatt

SEQ ID NO: 144783 - DNA, 25 bp, Artificial
  probe
  misc_feature (1)..(25): SEQ ID NO: 7163; WAN024D5V_at; Start 25; Stop 49
agttcaacttgtctttttctctgct

SEQ ID NO: 144784 - DNA, 25 bp, Artificial
  probe
  misc_feature (1)..(25): SEQ ID NO: 7163; WAN024D5V_at; Start 103; Stop 127
tcccttctctctatctgttatttcg

SEQ ID NO: 144785 - DNA, 25 bp, Artificial
  probe
  misc_feature (1)..(25): SEQ ID NO: 7163; WAN024D5V_at; Start 77; Stop 101
tattattccccttttctaagcttca

SEQ ID NO: 144786 - DNA, 25 bp, Artificial
  probe
  misc_feature (1)..(25): SEQ ID NO: 7163; WAN024D5V_at; Start 48; Stop 72
cttttttgtcttgaatgccttaaat

SEQ ID NO: 144787 - DNA, 25 bp, Artificial
  probe
  misc_feature (1)..(25): SEQ ID NO: 7163; WAN024D5V_at; Start 47; Stop 71
gcttttttgtcttgaatgccttaaa

SEQ ID NO: 144788 - DNA, 25 bp, Artificial
  probe
  misc_feature (1)..(25): SEQ ID NO: 7163; WAN024D5V_at; Start 14; Stop 38
ctgtcaaaagtagttcaacttgtct

SEQ ID NO: 144789 - DNA, 25 bp, Artificial
  probe
  misc_feature (1)..(25): SEQ ID NO: 7163; WAN024D5V_at; Start 98; Stop 122
ttcaatcccttctctctatctgtta

SEQ ID NO: 144790 - DNA, 25 bp, Artificial
  probe
  misc_feature (1)..(25): SEQ ID NO: 7163; WAN024D5V_at; Start 26; Stop 50
gttcaacttgtctttttctctgctt

SEQ ID NO: 144791 - DNA, 25 bp, Artificial
  probe
  misc_feature (1)..(25): SEQ ID NO: 7163; WAN024D5V_at; Start 46; Stop 70
tgcttttttgtcttgaatgccttaa

SEQ ID NO: 144792 - DNA, 25 bp, Artificial
  probe
  misc_feature (1)..(25): SEQ ID NO: 7163; WAN024D5V_at; Start 105; Stop 129
ccttctctctatctgttatttcgca

SEQ ID NO: 144793 - DNA, 25 bp, Artificial
  probe
  misc_feature (1)..(25): SEQ ID NO: 7163; WAN024D5V_at; Start 104; Stop 128
cccttctctctatctgttatttcgc

SEQ ID NO: 144794 - DNA, 25 bp, Artificial
  probe
  misc_feature (1)..(25): SEQ ID NO: 7163; WAN024D5V_at; Start 12; Stop 36
aactgtcaaaagtagttcaacttgt

SEQ ID NO: 144795 - DNA, 25 bp, Artificial
  probe
  misc_feature (1)..(25): SEQ ID NO: 1715; WAN024D5W_at; Start 43; Stop 67
caagttgaactacttttgacagttt

SEQ ID NO: 144796 - DNA, 25 bp, Artificial
  probe
  misc_feature (1)..(25): SEQ ID NO: 1715; WAN024D5W_at; Start 195; Stop 219
aaagctatttgaaaaagtgttcgat

SEQ ID NO: 144797 - DNA, 25 bp, Artificial
  probe
  misc_feature (1)..(25): SEQ ID NO: 1715; WAN024D5W_at; Start 14; Stop 38
cattcaagacaaaaaagcagagaaa

SEQ ID NO: 144798 - DNA, 25 bp, Artificial
  probe
  misc_feature (1)..(25): SEQ ID NO: 1715; WAN024D5W_at; Start 17; Stop 41
tcaagacaaaaaagcagagaaaaag

SEQ ID NO: 144799 - DNA, 25 bp, Artificial
  probe
  misc_feature (1)..(25): SEQ ID NO: 1715; WAN024D5W_at; Start 109; Stop 133
gggattgtcccctttaagctggata

SEQ ID NO: 144800 - DNA, 25 bp, Artificial
  probe
  misc_feature (1)..(25): SEQ ID NO: 1715; WAN024D5W_at; Start 175; Stop 199
acaagtatttatgcttatgaaaagc

SEQ ID NO: 144801 - DNA, 25 bp, Artificial
  probe
  misc_feature (1)..(25): SEQ ID NO: 1715; WAN024D5W_at; Start 119; Stop 143
cctttaagctggataagattctgat

SEQ ID NO: 144802 - DNA, 25 bp, Artificial
  probe
  misc_feature (1)..(25): SEQ ID NO: 1715; WAN024D5W_at; Start 88; Stop 112
gatttatttcttcacttatttggga

SEQ ID NO: 144803 - DNA, 25 bp, Artificial
  probe
  misc_feature (1)..(25): SEQ ID NO: 1715; WAN024D5W_at; Start 126; Stop 150
gctggataagattctgattgtgagc

SEQ ID NO: 144804 - DNA, 25 bp, Artificial
  probe
  misc_feature (1)..(25): SEQ ID NO: 1715; WAN024D5W_at; Start 2; Stop 26
tgatatttaaggcattcaagacaaa

SEQ ID NO: 144805 - DNA, 25 bp, Artificial
  probe
  misc_feature (1)..(25): SEQ ID NO: 1715; WAN024D5W_at; Start 23; Stop 47
caaaaaagcagagaaaaagacaagt

SEQ ID NO: 144806 - DNA, 25 bp, Artificial
  probe
  misc_feature (1)..(25): SEQ ID NO: 1715; WAN024D5W_at; Start 141; Stop 165
gattgtgagcttgattatatttccc

SEQ ID NO: 144807 - DNA, 25 bp, Artificial
  probe
  misc_feature (1)..(25): SEQ ID NO: 1715; WAN024D5W_at; Start 12; Stop 36
ggcattcaagacaaaaaagcagaga

SEQ ID NO: 144808 - DNA, 25 bp, Artificial
  probe
  misc_feature (1)..(25): SEQ ID NO: 1715; WAN024D5W_at; Start 111; Stop 135
gattgtcccctttaagctggataag

SEQ ID NO: 144809 - DNA, 25 bp, Artificial
  probe
  misc_feature (1)..(25): SEQ ID NO: 1715; WAN024D5W_at; Start 66; Stop 90
ttttttcgacagttttctgattgat

SEQ ID NO: 144810 - DNA, 25 bp, Artificial
  probe
  misc_feature (1)..(25): SEQ ID NO: 1715; WAN024D5W_at; Start 9; Stop 33
taaggcattcaagacaaaaaagcag

SEQ ID NO: 144811 - DNA, 25 bp, Artificial
  probe
  misc_feature (1)..(25): SEQ ID NO: 1715; WAN024D5W_at; Start 108; Stop 132
tgggattgtcccctttaagctggat

SEQ ID NO: 144812 - DNA, 25 bp, Artificial
  probe
  misc_feature (1)..(25): SEQ ID NO: 1715; WAN024D5W_at; Start 200; Stop 224
tatttgaaaaagtgttcgataagga

SEQ ID NO: 144813 - DNA, 25 bp, Artificial
  probe
  misc_feature (1)..(25): SEQ ID NO: 1715; WAN024D5W_at; Start 41; Stop 65
gacaagttgaactacttttgacagt

SEQ ID NO: 144814 - DNA, 25 bp, Artificial
  probe
  misc_feature (1)..(25): SEQ ID NO: 1715; WAN024D5W_at; Start 135; Stop 159
gattctgattgtgagcttgattata

SEQ ID NO: 144815 - DNA, 25 bp, Artificial
  probe
  misc_feature (1)..(25): SEQ ID NO: 1715; WAN024D5W_at; Start 73; Stop 97
gacagttttctgattgatttatttc

SEQ ID NO: 144816 - DNA, 25 bp, Artificial
  probe
  misc_feature (1)..(25): SEQ ID NO: 1715; WAN024D5W_at; Start 28; Stop 52
aagcagagaaaaagacaagttgaac

SEQ ID NO: 144817 - DNA, 25 bp, Artificial
  probe
  misc_feature (1)..(25): SEQ ID NO: 1715; WAN024D5W_at; Start 96; Stop 120
tcttcacttatttgggattgtcccc

SEQ ID NO: 144818 - DNA, 25 bp, Artificial
  probe
  misc_feature (1)..(25): SEQ ID NO: 1715; WAN024D5W_at; Start 130; Stop 154
gataagattctgattgtgagcttga

SEQ ID NO: 144819 - DNA, 25 bp, Artificial
  probe
  misc_feature (1)..(25): SEQ ID NO: 1715; WAN024D5W_at; Start 118; Stop 142
ccctttaagctggataagattctga

SEQ ID NO: 144820 - DNA, 25 bp, Artificial
  probe
  misc_feature (1)..(25): SEQ ID NO: 1715; WAN024D5W_at; Start 156; Stop 180
tatatttcccattatttctacaagt

SEQ ID NO: 144821 - DNA, 25 bp, Artificial
  probe
  misc_feature (1)..(25): SEQ ID NO: 1715; WAN024D5W_at; Start 114; Stop 138
tgtcccctttaagctggataagatt

SEQ ID NO: 144822 - DNA, 25 bp, Artificial
  probe
  misc_feature (1)..(25): SEQ ID NO: 1715; WAN024D5W_at; Start 116; Stop 140
tcccctttaagctggataagattct

SEQ ID NO: 144823 - DNA, 25 bp, Artificial
  probe
  misc_feature (1)..(25): SEQ ID NO: 1715; WAN024D5W_at; Start 145; Stop 169
gtgagcttgattatatttcccatta

SEQ ID NO: 144824 - DNA, 25 bp, Artificial
  probe
  misc_feature (1)..(25): SEQ ID NO: 1715; WAN024D5W_at; Start 97; Stop 121
cttcacttatttgggattgtcccct

SEQ ID NO: 144825 - DNA, 25 bp, Artificial
  probe
  misc_feature (1)..(25): SEQ ID NO: 1715; WAN024D5W_at; Start 123; Stop 147
taagctggataagattctgattgtg

SEQ ID NO: 144826 - DNA, 25 bp, Artificial
  probe
  misc_feature (1)..(25): SEQ ID NO: 1715; WAN024D5W_at; Start 31; Stop 55
cagagaaaaagacaagttgaactac

SEQ ID NO: 144827 - DNA, 25 bp, Artificial
  probe
  misc_feature (1)..(25): SEQ ID NO: 1715; WAN024D5W_at; Start 187; Stop 211
gcttatgaaaagctatttgaaaaag

SEQ ID NO: 144828 - DNA, 25 bp, Artificial
  probe
  misc_feature (1)..(25): SEQ ID NO: 1715; WAN024D5W_at; Start 164; Stop 188
ccattatttctacaagtatttatgc

SEQ ID NO: 144829 - DNA, 25 bp, Artificial
  probe
  misc_feature (1)..(25): SEQ ID NO: 1806; WAN024D5X_at; Start 311; Stop 335
tatacacagggaaagtggaacagtt

SEQ ID NO: 144830 - DNA, 25 bp, Artificial
  probe
  misc_feature (1)..(25): SEQ ID NO: 1806; WAN024D5X_at; Start 132; Stop 156
tcgattgtttgggaattgctttact

SEQ ID NO: 144831 - DNA, 25 bp, Artificial
  probe
  misc_feature (1)..(25): SEQ ID NO: 1806; WAN024D5X_at; Start 297; Stop 321
gaaagatattgaattatacacaggg

SEQ ID NO: 144832 - DNA, 25 bp, Artificial
  probe
  misc_feature (1)..(25): SEQ ID NO: 1806; WAN024D5X_at; Start 86; Stop 110
caggactagaaaatttaacagaagg

SEQ ID NO: 144833 - DNA, 25 bp, Artificial
  probe
  misc_feature (1)..(25): SEQ ID NO: 1806; WAN024D5X_at; Start 100; Stop 124
ttaacagaaggttcgattgctatcg

SEQ ID NO: 144834 - DNA, 25 bp, Artificial
  probe
  misc_feature (1)..(25): SEQ ID NO: 1806; WAN024D5X_at; Start 109; Stop 133
ggttcgattgctatcgatggtaatc

SEQ ID NO: 144835 - DNA, 25 bp, Artificial
  probe
  misc_feature (1)..(25): SEQ ID NO: 1806; WAN024D5X_at; Start 329; Stop 353
aacagttggttcatttgagagctgg

SEQ ID NO: 144836 - DNA, 25 bp, Artificial
  probe
  misc_feature (1)..(25): SEQ ID NO: 1806; WAN024D5X_at; Start 355; Stop 379
gaatgcctcatcacttttccagaag

SEQ ID NO: 144837 - DNA, 25 bp, Artificial
  probe
  misc_feature (1)..(25): SEQ ID NO: 1806; WAN024D5X_at; Start 209; Stop 233
tggatattcatttagttttggaaaa

SEQ ID NO: 144838 - DNA, 25 bp, Artificial
  probe
  misc_feature (1)..(25): SEQ ID NO: 1806; WAN024D5X_at; Start 224; Stop 248
ttttggaaaacgaagaagccatggc

SEQ ID NO: 144839 - DNA, 25 bp, Artificial
  probe
  misc_feature (1)..(25): SEQ ID NO: 1806; WAN024D5X_at; Start 429; Stop 453
tgtctttaaagttgcgatttcttaa

SEQ ID NO: 144840 - DNA, 25 bp, Artificial
  probe
  misc_feature (1)..(25): SEQ ID NO: 1806; WAN024D5X_at; Start 18; Stop 42
tagccgtttaggaacttatgtggga

SEQ ID NO: 144841 - DNA, 25 bp, Artificial
  probe
  misc_feature (1)..(25): SEQ ID NO: 1806; WAN024D5X_at; Start 254; Stop 278
catcgccggaaaatgtaagcgttac

SEQ ID NO: 144842 - DNA, 25 bp, Artificial
  probe
  misc_feature (1)..(25): SEQ ID NO: 1806; WAN024D5X_at; Start 317; Stop 341
cagggaaagtggaacagttggttca

SEQ ID NO: 144843 - DNA, 25 bp, Artificial
  probe
  misc_feature (1)..(25): SEQ ID NO: 1806; WAN024D5X_at; Start 269; Stop 293
taagcgttacccaagaatatgatga

SEQ ID NO: 144844 - DNA, 25 bp, Artificial
  probe
  misc_feature (1)..(25): SEQ ID NO: 1806; WAN024D5X_at; Start 245; Stop 269
tggctgttacatcgccggaaaatgt

SEQ ID NO: 144845 - DNA, 25 bp, Artificial
  probe
  misc_feature (1)..(25): SEQ ID NO: 1806; WAN024D5X_at; Start 58; Stop 82
gcaacattaatagattttctagaaa

SEQ ID NO: 144846 - DNA, 25 bp, Artificial
  probe
  misc_feature (1)..(25): SEQ ID NO: 1806; WAN024D5X_at; Start 273; Stop 297
cgttacccaagaatatgatgaagag

SEQ ID NO: 144847 - DNA, 25 bp, Artificial
  probe
  misc_feature (1)..(25): SEQ ID NO: 1806; WAN024D5X_at; Start 359; Stop 383
gcctcatcacttttccagaagattt

SEQ ID NO: 144848 - DNA, 25 bp, Artificial
  probe
  misc_feature (1)..(25): SEQ ID NO: 1806; WAN024D5X_at; Start 159; Stop 183
tctagcagatggtcaagcaggggct

SEQ ID NO: 144849 - DNA, 25 bp, Artificial
  probe
  misc_feature (1)..(25): SEQ ID NO: 1806; WAN024D5X_at; Start 374; Stop 398
cagaagatttacatcaacccaaggt

SEQ ID NO: 144850 - DNA, 25 bp, Artificial
  probe
  misc_feature (1)..(25): SEQ ID NO: 1806; WAN024D5X_at; Start 48; Stop 72
tccacattttgcaacattaatagat

SEQ ID NO: 144851 - DNA, 25 bp, Artificial
  probe
  misc_feature (1)..(25): SEQ ID NO: 1806; WAN024D5X_at; Start 196; Stop 220
caccaaaaatatttggatattcatt

SEQ ID NO: 144852 - DNA, 25 bp, Artificial
  probe
  misc_feature (1)..(25): SEQ ID NO: 1806; WAN024D5X_at; Start 227; Stop 251
tggaaaacgaagaagccatggctgt

SEQ ID NO: 144853 - DNA, 25 bp, Artificial
  probe
  misc_feature (1)..(25): SEQ ID NO: 1806; WAN024D5X_at; Start 241; Stop 265
gccatggctgttacatcgccggaaa

SEQ ID NO: 144854 - DNA, 25 bp, Artificial
  probe
  misc_feature (1)..(25): SEQ ID NO: 1806; WAN024D5X_at; Start 279; Stop 303
ccaagaatatgatgaagagaaagat

SEQ ID NO: 144855 - DNA, 25 bp, Artificial
  probe
  misc_feature (1)..(25): SEQ ID NO: 1806; WAN024D5X_at; Start 409; Stop 433
gatgaacctgtgaaaaaagttgtct

SEQ ID NO: 144856 - DNA, 25 bp, Artificial
  probe
  misc_feature (1)..(25): SEQ ID NO: 1806; WAN024D5X_at; Start 379; Stop 403
gatttacatcaacccaaggttcgta

SEQ ID NO: 144857 - DNA, 25 bp, Artificial
  probe
  misc_feature (1)..(25): SEQ ID NO: 1806; WAN024D5X_at; Start 399; Stop 423
tcgtataaatgatgaacctgtgaaa

SEQ ID NO: 144858 - DNA, 25 bp, Artificial
  probe
  misc_feature (1)..(25): SEQ ID NO: 1806; WAN024D5X_at; Start 39; Stop 63
gggagtaaatccacattttgcaaca

SEQ ID NO: 144859 - DNA, 25 bp, Artificial
  probe
  misc_feature (1)..(25): SEQ ID NO: 1806; WAN024D5X_at; Start 123; Stop 147
cgatggtaatcgattgtttgggaat

SEQ ID NO: 144860 - DNA, 25 bp, Artificial
  probe
  misc_feature (1)..(25): SEQ ID NO: 1806; WAN024D5X_at; Start 29; Stop 53
gaacttatgtgggagtaaatccaca

SEQ ID NO: 144861 - DNA, 25 bp, Artificial
  probe
  misc_feature (1)..(25): SEQ ID NO: 1806; WAN024D5X_at; Start 238; Stop 262
gaagccatggctgttacatcgccgg

SEQ ID NO: 144862 - DNA, 25 bp, Artificial
  probe
  misc_feature (1)..(25): SEQ ID NO: 1806; WAN024D5X_at; Start 388; Stop 412
caacccaaggttcgtataaatgatg

SEQ ID NO: 144863 - DNA, 25 bp, Artificial
  probe
  misc_feature (1)..(25): SEQ ID NO: 2373; WAN024D5Y_at; Start 277; Stop 301
ccttgcggtgcttgtagagaattcc

SEQ ID NO: 144864 - DNA, 25 bp, Artificial
  probe
  misc_feature (1)..(25): SEQ ID NO: 2373; WAN024D5Y_at; Start 143; Stop 167
gaacctgtggtgttttccatctctg

SEQ ID NO: 144865 - DNA, 25 bp, Artificial
  probe
  misc_feature (1)..(25): SEQ ID NO: 2373; WAN024D5Y_at; Start 155; Stop 179
ttttccatctctgcgcagaacgggc

SEQ ID NO: 144866 - DNA, 25 bp, Artificial
  probe
  misc_feature (1)..(25): SEQ ID NO: 2373; WAN024D5Y_at; Start 235; Stop 259
gcctttcgagacaaaccaccttatg

SEQ ID NO: 144867 - DNA, 25 bp, Artificial
  probe
  misc_feature (1)..(25): SEQ ID NO: 2373; WAN024D5Y_at; Start 285; Stop 309
tgcttgtagagaattccttttagag

SEQ ID NO: 144868 - DNA, 25 bp, Artificial
  probe
  misc_feature (1)..(25): SEQ ID NO: 2373; WAN024D5Y_at; Start 55; Stop 79
gaagtatcagactttgtttatgcca

SEQ ID NO: 144869 - DNA, 25 bp, Artificial
  probe
  misc_feature (1)..(25): SEQ ID NO: 2373; WAN024D5Y_at; Start 250; Stop 274
ccaccttatggtggaagttcagcca

SEQ ID NO: 144870 - DNA, 25 bp, Artificial
  probe
  misc_feature (1)..(25): SEQ ID NO: 2373; WAN024D5Y_at; Start 18; Stop 42
gatgtacgaagaagcacagaaacta

SEQ ID NO: 144871 - DNA, 25 bp, Artificial
  probe
  misc_feature (1)..(25): SEQ ID NO: 2373; WAN024D5Y_at; Start 73; Stop 97
tatgccaatcatgttgtagctgcag

SEQ ID NO: 144872 - DNA, 25 bp, Artificial
  probe
  misc_feature (1)..(25): SEQ ID NO: 2373; WAN024D5Y_at; Start 28; Stop 52
gaagcacagaaactatacaatccac

SEQ ID NO: 144873 - DNA, 25 bp, Artificial
  probe
  misc_feature (1)..(25): SEQ ID NO: 2373; WAN024D5Y_at; Start 194; Stop 218
tgtaccaattttcaggacaaactaa

SEQ ID NO: 144874 - DNA, 25 bp, Artificial
  probe
  misc_feature (1)..(25): SEQ ID NO: 2373; WAN024D5Y_at; Start 185; Stop 209
tcttcaatatgtaccaattttcagg

SEQ ID NO: 144875 - DNA, 25 bp, Artificial
  probe
  misc_feature (1)..(25): SEQ ID NO: 2373; WAN024D5Y_at; Start 365; Stop 389
cagttaaagtcgcagaactaatccc

SEQ ID NO: 144876 - DNA, 25 bp, Artificial
  probe
  misc_feature (1)..(25): SEQ ID NO: 2373; WAN024D5Y_at; Start 8; Stop 32
tctgggaaaagatgtacgaagaagc

SEQ ID NO: 144877 - DNA, 25 bp, Artificial
  probe
  misc_feature (1)..(25): SEQ ID NO: 2373; WAN024D5Y_at; Start 109; Stop 133
gatggacaaatatttacaggattct

SEQ ID NO: 144878 - DNA, 25 bp, Artificial
  probe
  misc_feature (1)..(25): SEQ ID NO: 2373; WAN024D5Y_at; Start 263; Stop 287
gaagttcagccatgccttgcggtgc

SEQ ID NO: 144879 - DNA, 25 bp, Artificial
  probe
  misc_feature (1)..(25): SEQ ID NO: 2373; WAN024D5Y_at; Start 123; Stop 147
tacaggattctgtatggagggaacc

SEQ ID NO: 144880 - DNA, 25 bp, Artificial
  probe
  misc_feature (1)..(25): SEQ ID NO: 2373; WAN024D5Y_at; Start 324; Stop 348
taaagatgcagaattcatgatggac

SEQ ID NO: 144881 - DNA, 25 bp, Artificial
  probe
  misc_feature (1)..(25): SEQ ID NO: 2373; WAN024D5Y_at; Start 61; Stop 85
tcagactttgtttatgccaatcatg

SEQ ID NO: 144882 - DNA, 25 bp, Artificial
  probe
  misc_feature (1)..(25): SEQ ID NO: 2373; WAN024D5Y_at; Start 375; Stop 399
cgcagaactaatcccttattggtgg

SEQ ID NO: 144883 - DNA, 25 bp, Artificial
  probe
  misc_feature (1)..(25): SEQ ID NO: 2373; WAN024D5Y_at; Start 228; Stop 252
agtattagcctttcgagacaaacca

SEQ ID NO: 144884 - DNA, 25 bp, Artificial
  probe
  misc_feature (1)..(25): SEQ ID NO: 2373; WAN024D5Y_at; Start 81; Stop 105
tcatgttgtagctgcagtagaagca

SEQ ID NO: 144885 - DNA, 25 bp, Artificial
  probe
  misc_feature (1)..(25): SEQ ID NO: 2373; WAN024D5Y_at; Start 150; Stop 174
tggtgttttccatctctgcgcagaa

SEQ ID NO: 144886 - DNA, 25 bp, Artificial
  probe
  misc_feature (1)..(25): SEQ ID NO: 2373; WAN024D5Y_at; Start 356; Stop 380
taagaaaaacagttaaagtcgcaga

SEQ ID NO: 144887 - DNA, 25 bp, Artificial
  probe
  misc_feature (1)..(25): SEQ ID NO: 2373; WAN024D5Y_at; Start 129; Stop 153
attctgtatggagggaacctgtggt

SEQ ID NO: 144888 - DNA, 25 bp, Artificial
  probe
  misc_feature (1)..(25): SEQ ID NO: 2373; WAN024D5Y_at; Start 258; Stop 282
tggtggaagttcagccatgccttgc

SEQ ID NO: 144889 - DNA, 25 bp, Artificial
  probe
  misc_feature (1)..(25): SEQ ID NO: 2373; WAN024D5Y_at; Start 34; Stop 58
cagaaactatacaatccacatgaag

SEQ ID NO: 144890 - DNA, 25 bp, Artificial
  probe
  misc_feature (1)..(25): SEQ ID NO: 2373; WAN024D5Y_at; Start 341; Stop 365
tgatggactataatataagaaaaac

SEQ ID NO: 144891 - DNA, 25 bp, Artificial
  probe
  misc_feature (1)..(25): SEQ ID NO: 2373; WAN024D5Y_at; Start 77; Stop 101
ccaatcatgttgtagctgcagtaga

SEQ ID NO: 144892 - DNA, 25 bp, Artificial
  probe
  misc_feature (1)..(25): SEQ ID NO: 2373; WAN024D5Y_at; Start 272; Stop 296
ccatgccttgcggtgcttgtagaga

SEQ ID NO: 144893 - DNA, 25 bp, Artificial
  probe
  misc_feature (1)..(25): SEQ ID NO: 2373; WAN024D5Y_at; Start 239; Stop 263
ttcgagacaaaccaccttatggtgg

SEQ ID NO: 144894 - DNA, 25 bp, Artificial
  probe
  misc_feature (1)..(25): SEQ ID NO: 2373; WAN024D5Y_at; Start 331; Stop 355
gcagaattcatgatggactataata

SEQ ID NO: 144895 - DNA, 25 bp, Artificial
  probe
  misc_feature (1)..(25): SEQ ID NO: 2373; WAN024D5Y_at; Start 43; Stop 67
tacaatccacatgaagtatcagact

SEQ ID NO: 144896 - DNA, 25 bp, Artificial
  probe
  misc_feature (1)..(25): SEQ ID NO: 2373; WAN024D5Y_at; Start 315; Stop 339
tgctgaaaataaagatgcagaattc

SEQ ID NO: 144897 - DNA, 25 bp, Artificial
  probe
  misc_feature (1)..(25): SEQ ID NO: 6916; WAN024D5Z_at; Start 179; Stop 203
tcatgacaatgaacaaagccaatgt

SEQ ID NO: 144898 - DNA, 25 bp, Artificial
  probe
  misc_feature (1)..(25): SEQ ID NO: 6916; WAN024D5Z_at; Start 199; Stop 223
aatgtcactcgcttcgtcgaatgct

SEQ ID NO: 144899 - DNA, 25 bp, Artificial
  probe
  misc_feature (1)..(25): SEQ ID NO: 6916; WAN024D5Z_at; Start 100; Stop 124
tgcataaccatttggctgatgtggc

SEQ ID NO: 144900 - DNA, 25 bp, Artificial
  probe
  misc_feature (1)..(25): SEQ ID NO: 6916; WAN024D5Z_at; Start 163; Stop 187
caagagtgggtagtgttcatgacaa

SEQ ID NO: 144901 - DNA, 25 bp, Artificial
  probe
  misc_feature (1)..(25): SEQ ID NO: 6916; WAN024D5Z_at; Start 152; Stop 176
tgataacccaacaagagtgggtagt

SEQ ID NO: 144902 - DNA, 25 bp, Artificial
  probe
  misc_feature (1)..(25): SEQ ID NO: 6916; WAN024D5Z_at; Start 125; Stop 149
tcacctgggaagaaaatcgcaaaat

SEQ ID NO: 144903 - DNA, 25 bp, Artificial
  probe
  misc_feature (1)..(25): SEQ ID NO: 6916; WAN024D5Z_at; Start 196; Stop 220
gccaatgtcactcgcttcgtcgaat

SEQ ID NO: 144904 - DNA, 25 bp, Artificial
  probe
  misc_feature (1)..(25): SEQ ID NO: 6916; WAN024D5Z_at; Start 136; Stop 160
gaaaatcgcaaaattgtgataaccc

SEQ ID NO: 144905 - DNA, 25 bp, Artificial
  probe
  misc_feature (1)..(25): SEQ ID NO: 6916; WAN024D5Z_at; Start 122; Stop 146
ggctcacctgggaagaaaatcgcaa

SEQ ID NO: 144906 - DNA, 25 bp, Artificial
  probe
  misc_feature (1)..(25): SEQ ID NO: 6916; WAN024D5Z_at; Start 217; Stop 241
gaatgctactgcctcgtctttgata

SEQ ID NO: 144907 - DNA, 25 bp, Artificial
  probe
  misc_feature (1)..(25): SEQ ID NO: 6916; WAN024D5Z_at; Start 50; Stop 74
taatcaatcaaaattttaaagagat

SEQ ID NO: 144908 - DNA, 25 bp, Artificial
  probe
  misc_feature (1)..(25): SEQ ID NO: 6916; WAN024D5Z_at; Start 115; Stop 139
ctgatgtggctcacctgggaagaaa

SEQ ID NO: 144909 - DNA, 25 bp, Artificial
  probe
  misc_feature (1)..(25): SEQ ID NO: 6916; WAN024D5Z_at; Start 209; Stop 233
gcttcgtcgaatgctactgcctcgt

SEQ ID NO: 144910 - DNA, 25 bp, Artificial
  probe
  misc_feature (1)..(25): SEQ ID NO: 6916; WAN024D5Z_at; Start 193; Stop 217
aaagccaatgtcactcgcttcgtcg

SEQ ID NO: 144911 - DNA, 25 bp, Artificial
  probe
  misc_feature (1)..(25): SEQ ID NO: 6916; WAN024D5Z_at; Start 96; Stop 120
tgcctgcataaccatttggctgatg

SEQ ID NO: 144912 - DNA, 25 bp, Artificial
  probe
  misc_feature (1)..(25): SEQ ID NO: 6916; WAN024D5Z_at; Start 212; Stop 236
tcgtcgaatgctactgcctcgtctt

SEQ ID NO: 144913 - DNA, 25 bp, Artificial
  probe
  misc_feature (1)..(25): SEQ ID NO: 6916; WAN024D5Z_at; Start 158; Stop 182
cccaacaagagtgggtagtgttcat

SEQ ID NO: 144914 - DNA, 25 bp, Artificial
  probe
  misc_feature (1)..(25): SEQ ID NO: 6916; WAN024D5Z_at; Start 92; Stop 116
tccatgcctgcataaccatttggct

SEQ ID NO: 144915 - DNA, 25 bp, Artificial
  probe
  misc_feature (1)..(25): SEQ ID NO: 6916; WAN024D5Z_at; Start 34; Stop 58
caattcatcctatttttaatcaatc

SEQ ID NO: 144916 - DNA, 25 bp, Artificial
  probe
  misc_feature (1)..(25): SEQ ID NO: 6916; WAN024D5Z_at; Start 149; Stop 173
ttgtgataacccaacaagagtgggt

SEQ ID NO: 144917 - DNA, 25 bp, Artificial
  probe
  misc_feature (1)..(25): SEQ ID NO: 6916; WAN024D5Z_at; Start 139; Stop 163
aatcgcaaaattgtgataacccaac

SEQ ID NO: 144918 - DNA, 25 bp, Artificial
  probe
  misc_feature (1)..(25): SEQ ID NO: 6916; WAN024D5Z_at; Start 207; Stop 231
tcgcttcgtcgaatgctactgcctc

SEQ ID NO: 144919 - DNA, 25 bp, Artificial
  probe
  misc_feature (1)..(25): SEQ ID NO: 6916; WAN024D5Z_at; Start 108; Stop 132
catttggctgatgtggctcacctgg

SEQ ID NO: 144920 - DNA, 25 bp, Artificial
  probe
  misc_feature (1)..(25): SEQ ID NO: 6916; WAN024D5Z_at; Start 144; Stop 168
caaaattgtgataacccaacaagag

SEQ ID NO: 144921 - DNA, 25 bp, Artificial
  probe
  misc_feature (1)..(25): SEQ ID NO: 6916; WAN024D5Z_at; Start 166; Stop 190
gagtgggtagtgttcatgacaatga

SEQ ID NO: 144922 - DNA, 25 bp, Artificial
  probe
  misc_feature (1)..(25): SEQ ID NO: 6916; WAN024D5Z_at; Start 7; Stop 31
gagtattatcaaagctttacaaaaa

SEQ ID NO: 144923 - DNA, 25 bp, Artificial
  probe
  misc_feature (1)..(25): SEQ ID NO: 6916; WAN024D5Z_at; Start 128; Stop 152
cctgggaagaaaatcgcaaaattgt

SEQ ID NO: 144924 - DNA, 25 bp, Artificial
  probe
  misc_feature (1)..(25): SEQ ID NO: 6916; WAN024D5Z_at; Start 81; Stop 105
gaaccttttcttccatgcctgcata

SEQ ID NO: 144925 - DNA, 25 bp, Artificial
  probe
  misc_feature (1)..(25): SEQ ID NO: 6916; WAN024D5Z_at; Start 2; Stop 26
tggtagagtattatcaaagctttac

SEQ ID NO: 144926 - DNA, 25 bp, Artificial
  probe
  misc_feature (1)..(25): SEQ ID NO: 6916; WAN024D5Z_at; Start 222; Stop 246
ctactgcctcgtctttgatacgtga

SEQ ID NO: 144927 - DNA, 25 bp, Artificial
  probe
  misc_feature (1)..(25): SEQ ID NO: 6916; WAN024D5Z_at; Start 110; Stop 134
tttggctgatgtggctcacctggga

SEQ ID NO: 144928 - DNA, 25 bp, Artificial
  probe
  misc_feature (1)..(25): SEQ ID NO: 6916; WAN024D5Z_at; Start 119; Stop 143
tgtggctcacctgggaagaaaatcg

SEQ ID NO: 144929 - DNA, 25 bp, Artificial
  probe
  misc_feature (1)..(25): SEQ ID NO: 6916; WAN024D5Z_at; Start 105; Stop 129
aaccatttggctgatgtggctcacc

SEQ ID NO: 144930 - DNA, 25 bp, Artificial
  probe
  misc_feature (1)..(25): SEQ ID NO: 6916; WAN024D5Z_at; Start 74; Stop 98
tattttcgaaccttttcttccatgc

SEQ ID NO: 144931 - DNA, 25 bp, Artificial
  probe
  misc_feature (1)..(25): SEQ ID NO: 1880; WAN024D62_at; Start 244; Stop 268
tcgagctacggttcacgtatcaaag

SEQ ID NO: 144932 - DNA, 25 bp, Artificial
  probe
  misc_feature (1)..(25): SEQ ID NO: 1880; WAN024D62_at; Start 342; Stop 366
gggttatcacaattttgcgattttc

SEQ ID NO: 144933 - DNA, 25 bp, Artificial
  probe
  misc_feature (1)..(25): SEQ ID NO: 1880; WAN024D62_at; Start 257; Stop 281
cacgtatcaaagacgaggcagtagc

SEQ ID NO: 144934 - DNA, 25 bp, Artificial
  probe
  misc_feature (1)..(25): SEQ ID NO: 1880; WAN024D62_at; Start 397; Stop 421
tatgcaggcatggaagaaaaggttc

SEQ ID NO: 144935 - DNA, 25 bp, Artificial
  probe
  misc_feature (1)..(25): SEQ ID NO: 1880; WAN024D62_at; Start 235; Stop 259
catgaatattcgagctacggttcac

SEQ ID NO: 144936 - DNA, 25 bp, Artificial
  probe
  misc_feature (1)..(25): SEQ ID NO: 1880; WAN024D62_at; Start 148; Stop 172
gttcaggaaaatgtcctcaatcaag

SEQ ID NO: 144937 - DNA, 25 bp, Artificial
  probe
  misc_feature (1)..(25): SEQ ID NO: 1880; WAN024D62_at; Start 6; Stop 30
ttttgacgatttgaaaaacatcacc

SEQ ID NO: 144938 - DNA, 25 bp, Artificial
  probe
  misc_feature (1)..(25): SEQ ID NO: 1880; WAN024D62_at; Start 9; Stop 33
tgacgatttgaaaaacatcaccttt

SEQ ID NO: 144939 - DNA, 25 bp, Artificial
  probe
  misc_feature (1)..(25): SEQ ID NO: 1880; WAN024D62_at; Start 355; Stop 379
tttgcgattttcttcccaggtgagc

SEQ ID NO: 144940 - DNA, 25 bp, Artificial
  probe
  misc_feature (1)..(25): SEQ ID NO: 1880; WAN024D62_at; Start 130; Stop 154
gataaagtctttctagttgttcagg

SEQ ID NO: 144941 - DNA, 25 bp, Artificial
  probe
  misc_feature (1)..(25): SEQ ID NO: 1880; WAN024D62_at; Start 308; Stop 332
ttgttcattgtcatgaacactaccc

SEQ ID NO: 144942 - DNA, 25 bp, Artificial
  probe
  misc_feature (1)..(25): SEQ ID NO: 1880; WAN024D62_at; Start 26; Stop 50
tcaccttttacaaagggattcatcc

SEQ ID NO: 144943 - DNA, 25 bp, Artificial
  probe
  misc_feature (1)..(25): SEQ ID NO: 1880; WAN024D62_at; Start 298; Stop 322
gacattggctttgttcattgtcatg

SEQ ID NO: 144944 - DNA, 25 bp, Artificial
  probe
  misc_feature (1)..(25): SEQ ID NO: 1880; WAN024D62_at; Start 250; Stop 274
tacggttcacgtatcaaagacgagg

SEQ ID NO: 144945 - DNA, 25 bp, Artificial
  probe
  misc_feature (1)..(25): SEQ ID NO: 1880; WAN024D62_at; Start 375; Stop 399
tgagccacatcagccaaatggttat

SEQ ID NO: 144946 - DNA, 25 bp, Artificial
  probe
  misc_feature (1)..(25): SEQ ID NO: 1880; WAN024D62_at; Start 350; Stop 374
acaattttgcgattttcttcccagg

SEQ ID NO: 144947 - DNA, 25 bp, Artificial
  probe
  misc_feature (1)..(25): SEQ ID NO: 1880; WAN024D62_at; Start 268; Stop 292
gacgaggcagtagcattcgacgaag

SEQ ID NO: 144948 - DNA, 25 bp, Artificial
  probe
  misc_feature (1)..(25): SEQ ID NO: 1880; WAN024D62_at; Start 141; Stop 165
tctagttgttcaggaaaatgtcctc

SEQ ID NO: 144949 - DNA, 25 bp, Artificial
  probe
  misc_feature (1)..(25): SEQ ID NO: 1880; WAN024D62_at; Start 405; Stop 429
catggaagaaaaggttcgaaaatat

SEQ ID NO: 144950 - DNA, 25 bp, Artificial
  probe
  misc_feature (1)..(25): SEQ ID NO: 1880; WAN024D62_at; Start 359; Stop 383
cgattttcttcccaggtgagccaca

SEQ ID NO: 144951 - DNA, 25 bp, Artificial
  probe
  misc_feature (1)..(25): SEQ ID NO: 1880; WAN024D62_at; Start 13; Stop 37
gatttgaaaaacatcaccttttaca

SEQ ID NO: 144952 - DNA, 25 bp, Artificial
  probe
  misc_feature (1)..(25): SEQ ID NO: 1880; WAN024D62_at; Start 238; Stop 262
gaatattcgagctacggttcacgta

SEQ ID NO: 144953 - DNA, 25 bp, Artificial
  probe
  misc_feature (1)..(25): SEQ ID NO: 1880; WAN024D62_at; Start 370; Stop 394
ccaggtgagccacatcagccaaatg

SEQ ID NO: 144954 - DNA, 25 bp, Artificial
  probe
  misc_feature (1)..(25): SEQ ID NO: 1880; WAN024D62_at; Start 373; Stop 397
ggtgagccacatcagccaaatggtt

SEQ ID NO: 144955 - DNA, 25 bp, Artificial
  probe
  misc_feature (1)..(25): SEQ ID NO: 1880; WAN024D62_at; Start 388; Stop 412
ccaaatggttatgcaggcatggaag

SEQ ID NO: 144956 - DNA, 25 bp, Artificial
  probe
  misc_feature (1)..(25): SEQ ID NO: 1880; WAN024D62_at; Start 401; Stop 425
caggcatggaagaaaaggttcgaaa

SEQ ID NO: 144957 - DNA, 25 bp, Artificial
  probe
  misc_feature (1)..(25): SEQ ID NO: 1880; WAN024D62_at; Start 385; Stop 409
cagccaaatggttatgcaggcatgg

SEQ ID NO: 144958 - DNA, 25 bp, Artificial
  probe
  misc_feature (1)..(25): SEQ ID NO: 1880; WAN024D62_at; Start 382; Stop 406
catcagccaaatggttatgcaggca

SEQ ID NO: 144959 - DNA, 25 bp, Artificial
  probe
  misc_feature (1)..(25): SEQ ID NO: 1880; WAN024D62_at; Start 264; Stop 288
caaagacgaggcagtagcattcgac

SEQ ID NO: 144960 - DNA, 25 bp, Artificial
  probe
  misc_feature (1)..(25): SEQ ID NO: 1880; WAN024D62_at; Start 261; Stop 285
tatcaaagacgaggcagtagcattc

SEQ ID NO: 144961 - DNA, 25 bp, Artificial
  probe
  misc_feature (1)..(25): SEQ ID NO: 1880; WAN024D62_at; Start 378; Stop 402
gccacatcagccaaatggttatgca

SEQ ID NO: 144962 - DNA, 25 bp, Artificial
  probe
  misc_feature (1)..(25): SEQ ID NO: 1880; WAN024D62_at; Start 363; Stop 387
tttcttcccaggtgagccacatcag

SEQ ID NO: 144963 - DNA, 25 bp, Artificial
  probe
  misc_feature (1)..(25): SEQ ID NO: 1880; WAN024D62_at; Start 253; Stop 277
ggttcacgtatcaaagacgaggcag

SEQ ID NO: 144964 - DNA, 25 bp, Artificial
  probe
  misc_feature (1)..(25): SEQ ID NO: 1880; WAN024D62_at; Start 271; Stop 295
gaggcagtagcattcgacgaagcga

SEQ ID NO: 144965 - DNA, 25 bp, Artificial
  probe
  misc_feature (1)..(25): SEQ ID NO: 1384; WAN024D63_at; Start 112; Stop 136
ggtggacctcatatcttacaaaaga

SEQ ID NO: 144966 - DNA, 25 bp, Artificial
  probe
  misc_feature (1)..(25): SEQ ID NO: 1384; WAN024D63_at; Start 53; Stop 77
tggttgatcaagaggggcaacttct

SEQ ID NO: 144967 - DNA, 25 bp, Artificial
  probe
  misc_feature (1)..(25): SEQ ID NO: 1384; WAN024D63_at; Start 183; Stop 207
tgttgccatatcttctgctgggatg

SEQ ID NO: 144968 - DNA, 25 bp, Artificial
  probe
  misc_feature (1)..(25): SEQ ID NO: 1384; WAN024D63_at; Start 189; Stop 213
catatcttctgctgggatggtggat

SEQ ID NO: 144969 - DNA, 25 bp, Artificial
  probe
  misc_feature (1)..(25): SEQ ID NO: 1384; WAN024D63_at; Start 161; Stop 185
tagaaaaaggcccagtagcaggtgt

SEQ ID NO: 144970 - DNA, 25 bp, Artificial
  probe
  misc_feature (1)..(25): SEQ ID NO: 1384; WAN024D63_at; Start 11; Stop 35
acgttgcaattgatatcggtggaac

SEQ ID NO: 144971 - DNA, 25 bp, Artificial
  probe
  misc_feature (1)..(25): SEQ ID NO: 1384; WAN024D63_at; Start 125; Stop 149
tcttacaaaagaccaaagatatcgt

SEQ ID NO: 144972 - DNA, 25 bp, Artificial
  probe
  misc_feature (1)..(25): SEQ ID NO: 1384; WAN024D63_at; Start 654; Stop 678
ctatctaggaaaaggtctggcaaat

SEQ ID NO: 144973 - DNA, 25 bp, Artificial
  probe
  misc_feature (1)..(25): SEQ ID NO: 1384; WAN024D63_at; Start 659; Stop 683
taggaaaaggtctggcaaatatttg

SEQ ID NO: 144974 - DNA, 25 bp, Artificial
  probe
  misc_feature (1)..(25): SEQ ID NO: 1384; WAN024D63_at; Start 130; Stop 154
caaaagaccaaagatatcgtagcta

SEQ ID NO: 144975 - DNA, 25 bp, Artificial
  probe
  misc_feature (1)..(25): SEQ ID NO: 1384; WAN024D63_at; Start 319; Stop 343
gaaaatgatgtcaactgtgcaggtc

SEQ ID NO: 144976 - DNA, 25 bp, Artificial
  probe
  misc_feature (1)..(25): SEQ ID NO: 1384; WAN024D63_at; Start 157; Stop 181
tatttagaaaaaggcccagtagcag

SEQ ID NO: 144977 - DNA, 25 bp, Artificial
  probe
  misc_feature (1)..(25): SEQ ID NO: 1384; WAN024D63_at; Start 10; Stop 34
tacgttgcaattgatatcggtggaa

SEQ ID NO: 144978 - DNA, 25 bp, Artificial
  probe
  misc_feature (1)..(25): SEQ ID NO: 1384; WAN024D63_at; Start 657; Stop 681
tctaggaaaaggtctggcaaatatt

SEQ ID NO: 144979 - DNA, 25 bp, Artificial
  probe
  misc_feature (1)..(25): SEQ ID NO: 1384; WAN024D63_at; Start 192; Stop 216
atcttctgctgggatggtggatccg

SEQ ID NO: 144980 - DNA, 25 bp, Artificial
  probe
  misc_feature (1)..(25): SEQ ID NO: 1384; WAN024D63_at; Start 652; Stop 676
gactatctaggaaaaggtctggcaa

SEQ ID NO: 144981 - DNA, 25 bp, Artificial
  probe
  misc_feature (1)..(25): SEQ ID NO: 1384; WAN024D63_at; Start 181; Stop 205
ggtgttgccatatcttctgctggga

SEQ ID NO: 144982 - DNA, 25 bp, Artificial
  probe
  misc_feature (1)..(25): SEQ ID NO: 1384; WAN024D63_at; Start 173; Stop 197
cagtagcaggtgttgccatatcttc

SEQ ID NO: 144983 - DNA, 25 bp, Artificial
  probe
  misc_feature (1)..(25): SEQ ID NO: 1384; WAN024D63_at; Start 110; Stop 134
agggtggacctcatatcttacaaaa

SEQ ID NO: 144984 - DNA, 25 bp, Artificial
  probe
  misc_feature (1)..(25): SEQ ID NO: 1384; WAN024D63_at; Start 320; Stop 344
aaaatgatgtcaactgtgcaggtct

SEQ ID NO: 144985 - DNA, 25 bp, Artificial
  probe
  misc_feature (1)..(25): SEQ ID NO: 1384; WAN024D63_at; Start 221; Stop 245
agggtgagattttctatgctgggcc

SEQ ID NO: 144986 - DNA, 25 bp, Artificial
  probe
  misc_feature (1)..(25): SEQ ID NO: 1384; WAN024D63_at; Start 42; Stop 66
caagtatggtttggttgatcaagag

SEQ ID NO: 144987 - DNA, 25 bp, Artificial
  probe
  misc_feature (1)..(25): SEQ ID NO: 1384; WAN024D63_at; Start 135; Stop 159
gaccaaagatatcgtagctagttat

SEQ ID NO: 144988 - DNA, 25 bp, Artificial
  probe
  misc_feature (1)..(25): SEQ ID NO: 1384; WAN024D63_at; Start 37; Stop 61
aacatcaagtatggtttggttgatc

SEQ ID NO: 144989 - DNA, 25 bp, Artificial
  probe
  misc_feature (1)..(25): SEQ ID NO: 1384; WAN024D63_at; Start 166; Stop 190
aaaggcccagtagcaggtgttgcca

SEQ ID NO: 144990 - DNA, 25 bp, Artificial
  probe
  misc_feature (1)..(25): SEQ ID NO: 1384; WAN024D63_at; Start 164; Stop 188
aaaaaggcccagtagcaggtgttgc

SEQ ID NO: 144991 - DNA, 25 bp, Artificial
  probe
  misc_feature (1)..(25): SEQ ID NO: 1384; WAN024D63_at; Start 115; Stop 139
ggacctcatatcttacaaaagacca

SEQ ID NO: 144992 - DNA, 25 bp, Artificial
  probe
  misc_feature (1)..(25): SEQ ID NO: 1384; WAN024D63_at; Start 214; Stop 238
ccggataagggtgagattttctatg

SEQ ID NO: 144993 - DNA, 25 bp, Artificial
  probe
  misc_feature (1)..(25): SEQ ID NO: 1384; WAN024D63_at; Start 210; Stop 234
ggatccggataagggtgagattttc

SEQ ID NO: 144994 - DNA, 25 bp, Artificial
  probe
  misc_feature (1)..(25): SEQ ID NO: 1384; WAN024D63_at; Start 101; Stop 125
aggcgcataagggtggacctcatat

SEQ ID NO: 144995 - DNA, 25 bp, Artificial
  probe
  misc_feature (1)..(25): SEQ ID NO: 1384; WAN024D63_at; Start 170; Stop 194
gcccagtagcaggtgttgccatatc

SEQ ID NO: 144996 - DNA, 25 bp, Artificial
  probe
  misc_feature (1)..(25): SEQ ID NO: 1384; WAN024D63_at; Start 247; Stop 271
caaatccctaactacgcaggcaccc

SEQ ID NO: 144997 - DNA, 25 bp, Artificial
  probe
  misc_feature (1)..(25): SEQ ID NO: 1384; WAN024D63_at; Start 142; Stop 166
gatatcgtagctagttatttagaaa

SEQ ID NO: 144998 - DNA, 25 bp, Artificial
  probe
  misc_feature (1)..(25): SEQ ID NO: 1384; WAN024D63_at; Start 106; Stop 130
cataagggtggacctcatatcttac

SEQ ID NO: 144999 - DNA, 25 bp, Artificial
  probe
  misc_feature (1)..(25): SEQ ID NO: 1281; WAN024D64_at; Start 418; Stop 442
gggaactctctagtttatctattga

SEQ ID NO: 145000 - DNA, 25 bp, Artificial
  probe
  misc_feature (1)..(25): SEQ ID NO: 1281; WAN024D64_at; Start 209; Stop 233
tgccactgtcagaaagcctaccctt

SEQ ID NO: 145001 - DNA, 25 bp, Artificial
  probe
  misc_feature (1)..(25): SEQ ID NO: 1281; WAN024D64_at; Start 488; Stop 512
tgacctttgccctaaatgccttgat

SEQ ID NO: 145002 - DNA, 25 bp, Artificial
  probe
  misc_feature (1)..(25): SEQ ID NO: 1281; WAN024D64_at; Start 188; Stop 212
gttggtactgggtcaatcatatgcc

SEQ ID NO: 145003 - DNA, 25 bp, Artificial
  probe
  misc_feature (1)..(25): SEQ ID NO: 1281; WAN024D64_at; Start 522; Stop 546
caatttggtgacaggtggcgattac

SEQ ID NO: 145004 - DNA, 25 bp, Artificial
  probe
  misc_feature (1)..(25): SEQ ID NO: 1281; WAN024D64_at; Start 533; Stop 557
caggtggcgattacggatttttgac

SEQ ID NO: 145005 - DNA, 25 bp, Artificial
  probe
  misc_feature (1)..(25): SEQ ID NO: 1281; WAN024D64_at; Start 395; Stop 419
tctttggtcatttagcactcttggg

SEQ ID NO: 145006 - DNA, 25 bp, Artificial
  probe
  misc_feature (1)..(25): SEQ ID NO: 1281; WAN024D64_at; Start 69; Stop 93
tgttagcctatttacgctcttagcc

SEQ ID NO: 145007 - DNA, 25 bp, Artificial
  probe
  misc_feature (1)..(25): SEQ ID NO: 1281; WAN024D64_at; Start 303; Stop 327
tgcattattgggaacatttgggaca

SEQ ID NO: 145008 - DNA, 25 bp, Artificial
  probe
  misc_feature (1)..(25): SEQ ID NO: 1281; WAN024D64_at; Start 227; Stop 251
tacccttttaccattgccgtatggc

SEQ ID NO: 145009 - DNA, 25 bp, Artificial
  probe
  misc_feature (1)..(25): SEQ ID NO: 1281; WAN024D64_at; Start 433; Stop 457
tatctattgagacagtataatgcgc

SEQ ID NO: 145010 - DNA, 25 bp, Artificial
  probe
  misc_feature (1)..(25): SEQ ID NO: 1281; WAN024D64_at; Start 257; Stop 281
ttgtggtactcttgcttcctggtca

SEQ ID NO: 145011 - DNA, 25 bp, Artificial
  probe
  misc_feature (1)..(25): SEQ ID NO: 1281; WAN024D64_at; Start 546; Stop 570
cggatttttgacaaaaccgccattg

SEQ ID NO: 145012 - DNA, 25 bp, Artificial
  probe
  misc_feature (1)..(25): SEQ ID NO: 1281; WAN024D64_at; Start 317; Stop 341
catttgggacattagcagcctttgt

SEQ ID NO: 145013 - DNA, 25 bp, Artificial
  probe
  misc_feature (1)..(25): SEQ ID NO: 1281; WAN024D64_at; Start 143; Stop 167
gatttttccaaatcttgcagactgt

SEQ ID NO: 145014 - DNA, 25 bp, Artificial
  probe
  misc_feature (1)..(25): SEQ ID NO: 1281; WAN024D64_at; Start 197; Stop 221
gggtcaatcatatgccactgtcaga

SEQ ID NO: 145015 - DNA, 25 bp, Artificial
  probe
  misc_feature (1)..(25): SEQ ID NO: 1281; WAN024D64_at; Start 243; Stop 267
ccgtatggctatgtttgtggtactc

SEQ ID NO: 145016 - DNA, 25 bp, Artificial
  probe
  misc_feature (1)..(25): SEQ ID NO: 1281; WAN024D64_at; Start 173; Stop 197
taatccttctttatggttggtactg

SEQ ID NO: 145017 - DNA, 25 bp, Artificial
  probe
  misc_feature (1)..(25): SEQ ID NO: 1281; WAN024D64_at; Start 500; Stop 524
taaatgccttgatttttgtggtcaa

SEQ ID NO: 145018 - DNA, 25 bp, Artificial
  probe
  misc_feature (1)..(25): SEQ ID NO: 1281; WAN024D64_at; Start 602; Stop 626
tacttgtttcaattgtgctggtagc

SEQ ID NO: 145019 - DNA, 25 bp, Artificial
  probe
  misc_feature (1)..(25): SEQ ID NO: 1281; WAN024D64_at; Start 667; Stop 691
gctcaagaagcagaaaaaatgattg

SEQ ID NO: 145020 - DNA, 25 bp, Artificial
  probe
  misc_feature (1)..(25): SEQ ID NO: 1281; WAN024D64_at; Start 332; Stop 356
cagcctttgtttatccagtgccaga

SEQ ID NO: 145021 - DNA, 25 bp, Artificial
  probe
  misc_feature (1)..(25): SEQ ID NO: 1281; WAN024D64_at; Start 89; Stop 113
tagccttaaccttttatacagccca

SEQ ID NO: 145022 - DNA, 25 bp, Artificial
  probe
  misc_feature (1)..(25): SEQ ID NO: 1281; WAN024D64_at; Start 448; Stop 472
tataatgcgcgattgctggatgtga

SEQ ID NO: 145023 - DNA, 25 bp, Artificial
  probe
  misc_feature (1)..(25): SEQ ID NO: 1281; WAN024D64_at; Start 575; Stop 599
gggatcacggtctagtagctaatta

SEQ ID NO: 145024 - DNA, 25 bp, Artificial
  probe
  misc_feature (1)..(25): SEQ ID NO: 1281; WAN024D64_at; Start 462; Stop 486
gctggatgtgaagggaatttttctc

SEQ ID NO: 145025 - DNA, 25 bp, Artificial
  probe
  misc_feature (1)..(25): SEQ ID NO: 1281; WAN024D64_at; Start 617; Stop 641
tgctggtagctactatcagtttgac

SEQ ID NO: 145026 - DNA, 25 bp, Artificial
  probe
  misc_feature (1)..(25): SEQ ID NO: 1281; WAN024D64_at; Start 158; Stop 182
tgcagactgttcagttaatccttct

SEQ ID NO: 145027 - DNA, 25 bp, Artificial
  probe
  misc_feature (1)..(25): SEQ ID NO: 1281; WAN024D64_at; Start 474; Stop 498
gggaatttttctcatgacctttgcc

SEQ ID NO: 145028 - DNA, 25 bp, Artificial
  probe
  misc_feature (1)..(25): SEQ ID NO: 1281; WAN024D64_at; Start 348; Stop 372
agtgccagatgcttacccttttcca

SEQ ID NO: 145029 - DNA, 25 bp, Artificial
  probe
  misc_feature (1)..(25): SEQ ID NO: 1281; WAN024D64_at; Start 54; Stop 78
tgaccttttttggtatgttagccta

SEQ ID NO: 145030 - DNA, 25 bp, Artificial
  probe
  misc_feature (1)..(25): SEQ ID NO: 1281; WAN024D64_at; Start 655; Stop 679
gaattctttttagctcaagaagcag

SEQ ID NO: 145031 - DNA, 25 bp, Artificial
  probe
  misc_feature (1)..(25): SEQ ID NO: 1281; WAN024D64_at; Start 12; Stop 36
ggatattttctttacgactcaggca

SEQ ID NO: 145032 - DNA, 25 bp, Artificial
  probe
  misc_feature (1)..(25): SEQ ID NO: 1281; WAN024D64_at; Start 103; Stop 127
tatacagcccatcgctatcgtgaaa

SEQ ID NO: 145033 - DNA, 25 bp, Artificial
  probe
  misc_feature (1)..(25): SEQ ID NO: 1254; WAN024D65_at; Start 521; Stop 545
aggcggcccaagatttacaaagaga

SEQ ID NO: 145034 - DNA, 25 bp, Artificial
  probe
  misc_feature (1)..(25): SEQ ID NO: 1254; WAN024D65_at; Start 542; Stop 566
gagaaattcaagagaaacaaattcc

SEQ ID NO: 145035 - DNA, 25 bp, Artificial
  probe
  misc_feature (1)..(25): SEQ ID NO: 1254; WAN024D65_at; Start 231; Stop 255
gattggtaccttgcaaagacgtaag

SEQ ID NO: 145036 - DNA, 25 bp, Artificial
  probe
  misc_feature (1)..(25): SEQ ID NO: 1254; WAN024D65_at; Start 495; Stop 519
cagtgagcagttgaaagagattttc

SEQ ID NO: 145037 - DNA, 25 bp, Artificial
  probe
  misc_feature (1)..(25): SEQ ID NO: 1254; WAN024D65_at; Start 418; Stop 442
gaaatcttgccagagttagccagac

SEQ ID NO: 145038 - DNA, 25 bp, Artificial
  probe
  misc_feature (1)..(25): SEQ ID NO: 1254; WAN024D65_at; Start 125; Stop 149
cggaagccttgcttccgctaggtgt

SEQ ID NO: 145039 - DNA, 25 bp, Artificial
  probe
  misc_feature (1)..(25): SEQ ID NO: 1254; WAN024D65_at; Start 559; Stop 583
caaattccaaatatgcctatgaccg

SEQ ID NO: 145040 - DNA, 25 bp, Artificial
  probe
  misc_feature (1)..(25): SEQ ID NO: 1254; WAN024D65_at; Start 203; Stop 227
taaaagatcgagatgtgacttggca

SEQ ID NO: 145041 - DNA, 25 bp, Artificial
  probe
  misc_feature (1)..(25): SEQ ID NO: 1254; WAN024D65_at; Start 165; Stop 189
aaatcgtgtagataagtttctggaa

SEQ ID NO: 145042 - DNA, 25 bp, Artificial
  probe
  misc_feature (1)..(25): SEQ ID NO: 1254; WAN024D65_at; Start 324; Stop 348
tcaaaaaagaagtgaccgagtcatc

SEQ ID NO: 145043 - DNA, 25 bp, Artificial
  probe
  misc_feature (1)..(25): SEQ ID NO: 1254; WAN024D65_at; Start 102; Stop 126
caagtatgtagatgtaccgacagcg

SEQ ID NO: 145044 - DNA, 25 bp, Artificial
  probe
  misc_feature (1)..(25): SEQ ID NO: 1254; WAN024D65_at; Start 112; Stop 136
gatgtaccgacagcggaagccttgc

SEQ ID NO: 145045 - DNA, 25 bp, Artificial
  probe
  misc_feature (1)..(25): SEQ ID NO: 1254; WAN024D65_at; Start 430; Stop 454
gagttagccagactagataagattg

SEQ ID NO: 145046 - DNA, 25 bp, Artificial
  probe
  misc_feature (1)..(25): SEQ ID NO: 1254; WAN024D65_at; Start 636; Stop 660
cacttttgttcgtataggtacatca

SEQ ID NO: 145047 - DNA, 25 bp, Artificial
  probe
  misc_feature (1)..(25): SEQ ID NO: 1254; WAN024D65_at; Start 597; Stop 621
aatgagtcgtgattataaagaagcg

SEQ ID NO: 145048 - DNA, 25 bp, Artificial
  probe
  misc_feature (1)..(25): SEQ ID NO: 1254; WAN024D65_at; Start 16; Stop 40
aatacagaacttgtttttcgagaag

SEQ ID NO: 145049 - DNA, 25 bp, Artificial
  probe
  misc_feature (1)..(25): SEQ ID NO: 1254; WAN024D65_at; Start 467; Stop 491
taatgacgatggcaccttttgaggc

SEQ ID NO: 145050 - DNA, 25 bp, Artificial
  probe
  misc_feature (1)..(25): SEQ ID NO: 1254; WAN024D65_at; Start 274; Stop 298
tacgttgattatttccatgcattgg

SEQ ID NO: 145051 - DNA, 25 bp, Artificial
  probe
  misc_feature (1)..(25): SEQ ID NO: 1254; WAN024D65_at; Start 574; Stop 598
cctatgaccgagttaagtatgggaa

SEQ ID NO: 145052 - DNA, 25 bp, Artificial
  probe
  misc_feature (1)..(25): SEQ ID NO: 1254; WAN024D65_at; Start 386; Stop 410
gcaaacacggtttttcgagagagga

SEQ ID NO: 145053 - DNA, 25 bp, Artificial
  probe
  misc_feature (1)..(25): SEQ ID NO: 1254; WAN024D65_at; Start 151; Stop 175
catcatatcggtgaaaatcgtgtag

SEQ ID NO: 145054 - DNA, 25 bp, Artificial
  probe
  misc_feature (1)..(25): SEQ ID NO: 1254; WAN024D65_at; Start 612; Stop 636
taaagaagcgattcaattcggttcc

SEQ ID NO: 145055 - DNA, 25 bp, Artificial
  probe
  misc_feature (1)..(25): SEQ ID NO: 1254; WAN024D65_at; Start 404; Stop 428
gagaggaactgctggaaatcttgcc

SEQ ID NO: 145056 - DNA, 25 bp, Artificial
  probe
  misc_feature (1)..(25): SEQ ID NO: 1254; WAN024D65_at; Start 479; Stop 503
caccttttgaggctagcagtgagca

SEQ ID NO: 145057 - DNA, 25 bp, Artificial
  probe
  misc_feature (1)..(25): SEQ ID NO: 1254; WAN024D65_at; Start 73; Stop 97
agtggttcggtctctgtcattgcag

SEQ ID NO: 145058 - DNA, 25 bp, Artificial
  probe
  misc_feature (1)..(25): SEQ ID NO: 1254; WAN024D65_at; Start 370; Stop 394
atttctaaagaagaaagcaaacacg

SEQ ID NO: 145059 - DNA, 25 bp, Artificial
  probe
  misc_feature (1)..(25): SEQ ID NO: 1254; WAN024D65_at; Start 60; Stop 84
tgctcatcgagagagtggttcggtc

SEQ ID NO: 145060 - DNA, 25 bp, Artificial
  probe
  misc_feature (1)..(25): SEQ ID NO: 1254; WAN024D65_at; Start 340; Stop 364
cgagtcatcaagtgtttccttcaag

SEQ ID NO: 145061 - DNA, 25 bp, Artificial
  probe
  misc_feature (1)..(25): SEQ ID NO: 1254; WAN024D65_at; Start 457; Stop 481
tatgttggtttaatgacgatggcac

SEQ ID NO: 145062 - DNA, 25 bp, Artificial
  probe
  misc_feature (1)..(25): SEQ ID NO: 1254; WAN024D65_at; Start 508; Stop 532
aaagagattttcaaggcggcccaag

SEQ ID NO: 145063 - DNA, 25 bp, Artificial
  probe
  misc_feature (1)..(25): SEQ ID NO: 1254; WAN024D65_at; Start 31; Stop 55
tttcgagaagttgcagaggctagtc

SEQ ID NO: 145064 - DNA, 25 bp, Artificial
  probe
  misc_feature (1)..(25): SEQ ID NO: 1254; WAN024D65_at; Start 293; Stop 317
cattggactcagtaaagctagcagg

SEQ ID NO: 145065 - DNA, 25 bp, Artificial
  probe
  misc_feature (1)..(25): SEQ ID NO: 1254; WAN024D65_at; Start 219; Stop 243
gacttggcatttgattggtaccttg

SEQ ID NO: 145066 - DNA, 25 bp, Artificial
  probe
  misc_feature (1)..(25): SEQ ID NO: 1254; WAN024D65_at; Start 46; Stop 70
gaggctagtctgagtgctcatcgag

SEQ ID NO: 145067 - DNA, 25 bp, Artificial
  probe
  misc_feature (1)..(25): SEQ ID NO: 2946; WAN024D66_at; Start 161; Stop 185
caaaagagaacaatatcaccagact

SEQ ID NO: 145068 - DNA, 25 bp, Artificial
  probe
  misc_feature (1)..(25): SEQ ID NO: 2946; WAN024D66_at; Start 518; Stop 542
tgaagcgaaatagagtacgataact

SEQ ID NO: 145069 - DNA, 25 bp, Artificial
  probe
  misc_feature (1)..(25): SEQ ID NO: 2946; WAN024D66_at; Start 506; Stop 530
tcggttttgatatgaagcgaaatag

SEQ ID NO: 145070 - DNA, 25 bp, Artificial
  probe
  misc_feature (1)..(25): SEQ ID NO: 2946; WAN024D66_at; Start 220; Stop 244
cagcgtgcaacggataaggtcatta

SEQ ID NO: 145071 - DNA, 25 bp, Artificial
  probe
  misc_feature (1)..(25): SEQ ID NO: 2946; WAN024D66_at; Start 288; Stop 312
tgttgatttattggcaggaaacgaa

SEQ ID NO: 145072 - DNA, 25 bp, Artificial
  probe
  misc_feature (1)..(25): SEQ ID NO: 2946; WAN024D66_at; Start 379; Stop 403
ggagcttgtcatgttttagctggaa

SEQ ID NO: 145073 - DNA, 25 bp, Artificial
  probe
  misc_feature (1)..(25): SEQ ID NO: 2946; WAN024D66_at; Start 420; Stop 444
ttctaccatgtatttgttgacacca

SEQ ID NO: 145074 - DNA, 25 bp, Artificial
  probe
  misc_feature (1)..(25): SEQ ID NO: 2946; WAN024D66_at; Start 185; Stop 209
ttcatgcaagacaacaggaattggc

SEQ ID NO: 145075 - DNA, 25 bp, Artificial
  probe
  misc_feature (1)..(25): SEQ ID NO: 2946; WAN024D66_at; Start 395; Stop 419
tagctggaaatttgaaaaaggtagc

SEQ ID NO: 145076 - DNA, 25 bp, Artificial
  probe
  misc_feature (1)..(25): SEQ ID NO: 2946; WAN024D66_at; Start 134; Stop 158
tgaatcaaccttcacagtcggctgg

SEQ ID NO: 145077 - DNA, 25 bp, Artificial
  probe
  misc_feature (1)..(25): SEQ ID NO: 2946; WAN024D66_at; Start 493; Stop 517
caacagggtgagttcggttttgata

SEQ ID NO: 145078 - DNA, 25 bp, Artificial
  probe
  misc_feature (1)..(25): SEQ ID NO: 2946; WAN024D66_at; Start 67; Stop 91
ccttatgaaaaaagagatgagcctg

SEQ ID NO: 145079 - DNA, 25 bp, Artificial
  probe
  misc_feature (1)..(25): SEQ ID NO: 2946; WAN024D66_at; Start 75; Stop 99
aaaaagagatgagcctgtgtttact

SEQ ID NO: 145080 - DNA, 25 bp, Artificial
  probe
  misc_feature (1)..(25): SEQ ID NO: 2946; WAN024D66_at; Start 199; Stop 223
caggaattggcaaatcagagtcagc

SEQ ID NO: 145081 - DNA, 25 bp, Artificial
  probe
  misc_feature (1)..(25): SEQ ID NO: 2946; WAN024D66_at; Start 299; Stop 323
tggcaggaaacgaaagtatcttgat

SEQ ID NO: 145082 - DNA, 25 bp, Artificial
  probe
  misc_feature (1)..(25): SEQ ID NO: 2946; WAN024D66_at; Start 466; Stop 490
gaagatatccgtttaccagatgaag

SEQ ID NO: 145083 - DNA, 25 bp, Artificial
  probe
  misc_feature (1)..(25): SEQ ID NO: 2946; WAN024D66_at; Start 171; Stop 195
caatatcaccagacttcatgcaaga

SEQ ID NO: 145084 - DNA, 25 bp, Artificial
  probe
  misc_feature (1)..(25): SEQ ID NO: 2946; WAN024D66_at; Start 365; Stop 389
tggactatttggatggagcttgtca

SEQ ID NO: 145085 - DNA, 25 bp, Artificial
  probe
  misc_feature (1)..(25): SEQ ID NO: 2946; WAN024D66_at; Start 349; Stop 373
caggctcgtcgttgtttggactatt

SEQ ID NO: 145086 - DNA, 25 bp, Artificial
  probe
  misc_feature (1)..(25): SEQ ID NO: 2946; WAN024D66_at; Start 481; Stop 505
ccagatgaagatcaacagggtgagt

SEQ ID NO: 145087 - DNA, 25 bp, Artificial
  probe
  misc_feature (1)..(25): SEQ ID NO: 2946; WAN024D66_at; Start 2; Stop 26
tgtctttaaaagatagattcgatag

SEQ ID NO: 145088 - DNA, 25 bp, Artificial
  probe
  misc_feature (1)..(25): SEQ ID NO: 2946; WAN024D66_at; Start 336; Stop 360
tatgacagaggtgcaggctcgtcgt

SEQ ID NO: 145089 - DNA, 25 bp, Artificial
  probe
  misc_feature (1)..(25): SEQ ID NO: 2946; WAN024D66_at; Start 52; Stop 76
gaggattcaagtctcccttatgaaa

SEQ ID NO: 145090 - DNA, 25 bp, Artificial
  probe
  misc_feature (1)..(25): SEQ ID NO: 2946; WAN024D66_at; Start 268; Stop 292
tatgaggatgcaacagaaattgttg

SEQ ID NO: 145091 - DNA, 25 bp, Artificial
  probe
  misc_feature (1)..(25): SEQ ID NO: 2946; WAN024D66_at; Start 329; Stop 353
ttcagtatatgacagaggtgcaggc

SEQ ID NO: 145092 - DNA, 25 bp, Artificial
  probe
  misc_feature (1)..(25): SEQ ID NO: 2946; WAN024D66_at; Start 101; Stop 125
cagtaaattcttcacaggaaccggc

SEQ ID NO: 145093 - DNA, 25 bp, Artificial
  probe
  misc_feature (1)..(25): SEQ ID NO: 2946; WAN024D66_at; Start 405; Stop 429
tttgaaaaaggtagcttctaccatg

SEQ ID NO: 145094 - DNA, 25 bp, Artificial
  probe
  misc_feature (1)..(25): SEQ ID NO: 2946; WAN024D66_at; Start 258; Stop 282
tcctagaaaatatgaggatgcaaca

SEQ ID NO: 145095 - DNA, 25 bp, Artificial
  probe
  misc_feature (1)..(25): SEQ ID NO: 2946; WAN024D66_at; Start 453; Stop 477
tattgtaaatgttgaagatatccgt

SEQ ID NO: 145096 - DNA, 25 bp, Artificial
  probe
  misc_feature (1)..(25): SEQ ID NO: 2946; WAN024D66_at; Start 30; Stop 54
tatagattattttacggaggatgag

SEQ ID NO: 145097 - DNA, 25 bp, Artificial
  probe
  misc_feature (1)..(25): SEQ ID NO: 2946; WAN024D66_at; Start 117; Stop 141
ggaaccggctctcccaatgaatcaa

SEQ ID NO: 145098 - DNA, 25 bp, Artificial
  probe
  misc_feature (1)..(25): SEQ ID NO: 2946; WAN024D66_at; Start 42; Stop 66
tacggaggatgaggattcaagtctc

SEQ ID NO: 145099 - DNA, 25 bp, Artificial
  probe
  misc_feature (1)..(25): SEQ ID NO: 2946; WAN024D66_at; Start 209; Stop 233
caaatcagagtcagcgtgcaacgga

SEQ ID NO: 145100 - DNA, 25 bp, Artificial
  probe
  misc_feature (1)..(25): SEQ ID NO: 2946; WAN024D66_at; Start 240; Stop 264
cattatagatgttcgttatcctaga

SEQ ID NO: 145101 - DNA, 25 bp, Artificial
  probe
  misc_feature (1)..(25): SEQ ID NO: 1887; WAN024D67_at; Start 90; Stop 114
tgcctacgaatccagtttaggtcgt

SEQ ID NO: 145102 - DNA, 25 bp, Artificial
  probe
  misc_feature (1)..(25): SEQ ID NO: 1887; WAN024D67_at; Start 234; Stop 258
cctagtgcgttttctggcgatgata

SEQ ID NO: 145103 - DNA, 25 bp, Artificial
  probe
  misc_feature (1)..(25): SEQ ID NO: 1887; WAN024D67_at; Start 25; Stop 49
tataatgcagtggatatttactccc

SEQ ID NO: 145104 - DNA, 25 bp, Artificial
  probe
  misc_feature (1)..(25): SEQ ID NO: 1887; WAN024D67_at; Start 51; Stop 75
gattttggtagccttcgctgtcatg

SEQ ID NO: 145105 - DNA, 25 bp, Artificial
  probe
  misc_feature (1)..(25): SEQ ID NO: 1887; WAN024D67_at; Start 65; Stop 89
tcgctgtcatgtcttggtttccagg

SEQ ID NO: 145106 - DNA, 25 bp, Artificial
  probe
  misc_feature (1)..(25): SEQ ID NO: 1887; WAN024D67_at; Start 28; Stop 52
aatgcagtggatatttactccctga

SEQ ID NO: 145107 - DNA, 25 bp, Artificial
  probe
  misc_feature (1)..(25): SEQ ID NO: 1887; WAN024D67_at; Start 149; Stop 173
ccttgcaacgcctgcctttacagat

SEQ ID NO: 145108 - DNA, 25 bp, Artificial
  probe
  misc_feature (1)..(25): SEQ ID NO: 1887; WAN024D67_at; Start 81; Stop 105
gtttccaggtgcctacgaatccagt

SEQ ID NO: 145109 - DNA, 25 bp, Artificial
  probe
  misc_feature (1)..(25): SEQ ID NO: 1887; WAN024D67_at; Start 57; Stop 81
ggtagccttcgctgtcatgtcttgg

SEQ ID NO: 145110 - DNA, 25 bp, Artificial
  probe
  misc_feature (1)..(25): SEQ ID NO: 1887; WAN024D67_at; Start 12; Stop 36
aattcgtatgatttataatgcagtg

SEQ ID NO: 145111 - DNA, 25 bp, Artificial
  probe
  misc_feature (1)..(25): SEQ ID NO: 1887; WAN024D67_at; Start 39; Stop 63
tatttactccctgattttggtagcc

SEQ ID NO: 145112 - DNA, 25 bp, Artificial
  probe
  misc_feature (1)..(25): SEQ ID NO: 1887; WAN024D67_at; Start 79; Stop 103
tggtttccaggtgcctacgaatcca

SEQ ID NO: 145113 - DNA, 25 bp, Artificial
  probe
  misc_feature (1)..(25): SEQ ID NO: 1887; WAN024D67_at; Start 59; Stop 83
tagccttcgctgtcatgtcttggtt

SEQ ID NO: 145114 - DNA, 25 bp, Artificial
  probe
  misc_feature (1)..(25): SEQ ID NO: 1887; WAN024D67_at; Start 161; Stop 185
tgcctttacagatagcgggtcttga

SEQ ID NO: 145115 - DNA, 25 bp, Artificial
  probe
  misc_feature (1)..(25): SEQ ID NO: 1887; WAN024D67_at; Start 86; Stop 110
caggtgcctacgaatccagtttagg

SEQ ID NO: 145116 - DNA, 25 bp, Artificial
  probe
  misc_feature (1)..(25): SEQ ID NO: 1887; WAN024D67_at; Start 230; Stop 254
aaaacctagtgcgttttctggcgat

SEQ ID NO: 145117 - DNA, 25 bp, Artificial
  probe
  misc_feature (1)..(25): SEQ ID NO: 1887; WAN024D67_at; Start 237; Stop 261
agtgcgttttctggcgatgatagga

SEQ ID NO: 145118 - DNA, 25 bp, Artificial
  probe
  misc_feature (1)..(25): SEQ ID NO: 1887; WAN024D67_at; Start 167; Stop 191
tacagatagcgggtcttgatttatc

SEQ ID NO: 145119 - DNA, 25 bp, Artificial
  probe
  misc_feature (1)..(25): SEQ ID NO: 1887; WAN024D67_at; Start 75; Stop 99
gtcttggtttccaggtgcctacgaa

SEQ ID NO: 145120 - DNA, 25 bp, Artificial
  probe
  misc_feature (1)..(25): SEQ ID NO: 1887; WAN024D67_at; Start 84; Stop 108
tccaggtgcctacgaatccagttta

SEQ ID NO: 145121 - DNA, 25 bp, Artificial
  probe
  misc_feature (1)..(25): SEQ ID NO: 1887; WAN024D67_at; Start 158; Stop 182
gcctgcctttacagatagcgggtct

SEQ ID NO: 145122 - DNA, 25 bp, Artificial
  probe
  misc_feature (1)..(25): SEQ ID NO: 1887; WAN024D67_at; Start 43; Stop 67
tactccctgattttggtagccttcg

SEQ ID NO: 145123 - DNA, 25 bp, Artificial
  probe
  misc_feature (1)..(25): SEQ ID NO: 1887; WAN024D67_at; Start 46; Stop 70
tccctgattttggtagccttcgctg

SEQ ID NO: 145124 - DNA, 25 bp, Artificial
  probe
  misc_feature (1)..(25): SEQ ID NO: 1887; WAN024D67_at; Start 155; Stop 179
aacgcctgcctttacagatagcggg

SEQ ID NO: 145125 - DNA, 25 bp, Artificial
  probe
  misc_feature (1)..(25): SEQ ID NO: 1887; WAN024D67_at; Start 111; Stop 135
tcgttggattgtagcgttggtgaaa

SEQ ID NO: 145126 - DNA, 25 bp, Artificial
  probe
  misc_feature (1)..(25): SEQ ID NO: 1887; WAN024D67_at; Start 232; Stop 256
aacctagtgcgttttctggcgatga

SEQ ID NO: 145127 - DNA, 25 bp, Artificial
  probe
  misc_feature (1)..(25): SEQ ID NO: 1887; WAN024D67_at; Start 116; Stop 140
ggattgtagcgttggtgaaaccagt

SEQ ID NO: 145128 - DNA, 25 bp, Artificial
  probe
  misc_feature (1)..(25): SEQ ID NO: 1887; WAN024D67_at; Start 153; Stop 177
gcaacgcctgcctttacagatagcg

SEQ ID NO: 145129 - DNA, 25 bp, Artificial
  probe
  misc_feature (1)..(25): SEQ ID NO: 1887; WAN024D67_at; Start 175; Stop 199
gcgggtcttgatttatctgtttggg

SEQ ID NO: 145130 - DNA, 25 bp, Artificial
  probe
  misc_feature (1)..(25): SEQ ID NO: 1887; WAN024D67_at; Start 94; Stop 118
tacgaatccagtttaggtcgttgga

SEQ ID NO: 145131 - DNA, 25 bp, Artificial
  probe
  misc_feature (1)..(25): SEQ ID NO: 1887; WAN024D67_at; Start 72; Stop 96
catgtcttggtttccaggtgcctac

SEQ ID NO: 145132 - DNA, 25 bp, Artificial
  probe
  misc_feature (1)..(25): SEQ ID NO: 1887; WAN024D67_at; Start 69; Stop 93
tgtcatgtcttggtttccaggtgcc

SEQ ID NO: 145133 - DNA, 25 bp, Artificial
  probe
  misc_feature (1)..(25): SEQ ID NO: 1887; WAN024D67_at; Start 163; Stop 187
cctttacagatagcgggtcttgatt

SEQ ID NO: 145134 - DNA, 25 bp, Artificial
  probe
  misc_feature (1)..(25): SEQ ID NO: 1887; WAN024D67_at; Start 102; Stop 126
cagtttaggtcgttggattgtagcg

SEQ ID NO: 145135 - DNA, 25 bp, Artificial
  probe
  misc_feature (1)..(25): SEQ ID NO: 5882; WAN024D68_at; Start 184; Stop 208
aagacattcgcccttgagtggcgtt

SEQ ID NO: 145136 - DNA, 25 bp, Artificial
  probe
  misc_feature (1)..(25): SEQ ID NO: 5882; WAN024D68_at; Start 122; Stop 146
tctacgaacaagtcttcctcgtcct

SEQ ID NO: 145137 - DNA, 25 bp, Artificial
  probe
  misc_feature (1)..(25): SEQ ID NO: 5882; WAN024D68_at; Start 177; Stop 201
caatgagaagacattcgcccttgag

SEQ ID NO: 145138 - DNA, 25 bp, Artificial
  probe
  misc_feature (1)..(25): SEQ ID NO: 5882; WAN024D68_at; Start 194; Stop 218
cccttgagtggcgtttcagcaatgc

SEQ ID NO: 145139 - DNA, 25 bp, Artificial
  probe
  misc_feature (1)..(25): SEQ ID NO: 5882; WAN024D68_at; Start 180; Stop 204
tgagaagacattcgcccttgagtgg

SEQ ID NO: 145140 - DNA, 25 bp, Artificial
  probe
  misc_feature (1)..(25): SEQ ID NO: 5882; WAN024D68_at; Start 83; Stop 107
tggtttttcttcacaccttgctgga

SEQ ID NO: 145141 - DNA, 25 bp, Artificial
  probe
  misc_feature (1)..(25): SEQ ID NO: 5882; WAN024D68_at; Start 48; Stop 72
tccactggtaaatcttagcgacttc

SEQ ID NO: 145142 - DNA, 25 bp, Artificial
  probe
  misc_feature (1)..(25): SEQ ID NO: 5882; WAN024D68_at; Start 173; Stop 197
tcaacaatgagaagacattcgccct

SEQ ID NO: 145143 - DNA, 25 bp, Artificial
  probe
  misc_feature (1)..(25): SEQ ID NO: 5882; WAN024D68_at; Start 27; Stop 51
cagcgtagagctgacttttattcca

SEQ ID NO: 145144 - DNA, 25 bp, Artificial
  probe
  misc_feature (1)..(25): SEQ ID NO: 5882; WAN024D68_at; Start 201; Stop 225
gtggcgtttcagcaatgctttctaa

SEQ ID NO: 145145 - DNA, 25 bp, Artificial
  probe
  misc_feature (1)..(25): SEQ ID NO: 5882; WAN024D68_at; Start 89; Stop 113
ttcttcacaccttgctggatgcggg

SEQ ID NO: 145146 - DNA, 25 bp, Artificial
  probe
  misc_feature (1)..(25): SEQ ID NO: 5882; WAN024D68_at; Start 35; Stop 59
agctgacttttattccactggtaaa

SEQ ID NO: 145147 - DNA, 25 bp, Artificial
  probe
  misc_feature (1)..(25): SEQ ID NO: 5882; WAN024D68_at; Start 145; Stop 169
cttttcctccacaccctgactggca

SEQ ID NO: 145148 - DNA, 25 bp, Artificial
  probe
  misc_feature (1)..(25): SEQ ID NO: 5882; WAN024D68_at; Start 63; Stop 87
tagcgacttccttgatagcttggtt

SEQ ID NO: 145149 - DNA, 25 bp, Artificial
  probe
  misc_feature (1)..(25): SEQ ID NO: 5882; WAN024D68_at; Start 94; Stop 118
cacaccttgctggatgcgggtttga

SEQ ID NO: 145150 - DNA, 25 bp, Artificial
  probe
  misc_feature (1)..(25): SEQ ID NO: 5882; WAN024D68_at; Start 8; Stop 32
tcttcccagtcgtggtaggcagcgt

SEQ ID NO: 145151 - DNA, 25 bp, Artificial
  probe
  misc_feature (1)..(25): SEQ ID NO: 5882; WAN024D68_at; Start 20; Stop 44
tggtaggcagcgtagagctgacttt

SEQ ID NO: 145152 - DNA, 25 bp, Artificial
  probe
  misc_feature (1)..(25): SEQ ID NO: 5882; WAN024D68_at; Start 4; Stop 28
tttttcttcccagtcgtggtaggca

SEQ ID NO: 145153 - DNA, 25 bp, Artificial
  probe
  misc_feature (1)..(25): SEQ ID NO: 5882; WAN024D68_at; Start 96; Stop 120
caccttgctggatgcgggtttgaat

SEQ ID NO: 145154 - DNA, 25 bp, Artificial
  probe
  misc_feature (1)..(25): SEQ ID NO: 5882; WAN024D68_at; Start 198; Stop 222
tgagtggcgtttcagcaatgctttc

SEQ ID NO: 145155 - DNA, 25 bp, Artificial
  probe
  misc_feature (1)..(25): SEQ ID NO: 5882; WAN024D68_at; Start 117; Stop 141
gaatttctacgaacaagtcttcctc

SEQ ID NO: 145156 - DNA, 25 bp, Artificial
  probe
  misc_feature (1)..(25): SEQ ID NO: 5882; WAN024D68_at; Start 102; Stop 126
gctggatgcgggtttgaatttctac

SEQ ID NO: 145157 - DNA, 25 bp, Artificial
  probe
  misc_feature (1)..(25): SEQ ID NO: 5882; WAN024D68_at; Start 166; Stop 190
ggcaccctcaacaatgagaagacat

SEQ ID NO: 145158 - DNA, 25 bp, Artificial
  probe
  misc_feature (1)..(25): SEQ ID NO: 5882; WAN024D68_at; Start 11; Stop 35
tcccagtcgtggtaggcagcgtaga

SEQ ID NO: 145159 - DNA, 25 bp, Artificial
  probe
  misc_feature (1)..(25): SEQ ID NO: 5882; WAN024D68_at; Start 31; Stop 55
gtagagctgacttttattccactgg

SEQ ID NO: 145160 - DNA, 25 bp, Artificial
  probe
  misc_feature (1)..(25): SEQ ID NO: 5882; WAN024D68_at; Start 53; Stop 77
tggtaaatcttagcgacttccttga

SEQ ID NO: 145161 - DNA, 25 bp, Artificial
  probe
  misc_feature (1)..(25): SEQ ID NO: 5882; WAN024D68_at; Start 162; Stop 186
gactggcaccctcaacaatgagaag

SEQ ID NO: 145162 - DNA, 25 bp, Artificial
  probe
  misc_feature (1)..(25): SEQ ID NO: 5882; WAN024D68_at; Start 76; Stop 100
gatagcttggtttttcttcacacct

SEQ ID NO: 145163 - DNA, 25 bp, Artificial
  probe
  misc_feature (1)..(25): SEQ ID NO: 5882; WAN024D68_at; Start 188; Stop 212
cattcgcccttgagtggcgtttcag

SEQ ID NO: 145164 - DNA, 25 bp, Artificial
  probe
  misc_feature (1)..(25): SEQ ID NO: 5882; WAN024D68_at; Start 108; Stop 132
tgcgggtttgaatttctacgaacaa

SEQ ID NO: 145165 - DNA, 25 bp, Artificial
  probe
  misc_feature (1)..(25): SEQ ID NO: 5882; WAN024D68_at; Start 171; Stop 195
cctcaacaatgagaagacattcgcc

SEQ ID NO: 145166 - DNA, 25 bp, Artificial
  probe
  misc_feature (1)..(25): SEQ ID NO: 5882; WAN024D68_at; Start 45; Stop 69
tattccactggtaaatcttagcgac

SEQ ID NO: 145167 - DNA, 25 bp, Artificial
  probe
  misc_feature (1)..(25): SEQ ID NO: 5882; WAN024D68_at; Start 160; Stop 184
ctgactggcaccctcaacaatgaga

SEQ ID NO: 145168 - DNA, 25 bp, Artificial
  probe
  misc_feature (1)..(25): SEQ ID NO: 5882; WAN024D68_at; Start 57; Stop 81
aaatcttagcgacttccttgatagc

SEQ ID NO: 145169 - DNA, 25 bp, Artificial
  probe
  misc_feature (1)..(25): SEQ ID NO: 1959; WAN024D69_at; Start 168; Stop 192
gcattttgacatttccaccaagcag

SEQ ID NO: 145170 - DNA, 25 bp, Artificial
  probe
  misc_feature (1)..(25): SEQ ID NO: 1959; WAN024D69_at; Start 124; Stop 148
tggattgctgctgaggatacgcgca

SEQ ID NO: 145171 - DNA, 25 bp, Artificial
  probe
  misc_feature (1)..(25): SEQ ID NO: 1959; WAN024D69_at; Start 597; Stop 621
gaccaaaatctatgaagaataccaa

SEQ ID NO: 145172 - DNA, 25 bp, Artificial
  probe
  misc_feature (1)..(25): SEQ ID NO: 1959; WAN024D69_at; Start 129; Stop 153
tgctgctgaggatacgcgcaataca

SEQ ID NO: 145173 - DNA, 25 bp, Artificial
  probe
  misc_feature (1)..(25): SEQ ID NO: 1959; WAN024D69_at; Start 332; Stop 356
ctattgaggaagaaattgcagttgt

SEQ ID NO: 145174 - DNA, 25 bp, Artificial
  probe
  misc_feature (1)..(25): SEQ ID NO: 1959; WAN024D69_at; Start 249; Stop 273
gaaagcagggcaaagtattgctcag

SEQ ID NO: 145175 - DNA, 25 bp, Artificial
  probe
  misc_feature (1)..(25): SEQ ID NO: 1959; WAN024D69_at; Start 237; Stop 261
gattggtttcttgaaagcagggcaa

SEQ ID NO: 145176 - DNA, 25 bp, Artificial
  probe
  misc_feature (1)..(25): SEQ ID NO: 1959; WAN024D69_at; Start 287; Stop 311
gtttgcctagcatttcagaccctgg

SEQ ID NO: 145177 - DNA, 25 bp, Artificial
  probe
  misc_feature (1)..(25): SEQ ID NO: 1959; WAN024D69_at; Start 241; Stop 265
ggtttcttgaaagcagggcaaagta

SEQ ID NO: 145178 - DNA, 25 bp, Artificial
  probe
  misc_feature (1)..(25): SEQ ID NO: 1959; WAN024D69_at; Start 131; Stop 155
ctgctgaggatacgcgcaatacagg

SEQ ID NO: 145179 - DNA, 25 bp, Artificial
  probe
  misc_feature (1)..(25): SEQ ID NO: 1959; WAN024D69_at; Start 271; Stop 295
caggtctctgatgccggtttgccta

SEQ ID NO: 145180 - DNA, 25 bp, Artificial
  probe
  misc_feature (1)..(25): SEQ ID NO: 1959; WAN024D69_at; Start 590; Stop 614
gggaattgaccaaaatctatgaaga

SEQ ID NO: 145181 - DNA, 25 bp, Artificial
  probe
  misc_feature (1)..(25): SEQ ID NO: 1959; WAN024D69_at; Start 27; Stop 51
gcagtctccctatggcaagctgtat

SEQ ID NO: 145182 - DNA, 25 bp, Artificial
  probe
  misc_feature (1)..(25): SEQ ID NO: 1959; WAN024D69_at; Start 264; Stop 288
tattgctcaggtctctgatgccggt

SEQ ID NO: 145183 - DNA, 25 bp, Artificial
  probe
  misc_feature (1)..(25): SEQ ID NO: 1959; WAN024D69_at; Start 275; Stop 299
tctctgatgccggtttgcctagcat

SEQ ID NO: 145184 - DNA, 25 bp, Artificial
  probe
  misc_feature (1)..(25): SEQ ID NO: 1959; WAN024D69_at; Start 161; Stop 185
tgctcaagcattttgacatttccac

SEQ ID NO: 145185 - DNA, 25 bp, Artificial
  probe
  misc_feature (1)..(25): SEQ ID NO: 1959; WAN024D69_at; Start 181; Stop 205
tccaccaagcagatcagttttcatg

SEQ ID NO: 145186 - DNA, 25 bp, Artificial
  probe
  misc_feature (1)..(25): SEQ ID NO: 1959; WAN024D69_at; Start 175; Stop 199
gacatttccaccaagcagatcagtt

SEQ ID NO: 145187 - DNA, 25 bp, Artificial
  probe
  misc_feature (1)..(25): SEQ ID NO: 1959; WAN024D69_at; Start 65; Stop 89
cgattggcaatctagatgatatgac

SEQ ID NO: 145188 - DNA, 25 bp, Artificial
  probe
  misc_feature (1)..(25): SEQ ID NO: 1959; WAN024D69_at; Start 296; Stop 320
gcatttcagaccctggtcatgattt

SEQ ID NO: 145189 - DNA, 25 bp, Artificial
  probe
  misc_feature (1)..(25): SEQ ID NO: 1959; WAN024D69_at; Start 191; Stop 215
agatcagttttcatgagcacaatgc

SEQ ID NO: 145190 - DNA, 25 bp, Artificial
  probe
  misc_feature (1)..(25): SEQ ID NO: 1959; WAN024D69_at; Start 329; Stop 353
cagctattgaggaagaaattgcagt

SEQ ID NO: 145191 - DNA, 25 bp, Artificial
  probe
  misc_feature (1)..(25): SEQ ID NO: 1959; WAN024D69_at; Start 292; Stop 316
cctagcatttcagaccctggtcatg

SEQ ID NO: 145192 - DNA, 25 bp, Artificial
  probe
  misc_feature (1)..(25): SEQ ID NO: 1959; WAN024D69_at; Start 186; Stop 210
caagcagatcagttttcatgagcac

SEQ ID NO: 145193 - DNA, 25 bp, Artificial
  probe
  misc_feature (1)..(25): SEQ ID NO: 1959; WAN024D69_at; Start 584; Stop 608
tggtcagggaattgaccaaaatcta

SEQ ID NO: 145194 - DNA, 25 bp, Artificial
  probe
  misc_feature (1)..(25): SEQ ID NO: 1959; WAN024D69_at; Start 840; Stop 864
tgcctaccacgactgggaagaaaaa

SEQ ID NO: 145195 - DNA, 25 bp, Artificial
  probe
  misc_feature (1)..(25): SEQ ID NO: 1959; WAN024D69_at; Start 58; Stop 82
gcaacgccgattggcaatctagatg

SEQ ID NO: 145196 - DNA, 25 bp, Artificial
  probe
  misc_feature (1)..(25): SEQ ID NO: 1959; WAN024D69_at; Start 25; Stop 49
gggcagtctccctatggcaagctgt

SEQ ID NO: 145197 - DNA, 25 bp, Artificial
  probe
  misc_feature (1)..(25): SEQ ID NO: 1959; WAN024D69_at; Start 228; Stop 252
tcctgatttgattggtttcttgaaa

SEQ ID NO: 145198 - DNA, 25 bp, Artificial
  probe
  misc_feature (1)..(25): SEQ ID NO: 1959; WAN024D69_at; Start 282; Stop 306
tgccggtttgcctagcatttcagac

SEQ ID NO: 145199 - DNA, 25 bp, Artificial
  probe
  misc_feature (1)..(25): SEQ ID NO: 1959; WAN024D69_at; Start 322; Stop 346
gttaaggcagctattgaggaagaaa

SEQ ID NO: 145200 - DNA, 25 bp, Artificial
  probe
  misc_feature (1)..(25): SEQ ID NO: 1959; WAN024D69_at; Start 836; Stop 860
acgctgcctaccacgactgggaaga

SEQ ID NO: 145201 - DNA, 25 bp, Artificial
  probe
  misc_feature (1)..(25): SEQ ID NO: 1959; WAN024D69_at; Start 257; Stop 281
ggcaaagtattgctcaggtctctga

SEQ ID NO: 145202 - DNA, 25 bp, Artificial
  probe
  misc_feature (1)..(25): SEQ ID NO: 1959; WAN024D69_at; Start 55; Stop 79
gtggcaacgccgattggcaatctag

SEQ ID NO: 145203 - DNA, 25 bp, Artificial
  probe
  misc_feature (1)..(25): SEQ ID NO: 2140; WAN024D6A_at; Start 21; Stop 45
tactaaactaaaagagtcaactcaa

SEQ ID NO: 145204 - DNA, 25 bp, Artificial
  probe
  misc_feature (1)..(25): SEQ ID NO: 2140; WAN024D6A_at; Start 32; Stop 56
aagagtcaactcaaaaattattcga

SEQ ID NO: 145205 - DNA, 25 bp, Artificial
  probe
  misc_feature (1)..(25): SEQ ID NO: 2140; WAN024D6A_at; Start 111; Stop 135
tgtgattgccaaacattgtcaaaca

SEQ ID NO: 145206 - DNA, 25 bp, Artificial
  probe
  misc_feature (1)..(25): SEQ ID NO: 2140; WAN024D6A_at; Start 34; Stop 58
gagtcaactcaaaaattattcgatg

SEQ ID NO: 145207 - DNA, 25 bp, Artificial
  probe
  misc_feature (1)..(25): SEQ ID NO: 2140; WAN024D6A_at; Start 71; Stop 95
ggttaaataatgaagatagaataga

SEQ ID NO: 145208 - DNA, 25 bp, Artificial
  probe
  misc_feature (1)..(25): SEQ ID NO: 2140; WAN024D6A_at; Start 108; Stop 132
caatgtgattgccaaacattgtcaa

SEQ ID NO: 145209 - DNA, 25 bp, Artificial
  probe
  misc_feature (1)..(25): SEQ ID NO: 2140; WAN024D6A_at; Start 42; Stop 66
tcaaaaattattcgatgcgcagaaa

SEQ ID NO: 145210 - DNA, 25 bp, Artificial
  probe
  misc_feature (1)..(25): SEQ ID NO: 2140; WAN024D6A_at; Start 43; Stop 67
caaaaattattcgatgcgcagaaaa

SEQ ID NO: 145211 - DNA, 25 bp, Artificial
  probe
  misc_feature (1)..(25): SEQ ID NO: 2140; WAN024D6A_at; Start 149; Stop 173
tggttttgactagcttttttgtgaa

SEQ ID NO: 145212 - DNA, 25 bp, Artificial
  probe
  misc_feature (1)..(25): SEQ ID NO: 2140; WAN024D6A_at; Start 155; Stop 179
tgactagcttttttgtgaaaaattg

SEQ ID NO: 145213 - DNA, 25 bp, Artificial
  probe
  misc_feature (1)..(25): SEQ ID NO: 2140; WAN024D6A_at; Start 75; Stop 99
aaataatgaagatagaatagaaaca

SEQ ID NO: 145214 - DNA, 25 bp, Artificial
  probe
  misc_feature (1)..(25): SEQ ID NO: 2140; WAN024D6A_at; Start 36; Stop 60
gtcaactcaaaaattattcgatgcg

SEQ ID NO: 145215 - DNA, 25 bp, Artificial
  probe
  misc_feature (1)..(25): SEQ ID NO: 2140; WAN024D6A_at; Start 103; Stop 127
aaaaacaatgtgattgccaaacatt

SEQ ID NO: 145216 - DNA, 25 bp, Artificial
  probe
  misc_feature (1)..(25): SEQ ID NO: 2140; WAN024D6A_at; Start 41; Stop 65
ctcaaaaattattcgatgcgcagaa

SEQ ID NO: 145217 - DNA, 25 bp, Artificial
  probe
  misc_feature (1)..(25): SEQ ID NO: 2140; WAN024D6A_at; Start 45; Stop 69
aaaattattcgatgcgcagaaaaaa

SEQ ID NO: 145218 - DNA, 25 bp, Artificial
  probe
  misc_feature (1)..(25): SEQ ID NO: 2140; WAN024D6A_at; Start 109; Stop 133
aatgtgattgccaaacattgtcaaa

SEQ ID NO: 145219 - DNA, 25 bp, Artificial
  probe
  misc_feature (1)..(25): SEQ ID NO: 2140; WAN024D6A_at; Start 31; Stop 55
aaagagtcaactcaaaaattattcg

SEQ ID NO: 145220 - DNA, 25 bp, Artificial
  probe
  misc_feature (1)..(25): SEQ ID NO: 2140; WAN024D6A_at; Start 39; Stop 63
aactcaaaaattattcgatgcgcag

SEQ ID NO: 145221 - DNA, 25 bp, Artificial
  probe
  misc_feature (1)..(25): SEQ ID NO: 2140; WAN024D6A_at; Start 110; Stop 134
atgtgattgccaaacattgtcaaac

SEQ ID NO: 145222 - DNA, 25 bp, Artificial
  probe
  misc_feature (1)..(25): SEQ ID NO: 2140; WAN024D6A_at; Start 158; Stop 182
ctagcttttttgtgaaaaattgtgt

SEQ ID NO: 145223 - DNA, 25 bp, Artificial
  probe
  misc_feature (1)..(25): SEQ ID NO: 2140; WAN024D6A_at; Start 44; Stop 68
aaaaattattcgatgcgcagaaaaa

SEQ ID NO: 145224 - DNA, 25 bp, Artificial
  probe
  misc_feature (1)..(25): SEQ ID NO: 2140; WAN024D6A_at; Start 104; Stop 128
aaaacaatgtgattgccaaacattg

SEQ ID NO: 145225 - DNA, 25 bp, Artificial
  probe
  misc_feature (1)..(25): SEQ ID NO: 2140; WAN024D6A_at; Start 40; Stop 64
actcaaaaattattcgatgcgcaga

SEQ ID NO: 145226 - DNA, 25 bp, Artificial
  probe
  misc_feature (1)..(25): SEQ ID NO: 2140; WAN024D6A_at; Start 37; Stop 61
tcaactcaaaaattattcgatgcgc

SEQ ID NO: 145227 - DNA, 25 bp, Artificial
  probe
  misc_feature (1)..(25): SEQ ID NO: 2140; WAN024D6A_at; Start 38; Stop 62
caactcaaaaattattcgatgcgca

SEQ ID NO: 145228 - DNA, 25 bp, Artificial
  probe
  misc_feature (1)..(25): SEQ ID NO: 2140; WAN024D6A_at; Start 114; Stop 138
gattgccaaacattgtcaaacagtc

SEQ ID NO: 145229 - DNA, 25 bp, Artificial
  probe
  misc_feature (1)..(25): SEQ ID NO: 2140; WAN024D6A_at; Start 55; Stop 79
gatgcgcagaaaaaaaggttaaata

SEQ ID NO: 145230 - DNA, 25 bp, Artificial
  probe
  misc_feature (1)..(25): SEQ ID NO: 2140; WAN024D6A_at; Start 2; Stop 26
tggaaaataatgactcgtttactaa

SEQ ID NO: 145231 - DNA, 25 bp, Artificial
  probe
  misc_feature (1)..(25): SEQ ID NO: 2140; WAN024D6A_at; Start 20; Stop 44
ttactaaactaaaagagtcaactca

SEQ ID NO: 145232 - DNA, 25 bp, Artificial
  probe
  misc_feature (1)..(25): SEQ ID NO: 2140; WAN024D6A_at; Start 74; Stop 98
taaataatgaagatagaatagaaac

SEQ ID NO: 145233 - DNA, 25 bp, Artificial
  probe
  misc_feature (1)..(25): SEQ ID NO: 2140; WAN024D6A_at; Start 53; Stop 77
tcgatgcgcagaaaaaaaggttaaa

SEQ ID NO: 145234 - DNA, 25 bp, Artificial
  probe
  misc_feature (1)..(25): SEQ ID NO: 2140; WAN024D6A_at; Start 50; Stop 74
tattcgatgcgcagaaaaaaaggtt

SEQ ID NO: 145235 - DNA, 25 bp, Artificial
  probe
  misc_feature (1)..(25): SEQ ID NO: 2140; WAN024D6A_at; Start 112; Stop 136
gtgattgccaaacattgtcaaacag

SEQ ID NO: 145236 - DNA, 25 bp, Artificial
  probe
  misc_feature (1)..(25): SEQ ID NO: 2140; WAN024D6A_at; Start 113; Stop 137
tgattgccaaacattgtcaaacagt

SEQ ID NO: 145237 - DNA, 25 bp, Artificial
  probe
  misc_feature (1)..(25): SEQ ID NO: 1679; WAN024D6B_at; Start 2104; Stop 2128
gaaatgttactccagtctcatgcag

SEQ ID NO: 145238 - DNA, 25 bp, Artificial
  probe
  misc_feature (1)..(25): SEQ ID NO: 1679; WAN024D6B_at; Start 1116; Stop 1140
taacctacagggagtctggaatgcg

SEQ ID NO: 145239 - DNA, 25 bp, Artificial
  probe
  misc_feature (1)..(25): SEQ ID NO: 1679; WAN024D6B_at; Start 1950; Stop 1974
taataagatcaatctctgggcgcgt

SEQ ID NO: 145240 - DNA, 25 bp, Artificial
  probe
  misc_feature (1)..(25): SEQ ID NO: 1679; WAN024D6B_at; Start 1658; Stop 1682
ttcaggctgctcaggaattgggact

SEQ ID NO: 145241 - DNA, 25 bp, Artificial
  probe
  misc_feature (1)..(25): SEQ ID NO: 1679; WAN024D6B_at; Start 396; Stop 420
tcaggtgacggactatcagagacag

SEQ ID NO: 145242 - DNA, 25 bp, Artificial
  probe
  misc_feature (1)..(25): SEQ ID NO: 1679; WAN024D6B_at; Start 1834; Stop 1858
catctagtgggactctatcctggca

SEQ ID NO: 145243 - DNA, 25 bp, Artificial
  probe
  misc_feature (1)..(25): SEQ ID NO: 1679; WAN024D6B_at; Start 2368; Stop 2392
tcggtggcaacagcagaaggtgatc

SEQ ID NO: 145244 - DNA, 25 bp, Artificial
  probe
  misc_feature (1)..(25): SEQ ID NO: 1679; WAN024D6B_at; Start 1042; Stop 1066
gaggagctgttcttccagtatggac

SEQ ID NO: 145245 - DNA, 25 bp, Artificial
  probe
  misc_feature (1)..(25): SEQ ID NO: 1679; WAN024D6B_at; Start 931; Stop 955
gactaccaagccttattccagcgtg

SEQ ID NO: 145246 - DNA, 25 bp, Artificial
  probe
  misc_feature (1)..(25): SEQ ID NO: 1679; WAN024D6B_at; Start 1350; Stop 1374
tcaagcgactccctttggttggacg

SEQ ID NO: 145247 - DNA, 25 bp, Artificial
  probe
  misc_feature (1)..(25): SEQ ID NO: 1679; WAN024D6B_at; Start 2178; Stop 2202
tgtttcaggcttaatggcacgtgga

SEQ ID NO: 145248 - DNA, 25 bp, Artificial
  probe
  misc_feature (1)..(25): SEQ ID NO: 1679; WAN024D6B_at; Start 1532; Stop 1556
ttttacataaggatcagcaggcgca

SEQ ID NO: 145249 - DNA, 25 bp, Artificial
  probe
  misc_feature (1)..(25): SEQ ID NO: 1679; WAN024D6B_at; Start 295; Stop 319
gctgagcagcacctaattgggccaa

SEQ ID NO: 145250 - DNA, 25 bp, Artificial
  probe
  misc_feature (1)..(25): SEQ ID NO: 1679; WAN024D6B_at; Start 1743; Stop 1767
cactcaatctggtcgaatcagggag

SEQ ID NO: 145251 - DNA, 25 bp, Artificial
  probe
  misc_feature (1)..(25): SEQ ID NO: 1679; WAN024D6B_at; Start 274; Stop 298
tacaatctggctaaggaactggctg

SEQ ID NO: 145252 - DNA, 25 bp, Artificial
  probe
  misc_feature (1)..(25): SEQ ID NO: 1679; WAN024D6B_at; Start 2044; Stop 2068
tggtgtagccatcctccttttcaga

SEQ ID NO: 145253 - DNA, 25 bp, Artificial
  probe
  misc_feature (1)..(25): SEQ ID NO: 1679; WAN024D6B_at; Start 1911; Stop 1935
caatgatcgtggagatggcggcaca

SEQ ID NO: 145254 - DNA, 25 bp, Artificial
  probe
  misc_feature (1)..(25): SEQ ID NO: 1679; WAN024D6B_at; Start 176; Stop 200
gaggtccacttcctgatagttcaga

SEQ ID NO: 145255 - DNA, 25 bp, Artificial
  probe
  misc_feature (1)..(25): SEQ ID NO: 1679; WAN024D6B_at; Start 1588; Stop 1612
gaacatgggccgatttcgattggca

SEQ ID NO: 145256 - DNA, 25 bp, Artificial
  probe
  misc_feature (1)..(25): SEQ ID NO: 1679; WAN024D6B_at; Start 1271; Stop 1295
tctatggtcgtctagcggctgtaaa

SEQ ID NO: 145257 - DNA, 25 bp, Artificial
  probe
  misc_feature (1)..(25): SEQ ID NO: 1679; WAN024D6B_at; Start 379; Stop 403
caaggtacgactttgtctcaggtga

SEQ ID NO: 145258 - DNA, 25 bp, Artificial
  probe
  misc_feature (1)..(25): SEQ ID NO: 1679; WAN024D6B_at; Start 2144; Stop 2168
tagctgccctacctgatgcttggtc

SEQ ID NO: 145259 - DNA, 25 bp, Artificial
  probe
  misc_feature (1)..(25): SEQ ID NO: 1679; WAN024D6B_at; Start 458; Stop 482
tctataagggaacgcgatttgaacg

SEQ ID NO: 145260 - DNA, 25 bp, Artificial
  probe
  misc_feature (1)..(25): SEQ ID NO: 1679; WAN024D6B_at; Start 1014; Stop 1038
ttataagccacaagaagggcaggct

SEQ ID NO: 145261 - DNA, 25 bp, Artificial
  probe
  misc_feature (1)..(25): SEQ ID NO: 1679; WAN024D6B_at; Start 916; Stop 940
tcaaggcatatcgaggactaccaag

SEQ ID NO: 145262 - DNA, 25 bp, Artificial
  probe
  misc_feature (1)..(25): SEQ ID NO: 1679; WAN024D6B_at; Start 159; Stop 183
aaaaagtctctggtctggaggtcca

SEQ ID NO: 145263 - DNA, 25 bp, Artificial
  probe
  misc_feature (1)..(25): SEQ ID NO: 1679; WAN024D6B_at; Start 1134; Stop 1158
gaatgcggtcgacaatcctccttgg

SEQ ID NO: 145264 - DNA, 25 bp, Artificial
  probe
  misc_feature (1)..(25): SEQ ID NO: 1679; WAN024D6B_at; Start 859; Stop 883
caacaggtgatagacttggtggaca

SEQ ID NO: 145265 - DNA, 25 bp, Artificial
  probe
  misc_feature (1)..(25): SEQ ID NO: 1679; WAN024D6B_at; Start 759; Stop 783
tcagatatcaggagccagttatgcc

SEQ ID NO: 145266 - DNA, 25 bp, Artificial
  probe
  misc_feature (1)..(25): SEQ ID NO: 1679; WAN024D6B_at; Start 1972; Stop 1996
cgtttgggagatggcaatcgagccc

SEQ ID NO: 145267 - DNA, 25 bp, Artificial
  probe
  misc_feature (1)..(25): SEQ ID NO: 1679; WAN024D6B_at; Start 1077; Stop 1101
gattagttcgtccagagactgccca

SEQ ID NO: 145268 - DNA, 25 bp, Artificial
  probe
  misc_feature (1)..(25): SEQ ID NO: 1679; WAN024D6B_at; Start 1292; Stop 1316
taaagtatgcaggaatcgtctctca

SEQ ID NO: 145269 - DNA, 25 bp, Artificial
  probe
  misc_feature (1)..(25): SEQ ID NO: 1679; WAN024D6B_at; Start 1795; Stop 1819
caaaatgagaaagtggaggcccagc

SEQ ID NO: 145270 - DNA, 25 bp, Artificial
  probe
  misc_feature (1)..(25): SEQ ID NO: 1679; WAN024D6B_at; Start 1402; Stop 1426
tggtcaccagctgccaatgcgtgga

SEQ ID NO: 145271 - DNA, 25 bp, Artificial
  probe
  misc_feature (1)..(25): SEQ ID NO: 3381; WAN024D6C_at; Start 41; Stop 65
gtggaactcgtatcacatacactgg

SEQ ID NO: 145272 - DNA, 25 bp, Artificial
  probe
  misc_feature (1)..(25): SEQ ID NO: 3381; WAN024D6C_at; Start 9; Stop 33
cccaattccattgaagatacgaaag

SEQ ID NO: 145273 - DNA, 25 bp, Artificial
  probe
  misc_feature (1)..(25): SEQ ID NO: 3381; WAN024D6C_at; Start 19; Stop 43
ttgaagatacgaaagataaacggtg

SEQ ID NO: 145274 - DNA, 25 bp, Artificial
  probe
  misc_feature (1)..(25): SEQ ID NO: 3381; WAN024D6C_at; Start 31; Stop 55
aagataaacggtggaactcgtatca

SEQ ID NO: 145275 - DNA, 25 bp, Artificial
  probe
  misc_feature (1)..(25): SEQ ID NO: 3381; WAN024D6C_at; Start 43; Stop 67
ggaactcgtatcacatacactggta

SEQ ID NO: 145276 - DNA, 25 bp, Artificial
  probe
  misc_feature (1)..(25): SEQ ID NO: 3381; WAN024D6C_at; Start 63; Stop 87
tggtaccttgactggattttggaat

SEQ ID NO: 145277 - DNA, 25 bp, Artificial
  probe
  misc_feature (1)..(25): SEQ ID NO: 3381; WAN024D6C_at; Start 10; Stop 34
ccaattccattgaagatacgaaaga

SEQ ID NO: 145278 - DNA, 25 bp, Artificial
  probe
  misc_feature (1)..(25): SEQ ID NO: 3381; WAN024D6C_at; Start 44; Stop 68
gaactcgtatcacatacactggtac

SEQ ID NO: 145279 - DNA, 25 bp, Artificial
  probe
  misc_feature (1)..(25): SEQ ID NO: 3381; WAN024D6C_at; Start 48; Stop 72
tcgtatcacatacactggtaccttg

SEQ ID NO: 145280 - DNA, 25 bp, Artificial
  probe
  misc_feature (1)..(25): SEQ ID NO: 3381; WAN024D6C_at; Start 56; Stop 80
catacactggtaccttgactggatt

SEQ ID NO: 145281 - DNA, 25 bp, Artificial
  probe
  misc_feature (1)..(25): SEQ ID NO: 3381; WAN024D6C_at; Start 21; Stop 45
gaagatacgaaagataaacggtgga

SEQ ID NO: 145282 - DNA, 25 bp, Artificial
  probe
  misc_feature (1)..(25): SEQ ID NO: 3381; WAN024D6C_at; Start 37; Stop 61
aacggtggaactcgtatcacataca

SEQ ID NO: 145283 - DNA, 25 bp, Artificial
  probe
  misc_feature (1)..(25): SEQ ID NO: 3381; WAN024D6C_at; Start 50; Stop 74
gtatcacatacactggtaccttgac

SEQ ID NO: 145284 - DNA, 25 bp, Artificial
  probe
  misc_feature (1)..(25): SEQ ID NO: 3381; WAN024D6C_at; Start 59; Stop 83
acactggtaccttgactggattttg

SEQ ID NO: 145285 - DNA, 25 bp, Artificial
  probe
  misc_feature (1)..(25): SEQ ID NO: 3381; WAN024D6C_at; Start 36; Stop 60
aaacggtggaactcgtatcacatac

SEQ ID NO: 145286 - DNA, 25 bp, Artificial
  probe
  misc_feature (1)..(25): SEQ ID NO: 3381; WAN024D6C_at; Start 20; Stop 44
tgaagatacgaaagataaacggtgg

SEQ ID NO: 145287 - DNA, 25 bp, Artificial
  probe
  misc_feature (1)..(25): SEQ ID NO: 3381; WAN024D6C_at; Start 35; Stop 59
taaacggtggaactcgtatcacata

SEQ ID NO: 145288 - DNA, 25 bp, Artificial
  probe
  misc_feature (1)..(25): SEQ ID NO: 3381; WAN024D6C_at; Start 38; Stop 62
acggtggaactcgtatcacatacac

SEQ ID NO: 145289 - DNA, 25 bp, Artificial
  probe
  misc_feature (1)..(25): SEQ ID NO: 3381; WAN024D6C_at; Start 45; Stop 69
aactcgtatcacatacactggtacc

SEQ ID NO: 145290 - DNA, 25 bp, Artificial
  probe
  misc_feature (1)..(25): SEQ ID NO: 3381; WAN024D6C_at; Start 61; Stop 85
actggtaccttgactggattttgga

SEQ ID NO: 145291 - DNA, 25 bp, Artificial
  probe
  misc_feature (1)..(25): SEQ ID NO: 3381; WAN024D6C_at; Start 62; Stop 86
ctggtaccttgactggattttggaa

SEQ ID NO: 145292 - DNA, 25 bp, Artificial
  probe
  misc_feature (1)..(25): SEQ ID NO: 3381; WAN024D6C_at; Start 33; Stop 57
gataaacggtggaactcgtatcaca

SEQ ID NO: 145293 - DNA, 25 bp, Artificial
  probe
  misc_feature (1)..(25): SEQ ID NO: 3381; WAN024D6C_at; Start 17; Stop 41
cattgaagatacgaaagataaacgg

SEQ ID NO: 145294 - DNA, 25 bp, Artificial
  probe
  misc_feature (1)..(25): SEQ ID NO: 3381; WAN024D6C_at; Start 11; Stop 35
caattccattgaagatacgaaagat

SEQ ID NO: 145295 - DNA, 25 bp, Artificial
  probe
  misc_feature (1)..(25): SEQ ID NO: 3381; WAN024D6C_at; Start 49; Stop 73
cgtatcacatacactggtaccttga

SEQ ID NO: 145296 - DNA, 25 bp, Artificial
  probe
  misc_feature (1)..(25): SEQ ID NO: 3381; WAN024D6C_at; Start 40; Stop 64
ggtggaactcgtatcacatacactg

SEQ ID NO: 145297 - DNA, 25 bp, Artificial
  probe
  misc_feature (1)..(25): SEQ ID NO: 3381; WAN024D6C_at; Start 15; Stop 39
tccattgaagatacgaaagataaac

SEQ ID NO: 145298 - DNA, 25 bp, Artificial
  probe
  misc_feature (1)..(25): SEQ ID NO: 3381; WAN024D6C_at; Start 58; Stop 82
tacactggtaccttgactggatttt

SEQ ID NO: 145299 - DNA, 25 bp, Artificial
  probe
  misc_feature (1)..(25): SEQ ID NO: 3381; WAN024D6C_at; Start 42; Stop 66
tggaactcgtatcacatacactggt

SEQ ID NO: 145300 - DNA, 25 bp, Artificial
  probe
  misc_feature (1)..(25): SEQ ID NO: 3381; WAN024D6C_at; Start 6; Stop 30
ttccccaattccattgaagatacga

SEQ ID NO: 145301 - DNA, 25 bp, Artificial
  probe
  misc_feature (1)..(25): SEQ ID NO: 3381; WAN024D6C_at; Start 7; Stop 31
tccccaattccattgaagatacgaa

SEQ ID NO: 145302 - DNA, 25 bp, Artificial
  probe
  misc_feature (1)..(25): SEQ ID NO: 3381; WAN024D6C_at; Start 53; Stop 77
tcacatacactggtaccttgactgg

SEQ ID NO: 145303 - DNA, 25 bp, Artificial
  probe
  misc_feature (1)..(25): SEQ ID NO: 3381; WAN024D6C_at; Start 54; Stop 78
cacatacactggtaccttgactgga

SEQ ID NO: 145304 - DNA, 25 bp, Artificial
  probe
  misc_feature (1)..(25): SEQ ID NO: 3381; WAN024D6C_at; Start 60; Stop 84
cactggtaccttgactggattttgg

SEQ ID NO: 145305 - DNA, 25 bp, Artificial
  probe
  misc_feature (1)..(25): SEQ ID NO: 5401; WAN024D6D_at; Start 48; Stop 72
taccagtgtatgtgatacgagttcc

SEQ ID NO: 145306 - DNA, 25 bp, Artificial
  probe
  misc_feature (1)..(25): SEQ ID NO: 5401; WAN024D6D_at; Start 133; Stop 157
tatggtttccgttcttctatctctc

SEQ ID NO: 145307 - DNA, 25 bp, Artificial
  probe
  misc_feature (1)..(25): SEQ ID NO: 5401; WAN024D6D_at; Start 30; Stop 54
tccaaaatccagtcaaggtaccagt

SEQ ID NO: 145308 - DNA, 25 bp, Artificial
  probe
  misc_feature (1)..(25): SEQ ID NO: 5401; WAN024D6D_at; Start 23; Stop 47
tattaattccaaaatccagtcaagg

SEQ ID NO: 145309 - DNA, 25 bp, Artificial
  probe
  misc_feature (1)..(25): SEQ ID NO: 5401; WAN024D6D_at; Start 56; Stop 80
tatgtgatacgagttccaccgttta

SEQ ID NO: 145310 - DNA, 25 bp, Artificial
  probe
  misc_feature (1)..(25): SEQ ID NO: 5401; WAN024D6D_at; Start 29; Stop 53
ttccaaaatccagtcaaggtaccag

SEQ ID NO: 145311 - DNA, 25 bp, Artificial
  probe
  misc_feature (1)..(25): SEQ ID NO: 5401; WAN024D6D_at; Start 37; Stop 61
tccagtcaaggtaccagtgtatgtg

SEQ ID NO: 145312 - DNA, 25 bp, Artificial
  probe
  misc_feature (1)..(25): SEQ ID NO: 5401; WAN024D6D_at; Start 35; Stop 59
aatccagtcaaggtaccagtgtatg

SEQ ID NO: 145313 - DNA, 25 bp, Artificial
  probe
  misc_feature (1)..(25): SEQ ID NO: 5401; WAN024D6D_at; Start 38; Stop 62
ccagtcaaggtaccagtgtatgtga

SEQ ID NO: 145314 - DNA, 25 bp, Artificial
  probe
  misc_feature (1)..(25): SEQ ID NO: 5401; WAN024D6D_at; Start 147; Stop 171
ttctatctctccttctatcacctaa

SEQ ID NO: 145315 - DNA, 25 bp, Artificial
  probe
  misc_feature (1)..(25): SEQ ID NO: 5401; WAN024D6D_at; Start 112; Stop 136
cagaaagtctttgggttacaatatg

SEQ ID NO: 145316 - DNA, 25 bp, Artificial
  probe
  misc_feature (1)..(25): SEQ ID NO: 5401; WAN024D6D_at; Start 60; Stop 84
tgatacgagttccaccgtttatctt

SEQ ID NO: 145317 - DNA, 25 bp, Artificial
  probe
  misc_feature (1)..(25): SEQ ID NO: 5401; WAN024D6D_at; Start 51; Stop 75
cagtgtatgtgatacgagttccacc

SEQ ID NO: 145318 - DNA, 25 bp, Artificial
  probe
  misc_feature (1)..(25): SEQ ID NO: 5401; WAN024D6D_at; Start 52; Stop 76
agtgtatgtgatacgagttccaccg

SEQ ID NO: 145319 - DNA, 25 bp, Artificial
  probe
  misc_feature (1)..(25): SEQ ID NO: 5401; WAN024D6D_at; Start 31; Stop 55
ccaaaatccagtcaaggtaccagtg

SEQ ID NO: 145320 - DNA, 25 bp, Artificial
  probe
  misc_feature (1)..(25): SEQ ID NO: 5401; WAN024D6D_at; Start 33; Stop 57
aaaatccagtcaaggtaccagtgta

SEQ ID NO: 145321 - DNA, 25 bp, Artificial
  probe
  misc_feature (1)..(25): SEQ ID NO: 5401; WAN024D6D_at; Start 58; Stop 82
tgtgatacgagttccaccgtttatc

SEQ ID NO: 145322 - DNA, 25 bp, Artificial
  probe
  misc_feature (1)..(25): SEQ ID NO: 5401; WAN024D6D_at; Start 75; Stop 99
cgtttatctttcgtatcttcaatgg

SEQ ID NO: 145323 - DNA, 25 bp, Artificial
  probe
  misc_feature (1)..(25): SEQ ID NO: 5401; WAN024D6D_at; Start 42; Stop 66
tcaaggtaccagtgtatgtgatacg

SEQ ID NO: 145324 - DNA, 25 bp, Artificial
  probe
  misc_feature (1)..(25): SEQ ID NO: 5401; WAN024D6D_at; Start 129; Stop 153
acaatatggtttccgttcttctatc

SEQ ID NO: 145325 - DNA, 25 bp, Artificial
  probe
  misc_feature (1)..(25): SEQ ID NO: 5401; WAN024D6D_at; Start 91; Stop 115
cttcaatggaattggggaagtcaga

SEQ ID NO: 145326 - DNA, 25 bp, Artificial
  probe
  misc_feature (1)..(25): SEQ ID NO: 5401; WAN024D6D_at; Start 43; Stop 67
caaggtaccagtgtatgtgatacga

SEQ ID NO: 145327 - DNA, 25 bp, Artificial
  probe
  misc_feature (1)..(25): SEQ ID NO: 5401; WAN024D6D_at; Start 142; Stop 166
cgttcttctatctctccttctatca

SEQ ID NO: 145328 - DNA, 25 bp, Artificial
  probe
  misc_feature (1)..(25): SEQ ID NO: 5401; WAN024D6D_at; Start 19; Stop 43
ttagtattaattccaaaatccagtc

SEQ ID NO: 145329 - DNA, 25 bp, Artificial
  probe
  misc_feature (1)..(25): SEQ ID NO: 5401; WAN024D6D_at; Start 137; Stop 161
gtttccgttcttctatctctccttc

SEQ ID NO: 145330 - DNA, 25 bp, Artificial
  probe
  misc_feature (1)..(25): SEQ ID NO: 5401; WAN024D6D_at; Start 26; Stop 50
taattccaaaatccagtcaaggtac

SEQ ID NO: 145331 - DNA, 25 bp, Artificial
  probe
  misc_feature (1)..(25): SEQ ID NO: 5401; WAN024D6D_at; Start 107; Stop 131
gaagtcagaaagtctttgggttaca

SEQ ID NO: 145332 - DNA, 25 bp, Artificial
  probe
  misc_feature (1)..(25): SEQ ID NO: 5401; WAN024D6D_at; Start 39; Stop 63
cagtcaaggtaccagtgtatgtgat

SEQ ID NO: 145333 - DNA, 25 bp, Artificial
  probe
  misc_feature (1)..(25): SEQ ID NO: 5401; WAN024D6D_at; Start 32; Stop 56
caaaatccagtcaaggtaccagtgt

SEQ ID NO: 145334 - DNA, 25 bp, Artificial
  probe
  misc_feature (1)..(25): SEQ ID NO: 5401; WAN024D6D_at; Start 44; Stop 68
aaggtaccagtgtatgtgatacgag

SEQ ID NO: 145335 - DNA, 25 bp, Artificial
  probe
  misc_feature (1)..(25): SEQ ID NO: 5401; WAN024D6D_at; Start 54; Stop 78
tgtatgtgatacgagttccaccgtt

SEQ ID NO: 145336 - DNA, 25 bp, Artificial
  probe
  misc_feature (1)..(25): SEQ ID NO: 5401; WAN024D6D_at; Start 72; Stop 96
caccgtttatctttcgtatcttcaa

SEQ ID NO: 145337 - DNA, 25 bp, Artificial
  probe
  misc_feature (1)..(25): SEQ ID NO: 5401; WAN024D6D_at; Start 50; Stop 74
ccagtgtatgtgatacgagttccac

SEQ ID NO: 145338 - DNA, 25 bp, Artificial
  probe
  misc_feature (1)..(25): SEQ ID NO: 5401; WAN024D6D_at; Start 82; Stop 106
ctttcgtatcttcaatggaattggg

SEQ ID NO: 145339 - DNA, 25 bp, Artificial
  probe
  misc_feature (1)..(25): SEQ ID NO: 762; WAN024D6E_at; Start 225; Stop 249
tatttctcagtttaccctctttgcg

SEQ ID NO: 145340 - DNA, 25 bp, Artificial
  probe
  misc_feature (1)..(25): SEQ ID NO: 762; WAN024D6E_at; Start 211; Stop 235
ggagaaatcctctctatttctcagt

SEQ ID NO: 145341 - DNA, 25 bp, Artificial
  probe
  misc_feature (1)..(25): SEQ ID NO: 762; WAN024D6E_at; Start 81; Stop 105
tttattgctggttggtgttggacca

SEQ ID NO: 145342 - DNA, 25 bp, Artificial
  probe
  misc_feature (1)..(25): SEQ ID NO: 762; WAN024D6E_at; Start 24; Stop 48
taaaaaagcccaagtgagtatagaa

SEQ ID NO: 145343 - DNA, 25 bp, Artificial
  probe
  misc_feature (1)..(25): SEQ ID NO: 762; WAN024D6E_at; Start 150; Stop 174
caatatgcggattttttcagacgca

SEQ ID NO: 145344 - DNA, 25 bp, Artificial
  probe
  misc_feature (1)..(25): SEQ ID NO: 762; WAN024D6E_at; Start 235; Stop 259
tttaccctctttgcggatactaaga

SEQ ID NO: 145345 - DNA, 25 bp, Artificial
  probe
  misc_feature (1)..(25): SEQ ID NO: 762; WAN024D6E_at; Start 291; Stop 315
taaacctgatatggcatcagacttc

SEQ ID NO: 145346 - DNA, 25 bp, Artificial
  probe
  misc_feature (1)..(25): SEQ ID NO: 762; WAN024D6E_at; Start 157; Stop 181
cggattttttcagacgcagaaggca

SEQ ID NO: 145347 - DNA, 25 bp, Artificial
  probe
  misc_feature (1)..(25): SEQ ID NO: 762; WAN024D6E_at; Start 32; Stop 56
cccaagtgagtatagaaggccagat

SEQ ID NO: 145348 - DNA, 25 bp, Artificial
  probe
  misc_feature (1)..(25): SEQ ID NO: 762; WAN024D6E_at; Start 68; Stop 92
tcaatcagggacttttattgctggt

SEQ ID NO: 145349 - DNA, 25 bp, Artificial
  probe
  misc_feature (1)..(25): SEQ ID NO: 762; WAN024D6E_at; Start 331; Stop 355
caaaaattagcgcaagaagtgcccg

SEQ ID NO: 145350 - DNA, 25 bp, Artificial
  probe
  misc_feature (1)..(25): SEQ ID NO: 762; WAN024D6E_at; Start 57; Stop 81
tcagggaaaaatcaatcagggactt

SEQ ID NO: 145351 - DNA, 25 bp, Artificial
  probe
  misc_feature (1)..(25): SEQ ID NO: 762; WAN024D6E_at; Start 102; Stop 126
accagaggaccaagaggaagatttg

SEQ ID NO: 145352 - DNA, 25 bp, Artificial
  probe
  misc_feature (1)..(25): SEQ ID NO: 762; WAN024D6E_at; Start 2; Stop 26
tgaaaatcattatccaacgggttaa

SEQ ID NO: 145353 - DNA, 25 bp, Artificial
  probe
  misc_feature (1)..(25): SEQ ID NO: 762; WAN024D6E_at; Start 171; Stop 195
cgcagaaggcaagatgaacctgtct

SEQ ID NO: 145354 - DNA, 25 bp, Artificial
  probe
  misc_feature (1)..(25): SEQ ID NO: 762; WAN024D6E_at; Start 138; Stop 162
gagaaaactggtcaatatgcggatt

SEQ ID NO: 145355 - DNA, 25 bp, Artificial
  probe
  misc_feature (1)..(25): SEQ ID NO: 762; WAN024D6E_at; Start 125; Stop 149
tggactatgctgtgagaaaactggt

SEQ ID NO: 145356 - DNA, 25 bp, Artificial
  probe
  misc_feature (1)..(25): SEQ ID NO: 762; WAN024D6E_at; Start 186; Stop 210
gaacctgtctgtcaaagatattgaa

SEQ ID NO: 145357 - DNA, 25 bp, Artificial
  probe
  misc_feature (1)..(25): SEQ ID NO: 762; WAN024D6E_at; Start 335; Stop 359
aattagcgcaagaagtgcccgttca

SEQ ID NO: 145358 - DNA, 25 bp, Artificial
  probe
  misc_feature (1)..(25): SEQ ID NO: 762; WAN024D6E_at; Start 112; Stop 136
caagaggaagatttggactatgctg

SEQ ID NO: 145359 - DNA, 25 bp, Artificial
  probe
  misc_feature (1)..(25): SEQ ID NO: 762; WAN024D6E_at; Start 368; Stop 392
tctttggagcagatatgcaggttga

SEQ ID NO: 145360 - DNA, 25 bp, Artificial
  probe
  misc_feature (1)..(25): SEQ ID NO: 762; WAN024D6E_at; Start 422; Stop 446
tcctagatactaaaaagagataact

SEQ ID NO: 145361 - DNA, 25 bp, Artificial
  probe
  misc_feature (1)..(25): SEQ ID NO: 762; WAN024D6E_at; Start 166; Stop 190
tcagacgcagaaggcaagatgaacc

SEQ ID NO: 145362 - DNA, 25 bp, Artificial
  probe
  misc_feature (1)..(25): SEQ ID NO: 762; WAN024D6E_at; Start 198; Stop 222
caaagatattgaaggagaaatcctc

SEQ ID NO: 145363 - DNA, 25 bp, Artificial
  probe
  misc_feature (1)..(25): SEQ ID NO: 762; WAN024D6E_at; Start 261; Stop 285
aggcaatcgtccagcctttacaggg

SEQ ID NO: 145364 - DNA, 25 bp, Artificial
  probe
  misc_feature (1)..(25): SEQ ID NO: 762; WAN024D6E_at; Start 284; Stop 308
gggcagctaaacctgatatggcatc

SEQ ID NO: 145365 - DNA, 25 bp, Artificial
  probe
  misc_feature (1)..(25): SEQ ID NO: 762; WAN024D6E_at; Start 42; Stop 66
tatagaaggccagattcagggaaaa

SEQ ID NO: 145366 - DNA, 25 bp, Artificial
  probe
  misc_feature (1)..(25): SEQ ID NO: 762; WAN024D6E_at; Start 377; Stop 401
cagatatgcaggttgagctggttaa

SEQ ID NO: 145367 - DNA, 25 bp, Artificial
  probe
  misc_feature (1)..(25): SEQ ID NO: 762; WAN024D6E_at; Start 178; Stop 202
ggcaagatgaacctgtctgtcaaag

SEQ ID NO: 145368 - DNA, 25 bp, Artificial
  probe
  misc_feature (1)..(25): SEQ ID NO: 762; WAN024D6E_at; Start 96; Stop 120
tgttggaccagaggaccaagaggaa

SEQ ID NO: 145369 - DNA, 25 bp, Artificial
  probe
  misc_feature (1)..(25): SEQ ID NO: 762; WAN024D6E_at; Start 305; Stop 329
catcagacttctatgatgctttcaa

SEQ ID NO: 145370 - DNA, 25 bp, Artificial
  probe
  misc_feature (1)..(25): SEQ ID NO: 762; WAN024D6E_at; Start 339; Stop 363
agcgcaagaagtgcccgttcagaca

SEQ ID NO: 145371 - DNA, 25 bp, Artificial
  probe
  misc_feature (1)..(25): SEQ ID NO: 762; WAN024D6E_at; Start 319; Stop 343
gatgctttcaatcaaaaattagcgc

SEQ ID NO: 145372 - DNA, 25 bp, Artificial
  probe
  misc_feature (1)..(25): SEQ ID NO: 762; WAN024D6E_at; Start 407; Stop 431
gacctgttaccattatcctagatac

SEQ ID NO: 145373 - DNA, 25 bp, Artificial
  probe
  misc_feature (1)..(25): SEQ ID NO: 1828; WAN024D6F_at; Start 48; Stop 72
gggaactctcctcatcctaggacat

SEQ ID NO: 145374 - DNA, 25 bp, Artificial
  probe
  misc_feature (1)..(25): SEQ ID NO: 1828; WAN024D6F_at; Start 127; Stop 151
tatcaagaaccgatttctttttgga

SEQ ID NO: 145375 - DNA, 25 bp, Artificial
  probe
  misc_feature (1)..(25): SEQ ID NO: 1828; WAN024D6F_at; Start 28; Stop 52
gatattccacttttccttcagggaa

SEQ ID NO: 145376 - DNA, 25 bp, Artificial
  probe
  misc_feature (1)..(25): SEQ ID NO: 1828; WAN024D6F_at; Start 47; Stop 71
agggaactctcctcatcctaggaca

SEQ ID NO: 145377 - DNA, 25 bp, Artificial
  probe
  misc_feature (1)..(25): SEQ ID NO: 1828; WAN024D6F_at; Start 33; Stop 57
tccacttttccttcagggaactctc

SEQ ID NO: 145378 - DNA, 25 bp, Artificial
  probe
  misc_feature (1)..(25): SEQ ID NO: 1828; WAN024D6F_at; Start 11; Stop 35
ccttggtgtctttaagtgatattcc

SEQ ID NO: 145379 - DNA, 25 bp, Artificial
  probe
  misc_feature (1)..(25): SEQ ID NO: 1828; WAN024D6F_at; Start 121; Stop 145
caagcatatcaagaaccgatttctt

SEQ ID NO: 145380 - DNA, 25 bp, Artificial
  probe
  misc_feature (1)..(25): SEQ ID NO: 1828; WAN024D6F_at; Start 118; Stop 142
ccccaagcatatcaagaaccgattt

SEQ ID NO: 145381 - DNA, 25 bp, Artificial
  probe
  misc_feature (1)..(25): SEQ ID NO: 1828; WAN024D6F_at; Start 38; Stop 62
ttttccttcagggaactctcctcat

SEQ ID NO: 145382 - DNA, 25 bp, Artificial
  probe
  misc_feature (1)..(25): SEQ ID NO: 1828; WAN024D6F_at; Start 27; Stop 51
tgatattccacttttccttcaggga

SEQ ID NO: 145383 - DNA, 25 bp, Artificial
  probe
  misc_feature (1)..(25): SEQ ID NO: 1828; WAN024D6F_at; Start 88; Stop 112
cgcatctgccaaagcctgaaaagag

SEQ ID NO: 145384 - DNA, 25 bp, Artificial
  probe
  misc_feature (1)..(25): SEQ ID NO: 1828; WAN024D6F_at; Start 82; Stop 106
tcctatcgcatctgccaaagcctga

SEQ ID NO: 145385 - DNA, 25 bp, Artificial
  probe
  misc_feature (1)..(25): SEQ ID NO: 1828; WAN024D6F_at; Start 15; Stop 39
ggtgtctttaagtgatattccactt

SEQ ID NO: 145386 - DNA, 25 bp, Artificial
  probe
  misc_feature (1)..(25): SEQ ID NO: 1828; WAN024D6F_at; Start 92; Stop 116
tctgccaaagcctgaaaagagactt

SEQ ID NO: 145387 - DNA, 25 bp, Artificial
  probe
  misc_feature (1)..(25): SEQ ID NO: 1828; WAN024D6F_at; Start 100; Stop 124
agcctgaaaagagacttcccccaag

SEQ ID NO: 145388 - DNA, 25 bp, Artificial
  probe
  misc_feature (1)..(25): SEQ ID NO: 1828; WAN024D6F_at; Start 85; Stop 109
tatcgcatctgccaaagcctgaaaa

SEQ ID NO: 145389 - DNA, 25 bp, Artificial
  probe
  misc_feature (1)..(25): SEQ ID NO: 1828; WAN024D6F_at; Start 104; Stop 128
tgaaaagagacttcccccaagcata

SEQ ID NO: 145390 - DNA, 25 bp, Artificial
  probe
  misc_feature (1)..(25): SEQ ID NO: 1828; WAN024D6F_at; Start 128; Stop 152
atcaagaaccgatttctttttggag

SEQ ID NO: 145391 - DNA, 25 bp, Artificial
  probe
  misc_feature (1)..(25): SEQ ID NO: 1828; WAN024D6F_at; Start 26; Stop 50
gtgatattccacttttccttcaggg

SEQ ID NO: 145392 - DNA, 25 bp, Artificial
  probe
  misc_feature (1)..(25): SEQ ID NO: 1828; WAN024D6F_at; Start 95; Stop 119
gccaaagcctgaaaagagacttccc

SEQ ID NO: 145393 - DNA, 25 bp, Artificial
  probe
  misc_feature (1)..(25): SEQ ID NO: 1828; WAN024D6F_at; Start 50; Stop 74
gaactctcctcatcctaggacatct

SEQ ID NO: 145394 - DNA, 25 bp, Artificial
  probe
  misc_feature (1)..(25): SEQ ID NO: 1828; WAN024D6F_at; Start 45; Stop 69
tcagggaactctcctcatcctagga

SEQ ID NO: 145395 - DNA, 25 bp, Artificial
  probe
  misc_feature (1)..(25): SEQ ID NO: 1828; WAN024D6F_at; Start 120; Stop 144
ccaagcatatcaagaaccgatttct

SEQ ID NO: 145396 - DNA, 25 bp, Artificial
  probe
  misc_feature (1)..(25): SEQ ID NO: 1828; WAN024D6F_at; Start 5; Stop 29
ttctctccttggtgtctttaagtga

SEQ ID NO: 145397 - DNA, 25 bp, Artificial
  probe
  misc_feature (1)..(25): SEQ ID NO: 1828; WAN024D6F_at; Start 87; Stop 111
tcgcatctgccaaagcctgaaaaga

SEQ ID NO: 145398 - DNA, 25 bp, Artificial
  probe
  misc_feature (1)..(25): SEQ ID NO: 1828; WAN024D6F_at; Start 89; Stop 113
gcatctgccaaagcctgaaaagaga

SEQ ID NO: 145399 - DNA, 25 bp, Artificial
  probe
  misc_feature (1)..(25): SEQ ID NO: 1828; WAN024D6F_at; Start 94; Stop 118
tgccaaagcctgaaaagagacttcc

SEQ ID NO: 145400 - DNA, 25 bp, Artificial
  probe
  misc_feature (1)..(25): SEQ ID NO: 1828; WAN024D6F_at; Start 44; Stop 68
ttcagggaactctcctcatcctagg

SEQ ID NO: 145401 - DNA, 25 bp, Artificial
  probe
  misc_feature (1)..(25): SEQ ID NO: 1828; WAN024D6F_at; Start 13; Stop 37
ttggtgtctttaagtgatattccac

SEQ ID NO: 145402 - DNA, 25 bp, Artificial
  probe
  misc_feature (1)..(25): SEQ ID NO: 1828; WAN024D6F_at; Start 35; Stop 59
cacttttccttcagggaactctcct

SEQ ID NO: 145403 - DNA, 25 bp, Artificial
  probe
  misc_feature (1)..(25): SEQ ID NO: 1828; WAN024D6F_at; Start 7; Stop 31
ctctccttggtgtctttaagtgata

SEQ ID NO: 145404 - DNA, 25 bp, Artificial
  probe
  misc_feature (1)..(25): SEQ ID NO: 1828; WAN024D6F_at; Start 81; Stop 105
ttcctatcgcatctgccaaagcctg

SEQ ID NO: 145405 - DNA, 25 bp, Artificial
  probe
  misc_feature (1)..(25): SEQ ID NO: 1828; WAN024D6F_at; Start 2; Stop 26
tgattctctccttggtgtctttaag

SEQ ID NO: 145406 - DNA, 25 bp, Artificial
  probe
  misc_feature (1)..(25): SEQ ID NO: 1828; WAN024D6F_at; Start 65; Stop 89
taggacatctcatcccttcctatcg

SEQ ID NO: 145407 - DNA, 25 bp, Artificial
  probe
  misc_feature (1)..(25): SEQ ID NO: 2900; WAN024D6G_at; Start 159; Stop 183
gggcaatgaccaagatagcataggt

SEQ ID NO: 145408 - DNA, 25 bp, Artificial
  probe
  misc_feature (1)..(25): SEQ ID NO: 2900; WAN024D6G_at; Start 252; Stop 276
taccagcaatatgaccaacttcagt

SEQ ID NO: 145409 - DNA, 25 bp, Artificial
  probe
  misc_feature (1)..(25): SEQ ID NO: 2900; WAN024D6G_at; Start 145; Stop 169
tacaaaagtaacaagggcaatgacc

SEQ ID NO: 145410 - DNA, 25 bp, Artificial
  probe
  misc_feature (1)..(25): SEQ ID NO: 2900; WAN024D6G_at; Start 225; Stop 249
tatcagtctcatccgcatcttgaag

SEQ ID NO: 145411 - DNA, 25 bp, Artificial
  probe
  misc_feature (1)..(25): SEQ ID NO: 2900; WAN024D6G_at; Start 128; Stop 152
tgaatgaagacacccactacaaaag

SEQ ID NO: 145412 - DNA, 25 bp, Artificial
  probe
  misc_feature (1)..(25): SEQ ID NO: 2900; WAN024D6G_at; Start 35; Stop 59
agaacgatggtaacgatagcaggaa

SEQ ID NO: 145413 - DNA, 25 bp, Artificial
  probe
  misc_feature (1)..(25): SEQ ID NO: 2900; WAN024D6G_at; Start 168; Stop 192
ccaagatagcataggtcaagacctt

SEQ ID NO: 145414 - DNA, 25 bp, Artificial
  probe
  misc_feature (1)..(25): SEQ ID NO: 2900; WAN024D6G_at; Start 233; Stop 257
tcatccgcatcttgaagcataccag

SEQ ID NO: 145415 - DNA, 25 bp, Artificial
  probe
  misc_feature (1)..(25): SEQ ID NO: 2900; WAN024D6G_at; Start 9; Stop 33
tggccaaaacttgagtaccaagaga

SEQ ID NO: 145416 - DNA, 25 bp, Artificial
  probe
  misc_feature (1)..(25): SEQ ID NO: 2900; WAN024D6G_at; Start 306; Stop 330
tcccacgaccataggttacgtttga

SEQ ID NO: 145417 - DNA, 25 bp, Artificial
  probe
  misc_feature (1)..(25): SEQ ID NO: 2900; WAN024D6G_at; Start 153; Stop 177
taacaagggcaatgaccaagatagc

SEQ ID NO: 145418 - DNA, 25 bp, Artificial
  probe
  misc_feature (1)..(25): SEQ ID NO: 2900; WAN024D6G_at; Start 83; Stop 107
gcaagggcaacagaagtcaacaact

SEQ ID NO: 145419 - DNA, 25 bp, Artificial
  probe
  misc_feature (1)..(25): SEQ ID NO: 2900; WAN024D6G_at; Start 183; Stop 207
tcaagaccttagaaaggttgttcaa

SEQ ID NO: 145420 - DNA, 25 bp, Artificial
  probe
  misc_feature (1)..(25): SEQ ID NO: 2900; WAN024D6G_at; Start 2; Stop 26
tgtcgtttggccaaaacttgagtac

SEQ ID NO: 145421 - DNA, 25 bp, Artificial
  probe
  misc_feature (1)..(25): SEQ ID NO: 2900; WAN024D6G_at; Start 117; Stop 141
gatttttcccttgaatgaagacacc

SEQ ID NO: 145422 - DNA, 25 bp, Artificial
  probe
  misc_feature (1)..(25): SEQ ID NO: 2900; WAN024D6G_at; Start 93; Stop 117
cagaagtcaacaactcaccaagtgg

SEQ ID NO: 145423 - DNA, 25 bp, Artificial
  probe
  misc_feature (1)..(25): SEQ ID NO: 2900; WAN024D6G_at; Start 132; Stop 156
tgaagacacccactacaaaagtaac

SEQ ID NO: 145424 - DNA, 25 bp, Artificial
  probe
  misc_feature (1)..(25): SEQ ID NO: 2900; WAN024D6G_at; Start 221; Stop 245
ggtgtatcagtctcatccgcatctt

SEQ ID NO: 145425 - DNA, 25 bp, Artificial
  probe
  misc_feature (1)..(25): SEQ ID NO: 2900; WAN024D6G_at; Start 19; Stop 43
ttgagtaccaagagaaagaacgatg

SEQ ID NO: 145426 - DNA, 25 bp, Artificial
  probe
  misc_feature (1)..(25): SEQ ID NO: 2900; WAN024D6G_at; Start 30; Stop 54
gagaaagaacgatggtaacgatagc

SEQ ID NO: 145427 - DNA, 25 bp, Artificial
  probe
  misc_feature (1)..(25): SEQ ID NO: 2900; WAN024D6G_at; Start 51; Stop 75
tagcaggaagtccttctggaatggc

SEQ ID NO: 145428 - DNA, 25 bp, Artificial
  probe
  misc_feature (1)..(25): SEQ ID NO: 2900; WAN024D6G_at; Start 103; Stop 127
caactcaccaagtggatttttccct

SEQ ID NO: 145429 - DNA, 25 bp, Artificial
  probe
  misc_feature (1)..(25): SEQ ID NO: 2900; WAN024D6G_at; Start 123; Stop 147
tcccttgaatgaagacacccactac

SEQ ID NO: 145430 - DNA, 25 bp, Artificial
  probe
  misc_feature (1)..(25): SEQ ID NO: 2900; WAN024D6G_at; Start 210; Stop 234
tttgtttgagtggtgtatcagtctc

SEQ ID NO: 145431 - DNA, 25 bp, Artificial
  probe
  misc_feature (1)..(25): SEQ ID NO: 2900; WAN024D6G_at; Start 95; Stop 119
gaagtcaacaactcaccaagtggat

SEQ ID NO: 145432 - DNA, 25 bp, Artificial
  probe
  misc_feature (1)..(25): SEQ ID NO: 2900; WAN024D6G_at; Start 303; Stop 327
ccatcccacgaccataggttacgtt

SEQ ID NO: 145433 - DNA, 25 bp, Artificial
  probe
  misc_feature (1)..(25): SEQ ID NO: 2900; WAN024D6G_at; Start 217; Stop 241
gagtggtgtatcagtctcatccgca

SEQ ID NO: 145434 - DNA, 25 bp, Artificial
  probe
  misc_feature (1)..(25): SEQ ID NO: 2900; WAN024D6G_at; Start 176; Stop 200
gcataggtcaagaccttagaaaggt

SEQ ID NO: 145435 - DNA, 25 bp, Artificial
  probe
  misc_feature (1)..(25): SEQ ID NO: 2900; WAN024D6G_at; Start 246; Stop 270
gaagcataccagcaatatgaccaac

SEQ ID NO: 145436 - DNA, 25 bp, Artificial
  probe
  misc_feature (1)..(25): SEQ ID NO: 2900; WAN024D6G_at; Start 57; Stop 81
gaagtccttctggaatggctgcaac

SEQ ID NO: 145437 - DNA, 25 bp, Artificial
  probe
  misc_feature (1)..(25): SEQ ID NO: 2900; WAN024D6G_at; Start 47; Stop 71
acgatagcaggaagtccttctggaa

SEQ ID NO: 145438 - DNA, 25 bp, Artificial
  probe
  misc_feature (1)..(25): SEQ ID NO: 2900; WAN024D6G_at; Start 286; Stop 310
tgtattgacaacaacacccatccca

SEQ ID NO: 145439 - DNA, 25 bp, Artificial
  probe
  misc_feature (1)..(25): SEQ ID NO: 2900; WAN024D6G_at; Start 238; Stop 262
cgcatcttgaagcataccagcaata

SEQ ID NO: 145440 - DNA, 25 bp, Artificial
  probe
  misc_feature (1)..(25): SEQ ID NO: 2900; WAN024D6G_at; Start 278; Stop 302
tacatacctgtattgacaacaacac

SEQ ID NO: 145441 - DNA, 25 bp, Artificial
  probe
  misc_feature (1)..(25): SEQ ID NO: 5220; WAN024D6H_at; Start 177; Stop 201
ttcggcaaggcgcttttccgcctca

SEQ ID NO: 145442 - DNA, 25 bp, Artificial
  probe
  misc_feature (1)..(25): SEQ ID NO: 5220; WAN024D6H_at; Start 76; Stop 100
gctgccgcaactaggatgataatca

SEQ ID NO: 145443 - DNA, 25 bp, Artificial
  probe
  misc_feature (1)..(25): SEQ ID NO: 5220; WAN024D6H_at; Start 186; Stop 210
gcgcttttccgcctcacttgatgac

SEQ ID NO: 145444 - DNA, 25 bp, Artificial
  probe
  misc_feature (1)..(25): SEQ ID NO: 5220; WAN024D6H_at; Start 232; Stop 256
acagcctgcaagacctcttcagggc

SEQ ID NO: 145445 - DNA, 25 bp, Artificial
  probe
  misc_feature (1)..(25): SEQ ID NO: 5220; WAN024D6H_at; Start 8; Stop 32
taaccacagctaggatgataatggc

SEQ ID NO: 145446 - DNA, 25 bp, Artificial
  probe
  misc_feature (1)..(25): SEQ ID NO: 5220; WAN024D6H_at; Start 135; Stop 159
gattgatcgtttctcgccttcttcg

SEQ ID NO: 145447 - DNA, 25 bp, Artificial
  probe
  misc_feature (1)..(25): SEQ ID NO: 5220; WAN024D6H_at; Start 49; Stop 73
ccaccagaagtcacgactgacaaga

SEQ ID NO: 145448 - DNA, 25 bp, Artificial
  probe
  misc_feature (1)..(25): SEQ ID NO: 5220; WAN024D6H_at; Start 164; Stop 188
cattgtgcccaaattcggcaaggcg

SEQ ID NO: 145449 - DNA, 25 bp, Artificial
  probe
  misc_feature (1)..(25): SEQ ID NO: 5220; WAN024D6H_at; Start 167; Stop 191
tgtgcccaaattcggcaaggcgctt

SEQ ID NO: 145450 - DNA, 25 bp, Artificial
  probe
  misc_feature (1)..(25): SEQ ID NO: 5220; WAN024D6H_at; Start 173; Stop 197
caaattcggcaaggcgcttttccgc

SEQ ID NO: 145451 - DNA, 25 bp, Artificial
  probe
  misc_feature (1)..(25): SEQ ID NO: 5220; WAN024D6H_at; Start 200; Stop 224
cacttgatgacaaaccttgctcggt

SEQ ID NO: 145452 - DNA, 25 bp, Artificial
  probe
  misc_feature (1)..(25): SEQ ID NO: 5220; WAN024D6H_at; Start 27; Stop 51
aatggcatctgcgatatcttcccca

SEQ ID NO: 145453 - DNA, 25 bp, Artificial
  probe
  misc_feature (1)..(25): SEQ ID NO: 5220; WAN024D6H_at; Start 34; Stop 58
tctgcgatatcttccccaccagaag

SEQ ID NO: 145454 - DNA, 25 bp, Artificial
  probe
  misc_feature (1)..(25): SEQ ID NO: 5220; WAN024D6H_at; Start 116; Stop 140
gctcgatgaatttgaccaagattga

SEQ ID NO: 145455 - DNA, 25 bp, Artificial
  probe
  misc_feature (1)..(25): SEQ ID NO: 5220; WAN024D6H_at; Start 39; Stop 63
gatatcttccccaccagaagtcacg

SEQ ID NO: 145456 - DNA, 25 bp, Artificial
  probe
  misc_feature (1)..(25): SEQ ID NO: 5220; WAN024D6H_at; Start 11; Stop 35
ccacagctaggatgataatggcatc

SEQ ID NO: 145457 - DNA, 25 bp, Artificial
  probe
  misc_feature (1)..(25): SEQ ID NO: 5220; WAN024D6H_at; Start 204; Stop 228
tgatgacaaaccttgctcggtcgca

SEQ ID NO: 145458 - DNA, 25 bp, Artificial
  probe
  misc_feature (1)..(25): SEQ ID NO: 5220; WAN024D6H_at; Start 93; Stop 117
gataatcatcaaatccttaaattgc

SEQ ID NO: 145459 - DNA, 25 bp, Artificial
  probe
  misc_feature (1)..(25): SEQ ID NO: 5220; WAN024D6H_at; Start 196; Stop 220
gcctcacttgatgacaaaccttgct

SEQ ID NO: 145460 - DNA, 25 bp, Artificial
  probe
  misc_feature (1)..(25): SEQ ID NO: 5220; WAN024D6H_at; Start 79; Stop 103
gccgcaactaggatgataatcatca

SEQ ID NO: 145461 - DNA, 25 bp, Artificial
  probe
  misc_feature (1)..(25): SEQ ID NO: 5220; WAN024D6H_at; Start 1; Stop 25
ttgatgataaccacagctaggatga

SEQ ID NO: 145462 - DNA, 25 bp, Artificial
  probe
  misc_feature (1)..(25): SEQ ID NO: 5220; WAN024D6H_at; Start 220; Stop 244
tcggtcgcatccacagcctgcaaga

SEQ ID NO: 145463 - DNA, 25 bp, Artificial
  probe
  misc_feature (1)..(25): SEQ ID NO: 5220; WAN024D6H_at; Start 112; Stop 136
aattgctcgatgaatttgaccaaga

SEQ ID NO: 145464 - DNA, 25 bp, Artificial
  probe
  misc_feature (1)..(25): SEQ ID NO: 5220; WAN024D6H_at; Start 170; Stop 194
gcccaaattcggcaaggcgcttttc

SEQ ID NO: 145465 - DNA, 25 bp, Artificial
  probe
  misc_feature (1)..(25): SEQ ID NO: 5220; WAN024D6H_at; Start 128; Stop 152
tgaccaagattgatcgtttctcgcc

SEQ ID NO: 145466 - DNA, 25 bp, Artificial
  probe
  misc_feature (1)..(25): SEQ ID NO: 5220; WAN024D6H_at; Start 16; Stop 40
gctaggatgataatggcatctgcga

SEQ ID NO: 145467 - DNA, 25 bp, Artificial
  probe
  misc_feature (1)..(25): SEQ ID NO: 5220; WAN024D6H_at; Start 67; Stop 91
gacaagattgctgccgcaactagga

SEQ ID NO: 145468 - DNA, 25 bp, Artificial
  probe
  misc_feature (1)..(25): SEQ ID NO: 5220; WAN024D6H_at; Start 72; Stop 96
gattgctgccgcaactaggatgata

SEQ ID NO: 145469 - DNA, 25 bp, Artificial
  probe
  misc_feature (1)..(25): SEQ ID NO: 5220; WAN024D6H_at; Start 157; Stop 181
tcgagttcattgtgcccaaattcgg

SEQ ID NO: 145470 - DNA, 25 bp, Artificial
  probe
  misc_feature (1)..(25): SEQ ID NO: 5220; WAN024D6H_at; Start 55; Stop 79
gaagtcacgactgacaagattgctg

SEQ ID NO: 145471 - DNA, 25 bp, Artificial
  probe
  misc_feature (1)..(25): SEQ ID NO: 5220; WAN024D6H_at; Start 237; Stop 261
ctgcaagacctcttcagggctctga

SEQ ID NO: 145472 - DNA, 25 bp, Artificial
  probe
  misc_feature (1)..(25): SEQ ID NO: 5220; WAN024D6H_at; Start 102; Stop 126
caaatccttaaattgctcgatgaat

SEQ ID NO: 145473 - DNA, 25 bp, Artificial
  probe
  misc_feature (1)..(25): SEQ ID NO: 5220; WAN024D6H_at; Start 208; Stop 232
gacaaaccttgctcggtcgcatcca

SEQ ID NO: 145474 - DNA, 25 bp, Artificial
  probe
  misc_feature (1)..(25): SEQ ID NO: 5220; WAN024D6H_at; Start 150; Stop 174
gccttcttcgagttcattgtgccca

SEQ ID NO: 145475 - DNA, 25 bp, Artificial
  probe
  misc_feature (1)..(25): SEQ ID NO: 3052; WAN024D6I_at; Start 64; Stop 88
ggtacagattcacctgtcaaggctg

SEQ ID NO: 145476 - DNA, 25 bp, Artificial
  probe
  misc_feature (1)..(25): SEQ ID NO: 3052; WAN024D6I_at; Start 171; Stop 195
gcctggtaccaattctttagagtca

SEQ ID NO: 145477 - DNA, 25 bp, Artificial
  probe
  misc_feature (1)..(25): SEQ ID NO: 3052; WAN024D6I_at; Start 146; Stop 170
cacctgcttcaagggcaacgatatc

SEQ ID NO: 145478 - DNA, 25 bp, Artificial
  probe
  misc_feature (1)..(25): SEQ ID NO: 3052; WAN024D6I_at; Start 119; Stop 143
tcaaacgtaggtccgctggtaccac

SEQ ID NO: 145479 - DNA, 25 bp, Artificial
  probe
  misc_feature (1)..(25): SEQ ID NO: 3052; WAN024D6I_at; Start 70; Stop 94
gattcacctgtcaaggctgcttctt

SEQ ID NO: 145480 - DNA, 25 bp, Artificial
  probe
  misc_feature (1)..(25): SEQ ID NO: 3052; WAN024D6I_at; Start 201; Stop 225
tgccatgtgtccatcacgaagaacg

SEQ ID NO: 145481 - DNA, 25 bp, Artificial
  probe
  misc_feature (1)..(25): SEQ ID NO: 3052; WAN024D6I_at; Start 230; Stop 254
caactggactagacatggatttgag

SEQ ID NO: 145482 - DNA, 25 bp, Artificial
  probe
  misc_feature (1)..(25): SEQ ID NO: 3052; WAN024D6I_at; Start 210; Stop 234
tccatcacgaagaacgcgggcaact

SEQ ID NO: 145483 - DNA, 25 bp, Artificial
  probe
  misc_feature (1)..(25): SEQ ID NO: 3052; WAN024D6I_at; Start 101; Stop 125
taagagagttggcttctatcaaacg

SEQ ID NO: 145484 - DNA, 25 bp, Artificial
  probe
  misc_feature (1)..(25): SEQ ID NO: 3052; WAN024D6I_at; Start 161; Stop 185
caacgatatcgcctggtaccaattc

SEQ ID NO: 145485 - DNA, 25 bp, Artificial
  probe
  misc_feature (1)..(25): SEQ ID NO: 3052; WAN024D6I_at; Start 112; Stop 136
gcttctatcaaacgtaggtccgctg

SEQ ID NO: 145486 - DNA, 25 bp, Artificial
  probe
  misc_feature (1)..(25): SEQ ID NO: 3052; WAN024D6I_at; Start 80; Stop 104
tcaaggctgcttcttcaattttaag

SEQ ID NO: 145487 - DNA, 25 bp, Artificial
  probe
  misc_feature (1)..(25): SEQ ID NO: 3052; WAN024D6I_at; Start 123; Stop 147
acgtaggtccgctggtaccacgtca

SEQ ID NO: 145488 - DNA, 25 bp, Artificial
  probe
  misc_feature (1)..(25): SEQ ID NO: 3052; WAN024D6I_at; Start 222; Stop 246
aacgcgggcaactggactagacatg

SEQ ID NO: 145489 - DNA, 25 bp, Artificial
  probe
  misc_feature (1)..(25): SEQ ID NO: 3052; WAN024D6I_at; Start 194; Stop 218
caatctctgccatgtgtccatcacg

SEQ ID NO: 145490 - DNA, 25 bp, Artificial
  probe
  misc_feature (1)..(25): SEQ ID NO: 3052; WAN024D6I_at; Start 265; Stop 289
gcttcttcagcttttccttcttggt

SEQ ID NO: 145491 - DNA, 25 bp, Artificial
  probe
  misc_feature (1)..(25): SEQ ID NO: 3052; WAN024D6I_at; Start 141; Stop 165
cacgtcacctgcttcaagggcaacg

SEQ ID NO: 145492 - DNA, 25 bp, Artificial
  probe
  misc_feature (1)..(25): SEQ ID NO: 3052; WAN024D6I_at; Start 41; Stop 65
cgactgacaagtctttttcgactgg

SEQ ID NO: 145493 - DNA, 25 bp, Artificial
  probe
  misc_feature (1)..(25): SEQ ID NO: 3052; WAN024D6I_at; Start 46; Stop 70
gacaagtctttttcgactggtacag

SEQ ID NO: 145494 - DNA, 25 bp, Artificial
  probe
  misc_feature (1)..(25): SEQ ID NO: 3052; WAN024D6I_at; Start 190; Stop 214
gagtcaatctctgccatgtgtccat

SEQ ID NO: 145495 - DNA, 25 bp, Artificial
  probe
  misc_feature (1)..(25): SEQ ID NO: 3052; WAN024D6I_at; Start 167; Stop 191
tatcgcctggtaccaattctttaga

SEQ ID NO: 145496 - DNA, 25 bp, Artificial
  probe
  misc_feature (1)..(25): SEQ ID NO: 3052; WAN024D6I_at; Start 136; Stop 160
ggtaccacgtcacctgcttcaaggg

SEQ ID NO: 145497 - DNA, 25 bp, Artificial
  probe
  misc_feature (1)..(25): SEQ ID NO: 3052; WAN024D6I_at; Start 155; Stop 179
caagggcaacgatatcgcctggtac

SEQ ID NO: 145498 - DNA, 25 bp, Artificial
  probe
  misc_feature (1)..(25): SEQ ID NO: 3052; WAN024D6I_at; Start 180; Stop 204
caattctttagagtcaatctctgcc

SEQ ID NO: 145499 - DNA, 25 bp, Artificial
  probe
  misc_feature (1)..(25): SEQ ID NO: 3052; WAN024D6I_at; Start 106; Stop 130
gagttggcttctatcaaacgtaggt

SEQ ID NO: 145500 - DNA, 25 bp, Artificial
  probe
  misc_feature (1)..(25): SEQ ID NO: 3052; WAN024D6I_at; Start 238; Stop 262
ctagacatggatttgagggcttcaa

SEQ ID NO: 145501 - DNA, 25 bp, Artificial
  probe
  misc_feature (1)..(25): SEQ ID NO: 3052; WAN024D6I_at; Start 151; Stop 175
gcttcaagggcaacgatatcgcctg

SEQ ID NO: 145502 - DNA, 25 bp, Artificial
  probe
  misc_feature (1)..(25): SEQ ID NO: 3052; WAN024D6I_at; Start 252; Stop 276
gagggcttcaatagcttcttcagct

SEQ ID NO: 145503 - DNA, 25 bp, Artificial
  probe
  misc_feature (1)..(25): SEQ ID NO: 3052; WAN024D6I_at; Start 115; Stop 139
tctatcaaacgtaggtccgctggta

SEQ ID NO: 145504 - DNA, 25 bp, Artificial
  probe
  misc_feature (1)..(25): SEQ ID NO: 3052; WAN024D6I_at; Start 92; Stop 116
cttcaattttaagagagttggcttc

SEQ ID NO: 145505 - DNA, 25 bp, Artificial
  probe
  misc_feature (1)..(25): SEQ ID NO: 3052; WAN024D6I_at; Start 226; Stop 250
cgggcaactggactagacatggatt

SEQ ID NO: 145506 - DNA, 25 bp, Artificial
  probe
  misc_feature (1)..(25): SEQ ID NO: 3052; WAN024D6I_at; Start 55; Stop 79
ttttcgactggtacagattcacctg

SEQ ID NO: 145507 - DNA, 25 bp, Artificial
  probe
  misc_feature (1)..(25): SEQ ID NO: 3052; WAN024D6I_at; Start 219; Stop 243
aagaacgcgggcaactggactagac

SEQ ID NO: 145508 - DNA, 25 bp, Artificial
  probe
  misc_feature (1)..(25): SEQ ID NO: 3052; WAN024D6I_at; Start 206; Stop 230
tgtgtccatcacgaagaacgcgggc

SEQ ID NO: 145509 - DNA, 25 bp, Artificial
  probe
  misc_feature (1)..(25): SEQ ID NO: 3088; WAN024D6J_at; Start 193; Stop 217
tgtttttgccaagccttgacgatac

SEQ ID NO: 145510 - DNA, 25 bp, Artificial
  probe
  misc_feature (1)..(25): SEQ ID NO: 3088; WAN024D6J_at; Start 85; Stop 109
cccttagaaacctctgtaccagtga

SEQ ID NO: 145511 - DNA, 25 bp, Artificial
  probe
  misc_feature (1)..(25): SEQ ID NO: 3088; WAN024D6J_at; Start 210; Stop 234
gacgatacgaaccttgtgttctgga

SEQ ID NO: 145512 - DNA, 25 bp, Artificial
  probe
  misc_feature (1)..(25): SEQ ID NO: 3088; WAN024D6J_at; Start 133; Stop 157
gctgttttcagagctggcgcgtcat

SEQ ID NO: 145513 - DNA, 25 bp, Artificial
  probe
  misc_feature (1)..(25): SEQ ID NO: 3088; WAN024D6J_at; Start 148; Stop 172
ggcgcgtcattgacaccgtcacctg

SEQ ID NO: 145514 - DNA, 25 bp, Artificial
  probe
  misc_feature (1)..(25): SEQ ID NO: 3088; WAN024D6J_at; Start 218; Stop 242
gaaccttgtgttctggagacacacg

SEQ ID NO: 145515 - DNA, 25 bp, Artificial
  probe
  misc_feature (1)..(25): SEQ ID NO: 3088; WAN024D6J_at; Start 164; Stop 188
cgtcacctgtcatggcaacgacttt

SEQ ID NO: 145516 - DNA, 25 bp, Artificial
  probe
  misc_feature (1)..(25): SEQ ID NO: 3088; WAN024D6J_at; Start 41; Stop 65
taatagtcgcaaagttatcatctgc

SEQ ID NO: 145517 - DNA, 25 bp, Artificial
  probe
  misc_feature (1)..(25): SEQ ID NO: 3088; WAN024D6J_at; Start 10; Stop 34
aagaccttacgtccttcttccactg

SEQ ID NO: 145518 - DNA, 25 bp, Artificial
  probe
  misc_feature (1)..(25): SEQ ID NO: 3088; WAN024D6J_at; Start 171; Stop 195
tgtcatggcaacgactttaccttgt

SEQ ID NO: 145519 - DNA, 25 bp, Artificial
  probe
  misc_feature (1)..(25): SEQ ID NO: 3088; WAN024D6J_at; Start 136; Stop 160
gttttcagagctggcgcgtcattga

SEQ ID NO: 145520 - DNA, 25 bp, Artificial
  probe
  misc_feature (1)..(25): SEQ ID NO: 3088; WAN024D6J_at; Start 35; Stop 59
cgacgataatagtcgcaaagttatc

SEQ ID NO: 145521 - DNA, 25 bp, Artificial
  probe
  misc_feature (1)..(25): SEQ ID NO: 3088; WAN024D6J_at; Start 203; Stop 227
aagccttgacgatacgaaccttgtg

SEQ ID NO: 145522 - DNA, 25 bp, Artificial
  probe
  misc_feature (1)..(25): SEQ ID NO: 3088; WAN024D6J_at; Start 142; Stop 166
agagctggcgcgtcattgacaccgt

SEQ ID NO: 145523 - DNA, 25 bp, Artificial
  probe
  misc_feature (1)..(25): SEQ ID NO: 3088; WAN024D6J_at; Start 44; Stop 68
tagtcgcaaagttatcatctgcaag

SEQ ID NO: 145524 - DNA, 25 bp, Artificial
  probe
  misc_feature (1)..(25): SEQ ID NO: 3088; WAN024D6J_at; Start 97; Stop 121
tctgtaccagtgattcccataccga

SEQ ID NO: 145525 - DNA, 25 bp, Artificial
  probe
  misc_feature (1)..(25): SEQ ID NO: 3088; WAN024D6J_at; Start 49; Stop 73
gcaaagttatcatctgcaagaatca

SEQ ID NO: 145526 - DNA, 25 bp, Artificial
  probe
  misc_feature (1)..(25): SEQ ID NO: 3088; WAN024D6J_at; Start 91; Stop 115
gaaacctctgtaccagtgattccca

SEQ ID NO: 145527 - DNA, 25 bp, Artificial
  probe
  misc_feature (1)..(25): SEQ ID NO: 3088; WAN024D6J_at; Start 188; Stop 212
taccttgtttttgccaagccttgac

SEQ ID NO: 145528 - DNA, 25 bp, Artificial
  probe
  misc_feature (1)..(25): SEQ ID NO: 3088; WAN024D6J_at; Start 167; Stop 191
cacctgtcatggcaacgactttacc

SEQ ID NO: 145529 - DNA, 25 bp, Artificial
  probe
  misc_feature (1)..(25): SEQ ID NO: 3088; WAN024D6J_at; Start 225; Stop 249
gtgttctggagacacacgggcataa

SEQ ID NO: 145530 - DNA, 25 bp, Artificial
  probe
  misc_feature (1)..(25): SEQ ID NO: 3088; WAN024D6J_at; Start 222; Stop 246
cttgtgttctggagacacacgggca

SEQ ID NO: 145531 - DNA, 25 bp, Artificial
  probe
  misc_feature (1)..(25): SEQ ID NO: 3088; WAN024D6J_at; Start 25; Stop 49
tcttccactgcgacgataatagtcg

SEQ ID NO: 145532 - DNA, 25 bp, Artificial
  probe
  misc_feature (1)..(25): SEQ ID NO: 3088; WAN024D6J_at; Start 128; Stop 152
tatcggctgttttcagagctggcgc

SEQ ID NO: 145533 - DNA, 25 bp, Artificial
  probe
  misc_feature (1)..(25): SEQ ID NO: 3088; WAN024D6J_at; Start 2; Stop 26
tgtttgagaagaccttacgtccttc

SEQ ID NO: 145534 - DNA, 25 bp, Artificial
  probe
  misc_feature (1)..(25): SEQ ID NO: 3088; WAN024D6J_at; Start 17; Stop 41
tacgtccttcttccactgcgacgat

SEQ ID NO: 145535 - DNA, 25 bp, Artificial
  probe
  misc_feature (1)..(25): SEQ ID NO: 3088; WAN024D6J_at; Start 199; Stop 223
tgccaagccttgacgatacgaacct

SEQ ID NO: 145536 - DNA, 25 bp, Artificial
  probe
  misc_feature (1)..(25): SEQ ID NO: 3088; WAN024D6J_at; Start 159; Stop 183
gacaccgtcacctgtcatggcaacg

SEQ ID NO: 145537 - DNA, 25 bp, Artificial
  probe
  misc_feature (1)..(25): SEQ ID NO: 3088; WAN024D6J_at; Start 68; Stop 92
gaatcatatcagaagcccccttaga

SEQ ID NO: 145538 - DNA, 25 bp, Artificial
  probe
  misc_feature (1)..(25): SEQ ID NO: 3088; WAN024D6J_at; Start 174; Stop 198
catggcaacgactttaccttgtttt

SEQ ID NO: 145539 - DNA, 25 bp, Artificial
  probe
  misc_feature (1)..(25): SEQ ID NO: 3088; WAN024D6J_at; Start 215; Stop 239
tacgaaccttgtgttctggagacac

SEQ ID NO: 145540 - DNA, 25 bp, Artificial
  probe
  misc_feature (1)..(25): SEQ ID NO: 3088; WAN024D6J_at; Start 151; Stop 175
gcgtcattgacaccgtcacctgtca

SEQ ID NO: 145541 - DNA, 25 bp, Artificial
  probe
  misc_feature (1)..(25): SEQ ID NO: 3088; WAN024D6J_at; Start 62; Stop 86
ctgcaagaatcatatcagaagcccc

SEQ ID NO: 145542 - DNA, 25 bp, Artificial
  probe
  misc_feature (1)..(25): SEQ ID NO: 3088; WAN024D6J_at; Start 205; Stop 229
gccttgacgatacgaaccttgtgtt

SEQ ID NO: 145543 - DNA, 25 bp, Artificial
  probe
  misc_feature (1)..(25): SEQ ID NO: 1357; WAN024D6K_at; Start 1643; Stop 1667
ccgctgaggctgttcgtgtggctaa

SEQ ID NO: 145544 - DNA, 25 bp, Artificial
  probe
  misc_feature (1)..(25): SEQ ID NO: 1357; WAN024D6K_at; Start 2517; Stop 2541
gacagttggcccattcaagtctaag

SEQ ID NO: 145545 - DNA, 25 bp, Artificial
  probe
  misc_feature (1)..(25): SEQ ID NO: 1357; WAN024D6K_at; Start 1865; Stop 1889
aacacaaggttcgtatcgtcaaggc

SEQ ID NO: 145546 - DNA, 25 bp, Artificial
  probe
  misc_feature (1)..(25): SEQ ID NO: 1357; WAN024D6K_at; Start 151; Stop 175
gaaaagcgccttgccgaatttgggc

SEQ ID NO: 145547 - DNA, 25 bp, Artificial
  probe
  misc_feature (1)..(25): SEQ ID NO: 1357; WAN024D6K_at; Start 70; Stop 94
caagcgttttatactcagagccctg

SEQ ID NO: 145548 - DNA, 25 bp, Artificial
  probe
  misc_feature (1)..(25): SEQ ID NO: 1357; WAN024D6K_at; Start 135; Stop 159
gtcatcaagtgaggcggaaaagcgc

SEQ ID NO: 145549 - DNA, 25 bp, Artificial
  probe
  misc_feature (1)..(25): SEQ ID NO: 1357; WAN024D6K_at; Start 748; Stop 772
caagatgcggatgagactgatacac

SEQ ID NO: 145550 - DNA, 25 bp, Artificial
  probe
  misc_feature (1)..(25): SEQ ID NO: 1357; WAN024D6K_at; Start 2421; Stop 2445
tattcatgcagatgccctaacgatg

SEQ ID NO: 145551 - DNA, 25 bp, Artificial
  probe
  misc_feature (1)..(25): SEQ ID NO: 1357; WAN024D6K_at; Start 421; Stop 445
gcccgcgttcttcgtgatggacaca

SEQ ID NO: 145552 - DNA, 25 bp, Artificial
  probe
  misc_feature (1)..(25): SEQ ID NO: 1357; WAN024D6K_at; Start 1617; Stop 1641
gatgattgaccctgaacgtcctgaa

SEQ ID NO: 145553 - DNA, 25 bp, Artificial
  probe
  misc_feature (1)..(25): SEQ ID NO: 1357; WAN024D6K_at; Start 1842; Stop 1866
tgtttatgcccgtgtgtctccagaa

SEQ ID NO: 145554 - DNA, 25 bp, Artificial
  probe
  misc_feature (1)..(25): SEQ ID NO: 1357; WAN024D6K_at; Start 332; Stop 356
tggttatcatcaacgctgcctttgg

SEQ ID NO: 145555 - DNA, 25 bp, Artificial
  probe
  misc_feature (1)..(25): SEQ ID NO: 1357; WAN024D6K_at; Start 928; Stop 952
gaaggacttcctgctatcgttacca

SEQ ID NO: 145556 - DNA, 25 bp, Artificial
  probe
  misc_feature (1)..(25): SEQ ID NO: 1357; WAN024D6K_at; Start 401; Stop 425
aatccatgtctagtccagttgcccg

SEQ ID NO: 145557 - DNA, 25 bp, Artificial
  probe
  misc_feature (1)..(25): SEQ ID NO: 1357; WAN024D6K_at; Start 1105; Stop 1129
tacgatgcggttctacatgactcag

SEQ ID NO: 145558 - DNA, 25 bp, Artificial
  probe
  misc_feature (1)..(25): SEQ ID NO: 1357; WAN024D6K_at; Start 491; Stop 515
cccttgaagcaggtgacgtggtacc

SEQ ID NO: 145559 - DNA, 25 bp, Artificial
  probe
  misc_feature (1)..(25): SEQ ID NO: 1357; WAN024D6K_at; Start 171; Stop 195
tgggcacaatgaactcgaagaaggc

SEQ ID NO: 145560 - DNA, 25 bp, Artificial
  probe
  misc_feature (1)..(25): SEQ ID NO: 1357; WAN024D6K_at; Start 2588; Stop 2612
caatcgttgtagaaccgcttgaagg

SEQ ID NO: 145561 - DNA, 25 bp, Artificial
  probe
  misc_feature (1)..(25): SEQ ID NO: 1357; WAN024D6K_at; Start 1685; Stop 1709
caattatgattacaggtgaccacca

SEQ ID NO: 145562 - DNA, 25 bp, Artificial
  probe
  misc_feature (1)..(25): SEQ ID NO: 1357; WAN024D6K_at; Start 246; Stop 270
gattatcatcctagttgcggcagca

SEQ ID NO: 145563 - DNA, 25 bp, Artificial
  probe
  misc_feature (1)..(25): SEQ ID NO: 1357; WAN024D6K_at; Start 1312; Stop 1336
gaattgccatttgactctgaccgta

SEQ ID NO: 145564 - DNA, 25 bp, Artificial
  probe
  misc_feature (1)..(25): SEQ ID NO: 1357; WAN024D6K_at; Start 1709; Stop 1733
aagacacagcggaagccattgccaa

SEQ ID NO: 145565 - DNA, 25 bp, Artificial
  probe
  misc_feature (1)..(25): SEQ ID NO: 1357; WAN024D6K_at; Start 994; Stop 1018
tccatcgttcgtaagttgccagcag

SEQ ID NO: 145566 - DNA, 25 bp, Artificial
  probe
  misc_feature (1)..(25): SEQ ID NO: 1357; WAN024D6K_at; Start 509; Stop 533
tggtaccagcggacctacgtttgat

SEQ ID NO: 145567 - DNA, 25 bp, Artificial
  probe
  misc_feature (1)..(25): SEQ ID NO: 1357; WAN024D6K_at; Start 2438; Stop 2462
taacgatggcctttgcaacccttgg

SEQ ID NO: 145568 - DNA, 25 bp, Artificial
  probe
  misc_feature (1)..(25): SEQ ID NO: 1357; WAN024D6K_at; Start 457; Stop 481
gactctaaagaattggtaccaggcg

SEQ ID NO: 145569 - DNA, 25 bp, Artificial
  probe
  misc_feature (1)..(25): SEQ ID NO: 1357; WAN024D6K_at; Start 1731; Stop 1755
caaacgtttgggaatcattgacgca

SEQ ID NO: 145570 - DNA, 25 bp, Artificial
  probe
  misc_feature (1)..(25): SEQ ID NO: 1357; WAN024D6K_at; Start 2267; Stop 2291
tcatgaatcataaaccacgtggacg

SEQ ID NO: 145571 - DNA, 25 bp, Artificial
  probe
  misc_feature (1)..(25): SEQ ID NO: 1357; WAN024D6K_at; Start 101; Stop 125
tcttgcaggctgtggatgcgaccga

SEQ ID NO: 145572 - DNA, 25 bp, Artificial
  probe
  misc_feature (1)..(25): SEQ ID NO: 1357; WAN024D6K_at; Start 2282; Stop 2306
cacgtggacgcaaggcaagcttctt

SEQ ID NO: 145573 - DNA, 25 bp, Artificial
  probe
  misc_feature (1)..(25): SEQ ID NO: 1357; WAN024D6K_at; Start 2335; Stop 2359
tatcaaggtgtactccaagcagctc

SEQ ID NO: 145574 - DNA, 25 bp, Artificial
  probe
  misc_feature (1)..(25): SEQ ID NO: 1357; WAN024D6K_at; Start 2382; Stop 2406
tgcgattgcttacccagttcatgtg

SEQ ID NO: 145575 - DNA, 25 bp, Artificial
  probe
  misc_feature (1)..(25): SEQ ID NO: 1357; WAN024D6K_at; Start 1059; Stop 1083
gactggtacgctgactatgaacaag

SEQ ID NO: 145576 - DNA, 25 bp, Artificial
  probe
  misc_feature (1)..(25): SEQ ID NO: 1357; WAN024D6K_at; Start 1750; Stop 1774
gacgcaaacgatacagaaggtcacg

SEQ ID NO: 145577 - DNA, 25 bp, Artificial
  probe
  misc_feature (1)..(25): SEQ ID NO: 639; WAN024D6L_at; Start 31; Stop 55
gcaattgcagttattgatttgctac

SEQ ID NO: 145578 - DNA, 25 bp, Artificial
  probe
  misc_feature (1)..(25): SEQ ID NO: 639; WAN024D6L_at; Start 250; Stop 274
ctattttttgttctcttagccttca

SEQ ID NO: 145579 - DNA, 25 bp, Artificial
  probe
  misc_feature (1)..(25): SEQ ID NO: 639; WAN024D6L_at; Start 115; Stop 139
ttaattttcttccttgctcaaggac

SEQ ID NO: 145580 - DNA, 25 bp, Artificial
  probe
  misc_feature (1)..(25): SEQ ID NO: 639; WAN024D6L_at; Start 207; Stop 231
aaagattcgcttctactatttaggg

SEQ ID NO: 145581 - DNA, 25 bp, Artificial
  probe
  misc_feature (1)..(25): SEQ ID NO: 639; WAN024D6L_at; Start 311; Stop 335
tcactgcttgccattctacttttta

SEQ ID NO: 145582 - DNA, 25 bp, Artificial
  probe
  misc_feature (1)..(25): SEQ ID NO: 639; WAN024D6L_at; Start 17; Stop 41
gaatccattttatagcaattgcagt

SEQ ID NO: 145583 - DNA, 25 bp, Artificial
  probe
  misc_feature (1)..(25): SEQ ID NO: 639; WAN024D6L_at; Start 215; Stop 239
gcttctactatttaggggttctcac

SEQ ID NO: 145584 - DNA, 25 bp, Artificial
  probe
  misc_feature (1)..(25): SEQ ID NO: 639; WAN024D6L_at; Start 160; Stop 184
gtccgactcaaacatcaattcgctg

SEQ ID NO: 145585 - DNA, 25 bp, Artificial
  probe
  misc_feature (1)..(25): SEQ ID NO: 639; WAN024D6L_at; Start 2; Stop 26
tgaaaaaactctatagaatccattt

SEQ ID NO: 145586 - DNA, 25 bp, Artificial
  probe
  misc_feature (1)..(25): SEQ ID NO: 639; WAN024D6L_at; Start 230; Stop 254
gggttctcaccattgattttctatt

SEQ ID NO: 145587 - DNA, 25 bp, Artificial
  probe
  misc_feature (1)..(25): SEQ ID NO: 639; WAN024D6L_at; Start 333; Stop 357
ttattatatgacagctgactaccta

SEQ ID NO: 145588 - DNA, 25 bp, Artificial
  probe
  misc_feature (1)..(25): SEQ ID NO: 639; WAN024D6L_at; Start 37; Stop 61
gcagttattgatttgctactatttg

SEQ ID NO: 145589 - DNA, 25 bp, Artificial
  probe
  misc_feature (1)..(25): SEQ ID NO: 639; WAN024D6L_at; Start 367; Stop 391
tatccagacttttacgacaaacaca

SEQ ID NO: 145590 - DNA, 25 bp, Artificial
  probe
  misc_feature (1)..(25): SEQ ID NO: 639; WAN024D6L_at; Start 359; Stop 383
gagaaaactatccagacttttacga

SEQ ID NO: 145591 - DNA, 25 bp, Artificial
  probe
  misc_feature (1)..(25): SEQ ID NO: 639; WAN024D6L_at; Start 331; Stop 355
ttttattatatgacagctgactacc

SEQ ID NO: 145592 - DNA, 25 bp, Artificial
  probe
  misc_feature (1)..(25): SEQ ID NO: 639; WAN024D6L_at; Start 263; Stop 287
tcttagccttcattagttctcagcg

SEQ ID NO: 145593 - DNA, 25 bp, Artificial
  probe
  misc_feature (1)..(25): SEQ ID NO: 639; WAN024D6L_at; Start 100; Stop 124
ctcttgctctctggtttaattttct

SEQ ID NO: 145594 - DNA, 25 bp, Artificial
  probe
  misc_feature (1)..(25): SEQ ID NO: 639; WAN024D6L_at; Start 369; Stop 393
tccagacttttacgacaaacacatc

SEQ ID NO: 145595 - DNA, 25 bp, Artificial
  probe
  misc_feature (1)..(25): SEQ ID NO: 639; WAN024D6L_at; Start 195; Stop 219
tcaaatcaataaaaagattcgcttc

SEQ ID NO: 145596 - DNA, 25 bp, Artificial
  probe
  misc_feature (1)..(25): SEQ ID NO: 639; WAN024D6L_at; Start 158; Stop 182
tcgtccgactcaaacatcaattcgc

SEQ ID NO: 145597 - DNA, 25 bp, Artificial
  probe
  misc_feature (1)..(25): SEQ ID NO: 639; WAN024D6L_at; Start 266; Stop 290
tagccttcattagttctcagcgttt

SEQ ID NO: 145598 - DNA, 25 bp, Artificial
  probe
  misc_feature (1)..(25): SEQ ID NO: 639; WAN024D6L_at; Start 361; Stop 385
gaaaactatccagacttttacgaca

SEQ ID NO: 145599 - DNA, 25 bp, Artificial
  probe
  misc_feature (1)..(25): SEQ ID NO: 639; WAN024D6L_at; Start 163; Stop 187
cgactcaaacatcaattcgctgaga

SEQ ID NO: 145600 - DNA, 25 bp, Artificial
  probe
  misc_feature (1)..(25): SEQ ID NO: 639; WAN024D6L_at; Start 277; Stop 301
agttctcagcgtttttcatctctta

SEQ ID NO: 145601 - DNA, 25 bp, Artificial
  probe
  misc_feature (1)..(25): SEQ ID NO: 639; WAN024D6L_at; Start 316; Stop 340
gcttgccattctactttttattata

SEQ ID NO: 145602 - DNA, 25 bp, Artificial
  probe
  misc_feature (1)..(25): SEQ ID NO: 639; WAN024D6L_at; Start 180; Stop 204
cgctgagatttatcctcaaatcaat

SEQ ID NO: 145603 - DNA, 25 bp, Artificial
  probe
  misc_feature (1)..(25): SEQ ID NO: 639; WAN024D6L_at; Start 174; Stop 198
tcaattcgctgagatttatcctcaa

SEQ ID NO: 145604 - DNA, 25 bp, Artificial
  probe
  misc_feature (1)..(25): SEQ ID NO: 639; WAN024D6L_at; Start 132; Stop 156
tcaaggactcctgctatttctcttg

SEQ ID NO: 145605 - DNA, 25 bp, Artificial
  probe
  misc_feature (1)..(25): SEQ ID NO: 639; WAN024D6L_at; Start 279; Stop 303
ttctcagcgtttttcatctcttatg

SEQ ID NO: 145606 - DNA, 25 bp, Artificial
  probe
  misc_feature (1)..(25): SEQ ID NO: 639; WAN024D6L_at; Start 372; Stop 396
agacttttacgacaaacacatctct

SEQ ID NO: 145607 - DNA, 25 bp, Artificial
  probe
  misc_feature (1)..(25): SEQ ID NO: 639; WAN024D6L_at; Start 129; Stop 153
tgctcaaggactcctgctatttctc

SEQ ID NO: 145608 - DNA, 25 bp, Artificial
  probe
  misc_feature (1)..(25): SEQ ID NO: 639; WAN024D6L_at; Start 170; Stop 194
aacatcaattcgctgagatttatcc

SEQ ID NO: 145609 - DNA, 25 bp, Artificial
  probe
  misc_feature (1)..(25): SEQ ID NO: 639; WAN024D6L_at; Start 272; Stop 296
tcattagttctcagcgtttttcatc

SEQ ID NO: 145610 - DNA, 25 bp, Artificial
  probe
  misc_feature (1)..(25): SEQ ID NO: 639; WAN024D6L_at; Start 125; Stop 149
tccttgctcaaggactcctgctatt

SEQ ID NO: 145611 - DNA, 25 bp, Artificial
  probe
  misc_feature (1)..(25): SEQ ID NO: 1407; WAN024D6M_at; Start 553; Stop 577
gatggcttcagcaataccttcacta

SEQ ID NO: 145612 - DNA, 25 bp, Artificial
  probe
  misc_feature (1)..(25): SEQ ID NO: 1407; WAN024D6M_at; Start 294; Stop 318
tgaggtcttggaacacactgtctct

SEQ ID NO: 145613 - DNA, 25 bp, Artificial
  probe
  misc_feature (1)..(25): SEQ ID NO: 1407; WAN024D6M_at; Start 529; Stop 553
gaccagctccaagtcaagcagtttg

SEQ ID NO: 145614 - DNA, 25 bp, Artificial
  probe
  misc_feature (1)..(25): SEQ ID NO: 1407; WAN024D6M_at; Start 585; Stop 609
taacgacgaggatttacaagtgaat

SEQ ID NO: 145615 - DNA, 25 bp, Artificial
  probe
  misc_feature (1)..(25): SEQ ID NO: 1407; WAN024D6M_at; Start 325; Stop 349
ttcgtggaaagactagataaactgc

SEQ ID NO: 145616 - DNA, 25 bp, Artificial
  probe
  misc_feature (1)..(25): SEQ ID NO: 1407; WAN024D6M_at; Start 66; Stop 90
taccaacaaggaaattgcggctcgc

SEQ ID NO: 145617 - DNA, 25 bp, Artificial
  probe
  misc_feature (1)..(25): SEQ ID NO: 1407; WAN024D6M_at; Start 543; Stop 567
caagcagtttgatggcttcagcaat

SEQ ID NO: 145618 - DNA, 25 bp, Artificial
  probe
  misc_feature (1)..(25): SEQ ID NO: 1407; WAN024D6M_at; Start 182; Stop 206
tgactgacctcggtctcaaactggt

SEQ ID NO: 145619 - DNA, 25 bp, Artificial
  probe
  misc_feature (1)..(25): SEQ ID NO: 1407; WAN024D6M_at; Start 142; Stop 166
gaaaatctcatcctaaaggacaagg

SEQ ID NO: 145620 - DNA, 25 bp, Artificial
  probe
  misc_feature (1)..(25): SEQ ID NO: 1407; WAN024D6M_at; Start 504; Stop 528
ggacaagcactcacttcacatcggt

SEQ ID NO: 145621 - DNA, 25 bp, Artificial
  probe
  misc_feature (1)..(25): SEQ ID NO: 1407; WAN024D6M_at; Start 486; Stop 510
tgacattctccattatctggacaag

SEQ ID NO: 145622 - DNA, 25 bp, Artificial
  probe
  misc_feature (1)..(25): SEQ ID NO: 1407; WAN024D6M_at; Start 39; Stop 63
tgaaattggcatagacctgcataag

SEQ ID NO: 145623 - DNA, 25 bp, Artificial
  probe
  misc_feature (1)..(25): SEQ ID NO: 1407; WAN024D6M_at; Start 412; Stop 436
gaaatcaataacctcccactagctg

SEQ ID NO: 145624 - DNA, 25 bp, Artificial
  probe
  misc_feature (1)..(25): SEQ ID NO: 1407; WAN024D6M_at; Start 615; Stop 639
cattgcaaaacaactctatgtcgag

SEQ ID NO: 145625 - DNA, 25 bp, Artificial
  probe
  misc_feature (1)..(25): SEQ ID NO: 1407; WAN024D6M_at; Start 279; Stop 303
gattcacgaggaagctgaggtcttg

SEQ ID NO: 145626 - DNA, 25 bp, Artificial
  probe
  misc_feature (1)..(25): SEQ ID NO: 1407; WAN024D6M_at; Start 379; Stop 403
ggaactattcctgccaagggagaac

SEQ ID NO: 145627 - DNA, 25 bp, Artificial
  probe
  misc_feature (1)..(25): SEQ ID NO: 1407; WAN024D6M_at; Start 571; Stop 595
ttcactatcctcagtaacgacgagg

SEQ ID NO: 145628 - DNA, 25 bp, Artificial
  probe
  misc_feature (1)..(25): SEQ ID NO: 1407; WAN024D6M_at; Start 436; Stop 460
gatatcaaggaagctggcgcctacc

SEQ ID NO: 145629 - DNA, 25 bp, Artificial
  probe
  misc_feature (1)..(25): SEQ ID NO: 1407; WAN024D6M_at; Start 2; Stop 26
tgaccccaaacaaagaagactatct

SEQ ID NO: 145630 - DNA, 25 bp, Artificial
  probe
  misc_feature (1)..(25): SEQ ID NO: 1407; WAN024D6M_at; Start 80; Stop 104
ttgcggctcgcatgcaagtctctcc

SEQ ID NO: 145631 - DNA, 25 bp, Artificial
  probe
  misc_feature (1)..(25): SEQ ID NO: 1407; WAN024D6M_at; Start 169; Stop 193
tgtggctatctactgactgacctcg

SEQ ID NO: 145632 - DNA, 25 bp, Artificial
  probe
  misc_feature (1)..(25): SEQ ID NO: 1407; WAN024D6M_at; Start 309; Stop 333
cactgtctctgacctgttcgtggaa

SEQ ID NO: 145633 - DNA, 25 bp, Artificial
  probe
  misc_feature (1)..(25): SEQ ID NO: 1407; WAN024D6M_at; Start 197; Stop 221
tcaaactggtctctgagctctatcg

SEQ ID NO: 145634 - DNA, 25 bp, Artificial
  probe
  misc_feature (1)..(25): SEQ ID NO: 1407; WAN024D6M_at; Start 269; Stop 293
caagtgaccagattcacgaggaagc

SEQ ID NO: 145635 - DNA, 25 bp, Artificial
  probe
  misc_feature (1)..(25): SEQ ID NO: 1407; WAN024D6M_at; Start 126; Stop 150
caaacgaatgaaaagtgaaaatctc

SEQ ID NO: 145636 - DNA, 25 bp, Artificial
  probe
  misc_feature (1)..(25): SEQ ID NO: 1407; WAN024D6M_at; Start 225; Stop 249
gcaccgcttgattgaagtttttcta

SEQ ID NO: 145637 - DNA, 25 bp, Artificial
  probe
  misc_feature (1)..(25): SEQ ID NO: 1407; WAN024D6M_at; Start 104; Stop 128
cccctgccgtaactgaaatgatcaa

SEQ ID NO: 145638 - DNA, 25 bp, Artificial
  probe
  misc_feature (1)..(25): SEQ ID NO: 1407; WAN024D6M_at; Start 211; Stop 235
gagctctatcgtaagcaccgcttga

SEQ ID NO: 145639 - DNA, 25 bp, Artificial
  probe
  misc_feature (1)..(25): SEQ ID NO: 1407; WAN024D6M_at; Start 338; Stop 362
tagataaactgctaggtttccctaa

SEQ ID NO: 145640 - DNA, 25 bp, Artificial
  probe
  misc_feature (1)..(25): SEQ ID NO: 1407; WAN024D6M_at; Start 456; Stop 480
ctaccgcctgactcgggtgcacgat

SEQ ID NO: 145641 - DNA, 25 bp, Artificial
  probe
  misc_feature (1)..(25): SEQ ID NO: 1407; WAN024D6M_at; Start 519; Stop 543
tcacatcggtgaccagctccaagtc

SEQ ID NO: 145642 - DNA, 25 bp, Artificial
  probe
  misc_feature (1)..(25): SEQ ID NO: 1407; WAN024D6M_at; Start 154; Stop 178
ctaaaggacaaggaatgtggctatc

SEQ ID NO: 145643 - DNA, 25 bp, Artificial
  probe
  misc_feature (1)..(25): SEQ ID NO: 1407; WAN024D6M_at; Start 256; Stop 280
catttagactatacaagtgaccaga

SEQ ID NO: 145644 - DNA, 25 bp, Artificial
  probe
  misc_feature (1)..(25): SEQ ID NO: 1407; WAN024D6M_at; Start 52; Stop 76
gacctgcataagattaccaacaagg

SEQ ID NO: 145645 - DNA, 25 bp, Artificial
  probe
  misc_feature (1)..(25): SEQ ID NO: 1913; WAN024D6N_at; Start 191; Stop 215
cagagattgtcaaggaccttaagga

SEQ ID NO: 145646 - DNA, 25 bp, Artificial
  probe
  misc_feature (1)..(25): SEQ ID NO: 1913; WAN024D6N_at; Start 80; Stop 104
ccagtgattttctggctgctagtgt

SEQ ID NO: 145647 - DNA, 25 bp, Artificial
  probe
  misc_feature (1)..(25): SEQ ID NO: 1913; WAN024D6N_at; Start 128; Stop 152
gaaagatcttgtcccagttgaagaa

SEQ ID NO: 145648 - DNA, 25 bp, Artificial
  probe
  misc_feature (1)..(25): SEQ ID NO: 1913; WAN024D6N_at; Start 185; Stop 209
gcggaacagagattgtcaaggacct

SEQ ID NO: 145649 - DNA, 25 bp, Artificial
  probe
  misc_feature (1)..(25): SEQ ID NO: 1913; WAN024D6N_at; Start 63; Stop 87
gaaggaaagcaaggtgaccagtgat

SEQ ID NO: 145650 - DNA, 25 bp, Artificial
  probe
  misc_feature (1)..(25): SEQ ID NO: 1913; WAN024D6N_at; Start 180; Stop 204
aacgggcggaacagagattgtcaag

SEQ ID NO: 145651 - DNA, 25 bp, Artificial
  probe
  misc_feature (1)..(25): SEQ ID NO: 1913; WAN024D6N_at; Start 388; Stop 412
accagtctagaaaaagtcgtggccg

SEQ ID NO: 145652 - DNA, 25 bp, Artificial
  probe
  misc_feature (1)..(25): SEQ ID NO: 1913; WAN024D6N_at; Start 407; Stop 431
tggccgatgcagagagtcagatgaa

SEQ ID NO: 145653 - DNA, 25 bp, Artificial
  probe
  misc_feature (1)..(25): SEQ ID NO: 1913; WAN024D6N_at; Start 200; Stop 224
tcaaggaccttaaggatattagtct

SEQ ID NO: 145654 - DNA, 25 bp, Artificial
  probe
  misc_feature (1)..(25): SEQ ID NO: 1913; WAN024D6N_at; Start 305; Stop 329
gccctgtaggagctcatattcatga

SEQ ID NO: 145655 - DNA, 25 bp, Artificial
  probe
  misc_feature (1)..(25): SEQ ID NO: 1913; WAN024D6N_at; Start 160; Stop 184
ctgatttcagtagcgcgtggaacgg

SEQ ID NO: 145656 - DNA, 25 bp, Artificial
  probe
  misc_feature (1)..(25): SEQ ID NO: 1913; WAN024D6N_at; Start 275; Stop 299
tcagtttccatgacaatccgaatcc

SEQ ID NO: 145657 - DNA, 25 bp, Artificial
  probe
  misc_feature (1)..(25): SEQ ID NO: 1913; WAN024D6N_at; Start 393; Stop 417
tctagaaaaagtcgtggccgatgca

SEQ ID NO: 145658 - DNA, 25 bp, Artificial
  probe
  misc_feature (1)..(25): SEQ ID NO: 1913; WAN024D6N_at; Start 289; Stop 313
aatccgaatccaaattgccctgtag

SEQ ID NO: 145659 - DNA, 25 bp, Artificial
  probe
  misc_feature (1)..(25): SEQ ID NO: 1913; WAN024D6N_at; Start 120; Stop 144
cattatcagaaagatcttgtcccag

SEQ ID NO: 145660 - DNA, 25 bp, Artificial
  probe
  misc_feature (1)..(25): SEQ ID NO: 1913; WAN024D6N_at; Start 219; Stop 243
tagtcttttagatgtttatcaggcg

SEQ ID NO: 145661 - DNA, 25 bp, Artificial
  probe
  misc_feature (1)..(25): SEQ ID NO: 1913; WAN024D6N_at; Start 107; Stop 131
gggtcaatcctgtcattatcagaaa

SEQ ID NO: 145662 - DNA, 25 bp, Artificial
  probe
  misc_feature (1)..(25): SEQ ID NO: 1913; WAN024D6N_at; Start 5; Stop 29
aaattccaagtagatttaccattgc

SEQ ID NO: 145663 - DNA, 25 bp, Artificial
  probe
  misc_feature (1)..(25): SEQ ID NO: 1913; WAN024D6N_at; Start 38; Stop 62
tgctgataatcattgccctcgaggg

SEQ ID NO: 145664 - DNA, 25 bp, Artificial
  probe
  misc_feature (1)..(25): SEQ ID NO: 1913; WAN024D6N_at; Start 31; Stop 55
actcatatgctgataatcattgccc

SEQ ID NO: 145665 - DNA, 25 bp, Artificial
  probe
  misc_feature (1)..(25): SEQ ID NO: 1913; WAN024D6N_at; Start 401; Stop 425
aagtcgtggccgatgcagagagtca

SEQ ID NO: 145666 - DNA, 25 bp, Artificial
  probe
  misc_feature (1)..(25): SEQ ID NO: 1913; WAN024D6N_at; Start 233; Stop 257
tttatcaggcggtcgaatgtcttgg

SEQ ID NO: 145667 - DNA, 25 bp, Artificial
  probe
  misc_feature (1)..(25): SEQ ID NO: 1913; WAN024D6N_at; Start 336; Stop 360
ggatcaaaaattggagagaattcag

SEQ ID NO: 145668 - DNA, 25 bp, Artificial
  probe
  misc_feature (1)..(25): SEQ ID NO: 1913; WAN024D6N_at; Start 297; Stop 321
tccaaattgccctgtaggagctcat

SEQ ID NO: 145669 - DNA, 25 bp, Artificial
  probe
  misc_feature (1)..(25): SEQ ID NO: 1913; WAN024D6N_at; Start 238; Stop 262
caggcggtcgaatgtcttggtaaga

SEQ ID NO: 145670 - DNA, 25 bp, Artificial
  probe
  misc_feature (1)..(25): SEQ ID NO: 1913; WAN024D6N_at; Start 227; Stop 251
tagatgtttatcaggcggtcgaatg

SEQ ID NO: 145671 - DNA, 25 bp, Artificial
  probe
  misc_feature (1)..(25): SEQ ID NO: 1913; WAN024D6N_at; Start 154; Stop 178
gcagagctgatttcagtagcgcgtg

SEQ ID NO: 145672 - DNA, 25 bp, Artificial
  probe
  misc_feature (1)..(25): SEQ ID NO: 1913; WAN024D6N_at; Start 261; Stop 285
gacaggtcaactcttcagtttccat

SEQ ID NO: 145673 - DNA, 25 bp, Artificial
  probe
  misc_feature (1)..(25): SEQ ID NO: 1913; WAN024D6N_at; Start 351; Stop 375
gagaattcagttgactatggaggca

SEQ ID NO: 145674 - DNA, 25 bp, Artificial
  probe
  misc_feature (1)..(25): SEQ ID NO: 1913; WAN024D6N_at; Start 416; Stop 440
cagagagtcagatgaaggattaact

SEQ ID NO: 145675 - DNA, 25 bp, Artificial
  probe
  misc_feature (1)..(25): SEQ ID NO: 1913; WAN024D6N_at; Start 72; Stop 96
caaggtgaccagtgattttctggct

SEQ ID NO: 145676 - DNA, 25 bp, Artificial
  probe
  misc_feature (1)..(25): SEQ ID NO: 1913; WAN024D6N_at; Start 362; Stop 386
tgactatggaggcagaacttggtca

SEQ ID NO: 145677 - DNA, 25 bp, Artificial
  probe
  misc_feature (1)..(25): SEQ ID NO: 1913; WAN024D6N_at; Start 252; Stop 276
tcttggtaagacaggtcaactcttc

SEQ ID NO: 145678 - DNA, 25 bp, Artificial
  probe
  misc_feature (1)..(25): SEQ ID NO: 1913; WAN024D6N_at; Start 319; Stop 343
catattcatgatgttttggatcaaa

SEQ ID NO: 145679 - DNA, 25 bp, Artificial
  probe
  misc_feature (1)..(25): SEQ ID NO: 2798; WAN024D6O_at; Start 224; Stop 248
tctataatggggtcattttgttgaa

SEQ ID NO: 145680 - DNA, 25 bp, Artificial
  probe
  misc_feature (1)..(25): SEQ ID NO: 2798; WAN024D6O_at; Start 57; Stop 81
tagaagtttgtggaatccagtatta

SEQ ID NO: 145681 - DNA, 25 bp, Artificial
  probe
  misc_feature (1)..(25): SEQ ID NO: 2798; WAN024D6O_at; Start 54; Stop 78
taatagaagtttgtggaatccagta

SEQ ID NO: 145682 - DNA, 25 bp, Artificial
  probe
  misc_feature (1)..(25): SEQ ID NO: 2798; WAN024D6O_at; Start 38; Stop 62
tgtcattttggaaggataatagaag

SEQ ID NO: 145683 - DNA, 25 bp, Artificial
  probe
  misc_feature (1)..(25): SEQ ID NO: 2798; WAN024D6O_at; Start 26; Stop 50
tagcctttatagtgtcattttggaa

SEQ ID NO: 145684 - DNA, 25 bp, Artificial
  probe
  misc_feature (1)..(25): SEQ ID NO: 2798; WAN024D6O_at; Start 100; Stop 124
tcaagttatttttatctatcctacc

SEQ ID NO: 145685 - DNA, 25 bp, Artificial
  probe
  misc_feature (1)..(25): SEQ ID NO: 2798; WAN024D6O_at; Start 59; Stop 83
gaagtttgtggaatccagtattatt

SEQ ID NO: 145686 - DNA, 25 bp, Artificial
  probe
  misc_feature (1)..(25): SEQ ID NO: 2798; WAN024D6O_at; Start 73; Stop 97
ccagtattatttttattatccctca

SEQ ID NO: 145687 - DNA, 25 bp, Artificial
  probe
  misc_feature (1)..(25): SEQ ID NO: 2798; WAN024D6O_at; Start 33; Stop 57
tatagtgtcattttggaaggataat

SEQ ID NO: 145688 - DNA, 25 bp, Artificial
  probe
  misc_feature (1)..(25): SEQ ID NO: 2798; WAN024D6O_at; Start 139; Stop 163
ggatacgagaatgttcagttagctt

SEQ ID NO: 145689 - DNA, 25 bp, Artificial
  probe
  misc_feature (1)..(25): SEQ ID NO: 2798; WAN024D6O_at; Start 138; Stop 162
tggatacgagaatgttcagttagct

SEQ ID NO: 145690 - DNA, 25 bp, Artificial
  probe
  misc_feature (1)..(25): SEQ ID NO: 2798; WAN024D6O_at; Start 44; Stop 68
tttggaaggataatagaagtttgtg

SEQ ID NO: 145691 - DNA, 25 bp, Artificial
  probe
  misc_feature (1)..(25): SEQ ID NO: 2798; WAN024D6O_at; Start 130; Stop 154
tataaaaatggatacgagaatgttc

SEQ ID NO: 145692 - DNA, 25 bp, Artificial
  probe
  misc_feature (1)..(25): SEQ ID NO: 2798; WAN024D6O_at; Start 132; Stop 156
taaaaatggatacgagaatgttcag

SEQ ID NO: 145693 - DNA, 25 bp, Artificial
  probe
  misc_feature (1)..(25): SEQ ID NO: 2798; WAN024D6O_at; Start 142; Stop 166
tacgagaatgttcagttagcttttt

SEQ ID NO: 145694 - DNA, 25 bp, Artificial
  probe
  misc_feature (1)..(25): SEQ ID NO: 2798; WAN024D6O_at; Start 91; Stop 115
tccctcatttcaagttatttttatc

SEQ ID NO: 145695 - DNA, 25 bp, Artificial
  probe
  misc_feature (1)..(25): SEQ ID NO: 2798; WAN024D6O_at; Start 204; Stop 228
tctaagtggcatctttttaatctat

SEQ ID NO: 145696 - DNA, 25 bp, Artificial
  probe
  misc_feature (1)..(25): SEQ ID NO: 2798; WAN024D6O_at; Start 80; Stop 104
tatttttattatccctcatttcaag

SEQ ID NO: 145697 - DNA, 25 bp, Artificial
  probe
  misc_feature (1)..(25): SEQ ID NO: 2798; WAN024D6O_at; Start 55; Stop 79
aatagaagtttgtggaatccagtat

SEQ ID NO: 145698 - DNA, 25 bp, Artificial
  probe
  misc_feature (1)..(25): SEQ ID NO: 2798; WAN024D6O_at; Start 41; Stop 65
cattttggaaggataatagaagttt

SEQ ID NO: 145699 - DNA, 25 bp, Artificial
  probe
  misc_feature (1)..(25): SEQ ID NO: 2798; WAN024D6O_at; Start 137; Stop 161
atggatacgagaatgttcagttagc

SEQ ID NO: 145700 - DNA, 25 bp, Artificial
  probe
  misc_feature (1)..(25): SEQ ID NO: 2798; WAN024D6O_at; Start 193; Stop 217
tttttgctttttctaagtggcatct

SEQ ID NO: 145701 - DNA, 25 bp, Artificial
  probe
  misc_feature (1)..(25): SEQ ID NO: 2798; WAN024D6O_at; Start 18; Stop 42
aattgtattagcctttatagtgtca

SEQ ID NO: 145702 - DNA, 25 bp, Artificial
  probe
  misc_feature (1)..(25): SEQ ID NO: 2798; WAN024D6O_at; Start 29; Stop 53
cctttatagtgtcattttggaagga

SEQ ID NO: 145703 - DNA, 25 bp, Artificial
  probe
  misc_feature (1)..(25): SEQ ID NO: 2798; WAN024D6O_at; Start 191; Stop 215
cttttttgctttttctaagtggcat

SEQ ID NO: 145704 - DNA, 25 bp, Artificial
  probe
  misc_feature (1)..(25): SEQ ID NO: 2798; WAN024D6O_at; Start 47; Stop 71
ggaaggataatagaagtttgtggaa

SEQ ID NO: 145705 - DNA, 25 bp, Artificial
  probe
  misc_feature (1)..(25): SEQ ID NO: 2798; WAN024D6O_at; Start 144; Stop 168
cgagaatgttcagttagctttttat

SEQ ID NO: 145706 - DNA, 25 bp, Artificial
  probe
  misc_feature (1)..(25): SEQ ID NO: 2798; WAN024D6O_at; Start 140; Stop 164
gatacgagaatgttcagttagcttt

SEQ ID NO: 145707 - DNA, 25 bp, Artificial
  probe
  misc_feature (1)..(25): SEQ ID NO: 2798; WAN024D6O_at; Start 52; Stop 76
gataatagaagtttgtggaatccag

SEQ ID NO: 145708 - DNA, 25 bp, Artificial
  probe
  misc_feature (1)..(25): SEQ ID NO: 2798; WAN024D6O_at; Start 134; Stop 158
aaaatggatacgagaatgttcagtt

SEQ ID NO: 145709 - DNA, 25 bp, Artificial
  probe
  misc_feature (1)..(25): SEQ ID NO: 2798; WAN024D6O_at; Start 35; Stop 59
tagtgtcattttggaaggataatag

SEQ ID NO: 145710 - DNA, 25 bp, Artificial
  probe
  misc_feature (1)..(25): SEQ ID NO: 2798; WAN024D6O_at; Start 210; Stop 234
tggcatctttttaatctataatggg

SEQ ID NO: 145711 - DNA, 25 bp, Artificial
  probe
  misc_feature (1)..(25): SEQ ID NO: 2798; WAN024D6O_at; Start 198; Stop 222
gctttttctaagtggcatcttttta

SEQ ID NO: 145712 - DNA, 25 bp, Artificial
  probe
  misc_feature (1)..(25): SEQ ID NO: 2798; WAN024D6O_at; Start 86; Stop 110
tattatccctcatttcaagttattt

SEQ ID NO: 145713 - DNA, 25 bp, Artificial
  probe
  misc_feature (1)..(25): SEQ ID NO: 1454; WAN024D6P_at; Start 34; Stop 58
ggtgtattcgcattgattctcattg

SEQ ID NO: 145714 - DNA, 25 bp, Artificial
  probe
  misc_feature (1)..(25): SEQ ID NO: 1454; WAN024D6P_at; Start 304; Stop 328
cgacttggacaaagtggtgatgtta

SEQ ID NO: 145715 - DNA, 25 bp, Artificial
  probe
  misc_feature (1)..(25): SEQ ID NO: 1454; WAN024D6P_at; Start 806; Stop 830
aagcatctgccattattgatgcacg

SEQ ID NO: 145716 - DNA, 25 bp, Artificial
  probe
  misc_feature (1)..(25): SEQ ID NO: 1454; WAN024D6P_at; Start 974; Stop 998
cacaaccaattgtcaacacaggaag

SEQ ID NO: 145717 - DNA, 25 bp, Artificial
  probe
  misc_feature (1)..(25): SEQ ID NO: 1454; WAN024D6P_at; Start 960; Stop 984
tggcaatcatgatgcacaaccaatt

SEQ ID NO: 145718 - DNA, 25 bp, Artificial
  probe
  misc_feature (1)..(25): SEQ ID NO: 1454; WAN024D6P_at; Start 495; Stop 519
gagagttgtcgataccgctaaggca

SEQ ID NO: 145719 - DNA, 25 bp, Artificial
  probe
  misc_feature (1)..(25): SEQ ID NO: 1454; WAN024D6P_at; Start 740; Stop 764
ttgaagcacgtatcacttacctagc

SEQ ID NO: 145720 - DNA, 25 bp, Artificial
  probe
  misc_feature (1)..(25): SEQ ID NO: 1454; WAN024D6P_at; Start 319; Stop 343
ggtgatgttagcacaaaatctcctt

SEQ ID NO: 145721 - DNA, 25 bp, Artificial
  probe
  misc_feature (1)..(25): SEQ ID NO: 1454; WAN024D6P_at; Start 164; Stop 188
ctcatgctggtttaaaagttgtcaa

SEQ ID NO: 145722 - DNA, 25 bp, Artificial
  probe
  misc_feature (1)..(25): SEQ ID NO: 1454; WAN024D6P_at; Start 791; Stop 815
tgcttcaacgccaacaagcatctgc

SEQ ID NO: 145723 - DNA, 25 bp, Artificial
  probe
  misc_feature (1)..(25): SEQ ID NO: 1454; WAN024D6P_at; Start 763; Stop 787
gcttatgctccagaaattgctgccg

SEQ ID NO: 145724 - DNA, 25 bp, Artificial
  probe
  misc_feature (1)..(25): SEQ ID NO: 1454; WAN024D6P_at; Start 259; Stop 283
tttgtcaatcccttcagcgtagcag

SEQ ID NO: 145725 - DNA, 25 bp, Artificial
  probe
  misc_feature (1)..(25): SEQ ID NO: 1454; WAN024D6P_at; Start 413; Stop 437
aagtcatgaccttgagcaattctcg

SEQ ID NO: 145726 - DNA, 25 bp, Artificial
  probe
  misc_feature (1)..(25): SEQ ID NO: 1454; WAN024D6P_at; Start 895; Stop 919
gaattggtagaacttgacgaagaac

SEQ ID NO: 145727 - DNA, 25 bp, Artificial
  probe
  misc_feature (1)..(25): SEQ ID NO: 1454; WAN024D6P_at; Start 114; Stop 138
catttttggaattattatcggacct

SEQ ID NO: 145728 - DNA, 25 bp, Artificial
  probe
  misc_feature (1)..(25): SEQ ID NO: 1454; WAN024D6P_at; Start 562; Stop 586
tgtgatagcgccctccgtaatattg

SEQ ID NO: 145729 - DNA, 25 bp, Artificial
  probe
  misc_feature (1)..(25): SEQ ID NO: 1454; WAN024D6P_at; Start 580; Stop 604
aatattgtccgcatctatccttacg

SEQ ID NO: 145730 - DNA, 25 bp, Artificial
  probe
  misc_feature (1)..(25): SEQ ID NO: 1454; WAN024D6P_at; Start 133; Stop 157
ggacctttactaatcgtaattgcag

SEQ ID NO: 145731 - DNA, 25 bp, Artificial
  probe
  misc_feature (1)..(25): SEQ ID NO: 1454; WAN024D6P_at; Start 272; Stop 296
tcagcgtagcagtcaaccctgcaaa

SEQ ID NO: 145732 - DNA, 25 bp, Artificial
  probe
  misc_feature (1)..(25): SEQ ID NO: 1454; WAN024D6P_at; Start 940; Stop 964
aatctccttgtcgttctttgtggca

SEQ ID NO: 145733 - DNA, 25 bp, Artificial
  probe
  misc_feature (1)..(25): SEQ ID NO: 1454; WAN024D6P_at; Start 446; Stop 470
tcaatgattgcttaggaaaccctgt

SEQ ID NO: 145734 - DNA, 25 bp, Artificial
  probe
  misc_feature (1)..(25): SEQ ID NO: 1454; WAN024D6P_at; Start 510; Stop 534
cgctaaggcagtcttcaacgttgat

SEQ ID NO: 145735 - DNA, 25 bp, Artificial
  probe
  misc_feature (1)..(25): SEQ ID NO: 1454; WAN024D6P_at; Start 659; Stop 683
tccgtggctctagcgaaattgttgc

SEQ ID NO: 145736 - DNA, 25 bp, Artificial
  probe
  misc_feature (1)..(25): SEQ ID NO: 1454; WAN024D6P_at; Start 599; Stop 623
cttacgatgtgtctcctaatgtgga

SEQ ID NO: 145737 - DNA, 25 bp, Artificial
  probe
  misc_feature (1)..(25): SEQ ID NO: 1454; WAN024D6P_at; Start 909; Stop 933
tgacgaagaacgaaaagctgccatg

SEQ ID NO: 145738 - DNA, 25 bp, Artificial
  probe
  misc_feature (1)..(25): SEQ ID NO: 1454; WAN024D6P_at; Start 14; Stop 38
taatcaattcaaaaccaaatggtgt

SEQ ID NO: 145739 - DNA, 25 bp, Artificial
  probe
  misc_feature (1)..(25): SEQ ID NO: 1454; WAN024D6P_at; Start 644; Stop 668
cagatgaaggtagtctccgtggctc

SEQ ID NO: 145740 - DNA, 25 bp, Artificial
  probe
  misc_feature (1)..(25): SEQ ID NO: 1454; WAN024D6P_at; Start 721; Stop 745
gatgctggcttggaaatccttgaag

SEQ ID NO: 145741 - DNA, 25 bp, Artificial
  probe
  misc_feature (1)..(25): SEQ ID NO: 1454; WAN024D6P_at; Start 850; Stop 874
gctgtaggaatggttgaaatggcac

SEQ ID NO: 145742 - DNA, 25 bp, Artificial
  probe
  misc_feature (1)..(25): SEQ ID NO: 1454; WAN024D6P_at; Start 865; Stop 889
gaaatggcactagaacggctcaatg

SEQ ID NO: 145743 - DNA, 25 bp, Artificial
  probe
  misc_feature (1)..(25): SEQ ID NO: 1454; WAN024D6P_at; Start 476; Stop 500
tcggtatcgcggtaacttggagagt

SEQ ID NO: 145744 - DNA, 25 bp, Artificial
  probe
  misc_feature (1)..(25): SEQ ID NO: 1454; WAN024D6P_at; Start 776; Stop 800
aaattgctgccgttatgcttcaacg

SEQ ID NO: 145745 - DNA, 25 bp, Artificial
  probe
  misc_feature (1)..(25): SEQ ID NO: 1454; WAN024D6P_at; Start 199; Stop 223
gctctggttctgacactctttggta

SEQ ID NO: 145746 - DNA, 25 bp, Artificial
  probe
  misc_feature (1)..(25): SEQ ID NO: 1454; WAN024D6P_at; Start 461; Stop 485
gaaaccctgtagaaatcggtatcgc

SEQ ID NO: 145747 - DNA, 25 bp, Artificial
  probe
  misc_feature (1)..(25): SEQ ID NO: 2118; WAN024D6Q_at; Start 799; Stop 823
gaacgtggcttttcaggatacaatg

SEQ ID NO: 145748 - DNA, 25 bp, Artificial
  probe
  misc_feature (1)..(25): SEQ ID NO: 2118; WAN024D6Q_at; Start 221; Stop 245
tctatggagagagggaagccaagtc

SEQ ID NO: 145749 - DNA, 25 bp, Artificial
  probe
  misc_feature (1)..(25): SEQ ID NO: 2118; WAN024D6Q_at; Start 23; Stop 47
ttctagcctatctgcgctcccgtag

SEQ ID NO: 145750 - DNA, 25 bp, Artificial
  probe
  misc_feature (1)..(25): SEQ ID NO: 2118; WAN024D6Q_at; Start 353; Stop 377
ccttgtgggtccatcagataaagac

SEQ ID NO: 145751 - DNA, 25 bp, Artificial
  probe
  misc_feature (1)..(25): SEQ ID NO: 2118; WAN024D6Q_at; Start 592; Stop 616
caaaaaggcttaaatgtcaatctac

SEQ ID NO: 145752 - DNA, 25 bp, Artificial
  probe
  misc_feature (1)..(25): SEQ ID NO: 2118; WAN024D6Q_at; Start 474; Stop 498
caacctagttttacagtacctgcgt

SEQ ID NO: 145753 - DNA, 25 bp, Artificial
  probe
  misc_feature (1)..(25): SEQ ID NO: 2118; WAN024D6Q_at; Start 400; Stop 424
ttagttgcagaagtggtcgaccgcc

SEQ ID NO: 145754 - DNA, 25 bp, Artificial
  probe
  misc_feature (1)..(25): SEQ ID NO: 2118; WAN024D6Q_at; Start 201; Stop 225
ggtctatcgccaggaacttctctat

SEQ ID NO: 145755 - DNA, 25 bp, Artificial
  probe
  misc_feature (1)..(25): SEQ ID NO: 2118; WAN024D6Q_at; Start 726; Stop 750
tatggatgaccaagagctttgtatc

SEQ ID NO: 145756 - DNA, 25 bp, Artificial
  probe
  misc_feature (1)..(25): SEQ ID NO: 2118; WAN024D6Q_at; Start 419; Stop 443
accgccaactgaagcagcagctaga

SEQ ID NO: 145757 - DNA, 25 bp, Artificial
  probe
  misc_feature (1)..(25): SEQ ID NO: 2118; WAN024D6Q_at; Start 457; Stop 481
aaaatcgactcctataccaacctag

SEQ ID NO: 145758 - DNA, 25 bp, Artificial
  probe
  misc_feature (1)..(25): SEQ ID NO: 2118; WAN024D6Q_at; Start 97; Stop 121
cagtttttatttgccagtctaggaa

SEQ ID NO: 145759 - DNA, 25 bp, Artificial
  probe
  misc_feature (1)..(25): SEQ ID NO: 2118; WAN024D6Q_at; Start 547; Stop 571
gacttggtcaaggaaataattcgta

SEQ ID NO: 145760 - DNA, 25 bp, Artificial
  probe
  misc_feature (1)..(25): SEQ ID NO: 2118; WAN024D6Q_at; Start 490; Stop 514
tacctgcgtttagaaagtttccatg

SEQ ID NO: 145761 - DNA, 25 bp, Artificial
  probe
  misc_feature (1)..(25): SEQ ID NO: 2118; WAN024D6Q_at; Start 701; Stop 725
ccaaggaaggtggtctggagattta

SEQ ID NO: 145762 - DNA, 25 bp, Artificial
  probe
  misc_feature (1)..(25): SEQ ID NO: 2118; WAN024D6Q_at; Start 381; Stop 405
cattgcagccagtcaactcttagtt

SEQ ID NO: 145763 - DNA, 25 bp, Artificial
  probe
  misc_feature (1)..(25): SEQ ID NO: 2118; WAN024D6Q_at; Start 830; Stop 854
tgacccagcagtcctctggacttgg

SEQ ID NO: 145764 - DNA, 25 bp, Artificial
  probe
  misc_feature (1)..(25): SEQ ID NO: 2118; WAN024D6Q_at; Start 296; Stop 320
tctatcagcagaggtcaaaagcaga

SEQ ID NO: 145765 - DNA, 25 bp, Artificial
  probe
  misc_feature (1)..(25): SEQ ID NO: 2118; WAN024D6Q_at; Start 432; Stop 456
gcagcagctagaacaggaaattttc

SEQ ID NO: 145766 - DNA, 25 bp, Artificial
  probe
  misc_feature (1)..(25): SEQ ID NO: 2118; WAN024D6Q_at; Start 687; Stop 711
cagtctcaagtacaccaaggaaggt

SEQ ID NO: 145767 - DNA, 25 bp, Artificial
  probe
  misc_feature (1)..(25): SEQ ID NO: 2118; WAN024D6Q_at; Start 815; Stop 839
gatacaatggccgtttgacccagca

SEQ ID NO: 145768 - DNA, 25 bp, Artificial
  probe
  misc_feature (1)..(25): SEQ ID NO: 2118; WAN024D6Q_at; Start 635; Stop 659
tcgtgacggataaaaagtggctgct

SEQ ID NO: 145769 - DNA, 25 bp, Artificial
  probe
  misc_feature (1)..(25): SEQ ID NO: 2118; WAN024D6Q_at; Start 525; Stop 549
cttaaagcaggttcaaattgaggac

SEQ ID NO: 145770 - DNA, 25 bp, Artificial
  probe
  misc_feature (1)..(25): SEQ ID NO: 2118; WAN024D6Q_at; Start 339; Stop 363
gctggattactataccttgtgggtc

SEQ ID NO: 145771 - DNA, 25 bp, Artificial
  probe
  misc_feature (1)..(25): SEQ ID NO: 2118; WAN024D6Q_at; Start 895; Stop 919
cagattcgtatcgagtctgaggtcg

SEQ ID NO: 145772 - DNA, 25 bp, Artificial
  probe
  misc_feature (1)..(25): SEQ ID NO: 2118; WAN024D6Q_at; Start 324; Stop 348
aaaactgacggatttgctggattac

SEQ ID NO: 145773 - DNA, 25 bp, Artificial
  probe
  misc_feature (1)..(25): SEQ ID NO: 2118; WAN024D6Q_at; Start 672; Stop 696
gcaaatcatctcaaacagtctcaag

SEQ ID NO: 145774 - DNA, 25 bp, Artificial
  probe
  misc_feature (1)..(25): SEQ ID NO: 2118; WAN024D6Q_at; Start 277; Stop 301
gaagcgcgtgagatggaactctatc

SEQ ID NO: 145775 - DNA, 25 bp, Artificial
  probe
  misc_feature (1)..(25): SEQ ID NO: 2118; WAN024D6Q_at; Start 244; Stop 268
tctcctttggaaatagctttagcag

SEQ ID NO: 145776 - DNA, 25 bp, Artificial
  probe
  misc_feature (1)..(25): SEQ ID NO: 2118; WAN024D6Q_at; Start 847; Stop 871
ggacttggcctttatctatctaaga

SEQ ID NO: 145777 - DNA, 25 bp, Artificial
  probe
  misc_feature (1)..(25): SEQ ID NO: 2118; WAN024D6Q_at; Start 618; Stop 642
tgaccttgataaagaaatcgtgacg

SEQ ID NO: 145778 - DNA, 25 bp, Artificial
  probe
  misc_feature (1)..(25): SEQ ID NO: 2118; WAN024D6Q_at; Start 262; Stop 286
ttagcagaaaaattagaagcgcgtg

SEQ ID NO: 145779 - DNA, 25 bp, Artificial
  probe
  misc_feature (1)..(25): SEQ ID NO: 2118; WAN024D6Q_at; Start 745; Stop 769
tgtatcaaagatacgggaatcggga

SEQ ID NO: 145780 - DNA, 25 bp, Artificial
  probe
  misc_feature (1)..(25): SEQ ID NO: 2118; WAN024D6Q_at; Start 930; Stop 954
gacagtgcggattcagtttgctcaa

SEQ ID NO: 145781 - DNA, 25 bp, Artificial
  probe
  misc_feature (1)..(25): SEQ ID NO: 1132; WAN024D6R_at; Start 14; Stop 38
cacgttgcgacgtcctttcgaggat

SEQ ID NO: 145782 - DNA, 25 bp, Artificial
  probe
  misc_feature (1)..(25): SEQ ID NO: 1132; WAN024D6R_at; Start 272; Stop 296
cagaaaatatctggtggctattaga

SEQ ID NO: 145783 - DNA, 25 bp, Artificial
  probe
  misc_feature (1)..(25): SEQ ID NO: 1132; WAN024D6R_at; Start 26; Stop 50
tcctttcgaggatgtcgcatttttt

SEQ ID NO: 145784 - DNA, 25 bp, Artificial
  probe
  misc_feature (1)..(25): SEQ ID NO: 1132; WAN024D6R_at; Start 304; Stop 328
caacgtttggatatagacattctga

SEQ ID NO: 145785 - DNA, 25 bp, Artificial
  probe
  misc_feature (1)..(25): SEQ ID NO: 1132; WAN024D6R_at; Start 97; Stop 121
tgggcaatccgacaagcttatcacg

SEQ ID NO: 145786 - DNA, 25 bp, Artificial
  probe
  misc_feature (1)..(25): SEQ ID NO: 1132; WAN024D6R_at; Start 99; Stop 123
ggcaatccgacaagcttatcacgaa

SEQ ID NO: 145787 - DNA, 25 bp, Artificial
  probe
  misc_feature (1)..(25): SEQ ID NO: 1132; WAN024D6R_at; Start 171; Stop 195
cttggctttatctaatgatattgga

SEQ ID NO: 145788 - DNA, 25 bp, Artificial
  probe
  misc_feature (1)..(25): SEQ ID NO: 1132; WAN024D6R_at; Start 250; Stop 274
tacacactggaacaaaaactttcag

SEQ ID NO: 145789 - DNA, 25 bp, Artificial
  probe
  misc_feature (1)..(25): SEQ ID NO: 1132; WAN024D6R_at; Start 223; Stop 247
caaggacgctactatgatgaaacac

SEQ ID NO: 145790 - DNA, 25 bp, Artificial
  probe
  misc_feature (1)..(25): SEQ ID NO: 1132; WAN024D6R_at; Start 324; Stop 348
tctgacggaaatggaaaacttcctc

SEQ ID NO: 145791 - DNA, 25 bp, Artificial
  probe
  misc_feature (1)..(25): SEQ ID NO: 1132; WAN024D6R_at; Start 10; Stop 34
gaaccacgttgcgacgtcctttcga

SEQ ID NO: 145792 - DNA, 25 bp, Artificial
  probe
  misc_feature (1)..(25): SEQ ID NO: 1132; WAN024D6R_at; Start 121; Stop 145
gaactggaagttaagcatcatgatt

SEQ ID NO: 145793 - DNA, 25 bp, Artificial
  probe
  misc_feature (1)..(25): SEQ ID NO: 1132; WAN024D6R_at; Start 321; Stop 345
cattctgacggaaatggaaaacttc

SEQ ID NO: 145794 - DNA, 25 bp, Artificial
  probe
  misc_feature (1)..(25): SEQ ID NO: 1132; WAN024D6R_at; Start 115; Stop 139
tatcacgaactggaagttaagcatc

SEQ ID NO: 145795 - DNA, 25 bp, Artificial
  probe
  misc_feature (1)..(25): SEQ ID NO: 1132; WAN024D6R_at; Start 295; Stop 319
gaactttctcaacgtttggatatag

SEQ ID NO: 145796 - DNA, 25 bp, Artificial
  probe
  misc_feature (1)..(25): SEQ ID NO: 1132; WAN024D6R_at; Start 105; Stop 129
ccgacaagcttatcacgaactggaa

SEQ ID NO: 145797 - DNA, 25 bp, Artificial
  probe
  misc_feature (1)..(25): SEQ ID NO: 1132; WAN024D6R_at; Start 22; Stop 46
gacgtcctttcgaggatgtcgcatt

SEQ ID NO: 145798 - DNA, 25 bp, Artificial
  probe
  misc_feature (1)..(25): SEQ ID NO: 1132; WAN024D6R_at; Start 238; Stop 262
gatgaaacaccctacacactggaac

SEQ ID NO: 145799 - DNA, 25 bp, Artificial
  probe
  misc_feature (1)..(25): SEQ ID NO: 1132; WAN024D6R_at; Start 284; Stop 308
ggtggctattagaactttctcaacg

SEQ ID NO: 145800 - DNA, 25 bp, Artificial
  probe
  misc_feature (1)..(25): SEQ ID NO: 1132; WAN024D6R_at; Start 235; Stop 259
tatgatgaaacaccctacacactgg

SEQ ID NO: 145801 - DNA, 25 bp, Artificial
  probe
  misc_feature (1)..(25): SEQ ID NO: 1132; WAN024D6R_at; Start 313; Stop 337
gatatagacattctgacggaaatgg

SEQ ID NO: 145802 - DNA, 25 bp, Artificial
  probe
  misc_feature (1)..(25): SEQ ID NO: 1132; WAN024D6R_at; Start 92; Stop 116
gcagttgggcaatccgacaagctta

SEQ ID NO: 145803 - DNA, 25 bp, Artificial
  probe
  misc_feature (1)..(25): SEQ ID NO: 1132; WAN024D6R_at; Start 86; Stop 110
tggagcgcagttgggcaatccgaca

SEQ ID NO: 145804 - DNA, 25 bp, Artificial
  probe
  misc_feature (1)..(25): SEQ ID NO: 1132; WAN024D6R_at; Start 265; Stop 289
aaactttcagaaaatatctggtggc

SEQ ID NO: 145805 - DNA, 25 bp, Artificial
  probe
  misc_feature (1)..(25): SEQ ID NO: 1132; WAN024D6R_at; Start 281; Stop 305
tctggtggctattagaactttctca

SEQ ID NO: 145806 - DNA, 25 bp, Artificial
  probe
  misc_feature (1)..(25): SEQ ID NO: 1132; WAN024D6R_at; Start 82; Stop 106
ttagtggagcgcagttgggcaatcc

SEQ ID NO: 145807 - DNA, 25 bp, Artificial
  probe
  misc_feature (1)..(25): SEQ ID NO: 1132; WAN024D6R_at; Start 109; Stop 133
caagcttatcacgaactggaagtta

SEQ ID NO: 145808 - DNA, 25 bp, Artificial
  probe
  misc_feature (1)..(25): SEQ ID NO: 1132; WAN024D6R_at; Start 54; Stop 78
taggatactaattatggagttgcaa

SEQ ID NO: 145809 - DNA, 25 bp, Artificial
  probe
  misc_feature (1)..(25): SEQ ID NO: 1132; WAN024D6R_at; Start 65; Stop 89
ttatggagttgcaagaattagtgga

SEQ ID NO: 145810 - DNA, 25 bp, Artificial
  probe
  misc_feature (1)..(25): SEQ ID NO: 1132; WAN024D6R_at; Start 3; Stop 27
gaaggtggaaccacgttgcgacgtc

SEQ ID NO: 145811 - DNA, 25 bp, Artificial
  probe
  misc_feature (1)..(25): SEQ ID NO: 1132; WAN024D6R_at; Start 241; Stop 265
gaaacaccctacacactggaacaaa

SEQ ID NO: 145812 - DNA, 25 bp, Artificial
  probe
  misc_feature (1)..(25): SEQ ID NO: 1132; WAN024D6R_at; Start 227; Stop 251
gacgctactatgatgaaacacccta

SEQ ID NO: 145813 - DNA, 25 bp, Artificial
  probe
  misc_feature (1)..(25): SEQ ID NO: 1132; WAN024D6R_at; Start 330; Stop 354
ggaaatggaaaacttcctctctgat

SEQ ID NO: 145814 - DNA, 25 bp, Artificial
  probe
  misc_feature (1)..(25): SEQ ID NO: 1132; WAN024D6R_at; Start 179; Stop 203
tatctaatgatattggaaatttcca

SEQ ID NO: 145815 - DNA, 25 bp, Artificial
  probe
  misc_feature (1)..(25): SEQ ID NO: 4022; WAN024D6S_at; Start 76; Stop 100
gagttgttcttactagttgtttctg

SEQ ID NO: 145816 - DNA, 25 bp, Artificial
  probe
  misc_feature (1)..(25): SEQ ID NO: 4022; WAN024D6S_at; Start 64; Stop 88
tggccactttatgagttgttcttac

SEQ ID NO: 145817 - DNA, 25 bp, Artificial
  probe
  misc_feature (1)..(25): SEQ ID NO: 4022; WAN024D6S_at; Start 6; Stop 30
tatcatgcgtagattctattcccat

SEQ ID NO: 145818 - DNA, 25 bp, Artificial
  probe
  misc_feature (1)..(25): SEQ ID NO: 4022; WAN024D6S_at; Start 179; Stop 203
tctatagctaccgtttccgtttctc

SEQ ID NO: 145819 - DNA, 25 bp, Artificial
  probe
  misc_feature (1)..(25): SEQ ID NO: 4022; WAN024D6S_at; Start 173; Stop 197
cgttactctatagctaccgtttccg

SEQ ID NO: 145820 - DNA, 25 bp, Artificial
  probe
  misc_feature (1)..(25): SEQ ID NO: 4022; WAN024D6S_at; Start 66; Stop 90
gccactttatgagttgttcttacta

SEQ ID NO: 145821 - DNA, 25 bp, Artificial
  probe
  misc_feature (1)..(25): SEQ ID NO: 4022; WAN024D6S_at; Start 144; Stop 168
ctttacacctctggtaatcttgatt

SEQ ID NO: 145822 - DNA, 25 bp, Artificial
  probe
  misc_feature (1)..(25): SEQ ID NO: 4022; WAN024D6S_at; Start 33; Stop 57
cccctactatctggtcatattattc

SEQ ID NO: 145823 - DNA, 25 bp, Artificial
  probe
  misc_feature (1)..(25): SEQ ID NO: 4022; WAN024D6S_at; Start 141; Stop 165
cttctttacacctctggtaatcttg

SEQ ID NO: 145824 - DNA, 25 bp, Artificial
  probe
  misc_feature (1)..(25): SEQ ID NO: 4022; WAN024D6S_at; Start 3; Stop 27
gattatcatgcgtagattctattcc

SEQ ID NO: 145825 - DNA, 25 bp, Artificial
  probe
  misc_feature (1)..(25): SEQ ID NO: 4022; WAN024D6S_at; Start 138; Stop 162
tctcttctttacacctctggtaatc

SEQ ID NO: 145826 - DNA, 25 bp, Artificial
  probe
  misc_feature (1)..(25): SEQ ID NO: 4022; WAN024D6S_at; Start 28; Stop 52
catctcccctactatctggtcatat

SEQ ID NO: 145827 - DNA, 25 bp, Artificial
  probe
  misc_feature (1)..(25): SEQ ID NO: 4022; WAN024D6S_at; Start 170; Stop 194
tatcgttactctatagctaccgttt

SEQ ID NO: 145828 - DNA, 25 bp, Artificial
  probe
  misc_feature (1)..(25): SEQ ID NO: 4022; WAN024D6S_at; Start 9; Stop 33
catgcgtagattctattcccatctc

SEQ ID NO: 145829 - DNA, 25 bp, Artificial
  probe
  misc_feature (1)..(25): SEQ ID NO: 4022; WAN024D6S_at; Start 60; Stop 84
ttattggccactttatgagttgttc

SEQ ID NO: 145830 - DNA, 25 bp, Artificial
  probe
  misc_feature (1)..(25): SEQ ID NO: 4022; WAN024D6S_at; Start 80; Stop 104
tgttcttactagttgtttctgaccc

SEQ ID NO: 145831 - DNA, 25 bp, Artificial
  probe
  misc_feature (1)..(25): SEQ ID NO: 4022; WAN024D6S_at; Start 57; Stop 81
cttttattggccactttatgagttg

SEQ ID NO: 145832 - DNA, 25 bp, Artificial
  probe
  misc_feature (1)..(25): SEQ ID NO: 4022; WAN024D6S_at; Start 172; Stop 196
tcgttactctatagctaccgtttcc

SEQ ID NO: 145833 - DNA, 25 bp, Artificial
  probe
  misc_feature (1)..(25): SEQ ID NO: 4022; WAN024D6S_at; Start 93; Stop 117
tgtttctgacccccttacactcaag

SEQ ID NO: 145834 - DNA, 25 bp, Artificial
  probe
  misc_feature (1)..(25): SEQ ID NO: 4022; WAN024D6S_at; Start 68; Stop 92
cactttatgagttgttcttactagt

SEQ ID NO: 145835 - DNA, 25 bp, Artificial
  probe
  misc_feature (1)..(25): SEQ ID NO: 4022; WAN024D6S_at; Start 120; Stop 144
actctatataaacaatcttctcttc

SEQ ID NO: 145836 - DNA, 25 bp, Artificial
  probe
  misc_feature (1)..(25): SEQ ID NO: 4022; WAN024D6S_at; Start 181; Stop 205
tatagctaccgtttccgtttctcac

SEQ ID NO: 145837 - DNA, 25 bp, Artificial
  probe
  misc_feature (1)..(25): SEQ ID NO: 4022; WAN024D6S_at; Start 53; Stop 77
tattcttttattggccactttatga

SEQ ID NO: 145838 - DNA, 25 bp, Artificial
  probe
  misc_feature (1)..(25): SEQ ID NO: 4022; WAN024D6S_at; Start 133; Stop 157
aatcttctcttctttacacctctgg

SEQ ID NO: 145839 - DNA, 25 bp, Artificial
  probe
  misc_feature (1)..(25): SEQ ID NO: 4022; WAN024D6S_at; Start 135; Stop 159
tcttctcttctttacacctctggta

SEQ ID NO: 145840 - DNA, 25 bp, Artificial
  probe
  misc_feature (1)..(25): SEQ ID NO: 4022; WAN024D6S_at; Start 45; Stop 69
ggtcatattattcttttattggcca

SEQ ID NO: 145841 - DNA, 25 bp, Artificial
  probe
  misc_feature (1)..(25): SEQ ID NO: 4022; WAN024D6S_at; Start 14; Stop 38
gtagattctattcccatctccccta

SEQ ID NO: 145842 - DNA, 25 bp, Artificial
  probe
  misc_feature (1)..(25): SEQ ID NO: 4022; WAN024D6S_at; Start 11; Stop 35
tgcgtagattctattcccatctccc

SEQ ID NO: 145843 - DNA, 25 bp, Artificial
  probe
  misc_feature (1)..(25): SEQ ID NO: 4022; WAN024D6S_at; Start 35; Stop 59
cctactatctggtcatattattctt

SEQ ID NO: 145844 - DNA, 25 bp, Artificial
  probe
  misc_feature (1)..(25): SEQ ID NO: 4022; WAN024D6S_at; Start 30; Stop 54
tctcccctactatctggtcatatta

SEQ ID NO: 145845 - DNA, 25 bp, Artificial
  probe
  misc_feature (1)..(25): SEQ ID NO: 4022; WAN024D6S_at; Start 182; Stop 206
atagctaccgtttccgtttctcact

SEQ ID NO: 145846 - DNA, 25 bp, Artificial
  probe
  misc_feature (1)..(25): SEQ ID NO: 4022; WAN024D6S_at; Start 48; Stop 72
catattattcttttattggccactt

SEQ ID NO: 145847 - DNA, 25 bp, Artificial
  probe
  misc_feature (1)..(25): SEQ ID NO: 4022; WAN024D6S_at; Start 61; Stop 85
tattggccactttatgagttgttct

SEQ ID NO: 145848 - DNA, 25 bp, Artificial
  probe
  misc_feature (1)..(25): SEQ ID NO: 4022; WAN024D6S_at; Start 5; Stop 29
ttatcatgcgtagattctattccca

SEQ ID NO: 145849 - DNA, 25 bp, Artificial
  probe
  misc_feature (1)..(25): SEQ ID NO: 858; WAN024D6T_at; Start 183; Stop 207
tatttcagcgtttggtgcttataca

SEQ ID NO: 145850 - DNA, 25 bp, Artificial
  probe
  misc_feature (1)..(25): SEQ ID NO: 858; WAN024D6T_at; Start 397; Stop 421
gaattggatcttcttcgtacaaaaa

SEQ ID NO: 145851 - DNA, 25 bp, Artificial
  probe
  misc_feature (1)..(25): SEQ ID NO: 858; WAN024D6T_at; Start 536; Stop 560
gccagattagttatgcagattatgc

SEQ ID NO: 145852 - DNA, 25 bp, Artificial
  probe
  misc_feature (1)..(25): SEQ ID NO: 858; WAN024D6T_at; Start 264; Stop 288
tggaacacagacacgttttctagtt

SEQ ID NO: 145853 - DNA, 25 bp, Artificial
  probe
  misc_feature (1)..(25): SEQ ID NO: 858; WAN024D6T_at; Start 448; Stop 472
cctgctgtagattttattcccgatg

SEQ ID NO: 145854 - DNA, 25 bp, Artificial
  probe
  misc_feature (1)..(25): SEQ ID NO: 858; WAN024D6T_at; Start 63; Stop 87
caaacgaggacatgaagtaacggct

SEQ ID NO: 145855 - DNA, 25 bp, Artificial
  probe
  misc_feature (1)..(25): SEQ ID NO: 858; WAN024D6T_at; Start 168; Stop 192
tggatttgatgctgttatttcagcg

SEQ ID NO: 145856 - DNA, 25 bp, Artificial
  probe
  misc_feature (1)..(25): SEQ ID NO: 858; WAN024D6T_at; Start 157; Stop 181
gatgatcttactggatttgatgctg

SEQ ID NO: 145857 - DNA, 25 bp, Artificial
  probe
  misc_feature (1)..(25): SEQ ID NO: 858; WAN024D6T_at; Start 10; Stop 34
gcagttattgcagcaaatggacaag

SEQ ID NO: 145858 - DNA, 25 bp, Artificial
  probe
  misc_feature (1)..(25): SEQ ID NO: 858; WAN024D6T_at; Start 71; Stop 95
gacatgaagtaacggctattgttcg

SEQ ID NO: 145859 - DNA, 25 bp, Artificial
  probe
  misc_feature (1)..(25): SEQ ID NO: 858; WAN024D6T_at; Start 434; Stop 458
ggacttttgtcagtcctgctgtaga

SEQ ID NO: 145860 - DNA, 25 bp, Artificial
  probe
  misc_feature (1)..(25): SEQ ID NO: 858; WAN024D6T_at; Start 241; Stop 265
gaactatttaatcagcttcttgctg

SEQ ID NO: 145861 - DNA, 25 bp, Artificial
  probe
  misc_feature (1)..(25): SEQ ID NO: 858; WAN024D6T_at; Start 255; Stop 279
gcttcttgctggaacacagacacgt

SEQ ID NO: 145862 - DNA, 25 bp, Artificial
  probe
  misc_feature (1)..(25): SEQ ID NO: 858; WAN024D6T_at; Start 599; Stop 623
taaaagaacgtatctctttacttga

SEQ ID NO: 145863 - DNA, 25 bp, Artificial
  probe
  misc_feature (1)..(25): SEQ ID NO: 858; WAN024D6T_at; Start 549; Stop 573
tgcagattatgctattggattggta

SEQ ID NO: 145864 - DNA, 25 bp, Artificial
  probe
  misc_feature (1)..(25): SEQ ID NO: 858; WAN024D6T_at; Start 577; Stop 601
gaacttgaaaaaggtcatcatataa

SEQ ID NO: 145865 - DNA, 25 bp, Artificial
  probe
  misc_feature (1)..(25): SEQ ID NO: 858; WAN024D6T_at; Start 198; Stop 222
tgcttatacaccagatacgctaccg

SEQ ID NO: 145866 - DNA, 25 bp, Artificial
  probe
  misc_feature (1)..(25): SEQ ID NO: 858; WAN024D6T_at; Start 374; Stop 398
cactagcaaaagctcaagcggatga

SEQ ID NO: 145867 - DNA, 25 bp, Artificial
  probe
  misc_feature (1)..(25): SEQ ID NO: 858; WAN024D6T_at; Start 412; Stop 436
cgtacaaaaaataatctcaactgga

SEQ ID NO: 145868 - DNA, 25 bp, Artificial
  probe
  misc_feature (1)..(25): SEQ ID NO: 858; WAN024D6T_at; Start 462; Stop 486
tattcccgatggtgaaaaaacagga

SEQ ID NO: 145869 - DNA, 25 bp, Artificial
  probe
  misc_feature (1)..(25): SEQ ID NO: 858; WAN024D6T_at; Start 143; Stop 167
ttgagttgacaaaagatgatcttac

SEQ ID NO: 145870 - DNA, 25 bp, Artificial
  probe
  misc_feature (1)..(25): SEQ ID NO: 858; WAN024D6T_at; Start 469; Stop 493
gatggtgaaaaaacaggaaactaca

SEQ ID NO: 145871 - DNA, 25 bp, Artificial
  probe
  misc_feature (1)..(25): SEQ ID NO: 858; WAN024D6T_at; Start 492; Stop 516
cattctagcaggagaaatttttact

SEQ ID NO: 145872 - DNA, 25 bp, Artificial
  probe
  misc_feature (1)..(25): SEQ ID NO: 858; WAN024D6T_at; Start 83; Stop 107
cggctattgttcgttctgaaaacaa

SEQ ID NO: 145873 - DNA, 25 bp, Artificial
  probe
  misc_feature (1)..(25): SEQ ID NO: 858; WAN024D6T_at; Start 556; Stop 580
tatgctattggattggtagatgaac

SEQ ID NO: 145874 - DNA, 25 bp, Artificial
  probe
  misc_feature (1)..(25): SEQ ID NO: 858; WAN024D6T_at; Start 499; Stop 523
gcaggagaaatttttactactaatg

SEQ ID NO: 145875 - DNA, 25 bp, Artificial
  probe
  misc_feature (1)..(25): SEQ ID NO: 858; WAN024D6T_at; Start 482; Stop 506
caggaaactacattctagcaggaga

SEQ ID NO: 145876 - DNA, 25 bp, Artificial
  probe
  misc_feature (1)..(25): SEQ ID NO: 858; WAN024D6T_at; Start 385; Stop 409
gctcaagcggatgaattggatcttc

SEQ ID NO: 145877 - DNA, 25 bp, Artificial
  probe
  misc_feature (1)..(25): SEQ ID NO: 858; WAN024D6T_at; Start 569; Stop 593
tggtagatgaacttgaaaaaggtca

SEQ ID NO: 145878 - DNA, 25 bp, Artificial
  probe
  misc_feature (1)..(25): SEQ ID NO: 858; WAN024D6T_at; Start 201; Stop 225
ttatacaccagatacgctaccgctc

SEQ ID NO: 145879 - DNA, 25 bp, Artificial
  probe
  misc_feature (1)..(25): SEQ ID NO: 858; WAN024D6T_at; Start 3; Stop 27
gaaactagcagttattgcagcaaat

SEQ ID NO: 145880 - DNA, 25 bp, Artificial
  probe
  misc_feature (1)..(25): SEQ ID NO: 858; WAN024D6T_at; Start 589; Stop 613
ggtcatcatataaaagaacgtatct

SEQ ID NO: 145881 - DNA, 25 bp, Artificial
  probe
  misc_feature (1)..(25): SEQ ID NO: 858; WAN024D6T_at; Start 529; Stop 553
ggaataagccagattagttatgcag

SEQ ID NO: 145882 - DNA, 25 bp, Artificial
  probe
  misc_feature (1)..(25): SEQ ID NO: 858; WAN024D6T_at; Start 423; Stop 447
taatctcaactggacttttgtcagt

SEQ ID NO: 145883 - DNA, 25 bp, Artificial
  probe
  misc_feature (1)..(25): SEQ ID NO: 2409; WAN024D6U_at; Start 246; Stop 270
caactctctaggacttcgtcgctaa

SEQ ID NO: 145884 - DNA, 25 bp, Artificial
  probe
  misc_feature (1)..(25): SEQ ID NO: 2409; WAN024D6U_at; Start 164; Stop 188
gattgatgaaaaaaatcggtcgccg

SEQ ID NO: 145885 - DNA, 25 bp, Artificial
  probe
  misc_feature (1)..(25): SEQ ID NO: 2409; WAN024D6U_at; Start 179; Stop 203
tcggtcgccgtcgtaacttgcttgc

SEQ ID NO: 145886 - DNA, 25 bp, Artificial
  probe
  misc_feature (1)..(25): SEQ ID NO: 2409; WAN024D6U_at; Start 61; Stop 85
gatacaggttcagtagaggttcaag

SEQ ID NO: 145887 - DNA, 25 bp, Artificial
  probe
  misc_feature (1)..(25): SEQ ID NO: 2409; WAN024D6U_at; Start 54; Stop 78
cgaaggtgatacaggttcagtagag

SEQ ID NO: 145888 - DNA, 25 bp, Artificial
  probe
  misc_feature (1)..(25): SEQ ID NO: 2409; WAN024D6U_at; Start 243; Stop 267
gatcaactctctaggacttcgtcgc

SEQ ID NO: 145889 - DNA, 25 bp, Artificial
  probe
  misc_feature (1)..(25): SEQ ID NO: 2409; WAN024D6U_at; Start 40; Stop 64
caatatgcacgtcacgaaggtgata

SEQ ID NO: 145890 - DNA, 25 bp, Artificial
  probe
  misc_feature (1)..(25): SEQ ID NO: 2409; WAN024D6U_at; Start 145; Stop 169
gaccacgctacttaccgtggattga

SEQ ID NO: 145891 - DNA, 25 bp, Artificial
  probe
  misc_feature (1)..(25): SEQ ID NO: 2409; WAN024D6U_at; Start 65; Stop 89
caggttcagtagaggttcaagttgc

SEQ ID NO: 145892 - DNA, 25 bp, Artificial
  probe
  misc_feature (1)..(25): SEQ ID NO: 2409; WAN024D6U_at; Start 182; Stop 206
gtcgccgtcgtaacttgcttgcata

SEQ ID NO: 145893 - DNA, 25 bp, Artificial
  probe
  misc_feature (1)..(25): SEQ ID NO: 2409; WAN024D6U_at; Start 250; Stop 274
tctctaggacttcgtcgctaactaa

SEQ ID NO: 145894 - DNA, 25 bp, Artificial
  probe
  misc_feature (1)..(25): SEQ ID NO: 2409; WAN024D6U_at; Start 43; Stop 67
tatgcacgtcacgaaggtgatacag

SEQ ID NO: 145895 - DNA, 25 bp, Artificial
  probe
  misc_feature (1)..(25): SEQ ID NO: 2409; WAN024D6U_at; Start 37; Stop 61
gcacaatatgcacgtcacgaaggtg

SEQ ID NO: 145896 - DNA, 25 bp, Artificial
  probe
  misc_feature (1)..(25): SEQ ID NO: 2409; WAN024D6U_at; Start 228; Stop 252
ccgttaccgtgagttgatcaactct

SEQ ID NO: 145897 - DNA, 25 bp, Artificial
  probe
  misc_feature (1)..(25): SEQ ID NO: 2409; WAN024D6U_at; Start 142; Stop 166
aaagaccacgctacttaccgtggat

SEQ ID NO: 145898 - DNA, 25 bp, Artificial
  probe
  misc_feature (1)..(25): SEQ ID NO: 2409; WAN024D6U_at; Start 2; Stop 26
tggcaatctcaaaagagaaaaaaaa

SEQ ID NO: 145899 - DNA, 25 bp, Artificial
  probe
  misc_feature (1)..(25): SEQ ID NO: 2409; WAN024D6U_at; Start 225; Stop 249
taaccgttaccgtgagttgatcaac

SEQ ID NO: 145900 - DNA, 25 bp, Artificial
  probe
  misc_feature (1)..(25): SEQ ID NO: 2409; WAN024D6U_at; Start 82; Stop 106
caagttgctgtccttacttgggaaa

SEQ ID NO: 145901 - DNA, 25 bp, Artificial
  probe
  misc_feature (1)..(25): SEQ ID NO: 2409; WAN024D6U_at; Start 74; Stop 98
tagaggttcaagttgctgtccttac

SEQ ID NO: 145902 - DNA, 25 bp, Artificial
  probe
  misc_feature (1)..(25): SEQ ID NO: 2409; WAN024D6U_at; Start 176; Stop 200
aaatcggtcgccgtcgtaacttgct

SEQ ID NO: 145903 - DNA, 25 bp, Artificial
  probe
  misc_feature (1)..(25): SEQ ID NO: 2409; WAN024D6U_at; Start 86; Stop 110
ttgctgtccttacttgggaaatcaa

SEQ ID NO: 145904 - DNA, 25 bp, Artificial
  probe
  misc_feature (1)..(25): SEQ ID NO: 2409; WAN024D6U_at; Start 153; Stop 177
tacttaccgtggattgatgaaaaaa

SEQ ID NO: 145905 - DNA, 25 bp, Artificial
  probe
  misc_feature (1)..(25): SEQ ID NO: 2409; WAN024D6U_at; Start 112; Stop 136
caccttaacgaacacatcaaacaac

SEQ ID NO: 145906 - DNA, 25 bp, Artificial
  probe
  misc_feature (1)..(25): SEQ ID NO: 2409; WAN024D6U_at; Start 58; Stop 82
ggtgatacaggttcagtagaggttc

SEQ ID NO: 145907 - DNA, 25 bp, Artificial
  probe
  misc_feature (1)..(25): SEQ ID NO: 2409; WAN024D6U_at; Start 51; Stop 75
tcacgaaggtgatacaggttcagta

SEQ ID NO: 145908 - DNA, 25 bp, Artificial
  probe
  misc_feature (1)..(25): SEQ ID NO: 2409; WAN024D6U_at; Start 184; Stop 208
cgccgtcgtaacttgcttgcatact

SEQ ID NO: 145909 - DNA, 25 bp, Artificial
  probe
  misc_feature (1)..(25): SEQ ID NO: 2409; WAN024D6U_at; Start 150; Stop 174
cgctacttaccgtggattgatgaaa

SEQ ID NO: 145910 - DNA, 25 bp, Artificial
  probe
  misc_feature (1)..(25): SEQ ID NO: 2409; WAN024D6U_at; Start 188; Stop 212
gtcgtaacttgcttgcatacttgcg

SEQ ID NO: 145911 - DNA, 25 bp, Artificial
  probe
  misc_feature (1)..(25): SEQ ID NO: 2409; WAN024D6U_at; Start 239; Stop 263
agttgatcaactctctaggacttcg

SEQ ID NO: 145912 - DNA, 25 bp, Artificial
  probe
  misc_feature (1)..(25): SEQ ID NO: 2409; WAN024D6U_at; Start 70; Stop 94
tcagtagaggttcaagttgctgtcc

SEQ ID NO: 145913 - DNA, 25 bp, Artificial
  probe
  misc_feature (1)..(25): SEQ ID NO: 2409; WAN024D6U_at; Start 202; Stop 226
gcatacttgcgtaaaaacgacgtta

SEQ ID NO: 145914 - DNA, 25 bp, Artificial
  probe
  misc_feature (1)..(25): SEQ ID NO: 2409; WAN024D6U_at; Start 47; Stop 71
cacgtcacgaaggtgatacaggttc

SEQ ID NO: 145915 - DNA, 25 bp, Artificial
  probe
  misc_feature (1)..(25): SEQ ID NO: 2409; WAN024D6U_at; Start 191; Stop 215
gtaacttgcttgcatacttgcgtaa

SEQ ID NO: 145916 - DNA, 25 bp, Artificial
  probe
  misc_feature (1)..(25): SEQ ID NO: 2409; WAN024D6U_at; Start 198; Stop 222
gcttgcatacttgcgtaaaaacgac

SEQ ID NO: 145917 - DNA, 25 bp, Artificial
  probe
  misc_feature (1)..(25): SEQ ID NO: 3015; WAN024D6V_at; Start 342; Stop 366
tcagatgctaggaatcgaggagacg

SEQ ID NO: 145918 - DNA, 25 bp, Artificial
  probe
  misc_feature (1)..(25): SEQ ID NO: 3015; WAN024D6V_at; Start 357; Stop 381
cgaggagacgacttatctgcaggaa

SEQ ID NO: 145919 - DNA, 25 bp, Artificial
  probe
  misc_feature (1)..(25): SEQ ID NO: 3015; WAN024D6V_at; Start 81; Stop 105
gcaaattggcactttagacaagggt

SEQ ID NO: 145920 - DNA, 25 bp, Artificial
  probe
  misc_feature (1)..(25): SEQ ID NO: 3015; WAN024D6V_at; Start 122; Stop 146
ttgccctcgatattcgtgaagagac

SEQ ID NO: 145921 - DNA, 25 bp, Artificial
  probe
  misc_feature (1)..(25): SEQ ID NO: 3015; WAN024D6V_at; Start 553; Stop 577
gggcagtctttctataaggatgctt

SEQ ID NO: 145922 - DNA, 25 bp, Artificial
  probe
  misc_feature (1)..(25): SEQ ID NO: 3015; WAN024D6V_at; Start 563; Stop 587
tctataaggatgctttggcaaaggg

SEQ ID NO: 145923 - DNA, 25 bp, Artificial
  probe
  misc_feature (1)..(25): SEQ ID NO: 3015; WAN024D6V_at; Start 480; Stop 504
ccttcgaatggtgcattatcaagag

SEQ ID NO: 145924 - DNA, 25 bp, Artificial
  probe
  misc_feature (1)..(25): SEQ ID NO: 3015; WAN024D6V_at; Start 2; Stop 26
tgttagcaagtgaagtgatccaagc

SEQ ID NO: 145925 - DNA, 25 bp, Artificial
  probe
  misc_feature (1)..(25): SEQ ID NO: 3015; WAN024D6V_at; Start 372; Stop 396
tctgcaggaaacaggtccagaacgt

SEQ ID NO: 145926 - DNA, 25 bp, Artificial
  probe
  misc_feature (1)..(25): SEQ ID NO: 3015; WAN024D6V_at; Start 404; Stop 428
gacgtattgggaatattcagcctca

SEQ ID NO: 145927 - DNA, 25 bp, Artificial
  probe
  misc_feature (1)..(25): SEQ ID NO: 3015; WAN024D6V_at; Start 387; Stop 411
tccagaacgtggaattggacgtatt

SEQ ID NO: 145928 - DNA, 25 bp, Artificial
  probe
  misc_feature (1)..(25): SEQ ID NO: 3015; WAN024D6V_at; Start 616; Stop 640
tactaccatactgctcaggatatgc

SEQ ID NO: 145929 - DNA, 25 bp, Artificial
  probe
  misc_feature (1)..(25): SEQ ID NO: 3015; WAN024D6V_at; Start 309; Stop 333
tatcgttgaaaatgggctcaatgac

SEQ ID NO: 145930 - DNA, 25 bp, Artificial
  probe
  misc_feature (1)..(25): SEQ ID NO: 3015; WAN024D6V_at; Start 327; Stop 351
caatgactggttttgtcagatgcta

SEQ ID NO: 145931 - DNA, 25 bp, Artificial
  probe
  misc_feature (1)..(25): SEQ ID NO: 3015; WAN024D6V_at; Start 443; Stop 467
tggcccaacaggtcaagcaagtctt

SEQ ID NO: 145932 - DNA, 25 bp, Artificial
  probe
  misc_feature (1)..(25): SEQ ID NO: 3015; WAN024D6V_at; Start 178; Stop 202
ttgattatcgtcaagcacgcgccta

SEQ ID NO: 145933 - DNA, 25 bp, Artificial
  probe
  misc_feature (1)..(25): SEQ ID NO: 3015; WAN024D6V_at; Start 527; Stop 551
caagagtagcaatttgtggtggaag

SEQ ID NO: 145934 - DNA, 25 bp, Artificial
  probe
  misc_feature (1)..(25): SEQ ID NO: 3015; WAN024D6V_at; Start 247; Stop 271
cagatttacatcgacctgattaagc

SEQ ID NO: 145935 - DNA, 25 bp, Artificial
  probe
  misc_feature (1)..(25): SEQ ID NO: 3015; WAN024D6V_at; Start 471; Stop 495
cctagatagccttcgaatggtgcat

SEQ ID NO: 145936 - DNA, 25 bp, Artificial
  probe
  misc_feature (1)..(25): SEQ ID NO: 3015; WAN024D6V_at; Start 417; Stop 441
tattcagcctcagacattttgggaa

SEQ ID NO: 145937 - DNA, 25 bp, Artificial
  probe
  misc_feature (1)..(25): SEQ ID NO: 3015; WAN024D6V_at; Start 427; Stop 451
cagacattttgggaattggcccaac

SEQ ID NO: 145938 - DNA, 25 bp, Artificial
  probe
  misc_feature (1)..(25): SEQ ID NO: 3015; WAN024D6V_at; Start 13; Stop 37
gaagtgatccaagcttatgaagcct

SEQ ID NO: 145939 - DNA, 25 bp, Artificial
  probe
  misc_feature (1)..(25): SEQ ID NO: 3015; WAN024D6V_at; Start 587; Stop 611
gggcagatgtctatatcactggtga

SEQ ID NO: 145940 - DNA, 25 bp, Artificial
  probe
  misc_feature (1)..(25): SEQ ID NO: 3015; WAN024D6V_at; Start 196; Stop 220
gcgcctatctttcgtcctatcaagg

SEQ ID NO: 145941 - DNA, 25 bp, Artificial
  probe
  misc_feature (1)..(25): SEQ ID NO: 3015; WAN024D6V_at; Start 293; Stop 317
gccataccaatattgatatcgttga

SEQ ID NO: 145942 - DNA, 25 bp, Artificial
  probe
  misc_feature (1)..(25): SEQ ID NO: 3015; WAN024D6V_at; Start 229; Stop 253
gccagccgtccgcaaaatcagattt

SEQ ID NO: 145943 - DNA, 25 bp, Artificial
  probe
  misc_feature (1)..(25): SEQ ID NO: 3015; WAN024D6V_at; Start 45; Stop 69
tcaggaattttctatggagggagac

SEQ ID NO: 145944 - DNA, 25 bp, Artificial
  probe
  misc_feature (1)..(25): SEQ ID NO: 3015; WAN024D6V_at; Start 95; Stop 119
tagacaagggtatccaaagggtcat

SEQ ID NO: 145945 - DNA, 25 bp, Artificial
  probe
  misc_feature (1)..(25): SEQ ID NO: 3015; WAN024D6V_at; Start 512; Stop 536
tgcagaagcctatttcaagagtagc

SEQ ID NO: 145946 - DNA, 25 bp, Artificial
  probe
  misc_feature (1)..(25): SEQ ID NO: 3015; WAN024D6V_at; Start 109; Stop 133
caaagggtcatggttgccctcgata

SEQ ID NO: 145947 - DNA, 25 bp, Artificial
  probe
  misc_feature (1)..(25): SEQ ID NO: 3015; WAN024D6V_at; Start 213; Stop 237
tatcaaggacttgcttgccagccgt

SEQ ID NO: 145948 - DNA, 25 bp, Artificial
  probe
  misc_feature (1)..(25): SEQ ID NO: 3015; WAN024D6V_at; Start 278; Stop 302
tcgcagtttatgtcagccataccaa

SEQ ID NO: 145949 - DNA, 25 bp, Artificial
  probe
  misc_feature (1)..(25): SEQ ID NO: 3015; WAN024D6V_at; Start 28; Stop 52
tatgaagccttttgccctcaggaat

SEQ ID NO: 145950 - DNA, 25 bp, Artificial
  probe
  misc_feature (1)..(25): SEQ ID NO: 3015; WAN024D6V_at; Start 456; Stop 480
caagcaagtctttgacctagatagc

SEQ ID NO: 145951 - DNA, 25 bp, Artificial
  probe
  misc_feature (1)..(25): SEQ ID NO: 1015; WAN024D6W_at; Start 118; Stop 142
gaagaaggtcttgtcgctatcgatg

SEQ ID NO: 145952 - DNA, 25 bp, Artificial
  probe
  misc_feature (1)..(25): SEQ ID NO: 1015; WAN024D6W_at; Start 40; Stop 64
tatgtctacgaagacggtgccctac

SEQ ID NO: 145953 - DNA, 25 bp, Artificial
  probe
  misc_feature (1)..(25): SEQ ID NO: 1015; WAN024D6W_at; Start 37; Stop 61
gagtatgtctacgaagacggtgccc

SEQ ID NO: 145954 - DNA, 25 bp, Artificial
  probe
  misc_feature (1)..(25): SEQ ID NO: 1015; WAN024D6W_at; Start 240; Stop 264
gaaaaatatccgcatcgtagaaggc

SEQ ID NO: 145955 - DNA, 25 bp, Artificial
  probe
  misc_feature (1)..(25): SEQ ID NO: 1015; WAN024D6W_at; Start 103; Stop 127
gaagttgcagaagtagaagaaggtc

SEQ ID NO: 145956 - DNA, 25 bp, Artificial
  probe
  misc_feature (1)..(25): SEQ ID NO: 1015; WAN024D6W_at; Start 316; Stop 340
tcagagtttgtgaggaagatttaac

SEQ ID NO: 145957 - DNA, 25 bp, Artificial
  probe
  misc_feature (1)..(25): SEQ ID NO: 1015; WAN024D6W_at; Start 91; Stop 115
tggaatcctgctgaagttgcagaag

SEQ ID NO: 145958 - DNA, 25 bp, Artificial
  probe
  misc_feature (1)..(25): SEQ ID NO: 1015; WAN024D6W_at; Start 285; Stop 309
gattgatggttttggtgccatgaaa

SEQ ID NO: 145959 - DNA, 25 bp, Artificial
  probe
  misc_feature (1)..(25): SEQ ID NO: 1015; WAN024D6W_at; Start 229; Stop 253
gggacgcgcgtgaaaaatatccgca

SEQ ID NO: 145960 - DNA, 25 bp, Artificial
  probe
  misc_feature (1)..(25): SEQ ID NO: 1015; WAN024D6W_at; Start 135; Stop 159
tatcgatgccaacggaaataaattg

SEQ ID NO: 145961 - DNA, 25 bp, Artificial
  probe
  misc_feature (1)..(25): SEQ ID NO: 1015; WAN024D6W_at; Start 161; Stop 185
ctgatggtgatacagtaactctcat

SEQ ID NO: 145962 - DNA, 25 bp, Artificial
  probe
  misc_feature (1)..(25): SEQ ID NO: 1015; WAN024D6W_at; Start 268; Stop 292
cacaatatcgactgtaagattgatg

SEQ ID NO: 145963 - DNA, 25 bp, Artificial
  probe
  misc_feature (1)..(25): SEQ ID NO: 1015; WAN024D6W_at; Start 19; Stop 43
tgtccaaaatgtaactcagagtatg

SEQ ID NO: 145964 - DNA, 25 bp, Artificial
  probe
  misc_feature (1)..(25): SEQ ID NO: 1015; WAN024D6W_at; Start 200; Stop 224
taaaaggtgcgccaaaagatttgaa

SEQ ID NO: 145965 - DNA, 25 bp, Artificial
  probe
  misc_feature (1)..(25): SEQ ID NO: 1015; WAN024D6W_at; Start 242; Stop 266
aaaatatccgcatcgtagaaggcga

SEQ ID NO: 145966 - DNA, 25 bp, Artificial
  probe
  misc_feature (1)..(25): SEQ ID NO: 1015; WAN024D6W_at; Start 217; Stop 241
gatttgaaacaagggacgcgcgtga

SEQ ID NO: 145967 - DNA, 25 bp, Artificial
  probe
  misc_feature (1)..(25): SEQ ID NO: 1015; WAN024D6W_at; Start 279; Stop 303
ctgtaagattgatggttttggtgcc

SEQ ID NO: 145968 - DNA, 25 bp, Artificial
  probe
  misc_feature (1)..(25): SEQ ID NO: 1015; WAN024D6W_at; Start 79; Stop 103
tgtgctcatgagtggaatcctgctg

SEQ ID NO: 145969 - DNA, 25 bp, Artificial
  probe
  misc_feature (1)..(25): SEQ ID NO: 1015; WAN024D6W_at; Start 169; Stop 193
gatacagtaactctcatcaaggact

SEQ ID NO: 145970 - DNA, 25 bp, Artificial
  probe
  misc_feature (1)..(25): SEQ ID NO: 1015; WAN024D6W_at; Start 185; Stop 209
tcaaggacttgaaagtaaaaggtgc

SEQ ID NO: 145971 - DNA, 25 bp, Artificial
  probe
  misc_feature (1)..(25): SEQ ID NO: 1015; WAN024D6W_at; Start 110; Stop 134
cagaagtagaagaaggtcttgtcgc

SEQ ID NO: 145972 - DNA, 25 bp, Artificial
  probe
  misc_feature (1)..(25): SEQ ID NO: 1015; WAN024D6W_at; Start 212; Stop 236
caaaagatttgaaacaagggacgcg

SEQ ID NO: 145973 - DNA, 25 bp, Artificial
  probe
  misc_feature (1)..(25): SEQ ID NO: 1015; WAN024D6W_at; Start 310; Stop 334
cttaaatcagagtttgtgaggaaga

SEQ ID NO: 145974 - DNA, 25 bp, Artificial
  probe
  misc_feature (1)..(25): SEQ ID NO: 1015; WAN024D6W_at; Start 51; Stop 75
agacggtgccctactggtttgccca

SEQ ID NO: 145975 - DNA, 25 bp, Artificial
  probe
  misc_feature (1)..(25): SEQ ID NO: 1015; WAN024D6W_at; Start 297; Stop 321
tggtgccatgaaacttaaatcagag

SEQ ID NO: 145976 - DNA, 25 bp, Artificial
  probe
  misc_feature (1)..(25): SEQ ID NO: 1015; WAN024D6W_at; Start 129; Stop 153
tgtcgctatcgatgccaacggaaat

SEQ ID NO: 145977 - DNA, 25 bp, Artificial
  probe
  misc_feature (1)..(25): SEQ ID NO: 1015; WAN024D6W_at; Start 44; Stop 68
tctacgaagacggtgccctactggt

SEQ ID NO: 145978 - DNA, 25 bp, Artificial
  probe
  misc_feature (1)..(25): SEQ ID NO: 1015; WAN024D6W_at; Start 173; Stop 197
cagtaactctcatcaaggacttgaa

SEQ ID NO: 145979 - DNA, 25 bp, Artificial
  probe
  misc_feature (1)..(25): SEQ ID NO: 1015; WAN024D6W_at; Start 30; Stop 54
taactcagagtatgtctacgaagac

SEQ ID NO: 145980 - DNA, 25 bp, Artificial
  probe
  misc_feature (1)..(25): SEQ ID NO: 1015; WAN024D6W_at; Start 11; Stop 35
taccaaattgtccaaaatgtaactc

SEQ ID NO: 145981 - DNA, 25 bp, Artificial
  probe
  misc_feature (1)..(25): SEQ ID NO: 1015; WAN024D6W_at; Start 226; Stop 250
caagggacgcgcgtgaaaaatatcc

SEQ ID NO: 145982 - DNA, 25 bp, Artificial
  probe
  misc_feature (1)..(25): SEQ ID NO: 1015; WAN024D6W_at; Start 194; Stop 218
tgaaagtaaaaggtgcgccaaaaga

SEQ ID NO: 145983 - DNA, 25 bp, Artificial
  probe
  misc_feature (1)..(25): SEQ ID NO: 1015; WAN024D6W_at; Start 190; Stop 214
gacttgaaagtaaaaggtgcgccaa

SEQ ID NO: 145984 - DNA, 25 bp, Artificial
  probe
  misc_feature (1)..(25): SEQ ID NO: 1015; WAN024D6W_at; Start 122; Stop 146
aaggtcttgtcgctatcgatgccaa

SEQ ID NO: 145985 - DNA, 25 bp, Artificial
  probe
  misc_feature (1)..(25): SEQ ID NO: 1319; WAN024D6X_at; Start 381; Stop 405
cttaacaggtgtcttgacggatatc

SEQ ID NO: 145986 - DNA, 25 bp, Artificial
  probe
  misc_feature (1)..(25): SEQ ID NO: 1319; WAN024D6X_at; Start 433; Stop 457
tataatctaggatatgacatcgaga

SEQ ID NO: 145987 - DNA, 25 bp, Artificial
  probe
  misc_feature (1)..(25): SEQ ID NO: 1319; WAN024D6X_at; Start 200; Stop 224
tatttcctcctcataatctgattgg

SEQ ID NO: 145988 - DNA, 25 bp, Artificial
  probe
  misc_feature (1)..(25): SEQ ID NO: 1319; WAN024D6X_at; Start 104; Stop 128
gcaaggtaactcgattagcttttga

SEQ ID NO: 145989 - DNA, 25 bp, Artificial
  probe
  misc_feature (1)..(25): SEQ ID NO: 1319; WAN024D6X_at; Start 477; Stop 501
ttccatctggcctgaaaatcatcaa

SEQ ID NO: 145990 - DNA, 25 bp, Artificial
  probe
  misc_feature (1)..(25): SEQ ID NO: 1319; WAN024D6X_at; Start 462; Stop 486
taaaccagctgttgcttccatctgg

SEQ ID NO: 145991 - DNA, 25 bp, Artificial
  probe
  misc_feature (1)..(25): SEQ ID NO: 1319; WAN024D6X_at; Start 448; Stop 472
gacatcgagattgttaaaccagctg

SEQ ID NO: 145992 - DNA, 25 bp, Artificial
  probe
  misc_feature (1)..(25): SEQ ID NO: 1319; WAN024D6X_at; Start 174; Stop 198
cgattgtttccatccggaaagtaag

SEQ ID NO: 145993 - DNA, 25 bp, Artificial
  probe
  misc_feature (1)..(25): SEQ ID NO: 1319; WAN024D6X_at; Start 331; Stop 355
gggactgacctagatattcgtttga

SEQ ID NO: 145994 - DNA, 25 bp, Artificial
  probe
  misc_feature (1)..(25): SEQ ID NO: 1319; WAN024D6X_at; Start 227; Stop 251
cgagtggacggaatttatatggaga

SEQ ID NO: 145995 - DNA, 25 bp, Artificial
  probe
  misc_feature (1)..(25): SEQ ID NO: 1319; WAN024D6X_at; Start 365; Stop 389
gagtgtctaccgttatcttaacagg

SEQ ID NO: 145996 - DNA, 25 bp, Artificial
  probe
  misc_feature (1)..(25): SEQ ID NO: 1319; WAN024D6X_at; Start 121; Stop 145
gcttttgaacgaggagattatatct

SEQ ID NO: 145997 - DNA, 25 bp, Artificial
  probe
  misc_feature (1)..(25): SEQ ID NO: 1319; WAN024D6X_at; Start 396; Stop 420
gacggatatctgtgtcctacataca

SEQ ID NO: 145998 - DNA, 25 bp, Artificial
  probe
  misc_feature (1)..(25): SEQ ID NO: 1319; WAN024D6X_at; Start 527; Stop 551
cactcggagctaagttagtagatga

SEQ ID NO: 145999 - DNA, 25 bp, Artificial
  probe
  misc_feature (1)..(25): SEQ ID NO: 1319; WAN024D6X_at; Start 316; Stop 340
tactcagctttttcagggactgacc

SEQ ID NO: 146000 - DNA, 25 bp, Artificial
  probe
  misc_feature (1)..(25): SEQ ID NO: 1319; WAN024D6X_at; Start 421; Stop 445
gctatagatgcctataatctaggat

SEQ ID NO: 146001 - DNA, 25 bp, Artificial
  probe
  misc_feature (1)..(25): SEQ ID NO: 1319; WAN024D6X_at; Start 76; Stop 100
ccagctcaggcgatttcggatgcca

SEQ ID NO: 146002 - DNA, 25 bp, Artificial
  probe
  misc_feature (1)..(25): SEQ ID NO: 1319; WAN024D6X_at; Start 302; Stop 326
tggataaacgccattactcagcttt

SEQ ID NO: 146003 - DNA, 25 bp, Artificial
  probe
  misc_feature (1)..(25): SEQ ID NO: 1319; WAN024D6X_at; Start 34; Stop 58
gaagattttgttgctgatagtggga

SEQ ID NO: 146004 - DNA, 25 bp, Artificial
  probe
  misc_feature (1)..(25): SEQ ID NO: 1319; WAN024D6X_at; Start 514; Stop 538
catttcaaaaatacactcggagcta

SEQ ID NO: 146005 - DNA, 25 bp, Artificial
  probe
  misc_feature (1)..(25): SEQ ID NO: 1319; WAN024D6X_at; Start 211; Stop 235
cataatctgattgggacgagtggac

SEQ ID NO: 146006 - DNA, 25 bp, Artificial
  probe
  misc_feature (1)..(25): SEQ ID NO: 1319; WAN024D6X_at; Start 351; Stop 375
tttgagagagcgtagagtgtctacc

SEQ ID NO: 146007 - DNA, 25 bp, Artificial
  probe
  misc_feature (1)..(25): SEQ ID NO: 1319; WAN024D6X_at; Start 339; Stop 363
cctagatattcgtttgagagagcgt

SEQ ID NO: 146008 - DNA, 25 bp, Artificial
  probe
  misc_feature (1)..(25): SEQ ID NO: 1319; WAN024D6X_at; Start 270; Stop 294
agagcatggttcagacagtcgtgtc

SEQ ID NO: 146009 - DNA, 25 bp, Artificial
  probe
  misc_feature (1)..(25): SEQ ID NO: 1319; WAN024D6X_at; Start 190; Stop 214
gaaagtaagttatttcctcctcata

SEQ ID NO: 146010 - DNA, 25 bp, Artificial
  probe
  misc_feature (1)..(25): SEQ ID NO: 1319; WAN024D6X_at; Start 408; Stop 432
tgtcctacatacagctatagatgcc

SEQ ID NO: 146011 - DNA, 25 bp, Artificial
  probe
  misc_feature (1)..(25): SEQ ID NO: 1319; WAN024D6X_at; Start 285; Stop 309
cagtcgtgtcttttggatggataaa

SEQ ID NO: 146012 - DNA, 25 bp, Artificial
  probe
  misc_feature (1)..(25): SEQ ID NO: 1319; WAN024D6X_at; Start 3; Stop 27
gacaaaggctttaatttcgattgat

SEQ ID NO: 146013 - DNA, 25 bp, Artificial
  probe
  misc_feature (1)..(25): SEQ ID NO: 1319; WAN024D6X_at; Start 143; Stop 167
tcttctttactattgatgctcatga

SEQ ID NO: 146014 - DNA, 25 bp, Artificial
  probe
  misc_feature (1)..(25): SEQ ID NO: 1319; WAN024D6X_at; Start 261; Stop 285
cttttatcaagagcatggttcagac

SEQ ID NO: 146015 - DNA, 25 bp, Artificial
  probe
  misc_feature (1)..(25): SEQ ID NO: 1319; WAN024D6X_at; Start 157; Stop 181
gatgctcatgaagaaaacgattgtt

SEQ ID NO: 146016 - DNA, 25 bp, Artificial
  probe
  misc_feature (1)..(25): SEQ ID NO: 1319; WAN024D6X_at; Start 490; Stop 514
gaaaatcatcaatttgccctaggtc

SEQ ID NO: 146017 - DNA, 25 bp, Artificial
  probe
  misc_feature (1)..(25): SEQ ID NO: 1319; WAN024D6X_at; Start 19; Stop 43
tcgattgattatacagaagattttg

SEQ ID NO: 146018 - DNA, 25 bp, Artificial
  probe
  misc_feature (1)..(25): SEQ ID NO: 1319; WAN024D6X_at; Start 499; Stop 523
caatttgccctaggtcatttcaaaa

SEQ ID NO: 146019 - DNA, 25 bp, Artificial
  probe
  misc_feature (1)..(25): SEQ ID NO: 4013; WAN024D6Y_at; Start 567; Stop 591
tgtcacacatgatcaagaagaagca

SEQ ID NO: 146020 - DNA, 25 bp, Artificial
  probe
  misc_feature (1)..(25): SEQ ID NO: 4013; WAN024D6Y_at; Start 190; Stop 214
caagatattacgaatttagatccgg

SEQ ID NO: 146021 - DNA, 25 bp, Artificial
  probe
  misc_feature (1)..(25): SEQ ID NO: 4013; WAN024D6Y_at; Start 136; Stop 160
cgtgcactagttggatttttggagc

SEQ ID NO: 146022 - DNA, 25 bp, Artificial
  probe
  misc_feature (1)..(25): SEQ ID NO: 4013; WAN024D6Y_at; Start 710; Stop 734
tcaataaaattagccaagaagttct

SEQ ID NO: 146023 - DNA, 25 bp, Artificial
  probe
  misc_feature (1)..(25): SEQ ID NO: 4013; WAN024D6Y_at; Start 408; Stop 432
gggacaacaacagcgtgtagcttta

SEQ ID NO: 146024 - DNA, 25 bp, Artificial
  probe
  misc_feature (1)..(25): SEQ ID NO: 4013; WAN024D6Y_at; Start 916; Stop 940
catattatcgaaaagaatgatggac

SEQ ID NO: 146025 - DNA, 25 bp, Artificial
  probe
  misc_feature (1)..(25): SEQ ID NO: 4013; WAN024D6Y_at; Start 887; Stop 911
aagtagacttgtcgaatagtgaaag

SEQ ID NO: 146026 - DNA, 25 bp, Artificial
  probe
  misc_feature (1)..(25): SEQ ID NO: 4013; WAN024D6Y_at; Start 470; Stop 494
tggatgaaccgttatcaaacctaga

SEQ ID NO: 146027 - DNA, 25 bp, Artificial
  probe
  misc_feature (1)..(25): SEQ ID NO: 4013; WAN024D6Y_at; Start 496; Stop 520
gccaaactacgagtttcgttgagaa

SEQ ID NO: 146028 - DNA, 25 bp, Artificial
  probe
  misc_feature (1)..(25): SEQ ID NO: 4013; WAN024D6Y_at; Start 645; Stop 669
tggcacgccgtatgatatttataat

SEQ ID NO: 146029 - DNA, 25 bp, Artificial
  probe
  misc_feature (1)..(25): SEQ ID NO: 4013; WAN024D6Y_at; Start 484; Stop 508
tcaaacctagatgccaaactacgag

SEQ ID NO: 146030 - DNA, 25 bp, Artificial
  probe
  misc_feature (1)..(25): SEQ ID NO: 4013; WAN024D6Y_at; Start 433; Stop 457
gcacgtgcattagtattagaaccaa

SEQ ID NO: 146031 - DNA, 25 bp, Artificial
  probe
  misc_feature (1)..(25): SEQ ID NO: 4013; WAN024D6Y_at; Start 791; Stop 815
tagagcgtgttaagttagagaaaac

SEQ ID NO: 146032 - DNA, 25 bp, Artificial
  probe
  misc_feature (1)..(25): SEQ ID NO: 4013; WAN024D6Y_at; Start 363; Stop 387
tatctcagacgagcaactaaaccga

SEQ ID NO: 146033 - DNA, 25 bp, Artificial
  probe
  misc_feature (1)..(25): SEQ ID NO: 4013; WAN024D6Y_at; Start 118; Stop 142
gggaaatcaacaactcttcgtgcac

SEQ ID NO: 146034 - DNA, 25 bp, Artificial
  probe
  misc_feature (1)..(25): SEQ ID NO: 4013; WAN024D6Y_at; Start 250; Stop 274
gcattattcccaacaatgactgttt

SEQ ID NO: 146035 - DNA, 25 bp, Artificial
  probe
  misc_feature (1)..(25): SEQ ID NO: 4013; WAN024D6Y_at; Start 327; Stop 351
taaagctaaagttcatgaaattgcg

SEQ ID NO: 146036 - DNA, 25 bp, Artificial
  probe
  misc_feature (1)..(25): SEQ ID NO: 4013; WAN024D6Y_at; Start 220; Stop 244
cgcgaaattggtattgtgtttcaaa

SEQ ID NO: 146037 - DNA, 25 bp, Artificial
  probe
  misc_feature (1)..(25): SEQ ID NO: 4013; WAN024D6Y_at; Start 514; Stop 538
ttgagaaaagaattgaaacgattgc

SEQ ID NO: 146038 - DNA, 25 bp, Artificial
  probe
  misc_feature (1)..(25): SEQ ID NO: 4013; WAN024D6Y_at; Start 418; Stop 442
cagcgtgtagctttagcacgtgcat

SEQ ID NO: 146039 - DNA, 25 bp, Artificial
  probe
  misc_feature (1)..(25): SEQ ID NO: 4013; WAN024D6Y_at; Start 586; Stop 610
gaagcattaacattatcagatagga

SEQ ID NO: 146040 - DNA, 25 bp, Artificial
  probe
  misc_feature (1)..(25): SEQ ID NO: 4013; WAN024D6Y_at; Start 551; Stop 575
gaatcactactctttatgtcacaca

SEQ ID NO: 146041 - DNA, 25 bp, Artificial
  probe
  misc_feature (1)..(25): SEQ ID NO: 4013; WAN024D6Y_at; Start 774; Stop 798
tgaaggatacatacgcttagagcgt

SEQ ID NO: 146042 - DNA, 25 bp, Artificial
  probe
  misc_feature (1)..(25): SEQ ID NO: 4013; WAN024D6Y_at; Start 146; Stop 170
ttggatttttggagccttcacaggg

SEQ ID NO: 146043 - DNA, 25 bp, Artificial
  probe
  misc_feature (1)..(25): SEQ ID NO: 4013; WAN024D6Y_at; Start 40; Stop 64
gattttattgccatcgataatctca

SEQ ID NO: 146044 - DNA, 25 bp, Artificial
  probe
  misc_feature (1)..(25): SEQ ID NO: 4013; WAN024D6Y_at; Start 930; Stop 954
gaatgatggactatcacgtcatata

SEQ ID NO: 146045 - DNA, 25 bp, Artificial
  probe
  misc_feature (1)..(25): SEQ ID NO: 4013; WAN024D6Y_at; Start 169; Stop 193
gggcaaatactagttgataatcaag

SEQ ID NO: 146046 - DNA, 25 bp, Artificial
  probe
  misc_feature (1)..(25): SEQ ID NO: 4013; WAN024D6Y_at; Start 765; Stop 789
taaagaaactgaaggatacatacgc

SEQ ID NO: 146047 - DNA, 25 bp, Artificial
  probe
  misc_feature (1)..(25): SEQ ID NO: 4013; WAN024D6Y_at; Start 237; Stop 261
gtttcaaagttatgcattattccca

SEQ ID NO: 146048 - DNA, 25 bp, Artificial
  probe
  misc_feature (1)..(25): SEQ ID NO: 4013; WAN024D6Y_at; Start 806; Stop 830
tagagaaaacttcacctcaagattt

SEQ ID NO: 146049 - DNA, 25 bp, Artificial
  probe
  misc_feature (1)..(25): SEQ ID NO: 4013; WAN024D6Y_at; Start 629; Stop 653
gatttattgagcaagttggcacgcc

SEQ ID NO: 146050 - DNA, 25 bp, Artificial
  probe
  misc_feature (1)..(25): SEQ ID NO: 4013; WAN024D6Y_at; Start 528; Stop 552
gaaacgattgcaaaaagaactagga

SEQ ID NO: 146051 - DNA, 25 bp, Artificial
  probe
  misc_feature (1)..(25): SEQ ID NO: 4013; WAN024D6Y_at; Start 101; Stop 125
taggaccaagtggttgtgggaaatc

SEQ ID NO: 146052 - DNA, 25 bp, Artificial
  probe
  misc_feature (1)..(25): SEQ ID NO: 4013; WAN024D6Y_at; Start 981; Stop 1005
taatccgcgtgatataatgcaattt

SEQ ID NO: 146053 - DNA, 25 bp, Artificial
  probe
  misc_feature (1)..(25): SEQ ID NO: 2638; WAN024D6Z_at; Start 592; Stop 616
gaagcgatgacacttgcagaccgta

SEQ ID NO: 146054 - DNA, 25 bp, Artificial
  probe
  misc_feature (1)..(25): SEQ ID NO: 2638; WAN024D6Z_at; Start 850; Stop 874
ggctacgaaggaaaagaattgatct

SEQ ID NO: 146055 - DNA, 25 bp, Artificial
  probe
  misc_feature (1)..(25): SEQ ID NO: 2638; WAN024D6Z_at; Start 37; Stop 61
tatccaaacagcgaacactattcag

SEQ ID NO: 146056 - DNA, 25 bp, Artificial
  probe
  misc_feature (1)..(25): SEQ ID NO: 2638; WAN024D6Z_at; Start 573; Stop 597
tgtaactcacgaccaaacagaagcg

SEQ ID NO: 146057 - DNA, 25 bp, Artificial
  probe
  misc_feature (1)..(25): SEQ ID NO: 2638; WAN024D6Z_at; Start 962; Stop 986
cagaactgcttggttcagaatctca

SEQ ID NO: 146058 - DNA, 25 bp, Artificial
  probe
  misc_feature (1)..(25): SEQ ID NO: 2638; WAN024D6Z_at; Start 444; Stop 468
tgcgattgtccgtgatgcgaaagta

SEQ ID NO: 146059 - DNA, 25 bp, Artificial
  probe
  misc_feature (1)..(25): SEQ ID NO: 2638; WAN024D6Z_at; Start 1017; Stop 1041
tgttgcaaaagttgatgctcgtgac

SEQ ID NO: 146060 - DNA, 25 bp, Artificial
  probe
  misc_feature (1)..(25): SEQ ID NO: 2638; WAN024D6Z_at; Start 804; Stop 828
ccgtttgaaagtgccagaaggagca

SEQ ID NO: 146061 - DNA, 25 bp, Artificial
  probe
  misc_feature (1)..(25): SEQ ID NO: 2638; WAN024D6Z_at; Start 642; Stop 666
ccctgctggtacaggtactatcgga

SEQ ID NO: 146062 - DNA, 25 bp, Artificial
  probe
  misc_feature (1)..(25): SEQ ID NO: 2638; WAN024D6Z_at; Start 657; Stop 681
tactatcggacgtgtagaacaaatc

SEQ ID NO: 146063 - DNA, 25 bp, Artificial
  probe
  misc_feature (1)..(25): SEQ ID NO: 2638; WAN024D6Z_at; Start 900; Stop 924
tgcagaacctgctttccttgaaaca

SEQ ID NO: 146064 - DNA, 25 bp, Artificial
  probe
  misc_feature (1)..(25): SEQ ID NO: 2638; WAN024D6Z_at; Start 885; Stop 909
tccagaagacgtgaatgcagaacct

SEQ ID NO: 146065 - DNA, 25 bp, Artificial
  probe
  misc_feature (1)..(25): SEQ ID NO: 2638; WAN024D6Z_at; Start 1078; Stop 1102
gacttgaacaaagcacacttcttcg

SEQ ID NO: 146066 - DNA, 25 bp, Artificial
  probe
  misc_feature (1)..(25): SEQ ID NO: 2638; WAN024D6Z_at; Start 626; Stop 650
tgtcagctactaagaaccctgctgg

SEQ ID NO: 146067 - DNA, 25 bp, Artificial
  probe
  misc_feature (1)..(25): SEQ ID NO: 2638; WAN024D6Z_at; Start 126; Stop 150
tggtaaatcaactacactccgtatg

SEQ ID NO: 146068 - DNA, 25 bp, Artificial
  probe
  misc_feature (1)..(25): SEQ ID NO: 2638; WAN024D6Z_at; Start 926; Stop 950
tcccagactgtgttgtaaaagcgac

SEQ ID NO: 146069 - DNA, 25 bp, Artificial
  probe
  misc_feature (1)..(25): SEQ ID NO: 2638; WAN024D6Z_at; Start 608; Stop 632
cagaccgtatcgttattatgtcagc

SEQ ID NO: 146070 - DNA, 25 bp, Artificial
  probe
  misc_feature (1)..(25): SEQ ID NO: 2638; WAN024D6Z_at; Start 481; Stop 505
gaacctttgtcaaacttggatgcca

SEQ ID NO: 146071 - DNA, 25 bp, Artificial
  probe
  misc_feature (1)..(25): SEQ ID NO: 2638; WAN024D6Z_at; Start 175; Stop 199
gaaggtactgcatctatcgatggcg

SEQ ID NO: 146072 - DNA, 25 bp, Artificial
  probe
  misc_feature (1)..(25): SEQ ID NO: 2638; WAN024D6Z_at; Start 537; Stop 561
taaaattcaccgtcgtatcggagct

SEQ ID NO: 146073 - DNA, 25 bp, Artificial
  probe
  misc_feature (1)..(25): SEQ ID NO: 2638; WAN024D6Z_at; Start 1046; Stop 1070
tgcaaacaggtgcaacagttgagct

SEQ ID NO: 146074 - DNA, 25 bp, Artificial
  probe
  misc_feature (1)..(25): SEQ ID NO: 2638; WAN024D6Z_at; Start 726; Stop 750
tgcaggattcatcggaagcccagct

SEQ ID NO: 146075 - DNA, 25 bp, Artificial
  probe
  misc_feature (1)..(25): SEQ ID NO: 2638; WAN024D6Z_at; Start 673; Stop 697
gaacaaatcggtactcctcaagaag

SEQ ID NO: 146076 - DNA, 25 bp, Artificial
  probe
  misc_feature (1)..(25): SEQ ID NO: 2638; WAN024D6Z_at; Start 229; Stop 253
cgtgatatcgccatggtattccaaa

SEQ ID NO: 146077 - DNA, 25 bp, Artificial
  probe
  misc_feature (1)..(25): SEQ ID NO: 2638; WAN024D6Z_at; Start 461; Stop 485
cgaaagtattcttgatggacgaacc

SEQ ID NO: 146078 - DNA, 25 bp, Artificial
  probe
  misc_feature (1)..(25): SEQ ID NO: 2638; WAN024D6Z_at; Start 336; Stop 360
taacaaacgtgttcaagaagcagct

SEQ ID NO: 146079 - DNA, 25 bp, Artificial
  probe
  misc_feature (1)..(25): SEQ ID NO: 2638; WAN024D6Z_at; Start 865; Stop 889
gaattgatctttggtatccgtccag

SEQ ID NO: 146080 - DNA, 25 bp, Artificial
  probe
  misc_feature (1)..(25): SEQ ID NO: 2638; WAN024D6Z_at; Start 517; Stop 541
tcaatgcgtgctgaaatcgctaaaa

SEQ ID NO: 146081 - DNA, 25 bp, Artificial
  probe
  misc_feature (1)..(25): SEQ ID NO: 2638; WAN024D6Z_at; Start 502; Stop 526
gccaaacttcgtgtatcaatgcgtg

SEQ ID NO: 146082 - DNA, 25 bp, Artificial
  probe
  misc_feature (1)..(25): SEQ ID NO: 2638; WAN024D6Z_at; Start 140; Stop 164
cactccgtatgattgctggtcttga

SEQ ID NO: 146083 - DNA, 25 bp, Artificial
  probe
  misc_feature (1)..(25): SEQ ID NO: 2638; WAN024D6Z_at; Start 1033; Stop 1057
gctcgtgactacttgcaaacaggtg

SEQ ID NO: 146084 - DNA, 25 bp, Artificial
  probe
  misc_feature (1)..(25): SEQ ID NO: 2638; WAN024D6Z_at; Start 416; Stop 440
gtcaacgtcaacgtgttgccatggg

SEQ ID NO: 146085 - DNA, 25 bp, Artificial
  probe
  misc_feature (1)..(25): SEQ ID NO: 2638; WAN024D6Z_at; Start 941; Stop 965
taaaagcgactatctctgtatcaga

SEQ ID NO: 146086 - DNA, 25 bp, Artificial
  probe
  misc_feature (1)..(25): SEQ ID NO: 2638; WAN024D6Z_at; Start 285; Stop 309
tgacaacatggctttcggtttgaaa

SEQ ID NO: 146087 - DNA, 25 bp, Artificial
  probe
  misc_feature (1)..(25): SEQ ID NO: 5660; WAN024D72_at; Start 205; Stop 229
gaagttaatggaacagatgtcactc

SEQ ID NO: 146088 - DNA, 25 bp, Artificial
  probe
  misc_feature (1)..(25): SEQ ID NO: 5660; WAN024D72_at; Start 985; Stop 1009
tctgtcggagaaagtgtggaattat

SEQ ID NO: 146089 - DNA, 25 bp, Artificial
  probe
  misc_feature (1)..(25): SEQ ID NO: 5660; WAN024D72_at; Start 455; Stop 479
cattggctcgtgctctggttcttga

SEQ ID NO: 146090 - DNA, 25 bp, Artificial
  probe
  misc_feature (1)..(25): SEQ ID NO: 5660; WAN024D72_at; Start 597; Stop 621
tactcatgatcaagaggaagccttg

SEQ ID NO: 146091 - DNA, 25 bp, Artificial
  probe
  misc_feature (1)..(25): SEQ ID NO: 5660; WAN024D72_at; Start 335; Stop 359
aggtagctccagatgttattaaagc

SEQ ID NO: 146092 - DNA, 25 bp, Artificial
  probe
  misc_feature (1)..(25): SEQ ID NO: 5660; WAN024D72_at; Start 238; Stop 262
cctgaaaagcgtggaattggtattg

SEQ ID NO: 146093 - DNA, 25 bp, Artificial
  probe
  misc_feature (1)..(25): SEQ ID NO: 5660; WAN024D72_at; Start 499; Stop 523
gatgaaccattgtcaaaccttgacg

SEQ ID NO: 146094 - DNA, 25 bp, Artificial
  probe
  misc_feature (1)..(25): SEQ ID NO: 5660; WAN024D72_at; Start 953; Stop 977
taacaagtattgatagtcaggctgc

SEQ ID NO: 146095 - DNA, 25 bp, Artificial
  probe
  misc_feature (1)..(25): SEQ ID NO: 5660; WAN024D72_at; Start 220; Stop 244
gatgtcactcatttggaacctgaaa

SEQ ID NO: 146096 - DNA, 25 bp, Artificial
  probe
  misc_feature (1)..(25): SEQ ID NO: 5660; WAN024D72_at; Start 87; Stop 111
tctgaatttagatatacatgaaggg

SEQ ID NO: 146097 - DNA, 25 bp, Artificial
  probe
  misc_feature (1)..(25): SEQ ID NO: 5660; WAN024D72_at; Start 122; Stop 146
catttcttgggccttcaggatgtgg

SEQ ID NO: 146098 - DNA, 25 bp, Artificial
  probe
  misc_feature (1)..(25): SEQ ID NO: 5660; WAN024D72_at; Start 612; Stop 636
ggaagccttgactttatctgataga

SEQ ID NO: 146099 - DNA, 25 bp, Artificial
  probe
  misc_feature (1)..(25): SEQ ID NO: 5660; WAN024D72_at; Start 483; Stop 507
taaaattctttgtctagatgaacca

SEQ ID NO: 146100 - DNA, 25 bp, Artificial
  probe
  misc_feature (1)..(25): SEQ ID NO: 5660; WAN024D72_at; Start 152; Stop 176
caactactttgagagcattggtagg

SEQ ID NO: 146101 - DNA, 25 bp, Artificial
  probe
  misc_feature (1)..(25): SEQ ID NO: 5660; WAN024D72_at; Start 439; Stop 463
caacaacaaagggtagcattggctc

SEQ ID NO: 146102 - DNA, 25 bp, Artificial
  probe
  misc_feature (1)..(25): SEQ ID NO: 5660; WAN024D72_at; Start 1003; Stop 1027
gaattatttatcacaccatcagacg

SEQ ID NO: 146103 - DNA, 25 bp, Artificial
  probe
  misc_feature (1)..(25): SEQ ID NO: 5660; WAN024D72_at; Start 514; Stop 538
aaccttgacgcaaaattacgtgtag

SEQ ID NO: 146104 - DNA, 25 bp, Artificial
  probe
  misc_feature (1)..(25): SEQ ID NO: 5660; WAN024D72_at; Start 891; Stop 915
tgagttttctggagttacaattcac

SEQ ID NO: 146105 - DNA, 25 bp, Artificial
  probe
  misc_feature (1)..(25): SEQ ID NO: 5660; WAN024D72_at; Start 389; Stop 413
agatctctgatcaacagttacagcg

SEQ ID NO: 146106 - DNA, 25 bp, Artificial
  probe
  misc_feature (1)..(25): SEQ ID NO: 5660; WAN024D72_at; Start 673; Stop 697
ggtacaccagtagagatttatcata

SEQ ID NO: 146107 - DNA, 25 bp, Artificial
  probe
  misc_feature (1)..(25): SEQ ID NO: 5660; WAN024D72_at; Start 1018; Stop 1042
ccatcagacgttctgcaattttaac

SEQ ID NO: 146108 - DNA, 25 bp, Artificial
  probe
  misc_feature (1)..(25): SEQ ID NO: 5660; WAN024D72_at; Start 323; Stop 347
taaaagttaagaaggtagctccaga

SEQ ID NO: 146109 - DNA, 25 bp, Artificial
  probe
  misc_feature (1)..(25): SEQ ID NO: 5660; WAN024D72_at; Start 184; Stop 208
gatccatcatcaggaagtattgaag

SEQ ID NO: 146110 - DNA, 25 bp, Artificial
  probe
  misc_feature (1)..(25): SEQ ID NO: 5660; WAN024D72_at; Start 823; Stop 847
ttagagaaagttcgattcaatcgtg

SEQ ID NO: 146111 - DNA, 25 bp, Artificial
  probe
  misc_feature (1)..(25): SEQ ID NO: 5660; WAN024D72_at; Start 541; Stop 565
ttgagaaaagagttgaaaagacttc

SEQ ID NO: 146112 - DNA, 25 bp, Artificial
  probe
  misc_feature (1)..(25): SEQ ID NO: 5660; WAN024D72_at; Start 274; Stop 298
tatgcgctatttccaactatgactg

SEQ ID NO: 146113 - DNA, 25 bp, Artificial
  probe
  misc_feature (1)..(25): SEQ ID NO: 5660; WAN024D72_at; Start 731; Stop 755
gagatattaatgttttgaccgatga

SEQ ID NO: 146114 - DNA, 25 bp, Artificial
  probe
  misc_feature (1)..(25): SEQ ID NO: 5660; WAN024D72_at; Start 970; Stop 994
caggctgctattagatctgtcggag

SEQ ID NO: 146115 - DNA, 25 bp, Artificial
  probe
  misc_feature (1)..(25): SEQ ID NO: 5660; WAN024D72_at; Start 640; Stop 664
gcagtctttaacaatggatacatcg

SEQ ID NO: 146116 - DNA, 25 bp, Artificial
  probe
  misc_feature (1)..(25): SEQ ID NO: 5660; WAN024D72_at; Start 746; Stop 770
tgaccgatgaaacagtccacgaagt

SEQ ID NO: 146117 - DNA, 25 bp, Artificial
  probe
  misc_feature (1)..(25): SEQ ID NO: 5660; WAN024D72_at; Start 403; Stop 427
cagttacagcgtaatgtatcagaat

SEQ ID NO: 146118 - DNA, 25 bp, Artificial
  probe
  misc_feature (1)..(25): SEQ ID NO: 5660; WAN024D72_at; Start 658; Stop 682
tacatcgaacaggtcggtacaccag

SEQ ID NO: 146119 - DNA, 25 bp, Artificial
  probe
  misc_feature (1)..(25): SEQ ID NO: 5660; WAN024D72_at; Start 360; Stop 384
taaagtatcagcagtggcagcaaaa

SEQ ID NO: 146120 - DNA, 25 bp, Artificial
  probe
  misc_feature (1)..(25): SEQ ID NO: 5660; WAN024D72_at; Start 371; Stop 395
cagtggcagcaaaaattaagatctc

SEQ ID NO: 146121 - DNA, 25 bp, Artificial
  probe
  misc_feature (1)..(25): SEQ ID NO: 5686; WAN024D73_at; Start 34; Stop 58
agattagaattgtcagataatatca

SEQ ID NO: 146122 - DNA, 25 bp, Artificial
  probe
  misc_feature (1)..(25): SEQ ID NO: 5686; WAN024D73_at; Start 33; Stop 57
tagattagaattgtcagataatatc

SEQ ID NO: 146123 - DNA, 25 bp, Artificial
  probe
  misc_feature (1)..(25): SEQ ID NO: 5686; WAN024D73_at; Start 86; Stop 110
aggtgttcaaatgtcagaagcaggt

SEQ ID NO: 146124 - DNA, 25 bp, Artificial
  probe
  misc_feature (1)..(25): SEQ ID NO: 5686; WAN024D73_at; Start 76; Stop 100
gaaaaaacagaggtgttcaaatgtc

SEQ ID NO: 146125 - DNA, 25 bp, Artificial
  probe
  misc_feature (1)..(25): SEQ ID NO: 5686; WAN024D73_at; Start 80; Stop 104
aaacagaggtgttcaaatgtcagaa

SEQ ID NO: 146126 - DNA, 25 bp, Artificial
  probe
  misc_feature (1)..(25): SEQ ID NO: 5686; WAN024D73_at; Start 36; Stop 60
attagaattgtcagataatatcatt

SEQ ID NO: 146127 - DNA, 25 bp, Artificial
  probe
  misc_feature (1)..(25): SEQ ID NO: 5686; WAN024D73_at; Start 74; Stop 98
aagaaaaaacagaggtgttcaaatg

SEQ ID NO: 146128 - DNA, 25 bp, Artificial
  probe
  misc_feature (1)..(25): SEQ ID NO: 5686; WAN024D73_at; Start 16; Stop 40
tctagtttatcaaataatagattag

SEQ ID NO: 146129 - DNA, 25 bp, Artificial
  probe
  misc_feature (1)..(25): SEQ ID NO: 5686; WAN024D73_at; Start 83; Stop 107
cagaggtgttcaaatgtcagaagca

SEQ ID NO: 146130 - DNA, 25 bp, Artificial
  probe
  misc_feature (1)..(25): SEQ ID NO: 5686; WAN024D73_at; Start 82; Stop 106
acagaggtgttcaaatgtcagaagc

SEQ ID NO: 146131 - DNA, 25 bp, Artificial
  probe
  misc_feature (1)..(25): SEQ ID NO: 5686; WAN024D73_at; Start 81; Stop 105
aacagaggtgttcaaatgtcagaag

SEQ ID NO: 146132 - DNA, 25 bp, Artificial
  probe
  misc_feature (1)..(25): SEQ ID NO: 5686; WAN024D73_at; Start 84; Stop 108
agaggtgttcaaatgtcagaagcag

SEQ ID NO: 146133 - DNA, 25 bp, Artificial
  probe
  misc_feature (1)..(25): SEQ ID NO: 5686; WAN024D73_at; Start 75; Stop 99
agaaaaaacagaggtgttcaaatgt

SEQ ID NO: 146134 - DNA, 25 bp, Artificial
  probe
  misc_feature (1)..(25): SEQ ID NO: 5686; WAN024D73_at; Start 85; Stop 109
gaggtgttcaaatgtcagaagcagg

SEQ ID NO: 146135 - DNA, 25 bp, Artificial
  probe
  misc_feature (1)..(25): SEQ ID NO: 5686; WAN024D73_at; Start 13; Stop 37
gattctagtttatcaaataatagat

SEQ ID NO: 146136 - DNA, 25 bp, Artificial
  probe
  misc_feature (1)..(25): SEQ ID NO: 5686; WAN024D73_at; Start 12; Stop 36
tgattctagtttatcaaataataga

SEQ ID NO: 146137 - DNA, 25 bp, Artificial
  probe
  misc_feature (1)..(25): SEQ ID NO: 5686; WAN024D73_at; Start 18; Stop 42
tagtttatcaaataatagattagaa

SEQ ID NO: 146138 - DNA, 25 bp, Artificial
  probe
  misc_feature (1)..(25): SEQ ID NO: 5686; WAN024D73_at; Start 70; Stop 94
aatgaagaaaaaacagaggtgttca

SEQ ID NO: 146139 - DNA, 25 bp, Artificial
  probe
  misc_feature (1)..(25): SEQ ID NO: 5686; WAN024D73_at; Start 77; Stop 101
aaaaaacagaggtgttcaaatgtca

SEQ ID NO: 146140 - DNA, 25 bp, Artificial
  probe
  misc_feature (1)..(25): SEQ ID NO: 5686; WAN024D73_at; Start 6; Stop 30
tgcttttgattctagtttatcaaat

SEQ ID NO: 146141 - DNA, 25 bp, Artificial
  probe
  misc_feature (1)..(25): SEQ ID NO: 5686; WAN024D73_at; Start 3; Stop 27
gtatgcttttgattctagtttatca

SEQ ID NO: 146142 - DNA, 25 bp, Artificial
  probe
  misc_feature (1)..(25): SEQ ID NO: 5686; WAN024D73_at; Start 79; Stop 103
aaaacagaggtgttcaaatgtcaga

SEQ ID NO: 146143 - DNA, 25 bp, Artificial
  probe
  misc_feature (1)..(25): SEQ ID NO: 5686; WAN024D73_at; Start 2; Stop 26
tgtatgcttttgattctagtttatc

SEQ ID NO: 146144 - DNA, 25 bp, Artificial
  probe
  misc_feature (1)..(25): SEQ ID NO: 5686; WAN024D73_at; Start 69; Stop 93
taatgaagaaaaaacagaggtgttc

SEQ ID NO: 146145 - DNA, 25 bp, Artificial
  probe
  misc_feature (1)..(25): SEQ ID NO: 5686; WAN024D73_at; Start 54; Stop 78
tatcattttgtgttataatgaagaa

SEQ ID NO: 146146 - DNA, 25 bp, Artificial
  probe
  misc_feature (1)..(25): SEQ ID NO: 5686; WAN024D73_at; Start 7; Stop 31
gcttttgattctagtttatcaaata

SEQ ID NO: 146147 - DNA, 25 bp, Artificial
  probe
  misc_feature (1)..(25): SEQ ID NO: 5686; WAN024D73_at; Start 78; Stop 102
aaaaacagaggtgttcaaatgtcag

SEQ ID NO: 146148 - DNA, 25 bp, Artificial
  probe
  misc_feature (1)..(25): SEQ ID NO: 5686; WAN024D73_at; Start 17; Stop 41
ctagtttatcaaataatagattaga

SEQ ID NO: 146149 - DNA, 25 bp, Artificial
  probe
  misc_feature (1)..(25): SEQ ID NO: 5686; WAN024D73_at; Start 72; Stop 96
tgaagaaaaaacagaggtgttcaaa

SEQ ID NO: 146150 - DNA, 25 bp, Artificial
  probe
  misc_feature (1)..(25): SEQ ID NO: 5686; WAN024D73_at; Start 30; Stop 54
taatagattagaattgtcagataat

SEQ ID NO: 146151 - DNA, 25 bp, Artificial
  probe
  misc_feature (1)..(25): SEQ ID NO: 5686; WAN024D73_at; Start 35; Stop 59
gattagaattgtcagataatatcat

SEQ ID NO: 146152 - DNA, 25 bp, Artificial
  probe
  misc_feature (1)..(25): SEQ ID NO: 5686; WAN024D73_at; Start 4; Stop 28
tatgcttttgattctagtttatcaa

SEQ ID NO: 146153 - DNA, 25 bp, Artificial
  probe
  misc_feature (1)..(25): SEQ ID NO: 5686; WAN024D73_at; Start 71; Stop 95
atgaagaaaaaacagaggtgttcaa

SEQ ID NO: 146154 - DNA, 25 bp, Artificial
  probe
  misc_feature (1)..(25): SEQ ID NO: 5686; WAN024D73_at; Start 52; Stop 76
aatatcattttgtgttataatgaag

SEQ ID NO: 146155 - DNA, 25 bp, Artificial
  probe
  misc_feature (1)..(25): SEQ ID NO: 2859; WAN024D74_at; Start 49; Stop 73
ttacgtccaggtggaaagcgtgcca

SEQ ID NO: 146156 - DNA, 25 bp, Artificial
  probe
  misc_feature (1)..(25): SEQ ID NO: 2859; WAN024D74_at; Start 424; Stop 448
catgatgtgcttcttaaggaagcta

SEQ ID NO: 146157 - DNA, 25 bp, Artificial
  probe
  misc_feature (1)..(25): SEQ ID NO: 2859; WAN024D74_at; Start 695; Stop 719
ttgctaagaataaacagaaattggg

SEQ ID NO: 146158 - DNA, 25 bp, Artificial
  probe
  misc_feature (1)..(25): SEQ ID NO: 2859; WAN024D74_at; Start 564; Stop 588
gactggtgaaatgacattaatgaaa

SEQ ID NO: 146159 - DNA, 25 bp, Artificial
  probe
  misc_feature (1)..(25): SEQ ID NO: 2859; WAN024D74_at; Start 288; Stop 312
gaaacttccttatcaagatgctagt

SEQ ID NO: 146160 - DNA, 25 bp, Artificial
  probe
  misc_feature (1)..(25): SEQ ID NO: 2859; WAN024D74_at; Start 519; Stop 543
ggaacaggtgatgatagaatcaggt

SEQ ID NO: 146161 - DNA, 25 bp, Artificial
  probe
  misc_feature (1)..(25): SEQ ID NO: 2859; WAN024D74_at; Start 200; Stop 224
tggatgctcaagctttagaagtggc

SEQ ID NO: 146162 - DNA, 25 bp, Artificial
  probe
  misc_feature (1)..(25): SEQ ID NO: 2859; WAN024D74_at; Start 109; Stop 133
gaaaagagaatactagaggttgcgt

SEQ ID NO: 146163 - DNA, 25 bp, Artificial
  probe
  misc_feature (1)..(25): SEQ ID NO: 2859; WAN024D74_at; Start 243; Stop 267
ggcaggtgttgctcatttaatcagt

SEQ ID NO: 146164 - DNA, 25 bp, Artificial
  probe
  misc_feature (1)..(25): SEQ ID NO: 2859; WAN024D74_at; Start 456; Stop 480
tatcagacaggaattatcacaagca

SEQ ID NO: 146165 - DNA, 25 bp, Artificial
  probe
  misc_feature (1)..(25): SEQ ID NO: 2859; WAN024D74_at; Start 488; Stop 512
taaatgtaggtcctttaactcaaga

SEQ ID NO: 146166 - DNA, 25 bp, Artificial
  probe
  misc_feature (1)..(25): SEQ ID NO: 2859; WAN024D74_at; Start 503; Stop 527
taactcaagatggttgggaacaggt

SEQ ID NO: 146167 - DNA, 25 bp, Artificial
  probe
  misc_feature (1)..(25): SEQ ID NO: 2859; WAN024D74_at; Start 87; Stop 111
tgcagaaggaggattttcaaaagaa

SEQ ID NO: 146168 - DNA, 25 bp, Artificial
  probe
  misc_feature (1)..(25): SEQ ID NO: 2859; WAN024D74_at; Start 225; Stop 249
taaaaaatctgctggaacggcaggt

SEQ ID NO: 146169 - DNA, 25 bp, Artificial
  probe
  misc_feature (1)..(25): SEQ ID NO: 2859; WAN024D74_at; Start 72; Stop 96
cacagattggttaattgcagaagga

SEQ ID NO: 146170 - DNA, 25 bp, Artificial
  probe
  misc_feature (1)..(25): SEQ ID NO: 2859; WAN024D74_at; Start 260; Stop 284
taatcagttttgaaagagcaaatgc

SEQ ID NO: 146171 - DNA, 25 bp, Artificial
  probe
  misc_feature (1)..(25): SEQ ID NO: 2859; WAN024D74_at; Start 164; Stop 188
cacagcgttttggttgcaagataac

SEQ ID NO: 146172 - DNA, 25 bp, Artificial
  probe
  misc_feature (1)..(25): SEQ ID NO: 2859; WAN024D74_at; Start 475; Stop 499
caagcaattcatgtaaatgtaggtc

SEQ ID NO: 146173 - DNA, 25 bp, Artificial
  probe
  misc_feature (1)..(25): SEQ ID NO: 2859; WAN024D74_at; Start 215; Stop 239
tagaagtggctaaaaaatctgctgg

SEQ ID NO: 146174 - DNA, 25 bp, Artificial
  probe
  misc_feature (1)..(25): SEQ ID NO: 2859; WAN024D74_at; Start 146; Stop 170
ctacagcaattgagttggcacagcg

SEQ ID NO: 146175 - DNA, 25 bp, Artificial
  probe
  misc_feature (1)..(25): SEQ ID NO: 2859; WAN024D74_at; Start 275; Stop 299
gagcaaatgcaatgaaacttcctta

SEQ ID NO: 146176 - DNA, 25 bp, Artificial
  probe
  misc_feature (1)..(25): SEQ ID NO: 2859; WAN024D74_at; Start 320; Stop 344
ttgttataaatgaagctatgctgac

SEQ ID NO: 146177 - DNA, 25 bp, Artificial
  probe
  misc_feature (1)..(25): SEQ ID NO: 2859; WAN024D74_at; Start 618; Stop 642
gctaggaactttgaaaatttgtgta

SEQ ID NO: 146178 - DNA, 25 bp, Artificial
  probe
  misc_feature (1)..(25): SEQ ID NO: 2859; WAN024D74_at; Start 370; Stop 394
aaatgtgtaatggaatatctaaggg

SEQ ID NO: 146179 - DNA, 25 bp, Artificial
  probe
  misc_feature (1)..(25): SEQ ID NO: 2859; WAN024D74_at; Start 535; Stop 559
gaatcaggttattgtgatgtgaaag

SEQ ID NO: 146180 - DNA, 25 bp, Artificial
  probe
  misc_feature (1)..(25): SEQ ID NO: 2859; WAN024D74_at; Start 336; Stop 360
tatgctgactatgcaagccgatcaa

SEQ ID NO: 146181 - DNA, 25 bp, Artificial
  probe
  misc_feature (1)..(25): SEQ ID NO: 2859; WAN024D74_at; Start 61; Stop 85
ggaaagcgtgccacagattggttaa

SEQ ID NO: 146182 - DNA, 25 bp, Artificial
  probe
  misc_feature (1)..(25): SEQ ID NO: 2859; WAN024D74_at; Start 441; Stop 465
ggaagctaaagagtctatcagacag

SEQ ID NO: 146183 - DNA, 25 bp, Artificial
  probe
  misc_feature (1)..(25): SEQ ID NO: 2859; WAN024D74_at; Start 185; Stop 209
taactgctgttgatatggatgctca

SEQ ID NO: 146184 - DNA, 25 bp, Artificial
  probe
  misc_feature (1)..(25): SEQ ID NO: 2859; WAN024D74_at; Start 731; Stop 755
tggctagttataaatcgtcaaaacg

SEQ ID NO: 146185 - DNA, 25 bp, Artificial
  probe
  misc_feature (1)..(25): SEQ ID NO: 2859; WAN024D74_at; Start 604; Stop 628
tatgacgaaggtttgctaggaactt

SEQ ID NO: 146186 - DNA, 25 bp, Artificial
  probe
  misc_feature (1)..(25): SEQ ID NO: 2859; WAN024D74_at; Start 590; Stop 614
tatcgggtatgatttatgacgaagg

SEQ ID NO: 146187 - DNA, 25 bp, Artificial
  probe
  misc_feature (1)..(25): SEQ ID NO: 2859; WAN024D74_at; Start 649; Stop 673
tgtaaaaaggagaatagaaagcagt

SEQ ID NO: 146188 - DNA, 25 bp, Artificial
  probe
  misc_feature (1)..(25): SEQ ID NO: 2859; WAN024D74_at; Start 352; Stop 376
gccgatcaagctaagaaaaaatgtg

SEQ ID NO: 146189 - DNA, 25 bp, Artificial
  probe
  misc_feature (1)..(25): SEQ ID NO: 2006; WAN024D75_at; Start 406; Stop 430
tattcgacccttcatatctgttggg

SEQ ID NO: 146190 - DNA, 25 bp, Artificial
  probe
  misc_feature (1)..(25): SEQ ID NO: 2006; WAN024D75_at; Start 240; Stop 264
tcgttcagagcacatggagaccttc

SEQ ID NO: 146191 - DNA, 25 bp, Artificial
  probe
  misc_feature (1)..(25): SEQ ID NO: 2006; WAN024D75_at; Start 630; Stop 654
tttatcagaaggacctcaggttggg

SEQ ID NO: 146192 - DNA, 25 bp, Artificial
  probe
  misc_feature (1)..(25): SEQ ID NO: 2006; WAN024D75_at; Start 840; Stop 864
tgcagccctctttttcagtaattgg

SEQ ID NO: 146193 - DNA, 25 bp, Artificial
  probe
  misc_feature (1)..(25): SEQ ID NO: 2006; WAN024D75_at; Start 472; Stop 496
taccagatggacagtaagctatcag

SEQ ID NO: 146194 - DNA, 25 bp, Artificial
  probe
  misc_feature (1)..(25): SEQ ID NO: 2006; WAN024D75_at; Start 522; Stop 546
agagggtcaccttctatttagaggc

SEQ ID NO: 146195 - DNA, 25 bp, Artificial
  probe
  misc_feature (1)..(25): SEQ ID NO: 2006; WAN024D75_at; Start 172; Stop 196
ttggctaatacacccctacaactgg

SEQ ID NO: 146196 - DNA, 25 bp, Artificial
  probe
  misc_feature (1)..(25): SEQ ID NO: 2006; WAN024D75_at; Start 202; Stop 226
gattttctctatatggagagccacc

SEQ ID NO: 146197 - DNA, 25 bp, Artificial
  probe
  misc_feature (1)..(25): SEQ ID NO: 2006; WAN024D75_at; Start 146; Stop 170
tcacagagacccagttgttgcgcca

SEQ ID NO: 146198 - DNA, 25 bp, Artificial
  probe
  misc_feature (1)..(25): SEQ ID NO: 2006; WAN024D75_at; Start 341; Stop 365
catttgaggaagtggactattggga

SEQ ID NO: 146199 - DNA, 25 bp, Artificial
  probe
  misc_feature (1)..(25): SEQ ID NO: 2006; WAN024D75_at; Start 309; Stop 333
gatcatcacgggtgctccagttgag

SEQ ID NO: 146200 - DNA, 25 bp, Artificial
  probe
  misc_feature (1)..(25): SEQ ID NO: 2006; WAN024D75_at; Start 77; Stop 101
aacgtgctgcccaccaagatatccg

SEQ ID NO: 146201 - DNA, 25 bp, Artificial
  probe
  misc_feature (1)..(25): SEQ ID NO: 2006; WAN024D75_at; Start 799; Stop 823
gatgatgttaatcaggtaccttgtc

SEQ ID NO: 146202 - DNA, 25 bp, Artificial
  probe
  misc_feature (1)..(25): SEQ ID NO: 2006; WAN024D75_at; Start 731; Stop 755
caaaagagtattttcgagatcgtga

SEQ ID NO: 146203 - DNA, 25 bp, Artificial
  probe
  misc_feature (1)..(25): SEQ ID NO: 2006; WAN024D75_at; Start 487; Stop 511
aagctatcaggtatttatcctcagg

SEQ ID NO: 146204 - DNA, 25 bp, Artificial
  probe
  misc_feature (1)..(25): SEQ ID NO: 2006; WAN024D75_at; Start 63; Stop 87
tgtcatggatgatcaacgtgctgcc

SEQ ID NO: 146205 - DNA, 25 bp, Artificial
  probe
  misc_feature (1)..(25): SEQ ID NO: 2006; WAN024D75_at; Start 90; Stop 114
ccaagatatccgtcctttgaagatt

SEQ ID NO: 146206 - DNA, 25 bp, Artificial
  probe
  misc_feature (1)..(25): SEQ ID NO: 2006; WAN024D75_at; Start 374; Stop 398
gacagatgcttgagtggtctaagac

SEQ ID NO: 146207 - DNA, 25 bp, Artificial
  probe
  misc_feature (1)..(25): SEQ ID NO: 2006; WAN024D75_at; Start 129; Stop 153
catgccacagaaaatggtcacagag

SEQ ID NO: 146208 - DNA, 25 bp, Artificial
  probe
  misc_feature (1)..(25): SEQ ID NO: 2006; WAN024D75_at; Start 701; Stop 725
gtcatttggagtatgaccgtgatac

SEQ ID NO: 146209 - DNA, 25 bp, Artificial
  probe
  misc_feature (1)..(25): SEQ ID NO: 2006; WAN024D75_at; Start 582; Stop 606
cacggagatttctaaggaagaggtc

SEQ ID NO: 146210 - DNA, 25 bp, Artificial
  probe
  misc_feature (1)..(25): SEQ ID NO: 2006; WAN024D75_at; Start 665; Stop 689
tggccagtcgtgatttacgagaaat

SEQ ID NO: 146211 - DNA, 25 bp, Artificial
  probe
  misc_feature (1)..(25): SEQ ID NO: 2006; WAN024D75_at; Start 502; Stop 526
tatcctcaggacaccctaaaagagg

SEQ ID NO: 146212 - DNA, 25 bp, Artificial
  probe
  misc_feature (1)..(25): SEQ ID NO: 2006; WAN024D75_at; Start 326; Stop 350
cagttgagcatttaccatttgagga

SEQ ID NO: 146213 - DNA, 25 bp, Artificial
  probe
  misc_feature (1)..(25): SEQ ID NO: 2006; WAN024D75_at; Start 822; Stop 846
tctttgttggtcttcatctgcagcc

SEQ ID NO: 146214 - DNA, 25 bp, Artificial
  probe
  misc_feature (1)..(25): SEQ ID NO: 2006; WAN024D75_at; Start 358; Stop 382
tattgggaggaatttagacagatgc

SEQ ID NO: 146215 - DNA, 25 bp, Artificial
  probe
  misc_feature (1)..(25): SEQ ID NO: 2006; WAN024D75_at; Start 215; Stop 239
tggagagccaccgttctaaaacaac

SEQ ID NO: 146216 - DNA, 25 bp, Artificial
  probe
  misc_feature (1)..(25): SEQ ID NO: 2006; WAN024D75_at; Start 157; Stop 181
cagttgttgcgccacttggctaata

SEQ ID NO: 146217 - DNA, 25 bp, Artificial
  probe
  misc_feature (1)..(25): SEQ ID NO: 2006; WAN024D75_at; Start 871; Stop 895
catgcggtctatcaggagacgcctt

SEQ ID NO: 146218 - DNA, 25 bp, Artificial
  probe
  misc_feature (1)..(25): SEQ ID NO: 2006; WAN024D75_at; Start 450; Stop 474
tctgcgctatggtgtagaaaaatac

SEQ ID NO: 146219 - DNA, 25 bp, Artificial
  probe
  misc_feature (1)..(25): SEQ ID NO: 2006; WAN024D75_at; Start 435; Stop 459
tcaggctgggctttatctgcgctat

SEQ ID NO: 146220 - DNA, 25 bp, Artificial
  probe
  misc_feature (1)..(25): SEQ ID NO: 2006; WAN024D75_at; Start 26; Stop 50
tgccagctgttgagattttacggac

SEQ ID NO: 146221 - DNA, 25 bp, Artificial
  probe
  misc_feature (1)..(25): SEQ ID NO: 2006; WAN024D75_at; Start 570; Stop 594
tcattcacggcacacggagatttct

SEQ ID NO: 146222 - DNA, 25 bp, Artificial
  probe
  misc_feature (1)..(25): SEQ ID NO: 2006; WAN024D75_at; Start 10; Stop 34
cgaattgataaaaaattgccagctg

SEQ ID NO: 146223 - DNA, 25 bp, Artificial
  probe
  misc_feature (1)..(25): SEQ ID NO: 1577; WAN024D76_at; Start 130; Stop 154
gaagttccccatttaatagataatg

SEQ ID NO: 146224 - DNA, 25 bp, Artificial
  probe
  misc_feature (1)..(25): SEQ ID NO: 1577; WAN024D76_at; Start 240; Stop 264
cgatcatcttgtgataaagagcttt

SEQ ID NO: 146225 - DNA, 25 bp, Artificial
  probe
  misc_feature (1)..(25): SEQ ID NO: 1577; WAN024D76_at; Start 56; Stop 80
tccatgagaacaccacgttcagtcc

SEQ ID NO: 146226 - DNA, 25 bp, Artificial
  probe
  misc_feature (1)..(25): SEQ ID NO: 1577; WAN024D76_at; Start 264; Stop 288
tttgttcttcagttggttccaatcg

SEQ ID NO: 146227 - DNA, 25 bp, Artificial
  probe
  misc_feature (1)..(25): SEQ ID NO: 1577; WAN024D76_at; Start 188; Stop 212
gatggttcaacaacgtgaggatgcc

SEQ ID NO: 146228 - DNA, 25 bp, Artificial
  probe
  misc_feature (1)..(25): SEQ ID NO: 1577; WAN024D76_at; Start 35; Stop 59
tccttcttcttgatggtgacatcca

SEQ ID NO: 146229 - DNA, 25 bp, Artificial
  probe
  misc_feature (1)..(25): SEQ ID NO: 1577; WAN024D76_at; Start 164; Stop 188
tctccatctttttcaaccgtttcag

SEQ ID NO: 146230 - DNA, 25 bp, Artificial
  probe
  misc_feature (1)..(25): SEQ ID NO: 1577; WAN024D76_at; Start 192; Stop 216
gttcaacaacgtgaggatgccctcc

SEQ ID NO: 146231 - DNA, 25 bp, Artificial
  probe
  misc_feature (1)..(25): SEQ ID NO: 1577; WAN024D76_at; Start 116; Stop 140
cgttgattggaaatgaagttcccca

SEQ ID NO: 146232 - DNA, 25 bp, Artificial
  probe
  misc_feature (1)..(25): SEQ ID NO: 1577; WAN024D76_at; Start 72; Stop 96
gttcagtccacttagcattctcttc

SEQ ID NO: 146233 - DNA, 25 bp, Artificial
  probe
  misc_feature (1)..(25): SEQ ID NO: 1577; WAN024D76_at; Start 328; Stop 352
tgcttccttctctgcccgttcaatt

SEQ ID NO: 146234 - DNA, 25 bp, Artificial
  probe
  misc_feature (1)..(25): SEQ ID NO: 1577; WAN024D76_at; Start 103; Stop 127
catagattcaattcgttgattggaa

SEQ ID NO: 146235 - DNA, 25 bp, Artificial
  probe
  misc_feature (1)..(25): SEQ ID NO: 1577; WAN024D76_at; Start 198; Stop 222
caacgtgaggatgccctccaaagat

SEQ ID NO: 146236 - DNA, 25 bp, Artificial
  probe
  misc_feature (1)..(25): SEQ ID NO: 1577; WAN024D76_at; Start 338; Stop 362
tctgcccgttcaatttcaaccttca

SEQ ID NO: 146237 - DNA, 25 bp, Artificial
  probe
  misc_feature (1)..(25): SEQ ID NO: 1577; WAN024D76_at; Start 278; Stop 302
ggttccaatcgatactcaacaccca

SEQ ID NO: 146238 - DNA, 25 bp, Artificial
  probe
  misc_feature (1)..(25): SEQ ID NO: 1577; WAN024D76_at; Start 299; Stop 323
cccatctgaagcatgataatggtga

SEQ ID NO: 146239 - DNA, 25 bp, Artificial
  probe
  misc_feature (1)..(25): SEQ ID NO: 1577; WAN024D76_at; Start 2; Stop 26
tgagctttagctgttccgatagttg

SEQ ID NO: 146240 - DNA, 25 bp, Artificial
  probe
  misc_feature (1)..(25): SEQ ID NO: 1577; WAN024D76_at; Start 229; Stop 253
cgctcccaaatcgatcatcttgtga

SEQ ID NO: 146241 - DNA, 25 bp, Artificial
  probe
  misc_feature (1)..(25): SEQ ID NO: 1577; WAN024D76_at; Start 23; Stop 47
gttgtttttccatccttcttcttga

SEQ ID NO: 146242 - DNA, 25 bp, Artificial
  probe
  misc_feature (1)..(25): SEQ ID NO: 1577; WAN024D76_at; Start 45; Stop 69
tgatggtgacatccatgagaacacc

SEQ ID NO: 146243 - DNA, 25 bp, Artificial
  probe
  misc_feature (1)..(25): SEQ ID NO: 1577; WAN024D76_at; Start 321; Stop 345
tgatatctgcttccttctctgcccg

SEQ ID NO: 146244 - DNA, 25 bp, Artificial
  probe
  misc_feature (1)..(25): SEQ ID NO: 1577; WAN024D76_at; Start 84; Stop 108
tagcattctcttcatctcccataga

SEQ ID NO: 146245 - DNA, 25 bp, Artificial
  probe
  misc_feature (1)..(25): SEQ ID NO: 1577; WAN024D76_at; Start 255; Stop 279
aaagagctttttgttcttcagttgg

SEQ ID NO: 146246 - DNA, 25 bp, Artificial
  probe
  misc_feature (1)..(25): SEQ ID NO: 1577; WAN024D76_at; Start 207; Stop 231
gatgccctccaaagataatatccgc

SEQ ID NO: 146247 - DNA, 25 bp, Artificial
  probe
  misc_feature (1)..(25): SEQ ID NO: 1577; WAN024D76_at; Start 148; Stop 172
gataatgagtttcttatctccatct

SEQ ID NO: 146248 - DNA, 25 bp, Artificial
  probe
  misc_feature (1)..(25): SEQ ID NO: 1577; WAN024D76_at; Start 50; Stop 74
gtgacatccatgagaacaccacgtt

SEQ ID NO: 146249 - DNA, 25 bp, Artificial
  probe
  misc_feature (1)..(25): SEQ ID NO: 1577; WAN024D76_at; Start 10; Stop 34
agctgttccgatagttgtttttcca

SEQ ID NO: 146250 - DNA, 25 bp, Artificial
  probe
  misc_feature (1)..(25): SEQ ID NO: 1577; WAN024D76_at; Start 177; Stop 201
caaccgtttcagatggttcaacaac

SEQ ID NO: 146251 - DNA, 25 bp, Artificial
  probe
  misc_feature (1)..(25): SEQ ID NO: 1577; WAN024D76_at; Start 220; Stop 244
gataatatccgctcccaaatcgatc

SEQ ID NO: 146252 - DNA, 25 bp, Artificial
  probe
  misc_feature (1)..(25): SEQ ID NO: 1577; WAN024D76_at; Start 290; Stop 314
tactcaacacccatctgaagcatga

SEQ ID NO: 146253 - DNA, 25 bp, Artificial
  probe
  misc_feature (1)..(25): SEQ ID NO: 1577; WAN024D76_at; Start 354; Stop 378
caaccttcatcttatcttcgtttaa

SEQ ID NO: 146254 - DNA, 25 bp, Artificial
  probe
  misc_feature (1)..(25): SEQ ID NO: 1577; WAN024D76_at; Start 63; Stop 87
gaacaccacgttcagtccacttagc

SEQ ID NO: 146255 - DNA, 25 bp, Artificial
  probe
  misc_feature (1)..(25): SEQ ID NO: 1577; WAN024D76_at; Start 310; Stop 334
catgataatggtgatatctgcttcc

SEQ ID NO: 146256 - DNA, 25 bp, Artificial
  probe
  misc_feature (1)..(25): SEQ ID NO: 1577; WAN024D76_at; Start 96; Stop 120
catctcccatagattcaattcgttg

SEQ ID NO: 146257 - DNA, 25 bp, Artificial
  probe
  misc_feature (1)..(25): SEQ ID NO: 2357; WAN024D77_at; Start 2; Stop 26
tggatgctattaaggaggcaggtta

SEQ ID NO: 146258 - DNA, 25 bp, Artificial
  probe
  misc_feature (1)..(25): SEQ ID NO: 2357; WAN024D77_at; Start 20; Stop 44
caggttatcatgtgctggatttagc

SEQ ID NO: 146259 - DNA, 25 bp, Artificial
  probe
  misc_feature (1)..(25): SEQ ID NO: 2357; WAN024D77_at; Start 28; Stop 52
catgtgctggatttagctcataatc

SEQ ID NO: 146260 - DNA, 25 bp, Artificial
  probe
  misc_feature (1)..(25): SEQ ID NO: 2357; WAN024D77_at; Start 125; Stop 149
tcggagtttatacgcacgaaccacg

SEQ ID NO: 146261 - DNA, 25 bp, Artificial
  probe
  misc_feature (1)..(25): SEQ ID NO: 2357; WAN024D77_at; Start 354; Stop 378
gggtgttgagtatcgattggaacca

SEQ ID NO: 146262 - DNA, 25 bp, Artificial
  probe
  misc_feature (1)..(25): SEQ ID NO: 2357; WAN024D77_at; Start 12; Stop 36
taaggaggcaggttatcatgtgctg

SEQ ID NO: 146263 - DNA, 25 bp, Artificial
  probe
  misc_feature (1)..(25): SEQ ID NO: 2357; WAN024D77_at; Start 309; Stop 333
acgggcagagaaggaagcagatatc

SEQ ID NO: 146264 - DNA, 25 bp, Artificial
  probe
  misc_feature (1)..(25): SEQ ID NO: 2357; WAN024D77_at; Start 322; Stop 346
gaagcagatatcaccattatcatgc

SEQ ID NO: 146265 - DNA, 25 bp, Artificial
  probe
  misc_feature (1)..(25): SEQ ID NO: 2357; WAN024D77_at; Start 159; Stop 183
tccgctggtcattaaggaagtgaat

SEQ ID NO: 146266 - DNA, 25 bp, Artificial
  probe
  misc_feature (1)..(25): SEQ ID NO: 2357; WAN024D77_at; Start 109; Stop 133
gctggaatcactccaatcggagttt

SEQ ID NO: 146267 - DNA, 25 bp, Artificial
  probe
  misc_feature (1)..(25): SEQ ID NO: 2357; WAN024D77_at; Start 373; Stop 397
gaaccaactgaagaacaaaaagctc

SEQ ID NO: 146268 - DNA, 25 bp, Artificial
  probe
  misc_feature (1)..(25): SEQ ID NO: 2357; WAN024D77_at; Start 246; Stop 270
tcaggaagactataatcgttatctt

SEQ ID NO: 146269 - DNA, 25 bp, Artificial
  probe
  misc_feature (1)..(25): SEQ ID NO: 2357; WAN024D77_at; Start 127; Stop 151
ggagtttatacgcacgaaccacgtg

SEQ ID NO: 146270 - DNA, 25 bp, Artificial
  probe
  misc_feature (1)..(25): SEQ ID NO: 2357; WAN024D77_at; Start 43; Stop 67
gctcataatcatattttggattcgc

SEQ ID NO: 146271 - DNA, 25 bp, Artificial
  probe
  misc_feature (1)..(25): SEQ ID NO: 2357; WAN024D77_at; Start 63; Stop 87
ttcgcaaattgagggagttatttca

SEQ ID NO: 146272 - DNA, 25 bp, Artificial
  probe
  misc_feature (1)..(25): SEQ ID NO: 2357; WAN024D77_at; Start 6; Stop 30
tgctattaaggaggcaggttatcat

SEQ ID NO: 146273 - DNA, 25 bp, Artificial
  probe
  misc_feature (1)..(25): SEQ ID NO: 2357; WAN024D77_at; Start 367; Stop 391
cgattggaaccaactgaagaacaaa

SEQ ID NO: 146274 - DNA, 25 bp, Artificial
  probe
  misc_feature (1)..(25): SEQ ID NO: 2357; WAN024D77_at; Start 119; Stop 143
ctccaatcggagtttatacgcacga

SEQ ID NO: 146275 - DNA, 25 bp, Artificial
  probe
  misc_feature (1)..(25): SEQ ID NO: 2357; WAN024D77_at; Start 348; Stop 372
tcagatgggtgttgagtatcgattg

SEQ ID NO: 146276 - DNA, 25 bp, Artificial
  probe
  misc_feature (1)..(25): SEQ ID NO: 2357; WAN024D77_at; Start 52; Stop 76
catattttggattcgcaaattgagg

SEQ ID NO: 146277 - DNA, 25 bp, Artificial
  probe
  misc_feature (1)..(25): SEQ ID NO: 2357; WAN024D77_at; Start 377; Stop 401
caactgaagaacaaaaagctcttta

SEQ ID NO: 146278 - DNA, 25 bp, Artificial
  probe
  misc_feature (1)..(25): SEQ ID NO: 2357; WAN024D77_at; Start 388; Stop 412
caaaaagctctttatcacaagatga

SEQ ID NO: 146279 - DNA, 25 bp, Artificial
  probe
  misc_feature (1)..(25): SEQ ID NO: 2357; WAN024D77_at; Start 204; Stop 228
agcctattcctatggtttcaatgga

SEQ ID NO: 146280 - DNA, 25 bp, Artificial
  probe
  misc_feature (1)..(25): SEQ ID NO: 2357; WAN024D77_at; Start 364; Stop 388
tatcgattggaaccaactgaagaac

SEQ ID NO: 146281 - DNA, 25 bp, Artificial
  probe
  misc_feature (1)..(25): SEQ ID NO: 2357; WAN024D77_at; Start 217; Stop 241
ggtttcaatggaattgagcagtata

SEQ ID NO: 146282 - DNA, 25 bp, Artificial
  probe
  misc_feature (1)..(25): SEQ ID NO: 2357; WAN024D77_at; Start 313; Stop 337
gcagagaaggaagcagatatcacca

SEQ ID NO: 146283 - DNA, 25 bp, Artificial
  probe
  misc_feature (1)..(25): SEQ ID NO: 2357; WAN024D77_at; Start 122; Stop 146
caatcggagtttatacgcacgaacc

SEQ ID NO: 146284 - DNA, 25 bp, Artificial
  probe
  misc_feature (1)..(25): SEQ ID NO: 2357; WAN024D77_at; Start 33; Stop 57
gctggatttagctcataatcatatt

SEQ ID NO: 146285 - DNA, 25 bp, Artificial
  probe
  misc_feature (1)..(25): SEQ ID NO: 2357; WAN024D77_at; Start 58; Stop 82
ttggattcgcaaattgagggagtta

SEQ ID NO: 146286 - DNA, 25 bp, Artificial
  probe
  misc_feature (1)..(25): SEQ ID NO: 2357; WAN024D77_at; Start 212; Stop 236
cctatggtttcaatggaattgagca

SEQ ID NO: 146287 - DNA, 25 bp, Artificial
  probe
  misc_feature (1)..(25): SEQ ID NO: 2357; WAN024D77_at; Start 106; Stop 130
aaagctggaatcactccaatcggag

SEQ ID NO: 146288 - DNA, 25 bp, Artificial
  probe
  misc_feature (1)..(25): SEQ ID NO: 2357; WAN024D77_at; Start 420; Stop 444
gggagcggatattatctttggaggg

SEQ ID NO: 146289 - DNA, 25 bp, Artificial
  probe
  misc_feature (1)..(25): SEQ ID NO: 2357; WAN024D77_at; Start 316; Stop 340
gagaaggaagcagatatcaccatta

SEQ ID NO: 146290 - DNA, 25 bp, Artificial
  probe
  misc_feature (1)..(25): SEQ ID NO: 2357; WAN024D77_at; Start 360; Stop 384
tgagtatcgattggaaccaactgaa

SEQ ID NO: 146291 - DNA, 25 bp, Artificial
  probe
  misc_feature (1)..(25): SEQ ID NO: 2586; WAN024D78_at; Start 214; Stop 238
tatattttggaagattttatagagg

SEQ ID NO: 146292 - DNA, 25 bp, Artificial
  probe
  misc_feature (1)..(25): SEQ ID NO: 2586; WAN024D78_at; Start 276; Stop 300
ggaacgaattgatacagcctataaa

SEQ ID NO: 146293 - DNA, 25 bp, Artificial
  probe
  misc_feature (1)..(25): SEQ ID NO: 2586; WAN024D78_at; Start 290; Stop 314
cagcctataaagaaatgaatgaaca

SEQ ID NO: 146294 - DNA, 25 bp, Artificial
  probe
  misc_feature (1)..(25): SEQ ID NO: 2586; WAN024D78_at; Start 141; Stop 165
tcctacttgggtcaatcgaacacca

SEQ ID NO: 146295 - DNA, 25 bp, Artificial
  probe
  misc_feature (1)..(25): SEQ ID NO: 2586; WAN024D78_at; Start 250; Stop 274
cgtgaccagttagatgaagcgacta

SEQ ID NO: 146296 - DNA, 25 bp, Artificial
  probe
  misc_feature (1)..(25): SEQ ID NO: 2586; WAN024D78_at; Start 187; Stop 211
ggatatcccttgtatcattaccaaa

SEQ ID NO: 146297 - DNA, 25 bp, Artificial
  probe
  misc_feature (1)..(25): SEQ ID NO: 2586; WAN024D78_at; Start 184; Stop 208
gaaggatatcccttgtatcattacc

SEQ ID NO: 146298 - DNA, 25 bp, Artificial
  probe
  misc_feature (1)..(25): SEQ ID NO: 2586; WAN024D78_at; Start 174; Stop 198
cttttcaccagaaggatatcccttg

SEQ ID NO: 146299 - DNA, 25 bp, Artificial
  probe
  misc_feature (1)..(25): SEQ ID NO: 2586; WAN024D78_at; Start 110; Stop 134
gaaaaacaactatcggaacagctaa

SEQ ID NO: 146300 - DNA, 25 bp, Artificial
  probe
  misc_feature (1)..(25): SEQ ID NO: 2586; WAN024D78_at; Start 55; Stop 79
gctaagtggactgaacgtggtgttc

SEQ ID NO: 146301 - DNA, 25 bp, Artificial
  probe
  misc_feature (1)..(25): SEQ ID NO: 2586; WAN024D78_at; Start 193; Stop 217
cccttgtatcattaccaaacttata

SEQ ID NO: 146302 - DNA, 25 bp, Artificial
  probe
  misc_feature (1)..(25): SEQ ID NO: 2586; WAN024D78_at; Start 179; Stop 203
caccagaaggatatcccttgtatca

SEQ ID NO: 146303 - DNA, 25 bp, Artificial
  probe
  misc_feature (1)..(25): SEQ ID NO: 2586; WAN024D78_at; Start 34; Stop 58
tctatgggagatgaagagaatgcta

SEQ ID NO: 146304 - DNA, 25 bp, Artificial
  probe
  misc_feature (1)..(25): SEQ ID NO: 2586; WAN024D78_at; Start 106; Stop 130
gatggaaaaacaactatcggaacag

SEQ ID NO: 146305 - DNA, 25 bp, Artificial
  probe
  misc_feature (1)..(25): SEQ ID NO: 2586; WAN024D78_at; Start 46; Stop 70
gaagagaatgctaagtggactgaac

SEQ ID NO: 146306 - DNA, 25 bp, Artificial
  probe
  misc_feature (1)..(25): SEQ ID NO: 2586; WAN024D78_at; Start 68; Stop 92
aacgtggtgttctcatggatgtcac

SEQ ID NO: 146307 - DNA, 25 bp, Artificial
  probe
  misc_feature (1)..(25): SEQ ID NO: 2586; WAN024D78_at; Start 169; Stop 193
ggaaccttttcaccagaaggatatc

SEQ ID NO: 146308 - DNA, 25 bp, Artificial
  probe
  misc_feature (1)..(25): SEQ ID NO: 2586; WAN024D78_at; Start 202; Stop 226
cattaccaaacttatattttggaag

SEQ ID NO: 146309 - DNA, 25 bp, Artificial
  probe
  misc_feature (1)..(25): SEQ ID NO: 2586; WAN024D78_at; Start 62; Stop 86
ggactgaacgtggtgttctcatgga

SEQ ID NO: 146310 - DNA, 25 bp, Artificial
  probe
  misc_feature (1)..(25): SEQ ID NO: 2586; WAN024D78_at; Start 2; Stop 26
tggggaacttcatttccaatcaacg

SEQ ID NO: 146311 - DNA, 25 bp, Artificial
  probe
  misc_feature (1)..(25): SEQ ID NO: 2586; WAN024D78_at; Start 297; Stop 321
taaagaaatgaatgaacatgtggga

SEQ ID NO: 146312 - DNA, 25 bp, Artificial
  probe
  misc_feature (1)..(25): SEQ ID NO: 2586; WAN024D78_at; Start 139; Stop 163
catcctacttgggtcaatcgaacac

SEQ ID NO: 146313 - DNA, 25 bp, Artificial
  probe
  misc_feature (1)..(25): SEQ ID NO: 2586; WAN024D78_at; Start 51; Stop 75
gaatgctaagtggactgaacgtggt

SEQ ID NO: 146314 - DNA, 25 bp, Artificial
  probe
  misc_feature (1)..(25): SEQ ID NO: 2586; WAN024D78_at; Start 311; Stop 335
aacatgtgggattgaagtggtatta

SEQ ID NO: 146315 - DNA, 25 bp, Artificial
  probe
  misc_feature (1)..(25): SEQ ID NO: 2586; WAN024D78_at; Start 57; Stop 81
taagtggactgaacgtggtgttctc

SEQ ID NO: 146316 - DNA, 25 bp, Artificial
  probe
  misc_feature (1)..(25): SEQ ID NO: 2586; WAN024D78_at; Start 41; Stop 65
gagatgaagagaatgctaagtggac

SEQ ID NO: 146317 - DNA, 25 bp, Artificial
  probe
  misc_feature (1)..(25): SEQ ID NO: 2586; WAN024D78_at; Start 108; Stop 132
tggaaaaacaactatcggaacagct

SEQ ID NO: 146318 - DNA, 25 bp, Artificial
  probe
  misc_feature (1)..(25): SEQ ID NO: 2586; WAN024D78_at; Start 286; Stop 310
gatacagcctataaagaaatgaatg

SEQ ID NO: 146319 - DNA, 25 bp, Artificial
  probe
  misc_feature (1)..(25): SEQ ID NO: 2586; WAN024D78_at; Start 247; Stop 271
catcgtgaccagttagatgaagcga

SEQ ID NO: 146320 - DNA, 25 bp, Artificial
  probe
  misc_feature (1)..(25): SEQ ID NO: 2586; WAN024D78_at; Start 73; Stop 97
ggtgttctcatggatgtcaccatca

SEQ ID NO: 146321 - DNA, 25 bp, Artificial
  probe
  misc_feature (1)..(25): SEQ ID NO: 2586; WAN024D78_at; Start 240; Stop 264
tggcagtcatcgtgaccagttagat

SEQ ID NO: 146322 - DNA, 25 bp, Artificial
  probe
  misc_feature (1)..(25): SEQ ID NO: 2586; WAN024D78_at; Start 148; Stop 172
tgggtcaatcgaacaccaaagggaa

SEQ ID NO: 146323 - DNA, 25 bp, Artificial
  probe
  misc_feature (1)..(25): SEQ ID NO: 2586; WAN024D78_at; Start 80; Stop 104
tcatggatgtcaccatcaagaagaa

SEQ ID NO: 146324 - DNA, 25 bp, Artificial
  probe
  misc_feature (1)..(25): SEQ ID NO: 2586; WAN024D78_at; Start 305; Stop 329
tgaatgaacatgtgggattgaagtg

SEQ ID NO: 146325 - DNA, 25 bp, Artificial
  probe
  misc_feature (1)..(25): SEQ ID NO: 5805; WAN024D79_at; Start 2; Stop 26
tgttcaatgtaaaatggactaggat

SEQ ID NO: 146326 - DNA, 25 bp, Artificial
  probe
  misc_feature (1)..(25): SEQ ID NO: 5805; WAN024D79_at; Start 16; Stop 40
tggactaggatagggaaaaaaatgc

SEQ ID NO: 146327 - DNA, 25 bp, Artificial
  probe
  misc_feature (1)..(25): SEQ ID NO: 5805; WAN024D79_at; Start 6; Stop 30
caatgtaaaatggactaggataggg

SEQ ID NO: 146328 - DNA, 25 bp, Artificial
  probe
  misc_feature (1)..(25): SEQ ID NO: 5805; WAN024D79_at; Start 20; Stop 44
ctaggatagggaaaaaaatgccaga

SEQ ID NO: 146329 - DNA, 25 bp, Artificial
  probe
  misc_feature (1)..(25): SEQ ID NO: 5805; WAN024D79_at; Start 9; Stop 33
tgtaaaatggactaggatagggaaa

SEQ ID NO: 146330 - DNA, 25 bp, Artificial
  probe
  misc_feature (1)..(25): SEQ ID NO: 5805; WAN024D79_at; Start 19; Stop 43
actaggatagggaaaaaaatgccag

SEQ ID NO: 146331 - DNA, 25 bp, Artificial
  probe
  misc_feature (1)..(25): SEQ ID NO: 5805; WAN024D79_at; Start 15; Stop 39
atggactaggatagggaaaaaaatg

SEQ ID NO: 146332 - DNA, 25 bp, Artificial
  probe
  misc_feature (1)..(25): SEQ ID NO: 5805; WAN024D79_at; Start 3; Stop 27
gttcaatgtaaaatggactaggata

SEQ ID NO: 146333 - DNA, 25 bp, Artificial
  probe
  misc_feature (1)..(25): SEQ ID NO: 5805; WAN024D79_at; Start 5; Stop 29
tcaatgtaaaatggactaggatagg

SEQ ID NO: 146334 - DNA, 25 bp, Artificial
  probe
  misc_feature (1)..(25): SEQ ID NO: 5805; WAN024D79_at; Start 25; Stop 49
atagggaaaaaaatgccagaaaatg

SEQ ID NO: 146335 - DNA, 25 bp, Artificial
  probe
  misc_feature (1)..(25): SEQ ID NO: 5805; WAN024D79_at; Start 4; Stop 28
ttcaatgtaaaatggactaggatag

SEQ ID NO: 146336 - DNA, 25 bp, Artificial
  probe
  misc_feature (1)..(25): SEQ ID NO: 5805; WAN024D79_at; Start 7; Stop 31
aatgtaaaatggactaggataggga

SEQ ID NO: 146337 - DNA, 25 bp, Artificial
  probe
  misc_feature (1)..(25): SEQ ID NO: 5805; WAN024D79_at; Start 21; Stop 45
taggatagggaaaaaaatgccagaa

SEQ ID NO: 146338 - DNA, 25 bp, Artificial
  probe
  misc_feature (1)..(25): SEQ ID NO: 5805; WAN024D79_at; Start 1; Stop 25
ttgttcaatgtaaaatggactagga

SEQ ID NO: 146339 - DNA, 25 bp, Artificial
  probe
  misc_feature (1)..(25): SEQ ID NO: 5805; WAN024D79_at; Start 18; Stop 42
gactaggatagggaaaaaaatgcca

SEQ ID NO: 146340 - DNA, 25 bp, Artificial
  probe
  misc_feature (1)..(25): SEQ ID NO: 5805; WAN024D79_at; Start 8; Stop 32
atgtaaaatggactaggatagggaa

SEQ ID NO: 146341 - DNA, 25 bp, Artificial
  probe
  misc_feature (1)..(25): SEQ ID NO: 5100; WAN024D7A_at; Start 24; Stop 48
tagagaaagctcttcgatccctcgc

SEQ ID NO: 146342 - DNA, 25 bp, Artificial
  probe
  misc_feature (1)..(25): SEQ ID NO: 5100; WAN024D7A_at; Start 159; Stop 183
tatttccagcaagctgtgggagaaa

SEQ ID NO: 146343 - DNA, 25 bp, Artificial
  probe
  misc_feature (1)..(25): SEQ ID NO: 5100; WAN024D7A_at; Start 138; Stop 162
gatagaccagtcaaaatcaagtatt

SEQ ID NO: 146344 - DNA, 25 bp, Artificial
  probe
  misc_feature (1)..(25): SEQ ID NO: 5100; WAN024D7A_at; Start 74; Stop 98
tggacatgctgaaaaccaacaataa

SEQ ID NO: 146345 - DNA, 25 bp, Artificial
  probe
  misc_feature (1)..(25): SEQ ID NO: 5100; WAN024D7A_at; Start 152; Stop 176
aatcaagtatttccagcaagctgtg

SEQ ID NO: 146346 - DNA, 25 bp, Artificial
  probe
  misc_feature (1)..(25): SEQ ID NO: 5100; WAN024D7A_at; Start 44; Stop 68
ctcgccaaaacagggctaagagaca

SEQ ID NO: 146347 - DNA, 25 bp, Artificial
  probe
  misc_feature (1)..(25): SEQ ID NO: 5100; WAN024D7A_at; Start 39; Stop 63
gatccctcgccaaaacagggctaag

SEQ ID NO: 146348 - DNA, 25 bp, Artificial
  probe
  misc_feature (1)..(25): SEQ ID NO: 5100; WAN024D7A_at; Start 142; Stop 166
gaccagtcaaaatcaagtatttcca

SEQ ID NO: 146349 - DNA, 25 bp, Artificial
  probe
  misc_feature (1)..(25): SEQ ID NO: 5100; WAN024D7A_at; Start 145; Stop 169
cagtcaaaatcaagtatttccagca

SEQ ID NO: 146350 - DNA, 25 bp, Artificial
  probe
  misc_feature (1)..(25): SEQ ID NO: 5100; WAN024D7A_at; Start 29; Stop 53
aaagctcttcgatccctcgccaaaa

SEQ ID NO: 146351 - DNA, 25 bp, Artificial
  probe
  misc_feature (1)..(25): SEQ ID NO: 5100; WAN024D7A_at; Start 112; Stop 136
tctgttttttcgacatcgtgcaaaa

SEQ ID NO: 146352 - DNA, 25 bp, Artificial
  probe
  misc_feature (1)..(25): SEQ ID NO: 5100; WAN024D7A_at; Start 37; Stop 61
tcgatccctcgccaaaacagggcta

SEQ ID NO: 146353 - DNA, 25 bp, Artificial
  probe
  misc_feature (1)..(25): SEQ ID NO: 5100; WAN024D7A_at; Start 109; Stop 133
ttttctgttttttcgacatcgtgca

SEQ ID NO: 146354 - DNA, 25 bp, Artificial
  probe
  misc_feature (1)..(25): SEQ ID NO: 5100; WAN024D7A_at; Start 80; Stop 104
tgctgaaaaccaacaataaaaagac

SEQ ID NO: 146355 - DNA, 25 bp, Artificial
  probe
  misc_feature (1)..(25): SEQ ID NO: 5100; WAN024D7A_at; Start 149; Stop 173
caaaatcaagtatttccagcaagct

SEQ ID NO: 146356 - DNA, 25 bp, Artificial
  probe
  misc_feature (1)..(25): SEQ ID NO: 5100; WAN024D7A_at; Start 20; Stop 44
ttcttagagaaagctcttcgatccc

SEQ ID NO: 146357 - DNA, 25 bp, Artificial
  probe
  misc_feature (1)..(25): SEQ ID NO: 5100; WAN024D7A_at; Start 8; Stop 32
tagcctgcatttttcttagagaaag

SEQ ID NO: 146358 - DNA, 25 bp, Artificial
  probe
  misc_feature (1)..(25): SEQ ID NO: 5100; WAN024D7A_at; Start 168; Stop 192
caagctgtgggagaaaaaaaagaca

SEQ ID NO: 146359 - DNA, 25 bp, Artificial
  probe
  misc_feature (1)..(25): SEQ ID NO: 5100; WAN024D7A_at; Start 3; Stop 27
gagattagcctgcatttttcttaga

SEQ ID NO: 146360 - DNA, 25 bp, Artificial
  probe
  misc_feature (1)..(25): SEQ ID NO: 5100; WAN024D7A_at; Start 201; Stop 225
ggaggtgagagcaataatgacatag

SEQ ID NO: 146361 - DNA, 25 bp, Artificial
  probe
  misc_feature (1)..(25): SEQ ID NO: 5100; WAN024D7A_at; Start 121; Stop 145
tcgacatcgtgcaaaaagatagacc

SEQ ID NO: 146362 - DNA, 25 bp, Artificial
  probe
  misc_feature (1)..(25): SEQ ID NO: 5100; WAN024D7A_at; Start 155; Stop 179
caagtatttccagcaagctgtggga

SEQ ID NO: 146363 - DNA, 25 bp, Artificial
  probe
  misc_feature (1)..(25): SEQ ID NO: 5100; WAN024D7A_at; Start 26; Stop 50
gagaaagctcttcgatccctcgcca

SEQ ID NO: 146364 - DNA, 25 bp, Artificial
  probe
  misc_feature (1)..(25): SEQ ID NO: 5100; WAN024D7A_at; Start 128; Stop 152
cgtgcaaaaagatagaccagtcaaa

SEQ ID NO: 146365 - DNA, 25 bp, Artificial
  probe
  misc_feature (1)..(25): SEQ ID NO: 5100; WAN024D7A_at; Start 34; Stop 58
tcttcgatccctcgccaaaacaggg

SEQ ID NO: 146366 - DNA, 25 bp, Artificial
  probe
  misc_feature (1)..(25): SEQ ID NO: 5100; WAN024D7A_at; Start 162; Stop 186
ttccagcaagctgtgggagaaaaaa

SEQ ID NO: 146367 - DNA, 25 bp, Artificial
  probe
  misc_feature (1)..(25): SEQ ID NO: 5100; WAN024D7A_at; Start 123; Stop 147
gacatcgtgcaaaaagatagaccag

SEQ ID NO: 146368 - DNA, 25 bp, Artificial
  probe
  misc_feature (1)..(25): SEQ ID NO: 5100; WAN024D7A_at; Start 198; Stop 222
gaaggaggtgagagcaataatgaca

SEQ ID NO: 146369 - DNA, 25 bp, Artificial
  probe
  misc_feature (1)..(25): SEQ ID NO: 5100; WAN024D7A_at; Start 41; Stop 65
tccctcgccaaaacagggctaagag

SEQ ID NO: 146370 - DNA, 25 bp, Artificial
  probe
  misc_feature (1)..(25): SEQ ID NO: 5100; WAN024D7A_at; Start 118; Stop 142
ttttcgacatcgtgcaaaaagatag

SEQ ID NO: 146371 - DNA, 25 bp, Artificial
  probe
  misc_feature (1)..(25): SEQ ID NO: 5100; WAN024D7A_at; Start 5; Stop 29
gattagcctgcatttttcttagaga

SEQ ID NO: 146372 - DNA, 25 bp, Artificial
  probe
  misc_feature (1)..(25): SEQ ID NO: 5100; WAN024D7A_at; Start 11; Stop 35
cctgcatttttcttagagaaagctc

SEQ ID NO: 146373 - DNA, 25 bp, Artificial
  probe
  misc_feature (1)..(25): SEQ ID NO: 5100; WAN024D7A_at; Start 47; Stop 71
gccaaaacagggctaagagacaggt

SEQ ID NO: 146374 - DNA, 25 bp, Artificial
  probe
  misc_feature (1)..(25): SEQ ID NO: 5100; WAN024D7A_at; Start 125; Stop 149
catcgtgcaaaaagatagaccagtc

SEQ ID NO: 146375 - DNA, 25 bp, Artificial
  probe
  misc_feature (1)..(25): SEQ ID NO: 630; WAN024D7B_at; Start 811; Stop 835
gaattgcaactgaaggtggtggaca

SEQ ID NO: 146376 - DNA, 25 bp, Artificial
  probe
  misc_feature (1)..(25): SEQ ID NO: 630; WAN024D7B_at; Start 143; Stop 167
tattgttggttttcagcatgtccat

SEQ ID NO: 146377 - DNA, 25 bp, Artificial
  probe
  misc_feature (1)..(25): SEQ ID NO: 630; WAN024D7B_at; Start 399; Stop 423
gaagcgaattgctcgggatttgcac

SEQ ID NO: 146378 - DNA, 25 bp, Artificial
  probe
  misc_feature (1)..(25): SEQ ID NO: 630; WAN024D7B_at; Start 852; Stop 876
gttagggagcttagacgacttgagt

SEQ ID NO: 146379 - DNA, 25 bp, Artificial
  probe
  misc_feature (1)..(25): SEQ ID NO: 630; WAN024D7B_at; Start 516; Stop 540
ccagttgcagagtgtcacagctatt

SEQ ID NO: 146380 - DNA, 25 bp, Artificial
  probe
  misc_feature (1)..(25): SEQ ID NO: 630; WAN024D7B_at; Start 661; Stop 685
gatcttagggttagtctcaagcaga

SEQ ID NO: 146381 - DNA, 25 bp, Artificial
  probe
  misc_feature (1)..(25): SEQ ID NO: 630; WAN024D7B_at; Start 91; Stop 115
gactggtctatctttttgcacgatg

SEQ ID NO: 146382 - DNA, 25 bp, Artificial
  probe
  misc_feature (1)..(25): SEQ ID NO: 630; WAN024D7B_at; Start 478; Stop 502
cagcaggctttgaaattggatagag

SEQ ID NO: 146383 - DNA, 25 bp, Artificial
  probe
  misc_feature (1)..(25): SEQ ID NO: 630; WAN024D7B_at; Start 552; Stop 576
ccagaaggatttgcgggttttgctc

SEQ ID NO: 146384 - DNA, 25 bp, Artificial
  probe
  misc_feature (1)..(25): SEQ ID NO: 630; WAN024D7B_at; Start 461; Stop 485
ttttatcgggtatcagtcagcaggc

SEQ ID NO: 146385 - DNA, 25 bp, Artificial
  probe
  misc_feature (1)..(25): SEQ ID NO: 630; WAN024D7B_at; Start 589; Stop 613
ccagttgaactggagcagaagagct

SEQ ID NO: 146386 - DNA, 25 bp, Artificial
  probe
  misc_feature (1)..(25): SEQ ID NO: 630; WAN024D7B_at; Start 292; Stop 316
gccagtttcaagtccttatcaggta

SEQ ID NO: 146387 - DNA, 25 bp, Artificial
  probe
  misc_feature (1)..(25): SEQ ID NO: 630; WAN024D7B_at; Start 431; Stop 455
tcagtcaggagttgtttgcggccca

SEQ ID NO: 146388 - DNA, 25 bp, Artificial
  probe
  misc_feature (1)..(25): SEQ ID NO: 630; WAN024D7B_at; Start 107; Stop 131
tgcacgatgtcgaaaaaacagaaaa

SEQ ID NO: 146389 - DNA, 25 bp, Artificial
  probe
  misc_feature (1)..(25): SEQ ID NO: 630; WAN024D7B_at; Start 76; Stop 100
gaaatacttgattttgactggtcta

SEQ ID NO: 146390 - DNA, 25 bp, Artificial
  probe
  misc_feature (1)..(25): SEQ ID NO: 630; WAN024D7B_at; Start 961; Stop 985
gttgatatccgtattcccctgttag

SEQ ID NO: 146391 - DNA, 25 bp, Artificial
  probe
  misc_feature (1)..(25): SEQ ID NO: 630; WAN024D7B_at; Start 218; Stop 242
gaaaaatgcaggctaatctcaagcg

SEQ ID NO: 146392 - DNA, 25 bp, Artificial
  probe
  misc_feature (1)..(25): SEQ ID NO: 630; WAN024D7B_at; Start 694; Stop 718
aaattgcctaagaaaatcgaggagc

SEQ ID NO: 146393 - DNA, 25 bp, Artificial
  probe
  misc_feature (1)..(25): SEQ ID NO: 630; WAN024D7B_at; Start 573; Stop 597
gctcttgcatttgcgaccagttgaa

SEQ ID NO: 146394 - DNA, 25 bp, Artificial
  probe
  misc_feature (1)..(25): SEQ ID NO: 630; WAN024D7B_at; Start 761; Stop 785
gccatgcccaggcatcttgcctaga

SEQ ID NO: 146395 - DNA, 25 bp, Artificial
  probe
  misc_feature (1)..(25): SEQ ID NO: 630; WAN024D7B_at; Start 415; Stop 439
gatttgcacgatacagtcagtcagg

SEQ ID NO: 146396 - DNA, 25 bp, Artificial
  probe
  misc_feature (1)..(25): SEQ ID NO: 630; WAN024D7B_at; Start 445; Stop 469
tttgcggcccacatgattttatcgg

SEQ ID NO: 146397 - DNA, 25 bp, Artificial
  probe
  misc_feature (1)..(25): SEQ ID NO: 630; WAN024D7B_at; Start 604; Stop 628
cagaagagcttgatagaagggattc

SEQ ID NO: 146398 - DNA, 25 bp, Artificial
  probe
  misc_feature (1)..(25): SEQ ID NO: 630; WAN024D7B_at; Start 865; Stop 889
gacgacttgagttatggactgcgaa

SEQ ID NO: 146399 - DNA, 25 bp, Artificial
  probe
  misc_feature (1)..(25): SEQ ID NO: 630; WAN024D7B_at; Start 778; Stop 802
tgcctagatgtctacctctatcaga

SEQ ID NO: 146400 - DNA, 25 bp, Artificial
  probe
  misc_feature (1)..(25): SEQ ID NO: 630; WAN024D7B_at; Start 364; Stop 388
cttgctcaggaagaggaaatcatcg

SEQ ID NO: 146401 - DNA, 25 bp, Artificial
  probe
  misc_feature (1)..(25): SEQ ID NO: 630; WAN024D7B_at; Start 190; Stop 214
tggcgagggatcgaagagctttctc

SEQ ID NO: 146402 - DNA, 25 bp, Artificial
  probe
  misc_feature (1)..(25): SEQ ID NO: 630; WAN024D7B_at; Start 796; Stop 820
tatcagacagatgttgaattgcaac

SEQ ID NO: 146403 - DNA, 25 bp, Artificial
  probe
  misc_feature (1)..(25): SEQ ID NO: 630; WAN024D7B_at; Start 54; Stop 78
ttttttctcccacagcttgctggaa

SEQ ID NO: 146404 - DNA, 25 bp, Artificial
  probe
  misc_feature (1)..(25): SEQ ID NO: 630; WAN024D7B_at; Start 279; Stop 303
tccagatttggatgccagtttcaag

SEQ ID NO: 146405 - DNA, 25 bp, Artificial
  probe
  misc_feature (1)..(25): SEQ ID NO: 630; WAN024D7B_at; Start 677; Stop 701
tcaagcagaatatgacgaaattgcc

SEQ ID NO: 146406 - DNA, 25 bp, Artificial
  probe
  misc_feature (1)..(25): SEQ ID NO: 630; WAN024D7B_at; Start 643; Stop 667
gagcttgaggacaagagtgatctta

SEQ ID NO: 146407 - DNA, 25 bp, Artificial
  probe
  misc_feature (1)..(25): SEQ ID NO: 630; WAN024D7B_at; Start 175; Stop 199
ctcttagccctgttttggcgaggga

SEQ ID NO: 146408 - DNA, 25 bp, Artificial
  probe
  misc_feature (1)..(25): SEQ ID NO: 630; WAN024D7B_at; Start 726; Stop 750
ccgtatcctgcaagagttgattagc

SEQ ID NO: 146409 - DNA, 25 bp, Artificial
  probe
  misc_feature (1)..(25): SEQ ID NO: 976; WAN024D7C_at; Start 662; Stop 686
caacggcttcaggtcaataccgggt

SEQ ID NO: 146410 - DNA, 25 bp, Artificial
  probe
  misc_feature (1)..(25): SEQ ID NO: 976; WAN024D7C_at; Start 333; Stop 357
cattgctttcccagacactttgatt

SEQ ID NO: 146411 - DNA, 25 bp, Artificial
  probe
  misc_feature (1)..(25): SEQ ID NO: 976; WAN024D7C_at; Start 147; Stop 171
ccaaaaaatggctcaggcttctgaa

SEQ ID NO: 146412 - DNA, 25 bp, Artificial
  probe
  misc_feature (1)..(25): SEQ ID NO: 976; WAN024D7C_at; Start 677; Stop 701
aataccgggtcattgtcattcatgg

SEQ ID NO: 146413 - DNA, 25 bp, Artificial
  probe
  misc_feature (1)..(25): SEQ ID NO: 976; WAN024D7C_at; Start 610; Stop 634
gttcgtactgaaaagaaggccacca

SEQ ID NO: 146414 - DNA, 25 bp, Artificial
  probe
  misc_feature (1)..(25): SEQ ID NO: 976; WAN024D7C_at; Start 392; Stop 416
tctttaattggcgtgatcagggcga

SEQ ID NO: 146415 - DNA, 25 bp, Artificial
  probe
  misc_feature (1)..(25): SEQ ID NO: 976; WAN024D7C_at; Start 696; Stop 720
tcatgggaatgctcctgaaaaggct

SEQ ID NO: 146416 - DNA, 25 bp, Artificial
  probe
  misc_feature (1)..(25): SEQ ID NO: 976; WAN024D7C_at; Start 709; Stop 733
cctgaaaaggctgaagaattgcgtc

SEQ ID NO: 146417 - DNA, 25 bp, Artificial
  probe
  misc_feature (1)..(25): SEQ ID NO: 976; WAN024D7C_at; Start 177; Stop 201
taagaccagtcaaccaagtattgcc

SEQ ID NO: 146418 - DNA, 25 bp, Artificial
  probe
  misc_feature (1)..(25): SEQ ID NO: 976; WAN024D7C_at; Start 126; Stop 150
tctgtctgctgaggaattttaccaa

SEQ ID NO: 146419 - DNA, 25 bp, Artificial
  probe
  misc_feature (1)..(25): SEQ ID NO: 976; WAN024D7C_at; Start 319; Stop 343
tatgagggcttaaccattgctttcc

SEQ ID NO: 146420 - DNA, 25 bp, Artificial
  probe
  misc_feature (1)..(25): SEQ ID NO: 976; WAN024D7C_at; Start 8; Stop 32
tagctgttttcacagattcctctgc

SEQ ID NO: 146421 - DNA, 25 bp, Artificial
  probe
  misc_feature (1)..(25): SEQ ID NO: 976; WAN024D7C_at; Start 779; Stop 803
catttggtagtgtcattggaacgca

SEQ ID NO: 146422 - DNA, 25 bp, Artificial
  probe
  misc_feature (1)..(25): SEQ ID NO: 976; WAN024D7C_at; Start 532; Stop 556
gccattttgggcaatttgcttagca

SEQ ID NO: 146423 - DNA, 25 bp, Artificial
  probe
  misc_feature (1)..(25): SEQ ID NO: 976; WAN024D7C_at; Start 819; Stop 843
tattgctctgggttatattccagtg

SEQ ID NO: 146424 - DNA, 25 bp, Artificial
  probe
  misc_feature (1)..(25): SEQ ID NO: 976; WAN024D7C_at; Start 232; Stop 256
gaacaaggctatacacatgccttgg

SEQ ID NO: 146425 - DNA, 25 bp, Artificial
  probe
  misc_feature (1)..(25): SEQ ID NO: 976; WAN024D7C_at; Start 217; Stop 241
ttaacttcgctcaaagaacaaggct

SEQ ID NO: 146426 - DNA, 25 bp, Artificial
  probe
  misc_feature (1)..(25): SEQ ID NO: 976; WAN024D7C_at; Start 428; Stop 452
gcattcaggataagctagccattca

SEQ ID NO: 146427 - DNA, 25 bp, Artificial
  probe
  misc_feature (1)..(25): SEQ ID NO: 976; WAN024D7C_at; Start 583; Stop 607
caaggtgtgattgaagtttacgaaa

SEQ ID NO: 146428 - DNA, 25 bp, Artificial
  probe
  misc_feature (1)..(25): SEQ ID NO: 976; WAN024D7C_at; Start 460; Stop 484
cgtacgtcagcctttatcatggtag

SEQ ID NO: 146429 - DNA, 25 bp, Artificial
  probe
  misc_feature (1)..(25): SEQ ID NO: 976; WAN024D7C_at; Start 162; Stop 186
ggcttctgaattgcctaagaccagt

SEQ ID NO: 146430 - DNA, 25 bp, Artificial
  probe
  misc_feature (1)..(25): SEQ ID NO: 976; WAN024D7C_at; Start 64; Stop 88
gacttgtttgtcttggatattcctg

SEQ ID NO: 146431 - DNA, 25 bp, Artificial
  probe
  misc_feature (1)..(25): SEQ ID NO: 976; WAN024D7C_at; Start 493; Stop 517
gatcatttggtaaaaggtggacgcc

SEQ ID NO: 146432 - DNA, 25 bp, Artificial
  probe
  misc_feature (1)..(25): SEQ ID NO: 976; WAN024D7C_at; Start 351; Stop 375
tttgattacaagtgctcccctaggc

SEQ ID NO: 146433 - DNA, 25 bp, Artificial
  probe
  misc_feature (1)..(25): SEQ ID NO: 976; WAN024D7C_at; Start 755; Stop 779
tgggttcggatgtttcacttgctac

SEQ ID NO: 146434 - DNA, 25 bp, Artificial
  probe
  misc_feature (1)..(25): SEQ ID NO: 976; WAN024D7C_at; Start 115; Stop 139
gaaggcatcaatctgtctgctgagg

SEQ ID NO: 146435 - DNA, 25 bp, Artificial
  probe
  misc_feature (1)..(25): SEQ ID NO: 976; WAN024D7C_at; Start 99; Stop 123
tggtgaggaatatgtcgaaggcatc

SEQ ID NO: 146436 - DNA, 25 bp, Artificial
  probe
  misc_feature (1)..(25): SEQ ID NO: 976; WAN024D7C_at; Start 406; Stop 430
gatcagggcgatgattttgccagca

SEQ ID NO: 146437 - DNA, 25 bp, Artificial
  probe
  misc_feature (1)..(25): SEQ ID NO: 976; WAN024D7C_at; Start 304; Stop 328
tatatggtcgatgactatgagggct

SEQ ID NO: 146438 - DNA, 25 bp, Artificial
  probe
  misc_feature (1)..(25): SEQ ID NO: 976; WAN024D7C_at; Start 791; Stop 815
tcattggaacgcacctaggagcagg

SEQ ID NO: 146439 - DNA, 25 bp, Artificial
  probe
  misc_feature (1)..(25): SEQ ID NO: 976; WAN024D7C_at; Start 650; Stop 674
ttatcaaggaaacaacggcttcagg

SEQ ID NO: 146440 - DNA, 25 bp, Artificial
  probe
  misc_feature (1)..(25): SEQ ID NO: 976; WAN024D7C_at; Start 366; Stop 390
tcccctaggcatcatggttgaaagc

SEQ ID NO: 146441 - DNA, 25 bp, Artificial
  probe
  misc_feature (1)..(25): SEQ ID NO: 976; WAN024D7C_at; Start 445; Stop 469
gccattcaaatcagccgtacgtcag

SEQ ID NO: 146442 - DNA, 25 bp, Artificial
  probe
  misc_feature (1)..(25): SEQ ID NO: 976; WAN024D7C_at; Start 802; Stop 826
cacctaggagcaggaagtattgctc

SEQ ID NO: 146443 - DNA, 25 bp, Artificial
  probe
  misc_feature (1)..(25): SEQ ID NO: 1632; WAN024D7D_at; Start 617; Stop 641
tctgggttaccttgactgctcttag

SEQ ID NO: 146444 - DNA, 25 bp, Artificial
  probe
  misc_feature (1)..(25): SEQ ID NO: 1632; WAN024D7D_at; Start 945; Stop 969
tacttggtacttcccagaaggcgca

SEQ ID NO: 146445 - DNA, 25 bp, Artificial
  probe
  misc_feature (1)..(25): SEQ ID NO: 1632; WAN024D7D_at; Start 825; Stop 849
ggtattgagcttcattccatggaca

SEQ ID NO: 146446 - DNA, 25 bp, Artificial
  probe
  misc_feature (1)..(25): SEQ ID NO: 1632; WAN024D7D_at; Start 1068; Stop 1092
cagtgttgccttgatcgtagcgatt

SEQ ID NO: 146447 - DNA, 25 bp, Artificial
  probe
  misc_feature (1)..(25): SEQ ID NO: 1632; WAN024D7D_at; Start 1397; Stop 1421
cacttggacgtatcaacattggtac

SEQ ID NO: 146448 - DNA, 25 bp, Artificial
  probe
  misc_feature (1)..(25): SEQ ID NO: 1632; WAN024D7D_at; Start 312; Stop 336
cgtagggattgcctctatcgtgaag

SEQ ID NO: 146449 - DNA, 25 bp, Artificial
  probe
  misc_feature (1)..(25): SEQ ID NO: 1632; WAN024D7D_at; Start 558; Stop 582
tattgcttcagcgactgcgggagtt

SEQ ID NO: 146450 - DNA, 25 bp, Artificial
  probe
  misc_feature (1)..(25): SEQ ID NO: 1632; WAN024D7D_at; Start 930; Stop 954
tacttctgcactaggtacttggtac

SEQ ID NO: 146451 - DNA, 25 bp, Artificial
  probe
  misc_feature (1)..(25): SEQ ID NO: 1632; WAN024D7D_at; Start 1039; Stop 1063
tccttcatgaatggtgctgctgact

SEQ ID NO: 146452 - DNA, 25 bp, Artificial
  probe
  misc_feature (1)..(25): SEQ ID NO: 1632; WAN024D7D_at; Start 129; Stop 153
gactcagcctcaaaatccacaaggg

SEQ ID NO: 146453 - DNA, 25 bp, Artificial
  probe
  misc_feature (1)..(25): SEQ ID NO: 1632; WAN024D7D_at; Start 1430; Stop 1454
aattcatgggcaaactcgtagtcgc

SEQ ID NO: 146454 - DNA, 25 bp, Artificial
  probe
  misc_feature (1)..(25): SEQ ID NO: 1632; WAN024D7D_at; Start 387; Stop 411
tgccctcggtggtacaacttatggt

SEQ ID NO: 146455 - DNA, 25 bp, Artificial
  probe
  misc_feature (1)..(25): SEQ ID NO: 1632; WAN024D7D_at; Start 1251; Stop 1275
tcttgccagcgcaactatgggtatc

SEQ ID NO: 146456 - DNA, 25 bp, Artificial
  probe
  misc_feature (1)..(25): SEQ ID NO: 1632; WAN024D7D_at; Start 235; Stop 259
gcagcgattgatgtagccttcttca

SEQ ID NO: 146457 - DNA, 25 bp, Artificial
  probe
  misc_feature (1)..(25): SEQ ID NO: 1632; WAN024D7D_at; Start 1291; Stop 1315
gaatttgtaaatgtccgtcctagct

SEQ ID NO: 146458 - DNA, 25 bp, Artificial
  probe
  misc_feature (1)..(25): SEQ ID NO: 1632; WAN024D7D_at; Start 498; Stop 522
tattttgctcggttctcaaatcggc

SEQ ID NO: 146459 - DNA, 25 bp, Artificial
  probe
  misc_feature (1)..(25): SEQ ID NO: 1632; WAN024D7D_at; Start 1367; Stop 1391
caacatctggtattgtgatgggagc

SEQ ID NO: 146460 - DNA, 25 bp, Artificial
  probe
  misc_feature (1)..(25): SEQ ID NO: 1632; WAN024D7D_at; Start 195; Stop 219
tactcatccagaggaaggttcgctc

SEQ ID NO: 146461 - DNA, 25 bp, Artificial
  probe
  misc_feature (1)..(25): SEQ ID NO: 1632; WAN024D7D_at; Start 295; Stop 319
aaaactggtgctcttgacgtaggga

SEQ ID NO: 146462 - DNA, 25 bp, Artificial
  probe
  misc_feature (1)..(25): SEQ ID NO: 1632; WAN024D7D_at; Start 544; Stop 568
ccatttgcgacaggtattgcttcag

SEQ ID NO: 146463 - DNA, 25 bp, Artificial
  probe
  misc_feature (1)..(25): SEQ ID NO: 1632; WAN024D7D_at; Start 218; Stop 242
tcattaaagaaacgagcgcagcgat

SEQ ID NO: 146464 - DNA, 25 bp, Artificial
  probe
  misc_feature (1)..(25): SEQ ID NO: 1632; WAN024D7D_at; Start 145; Stop 169
ccacaagggatttgggatgtcctca

SEQ ID NO: 146465 - DNA, 25 bp, Artificial
  probe
  misc_feature (1)..(25): SEQ ID NO: 1632; WAN024D7D_at; Start 327; Stop 351
tatcgtgaagaagtataagggccgc

SEQ ID NO: 146466 - DNA, 25 bp, Artificial
  probe
  misc_feature (1)..(25): SEQ ID NO: 1632; WAN024D7D_at; Start 840; Stop 864
tccatggacagaccttggcgttacc

SEQ ID NO: 146467 - DNA, 25 bp, Artificial
  probe
  misc_feature (1)..(25): SEQ ID NO: 1632; WAN024D7D_at; Start 180; Stop 204
tcgggctatgctaggtactcatcca

SEQ ID NO: 146468 - DNA, 25 bp, Artificial
  probe
  misc_feature (1)..(25): SEQ ID NO: 1632; WAN024D7D_at; Start 1455; Stop 1479
tattattgtagtgaccatcgccctt

SEQ ID NO: 146469 - DNA, 25 bp, Artificial
  probe
  misc_feature (1)..(25): SEQ ID NO: 1632; WAN024D7D_at; Start 1268; Stop 1292
tgggtatcatggctccacttggaga

SEQ ID NO: 146470 - DNA, 25 bp, Artificial
  probe
  misc_feature (1)..(25): SEQ ID NO: 1632; WAN024D7D_at; Start 695; Stop 719
cactggtttatagtactcgcaaaga

SEQ ID NO: 146471 - DNA, 25 bp, Artificial
  probe
  misc_feature (1)..(25): SEQ ID NO: 1632; WAN024D7D_at; Start 475; Stop 499
gatagcctgactggtgttgcaatta

SEQ ID NO: 146472 - DNA, 25 bp, Artificial
  probe
  misc_feature (1)..(25): SEQ ID NO: 1632; WAN024D7D_at; Start 1083; Stop 1107
cgtagcgattgctcgtggtattcaa

SEQ ID NO: 146473 - DNA, 25 bp, Artificial
  probe
  misc_feature (1)..(25): SEQ ID NO: 1632; WAN024D7D_at; Start 113; Stop 137
tagaaggtatttacgagactcagcc

SEQ ID NO: 146474 - DNA, 25 bp, Artificial
  probe
  misc_feature (1)..(25): SEQ ID NO: 1632; WAN024D7D_at; Start 1382; Stop 1406
tgatgggagctcttgcacttggacg

SEQ ID NO: 146475 - DNA, 25 bp, Artificial
  probe
  misc_feature (1)..(25): SEQ ID NO: 1632; WAN024D7D_at; Start 520; Stop 544
ggctgtttggcatctactctgaatc

SEQ ID NO: 146476 - DNA, 25 bp, Artificial
  probe
  misc_feature (1)..(25): SEQ ID NO: 1632; WAN024D7D_at; Start 1352; Stop 1376
tgaacttgattgcaccaacatctgg

SEQ ID NO: 146477 - DNA, 25 bp, Artificial
  probe
  misc_feature (1)..(25): SEQ ID NO: 1106; WAN024D7E_at; Start 3; Stop 27
gaagcaatctatctcaaatctcaag

SEQ ID NO: 146478 - DNA, 25 bp, Artificial
  probe
  misc_feature (1)..(25): SEQ ID NO: 1106; WAN024D7E_at; Start 457; Stop 481
gctaaggacaatctttctgacgctg

SEQ ID NO: 146479 - DNA, 25 bp, Artificial
  probe
  misc_feature (1)..(25): SEQ ID NO: 1106; WAN024D7E_at; Start 704; Stop 728
aaagaggtcgcacctacggtagcaa

SEQ ID NO: 146480 - DNA, 25 bp, Artificial
  probe
  misc_feature (1)..(25): SEQ ID NO: 1106; WAN024D7E_at; Start 1030; Stop 1054
gagttaaattctgctatcaaggaca

SEQ ID NO: 146481 - DNA, 25 bp, Artificial
  probe
  misc_feature (1)..(25): SEQ ID NO: 1106; WAN024D7E_at; Start 622; Stop 646
tcagatggctttgacgaccgcctgc

SEQ ID NO: 146482 - DNA, 25 bp, Artificial
  probe
  misc_feature (1)..(25): SEQ ID NO: 1106; WAN024D7E_at; Start 829; Stop 853
ggcgtctttgataccgatgtccata

SEQ ID NO: 146483 - DNA, 25 bp, Artificial
  probe
  misc_feature (1)..(25): SEQ ID NO: 1106; WAN024D7E_at; Start 658; Stop 682
caaaaggctatcatggaaattccca

SEQ ID NO: 146484 - DNA, 25 bp, Artificial
  probe
  misc_feature (1)..(25): SEQ ID NO: 1106; WAN024D7E_at; Start 244; Stop 268
gatttggcaagcttgatcacttcta

SEQ ID NO: 146485 - DNA, 25 bp, Artificial
  probe
  misc_feature (1)..(25): SEQ ID NO: 1106; WAN024D7E_at; Start 284; Stop 308
tcggtttcgatgttctaagagatac

SEQ ID NO: 146486 - DNA, 25 bp, Artificial
  probe
  misc_feature (1)..(25): SEQ ID NO: 1106; WAN024D7E_at; Start 39; Stop 63
tggagccattatcagtatttcgacc

SEQ ID NO: 146487 - DNA, 25 bp, Artificial
  probe
  misc_feature (1)..(25): SEQ ID NO: 1106; WAN024D7E_at; Start 673; Stop 697
gaaattcccaaaatcagcaaggtca

SEQ ID NO: 146488 - DNA, 25 bp, Artificial
  probe
  misc_feature (1)..(25): SEQ ID NO: 1106; WAN024D7E_at; Start 775; Stop 799
tttgaaagccatgaaatcgcggatc

SEQ ID NO: 146489 - DNA, 25 bp, Artificial
  probe
  misc_feature (1)..(25): SEQ ID NO: 1106; WAN024D7E_at; Start 475; Stop 499
gacgctgttacctcacttggaaccg

SEQ ID NO: 146490 - DNA, 25 bp, Artificial
  probe
  misc_feature (1)..(25): SEQ ID NO: 1106; WAN024D7E_at; Start 308; Stop 332
ccattcaaaagattctcagtcggga

SEQ ID NO: 146491 - DNA, 25 bp, Artificial
  probe
  misc_feature (1)..(25): SEQ ID NO: 1106; WAN024D7E_at; Start 791; Stop 815
tcgcggatcaggtcgagtctatgct

SEQ ID NO: 146492 - DNA, 25 bp, Artificial
  probe
  misc_feature (1)..(25): SEQ ID NO: 1106; WAN024D7E_at; Start 531; Stop 555
tccgattgtggataaactggttgct

SEQ ID NO: 146493 - DNA, 25 bp, Artificial
  probe
  misc_feature (1)..(25): SEQ ID NO: 1106; WAN024D7E_at; Start 498; Stop 522
cgccattgccatcctagctagtagt

SEQ ID NO: 146494 - DNA, 25 bp, Artificial
  probe
  misc_feature (1)..(25): SEQ ID NO: 1106; WAN024D7E_at; Start 174; Stop 198
cttaatcgggattcggatggcgcgc

SEQ ID NO: 146495 - DNA, 25 bp, Artificial
  probe
  misc_feature (1)..(25): SEQ ID NO: 1106; WAN024D7E_at; Start 338; Stop 362
cggtcattgatcctcttggtgcaac

SEQ ID NO: 146496 - DNA, 25 bp, Artificial
  probe
  misc_feature (1)..(25): SEQ ID NO: 1106; WAN024D7E_at; Start 744; Stop 768
tacactagagatgaatcctgacttg

SEQ ID NO: 146497 - DNA, 25 bp, Artificial
  probe
  misc_feature (1)..(25): SEQ ID NO: 1106; WAN024D7E_at; Start 1129; Stop 1153
tggcgtcgccacgaaacctggcaaa

SEQ ID NO: 146498 - DNA, 25 bp, Artificial
  probe
  misc_feature (1)..(25): SEQ ID NO: 1106; WAN024D7E_at; Start 393; Stop 417
tgtggtctatctctacaatactcgc

SEQ ID NO: 146499 - DNA, 25 bp, Artificial
  probe
  misc_feature (1)..(25): SEQ ID NO: 1106; WAN024D7E_at; Start 411; Stop 435
tactcgcctcagtaagaaatccaac

SEQ ID NO: 146500 - DNA, 25 bp, Artificial
  probe
  misc_feature (1)..(25): SEQ ID NO: 1106; WAN024D7E_at; Start 937; Stop 961
ggaaaccaactagaagaactcttga

SEQ ID NO: 146501 - DNA, 25 bp, Artificial
  probe
  misc_feature (1)..(25): SEQ ID NO: 1106; WAN024D7E_at; Start 69; Stop 93
gatcttgtctgcagccaaattagca

SEQ ID NO: 146502 - DNA, 25 bp, Artificial
  probe
  misc_feature (1)..(25): SEQ ID NO: 1106; WAN024D7E_at; Start 1109; Stop 1133
gtatcatccataccagtatctggcg

SEQ ID NO: 146503 - DNA, 25 bp, Artificial
  probe
  misc_feature (1)..(25): SEQ ID NO: 1106; WAN024D7E_at; Start 689; Stop 713
gcaaggtcaaatcgcaaagaggtcg

SEQ ID NO: 146504 - DNA, 25 bp, Artificial
  probe
  misc_feature (1)..(25): SEQ ID NO: 1106; WAN024D7E_at; Start 141; Stop 165
taacgtatcggacatcattggaaat

SEQ ID NO: 146505 - DNA, 25 bp, Artificial
  probe
  misc_feature (1)..(25): SEQ ID NO: 1106; WAN024D7E_at; Start 355; Stop 379
ggtgcaactctaggaatcatttctg

SEQ ID NO: 146506 - DNA, 25 bp, Artificial
  probe
  misc_feature (1)..(25): SEQ ID NO: 1106; WAN024D7E_at; Start 644; Stop 668
tgctcgaggactaccaaaaggctat

SEQ ID NO: 146507 - DNA, 25 bp, Artificial
  probe
  misc_feature (1)..(25): SEQ ID NO: 1106; WAN024D7E_at; Start 856; Stop 880
gaaccagcacctatccctgaggatg

SEQ ID NO: 146508 - DNA, 25 bp, Artificial
  probe
  misc_feature (1)..(25): SEQ ID NO: 1106; WAN024D7E_at; Start 844; Stop 868
gatgtccatatcgaaccagcaccta

SEQ ID NO: 146509 - DNA, 25 bp, Artificial
  probe
  misc_feature (1)..(25): SEQ ID NO: 1106; WAN024D7E_at; Start 108; Stop 132
tcattcatccagtttggtggccgat

SEQ ID NO: 146510 - DNA, 25 bp, Artificial
  probe
  misc_feature (1)..(25): SEQ ID NO: 1106; WAN024D7E_at; Start 976; Stop 1000
tatattcgccaagatggagagcaga

SEQ ID NO: 146511 - DNA, 25 bp, Artificial
  probe
  misc_feature (1)..(25): SEQ ID NO: 2870; WAN024D7F_at; Start 225; Stop 249
gtataagattgctatcatggatggg

SEQ ID NO: 146512 - DNA, 25 bp, Artificial
  probe
  misc_feature (1)..(25): SEQ ID NO: 2870; WAN024D7F_at; Start 176; Stop 200
tattggaagaattactagaagctgg

SEQ ID NO: 146513 - DNA, 25 bp, Artificial
  probe
  misc_feature (1)..(25): SEQ ID NO: 2870; WAN024D7F_at; Start 291; Stop 315
caagattccagccttattggaccag

SEQ ID NO: 146514 - DNA, 25 bp, Artificial
  probe
  misc_feature (1)..(25): SEQ ID NO: 2870; WAN024D7F_at; Start 479; Stop 503
gacatttcttcaattatgctcctga

SEQ ID NO: 146515 - DNA, 25 bp, Artificial
  probe
  misc_feature (1)..(25): SEQ ID NO: 2870; WAN024D7F_at; Start 262; Stop 286
tcagactttgtgaagctcaatccaa

SEQ ID NO: 146516 - DNA, 25 bp, Artificial
  probe
  misc_feature (1)..(25): SEQ ID NO: 2870; WAN024D7F_at; Start 591; Stop 615
tattgcaggcaatgactatacgatt

SEQ ID NO: 146517 - DNA, 25 bp, Artificial
  probe
  misc_feature (1)..(25): SEQ ID NO: 2870; WAN024D7F_at; Start 110; Stop 134
caaaaggagaacaagcttttcagct

SEQ ID NO: 146518 - DNA, 25 bp, Artificial
  probe
  misc_feature (1)..(25): SEQ ID NO: 2870; WAN024D7F_at; Start 495; Stop 519
tgctcctgaaaaattggaatatcct

SEQ ID NO: 146519 - DNA, 25 bp, Artificial
  probe
  misc_feature (1)..(25): SEQ ID NO: 2870; WAN024D7F_at; Start 208; Stop 232
gaagcggcttacgacttgtataaga

SEQ ID NO: 146520 - DNA, 25 bp, Artificial
  probe
  misc_feature (1)..(25): SEQ ID NO: 2870; WAN024D7F_at; Start 95; Stop 119
tcgaacaaaacttgccaaaaggaga

SEQ ID NO: 146521 - DNA, 25 bp, Artificial
  probe
  misc_feature (1)..(25): SEQ ID NO: 2870; WAN024D7F_at; Start 446; Stop 470
caggtgcagcaccttttctaggtgg

SEQ ID NO: 146522 - DNA, 25 bp, Artificial
  probe
  misc_feature (1)..(25): SEQ ID NO: 2870; WAN024D7F_at; Start 624; Stop 648
tgctatctggtcttggtatggacag

SEQ ID NO: 146523 - DNA, 25 bp, Artificial
  probe
  misc_feature (1)..(25): SEQ ID NO: 2870; WAN024D7F_at; Start 80; Stop 104
cagcaggtgcccgtttcgaacaaaa

SEQ ID NO: 146524 - DNA, 25 bp, Artificial
  probe
  misc_feature (1)..(25): SEQ ID NO: 2870; WAN024D7F_at; Start 419; Stop 443
aagttttgaattggctattctggca

SEQ ID NO: 146525 - DNA, 25 bp, Artificial
  probe
  misc_feature (1)..(25): SEQ ID NO: 2870; WAN024D7F_at; Start 658; Stop 682
ggaaatctttaccaaggttctgcaa

SEQ ID NO: 146526 - DNA, 25 bp, Artificial
  probe
  misc_feature (1)..(25): SEQ ID NO: 2870; WAN024D7F_at; Start 563; Stop 587
tggataaggaattggctcagaaacc

SEQ ID NO: 146527 - DNA, 25 bp, Artificial
  probe
  misc_feature (1)..(25): SEQ ID NO: 2870; WAN024D7F_at; Start 640; Stop 664
tatggacagttagttcaaggaaatc

SEQ ID NO: 146528 - DNA, 25 bp, Artificial
  probe
  misc_feature (1)..(25): SEQ ID NO: 2870; WAN024D7F_at; Start 331; Stop 355
gtaagagtctttgagtctgctcata

SEQ ID NO: 146529 - DNA, 25 bp, Artificial
  probe
  misc_feature (1)..(25): SEQ ID NO: 2870; WAN024D7F_at; Start 364; Stop 388
taccttgctgagaaatttggagcct

SEQ ID NO: 146530 - DNA, 25 bp, Artificial
  probe
  misc_feature (1)..(25): SEQ ID NO: 2870; WAN024D7F_at; Start 69; Stop 93
aaacagaccaacagcaggtgcccgt

SEQ ID NO: 146531 - DNA, 25 bp, Artificial
  probe
  misc_feature (1)..(25): SEQ ID NO: 2870; WAN024D7F_at; Start 576; Stop 600
ggctcagaaaccttatattgcaggc

SEQ ID NO: 146532 - DNA, 25 bp, Artificial
  probe
  misc_feature (1)..(25): SEQ ID NO: 2870; WAN024D7F_at; Start 149; Stop 173
caccaaatggtgtgaaggttactat

SEQ ID NO: 146533 - DNA, 25 bp, Artificial
  probe
  misc_feature (1)..(25): SEQ ID NO: 2870; WAN024D7F_at; Start 689; Stop 713
tggatgcctcaagttatcaaaatct

SEQ ID NO: 146534 - DNA, 25 bp, Artificial
  probe
  misc_feature (1)..(25): SEQ ID NO: 2870; WAN024D7F_at; Start 434; Stop 458
tattctggcaagcaggtgcagcacc

SEQ ID NO: 146535 - DNA, 25 bp, Artificial
  probe
  misc_feature (1)..(25): SEQ ID NO: 2870; WAN024D7F_at; Start 703; Stop 727
tatcaaaatctagtaaaatgggcag

SEQ ID NO: 146536 - DNA, 25 bp, Artificial
  probe
  misc_feature (1)..(25): SEQ ID NO: 2870; WAN024D7F_at; Start 736; Stop 760
gccaatcgtccagctgttaagcgtg

SEQ ID NO: 146537 - DNA, 25 bp, Artificial
  probe
  misc_feature (1)..(25): SEQ ID NO: 2870; WAN024D7F_at; Start 721; Stop 745
tgggcagaaaaaattgccaatcgtc

SEQ ID NO: 146538 - DNA, 25 bp, Artificial
  probe
  misc_feature (1)..(25): SEQ ID NO: 2870; WAN024D7F_at; Start 384; Stop 408
agcctttttaccaagtaatcctgtg

SEQ ID NO: 146539 - DNA, 25 bp, Artificial
  probe
  misc_feature (1)..(25): SEQ ID NO: 2870; WAN024D7F_at; Start 604; Stop 628
gactatacgattgcagatattgcta

SEQ ID NO: 146540 - DNA, 25 bp, Artificial
  probe
  misc_feature (1)..(25): SEQ ID NO: 2870; WAN024D7F_at; Start 17; Stop 41
taccgaccgtatggcaggatgaagc

SEQ ID NO: 146541 - DNA, 25 bp, Artificial
  probe
  misc_feature (1)..(25): SEQ ID NO: 2870; WAN024D7F_at; Start 33; Stop 57
ggatgaagctagtaatcaaggagct

SEQ ID NO: 146542 - DNA, 25 bp, Artificial
  probe
  misc_feature (1)..(25): SEQ ID NO: 2870; WAN024D7F_at; Start 2; Stop 26
tgtcagcatatcaattaccgaccgt

SEQ ID NO: 146543 - DNA, 25 bp, Artificial
  probe
  misc_feature (1)..(25): SEQ ID NO: 2870; WAN024D7F_at; Start 302; Stop 326
ccttattggaccagtcaggtactga

SEQ ID NO: 146544 - DNA, 25 bp, Artificial
  probe
  misc_feature (1)..(25): SEQ ID NO: 2870; WAN024D7F_at; Start 191; Stop 215
tagaagctggttttaaggaagcggc

SEQ ID NO: 146545 - DNA, 25 bp, Artificial
  probe
  misc_feature (1)..(25): SEQ ID NO: 2286; WAN024D7G_at; Start 45; Stop 69
gctactcggactgctcgctttgaag

SEQ ID NO: 146546 - DNA, 25 bp, Artificial
  probe
  misc_feature (1)..(25): SEQ ID NO: 2286; WAN024D7G_at; Start 30; Stop 54
gatggttgcttcaatgctactcgga

SEQ ID NO: 146547 - DNA, 25 bp, Artificial
  probe
  misc_feature (1)..(25): SEQ ID NO: 2286; WAN024D7G_at; Start 154; Stop 178
gctgtctggttaggatggcccaaat

SEQ ID NO: 146548 - DNA, 25 bp, Artificial
  probe
  misc_feature (1)..(25): SEQ ID NO: 2286; WAN024D7G_at; Start 25; Stop 49
tatttgatggttgcttcaatgctac

SEQ ID NO: 146549 - DNA, 25 bp, Artificial
  probe
  misc_feature (1)..(25): SEQ ID NO: 2286; WAN024D7G_at; Start 69; Stop 93
gataggtttttctcagttcaaggag

SEQ ID NO: 146550 - DNA, 25 bp, Artificial
  probe
  misc_feature (1)..(25): SEQ ID NO: 2286; WAN024D7G_at; Start 18; Stop 42
gggtttttatttgatggttgcttca

SEQ ID NO: 146551 - DNA, 25 bp, Artificial
  probe
  misc_feature (1)..(25): SEQ ID NO: 2286; WAN024D7G_at; Start 110; Stop 134
tatctatcttaacaagtttagctgg

SEQ ID NO: 146552 - DNA, 25 bp, Artificial
  probe
  misc_feature (1)..(25): SEQ ID NO: 2286; WAN024D7G_at; Start 39; Stop 63
ttcaatgctactcggactgctcgct

SEQ ID NO: 146553 - DNA, 25 bp, Artificial
  probe
  misc_feature (1)..(25): SEQ ID NO: 2286; WAN024D7G_at; Start 156; Stop 180
tgtctggttaggatggcccaaataa

SEQ ID NO: 146554 - DNA, 25 bp, Artificial
  probe
  misc_feature (1)..(25): SEQ ID NO: 2286; WAN024D7G_at; Start 9; Stop 33
caaagaaatgggtttttatttgatg

SEQ ID NO: 146555 - DNA, 25 bp, Artificial
  probe
  misc_feature (1)..(25): SEQ ID NO: 2286; WAN024D7G_at; Start 35; Stop 59
ttgcttcaatgctactcggactgct

SEQ ID NO: 146556 - DNA, 25 bp, Artificial
  probe
  misc_feature (1)..(25): SEQ ID NO: 2286; WAN024D7G_at; Start 34; Stop 58
gttgcttcaatgctactcggactgc

SEQ ID NO: 146557 - DNA, 25 bp, Artificial
  probe
  misc_feature (1)..(25): SEQ ID NO: 2286; WAN024D7G_at; Start 60; Stop 84
cgctttgaagataggtttttctcag

SEQ ID NO: 146558 - DNA, 25 bp, Artificial
  probe
  misc_feature (1)..(25): SEQ ID NO: 2286; WAN024D7G_at; Start 51; Stop 75
cggactgctcgctttgaagataggt

SEQ ID NO: 146559 - DNA, 25 bp, Artificial
  probe
  misc_feature (1)..(25): SEQ ID NO: 2286; WAN024D7G_at; Start 48; Stop 72
actcggactgctcgctttgaagata

SEQ ID NO: 146560 - DNA, 25 bp, Artificial
  probe
  misc_feature (1)..(25): SEQ ID NO: 2286; WAN024D7G_at; Start 33; Stop 57
ggttgcttcaatgctactcggactg

SEQ ID NO: 146561 - DNA, 25 bp, Artificial
  probe
  misc_feature (1)..(25): SEQ ID NO: 2286; WAN024D7G_at; Start 50; Stop 74
tcggactgctcgctttgaagatagg

SEQ ID NO: 146562 - DNA, 25 bp, Artificial
  probe
  misc_feature (1)..(25): SEQ ID NO: 2286; WAN024D7G_at; Start 155; Stop 179
ctgtctggttaggatggcccaaata

SEQ ID NO: 146563 - DNA, 25 bp, Artificial
  probe
  misc_feature (1)..(25): SEQ ID NO: 2286; WAN024D7G_at; Start 66; Stop 90
gaagataggtttttctcagttcaag

SEQ ID NO: 146564 - DNA, 25 bp, Artificial
  probe
  misc_feature (1)..(25): SEQ ID NO: 2286; WAN024D7G_at; Start 67; Stop 91
aagataggtttttctcagttcaagg

SEQ ID NO: 146565 - DNA, 25 bp, Artificial
  probe
  misc_feature (1)..(25): SEQ ID NO: 2286; WAN024D7G_at; Start 44; Stop 68
tgctactcggactgctcgctttgaa

SEQ ID NO: 146566 - DNA, 25 bp, Artificial
  probe
  misc_feature (1)..(25): SEQ ID NO: 2286; WAN024D7G_at; Start 41; Stop 65
caatgctactcggactgctcgcttt

SEQ ID NO: 146567 - DNA, 25 bp, Artificial
  probe
  misc_feature (1)..(25): SEQ ID NO: 2286; WAN024D7G_at; Start 100; Stop 124
gataaattcttatctatcttaacaa

SEQ ID NO: 146568 - DNA, 25 bp, Artificial
  probe
  misc_feature (1)..(25): SEQ ID NO: 2286; WAN024D7G_at; Start 36; Stop 60
tgcttcaatgctactcggactgctc

SEQ ID NO: 146569 - DNA, 25 bp, Artificial
  probe
  misc_feature (1)..(25): SEQ ID NO: 2286; WAN024D7G_at; Start 58; Stop 82
ctcgctttgaagataggtttttctc

SEQ ID NO: 146570 - DNA, 25 bp, Artificial
  probe
  misc_feature (1)..(25): SEQ ID NO: 2286; WAN024D7G_at; Start 47; Stop 71
tactcggactgctcgctttgaagat

SEQ ID NO: 146571 - DNA, 25 bp, Artificial
  probe
  misc_feature (1)..(25): SEQ ID NO: 2286; WAN024D7G_at; Start 32; Stop 56
tggttgcttcaatgctactcggact

SEQ ID NO: 146572 - DNA, 25 bp, Artificial
  probe
  misc_feature (1)..(25): SEQ ID NO: 2286; WAN024D7G_at; Start 53; Stop 77
gactgctcgctttgaagataggttt

SEQ ID NO: 146573 - DNA, 25 bp, Artificial
  probe
  misc_feature (1)..(25): SEQ ID NO: 2286; WAN024D7G_at; Start 42; Stop 66
aatgctactcggactgctcgctttg

SEQ ID NO: 146574 - DNA, 25 bp, Artificial
  probe
  misc_feature (1)..(25): SEQ ID NO: 2286; WAN024D7G_at; Start 29; Stop 53
tgatggttgcttcaatgctactcgg

SEQ ID NO: 146575 - DNA, 25 bp, Artificial
  probe
  misc_feature (1)..(25): SEQ ID NO: 2286; WAN024D7G_at; Start 71; Stop 95
taggtttttctcagttcaaggagaa

SEQ ID NO: 146576 - DNA, 25 bp, Artificial
  probe
  misc_feature (1)..(25): SEQ ID NO: 2286; WAN024D7G_at; Start 56; Stop 80
tgctcgctttgaagataggtttttc

SEQ ID NO: 146577 - DNA, 25 bp, Artificial
  probe
  misc_feature (1)..(25): SEQ ID NO: 2286; WAN024D7G_at; Start 46; Stop 70
ctactcggactgctcgctttgaaga

SEQ ID NO: 146578 - DNA, 25 bp, Artificial
  probe
  misc_feature (1)..(25): SEQ ID NO: 2286; WAN024D7G_at; Start 37; Stop 61
gcttcaatgctactcggactgctcg

SEQ ID NO: 146579 - DNA, 25 bp, Artificial
  probe
  misc_feature (1)..(25): SEQ ID NO: 5762; WAN024D7H_at; Start 581; Stop 605
ggcggtcagctgaagattcactcaa

SEQ ID NO: 146580 - DNA, 25 bp, Artificial
  probe
  misc_feature (1)..(25): SEQ ID NO: 5762; WAN024D7H_at; Start 212; Stop 236
caagctttgaaaaggcaaactgctc

SEQ ID NO: 146581 - DNA, 25 bp, Artificial
  probe
  misc_feature (1)..(25): SEQ ID NO: 5762; WAN024D7H_at; Start 490; Stop 514
gattttctctctcttgtcatcagag

SEQ ID NO: 146582 - DNA, 25 bp, Artificial
  probe
  misc_feature (1)..(25): SEQ ID NO: 5762; WAN024D7H_at; Start 564; Stop 588
aattcatggaggatagaggcggtca

SEQ ID NO: 146583 - DNA, 25 bp, Artificial
  probe
  misc_feature (1)..(25): SEQ ID NO: 5762; WAN024D7H_at; Start 424; Stop 448
cgctggtaagactttgaagagccat

SEQ ID NO: 146584 - DNA, 25 bp, Artificial
  probe
  misc_feature (1)..(25): SEQ ID NO: 5762; WAN024D7H_at; Start 627; Stop 651
gggcctttctaacagctttaataga

SEQ ID NO: 146585 - DNA, 25 bp, Artificial
  probe
  misc_feature (1)..(25): SEQ ID NO: 5762; WAN024D7H_at; Start 434; Stop 458
actttgaagagccattggaaggcag

SEQ ID NO: 146586 - DNA, 25 bp, Artificial
  probe
  misc_feature (1)..(25): SEQ ID NO: 5762; WAN024D7H_at; Start 706; Stop 730
ttaccgagaagatttgtcacaacca

SEQ ID NO: 146587 - DNA, 25 bp, Artificial
  probe
  misc_feature (1)..(25): SEQ ID NO: 5762; WAN024D7H_at; Start 405; Stop 429
ttttgatgaaattaaaagtcgctgg

SEQ ID NO: 146588 - DNA, 25 bp, Artificial
  probe
  misc_feature (1)..(25): SEQ ID NO: 5762; WAN024D7H_at; Start 639; Stop 663
cagctttaatagaaaatcaagtaca

SEQ ID NO: 146589 - DNA, 25 bp, Artificial
  probe
  misc_feature (1)..(25): SEQ ID NO: 5762; WAN024D7H_at; Start 688; Stop 712
gaactttgctggatttgtttaccga

SEQ ID NO: 146590 - DNA, 25 bp, Artificial
  probe
  misc_feature (1)..(25): SEQ ID NO: 5762; WAN024D7H_at; Start 674; Stop 698
gaagcacgtcgcttgaactttgctg

SEQ ID NO: 146591 - DNA, 25 bp, Artificial
  probe
  misc_feature (1)..(25): SEQ ID NO: 5762; WAN024D7H_at; Start 662; Stop 686
caaactgtgggggaagcacgtcgct

SEQ ID NO: 146592 - DNA, 25 bp, Artificial
  probe
  misc_feature (1)..(25): SEQ ID NO: 5762; WAN024D7H_at; Start 502; Stop 526
cttgtcatcagagtttgagactgta

SEQ ID NO: 146593 - DNA, 25 bp, Artificial
  probe
  misc_feature (1)..(25): SEQ ID NO: 5762; WAN024D7H_at; Start 389; Stop 413
cctcaccgtttggattttttgatga

SEQ ID NO: 146594 - DNA, 25 bp, Artificial
  probe
  misc_feature (1)..(25): SEQ ID NO: 5762; WAN024D7H_at; Start 695; Stop 719
gctggatttgtttaccgagaagatt

SEQ ID NO: 146595 - DNA, 25 bp, Artificial
  probe
  misc_feature (1)..(25): SEQ ID NO: 5762; WAN024D7H_at; Start 125; Stop 149
gatgccttggctctctattctgcca

SEQ ID NO: 146596 - DNA, 25 bp, Artificial
  probe
  misc_feature (1)..(25): SEQ ID NO: 5762; WAN024D7H_at; Start 203; Stop 227
caaaatatccaagctttgaaaaggc

SEQ ID NO: 146597 - DNA, 25 bp, Artificial
  probe
  misc_feature (1)..(25): SEQ ID NO: 5762; WAN024D7H_at; Start 134; Stop 158
gctctctattctgccagtcaattgg

SEQ ID NO: 146598 - DNA, 25 bp, Artificial
  probe
  misc_feature (1)..(25): SEQ ID NO: 5762; WAN024D7H_at; Start 481; Stop 505
ggaagaagtgattttctctctcttg

SEQ ID NO: 146599 - DNA, 25 bp, Artificial
  probe
  misc_feature (1)..(25): SEQ ID NO: 5762; WAN024D7H_at; Start 648; Stop 672
tagaaaatcaagtacaaactgtggg

SEQ ID NO: 146600 - DNA, 25 bp, Artificial
  probe
  misc_feature (1)..(25): SEQ ID NO: 5762; WAN024D7H_at; Start 219; Stop 243
tgaaaaggcaaactgctcaacacta

SEQ ID NO: 146601 - DNA, 25 bp, Artificial
  probe
  misc_feature (1)..(25): SEQ ID NO: 5762; WAN024D7H_at; Start 540; Stop 564
tcagagcaaagatggtgaccttcaa

SEQ ID NO: 146602 - DNA, 25 bp, Artificial
  probe
  misc_feature (1)..(25): SEQ ID NO: 5762; WAN024D7H_at; Start 678; Stop 702
cacgtcgcttgaactttgctggatt

SEQ ID NO: 146603 - DNA, 25 bp, Artificial
  probe
  misc_feature (1)..(25): SEQ ID NO: 5762; WAN024D7H_at; Start 716; Stop 740
gatttgtcacaaccacagggattgg

SEQ ID NO: 146604 - DNA, 25 bp, Artificial
  probe
  misc_feature (1)..(25): SEQ ID NO: 5762; WAN024D7H_at; Start 530; Stop 554
tctaaggaaatcagagcaaagatgg

SEQ ID NO: 146605 - DNA, 25 bp, Artificial
  probe
  misc_feature (1)..(25): SEQ ID NO: 5762; WAN024D7H_at; Start 604; Stop 628
aactatctccaagaaagcgcgcggg

SEQ ID NO: 146606 - DNA, 25 bp, Artificial
  probe
  misc_feature (1)..(25): SEQ ID NO: 5762; WAN024D7H_at; Start 592; Stop 616
gaagattcactcaactatctccaag

SEQ ID NO: 146607 - DNA, 25 bp, Artificial
  probe
  misc_feature (1)..(25): SEQ ID NO: 5762; WAN024D7H_at; Start 550; Stop 574
gatggtgaccttcaaattcatggag

SEQ ID NO: 146608 - DNA, 25 bp, Artificial
  probe
  misc_feature (1)..(25): SEQ ID NO: 5762; WAN024D7H_at; Start 517; Stop 541
tgagactgtattttctaaggaaatc

SEQ ID NO: 146609 - DNA, 25 bp, Artificial
  probe
  misc_feature (1)..(25): SEQ ID NO: 5762; WAN024D7H_at; Start 723; Stop 747
cacaaccacagggattggtttttgt

SEQ ID NO: 146610 - DNA, 25 bp, Artificial
  probe
  misc_feature (1)..(25): SEQ ID NO: 5762; WAN024D7H_at; Start 411; Stop 435
tgaaattaaaagtcgctggtaagac

SEQ ID NO: 146611 - DNA, 25 bp, Artificial
  probe
  misc_feature (1)..(25): SEQ ID NO: 5762; WAN024D7H_at; Start 577; Stop 601
tagaggcggtcagctgaagattcac

SEQ ID NO: 146612 - DNA, 25 bp, Artificial
  probe
  misc_feature (1)..(25): SEQ ID NO: 5762; WAN024D7H_at; Start 5; Stop 29
ggctaaaaaatatgctacactatca

SEQ ID NO: 146613 - DNA, 25 bp, Artificial
  probe
  misc_feature (1)..(25): SEQ ID NO: 1266; WAN024D7I_at; Start 868; Stop 892
gataacagtcaagcaagatactctt

SEQ ID NO: 146614 - DNA, 25 bp, Artificial
  probe
  misc_feature (1)..(25): SEQ ID NO: 1266; WAN024D7I_at; Start 1412; Stop 1436
ccaagaagtttatttgccgaaatca

SEQ ID NO: 146615 - DNA, 25 bp, Artificial
  probe
  misc_feature (1)..(25): SEQ ID NO: 1266; WAN024D7I_at; Start 1166; Stop 1190
tgtacaccatcttaacccatgctga

SEQ ID NO: 146616 - DNA, 25 bp, Artificial
  probe
  misc_feature (1)..(25): SEQ ID NO: 1266; WAN024D7I_at; Start 958; Stop 982
gatgagctgatttggcatttacaca

SEQ ID NO: 146617 - DNA, 25 bp, Artificial
  probe
  misc_feature (1)..(25): SEQ ID NO: 1266; WAN024D7I_at; Start 1203; Stop 1227
tcagttgttagaaaatcgaccacct

SEQ ID NO: 146618 - DNA, 25 bp, Artificial
  probe
  misc_feature (1)..(25): SEQ ID NO: 1266; WAN024D7I_at; Start 1189; Stop 1213
gaaaacctctctactcagttgttag

SEQ ID NO: 146619 - DNA, 25 bp, Artificial
  probe
  misc_feature (1)..(25): SEQ ID NO: 1266; WAN024D7I_at; Start 427; Stop 451
gaattatcttttactccatccgaga

SEQ ID NO: 146620 - DNA, 25 bp, Artificial
  probe
  misc_feature (1)..(25): SEQ ID NO: 1266; WAN024D7I_at; Start 1330; Stop 1354
gatgaattaaaaacaagtcctgaga

SEQ ID NO: 146621 - DNA, 25 bp, Artificial
  probe
  misc_feature (1)..(25): SEQ ID NO: 1266; WAN024D7I_at; Start 1114; Stop 1138
taccgtcaggcaattggacagcatg

SEQ ID NO: 146622 - DNA, 25 bp, Artificial
  probe
  misc_feature (1)..(25): SEQ ID NO: 1266; WAN024D7I_at; Start 825; Stop 849
tgatattttcctagatcctcaagaa

SEQ ID NO: 146623 - DNA, 25 bp, Artificial
  probe
  misc_feature (1)..(25): SEQ ID NO: 1266; WAN024D7I_at; Start 199; Stop 223
caatcttctgttaacggaatcatga

SEQ ID NO: 146624 - DNA, 25 bp, Artificial
  probe
  misc_feature (1)..(25): SEQ ID NO: 1266; WAN024D7I_at; Start 502; Stop 526
gagcgctattatttcctagattggc

SEQ ID NO: 146625 - DNA, 25 bp, Artificial
  probe
  misc_feature (1)..(25): SEQ ID NO: 1266; WAN024D7I_at; Start 3; Stop 27
gaattatggaggaaatacccgtatg

SEQ ID NO: 146626 - DNA, 25 bp, Artificial
  probe
  misc_feature (1)..(25): SEQ ID NO: 1266; WAN024D7I_at; Start 1255; Stop 1279
gaccatgctatatcccttacctttg

SEQ ID NO: 146627 - DNA, 25 bp, Artificial
  probe
  misc_feature (1)..(25): SEQ ID NO: 1266; WAN024D7I_at; Start 732; Stop 756
tttccaggagacacttgcttatttc

SEQ ID NO: 146628 - DNA, 25 bp, Artificial
  probe
  misc_feature (1)..(25): SEQ ID NO: 1266; WAN024D7I_at; Start 363; Stop 387
tagtgccaacctctatcgactgggc

SEQ ID NO: 146629 - DNA, 25 bp, Artificial
  probe
  misc_feature (1)..(25): SEQ ID NO: 1266; WAN024D7I_at; Start 445; Stop 469
tccgagatacgtggaaatgagatcg

SEQ ID NO: 146630 - DNA, 25 bp, Artificial
  probe
  misc_feature (1)..(25): SEQ ID NO: 1266; WAN024D7I_at; Start 119; Stop 143
ccgaaaaattaggatgtacagaacg

SEQ ID NO: 146631 - DNA, 25 bp, Artificial
  probe
  misc_feature (1)..(25): SEQ ID NO: 1266; WAN024D7I_at; Start 398; Stop 422
caaaggttctttcatctcagtttca

SEQ ID NO: 146632 - DNA, 25 bp, Artificial
  probe
  misc_feature (1)..(25): SEQ ID NO: 1266; WAN024D7I_at; Start 1076; Stop 1100
cagactttatgggaagtgcgcgtca

SEQ ID NO: 146633 - DNA, 25 bp, Artificial
  probe
  misc_feature (1)..(25): SEQ ID NO: 1266; WAN024D7I_at; Start 484; Stop 508
tttgcccaatacttttctgagcgct

SEQ ID NO: 146634 - DNA, 25 bp, Artificial
  probe
  misc_feature (1)..(25): SEQ ID NO: 1266; WAN024D7I_at; Start 649; Stop 673
cacagggttaaaaatggtcacttca

SEQ ID NO: 146635 - DNA, 25 bp, Artificial
  probe
  misc_feature (1)..(25): SEQ ID NO: 1266; WAN024D7I_at; Start 68; Stop 92
taatggaaaccctaattcagaatcg

SEQ ID NO: 146636 - DNA, 25 bp, Artificial
  probe
  misc_feature (1)..(25): SEQ ID NO: 1266; WAN024D7I_at; Start 537; Stop 561
ccttcctgaggaagatttaacagag

SEQ ID NO: 146637 - DNA, 25 bp, Artificial
  probe
  misc_feature (1)..(25): SEQ ID NO: 1266; WAN024D7I_at; Start 99; Stop 123
gatgaaattacatgaactagccgaa

SEQ ID NO: 146638 - DNA, 25 bp, Artificial
  probe
  misc_feature (1)..(25): SEQ ID NO: 1266; WAN024D7I_at; Start 1309; Stop 1333
cgctttaccttcgatatttgggatg

SEQ ID NO: 146639 - DNA, 25 bp, Artificial
  probe
  misc_feature (1)..(25): SEQ ID NO: 1266; WAN024D7I_at; Start 42; Stop 66
cacaaaagttcaaagacaattacgc

SEQ ID NO: 146640 - DNA, 25 bp, Artificial
  probe
  misc_feature (1)..(25): SEQ ID NO: 1266; WAN024D7I_at; Start 942; Stop 966
tacttttactaaccacgatgagctg

SEQ ID NO: 146641 - DNA, 25 bp, Artificial
  probe
  misc_feature (1)..(25): SEQ ID NO: 1266; WAN024D7I_at; Start 378; Stop 402
tcgactgggcagaaatattacaaag

SEQ ID NO: 146642 - DNA, 25 bp, Artificial
  probe
  misc_feature (1)..(25): SEQ ID NO: 1266; WAN024D7I_at; Start 522; Stop 546
ttggccttttcctgaccttcctgag

SEQ ID NO: 146643 - DNA, 25 bp, Artificial
  probe
  misc_feature (1)..(25): SEQ ID NO: 1266; WAN024D7I_at; Start 632; Stop 656
tgatagctatcagtatccacagggt

SEQ ID NO: 146644 - DNA, 25 bp, Artificial
  probe
  misc_feature (1)..(25): SEQ ID NO: 1266; WAN024D7I_at; Start 774; Stop 798
tgaaatgactccagatacaatcgct

SEQ ID NO: 146645 - DNA, 25 bp, Artificial
  probe
  misc_feature (1)..(25): SEQ ID NO: 1266; WAN024D7I_at; Start 1150; Stop 1174
cagttggaacacttgatgtacacca

SEQ ID NO: 146646 - DNA, 25 bp, Artificial
  probe
  misc_feature (1)..(25): SEQ ID NO: 1266; WAN024D7I_at; Start 1134; Stop 1158
gcatgaccatcctgaacagttggaa

SEQ ID NO: 146647 - DNA, 25 bp, Artificial
  probe
  misc_feature (1)..(25): SEQ ID NO: 5303; WAN024D7J_at; Start 166; Stop 190
cttgctggtaaagcggaagttagct

SEQ ID NO: 146648 - DNA, 25 bp, Artificial
  probe
  misc_feature (1)..(25): SEQ ID NO: 5303; WAN024D7J_at; Start 313; Stop 337
tacaacttctctatccctggtacag

SEQ ID NO: 146649 - DNA, 25 bp, Artificial
  probe
  misc_feature (1)..(25): SEQ ID NO: 5303; WAN024D7J_at; Start 525; Stop 549
acgtgttaatgactctgcctgggca

SEQ ID NO: 146650 - DNA, 25 bp, Artificial
  probe
  misc_feature (1)..(25): SEQ ID NO: 5303; WAN024D7J_at; Start 296; Stop 320
ggattttctctccagtctacaactt

SEQ ID NO: 146651 - DNA, 25 bp, Artificial
  probe
  misc_feature (1)..(25): SEQ ID NO: 5303; WAN024D7J_at; Start 441; Stop 465
tgcagggcacgatcaacttttcgct

SEQ ID NO: 146652 - DNA, 25 bp, Artificial
  probe
  misc_feature (1)..(25): SEQ ID NO: 5303; WAN024D7J_at; Start 62; Stop 86
taagaaaaaggagacacatcatgtc

SEQ ID NO: 146653 - DNA, 25 bp, Artificial
  probe
  misc_feature (1)..(25): SEQ ID NO: 5303; WAN024D7J_at; Start 427; Stop 451
tcatctgtagccaatgcagggcacg

SEQ ID NO: 146654 - DNA, 25 bp, Artificial
  probe
  misc_feature (1)..(25): SEQ ID NO: 5303; WAN024D7J_at; Start 581; Stop 605
taaactcacttgaaaaacaagctca

SEQ ID NO: 146655 - DNA, 25 bp, Artificial
  probe
  misc_feature (1)..(25): SEQ ID NO: 5303; WAN024D7J_at; Start 459; Stop 483
tttcgctatctacaaagacctcttg

SEQ ID NO: 146656 - DNA, 25 bp, Artificial
  probe
  misc_feature (1)..(25): SEQ ID NO: 5303; WAN024D7J_at; Start 560; Stop 584
tggttcttgaagaaacagtcctaaa

SEQ ID NO: 146657 - DNA, 25 bp, Artificial
  probe
  misc_feature (1)..(25): SEQ ID NO: 5303; WAN024D7J_at; Start 181; Stop 205
gaagttagctaccttgattattcag

SEQ ID NO: 146658 - DNA, 25 bp, Artificial
  probe
  misc_feature (1)..(25): SEQ ID NO: 5303; WAN024D7J_at; Start 409; Stop 433
gacaagtttgtcacagtatcatctg

SEQ ID NO: 146659 - DNA, 25 bp, Artificial
  probe
  misc_feature (1)..(25): SEQ ID NO: 5303; WAN024D7J_at; Start 261; Stop 285
tgctcgtgaagcagttctcgttgcg

SEQ ID NO: 146660 - DNA, 25 bp, Artificial
  probe
  misc_feature (1)..(25): SEQ ID NO: 5303; WAN024D7J_at; Start 246; Stop 270
tccagctgtagctgctgctcgtgaa

SEQ ID NO: 146661 - DNA, 25 bp, Artificial
  probe
  misc_feature (1)..(25): SEQ ID NO: 5303; WAN024D7J_at; Start 276; Stop 300
tctcgttgcggatgctatctggatt

SEQ ID NO: 146662 - DNA, 25 bp, Artificial
  probe
  misc_feature (1)..(25): SEQ ID NO: 5303; WAN024D7J_at; Start 366; Stop 390
tgcccttgacttgtctgatacacgt

SEQ ID NO: 146663 - DNA, 25 bp, Artificial
  probe
  misc_feature (1)..(25): SEQ ID NO: 5303; WAN024D7J_at; Start 106; Stop 130
gtcggatcactacgtcaaggttctt

SEQ ID NO: 146664 - DNA, 25 bp, Artificial
  probe
  misc_feature (1)..(25): SEQ ID NO: 5303; WAN024D7J_at; Start 511; Stop 535
gatttcactgctgcacgtgttaatg

SEQ ID NO: 146665 - DNA, 25 bp, Artificial
  probe
  misc_feature (1)..(25): SEQ ID NO: 5303; WAN024D7J_at; Start 326; Stop 350
tccctggtacagtgaaaaacttgct

SEQ ID NO: 146666 - DNA, 25 bp, Artificial
  probe
  misc_feature (1)..(25): SEQ ID NO: 5303; WAN024D7J_at; Start 485; Stop 509
catttatccgtacacaaggcgttgg

SEQ ID NO: 146667 - DNA, 25 bp, Artificial
  probe
  misc_feature (1)..(25): SEQ ID NO: 5303; WAN024D7J_at; Start 351; Stop 375
tgactggctatctcgtgcccttgac

SEQ ID NO: 146668 - DNA, 25 bp, Artificial
  probe
  misc_feature (1)..(25): SEQ ID NO: 5303; WAN024D7J_at; Start 394; Stop 418
gtttctgcccttcaagacaagtttg

SEQ ID NO: 146669 - DNA, 25 bp, Artificial
  probe
  misc_feature (1)..(25): SEQ ID NO: 5303; WAN024D7J_at; Start 218; Stop 242
tcagccaagatttggaagttccaac

SEQ ID NO: 146670 - DNA, 25 bp, Artificial
  probe
  misc_feature (1)..(25): SEQ ID NO: 5303; WAN024D7J_at; Start 124; Stop 148
ggttctttcaaccaccaaatggcgc

SEQ ID NO: 146671 - DNA, 25 bp, Artificial
  probe
  misc_feature (1)..(25): SEQ ID NO: 5303; WAN024D7J_at; Start 139; Stop 163
caaatggcgctcgaagctgagaaag

SEQ ID NO: 146672 - DNA, 25 bp, Artificial
  probe
  misc_feature (1)..(25): SEQ ID NO: 5303; WAN024D7J_at; Start 568; Stop 592
gaagaaacagtcctaaactcacttg

SEQ ID NO: 146673 - DNA, 25 bp, Artificial
  probe
  misc_feature (1)..(25): SEQ ID NO: 5303; WAN024D7J_at; Start 91; Stop 115
aaagtattatttatcgtcggatcac

SEQ ID NO: 146674 - DNA, 25 bp, Artificial
  probe
  misc_feature (1)..(25): SEQ ID NO: 5303; WAN024D7J_at; Start 471; Stop 495
caaagacctcttgccatttatccgt

SEQ ID NO: 146675 - DNA, 25 bp, Artificial
  probe
  misc_feature (1)..(25): SEQ ID NO: 5303; WAN024D7J_at; Start 596; Stop 620
aacaagctcaagacttggtcgaagc

SEQ ID NO: 146676 - DNA, 25 bp, Artificial
  probe
  misc_feature (1)..(25): SEQ ID NO: 5303; WAN024D7J_at; Start 196; Stop 220
gattattcagcccttcctctcttca

SEQ ID NO: 146677 - DNA, 25 bp, Artificial
  probe
  misc_feature (1)..(25): SEQ ID NO: 5303; WAN024D7J_at; Start 31; Stop 55
ttttataacaacgagagagttctcg

SEQ ID NO: 146678 - DNA, 25 bp, Artificial
  probe
  misc_feature (1)..(25): SEQ ID NO: 5303; WAN024D7J_at; Start 497; Stop 521
cacaaggcgttggtgatttcactgc

SEQ ID NO: 146679 - DNA, 25 bp, Artificial
  probe
  misc_feature (1)..(25): SEQ ID NO: 5303; WAN024D7J_at; Start 43; Stop 67
gagagagttctcgaaattttaagaa

SEQ ID NO: 146680 - DNA, 25 bp, Artificial
  probe
  misc_feature (1)..(25): SEQ ID NO: 5303; WAN024D7J_at; Start 341; Stop 365
aaaacttgcttgactggctatctcg

SEQ ID NO: 146681 - DNA, 25 bp, Artificial
  probe
  misc_feature (1)..(25): SEQ ID NO: 859; WAN024D7K_at; Start 1096; Stop 1120
gaaaatgtccgcctcagctatgcga

SEQ ID NO: 146682 - DNA, 25 bp, Artificial
  probe
  misc_feature (1)..(25): SEQ ID NO: 859; WAN024D7K_at; Start 320; Stop 344
tctttatggctgtggtcaatccagg

SEQ ID NO: 146683 - DNA, 25 bp, Artificial
  probe
  misc_feature (1)..(25): SEQ ID NO: 859; WAN024D7K_at; Start 805; Stop 829
tcgaatccgtcagcagtagcccaat

SEQ ID NO: 146684 - DNA, 25 bp, Artificial
  probe
  misc_feature (1)..(25): SEQ ID NO: 859; WAN024D7K_at; Start 35; Stop 59
aaagtgtgactttggctgctggagc

SEQ ID NO: 146685 - DNA, 25 bp, Artificial
  probe
  misc_feature (1)..(25): SEQ ID NO: 859; WAN024D7K_at; Start 825; Stop 849
ccaatatgcagcagttgaggctcta

SEQ ID NO: 146686 - DNA, 25 bp, Artificial
  probe
  misc_feature (1)..(25): SEQ ID NO: 859; WAN024D7K_at; Start 1134; Stop 1158
gcttaaagaagcagtcgaacgcttg

SEQ ID NO: 146687 - DNA, 25 bp, Artificial
  probe
  misc_feature (1)..(25): SEQ ID NO: 859; WAN024D7K_at; Start 631; Stop 655
tataatggtcatgagttcacaccga

SEQ ID NO: 146688 - DNA, 25 bp, Artificial
  probe
  misc_feature (1)..(25): SEQ ID NO: 859; WAN024D7K_at; Start 1055; Stop 1079
ccgaagtggccttggtaacaggagc

SEQ ID NO: 146689 - DNA, 25 bp, Artificial
  probe
  misc_feature (1)..(25): SEQ ID NO: 859; WAN024D7K_at; Start 137; Stop 161
aaaatatccaagatgccgccattgc

SEQ ID NO: 146690 - DNA, 25 bp, Artificial
  probe
  misc_feature (1)..(25): SEQ ID NO: 859; WAN024D7K_at; Start 509; Stop 533
tgaattcgccatctaatcccacagg

SEQ ID NO: 146691 - DNA, 25 bp, Artificial
  probe
  misc_feature (1)..(25): SEQ ID NO: 859; WAN024D7K_at; Start 674; Stop 698
cgattcgcaagcaaacagtggtcat

SEQ ID NO: 146692 - DNA, 25 bp, Artificial
  probe
  misc_feature (1)..(25): SEQ ID NO: 859; WAN024D7K_at; Start 864; Stop 888
tactgtagaaagcatgcgtcaggcc

SEQ ID NO: 146693 - DNA, 25 bp, Artificial
  probe
  misc_feature (1)..(25): SEQ ID NO: 859; WAN024D7K_at; Start 880; Stop 904
cgtcaggcctttgaggaacgtctta

SEQ ID NO: 146694 - DNA, 25 bp, Artificial
  probe
  misc_feature (1)..(25): SEQ ID NO: 859; WAN024D7K_at; Start 71; Stop 95
cactgaaggctgagggtagagatat

SEQ ID NO: 146695 - DNA, 25 bp, Artificial
  probe
  misc_feature (1)..(25): SEQ ID NO: 859; WAN024D7K_at; Start 1112; Stop 1136
gctatgcgacagacctagacacgct

SEQ ID NO: 146696 - DNA, 25 bp, Artificial
  probe
  misc_feature (1)..(25): SEQ ID NO: 859; WAN024D7K_at; Start 478; Stop 502
gctcgcactgacaagaccaaggttt

SEQ ID NO: 146697 - DNA, 25 bp, Artificial
  probe
  misc_feature (1)..(25): SEQ ID NO: 859; WAN024D7K_at; Start 768; Stop 792
tatcgctgccatgtccaagattgca

SEQ ID NO: 146698 - DNA, 25 bp, Artificial
  probe
  misc_feature (1)..(25): SEQ ID NO: 859; WAN024D7K_at; Start 1012; Stop 1036
tacacggatgtgacagactttacaa

SEQ ID NO: 146699 - DNA, 25 bp, Artificial
  probe
  misc_feature (1)..(25): SEQ ID NO: 859; WAN024D7K_at; Start 54; Stop 78
tggagcccgtgccaaagcactgaag

SEQ ID NO: 146700 - DNA, 25 bp, Artificial
  probe
  misc_feature (1)..(25): SEQ ID NO: 859; WAN024D7K_at; Start 368; Stop 392
catactgggttagctatggagatca

SEQ ID NO: 146701 - DNA, 25 bp, Artificial
  probe
  misc_feature (1)..(25): SEQ ID NO: 859; WAN024D7K_at; Start 976; Stop 1000
ttcccaaatgtcaaaaaggccatgg

SEQ ID NO: 146702 - DNA, 25 bp, Artificial
  probe
  misc_feature (1)..(25): SEQ ID NO: 859; WAN024D7K_at; Start 539; Stop 563
tttacacccgtgaggaactcttggc

SEQ ID NO: 146703 - DNA, 25 bp, Artificial
  probe
  misc_feature (1)..(25): SEQ ID NO: 859; WAN024D7K_at; Start 271; Stop 295
tcaaatcaagtgacagtcgctgcgg

SEQ ID NO: 146704 - DNA, 25 bp, Artificial
  probe
  misc_feature (1)..(25): SEQ ID NO: 859; WAN024D7K_at; Start 554; Stop 578
aactcttggcaattggaaactgggc

SEQ ID NO: 146705 - DNA, 25 bp, Artificial
  probe
  misc_feature (1)..(25): SEQ ID NO: 859; WAN024D7K_at; Start 660; Stop 684
tagcctatcggaagcgattcgcaag

SEQ ID NO: 146706 - DNA, 25 bp, Artificial
  probe
  misc_feature (1)..(25): SEQ ID NO: 859; WAN024D7K_at; Start 494; Stop 518
ccaaggttttggtgctgaattcgcc

SEQ ID NO: 146707 - DNA, 25 bp, Artificial
  probe
  misc_feature (1)..(25): SEQ ID NO: 859; WAN024D7K_at; Start 161; Stop 185
catcgattcgagatgggcgtgcttc

SEQ ID NO: 146708 - DNA, 25 bp, Artificial
  probe
  misc_feature (1)..(25): SEQ ID NO: 859; WAN024D7K_at; Start 286; Stop 310
gtcgctgcgggagccaaatattctc

SEQ ID NO: 146709 - DNA, 25 bp, Artificial
  probe
  misc_feature (1)..(25): SEQ ID NO: 859; WAN024D7K_at; Start 234; Stop 258
tagctactttgagcgcttttacggc

SEQ ID NO: 146710 - DNA, 25 bp, Artificial
  probe
  misc_feature (1)..(25): SEQ ID NO: 859; WAN024D7K_at; Start 202; Stop 226
tcaggtctgccagagcttaaggcgg

SEQ ID NO: 146711 - DNA, 25 bp, Artificial
  probe
  misc_feature (1)..(25): SEQ ID NO: 859; WAN024D7K_at; Start 789; Stop 813
tgcaggtcaaacaacttcgaatccg

SEQ ID NO: 146712 - DNA, 25 bp, Artificial
  probe
  misc_feature (1)..(25): SEQ ID NO: 859; WAN024D7K_at; Start 395; Stop 419
tcaagatggcagaaggcgttcccgt

SEQ ID NO: 146713 - DNA, 25 bp, Artificial
  probe
  misc_feature (1)..(25): SEQ ID NO: 859; WAN024D7K_at; Start 1041; Stop 1065
tatcttagaagaagccgaagtggcc

SEQ ID NO: 146714 - DNA, 25 bp, Artificial
  probe
  misc_feature (1)..(25): SEQ ID NO: 859; WAN024D7K_at; Start 98; Stop 122
tgtctctaaccttgggtgagccaga

SEQ ID NO: 146715 - DNA, 25 bp, Artificial
  probe
  misc_feature (1)..(25): SEQ ID NO: 2482; WAN024D7L_at; Start 201; Stop 225
aaatgacgatgcagctcttaaagag

SEQ ID NO: 146716 - DNA, 25 bp, Artificial
  probe
  misc_feature (1)..(25): SEQ ID NO: 2482; WAN024D7L_at; Start 151; Stop 175
gaaatccaagatttccgtgaaggac

SEQ ID NO: 146717 - DNA, 25 bp, Artificial
  probe
  misc_feature (1)..(25): SEQ ID NO: 2482; WAN024D7L_at; Start 50; Stop 74
aagctaaaaacgctttggtagcacg

SEQ ID NO: 146718 - DNA, 25 bp, Artificial
  probe
  misc_feature (1)..(25): SEQ ID NO: 2482; WAN024D7L_at; Start 196; Stop 220
gaagcaaatgacgatgcagctctta

SEQ ID NO: 146719 - DNA, 25 bp, Artificial
  probe
  misc_feature (1)..(25): SEQ ID NO: 2482; WAN024D7L_at; Start 82; Stop 106
tctattttgactgacaacggtgcaa

SEQ ID NO: 146720 - DNA, 25 bp, Artificial
  probe
  misc_feature (1)..(25): SEQ ID NO: 2482; WAN024D7L_at; Start 30; Stop 54
tcgtccaaacattgaagaagaagct

SEQ ID NO: 146721 - DNA, 25 bp, Artificial
  probe
  misc_feature (1)..(25): SEQ ID NO: 2482; WAN024D7L_at; Start 136; Stop 160
cgtcgtcttgcatacgaaatccaag

SEQ ID NO: 146722 - DNA, 25 bp, Artificial
  probe
  misc_feature (1)..(25): SEQ ID NO: 2482; WAN024D7L_at; Start 22; Stop 46
tatatcattcgtccaaacattgaag

SEQ ID NO: 146723 - DNA, 25 bp, Artificial
  probe
  misc_feature (1)..(25): SEQ ID NO: 2482; WAN024D7L_at; Start 130; Stop 154
gaaaaacgtcgtcttgcatacgaaa

SEQ ID NO: 146724 - DNA, 25 bp, Artificial
  probe
  misc_feature (1)..(25): SEQ ID NO: 2482; WAN024D7L_at; Start 68; Stop 92
tagcacgttttgactctattttgac

SEQ ID NO: 146725 - DNA, 25 bp, Artificial
  probe
  misc_feature (1)..(25): SEQ ID NO: 2482; WAN024D7L_at; Start 165; Stop 189
ccgtgaaggactttaccacatcgtt

SEQ ID NO: 146726 - DNA, 25 bp, Artificial
  probe
  misc_feature (1)..(25): SEQ ID NO: 2482; WAN024D7L_at; Start 107; Stop 131
ctgttgttgaatcaaaaacttggga

SEQ ID NO: 146727 - DNA, 25 bp, Artificial
  probe
  misc_feature (1)..(25): SEQ ID NO: 2482; WAN024D7L_at; Start 247; Stop 271
aacgctgacattcttcgtcacatga

SEQ ID NO: 146728 - DNA, 25 bp, Artificial
  probe
  misc_feature (1)..(25): SEQ ID NO: 2482; WAN024D7L_at; Start 160; Stop 184
gatttccgtgaaggactttaccaca

SEQ ID NO: 146729 - DNA, 25 bp, Artificial
  probe
  misc_feature (1)..(25): SEQ ID NO: 2482; WAN024D7L_at; Start 89; Stop 113
tgactgacaacggtgcaactgttgt

SEQ ID NO: 146730 - DNA, 25 bp, Artificial
  probe
  misc_feature (1)..(25): SEQ ID NO: 2482; WAN024D7L_at; Start 239; Stop 263
caaaaatcaacgctgacattcttcg

SEQ ID NO: 146731 - DNA, 25 bp, Artificial
  probe
  misc_feature (1)..(25): SEQ ID NO: 2482; WAN024D7L_at; Start 33; Stop 57
tccaaacattgaagaagaagctaaa

SEQ ID NO: 146732 - DNA, 25 bp, Artificial
  probe
  misc_feature (1)..(25): SEQ ID NO: 2482; WAN024D7L_at; Start 272; Stop 296
tcgtcaaaattgacgcgtaactaat

SEQ ID NO: 146733 - DNA, 25 bp, Artificial
  probe
  misc_feature (1)..(25): SEQ ID NO: 2482; WAN024D7L_at; Start 96; Stop 120
caacggtgcaactgttgttgaatca

SEQ ID NO: 146734 - DNA, 25 bp, Artificial
  probe
  misc_feature (1)..(25): SEQ ID NO: 2482; WAN024D7L_at; Start 86; Stop 110
ttttgactgacaacggtgcaactgt

SEQ ID NO: 146735 - DNA, 25 bp, Artificial
  probe
  misc_feature (1)..(25): SEQ ID NO: 2482; WAN024D7L_at; Start 79; Stop 103
gactctattttgactgacaacggtg

SEQ ID NO: 146736 - DNA, 25 bp, Artificial
  probe
  misc_feature (1)..(25): SEQ ID NO: 2482; WAN024D7L_at; Start 211; Stop 235
gcagctcttaaagagtttgaccgtc

SEQ ID NO: 146737 - DNA, 25 bp, Artificial
  probe
  misc_feature (1)..(25): SEQ ID NO: 2482; WAN024D7L_at; Start 3; Stop 27
ggctaaatacgaaattctttatatc

SEQ ID NO: 146738 - DNA, 25 bp, Artificial
  probe
  misc_feature (1)..(25): SEQ ID NO: 2482; WAN024D7L_at; Start 253; Stop 277
gacattcttcgtcacatgatcgtca

SEQ ID NO: 146739 - DNA, 25 bp, Artificial
  probe
  misc_feature (1)..(25): SEQ ID NO: 2482; WAN024D7L_at; Start 13; Stop 37
gaaattctttatatcattcgtccaa

SEQ ID NO: 146740 - DNA, 25 bp, Artificial
  probe
  misc_feature (1)..(25): SEQ ID NO: 2482; WAN024D7L_at; Start 192; Stop 216
cgttgaagcaaatgacgatgcagct

SEQ ID NO: 146741 - DNA, 25 bp, Artificial
  probe
  misc_feature (1)..(25): SEQ ID NO: 2482; WAN024D7L_at; Start 216; Stop 240
tcttaaagagtttgaccgtctttca

SEQ ID NO: 146742 - DNA, 25 bp, Artificial
  probe
  misc_feature (1)..(25): SEQ ID NO: 2482; WAN024D7L_at; Start 260; Stop 284
ttcgtcacatgatcgtcaaaattga

SEQ ID NO: 146743 - DNA, 25 bp, Artificial
  probe
  misc_feature (1)..(25): SEQ ID NO: 2482; WAN024D7L_at; Start 229; Stop 253
gaccgtctttcaaaaatcaacgctg

SEQ ID NO: 146744 - DNA, 25 bp, Artificial
  probe
  misc_feature (1)..(25): SEQ ID NO: 2482; WAN024D7L_at; Start 124; Stop 148
acttgggaaaaacgtcgtcttgcat

SEQ ID NO: 146745 - DNA, 25 bp, Artificial
  probe
  misc_feature (1)..(25): SEQ ID NO: 2482; WAN024D7L_at; Start 232; Stop 256
cgtctttcaaaaatcaacgctgaca

SEQ ID NO: 146746 - DNA, 25 bp, Artificial
  probe
  misc_feature (1)..(25): SEQ ID NO: 2482; WAN024D7L_at; Start 99; Stop 123
cggtgcaactgttgttgaatcaaaa

SEQ ID NO: 146747 - DNA, 25 bp, Artificial
  probe
  misc_feature (1)..(25): SEQ ID NO: 2482; WAN024D7L_at; Start 60; Stop 84
cgctttggtagcacgttttgactct

SEQ ID NO: 146748 - DNA, 25 bp, Artificial
  probe
  misc_feature (1)..(25): SEQ ID NO: 2482; WAN024D7L_at; Start 264; Stop 288
tcacatgatcgtcaaaattgacgcg

SEQ ID NO: 146749 - DNA, 25 bp, Artificial
  probe
  misc_feature (1)..(25): SEQ ID NO: 6637; WAN024D7M_at; Start 113; Stop 137
aaaacgaaaatggagagcgtgaggc

SEQ ID NO: 146750 - DNA, 25 bp, Artificial
  probe
  misc_feature (1)..(25): SEQ ID NO: 6637; WAN024D7M_at; Start 12; Stop 36
cgtcacactggttgggaggcttgta

SEQ ID NO: 146751 - DNA, 25 bp, Artificial
  probe
  misc_feature (1)..(25): SEQ ID NO: 6637; WAN024D7M_at; Start 241; Stop 265
tcttacgagaaagacggtcagcgtc

SEQ ID NO: 146752 - DNA, 25 bp, Artificial
  probe
  misc_feature (1)..(25): SEQ ID NO: 6637; WAN024D7M_at; Start 294; Stop 318
tgtagctctgctagagagtcgcaac

SEQ ID NO: 146753 - DNA, 25 bp, Artificial
  probe
  misc_feature (1)..(25): SEQ ID NO: 6637; WAN024D7M_at; Start 174; Stop 198
tgacatcattgctcagtattgcagc

SEQ ID NO: 146754 - DNA, 25 bp, Artificial
  probe
  misc_feature (1)..(25): SEQ ID NO: 6637; WAN024D7M_at; Start 35; Stop 59
tagcgcctcctgatctacgaaaaac

SEQ ID NO: 146755 - DNA, 25 bp, Artificial
  probe
  misc_feature (1)..(25): SEQ ID NO: 6637; WAN024D7M_at; Start 29; Stop 53
ggcttgtagcgcctcctgatctacg

SEQ ID NO: 146756 - DNA, 25 bp, Artificial
  probe
  misc_feature (1)..(25): SEQ ID NO: 6637; WAN024D7M_at; Start 331; Stop 355
caaggcaacagtttccaaaatggga

SEQ ID NO: 146757 - DNA, 25 bp, Artificial
  probe
  misc_feature (1)..(25): SEQ ID NO: 6637; WAN024D7M_at; Start 255; Stop 279
cggtcagcgtcgatatgtgactgaa

SEQ ID NO: 146758 - DNA, 25 bp, Artificial
  probe
  misc_feature (1)..(25): SEQ ID NO: 6637; WAN024D7M_at; Start 195; Stop 219
cagcaagggctcacttattgggatc

SEQ ID NO: 146759 - DNA, 25 bp, Artificial
  probe
  misc_feature (1)..(25): SEQ ID NO: 6637; WAN024D7M_at; Start 309; Stop 333
gagtcgcaacagtcagcacggacaa

SEQ ID NO: 146760 - DNA, 25 bp, Artificial
  probe
  misc_feature (1)..(25): SEQ ID NO: 6637; WAN024D7M_at; Start 344; Stop 368
tccaaaatgggaatagctcaccttt

SEQ ID NO: 146761 - DNA, 25 bp, Artificial
  probe
  misc_feature (1)..(25): SEQ ID NO: 6637; WAN024D7M_at; Start 82; Stop 106
cagggcacgcttgcagtcaatcgca

SEQ ID NO: 146762 - DNA, 25 bp, Artificial
  probe
  misc_feature (1)..(25): SEQ ID NO: 6637; WAN024D7M_at; Start 94; Stop 118
gcagtcaatcgcaatttcaaaaacg

SEQ ID NO: 146763 - DNA, 25 bp, Artificial
  probe
  misc_feature (1)..(25): SEQ ID NO: 6637; WAN024D7M_at; Start 109; Stop 133
ttcaaaaacgaaaatggagagcgtg

SEQ ID NO: 146764 - DNA, 25 bp, Artificial
  probe
  misc_feature (1)..(25): SEQ ID NO: 6637; WAN024D7M_at; Start 154; Stop 178
caagcttggagaggtacagctgaca

SEQ ID NO: 146765 - DNA, 25 bp, Artificial
  probe
  misc_feature (1)..(25): SEQ ID NO: 6637; WAN024D7M_at; Start 387; Stop 411
tgacctcccaaatgacggtttgccg

SEQ ID NO: 146766 - DNA, 25 bp, Artificial
  probe
  misc_feature (1)..(25): SEQ ID NO: 6637; WAN024D7M_at; Start 205; Stop 229
tcacttattgggatcattgggcgct

SEQ ID NO: 146767 - DNA, 25 bp, Artificial
  probe
  misc_feature (1)..(25): SEQ ID NO: 6637; WAN024D7M_at; Start 281; Stop 305
taatcgctgagagtgtagctctgct

SEQ ID NO: 146768 - DNA, 25 bp, Artificial
  probe
  misc_feature (1)..(25): SEQ ID NO: 6637; WAN024D7M_at; Start 164; Stop 188
gaggtacagctgacatcattgctca

SEQ ID NO: 146769 - DNA, 25 bp, Artificial
  probe
  misc_feature (1)..(25): SEQ ID NO: 6637; WAN024D7M_at; Start 304; Stop 328
ctagagagtcgcaacagtcagcacg

SEQ ID NO: 146770 - DNA, 25 bp, Artificial
  probe
  misc_feature (1)..(25): SEQ ID NO: 6637; WAN024D7M_at; Start 226; Stop 250
cgcttacaagttaggtcttacgaga

SEQ ID NO: 146771 - DNA, 25 bp, Artificial
  probe
  misc_feature (1)..(25): SEQ ID NO: 6637; WAN024D7M_at; Start 42; Stop 66
tcctgatctacgaaaaacgcctaat

SEQ ID NO: 146772 - DNA, 25 bp, Artificial
  probe
  misc_feature (1)..(25): SEQ ID NO: 6637; WAN024D7M_at; Start 7; Stop 31
aataacgtcacactggttgggaggc

SEQ ID NO: 146773 - DNA, 25 bp, Artificial
  probe
  misc_feature (1)..(25): SEQ ID NO: 6637; WAN024D7M_at; Start 218; Stop 242
tcattgggcgcttacaagttaggtc

SEQ ID NO: 146774 - DNA, 25 bp, Artificial
  probe
  misc_feature (1)..(25): SEQ ID NO: 6637; WAN024D7M_at; Start 71; Stop 95
tatctagtttacagggcacgcttgc

SEQ ID NO: 146775 - DNA, 25 bp, Artificial
  probe
  misc_feature (1)..(25): SEQ ID NO: 6637; WAN024D7M_at; Start 183; Stop 207
tgctcagtattgcagcaagggctca

SEQ ID NO: 146776 - DNA, 25 bp, Artificial
  probe
  misc_feature (1)..(25): SEQ ID NO: 6637; WAN024D7M_at; Start 268; Stop 292
tatgtgactgaagtaatcgctgaga

SEQ ID NO: 146777 - DNA, 25 bp, Artificial
  probe
  misc_feature (1)..(25): SEQ ID NO: 6637; WAN024D7M_at; Start 354; Stop 378
gaatagctcaccttttaccgatcct

SEQ ID NO: 146778 - DNA, 25 bp, Artificial
  probe
  misc_feature (1)..(25): SEQ ID NO: 6637; WAN024D7M_at; Start 53; Stop 77
gaaaaacgcctaataatgtatctag

SEQ ID NO: 146779 - DNA, 25 bp, Artificial
  probe
  misc_feature (1)..(25): SEQ ID NO: 6637; WAN024D7M_at; Start 66; Stop 90
taatgtatctagtttacagggcacg

SEQ ID NO: 146780 - DNA, 25 bp, Artificial
  probe
  misc_feature (1)..(25): SEQ ID NO: 6637; WAN024D7M_at; Start 321; Stop 345
tcagcacggacaaggcaacagtttc

SEQ ID NO: 146781 - DNA, 25 bp, Artificial
  probe
  misc_feature (1)..(25): SEQ ID NO: 6637; WAN024D7M_at; Start 2; Stop 26
tgatcaataacgtcacactggttgg

SEQ ID NO: 146782 - DNA, 25 bp, Artificial
  probe
  misc_feature (1)..(25): SEQ ID NO: 6637; WAN024D7M_at; Start 139; Stop 163
gattttatcaattttcaagcttgga

SEQ ID NO: 146783 - DNA, 25 bp, Artificial
  probe
  misc_feature (1)..(25): SEQ ID NO: 6621; WAN024D7N_at; Start 445; Stop 469
gggaacacaacaaatctagttcctg

SEQ ID NO: 146784 - DNA, 25 bp, Artificial
  probe
  misc_feature (1)..(25): SEQ ID NO: 6621; WAN024D7N_at; Start 386; Stop 410
atcaaggcagttctttccaaaatgg

SEQ ID NO: 146785 - DNA, 25 bp, Artificial
  probe
  misc_feature (1)..(25): SEQ ID NO: 6621; WAN024D7N_at; Start 29; Stop 53
gacttacaagagatgccgaactgag

SEQ ID NO: 146786 - DNA, 25 bp, Artificial
  probe
  misc_feature (1)..(25): SEQ ID NO: 6621; WAN024D7N_at; Start 93; Stop 117
tgctgtaaaccgtccatttaagaac

SEQ ID NO: 146787 - DNA, 25 bp, Artificial
  probe
  misc_feature (1)..(25): SEQ ID NO: 6621; WAN024D7N_at; Start 314; Stop 338
gccgtaacagtcagcaaaataatca

SEQ ID NO: 146788 - DNA, 25 bp, Artificial
  probe
  misc_feature (1)..(25): SEQ ID NO: 6621; WAN024D7N_at; Start 325; Stop 349
cagcaaaataatcaaggtcatcaag

SEQ ID NO: 146789 - DNA, 25 bp, Artificial
  probe
  misc_feature (1)..(25): SEQ ID NO: 6621; WAN024D7N_at; Start 340; Stop 364
ggtcatcaagaccatcatggcggtt

SEQ ID NO: 146790 - DNA, 25 bp, Artificial
  probe
  misc_feature (1)..(25): SEQ ID NO: 6621; WAN024D7N_at; Start 221; Stop 245
caggagtaattcaaacacgtagcta

SEQ ID NO: 146791 - DNA, 25 bp, Artificial
  probe
  misc_feature (1)..(25): SEQ ID NO: 6621; WAN024D7N_at; Start 43; Stop 67
gccgaactgagatacacgcaatcta

SEQ ID NO: 146792 - DNA, 25 bp, Artificial
  probe
  misc_feature (1)..(25): SEQ ID NO: 6621; WAN024D7N_at; Start 517; Stop 541
gatattagtgatgatgatttaccgt

SEQ ID NO: 146793 - DNA, 25 bp, Artificial
  probe
  misc_feature (1)..(25): SEQ ID NO: 6621; WAN024D7N_at; Start 414; Stop 438
tagttacgggcaacaaggcagtttc

SEQ ID NO: 146794 - DNA, 25 bp, Artificial
  probe
  misc_feature (1)..(25): SEQ ID NO: 6621; WAN024D7N_at; Start 256; Stop 280
caaggtcaacgtgtttatgtcacag

SEQ ID NO: 146795 - DNA, 25 bp, Artificial
  probe
  misc_feature (1)..(25): SEQ ID NO: 6621; WAN024D7N_at; Start 198; Stop 222
aaaaggctctcttatcggagttaca

SEQ ID NO: 146796 - DNA, 25 bp, Artificial
  probe
  misc_feature (1)..(25): SEQ ID NO: 6621; WAN024D7N_at; Start 459; Stop 483
tctagttcctgatttcacccgtgat

SEQ ID NO: 146797 - DNA, 25 bp, Artificial
  probe
  misc_feature (1)..(25): SEQ ID NO: 6621; WAN024D7N_at; Start 305; Stop 329
tgttggaaagccgtaacagtcagca

SEQ ID NO: 146798 - DNA, 25 bp, Artificial
  probe
  misc_feature (1)..(25): SEQ ID NO: 6621; WAN024D7N_at; Start 152; Stop 176
gcgttatctggagacagttagctga

SEQ ID NO: 146799 - DNA, 25 bp, Artificial
  probe
  misc_feature (1)..(25): SEQ ID NO: 6621; WAN024D7N_at; Start 61; Stop 85
caatctaatattgcggttgctacgt

SEQ ID NO: 146800 - DNA, 25 bp, Artificial
  probe
  misc_feature (1)..(25): SEQ ID NO: 6621; WAN024D7N_at; Start 483; Stop 507
taacaatccatttggcagacccaca

SEQ ID NO: 146801 - DNA, 25 bp, Artificial
  probe
  misc_feature (1)..(25): SEQ ID NO: 6621; WAN024D7N_at; Start 401; Stop 425
tccaaaatggaaatagttacgggca

SEQ ID NO: 146802 - DNA, 25 bp, Artificial
  probe
  misc_feature (1)..(25): SEQ ID NO: 6621; WAN024D7N_at; Start 107; Stop 131
catttaagaacgaggctggagagcg

SEQ ID NO: 146803 - DNA, 25 bp, Artificial
  probe
  misc_feature (1)..(25): SEQ ID NO: 6621; WAN024D7N_at; Start 162; Stop 186
gagacagttagctgaaaatcttgct

SEQ ID NO: 146804 - DNA, 25 bp, Artificial
  probe
  misc_feature (1)..(25): SEQ ID NO: 6621; WAN024D7N_at; Start 231; Stop 255
tcaaacacgtagctatgataaccag

SEQ ID NO: 146805 - DNA, 25 bp, Artificial
  probe
  misc_feature (1)..(25): SEQ ID NO: 6621; WAN024D7N_at; Start 289; Stop 313
gccagtaattttcaactgttggaaa

SEQ ID NO: 146806 - DNA, 25 bp, Artificial
  probe
  misc_feature (1)..(25): SEQ ID NO: 6621; WAN024D7N_at; Start 206; Stop 230
ctcttatcggagttacaggagtaat

SEQ ID NO: 146807 - DNA, 25 bp, Artificial
  probe
  misc_feature (1)..(25): SEQ ID NO: 6621; WAN024D7N_at; Start 375; Stop 399
gggctacagtaatcaaggcagttct

SEQ ID NO: 146808 - DNA, 25 bp, Artificial
  probe
  misc_feature (1)..(25): SEQ ID NO: 6621; WAN024D7N_at; Start 75; Stop 99
ggttgctacgtttactcttgctgta

SEQ ID NO: 146809 - DNA, 25 bp, Artificial
  probe
  misc_feature (1)..(25): SEQ ID NO: 6621; WAN024D7N_at; Start 354; Stop 378
tcatggcggttatcagcagcagggc

SEQ ID NO: 146810 - DNA, 25 bp, Artificial
  probe
  misc_feature (1)..(25): SEQ ID NO: 6621; WAN024D7N_at; Start 367; Stop 391
cagcagcagggctacagtaatcaag

SEQ ID NO: 146811 - DNA, 25 bp, Artificial
  probe
  misc_feature (1)..(25): SEQ ID NO: 6621; WAN024D7N_at; Start 273; Stop 297
tgtcacagaagttgttgccagtaat

SEQ ID NO: 146812 - DNA, 25 bp, Artificial
  probe
  misc_feature (1)..(25): SEQ ID NO: 6621; WAN024D7N_at; Start 495; Stop 519
tggcagacccacaaatccattggat

SEQ ID NO: 146813 - DNA, 25 bp, Artificial
  probe
  misc_feature (1)..(25): SEQ ID NO: 6621; WAN024D7N_at; Start 20; Stop 44
tagtagggcgacttacaagagatgc

SEQ ID NO: 146814 - DNA, 25 bp, Artificial
  probe
  misc_feature (1)..(25): SEQ ID NO: 6621; WAN024D7N_at; Start 144; Stop 168
tatcaattgcgttatctggagacag

SEQ ID NO: 146815 - DNA, 25 bp, Artificial
  probe
  misc_feature (1)..(25): SEQ ID NO: 6621; WAN024D7N_at; Start 242; Stop 266
gctatgataaccagcaaggtcaacg

SEQ ID NO: 146816 - DNA, 25 bp, Artificial
  probe
  misc_feature (1)..(25): SEQ ID NO: 6621; WAN024D7N_at; Start 473; Stop 497
tcacccgtgataacaatccatttgg

SEQ ID NO: 146817 - DNA, 25 bp, Artificial
  probe
  misc_feature (1)..(25): SEQ ID NO: 1783; WAN024D7O_at; Start 431; Stop 455
caaacccattggatatttcagatga

SEQ ID NO: 146818 - DNA, 25 bp, Artificial
  probe
  misc_feature (1)..(25): SEQ ID NO: 1783; WAN024D7O_at; Start 302; Stop 326
aaatgttggaaagccgtagtgtgcg

SEQ ID NO: 146819 - DNA, 25 bp, Artificial
  probe
  misc_feature (1)..(25): SEQ ID NO: 1783; WAN024D7O_at; Start 215; Stop 239
gggtgacaggtcgtatccagactcg

SEQ ID NO: 146820 - DNA, 25 bp, Artificial
  probe
  misc_feature (1)..(25): SEQ ID NO: 1783; WAN024D7O_at; Start 238; Stop 262
cgtagttacgataaccagcaaggac

SEQ ID NO: 146821 - DNA, 25 bp, Artificial
  probe
  misc_feature (1)..(25): SEQ ID NO: 1783; WAN024D7O_at; Start 404; Stop 428
cacgtaatgaaaatccatttggagc

SEQ ID NO: 146822 - DNA, 25 bp, Artificial
  probe
  misc_feature (1)..(25): SEQ ID NO: 1783; WAN024D7O_at; Start 118; Stop 142
caaaatggtgaacgtgaggctgatt

SEQ ID NO: 146823 - DNA, 25 bp, Artificial
  probe
  misc_feature (1)..(25): SEQ ID NO: 1783; WAN024D7O_at; Start 50; Stop 74
tgcgttataccccatcaaatgtagc

SEQ ID NO: 146824 - DNA, 25 bp, Artificial
  probe
  misc_feature (1)..(25): SEQ ID NO: 1783; WAN024D7O_at; Start 21; Stop 45
tgtagggcgtatgacacgtgacgct

SEQ ID NO: 146825 - DNA, 25 bp, Artificial
  probe
  misc_feature (1)..(25): SEQ ID NO: 1783; WAN024D7O_at; Start 6; Stop 30
taacaatgttgtacttgtagggcgt

SEQ ID NO: 146826 - DNA, 25 bp, Artificial
  probe
  misc_feature (1)..(25): SEQ ID NO: 1783; WAN024D7O_at; Start 94; Stop 118
gcagtaaaccgtacatttaagagtc

SEQ ID NO: 146827 - DNA, 25 bp, Artificial
  probe
  misc_feature (1)..(25): SEQ ID NO: 1783; WAN024D7O_at; Start 158; Stop 182
tgtggcgccaacaggctgaaaatct

SEQ ID NO: 146828 - DNA, 25 bp, Artificial
  probe
  misc_feature (1)..(25): SEQ ID NO: 1783; WAN024D7O_at; Start 223; Stop 247
ggtcgtatccagactcgtagttacg

SEQ ID NO: 146829 - DNA, 25 bp, Artificial
  probe
  misc_feature (1)..(25): SEQ ID NO: 1783; WAN024D7O_at; Start 147; Stop 171
caatgtcgttatgtggcgccaacag

SEQ ID NO: 146830 - DNA, 25 bp, Artificial
  probe
  misc_feature (1)..(25): SEQ ID NO: 1783; WAN024D7O_at; Start 198; Stop 222
aaaaggctcacttatcggggtgaca

SEQ ID NO: 146831 - DNA, 25 bp, Artificial
  probe
  misc_feature (1)..(25): SEQ ID NO: 1783; WAN024D7O_at; Start 252; Stop 276
ccagcaaggacaacgtgtctacgtg

SEQ ID NO: 146832 - DNA, 25 bp, Artificial
  probe
  misc_feature (1)..(25): SEQ ID NO: 1783; WAN024D7O_at; Start 71; Stop 95
tagcagttgcgacttttactcttgc

SEQ ID NO: 146833 - DNA, 25 bp, Artificial
  probe
  misc_feature (1)..(25): SEQ ID NO: 1783; WAN024D7O_at; Start 17; Stop 41
tacttgtagggcgtatgacacgtga

SEQ ID NO: 146834 - DNA, 25 bp, Artificial
  probe
  misc_feature (1)..(25): SEQ ID NO: 1783; WAN024D7O_at; Start 354; Stop 378
tgcaccaactgcaaactattcagca

SEQ ID NO: 146835 - DNA, 25 bp, Artificial
  probe
  misc_feature (1)..(25): SEQ ID NO: 1783; WAN024D7O_at; Start 243; Stop 267
ttacgataaccagcaaggacaacgt

SEQ ID NO: 146836 - DNA, 25 bp, Artificial
  probe
  misc_feature (1)..(25): SEQ ID NO: 1783; WAN024D7O_at; Start 451; Stop 475
gatgatgatttaccattctaactaa

SEQ ID NO: 146837 - DNA, 25 bp, Artificial
  probe
  misc_feature (1)..(25): SEQ ID NO: 1783; WAN024D7O_at; Start 376; Stop 400
gcacctacaaattcagtaccagact

SEQ ID NO: 146838 - DNA, 25 bp, Artificial
  probe
  misc_feature (1)..(25): SEQ ID NO: 1783; WAN024D7O_at; Start 441; Stop 465
ggatatttcagatgatgatttacca

SEQ ID NO: 146839 - DNA, 25 bp, Artificial
  probe
  misc_feature (1)..(25): SEQ ID NO: 1783; WAN024D7O_at; Start 299; Stop 323
tccaaatgttggaaagccgtagtgt

SEQ ID NO: 146840 - DNA, 25 bp, Artificial
  probe
  misc_feature (1)..(25): SEQ ID NO: 1783; WAN024D7O_at; Start 389; Stop 413
cagtaccagacttttcacgtaatga

SEQ ID NO: 146841 - DNA, 25 bp, Artificial
  probe
  misc_feature (1)..(25): SEQ ID NO: 1783; WAN024D7O_at; Start 142; Stop 166
tttatcaatgtcgttatgtggcgcc

SEQ ID NO: 146842 - DNA, 25 bp, Artificial
  probe
  misc_feature (1)..(25): SEQ ID NO: 1783; WAN024D7O_at; Start 109; Stop 133
tttaagagtcaaaatggtgaacgtg

SEQ ID NO: 146843 - DNA, 25 bp, Artificial
  probe
  misc_feature (1)..(25): SEQ ID NO: 1783; WAN024D7O_at; Start 262; Stop 286
caacgtgtctacgtgacagaggtcg

SEQ ID NO: 146844 - DNA, 25 bp, Artificial
  probe
  misc_feature (1)..(25): SEQ ID NO: 1783; WAN024D7O_at; Start 269; Stop 293
tctacgtgacagaggtcgtggctga

SEQ ID NO: 146845 - DNA, 25 bp, Artificial
  probe
  misc_feature (1)..(25): SEQ ID NO: 1783; WAN024D7O_at; Start 419; Stop 443
catttggagcaacaaacccattgga

SEQ ID NO: 146846 - DNA, 25 bp, Artificial
  probe
  misc_feature (1)..(25): SEQ ID NO: 1783; WAN024D7O_at; Start 57; Stop 81
taccccatcaaatgtagcagttgcg

SEQ ID NO: 146847 - DNA, 25 bp, Artificial
  probe
  misc_feature (1)..(25): SEQ ID NO: 1783; WAN024D7O_at; Start 370; Stop 394
tattcagcacctacaaattcagtac

SEQ ID NO: 146848 - DNA, 25 bp, Artificial
  probe
  misc_feature (1)..(25): SEQ ID NO: 1783; WAN024D7O_at; Start 80; Stop 104
cgacttttactcttgcagtaaaccg

SEQ ID NO: 146849 - DNA, 25 bp, Artificial
  probe
  misc_feature (1)..(25): SEQ ID NO: 1783; WAN024D7O_at; Start 343; Stop 367
ggagcttactctgcaccaactgcaa

SEQ ID NO: 146850 - DNA, 25 bp, Artificial
  probe
  misc_feature (1)..(25): SEQ ID NO: 1783; WAN024D7O_at; Start 334; Stop 358
cacacaggtggagcttactctgcac

SEQ ID NO: 146851 - DNA, 25 bp, Artificial
  probe
  misc_feature (1)..(25): SEQ ID NO: 2953; WAN024D7P_at; Start 119; Stop 143
tcaatgcaaagcgacggaatgagat

SEQ ID NO: 146852 - DNA, 25 bp, Artificial
  probe
  misc_feature (1)..(25): SEQ ID NO: 2953; WAN024D7P_at; Start 171; Stop 195
tacgtatgcagcttcaagagtttca

SEQ ID NO: 146853 - DNA, 25 bp, Artificial
  probe
  misc_feature (1)..(25): SEQ ID NO: 2953; WAN024D7P_at; Start 130; Stop 154
cgacggaatgagattttctctccga

SEQ ID NO: 146854 - DNA, 25 bp, Artificial
  probe
  misc_feature (1)..(25): SEQ ID NO: 2953; WAN024D7P_at; Start 175; Stop 199
tatgcagcttcaagagtttcacctg

SEQ ID NO: 146855 - DNA, 25 bp, Artificial
  probe
  misc_feature (1)..(25): SEQ ID NO: 2953; WAN024D7P_at; Start 51; Stop 75
tgaaataacaccgatacgtccaccg

SEQ ID NO: 146856 - DNA, 25 bp, Artificial
  probe
  misc_feature (1)..(25): SEQ ID NO: 2953; WAN024D7P_at; Start 203; Stop 227
gcattatcaaagcaagagcttcttc

SEQ ID NO: 146857 - DNA, 25 bp, Artificial
  probe
  misc_feature (1)..(25): SEQ ID NO: 2953; WAN024D7P_at; Start 198; Stop 222
tgaaggcattatcaaagcaagagct

SEQ ID NO: 146858 - DNA, 25 bp, Artificial
  probe
  misc_feature (1)..(25): SEQ ID NO: 2953; WAN024D7P_at; Start 112; Stop 136
ttttcaatcaatgcaaagcgacgga

SEQ ID NO: 146859 - DNA, 25 bp, Artificial
  probe
  misc_feature (1)..(25): SEQ ID NO: 2953; WAN024D7P_at; Start 184; Stop 208
tcaagagtttcacctgaaggcatta

SEQ ID NO: 146860 - DNA, 25 bp, Artificial
  probe
  misc_feature (1)..(25): SEQ ID NO: 2953; WAN024D7P_at; Start 16; Stop 40
tgtttagcaagtgcttcgtctccac

SEQ ID NO: 146861 - DNA, 25 bp, Artificial
  probe
  misc_feature (1)..(25): SEQ ID NO: 2953; WAN024D7P_at; Start 194; Stop 218
cacctgaaggcattatcaaagcaag

SEQ ID NO: 146862 - DNA, 25 bp, Artificial
  probe
  misc_feature (1)..(25): SEQ ID NO: 2953; WAN024D7P_at; Start 22; Stop 46
gcaagtgcttcgtctccaccttcaa

SEQ ID NO: 146863 - DNA, 25 bp, Artificial
  probe
  misc_feature (1)..(25): SEQ ID NO: 2953; WAN024D7P_at; Start 70; Stop 94
ccaccgttatgttggtatgctccaa

SEQ ID NO: 146864 - DNA, 25 bp, Artificial
  probe
  misc_feature (1)..(25): SEQ ID NO: 2953; WAN024D7P_at; Start 233; Stop 257
tagcaggttttccttcagcaatgac

SEQ ID NO: 146865 - DNA, 25 bp, Artificial
  probe
  misc_feature (1)..(25): SEQ ID NO: 2953; WAN024D7P_at; Start 166; Stop 190
gcagatacgtatgcagcttcaagag

SEQ ID NO: 146866 - DNA, 25 bp, Artificial
  probe
  misc_feature (1)..(25): SEQ ID NO: 2953; WAN024D7P_at; Start 31; Stop 55
tcgtctccaccttcaacaactgaaa

SEQ ID NO: 146867 - DNA, 25 bp, Artificial
  probe
  misc_feature (1)..(25): SEQ ID NO: 2953; WAN024D7P_at; Start 103; Stop 127
gcgtctgttttttcaatcaatgcaa

SEQ ID NO: 146868 - DNA, 25 bp, Artificial
  probe
  misc_feature (1)..(25): SEQ ID NO: 2953; WAN024D7P_at; Start 155; Stop 179
tagttgctgttgcagatacgtatgc

SEQ ID NO: 146869 - DNA, 25 bp, Artificial
  probe
  misc_feature (1)..(25): SEQ ID NO: 2953; WAN024D7P_at; Start 44; Stop 68
caacaactgaaataacaccgatacg

SEQ ID NO: 146870 - DNA, 25 bp, Artificial
  probe
  misc_feature (1)..(25): SEQ ID NO: 2953; WAN024D7P_at; Start 88; Stop 112
gctccaaagtgttgtgcgtctgttt

SEQ ID NO: 146871 - DNA, 25 bp, Artificial
  probe
  misc_feature (1)..(25): SEQ ID NO: 2953; WAN024D7P_at; Start 65; Stop 89
tacgtccaccgttatgttggtatgc

SEQ ID NO: 146872 - DNA, 25 bp, Artificial
  probe
  misc_feature (1)..(25): SEQ ID NO: 2953; WAN024D7P_at; Start 150; Stop 174
tccgatagttgctgttgcagatacg

SEQ ID NO: 146873 - DNA, 25 bp, Artificial
  probe
  misc_feature (1)..(25): SEQ ID NO: 2953; WAN024D7P_at; Start 125; Stop 149
caaagcgacggaatgagattttctc

SEQ ID NO: 146874 - DNA, 25 bp, Artificial
  probe
  misc_feature (1)..(25): SEQ ID NO: 2953; WAN024D7P_at; Start 9; Stop 33
tgacaattgtttagcaagtgcttcg

SEQ ID NO: 146875 - DNA, 25 bp, Artificial
  probe
  misc_feature (1)..(25): SEQ ID NO: 2953; WAN024D7P_at; Start 139; Stop 163
gagattttctctccgatagttgctg

SEQ ID NO: 146876 - DNA, 25 bp, Artificial
  probe
  misc_feature (1)..(25): SEQ ID NO: 2953; WAN024D7P_at; Start 254; Stop 278
tgactttagctgtagtatttaccaa

SEQ ID NO: 146877 - DNA, 25 bp, Artificial
  probe
  misc_feature (1)..(25): SEQ ID NO: 2953; WAN024D7P_at; Start 238; Stop 262
ggttttccttcagcaatgactttag

SEQ ID NO: 146878 - DNA, 25 bp, Artificial
  probe
  misc_feature (1)..(25): SEQ ID NO: 2953; WAN024D7P_at; Start 244; Stop 268
ccttcagcaatgactttagctgtag

SEQ ID NO: 146879 - DNA, 25 bp, Artificial
  probe
  misc_feature (1)..(25): SEQ ID NO: 2953; WAN024D7P_at; Start 56; Stop 80
taacaccgatacgtccaccgttatg

SEQ ID NO: 146880 - DNA, 25 bp, Artificial
  probe
  misc_feature (1)..(25): SEQ ID NO: 2953; WAN024D7P_at; Start 83; Stop 107
ggtatgctccaaagtgttgtgcgtc

SEQ ID NO: 146881 - DNA, 25 bp, Artificial
  probe
  misc_feature (1)..(25): SEQ ID NO: 2953; WAN024D7P_at; Start 266; Stop 290
tagtatttaccaattcaacgaattg

SEQ ID NO: 146882 - DNA, 25 bp, Artificial
  probe
  misc_feature (1)..(25): SEQ ID NO: 2953; WAN024D7P_at; Start 145; Stop 169
ttctctccgatagttgctgttgcag

SEQ ID NO: 146883 - DNA, 25 bp, Artificial
  probe
  misc_feature (1)..(25): SEQ ID NO: 2953; WAN024D7P_at; Start 262; Stop 286
gctgtagtatttaccaattcaacga

SEQ ID NO: 146884 - DNA, 25 bp, Artificial
  probe
  misc_feature (1)..(25): SEQ ID NO: 2953; WAN024D7P_at; Start 2; Stop 26
tgtgcattgacaattgtttagcaag

SEQ ID NO: 146885 - DNA, 25 bp, Artificial
  probe
  misc_feature (1)..(25): SEQ ID NO: 5114; WAN024D7Q_at; Start 92; Stop 116
gcagcaacacggtcagctttcttag

SEQ ID NO: 146886 - DNA, 25 bp, Artificial
  probe
  misc_feature (1)..(25): SEQ ID NO: 5114; WAN024D7Q_at; Start 50; Stop 74
gctgcaacattaccgttaacataaa

SEQ ID NO: 146887 - DNA, 25 bp, Artificial
  probe
  misc_feature (1)..(25): SEQ ID NO: 5114; WAN024D7Q_at; Start 32; Stop 56
gcgtttacttcaataactgctgcaa

SEQ ID NO: 146888 - DNA, 25 bp, Artificial
  probe
  misc_feature (1)..(25): SEQ ID NO: 5114; WAN024D7Q_at; Start 163; Stop 187
gatgtcaccgtctgtttctacaagc

SEQ ID NO: 146889 - DNA, 25 bp, Artificial
  probe
  misc_feature (1)..(25): SEQ ID NO: 5114; WAN024D7Q_at; Start 312; Stop 336
cgccctcctaggtaattactatttg

SEQ ID NO: 146890 - DNA, 25 bp, Artificial
  probe
  misc_feature (1)..(25): SEQ ID NO: 5114; WAN024D7Q_at; Start 238; Stop 262
tacaagtttagctgtaatttctgcc

SEQ ID NO: 146891 - DNA, 25 bp, Artificial
  probe
  misc_feature (1)..(25): SEQ ID NO: 5114; WAN024D7Q_at; Start 2; Stop 26
tgagcgttttttgcaacgaagtcag

SEQ ID NO: 146892 - DNA, 25 bp, Artificial
  probe
  misc_feature (1)..(25): SEQ ID NO: 5114; WAN024D7Q_at; Start 225; Stop 249
cacgcaactcttttacaagtttagc

SEQ ID NO: 146893 - DNA, 25 bp, Artificial
  probe
  misc_feature (1)..(25): SEQ ID NO: 5114; WAN024D7Q_at; Start 119; Stop 143
gccttagccatacctttttcacgaa

SEQ ID NO: 146894 - DNA, 25 bp, Artificial
  probe
  misc_feature (1)..(25): SEQ ID NO: 5114; WAN024D7Q_at; Start 106; Stop 130
agctttcttagctgccttagccata

SEQ ID NO: 146895 - DNA, 25 bp, Artificial
  probe
  misc_feature (1)..(25): SEQ ID NO: 5114; WAN024D7Q_at; Start 190; Stop 214
ttttttagcgtccataacaccggca

SEQ ID NO: 146896 - DNA, 25 bp, Artificial
  probe
  misc_feature (1)..(25): SEQ ID NO: 5114; WAN024D7Q_at; Start 79; Stop 103
agtcaaaccttctgcagcaacacgg

SEQ ID NO: 146897 - DNA, 25 bp, Artificial
  probe
  misc_feature (1)..(25): SEQ ID NO: 5114; WAN024D7Q_at; Start 41; Stop 65
tcaataactgctgcaacattaccgt

SEQ ID NO: 146898 - DNA, 25 bp, Artificial
  probe
  misc_feature (1)..(25): SEQ ID NO: 5114; WAN024D7Q_at; Start 168; Stop 192
caccgtctgtttctacaagcgcttt

SEQ ID NO: 146899 - DNA, 25 bp, Artificial
  probe
  misc_feature (1)..(25): SEQ ID NO: 5114; WAN024D7Q_at; Start 71; Stop 95
taaacaccagtcaaaccttctgcag

SEQ ID NO: 146900 - DNA, 25 bp, Artificial
  probe
  misc_feature (1)..(25): SEQ ID NO: 5114; WAN024D7Q_at; Start 179; Stop 203
tctacaagcgcttttttagcgtcca

SEQ ID NO: 146901 - DNA, 25 bp, Artificial
  probe
  misc_feature (1)..(25): SEQ ID NO: 5114; WAN024D7Q_at; Start 211; Stop 235
ggcaccagatttttcacgcaactct

SEQ ID NO: 146902 - DNA, 25 bp, Artificial
  probe
  misc_feature (1)..(25): SEQ ID NO: 5114; WAN024D7Q_at; Start 218; Stop 242
gatttttcacgcaactcttttacaa

SEQ ID NO: 146903 - DNA, 25 bp, Artificial
  probe
  misc_feature (1)..(25): SEQ ID NO: 5114; WAN024D7Q_at; Start 133; Stop 157
tttttcacgaagcaattcaatcgct

SEQ ID NO: 146904 - DNA, 25 bp, Artificial
  probe
  misc_feature (1)..(25): SEQ ID NO: 5114; WAN024D7Q_at; Start 282; Stop 306
ttttgaaaataggagagccgggcta

SEQ ID NO: 146905 - DNA, 25 bp, Artificial
  probe
  misc_feature (1)..(25): SEQ ID NO: 5114; WAN024D7Q_at; Start 148; Stop 172
ttcaatcgctttttcgatgtcaccg

SEQ ID NO: 146906 - DNA, 25 bp, Artificial
  probe
  misc_feature (1)..(25): SEQ ID NO: 5114; WAN024D7Q_at; Start 123; Stop 147
tagccatacctttttcacgaagcaa

SEQ ID NO: 146907 - DNA, 25 bp, Artificial
  probe
  misc_feature (1)..(25): SEQ ID NO: 5114; WAN024D7Q_at; Start 286; Stop 310
gaaaataggagagccgggctaagcc

SEQ ID NO: 146908 - DNA, 25 bp, Artificial
  probe
  misc_feature (1)..(25): SEQ ID NO: 5114; WAN024D7Q_at; Start 57; Stop 81
cattaccgttaacataaacaccagt

SEQ ID NO: 146909 - DNA, 25 bp, Artificial
  probe
  misc_feature (1)..(25): SEQ ID NO: 5114; WAN024D7Q_at; Start 97; Stop 121
aacacggtcagctttcttagctgcc

SEQ ID NO: 146910 - DNA, 25 bp, Artificial
  probe
  misc_feature (1)..(25): SEQ ID NO: 5114; WAN024D7Q_at; Start 86; Stop 110
ccttctgcagcaacacggtcagctt

SEQ ID NO: 146911 - DNA, 25 bp, Artificial
  probe
  misc_feature (1)..(25): SEQ ID NO: 5114; WAN024D7Q_at; Start 204; Stop 228
taacaccggcaccagatttttcacg

SEQ ID NO: 146912 - DNA, 25 bp, Artificial
  probe
  misc_feature (1)..(25): SEQ ID NO: 5114; WAN024D7Q_at; Start 24; Stop 48
cagtttcagcgtttacttcaataac

SEQ ID NO: 146913 - DNA, 25 bp, Artificial
  probe
  misc_feature (1)..(25): SEQ ID NO: 5114; WAN024D7Q_at; Start 10; Stop 34
ttttgcaacgaagtcagtttcagcg

SEQ ID NO: 146914 - DNA, 25 bp, Artificial
  probe
  misc_feature (1)..(25): SEQ ID NO: 5114; WAN024D7Q_at; Start 15; Stop 39
caacgaagtcagtttcagcgtttac

SEQ ID NO: 146915 - DNA, 25 bp, Artificial
  probe
  misc_feature (1)..(25): SEQ ID NO: 5114; WAN024D7Q_at; Start 356; Stop 380
ccttctacaacttcaacgatttctt

SEQ ID NO: 146916 - DNA, 25 bp, Artificial
  probe
  misc_feature (1)..(25): SEQ ID NO: 5114; WAN024D7Q_at; Start 153; Stop 177
tcgctttttcgatgtcaccgtctgt

SEQ ID NO: 146917 - DNA, 25 bp, Artificial
  probe
  misc_feature (1)..(25): SEQ ID NO: 5114; WAN024D7Q_at; Start 253; Stop 277
aatttctgccattttaattctccta

SEQ ID NO: 146918 - DNA, 25 bp, Artificial
  probe
  misc_feature (1)..(25): SEQ ID NO: 5114; WAN024D7Q_at; Start 373; Stop 397
gatttcttcaattgaatctgcttga

SEQ ID NO: 146919 - DNA, 25 bp, Artificial
  probe
  misc_feature (1)..(25): SEQ ID NO: 5055; WAN024D7R_at; Start 82; Stop 106
gattacatcgatatcatctggatca

SEQ ID NO: 146920 - DNA, 25 bp, Artificial
  probe
  misc_feature (1)..(25): SEQ ID NO: 5055; WAN024D7R_at; Start 12; Stop 36
cgataatagcgtcagccaatttagc

SEQ ID NO: 146921 - DNA, 25 bp, Artificial
  probe
  misc_feature (1)..(25): SEQ ID NO: 5055; WAN024D7R_at; Start 356; Stop 380
tggattgttccccagtttgtaagag

SEQ ID NO: 146922 - DNA, 25 bp, Artificial
  probe
  misc_feature (1)..(25): SEQ ID NO: 5055; WAN024D7R_at; Start 183; Stop 207
ggtcaactacgtacatcacatctgg

SEQ ID NO: 146923 - DNA, 25 bp, Artificial
  probe
  misc_feature (1)..(25): SEQ ID NO: 5055; WAN024D7R_at; Start 382; Stop 406
tccacccaaccaacggtggttgatg

SEQ ID NO: 146924 - DNA, 25 bp, Artificial
  probe
  misc_feature (1)..(25): SEQ ID NO: 5055; WAN024D7R_at; Start 150; Stop 174
tagcttctttaacagcgatttgctc

SEQ ID NO: 146925 - DNA, 25 bp, Artificial
  probe
  misc_feature (1)..(25): SEQ ID NO: 5055; WAN024D7R_at; Start 255; Stop 279
cacgttgtttgttaagaagtgcaac

SEQ ID NO: 146926 - DNA, 25 bp, Artificial
  probe
  misc_feature (1)..(25): SEQ ID NO: 5055; WAN024D7R_at; Start 361; Stop 385
tgttccccagtttgtaagagttcca

SEQ ID NO: 146927 - DNA, 25 bp, Artificial
  probe
  misc_feature (1)..(25): SEQ ID NO: 5055; WAN024D7R_at; Start 301; Stop 325
gaaagttccatcttcttccatacgt

SEQ ID NO: 146928 - DNA, 25 bp, Artificial
  probe
  misc_feature (1)..(25): SEQ ID NO: 5055; WAN024D7R_at; Start 162; Stop 186
cagcgatttgctctttatgtgggtc

SEQ ID NO: 146929 - DNA, 25 bp, Artificial
  probe
  misc_feature (1)..(25): SEQ ID NO: 5055; WAN024D7R_at; Start 327; Stop 351
taatttctttcaaacgagcgatacg

SEQ ID NO: 146930 - DNA, 25 bp, Artificial
  probe
  misc_feature (1)..(25): SEQ ID NO: 5055; WAN024D7R_at; Start 288; Stop 312
taggaagaacttcgaaagttccatc

SEQ ID NO: 146931 - DNA, 25 bp, Artificial
  probe
  misc_feature (1)..(25): SEQ ID NO: 5055; WAN024D7R_at; Start 69; Stop 93
cgttagctgggatgattacatcgat

SEQ ID NO: 146932 - DNA, 25 bp, Artificial
  probe
  misc_feature (1)..(25): SEQ ID NO: 5055; WAN024D7R_at; Start 42; Stop 66
tcaatttaacagcacggatagcgtc

SEQ ID NO: 146933 - DNA, 25 bp, Artificial
  probe
  misc_feature (1)..(25): SEQ ID NO: 5055; WAN024D7R_at; Start 309; Stop 333
catcttcttccatacgtttaatttc

SEQ ID NO: 146934 - DNA, 25 bp, Artificial
  probe
  misc_feature (1)..(25): SEQ ID NO: 5055; WAN024D7R_at; Start 20; Stop 44
gcgtcagccaatttagctgtgatca

SEQ ID NO: 146935 - DNA, 25 bp, Artificial
  probe
  misc_feature (1)..(25): SEQ ID NO: 5055; WAN024D7R_at; Start 393; Stop 417
aacggtggttgatgaagtattgacc

SEQ ID NO: 146936 - DNA, 25 bp, Artificial
  probe
  misc_feature (1)..(25): SEQ ID NO: 5055; WAN024D7R_at; Start 177; Stop 201
tatgtgggtcaactacgtacatcac

SEQ ID NO: 146937 - DNA, 25 bp, Artificial
  probe
  misc_feature (1)..(25): SEQ ID NO: 5055; WAN024D7R_at; Start 235; Stop 259
caagaatttttcaagacgcgcacgt

SEQ ID NO: 146938 - DNA, 25 bp, Artificial
  probe
  misc_feature (1)..(25): SEQ ID NO: 5055; WAN024D7R_at; Start 249; Stop 273
gacgcgcacgttgtttgttaagaag

SEQ ID NO: 146939 - DNA, 25 bp, Artificial
  probe
  misc_feature (1)..(25): SEQ ID NO: 5055; WAN024D7R_at; Start 342; Stop 366
gagcgatacgtttttggattgttcc

SEQ ID NO: 146940 - DNA, 25 bp, Artificial
  probe
  misc_feature (1)..(25): SEQ ID NO: 5055; WAN024D7R_at; Start 201; Stop 225
catctgggatacgaggcatatcttc

SEQ ID NO: 146941 - DNA, 25 bp, Artificial
  probe
  misc_feature (1)..(25): SEQ ID NO: 5055; WAN024D7R_at; Start 5; Stop 29
cgtccttcgataatagcgtcagcca

SEQ ID NO: 146942 - DNA, 25 bp, Artificial
  probe
  misc_feature (1)..(25): SEQ ID NO: 5055; WAN024D7R_at; Start 35; Stop 59
gctgtgatcaatttaacagcacgga

SEQ ID NO: 146943 - DNA, 25 bp, Artificial
  probe
  misc_feature (1)..(25): SEQ ID NO: 5055; WAN024D7R_at; Start 112; Stop 136
ggtgtcaaccatcgctacaactggg

SEQ ID NO: 146944 - DNA, 25 bp, Artificial
  probe
  misc_feature (1)..(25): SEQ ID NO: 5055; WAN024D7R_at; Start 56; Stop 80
cggatagcgtcatcgttagctggga

SEQ ID NO: 146945 - DNA, 25 bp, Artificial
  probe
  misc_feature (1)..(25): SEQ ID NO: 5055; WAN024D7R_at; Start 121; Stop 145
catcgctacaactgggattcccaat

SEQ ID NO: 146946 - DNA, 25 bp, Artificial
  probe
  misc_feature (1)..(25): SEQ ID NO: 5055; WAN024D7R_at; Start 270; Stop 294
gaagtgcaacttctttcttaggaag

SEQ ID NO: 146947 - DNA, 25 bp, Artificial
  probe
  misc_feature (1)..(25): SEQ ID NO: 5055; WAN024D7R_at; Start 170; Stop 194
tgctctttatgtgggtcaactacgt

SEQ ID NO: 146948 - DNA, 25 bp, Artificial
  probe
  misc_feature (1)..(25): SEQ ID NO: 5055; WAN024D7R_at; Start 194; Stop 218
tacatcacatctgggatacgaggca

SEQ ID NO: 146949 - DNA, 25 bp, Artificial
  probe
  misc_feature (1)..(25): SEQ ID NO: 5055; WAN024D7R_at; Start 48; Stop 72
taacagcacggatagcgtcatcgtt

SEQ ID NO: 146950 - DNA, 25 bp, Artificial
  probe
  misc_feature (1)..(25): SEQ ID NO: 5055; WAN024D7R_at; Start 102; Stop 126
gatcagtattggtgtcaaccatcgc

SEQ ID NO: 146951 - DNA, 25 bp, Artificial
  probe
  misc_feature (1)..(25): SEQ ID NO: 5055; WAN024D7R_at; Start 207; Stop 231
ggatacgaggcatatcttcgatacc

SEQ ID NO: 146952 - DNA, 25 bp, Artificial
  probe
  misc_feature (1)..(25): SEQ ID NO: 5055; WAN024D7R_at; Start 96; Stop 120
catctggatcagtattggtgtcaac

SEQ ID NO: 146953 - DNA, 25 bp, Artificial
  probe
  misc_feature (1)..(25): SEQ ID NO: 2424; WAN024D7S_at; Start 638; Stop 662
tcgaccaagacaacgaaagccgtgc

SEQ ID NO: 146954 - DNA, 25 bp, Artificial
  probe
  misc_feature (1)..(25): SEQ ID NO: 2424; WAN024D7S_at; Start 428; Stop 452
cattgattgaaaaaacagacgcaca

SEQ ID NO: 146955 - DNA, 25 bp, Artificial
  probe
  misc_feature (1)..(25): SEQ ID NO: 2424; WAN024D7S_at; Start 1019; Stop 1043
tggcagcagccttgaataactaact

SEQ ID NO: 146956 - DNA, 25 bp, Artificial
  probe
  misc_feature (1)..(25): SEQ ID NO: 2424; WAN024D7S_at; Start 384; Stop 408
tgcaacagcaactatcggagagaaa

SEQ ID NO: 146957 - DNA, 25 bp, Artificial
  probe
  misc_feature (1)..(25): SEQ ID NO: 2424; WAN024D7S_at; Start 31; Stop 55
gagttgcgtgaaaaatctggtgccg

SEQ ID NO: 146958 - DNA, 25 bp, Artificial
  probe
  misc_feature (1)..(25): SEQ ID NO: 2424; WAN024D7S_at; Start 1002; Stop 1026
tgaagttgcagctacaatggcagca

SEQ ID NO: 146959 - DNA, 25 bp, Artificial
  probe
  misc_feature (1)..(25): SEQ ID NO: 2424; WAN024D7S_at; Start 122; Stop 146
ttcgtgaaaaaggtatggctaaggc

SEQ ID NO: 146960 - DNA, 25 bp, Artificial
  probe
  misc_feature (1)..(25): SEQ ID NO: 2424; WAN024D7S_at; Start 551; Stop 575
tcgcagcgatgaaaccaacagttct

SEQ ID NO: 146961 - DNA, 25 bp, Artificial
  probe
  misc_feature (1)..(25): SEQ ID NO: 2424; WAN024D7S_at; Start 962; Stop 986
ttggtgaaggtatcgagaaagctgc

SEQ ID NO: 146962 - DNA, 25 bp, Artificial
  probe
  misc_feature (1)..(25): SEQ ID NO: 2424; WAN024D7S_at; Start 153; Stop 177
gaaagctgaccgtgttgctgcagaa

SEQ ID NO: 146963 - DNA, 25 bp, Artificial
  probe
  misc_feature (1)..(25): SEQ ID NO: 2424; WAN024D7S_at; Start 472; Stop 496
cataacggtggacgtatcggtgtta

SEQ ID NO: 146964 - DNA, 25 bp, Artificial
  probe
  misc_feature (1)..(25): SEQ ID NO: 2424; WAN024D7S_at; Start 745; Stop 769
gctgacatcaaagctgaattggctg

SEQ ID NO: 146965 - DNA, 25 bp, Artificial
  probe
  misc_feature (1)..(25): SEQ ID NO: 2424; WAN024D7S_at; Start 91; Stop 115
gacggtgacatcgaaaaagcgattg

SEQ ID NO: 146966 - DNA, 25 bp, Artificial
  probe
  misc_feature (1)..(25): SEQ ID NO: 2424; WAN024D7S_at; Start 232; Stop 256
gctgaaactgacttcgttgcaaaaa

SEQ ID NO: 146967 - DNA, 25 bp, Artificial
  probe
  misc_feature (1)..(25): SEQ ID NO: 2424; WAN024D7S_at; Start 458; Stop 482
ttggagcataccaacataacggtgg

SEQ ID NO: 146968 - DNA, 25 bp, Artificial
  probe
  misc_feature (1)..(25): SEQ ID NO: 2424; WAN024D7S_at; Start 672; Stop 696
taaaccagctcttccacacttgaag

SEQ ID NO: 146969 - DNA, 25 bp, Artificial
  probe
  misc_feature (1)..(25): SEQ ID NO: 2424; WAN024D7S_at; Start 443; Stop 467
cagacgcacaacactttggagcata

SEQ ID NO: 146970 - DNA, 25 bp, Artificial
  probe
  misc_feature (1)..(25): SEQ ID NO: 2424; WAN024D7S_at; Start 976; Stop 1000
gagaaagctgcaaacgacttcgaag

SEQ ID NO: 146971 - DNA, 25 bp, Artificial
  probe
  misc_feature (1)..(25): SEQ ID NO: 2424; WAN024D7S_at; Start 76; Stop 100
gcgcttgtagaaacagacggtgaca

SEQ ID NO: 146972 - DNA, 25 bp, Artificial
  probe
  misc_feature (1)..(25): SEQ ID NO: 2424; WAN024D7S_at; Start 760; Stop 784
gaattggctgcagaaggcaaaccag

SEQ ID NO: 146973 - DNA, 25 bp, Artificial
  probe
  misc_feature (1)..(25): SEQ ID NO: 2424; WAN024D7S_at; Start 882; Stop 906
catcatggatgacagcaagacagtt

SEQ ID NO: 146974 - DNA, 25 bp, Artificial
  probe
  misc_feature (1)..(25): SEQ ID NO: 2424; WAN024D7S_at; Start 913; Stop 937
taccttgaatcagttaacgcttcgg

SEQ ID NO: 146975 - DNA, 25 bp, Artificial
  probe
  misc_feature (1)..(25): SEQ ID NO: 2424; WAN024D7S_at; Start 930; Stop 954
cgcttcggtagttgagtttgctcgc

SEQ ID NO: 146976 - DNA, 25 bp, Artificial
  probe
  misc_feature (1)..(25): SEQ ID NO: 2424; WAN024D7S_at; Start 599; Stop 623
aattcgttaaagatgagttggcaca

SEQ ID NO: 146977 - DNA, 25 bp, Artificial
  probe
  misc_feature (1)..(25): SEQ ID NO: 2424; WAN024D7S_at; Start 355; Stop 379
ggtgaaactcttgaagctgcatacg

SEQ ID NO: 146978 - DNA, 25 bp, Artificial
  probe
  misc_feature (1)..(25): SEQ ID NO: 2424; WAN024D7S_at; Start 49; Stop 73
ggtgccggtgttatggacgctaaaa

SEQ ID NO: 146979 - DNA, 25 bp, Artificial
  probe
  misc_feature (1)..(25): SEQ ID NO: 2424; WAN024D7S_at; Start 293; Stop 317
aagtcattgctgaaggaaaacctgc

SEQ ID NO: 146980 - DNA, 25 bp, Artificial
  probe
  misc_feature (1)..(25): SEQ ID NO: 2424; WAN024D7S_at; Start 535; Stop 559
caattgtcaatgcacatcgcagcga

SEQ ID NO: 146981 - DNA, 25 bp, Artificial
  probe
  misc_feature (1)..(25): SEQ ID NO: 2424; WAN024D7S_at; Start 135; Stop 159
tatggctaaggcagctaagaaagct

SEQ ID NO: 146982 - DNA, 25 bp, Artificial
  probe
  misc_feature (1)..(25): SEQ ID NO: 2424; WAN024D7S_at; Start 403; Stop 427
gagaaaatctcattccgtcgctttg

SEQ ID NO: 146983 - DNA, 25 bp, Artificial
  probe
  misc_feature (1)..(25): SEQ ID NO: 2424; WAN024D7S_at; Start 193; Stop 217
tatgttaacggtaatgttgcagcag

SEQ ID NO: 146984 - DNA, 25 bp, Artificial
  probe
  misc_feature (1)..(25): SEQ ID NO: 2424; WAN024D7S_at; Start 613; Stop 637
gagttggcacaattgaatcacgtta

SEQ ID NO: 146985 - DNA, 25 bp, Artificial
  probe
  misc_feature (1)..(25): SEQ ID NO: 2424; WAN024D7S_at; Start 508; Stop 532
gaaggtggagacgaagcacttgcta

SEQ ID NO: 146986 - DNA, 25 bp, Artificial
  probe
  misc_feature (1)..(25): SEQ ID NO: 2424; WAN024D7S_at; Start 726; Stop 750
tgttattgctcaagctgaagctgac

SEQ ID NO: 146987 - DNA, 25 bp, Artificial
  probe
  misc_feature (1)..(25): SEQ ID NO: 5213; WAN024D7T_at; Start 290; Stop 314
tcgttggtactaagaaacaagcagc

SEQ ID NO: 146988 - DNA, 25 bp, Artificial
  probe
  misc_feature (1)..(25): SEQ ID NO: 5213; WAN024D7T_at; Start 666; Stop 690
tgatatcgatgtaatcatcccagct

SEQ ID NO: 146989 - DNA, 25 bp, Artificial
  probe
  misc_feature (1)..(25): SEQ ID NO: 5213; WAN024D7T_at; Start 627; Stop 651
cccagttgtagcgatggttgacacc

SEQ ID NO: 146990 - DNA, 25 bp, Artificial
  probe
  misc_feature (1)..(25): SEQ ID NO: 5213; WAN024D7T_at; Start 734; Stop 758
tggctgacgctattatcgaaggacg

SEQ ID NO: 146991 - DNA, 25 bp, Artificial
  probe
  misc_feature (1)..(25): SEQ ID NO: 5213; WAN024D7T_at; Start 576; Stop 600
tgacccacataaagagcaaatcgct

SEQ ID NO: 146992 - DNA, 25 bp, Artificial
  probe
  misc_feature (1)..(25): SEQ ID NO: 5213; WAN024D7T_at; Start 176; Stop 200
tctttactgaacgtaacggaatcca

SEQ ID NO: 146993 - DNA, 25 bp, Artificial
  probe
  misc_feature (1)..(25): SEQ ID NO: 5213; WAN024D7T_at; Start 214; Stop 238
caacaaactgtaaaatacgctgacc

SEQ ID NO: 146994 - DNA, 25 bp, Artificial
  probe
  misc_feature (1)..(25): SEQ ID NO: 5213; WAN024D7T_at; Start 303; Stop 327
gaaacaagcagctgatgcagttgct

SEQ ID NO: 146995 - DNA, 25 bp, Artificial
  probe
  misc_feature (1)..(25): SEQ ID NO: 5213; WAN024D7T_at; Start 557; Stop 581
cagatgtgatgtacgtagttgaccc

SEQ ID NO: 146996 - DNA, 25 bp, Artificial
  probe
  misc_feature (1)..(25): SEQ ID NO: 5213; WAN024D7T_at; Start 2; Stop 26
tgatgaattgtgaagcagttgccct

SEQ ID NO: 146997 - DNA, 25 bp, Artificial
  probe
  misc_feature (1)..(25): SEQ ID NO: 5213; WAN024D7T_at; Start 490; Stop 514
cttcttaacaaacaacgtgcgcgtc

SEQ ID NO: 146998 - DNA, 25 bp, Artificial
  probe
  misc_feature (1)..(25): SEQ ID NO: 5213; WAN024D7T_at; Start 229; Stop 253
tacgctgaccaagcatacgacttca

SEQ ID NO: 146999 - DNA, 25 bp, Artificial
  probe
  misc_feature (1)..(25): SEQ ID NO: 5213; WAN024D7T_at; Start 247; Stop 271
gacttcatgcgtgatgcagcagcta

SEQ ID NO: 147000 - DNA, 25 bp, Artificial
  probe
  misc_feature (1)..(25): SEQ ID NO: 5213; WAN024D7T_at; Start 778; Stop 802
gcagttgaagcagaatttgcagctt

SEQ ID NO: 147001 - DNA, 25 bp, Artificial
  probe
  misc_feature (1)..(25): SEQ ID NO: 5213; WAN024D7T_at; Start 398; Stop 422
gaacaatccaaaaacgtatcgctcg

SEQ ID NO: 147002 - DNA, 25 bp, Artificial
  probe
  misc_feature (1)..(25): SEQ ID NO: 5213; WAN024D7T_at; Start 22; Stop 46
gcccttgggtcgttttgcgagttga

SEQ ID NO: 147003 - DNA, 25 bp, Artificial
  probe
  misc_feature (1)..(25): SEQ ID NO: 5213; WAN024D7T_at; Start 98; Stop 122
caatgaaacaacttcttgaggctgg

SEQ ID NO: 147004 - DNA, 25 bp, Artificial
  probe
  misc_feature (1)..(25): SEQ ID NO: 5213; WAN024D7T_at; Start 348; Stop 372
tcaatacttcatcaaccaccgttgg

SEQ ID NO: 147005 - DNA, 25 bp, Artificial
  probe
  misc_feature (1)..(25): SEQ ID NO: 5213; WAN024D7T_at; Start 130; Stop 154
tttggtcaccaaactcgtcgctgga

SEQ ID NO: 147006 - DNA, 25 bp, Artificial
  probe
  misc_feature (1)..(25): SEQ ID NO: 5213; WAN024D7T_at; Start 145; Stop 169
cgtcgctggaatcctaagatggcta

SEQ ID NO: 147007 - DNA, 25 bp, Artificial
  probe
  misc_feature (1)..(25): SEQ ID NO: 5213; WAN024D7T_at; Start 262; Stop 286
gcagcagctaacgatgcagttgtat

SEQ ID NO: 147008 - DNA, 25 bp, Artificial
  probe
  misc_feature (1)..(25): SEQ ID NO: 5213; WAN024D7T_at; Start 192; Stop 216
cggaatccacgttatcgacttgcaa

SEQ ID NO: 147009 - DNA, 25 bp, Artificial
  probe
  misc_feature (1)..(25): SEQ ID NO: 5213; WAN024D7T_at; Start 756; Stop 780
acgtcaaggtgaggatgcagtagca

SEQ ID NO: 147010 - DNA, 25 bp, Artificial
  probe
  misc_feature (1)..(25): SEQ ID NO: 5213; WAN024D7T_at; Start 67; Stop 91
caaaaaggagaaatactcatggcag

SEQ ID NO: 147011 - DNA, 25 bp, Artificial
  probe
  misc_feature (1)..(25): SEQ ID NO: 5213; WAN024D7T_at; Start 719; Stop 743
tgatcacagctaaattggctgacgc

SEQ ID NO: 147012 - DNA, 25 bp, Artificial
  probe
  misc_feature (1)..(25): SEQ ID NO: 5213; WAN024D7T_at; Start 468; Stop 492
tcttcctaagaaagaagttgcactt

SEQ ID NO: 147013 - DNA, 25 bp, Artificial
  probe
  misc_feature (1)..(25): SEQ ID NO: 5213; WAN024D7T_at; Start 331; Stop 355
gaagcagtacgttcaggtcaatact

SEQ ID NO: 147014 - DNA, 25 bp, Artificial
  probe
  misc_feature (1)..(25): SEQ ID NO: 5213; WAN024D7T_at; Start 697; Stop 721
gacgctatccgtgctgttaaattga

SEQ ID NO: 147015 - DNA, 25 bp, Artificial
  probe
  misc_feature (1)..(25): SEQ ID NO: 5213; WAN024D7T_at; Start 318; Stop 342
tgcagttgctgaagaagcagtacgt

SEQ ID NO: 147016 - DNA, 25 bp, Artificial
  probe
  misc_feature (1)..(25): SEQ ID NO: 5213; WAN024D7T_at; Start 683; Stop 707
tcccagctaacgatgacgctatccg

SEQ ID NO: 147017 - DNA, 25 bp, Artificial
  probe
  misc_feature (1)..(25): SEQ ID NO: 5213; WAN024D7T_at; Start 642; Stop 666
ggttgacaccaatactgatccagat

SEQ ID NO: 147018 - DNA, 25 bp, Artificial
  probe
  misc_feature (1)..(25): SEQ ID NO: 5213; WAN024D7T_at; Start 435; Stop 459
taaacgtatggaagaagatggaact

SEQ ID NO: 147019 - DNA, 25 bp, Artificial
  probe
  misc_feature (1)..(25): SEQ ID NO: 5213; WAN024D7T_at; Start 114; Stop 138
tgaggctggtgtacactttggtcac

SEQ ID NO: 147020 - DNA, 25 bp, Artificial
  probe
  misc_feature (1)..(25): SEQ ID NO: 5213; WAN024D7T_at; Start 505; Stop 529
cgtgcgcgtcttgaaaaattcttgg

SEQ ID NO: 147021 - DNA, 25 bp, Artificial
  probe
  misc_feature (1)..(25): SEQ ID NO: 3004; WAN024D7U_at; Start 202; Stop 226
ccagaaatggatatccagtcggtga

SEQ ID NO: 147022 - DNA, 25 bp, Artificial
  probe
  misc_feature (1)..(25): SEQ ID NO: 3004; WAN024D7U_at; Start 156; Stop 180
ggcagacttctttgagtccaatcat

SEQ ID NO: 147023 - DNA, 25 bp, Artificial
  probe
  misc_feature (1)..(25): SEQ ID NO: 3004; WAN024D7U_at; Start 79; Stop 103
tatagccatgttgccatttatttgg

SEQ ID NO: 147024 - DNA, 25 bp, Artificial
  probe
  misc_feature (1)..(25): SEQ ID NO: 3004; WAN024D7U_at; Start 325; Stop 349
cctatttttgaaactattcctatga

SEQ ID NO: 147025 - DNA, 25 bp, Artificial
  probe
  misc_feature (1)..(25): SEQ ID NO: 3004; WAN024D7U_at; Start 46; Stop 70
atgggacaggccatccagacttcca

SEQ ID NO: 147026 - DNA, 25 bp, Artificial
  probe
  misc_feature (1)..(25): SEQ ID NO: 3004; WAN024D7U_at; Start 10; Stop 34
aatggcgatttgatttttgtgagag

SEQ ID NO: 147027 - DNA, 25 bp, Artificial
  probe
  misc_feature (1)..(25): SEQ ID NO: 3004; WAN024D7U_at; Start 59; Stop 83
tccagacttccacaggtaactatag

SEQ ID NO: 147028 - DNA, 25 bp, Artificial
  probe
  misc_feature (1)..(25): SEQ ID NO: 3004; WAN024D7U_at; Start 473; Stop 497
tacaatgtaaagaaaggaatcttca

SEQ ID NO: 147029 - DNA, 25 bp, Artificial
  probe
  misc_feature (1)..(25): SEQ ID NO: 3004; WAN024D7U_at; Start 92; Stop 116
ccatttatttggatgggatgattta

SEQ ID NO: 147030 - DNA, 25 bp, Artificial
  probe
  misc_feature (1)..(25): SEQ ID NO: 3004; WAN024D7U_at; Start 141; Stop 165
tgtctgtcaagaaccggcagacttc

SEQ ID NO: 147031 - DNA, 25 bp, Artificial
  probe
  misc_feature (1)..(25): SEQ ID NO: 3004; WAN024D7U_at; Start 151; Stop 175
gaaccggcagacttctttgagtcca

SEQ ID NO: 147032 - DNA, 25 bp, Artificial
  probe
  misc_feature (1)..(25): SEQ ID NO: 3004; WAN024D7U_at; Start 455; Stop 479
tggcagcatcgcctctgttacaatg

SEQ ID NO: 147033 - DNA, 25 bp, Artificial
  probe
  misc_feature (1)..(25): SEQ ID NO: 3004; WAN024D7U_at; Start 413; Stop 437
tgcctgttcctctgaaccaagctgg

SEQ ID NO: 147034 - DNA, 25 bp, Artificial
  probe
  misc_feature (1)..(25): SEQ ID NO: 3004; WAN024D7U_at; Start 447; Stop 471
tagtcagttggcagcatcgcctctg

SEQ ID NO: 147035 - DNA, 25 bp, Artificial
  probe
  misc_feature (1)..(25): SEQ ID NO: 3004; WAN024D7U_at; Start 110; Stop 134
tgatttatcatgctagtggacaggc

SEQ ID NO: 147036 - DNA, 25 bp, Artificial
  probe
  misc_feature (1)..(25): SEQ ID NO: 3004; WAN024D7U_at; Start 217; Stop 241
cagtcggtgaaggaaagagcttgca

SEQ ID NO: 147037 - DNA, 25 bp, Artificial
  probe
  misc_feature (1)..(25): SEQ ID NO: 3004; WAN024D7U_at; Start 460; Stop 484
gcatcgcctctgttacaatgtaaag

SEQ ID NO: 147038 - DNA, 25 bp, Artificial
  probe
  misc_feature (1)..(25): SEQ ID NO: 3004; WAN024D7U_at; Start 85; Stop 109
catgttgccatttatttggatggga

SEQ ID NO: 147039 - DNA, 25 bp, Artificial
  probe
  misc_feature (1)..(25): SEQ ID NO: 3004; WAN024D7U_at; Start 63; Stop 87
gacttccacaggtaactatagccat

SEQ ID NO: 147040 - DNA, 25 bp, Artificial
  probe
  misc_feature (1)..(25): SEQ ID NO: 3004; WAN024D7U_at; Start 130; Stop 154
caggctggtgttgtctgtcaagaac

SEQ ID NO: 147041 - DNA, 25 bp, Artificial
  probe
  misc_feature (1)..(25): SEQ ID NO: 3004; WAN024D7U_at; Start 115; Stop 139
tatcatgctagtggacaggctggtg

SEQ ID NO: 147042 - DNA, 25 bp, Artificial
  probe
  misc_feature (1)..(25): SEQ ID NO: 3004; WAN024D7U_at; Start 482; Stop 506
aagaaaggaatcttcatgattcaga

SEQ ID NO: 147043 - DNA, 25 bp, Artificial
  probe
  misc_feature (1)..(25): SEQ ID NO: 3004; WAN024D7U_at; Start 492; Stop 516
tcttcatgattcagatttttaacta

SEQ ID NO: 147044 - DNA, 25 bp, Artificial
  probe
  misc_feature (1)..(25): SEQ ID NO: 3004; WAN024D7U_at; Start 295; Stop 319
tactgctcccagtatatagcagaaa

SEQ ID NO: 147045 - DNA, 25 bp, Artificial
  probe
  misc_feature (1)..(25): SEQ ID NO: 3004; WAN024D7U_at; Start 261; Stop 285
caatgcttctttctatccagatgca

SEQ ID NO: 147046 - DNA, 25 bp, Artificial
  probe
  misc_feature (1)..(25): SEQ ID NO: 3004; WAN024D7U_at; Start 21; Stop 45
gatttttgtgagagatgggtcagac

SEQ ID NO: 147047 - DNA, 25 bp, Artificial
  probe
  misc_feature (1)..(25): SEQ ID NO: 3004; WAN024D7U_at; Start 40; Stop 64
tcagacatgggacaggccatccaga

SEQ ID NO: 147048 - DNA, 25 bp, Artificial
  probe
  misc_feature (1)..(25): SEQ ID NO: 3004; WAN024D7U_at; Start 53; Stop 77
aggccatccagacttccacaggtaa

SEQ ID NO: 147049 - DNA, 25 bp, Artificial
  probe
  misc_feature (1)..(25): SEQ ID NO: 3004; WAN024D7U_at; Start 442; Stop 466
aatcctagtcagttggcagcatcgc

SEQ ID NO: 147050 - DNA, 25 bp, Artificial
  probe
  misc_feature (1)..(25): SEQ ID NO: 3004; WAN024D7U_at; Start 246; Stop 270
tcttggagcaccctacaatgcttct

SEQ ID NO: 147051 - DNA, 25 bp, Artificial
  probe
  misc_feature (1)..(25): SEQ ID NO: 3004; WAN024D7U_at; Start 135; Stop 159
tggtgttgtctgtcaagaaccggca

SEQ ID NO: 147052 - DNA, 25 bp, Artificial
  probe
  misc_feature (1)..(25): SEQ ID NO: 3004; WAN024D7U_at; Start 70; Stop 94
acaggtaactatagccatgttgcca

SEQ ID NO: 147053 - DNA, 25 bp, Artificial
  probe
  misc_feature (1)..(25): SEQ ID NO: 3004; WAN024D7U_at; Start 36; Stop 60
tgggtcagacatgggacaggccatc

SEQ ID NO: 147054 - DNA, 25 bp, Artificial
  probe
  misc_feature (1)..(25): SEQ ID NO: 3004; WAN024D7U_at; Start 213; Stop 237
tatccagtcggtgaaggaaagagct

SEQ ID NO: 147055 - DNA, 25 bp, Artificial
  probe
  misc_feature (1)..(25): SEQ ID NO: 2524; WAN024D7V_at; Start 1068; Stop 1092
agaggaaggaagtctccatgcccgc

SEQ ID NO: 147056 - DNA, 25 bp, Artificial
  probe
  misc_feature (1)..(25): SEQ ID NO: 2524; WAN024D7V_at; Start 220; Stop 244
tgggaagctacacaatacggttaca

SEQ ID NO: 147057 - DNA, 25 bp, Artificial
  probe
  misc_feature (1)..(25): SEQ ID NO: 2524; WAN024D7V_at; Start 1030; Stop 1054
gaagccaaggttatcctcaaccgtg

SEQ ID NO: 147058 - DNA, 25 bp, Artificial
  probe
  misc_feature (1)..(25): SEQ ID NO: 2524; WAN024D7V_at; Start 10; Stop 34
tatgattttacaagcctgcccaacc

SEQ ID NO: 147059 - DNA, 25 bp, Artificial
  probe
  misc_feature (1)..(25): SEQ ID NO: 2524; WAN024D7V_at; Start 91; Stop 115
ccagcttggatagcggatatggact

SEQ ID NO: 147060 - DNA, 25 bp, Artificial
  probe
  misc_feature (1)..(25): SEQ ID NO: 2524; WAN024D7V_at; Start 1114; Stop 1138
tctctgttgcaagaagtctgtcagc

SEQ ID NO: 147061 - DNA, 25 bp, Artificial
  probe
  misc_feature (1)..(25): SEQ ID NO: 2524; WAN024D7V_at; Start 766; Stop 790
gctttccagaaacgcctgttggcca

SEQ ID NO: 147062 - DNA, 25 bp, Artificial
  probe
  misc_feature (1)..(25): SEQ ID NO: 2524; WAN024D7V_at; Start 38; Stop 62
tagggcaccatacctataaatggaa

SEQ ID NO: 147063 - DNA, 25 bp, Artificial
  probe
  misc_feature (1)..(25): SEQ ID NO: 2524; WAN024D7V_at; Start 237; Stop 261
cggttacaactttgacaaagaggct

SEQ ID NO: 147064 - DNA, 25 bp, Artificial
  probe
  misc_feature (1)..(25): SEQ ID NO: 2524; WAN024D7V_at; Start 76; Stop 100
gatagtgaagttctaccagcttgga

SEQ ID NO: 147065 - DNA, 25 bp, Artificial
  probe
  misc_feature (1)..(25): SEQ ID NO: 2524; WAN024D7V_at; Start 497; Stop 521
tttgcaaccctcacaatcctggtgg

SEQ ID NO: 147066 - DNA, 25 bp, Artificial
  probe
  misc_feature (1)..(25): SEQ ID NO: 2524; WAN024D7V_at; Start 1134; Stop 1158
tcagcggattgtggctacttttgcc

SEQ ID NO: 147067 - DNA, 25 bp, Artificial
  probe
  misc_feature (1)..(25): SEQ ID NO: 2524; WAN024D7V_at; Start 942; Stop 966
catgaaaccgcaaggtacctacttg

SEQ ID NO: 147068 - DNA, 25 bp, Artificial
  probe
  misc_feature (1)..(25): SEQ ID NO: 2524; WAN024D7V_at; Start 988; Stop 1012
tatgacctgactgatgaaacattgc

SEQ ID NO: 147069 - DNA, 25 bp, Artificial
  probe
  misc_feature (1)..(25): SEQ ID NO: 2524; WAN024D7V_at; Start 510; Stop 534
caatcctggtggacgtgtttgggaa

SEQ ID NO: 147070 - DNA, 25 bp, Artificial
  probe
  misc_feature (1)..(25): SEQ ID NO: 2524; WAN024D7V_at; Start 593; Stop 617
cggatgagattcaccaagatttgac

SEQ ID NO: 147071 - DNA, 25 bp, Artificial
  probe
  misc_feature (1)..(25): SEQ ID NO: 2524; WAN024D7V_at; Start 557; Stop 581
gccaactctgccaaaaacacggtgt

SEQ ID NO: 147072 - DNA, 25 bp, Artificial
  probe
  misc_feature (1)..(25): SEQ ID NO: 2524; WAN024D7V_at; Start 1098; Stop 1122
tatagctatgcccaaatctctgttg

SEQ ID NO: 147073 - DNA, 25 bp, Artificial
  probe
  misc_feature (1)..(25): SEQ ID NO: 2524; WAN024D7V_at; Start 175; Stop 199
ggttatacctatgccagtgaagact

SEQ ID NO: 147074 - DNA, 25 bp, Artificial
  probe
  misc_feature (1)..(25): SEQ ID NO: 2524; WAN024D7V_at; Start 362; Stop 386
cctttgctcgcagtgtcaagttgaa

SEQ ID NO: 147075 - DNA, 25 bp, Artificial
  probe
  misc_feature (1)..(25): SEQ ID NO: 2524; WAN024D7V_at; Start 1047; Stop 1071
caaccgtggtttggattttggagag

SEQ ID NO: 147076 - DNA, 25 bp, Artificial
  probe
  misc_feature (1)..(25): SEQ ID NO: 2524; WAN024D7V_at; Start 254; Stop 278
aagaggctcttgtctttatcgaggg

SEQ ID NO: 147077 - DNA, 25 bp, Artificial
  probe
  misc_feature (1)..(25): SEQ ID NO: 2524; WAN024D7V_at; Start 972; Stop 996
gcttgacttttcagcttatgacctg

SEQ ID NO: 147078 - DNA, 25 bp, Artificial
  probe
  misc_feature (1)..(25): SEQ ID NO: 2524; WAN024D7V_at; Start 779; Stop 803
gcctgttggccaataatcagcatga

SEQ ID NO: 147079 - DNA, 25 bp, Artificial
  probe
  misc_feature (1)..(25): SEQ ID NO: 2524; WAN024D7V_at; Start 436; Stop 460
gagattgactttgaccaacttgaaa

SEQ ID NO: 147080 - DNA, 25 bp, Artificial
  probe
  misc_feature (1)..(25): SEQ ID NO: 2524; WAN024D7V_at; Start 847; Stop 871
tacggtaaagattggctagaggaac

SEQ ID NO: 147081 - DNA, 25 bp, Artificial
  probe
  misc_feature (1)..(25): SEQ ID NO: 2524; WAN024D7V_at; Start 1083; Stop 1107
ccatgcccgcatcaatatagctatg

SEQ ID NO: 147082 - DNA, 25 bp, Artificial
  probe
  misc_feature (1)..(25): SEQ ID NO: 2524; WAN024D7V_at; Start 809; Stop 833
caggcttgggttatttggcgacaga

SEQ ID NO: 147083 - DNA, 25 bp, Artificial
  probe
  misc_feature (1)..(25): SEQ ID NO: 2524; WAN024D7V_at; Start 830; Stop 854
cagaagctgcctatcgatacggtaa

SEQ ID NO: 147084 - DNA, 25 bp, Artificial
  probe
  misc_feature (1)..(25): SEQ ID NO: 2524; WAN024D7V_at; Start 146; Stop 170
tgcaaacttacgcagaccaactggt

SEQ ID NO: 147085 - DNA, 25 bp, Artificial
  probe
  misc_feature (1)..(25): SEQ ID NO: 2524; WAN024D7V_at; Start 1012; Stop 1036
caagagttgttgagaaatgaagcca

SEQ ID NO: 147086 - DNA, 25 bp, Artificial
  probe
  misc_feature (1)..(25): SEQ ID NO: 2524; WAN024D7V_at; Start 927; Stop 951
gactaaaatcaaggtcatgaaaccg

SEQ ID NO: 147087 - DNA, 25 bp, Artificial
  probe
  misc_feature (1)..(25): SEQ ID NO: 2524; WAN024D7V_at; Start 861; Stop 885
gctagaggaactcaagcaagtcttt

SEQ ID NO: 147088 - DNA, 25 bp, Artificial
  probe
  misc_feature (1)..(25): SEQ ID NO: 2524; WAN024D7V_at; Start 270; Stop 294
tatcgagggtgtggtaccagccatc

SEQ ID NO: 147089 - DNA, 25 bp, Artificial
  probe
  misc_feature (1)..(25): SEQ ID NO: 2167; WAN024D7W_at; Start 49; Stop 73
gagataggggcacttcagacctcgt

SEQ ID NO: 147090 - DNA, 25 bp, Artificial
  probe
  misc_feature (1)..(25): SEQ ID NO: 2167; WAN024D7W_at; Start 14; Stop 38
ttaagatcattcaggcaagcaagtc

SEQ ID NO: 147091 - DNA, 25 bp, Artificial
  probe
  misc_feature (1)..(25): SEQ ID NO: 2167; WAN024D7W_at; Start 268; Stop 292
ggaacacttcttcttgcagccttga

SEQ ID NO: 147092 - DNA, 25 bp, Artificial
  probe
  misc_feature (1)..(25): SEQ ID NO: 2167; WAN024D7W_at; Start 75; Stop 99
ttttccagctgaaaagcagcaactt

SEQ ID NO: 147093 - DNA, 25 bp, Artificial
  probe
  misc_feature (1)..(25): SEQ ID NO: 2167; WAN024D7W_at; Start 101; Stop 125
cccatattttagaagaaagtatccg

SEQ ID NO: 147094 - DNA, 25 bp, Artificial
  probe
  misc_feature (1)..(25): SEQ ID NO: 2167; WAN024D7W_at; Start 343; Stop 367
gatgagctgctttcctattttgaaa

SEQ ID NO: 147095 - DNA, 25 bp, Artificial
  probe
  misc_feature (1)..(25): SEQ ID NO: 2167; WAN024D7W_at; Start 33; Stop 57
caagtctgatttgcctgagataggg

SEQ ID NO: 147096 - DNA, 25 bp, Artificial
  probe
  misc_feature (1)..(25): SEQ ID NO: 2167; WAN024D7W_at; Start 138; Stop 162
tacctttcttctagctagggatgaa

SEQ ID NO: 147097 - DNA, 25 bp, Artificial
  probe
  misc_feature (1)..(25): SEQ ID NO: 2167; WAN024D7W_at; Start 124; Stop 148
cgtaagtgtgcggatacctttcttc

SEQ ID NO: 147098 - DNA, 25 bp, Artificial
  probe
  misc_feature (1)..(25): SEQ ID NO: 2167; WAN024D7W_at; Start 350; Stop 374
tgctttcctattttgaaatgaacgg

SEQ ID NO: 147099 - DNA, 25 bp, Artificial
  probe
  misc_feature (1)..(25): SEQ ID NO: 2167; WAN024D7W_at; Start 364; Stop 388
gaaatgaacggttttgttgatgaag

SEQ ID NO: 147100 - DNA, 25 bp, Artificial
  probe
  misc_feature (1)..(25): SEQ ID NO: 2167; WAN024D7W_at; Start 318; Stop 342
caaagggattcgtttggagagtcct

SEQ ID NO: 147101 - DNA, 25 bp, Artificial
  probe
  misc_feature (1)..(25): SEQ ID NO: 2167; WAN024D7W_at; Start 438; Stop 462
taatcccttttatctggaggaacaa

SEQ ID NO: 147102 - DNA, 25 bp, Artificial
  probe
  misc_feature (1)..(25): SEQ ID NO: 2167; WAN024D7W_at; Start 110; Stop 134
tagaagaaagtatccgtaagtgtgc

SEQ ID NO: 147103 - DNA, 25 bp, Artificial
  probe
  misc_feature (1)..(25): SEQ ID NO: 2167; WAN024D7W_at; Start 133; Stop 157
gcggatacctttcttctagctaggg

SEQ ID NO: 147104 - DNA, 25 bp, Artificial
  probe
  misc_feature (1)..(25): SEQ ID NO: 2167; WAN024D7W_at; Start 410; Stop 434
ctagccagggctatagtatgatttg

SEQ ID NO: 147105 - DNA, 25 bp, Artificial
  probe
  misc_feature (1)..(25): SEQ ID NO: 2167; WAN024D7W_at; Start 180; Stop 204
tattttatcaagtccccagtcagac

SEQ ID NO: 147106 - DNA, 25 bp, Artificial
  probe
  misc_feature (1)..(25): SEQ ID NO: 2167; WAN024D7W_at; Start 219; Stop 243
aaaagtacattctttagtcatcgag

SEQ ID NO: 147107 - DNA, 25 bp, Artificial
  probe
  misc_feature (1)..(25): SEQ ID NO: 2167; WAN024D7W_at; Start 400; Stop 424
ctctatgcaactagccagggctata

SEQ ID NO: 147108 - DNA, 25 bp, Artificial
  probe
  misc_feature (1)..(25): SEQ ID NO: 2167; WAN024D7W_at; Start 4; Stop 28
gaaattccaattaagatcattcagg

SEQ ID NO: 147109 - DNA, 25 bp, Artificial
  probe
  misc_feature (1)..(25): SEQ ID NO: 2167; WAN024D7W_at; Start 21; Stop 45
cattcaggcaagcaagtctgatttg

SEQ ID NO: 147110 - DNA, 25 bp, Artificial
  probe
  misc_feature (1)..(25): SEQ ID NO: 2167; WAN024D7W_at; Start 334; Stop 358
gagagtcctgatgagctgctttcct

SEQ ID NO: 147111 - DNA, 25 bp, Artificial
  probe
  misc_feature (1)..(25): SEQ ID NO: 2167; WAN024D7W_at; Start 82; Stop 106
gctgaaaagcagcaactttcccata

SEQ ID NO: 147112 - DNA, 25 bp, Artificial
  probe
  misc_feature (1)..(25): SEQ ID NO: 2167; WAN024D7W_at; Start 173; Stop 197
taggctatattttatcaagtcccca

SEQ ID NO: 147113 - DNA, 25 bp, Artificial
  probe
  misc_feature (1)..(25): SEQ ID NO: 2167; WAN024D7W_at; Start 145; Stop 169
cttctagctagggatgaaaatcaac

SEQ ID NO: 147114 - DNA, 25 bp, Artificial
  probe
  misc_feature (1)..(25): SEQ ID NO: 2167; WAN024D7W_at; Start 420; Stop 444
ctatagtatgatttggtttaatccc

SEQ ID NO: 147115 - DNA, 25 bp, Artificial
  probe
  misc_feature (1)..(25): SEQ ID NO: 2167; WAN024D7W_at; Start 155; Stop 179
gggatgaaaatcaacttttaggcta

SEQ ID NO: 147116 - DNA, 25 bp, Artificial
  probe
  misc_feature (1)..(25): SEQ ID NO: 2167; WAN024D7W_at; Start 279; Stop 303
tcttgcagccttgaaagaggtggca

SEQ ID NO: 147117 - DNA, 25 bp, Artificial
  probe
  misc_feature (1)..(25): SEQ ID NO: 2167; WAN024D7W_at; Start 326; Stop 350
ttcgtttggagagtcctgatgagct

SEQ ID NO: 147118 - DNA, 25 bp, Artificial
  probe
  misc_feature (1)..(25): SEQ ID NO: 2167; WAN024D7W_at; Start 189; Stop 213
aagtccccagtcagacaatccgcaa

SEQ ID NO: 147119 - DNA, 25 bp, Artificial
  probe
  misc_feature (1)..(25): SEQ ID NO: 2167; WAN024D7W_at; Start 91; Stop 115
cagcaactttcccatattttagaag

SEQ ID NO: 147120 - DNA, 25 bp, Artificial
  probe
  misc_feature (1)..(25): SEQ ID NO: 2167; WAN024D7W_at; Start 64; Stop 88
cagacctcgtcttttccagctgaaa

SEQ ID NO: 147121 - DNA, 25 bp, Artificial
  probe
  misc_feature (1)..(25): SEQ ID NO: 2167; WAN024D7W_at; Start 287; Stop 311
ccttgaaagaggtggcagttgagct

SEQ ID NO: 147122 - DNA, 25 bp, Artificial
  probe
  misc_feature (1)..(25): SEQ ID NO: 2167; WAN024D7W_at; Start 10; Stop 34
ccaattaagatcattcaggcaagca

SEQ ID NO: 147123 - DNA, 25 bp, Artificial
  probe
  misc_feature (1)..(25): SEQ ID NO: 761; WAN024D7X_at; Start 91; Stop 115
tctgtctttgaagcacatttgagag

SEQ ID NO: 147124 - DNA, 25 bp, Artificial
  probe
  misc_feature (1)..(25): SEQ ID NO: 761; WAN024D7X_at; Start 284; Stop 308
ccaaggaggcacagggactcggact

SEQ ID NO: 147125 - DNA, 25 bp, Artificial
  probe
  misc_feature (1)..(25): SEQ ID NO: 761; WAN024D7X_at; Start 37; Stop 61
cggattgttgaacttgaatttgaaa

SEQ ID NO: 147126 - DNA, 25 bp, Artificial
  probe
  misc_feature (1)..(25): SEQ ID NO: 761; WAN024D7X_at; Start 135; Stop 159
ggttgctgaaaaagaaggaagaatc

SEQ ID NO: 147127 - DNA, 25 bp, Artificial
  probe
  misc_feature (1)..(25): SEQ ID NO: 761; WAN024D7X_at; Start 232; Stop 256
gactatagtcatgagcctggtggtt

SEQ ID NO: 147128 - DNA, 25 bp, Artificial
  probe
  misc_feature (1)..(25): SEQ ID NO: 761; WAN024D7X_at; Start 64; Stop 88
ttttcggtcgaagaagccattcctc

SEQ ID NO: 147129 - DNA, 25 bp, Artificial
  probe
  misc_feature (1)..(25): SEQ ID NO: 761; WAN024D7X_at; Start 279; Stop 303
tattgccaaggaggcacagggactc

SEQ ID NO: 147130 - DNA, 25 bp, Artificial
  probe
  misc_feature (1)..(25): SEQ ID NO: 761; WAN024D7X_at; Start 76; Stop 100
gaagccattcctccttctgtctttg

SEQ ID NO: 147131 - DNA, 25 bp, Artificial
  probe
  misc_feature (1)..(25): SEQ ID NO: 761; WAN024D7X_at; Start 345; Stop 369
tcttgaagatgagagagatggcatt

SEQ ID NO: 147132 - DNA, 25 bp, Artificial
  probe
  misc_feature (1)..(25): SEQ ID NO: 761; WAN024D7X_at; Start 313; Stop 337
cagaaattgctgacagccttgaaag

SEQ ID NO: 147133 - DNA, 25 bp, Artificial
  probe
  misc_feature (1)..(25): SEQ ID NO: 761; WAN024D7X_at; Start 201; Stop 225
gcaagaccagtcttttacagaagaa

SEQ ID NO: 147134 - DNA, 25 bp, Artificial
  probe
  misc_feature (1)..(25): SEQ ID NO: 761; WAN024D7X_at; Start 166; Stop 190
tatatcgaaggaccagttggcctgc

SEQ ID NO: 147135 - DNA, 25 bp, Artificial
  probe
  misc_feature (1)..(25): SEQ ID NO: 761; WAN024D7X_at; Start 471; Stop 495
tatggtctgggaaatgaaaaaataa

SEQ ID NO: 147136 - DNA, 25 bp, Artificial
  probe
  misc_feature (1)..(25): SEQ ID NO: 761; WAN024D7X_at; Start 457; Stop 481
gaaacatggtatgatatggtctggg

SEQ ID NO: 147137 - DNA, 25 bp, Artificial
  probe
  misc_feature (1)..(25): SEQ ID NO: 761; WAN024D7X_at; Start 155; Stop 179
gaatcatgggttatatcgaaggacc

SEQ ID NO: 147138 - DNA, 25 bp, Artificial
  probe
  misc_feature (1)..(25): SEQ ID NO: 761; WAN024D7X_at; Start 409; Stop 433
aaacatggatttgtcaacgaaggcc

SEQ ID NO: 147139 - DNA, 25 bp, Artificial
  probe
  misc_feature (1)..(25): SEQ ID NO: 761; WAN024D7X_at; Start 254; Stop 278
gttatatctctgtgacctgtctgtc

SEQ ID NO: 147140 - DNA, 25 bp, Artificial
  probe
  misc_feature (1)..(25): SEQ ID NO: 761; WAN024D7X_at; Start 218; Stop 242
cagaagaaataaaagactatagtca

SEQ ID NO: 147141 - DNA, 25 bp, Artificial
  probe
  misc_feature (1)..(25): SEQ ID NO: 761; WAN024D7X_at; Start 104; Stop 128
cacatttgagagaaattcagacctc

SEQ ID NO: 147142 - DNA, 25 bp, Artificial
  probe
  misc_feature (1)..(25): SEQ ID NO: 761; WAN024D7X_at; Start 328; Stop 352
gccttgaaagaagttgctcttgaag

SEQ ID NO: 147143 - DNA, 25 bp, Artificial
  probe
  misc_feature (1)..(25): SEQ ID NO: 761; WAN024D7X_at; Start 180; Stop 204
agttggcctgcaccgccatctgcaa

SEQ ID NO: 147144 - DNA, 25 bp, Artificial
  probe
  misc_feature (1)..(25): SEQ ID NO: 761; WAN024D7X_at; Start 427; Stop 451
gaaggccagtcccagtcaacctttg

SEQ ID NO: 147145 - DNA, 25 bp, Artificial
  probe
  misc_feature (1)..(25): SEQ ID NO: 761; WAN024D7X_at; Start 140; Stop 164
ctgaaaaagaaggaagaatcatggg

SEQ ID NO: 147146 - DNA, 25 bp, Artificial
  probe
  misc_feature (1)..(25): SEQ ID NO: 761; WAN024D7X_at; Start 359; Stop 383
gagatggcattaatctaacctgtca

SEQ ID NO: 147147 - DNA, 25 bp, Artificial
  probe
  misc_feature (1)..(25): SEQ ID NO: 761; WAN024D7X_at; Start 267; Stop 291
gacctgtctgtctattgccaaggag

SEQ ID NO: 147148 - DNA, 25 bp, Artificial
  probe
  misc_feature (1)..(25): SEQ ID NO: 761; WAN024D7X_at; Start 418; Stop 442
tttgtcaacgaaggccagtcccagt

SEQ ID NO: 147149 - DNA, 25 bp, Artificial
  probe
  misc_feature (1)..(25): SEQ ID NO: 761; WAN024D7X_at; Start 374; Stop 398
taacctgtcatgactatctcatcgc

SEQ ID NO: 147150 - DNA, 25 bp, Artificial
  probe
  misc_feature (1)..(25): SEQ ID NO: 761; WAN024D7X_at; Start 16; Stop 40
gcaagattagaagatttggatcgga

SEQ ID NO: 147151 - DNA, 25 bp, Artificial
  probe
  misc_feature (1)..(25): SEQ ID NO: 761; WAN024D7X_at; Start 121; Stop 145
cagacctcttttctggttgctgaaa

SEQ ID NO: 147152 - DNA, 25 bp, Artificial
  probe
  misc_feature (1)..(25): SEQ ID NO: 761; WAN024D7X_at; Start 241; Stop 265
catgagcctggtggttatatctctg

SEQ ID NO: 147153 - DNA, 25 bp, Artificial
  probe
  misc_feature (1)..(25): SEQ ID NO: 761; WAN024D7X_at; Start 432; Stop 456
ccagtcccagtcaacctttgcaggg

SEQ ID NO: 147154 - DNA, 25 bp, Artificial
  probe
  misc_feature (1)..(25): SEQ ID NO: 761; WAN024D7X_at; Start 8; Stop 32
tcagacaagcaagattagaagattt

SEQ ID NO: 147155 - DNA, 25 bp, Artificial
  probe
  misc_feature (1)..(25): SEQ ID NO: 761; WAN024D7X_at; Start 30; Stop 54
tttggatcggattgttgaacttgaa

SEQ ID NO: 147156 - DNA, 25 bp, Artificial
  probe
  misc_feature (1)..(25): SEQ ID NO: 761; WAN024D7X_at; Start 191; Stop 215
accgccatctgcaagaccagtcttt

SEQ ID NO: 147157 - DNA, 25 bp, Artificial
  probe
  misc_feature (1)..(25): SEQ ID NO: 3365; WAN024D7Y_at; Start 60; Stop 84
tattcttttgctagtcttgattaaa

SEQ ID NO: 147158 - DNA, 25 bp, Artificial
  probe
  misc_feature (1)..(25): SEQ ID NO: 3365; WAN024D7Y_at; Start 107; Stop 131
caggcattttcgaagaaagagctga

SEQ ID NO: 147159 - DNA, 25 bp, Artificial
  probe
  misc_feature (1)..(25): SEQ ID NO: 3365; WAN024D7Y_at; Start 480; Stop 504
tcagctaggagaagctctaactaat

SEQ ID NO: 147160 - DNA, 25 bp, Artificial
  probe
  misc_feature (1)..(25): SEQ ID NO: 3365; WAN024D7Y_at; Start 212; Stop 236
tggctggtagccgtaaagaagctaa

SEQ ID NO: 147161 - DNA, 25 bp, Artificial
  probe
  misc_feature (1)..(25): SEQ ID NO: 3365; WAN024D7Y_at; Start 179; Stop 203
cagaagtattggctcaaaaacgcga

SEQ ID NO: 147162 - DNA, 25 bp, Artificial
  probe
  misc_feature (1)..(25): SEQ ID NO: 3365; WAN024D7Y_at; Start 9; Stop 33
cgtaacagtaggtgaattaattggt

SEQ ID NO: 147163 - DNA, 25 bp, Artificial
  probe
  misc_feature (1)..(25): SEQ ID NO: 3365; WAN024D7Y_at; Start 94; Stop 118
tggtctaatattacaggcattttcg

SEQ ID NO: 147164 - DNA, 25 bp, Artificial
  probe
  misc_feature (1)..(25): SEQ ID NO: 3365; WAN024D7Y_at; Start 221; Stop 245
gccgtaaagaagctaagacaatcat

SEQ ID NO: 147165 - DNA, 25 bp, Artificial
  probe
  misc_feature (1)..(25): SEQ ID NO: 3365; WAN024D7Y_at; Start 243; Stop 267
cattgaaaatgcaaaggaaacagct

SEQ ID NO: 147166 - DNA, 25 bp, Artificial
  probe
  misc_feature (1)..(25): SEQ ID NO: 3365; WAN024D7Y_at; Start 279; Stop 303
ggctaatatcttagcagatgctaaa

SEQ ID NO: 147167 - DNA, 25 bp, Artificial
  probe
  misc_feature (1)..(25): SEQ ID NO: 3365; WAN024D7Y_at; Start 184; Stop 208
gtattggctcaaaaacgcgaagatg

SEQ ID NO: 147168 - DNA, 25 bp, Artificial
  probe
  misc_feature (1)..(25): SEQ ID NO: 3365; WAN024D7Y_at; Start 460; Stop 484
ctcattgatcagtatatcgatcagc

SEQ ID NO: 147169 - DNA, 25 bp, Artificial
  probe
  misc_feature (1)..(25): SEQ ID NO: 3365; WAN024D7Y_at; Start 116; Stop 140
tcgaagaaagagctgaaaaaattgc

SEQ ID NO: 147170 - DNA, 25 bp, Artificial
  probe
  misc_feature (1)..(25): SEQ ID NO: 3365; WAN024D7Y_at; Start 102; Stop 126
tattacaggcattttcgaagaaaga

SEQ ID NO: 147171 - DNA, 25 bp, Artificial
  probe
  misc_feature (1)..(25): SEQ ID NO: 3365; WAN024D7Y_at; Start 127; Stop 151
gctgaaaaaattgcttcagatattg

SEQ ID NO: 147172 - DNA, 25 bp, Artificial
  probe
  misc_feature (1)..(25): SEQ ID NO: 3365; WAN024D7Y_at; Start 229; Stop 253
gaagctaagacaatcattgaaaatg

SEQ ID NO: 147173 - DNA, 25 bp, Artificial
  probe
  misc_feature (1)..(25): SEQ ID NO: 3365; WAN024D7Y_at; Start 275; Stop 299
gtaaggctaatatcttagcagatgc

SEQ ID NO: 147174 - DNA, 25 bp, Artificial
  probe
  misc_feature (1)..(25): SEQ ID NO: 3365; WAN024D7Y_at; Start 265; Stop 289
gctgagcaaagtaaggctaatatct

SEQ ID NO: 147175 - DNA, 25 bp, Artificial
  probe
  misc_feature (1)..(25): SEQ ID NO: 3365; WAN024D7Y_at; Start 163; Stop 187
gaagcccgtcaaaaagcagaagtat

SEQ ID NO: 147176 - DNA, 25 bp, Artificial
  probe
  misc_feature (1)..(25): SEQ ID NO: 3365; WAN024D7Y_at; Start 159; Stop 183
tgaagaagcccgtcaaaaagcagaa

SEQ ID NO: 147177 - DNA, 25 bp, Artificial
  probe
  misc_feature (1)..(25): SEQ ID NO: 3365; WAN024D7Y_at; Start 474; Stop 498
tatcgatcagctaggagaagctcta

SEQ ID NO: 147178 - DNA, 25 bp, Artificial
  probe
  misc_feature (1)..(25): SEQ ID NO: 3365; WAN024D7Y_at; Start 167; Stop 191
cccgtcaaaaagcagaagtattggc

SEQ ID NO: 147179 - DNA, 25 bp, Artificial
  probe
  misc_feature (1)..(25): SEQ ID NO: 3365; WAN024D7Y_at; Start 252; Stop 276
tgcaaaggaaacagctgagcaaagt

SEQ ID NO: 147180 - DNA, 25 bp, Artificial
  probe
  misc_feature (1)..(25): SEQ ID NO: 3365; WAN024D7Y_at; Start 48; Stop 72
cactggctcttttattcttttgcta

SEQ ID NO: 147181 - DNA, 25 bp, Artificial
  probe
  misc_feature (1)..(25): SEQ ID NO: 3365; WAN024D7Y_at; Start 154; Stop 178
agagctgaagaagcccgtcaaaaag

SEQ ID NO: 147182 - DNA, 25 bp, Artificial
  probe
  misc_feature (1)..(25): SEQ ID NO: 3365; WAN024D7Y_at; Start 205; Stop 229
gatgaattggctggtagccgtaaag

SEQ ID NO: 147183 - DNA, 25 bp, Artificial
  probe
  misc_feature (1)..(25): SEQ ID NO: 3365; WAN024D7Y_at; Start 87; Stop 111
atttgcatggtctaatattacaggc

SEQ ID NO: 147184 - DNA, 25 bp, Artificial
  probe
  misc_feature (1)..(25): SEQ ID NO: 3365; WAN024D7Y_at; Start 74; Stop 98
tcttgattaaaaaatttgcatggtc

SEQ ID NO: 147185 - DNA, 25 bp, Artificial
  probe
  misc_feature (1)..(25): SEQ ID NO: 3365; WAN024D7Y_at; Start 199; Stop 223
cgcgaagatgaattggctggtagcc

SEQ ID NO: 147186 - DNA, 25 bp, Artificial
  probe
  misc_feature (1)..(25): SEQ ID NO: 3365; WAN024D7Y_at; Start 259; Stop 283
gaaacagctgagcaaagtaaggcta

SEQ ID NO: 147187 - DNA, 25 bp, Artificial
  probe
  misc_feature (1)..(25): SEQ ID NO: 3365; WAN024D7Y_at; Start 192; Stop 216
tcaaaaacgcgaagatgaattggct

SEQ ID NO: 147188 - DNA, 25 bp, Artificial
  probe
  misc_feature (1)..(25): SEQ ID NO: 3365; WAN024D7Y_at; Start 1; Stop 25
ctgatgcacgtaacagtaggtgaat

SEQ ID NO: 147189 - DNA, 25 bp, Artificial
  probe
  misc_feature (1)..(25): SEQ ID NO: 3365; WAN024D7Y_at; Start 468; Stop 492
tcagtatatcgatcagctaggagaa

SEQ ID NO: 147190 - DNA, 25 bp, Artificial
  probe
  misc_feature (1)..(25): SEQ ID NO: 3365; WAN024D7Y_at; Start 247; Stop 271
gaaaatgcaaaggaaacagctgagc

SEQ ID NO: 147191 - DNA, 25 bp, Artificial
  probe
  misc_feature (1)..(25): SEQ ID NO: 6812; WAN024D7Z_at; Start 237; Stop 261
ggttctgatttacaatcacagagca

SEQ ID NO: 147192 - DNA, 25 bp, Artificial
  probe
  misc_feature (1)..(25): SEQ ID NO: 6812; WAN024D7Z_at; Start 143; Stop 167
ttttagctcaggtggcagttgatga

SEQ ID NO: 147193 - DNA, 25 bp, Artificial
  probe
  misc_feature (1)..(25): SEQ ID NO: 6812; WAN024D7Z_at; Start 157; Stop 181
gcagttgatgagtctgataaggaaa

SEQ ID NO: 147194 - DNA, 25 bp, Artificial
  probe
  misc_feature (1)..(25): SEQ ID NO: 6812; WAN024D7Z_at; Start 114; Stop 138
agtcgcagaagaaacgggcttacct

SEQ ID NO: 147195 - DNA, 25 bp, Artificial
  probe
  misc_feature (1)..(25): SEQ ID NO: 6812; WAN024D7Z_at; Start 199; Stop 223
caagactctgtctcacctttaatgc

SEQ ID NO: 147196 - DNA, 25 bp, Artificial
  probe
  misc_feature (1)..(25): SEQ ID NO: 6812; WAN024D7Z_at; Start 233; Stop 257
ttcaggttctgatttacaatcacag

SEQ ID NO: 147197 - DNA, 25 bp, Artificial
  probe
  misc_feature (1)..(25): SEQ ID NO: 6812; WAN024D7Z_at; Start 82; Stop 106
cggattttttcagacttggatcaaa

SEQ ID NO: 147198 - DNA, 25 bp, Artificial
  probe
  misc_feature (1)..(25): SEQ ID NO: 6812; WAN024D7Z_at; Start 42; Stop 66
gccttttgtccaattagtgattgaa

SEQ ID NO: 147199 - DNA, 25 bp, Artificial
  probe
  misc_feature (1)..(25): SEQ ID NO: 6812; WAN024D7Z_at; Start 205; Stop 229
tctgtctcacctttaatgcaaaact

SEQ ID NO: 147200 - DNA, 25 bp, Artificial
  probe
  misc_feature (1)..(25): SEQ ID NO: 6812; WAN024D7Z_at; Start 100; Stop 124
gatcaaatcaagcaagtcgcagaag

SEQ ID NO: 147201 - DNA, 25 bp, Artificial
  probe
  misc_feature (1)..(25): SEQ ID NO: 6812; WAN024D7Z_at; Start 149; Stop 173
ctcaggtggcagttgatgagtctga

SEQ ID NO: 147202 - DNA, 25 bp, Artificial
  probe
  misc_feature (1)..(25): SEQ ID NO: 6812; WAN024D7Z_at; Start 219; Stop 243
aatgcaaaactttattcaggttctg

SEQ ID NO: 147203 - DNA, 25 bp, Artificial
  probe
  misc_feature (1)..(25): SEQ ID NO: 6812; WAN024D7Z_at; Start 222; Stop 246
gcaaaactttattcaggttctgatt

SEQ ID NO: 147204 - DNA, 25 bp, Artificial
  probe
  misc_feature (1)..(25): SEQ ID NO: 6812; WAN024D7Z_at; Start 48; Stop 72
tgtccaattagtgattgaaaaagga

SEQ ID NO: 147205 - DNA, 25 bp, Artificial
  probe
  misc_feature (1)..(25): SEQ ID NO: 6812; WAN024D7Z_at; Start 117; Stop 141
cgcagaagaaacgggcttaccttct

SEQ ID NO: 147206 - DNA, 25 bp, Artificial
  probe
  misc_feature (1)..(25): SEQ ID NO: 6812; WAN024D7Z_at; Start 186; Stop 210
agttggtttctttcaagactctgtc

SEQ ID NO: 147207 - DNA, 25 bp, Artificial
  probe
  misc_feature (1)..(25): SEQ ID NO: 6812; WAN024D7Z_at; Start 202; Stop 226
gactctgtctcacctttaatgcaaa

SEQ ID NO: 147208 - DNA, 25 bp, Artificial
  probe
  misc_feature (1)..(25): SEQ ID NO: 6812; WAN024D7Z_at; Start 190; Stop 214
ggtttctttcaagactctgtctcac

SEQ ID NO: 147209 - DNA, 25 bp, Artificial
  probe
  misc_feature (1)..(25): SEQ ID NO: 6812; WAN024D7Z_at; Start 107; Stop 131
tcaagcaagtcgcagaagaaacggg

SEQ ID NO: 147210 - DNA, 25 bp, Artificial
  probe
  misc_feature (1)..(25): SEQ ID NO: 6812; WAN024D7Z_at; Start 79; Stop 103
gaccggattttttcagacttggatc

SEQ ID NO: 147211 - DNA, 25 bp, Artificial
  probe
  misc_feature (1)..(25): SEQ ID NO: 6812; WAN024D7Z_at; Start 111; Stop 135
gcaagtcgcagaagaaacgggctta

SEQ ID NO: 147212 - DNA, 25 bp, Artificial
  probe
  misc_feature (1)..(25): SEQ ID NO: 6812; WAN024D7Z_at; Start 214; Stop 238
cctttaatgcaaaactttattcagg

SEQ ID NO: 147213 - DNA, 25 bp, Artificial
  probe
  misc_feature (1)..(25): SEQ ID NO: 6812; WAN024D7Z_at; Start 112; Stop 136
caagtcgcagaagaaacgggcttac

SEQ ID NO: 147214 - DNA, 25 bp, Artificial
  probe
  misc_feature (1)..(25): SEQ ID NO: 6812; WAN024D7Z_at; Start 97; Stop 121
ttggatcaaatcaagcaagtcgcag

SEQ ID NO: 147215 - DNA, 25 bp, Artificial
  probe
  misc_feature (1)..(25): SEQ ID NO: 6812; WAN024D7Z_at; Start 102; Stop 126
tcaaatcaagcaagtcgcagaagaa

SEQ ID NO: 147216 - DNA, 25 bp, Artificial
  probe
  misc_feature (1)..(25): SEQ ID NO: 6812; WAN024D7Z_at; Start 208; Stop 232
gtctcacctttaatgcaaaacttta

SEQ ID NO: 147217 - DNA, 25 bp, Artificial
  probe
  misc_feature (1)..(25): SEQ ID NO: 6812; WAN024D7Z_at; Start 105; Stop 129
aatcaagcaagtcgcagaagaaacg

SEQ ID NO: 147218 - DNA, 25 bp, Artificial
  probe
  misc_feature (1)..(25): SEQ ID NO: 6812; WAN024D7Z_at; Start 52; Stop 76
caattagtgattgaaaaaggagaag

SEQ ID NO: 147219 - DNA, 25 bp, Artificial
  probe
  misc_feature (1)..(25): SEQ ID NO: 6812; WAN024D7Z_at; Start 139; Stop 163
tcttttttagctcaggtggcagttg

SEQ ID NO: 147220 - DNA, 25 bp, Artificial
  probe
  misc_feature (1)..(25): SEQ ID NO: 6812; WAN024D7Z_at; Start 75; Stop 99
agaggaccggattttttcagacttg

SEQ ID NO: 147221 - DNA, 25 bp, Artificial
  probe
  misc_feature (1)..(25): SEQ ID NO: 6812; WAN024D7Z_at; Start 183; Stop 207
aacagttggtttctttcaagactct

SEQ ID NO: 147222 - DNA, 25 bp, Artificial
  probe
  misc_feature (1)..(25): SEQ ID NO: 6812; WAN024D7Z_at; Start 108; Stop 132
caagcaagtcgcagaagaaacgggc

SEQ ID NO: 147223 - DNA, 25 bp, Artificial
  probe
  misc_feature (1)..(25): SEQ ID NO: 6812; WAN024D7Z_at; Start 151; Stop 175
caggtggcagttgatgagtctgata

SEQ ID NO: 147224 - DNA, 25 bp, Artificial
  probe
  misc_feature (1)..(25): SEQ ID NO: 6812; WAN024D7Z_at; Start 163; Stop 187
gatgagtctgataaggaaaaaacag

SEQ ID NO: 147225 - DNA, 25 bp, Artificial
  probe
  misc_feature (1)..(25): SEQ ID NO: 6583; WAN024D82_at; Start 84; Stop 108
gatttgctctgtgattgtaggccag

SEQ ID NO: 147226 - DNA, 25 bp, Artificial
  probe
  misc_feature (1)..(25): SEQ ID NO: 6583; WAN024D82_at; Start 51; Stop 75
ggttcaagcaatctacaagcacatc

SEQ ID NO: 147227 - DNA, 25 bp, Artificial
  probe
  misc_feature (1)..(25): SEQ ID NO: 6583; WAN024D82_at; Start 88; Stop 112
tgctctgtgattgtaggccagaacc

SEQ ID NO: 147228 - DNA, 25 bp, Artificial
  probe
  misc_feature (1)..(25): SEQ ID NO: 6583; WAN024D82_at; Start 2; Stop 26
tgagcagacgtaatcgtcacttcaa

SEQ ID NO: 147229 - DNA, 25 bp, Artificial
  probe
  misc_feature (1)..(25): SEQ ID NO: 6583; WAN024D82_at; Start 40; Stop 64
tttttcaagtcggttcaagcaatct

SEQ ID NO: 147230 - DNA, 25 bp, Artificial
  probe
  misc_feature (1)..(25): SEQ ID NO: 6583; WAN024D82_at; Start 38; Stop 62
tctttttcaagtcggttcaagcaat

SEQ ID NO: 147231 - DNA, 25 bp, Artificial
  probe
  misc_feature (1)..(25): SEQ ID NO: 6583; WAN024D82_at; Start 81; Stop 105
aaagatttgctctgtgattgtaggc

SEQ ID NO: 147232 - DNA, 25 bp, Artificial
  probe
  misc_feature (1)..(25): SEQ ID NO: 6583; WAN024D82_at; Start 3; Stop 27
gagcagacgtaatcgtcacttcaaa

SEQ ID NO: 147233 - DNA, 25 bp, Artificial
  probe
  misc_feature (1)..(25): SEQ ID NO: 6583; WAN024D82_at; Start 95; Stop 119
tgattgtaggccagaacctggataa

SEQ ID NO: 147234 - DNA, 25 bp, Artificial
  probe
  misc_feature (1)..(25): SEQ ID NO: 6583; WAN024D82_at; Start 86; Stop 110
tttgctctgtgattgtaggccagaa

SEQ ID NO: 147235 - DNA, 25 bp, Artificial
  probe
  misc_feature (1)..(25): SEQ ID NO: 6583; WAN024D82_at; Start 102; Stop 126
aggccagaacctggataaagttttg

SEQ ID NO: 147236 - DNA, 25 bp, Artificial
  probe
  misc_feature (1)..(25): SEQ ID NO: 6583; WAN024D82_at; Start 55; Stop 79
caagcaatctacaagcacatcataa

SEQ ID NO: 147237 - DNA, 25 bp, Artificial
  probe
  misc_feature (1)..(25): SEQ ID NO: 6583; WAN024D82_at; Start 58; Stop 82
gcaatctacaagcacatcataaaaa

SEQ ID NO: 147238 - DNA, 25 bp, Artificial
  probe
  misc_feature (1)..(25): SEQ ID NO: 6583; WAN024D82_at; Start 83; Stop 107
agatttgctctgtgattgtaggcca

SEQ ID NO: 147239 - DNA, 25 bp, Artificial
  probe
  misc_feature (1)..(25): SEQ ID NO: 6583; WAN024D82_at; Start 42; Stop 66
tttcaagtcggttcaagcaatctac

SEQ ID NO: 147240 - DNA, 25 bp, Artificial
  probe
  misc_feature (1)..(25): SEQ ID NO: 6583; WAN024D82_at; Start 96; Stop 120
gattgtaggccagaacctggataaa

SEQ ID NO: 147241 - DNA, 25 bp, Artificial
  probe
  misc_feature (1)..(25): SEQ ID NO: 6583; WAN024D82_at; Start 62; Stop 86
tctacaagcacatcataaaaaagat

SEQ ID NO: 147242 - DNA, 25 bp, Artificial
  probe
  misc_feature (1)..(25): SEQ ID NO: 6583; WAN024D82_at; Start 24; Stop 48
caaatcgatttgtttctttttcaag

SEQ ID NO: 147243 - DNA, 25 bp, Artificial
  probe
  misc_feature (1)..(25): SEQ ID NO: 6583; WAN024D82_at; Start 11; Stop 35
gtaatcgtcacttcaaatcgatttg

SEQ ID NO: 147244 - DNA, 25 bp, Artificial
  probe
  misc_feature (1)..(25): SEQ ID NO: 6583; WAN024D82_at; Start 89; Stop 113
gctctgtgattgtaggccagaacct

SEQ ID NO: 147245 - DNA, 25 bp, Artificial
  probe
  misc_feature (1)..(25): SEQ ID NO: 6583; WAN024D82_at; Start 45; Stop 69
caagtcggttcaagcaatctacaag

SEQ ID NO: 147246 - DNA, 25 bp, Artificial
  probe
  misc_feature (1)..(25): SEQ ID NO: 6583; WAN024D82_at; Start 66; Stop 90
caagcacatcataaaaaagatttgc

SEQ ID NO: 147247 - DNA, 25 bp, Artificial
  probe
  misc_feature (1)..(25): SEQ ID NO: 6583; WAN024D82_at; Start 94; Stop 118
gtgattgtaggccagaacctggata

SEQ ID NO: 147248 - DNA, 25 bp, Artificial
  probe
  misc_feature (1)..(25): SEQ ID NO: 6583; WAN024D82_at; Start 36; Stop 60
tttctttttcaagtcggttcaagca

SEQ ID NO: 147249 - DNA, 25 bp, Artificial
  probe
  misc_feature (1)..(25): SEQ ID NO: 6583; WAN024D82_at; Start 8; Stop 32
gacgtaatcgtcacttcaaatcgat

SEQ ID NO: 147250 - DNA, 25 bp, Artificial
  probe
  misc_feature (1)..(25): SEQ ID NO: 6583; WAN024D82_at; Start 5; Stop 29
gcagacgtaatcgtcacttcaaatc

SEQ ID NO: 147251 - DNA, 25 bp, Artificial
  probe
  misc_feature (1)..(25): SEQ ID NO: 6583; WAN024D82_at; Start 49; Stop 73
tcggttcaagcaatctacaagcaca

SEQ ID NO: 147252 - DNA, 25 bp, Artificial
  probe
  misc_feature (1)..(25): SEQ ID NO: 6583; WAN024D82_at; Start 15; Stop 39
tcgtcacttcaaatcgatttgtttc

SEQ ID NO: 147253 - DNA, 25 bp, Artificial
  probe
  misc_feature (1)..(25): SEQ ID NO: 6583; WAN024D82_at; Start 91; Stop 115
tctgtgattgtaggccagaacctgg

SEQ ID NO: 147254 - DNA, 25 bp, Artificial
  probe
  misc_feature (1)..(25): SEQ ID NO: 6583; WAN024D82_at; Start 99; Stop 123
tgtaggccagaacctggataaagtt

SEQ ID NO: 147255 - DNA, 25 bp, Artificial
  probe
  misc_feature (1)..(25): SEQ ID NO: 6583; WAN024D82_at; Start 47; Stop 71
agtcggttcaagcaatctacaagca

SEQ ID NO: 147256 - DNA, 25 bp, Artificial
  probe
  misc_feature (1)..(25): SEQ ID NO: 6583; WAN024D82_at; Start 46; Stop 70
aagtcggttcaagcaatctacaagc

SEQ ID NO: 147257 - DNA, 25 bp, Artificial
  probe
  misc_feature (1)..(25): SEQ ID NO: 6583; WAN024D82_at; Start 44; Stop 68
tcaagtcggttcaagcaatctacaa

SEQ ID NO: 147258 - DNA, 25 bp, Artificial
  probe
  misc_feature (1)..(25): SEQ ID NO: 6583; WAN024D82_at; Start 53; Stop 77
ttcaagcaatctacaagcacatcat

SEQ ID NO: 147259 - DNA, 25 bp, Artificial
  probe
  misc_feature (1)..(25): SEQ ID NO: 2250; WAN024D83_at; Start 237; Stop 261
ggttctggcctacaatcacagagca

SEQ ID NO: 147260 - DNA, 25 bp, Artificial
  probe
  misc_feature (1)..(25): SEQ ID NO: 2250; WAN024D83_at; Start 336; Stop 360
tacgtctgctcatcctctaactgat

SEQ ID NO: 147261 - DNA, 25 bp, Artificial
  probe
  misc_feature (1)..(25): SEQ ID NO: 2250; WAN024D83_at; Start 221; Stop 245
tacaaaactttatccaggttctggc

SEQ ID NO: 147262 - DNA, 25 bp, Artificial
  probe
  misc_feature (1)..(25): SEQ ID NO: 2250; WAN024D83_at; Start 351; Stop 375
tctaactgatgaacagaagactcgt

SEQ ID NO: 147263 - DNA, 25 bp, Artificial
  probe
  misc_feature (1)..(25): SEQ ID NO: 2250; WAN024D83_at; Start 158; Stop 182
cagtagacgagtcggataaggaaaa

SEQ ID NO: 147264 - DNA, 25 bp, Artificial
  probe
  misc_feature (1)..(25): SEQ ID NO: 2250; WAN024D83_at; Start 428; Stop 452
aacaaatcgatgaaagtctcattgg

SEQ ID NO: 147265 - DNA, 25 bp, Artificial
  probe
  misc_feature (1)..(25): SEQ ID NO: 2250; WAN024D83_at; Start 42; Stop 66
gccttttgtccaattggtacttgaa

SEQ ID NO: 147266 - DNA, 25 bp, Artificial
  probe
  misc_feature (1)..(25): SEQ ID NO: 2250; WAN024D83_at; Start 482; Stop 506
caattgatgtgagtattaaacaaca

SEQ ID NO: 147267 - DNA, 25 bp, Artificial
  probe
  misc_feature (1)..(25): SEQ ID NO: 2250; WAN024D83_at; Start 259; Stop 283
gcaaatcttttttatgatgtgcttg

SEQ ID NO: 147268 - DNA, 25 bp, Artificial
  probe
  misc_feature (1)..(25): SEQ ID NO: 2250; WAN024D83_at; Start 330; Stop 354
gacgattacgtctgctcatcctcta

SEQ ID NO: 147269 - DNA, 25 bp, Artificial
  probe
  misc_feature (1)..(25): SEQ ID NO: 2250; WAN024D83_at; Start 301; Stop 325
cttgaaaaagaaacaaatcgatttg

SEQ ID NO: 147270 - DNA, 25 bp, Artificial
  probe
  misc_feature (1)..(25): SEQ ID NO: 2250; WAN024D83_at; Start 76; Stop 100
gaagaccgtatcttttcagacttga

SEQ ID NO: 147271 - DNA, 25 bp, Artificial
  probe
  misc_feature (1)..(25): SEQ ID NO: 2250; WAN024D83_at; Start 289; Stop 313
tgcttgaaccgacttgaaaaagaaa

SEQ ID NO: 147272 - DNA, 25 bp, Artificial
  probe
  misc_feature (1)..(25): SEQ ID NO: 2250; WAN024D83_at; Start 151; Stop 175
caagtggcagtagacgagtcggata

SEQ ID NO: 147273 - DNA, 25 bp, Artificial
  probe
  misc_feature (1)..(25): SEQ ID NO: 2250; WAN024D83_at; Start 48; Stop 72
tgtccaattggtacttgaaaaagga

SEQ ID NO: 147274 - DNA, 25 bp, Artificial
  probe
  misc_feature (1)..(25): SEQ ID NO: 2250; WAN024D83_at; Start 81; Stop 105
ccgtatcttttcagacttgactcaa

SEQ ID NO: 147275 - DNA, 25 bp, Artificial
  probe
  misc_feature (1)..(25): SEQ ID NO: 2250; WAN024D83_at; Start 374; Stop 398
gtttgctccctttgattgagaaaaa

SEQ ID NO: 147276 - DNA, 25 bp, Artificial
  probe
  misc_feature (1)..(25): SEQ ID NO: 2250; WAN024D83_at; Start 413; Stop 437
taaggagtgtaaaagaacaaatcga

SEQ ID NO: 147277 - DNA, 25 bp, Artificial
  probe
  misc_feature (1)..(25): SEQ ID NO: 2250; WAN024D83_at; Start 434; Stop 458
tcgatgaaagtctcattggtggttt

SEQ ID NO: 147278 - DNA, 25 bp, Artificial
  probe
  misc_feature (1)..(25): SEQ ID NO: 2250; WAN024D83_at; Start 397; Stop 421
aaaatgtctctgaaagtaaggagtg

SEQ ID NO: 147279 - DNA, 25 bp, Artificial
  probe
  misc_feature (1)..(25): SEQ ID NO: 2250; WAN024D83_at; Start 369; Stop 393
gactcgtttgctccctttgattgag

SEQ ID NO: 147280 - DNA, 25 bp, Artificial
  probe
  misc_feature (1)..(25): SEQ ID NO: 2250; WAN024D83_at; Start 468; Stop 492
tgccaatcacaagacaattgatgtg

SEQ ID NO: 147281 - DNA, 25 bp, Artificial
  probe
  misc_feature (1)..(25): SEQ ID NO: 2250; WAN024D83_at; Start 146; Stop 170
taaaacaagtggcagtagacgagtc

SEQ ID NO: 147282 - DNA, 25 bp, Artificial
  probe
  misc_feature (1)..(25): SEQ ID NO: 2250; WAN024D83_at; Start 282; Stop 306
tgtagattgcttgaaccgacttgaa

SEQ ID NO: 147283 - DNA, 25 bp, Artificial
  probe
  misc_feature (1)..(25): SEQ ID NO: 2250; WAN024D83_at; Start 360; Stop 384
tgaacagaagactcgtttgctccct

SEQ ID NO: 147284 - DNA, 25 bp, Artificial
  probe
  misc_feature (1)..(25): SEQ ID NO: 2250; WAN024D83_at; Start 487; Stop 511
gatgtgagtattaaacaacaactta

SEQ ID NO: 147285 - DNA, 25 bp, Artificial
  probe
  misc_feature (1)..(25): SEQ ID NO: 2250; WAN024D83_at; Start 274; Stop 298
gatgtgcttgtagattgcttgaacc

SEQ ID NO: 147286 - DNA, 25 bp, Artificial
  probe
  misc_feature (1)..(25): SEQ ID NO: 2250; WAN024D83_at; Start 310; Stop 334
gaaacaaatcgatttgaagtgacga

SEQ ID NO: 147287 - DNA, 25 bp, Artificial
  probe
  misc_feature (1)..(25): SEQ ID NO: 2250; WAN024D83_at; Start 186; Stop 210
aattgcttttttccaagattctgtg

SEQ ID NO: 147288 - DNA, 25 bp, Artificial
  probe
  misc_feature (1)..(25): SEQ ID NO: 2250; WAN024D83_at; Start 447; Stop 471
cattggtggttttgtcatttttgcc

SEQ ID NO: 147289 - DNA, 25 bp, Artificial
  probe
  misc_feature (1)..(25): SEQ ID NO: 2250; WAN024D83_at; Start 454; Stop 478
ggttttgtcatttttgccaatcaca

SEQ ID NO: 147290 - DNA, 25 bp, Artificial
  probe
  misc_feature (1)..(25): SEQ ID NO: 2250; WAN024D83_at; Start 94; Stop 118
gacttgactcaaatcaagcaagttg

SEQ ID NO: 147291 - DNA, 25 bp, Artificial
  probe
  misc_feature (1)..(25): SEQ ID NO: 2250; WAN024D83_at; Start 320; Stop 344
gatttgaagtgacgattacgtctgc

SEQ ID NO: 147292 - DNA, 25 bp, Artificial
  probe
  misc_feature (1)..(25): SEQ ID NO: 2250; WAN024D83_at; Start 63; Stop 87
tgaaaaaggagaagaagaccgtatc

SEQ ID NO: 147293 - DNA, 25 bp, Artificial
  probe
  misc_feature (1)..(25): SEQ ID NO: 874; WAN024D84_at; Start 630; Stop 654
tttaatctacgatggcgttggcgaa

SEQ ID NO: 147294 - DNA, 25 bp, Artificial
  probe
  misc_feature (1)..(25): SEQ ID NO: 874; WAN024D84_at; Start 717; Stop 741
tgctattcatctctctaaagacggt

SEQ ID NO: 147295 - DNA, 25 bp, Artificial
  probe
  misc_feature (1)..(25): SEQ ID NO: 874; WAN024D84_at; Start 888; Stop 912
cattgttgtccatcaagactctgac

SEQ ID NO: 147296 - DNA, 25 bp, Artificial
  probe
  misc_feature (1)..(25): SEQ ID NO: 874; WAN024D84_at; Start 61; Stop 85
gcagactttgatacagaaactggtc

SEQ ID NO: 147297 - DNA, 25 bp, Artificial
  probe
  misc_feature (1)..(25): SEQ ID NO: 874; WAN024D84_at; Start 781; Stop 805
gcagtatataccatccttgcggacg

SEQ ID NO: 147298 - DNA, 25 bp, Artificial
  probe
  misc_feature (1)..(25): SEQ ID NO: 874; WAN024D84_at; Start 823; Stop 847
gaaatcgttccaacgcatggtcaga

SEQ ID NO: 147299 - DNA, 25 bp, Artificial
  probe
  misc_feature (1)..(25): SEQ ID NO: 874; WAN024D84_at; Start 191; Stop 215
gaattgcagcctatcaaactgacgg

SEQ ID NO: 147300 - DNA, 25 bp, Artificial
  probe
  misc_feature (1)..(25): SEQ ID NO: 874; WAN024D84_at; Start 736; Stop 760
gacggtaaatacctctacgcttcta

SEQ ID NO: 147301 - DNA, 25 bp, Artificial
  probe
  misc_feature (1)..(25): SEQ ID NO: 874; WAN024D84_at; Start 205; Stop 229
caaactgacgggactgtgttaaatc

SEQ ID NO: 147302 - DNA, 25 bp, Artificial
  probe
  misc_feature (1)..(25): SEQ ID NO: 874; WAN024D84_at; Start 28; Stop 52
tatacacgtcgtacttctcaaggga

SEQ ID NO: 147303 - DNA, 25 bp, Artificial
  probe
  misc_feature (1)..(25): SEQ ID NO: 874; WAN024D84_at; Start 241; Stop 265
gaaggagctccccactgttatgttg

SEQ ID NO: 147304 - DNA, 25 bp, Artificial
  probe
  misc_feature (1)..(25): SEQ ID NO: 874; WAN024D84_at; Start 470; Stop 494
gaactgaccaagtcatcacctatga

SEQ ID NO: 147305 - DNA, 25 bp, Artificial
  probe
  misc_feature (1)..(25): SEQ ID NO: 874; WAN024D84_at; Start 43; Stop 67
tctcaagggatttacaaggcagact

SEQ ID NO: 147306 - DNA, 25 bp, Artificial
  probe
  misc_feature (1)..(25): SEQ ID NO: 874; WAN024D84_at; Start 275; Stop 299
aaaagcgtgatttggtttacgcagc

SEQ ID NO: 147307 - DNA, 25 bp, Artificial
  probe
  misc_feature (1)..(25): SEQ ID NO: 874; WAN024D84_at; Start 76; Stop 100
gaaactggtcagctttcaaatctag

SEQ ID NO: 147308 - DNA, 25 bp, Artificial
  probe
  misc_feature (1)..(25): SEQ ID NO: 874; WAN024D84_at; Start 485; Stop 509
tcacctatgacctcgatcaagaagg

SEQ ID NO: 147309 - DNA, 25 bp, Artificial
  probe
  misc_feature (1)..(25): SEQ ID NO: 874; WAN024D84_at; Start 330; Stop 354
taaacgccaggaagatggtagtctt

SEQ ID NO: 147310 - DNA, 25 bp, Artificial
  probe
  misc_feature (1)..(25): SEQ ID NO: 874; WAN024D84_at; Start 942; Stop 966
caatggtcgtctagcagaactctcc

SEQ ID NO: 147311 - DNA, 25 bp, Artificial
  probe
  misc_feature (1)..(25): SEQ ID NO: 874; WAN024D84_at; Start 259; Stop 283
tatgttgctgtcgatgaaaagcgtg

SEQ ID NO: 147312 - DNA, 25 bp, Artificial
  probe
  misc_feature (1)..(25): SEQ ID NO: 874; WAN024D84_at; Start 838; Stop 862
catggtcagactccacgtgattttg

SEQ ID NO: 147313 - DNA, 25 bp, Artificial
  probe
  misc_feature (1)..(25): SEQ ID NO: 874; WAN024D84_at; Start 98; Stop 122
tagaactttttgcagctgagccaag

SEQ ID NO: 147314 - DNA, 25 bp, Artificial
  probe
  misc_feature (1)..(25): SEQ ID NO: 874; WAN024D84_at; Start 112; Stop 136
gctgagccaagtccaacctaccttg

SEQ ID NO: 147315 - DNA, 25 bp, Artificial
  probe
  misc_feature (1)..(25): SEQ ID NO: 874; WAN024D84_at; Start 795; Stop 819
ccttgcggacggtagcttagagtta

SEQ ID NO: 147316 - DNA, 25 bp, Artificial
  probe
  misc_feature (1)..(25): SEQ ID NO: 874; WAN024D84_at; Start 316; Stop 340
caagtccttgtttataaacgccagg

SEQ ID NO: 147317 - DNA, 25 bp, Artificial
  probe
  misc_feature (1)..(25): SEQ ID NO: 874; WAN024D84_at; Start 158; Stop 182
tatacactgttggtagccaagacga

SEQ ID NO: 147318 - DNA, 25 bp, Artificial
  probe
  misc_feature (1)..(25): SEQ ID NO: 874; WAN024D84_at; Start 382; Stop 406
ggccaaggtccacatgaaaatcaag

SEQ ID NO: 147319 - DNA, 25 bp, Artificial
  probe
  misc_feature (1)..(25): SEQ ID NO: 874; WAN024D84_at; Start 363; Stop 387
tgatatggatcaacacagtggccaa

SEQ ID NO: 147320 - DNA, 25 bp, Artificial
  probe
  misc_feature (1)..(25): SEQ ID NO: 874; WAN024D84_at; Start 229; Stop 253
catgttgttgaagaaggagctcccc

SEQ ID NO: 147321 - DNA, 25 bp, Artificial
  probe
  misc_feature (1)..(25): SEQ ID NO: 874; WAN024D84_at; Start 855; Stop 879
tgattttgatttgacacccgaccaa

SEQ ID NO: 147322 - DNA, 25 bp, Artificial
  probe
  misc_feature (1)..(25): SEQ ID NO: 874; WAN024D84_at; Start 547; Stop 571
ggagcaggctcacgccatatcattt

SEQ ID NO: 147323 - DNA, 25 bp, Artificial
  probe
  misc_feature (1)..(25): SEQ ID NO: 874; WAN024D84_at; Start 759; Stop 783
taaccgtggccatgattctatcgca

SEQ ID NO: 147324 - DNA, 25 bp, Artificial
  probe
  misc_feature (1)..(25): SEQ ID NO: 874; WAN024D84_at; Start 455; Stop 479
tgacctgcgacttgggaactgacca

SEQ ID NO: 147325 - DNA, 25 bp, Artificial
  probe
  misc_feature (1)..(25): SEQ ID NO: 874; WAN024D84_at; Start 526; Stop 550
tatacctatcacagcaagccaggag

SEQ ID NO: 147326 - DNA, 25 bp, Artificial
  probe
  misc_feature (1)..(25): SEQ ID NO: 874; WAN024D84_at; Start 974; Stop 998
tccatgttcccgaagcagtctgcat

SEQ ID NO: 147327 - DNA, 25 bp, Artificial
  probe
  misc_feature (1)..(25): SEQ ID NO: 2183; WAN024D85_at; Start 84; Stop 108
tgcaaccttctttatcggtcgcaaa

SEQ ID NO: 147328 - DNA, 25 bp, Artificial
  probe
  misc_feature (1)..(25): SEQ ID NO: 2183; WAN024D85_at; Start 238; Stop 262
tatggaatcccaactgtaccaggtt

SEQ ID NO: 147329 - DNA, 25 bp, Artificial
  probe
  misc_feature (1)..(25): SEQ ID NO: 2183; WAN024D85_at; Start 122; Stop 146
gccgtaaatttgcaggtacattgtc

SEQ ID NO: 147330 - DNA, 25 bp, Artificial
  probe
  misc_feature (1)..(25): SEQ ID NO: 2183; WAN024D85_at; Start 3; Stop 27
ggaacaatttttagataacatcaaa

SEQ ID NO: 147331 - DNA, 25 bp, Artificial
  probe
  misc_feature (1)..(25): SEQ ID NO: 2183; WAN024D85_at; Start 157; Stop 181
gctgaaaccaaagctcacatttact

SEQ ID NO: 147332 - DNA, 25 bp, Artificial
  probe
  misc_feature (1)..(25): SEQ ID NO: 2183; WAN024D85_at; Start 200; Stop 224
caagccaactcaatgatttgcaagc

SEQ ID NO: 147333 - DNA, 25 bp, Artificial
  probe
  misc_feature (1)..(25): SEQ ID NO: 2183; WAN024D85_at; Start 293; Stop 317
tccgttgcgactcttcaatgtcagc

SEQ ID NO: 147334 - DNA, 25 bp, Artificial
  probe
  misc_feature (1)..(25): SEQ ID NO: 2183; WAN024D85_at; Start 113; Stop 137
gcccttactgccgtaaatttgcagg

SEQ ID NO: 147335 - DNA, 25 bp, Artificial
  probe
  misc_feature (1)..(25): SEQ ID NO: 2183; WAN024D85_at; Start 104; Stop 128
gcaaaacttgcccttactgccgtaa

SEQ ID NO: 147336 - DNA, 25 bp, Artificial
  probe
  misc_feature (1)..(25): SEQ ID NO: 2183; WAN024D85_at; Start 23; Stop 47
tcaaagaccttgaagtcactacagt

SEQ ID NO: 147337 - DNA, 25 bp, Artificial
  probe
  misc_feature (1)..(25): SEQ ID NO: 2183; WAN024D85_at; Start 247; Stop 271
ccaactgtaccaggttttgttcata

SEQ ID NO: 147338 - DNA, 25 bp, Artificial
  probe
  misc_feature (1)..(25): SEQ ID NO: 2183; WAN024D85_at; Start 38; Stop 62
tcactacagttgtgcgtgcgcaaga

SEQ ID NO: 147339 - DNA, 25 bp, Artificial
  probe
  misc_feature (1)..(25): SEQ ID NO: 2183; WAN024D85_at; Start 55; Stop 79
gcgcaagaagctcttgataaaaaag

SEQ ID NO: 147340 - DNA, 25 bp, Artificial
  probe
  misc_feature (1)..(25): SEQ ID NO: 2183; WAN024D85_at; Start 210; Stop 234
caatgatttgcaagcattccgctca

SEQ ID NO: 147341 - DNA, 25 bp, Artificial
  probe
  misc_feature (1)..(25): SEQ ID NO: 2183; WAN024D85_at; Start 316; Stop 340
gcacaagaaatcaaagatttcgcag

SEQ ID NO: 147342 - DNA, 25 bp, Artificial
  probe
  misc_feature (1)..(25): SEQ ID NO: 2183; WAN024D85_at; Start 277; Stop 301
gatggacaaatcaacgtccgttgcg

SEQ ID NO: 147343 - DNA, 25 bp, Artificial
  probe
  misc_feature (1)..(25): SEQ ID NO: 2183; WAN024D85_at; Start 91; Stop 115
ttctttatcggtcgcaaaacttgcc

SEQ ID NO: 147344 - DNA, 25 bp, Artificial
  probe
  misc_feature (1)..(25): SEQ ID NO: 2183; WAN024D85_at; Start 287; Stop 311
tcaacgtccgttgcgactcttcaat

SEQ ID NO: 147345 - DNA, 25 bp, Artificial
  probe
  misc_feature (1)..(25): SEQ ID NO: 2183; WAN024D85_at; Start 130; Stop 154
tttgcaggtacattgtcaggtgtcg

SEQ ID NO: 147346 - DNA, 25 bp, Artificial
  probe
  misc_feature (1)..(25): SEQ ID NO: 2183; WAN024D85_at; Start 214; Stop 238
gatttgcaagcattccgctcacgct

SEQ ID NO: 147347 - DNA, 25 bp, Artificial
  probe
  misc_feature (1)..(25): SEQ ID NO: 2183; WAN024D85_at; Start 69; Stop 93
tgataaaaaagaaactgcaaccttc

SEQ ID NO: 147348 - DNA, 25 bp, Artificial
  probe
  misc_feature (1)..(25): SEQ ID NO: 2183; WAN024D85_at; Start 47; Stop 71
ttgtgcgtgcgcaagaagctcttga

SEQ ID NO: 147349 - DNA, 25 bp, Artificial
  probe
  misc_feature (1)..(25): SEQ ID NO: 2183; WAN024D85_at; Start 226; Stop 250
ttccgctcacgctatggaatcccaa

SEQ ID NO: 147350 - DNA, 25 bp, Artificial
  probe
  misc_feature (1)..(25): SEQ ID NO: 2183; WAN024D85_at; Start 169; Stop 193
gctcacatttacttcatcaatagtg

SEQ ID NO: 147351 - DNA, 25 bp, Artificial
  probe
  misc_feature (1)..(25): SEQ ID NO: 2183; WAN024D85_at; Start 138; Stop 162
tacattgtcaggtgtcgtagctgaa

SEQ ID NO: 147352 - DNA, 25 bp, Artificial
  probe
  misc_feature (1)..(25): SEQ ID NO: 2183; WAN024D85_at; Start 14; Stop 38
tagataacatcaaagaccttgaagt

SEQ ID NO: 147353 - DNA, 25 bp, Artificial
  probe
  misc_feature (1)..(25): SEQ ID NO: 2183; WAN024D85_at; Start 219; Stop 243
gcaagcattccgctcacgctatgga

SEQ ID NO: 147354 - DNA, 25 bp, Artificial
  probe
  misc_feature (1)..(25): SEQ ID NO: 2183; WAN024D85_at; Start 146; Stop 170
caggtgtcgtagctgaaaccaaagc

SEQ ID NO: 147355 - DNA, 25 bp, Artificial
  probe
  misc_feature (1)..(25): SEQ ID NO: 2183; WAN024D85_at; Start 259; Stop 283
ggttttgttcatattacagatggac

SEQ ID NO: 147356 - DNA, 25 bp, Artificial
  probe
  misc_feature (1)..(25): SEQ ID NO: 2183; WAN024D85_at; Start 307; Stop 331
tcaatgtcagcacaagaaatcaaag

SEQ ID NO: 147357 - DNA, 25 bp, Artificial
  probe
  misc_feature (1)..(25): SEQ ID NO: 2183; WAN024D85_at; Start 30; Stop 54
ccttgaagtcactacagttgtgcgt

SEQ ID NO: 147358 - DNA, 25 bp, Artificial
  probe
  misc_feature (1)..(25): SEQ ID NO: 2183; WAN024D85_at; Start 272; Stop 296
ttacagatggacaaatcaacgtccg

SEQ ID NO: 147359 - DNA, 25 bp, Artificial
  probe
  misc_feature (1)..(25): SEQ ID NO: 2183; WAN024D85_at; Start 299; Stop 323
gcgactcttcaatgtcagcacaaga

SEQ ID NO: 147360 - DNA, 25 bp, Artificial
  probe
  misc_feature (1)..(25): SEQ ID NO: 2183; WAN024D85_at; Start 150; Stop 174
tgtcgtagctgaaaccaaagctcac

SEQ ID NO: 147361 - DNA, 25 bp, Artificial
  probe
  misc_feature (1)..(25): SEQ ID NO: 6702; WAN024D86_at; Start 363; Stop 387
tagaactgctcttagcacgctggtg

SEQ ID NO: 147362 - DNA, 25 bp, Artificial
  probe
  misc_feature (1)..(25): SEQ ID NO: 6702; WAN024D86_at; Start 124; Stop 148
aatcactggcgaattttccaaaagg

SEQ ID NO: 147363 - DNA, 25 bp, Artificial
  probe
  misc_feature (1)..(25): SEQ ID NO: 6702; WAN024D86_at; Start 29; Stop 53
tatcatccagcaccctaagccgtga

SEQ ID NO: 147364 - DNA, 25 bp, Artificial
  probe
  misc_feature (1)..(25): SEQ ID NO: 6702; WAN024D86_at; Start 393; Stop 417
cagaaaatacgtgacaaatgccatc

SEQ ID NO: 147365 - DNA, 25 bp, Artificial
  probe
  misc_feature (1)..(25): SEQ ID NO: 6702; WAN024D86_at; Start 212; Stop 236
cagaaatcgtcaataaaaccttagc

SEQ ID NO: 147366 - DNA, 25 bp, Artificial
  probe
  misc_feature (1)..(25): SEQ ID NO: 6702; WAN024D86_at; Start 485; Stop 509
catgtaggttatgtttttcttcaaa

SEQ ID NO: 147367 - DNA, 25 bp, Artificial
  probe
  misc_feature (1)..(25): SEQ ID NO: 6702; WAN024D86_at; Start 242; Stop 266
cagatgagctccactattatgacga

SEQ ID NO: 147368 - DNA, 25 bp, Artificial
  probe
  misc_feature (1)..(25): SEQ ID NO: 6702; WAN024D86_at; Start 197; Stop 221
agacactgacacctccagaaatcgt

SEQ ID NO: 147369 - DNA, 25 bp, Artificial
  probe
  misc_feature (1)..(25): SEQ ID NO: 6702; WAN024D86_at; Start 94; Stop 118
aagcaatcactttcctatcgcgcca

SEQ ID NO: 147370 - DNA, 25 bp, Artificial
  probe
  misc_feature (1)..(25): SEQ ID NO: 6702; WAN024D86_at; Start 225; Stop 249
taaaaccttagctttctcagatgag

SEQ ID NO: 147371 - DNA, 25 bp, Artificial
  probe
  misc_feature (1)..(25): SEQ ID NO: 6702; WAN024D86_at; Start 334; Stop 358
gaggcttttccccaactcaatcaag

SEQ ID NO: 147372 - DNA, 25 bp, Artificial
  probe
  misc_feature (1)..(25): SEQ ID NO: 6702; WAN024D86_at; Start 275; Stop 299
agctcctgcttttccacctgcaaga

SEQ ID NO: 147373 - DNA, 25 bp, Artificial
  probe
  misc_feature (1)..(25): SEQ ID NO: 6702; WAN024D86_at; Start 62; Stop 86
caaccagaattgtcatcatgaagaa

SEQ ID NO: 147374 - DNA, 25 bp, Artificial
  probe
  misc_feature (1)..(25): SEQ ID NO: 6702; WAN024D86_at; Start 165; Stop 189
tgataaggccttctactcaagaact

SEQ ID NO: 147375 - DNA, 25 bp, Artificial
  probe
  misc_feature (1)..(25): SEQ ID NO: 6702; WAN024D86_at; Start 108; Stop 132
ctatcgcgccatgaaaaatcactgg

SEQ ID NO: 147376 - DNA, 25 bp, Artificial
  probe
  misc_feature (1)..(25): SEQ ID NO: 6702; WAN024D86_at; Start 41; Stop 65
ccctaagccgtgagatgatgacaac

SEQ ID NO: 147377 - DNA, 25 bp, Artificial
  probe
  misc_feature (1)..(25): SEQ ID NO: 6702; WAN024D86_at; Start 154; Stop 178
cgaaaactgtctgataaggccttct

SEQ ID NO: 147378 - DNA, 25 bp, Artificial
  probe
  misc_feature (1)..(25): SEQ ID NO: 6702; WAN024D86_at; Start 405; Stop 429
gacaaatgccatccagatgccctat

SEQ ID NO: 147379 - DNA, 25 bp, Artificial
  probe
  misc_feature (1)..(25): SEQ ID NO: 6702; WAN024D86_at; Start 77; Stop 101
tcatgaagaattttgacaagcaatc

SEQ ID NO: 147380 - DNA, 25 bp, Artificial
  probe
  misc_feature (1)..(25): SEQ ID NO: 6702; WAN024D86_at; Start 378; Stop 402
cacgctggtgcgctacagaaaatac

SEQ ID NO: 147381 - DNA, 25 bp, Artificial
  probe
  misc_feature (1)..(25): SEQ ID NO: 6702; WAN024D86_at; Start 310; Stop 334
gaccatttctttgacttgttaactg

SEQ ID NO: 147382 - DNA, 25 bp, Artificial
  probe
  misc_feature (1)..(25): SEQ ID NO: 6702; WAN024D86_at; Start 437; Stop 461
ccaagctggaggcaatcaataaact

SEQ ID NO: 147383 - DNA, 25 bp, Artificial
  probe
  misc_feature (1)..(25): SEQ ID NO: 6702; WAN024D86_at; Start 350; Stop 374
tcaatcaagcctttagaactgctct

SEQ ID NO: 147384 - DNA, 25 bp, Artificial
  probe
  misc_feature (1)..(25): SEQ ID NO: 6702; WAN024D86_at; Start 49; Stop 73
cgtgagatgatgacaaccagaattg

SEQ ID NO: 147385 - DNA, 25 bp, Artificial
  probe
  misc_feature (1)..(25): SEQ ID NO: 6702; WAN024D86_at; Start 289; Stop 313
cacctgcaagaaaagaatgccgacc

SEQ ID NO: 147386 - DNA, 25 bp, Artificial
  probe
  misc_feature (1)..(25): SEQ ID NO: 6702; WAN024D86_at; Start 182; Stop 206
caagaacttttagacagacactgac

SEQ ID NO: 147387 - DNA, 25 bp, Artificial
  probe
  misc_feature (1)..(25): SEQ ID NO: 6702; WAN024D86_at; Start 140; Stop 164
tccaaaaggatagccgaaaactgtc

SEQ ID NO: 147388 - DNA, 25 bp, Artificial
  probe
  misc_feature (1)..(25): SEQ ID NO: 6702; WAN024D86_at; Start 321; Stop 345
tgacttgttaactgaggcttttccc

SEQ ID NO: 147389 - DNA, 25 bp, Artificial
  probe
  misc_feature (1)..(25): SEQ ID NO: 6702; WAN024D86_at; Start 447; Stop 471
ggcaatcaataaactcatcagcttt

SEQ ID NO: 147390 - DNA, 25 bp, Artificial
  probe
  misc_feature (1)..(25): SEQ ID NO: 6702; WAN024D86_at; Start 467; Stop 491
gctttcttcaaacccaaacatgtag

SEQ ID NO: 147391 - DNA, 25 bp, Artificial
  probe
  misc_feature (1)..(25): SEQ ID NO: 6702; WAN024D86_at; Start 18; Stop 42
gatagatttcatatcatccagcacc

SEQ ID NO: 147392 - DNA, 25 bp, Artificial
  probe
  misc_feature (1)..(25): SEQ ID NO: 6702; WAN024D86_at; Start 259; Stop 283
tatgacgatctttaccagctcctgc

SEQ ID NO: 147393 - DNA, 25 bp, Artificial
  probe
  misc_feature (1)..(25): SEQ ID NO: 6702; WAN024D86_at; Start 4; Stop 28
cacaaatcgtccttgatagatttca

SEQ ID NO: 147394 - DNA, 25 bp, Artificial
  probe
  misc_feature (1)..(25): SEQ ID NO: 6702; WAN024D86_at; Start 420; Stop 444
gatgccctattctaactccaagctg

SEQ ID NO: 147395 - DNA, 25 bp, Artificial
  probe
  misc_feature (1)..(25): SEQ ID NO: 1273; WAN024D87_at; Start 148; Stop 172
tatattggtgctgggacaaaccgta

SEQ ID NO: 147396 - DNA, 25 bp, Artificial
  probe
  misc_feature (1)..(25): SEQ ID NO: 1273; WAN024D87_at; Start 113; Stop 137
caaaccttgaattcggaacagctgg

SEQ ID NO: 147397 - DNA, 25 bp, Artificial
  probe
  misc_feature (1)..(25): SEQ ID NO: 1273; WAN024D87_at; Start 483; Stop 507
ggcaaatgcttccagctgatgctga

SEQ ID NO: 147398 - DNA, 25 bp, Artificial
  probe
  misc_feature (1)..(25): SEQ ID NO: 1273; WAN024D87_at; Start 380; Stop 404
tcttttgctgttcgtcatctcggag

SEQ ID NO: 147399 - DNA, 25 bp, Artificial
  probe
  misc_feature (1)..(25): SEQ ID NO: 1273; WAN024D87_at; Start 818; Stop 842
gttgcatcaccaaaccctgaaagtc

SEQ ID NO: 147400 - DNA, 25 bp, Artificial
  probe
  misc_feature (1)..(25): SEQ ID NO: 1273; WAN024D87_at; Start 310; Stop 334
tgcccaagtattagcggcccatggc

SEQ ID NO: 147401 - DNA, 25 bp, Artificial
  probe
  misc_feature (1)..(25): SEQ ID NO: 1273; WAN024D87_at; Start 934; Stop 958
tgaaattcgtcaagctgatggcagt

SEQ ID NO: 147402 - DNA, 25 bp, Artificial
  probe
  misc_feature (1)..(25): SEQ ID NO: 1273; WAN024D87_at; Start 526; Stop 550
tcgtgcgattgataacccatttgct

SEQ ID NO: 147403 - DNA, 25 bp, Artificial
  probe
  misc_feature (1)..(25): SEQ ID NO: 1273; WAN024D87_at; Start 897; Stop 921
tagtggcgactgaccctgatgctga

SEQ ID NO: 147404 - DNA, 25 bp, Artificial
  probe
  misc_feature (1)..(25): SEQ ID NO: 1273; WAN024D87_at; Start 188; Stop 212
tgcgtcaagcacacagaaggccttg

SEQ ID NO: 147405 - DNA, 25 bp, Artificial
  probe
  misc_feature (1)..(25): SEQ ID NO: 1273; WAN024D87_at; Start 1031; Stop 1055
gggacactcccaaagaatgctgcat

SEQ ID NO: 147406 - DNA, 25 bp, Artificial
  probe
  misc_feature (1)..(25): SEQ ID NO: 1273; WAN024D87_at; Start 256; Stop 280
ggttgctattgcctatgactcgcga

SEQ ID NO: 147407 - DNA, 25 bp, Artificial
  probe
  misc_feature (1)..(25): SEQ ID NO: 1273; WAN024D87_at; Start 467; Stop 491
tacggttctgatggtgggcaaatgc

SEQ ID NO: 147408 - DNA, 25 bp, Artificial
  probe
  misc_feature (1)..(25): SEQ ID NO: 1273; WAN024D87_at; Start 776; Stop 800
gttgtcgaagctcaagcaaaaccag

SEQ ID NO: 147409 - DNA, 25 bp, Artificial
  probe
  misc_feature (1)..(25): SEQ ID NO: 1273; WAN024D87_at; Start 1009; Stop 1033
tttagaagctcacaaacaagctggg

SEQ ID NO: 147410 - DNA, 25 bp, Artificial
  probe
  misc_feature (1)..(25): SEQ ID NO: 1273; WAN024D87_at; Start 174; Stop 198
taatatctatgtggtgcgtcaagca

SEQ ID NO: 147411 - DNA, 25 bp, Artificial
  probe
  misc_feature (1)..(25): SEQ ID NO: 1273; WAN024D87_at; Start 509; Stop 533
gctttaactgactatattcgtgcga

SEQ ID NO: 147412 - DNA, 25 bp, Artificial
  probe
  misc_feature (1)..(25): SEQ ID NO: 1273; WAN024D87_at; Start 272; Stop 296
gactcgcgacatttttcaccagaat

SEQ ID NO: 147413 - DNA, 25 bp, Artificial
  probe
  misc_feature (1)..(25): SEQ ID NO: 1273; WAN024D87_at; Start 662; Stop 686
gatttgattgaccaatacggtcgcg

SEQ ID NO: 147414 - DNA, 25 bp, Artificial
  probe
  misc_feature (1)..(25): SEQ ID NO: 1273; WAN024D87_at; Start 732; Stop 756
tagcacgtcgagctttagcacaagc

SEQ ID NO: 147415 - DNA, 25 bp, Artificial
  probe
  misc_feature (1)..(25): SEQ ID NO: 1273; WAN024D87_at; Start 82; Stop 106
gatgacaaaacaaaagaagacgcct

SEQ ID NO: 147416 - DNA, 25 bp, Artificial
  probe
  misc_feature (1)..(25): SEQ ID NO: 1273; WAN024D87_at; Start 979; Stop 1003
ccaaatcggtgctcttatcgccaaa

SEQ ID NO: 147417 - DNA, 25 bp, Artificial
  probe
  misc_feature (1)..(25): SEQ ID NO: 1273; WAN024D87_at; Start 870; Stop 894
tagggcgtcaagtcgatgctgatgt

SEQ ID NO: 147418 - DNA, 25 bp, Artificial
  probe
  misc_feature (1)..(25): SEQ ID NO: 1273; WAN024D87_at; Start 293; Stop 317
gaattcgcttttgaatctgcccaag

SEQ ID NO: 147419 - DNA, 25 bp, Artificial
  probe
  misc_feature (1)..(25): SEQ ID NO: 1273; WAN024D87_at; Start 600; Stop 624
taattggtgaaactctcgatgctgc

SEQ ID NO: 147420 - DNA, 25 bp, Artificial
  probe
  misc_feature (1)..(25): SEQ ID NO: 1273; WAN024D87_at; Start 615; Stop 639
tcgatgctgcctaccttgaagaggt

SEQ ID NO: 147421 - DNA, 25 bp, Artificial
  probe
  misc_feature (1)..(25): SEQ ID NO: 1273; WAN024D87_at; Start 713; Stop 737
catggtactggagaaatgctagcac

SEQ ID NO: 147422 - DNA, 25 bp, Artificial
  probe
  misc_feature (1)..(25): SEQ ID NO: 1273; WAN024D87_at; Start 750; Stop 774
cacaagctggtttcgaatctgttca

SEQ ID NO: 147423 - DNA, 25 bp, Artificial
  probe
  misc_feature (1)..(25): SEQ ID NO: 1273; WAN024D87_at; Start 842; Stop 866
caagccgcctttgccttagctgaag

SEQ ID NO: 147424 - DNA, 25 bp, Artificial
  probe
  misc_feature (1)..(25): SEQ ID NO: 1273; WAN024D87_at; Start 22; Stop 46
caaaaatggctaaatgtccctgatc

SEQ ID NO: 147425 - DNA, 25 bp, Artificial
  probe
  misc_feature (1)..(25): SEQ ID NO: 1273; WAN024D87_at; Start 344; Stop 368
tatgtttttgaaagcctacgcccta

SEQ ID NO: 147426 - DNA, 25 bp, Artificial
  probe
  misc_feature (1)..(25): SEQ ID NO: 1273; WAN024D87_at; Start 677; Stop 701
tacggtcgcgatatgcaaattgtct

SEQ ID NO: 147427 - DNA, 25 bp, Artificial
  probe
  misc_feature (1)..(25): SEQ ID NO: 1273; WAN024D87_at; Start 412; Stop 436
tggtattatggtaaccgccagtcat

SEQ ID NO: 147428 - DNA, 25 bp, Artificial
  probe
  misc_feature (1)..(25): SEQ ID NO: 1273; WAN024D87_at; Start 855; Stop 879
ccttagctgaagaactagggcgtca

SEQ ID NO: 147429 - DNA, 25 bp, Artificial
  probe
  misc_feature (1)..(25): SEQ ID NO: 5680; WAN024D88_at; Start 60; Stop 84
aattaagggattttttgaagcagag

SEQ ID NO: 147430 - DNA, 25 bp, Artificial
  probe
  misc_feature (1)..(25): SEQ ID NO: 5680; WAN024D88_at; Start 208; Stop 232
cggaagatgctaaaaaacaaggcga

SEQ ID NO: 147431 - DNA, 25 bp, Artificial
  probe
  misc_feature (1)..(25): SEQ ID NO: 5680; WAN024D88_at; Start 163; Stop 187
caccagagcaacaaaaactccatga

SEQ ID NO: 147432 - DNA, 25 bp, Artificial
  probe
  misc_feature (1)..(25): SEQ ID NO: 5680; WAN024D88_at; Start 32; Stop 56
gtttgaatgttgaacttgcgcacca

SEQ ID NO: 147433 - DNA, 25 bp, Artificial
  probe
  misc_feature (1)..(25): SEQ ID NO: 5680; WAN024D88_at; Start 80; Stop 104
cagagtttaaaaatcgtattaatgg

SEQ ID NO: 147434 - DNA, 25 bp, Artificial
  probe
  misc_feature (1)..(25): SEQ ID NO: 5680; WAN024D88_at; Start 185; Stop 209
tgatcaatttgaagcagaagcaacg

SEQ ID NO: 147435 - DNA, 25 bp, Artificial
  probe
  misc_feature (1)..(25): SEQ ID NO: 5680; WAN024D88_at; Start 28; Stop 52
aaaggtttgaatgttgaacttgcgc

SEQ ID NO: 147436 - DNA, 25 bp, Artificial
  probe
  misc_feature (1)..(25): SEQ ID NO: 5680; WAN024D88_at; Start 152; Stop 176
aaaaaactatacaccagagcaacaa

SEQ ID NO: 147437 - DNA, 25 bp, Artificial
  probe
  misc_feature (1)..(25): SEQ ID NO: 5680; WAN024D88_at; Start 189; Stop 213
caatttgaagcagaagcaacggaag

SEQ ID NO: 147438 - DNA, 25 bp, Artificial
  probe
  misc_feature (1)..(25): SEQ ID NO: 5680; WAN024D88_at; Start 73; Stop 97
tttgaagcagagtttaaaaatcgta

SEQ ID NO: 147439 - DNA, 25 bp, Artificial
  probe
  misc_feature (1)..(25): SEQ ID NO: 5680; WAN024D88_at; Start 161; Stop 185
tacaccagagcaacaaaaactccat

SEQ ID NO: 147440 - DNA, 25 bp, Artificial
  probe
  misc_feature (1)..(25): SEQ ID NO: 5680; WAN024D88_at; Start 36; Stop 60
gaatgttgaacttgcgcaccaacaa

SEQ ID NO: 147441 - DNA, 25 bp, Artificial
  probe
  misc_feature (1)..(25): SEQ ID NO: 5680; WAN024D88_at; Start 193; Stop 217
ttgaagcagaagcaacggaagatgc

SEQ ID NO: 147442 - DNA, 25 bp, Artificial
  probe
  misc_feature (1)..(25): SEQ ID NO: 5680; WAN024D88_at; Start 43; Stop 67
gaacttgcgcaccaacaaattaagg

SEQ ID NO: 147443 - DNA, 25 bp, Artificial
  probe
  misc_feature (1)..(25): SEQ ID NO: 5680; WAN024D88_at; Start 159; Stop 183
tatacaccagagcaacaaaaactcc

SEQ ID NO: 147444 - DNA, 25 bp, Artificial
  probe
  misc_feature (1)..(25): SEQ ID NO: 5680; WAN024D88_at; Start 181; Stop 205
tccatgatcaatttgaagcagaagc

SEQ ID NO: 147445 - DNA, 25 bp, Artificial
  probe
  misc_feature (1)..(25): SEQ ID NO: 5680; WAN024D88_at; Start 210; Stop 234
gaagatgctaaaaaacaaggcgata

SEQ ID NO: 147446 - DNA, 25 bp, Artificial
  probe
  misc_feature (1)..(25): SEQ ID NO: 5680; WAN024D88_at; Start 205; Stop 229
caacggaagatgctaaaaaacaagg

SEQ ID NO: 147447 - DNA, 25 bp, Artificial
  probe
  misc_feature (1)..(25): SEQ ID NO: 5680; WAN024D88_at; Start 129; Stop 153
tagtacattaaatcgtgtaaataaa

SEQ ID NO: 147448 - DNA, 25 bp, Artificial
  probe
  misc_feature (1)..(25): SEQ ID NO: 5680; WAN024D88_at; Start 48; Stop 72
tgcgcaccaacaaattaagggattt

SEQ ID NO: 147449 - DNA, 25 bp, Artificial
  probe
  misc_feature (1)..(25): SEQ ID NO: 5680; WAN024D88_at; Start 188; Stop 212
tcaatttgaagcagaagcaacggaa

SEQ ID NO: 147450 - DNA, 25 bp, Artificial
  probe
  misc_feature (1)..(25): SEQ ID NO: 5680; WAN024D88_at; Start 216; Stop 240
gctaaaaaacaaggcgatattgtgt

SEQ ID NO: 147451 - DNA, 25 bp, Artificial
  probe
  misc_feature (1)..(25): SEQ ID NO: 5680; WAN024D88_at; Start 46; Stop 70
cttgcgcaccaacaaattaagggat

SEQ ID NO: 147452 - DNA, 25 bp, Artificial
  probe
  misc_feature (1)..(25): SEQ ID NO: 5680; WAN024D88_at; Start 121; Stop 145
ataaaaaatagtacattaaatcgtg

SEQ ID NO: 147453 - DNA, 25 bp, Artificial
  probe
  misc_feature (1)..(25): SEQ ID NO: 5680; WAN024D88_at; Start 219; Stop 243
aaaaaacaaggcgatattgtgttga

SEQ ID NO: 147454 - DNA, 25 bp, Artificial
  probe
  misc_feature (1)..(25): SEQ ID NO: 5680; WAN024D88_at; Start 213; Stop 237
gatgctaaaaaacaaggcgatattg

SEQ ID NO: 147455 - DNA, 25 bp, Artificial
  probe
  misc_feature (1)..(25): SEQ ID NO: 5680; WAN024D88_at; Start 1; Stop 25
ttgtatcagaatgaagacttgtata

SEQ ID NO: 147456 - DNA, 25 bp, Artificial
  probe
  misc_feature (1)..(25): SEQ ID NO: 5680; WAN024D88_at; Start 76; Stop 100
gaagcagagtttaaaaatcgtatta

SEQ ID NO: 147457 - DNA, 25 bp, Artificial
  probe
  misc_feature (1)..(25): SEQ ID NO: 5680; WAN024D88_at; Start 34; Stop 58
ttgaatgttgaacttgcgcaccaac

SEQ ID NO: 147458 - DNA, 25 bp, Artificial
  probe
  misc_feature (1)..(25): SEQ ID NO: 5680; WAN024D88_at; Start 195; Stop 219
gaagcagaagcaacggaagatgcta

SEQ ID NO: 147459 - DNA, 25 bp, Artificial
  probe
  misc_feature (1)..(25): SEQ ID NO: 5680; WAN024D88_at; Start 198; Stop 222
gcagaagcaacggaagatgctaaaa

SEQ ID NO: 147460 - DNA, 25 bp, Artificial
  probe
  misc_feature (1)..(25): SEQ ID NO: 5680; WAN024D88_at; Start 175; Stop 199
aaaaactccatgatcaatttgaagc

SEQ ID NO: 147461 - DNA, 25 bp, Artificial
  probe
  misc_feature (1)..(25): SEQ ID NO: 5680; WAN024D88_at; Start 166; Stop 190
cagagcaacaaaaactccatgatca

SEQ ID NO: 147462 - DNA, 25 bp, Artificial
  probe
  misc_feature (1)..(25): SEQ ID NO: 5680; WAN024D88_at; Start 170; Stop 194
gcaacaaaaactccatgatcaattt

SEQ ID NO: 147463 - DNA, 25 bp, Artificial
  probe
  misc_feature (1)..(25): SEQ ID NO: 705; WAN024D89_at; Start 362; Stop 386
gaactcctggccgtatctttgaact

SEQ ID NO: 147464 - DNA, 25 bp, Artificial
  probe
  misc_feature (1)..(25): SEQ ID NO: 705; WAN024D89_at; Start 924; Stop 948
tagcgaaacctacacacaccgtgct

SEQ ID NO: 147465 - DNA, 25 bp, Artificial
  probe
  misc_feature (1)..(25): SEQ ID NO: 705; WAN024D89_at; Start 255; Stop 279
taaaacgtgggcagaagctatcgga

SEQ ID NO: 147466 - DNA, 25 bp, Artificial
  probe
  misc_feature (1)..(25): SEQ ID NO: 705; WAN024D89_at; Start 665; Stop 689
aactggctcatgtagaggatttccg

SEQ ID NO: 147467 - DNA, 25 bp, Artificial
  probe
  misc_feature (1)..(25): SEQ ID NO: 705; WAN024D89_at; Start 1023; Stop 1047
taaaaagtttgcaagtatccgagaa

SEQ ID NO: 147468 - DNA, 25 bp, Artificial
  probe
  misc_feature (1)..(25): SEQ ID NO: 705; WAN024D89_at; Start 682; Stop 706
gatttccgtggtctagtcttcttca

SEQ ID NO: 147469 - DNA, 25 bp, Artificial
  probe
  misc_feature (1)..(25): SEQ ID NO: 705; WAN024D89_at; Start 445; Stop 469
gaccaattactagatgattctcaga

SEQ ID NO: 147470 - DNA, 25 bp, Artificial
  probe
  misc_feature (1)..(25): SEQ ID NO: 705; WAN024D89_at; Start 992; Stop 1016
tcgtcactcatccagaagaaatcaa

SEQ ID NO: 147471 - DNA, 25 bp, Artificial
  probe
  misc_feature (1)..(25): SEQ ID NO: 705; WAN024D89_at; Start 132; Stop 156
cggaactggtaagaccctagcgtat

SEQ ID NO: 147472 - DNA, 25 bp, Artificial
  probe
  misc_feature (1)..(25): SEQ ID NO: 705; WAN024D89_at; Start 152; Stop 176
cgtatctcctaccaagtcttctcag

SEQ ID NO: 147473 - DNA, 25 bp, Artificial
  probe
  misc_feature (1)..(25): SEQ ID NO: 705; WAN024D89_at; Start 296; Stop 320
tcctttcaggttcaagtcagaaacg

SEQ ID NO: 147474 - DNA, 25 bp, Artificial
  probe
  misc_feature (1)..(25): SEQ ID NO: 705; WAN024D89_at; Start 725; Stop 749
ggaatgccgaggaaaaactacagta

SEQ ID NO: 147475 - DNA, 25 bp, Artificial
  probe
  misc_feature (1)..(25): SEQ ID NO: 705; WAN024D89_at; Start 36; Stop 60
gagtgaccaactcggtttccaagaa

SEQ ID NO: 147476 - DNA, 25 bp, Artificial
  probe
  misc_feature (1)..(25): SEQ ID NO: 705; WAN024D89_at; Start 116; Stop 140
taggagtgagccaaaccggaactgg

SEQ ID NO: 147477 - DNA, 25 bp, Artificial
  probe
  misc_feature (1)..(25): SEQ ID NO: 705; WAN024D89_at; Start 628; Stop 652
caggtagaccaacgtcatcgagtgg

SEQ ID NO: 147478 - DNA, 25 bp, Artificial
  probe
  misc_feature (1)..(25): SEQ ID NO: 705; WAN024D89_at; Start 102; Stop 126
tggagaaaacctcctaggagtgagc

SEQ ID NO: 147479 - DNA, 25 bp, Artificial
  probe
  misc_feature (1)..(25): SEQ ID NO: 705; WAN024D89_at; Start 850; Stop 874
gcaactgaccttttggctcgtggaa

SEQ ID NO: 147480 - DNA, 25 bp, Artificial
  probe
  misc_feature (1)..(25): SEQ ID NO: 705; WAN024D89_at; Start 268; Stop 292
gaagctatcggattgactgctcaac

SEQ ID NO: 147481 - DNA, 25 bp, Artificial
  probe
  misc_feature (1)..(25): SEQ ID NO: 705; WAN024D89_at; Start 909; Stop 933
tgatattcctagagatagcgaaacc

SEQ ID NO: 147482 - DNA, 25 bp, Artificial
  probe
  misc_feature (1)..(25): SEQ ID NO: 705; WAN024D89_at; Start 19; Stop 43
actgaatggcaagaactgagtgacc

SEQ ID NO: 147483 - DNA, 25 bp, Artificial
  probe
  misc_feature (1)..(25): SEQ ID NO: 705; WAN024D89_at; Start 770; Stop 794
ccctcgctagtgatgttaatgttaa

SEQ ID NO: 147484 - DNA, 25 bp, Artificial
  probe
  misc_feature (1)..(25): SEQ ID NO: 705; WAN024D89_at; Start 511; Stop 535
caccaactggtctacatgagtgcca

SEQ ID NO: 147485 - DNA, 25 bp, Artificial
  probe
  misc_feature (1)..(25): SEQ ID NO: 705; WAN024D89_at; Start 2; Stop 26
tgaaaaccaaactaccgactgaatg

SEQ ID NO: 147486 - DNA, 25 bp, Artificial
  probe
  misc_feature (1)..(25): SEQ ID NO: 705; WAN024D89_at; Start 710; Stop 734
gcctgtcagaccttgggaatgccga

SEQ ID NO: 147487 - DNA, 25 bp, Artificial
  probe
  misc_feature (1)..(25): SEQ ID NO: 705; WAN024D89_at; Start 349; Stop 373
gaaattctgattggaactcctggcc

SEQ ID NO: 147488 - DNA, 25 bp, Artificial
  probe
  misc_feature (1)..(25): SEQ ID NO: 705; WAN024D89_at; Start 523; Stop 547
tacatgagtgccacgaccaagtttg

SEQ ID NO: 147489 - DNA, 25 bp, Artificial
  probe
  misc_feature (1)..(25): SEQ ID NO: 705; WAN024D89_at; Start 552; Stop 576
agaaaagattgtgccgaatacacgc

SEQ ID NO: 147490 - DNA, 25 bp, Artificial
  probe
  misc_feature (1)..(25): SEQ ID NO: 705; WAN024D89_at; Start 883; Stop 907
gatagcctagaatgtgtcgtaaact

SEQ ID NO: 147491 - DNA, 25 bp, Artificial
  probe
  misc_feature (1)..(25): SEQ ID NO: 705; WAN024D89_at; Start 613; Stop 637
cagcatttctacatgcaggtagacc

SEQ ID NO: 147492 - DNA, 25 bp, Artificial
  probe
  misc_feature (1)..(25): SEQ ID NO: 705; WAN024D89_at; Start 754; Stop 778
gatatattggctgtttccctcgcta

SEQ ID NO: 147493 - DNA, 25 bp, Artificial
  probe
  misc_feature (1)..(25): SEQ ID NO: 705; WAN024D89_at; Start 868; Stop 892
cgtggaattgatatcgatagcctag

SEQ ID NO: 147494 - DNA, 25 bp, Artificial
  probe
  misc_feature (1)..(25): SEQ ID NO: 705; WAN024D89_at; Start 414; Stop 438
gaatgtggaaaccatcatcctggat

SEQ ID NO: 147495 - DNA, 25 bp, Artificial
  probe
  misc_feature (1)..(25): SEQ ID NO: 705; WAN024D89_at; Start 826; Stop 850
gataaccaactaaccctgcttcttg

SEQ ID NO: 147496 - DNA, 25 bp, Artificial
  probe
  misc_feature (1)..(25): SEQ ID NO: 705; WAN024D89_at; Start 484; Stop 508
aaaatcactcactacgcacctcgtg

SEQ ID NO: 147497 - DNA, 25 bp, Artificial
  probe
  misc_feature (1)..(25): SEQ ID NO: 2984; WAN024D8A_at; Start 298; Stop 322
ttgtcaagtcaaaatgatgccatga

SEQ ID NO: 147498 - DNA, 25 bp, Artificial
  probe
  misc_feature (1)..(25): SEQ ID NO: 2984; WAN024D8A_at; Start 443; Stop 467
taaagaatgccaaccaatcaaagac

SEQ ID NO: 147499 - DNA, 25 bp, Artificial
  probe
  misc_feature (1)..(25): SEQ ID NO: 2984; WAN024D8A_at; Start 254; Stop 278
cacgtattcaaccttatatgactga

SEQ ID NO: 147500 - DNA, 25 bp, Artificial
  probe
  misc_feature (1)..(25): SEQ ID NO: 2984; WAN024D8A_at; Start 544; Stop 568
gtttggaaatctgggttagatgatt

SEQ ID NO: 147501 - DNA, 25 bp, Artificial
  probe
  misc_feature (1)..(25): SEQ ID NO: 2984; WAN024D8A_at; Start 364; Stop 388
aaagctgatatctttgtcaatcaga

SEQ ID NO: 147502 - DNA, 25 bp, Artificial
  probe
  misc_feature (1)..(25): SEQ ID NO: 2984; WAN024D8A_at; Start 289; Stop 313
tctcaagaattgtcaagtcaaaatg

SEQ ID NO: 147503 - DNA, 25 bp, Artificial
  probe
  misc_feature (1)..(25): SEQ ID NO: 2984; WAN024D8A_at; Start 439; Stop 463
gatttaaagaatgccaaccaatcaa

SEQ ID NO: 147504 - DNA, 25 bp, Artificial
  probe
  misc_feature (1)..(25): SEQ ID NO: 2984; WAN024D8A_at; Start 299; Stop 323
tgtcaagtcaaaatgatgccatgaa

SEQ ID NO: 147505 - DNA, 25 bp, Artificial
  probe
  misc_feature (1)..(25): SEQ ID NO: 2984; WAN024D8A_at; Start 249; Stop 273
taatacacgtattcaaccttatatg

SEQ ID NO: 147506 - DNA, 25 bp, Artificial
  probe
  misc_feature (1)..(25): SEQ ID NO: 2984; WAN024D8A_at; Start 315; Stop 339
tgccatgaaccaagtgtataaggat

SEQ ID NO: 147507 - DNA, 25 bp, Artificial
  probe
  misc_feature (1)..(25): SEQ ID NO: 2984; WAN024D8A_at; Start 377; Stop 401
ttgtcaatcagactacgaatcaagc

SEQ ID NO: 147508 - DNA, 25 bp, Artificial
  probe
  misc_feature (1)..(25): SEQ ID NO: 2984; WAN024D8A_at; Start 302; Stop 326
caagtcaaaatgatgccatgaacca

SEQ ID NO: 147509 - DNA, 25 bp, Artificial
  probe
  misc_feature (1)..(25): SEQ ID NO: 2984; WAN024D8A_at; Start 312; Stop 336
tgatgccatgaaccaagtgtataag

SEQ ID NO: 147510 - DNA, 25 bp, Artificial
  probe
  misc_feature (1)..(25): SEQ ID NO: 2984; WAN024D8A_at; Start 361; Stop 385
gaaaaagctgatatctttgtcaatc

SEQ ID NO: 147511 - DNA, 25 bp, Artificial
  probe
  misc_feature (1)..(25): SEQ ID NO: 2984; WAN024D8A_at; Start 318; Stop 342
catgaaccaagtgtataaggattat

SEQ ID NO: 147512 - DNA, 25 bp, Artificial
  probe
  misc_feature (1)..(25): SEQ ID NO: 2984; WAN024D8A_at; Start 370; Stop 394
gatatctttgtcaatcagactacga

SEQ ID NO: 147513 - DNA, 25 bp, Artificial
  probe
  misc_feature (1)..(25): SEQ ID NO: 2984; WAN024D8A_at; Start 309; Stop 333
aaatgatgccatgaaccaagtgtat

SEQ ID NO: 147514 - DNA, 25 bp, Artificial
  probe
  misc_feature (1)..(25): SEQ ID NO: 2984; WAN024D8A_at; Start 367; Stop 391
gctgatatctttgtcaatcagacta

SEQ ID NO: 147515 - DNA, 25 bp, Artificial
  probe
  misc_feature (1)..(25): SEQ ID NO: 2984; WAN024D8A_at; Start 316; Stop 340
gccatgaaccaagtgtataaggatt

SEQ ID NO: 147516 - DNA, 25 bp, Artificial
  probe
  misc_feature (1)..(25): SEQ ID NO: 2984; WAN024D8A_at; Start 313; Stop 337
gatgccatgaaccaagtgtataagg

SEQ ID NO: 147517 - DNA, 25 bp, Artificial
  probe
  misc_feature (1)..(25): SEQ ID NO: 2984; WAN024D8A_at; Start 310; Stop 334
aatgatgccatgaaccaagtgtata

SEQ ID NO: 147518 - DNA, 25 bp, Artificial
  probe
  misc_feature (1)..(25): SEQ ID NO: 2984; WAN024D8A_at; Start 304; Stop 328
agtcaaaatgatgccatgaaccaag

SEQ ID NO: 147519 - DNA, 25 bp, Artificial
  probe
  misc_feature (1)..(25): SEQ ID NO: 2984; WAN024D8A_at; Start 374; Stop 398
tctttgtcaatcagactacgaatca

SEQ ID NO: 147520 - DNA, 25 bp, Artificial
  probe
  misc_feature (1)..(25): SEQ ID NO: 2984; WAN024D8A_at; Start 286; Stop 310
tattctcaagaattgtcaagtcaaa

SEQ ID NO: 147521 - DNA, 25 bp, Artificial
  probe
  misc_feature (1)..(25): SEQ ID NO: 2984; WAN024D8A_at; Start 441; Stop 465
tttaaagaatgccaaccaatcaaag

SEQ ID NO: 147522 - DNA, 25 bp, Artificial
  probe
  misc_feature (1)..(25): SEQ ID NO: 2984; WAN024D8A_at; Start 541; Stop 565
caggtttggaaatctgggttagatg

SEQ ID NO: 147523 - DNA, 25 bp, Artificial
  probe
  misc_feature (1)..(25): SEQ ID NO: 2984; WAN024D8A_at; Start 301; Stop 325
tcaagtcaaaatgatgccatgaacc

SEQ ID NO: 147524 - DNA, 25 bp, Artificial
  probe
  misc_feature (1)..(25): SEQ ID NO: 2984; WAN024D8A_at; Start 321; Stop 345
gaaccaagtgtataaggattatatt

SEQ ID NO: 147525 - DNA, 25 bp, Artificial
  probe
  misc_feature (1)..(25): SEQ ID NO: 2984; WAN024D8A_at; Start 257; Stop 281
gtattcaaccttatatgactgaatc

SEQ ID NO: 147526 - DNA, 25 bp, Artificial
  probe
  misc_feature (1)..(25): SEQ ID NO: 2984; WAN024D8A_at; Start 295; Stop 319
gaattgtcaagtcaaaatgatgcca

SEQ ID NO: 147527 - DNA, 25 bp, Artificial
  probe
  misc_feature (1)..(25): SEQ ID NO: 2984; WAN024D8A_at; Start 307; Stop 331
caaaatgatgccatgaaccaagtgt

SEQ ID NO: 147528 - DNA, 25 bp, Artificial
  probe
  misc_feature (1)..(25): SEQ ID NO: 2984; WAN024D8A_at; Start 283; Stop 307
gcttattctcaagaattgtcaagtc

SEQ ID NO: 147529 - DNA, 25 bp, Artificial
  probe
  misc_feature (1)..(25): SEQ ID NO: 2984; WAN024D8A_at; Start 306; Stop 330
tcaaaatgatgccatgaaccaagtg

SEQ ID NO: 147530 - DNA, 25 bp, Artificial
  probe
  misc_feature (1)..(25): SEQ ID NO: 2984; WAN024D8A_at; Start 372; Stop 396
tatctttgtcaatcagactacgaat

SEQ ID NO: 147531 - DNA, 25 bp, Artificial
  probe
  misc_feature (1)..(25): SEQ ID NO: 879; WAN024D8B_at; Start 760; Stop 784
gatggaaccttgactctcaacacga

SEQ ID NO: 147532 - DNA, 25 bp, Artificial
  probe
  misc_feature (1)..(25): SEQ ID NO: 879; WAN024D8B_at; Start 668; Stop 692
gagatggtatcctcttctacccaga

SEQ ID NO: 147533 - DNA, 25 bp, Artificial
  probe
  misc_feature (1)..(25): SEQ ID NO: 879; WAN024D8B_at; Start 723; Stop 747
catcacttccaatcttccttgcgag

SEQ ID NO: 147534 - DNA, 25 bp, Artificial
  probe
  misc_feature (1)..(25): SEQ ID NO: 879; WAN024D8B_at; Start 705; Stop 729
catcaaggctggaaaaaacatcact

SEQ ID NO: 147535 - DNA, 25 bp, Artificial
  probe
  misc_feature (1)..(25): SEQ ID NO: 879; WAN024D8B_at; Start 376; Stop 400
tgttttatctttgaagcagctcgta

SEQ ID NO: 147536 - DNA, 25 bp, Artificial
  probe
  misc_feature (1)..(25): SEQ ID NO: 879; WAN024D8B_at; Start 408; Stop 432
cgagaaagcctttactactatcaaa

SEQ ID NO: 147537 - DNA, 25 bp, Artificial
  probe
  misc_feature (1)..(25): SEQ ID NO: 879; WAN024D8B_at; Start 102; Stop 126
cagtggagaataccaactggtcgca

SEQ ID NO: 147538 - DNA, 25 bp, Artificial
  probe
  misc_feature (1)..(25): SEQ ID NO: 879; WAN024D8B_at; Start 539; Stop 563
accgttttgctggtggagccctcat

SEQ ID NO: 147539 - DNA, 25 bp, Artificial
  probe
  misc_feature (1)..(25): SEQ ID NO: 879; WAN024D8B_at; Start 618; Stop 642
tgacgcgacttaccatgctcaacag

SEQ ID NO: 147540 - DNA, 25 bp, Artificial
  probe
  misc_feature (1)..(25): SEQ ID NO: 879; WAN024D8B_at; Start 114; Stop 138
ccaactggtcgcaatctattctaga

SEQ ID NO: 147541 - DNA, 25 bp, Artificial
  probe
  misc_feature (1)..(25): SEQ ID NO: 879; WAN024D8B_at; Start 56; Stop 80
tcggaactggcgctatcagccatca

SEQ ID NO: 147542 - DNA, 25 bp, Artificial
  probe
  misc_feature (1)..(25): SEQ ID NO: 879; WAN024D8B_at; Start 137; Stop 161
gaaaactagaaactgcagcaacctt

SEQ ID NO: 147543 - DNA, 25 bp, Artificial
  probe
  misc_feature (1)..(25): SEQ ID NO: 879; WAN024D8B_at; Start 44; Stop 68
aattaggtgtcatcggaactggcgc

SEQ ID NO: 147544 - DNA, 25 bp, Artificial
  probe
  misc_feature (1)..(25): SEQ ID NO: 879; WAN024D8B_at; Start 888; Stop 912
tgcacacatgatccagcaaccagat

SEQ ID NO: 147545 - DNA, 25 bp, Artificial
  probe
  misc_feature (1)..(25): SEQ ID NO: 879; WAN024D8B_at; Start 910; Stop 934
gatctgaatctctaccaaacttggc

SEQ ID NO: 147546 - DNA, 25 bp, Artificial
  probe
  misc_feature (1)..(25): SEQ ID NO: 879; WAN024D8B_at; Start 776; Stop 800
tcaacacgattgagcatattcgctc

SEQ ID NO: 147547 - DNA, 25 bp, Artificial
  probe
  misc_feature (1)..(25): SEQ ID NO: 879; WAN024D8B_at; Start 814; Stop 838
gaccaccaaggaaatcaagtccagc

SEQ ID NO: 147548 - DNA, 25 bp, Artificial
  probe
  misc_feature (1)..(25): SEQ ID NO: 879; WAN024D8B_at; Start 272; Stop 296
caaaagctgccttgtctgctggtaa

SEQ ID NO: 147549 - DNA, 25 bp, Artificial
  probe
  misc_feature (1)..(25): SEQ ID NO: 879; WAN024D8B_at; Start 634; Stop 658
gctcaacagcttgacaatagcattg

SEQ ID NO: 147550 - DNA, 25 bp, Artificial
  probe
  misc_feature (1)..(25): SEQ ID NO: 879; WAN024D8B_at; Start 154; Stop 178
gcaacctttgcttctcgctatcaga

SEQ ID NO: 147551 - DNA, 25 bp, Artificial
  probe
  misc_feature (1)..(25): SEQ ID NO: 879; WAN024D8B_at; Start 744; Stop 768
cgagatttatacaacagatggaacc

SEQ ID NO: 147552 - DNA, 25 bp, Artificial
  probe
  misc_feature (1)..(25): SEQ ID NO: 879; WAN024D8B_at; Start 691; Stop 715
gactatcaagttcacatcaaggctg

SEQ ID NO: 147553 - DNA, 25 bp, Artificial
  probe
  misc_feature (1)..(25): SEQ ID NO: 879; WAN024D8B_at; Start 873; Stop 897
ggaagtcgctgcatttgcacacatg

SEQ ID NO: 147554 - DNA, 25 bp, Artificial
  probe
  misc_feature (1)..(25): SEQ ID NO: 879; WAN024D8B_at; Start 226; Stop 250
gatttagtctatatcgccagtccaa

SEQ ID NO: 147555 - DNA, 25 bp, Artificial
  probe
  misc_feature (1)..(25): SEQ ID NO: 879; WAN024D8B_at; Start 940; Stop 964
gatgcaggctctgttcatgagctac

SEQ ID NO: 147556 - DNA, 25 bp, Artificial
  probe
  misc_feature (1)..(25): SEQ ID NO: 879; WAN024D8B_at; Start 86; Stop 110
tagaagcagcccataccagtggaga

SEQ ID NO: 147557 - DNA, 25 bp, Artificial
  probe
  misc_feature (1)..(25): SEQ ID NO: 879; WAN024D8B_at; Start 958; Stop 982
gagctactatataccatgcgccaga

SEQ ID NO: 147558 - DNA, 25 bp, Artificial
  probe
  misc_feature (1)..(25): SEQ ID NO: 879; WAN024D8B_at; Start 828; Stop 852
tcaagtccagcttcctatccaacag

SEQ ID NO: 147559 - DNA, 25 bp, Artificial
  probe
  misc_feature (1)..(25): SEQ ID NO: 879; WAN024D8B_at; Start 248; Stop 272
caaactccttacattttgctcaggc

SEQ ID NO: 147560 - DNA, 25 bp, Artificial
  probe
  misc_feature (1)..(25): SEQ ID NO: 879; WAN024D8B_at; Start 799; Stop 823
tcagctatttttaccgaccaccaag

SEQ ID NO: 147561 - DNA, 25 bp, Artificial
  probe
  misc_feature (1)..(25): SEQ ID NO: 879; WAN024D8B_at; Start 858; Stop 882
tcatacgatgactgaggaagtcgct

SEQ ID NO: 147562 - DNA, 25 bp, Artificial
  probe
  misc_feature (1)..(25): SEQ ID NO: 879; WAN024D8B_at; Start 572; Stop 596
ggatttatcccctctatgctgctgt

SEQ ID NO: 147563 - DNA, 25 bp, Artificial
  probe
  misc_feature (1)..(25): SEQ ID NO: 879; WAN024D8B_at; Start 657; Stop 681
tgacctaaatggagatggtatcctc

SEQ ID NO: 147564 - DNA, 25 bp, Artificial
  probe
  misc_feature (1)..(25): SEQ ID NO: 879; WAN024D8B_at; Start 71; Stop 95
tcagccatcatttcatagaagcagc

SEQ ID NO: 147565 - DNA, 25 bp, Artificial
  probe
  misc_feature (1)..(25): SEQ ID NO: 3856; WAN024D8C_at; Start 62; Stop 86
catttcgtgattttgtagtaagaaa

SEQ ID NO: 147566 - DNA, 25 bp, Artificial
  probe
  misc_feature (1)..(25): SEQ ID NO: 3856; WAN024D8C_at; Start 176; Stop 200
atgctgctacacagattattaggga

SEQ ID NO: 147567 - DNA, 25 bp, Artificial
  probe
  misc_feature (1)..(25): SEQ ID NO: 3856; WAN024D8C_at; Start 85; Stop 109
aatactgaaaagttgaaagattatc

SEQ ID NO: 147568 - DNA, 25 bp, Artificial
  probe
  misc_feature (1)..(25): SEQ ID NO: 3856; WAN024D8C_at; Start 123; Stop 147
gaatgaacttgcagtctgtgattta

SEQ ID NO: 147569 - DNA, 25 bp, Artificial
  probe
  misc_feature (1)..(25): SEQ ID NO: 3856; WAN024D8C_at; Start 13; Stop 37
agagccgtggacaacctttatcttg

SEQ ID NO: 147570 - DNA, 25 bp, Artificial
  probe
  misc_feature (1)..(25): SEQ ID NO: 3856; WAN024D8C_at; Start 27; Stop 51
cctttatcttgtaaaagacgatagt

SEQ ID NO: 147571 - DNA, 25 bp, Artificial
  probe
  misc_feature (1)..(25): SEQ ID NO: 3856; WAN024D8C_at; Start 178; Stop 202
gctgctacacagattattagggaaa

SEQ ID NO: 147572 - DNA, 25 bp, Artificial
  probe
  misc_feature (1)..(25): SEQ ID NO: 3856; WAN024D8C_at; Start 24; Stop 48
caacctttatcttgtaaaagacgat

SEQ ID NO: 147573 - DNA, 25 bp, Artificial
  probe
  misc_feature (1)..(25): SEQ ID NO: 3856; WAN024D8C_at; Start 16; Stop 40
gccgtggacaacctttatcttgtaa

SEQ ID NO: 147574 - DNA, 25 bp, Artificial
  probe
  misc_feature (1)..(25): SEQ ID NO: 3856; WAN024D8C_at; Start 33; Stop 57
tcttgtaaaagacgatagtcaacta

SEQ ID NO: 147575 - DNA, 25 bp, Artificial
  probe
  misc_feature (1)..(25): SEQ ID NO: 3856; WAN024D8C_at; Start 20; Stop 44
tggacaacctttatcttgtaaaaga

SEQ ID NO: 147576 - DNA, 25 bp, Artificial
  probe
  misc_feature (1)..(25): SEQ ID NO: 3856; WAN024D8C_at; Start 80; Stop 104
taagaaatactgaaaagttgaaaga

SEQ ID NO: 147577 - DNA, 25 bp, Artificial
  probe
  misc_feature (1)..(25): SEQ ID NO: 3856; WAN024D8C_at; Start 90; Stop 114
tgaaaagttgaaagattatcaatct

SEQ ID NO: 147578 - DNA, 25 bp, Artificial
  probe
  misc_feature (1)..(25): SEQ ID NO: 3856; WAN024D8C_at; Start 114; Stop 138
ttttttaaagaatgaacttgcagtc

SEQ ID NO: 147579 - DNA, 25 bp, Artificial
  probe
  misc_feature (1)..(25): SEQ ID NO: 3856; WAN024D8C_at; Start 116; Stop 140
ttttaaagaatgaacttgcagtctg

SEQ ID NO: 147580 - DNA, 25 bp, Artificial
  probe
  misc_feature (1)..(25): SEQ ID NO: 3856; WAN024D8C_at; Start 67; Stop 91
cgtgattttgtagtaagaaatactg

SEQ ID NO: 147581 - DNA, 25 bp, Artificial
  probe
  misc_feature (1)..(25): SEQ ID NO: 3856; WAN024D8C_at; Start 126; Stop 150
tgaacttgcagtctgtgatttaccg

SEQ ID NO: 147582 - DNA, 25 bp, Artificial
  probe
  misc_feature (1)..(25): SEQ ID NO: 3856; WAN024D8C_at; Start 12; Stop 36
gagagccgtggacaacctttatctt

SEQ ID NO: 147583 - DNA, 25 bp, Artificial
  probe
  misc_feature (1)..(25): SEQ ID NO: 3856; WAN024D8C_at; Start 128; Stop 152
aacttgcagtctgtgatttaccgca

SEQ ID NO: 147584 - DNA, 25 bp, Artificial
  probe
  misc_feature (1)..(25): SEQ ID NO: 3856; WAN024D8C_at; Start 9; Stop 33
aaggagagccgtggacaacctttat

SEQ ID NO: 147585 - DNA, 25 bp, Artificial
  probe
  misc_feature (1)..(25): SEQ ID NO: 3856; WAN024D8C_at; Start 127; Stop 151
gaacttgcagtctgtgatttaccgc

SEQ ID NO: 147586 - DNA, 25 bp, Artificial
  probe
  misc_feature (1)..(25): SEQ ID NO: 3856; WAN024D8C_at; Start 174; Stop 198
taatgctgctacacagattattagg

SEQ ID NO: 147587 - DNA, 25 bp, Artificial
  probe
  misc_feature (1)..(25): SEQ ID NO: 3856; WAN024D8C_at; Start 31; Stop 55
tatcttgtaaaagacgatagtcaac

SEQ ID NO: 147588 - DNA, 25 bp, Artificial
  probe
  misc_feature (1)..(25): SEQ ID NO: 3856; WAN024D8C_at; Start 3; Stop 27
gaaagaaaggagagccgtggacaac

SEQ ID NO: 147589 - DNA, 25 bp, Artificial
  probe
  misc_feature (1)..(25): SEQ ID NO: 3856; WAN024D8C_at; Start 36; Stop 60
tgtaaaagacgatagtcaactagct

SEQ ID NO: 147590 - DNA, 25 bp, Artificial
  probe
  misc_feature (1)..(25): SEQ ID NO: 3856; WAN024D8C_at; Start 2; Stop 26
tgaaagaaaggagagccgtggacaa

SEQ ID NO: 147591 - DNA, 25 bp, Artificial
  probe
  misc_feature (1)..(25): SEQ ID NO: 3856; WAN024D8C_at; Start 11; Stop 35
ggagagccgtggacaacctttatct

SEQ ID NO: 147592 - DNA, 25 bp, Artificial
  probe
  misc_feature (1)..(25): SEQ ID NO: 3856; WAN024D8C_at; Start 112; Stop 136
tcttttttaaagaatgaacttgcag

SEQ ID NO: 147593 - DNA, 25 bp, Artificial
  probe
  misc_feature (1)..(25): SEQ ID NO: 3856; WAN024D8C_at; Start 14; Stop 38
gagccgtggacaacctttatcttgt

SEQ ID NO: 147594 - DNA, 25 bp, Artificial
  probe
  misc_feature (1)..(25): SEQ ID NO: 3856; WAN024D8C_at; Start 131; Stop 155
ttgcagtctgtgatttaccgcaagc

SEQ ID NO: 147595 - DNA, 25 bp, Artificial
  probe
  misc_feature (1)..(25): SEQ ID NO: 3856; WAN024D8C_at; Start 119; Stop 143
taaagaatgaacttgcagtctgtga

SEQ ID NO: 147596 - DNA, 25 bp, Artificial
  probe
  misc_feature (1)..(25): SEQ ID NO: 3856; WAN024D8C_at; Start 75; Stop 99
tgtagtaagaaatactgaaaagttg

SEQ ID NO: 147597 - DNA, 25 bp, Artificial
  probe
  misc_feature (1)..(25): SEQ ID NO: 3856; WAN024D8C_at; Start 179; Stop 203
ctgctacacagattattagggaaag

SEQ ID NO: 147598 - DNA, 25 bp, Artificial
  probe
  misc_feature (1)..(25): SEQ ID NO: 3856; WAN024D8C_at; Start 121; Stop 145
aagaatgaacttgcagtctgtgatt

SEQ ID NO: 147599 - DNA, 25 bp, Artificial
  probe
  misc_feature (1)..(25): SEQ ID NO: 5067; WAN024D8D_at; Start 781; Stop 805
gatggcgaaatctggacgactcgac

SEQ ID NO: 147600 - DNA, 25 bp, Artificial
  probe
  misc_feature (1)..(25): SEQ ID NO: 5067; WAN024D8D_at; Start 51; Stop 75
ttcattagtggatgagcaagccgat

SEQ ID NO: 147601 - DNA, 25 bp, Artificial
  probe
  misc_feature (1)..(25): SEQ ID NO: 5067; WAN024D8D_at; Start 872; Stop 896
tcatcgataaagaaggccacctaag

SEQ ID NO: 147602 - DNA, 25 bp, Artificial
  probe
  misc_feature (1)..(25): SEQ ID NO: 5067; WAN024D8D_at; Start 221; Stop 245
cacttgggttagagcatagcctagc

SEQ ID NO: 147603 - DNA, 25 bp, Artificial
  probe
  misc_feature (1)..(25): SEQ ID NO: 5067; WAN024D8D_at; Start 114; Stop 138
tgaataccgcttcaacgccaatagt

SEQ ID NO: 147604 - DNA, 25 bp, Artificial
  probe
  misc_feature (1)..(25): SEQ ID NO: 5067; WAN024D8D_at; Start 709; Stop 733
tttgacagtcaaacaggatatcctg

SEQ ID NO: 147605 - DNA, 25 bp, Artificial
  probe
  misc_feature (1)..(25): SEQ ID NO: 5067; WAN024D8D_at; Start 795; Stop 819
gacgactcgactctttggagaaaga

SEQ ID NO: 147606 - DNA, 25 bp, Artificial
  probe
  misc_feature (1)..(25): SEQ ID NO: 5067; WAN024D8D_at; Start 454; Stop 478
tacagtgcggataaggttgcccaat

SEQ ID NO: 147607 - DNA, 25 bp, Artificial
  probe
  misc_feature (1)..(25): SEQ ID NO: 5067; WAN024D8D_at; Start 582; Stop 606
gattcaagacccagccaatcctagg

SEQ ID NO: 147608 - DNA, 25 bp, Artificial
  probe
  misc_feature (1)..(25): SEQ ID NO: 5067; WAN024D8D_at; Start 498; Stop 522
gacttctgccttgatcaatctggga

SEQ ID NO: 147609 - DNA, 25 bp, Artificial
  probe
  misc_feature (1)..(25): SEQ ID NO: 5067; WAN024D8D_at; Start 849; Stop 873
tttggagggcatcgaagtcatcctc

SEQ ID NO: 147610 - DNA, 25 bp, Artificial
  probe
  misc_feature (1)..(25): SEQ ID NO: 5067; WAN024D8D_at; Start 766; Stop 790
tctgataaatcagtcgatggcgaaa

SEQ ID NO: 147611 - DNA, 25 bp, Artificial
  probe
  misc_feature (1)..(25): SEQ ID NO: 5067; WAN024D8D_at; Start 11; Stop 35
gttcacattctgaacggctaatggg

SEQ ID NO: 147612 - DNA, 25 bp, Artificial
  probe
  misc_feature (1)..(25): SEQ ID NO: 5067; WAN024D8D_at; Start 423; Stop 447
gaagatcgatctaggttgtttagcc

SEQ ID NO: 147613 - DNA, 25 bp, Artificial
  probe
  misc_feature (1)..(25): SEQ ID NO: 5067; WAN024D8D_at; Start 199; Stop 223
ccagacctgtttgagctgatttcac

SEQ ID NO: 147614 - DNA, 25 bp, Artificial
  probe
  misc_feature (1)..(25): SEQ ID NO: 5067; WAN024D8D_at; Start 677; Stop 701
tgaccgtcgatggacaagattacca

SEQ ID NO: 147615 - DNA, 25 bp, Artificial
  probe
  misc_feature (1)..(25): SEQ ID NO: 5067; WAN024D8D_at; Start 565; Stop 589
aacccatggcaaatcgggattcaag

SEQ ID NO: 147616 - DNA, 25 bp, Artificial
  probe
  misc_feature (1)..(25): SEQ ID NO: 5067; WAN024D8D_at; Start 334; Stop 358
gaaattgaatcggtgctgcctctaa

SEQ ID NO: 147617 - DNA, 25 bp, Artificial
  probe
  misc_feature (1)..(25): SEQ ID NO: 5067; WAN024D8D_at; Start 741; Stop 765
ggaactagcgagtctaacaatcatc

SEQ ID NO: 147618 - DNA, 25 bp, Artificial
  probe
  misc_feature (1)..(25): SEQ ID NO: 5067; WAN024D8D_at; Start 513; Stop 537
caatctgggagggaatatcctgacc

SEQ ID NO: 147619 - DNA, 25 bp, Artificial
  probe
  misc_feature (1)..(25): SEQ ID NO: 5067; WAN024D8D_at; Start 814; Stop 838
gaaagacctgcttctatcctctggc

SEQ ID NO: 147620 - DNA, 25 bp, Artificial
  probe
  misc_feature (1)..(25): SEQ ID NO: 5067; WAN024D8D_at; Start 727; Stop 751
tatcctgttgaaacggaactagcga

SEQ ID NO: 147621 - DNA, 25 bp, Artificial
  probe
  misc_feature (1)..(25): SEQ ID NO: 5067; WAN024D8D_at; Start 252; Stop 276
tagccacctcaatatcagcattggt

SEQ ID NO: 147622 - DNA, 25 bp, Artificial
  probe
  misc_feature (1)..(25): SEQ ID NO: 5067; WAN024D8D_at; Start 886; Stop 910
ggccacctaagctgttcttcaggaa

SEQ ID NO: 147623 - DNA, 25 bp, Artificial
  probe
  misc_feature (1)..(25): SEQ ID NO: 5067; WAN024D8D_at; Start 278; Stop 302
ccttaattcaaacctggcgtatcgg

SEQ ID NO: 147624 - DNA, 25 bp, Artificial
  probe
  misc_feature (1)..(25): SEQ ID NO: 5067; WAN024D8D_at; Start 347; Stop 371
tgctgcctctaatcaatcctcatgg

SEQ ID NO: 147625 - DNA, 25 bp, Artificial
  probe
  misc_feature (1)..(25): SEQ ID NO: 5067; WAN024D8D_at; Start 318; Stop 342
ggtcgcccagcctcaagaaattgaa

SEQ ID NO: 147626 - DNA, 25 bp, Artificial
  probe
  misc_feature (1)..(25): SEQ ID NO: 5067; WAN024D8D_at; Start 439; Stop 463
tgtttagccaaaggatacagtgcgg

SEQ ID NO: 147627 - DNA, 25 bp, Artificial
  probe
  misc_feature (1)..(25): SEQ ID NO: 5067; WAN024D8D_at; Start 185; Stop 209
ccgtcacggttcatccagacctgtt

SEQ ID NO: 147628 - DNA, 25 bp, Artificial
  probe
  misc_feature (1)..(25): SEQ ID NO: 5067; WAN024D8D_at; Start 533; Stop 557
tgaccattggaaaaaatcaggcaag

SEQ ID NO: 147629 - DNA, 25 bp, Artificial
  probe
  misc_feature (1)..(25): SEQ ID NO: 5067; WAN024D8D_at; Start 658; Stop 682
ggcatttatgaacgtcacctgaccg

SEQ ID NO: 147630 - DNA, 25 bp, Artificial
  probe
  misc_feature (1)..(25): SEQ ID NO: 5067; WAN024D8D_at; Start 66; Stop 90
gcaagccgatatctttctccaaaaa

SEQ ID NO: 147631 - DNA, 25 bp, Artificial
  probe
  misc_feature (1)..(25): SEQ ID NO: 5067; WAN024D8D_at; Start 129; Stop 153
cgccaatagtcaagaatctgagttg

SEQ ID NO: 147632 - DNA, 25 bp, Artificial
  probe
  misc_feature (1)..(25): SEQ ID NO: 5067; WAN024D8D_at; Start 303; Stop 327
tttttcagatgccaaggtcgcccag

SEQ ID NO: 147633 - DNA, 25 bp, Artificial
  probe
  misc_feature (1)..(25): SEQ ID NO: 4882; WAN024D8E_at; Start 426; Stop 450
tcatactcaagaggaggtaatccaa

SEQ ID NO: 147634 - DNA, 25 bp, Artificial
  probe
  misc_feature (1)..(25): SEQ ID NO: 4882; WAN024D8E_at; Start 224; Stop 248
ttgctatcacaaccctcaagtctgt

SEQ ID NO: 147635 - DNA, 25 bp, Artificial
  probe
  misc_feature (1)..(25): SEQ ID NO: 4882; WAN024D8E_at; Start 82; Stop 106
tatgtcaatcaggtctgcgccccta

SEQ ID NO: 147636 - DNA, 25 bp, Artificial
  probe
  misc_feature (1)..(25): SEQ ID NO: 4882; WAN024D8E_at; Start 307; Stop 331
gaccaactctacgatgcttttgtgg

SEQ ID NO: 147637 - DNA, 25 bp, Artificial
  probe
  misc_feature (1)..(25): SEQ ID NO: 4882; WAN024D8E_at; Start 262; Stop 286
gaaatagcccagacacttaatactc

SEQ ID NO: 147638 - DNA, 25 bp, Artificial
  probe
  misc_feature (1)..(25): SEQ ID NO: 4882; WAN024D8E_at; Start 70; Stop 94
caggttttgctctatgtcaatcagg

SEQ ID NO: 147639 - DNA, 25 bp, Artificial
  probe
  misc_feature (1)..(25): SEQ ID NO: 4882; WAN024D8E_at; Start 400; Stop 424
tatcatcaaactctagacttaatcg

SEQ ID NO: 147640 - DNA, 25 bp, Artificial
  probe
  misc_feature (1)..(25): SEQ ID NO: 4882; WAN024D8E_at; Start 63; Stop 87
tctggaccaggttttgctctatgtc

SEQ ID NO: 147641 - DNA, 25 bp, Artificial
  probe
  misc_feature (1)..(25): SEQ ID NO: 4882; WAN024D8E_at; Start 136; Stop 160
gcatctatggtcaacaattatgtga

SEQ ID NO: 147642 - DNA, 25 bp, Artificial
  probe
  misc_feature (1)..(25): SEQ ID NO: 4882; WAN024D8E_at; Start 240; Stop 264
caagtctgtattttctattcaagaa

SEQ ID NO: 147643 - DNA, 25 bp, Artificial
  probe
  misc_feature (1)..(25): SEQ ID NO: 4882; WAN024D8E_at; Start 415; Stop 439
gacttaatcgatcatactcaagagg

SEQ ID NO: 147644 - DNA, 25 bp, Artificial
  probe
  misc_feature (1)..(25): SEQ ID NO: 4882; WAN024D8E_at; Start 202; Stop 226
cgccaacagattgcccgtttgattg

SEQ ID NO: 147645 - DNA, 25 bp, Artificial
  probe
  misc_feature (1)..(25): SEQ ID NO: 4882; WAN024D8E_at; Start 339; Stop 363
gaaccaaggaattgacccagctaac

SEQ ID NO: 147646 - DNA, 25 bp, Artificial
  probe
  misc_feature (1)..(25): SEQ ID NO: 4882; WAN024D8E_at; Start 327; Stop 351
tgtggactacatgaaccaaggaatt

SEQ ID NO: 147647 - DNA, 25 bp, Artificial
  probe
  misc_feature (1)..(25): SEQ ID NO: 4882; WAN024D8E_at; Start 194; Stop 218
aataccaacgccaacagattgcccg

SEQ ID NO: 147648 - DNA, 25 bp, Artificial
  probe
  misc_feature (1)..(25): SEQ ID NO: 4882; WAN024D8E_at; Start 360; Stop 384
taaccctattatccaaaccagctgc

SEQ ID NO: 147649 - DNA, 25 bp, Artificial
  probe
  misc_feature (1)..(25): SEQ ID NO: 4882; WAN024D8E_at; Start 313; Stop 337
ctctacgatgcttttgtggactaca

SEQ ID NO: 147650 - DNA, 25 bp, Artificial
  probe
  misc_feature (1)..(25): SEQ ID NO: 4882; WAN024D8E_at; Start 56; Stop 80
acctctatctggaccaggttttgct

SEQ ID NO: 147651 - DNA, 25 bp, Artificial
  probe
  misc_feature (1)..(25): SEQ ID NO: 4882; WAN024D8E_at; Start 97; Stop 121
tgcgcccctatctctcctaataaag

SEQ ID NO: 147652 - DNA, 25 bp, Artificial
  probe
  misc_feature (1)..(25): SEQ ID NO: 4882; WAN024D8E_at; Start 162; Stop 186
aaatggttacctgacaaagcctgac

SEQ ID NO: 147653 - DNA, 25 bp, Artificial
  probe
  misc_feature (1)..(25): SEQ ID NO: 4882; WAN024D8E_at; Start 366; Stop 390
tattatccaaaccagctgccaaacc

SEQ ID NO: 147654 - DNA, 25 bp, Artificial
  probe
  misc_feature (1)..(25): SEQ ID NO: 4882; WAN024D8E_at; Start 334; Stop 358
tacatgaaccaaggaattgacccag

SEQ ID NO: 147655 - DNA, 25 bp, Artificial
  probe
  misc_feature (1)..(25): SEQ ID NO: 4882; WAN024D8E_at; Start 77; Stop 101
tgctctatgtcaatcaggtctgcgc

SEQ ID NO: 147656 - DNA, 25 bp, Artificial
  probe
  misc_feature (1)..(25): SEQ ID NO: 4882; WAN024D8E_at; Start 127; Stop 151
ggcctaacagcatctatggtcaaca

SEQ ID NO: 147657 - DNA, 25 bp, Artificial
  probe
  misc_feature (1)..(25): SEQ ID NO: 4882; WAN024D8E_at; Start 346; Stop 370
ggaattgacccagctaaccctatta

SEQ ID NO: 147658 - DNA, 25 bp, Artificial
  probe
  misc_feature (1)..(25): SEQ ID NO: 4882; WAN024D8E_at; Start 210; Stop 234
gattgcccgtttgattgctatcaca

SEQ ID NO: 147659 - DNA, 25 bp, Artificial
  probe
  misc_feature (1)..(25): SEQ ID NO: 4882; WAN024D8E_at; Start 166; Stop 190
ggttacctgacaaagcctgacaaaa

SEQ ID NO: 147660 - DNA, 25 bp, Artificial
  probe
  misc_feature (1)..(25): SEQ ID NO: 4882; WAN024D8E_at; Start 278; Stop 302
ttaatactctacaaactcaagcaag

SEQ ID NO: 147661 - DNA, 25 bp, Artificial
  probe
  misc_feature (1)..(25): SEQ ID NO: 4882; WAN024D8E_at; Start 150; Stop 174
caattatgtgaaaaatggttacctg

SEQ ID NO: 147662 - DNA, 25 bp, Artificial
  probe
  misc_feature (1)..(25): SEQ ID NO: 4882; WAN024D8E_at; Start 289; Stop 313
caaactcaagcaagttcagaccaac

SEQ ID NO: 147663 - DNA, 25 bp, Artificial
  probe
  misc_feature (1)..(25): SEQ ID NO: 4882; WAN024D8E_at; Start 319; Stop 343
gatgcttttgtggactacatgaacc

SEQ ID NO: 147664 - DNA, 25 bp, Artificial
  probe
  misc_feature (1)..(25): SEQ ID NO: 4882; WAN024D8E_at; Start 298; Stop 322
gcaagttcagaccaactctacgatg

SEQ ID NO: 147665 - DNA, 25 bp, Artificial
  probe
  misc_feature (1)..(25): SEQ ID NO: 4882; WAN024D8E_at; Start 255; Stop 279
tattcaagaaatagcccagacactt

SEQ ID NO: 147666 - DNA, 25 bp, Artificial
  probe
  misc_feature (1)..(25): SEQ ID NO: 4882; WAN024D8E_at; Start 418; Stop 442
ttaatcgatcatactcaagaggagg

SEQ ID NO: 147667 - DNA, 25 bp, Artificial
  probe
  misc_feature (1)..(25): SEQ ID NO: 2168; WAN024D8F_at; Start 275; Stop 299
tctttcaccgtattgctgtggcagc

SEQ ID NO: 147668 - DNA, 25 bp, Artificial
  probe
  misc_feature (1)..(25): SEQ ID NO: 2168; WAN024D8F_at; Start 216; Stop 240
ggaggcctatgaagctatttatgag

SEQ ID NO: 147669 - DNA, 25 bp, Artificial
  probe
  misc_feature (1)..(25): SEQ ID NO: 2168; WAN024D8F_at; Start 356; Stop 380
ttgattatcttgattttcgctcaga

SEQ ID NO: 147670 - DNA, 25 bp, Artificial
  probe
  misc_feature (1)..(25): SEQ ID NO: 2168; WAN024D8F_at; Start 100; Stop 124
caaaatggctatccaaatgcagatg

SEQ ID NO: 147671 - DNA, 25 bp, Artificial
  probe
  misc_feature (1)..(25): SEQ ID NO: 2168; WAN024D8F_at; Start 231; Stop 255
tatttatgagggaaactggcaagct

SEQ ID NO: 147672 - DNA, 25 bp, Artificial
  probe
  misc_feature (1)..(25): SEQ ID NO: 2168; WAN024D8F_at; Start 28; Stop 52
gaagtagatgccatcatgcaggtga

SEQ ID NO: 147673 - DNA, 25 bp, Artificial
  probe
  misc_feature (1)..(25): SEQ ID NO: 2168; WAN024D8F_at; Start 66; Stop 90
aaaatgtttagcagatgctggtagt

SEQ ID NO: 147674 - DNA, 25 bp, Artificial
  probe
  misc_feature (1)..(25): SEQ ID NO: 2168; WAN024D8F_at; Start 10; Stop 34
cgtttagcttttccaaatgaagtag

SEQ ID NO: 147675 - DNA, 25 bp, Artificial
  probe
  misc_feature (1)..(25): SEQ ID NO: 2168; WAN024D8F_at; Start 243; Stop 267
aaactggcaagctggagagtcagag

SEQ ID NO: 147676 - DNA, 25 bp, Artificial
  probe
  misc_feature (1)..(25): SEQ ID NO: 2168; WAN024D8F_at; Start 367; Stop 391
gattttcgctcagatacgcatgctg

SEQ ID NO: 147677 - DNA, 25 bp, Artificial
  probe
  misc_feature (1)..(25): SEQ ID NO: 2168; WAN024D8F_at; Start 175; Stop 199
ggagaactgctagcctatgctgctg

SEQ ID NO: 147678 - DNA, 25 bp, Artificial
  probe
  misc_feature (1)..(25): SEQ ID NO: 2168; WAN024D8F_at; Start 285; Stop 309
tattgctgtggcagcagatgtgcag

SEQ ID NO: 147679 - DNA, 25 bp, Artificial
  probe
  misc_feature (1)..(25): SEQ ID NO: 2168; WAN024D8F_at; Start 92; Stop 116
accagtggcaaaatggctatccaaa

SEQ ID NO: 147680 - DNA, 25 bp, Artificial
  probe
  misc_feature (1)..(25): SEQ ID NO: 2168; WAN024D8F_at; Start 190; Stop 214
tatgctgctgtgaccaagagtccag

SEQ ID NO: 147681 - DNA, 25 bp, Artificial
  probe
  misc_feature (1)..(25): SEQ ID NO: 2168; WAN024D8F_at; Start 155; Stop 179
cctacgtagccttggaagagggaga

SEQ ID NO: 147682 - DNA, 25 bp, Artificial
  probe
  misc_feature (1)..(25): SEQ ID NO: 2168; WAN024D8F_at; Start 185; Stop 209
tagcctatgctgctgtgaccaagag

SEQ ID NO: 147683 - DNA, 25 bp, Artificial
  probe
  misc_feature (1)..(25): SEQ ID NO: 2168; WAN024D8F_at; Start 164; Stop 188
ccttggaagagggagaactgctagc

SEQ ID NO: 147684 - DNA, 25 bp, Artificial
  probe
  misc_feature (1)..(25): SEQ ID NO: 2168; WAN024D8F_at; Start 327; Stop 351
aaccttcttagagggcttgattgaa

SEQ ID NO: 147685 - DNA, 25 bp, Artificial
  probe
  misc_feature (1)..(25): SEQ ID NO: 2168; WAN024D8F_at; Start 145; Stop 169
tcagggcaagcctacgtagccttgg

SEQ ID NO: 147686 - DNA, 25 bp, Artificial
  probe
  misc_feature (1)..(25): SEQ ID NO: 2168; WAN024D8F_at; Start 210; Stop 234
tccagaggaggcctatgaagctatt

SEQ ID NO: 147687 - DNA, 25 bp, Artificial
  probe
  misc_feature (1)..(25): SEQ ID NO: 2168; WAN024D8F_at; Start 377; Stop 401
cagatacgcatgctgaaaacaaggt

SEQ ID NO: 147688 - DNA, 25 bp, Artificial
  probe
  misc_feature (1)..(25): SEQ ID NO: 2168; WAN024D8F_at; Start 61; Stop 85
gccaaaaaatgtttagcagatgctg

SEQ ID NO: 147689 - DNA, 25 bp, Artificial
  probe
  misc_feature (1)..(25): SEQ ID NO: 2168; WAN024D8F_at; Start 260; Stop 284
agtcagagtatctagtctttcaccg

SEQ ID NO: 147690 - DNA, 25 bp, Artificial
  probe
  misc_feature (1)..(25): SEQ ID NO: 2168; WAN024D8F_at; Start 396; Stop 420
caaggttatgcaacatatttttgaa

SEQ ID NO: 147691 - DNA, 25 bp, Artificial
  probe
  misc_feature (1)..(25): SEQ ID NO: 2168; WAN024D8F_at; Start 126; Stop 150
tattatcgatgatatcatctcaggg

SEQ ID NO: 147692 - DNA, 25 bp, Artificial
  probe
  misc_feature (1)..(25): SEQ ID NO: 2168; WAN024D8F_at; Start 340; Stop 364
ggcttgattgaaggttttgattatc

SEQ ID NO: 147693 - DNA, 25 bp, Artificial
  probe
  misc_feature (1)..(25): SEQ ID NO: 2168; WAN024D8F_at; Start 385; Stop 409
catgctgaaaacaaggttatgcaac

SEQ ID NO: 147694 - DNA, 25 bp, Artificial
  probe
  misc_feature (1)..(25): SEQ ID NO: 2168; WAN024D8F_at; Start 18; Stop 42
ttttccaaatgaagtagatgccatc

SEQ ID NO: 147695 - DNA, 25 bp, Artificial
  probe
  misc_feature (1)..(25): SEQ ID NO: 2168; WAN024D8F_at; Start 303; Stop 327
tgtgcagggaaaaggagttgctcaa

SEQ ID NO: 147696 - DNA, 25 bp, Artificial
  probe
  misc_feature (1)..(25): SEQ ID NO: 2168; WAN024D8F_at; Start 136; Stop 160
gatatcatctcagggcaagcctacg

SEQ ID NO: 147697 - DNA, 25 bp, Artificial
  probe
  misc_feature (1)..(25): SEQ ID NO: 2168; WAN024D8F_at; Start 250; Stop 274
caagctggagagtcagagtatctag

SEQ ID NO: 147698 - DNA, 25 bp, Artificial
  probe
  misc_feature (1)..(25): SEQ ID NO: 2168; WAN024D8F_at; Start 317; Stop 341
gagttgctcaaaccttcttagaggg

SEQ ID NO: 147699 - DNA, 25 bp, Artificial
  probe
  misc_feature (1)..(25): SEQ ID NO: 2168; WAN024D8F_at; Start 112; Stop 136
ccaaatgcagatgttattatcgatg

SEQ ID NO: 147700 - DNA, 25 bp, Artificial
  probe
  misc_feature (1)..(25): SEQ ID NO: 2168; WAN024D8F_at; Start 200; Stop 224
tgaccaagagtccagaggaggccta

SEQ ID NO: 147701 - DNA, 25 bp, Artificial
  probe
  misc_feature (1)..(25): SEQ ID NO: 1903; WAN024D8G_at; Start 156; Stop 180
tcctattttagacccagttattgct

SEQ ID NO: 147702 - DNA, 25 bp, Artificial
  probe
  misc_feature (1)..(25): SEQ ID NO: 1903; WAN024D8G_at; Start 332; Stop 356
tgcaagtggcttctgctcaagcaat

SEQ ID NO: 147703 - DNA, 25 bp, Artificial
  probe
  misc_feature (1)..(25): SEQ ID NO: 1903; WAN024D8G_at; Start 125; Stop 149
gagatgaaacgatagaagaagttgt

SEQ ID NO: 147704 - DNA, 25 bp, Artificial
  probe
  misc_feature (1)..(25): SEQ ID NO: 1903; WAN024D8G_at; Start 396; Stop 420
accttgtcatcgtgtgttgggagca

SEQ ID NO: 147705 - DNA, 25 bp, Artificial
  probe
  misc_feature (1)..(25): SEQ ID NO: 1903; WAN024D8G_at; Start 283; Stop 307
ggcattccttatggtcagacagtga

SEQ ID NO: 147706 - DNA, 25 bp, Artificial
  probe
  misc_feature (1)..(25): SEQ ID NO: 1903; WAN024D8G_at; Start 269; Stop 293
gggactatttacagggcattcctta

SEQ ID NO: 147707 - DNA, 25 bp, Artificial
  probe
  misc_feature (1)..(25): SEQ ID NO: 1903; WAN024D8G_at; Start 93; Stop 117
tcaggagcagaagcattttgagagg

SEQ ID NO: 147708 - DNA, 25 bp, Artificial
  probe
  misc_feature (1)..(25): SEQ ID NO: 1903; WAN024D8G_at; Start 213; Stop 237
ggatttatccaacttgctcttggcg

SEQ ID NO: 147709 - DNA, 25 bp, Artificial
  probe
  misc_feature (1)..(25): SEQ ID NO: 1903; WAN024D8G_at; Start 459; Stop 483
gaaagcttggctcttggagcatgaa

SEQ ID NO: 147710 - DNA, 25 bp, Artificial
  probe
  misc_feature (1)..(25): SEQ ID NO: 1903; WAN024D8G_at; Start 198; Stop 222
taaaggcaagcctcaggatttatcc

SEQ ID NO: 147711 - DNA, 25 bp, Artificial
  probe
  misc_feature (1)..(25): SEQ ID NO: 1903; WAN024D8G_at; Start 383; Stop 407
ggtctatcctagtaccttgtcatcg

SEQ ID NO: 147712 - DNA, 25 bp, Artificial
  probe
  misc_feature (1)..(25): SEQ ID NO: 1903; WAN024D8G_at; Start 38; Stop 62
caattggtattctatcacttgtagc

SEQ ID NO: 147713 - DNA, 25 bp, Artificial
  probe
  misc_feature (1)..(25): SEQ ID NO: 1903; WAN024D8G_at; Start 239; Stop 263
caatcggaacgaattttgaaaagag

SEQ ID NO: 147714 - DNA, 25 bp, Artificial
  probe
  misc_feature (1)..(25): SEQ ID NO: 1903; WAN024D8G_at; Start 50; Stop 74
tatcacttgtagctgatgaccatta

SEQ ID NO: 147715 - DNA, 25 bp, Artificial
  probe
  misc_feature (1)..(25): SEQ ID NO: 1903; WAN024D8G_at; Start 262; Stop 286
agagtttgggactatttacagggca

SEQ ID NO: 147716 - DNA, 25 bp, Artificial
  probe
  misc_feature (1)..(25): SEQ ID NO: 1903; WAN024D8G_at; Start 370; Stop 394
ggacgcaatccttggtctatcctag

SEQ ID NO: 147717 - DNA, 25 bp, Artificial
  probe
  misc_feature (1)..(25): SEQ ID NO: 1903; WAN024D8G_at; Start 446; Stop 470
caggagtggaaaagaaagcttggct

SEQ ID NO: 147718 - DNA, 25 bp, Artificial
  probe
  misc_feature (1)..(25): SEQ ID NO: 1903; WAN024D8G_at; Start 439; Stop 463
tatgctgcaggagtggaaaagaaag

SEQ ID NO: 147719 - DNA, 25 bp, Artificial
  probe
  misc_feature (1)..(25): SEQ ID NO: 1903; WAN024D8G_at; Start 61; Stop 85
gctgatgaccattatttgtatggaa

SEQ ID NO: 147720 - DNA, 25 bp, Artificial
  probe
  misc_feature (1)..(25): SEQ ID NO: 1903; WAN024D8G_at; Start 79; Stop 103
tatggaatttgggttcaggagcaga

SEQ ID NO: 147721 - DNA, 25 bp, Artificial
  probe
  misc_feature (1)..(25): SEQ ID NO: 1903; WAN024D8G_at; Start 345; Stop 369
tgctcaagcaattggtggagcagtg

SEQ ID NO: 147722 - DNA, 25 bp, Artificial
  probe
  misc_feature (1)..(25): SEQ ID NO: 1903; WAN024D8G_at; Start 151; Stop 175
agtcatcctattttagacccagtta

SEQ ID NO: 147723 - DNA, 25 bp, Artificial
  probe
  misc_feature (1)..(25): SEQ ID NO: 1903; WAN024D8G_at; Start 189; Stop 213
tgattactttaaaggcaagcctcag

SEQ ID NO: 147724 - DNA, 25 bp, Artificial
  probe
  misc_feature (1)..(25): SEQ ID NO: 1903; WAN024D8G_at; Start 26; Stop 50
tctactcctcaccaattggtattct

SEQ ID NO: 147725 - DNA, 25 bp, Artificial
  probe
  misc_feature (1)..(25): SEQ ID NO: 1903; WAN024D8G_at; Start 310; Stop 334
tatggacaaattgctcaagacctgc

SEQ ID NO: 147726 - DNA, 25 bp, Artificial
  probe
  misc_feature (1)..(25): SEQ ID NO: 1903; WAN024D8G_at; Start 364; Stop 388
gcagtgggacgcaatccttggtcta

SEQ ID NO: 147727 - DNA, 25 bp, Artificial
  probe
  misc_feature (1)..(25): SEQ ID NO: 1903; WAN024D8G_at; Start 339; Stop 363
ggcttctgctcaagcaattggtgga

SEQ ID NO: 147728 - DNA, 25 bp, Artificial
  probe
  misc_feature (1)..(25): SEQ ID NO: 1903; WAN024D8G_at; Start 297; Stop 321
tcagacagtgacctatggacaaatt

SEQ ID NO: 147729 - DNA, 25 bp, Artificial
  probe
  misc_feature (1)..(25): SEQ ID NO: 1903; WAN024D8G_at; Start 117; Stop 141
gggactaggagatgaaacgatagaa

SEQ ID NO: 147730 - DNA, 25 bp, Artificial
  probe
  misc_feature (1)..(25): SEQ ID NO: 1903; WAN024D8G_at; Start 322; Stop 346
gctcaagacctgcaagtggcttctg

SEQ ID NO: 147731 - DNA, 25 bp, Artificial
  probe
  misc_feature (1)..(25): SEQ ID NO: 1903; WAN024D8G_at; Start 278; Stop 302
tacagggcattccttatggtcagac

SEQ ID NO: 147732 - DNA, 25 bp, Artificial
  probe
  misc_feature (1)..(25): SEQ ID NO: 1903; WAN024D8G_at; Start 230; Stop 254
tcttggcgccaatcggaacgaattt

SEQ ID NO: 147733 - DNA, 25 bp, Artificial
  probe
  misc_feature (1)..(25): SEQ ID NO: 1903; WAN024D8G_at; Start 411; Stop 435
gttgggagcaggcaagcgtctgaca

SEQ ID NO: 147734 - DNA, 25 bp, Artificial
  probe
  misc_feature (1)..(25): SEQ ID NO: 1903; WAN024D8G_at; Start 222; Stop 246
caacttgctcttggcgccaatcgga

SEQ ID NO: 147735 - DNA, 25 bp, Artificial
  probe
  misc_feature (1)..(25): SEQ ID NO: 3010; WAN024D8H_at; Start 87; Stop 111
cgtccatatcgtggaagaaacacct

SEQ ID NO: 147736 - DNA, 25 bp, Artificial
  probe
  misc_feature (1)..(25): SEQ ID NO: 3010; WAN024D8H_at; Start 221; Stop 245
gaagtttgtcaaaccaagaagcggc

SEQ ID NO: 147737 - DNA, 25 bp, Artificial
  probe
  misc_feature (1)..(25): SEQ ID NO: 3010; WAN024D8H_at; Start 99; Stop 123
ggaagaaacacctagccaagaagtc

SEQ ID NO: 147738 - DNA, 25 bp, Artificial
  probe
  misc_feature (1)..(25): SEQ ID NO: 3010; WAN024D8H_at; Start 64; Stop 88
caattaggtgtggactataaagccg

SEQ ID NO: 147739 - DNA, 25 bp, Artificial
  probe
  misc_feature (1)..(25): SEQ ID NO: 3010; WAN024D8H_at; Start 182; Stop 206
gtatcaaataccgtgaattagggct

SEQ ID NO: 147740 - DNA, 25 bp, Artificial
  probe
  misc_feature (1)..(25): SEQ ID NO: 3010; WAN024D8H_at; Start 139; Stop 163
gaaacctcaggatttgaattgaagc

SEQ ID NO: 147741 - DNA, 25 bp, Artificial
  probe
  misc_feature (1)..(25): SEQ ID NO: 3010; WAN024D8H_at; Start 190; Stop 214
taccgtgaattagggctaaaagata

SEQ ID NO: 147742 - DNA, 25 bp, Artificial
  probe
  misc_feature (1)..(25): SEQ ID NO: 3010; WAN024D8H_at; Start 91; Stop 115
catatcgtggaagaaacacctagcc

SEQ ID NO: 147743 - DNA, 25 bp, Artificial
  probe
  misc_feature (1)..(25): SEQ ID NO: 3010; WAN024D8H_at; Start 158; Stop 182
tgaagcaatttttcaacaccagtgg

SEQ ID NO: 147744 - DNA, 25 bp, Artificial
  probe
  misc_feature (1)..(25): SEQ ID NO: 3010; WAN024D8H_at; Start 52; Stop 76
caagaattaaatcaattaggtgtgg

SEQ ID NO: 147745 - DNA, 25 bp, Artificial
  probe
  misc_feature (1)..(25): SEQ ID NO: 3010; WAN024D8H_at; Start 81; Stop 105
taaagccgtccatatcgtggaagaa

SEQ ID NO: 147746 - DNA, 25 bp, Artificial
  probe
  misc_feature (1)..(25): SEQ ID NO: 3010; WAN024D8H_at; Start 170; Stop 194
tcaacaccagtggtatcaaataccg

SEQ ID NO: 147747 - DNA, 25 bp, Artificial
  probe
  misc_feature (1)..(25): SEQ ID NO: 3010; WAN024D8H_at; Start 195; Stop 219
tgaattagggctaaaagataaggta

SEQ ID NO: 147748 - DNA, 25 bp, Artificial
  probe
  misc_feature (1)..(25): SEQ ID NO: 3010; WAN024D8H_at; Start 163; Stop 187
caatttttcaacaccagtggtatca

SEQ ID NO: 147749 - DNA, 25 bp, Artificial
  probe
  misc_feature (1)..(25): SEQ ID NO: 3010; WAN024D8H_at; Start 120; Stop 144
agtcattttgaattggctagaaacc

SEQ ID NO: 147750 - DNA, 25 bp, Artificial
  probe
  misc_feature (1)..(25): SEQ ID NO: 3010; WAN024D8H_at; Start 229; Stop 253
tcaaaccaagaagcggctgagttgc

SEQ ID NO: 147751 - DNA, 25 bp, Artificial
  probe
  misc_feature (1)..(25): SEQ ID NO: 3010; WAN024D8H_at; Start 234; Stop 258
ccaagaagcggctgagttgctagca

SEQ ID NO: 147752 - DNA, 25 bp, Artificial
  probe
  misc_feature (1)..(25): SEQ ID NO: 3010; WAN024D8H_at; Start 236; Stop 260
aagaagcggctgagttgctagcaag

SEQ ID NO: 147753 - DNA, 25 bp, Artificial
  probe
  misc_feature (1)..(25): SEQ ID NO: 3010; WAN024D8H_at; Start 95; Stop 119
tcgtggaagaaacacctagccaaga

SEQ ID NO: 147754 - DNA, 25 bp, Artificial
  probe
  misc_feature (1)..(25): SEQ ID NO: 3010; WAN024D8H_at; Start 131; Stop 155
attggctagaaacctcaggatttga

SEQ ID NO: 147755 - DNA, 25 bp, Artificial
  probe
  misc_feature (1)..(25): SEQ ID NO: 3010; WAN024D8H_at; Start 257; Stop 281
caagtgacggtatgttgttaaaacg

SEQ ID NO: 147756 - DNA, 25 bp, Artificial
  probe
  misc_feature (1)..(25): SEQ ID NO: 3010; WAN024D8H_at; Start 24; Stop 48
caaatgttcaacttgtaaaaaagca

SEQ ID NO: 147757 - DNA, 25 bp, Artificial
  probe
  misc_feature (1)..(25): SEQ ID NO: 3010; WAN024D8H_at; Start 240; Stop 264
agcggctgagttgctagcaagtgac

SEQ ID NO: 147758 - DNA, 25 bp, Artificial
  probe
  misc_feature (1)..(25): SEQ ID NO: 3010; WAN024D8H_at; Start 248; Stop 272
agttgctagcaagtgacggtatgtt

SEQ ID NO: 147759 - DNA, 25 bp, Artificial
  probe
  misc_feature (1)..(25): SEQ ID NO: 3010; WAN024D8H_at; Start 103; Stop 127
gaaacacctagccaagaagtcattt

SEQ ID NO: 147760 - DNA, 25 bp, Artificial
  probe
  misc_feature (1)..(25): SEQ ID NO: 3010; WAN024D8H_at; Start 174; Stop 198
caccagtggtatcaaataccgtgaa

SEQ ID NO: 147761 - DNA, 25 bp, Artificial
  probe
  misc_feature (1)..(25): SEQ ID NO: 3010; WAN024D8H_at; Start 68; Stop 92
taggtgtggactataaagccgtcca

SEQ ID NO: 147762 - DNA, 25 bp, Artificial
  probe
  misc_feature (1)..(25): SEQ ID NO: 3010; WAN024D8H_at; Start 244; Stop 268
gctgagttgctagcaagtgacggta

SEQ ID NO: 147763 - DNA, 25 bp, Artificial
  probe
  misc_feature (1)..(25): SEQ ID NO: 3010; WAN024D8H_at; Start 107; Stop 131
cacctagccaagaagtcattttgaa

SEQ ID NO: 147764 - DNA, 25 bp, Artificial
  probe
  misc_feature (1)..(25): SEQ ID NO: 3010; WAN024D8H_at; Start 185; Stop 209
tcaaataccgtgaattagggctaaa

SEQ ID NO: 147765 - DNA, 25 bp, Artificial
  probe
  misc_feature (1)..(25): SEQ ID NO: 3010; WAN024D8H_at; Start 76; Stop 100
gactataaagccgtccatatcgtgg

SEQ ID NO: 147766 - DNA, 25 bp, Artificial
  probe
  misc_feature (1)..(25): SEQ ID NO: 3010; WAN024D8H_at; Start 225; Stop 249
tttgtcaaaccaagaagcggctgag

SEQ ID NO: 147767 - DNA, 25 bp, Artificial
  probe
  misc_feature (1)..(25): SEQ ID NO: 3010; WAN024D8H_at; Start 143; Stop 167
cctcaggatttgaattgaagcaatt

SEQ ID NO: 147768 - DNA, 25 bp, Artificial
  probe
  misc_feature (1)..(25): SEQ ID NO: 3010; WAN024D8H_at; Start 115; Stop 139
caagaagtcattttgaattggctag

SEQ ID NO: 147769 - DNA, 25 bp, Artificial
  probe
  misc_feature (1)..(25): SEQ ID NO: 1787; WAN024D8I_at; Start 414; Stop 438
ccatttatcaggtggacagaagcaa

SEQ ID NO: 147770 - DNA, 25 bp, Artificial
  probe
  misc_feature (1)..(25): SEQ ID NO: 1787; WAN024D8I_at; Start 391; Stop 415
gaccgtgaaaaccattatcctcgcc

SEQ ID NO: 147771 - DNA, 25 bp, Artificial
  probe
  misc_feature (1)..(25): SEQ ID NO: 1787; WAN024D8I_at; Start 162; Stop 186
cagtggctctattcagattgatggt

SEQ ID NO: 147772 - DNA, 25 bp, Artificial
  probe
  misc_feature (1)..(25): SEQ ID NO: 1787; WAN024D8I_at; Start 432; Stop 456
gaagcaacgggttgccctagcgcgt

SEQ ID NO: 147773 - DNA, 25 bp, Artificial
  probe
  misc_feature (1)..(25): SEQ ID NO: 1787; WAN024D8I_at; Start 290; Stop 314
cacttgataatgtgaaagaaggctt

SEQ ID NO: 147774 - DNA, 25 bp, Artificial
  probe
  misc_feature (1)..(25): SEQ ID NO: 1787; WAN024D8I_at; Start 553; Stop 577
gctgctaagtcaggtcagaccatga

SEQ ID NO: 147775 - DNA, 25 bp, Artificial
  probe
  misc_feature (1)..(25): SEQ ID NO: 1787; WAN024D8I_at; Start 599; Stop 623
cctttgtagcccaagttgcggataa

SEQ ID NO: 147776 - DNA, 25 bp, Artificial
  probe
  misc_feature (1)..(25): SEQ ID NO: 1787; WAN024D8I_at; Start 306; Stop 330
agaaggcttggttgttgtcaagaaa

SEQ ID NO: 147777 - DNA, 25 bp, Artificial
  probe
  misc_feature (1)..(25): SEQ ID NO: 1787; WAN024D8I_at; Start 655; Stop 679
gagtctggaactccggatgagatta

SEQ ID NO: 147778 - DNA, 25 bp, Artificial
  probe
  misc_feature (1)..(25): SEQ ID NO: 1787; WAN024D8I_at; Start 456; Stop 480
tgcgcttgctatgaaaccagatgtt

SEQ ID NO: 147779 - DNA, 25 bp, Artificial
  probe
  misc_feature (1)..(25): SEQ ID NO: 1787; WAN024D8I_at; Start 406; Stop 430
tatcctcgccatttatcaggtggac

SEQ ID NO: 147780 - DNA, 25 bp, Artificial
  probe
  misc_feature (1)..(25): SEQ ID NO: 1787; WAN024D8I_at; Start 103; Stop 127
tcttcaggagctggaaaatcaacct

SEQ ID NO: 147781 - DNA, 25 bp, Artificial
  probe
  misc_feature (1)..(25): SEQ ID NO: 1787; WAN024D8I_at; Start 487; Stop 511
ttagacgaaccaacttcagcccttg

SEQ ID NO: 147782 - DNA, 25 bp, Artificial
  probe
  misc_feature (1)..(25): SEQ ID NO: 1787; WAN024D8I_at; Start 118; Stop 142
aaatcaacctttcttcgcagtctca

SEQ ID NO: 147783 - DNA, 25 bp, Artificial
  probe
  misc_feature (1)..(25): SEQ ID NO: 1787; WAN024D8I_at; Start 716; Stop 740
tcgctagttacaaacggacttatat

SEQ ID NO: 147784 - DNA, 25 bp, Artificial
  probe
  misc_feature (1)..(25): SEQ ID NO: 1787; WAN024D8I_at; Start 513; Stop 537
cccagaattggtcggtgaagtagaa

SEQ ID NO: 147785 - DNA, 25 bp, Artificial
  probe
  misc_feature (1)..(25): SEQ ID NO: 1787; WAN024D8I_at; Start 240; Stop 264
taagttgtctatggttttccaacag

SEQ ID NO: 147786 - DNA, 25 bp, Artificial
  probe
  misc_feature (1)..(25): SEQ ID NO: 1787; WAN024D8I_at; Start 449; Stop 473
tagcgcgtgcgcttgctatgaaacc

SEQ ID NO: 147787 - DNA, 25 bp, Artificial
  probe
  misc_feature (1)..(25): SEQ ID NO: 1787; WAN024D8I_at; Start 20; Stop 44
taagcaaatccttttcaggacagac

SEQ ID NO: 147788 - DNA, 25 bp, Artificial
  probe
  misc_feature (1)..(25): SEQ ID NO: 1787; WAN024D8I_at; Start 151; Stop 175
gaaacacctgacagtggctctattc

SEQ ID NO: 147789 - DNA, 25 bp, Artificial
  probe
  misc_feature (1)..(25): SEQ ID NO: 1787; WAN024D8I_at; Start 499; Stop 523
acttcagcccttgacccagaattgg

SEQ ID NO: 147790 - DNA, 25 bp, Artificial
  probe
  misc_feature (1)..(25): SEQ ID NO: 1787; WAN024D8I_at; Start 645; Stop 669
gaaaatcatcgagtctggaactccg

SEQ ID NO: 147791 - DNA, 25 bp, Artificial
  probe
  misc_feature (1)..(25): SEQ ID NO: 1787; WAN024D8I_at; Start 89; Stop 113
tagccttgattggttcttcaggagc

SEQ ID NO: 147792 - DNA, 25 bp, Artificial
  probe
  misc_feature (1)..(25): SEQ ID NO: 1787; WAN024D8I_at; Start 533; Stop 557
tagaaaagtctattgcagatgctgc

SEQ ID NO: 147793 - DNA, 25 bp, Artificial
  probe
  misc_feature (1)..(25): SEQ ID NO: 1787; WAN024D8I_at; Start 212; Stop 236
ctcaagaagaaatccttgccctacg

SEQ ID NO: 147794 - DNA, 25 bp, Artificial
  probe
  misc_feature (1)..(25): SEQ ID NO: 1787; WAN024D8I_at; Start 357; Stop 381
tgccaaggaagagttggctaaggtt

SEQ ID NO: 147795 - DNA, 25 bp, Artificial
  probe
  misc_feature (1)..(25): SEQ ID NO: 1787; WAN024D8I_at; Start 57; Stop 81
tctggacttggatattcaaaaaggg

SEQ ID NO: 147796 - DNA, 25 bp, Artificial
  probe
  misc_feature (1)..(25): SEQ ID NO: 1787; WAN024D8I_at; Start 682; Stop 706
cacacccctaaagaagagcggacaa

SEQ ID NO: 147797 - DNA, 25 bp, Artificial
  probe
  misc_feature (1)..(25): SEQ ID NO: 1787; WAN024D8I_at; Start 670; Stop 694
gatgagattatccacacccctaaag

SEQ ID NO: 147798 - DNA, 25 bp, Artificial
  probe
  misc_feature (1)..(25): SEQ ID NO: 1787; WAN024D8I_at; Start 274; Stop 298
tttgaacgccgaacagcacttgata

SEQ ID NO: 147799 - DNA, 25 bp, Artificial
  probe
  misc_feature (1)..(25): SEQ ID NO: 1787; WAN024D8I_at; Start 324; Stop 348
caagaaattatctgaccaagaagcg

SEQ ID NO: 147800 - DNA, 25 bp, Artificial
  probe
  misc_feature (1)..(25): SEQ ID NO: 1787; WAN024D8I_at; Start 38; Stop 62
gacagactgtcttggatcatctgga

SEQ ID NO: 147801 - DNA, 25 bp, Artificial
  probe
  misc_feature (1)..(25): SEQ ID NO: 1787; WAN024D8I_at; Start 343; Stop 367
gaagcgactaagattgccaaggaag

SEQ ID NO: 147802 - DNA, 25 bp, Artificial
  probe
  misc_feature (1)..(25): SEQ ID NO: 1787; WAN024D8I_at; Start 570; Stop 594
gaccatgattttggtcagtcatgac

SEQ ID NO: 147803 - DNA, 25 bp, Artificial
  probe
  misc_feature (1)..(25): SEQ ID NO: 1535; WAN024D8J_at; Start 153; Stop 177
ctatgatatgattatgattggagtc

SEQ ID NO: 147804 - DNA, 25 bp, Artificial
  probe
  misc_feature (1)..(25): SEQ ID NO: 1535; WAN024D8J_at; Start 210; Stop 234
gagtttaattcttgttttcaaggca

SEQ ID NO: 147805 - DNA, 25 bp, Artificial
  probe
  misc_feature (1)..(25): SEQ ID NO: 1535; WAN024D8J_at; Start 12; Stop 36
catgctactgcaactattttcttta

SEQ ID NO: 147806 - DNA, 25 bp, Artificial
  probe
  misc_feature (1)..(25): SEQ ID NO: 1535; WAN024D8J_at; Start 183; Stop 207
tgtcccagtattatcctttgcggtt

SEQ ID NO: 147807 - DNA, 25 bp, Artificial
  probe
  misc_feature (1)..(25): SEQ ID NO: 1535; WAN024D8J_at; Start 188; Stop 212
cagtattatcctttgcggttatgag

SEQ ID NO: 147808 - DNA, 25 bp, Artificial
  probe
  misc_feature (1)..(25): SEQ ID NO: 1535; WAN024D8J_at; Start 99; Stop 123
tctgagagccatgtcgggagttgat

SEQ ID NO: 147809 - DNA, 25 bp, Artificial
  probe
  misc_feature (1)..(25): SEQ ID NO: 1535; WAN024D8J_at; Start 21; Stop 45
gcaactattttctttatatttcgag

SEQ ID NO: 147810 - DNA, 25 bp, Artificial
  probe
  misc_feature (1)..(25): SEQ ID NO: 1535; WAN024D8J_at; Start 109; Stop 133
atgtcgggagttgataagacagcca

SEQ ID NO: 147811 - DNA, 25 bp, Artificial
  probe
  misc_feature (1)..(25): SEQ ID NO: 1535; WAN024D8J_at; Start 140; Stop 164
gccaagcccatctctatgatatgat

SEQ ID NO: 147812 - DNA, 25 bp, Artificial
  probe
  misc_feature (1)..(25): SEQ ID NO: 1535; WAN024D8J_at; Start 57; Stop 81
gaccaccatccttgttctgattttt

SEQ ID NO: 147813 - DNA, 25 bp, Artificial
  probe
  misc_feature (1)..(25): SEQ ID NO: 1535; WAN024D8J_at; Start 63; Stop 87
catccttgttctgatttttttaggg

SEQ ID NO: 147814 - DNA, 25 bp, Artificial
  probe
  misc_feature (1)..(25): SEQ ID NO: 1535; WAN024D8J_at; Start 2; Stop 26
tgagagaaatcatgctactgcaact

SEQ ID NO: 147815 - DNA, 25 bp, Artificial
  probe
  misc_feature (1)..(25): SEQ ID NO: 1535; WAN024D8J_at; Start 194; Stop 218
tatcctttgcggttatgagtttaat

SEQ ID NO: 147816 - DNA, 25 bp, Artificial
  probe
  misc_feature (1)..(25): SEQ ID NO: 1535; WAN024D8J_at; Start 90; Stop 114
ttggattggtctgagagccatgtcg

SEQ ID NO: 147817 - DNA, 25 bp, Artificial
  probe
  misc_feature (1)..(25): SEQ ID NO: 1535; WAN024D8J_at; Start 215; Stop 239
taattcttgttttcaaggcataact

SEQ ID NO: 147818 - DNA, 25 bp, Artificial
  probe
  misc_feature (1)..(25): SEQ ID NO: 1535; WAN024D8J_at; Start 5; Stop 29
gagaaatcatgctactgcaactatt

SEQ ID NO: 147819 - DNA, 25 bp, Artificial
  probe
  misc_feature (1)..(25): SEQ ID NO: 1535; WAN024D8J_at; Start 173; Stop 197
gagtcttggttgtcccagtattatc

SEQ ID NO: 147820 - DNA, 25 bp, Artificial
  probe
  misc_feature (1)..(25): SEQ ID NO: 1535; WAN024D8J_at; Start 138; Stop 162
tcgccaagcccatctctatgatatg

SEQ ID NO: 147821 - DNA, 25 bp, Artificial
  probe
  misc_feature (1)..(25): SEQ ID NO: 1535; WAN024D8J_at; Start 145; Stop 169
gcccatctctatgatatgattatga

SEQ ID NO: 147822 - DNA, 25 bp, Artificial
  probe
  misc_feature (1)..(25): SEQ ID NO: 1535; WAN024D8J_at; Start 186; Stop 210
cccagtattatcctttgcggttatg

SEQ ID NO: 147823 - DNA, 25 bp, Artificial
  probe
  misc_feature (1)..(25): SEQ ID NO: 1535; WAN024D8J_at; Start 104; Stop 128
gagccatgtcgggagttgataagac

SEQ ID NO: 147824 - DNA, 25 bp, Artificial
  probe
  misc_feature (1)..(25): SEQ ID NO: 1535; WAN024D8J_at; Start 218; Stop 242
ttcttgttttcaaggcataactaat

SEQ ID NO: 147825 - DNA, 25 bp, Artificial
  probe
  misc_feature (1)..(25): SEQ ID NO: 1535; WAN024D8J_at; Start 168; Stop 192
gattggagtcttggttgtcccagta

SEQ ID NO: 147826 - DNA, 25 bp, Artificial
  probe
  misc_feature (1)..(25): SEQ ID NO: 1535; WAN024D8J_at; Start 28; Stop 52
ttttctttatatttcgagagtttga

SEQ ID NO: 147827 - DNA, 25 bp, Artificial
  probe
  misc_feature (1)..(25): SEQ ID NO: 1535; WAN024D8J_at; Start 107; Stop 131
ccatgtcgggagttgataagacagc

SEQ ID NO: 147828 - DNA, 25 bp, Artificial
  probe
  misc_feature (1)..(25): SEQ ID NO: 1535; WAN024D8J_at; Start 136; Stop 160
gctcgccaagcccatctctatgata

SEQ ID NO: 147829 - DNA, 25 bp, Artificial
  probe
  misc_feature (1)..(25): SEQ ID NO: 1535; WAN024D8J_at; Start 180; Stop 204
ggttgtcccagtattatcctttgcg

SEQ ID NO: 147830 - DNA, 25 bp, Artificial
  probe
  misc_feature (1)..(25): SEQ ID NO: 1535; WAN024D8J_at; Start 165; Stop 189
tatgattggagtcttggttgtccca

SEQ ID NO: 147831 - DNA, 25 bp, Artificial
  probe
  misc_feature (1)..(25): SEQ ID NO: 1535; WAN024D8J_at; Start 100; Stop 124
ctgagagccatgtcgggagttgata

SEQ ID NO: 147832 - DNA, 25 bp, Artificial
  probe
  misc_feature (1)..(25): SEQ ID NO: 1535; WAN024D8J_at; Start 197; Stop 221
cctttgcggttatgagtttaattct

SEQ ID NO: 147833 - DNA, 25 bp, Artificial
  probe
  misc_feature (1)..(25): SEQ ID NO: 1535; WAN024D8J_at; Start 87; Stop 111
gatttggattggtctgagagccatg

SEQ ID NO: 147834 - DNA, 25 bp, Artificial
  probe
  misc_feature (1)..(25): SEQ ID NO: 1535; WAN024D8J_at; Start 55; Stop 79
ttgaccaccatccttgttctgattt

SEQ ID NO: 147835 - DNA, 25 bp, Artificial
  probe
  misc_feature (1)..(25): SEQ ID NO: 1535; WAN024D8J_at; Start 142; Stop 166
caagcccatctctatgatatgatta

SEQ ID NO: 147836 - DNA, 25 bp, Artificial
  probe
  misc_feature (1)..(25): SEQ ID NO: 1535; WAN024D8J_at; Start 79; Stop 103
tttttagggatttggattggtctga

SEQ ID NO: 147837 - DNA, 25 bp, Artificial
  probe
  misc_feature (1)..(25): SEQ ID NO: 5294; WAN024D8K_at; Start 220; Stop 244
gaaggtgctgttcatcaaggttttg

SEQ ID NO: 147838 - DNA, 25 bp, Artificial
  probe
  misc_feature (1)..(25): SEQ ID NO: 5294; WAN024D8K_at; Start 364; Stop 388
tctatcttgcgaacagccgatgcga

SEQ ID NO: 147839 - DNA, 25 bp, Artificial
  probe
  misc_feature (1)..(25): SEQ ID NO: 5294; WAN024D8K_at; Start 547; Stop 571
tttggaacggatatgaacggtactc

SEQ ID NO: 147840 - DNA, 25 bp, Artificial
  probe
  misc_feature (1)..(25): SEQ ID NO: 5294; WAN024D8K_at; Start 472; Stop 496
gaacacgttccaattgcccgagtga

SEQ ID NO: 147841 - DNA, 25 bp, Artificial
  probe
  misc_feature (1)..(25): SEQ ID NO: 5294; WAN024D8K_at; Start 609; Stop 633
catcattggaaatgaaggaaaaggt

SEQ ID NO: 147842 - DNA, 25 bp, Artificial
  probe
  misc_feature (1)..(25): SEQ ID NO: 5294; WAN024D8K_at; Start 352; Stop 376
cataatctgggttctatcttgcgaa

SEQ ID NO: 147843 - DNA, 25 bp, Artificial
  probe
  misc_feature (1)..(25): SEQ ID NO: 5294; WAN024D8K_at; Start 703; Stop 727
cttaatgccagtgttgctgcggcca

SEQ ID NO: 147844 - DNA, 25 bp, Artificial
  probe
  misc_feature (1)..(25): SEQ ID NO: 5294; WAN024D8K_at; Start 443; Stop 467
tcgttgccaaaacagccacaggtgc

SEQ ID NO: 147845 - DNA, 25 bp, Artificial
  probe
  misc_feature (1)..(25): SEQ ID NO: 5294; WAN024D8K_at; Start 235; Stop 259
caaggttttgttctacgagtgtctg

SEQ ID NO: 147846 - DNA, 25 bp, Artificial
  probe
  misc_feature (1)..(25): SEQ ID NO: 5294; WAN024D8K_at; Start 265; Stop 289
gcctatagcgagctagattacatcc

SEQ ID NO: 147847 - DNA, 25 bp, Artificial
  probe
  misc_feature (1)..(25): SEQ ID NO: 5294; WAN024D8K_at; Start 393; Stop 417
tgtttcaggtgtcatcattcccaag

SEQ ID NO: 147848 - DNA, 25 bp, Artificial
  probe
  misc_feature (1)..(25): SEQ ID NO: 5294; WAN024D8K_at; Start 121; Stop 145
gatctccgaggtaagaatgttgaga

SEQ ID NO: 147849 - DNA, 25 bp, Artificial
  probe
  misc_feature (1)..(25): SEQ ID NO: 5294; WAN024D8K_at; Start 43; Stop 67
aatgatattgtctatggtgtccacg

SEQ ID NO: 147850 - DNA, 25 bp, Artificial
  probe
  misc_feature (1)..(25): SEQ ID NO: 5294; WAN024D8K_at; Start 459; Stop 483
cacaggtgctattgaacacgttcca

SEQ ID NO: 147851 - DNA, 25 bp, Artificial
  probe
  misc_feature (1)..(25): SEQ ID NO: 5294; WAN024D8K_at; Start 113; Stop 137
tccaagaagatctccgaggtaagaa

SEQ ID NO: 147852 - DNA, 25 bp, Artificial
  probe
  misc_feature (1)..(25): SEQ ID NO: 5294; WAN024D8K_at; Start 689; Stop 713
gacatgttcaaagccttaatgccag

SEQ ID NO: 147853 - DNA, 25 bp, Artificial
  probe
  misc_feature (1)..(25): SEQ ID NO: 5294; WAN024D8K_at; Start 429; Stop 453
cggagtaactcctgtcgttgccaaa

SEQ ID NO: 147854 - DNA, 25 bp, Artificial
  probe
  misc_feature (1)..(25): SEQ ID NO: 5294; WAN024D8K_at; Start 147; Stop 171
agtcaaggaactagctacagaaaag

SEQ ID NO: 147855 - DNA, 25 bp, Artificial
  probe
  misc_feature (1)..(25): SEQ ID NO: 5294; WAN024D8K_at; Start 171; Stop 195
gaaggtgtccatttcttggacatca

SEQ ID NO: 147856 - DNA, 25 bp, Artificial
  probe
  misc_feature (1)..(25): SEQ ID NO: 5294; WAN024D8K_at; Start 540; Stop 564
ctggacctttggaacggatatgaac

SEQ ID NO: 147857 - DNA, 25 bp, Artificial
  probe
  misc_feature (1)..(25): SEQ ID NO: 5294; WAN024D8K_at; Start 575; Stop 599
gccacaagtggaatacaaaagggaa

SEQ ID NO: 147858 - DNA, 25 bp, Artificial
  probe
  misc_feature (1)..(25): SEQ ID NO: 5294; WAN024D8K_at; Start 84; Stop 108
ccttgcaaatacaggaaacaaactc

SEQ ID NO: 147859 - DNA, 25 bp, Artificial
  probe
  misc_feature (1)..(25): SEQ ID NO: 5294; WAN024D8K_at; Start 278; Stop 302
tagattacatccttgcaaaaacacg

SEQ ID NO: 147860 - DNA, 25 bp, Artificial
  probe
  misc_feature (1)..(25): SEQ ID NO: 5294; WAN024D8K_at; Start 251; Stop 275
gagtgtctgaatttgcctatagcga

SEQ ID NO: 147861 - DNA, 25 bp, Artificial
  probe
  misc_feature (1)..(25): SEQ ID NO: 5294; WAN024D8K_at; Start 675; Stop 699
cattccgatgaatggacatgttcaa

SEQ ID NO: 147862 - DNA, 25 bp, Artificial
  probe
  misc_feature (1)..(25): SEQ ID NO: 5294; WAN024D8K_at; Start 595; Stop 619
gggaaaatcgccctcatcattggaa

SEQ ID NO: 147863 - DNA, 25 bp, Artificial
  probe
  misc_feature (1)..(25): SEQ ID NO: 5294; WAN024D8K_at; Start 732; Stop 756
catgtacgaagttttccgaaataga

SEQ ID NO: 147864 - DNA, 25 bp, Artificial
  probe
  misc_feature (1)..(25): SEQ ID NO: 5294; WAN024D8K_at; Start 158; Stop 182
tagctacagaaaagaaggtgtccat

SEQ ID NO: 147865 - DNA, 25 bp, Artificial
  probe
  misc_feature (1)..(25): SEQ ID NO: 5294; WAN024D8K_at; Start 377; Stop 401
cagccgatgcgaccaatgtttcagg

SEQ ID NO: 147866 - DNA, 25 bp, Artificial
  probe
  misc_feature (1)..(25): SEQ ID NO: 5294; WAN024D8K_at; Start 98; Stop 122
gaaacaaactctacctccaagaaga

SEQ ID NO: 147867 - DNA, 25 bp, Artificial
  probe
  misc_feature (1)..(25): SEQ ID NO: 5294; WAN024D8K_at; Start 560; Stop 584
tgaacggtactccttgccacaagtg

SEQ ID NO: 147868 - DNA, 25 bp, Artificial
  probe
  misc_feature (1)..(25): SEQ ID NO: 5294; WAN024D8K_at; Start 310; Stop 334
gaaaatccacttctattgattctag

SEQ ID NO: 147869 - DNA, 25 bp, Artificial
  probe
  misc_feature (1)..(25): SEQ ID NO: 5294; WAN024D8K_at; Start 323; Stop 347
tattgattctagatggtctaaccga

SEQ ID NO: 147870 - DNA, 25 bp, Artificial
  probe
  misc_feature (1)..(25): SEQ ID NO: 5294; WAN024D8K_at; Start 718; Stop 742
gctgcggccattctcatgtacgaag

SEQ ID NO: 147871 - DNA, 25 bp, Artificial
  probe
  misc_feature (1)..(25): SEQ ID NO: 7420; WAN024D8L_at; Start 2; Stop 26
tgaactacttcctctttgatataaa

SEQ ID NO: 147872 - DNA, 25 bp, Artificial
  probe
  misc_feature (1)..(25): SEQ ID NO: 7420; WAN024D8L_at; Start 43; Stop 67
aatgaagatgcctccttcataaaac

SEQ ID NO: 147873 - DNA, 25 bp, Artificial
  probe
  misc_feature (1)..(25): SEQ ID NO: 7420; WAN024D8L_at; Start 51; Stop 75
tgcctccttcataaaaccggtacta

SEQ ID NO: 147874 - DNA, 25 bp, Artificial
  probe
  misc_feature (1)..(25): SEQ ID NO: 7420; WAN024D8L_at; Start 31; Stop 55
atgtatatcgataatgaagatgcct

SEQ ID NO: 147875 - DNA, 25 bp, Artificial
  probe
  misc_feature (1)..(25): SEQ ID NO: 7420; WAN024D8L_at; Start 37; Stop 61
atcgataatgaagatgcctccttca

SEQ ID NO: 147876 - DNA, 25 bp, Artificial
  probe
  misc_feature (1)..(25): SEQ ID NO: 7420; WAN024D8L_at; Start 32; Stop 56
tgtatatcgataatgaagatgcctc

SEQ ID NO: 147877 - DNA, 25 bp, Artificial
  probe
  misc_feature (1)..(25): SEQ ID NO: 7420; WAN024D8L_at; Start 50; Stop 74
atgcctccttcataaaaccggtact

SEQ ID NO: 147878 - DNA, 25 bp, Artificial
  probe
  misc_feature (1)..(25): SEQ ID NO: 7420; WAN024D8L_at; Start 7; Stop 31
tacttcctctttgatataaaaatca

SEQ ID NO: 147879 - DNA, 25 bp, Artificial
  probe
  misc_feature (1)..(25): SEQ ID NO: 7420; WAN024D8L_at; Start 1; Stop 25
ttgaactacttcctctttgatataa

SEQ ID NO: 147880 - DNA, 25 bp, Artificial
  probe
  misc_feature (1)..(25): SEQ ID NO: 7420; WAN024D8L_at; Start 3; Stop 27
gaactacttcctctttgatataaaa

SEQ ID NO: 147881 - DNA, 25 bp, Artificial
  probe
  misc_feature (1)..(25): SEQ ID NO: 7420; WAN024D8L_at; Start 35; Stop 59
atatcgataatgaagatgcctcctt

SEQ ID NO: 147882 - DNA, 25 bp, Artificial
  probe
  misc_feature (1)..(25): SEQ ID NO: 7420; WAN024D8L_at; Start 39; Stop 63
cgataatgaagatgcctccttcata

SEQ ID NO: 147883 - DNA, 25 bp, Artificial
  probe
  misc_feature (1)..(25): SEQ ID NO: 7420; WAN024D8L_at; Start 5; Stop 29
actacttcctctttgatataaaaat

SEQ ID NO: 147884 - DNA, 25 bp, Artificial
  probe
  misc_feature (1)..(25): SEQ ID NO: 7420; WAN024D8L_at; Start 29; Stop 53
tcatgtatatcgataatgaagatgc

SEQ ID NO: 147885 - DNA, 25 bp, Artificial
  probe
  misc_feature (1)..(25): SEQ ID NO: 7420; WAN024D8L_at; Start 47; Stop 71
aagatgcctccttcataaaaccggt

SEQ ID NO: 147886 - DNA, 25 bp, Artificial
  probe
  misc_feature (1)..(25): SEQ ID NO: 7420; WAN024D8L_at; Start 6; Stop 30
ctacttcctctttgatataaaaatc

SEQ ID NO: 147887 - DNA, 25 bp, Artificial
  probe
  misc_feature (1)..(25): SEQ ID NO: 7420; WAN024D8L_at; Start 13; Stop 37
ctctttgatataaaaatcatgtata

SEQ ID NO: 147888 - DNA, 25 bp, Artificial
  probe
  misc_feature (1)..(25): SEQ ID NO: 7420; WAN024D8L_at; Start 49; Stop 73
gatgcctccttcataaaaccggtac

SEQ ID NO: 147889 - DNA, 25 bp, Artificial
  probe
  misc_feature (1)..(25): SEQ ID NO: 7420; WAN024D8L_at; Start 45; Stop 69
tgaagatgcctccttcataaaaccg

SEQ ID NO: 147890 - DNA, 25 bp, Artificial
  probe
  misc_feature (1)..(25): SEQ ID NO: 7420; WAN024D8L_at; Start 25; Stop 49
aaaatcatgtatatcgataatgaag

SEQ ID NO: 147891 - DNA, 25 bp, Artificial
  probe
  misc_feature (1)..(25): SEQ ID NO: 7420; WAN024D8L_at; Start 34; Stop 58
tatatcgataatgaagatgcctcct

SEQ ID NO: 147892 - DNA, 25 bp, Artificial
  probe
  misc_feature (1)..(25): SEQ ID NO: 7420; WAN024D8L_at; Start 26; Stop 50
aaatcatgtatatcgataatgaaga

SEQ ID NO: 147893 - DNA, 25 bp, Artificial
  probe
  misc_feature (1)..(25): SEQ ID NO: 7420; WAN024D8L_at; Start 10; Stop 34
ttcctctttgatataaaaatcatgt

SEQ ID NO: 147894 - DNA, 25 bp, Artificial
  probe
  misc_feature (1)..(25): SEQ ID NO: 7420; WAN024D8L_at; Start 46; Stop 70
gaagatgcctccttcataaaaccgg

SEQ ID NO: 147895 - DNA, 25 bp, Artificial
  probe
  misc_feature (1)..(25): SEQ ID NO: 7420; WAN024D8L_at; Start 42; Stop 66
taatgaagatgcctccttcataaaa

SEQ ID NO: 147896 - DNA, 25 bp, Artificial
  probe
  misc_feature (1)..(25): SEQ ID NO: 7420; WAN024D8L_at; Start 48; Stop 72
agatgcctccttcataaaaccggta

SEQ ID NO: 147897 - DNA, 25 bp, Artificial
  probe
  misc_feature (1)..(25): SEQ ID NO: 7420; WAN024D8L_at; Start 33; Stop 57
gtatatcgataatgaagatgcctcc

SEQ ID NO: 147898 - DNA, 25 bp, Artificial
  probe
  misc_feature (1)..(25): SEQ ID NO: 7420; WAN024D8L_at; Start 9; Stop 33
cttcctctttgatataaaaatcatg

SEQ ID NO: 147899 - DNA, 25 bp, Artificial
  probe
  misc_feature (1)..(25): SEQ ID NO: 7420; WAN024D8L_at; Start 23; Stop 47
taaaaatcatgtatatcgataatga

SEQ ID NO: 147900 - DNA, 25 bp, Artificial
  probe
  misc_feature (1)..(25): SEQ ID NO: 7420; WAN024D8L_at; Start 40; Stop 64
gataatgaagatgcctccttcataa

SEQ ID NO: 147901 - DNA, 25 bp, Artificial
  probe
  misc_feature (1)..(25): SEQ ID NO: 7420; WAN024D8L_at; Start 36; Stop 60
tatcgataatgaagatgcctccttc

SEQ ID NO: 147902 - DNA, 25 bp, Artificial
  probe
  misc_feature (1)..(25): SEQ ID NO: 7420; WAN024D8L_at; Start 12; Stop 36
cctctttgatataaaaatcatgtat

SEQ ID NO: 147903 - DNA, 25 bp, Artificial
  probe
  misc_feature (1)..(25): SEQ ID NO: 7420; WAN024D8L_at; Start 38; Stop 62
tcgataatgaagatgcctccttcat

SEQ ID NO: 147904 - DNA, 25 bp, Artificial
  probe
  misc_feature (1)..(25): SEQ ID NO: 7420; WAN024D8L_at; Start 30; Stop 54
catgtatatcgataatgaagatgcc

SEQ ID NO: 147905 - DNA, 25 bp, Artificial
  probe
  misc_feature (1)..(25): SEQ ID NO: 7326; WAN024D8M_at; Start 76; Stop 100
caatttaatatttccattgccactc

SEQ ID NO: 147906 - DNA, 25 bp, Artificial
  probe
  misc_feature (1)..(25): SEQ ID NO: 7326; WAN024D8M_at; Start 57; Stop 81
ggcaggagcgtccatcttacaattt

SEQ ID NO: 147907 - DNA, 25 bp, Artificial
  probe
  misc_feature (1)..(25): SEQ ID NO: 7326; WAN024D8M_at; Start 14; Stop 38
tacttatccattcatttgcctttgc

SEQ ID NO: 147908 - DNA, 25 bp, Artificial
  probe
  misc_feature (1)..(25): SEQ ID NO: 7326; WAN024D8M_at; Start 25; Stop 49
tcatttgcctttgctttaaagaaaa

SEQ ID NO: 147909 - DNA, 25 bp, Artificial
  probe
  misc_feature (1)..(25): SEQ ID NO: 7326; WAN024D8M_at; Start 52; Stop 76
tcagcggcaggagcgtccatcttac

SEQ ID NO: 147910 - DNA, 25 bp, Artificial
  probe
  misc_feature (1)..(25): SEQ ID NO: 7326; WAN024D8M_at; Start 62; Stop 86
gagcgtccatcttacaatttaatat

SEQ ID NO: 147911 - DNA, 25 bp, Artificial
  probe
  misc_feature (1)..(25): SEQ ID NO: 7326; WAN024D8M_at; Start 39; Stop 63
tttaaagaaaaaatcagcggcagga

SEQ ID NO: 147912 - DNA, 25 bp, Artificial
  probe
  misc_feature (1)..(25): SEQ ID NO: 7326; WAN024D8M_at; Start 38; Stop 62
ctttaaagaaaaaatcagcggcagg

SEQ ID NO: 147913 - DNA, 25 bp, Artificial
  probe
  misc_feature (1)..(25): SEQ ID NO: 7326; WAN024D8M_at; Start 91; Stop 115
attgccactctttctaaggcctttg

SEQ ID NO: 147914 - DNA, 25 bp, Artificial
  probe
  misc_feature (1)..(25): SEQ ID NO: 7326; WAN024D8M_at; Start 37; Stop 61
gctttaaagaaaaaatcagcggcag

SEQ ID NO: 147915 - DNA, 25 bp, Artificial
  probe
  misc_feature (1)..(25): SEQ ID NO: 7326; WAN024D8M_at; Start 86; Stop 110
tttccattgccactctttctaaggc

SEQ ID NO: 147916 - DNA, 25 bp, Artificial
  probe
  misc_feature (1)..(25): SEQ ID NO: 7326; WAN024D8M_at; Start 43; Stop 67
aagaaaaaatcagcggcaggagcgt

SEQ ID NO: 147917 - DNA, 25 bp, Artificial
  probe
  misc_feature (1)..(25): SEQ ID NO: 7326; WAN024D8M_at; Start 94; Stop 118
gccactctttctaaggcctttgtaa

SEQ ID NO: 147918 - DNA, 25 bp, Artificial
  probe
  misc_feature (1)..(25): SEQ ID NO: 7326; WAN024D8M_at; Start 56; Stop 80
cggcaggagcgtccatcttacaatt

SEQ ID NO: 147919 - DNA, 25 bp, Artificial
  probe
  misc_feature (1)..(25): SEQ ID NO: 7326; WAN024D8M_at; Start 64; Stop 88
gcgtccatcttacaatttaatattt

SEQ ID NO: 147920 - DNA, 25 bp, Artificial
  probe
  misc_feature (1)..(25): SEQ ID NO: 7326; WAN024D8M_at; Start 61; Stop 85
ggagcgtccatcttacaatttaata

SEQ ID NO: 147921 - DNA, 25 bp, Artificial
  probe
  misc_feature (1)..(25): SEQ ID NO: 7326; WAN024D8M_at; Start 9; Stop 33
tactatacttatccattcatttgcc

SEQ ID NO: 147922 - DNA, 25 bp, Artificial
  probe
  misc_feature (1)..(25): SEQ ID NO: 7326; WAN024D8M_at; Start 41; Stop 65
taaagaaaaaatcagcggcaggagc

SEQ ID NO: 147923 - DNA, 25 bp, Artificial
  probe
  misc_feature (1)..(25): SEQ ID NO: 7326; WAN024D8M_at; Start 48; Stop 72
aaaatcagcggcaggagcgtccatc

SEQ ID NO: 147924 - DNA, 25 bp, Artificial
  probe
  misc_feature (1)..(25): SEQ ID NO: 7326; WAN024D8M_at; Start 51; Stop 75
atcagcggcaggagcgtccatctta

SEQ ID NO: 147925 - DNA, 25 bp, Artificial
  probe
  misc_feature (1)..(25): SEQ ID NO: 7326; WAN024D8M_at; Start 54; Stop 78
agcggcaggagcgtccatcttacaa

SEQ ID NO: 147926 - DNA, 25 bp, Artificial
  probe
  misc_feature (1)..(25): SEQ ID NO: 7326; WAN024D8M_at; Start 55; Stop 79
gcggcaggagcgtccatcttacaat

SEQ ID NO: 147927 - DNA, 25 bp, Artificial
  probe
  misc_feature (1)..(25): SEQ ID NO: 7326; WAN024D8M_at; Start 35; Stop 59
ttgctttaaagaaaaaatcagcggc

SEQ ID NO: 147928 - DNA, 25 bp, Artificial
  probe
  misc_feature (1)..(25): SEQ ID NO: 7326; WAN024D8M_at; Start 88; Stop 112
tccattgccactctttctaaggcct

SEQ ID NO: 147929 - DNA, 25 bp, Artificial
  probe
  misc_feature (1)..(25): SEQ ID NO: 7326; WAN024D8M_at; Start 59; Stop 83
caggagcgtccatcttacaatttaa

SEQ ID NO: 147930 - DNA, 25 bp, Artificial
  probe
  misc_feature (1)..(25): SEQ ID NO: 7326; WAN024D8M_at; Start 50; Stop 74
aatcagcggcaggagcgtccatctt

SEQ ID NO: 147931 - DNA, 25 bp, Artificial
  probe
  misc_feature (1)..(25): SEQ ID NO: 7326; WAN024D8M_at; Start 42; Stop 66
aaagaaaaaatcagcggcaggagcg

SEQ ID NO: 147932 - DNA, 25 bp, Artificial
  probe
  misc_feature (1)..(25): SEQ ID NO: 7326; WAN024D8M_at; Start 84; Stop 108
tatttccattgccactctttctaag

SEQ ID NO: 147933 - DNA, 25 bp, Artificial
  probe
  misc_feature (1)..(25): SEQ ID NO: 7326; WAN024D8M_at; Start 58; Stop 82
gcaggagcgtccatcttacaattta

SEQ ID NO: 147934 - DNA, 25 bp, Artificial
  probe
  misc_feature (1)..(25): SEQ ID NO: 7326; WAN024D8M_at; Start 1; Stop 25
gtgtcaattactatacttatccatt

SEQ ID NO: 147935 - DNA, 25 bp, Artificial
  probe
  misc_feature (1)..(25): SEQ ID NO: 7326; WAN024D8M_at; Start 47; Stop 71
aaaaatcagcggcaggagcgtccat

SEQ ID NO: 147936 - DNA, 25 bp, Artificial
  probe
  misc_feature (1)..(25): SEQ ID NO: 7326; WAN024D8M_at; Start 21; Stop 45
ccattcatttgcctttgctttaaag

SEQ ID NO: 147937 - DNA, 25 bp, Artificial
  probe
  misc_feature (1)..(25): SEQ ID NO: 7326; WAN024D8M_at; Start 33; Stop 57
ctttgctttaaagaaaaaatcagcg

SEQ ID NO: 147938 - DNA, 25 bp, Artificial
  probe
  misc_feature (1)..(25): SEQ ID NO: 7326; WAN024D8M_at; Start 96; Stop 120
cactctttctaaggcctttgtaagt

SEQ ID NO: 147939 - DNA, 25 bp, Artificial
  probe
  misc_feature (1)..(25): SEQ ID NO: 2876; WAN024D8N_at; Start 772; Stop 796
tgtcaaagcattacagagtacactc

SEQ ID NO: 147940 - DNA, 25 bp, Artificial
  probe
  misc_feature (1)..(25): SEQ ID NO: 2876; WAN024D8N_at; Start 142; Stop 166
ggaggcagcttcattatcgatatac

SEQ ID NO: 147941 - DNA, 25 bp, Artificial
  probe
  misc_feature (1)..(25): SEQ ID NO: 2876; WAN024D8N_at; Start 785; Stop 809
cagagtacactcaaagaaaaagaat

SEQ ID NO: 147942 - DNA, 25 bp, Artificial
  probe
  misc_feature (1)..(25): SEQ ID NO: 2876; WAN024D8N_at; Start 881; Stop 905
catctgccagcaaattttctatcta

SEQ ID NO: 147943 - DNA, 25 bp, Artificial
  probe
  misc_feature (1)..(25): SEQ ID NO: 2876; WAN024D8N_at; Start 817; Stop 841
gctgaaactcttcttttaaacactg

SEQ ID NO: 147944 - DNA, 25 bp, Artificial
  probe
  misc_feature (1)..(25): SEQ ID NO: 2876; WAN024D8N_at; Start 802; Stop 826
aaaagaatgaatgtagctgaaactc

SEQ ID NO: 147945 - DNA, 25 bp, Artificial
  probe
  misc_feature (1)..(25): SEQ ID NO: 2876; WAN024D8N_at; Start 54; Stop 78
caatgagaagtattcaagtgcaggt

SEQ ID NO: 147946 - DNA, 25 bp, Artificial
  probe
  misc_feature (1)..(25): SEQ ID NO: 2876; WAN024D8N_at; Start 833; Stop 857
taaacactgaactacctataaaaga

SEQ ID NO: 147947 - DNA, 25 bp, Artificial
  probe
  misc_feature (1)..(25): SEQ ID NO: 2876; WAN024D8N_at; Start 631; Stop 655
gaaattgatgatgataaagcacttg

SEQ ID NO: 147948 - DNA, 25 bp, Artificial
  probe
  misc_feature (1)..(25): SEQ ID NO: 2876; WAN024D8N_at; Start 249; Stop 273
tgtcagtgcaaacggagaaaagttt

SEQ ID NO: 147949 - DNA, 25 bp, Artificial
  probe
  misc_feature (1)..(25): SEQ ID NO: 2876; WAN024D8N_at; Start 198; Stop 222
aaatagcacttatagtatgtcagac

SEQ ID NO: 147950 - DNA, 25 bp, Artificial
  probe
  misc_feature (1)..(25): SEQ ID NO: 2876; WAN024D8N_at; Start 531; Stop 555
gatggacgctcctgccgctgatttt

SEQ ID NO: 147951 - DNA, 25 bp, Artificial
  probe
  misc_feature (1)..(25): SEQ ID NO: 2876; WAN024D8N_at; Start 98; Stop 122
aagagaattcaacttatgcagaagg

SEQ ID NO: 147952 - DNA, 25 bp, Artificial
  probe
  misc_feature (1)..(25): SEQ ID NO: 2876; WAN024D8N_at; Start 355; Stop 379
cacgagaattgttgttatcttgctg

SEQ ID NO: 147953 - DNA, 25 bp, Artificial
  probe
  misc_feature (1)..(25): SEQ ID NO: 2876; WAN024D8N_at; Start 914; Stop 938
gatacaagggaaaacttccaagtga

SEQ ID NO: 147954 - DNA, 25 bp, Artificial
  probe
  misc_feature (1)..(25): SEQ ID NO: 2876; WAN024D8N_at; Start 645; Stop 669
taaagcacttgaagatgtagcaaga

SEQ ID NO: 147955 - DNA, 25 bp, Artificial
  probe
  misc_feature (1)..(25): SEQ ID NO: 2876; WAN024D8N_at; Start 671; Stop 695
tcttagatgatcattttgcaacgaa

SEQ ID NO: 147956 - DNA, 25 bp, Artificial
  probe
  misc_feature (1)..(25): SEQ ID NO: 2876; WAN024D8N_at; Start 703; Stop 727
caaggcacgcttgaaaaaatatcta

SEQ ID NO: 147957 - DNA, 25 bp, Artificial
  probe
  misc_feature (1)..(25): SEQ ID NO: 2876; WAN024D8N_at; Start 544; Stop 568
gccgctgattttttctttaaagcaa

SEQ ID NO: 147958 - DNA, 25 bp, Artificial
  probe
  misc_feature (1)..(25): SEQ ID NO: 2876; WAN024D8N_at; Start 558; Stop 582
ctttaaagcaaaggcaaatgaatgg

SEQ ID NO: 147959 - DNA, 25 bp, Artificial
  probe
  misc_feature (1)..(25): SEQ ID NO: 2876; WAN024D8N_at; Start 486; Stop 510
tacaaaggccttagaaagagtggca

SEQ ID NO: 147960 - DNA, 25 bp, Artificial
  probe
  misc_feature (1)..(25): SEQ ID NO: 2876; WAN024D8N_at; Start 239; Stop 263
caagttacattgtcagtgcaaacgg

SEQ ID NO: 147961 - DNA, 25 bp, Artificial
  probe
  misc_feature (1)..(25): SEQ ID NO: 2876; WAN024D8N_at; Start 454; Stop 478
tcaaccttgcttcaaccgaatcaaa

SEQ ID NO: 147962 - DNA, 25 bp, Artificial
  probe
  misc_feature (1)..(25): SEQ ID NO: 2876; WAN024D8N_at; Start 929; Stop 953
ttccaagtgaagtccgtaatttagc

SEQ ID NO: 147963 - DNA, 25 bp, Artificial
  probe
  misc_feature (1)..(25): SEQ ID NO: 2876; WAN024D8N_at; Start 943; Stop 967
cgtaatttagcttgcaaacatcaca

SEQ ID NO: 147964 - DNA, 25 bp, Artificial
  probe
  misc_feature (1)..(25): SEQ ID NO: 2876; WAN024D8N_at; Start 847; Stop 871
cctataaaagagatagcagaatctg

SEQ ID NO: 147965 - DNA, 25 bp, Artificial
  probe
  misc_feature (1)..(25): SEQ ID NO: 2876; WAN024D8N_at; Start 273; Stop 297
taatccgtatcaaactattaccgca

SEQ ID NO: 147966 - DNA, 25 bp, Artificial
  probe
  misc_feature (1)..(25): SEQ ID NO: 2876; WAN024D8N_at; Start 471; Stop 495
gaatcaaataatacttacaaaggcc

SEQ ID NO: 147967 - DNA, 25 bp, Artificial
  probe
  misc_feature (1)..(25): SEQ ID NO: 2876; WAN024D8N_at; Start 865; Stop 889
gaatctgttggatattcatctgcca

SEQ ID NO: 147968 - DNA, 25 bp, Artificial
  probe
  misc_feature (1)..(25): SEQ ID NO: 2876; WAN024D8N_at; Start 127; Stop 151
tattggttttatgaaggaggcagct

SEQ ID NO: 147969 - DNA, 25 bp, Artificial
  probe
  misc_feature (1)..(25): SEQ ID NO: 2876; WAN024D8N_at; Start 688; Stop 712
gcaacgaatgtaaatcaaggcacgc

SEQ ID NO: 147970 - DNA, 25 bp, Artificial
  probe
  misc_feature (1)..(25): SEQ ID NO: 2876; WAN024D8N_at; Start 518; Stop 542
tattaaattgtaagatggacgctcc

SEQ ID NO: 147971 - DNA, 25 bp, Artificial
  probe
  misc_feature (1)..(25): SEQ ID NO: 2876; WAN024D8N_at; Start 69; Stop 93
aagtgcaggtcatacattttgttgg

SEQ ID NO: 147972 - DNA, 25 bp, Artificial
  probe
  misc_feature (1)..(25): SEQ ID NO: 2876; WAN024D8N_at; Start 180; Stop 204
caaagaggaagtagttcaaaatagc

SEQ ID NO: 147973 - DNA, 25 bp, Artificial
  probe
  misc_feature (1)..(25): SEQ ID NO: 1378; WAN024D8O_at; Start 618; Stop 642
ttatcctacacaaaaacctattctg

SEQ ID NO: 147974 - DNA, 25 bp, Artificial
  probe
  misc_feature (1)..(25): SEQ ID NO: 1378; WAN024D8O_at; Start 481; Stop 505
cgagatggaaactctaaaactatat

SEQ ID NO: 147975 - DNA, 25 bp, Artificial
  probe
  misc_feature (1)..(25): SEQ ID NO: 1378; WAN024D8O_at; Start 725; Stop 749
tagcctccaagattttgaatagaaa

SEQ ID NO: 147976 - DNA, 25 bp, Artificial
  probe
  misc_feature (1)..(25): SEQ ID NO: 1378; WAN024D8O_at; Start 757; Stop 781
gggattgatttatctgaggaagcta

SEQ ID NO: 147977 - DNA, 25 bp, Artificial
  probe
  misc_feature (1)..(25): SEQ ID NO: 1378; WAN024D8O_at; Start 226; Stop 250
ggcagtattttcgttcattgtgata

SEQ ID NO: 147978 - DNA, 25 bp, Artificial
  probe
  misc_feature (1)..(25): SEQ ID NO: 1378; WAN024D8O_at; Start 993; Stop 1017
taatgaatgtctgaatgagagtatc

SEQ ID NO: 147979 - DNA, 25 bp, Artificial
  probe
  misc_feature (1)..(25): SEQ ID NO: 1378; WAN024D8O_at; Start 712; Stop 736
ggaactactttagtagcctccaaga

SEQ ID NO: 147980 - DNA, 25 bp, Artificial
  probe
  misc_feature (1)..(25): SEQ ID NO: 1378; WAN024D8O_at; Start 840; Stop 864
taaaggaatcgaagcatatagaacc

SEQ ID NO: 147981 - DNA, 25 bp, Artificial
  probe
  misc_feature (1)..(25): SEQ ID NO: 1378; WAN024D8O_at; Start 1032; Stop 1056
tgctataaactccaaaaaacttgat

SEQ ID NO: 147982 - DNA, 25 bp, Artificial
  probe
  misc_feature (1)..(25): SEQ ID NO: 1378; WAN024D8O_at; Start 850; Stop 874
gaagcatatagaaccaaaactgagg

SEQ ID NO: 147983 - DNA, 25 bp, Artificial
  probe
  misc_feature (1)..(25): SEQ ID NO: 1378; WAN024D8O_at; Start 449; Stop 473
caaatatcgaccaaatactagtgga

SEQ ID NO: 147984 - DNA, 25 bp, Artificial
  probe
  misc_feature (1)..(25): SEQ ID NO: 1378; WAN024D8O_at; Start 863; Stop 887
ccaaaactgaggaagaggaaaacat

SEQ ID NO: 147985 - DNA, 25 bp, Artificial
  probe
  misc_feature (1)..(25): SEQ ID NO: 1378; WAN024D8O_at; Start 309; Stop 333
tcaaagcgaaattatatggaactat

SEQ ID NO: 147986 - DNA, 25 bp, Artificial
  probe
  misc_feature (1)..(25): SEQ ID NO: 1378; WAN024D8O_at; Start 191; Stop 215
gattagaagaatgcaaaagagtgct

SEQ ID NO: 147987 - DNA, 25 bp, Artificial
  probe
  misc_feature (1)..(25): SEQ ID NO: 1378; WAN024D8O_at; Start 350; Stop 374
caaaaaagggattattgaacaatca

SEQ ID NO: 147988 - DNA, 25 bp, Artificial
  probe
  misc_feature (1)..(25): SEQ ID NO: 1378; WAN024D8O_at; Start 696; Stop 720
cccgttctgtggaagtggaactact

SEQ ID NO: 147989 - DNA, 25 bp, Artificial
  probe
  misc_feature (1)..(25): SEQ ID NO: 1378; WAN024D8O_at; Start 1135; Stop 1159
gaccattttgaacttacaatcgaaa

SEQ ID NO: 147990 - DNA, 25 bp, Artificial
  probe
  misc_feature (1)..(25): SEQ ID NO: 1378; WAN024D8O_at; Start 464; Stop 488
tactagtggaacgaaaacgagatgg

SEQ ID NO: 147991 - DNA, 25 bp, Artificial
  probe
  misc_feature (1)..(25): SEQ ID NO: 1378; WAN024D8O_at; Start 1114; Stop 1138
cctgaaaatataatagtagttgacc

SEQ ID NO: 147992 - DNA, 25 bp, Artificial
  probe
  misc_feature (1)..(25): SEQ ID NO: 1378; WAN024D8O_at; Start 772; Stop 796
gaggaagctatcaatataactcagc

SEQ ID NO: 147993 - DNA, 25 bp, Artificial
  probe
  misc_feature (1)..(25): SEQ ID NO: 1378; WAN024D8O_at; Start 133; Stop 157
tattcattcgaagatacgtggactt

SEQ ID NO: 147994 - DNA, 25 bp, Artificial
  probe
  misc_feature (1)..(25): SEQ ID NO: 1378; WAN024D8O_at; Start 788; Stop 812
taactcagcaacgtctggaaaatgt

SEQ ID NO: 147995 - DNA, 25 bp, Artificial
  probe
  misc_feature (1)..(25): SEQ ID NO: 1378; WAN024D8O_at; Start 72; Stop 96
tatggaccctcctttctttacacag

SEQ ID NO: 147996 - DNA, 25 bp, Artificial
  probe
  misc_feature (1)..(25): SEQ ID NO: 1378; WAN024D8O_at; Start 147; Stop 171
tacgtggacttcgattgaggattac

SEQ ID NO: 147997 - DNA, 25 bp, Artificial
  probe
  misc_feature (1)..(25): SEQ ID NO: 1378; WAN024D8O_at; Start 522; Stop 546
tggtaactatattctagcaaaagag

SEQ ID NO: 147998 - DNA, 25 bp, Artificial
  probe
  misc_feature (1)..(25): SEQ ID NO: 1378; WAN024D8O_at; Start 552; Stop 576
tggagttcccctttcagatgtttgg

SEQ ID NO: 147999 - DNA, 25 bp, Artificial
  probe
  misc_feature (1)..(25): SEQ ID NO: 1378; WAN024D8O_at; Start 536; Stop 560
tagcaaaagagaaaaatggagttcc

SEQ ID NO: 148000 - DNA, 25 bp, Artificial
  probe
  misc_feature (1)..(25): SEQ ID NO: 1378; WAN024D8O_at; Start 682; Stop 706
gatatagttttagacccgttctgtg

SEQ ID NO: 148001 - DNA, 25 bp, Artificial
  probe
  misc_feature (1)..(25): SEQ ID NO: 1378; WAN024D8O_at; Start 896; Stop 920
tattacaggcaaaaattgttcaaag

SEQ ID NO: 148002 - DNA, 25 bp, Artificial
  probe
  misc_feature (1)..(25): SEQ ID NO: 1378; WAN024D8O_at; Start 601; Stop 625
gctaaagaaagagtaggttatccta

SEQ ID NO: 148003 - DNA, 25 bp, Artificial
  probe
  misc_feature (1)..(25): SEQ ID NO: 1378; WAN024D8O_at; Start 60; Stop 84
tgatttaatctatatggaccctcct

SEQ ID NO: 148004 - DNA, 25 bp, Artificial
  probe
  misc_feature (1)..(25): SEQ ID NO: 1378; WAN024D8O_at; Start 561; Stop 585
cctttcagatgtttggaatatacca

SEQ ID NO: 148005 - DNA, 25 bp, Artificial
  probe
  misc_feature (1)..(25): SEQ ID NO: 1378; WAN024D8O_at; Start 204; Stop 228
caaaagagtgctaaaaaatagtggc

SEQ ID NO: 148006 - DNA, 25 bp, Artificial
  probe
  misc_feature (1)..(25): SEQ ID NO: 1378; WAN024D8O_at; Start 1009; Stop 1033
gagagtatctctttattacagaatg

SEQ ID NO: 148007 - DNA, 25 bp, Artificial
  probe
  misc_feature (1)..(25): SEQ ID NO: 3043; WAN024D8P_at; Start 152; Stop 176
cagatattgcaaataaaaaaacagg

SEQ ID NO: 148008 - DNA, 25 bp, Artificial
  probe
  misc_feature (1)..(25): SEQ ID NO: 3043; WAN024D8P_at; Start 88; Stop 112
tatggagattctgcctgggaacatt

SEQ ID NO: 148009 - DNA, 25 bp, Artificial
  probe
  misc_feature (1)..(25): SEQ ID NO: 3043; WAN024D8P_at; Start 54; Stop 78
aacattgtataacggtattggaggg

SEQ ID NO: 148010 - DNA, 25 bp, Artificial
  probe
  misc_feature (1)..(25): SEQ ID NO: 3043; WAN024D8P_at; Start 59; Stop 83
tgtataacggtattggagggaaata

SEQ ID NO: 148011 - DNA, 25 bp, Artificial
  probe
  misc_feature (1)..(25): SEQ ID NO: 3043; WAN024D8P_at; Start 141; Stop 165
tagtattctaacagatattgcaaat

SEQ ID NO: 148012 - DNA, 25 bp, Artificial
  probe
  misc_feature (1)..(25): SEQ ID NO: 3043; WAN024D8P_at; Start 113; Stop 137
taagagcagtgaccggtattgattt

SEQ ID NO: 148013 - DNA, 25 bp, Artificial
  probe
  misc_feature (1)..(25): SEQ ID NO: 3043; WAN024D8P_at; Start 92; Stop 116
gagattctgcctgggaacatttaag

SEQ ID NO: 148014 - DNA, 25 bp, Artificial
  probe
  misc_feature (1)..(25): SEQ ID NO: 3043; WAN024D8P_at; Start 85; Stop 109
tattatggagattctgcctgggaac

SEQ ID NO: 148015 - DNA, 25 bp, Artificial
  probe
  misc_feature (1)..(25): SEQ ID NO: 3043; WAN024D8P_at; Start 9; Stop 33
ctatccaaatagaactcaagctata

SEQ ID NO: 148016 - DNA, 25 bp, Artificial
  probe
  misc_feature (1)..(25): SEQ ID NO: 3043; WAN024D8P_at; Start 82; Stop 106
tattattatggagattctgcctggg

SEQ ID NO: 148017 - DNA, 25 bp, Artificial
  probe
  misc_feature (1)..(25): SEQ ID NO: 3043; WAN024D8P_at; Start 36; Stop 60
aattcagcaaactttagaaacattg

SEQ ID NO: 148018 - DNA, 25 bp, Artificial
  probe
  misc_feature (1)..(25): SEQ ID NO: 3043; WAN024D8P_at; Start 24; Stop 48
tcaagctataaaaattcagcaaact

SEQ ID NO: 148019 - DNA, 25 bp, Artificial
  probe
  misc_feature (1)..(25): SEQ ID NO: 3043; WAN024D8P_at; Start 107; Stop 131
aacatttaagagcagtgaccggtat

SEQ ID NO: 148020 - DNA, 25 bp, Artificial
  probe
  misc_feature (1)..(25): SEQ ID NO: 3043; WAN024D8P_at; Start 101; Stop 125
cctgggaacatttaagagcagtgac

SEQ ID NO: 148021 - DNA, 25 bp, Artificial
  probe
  misc_feature (1)..(25): SEQ ID NO: 3043; WAN024D8P_at; Start 111; Stop 135
tttaagagcagtgaccggtattgat

SEQ ID NO: 148022 - DNA, 25 bp, Artificial
  probe
  misc_feature (1)..(25): SEQ ID NO: 3043; WAN024D8P_at; Start 109; Stop 133
catttaagagcagtgaccggtattg

SEQ ID NO: 148023 - DNA, 25 bp, Artificial
  probe
  misc_feature (1)..(25): SEQ ID NO: 3043; WAN024D8P_at; Start 137; Stop 161
tacttagtattctaacagatattgc

SEQ ID NO: 148024 - DNA, 25 bp, Artificial
  probe
  misc_feature (1)..(25): SEQ ID NO: 3043; WAN024D8P_at; Start 66; Stop 90
cggtattggagggaaatattattat

SEQ ID NO: 148025 - DNA, 25 bp, Artificial
  probe
  misc_feature (1)..(25): SEQ ID NO: 3043; WAN024D8P_at; Start 103; Stop 127
tgggaacatttaagagcagtgaccg

SEQ ID NO: 148026 - DNA, 25 bp, Artificial
  probe
  misc_feature (1)..(25): SEQ ID NO: 3043; WAN024D8P_at; Start 28; Stop 52
gctataaaaattcagcaaactttag

SEQ ID NO: 148027 - DNA, 25 bp, Artificial
  probe
  misc_feature (1)..(25): SEQ ID NO: 3043; WAN024D8P_at; Start 18; Stop 42
tagaactcaagctataaaaattcag

SEQ ID NO: 148028 - DNA, 25 bp, Artificial
  probe
  misc_feature (1)..(25): SEQ ID NO: 3043; WAN024D8P_at; Start 96; Stop 120
ttctgcctgggaacatttaagagca

SEQ ID NO: 148029 - DNA, 25 bp, Artificial
  probe
  misc_feature (1)..(25): SEQ ID NO: 3043; WAN024D8P_at; Start 52; Stop 76
gaaacattgtataacggtattggag

SEQ ID NO: 148030 - DNA, 25 bp, Artificial
  probe
  misc_feature (1)..(25): SEQ ID NO: 3043; WAN024D8P_at; Start 90; Stop 114
tggagattctgcctgggaacattta

SEQ ID NO: 148031 - DNA, 25 bp, Artificial
  probe
  misc_feature (1)..(25): SEQ ID NO: 3043; WAN024D8P_at; Start 43; Stop 67
caaactttagaaacattgtataacg

SEQ ID NO: 148032 - DNA, 25 bp, Artificial
  probe
  misc_feature (1)..(25): SEQ ID NO: 3043; WAN024D8P_at; Start 78; Stop 102
gaaatattattatggagattctgcc

SEQ ID NO: 148033 - DNA, 25 bp, Artificial
  probe
  misc_feature (1)..(25): SEQ ID NO: 3043; WAN024D8P_at; Start 105; Stop 129
ggaacatttaagagcagtgaccggt

SEQ ID NO: 148034 - DNA, 25 bp, Artificial
  probe
  misc_feature (1)..(25): SEQ ID NO: 3043; WAN024D8P_at; Start 99; Stop 123
tgcctgggaacatttaagagcagtg

SEQ ID NO: 148035 - DNA, 25 bp, Artificial
  probe
  misc_feature (1)..(25): SEQ ID NO: 3043; WAN024D8P_at; Start 56; Stop 80
cattgtataacggtattggagggaa

SEQ ID NO: 148036 - DNA, 25 bp, Artificial
  probe
  misc_feature (1)..(25): SEQ ID NO: 3043; WAN024D8P_at; Start 125; Stop 149
ccggtattgatttacttagtattct

SEQ ID NO: 148037 - DNA, 25 bp, Artificial
  probe
  misc_feature (1)..(25): SEQ ID NO: 3043; WAN024D8P_at; Start 94; Stop 118
gattctgcctgggaacatttaagag

SEQ ID NO: 148038 - DNA, 25 bp, Artificial
  probe
  misc_feature (1)..(25): SEQ ID NO: 3043; WAN024D8P_at; Start 5; Stop 29
tctactatccaaatagaactcaagc

SEQ ID NO: 148039 - DNA, 25 bp, Artificial
  probe
  misc_feature (1)..(25): SEQ ID NO: 3043; WAN024D8P_at; Start 50; Stop 74
tagaaacattgtataacggtattgg

SEQ ID NO: 148040 - DNA, 25 bp, Artificial
  probe
  misc_feature (1)..(25): SEQ ID NO: 3043; WAN024D8P_at; Start 106; Stop 130
gaacatttaagagcagtgaccggta

SEQ ID NO: 148041 - DNA, 25 bp, Artificial
  probe
  misc_feature (1)..(25): SEQ ID NO: 2396; WAN024D8Q_at; Start 20; Stop 44
gccattatttgatatacagagtttt

SEQ ID NO: 148042 - DNA, 25 bp, Artificial
  probe
  misc_feature (1)..(25): SEQ ID NO: 2396; WAN024D8Q_at; Start 52; Stop 76
tcatttgaagaaggagaaaatatcg

SEQ ID NO: 148043 - DNA, 25 bp, Artificial
  probe
  misc_feature (1)..(25): SEQ ID NO: 2396; WAN024D8Q_at; Start 165; Stop 189
tggtacagaaaatactctaactaat

SEQ ID NO: 148044 - DNA, 25 bp, Artificial
  probe
  misc_feature (1)..(25): SEQ ID NO: 2396; WAN024D8Q_at; Start 64; Stop 88
ggagaaaatatcgatttgtatcaaa

SEQ ID NO: 148045 - DNA, 25 bp, Artificial
  probe
  misc_feature (1)..(25): SEQ ID NO: 2396; WAN024D8Q_at; Start 124; Stop 148
tttttagaagaagctgcagtactat

SEQ ID NO: 148046 - DNA, 25 bp, Artificial
  probe
  misc_feature (1)..(25): SEQ ID NO: 2396; WAN024D8Q_at; Start 116; Stop 140
ctggttcatttttagaagaagctgc

SEQ ID NO: 148047 - DNA, 25 bp, Artificial
  probe
  misc_feature (1)..(25): SEQ ID NO: 2396; WAN024D8Q_at; Start 15; Stop 39
taagagccattatttgatatacaga

SEQ ID NO: 148048 - DNA, 25 bp, Artificial
  probe
  misc_feature (1)..(25): SEQ ID NO: 2396; WAN024D8Q_at; Start 112; Stop 136
tatgctggttcatttttagaagaag

SEQ ID NO: 148049 - DNA, 25 bp, Artificial
  probe
  misc_feature (1)..(25): SEQ ID NO: 2396; WAN024D8Q_at; Start 75; Stop 99
cgatttgtatcaaaataaaggtcgt

SEQ ID NO: 148050 - DNA, 25 bp, Artificial
  probe
  misc_feature (1)..(25): SEQ ID NO: 2396; WAN024D8Q_at; Start 18; Stop 42
gagccattatttgatatacagagtt

SEQ ID NO: 148051 - DNA, 25 bp, Artificial
  probe
  misc_feature (1)..(25): SEQ ID NO: 2396; WAN024D8Q_at; Start 121; Stop 145
tcatttttagaagaagctgcagtac

SEQ ID NO: 148052 - DNA, 25 bp, Artificial
  probe
  misc_feature (1)..(25): SEQ ID NO: 2396; WAN024D8Q_at; Start 94; Stop 118
ggtcgttttttatacaaatatgctg

SEQ ID NO: 148053 - DNA, 25 bp, Artificial
  probe
  misc_feature (1)..(25): SEQ ID NO: 2396; WAN024D8Q_at; Start 100; Stop 124
tttttatacaaatatgctggttcat

SEQ ID NO: 148054 - DNA, 25 bp, Artificial
  probe
  misc_feature (1)..(25): SEQ ID NO: 2396; WAN024D8Q_at; Start 4; Stop 28
gcaaatgataataagagccattatt

SEQ ID NO: 148055 - DNA, 25 bp, Artificial
  probe
  misc_feature (1)..(25): SEQ ID NO: 2396; WAN024D8Q_at; Start 2; Stop 26
tggcaaatgataataagagccatta

SEQ ID NO: 148056 - DNA, 25 bp, Artificial
  probe
  misc_feature (1)..(25): SEQ ID NO: 2396; WAN024D8Q_at; Start 108; Stop 132
caaatatgctggttcatttttagaa

SEQ ID NO: 148057 - DNA, 25 bp, Artificial
  probe
  misc_feature (1)..(25): SEQ ID NO: 2396; WAN024D8Q_at; Start 53; Stop 77
catttgaagaaggagaaaatatcga

SEQ ID NO: 148058 - DNA, 25 bp, Artificial
  probe
  misc_feature (1)..(25): SEQ ID NO: 2396; WAN024D8Q_at; Start 74; Stop 98
tcgatttgtatcaaaataaaggtcg

SEQ ID NO: 148059 - DNA, 25 bp, Artificial
  probe
  misc_feature (1)..(25): SEQ ID NO: 2396; WAN024D8Q_at; Start 25; Stop 49
tatttgatatacagagttttaggta

SEQ ID NO: 148060 - DNA, 25 bp, Artificial
  probe
  misc_feature (1)..(25): SEQ ID NO: 2396; WAN024D8Q_at; Start 44; Stop 68
taggtatttcatttgaagaaggaga

SEQ ID NO: 148061 - DNA, 25 bp, Artificial
  probe
  misc_feature (1)..(25): SEQ ID NO: 2396; WAN024D8Q_at; Start 95; Stop 119
gtcgttttttatacaaatatgctgg

SEQ ID NO: 148062 - DNA, 25 bp, Artificial
  probe
  misc_feature (1)..(25): SEQ ID NO: 2396; WAN024D8Q_at; Start 55; Stop 79
tttgaagaaggagaaaatatcgatt

SEQ ID NO: 148063 - DNA, 25 bp, Artificial
  probe
  misc_feature (1)..(25): SEQ ID NO: 2396; WAN024D8Q_at; Start 114; Stop 138
tgctggttcatttttagaagaagct

SEQ ID NO: 148064 - DNA, 25 bp, Artificial
  probe
  misc_feature (1)..(25): SEQ ID NO: 2396; WAN024D8Q_at; Start 110; Stop 134
aatatgctggttcatttttagaaga

SEQ ID NO: 148065 - DNA, 25 bp, Artificial
  probe
  misc_feature (1)..(25): SEQ ID NO: 2396; WAN024D8Q_at; Start 119; Stop 143
gttcatttttagaagaagctgcagt

SEQ ID NO: 148066 - DNA, 25 bp, Artificial
  probe
  misc_feature (1)..(25): SEQ ID NO: 2396; WAN024D8Q_at; Start 98; Stop 122
gttttttatacaaatatgctggttc

SEQ ID NO: 148067 - DNA, 25 bp, Artificial
  probe
  misc_feature (1)..(25): SEQ ID NO: 2396; WAN024D8Q_at; Start 122; Stop 146
catttttagaagaagctgcagtact

SEQ ID NO: 148068 - DNA, 25 bp, Artificial
  probe
  misc_feature (1)..(25): SEQ ID NO: 2396; WAN024D8Q_at; Start 118; Stop 142
ggttcatttttagaagaagctgcag

SEQ ID NO: 148069 - DNA, 25 bp, Artificial
  probe
  misc_feature (1)..(25): SEQ ID NO: 2396; WAN024D8Q_at; Start 61; Stop 85
gaaggagaaaatatcgatttgtatc

SEQ ID NO: 148070 - DNA, 25 bp, Artificial
  probe
  misc_feature (1)..(25): SEQ ID NO: 2396; WAN024D8Q_at; Start 16; Stop 40
aagagccattatttgatatacagag

SEQ ID NO: 148071 - DNA, 25 bp, Artificial
  probe
  misc_feature (1)..(25): SEQ ID NO: 2396; WAN024D8Q_at; Start 57; Stop 81
tgaagaaggagaaaatatcgatttg

SEQ ID NO: 148072 - DNA, 25 bp, Artificial
  probe
  misc_feature (1)..(25): SEQ ID NO: 2396; WAN024D8Q_at; Start 22; Stop 46
cattatttgatatacagagttttag

SEQ ID NO: 148073 - DNA, 25 bp, Artificial
  probe
  misc_feature (1)..(25): SEQ ID NO: 2396; WAN024D8Q_at; Start 30; Stop 54
gatatacagagttttaggtatttca

SEQ ID NO: 148074 - DNA, 25 bp, Artificial
  probe
  misc_feature (1)..(25): SEQ ID NO: 2396; WAN024D8Q_at; Start 163; Stop 187
tttggtacagaaaatactctaacta

SEQ ID NO: 148075 - DNA, 25 bp, Artificial
  probe
  misc_feature (1)..(25): SEQ ID NO: 965; WAN024D8R_at; Start 683; Stop 707
tattgtactttttcactctcaagaa

SEQ ID NO: 148076 - DNA, 25 bp, Artificial
  probe
  misc_feature (1)..(25): SEQ ID NO: 965; WAN024D8R_at; Start 117; Stop 141
tattctaaagactcaagggacatcg

SEQ ID NO: 148077 - DNA, 25 bp, Artificial
  probe
  misc_feature (1)..(25): SEQ ID NO: 965; WAN024D8R_at; Start 284; Stop 308
acgtcttgtctaattttctatatgc

SEQ ID NO: 148078 - DNA, 25 bp, Artificial
  probe
  misc_feature (1)..(25): SEQ ID NO: 965; WAN024D8R_at; Start 473; Stop 497
tatacaaattgaaaagtggcttggt

SEQ ID NO: 148079 - DNA, 25 bp, Artificial
  probe
  misc_feature (1)..(25): SEQ ID NO: 965; WAN024D8R_at; Start 314; Stop 338
cagtttccattatttatgctttgaa

SEQ ID NO: 148080 - DNA, 25 bp, Artificial
  probe
  misc_feature (1)..(25): SEQ ID NO: 965; WAN024D8R_at; Start 172; Stop 196
gctatgctcggtatgttaatggctg

SEQ ID NO: 148081 - DNA, 25 bp, Artificial
  probe
  misc_feature (1)..(25): SEQ ID NO: 965; WAN024D8R_at; Start 639; Stop 663
gatgtctattagtcagtatcttgtg

SEQ ID NO: 148082 - DNA, 25 bp, Artificial
  probe
  misc_feature (1)..(25): SEQ ID NO: 965; WAN024D8R_at; Start 698; Stop 722
ctctcaagaaaagcaagaagtattc

SEQ ID NO: 148083 - DNA, 25 bp, Artificial
  probe
  misc_feature (1)..(25): SEQ ID NO: 965; WAN024D8R_at; Start 130; Stop 154
caagggacatcgcttggtattaagc

SEQ ID NO: 148084 - DNA, 25 bp, Artificial
  probe
  misc_feature (1)..(25): SEQ ID NO: 965; WAN024D8R_at; Start 492; Stop 516
cttggtatttggtattttagtagct

SEQ ID NO: 148085 - DNA, 25 bp, Artificial
  probe
  misc_feature (1)..(25): SEQ ID NO: 965; WAN024D8R_at; Start 372; Stop 396
gggtattccaggtgatttaggatta

SEQ ID NO: 148086 - DNA, 25 bp, Artificial
  probe
  misc_feature (1)..(25): SEQ ID NO: 965; WAN024D8R_at; Start 578; Stop 602
ttatcaaagcaattgaacttcttcc

SEQ ID NO: 148087 - DNA, 25 bp, Artificial
  probe
  misc_feature (1)..(25): SEQ ID NO: 965; WAN024D8R_at; Start 75; Stop 99
tttgcttatctcgtttataccgccg

SEQ ID NO: 148088 - DNA, 25 bp, Artificial
  probe
  misc_feature (1)..(25): SEQ ID NO: 965; WAN024D8R_at; Start 191; Stop 215
tggctgttatacatgctaatcgagt

SEQ ID NO: 148089 - DNA, 25 bp, Artificial
  probe
  misc_feature (1)..(25): SEQ ID NO: 965; WAN024D8R_at; Start 220; Stop 244
agtagagatttttcccacaatacgg

SEQ ID NO: 148090 - DNA, 25 bp, Artificial
  probe
  misc_feature (1)..(25): SEQ ID NO: 965; WAN024D8R_at; Start 270; Stop 294
gaatcggatgatttacgtcttgtct

SEQ ID NO: 148091 - DNA, 25 bp, Artificial
  probe
  misc_feature (1)..(25): SEQ ID NO: 965; WAN024D8R_at; Start 63; Stop 87
aatatatctcagtttgcttatctcg

SEQ ID NO: 148092 - DNA, 25 bp, Artificial
  probe
  misc_feature (1)..(25): SEQ ID NO: 965; WAN024D8R_at; Start 40; Stop 64
agaaatttatattcatcaggcgtaa

SEQ ID NO: 148093 - DNA, 25 bp, Artificial
  probe
  misc_feature (1)..(25): SEQ ID NO: 965; WAN024D8R_at; Start 265; Stop 289
cagaagaatcggatgatttacgtct

SEQ ID NO: 148094 - DNA, 25 bp, Artificial
  probe
  misc_feature (1)..(25): SEQ ID NO: 965; WAN024D8R_at; Start 94; Stop 118
ccgccgatattgcttacattcttta

SEQ ID NO: 148095 - DNA, 25 bp, Artificial
  probe
  misc_feature (1)..(25): SEQ ID NO: 965; WAN024D8R_at; Start 87; Stop 111
gtttataccgccgatattgcttaca

SEQ ID NO: 148096 - DNA, 25 bp, Artificial
  probe
  misc_feature (1)..(25): SEQ ID NO: 965; WAN024D8R_at; Start 404; Stop 428
tagtagctattgtagtcaatacaat

SEQ ID NO: 148097 - DNA, 25 bp, Artificial
  probe
  misc_feature (1)..(25): SEQ ID NO: 965; WAN024D8R_at; Start 563; Stop 587
ctagtaatgatttgtttatcaaagc

SEQ ID NO: 148098 - DNA, 25 bp, Artificial
  probe
  misc_feature (1)..(25): SEQ ID NO: 965; WAN024D8R_at; Start 548; Stop 572
cgatgatgatgaatactagtaatga

SEQ ID NO: 148099 - DNA, 25 bp, Artificial
  probe
  misc_feature (1)..(25): SEQ ID NO: 965; WAN024D8R_at; Start 350; Stop 374
tactagtcatagtaagtaaattggg

SEQ ID NO: 148100 - DNA, 25 bp, Artificial
  probe
  misc_feature (1)..(25): SEQ ID NO: 965; WAN024D8R_at; Start 177; Stop 201
gctcggtatgttaatggctgttata

SEQ ID NO: 148101 - DNA, 25 bp, Artificial
  probe
  misc_feature (1)..(25): SEQ ID NO: 965; WAN024D8R_at; Start 336; Stop 360
gaatggcattgtgttactagtcata

SEQ ID NO: 148102 - DNA, 25 bp, Artificial
  probe
  misc_feature (1)..(25): SEQ ID NO: 965; WAN024D8R_at; Start 140; Stop 164
cgcttggtattaagcatatttcaaa

SEQ ID NO: 148103 - DNA, 25 bp, Artificial
  probe
  misc_feature (1)..(25): SEQ ID NO: 965; WAN024D8R_at; Start 362; Stop 386
taagtaaattgggtattccaggtga

SEQ ID NO: 148104 - DNA, 25 bp, Artificial
  probe
  misc_feature (1)..(25): SEQ ID NO: 965; WAN024D8R_at; Start 623; Stop 647
ttgtggcttcaaatacgatgtctat

SEQ ID NO: 148105 - DNA, 25 bp, Artificial
  probe
  misc_feature (1)..(25): SEQ ID NO: 965; WAN024D8R_at; Start 328; Stop 352
tatgctttgaatggcattgtgttac

SEQ ID NO: 148106 - DNA, 25 bp, Artificial
  probe
  misc_feature (1)..(25): SEQ ID NO: 965; WAN024D8R_at; Start 55; Stop 79
tcaggcgtaatatatctcagtttgc

SEQ ID NO: 148107 - DNA, 25 bp, Artificial
  probe
  misc_feature (1)..(25): SEQ ID NO: 965; WAN024D8R_at; Start 417; Stop 441
agtcaatacaattttgttagtcctg

SEQ ID NO: 148108 - DNA, 25 bp, Artificial
  probe
  misc_feature (1)..(25): SEQ ID NO: 965; WAN024D8R_at; Start 158; Stop 182
tttcaaacttttatgctatgctcgg

SEQ ID NO: 148109 - DNA, 25 bp, Artificial
  probe
  misc_feature (1)..(25): SEQ ID NO: 1617; WAN024D8S_at; Start 147; Stop 171
atacaatcccagtctctcgctctgc

SEQ ID NO: 148110 - DNA, 25 bp, Artificial
  probe
  misc_feature (1)..(25): SEQ ID NO: 1617; WAN024D8S_at; Start 1; Stop 25
atgagtattaaaactataaggagga

SEQ ID NO: 148111 - DNA, 25 bp, Artificial
  probe
  misc_feature (1)..(25): SEQ ID NO: 1617; WAN024D8S_at; Start 209; Stop 233
aactattttgggaggaagaagatga

SEQ ID NO: 148112 - DNA, 25 bp, Artificial
  probe
  misc_feature (1)..(25): SEQ ID NO: 1617; WAN024D8S_at; Start 152; Stop 176
atcccagtctctcgctctgccagtc

SEQ ID NO: 148113 - DNA, 25 bp, Artificial
  probe
  misc_feature (1)..(25): SEQ ID NO: 1617; WAN024D8S_at; Start 208; Stop 232
caactattttgggaggaagaagatg

SEQ ID NO: 148114 - DNA, 25 bp, Artificial
  probe
  misc_feature (1)..(25): SEQ ID NO: 1617; WAN024D8S_at; Start 2; Stop 26
tgagtattaaaactataaggaggac

SEQ ID NO: 148115 - DNA, 25 bp, Artificial
  probe
  misc_feature (1)..(25): SEQ ID NO: 1617; WAN024D8S_at; Start 148; Stop 172
tacaatcccagtctctcgctctgcc

SEQ ID NO: 148116 - DNA, 25 bp, Artificial
  probe
  misc_feature (1)..(25): SEQ ID NO: 1617; WAN024D8S_at; Start 181; Stop 205
tgcagatgtttagggaaaaccctag

SEQ ID NO: 148117 - DNA, 25 bp, Artificial
  probe
  misc_feature (1)..(25): SEQ ID NO: 1617; WAN024D8S_at; Start 149; Stop 173
acaatcccagtctctcgctctgcca

SEQ ID NO: 148118 - DNA, 25 bp, Artificial
  probe
  misc_feature (1)..(25): SEQ ID NO: 1617; WAN024D8S_at; Start 150; Stop 174
caatcccagtctctcgctctgccag

SEQ ID NO: 148119 - DNA, 25 bp, Artificial
  probe
  misc_feature (1)..(25): SEQ ID NO: 1617; WAN024D8S_at; Start 146; Stop 170
aatacaatcccagtctctcgctctg

SEQ ID NO: 148120 - DNA, 25 bp, Artificial
  probe
  misc_feature (1)..(25): SEQ ID NO: 1617; WAN024D8S_at; Start 211; Stop 235
ctattttgggaggaagaagatgaaa

SEQ ID NO: 148121 - DNA, 25 bp, Artificial
  probe
  misc_feature (1)..(25): SEQ ID NO: 1617; WAN024D8S_at; Start 210; Stop 234
actattttgggaggaagaagatgaa

SEQ ID NO: 148122 - DNA, 25 bp, Artificial
  probe
  misc_feature (1)..(25): SEQ ID NO: 1617; WAN024D8S_at; Start 182; Stop 206
gcagatgtttagggaaaaccctaga

SEQ ID NO: 148123 - DNA, 25 bp, Artificial
  probe
  misc_feature (1)..(25): SEQ ID NO: 1617; WAN024D8S_at; Start 180; Stop 204
ttgcagatgtttagggaaaacccta

SEQ ID NO: 148124 - DNA, 25 bp, Artificial
  probe
  misc_feature (1)..(25): SEQ ID NO: 1617; WAN024D8S_at; Start 145; Stop 169
aaatacaatcccagtctctcgctct

SEQ ID NO: 148125 - DNA, 25 bp, Artificial
  probe
  misc_feature (1)..(25): SEQ ID NO: 1617; WAN024D8S_at; Start 151; Stop 175
aatcccagtctctcgctctgccagt

SEQ ID NO: 148126 - DNA, 25 bp, Artificial
  probe
  misc_feature (1)..(25): SEQ ID NO: 1617; WAN024D8S_at; Start 207; Stop 231
ccaactattttgggaggaagaagat

SEQ ID NO: 148127 - DNA, 25 bp, Artificial
  probe
  misc_feature (1)..(25): SEQ ID NO: 1617; WAN024D8S_at; Start 203; Stop 227
tagaccaactattttgggaggaaga

SEQ ID NO: 148128 - DNA, 25 bp, Artificial
  probe
  misc_feature (1)..(25): SEQ ID NO: 1617; WAN024D8S_at; Start 212; Stop 236
tattttgggaggaagaagatgaaaa

SEQ ID NO: 148129 - DNA, 25 bp, Artificial
  probe
  misc_feature (1)..(25): SEQ ID NO: 1617; WAN024D8S_at; Start 202; Stop 226
ctagaccaactattttgggaggaag

SEQ ID NO: 148130 - DNA, 25 bp, Artificial
  probe
  misc_feature (1)..(25): SEQ ID NO: 3322; WAN024D8T_at; Start 77; Stop 101
tactcccaaaagtcatcaaatacgg

SEQ ID NO: 148131 - DNA, 25 bp, Artificial
  probe
  misc_feature (1)..(25): SEQ ID NO: 3322; WAN024D8T_at; Start 40; Stop 64
tcagggcaagaagctaaaaaggtcc

SEQ ID NO: 148132 - DNA, 25 bp, Artificial
  probe
  misc_feature (1)..(25): SEQ ID NO: 3322; WAN024D8T_at; Start 31; Stop 55
tttttaatttcagggcaagaagcta

SEQ ID NO: 148133 - DNA, 25 bp, Artificial
  probe
  misc_feature (1)..(25): SEQ ID NO: 3322; WAN024D8T_at; Start 82; Stop 106
ccaaaagtcatcaaatacggtgatg

SEQ ID NO: 148134 - DNA, 25 bp, Artificial
  probe
  misc_feature (1)..(25): SEQ ID NO: 3322; WAN024D8T_at; Start 7; Stop 31
acctccagtggaggtttttcttgct

SEQ ID NO: 148135 - DNA, 25 bp, Artificial
  probe
  misc_feature (1)..(25): SEQ ID NO: 3322; WAN024D8T_at; Start 32; Stop 56
ttttaatttcagggcaagaagctaa

SEQ ID NO: 148136 - DNA, 25 bp, Artificial
  probe
  misc_feature (1)..(25): SEQ ID NO: 3322; WAN024D8T_at; Start 27; Stop 51
ttgctttttaatttcagggcaagaa

SEQ ID NO: 148137 - DNA, 25 bp, Artificial
  probe
  misc_feature (1)..(25): SEQ ID NO: 3322; WAN024D8T_at; Start 30; Stop 54
ctttttaatttcagggcaagaagct

SEQ ID NO: 148138 - DNA, 25 bp, Artificial
  probe
  misc_feature (1)..(25): SEQ ID NO: 3322; WAN024D8T_at; Start 81; Stop 105
cccaaaagtcatcaaatacggtgat

SEQ ID NO: 148139 - DNA, 25 bp, Artificial
  probe
  misc_feature (1)..(25): SEQ ID NO: 3322; WAN024D8T_at; Start 8; Stop 32
cctccagtggaggtttttcttgctt

SEQ ID NO: 148140 - DNA, 25 bp, Artificial
  probe
  misc_feature (1)..(25): SEQ ID NO: 3322; WAN024D8T_at; Start 35; Stop 59
taatttcagggcaagaagctaaaaa

SEQ ID NO: 148141 - DNA, 25 bp, Artificial
  probe
  misc_feature (1)..(25): SEQ ID NO: 3322; WAN024D8T_at; Start 74; Stop 98
ttttactcccaaaagtcatcaaata

SEQ ID NO: 148142 - DNA, 25 bp, Artificial
  probe
  misc_feature (1)..(25): SEQ ID NO: 3322; WAN024D8T_at; Start 9; Stop 33
ctccagtggaggtttttcttgcttt

SEQ ID NO: 148143 - DNA, 25 bp, Artificial
  probe
  misc_feature (1)..(25): SEQ ID NO: 3322; WAN024D8T_at; Start 79; Stop 103
ctcccaaaagtcatcaaatacggtg

SEQ ID NO: 148144 - DNA, 25 bp, Artificial
  probe
  misc_feature (1)..(25): SEQ ID NO: 3322; WAN024D8T_at; Start 76; Stop 100
ttactcccaaaagtcatcaaatacg

SEQ ID NO: 148145 - DNA, 25 bp, Artificial
  probe
  misc_feature (1)..(25): SEQ ID NO: 3322; WAN024D8T_at; Start 80; Stop 104
tcccaaaagtcatcaaatacggtga

SEQ ID NO: 148146 - DNA, 25 bp, Artificial
  probe
  misc_feature (1)..(25): SEQ ID NO: 3322; WAN024D8T_at; Start 39; Stop 63
ttcagggcaagaagctaaaaaggtc

SEQ ID NO: 148147 - DNA, 25 bp, Artificial
  probe
  misc_feature (1)..(25): SEQ ID NO: 3322; WAN024D8T_at; Start 36; Stop 60
aatttcagggcaagaagctaaaaag

SEQ ID NO: 148148 - DNA, 25 bp, Artificial
  probe
  misc_feature (1)..(25): SEQ ID NO: 3322; WAN024D8T_at; Start 33; Stop 57
tttaatttcagggcaagaagctaaa

SEQ ID NO: 148149 - DNA, 25 bp, Artificial
  probe
  misc_feature (1)..(25): SEQ ID NO: 3322; WAN024D8T_at; Start 26; Stop 50
cttgctttttaatttcagggcaaga

SEQ ID NO: 148150 - DNA, 25 bp, Artificial
  probe
  misc_feature (1)..(25): SEQ ID NO: 3322; WAN024D8T_at; Start 24; Stop 48
ttcttgctttttaatttcagggcaa

SEQ ID NO: 148151 - DNA, 25 bp, Artificial
  probe
  misc_feature (1)..(25): SEQ ID NO: 3322; WAN024D8T_at; Start 29; Stop 53
gctttttaatttcagggcaagaagc

SEQ ID NO: 148152 - DNA, 25 bp, Artificial
  probe
  misc_feature (1)..(25): SEQ ID NO: 3322; WAN024D8T_at; Start 25; Stop 49
tcttgctttttaatttcagggcaag

SEQ ID NO: 148153 - DNA, 25 bp, Artificial
  probe
  misc_feature (1)..(25): SEQ ID NO: 3322; WAN024D8T_at; Start 84; Stop 108
aaaagtcatcaaatacggtgatggg

SEQ ID NO: 148154 - DNA, 25 bp, Artificial
  probe
  misc_feature (1)..(25): SEQ ID NO: 3322; WAN024D8T_at; Start 83; Stop 107
caaaagtcatcaaatacggtgatgg

SEQ ID NO: 148155 - DNA, 25 bp, Artificial
  probe
  misc_feature (1)..(25): SEQ ID NO: 3322; WAN024D8T_at; Start 75; Stop 99
tttactcccaaaagtcatcaaatac

SEQ ID NO: 148156 - DNA, 25 bp, Artificial
  probe
  misc_feature (1)..(25): SEQ ID NO: 3322; WAN024D8T_at; Start 37; Stop 61
atttcagggcaagaagctaaaaagg

SEQ ID NO: 148157 - DNA, 25 bp, Artificial
  probe
  misc_feature (1)..(25): SEQ ID NO: 3322; WAN024D8T_at; Start 78; Stop 102
actcccaaaagtcatcaaatacggt

SEQ ID NO: 148158 - DNA, 25 bp, Artificial
  probe
  misc_feature (1)..(25): SEQ ID NO: 3322; WAN024D8T_at; Start 23; Stop 47
tttcttgctttttaatttcagggca

SEQ ID NO: 148159 - DNA, 25 bp, Artificial
  probe
  misc_feature (1)..(25): SEQ ID NO: 3322; WAN024D8T_at; Start 28; Stop 52
tgctttttaatttcagggcaagaag

SEQ ID NO: 148160 - DNA, 25 bp, Artificial
  probe
  misc_feature (1)..(25): SEQ ID NO: 3322; WAN024D8T_at; Start 34; Stop 58
ttaatttcagggcaagaagctaaaa

SEQ ID NO: 148161 - DNA, 25 bp, Artificial
  probe
  misc_feature (1)..(25): SEQ ID NO: 1656; WAN024D8U_at; Start 428; Stop 452
tgattgctcagtatgcccttgctgg

SEQ ID NO: 148162 - DNA, 25 bp, Artificial
  probe
  misc_feature (1)..(25): SEQ ID NO: 1656; WAN024D8U_at; Start 652; Stop 676
aaaccaggcctagctgacgaagtcg

SEQ ID NO: 148163 - DNA, 25 bp, Artificial
  probe
  misc_feature (1)..(25): SEQ ID NO: 1656; WAN024D8U_at; Start 360; Stop 384
tgcagttgaagcgacaggtagtcct

SEQ ID NO: 148164 - DNA, 25 bp, Artificial
  probe
  misc_feature (1)..(25): SEQ ID NO: 1656; WAN024D8U_at; Start 552; Stop 576
ttaccgcctcaataaacgccaagga

SEQ ID NO: 148165 - DNA, 25 bp, Artificial
  probe
  misc_feature (1)..(25): SEQ ID NO: 1656; WAN024D8U_at; Start 8; Stop 32
tgcaagaaacgattatccaagagct

SEQ ID NO: 148166 - DNA, 25 bp, Artificial
  probe
  misc_feature (1)..(25): SEQ ID NO: 1656; WAN024D8U_at; Start 197; Stop 221
aactgcgagctgaaacgggagacga

SEQ ID NO: 148167 - DNA, 25 bp, Artificial
  probe
  misc_feature (1)..(25): SEQ ID NO: 1656; WAN024D8U_at; Start 626; Stop 650
tcccaacggcagacctagaagaaga

SEQ ID NO: 148168 - DNA, 25 bp, Artificial
  probe
  misc_feature (1)..(25): SEQ ID NO: 1656; WAN024D8U_at; Start 613; Stop 637
ctttatgaaaaaatcccaacggcag

SEQ ID NO: 148169 - DNA, 25 bp, Artificial
  probe
  misc_feature (1)..(25): SEQ ID NO: 1656; WAN024D8U_at; Start 768; Stop 792
caaaggccaacacaaacgccactta

SEQ ID NO: 148170 - DNA, 25 bp, Artificial
  probe
  misc_feature (1)..(25): SEQ ID NO: 1656; WAN024D8U_at; Start 667; Stop 691
gacgaagtcgcacttggagtcacct

SEQ ID NO: 148171 - DNA, 25 bp, Artificial
  probe
  misc_feature (1)..(25): SEQ ID NO: 1656; WAN024D8U_at; Start 740; Stop 764
ctcaagcgaccattgaaaactggtg

SEQ ID NO: 148172 - DNA, 25 bp, Artificial
  probe
  misc_feature (1)..(25): SEQ ID NO: 1656; WAN024D8U_at; Start 260; Stop 284
tgcaagctgatgaagcagatgctca

SEQ ID NO: 148173 - DNA, 25 bp, Artificial
  probe
  misc_feature (1)..(25): SEQ ID NO: 1656; WAN024D8U_at; Start 181; Stop 205
caattagctatggaagaactgcgag

SEQ ID NO: 148174 - DNA, 25 bp, Artificial
  probe
  misc_feature (1)..(25): SEQ ID NO: 1656; WAN024D8U_at; Start 457; Stop 481
catagcggagcggtcattggaacag

SEQ ID NO: 148175 - DNA, 25 bp, Artificial
  probe
  misc_feature (1)..(25): SEQ ID NO: 1656; WAN024D8U_at; Start 330; Stop 354
tatcaaggaatcagctgatgccatg

SEQ ID NO: 148176 - DNA, 25 bp, Artificial
  probe
  misc_feature (1)..(25): SEQ ID NO: 1656; WAN024D8U_at; Start 95; Stop 119
gatatctgaaaaaacatcccttcct

SEQ ID NO: 148177 - DNA, 25 bp, Artificial
  probe
  misc_feature (1)..(25): SEQ ID NO: 1656; WAN024D8U_at; Start 754; Stop 778
gaaaactggtggcacaaaggccaac

SEQ ID NO: 148178 - DNA, 25 bp, Artificial
  probe
  misc_feature (1)..(25): SEQ ID NO: 1656; WAN024D8U_at; Start 307; Stop 331
ccagatgtcagcttggttgtgaata

SEQ ID NO: 148179 - DNA, 25 bp, Artificial
  probe
  misc_feature (1)..(25): SEQ ID NO: 1656; WAN024D8U_at; Start 584; Stop 608
tcttgcagaaacttggcgcagagcc

SEQ ID NO: 148180 - DNA, 25 bp, Artificial
  probe
  misc_feature (1)..(25): SEQ ID NO: 1656; WAN024D8U_at; Start 39; Stop 63
caaaccagtgattgatgcccaggaa

SEQ ID NO: 148181 - DNA, 25 bp, Artificial
  probe
  misc_feature (1)..(25): SEQ ID NO: 1656; WAN024D8U_at; Start 414; Stop 438
ggcacgttgccgtatgattgctcag

SEQ ID NO: 148182 - DNA, 25 bp, Artificial
  probe
  misc_feature (1)..(25): SEQ ID NO: 1656; WAN024D8U_at; Start 293; Stop 317
tagccttcatccagccagatgtcag

SEQ ID NO: 148183 - DNA, 25 bp, Artificial
  probe
  misc_feature (1)..(25): SEQ ID NO: 1656; WAN024D8U_at; Start 21; Stop 45
tatccaagagctgggtgtcaaacca

SEQ ID NO: 148184 - DNA, 25 bp, Artificial
  probe
  misc_feature (1)..(25): SEQ ID NO: 1656; WAN024D8U_at; Start 380; Stop 404
gtcctgtttcagacttcaacaaggg

SEQ ID NO: 148185 - DNA, 25 bp, Artificial
  probe
  misc_feature (1)..(25): SEQ ID NO: 1656; WAN024D8U_at; Start 346; Stop 370
gatgccatgacagctgcagttgaag

SEQ ID NO: 148186 - DNA, 25 bp, Artificial
  probe
  misc_feature (1)..(25): SEQ ID NO: 1656; WAN024D8U_at; Start 709; Stop 733
tacctagaaggcaaaacaatcagcc

SEQ ID NO: 148187 - DNA, 25 bp, Artificial
  probe
  misc_feature (1)..(25): SEQ ID NO: 1656; WAN024D8U_at; Start 512; Stop 536
ttaccaagtttggtgacggcggtgc

SEQ ID NO: 148188 - DNA, 25 bp, Artificial
  probe
  misc_feature (1)..(25): SEQ ID NO: 1656; WAN024D8U_at; Start 52; Stop 76
gatgcccaggaagaaatccgtcgtt

SEQ ID NO: 148189 - DNA, 25 bp, Artificial
  probe
  misc_feature (1)..(25): SEQ ID NO: 1656; WAN024D8U_at; Start 229; Stop 253
aaatttatcgctgtccgcctgccat

SEQ ID NO: 148190 - DNA, 25 bp, Artificial
  probe
  misc_feature (1)..(25): SEQ ID NO: 1656; WAN024D8U_at; Start 277; Stop 301
gatgctcaaaaagccctagccttca

SEQ ID NO: 148191 - DNA, 25 bp, Artificial
  probe
  misc_feature (1)..(25): SEQ ID NO: 1656; WAN024D8U_at; Start 212; Stop 236
cgggagacgatagctacaaatttat

SEQ ID NO: 148192 - DNA, 25 bp, Artificial
  probe
  misc_feature (1)..(25): SEQ ID NO: 1656; WAN024D8U_at; Start 526; Stop 550
gacggcggtgcggatattctccctc

SEQ ID NO: 148193 - DNA, 25 bp, Artificial
  probe
  misc_feature (1)..(25): SEQ ID NO: 1656; WAN024D8U_at; Start 245; Stop 269
gcctgccatacggagtgcaagctga

SEQ ID NO: 148194 - DNA, 25 bp, Artificial
  probe
  misc_feature (1)..(25): SEQ ID NO: 1656; WAN024D8U_at; Start 598; Stop 622
ggcgcagagccagccctttatgaaa

SEQ ID NO: 148195 - DNA, 25 bp, Artificial
  probe
  misc_feature (1)..(25): SEQ ID NO: 960; WAN024D8V_at; Start 170; Stop 194
gcaattgggttgcttcctatactaa

SEQ ID NO: 148196 - DNA, 25 bp, Artificial
  probe
  misc_feature (1)..(25): SEQ ID NO: 960; WAN024D8V_at; Start 393; Stop 417
tcaaaaggtcagagcacgttatgcc

SEQ ID NO: 148197 - DNA, 25 bp, Artificial
  probe
  misc_feature (1)..(25): SEQ ID NO: 960; WAN024D8V_at; Start 387; Stop 411
aggttttcaaaaggtcagagcacgt

SEQ ID NO: 148198 - DNA, 25 bp, Artificial
  probe
  misc_feature (1)..(25): SEQ ID NO: 960; WAN024D8V_at; Start 441; Stop 465
tgtcatggaaaaggctggaatgtcc

SEQ ID NO: 148199 - DNA, 25 bp, Artificial
  probe
  misc_feature (1)..(25): SEQ ID NO: 960; WAN024D8V_at; Start 47; Stop 71
taagaagatttgtggagagtgatgc

SEQ ID NO: 148200 - DNA, 25 bp, Artificial
  probe
  misc_feature (1)..(25): SEQ ID NO: 960; WAN024D8V_at; Start 17; Stop 41
cgcaaatattacagacagaacgttt

SEQ ID NO: 148201 - DNA, 25 bp, Artificial
  probe
  misc_feature (1)..(25): SEQ ID NO: 960; WAN024D8V_at; Start 92; Stop 116
gggcttcatccgctgagaatctgac

SEQ ID NO: 148202 - DNA, 25 bp, Artificial
  probe
  misc_feature (1)..(25): SEQ ID NO: 960; WAN024D8V_at; Start 97; Stop 121
tcatccgctgagaatctgacctatg

SEQ ID NO: 148203 - DNA, 25 bp, Artificial
  probe
  misc_feature (1)..(25): SEQ ID NO: 960; WAN024D8V_at; Start 399; Stop 423
ggtcagagcacgttatgccagtctc

SEQ ID NO: 148204 - DNA, 25 bp, Artificial
  probe
  misc_feature (1)..(25): SEQ ID NO: 960; WAN024D8V_at; Start 216; Stop 240
catttgtctaaaagaaaacccagag

SEQ ID NO: 148205 - DNA, 25 bp, Artificial
  probe
  misc_feature (1)..(25): SEQ ID NO: 960; WAN024D8V_at; Start 80; Stop 104
tgtttcaaaattgggcttcatccgc

SEQ ID NO: 148206 - DNA, 25 bp, Artificial
  probe
  misc_feature (1)..(25): SEQ ID NO: 960; WAN024D8V_at; Start 105; Stop 129
tgagaatctgacctatgttacctgg

SEQ ID NO: 148207 - DNA, 25 bp, Artificial
  probe
  misc_feature (1)..(25): SEQ ID NO: 960; WAN024D8V_at; Start 413; Stop 437
atgccagtctcaacccagcttcagg

SEQ ID NO: 148208 - DNA, 25 bp, Artificial
  probe
  misc_feature (1)..(25): SEQ ID NO: 960; WAN024D8V_at; Start 497; Stop 521
gaaaaggctatcttgcggatcttat

SEQ ID NO: 148209 - DNA, 25 bp, Artificial
  probe
  misc_feature (1)..(25): SEQ ID NO: 960; WAN024D8V_at; Start 461; Stop 485
tgtcctatctacaaaccattgttaa

SEQ ID NO: 148210 - DNA, 25 bp, Artificial
  probe
  misc_feature (1)..(25): SEQ ID NO: 960; WAN024D8V_at; Start 13; Stop 37
ggtacgcaaatattacagacagaac

SEQ ID NO: 148211 - DNA, 25 bp, Artificial
  probe
  misc_feature (1)..(25): SEQ ID NO: 960; WAN024D8V_at; Start 85; Stop 109
caaaattgggcttcatccgctgaga

SEQ ID NO: 148212 - DNA, 25 bp, Artificial
  probe
  misc_feature (1)..(25): SEQ ID NO: 960; WAN024D8V_at; Start 132; Stop 156
tccccatcctgatgtcgaaatcact

SEQ ID NO: 148213 - DNA, 25 bp, Artificial
  probe
  misc_feature (1)..(25): SEQ ID NO: 960; WAN024D8V_at; Start 454; Stop 478
gctggaatgtcctatctacaaacca

SEQ ID NO: 148214 - DNA, 25 bp, Artificial
  probe
  misc_feature (1)..(25): SEQ ID NO: 960; WAN024D8V_at; Start 525; Stop 549
ttatggtataagtagggaagaatgt

SEQ ID NO: 148215 - DNA, 25 bp, Artificial
  probe
  misc_feature (1)..(25): SEQ ID NO: 960; WAN024D8V_at; Start 176; Stop 200
gggttgcttcctatactaatctcaa

SEQ ID NO: 148216 - DNA, 25 bp, Artificial
  probe
  misc_feature (1)..(25): SEQ ID NO: 960; WAN024D8V_at; Start 51; Stop 75
aagatttgtggagagtgatgcagaa

SEQ ID NO: 148217 - DNA, 25 bp, Artificial
  probe
  misc_feature (1)..(25): SEQ ID NO: 960; WAN024D8V_at; Start 267; Stop 291
taagatagacgaggctgatttaagc

SEQ ID NO: 148218 - DNA, 25 bp, Artificial
  probe
  misc_feature (1)..(25): SEQ ID NO: 960; WAN024D8V_at; Start 489; Stop 513
tgtagagagaaaaggctatcttgcg

SEQ ID NO: 148219 - DNA, 25 bp, Artificial
  probe
  misc_feature (1)..(25): SEQ ID NO: 960; WAN024D8V_at; Start 508; Stop 532
cttgcggatcttatttattatggta

SEQ ID NO: 148220 - DNA, 25 bp, Artificial
  probe
  misc_feature (1)..(25): SEQ ID NO: 960; WAN024D8V_at; Start 181; Stop 205
gcttcctatactaatctcaactatt

SEQ ID NO: 148221 - DNA, 25 bp, Artificial
  probe
  misc_feature (1)..(25): SEQ ID NO: 960; WAN024D8V_at; Start 406; Stop 430
gcacgttatgccagtctcaacccag

SEQ ID NO: 148222 - DNA, 25 bp, Artificial
  probe
  misc_feature (1)..(25): SEQ ID NO: 960; WAN024D8V_at; Start 141; Stop 165
tgatgtcgaaatcactcgaaactcg

SEQ ID NO: 148223 - DNA, 25 bp, Artificial
  probe
  misc_feature (1)..(25): SEQ ID NO: 960; WAN024D8V_at; Start 274; Stop 298
gacgaggctgatttaagctgtgaaa

SEQ ID NO: 148224 - DNA, 25 bp, Artificial
  probe
  misc_feature (1)..(25): SEQ ID NO: 960; WAN024D8V_at; Start 30; Stop 54
gacagaacgtttgattttaagaaga

SEQ ID NO: 148225 - DNA, 25 bp, Artificial
  probe
  misc_feature (1)..(25): SEQ ID NO: 960; WAN024D8V_at; Start 220; Stop 244
tgtctaaaagaaaacccagagcaag

SEQ ID NO: 148226 - DNA, 25 bp, Artificial
  probe
  misc_feature (1)..(25): SEQ ID NO: 960; WAN024D8V_at; Start 476; Stop 500
ccattgttaatggtgtagagagaaa

SEQ ID NO: 148227 - DNA, 25 bp, Artificial
  probe
  misc_feature (1)..(25): SEQ ID NO: 960; WAN024D8V_at; Start 144; Stop 168
tgtcgaaatcactcgaaactcgatt

SEQ ID NO: 148228 - DNA, 25 bp, Artificial
  probe
  misc_feature (1)..(25): SEQ ID NO: 960; WAN024D8V_at; Start 448; Stop 472
gaaaaggctggaatgtcctatctac

SEQ ID NO: 148229 - DNA, 25 bp, Artificial
  probe
  misc_feature (1)..(25): SEQ ID NO: 4937; WAN024D8W_at; Start 34; Stop 58
acagtagtacgtaagaatgaatctc

SEQ ID NO: 148230 - DNA, 25 bp, Artificial
  probe
  misc_feature (1)..(25): SEQ ID NO: 4937; WAN024D8W_at; Start 106; Stop 130
actcttcaagaaacacgcaaacgtg

SEQ ID NO: 148231 - DNA, 25 bp, Artificial
  probe
  misc_feature (1)..(25): SEQ ID NO: 4937; WAN024D8W_at; Start 85; Stop 109
cgtgcggttactaaagctggtactc

SEQ ID NO: 148232 - DNA, 25 bp, Artificial
  probe
  misc_feature (1)..(25): SEQ ID NO: 4937; WAN024D8W_at; Start 91; Stop 115
gttactaaagctggtactcttcaag

SEQ ID NO: 148233 - DNA, 25 bp, Artificial
  probe
  misc_feature (1)..(25): SEQ ID NO: 4937; WAN024D8W_at; Start 108; Stop 132
tcttcaagaaacacgcaaacgtgaa

SEQ ID NO: 148234 - DNA, 25 bp, Artificial
  probe
  misc_feature (1)..(25): SEQ ID NO: 4937; WAN024D8W_at; Start 28; Stop 52
tctaaaacagtagtacgtaagaatg

SEQ ID NO: 148235 - DNA, 25 bp, Artificial
  probe
  misc_feature (1)..(25): SEQ ID NO: 4937; WAN024D8W_at; Start 87; Stop 111
tgcggttactaaagctggtactctt

SEQ ID NO: 148236 - DNA, 25 bp, Artificial
  probe
  misc_feature (1)..(25): SEQ ID NO: 4937; WAN024D8W_at; Start 57; Stop 81
tcttgacgacgcacttcgccgtttc

SEQ ID NO: 148237 - DNA, 25 bp, Artificial
  probe
  misc_feature (1)..(25): SEQ ID NO: 4937; WAN024D8W_at; Start 119; Stop 143
cacgcaaacgtgaattctatgaaaa

SEQ ID NO: 148238 - DNA, 25 bp, Artificial
  probe
  misc_feature (1)..(25): SEQ ID NO: 4937; WAN024D8W_at; Start 80; Stop 104
tcaaacgtgcggttactaaagctgg

SEQ ID NO: 148239 - DNA, 25 bp, Artificial
  probe
  misc_feature (1)..(25): SEQ ID NO: 4937; WAN024D8W_at; Start 96; Stop 120
taaagctggtactcttcaagaaaca

SEQ ID NO: 148240 - DNA, 25 bp, Artificial
  probe
  misc_feature (1)..(25): SEQ ID NO: 4937; WAN024D8W_at; Start 103; Stop 127
ggtactcttcaagaaacacgcaaac

SEQ ID NO: 148241 - DNA, 25 bp, Artificial
  probe
  misc_feature (1)..(25): SEQ ID NO: 4937; WAN024D8W_at; Start 48; Stop 72
gaatgaatctcttgacgacgcactt

SEQ ID NO: 148242 - DNA, 25 bp, Artificial
  probe
  misc_feature (1)..(25): SEQ ID NO: 4937; WAN024D8W_at; Start 24; Stop 48
aatgtctaaaacagtagtacgtaag

SEQ ID NO: 148243 - DNA, 25 bp, Artificial
  probe
  misc_feature (1)..(25): SEQ ID NO: 4937; WAN024D8W_at; Start 159; Stop 183
taaacgtaaatcagaagtagctcgt

SEQ ID NO: 148244 - DNA, 25 bp, Artificial
  probe
  misc_feature (1)..(25): SEQ ID NO: 4937; WAN024D8W_at; Start 51; Stop 75
tgaatctcttgacgacgcacttcgc

SEQ ID NO: 148245 - DNA, 25 bp, Artificial
  probe
  misc_feature (1)..(25): SEQ ID NO: 4937; WAN024D8W_at; Start 61; Stop 85
gacgacgcacttcgccgtttcaaac

SEQ ID NO: 148246 - DNA, 25 bp, Artificial
  probe
  misc_feature (1)..(25): SEQ ID NO: 4937; WAN024D8W_at; Start 111; Stop 135
tcaagaaacacgcaaacgtgaattc

SEQ ID NO: 148247 - DNA, 25 bp, Artificial
  probe
  misc_feature (1)..(25): SEQ ID NO: 4937; WAN024D8W_at; Start 67; Stop 91
gcacttcgccgtttcaaacgtgcgg

SEQ ID NO: 148248 - DNA, 25 bp, Artificial
  probe
  misc_feature (1)..(25): SEQ ID NO: 4937; WAN024D8W_at; Start 6; Stop 30
cttgaagggagtgaaaaaaatgtct

SEQ ID NO: 148249 - DNA, 25 bp, Artificial
  probe
  misc_feature (1)..(25): SEQ ID NO: 4937; WAN024D8W_at; Start 45; Stop 69
taagaatgaatctcttgacgacgca

SEQ ID NO: 148250 - DNA, 25 bp, Artificial
  probe
  misc_feature (1)..(25): SEQ ID NO: 4937; WAN024D8W_at; Start 115; Stop 139
gaaacacgcaaacgtgaattctatg

SEQ ID NO: 148251 - DNA, 25 bp, Artificial
  probe
  misc_feature (1)..(25): SEQ ID NO: 4937; WAN024D8W_at; Start 53; Stop 77
aatctcttgacgacgcacttcgccg

SEQ ID NO: 148252 - DNA, 25 bp, Artificial
  probe
  misc_feature (1)..(25): SEQ ID NO: 4937; WAN024D8W_at; Start 167; Stop 191
aatcagaagtagctcgtaaacgtaa

SEQ ID NO: 148253 - DNA, 25 bp, Artificial
  probe
  misc_feature (1)..(25): SEQ ID NO: 4937; WAN024D8W_at; Start 37; Stop 61
gtagtacgtaagaatgaatctcttg

SEQ ID NO: 148254 - DNA, 25 bp, Artificial
  probe
  misc_feature (1)..(25): SEQ ID NO: 4937; WAN024D8W_at; Start 93; Stop 117
tactaaagctggtactcttcaagaa

SEQ ID NO: 148255 - DNA, 25 bp, Artificial
  probe
  misc_feature (1)..(25): SEQ ID NO: 4937; WAN024D8W_at; Start 120; Stop 144
acgcaaacgtgaattctatgaaaaa

SEQ ID NO: 148256 - DNA, 25 bp, Artificial
  probe
  misc_feature (1)..(25): SEQ ID NO: 4937; WAN024D8W_at; Start 89; Stop 113
cggttactaaagctggtactcttca

SEQ ID NO: 148257 - DNA, 25 bp, Artificial
  probe
  misc_feature (1)..(25): SEQ ID NO: 4937; WAN024D8W_at; Start 81; Stop 105
caaacgtgcggttactaaagctggt

SEQ ID NO: 148258 - DNA, 25 bp, Artificial
  probe
  misc_feature (1)..(25): SEQ ID NO: 4937; WAN024D8W_at; Start 157; Stop 181
cgtaaacgtaaatcagaagtagctc

SEQ ID NO: 148259 - DNA, 25 bp, Artificial
  probe
  misc_feature (1)..(25): SEQ ID NO: 4937; WAN024D8W_at; Start 169; Stop 193
tcagaagtagctcgtaaacgtaaaa

SEQ ID NO: 148260 - DNA, 25 bp, Artificial
  probe
  misc_feature (1)..(25): SEQ ID NO: 4937; WAN024D8W_at; Start 165; Stop 189
taaatcagaagtagctcgtaaacgt

SEQ ID NO: 148261 - DNA, 25 bp, Artificial
  probe
  misc_feature (1)..(25): SEQ ID NO: 4937; WAN024D8W_at; Start 163; Stop 187
cgtaaatcagaagtagctcgtaaac

SEQ ID NO: 148262 - DNA, 25 bp, Artificial
  probe
  misc_feature (1)..(25): SEQ ID NO: 4937; WAN024D8W_at; Start 100; Stop 124
gctggtactcttcaagaaacacgca

SEQ ID NO: 148263 - DNA, 25 bp, Artificial
  probe
  misc_feature (1)..(25): SEQ ID NO: 1932; WAN024D8X_at; Start 1148; Stop 1172
cgtttgtcaagtatgcggctggaga

SEQ ID NO: 148264 - DNA, 25 bp, Artificial
  probe
  misc_feature (1)..(25): SEQ ID NO: 1932; WAN024D8X_at; Start 215; Stop 239
tagtttattcgcaagaacctgctgc

SEQ ID NO: 148265 - DNA, 25 bp, Artificial
  probe
  misc_feature (1)..(25): SEQ ID NO: 1932; WAN024D8X_at; Start 104; Stop 128
gggtcaatcccttaaaagaagagca

SEQ ID NO: 148266 - DNA, 25 bp, Artificial
  probe
  misc_feature (1)..(25): SEQ ID NO: 1932; WAN024D8X_at; Start 363; Stop 387
caatgaaatttcaagcaaacgggct

SEQ ID NO: 148267 - DNA, 25 bp, Artificial
  probe
  misc_feature (1)..(25): SEQ ID NO: 1932; WAN024D8X_at; Start 142; Stop 166
gatgccattactcaaaccccttggg

SEQ ID NO: 148268 - DNA, 25 bp, Artificial
  probe
  misc_feature (1)..(25): SEQ ID NO: 1932; WAN024D8X_at; Start 724; Stop 748
gacttgttgccagtagagcatatca

SEQ ID NO: 148269 - DNA, 25 bp, Artificial
  probe
  misc_feature (1)..(25): SEQ ID NO: 1932; WAN024D8X_at; Start 437; Stop 461
tgaccaatgaatctgccgaccgctt

SEQ ID NO: 148270 - DNA, 25 bp, Artificial
  probe
  misc_feature (1)..(25): SEQ ID NO: 1932; WAN024D8X_at; Start 667; Stop 691
tgggcacccgaggaaaacgaagaga

SEQ ID NO: 148271 - DNA, 25 bp, Artificial
  probe
  misc_feature (1)..(25): SEQ ID NO: 1932; WAN024D8X_at; Start 232; Stop 256
cctgctgctcaaatggtggctcaag

SEQ ID NO: 148272 - DNA, 25 bp, Artificial
  probe
  misc_feature (1)..(25): SEQ ID NO: 1932; WAN024D8X_at; Start 1119; Stop 1143
cgaacagtcggttgaaattggccaa

SEQ ID NO: 148273 - DNA, 25 bp, Artificial
  probe
  misc_feature (1)..(25): SEQ ID NO: 1932; WAN024D8X_at; Start 836; Stop 860
tacagtttaagggtaacaatccagc

SEQ ID NO: 148274 - DNA, 25 bp, Artificial
  probe
  misc_feature (1)..(25): SEQ ID NO: 1932; WAN024D8X_at; Start 814; Stop 838
gagggtcagtttgttgcccatctac

SEQ ID NO: 148275 - DNA, 25 bp, Artificial
  probe
  misc_feature (1)..(25): SEQ ID NO: 1932; WAN024D8X_at; Start 422; Stop 446
cgacaaatgtcgtggtgaccaatga

SEQ ID NO: 148276 - DNA, 25 bp, Artificial
  probe
  misc_feature (1)..(25): SEQ ID NO: 1932; WAN024D8X_at; Start 403; Stop 427
aacatggagcgttttggagcgacaa

SEQ ID NO: 148277 - DNA, 25 bp, Artificial
  probe
  misc_feature (1)..(25): SEQ ID NO: 1932; WAN024D8X_at; Start 167; Stop 191
gccactatgggaaggtttcagggaa

SEQ ID NO: 148278 - DNA, 25 bp, Artificial
  probe
  misc_feature (1)..(25): SEQ ID NO: 1932; WAN024D8X_at; Start 280; Stop 304
aaggtcttggacttggctgctgcac

SEQ ID NO: 148279 - DNA, 25 bp, Artificial
  probe
  misc_feature (1)..(25): SEQ ID NO: 1932; WAN024D8X_at; Start 571; Stop 595
tatccgagtcaatgtgctagcttgc

SEQ ID NO: 148280 - DNA, 25 bp, Artificial
  probe
  misc_feature (1)..(25): SEQ ID NO: 1932; WAN024D8X_at; Start 1016; Stop 1040
ggaagctcaagattgctcgcaatgg

SEQ ID NO: 148281 - DNA, 25 bp, Artificial
  probe
  misc_feature (1)..(25): SEQ ID NO: 1932; WAN024D8X_at; Start 187; Stop 211
gggaaatcgcctgagcatgctacag

SEQ ID NO: 148282 - DNA, 25 bp, Artificial
  probe
  misc_feature (1)..(25): SEQ ID NO: 1932; WAN024D8X_at; Start 498; Stop 522
tcttgatgccccttgctctggtgaa

SEQ ID NO: 148283 - DNA, 25 bp, Artificial
  probe
  misc_feature (1)..(25): SEQ ID NO: 1932; WAN024D8X_at; Start 1059; Stop 1083
taagaagaaacgctttgagcccagt

SEQ ID NO: 148284 - DNA, 25 bp, Artificial
  probe
  misc_feature (1)..(25): SEQ ID NO: 1932; WAN024D8X_at; Start 586; Stop 610
gctagcttgcaaagagaaattctgg

SEQ ID NO: 148285 - DNA, 25 bp, Artificial
  probe
  misc_feature (1)..(25): SEQ ID NO: 1932; WAN024D8X_at; Start 974; Stop 998
gagaccagctttatctcttgccaga

SEQ ID NO: 148286 - DNA, 25 bp, Artificial
  probe
  misc_feature (1)..(25): SEQ ID NO: 1932; WAN024D8X_at; Start 934; Stop 958
catttgaaggtcaatctaccgggta

SEQ ID NO: 148287 - DNA, 25 bp, Artificial
  probe
  misc_feature (1)..(25): SEQ ID NO: 1932; WAN024D8X_at; Start 72; Stop 96
ctcttttgaggaggaagcggtttcg

SEQ ID NO: 148288 - DNA, 25 bp, Artificial
  probe
  misc_feature (1)..(25): SEQ ID NO: 1932; WAN024D8X_at; Start 650; Stop 674
tttattcgacctgtacctgggcacc

SEQ ID NO: 148289 - DNA, 25 bp, Artificial
  probe
  misc_feature (1)..(25): SEQ ID NO: 1932; WAN024D8X_at; Start 539; Stop 563
aacctgatgctatggactattggag

SEQ ID NO: 148290 - DNA, 25 bp, Artificial
  probe
  misc_feature (1)..(25): SEQ ID NO: 1932; WAN024D8X_at; Start 1276; Stop 1300
tattttccaaaaggcctcagattca

SEQ ID NO: 148291 - DNA, 25 bp, Artificial
  probe
  misc_feature (1)..(25): SEQ ID NO: 1932; WAN024D8X_at; Start 1189; Stop 1213
gaaagtctgccaaatggttggtacc

SEQ ID NO: 148292 - DNA, 25 bp, Artificial
  probe
  misc_feature (1)..(25): SEQ ID NO: 1932; WAN024D8X_at; Start 601; Stop 625
gaaattctggaggatgcagtgacca

SEQ ID NO: 148293 - DNA, 25 bp, Artificial
  probe
  misc_feature (1)..(25): SEQ ID NO: 1932; WAN024D8X_at; Start 524; Stop 548
gaatgtttcgtaagcaacctgatgc

SEQ ID NO: 148294 - DNA, 25 bp, Artificial
  probe
  misc_feature (1)..(25): SEQ ID NO: 1932; WAN024D8X_at; Start 311; Stop 335
gcaaatcaactcaactggcagccta

SEQ ID NO: 148295 - DNA, 25 bp, Artificial
  probe
  misc_feature (1)..(25): SEQ ID NO: 1932; WAN024D8X_at; Start 885; Stop 909
taacctcagccgtgaacaagttgcc

SEQ ID NO: 148296 - DNA, 25 bp, Artificial
  probe
  misc_feature (1)..(25): SEQ ID NO: 1932; WAN024D8X_at; Start 870; Stop 894
taaggcaagtaagagtaacctcagc

SEQ ID NO: 148297 - DNA, 25 bp, Artificial
  probe
  misc_feature (1)..(25): SEQ ID NO: 5683; WAN024D8Y_at; Start 138; Stop 162
tagaatgtcaatacctggcagacta

SEQ ID NO: 148298 - DNA, 25 bp, Artificial
  probe
  misc_feature (1)..(25): SEQ ID NO: 5683; WAN024D8Y_at; Start 21; Stop 45
cctccgtggaatagtagatttattt

SEQ ID NO: 148299 - DNA, 25 bp, Artificial
  probe
  misc_feature (1)..(25): SEQ ID NO: 5683; WAN024D8Y_at; Start 116; Stop 140
catctgctttgtctgagacaaatag

SEQ ID NO: 148300 - DNA, 25 bp, Artificial
  probe
  misc_feature (1)..(25): SEQ ID NO: 5683; WAN024D8Y_at; Start 134; Stop 158
caaatagaatgtcaatacctggcag

SEQ ID NO: 148301 - DNA, 25 bp, Artificial
  probe
  misc_feature (1)..(25): SEQ ID NO: 5683; WAN024D8Y_at; Start 102; Stop 126
ttctttatccttggcatctgctttg

SEQ ID NO: 148302 - DNA, 25 bp, Artificial
  probe
  misc_feature (1)..(25): SEQ ID NO: 5683; WAN024D8Y_at; Start 93; Stop 117
aattacatcttctttatccttggca

SEQ ID NO: 148303 - DNA, 25 bp, Artificial
  probe
  misc_feature (1)..(25): SEQ ID NO: 5683; WAN024D8Y_at; Start 141; Stop 165
aatgtcaatacctggcagactaact

SEQ ID NO: 148304 - DNA, 25 bp, Artificial
  probe
  misc_feature (1)..(25): SEQ ID NO: 5683; WAN024D8Y_at; Start 144; Stop 168
gtcaatacctggcagactaactaat

SEQ ID NO: 148305 - DNA, 25 bp, Artificial
  probe
  misc_feature (1)..(25): SEQ ID NO: 5683; WAN024D8Y_at; Start 96; Stop 120
tacatcttctttatccttggcatct

SEQ ID NO: 148306 - DNA, 25 bp, Artificial
  probe
  misc_feature (1)..(25): SEQ ID NO: 5683; WAN024D8Y_at; Start 140; Stop 164
gaatgtcaatacctggcagactaac

SEQ ID NO: 148307 - DNA, 25 bp, Artificial
  probe
  misc_feature (1)..(25): SEQ ID NO: 5683; WAN024D8Y_at; Start 14; Stop 38
tcgatatcctccgtggaatagtaga

SEQ ID NO: 148308 - DNA, 25 bp, Artificial
  probe
  misc_feature (1)..(25): SEQ ID NO: 5683; WAN024D8Y_at; Start 110; Stop 134
ccttggcatctgctttgtctgagac

SEQ ID NO: 148309 - DNA, 25 bp, Artificial
  probe
  misc_feature (1)..(25): SEQ ID NO: 5683; WAN024D8Y_at; Start 37; Stop 61
gatttattttctaatatcattcaag

SEQ ID NO: 148310 - DNA, 25 bp, Artificial
  probe
  misc_feature (1)..(25): SEQ ID NO: 5683; WAN024D8Y_at; Start 2; Stop 26
tgtatcgctgtatcgatatcctccg

SEQ ID NO: 148311 - DNA, 25 bp, Artificial
  probe
  misc_feature (1)..(25): SEQ ID NO: 5683; WAN024D8Y_at; Start 98; Stop 122
catcttctttatccttggcatctgc

SEQ ID NO: 148312 - DNA, 25 bp, Artificial
  probe
  misc_feature (1)..(25): SEQ ID NO: 5683; WAN024D8Y_at; Start 16; Stop 40
gatatcctccgtggaatagtagatt

SEQ ID NO: 148313 - DNA, 25 bp, Artificial
  probe
  misc_feature (1)..(25): SEQ ID NO: 5683; WAN024D8Y_at; Start 111; Stop 135
cttggcatctgctttgtctgagaca

SEQ ID NO: 148314 - DNA, 25 bp, Artificial
  probe
  misc_feature (1)..(25): SEQ ID NO: 5683; WAN024D8Y_at; Start 127; Stop 151
tctgagacaaatagaatgtcaatac

SEQ ID NO: 148315 - DNA, 25 bp, Artificial
  probe
  misc_feature (1)..(25): SEQ ID NO: 5683; WAN024D8Y_at; Start 18; Stop 42
tatcctccgtggaatagtagattta

SEQ ID NO: 148316 - DNA, 25 bp, Artificial
  probe
  misc_feature (1)..(25): SEQ ID NO: 5683; WAN024D8Y_at; Start 8; Stop 32
gctgtatcgatatcctccgtggaat

SEQ ID NO: 148317 - DNA, 25 bp, Artificial
  probe
  misc_feature (1)..(25): SEQ ID NO: 5683; WAN024D8Y_at; Start 58; Stop 82
caagacttgtttaacccatttcttg

SEQ ID NO: 148318 - DNA, 25 bp, Artificial
  probe
  misc_feature (1)..(25): SEQ ID NO: 5683; WAN024D8Y_at; Start 12; Stop 36
tatcgatatcctccgtggaatagta

SEQ ID NO: 148319 - DNA, 25 bp, Artificial
  probe
  misc_feature (1)..(25): SEQ ID NO: 5683; WAN024D8Y_at; Start 10; Stop 34
tgtatcgatatcctccgtggaatag

SEQ ID NO: 148320 - DNA, 25 bp, Artificial
  probe
  misc_feature (1)..(25): SEQ ID NO: 5683; WAN024D8Y_at; Start 6; Stop 30
tcgctgtatcgatatcctccgtgga

SEQ ID NO: 148321 - DNA, 25 bp, Artificial
  probe
  misc_feature (1)..(25): SEQ ID NO: 5683; WAN024D8Y_at; Start 51; Stop 75
tatcattcaagacttgtttaaccca

SEQ ID NO: 148322 - DNA, 25 bp, Artificial
  probe
  misc_feature (1)..(25): SEQ ID NO: 5683; WAN024D8Y_at; Start 132; Stop 156
gacaaatagaatgtcaatacctggc

SEQ ID NO: 148323 - DNA, 25 bp, Artificial
  probe
  misc_feature (1)..(25): SEQ ID NO: 5683; WAN024D8Y_at; Start 4; Stop 28
tatcgctgtatcgatatcctccgtg

SEQ ID NO: 148324 - DNA, 25 bp, Artificial
  probe
  misc_feature (1)..(25): SEQ ID NO: 5683; WAN024D8Y_at; Start 113; Stop 137
tggcatctgctttgtctgagacaaa

SEQ ID NO: 148325 - DNA, 25 bp, Artificial
  probe
  misc_feature (1)..(25): SEQ ID NO: 5683; WAN024D8Y_at; Start 123; Stop 147
tttgtctgagacaaatagaatgtca

SEQ ID NO: 148326 - DNA, 25 bp, Artificial
  probe
  misc_feature (1)..(25): SEQ ID NO: 5683; WAN024D8Y_at; Start 107; Stop 131
tatccttggcatctgctttgtctga

SEQ ID NO: 148327 - DNA, 25 bp, Artificial
  probe
  misc_feature (1)..(25): SEQ ID NO: 5683; WAN024D8Y_at; Start 7; Stop 31
cgctgtatcgatatcctccgtggaa

SEQ ID NO: 148328 - DNA, 25 bp, Artificial
  probe
  misc_feature (1)..(25): SEQ ID NO: 5683; WAN024D8Y_at; Start 136; Stop 160
aatagaatgtcaatacctggcagac

SEQ ID NO: 148329 - DNA, 25 bp, Artificial
  probe
  misc_feature (1)..(25): SEQ ID NO: 5683; WAN024D8Y_at; Start 23; Stop 47
tccgtggaatagtagatttattttc

SEQ ID NO: 148330 - DNA, 25 bp, Artificial
  probe
  misc_feature (1)..(25): SEQ ID NO: 5683; WAN024D8Y_at; Start 54; Stop 78
cattcaagacttgtttaacccattt

SEQ ID NO: 148331 - DNA, 25 bp, Artificial
  probe
  misc_feature (1)..(25): SEQ ID NO: 790; WAN024D8Z_at; Start 58; Stop 82
ggtattgacattctatttgtctcag

SEQ ID NO: 148332 - DNA, 25 bp, Artificial
  probe
  misc_feature (1)..(25): SEQ ID NO: 790; WAN024D8Z_at; Start 35; Stop 59
tagacgatgggttttatctgccagg

SEQ ID NO: 148333 - DNA, 25 bp, Artificial
  probe
  misc_feature (1)..(25): SEQ ID NO: 790; WAN024D8Z_at; Start 109; Stop 133
gatgtaattttatttctttcaagaa

SEQ ID NO: 148334 - DNA, 25 bp, Artificial
  probe
  misc_feature (1)..(25): SEQ ID NO: 790; WAN024D8Z_at; Start 23; Stop 47
caactaaacaaatagacgatgggtt

SEQ ID NO: 148335 - DNA, 25 bp, Artificial
  probe
  misc_feature (1)..(25): SEQ ID NO: 790; WAN024D8Z_at; Start 31; Stop 55
caaatagacgatgggttttatctgc

SEQ ID NO: 148336 - DNA, 25 bp, Artificial
  probe
  misc_feature (1)..(25): SEQ ID NO: 790; WAN024D8Z_at; Start 86; Stop 110
aagcagatgccaaggataaagaaga

SEQ ID NO: 148337 - DNA, 25 bp, Artificial
  probe
  misc_feature (1)..(25): SEQ ID NO: 790; WAN024D8Z_at; Start 33; Stop 57
aatagacgatgggttttatctgcca

SEQ ID NO: 148338 - DNA, 25 bp, Artificial
  probe
  misc_feature (1)..(25): SEQ ID NO: 790; WAN024D8Z_at; Start 22; Stop 46
ccaactaaacaaatagacgatgggt

SEQ ID NO: 148339 - DNA, 25 bp, Artificial
  probe
  misc_feature (1)..(25): SEQ ID NO: 790; WAN024D8Z_at; Start 95; Stop 119
ccaaggataaagaagatgtaatttt

SEQ ID NO: 148340 - DNA, 25 bp, Artificial
  probe
  misc_feature (1)..(25): SEQ ID NO: 790; WAN024D8Z_at; Start 84; Stop 108
caaagcagatgccaaggataaagaa

SEQ ID NO: 148341 - DNA, 25 bp, Artificial
  probe
  misc_feature (1)..(25): SEQ ID NO: 790; WAN024D8Z_at; Start 76; Stop 100
gtctcagacaaagcagatgccaagg

SEQ ID NO: 148342 - DNA, 25 bp, Artificial
  probe
  misc_feature (1)..(25): SEQ ID NO: 790; WAN024D8Z_at; Start 82; Stop 106
gacaaagcagatgccaaggataaag

SEQ ID NO: 148343 - DNA, 25 bp, Artificial
  probe
  misc_feature (1)..(25): SEQ ID NO: 790; WAN024D8Z_at; Start 39; Stop 63
cgatgggttttatctgccaggtatt

SEQ ID NO: 148344 - DNA, 25 bp, Artificial
  probe
  misc_feature (1)..(25): SEQ ID NO: 790; WAN024D8Z_at; Start 80; Stop 104
cagacaaagcagatgccaaggataa

SEQ ID NO: 148345 - DNA, 25 bp, Artificial
  probe
  misc_feature (1)..(25): SEQ ID NO: 790; WAN024D8Z_at; Start 75; Stop 99
tgtctcagacaaagcagatgccaag

SEQ ID NO: 148346 - DNA, 25 bp, Artificial
  probe
  misc_feature (1)..(25): SEQ ID NO: 790; WAN024D8Z_at; Start 79; Stop 103
tcagacaaagcagatgccaaggata

SEQ ID NO: 148347 - DNA, 25 bp, Artificial
  probe
  misc_feature (1)..(25): SEQ ID NO: 790; WAN024D8Z_at; Start 71; Stop 95
tatttgtctcagacaaagcagatgc

SEQ ID NO: 148348 - DNA, 25 bp, Artificial
  probe
  misc_feature (1)..(25): SEQ ID NO: 790; WAN024D8Z_at; Start 91; Stop 115
gatgccaaggataaagaagatgtaa

SEQ ID NO: 148349 - DNA, 25 bp, Artificial
  probe
  misc_feature (1)..(25): SEQ ID NO: 790; WAN024D8Z_at; Start 73; Stop 97
tttgtctcagacaaagcagatgcca

SEQ ID NO: 148350 - DNA, 25 bp, Artificial
  probe
  misc_feature (1)..(25): SEQ ID NO: 790; WAN024D8Z_at; Start 89; Stop 113
cagatgccaaggataaagaagatgt

SEQ ID NO: 148351 - DNA, 25 bp, Artificial
  probe
  misc_feature (1)..(25): SEQ ID NO: 790; WAN024D8Z_at; Start 77; Stop 101
tctcagacaaagcagatgccaagga

SEQ ID NO: 148352 - DNA, 25 bp, Artificial
  probe
  misc_feature (1)..(25): SEQ ID NO: 790; WAN024D8Z_at; Start 93; Stop 117
tgccaaggataaagaagatgtaatt

SEQ ID NO: 148353 - DNA, 25 bp, Artificial
  probe
  misc_feature (1)..(25): SEQ ID NO: 790; WAN024D8Z_at; Start 64; Stop 88
gacattctatttgtctcagacaaag

SEQ ID NO: 148354 - DNA, 25 bp, Artificial
  probe
  misc_feature (1)..(25): SEQ ID NO: 790; WAN024D8Z_at; Start 49; Stop 73
tatctgccaggtattgacattctat

SEQ ID NO: 148355 - DNA, 25 bp, Artificial
  probe
  misc_feature (1)..(25): SEQ ID NO: 790; WAN024D8Z_at; Start 55; Stop 79
ccaggtattgacattctatttgtct

SEQ ID NO: 148356 - DNA, 25 bp, Artificial
  probe
  misc_feature (1)..(25): SEQ ID NO: 790; WAN024D8Z_at; Start 60; Stop 84
tattgacattctatttgtctcagac

SEQ ID NO: 148357 - DNA, 25 bp, Artificial
  probe
  misc_feature (1)..(25): SEQ ID NO: 790; WAN024D8Z_at; Start 51; Stop 75
tctgccaggtattgacattctattt

SEQ ID NO: 148358 - DNA, 25 bp, Artificial
  probe
  misc_feature (1)..(25): SEQ ID NO: 790; WAN024D8Z_at; Start 37; Stop 61
gacgatgggttttatctgccaggta

SEQ ID NO: 148359 - DNA, 25 bp, Artificial
  probe
  misc_feature (1)..(25): SEQ ID NO: 790; WAN024D8Z_at; Start 78; Stop 102
ctcagacaaagcagatgccaaggat

SEQ ID NO: 148360 - DNA, 25 bp, Artificial
  probe
  misc_feature (1)..(25): SEQ ID NO: 790; WAN024D8Z_at; Start 17; Stop 41
tcaaaccaactaaacaaatagacga

SEQ ID NO: 148361 - DNA, 25 bp, Artificial
  probe
  misc_feature (1)..(25): SEQ ID NO: 790; WAN024D8Z_at; Start 47; Stop 71
tttatctgccaggtattgacattct

SEQ ID NO: 148362 - DNA, 25 bp, Artificial
  probe
  misc_feature (1)..(25): SEQ ID NO: 790; WAN024D8Z_at; Start 44; Stop 68
ggttttatctgccaggtattgacat

SEQ ID NO: 148363 - DNA, 25 bp, Artificial
  probe
  misc_feature (1)..(25): SEQ ID NO: 790; WAN024D8Z_at; Start 53; Stop 77
tgccaggtattgacattctatttgt

SEQ ID NO: 148364 - DNA, 25 bp, Artificial
  probe
  misc_feature (1)..(25): SEQ ID NO: 790; WAN024D8Z_at; Start 42; Stop 66
tgggttttatctgccaggtattgac

SEQ ID NO: 148365 - DNA, 25 bp, Artificial
  probe
  misc_feature (1)..(25): SEQ ID NO: 3389; WAN024D92_at; Start 457; Stop 481
gctgccctctgggatcaggttaaag

SEQ ID NO: 148366 - DNA, 25 bp, Artificial
  probe
  misc_feature (1)..(25): SEQ ID NO: 3389; WAN024D92_at; Start 625; Stop 649
gaagagaccatgtttgagctcaaga

SEQ ID NO: 148367 - DNA, 25 bp, Artificial
  probe
  misc_feature (1)..(25): SEQ ID NO: 3389; WAN024D92_at; Start 514; Stop 538
ggtggtcagcaacaacgtctctgta

SEQ ID NO: 148368 - DNA, 25 bp, Artificial
  probe
  misc_feature (1)..(25): SEQ ID NO: 3389; WAN024D92_at; Start 527; Stop 551
aacgtctctgtatcgctcgtgccat

SEQ ID NO: 148369 - DNA, 25 bp, Artificial
  probe
  misc_feature (1)..(25): SEQ ID NO: 3389; WAN024D92_at; Start 671; Stop 695
taacgcataatatgcagcaggctgc

SEQ ID NO: 148370 - DNA, 25 bp, Artificial
  probe
  misc_feature (1)..(25): SEQ ID NO: 3389; WAN024D92_at; Start 688; Stop 712
caggctgctcgtgcaagtgactata

SEQ ID NO: 148371 - DNA, 25 bp, Artificial
  probe
  misc_feature (1)..(25): SEQ ID NO: 3389; WAN024D92_at; Start 293; Stop 317
cagaaatcaacgtttatgaaatgcg

SEQ ID NO: 148372 - DNA, 25 bp, Artificial
  probe
  misc_feature (1)..(25): SEQ ID NO: 3389; WAN024D92_at; Start 481; Stop 505
gacgatctccacaagtcagccttga

SEQ ID NO: 148373 - DNA, 25 bp, Artificial
  probe
  misc_feature (1)..(25): SEQ ID NO: 3389; WAN024D92_at; Start 745; Stop 769
tatgacaagactgcaactattttcc

SEQ ID NO: 148374 - DNA, 25 bp, Artificial
  probe
  misc_feature (1)..(25): SEQ ID NO: 3389; WAN024D92_at; Start 13; Stop 37
gaagccatgtcaacatataactggg

SEQ ID NO: 148375 - DNA, 25 bp, Artificial
  probe
  misc_feature (1)..(25): SEQ ID NO: 3389; WAN024D92_at; Start 592; Stop 616
tcagccttggatccgattgcgacca

SEQ ID NO: 148376 - DNA, 25 bp, Artificial
  probe
  misc_feature (1)..(25): SEQ ID NO: 3389; WAN024D92_at; Start 2; Stop 26
tgcctaaaggagaagccatgtcaac

SEQ ID NO: 148377 - DNA, 25 bp, Artificial
  probe
  misc_feature (1)..(25): SEQ ID NO: 3389; WAN024D92_at; Start 414; Stop 438
taagcaagtcctagatgaaatcgta

SEQ ID NO: 148378 - DNA, 25 bp, Artificial
  probe
  misc_feature (1)..(25): SEQ ID NO: 3389; WAN024D92_at; Start 202; Stop 226
tacttacgcagtctcaatcgcatga

SEQ ID NO: 148379 - DNA, 25 bp, Artificial
  probe
  misc_feature (1)..(25): SEQ ID NO: 3389; WAN024D92_at; Start 471; Stop 495
tcaggttaaagacgatctccacaag

SEQ ID NO: 148380 - DNA, 25 bp, Artificial
  probe
  misc_feature (1)..(25): SEQ ID NO: 3389; WAN024D92_at; Start 266; Stop 290
tctatcgtggaattgatgtcaaccg

SEQ ID NO: 148381 - DNA, 25 bp, Artificial
  probe
  misc_feature (1)..(25): SEQ ID NO: 3389; WAN024D92_at; Start 425; Stop 449
tagatgaaatcgtagaaacctccct

SEQ ID NO: 148382 - DNA, 25 bp, Artificial
  probe
  misc_feature (1)..(25): SEQ ID NO: 3389; WAN024D92_at; Start 43; Stop 67
aagcatatccttacctttcctgaag

SEQ ID NO: 148383 - DNA, 25 bp, Artificial
  probe
  misc_feature (1)..(25): SEQ ID NO: 3389; WAN024D92_at; Start 541; Stop 565
gctcgtgccatctctgttaagccag

SEQ ID NO: 148384 - DNA, 25 bp, Artificial
  probe
  misc_feature (1)..(25): SEQ ID NO: 3389; WAN024D92_at; Start 565; Stop 589
gatatcctcttaatggatgagccag

SEQ ID NO: 148385 - DNA, 25 bp, Artificial
  probe
  misc_feature (1)..(25): SEQ ID NO: 3389; WAN024D92_at; Start 496; Stop 520
tcagccttgaccttatcaggtggtc

SEQ ID NO: 148386 - DNA, 25 bp, Artificial
  probe
  misc_feature (1)..(25): SEQ ID NO: 3389; WAN024D92_at; Start 789; Stop 813
caccaatgactatgtatctggtcac

SEQ ID NO: 148387 - DNA, 25 bp, Artificial
  probe
  misc_feature (1)..(25): SEQ ID NO: 3389; WAN024D92_at; Start 437; Stop 461
tagaaacctcccttcgtcaggctgc

SEQ ID NO: 148388 - DNA, 25 bp, Artificial
  probe
  misc_feature (1)..(25): SEQ ID NO: 3389; WAN024D92_at; Start 381; Stop 405
tacctttgcgcatgaacgtgctgga

SEQ ID NO: 148389 - DNA, 25 bp, Artificial
  probe
  misc_feature (1)..(25): SEQ ID NO: 3389; WAN024D92_at; Start 605; Stop 629
cgattgcgaccatgcaactagaaga

SEQ ID NO: 148390 - DNA, 25 bp, Artificial
  probe
  misc_feature (1)..(25): SEQ ID NO: 3389; WAN024D92_at; Start 28; Stop 52
tataactgggatgagaagcatatcc

SEQ ID NO: 148391 - DNA, 25 bp, Artificial
  probe
  misc_feature (1)..(25): SEQ ID NO: 3389; WAN024D92_at; Start 772; Stop 796
aatgccaagctacagtccaccaatg

SEQ ID NO: 148392 - DNA, 25 bp, Artificial
  probe
  misc_feature (1)..(25): SEQ ID NO: 3389; WAN024D92_at; Start 400; Stop 424
gctggagttaaggataagcaagtcc

SEQ ID NO: 148393 - DNA, 25 bp, Artificial
  probe
  misc_feature (1)..(25): SEQ ID NO: 3389; WAN024D92_at; Start 762; Stop 786
tattttccaaaatgccaagctacag

SEQ ID NO: 148394 - DNA, 25 bp, Artificial
  probe
  misc_feature (1)..(25): SEQ ID NO: 3389; WAN024D92_at; Start 310; Stop 334
gaaatgcgtaaacacattggaatgg

SEQ ID NO: 148395 - DNA, 25 bp, Artificial
  probe
  misc_feature (1)..(25): SEQ ID NO: 3389; WAN024D92_at; Start 237; Stop 261
tgatattgctaaagtaactgggcag

SEQ ID NO: 148396 - DNA, 25 bp, Artificial
  probe
  misc_feature (1)..(25): SEQ ID NO: 3389; WAN024D92_at; Start 251; Stop 275
taactgggcagattctctatcgtgg

SEQ ID NO: 148397 - DNA, 25 bp, Artificial
  probe
  misc_feature (1)..(25): SEQ ID NO: 3389; WAN024D92_at; Start 280; Stop 304
gatgtcaaccgtccagaaatcaacg

SEQ ID NO: 148398 - DNA, 25 bp, Artificial
  probe
  misc_feature (1)..(25): SEQ ID NO: 3389; WAN024D92_at; Start 709; Stop 733
tatacaggcttcttttacttgggtg

SEQ ID NO: 148399 - DNA, 25 bp, Artificial
  probe
  misc_feature (1)..(25): SEQ ID NO: 944; WAN024D93_at; Start 322; Stop 346
gcaggaattagtgctactgacgaga

SEQ ID NO: 148400 - DNA, 25 bp, Artificial
  probe
  misc_feature (1)..(25): SEQ ID NO: 944; WAN024D93_at; Start 243; Stop 267
ggttaagttggaaatctcaagcatg

SEQ ID NO: 148401 - DNA, 25 bp, Artificial
  probe
  misc_feature (1)..(25): SEQ ID NO: 944; WAN024D93_at; Start 626; Stop 650
aaaacgctggcttagctgtcgcaac

SEQ ID NO: 148402 - DNA, 25 bp, Artificial
  probe
  misc_feature (1)..(25): SEQ ID NO: 944; WAN024D93_at; Start 531; Stop 555
cctaactaatatgggtgaagcagtc

SEQ ID NO: 148403 - DNA, 25 bp, Artificial
  probe
  misc_feature (1)..(25): SEQ ID NO: 944; WAN024D93_at; Start 67; Stop 91
cagtcaggttctaatggttctcagt

SEQ ID NO: 148404 - DNA, 25 bp, Artificial
  probe
  misc_feature (1)..(25): SEQ ID NO: 944; WAN024D93_at; Start 203; Stop 227
cagacatcgacatggctcaggctat

SEQ ID NO: 148405 - DNA, 25 bp, Artificial
  probe
  misc_feature (1)..(25): SEQ ID NO: 944; WAN024D93_at; Start 773; Stop 797
gctatcttgaaaaagcagcaagtct

SEQ ID NO: 148406 - DNA, 25 bp, Artificial
  probe
  misc_feature (1)..(25): SEQ ID NO: 944; WAN024D93_at; Start 412; Stop 436
gctgatgtggaaaaatacaaggatt

SEQ ID NO: 148407 - DNA, 25 bp, Artificial
  probe
  misc_feature (1)..(25): SEQ ID NO: 944; WAN024D93_at; Start 371; Stop 395
tcccatactatgaaaacaagattag

SEQ ID NO: 148408 - DNA, 25 bp, Artificial
  probe
  misc_feature (1)..(25): SEQ ID NO: 944; WAN024D93_at; Start 448; Stop 472
gaaagtgctaatattgcagcccaaa

SEQ ID NO: 148409 - DNA, 25 bp, Artificial
  probe
  misc_feature (1)..(25): SEQ ID NO: 944; WAN024D93_at; Start 39; Stop 63
tcttgcaagtttcttcttagtagct

SEQ ID NO: 148410 - DNA, 25 bp, Artificial
  probe
  misc_feature (1)..(25): SEQ ID NO: 944; WAN024D93_at; Start 757; Stop 781
gaaggaacttaccaaagctatcttg

SEQ ID NO: 148411 - DNA, 25 bp, Artificial
  probe
  misc_feature (1)..(25): SEQ ID NO: 944; WAN024D93_at; Start 664; Stop 688
atgaaggacggcgacgccaatgccg

SEQ ID NO: 148412 - DNA, 25 bp, Artificial
  probe
  misc_feature (1)..(25): SEQ ID NO: 944; WAN024D93_at; Start 398; Stop 422
tcttggttcgtaaggctgatgtgga

SEQ ID NO: 148413 - DNA, 25 bp, Artificial
  probe
  misc_feature (1)..(25): SEQ ID NO: 944; WAN024D93_at; Start 433; Stop 457
gatttaactagcctagaaagtgcta

SEQ ID NO: 148414 - DNA, 25 bp, Artificial
  probe
  misc_feature (1)..(25): SEQ ID NO: 944; WAN024D93_at; Start 257; Stop 281
tctcaagcatgagttttgacaatgt

SEQ ID NO: 148415 - DNA, 25 bp, Artificial
  probe
  misc_feature (1)..(25): SEQ ID NO: 944; WAN024D93_at; Start 289; Stop 313
agtcttcaaactggtaaggctgacc

SEQ ID NO: 148416 - DNA, 25 bp, Artificial
  probe
  misc_feature (1)..(25): SEQ ID NO: 944; WAN024D93_at; Start 491; Stop 515
caatggtcaaggaacaattgccaaa

SEQ ID NO: 148417 - DNA, 25 bp, Artificial
  probe
  misc_feature (1)..(25): SEQ ID NO: 944; WAN024D93_at; Start 274; Stop 298
gacaatgttttgaccagtcttcaaa

SEQ ID NO: 148418 - DNA, 25 bp, Artificial
  probe
  misc_feature (1)..(25): SEQ ID NO: 944; WAN024D93_at; Start 155; Stop 179
cctttgaatttcaatcattggttga

SEQ ID NO: 148419 - DNA, 25 bp, Artificial
  probe
  misc_feature (1)..(25): SEQ ID NO: 944; WAN024D93_at; Start 612; Stop 636
tagttatgctgctaaaaacgctggc

SEQ ID NO: 148420 - DNA, 25 bp, Artificial
  probe
  misc_feature (1)..(25): SEQ ID NO: 944; WAN024D93_at; Start 657; Stop 681
cttgaagatgaaggacggcgacgcc

SEQ ID NO: 148421 - DNA, 25 bp, Artificial
  probe
  misc_feature (1)..(25): SEQ ID NO: 944; WAN024D93_at; Start 141; Stop 165
tcctgactatgcaccctttgaattt

SEQ ID NO: 148422 - DNA, 25 bp, Artificial
  probe
  misc_feature (1)..(25): SEQ ID NO: 944; WAN024D93_at; Start 190; Stop 214
caggtagtcggtgcagacatcgaca

SEQ ID NO: 148423 - DNA, 25 bp, Artificial
  probe
  misc_feature (1)..(25): SEQ ID NO: 944; WAN024D93_at; Start 336; Stop 360
tactgacgagagaaaagaagtcttt

SEQ ID NO: 148424 - DNA, 25 bp, Artificial
  probe
  misc_feature (1)..(25): SEQ ID NO: 944; WAN024D93_at; Start 544; Stop 568
ggtgaagcagtcaatgaattgcagg

SEQ ID NO: 148425 - DNA, 25 bp, Artificial
  probe
  misc_feature (1)..(25): SEQ ID NO: 944; WAN024D93_at; Start 303; Stop 327
taaggctgacctagcagttgcagga

SEQ ID NO: 148426 - DNA, 25 bp, Artificial
  probe
  misc_feature (1)..(25): SEQ ID NO: 944; WAN024D93_at; Start 709; Stop 733
gatgatttgaaagaagtggtagaca

SEQ ID NO: 148427 - DNA, 25 bp, Artificial
  probe
  misc_feature (1)..(25): SEQ ID NO: 944; WAN024D93_at; Start 787; Stop 811
gcagcaagtctaactgaagttgaag

SEQ ID NO: 148428 - DNA, 25 bp, Artificial
  probe
  misc_feature (1)..(25): SEQ ID NO: 944; WAN024D93_at; Start 598; Stop 622
gagcctgttgcacttagttatgctg

SEQ ID NO: 148429 - DNA, 25 bp, Artificial
  probe
  misc_feature (1)..(25): SEQ ID NO: 944; WAN024D93_at; Start 219; Stop 243
tcaggctatcgctgatgaacttggg

SEQ ID NO: 148430 - DNA, 25 bp, Artificial
  probe
  misc_feature (1)..(25): SEQ ID NO: 944; WAN024D93_at; Start 642; Stop 666
tgtcgcaactgtcagcttgaagatg

SEQ ID NO: 148431 - DNA, 25 bp, Artificial
  probe
  misc_feature (1)..(25): SEQ ID NO: 944; WAN024D93_at; Start 477; Stop 501
gactgttccagaatcaatggtcaag

SEQ ID NO: 148432 - DNA, 25 bp, Artificial
  probe
  misc_feature (1)..(25): SEQ ID NO: 944; WAN024D93_at; Start 587; Stop 611
ttcatatggatgagcctgttgcact

SEQ ID NO: 148433 - DNA, 25 bp, Artificial
  probe
  misc_feature (1)..(25): SEQ ID NO: 2315; WAN024D94_at; Start 178; Stop 202
tatcaggccaaagggtcaggagacc

SEQ ID NO: 148434 - DNA, 25 bp, Artificial
  probe
  misc_feature (1)..(25): SEQ ID NO: 2315; WAN024D94_at; Start 454; Stop 478
caaccggaatatagtcgtgacaatg

SEQ ID NO: 148435 - DNA, 25 bp, Artificial
  probe
  misc_feature (1)..(25): SEQ ID NO: 2315; WAN024D94_at; Start 486; Stop 510
gactattgttggtttctggacgcct

SEQ ID NO: 148436 - DNA, 25 bp, Artificial
  probe
  misc_feature (1)..(25): SEQ ID NO: 2315; WAN024D94_at; Start 626; Stop 650
gagcagttgaccagttggaccaacg

SEQ ID NO: 148437 - DNA, 25 bp, Artificial
  probe
  misc_feature (1)..(25): SEQ ID NO: 2315; WAN024D94_at; Start 583; Stop 607
catgtcatggattttgtcatcaagg

SEQ ID NO: 148438 - DNA, 25 bp, Artificial
  probe
  misc_feature (1)..(25): SEQ ID NO: 2315; WAN024D94_at; Start 268; Stop 292
gcagaggtcattttccgccagcgct

SEQ ID NO: 148439 - DNA, 25 bp, Artificial
  probe
  misc_feature (1)..(25): SEQ ID NO: 2315; WAN024D94_at; Start 229; Stop 253
gatgcccttattccttacgctgcag

SEQ ID NO: 148440 - DNA, 25 bp, Artificial
  probe
  misc_feature (1)..(25): SEQ ID NO: 2315; WAN024D94_at; Start 299; Stop 323
tgacagacaaggaattgaaagaacg

SEQ ID NO: 148441 - DNA, 25 bp, Artificial
  probe
  misc_feature (1)..(25): SEQ ID NO: 2315; WAN024D94_at; Start 408; Stop 432
tcctaagtcaacacccgataccaag

SEQ ID NO: 148442 - DNA, 25 bp, Artificial
  probe
  misc_feature (1)..(25): SEQ ID NO: 2315; WAN024D94_at; Start 194; Stop 218
caggagaccagccagaaattgtgga

SEQ ID NO: 148443 - DNA, 25 bp, Artificial
  probe
  misc_feature (1)..(25): SEQ ID NO: 2315; WAN024D94_at; Start 240; Stop 264
tccttacgctgcagtggtaccgcat

SEQ ID NO: 148444 - DNA, 25 bp, Artificial
  probe
  misc_feature (1)..(25): SEQ ID NO: 2315; WAN024D94_at; Start 525; Stop 549
ggtcagtgtggcaggctaccatctg

SEQ ID NO: 148445 - DNA, 25 bp, Artificial
  probe
  misc_feature (1)..(25): SEQ ID NO: 2315; WAN024D94_at; Start 125; Stop 149
tgggaaccttggattccattgatgg

SEQ ID NO: 148446 - DNA, 25 bp, Artificial
  probe
  misc_feature (1)..(25): SEQ ID NO: 2315; WAN024D94_at; Start 4; Stop 28
gataagaacgtgcaggaaccagtga

SEQ ID NO: 148447 - DNA, 25 bp, Artificial
  probe
  misc_feature (1)..(25): SEQ ID NO: 2315; WAN024D94_at; Start 283; Stop 307
cgccagcgctttgagatgacagaca

SEQ ID NO: 148448 - DNA, 25 bp, Artificial
  probe
  misc_feature (1)..(25): SEQ ID NO: 2315; WAN024D94_at; Start 162; Stop 186
cttggatggcaaggcttatcaggcc

SEQ ID NO: 148449 - DNA, 25 bp, Artificial
  probe
  misc_feature (1)..(25): SEQ ID NO: 2315; WAN024D94_at; Start 663; Stop 687
agaccgtcaatacttgtttgctaag

SEQ ID NO: 148450 - DNA, 25 bp, Artificial
  probe
  misc_feature (1)..(25): SEQ ID NO: 2315; WAN024D94_at; Start 500; Stop 524
tctggacgcctgagattttccatgg

SEQ ID NO: 148451 - DNA, 25 bp, Artificial
  probe
  misc_feature (1)..(25): SEQ ID NO: 2315; WAN024D94_at; Start 557; Stop 581
tatcagatgatttgaccttcggtgg

SEQ ID NO: 148452 - DNA, 25 bp, Artificial
  probe
  misc_feature (1)..(25): SEQ ID NO: 2315; WAN024D94_at; Start 42; Stop 66
caatactcttggagccttgatggct

SEQ ID NO: 148453 - DNA, 25 bp, Artificial
  probe
  misc_feature (1)..(25): SEQ ID NO: 2315; WAN024D94_at; Start 59; Stop 83
tgatggctggcctttatggtggtac

SEQ ID NO: 148454 - DNA, 25 bp, Artificial
  probe
  misc_feature (1)..(25): SEQ ID NO: 2315; WAN024D94_at; Start 682; Stop 706
gctaagttcaatgttgacgagatga

SEQ ID NO: 148455 - DNA, 25 bp, Artificial
  probe
  misc_feature (1)..(25): SEQ ID NO: 2315; WAN024D94_at; Start 439; Stop 463
gatgtcgcaacccatcaaccggaat

SEQ ID NO: 148456 - DNA, 25 bp, Artificial
  probe
  misc_feature (1)..(25): SEQ ID NO: 2315; WAN024D94_at; Start 612; Stop 636
cattatcgaggtgggagcagttgac

SEQ ID NO: 148457 - DNA, 25 bp, Artificial
  probe
  misc_feature (1)..(25): SEQ ID NO: 2315; WAN024D94_at; Start 424; Stop 448
gataccaagtttgctgatgtcgcaa

SEQ ID NO: 148458 - DNA, 25 bp, Artificial
  probe
  misc_feature (1)..(25): SEQ ID NO: 2315; WAN024D94_at; Start 649; Stop 673
cgtttcccagtccaagaccgtcaat

SEQ ID NO: 148459 - DNA, 25 bp, Artificial
  probe
  misc_feature (1)..(25): SEQ ID NO: 2315; WAN024D94_at; Start 97; Stop 121
gaattgctagaacatggtgaccttg

SEQ ID NO: 148460 - DNA, 25 bp, Artificial
  probe
  misc_feature (1)..(25): SEQ ID NO: 2315; WAN024D94_at; Start 109; Stop 133
catggtgaccttggtttgggaacct

SEQ ID NO: 148461 - DNA, 25 bp, Artificial
  probe
  misc_feature (1)..(25): SEQ ID NO: 2315; WAN024D94_at; Start 597; Stop 621
tgtcatcaaggaaggcattatcgag

SEQ ID NO: 148462 - DNA, 25 bp, Artificial
  probe
  misc_feature (1)..(25): SEQ ID NO: 2315; WAN024D94_at; Start 390; Stop 414
tatgcatgtgcgtatgattcctaag

SEQ ID NO: 148463 - DNA, 25 bp, Artificial
  probe
  misc_feature (1)..(25): SEQ ID NO: 2315; WAN024D94_at; Start 81; Stop 105
tactatgacagtaggagaattgcta

SEQ ID NO: 148464 - DNA, 25 bp, Artificial
  probe
  misc_feature (1)..(25): SEQ ID NO: 2315; WAN024D94_at; Start 538; Stop 562
ggctaccatctgcacttcatatcag

SEQ ID NO: 148465 - DNA, 25 bp, Artificial
  probe
  misc_feature (1)..(25): SEQ ID NO: 2315; WAN024D94_at; Start 213; Stop 237
tgtggaagtgtcaccagatgccctt

SEQ ID NO: 148466 - DNA, 25 bp, Artificial
  probe
  misc_feature (1)..(25): SEQ ID NO: 2315; WAN024D94_at; Start 570; Stop 594
gaccttcggtggacatgtcatggat

SEQ ID NO: 148467 - DNA, 25 bp, Artificial
  probe
  misc_feature (1)..(25): SEQ ID NO: 621; WAN024D95_at; Start 678; Stop 702
gaataatgttgcaatcggcgtgacc

SEQ ID NO: 148468 - DNA, 25 bp, Artificial
  probe
  misc_feature (1)..(25): SEQ ID NO: 621; WAN024D95_at; Start 911; Stop 935
taccagcgaaggaattgctcccaga

SEQ ID NO: 148469 - DNA, 25 bp, Artificial
  probe
  misc_feature (1)..(25): SEQ ID NO: 621; WAN024D95_at; Start 873; Stop 897
ccaaaatgcggagtatgtcggctat

SEQ ID NO: 148470 - DNA, 25 bp, Artificial
  probe
  misc_feature (1)..(25): SEQ ID NO: 621; WAN024D95_at; Start 282; Stop 306
taacaagatgaaggacgaagacctc

SEQ ID NO: 148471 - DNA, 25 bp, Artificial
  probe
  misc_feature (1)..(25): SEQ ID NO: 621; WAN024D95_at; Start 739; Stop 763
gaaaatctacgttatgtggtaccga

SEQ ID NO: 148472 - DNA, 25 bp, Artificial
  probe
  misc_feature (1)..(25): SEQ ID NO: 621; WAN024D95_at; Start 1014; Stop 1038
taaatggacagggaaatatagcgac

SEQ ID NO: 148473 - DNA, 25 bp, Artificial
  probe
  misc_feature (1)..(25): SEQ ID NO: 621; WAN024D95_at; Start 787; Stop 811
gacaatatggtcattcccaaaacag

SEQ ID NO: 148474 - DNA, 25 bp, Artificial
  probe
  misc_feature (1)..(25): SEQ ID NO: 621; WAN024D95_at; Start 586; Stop 610
cagcagttggaagagacagtggata

SEQ ID NO: 148475 - DNA, 25 bp, Artificial
  probe
  misc_feature (1)..(25): SEQ ID NO: 621; WAN024D95_at; Start 245; Stop 269
cgacctacgatattgccattccaag

SEQ ID NO: 148476 - DNA, 25 bp, Artificial
  probe
  misc_feature (1)..(25): SEQ ID NO: 621; WAN024D95_at; Start 16; Stop 40
tcatttttagcaggaattgcagcga

SEQ ID NO: 148477 - DNA, 25 bp, Artificial
  probe
  misc_feature (1)..(25): SEQ ID NO: 621; WAN024D95_at; Start 530; Stop 554
aggtgctgggactaggactcaattc

SEQ ID NO: 148478 - DNA, 25 bp, Artificial
  probe
  misc_feature (1)..(25): SEQ ID NO: 621; WAN024D95_at; Start 949; Stop 973
gataaggccttctatcccgatgttg

SEQ ID NO: 148479 - DNA, 25 bp, Artificial
  probe
  misc_feature (1)..(25): SEQ ID NO: 621; WAN024D95_at; Start 34; Stop 58
gcagcgattatccttgtcttgtggg

SEQ ID NO: 148480 - DNA, 25 bp, Artificial
  probe
  misc_feature (1)..(25): SEQ ID NO: 621; WAN024D95_at; Start 365; Stop 389
tcaaccagtcctttgacccaggtaa

SEQ ID NO: 148481 - DNA, 25 bp, Artificial
  probe
  misc_feature (1)..(25): SEQ ID NO: 621; WAN024D95_at; Start 443; Stop 467
ccatggtagatgaagcgcctgagca

SEQ ID NO: 148482 - DNA, 25 bp, Artificial
  probe
  misc_feature (1)..(25): SEQ ID NO: 621; WAN024D95_at; Start 967; Stop 991
gatgttgaaaccatgaaacacctag

SEQ ID NO: 148483 - DNA, 25 bp, Artificial
  probe
  misc_feature (1)..(25): SEQ ID NO: 621; WAN024D95_at; Start 198; Stop 222
ttttgactccaacgaagccatgtac

SEQ ID NO: 148484 - DNA, 25 bp, Artificial
  probe
  misc_feature (1)..(25): SEQ ID NO: 621; WAN024D95_at; Start 348; Stop 372
tatcggaccagagtttctcaaccag

SEQ ID NO: 148485 - DNA, 25 bp, Artificial
  probe
  misc_feature (1)..(25): SEQ ID NO: 621; WAN024D95_at; Start 425; Stop 449
gaattgtctacaacgaaaccatggt

SEQ ID NO: 148486 - DNA, 25 bp, Artificial
  probe
  misc_feature (1)..(25): SEQ ID NO: 621; WAN024D95_at; Start 230; Stop 254
taaagcagggtggaacgacctacga

SEQ ID NO: 148487 - DNA, 25 bp, Artificial
  probe
  misc_feature (1)..(25): SEQ ID NO: 621; WAN024D95_at; Start 458; Stop 482
cgcctgagcattgggatgacctttg

SEQ ID NO: 148488 - DNA, 25 bp, Artificial
  probe
  misc_feature (1)..(25): SEQ ID NO: 621; WAN024D95_at; Start 542; Stop 566
taggactcaattccctcggctacag

SEQ ID NO: 148489 - DNA, 25 bp, Artificial
  probe
  misc_feature (1)..(25): SEQ ID NO: 621; WAN024D95_at; Start 1032; Stop 1056
tagcgacctcttcctacagtttaaa

SEQ ID NO: 148490 - DNA, 25 bp, Artificial
  probe
  misc_feature (1)..(25): SEQ ID NO: 621; WAN024D95_at; Start 895; Stop 919
tattcaacaccaaacctaccagcga

SEQ ID NO: 148491 - DNA, 25 bp, Artificial
  probe
  misc_feature (1)..(25): SEQ ID NO: 621; WAN024D95_at; Start 849; Stop 873
tatgttgaaacctgaaaatgctctc

SEQ ID NO: 148492 - DNA, 25 bp, Artificial
  probe
  misc_feature (1)..(25): SEQ ID NO: 621; WAN024D95_at; Start 755; Stop 779
tggtaccgacagaggccagcaatct

SEQ ID NO: 148493 - DNA, 25 bp, Artificial
  probe
  misc_feature (1)..(25): SEQ ID NO: 621; WAN024D95_at; Start 298; Stop 322
gaagacctcttggttccgcttgatt

SEQ ID NO: 148494 - DNA, 25 bp, Artificial
  probe
  misc_feature (1)..(25): SEQ ID NO: 621; WAN024D95_at; Start 709; Stop 733
ggtgaagccagccaaatgttagaaa

SEQ ID NO: 148495 - DNA, 25 bp, Artificial
  probe
  misc_feature (1)..(25): SEQ ID NO: 621; WAN024D95_at; Start 604; Stop 628
gtggataagctctacaaactgactc

SEQ ID NO: 148496 - DNA, 25 bp, Artificial
  probe
  misc_feature (1)..(25): SEQ ID NO: 621; WAN024D95_at; Start 130; Stop 154
gactatatcgatcctgaactcttga

SEQ ID NO: 148497 - DNA, 25 bp, Artificial
  probe
  misc_feature (1)..(25): SEQ ID NO: 621; WAN024D95_at; Start 694; Stop 718
ggcgtgaccttctctggtgaagcca

SEQ ID NO: 148498 - DNA, 25 bp, Artificial
  probe
  misc_feature (1)..(25): SEQ ID NO: 621; WAN024D95_at; Start 215; Stop 239
ccatgtacactaagataaagcaggg

SEQ ID NO: 148499 - DNA, 25 bp, Artificial
  probe
  misc_feature (1)..(25): SEQ ID NO: 621; WAN024D95_at; Start 926; Stop 950
tgctcccagaggaaacaaaggaaga

SEQ ID NO: 148500 - DNA, 25 bp, Artificial
  probe
  misc_feature (1)..(25): SEQ ID NO: 621; WAN024D95_at; Start 633; Stop 657
tatcaaggctatcgttgcggacgag

SEQ ID NO: 148501 - DNA, 25 bp, Artificial
  probe
  misc_feature (1)..(25): SEQ ID NO: 972; WAN024D96_at; Start 280; Stop 304
gattttgagtactatagctacaagg

SEQ ID NO: 148502 - DNA, 25 bp, Artificial
  probe
  misc_feature (1)..(25): SEQ ID NO: 972; WAN024D96_at; Start 205; Stop 229
gaaatcgacctttctccagaagagt

SEQ ID NO: 148503 - DNA, 25 bp, Artificial
  probe
  misc_feature (1)..(25): SEQ ID NO: 972; WAN024D96_at; Start 466; Stop 490
gacttgatgaactatacacgaggct

SEQ ID NO: 148504 - DNA, 25 bp, Artificial
  probe
  misc_feature (1)..(25): SEQ ID NO: 972; WAN024D96_at; Start 59; Stop 83
ccacgaggtacctggatgccgacat

SEQ ID NO: 148505 - DNA, 25 bp, Artificial
  probe
  misc_feature (1)..(25): SEQ ID NO: 972; WAN024D96_at; Start 426; Stop 450
taaggttgcggtgatggctcacacg

SEQ ID NO: 148506 - DNA, 25 bp, Artificial
  probe
  misc_feature (1)..(25): SEQ ID NO: 972; WAN024D96_at; Start 88; Stop 112
gaatggcgtgccgactatctgccta

SEQ ID NO: 148507 - DNA, 25 bp, Artificial
  probe
  misc_feature (1)..(25): SEQ ID NO: 972; WAN024D96_at; Start 537; Stop 561
taaggtgggcaaggtctctcgtatc

SEQ ID NO: 148508 - DNA, 25 bp, Artificial
  probe
  misc_feature (1)..(25): SEQ ID NO: 972; WAN024D96_at; Start 445; Stop 469
cacacggagcaggatgtcttagact

SEQ ID NO: 148509 - DNA, 25 bp, Artificial
  probe
  misc_feature (1)..(25): SEQ ID NO: 972; WAN024D96_at; Start 103; Stop 127
tatctgcctaaagaagcgattttgc

SEQ ID NO: 148510 - DNA, 25 bp, Artificial
  probe
  misc_feature (1)..(25): SEQ ID NO: 972; WAN024D96_at; Start 129; Stop 153
ggtagctccagccatttttgaaaaa

SEQ ID NO: 148511 - DNA, 25 bp, Artificial
  probe
  misc_feature (1)..(25): SEQ ID NO: 972; WAN024D96_at; Start 73; Stop 97
gatgccgacatcattgaatggcgtg

SEQ ID NO: 148512 - DNA, 25 bp, Artificial
  probe
  misc_feature (1)..(25): SEQ ID NO: 972; WAN024D96_at; Start 344; Stop 368
tgagttaccataatttccaagaaac

SEQ ID NO: 148513 - DNA, 25 bp, Artificial
  probe
  misc_feature (1)..(25): SEQ ID NO: 972; WAN024D96_at; Start 219; Stop 243
tccagaagagtatatccatctaatc

SEQ ID NO: 148514 - DNA, 25 bp, Artificial
  probe
  misc_feature (1)..(25): SEQ ID NO: 972; WAN024D96_at; Start 619; Stop 643
cctgggcagatttctctagctagca

SEQ ID NO: 148515 - DNA, 25 bp, Artificial
  probe
  misc_feature (1)..(25): SEQ ID NO: 972; WAN024D96_at; Start 504; Stop 528
tcctgaacaggaatatgtgaccatt

SEQ ID NO: 148516 - DNA, 25 bp, Artificial
  probe
  misc_feature (1)..(25): SEQ ID NO: 972; WAN024D96_at; Start 143; Stop 167
tttttgaaaaattcgcaggccgtga

SEQ ID NO: 148517 - DNA, 25 bp, Artificial
  probe
  misc_feature (1)..(25): SEQ ID NO: 972; WAN024D96_at; Start 551; Stop 575
tctctcgtatcactgcggatgtgac

SEQ ID NO: 148518 - DNA, 25 bp, Artificial
  probe
  misc_feature (1)..(25): SEQ ID NO: 972; WAN024D96_at; Start 395; Stop 419
cagagttgacgatcctaaatccaaa

SEQ ID NO: 148519 - DNA, 25 bp, Artificial
  probe
  misc_feature (1)..(25): SEQ ID NO: 972; WAN024D96_at; Start 154; Stop 178
ttcgcaggccgtgagttggttttca

SEQ ID NO: 148520 - DNA, 25 bp, Artificial
  probe
  misc_feature (1)..(25): SEQ ID NO: 972; WAN024D96_at; Start 298; Stop 322
tacaaggatgtttttgaggaaatgc

SEQ ID NO: 148521 - DNA, 25 bp, Artificial
  probe
  misc_feature (1)..(25): SEQ ID NO: 972; WAN024D96_at; Start 169; Stop 193
ttggttttcacgctacgaactcgct

SEQ ID NO: 148522 - DNA, 25 bp, Artificial
  probe
  misc_feature (1)..(25): SEQ ID NO: 972; WAN024D96_at; Start 191; Stop 215
gctccgaaggtggagaaatcgacct

SEQ ID NO: 148523 - DNA, 25 bp, Artificial
  probe
  misc_feature (1)..(25): SEQ ID NO: 972; WAN024D96_at; Start 26; Stop 50
caagaagtttagaggaggctcaggc

SEQ ID NO: 148524 - DNA, 25 bp, Artificial
  probe
  misc_feature (1)..(25): SEQ ID NO: 972; WAN024D96_at; Start 234; Stop 258
ccatctaatcaaggaagttgcgcaa

SEQ ID NO: 148525 - DNA, 25 bp, Artificial
  probe
  misc_feature (1)..(25): SEQ ID NO: 972; WAN024D96_at; Start 180; Stop 204
gctacgaactcgctccgaaggtgga

SEQ ID NO: 148526 - DNA, 25 bp, Artificial
  probe
  misc_feature (1)..(25): SEQ ID NO: 972; WAN024D96_at; Start 485; Stop 509
gaggctttaaaaccctcaatcctga

SEQ ID NO: 148527 - DNA, 25 bp, Artificial
  probe
  misc_feature (1)..(25): SEQ ID NO: 972; WAN024D96_at; Start 361; Stop 385
caagaaacacctgagaacatgatgg

SEQ ID NO: 148528 - DNA, 25 bp, Artificial
  probe
  misc_feature (1)..(25): SEQ ID NO: 972; WAN024D96_at; Start 118; Stop 142
gcgattttgcaggtagctccagcca

SEQ ID NO: 148529 - DNA, 25 bp, Artificial
  probe
  misc_feature (1)..(25): SEQ ID NO: 972; WAN024D96_at; Start 651; Stop 675
aatcagggagattttggatgaagct

SEQ ID NO: 148530 - DNA, 25 bp, Artificial
  probe
  misc_feature (1)..(25): SEQ ID NO: 972; WAN024D96_at; Start 596; Stop 620
ccagtctggatgaggttagtgcccc

SEQ ID NO: 148531 - DNA, 25 bp, Artificial
  probe
  misc_feature (1)..(25): SEQ ID NO: 972; WAN024D96_at; Start 8; Stop 32
taatcgtttcagtaatgccaagaag

SEQ ID NO: 148532 - DNA, 25 bp, Artificial
  probe
  misc_feature (1)..(25): SEQ ID NO: 972; WAN024D96_at; Start 524; Stop 548
ccatttctatgggtaaggtgggcaa

SEQ ID NO: 148533 - DNA, 25 bp, Artificial
  probe
  misc_feature (1)..(25): SEQ ID NO: 972; WAN024D96_at; Start 375; Stop 399
gaacatgatggaaatcttgtcagag

SEQ ID NO: 148534 - DNA, 25 bp, Artificial
  probe
  misc_feature (1)..(25): SEQ ID NO: 972; WAN024D96_at; Start 581; Stop 605
cgagttggtcttttgccagtctgga

SEQ ID NO: 148535 - DNA, 25 bp, Artificial
  probe
  misc_feature (1)..(25): SEQ ID NO: 1118; WAN024D97_at; Start 18; Stop 42
tacacgtttagctgcagttgttgcc

SEQ ID NO: 148536 - DNA, 25 bp, Artificial
  probe
  misc_feature (1)..(25): SEQ ID NO: 1118; WAN024D97_at; Start 20; Stop 44
cacgtttagctgcagttgttgccaa

SEQ ID NO: 148537 - DNA, 25 bp, Artificial
  probe
  misc_feature (1)..(25): SEQ ID NO: 1118; WAN024D97_at; Start 485; Stop 509
gaccttacctagacaagttacagga

SEQ ID NO: 148538 - DNA, 25 bp, Artificial
  probe
  misc_feature (1)..(25): SEQ ID NO: 1118; WAN024D97_at; Start 787; Stop 811
caactgtggacaggcaaggaaatgc

SEQ ID NO: 148539 - DNA, 25 bp, Artificial
  probe
  misc_feature (1)..(25): SEQ ID NO: 1118; WAN024D97_at; Start 81; Stop 105
tagagcctttgaggcgacagctacc

SEQ ID NO: 148540 - DNA, 25 bp, Artificial
  probe
  misc_feature (1)..(25): SEQ ID NO: 1118; WAN024D97_at; Start 10; Stop 34
gatggctatacacgtttagctgcag

SEQ ID NO: 148541 - DNA, 25 bp, Artificial
  probe
  misc_feature (1)..(25): SEQ ID NO: 1118; WAN024D97_at; Start 285; Stop 309
caatgagaatggcaatttaattgga

SEQ ID NO: 148542 - DNA, 25 bp, Artificial
  probe
  misc_feature (1)..(25): SEQ ID NO: 1118; WAN024D97_at; Start 300; Stop 324
tttaattggatataatacagatggc

SEQ ID NO: 148543 - DNA, 25 bp, Artificial
  probe
  misc_feature (1)..(25): SEQ ID NO: 1118; WAN024D97_at; Start 550; Stop 574
gtttctgaactgcaagcaaggattg

SEQ ID NO: 148544 - DNA, 25 bp, Artificial
  probe
  misc_feature (1)..(25): SEQ ID NO: 1118; WAN024D97_at; Start 85; Stop 109
gcctttgaggcgacagctaccaacg

SEQ ID NO: 148545 - DNA, 25 bp, Artificial
  probe
  misc_feature (1)..(25): SEQ ID NO: 1118; WAN024D97_at; Start 32; Stop 56
cagttgttgccaatcctattaagca

SEQ ID NO: 148546 - DNA, 25 bp, Artificial
  probe
  misc_feature (1)..(25): SEQ ID NO: 1118; WAN024D97_at; Start 23; Stop 47
gtttagctgcagttgttgccaatcc

SEQ ID NO: 148547 - DNA, 25 bp, Artificial
  probe
  misc_feature (1)..(25): SEQ ID NO: 1118; WAN024D97_at; Start 37; Stop 61
gttgccaatcctattaagcattcta

SEQ ID NO: 148548 - DNA, 25 bp, Artificial
  probe
  misc_feature (1)..(25): SEQ ID NO: 1118; WAN024D97_at; Start 3; Stop 27
gaagcttgatggctatacacgttta

SEQ ID NO: 148549 - DNA, 25 bp, Artificial
  probe
  misc_feature (1)..(25): SEQ ID NO: 1118; WAN024D97_at; Start 775; Stop 799
gcagaagcttttcaactgtggacag

SEQ ID NO: 148550 - DNA, 25 bp, Artificial
  probe
  misc_feature (1)..(25): SEQ ID NO: 1118; WAN024D97_at; Start 763; Stop 787
ctctatcaagctgcagaagcttttc

SEQ ID NO: 148551 - DNA, 25 bp, Artificial
  probe
  misc_feature (1)..(25): SEQ ID NO: 1118; WAN024D97_at; Start 60; Stop 84
tatttctcccttcatccacaataga

SEQ ID NO: 148552 - DNA, 25 bp, Artificial
  probe
  misc_feature (1)..(25): SEQ ID NO: 1118; WAN024D97_at; Start 815; Stop 839
cagaagagatttggcagtctttaac

SEQ ID NO: 148553 - DNA, 25 bp, Artificial
  probe
  misc_feature (1)..(25): SEQ ID NO: 1118; WAN024D97_at; Start 482; Stop 506
caagaccttacctagacaagttaca

SEQ ID NO: 148554 - DNA, 25 bp, Artificial
  probe
  misc_feature (1)..(25): SEQ ID NO: 1118; WAN024D97_at; Start 45; Stop 69
tcctattaagcattctatttctccc

SEQ ID NO: 148555 - DNA, 25 bp, Artificial
  probe
  misc_feature (1)..(25): SEQ ID NO: 1118; WAN024D97_at; Start 778; Stop 802
gaagcttttcaactgtggacaggca

SEQ ID NO: 148556 - DNA, 25 bp, Artificial
  probe
  misc_feature (1)..(25): SEQ ID NO: 1118; WAN024D97_at; Start 820; Stop 844
gagatttggcagtctttaacagaaa

SEQ ID NO: 148557 - DNA, 25 bp, Artificial
  probe
  misc_feature (1)..(25): SEQ ID NO: 1118; WAN024D97_at; Start 828; Stop 852
gcagtctttaacagaaaaataccaa

SEQ ID NO: 148558 - DNA, 25 bp, Artificial
  probe
  misc_feature (1)..(25): SEQ ID NO: 1118; WAN024D97_at; Start 772; Stop 796
gctgcagaagcttttcaactgtgga

SEQ ID NO: 148559 - DNA, 25 bp, Artificial
  probe
  misc_feature (1)..(25): SEQ ID NO: 1118; WAN024D97_at; Start 781; Stop 805
gcttttcaactgtggacaggcaagg

SEQ ID NO: 148560 - DNA, 25 bp, Artificial
  probe
  misc_feature (1)..(25): SEQ ID NO: 1118; WAN024D97_at; Start 595; Stop 619
aatgccaccagtgtgggcatggatg

SEQ ID NO: 148561 - DNA, 25 bp, Artificial
  probe
  misc_feature (1)..(25): SEQ ID NO: 1118; WAN024D97_at; Start 306; Stop 330
tggatataatacagatggcaaggga
